(19) United States
(12) Patent Application Publication
(10) Pub. No.: US 2025/0304994 A1
(43) Pub. Date: Oct. 2, 2025

(54) Circular RNA Compositions and Methods

(71) Applicant: Orna Therapeutics, Inc., Watertown, MA (US)

(72) Inventors: Robert Alexander Wesselhoeft, Somerville, MA (US); Kristen Ott, Watertown, MA (US); Huan Shu, Watertown, MA (US); Varun Shivashankar, Watertown, MA (US)

(73) Assignee: Orna Therapeutics, Inc., Watertown, MA (US)

(21) Appl. No.: 19/234,626

(22) Filed: Jun. 11, 2025

Related U.S. Application Data
(63) Continuation of application No. PCT/US23/84046, filed on Dec. 14, 2023.
(60) Provisional application No. 63/387,600, filed on Dec. 15, 2022.
(60) Provisional application No. 63/387,559, filed on Dec. 15, 2022.

(51) Int. Cl. C12N 15/85; A61K 40/11; A61K 40/31; A61K 40/42; C12N 5/0783; C12N 13/00

(52) U.S. Cl. CPC C12N 15/85; A61K 40/11; A61K 40/31; A61K 40/4202; A61K 40/4211; C12N 5/0636; C12N 13/00; C12N 2510/00; C12N 2840/203

(57) ABSTRACT

Circular RNA, along with related compositions and methods are described herein. In some embodiments, the inventive circular RNA comprises intron segments, spacers, an IRES, duplex forming regions, and an expression sequence. In some embodiments, circular RNA of the invention has improved expression, functional stability, immunogenicity, ease of manufacturing, and/or half-life when compared to linear RNA. In some embodiments, the disclosed methods and constructs result in improved translation when compared to existing RNA approaches. In some embodiments, the disclosed methods and constructs result in improved circularization efficiency, splicing efficiency, and/or purity when compared to existing RNA circularization approaches.

### CROSS-REFERENCE TO RELATED APPLICATIONS

[0001] This application is a continuation of PCT/US2023/084046, filed Dec. 14, 2023, which claims the benefit of priority of U.S. Provisional Application No. 63/387,600, filed Dec. 15, 2022, and U.S. Provisional Application No. 63/387,559, filed Dec. 15, 2022, each of which is incorporated by reference herein in its entirety for any purpose.

### SEQUENCE LISTING

[0002] This application is filed with a Sequence Listing in electronic format. The Sequence Listing is provided as a file entitled “01318-0009-00PCT_SL.xml” created on Dec. 14, 2023, which is 30,429,268 bytes in size. The information in the electronic format of the sequence listing is incorporated herein by reference in its entirety.

### BACKGROUND OF THE INVENTION

[0003] Conventional gene therapy involves the use of DNA for insertion of desired genetic information into host cells. The DNA introduced into the cell is usually integrated to a certain extent into the genome of one or more transfected cells, allowing for long-lasting action of the introduced genetic material in the host. While there may be substantial benefits to such sustained action, integration of exogenous DNA into a host genome may also have many deleterious effects. For example, it is possible that the introduced DNA will be inserted into an intact gene, resulting in a mutation which impedes or even totally eliminates the function of the endogenous gene. Thus, gene therapy with DNA may result in the impairment of a vital genetic function in the treated host, such as e.g., elimination or deleteriously reduced production of an essential enzyme or interruption of a gene critical for the regulation of cell growth, resulting in unregulated or cancerous cell proliferation. In addition, with conventional DNA based gene therapy it is necessary for effective expression of the desired gene product to include a strong promoter sequence, which again may lead to undesirable changes in the regulation of normal gene expression in the cell. It is also possible that the DNA based genetic material will result in the induction of undesired anti-DNA antibodies, which in turn, may trigger a possibly fatal immune response. Gene therapy approaches using viral vectors can also result in an adverse immune response. In some circumstances, the viral vector may even integrate into the host genome. In addition, production of clinical grade viral vectors is also expensive and time consuming. Targeting delivery of the introduced genetic material using viral vectors can also be difficult to control. Thus, while DNA based gene therapy has been evaluated for delivery of secreted proteins using viral vectors, these approaches may be limited for these various reasons.

[0004] In contrast to DNA, the use of RNA as a gene therapy agent is substantially safer because RNA does not involve the risk of being stably integrated into the genome of the transfected cell, thus eliminating the concern that the introduced genetic material will disrupt the normal functioning of an essential gene, or cause a mutation that results in deleterious or oncogenic effects, and extraneous promoter sequences are not required for effective translation of the encoded protein, again avoiding possible deleterious side effects. In addition, it is not necessary for mRNA to enter the nucleus to perform its function, while DNA must overcome this major barrier.

[0005] Circular RNA is useful in the design and production of stable forms of RNA. The circularization of an RNA molecule provides an advantage to the study of RNA structure and function, especially in the case of molecules that are prone to folding in an inactive conformation. Circular RNA can also be particularly interesting and useful for in vivo applications, especially in the research area of RNA-based control of gene expression and therapeutics, including protein replacement therapy and vaccination.

[0006] The present disclosure provides methods and compositions for the manufacture and optimization of circularized RNAs via engineering of the sequences for the precursor linear RNA and ultimately the circular RNA along with methods of treating a subject in need using the disclosed circular RNA polynucleotides.

### SUMMARY

[0007] Precursor RNA polynucleotides, circular RNA polynucleotides (oRNA™) pharmaceutical compositions comprising oRNAs, and related methods are described herein.

[0008] Disclosed herein, in certain embodiments, is a circular RNA polynucleotide (oRNA) comprising a translation initiation element (TIE), wherein the TIE comprises a sequence having at least 85% sequence identity to a sequence set forth in any one of SEQ ID NOS: 14067-24829 (GIRES-1 through GIRES-10762), or a fragment thereof, optionally barcoded with a barcode sequence selected from SEQ ID NOs: 3304-14066 (e.g., the IRES of SEQ ID NO: 14067 is barcoded with the barcode sequence of SEQ ID NO: 3304, the IRES of SEQ ID NO: 14068 is barcoded with the barcode sequence of SEQ ID NO: 3305, the IRES of SEQ ID NO: 14069 is barcoded with the barcode sequence of SEQ ID NO: 3306, and sequentially thereon). In some embodiments, the TIE comprises a consensus sequence as set forth in the Table of Exemplary Consensus Sequences herein (SEQ ID NOs: 24867-24892, Table A), wherein N is any nucleotide (e.g., pursuant to IUPAC). In some embodiments, the TIE comprises at least 100 nucleotides, at least 200 nucleotides, at least 300 nucleotides, at least 400 nucleotides, at least 500 nucleotides, at least 600 nucleotides, or at least 700 nucleotides (e.g., contiguous nucleotides) of said consensus sequence.

[0009] Disclosed herein, in certain embodiments, is a circular RNA polynucleotide (oRNA), comprising a core functional element, and a pharmaceutically acceptable salt, buffer, diluent, or combination thereof; wherein the core functional element comprises a translation initiation element (TIE), wherein the TIE comprises a sequence having at least 85% sequence identity to a sequence set forth in any one of SEQ ID NOS: 14067-24829, or a fragment thereof.

[0010] Disclosed herein, in certain embodiments, is a circular RNA polynucleotide (oRNA), comprising a core functional element, and a pharmaceutically acceptable salt, buffer, diluent, or combination thereof; wherein the core functional element comprises a translation initiation element (TIE), wherein the TIE comprises a sequence having at least 85% sequence identity to a sequence set forth in any one of SEQ ID NOs: 793, 876, 1017, 1216, and 3291, wherein the oRNA is capable of expressing a therapeutic protein in a T cell.

[0011] Disclosed herein, in certain embodiments, is a circular RNA polynucleotide (oRNA), comprising a core functional element, and a pharmaceutically acceptable salt, buffer, diluent, or combination thereof; wherein the core functional element comprises a translation initiation element (TIE), wherein the TIE comprises at least 85% sequence identity to a sequence set forth in any one of SEQ ID NOs: 785, 823, 840, 857, 861, 862, 864, 983, 1023, 1168, 1169, 1171, 1179, 1192, 1284, 1287, 2285, 2742, 2777, 2778, 3283, 3290, 3293, and 3302, wherein the oRNA is capable of expressing a therapeutic protein in a T cell.

[0012] Disclosed herein, in certain embodiments, is a circular RNA polynucleotide (oRNA), comprising a core functional element, and a pharmaceutically acceptable salt, buffer, diluent, or combination thereof; wherein the core functional element comprises a translation initiation element (TIE), wherein the TIE comprises at least 85% sequence identity to a sequence set forth in any one of SEQ ID NOs: 75, 77, 137, 532, 566, 580, 648, 693, 752, 787, 791, 820, 839, 843, 852, 863, 871, 874, 922, 959, 984, 1015, 1026, 1041, 1047, 1059, 1068, 1134, 1177, 1178, 1180, 1189, 1193, 1198, 1263, 1276, 1280, 1282, 2601, 2615, 2616, 2617, 2618, 2627, 2667, 2681, 2746, 2758, 3284, 3285, 3289, 3292, 3294, 3295, 3296, 3297, 3298, 3299, and 3301, wherein the oRNA is capable of expressing a therapeutic protein in a T cell.

[0013] Also disclosed herein, in certain embodiments, is a precursor RNA polynucleotide capable of producing the circular RNA provided herein.

[0014] In certain embodiments, the TIE comprises an internal ribosome entry site (IRES). In certain embodiments, the IRES is in whole or in part from an untranslated region (UTR). In certain embodiments, the IRES has at least 90% identity to a sequence set forth in any one of SEQ ID NOS: 14067-24829 (GIRES-1 through GIRES-10762). In certain embodiments, the IRES has at least 95% identity to a sequence set forth in any one of SEQ ID NOS: 14067-24829. In certain embodiments, the IRES has at least 98% identity to a sequence set forth in any one of SEQ ID NOS: 14067-24829. In certain embodiments, the IRES has at least 99% identity to a sequence set forth in any one of SEQ ID NOS: 14067-24829. In certain embodiments, the IRES comprises a sequence set forth in any one of SEQ ID NOS: 14067-24829.

[0015] In certain embodiments, the TIE comprises an internal ribosome entry site (IRES). In certain embodiments, the IRES is in whole or in part from an untranslated region (UTR). In certain embodiments, the IRES sequence has at least 90% sequence identity to a sequence set forth in any one of SEQ ID NO: 793, 876, 1017, 1216, and 3291. In certain embodiments, the IRES sequence has at least 95% sequence identity to a sequence set forth in any one of SEQ ID NO: 793, 876, 1017, 1216, and 3291. In certain embodiments, the IRES sequence has at least 98% sequence identity to a sequence set forth in any one of SEQ ID NO: 793, 876, 1017, 1216, and 3291. In certain embodiments, the IRES sequence has at least 99% sequence identity to a sequence set forth in any one of SEQ ID NO: 793, 876, 1017, 1216, and 3291. In certain embodiments, the IRES sequence comprises a sequence set forth in any one of SEQ ID NO: 793, 876, 1017, 1216, and 3291. In certain embodiments, the IRES sequence has at least 90% sequence identity to a sequence set forth in any one of SEQ ID NO: 785, 823, 840, 857, 861, 862, 864, 983, 1023, 1168, 1169, 1171, 1179, 1192, 1284, 1287, 2285, 2742, 2777, 2778, 3283, 3290, 3293, and 3302. In certain embodiments, the IRES sequence has at least 95% sequence identity to a sequence set forth in any one of SEQ ID NO: 785, 823, 840, 857, 861, 862, 864, 983, 1023, 1168, 1169, 1171, 1179, 1192, 1284, 1287, 2285, 2742, 2777, 2778, 3283, 3290, 3293, and 3302. In certain embodiments, the IRES sequence has at least 98% sequence identity to a sequence set forth in any one of SEQ ID NO: 785, 823, 840, 857, 861, 862, 864, 983, 1023, 1168, 1169, 1171, 1179, 1192, 1284, 1287, 2285, 2742, 2777, 2778, 3283, 3290, 3293, and 3302. In certain embodiments, the IRES sequence has at least 99% sequence identity to a sequence set forth in any one of SEQ ID NO: 785, 823, 840, 857, 861, 862, 864, 983, 1023, 1168, 1169, 1171, 1179, 1192, 1284, 1287, 2285, 2742, 2777, 2778, 3283, 3290, 3293, and 3302. In certain embodiments, the IRES sequence comprises a sequence set forth in any one of SEQ ID NO: 785, 823, 840, 857, 861, 862, 864, 983, 1023, 1168, 1169, 1171, 1179, 1192, 1284, 1287, 2285, 2742, 2777, 2778, 3283, 3290, 3293, and 3302. In certain embodiments, the IRES sequence has at least 90% sequence identity to a sequence set forth in any one of SEQ ID NO: 75, 77, 137, 532, 566, 580, 648, 693, 752, 787, 791, 820, 839, 843, 852, 863, 871, 874, 922, 959, 984, 1015, 1026, 1041, 1047, 1059, 1068, 1134, 1177, 1178, 1180, 1189, 1193, 1198, 1263, 1276, 1280, 1282, 2601, 2615, 2616, 2617, 2618, 2627, 2667, 2681, 2746, 2758, 3284, 3285, 3289, 3292, 3294, 3295, 3296, 3297, 3298, 3299, and 3301. In certain embodiments, the IRES sequence has at least 95% sequence identity to a sequence set forth in any one of SEQ ID NO: 75, 77, 137, 532, 566, 580, 648, 693, 752, 787, 791, 820, 839, 843, 852, 863, 871, 874, 922, 959, 984, 1015, 1026, 1041, 1047, 1059, 1068, 1134, 1177, 1178, 1180, 1189, 1193, 1198, 1263, 1276, 1280, 1282, 2601, 2615, 2616, 2617, 2618, 2627, 2667, 2681, 2746, 2758, 3284, 3285, 3289, 3292, 3294, 3295, 3296, 3297, 3298, 3299, and 3301. In certain embodiments, the IRES sequence has at least 98% sequence identity to a sequence set forth in any one of SEQ ID NO: 75, 77, 137, 532, 566, 580, 648, 693, 752, 787, 791, 820, 839, 843, 852, 863, 871, 874, 922, 959, 984, 1015, 1026, 1041, 1047, 1059, 1068, 1134, 1177, 1178, 1180, 1189, 1193, 1198, 1263, 1276, 1280, 1282, 2601, 2615, 2616, 2617, 2618, 2627, 2667, 2681, 2746, 2758, 3284, 3285, 3289, 3292, 3294, 3295, 3296, 3297, 3298, 3299, and 3301. In certain embodiments, the IRES sequence has at least 99% sequence identity to a sequence set forth in any one of SEQ ID NO: 75, 77, 137, 532, 566, 580, 648, 693, 752, 787, 791, 820, 839, 843, 852, 863, 871, 874, 922, 959, 984, 1015, 1026, 1041, 1047, 1059, 1068, 1134, 1177, 1178, 1180, 1189, 1193, 1198, 1263, 1276, 1280, 1282, 2601, 2615, 2616, 2617, 2618, 2627, 2667, 2681, 2746, 2758, 3284, 3285, 3289, 3292, 3294, 3295, 3296, 3297, 3298, 3299, and 3301. In certain embodiments, the IRES sequence comprises a sequence set forth in any one of SEQ ID NO: 75, 77, 137, 532, 566, 580, 648, 693, 752, 787, 791, 820, 839, 843, 852, 863, 871, 874, 922, 959, 984, 1015, 1026, 1041, 1047, 1059, 1068, 1134, 1177, 1178, 1180, 1189, 1193, 1198, 1263, 1276, 1280, 1282, 2601, 2615, 2616, 2617, 2618, 2627, 2667, 2681, 2746, 2758, 3284, 3285, 3289, 3292, 3294, 3295, 3296, 3297, 3298, 3299, and 3301.

[0016] In certain embodiments, the precursor RNA polynucleotide further comprises an accessory element. In certain embodiments, the accessory element comprises a miRNA binding site or a fragment thereof, a restriction site or a fragment thereof, an RNA editing motif or a fragment thereof, a zip code element or a fragment thereof, an RNA trafficking element or a fragment thereof, an endonuclease site or a fragment thereof, or a combination thereof. In certain embodiments, the accessory element comprises a binding domain to an IRES transacting factor (ITAF) and/or a translation initiation factor. In certain embodiments, the binding domain comprises a polyA region, a polyC region, a polyAC region, a polypyrimidine tract, or a combination or variant thereof. In certain embodiments, the ITAF comprises a poly(rC)-binding protein 1 (PCBP1), PCBP2, PCBP3, PCBP4, poly(A)-binding protein 1 (PABP1), polypyrimidine-tract binding protein (PTB), Argonaute protein family member, HNRNPK (heterogeneous nuclear ribonucleoprotein K protein), or La protein, or a fragment or combination thereof. In certain embodiments, the core functional element further comprises a coding sequence and, optionally, a termination sequence located downstream to the coding sequence. In certain embodiments, the coding sequence is located downstream to the IRES. In certain embodiments, the coding sequence is located upstream to the IRES. In certain embodiments, the termination sequence is a stop codon or a stop cassette. In certain embodiments, the stop cassette comprises one or more stop codons in two or more open reading frames.

[0017] In certain embodiments, the precursor RNA polynucleotide comprises: (a) a 5′ enhanced intron element, (b) a 5′ enhanced exon element, (c) the core functional element, (d) a 3′ enhanced exon element, and (e) a 3′ enhanced intron element. In certain embodiments, elements (a)-(e) are arranged in order from (a) to (e). In certain embodiments, the 5′ enhanced exon element and/or the 3′ enhanced exon element are each comprised within the core functional element. In certain embodiments, the 5′ enhanced exon element and/or the 3′ enhanced exon element are each comprised within the coding sequence.

[0018] In certain embodiments, the 5′ enhanced intron element comprises a 3′ intron segment. In certain embodiments, the 3′ intron segment further comprises a first or a first and a second nucleotides of a 3′ group I intron splice site dinucleotide. In certain embodiments, the 3′ intron segment is located at the 3′ end of the 5′ enhanced intron element. In certain embodiments, the 5′ enhanced intron element comprises a leading untranslated sequence located at the 5′ end. In certain embodiments, the leading untranslated sequence comprises a spacer. In certain embodiments, the leading untranslated sequence comprises the last nucleotide of a transcription start site. In certain embodiments, the leading untranslated sequence comprises 1 to 100 additional nucleotides. In certain embodiments, the 5′ enhanced intron element comprises a 5′ affinity sequence. In certain embodiments, the 5′ affinity sequence comprises a polyA, polyAC, or polypyrimidine sequence. In certain embodiments, the 5′ affinity sequence comprises 10 to 100 nucleotides. In certain embodiments, the 5′ enhanced intron element comprises a 5′ external spacer sequence. In certain embodiments, the 5′ external spacer sequence is located between the 5′ affinity sequence and the 3′ intron segment. In certain embodiments, the 5′ external spacer sequence has a length of about 6 to 60 nucleotides. In certain embodiments, the 5′ external spacer sequence comprises or consists of a sequence selected from SEQ ID NOs: 3094-3152.

[0019] In certain embodiments, the 5′ enhanced intron element comprises: (a) a leading untranslated sequence; (b) a 5′ affinity sequence; (c) a 5′ external spacer sequence; and (d) a 3′ intron segment including the first nucleotide of a 3′ Group I intron splice site; wherein the leading untranslated sequence comprises the last nucleotide of a transcription start site and 1 to 100 nucleotides. In certain embodiments, (a)-(d) are arranged in the order from (a) to (d). In certain embodiments, the 5′ enhanced intron element comprises: (a) a leading untranslated sequence; (b) a 5′ external spacer sequence; (c) a 5′ affinity sequence; and (d) a 3′ intron segment including the first nucleotide of a 3′ group I splice site; wherein the leading untranslated sequence comprises the last nucleotide of a transcription start site and 1 to 100 nucleotide. In certain embodiments, (a)-(d) are arranged in the order from (a) to (d). In certain embodiments, the 5′ enhanced intron element comprises: (a) a leading untranslated sequence; (b) a 5′ external spacer sequence; (c) a 5′ affinity sequence; and a 3′ intron segment including the first and second nucleotides of a 3′ Group I splice site; wherein the leading untranslated sequence comprises the last nucleotide of a transcription start site and 1 to 100 nucleotide; and wherein the 5′ enhanced exon element comprises a 3′ exon segment lacking the second nucleotide of a 3′ group I splice site dinucleotide. In certain embodiments, (a)-(d) are arranged in the order from (a) to (d).

[0020] In certain embodiments, the 5′ enhanced exon element comprises a 3′ exon segment. In certain embodiments, the 3′ exon segment further comprises the second nucleotide of a 3′ group I intron splice site dinucleotide. In certain embodiments, the 3′ exon segment comprises 1 to 100 natural nucleotides derived from a natural exon. In certain embodiments, the natural exon is derived from a Group I intron containing gene or a fragment thereof. In certain embodiments, the natural exon derived from an anabaena bacterium, T4 phage virus, twort bacteriophage, tetrahymena, or azoarcus bacterium. In certain embodiments, the 5′ enhanced exon element comprises a 5′ internal spacer sequence located downstream from the 3′ exon segment. In certain embodiments, the 5′ internal spacer sequence is about 6 to 60 nucleotides in length. In certain embodiments, the 5′ internal spacer sequence comprises or consists of a sequence selected from SEQ ID NOs: 3094-3152.

[0021] In certain embodiments, the 5′ enhanced exon element comprises in the following order: (a) a 3′ exon segment including the second nucleotide of a 3′ group I intron splice site dinucleotide; and (b) a 5′ internal spacer sequence, wherein the 3′ exon segment comprises 1 to 100 natural nucleotides derived from a natural exon. In certain embodiments, the 5′ enhanced exon element comprises in the following order: (a) a 3′ exon segment; and (b) a 5′ internal spacer sequence, wherein the 3′ exon segment comprises 1 to 100 natural nucleotides derived from a natural exon; and wherein the 5′ enhanced intron element comprises a 3′ intron segment comprising the first and second nucleotides of a 3′ group I splice site dinucleotide.

[0022] In certain embodiments, the 3′ enhanced exon element comprises a 5′ exon segment. In certain embodiments, the 5′ exon segment comprises the first nucleotide of a 5′ group I intron segment. In certain embodiments, the 5′ exon segment further comprises 1 to 100 nucleotides derived from a natural exon. In certain embodiments, the natural exon is derived from a Group I intron containing gene or a fragment thereof. In certain embodiments, the 3′ enhanced exon element comprises a 3′ internal spacer sequence. In certain embodiments, the 3′ internal spacer sequence is located between the termination sequence and the 5′ exon segment. In certain embodiments, the 3′ internal spacer is about 6 to 60 nucleotides in length. In certain embodiments, the 3′ internal spacer comprises or consists of a sequence selected from SEQ ID NOs: 3094-3152. In certain embodiments, the 3′ enhanced exon element comprises: (a) a 3′ internal spacer sequence; and (b) a 5′ exon segment including the first nucleotide of a 5′ group I intron splice site dinucleotide, wherein the 5′ exon segment comprises 1 to 100 nucleotides derived from a natural exon. In certain embodiments, the 3′ enhanced exon element comprises: (a) a 3′ internal spacer sequence; and (b) a 5′ exon segment, wherein the 5′ exon segment comprises 1 to 100 nucleotides derived from a natural exon; wherein the 3′ enhanced intron element comprises a 5′ intron segment comprising the first and second nucleotide of a 5′ group I intron splice site dinucleotide.

[0023] In certain embodiments, the 3′ enhanced intron element comprises a 5′ intron segment. In certain embodiments, the 5′ intron segment comprises a second nucleotide of a 5′ group I intron splice site dinucleotide. In certain embodiments, the 3′ enhanced intron element comprises a trailing untranslated sequence located at the 3′ end of the 5′ intron. In certain embodiments, the trailing untranslated sequence comprises 3 to 12 nucleotides. In certain embodiments, the 3′ enhanced intron segment comprises a 3′ external spacer sequence. In certain embodiments, the 3′ external spacer sequence is located between the 5′ intron segment and trailing untranslated sequence. In certain embodiments, the 3′ external spacer sequence has a length of 6 to 60 nucleotides in length. In certain embodiments, the 3′ external spacer sequence comprises or consists of a sequence selected SEQ ID NOs: 3094-3152. In certain embodiments, the 3′ enhanced intron element comprises a 3′ affinity sequence. In certain embodiments, the 3′ affinity sequence is located between the 3′ external spacer sequence and the trailing untranslated sequence. In certain embodiments, the 3′ affinity sequence comprises a polyA, polyAC, or polypyrimidine sequence. In certain embodiments, the affinity sequence comprises 10 to 100 nucleotides.

[0024] In certain embodiments, the 5′ enhanced intron element further comprises a 5′ external duplex sequence; wherein the 3′ enhanced intron element further comprises a 3′ external duplex sequence. In certain embodiments, the 5′ external duplex sequence and 3′ external duplex sequence are fully or partially complementary to each other. In certain embodiments, the 5′ external duplex sequence comprises fully synthetic or partially synthetic nucleotides. In certain embodiments, the 3′ external duplex sequence comprises fully synthetic or partially synthetic nucleotides. In certain embodiments, the 3′ external duplex sequence is about 6 to about 50 nucleotides. In certain embodiments, the 5′ external duplex sequence is about 6 to about 50 nucleotides. In certain embodiments, the 5′ enhanced exon element further comprises a 5′ internal duplex sequence; wherein the 3′ enhanced exon element further comprises a 3′ internal duplex sequence. In certain embodiments, the 5′ internal duplex sequence and 3′ internal duplex sequence are fully complementary to each other. In certain embodiments, the 5′ internal duplex sequence and 3′ internal duplex sequence are partially complementary to each other. In certain embodiments, the 5′ internal duplex sequence and 3′ internal duplex sequences form a double-stranded duplex structure comprising at least one mismatched nucleotide pair. In certain embodiments, the double-stranded duplex structure comprises at least two mismatched nucleotide pairs. In certain embodiments, the double-stranded duplex structure comprises at least three mismatched nucleotide pairs. In certain embodiments, the double-stranded duplex structure comprises at least four mismatched nucleotide pairs. In certain embodiments, the double-stranded duplex structure comprises at least five mismatched nucleotide pairs. In certain embodiments, the 5′ internal duplex sequence comprises fully synthetic nucleotides. In certain embodiments, the 5′ internal duplex sequence comprises partially synthetic nucleotides. In certain embodiments, the 3′ internal duplex sequence comprises fully synthetic nucleotides. In certain embodiments, the 3′ internal duplex sequence comprises partially synthetic nucleotides. In certain embodiments, the 3′ internal duplex sequence is about 6 to about 19 nucleotides. In certain embodiments, the 5′ internal duplex sequence is about 6 to about 19 nucleotides. In certain embodiments, the 3′ enhanced intron segment comprises in the following order: (a) a 5′ intron segment including the second nucleotide of a 5′ group I intron splice site dinucleotide; (b) a 3′ external spacer sequence; and (c) a 3′ affinity sequence. In certain embodiments, the 3′ enhanced exon segment comprises in the following order: (a) a 5′ intron segment including the first and second nucleotide of a 5′ group I intron splice site dinucleotide; (b) a 3′ external spacer sequence; and (c) a 3′ affinity sequence; wherein the 3′ enhanced exon element comprises a 5′ exon segment lacking the first nucleotide of a 5′ group I intron splice site dinucleotide.

[0025] In certain embodiments, the precursor RNA polynucleotide comprises: (a) a leading untranslated sequence; (b) a 5′ affinity sequence; (c) 5′ external duplex sequence; (d) 5′ spacer sequence; (e) 3′ intron segment; (f) 3′ exon segment; (g) 5′ internal duplex sequence; (h) 5′ internal spacer sequence; (i) a translation initiation element; (j) a coding sequence; (k) a termination sequence; (1) a 3′ internal spacer sequence; (m) a 3′ internal duplex sequence; (n) a 5′ exon segment; (o) a 5′ intron segment; (p) a 3′ external duplex sequence; (q) a 3′ affinity sequence; and (r) a trailing untranslated sequence. In certain embodiments, (a)-(r) are arranged in the order from (a) to (r). In certain embodiments, the precursor RNA polynucleotide comprises; (a) a leading untranslated sequence; (b) a 5′ affinity sequence; (c) a 5′ external spacer sequence; (d) a 3′ intron segment; (e) a 3′ exon segment; (f) a 5′ internal duplex sequence; (g) a 5′ internal spacer sequence; (h) a translation initiation element; (i) a coding sequence; (j) a termination sequence; (k) a 3′ internal spacer sequence; (1) a 3′ internal duplex sequence; (m) a 5′ exon segment; (n) a 5′ intron segment; (o) a 3′ external spacer sequence; (p) a 3′ affinity sequence; and (q) a trailing untranslated sequence. In certain embodiments, (a)-(q) are arranged in the order from (a) to (q). In certain embodiments, the precursor RNA polynucleotide comprises: (a) a leading untranslated sequence; (b) a 5′ affinity sequence; (c) a 5′ external spacer sequence; (d) a 3′ intron segment; (e) a 3′ exon segment; (f) a 5′ internal spacer sequence; (g) a translation initiation element; (h) a coding sequence; (i) a termination sequence; (j) a 3′ internal spacer sequence; (k) a 5′ exon segment; (1) a 5′ intron segment; (m) a 3′ external spacer sequence; (n) a 3′ affinity sequence; and (o) a trailing untranslated sequence. In certain embodiments, (a)-(o) are arranged in the order from (a) to (o). In certain embodiments, the precursor RNA polynucleotide comprises: (a) a leading untranslated sequence; (b) a 5′ affinity sequence; (c) 5′ external duplex sequence; (d) 5′ spacer sequence; (e) 3′ intron segment; (f) 3′ exon segment; (g) 5′ internal duplex sequence (h) 5′ internal spacer sequence; (i) a termination sequence; (j) a coding sequence; (k) a translation initiation element; (1) a 3′ internal spacer sequence; (m) a 3′ internal duplex sequence; (n) a 5′ exon segment; (o) a 5′ intron segment; (p) a 3′ external duplex sequence; (q) a 3′ affinity sequence; and (r) a trailing untranslated sequence. In certain embodiments, (a)-(r) are arranged in the order from (a) to (r).

[0026] In certain embodiments, the coding sequence comprises two or more protein coding regions. In certain embodiments, the coding sequence comprises a sequence encoding a proteolytic cleavage site and/or a ribosomal stuttering element between the first and second expression sequence. In certain embodiments, the ribosomal stuttering element is a self-cleaving spacer. In certain embodiments, the precursor RNA polynucleotide further comprises a polynucleotide sequence encoding 2A ribosomal stuttering peptide. In certain embodiments, the precursor RNA polynucleotide comprises the following sequences operably linked to the IRES and/or operable linked to one another: (1) a 3′ group I intron segment; (2) a coding sequence that encodes the therapeutic protein; and (3) a 5′ group I intron segment. In certain embodiments, the 3′ group I intron segment and the 5′ group I intron segment are each derived from a bacterial phage, a viral vector, an organelle genome, or a nuclear rDNA gene. In certain embodiments, the 3′ group I intron segment and the 5′ group I intron segment are each derived from an anabaena bacterium, a T4 phage virus, a twort bacteriophage, a tetrahymena, or an azoarcus bacterium. In certain embodiments, the precursor RNA polynucleotide comprises one or more spacer sequences, said one or more spacer sequences being operably connected to at least one of the 3′ group I intron segment, IRES sequence, coding sequence, and 5′ group I intron segment. In certain embodiments, the precursor RNA polynucleotide comprises two spacer sequences. In certain embodiments, the two spacer sequences comprise a 5′ external spacer sequence and a 3′ external spacer sequence, or a 5′ internal spacer sequence and a 3′ internal spacer sequence. In certain embodiments, the precursor RNA polynucleotide comprises four spacer sequences. In certain embodiments, the four spacer sequences comprise a 5′ external spacer sequence, a 3′ external spacer sequence, a 5′ internal spacer sequence, and a 3′ internal spacer sequence. In certain embodiments, the precursor RNA polynucleotide comprises a 3′ exon segment and a 5′ exon segment, each derived from a natural exon. In certain embodiments, the precursor RNA polynucleotide comprises the following elements operably linked to one another: (a) the 5′ external spacer sequence; (b) the 3′ group I intron segment; (c) the 5′ exon segment; (d) the 5′ internal duplex sequence; (e) the IRES sequence; (f) the coding sequence; (g) the 3′ internal duplex sequence; (h) the 3′ exon segment; (j) the 5′ group I intron segment; and (k) the 3′ external spacer sequence. In certain embodiments, elements (a)-(k) are arranged in the order of (a)-(k). In certain embodiments, the precursor RNA polynucleotide comprises the following elements operably linked to one another: (a) the 3′ group I intron segment; (b) the 5′ exon segment; (c) the 5′ internal duplex sequence; (d) the 5′ internal spacer sequence; (e) the IRES sequence; (f) the coding sequence; (g) the 3′ internal spacer sequence; (h) the 3′ internal duplex sequence; (i) the 3′ exon segment; and (j) the 5′ group I intron segment. In certain embodiments, elements (a)-(j) are arranged in the order of (a)-(j). In certain embodiments, the precursor RNA polynucleotide comprises the following elements operably linked to one another: (a) the 5′ external spacer sequence; (b) the 3′ group I intron segment; (c) the 5′ exon segment; (d) the 5′ internal duplex sequence; (e) the 5′ internal spacer sequence; (f) the IRES sequence; (g) the coding sequence; (h) the 3′ internal spacer sequence; (i) the 3′ internal duplex sequence; (j) the 5′ exon element; (k) the 5′ group I intron segment; and (1) the 3′ external spacer sequence. In certain embodiments, elements (a)-(l) are arranged in the order of (a)-(l). In certain embodiments, the precursor RNA polynucleotide comprises fully synthetic nucleotides. In certain embodiments, the precursor RNA polynucleotide comprises partially synthetic nucleotides. In certain embodiments, the precursor RNA polynucleotide is transcribed from a vector or DNA polynucleotide comprising a PCR product, a linearized plasmid, a non-linearized plasmid, a linearized minicircle, a non-linearized minicircle, a viral vector, a cosmid, a cDNA, or an artificial chromosome.

[0027] Disclosed herein, in certain embodiments, is an oRNA produced using the precursor RNA polynucleotide of any one of the foregoing aspects and embodiments. In certain embodiments, the oRNA comprises the IRES sequence and the coding sequence. In certain embodiments, the IRES sequence is upstream of the coding sequence. In certain embodiments, the IRES sequence is downstream of the coding sequence. In certain embodiments, the oRNA comprises: (a) the 5′ exon segment; (b) the 5′ internal duplex sequence; (c) the 5′ internal spacer sequence; (d) the IRES sequence; (e) the coding sequence; (f) the 3′ internal spacer sequence (g) the 3′ internal duplex sequence; and (h) the 5′ exon element. In certain embodiments, (a)-(h) are arranged in the order from (a) to (h).

[0028] Disclosed herein, in certain embodiments, is a pharmaceutical composition comprising an oRNA comprising a sequence having at least 85% sequence identity to a sequence set forth in any one of SEQ ID NOS: 14067-24829, and a pharmaceutically acceptable salt, buffer, diluent, or combination thereof.

[0029] Disclosed herein, in certain embodiments, is a pharmaceutical composition comprising an oRNA comprising a sequence having at least 85% sequence identity to a sequence set forth in any one of SEQ ID NOS: 14067-24829, and a pharmaceutically acceptable salt, buffer, diluent, or combination thereof, wherein the oRNA is capable of expressing a therapeutic protein in a cell.

[0030] Disclosed herein, in certain embodiments, is a pharmaceutical composition comprising an oRNA comprising a sequence having at least 85% sequence identity to a sequence set forth in any one of SEQ ID NOS: 14067-24829, a cell, and a pharmaceutically acceptable salt, buffer, diluent, or combination thereof, wherein the oRNA is capable of expressing a therapeutic protein in the cell.

[0031] Disclosed herein, in certain embodiments, is a pharmaceutical composition comprising an oRNA comprising a sequence having at least 85% sequence identity to a sequence set forth in any one of SEQ ID NOS: 14067-24829, a transfer vehicle capable of delivering the oRNA to a cell, and a pharmaceutically acceptable salt, buffer, diluent, or combination thereof, wherein the oRNA is capable of expressing a therapeutic protein in a cell.

[0032] Disclosed herein, in certain embodiments, is a pharmaceutical composition comprising an oRNA comprising a sequence having at least 85% sequence identity to a sequence set forth in any one of SEQ ID NO: 793, 876, 1017, 1216, and 3291, and a pharmaceutically acceptable salt, buffer, diluent, or combination thereof, wherein the oRNA is capable of expressing a therapeutic protein in a T cell.

[0033] Disclosed herein, in certain embodiments, is a pharmaceutical composition comprising an oRNA comprising a sequence having at least 85% sequence identity to a sequence set forth in any one of SEQ ID NO: 793, 876, 1017, 1216, and 3291, a T cell, and a pharmaceutically acceptable salt, buffer, diluent, or combination thereof.

[0034] Disclosed herein, in certain embodiments, is a pharmaceutical composition comprising an oRNA comprising a sequence having at least 85% sequence identity to a sequence set forth in any one of SEQ ID NO: 793, 876, 1017, 1216, and 3291, a transfer vehicle capable of delivering the oRNA into a T cell, and a pharmaceutically acceptable salt, buffer, diluent, or combination thereof.

[0035] In certain embodiments, pharmaceutical composition comprising an oRNA comprising a sequence having at least 85% sequence identity to a sequence set forth in any one of SEQ ID NO: 793, 876, 1017, 1216, and 3291, a transfer vehicle capable of delivering the oRNA into a T cell, and a pharmaceutically acceptable salt, buffer, diluent, or combination thereof. In certain embodiments, the sequence has at least 95% sequence identity to a sequence set forth in any one of SEQ ID NOs: 793, 876, 1017, 1216, and 3291. In certain embodiments, the sequence has at least 98% sequence identity to a sequence set forth in any one of SEQ ID NOs: 793, 876, 1017, 1216, and 3291. In certain embodiments, the sequence has at least 98% sequence identity to a sequence set forth in any one of SEQ ID NOs: 793, 876, 1017, 1216, and 3291. In certain embodiments, the sequence comprise a sequence set forth in any one of SEQ ID NOs: 793, 876, 1017, 1216, and 3291.

[0036] Disclosed herein, in certain embodiments, is a pharmaceutical composition comprising an oRNA comprising an sequence having at least 85% sequence identity to a sequence set forth in any one of SEQ ID NOs: 785, 823, 840, 857, 861, 862, 864, 983, 1023, 1168, 1169, 1171, 1179, 1192, 1284, 1287, 2285, 2742, 2777, 2778, 3283, 3290, 3293, and 3302, and a pharmaceutically acceptable salt, buffer, diluent, or combination thereof, wherein the oRNA is capable of expressing a therapeutic protein in an immune cell, e.g., a T cell, a myeloid cell, and/or an NK cell.

[0037] Disclosed herein, in certain embodiments, is a pharmaceutical composition comprising an oRNA comprising a sequence having at least 85% sequence identity to a sequence set forth in any one of SEQ ID NOs: 785, 823, 840, 857, 861, 862, 864, 983, 1023, 1168, 1169, 1171, 1179, 1192, 1284, 1287, 2285, 2742, 2777, 2778, 3283, 3290, 3293, and 3302, a T cell, and a pharmaceutically acceptable salt, buffer, diluent, or combination thereof.

[0038] Disclosed herein, in certain embodiments, is a pharmaceutical composition comprising an oRNA comprising a sequence having at least 85% sequence identity to a sequence set forth in any one of SEQ ID NOs: 785, 823, 840, 857, 861, 862, 864, 983, 1023, 1168, 1169, 1171, 1179, 1192, 1284, 1287, 2285, 2742, 2777, 2778, 3283, 3290, 3293, and 3302, a transfer vehicle capable of delivering the oRNA into a T cell, and a pharmaceutically acceptable salt, buffer, diluent, or combination thereof.

[0039] In certain embodiments, the TIE comprises a sequence that has at least 90% identity to a sequence set forth in any one of SEQ ID NOS: 14067-24829. In certain embodiments, the sequence has at least 95% identity to a sequence set forth in any one of SEQ ID NOS: 14067-24829. In certain embodiments, the sequence has at least 98% identity to a sequence set forth in any one of SEQ ID NOS: 14067-24829. In certain embodiments, the sequence has at least 99% identity to a sequence set forth in any one of SEQ ID NOS: 14067-24829. In certain embodiments, the sequence comprises a sequence set forth in any one of SEQ ID NOS: 14067-24829.

[0040] In certain embodiments, the TIE comprises a sequence that has at least 90% sequence identity to a sequence set forth in any one of SEQ ID NOs: 785, 823, 840, 857, 861, 862, 864, 983, 1023, 1168, 1169, 1171, 1179, 1192, 1284, 1287, 2285, 2742, 2777, 2778, 3283, 3290, 3293, and 3302. In certain embodiments, the sequence has at least 95% sequence identity to a sequence set forth in any one of SEQ ID NOs: 785, 823, 840, 857, 861, 862, 864, 983, 1023, 1168, 1169, 1171, 1179, 1192, 1284, 1287, 2285, 2742, 2777, 2778, 3283, 3290, 3293, and 3302. In certain embodiments, the sequence has at least 98% sequence identity to a sequence set forth in any one of SEQ ID NOs: 785, 823, 840, 857, 861, 862, 864, 983, 1023, 1168, 1169, 1171, 1179, 1192, 1284, 1287, 2285, 2742, 2777, 2778, 3283, 3290, 3293, and 3302. In certain embodiments, the sequence has at least 99% sequence identity to a sequence set forth in any one of SEQ ID NOs: 785, 823, 840, 857, 861, 862, 864, 983, 1023, 1168, 1169, 1171, 1179, 1192, 1284, 1287, 2285, 2742, 2777, 2778, 3283, 3290, 3293, and 3302. In certain embodiments, the sequence comprises a sequence set forth in any one of SEQ ID NOs: 785, 823, 840, 857, 861, 862, 864, 983, 1023, 1168, 1169, 1171, 1179, 1192, 1284, 1287, 2285, 2742, 2777, 2778, 3283, 3290, 3293, and 3302.

[0041] Disclosed herein, in certain embodiments, is a pharmaceutical composition comprising an oRNA comprising a sequence having at least 85% sequence identity to a sequence set forth in any one of SEQ ID NOs: 75, 77, 137, 532, 566, 580, 648, 693, 752, 787, 791, 820, 839, 843, 852, 863, 871, 874, 922, 959, 984, 1015, 1026, 1041, 1047, 1059, 1068, 1134, 1177, 1178, 1180, 1189, 1193, 1198, 1263, 1276, 1280, 1282, 2601, 2615, 2616, 2617, 2618, 2627, 2667, 2681, 2746, 2758, 3284, 3285, 3289, 3292, 3294, 3295, 3296, 3297, 3298, 3299, and 3301, and a pharmaceutically acceptable salt, buffer, diluent, or combination thereof, wherein the oRNA is capable of expressing a therapeutic protein in a T cell.

[0042] Disclosed herein, in certain embodiments, is a pharmaceutical composition comprising an oRNA comprising a sequence having at least 85% sequence identity to a sequence set forth in any one of SEQ ID NOs: 75, 77, 137, 532, 566, 580, 648, 693, 752, 787, 791, 820, 839, 843, 852, 863, 871, 874, 922, 959, 984, 1015, 1026, 1041, 1047, 1059, 1068, 1134, 1177, 1178, 1180, 1189, 1193, 1198, 1263, 1276, 1280, 1282, 2601, 2615, 2616, 2617, 2618, 2627, 2667, 2681, 2746, 2758, 3284, 3285, 3289, 3292, 3294, 3295, 3296, 3297, 3298, 3299, and 3301, a T cell, and a pharmaceutically acceptable salt, buffer, diluent, or combination thereof.

[0043] Disclosed herein, in certain embodiments, is a pharmaceutical composition comprising an oRNA comprising an sequence having at least 85% sequence identity to a sequence set forth in any one of SEQ ID NOs: 75, 77, 137, 532, 566, 580, 648, 693, 752, 787, 791, 820, 839, 843, 852, 863, 871, 874, 922, 959, 984, 1015, 1026, 1041, 1047, 1059, 1068, 1134, 1177, 1178, 1180, 1189, 1193, 1198, 1263, 1276, 1280, 1282, 2601, 2615, 2616, 2617, 2618, 2627, 2667, 2681, 2746, 2758, 3284, 3285, 3289, 3292, 3294, 3295, 3296, 3297, 3298, 3299, and 3301, a transfer vehicle capable of delivering the oRNA into a T cell, and a pharmaceutically acceptable salt, buffer, diluent, or combination thereof.

[0044] In certain embodiments, the TIE comprises a sequence that has at least 90% sequence identity to a sequence set forth in any one of SEQ ID NOs: 75, 77, 137, 532, 566, 580, 648, 693, 752, 787, 791, 820, 839, 843, 852, 863, 871, 874, 922, 959, 984, 1015, 1026, 1041, 1047, 1059, 1068, 1134, 1177, 1178, 1180, 1189, 1193, 1198, 1263, 1276, 1280, 1282, 2601, 2615, 2616, 2617, 2618, 2627, 2667, 2681, 2746, 2758, 3284, 3285, 3289, 3292, 3294, 3295, 3296, 3297, 3298, 3299, and 3301. In certain embodiments, the sequence has at least 95% sequence identity to a sequence set forth in any one of SEQ ID NOs: 75, 77, 137, 532, 566, 580, 648, 693, 752, 787, 791, 820, 839, 843, 852, 863, 871, 874, 922, 959, 984, 1015, 1026, 1041, 1047, 1059, 1068, 1134, 1177, 1178, 1180, 1189, 1193, 1198, 1263, 1276, 1280, 1282, 2601, 2615, 2616, 2617, 2618, 2627, 2667, 2681, 2746, 2758, 3284, 3285, 3289, 3292, 3294, 3295, 3296, 3297, 3298, 3299, and 3301. In certain embodiments, the sequence has at least 98% sequence identity to a sequence set forth in any one of SEQ ID NOs: 75, 77, 137, 532, 566, 580, 648, 693, 752, 787, 791, 820, 839, 843, 852, 863, 871, 874, 922, 959, 984, 1015, 1026, 1041, 1047, 1059, 1068, 1134, 1177, 1178, 1180, 1189, 1193, 1198, 1263, 1276, 1280, 1282, 2601, 2615, 2616, 2617, 2618, 2627, 2667, 2681, 2746, 2758, 3284, 3285, 3289, 3292, 3294, 3295, 3296, 3297, 3298, 3299, and 3301. In certain embodiments, the sequence has at least 99% sequence identity to a sequence set forth in any one of SEQ ID NOs: 75, 77, 137, 532, 566, 580, 648, 693, 752, 787, 791, 820, 839, 843, 852, 863, 871, 874, 922, 959, 984, 1015, 1026, 1041, 1047, 1059, 1068, 1134, 1177, 1178, 1180, 1189, 1193, 1198, 1263, 1276, 1280, 1282, 2601, 2615, 2616, 2617, 2618, 2627, 2667, 2681, 2746, 2758, 3284, 3285, 3289, 3292, 3294, 3295, 3296, 3297, 3298, 3299, and 3301. In certain embodiments, the sequence comprise a sequence set forth in any one of SEQ ID NOs: 75, 77, 137, 532, 566, 580, 648, 693, 752, 787, 791, 820, 839, 843, 852, 863, 871, 874, 922, 959, 984, 1015, 1026, 1041, 1047, 1059, 1068, 1134, 1177, 1178, 1180, 1189, 1193, 1198, 1263, 1276, 1280, 1282, 2601, 2615, 2616, 2617, 2618, 2627, 2667, 2681, 2746, 2758, 3284, 3285, 3289, 3292, 3294, 3295, 3296, 3297, 3298, 3299, and 3301.

[0045] In certain embodiments, the oRNA comprises the following elements, in the following order: (1) the TIE sequence, e.g., comprising an IRES sequence; and (2) a coding sequence encoding a therapeutic protein, wherein elements (1) and (2) are operably linked to one another. In certain embodiments, the TIE sequence, e.g., comprising an IRES sequence is capable of facilitating expression of the therapeutic protein encoded by a precursor RNA polynucleotide in the cell. In certain embodiments, the TIE sequence, e.g., comprising an IRES sequence, is capable of facilitating expression of the therapeutic protein in the cell, such that the expression level of the protein in the cell is comparable to or higher than when a control TIE sequence, e.g., comprising an IRES sequence, is used (e.g., SEQ ID NO: 3303). In certain embodiments, the TIE sequence, e.g., comprising an IRES sequence, is capable of facilitating expression of the therapeutic protein in the cell, such that the expression level of the protein in the cell is higher than when a control TIE sequence, e.g., comprising an IRES sequence, is used (e.g., SEQ ID NO: 3303) by about 1.5-fold, 2-fold, 3-fold, 4-fold, 5-fold, or higher as compared to the expression mediated by the control TIE sequence, e.g., comprising an IRES sequence (e.g., SEQ ID NO: 3303).

[0046] In certain embodiments, the TIE sequence, e.g., comprising an IRES sequence, is capable of facilitating expression of the therapeutic protein encoded by a precursor RNA polynucleotide in an immune cell. In certain embodiments, the TIE sequence, e.g., comprising an IRES sequence, is capable of facilitating expression of the therapeutic protein in the immune cell, such that the expression level of the protein in the immune cell is comparable to or higher than when a control TIE sequence, e.g., comprising an IRES sequence, is used (e.g., SEQ ID NO: 3303). In certain embodiments, the TIE sequence, e.g., comprising an IRES sequence, is capable of facilitating expression of the therapeutic protein in the immune cell, such that the expression level of the protein in the immune cell is higher than when a control TIE sequence, e.g., comprising an IRES sequence, is used (e.g., SEQ ID NO: 3303) by about 1.5-fold, 2-fold, 3-fold, 4-fold, 5-fold, or higher as compared to the expression mediated by the control TIE sequence, e.g., comprising an IRES sequence (e.g., SEQ ID NO: 3303). Immune cells include, but are not limited to, T cells, myeloid cells (e.g., macrophages), and NK cells.

[0047] In certain embodiments, the TIE sequence, e.g., comprising an IRES sequence, is capable of facilitating expression of the therapeutic protein encoded by a precursor RNA polynucleotide in a non-immune cell, e.g., a muscle or liver cell. In certain embodiments, the TIE sequence, e.g., comprising an IRES sequence, is capable of facilitating expression of the therapeutic protein in the non-immune cell, e.g., a muscle or liver cell, such that the expression level of the protein in the non-immune cell, e.g., a muscle or liver cell, is comparable to or higher than when a control TIE sequence, e.g., comprising an IRES sequence, is used (e.g., SEQ ID NO: 3303). In certain embodiments, the TIE sequence, e.g., comprising an IRES sequence, is capable of facilitating expression of the therapeutic protein in the non-immune cell, e.g., a muscle or liver cell, such that the expression level of the protein in the non-immune cell, e.g., a muscle or liver cell, is higher than when a control TIE sequence, e.g., comprising an IRES sequence, is used (e.g., SEQ ID NO: 3303) by about 1.5-fold, 2-fold, 3-fold, 4-fold, 5-fold, or higher as compared to the expression mediated by the control TIE sequence, e.g., comprising an IRES sequence (e.g., SEQ ID NO: 3303).

[0048] In certain embodiments, the TIE sequence, e.g., comprising an IRES sequence, is capable of facilitating expression of the therapeutic protein encoded by a precursor RNA polynucleotide in the T cell. In certain embodiments, the TIE sequence, e.g., comprising an IRES sequence, is capable of facilitating expression of the therapeutic protein in the T cell, such that the expression level of the protein in the T cell is comparable to or higher than when a control IRES is used (e.g., SEQ ID NO: 3303). In certain embodiments, the TIE sequence, e.g., comprising an IRES sequence, is capable of facilitating expression of the therapeutic protein in the T cell, such that the expression level of the protein in the T cell is higher than when a control TIE sequence, e.g., comprising an IRES sequence, is used (e.g., SEQ ID NO: 3303) by about 1.5-fold, 2-fold, 3-fold, 4-fold, 5-fold, or higher as compared to the expression mediated by the control TIE sequence, e.g., comprising an IRES sequence (e.g., SEQ ID NO: 3303).

[0049] In certain embodiments, the therapeutic protein comprises a chimeric protein. In certain embodiments, the chimeric protein comprises a chimeric antigen receptor (CAR), a T-cell receptor (TCR), a B-cell receptor (BCR), an immune cell activation or inhibitory receptor, a recombinant fusion protein, a chimeric mutant protein, or a fusion protein, or a combination thereof. In certain embodiments, the therapeutic protein comprises an antibody, a nanobody, a non-antibody protein, an immune modulatory ligand, a receptor, a structural protein, a growth factor ligand or receptor, a hormone or hormone receptor, a transcription factor, a checkpoint inhibitor or agonist, a Fc fusion protein, an anticoagulant, a blood clotting factor, a chaperone protein, a antimicrobial protein, a structural protein, a biochemical enzyme, a tight junction protein, a mitochondrial stress response, a cytoskeletal protein, a metal-binding protein, or a small molecule, or combinations thereof. In certain embodiments, the therapeutic protein comprises an antibody, a nanobody, a non-antibody protein, an immune modulatory ligand, a receptor, a structural protein, a growth factor ligand or receptor, a hormone or hormone receptor, a transcription factor, a checkpoint inhibitor or agonist, a Fc fusion protein, an anticoagulant, a blood clotting factor, a chaperone protein, a antimicrobial protein, a structural protein, a biochemical enzyme, a tight junction protein, a mitochondrial stress response, a cytoskeletal protein, a metal-binding protein, or a small molecule, or combinations thereof. In certain embodiments, the structural protein comprises a channel protein or nuclear pore protein. In certain embodiments, the coding sequence is codon-optimized. In certain embodiments, the coding sequence is codon-optimized. In certain embodiments, the coding sequence is codon-optimized. In certain embodiments, the coding sequence is optimized to have G-C content that is between 50% and 70%. In certain embodiments, the coding sequence is optimized to have G-C content that is between 55% and 64%. In certain embodiments, the oRNA is from about 0.1 to about 15 kilobases in length. In certain embodiments, the pharmaceutical composition has an in vivo duration of therapeutic effect in humans of at least 20 hours. In certain embodiments, the pharmaceutical composition has a functional half-life of at least 6 hours. In certain embodiments, the pharmaceutical composition has a duration of therapeutic effect in a human cell greater than or equal to that of an equivalent linear RNA polynucleotide comprising the same expression sequence. In certain embodiments, the pharmaceutical composition has an in vivo duration of therapeutic effect in human greater than that of an equivalent linear RNA polynucleotide having the same expression sequence. In certain embodiments, an in vivo duration of therapeutic effect in human greater than that of an equivalent linear RNA polynucleotide having the same expression sequence. In certain embodiments, the pharmaceutical composition is formulated for delivery to a T cell via electroporation. In certain embodiments, the oRNA is comprised in a nucleic acid expression vector. In certain embodiments, the nucleic acid expression vector is selected from the group consisting of a PCR product, a linearized plasmid, a non-linearized plasmid, a linearized minicircle, a non-linearized minicircle, a cosmid, a cDNA, or an artificial chromosome.

[0050] In certain embodiments, the transfer vehicle comprises a nanoparticle. In certain embodiments, the nanoparticle is a lipid nanoparticle, a core-shell nanoparticle, a biodegradable nanoparticle, a biodegradable lipid nanoparticle, a polymer nanoparticle, a polyplex or a biodegradable polymer nanoparticle. In certain embodiments, the nanoparticle is a lipid nanoparticle, a core-shell nanoparticle, or a biodegradable nanoparticle. In certain embodiments, the nanoparticle comprises one or more cationic lipids, ionizable lipids, or poly β-amino esters, or combinations thereof. In certain embodiments, the nanoparticle comprises one or more non-cationic lipids. In certain embodiments, the nanoparticle comprises one or more non-cationic lipids. In certain embodiments, the one or more structural lipids comprise cholesterol. In certain embodiments, the nanoparticle comprises arachidonic acid, leukotriene, oleic acid, or combinations thereof. In certain embodiments, the molar ratio of the ionizable lipid in the transfer vehicle is from about 40 to about 60% of the total lipid present in the transfer vehicle. In certain embodiments, the molar ratio of the helper lipid in the transfer vehicle is from about 3.5% to about 14% of the total lipid present in the transfer vehicle. In certain embodiments, the molar ratio of the PEG-lipid in the transfer vehicle is from about 0.5% to about 5% of the total lipid present in the LNP. In certain embodiments, the structural lipid in the transfer vehicle is from about 28% to about 50% of the total lipid present in the transfer vehicle. In certain embodiments, the molar ratio of ionizable lipid:helper lipid:structural lipid:PEG-lipid is about 45:9:44:2, about 50:10:38.5:1.5, about 41:12:45:2, about 62:4:33:1, or about 53:5:41:1. In certain embodiments, the nanoparticle has a lipid to phosphate (IL:P) ratio of about 3 to about 6, such as about 3, about 4, about 4.5, about 5, about 5.5, or about 6. In certain embodiments, the transfer vehicle is formulated for endosomal release of the circular RNA polynucleotide. In certain embodiments, the nanoparticle comprises a targeting moiety operably connected thereto, wherein the targeting moiety mediates receptor-mediated endocytosis, endosome fusion, or direct fusion into cells in the absence of cell isolation or purification. In certain embodiments, the targeting moiety comprises a small molecule, a scFv, a nanobody, a peptide, a cyclic peptide, a di or tri cyclic peptide, minibody, a polynucleotide an aptamer, an engineered a scaffold protein, a heavy chain variable region, a light chain variable region, or a fragment thereof. In certain embodiments, the transfer vehicle comprises a liposome, a dendrimer, a carbohydrate carrier, glycan nanomaterial, fusome, exosome, or a combination thereof.

[0051] In certain embodiments, the nanoparticle comprises a targeting moiety operably connected thereto, wherein the targeting moiety mediates receptor-mediated endocytosis, endosome fusion, or direct fusion into T cells in the absence of cell isolation or purification. In certain embodiments, the T cell is a CD8+ cytotoxic T cell, a CD4+ helper T cell (Th), a regulatory T (Treg) cell, a memory T cell, or an innate-like T cell. In certain embodiments, the Th cell is a Th1 cell, a Th2 cell, a Th17 cell, a Th9 cell, a Tfh cell, or a Th22 cell. In certain embodiments, the memory T cell is a central memory T cell (Tcm), an effector memory T cell (Tem), a tissue-resident memory T cell (Trm), or a virtual memory T cell. In certain embodiments, the innate-like T cell is a natural killer T (NKT) cell, a mucosal-associated invariant T cell (MAIT), or a gamma delta T cell (γδ T cell).

[0052] Disclosed herein, in certain embodiments, is a eukaryotic cell comprising the precursor RNA polynucleotide, oRNA, or pharmaceutical composition of any of the foregoing aspects and embodiments. In some embodiments, the eukaryotic cell is a human cell. In certain embodiments, the eukaryotic cell is an immune cell. In certain embodiments, the eukaryotic cell is a T cell, dendritic cell, macrophage, B cell, neutrophil, or basophil.

[0053] Disclosed herein, in certain embodiments, is a T cell comprising precursor RNA polynucleotide, oRNA, or pharmaceutical composition of any of the foregoing aspects and embodiments. In certain embodiments, the T cell is a human T cell. In certain embodiments, the T cell is a CD8+ cytotoxic T cell, a CD4+ helper T cell (Th), a regulatory T (Treg) cell, a memory T cell, an innate-like T cell. In certain embodiments, the Th cell is a Th1 cell, a Th2 cell, a Th17 cell, a Th9 cell, a Tfh cell, or a Th22 cell. In certain embodiments, the memory T cell is a central memory T cell (Tcm), an effector memory T cell (Tem), a tissue-resident memory T cell (Trm), or a virtual memory T cell. In certain embodiments, the innate-like T cell is a natural killer T (NKT) cell, a mucosal-associated invariant T cell (MAIT), or a gamma delta T cell (γδ T cell).

[0054] Disclosed herein, in certain embodiments, is a prokaryotic cell comprising the precursor RNA polynucleotide, oRNA, or pharmaceutical composition of any of the foregoing aspects and embodiments.

[0055] Disclosed herein, in certain embodiments, is a method of expressing a therapeutic protein in a cell, comprising contacting the cell with the precursor RNA polynucleotide, oRNA, or pharmaceutical composition of any of the foregoing aspects and embodiments, thereby expressing the therapeutic protein in the cell.

[0056] Disclosed herein, in certain embodiments, is a method of expressing a therapeutic protein in a T cell, comprising contacting the T cell with the precursor RNA polynucleotide, oRNA, or pharmaceutical composition of any of the foregoing aspects and embodiments, thereby expressing the therapeutic protein in the T cell. In certain embodiments, the TIE sequence, e.g., comprising an IRES sequence, is capable of facilitating expression of the therapeutic protein in the T cell, such that the expression level of the protein in the T cell is comparable to or higher than when a control TIE sequence, e.g., comprising an IRES sequence, is used (e.g., SEQ ID NO: 3303). In certain embodiments, the TIE sequence, e.g., comprising an IRES sequence, is capable of facilitating expression of the therapeutic protein in the T cell, such that the expression level of the protein in the T cell is higher than when a control TIE sequence, e.g., comprising an IRES sequence, is used (e.g., SEQ ID NO: 3303) by about 1.5-fold, 2-fold, 3-fold, 4-fold, 5-fold, or higher as compared to the expression mediated by the control IRES (e.g., SEQ ID NO: 3303).

[0057] Disclosed herein, in certain embodiments, is a method of expressing a protein from an oRNA molecule in a cell, comprising providing the cell with an oRNA comprising an IRES selected from a sequence set forth in any one SEQ ID NOS: 14067-24829, adjacent to a coding sequence.

[0058] Disclosed herein, in certain embodiments, is a method of expressing a protein from an oRNA molecule in a T cell, comprising providing the T cell with an oRNA comprising an IRES selected from a sequence set forth in any one of SEQ ID NOs: 793, 876, 1017, 1216, and 3291 adjacent to a coding sequence. In certain embodiments, the IRES is capable of facilitating expression of the therapeutic protein in the T cell, such that the expression level of the protein in the T cell is comparable to or higher than when a control IRES is used (e.g., SEQ ID NO: 3303). In certain embodiments, the IRES is capable of facilitating expression of the therapeutic protein in the T cell, such that the expression level of the protein in the T cell is higher than when a control IRES is used (e.g., SEQ ID NO: 3303) by about 1.5-fold, 2-fold, 3-fold, 4-fold, 5-fold, or higher as compared to the expression mediated by the control IRES (e.g., SEQ ID NO: 3303).

[0059] Disclosed herein, in certain embodiments, is a method of expressing a protein from an oRNA molecule in a T cell, comprising providing the T cell with an oRNA comprising an IRES selected from a sequence set forth in any one of SEQ ID NOs: 785, 823, 840, 857, 861, 862, 864, 983, 1023, 1168, 1169, 1171, 1179, 1192, 1284, 1287, 2285, 2742, 2777, 2778, 3283, 3290, 3293, and 3302 adjacent to a coding sequence. In certain embodiments, the IRES is capable of facilitating expression of the therapeutic protein in the T cell, such that the expression level of the protein in the T cell is comparable to or higher than when a control IRES is used (e.g., SEQ ID NO: 3303). In certain embodiments, the IRES is capable of facilitating expression of the therapeutic protein in the T cell, such that the expression level of the protein in the T cell is higher than when a control IRES is used (e.g., SEQ ID NO: 3303) by about 1.5-fold, 2-fold, 3-fold, 4-fold, 5-fold, or higher as compared to the expression mediated by the control IRES (e.g., SEQ ID NO: 3303).

[0060] Disclosed herein, in certain embodiments, is a method of expressing a protein from an oRNA molecule in a T cell, comprising providing the T cell with an oRNA comprising an IRES selected from a sequence set forth in any one of SEQ ID NOs: 75, 77, 137, 532, 566, 580, 648, 693, 752, 787, 791, 820, 839, 843, 852, 863, 871, 874, 922, 959, 984, 1015, 1026, 1041, 1047, 1059, 1068, 1134, 1177, 1178, 1180, 1189, 1193, 1198, 1263, 1276, 1280, 1282, 2601, 2615, 2616, 2617, 2618, 2627, 2667, 2681, 2746, 2758, 3284, 3285, 3289, 3292, 3294, 3295, 3296, 3297, 3298, 3299, and 3301 adjacent to a coding sequence. In certain embodiments, the IRES is capable of facilitating expression of the therapeutic protein in the T cell, such that the expression level of the protein in the T cell is comparable to or higher than when a control IRES is used (e.g., SEQ ID NO: 3303). In certain embodiments, the IRES is capable of facilitating expression of the therapeutic protein in the T cell, such that the expression level of the protein in the T cell is higher than when a control IRES is used (e.g., SEQ ID NO: 3303) by about 1.5-fold, 2-fold, 3-fold, 4-fold, 5-fold, or higher as compared to the expression mediated by the control IRES (e.g., SEQ ID NO: 3303).

[0061] Disclosed herein, in certain embodiments, is a method of treating a subject having a disease or disorder, the method comprising administering the pharmaceutical composition of any of the foregoing aspects and embodiments. In certain embodiments, the disease or disorder is a cancer. In certain embodiments, the disease or disorder is an autoimmune disease or disorder. In certain embodiments, the subject is a human.

### BRIEF DESCRIPTION OF THE DRAWINGS

[0062] FIG. 1 depicts luminescence in supernatants of HEK293 (FIGS. 1A, 1D, and 1E), HepG2 (FIG. 1B), or 1C1C7 (FIG. 1C) cells 24 hours after transfection with circular RNA comprising a Gaussia luciferase expression sequence and various IRES sequences.

[0063] FIG. 2 depicts luminescence in supernatants of HEK293 (FIG. 2A), HepG2 (FIG. 2B), or 1C1C7 (FIG. 2C) cells 24 hours after transfection with circular RNA comprising a Gaussia luciferase expression sequence and various IRES sequences having different lengths.

[0064] FIG. 3 depicts stability of select IRES constructs in HepG2 (FIG. 3A) or 1C1C7 (FIG. 3B) cells over 3 days as measured by luminescence.

[0065] FIGS. 4A and 4B depict protein expression from select IRES constructs in Jurkat cells, as measured by luminescence from secreted Gaussia luciferase in cell supernatants.

[0066] FIGS. 5A and 5B depict stability of select IRES constructs in Jurkat cells over 3 days as measured by luminescence.

[0067] FIG. 6 depicts comparisons of 24 hour luminescence (FIG. 6A) or relative luminescence over 3 days (FIG. 6B) of modified linear, unpurified circular, or purified circular RNA encoding Gaussia luciferase.

[0068] FIG. 7 depicts transcript induction of IFNγ (FIG. 7A), IL-6 (FIG. 7B), IL-2 (FIG. 7C), RIG-I (FIG. 7D), IFN-β1 (FIG. 7E), and TNFα (FIG. 7F) after electroporation of Jurkat cells with modified linear, unpurified circular, or purified circular RNA.

[0069] FIG. 8 depicts a comparison of luminescence of circular RNA and modified linear RNA encoding Gaussia luciferase in human primary monocytes (FIG. 8A) and macrophages (FIG. 8B and FIG. 8C).

[0070] FIG. 9 depicts relative luminescence over 3 days (FIG. 9A) in supernatant of primary T cells after transduction with circular RNA comprising a Gaussia luciferase expression sequence and varying IRES sequences or 24 hour luminescence (FIG. 9B).

[0071] FIG. 10 depicts 24 hour luminescence in supernatant of primary T cells (FIG. 10A) after transduction with circular RNA or modified linear RNA comprising a Gaussia luciferase expression sequence, or relative luminescence over 3 days (FIG. 10B), and 24 hour luminescence in PBMCs (FIG. 10C).

[0072] FIG. 11 depicts HPLC chromatograms (FIG. 11A) and circularization efficiencies (FIG. 11B) of RNA constructs having different permutation sites.

[0073] FIG. 12 depicts HPLC chromatograms (FIG. 12A) and circularization efficiencies (FIG. 12B) of RNA constructs having different introns and/or permutation sites.

[0074] FIG. 13 depicts HPLC chromatograms (FIG. 13A) and circularization efficiencies (FIG. 13B) of 3 RNA constructs with or without homology arms.

[0075] FIG. 14 depicts circularization efficiencies of 3 RNA constructs without homology arms or with homology arms having various lengths and GC content.

[0076] FIGS. 15A and 15B depict HPLC chromatograms showing the contribution of strong homology arms to improved splicing efficiency, the relationship between circularization efficiency and nicking in select constructs, and combinations of permutations sites and homology arms hypothesized to demonstrate improved circularization efficiency.

[0077] FIG. 16 shows fluorescent images of T cells mock electroporated (left) or electroporated with circular RNA encoding a CAR (right) in co-cultured with Raji cells expressing GFP and firefly luciferase.

[0078] FIG. 17 shows bright field (left), fluorescent (center), and overlay (right) images of T cells mock electroporated (top) or electroporated with circular RNA encoding a CAR (bottom) and co-cultured with Raji cells expressing GFP and firefly luciferase.

[0079] FIG. 18 depicts specific lysis of Raji target cells by T cells mock electroporated or electroporated with circular RNA encoding different CAR sequences.

[0080] FIG. 19 depicts luminescence in supernatants of Jurkat cells (left) or resting primary human CD3+ T cells (right) 24 hours after transduction with linear or circular RNA comprising a Gaussia luciferase expression sequence and varying IRES sequences (FIG. 19A), and relative luminescence over 3 days (FIG. 19B).

[0081] FIG. 20 depicts transcript induction of IFN-β1 (FIG. 20A), RIG-I (FIG. 20B), IL-2 (FIG. 20C), IL-6 (FIG. 20D), IFNγ (FIG. 20E), and TNFα (FIG. 20F) after electroporation of human CD3+ T cells with modified linear, unpurified circular, or purified circular RNA.

[0082] FIG. 21 depicts specific lysis of Raji target cells by human primary CD3+ T cells electroporated with circRNA encoding a CAR as determined by detection of firefly luminescence (FIG. 21A), and IFNγ transcript induction 24 hours after electroporation with different quantities of circular or linear RNA encoding a CAR sequence (FIG. 21B).

[0083] FIG. 22 depicts specific lysis of target or non-target cells by human primary CD3+ T cells electroporated with circular or linear RNA encoding a CAR at different E:T ratios (FIG. 22A and FIG. 22B) as determined by detection of firefly luminescence.

[0084] FIG. 23 depicts specific lysis of target cells by human CD3+ T cells electroporated with RNA encoding a CAR at 1, 3, 5, and 7 days post electroporation.

[0085] FIG. 24 depicts specific lysis of target cells by human CD3+ T cells electroporated with circular RNA encoding a CD19 or BCMA targeted CAR.

[0086] FIG. 25 depicts total Flux of organs harvested from CD-1 mice dosed with circular RNA encoding FLuc and formulated with 50% Lipid 10b-15, 10% DSPC, 1.5% PEG-DMG, and 38.5% cholesterol.

[0087] FIG. 26 shows images highlighting the luminescence of organs harvested from CD-1 mice dosed with circular RNA encoding FLuc and formulated with 50% Lipid 10b-15, 10% DSPC, 1.5% PEG-DMG, and 38.5% cholesterol.

[0088] FIG. 27 depicts molecular characterization of Lipids 10a-26 and 10a-27. FIG. 27A shows the proton nuclear magnetic resonance (NMR) spectrum of Lipid 10a-26. FIG. 27B shows the retention time of Lipid 10a-26 measured by liquid chromatography-mass spectrometry (LC-MS). FIG. 27C shows the mass spectrum of Lipid 10a-26. FIG. 27D shows the proton NMR spectrum of Lipid 10a-27. FIG. 27E shows the retention time of Lipid 10a-27 measured by LC-MS. FIG. 27F shows the mass spectrum of Lipid 10a-27.

[0089] FIG. 28 depicts molecular characterization of Lipid 22-S14 and its synthetic intermediates. FIG. 28A depicts the NMR spectrum of 2-(tetradecylthio)ethan-1-ol. FIG. 28B depicts the NMR spectrum of 2-(tetradecylthio)ethyl acrylate. FIG. 28C depicts the NMR spectrum of bis(2-(tetradecylthio)ethyl) 3,3′-((3-(2-methyl-1H-imidazol-1-yl)propyl)azanediyl)dipropionate (Lipid 22-S14).

[0090] FIG. 29 depicts the NMR spectrum of bis(2-(tetradecylthio)ethyl) 3,3′-((3-(1H-imidazol-1-yl)propyl)azanediyl)dipropionate (Lipid 93-S14).

[0091] FIG. 30 depicts molecular characterization of heptadecan-9-yl 8-((3-(2-methyl-1H-imidazol-1-yl)propyl)(8-(nonyloxy)-8-oxooctyl)amino)octanoate (Lipid 10a-54). FIG. 30A shows the proton NMR spectrum of Lipid 10a-54. FIG. 30B shows the retention time of Lipid 10a-54 measured by LC-MS. FIG. 30C shows the mass spectrum of Lipid 10a-54.

[0092] FIG. 31 depicts molecular characterization of heptadecan-9-yl 8-((3-(1H-imidazol-1-yl)propyl)(8-(nonyloxy)-8-oxooctyl)amino)octanoate (Lipid 10a-53). FIG. 31A shows the proton NMR spectrum of Lipid 10a-53. FIG. 31B shows the retention time of Lipid 10a-53 measured by LC-MS. FIG. 31C shows the mass spectrum of Lipid 10a-53.

[0093] FIG. 32A depicts total flux of spleen and liver harvested from CD-1 mice dosed with circular RNA encoding firefly luciferase (FLuc) and formulated with ionizable lipid of interest, DSPC, cholesterol, and DSPE-PEG 2000 (Avanti Polar Lipids Inc.) at a weight ratio of 16:1:4:1 or 62:4:33:1 molar ratio. FIG. 32B depicts average radiance for biodistribution of protein expression.

[0094] FIG. 33A depicts images highlighting the luminescence of organs harvested from CD-1 mice dosed with circular RNA encoding FLuc and formulated with ionizable Lipid 22-S14, DSPC, cholesterol, and DSPE-PEG 2000 (Avanti Polar Lipids Inc.) at a weight ratio of 16:1:4:1 or 62:4:33:1 molar ratio. FIG. 33B depicts whole body IVIS images of CD-1 mice dosed with circular RNA encoding FLuc and formulated with ionizable Lipid 22-S14, DSPC, cholesterol, and DSPE-PEG 2000 (Avanti Polar Lipids Inc.) at a weight ratio of 16:1:4:1 or 62:4:33:1 molar ratio.

[0095] FIG. 34A depicts images highlighting the luminescence of organs harvested from CD-1 mice dosed with circular RNA encoding FLuc and formulated with ionizable Lipid 93-S14, DSPC, cholesterol, and DSPE-PEG 2000 (Avanti Polar Lipids Inc.) at a weight ratio of 16:1:4:1 or 62:4:33:1 molar ratio. FIG. 34B depicts whole body IVIS images of CD-1 mice dosed with circular RNA encoding FLuc and formulated with ionizable Lipid 93-S14, DSPC, cholesterol, and DSPE-PEG 2000 (Avanti Polar Lipids Inc.) at a weight ratio of 16:1:4:1 or 62:4:33:1 molar ratio.

[0096] FIG. 35A depicts images highlighting the luminescence of organs harvested from CD-1 mice dosed with circular RNA encoding FLuc and formulated with ionizable Lipid 10a-26, DSPC, cholesterol, and DSPE-PEG 2000 (Avanti Polar Lipids Inc.) at a weight ratio of 16:1:4:1 or 62:4:33:1 molar ratio. FIG. 35B depicts whole body IVIS images of CD-1 mice dosed with circular RNA encoding FLuc and formulated with ionizable Lipid 10a-26, DSPC, cholesterol, and DSPE-PEG 2000 (Avanti Polar Lipids Inc.) at a weight ratio of 16:1:4:1 or 62:4:33:1 molar ratio.

[0097] FIG. 36 depicts images highlighting the luminescence of organs harvested from c57 BL/6J mice dosed with circular RNA encoding FLuc and encapsulated in lipid nanoparticles formed with Lipid 10b-15 (FIG. 36A), Lipid 10a-53 (FIG. 36B), or Lipid 10a-54 (FIG. 36C). PBS was used as control (FIG. 36D).

[0098] FIGS. 37A and 37B depict relative luminescence in the lysates of human PBMCs after 24-hour incubation with testing lipid nanoparticles containing circular RNA encoding firefly luciferase.

[0099] FIG. 38 shows the expression of GFP (FIG. 38A) and CD19 CAR (FIG. 38B) in human PBMCs after incubating with testing lipid nanoparticle containing circular RNA encoding either GFP or CD19 CAR.

[0100] FIG. 39 depicts the expression of an anti-murine CD19 CAR in 1C1C7 cells lipotransfected with circular RNA comprising an anti-murine CD19 CAR expression sequence and varying IRES sequences.

[0101] FIG. 40 shows the cytotoxicity of an anti-murine CD19 CAR to murine T cells. The CD19 CAR is encoded by and expressed from a circular RNA, which is electroporated into the murine T cells.

[0102] FIG. 41 depicts the B cell counts in peripheral blood (FIGS. 41A and 41B) or spleen (FIG. 41C) in C57BL/6J mice injected every other day with testing lipid nanoparticles encapsulating a circular RNA encoding an anti-murine CD19 CAR.

[0103] FIGS. 42A and 42B compares the expression level of an anti-human CD19 CAR expressed from a circular RNA with that expressed from a linear mRNA.

[0104] FIGS. 43A and 43B compares the cytotoxic effect of an anti-human CD19 CAR expressed from a circular RNA with that expressed from a linear mRNA

[0105] FIG. 44 depicts the cytotoxicity of two CARs (anti-human CD19 CAR and anti-human BCMA CAR) expressed from a single circular RNA in T cells.

[0106] FIG. 45A shows representative FACS plots with frequencies of tdTomato expression in various spleen immune cell subsets following treatment with LNPs formed with Lipid 10a-27 or 10a-26 or Lipid 10b-15. FIG. 45B shows the quantification of the proportion of myeloid cells, B cells, and T cells expressing tdTomato (mean+std. dev., n=3), equivalent to the proportion of each cell population successfully transfected with Cre circular RNA. FIG. 45C illustrates the proportion of additional splenic immune cell populations, including NK cells, classical monocytes, nonclassical monocytes, neutrophils, and dendritic cells, expressing tdTomato after treatment with Lipids 27 and 26 (mean+std. dev., n=3).

[0107] FIG. 46A depicts an exemplary RNA construct design with built-in polyA sequences in the introns. FIG. 46B shows the chromatography trace of unpurified circular RNA. FIG. 46C shows the chromatography trace of affinity-purified circular RNA. FIG. 46D shows the immunogenicity of the circular RNAs prepared with varying in vitro transcription (IVT) conditions and purification methods. (Commercial=commercial IVT mix; Custom=customized IVT mix; Aff=affinity purification; Enz=enzyme purification; GMP:GTP ratio=8, 12.5, or 13.75).

[0108] FIG. 47A depicts an exemplary RNA construct design with a dedicated binding sequence of TATAATTCTACCCTATTGAGGCATTGACTA (SEQ ID NO: 3269) as an alternative to polyA for hybridization purification. FIG. 47B shows the chromatography trace of unpurified circular RNA. FIG. 46C shows the chromatography trace of affinity-purified circular RNA.

[0109] FIG. 48A shows the chromatography trace of unpurified circular RNA encoding dystrophin. FIG. 48B shows the chromatography trace of enzyme-purified circular RNA encoding dystrophin.

[0110] FIG. 49 compares the expression (FIG. 49A) and stability (FIG. 49B) of purified circRNAs with different 5′ spacers between the 3′ intron segment/5′ internal duplex region and the IRES in Jurkat cells. (AC=only A and C were used in the spacer sequence; UC=only U and C were used in the spacer sequence.)

[0111] FIG. 50 shows luminescence expression levels and stability of expression in primary T cells from circular RNAs containing the original or modified IRES elements indicated.

[0112] FIG. 51 shows luminescence expression levels and stability of expression in HepG2 cells from circular RNAs containing the original or modified IRES elements indicated.

[0113] FIG. 52 shows luminescence expression levels and stability of expression in 1C1C7 cells from circular RNAs containing the original or modified IRES elements indicated.

[0114] FIG. 53 shows luminescence expression levels and stability of expression in HepG2 cells from circular RNAs containing IRES elements with untranslated regions (UTRs) inserted or hybrid IRES elements. “Scr” means Scrambled, which was used as a control.

[0115] FIG. 54 shows luminescence expression levels and stability of expression in 1C1C7 cells from circular RNAs containing an IRES and variable stop codon cassettes operably linked to a Gaussia luciferase coding sequence.

[0116] FIG. 55 shows luminescence expression levels and stability of expression in 1C1C7 cells from circular RNAs containing an IRES and variable untranslated regions (UTRs) inserted before the start codon of a Gaussia luciferase coding sequence.

[0117] FIG. 56 shows expression levels of human erythropoietin (hEPO) in Huh7 cells from circular RNAs containing two miR-122 target sites downstream from the hEPO coding sequence.

[0118] FIG. 57 shows immune cell expression of mOX40L in wildtype mice following intravenous injection of LNPs that have been transfected with circular RNAs encoding mOX40L.

[0119] FIG. 58 shows B cell depletion of LNPs transfected intravenously with circular RNAs in mice. FIG. 58A quantifies B cell depletion through B220+ B cells of live, CD45+ immune cells and FIG. 58B compares B cell depletion of B220+ B cells of live, CD45+ immune cells in comparison to luciferase expressing circular RNAs. FIG. 58C provides B cell weight gain of the transfected cells.

[0120] FIG. 59 shows CAR expression levels in the peripheral blood (FIG. 59A) and spleen (FIG. 59B) when treated with LNP encapsulating circular RNA that expresses anti-CD19 CAR. Anti-CD20 (aCD20) and circular RNA encoding luciferase (oLuc) were used for comparison.

[0121] FIG. 60 shows the overall frequency of anti-CD19 CAR expression, the frequency of anti-CD19 CAR expression on the surface of cells and effect on anti-tumor response of IRES specific circular RNA encoding anti-CD19 CARs on T cells. FIG. 60A shows anti-CD19 CAR geometric mean florescence intensity, FIG. 60B shows percentage of anti-CD19 CAR expression, and FIG. 60C shows the percentage target cell lysis performed by the anti-CD19 CAR. (CK=Caprine Kobuvirus; AP=Apodemus Picornavirus; CK*=Caprine Kobuvirus with codon optimization; PV=Parabovirus; SV=Salivirus.)

[0122] FIG. 61 shows CAR expression levels of A20 FLuc target cells when treated with IRES specific circular RNA constructs.

[0123] FIG. 62 shows luminescence expression levels for cytosolic (FIG. 62A) and surface (FIG. 62B) proteins from circular RNA in primary human T cells.

[0124] FIG. 63 shows luminescence expression in human T cells when treated with IRES specific circular constructs. Expression in circular RNA constructs were compared to linear mRNA. FIG. 63A, FIG. 63B, and FIG. 63G provide Gaussia luciferase expression in multiple donor cells. FIG. 63C, FIG. 63D, FIG. 63E, and FIG. 63F provides firefly luciferase expression in multiple donor cells.

[0125] FIG. 64 shows anti-CD19 CAR (FIG. 64A and FIG. 64B) and anti-BCMA CAR (FIG. 63B) expression in human T cells following treatment of a lipid nanoparticle encompassing a circular RNA that encodes either an anti-CD19 or anti-BCMA CAR to a firefly luciferase expressing K562 cell.

[0126] FIG. 65 shows anti-CD19 CAR expression levels resulting from delivery via electroporation in vitro of a circular RNA encoding an anti-CD19 CAR in a specific antigen-dependent manner. FIG. 65A shows Nalm6 cell lysing with an anti-CD19 CAR. FIG. 65B shows K562 cell lysing with an anti-CD19 CAR.

[0127] FIG. 66 shows transfection of LNP mediated by use of ApoE3 in solutions containing LNP and circular RNA expressing green fluorescence protein (GFP). FIG. 66A showed the live-dead results. FIG. 66B, FIG. 66C, FIG. 66D, and FIG. 66E provide the frequency of expression for multiple donors.

[0128] FIG. 67 provides multiple controlled adjuvant strategies. CircRNA as indicated on the figure entails an unpurified sense circular RNA splicing reaction using GTP as an indicator molecule in vitro. 3p-circRNA entails a purified sense circular RNA as well as a purified antisense circular RNA mixed containing triphosphorylated 5′ termini. FIG. 67A shows IFN-β Induction in vitro in wild type and MAVS knockout A549 cells and FIG. 67B shows in vivo cytokine response to formulated circRNA generated using the indicated strategy.

[0129] FIG. 68 illustrates an intramuscular delivery of LNP containing circular RNA constructs. FIG. 68A provides a live whole body flux post a 6 hour period and FIG. 68B provides whole body IVIS 6 hours following a 1 μg dose of the LNP-circular RNA construct.

[0130] FIG. 68C provides an ex vivo expression distribution over a 24-hour period.

[0131] FIG. 69 illustrates expression of multiple circular RNAs from a single lipid formulation. FIG. 69A provides hEPO titers from a single and mixed set of LNP containing circular RNA constructs, while FIG. 69B provides total flux of bioluminescence expression from single or mixed set of LNP containing circular RNA constructs.

[0132] FIG. 70 depicts a general sequence construct of a linear RNA polynucleotide precursor (10). The sequence as provided is illustrated in a 5′ to 3′ order of a 5′ enhanced intron element (20), a 5′ enhanced exon element (30), a core functional element (40), a 3′ enhanced exon element (50) and a 3′ enhanced intron element (60).

[0133] FIG. 71 depicts various exemplary iterations of the 5′ enhanced exon element (20). As illustrated, one iteration of the 5′ enhanced exon element (20) comprises in a 5′ to 3′ order in the following order: a leading untranslated sequence (21), a 5′ affinity tag (22), a 5′ external duplex region (24), a 5′ external spacer (26), and a 3′ intron segment (28).

[0134] FIG. 72 depicts various exemplary iterations of the 5′ enhanced exon element (30). As illustrated, one iteration of the 5′ enhanced exon element (30) comprises in a 5′ to 3′ order: a 3′ exon segment (32), a 5′ internal duplex region (34), and a 5′ internal spacer (36).

[0135] FIG. 73 depicts various exemplary iterations of the core functional element (40). As illustrated, one iteration of the core functional element (40) comprises a TIE (42), a coding region (46) and a stop region (e.g., a stop codon or stop cassette) (48). Another iteration is illustrated to show the core functional element (47) comprising a noncoding region (47).

[0136] FIG. 74 depicts various exemplary iterations of the 3′ enhanced exon element (50). As illustrated, one of the iterations of the 3′ enhanced exon element (50) comprises, in the following 5′ to 3′ order: a 3′ internal spacer (52), a 3′ internal duplex region (54), and a 5′ exon segment (56).

[0137] FIG. 75 depicts various exemplary iterations of the 3′ enhanced intron element (60). As illustrated, one of the iterations of the 3′ enhanced intron element (60) comprises, in the following order, a 5′ intron segment (62), a 3′ external spacer (64), a 3′ external duplex region (66), a 3′ affinity tag (68) and a terminal untranslated sequence (69).

[0138] FIG. 76 depicts various exemplary iterations a translation initiation element (TIE) (42). TIE (42) sequence as illustrated in one iteration is solely an IRES (43). In another iteration, the TIE (42) is an aptamer (44). In two different iterations, the TIE (42) is an aptamer (44) and IRES (43) combination. In another iteration, the TIE (42) is an aptamer complex (45).

[0139] FIG. 77 illustrates an exemplary linear RNA polynucleotide precursor (10) comprising in the following 5′ to 3′ order, a leading untranslated sequence (21), a 5′ affinity tag (22), a 5′ external duplex region (24), a 5′ external spacer (26), a 3′ intron segment (28), a 3′ exon segment (32), a 5′ internal duplex region (34), a 5′ internal spacer (36), a TIE (42), a coding element (46), a stop region (48), a 3′ internal spacer (52), a 3′ internal duplex region (54), a 5′ exon segment (56), a 5′ intron segment (62), a 3′ external spacer (64), a 3′ external duplex region (66), a 3′ affinity tag (68) and a terminal untranslated sequence (69).

[0140] FIG. 78 illustrates an exemplary linear RNA polynucleotide precursor (10) comprising in the following 5′ to 3′ order, a leading untranslated sequence (21), a 5′ affinity tag (22), a 5′ external duplex region (24), a 5′ external spacer (26), a 3′ intron segment (28), a 3′ exon segment (32), a 5′ internal duplex region (34), a 5′ internal spacer (36), a coding element (46), a stop region (48), a TIE (42), a 3′ internal spacer (52), a 3′ internal duplex region (54), a 5′ exon segment (56), a 5′ intron segment (62), a 3′ external spacer (64), a 3′ external duplex region (66), a 3′ affinity tag (68) and a terminal untranslated sequence (69).

[0141] FIG. 79 illustrates an exemplary linear RNA polynucleotide precursor (10) comprising in the following 5′ to 3′ order, a leading untranslated sequence (21), a 5′ affinity tag (22), a 5′ external duplex region (24), a 5′ external spacer (26), a 3′ intron segment (28), a 3′ exon segment (32), a 5′ internal duplex region (34), a 5′ internal spacer (36), a noncoding element (47), a 3′ internal spacer (52), a 3′ internal duplex region (54), a 5′ exon segment (56), a 5′ intron segment (62), a 3′ external spacer (64), a 3′ external duplex region (66), a 3′ affinity tag (68) and a terminal untranslated sequence (69).

[0142] FIG. 80 illustrates the general circular RNA (8) structure formed post splicing. The circular RNA as depicted includes a 5′ exon element (30), a core functional element (40) and a 3′ exon element (50).

[0143] FIG. 81 illustrates the various ways an accessory element (70) (e.g., a miRNA binding site) may be included in a linear RNA polynucleotide. FIG. 81A shows a linear RNA polynucleotide comprising an accessory element (70) at the spacer regions. FIG. 81B shows a linear RNA polynucleotide comprising an accessory element (70) located between each of the external duplex regions and the exon segments. FIG. 81C depicts an accessory element (70) within a spacer. FIG. 81D illustrates various iterations of an accessory element (70) located within the core functional element. FIG. 81E illustrates an accessory element (70) located within an internal ribosome entry site (IRES).

[0144] FIG. 82 illustrates a screening of a LNP formulated with circular RNA encoding firefly luciferase and having a TIE in primary human (FIG. 82A), mouse (FIG. 82B), and cynomolgus monkey (FIG. 82C) hepatocyte with varying dosages in vitro.

[0145] FIGS. 83A-83C illustrates a screening of a LNP formulated with circular RNA encoding firefly luciferase and having a TIE, in primary human hepatocyte from three different donors with varying dosages in vitro.

[0146] FIG. 84 illustrates in vitro expression of LNP formulated with circular RNA encoding for GFP and having a TIE, in HeLa, HEK293, and HUH7 human cell models.

[0147] FIG. 85 illustrates in vitro expression of LNP formulated with circular RNAs encoding a GFO protein and having a TIE, in primary human hepatocytes.

[0148] FIG. 86 illustrates in vitro expression of circular RNA encoding firefly luciferase and having a TIE, in mouse myoblast (FIG. 86A) and primary human muscle myoblast (FIG. 86B) cells.

[0149] FIG. 87 illustrates in vitro expression of circular RNA encoding for firefly luciferase and having a TIE, in myoblasts and differentiated primary human skeletal muscle myotubes. FIG. 87A provides the data related to cells received from human donor 1; FIG. 87B provides the data related to cell received from human donor 2.

[0150] FIG. 88 illustrates cell-free in vitro translation of circular RNA of variable sizes. In FIG. 88A circular RNA encoding for firefly luciferase and linear mRNA encoding for firefly luciferase was tested for expression. In FIG. 88B, human and mouse cells were given circular RNAs encoding for ATP7B proteins. Some of the circular RNAs tested were codon optimized. Circular RNA expressing firefly luciferase was used for comparison.

[0151] FIG. 89 shows an exemplary RNA circularization process. The schematic shown in FIG. 89A depicts an autocatalytic circularization process. Briefly, precursor RNA molecules containing intron segments and accessory elements that enhance circularization efficiency undergo splicing, resulting in a synthetic circular RNA and two excised intron/accessory sequence segments (spliced out intron segments/fragments). Some circularized RNA (oRNA) is nicked during synthesis. FIG. 89B shows an exemplary chromatogram showing peak residence of different species after size exclusion HPLC analysis.

[0152] FIG. 90 depicts an exemplary negative selection purification method for circular RNA molecules such as oRNA. Oligonucleotides that are complementary to sequences present in the precursor RNA (such as the intron segments or external accessory regions) but not the oRNA are bound to a solid support, such as a bead. oRNA preparations are washed over the bead; precursor RNA, partially spliced RNA, incomplete transcripts, and post-splicing intron segments bind to the oligonucleotide under certain buffer conditions while oRNA and nicked oRNA flow through. Flowthrough is collected for further processing.

[0153] FIG. 91A and FIG. 91B depict an exemplary negative selection purification method for circular RNA molecule such as oRNA. The schematic shown in FIG. 91A depicts enzymatic polyadenylation of in vitro transcription reaction products containing oRNA and linear RNA, resulting in polyadenylation of only the linear RNA. The mixture of linear and circular RNA is washed over beads conjugated to deoxythymidine oligonucleotides (“Oligo dT”) under specific buffer conditions. Polyadenylated linear RNA anneals to the beads while oRNA flows through for collection. FIG. 91B shows exemplary SEC-HPLC chromatograms of in vitro transcription (IVT) reaction products prior to polyadenylation and purification (left panel) and of the eluant following polyadenylation using E. coli polyA polymerase and purification with oligo-dT beads in binding buffer (right panel).

[0154] FIG. 92A and FIG. 92B depict an exemplary circular RNA enzymatic purification method. In this method, oRNA is synthesized by IVT in the presence of excess GMP and is autocatalytically spliced during the process. The resulting reaction products are digested with Xrn1 (a 5′ to 3′ exonuclease requiring a 5′ terminal monophosphate) and RNase R (a 3′ to 5′ exonuclease) to remove non-circular RNA molecules. FIG. 92A shows such Xrn1 and RNaseR digestion of linear RNA. FIG. 92B shows exemplary SEC-HPLC chromatograms of IVT reaction products prior to enzymatic digestion (left pane) and of the final, enzymatically purified material (right panel).

[0155] FIG. 93A and FIG. 93B show induction of RIG-1 and IFNB1 RNA expression, markers of immune stimulation, following transfection of the cells with the various RNA preparations indicated. All RNA preparations except for the commercially available 3phpRNA were produced using in vitro transcription and circularization of RNA comprising an Anabaena permuted intron, GLuc reading frame, strong homology arms, 5′ and 3′ spacers, and a CVB3 IRES. RIG-1 and IFNB1 RNA expression was measured using RT-qPCR. In FIG. 93, “IVT” indicates an unpurified reaction mixture; “+ GMP” indicates an unpurified reaction mixture in which the in vitro transcription was performed in the presence of 12.5-fold GMP relative to GITP; “+HPLC” indicates a reaction mixture purified by HPLC; “+HPLC/GMP” indicates a reaction mixture purified by HPLC in which the in vitro transcription was performed in the presence of 12.5-fold GMP relative to GTP; “3phpRNA” indicates a positive control comprising a triphosphate hairpin RNA (tlrl-hprna, Invivogen); and “mock” indicates a preparation containing no RNA. FIG. 93A shows immune stimulation of HeLa cells, and FIG. 93B shows immune stimulation of A594 cells.

[0156] FIG. 94A and FIG. 94B shows anti-CD19 CAR expression levels resulting from in vitro delivery via electroporation of various circular RNA encoding chimeric antigen receptors in human T cells. FIG. 94A provides representative dot plots from FACs analysis of human T cell expression of CD19-41BBζ, CD19-CD28ζ, HER2-41BBζ, and HER2-CD28ζCARs. FIG. 94B depicts cumulative data for the MFI of CD19-41BBζ, CD19-CD28ζ, HER2-41BBζ, and HER2-CD28ζ expression collected via fluorescence-activated cell sorting (FACS).

[0157] FIGS. 95A-95C illustrate cytotoxic response to tumor cells upon electroporation of T cells with circular RNA encoding CD19-41BBζ and CD19-CD28ζ and subsequent co-culture with tumor cells. FIG. 95A provides the % specific lysis of tumor cells after coculture with T cells expressing oRNA encoding CD19-41BBζ, CD19-CD28ζ, HER2-41BBζ, and HER2-CD28ζCARs in comparison to T cells expressing a circular RNA encoding mOX40L.

[0158] FIG. 95B and FIG. 95C depict IFN-g and IL-2 cytokine in μg/mL, respectively, secreted by T cells expressing the listed oRNA as compared to a circular RNA encoding mOX40L after co-cultured with tumor cells.

[0159] FIG. 96A and FIG. 96B show in vivo mOX40L expression in the splenic and peripheral blood T cells of humanized mice following intravenous administration of LNP formulated with circular RNAs encoding mOX40L. LNPs were formulated with either PBS (indicated as “vehicle” in said figure), or LNP-oRNA constructs formulated with lipid 10b-15, 10a-27, or 10a-26. FIG. 96A depicts mOX40L detection in T cells in the spleen of the humanized mice. FIG. 96B depicts mOX40L detection in T cells in the peripheral blood of the humanized mice.

[0160] FIG. 97 illustrates B cell aplasia in humanized mice after intravenous administration of LNP formulated with circular RNA encoding anti-CD19 chimeric antigen receptor (CAR). Representative FACS dot plots from the peripheral blood of untreated animals (left) and treated animals (right) show the percentage of B cells post 6 days from intravenous administration.

[0161] FIG. 98A and FIG. 98B show % killing of Nalm6 tumor cells after co-culture with LNP-oRNA encoding CAR or control (FIG. 98A) and chimeric antigen receptor (CAR) surface expression (FIG. 98B) following in vitro transfection of LNP-circular RNA (oRNA) encoding CD19-41BBζ or CD19-CD28ζCARs. FIG. 98A illustrates killing of Nalm6 tumor cells after co-culture of T cells transfected with LNP-oRNA constructs encoding CARs of CD19-41BBζ and CD19-CD28ζCARs along with HER2-41BBz, HER2-CD28z, or the control LN1-oRNA mOX40L. FIG. 98B provides mean fluorescence intensity (MFI) of the CAR surface expression on T cells treated with the LNP-oRNA CAR constructs.

[0162] FIG. 99 depicts antigen-dependent tumor regression measured by total flux (in photons/sec) following dosing of mice with either PBS, PBMC, LNP-oRNA encoding for mOx40L, LNP-oRNA encoding for CD19-41BBζ (“CD19-41BBζ is (“CD19-41BBζ is CAR”), oRNA encoding for and CD19-CD28ζ(“CD19-CD28ζ is CAR”), LNP-oRNA encoding for HER2-41BBz CAR (“HER2-41BBz is CAR”), or LNP-oRNA encoding for HER2-CD287 CAR (“HER2-CD28z is CAR”). PBS and PBMC solutions lacking oRNAs were used as negative control.

[0163] FIG. 100A, FIG. 100B, and FIG. 100C depict the correlation between IRES activities in myotubes and hepatocytes or myotubes and T cells. Each data point indicates the mean expression value of a circular RNA containing a IRES in front of a Gaussia luciferase coding region, wherein each IRES comprises a sequence selected from SEQ ID NOs: 1-2983 and 3282-3287 or a fragment thereof. Circular RNAs containing the IRESs were synthesized in an array format and formulated into LNPs before being transfected into activated primary human T cells, primary human myotubes, and primary human hepatocytes. All data points are normalized to a positive control IRES (SEQ ID NO: 3282).

[0164] FIG. 101A, FIG. 101B, and FIG. 101C depict IRES activities in hepatocytes (FIG. 101A), myotubes (FIG. 101B), and T cells (FIG. 101C) relative to IRESs commonly used (EMCV, CVB3). Each data point indicates the mean expression value of a circular RNA containing a IRES in front of a Gaussia luciferase coding region, wherein each IRES comprises a sequence selected from SEQ ID NOs: 1-2983 and 3282-3287 or a fragment thereof. Circular RNAs containing the IRESs were synthesized in an array format and formulated into LNPs before being transfected into activated primary human T cells, primary human myotubes, and primary human hepatocytes. All data points are normalized to a positive control IRES (SEQ ID NO: 3282).

[0165] FIGS. 102A and 102B are scatter plots showing the relative expression of circular RNA (oRNA) encoding a Gaussia luciferase (gLuc) gene expressed in two of three cell types of interest. (FIG. 102A) Expression of gLuc-encoding oRNA encapsulated in a lipid nanoparticle (LNP) and transfected into primary human hepatocytes (PHH) under transcriptional control of an Internal Ribosomal Entry Site (IRES) sequence listed in Tables 5 and 6 versus gLuc expression in T cells electroporated (EP TCL) with a gLuc-encoding oRNA construct under transcriptional control of the same IRES sequence. A strong correlation is apparent between gLuc expression seen in PPH and EP TCL. (FIG. 102B) Expression of gLuc-encoding oRNA encapsulated in a lipid nanoparticle (LNP) and transfected into primary human myotubes (MYO) under transcriptional control of an IRES sequence listed in Tables 5 and 6 versus gLuc expression in EP TCL with a gLuc-encoding oRNA construct under transcriptional control of the same IRES sequence. A strong correlation is apparent between gLuc expression seen in MYO and EP TCL.

[0166] FIGS. 103A-103C are scatter plots showing the relative expression of oRNA encoding a Firefly luciferase (FLuc) gene against the expression of a gLuc gene expressed in one of three cell types of interest (PHH, MYO, EP TCL). (FIG. 103A) Expression of FLuc-encoding and gLuc-encoding oRNA encapsulated in a LNP and transfected into primary human myotubes under transcriptional control of an IRES sequence listed in Table 7. (FIG. 103B) Expression of FLuc-encoding and gLuc-encoding oRNA encapsulated in a LNP and transfected into primary human hepatocytes under transcriptional control of an IRES sequence listed in Table 8. (FIG. 103C) Expression of FLuc-encoding and gLuc-encoding oRNA transfected into primary human T cells via electroporation and under transcriptional control of an IRES sequence listed in Table 9. In all three cell types, a strong correlation was observed between gLuc and FLuc expression within the same cell type.

[0167] FIG. 104 depicts the estimated number of clones per internal ribosome entry sites (IRES) (“Estimated clones per fragment”) against the number of sequences in each pool (“Pooled Fragments”). There were 11 pools collected. The dotted line in the chart represents the estimated linear relationship between the estimated number of clones per IRES for each sequence.

[0168] FIG. 105 provides a chromatographic overlay of the in vitro transcription reaction (IVT) that resulted from the pooled plasmid output of a IRES library screening, and a standard single plasmid control determined using HPLC analysis.

[0169] FIG. 106 shows chromatograms of circRNA generated via IVT before and after RNase R digestion. FIG. 106A provides a control circRNA before RNase R digestion. FIG. 106B provides the circular RNA post IVT from the pooled plasmid before RNase R digestion. FIG. 106C provides a control circRNA after RNase R digestion. FIG. 106D provides the circular RNA post IVT from the pooled plasmid output post RNase R digestion.

[0170] FIG. 107 illustrates the absorbance profile of the polysome species contained in sucrose gradients collected from cells translating circular RNAs having an internal ribosome entry site (IRES).

[0171] FIG. 108 provides a graphical summary of the circRNAs coded for in a plasmid pool, ranked by polysome load, and determined by sequencing read strength of the RNA's contained in the sucrose gradients of interest.

[0172] FIG. 109 provides a graphical representation of the RNAs coded for in the pool, ranked by the calculated half-life (in hours) of RNAs after filtering for a minimal count in at least 3 timepoints.

[0173] FIG. 110 provides a graphical representation of the RNAs coded for in the pool, ranked by the estimated circularization efficiency, wherein the estimated circularization efficiency was calculated by contrasting the count in the exonuclease treated library to the IVT library after filtering for a minimal count after library size normalization.

[0174] FIG. 111 provides the immunoprecipitation results for circular RNA constructs encoding for dystrophin and having either a V5 or vinculin antibody tag. Circular RNA constructs were derived from an IVT reaction of vectors having IRES of either Constructs 82-87 and 81. Each circular RNA construct was tested twice. FIG. 111A shows the immunoprecipitation imaging of the circular RNA. FIG. 111B shows the area under the curve (AUC) values.

[0175] FIG. 112 provides the immunoprecipitation results for circular RNA constructs encoding for dystrophin and having either a V5 or vinculin antibody tag. Circular RNA constructs were derived from an IVT reaction of Constructs 81, 85, 88-90. Each circular RNA construct was tested twice. FIG. 112A shows the immunoprecipitation imaging of the circular RNA. FIG. 112B shows the area under the curve (AUC) values generated from the immunoprecipitation results.

[0176] FIG. 113 provides the immunoprecipitation results for circular RNA constructs encoding for dystrophin and having either a V5 or vinculin antibody tag. Circular RNA constructs were derived from an IVT reaction of Constructs 81-83, 85-87, 91. Each circular RNA construct was tested twice. FIG. 113A shows the immunoprecipitation imaging of the circular RNA. FIG. 113B shows the area under the curve (AUC) values generated from the immunoprecipitation results.

[0177] FIG. 114 provides the immunoprecipitation results for circular RNA constructs encoding for dystrophin and having either a V5 or vinculin antibody tag. Circular RNA constructs were derived from an IVT reaction of Constructs 81-83, 85-89, 91. FIG. 114A shows the immunoprecipitation imaging of the circular RNA. FIG. 114B shows the area under the curve (AUC) values generated from the immunoprecipitation results.

[0178] FIG. 115 depicts immunoprecipitation image results of the circular RNA encoding dystrophin that was injected into mdx mice in vivo. Gastrocnemius muscle (“Gastroc”) results are on the right and diaphragm results (“Diaphragm”) are on the left of the figure. Circular RNAs further comprised of an a SEQ ID NO: 3283, SEQ ID NO: 3291, SEQ ID NO: 24894, or SEQ ID NO: 24895 IRES.

[0179] FIG. 116 provides the Western Blot results for circular RNA constructs comprising either SEQ ID NO: 3282 (FIG. 116A) and SEQ ID NO: 3291 (FIG. 116B) IRES and encoding a dystrophin protein. FIG. 116C provides the AUC results of the percent dystrophin present.

[0180] FIG. 117 provides the fluc expression and expression decay of circular RNAs comprising a IRES (e.g., SEQ ID NO: 1284 or SEQ ID NO: 24896) in the liver (FIG. 117A) or the spleen (FIG. 117B) of mice post administration of the circular RNA.

[0181] FIG. 118 provides the hEPO expression and expression decay of circular RNAs comprising an IRES (e.g., SEQ ID NO: 1284, SEQ ID NO: 3291 or SEQ ID NO: 24896) post administration of the circular RNA.

[0182] FIG. 119 shows the expression of fluc (FIG. 119A), hEPO (FIG. 119B), or FIX (FIG. 119C) protein expression in primary human hepatocytes post administration of circular RNAs encoding either fluc, hEPO, or FIX and having a SEQ ID NO: 3283, SEQ ID NO: 3282, SEQ ID NO: 1284, SEQ ID NO: 3291 IRES.

### DETAILED DESCRIPTION

[0183] The present disclosure provides, among other things, methods and compositions for treating an autoimmune disorder, deficiency disease, or cancer based on circular RNA therapy. In particular, the present disclosure provides methods for treating an autoimmune disorder, deficiency disease, or cancer by administering to a subject in need of treatment a composition comprising a circular RNA encoding at least one therapeutic protein at an effective dose and an administration interval such that at least one symptom or feature of the relevant disease or disorder is reduced in intensity, severity, or frequency or is delayed in onset.

[0184] As disclosed herein, the improved circular RNA therapy, along with associated compositions and methods, allows for increased circular RNA stability and expression in target cells (e.g., T cells), among other things. In some embodiments, the circular RNA is transcribed from a linear RNA polynucleotide construct comprising enhanced intron elements, enhanced exon elements, and a core functional element. The enhanced intron element, in some embodiments, comprises post splicing group I intron segments, spacers, duplex sequences, affinity sequences, and unique untranslated sequences that allows for optimal circularization. In some embodiments, the enhanced exon element comprises an exon segment, spacers and duplex sequences to aid with the circularization process and for maintaining stability of the circular RNA post circularization. Within the same embodiments, the core functional element includes the essential elements for protein translation of a translation initiation element (TIE), a coding or noncoding element, and a termination sequence (e.g., a stop codon or stop cassette). Together, the enhanced intron elements, enhanced exon elements, and core functional element comprising a coding element provides an optimal circular RNA polynucleotide for encoding a therapeutic protein. In one embodiment, the enhanced intron elements, enhanced exon elements, and core functional element comprising a noncoding element provides an optimal circular RNA polynucleotide for triggering an immune system as an adjuvant.

[0185] Also disclosed herein is a DNA template (e.g., a vector) for making circular RNA. In some embodiments, the DNA template comprises a 3′ enhanced intron segment, a 3′ enhanced exon segment, a core functional element, a 5′ enhanced exon segment, and a 5′ enhanced intron segment. In some embodiments, these elements are positioned in the DNA template in the above order.

[0186] Additional embodiments include circular RNA polynucleotides, including circular RNA polynucleotides (e.g., a circular RNA comprising 3′ enhanced exon element, a core functional element, and a 5′ enhanced exon element) made using the DNA template provided herein, compositions comprising such circular RNA, cells comprising such circular RNA, methods of using and making such DNA template, circular RNA, compositions and cells.

[0187] In some embodiments, provided herein are methods comprising administration of circular RNA polynucleotides provided herein into cells for therapy or production of useful proteins. In some embodiments, the method is advantageous in providing the production of a desired polypeptide inside eukaryotic cells with a longer half-life than linear RNA, due to the resistance of the circular RNA to ribonucleases.

[0188] Circular RNA polynucleotides lack the free ends necessary for exonuclease-mediated degradation, causing them to be resistant to several mechanisms of RNA degradation and granting extended half-lives when compared to an equivalent linear RNA. Circularization may allow for the stabilization of RNA polynucleotides that generally suffer from short half-lives and may improve the overall efficacy of exogenous mRNA in a variety of applications. In an embodiment, the functional half-life of the circular RNA polynucleotides provided herein in eukaryotic cells (e.g., mammalian cells, such as human cells) as assessed by protein synthesis is at least 20 hours (e.g., at least 80 hours).

[0189] Various aspects of the invention are described in detail in the following sections. The use of sections is not meant to limit the invention. Each section can apply to any aspect of the invention. In this application, the use of “or” means “and/or” unless stated otherwise.

### 1. Definitions

[0190] Linear nucleic acid molecules are said to have a “5′-terminus” (or “5′ end”) and a “3′-terminus” (or “3′ end”) because nucleic acid phosphodiester linkages occur at the 5′ carbon and 3′ carbon of the sugar moieties of the substituent mononucleotides. The end nucleotide of a polynucleotide at which a new linkage would be to a 5′ carbon is its 5′ terminal nucleotide. The end nucleotide of a polynucleotide at which a new linkage would be to a 3′ carbon is its 3′ terminal nucleotide. A “terminal nucleotide,” as used herein, is the nucleotide at the end position of the 3′- or 5′-terminus.

[0191] As used herein, the term “3′ group I intron segment” or “3′ group I intron fragment” refers to a sequence with 75% or higher similarity to the 3′-proximal end of a natural group I intron including the splice site dinucleotide and optionally a stretch of natural exon sequence. In some embodiments, a circular RNA comprises a post splicing 3′ group I intron fragment. In some embodiments, the post splicing 3′ group I intron fragment in the circular RNA is a post splicing stretch of exon sequence. In some embodiments, the circular RNA further comprises a desired expression sequence, and the post splicing stretch of exon sequence is (e.g., designed) to be a portion of the desired expression sequence, contiguous with the desired expression sequence, and/or in frame with the desired expression sequence.

[0192] As used herein, the term “5′ group I intron segment” or “5′ group I intron fragment” refers to a sequence with 75% or higher similarity to the 5′-proximal end of a natural group I intron including the splice site dinucleotide and optionally a stretch of natural exon sequence. In some embodiments, a circular RNA comprises a post splicing 5′ group I intron fragment. In some embodiments, the post splicing 5′ group I intron fragment in the circular RNA is a post splicing stretch of exon sequence. In some embodiments, the circular RNA further comprises a desired expression sequence, and the post splicing stretch of exon sequence is (e.g., designed) to be a portion of the desired expression sequence, contiguous with the desired expression sequence, and/or in frame with the desired expression sequence.

[0193] As used herein, the term “permutation site” refers to the site in a group I intron where a cut is made prior to permutation of the intron. This cut generates 3′ and 5′ group I intron segments that are permuted to be on either side of a stretch of precursor RNA to be circularized.

[0194] As used herein, the singular forms “a,” “an,” and “the” include plural referents unless the content clearly dictates otherwise. Thus, for example, reference to “a cell” includes combinations of two or more cells, or entire cultures of cells; reference to “a polynucleotide” includes, as a practical matter, many copies of that polynucleotide.

[0195] Unless specifically stated or obvious from context, as used herein, the term “about,” is understood as within a range of normal tolerance in the art, for example within 2 standard deviations of the mean. “About” can be understood as within 10%, 9%, 8%, 7%, 6%, 5%, 4%, 3%, 2%, 1%, 0.9%, 0.8%, 0.7%, 0.6%, 0.5%, 0.4%, 0.3%, 0.2%, 0.1%, 0.09%, 0.08%, 0.07%, 0.06%, 0.05%, 0.04%, 0.03%, 0.02%, or 0.01% of the stated value. Unless otherwise clear from the context, all numerical values provided herein are modified by the term “about.”

[0196] As used herein, an “affinity sequence” or “affinity tag” is a region of a polynucleotide sequence ranging from one (1) nucleotide to hundreds or thousands of nucleotides containing a repeated set of nucleotides for the purposes of aiding purification of a polynucleotide sequence. For example, an affinity sequence may comprise, but is not limited to, a polyA or polyAC sequence. In some embodiments, affinity tags are used in purification methods, referred to herein as “affinity-purification,” in which selective binding of a binding agent to molecules comprising an affinity tag facilitates separation from molecules that do not comprise an affinity tag. In some embodiments, an affinity-purification method is a “negative selection” purification method, in which unwanted species, such as linear RNA, are selectively bound and removed and wanted species, such as circular RNA, are eluted and separated from unwanted species.

[0197] The term “antibody” (Ab) includes, without limitation, a glycoprotein immunoglobulin which binds specifically to an antigen. In general, an antibody may comprise at least two heavy (H) chains and two light (L) chains interconnected by disulfide bonds, or an antigen-binding molecule thereof. Each H chain may comprise a heavy chain variable region (abbreviated herein as VH) and a heavy chain constant region. The heavy chain constant region can comprise three constant domains, CH1, CH2 and CH3. Each light chain can comprise a light chain variable region (abbreviated herein as VL) and a light chain constant region. The light chain constant region can comprise one constant domain, CL. The VH and VL regions may be further subdivided into regions of hypervariability, termed complementarity determining regions (CDRs), interspersed with regions that are more conserved, termed framework regions (FR). Each VH and VL may comprise three CDRs and four FRs, arranged from amino-terminus to carboxy-terminus in the following order: FR1, CDR1, FR2, CDR2, FR3, CDR3, and FR4. The variable regions of the heavy and light chains contain a binding domain that interacts with an antigen. The constant regions of the Abs may mediate the binding of the immunoglobulin to host tissues or factors, including various cells of the immune system (e.g., effector cells) and the first component of the classical complement system. Antibodies may include, for example, monoclonal antibodies, recombinantly produced antibodies, monospecific antibodies, multispecific antibodies (including bispecific antibodies), human antibodies, engineered antibodies, humanized antibodies, chimeric antibodies, immunoglobulins, synthetic antibodies, tetrameric antibodies comprising two heavy chain and two light chain molecules, an antibody light chain monomer, an antibody heavy chain monomer, an antibody light chain dimer, an antibody heavy chain dimer, an antibody light chain-antibody heavy chain pair, intrabodies, antibody fusions (sometimes referred to herein as “antibody conjugates”), heteroconjugate antibodies, single domain antibodies, monovalent antibodies, single chain antibodies or single-chain variable fragments (scFv), camelized antibodies, affybodies, Fab fragments, F(ab′)2 fragments, disulfide-linked variable fragments (sdFv), anti-idiotypic (anti-id) antibodies (including, e.g., anti-anti-Id antibodies), minibodies, domain antibodies, synthetic antibodies (sometimes referred to herein as “antibody mimetics”), and antigen-binding fragments of any of the above. In some embodiments, antibodies described herein refer to polyclonal antibody populations.

[0198] An immunoglobulin may derive from any of the commonly known isotypes, including but not limited to IgA, secretory IgA, IgG and IgM. IgG subclasses are also well known to those in the art and include but are not limited to human IgG1, IgG2, IgG3 and IgG4. “Isotype” refers to the Ab class or subclass (e.g., IgM or IgG1) that is encoded by the heavy chain constant region genes. The term “antibody” includes, by way of example, both naturally occurring and non-naturally occurring Abs; monoclonal and polyclonal Abs; chimeric and humanized Abs; human or nonhuman Abs; wholly synthetic Abs; and single chain Abs. A nonhuman Ab may be humanized by recombinant methods to reduce its immunogenicity in humans. Where not expressly stated, and unless the context indicates otherwise, the term “antibody” also includes an antigen-binding fragment or an antigen-binding portion of any of the aforementioned immunoglobulins, and includes a monovalent and a divalent fragment or portion, and a single chain Ab.

[0199] A number of definitions of the CDRs are commonly in use: Kabat numbering, Chothia numbering, AbM numbering, or contact numbering. The AbM definition is a compromise between the two used by Oxford Molecular's AbM antibody modelling software. The contact definition is based on an analysis of the available complex crystal structures. The term “Kabat numbering” and like terms are recognized in the art and refer to a system of numbering amino acid residues in the heavy and light chain variable regions of an antibody, or an antigen-binding molecule thereof. In certain aspects, the CDRs of an antibody may be determined according to the Kabat numbering system (see, e.g., Kabat EA & Wu TT (1971) Ann NY Acad Sci 190: 382-391 and Kabat E A et al., (1991) Sequences of Proteins of Immunological Interest, Fifth Edition, U.S. Department of Health and Human Services, NIH Publication No. 91-3242). Using the Kabat numbering system, CDRs within an antibody heavy chain molecule are typically present at amino acid positions 31 to 35, which optionally may include one or two additional amino acids, following 35 (referred to in the Kabat numbering scheme as 35A and 35B) (CDR1), amino acid positions 50 to 65 (CDR2), and amino acid positions 95 to 102 (CDR3). Using the Kabat numbering system, CDRs within an antibody light chain molecule are typically present at amino acid positions 24 to 34 (CDR1), amino acid positions 50 to 56 (CDR2), and amino acid positions 89 to 97 (CDR3). In a specific embodiment, the CDRs of the antibodies described herein have been determined according to the Kabat numbering scheme. In certain aspects, the CDRs of an antibody may be determined according to the Chothia numbering scheme, which refers to the location of immunoglobulin structural loops (see, e.g., Chothia C & Lesk AM, (1987), J Mol Biol 196: 901-917; A1-Lazikani B et al, (1997) J Mol Biol 273: 927-948; Chothia C et al., (1992) J Mol Biol 227: 799-817; Tramontano A et al, (1990) J Mol Biol 215(1): 175-82; and U.S. Pat. No. 7,709,226). Typically, when using the Kabat numbering convention, the Chothia CDR-H1 loop is present at heavy chain amino acids 26 to 32, 33, or 34, the Chothia CDR-H2 loop is present at heavy chain amino acids 52 to 56, and the Chothia CDR-H3 loop is present at heavy chain amino acids 95 to 102, while the Chothia CDR-L1 loop is present at light chain amino acids 24 to 34, the Chothia CDR-L2 loop is present at light chain amino acids 50 to 56, and the Chothia CDR-L3 loop is present at light chain amino acids 89 to 97. The end of the Chothia CDR-HI loop when numbered using the Kabat numbering convention varies between H32 and H34 depending on the length of the loop (this is because the Kabat numbering scheme places the insertions at H35A and H35B; if neither 35A nor 35B is present, the loop ends at 32; if only 35a is present, the loop ends at 33; if both 35A and 35B are present, the loop ends at 34). In a specific embodiment, the CDRs of the antibodies described herein have been determined according to the Chothia numbering scheme.

[0200] As used herein, the term “variable region” or “variable domain” is used interchangeably and are common in the art. The variable region typically refers to a portion of an antibody, generally, a portion of a light or heavy chain, typically about the amino-terminal 110 to 120 amino acids in the mature heavy chain and about 90 to 115 amino acids in the mature light chain, which differ extensively in sequence among antibodies and are used in the binding and specificity of a particular antibody for its particular antigen. The variability in sequence is concentrated in those regions called complementarity determining regions (CDRs) while the more highly conserved regions in the variable domain are called framework regions (FR). Without wishing to be bound by any particular mechanism or theory, it is believed that the CDRs of the light and heavy chains are primarily responsible for the interaction and specificity of the antibody with antigen. In some embodiments, the variable region is a human variable region. In some embodiments, the variable region comprises rodent or murine CDRs and human framework regions (FRs). In particular embodiments, the variable region is a primate (e.g., non-human primate) variable region. In some embodiments, the variable region comprises rodent or murine CDRs and primate (e.g., non-human primate) framework regions (FRs). The terms “VL” and “VL domain” are used interchangeably to refer to the light chain variable region of an antibody or an antigen-binding molecule thereof. The terms “VH” and “VH domain” are used interchangeably to refer to the heavy chain variable region of an antibody or an antigen-binding molecule thereof.

[0201] As used herein, the terms “constant region” and “constant domain” are interchangeable and have a meaning common in the art. The constant region is an antibody portion, e.g., a carboxyl terminal portion of a light and/or heavy chain which is not directly involved in binding of an antibody to an antigen but which may exhibit various effector functions, such as interaction with the Fc receptor. The constant region of an immunoglobulin molecule generally has a more conserved amino acid sequence relative to an immunoglobulin variable domain.

[0202] As used herein, “aptamer” refers in general to either an oligonucleotide of a single defined sequence or a mixture of said nucleotides, wherein the mixture retains the properties of binding specifically to the target molecule (e.g., eukaryotic initiation factor, 40S ribosome, polyC binding protein, polyA binding protein, polypyrimidine tract-binding protein, argonaute protein family, Heterogeneous nuclear ribonucleoprotein K and La and related RNA-binding protein). Thus, as used herein “aptamer” denotes both singular and plural sequences of nucleotides, as defined hereinabove. The term “aptamer” is meant to refer to a single- or double-stranded nucleic acid which is capable of binding to a protein or other molecule. In general, aptamers preferably comprise about 10 to about 100 nucleotides, preferably about 15 to about 40 nucleotides, more preferably about 20 to about 40 nucleotides, in that oligonucleotides of a length that falls within these ranges are readily prepared by conventional techniques. Optionally, aptamers can further comprise a minimum of approximately 6 nucleotides, preferably 10, and more preferably 14 or 15 nucleotides, that are necessary to effect specific binding. As used herein, the phrase “aptamer complex” refers to a sequence comprising two or more aptamers operably connected to one another. An aptamer complex can include two or more aptamer complexes the sequences of which are contiguous with one another or may have one or more intervening nucleotides between each of the two or more aptamers.

[0203] As used herein, “autoimmunity” is defined as persistent and progressive immune reactions to non-infectious self-antigens, as distinct from infectious non self-antigens from bacterial, viral, fungal, or parasitic organisms which invade and persist within mammals and humans. Autoimmune conditions include scleroderma, Grave's disease, Crohn's disease, Sjorgen's disease, multiple sclerosis, Hashimoto's disease, psoriasis, myasthenia gravis, autoimmune polyendocrinopathy syndromes, Type I diabetes mellitus (TIDM), autoimmune gastritis, autoimmune uveoretinitis, polymyositis, colitis, and thyroiditis, as well as in the generalized autoimmune diseases typified by human Lupus. “Autoantigen” or “self-antigen” as used herein refers to an antigen or epitope which is native to the mammal and which is immunogenic in said mammal.

[0204] A “cancer” refers to a broad group of various diseases characterized by the uncontrolled growth of abnormal cells in the body. Unregulated cell division and growth results in the formation of malignant tumors that invade neighboring tissues and may also metastasize to distant parts of the body through the lymphatic system or bloodstream. A “cancer” or “cancer tissue” may include a tumor. The particular cancer may be responsive to chemo- or radiation therapy or the cancer may be refractory. A refractory cancer refers to a cancer that is not amenable to surgical intervention and the cancer is either initially unresponsive to chemo- or radiation therapy or the cancer becomes unresponsive over time.

[0205] As used herein, the terms “circRNA,” “circular polyribonucleotide,” “circular RNA,” “circularized RNA,” and “oRNA” are used interchangeably and refer to a single-stranded RNA polynucleotide wherein the 3′ and 5′ ends that are normally present in a linear RNA polynucleotide have been (e.g., covalently) joined together. As used herein, such terms also include preparations comprising circRNAs. Also encompassed within the meaning of these terms are precursor RNA polynucleotides capable of circularizing to produce a covalently-closed circular RNA molecule. Such precursor RNA polynucleotides may include sequence elements that mediate or facilitate circularization of the polynucleotide, including group I intron segments (e.g., 3′ and 5′ group I intron segments), spacer sequences, internal duplex regions, polyA sequences, polyC sequences, polyAC sequences, polypyrimidine tract, among others.

[0206] As used herein, the term “circularization efficiency” refers to a measurement of the rate of formation of amount of resultant circular polyribonucleotide as compared to its linear starting material.

[0207] The expression sequences in the polynucleotide construct may be separated by a “cleavage site” sequence which enables polypeptides encoded by the expression sequences, once translated, to be expressed separately by the cell. A “self-cleaving peptide” refers to a peptide which is translated without a peptide bond between two adjacent amino acids, or functions such that when the polypeptide comprising the proteins and the self-cleaving peptide is produced, it is immediately cleaved or separated into distinct and discrete first and second polypeptides without the need for any external cleavage activity.

[0208] As used herein, “coding element,” “coding sequence,” “coding nucleic acid,” or “coding region” is region located within the expression sequence and encodings for one or more proteins or polypeptides (e.g., therapeutic protein). As used herein, a “noncoding element,” “noncoding sequence,” “non-coding nucleic acid,” or “noncoding nucleic acid” is a region located within the expression sequence. This sequence, but itself does not encode for a protein or polypeptide, but may have other regulatory functions, including but not limited, allow the overall polynucleotide to act as a biomarker or adjuvant to a specific cell.

[0209] As used herein, the term “DNA template” refers to a DNA sequence capable of transcribing a linear RNA polynucleotide. For example, but not intending to be limiting, a DNA template may include a DNA vector, PCR product or plasmid.

[0210] As used herein, the terms “duplexed,” “double-stranded,” and “hybridized” are used interchangeably and refer to double-stranded nucleic acids formed by hybridization of two single strands of nucleic acids containing complementary sequences. Sequences of the two single-stranded nucleic acids can be fully complementary or partially complementary. In some embodiments, a nucleic acid provided herein may be fully double-stranded or partially double-stranded. In most cases, genomic DNA is double-stranded.

[0211] As used herein, two “duplex sequences,” “duplex forming sequences,” “duplex region,” “duplex forming regions,” “homology arms,” or “homology regions,” complement, or are complementary, fully or partially, to one another when the two regions share a sufficient level of sequence identity to one another's reverse complement to act as substrates for a hybridization reaction. In some embodiments, two duplex forming sequences are thermodynamically favored to cross-pair in a sequence specific interaction. As used herein, polynucleotide sequences have “homology” when they are either identical or share sequence identity to a reverse complement or “complementary” sequence. The percent sequence identity between a homology region and a counterpart homology region's reverse complement can be any percent of sequence identity that allows for hybridization to occur. In some embodiments, an internal duplex forming region of a polynucleotide disclosed herein is capable of forming a duplex with another internal duplex forming region and does not form a duplex with an external duplex forming region.

[0212] As used herein, the term “encode” refers broadly to any process whereby the information in a polymeric macromolecule is used to direct the production of a second molecule that is different from the first. The second molecule may have a chemical structure that is different from the chemical nature of the first molecule. For example, a DNA template (e.g., a DNA vector) may encode a RNA polynucleotide; a precursor RNA polynucleotide (e.g., a linear precursor RNA polynucleotide) may encode a mature RNA polynucleotide (e.g., a circular RNA polynucleotide).

[0213] As used herein, the term “expression sequence” refers to a nucleic acid sequence that encodes a product, e.g., a peptide or polypeptide, regulatory nucleic acid, or non-coding nucleic acid. An exemplary expression sequence that codes for a peptide or polypeptide can comprise a plurality of nucleotide triads, each of which can code for an amino acid and is termed as a “codon.”

[0214] As used herein, an “internal ribosome entry site” or “IRES” refers to an RNA sequence or structural element ranging in size from 10 nt to 1000 nt or more, capable of initiating translation of a polypeptide in the absence of a typical RNA cap structure. An IRES is typically about 500 nt to about 700 nt in length. The IRES may comprise naturally occurring sequences and/or synthetic, non-naturally occurring sequences.

[0215] As used herein, a “leading untranslated sequence” is a region of polynucleotide sequences ranging from 1 nucleotide to hundreds of nucleotides located at the upmost 5′ end of a polynucleotide sequence. The sequences can be defined or can be random. An leading untranslated sequence is non-coding. As used herein, a “terminal untranslated sequence” is a region of polynucleotide sequences ranging from 1 nucleotide to hundreds of nucleotides located at the downmost 3′ end of a polynucleotide sequence. The sequences can be defined or can be random. A terminal untranslated sequence is non-coding.

[0216] As used herein, a “miRNA site” refers to a stretch of nucleotides within a polynucleotide that is capable of forming a duplex with at least 8 nucleotides of a natural miRNA sequence.

[0217] The term “nucleotide” refers to a ribonucleotide, a deoxyribonucleotide, a modified form thereof, or an analog thereof. Nucleotides include species that comprise purines, e.g., adenine, hypoxanthine, guanine, and their derivatives and analogs, as well as pyrimidines, e.g., cytosine, uracil, thymine, and their derivatives and analogs. Nucleotide analogs include nucleotides having modifications in the chemical structure of the base, sugar and/or phosphate, including, but not limited to, 5′-position pyrimidine modifications, 8′-position purine modifications, modifications at cytosine exocyclic amines, and substitution of 5-bromo-uracil; and 2′-position sugar modifications, including but not limited to, sugar-modified ribonucleotides in which the 2′-OH is replaced by a group such as an H, OR, R, halo, SH, SR, NH₂, NHR, NR₂, or CN, wherein R is an alkyl moiety as defined herein. Nucleotide analogs are also meant to include nucleotides with bases such as inosine, queuosine, xanthine; sugars such as 2′-methyl ribose; non-natural phosphodiester linkages such as methylphosphonate, phosphorothioate and peptide linkages. Nucleotide analogs include 5-methoxyuridine, 1-methylpseudouridine, and 6-methyladenosine.

[0218] All nucleotide sequences disclosed herein can represent an RNA sequence or a corresponding DNA sequence. It is understood that deoxythymidine (dT or T) in a DNA is transcribed into a uridine (U) in an RNA. As such, “T” and “U” are used interchangeably herein in nucleotide sequences.

[0219] The terms “nucleic acid” and “polynucleotide” are used interchangeably herein to describe a polymer of any length, e.g., greater than about 2 bases, greater than about 10 bases, greater than about 100 bases, greater than about 500 bases, greater than 1000 bases, or up to about 10,000 or more bases, composed of nucleotides, e.g., deoxyribonucleotides or ribonucleotides, and may be produced enzymatically or synthetically (e.g., as described in U.S. Pat. No. 5,948,902 and the references cited therein), which can hybridize with naturally occurring nucleic acids in a sequence specific manner analogous to that of two naturally occurring nucleic acids, e.g., can participate in Watson-Crick base pairing interactions. An “oligonucleotide” is a polynucleotide comprising fewer than 1000 nucleotides, such as a polynucleotide comprising fewer than 500 nucleotides or fewer than 100 nucleotides. Naturally occurring nucleic acids are comprised of nucleotides, including guanine, cytosine, adenine, thymine, and uracil containing nucleotides (G, C, A, T, and U respectively). As used herein, “polyA” means a polynucleotide or a portion of a polynucleotide consisting of nucleotides comprising adenine. As used herein, “polyT” means a polynucleotide or a portion of a polynucleotide consisting of nucleotides comprising thymine. As used herein, “polyAC” means a polynucleotide or a portion of a polynucleotide consisting of nucleotides comprising adenine or cytosine.

[0220] As used herein, the term “ribosomal skipping element” refers to a nucleotide sequence encoding a short peptide sequence capable of causing generation of two peptide chains from translation of one RNA molecule. While not wishing to be bound by theory, it is hypothesized that ribosomal skipping elements function by (1) terminating translation of the first peptide chain and re-initiating translation of the second peptide chain; or (2) cleavage of a peptide bond in the peptide sequence encoded by the ribosomal skipping element by an intrinsic protease activity of the encoded peptide, or by another protease in the environment (e.g., cytosol).

[0221] The term “sequence identity,” as used herein, refers to the extent that sequences are identical on a nucleotide-by-nucleotide basis or an amino acid-by-amino acid basis over a window of comparison. Thus, a “percentage of sequence identity” may be calculated by comparing two optimally aligned sequences over the window of comparison, determining the number of positions at which the identical nucleic acid base (e.g., A, T, C, G, I) or the identical amino acid residue (e.g., Ala, Pro, Ser, Thr, Gly, Val, Leu, Ile, Phe, Tyr, Trp, Lys, Arg, His, Asp, Glu, Asn, Gln, Cys and Met) occurs in both sequences to yield the number of matched positions, dividing the number of matched positions by the total number of positions in the window of comparison (i.e., the window size), and multiplying the result by 100 to yield the percentage of sequence identity. Included are nucleotides and polypeptides having at least about 50%, 55%, 60%, 65%, 70%, 75%, 80%, 85%, 90%, 95%, 96%, 97%, 98%, 99% or 100% sequence identity to any of the reference sequences described herein, typically where the polypeptide variant maintains at least one biological activity of the reference polypeptide.

[0222] As used herein, a “spacer” refers to a region of a polynucleotide sequence ranging from 1 nucleotide to hundreds or thousands of nucleotides separating two other elements along a polynucleotide sequence. The sequences can be defined or can be random. A spacer is typically non-coding. In some embodiments, spacers include duplex regions.

[0223] As used herein, the term “stop cassette” refers to one or more stop codons present in two or more open reading frames.

[0224] As used herein, the term “splice site” refers to a dinucleotide that is partially or fully included in a group I intron and between which a phosphodiester bond is cleaved during RNA circularization.

[0225] As used herein, the term “therapeutic protein” refers to any protein that, when administered to a subject directly or indirectly in the form of a translated nucleic acid, has a therapeutic, diagnostic, and/or prophylactic effect and/or elicits a desired biological and/or pharmacological effect.

[0226] As used herein, the terms “transfect” or “transfection” refer to the intracellular introduction of one or more encapsulated materials (e.g., nucleic acids and/or polynucleotides) into a cell, or preferably into a target cell. The term “transfection efficiency” refers to the relative amount of such encapsulated material (e.g., polynucleotides) up-taken by, introduced into and/or expressed by the target cell which is subject to transfection. In some embodiments, transfection efficiency may be estimated by the amount of a reporter polynucleotide product produced by the target cells following transfection. In some embodiments, a transfer vehicle has high transfection efficiency. In some embodiments, a transfer vehicle has at least about 10%, 20%, 30%, 40%, 50%, 60%, 70%, 80%, or 90% transfection efficiency.

[0227] As used herein, “transfer vehicle” includes any of the standard pharmaceutical carriers, diluents, excipients, and the like, which are generally intended for use in connection with the administration of biologically active agents, including nucleic acids. In certain embodiments of the present invention, the transfer vehicles (e.g., lipid nanoparticles) are prepared to encapsulate one or more materials or therapeutic agents (e.g., circRNA). The process of incorporating a desired therapeutic agent (e.g., circRNA) into a transfer vehicle is referred to herein as or “loading” or “encapsulating” (Lasic, et al., FEBS Lett., 312: 255-258, 1992). The transfer vehicle-loaded or -encapsulated materials (e.g., circRNA) may be completely or partially located in the interior space of the transfer vehicle, within a bilayer membrane of the transfer vehicle, or associated with the exterior surface of the transfer vehicle.

[0228] The terms “treat,” and “prevent” as well as words stemming therefrom, as used herein, do not necessarily imply 100% or complete treatment or prevention. Rather, there are varying degrees of treatment or prevention of which one of ordinary skill in the art recognizes as having a potential benefit or therapeutic effect. The treatment or prevention provided by the method disclosed herein can include treatment or prevention of one or more conditions or symptoms of the disease. Also, for purposes herein, “prevention” can encompass delaying the onset of the disease, or a symptom or condition thereof. As used herein, the terms “upstream” and “downstream” refer to relative positions of genetic code, e.g., nucleotides, sequence elements, in polynucleotide sequences. In some embodiments, in an RNA polynucleotide, upstream is toward the 5′ end of the polynucleotide and downstream is toward the 3′ end. In some embodiments, in a DNA polynucleotide, upstream is toward the 5′ end of the coding strand for the gene in question and downstream is toward the 3′ end. A person of ordinary skill in the art would readily understand the meaning of “upstream” and “downstream” sequences as used in the present disclosure.

### A. Lipid Definitions

[0229] As used herein, the phrase “biodegradable lipid” or “degradable lipid” refers to any of a number of lipid species that are broken down in a host environment on the order of minutes, hours, or days ideally making them less toxic and unlikely to accumulate in a host over time. Common modifications to lipids include ester bonds, and disulfide bonds among others to increase the biodegradability of a lipid.

[0230] As used herein, the phrase “biodegradable PEG lipid” or “degradable PEG lipid” refers to any of a number of lipid species where the PEG molecules are cleaved from the lipid in a host environment on the order of minutes, hours, or days ideally making them less immunogenic. Common modifications to PEG lipids include ester bonds, and disulfide bonds among others to increase the biodegradability of a lipid.

[0231] As used herein, the term “cationic lipid” or “ionizable lipid” refers to any of a number of lipid species that carry a net positive charge at a selected pH, such as physiological pH 4 and a neutral charge at other pHs such as physiological pH 7.

[0232] As used herein, the term “PEG” means any polyethylene glycol or other polyalkylene ether polymer.

[0233] As generally defined herein, a “PEG-OH lipid” (also referred to herein as “hydroxy-PEGylated lipid”) is a PEGylated lipid having one or more hydroxyl (—OH) groups on the lipid.

[0234] As used herein, a “phospholipid” is a lipid that includes a phosphate moiety and one or more carbon chains, such as unsaturated fatty acid chains.

[0235] As used herein, the term “structural lipid” refers to sterols and also to lipids containing sterol moieties. As defined herein, “sterols” are a subgroup of steroids consisting of steroid alcohols.

[0236] The terms “head-group” and “tail-group,” when used herein to describe the compounds (e.g., lipids) of the present invention, and in particular functional groups that are comprised in such compounds, are used for ease of reference to describe the orientation of such compounds or of one or more functional groups relative to other functional groups. For example, in certain embodiments, a hydrophilic head-group (e.g., guanidinium) is bound (e.g., by one or more of hydrogen-bonds, van der Waals' forces, ionic interactions and covalent bonds) to a cleavable functional group (e.g., a disulfide group), which in turn is bound to a hydrophobic tail-group (e.g., cholesterol). In certain embodiments, the compounds disclosed herein comprise, for example, at least one hydrophilic head-group and at least one hydrophobic tail-group, each bound to at least one cleavable group, thereby rendering such compounds amphiphilic.

[0237] As used herein, the term “amphiphilic” means the ability to dissolve in both polar (e.g., water) and non-polar (e.g., lipid) environments. For example, in certain embodiments, the compounds (e.g., lipids) disclosed herein comprise at least one lipophilic tail-group (e.g., cholesterol or a C₆₋₂₀ alkyl) and at least one hydrophilic head-group (e.g., imidazole), each bound to a cleavable group (e.g., disulfide).

[0238] As used herein, the term “hydrophilic” is used to indicate in qualitative terms that a functional group is water-preferring, and typically such groups are water-soluble. For example, disclosed herein are compounds (e.g., ionizable lipids) that comprise a cleavable group (e.g., a disulfide (S—S) group) bound to one or more hydrophilic groups (e.g., a hydrophilic head-group), wherein such hydrophilic groups comprise or are selected from the group consisting of imidazole, guanidinium, amino, imine, enamine, an optionally-substituted alkyl amino (e.g., an alkyl amino such as dimethylamino) and pyridyl.

[0239] As used herein, the term “hydrophobic” is used to indicate in qualitative terms that a functional group is water-avoiding, and typically such groups are not water soluble. In certain embodiments, at least one of the functional groups of moieties that comprise the compounds disclosed herein is hydrophobic in nature (e.g., a hydrophobic tail-group comprising a naturally occurring lipid such as cholesterol). For example, disclosed herein are compounds (e.g., ionizable lipids) that comprise a cleavable functional group (e.g., a disulfide (S—S) group) bound to one or more hydrophobic groups, wherein such hydrophobic groups may comprise, or may be selected from, one or more naturally occurring lipids such as cholesterol, an optionally substituted, variably saturated or unsaturated C₆-C₂₀ alkyl, and/or an optionally substituted, variably saturated or unsaturated C₆-C₂₀ acyl.

[0240] As used herein, the term “liposome” generally refers to a vesicle composed of lipids (e.g., amphiphilic lipids) arranged in one or more spherical bilayer or bilayers. Such liposomes may be unilamellar or multilamellar vesicles which have a membrane formed from a lipophilic material and an aqueous interior that contains the encapsulated circRNA to be delivered to one or more target cells, tissues and organs.

[0241] As used herein, the phrase “lipid nanoparticle” refers to a transfer vehicle comprising one or more cationic or ionizable lipids, stabilizing lipids, structural lipids, and helper lipids.

[0242] In certain embodiments, the compositions described herein comprise one or more liposomes or lipid nanoparticles. Examples of suitable lipids (e.g., ionizable lipids) that may be used to form the liposomes and lipid nanoparticles contemplated include one or more of the compounds disclosed herein.

[0243] In some embodiments, a lipid, e.g., an ionizable lipid, disclosed herein comprises one or more cleavable groups. The terms “cleave” and “cleavable” are used herein to mean that one or more chemical bonds (e.g., one or more of covalent bonds, hydrogen-bonds, van der Waals' forces and/or ionic interactions) between atoms in or adjacent to the subject functional group are broken (e.g., hydrolyzed) or are capable of being broken upon exposure to selected conditions (e.g., upon exposure to enzymatic conditions). In certain embodiments, the cleavable group is a disulfide functional group, and in particular embodiments is a disulfide group that is capable of being cleaved upon exposure to selected biological conditions (e.g., intracellular conditions). In certain embodiments, the cleavable group is an ester functional group that is capable of being cleaved upon exposure to selected biological conditions. For example, the disulfide groups may be cleaved enzymatically or by a hydrolysis, oxidation or reduction reaction. Upon cleavage of such disulfide functional group, the one or more functional moieties or groups (e.g., one or more of a head-group and/or a tail-group) that are bound thereto may be liberated. Exemplary cleavable groups may include, but are not limited to, disulfide groups, ester groups, ether groups, and any derivatives thereof (e.g., alkyl and aryl esters). In certain embodiments, the cleavable group is not an ester group or an ether group. In some embodiments, a cleavable group is bound (e.g., bound by one or more of hydrogen-bonds, van der Waals' forces, ionic interactions and covalent bonds) to one or more functional moieties or groups (e.g., at least one head-group and at least one tail-group). In certain embodiments, at least one of the functional moieties or groups is hydrophilic (e.g., a hydrophilic head-group comprising one or more of imidazole, guanidinium, amino, imine, enamine, optionally-substituted alkyl amino and pyridyl).

### B. Chemical Definitions

[0244] When describing the invention, which may include compounds and pharmaceutically acceptable salts thereof, pharmaceutical compositions containing such compounds and methods of using such compounds and compositions, the following terms, if present, have the following meanings unless otherwise indicated. It should also be understood that when described herein any of the moieties defined forth below may be substituted with a variety of substituents, and that the respective definitions are intended to include such substituted moieties within their scope as set out below. Unless otherwise stated, the term “substituted” is to be defined as set out below. It should be further understood that the terms “groups” and “radicals” can be considered interchangeable when used herein.

[0245] Compound described herein may also comprise one or more isotopic substitutions. For example, H may be in any isotopic form, including ¹H, ²H (D or deuterium), and ³H (T or tritium); C may be in any isotopic form, including ¹²C, ¹³C, and ¹⁴C; O may be in any isotopic form, including ¹⁶O and ¹⁸O; F may be in any isotopic form, including ¹⁸F and ¹⁹F; and the like.

[0246] When a range of values is listed, it is intended to encompass each value and sub-range within the range. For example, “C₁₋₆ alkyl” is intended to encompass, C₁, C₂, C₃, C₄, C₅, C₆, C₁₋₆, C₁₋₅, C₁₋₄, C₁₋₃, C₁₋₂, C₂₋₆, C₂₋₅, C₂₋₄, C₂₋₃, C₃₋₆, C₃₋₅, C₃₋₄, C₄₋₆, C₄₋₅, and C₅₋₆ alkyl.

[0247] As used herein, the term “alkyl” refers to both straight and branched chain C₁₋₄₀ hydrocarbons (e.g., C₆₋₂₀ hydrocarbons), and include both saturated and unsaturated hydrocarbons. In certain embodiments, the alkyl may comprise one or more cyclic alkyls and/or one or more heteroatoms such as oxygen, nitrogen, or sulfur and may optionally be substituted with substituents (e.g., one or more of alkyl, halo, alkoxyl, hydroxy, amino, aryl, ether, ester or amide). In certain embodiments, a contemplated alkyl includes (9Z,12Z)-octadeca-9,12-dien. The use of designations such as, for example, “C₆₋₂₀” is intended to refer to an alkyl (e.g., straight or branched chain and inclusive of alkenes and alkyls) having the recited range carbon atoms. In some embodiments, an alkyl group has 1 to 10 carbon atoms (“C₁₋₁₀ alkyl”). In some embodiments, an alkyl group has 1 to 9 carbon atoms (“C₁₋₉ alkyl”). In some embodiments, an alkyl group has 1 to 8 carbon atoms (“C₁₋₈ alkyl”). In some embodiments, an alkyl group has 1 to 7 carbon atoms (“C₁₋₇ alkyl”). In some embodiments, an alkyl group has 1 to 6 carbon atoms (“C₁₋₆ alkyl”). In some embodiments, an alkyl group has 1 to 5 carbon atoms (“C₁₋₅ alkyl”). In some embodiments, an alkyl group has 1 to 4 carbon atoms (“C₁₋₄ alkyl”). In some embodiments, an alkyl group has 1 to 3 carbon atoms (“C₁₋₃ alkyl”). In some embodiments, an alkyl group has 1 to 2 carbon atoms (“C₁₋₂ alkyl”). In some embodiments, an alkyl group has 1 carbon atom (“C₁ alkyl”). Examples of C₁₋₆ alkyl groups include methyl, ethyl, propyl, isopropyl, butyl, isobutyl, pentyl, hexyl, and the like.

[0248] As used herein, “alkenyl” refers to a radical of a straight-chain or branched hydrocarbon group having from 2 to 20 carbon atoms, one or more carbon-carbon double bonds (e.g., 1, 2, 3, or 4 carbon-carbon double bonds), and optionally one or more carbon-carbon triple bonds (e.g., 1, 2, 3, or 4 carbon-carbon triple bonds) (“C₂₋₂₀ alkenyl”). In certain embodiments, alkenyl does not contain any triple bonds. In some embodiments, an alkenyl group has 2 to 10 carbon atoms (“C₂₋₁₀ alkenyl”). In some embodiments, an alkenyl group has 2 to 9 carbon atoms (“C₂₋₉ alkenyl”). In some embodiments, an alkenyl group has 2 to 8 carbon atoms (“C₂₋₈ alkenyl”). In some embodiments, an alkenyl group has 2 to 7 carbon atoms (“C₂₋₇ alkenyl”). In some embodiments, an alkenyl group has 2 to 6 carbon atoms (“C₂-6 alkenyl”). In some embodiments, an alkenyl group has 2 to 5 carbon atoms (“C₂₋₅ alkenyl”). In some embodiments, an alkenyl group has 2 to 4 carbon atoms (“C₂₋₄ alkenyl”). In some embodiments, an alkenyl group has 2 to 3 carbon atoms (“C₂₋₃ alkenyl”). In some embodiments, an alkenyl group has 2 carbon atoms (“C₂ alkenyl”). The one or more carbon-carbon double bonds can be internal (such as in 2-butenyl) or terminal (such as in 1-butenyl). Examples of C₂₋₄ alkenyl groups include ethenyl (C₂), 1-propenyl (C₃), 2-propenyl (C₃), 1-butenyl (C₄), 2-butenyl (C₄), butadienyl (C₄), and the like. Examples of C₂₋₆ alkenyl groups include the aforementioned C₂₋₄ alkenyl groups as well as pentenyl (C₅), pentadienyl (C₅), hexenyl (C₆), and the like. Additional examples of alkenyl include heptenyl (C₇), octenyl (C₈), octatrienyl (C₈), and the like.

[0249] As used herein, “alkynyl” refers to a radical of a straight-chain or branched hydrocarbon group having from 2 to 20 carbon atoms, one or more carbon-carbon triple bonds (e.g., 1, 2, 3, or 4 carbon-carbon triple bonds), and optionally one or more carbon-carbon double bonds (e.g., 1, 2, 3, or 4 carbon-carbon double bonds) (“C₂₋₂₀ alkynyl”). In certain embodiments, alkynyl does not contain any double bonds. In some embodiments, an alkynyl group has 2 to 10 carbon atoms (“C₂₋₁₀ alkynyl”). In some embodiments, an alkynyl group has 2 to 9 carbon atoms (“C₂₋₉ alkynyl”). In some embodiments, an alkynyl group has 2 to 8 carbon atoms (“C₂₋₈ alkynyl”). In some embodiments, an alkynyl group has 2 to 7 carbon atoms (“C₂₋₇ alkynyl”). In some embodiments, an alkynyl group has 2 to 6 carbon atoms (“C₂₋₆ alkynyl”). In some embodiments, an alkynyl group has 2 to 5 carbon atoms (“C₂₋₅ alkynyl”). In some embodiments, an alkynyl group has 2 to 4 carbon atoms (“C₂₋₄ alkynyl”). In some embodiments, an alkynyl group has 2 to 3 carbon atoms (“C₂₋₃ alkynyl”). In some embodiments, an alkynyl group has 2 carbon atoms (“C₂ alkynyl”). The one or more carbon-carbon triple bonds can be internal (such as in 2-butynyl) or terminal (such as in 1-butynyl). Examples of C₂₋₄ alkynyl groups include, without limitation, ethynyl (C₂), 1-propynyl (C₃), 2-propynyl (C₃), 1-butynyl (C₄), 2-butynyl (C₄), and the like. Examples of C₂₋₆ alkenyl groups include the aforementioned C₂₋₄ alkynyl groups as well as pentynyl (C₅), hexynyl (C₆), and the like. Additional examples of alkynyl include heptynyl (C₇), octynyl (C₈), and the like.

[0250] As used herein, “alkylene,” “alkenylene,” and “alkynylene,” refer to a divalent radical of an alkyl, alkenyl, and alkynyl group respectively. When a range or number of carbons is provided for a particular “alkylene,” “alkenylene,” or “alkynylene” group, it is understood that the range or number refers to the range or number of carbons in the linear carbon divalent chain. “Alkylene,” “alkenylene,” and “alkynylene” groups may be substituted or unsubstituted with one or more substituents as described herein.

[0251] The term “alkoxy,” as used herein, refers to an alkyl group which is attached to another moiety via an oxygen atom (—O(alkyl)). Non-limiting examples include e.g., methoxy, ethoxy, propoxy, and butoxy.

[0252] As used herein, the term “aryl” refers to aromatic groups (e.g., monocyclic, bicyclic and tricyclic structures) containing six to ten carbons in the ring portion. The aryl groups may be optionally substituted through available carbon atoms and in certain embodiments may include one or more heteroatoms such as oxygen, nitrogen or sulfur. In some embodiments, an aryl group has six ring carbon atoms (“C₆ aryl”; e.g., phenyl). In some embodiments, an aryl group has ten ring carbon atoms (“C₁₀ aryl”; e.g., naphthyl such as 1-naphthyl and 2-naphthyl).

[0253] The term “cycloalkyl” refers to a monovalent saturated cyclic, bicyclic, or bridged cyclic (e.g., adamantyl) hydrocarbon group of 3-12, 3-8, 4-8, or 4-6 carbons, referred to herein, e.g., as “C₄₋₈ cycloalkyl,” derived from a cycloalkane. Exemplary cycloalkyl groups include, but are not limited to, cyclohexanes, cyclopentanes, cyclobutanes and cyclopropanes.

[0254] As used herein, “cyano” refers to —CN.

[0255] As used herein, “heteroaryl” refers to a radical of a 5-10 membered monocyclic or bicyclic 4n+2 aromatic ring system (e.g., having 6 or 10 electrons shared in a cyclic array) having ring carbon atoms and 1-4 ring heteroatoms provided in the aromatic ring system, wherein each heteroatom is independently selected from nitrogen, oxygen and sulfur (“5-10 membered heteroaryl”). In heteroaryl groups that contain one or more nitrogen atoms, the point of attachment can be a carbon or nitrogen atom, as valency permits. Heteroaryl bicyclic ring systems can include one or more heteroatoms in one or both rings. “Heteroaryl” includes ring systems wherein the heteroaryl ring, as defined above, is fused with one or more carbocyclyl or heterocyclyl groups wherein the point of attachment is on the heteroaryl ring, and in such instances, the number of ring members continue to designate the number of ring members in the heteroaryl ring system. “Heteroaryl” also includes ring systems wherein the heteroaryl ring, as defined above, is fused with one or more aryl groups wherein the point of attachment is either on the aryl or heteroaryl ring, and in such instances, the number of ring members designates the number of ring members in the fused (aryl/heteroaryl) ring system. Bicyclic heteroaryl groups wherein one ring does not contain a heteroatom (e.g., indolyl, quinolinyl, carbazolyl, and the like) the point of attachment can be on either ring, i.e., either the ring bearing a heteroatom (e.g., 2-indolyl) or the ring that does not contain a heteroatom (e.g., 5-indolyl).

[0256] As used herein, “heterocyclyl” or “heterocyclic” refers to a radical of a 3- to 10-membered non-aromatic ring system having ring carbon atoms and 1 to 4 ring heteroatoms, wherein each heteroatom is independently selected from nitrogen, oxygen, sulfur, boron, phosphorus, and silicon (“3-10 membered heterocyclyl”). In heterocyclyl groups that contain one or more nitrogen atoms, the point of attachment can be a carbon or nitrogen atom, as valency permits. A heterocyclyl group can either be monocyclic (“monocyclic heterocyclyl”) or a fused, bridged or spiro ring system such as a bicyclic system (“bicyclic heterocyclyl”), and can be saturated or can be partially unsaturated. Heterocyclyl bicyclic ring systems can include one or more heteroatoms in one or both rings. “Heterocyclyl” also includes ring systems wherein the heterocyclyl ring, as defined above, is fused with one or more carbocyclyl groups wherein the point of attachment is either on the carbocyclyl or heterocyclyl ring, or ring systems wherein the heterocyclyl ring, as defined above, is fused with one or more aryl or heteroaryl groups, wherein the point of attachment is on the heterocyclyl ring, and in such instances, the number of ring members continue to designate the number of ring members in the heterocyclyl ring system. The terms “heterocycle,” “heterocyclyl,” “heterocyclyl ring,” “heterocyclic group,” “heterocyclic moiety,” and “heterocyclic radical,” may be used interchangeably.

[0257] The terms “halo” and “halogen” as used herein refer to an atom selected from fluorine (fluoro, F), chlorine (chloro, Cl), bromine (bromo, Br), and iodine (iodo, I). In certain embodiments, the halo group is either fluoro or chloro.

[0258] As used herein, “oxo” refers to —C═O.

[0259] In general, the term “substituted”, whether preceded by the term “optionally” or not, means that at least one hydrogen present on a group (e.g., a carbon or nitrogen atom) is replaced with a permissible substituent, e.g., a substituent which upon substitution results in a stable compound, e.g., a compound which does not spontaneously undergo transformation such as by rearrangement, cyclization, elimination, or other reaction. Unless otherwise indicated, a “substituted” group has a substituent at one or more substitutable positions of the group, and when more than one position in any given structure is substituted, the substituent is either the same or different at each position.

[0260] As used herein, “pharmaceutically acceptable salt” refers to those salts which are, within the scope of sound medical judgment, suitable for use in contact with the tissues of humans and lower animals without undue toxicity, irritation, allergic response and the like, and are commensurate with a reasonable benefit/risk ratio. Pharmaceutically acceptable salts are well known in the art. For example, Berge et al., describes pharmaceutically acceptable salts in detail in J. Pharmaceutical Sciences (1977) 66:1-19. Pharmaceutically acceptable salts of the compounds of this invention include those derived from suitable inorganic and organic acids and bases. Examples of pharmaceutically acceptable, nontoxic acid addition salts are salts of an amino group formed with inorganic acids such as hydrochloric acid, hydrobromic acid, phosphoric acid, sulfuric acid and perchloric acid or with organic acids such as acetic acid, oxalic acid, maleic acid, tartaric acid, citric acid, succinic acid or malonic acid or by using other methods used in the art such as ion exchange. Other pharmaceutically acceptable salts include adipate, alginate, ascorbate, aspartate, benzenesulfonate, benzoate, bisulfate, borate, butyrate, camphorate, camphorsulfonate, citrate, cyclopentanepropionate, digluconate, dodecylsulfate, ethanesulfonate, formate, fumarate, glucoheptonate, glycerophosphate, gluconate, hemisulfate, heptanoate, hexanoate, hydroiodide, 2-hydroxy-ethanesulfonate, lactobionate, lactate, laurate, lauryl sulfate, malate, maleate, malonate, methanesulfonate, 2-naphthalenesulfonate, nicotinate, nitrate, oleate, oxalate, palmitate, pamoate, pectinate, persulfate, 3-phenylpropionate, phosphate, picrate, pivalate, propionate, stearate, succinate, sulfate, tartrate, thiocyanate, p-toluenesulfonate, undecanoate, valerate salts, and the like. Pharmaceutically acceptable salts derived from appropriate bases include alkali metal, alkaline earth metal, ammonium and N+(C1-4alkyl)4 salts. Representative alkali or alkaline earth metal salts include sodium, lithium, potassium, calcium, magnesium, and the like. Further pharmaceutically acceptable salts include, when appropriate, nontoxic ammonium, quaternary ammonium, and amine cations formed using counterions such as halide, hydroxide, carboxylate, sulfate, phosphate, nitrate, lower alkyl sulfonate, and aryl sulfonate.

[0261] In typical embodiments, the present invention is intended to encompass the compounds disclosed herein, and the pharmaceutically acceptable salts, pharmaceutically acceptable esters, tautomeric forms, polymorphs, and prodrugs of such compounds. In some embodiments, the present invention includes a pharmaceutically acceptable addition salt, a pharmaceutically acceptable ester, a solvate (e.g., hydrate) of an addition salt, a tautomeric form, a polymorph, an enantiomer, a mixture of enantiomers, a stereoisomer or mixture of stereoisomers (pure or as a racemic or non-racemic mixture) of a compound described herein.

[0262] Compounds described herein can comprise one or more asymmetric centers, and thus can exist in various isomeric forms, e.g., enantiomers and/or diastereomers. For example, the compounds described herein can be in the form of an individual enantiomer, diastereomer or geometric isomer, or can be in the form of a mixture of stereoisomers, including racemic mixtures and mixtures enriched in one or more stereoisomer. Isomers can be isolated from mixtures by methods known to those skilled in the art, including chiral high pressure liquid chromatography (HPLC) and the formation and crystallization of chiral salts; or preferred isomers can be prepared by asymmetric syntheses. See, for example, Jacques et al., Enantiomers, Racemates and Resolutions (Wiley Interscience, New York, 1981); Wilen et al., Tetrahedron 33:2725 (1977); Eliel, Stereochemistry of Carbon Compounds (McGraw-Hill, NY, 1962); and Wilen, Tables of Resolving Agents and Optical Resolutions p. 268 (E.L. Eliel, Ed., Univ. of Notre Dame Press, Notre Dame, IN 1972). The invention additionally encompasses compounds described herein as individual isomers substantially free of other isomers, and alternatively, as mixtures of various isomers.

[0263] In certain embodiments, the compounds (e.g., ionizable lipids) and the transfer vehicles (e.g., lipid nanoparticles) of which such compounds are a component exhibit an enhanced (e.g., increased) ability to transfect one or more target cells. Accordingly, also provided herein are methods of transfecting one or more target cells. Such methods generally comprise the step of contacting the one or more target cells with the compounds and/or pharmaceutical compositions disclosed herein such that the one or more target cells are transfected with the circular RNA encapsulated therein.

[0264] It is to be understood that the terminology used herein is for the purpose of describing particular embodiments only, and is not intended to be limiting. Unless specifically stated or obvious from context, as used herein, the term “or” is understood to be inclusive. Unless defined herein and below in the reminder of the specification, all technical and scientific terms used herein have the same meaning as commonly understood by one of ordinary skill in the art to which the invention pertains. 2. DNA TEMPLATE, PRECURSOR RNA & CIRCULAR RNA

[0265] According to the present invention, transcription of a DNA template provided herein (e.g., comprising a 3′ enhanced intron element, 3′ enhanced exon element, a core functional element, a 5′ enhanced exon element, and a 5′ enhanced intron element) results in formation of a precursor linear RNA polynucleotide capable of circularizing. In some embodiments, this DNA template comprises a vector, PCR product, plasmid, minicircle DNA, cosmid, artificial chromosome, complementary DNA (cDNA), extrachromosomal DNA (ecDNA), or a fragment therein. In certain embodiments, the minicircle DNA may be linearized or non-linearized. In certain embodiments, the plasmid may be linearized or non-linearized. In some embodiments, the DNA template may be single-stranded. In other embodiments, the DNA template may be double-stranded. In some embodiments, the DNA template comprises in whole or in part from a viral, bacterial or eukaryotic vector.

[0266] The present invention, as provided herein, comprises a DNA template that shares the same sequence as the precursor linear RNA polynucleotide prior to splicing of the precursor linear RNA polynucleotide (e.g., a 3′ enhanced intron element, a 3′ enhanced exon element, a core functional element, and a 5′ enhanced exon element, a 5′ enhanced intron element). In some embodiments, said linear precursor RNA polynucleotide undergoes splicing leading to the removal of the 3′ enhanced intron element and 5′ enhanced intron element during the process of circularization. In some embodiments, the resulting circular RNA polynucleotide lacks a 3′ enhanced intron segment and a 5′ enhanced intron segment, but maintains a 3′ enhanced exon segment, a core functional element, and a 5′ enhanced exon element.

[0267] In some embodiments, the precursor linear RNA polynucleotide circularizes when incubated in the presence of one or more guanosine nucleotides or nucleoside (e.g., GTP) and a divalent cation (e.g., Mg²⁺). In some embodiments, the 3′ enhanced exon element, 5′ enhanced exon element, and/or core functional element in whole or in part promotes the circularization of the precursor linear RNA polynucleotide to form the circular RNA polynucleotide provided herein.

[0268] In certain embodiments, circular RNA provided herein is produced inside a cell. In some embodiments, precursor RNA is transcribed using a DNA template (e.g., in some embodiments, using a vector provided herein) in the cytoplasm by a bacteriophage RNA polymerase, or in the nucleus by host RNA polymerase II and then circularized.

[0269] In certain embodiments, the circular RNA provided herein is injected into an animal (e.g., a human), such that a polypeptide encoded by the circular RNA molecule is expressed inside the animal.

[0270] In some embodiments, the DNA (e.g., vector), linear RNA (e.g., precursor RNA), and/or circular RNA polynucleotide provided herein is between 300 and 10000, 400 and 9000, 500 and 8000, 600 and 7000, 700 and 6000, 800 and 5000, 900 and 5000, 1000 and 5000, 1100 and 5000, 1200 and 5000, 1300 and 5000, 1400 and 5000, and/or 1500 and 5000 nucleotides in length. In some embodiments, the polynucleotide is at least 300 nt, 400 nt, 500 nt, 600 nt, 700 nt, 800 nt, 900 nt, 1000 nt, 1100 nt, 1200 nt, 1300 nt, 1400 nt, 1500 nt, 2000 nt, 2500 nt, 3000 nt, 3500 nt, 4000 nt, 4500 nt, or 5000 nt in length. In some embodiments, the polynucleotide is no more than 3000 nt, 3500 nt, 4000 nt, 4500 nt, 5000 nt, 6000 nt, 7000 nt, 8000 nt, 9000 nt, or 10000 nt in length. In some embodiments, the length of a DNA, linear RNA, and/or circular RNA polynucleotide provided herein is about 300 nt, 400 nt, 500 nt, 600 nt, 700 nt, 800 nt, 900 nt, 1000 nt, 1100 nt, 1200 nt, 1300 nt, 1400 nt, 1500 nt, 2000 nt, 2500 nt, 3000 nt, 3500 nt, 4000 nt, 4500 nt, 5000 nt, 6000 nt, 7000 nt, 8000 nt, 9000 nt, or 10000 nt.

[0271] In some embodiments, the circular RNA provided herein has higher functional stability than mRNA comprising the same expression sequence. In some embodiments, the circular RNA provided herein has higher functional stability than mRNA comprising the same expression sequence, 5moU modifications, an optimized UTR, a cap, and/or a polyA tail.

[0272] In some embodiments, the circular RNA polynucleotide provided herein has a functional half-life of at least 5 hours, 10 hours, 15 hours, 20 hours. 30 hours, 40 hours, 50 hours, 60 hours, 70 hours or 80 hours. In some embodiments, the circular RNA polynucleotide provided herein has a functional half-life of 5-80, 10-70, 15-60, and/or 20-50 hours. In some embodiments, the circular RNA polynucleotide provided herein has a functional half-life greater than (e.g., at least 1.5-fold greater than, at least 2-fold greater than) that of an equivalent linear RNA polynucleotide encoding the same protein. In some embodiments, functional half-life can be assessed through the detection of functional protein synthesis.

[0273] In some embodiments, the circular RNA polynucleotide provided herein has a half-life of at least 5 hours, 10 hours, 15 hours, 20 hours. 30 hours, 40 hours, 50 hours, 60 hours, 70 hours or 80 hours. In some embodiments, the circular RNA polynucleotide provided herein has a half-life of 5-80, 10-70, 15-60, and/or 20-50 hours. In some embodiments, the circular RNA polynucleotide provided herein has a half-life greater than (e.g., at least 1.5-fold greater than, at least 2-fold greater than) that of an equivalent linear RNA polynucleotide encoding the same protein. In some embodiments, the circular RNA polynucleotide, or pharmaceutical composition thereof, has a functional half-life in a human cell greater than or equal to that of a pre-determined threshold value. In some embodiments the functional half-life is determined by a functional protein assay. For example in some embodiments, the functional half-life is determined by an in vitro luciferase assay, wherein the activity of Gaussia luciferase (GLuc) is measured in the media of human cells (e.g. HepG2) expressing the circular RNA polynucleotide every 1, 2, 6, 12, or 24 hours over 1, 2, 3, 4, 5, 6, 7, or 14 days. In other embodiments, the functional half-life is determined by an in vivo assay, wherein levels of a protein encoded by the expression sequence of the circular RNA polynucleotide are measured in patient serum or tissue samples every 1, 2, 6, 12, or 24 hours over 1, 2, 3, 4, 5, 6, 7, or 14 days. In some embodiments, the pre-determined threshold value is the functional half-life of a reference linear RNA polynucleotide comprising the same expression sequence as the circular RNA polynucleotide.

[0274] In some embodiments, the circular RNA provided herein may have a higher magnitude of expression than equivalent linear mRNA, e.g., a higher magnitude of expression 24 hours after administration of RNA to cells. In some embodiments, the circular RNA provided herein has a higher magnitude of expression than mRNA comprising the same expression sequence, 5moU modifications, an optimized UTR, a cap, and/or a polyA tail.

[0275] In some embodiments, the circular RNA provided herein may be less immunogenic than an equivalent mRNA when exposed to an immune system of an organism or a certain type of immune cell. In some embodiments, the circular RNA provided herein is associated with modulated production of cytokines when exposed to an immune system of an organism or a certain type of immune cell. For example, in some embodiments, the circular RNA provided herein is associated with reduced production of IFN-β1, RIG-I, IL-2, IL-6, IFNγ, and/or TNFα when exposed to an immune system of an organism or a certain type of immune cell as compared to mRNA comprising the same expression sequence. In some embodiments, the circular RNA provided herein is associated with less IFN-β1, RIG-I, IL-2, IL-6, IFNγ, and/or TNFα transcript induction when exposed to an immune system of an organism or a certain type of immune cell as compared to mRNA comprising the same expression sequence. In some embodiments, the circular RNA provided herein is less immunogenic than mRNA comprising the same expression sequence. In some embodiments, the circular RNA provided herein is less immunogenic than mRNA comprising the same expression sequence, 5moU modifications, an optimized UTR, a cap, and/or a polyA tail.

[0276] In certain embodiments, the circular RNA provided herein can be transfected into a cell as is, or can be transfected in DNA vector form and transcribed in the cell. Transcription of circular RNA from a transfected DNA vector can be via added polymerases or polymerases encoded by nucleic acids transfected into the cell, or preferably via endogenous polymerases.

### A. Enhanced Intron Elements & Enhanced Exon Elements

[0277] Polynucleotides provided herein may comprise one or more enhanced intron elements and/or one or more enhanced exon elements. In some embodiments, the enhanced intron elements and enhanced exon elements may comprise spacers, duplex regions, affinity sequences, intron segments, exon segments, and/or various untranslated elements. These sequences within the enhanced intron elements or enhanced exon elements are arranged to optimize circularization or protein expression.

a. Spacer

[0278] In some embodiments, a provided polynucleotide (e.g., a DNA template, a precursor RNA polynucleotide, or a circular RNA polynucleotide) comprises one or more spacers. In certain embodiments, the polynucleotide comprises a first (5′) and/or a second (3′) spacer. In some embodiments, the polynucleotide (e.g., DNA template or precursor linear RNA polynucleotide) comprises one or more spacers in the enhanced intron elements. In some embodiments, the polynucleotide (e.g., DNA template, precursor linear RNA polynucleotide, or a circular RNA polynucleotide) comprises one or more spacers in the enhanced exon elements. In certain embodiments, the polynucleotide comprises a spacer in the 3′ enhanced intron segment and a spacer in the 5′ enhanced intron segment. In certain embodiments, the polynucleotide comprises a spacer in the 3′ enhanced exon segment and another spacer in the 5′ enhanced exon segment to aid with circularization or protein expression due to symmetry created in the overall sequence.

[0279] In some embodiments, including a spacer between the 3′ group I intron segment and the core functional element may conserve secondary structures in those regions by preventing them from interacting, thus increasing splicing efficiency. In some embodiments, the first (between 3′ group I intron segment and core functional element) and second (between the two expression sequences and core functional element) spacers comprise additional base pairing regions that are predicted to base pair with each other and not to the first and second duplex regions. In other embodiments, the first (between 3′ group I intron segment and core functional element) and second (between the one of the core functional element and 5′ group I intron segment) spacers comprise additional base pairing regions that are predicted to base pair with each other and not to the first and second duplex regions. In some embodiments, such spacer base pairing brings the group I intron segments in close proximity to each other, further increasing splicing efficiency. Additionally, in some embodiments, the combination of base pairing between the first and second duplex regions, and separately, base pairing between the first and second spacers, promotes the formation of a splicing bubble containing the group I intron segments flanked by adjacent regions of base pairing. Typical spacers are contiguous sequences with one or more of the following qualities: 1) predicted to avoid interfering with proximal structures, for example, the IRES, expression sequence, aptamer, or intron; 2) is at least 7 nt long and no longer than 100 nt; 3) is located after and adjacent to the 3′ intron segment and/or before and adjacent to the 5′ intron segment; and 4) contains one or more of the following: a) an unstructured region at least 5 nt long, b) a region of base pairing at least 5 nt long to a distal sequence, including another spacer, and c) a structured region at least 7 nt long limited in scope to the sequence of the spacer. Spacers may have several regions, including an unstructured region, a base pairing region, a hairpin/structured region, and combinations thereof. In an embodiment, the spacer has a structured region with high GC content. In an embodiment, a region within a spacer base pairs with another region within the same spacer. In an embodiment, a region within a spacer base pairs with a region within another spacer. In an embodiment, a spacer comprises one or more hairpin structures. In an embodiment, a spacer comprises one or more hairpin structures with a stem of 4 to 12 nucleotides and a loop of 2 to 10 nucleotides. In an embodiment, there is an additional spacer between the 3′ group I intron segment and the core functional element. In an embodiment, this additional spacer prevents the structured regions of the IRES or aptamer of a TIE from interfering with the folding of the 3′ group I intron segment or reduces the extent to which this occurs. In some embodiments, the 5′ spacer sequence is at least 7, 8, 9, 10, 11, 12, 13, 14, 15, 16, 17, 18, 19, 20, 25 or 30 nucleotides in length. In some embodiments, the 5′ spacer sequence is no more than 100, 90, 80, 70, 60, 50, 45, 40, 35 or 30 nucleotides in length. In some embodiments the 5′ spacer sequence is between 5 and 50, 10 and 50, 20 and 50, 20 and 40, and/or 25 and 35 nucleotides in length. In certain embodiments, the 5′ spacer sequence is 10, 11, 12, 13, 14, 15, 16, 17, 18, 19, 20, 21, 22, 23, 24, 25, 26, 27, 28, 29, 30, 31, 32, 33, 34, 35, 36, 37, 38, 39, 40, 41, 42, 43, 44, 45, 46, 47, 48, 49 or 50 nucleotides in length. In one embodiment, the 5′ spacer sequence is a polyA sequence. In another embodiment, the 5′ spacer sequence is a polyAC sequence. In one embodiment, a spacer comprises about 10%, 20%, 30%, 40%, 50%, 60%, 70%, 80%, 90%, or 100% polyAC content. In one embodiment, a spacer comprises about 10%, 20%, 30%, 40%, 50%, 60%, 70%, 80%, 90%, or 100% polypyrimidine (C/T or C/U) content.

b. Duplex Region

[0280] In some embodiments, a provided polynucleotide (e.g., a DNA template, a precursor linear RNA polynucleotide, or a circular RNA polynucleotide provided herein comprise one or more duplex regions. In some embodiments, the polynucleotide comprises a first (5′) duplex region and a second (3′) duplex region. In certain embodiments, the polynucleotide comprises a 5′ external duplex region located within the 3′ enhanced intron segment and a 3′ external duplex region located within the 5′ enhanced intron segment. In some embodiments, the polynucleotide comprise a 5′ internal duplex region located within the 3′ enhanced exon segment and a 3′ internal duplex region located within the 5′ enhanced exon segment. In some embodiments, the polynucleotide comprises a 5′ external duplex region, 5′ internal duplex region, a 3′ internal duplex region, and a 3′ external duplex region.

[0281] In certain embodiments, the first and second duplex regions may form perfect or imperfect duplexes. Thus, in certain embodiments at least 75%, 80%, 85%, 90%, 91%, 92%, 93%, 94%, 95%, 96%, 97%, 98%, 99% or 100% of the first and second duplex regions may be base paired with one another. In some embodiments, the duplex regions are predicted to have less than 50% (e.g., less than 45%, less than 40%, less than 35%, less than 30%, less than 25%) base pairing with unintended sequences in the RNA (e.g., non-duplex region sequences). In some embodiments, including such duplex regions on the ends of the precursor RNA strand, and adjacent or very close to the group I intron segment, bring the group I intron segments in close proximity to each other, increasing splicing efficiency. In some embodiments, the duplex regions are 3 to 100 nucleotides in length (e.g., 3-75 nucleotides in length, 3-50 nucleotides in length, 20-50 nucleotides in length, 35-50 nucleotides in length, 5-25 nucleotides in length, 9-19 nucleotides in length). In some embodiments, the duplex regions are about 3, 4, 5, 6, 7, 8, 9, 10, 11, 12, 13, 14, 15, 16, 17, 18, 19, 20, 21, 22, 23, 24, 25, 26, 27, 28, 29, 30, 31, 32, 33, 34, 35, 36, 37, 38, 39, 40, 41, 42, 43, 44, 45, 46, 47, 48, 49 or 50 nucleotides in length. In some embodiments, the duplex regions have a length of about 9 to about 50 nucleotides. In one embodiment, the duplex regions have a length of about 9 to about 19 nucleotides. In some embodiments, the duplex regions have a length of about 20 to about 40 nucleotides. In certain embodiments, the duplex regions have a length of about 30 nucleotides.

[0282] In other embodiments, the polynucleotide does not comprise of any duplex regions to optimize translation or circularization.

c. Affinity Sequence

[0283] As provided herein, a provided polynucleotide (e.g., a DNA template, a precursor linear RNA polynucleotide, or a circular RNA polynucleotide) may comprise an affinity sequence (or affinity tag). In some embodiments, the affinity tag is located in the 3′ enhanced intron element. In some embodiments, the affinity tag is located in the 5′ enhanced intron element. In some embodiments, both (3′ and 5′) enhanced intron elements each comprise an affinity tag. In one embodiment, an affinity tag of the 3′ enhanced intron element is the length as an affinity tag in the 5′ enhanced intron element. In some embodiments, an affinity tag of the 3′ enhanced intron element is the same sequence as an affinity tag in the 5′ enhanced intron element. In some embodiments, the affinity sequence is placed to optimize oligo-dT purification.

[0284] In some embodiments, the one or more affinity tags present in a precursor linear RNA polynucleotide are removed upon circularization. See, for example, FIG. 89A and FIG. 89B. In some embodiments, affinity tags are added to remaining linear RNA after circularization of RNA is performed. In some such embodiments, the affinity tags are added enzymatically to linear RNA. The presence of one or more affinity tags in linear RNA and their absence from circular RNA can facilitate purification of circular RNA. In some embodiments, such purification is performed using a negative selection or affinity-purification method. In some embodiments, such purification is performed using a binding agent that preferentially or specifically binds to the affinity tag.

[0285] In some embodiments, an affinity tag comprises a polyA sequence. In some embodiments the polyA sequence is at least 15, 30, or 60 nucleotides long. In some embodiments, the affinity tag comprising a polyA sequence is present in two places in a precursor linear RNA. In some embodiments, one or both polyA sequences are 15-50 nucleotides long. In some embodiments, one or both polyA sequences are 20-25 nucleotides long. In some embodiments, the polyA sequence(s) is removed upon circularization. Thus, an oligonucleotide hybridizing with the polyA sequence, such as a deoxythymidine oligonucleotide (oligo(dT)) conjugated to a solid surface (e.g., a resin), can be used to separate circular RNA from its precursor RNA.

[0286] In some embodiments, an affinity tag comprises a sequence that is absent from the circular RNA product. In some such embodiments, the sequence that is absent from the circular RNA product is a dedicated binding site (DBS). In some embodiments, the DBS is an unstructured sequence, i.e., a sequence that does not form a defined structural element, such as a hairpin loop, contiguous dsRNA region, or triple helix. In some embodiments, the DBS sequence forms a random coil. In some embodiments, the DBS comprises at least 25% GC content, at least 50% GC content, at least 75% GC content, or at least 100% GC content. In some embodiments, the DBS comprises at least 25% AC content, at least 50% AC content, at least 75% AC content, or 100% AC content. In some embodiments, the DBS is at least 15, 30, or 60 nucleotides long. In some embodiments, the affinity tag comprising a DBS is present in two places in a precursor linear RNA. In some embodiments, the DBS sequences are each independently 15-50 nucleotides long. In some embodiments, the DBS sequences are each independently 20-25 nucleotides long.

[0287] In some embodiments, the DBS sequence(s) is removed upon circularization. Thus, binding agents comprising oligonucleotides comprising a sequence that is complementary to the DBS can be used to facilitate purification of circular RNA. For example, the binding agent may comprise an oligonucleotide complementary to a DBS conjugated to a solid surface (e.g., a resin).

[0288] In some embodiments, an affinity sequence or other type of affinity handle, such as biotin, is added to linear RNA by ligation. In some embodiments, an oligonucleotide comprising an affinity sequence is ligated to the linear RNA. In some embodiments, an oligonucleotide conjugated to an affinity handle is ligated to the linear RNA. In some embodiments, a solution comprising the linear RNA ligated to the affinity sequence or handle and the circular RNA that does not comprise an affinity sequence or handle are contacted with a binding agent comprising a solid support conjugated to an oligonucleotide complementary to the affinity sequence or to a binding partner of the affinity handle, such that the linear RNA binds to the binding agent, and the circular RNA is eluted or separated from the solid support.

[0289] Any purification method for circular RNA described herein may comprise one or more buffer exchange steps. In some embodiments, buffer exchange is performed after in vitro transcription (IVT) and before additional purification steps. In some such embodiments, the IVT reaction solution is buffer exchanged into a buffer comprising Tris. In some embodiments, the IVT reaction solution is buffer exchanged into a buffer comprising greater than 1 mM or greater than 10 mM one or more monovalent salts, such as NaCl or KCl, and optionally comprising EDTA. In some embodiments, buffer exchange is performed after purification of circular RNA is complete. In some embodiments, buffer exchange is performed after IVT and after purification of circular RNA. In some embodiments, the buffer exchange that is performed after purification of circular RNA comprises exchange of the circular RNA into water or storage buffer. In some embodiments, the storage buffer comprises 1 mM sodium citrate, pH 6.5.

[0290] In certain embodiments, the 3′ enhanced intron element comprises a leading untranslated sequence. In some embodiments, the leading untranslated sequence is a the 5′ end of the 3′ enhanced intron segment. In some embodiments, the leading untranslated sequence comprises of the last nucleotide of a transcription start site (TSS). In some embodiments, the TSS is chosen from a viral, bacterial, or eukaryotic DNA template. In one embodiment, the leading untranslated sequence comprise the last nucleotide of a TSS and 0 to 100 additional nucleotides. In some embodiments, the TSS is a terminal spacer. In one embodiment, the leading untranslated sequence contains a guanosine at the 5′ end upon translation of an RNA T7 polymerase.

[0291] In certain embodiments, the 5′ enhanced intron element comprises a trailing untranslated sequence. In some embodiments, the 5′ trailing untranslated sequence is located at the 3′ end of the 5′ enhanced intron element. In some embodiments, the trailing untranslated sequence is a partial restriction digest sequence. In one embodiment, the trailing untranslated sequence is in whole or in part a restriction digest site used to linearize the DNA template. In some embodiments, the restriction digest site is in whole or in part from a natural viral, bacterial or eukaryotic DNA template. In some embodiments, the trailing untranslated sequence is a terminal restriction site fragment.

### d. Enhanced Intron Segments

[0292] In some embodiments, the 3′ enhanced intron element and 5′ enhanced intron element each comprise an intron segment. In certain embodiments, a 3′ intron segment is a contiguous sequence at least 75% homologous (e.g., at least 80%, 85%, 90%, 91%, 92%, 93%, 94%, 95%, 96%, 97%, 98%, 99% or 100% homologous) to a 3′ proximal fragment of a natural group I intron including the 3′ splice site dinucleotide. Typically, a 5′ intron segment is a contiguous sequence at least 75% homologous (e.g., at least 80%, 85%, 90%, 91%, 92%, 93%, 94%, 95%, 96%, 97%, 98%, 99% or 100% homologous) to a 5′ proximal fragment of a natural group I intron including the 5′ splice site dinucleotide. In some embodiments, the 3′ intron segment includes the first nucleotide of a 3′ group I splice site dinucleotide. In some embodiments, the 5′ intron segment includes the first nucleotide of a 5′ group I splice site dinucleotide. In other embodiments, the 3′ intron segment includes the first and second nucleotides of a 3′ group I intron segment splice site dinucleotide; and the 5′ intron segment includes the first and second nucleotides of a 3′ group I intron segment dinucleotide.

### E. Enhanced Exon Segments

[0293] In certain embodiments, a provided polynucleotide (e.g., a DNA template, a linear precursor RNA polynucleotide, or a circular RNA polynucleotide) comprises an enhanced exon segment. In some embodiments, following a 5′ to 3′ order, the 3′ enhanced exon element is located upstream to core functional element. In some embodiments, following a 5′ to 3′ order, the 5′ enhanced intron element is located downstream to the core functional element.

[0294] According to the present invention, the 3′ enhanced exon element and 5′ enhanced exon element each comprise an exon segment. In some embodiments, the 3′ enhanced exon element comprises a 3′ exon segment. In some embodiments, the 5′ enhanced exon element comprises a 5′ exon segment. In certain embodiments, as provided herein, the 3′ exon segment and 5′ exon segment each comprises a group I intron segment and 1 to 100 nucleotides of an exon sequence. In certain embodiments, a 3′ intron segment is a contiguous sequence at least 75% homologous (e.g., at least 80%, 85%, 90%, 91%, 92%, 93%, 94%, 95%, 96%, 97%, 98%, 99% or 100% homologous) to a 3′ proximal fragment of a natural group I intron including the 3′ splice site dinucleotide. Typically, a 5′ group I intron segment is a contiguous sequence at least 75% homologous (e.g., at least 80%, 85%, 90%, 91%, 92%, 93%, 94%, 95%, 96%, 97%, 98%, 99% or 100% homologous) to a 5′ proximal fragment of a natural group I intron including the 5′ splice site dinucleotide. In some embodiments, the 3′ exon segment comprises a second nucleotide of a 3′ group I intron splice site dinucleotide and 1 to 100 nucleotides of an exon sequence. In some embodiments, the 5′ exon segment comprises the first nucleotide of a 5′ group I intron splice site dinucleotide and 1 to 100 nucleotides of an exon sequence. In some embodiments, the exon sequence comprises in part or in whole from a naturally occurring exon sequence from a virus, bacterium or eukaryotic DNA vector. In other embodiments, the exon sequence further comprises a synthetic, genetically modified (e.g., containing modified nucleotide), or other engineered exon sequence.

[0295] In one embodiment, where the 3′ intron segment comprises both nucleotides of a 3′ group I splice site dinucleotide and the 5′ intron segment comprises both nucleotides of a 5′ group I splice site dinucleotide, the exon segments located within the 5′ enhanced exon element and 3′ enhanced exon element does not comprise of a group I splice site dinucleotide.

f. Exemplary Permutation of the Enhanced Intron Elements & Enhanced Exon Elements

[0296] For means of example and not intended to be limiting, in some embodiments, a 3′ enhanced intron element comprises in the following 5′ to 3′ order: a leading untranslated sequence, a 5′ affinity tag, an optional 5′ external duplex region, a 5′ external spacer, and a 3′ intron segment. In same embodiments, the 3′ enhanced exon element comprises in the following 5′ to 3′ order: a 3′ exon segment, an optional 5′ internal duplex region, an optional 5′ internal duplex region, and a 5′ internal spacer. In the same embodiments, the 5′ enhanced exon element comprises in the following 5′ to 3′ order: a 3′ internal spacer, an optional 3′ internal duplex region, and a 5′ exon segment. In still the same embodiments, the 3′ enhanced intron element comprises in the following 5′ to 3′ order: a 5′ intron segment, a 3′ external spacer, an optional 3′ external duplex region, a 3′ affinity tag, and a trailing untranslated sequence.

### B. Core Functional Element

[0297] In some embodiments, a provided polynucleotide (e.g., a DNA template, a linear precursor RNA polynucleotide, or a circular RNA polynucleotide) comprises a core functional element. In some embodiments, the core functional element comprises a coding or noncoding element. In certain embodiments, the core functional element may contain both a coding and noncoding element. In some embodiments, the core functional element further comprises translation initiation element (TIE) upstream to the coding or noncoding element. In some embodiments, the core functional element comprises a termination element. In some embodiments, the termination element is located downstream to the TIE and coding element. In some embodiments, the termination element is located downstream to the coding element but upstream to the TIE. In certain embodiments, where the coding element comprises a noncoding region, a core functional element lacks a TIE and/or a termination element.

a. Coding or Noncoding Element

[0298] In some embodiments, the polynucleotides provided herein comprise a coding or noncoding element or a combination of both. In some embodiments, the coding element comprises an expression sequence. In some embodiments, the coding element encodes at least one therapeutic protein.

[0299] In some embodiments, a provided circular RNA encodes two or more polypeptides. In some embodiments, the circular RNA is a bicistronic RNA. The sequences encoding the two or more polypeptides can be separated by a ribosomal skipping element or a nucleotide sequence encoding a protease cleavage site. In certain embodiments, the ribosomal skipping element encodes thosea-asigna virus 2A peptide (T2A), porcine teschovirus-1 2 A peptide (P2A), foot-and-mouth disease virus 2A peptide (F2A), equine rhinitis A vims 2A peptide (E2A), cytoplasmic polyhedrosis vims 2A peptide (BmCPV 2A), or flacherie vims of B. mori 2A peptide (BmIFV 2A).

b. Translation Initiation Element (TIE)

[0300] As provided herein in some embodiments, the core functional element comprises at least one translation initiation element (TIE). TIEs are designed to allow translation efficiency of an encoded protein. Thus, optimal core functional elements comprising only of noncoding elements lack any TIEs. In some embodiments, core functional elements comprising one or more coding element will further comprise one or more TIEs.

[0301] In some embodiments, the TIE comprises a naturally occurring sequence and/or a synthetic, non-naturally occurring sequence capable of promoting and/or initiating translation of an encoded protein.

[0302] In some embodiments, a TIE comprises an untranslated region (UTR). In certain embodiments, the TIE provided herein comprise an internal ribosome entry site (IRES). Inclusion of an IRES permits the translation of one or more open reading frames from a circular RNA (e.g., open reading frames that form the expression sequences). The IRES element attracts a eukaryotic ribosomal translation initiation complex and promotes translation initiation. See, e.g., Kaufman et al., Nuc. Acids Res. (1991) 19:4485-4490; Gurtu et al., Biochem. Biophys. Res. Comm. (1996) 229:295-298; Rees et al., BioTechniques (1996) 20: 102-110; Kobayashi et al., BioTechniques (1996) 21:399-402; and Mosser et al., BioTechniques 1997 22 150-161.

i. Natural Ties: Viral, & Eukaryotic/Cellular Internal Ribosome Entry Site (IRES)

[0303] A multitude of IRES sequences are available and include sequences derived from a wide variety of viruses, such as from leader sequences of picornaviruses such as the encephalomyocarditis virus (EMCV) UTR (Jang et al., J. Virol. (1989) 63: 1651-1660), the polio leader sequence, the hepatitis A virus leader, the hepatitis C virus IRES, human rhinovirus type 2 IRES (Dobrikova et al., Proc. Natl. Acad. Sci. (2003) 100(25): 15125-15130), an IRES element from the foot and mouth disease virus (Ramesh et al., Nucl. Acid Res. (1996) 24:2697-2700), a giardiavirus IRES (Garlapati et al., J. Biol. Chem. (2004) 279(5):3389-3397), and the like.

[0304] Different IRES sequences have varying ability to drive protein expression, and the ability of any particular identified or predicted IRES sequence to drive protein expression from linear mRNA or circular RNA constructs is unknown and unpredictable. In certain embodiments, potential IRES sequences can be bioinformatically identified based on sequence positions in viral sequences. However, the activity of such sequences has been previously uncharacterized. As demonstrated herein, such IRES sequences may have differing protein expression capability depending on cell type, for example in T cells, liver cells, or muscle cells. In some embodiments, the novel IRES sequences described herein may have at least 2, 3, 4, 5, 6, 7, 8, 9, 10, 20, 50, or 100 fold increased expression in a particular cell type compared to previously described EMCV IRES sequences.

[0305] In some embodiments, for driving protein expression, a provided circular RNA comprises an IRES operably linked to a protein coding sequence.

[0306] In some embodiments, a TIE comprises a sequence from a nonviral untranslated region (UTR). In certain embodiments, a TIE comprises a sequence from a mammalian UTR and is capable of driving protein expression when operably linked to the coding sequence for said protein. In certain embodiments, a TIE comprises a sequence from a primate UTR and is capable of driving protein expression when operably linked to the coding sequence for said protein. In certain embodiments, a TIE comprises a sequence from a human UTR and is capable of driving protein expression when operably linked to the coding sequence for said protein. In certain embodiments, a TIE comprises a sequence from an invertebrate UTR and is capable of driving protein expression when operably linked to the coding sequence for said protein. In certain embodiments, a TIE comprises a sequence from a drosophila UTR and is capable of driving protein expression when operably linked to the coding sequence for said protein.

[0307] In some embodiments, the IRES comprises a sequence of any one of the IRES sequences SEQ ID NOS: 14067-24829 or a fragment thereof. In some embodiments, the IRES comprises a sequence at least 80%, 85%, 90%, 91%, 92%, 93%, 94%, 95%, 96%, 97%, 98%, or 99% identical to a sequence of any one of the IRES sequences SEQ ID NOS: 14067-24829. In some embodiments, the circular RNA disclosed herein comprises an IRES sequence at least 80%, 85%, 90%, 91%, 92%, 93%, 94%, 95%, 96%, 97%, 98%, or 99% identical to a sequence of any one of the IRES sequences SEQ ID NOS: 14067-24829. In some embodiments, the circular RNA disclosed herein comprises an IRES sequence of any one of the IRES sequences SEQ ID NOS: 14067-24829 or a fragment thereof.

[0308] In some embodiments, the IRES comprises a sequence set forth in any one of SEQ ID NOs: 793, 876, 1017, 1216, and 3291 or a fragment thereof. In some embodiments, the IRES comprises a sequence at least 80%, 85%, 90%, 91%, 92%, 93%, 94%, 95%, 96%, 97%, 98%, or 99% identical to a sequence set forth in any one of SEQ ID NOs: 793, 876, 1017, 1216, and 3291. In some embodiments, the circular RNA disclosed herein comprises an IRES sequence at least 80%, 85%, 90%, 91%, 92%, 93%, 94%, 95%, 96%, 97%, 98%, or 99% identical to set forth in any one of SEQ ID NOs: 793, 876, 1017, 1216, and 3291. In some embodiments, the circular RNA disclosed herein comprises an IRES sequence set forth in any one of SEQ ID NOs: 793, 876, 1017, 1216, and 3291 or a fragment thereof. In some embodiments, the IRES comprises a sequence set forth in any one of SEQ ID NOs: 785, 823, 840, 857, 861, 862, 864, 983, 1023, 1168, 1169, 1171, 1179, 1192, 1284, 1287, 2285, 2742, 2777, 2778, 3283, 3290, 3293, and 3302 or a fragment thereof. In some embodiments, the IRES comprises a sequence at least 80%, 85%, 90%, 91%, 92%, 93%, 94%, 95%, 96%, 97%, 98%, or 99% identical to a sequence set forth in any one of SEQ ID NOs: 785, 823, 840, 857, 861, 862, 864, 983, 1023, 1168, 1169, 1171, 1179, 1192, 1284, 1287, 2285, 2742, 2777, 2778, 3283, 3290, 3293, and 3302. In some embodiments, the circular RNA disclosed herein comprises an IRES sequence at least 80%, 85%, 90%, 91%, 92%, 93%, 94%, 95%, 96%, 97%, 98%, or 99% identical to set forth in any one of SEQ ID NOs: 785, 823, 840, 857, 861, 862, 864, 983, 1023, 1168, 1169, 1171, 1179, 1192, 1284, 1287, 2285, 2742, 2777, 2778, 3283, 3290, 3293, and 3302. In some embodiments, the circular RNA disclosed herein comprises an IRES sequence set forth in any one of SEQ ID NOs: 785, 823, 840, 857, 861, 862, 864, 983, 1023, 1168, 1169, 1171, 1179, 1192, 1284, 1287, 2285, 2742, 2777, 2778, 3283, 3290, 3293, and 3302 or a fragment thereof. In some embodiments, the IRES comprises a sequence set forth in any one of SEQ ID NOs: 75, 77, 137, 532, 566, 580, 648, 693, 752, 787, 791, 820, 839, 843, 852, 863, 871, 874, 922, 959, 984, 1015, 1026, 1041, 1047, 1059, 1068, 1134, 1177, 1178, 1180, 1189, 1193, 1198, 1263, 1276, 1280, 1282, 2601, 2615, 2616, 2617, 2618, 2627, 2667, 2681, 2746, 2758, 3284, 3285, 3289, 3292, 3294, 3295, 3296, 3297, 3298, 3299, and 3301 or a fragment thereof. In some embodiments, the IRES comprises a sequence at least 80%, 85%, 90%, 91%, 92%, 93%, 94%, 95%, 96%, 97%, 98%, or 99% identical to a sequence set forth in any one of SEQ ID NOs: 75, 77, 137, 532, 566, 580, 648, 693, 752, 787, 791, 820, 839, 843, 852, 863, 871, 874, 922, 959, 984, 1015, 1026, 1041, 1047, 1059, 1068, 1134, 1177, 1178, 1180, 1189, 1193, 1198, 1263, 1276, 1280, 1282, 2601, 2615, 2616, 2617, 2618, 2627, 2667, 2681, 2746, 2758, 3284, 3285, 3289, 3292, 3294, 3295, 3296, 3297, 3298, 3299, and 3301. In some embodiments, the circular RNA disclosed herein comprises an IRES sequence at least 80%, 85%, 90%, 91%, 92%, 93%, 94%, 95%, 96%, 97%, 98%, or 99% identical to set forth in any one of SEQ ID NOs: 75, 77, 137, 532, 566, 580, 648, 693, 752, 787, 791, 820, 839, 843, 852, 863, 871, 874, 922, 959, 984, 1015, 1026, 1041, 1047, 1059, 1068, 1134, 1177, 1178, 1180, 1189, 1193, 1198, 1263, 1276, 1280, 1282, 2601, 2615, 2616, 2617, 2618, 2627, 2667, 2681, 2746, 2758, 3284, 3285, 3289, 3292, 3294, 3295, 3296, 3297, 3298, 3299, and 3301. In some embodiments, the circular RNA disclosed herein comprises an IRES sequence set forth in any one of SEQ ID NOs: 75, 77, 137, 532, 566, 580, 648, 693, 752, 787, 791, 820, 839, 843, 852, 863, 871, 874, 922, 959, 984, 1015, 1026, 1041, 1047, 1059, 1068, 1134, 1177, 1178, 1180, 1189, 1193, 1198, 1263, 1276, 1280, 1282, 2601, 2615, 2616, 2617, 2618, 2627, 2667, 2681, 2746, 2758, 3284, 3285, 3289, 3292, 3294, 3295, 3296, 3297, 3298, 3299, and 3301 or a fragment thereof.

[0309] In some embodiments, the IRES comprises a sequence selected from SEQ ID NOs: 1-2983 and 3282-3287 or a fragment thereof. In some embodiments, the IRES comprises a sequence at least 80%, 85%, 90%, 91%, 92%, 93%, 94%, 95%, 96%, 97%, 98%, or 99% identical to a sequence selected from SEQ ID NOs: 1-2983 and 3282-3287. In some embodiments, the circular RNA disclosed herein comprises an IRES sequence at least 80%, 85%, 90%, 91%, 92%, 93%, 94%, 95%, 96%, 97%, 98%, or 99% identical to a sequence selected from SEQ ID NOs: 1-2983 and 3282-3287. In some embodiments, the circular RNA disclosed herein comprises an IRES sequence selected from SEQ ID NOs: 1-2983 and 3282-3287 or a fragment thereof. Modifications of IRES and accessory sequences are disclosed herein to increase or reduce IRES activities, for example, by truncating the 5′ and/or 3′ ends of the IRES, adding a spacer 5′ to the IRES, modifying the 6 nucleotides 5′ to the translation initiation site (Kozak sequence), modification of alternative translation initiation sites, and creating chimeric/hybrid IRES sequences. In some embodiments, the IRES sequence in the circular RNA disclosed herein comprises one or more of these modifications relative to a native IRES (e.g., SEQ ID NOs: 1-2983 and 3282-3287). In some embodiments, the IRES comprises one or more modifications in any one of SEQ ID NOs: 793, 876, 1017, 1216, and 3291. In some embodiments, the IRES comprises one or more modifications in any one of SEQ ID NOs: 785, 823, 840, 857, 861, 862, 864, 983, 1023, 1168, 1169, 1171, 1179, 1192, 1284, 1287, 2285, 2742, 2777, 2778, 3283, 3290, 3293, and 3302. In some embodiments, the IRES comprises one or more modifications in any one of SEQ ID NOs: 75, 77, 137, 532, 566, 580, 648, 693, 752, 787, 791, 820, 839, 843, 852, 863, 871, 874, 922, 959, 984, 1015, 1026, 1041, 1047, 1059, 1068, 1134, 1177, 1178, 1180, 1189, 1193, 1198, 1263, 1276, 1280, 1282, 2601, 2615, 2616, 2617, 2618, 2627, 2667, 2681, 2746, 2758, 3284, 3285, 3289, 3292, 3294, 3295, 3296, 3297, 3298, 3299, and 3301.

[0310] In some embodiments, the IRES is an Aalivirus, Ailurivirus, Ampivirus, Anativirus, Aphthovirus, Aquamavirus, Avihepatovirus, Avisivirus, Boosepivirus, Bopivirus, Caecilivirus, Cardiovirus, Cosavirus, Crahelivirus, Crohivirus, Danipivirus, Dicipivirus, Diresapivirus, Enterovirus, Erbovirus, Felipivirus, Fipivirus, Gallivirus, Gruhelivirus, Grusopivirus, Harkavirus, Hemipivirus, Hepatovirus, Hunnivirus, Kobuvirus, Kunsagivirus, Limnipivirus, Livupivirus, Ludopivirus, Malagasivirus, Marsupivirus, Megrivirus, Mischivirus, Mosavirus, Mupivirus, Myrropivirus, Orivirus, Oscivirus, Parabovirus, Parechovirus, Pasivirus, Passerivirus, Pemapivirus, Poecivirus, Potamipivirus, Pygoscepivirus, Rabovirus, Rafivirus, Rajidapivirus, Rohelivirus, Rosavirus, Sakobuvirus, Salivirus, Sapelovirus, Senecavirus, Shanbavirus, Sicinivirus, Symapivirus, Teschovirus, Torchivirus, Tottorivirus, Tremovirus, Tropivirus, Hepacivirus, Pegivirus, Pestivirus, Flavivirus IRES.

[0311] In some embodiments, the IRES is an IRES sequence of Taura syndrome virus, Triatoma virus, Theiler's encephalomyelitis virus, Simian Virus 40, Solenopsis invicta virus 1, Rhopalosiphum padi virus, Reticuloendotheliosis virus, Human poliovirus 1, Plautia stali intestine virus, Kashmir bee virus, Human rhinovirus 2, Homalodisca coagulata virus-1, Human Immunodeficiency Virus type 1, Himetobi P virus, Hepatitis C virus, Hepatitis A virus, Hepatitis GB virus, Foot and mouth disease virus, Human enterovirus 71, Equine rhinitis virus, Ectropis obliqua picorna-like virus, Encephalomyocarditis virus, Drosophila C Virus, Human coxsackievirus B3, Crucifer tobamovirus, Cricket paralysis virus, Bovine viral diarrhea virus 1, Black Queen Cell Virus, Aphid lethal paralysis virus, Avian encephalomyelitis virus, Acute bee paralysis virus, Hibiscus chlorotic ringspot virus, Classical swine fever virus, Human FGF2, Human SFTPA1, Human AML1/RUNX1, Drosophila antennapedia, Human AQP4, Human AT1R, Human BAG-1, Human BCL2, Human BiP, Human c-IAPI, Human c-myc, Human eIF4G, Mouse NDST4L, Human LEF1, Mouse HIF1 alpha, Human n.myc, Mouse Gtx, Human p27kipl, Human PDGF2/c-sis, Human p53, Human Pim-1, Mouse Rbm3, Drosophila reaper, Canine Scamper, Drosophila Ubx, Human UNR, Mouse UtrA, Human VEGF-A, Human XIAP, Drosophila hairless, S. cerevisiae TFIID, S. cerevisiae YAP1, tobacco etch virus, turnip crinkle virus, EMCV-A, EMCV-B, EMCV-Bf, EMCV-Cf, EMCV pEC9, Picobirnavirus, HCV QC64, Human Cosavirus E/D, Human Cosavirus F, Human Cosavirus JMY, Rhinovirus NAT001, HRV14, HRV89, HRVC-02, HRV-A21, Salivirus A SH1, Salivirus FHB, Salivirus NG-J1, Human Parechovirus 1, Crohivirus B, Yc-3, Rosavirus M-7, Shanbavirus A, Pasivirus A, Pasivirus A 2, Echovirus E14, Human Parechovirus 5, Aichi Virus, Hepatitis A Virus HA16, Phopivirus, CVA10, Enterovirus C, Enterovirus D, Enterovirus J, Human Pegivirus 2, GBV-C GT110, GBV-C K1737, GBV-C Iowa, Pegivirus A 1220, Pasivirus A 3, Sapelovirus, Rosavirus B, Bakunsa Virus, Tremovirus A, Swine Pasivirus 1, PLV-CHN, Pasivirus A, Sicinivirus, Hepacivirus K, Hepacivirus A, BVDV1, Border Disease Virus, BVDV2, CSFV-PK15C, SF573 Dicistrovirus, Hubei Picorna-like Virus, CRPV, Salivirus A BN5, Salivirus A BN2, Salivirus A 02394, Salivirus A GUT, Salivirus A CH, Salivirus A SZ1, Salivirus FHB, CVB3, CVB1, Echovirus 7, CVB5, EVA71, CVA3, CVA12, EV24 or an aptamer to eIF4G.

[0312] In some embodiments, the IRES comprises in whole or in part from a eukaryotic or cellular IRES. In certain embodiments, the IRES is from a human gene, where the human gene is ABCF1, ABCG1, ACAD10, ACOT7, ACSS3, ACTG2, ADCYAP1, ADK, AGTR1, AHCYL2, AHI1, AKAP8L, AKR1A1, ALDH3A1, ALDOA, ALG13, AMMECRIL, ANGPTL4, ANK3, AOC3, AP4B1, AP4E1, APAF1, APBB1, APC, APH1A, APOBEC3D, APOM, APP, AQP4, ARHGAP36, ARL13B, ARMC8, ARMCX6, ARPC1A, ARPC2, ARRDC3, ASAP1, ASB3, ASB5, ASCL1, ASMTL, ATF2, ATF3, ATG4A, ATP5B, ATP6V0A1, ATXN3, AURKA, AURKA, AURKA, AURKA, B3GALNT1, B3GNTL1, B4GALT3, BAAT, BAG1, BAIAP2, BAIAP2L2, BAZ2A, BBX, BCAR1, BCL2, BCS1L, BET1, BID, BIRC2, BPGM, BPIFA2, BRINP2, BSG, BTN3A2, C12orf43, C14orf93, C17orf62, C1orf226, C21orf62, C2orf15, C4BPB, C4orf22, C9orf84, CACNA1A, CALCOCO2, CAPN11, CASP12, CASP8AP2, CAV1, CBX5, CCDCl20, CCDCl7, CCDCl86, CCDC51, CCN1, CCND1, CCNT1, CD2BP2, CD9, CDC25C, CDC42, CDC7, CDCA7L, CDIP1, CDK1, CDK11A, CDKN1B, CEACAM7, CEP295NL, CFLAR, CHCHD7, CHIA, CHIC1, CHMP2A, CHRNA2, CLCN3, CLEC12A, CLEC7A, CLECL1, CLRN1, CMSS1, CNIH1, CNR1, CNTN5, COG4, COMMD1, COMMD5, CPEB1, CPS1, CRACR2B, CRBN, CREM, CRYBG1, CSDE1, CSF2RA, CSNK2A1, CSTF3, CTCFL, CTH, CTNNA3, CTNNB1, CTNNB1, CTNND1, CTSL, CUTA, CXCR5, CYB5R3, CYP24A1, CYP3A5, DAG1, DAP3, DAP5, DAXX, DCAF4, DCAF7, DCLRElA, DCP1A, DCTN1, DCTN2, DDX19B, DDX46, DEFB123, DGKA, DGKD, DHRS4, DHX15, D103, DLG1, DLL4, DMD UTR, DMD ex5, DMKN, DNAH6, DNAL4, DUSP13, DUSP19, DYNC1I2, DYNLRB2, DYRKIA, ECI2, ECT2, EIFIAD, EIF2B4, EIF4G1, EIF4G2, EIF4G3, ELANE, ELOVL6, ELP5, EMCN, ENOl, EPB41, ERMN, ERVV-1, ESRRG, ETFB, ETFBKMT, ETV1, ETV4, EXD1, EXT1, EZH2, FAM111B, FAM157A, FAM213A, FBXO25, FBXO9, FBXW7, FCMR, FGF1, FGF1, FGF1A, FGF2, FGF2, FGF-9, FHL5, FMR1, FN1, FOXP1, FTH1, FUBP1, G3BP1, GABBR1, GALC, GART, GAS7, gastrin, GATA1, GATA4, GFM2, GHR, GJB2, GLIl, GLRA2, GMNN, GPAT3, GPATCH3, GPR137, GPR34, GPR55, GPR89A, GPRASP1, GRAP2, GSDMB, GSTO2, GTF2B, GTF2H4, GUCYlB2, HAX1, HCST, HIGD1A, HIGD1B, HIPK1, HISTIHIC, HIST1H3H, HK11, HLA-DRB4, HMBS, HMGA1, HNRNPC, HOPX, HOXA2, HOXA3, HPCAL1, HR, HSP90AB1, HSPA1A, HSPA4L, HSPA5, HYPK, IFFO1, IFT74, IFT81, IGF1, IGF1R, IGF1R, IGF2, IL11, IL17RE, IL1RL1, IL1RN, IL32, IL6, ILF2, ILVBL, INSR, INTS13, IP6K1, ITGA4, ITGAE, KCNE4, KERA, KIAA0355, KIAA0895L, KIAA1324, KIAA1522, KIAA1683, KIF2C, KIZ, KLHL31, KLK7, KRR1, KRT14, KRT17, KRT33A, KRT6A, KRTAP10-2, KRTAP13-3, KRTAP13-4, KRTAP5-11, KRTCAP2, LACRT, LAMB1, LAMB3, LANCL1, LBX2, LCAT, LDHA, LDHAL6A, LEF1, LINC-PINT, LMO3, LRRC4C, LRRC7, LRTOMT, LSM5, LTB4R, LYRM1, LYRM2, MAGEA11, MAGEA8, MAGEB1, MAGEB16, MAGEB3, MAPT, MARS, MC1R, MCCC1, METTL12, METTL7A, MGC16025, MGC16025, MIA2, MIA2, MITF, MKLN1, MNT, MORF4L2, MPD6, MRFAP1, MRPL21, MRPS12, MSI2, MSLN, MSN, MT2A, MTFR1L, MTMR2, MTRR, MTUS1, MYB, MYC, MYCL, MYCN, MYL10, MYL3, MYLK, MYO1A, MYT2, MZB1, NAP1L1, NAV1, NBAS, NCF2, NDRG1, NDST2, NDUFA7, NDUFB11, NDUFC1, NDUFSI, NEDD4L, NFAT5, NFE2L2, NFE2L2, NFIA, NHEJ1, NHP2, NIT1, NKRF, NME1-NME2, NPAT, NR3C1, NRBF2, NRF1, NTRK2, NUDCD1, NXF2, NXT2, ODC1, ODF2, OPTN, OR10R2, OR11L1, OR2M2, OR2M3, OR2M5, OR2T10, OR4C15, OR4F17, OR4F5, OR5H1, OR5K1, OR6C3, OR6C75, OR6N1, OR7G2, p53, P2RY4, PAN2, PAQR6, PARP4, PARP9, PC, PCBP4, PCDHGC3, PCLAF, PDGFB, PDZRN4, PELO, PEMT, PEX2, PFKM, PGBD4, PGLYRP3, PHLDA2, PHTF1, PI4 KB, PIGC, PIM1, PKD2L1, PKM, PLCB4, PLD3, PLEKHA1, PLEKHBI, PLS3, PML, PNMA5, PNN, POC1A, POC1B, POLD2, POLD4, POU5F1, PPIG, PQBP1, PRAME, PRPF4, PRR11, PRRT1, PRSS8, PSMA2, PSMA3, PSMA4, PSMD11, PSMD4, PSMD6, PSME3, PSMG3, PTBP3, PTCH1, PTHLH, PTPRD, PUS7L, PVRIG, QPRT, RAB27A, RAB7B, RABGGTB, RAETIE, RALGDS, RALYL, RARB, RCVRN, REG3G, RFC5, RGL4, RGS19, RGS3, RHD, RINL, RIPOR2, RITA1, RMDN2, RNASE1, RNASE4, RNF4, RPA2, RPL17, RPL21, RPL26L1, RPL28, RPL29, RPL41, RPL9, RPS11, RPS13, RPS14, RRBP1, RSU1, RTP2, RUNX1, RUNX1T1, RUNX1T1, RUNX2, RUSC1, RXRG, S100A13, S100A4, SAT1, SCHIPI, SCMH1, SEC14L1, SEMA4A, SERPINA1, SERPINB4, SERTAD3, SFTPD, SH3D19, SHC1, SHMT1, SHPRH, SIM1, SIRT5, SLC11A2, SLC12A4, SLC16A1, SLC25A3, SLC26A9, SLC5A11, SLC6A12, SLC6A19, SLC7A1, SLFN11, SLIRP, SMAD5, SMARCADI, SMN1, SNCA, SNRNP200, SNRPB2, SNX12, SOD1, SOX13, SOX5, SP8, SPARCL1, SPATA12, SPATA31C2, SPN, SPOP, SQSTM1, SRBD1, SRC, SREBF1, SRPK2, SSB, SSB, SSBP1, ST3GAL6, STAB1, STAMBP, STAU1, STAU1, STAU1, STAU1, STAU1, STK16, STK24, STK38, STMN1, STX7, SULT2B1, SYK, SYNPR, TAF1C, TAGLN, TANK, TAS2R40, TBC1D15, TBXAS1, TCF4, TDGF1, TDP2, TDRD3, TDRD5, TESK2, THAP6, THBD, THTPA, TIAM2, TKFC, TKTL1, TLR10, TM9SF2, TMC6, TMCO2, TMED10, TMEM116, TMEM126A, TMEM159, TMEM208, TMEM230, TMEM67, TMPRSS13, TMUB2, TNFSF4, TNIP3, TP53, TP53, TP73, TRAF1, TRAK1, TRIM31, TRIM6, TRMT1, TRMT2B, TRPM7, TRPM8, TSPEAR, TTC39B, TTLL11, TUBB6, TXLNB, TXNIP, TXNL1, TXNRD1, TYROBP, U2AF1, UBA1, UBE2D3, UBE2I, UBE2L3, UBE2V1, UBE2V2, UMPS, UNG, UPP2, USMG5, USP18, UTP14A, UTRN, UTS2, VDR, VEGFA, VEGFA, VEPH1, VIPAS39, VPS29, VSIG10L, WDHD1, WDR12, WDR4, WDR45, WDYHV1, WRAP53, XIAP, XPNPEP3, YAP1, YWHAZ, YY1AP1, ZBTB32, ZNF146, ZNF250, ZNF385A, ZNF408, ZNF410, ZNF423, ZNF43, ZNF502, ZNF512, ZNF513, ZNF580, ZNF609, ZNF707, or ZNRD1.

ii. Synthetic Ties: Aptamer Complexes, Modified Nucleotides, IRES Variants & Other Engineered TIES

[0313] As contemplated herein, in certain embodiments, a translation initiation element (TIE) comprises a synthetic TIE. In some embodiments, a synthetic TIE comprises aptamer complexes, synthetic IRES or other engineered TIES capable of initiating translation of a linear RNA or circular RNA polynucleotide.

[0314] In some embodiments, one or more aptamer sequences is capable of binding to a component of a eukaryotic initiation factor to either enhance or initiate translation. In some embodiments, aptamer may be used to enhance translation in vivo and in vitro by promoting specific eukaryotic initiation factors (eIF) (e.g., aptamer in WO 2019/081383 A1 is capable of binding to eukaryotic initiation factor 4F (eIF4F). In some embodiments, the aptamer or a complex of aptamers may be capable of binding to EIF4G, EIF4E, EIF4A, EIF4B, EIF3, EIF2, EIF5, EIF1, EIF1A, 40S ribosome, PCBP1 (polyC binding protein), PCBP2, PCBP3, PCBP4, PABP1 (polyA binding protein), PTB, Argonaute protein family, HNRNPK (heterogeneous nuclear ribonucleoprotein K), or La protein.

iii. TIE Consensus

[0315] In some embodiments, a TIE disclosed herein comprises a naturally occurring and/or synthetic sequence and includes an IRES consensus sequence. In some embodiments, the TIE comprises a consensus sequence as set forth in the Table of Exemplary Consensus Sequences, below, wherein N is any nucleotide (e.g., pursuant to IUPAC). In some embodiments, the TIE comprises at least 100 nucleotides, at least 200 nucleotides, at least 300 nucleotides, at least 400 nucleotides, at least 500 nucleotides, at least 600 nucleotides, or at least 700 nucleotides (e.g., contiguous nucleotides) of said consensus sequence. Table of Exemplary Consensus Sequences (Table A) TCNNNNNNANNNNNCNNTTNAAANNNNCTGTGGGTTGTTCCCACNCACA

TABLE A
TABLE of Exemplary Consensus Sequences

TCNNNNNNANNNNNNNNCNNTTNAAANNNNCTGTGGGTTGTTCCCACNCACA
GGGCCCACTGGGCGCTAGCACTCTGATTTNACGAAATCNTTGTGCGCCTGTTTT
ATATCCCTTCCCCCNANTNNGAAACNTAGAAGCAATGCGCANCACTGATCAAT
AGNAGGCGTAACGCGCCAGTTACGTCATGATCAAGCANATCTGTNNCCCCGGA
CNGAGTATCAATAGACTGCTTNCGCGGTTGAAGGAGAAANNGTTCGTTANCCG
GCTAACTACTTCGAGAAGCCCAGTANCACCATGGAAGCTGCAGGGTGTTTCGC
TCAGCACTTCCCCCGTGTAGATCAGGTCGATGAGNCACTGCAANCCCCACAGG
NGANTGTGGCAGTGGCTGCGTTGGCGGCCTGCCTATGGGGAGACCCATAGGAC
GCTCTAATGTGGACATGGTGNGAAGAGCCTATTGAGCTAGTTAGTAGTCCTCC
GGCCCCTGAATGCGGCTAATCCTAACTGCGGAGCACANGCCNTCAACCCAGAG
GGTAGTGTGTCGTAANGGGCAACTCTGCAGCGGAACCGACTACTTTGGGTGTC
CGTGTTTCTTNTTATTCTTATATTGGCNGCTTATGGTGACAATTACAGAATTGTT
ACCATATAGCTATTGGATTGGCCATCCGGTGTGNAATAGAGCTGTTATATACCT
NTTTGTTGGNTTTGTNCCACTNACTTTAAAATCTATANNNACNCTNAANTTNAT
ATTNNCNCTCAANACANTTNAAC
(SEQ ID NO: 24867)
CTAATGTCTGNTNNNNNNNNNNNNNNNNNNNNNCCACTCACAGGACCCACGC
GGTGCTAGCACTCTGGTTCCACGGGACCTTTGTGCGCCTGTTTTATGTCCCCTN
CCCCAATTTGTAACTTAGAAGCAATTTGCAACACTGATCAGTAGCAGGCATAG
CGCACCAGCTATGTCTTGATCAAGCACTTCTGTTTCCCCGGACCGAGTATCAAT
AGACTGTNCACACGGTTGAAGGAGAAAGCGTCCGTTATCCGGCTAACTACTTC
GAGAAACCCAGTAGCACCATTGAAACTACAGAGTGTTTCGCTCCACACTTCCC
CCGTGTAGATCAGGTCGATGAGTCACTGCAATCCCCACGGGCGACCGTGGCAG
TGGCTGCGCTGGCGGCCTGCCTATGGGGCAACCCATAGGACGCTCTAATGTGG
ACATGGTGTGAAGAGTCTATTGAGCTAGTTAGTAGTCCTCCGGCCCCTGAATGC
GGCTAATCCTAACTGCGGAGCACATGCCTTCAATCCAGAGGGTAGTGTGTCGT
AATGGGCAACTCTGCAGCGGAACCGACTACTTTGGGTGTCCGTGTTTCCTTTTA
TTCTCACATTGGCTGCTTATGGTGACAATTACNGAATTGTTACCATATAGCTAT
TGGATTGGCCATCCGGTGTGCAATAGAGCTATTATATACCTATTTGTTGGCTTT
GTACCACTNACCTTAAAATCTNTAACCACTCTCGAGTGTATATTAACCCTTAAT
ACAATCAAAC
(SEQ ID NO: 24868)
NNNNNNNNNNNNNNNNNNNNNTNNNNNNNNNNNNNNNNNNNNNNCACTCAC
AGGACCCACGCGGTGCTAGCACTCTGGTTCCACGGNACCTTTGTGCGCCTGTTT
TANGTCCCCTCTCCCCAATTTGTAACTTAGAAGCAATTTNCAACACTGATCANT
AGCAGGCATNGCGCACCAGCTATGTCTTGATCAAGCACTTCTGTTTCCCCGGAC
CGAGTATCAATAGACTGTTCACACGGTTGAAGGAGAAAGCGTCCGTTATCCGG
CTAACTACTTCGAGAAACCCAGTAGCNCCATTGAAACTNCAGAGTGTTTCGCT
CCACACTTCCCCCGTGTAGATCAGGTCGATGAGTCACTGCAATCCCCACGGGC
GACCGTGGCAGTGGCTGCGCTGGCGGCCTGCCTATGGGGCAACCCATAGGACG
CTCTAATGTGGACATGGTGNGAAGAGTCTATTGAGCTAGTTAGTAGTCCTCCG
GCCCCTGAATGCGGCTAATCCTAACTGCGGAGCACATGCCTTCAANCCAGAGG
GTAGTGTGTCGTAATGGGCAACTCTGCAGCGGAACCGACTACTTTGGGTGTCC
GTGTTTCCTTTTATTCTCACATTGGCTGCTTATGGTGACAATTACAGAATTGTTA
CCATATAGCTATTGGATTGGCCATCCGGTGTGCAATAGAGCTATTATATACCTA
TTTGTTGGCTTTGTACCACTNACCTTAAAATCTNTAACCACTCTNGAGTNTATA
TTAACCCTTAATACAATCAAAC
(SEQ ID NO: 24869)
TATGTTTCCNNNCTNNTNGNNNNNNNNNNNNNNNNGGTNGTTCCCACCCACAG
GGCCCACTGGGCGCCAGTACACTGGTATGCCNNNNCCTNGGTATNACGGTACC
NTTNNNNNNCAGTACCTTTGTACGCCTGTTTTATATNCCCTCCCCNAANNGTAA
CCTTAGAAGTTTAAATAAACAAAGACCAATAGGAGTCCAACANCCAGTTGGAT
TGCGGTCAAGCACTTCTGTCTCCCCGGACCTAGTAGTGATAGGCTGTACCCACG
GCCGAAGATGAACCCGTCCGTTATCCGGCCAGCTACTTCGAGAAGCCTAGTAN
CATCAAAGATCTGTCTTGGCGTTTCGCTCAGCGCGTTCCCCCCGCGTAGATCGG
GCTGATGGGTCTCCGCATNCCCCACGGGCGACCGTGGCGGAGGCCGCGTGGCG
GCCCGCCTATGGCGAAAGCCATAGGACGCCATTTCAGTGACAGGGTGTGAAGA
GCCTATTGAGCTAGTTGGTAGTCCTCCGGCCCCTGAATGCGGCTAATCCTAACC
ACGGAGCNTCCGCCAACAAACCAGTTGGNAGGGNGTCGTAACGGGTAACTCT
GTGGCGGAACCGACTACTTTGGGTGTCCGTGTTTCCTTTTGATCCTATTTTGGCT
GCTTATGGTGACAACGATAAGTTGTTATCATAAAGCTTTTGGGTTGGCCACCTG
GAAAAAGTTATCAGTGTTTGATATTGTTCGGCTTTCACGCCTACCAATAAAACA
AGCTTTATATTTNTTAATTTCATTTTATCCATNNNAGGATATTACTGAATTTCAT
NTACAACTNTTGCTCACANTATCAGCAAN
(SEQ ID NO: 24870)
ANNNNNNNNNNNNNNNNNNNNTTAAAACAGCCTGTGGGTTGCACCCACCCAC
AGGGCCNACTGGGCGCTAGCACTCTGGNACTNAGGTACCTTTGTGCGCCTGTTT
TNNNTNCCCTTNCCCCGAAGTAACTTAGAAGCTGTNAANCAACGATCAANAGN
AGGTGTGACACACCAGTCATANCTTGATCAAGCACTTCTGTTTCCCCGGACTGA
GTATCAATAGGCTGCTCGCGCGGCTGAAGGAGAAAACGTTCGTTACCCGACCA
ACTACTTCGAGAAGCTTAGTACCACCATGAACGAGGCAGNGTGTTTCGNTCAG
CACAACCCCAGTGTAGATCAGGCTGATGAGTCACTGCAACCCCCATGGGCGAC
CATGGCAGTGGCTGCGTTGGCGGCCTGCCCATGGAGAAATCCATGGGACGCTC
TAATTCTGACATGGTGTGAAGAGCCTATTGAGCTAGCTGGTAGTCCTCCGGCCC
CTGAATGCGGCTAATCCTAACTGCGGAGCACATGCTCACAAACCAGTGGGTGG
TGTGTCGTAACGGGCAACTCTGCAGCGGAACCGACTACTTTGGGTGTCCGTGTT
TCCTTTTTATTCTTATNTTGGCTGCTTATGGTGACAATCAAAGANTTGTTACCAT
ATAGCTATTGGATTGGCCATCCGGTGTGCAACAGAGCAATTGTTTACCTATTTN
TTGGTTTTGTACCANTATCACTGAAGTCTGTGATCACTCTCAAATTCATTTTGAC
CCTCAACNCAATCAAAC
(SEQ ID NO: 24871)
ATTTACCATGTGNNNNNNNNNNNNNNNNNNNNNNNNANNNNTGTGCCCAATC
TCTTGACTCCTGCTGGAACCACCGACCAGTAGTGTCCAAAATGCNAGGTGGAA
AATCCTCCCTTCCCCTCTGGGCTNCATGCCCNGCATCCTCCCCCCAGCCTGACG
TGCCACAGGCTGTGCAAAGACCCCGCGAAAGCTGCCAAAAGTGGCAATTGTGG
GTCCCCCCTTTGTCAAGGCGTCGAGTCTTTCTCCCTTAAGGCTAGNCCNGTCAG
TGAACTCTGTCGGGCAACTAGTGACGCCACTGCATGCCTCCGACCTCGGCCGC
GGAGTGCTGCCCCCCAAGTCATGCCCCTGACCACAAGTTGTGCTGTCTGGCAA
ACANTGTCTGTGAGAATGTTCCGCTGTGGCTGCCAAGCCTGGTAACAGGCTGC
CCCAGTGTGCGTANTTCTCATCCAGACNTCGGTCTGGCAACTTGCTGTTAAGAC
ATGGCGTAAGGGGCGTGTGCCAACGCCCTGGAACGAGTGTCCACTCTAATACC
CCGAGGAATGCTACGCAGGTACCCCTGGCTCGCCAGGGATCTGAGCGTAGGCT
AATTGTCTAAGGGTATTTTCATTTCCCACNCTCTNNTTCTTGTTCATA
(SEQ ID NO: 24872)
CAGAACTTGTGTCGTGGATAATGTAACTTAGAAGTTATTAAACAAAGTTCAAT
AGAAGGGGGTACAAACCAGTGCCACCACGAACAAGCACTTCTGTTTCCCCGGT
GAAGCTGTATAGACTGTCTCCACGGTTGAAAATGGCAGATCCGTTACCCGCTTT
GGTACTTCGAGAAACCTAGTATCACCTTGGAATCTTCGATGCGTTGCGCTCAGC
ACTCAACCCCAGAGTGTAGCTTAGGTCGATGAGTCTGGACGATCCTCACTGGT
GACAGTGGTCCAGGCTGCGTTGGCGGCCTACCTGTGGTGAAAACCACAGGACG
CTAGTTGTGAACAAGGTGTGAAGAGTCTATTGAGCTACCAAAGAGTCCTCCGG
CCCCTGAATGCGGCTAATCCTAACCACGGAGCAAGTGCCTTCAAACCAGTAGG
TAGCTTGTCGTAACGCGCAAGTCTGTGGCGGAACCGACTACTTTGGGTGTCCGT
GTTTCCTTTTATTTTATCATGGCTGCTTATGGTGACAATCTAAGATTGTTATCAT
ATAGCTATTGGATTGGCCATCCGGTGACTAACAGAGATCTCATATACCTTTTTG
TTGGTTTTACTAAATTAAATATTACCACGTTCAAGACACTTCTCCTTATCATAC
AACTAAATAGTGAGAAGAGAAA
(SEQ ID NO: 24873)
CACCCTCAGGTGCAAAGATGTTAAAACAGCTCTGGGGTTGTTCCCACCCACAG
GGCCCACTGGGCGCTAGCACTCTGGTATCCCGGTACCCTTGTGCGCCTGTTTTA
TCTACCCTTCCCCAATTGCAATTTAGAAGTTCAACACTCACGGTCAATAGACGG
CTCAGTACGCCAACTGAGTTACGACCAAGTACTTCTGTTACCCCGGACCGAGT
ATCAATAGGCTGCTCACGCGGCTGAAGGAGAAAACGTTCGTTATCCGGCCAAT
TACTTCGAGAAACCTAGTACCACCATGAAGGTTGCGCAGCGTTTCGCTCCGCA
CAACCCCAGTGTAGATCAGGCCGATGAGTCACCGCACTCCCCACGGGCGACCG
TGGCGGTGGCTGCGCTGGCGGCCTGCCCATGGGGTAACCCATGGGACGCTTCA
ATACTGACATGGTGCGAAGAGTCTATTGAGCTAATTGGTAGTCCTCCGGCCCCT
GAATGCGGCTAATCCTAACTGCGGAGCAGGTACCCACATGCCAGTGGGCAATC
TGTCGTAATGGGCAACTCTGCAGCGGAACCGACTACTTTGGGTGTCCGTGTTTC
CTTTTATTCCTATACTGGCTGCTTATGGTGACAATTGAGAGATTGTTACCATAT
AGCTATTGGATTGGCCATCCGGTGACAAACAGAGCAATTGTTTACTTATTTGTT
GGTTTTGTACCATTAAATTTTAAGGCTCTAAGAACACTTAATTACATATTATTA
CTCAACTCATTCAA
(SEQ ID NO: 24874)
TNNNNNNNNNNNNNNNNNCNNNNAAACAGCTCTGGGGTTGTTCCCACCCCAG
AGGCCCACGTGGCGGCTAGTACACTGGTATCACGGTACCTTTGTACGCCTGTTT
TATACTCCCTCCCCCGCAACTTAGAAGCATACAANTCAAGCTCAATAGGAGGG
GGTGCAAGCCAGCGCCTCCGTGGGCAAGCACTACTGTTTCCCCGGTGAGGCCG
CATAGACTGTTCCCACGGTTGAAAGTGNCCGATCCGTTATCCGCTCATGTACTT
CGAGAAGCCTAGTATCGCTCTGGAATCTTCGACGCGTTGCGCTCAGCACTCAA
CCCCGGAGTGTAGCTTGGGCCGATGAGTCTGGACAGTCCCCACTGGCGACAGT
GGTCCAGGCTGCGCTGGCGGCCCACCNGTGGCCCAAAGCCACGGGACGCTAGT
TGTGAACAGGGTGTGAAGAGCCTATTGAGCTACATGAGAGTCCTCCGGCCCCT
GAATGCGGCTAATCCTAACCATGGAGCAGGCAGCTGCAACCCAGCAGCCAGCC
TGTCGTAACGCGCAAGTCCGTGGCGGAACCGACTACTTTGGGTGTCCGTGTTTC
CTTTTATTCTTGAATGGCTGCTTATGGTGACAATCATAGATTGTTATCATAAAG
CGAGTTGGATTGGCCATCCAGTGTGAATCAGATTAATTACTCCCTTGTTTGTTG
GATCCACTCCCGAAACGTTTTACTCCTTAACTTATTGAAATTGTTTGAAGACAG
GATTTCAGTGTCACA
(SEQ ID NO: 24875)
CAANNNNNNNNNNNNNNNNNNNNTTAAAACAGCTCTGGGGTTGTTCCCACCC
CAGAGGCCCACGTGGCGGCTAGTACTCTGGTATCGCGGTACCTTTGTACGCCT
GTTTTATACCCCNACCCCATGTAACTTTAGAAGCAGTTCAACAAGTTCAATAGG
GGGGGTGCAAACCAGCACCACCACGAACAAGCACTTCTGTAACCCCGGTNACC
TTGTATANGCTGTACCCACGGCTGAAAGCGAGTGATCCGTTATCCGCTTAAGTA
CTTCGAGAAGCCTAGTANCACCTTAGAATCTTCGATGCGTTGCGCTCAGCACTC
TATCCCGAGTGTAGCTTAGGCTGATGAGTCTGGGCGTTCCNCACCGGCGACGG
TGGCCCAGGCTGCGTTGGCGGCCTACCCATGGCTAACGCCATGGGACGCTAGA
TGTGAACAAGGTGTGAAGAGCCTATTGAGCTACTTAAGAGTCCTCCGGCCCCT
GAATGCGGCTAATCCCAACCACGGAGCAGGTGCCTTCAACCCAGAGGGTGGCC
TGTCGTAACGCGCAAGTCTGTGGCGGAACCGACTACTTTGGGTGTCCGTGTTTC
CTTTTATCTTTTATATGGCTGCTTATGGTGACAATCATAGATTGTTATCATAAAG
CGACTTGGATTGGCCATCCGGTAAAATACAAACACATCANTTACTTGTTTGTTG
GATTTACTCCACTCNCCCAATTTACTCCTAGCATAATATCCATTGTTTTGTTAAN
AAGACATTACTATCACA
(SEQ ID NO: 24876)
CAACCCACCAACGGTACACCGCNCNNNTTNNNGNNNNNNNNNNNNNNNATTC
CCAAGGCCCACTCGGTTCAACTTCGGTTTCCGGACAAATANAAAGAACCTCAG
TCCTCTTGGTACTTTCTCGCCTGAGTCTACAAAGCGAGAAACCTGCCCCTCTAA
CGCCAGACGAGCGGCATAAAACTCGAACTTCTGGCACGTTCCACCACCCCTTC
TCCTATCCCAACCCCCATTGCGCTCTCAAGGTCGCGCTTTTCCGAGACTAGCTC
GGATTCAAAAAGTTCCTGGCACCCTTTACCCCTTCAGGCCCTTAAGGTAGGAA
CTGACCTTGTGCTGTGATCTCGGTGCGGAAGTGCTACTGCGTAGTGATTGTAAG
ATCCTTTTGTGGTTCTGCCCTGGCAAGGCTACAGAGTGCTGTGATCCGCTGCGG
ATGCCATCCTGGTAACAGGACCCCCAGTGTGCGCAACAGTATGTTCACGGTCT
TCCGTGTTCACCACATTCGGAACACTGCTTTCGTGAAACAGTGTGTGTCCAATC
CCTGTGATCAGTATCAACCACACCACCTAGGAATGCTAGGAAGGTACCCCGGT
TCGCCGGGATCTGATCCTAGGCTAATTGTCTACGGTGGTGCTCCTTTTTATTTTC
CACTTCAACTCACTGGTTACAACTGCTTGATTTCTGTGTTTGCTGCTTTTCTCTG
CTCTCACTGCCATTCTCAAGTGTTCACACTGTCCAAGCTCCTTTGGTTGTTCGCT
TCCACTTGCCACTGTCAACTCTTGTC
(SEQ ID NO: 24877)
GTTTGATGGCGTGNNNNNNNNNNNNNNNNNNNNTTAAAACAGCCTGTGGGTT
GTTCCCACCCACAGGGCCCACTGGGCGCTAGCACACTGATTCTGCGGGATCTTT
GTGCGCCTGTTTTATAACCCTTNCCCCTAAGCAGCAACTTAGAAGCTTTGNACA
ATCACGACCANTAGTGGGCGTGNCGCGCCAGTCACGTCTTGGTCAAGCACTTC
TGTNTCCCCGGACTGAGTATCAATAGACTGCTCACGCGGTTGAAGGAGAAAAC
GTTCGTTANCCGGCTAACTACTTCGAGAAACCTAGTAGCACCNTGAAAGTTGC
GGAGTGTTTCGCTCAGCACTTCCCCCGTGTAGATCAGGTCGATGAGTCACTGTA
AACCCCACGGGCGACCGTGACAGTGGCTGCGTTGGCGGCCTGCCCATGGGGTA
ACCCATGGGACGCTCTAATACAGACATGGTGNGAAGAGTCTATTGAGCTAGTT
AGNAGTCCTCCGGCCCCTGAATGCGGCTAATCCTAACTGCGGAGCGCGCACCC
TCAACCCAGGGGGGCGGCGNGTCGTAATGGGTAACTCTGCAGCGGAACCGACT
ACTTTGGGTGTCCGTGTTTCCTTTTTTATTCNTTATTGGCTGCTTATGGTGACAA
TTGAAAAGTTGTTACCATATAGCTATTGGATTGGCCATCCGGTGTCNAACAGA
GCTATTGTTTACCTATTTATTGGATACGTCCCTCTTAATCTCAAGGCCATTCAAA
CTCTTGATTATATATTGCTCCTTAANTGTAAGAA
(SEQ ID NO: 24878)
CAANNNNNNNNNNNNNNNNNNNNTTAAAACAGCTCTGGGGTTGTTCCCACCC
CAGAGGCCCACGTGGCGGCTAGTACTCTGGTATCGCGGTACCTTTGTACGCCT
GTTTTATACCCCNACCCCATGTAACTTTAGAAGCAGTTCAACAAGTTCAATAGG
GGGGGTGCAAACCAGCACCACCACGAACAAGCACTTCTGTAACCCCGGTGACC
TTGTATAAGCTGTACCCACGGCTGAAAGCGAGTGATCCGTTATCCGCTTAAGTA
CTTCGAGAAGCCTAGTATCACCTTAGAATCTTCGATGCGTTGCGCTCAGCACTC
TATCCCGAGTGTAGCTTAGGCTGATGAGTCTGGGCGTTCCNCACCGGCGACGG
TGGCCCAGGCTGCGTTGGCGGCCTACCCATGGCTAACGCCATGGGACGCTAGA
TGTGAACAAGGTGTGAAGAGCCTATTGAGCTACTTAAGAGTCCTCCGGCCCCT
GAATGCGGCTAATCCCAACCACGGAGCAGGTGCCTTCAACCCAGAGGGTGGCC
TGTCGTAACGCGCAAGTCTGTGGCGGAACCGACTACTTTGGGTGTCCGTGTTTC
CTTTTATCTTTTATATGGCTGCTTATGGTGACAATCATAGATTGTTATCATAAAG
CGACTTGGATTGGCCATCCGGTAAAATACAAACACATCATTTACTTGTTTGTTG
GATTTACTCCACTCTCCCAATTTACTCCTAGCATAATATCCATTGTTTTGTTAAC
AAGACATTACTATCACA
(SEQ ID NO: 24879)
ATCGAAAGGCTTATACGATCCCACGTGTGTATGCCAACCTACATGGACTCNNN
NNNNTAGGNTNNANNNNCAACCCTTTCATAACCCCCCCCTTTTAACCCNNCNN
NNNGTNANCNNACGCTTCACTCGCCTTTGGGTATAGCGGCCCAATGTGCTGAA
GAAAAGGATACGCTATAAGGGGCCAACGGGTGGTGGCCCTTAAGACCACCCA
ACCTAGAAGCTTGTACACTCGGGCAATAGTGAGGCCCACATCCAGTGGGTCAA
GCCCAAAGCATTCTTGTTCCCCGGTATGATCTCATAAGCTGTACCCACGGCTGA
AAGAGTGATTATCGTTATCCCACTCAGTACTTCGGAGAGCCTAGTACACCACTT
GGAAATGGAAGTCTGTGATCCGGGGTTGACCCTGAACCCCAGAAACTCATGAT
GAGGCTAACCTTCCCGAACACGGCGACGTGTGGTTAGCCTGCGCTGGCATGAG
GCCTCTTTGTAGGCAGACTGAAATGGAAGGGTGACGAAGAGCCGACTGAGCTA
CTGTTTTATTCCTCCGGCCCCCTGAATGCGGCTAATCCTAACTCCTGGTCCAGT
ACTTGTAACCCAACAGGTGGCTGGTCGTAATGCGTAAGCCGGGAGCGGAACCG
ACTACTTTGGGGCGTCCGTGTTTCTCAATATTATTCATTTCTAGCTTATGGTGAC
AATTTATGATTGCAGAGATTGTGCTGTATTTGTGTCTGAGAGAAGAAGTAACA
AT
(SEQ ID NO: 24880)
CAACCCACCAACGGTACACCGCNCNNNTTNNNGNNNNNNNNNNNNNNNATTC
CCAAGGCCCACTCGGTTCAACTTCGGTTTCCGGACAAATANAAAGAACCTCAG
TCCTCTTGGTACTTTCTCGCCTGAGTCTACAAAGCGAGAAACCTGCCCCTCTAA
CGCCAGACGAGCGGCATAAAACTCGAACTTCTGGCACGTTCCACCACCCCTTC
TCCTATCCCAACCCCCATTGCGCTCTCAAGGTCGCGCTTTTCCGAGACTAGCTC
GGATTCAAAAAGTTCCTGGCACCCTTTACCCCTTCAGGCCCTTAAGGTAGGAA
CTGACCTTGTGCTGTGATCTCGGTGCGGAAGTGCTACTGCGTAGTGATTGTAAG
ATCCTTTTGTGGTTCTGCCCTGGCAAGGCTACAGAGTGCTGTGATCCGCTGCGG
ATGCCATCCTGGTAACAGGACCCCCAGTGTGCGCAACAGTATGTTCACGGTCT
TCCGTGTTCACCACATTCGGAACACTGCTTTCGTGAAACAGTGTGTGTCCAATC
CCTGTGATCAGTATCAACCACACCACCTAGGAATGCTAGGAAGGTACCCCGGT
TCGCCGGGATCTGATCCTAGGCTAATTGTCTACGGTGGTGCTCCTTTTTATTTTC
CACTTCAACTCACTGGTTACAACTGCTTGATTTCTGTGTTTGCTGCTTTTCTCTG
CTCTCACTGCCATTCTCAAGTGTTCACACTGTCCAAGCTCCTTTGGTTGTTCGCT
TCCACTTGCCACTGTCAACTCTTGTC
(SEQ ID NO: 24881)
NNNNNNNNNNNNNNNNNNNNTTAAAACAGCTCTGGGGTTGNACCCACCCCAG
AGGCCCACGTGGCGGCTAGTACTCCGGTATTGCGGTACCCTTGTACGCCTGTTT
TATACTCCCTTCCCGTAACTTAGACGCACAAAACCAAGTTCAATAGAAGGGGG
TACAAACCAGTACCACCACGAACAAGCACTTCTGTTTCCCCGGTGATGTTGTAT
AGACTGCTTGCGTGGTTGAAAGCGACGGATCCGTTATCCGCTTATGTACTTCGA
GAAGCCCAGTACCACCTCGGAATCTTCGATGCGTTGCGCTCAGCACTCAACCC
CAGAGTGTAGCTTAGGCTGATGAGTCTGGACATCCCTCACCGGTGACGGTGGT
CCAGGCTGCGTTGGCGGCCTACCTATGGCTAACGCCATGGGACGCTAGTTGTG
AACAAGGTGTGAAGAGCCTATTGAGCTACATAAGAATCCTCCGGCCCCTGAAT
GCGGCTAATCCCAACCTCGGAGCAGGTGGTCACAAACCAGTGATTGGCCTGTC
GTAACGCGCAAGTCCGTGGCGGAACCGACTACTTTGGGTGTCCGTGTTTCCTTT
TATTTTATTGTGGCTGCTTATGGTGACAATCACAGATTGTTATCATAAAGCGAA
TTGGATTGGCCATCCGGTGAAAGTGAGATTCATTATCTATCTGTTTGCTGGATT
CGCTCCATTGAGTGTGTTTACTCTAAGTACAATTTCAACAGTTATTTCAATCAG
ACAATTGTATCANA
(SEQ ID NO: 24882)
ACCACCGTGAATGCGACAATGGCGCGCCTCGGCAAGGCCGCCGATACCGCACT
GTGCTACTTCGGTACCACTCTGCGGGAATGACAATATGCCCGGTGTATAGTTTG
CCTGTTTCTCGCACNNNNNNNGCNNNNNCGGNANTGTGAAACTGGCACCCCTC
CTCTCCCCTACCACCCTTTCTCCTTCGCCCCCATTCATAATTTACAACGCCGCAC
ACAGCGGCGGCCGCCAAGGGCTAGCCTGGCGGTTATAAAAGGAACCTGGGTCT
TTCCCTCTTCAAGCCAAAAGGTAGGTTCCCTGTGTCCCTGAATGCTCGGTGAGG
AATGCTGCACCGTAACGCTTTGTGAAGTGTTTGCAAGTTCTGGCCCGGCAAGCC
TACAGAGTGCTGTGATCCGCTGCGGACGCCATCCTGGTAACAGGACCCCCAGT
GTGCGCAACAGTATGTTCAGACTTCGGTTTGTTCACTTGCTTTCATGGACCATT
GCGCGAAAGTGCGTGCGCCATATCCCTGTACTTCAGGTGTGCTTCTCTGGACCC
TAGGAATGCTGCGAAGGTACCCCGTTTCGGCGGGATCTGATCGCAGGCTAATT
GTCTATGGGTTCAGTTTCCTTTTTCTTTACTCCACAATTGACTGCTTAACTGACT
CTGGATCTTGTGCTTCCACTGCTCTTTCTGCTCTCAAAACGGCTTCACTTACCAA
CTCTCACCTTTCGACCAACACCATTTACACACTAACTTTTTTCGACTCTTCTGAC
TCCTGGCTTGGTGAAGAC
(SEQ ID NO: 24883)
NNNNNNNNNNNNNNNNNNNNATTCTCGGGCTACGGCCCTGGAGCCACTCCGG
CTCCTAAAGATTTAGAAGTTTGAGCACACCCGCCCACTAGGGCCCCCCATCCA
GGGGGGCAACGGGCAAGCACTTCTGTTTCCCCGGTATGATCTGATAGGCTGTA
ACCACGGCTGAAACAGAGATTATCGTTATCCGCTTCACTACTTCGAGAAGCCT
AGTAATGATGGGTGAAATTGAATCCGTTGATCCGGTGTCTCCCCCACACCAGA
AACTCATGATGAGGGTTGCCATCCCGGCTACGGCGACGTAGCGGGCATCCCTG
CGCTGGCATGAGGCCTCTTAGGAGGACGGATGATATGGATCTTGTCGTGAAGA
GCCTATTGAGCTAGTGTCGACTCCTCCGCCCCCGTGAATGCGGCTAATCCTAAC
CCCGGAGCAGGTGGGTCCAATCCAGGGCCTGGCCTGTCGTAATGCGTAAGTCT
GGGACGGAACCGACTACTTTCGGGAAGGCGTGTTTCCATTTGTTCATTATTTGT
GTGTTTATGGTGACAACTCTGGGTAAACGTTCTATTGCGTTTATTGAGAGATTC
CCAACAATTGAACAAACGAGAACTACCTGTTTTATTAAATTTACACAGAGAAG
AATTACA
(SEQ ID NO: 24884)
ACGTTCGCTGCGGTGCCAATTTAAAACAGCTCTGGGGTTGTTCCCACCCCAGA
GGCCCACGTGGCGGCTAGTACTCTGGTATTACGGTACCTTTGTACGCCTGTTTT
ATACTCCCTTCCCCTCCGTAACTTAGAAGCATGAGAATCAAGTTCAATAGAAG
GGGGTACAAACCAGTACCACCACGAACAAGCACTTCTGTCACCCCGGTGAGGT
TGTATAGACTGTCCCCACGGTTGAAAGCGACTGATCCGTTATCCGCTCAATTAC
TTCGGGAAGCCTAGTACCATCCTGGAATCTTCGATGCGTTGCGCTCAGCACTCA
ACCCCAGAGTGTAGCTTAGGCCGATGAGTCTGGACAATCCTCACTGGCGACAG
TGGTCCAGGCTGCGTTGGCGGCCTACCTGTGGTCCAAAGCCACAGGACGCTAG
TTGTGAACAAGGTGCGAAGAGCCTACTGAGCTAATTGAGAGTCCTCCGGCCCC
TGAATGCGGCTAATCCCAACCACGGAGCAGGCGGTTGCAAACCAGCAACTGGC
TTGTCGTAACGCGAAAGTCTGTGGCGGAACCGACTACTTTGGGTGTCCGTGTTT
CCTTTTATTCTTATGATGGCTGCTTATGGTGACAATCGTTGATTGTTATCATAAA
GCGAATTGGATTGGCCATCCGGTGAAAATCAAATCTATTGTTTACCTGTTCATT
GGGTTCACTCCACTAACTTCACACACTATATATCTCATTAAGGTCGTATTACTA
GTAAGGAATTATCACCAAA
(SEQ ID NO: 24885)
CGAGCTCCGTGAATAAACTCCTTCACTTTCCATAACTACAGTGCTTTGGTAGGT
AAGCATCCTGACCCCCCGCGGAAGCTGCCAACGTGGCAACTGTGGGGATCCAG
GCAGGTTATCAAAGGCACCCGGTCTTTCCGCCTTCAGGAGTATCCCTGCCGGTG
AATTCCGACAGGGCTCTGCTTGGTGCCAACCTCCCCCAAATGCGCGCTGCGGG
AGTGCTCTTCCCCAACTCATCTTAGTAACCTCTCATGTGTGTGCTTGGTCAGCA
TATCTGAGGCGACGTTCCGCTGTCCCAGACCAGTCCAGCAATGGACGGGCCAG
TGTGCGTAGTCGCTTTCCGGTTTCCCGGCGCATGTTTGGCGAAACGCTGAGGTA
AGGTTGGTGTGCCCAATGCCCGTAATTTGGTGACACCTCAAGACCACCCAGGA
ATGCCAGGGAGGTACCCCACTTCGGTGGGATCTGACCCTGGGCTAATTGTCTA
CGGTGGTTCTTCTTGCTTCCACTTCTCTTTTTTCTGGCATG
(SEQ ID NO: 24886)
AGGAGTGCTGATATAGATTCGGATTTAGGCCGTGGTGCCCGTGGGCACGACGG
CCACGGCTCCAGCCGCACTCCTCTCCACGCCTTGTCCCACGGGACATAAAGTG
GAGCCCTAAGCCCTAAACCCCCATGTTACCCAATTTTCTTATCCACTTCCCTTTT
TCCCTTTGACTCACATTTTTCTTGACCGCGCTTGTGAGGCGGTTCCCGTACAGTT
GAGTTGACGGGTCCCGCGCGGGACCTGAAAATTACTCCATACTGATTAGGAAA
GGTTCTAGTACGCTTGTACCCTTAAGGCCAGCGGGCTACCTCCTTTAGGTCTTA
TAGCCCCAACTGGTTAGAACCACTCCAGCTCACCTCTATCGGTGCGGGAGTGC
TACCACCCCTGCCTGCGTCAAGCCCGTTTTTCTAGTGATCTGTCCACAAACACT
TGGATTCCCGTCGCGACTGACAGAACCTGGCGACAGGTGTCTCGATGTGTGTG
ACCAAGTGGCATGAGAATCGGAAACTAACGCTGGTAAGATGGTAAGTGCCCA
ATCCCTGTGGGGTGATGTTTTTCTCTGCATAGGAATGCTGCGAAGGTACCCCGG
CCTTGAGTCGGGATCTGATCGCAGGCTAATTGTCCTCTGTGCAGTTCATTTCCT
TTTCTTTTCATTGGCATC
(SEQ ID NO: 24887)
NNNNNNNNNNNNNNNNNNNNNTNNNNNNNNNNNNNNNNNNNNNNCACTCAC
AGGACCCACGCGGTGCTAGCACTCTGGTTCCACGGNACCTTTGTGCGCCTGTTT
TANGTCCCCTCTCCCCAATTTGTAACTTAGAAGCAATTTNCAACACTGATCANT
AGCAGGCATNGCGCACCAGCTATGTCTTGATCAAGCACTTCTGTTTCCCCGGAC
CGAGTATCAATAGACTGTTCACACGGTTGAAGGAGAAAGCGTCCGTTATCCGG
CTAACTACTTCGAGAAACCCAGTAGCNCCATTGAAACTNCAGAGTGTTTCGCT
CCACACTTCCCCCGTGTAGATCAGGTCGATGAGTCACTGCAATCCCCACGGGC
GACCGTGGCAGTGGCTGCGCTGGCGGCCTGCCTATGGGGCAACCCATAGGACG
CTCTAATGTGGACATGGTGNGAAGAGTCTATTGAGCTAGTTAGTAGTCCTCCG
GCCCCTGAATGCGGCTAATCCTAACTGCGGAGCACATGCCTTCAANCCAGAGG
GTAGTGTGTCGTAATGGGCAACTCTGCAGCGGAACCGACTACTTTGGGTGTCC
GTGTTTCCTTTTATTCTCACATTGGCTGCTTATGGTGACAATTACAGAATTGTTA
CCATATAGCTATTGGATTGGCCATCCGGTGTGCAATAGAGCTATTATATACCTA
TTTGTTGGCTTTGTACCACTNACCTTAAAATCTNTAACCACTCTNGAGTNTATA
TTAACCCTTAATACAATCAAAC
(SEQ ID NO: 24888)
NNNNNNNNNNNNNNNNNNNNNTAAAANNGCCTTGGGGTTGTTCCCACTCCAA
GGGCCCACGTGGCGGCTAGTACTCTGGTACTTCGGTACCTTTGTACGCCTGTTT
TATCTCCCTTCCCAATGTAANTTAGAAGNTCTTAAATCAANGCTCAATAGGTGG
GGCGCAAACCAGCGCTCTCATGAGCAAGCACTCCTGTCTCCCCGGTGNGGTTG
TATAAACTGTTCCCACGGTTGAAAACAACCTATCCGTTATCCGCTATAGTACTT
CGAGAAACCTAGTATCACCTTTGGATTGTTGACGCGTTGCGCTCAGCACACTAA
CCCGTGTGTAGCTTGGGTCGATGAGTCTGGACATACCCCACTGGCGACAGTGG
TCCAGGCTGCGTTGGCGGCCTACTCATGGTGAAAACCATGAGACGCTAGACAT
GAACAAGGTGTGAAGAGTCTATTGAGCTACTATAGAGTCCTCCGGCCCCTGAA
TGCGGCTAATCCTAACCATGGAGCAAGTGCTCACAGGCCAGTGAGTTGCTTGT
CGTAATGCGCAAGTCCGTGGCGGAACCGACTACTTTGGGTGTCCGTGTTTCACT
TTTTACTTTTATGACTGCTTATGGTGACAATTTGATATTGTTACCATTTAGCTTG
TCAAATNAATTGCAAAAGATCCTAAATCTTANTTANCAANTTGCATTTTGATAA
CNTTNATTTGAAAATTTTAANANNNNNNTNAANNA
(SEQ ID NO: 24889)
AGATACTATAGATGGATCCACCTCGGCCCCCTCACCCTCTTTTCCGGTGGCCAC
GCCCGGGCCACCGATACTTCCCTTNNCNNNNNCGGGANTNNTNNNNNGNAAC
NCNACANNNNNNNNNTNTTTNNNNNNNCNNTCCCCCTTTTCCNAACCCCAACC
GCCGTATCTGGTGGCGGCAAGACACACGGGTCTTTCCCTCTAAAGCACAATTG
TGTGTGTGTCCCAGGTCCTCCTGCGTNCGGTGCGGGAGTGCTCCCACCCAACTG
TTGTAAGCCTGTCCAACGNGTCGTCCTGGCAAGACTATGACGTCGCATGTTCCG
CTGCGGATGCCGACCGGGTAACCGGTTCCCCAGTGTGTGTAGTGCGATCTTCC
AGGTNCTCCTGGTTGGCGTTGTCCAGAAACTGCTTCAGGTAAGTGGGGTGTGC
CCAATCCCTACAAAGGTTGATTCTTTCACCACCTTAGGAATGCTCCGGAGGTAC
CCCAGCAACAGCTGGGATCTGACCGGAGGCTAATTGTCTACGGGTGGTGTTTC
CTTTTTCTTTTTCACACAACTNNANTGCTGACAACTCACTGACTANCCACTTGC
TCTCTTGTGCCTTTCTGCTCTGGTTCAAGTTCCTTGATTGTTTTTGANTGCTTTTT
NANTGCTTTTCTTCNCACAATCCTTGCTCAGTTCAAAGTC
(SEQ ID NO: 24890)
TTGAGTGGCCTCACCGGAATTGTGAAACTNGNNNNNNNNNNNNNCCCTNCCAC
CCTTTCTCCTTCGCCCCCATTCATAANTNNNNNCGNNNNNNNNNNCGGCGGCC
GCCAAGGGCTAGCCTGGCGGTTATAAAAGGAACCTGGGTCTTTCCCTCTTCAA
GCCAAAAGGTAGGTTCCCTGTGTCCCTGAATGCTCGGTGAGGAATGCTGCACC
GTAACGCTTTGTGAAGTGTTTGCAAGTTCTGGCCCGGCAAGCCTACAGAGTGCT
GTGATCCGCTGCGGACGCCATCCTGGTAACAGGACCCCCAGTGTGCGCAACAG
TATGTTCAGACTTCGGTTTGTTCACTTGCTTTCATGGACCATTGCGCGAAAGTG
CGTGCGCCATATCCCTGTACTTCAGGTGTGCTTCTCTGGACCCTAGGAATGCTG
CGAAGGTACCCCGTTTCGGCGGGATCTGATCGCAGGCTAATTGTCTATGGGTTC
AGTTTCCTTTTTCTTTACTCCACAATTGACTGCTTAACTGACTCTGGATCTTGTG
CTTCCACTGCTCTTTCTGCTCTCAAAACGGCTTCACTTACCAACTCTCACCTTTC
GACCAACACCATTTACACACTAACTTTTTTCGACTCTTCTGACTCCTGGCTTGGT
GAAGAC
(SEQ ID NO: 24891)
NNNNNNNNNNNNNNNNNANNTTNAAANNNNNNNNGGGGNTGTTCCCACCCTA
GAGGCCCACGTGGCGGCTAGCACTCTGGTATCACGGTACCTTTGTGCGCCTGTT
TTATATCCCTTTCCCCATGCAACTTAGAAGTTTTTTAAACAAAGTTCAATAGAA
GGGGGTACAAACCAGTGCCACCACGAACAAGCACTTCTGTTTCCCCGGTGAAG
CTGCATAGACTGTCCCCACGGTTGAAAGCGGCAGATCCGTNATCCGCTTTGGT
ACTTCGAGAAACCTAGTATCACCTTGGAATCTTCGATGCGTTGCGCTCAGCACT
CAACCCCAGAGTGTAGCTTAGGTTGATGAGTCTGGACNATCCTCACTGGCGAC
AGTGGTCCAGGCTGCGTTGGCGGCCTACCTGTGGTGAAAACCACAGGACGCTA
GATGTGAACAAGGTGTGAAGAGTCTATTGAGCTACCAAAGAGTCCTCCGGCCC
CTGAATGCGGCTAATCCTAACCACGGAGCAAGTACCCACAAACCAGTGGGCAG
CTTGTCGTAACGCGCAAGTCTGTGGCGGAACCGACTACTTTGGGTGTCCGTGTT
TCCTTTTTATTTTATCATGGCTGCTTATGGTGACAATCTAAGATTGTTATCATAT
AGCTATTGGATTGGCCATCCGGTGACTAACAGAGATATTATATACCTATTTGTT
GGTTTTNTTAGATTAAATACTATCACATTCAAAACTCTTCTTTATATCATACAAT
TGAACAGTAGAAAGAGAAA
(SEQ ID NO: 24892)

c. Termination Sequence

[0316] In certain embodiments, the core functional element comprises a termination sequence. In some embodiments, the termination sequence comprises a stop codon. In one embodiment, the termination sequence comprises a stop cassette. In some embodiments, the stop cassette comprises at least 2 stop codons. In some embodiments, the stop cassette comprises at least 2 frames of stop codons. In the same embodiment, the frames of the stop codons in a stop cassette each comprise 1, 2 or more stop codons. In some embodiments, the stop cassette comprises a LoxP or a RoxStopRox, or frt-flanked stop cassette. In the same embodiment, the stop cassette comprises a lox-stop-lox stop cassette.

### C. Variants

[0317] In certain embodiments, a provided polynucleotide (e.g., a DNA template, a precursor RNA polynucleotide, or a circular RNA polynucleotide) comprises modified nucleotides and/or modified nucleosides. In some embodiments, the modified nucleoside is m⁵C (5-methylcytidine). In another embodiment, the modified nucleoside is m⁵U (5-methyluridine). In another embodiment, the modified nucleoside is m⁶A (N⁶-methyladenosine). In another embodiment, the modified nucleoside is s²U (2-thiouridine). In another embodiment, the modified nucleoside is Ψ (pseudouridine). In another embodiment, the modified nucleoside is Um (2′-O-methyluridine). In other embodiments, the modified nucleoside is m¹A (1-methyladenosine); m²A (2-methyladenosine); Am (2′-O-methyladenosine); ms² m⁶A (2-methylthio-N⁶-methyladenosine); i⁶A (N⁶-isopentenyladenosine); ms²i6A (2-methylthio-N⁶ isopentenyladenosine); io⁶A (N⁶-(cis-hydroxyisopentenyl)adenosine); ms²io⁶A (2-methylthio-N⁶-(cis-hydroxyisopentenyl)adenosine); g⁶A (N⁶-glycinylcarbamoyladenosine); t⁶A (N⁶-threonylcarbamoyladenosine); ms²t6A (2-methylthio-N⁶-threonyl carbamoyladenosine); m t A (N⁶-methyl-N⁶-threonylcarbamoyladenosine); hn⁶A(N⁶-hydroxynorvalylcarbamoyladenosine); ms²hn⁶A (2-methylthio-N⁶-hydroxynorvalyl carbamoyladenosine); Ar(p) (2′-O-ribosyladenosine (phosphate)); I (inosine); m¹I (1-methylinosine); miIm (1,2′-O-dimethylinosine); m³C (3-methylcytidine); Cm (2′-O-methylcytidine); s²C (2-thiocytidine); ac⁴C (N⁴-acetylcytidine); f⁵C (5-formylcytidine); m⁵Cm (5,2′-O-dimethylcytidine); ac⁴Cm (N⁴-acetyl-2′-O-methylcytidine); k²C (lysidine); m¹G (1-methylguanosine); m²G (N²-methylguanosine); m⁷G (7-methylguanosine); Gm (2′-O-methylguanosine); m²₂G (N²,N²-dimethylguanosine); m²Gm (N²,2′-O-dimethylguanosine); m²₂Gm (N²,N²,2′-O-trimethylguanosine); Gr(p) (2′-O-ribosylguanosine(phosphate)); yW (wybutosine); o₂yW (peroxywybutosine); OHyW (hydroxywybutosine); OHyW* (undermodified hydroxywybutosine); imG (wyosine); mimG (methylwyosine); Q (queuosine); oQ (epoxyqueuosine); galQ (galactosyl-queuosine); manQ (mannosyl-queuosine); preQ₀ (7-cyano-7-deazaguanosine); preQ₁ (7-aminomethyl-7-deazaguanosine); G⁺ (archaeosine); D (dihydrouridine); m⁵Um (5,2′-O-dimethyluridine); s⁴U (4-thiouridine); m⁵s²U (5-methyl-2-thiouridine); s²Um (2-thio-2′-O-methyluridine); acp³U (3-(3-amino-3-carboxypropyl)uridine); ho⁵U (5-hydroxyuridine); mo⁵U (5-methoxyuridine); cmo⁵U (uridine 5-oxyacetic acid); mcmo⁵U (uridine 5-oxyacetic acid methyl ester); chm⁵U (5-(carboxyhydroxymethyl)uridine)); mchm⁵U (5-(carboxyhydroxymethyl)uridine methyl ester); mcm⁵U (5-methoxycarbonylmethyluridine); mcm⁵Um (5-methoxycarbonylmethyl-2′-O-methyluridine); mcm⁵s²U (5-methoxycarbonylmethyl-2-thiouridine); nm⁵S²U (5-aminomethyl-2-thiouridine); mnm⁵U (5-methylaminomethyluridine); mnm⁵s²U (5-methylaminomethyl-2-thiouridine); mnm⁵se²U (5-methylaminomethyl-2-selenouridine); ncm⁵U (5-carbamoylmethyluridine); nCm⁵Um (5-carbamoylmethyl-2′-O-methyluridine); cmnm⁵U (5-carboxymethylaminomethyluridine); cmnm⁵Um (5-carboxymethylaminomethyl-2′-O-methyluridine); cmnm⁵s²U (5-carboxymethylaminomethyl-2-thiouridine); m⁶ 2A (N⁶,N⁶-dimethyladenosine); Im (2′-O-methylinosine); m⁴C (N⁴-methylcytidine); m⁴Cm (N⁴,2′-O-dimethylcytidine); hm⁵C (5-hydroxymethylcytidine); m³U (3-methyluridine); cm⁵U (5-carboxymethyluridine); m⁶Am (N⁶,2′-O-dimethyladenosine); m⁶ 2Am (N⁶,N⁶,0-2′-trimethyladenosine); m^{2,7}G (N²,7-dimethylguanosine); m^{2,2,7}G (N²,N²,7-trimethylguanosine); m³Um (3,2′-O-dimethyluridine); m⁵D (5-methyldihydrouridine); fVCm (5-formyl-2′-O-methylcytidine); m¹Gm (1,2′-O-dimethylguanosine); m¹Am (1,2′-O-dimethyladenosine); τm⁵U (5-taurinomethyluridine); τm⁵s²U (5-taurinomethyl-2-thiouridine)); imG-14 (4-demethylwyosine); imG2 (isowyosine); or ac⁶A (N⁶-acetyladenosine).

[0318] In some embodiments, the modified nucleoside may include a compound selected from the group of: pyridin-4-one ribonucleoside, 5-aza-uridine, 2-thio-5-aza-uridine, 2-thiouridine, 4-thio-pseudouridine, 2-thio-pseudouridine, 5-hydroxyuridine, 3-methyluridine, 5-carboxymethyl-uridine, 1-carboxymethyl-pseudouridine, 5-propynyl-uridine, 1-propynyl-pseudouridine, 5-taurinomethyluridine, 1-taurinomethyl-pseudouridine, 5-taurinomethyl-2-thio-uridine, 1-taurinomethyl-4-thio-uridine, 5-methyl-uridine, 1-methyl-pseudouridine, 4-thio-1-methyl-pseudouridine, 2-thio-1-methyl-pseudouridine, 1-methyl-1-deaza-pseudouridine, 2-thio-1-methyl-1-deaza-pseudouridine, dihydrouridine, dihydropseudouridine, 2-thio-dihydrouridine, 2-thio-dihydropseudouridine, 2-methoxyuridine, 2-methoxy-4-thio-uridine, 4-methoxy-pseudouridine, 4-m ethoxy-2-thio-pseudouridine, 5-aza-cytidine, pseudoisocytidine, 3-methyl-cytidine, N4-acetylcytidine, 5-formylcytidine, N4-methylcytidine, 5-hydroxymethylcytidine, 1-methyl-pseudoisocytidine, pyrrolo-cytidine, pyrrolo-pseudoisocytidine, 2-thio-cytidine, 2-thio-5-methyl-cytidine, 4-thio-pseudoisocytidine, 4-thio-1-methyl-pseudoisocytidine, 4-thio-1-methyl-1-deaza-pseudoisocytidine, 1-methyl-1-deaza-pseudoisocytidine, zebularine, 5-aza-zebularine, 5-methyl-zebularine, 5-aza-2-thio-zebularine, 2-thio-zebularine, 2-methoxy-cytidine, 2-methoxy-5-methyl-cytidine, 4-methoxy-pseudoisocytidine, 4-methoxy-1-methyl-pseudoisocytidine, 2-aminopurine, 2,6-diaminopurine, 7-deaza-adenine, 7-deaza-8-aza-adenine, 7-deaza-2-aminopurine, 7-deaza-8-aza-2-aminopurine, 7-deaza-2,6-diaminopurine, 7-deaza-8-aza-2,6-diaminopurine, 1-methyladenosine, N6-methyladenosine, N6-isopentenyladenosine, N6-(cis-hydroxyisopentenyl)adenosine, 2-methylthio-N6-(cis-hydroxyisopentenyl) adenosine, N6-glycinylcarbamoyladenosine, N6-threonylcarbamoyladenosine, 2-methylthio-N6-threonyl carbamoyladenosine, N6,N6-dimethyladenosine, 7-methyladenine, 2-methylthio-adenine, 2-methoxy-adenine, inosine, 1-methyl-inosine, wyosine, wybutosine, 7-deaza-guanosine, 7-deaza-8-aza-guanosine, 6-thio-guanosine, 6-thio-7-deaza-guanosine, 6-thio-7-deaza-8-aza-guanosine, 7-methyl-guanosine, 6-thio-7-methyl-guanosine, 7-methylinosine, 6-methoxy-guanosine, 1-methylguanosine, N2-methylguanosine, N2,N2-dimethylguanosine, 8-oxo-guanosine, 7-methyl-8-oxo-guanosine, 1-methyl-6-thio-guanosine, N2-methyl-6-thio-guanosine, and N2,N2-dimethyl-6-thio-guanosine. In another embodiment, the modifications are independently selected from the group consisting of 5-methylcytosine, pseudouridine and 1-methylpseudouridine.

[0319] In some embodiments, the modified ribonucleosides include 5-methylcytidine, 5-methoxyuridine, 1-methyl-pseudouridine, N6-methyladenosine, and/or pseudouridine. In some embodiments, such modified nucleosides provide additional stability and resistance to immune activation.

[0320] In particular embodiments, polynucleotides may be codon-optimized. A codon optimized sequence may be one in which codons in a polynucleotide encoding a polypeptide have been substituted in order to increase the expression, stability and/or activity of the polypeptide. Factors that influence codon optimization include, but are not limited to one or more of: (i) variation of codon biases between two or more organisms or genes or synthetically constructed bias tables, (ii) variation in the degree of codon bias within an organism, gene, or set of genes, (iii) systematic variation of codons including context, (iv) variation of codons according to their decoding tRNAs, (v) variation of codons according to GC %, either overall or in one position of the triplet, (vi) variation in degree of similarity to a reference sequence for example a naturally occurring sequence, (vii) variation in the codon frequency cutoff, (viii) structural properties of mRNAs transcribed from the DNA sequence, (ix) prior knowledge about the function of the DNA sequences upon which design of the codon substitution set is to be based, and/or (x) systematic variation of codon sets for each amino acid. In some embodiments, a codon optimized polynucleotide may minimize ribozyme collisions and/or limit structural interference between the expression sequence and the core functional element.

### 3. Payloads

[0321] In some embodiments, the expression sequence encodes a therapeutic protein. In some embodiments, the therapeutic protein is selected from the proteins listed in Table 1.

TABLE 1
Payloads

| | | Tar- | |
|---|---|---|---|
| | | get | |
| | | cell/ | |
| Pay- | | or- | |
| load | Sequence | gan | Preferred delivery formulation |
| CD19 CAR | Any of sequences selected from SEQ ID NOs: 3153- 3161 | T cells | [chemical structure] |
| | | | (50 mol %) |
| | | | DSPC (10 mol %) |
| | | | Beta-sitosterol (28.5% mol %) |
| | | | Cholesterol (10 mol %) |
| | | | PEG DMG (1.5 mol %) |
| BCMA CAR* | MALPVTALLLPLALLL HAARPDIVLTQSPASLA VSLGERATINCRASESV SVIGAHLIHWYQQKPG QPPKLLIYLASNLETGV PARFSGSGSGTDFTLTIS SLQAEDAAIYYCLQSRI FPRTFGQGTKLEIKGST SGSGKPGSGEGSTKGQ VQLVQSGSELKKPGAS | T cells | [chemical structure] |
| | VKVSCKASGYTFTDYSI | | |
| | NWVRQAPGQGLEWMG | | (50 mol %) |
| | WINTETREPAYAYDFR | | DSPC (10 mol %) |
| | GRFVFSLDTSVSTAYLQ | | Beta-sitosterol (28.5% mol %) |
| | ISSLKAEDTAVYYCAR | | Cholesterol (10 mol %) |
| | DYSYAMDYWGQGTLV | | PEG DMG (1.5 mol %) |
| | TVSSAAATTTPAPRPPT | | |
| | PAPTIASQPLSLRPEACR | | |
| | PAAGGAVHTRGLDFAC | | |
| | DIYIWAPLAGTCGVLLL | | |
| | SLVITLYCKRGRKKLLY | | |
| | IFKQPFMRPVQTTQEED | | |
| | GCSCRFPEEEEGGCELR | | |
| | VKFSRSADAPAYQQGQ | | |
| | NQLYNELNLGRREEYD | | |
| | VLDKRRGRDPEMGGKP | | |
| | RRKNPQEGLYNELQKD | | |
| | KMAEAYSEIGMKGERR | | |
| | RGKGHDGLYQGLSTAT | | |
| | KDTYDALHMQALPPR | | |
| | (SEQ ID NO: 3270) | | |
| | *The BCMA CAR may be | | |
| | chosen from any of the | | |
| | anti-BCMA CARs | | |
| | disclosed in US Patent | | |
| | Application US | | |
| | 2021/0128618A1 | | |
| MAGE- A4 TCR | TCR alpha chain: KNQVEQSPQSLIILEGK NCTLQCNYTVSPFSNLR WYKQDTGRGPVSLTIM TFSENTKSNGRYTATLD ADTKQSSLHITASQLSD SASYICVVNHSGGSYIP TFGRGTSLIVHPYIQKP DPAVYQLRDSKSSDKS VCLFTDFDSQTNVSQSK | T cells | [chemical structure] |
| | DSDVYITDKTVLDMRS | | |
| | MDFKSNSAVAWSNKS | | (50 mol %) |
| | DFACANAFNNSIIPEDT | | DSPC (10 mol %) |
| | FFPSPESS (SEQ ID NO: | | Beta-sitosterol (28.5% mol %) |
| | 3271) | | Cholesterol (10 mol %) |
| | TCR beta chain: | | PEG DMG (1.5 mol %) |
| | DVKVTQSSRYLVKRTG | | |
| | EKVFLECVQDMDHEN | | |
| | MFWYRQDPGLGLRLIY | | |
| | FSYDVKMKEKGDIPEG | | |
| | YSVSREKKERFSLILES | | |
| | ASTNQTSMYLCASSFL | | |
| | MTSGDPYEQYFGPGTR | | |
| | LTVTEDLKNVFPPEVA | | |
| | VFEPSEAEISHTQKATL | | |
| | VCLATGFYPDHVELSW | | |
| | WVNGKEVHSGVSTDPQ | | |
| | PLKEQPALNDSRYCLSS | | |
| | RLRVSATFWQNPRNHF | | |
| | RCQVQFYGLSENDEWT | | |
| | QDRAKPVTQIVSAEAW | | |
| | GRAD (SEQ ID NO: | | |
| | 3272) | | |
| NY- ESO TCR | TCRalpha extracellular sequence MQEVTQIPAALSVPEGE NLVLNCSFTDSAIYNLQ WFRQDPGKGLTSLLLIQ SSQREQTSGRLNASLDK SSGRSTLYIAASQPGDS ATYLCAVRPTSGGSYIP TFGRGTSLIVHPY (SEQ ID NO: 3273) | T cells | [chemical structure] |
| | TCRbeta extracellular | | |
| | sequence | | (50 mol %) |
| | MGVTQTPKFQVLKTGQ | | DSPC (10 mol %) |
| | SMTLQCAQDMNHEYM | | Beta-sitosterol (28.5% mol %) |
| | SWYRQDPGMGLRLIHY | | Cholesterol (10 mol %) |
| | SVGAGITDQGEVPNGY | | PEG DMG (1.5 mol %) |
| | NVSRSTTEDFPLRLLSA | | |
| | APSQTSVYFCASSYVG | | |
| | NTGELFFGEGSRLTVL | | |
| | (SEQ ID NO: 3274) | | |
| EPO | APPRLICDSRVLERYLL | Kid- | |
| | EAKEAENITTGCAEHCS | ney | |
| | LNENITVPDTKVNFYA | or | |
| | WKRMEVGQQAVEVW | bone | |
| | QGLALLSEAVLRGQAL | mar- | |
| | LVNSSQPWEPLQLHVD | row | |
| | KAVSGLRSLTTLLRALG | | |
| | AQKEAISPPDAASAAPL | | |
| | RTITADTFRKLFRVYSN | | |
| | FLRGKLKLYTGEACRT | | |
| | GDR (SEQ ID NO: 3275) | | |
| PAH | MSTAVLENPGLGRKLS DFGQETSYIEDNCNQN GAISLIFSLKEEVGALA KVLRLFEENDVNLTHIE SRPSRLKKDEYEFFTHL DKRSLPALTNIIKILRHD IGATVHELSRDKKKDT VPWFPRTIQELDRFANQ ILSYGAELDADHPGFKD PVYRARRKQFADIAYN YRHGQPIPRVEYMEEE | Hep- atic cells | [chemical structure] |
| | KKTWGTVFKTLKSLYK | | |
| | THACYEYNHIFPLLEKY | | (50 mol %) |
| | CGFHEDNIPQLEDVSQF | | DSPC (10 mol %) |
| | LQTCTGFRLRPVAGLLS | | Cholesterol (38.5% mol %) |
| | SRDFLGGLAFRVFHCT | | PEG-DMG (1.5%) |
| | QYIRHGSKPMYTPEPDI | | OR |
| | CHELLGHVPLFSDRSFA | | MC3 (50 mol %) |
| | QFSQEIGLASLGAPDEY | | DSPC (10 mol %) |
| | IEKLATIYWFTVEFGLC | | Cholesterol (38.5% mol %) |
| | KQGDSIKAYGAGLLSSF | | PEG-DMG (1.5%) |
| | GELQYCLSEKPKLLPLE | | |
| | LEKTAIQNYTVTEFQPL | | |
| | YYVAESFNDAKEKVRN | | |
| | FAATIPRPFSVRYDPYT | | |
| | QRIEVLDNTQQLKILAD | | |
| | SINSEIGILCSALQKIK | | |
| | (SEQ ID NO: 3257) | | |
| CPS1 | LSVKAQTAHIVLEDGT KMKGYSFGHPSSVAGE VVFNTGLGGYPEAITDP AYKGQILTMANPIIGNG GAPDTTALDELGLSKY LESNGIKVSGLLVLDYS KDYNHWLATKSLGQW LQEEKVPAIYGVDTRM LTKIIRDKGTMLGKIEF EGQPVDFVDPNKQNLI AEVSTKDVKVYGKGNP | Hep- atic cells | [chemical structure] |
| | TKVVAVDCGIKNNVIR | | |
| | LLVKRGAEVHLVPWN | | (50 mol %) |
| | HDFTKMEYDGILIAGGP | | DSPC (10 mol %) |
| | GNPALAEPLIQNVRKIL | | Cholesterol (38.5% mol %) |
| | ESDRKEPLFGISTGNLIT | | PEG-DMG (1.5%) |
| | GLAAGAKTYKMSMAN | | OR |
| | RGQNQPVLNITNKQAFI | | MC3 (50 mol %) |
| | TAQNHGYALDNTLPAG | | DSPC (10 mol %) |
| | WKPLFVNVNDQTNEGI | | Cholesterol (38.5% mol %) |
| | MHESKPFFAVQFHPEV | | PEG-DMG (1.5%) |
| | TPGPIDTEYLFDSFFSLI | | |
| | KKGKATTITSVLPKPAL | | |
| | VASRVEVSKVLILGSGG | | |
| | LSIGQAGEFDYSGSQAV | | |
| | KAMKEENVKTVLMNP | | |
| | NIASVQTNEVGLKQAD | | |
| | TVYFLPITPQFVTEVIKA | | |
| | EQPDGLILGMGGQTAL | | |
| | NCGVELFKRGVLKEYG | | |
| | VKVLGTSVESIMATED | | |
| | ROLFSDKLNEINEKIAPS | | |
| | FAVESIEDALKAADTIG | | |
| | YPVMIRSAYALGGLGS | | |
| | GICPNRETLMDLSTKAF | | |
| | AMTNQILVEKSVTGWK | | |
| | EIEYEVVRDADDNCVT | | |
| | VCNMENVDAMGVHTG | | |
| | DSVVVAPAQTLSNAEF | | |
| | QMLRRTSINVVRHLGIV | | |
| | GECNIQFALHPTSMEYC | | |
| | IIEVNARLSRSSALASK | | |
| | ATGYPLAFIAAKIALGIP | | |
| | LPEIKNVVSGKTSACFE | | |
| | PSLDYMVTKIPRWDLD | | |
| | RFHGTSSRIGSSMKSVG | | |
| | EVMAIGRTFEESFQKAL | | |
| | RMCHPSIEGFTPRLPMN | | |
| | KEWPSNLDLRKELSEPS | | |
| | STRIYAIAKAIDDNMSL | | |
| | DEIEKLTYIDKWFLYK | | |
| | MRDILNMEKTLKGLNS | | |
| | ESMTEETLKRAKEIGFS | | |
| | DKQISKCLGLTEAQTRE | | |
| | LRLKKNIHPWVKQIDTL | | |
| | AAEYPSVTNYLYVTYN | | |
| | GQEHDVNFDDHGMMV | | |
| | LGCGPYHIGSSVEFDW | | |
| | CAVSSIRTLRQLGKKTV | | |
| | VVNCNPETVSTDFDEC | | |
| | DKLYFEELSLERILDIYH | | |
| | QEACGGCIISVGGQIPN | | |
| | NLAVPLYKNGVKIMGT | | |
| | SPLQIDRAEDRSIFSAVL | | |
| | DELKVAQAPWKAVNT | | |
| | LNEALEFAKSVDYPCLL | | |
| | RPSYVLSGSAMNVVFS | | |
| | EDEMKKFLEEATRVSQ | | |
| | EHPVVLTKFVEGAREV | | |
| | EMDAVGKDGRVISHAI | | |
| | SEHVEDAGVHSGDATL | | |
| | MLPTQTISQGAIEKVKD | | |
| | ATRKIAKAFAISGPFNV | | |
| | QFLVKGNDVLVIECNL | | |
| | RASRSFPFVSKTLGVDF | | |
| | IDVATKVMIGENVDEK | | |
| | HLPTLDHPIIPADYVAIK | | |
| | APMFSWPRLRDADPILR | | |
| | CEMASTGEVACFGEGI | | |
| | HTAFLKAMLSTGFKIPQ | | |
| | KGILIGIQQSFRPRFLGV | | |
| | AEQLHNEGFKLFATEA | | |
| | TSDWLNANNVPATPVA | | |
| | WPSQEGQNPSLSSIRKLI | | |
| | RDGSIDLVINLPNNNTK | | |
| | FVHDNYVIRRTAVDSGI | | |
| | PLLTNFQVTKLFAEAV | | |
| | QKSRKVDSKSLFHYRQ | | |
| | YSAGKAA (SEQ ID NO: | | |
| | 3276) | | |
| Cas9 | MKRNYILGLDIGITSVG YGIIDYETRDVIDAGVR LFKEANVENNEGRRSK RGARRLKRRRRHRIQR VKKLLFDYNLLTDHSE LSGINPYEARVKGLSQK LSEEEFSAALLHLAKRR GVHNVNEVEEDTGNEL STKEQISRNSKALEEKY VAELQLERLKKDGEVR | Im- mune cells | [chemical structure] |
| | GSINRFKTSDYVKEAK | | |
| | QLLKVQKAYHQLDQSF | | (50 mol %) |
| | IDTYIDLLETRRTYYEG | | DSPC (10 mol %) |
| | PGEGSPFGWKDIKEWY | | Beta-sitosterol (28.5% mol %) |
| | EMLMGHCTYFPEELRS | | Cholesterol (10 mol %) |
| | VKYAYNADLYNALND | | PEG DMG (1.5 mol %) |
| | LNNLVITRDENEKLEYY | | |
| | EKFQIIENVFKQKKKPT | | |
| | LKQIAKEILVNEEDIKG | | |
| | YRVTSTGKPEFTNLKV | | |
| | YHDIKDITARKEIIENAE | | |
| | LLDQIAKILTIYQSSEDI | | |
| | QEELTNLNSELTQEEIE | | |
| | QISNLKGYTGTHNLSLK | | |
| | AINLILDELWHTNDNQI | | |
| | AIFNRLKLVPKKVDLSQ | | |
| | QKEIPTTLVDDFILSPVV | | |
| | KRSFIQSIKVINAIIKKY | | |
| | GLPNDIIIELAREKNSKD | | |
| | AQKMINEMQKRNRQT | | |
| | NERIEEIIRTTGKENAKY | | |
| | LIEKIKLHDMQEGKCLY | | |
| | SLEAIPLEDLLNNPFNY | | |
| | EVDHIIPRSVSFDNSFNN | | |
| | KVLVKQEENSKKGNRT | | |
| | PFQYLSSSDSKISYETFK | | |
| | KHILNLAKGKGRISKTK | | |
| | KEYLLEERDINRFSVQK | | |
| | DFINRNLVDTRYATRG | | |
| | LMNLLRSYFRVNNLDV | | |
| | KVKSINGGFTSFLRRK | | |
| | WKFKKERNKGYKHHA | | |
| | EDALIIANADFIFKEWK | | |
| | KLDKAKKVMENQMFE | | |
| | EKQAESMPEIETEQEYK | | |
| | EIFITPHQIKHIKDFKDY | | |
| | KYSHRVDKKPNRELIN | | |
| | DTLYSTRKDDKGNTLI | | |
| | VNNLNGLYDKDNDKL | | |
| | KKLINKSPEKLLMYHH | | |
| | DPQTYQKLKLIMEQYG | | |
| | DEKNPLYKYYEETGNY | | |
| | LTKYSKKDNGPVIKKIK | | |
| | YYGNKLNAHLDITDDY | | |
| | PNSRNKVVKLSLKPYR | | |
| | FDVYLDNGVYKFVTVK | | |
| | NLDVIKKENYYEVNSK | | |
| | CYEEAKKLKKISNQAEF | | |
| | IASFYNNDLIKINGELY | | |
| | RVIGVNNDLLNRIEVN | | |
| | MIDITYREYLENMNDK | | |
| | RPPRIIKTIASKTQSIKK | | |
| | YSTDILGNLYEVKSKK | | |
| | HPQIIKKG (SEQ ID | | |
| | NO: 3277) | | |
| ADAM TS13 | AAGGILHLELLVAVGP DVFQAHQEDTERYVLT NLNIGAELLRDPSLGAQ FRVHLVKMVILTEPEG APNITANLTSSLLSVCG WSQTINPEDDTDPGHA DLVLYITRFDLELPDGN RQVRGVTQLGGACSPT WSCLITEDTGFDLGVTI AHEIGHSFGLEHDGAPG SGCGPSGHVMASDGAA | Hep- atic cells | [chemical structure] |
| | PRAGLAWSPCSRRQLL | | |
| | SLLSAGRARCVWDPPR | | (50 mol %) |
| | PQPGSAGHPPDAQPGL | | DSPC (10 mol %) |
| | YYSANEQCRVAFGPKA | | Cholesterol (38.5% mol %) |
| | VACTFAREHLDMCQAL | | PEG-DMG (1.5%) |
| | SCHTDPLDQSSCSRLLV | | OR |
| | PLLDGTECGVEKWCSK | | MC3 (50 mol %) |
| | GRCRSLVELTPIAAVHG | | DSPC (10 mol %) |
| | RWSSWGPRSPCSRSCG | | Cholesterol (38.5% mol %) |
| | GGVVTRRRQCNNPRPA | | PEG-DMG (1.5%) |
| | FGGRACVGADLQAEM | | |
| | CNTQACEKTQLEFMSQ | | |
| | QCARTDGQPLRSSPGG | | |
| | ASFYHWGAAVPHSQG | | |
| | DALCRHMCRAIGESFIM | | |
| | KRGDSFLDGTRCMPSG | | |
| | PREDGTLSLCVSGSCRT | | |
| | FGCDGRMDSQQVWDR | | |
| | CQVCGGDNSTCSPRKG | | |
| | SFTAGRAREYVTFLTVT | | |
| | PNLTSVYIANHRPLFTH | | |
| | LAVRIGGRYVVAGKMS | | |
| | ISPNTTYPSLLEDGRVE | | |
| | YRVALTEDRLPRLEEIRI | | |
| | WGPLQEDADIQVYRRY | | |
| | GEEYGNLTRPDITFTYF | | |
| | QPKPRQAWVWAAVRG | | |
| | PCSVSCGAGLRWVNYS | | |
| | CLDQARKELVETVQCQ | | |
| | GSQQPPAWPEACVLEP | | |
| | CPPYWAVGDFGPCSAS | | |
| | CGGGLRERPVRCVEAQ | | |
| | GSLLKTLPPARCRAGA | | |
| | QQPAVALETCNPQPCP | | |
| | ARWEVSEPSSCTSAGG | | |
| | AGLALENETCVPGADG | | |
| | LEAPVTEGPGSVDEKLP | | |
| | APEPCVGMSCPPGWGH | | |
| | LDATSAGEKAPSPWGSI | | |
| | RTGAQAAHVWTPAAG | | |
| | SCSVSCGRGLMELRFLC | | |
| | MDSALRVPVQEELCGL | | |
| | ASKPGSRREVCQAVPC | | |
| | PARWQYKLAACSVSCG | | |
| | RGVVRRILYCARAHGE | | |
| | DDGEEILLDTQCQGLPR | | |
| | PEPQEACSLEPCPPRWK | | |
| | VMSLGPCSASCGLGTA | | |
| | RRSVACVQLDQGQDVE | | |
| | VDEAACAALVRPEASV | | |
| | PCLIADCTYRWHVGTW | | |
| | MECSVSCGDGIQRRRD | | |
| | TCLGPQAQAPVPADFC | | |
| | QHLPKPVTVRGCWAGP | | |
| | CVGQGTPSLVPHEEAA | | |
| | APGRTTATPAGASLEW | | |
| | SQARGLLFSPAPQPRRL | | |
| | LPGPQENSVQSSACGR | | |
| | QHLEPTGTIDMRGPGQ | | |
| | ADCAVAIGRPLGEVVT | | |
| | LRVLESSLNCSAGDML | | |
| | LLWGRLTWRKMCRKL | | |
| | LDMTFSSKTNTLVVRQ | | |
| | RCGRPGGGVLLRYGSQ | | |
| | LAPETFYRECDMQLFG | | |
| | PWGEIVSPSLSPATSNA | | |
| | GGCRLFINVAPHARIAI | | |
| | HALATNMGAGTEGAN | | |
| | ASYILIRDTHSLRTTAFH | | |
| | GQQVLYWESESSQAEM | | |
| | EFSEGFLKAQASLRGQ | | |
| | YWTLQSWVPEMQDPQ | | |
| | SWKGKEGT (SEQ ID | | |
| | NO: 3278) | | |
| FOXP3 | MPNPRPGKPSAPSLALG PSPGASPSWRAAPKAS DLLGARGPGGTFQGRD LRGGAHASSSSLNPMPP SQLQLPTLPLVMVAPSG ARLGPLPHLQALLQDR PHFMHQLSTVDAHART PVLQVHPLESPAMISLT PPTTATGVFSLKARPGL PPGINVASLEWVSREPA | Im- mune cells | [chemical structure] |
| | LLCTFPNPSAPRKDSTL | | |
| | SAVPQSSYPLLANGVC | | (50 mol %) |
| | KWPGCEKVFEEPEDFL | | DSPC (10 mol %) |
| | KHCQADHLLDEKGRA | | Beta-sitosterol (28.5% mol %) |
| | QCLLQREMVQSLEQQL | | Cholesterol (10 mol %) |
| | VLEKEKLSAMQAHLAG | | PEG DMG (1.5 mol %) |
| | KMALTKASSVASSDKG | | |
| | SCCIVAAGSQGPVVPA | | |
| | WSGPREAPDSLFAVRR | | |
| | HLWGSHGNSTFPEFLH | | |
| | NMDYFKFHNMRPPFTY | | |
| | ATLIRWAILEAPEKQRT | | |
| | LNEIYHWFTRMFAFFR | | |
| | NHPATWKNAIRHNLSL | | |
| | HKCFVRVESEKGAVWT | | |
| | VDELEFRKKRSQRPSRC | | |
| | SNPTPGP (SEQ ID NO: | | |
| | 3187) | | |
| IL-10 | SPGQGTQSENSCTHFPG NLPNMLRDLRDAFSRV KTFFQMKDQLDNLLLK ESLLEDFKGYLGCQALS EMIQFYLEEVMPQAEN QDPDIKAHVNSLGENL KTLRLRLRRCHRFLPCE NKSKAVEQVKNAFNKL QEKGIYKAMSEFDIFIN YIEAYMTMKIRN (SEQ ID NO: 3181) | Im- mune cells | [chemical structure] |
| | | | (50 mol %) |
| | | | DSPC (10 mol %) |
| | | | Beta-sitosterol (28.5% mol %) |
| | | | Cholesterol (10 mol %) |
| | | | PEG DMG (1.5 mol %) |
| IL-2 | APTSSSTKKTQLQLEHL LLDLQMILNGINNYKNP KLTRMLTFKFYMPKKA TELKHLQCLEEELKPLE EVLNLAQSKNFHLRPR DLISNINVIVLELKGSET TFMCEYADETATIVEFL NRWITFCQSIISTLT (SEQ ID NO: 3177) | Im- mune cells | [chemical structure] |
| | | | (50 mol %) |
| | | | DSPC (10 mol %) |
| | | | Beta-sitosterol (28.5% mol %) |
| | | | Cholesterol (10 mol %) |
| | | | PEG DMG (1.5 mol %) |

[0322] In some embodiments, the expression sequence encodes a therapeutic protein. In some embodiments, the expression sequence encodes a cytokine, e.g., IL-12p70, IL-15, IL-2, IL-18, IL-21, IFN-α, IFN-β, IL-10, TGF-beta, IL-4, or IL-35, or a functional fragment thereof. In some embodiments, the expression sequence encodes an immune checkpoint inhibitor. In some embodiments, the expression sequence encodes an agonist (e.g., a TNFR family member such as CD137L, OX40L, ICOSL, LIGHT, or CD70). In some embodiments, the expression sequence encodes a chimeric antigen receptor. In some embodiments, the expression sequence encodes an inhibitory receptor agonist (e.g., PDL1, PDL2, Galectin-9, VISTA, B7H4, or MHCII) or inhibitory receptor (e.g., PD1, CTLA4, TIGIT, LAG3, or TIM3). In some embodiments, the expression sequence encodes an inhibitory receptor antagonist. In some embodiments, the expression sequence encodes one or more TCR chains (alpha and beta chains or gamma and delta chains). In some embodiments, the expression sequence encodes a secreted T cell or immune cell engager (e.g., a bispecific antibody such as BiTE, targeting, e.g., CD3, CD137, or CD28 and a tumor-expressed protein e.g., CD19, CD20, or BCMA etc.). In some embodiments, the expression sequence encodes a transcription factor (e.g., FOXP3, HELIOS, TOX1, or TOX2). In some embodiments, the expression sequence encodes an immunosuppressive enzyme (e.g., IDO or CD39/CD73). In some embodiments, the expression sequence encodes a GvHD (e.g., anti-HLA-A2 CAR-Tregs).

[0323] In some embodiments, the therapeutic protein is an antigen-binding protein, including but not limited to an antibody or an antigen-binding fragment thereof. An antigen-binding protein disclosed herein may be monoclonal or polyclonal. In some embodiments, the antigen-binding protein is monoclonal. In some embodiments, the antigen-binding protein is polyclonal. In particular embodiments, antigen-binding proteins of the present disclosure are human antibodies.

[0324] In some embodiments, the antibodies are intact immunoglobulin molecules, such as, e.g., a human antibody, as well as those portions of a humanized Ig molecule that contain the antigen-binding site (i.e., paratope) or a single heavy chain and a single light chain, including those portions known in the art such as Fab, Fab′, F(ab)′, F(ab′)2, Fd, scFv, a variable heavy domain, a variable light domain, a variable NAR domain, a single chain binding polypeptide, a dAb fragment, a nanobody, a VHH, and others also referred to as antigen-binding fragments. When constructing polynucleotides encoding an immunoglobulin molecule or fragments thereof, polynucleotides encoding variable regions or portions thereof are, in some embodiments, connected to, or otherwise joined to polynucleotides encoding one or more constant regions or portions thereof to produce any of the antibodies or fragments thereof described herein. Thus, in some embodiments, the antigen-binding fragment of any one of the antibodies described above is a Fab, Fab′, F(ab)′, F(ab′)2, Fd, scFv, a variable heavy domain, a variable light domain, a variable NAR domain, a dAb fragment, a nanobody, a VHH, a single chain binding polypeptide (e.g., a scFv with Fc portion) or any other functional fragment thereof as described herein.

[0325] In some embodiments, the antibodies are of any immunoglobulin class, and, therefore, in some embodiments, have a gamma, mu, alpha, delta, or epsilon heavy chain. In some embodiments, the gamma chain is gamma 1, gamma 2, gamma 3, or gamma 4. In some embodiments, the alpha chain is alpha 1 or alpha 2.

[0326] In some embodiments, an antibody of the present disclosure is an IgA immunoglobulin. In some embodiments, antibodies of the present disclosure are of any IgA subclass. In some embodiments, the antibody is IgA1. In some embodiments, the antibody is IgA2. In some embodiments, an antibody of the present disclosure is an IgD immunoglobulin. In some embodiments, an antibody of the present disclosure is an IgE immunoglobulin. In some embodiments, an antibody of the present disclosure is an IgG immunoglobulin. In some embodiments, antibodies of the present disclosure are of any IgG subclass. In some embodiments, the antibody is IgG1. In some embodiments, the antibody is IgG2. In some embodiments, the antibody is IgG3. In some embodiments, the antibody is IgG4. In some embodiments, an antibody of the present disclosure is an IgM immunoglobulin.

[0327] In some embodiments, antigen-binding proteins of the present disclosure comprise a variable light chain that is either kappa or lambda. In some embodiments, the lambda chain is of any subtype, including, e.g., lambda 1, lambda 2, lambda 3, and lambda 4. In some embodiments, the light chain is kappa.

[0328] In some embodiments, an antigen-binding protein of the present disclosure is monospecific. Exemplary monospecific antigen-binding proteins bind one epitope of a single antigen.

[0329] In some embodiments, an antigen-binding protein of the present disclosure is bispecific or multi-specific (e.g., tri-specific). Bispecific antigen-binding proteins have binding specificities for at least two different epitopes. Exemplary bispecific antigen-binding proteins, in some embodiments, bind to two different epitopes of a single antigen. Other such antigen-binding proteins, in some embodiments, combine a first antigen binding site with a binding site for a second antigen. In some embodiments, the bispecific antigen-binding proteins bind at least two different epitopes.

[0330] In some embodiments, an antigen-binding protein of the present disclosure has two or more valences, which are also referred to as multivalent. In some embodiments, an antigen-binding protein of the present disclosure is trispecific. In some embodiments, the antigen-binding proteins of the present disclosure are multivalent antibodies or fragments thereof with three or more antigen binding sites (e.g., tetravalent antibodies). In some embodiments, the multivalent antigen-binding protein comprises a dimerization domain and three or more antigen binding sites. In some embodiments, the dimerization domain comprises (or consists of) an Fc region or a hinge region. In this scenario, the antigen-binding protein will comprise an Fc region and three or more antigen binding sites amino-terminal to the Fc region. In some embodiments, the multivalent antigen-binding protein herein comprises about three to about eight, but preferably four, antigen binding sites. The multivalent antigen-binding protein comprises at least one polypeptide chain (and preferably two polypeptide chains), wherein the polypeptide chain(s) comprise two or more variable regions. For instance, the polypeptide chain(s) comprises VD1-(X1)ₙ-VD2-(X2)ₙ-Fc, wherein VD1 is a first variable region, VD2 is a second variable region, Fc is one polypeptide chain of an Fc region, X1 and X2 represent an amino acid or polypeptide, and n is 0 or 1. In some embodiments, the polypeptide chain(s) each independently comprise: V_{H}-C_{H}1-flexible linker-V_{H}-C_{H}1-Fc region chain; or V_{H}-C_{H}1-V_{H}-C_{H}1-Fc region chain. In some embodiments, the multivalent antigen-binding protein herein further comprises at least two (and preferably four) light chain variable region polypeptides. In some embodiments, the multivalent antigen-binding protein herein comprises from about two to about eight light chain variable region polypeptides. In some embodiments, the light chain variable region polypeptides described herein comprise a light chain variable region. In some embodiments, the light chain variable region polypeptides described herein further comprise a CL domain.

[0331] In some embodiments, an antigen-binding protein of the present disclosure is an SMIP or binding domain immunoglobulin fusion protein specific for the target protein. These constructs are single-chain polypeptides comprising antigen-binding domains fused to immunoglobulin domains necessary to carry out antibody effector functions.

[0332] In some embodiments, an antigen-binding protein of the present disclosure comprises a single chain binding polypeptide having a heavy chain variable region, and/or a light chain variable region which binds an epitope disclosed herein and has, optionally, an immunoglobulin Fc region. Such a molecule is a single chain variable fragment (scFv) optionally having effector function or increased half-life through the presence of the immunoglobulin Fc region.

[0333] As noted above, the disclosure further provides antibody fragments. In certain circumstances, there are advantages of using antibody fragments, rather than whole antibodies. For example, the smaller size of the fragments allows for rapid clearance, and leads to improved access to certain tissues, such as organs (e.g., lung, kidney, liver, or heart). Examples of antibody fragments include: Fab, F(ab′), F(ab′)₂, and Fv fragments, diabodies, linear antibodies, single-chain antibodies, and multispecific antibodies formed from antibody fragments.

[0334] The antigen-binding protein of choice can be a single chain Fv fragment (scFv). Fv and sFv are the only species with intact combining sites that are devoid of constant regions. Thus, they are suitable for reduced nonspecific binding during in vivo use. sFv fusion proteins can be constructed to yield fusion of an effector protein at either the amino or the carboxy terminus of an sFv. The antigen-binding protein fragment can also be a “linear antibody.” In some embodiments, such linear antibody fragments are monospecific or bispecific.

[0335] In some embodiments, a polynucleotide encodes a protein that is made up of subunits that are encoded by more than one gene. For example, the protein may be a heterodimer, wherein each chain or subunit of the protein is encoded by a separate gene. It is possible that more than one circRNA molecule is delivered in the transfer vehicle and each circRNA encodes a separate subunit of the protein. Alternatively, a single circRNA may be engineered to encode more than one subunit. In certain embodiments, separate circRNA molecules encoding the individual subunits may be administered in separate transfer vehicles.

### A. Antigen-Recognition Receptors

a. Chimeric Antigen Receptors (CARS)

[0336] In some embodiments, a provided RNA polynucleotide encodes one or more chimeric antigen receptors (CARs or CAR-Ts). CARs are genetically-engineered receptors. These engineered receptors may be inserted into and expressed by immune cells, including T cells via circular RNA as described herein. With a CAR, a single receptor may be programmed to both recognize a specific antigen and, when bound to that antigen, activate the immune cell to attack and destroy the cell bearing that antigen. When these antigens exist on tumor cells, an immune cell that expresses the CAR may target and kill the tumor cell. In some embodiments, the CAR encoded by the polynucleotide comprises (i) an antigen-binding molecule that specifically binds to a target antigen, (ii) a hinge domain, a transmembrane domain, and an intracellular domain, and (iii) an activating domain.

[0337] In some embodiments, an orientation of the CARs in accordance with the disclosure comprises an antigen binding domain (such as an scFv) in tandem with a costimulatory domain and an activating domain. The costimulatory domain may comprise one or more of an extracellular portion, a transmembrane portion, and an intracellular portion. In other embodiments, multiple costimulatory domains may be utilized in tandem.

i. Antigen Binding Domain

[0338] CARs may be engineered to bind to an antigen (such as a cell-surface antigen) by incorporating an antigen binding molecule that interacts with that targeted antigen. In some embodiments, the antigen binding molecule is an antibody fragment thereof, e.g., one or more single chain antibody fragment (scFv). An scFv is a single chain antibody fragment having the variable regions of the heavy and light chains of an antibody linked together. See U.S. Pat. Nos. 7,741,465, and 6,319,494 as well as Eshhar et al., Cancer Immunol Immunotherapy (1997) 45: 131-136. An scFv retains the parent antibody's ability to specifically interact with target antigen. scFvs are useful in chimeric antigen receptors because they may be engineered to be expressed as part of a single chain along with the other CAR components. Id. See also Krause et al., J. Exp. Med., Volume 188, No. 4, 1998 (619-626); Finney et al., Journal of Immunology, 1998, 161: 2791-2797. It will be appreciated that the antigen binding molecule is typically contained within the extracellular portion of the CAR such that it is capable of recognizing and binding to the antigen of interest. Bispecific and multispecific CARs are contemplated within the scope of the invention, with specificity to more than one target of interest.

[0339] In some embodiments, the antigen binding molecule comprises a single chain, wherein the heavy chain variable region and the light chain variable region are connected by a linker. In some embodiments, the VH is located at the N terminus of the linker and the VL is located at the C terminus of the linker. In other embodiments, the VL is located at the N terminus of the linker and the VH is located at the C terminus of the linker. In some embodiments, the linker comprises at least about 5, at least about 8, at least about 10, at least about 13, at least about 15, at least about 18, at least about 20, at least about 25, at least about 30, at least about 35, at least about 40, at least about 45, at least about 50, at least about 60, at least about 70, at least about 80, at least about 90, or at least about 100 amino acids.

[0340] In some embodiments, the antigen binding molecule comprises a nanobody. In some embodiments, the antigen binding molecule comprises a DARPin. In some embodiments, the antigen binding molecule comprises an anticalin or other synthetic protein capable of specific binding to target protein.

[0341] In some embodiments, the CAR comprises an antigen binding domain specific for an antigen selected from the group CD19, CD123, CD22, CD30, CD171, CS-1, C-type lectin-like molecule-1, CD33, epidermal growth factor receptor variant III (EGFRvIII), ganglioside G2 (GD2), ganglioside GD3, TNF receptor family member B cell maturation (BCMA), Tn antigen ((Tn Ag) or (GaINAca-Ser/Thr)), prostate-specific membrane antigen (PSMA), Receptor tyrosine kinase-like orphan receptor 1 (ROR1), Fms-Like Tyrosine Kinase 3 (FLT3), Tumor-associated glycoprotein 72 (TAG72), CD38, CD44v6, Carcinoembryonic antigen (CEA), Epithelial cell adhesion molecule (EPCAM), B7H3 (CD276), KIT (CD117), Interleukin-13 receptor subunit alpha-2, mesothelin, Interleukin 11 receptor alpha (IL-11Ra), prostate stem cell antigen (PSCA), Protease Serine 21, vascular endothelial growth factor receptor 2 (VEGFR2), Lewis(Y) antigen, CD24, Platelet-derived growth factor receptor beta (PDGFR-beta), Stage-specific embryonic antigen-4 (SSEA-4), CD20, Folate receptor alpha, HER2, HER3, Mucin 1, cell surface associated (MUC1), epidermal growth factor receptor (EGFR), neural cell adhesion molecule (NCAM), Prostase, prostatic acid phosphatase (PAP), elongation factor 2 mutated (ELF2M), Ephrin B2, fibroblast activation protein alpha (FAP), insulin-like growth factor 1 receptor (IGF-I receptor), carbonic anhydrase IX (CAIX), Proteasome (Prosome, Macropain) Subunit, Beta Type, 9 (LMP2), glycoprotein 100 (gp100), oncogene fusion protein consisting of breakpoint cluster region (BCR) and Abelson murine leukemia viral oncogene homolog 1 (Ab1) (bcr-abl), tyrosinase, ephrin type-A receptor 2 (EphA2), Fucosyl GM1, sialyl Lewis adhesion molecule (sLe), ganglioside GM3, transglutaminase 5 (TGS5), high molecular weight-melanoma-associated antigen (HMWMAA), o-acetyl-GD2 ganglioside (OAcGD2), Folate receptor beta, tumor endothelial marker 1 (TEM1/CD248), tumor endothelial marker 7-related (TEM7R), claudin 6 (CLDN6), thyroid stimulating hormone receptor (TSHR), G protein-coupled receptor class C group 5, member D (GPRC5D), chromosome X open reading frame 61 (CXORF61), CD97, CD179a, anaplastic lymphoma kinase (ALK), Polysialic acid, placenta-specific 1 (PLAC1), hexasaccharide portion of globoH glycoceramide (GloboH), mammary gland differentiation antigen (NY-BR-1), uroplakin 2 (UPK2), Hepatitis A virus cellular receptor 1 (HAVCR1), adrenoceptor beta 3 (ADRB3), pannexin 3 (PANX3), G protein-coupled receptor 20 (GPR20), lymphocyte antigen 6 complex, locus K 9 (LY6K), Olfactory receptor 51E2 (OR51E2), TCR Gamma Alternate Reading Frame Protein (TARP), Wilms tumor protein (WT1), Cancer/testis antigen 1 (NY-ESO-1), Cancer/testis antigen 2 (LAGE-1a), MAGE family members (including MAGE-A1, MAGE-A3 and MAGE-A4), ETS translocation-variant gene 6, located on chromosome 12p (ETV6-AML), sperm protein 17 (SPA17), X Antigen Family, Member 1A (XAGE1), angiopoietin-binding cell surface receptor 2 (Tie 2), melanoma cancer testis antigen-1 (MAD-CT-1), melanoma cancer testis antigen-2 (MAD-CT-2), Fos-related antigen 1, tumor protein p53 (p53), p53 mutant, prostein, survivin, telomerase, prostate carcinoma tumor antigen-1, melanoma antigen recognized by T cells 1, Rat sarcoma (Ras) mutant, human Telomerase reverse transcriptase (hTERT), sarcoma translocation breakpoints, melanoma inhibitor of apoptosis (ML-IAP), ERG (transmembrane protease, serine 2 (TMPRSS2) ETS fusion gene), N-Acetyl glucosaminyl-transferase V (NA17), paired box protein Pax-3 (PAX3), Androgen receptor, Cyclin B1, v-myc avian myelocytomatosis viral oncogene neuroblastoma derived homolog (MYCN), Ras Homolog Family Member C (RhoC), Tyrosinase-related protein 2 (TRP-2), Cytochrome P450 1B1 (CYP1B1), CCCTC-Binding Factor (Zinc Finger Protein)-Like, Squamous Cell Carcinoma Antigen Recognized By T Cells 3 (SART3), Paired box protein Pax-5 (PAX5), proacrosin binding protein sp32 (OY-TES1), lymphocyte-specific protein tyrosine kinase (LCK), A kinase anchor protein 4 (AKAP-4), synovial sarcoma, X breakpoint 2 (SSX2), Receptor for Advanced Glycation Endproducts (RAGE-1), renal ubiquitous 1 (RU1), renal ubiquitous 2 (RU2), legumain, human papilloma virus E6 (HPV E6), human papilloma virus E7 (HPV E7), intestinal carboxyl esterase, heat shock protein 70-2 mutated (mut hsp70-2), CD79a, CD79b, CD72, Leukocyte-associated immunoglobulin-like receptor 1 (LAIR1), Fc fragment of IgA receptor (FCAR or CD89), Leukocyte immunoglobulin-like receptor subfamily A member 2 (LILRA2), CD300 molecule-like family member f (CD300LF), C-type lectin domain family 12 member A (CLECI2A), bone marrow stromal cell antigen 2 (BST2), EGF-like module-containing mucin-like hormone receptor-like 2 (EMR2), lymphocyte antigen 75 (LY75), Glypican-3 (GPC3), Fc receptor-like 5 (FCRL5), MUC16, 5T4, 8H9, αvβθ integrin, αvβ6 integrin, alphafetoprotein (AFP), B7-H6, ca-125, CA9, CD44, CD44v7/8, CD52, E-cadherin, EMA (epithelial membrane antigen), epithelial glycoprotein-2 (EGP-2), epithelial glycoprotein-40 (EGP-40), ErbB4, epithelial tumor antigen (ETA), folate binding protein (FBP), kinase insert domain receptor (KDR), k-light chain, L1 cell adhesion molecule, MUC18, NKG2D, oncofetal antigen (h5T4), tumor/testis-antigen 1B, GAGE, GAGE-1, BAGE, SCP-1, CTZ9, SAGE, CAGE, CT10, MART-1, immunoglobulin lambda-like polypeptide 1 (IGLL1), Hepatitis B Surface Antigen Binding Protein (HBsAg), viral capsid antigen (VCA), early antigen (EA), EBV nuclear antigen (EBNA), HHV-6 p41 early antigen, HHV-6B U94 latent antigen, HHV-6B p98 late antigen, cytomegalovirus (CMV) antigen, large T antigen, small T antigen, adenovirus antigen, respiratory syncytial virus (RSV) antigen, haemagglutinin (HA), neuraminidase (NA), parainfluenza type 1 antigen, parainfluenza type 2 antigen, parainfluenza type 3 antigen, parainfluenza type 4 antigen, Human Metapneumovirus (HMPV) antigen, hepatitis C virus (HCV) core antigen, HIV p24 antigen, human T cell lymphotrophic virus (HTLV-1) antigen, Merkel cell polyoma virus small T antigen, Merkel cell polyoma virus large T antigen, Kaposi sarcoma-associated herpesvirus (KSHV) lytic nuclear antigen and KSHV latent nuclear antigen. In some embodiments, an antigen binding domain comprises an amino acid sequence selected from SEQ ID NOs: 3162-3176.

ii. Hinge/Spacer Domain

[0342] In some embodiments, a CAR of the instant disclosure comprises a hinge or spacer domain. In some embodiments, the hinge/spacer domain may comprise a truncated hinge/spacer domain (THD) the THD domain is a truncated version of a complete hinge/spacer domain (“CHD”). In some embodiments, an extracellular domain is from or derived from (e.g., comprises all or a fragment of) ErbB2, glycophorin A (GpA), CD2, CD3 delta, CD3 epsilon, CD3 gamma, CD4, CD7, CD8a, CD8[T CD11a (IT GAL), CD11b (IT GAM), CD11c (ITGAX), CD11d (IT GAD), CD18 (ITGB2), CD19 (B4), CD27 (TNFRSF7), CD28, CD28T, CD29 (ITGB1), CD30 (TNFRSF8), CD40 (TNFRSF5), CD48 (SLAMF2), CD49a (ITGA1), CD49d (ITGA4), CD49f (ITGA6), CD66a (CEACAM1), CD66b (CEACAM8), CD66c (CEACAM6), CD66d (CEACAM3), CD66e (CEACAM5), CD69 (CLEC2), CD79A (B-cell antigen receptor complex-associated alpha chain), CD79B (B-cell antigen receptor complex-associated beta chain), CD84 (SLAMF5), CD96 (Tactile), CD100 (SEMA4D), CD103 (ITGAE), CD134 (0X40), CD137 (4-1BB), CD150 (SLAMF1), CD158A (KIR2DL1), CD158B1 (KIR2DL2), CD158B2 (KIR2DL3), CD158C (KIR3DP1), CD158D (KIRDL4), CD158F1 (KIR2DL5A), CD158F2 (KIR2DL5B), CD158K (KIR3DL2), CD160 (BY55), CD162 (SELPLG), CD226 (DNAM1), CD229 (SLAMF3), CD244 (SLAMF4), CD247 (CD3-zeta), CD258 (LIGHT), CD268 (BAFFR), CD270 (TNFSF14), CD272 (BTLA), CD276 (B7-H3), CD279 (PD-1), CD314 (NKG2D), CD319 (SLAMF7), CD335 (NK-p46), CD336 (NK-p44), CD337 (NK-p30), CD352 (SLAMF6), CD353 (SLAMF8), CD355 (CRT AM), CD357 (TNFRSF18), inducible T cell co-stimulator (ICOS), LFA-1 (CD11a/CD18), NKG2C, DAP-10, ICAM-1, NKp80 (KLRF1), IL-2R beta, IL-2R gamma, IL-7R alpha, LFA-1, SLAMF9, LAT, GADS (GrpL), SLP-76 (LCP2), PAG1/CBP, a CD83 ligand, Fc gamma receptor, MHC class 1 molecule, MHC class 2 molecule, a TNF receptor protein, an immunoglobulin protein, a cytokine receptor, an integrin, activating NK cell receptors, a Toll ligand receptor, and fragments or combinations thereof. A hinge or spacer domain may be derived either from a natural or from a synthetic source.

[0343] In some embodiments, a hinge or spacer domain is positioned between an antigen binding molecule (e.g., an scFv) and a transmembrane domain. In this orientation, the hinge/spacer domain provides distance between the antigen binding molecule and the surface of a cell membrane on which the CAR is expressed. In some embodiments, a hinge or spacer domain is from or derived from an immunoglobulin. In some embodiments, a hinge or spacer domain is selected from the hinge/spacer regions of IgG1, IgG2, IgG3, IgG4, IgA, IgD, IgE, IgM, or a fragment thereof. In some embodiments, a hinge or spacer domain comprises, is from, or is derived from the hinge/spacer region of CD8 alpha. In some embodiments, a hinge or spacer domain comprises, is from, or is derived from the hinge/spacer region of CD28. In some embodiments, a hinge or spacer domain comprises a fragment of the hinge/spacer region of CD8 alpha or a fragment of the hinge/spacer region of CD28, wherein the fragment is anything less than the whole hinge/spacer region. In some embodiments, the fragment of the CD8 alpha hinge/spacer region or the fragment of the CD28 hinge/spacer region comprises an amino acid sequence that excludes at least 1, at least 2, at least 3, at least 4, at least 5, at least 6, at least 7, at least 8, at least 9, at least 10, at least 11, at least 12, at least 13, at least 14, at least 15, at least 16, at least 17, at least 18, at least 19, or at least 20 amino acids at the N-terminus or C-Terminus, or both, of the CD8 alpha hinge/spacer region, or of the CD28 hinge/spacer region.

iii. Transmembrane Domain

[0344] The CAR of the present disclosure may further comprise a transmembrane domain and/or an intracellular signaling domain. The transmembrane domain may be designed to be fused to the extracellular domain of the CAR. It may similarly be fused to the intracellular domain of the CAR. In some embodiments, the transmembrane domain that naturally is associated with one of the domains in a CAR is used. In some instances, the transmembrane domain may be selected or modified (e.g., by an amino acid substitution) to avoid binding of such domains to the transmembrane domains of the same or different surface membrane proteins to minimize interactions with other members of the receptor complex. The transmembrane domain may be derived either from a natural or from a synthetic source. Where the source is natural, the domain may be derived from any membrane-bound or transmembrane protein.

[0345] Transmembrane regions may be derived from (i.e. comprise) a receptor tyrosine kinase (e.g., ErbB2), glycophorin A (GpA), 4-1BB/CD137, activating NK cell receptors, an immunoglobulin protein, B7-H3, BAFFR, BFAME (SEAMF8), BTEA, CD100 (SEMA4D), CD103, CD160 (BY55), CD18, CD19, CD19a, CD2, CD247, CD27, CD276 (B7-H3), CD28, CD29, CD3 delta, CD3 epsilon, CD3 gamma, CD30, CD4, CD40, CD49a, CD49D, CD49f, CD69, CD7, CD84, CD8alpha, CD8beta, CD96 (Tactile), CD11a, CD11b, CD11c, CD11d, CDS, CEACAM1, CRT AM, cytokine receptor, DAP-10, DNAM1 (CD226), Fc gamma receptor, GADS, GITR, HVEM (EIGHTR), IA4, ICAM-1, ICAM-1, Ig alpha (CD79a), IE-2R beta, IE-2R gamma, IE-7R alpha, inducible T cell costimulator (ICOS), integrins, ITGA4, ITGA4, ITGA6, IT GAD, ITGAE, ITGAE, IT GAM, ITGAX, ITGB2, ITGB7, ITGB1, KIRDS2, EAT, LFA-1, LFA-1, a ligand that specifically binds with CD83, LIGHT, LIGHT, LTBR, Ly9 (CD229), lymphocyte function-associated antigen-1 (LFA-1; CD1-1a/CD18), MHC class 1 molecule, NKG2C, NKG2D, NKp30, NKp44, NKp46, NKp80 (KLRF1), OX-40, PAG/Cbp, programmed death-1 (PD-1), PSGL1, SELPLG (CD162), Signaling Lymphocytic Activation Molecules (SLAM proteins), SLAM (SLAMF1; CD150; IPO-3), SLAMF4 (CD244; 2B4), SLAMF6 (NTB-A; Lyl08), SLAMF7, SLP-76, TNF receptor proteins, TNFR2, TNFSF14, a Toll ligand receptor, TRANCE/RANKL, VLA1, or VLA-6, or a fragment, truncation, or a combination thereof.

[0346] In some embodiments, suitable intracellular signaling domain include, but are not limited to, activating Macrophage/Myeloid cell receptors CSFR1, MYD88, CD14, TIE2, TLR4, CR3, CD64, TREM2, DAP10, DAP12, CD169, DECTIN1, CD206, CD47, CD163, CD36, MARCO, TIM4, MERTK, F4/80, CD91, C1QR, LOX-1, CD68, SRA, BAI-1, ABCA7, CD36, CD31, Lactoferrin, or a fragment, truncation, or combination thereof.

[0347] In some embodiments, a receptor tyrosine kinase may be derived from (e.g., comprise) Insulin receptor (InsR), Insulin-like growth factor 1 receptor (IGF1R), Insulin receptor-related receptor (IRR), platelet derived growth factor receptor alpha (PDGFRa), platelet derived growth factor receptor beta (PDGFRfi). KIT proto-oncogene receptor tyrosine kinase (Kit), colony stimulating factor 1 receptor (CSFR), fms related tyrosine kinase 3 (FLT3), fms related tyrosine kinase 1 (VEGFR-1), kinase insert domain receptor (VEGFR-2), fms related tyrosine kinase 4 (VEGFR-3), fibroblast growth factor receptor 1 (FGFR1), fibroblast growth factor receptor 2 (FGFR2), fibroblast growth factor receptor 3 (FGFR3), fibroblast growth factor receptor 4 (FGFR4), protein tyrosine kinase 7 (CCK4), neurotrophic receptor tyrosine kinase 1 (trkA), neurotrophic receptor tyrosine kinase 2 (trkB), neurotrophic receptor tyrosine kinase 3 (trkC), receptor tyrosine kinase like orphan receptor 1 (ROR1), receptor tyrosine kinase like orphan receptor 2 (ROR2), muscle associated receptor tyrosine kinase (MuSK), MET proto-oncogene, receptor tyrosine kinase (MET), macrophage stimulating 1 receptor (Ron), AXL receptor tyrosine kinase (Axl), TYR03 protein tyrosine kinase (Tyro3), MER proto-oncogene, tyrosine kinase (Mer), tyrosine kinase with immunoglobulin like and EGF like domains 1 (TIE1), TEK receptor tyrosine kinase (TIE2), EPH receptor A1 (EphA1), EPH receptor A2 (EphA2), (EPH receptor A3) EphA3, EPH receptor A4 (EphA4), EPH receptor A5 (EphA5), EPH receptor A6 (EphA6), EPH receptor A7 (EphA7), EPH receptor A8 (EphA8), EPH receptor A10 (EphAlO), EPH receptor B1 (EphB1), EPH receptor B2 (EphB2), EPH receptor B3 (EphB3), EPH receptor B4 (EphB4), EPH receptor B6 (EphB6), ret proto oncogene (Ret), receptor-like tyrosine kinase (RYK), discoidin domain receptor tyrosine kinase 1 (DDR1), discoidin domain receptor tyrosine kinase 2 (DDR2), c-ros oncogene 1, receptor tyrosine kinase (ROS), apoptosis associated tyrosine kinase (Lmr1), lemur tyrosine kinase 2 (Lmr2), lemur tyrosine kinase 3 (Lmr3), leukocyte receptor tyrosine kinase (LTK), ALK receptor tyrosine kinase (ALK), or serine/threonine/tyrosine kinase 1 (STYK1).

iv. Costimulatory Domain

[0348] In certain embodiments, the CAR comprises a costimulatory domain. In some embodiments, the costimulatory domain comprises 4-1BB (CD137), CD28, or both, and/or an intracellular T cell signaling domain. In a preferred embodiment, the costimulatory domain is human CD28, human 4-1BB, or both, and the intracellular T cell signaling domain is human CD3 zeta (ζ). 4-1BB, CD28, CD3 zeta may comprise less than the whole 4-1BB, CD28 or CD3 zeta, respectively. Chimeric antigen receptors may incorporate costimulatory (signaling) domains to increase their potency. See U.S. Pat. Nos. 7,741,465, and 6,319,494, as well as Krause et al. and Finney et al. (supra), Song et al., Blood 119:696-706 (2012); Kalos et al., Sci Transl. Med. 3:95 (2011); Porter et al., N. Engl. J. Med. 365:725-33 (2011), and Gross et al., Amur. Rev. Pharmacol. Toxicol. 56:59-83 (2016).

v. Intracellular Signaling Domain

[0349] The intracellular (signaling) domain of the engineered T-cells disclosed herein may provide signaling to an activating domain, which then activates at least one of the normal effector functions of the immune cell. Effector function of a T-cell, for example, may be cytolytic activity or helper activity including the secretion of cytokines.

[0350] In some embodiments, suitable intracellular signaling domain include (e.g., comprise), but are not limited to 4-1BB/CD137, activating NK cell receptors, an Immunoglobulin protein, B7-H3, BAFFR, BLAME (SLAMF8), BTLA, CD100 (SEMA4D), CD103, CD160 (BY55), CD18, CD19, CD19a, CD2, CD247, CD27, CD276 (B7-H3), CD28, CD29, CD3 delta, CD3 epsilon, CD3 gamma, CD30, CD4, CD40, CD49a, CD49D, CD49f, CD69, CD7, CD84, CD8alpha, CD8beta, CD96 (Tactile), CD11a, CD11b, CD11c, CD11d, CDS, CEACAM1, CRT AM, cytokine receptor, DAP-10, DNAM1 (CD226), Fc gamma receptor, GADS, GITR, HVEM (LIGHTR), IA4, ICAM-1, Ig alpha (CD79a), IL-2R beta, IL-2R gamma, IL-7R alpha, inducible T cell costimulator (ICOS), integrins, ITGA4, ITGA6, ITGAD, ITGAE, ITGAL, ITGAM, ITGAX, ITGB2, ITGB7, ITGB1, KIRDS2, LAT, LFA-1, ligand that specifically binds with CD83, LIGHT, LTBR, Ly9 (CD229), Lyl08, lymphocyte function-associated antigen-1 (LFA-1; CD1-1a/CD18), MHC class 1 molecule, NKG2C, NKG2D, NKp30, NKp44, NKp46, NKp80 (KLRF1), OX-40, PAG/Cbp, programmed death-1 (PD-1), PSGL1, SELPLG (CD162), Signaling Lymphocytic Activation Molecules (SLAM proteins), SLAM (SLAMF1; CD150; IPO-3), SLAMF4 (CD244; 2B4), SLAMF6 (NTB-A), SLAMF7, SLP-76, TNF receptor proteins, TNFR2, TNFSF14, a Toll ligand receptor, TRANCE/RANKL, VLA1, or VLA-6, or a fragment, truncation, or a combination thereof.

[0351] CD3 is an element of the T-cell receptor on native T-cells, and has been shown to be an important intracellular activating element in CARs. In some embodiments, the CD3 is CD3 zeta. In some embodiments, the activating domain comprises an amino acid sequence at least about 60%, at least about 65%, at least about 70%, at least about 75%, at least about 80%, at least about 85%, at least about 90%, at least about 95%, at least about 96%, at least about 97%, at least about 98%, at least about 99%, or about 100% identical to a polypeptide sequence selected from SEQ ID NOs: 3162-3176.

b. T-Cell Receptors (TCR)

[0352] In some embodiments, a provided circular RNA polynucleotide encodes a T-cell receptor. TCRs are described using the International Immunogenetics (IMGT) TCR nomenclature, and links to the IMGT public database of TCR sequences. Native alpha-beta heterodimeric TCRs have an alpha chain and a beta chain. Broadly, each chain may comprise variable, joining and constant regions, and the beta chain also usually contains a short diversity region between the variable and joining regions, but this diversity region is often considered as part of the joining region. Each variable region may comprise three CDRs (Complementarity Determining Regions) embedded in a framework sequence, one being the hypervariable region named CDR3. There are several types of alpha chain variable (Vα) regions and several types of beta chain variable (Vβ) regions distinguished by their framework, CDR1 and CDR2 sequences, and by a partly defined CDR3 sequence. The Va types are referred to in IMGT nomenclature by a unique TRAV number. Thus “TRAV21” defines a TCR Vα region having unique framework and CDR1 and CDR2 sequences, and a CDR3 sequence which is partly defined by an amino acid sequence which is preserved from TCR to TCR but which also includes an amino acid sequence which varies from TCR to TCR. In the same way, “TRBV5-1” defines a TCR Vβ region having unique framework and CDR1 and CDR2 sequences, but with only a partly defined CDR3 sequence.

[0353] The joining regions of the TCR are similarly defined by the unique IMGT TRAJ and TRBJ nomenclature, and the constant regions by the IMGT TRAC and TRBC nomenclature.

[0354] The beta chain diversity region is referred to in IMGT nomenclature by the abbreviation TRBD, and, as mentioned, the concatenated TRBD/TRBJ regions are often considered together as the joining region.

[0355] The unique sequences defined by the IMGT nomenclature are widely known and accessible to those working in the TCR field. For example, they can be found in the IMGT public database. The “T cell Receptor Factsbook”, (2001) LeFranc and LeFranc, Academic Press, ISBN 0-12-441352-8 also discloses sequences defined by the IMGT nomenclature, but because of its publication date and consequent time-lag, the information therein sometimes needs to be confirmed by reference to the IMGT database.

[0356] Native TCRs exist in heterodimeric αβ or γδ forms. However, recombinant TCRs consisting of aa or RR homodimers have previously been shown to bind to peptide MHC molecules. Therefore, the TCR of the invention may be a heterodimeric αβ TCR or may be an aa or RR homodimeric TCR.

[0357] For use in adoptive therapy, an αβ heterodimeric TCR may, for example, be transfected as full length chains having both cytoplasmic and transmembrane domains. In certain embodiments TCRs of the invention may have an introduced disulfide bond between residues of the respective constant domains, as described, for example, in WO 2006/000830.

[0358] TCRs of the invention, particularly alpha-beta heterodimeric TCRs, may comprise an alpha chain TRAC constant domain sequence and/or a beta chain TRBC1 or TRBC2 constant domain sequence. The alpha and beta chain constant domain sequences may be modified by truncation or substitution to delete the native disulfide bond between Cys4 of exon 2 of TRAC and Cys2 of exon 2 of TRBC1 or TRBC2. The alpha and/or beta chain constant domain sequence(s) may also be modified by substitution of cysteine residues for Thr 48 of TRAC and Ser 57 of TRBC1 or TRBC2, the said cysteines forming a disulfide bond between the alpha and beta constant domains of the TCR.

[0359] Binding affinity (inversely proportional to the equilibrium constant K_{D}) and binding half-life (expressed as T½) can be Determined by any Appropriate Method. It Will be appreciated that doubling the affinity of a TCR results in halving the K_{D}. T½ is calculated as ln 2 divided by the off-rate (koff). So doubling of T½ results in a halving in koff. K_{D} and koff values for TCRs are usually measured for soluble forms of the TCR, i.e. those forms which are truncated to remove cytoplasmic and transmembrane domain residues. Therefore it is to be understood that a given TCR has an improved binding affinity for, and/or a binding half-life for the parental TCR if a soluble form of that TCR has the said characteristics. Preferably the binding affinity or binding half-life of a given TCR is measured several times, for example 3 or more times, using the same assay protocol, and an average of the results is taken.

[0360] Since the TCRs of the invention have utility in adoptive therapy, the invention includes a non-naturally occurring and/or purified and/or or engineered cell, especially a T-cell, presenting a TCR of the invention. There are a number of methods suitable for the transfection of T-cells with nucleic acid (such as DNA, cDNA or RNA) encoding the TCRs of the invention (see for example Robbins et al., (2008) J Immunol. 180: 6116-6131). T-cells expressing the TCRs of the invention will be suitable for use in adoptive therapy-based treatment of cancers such as those of the pancreas and liver. As will be known to those skilled in the art, there are a number of suitable methods by which adoptive therapy can be carried out (see for example Rosenberg et al., (2008) Nat Rev Cancer 8(4): 299-308).

[0361] As is well-known in the art TCRs of the invention may be subject to post-translational modifications when expressed by transfected cells. Glycosylation is one such modification, which may comprise the covalent attachment of oligosaccharide moieties to defined amino acids in the TCR chain. For example, asparagine residues, or serine/threonine residues are well-known locations for oligosaccharide attachment. The glycosylation status of a particular protein depends on a number of factors, including protein sequence, protein conformation and the availability of certain enzymes. Furthermore, glycosylation status (i.e., oligosaccharide type, covalent linkage and total number of attachments) can influence protein function. Therefore, when producing recombinant proteins, controlling glycosylation is often desirable. Glycosylation of transfected TCRs may be controlled by mutations of the transfected gene (Kuball J et al. (2009), J Exp Med 206(2):463-475). Such mutations are also encompassed in this invention.

[0362] A TCR may be specific for an antigen in the group MAGE-A1, MAGE-A2, MAGE-A3, MAGE-A4, MAGE-A5, MAGE-A6, MAGE-A7, MAGE-A8, MAGE-A9, MAGE-A10, MAGE-A11, MAGE-A12, MAGE-A13, GAGE-1, GAGE-2, GAGE-3, GAGE-4, GAGE-5, GAGE-6, GAGE-7, GAGE-8, BAGE-1, RAGE-1, LB33/MUM-1, PRAME, NAG, MAGE-Xp2 (MAGE-B2), MAGE-Xp3 (MAGE-B3), MAGE-Xp4 (AGE-B4), tyrosinase, brain glycogen phosphorylase, Melan-A, MAGE-C1, MAGE-C2, NY-ESO-1, LAGE-1, SSX-1, SSX-2(HOM-MEL-40), SSX-1, SSX-4, SSX-5, SCP-1, CT-7, alpha-actinin-4, Bcr-Ab1 fusion protein, Casp-8, beta-catenin, cdc27, cdk4, cdkn2a, coa-1, dek-can fusion protein, EF2, ETV6-AML1 fusion protein, LDLR-fucosyltransferaseAS fusion protein, HLA-A2, HLA-A11, hsp70-2, KIAAO205, Mart2, Mum-2, and 3, neo-PAP, myosin class I, OS-9, pm1-RARa fusion protein, PTPRK, K-ras, N-ras, Triosephosphate isomeras, GnTV, Herv-K-mel, Lage-1, Mage-C₂, NA-88, Lage-2, SP17, and TRP2-Int2, (MART-I), gp100 (Pmel 17), TRP-1, TRP-2, MAGE-1, MAGE-3, pi5(58), CEA, NY-ESO (LAGE), SCP-1, Hom/Mel-40, p53, H-Ras, HER-2/neu, BCR-ABL, E2A-PRL, H4-RET, IGH-IGK, MYL-RAR, Epstein Barr virus antigens, EBNA, human papillomavirus (HPV) antigens E6 and E7, TSP-180, MAGE-4, MAGE-5, MAGE-6, pi85erbB2, pi80erbB-3, c-met, nm-23H1, PSA, TAG-72-4, CA 19-9, CA 72-4, CAM 17.1, NuMa, K-ras, beta-catenin, CDK4, Mum-1, p16, TAGE, PSMA, PSCA, CT7, telomerase, 43-9F, 5T4, 791Tgp72, a-fetoprotein, 13HCG, BCA225, BTAA, CA 125, CA 15-3 (CA 27.29\BCAA), CA 195, CA 242, CA-50, CAM43, CD68\KP1, CO-029, FGF-5, G250, Ga733 (EpCAM), HTgp-175, M344, MA-50, MG7-Ag, MOV18, NB\170K, NY-CO-1, RCAS1, SDCCAGi6, TA-90 (Mac-2 binding protein\cyclophilin C-associated protein), TAAL6, TAG72, TLP, and TPS.

c. B-Cell Receptors (BCR)

[0363] In some embodiments, a provided circular RNA polynucleotide encodes one or more B-cell receptors (BCRs). BCRs (or B-cell antigen receptors) are immunoglobulin molecules that form a type I transmembrane protein on the surface of a B cell. A BCR is capable of transmitting activating signal into a B cell following recognition of a specific antigen. Prior to binding of a B cell to an antigen, the BCR will remain in an unstimulated or “resting” stage. Binding of an antigen to a BCR leads to signaling that initiates a humoral immune response.

[0364] A BCR is expressed by mature B cells. These B cells work with immunoglobulins (Igs) in recognizing and tagging pathogens. The typical BCR comprises a membrane-bound immunoglobulin (e.g., mIgA, mIgD, mIgE, mIgG, and mIgM), along with associated and Igα/Igβ (CD79a/CD79b) heterodimers (α/β). These membrane-bound immunoglobulins are tetramers consisting of two identical heavy and two light chains. Within the BCR, the membrane bound immunoglobulins is capable of responding to antigen binding by signal transmission across the plasma membrane leading to B cell activation and consequently clonal expansion and specific antibody production (Friess M et al. (2018), Front. Immunol. 2947(9)). The Igα/Igβ heterodimers is responsible for transducing signals to the cell interior.

[0365] A Igα/Igβ heterodimer signaling relies on the presence of immunoreceptor tyrosine-based activation motifs (ITAMs) located on each of the cytosolic tails of the heterodimers. ITAMs comprise two tyrosine residues separated by 9-12 amino acids (e.g., tyrosine, leucine, and/or valine). Upon binding of an antigen, the tyrosine of the BCR's ITAMs become phosphorylated by Src-family tyrosine kinases Blk, Fyn, or Lyn (Janeway C et al., Immunobiology: The Immune System in Health and Disease (Garland Science, 5th ed. 2001)).

d. Other Chimeric Proteins

[0366] In addition to the chimeric proteins provided above, the circular RNA polynucleotide may encode for a various number of other chimeric proteins available in the art. The chimeric proteins may include recombinant fusion proteins, chimeric mutant protein, or other fusion proteins.

### B. Immune Modulatory Ligands

[0367] In some embodiments, the circular RNA polynucleotide encodes for an immune modulatory ligand. In certain embodiments, the immune modulatory ligand may be immunostimulatory; while in other embodiments, the immune modulatory ligand may be immunosuppressive.

a. Cytokines: Interferon, Chemokines, Interleukins, Growth Factor & Others

[0368] In some embodiments, the circular RNA polynucleotide encodes for a cytokine. In some embodiments, the cytokine comprises a chemokine, interferon, interleukin, lymphokine, and tumor necrosis factor. Chemokines are chemotactic cytokine produced by a variety of cell types in acute and chronic inflammation that mobilizes and activates white blood cells. An interferon comprises a family of secreted α-helical cytokines induced in response to specific extracellular molecules through stimulation of TLRs (Borden, Molecular Basis of Cancer (Fourth Edition) 2015). Interleukins are cytokines expressed by leukocytes.

[0369] Descriptions and/or amino acid sequences of IL-2, IL-7, IL-10, IL-12, IL-15, IL-18, IL-27β, IFNγ, and/or TGFβ1 are provided herein and at the www.uniprot.org database at accession numbers: P60568 (IL-2), P29459 (IL-12A), P29460 (IL-12B), P13232 (IL-7), P22301 (IL-10), P40933 (IL-15), Q14116 (IL-18), Q14213 (IL-27β), P01579 (IFNγ), and/or P01137 (TGFβ1).

### C. Transcription Factors

[0370] Regulatory T-cells (Treg) are important in maintaining homeostasis, controlling the magnitude and duration of the inflammatory response, and in preventing autoimmune and allergic responses.

[0371] In general, Tregs are thought to be mainly involved in suppressing immune responses, functioning in part as a “self-check” for the immune system to prevent excessive reactions. In particular, Tregs are involved in maintaining tolerance to self-antigens, harmless agents such as pollen or food, and abrogating autoimmune disease.

[0372] Tregs are found throughout the body including, without limitation, the gut, skin, lung, and liver. Additionally, Treg cells may also be found in certain compartments of the body that are not directly exposed to the external environment such as the spleen, lymph nodes, and even adipose tissue. Each of these Treg cell populations is known or suspected to have one or more unique features and additional information may be found in Lehtimaki and Lahesmaa, Regulatory T-cells control immune responses through their non-redundant tissue specific features, 2013, FRONTIERS IN IMMUNOL., 4(294): 1-10, the disclosure of which is hereby incorporated in its entirety.

[0373] Typically, Tregs are known to require TGF-β and IL-2 for proper activation and development. Tregs, expressing abundant amounts of the IL-2 receptor (IL-2R), are reliant on IL-2 produced by activated T-cells. Tregs are known to produce both IL-10 and TGF-β, both potent immune suppressive cytokines. Additionally, Tregs are known to inhibit the ability of antigen presenting cells (APCs) to stimulate T-cells. One proposed mechanism for APC inhibition is via CTLA-4, which is expressed by Foxp3+ Tregs. It is thought that CTLA-4 may bind to B7 molecules on APCs and either block these molecules or remove them by causing internalization resulting in reduced availability of B7 and an inability to provide adequate co-stimulation for immune responses. Additional discussion regarding the origin, differentiation and function of Tregs may be found in Dhamne et al., Peripheral and thymic Foxp3+ regulatory T-cells in search of origin, distinction, and function, 2013, Frontiers in Immunol., 4 (253): 1-11, the disclosure of which is hereby incorporated in its entirety.

### D. Checkpoint Inhibitors & Agonists

[0374] As provided herein, in certain embodiments, the coding element of the circular RNA encodes for one or more checkpoint inhibitors or agonists.

[0375] In some embodiments, the immune checkpoint inhibitor is an inhibitor of Programmed Death-Ligand 1 (PD-L1, also known as B7-H1, CD274), Programmed Death 1 (PD-1), CTLA-4, PD-L2 (B7-DC, CD273), LAG3, TIM3, 2B4, A2aR, B7H1, B7H3, B7H4, BTLA, CD2, CD27, CD28, CD30, CD40, CD70, CD80, CD86, CD137, CD160, CD226, CD276, DR3, GAL9, GITR, HAVCR2, HVEM, IDO1, IDO2, ICOS (inducible T cell costimulator), KIR, LAIR1, LIGHT, MARCO (macrophage receptor with collageneous structure), PS (phosphatidylserine), OX-40, SLAM, TIGHT, VISTA, VTCN1, or any combinations thereof. In some embodiments, the immune checkpoint inhibitor is an inhibitor of IDO1, CTLA4, PD-1, LAG3, PD-L1, TIM3, or combinations thereof. In some embodiments, the immune checkpoint inhibitor is an inhibitor of PD-L1. In some embodiments, the immune checkpoint inhibitor is an inhibitor of PD-1. In some embodiments, the immune checkpoint inhibitor is an inhibitor of CTLA-4. In some embodiments, the immune checkpoint inhibitor is an inhibitor of LAG3. In some embodiments, the immune checkpoint inhibitor is an inhibitor of TIM3. In some embodiments, the immune checkpoint inhibitor is an inhibitor of IDO1.

[0376] As described herein, at least in one aspect, the invention encompasses the use of immune checkpoint antagonists. Such immune checkpoint antagonists include antagonists of immune checkpoint molecules such as Cytotoxic T-Lymphocyte Antigen 4 (CTLA-4), Programmed Cell Death Protein 1 (PD-1), Programmed Death-Ligand 1 (PDL-1), Lymphocyte-activation gene 3 (LAG-3), and T cell immunoglobulin and mucin domain 3 (TIM-3). An antagonist of CTLA-4, PD-1, PDL-1, LAG-3, or TIM-3 interferes with CTLA-4, PD-1, PDL-1, LAG-3, or TIM-3 function, respectively. Such antagonists of CTLA-4, PD-1, PDL-1, LAG-3, and TIM-3 can include antibodies which specifically bind to CTLA-4, PD-1, PDL-1, LAG-3, and TIM-3, respectively and inhibit and/or block biological activity and function.

### E. Others

[0377] In some embodiments, the payload encoded within one or more of the coding elements is a hormone, FC fusion protein, anticoagulant, blood clotting factor, protein associated with deficiencies and genetic disease, a chaperone protein, an antimicrobial protein, an enzyme (e.g., metabolic enzyme), a structural protein (e.g., a channel or nuclear pore protein), protein variant, small molecule, antibody, nanobody, an engineered non-body antibody, or a combination thereof.

### 4. Additional Accessory Elements (Sequence Elements)

[0378] As described in this invention, the polynucleotide (e.g., circular RNA polynucleotide, linear RNA polynucleotide, and/or DNA template) may further comprise of accessory elements. In certain embodiments, these accessory elements may be included within the sequences of the circular RNA, linear RNA polynucleotide and/or DNA template for enhancing circularization, translation or both. Accessory elements are sequences, in certain embodiments that are located with specificity between or within the enhanced intron elements, enhanced exon elements, or core functional element of the respective polynucleotide. As an example, but not intended to be limiting, an accessory element includes, a IRES transacting factor region, a miRNA binding site, a restriction site, an RNA editing region, a structural or sequence element, a granule site, a zip code element, an RNA trafficking element or another specialized sequence as found in the art that enhances promotes circularization and/or translation of the protein encoded within the circular RNA polynucleotide.

### A. IRES Transacting Factors

[0379] In certain embodiments, the accessory element comprises an IRES transacting factor (ITAF) region. In some embodiments, the IRES transacting factor region modulates the initiation of translation through binding to PCBP1-PCBP4 (polyC binding protein), PABP1 (polyA binding protein), PTB (polypyrimidine tract binding), Argonaute protein family, HNRNPK (Heterogeneous nuclear ribonucleoprotein K protein), or La protein. In some embodiments, the IRES transacting factor region comprises a polyA, polyC, polyAC, or polypyrimidine track.

[0380] In some embodiments, the ITAF region is located within the core functional element. In some embodiments, the ITAF region is located within the TIE.

### B. miRNA Binding Sites

[0381] In certain embodiments, the accessory element comprises a miRNA binding site. In some embodiments the miRNA binding site is located within the 5′ enhanced intron element, 5′ enhanced exon element, core functional element, 3′ enhanced exon element, and/or 3′ enhanced intron element.

[0382] In some embodiments, wherein the miRNA binding site is located within the spacer within the enhanced intron element or enhanced exon element. In certain embodiments, the miRNA binding site comprises the entire spacer regions.

[0383] In some embodiments, the 5′ enhanced intron element and 3′ enhanced intron elements each comprise identical miRNA binding sites. In another embodiment, the miRNA binding site of the 5′ enhanced intron element comprises a different, in length or nucleotides, miRNA binding site than the 3′ enhanced intron element. In one embodiment, the 5′ enhanced exon element and 3′ enhanced exon element comprise identical miRNA binding sites. In other embodiments, the 5′ enhanced exon element and 3′ enhanced exon element comprises different, in length or nucleotides, miRNA binding sites.

[0384] In some embodiments, the miRNA binding sites are located adjacent to each other within the circular RNA polynucleotide, linear RNA polynucleotide precursor, and/or DNA template. In certain embodiments, the first nucleotide of one of the miRNA binding sites follows the first nucleotide last nucleotide of the second miRNA binding site.

[0385] In some embodiments, the miRNA binding site is located within a translation initiation element (TIE) of a core functional element. In one embodiment, the miRNA binding site is located before, trailing or within an internal ribosome entry site (IRES). In another embodiment, the miRNA binding site is located before, trailing, or within an aptamer complex.

[0386] Incorporation of miRNA sequences within a circular RNA molecule can permit tissue-specific expression of a coding sequence within a core functional element. For example, in a circular RNA intended to express a protein in immune cells, miRNA binding sequences resulting in expression suppression in tissues such as the liver or kidney may be desired. Such miRNA binding sequences may be selected based on the cell or tissue expression of miRNAs.

[0387] The unique sequences defined by the miRNA nomenclature are widely known and accessible to those working in the microRNA field. For example, they can be found in the miRDB public database.

### 5. Production of Polynucleotides

[0388] The DNA templates provided herein can be made using standard techniques of molecular biology. For example, the various elements of the vectors provided herein can be obtained using recombinant methods, such as by screening cDNA and genomic libraries from cells, or by deriving the polynucleotides from a DNA template known to include the same.

[0389] The various elements of the DNA template provided herein can also be produced synthetically, rather than cloned, based on the known sequences. The complete sequence can be assembled from overlapping oligonucleotides prepared by standard methods and assembled into the complete sequence. See, e.g., Edge, Nature (1981) 292:756; Nambair et al., Science (1984) 223: 1299; and Jay et al., J. Biol. Chem. (1984) 259:631 1.

[0390] Thus, particular nucleotide sequences can be obtained from DNA template harboring the desired sequences or synthesized completely, or in part, using various oligonucleotide synthesis techniques known in the art, such as site-directed mutagenesis and polymerase chain reaction (PCR) techniques where appropriate. One method of obtaining nucleotide sequences encoding the desired DNA template elements is by annealing complementary sets of overlapping synthetic oligonucleotides produced in a conventional, automated polynucleotide synthesizer, followed by ligation with an appropriate DNA ligase and amplification of the ligated nucleotide sequence via PCR. See, e.g., Jayaraman et al., Proc. Natl. Acad. Sci. USA (1991) 88:4084-4088. Additionally, oligonucleotide-directed synthesis (Jones et al., Nature (1986) 54:75-82), oligonucleotide directed mutagenesis of preexisting nucleotide regions (Riechmann et al., Nature (1988) 332:323-327 and Verhoeyen et al., Science (1988) 239: 1534-1536), and enzymatic filling-in of gapped oligonucleotides using T4 DNA polymerase (Queen et al., Proc. Natl. Acad. Sci. USA (1989) 86: 10029-10033) can be used.

[0391] The precursor RNA provided herein can be generated by incubating a DNA template provided herein under conditions permissive of transcription of the precursor RNA encoded by the DNA template. For example, in some embodiments a precursor RNA is synthesized by incubating a DNA template provided herein that comprises an RNA polymerase promoter upstream of its 5′ duplex sequence and/or expression sequences with a compatible RNA polymerase enzyme under conditions permissive of in vitro transcription. In some embodiments, the DNA template is incubated inside of a cell by a bacteriophage RNA polymerase or in the nucleus of a cell by host RNA polymerase II.

[0392] In certain embodiments, provided herein is a method of generating precursor RNA by performing in vitro transcription using a DNA template provided herein as a template (e.g., a vector provided herein with an RNA polymerase promoter positioned upstream of the 5′ duplex region).

[0393] In certain embodiments, the resulting precursor RNA can be used to generate circular RNA (e.g., a circular RNA polynucleotide provided herein) by incubating it in the presence of magnesium ions and guanosine nucleotide or nucleoside at a temperature at which RNA circularization occurs (e.g., between 20° C. and 60° C.).

[0394] Thus, in certain embodiments provided herein is a method of making circular RNA. In certain embodiments, the method comprises synthesizing precursor RNA by transcription (e.g., run-off transcription) using a vector provided herein (e.g., a 5′ enhanced intron element, a 5′ enhanced exon element, a core functional element, a 3′ enhanced exon element, and a 3′ enhanced intron element) as a template, and incubating the resulting precursor RNA in the presence of divalent cations (e.g., magnesium ions) and GTP such that it circularizes to form circular RNA. In some embodiments, the precursor RNA disclosed herein is capable of circularizing in the absence of magnesium ions and GTP and/or without the step of incubation with magnesium ions and GTP. It has been discovered that circular RNA has reduced immunogenicity relative to a corresponding mRNA, at least partially because the mRNA contains an immunogenic 5′ cap. When transcribing a DNA vector from certain promoters (e.g., a T7 promoter) to produce a precursor RNA, it is understood that the 5′ end of the precursor RNA is G. To reduce the immunogenicity of a circular RNA composition that contains a low level of contaminant linear mRNA, an excess of GMP relative to GTP can be provided during transcription such that most transcripts contain a 5′ GMP, which cannot be capped. Therefore, in some embodiments, transcription is carried out in the presence of an excess of GMP. In some embodiments, transcription is carried out where the ratio of GMP concentration to GTP concentration is within the range of about 3:1 to about 15:1, for example, about 3:1 to about 10:1, about 3:1 to about 5:1, about 3:1, about 4:1, or about 5:1.

[0395] In some embodiments, a composition comprising circular RNA has been purified. Circular RNA may be purified by any known method commonly used in the art, such as column chromatography, gel filtration chromatography, and size exclusion chromatography. In some embodiments, purification comprises one or more of the following steps: phosphatase treatment, HPLC size exclusion purification, and RNase R digestion. In some embodiments, purification comprises the following steps in order: RNase R digestion, phosphatase treatment, and HPLC size exclusion purification. In some embodiments, purification comprises reverse phase HPLC. In some embodiments, a purified composition contains less double stranded RNA, DNA splints, triphosphorylated RNA, phosphatase proteins, protein ligases, capping enzymes and/or nicked RNA than unpurified RNA. In some embodiments, purification of circular RNA comprises an affinity-purification or negative selection method described herein. In some embodiments, purification of circular RNA comprises separation of linear RNA from circular RNA using oligonucleotides that are complementary to a sequence in the linear RNA but are not complementary to a sequence in the circular RNA. In some embodiments, a purified composition is less immunogenic than an unpurified composition. In some embodiments, immune cells exposed to a purified composition produce less TNFα, RIG-I, IL-2, IL-6, IFNγ, and/or a type 1 interferon, e.g., IFN-β1, than immune cells exposed to an unpurified composition.

[0396] Described herein is a method of evaluating RNA translatability using polysome profiling. Polysome profiling involves the analysis of ribosome-free and polysome-bound RNAs and may be used to determine translatability of an RNA molecule (see, e.g., Leppek et al., Nature Commun. (2022), 13, 1536). Polysomes are an aggregate of ribosomes that are in the process of actively translating RNA into protein and have a different molecular weight as compared to unbound ribosomes (i.e., non-translating ribosomes that are not bound to an RNA molecule). Given that there are different molecular weights between bound polysomes and unbound ribosomes, ribosome fractionation can be conducted for the bound polysomes (associated with actively translating RNAs) and unbound (non-translating RNAs) molecules. In some embodiments, separation and/or fractionation of the polysomes may be performed using a sucrose gradient.

[0397] Polysomes having RNAs with multiple bound ribosomes are an indication of higher translational capacity. By contrast, free RNAs that are not bound by any ribosomes or ribosomal subunits are an indication of lower or no translational capacity. In some embodiments, the RNA sequences (e.g., circular RNA), following cellular introduction and isolation, may be bound by two or more ribosomes resulting in a sucrose fractionation correlating to the number of bound ribosomes. In certain embodiments, the RNA sequences may be bound by a single ribosome resulting in a correlative sucrose fraction. In some embodiments, the RNA sequences may be bound by the 60s ribosomal subunit resulting in a correlative sucrose fraction. In other embodiments, the RNA sequences may be bound by the 40s ribosomal subunit resulting in a correlative sucrose fraction. Alternatively, in some embodiments, the RNA sequences may not be bound by any ribosomes or subunits resulting in a correlative sucrose fraction.

[0398] In certain embodiments, RNA polysome loading (i.e., the process by which the RNA of interest is loaded onto ribosome) can be evaluated in a cell-free expression (CFE) environment. CFE is a system by which polynucleotides can be evaluated for their transcription and translational capacity via an in-vitro environment. Such experiments may comprise introducing a DNA template into a mix of a cytoplasmic extract consisting of the cellular products necessary for transcription and translation (see, e.g., Garenne et al., Nat. Rev. Methods Primers (2021), 1, 49). From this system, the polysomes may then be collected and evaluated via the polysome profiling methods described herein.

[0399] In some embodiments, a pool of the RNA of interest (e.g., circular RNA) is transfected into a collection of cells (e.g., mammalian cells) instead of a CFE environment. In some embodiments, the cells undergo cell lysis to release the cytoplasmic polysomes that are then extracted for polysome profiling analysis. In some embodiments, following cell lysis, the lysed cells and their RNA content are added to a sucrose gradient and centrifuged to separate the RNA molecules based on their ribosomal load (see, e.g., bChass6 et al., Nucleic Acids Res. (2017), 45(3):e15). The sucrose gradients are then fractionated by pumping the gradients into a fractional collection instrument and collected as individual sucrose/polysome fractions. In some embodiments, the nature of these fractions can be defined by volume and/or time. A set referential ‘ladder’ RNA sequences are added to the individual fractions at known concentrations to aid in quantifying and for comparative purposes against the original pool of RNA molecules. The RNA may be then extracted from the individual sucrose gradient fractions for sequencing and analysis (e.g., RNA stability).

[0400] In some embodiments, polysome profiling may be used to determine translatability of one or more RNA molecule. In some embodiments, the RNA molecules analyzed through polysome profiling comprise a circular RNA and/or linear RNA. In some embodiments, the RNA (e.g., circular RNA) comprises a translation initiation element (TIE) described herein. In some embodiments, the polysome profiling may be used to select and optimize translatability and/or expression in the RNA molecule. In some embodiments, a TIE capable of high translation efficiency, e.g., in a circular RNA disclosed herein, refers to high ribosome initiation, load, and/or recruitment, e.g., de novo ribosome initiation and/or recruitment, as determined by the polysome profiling methods disclosed herein and/or known in the field.

[0401] Provided herein are methods of identifying a TIE capable of initiating, promoting, and/or driving translation comprising the steps of: (a) obtaining a pool of RNA molecules comprising barcode sequence and TIE, (b) transfecting the RNA molecules into a cell comprising one or more ribosomes, (c) lysing the cell and adding the content of the lysed cell into a gradient to fractionate based on the ribosomal load, and (d) selecting the RNA and TIE combination having high ribosomal load. In some embodiments, the RNA is circular RNA.

[0402] Provided herein are methods of identifying a TIE having high translation efficiency comprising the steps of: (a) obtaining a pool of RNA molecules comprising barcode sequence and TIE, (b) transfecting the RNA molecules into a cell comprising one or more ribosomes, (c) lysing the cell and adding the content of the lysed cell into a gradient to fractionate based on the ribosomal load, and (d) selecting the RNA and TIE combination having high ribosomal load. In some embodiments, the RNA is circular RNA.

### 6. Overview of Transfer Vehicle & Other Delivery Mechanisms

### A. Ionizable Lipids

[0403] In certain embodiments, disclosed herein are ionizable lipids that may be used as a component of a transfer vehicle to facilitate or enhance the delivery and release of circular RNA to one or more target cells (e.g., by permeating or fusing with the lipid membranes of such target cells). In certain embodiments, an ionizable lipid comprises one or more cleavable functional groups (e.g., a disulfide) that allow, for example, a hydrophilic functional head-group to dissociate from a lipophilic functional tail-group of the compound (e.g., upon exposure to oxidative, reducing or acidic conditions), thereby facilitating a phase transition in the lipid bilayer of the one or more target cells.

[0404] In some embodiments, an ionizable lipid is a lipid as described in international patent application PCT/US2018/058555.

[0405] In some embodiments, the transfer vehicle comprises Lipid A, Lipid B, Lipid C, and/or Lipid D. In some embodiments, inclusion of Lipid A, Lipid B, Lipid C, and/or Lipid D improves encapsulation and/or endosomal escape.

[0406] In some embodiments, an ionizable lipid is Lipid A, which is (9Z,12Z)-3-((4,4-bis(octyloxy)butanoyl)oxy)-2-((((3-(diethylamino)propoxy)carbonyl)oxy)methyl)propyl octadeca9,12-dienoate, also called 3-((4,44bis(octyloxy)butanoyl)oxy)-2-((((3-(diethylamino)propoxy)carbonyl)oxy)methyl)propyl (9Z,12Z)-octadeca-9,12-dienoate. Lipid A can be depicted as:

[chemical structure]

[0407] In some embodiments, an ionizable lipid of the disclosure is selected from Table 2.

TABLE 2
Exemplary Ionizable Lipids

| Lipid | Structure |
|---|---|
| 10a-26 | [chemical structure] |
| 10a-27 | [chemical structure] |
| 10a-53 | [chemical structure] |
| 10a-54 | [chemical structure] |
| 10b-15 | [chemical structure] |
| 22-S14 | [chemical structure] |
| 93-S14 | [chemical structure] |
| Lipid 39 | [chemical structure] |

Table of Additional Exemplary Ionizable Lipids (Table B)

| Lipid | Structure |
|---|---|
| 1 | [chemical structure] |
| 2 | [chemical structure] |
| 3 | [chemical structure] |
| 4 | [chemical structure] |
| 5 | [chemical structure] |
| 6 | [chemical structure] |
| 7 | [chemical structure] |
| 8 | [chemical structure] |
| 9 | [chemical structure] |
| 10 | [chemical structure] |
| 11 | [chemical structure] |
| 12 | [chemical structure] |
| 13 | [chemical structure] |
| 14 | [chemical structure] |
| 15 | [chemical structure] |
| 16 | [chemical structure] |
| 17 | [chemical structure] |
| 18 | [chemical structure] |
| 19 | [chemical structure] |
| 20 | [chemical structure] |
| 21 | [chemical structure] |
| 22 | [chemical structure] |
| 23 | [chemical structure] |
| 24 | [chemical structure] |
| 25 | [chemical structure] |
| 26 | [chemical structure] |
| 27 | [chemical structure] |
| 28 | [chemical structure] |
| 29 | [chemical structure] |
| 30 | [chemical structure] |
| 31 | [chemical structure] |
| 32 | [chemical structure] |
| 33 | [chemical structure] |
| 34 | [chemical structure] |
| 35 | [chemical structure] |
| 36 | [chemical structure] |
| 37 | [chemical structure] |
| 38 | [chemical structure] |
| 39 | [chemical structure] |
| 40 | [chemical structure] |
| 41 | [chemical structure] |
| 42 | [chemical structure] |
| 43 | [chemical structure] |
| 44 | [chemical structure] |
| 45 | [chemical structure] |
| 46 | [chemical structure] |
| 47 | [chemical structure] |
| 48 | [chemical structure] |
| 49 | [chemical structure] |
| 50 | [chemical structure] |
| 51 | [chemical structure] |
| 52 | [chemical structure] |
| 53 | [chemical structure] |
| 54 | [chemical structure] |
| 55 | [chemical structure] |
| 56 | [chemical structure] |
| 57 | [chemical structure] |
| 58 | [chemical structure] |
| 59 | [chemical structure] |
| 60 | [chemical structure] |
| 61 | [chemical structure] |
| 62 | [chemical structure] |
| 63 | [chemical structure] |
| 64 | [chemical structure] |
| 65 | [chemical structure] |
| 66 | [chemical structure] |
| 67 | [chemical structure] |
| 68 | [chemical structure] |
| 69 | [chemical structure] |
| 70 | [chemical structure] |
| 71 | [chemical structure] |
| 72 | [chemical structure] |
| 73 | [chemical structure] |
| 74 | [chemical structure] |
| 75 | [chemical structure] |
| 76 | [chemical structure] |
| 77 | [chemical structure] |
| 78 | [chemical structure] |
| 79 | [chemical structure] |
| 80 | [chemical structure] |
| 81 | [chemical structure] |
| 82 | [chemical structure] |
| 83 | [chemical structure] |
| 84 | [chemical structure] |
| 85 | [chemical structure] |
| 86 | [chemical structure] |
| 87 | [chemical structure] |
| 88 | [chemical structure] |
| 89 | [chemical structure] |
| 90 | [chemical structure] |
| 91 | [chemical structure] |
| 92 | [chemical structure] |
| 93 | [chemical structure] |
| 94 | [chemical structure] |
| 95 | [chemical structure] |
| 96 | [chemical structure] |
| 97 | [chemical structure] |
| 98 | [chemical structure] |
| 99 | [chemical structure] |
| 100 | [chemical structure] |
| 101 | [chemical structure] |
| 102 | [chemical structure] |
| 103 | [chemical structure] |
| 104 | [chemical structure] |
| 105 | [chemical structure] |
| 106 | [chemical structure] |
| 107 | [chemical structure] |
| 108 | [chemical structure] |
| 109 | [chemical structure] |
| 110 | [chemical structure] |
| 111 | [chemical structure] |
| 112 | [chemical structure] |
| 113 | [chemical structure] |
| 114 | [chemical structure] |
| 115 | [chemical structure] |
| 116 | [chemical structure] |
| 117 | [chemical structure] |
| 118 | [chemical structure] |
| 119 | [chemical structure] |
| 120 | [chemical structure] |
| 121 | [chemical structure] |
| 122 | [chemical structure] |
| 123 | [chemical structure] |
| 124 | [chemical structure] |
| 125 | [chemical structure] |
| 126 | [chemical structure] |
| 127 | [chemical structure] |
| 128 | [chemical structure] |
| 129 | [chemical structure] |
| 130 | [chemical structure] |
| 131 | [chemical structure] |
| 132 | [chemical structure] |
| 133 | [chemical structure] |
| 134 | [chemical structure] |
| 135 | [chemical structure] |
| 136 | [chemical structure] |
| 137 | [chemical structure] |
| 138 | [chemical structure] |
| 139 | [chemical structure] |
| 140 | [chemical structure] |
| 141 | [chemical structure] |
| 142 | [chemical structure] |
| 143 | [chemical structure] |
| 144 | [chemical structure] |
| 145 | [chemical structure] |
| 146 | [chemical structure] |
| 147 | [chemical structure] |
| 148 | [chemical structure] |
| 149 | [chemical structure] |
| 150 | [chemical structure] |
| 151 | [chemical structure] |
| 152 | [chemical structure] |
| 153 | [chemical structure] |
| 154 | [chemical structure] |
| 155 | [chemical structure] |
| 156 | [chemical structure] |
| 157 | [chemical structure] |
| 158 | [chemical structure] |
| 159 | [chemical structure] |
| 160 | [chemical structure] |
| 161 | [chemical structure] |
| 162 | [chemical structure] |
| 163 | [chemical structure] |
| 164 | [chemical structure] |
| 165 | [chemical structure] |
| 166 | [chemical structure] |
| 167 | [chemical structure] |
| 168 | [chemical structure] |
| 169 | [chemical structure] |
| 170 | [chemical structure] |
| 171 | [chemical structure] |
| 172 | [chemical structure] |
| 173 | [chemical structure] |
| 174 | [chemical structure] |
| 175 | [chemical structure] |
| 176 | [chemical structure] |
| 177 | [chemical structure] |
| 178 | [chemical structure] |
| 179 | [chemical structure] |
| 180 | [chemical structure] |
| 181 | [chemical structure] |
| 182 | [chemical structure] |
| 183 | [chemical structure] |
| 184 | [chemical structure] |
| 185 | [chemical structure] |

[0408] In some embodiments, an ionizable lipid is a compound of Formula (15):

[chemical structure]

or is a pharmaceutically acceptable salt thereof, wherein:
[0409] n* is an integer from 1 to 7;
[0410] R^{a} is hydrogen or hydroxyl;
[0411] R^{h} is hydrogen or C₁-C₆ alkyl;
[0412] R¹ is C₁-C₃₀ alkyl or R¹*;
[0413] R² is C₁-C₃₀ alkyl or R²*;
[0414] R¹* and R²* are independently selected from:

—(CH₂)_{q}C(O)O(CH₂)ᵣC(R⁸)(R⁹)(R¹⁰),

—(CH₂)_{q}OC(O)(CH₂)ᵣC(R⁸)(R⁹)(R¹⁰), and

—(CH₂)_{q}OC(O)O(CH₂)ᵣC(R⁸)(R⁹)(R¹⁰);
[0415] wherein:
   [0416] q is an integer from 0 to 12,
   [0417] r is an integer from 0 to 6, wherein at least one occurrence of r is not 0;
   [0418] R⁸ is H or R¹¹;
   [0419] R⁹, R¹⁰, and R¹¹ are each independently C₁-C₂₀ alkyl or C₂-C₂₀-alkenyl; and
[0420] wherein (i) R¹ is R¹*, (ii) R² is R²*, or (iii) R¹ is R¹* and R² is R²*;

[0421] In some embodiments of Formula (15), R^{a} is hydrogen and the ionizable lipid is of Formula (16):

[chemical structure]

or is a pharmaceutically acceptable salt thereof, wherein:
[0422] n* is an integer from 1 to 7.

[0423] In some embodiments of Formula (16), the ionizable lipid is of Formula (17):

[chemical structure]

or a pharmaceutically acceptable salt thereof, wherein:
[0424] n is an integer from 1 to 7;
[0425] q and q′ are each independently integers from 0 to 12;
[0426] r and r′ are each independently integers from 0 to 6, wherein at least one of r or r′ is not 0;
[0427] Z^{A} and Z^{B} are each independently selected from \hat{ }—C(O)O—, \hat{ }—OC(O), and —OC(O)O—; where \hat{ } denotes the attachment point to —(CH₂)_{q}— or —(CH₂)_{q′}—; and
[0428] R^{9A}, R^{9B}, R^{10A}, and R^{10B} are each independently C₁-C₂₀ alkyl or C₂-C₂₀ alkenyl.

[0429] In some embodiments of Formula (17), Z^{A} and Z^{B} are \hat{ }—C(O)O—, and the ionizable lipid is of Formula (17a-1)

[chemical structure]

[0430] In some embodiments of Formula (17), Z^{A} and Z^{B} are \hat{ }—OC(O)—, and the ionizable lipid is of Formula (17a-2)

[chemical structure]

[0431] In some embodiments of Formula (17), Z^{A} and Z^{B} are —O(C)(O)O—, and the ionizable lipid is represented by Formula (17a-3):

[chemical structure]

[0432] In some embodiments of Formula (15), R^{a} is hydroxyl and the ionizable lipid is of Formula (18):

[chemical structure]

or is a pharmaceutically acceptable salt thereof, wherein:
[0433] n* is an integer from 1 to 7;
[0434] R^{h} is hydrogen or C₁-C₆ alkyl;
[0435] R¹ is C₁-C₃₀ alkyl or R¹*;
[0436] R² is C₁-C₃₀ alkyl or R²*;
[0437] R¹* and R²* are independently selected from:

—(CH₂)_{q}C(O)O(CH₂)ᵣC(R⁸)(R⁹)(R¹⁰),

—(CH₂)_{q}OC(O)(CH₂)ᵣC(R⁸)(R⁹)(R¹⁰), and

—(CH₂)_{q}OC(O)O(CH₂)ᵣC(R⁸)(R⁹)(R¹⁰);
[0438] wherein:
[0439] q is an integer from 0 to 12,
[0440] r is an integer from 0 to 6, wherein at least one occurrence of r is not 0;
[0441] R⁸ is hydrogen or R¹¹;
[0442] R⁹, R¹⁰, and R¹¹ are each independently C₁-C₂₀ alkyl or C₂-C₂₀-alkenyl;
[0443] wherein (i) R¹ is R¹*, (ii) R² is R²*, or (iii) R¹ is R¹* and R² is R²*; and
[0444] wherein, for (iii), (a) R¹* and R²* are different or (b) R⁹ and R¹⁰ have different numbers of carbon atoms for at least one of R¹* and R²*.

[0445] In some embodiments of Formula (18), the ionizable lipid of is of Formula (19):

[chemical structure]

[0446] or is a pharmaceutically acceptable salt thereof, wherein:
   [0447] n is an integer from 1 to 7;
   [0448] q and q′ are each independently integers from 0 to 12;
   [0449] r and r′ are each independently integers from 0 to 6, wherein at least one of r
   [0450] or r′ is not 0;
   [0451] Z^{A} and Z^{B} are each independently selected from \hat{ }—C(O)O—, \hat{ }—OC(O), and —OC(O)O—; where \hat{ } denotes the attachment point to —(CH₂)_{q}— or —(CH₂)_{q′}; —and
   [0452] R^{9A}, R^{9B}, R^{10A}, and R^{10B} are each independently C₁-C₂₀ alkyl or C₂-C₂₀ alkenyl.

[0453] In some embodiments of Formula (19), Z^{A} and Z^{B} are \hat{ }—C(O)O—, and the ionizable lipid is of Formula (19a-1):

[chemical structure]

[0454] In some embodiments of Formula (19), Z^{A} and Z^{B} are \hat{ }—OC(O)—, and the ionizable lipid is of Formula (19a-2):

[chemical structure]

[0455] In some embodiments of Formula (19), Z^{A} and Z^{B} are —O(C)(O)O—, and the ionizable lipid is represented by Formula (19a-3):

[chemical structure]

[0456] In some embodiments of Formula (15), R¹ is C₁-C₃₀ alkyl, and the ionizable lipid is of Formula (20):

[chemical structure]

or is a pharmaceutically acceptable salt thereof, wherein:
[0457] Z^{A} is selected from \hat{ }—C(O)O—, \hat{ }—OC(O)—, and —OC(O)O—; where \hat{ } denotes the attachment point to —(CH₂)_{q}—;
[0458] R^{9A} and R^{10A} are each independently C₁-C₂₀ alkyl or C₂-C₂₀ alkenyl;
[0459] n is an integer from 1 to 7;
[0460] q is an integer from 0 to 12; and
[0461] r is an integer from 1 to 6.

[0462] In some embodiments of Formula (20), Z^{A} is \hat{ }—C(O)O—, and the ionizable lipid is of Formula (20a-1):

[chemical structure]

[0463] In some embodiments of Formula (20), Z^{A} is \hat{ }—OC(O)—, and the ionizable lipid is of Formula (20a-2):

[chemical structure]

[0464] In some embodiments of Formula (20), Z^{A} is —OC(O)O—, and the ionizable lipid is of Formula (20a-3):

[chemical structure]

[0465] In some embodiments of Formula (15), R² is C₁-C₃₀ alkyl, and the ionizable lipid is of Formula (21):

[chemical structure]

or is a pharmaceutically acceptable salt thereof, wherein:
[0466] Z^{B} is selected from \hat{ }—C(O)O—, \hat{ }—OC(O)—, and —OC(O)O—; where \hat{ } denotes the attachment point to —(CH₂)_{q′}—;
[0467] R^{9B} and R^{10B} are each independently C₁-C₂₀ alkyl or C₂-C₂₀ alkenyl;
[0468] n is an integer from 1 to 7;
[0469] q′ is an integer from 0 to 12; and
[0470] r′ is an integer from 1 to 6.

[0471] In some embodiments of Formula (21), Z^{B} is \hat{ }—C(O)O—, and the ionizable lipid is of Formula (21a-1):

[chemical structure]

[0472] In some embodiments of Formula (21), Z^{B} is \hat{ }—OC(O)—, and the ionizable lipid is of Formula (21a-2):

[chemical structure]

[0473] In some embodiments of Formula (21), Z^{B} is —OC(O)O—, and the ionizable lipid is of Formula (21a-3):

[chemical structure]

[0474] In some embodiments, an ionizable lipid is selected from the table below:

| Ionizable | |
|---|---|
| lipid | |
| number | Structure |
| 1-a | [chemical structure] |
| 1-b | [chemical structure] |
| 1-c | [chemical structure] |
| 1-d | [chemical structure] |
| 1-e | [chemical structure] |
| 1-f | [chemical structure] |
| 1-g | [chemical structure] |
| 1-h | [chemical structure] |
| 1-i | [chemical structure] |
| 1-j | [chemical structure] |
| 1-k | [chemical structure] |
| 1-l | [chemical structure] |
| 1-m | [chemical structure] |
| 1-m | [chemical structure] |
| 1-n | [chemical structure] |
| 1-o | [chemical structure] |
| 1-p | [chemical structure] |
| 1-q | [chemical structure] |
| 1-r | [chemical structure] |
| 1-s | [chemical structure] |
| 1-t | [chemical structure] |
| 1-u | [chemical structure] |
| 1-v | [chemical structure] |
| 1-w | [chemical structure] |
| 1-x | [chemical structure] |
| 1-y | [chemical structure] |
| 1-z | [chemical structure] |
| 1-aa | [chemical structure] |
| 1-ab | [chemical structure] |
| 1-ac | [chemical structure] |
| 1-ad | [chemical structure] |
| 1-ae | [chemical structure] |
| 1-af | [chemical structure] |
| 1-ag | [chemical structure] |
| 1-ah | [chemical structure] |
| 1-ai | [chemical structure] |
| 1-aj | [chemical structure] |
| 1-ak | [chemical structure] |

[0475] In some embodiments, an ionizable lipid of the present disclosure is represented by Formula (22):

[chemical structure]

or is a pharmaceutically acceptable salt thereof, wherein:
[0476] R^{a} is hydrogen or hydroxyl;
[0477] R¹ is C₁-C₃₀ alkyl or R¹*;
[0478] R² is C₁-C₃₀ alkyl or R²*;
[0479] R¹* and R²* are independently selected from:

—(CH₂)_{q}C(O)O(CH₂)ᵣC(R⁴)(R⁵)(R⁶),

—(CH₂)_{q}OC(O)(CH₂)ᵣC(R⁴)(R⁵)(R⁶), and

—(CH₂)_{q}OC(O)O(CH₂)ᵣC(R⁴)(R⁵)(R⁶);
[0480] wherein:
   [0481] q is an integer from 0 to 12,
   [0482] r is an integer from 0 to 6, wherein at least one occurrence of r is not 0;
   [0483] R⁴ is hydrogen or R⁷;
   [0484] R⁵, R⁶, and R⁷ are each independently C₁-C₂₀ alkyl or C₂-C₂₀-alkenyl;
[0485] wherein (i) R¹ is R¹*, (ii) R² is R²*, or (iii) R¹ is R¹* and R² is R²*; and
[0486] R³ is L-R′, wherein L is linear or branched C₁-C₁₀ alkylene, and R′ is (i) mono- or bicyclic heterocyclyl or heteroaryl, such as imidazolyl, pyrazolyl, 1,2,4-triazolyl, or benzimidazolyl, each optionally substituted at one or more available carbon and nitrogen by C₁-C₆ alkyl, or (ii) R^{A}, R^{B}, or R^{C}, wherein
   [0487] R^{A} is selected from:

[chemical structure]

[chemical structure]

[chemical structure]

[chemical structure]

[chemical structure]

[0488] and
[0489] R^{C} is selected from:

[chemical structure]

[chemical structure]

[0490] with the proviso that the ionizable lipid is not:

[chemical structure]

[chemical structure]

[chemical structure]

[chemical structure]

[0491] In some embodiments of Formula (22), R³ is selected from:

[chemical structure]

[chemical structure]

[0492] In some embodiments of Formula (22), R¹ is R¹*, R² is R²*, and the ionizable lipid is of Formula (23):

[chemical structure]

[0493] wherein:
[0494] q and q′ are each independently integers from 0 to 12;
[0495] r and r′ are each independently integers from 0 to 6, wherein at least one of r or r′ is not 0;
[0496] Z^{A} and Z^{B} are each independently selected from —C(O)O—, \hat{ }—OC(O), and —OC(O)O—; where \hat{ } denotes the attachment point to —(CH₂)_{q}— or —(CH₂)_{q′}—; and
[0497] R^{5A}, R^{5B}, R^{6A}, and R^{6B} are each independently C₁-C₂₀ alkyl or C₂-C₂₀ alkenyl.

[0498] In some embodiments of Formula (23), Z^{A} and Z^{B} are \hat{ }—C(O)O—, and the ionizable lipid is of Formula (23a-1):

[chemical structure]

[0499] In some embodiments of Formula (23), Z^{A} and Z^{B} are \hat{ }—OC(O)—, and the ionizable lipid is of Formula (23a-2)

[chemical structure]

[0500] In some embodiments of Formula (23), Z^{A} and Z^{B} are —O(C)(O)O—, and the ionizable lipid is represented by Formula (23a-3):

[chemical structure]

[0501] In some embodiments of Formula (22), R² is C₁-C₃₀ alkyl, and the ionizable lipid is of Formula (25):

[chemical structure]

or is a pharmaceutically acceptable salt thereof, wherein:
[0502] Z^{B} is selected from \hat{ }—C(O)O—, \hat{ }—OC(O)—, and —OC(O)O—; where \hat{ } denotes the attachment point to —(CH₂)_{q′}—;
[0503] R^{5B} and R^{6B} are each independently C₁-C₂₀ alkyl or C₂-C₂₀ alkenyl;
[0504] q′ is an integer from 0 to 12; and
[0505] r′ is an integer from 1 to 6.

[0506] In some embodiments of Formula (25), Z^{B} is \hat{ }—C(O)O—, and the ionizable lipid is of Formula (25a-1):

[chemical structure]

[0507] In some embodiments of Formula (25), Z^{B} is \hat{ }—OC(O)—, and the ionizable lipid is of Formula (25a-2):

[chemical structure]

[0508] In some embodiments of Formula (25), Z^{B} is —OC(O)O—, and the ionizable lipid is of Formula (25a-3):

[chemical structure]

[0509] In some embodiments, an ionizable lipid is selected from the table below:

| Lipid | Structure |
|---|---|
| 100-a | [chemical structure] |
| 100-b | [chemical structure] |
| 100-c | [chemical structure] |
| 100-d | [chemical structure] |
| 100-e | [chemical structure] |
| | and |
| 100-f | [chemical structure] |

[0510] In some embodiments, an ionizable lipid is selected from the table below.

| Lipid | Structure |
|---|---|
| 1-al | [chemical structure] |
| 1-am | [chemical structure] |
| 1-an | [chemical structure] |
| 1-ao | [chemical structure] |
| 1-ap | [chemical structure] |
| 1-aq | [chemical structure] |
| 1-ar | [chemical structure] |
| 1-as | [chemical structure] |
| 1-at | [chemical structure] |
| 1-au | [chemical structure] |

[0511] In some embodiments, an ionizable lipid is described in US patent publication number 20190321489. In some embodiments, an ionizable lipid is described in international patent publication WO 2010/053572, incorporated herein by reference. In some embodiments, an ionizable lipid is C12-200, described at paragraph [00225] of WO 2010/053572.

[0512] Several ionizable lipids have been described in the literature, many of which are commercially available. In certain embodiments, such ionizable lipids are included in the transfer vehicles described herein. In some embodiments, the ionizable lipid N-[1-(2,3-dioleyloxy)propyl]-N,N,N-trimethylammonium chloride or “DOTMA” is used. (Felgner et al. Proc. Nat'l Acad. Sci. 84, 7413 (1987); U.S. Pat. No. 4,897,355). DOTMA can be formulated alone or can be combined with a neutral lipid, dioleoylphosphatidylethanolamine or “DOPE” or other cationic or non-cationic lipids into a lipid nanoparticle. Other suitable cationic lipids include, for example, ionizable cationic lipids as described in U.S. provisional patent application 61/617,468, filed Mar. 29, 2012 (incorporated herein by reference), such as, e.g., (15Z,18Z)—N,N-dimethyl-6-(9Z,12Z)-octadeca-9,12-dien-1-yl)tetracosa-15,18-dien-1-amine (HGT5000), (15Z,18Z)—N,N-dimethyl-6-((9Z,12Z)-octadeca-9,12-dien-1-yl)tetracosa-4,15,18-trien-1-amine (HGT5001), and (15Z,18Z)—N,N-dimethyl-6-((9Z,12Z)-octadeca-9,12-dien-1-yl)tetracosa-5,15,18-trien-1-amine (HGT5002), C12-200 (described in WO 2010/053572), 2-(2,2-di((9Z,12Z)-octadeca-9,12-dien-1-yl)-1,3-dioxolan-4-yl)-N,N-dimethylethanamine (DLinKC2-DMA)) (See, WO 2010/042877; Semple et al., Nature Biotech. 28:172-176 (2010)), 2-(2,2-di((9Z,2Z)-octadeca-9,12-dien-1-yl)-1,3-dioxolan-4-yl)-N,N-dimethylethanamine (DLin-KC2-DMA), (3S,10R,13R,17R)-10,13-dimethyl-17-((R)-6-methylheptan-2-yl)-2, 3, 4, 7, 8, 9, 10, 11, 12, 13, 14, 15, 16, 17-tetradecahydro-1H-cyclopenta[a]phenanthren-3-yl 3-(1H-imidazol-4-yl)propanoate (ICE), (15Z,18Z)—N,N-dimethyl-6-(9Z,12Z)-octadeca-9,12-dien-1-yl)tetracosa-15,18-dien-1-amine (HGT5000), (15Z,18Z)—N,N-dimethyl-6-((9Z,12Z)-octadeca-9,12-dien-1-yl)tetracosa-4,15,18-trien-1-amine (HGT5001), (15Z,18 Z)—N,N-dimethyl-6-((9Z,12Z)-octadeca-9,12-dien-1-yl)tetracosa-5,15,18-trien-1-amine (HGT5002), 5-carboxyspermylglycine-dioctadecylamide (DOGS), 2,3-dioleyloxy-N-[2(spermine-carboxamido)ethyl]-N,N-dimethyl-1-propanaminium (DOSPA) (Behr et al. Proc. Nat.'l Acad. Sci. 86, 6982 (1989); U.S. Pat. Nos. 5,171,678; 5,334,761), 1,2-Dioleoyl-3-Dimethylammonium-Propane (DODAP), 1,2-Dioleoyl-3-Trimethylammonium-Propane or (DOTAP). Contemplated ionizable lipids also include 1,2-distcaryloxy-N,N-dimethyl-3-aminopropane (DSDMA), 1,2-dioleyloxy-N,N-dimethyl-3-aminopropane (DODMA), 1,2-dilinoleyloxy-N,N-dimethyl-3-aminopropane (DLinDMA), 1,2-dilinolenyloxy-N,N-dimethyl-3-aminopropane (DLenDMA), N-dioleyl-N,N-dimethylammonium chloride (DODAC), N,N-distearyl-N,N-dimethylammonium bromide (DDAB), N-(1,2-dimyristyloxyprop-3-yl)-N,N-dimethyl-N-hydroxyethyl ammonium bromide (DMRIE), 3-dimethylamino-2-(cholest-5-en-3-beta-oxybutan-4-oxy)-1-(cis,cis-9,12-octadecadienoxy)propane (CLinDMA), 2-[5′-(cholest-5-en-3-beta-oxy)-3′-oxapentoxy)-3-dimethyl-1-(cis,cis-9′, 1-2′-octadecadienoxy)propane (CpLinDMA), N,N-dimethyl-3,4-dioleyloxybenzylamine (DMOBA), 1,2-N,N′-dioleylcarbamyl-3-dimethylaminopropane (DOcarbDAP), 2,3-Dilinoleoyloxy-N,N-dimethylpropylamine (DLinDAP), 1,2-N,N′-Dilinoleylcarbamyl-3-dimethylamninopropane (DLincarbDAP), 1,2-Dilinoleoylcarbamyl-3-dimethylaminopropane (DLinCDAP), 2,2-dilinoleyl-4-dimethylaminomethyl-[1,3]-dioxolane (DLin-K-DMA), 2,2-dilinoleyl-4-dimethylaminoethyl-[1,3]-dioxolane (DLin-K-XTC2-DMA) or GL67, or mixtures thereof. (Heyes, J., et al., J Controlled Release 107: 276-287 (2005); Morrissey, D V., et al., Nat. Biotechnol. 23(8): 1003-1007 (2005); PCT Publication WO2005/121348A1). The use of cholesterol-based ionizable lipids to formulate the transfer vehicles (e.g., lipid nanoparticles) is also contemplated by the present invention. Such cholesterol-based ionizable lipids can be used, either alone or in combination with other lipids. Suitable cholesterol-based ionizable lipids include, for example, DC-Cholesterol (N,N-dimethyl-N-ethylcarboxamidocholesterol), and 1,4-bis(3-N-oleylamino-propyl)piperazine (Gao, et al., Biochem. Biophys. Res. Comm. 179, 280 (1991); Wolf et al. BioTechniques 23, 139 (1997); U.S. Pat. No. 5,744,335).

[0513] Also contemplated are cationic lipids such as dialkylamino-based, imidazole-based, and guanidinium-based lipids. For example, also contemplated is the use of the ionizable lipid (3S,10R, 13R, 17R)-10,13-dimethyl-17-((R)-6-methylheptan-2-yl)-2, 3, 4, 7, 8, 9, 10, 11, 12, 13, 14, 15, 16, 17-tetradecahydro-1H-cyclopenta[a]phenanthren-3-yl 3-(1H-imidazol-4-yl)propanoate (ICE), as disclosed in International Application No. PCT/US2010/058457, incorporated herein by reference.

[0514] Also contemplated are ionizable lipids such as the dialkylamino-based, imidazole-based, and guanidinium-based lipids. For example, certain embodiments are directed to a composition comprising one or more imidazole-based ionizable lipids.

[0515] Without wishing to be bound by a particular theory, it is believed that the fusogenicity of the imidazole-based cationic lipid is related to the endosomal disruption which is facilitated by the imidazole group, which has a lower pKa relative to traditional ionizable lipids. The endosomal disruption in turn promotes osmotic swelling and the disruption of the liposomal membrane, followed by the transfection or intracellular release of the nucleic acid(s) contents loaded therein into the target cell.

[0516] The imidazole-based ionizable lipids are also characterized by their reduced toxicity relative to other ionizable lipids.

a. Amine Lipids

[0517] In certain embodiments, transfer vehicle compositions for the delivery of circular RNA comprise an amine lipid. In certain embodiments, an ionizable lipid is an amine lipid. In some embodiments, an amine lipid is described in international patent application PCT/US2018/053569.

[0518] In some embodiments, the amine lipid is Lipid E, which is (9Z, 12Z)-3-((4,4-bis(octyloxy)butanoyl)oxy)-2-((((3-(diethylamino)propoxy)carbonyl)oxy)methyl)propyl octadeca-9, 12-dienoate.

[0519] Lipid E can be depicted as:

[chemical structure]

[0520] Lipid E may be synthesized according to WO2015/095340 (e.g., pp. 84-86). In certain embodiments, the amine lipid is an equivalent to Lipid E.

[0521] In certain embodiments, an amine lipid is an analog of Lipid E. In certain embodiments, a Lipid E analog is an acetal analog of Lipid E. In particular transfer vehicle compositions, the acetal analog is a C4-C12 acetal analog. In some embodiments, the acetal analog is a C5-C12 acetal analog. In additional embodiments, the acetal analog is a C5-C10 acetal analog. In further embodiments, the acetal analog is chosen from a C4, C5, C6, C7, C9, C10, C11 and C12 acetal analog.

[0522] Amine lipids and other biodegradable lipids suitable for use in the transfer vehicles, e.g., lipid nanoparticles, described herein are biodegradable in vivo. The amine lipids described herein have low toxicity (e.g., are tolerated in animal models without adverse effect in amounts of greater than or equal to 10 mg/kg). In certain embodiments, transfer vehicles composing an amine lipid include those where at least 75% of the amine lipid is cleared from the plasma within 8, 10, 12, 24, or 48 hours, or 3, 4, 5, 6, 7, or 10 days.

[0523] Biodegradable lipids include, for example, the biodegradable lipids of WO2017/173054, WO2015/095340, and WO2014/136086.

[0524] Lipid clearance may be measured by methods known by persons of skill in the art. See, for example, Maier, M. A., et al. Biodegradable Lipids Enabling Rapidly Eliminated Lipid Nanoparticles for Systemic Delivery of RNAi Therapeutics. Mol. Ther. 2013, 21(8), 1570-78.

[0525] Transfer vehicle compositions comprising an amine lipid can lead to an increased clearance rate. In some embodiments, the clearance rate is a lipid clearance rate, for example the rate at which a lipid is cleared from the blood, serum, or plasma. In some embodiments, the clearance rate is an RNA clearance rate, for example the rate at which an circRNA is cleared from the blood, serum, or plasma. In some embodiments, the clearance rate is the rate at which transfer vehicles are cleared from the blood, serum, or plasma. In some embodiments, the clearance rate is the rate at which transfer vehicles are cleared from a tissue, such as liver tissue or spleen tissue. In certain embodiments, a high rate of clearance leads to a safety profile with no substantial adverse effects. The amine lipids and biodegradable lipids may reduce transfer vehicle accumulation in circulation and in tissues. In some embodiments, a reduction in transfer vehicle accumulation in circulation and in tissues leads to a safety profile with no substantial adverse effects.

[0526] Lipids may be ionizable depending upon the pH of the medium they are in. For example, in a slightly acidic medium, the lipid, such as an amine lipid, may be protonated and thus bear a positive charge. Conversely, in a slightly basic medium, such as, for example, blood, where pH is approximately 7.35, the lipid, such as an amine lipid, may not be protonated and thus bear no charge.

[0527] The ability of a lipid to bear a charge is related to its intrinsic pKa. In some embodiments, the amine lipids of the present disclosure may each, independently, have a pKa in the range of from about 5.1 to about 7.4. In some embodiments, the bioavailable lipids of the present disclosure may each, independently, have a pKa in the range of from about 5.1 to about 7.4. For example, the amine lipids of the present disclosure may each, independently, have a pKa in the range of from about 5.8 to about 6.5. Lipids with a pKa ranging from about 5.1 to about 7.4 are effective for delivery of cargo in vivo, e.g., to the liver. Further, it has been found that lipids with a pKa ranging from about 5.3 to about 6.4 are effective for delivery in vivo, e.g., into tumors. See, e.g., WO2014/136086.

b. Lipids Containing a Disulfide Bond

[0528] A lipid of the present invention may have an S—S(disulfide) bond. These lipid-like compounds are useful for delivery of pharmaceutical agents. They can be preliminarily screened for their efficacy in delivering pharmaceutical agents by an in vitro assay and then confirmed by animal experiments and clinic trials. Other methods will also be apparent to those of ordinary skill in the art.

[0529] The above described complexes can be prepared using procedures described in publications such as Wang et al., ACS Synthetic Biology, 1, 403-07 (2012). Generally, they are obtained by incubating a lipid-like compound and a pharmaceutical agent in a buffer such as a sodium acetate buffer or a phosphate buffered saline (“PBS”).

i. Hydrophilic Groups

[0530] In certain embodiments, the selected hydrophilic functional group or moiety may alter or otherwise impart properties to the compound or to the transfer vehicle of which such compound is a component (e.g., by improving the transfection efficiencies of a lipid nanoparticle of which the compound is a component). For example, the incorporation of guanidinium as a hydrophilic head-group in the compounds disclosed herein may promote the fusogenicity of such compounds (or of the transfer vehicle of which such compounds are a component) with the cell membrane of one or more target cells, thereby enhancing, for example, the transfection efficiencies of such compounds. It has been hypothesized that the nitrogen from the hydrophilic guanidinium moiety forms a six-membered ring transition state which grants stability to the interaction and thus allows for cellular uptake of encapsulated materials. (Wender, et al., Adv. Drug Del. Rev. (2008) 60: 452-472.) Similarly, the incorporation of one or more amino groups or moieties into the disclosed compounds (e.g., as a head-group) may further promote disruption of the endosomal/lysosomal membrane of the target cell by exploiting the fusogenicity of such amino groups. This is based not only on the pKa of the amino group of the composition, but also on the ability of the amino group to undergo a hexagonal phase transition and fuse with the target cell surface, i.e. the vesicle membrane. (Koltover, et al. Science (1998) 281: 78-81.) The result is believed to promote the disruption of the vesicle membrane and release of the lipid nanoparticle contents into the target cell.

[0531] Similarly, in certain embodiments the incorporation of, for example, imidazole as a hydrophilic head-group in the compounds disclosed herein may serve to promote endosomal or lysosomal release of, for example, contents that are encapsulated in a transfer vehicle (e.g., lipid nanoparticle) of the invention. Such enhanced release may be achieved by one or both of a proton-sponge mediated disruption mechanism and/or an enhanced fusogenicity mechanism. The proton-sponge mechanism is based on the ability of a compound, and in particular a functional moiety or group of the compound, to buffer the acidification of the endosome. This may be manipulated or otherwise controlled by the pKa of the compound or of one or more of the functional groups comprising such compound (e.g., imidazole). Accordingly, in certain embodiments the fusogenicity of, for example, the imidazole-based compounds disclosed herein (e.g., HGT4001 and HGT4004) are related to the endosomal disruption properties, which are facilitated by such imidazole groups, which have a lower pKa relative to other traditional ionizable lipids. Such endosomal disruption properties in turn promote osmotic swelling and the disruption of the liposomal membrane, followed by the transfection or intracellular release of the polynucleotide materials loaded or encapsulated therein into the target cell. This phenomenon can be applicable to a variety of compounds with desirable pKa profiles in addition to an imidazole moiety. Such embodiments also include multi-nitrogen based functionalities such as polyamines, polypeptide (histidine), and nitrogen-based dendritic structures.

### B. Stabilizing Lipids

[0532] A stabilizing lipid or surface stabilizing lipid may be used to enhance the structure of the LNP. A stabilizing lipid as contemplated herein may be a polyethylene glycol (PEG)-modified phospholipid. The use and inclusion of polyethylene glycol (PEG)-modified phospholipids and derivatized lipids such as derivatized ceramides (PEG-CER), including N-Octanoyl-Sphingosine-1-[Succinyl(Methoxy Polyethylene Glycol)-2000](C8 PEG-2000 ceramide) in the liposomal and pharmaceutical compositions described herein is contemplated, preferably in combination with one or more of the compounds and lipids disclosed herein. Contemplated PEG-modified lipids include, but are not limited to, a polyethylene glycol chain of up to 5 kDa in length covalently attached to a lipid with alkyl chain(s) of C6-C20 length. In some embodiments, the PEG-modified lipid employed in the compositions and methods of the invention is 1,2-dimyristoyl-sn-glycerol, methoxypolyethylene Glycol (2000 MW PEG) “DMG-PEG2000.” The addition of PEG-modified lipids to the lipid delivery vehicle may prevent complex aggregation and may also provide a means for increasing circulation lifetime and increasing the delivery of the lipid-polynucleotide composition to the target tissues, (Klibanov et al. (1990) FEBS Letters, 268 (1): 235-237), or they may be selected to rapidly exchange out of the formulation in vivo (see U.S. Pat. No. 5,885,613). Particularly useful exchangeable lipids are PEG-ceramides having shorter acyl chains (e.g., C14 or C18). The PEG-modified phospholipid and derivatized lipids of the present invention may comprise a molar ratio from about 0% to about 20%, about 0.5% to about 20%, about 1% to about 15%, about 4% to about 10%, or about 2% of the total lipid present in a liposomal lipid nanoparticle.

[0533] In an embodiment, a PEG-modified lipid is described in International Pat. Appl. No. PCT/US2019/015913, which is incorporated herein by reference in their entirety. In an embodiment, a transfer vehicle comprises one or more PEG-modified lipids.

[0534] Non-limiting examples of PEG-modified lipids include PEG-modified phosphatidylethanolamines and phosphatidic acids, PEG-ceramide conjugates (e.g., PEG-CerC14 or PEG-CerC20), PEG-modified dialkylamines and PEG-modified 1,2-diacyloxypropan-3-amines. In some further enbodiments, a PEG-modified lipid may be, e,g, PEG-c-DOMG, PEG-DMG, PEG-DLPE, PEG-DMPE, PEG-DPPC, or a PEG-DSPE.

[0535] In some still further embodiments, the PEG-modified lipid includes, but is not limited to 1,2-dimyristoyl-sn-glycerol methoxypolyethylene glycol (PEG-DMG), 1,2-distearoyl-sn-glycero-3-phosphoethanolamine-N-[amino(polyethylene glycol)](PEG-DSPE), PEG-disteryl glycerol (PEG-DSG), PEG-dipalmetoleyl, PEG-dioleyl, PEG-distearyl, PEG-diacylglycamide (PEG-DAG), PEG-dipalmitoyl phosphatidylethanolamine (PEG-DPPE), or PEG-1,2-dimyristyloxlpropyl-3-amine (PEG-c-DMA).

[0536] In various embodiments, a PEG-modified lipid may also be referred to as “PEGylated lipid” or “PEG-lipid.”

[0537] In one embodiment, the PEG-lipid is selected from the group consisting of a PEG-modified phosphatidylethanolamine, a PEG-modified phosphatidic acid, a PEG-modified ceramide, a PEG-modified dialkylamine, a PEG-modified diacylglycerol, a PEG-modified dialkylglycerol, and mixtures thereof.

[0538] In some embodiments, the lipid moiety of the PEG-lipids includes those having lengths of from about C14 to about C22, such as from about C14 to about C16. In some embodiments, a PEG moiety, for example a mPEG-NH₂, has a size of about 1000, about 2000, about 5000, about 10,000, about 15,000 or about 20,000 Daltons. In one embodiment, the PEG-lipid is PEG2k-DMG.

[0539] In one embodiment, the lipid nanoparticles described herein can comprise a lipid modified with a non-diffusible PEG. Non-limiting examples of non-diffusible PEGs include PEG-DSG and PEG-DSPE.

[0540] PEG-lipids are known in the art, such as those described in U.S. Pat. No. 8,158,601 and International Pat. Publ. No. WO2015/130584 A2, which are incorporated herein by reference in their entirety.

[0541] In various embodiments, lipids (e.g., PEG-lipids), described herein may be synthesized as described International Pat. Publ. No. PCT/US2016/000129, which is incorporated by reference in its entirety.

[0542] The lipid component of a lipid nanoparticle composition may include one or more molecules comprising polyethylene glycol, such as PEG or PEG-modified lipids. Such species may be alternately referred to as PEGylated lipids. A PEG lipid is a lipid modified with polyethylene glycol. A PEG lipid may be selected from the non-limiting group including PEG-modified phosphatidylethanolamines, PEG-modified phosphatidic acids, PEG-modified ceramides, PEG-modified dialkylamines, PEG-modified diacylglycerols, PEG-modified dialkylglycerols, and mixtures thereof. For example, a PEG lipid may be PEG-c-DOMG, PEG-DMG, PEG-DLPE, PEG-DMPE, PEG-DPPC, or a PEG-DSPE lipid.

### C. Helper Lipids

[0543] In some embodiments, the transfer vehicle (e.g., LNP) described herein comprises one or more non-cationic helper lipids. In some embodiments, the helper lipid is a phospholipid. In some embodiments, the helper lipid is a phospholipid substitute or replacement. In some embodiments, the phospholipid or phospholipid substitute can be, for example, one or more saturated or (poly)unsaturated phospholipids, or phospholipid substitutes, or a combination thereof. In general, phospholipids comprise a phospholipid moiety and one or more fatty acid moieties.

[0544] A phospholipid moiety can be selected, for example, from the non-limiting group consisting of phosphatidyl choline, phosphatidyl ethanolamine, phosphatidyl glycerol, phosphatidyl serine, phosphatidic acid, 2-lysophosphatidyl choline, and a sphingomyelin.

[0545] A fatty acid moiety can be selected, for example, from the non-limiting group consisting of lauric acid, myristic acid, myristoleic acid, palmitic acid, palmitoleic acid, stearic acid, oleic acid, linoleic acid, alpha-linolenic acid, erucic acid, phytanoic acid, arachidic acid, arachidonic acid, eicosapentaenoic acid, behenic acid, docosapentaenoic acid, and docosahexaenoic acid.

[0546] Phospholipids include, but are not limited to, glycerophospholipids such as phosphatidylcholines, phosphatidylethanolamines, phosphatidylserines, phosphatidylinositols, phosphatidy glycerols, and phosphatidic acids. Phospholipids also include phosphosphingolipid, such as sphingomyelin.

[0547] In some embodiments, the helper lipid is a 1,2-distearoyl-177-glycero-3-phosphocholine (DSPC) analog, a DSPC substitute, oleic acid, or an oleic acid analog.

[0548] In some embodiments, a helper lipid is a non-phosphatidyl choline (PC) zwitterionic lipid, a DSPC analog, oleic acid, an oleic acid analog, or a DSPC substitute.

[0549] In some embodiments, a helper lipid is described in PCT/US2018/053569. Helper lipids suitable for use in a lipid composition of the disclosure include, for example, a variety of neutral, uncharged or zwitterionic lipids. Such helper lipids are preferably used in combination with one or more of the compounds and lipids disclosed herein. Examples of helper lipids include, but are not limited to, 5-heptadecylbenzene-1,3-diol (resorcinol), dipalmitoylphosphatidylcholine (DPPC), distearoylphosphatidylcholine (DSPC), pohsphocholine (DOPC), dimyristoylphosphatidylcholine (DMPC), phosphatidylcholine (PLPC), 1,2-distearoylsn-glycero-3-phosphocholine (DAPC), phosphatidylethanolamine (PE), egg phosphatidylcholine (EPC), dilauryloylphosphatidylcholine (DLPC), dimyristoylphosphatidylcholine (DMPC), 1-myristoyl-2-palmitoyl phosphatidylcholine (MPPC), 1-paimitoyl-2-myristoyl phosphatidylcholine (PMPC), 1-palmitoyl-2-stearoyl phosphatidylcholine (PSPC), 1,2-diarachidoyl-sn-glycero-3-phosphocholine (DBPC), 1-stearoyl-2-palmitoyl phosphatidylcholine (SPPC), 1,2-dieicosenoyl-sn-glycero-3-phosphocholine (DEPC), paimitoyioieoyl phosphatidylcholine (POPC), lysophosphatidyl choline, dioleoyl phosphatidylethanol amine (DOPE) dilinoleoylphosphatidylcholine distearoylphosphatidylethanolamine (DSPE), dimyristoyl phosphatidylethanolamine (DMPE), dipalmitoyl phosphatidylethanolamine (DPPE), palmitoyloleoyl phosphatidylethanolamine (POPE), lysophosphatidylethanolamine and combinations thereof. In one embodiment, the helper lipid may be distearoylphosphatidylcholine (DSPC) or dimyristoyl phosphatidyl ethanolamine (DMPE). In another embodiment, the helper lipid may be distearoylphosphatidylcholine (DSPC). Helper lipids function to stabilize and improve processing of the transfer vehicles. Such helper lipids are preferably used in combination with other excipients, for example, one or more of the ionizable lipids disclosed herein. In some embodiments, when used in combination with an ionizable lipid, the helper lipid may comprise a molar ratio of 5% to about 90%, or about 10% to about 70% of the total lipid present in the lipid nanoparticle.

### D. Structural Lipids

[0550] The transfer vehicles described herein comprise one or more structural lipids. Incorporation of structural lipids in the lipid nanoparticle may help mitigate aggregation of other lipids in the particle. Structural lipids can include, but are not limited to, cholesterol, fecosterol, ergosterol, bassicasterol, tomatidine, tomatine, ursolic, alpha-tocopherol, and mixtures thereof. In certain embodiments, the structural lipid is cholesterol. In certain embodiments, the structural lipid includes cholesterol and a corticosteroid (such as, for example, prednisolone, dexamethasone, prednisone, and hydrocortisone), or a combination thereof.

[0551] In some embodiments, the structural lipid is a sterol. In certain embodiments, the structural lipid is a steroid. In certain embodiments, the structural lipid is cholesterol. In certain embodiments, the structural lipid is an analog of cholesterol. In certain embodiments, the structural lipid is alpha-tocopherol.

[0552] The transfer vehicles described herein comprise one or more structural lipids. Incorporation of structural lipids in a transfer vehicle, e.g., a lipid nanoparticle, may help mitigate aggregation of other lipids in the particle. In certain embodiments, the structural lipid includes cholesterol and a corticosteroid (such as, for example, prednisolone, dexamethasone, prednisone, and hydrocortisone), or a combination thereof.

[0553] In some embodiments, the structural lipid is a sterol. Structural lipids can include, but are not limited to, sterols (e.g., phytosterols or zoosterols).

[0554] In certain embodiments, the structural lipid is a steroid. For example, sterols can include, but are not limited to, cholesterol, β-sitosterol, fecosterol, ergosterol, sitosterol, campesterol, stigmasterol, brassicasterol, ergosterol, tomatidine, tomatine, ursolic acid, or alpha-tocopherol.

[0555] In some embodiments, a transfer vehicle includes an effective amount of an immune cell delivery potentiating lipid, e.g., a cholesterol analog or an amino lipid or combination thereof, that, when present in a transfer vehicle, e.g., an lipid nanoparticle, may function by enhancing cellular association and/or uptake, internalization, intracellular trafficking and/or processing, and/or endosomal escape and/or may enhance recognition by and/or binding to immune cells, relative to a transfer vehicle lacking the immune cell delivery potentiating lipid. Accordingly, while not intending to be bound by any particular mechanism or theory, in one embodiment, a structural lipid or other immune cell delivery potentiating lipid of the disclosure binds to C1q or promotes the binding of a transfer vehicle comprising such lipid to C1q. Thus, for in vitro use of the transfer vehicles of the disclosure for delivery of a nucleic acid molecule to an immune cell, culture conditions that include C1q are used (e.g., use of culture media that includes serum or addition of exogenous C1q to serum-free media). For in vivo use of the transfer vehicles of the disclosure, the requirement for C1q is supplied by endogenous C1q.

[0556] In certain embodiments, the structural lipid is cholesterol. In certain embodiments, the structural lipid is an analog of cholesterol.

### E. Lipid Nanoparticle (LNP) Formulations

[0557] In various embodiments, lipid nanoparticles (LNPs) may be used as a transfer vehicle to deliver a disclosed circular RNA (e.g., to one or more target cells).

[0558] The formation of a lipid nanoparticle (LNP) described herein may be accomplished by any methods known in the art. For example, as described in U.S. Pat. Pub. No. US2012/0178702 A1, which is incorporated herein by reference in its entirety. Non-limiting examples of lipid nanoparticle compositions and methods of making them are described, for example, in Semple et al. (2010) Nat. Biotechnol. 28:172-176; Jayarama et al. (2012), Angew. Chem. Int. Ed., 51:8529-8533; and Maier et al. (2013) Molecular Therapy 21, 1570-1578 (the contents of each of which are incorporated herein by reference in their entirety).

[0559] In one embodiment, the LNP formulation may be prepared by, e.g., the methods described in International Pat. Pub. No. WO 2011/127255 or WO 2008/103276, the contents of each of which are herein incorporated by reference in their entirety.

[0560] In one embodiment, LNP formulations described herein may comprise a polycationic composition. As a non-limiting example, the polycationic composition may be a composition selected from Formulae 1-60 of U.S. Pat. Pub. No. US2005/0222064 A1, the content of which is herein incorporated by reference in its entirety.

[0561] In one embodiment, the lipid nanoparticle may be formulated by the methods described in U.S. Pat. Pub. No. US2013/0156845 A1, and International Pat. Pub. No. WO2013/093648 A2 or WO2012/024526 A2, each of which is herein incorporated by reference in its entirety.

[0562] In one embodiment, the lipid nanoparticles described herein may be made in a sterile environment by the system and/or methods described in U.S. Pat. Pub. No. US2013/0164400 A1, which is incorporated herein by reference in its entirety.

[0563] In one embodiment, the LNP formulation may be formulated in a nanoparticle such as a nucleic acid-lipid particle described in U.S. Pat. No. 8,492,359, which is incorporated herein by reference in its entirety.

[0564] A nanoparticle composition may optionally comprise one or more coatings. For example, a nanoparticle composition may be formulated in a capsule, film, or tablet having a coating. A capsule, film, or tablet including a composition described herein may have any useful size, tensile strength, hardness, or density.

[0565] In some embodiments, the lipid nanoparticles described herein may be synthesized using methods comprising microfluidic mixers. Exemplary microfluidic mixers may include, but are not limited to, a slit interdigital micromixer including, but not limited to, those manufactured by Precision Nanosystems (Vancouver, BC, Canada), Microinnova (Allerheiligen bei Wildon, Austria) and/or a staggered herringbone micromixer (SHM) (Zhigaltsev, I. V. et al. (2012) Langmuir. 28:3633-40; Belliveau, N. M. et al. Mol. Ther. Nucleic. Acids. (2012) 1:e37; Chen, D. et al. J. Am. Chem. Soc. (2012) 134(16):6948-51; each of which is herein incorporated by reference in its entirety).

[0566] In some embodiments, methods of LNP generation comprising SHM, further comprise the mixing of at least two input streams wherein mixing occurs by microstructure-induced chaotic advection (MICA). According to this method, fluid streams flow through channels present in a herringbone pattern causing rotational flow and folding the fluids around each other. This method may also comprise a surface for fluid mixing wherein the surface changes orientations during fluid cycling. Methods of generating LNPs using SHM include those disclosed in U.S. Pat. Pub. Nos. US2004/0262223 A1 and US2012/0276209 A1, each of which is incorporated herein by reference in their entirety.

[0567] In one embodiment, the lipid nanoparticles may be formulated using a micromixer such as, but not limited to, a Slit Interdigital Microstructured Mixer (SIMM-V2) or a Standard Slit Interdigital Micro Mixer (SSIMM) or Caterpillar (CPMM) or Impinging-jet (IJMM) from the Institut fur Mikrotechnik Mainz GmbH, Mainz Germany). In one embodiment, the lipid nanoparticles are created using microfluidic technology (see, Whitesides (2006) Nature. 442: 368-373; and Abraham et al. (2002) Science. 295: 647-651; each of which is herein incorporated by reference in its entirety). As a non-limiting example, controlled microfluidic formulation includes a passive method for mixing streams of steady pressure-driven flows in micro channels at a low Reynolds number (see, e.g., Abraham et al. (2002) Science. 295: 647651; which is herein incorporated by reference in its entirety).

[0568] In one embodiment, the circRNA of the present invention may be formulated in lipid nanoparticles created using a micromixer chip such as, but not limited to, those from Harvard Apparatus (Holliston, MA), Dolomite Microfluidics (Royston, UK), or Precision Nanosystems (Van Couver, BC, Canada). A micromixer chip can be used for rapid mixing of two or more fluid streams with a split and recombine mechanism.

[0569] In some embodiments, the LNP of the present disclosure comprises a molar ratio of between about 40% and about 60% ionizable lipid, a molar ratio of between about 3.5% and about 14% helper lipid, a molar ratio of between about 28% and about 50% structural lipid, and a molar ratio of between about 0.5% and about 5% PEG-lipid, inclusive of all endpoints. In some embodiments, the total molar percentage of the ionizable lipid, the helper lipid, the structural lipid, and the PEG-lipid is 100% in the LNP.

[0570] In some embodiments, the molar ratio of the ionizable lipid in the LNP is from about 40 to about 60% of the total lipid present in the LNP. In some embodiments, the molar ratio of the ionizable lipid in the LNP is about 40%, about 41%, about 42%, about 43%, about 44%, about 45%, about 46%, about 47%, about 48%, about 49%, about 50%, about 51%, about 52%, about 53%, about 54%, about 55%, about 56%, about 57%, about 58%, about 59%, or about 60% of the total lipid present in the LNP. In some embodiments, the ionizable lipid is represented by Formula (7). In some embodiments, the ionizable lipid is represented by Formula (8). All values are inclusive of all endpoints.

[0571] In some embodiments, the molar ratio of the helper lipid in the LNP is from about 3.5% to about 14% of the total lipid present in the LNP. In some embodiments, the molar ratio of the helper lipid in the LNP is about 3, about 4%, about 5%, about 6%, about 7%, about 8%, about 9%, about 10%, about 11%, about 12%, about 13%, or about 14% of the total lipid present in the LNP. In some embodiments, the helper lipid is DSPC. In some embodiments, the helper lipid is DOPE. All values are inclusive of all endpoints.

[0572] In some embodiments, the molar ratio of the structural lipid in the LNP is from about 28% to about 50% of the total lipid present in the LNP. In some embodiments, the molar ratio of the structural lipid in the LNP is about 28%, about 29%, about 30%, about 31%, about 32%, about 33%, about 34%, about 35%, about 36%, about 37%, about 38%, about 39%, about 40%, about 41%, about 42%, about 43%, about 44%, about 45%, about 46%, about 47%, about 48%, about 49%, or about 50% of the total lipid present in the LNP. In some embodiments, the structural lipid is cholesterol. All values are inclusive of all endpoints.

[0573] In some embodiments, the molar ratio of the PEG-lipid in the LNP is from about 0.5% to about 5% of the total lipid present in the LNP. In some embodiments, the molar ratio of the PEG-lipid in the LNP is about 0.5%, about 0.6%, about 0.7%, about 0.8%, about 0.9%, about 1.0%, about 1.1%, about 1.2%, about 1.3%, about 1.4%, about 1.5%, about 1.6%, about 1.7%, about 1.8%, about 1.9%, about 2.0%, about 2.1%, about 2.2%, about 2.3%, about 2.4%, about 2.5%, about 2.6%, about 2.7%, about 2.8%, about 2.9%, about 3.0%, about 3.1%, about 3.2%, about 3.3%, 3.4%, about 3.5%, about 4.0%, about 4.5%, or about 5% of the total lipid present in the LNP. In some embodiments, the PEG-lipid is DSPE-PEG(2000). In some embodiments, the PEG-lipid is DMG-PEG(2000). All values are inclusive of all endpoints.

[0574] In some embodiments, the molar ratio of ionizable lipid:helper lipid: structural lipid:PEG-lipid in the LNP is about 45:9:44:2. In some embodiments, the molar ratio of ionizable lipid:helper lipid:structural lipid:PEG-lipid in the LNP is about 50:10:38.5:1.5. In some embodiments, the molar ratio of ionizable lipid:helper lipid:structural lipid:PEG-lipid in the LNP is about 41:12:45:2. In some embodiments, the molar ratio of ionizable lipid:helper lipid:structural lipid:PEG-lipid in the LNP is about 62:4:33:1. In some embodiments, the molar ratio of ionizable lipid:helper lipid:structural lipid:PEG-lipid in the LNP is about 53:5:41:1. In some embodiments, the molar ratio of each of the ionizable lipid, helper lipid, structural lipid, and PEG-lipid is within 10%, 9%, 8%, 7%, 6%, 5%, 4%, 3%, 2%, 1%, 0.9%, 0.8%, 0.7%, 0.6%, 0.5%, 0.4%, 0.3%, 0.2%, 0.1%, 0.09%, 0.08%, 0.07%, 0.06%, 0.05%, 0.04%, 0.03%, 0.02%, or 0.01% of the stated value.

[0575] In one embodiment, the lipid nanoparticles may have a diameter from about 10 to about 100 nm such as, but not limited to, about 10 to about 20 nm, about 10 to about 30 nm, about 10 to about 40 nm, about 10 to about 50 nm, about 10 to about 60 nm, about 10 to about 70 nm, about 10 to about 80 nm, about 10 to about 90 nm, about 20 to about 30 nm, about 20 to about 40 nm, about 20 to about 50 nm, about 20 to about 60 nm, about 20 to about 70 nm, about 20 to about 80 nm, about 20 to about 90 nm, about 20 to about 100 nm, about 30 to about 40 nm, about 30 to about 50 nm, about 30 to about 60 nm, about 30 to about 70 nm, about 30 to about 80 nm, about 30 to about 90 nm, about 30 to about 100 nm, about 40 to about 50 nm, about 40 to about 60 nm, about 40 to about 70 nm, about 40 to about 80 nm, about 40 to about 90 nm, about 40 to about 100 nm, about 50 to about 60 nm, about 50 to about 70 nm about 50 to about 80 nm, about 50 to about 90 nm, about 50 to about 100 nm, about 60 to about 70 nm, about 60 to about 80 nm, about 60 to about 90 nm, about 60 to about 100 nm, about 70 to about 80 nm, about 70 to about 90 nm, about 70 to about 100 nm, about 80 to about 90 nm, about 80 to about 100 nm and/or about 90 to about 100 nm. In one embodiment, the lipid nanoparticles may have a diameter from about 10 to 500 nm. In one embodiment, the lipid nanoparticle may have a diameter greater than 100 nm, greater than 150 nm, greater than 200 nm, greater than 250 nm, greater than 300 nm, greater than 350 nm, greater than 400 nm, greater than 450 nm, greater than 500 nm, greater than 550 nm, greater than 600 nm, greater than 650 nm, greater than 700 nm, greater than 750 nm, greater than 800 nm, greater than 850 nm, greater than 900 nm, greater than 950 nm or greater than 1000 nm. Each possibility represents a separate embodiment of the present invention.

[0576] In some embodiments, a nanoparticle (e.g., a lipid nanoparticle) has a mean diameter of 10-500 nm, 20-400 nm, 30-300 nm, or 40-200 nm. In some embodiments, a nanoparticle (e.g., a lipid nanoparticle) has a mean diameter of 50-150 nm, 50-200 nm, 80-100 nm, or 80-200 nm.

[0577] In some embodiments, the lipid nanoparticles described herein can have a diameter from below 0.1 μm to up to 1 mm such as, but not limited to, less than 0.1 μm, less than 1.0 μm, less than 5 μm, less than 10 μm, less than 15 μm, less than 20 μm, less than 25 μm, less than 30 μm, less than 35 μm, less than 40 μm, less than 50 μm, less than 55 μm, less than 60 μm, less than 65 μm, less than 70 μm, less than 75 μm, less than 80 μm, less than 85 μm, less than 90 μm, less than 95 μm, less than 100 μm, less than 125 μm, less than 150 μm, less than 175 μm, less than 200 μm, less than 225 μm, less than 250 μm, less than 275 μm, less than 300 μm, less than 325 μm, less than 350 μm, less than 375 μm, less than 400 μm, less than 425 μm, less than 450 μm, less than 475 μm, less than 500 μm, less than 525 μm, less than 550 μm, less than 575 μm, less than 600 μm, less than 625 μm, less than 650 μm, less than 675 μm, less than 700 μm, less than 725 μm, less than 750 μm, less than 775 μm, less than 800 μm, less than 825 μm, less than 850 μm, less than 875 μm, less than 900 μm, less than 925 μm, less than 950 μm, less than 975 μm.

[0578] In another embodiment, LNPs may have a diameter from about 1 nm to about 100 nm, from about 1 nm to about 10 nm, about 1 nm to about 20 nm, from about 1 nm to about 30 nm, from about 1 nm to about 40 nm, from about 1 nm to about 50 nm, from about 1 nm to about 60 nm, from about 1 nm to about 70 nm, from about 1 nm to about 80 nm, from about 1 nm to about 90 nm, from about 5 nm to about from 100 nm, from about 5 nm to about 10 nm, about 5 nm to about 20 nm, from about 5 nm to about 30 nm, from about 5 nm to about 40 nm, from about 5 nm to about 50 nm, from about 5 nm to about 60 nm, from about 5 nm to about 70 nm, from about 5 nm to about 80 nm, from about 5 nm to about 90 nm, about 10 to about 50 nM, from about 20 to about 50 nm, from about 30 to about 50 nm, from about 40 to about 50 nm, from about 20 to about 60 nm, from about 30 to about 60 nm, from about 40 to about 60 nm, from about 20 to about 70 nm, from about 30 to about 70 nm, from about 40 to about 70 nm, from about 50 to about 70 nm, from about 60 to about 70 nm, from about 20 to about 80 nm, from about 30 to about 80 nm, from about 40 to about 80 nm, from about 50 to about 80 nm, from about 60 to about 80 nm, from about 20 to about 90 nm, from about 30 to about 90 nm, from about 40 to about 90 nm, from about 50 to about 90 nm, from about 60 to about 90 nm and/or from about 70 to about 90 nm. Each possibility represents a separate embodiment of the present invention.

[0579] A nanoparticle composition may be relatively homogenous. A polydispersity index may be used to indicate the homogeneity of a nanoparticle composition, e.g., the particle size distribution of the nanoparticle compositions. A small (e.g., less than 0.3) polydispersity index generally indicates a narrow particle size distribution. A nanoparticle composition may have a polydispersity index from about 0 to about 0.25, such as 0.01, 0.02, 0.03, 0.04, 0.05, 0.06, 0.07, 0.08, 0.09, 0.10, 0.1 1, 0.12, 0.13, 0.14, 0.15, 0.16, 0.17, 0.18, 0.19, 0.20, 0.21, 0.22, 0.23, 0.24, or 0.25. In some embodiments, the polydispersity index of a nanoparticle composition may be from about 0.10 to about 0.20. Each possibility represents a separate embodiment of the present invention.

[0580] The zeta potential of a nanoparticle composition may be used to indicate the electrokinetic potential of the composition. For example, the zeta potential may describe the surface charge of a nanoparticle composition. Nanoparticle compositions with relatively low charges, positive or negative, are generally desirable, as more highly charged species may interact undesirably with cells, tissues, and other elements in the body. In some embodiments, the zeta potential of a nanoparticle composition may be from about −20 mV to about +20 mV, from about −20 mV to about +15 mV, from about −20 mV to about +10 mV, from about −20 mV to about +5 mV, from about −20 mV to about 0 mV, from about −20 mV to about −5 mV, from about −20 mV to about −10 mV, from about −20 mV to about −15 mV from about −20 mV to about +20 mV, from about −20 mV to about +15 mV, from about −20 mV to about +10 mV, from about −20 mV to about +5 mV, from about −20 mV to about 0 mV, from about 0 mV to about +20 mV, from about 0 mV to about +15 mV, from about 0 mV to about +10 mV, from about 0 mV to about +5 mV, from about +5 mV to about +20 mV, from about +5 mV to about +15 mV, or from about +5 mV to about +10 mV. Each possibility represents a separate embodiment of the present invention.

[0581] The efficiency of encapsulation of a therapeutic agent describes the amount of therapeutic agent that is encapsulated or otherwise associated with a nanoparticle composition after preparation, relative to the initial amount provided. The encapsulation efficiency is desirably high (e.g., close to 100%). The encapsulation efficiency may be measured, for example, by comparing the amount of therapeutic agent in a solution containing the nanoparticle composition before and after breaking up the nanoparticle composition with one or more organic solvents or detergents. Fluorescence may be used to measure the amount of free therapeutic agent (e.g., nucleic acids) in a solution. For the nanoparticle compositions described herein, the encapsulation efficiency of a therapeutic agent may be at least 50%, for example 50%, 55%, 60%, 65%, 70%, 75%, 80%, 85%, 90%, 91%, 92%, 93%, 94%, 95%, 96%, 97%, 98%, 99%, or 100%. In some embodiments, the encapsulation efficiency may be at least 80%. In certain embodiments, the encapsulation efficiency may be at least 90%. Each possibility represents a separate embodiment of the present invention. In some embodiments, the lipid nanoparticle has a polydispersity value of less than 0.4. In some embodiments, the lipid nanoparticle has a net neutral charge at a neutral pH. In some embodiments, the lipid nanoparticle has a mean diameter of 50-200 nm.

[0582] The properties of a lipid nanoparticle formulation may be influenced by factors including, but not limited to, the selection of the cationic lipid component, the degree of cationic lipid saturation, the selection of the non-cationic lipid component, the degree of noncationic lipid saturation, the selection of the structural lipid component, the nature of the PEGylation, ratio of all components and biophysical parameters such as size. As described herein, the purity of a PEG lipid component is also important to an LNP's properties and performance.

### F. Methods for Preparing Lipid Nanoparticles (LNP) Formulations

[0583] In one embodiment, a lipid nanoparticle formulation may be prepared by the methods described in International Publication Nos. WO2011127255 or WO2008103276, each of which is herein incorporated by reference in their entirety. In some embodiments, lipid nanoparticle formulations may be as described in International Publication No. WO2019131770, which is herein incorporated by reference in its entirety.

[0584] In some embodiments, circular RNA is formulated according to a process described in U.S. patent application Ser. No. 15/809,680. In some embodiments, the present invention provides a process of encapsulating circular RNA in transfer vehicles comprising the steps of forming lipids into pre-formed transfer vehicles (i.e. formed in the absence of RNA) and then combining the pre-formed transfer vehicles with RNA. In some embodiments, the novel formulation process results in an RNA formulation with higher potency (peptide or protein expression) and higher efficacy (improvement of a biologically relevant endpoint) both in vitro and in vivo with potentially better tolerability as compared to the same RNA formulation prepared without the step of preforming the lipid nanoparticles (e.g., combining the lipids directly with the RNA).

[0585] For certain cationic lipid nanoparticle formulations of RNA, in order to achieve high encapsulation of RNA, the RNA in buffer (e.g., citrate buffer) has to be heated. In those processes or methods, the heating is required to occur before the formulation process (i.e. heating the separate components) as heating post-formulation (post-formation of nanoparticles) does not increase the encapsulation efficiency of the RNA in the lipid nanoparticles. In contrast, in some embodiments of the novel processes of the present invention, the order of heating of RNA does not appear to affect the RNA encapsulation percentage. In some embodiments, no heating (i.e. maintaining at ambient temperature) of one or more of the solutions comprising the pre-formed lipid nanoparticles, the solution comprising the RNA and the mixed solution comprising the lipid nanoparticle encapsulated RNA is required to occur before or after the formulation process.

[0586] RNA may be provided in a solution to be mixed with a lipid solution such that the RNA may be encapsulated in lipid nanoparticles. A suitable RNA solution may be any aqueous solution containing RNA to be encapsulated at various concentrations. For example, a suitable RNA solution may contain an RNA at a concentration of or greater than about 0.01 mg/ml, 0.05 mg/ml, 0.06 mg/ml, 0.07 mg/ml, 0.08 mg/ml, 0.09 mg/ml, 0.1 mg/ml, 0.15 mg/ml, 0.2 mg/ml, 0.3 mg/ml, 0.4 mg/ml, 0.5 mg/ml, 0.6 mg/ml, 0.7 mg/ml, 0.8 mg/ml, 0.9 mg/ml, or 1.0 mg/ml. In some embodiments, a suitable RNA solution may contain an RNA at a concentration in a range from about 0.01-1.0 mg/ml, 0.01-0.9 mg/ml, 0.01-0.8 mg/ml, 0.01-0.7 mg/ml, 0.01-0.6 mg/ml, 0.01-0.5 mg/ml, 0.01-0.4 mg/ml, 0.01-0.3 mg/ml, 0.01-0.2 mg/ml, 0.01-0.1 mg/ml, 0.05-1.0 mg/ml, 0.05-0.9 mg/ml, 0.05-0.8 mg/ml, 0.05-0.7 mg/ml, 0.05-0.6 mg/ml, 0.05-0.5 mg/ml, 0.05-0.4 mg/ml, 0.05-0.3 mg/ml, 0.05-0.2 mg/ml, 0.05-0.1 mg/ml, 0.1-1.0 mg/ml, 0.2-0.9 mg/ml, 0.3-0.8 mg/ml, 0.4-0.7 mg/ml, or 0.5-0.6 mg/ml.

[0587] Typically, a suitable RNA solution may also contain a buffering agent and/or salt. Generally, buffering agents can include HEPES, Tris, ammonium sulfate, sodium bicarbonate, sodium citrate, sodium acetate, potassium phosphate or sodium phosphate. In some embodiments, suitable concentration of the buffering agent may be in a range from about 0.1 mM to 100 mM, 0.5 mM to 90 mM, 1.0 mM to 80 mM, 2 mM to 70 mM, 3 mM to 60 mM, 4 mM to 50 mM, 5 mM to 40 mM, 6 mM to 30 mM, 7 mM to 20 mM, 8 mM to 15 mM, or 9 to 12 mM.

[0588] Exemplary salts can include sodium chloride, magnesium chloride, and potassium chloride. In some embodiments, suitable concentration of salts in an RNA solution may be in a range from about 1 mM to 500 mM, 5 mM to 400 mM, 10 mM to 350 mM, 15 mM to 300 mM, 20 mM to 250 mM, 30 mM to 200 mM, 40 mM to 190 mM, 50 mM to 180 mM, 50 mM to 170 mM, 50 mM to 160 mM, 50 mM to 150 mM, or 50 mM to 100 mM.

[0589] In some embodiments, a suitable RNA solution may have a pH in a range from about 3.5-6.5, 3.5-6.0, 3.5-5.5, 3.5-5.0, 3.5-4.5, 4.0-5.5, 4.0-5.0, 4.0-4.9, 4.0-4.8, 4.0-4.7, 4.0-4.6, or 4.0-4.5.

[0590] Various methods may be used to prepare an RNA solution suitable for the present invention. In some embodiments, RNA may be directly dissolved in a buffer solution described herein. In some embodiments, an RNA solution may be generated by mixing an RNA stock solution with a buffer solution prior to mixing with a lipid solution for encapsulation. In some embodiments, an RNA solution may be generated by mixing an RNA stock solution with a buffer solution immediately before mixing with a lipid solution for encapsulation.

[0591] According to the present invention, a lipid solution contains a mixture of lipids suitable to form transfer vehicles for encapsulation of RNA. In some embodiments, a suitable lipid solution is ethanol based. For example, a suitable lipid solution may contain a mixture of desired lipids dissolved in pure ethanol (i.e. 100% ethanol). In another embodiment, a suitable lipid solution is isopropyl alcohol based. In another embodiment, a suitable lipid solution is dimethylsulfoxide-based. In another embodiment, a suitable lipid solution is a mixture of suitable solvents including, but not limited to, ethanol, isopropyl alcohol and dimethylsulfoxide.

[0592] A suitable lipid solution may contain a mixture of desired lipids at various concentrations. In some embodiments, a suitable lipid solution may contain a mixture of desired lipids at a total concentration in a range from about 0.1-100 mg/ml, 0.5-90 mg/ml, 1.0-80 mg/ml, 1.0-70 mg/ml, 1.0-60 mg/ml, 1.0-50 mg/ml, 1.0-40 mg/ml, 1.0-30 mg/ml, 1.0-20 mg/ml, 1.0-15 mg/ml, 1.0-10 mg/ml, 1.0-9 mg/ml, 1.0-8 mg/ml, 1.0-7 mg/ml, 1.0-6 mg/ml, or 1.0-5 mg/ml.

### G. Other Delivery Vehicles Known in the Art

[0593] In certain embodiments, other delivery vehicles that are known in the art may be used to transport the circular RNA (i.e., are transfer vehicles encompassed herein).

[0594] In some embodiments, liposomes or other lipid bilayer vesicles may be used as a component or as the whole transfer vehicle to facilitate or enhance the delivery and release of circular RAN to one or more target cells. Liposomes are usually characterized by having an interior space sequestered from an outer medium by a membrane of one or more bilayers forming a microscopic sack or vesicle. Bilayer membranes of liposomes are typically formed by lipids, i.e. amphiphilic molecules of synthetic or natural origin that comprise spatially separated hydrophobic or hydrophilic domains (Lasic, D, and Papahadjopoulos, D., eds. Medical Applications of Liposomes. Elsevier, Amsterdam, 1998).

[0595] In certain embodiments, the transfer vehicle for transporting the circular RNA comprises a dendrimer. Use of “dendrimer” describes the architectural motif of the transfer vehicle. In some embodiments, the dendrimer includes but is not limited to containing an interior core and one or more layers (i.e. generations) that extend or attach out from the interior core. In some of the embodiments, the generations may contain one or more branching points and an exterior surface of terminal groups that attach to the outermost generation. The branching points, in certain embodiments, may be mostly monodispersed and contain symmetric branching units built around the interior core. In some embodiments, the interior core. Synthesis of the dendrimer may comprise the divergent method, convergent growth, hypercore and branched monomer growth, double exponential growth, lego chemistry, click chemistry and other methods as available in the art (Mendes L. et al., Molecules. 2017. 22 (9): 1401 further describes these methods).

[0596] In certain embodiments, as described herein, the transfer vehicle for the circular RNA construct comprises a polymer nanoparticle. In some embodiments, the polymer nanoparticle includes nanocapsules and nanospheres. Nanocapsules, in some embodiments, are composed of an oily core surrounded by a polymeric shell. In some embodiments, the circular RNA is contained within the core and the polymeric shell controls the release of the circular RNA. On the other hand, nanospheres comprise a continuous polymeric network in which the circular RNA is retained or absorbed onto the surface. In some embodiments, cationic polymers are used to encapsulate the circular RNA due to the favorable electrostatic interaction of the cations to the negatively charged nucleic acids and cell membrane. The polymer nanoparticle may be prepared by various methods. In some embodiments, the polymer nanoparticle may be prepared by nanoprecipitation, emulsion techniques, solvent evaporation, solvent diffusion, reverse salting-out or other methods available in the art.

[0597] In certain embodiments, as described herein, the transfer vehicle for the circular RNA construct comprises a polymer-lipid hybrid nanoparticle (LPHNP). In some embodiments, the LPHNP comprises a polymer core enveloped within a lipid bilayer. In some embodiments, the polymer core encapsulates the circular RNA construct. In some embodiments, the LPHNP further comprises an outer lipid bilayer. In certain embodiments this outer lipid bilayer comprises a PEG-lipid, helper lipid, cholesterol or other molecule as known in the art to help with stability in a lipid-based nanoparticle. The lipid bilayer closest to the polymer core mitigates the loss of the entrapped circular RNA during LPHNP formation and protects from degradation of the polymer core by preventing diffusion of water from outside of the transfer vehicle into the polymer core (Mukherjee et al., In J. Nanomedicine. 2019; 14: 1937-1952).

[0598] In certain embodiments, the circular RNA can be transported using a peptide-based delivery mechanism. In some embodiments, the peptide-based delivery mechanism comprises a lipoprotein. Based on the size of the drug to be delivered, the lipoprotein may be either a low-density (LDL) or high-density lipoprotein (HDL). As seen in U.S. Pat. No. 8,734,853B2, high-density lipoproteins are capable of transporting a nucleic acid in vivo and in vitro. In particular embodiments, the lipid component includes cholesterol. In more particular embodiments, the lipid component includes a combination of cholesterol and cholesterol oleate.

[0599] In certain embodiments, the circular RNA construct can be transported using a carbohydrate carrier or a sugar-nanocapsule. In certain embodiments, the carbohydrate carrier comprises a sugar-decorated nanoparticle, peptide- and saccharide-conjugated dendrimer, nanoparticles based on polysaccharides, and other carbohydrate-based carriers available in the art. As described herein, the incorporation of carbohydrate molecules may be through synthetic means. In some embodiments, the carbohydrate carrier comprises polysaccharides. These polysaccharides may be made from the microbial cell wall of the target cell. For example, carbohydrate carriers comprised of mannan carbohydrates have been shown to successfully deliver mRNA (Son et al., Nano Lett. 2020. 20(3): 1499-1509).

[0600] In certain embodiments, as provided herein, the transfer vehicle for the circular RNA is a glyconanoparticle (GlycoNP). As known in the art, glyconanoparticles comprise a core comprising gold, iron oxide, semiconductor nanoparticles or a combination thereof. In some embodiments, the glyconanoparticle is functionalized using carbohydrates. In certain embodiments, the glyconanoparticle comprises a carbon nanotube or graphene. In one embodiment the glyconanoparticle comprises a polysaccharide-based GlycoNP (e.g., chitosan-based GlycoNP). In certain embodiments, the glyconanoparticle is a glycodendrimer.

[0601] In certain embodiments, as provided herein, the circular RNA is transferred through use of an exosome, a type of extracellular vesicle. Exosomes naturally are secreted by various types of cells and are used as a transport vesicle for various forms of cargo. During delivery exosomes can contain and protect specific mRNAs, regulatory microRNAs, lipids, and proteins (Luan et al., Acta Pharmacologica Sinica. 2017. 38:754-763). Naturally, exosomes may be 30 nm to 125 nm.

[0602] In some embodiments, the exosome may be made in part from an immune cell. As shown in Haney et al, use of immune cell derived exosomes are able to avoid mononuclear phagocytes (J Control Release. 2015. 207:18-30). In some embodiments, the exosome may be a dendritic cell, macrophage, T cell, B cell or derived from another immune cell. As seen in WO/2021/041473A1, various forms of RNAs of varying lengths may be transported through exosome delivery including messenger RNA (mRNA), microRNA (miRNA), long intergenic non-coding RNA (lincRNA), long non-coding RNA (lncRNA), non-coding RNA (ncRNA), non-messenger RNA (nmRNA), small RNA (sRNA), small non-messenger RNA (smnRNA), DNA damage response RNA (DD RNA), extracellular RNA (exRNA), small nuclear RNA (snRNA), small nucleolar RNA (snoRNA), and precursor messenger RNA (pre-mRNA).

[0603] In other embodiments, the transfer vehicle may comprise in whole or in part from a fusome. In some embodiments, the fusome is derived from an endoplasmic reticulum of a germline cyst. In certain embodiments, the germline cyst is from a Drosophila ovary.

[0604] In certain embodiments, the circular RNA construct may be transported using noncellular and instead be through mechanical delivery mechanisms. In some embodiments, this delivery method includes microneedles, electroporation, continuous pumps and/or gene guns.

[0605] In some embodiments, the transfer vehicle of the circular RNA construct is a solution or diluent comprising of a salt or a buffer.

[0606] Various circular RNA, circular RNA constructs, compositions comprising circular RNA, precursor RNA, lipids, and related methods are described, for example in WO2019236673, WO2020237227, WO2021113777, WO2021226597, WO2021189059, WO2021236855, WO2022261490, WO2023056033, and WO2023081526, each incorporated by reference in their entireties herein.

### 7. Combinations of Proteins and IRES

[0607] In certain embodiments, as provided herein, the payload encoded by the circular RNA polynucleotide may be optimized through use of a specific internal ribosome entry sites (IRES) within the translation initiation element (TIE). In some embodiments, IRES specificity within a circular RNA can significantly enhance expression of specific proteins encoded within the coding element.

### 8. Targeting

### A. Targeting Methods

[0608] The present invention also contemplates the discriminatory targeting of target cells and tissues by both passive and active targeting means. The phenomenon of passive targeting exploits the natural distributions patterns of a transfer vehicle in vivo without relying upon the use of additional excipients or means to enhance recognition of the transfer vehicle by target cells. For example, transfer vehicles which are subject to phagocytosis by the cells of the reticulo-endothelial system are likely to accumulate in the liver or spleen, and accordingly may provide a means to passively direct the delivery of the compositions to such target cells.

[0609] Alternatively, the present invention contemplates active targeting, which involves the use of targeting moieties that may be bound (either covalently or non-covalently) to the transfer vehicle to encourage localization of such transfer vehicle at certain target cells or target tissues. For example, targeting may be mediated by the inclusion of one or more endogenous targeting moieties in or on the transfer vehicle to encourage distribution to the target cells or tissues. Recognition of the targeting moiety by the target tissues actively facilitates tissue distribution and cellular uptake of the transfer vehicle and/or its contents in the target cells and tissues (e.g., the inclusion of an apolipoprotein-E targeting ligand in or on the transfer vehicle encourages recognition and binding of the transfer vehicle to endogenous low density lipoprotein receptors expressed by hepatocytes). As provided herein, the composition can comprise a moiety capable of enhancing affinity of the composition to the target cell. Targeting moieties may be linked to the outer bilayer of the lipid particle during formulation or post-formulation. These methods are well known in the art. In addition, some lipid particle formulations may employ fusogenic polymers such as PEAA, hemagluttinin, other lipopeptides (see U.S. patent application Ser. No. 08/835,281, and 60/083,294, which are incorporated herein by reference) and other features useful for in vivo and/or intracellular delivery. In other some embodiments, the compositions of the present invention demonstrate improved transfection efficacies, and/or demonstrate enhanced selectivity towards target cells or tissues of interest. Contemplated therefore are compositions which comprise one or more moieties (e.g., peptides, aptamers, oligonucleotides, a vitamin or other molecules) that are capable of enhancing the affinity of the compositions and their nucleic acid contents for the target cells or tissues. Suitable moieties may optionally be bound or linked to the surface of the transfer vehicle. In some embodiments, the targeting moiety may span the surface of a transfer vehicle or be encapsulated within the transfer vehicle. Suitable moieties and are selected based upon their physical, chemical or biological properties (e.g., selective affinity and/or recognition of target cell surface markers or features). Cell-specific target sites and their corresponding targeting ligand can vary widely. Suitable targeting moieties are selected such that the unique characteristics of a target cell are exploited, thus allowing the composition to discriminate between target and non-target cells. For example, compositions of the invention may include surface markers (e.g., apolipoprotein-B or apolipoprotein-E) that selectively enhance recognition of, or affinity to hepatocytes (e.g., by receptor-mediated recognition of and binding to such surface markers). As an example, the use of galactose as a targeting moiety would be expected to direct the compositions of the present invention to parenchymal hepatocytes, or alternatively the use of mannose containing sugar residues as a targeting ligand would be expected to direct the compositions of the present invention to liver endothelial cells (e.g., mannose containing sugar residues that may bind preferentially to the asialoglycoprotein receptor present in hepatocytes). (See Hillery A M, et al. “Drug Delivery and Targeting: For Pharmacists and Pharmaceutical Scientists” (2002) Taylor & Francis, Inc.) The presentation of such targeting moieties that have been conjugated to moieties present in the transfer vehicle (e.g., a lipid nanoparticle) therefore facilitate recognition and uptake of the compositions of the present invention in target cells and tissues. Examples of suitable targeting moieties include one or more peptides, proteins, aptamers, vitamins and oligonucleotides.

[0610] In particular embodiments, a transfer vehicle comprises a targeting moiety. In some embodiments, the targeting moiety mediates receptor-mediated endocytosis selectively into a specific population of cells. In some embodiments, the targeting moiety is capable of binding to a T cell antigen. In some embodiments, the targeting moiety is capable of binding to a NK, NKT, or macrophage antigen. In some embodiments, the targeting moiety is capable of binding to a protein selected from the group CD3, CD4, CD8, PD-1, 4-1BB, and CD2. In some embodiments, the targeting moiety is an single chain Fv (scFv) fragment, nanobody, peptide, peptide-based macrocycle, minibody, heavy chain variable region, light chain variable region or fragment thereof. In some embodiments, the targeting moiety is selected from T-cell receptor motif antibodies, T-cell α chain antibodies, T-cell R chain antibodies, T-cell γ chain antibodies, T-cell δ chain antibodies, CCR7 antibodies, CD3 antibodies, CD4 antibodies, CD5 antibodies, CD7 antibodies, CD8 antibodies, CD11b antibodies, CD11c antibodies, CD16 antibodies, CD19 antibodies, CD20 antibodies, CD21 antibodies, CD22 antibodies, CD25 antibodies, CD28 antibodies, CD34 antibodies, CD35 antibodies, CD40 antibodies, CD45RA antibodies, CD45RO antibodies, CD52 antibodies, CD56 antibodies, CD62L antibodies, CD68 antibodies, CD80 antibodies, CD95 antibodies, CD117 antibodies, CD127 antibodies, CD133 antibodies, CD137 (4-1BB) antibodies, CD163 antibodies, F4/80 antibodies, IL-4Rα antibodies, Sca-1 antibodies, CTLA-4 antibodies, GITR antibodies GARP antibodies, LAP antibodies, granzyme B antibodies, LFA-1 antibodies, transferrin receptor antibodies, and fragments thereof. In some embodiments, the targeting moiety is a small molecule binder of an ectoenzyme on lymphocytes. Small molecule binders of ectoenzymes include A2A inhibitors CD73 inhibitors, CD39 or adenosine receptors A2aR and A2bR. Potential small molecules include AB928.

[0611] In some embodiments, transfer vehicles are formulated and/or targeted as described in Shobaki N, Sato Y, Harashima H. Mixing lipids to manipulate the ionization status of lipid nanoparticles for specific tissue targeting. Int J Nanomedicine. 2018; 13:8395-8410. Published 2018 Dec. 10. In some embodiments, a transfer vehicle is made up of 3 lipid types. In some embodiments, a transfer vehicle is made up of 4 lipid types. In some embodiments, a transfer vehicle is made up of 5 lipid types. In some embodiments, a transfer vehicle is made up of 6 lipid types.

### B. Target Cells

[0612] Where it is desired to deliver a nucleic acid to an immune cell, the immune cell represents the target cell. In some embodiments, the compositions of the invention transfect the target cells on a discriminatory basis (i.e., do not transfect non-target cells). The compositions of the invention may also be prepared to preferentially target a variety of target cells, which include, but are not limited to, T cells, liver cells (e.g., hepatocytes), and muscle cells (e.g., myotubes), B cells, macrophages, and dendritic cells.

[0613] In some embodiments, the target cells are T cells, liver cells (e.g., hepatocytes), and muscle cells (e.g., myotubes). In some embodiments, the cells are primary cells (e.g., human primary cells). In some embodiments, the T cell is a CD8+ cytotoxic T cell, a CD4+ helper T cell (Th), a regulatory T (Treg) cell, a memory T cell, or an innate-like T cell. In some embodiments, the Th cell is a Th1 cell, a Th2 cell, a Th17 cell, a Th9 cell, a Tfh cell, or a Th22 cell. In some embodiments, the memory T cell is a central memory T cell (Tcm), an effector memory T cell (Tem), a tissue-resident memory T cell (Trm), or a virtual memory T cell. In some embodiments, the innate-like T cell is a natural killer T (NKT) cell, a mucosal-associated invariant T cell (MAIT), or a gamma delta T cell (γδ T cell). In some embodiments, the T cells are activated T cells (e.g., with an antigen-presenting cell (APC) or a CD3-stimulating agent and a CD28-stimulating agent). In some embodiments, activation is associated with production and release of cytokines, production of cytolytic enzymes, interaction with APCs, among others. In some embodiments, the T cells are not activated. In some embodiments, the target cells are deficient in a protein or enzyme of interest. For example, where it is desired to deliver a nucleic acid to a T cell, the T cell represents the target cell. In some embodiments, the compositions of the invention transfect the target cells on a discriminatory basis (i.e., do not transfect non-target cells).

[0614] In some embodiments, the target cells are deficient in a protein or enzyme of interest. For example, where it is desired to deliver a nucleic acid to a hepatocyte, the hepatocyte represents the target cell; where it is desired to deliver a nucleic acid to a T-cell, the T-cell represents the target cell. In some embodiments, the compositions of the invention transfect the target cells on a discriminatory basis (i.e., do not transfect non-target cells).

[0615] The compositions of the invention may also be prepared to preferentially target a variety of target cells, which include, but are not limited to, hepatocytes, epithelial cells, hematopoietic cells, epithelial cells, endothelial cells, lung cells, bone cells, stem cells, mesenchymal cells, neural cells (e.g., meninges, astrocytes, motor neurons, cells of the dorsal root ganglia and anterior horn motor neurons), photoreceptor cells (e.g., rods and cones), retinal pigmented epithelial cells, secretory cells, cardiac cells, adipocytes, vascular smooth muscle cells, cardiomyocytes, skeletal muscle cells, beta cells, pituitary cells, synovial lining cells, ovarian cells, testicular cells, fibroblasts, B cells, T cells, reticulocytes, leukocytes, granulocytes and tumor cells.

[0616] The compositions of the invention may be prepared to preferentially distribute to target cells such as in the heart, lungs, kidneys, liver, and spleen. In some embodiments, the compositions of the invention distribute into the cells of the liver or spleen to facilitate the delivery and the subsequent expression of the circRNA comprised therein by the cells of the liver (e.g., hepatocytes) or the cells of spleen (e.g., immune cells). The compositions of the invention may be prepared to preferentially distribute to target cells such as in the blood, muscle, thymus, liver, and spleen. In some embodiments, the compositions of the invention distribute into the cells of the blood, liver, or spleen to facilitate the delivery and the subsequent expression of the circRNA comprised therein by the cells of or the cells of blood or spleen (e.g., immune cells), muscle (e.g., myotubes) or the liver (e.g., hepatocytes).

[0617] The targeted cells may function as a biological “reservoir” or “depot” capable of producing, and systemically excreting a functional protein or enzyme. Accordingly, in one embodiment of the invention the transfer vehicle may target hepatocytes or immune cells and/or preferentially distribute to the cells of the liver or spleen upon delivery. In an embodiment, following transfection of the target hepatocytes or immune cells, the circRNA loaded in the vehicle are translated and a functional protein product is produced, excreted and systemically distributed. In other embodiments, cells other than hepatocytes (e.g., lung, spleen, heart, ocular, or cells of the central nervous system) can serve as a depot location for protein production. In one embodiment of the invention the transfer vehicle may target T cells, myotubes, and hepatocytes. In an embodiment, following transfection of the target T cells, hepatocytes, and myotubes, the circRNA loaded in the vehicle are translated and a functional protein product is produced, excreted and systemically distributed.

[0618] In one embodiment, the compositions of the invention facilitate a subject's endogenous production of one or more functional proteins and/or enzymes. In an embodiment of the present invention, the transfer vehicles comprise circRNA which encode a deficient protein or enzyme. Upon distribution of such compositions to the target tissues and the subsequent transfection of such target cells, the exogenous circRNA loaded into the transfer vehicle (e.g., a lipid nanoparticle) may be translated in vivo to produce a functional protein or enzyme encoded by the exogenously administered circRNA (e.g., a protein or enzyme in which the subject is deficient). Accordingly, the compositions of the present invention exploit a subject's ability to translate exogenously- or recombinantly-prepared circRNA to produce an endogenously-translated protein or enzyme, and thereby produce (and where applicable excrete) a functional protein or enzyme. The expressed or translated proteins or enzymes may also be characterized by the in vivo inclusion of native post-translational modifications which may often be absent in recombinantly-prepared proteins or enzymes, thereby further reducing the immunogenicity of the translated protein or enzyme.

[0619] The administration of circRNA encoding a deficient protein or enzyme avoids the need to deliver the nucleic acids to specific organelles within a target cell. Rather, upon transfection of a target cell and delivery of the nucleic acids to the cytoplasm of the target cell, the circRNA contents of a transfer vehicle may be translated and a functional protein or enzyme expressed.

[0620] In some embodiments, a circular RNA comprises one or more miRNA binding sites. In some embodiments, a circular RNA comprises one or more miRNA binding sites recognized by miRNA present in one or more non-target cells or non-target cell types (e.g., Kupffer cells or hepatic cells) and not present in one or more target cells or target cell types (e.g., hepatocytes or T cells). In some embodiments, a circular RNA comprises one or more miRNA binding sites recognized by miRNA present in an increased concentration in one or more non-target cells or non-target cell types (e.g., Kupffer cells or hepatic cells) compared to one or more target cells or target cell types (e.g., hepatocytes or T cells). miRNAs are thought to function by pairing with complementary sequences within RNA molecules, resulting in gene silencing.

[0621] In some embodiments, the compositions of the invention transfect or distribute to target cells on a discriminatory basis (i.e. do not transfect non-target cells). The compositions of the invention may also be prepared to preferentially target a variety of target cells, which include, but are not limited to, hepatocytes, epithelial cells, hematopoietic cells, epithelial cells, endothelial cells, lung cells, bone cells, stem cells, mesenchymal cells, neural cells (e.g., meninges, astrocytes, motor neurons, cells of the dorsal root ganglia and anterior horn motor neurons), photoreceptor cells (e.g., rods and cones), retinal pigmented epithelial cells, secretory cells, cardiac cells, adipocytes, vascular smooth muscle cells, cardiomyocytes, skeletal muscle cells, beta cells, pituitary cells, synovial lining cells, ovarian cells, testicular cells, fibroblasts, B cells, T cells, reticulocytes, leukocytes, granulocytes and tumor cells. In some embodiments, the compositions of the invention may be prepared to preferentially target a variety of target cells, which include T cells, hepatocytes, and muscle cells (e.g., myotubes).

### 9. Pharmaceutical Compositions

[0622] In certain embodiments, provided herein are compositions (e.g., pharmaceutical compositions) comprising a therapeutic agent provided herein. In some embodiments, the therapeutic agent is a circular RNA polynucleotide provided herein. In some embodiments the therapeutic agent is a vector provided herein. In some embodiments, the therapeutic agent is a cell comprising a circular RNA or vector provided herein (e.g., a human cell, such as a human T-cell). In certain embodiments, the composition further comprises a pharmaceutically acceptable carrier. In some embodiments, the compositions provided herein comprise a therapeutic agent provided herein in combination with other pharmaceutically active agents or drugs, such as anti-inflammatory drugs or antibodies capable of targeting B cell antigens, e.g., anti-CD20 antibodies, e.g., rituximab.

[0623] With respect to pharmaceutical compositions, the pharmaceutically acceptable carrier can be any of those conventionally used and is limited only by physico-chemical considerations, such as solubility and lack of reactivity with the active agent(s), and by the route of administration. The pharmaceutically acceptable carriers described herein, for example, vehicles, adjuvants, excipients, and diluents, are well-known to those skilled in the art and are readily available to the public. It is preferred that the pharmaceutically acceptable carrier be one which is chemically inert to the therapeutic agent(s) and one which has no detrimental side effects or toxicity under the conditions of use.

[0624] The choice of carrier will be determined in part by the particular therapeutic agent, as well as by the particular method used to administer the therapeutic agent. Accordingly, there are a variety of suitable formulations of the pharmaceutical compositions provided herein.

[0625] In certain embodiments, the pharmaceutical composition comprises a preservative. In certain embodiments, suitable preservatives may include, for example, methylparaben, propylparaben, sodium benzoate, and benzalkonium chloride. Optionally, a mixture of two or more preservatives may be used. The preservative or mixtures thereof are typically present in an amount of about 0.0001% to about 2% by weight of the total composition.

[0626] In some embodiments, the pharmaceutical composition comprises a buffering agent. In some embodiments, suitable buffering agents may include, for example, citric acid, sodium citrate, phosphoric acid, potassium phosphate, and various other acids and salts. A mixture of two or more buffering agents optionally may be used. The buffering agent or mixtures thereof are typically present in an amount of about 0.001% to about 4% by weight of the total composition.

[0627] In some embodiments, the concentration of therapeutic agent in the pharmaceutical composition can vary, e.g., less than about 1%, or at least about 1%, 2%, 3%, 4%, 5%, 6%, 7%, 8%9% 10%%, 15%, 20%, 25%, 30%, 35%, 40%, 45%, or about 50% or more by weight, and can be selected primarily by fluid volumes, and viscosities, in accordance with the particular mode of administration selected.

[0628] The following formulations for oral, aerosol, parenteral (e.g., subcutaneous, intravenous, intraarterial, intramuscular, intradermal, intraperitoneal, and intrathecal), and topical administration are merely exemplary and are in no way limiting. More than one route can be used to administer the therapeutic agents provided herein, and in certain instances, a particular route can provide a more immediate and more effective response than another route.

[0629] Formulations suitable for oral administration can comprise or consist of (a) liquid solutions, such as an effective amount of the therapeutic agent dissolved in diluents, such as water, saline, or orange juice; (b) capsules, sachets, tablets, lozenges, and troches, each containing a predetermined amount of the active ingredient, as solids or granules; (c) powders; (d) suspensions in an appropriate liquid; and (e) suitable emulsions. Liquid formulations may include diluents, such as water and alcohols, for example, ethanol, benzyl alcohol and the polyethylene alcohols, either with or without the addition of a pharmaceutically acceptable surfactant. Capsule forms can be of the ordinary hard or soft shelled gelatin type containing, for example, surfactants, lubricants, and inert fillers, such as lactose, sucrose, calcium phosphate, and corn starch. Tablet forms can include one or more of lactose, sucrose, mannitol, corn starch, potato starch, alginic acid, microcrystalline cellulose, acacia, gelatin, guar gum, colloidal silicon dioxide, croscarmellose sodium, talc, magnesium stearate, calcium stearate, zinc stearate, stearic acid, and other excipients, colorants, diluents, buffering agents, disintegrating agents, moistening agents, preservatives, flavoring agents, and other pharmacologically compatible excipients. Lozenge forms can comprise the therapeutic agent with a flavorant, usually sucrose, acacia or tragacanth. Pastilles can comprise the therapeutic agent with an inert base, such as gelatin and glycerin, or sucrose and acacia, emulsions, gels, and the like containing, in addition to, such excipients as are known in the art.

[0630] Formulations suitable for parenteral administration include aqueous and nonaqueous isotonic sterile injection solutions, which can contain antioxidants, buffers, bacteriostats, and solutes that render the formulation isotonic with the blood of the intended recipient, and aqueous and nonaqueous sterile suspensions that can include suspending agents, solubilizers, thickening agents, stabilizers, and preservatives. In some embodiments, the therapeutic agents provided herein can be administered in a physiologically acceptable diluent in a pharmaceutical carrier, such as a sterile liquid or mixture of liquids including water, saline, aqueous dextrose and related sugar solutions, an alcohol such as ethanol or hexadecyl alcohol, a glycol such as propylene glycol or polyethylene glycol, dimethylsulfoxide, glycerol, ketals such as 2,2-dimethyl-1,3-dioxolane-4-methanol, ethers, poly(ethyleneglycol) 400, oils, fatty acids, fatty acid esters or glycerides, or acetylated fatty acid glycerides with or without the addition of a pharmaceutically acceptable surfactant such as a soap or a detergent, suspending agent such as pectin, carbomers, methylcellulose, hydroxypropylmethylcellulose, or carboxymethylcellulose, or emulsifying agents and other pharmaceutical adjuvants.

[0631] Oils, which can be used in parenteral formulations in some embodiments, include petroleum, animal oils, vegetable oils, or synthetic oils. Specific examples of oils include peanut, soybean, sesame, cottonseed, corn, olive, petrolatum, and mineral oil. Suitable fatty acids for use in parenteral formulations include oleic acid, stearic acid, and isostearic acid. Ethyl oleate and isopropyl myristate are examples of suitable fatty acid esters.

[0632] Suitable soaps for use in certain embodiments of parenteral formulations include fatty alkali metal, ammonium, and triethanolamine salts, and suitable detergents include (a) cationic detergents such as, for example, dimethyl dialkyl ammonium halides. and alkyl pyridinium halides, (b) anionic detergents such as, for example, alkyl, aryl, and olefin sulfonates, alky, olefin, ether, and monoglyceride sulfates, and sulfosuccinates, (c) nonionic detergents such as, for example, fatty amine oxides, fatty acid alkanolamides, and polyoxyethylenepolypropylene copolymers, (d) amphoteric detergents such as, for example, alkyl-β-aminopropionates, and 2-alkyl-imidazoline quaternary ammonium salts, and (e) mixtures thereof.

[0633] In some embodiments, the parenteral formulations will contain, for example, from about 0.5% to about 25% by weight of the therapeutic agent in solution. Preservatives and buffers may be used. In order to minimize or eliminate irritation at the site of injection, such compositions may contain one or more nonionic surfactants having, for example, a hydrophile-lipophile balance (HLB) of from about 12 to about 17. The quantity of surfactant in such formulations will typically range, for example, from about 5% to about 15% by weight. Suitable surfactants include polyethylene glycol, sorbitan, fatty acid esters such as sorbitan monooleate, and high molecular weight adducts of ethylene oxide with a hydrophobic base formed by the condensation of propylene oxide with propylene glycol. The parenteral formulations can be presented in unit-dose or multi-dose sealed containers, such as ampoules or vials, and can be stored in a freeze-dried (lyophilized) condition requiring only the addition of a sterile liquid excipient, for example, water for injections, immediately prior to use. Extemporaneous injection solutions and suspensions can be prepared from sterile powders, granules, and tablets of the kind previously described.

[0634] In certain embodiments, injectable formulations are provided herein. The requirements for effective pharmaceutical carriers for injectable compositions are well-known to those of ordinary skill in the art (see, e.g., Pharmaceutics and Pharmacy Practice, J. B. Lippincott Company, Philadelphia, PA, Banker and Chalmers, eds., pages 238-250 (1982), and ASHP Handbook on Injectable Drugs, Toissel, 4th ed, pages 622-630 (1986)).

[0635] In some embodiments, topical formulations are provided herein. Topical formulations, including those that are useful for transdermal drug release, are suitable in the context of certain embodiments provided herein for application to skin. In some embodiments, the therapeutic agent alone or in combination with other suitable components, can be made into aerosol formulations to be administered via inhalation. These aerosol formulations can be placed into pressurized acceptable propellants, such as dichlorodifluoromethane, propane, nitrogen, and the like. They also may be formulated as pharmaceuticals for non-pressured preparations, such as in a nebulizer or an atomizer. Such spray formulations also may be used to spray mucosa.

[0636] In certain embodiments, the therapeutic agents provided herein can be formulated as inclusion complexes, such as cyclodextrin inclusion complexes, or liposomes. Liposomes can serve to target the therapeutic agents to a particular tissue. Liposomes also can be used to increase the half-life of the therapeutic agents. Many methods are available for preparing liposomes, as described in, for example, Szoka et al., Ann. Rev. Biophys. Bioeng., 9, 467 (1980) and U.S. Pat. Nos. 4,235,871, 4,501,728, 4,837,028, and 5,019,369.

[0637] In some embodiments, the therapeutic agents provided herein are formulated in time-released, delayed release, or sustained release delivery systems such that the delivery of the composition occurs prior to, and with sufficient time to, cause sensitization of the site to be treated. Such systems can avoid repeated administrations of the therapeutic agent, thereby increasing convenience to the subject and the physician, and may be particularly suitable for certain composition embodiments provided herein. In one embodiment, the compositions of the invention are formulated such that they are suitable for extended-release of the circRNA contained therein. Such extended-release compositions may be conveniently administered to a subject at extended dosing intervals. For example, in one embodiment, the compositions of the present invention are administered to a subject twice a day, daily or every other day. In an embodiment, the compositions of the present invention are administered to a subject twice a week, once a week, every ten days, every two weeks, every three weeks, every four weeks, once a month, every six weeks, every eight weeks, every three months, every four months, every six months, every eight months, every nine months or annually.

[0638] In some embodiments, a protein encoded by an inventive polynucleotide is produced by a target cell for sustained amounts of time. For example, the protein may be produced for more than one hour, more than four, more than six, more than 12, more than 24, more than 48 hours, or more than 72 hours after administration. In some embodiments the polypeptide is expressed at a peak level about six hours after administration. In some embodiments the expression of the polypeptide is sustained at least at a therapeutic level. In some embodiments, the polypeptide is expressed at least at a therapeutic level for more than one, more than four, more than six, more than 12, more than 24, more than 48, or more than 72 hours after administration. In some embodiments, the polypeptide is detectable at a therapeutic level in patient tissue (e.g., liver or lung). In some embodiments, the level of detectable polypeptide is from continuous expression from the circRNA composition over periods of time of more than one, more than four, more than six, more than 12, more than 24, more than 48, or more than 72 hours after administration.

[0639] In certain embodiments, a protein encoded by an inventive polynucleotide is produced at levels above normal physiological levels. The level of protein may be increased as compared to a control. In some embodiments, the control is the baseline physiological level of the polypeptide in a normal individual or in a population of normal individuals. In other embodiments, the control is the baseline physiological level of the polypeptide in an individual having a deficiency in the relevant protein or polypeptide or in a population of individuals having a deficiency in the relevant protein or polypeptide. In some embodiments, the control can be the normal level of the relevant protein or polypeptide in the individual to whom the composition is administered. In other embodiments, the control is the expression level of the polypeptide upon other therapeutic intervention, e.g., upon direct injection of the corresponding polypeptide, at one or more comparable time points.

[0640] In certain embodiments, the levels of a protein encoded by an inventive polynucleotide are detectable at 3 days, 4 days, 5 days, or 1 week or more after administration. Increased levels of protein may be observed in a tissue (e.g., liver or lung).

[0641] In some embodiments, the method yields a sustained circulation half-life of a protein encoded by an inventive polynucleotide. For example, the protein may be detected for hours or days longer than the half-life observed via subcutaneous injection of the protein or mRNA encoding the protein. In some embodiments, the half-life of the protein is 1 day, 2 days, 3 days, 4 days, 5 days, or 1 week or more. In some embodiments, the functional half-life of the protein is at least 6 hours (e.g., at least 6, 7, 8, 9, 10, 12, 14, 16, 18, 20, 22, 24, 36, 48 hours, or more).

[0642] Many types of release delivery systems are available and known to those of ordinary skill in the art. They include polymer based systems such as poly(lactide-glycolide), copolyoxalates, polycaprolactones, polyesteramides, polyorthoesters, polyhydroxybutyric acid, and polyanhydrides. Microcapsules of the foregoing polymers containing drugs are described in, for example, U.S. Pat. No. 5,075,109. Delivery systems also include non-polymer systems that are lipids including sterols such as cholesterol, cholesterol esters, and fatty acids or neutral fats such as mono-di- and tri-glycerides; hydrogel release systems; sylastic systems; peptide based systems: wax coatings; compressed tablets using conventional binders and excipients; partially fused implants; and the like. Specific examples include, but are not limited to: (a) erosional systems in which the active composition is contained in a form within a matrix such as those described in U.S. Pat. Nos. 4,452,775, 4,667,014, 4,748,034, and 5,239,660 and (b) diffusional systems in which an active component permeates at a controlled rate from a polymer such as described in U.S. Pat. Nos. 3,832,253 and 3,854,480. In addition, pump-based hardware delivery systems can be used, some of which are adapted for implantation.

[0643] In some embodiments, the therapeutic agent can be conjugated either directly or indirectly through a linking moiety to a targeting moiety. Methods for conjugating therapeutic agents to targeting moieties is known in the art. See, for instance, Wadwa et al., J, Drug Targeting 3:111 (1995) and U.S. Pat. No. 5,087,616.

[0644] In some embodiments, the therapeutic agents provided herein are formulated into a depot form, such that the manner in which the therapeutic agent is released into the body to which it is administered is controlled with respect to time and location within the body (see, for example, U.S. Pat. No. 4,450,150). Depot forms of therapeutic agents can be, for example, an implantable composition comprising the therapeutic agents and a porous or non-porous material, such as a polymer, wherein the therapeutic agents are encapsulated by or diffused throughout the material and/or degradation of the non-porous material. The depot is then implanted into the desired location within the body and the therapeutic agents are released from the implant at a predetermined rate.

### 10. Therapeutic Methods

### A. Areas for Treatment & Relevant Diseases/Disorders

[0645] Also provided herein is a method of treating a subject in need thereof comprising administering a therapeutically effective amount of the circular RNA provided herein. In some embodiments, provided herein is a method of treating a subject in need thereof comprising administering a therapeutically effective amount of a composition comprising the circular RNA provided herein. In some embodiments, in addition to the circular RNA, a delivery vehicle, and optionally, a targeting moiety operably connected to the delivery vehicle is administered.

[0646] In some embodiments, provided herein are methods of treating and/or preventing a disease in a subject (e.g., mammalian subject, such as a human subject).

[0647] In some embodiments, provided herein are methods of treating and/or preventing a disease in a subject (e.g., mammalian subject, such as a human subject) by introducing or administering an effective amount of a pharmaceutical composition comprising a circular RNA encoding a therapeutic protein, e.g., dystrophin, and at least one delivery vehicle as described herein.

[0648] In some embodiments, provided herein is a method of vaccinating a subject by introducing or administering an effective amount of a pharmaceutical composition described herein comprising the circular RNA described herein and at least one delivery vehicle as described herein. In some embodiments, the method of vaccinating comprises administering an effective amount of an antigen comprising a viral polypeptide from an adenovirus; Herpes simplex, type 1; Herpes simplex, type 2; encephalitis virus, papillomavirus, Varicella-zoster virus; Epstein-barr virus; Human cytomegalovirus; Human herpes virus, type 8; Human papillomavirus; BK virus; JC virus; Smallpox; polio virus; Hepatitis B virus; Human bocavirus; Parvovirus B19; Human astrovirus; Norwalk virus; coxsackievirus; hepatitis A virus; poliovirus; rhinovirus; Severe acute respiratory syndrome virus; Hepatitis C virus; Yellow Fever virus; Dengue virus; West Nile virus; Rubella virus; Hepatitis E virus; Human Immunodeficiency virus (HIV); Influenza virus; Guanarito virus; Junin virus; Lassa virus; Machupo virus; Sabia virus; Crimean-Congo hemorrhagic fever virus; Ebola virus; Marburg virus; Measles virus; Mumps virus; Parainfluenza virus; Respiratory syncytial virus; Human metapneumo virus; Hendra virus; Nipah virus; Rabies virus; Hepatitis D; Rotavirus; Orbivirus; Coltivirus; Banna virus; Human Enterovirus; Hanta virus; West Nile virus; Middle East Respiratory Syndrome Corona Virus; Japanese encephalitis virus; Vesicular exanthernavirus; SARS-CoV-2; Eastern equine encephalitis, or a combination of any two or more of the foregoing.

[0649] In some embodiments, the circular RNA encodes a CAR, the CARs have biological activity, e.g., ability to recognize an antigen, e.g., CD19, HER2, or BCMA, such that the CAR, when expressed by a cell, is able to mediate an immune response against the cell expressing the antigen, e.g., CD19, HER2, or BCMA, for which the CAR is specific. In this regard, an embodiment provided herein provides a method of treating or preventing cancer in a subject, comprising administering to the subject the circular RNA therapeutic agents, and/or the pharmaceutical compositions provided herein in an amount effective to treat or prevent cancer in the subject.

[0650] In some embodiments, the subject has a cancer selected from the group consisting of: acute myeloid leukemia (AML); alveolar rhabdomyosarcoma; B cell malignancies; bladder cancer (e.g., bladder carcinoma); bone cancer; brain cancer (e.g., medulloblastoma and glioblastoma multiforme); breast cancer; cancer of the anus, anal canal, or anorectum; cancer of the eye; cancer of the intrahepatic bile duct; cancer of the joints; cancer of the neck; gallbladder cancer; cancer of the pleura; cancer of the nose, nasal cavity, or middle ear; cancer of the oral cavity; cancer of the vulva; chronic lymphocytic leukemia; chronic myeloid cancer; colon cancer; esophageal cancer, cervical cancer; fibrosarcoma; gastrointestinal carcinoid tumor; head and neck cancer (e.g., head and neck squamous cell carcinoma); Hodgkin lymphoma; hypopharynx cancer; kidney cancer; larynx cancer; leukemia; liquid tumors; lipoma; liver cancer; lung cancer (e.g., non-small cell lung carcinoma, lung adenocarcinoma, and small cell lung carcinoma); lymphoma; mesothelioma; mastocytoma; melanoma; multiple myeloma; nasopharynx cancer; non-Hodgkin lymphoma; B-chronic lymphocytic leukemia; hairy cell leukemia; Burkitt's lymphoma; ovarian cancer; pancreatic cancer; cancer of the peritoneum; cancer of the omentum; mesentery cancer; pharynx cancer; prostate cancer; rectal cancer; renal cancer; skin cancer; small intestine cancer; soft tissue cancer; solid tumors; synovial sarcoma; gastric cancer; teratoma; testicular cancer; thyroid cancer; and ureter cancer.

[0651] In some embodiments, the subject has an autoimmune disease or disorder.

[0652] In some embodiments, the subject has an autoimmune disease or disorder selected from scleroderma, Grave's disease, Crohn's disease, Sjogren's disease, multiple sclerosis, Hashimoto's disease, psoriasis, myasthenia gravis, autoimmune polyendocrinopathy syndromes, Type I diabetes mellitus (TIDM), autoimmune gastritis, autoimmune uveoretinitis, polymyositis, colitis, thyroiditis, and the generalized autoimmune diseases typified by human Lupus.

[0653] In some embodiments, the subject has an autoimmune disease or disorder that is B-cell mediated. In some embodiments, the subject has an autoimmune disease or disorder that is autoantibody mediated.

[0654] In some embodiments, the subject has lupus, e.g., systemic lupus erythematosus (SLE), cutaneous lupus erythematosus (CLE), lupus nephritis (LN), neonatal lupus, drug-induced lupus.

[0655] In the subject has antisynthetase syndrome, multifocal motor neuropathy, myasthenia gravis, neuromyelitis optica, pemphigus vulgaris, and/or systemic sclerosis.

[0656] In some embodiments, provided herein is a method of treating and/or preventing cancer in a subject, comprising introducing the circular RNA and/or pharmaceutical composition thereof disclosed herein. In some embodiments, provided herein is a method of treating cancer in a subject, comprising introducing the circular RNA encoding CD19 CAR and/or pharmaceutical composition thereof disclosed herein. In some embodiments, provided herein is a method of treating cancer in a subject, comprising introducing the circular RNA encoding HER2 CAR and/or pharmaceutical composition thereof disclosed herein. In some embodiments, provided herein is a method of treating cancer in a subject, comprising introducing the circular RNA encoding BCMA CAR and/or pharmaceutical composition thereof disclosed herein.

[0657] In some embodiments, provided herein is a method of treating and/or preventing B-cell lymphoma, e.g., large B-cell lymphoma, in a subject, comprising introducing the circular RNA and/or pharmaceutical composition thereof disclosed herein. In some embodiments, provided herein is a method of treating B-cell lymphoma, e.g., large B-cell lymphoma, in a subject, comprising introducing the circular RNA encoding CD19 CAR and/or pharmaceutical composition thereof disclosed herein. In some embodiments, provided herein is a method of treating B-cell lymphoma, e.g., large B-cell lymphoma, in a subject, comprising introducing the circular RNA encoding CD19 CAR and comprising an IRES and/or pharmaceutical composition thereof disclosed herein.

[0658] In some embodiments, provided herein is a method of treating and/or preventing mantle cell lymphoma in a subject, comprising introducing the circular RNA and/or pharmaceutical composition thereof disclosed herein. In some embodiments, provided herein is a method of treating mantle cell lymphoma in a subject, comprising introducing the circular RNA encoding CD19 CAR and/or pharmaceutical composition thereof disclosed herein. In some embodiments, provided herein is a method of treating mantle cell lymphoma in a subject, comprising introducing the circular RNA encoding CD19 CAR and comprising an IRES and/or pharmaceutical composition thereof disclosed herein.

[0659] In some embodiments, provided herein is a method of treating and/or preventing multiple myeloma in a subject, comprising introducing the circular RNA and/or pharmaceutical composition thereof disclosed herein. In some embodiments, provided herein is a method of treating multiple myeloma in a subject, comprising introducing the circular RNA encoding BCMA CAR and/or pharmaceutical composition thereof disclosed herein. In some embodiments, provided herein is a method of treating multiple myeloma in a subject, comprising introducing the circular RNA encoding BCMA CAR and comprising an IRES and/or pharmaceutical composition thereof disclosed herein.

[0660] In some embodiments, provided herein is a method of treating and/or preventing a solid tumor in a subject, comprising introducing the circular RNA and/or pharmaceutical composition thereof disclosed herein. In some embodiments, provided herein is a method of treating a solid tumor in a subject, comprising introducing the circular RNA encoding HER2 CAR and/or pharmaceutical composition thereof disclosed herein. In some embodiments, provided herein is a method of treating a solid tumor in a subject, comprising introducing the circular RNA encoding HER2 CAR and comprising an IRES and/or pharmaceutical composition thereof disclosed herein.

[0661] In 2022, Mackensen et al. reported a compassionate-use anti-CD19 CAR T cell therapy for refractory systemic lupus erythematosus in which autologous T cells from SLE patients “were transduced with a lentiviral anti-CD19 CAR vector, expanded and reinfused . . . into the patients after lymphodepletion . . . CAR T cells expanded in vivo, led to deep depletion of B cells, improvement of clinical symptoms and normalization of laboratory parameters including seroconversion of anti-double-stranded DNA antibodies. Remission of SLE according to DORIS criteria was achieved in all five patients after 3 months and the median (range) Systemic Lupus Erythematosus Disease Activity Index score after 3 months was 0 (2).” Mackensen et al., Anti-CD19 CAR T cell therapy for refractory systemic lupus erythematosus, Nature Medicine (2022); see also Nunez et al., Cytokine and reactivity profiles in SLE patients following anti-CD19 CART therapy, Molecular Therapy (2023); the contents of both of which are hereby incorporated by reference in their entireties.

[0662] In some embodiments, provided herein is a method of treating and/or preventing an autoimmune disease, e.g., a B cell mediated autoimmune disease, e.g., lupus, in a subject, comprising introducing the circular RNA encoding CD19 CAR and/or pharmaceutical composition thereof disclosed herein. In some embodiments, provided herein is a method of treating lupus in a subject, comprising introducing the circular RNA encoding CD19 CAR and/or pharmaceutical composition thereof disclosed herein. In some embodiments, provided herein is a method of treating SLE in a subject, comprising introducing the circular RNA encoding CD19 CAR and/or pharmaceutical composition thereof disclosed herein.

[0663] In some embodiments, provided herein is a method of treating and/or preventing an autoimmune disease, e.g., a B cell mediated autoimmune disease, e.g., lupus, in a subject, comprising introducing the circular RNA encoding CD19 CAR and comprising an IRES and/or pharmaceutical composition thereof disclosed herein. In some embodiments, provided herein is a method of treating lupus in a subject, comprising introducing the circular RNA encoding CD19 CAR and comprising an IRES and/or pharmaceutical composition thereof disclosed herein. In some embodiments, provided herein is a method of treating SLE in a subject, comprising introducing the circular RNA encoding CD19 CAR and comprising an IRES and/or pharmaceutical composition thereof disclosed herein.

[0664] In some embodiments, provided herein is a method of treating and/or preventing an autoimmune disease, e.g., a B cell mediated autoimmune disease, e.g., lupus, in a subject, comprising introducing the circular RNA and/or pharmaceutical composition thereof disclosed herein. In some embodiments, provided herein is a method of treating lupus in a subject, comprising introducing the circular RNA and/or pharmaceutical composition thereof disclosed herein. In some embodiments, provided herein is a method of treating SLE in a subject, comprising introducing the circular RNA and/or pharmaceutical composition thereof disclosed herein.

[0665] In some embodiments, provided herein is a method of treating and/or preventing an autoimmune disease, e.g., a B cell mediated autoimmune disease, e.g., lupus, in a subject, comprising introducing the circular RNA encoding CD19 CAR and/or pharmaceutical composition thereof disclosed herein. In some embodiments, provided herein is a method of treating lupus in a subject, comprising introducing the circular RNA encoding CD19 CAR and/or pharmaceutical composition thereof disclosed herein. In some embodiments, provided herein is a method of treating SLE in a subject, comprising introducing the circular RNA encoding CD19 CAR and/or pharmaceutical composition thereof disclosed herein.

[0666] In some embodiments, provided herein is a method of treating and/or preventing an autoimmune disease, e.g., a B cell mediated autoimmune disease, e.g., lupus, in a subject, comprising introducing the circular RNA encoding CD19 CAR and comprising an IRES and/or pharmaceutical composition thereof disclosed herein. In some embodiments, provided herein is a method of treating lupus in a subject, comprising introducing the circular RNA encoding CD19 CAR and comprising an IRES and/or pharmaceutical composition thereof disclosed herein. In some embodiments, provided herein is a method of treating SLE in a subject, comprising introducing the circular RNA encoding CD19 CAR and comprising an IRES and/or pharmaceutical composition thereof disclosed herein.

[0667] The transfer vehicles may preferentially distribute to specific target cells such as immune cells (e.g., T cells, NK cells, macrophages, etc.), or in the heart, lungs, kidneys, liver, and spleen. In some embodiments, the compositions distribute into the cells of the liver or spleen to facilitate the delivery and the subsequent expression of the circular RNA comprised therein by the cells of the liver (e.g., hepatocytes) or the cells of spleen (e.g., immune cells). The targeted cells may function as a biological “reservoir” or “depot” capable of producing, and systemically excreting a functional protein or enzyme. Accordingly, in one embodiment of the disclosure, the transfer vehicle may target hepatocytes or immune cells and/or preferentially distribute to the cells of the liver or spleen upon delivery. In an embodiment, following transfection of the target hepatocytes or immune cells, the circular RNA loaded in the vehicle is translated and a functional protein product is produced, excreted and systemically distributed. In other embodiments, cells other than hepatocytes (e.g., lung, spleen, heart, ocular, or cells of the central nervous system) can serve as a depot location for protein production. The compositions may also be prepared to preferentially target a variety of target cells, which include, but are not limited to, hepatocytes, epithelial cells, hematopoietic cells, epithelial cells, endothelial cells, lung cells, bone cells, stem cells, mesenchymal cells, neural cells (e.g., meninges, astrocytes, motor neurons, cells of the dorsal root ganglia and anterior horn motor neurons), photoreceptor cells (e.g., rods and cones), retinal pigmented epithelial cells, secretory cells, cardiac cells, adipocytes, vascular smooth muscle cells, cardiomyocytes, skeletal muscle cells, beta cells, pituitary cells, synovial lining cells, ovarian cells, testicular cells, fibroblasts, B cells, T cells, reticulocytes, leukocytes, granulocytes and tumor cells.

[0668] In some embodiments, provided herein is a method of treating and/or preventing a disease or disorder in a subject, comprising introducing the circular RNA and/or pharmaceutical composition thereof to an immune cell in the subject.

[0669] In some embodiments, provided herein is a method of treating and/or preventing a disease or disorder in a subject, comprising introducing the circular RNA and/or pharmaceutical composition thereof to a non-immune cell in the subject, e.g., a muscle or liver cell.

[0670] In some embodiments, provided herein is a method of treating and/or preventing a disease or disorder in a subject, comprising introducing the circular RNA and/or pharmaceutical composition thereof to a T cell in the subject. In some embodiments, provided herein is a method of treating a disease or disorder in a subject, comprising introducing the circular RNA and/or pharmaceutical composition thereof to a helper T cell in the subject. In some embodiments, provided herein is a method of treating a disease or disorder in a subject, comprising introducing the circular RNA and/or pharmaceutical composition thereof to a cytotoxic T cell in the subject.

[0671] In some embodiments, provided herein is a method of treating and/or preventing a disease or disorder in a subject, comprising introducing the circular RNA and/or pharmaceutical composition thereof to a NK cell in the subject.

[0672] In some embodiments, provided herein is a method of treating and/or preventing a disease or disorder in a subject, comprising introducing the circular RNA and/or pharmaceutical composition thereof to a macrophage in the subject.

[0673] In some embodiments, provided herein is a method of treating and/or preventing a disease or disorder in a subject, comprising introducing the circular RNA and/or pharmaceutical composition thereof to a myeloid cell in the subject.

[0674] In some embodiments, provided herein is a method of treating and/or preventing a disease or disorder in a subject, comprising introducing the circular RNA and/or pharmaceutical composition thereof to a monocyte in the subject.

[0675] In some embodiments, provided herein is a method of treating and/or preventing a disease or disorder in a subject, comprising introducing the circular RNA and/or pharmaceutical composition thereof to a CD3+ cell in the subject.

[0676] In some embodiments, provided herein is a method of treating and/or preventing a disease or disorder in a subject, comprising introducing the circular RNA and/or pharmaceutical composition thereof to a CD4+ cell in the subject.

[0677] In some embodiments, provided herein is a method of treating and/or preventing a disease or disorder in a subject, comprising introducing the circular RNA and/or pharmaceutical composition thereof to a CD8+ cell in the subject.

[0678] In some embodiments, provided herein is a method of treating and/or preventing a disease or disorder in a subject, comprising introducing the circular RNA and/or pharmaceutical composition thereof to a CD14+ cell in the subject.

[0679] In some embodiments, provided herein is a method of treating and/or preventing a disease or disorder in a subject, comprising introducing the circular RNA and/or pharmaceutical composition thereof to a CD16+ cell in the subject.

[0680] In some embodiments, provided herein is a method of treating and/or preventing a disease or disorder in a subject, comprising introducing the circular RNA and/or pharmaceutical composition thereof to a CD33+ cell in the subject.

[0681] In some embodiments, provided herein is a method of treating and/or preventing a disease or disorder in a subject, comprising introducing the circular RNA and/or pharmaceutical composition thereof to a CD33+CD14+ cell in the subject.

[0682] In some embodiments, provided herein is a method of treating and/or preventing a disease or disorder in a subject, comprising introducing the circular RNA and/or pharmaceutical composition thereof to a CD33+CD64+ cell in the subject.

[0683] In some embodiments, provided herein is a method of treating and/or preventing a disease or disorder in a subject, comprising introducing the circular RNA and/or pharmaceutical composition thereof to a CD56+ cell in the subject.

[0684] In some embodiments, provided herein is a method of treating and/or preventing a disease or disorder in a subject, comprising introducing the circular RNA and/or pharmaceutical composition thereof to a CD11B+ cell in the subject.

[0685] In certain embodiments the therapeutic agents provided herein (i.e., circular RNA constructs and compositions thereof) and the transfer vehicles (e.g., lipid nanoparticles) exhibit an enhanced (e.g., increased) ability to transfect one or more target cells. Accordingly, also provided herein are methods of transfecting one or more target cells. Such methods generally comprise the step of contacting the one or more target cells with the compounds and/or pharmaceutical compositions disclosed herein such that the one or more target cells are transfected with the circular RNA encapsulated therein. As used herein, the terms “transfect” or “transfection” refer to the intracellular introduction of one or more encapsulated materials (e.g., nucleic acids and/or polynucleotides) into a cell, or preferably into a target cell. The term “transfection efficiency” refers to the relative amount of such encapsulated material (e.g., polynucleotides) up-taken by, introduced into and/or expressed by the target cell which is subject to transfection. In some embodiments, transfection efficiency may be estimated by the amount of a reporter polynucleotide product produced by the target cells following transfection. In some embodiments, a transfer vehicle has high transfection efficiency. In some embodiments, a transfer vehicle has at least about 10%, 20%, 30%, 40%, 50%, 60%, 70%, 80%, or 90% transfection efficiency.

[0686] In certain embodiments, the therapeutic agents provided herein (i.e., circular RNA constructs and compositions thereof) are co-administered with one or more additional therapeutic agents e.g., in the same pharmaceutical composition or in separate pharmaceutical compositions. In some embodiments, the therapeutic agent provided herein can be administered first and the one or more additional therapeutic agents can be administered second, or vice versa. Alternatively, the therapeutic agent provided herein and the one or more additional therapeutic agents can be administered simultaneously. In some embodiments, the therapeutic agents are co-administered sufficiently close in time such that the therapeutic agent provided herein can enhance the effect of the one or more additional therapeutic agents, or vice versa.

[0687] In some embodiments, the subject is a mammal. In some embodiments, the mammal referred to herein can be any mammal, including, but not limited to, mammals of the order Rodentia, such as mice and hamsters, or mammals of the order Logomorpha, such as rabbits. The mammals may be from the order Carnivora, including Felines (cats) and Canines (dogs). The mammals may be from the order Artiodactyla, including Bovines (cows) and Swines (pigs), or of the order Perssodactyla, including Equines (horses). The mammals may be of the order Primates, Ceboids, or Simoids (monkeys) or of the order Anthropoids (humans and apes). Preferably, the mammal is a human.

### EXAMPLES

[0688] Wesselhoeft et al., (2019) RNA Circularization Diminishes Immunogenicity and Can Extend Translation Duration In vivo. Molecular Cell. 74(3), 508-520 and Wesselhoeft et al., (2018) Engineering circular RNA for Potent and Stable Translation in Eukaryotic Cells. Nature Communications. 9, 2629 are incorporated by reference in their entirety.

[0689] The invention is further described in detail by reference to the following examples but are not intended to be limited to the following examples. These examples encompass any and all variations of the illustrations with the intention of providing those of ordinary skill in the art with complete disclosure and description of how to make and use the subject invention and are not intended to limit the scope of what is regarded as the invention.

### Example 1

### Example 1a: External Duplex Regions Allow for Circularization of Long Precursor RNA Using the Permuted Intron Exon (PIE) Circularization Strategy

[0690] A 1.1 kb sequence containing a full-length encephalomyocarditis virus (EMCV) IRES, a Gaussia luciferase (GLuc) expression sequence, and two short exon segments of the permuted intron-exon (PIE) construct were inserted between the 3′ and 5′ introns of the permuted group I catalytic intron in the thymidylate synthase (Td) gene of the T4 phage. Precursor RNA was synthesized by run-off transcription. Circularization was attempted by heating the precursor RNA in the presence of magnesium ions and GTP, but splicing products were not obtained.

[0691] Perfectly complementary 9 nucleotide and 19 nucleotide long duplex regions were designed and added at the 5′ and 3′ ends of the precursor RNA. Addition of these homology arms increased splicing efficiency from 0 to 16% for 9 nucleotide duplex regions and to 48% for 19 nucleotide duplex regions as assessed by disappearance of the precursor RNA band.

[0692] The splicing product was treated with RNase R. Sequencing across the putative splice junction of RNase R-treated splicing reactions revealed ligated exons, and digestion of the RNase R-treated splicing reaction with oligonucleotide-targeted RNase H produced a single band in contrast to two bands yielded by RNase H-digested linear precursor. This shows that circular RNA is a major product of the splicing reactions of precursor RNA containing the 9 or 19 nucleotide long external duplex regions

### Example 1B: Spacers that Conserve Secondary Structures of IRES and PIE Splice Sites Increase Circularization Efficiency

[0693] A series of spacers was designed and inserted between the 3′ PIE splice site and the TRES. These spacers were designed to either conserve or disrupt secondary structures within intron sequences in the IRES, 3′ PIE splice site, and/or 5′ splice site. The addition of spacer sequences designed to conserve secondary structures resulted in 87% splicing efficiency, while the addition of a disruptive spacer sequences resulted in no detectable splicing.

### Example 2

### Example 2a: Internal Duplex Regions in Addition to External Duplex Regions Create a Splicing Bubble and Allows for Translation of Several Expression Sequences

[0694] Spacers were designed to be unstructured, non-homologous to the intron and IRES sequences, and to contain spacer-spacer duplex regions. These were inserted between the 5′ exon and IRES and between the 3′ exon and expression sequence in constructs containing external duplex regions, EMCV IRES, and expression sequences for Gaussia luciferase (total length: 1289 nt), Firefly luciferase (2384 nt), eGFP (1451 nt), human erythropoietin (1313 nt), and Cas9 endonuclease (4934 nt). Circularization of all 5 constructs was achieved. Circularization of constructs utilizing T4 phage and Anabaena introns were roughly equal. Circularization efficiency was higher for shorter sequences. To measure translation, each construct was transfected into HEK293 cells. Gaussia and Firefly luciferase transfected cells produced a robust response as measured by luminescence, human erythropoietin was detectable in the media of cells transfected with erythropoietin circRNA, and EGFP fluorescence was observed from cells transfected with EGFP circRNA. Co-transfection of Cas9 circRNA with sgRNA directed against GFP into cells constitutively expressing GFP resulted in ablated fluorescence in up to 97% of cells in comparison to an sgRNA-only control.

### Example 2B: Use of CVB3 IRES Increases Protein Production

[0695] Constructs with internal and external duplex regions and differing IRES containing either Gaussia luciferase or Firefly luciferase expression sequences were made. Protein production was measured by luminescence in the supernatant of HEK293 cells 24 hours after transfection. The Coxsackievirus B3 (CVB3) IRES construct produced the most protein in both cases.

### Example 2C: Use of polyA or polyAC Spacers Increases Protein Production

[0696] Thirty nucleotide long polyA or polyAC spacers were added between the IRES and splice junction in a construct with each IRES that produced protein in example 2B. Gaussia luciferase activity was measured by luminescence in the supernatant of HEK293 cells 24 hours after transfection. Both spacers improved expression in every construct over control constructs without spacers.

### Example 3

Hek293 or HeLa Cells Transfected with Circular RNA Produce More Protein than Those Transfected with Comparable Unmodified or Modified Linear RNA.

[0697] HPLC-purified Gaussia luciferase-coding circRNA (CVB3-GLuc-pAC) was compared with a canonical unmodified 5′ methylguanosine-capped and 3′ polyA-tailed linear GLuc mRNA, and a commercially available nucleoside-modified (pseudouridine, 5-methylcytosine) linear GLuc mRNA (from Trilink). Luminescence was measured 24 h post-transfection, revealing that circRNA produced 811.2% more protein than the unmodified linear mRNA in HEK293 cells and 54.5% more protein than the modified mRNA. Similar results were obtained in HeLa cells and a comparison of optimized circRNA coding for human erythropoietin with linear mRNA modified with 5-methoxyuridine.

[0698] Luminescence data was collected over 6 days. In HEK293 cells, circRNA transfection resulted in a protein production half-life of 80 hours, in comparison with the 43 hours of unmodified linear mRNA and 45 hours of modified linear mRNA. In HeLa cells, circRNA transfection resulted in a protein production half-life of 116 hours, in comparison with the 44 hours of unmodified linear mRNA and 49 hours of modified linear mRNA. CircRNA produced substantially more protein than both the unmodified and modified linear mRNAs over its lifetime in both cell types.

### Example 4

### Example 4a: Purification of circRNA by RNase Digestion, HPLC Purification, and Phosphatase Treatment Decreases Immunogenicity. Completely Purified Circular RNA is Significantly Less Immunogenic than Unpurified or Partially Purified Circular RNA. Protein Expression Stability and Cell Viability are Dependent on Cell Type and Circular RNA Purity

[0699] Human embryonic kidney 293 (HEK293) and human lung carcinoma A549 cells were transfected with:
[0700] a. products of an unpurified GLuc circular RNA splicing reaction,
[0701] b. products of RNase R digestion of the splicing reaction,
[0702] c. products of RNase R digestion and HPLC purification of the splicing reaction, or
[0703] d. products of RNase digestion, HPLC purification, and phosphatase treatment of the splicing reaction.

[0704] RNase R digestion of splicing reactions was insufficient to prevent cytokine release in A549 cells in comparison to untransfected controls.

[0705] The addition of HPLC purification was also insufficient to prevent cytokine release, although there was a significant reduction in interleukin-6 (IL-6) and a significant increase in interferon-α1 (IFNα1) compared to the unpurified splicing reaction.

[0706] The addition of a phosphatase treatment after HPLC purification and before RNase R digestion dramatically reduced the expression of all upregulated cytokines assessed in A549 cells. Secreted monocyte chemoattractant protein 1 (MCP1), IL-6, IFNα1, tumor necrosis factor α (TNFα), and IFNγ inducible protein-10 (IP-10) fell to undetectable or untransfected baseline levels.

[0707] There was no substantial cytokine release in HEK293 cells. A549 cells had increased GLuc expression stability and cell viability when transfected with higher purity circular RNA. Completely purified circular RNA had a stability phenotype similar to that of transfected 293 cells.

### Example 4B: Circular RNA Does not Cause Significant Immunogenicity and is not a RIG-I Ligand

[0708] A549 cells were transfected with:
[0709] a. unpurified circular RNA,
[0710] b. high molecular weight (linear and circular concatenations) RNA,
[0711] c. circular (nicked) RNA,
[0712] d. an early fraction of purified circular RNA (more overlap with nicked RNA peak),
[0713] e. a late fraction of purified circular RNA (less overlap with nicked RNA peak),
[0714] f. introns excised during circularization, or
[0715] g. vehicle (i.e. untransfected control).

[0716] Precursor RNA was separately synthesized and purified in the form of the splice site deletion mutant (DS) due to difficulties in obtaining suitably pure linear precursor RNA from the splicing reaction. Cytokine release and cell viability was measured in each case.

[0717] Robust IL-6, RANTES, and IP-10 release was observed in response to most of the species present within the splicing reaction, as well as precursor RNA. Early circRNA fractions elicited cytokine responses comparable to other non-circRNA fractions, indicating that even relatively small quantities of linear RNA contaminants are able to induce a substantial cellular immune response in A549 cells. Late circRNA fractions elicited no cytokine response in excess of that from untransfected controls. A549 cell viability 36 hours post-transfection was significantly greater for late circRNA fractions compared with all of the other fractions.

[0718] RIG-I and IFN-β 1 transcript induction upon transfection of A549 cells with late circRNA HPLC fractions, precursor RNA or unpurified splicing reactions were analyzed. Induction of both RIG-I and IFN-β1 transcripts were weaker for late circRNA fractions than precursor RNA and unpurified splicing reactions. RNase R treatment of splicing reactions alone was not sufficient to ablate this effect. Addition of very small quantities of the RIG-I ligand 3p-hpRNA to circular RNA induced substantial RIG-I transcription. In HeLa cells, transfection of RNase R-digested splicing reactions induced RIG-I and IFN-β1, but purified circRNA did not. Overall, HeLa cells were less sensitive to contaminating RNA species than A549 cells.

[0719] A time course experiment monitoring RIG-I, IFN-β1, IL-6, and RANTES transcript induction within the first 8 hours after transfection of A549 cells with splicing reactions or fully purified circRNA did not reveal a transient response to circRNA. Purified circRNA similarly failed to induce pro-inflammatory transcripts in RAW264.7 murine macrophages.

[0720] A549 cells were transfected with purified circRNA containing an EMCV IRES and EGFP expression sequence. This failed to produce substantial induction of pro-inflammatory transcripts. These data demonstrate that non-circular components of the splicing reaction are responsible for the immunogenicity observed in previous studies and that circRNA is not a natural ligand for RIG-I.

### Example 5

### Circular RNA Avoids Detection by TLRs.

[0721] TLR3, 7, and 8 reporter cell lines were transfected with multiple linear or circular RNA constructs and secreted embryonic alkaline phosphatase (SEAP) was measured.

[0722] Linearized RNA was constructed by deleting the intron and homology arm sequences. The linear RNA constructs were then treated with phosphatase (in the case of capped RNAs, after capping) and purified by HPLC.

[0723] None of the attempted transfections produced a response in TLR7 reporter cells. TLR3 and TLR8 reporter cells were activated by capped linearized RNA, polyadenylated linearized RNA, the nicked circRNA HPLC fraction, and the early circRNA fraction. The late circRNA fraction and mlW-mRNA did not provoke TLR-mediated response in any cell line.

[0724] In a second experiment, circRNA was linearized using two methods: treatment of circRNA with heat in the presence of magnesium ions and DNA oligonucleotide-guided RNase H digestion. Both methods yielded a majority of full-length linear RNA with small amounts of intact circRNA. TLR3, 7, and 8 reporter cells were transfected with circular RNA, circular RNA degraded by heat, or circular RNA degraded by RNase H, and SEAP secretion was measured 36 hours after transfection. TLR8 reporter cells secreted SEAP in response to both forms of degraded circular RNA, but did not produce a greater response to circular RNA transfection than mock transfection. No activation was observed in TLR3 and TLR7 reporter cells for degraded or intact conditions, despite the activation of TLR3 by in vitro transcribed linearized RNA.

### Example 6

Unmodified Circular RNA Produces Increased Sustained In Vivo Protein Expression than Linear RNA.

[0725] Mice were injected and HEK293 cells were transfected with unmodified and mlW-modified human erythropoietin (hEpo) linear mRNAs and circRNAs. Equimolar transfection of mlW-mRNA and unmodified circRNA resulted in robust protein expression in HEK293 cells. hEpo linear mRNA and circRNA displayed similar relative protein expression patterns and cell viabilities in comparison to GLuc linear mRNA and circRNA upon equal weight transfection of HEK293 and A549 cells.

[0726] In mice, hEpo was detected in serum after the injection of hEpo circRNA or linear mRNA into visceral adipose. hEpo detected after the injection of unmodified circRNA decayed more slowly than that from unmodified or m1ψ-mRNA and was still present 42 hours post-injection. Serum hEpo rapidly declined upon the injection of unpurified circRNA splicing reactions or unmodified linear mRNA. Injection of unpurified splicing reactions produced a cytokine response detectable in serum that was not observed for the other RNAs, including purified circRNA.

### Example 7

### Circular RNA can be Effectively Delivered In Vivo or In Vitro Via Lipid Nanoparticles.

[0727] Purified circular RNA was formulated into lipid nanoparticles (LNPs) with the ionizable lipidoid cKK-E12 (Dong et al., 2014; Kauffman et al., 2015). The particles formed uniform multilamellar structures with an average size, polydispersity index, and encapsulation efficiency similar to that of particles containing commercially available control linear mRNA modified with 5moU.

[0728] Purified hEpo circRNA displayed greater expression than 5moU-mRNA when encapsulated in LNPs and added to HEK293 cells. Expression stability from LNP-RNA in HEK293 cells was similar to that of RNA delivered by transfection reagent, with the exception of a slight delay in decay for both 5moU-mRNA and circRNA. Both unmodified circRNA and 5moU-mRNA failed to activate RIG-I/IFN-β1 in vitro.

[0729] In mice, LNP-RNA was delivered by local injection into visceral adipose tissue or intravenous delivery to the liver. Serum hEpo expression from circRNA was lower but comparable with that from 5moU-mRNA 6 hours after delivery in both cases. Serum hEpo detected after adipose injection of unmodified LNP-circRNA decayed more slowly than that from LNP-5moU-mRNA, with a delay in expression decay present in serum that was similar to that noted in vitro, but serum hEpo after intravenous injection of LNP-circRNA or LNP-5moU-mRNA decayed at approximately the same rate. There was no increase in serum cytokines or local RIG-I, TNFα, or IL-6 transcript induction in any of these cases.

### Example 8

### Expression and Functional Stability by IRES in HEK293, HepG2, and ICIC7 Cells.

[0730] Constructs including anabaena intron/exon regions, a Gaussia luciferase expression sequence, and varying IRES were circularized. 100 ng of each circularization reaction was separately transfected into 20,000 HEK293 cells, HepG2 cells, and 1C1C7 cells using Lipofectamine MessengerMax. Luminescence in each supernatant was assessed after 24 hours as a measure of protein expression. In HEK293 cells, constructs including Crohivirus B, Salivirus FHB, Aichi Virus, Salivirus HG-J1, and Enterovirus J IRES produced the most luminescence at 24 hours (FIG. 1A). In HepG2 cells, constructs including Aichi Virus, Salivirus FHB, EMCV-Cf, and CVA3 IRES produced high luminescence at 24 hours (FIG. 1B). In 1C1C7 cells, constructs including Salivirus FHB, Aichi Virus, Salivirus NG-J1, and Salivirus A SZ-1 IRES produced high luminescence at 24 hours (FIG. 1C).

[0731] A trend of larger IRES producing greater luminescence at 24 hours was observed. Shorter total sequence length tends to increase circularization efficiency, so selecting a high expression and relatively short IRES may result in an improved construct. In HEK293 cells, a construct using the Crohivirus B IRES produced the highest luminescence, especially in comparison to other IRES of similar length (FIG. 2A). Expression from TRES constructs in HepG2 and 1C1C7 cells plotted against IRES size are in FIGS. 2B and 2C.

[0732] Functional stability of select IRES constructs in HepG2 and 1C1C7 cells were measured over 3 days. Luminescence from secreted Gaussia luciferase in supernatant was measured every 24 hours after transfection of 20,000 cells with 100 ng of each circularization reaction, followed by complete media replacement. Salivirus A GUT and Salivirus FHB exhibited the highest functional stability in HepG2 cells, and Salivirus N-J1 and Salivirus FHB produced the most stable expression in 1C1C7 cells (FIGS. 3A and 3B).

### Example 9

### Expression and Functional Stability by IRES in Jurkat Cells.

[0733] 2 sets of constructs including anabaena intron/exon regions, a Gaussia luciferase expression sequence, and a subset of previously tested IRES were circularized. 60,000 Jurkat cells were electroporated with 1 μg of each circularization reaction. Luminescence from secreted Gaussia luciferase in supernatant was measured 24 hours after electroporation. A CVB3 IRES construct was included in both sets for comparison between sets and to previously defined IRES efficacy. CVB1 and Salivirus A SZ1 IRES constructs produced the most expression at 24 h. Data can be found in FIGS. 4A and 4B.

[0734] Functional stability of the TRES constructs in each round of electroporated Jurkat cells was measured over 3 days. Luminescence from secreted Gaussia luciferase in supernatant was measured every 24 hours after electroporation of 60,000 cells with 1 μg of each circularization reaction, followed by complete media replacement (FIGS. 5A and 5B).

[0735] Salivirus A SZ1 and Salivirus A BN2 IRES constructs had high functional stability compared to other constructs.

### Example 10

### Expression, Functional Stability, and Cytokine Release of Circular and Linear RNA in Jurkat Cells.

[0736] A construct including anabaena intron/exon regions, a Gaussia luciferase expression sequence, and a Salivirus FHB TRES was circularized. mRNA including a Gaussia luciferase expression sequence and a ˜150 nt polyA tail (e.g., SEQ ID NO: 3279), and modified to replace 100% of uridine with 5-methoxy uridine (5moU) is commercially available and was purchased from Trilink. 5moU nucleotide modifications have been shown to improve mRNA stability and expression (Bioconjug Chem. 2016 Mar. 16; 27(3):849-53). Expression of modified mRNA, circularization reactions (unpure), and circRNA purified by size exclusion HPLC (pure) in Jurkat cells were measured and compared (FIG. 6A). Luminescence from secreted Gaussia luciferase in supernatant was measured 24 hours after electroporation of 60,000 cells with 1 μg of each RNA species. Luminescence from secreted Gaussia luciferase in supernatant was measured every 24 hours after electroporation of 60,000 cells with 1 ug of each RNA species, followed by complete media replacement. A comparison of functional stability data of modified mRNA and circRNA in Jurkat cells over 3 days is in FIG. 6B.

[0737] IFNγ (FIG. 7A), IL-6 (FIG. 7B), IL-2 (FIG. 7C), RIG-I (FIG. 7D), IFN-β 1 (FIG. 7E), and TNFα (FIG. 7F) transcript induction was measured 18 hours after electroporation of 60,000 Jurkat cells with 1 μg of each RNA species described above and 3p-hpRNA (5′ triphosphate hairpin RNA, which is a known RIG-I agonist).

### Example 11

### Expression of Circular and Linear RNA in Monocytes and Macrophages.

[0738] A construct including anabaena intron/exon regions, a Gaussia luciferase expression sequence, and a Salivirus FHB TRES was circularized. mRNA including a Gaussia luciferase expression sequence and a ˜150 nt polyA tail (e.g., SEQ ID NO: 3279), and modified to replace 100% of uridine with 5-methoxy uridine (5moU) was purchased from Trilink. Expression of circular and modified mRNA was measured in human primary monocytes (FIG. 8A) and human primary macrophages (FIG. 8B). Luminescence from secreted Gaussia luciferase in supernatant was measured 24 hours after electroporation of 60,000 cells with 1 μg of each RNA species. Luminescence was also measured 4 days after electroporation of human primary macrophages with media changes every 24 hours (FIG. 8C). The difference in luminescence was statistically significant in each case (p<0.05).

### Example 12

### Expression and Functional Stability by IRES in Primary T Cells.

[0739] Constructs including anabaena intron/exon regions, a Gaussia luciferase expression sequence, and a subset of previously tested IRES were circularized and reaction products were purified by size exclusion HPLC. 150,000 primary human CD3+ T-cells were electroporated with 1 μg of each circRNA. Luminescence from secreted Gaussia luciferase in supernatant was measured 24 hours after electroporation (FIG. 9A). Aichi Virus and CVB3 IRES constructs had the most expression at 24 hours.

[0740] Luminescence was also measured every 24 hours after electroporation for 3 days in order to compare functional stability of each construct (FIG. 9B). The construct with a Salivirus A SZ1 TRES was the most stable.

### Example 13

### Expression and Functional Stability of Circular and Linear RNA in Primary T Cells and PBMCs.

[0741] Constructs including anabaena intron/exon regions, a Gaussia luciferase expression sequence, and a Salivirus A SZ1 IRES or Salivirus FHB IRES were circularized. mRNA including a Gaussia luciferase expression sequence and a ˜150 nt polyA tail (e.g., SEQ ID NO: 3279), and modified to replace 100% of uridine with 5-methoxy uridine (5moU) and was purchased from Trilink. Expression of Salivirus A SZ1 IRES HPLC purified circular and modified mRNA was measured in human primary CD3+ T cells. Expression of Salivirus FHB HPLC purified circular, unpurified circular and modified mRNA was measured in human PBMCs. Luminescence from secreted Gaussia luciferase in supernatant was measured 24 hours after electroporation of 150,000 cells with 1 μg of each RNA species. Data for primary human T cells is in FIGS. 10A and 10B, and data for PBMCs is in FIG. 10C. The difference in expression between the purified circular RNA and unpurified circular RNA or linear RNA was significant in each case (p<0.05).

[0742] Luminescence from secreted Gaussia luciferase in primary T cell supernatant was measured every 24 hours after electroporation over 3 days in order to compare construct functional stability. Data is shown in FIG. 10B. The difference in relative luminescence from the day 1 measurement between purified circular RNA and linear RNA was significant at both day 2 and day 3 for primary T cells.

### Example 14

### Circularization Efficiency by Permutation Site in Anabaena Intron.

[0743] RNA constructs including a CVB3 IRES, a Gaussia luciferase expression sequence, anabaena intron/exon regions, spacers, internal duplex regions, and homology arms were produced. Circularization efficiency of constructs using the traditional anabaena intron permutation site and 5 consecutive permutations sites in P9 was measured by HPLC. HPLC chromatograms for the 5 consecutive permutation sites in P9 are shown in FIG. 11A.

[0744] Circularization efficiency was measured at a variety of permutation sites. Circularization efficiency is defined as the area under the HPLC chromatogram curve for each of: circRNA/(circRNA+precursor RNA). Ranked quantification of circularization efficiency at each permutation site is in FIG. 11B. 3 permutation sites (indicated in FIG. 111B) were selected for further investigation.

[0745] Circular RNA in this example was circularized by in vitro transcription (IVT) then purified via spin column. Circularization efficiency for all constructs would likely be higher if the additional step of incubation with Mg²⁺ and guanosine nucleotide were included; however, removing this step allowed for comparison between, and optimization of, circular RNA constructs. This level of optimization is especially useful for maintaining high circularization efficiency with large RNA constructs, such as those encoding chimeric antigen receptors.

### Example 15

### Circularization Efficiency of Alternative Introns.

[0746] Precursor RNA containing a permuted group 1 intron of variable species origin or permutation site and several constant elements including: a CVB3 IRES, a Gaussia luciferase expression sequence, spacers, internal duplex regions, and homology arms were created. Circularization data can be found in FIG. 12. FIG. 12A shows chromatograms resolving precursor, CircRNA and introns. FIG. 12B provides ranked quantification of circularization efficiency, based on the chromatograms shown in FIG. 12A, as a function of intron construct.

[0747] Circular RNA in this example was circularized by in vitro transcription (IVT) then spin column purification. Circularization efficiency for all constructs would likely be higher if the additional step of incubation with Mg²⁺ and guanosine nucleotide were included; however, removing this step allows for comparison between, and optimization of, circular RNA constructs. This level of optimization is especially useful for maintaining high circularization efficiency with large RNA constructs, such as those encoding chimeric antigen receptors.

### Example 16

### Circularization Efficiency by Homology Arm Presence or Length.

[0748] RNA constructs including a CVB3 IRES, a Gaussia luciferase expression sequence, anabaena intron/exon regions, spacers, and internal duplex regions were produced. Constructs representing 3 anabaena intron permutation sites were tested with 30 nt, 25% GC homology arms or without homology arms (“NA”). These constructs were allowed to circularize without the step of incubation with Mg²⁺. Circularization efficiency was measured and compared. Data can be found in FIG. 13. Circularization efficiency was higher for each construct lacking homology arms. FIG. 13A provides ranked quantification of circularization efficiency; FIG. 13B provides chromatograms resolving precursor, circRNA and introns.

[0749] For each of the 3 permutation sites, constructs were created with 10 nt, 20 nt, and 30 nt arm length and 25%, 50%, and 75% GC. Splicing efficiency of these constructs was measured and compared to constructs without homology arms (FIG. 14). Splicing efficiency is defined as the proportion of free introns relative to the total RNA in the splicing reaction.

[0750] FIG. 15A (left) contains HPLC chromatograms showing the contribution of strong homology arms to improved splicing efficiency. Top left: 75% GC content, 10 nt homology arms. Center left: 75% GC content, 20 nt homology arms. Bottom left: 75% GC content, 30 nt homology arms.

[0751] FIG. 15A (right) shows HPLC chromatograms indicating increased splicing efficiency paired with increased nicking, appearing as a shoulder on the circRNA peak. Top right: 75% GC content, 10 nt homology arms. Center right: 75% GC content, 20 nt homology arms. Bottom right: 75% GC content, 30 nt homology arms.

[0752] FIG. 15B (left) shows select combinations of permutation sites and homology arms hypothesized to demonstrate improved circularization efficiency.

[0753] FIG. 15B (right) shows select combinations of permutation sites and homology arms hypothesized to demonstrate improved circularization efficiency, treated with E. coli polyA polymerase.

[0754] Circular RNA in this example was circularized by in vitro transcription (IVT) then spin-column purified. Circularization efficiency for all constructs would likely be higher if an additional Mg²⁺ incubation step with guanosine nucleotide were included; however, removing this step allowed for comparison between, and optimization of, circular RNA constructs. This level of optimization is especially useful for maintaining high circularization efficiency with large RNA constructs, such as those encoding chimeric antigen receptors.

### Example 17

### Circular RNA Encoding Chimeric Antigen Receptors.

[0755] Constructs including anabaena intron/exon regions, a Kymriah chimeric antigen receptor (CAR) expression sequence, and a CVB3 IRES were circularized. 100,000 human primary CD3+ T cells were electroporated with 500 ng of circRNA and co-cultured for 24 hours with Raji cells stably expressing GFP and firefly luciferase. Effector to target ratio (E:T ratio) 0.75:1. 100,000 human primary CD3+ T cells were mock electroporated and co-cultured as a control (FIG. 16).

[0756] Sets of 100,000 human primary CD3+ T cells were mock electroporated or electroporated with 1 μg of circRNA then co-cultured for 48 hours with Raji cells stably expressing GFP and firefly luciferase. E:T ratio 10:1 (FIG. 17).

[0757] Quantification of specific lysis of Raji target cells was determined by detection of firefly luminescence (FIG. 18). 100,000 human primary CD3+ T cells either mock electroporated or electroporated with circRNA encoding different CAR sequences were co-cultured for 48 hours with Raji cells stably expressing GFP and firefly luciferase. % Specific lysis defined as 1-[CAR condition luminescence]/[mock condition luminescence]. E:T ratio 10:1.

### Example 18

### Expression and Functional Stability of Circular and Linear RNA in Jurkat Cells and Resting Human T Cells.

[0758] Constructs including anabaena intron/exon regions, a Gaussia luciferase expression sequence, and a subset of previously tested IRES were circularized and reaction products were purified by size exclusion HPLC. 150,000 Jurkat cells were electroporated with 1 μg of circular RNA or 5moU-mRNA. Luminescence from secreted Gaussia luciferase in supernatant was measured 24 hours after electroporation (FIG. 19A left). 150,000 resting primary human CD3+ T cells (10 days post-stimulation) were electroporated with 1 μg of circular RNA or 5moU-mRNA. Luminescence from secreted Gaussia luciferase in supernatant was measured 24 hours after electroporation (FIG. 19A right).

[0759] Luminescence from secreted Gaussia luciferase in supernatant was measured every 24 hours after electroporation, followed by complete media replacement. Functional stability data is shown in FIG. 19B. Circular RNA had more functional stability than linear RNA in each case, with a more pronounced difference in Jurkat cells.

### Example 19

IFN-β1, RIG-I, IL-2, IL-6, IFNγ, and TNFα Transcript Induction of Cells Electroporated with Linear RNA or Varying Circular RNA Constructs.

[0760] Constructs including anabaena intron/exon regions, a Gaussia luciferase expression sequence, and a subset of previously tested IRES were circularized and reaction products were purified by size exclusion HPLC. 150,000 CD3+ human T cells were electroporated with 1 μg of circular RNA, 5moU-mRNA, or immunostimulatory positive control poly inosine:cytosine. IFN-β1 (FIG. 20A), RIG-I (FIG. 20B), IL-2 (FIG. 20C), IL-6 (FIG. 20D), IFN-7 (FIG. 20E), and TNF-α (FIG. 20F) transcript induction was measured 18 hours after electroporation.

### Example 20

[0761] Specific lysis of target cells and IFNγ transcript induction by CAR expressing cells electroporated with different amounts of circular or linear RNA; specific lysis of target and non-target cells by CAR expressing cells at different E: T ratios.

[0762] Constructs including anabaena intron/exon regions, an anti-CD19 CAR expression sequence, and a CVB3 IRES were circularized and reaction products were purified by size exclusion HPLC. 150,000 human primary CD3+ T cells either mock electroporated or electroporated with different quantities of circRNA encoding an anti-CD19 CAR sequence were co-cultured for 12 hours with Raji cells stably expressing GFP and firefly luciferase at an E:T ratio of 2:1. Specific lysis of Raji target cells was determined by detection of firefly luminescence (FIG. 21A). % Specific lysis was defined as 1-[CAR condition luminescence]/[mock condition luminescence]. IFNγ transcript induction was measured 24 hours after electroporation (FIG. 21).

[0763] 150,000 human primary CD3+ T cells were either mock electroporated or electroporated with 500 ng circRNA or mlW-mRNA encoding an anti-CD19 CAR sequence, then co-cultured for 24 hours with Raji cells stably expressing firefly luciferase at different E:T ratios. Specific lysis of Raji target cells was determined by detection of firefly luminescence (FIG. 22A). Specific lysis was defined as 1-[CAR condition luminescence]/[mock condition luminescence].

[0764] CAR expressing T cells were also co-cultured for 24 hours with Raji or K562 cells stably expressing firefly luciferase at different E:T ratios. Specific lysis of Raji target cells or K562 non-target cells was determined by detection of firefly luminescence (FIG. 22B). % Specific lysis is defined as 1-[CAR condition luminescence]/[mock condition luminescence].

### Example 21

Specific Lysis of Target Cells by T Cells Electroporated with Circular RNA or Linear RNA Encoding a CAR.

[0765] Constructs including anabaena intron/exon regions, an anti-CD19 CAR expression sequence, and a CVB3 IRES were circularized and reaction products were purified by size exclusion HPLC. Human primary CD3+ T cells were electroporated with 500 ng of circular RNA or an equimolar quantity of m1ψ-mRNA, each encoding a CD19-targeted CAR. Raji cells were added to CAR-T cell cultures over 7 days at an E:T ratio of 10:1. % Specific lysis was measured for both constructs at 1, 3, 5, and 7 days (FIG. 23).

### Example 22

### Specific Lysis of Raji Cells by T Cells Expressing an Anti-CD19 CAR or an Anti-BCMA CAR.

[0766] Constructs including anabaena intron/exon regions, anti-CD19 or anti-BCMA CAR expression sequence, and a CVB3 IRES were circularized and reaction products were purified by size exclusion HPLC. 150,000 primary human CD3+ T cells were electroporated with 500 ng of circRNA, then were co-cultured with Raji cells at an E:T ratio of 2:1. % Specific lysis was measured 12 hours after electroporation (FIG. 24).

### Example 23

### Expression, Functional Stability, and Cytokine Transcript Induction of Circular and Linear RNA Expressing Antigens.

[0767] Constructs including one or more antigen expression sequences are circularized and reaction products are purified by size exclusion HPLC. Antigen presenting cells are electroporated with circular RNA or mRNA.

[0768] In vitro antigen production is measured via ELISA. Optionally, antigen production is measured every 24 hours after electroporation. Cytokine transcript induction or release is measured 18 hours after electroporation of antigen presenting cells with circular or linear RNA encoding antigens. The tested cytokines may include IFN-β1, RIG-I, IL-2, TL-6, IFNγ, RANTES, and TNFα.

[0769] In vitro antigen production and cytokine induction are measured using purified circRNA, purified circRNA plus antisense circRNA, and unpurified circRNA in order to find the ratio that best preserves expression and immune stimulation.

### Example 24

### In Vivo Antigen and Antibody Expression in Animal Models.

[0770] To assess the ability of antigen encoding circRNAs to facilitate antigen expression and antibody production in vivo, escalating doses of RNA encoding one or more antigens is introduced into mice via intramuscular injection.

[0771] Mice are injected once, blood collected after 28 days, then injected again, with blood collected 14 days thereafter. Neutralizing antibodies against antigen of interest is measured via ELISA.

### Example 25

### Protection Against Infection.

[0772] To assess the ability of antigen encoding circRNAs to protect against or cure an infection, RNA encoding one or more antigens of a virus (such as influenza) is introduced into mice via intramuscular injection.

[0773] Mice receive an initial injection and boost injections of circRNA encoding one or more antigens. Protection from a virus such as influenza is determined by weight loss and mortality over 2 weeks.

### Example 26

### Protein Expression by Organ

[0774] Circular or linear RNA encoding FLuc was generated and loaded into transfer vehicles with the following formulation: 50% ionizable Lipid 10b-15 represented by

[chemical structure]

10% DSPC, 1.5% PEG-DMG, 38.5% cholesterol. CD-1 mice were dosed at 0.2 mg/kg and luminescence was measured at 6 hours (live IVIS) and 24 hours (live IVIS and ex vivo IVIS). Total Flux (photons/second over a region of interest) of the liver, spleen, kidney, lung, and heart was measured (FIGS. 25 and 26).

### Example 27

### Distribution of Expression in the Spleen

[0775] Circular or linear RNA encoding GFP is generated and loaded into transfer vehicles with the following formulation: 50% ionizable Lipid 10b-15 represented by

[chemical structure]

10% DSPC, 1.5% PEG-DMG, 38.5% cholesterol. The formulation is administered to CD-1 mice. Flow cytometry is run on spleen cells to determine the distribution of expression across cell types.

### Example 28

### Example 28a: Production of Nanoparticle Compositions

[0776] In order to investigate safe and efficacious nanoparticle compositions for use in the delivery of circular RNA to cells, a range of formulations are prepared and tested. Specifically, the particular elements and ratios thereof in the lipid component of nanoparticle compositions are optimized.

[0777] Nanoparticles can be made in a 1 fluid stream or with mixing processes such as microfluidics and T-junction mixing of two fluid streams, one of which contains the circular RNA and the other has the lipid components.

[0778] Lipid compositions are prepared by combining an ionizable lipid, optionally a helper lipid (such as DOPE, DSPC, or oleic acid obtainable from Avanti Polar Lipids, Alabaster, AL), a PEG lipid (such as 1,2-dimyristoyl-sn-glycerol methoxypolyethylene glycol, also known as PEG-DMG, obtainable from Avanti Polar Lipids, Alabaster, AL), and a structural lipid such as cholesterol at concentrations of about, e.g., 40 or 50 mM in a solvent, e.g., ethanol. Solutions should be refrigerated for storage at, for example, −20° C. Lipids are combined to yield desired molar ratios and diluted with water and ethanol to a final lipid concentration of e.g., between about 5.5 mM and about 25 mM.

### Example 28B: In Vivo Formulation Studies

[0779] In order to monitor how effectively various nanoparticle compositions deliver circRNA to targeted cells, different nanoparticle compositions including circRNA are prepared and administered to rodent populations. Mice are intravenously, intramuscularly, intraarterially, or intratumorally administered a single dose including a nanoparticle composition with a lipid nanoparticle formulation. In some instances, mice may be made to inhale doses. Dose sizes may range from 0.001 mg/kg to 10 mg/kg, where 10 mg/kg describes a dose including 10 mg of a circRNA in a nanoparticle composition for each 1 kg of body mass of the mouse. A control composition including PBS may also be employed.

[0780] Upon administration of nanoparticle compositions to mice, dose delivery profiles, dose responses, and toxicity of particular formulations and doses thereof can be measured by enzyme-linked immunosorbent assays (ELISA), bioluminescent imaging, or other methods. Time courses of protein expression can also be evaluated. Samples collected from the rodents for evaluation may include blood and tissue (for example, muscle tissue from the site of an intramuscular injection and internal tissue); sample collection may involve sacrifice of the animals.

[0781] Higher levels of protein expression induced by administration of a composition including a circRNA will be indicative of higher circRNA translation and/or nanoparticle composition circRNA delivery efficiencies. As the non-RNA components are not thought to affect translational machineries themselves, a higher level of protein expression is likely indicative of a higher efficiency of delivery of the circRNA by a given nanoparticle composition relative to other nanoparticle compositions or the absence thereof.

### Example 29

### T Cell Targeting

[0782] To target transfer vehicles to T cells, T cell antigen binders, e.g., anti-CD8 antibodies, are coupled to the surface of the transfer vehicle. Anti-T cell antigen antibodies are mildly reduced with an excess of DTT in the presence of EDTA in PBS to expose free hinge region thiols. To remove DTT, antibodies are passed through a desalting column. The heterobifunctional cross-linker SM(PEG)24 is used to anchor antibodies to the surface of circRNA-loaded transfer vehicles (Amine groups are present in the head groups of PEG lipids, free thiol groups on antibodies were created by DTT, SM(PEG)24 cross-links between amines and thiol groups). Transfer vehicles are first incubated with an excess of SM(PEG)24 and centrifuged to remove unreacted cross-linker. Activated transfer vehicles are then incubated with an excess of reduced anti-T cell antigen antibody. Unbound antibody is removed using a centrifugal filtration device.

### Example 30

circRNA Formulation Using Preformed Vesicles

[0783] Cationic lipid containing transfer vehicles are made using the preformed vesicle method. Cationic lipid, DSPC, cholesterol and PEG-lipid are solubilized in ethanol at a molar ratio of 40/10/40/10, respectively. The lipid mixture is added to an aqueous buffer (50 mM citrate, pH 4) with mixing to a final ethanol and lipid concentration of 30% (vol/vol) and 6.1 mg/mL respectively and allowed to equilibrate at room temperature for 2 min before extrusion. The hydrated lipids are extruded through two stacked 80 nm pore-sized filters (Nuclepore) at 22° C. using a Lipex Extruder (Northern Lipids, Vancouver, BC) until a vesicle diameter of 70-90 nm, as determined by Nicomp analysis, is obtained. For cationic lipid mixtures which do not form small vesicles, hydrating the lipid mixture with a lower pH buffer (50 mM citrate, pH 3) to protonate the phosphate group on the DSPC headgroup helps form stable 70-90 nm vesicles.

[0784] The FVII circRNA (solubilized in a 50 mM citrate, pH 4 aqueous solution containing 30% ethanol) is added to the vesicles, pre-equilibrated to 35° C., at a rate of ˜5 mL/min with mixing. After a final target circRNA/lipid ratio of 0.06 (wt wt) is achieved, the mixture is incubated for a further 30 min at 35° C. to allow vesicle re-organization and encapsulation of the FVII RNA. The ethanol is then removed and the external buffer replaced with PBS (155 mM NaCl, 3 mM Na2HP04, ImM KH2P04, pH 7.5) by either dialysis or tangential flow diafiltration. The final encapsulated circRNA-to-lipid ratio is determined after removal of unencapsulated RNA using size-exclusion spin columns or ion exchange spin columns.

### Example 31

Expression of Engineered Circular RNA with a Half-Life Extension Domain has Improved Pharmacokinetic Parameters than without a Half-Life Extension Domain

[0785] The trispecific antigen-binding protein encoded on a circRNA molecule of example 23 is administered to cynomolgus monkeys as a 0.5 mg/kg bolus injection intramuscularly. Another cynomolgus monkey group receives a comparable protein encoded on a circRNA molecule in size with binding domains to CD3 and GPC-3, but lacking a half-life extension domain. A third and fourth group receive a protein encoded on a circRNA molecule with CD3 and half-life extension domain binding domains and a protein with GPC-3 and half-life extension domains, respectively. Both proteins encoded by circRNA are comparable in size to the trispecific antigen-binding protein. Each test group consists of 5 monkeys. Serum samples are taken at indicated time points, serially diluted, and the concentration of the proteins is determined using a binding ELISA to CD3 and/or GPC-3.

[0786] Pharmacokinetic analysis is performed using the test article plasma concentrations. Group mean plasma data for each test article conforms to a multi-exponential profile when plotted against the time post-dosing. The data are fit by a standard two-compartment model with bolus input and first-order rate constants for distribution and elimination phases. The general equation for the best fit of the data for i.v. administration is: c(t)=Ae^{˜at}+Be^{˜pt}, where c(t) is the plasma concentration at time t, A and B are intercepts on the Y-axis, and a and β are the apparent first-order rate constants for the distribution and elimination phases, respectively. The a-phase is the initial phase of the clearance and reflects distribution of the protein into all extracellular fluid of the animal, whereas the second or β-phase portion of the decay curve represents true plasma clearance. Methods for fitting such equations are well known in the art. For example, A=D/V(a−k21)/(a−p), B=D/V(p−k21)/(a−p), and a and β (for α>β) are roots of the quadratic equation: r²+(k12+k21+k10)r+k21k10=0 using estimated parameters of V=volume of distribution, k10=elimination rate, k12=transfer rate from compartment 1 to compartment 2 and k21=transfer rate from compartment 2 to compartment 1, and D=the administered dose.

[0787] Data analysis: Graphs of concentration versus time profiles are made using KaleidaGraph (KaleidaGraph™ V. 3.09 Copyright 1986-1997. Synergy Software. Reading, Pa.). Values reported as less than reportable (LTR) are not included in the PK analysis and are not represented graphically. Pharmacokinetic parameters are determined by compartmental analysis using WinNonlin software (WinNonlin® Professional V. 3.1 WinNonlin™ Copyright 1998-1999. Pharsight Corporation. Mountain View, Calif). Pharmacokinetic parameters are computed as described in Ritschel WA and Kearns G L, 1999, EST: Handbook Of Basic Pharmacokinetics Including Clinical Applications, 5th edition, American Pharmaceutical Assoc., Washington, DC.

[0788] It is expected that the trispecific antigen-binding protein encoded on a circRNA molecule of Example 23 has improved pharmacokinetic parameters such as an increase in elimination half-time as compared to proteins lacking a half-life extension domain.

### Example 32

### In Vivo Analysis

[0789] Female CD-1 or female c57BL/6J mice ranging from 22-25 g were dosed at 0.5 mg/kg RNA intravenously. Six hours after injection, mice were injected intraperitoneally with 200 μL of D-luciferin at 15 mg/mL concentration. 5 minutes after injection, mice were anesthetized using isoflurane, and placed inside the IVIS Spectrum In Vivo Imaging System (Perkin Elmer) with dorsal side up. Whole body total IVIS flux of Lipids 22-S14, 93-S14, Lipid 10a-26 is presented in FIG. 32A. Post 10 minutes injection, mice were scanned for luminescence. Mice were euthanized and organs were extracted within 25 minutes of luciferin injection to scan for luminescence in liver, spleen, kidneys, lungs, and heart. Images (FIGS. 33A-B, 34A-B, 35A-B) were analyzed using Living Images (Perkin Elmer) software. Regions of interest were drawn to obtain flux and average radiance and analyzed for biodistribution of protein expression (FIG. 32A-B).

[0790] FIG. 32A illustrates the increased whole-body total flux observed from luciferase circRNA with Lipid 10a-26 LNPs compared to LNPs made with lipids 22-S14 and 93-S14. FIG. 32B shows the ex vivo IVIS analysis of tissues further highlighting the increased overall expression with Lipid 10a-26 while maintaining the desired spleen to liver ratios observed with lipids 22-S14 and 93-S14 despite the significant structural changes designed to improve expression. These data highlight the improvements afforded by Lipid 10a-26 compared to previously reported lipids.

[0791] Similar analysis as described above was also performed with circRNA encapsulated in LNPs formed with Lipid 10b-15 or Lipid 10a-53 or 10a-54. FIGS. 36A-C show the ex vivo IVIS analysis of tissues, respectively highlighting the overall expression with Lipid 10b-15, 10a-53, and 10a-54 while maintaining the desired spleen to liver ratios despite the significant structural changes designed to improve expression. FIG. 36D shows the results for PBS control. These data demonstrates the improvements afforded by Lipids 10b-15, 10a-53, and 10a-54 compared to previously reported lipids such as 93-S14 and 22-S14.

### Example 33

### Delivery of Luciferase

[0792] Human peripheral blood mononuclear cells (PBMCs) (Stemcell Technologies) were transfected with lipid nanoparticles (LNP) encapsulating firefly luciferase (f. luc) circular RNA and examined for luciferase expression. PBMCs from two different donors were incubated in vitro with five different LNP compositions, containing circular RNA encoding for firefly luciferase (200 ng), at 37° C. in RPMI, 2% human serum, IL-2 (10 ng/mL), and 50 uM BME. PBMCs incubated without LNP were used as a negative control. After 24 hours, the cells were lysed and analyzed for firefly luciferase expression based on bioluminescence (Promega BrightGlo).

[0793] Representative data are presented in FIGS. 37A and 37B, showing that that the tested LNPs are capable of delivering circular RNA into primary human immune cells resulting in protein expression.

### Example 34

### In Vitro Delivery of Green Fluorescent Protein (GFP) or Chimeric Antigen Receptor (CAR)

[0794] Human PBMCs (Stemcell Technologies) were transfected with LNP encapsulating GFP and examined by flow cytometry. PBMCs from five different donors (PBMC A-E) were incubated in vitro with one LNP composition, containing circular RNA encoding either GFP or CD19-CAR (200 ng), at 37° C. in RPMI, 2% human serum, IL-2 (10 ng/mL), and 50 uM BME. PBMCs incubated without LNP were used as a negative control. After 24, 48, or 72 hours post-LNP incubation, cells were analyzed for CD3, CD19, CD56, CD14, CD11b, CD45, fixable live dead, and payload (GFP or CD19-CAR).

[0795] Representative data are presented in FIGS. 38A and 38B, showing that the tested LNP is capable of delivering circular RNA into primary human immune cells resulting in protein expression.

### Example 35

### Multiple IRES Variants can Mediate Expression of Murine CD19 CAR In Vitro

[0796] Multiple circular RNA constructs, encoding anti-murine CD19 CAR, contains unique IRES sequences and were lipotransfected into 1C1C7 cell lines. Prior to lipotransfection, 1C1C7 cells are expanded for several days in complete RPMI Once the cells expanded to appropriate numbers, 1C1C7 cells were lipotransfected (Invitrogen RNAiMAX) with four different circular RNA constructs. After 24 hours, 1C1C7 cells were incubated with His-tagged recombinant murine CD19 (Sino Biological) protein, then stained with a secondary anti-His antibody. Afterwards, the cells were analyzed via flow cytometry.

[0797] Representative data are presented in FIGS. 39, showing that IRES sourced from the indicated virus (apodemus agrarius picornavirus, caprine kobuvirus, parabovirus, and salivirus) are capable of driving expression of an anti-mouse CD19 CAR in murine T cells.

### Example 36

### Murine CD19 CAR Mediates Tumor Cell Killing In Vitro

[0798] Circular RNA encoding anti-mouse CD19 CAR were electroporated into murine T cells to evaluate CAR-mediated cytotoxicity. For electroporation, T cells were electroporated with circular RNA encoding anti-mouse CD19 CAR using ThermoFisher's Neon Transfection System then rested overnight. For the cytotoxicity assay, electroporated T cells were co-cultured with Fluc+ target and non-target cells at 1:1 ratio in complete RPMI containing 10% FBS, IL-2 (10 ng/mL), and 50 uM BME and incubated overnight at 37° C. Cytotoxicity was measured using a luciferase assay system 24 hours post-co-culture (Promega Brightglo Luciferase System) to detect lysis of Fluc+ target and non-target cells. Values shown are calculated relative to the untransfected mock signal.

[0799] Representative data are presented in FIG. 40, showing that an anti-mouse CD19 CAR expressed from circular RNA is functional in murine T cells in vitro.

### Example 37

Functional Depletion of B Cells with a Lipid Encapsulated Circular RNA Encoding Murine CD19 CAR

[0800] C57BL/6J mice were injected with LNP formed with Lipid 10b-15, encapsulating circular RNA encoding anti-murine CD19 CAR. As a control, Lipid 10b-15 encapsulating circular RNA encoding firefly luciferase (f.Luc) were injected in different group of mice. Female C57BL.6J, ranging from 20-25 g, were injected intravenously with 5 doses of 0.5 mg/kg of LNP, every other day. Between injections, blood draws were analyzed via flow cytometry for fixable live/dead, CD45, TCRvb, B220, CD1 ib, and anti-murine CAR. Two days after the last injection, spleens were harvested and processed for flow cytometry analysis. Splenocytes were stained with fixable live/dead, CD45, TCRvb, B220, CD1 ib, NK1.1, F4/80, CD11c, and anti-murine CAR. Data from mice injected with anti-murine CD19 CAR LNP were normalized to mice that receivedf.Luc LNP.

[0801] Representative data are presented in FIGS. 41A, 41B, and 41C, showing that an anti-mouse CD19 CAR expressed from circular circRNA delivered in vivo with LNPs is functional in murine T cells in vivo.

### Example 38

Cd19 CAR Expressed from Circular RNA has Higher Yield and Greate Cytotoxic Effect Compared to that Expressed from mRNA

[0802] Circular RNA encoding an anti-CD19 chimeric antigen receptor, which includes, from N-terminus to C-terminus, a FMC63-derived scFv, a CD8 transmembrane domain, a 4-1BB costimulatory domain, and a CD3ζ intracellular domain, were electroporated into human peripheral T cells to evaluate surface expression and CAR-mediated cytotoxicity. For comparison, circular RNA-electroporated T cells were compared to mRNA-electroporated T cells in this experiment. For electroporation, CD3+ T cells were isolated from human PBMCs using commercially available T cell isolation kits (Miltenyi Biotec) from donor human PBMCs. After isolation, T cells were stimulated with anti-CD3/anti-CD28 (Stemcell Technologies) and expanded over 5 days at 37° C. in complete RPMI containing 10% FBS, IL-2 (10 ng/mL), and 5 μM BME. Five days post stimulation, T cells were electroporated with circular RNA encoding anti-human CD19 CAR using ThermoFisher's Neon Transfection System and then rested overnight. For the cytotoxicity assay, electroporated T cells were co-cultured with Fluc+ target and non-target cells at 1:1 ratio in complete RPMI containing 10% FBS, IL-2 (10 ng/mL), and 5 μM BME and incubated overnight at 37° C. Cytotoxicity was measured using a luciferase assay system 24 hours post-co-culture (Promega Brightglo Luciferase System) to detect lysis of Fluc+ target and non-target cells. Furthermore, an aliquot of electroporated T cells were taken and stained for live dead fixable staining, CD3, CD45, and chimeric antigen receptors (FMC63) at the day of analysis.

[0803] Representative data are presented in FIGS. 42 and 43. FIGS. 42A and 42B show that an anti-human CD19 CAR expressed from circular RNA is expressed at higher levels and longer than an anti-human CD19 CAR expressed from linear mRNA. FIGS. 43A and 43B show that an anti-human CD19 CAR expressed from circular RNA is exerts a greater cytotoxic effect relative to anti-human CD19 CAR expressed from linear mRNA.

### Example 39

Functional Expression of Two CARs from a Single Circular RNA

[0804] Circular RNA encoding chimeric antigen receptors were electroporated into human peripheral T cells to evaluate surface expression and CAR-mediated cytotoxicity. The purpose of this study is to evaluate if circular RNA encoding for two CARs can be stochastically expressed with a 2A (P2A) or an IRES sequence. For electroporation, CD3+ T cells were commercially purchased (Cellero) and stimulated with anti-CD3/anti-CD28 (Stemcell Technologies) and expanded over 5 days at 37° C. in complete RPMI containing 10% FBS, IL-2 (10 ng/mL), and 50 uM BME. Four days post stimulation, T cells were electroporated with circular RNA encoding anti-human CD19 CAR, anti-human CD19 CAR-2A-anti-human BCMA CAR, and anti-human CD19 CAR-IRES-anti-human BCMA CAR using ThermoFisher's Neon Transfection System then rested overnight. For the cytotoxicity assay, electroporated T cells were co-cultured with Fluc+K562 cells expressing human CD19 or BCMA antigens at 1:1 ratio in complete RPMI containing 10% FBS, IL-2 (10 ng/mL), and 50 uM BME and incubated overnight at 37° C. Cytotoxicity was measured using a luciferase assay system 24 hours post-co-culture (Promega BrightGlo Luciferase System) to detect lysis of Fluc+ target cells.

[0805] Representative data are presented in FIG. 44, showing that two CARs can be functionally expressed from the same circular RNA construct and exert cytotoxic effector function.

### Example 40

### In Vivo Circular RNA Transfection Using Cre Reporter Mice

[0806] Circular RNAs encoding Cre recombinase (Cre) are encapsulated into lipid nanoparticles as previously described. Female, 6-8 week old B6.Cg-Gt(ROSA)26Sortm9(CAG-tdTomato)Hze/J (Ai9) mice were dosed with lipid nanoparticles at 0.5 mg/kg RNA intravenously. Fluorescent tdTomato protein was transcribed and translated in Ai9 mice upon Cre recombination, meaning circular RNAs have been delivered to and translated in tdTomato+ cells. After 48 hr, mice were euthanized and the spleens were harvested, processed into a single cell suspension, and stained with various fluorophore-conjugated antibodies for immunophenotyping via flow cytometry.

[0807] FIG. 45A shows representative FACS plots with frequencies of tdTomato expression in various spleen immune cell (CD45+, live) subsets, including total myeloid (CD11b+), B cells (CD19+), and T cells (TCR-B+) following treatment with LNPs formed with Lipid 10a-27 or 10a-26 or Lipid 10b-15. Ai9 mice injected with PBS represented background tdTomato fluorescence. FIG. 45B quantifies the proportion of myeloid cells, B cells, and T cells expressing tdTomato (mean+std. dev., n=3), which is equivalent to the proportion of each cell population which has been successfully transfected with Cre circular RNA. LNPs made with Lipids 10a-27 and 10a-26 exhibit significantly higher myeloid and T cell transfection compared with Lipid 93-S14, highlighting the improvements conferred by lipid structural modifications.

[0808] FIG. 45C illustrates the proportion of additional splenic immune cell populations expressing tdTomato with Lipids 10a-27 and 10a-26 (mean+std. dev., n=3), which also include NK cells (NKp46+, TCR-B−), classical monocytes (CD11b+, Ly-6G-, Ly-6C_hi), nonclassical monocytes (CD11b+, Ly-6G-, Ly-6C_lo), neutrophils (CD11b+, Ly-6G+), and dendritic cells (CD11c+, MHC-II+). These experiments demonstrate that LNPs made with Lipids 10a-27 and 10a-26 and Lipid 10b-15 are effective at delivering circular RNAs to many splenic immune cell subsets in mice and lead to successful protein expression from the circular RNA in those cells.

### Example 41

### Example 41A: Built-In polyA Sequences and Affinity-Purification to Produce Immune-Silent Circular RNA

[0809] PolyA sequences (20-30 nt) were inserted into the 5′ and 3′ ends of the RNA construct (precursor RNA with built-in polyA sequences in the introns). See, for example, FIG. 89A. Precursor RNA and introns can alternatively be polyadenylated post-transcriptionally using, e.g., E coli. polyA polymerase or yeast polyA polymerase, which requires the use of an additional enzyme.

[0810] Circular RNA in this example was circularized by in vitro transcription (IVT) and affinity-purified by washing over a commercially available oligo-dT resin to selectively remove polyA-tagged sequences (including free introns and precursor RNA) from the splicing reaction. See, for example, FIG. 90. The IVT was performed with a commercial IVT kit (New England Biolabs) or a customized IVT mix (Orna Therapeutics), containing guanosine monophosphate (GMP) and guanosine triphosphate (GTP) at different ratios (GMP:GTP=8, 12.5, or 13.75). In some embodiments, GMP at a high GMP:GTP ratio may be preferentially included as the first nucleotide, yielding a majority of monophosphate-capped precursor RNAs. As a comparison, the circular RNA product was alternatively purified by the treatment with Xrn1, Rnase R, and Dnase I (enzyme purification). See, for example, FIG. 92.

[0811] Immunogenicity of the circular RNAs prepared using the affinity purification or enzyme purification process were then assessed. Briefly, the prepared circular RNAs were transfected into A549 cells. After 24 hours, the cells were lysed and interferon beta-1 induction relative to mock samples was measured by qPCR. 3p-hpRNA, a triphosphorylated RNA, was used as a positive control.

[0812] FIGS. 46B and 46C and FIGS. 99A and 99B show that the negative selection affinity purification removes non-circular products from splicing reactions when polyA sequences are included on elements that are removed during splicing and present in unspliced precursor molecules. FIG. 46D shows circular RNAs prepared with tested IVT conditions and purification methods are all immunoquiescent. These results suggest the negative selection affinity purification is equivalent or superior to enzyme purification for circular RNA purification and that customized circular RNA synthesis conditions (IVT conditions) may reduce the reliance on GMP excess to achieve maximal immunoquiescence.

### Example 41B: Dedicated Binding Site and Affinity-Purification for Circular RNA Production

[0813] Instead of polyA tags, one can include specifically design sequences (DBS, dedicated binding site). See, for example, FIG. 47A.

[0814] Instead of a polyA tag, a dedicated binding site (DBS), such as a specifically designed complementary oligonucleotide that can bind to a resin, may be used to selectively deplete precursor RNA and free introns. In this example, DBS sequences (30 nt) were inserted into the 5′ and 3′ ends of the precursor RNA, such as TATAATTCTACCCTATTGAGGCATTGACTA (SEQ ID NO: 3269), shown in FIG. 47A. RNA was transcribed and the transcribed product was washed over a custom complementary oligonucleotide linked to a resin.

[0815] FIGS. 47B and 47C demonstrates that including the designed DBS sequence in elements that are removed during splicing enables the removal of unspliced precursor RNA and free intron components in a splicing reaction, via negative affinity purification.

### Example 41C: Production of a Circular RNA Encoding Dystrophin

[0816] A 12 kb 12,000 nt circular RNA encoding dystrophin was produced by in vitro transcription of RNA precursors followed by enzyme purification using a mixture of Xrn1, DNase 1, and RNase R to degrade remaining linear components. FIG. 48 shows that the circular RNA encoding dystrophin was successfully produced.

### Example 41D: Negative Selection Affinity-Purification of Circular RNA

[0817] Affinity sequences are added to precursor RNAs, and circular RNA is produced by in vitro transcription (IVT), as described in Examples 51A and 51B. Oligonucleotides comprising a sequence that is 100% complementary to the affinity sequences are conjugated to a resin, or a commercially available resin conjugated to oligonucleotides complementary to the affinity sequences is obtained. The IVT reaction mixture may be directly added to the resin. Alternatively, the IVT reaction solution is buffer exchanged into binding buffer, such as a Tris buffer, comprising greater than 1 mM one or more monovalent salts, such as NaCl or KCl, or the one or more monovalent salts are simply added to the IVT reaction mixture before the IVT reaction mixture is added to the resin. Circular RNA that does not comprise an affinity sequence is then affinity-purified by washing the solution comprising linear RNA and circular RNA over the resin. The solution may be heated during this process in order to denature aberrantly hybridized sequences. The eluent from the beads is collected and buffer exchanged into water or storage buffer comprising 1 mM sodium citrate, pH 6.5, using a filtration threshold of 10-300 kDa.

### Example 42

### 5′ Spacer Between 3′ Intron Segment and the IRES Improves Circular RNA Expression

[0818] Expression level of purified circRNAs with different 5′ spacers between the 3′ intron segment and the IRES in Jurkat cells were compared. Briefly, luminescence from secreted Gaussia luciferase in supernatant was measured 24 hours after electroporation of 60,000 cells with 250 ng of each RNA.

[0819] Additionally, stability of purified circRNAs with different 5′ spacers between the 3′ intron segment and the IRES in Jurkat cells were compared. Briefly, luminescence from secreted Gaussia luciferase in supernatant was measured over 2 days after electroporation of 60,000 cells with 250 ng of each RNA and normalized to day 1 expression.

[0820] The results are shown in FIGS. 49A and 49B, indicating that adding a spacer can enhance IRES function and the importance of sequence identity and length of the added spacer. A potential explanation is that the spacer is added right before the IRES and likely functions by allowing the IRES to fold in isolation from other structured elements such as the intron segments.

### Example 43

[0821] This example describes deletion scanning from 5′ or 3′ end of the caprine kobuvirus TRES. TRES borders are generally poorly characterized and require empirical analysis, and this example can be used for locating the core functional sequences required for driving translation. Briefly, circular RNA constructs were generated with truncated IRES elements operably linked to a Gaussia luciferase coding sequence. The truncated IRES elements had nucleotide sequences of the indicated lengths removed from the 5′ or 3′ end. Luminescence from secreted Gaussia luciferase in supernatant was measured 24 and 48 hours after electroporation of primary human T cells with RNA. Stability of expression was calculated as the ratio of the expression level at the 48-hour time point relative to that at the 24-hour time point.

[0822] As shown in FIG. 50, deletion of more than 40 nucleotides from the 5′ end of the IRES reduced expression and disrupted IRES function. Stability of expression was relatively unaffected by the truncation of the IRES element but expression level was substantially reduced by deletion of 141 nucleotides from the 3′ end of the IRES, whereas deletion of 57 or 122 nucleotides from the 3′ end had a positive impact on the expression level.

[0823] It was also observed that deletion of the 6-nucleotide pre-start sequence reduced the expression level of the luciferase reporter. Replacement of the 6-nucleotide sequence with a classical Kozak sequence (GCCACC) did not have a significant impact but at least maintained expression.

### Example 44

[0824] This example describes modifications (e.g., truncations) of selected selected IRES sequences, including Caprine Kobuvirus (CKV) IRES, Parabovirus IRES, Apodemus Picornavirus (AP) IRES, Kobuvirus SZAL6 IRES, Crohivirus B (CrVB) IRES, CVB3 IRES, and SAFV IRES. Briefly, circular RNA constructs were generated with truncated IRES elements operably linked to a Gaussia luciferase coding sequence. HepG2 cells were transfected with the circular RNAs. Luminescence in the supernatant was assessed 24 and 48 hours after transfection. Stability of expression was calculated as the ratio of the expression level at the 48-hour time point relative to that at the 24-hour time point.

[0825] As shown in FIG. 51, truncations had variable effects depending on the identity of the IRES, which may depend on the initiation mechanism and protein factors used for translation, which often differs between IRESs. 5′ and 3′ deletions can be effectively combined, for example, in the context of CKV IRES. Addition of a canonical Kozak sequence in some cases significantly improved expression (as in SAFV, Full vs Full+K) or diminished expression (as in CKV, 5d40/3d122 vs 5d40/3d122+K).

### Example 45

[0826] This example describes modifications of CK-739, AP-748, and PV-743 IRES sequences, including mutations and alternative translation initiation sites. Briefly, circular RNA constructs were generated with modified IRES elements operably linked to a Gaussia luciferase coding sequence. Luminescence from secreted Gaussia luciferase in supernatant was measured 24 and 48 hours after transfection of 1C1C7 cells with RNA.

[0827] CUG was the most commonly found alternative start site but many others were also characterized. These triplets can be present in the IRES scanning tract prior to the start codon and can affect translation of correct polypeptides. Four alternative start site mutations of the IRES having the sequence of SEQ ID NO: 3282 were created. As shown in FIG. 52, mutations of alternative translation initiation sites in the CK-739 IRES affected translation of correct polypeptides, positively in some instances and negatively in other instances. Mutation of all the alternative translation initiation sites reduced the level of translation.

[0828] Alternative Kozak sequences, 6 nucleotides before start codon, can also affect expression levels. The 6-nucleotide sequence upstream of the start codon were gTcacG, aaagtc, gTcacG, gtcatg, gcaaac, and acaacc, respectively, in CK-739 IRES and Sample Nos. 1-5 in the “6 nt Pre-Start” group. As shown in FIG. 52, substitution of certain 6-nucleotide sequences prior to the start codon affected translation.

[0829] It was also observed that 5′ and 3′ terminal deletions in AP-748 and PV-743 IRES sequences reduced expression. However, in the CK-739 IRES, which had a long scanning tract, translation was relatively unaffected by deletions in the scanning tract.

### Example 46

[0830] This example describes modifications of selected IRES sequences by inserting 5′ and/or 3′ untranslated regions (UTRs) and creating IRES hybrids. Briefly, circular RNA constructs were generated with modified IRES elements operably linked to a Gaussia luciferase coding sequence. Luminescence from secreted Gaussia luciferase in supernatant was measured 24 and 48 hours after transfection of HepG2 cells with RNA.

[0831] IRES sequences with UTRs inserted may comprise a sequence selected from SEQ ID NOs: 3192-3199. As shown in FIG. 53, insertion of 5′ UTR right after the 3′ end of the IRES and before the start codon slightly increased the translation from Caprine Kobuvirus (CK) IRES but in some instances abrogated translation from Salivirus SZ1 IRES. Insertion of 3′ UTR right after the stop cassette had no impact on both IRES sequences.

[0832] Hybrid CK IRES sequences were made with CK IRES as a base, with specific regions of the CK IRES replaced with similar-looking structures from other IRES sequences, for example, SZ1 and AV (Aichivirus). As shown in FIG. 53, certain hybrid synthetic IRES sequences were functional, indicating that hybrid IRES can be constructed using parts from distinct TRES sequences that show similar predicted structures while deleting these structures completely abrogates IRES function.

### Example 47

[0833] This example describes modifications of circular RNAs by introducing stop codon or cassette variants. Briefly, circular RNA constructs were generated with IRES elements operably linked to a Gaussia luciferase coding sequence followed by variable stop codon cassettes, which included a stop codon in each frame and two stop codons in the reading frame of the Gaussia luciferase coding sequence. 1C1C7 cells were transfected with the circular RNAs. Luminescence in supernatant was assessed 24 and 48 hours after transfection.

[0834] The sequences of the stop codon cassettes comprise a sequence selected from SEQ ID NOs: 3203-3209. As shown in FIG. 54, certain stop codon cassettes improved expression levels, although they had little impact on expression stability. In particular, a stop cassette with two frame 1 (the reading frame of the Gaussia luciferase coding sequence) stop codons, the first being TAA, followed by a frame 2 stop codon and a frame 3 stop codon, is effective for promoting functional translation.

### Example 48

[0835] This example describes modifications of circular RNAs by inserting 5′ UTR variants. Briefly, circular RNA constructs were generated with IRES elements with 5′ UTR variants inserted between the 3′ end of the IRES and the start codon, the IRES being operably linked to a Gaussia luciferase coding sequence. 1C1C7 cells were transfected with the circular RNAs. Luminescence in supernatant was assessed 24 and 48 hours after transfection.

[0836] The sequences of the 5′ UTR variants comprise a sequence selected from SEQ ID NOs: 3192-3202. As shown in FIG. 55, a CK TRES with a canonical Kozak sequence (UTR4) was more effective when a 36-nucleotide unstructured/low GC spacer sequence was added (UTR2), suggesting that the GC-rich Kozak sequences may interfere with core TRES folding. Using a higher-GC/structured spacer with a kozak sequence did not show the same benefit (UTR3), possibly due to interference with IRES folding by the spacer itself. Mutating the kozak sequence to gTcacG (UTR1) enhanced translation to the same level as the Kozak+spacer alternative without the need for a spacer.

### Example 49

[0837] This example describes the impact of miRNA target sites in circular RNAs on expression levels. Briefly, circular RNA constructs were generated with IRES elements operably linked to a human erythropoietin (hEPO) coding sequence, where 2 tandem miR-122 target sites were inserted into the construct. miR-122-expressing Huh7 cells were transfected with the circular RNAs. hEPO expression in supernatant was assessed 24 and 48 hours after transfection by sandwich ELISA.

[0838] As shown in FIG. 56, the hEPO expression level was abrogated where the miR-122 target sites were inserted into the circular RNA. This result demonstrates that expression from circular RNA can be regulated by miRNA. As such, cell type- or tissue-specific expression can be achieved by incorporating target sites of the miRNAs expressed in the cell types in which expression of the recombinant protein is undesirable.

### Example 50

[0839] This example shows immune cell expression of mOX40L circRNA in wildtype mice.

[0840] C57BL/6 mice (female, 6-8 weeks, n=3 or 4 per group) were injected intravenously with 0.5 mg/kg mOX40L circRNA LNPs or PBS. After 24 hours, mice were euthanized and their spleens were collected and manually processed into single cell suspensions. Splenocytes were stained for dead cells (LiveDead Fixable Aqua, Thermo) and with anti-mouse antibodies (TCR-B chain, PacBlue, H57-597; CD11b, FITC, ICRF44; B220, PE, RA3-6B2; CD45, PerCP, 30-F11; mOX40L, AF647, RM134L; NK1.1, APC/750, PK136; TruStain FcX, 93; all antibodies from Biolegend) at 1:200. Flow cytometry was performed using an Attune NxT Flow Cytometer (Thermo).

[0841] The percent of mOX40L+ cells in splenic myeloid (CD11b+), T cells (TCR-B+), and NK cells (NK1.1+) is presented in FIG. 57. Notably, significantly different transfection efficiencies are observed between the same formulations injected intravenously in different buffers (hypotonic PBS, isotonic PBS, and isotonic TBS). 10a-27 4.5D LNP in hypotonic PBS results in approximately 14% myeloid cell transfection, 6% T cell transfection, and 21% NK cell transfection in the spleen. Of the formulations injected in isotonic buffer, 10a-27 DSPC 5.7A LNP demonstrates myeloid, T cell, and NK cell transfection in the spleen (9%, 3%, and 8%, respectively).

### Example 51

[0842] This example shows circRNA-LNP CAR-mediated B cell depletion in mice.

[0843] C57BL/6 mice (female, 6-8 weeks, n=5 per group) were injected intravenously with 0.5 mg/kg aCD19-CAR circRNA LNPs or control FLuc circRNA LNPs on Days 0, 2, 5, 7, and 9. On Days −1, 1, 8 and 12, submandibular bleeds were performed to collect blood. 30 μL of blood was lysed with ACK lysis buffer and washed with MACS buffer to isolate immune cells. On Day 12, mice were euthanized and their spleens were collected and manually processed into single cell suspensions. To assess the frequency of B cells in the blood and spleen, these single cell suspensions were stained for dead cells (LiveDead Fixable Aqua, Thermo) and stained with anti-mouse antibodies (TCR-B chain, PacBlue, H57-597; CD11b, FITC, ICRF44; B220, PE, RA3-6B2; CD45, PerCP, 30-F11; TruStain FcX, 93; all antibodies from Biolegend) at 1:200. Flow cytometry was performed using an Attune NxT Flow Cytometer (Thermo).

[0844] FIG. 58A quantifies the B cell depletion observed in this study, as defined by percentage of B220+ B cells of live, CD45+ immune cells. The B cell depletion in the aCD19-CAR circRNA LNP group was compared to its respective FLuc circRNA LNP control on Days 8 and 12 (for blood) and Day 12 (for spleen). In the blood, aCD19-CAR 10a-27 (4.5D) and 10a-26 (4.5D) LNPs resulted in approximately 28% and 17% reductions, respectively, in % B220+ of live CD45+ at Day 8 compared to FLuc control. In the spleen, aCD19-CAR 10a-27 (4.5D) and 10a-26 (4.5D) LNPs resulted in approximately 5% and 9% reductions in % B220+ of live CD45+ at Day 12 compared to FLuc control as shown in FIG. 58B. In all, these results suggest that CAR-mediated B cell depletion is occurring in mice treated with aCD19-CAR circRNA LNPs for Lipid 10a-27 (4.5D) and Lipid 10a-26 (4.5D).

[0845] In addition, FIG. 58C shows the percent weight gain of mice in this study. There was not significant weight loss on average from the 10a-27 4.5D or 10a-26 4.5D LNP treated mice (5×0.5 mg/kg over 9 days), suggesting that these LNPs may be well-tolerated in mice at this dose and schedule.

TABLE 3
H. Characterization of LNPs

| | Z-Average | | RNA Encapsulation |
|---|---|---|---|
| Formulation | (nm) | PDI | Efficiency (%) |
| 10a-27 (4.5D), oLuc | 65 | 0.03 | 93 |
| 10a-27 (4.5D), oaCD19-CAR | 74 | 0.02 | 96 |
| 10a-26 (4.5D), oLuc | 71 | 0.04 | 91 |
| 10a-26, (4.5D), oaCD19-CAR | 71 | 0.04 | 93 |

### Example 52

### LNP and Circular RNA Construct Containing Anti-CD19 CAR Reduces B Cells in the Blood and Spleen In Vivo.

[0846] Circular RNA constructs encoding an anti-CD19 CAR expression were encapsulated within lipid nanoparticles as described above. For comparison, circular RNAs encoding luciferase expression were encapsulated within separate lipid nanoparticle.

[0847] C57BL/6 mice at 6 to 8 weeks old were injected with either LNP solution every other day for a total of 4 LNP injections within each mouse. 24 hours after the last LNP injection, the mice's spleen and blood were harvested, stained, and analyzed via flow cytometry. As shown in FIG. 59A and FIG. 59B, mice containing LNP-circular RNA constructs encoding an anti-CD19 CAR led to a statistically significant reduction in CD19+ B cells in the peripheral blood and spleen compared to mice treated with LNP-circular RNA encoding a luciferase.

### Example 53

IRES Sequences Contained within Circular RNA Encoding CARs Improves CAR Expressions and Cytotoxicity of T-Cells.

[0848] Activated murine T-cells were electroporated with 200 ng of circular RNA constructs containing a unique IRES and a murine anti-CD19 1D3ζ CAR expression sequence. The IRES contained in these constructs were derived either in whole or in part from a Caprine Kobuvirus, Apodemus Picornavirus, Parabovirus, or Salivirus. A Caprine Kobuvirus derived IRES was additionally codon optimized. As a control, a circular RNA containing a wild-type zeta mouse CAR with no IRES was used for comparison. The T-cells were stained for the CD-19 CAR 24 hours post electroporation to evaluate for surface expression and then co-cultured with A20 Fluc target cells. The assay was then evaluated for cytotoxic killing of the Fluc+A20 cells 24 hours after co-culture of the T-cells with the target cells.

[0849] As seen in FIGS. 60A, 60B, 60C, and 61, the unique IRES were able to increase the frequency that the T-cells expressed the CAR protein and level of CAR expression on the surface of the cells. The increased frequency of expression of the CAR protein and level of CAR expression on the surface of cells lead to an improved anti-tumor response.

### Example 54

Cytosolic and Surface Proteins Expressed from Circular RNA Construct in Primary Human T Cells.

[0850] Circular RNA construct contained either a sequence encoding for a fluorescent cytosolic reporter or a surface antigen reporter. Fluorescent reporters included green fluorescent protein, mCitrine, mWasabi, Tsapphire. Surface reporters included CD52 and Thy1.1^{bio}. Primary human T cells were activated with an anti-CD3/anti-CD28 antibody and electroporated 6 days post activation of the circular RNA containing a reporter sequence. T cells were harvested and analyzed via flow cytometry 24 hours post electroporation. Surface antigens were stained with commercially available antibodies (e.g., Biolegend, Miltenyi, and BD).

[0851] As seen in FIG. 62A and FIG. 62B, cytosolic and surface proteins can be expressed from circular RNA encoding the proteins in primary human T cells.

### Example 55

Circular RNAs Containing Unique IRES Sequences have Improved Translation Expression Over Linear mRNA.

[0852] Circular RNA constructs contained a unique IRES along with an expression sequence for Firefly luciferase (FLuc).

[0853] Human T cells from 2 donors were enriched and stimulated with anti-CD3/anti-CD28 antibodies. After several days of proliferation, activated T cells were harvested and electroporated with equal molar of either mRNA or circular RNA expressing FLuc payloads. Various IRES sequences, including those derived from Caprine Kobuvirus, Apodemus Picornavirus, and Parabovirus, were studied to evaluate expression level and durability of the payload expression across 7 days. Across the 7 days, the T cells were lysed with Promega Brightglo to evaluate for bioluminescence.

[0854] As shown in FIGS. 63C-63G, the presence of an IRES within a circular RNA can increase translation and expression of a cytosolic protein by orders of magnitude and can improve expression compared to linear mRNA. This was found consistent across multiple human T cell donors.

### Example 56

### Example 56A: LNP-Circular RNA Encoding Anti-CD19 Mediates Human T Cell Killing of K562 Cells

[0855] Circular RNA constructs contained a sequence encoding for anti-CD19 antibodies. Circular RNA constructs were then encapsulated within a lipid nanoparticle (LNP).

[0856] Human T cells were stimulated with anti-CD3/anti-CD28 and left to proliferate up to 6 says. At day 6, LNP-circular RNA and ApoE3 (1 μg/mL) were co-cultured with the T cells to mediate transfection. 24 hours later, Fluc+K562 cells were electroporated with 200 ng of circular RNA encoding anti-CD19 antibodies and were later co-cultured at day 7. 48 hours post co-culture, the assay was assessed for CAR expression and cytotoxic killing of K562 cells through Fluc expression.

[0857] As shown in FIG. 64A and FIG. 64B, there is T cell expression of anti-CD19 CAR from the LNP-mediated delivery of a CAR in vitro to T cells and its capability to lyse tumor cells in a specific, antigen dependent manner in engineered K562 cells.

### Example 56B: LNP-Circular RNA Encoding Anti-BCMA Antibody Mediates Human T Cell Killing of K562 Cells

[0858] Circular RNA constructs contained a sequence encoding for anti-BCMA antibodies. Circular RNA constructs were then encapsulated within a lipid nanoparticle (LNP).

[0859] Human T cells were stimulated with anti-CD3/anti-CD28 and left to proliferate up to 6 says. At day 6, LNP-circular RNA and ApoE3 (1 μg/mL) were co-cultured with the T cells to mediate transfection. 24 hours later, Fluc+K562 cells were electroporated with 200 ng of circular RNA encoding anti-BCMA antibodies and were later co-cultured at day 7. 48 hours post co-culture, the assay was assessed for CAR expression and cytotoxic killing of K562 cells through Fluc expression.

[0860] As shown in FIG. 64B, there is T cell expression of BCMA CAR from the LNP-mediated delivery of a CAR in vitro to T cells and its capability to lyse tumor cells in a specific, antigen dependent manner in engineered K562 cells.

### Example 57

### Anti-CD19 CAR T Cells Exhibit Anti-Tumor Activity In Vitro.

[0861] Human T cells were activated with anti-CD3/anti-CD28 and electroporated once with 200 ng of anti-CD19 CAR-expressing circular RNA. Electroporated T cells were co-cultured with FLuc+ Nalm6 target cells and non-target Fluc+K562 cells to evaluate CAR-mediated killing. After 24 hours post co-culture, the T cells were lysed and examined for remanent FLuc expression by target and non-target cells to evaluate expression and stability of expression across 8 days total.

[0862] As shown in FIGS. 65A and 65B, T cells express circular RNA CAR constructs in specific, antigen-dependent manner. Results also shows improved cytotoxicity of circular RNAs encoding CARs compared to linear mRNA encoding CARs and delivery of a functional surface receptor.

### Example 58

Effective LNP Transfection of Circular RNA Mediated with ApoE3

[0863] Human T cells were stimulated with anti-CD3/anti-CD28 and left to proliferate up to 6 days. At day 6, lipid nanoparticle (LNP) was and circular RNA expressing green fluorescence protein solution with or without ApoE3 (1 μg/mL) were co-cultured with the T cells. 24 hours later, the T cells were stained for live/dead T cells and the live T cells were analyzed for GFP expression on a flow cytometer.

[0864] As shown by FIGS. 66A-66E, efficient LNP transfection can be mediated by ApoE3 on activated T cells, followed by significant payload expression. These results were exhibited across multiple donors.

### Example 59

[0865] This example shows in vivo cytokine response after IV injection of 0.2 mg/kg circRNA preparations encapsulated in a lipid nanoparticle formulation. circRNA splicing reactions synthesized with GTP as a precursor RNA initiator and splicing nucleotide incited greater cytokine responses than purified circRNA and linear mlyI-mRNA due to the presence of triphosphorylated 5′ termini in the splicing reaction. Levels of IL--10, IL-6, IL-10, IL-12p70, RANTES, TNFα were measured from blood drawn 6 hours following intravenous injection of the LNP-formulated circRNA preparation. Mice injected with PBS were used as a control.

[0866] As seen in FIG. 67, circRNA splicing reactions synthesized with GTP as a precursor RNA initiator and splicing nucleotide incite greater cytokine responses than purified circRNA and linear mlW-mRNA due to the presence of triphosphorylated 5′ termini in the splicing reaction.

### Example 60

[0867] This example illustrates intramuscular delivery of varying doses of lipid nanoparticle containing circular RNAs. Mice were dosed with either 0.1 μg, 1 μg, or 10 μg of circRNA formulated in lipid nanoparticles. Whole body IVIS imagine was conducted at 6 hours following an injection of luciferin (FIG. 68A and FIG. 68B). Ex vivo IVIS imaging was conducted at 24-hour. Flux values for liver, quad, and calf are shown in FIG. 68C. FIG. 69B and FIG. 69C show that the expression of the circular RNA is present in the muscle tissue of the mice.

### Example 61

[0868] This example illustrates expression of multiple circular RNAs in LNP formulations. Circular RNA constructs encoding either hEPO or fLuc were dosed in a single and mixed set of LNPs. hEPO concentration in the serum (FIG. 69A) and total flux by IVIS imaging (FIG. 69B) was determined. The results show that the circular RNA hEPO or fLuc constructs individually formulated or co-formulated expressed protein efficiently.

### Example 62

### Example 62A: Hepatocyte Plating and Culture

[0869] Primary human hepatocytes (PHH), primary mouse hepatocytes (PMH), primary cynomolgus monkey hepatocytes (PCH) were thawed and resuspended in hepatocyte thawing medium (Xenotech, cat #K8600/K8650) followed by centrifugation. The supernatant was discarded, and the pelleted cells were resuspended in hepatocyte plating medium (Xenotech, cat #K8200). Cells were counted via hemocytometer and plated on Bio-coat collagen-I coated 96-well plates at a density of 25,000 cells/well for PHH, 25,000 cells/well for PMH, and 50,000 cells/well for PCH in 100 μL of plating media. Plated cells were allowed to settle and adhere for 6 hours in a tissue culture incubator at 37° C. and 5% CO₂ atmosphere. After incubation cells were checked for monolayer formation after which the plating media was aspirated and replaced with 100 ul of culture media (Xenotech, cat #K8300). Media was replaced every 24 hours for the duration of the experiment.

### Example 62B: In Vitro Screening of LNP Formulated Circular RNA Encoding Firefly Luciferase in Primary Human, Mouse, and Cynomolgus Monkey Hepatocytes

[0870] A circular RNA construct comprising a TIE and a coding element encoding for firefly luciferase was produced and transfected into LNPs. Various concentrations of LNPs formulated with the circularized RNA (oRNA) were diluted in hepatocyte media supplemented with 3% fetal bovine serum (FBS) (ThermoFisher, cat #A3160401). Media was aspirated from the cells prior to addition of 100 μL of LNP/FBS/media mixture to the cells.

[0871] Luciferase activity was detected in primary human (FIG. 82A), mouse (FIG. 82B), and cynomolgus monkey (FIG. 82C) hepatocyte. 24 hours post-transfection plates were removed from the incubator and allowed to equilibrate to room temperature for 15 mins. A volume of 100 μL of Firefly Luciferase one-step glow assay working solution (Pierce, cat #16196) was added to each well. The plate was placed on a microplate shaker (ThermoFisher, cat #S72050) and mixed at 300 rpm for 3 min. Post-mixing, the plate was allowed to incubate at room temperature for 10 min. Luminescence was read using a Varioskan or Bio-Tek Cytation5 instrument.

[0872] As seen in FIG. 82A, FIG. 82B, and FIG. 82C, TIE containing circular RNAs are capable of driving firefly luciferase protein expression in primary hepatocytes from multiple species in a dose-dependent manner when transfected in vitro with an LNP.

### Example 62C: In Vitro Screening of LNP Formulated Circular RNA Encoding Firefly Luciferase in Multiple Primary Human Hepatocyte Donors

[0873] A circular RNA construct comprising a TIE and a coding element encoding for firefly luciferase was produced and transfected into LNPs. Various concentrations of LNPs formulated with the circularized RNA (oRNA) were diluted in hepatocyte media supplemented with 3% fetal bovine serum (FBS) (ThermoFisher, cat #A3160401). Media was aspirated from the cells prior to addition of 100 ul of LNP/FBS/media mixture to the cells.

[0874] Luciferase activity was detected in primary human (FIG. 83A), mouse (FIG. 83B), and cynomolgus monkey (FIG. 83C) hepatocyte. 24 hours post-transfection plates were removed from the incubator and allowed to equilibrate to room temperature for 15 mins. A volume of 100 μL of Firefly Luciferase one-step glow assay working solution (Pierce, cat #16196) was added to each well. The plate was placed on a microplate shaker (ThermoFisher, cat #S72050) and mixed at 300 rpm for 3 min. Post-mixing, the plate was allowed to incubate at room temperature for 10 min. Luminescence was read using a Varioskan or Bio-Tek Cytation5 instrument.

[0875] As seen in FIG. 83A-83C, TIE containing circular RNAs are capable of driving firefly luciferase protein expression in primary hepatocytes from multiple human donors in a dose-dependent manner when transfected in vitro with an LNP.

### Example 63

In Vitro Expression of LNP Formulated with Circular RNA Encoding for GFP in Multiple Human Cell Models.

[0876] A circular RNA construct was produced comprising a TIE and coding element encoding for a GFP protein. LNP were formulated with the circular RNA construct. Then various concentrations of the LNP containing the circular RNA construct were diluted in hepatocyte media supplemented with 3% fetal bovine (FBS) (ThermoFisher, cat #A3160401). Media was aspirated from the cells prior to addition of 100 ul of LNP/FBS/media mixture to the cells.

[0877] HeLa (human cervical adenocarcinoma; ATCC, cat #CCL-2), HEK293 (human embryonic kidney; ATCC, cat #CRL-1573), and HUH7 (human liver hepatocellular carcinoma; JCRB, cat #JCRB0403) were transfected as previously described with LNP formulated oRNAs. Twenty-four hours post-transfection, the media was removed and the cells were trypsinized. The trypsinized cells were neutralized with PBS supplemented with 10% FBS, harvested, and transferred to a tube. The tube was centrifuged to pellet the cells and the supernatant was aspirated. The pellet was stored at −80° C. prior to lysis. For lysis the cells were thawed on ice and were lysed with 100 μL/well RIPA buffer (Boston Bio Products, Cat. BP-115) plus freshly added 1 mM DTT, and 250 U/mL Benzonase (EMD Millipore, cat #71206-3), and protease inhibitor mixture consisting of complete protease inhibitor cocktail (Sigma, cat #11697498001). Cells were kept on ice for 30 minutes at which time NaCl (1M final concentration) was added. Cell lysates were thoroughly mixed and retained on ice for 30 min. The whole cell extracts (WCE) were centrifuged to pellet debris. A Bradford assay (Bio-Rad, cat #500-0001) was used to assess protein content of the lysates. The Bradford assay procedure was completed according to the manufacturer's protocol. Extracts were stored at −20° C. prior to use. Western blots were performed to assess GFP protein levels. Whole cell extract lysates were mixed with Laemmli buffer and denatured at 95° C. for 10 min. Western blots were run using the NuPage system on 4-12% Bis-Tris gels (ThermoFisher, cat #NPO335BOX) according to the manufacturer's protocol followed by wet transfer onto 0.45 μm nitrocellulose membrane (ThermoFisher, cat #LC2001). After transfer membranes were rinsed thoroughly with water and stained with Ponceau S solution (Boston Bio Products, cat #ST-180) to confirm complete and even transfer. Blots were blocked using 5% Dry Milk in TBS for 30 minutes on a lab rocker at room temperature. Blots were rinsed with 1×TBST (Boston BioProducts, cat #IBB-180) and probed with mouse dylight 680-tagged anti-GFP monoclonal antibody (ThermoFisher, cat #MA515256D680) at 1:1,000 in 1×TBST. Anti-3-actin or GAPDH was used as a loading control (ThermoFisher, cat #AM4302/AM4300) at 1:4,000 in 1× TBST and incubated simultaneously with the GFP primary antibody. Blots were sealed in a bag and kept overnight at 4° C. on a lab rocker. After incubation, blots were rinsed 3 times for 5 minutes each in 1× TBST and probed with mouse secondary antibodies (ThermoFisher, cat #PI35519) at 1:25,000 each in 1× TBST for 30 minutes at room temperature. After incubation, blots were rinsed 3 times for 5 minutes each in 1× TBST. Blots were visualized and analyzed using a Licor Odyssey system.

[0878] As shown in FIG. 84, TIE-containing circular RNA is capable of expressing GFP protein in diverse human cell lines (e.g., HeLa, HEK293, and HUH7 cells) in a dose dependent manner when transfected in vitro with an LNP.

### Example 64

In Vitro Expression of LNP Formulated with Circular RNA Encoding for GFP in Primary Human Hepatocytes.

[0879] A circular RNA construct was produced comprising a TIE and coding element encoding for a GFP protein. Various concentrations of LNP containing circularized RNA (oRNA) were diluted in hepatocyte media supplemented with 3% fetal bovine serum (FBS) (ThermoFisher, cat #A3160401). Media was aspirated from the cells prior to addition of 100 μL of LNP/FBS/media mixture to the cells.

[0880] Primary human hepatocytes (PHH) were thawed and resuspended in hepatocyte thawing medium (Xenotech, cat #K8600/K8650) followed by centrifugation. The supernatant was discarded, and the pelleted cells were resuspended in hepatocyte plating medium (Xenotech, cat #K8200). Cells were counted via hemocytometer and plated on Bio-coat collagen-I coated 96-well plates at a density of 25,000 cells/well for PHH, 25,000 cells/well for PMH, and 50,000 cells/well for PCH in 100 μl of plating media. Plated cells were allowed to settle and adhere for 6 hours in a tissue culture incubator at 37° C. and 5% CO₂ atmosphere. After incubation cells were checked for monolayer formation after which the plating media was aspirated and replaced with 100 μl of culture media (Xenotech, cat #K8300). Media was replaced every 24 hours for the duration of the experiment.

[0881] Primary human hepatocytes were transfected as previously described with LNP formulated oRNAs. Twenty-four hours post-transfection, the media was removed and the cells were trypsinized. The trypsinized cells were neutralized with PBS supplemented with 10% FBS, harvested, and transferred to a tube. The tube was centrifuged to pellet the cells and the supernatant was aspirated. The pellet was stored at −80° C. prior to lysis. For lysis the cells were thawed on ice and were lysed with 100 μL/well RIPA buffer (Boston Bio Products, Cat. BP-115) plus freshly added 1 mM DTT, and 250 U/ml Benzonase (EMD Millipore, cat #71206-3), and protease inhibitor mixture consisting of complete protease inhibitor cocktail (Sigma, cat #11697498001). Cells were kept on ice for 30 minutes at which time NaCl (1M final concentration) was added. Cell lysates were thoroughly mixed and retained on ice for 30 min. The whole cell extracts (WCE) were centrifuged to pellet debris. A Bradford assay (Bio-Rad, cat #500-0001) was used to assess protein content of the lysates. The Bradford assay procedure was completed according to the manufacturer's protocol. Extracts were stored at −20° C. prior to use. Western blots were performed to assess GFP protein levels. Whole cell extract lysates were mixed with Laemmli buffer and denatured at 95° C. for 10 min. Western blots were run using the NuPage system on 4-12% Bis-Tris gels (ThermoFisher, cat #NPO335BOX) according to the manufacturer's protocol followed by wet transfer onto 0.45 m nitrocellulose membrane (ThermoFisher, cat #LC2001). After transfer membranes were rinsed thoroughly with water and stained with Ponceau S solution (Boston Bio Products, cat #ST-180) to confirm complete and even transfer. Blots were blocked using 5% Dry Milk in TBS for 30 minutes on a lab rocker at room temperature. Blots were rinsed with 1× TBST (Boston BioProducts, cat #IBB-180) and probed with mouse dylight 680-tagged anti-GFP monoclonal antibody (ThermoFisher, cat #MA515256D680) at 1:1,000 in 1× TBST. Anti-p-actin or GAPDH was used as a loading control (ThermoFisher, cat #AM4302/AM4300) at 1:4,000 in 1× TBST and incubated simultaneously with the GFP primary antibody. Blots were sealed in a bag and kept overnight at 4° C. on a lab rocker. After incubation, blots were rinsed 3 times for 5 minutes each in 1× TBST and probed with mouse secondary antibodies (ThermoFisher, cat #PI35519) at 1:25,000 each in 1× TBST for 30 minutes at room temperature. After incubation, blots were rinsed 3 times for 5 minutes each in 1× TBST. Blots were visualized and analyzed using a Licor Odyssey system.

[0882] As shown in the western blot in FIG. 85, circular RNAs containing a TIE is capable of successfully encoding a GFP protein in primary human hepatocytes when transfected in vivo with an LNP.

### Example 65

### In Vitro Expression Offirefly Luciferase in Circular RNA Encoding Firefly Luciferase in Mouse Myoblast and Primary Human Skeletal Muscle Myoblast Cells Using Lipofectamine.

[0883] A circular RNA construct comprising a TIE and coding element encoding firefly luciferase protein.

[0884] Primary human skeletal muscle (HSkM) cells (Lonza, cat #20TL356514) were thawed in a 37° C. water bath and plated at recommended seeding density (3,000 to 5,000 per cm²) in SkGM-2 BulletKit growth media (Lonza, cat #CC-3245) and allowed to grow overnight. Cells were detached using ReagentPack subculture reagents (Lonza, cat #CC-5034) and plated on tissue culture grade 96-well plates at recommended seeding density and allowed to grow overnight in a tissue culture incubator at 37° C. and 5% CO₂ atmosphere or to 70-80% confluency with growth media changed every 2 days.

[0885] For one 96-well plate reaction, 0.3 μL of Lipofectamine-3000 transfection reagent (Lipo3K) (ThermoFisher, cat #L3000015) was mixed with 5 μL Opti-MEM reduced serum media (ThermoFisher, cat #51985091). In a separate tube, per reaction, firefly luciferase (f.luc) oRNA (at 10-200 ng) was combined with 5 μL Opti-MEM and 0.2 μL P3000TM enhancer reagent (ThermoFisher, cat #L3000015). Equal volumes of Lipo3K/Opti-MEM mix was combined with oRNA/Opti-MEM mix and incubated at room temperature for 15 min. The Lipo3K/oRNA mixture was added to each well to be transfected and placed in a tissue culture incubator at 37° C. and 5% CO₂ atmosphere for 24 hours.

[0886] After 24 hours, the transfection plates were removed from the incubator and allowed to equilibrate to room temperature for 15 minutes. A volume of 100 μL of firefly luciferase one-step glow assay working solution (Pierce, cat #16196) was added to each well. The plate was placed on a microplate shaker (ThermoFisher, cat #572050) and mixed at 300 rpm for 3 minutes. Post-mixing, the plate was allowed to incubate at room temperature for 10 minutes. Luminescence was read using a Varioskan or Bio-Tek Cytation5 instrument.

[0887] As shown in FIG. 86A and FIG. 86B, circular RNAs comprising a TIE is capable of driving firefly luciferase protein expression in myoblasts from different species in a dose-dependent manner when transfected in vitro with lipofectamine.

### Example 66

[0888] In Vitro Expression of Firefly Luciferase in Circular RNA Encoding Firefly Luciferase in Differentiated Primary Human Skeletal Muscles Myotubes

[0889] A circular RNA construct comprising a TIE and coding element encoding firefly luciferase protein.

[0890] Primary human skeletal muscle (HSkM) cells (Lonza, cat #20TL356514) were thawed in a 37° C. water bath and plated at recommended seeding density (3,000 to 5,000 per cm²) in SkGM-2 BulletKit growth media (Lonza, cat #CC-3245) and allowed to grow overnight. Cells were detached using ReagentPack subculture reagents (Lonza, cat #CC-5034) and plated on tissue culture grade 96-well plates at recommended seeding density and allowed to grow overnight in a tissue culture incubator at 37° C. and 5% CO₂ atmosphere or to 70-80% confluency with growth media changed every 2 days. Once cells reached 70-80% confluency, growth media was removed, cells were washed twice in 1×PBS (Gibco, cat #10010023) and changed to differentiation media consisting of F-10 (1×) (Gibco, cat #11550-043) supplemented with 2% Horse Serum (Gibco, cat #26050088) and 1% Pen-Strep (Gibco, cat #15140-122). Media was changed daily for 5 to 6 days until nearly all myoblasts had fused to form myotubes.

[0891] For one 96-well plate reaction, 0.3 μL of Lipofectamine-3000 transfection reagent (Lipo3K) (ThermoFisher, cat #L3000015) was mixed with Sul Opti-MEM reduced serum media (ThermoFisher, cat #51985091). In a separate tube, per reaction, firefly luciferase (f.luc) oRNA (at 10-200 ng) was combined with 5 μL Opti-MEM and 0.2 μL P3000TM enhancer reagent (ThermoFisher, cat #L3000015). Equal volumes of Lipo3K/Opti-MEM mix was combined with oRNA/Opti-MEM mix and incubated at room temperature for 15 min. The Lipo3K/oRNA mixture was added to each well to be transfected and placed in a tissue culture incubator at 37° C. and 5% CO₂ atmosphere for 24 hours.

[0892] After 24 hours, transfection plates were removed from the incubator and allowed to equilibrate to room temperature for 15 minutes. A volume of 100 μL of Firefly Luc one-step glow assay working solution (Pierce, cat #16196) was added to each well. The plate was placed on a microplate shaker (ThermoFisher, cat #S72050) and mixed at 300 rpm for 3 minutes. Post-mixing, the plate was allowed to incubate at room temperature for 10 minutes. Luminescence was read using a Varioskan or Bio-Tek Cytation5 instrument.

[0893] As shown in FIG. 87A and FIG. 87B, a circular RNA comprising a TIE is capable of driving firefly luciferase protein expression in primary muscles cells through differentiated states (e.g., in myoblast and differentiated myotubes) in multiple human donors in a dose-dependent manner when transfected in vitro with lipofectamine.

### Example 67

### Cell-Free In Vitro Translation of Circular RNAs Containing TIEs

[0894] A cell-free rabbit reticulocyte in vitro translation assay (Promega, cat #L4540) was completed to characterize protein products from various RNA templates. Both linear mRNA and circular oRNA templates were used in the assay and reaction components were assembled according to the manufacturer's protocol. Prior to assay, RNA templates were denatured at 65° C. for 3 minutes and immediately cooled on ice. All reaction components were assembled on ice. Flexi Rabbit Reticulocyte kit components, complete amino acid mixture (Promega, cat #L5061), RNAsin TIEuclease inhibitor (Promega, cat #N2111), and transcend tRNA (Promega, cat #L5061) were added to denatured RNA templates. The reaction was vortexed to mix and incubated at 30° C. for 60 minutes and then placed on ice.

[0895] The reaction mixture was added to 1× sample buffer (ThermoFisher, cat #NP0007) and heated at 70° C. for 15 minutes. The denatured protein sample was loaded onto 4-12% Bis-Tris gels (ThermoFisher, cat #NPO335BOX). Gel electrophoresis was completed, and the gel was wet transferred onto 0.45 m nitrocellulose membrane (ThermoFisher, cat #LC2001). Post-transfer, the membrane was blocked for 1 hour with rocking in freshly made TBS with 0.5% Tween-20 (Boston Bioproducts Inc Cat #IBB-180). The membrane was incubated for 45 min with rocking with streptavidin-AP (Promega, cat #V5591) at a 1:2,500 dilution. The membrane was rinsed with four cycles of: twice with TBST and twice with deionized water for 1 min per rinse. The membrane was incubated with Western Blue substrate (Promega, cat #S3841) for 45 minutes and the membrane was rinsed in water and scanned on a LICOR Odyssey CLx imaging system.

[0896] As shown in FIG. 88A and FIG. 88B, a circular RNA comprising a TIE is capable of driving protein expression in a cell-free lysate, independent of any cell type. FIG. 88A illustrates expression of firefly luciferase from a linear or circular RNA input. FIG. 88B illustrates expression of human and mouse ATP7B proteins with different codon optimization (co) approaches compared to wild-type native sequence (WT). The codon optimized-circular RNAs expressing ARP7B protein and the circular RNA expressing firefly luciferase shoed protein full-length protein expression.

### Example 68

### TIE Selection Methodology

[0897] Putative TIEs were identified for activity assessment from sequences in GenBank. Briefly, Riboviria and Unclassified Virus sequences greater than 1 kb in length were identified. 5′ and intergenic UTRs were extracted based on putative CDS start and end sites with a minimum length cutoff of 250 nt. Reverse sequences were also collected for negative sense CDS annotations. For genera not expected to contain TIE sequences, a few noncoding regions per genus were selected at random. Duplicates, >10 nt repeat-containing sequences, sequences with both XbaI and BamHI sites, and low-quality sequences (non acgt) were culled, then sequences were clustered through CDHit with an 80% sequence similarity cutoff for clustering; representative sequences from each cluster were selected for further study. For unclassified sequences or sequences expected to contain a TIE, all 5′ and intergenic UTRs were selected; duplicates, >10 nt repeat-containing sequences, sequences with both XbaI and BamHI sites, and low-quality sequences (non acgt) were culled, then sequences were clustered through CDHit with a 95% (low risk, known IRESs) sequence similarity cutoff for clustering; representative sequences from each cluster were selected for further study. For both strategies, sequences shorter than 300 nt or unable to be synthesized due to sequence complexity were eliminated.

### Example 69

### Example 69A: TIE Activity in Primary Human T Cells

[0898] Nucleic acid sequences containing putative TIEs were inserted into a circular RNA (oRNA) construct prior to the start codon of a Gaussia luciferase reporter sequence. oRNA containing the TIE was synthesized and purified. Purified oRNA was formulated into lipid nanoparticles. LNP-oRNA was transfected into T cells in vitro. Supernatant was harvested and replaced 24 and 48 hours after transfection, and Gaussia luciferase expression from oRNA was determined using a coelenterazine-containing detection reagent and luminometer. Higher luminescence at 24 hours indicates higher TIE function. Higher luminescence at 48 hours relative to 24 hours indicates higher oRNA stability due to TIE function.

### Example 69B: TIE Activity in Primary Human Hepatocytes

[0899] Nucleic acid sequences containing putative TIEs were inserted into a circular RNA (oRNA) construct prior to the start codon of a Gaussia luciferase reporter sequence. oRNA containing the TIE was synthesized and purified. Purified oRNA was formulated into lipid nanoparticles. LNP-oRNA was transfected into hepatocytes in vitro. Supernatant was harvested and replaced 24 and 48 hours after transfection, and Gaussia luciferase expression from oRNA was determined using a coelenterazine-containing detection reagent and luminometer. Higher luminescence at 24 hours indicates higher TIE function. Higher luminescence at 48 hours relative to 24 hours indicates higher oRNA stability due to TIE function.

### Example 69C: TIE Activity in Primary Human Myotubes

[0900] Nucleic acid sequences containing putative TIEs were inserted into a circular RNA (oRNA) construct prior to the start codon of a Gaussia luciferase reporter sequence. oRNA containing the TIE was synthesized and purified. Purified oRNA was formulated into lipid nanoparticles. LNP-oRNA was transfected into human myotubes in vitro. Supernatant was harvested and replaced 24 and 48 hours after transfection, and Gaussia luciferase expression from oRNA was determined using a coelenterazine-containing detection reagent and luminometer. Higher luminescence at 24 hours indicates higher TIE function. Higher luminescence at 48 hours relative to 24 hours indicates higher oRNA stability due to TIE function.

### Example 70

### TIE Tissue Tropism

[0901] Select TIE-containing oRNAs were formulated into LNPs. LNP-oRNAs were transfected into T cells, hepatocytes, and myotubes. Supernatant was harvested and replaced 24 and 48 hours after transfection, and Gaussia luciferase expression from oRNA was determined using a coelenterazine-containing detection reagent and luminometer. Higher luminescence at 24 hours indicates higher TIE function. Higher luminescence at 48 hours relative to 24 hours may indicate higher oRNA stability due to TIE function. TIE activity was compared between cell types and differences resulting from TIE tissue preference were noted. Differences may be a result of the TIE engaging proteins that show tissue-specific expression and promoting enhanced translation initiation, degradation, or stability.

### Example 71

### Example 71A: TIE Deletion Scanning

[0902] Select TIE sequences with progressive deletions from either the 5′ end or 3′ end of the TIE were inserted into a circular RNA (oRNA) construct prior to the start codon of a Gaussia luciferase reporter sequence. oRNA containing the TIE variant was synthesized and purified. Purified oRNA was formulated into lipid nanoparticles. LNP-oRNA was transfected into human primary T cells. Supernatant was harvested and replaced 24 and 48 hours after transfection, and Gaussia luciferase expression from oRNA was determined using a coelenterazine-containing detection reagent and luminometer. Higher luminescence at 24 hours indicates higher TIE function. Higher luminescence at 48 hours relative to 24 hours may indicate higher oRNA stability due to TIE function. Expression or stability impairment due to progressive deletions identifies the core functional unit of the TIE.

### Example 71B: TIE Variant Generation and Identification

[0903] Select TIE-containing oRNA synthesis plasmids were subjected to error-prone PCR to introduce random mutations into the PCR product. PCR product was used as a template for oRNA synthesis. Purified oRNA was formulated into LNPs and transfected into primary human T cells. Polysome fractions were harvested from T cells at 6, 24, 48, and 72 hours post-transfection by HPLC. RNA associated with each polysome fraction was extracted from polysome fractions and sequenced by NGS. TIE mutation enrichment in each polysome fraction at each time point was analyzed to identify mutations that 1) maintain or improve translation activity from the TIE and/or 2) improve stability of the oRNA.

### Example 71C: TIE Single and Multi-Variant Validation

[0904] Nucleic acid sequences containing putative beneficial TIE mutations from example 6 alone or in combination were inserted into a circular RNA (oRNA) construct prior to the start codon of a Gaussia luciferase reporter sequence. oRNA containing the TIE variant was synthesized and purified. Purified oRNA was formulated into lipid nanoparticles. LNP-oRNA was transfected into human primary T cells. Supernatant was harvested and replaced 24 and 48 hours after transfection, and Gaussia luciferase expression from oRNA was determined using a coelenterazine-containing detection reagent and luminometer. Higher luminescence at 24 hours indicates higher TIE function. Higher luminescence at 48 hours relative to 24 hours indicates higher oRNA stability due to TIE function.

### Example 72

### Example 72A: Selection of Eukaryotic TIEs

[0905] Selection of eukaryotic TIEs. Putative eukaryotic TIEs were identified using several databases. TIEs selected include sequences 40-1578 nucleotides in length and may or may not contain identified modification (m6A) sites.

### Example 72B: TIEs Containing Modified Nucleotides (m6A)

[0906] Nucleic acid sequences containing putative TIEs were inserted into a circular RNA (oRNA) construct preceding the coding region of a Gaussia luciferase reporter sequence. oRNAs were synthesized with a titration of modified nucleotide. Purified oRNA was formulated into lipid nanoparticles. LNP-oRNAs were transfected into T cells, hepatocytes, and myotubes. Supernatant was harvested and replaced 24 and 48 hours after transfection, and Gaussia luciferase expression from oRNA was determined using a coelenterazine-containing detection reagent and luminometer. Higher luminescence of modified nucleotide containing TIEs at 24 hours indicates necessity for modification for enhanced function. Higher luminescence at 48 hours relative to 24 hours indicates modified nucleotide containing TIEs enhance stability of oRNA.

### Example 73

Expression of TIEs In Cells Undergoing Oxidative and/or Hypoxic Stress

[0907] Nucleic acid sequences containing putative TIEs were inserted into a circular RNA (oRNA) construct preceding the coding region of a Gaussia luciferase reporter sequence. Purified oRNA was formulated into lipid nanoparticles. Hepatocytes were treated with hydrogen peroxide to induce oxidative stress or CoCl₂ to induce hypoxic stress. LNP-oRNA was transfected into hepatocytes (under hypoxic stress, oxidative stress, or untreated) in vitro. Supernatant was harvested and replaced 24 and 48 hours after transfection, and Gaussia luciferase expression from oRNA was determined using a coelenterazine-containing detection reagent and luminometer. Higher luminescence at 24 hours indicates higher TIE function. Higher luminescence at 48 hours relative to 24 hours may indicate higher oRNA stability due to TIE function.

### Example 74

### Aptamer as a TIE

[0908] Nucleic acid sequences containing aptamers against translation initiation factors (ie eIF4E, eIF4G, eIF4a) were inserted into a circular RNA (oRNA) construct preceding the coding region of a Gaussia luciferase reporter sequence. Purified oRNA was formulated into lipid nanoparticles. LNP-oRNAs were transfected into hepatocytes. Supernatant was harvested and replaced 24 and 48 hours after transfection, and Gaussia luciferase expression from oRNA was determined using a coelenterazine-containing detection reagent and luminometer. Higher luminescence at 24 hours indicates higher TIE function. Higher luminescence at 48 hours relative to 24 hours may indicate higher oRNA stability due to TIE function.

### Example 75

### Tandem TIEs

[0909] Select combinations of viral, eukaryotic, and/or aptamer TIEs were inserted into a circular RNA (oRNA) construct preceding the coding region of a Gaussia luciferase reporter sequence. oRNAs were synthesized with a titration of modified nucleotide. Purified oRNA was formulated into lipid nanoparticles. LNP-oRNAs were transfected into T cells, hepatocytes, and myotubes. Supernatant was harvested and replaced 24 and 48 hours after transfection, and Gaussia luciferase expression from oRNA was determined using a coelenterazine-containing detection reagent and luminometer. Higher luminescence of constructs containing multiple TIEs at 24 hours indicates a synergy of TIEs. Higher luminescence at 48 hours relative to 24 hours may indicate having multiple TIEs in one construct enhance stability of oRNA.

### Example 76

### Example 76A: Coding Aptamers to Enhance Cap-Independent Translation

[0910] Certain aptamers that bind to eIF4E, eIF4a, and other translation initiators are known to inhibit translation by forcing the proteins to adopt a non-functional conformation. Nucleic acid sequences containing aptamers against translation initiation factors (ie eIF4E, eIF4a) were inserted into a circular RNA (oRNA) construct preceding a functional TIE and the coding region of a Gaussia luciferase reporter sequence. Purified oRNA was formulated into lipid nanoparticles. LNP-oRNAs were transfected into hepatocytes. Supernatant was harvested and replaced 24 and 48 hours after transfection, and Gaussia luciferase expression from oRNA was determined using a coelenterazine-containing detection reagent and luminometer. Higher luminescence at 24 hours indicates a preference for cap-independent translation. Higher luminescence at 48 hours relative to 24 hours indicates higher oRNA stability due to inhibition of cap-dependent translation.

### Example 76B: Coding Aptamers to Enhance Cap-Independent Translation

[0911] Co-transfection of oRNA and aptamers. Certain aptamers that bind to eIF4E, eIF4a, and other translation initiators are known to inhibit translation by forcing the proteins to adopt a non-functional conformation. Nucleic acid sequences containing aptamers against translation initiation factors (i.e., eIF4E, eIF4a) were co-transfected with a circular RNA (oRNA) containing a TIE and the coding region of a Gaussia luciferase reporter. Purified aptamer and oRNA were formulated into lipid nanoparticles together. LNP-oRNAs were transfected into hepatocytes. Supernatant was harvested and replaced 24 and 48 hours after transfection, and Gaussia luciferase expression from oRNA was determined using a coelenterazine-containing detection reagent and luminometer. Higher luminescence at 24 hours indicates a preference for cap-independent translation. Higher luminescence at 48 hours relative to 24 hours may indicate higher oRNA stability due to inhibition of cap-dependent translation.

### Example 77

[0912] Immunogenicity of circular RNAs was assessed. Induction of RIG-1 and IFNB1 RNA expressions, markers of immune stimulation, was measured using RT-cPCR following transfection of the cells with various RNA preparations. All RNA preparations except for the commercially available 3phpRNA were produced using in vitro transcription (IVT) and circularization of RNA comprising an Anabaena permuted intron, GLuc reading frame, strong homology arms, 5′ and 3′ spacers, and a CVB3 IRES. In both HeLa cells (FIG. 93A) and A594 cells (FIG. 93B), the highest levels of RIG-1 and IFNB1 were induced by the IVT reaction product prepared in the absence of excess GMP and by the positive control 3phpRNA.

### Example 78—IRES Selection and Screening

[0913] Approximately 3,000 internal ribosome entry site (IRES) sequence candidates were computationally identified from untranslated regions (UTRs), e.g., viral UTRs, in partial and complete viral sequence available in the art (e.g., Genbank). Each DNA template was cloned to include a IRES sequence selected from SEQ ID NOs: 1-2983 and 3282-3287 or a fragment thereof, optionally in combination with barcode sequences selected from [3289-6271 and 6570-6575]. Exemplary constructs included a 5′ enhanced intron element, a 5′ enhanced exon element, an TRES candidate, a coding element encoding Gaussia Luciferase, a 3′ enhanced exon element, and a 3′ enhanced intron element. Engineered circular RNA (oRNA) was generated from the DNA template by in vitro transcription (IVT); and oRNA was subsequently purified from non-circular RNA components of the IVT reaction.

[0914] Purified oRNA was nanoprecipitated with lipids to form LNP-oRNA constructs. LNPs were formulated first by creating empty lipid nanoparticles using a Precision Nanosystems Ignite instrument with a “NextGen” mixing chamber. Ethanol phase contained Lipid 39 from Table 2, DSPC, cholesterol, and DMG-PEG 2000 (Avanti Polar Lipids, Inc., Alabaster, AL) at a molar ratio of 45:9:44:2 was combined with 50 mM sodium acetate buffer at pH 4.5. A 3:1 aqueous to ethanol mixing ratio was used. The empty LNPs were then dialyzed in 1 L of 1×PBS and exchanged 2 times over 18 hours. Dialyzed empty LNPs were then mixed with a final circular RNA concentration of 40 μg/mL in 50 mM sodium acetate buffer at pH 4.5. A 3:1 aqueous to empty lipid nanoparticle mixing ratio was used. The LNPs final ionizable lipid to RNA phosphate ratio was at 6.0.

[0915] Primary human skeletal myotubes, primary human hepatocytes, and activated primary human T cells were treated with formulated LNP-oRNA in triplicate. Protein expression in supernatant was assessed by luminescence measurements 48 hours following transfection.

[0916] Total luminescent signal was normalized across replicate plates to control for plate-wide differences between replicates due to flash assay readout timing. Plates with positive controls having <1.5× signal over background were excluded from analysis. Background was subtracted based on empty wells. Each test well replicate was normalized to the average of the plate controls.

[0917] Table 4 provides the protein expression and stability measurements for the screening. Measured numbers were normalized to a control (caprine kobuvirus IRES, SEQ ID NO: 3282) and represented as a fold change.

TABLE 4
I. Expression and functional stability screening of IRES

| | [Mod] | | [Mod] |
|---|---|---|---|
| SEQ | Fold | [Mod] T | PHH |
| ID | Change | Fold | Fold |
| NO | Myo | Change | Change |
| 97 | 0.260167 | 0.353177 | 1.163467 |
| 98 | 0.290648 | 0.677026 | 0.78802 |
| 99 | 0.163908 | 0.27666 | 1.020326 |
| 100 | 0.495163 | 0.48261 | 1.22777 |
| 101 | 0.533025 | 0.852995 | 1.370347 |
| 102 | 0.044695 | 0.030995 | 0.514093 |
| 103 | 0.045577 | 0.039508 | 0.647085 |
| 104 | 0.076071 | 0.168841 | 0.774536 |
| 105 | 0.249558 | 0.329006 | 0.642043 |
| 106 | 0.352419 | 0.648041 | 1.09325 |
| 107 | 0.287896 | 0.937122 | 1.119079 |
| 109 | 0.249157 | 0.626121 | 0.853308 |
| 110 | 0.242425 | 0.513277 | 0.717483 |
| 111 | 0.222321 | 0.465065 | 0.786969 |
| 112 | 0.371086 | 0.636962 | 0.807476 |
| 113 | 0.317071 | 0.43731 | 0.827882 |
| 114 | 0.05835 | 0.068124 | 0.789812 |
| 115 | 0.050735 | 0.046932 | 0.425032 |
| 116 | 0.039211 | 0.030739 | 0.529925 |
| 117 | 0.042734 | 0.046123 | 0.425775 |
| 118 | 0.154586 | 0.456184 | 0.666903 |
| 119 | 0.198021 | 0.987593 | 0.62119 |
| 120 | 0.275525 | 0.701885 | 0.489288 |
| 121 | 0.627572 | 1.028933 | 0.997696 |
| 122 | 0.388602 | 0.8876 | 0.832163 |
| 123 | 0.039714 | 0.030111 | 0.638047 |
| 125 | 0.382696 | 0.641754 | 0.649185 |
| 126 | 0.057929 | 0.06647 | 0.645602 |
| 127 | 0.293568 | 0.685807 | 0.674465 |
| 128 | 0.489317 | 0.583675 | 1.021214 |
| 129 | 0.053695 | 0.089454 | 0.668895 |
| 130 | 0.040577 | 0.060757 | 0.572842 |
| 131 | 0.039511 | 0.033359 | 0.53476 |
| 132 | 0.039977 | 0.031182 | 0.564324 |
| 133 | 0.039326 | 0.030041 | 0.541046 |
| 134 | 0.046625 | 0.052943 | 0.46727 |
| 136 | 0.047864 | 0.042316 | 0.428555 |
| 138 | 0.372287 | 0.637832 | 0.615651 |
| 139 | 0.059696 | 0.097316 | 0.520599 |
| 140 | 0.16008 | 0.399455 | 0.715372 |
| 141 | 0.040253 | 0.031062 | 0.546956 |
| 142 | 0.038521 | 0.027425 | 0.46798 |
| 143 | 0.03901 | 0.032654 | 0.420921 |
| 145 | 0.03927 | 0.026297 | 0.635934 |
| 146 | 0.043229 | 0.034645 | 0.587329 |
| 147 | 0.042637 | 0.036624 | 0.559359 |
| 148 | 0.039126 | 0.029094 | 0.736827 |
| 149 | 0.039186 | 0.028926 | 0.711791 |
| 150 | 0.03864 | 0.027048 | 0.514678 |
| 151 | 0.037309 | 0.026948 | 0.493258 |
| 152 | 0.038449 | 0.026258 | 0.615534 |
| 153 | 0.038341 | 0.025876 | 0.695107 |
| 154 | 0.0402 | 0.0304 | 0.722679 |
| 155 | 0.038723 | 0.027351 | 0.586864 |
| 156 | 0.038511 | 0.027142 | 0.627475 |
| 157 | 0.039049 | 0.027127 | 0.731503 |
| 158 | 0.038048 | 0.027701 | 0.672155 |
| 159 | 0.038668 | 0.025816 | 0.61191 |
| 160 | 0.039335 | 0.026247 | 0.5674 |
| 161 | 0.038824 | 0.025876 | 0.492452 |
| 162 | 0.038216 | 0.023393 | 0.575165 |
| 163 | 0.038264 | 0.027191 | 0.52053 |
| 164 | 0.038197 | 0.026151 | 0.524974 |
| 165 | 0.037817 | 0.026532 | 0.561699 |
| 166 | 0.038844 | 0.026828 | 0.575901 |
| 167 | 0.038524 | 0.025708 | 0.69976 |
| 168 | 0.038788 | 0.025543 | 0.731934 |
| 169 | 0.039231 | 0.027338 | 0.432891 |
| 170 | 0.037986 | 0.022969 | 0.541642 |
| 171 | 0.038154 | 0.027212 | 0.582587 |
| 172 | 0.037112 | 0.026558 | 0.639476 |
| 173 | 0.037335 | 0.026078 | 0.504809 |
| 174 | 0.037049 | 0.025905 | 0.577144 |
| 175 | 0.037822 | 0.025498 | 0.530502 |
| 177 | 0.038266 | 0.026051 | 0.561219 |
| 178 | 0.039045 | 0.027092 | 0.500802 |
| 179 | 0.037153 | 0.026609 | 0.50571 |
| 180 | 0.038755 | 0.028951 | 0.487148 |
| 181 | 0.037539 | 0.025831 | 0.659122 |
| 182 | 0.03747 | 0.025334 | 0.496612 |
| 183 | 0.038763 | 0.025478 | 0.768879 |
| 184 | 0.043604 | 0.030907 | 0.689648 |
| 185 | 0.039562 | 0.027297 | 0.687583 |
| 186 | 0.039007 | 0.026413 | 0.665244 |
| 187 | 0.038049 | 0.026641 | 0.587503 |
| 188 | 0.037709 | 0.026875 | 0.671188 |
| 189 | 0.037762 | 0.027089 | 0.52406 |
| 190 | 0.03731 | 0.026211 | 0.418576 |
| 191 | 0.038235 | 0.02599 | 0.484504 |
| 192 | 0.039939 | 0.027233 | 0.483419 |
| 194 | 0.020192 | 0.00648 | 0.519074 |
| 195 | 0.019531 | 0.006334 | 0.376436 |
| 196 | 0.019542 | 0.00641 | 0.498646 |
| 197 | 0.019244 | 0.006324 | 0.402627 |
| 198 | 0.018573 | 0.006291 | 0.419065 |
| 199 | 0.019198 | 0.006785 | 0.34161 |
| 200 | 0.019364 | 0.00696 | 0.385662 |
| 201 | 0.020124 | 0.006802 | 0.336954 |
| 202 | 0.019957 | 0.006958 | 0.433697 |
| 203 | 0.019453 | 0.006298 | 0.462718 |
| 204 | 0.019494 | 0.006471 | 0.441202 |
| 205 | 0.019442 | 0.006373 | 0.629439 |
| 206 | 0.018867 | 0.006885 | 0.374898 |
| 207 | 0.01914 | 0.006134 | 0.460931 |
| 208 | 0.018981 | 0.006092 | 0.433478 |
| 209 | 0.019624 | 0.006283 | 0.410556 |
| 210 | 0.019591 | 0.007049 | 0.588881 |
| 211 | 0.019397 | 0.006595 | 0.542165 |
| 212 | 0.019568 | 0.00626 | 0.532913 |
| 213 | 0.018989 | 0.006333 | 0.547859 |
| 214 | 0.01915 | 0.006268 | 0.425401 |
| 216 | 0.019187 | 0.006268 | 0.524257 |
| 217 | 0.019397 | 0.006238 | 0.390937 |
| 218 | 0.019339 | 0.006206 | 0.494667 |
| 219 | 0.018624 | 0.00708 | 0.490922 |
| 220 | 0.019181 | 0.006335 | 0.474431 |
| 221 | 0.019256 | 0.006244 | 0.457017 |
| 222 | 0.019112 | 0.006315 | 0.449704 |
| 223 | 0.01928 | 0.006732 | 0.413984 |
| 224 | 0.019162 | 0.006106 | 0.445024 |
| 225 | 0.019165 | 0.006185 | 0.408971 |
| 226 | 0.018975 | 0.006285 | 0.510492 |
| 227 | 0.019522 | 0.007133 | 0.437234 |
| 228 | 0.019859 | 0.006494 | 0.570592 |
| 229 | 0.019454 | 0.006315 | 0.473748 |
| 230 | 0.018871 | 0.006278 | 0.51804 |
| 231 | 0.019655 | 0.006844 | 0.511603 |
| 232 | 0.019285 | 0.006225 | 0.565024 |
| 233 | 0.019316 | 0.006211 | 0.442953 |
| 235 | 0.019002 | 0.007102 | 0.395003 |
| 236 | 0.018841 | 0.006315 | 0.509341 |
| 237 | 0.019316 | 0.006327 | 0.318761 |
| 238 | 0.019395 | 0.007836 | 0.596039 |
| 239 | 0.019249 | 0.006356 | 0.413194 |
| 241 | 0.019155 | 0.006661 | 0.275657 |
| 242 | 0.019203 | 0.006108 | 0.443553 |
| 243 | 0.019402 | 0.006124 | 0.451916 |
| 244 | 0.018854 | 0.007129 | 0.467265 |
| 245 | 0.019175 | 0.006401 | 0.543468 |
| 246 | 0.019056 | 0.007055 | 0.4824 |
| 247 | 0.018824 | 0.006353 | 0.484173 |
| 248 | 0.019655 | 0.006175 | 0.368398 |
| 249 | 0.01946 | 0.006185 | 0.396805 |
| 250 | 0.019 | 0.006117 | 0.480145 |
| 252 | 0.01904 | 0.007513 | 0.39182 |
| 253 | 0.018899 | 0.006977 | 0.575079 |
| 254 | 0.019338 | 0.006347 | 0.526008 |
| 255 | 0.019193 | 0.006255 | 0.287479 |
| 256 | 0.019022 | 0.006292 | 0.433444 |
| 257 | 0.01915 | 0.006647 | 0.428502 |
| 258 | 0.019567 | 0.006018 | 0.468423 |
| 259 | 0.019534 | 0.006067 | 0.58953 |
| 260 | 0.019436 | 0.007053 | 0.357243 |
| 261 | 0.019714 | 0.006449 | 0.480901 |
| 262 | 0.018951 | 0.006418 | 0.40858 |
| 263 | 0.019192 | 0.006212 | 0.560046 |
| 264 | 0.019612 | 0.006356 | 0.552301 |
| 265 | 0.019321 | 0.006195 | 0.401567 |
| 266 | 0.019369 | 0.006648 | 0.604516 |
| 267 | 0.019151 | 0.006684 | 0.464703 |
| 268 | 0.018286 | 0.007032 | 0.4753 |
| 269 | 0.01937 | 0.006374 | 0.5176 |
| 270 | 0.019261 | 0.006259 | 0.499406 |
| 271 | 0.019395 | 0.00619 | 0.412264 |
| 272 | 0.018911 | 0.006199 | 0.421016 |
| 274 | 0.019303 | 0.006349 | 0.455375 |
| 276 | 0.019357 | 0.006325 | 0.376791 |
| 278 | 0.019529 | 0.006257 | 0.583499 |
| 279 | 0.019217 | 0.006392 | 0.4111 |
| 281 | 0.019185 | 0.006136 | 0.587463 |
| 282 | 0.019681 | 0.006236 | 0.688522 |
| 283 | 0.020003 | 0.006456 | 0.361814 |
| 284 | 0.021001 | 0.008113 | 0.463016 |
| 285 | 0.019166 | 0.006828 | 0.350735 |
| 286 | 0.019521 | 0.006951 | 0.480012 |
| 287 | 0.019513 | 0.006754 | 0.469042 |
| 288 | 0.018469 | 0.006294 | 0.484396 |
| 289 | 0.019434 | 0.006129 | 0.551443 |
| 290 | 0.019277 | 0.006906 | 0.508385 |
| 291 | 0.021833 | 0.009489 | 0.384556 |
| 293 | 0.01252 | 0.006427 | 0.356902 |
| 294 | 0.011884 | 0.006276 | 0.322886 |
| 295 | 0.012392 | 0.00627 | 0.447166 |
| 297 | 0.012283 | 0.00621 | 0.567064 |
| 298 | 0.012177 | 0.006287 | 0.464133 |
| 299 | 0.012284 | 0.006151 | 0.348391 |
| 300 | 0.012339 | 0.006071 | 0.502548 |
| 301 | 0.012495 | 0.007116 | 0.35649 |
| 302 | 0.01222 | 0.006362 | 0.411845 |
| 303 | 0.012195 | 0.006278 | 0.26423 |
| 304 | 0.012215 | 0.006262 | 0.552091 |
| 305 | 0.01249 | 0.006788 | 0.42767 |
| 306 | 0.012402 | 0.006165 | 0.371097 |
| 307 | 0.012281 | 0.006139 | 0.520864 |
| 308 | 0.012497 | 0.00617 | 0.397038 |
| 309 | 0.012793 | 0.006274 | 0.245538 |
| 310 | 0.012404 | 0.006334 | 0.348876 |
| 311 | 0.012122 | 0.006441 | 0.294773 |
| 312 | 0.012249 | 0.006229 | 0.325353 |
| 313 | 0.012563 | 0.006174 | 0.365834 |
| 314 | 0.012287 | 0.006596 | 0.462958 |
| 315 | 0.012275 | 0.006142 | 0.298952 |
| 316 | 0.012716 | 0.007565 | 0.34122 |
| 317 | 0.012291 | 0.006397 | 0.309566 |
| 318 | 0.012115 | 0.006393 | 0.329808 |
| 319 | 0.01227 | 0.008317 | 0.304387 |
| 320 | 0.012221 | 0.006647 | 0.328903 |
| 321 | 0.012186 | 0.007163 | 0.399922 |
| 322 | 0.015035 | 0.031123 | 0.376798 |
| 323 | 0.012308 | 0.006096 | 0.237291 |
| 324 | 0.01192 | 0.006316 | 0.405807 |
| 325 | 0.012466 | 0.00625 | 0.493302 |
| 328 | 0.012498 | 0.00643 | 0.514255 |
| 329 | 0.012432 | 0.006216 | 0.374611 |
| 330 | 0.012053 | 0.006128 | 0.420442 |
| 331 | 0.012416 | 0.006082 | 0.375976 |
| 332 | 0.01236 | 0.006301 | 0.525602 |
| 333 | 0.012418 | 0.006263 | 0.410027 |
| 334 | 0.011605 | 0.006186 | 0.411457 |
| 335 | 0.011728 | 0.006232 | 0.357123 |
| 336 | 0.012106 | 0.006323 | 0.380811 |
| 337 | 0.012118 | 0.006278 | 0.325981 |
| 338 | 0.012218 | 0.006206 | 0.377091 |
| 339 | 0.012209 | 0.006258 | 0.32511 |
| 340 | 0.012372 | 0.006041 | 0.380202 |
| 341 | 0.012382 | 0.00629 | 0.480572 |
| 342 | 0.011896 | 0.006308 | 0.348783 |
| 343 | 0.01204 | 0.006332 | 0.37449 |
| 344 | 0.011928 | 0.006417 | 0.471347 |
| 345 | 0.01169 | 0.006267 | 0.36332 |
| 346 | 0.012345 | 0.006259 | 0.366717 |
| 347 | 0.012182 | 0.006163 | 0.363674 |
| 348 | 0.012163 | 0.00616 | 0.444482 |
| 349 | 0.012659 | 0.006222 | 0.317343 |
| 350 | 0.01182 | 0.006202 | 0.590775 |
| 351 | 0.011972 | 0.006135 | 0.408389 |
| 352 | 0.011885 | 0.006384 | 0.34904 |
| 353 | 0.011969 | 0.006398 | 0.336116 |
| 354 | 0.012428 | 0.006564 | 0.404646 |
| 355 | 0.012092 | 0.006308 | 0.299465 |
| 356 | 0.012409 | 0.006126 | 0.356694 |
| 357 | 0.012519 | 0.006278 | 0.390957 |
| 358 | 0.011963 | 0.006349 | 0.303741 |
| 359 | 0.012077 | 0.006261 | 0.334388 |
| 360 | 0.012007 | 0.006365 | 0.350437 |
| 361 | 0.012282 | 0.007154 | 0.317387 |
| 362 | 0.012469 | 0.007445 | 0.472965 |
| 363 | 0.012436 | 0.006211 | 0.393245 |
| 364 | 0.012106 | 0.006298 | 0.499986 |
| 365 | 0.012805 | 0.009062 | 0.426256 |
| 366 | 0.01212 | 0.006302 | 0.373071 |
| 367 | 0.01206 | 0.006217 | 0.396929 |
| 368 | 0.011994 | 0.006227 | 0.438247 |
| 369 | 0.011901 | 0.006318 | 0.340287 |
| 370 | 0.012341 | 0.007446 | 0.356303 |
| 371 | 0.012601 | 0.006237 | 0.447917 |
| 372 | 0.012511 | 0.007461 | 0.304352 |
| 373 | 0.012419 | 0.006273 | 0.445464 |
| 374 | 0.012212 | 0.006298 | 0.325297 |
| 375 | 0.012262 | 0.006342 | 0.253124 |
| 376 | 0.01206 | 0.00625 | 0.506673 |
| 377 | 0.012314 | 0.006239 | 0.391603 |
| 378 | 0.011869 | 0.006468 | 0.357757 |
| 380 | 0.013014 | 0.007118 | 0.33064 |
| 381 | 0.014152 | 0.007984 | 0.444288 |
| 382 | 0.012422 | 0.006289 | 0.366077 |
| 383 | 0.012649 | 0.0065 | 0.360518 |
| 384 | 0.012302 | 0.006376 | 0.350175 |
| 385 | 0.012345 | 0.006215 | 0.391858 |
| 386 | 0.012388 | 0.006074 | 0.51586 |
| 387 | 0.012519 | 0.007024 | 0.397167 |
| 388 | 0.013891 | 0.00748 | 0.425872 |
| 391 | 0.00426 | 0.025652 | 1.07762 |
| 392 | 0.004221 | 0.024819 | 0.967405 |
| 393 | 0.004402 | 0.026185 | 1.490273 |
| 395 | 0.004363 | 0.024306 | 1.116184 |
| 396 | 0.004078 | 0.025204 | 1.218613 |
| 397 | 0.004141 | 0.025195 | 1.186671 |
| 399 | 0.004058 | 0.025739 | 1.164329 |
| 400 | 0.004405 | 0.026216 | 0.849372 |
| 401 | 0.004166 | 0.025629 | 1.02162 |
| 402 | 0.004116 | 0.025377 | 1.037716 |
| 403 | 0.004734 | 0.028736 | 1.197277 |
| 404 | 0.004247 | 0.025532 | 0.859999 |
| 405 | 0.004301 | 0.025699 | 0.866291 |
| 406 | 0.004319 | 0.025744 | 1.453868 |
| 407 | 0.00439 | 0.026383 | 0.93497 |
| 408 | 0.00535 | 0.032252 | 0.865951 |
| 409 | 0.004149 | 0.025932 | 0.961605 |
| 410 | 0.004251 | 0.025634 | 1.117515 |
| 411 | 0.004339 | 0.025073 | 1.08764 |
| 412 | 0.004524 | 0.025372 | 0.873893 |
| 413 | 0.004216 | 0.025102 | 1.007087 |
| 414 | 0.004159 | 0.025802 | 0.964101 |
| 415 | 0.004389 | 0.025762 | 0.882981 |
| 416 | 0.004232 | 0.024642 | 1.018017 |
| 417 | 0.004211 | 0.025603 | 0.850283 |
| 418 | 0.004341 | 0.025106 | 0.846304 |
| 419 | 0.004202 | 0.024844 | 1.080883 |
| 420 | 0.004135 | 0.024946 | 0.97078 |
| 422 | 0.004459 | 0.025873 | 1.058666 |
| 423 | 0.004274 | 0.025787 | 1.226844 |
| 424 | 0.004383 | 0.024211 | 0.850711 |
| 425 | 0.004319 | 0.025464 | 0.973357 |
| 426 | 0.004226 | 0.025422 | 0.838836 |
| 427 | 0.004226 | 0.025762 | 0.973639 |
| 428 | 0.004161 | 0.025186 | 0.86052 |
| 429 | 0.004196 | 0.02512 | 1.028343 |
| 430 | 0.004215 | 0.0256 | 1.062937 |
| 431 | 0.00421 | 0.025733 | 1.00445 |
| 433 | 0.004741 | 0.027408 | 0.950117 |
| 434 | 0.004318 | 0.025754 | 1.092758 |
| 435 | 0.004428 | 0.025757 | 1.018609 |
| 436 | 0.004163 | 0.02512 | 0.727576 |
| 437 | 0.004243 | 0.025229 | 0.780294 |
| 438 | 0.00418 | 0.026218 | 1.039505 |
| 439 | 0.004887 | 0.026537 | 1.117939 |
| 440 | 0.005189 | 0.028072 | 0.889784 |
| 441 | 0.004272 | 0.025361 | 0.836717 |
| 442 | 0.004524 | 0.02738 | 0.921425 |
| 443 | 0.004218 | 0.025148 | 1.162762 |
| 444 | 0.004237 | 0.024847 | 0.728786 |
| 445 | 0.004293 | 0.025134 | 1.175772 |
| 446 | 0.005773 | 0.02595 | 0.999823 |
| 447 | 0.004274 | 0.025853 | 1.006288 |
| 448 | 0.004344 | 0.02546 | 0.863958 |
| 449 | 0.004346 | 0.025705 | 0.920647 |
| 450 | 0.004326 | 0.025476 | 0.816123 |
| 451 | 0.004237 | 0.025069 | 0.846299 |
| 452 | 0.005257 | 0.025596 | 0.800487 |
| 453 | 0.007428 | 0.026513 | 1.037012 |
| 454 | 0.004303 | 0.024553 | 0.94302 |
| 455 | 0.010434 | 0.037939 | 0.690676 |
| 456 | 0.007299 | 0.027948 | 1.099247 |
| 457 | 0.004251 | 0.025526 | 0.872239 |
| 458 | 0.004302 | 0.025162 | 1.050254 |
| 459 | 0.004217 | 0.025242 | 0.856808 |
| 460 | 0.004174 | 0.02491 | 0.771856 |
| 461 | 0.004283 | 0.023773 | 0.825394 |
| 462 | 0.004232 | 0.026042 | 1.06574 |
| 463 | 0.00424 | 0.02602 | 0.834992 |
| 464 | 0.004112 | 0.026109 | 1.215674 |
| 465 | 0.004229 | 0.025226 | 0.796978 |
| 466 | 0.004197 | 0.024889 | 1.287377 |
| 467 | 0.005177 | 0.025637 | 0.884542 |
| 469 | 0.00431 | 0.025306 | 1.013611 |
| 470 | 0.004249 | 0.025992 | 0.811355 |
| 471 | 0.004548 | 0.027775 | 0.99103 |
| 473 | 0.005266 | 0.027614 | 0.841048 |
| 474 | 0.005181 | 0.025263 | 1.045863 |
| 475 | 0.004214 | 0.024591 | 1.055417 |
| 476 | 0.004585 | 0.024957 | 0.96854 |
| 477 | 0.005587 | 0.026272 | 1.177024 |
| 478 | 0.005441 | 0.028445 | 0.988752 |
| 479 | 0.004717 | 0.027028 | 0.856542 |
| 480 | 0.004527 | 0.026333 | 0.732261 |
| 481 | 0.004189 | 0.026134 | 1.042274 |
| 482 | 0.004308 | 0.025592 | 1.144538 |
| 483 | 0.004232 | 0.025486 | 0.988084 |
| 484 | 0.005422 | 0.026264 | 0.930135 |
| 486 | 0.010488 | 0.036814 | 0.400608 |
| 487 | 0.009352 | 0.035227 | 0.398473 |
| 488 | 0.011628 | 0.039565 | 0.371609 |
| 489 | 0.010104 | 0.036386 | 0.522603 |
| 490 | 0.010243 | 0.035054 | 0.428049 |
| 491 | 0.009427 | 0.034974 | 0.456625 |
| 492 | 0.009978 | 0.034961 | 0.578826 |
| 493 | 0.017268 | 0.035854 | 0.439093 |
| 494 | 0.011939 | 0.036741 | 0.564414 |
| 495 | 0.009874 | 0.035139 | 0.393693 |
| 496 | 0.009436 | 0.033925 | 0.438625 |
| 499 | 0.017365 | 0.040412 | 0.408489 |
| 500 | 0.010443 | 0.035109 | 0.376297 |
| 501 | 0.098725 | 0.035501 | 0.705679 |
| 502 | 0.009362 | 0.036715 | 0.497175 |
| 503 | 0.010364 | 0.039033 | 0.408634 |
| 504 | 0.01097 | 0.034864 | 0.429402 |
| 505 | 0.011296 | 0.045354 | 0.444601 |
| 506 | 0.009332 | 0.034205 | 0.450232 |
| 507 | 0.009893 | 0.052264 | 0.571042 |
| 508 | 0.009472 | 0.034109 | 0.533749 |
| 510 | 0.010046 | 0.035326 | 0.405723 |
| 511 | 0.009439 | 0.03423 | 0.345853 |
| 512 | 0.009106 | 0.034492 | 0.364057 |
| 513 | 0.013017 | 0.036592 | 0.399432 |
| 514 | 0.029114 | 0.157091 | 0.665907 |
| 515 | 0.009588 | 0.035852 | 0.430589 |
| 516 | 0.01053 | 0.034159 | 0.347145 |
| 517 | 0.011616 | 0.049112 | 0.479119 |
| 518 | 0.010441 | 0.034833 | 0.526338 |
| 519 | 0.012705 | 0.03856 | 0.465362 |
| 520 | 0.036111 | 0.066426 | 0.601134 |
| 521 | 0.009721 | 0.035602 | 0.5263 |
| 522 | 0.009626 | 0.034174 | 0.411501 |
| 523 | 0.010243 | 0.034049 | 0.461773 |
| 524 | 0.009466 | 0.03404 | 0.450292 |
| 525 | 0.009484 | 0.035115 | 0.428652 |
| 526 | 0.034651 | 0.049443 | 0.470629 |
| 527 | 0.010225 | 0.035086 | 0.474979 |
| 528 | 0.01019 | 0.0345 | 0.559636 |
| 529 | 0.0097 | 0.044281 | 0.512486 |
| 531 | 0.011152 | 0.035546 | 0.358218 |
| 532 | 0.017782 | 0.037115 | 0.476891 |
| 533 | 0.010199 | 0.033963 | 0.420376 |
| 534 | 0.009483 | 0.035329 | 0.29936 |
| 535 | 0.90231 | 0.680855 | 0.881043 |
| 537 | 0.010176 | 0.034227 | 0.547417 |
| 539 | 0.009638 | 0.034846 | 0.4356 |
| 540 | 0.00967 | 0.035308 | 0.379571 |
| 541 | 0.020438 | 0.064563 | 0.553054 |
| 542 | 0.0096 | 0.035474 | 0.46663 |
| 543 | 0.010103 | 0.036928 | 0.391608 |
| 544 | 0.031817 | 0.071379 | 0.405136 |
| 545 | 0.011419 | 0.044632 | 0.471581 |
| 546 | 0.009434 | 0.034118 | 0.633882 |
| 547 | 0.009671 | 0.034574 | 0.37907 |
| 548 | 0.009753 | 0.03389 | 0.425888 |
| 549 | 0.009679 | 0.034543 | 0.416178 |
| 550 | 0.010414 | 0.035565 | 0.382037 |
| 551 | 0.009573 | 0.034555 | 0.569187 |
| 553 | 0.010895 | 0.037061 | 0.452852 |
| 554 | 0.0252 | 0.106556 | 0.399393 |
| 556 | 0.009499 | 0.034102 | 0.463958 |
| 557 | 0.016537 | 0.050391 | 0.406694 |
| 558 | 0.029851 | 0.098052 | 0.422865 |
| 559 | 0.240194 | 0.948046 | 0.755382 |
| 560 | 0.023732 | 0.142099 | 0.410883 |
| 561 | 0.009951 | 0.034656 | 0.525667 |
| 562 | 0.023838 | 0.071971 | 0.547672 |
| 563 | 0.029476 | 0.233222 | 0.518497 |
| 564 | 0.009775 | 0.033845 | 0.432675 |
| 565 | 0.014326 | 0.034722 | 0.462568 |
| 567 | 0.062129 | 0.223441 | 0.412738 |
| 568 | 0.010126 | 0.035292 | 0.406865 |
| 569 | 0.010231 | 0.035076 | 0.671012 |
| 570 | 0.010125 | 0.035003 | 0.480816 |
| 571 | 0.010039 | 0.034758 | 0.495482 |
| 572 | 0.010531 | 0.045745 | 0.522281 |
| 573 | 0.025354 | 0.034962 | 0.419466 |
| 574 | 0.243552 | 0.556199 | 0.762058 |
| 575 | 0.015572 | 0.035785 | 0.437496 |
| 576 | 0.013035 | 0.038805 | 0.531242 |
| 577 | 0.032586 | 0.079404 | 0.417157 |
| 578 | 0.02313 | 0.063316 | 0.474352 |
| 579 | 0.065246 | 0.302516 | 0.543815 |
| 581 | 0.354729 | 0.62217 | 1.144543 |
| 582 | 0.033618 | 0.058613 | 0.615124 |
| 583 | 0.308377 | 0.394948 | 0.932255 |
| 585 | 0.006337 | 0.020183 | 0.315108 |
| 586 | 0.163191 | 0.081969 | 0.381663 |
| 587 | 0.005108 | 0.023774 | 0.224587 |
| 588 | 0.021841 | 0.05963 | 0.370248 |
| 589 | 0.046721 | 0.333438 | 0.27475 |
| 590 | 0.090307 | 0.279891 | 0.29317 |
| 591 | 0.028787 | 0.07838 | 0.325743 |
| 592 | 0.005702 | 0.020121 | 0.306412 |
| 593 | 0.0099 | 0.046476 | 0.246072 |
| 594 | 0.015627 | 0.043937 | 0.215799 |
| 595 | 0.004629 | 0.019544 | 0.251833 |
| 596 | 0.046096 | 0.243097 | 0.24242 |
| 597 | 0.724998 | 0.981484 | 0.844379 |
| 598 | 0.026838 | 0.114469 | 0.289663 |
| 599 | 0.005828 | 0.019718 | 0.257416 |
| 600 | 0.005909 | 0.019865 | 0.251511 |
| 601 | 0.00614 | 0.020424 | 0.288905 |
| 602 | 0.005997 | 0.020776 | 0.216972 |
| 603 | 0.004669 | 0.019593 | 0.244223 |
| 604 | 0.008771 | 0.03346 | 0.323606 |
| 605 | 0.006624 | 0.020724 | 0.274329 |
| 606 | 0.005853 | 0.020382 | 0.242918 |
| 607 | 0.007747 | 0.021643 | 0.255363 |
| 608 | 0.005712 | 0.019678 | 0.221593 |
| 609 | 0.256073 | 0.504568 | 0.599603 |
| 610 | 0.005913 | 0.020199 | 0.199839 |
| 611 | 0.00447 | 0.019293 | 0.258074 |
| 612 | 0.005724 | 0.019734 | 0.360177 |
| 613 | 0.005694 | 0.019843 | 0.280102 |
| 614 | 0.005742 | 0.019885 | 0.286104 |
| 615 | 0.005705 | 0.019587 | 0.226829 |
| 616 | 0.006013 | 0.020573 | 0.266788 |
| 617 | 0.035272 | 0.094008 | 0.237734 |
| 618 | 0.026309 | 0.025971 | 0.242108 |
| 619 | 0.004687 | 0.020401 | 0.240359 |
| 620 | 0.00571 | 0.019825 | 0.218814 |
| 621 | 0.006001 | 0.020668 | 0.280146 |
| 622 | 0.082002 | 0.273485 | 0.335066 |
| 623 | 0.006029 | 0.020465 | 0.261982 |
| 624 | 0.140559 | 0.424388 | 0.42443 |
| 625 | 0.005826 | 0.019866 | 0.264531 |
| 626 | 0.051468 | 0.032244 | 0.306101 |
| 627 | 0.075104 | 0.276951 | 0.298932 |
| 628 | 0.005997 | 0.022048 | 0.26821 |
| 629 | 0.034034 | 0.401114 | 0.435605 |
| 630 | 0.011946 | 0.027566 | 0.254444 |
| 631 | 0.005914 | 0.020147 | 0.288981 |
| 632 | 0.037385 | 0.026122 | 0.362523 |
| 633 | 0.005826 | 0.019832 | 0.356419 |
| 634 | 0.010026 | 0.030547 | 0.206994 |
| 635 | 0.01508 | 0.04919 | 0.264614 |
| 636 | 0.296551 | 1.260655 | 0.610765 |
| 637 | 0.032124 | 0.375722 | 0.306647 |
| 638 | 0.005896 | 0.021846 | 0.271964 |
| 639 | 0.018881 | 0.148987 | 0.215144 |
| 640 | 0.018015 | 0.131161 | 0.288994 |
| 641 | 0.032334 | 0.02755 | 0.409355 |
| 642 | 0.067149 | 0.273403 | 0.35373 |
| 643 | 0.094609 | 0.53261 | 0.4944 |
| 644 | 0.006418 | 0.02472 | 0.231759 |
| 645 | 0.131335 | 0.734794 | 0.553125 |
| 646 | 0.029427 | 0.344127 | 0.390884 |
| 647 | 0.023863 | 0.136043 | 0.300959 |
| 650 | 0.010281 | 0.03014 | 0.242733 |
| 651 | 0.007994 | 0.028947 | 0.25194 |
| 652 | 0.15318 | 0.627023 | 0.43527 |
| 653 | 0.118823 | 0.69422 | 0.40527 |
| 654 | 0.105353 | 0.646828 | 0.388119 |
| 656 | 0.006783 | 0.02363 | 0.269316 |
| 657 | 0.307363 | 1.189775 | 0.605584 |
| 658 | 0.142732 | 0.450462 | 0.421859 |
| 659 | 0.22685 | 0.512994 | 0.582274 |
| 660 | 0.088314 | 0.402555 | 0.524885 |
| 661 | 0.180276 | 0.439707 | 0.530249 |
| 662 | 0.010698 | 0.060157 | 0.272901 |
| 663 | 0.161736 | 0.431703 | 0.609228 |
| 664 | 0.104153 | 0.348438 | 0.502663 |
| 665 | 0.509021 | 0.807128 | 0.717144 |
| 666 | 0.474224 | 0.60482 | 0.829418 |
| 667 | 0.04441 | 0.198916 | 0.289447 |
| 668 | 0.072205 | 0.466606 | 0.40305 |
| 669 | 0.026334 | 0.185174 | 0.304685 |
| 670 | 0.108713 | 0.572116 | 0.361198 |
| 671 | 0.054216 | 0.293384 | 0.286724 |
| 672 | 0.089022 | 0.461053 | 0.683679 |
| 673 | 0.052496 | 0.22393 | 0.290818 |
| 674 | 0.242917 | 0.426446 | 0.671781 |
| 675 | 0.020806 | 0.100778 | 0.254393 |
| 676 | 0.120498 | 0.594332 | 0.557211 |
| 677 | 0.083653 | 0.221249 | 0.399649 |
| 678 | 0.006713 | 0.026074 | 0.284843 |
| 679 | 0.012988 | 0.238136 | 0.251857 |
| 680 | 0.939588 | 1.168014 | 0.89748 |
| 682 | 0.116101 | 0.51627 | 0.411418 |
| 683 | 0.091835 | 0.41856 | 0.330861 |
| 684 | 0.269272 | 0.956985 | 0.388996 |
| 685 | 0.068553 | 0.420129 | 0.219238 |
| 686 | 0.118729 | 0.627236 | 0.408928 |
| 687 | 0.109438 | 0.486295 | 0.332833 |
| 688 | 0.136059 | 0.604523 | 0.382106 |
| 689 | 0.029476 | 0.230011 | 0.246326 |
| 690 | 0.713106 | 1.287446 | 0.527058 |
| 691 | 0.237497 | 0.831741 | 0.595391 |
| 692 | 0.223793 | 1.114774 | 0.464139 |
| 693 | 0.271839 | 2.152616 | 0.674694 |
| 694 | 0.05139 | 0.613276 | 0.240255 |
| 695 | 0.327666 | 1.036856 | 0.542561 |
| 696 | 0.098363 | 0.604772 | 0.25928 |
| 697 | 0.375897 | 0.957958 | 0.549728 |
| 698 | 0.026512 | 0.225899 | 0.241871 |
| 699 | 0.497694 | 1.50769 | 0.574673 |
| 700 | 0.288469 | 0.915024 | 0.510727 |
| 701 | 0.437509 | 1.020715 | 0.734873 |
| 702 | 0.046205 | 0.476705 | 0.190078 |
| 703 | 0.122863 | 0.83862 | 0.282447 |
| 704 | 0.147205 | 0.901082 | 0.301388 |
| 705 | 0.223074 | 0.853951 | 0.40577 |
| 706 | 0.008438 | 0.033092 | 0.191812 |
| 707 | 0.394494 | 0.997947 | 0.843619 |
| 708 | 0.186993 | 1.051411 | 0.468843 |
| 709 | 0.108893 | 0.601642 | 0.210326 |
| 710 | 0.091753 | 0.734575 | 0.237951 |
| 711 | 0.345755 | 1.159082 | 0.385849 |
| 712 | 0.115713 | 0.513471 | 0.287018 |
| 713 | 0.122493 | 0.686785 | 0.347889 |
| 714 | 0.191872 | 0.830288 | 0.567754 |
| 715 | 0.016321 | 0.055715 | 0.200218 |
| 716 | 0.020481 | 0.530732 | 0.198959 |
| 717 | 0.039274 | 0.234164 | 0.199885 |
| 718 | 0.344223 | 1.062216 | 0.47539 |
| 719 | 0.034917 | 0.299112 | 0.221854 |
| 720 | 0.149534 | 0.777313 | 0.356745 |
| 721 | 0.35108 | 1.01378 | 0.464163 |
| 722 | 0.234439 | 0.884539 | 0.353844 |
| 723 | 0.0088 | 0.035731 | 0.175315 |
| 724 | 0.302881 | 1.254204 | 0.495122 |
| 725 | 0.05075 | 0.39608 | 0.275113 |
| 726 | 0.081523 | 0.495768 | 0.301285 |
| 727 | 0.043541 | 0.247525 | 0.249821 |
| 728 | 0.33696 | 1.546341 | 0.460674 |
| 729 | 0.359043 | 1.008995 | 0.546047 |
| 730 | 0.097955 | 0.496152 | 0.329261 |
| 731 | 0.072919 | 0.443675 | 0.274429 |
| 732 | 0.015001 | 0.060524 | 0.182808 |
| 733 | 0.453244 | 1.410075 | 0.629982 |
| 734 | 0.342572 | 1.700432 | 0.413281 |
| 735 | 0.012613 | 0.050176 | 0.182816 |
| 736 | 0.016461 | 0.063952 | 0.182823 |
| 738 | 0.482005 | 1.605961 | 0.567678 |
| 739 | 0.58218 | 1.397435 | 0.754253 |
| 740 | 0.029093 | 0.051791 | 0.207152 |
| 741 | 0.349249 | 1.283688 | 0.511103 |
| 742 | 0.04606 | 0.482528 | 0.221214 |
| 743 | 0.141882 | 0.376925 | 2.230581 |
| 744 | 0.254656 | 0.939146 | 0.493241 |
| 745 | 0.015338 | 0.058975 | 0.213153 |
| 746 | 0.340833 | 0.962798 | 0.521323 |
| 747 | 0.701684 | 1.619727 | 0.658665 |
| 748 | 0.442992 | 1.472323 | 0.774321 |
| 749 | 0.196686 | 0.71019 | 0.441595 |
| 750 | 0.00964 | 0.038536 | 0.188239 |
| 751 | 0.360595 | 1.364262 | 0.554156 |
| 752 | 0.32576 | 1.182967 | 0.622747 |
| 753 | 0.066818 | 0.928007 | 0.240297 |
| 754 | 0.017628 | 0.16402 | 0.222692 |
| 755 | 0.237297 | 1.072629 | 0.451982 |
| 756 | 0.178168 | 1.009049 | 0.452329 |
| 757 | 0.012459 | 0.041059 | 0.194411 |
| 758 | 0.007271 | 0.030828 | 0.157203 |
| 759 | 0.031242 | 0.159577 | 0.186227 |
| 761 | 0.043353 | 0.146524 | 0.225515 |
| 762 | 0.007574 | 0.030242 | 0.208583 |
| 763 | 0.008587 | 0.032455 | 0.1986 |
| 764 | 0.008102 | 0.033408 | 0.169696 |
| 765 | 0.008951 | 0.03922 | 0.17488 |
| 766 | 0.018024 | 0.295069 | 0.205724 |
| 767 | 0.124411 | 0.768264 | 0.418591 |
| 768 | 0.008208 | 0.036795 | 0.183375 |
| 769 | 0.036346 | 0.37833 | 0.238709 |
| 770 | 0.279379 | 1.535747 | 0.723481 |
| 771 | 0.643475 | 0.520238 | 0.45387 |
| 772 | 0.014665 | 0.047355 | 0.166823 |
| 773 | 0.468419 | 2.022633 | 0.735404 |
| 774 | 0.362808 | 1.622526 | 0.436049 |
| 775 | 0.008859 | 0.038937 | 0.134732 |
| 776 | 0.311065 | 0.985297 | 0.574464 |
| 777 | 0.039862 | 0.065683 | 0.181863 |
| 779 | 0.123206 | 0.450318 | 0.697269 |
| 780 | 0.006814 | 0.029606 | 0.249389 |
| 781 | 0.009967 | 0.031473 | 0.286858 |
| 782 | 0.777497 | 1.325239 | 0.830948 |
| 783 | 0.587889 | 1.292049 | 1.019843 |
| 784 | 0.387894 | 0.821784 | 0.97539 |
| 786 | 0.120025 | 0.185762 | 0.380872 |
| 787 | 0.235698 | 0.942409 | 1.240669 |
| 788 | 0.336218 | 1.269178 | 0.957619 |
| 789 | 0.01732 | 0.096762 | 0.304029 |
| 791 | 0.617079 | 1.629033 | 1.466181 |
| 792 | 0.185997 | 0.704769 | 0.536405 |
| 793 | 0.877167 | 1.831368 | 1.454354 |
| 794 | 0.009408 | 0.076964 | 0.311169 |
| 795 | 0.099921 | 0.429592 | 0.632075 |
| 796 | 0.094809 | 0.536362 | 0.432216 |
| 797 | 0.244954 | 0.482612 | 0.621421 |
| 798 | 0.017916 | 0.084297 | 0.371982 |
| 799 | 0.012818 | 0.047289 | 0.29833 |
| 800 | 0.011675 | 0.13481 | 0.297163 |
| 801 | 0.099266 | 0.273608 | 0.403125 |
| 802 | 0.367887 | 1.18793 | 0.85394 |
| 803 | 0.006742 | 0.027036 | 0.289538 |
| 804 | 0.059456 | 0.162059 | 0.353715 |
| 805 | 0.01413 | 0.033509 | 0.294557 |
| 806 | 0.518086 | 1.610542 | 0.760268 |
| 807 | 0.022595 | 0.066194 | 0.294225 |
| 808 | 0.459064 | 1.277287 | 1.042237 |
| 810 | 0.012544 | 0.05468 | 0.274167 |
| 811 | 0.151174 | 0.538166 | 0.417778 |
| 812 | 0.006597 | 0.025521 | 0.283047 |
| 813 | 0.00961 | 0.027888 | 0.286255 |
| 814 | 0.048257 | 0.855988 | 0.357851 |
| 815 | 0.008921 | 0.03568 | 0.252635 |
| 816 | 0.39553 | 1.021138 | 0.918671 |
| 817 | 0.123764 | 0.912411 | 0.462477 |
| 818 | 0.007052 | 0.060048 | 0.259581 |
| 820 | 0.595672 | 0.572794 | 2.367059 |
| 821 | 0.027009 | 0.077125 | 0.292614 |
| 822 | 0.006996 | 0.035426 | 0.27968 |
| 823 | 0.61953 | 2.009281 | 0.808006 |
| 824 | 0.078118 | 0.029309 | 0.329722 |
| 825 | 0.038471 | 0.505871 | 0.321534 |
| 826 | 0.214307 | 1.236203 | 0.710454 |
| 827 | 0.187119 | 1.091001 | 0.678169 |
| 828 | 0.008155 | 0.032836 | 0.286114 |
| 829 | 0.043091 | 0.374192 | 0.385331 |
| 830 | 0.227057 | 0.993627 | 0.956788 |
| 831 | 0.111249 | 0.782791 | 0.514752 |
| 832 | 0.007741 | 0.034744 | 0.240929 |
| 833 | 0.148308 | 1.302523 | 0.621108 |
| 834 | 0.050544 | 0.635099 | 0.432155 |
| 835 | 0.107654 | 0.475431 | 0.419748 |
| 836 | 0.332776 | 1.197718 | 0.712195 |
| 837 | 0.007024 | 0.02723 | 0.249139 |
| 839 | 0.541139 | 1.487877 | 1.280705 |
| 840 | 0.434719 | 1.514761 | 1.27396 |
| 841 | 0.268407 | 1.048218 | 0.711256 |
| 842 | 0.258458 | 1.028083 | 0.818548 |
| 843 | 0.211266 | 0.691019 | 1.864166 |
| 846 | 0.14662 | 0.821729 | 1.1122 |
| 847 | 0.386867 | 1.568454 | 0.669131 |
| 848 | 0.080316 | 0.56734 | 0.850772 |
| 849 | 0.25383 | 1.721732 | 0.602704 |
| 850 | 0.526909 | 1.78363 | 0.891613 |
| 851 | 0.116222 | 0.76078 | 0.77039 |
| 852 | 0.206702 | 0.560921 | 1.415325 |
| 853 | 0.238304 | 1.081284 | 0.677935 |
| 854 | 0.053709 | 0.430447 | 0.580549 |
| 855 | 0.218825 | 0.941552 | 0.664315 |
| 856 | 0.101452 | 0.224533 | 0.577448 |
| 857 | 0.417144 | 0.902022 | 1.306233 |
| 858 | 0.03876 | 0.729869 | 0.32705 |
| 859 | 0.007745 | 0.034045 | 0.25266 |
| 860 | 0.008348 | 0.045165 | 0.274574 |
| 861 | 0.594983 | 1.639781 | 1.271579 |
| 862 | 0.900769 | 1.57937 | 1.004981 |
| 863 | 0.537996 | 1.331377 | 1.261956 |
| 864 | 0.388698 | 0.891772 | 1.285634 |
| 865 | 0.264661 | 1.079879 | 0.864063 |
| 866 | 0.06028 | 0.22964 | 0.478783 |
| 867 | 0.239258 | 0.716616 | 0.710261 |
| 868 | 0.008279 | 0.030116 | 0.264729 |
| 870 | 0.345182 | 0.941026 | 1.084312 |
| 871 | 0.381332 | 0.702232 | 1.235897 |
| 872 | 0.007184 | 0.0288 | 0.280018 |
| 873 | 0.011191 | 0.037242 | 0.285839 |
| 874 | 0.149494 | 0.617071 | 1.476994 |
| 875 | 0.172408 | 0.907391 | 0.867952 |
| 876 | 0.462175 | 1.088865 | 1.306636 |
| 878 | 0.010338 | 0.034189 | 0.216719 |
| 879 | 0.004925 | 0.019286 | 0.108567 |
| 881 | 0.005183 | 0.020939 | 0.088123 |
| 882 | 0.005094 | 0.020658 | 0.090945 |
| 883 | 0.005435 | 0.022801 | 0.085715 |
| 884 | 0.150855 | 0.669518 | 0.216276 |
| 885 | 0.352227 | 0.729722 | 0.522431 |
| 886 | 0.00519 | 0.04764 | 0.094334 |
| 887 | 0.006618 | 0.067628 | 0.098385 |
| 888 | 0.689507 | 1.833727 | 0.663895 |
| 889 | 0.192102 | 1.196074 | 0.344485 |
| 890 | 0.348046 | 1.61085 | 0.692815 |
| 891 | 0.080898 | 0.580847 | 0.200646 |
| 892 | 0.044425 | 0.718329 | 0.121203 |
| 893 | 0.382721 | 0.843293 | 0.376432 |
| 894 | 0.068781 | 0.640743 | 0.21479 |
| 896 | 0.014415 | 0.055218 | 0.107079 |
| 897 | 0.00687 | 0.027706 | 0.094585 |
| 898 | 0.286212 | 1.357183 | 0.357932 |
| 899 | 0.297653 | 1.1528 | 0.302755 |
| 900 | 0.327981 | 0.932419 | 0.386499 |
| 901 | 0.010727 | 0.05943 | 0.088041 |
| 902 | 0.350484 | 1.180504 | 0.40489 |
| 903 | 0.374566 | 1.622565 | 0.396166 |
| 904 | 0.166397 | 1.049689 | 0.320325 |
| 905 | 0.136541 | 0.817688 | 0.362347 |
| 906 | 0.291429 | 1.325833 | 0.396889 |
| 907 | 0.347797 | 1.267447 | 0.541789 |
| 908 | 0.034779 | 0.467747 | 0.163031 |
| 909 | 0.164487 | 0.350343 | 0.141732 |
| 910 | 0.265078 | 0.886219 | 0.407203 |
| 911 | 0.220201 | 0.717038 | 0.423402 |
| 912 | 0.186388 | 0.85741 | 0.362314 |
| 913 | 0.518467 | 1.762848 | 0.547938 |
| 914 | 0.40602 | 1.766605 | 0.454544 |
| 915 | 0.163459 | 1.042566 | 0.26138 |
| 916 | 0.296433 | 1.092387 | 0.371475 |
| 917 | 0.635553 | 1.261914 | 0.549559 |
| 918 | 0.291057 | 1.006901 | 0.474071 |
| 919 | 0.413799 | 1.246473 | 0.564896 |
| 920 | 0.179531 | 1.451147 | 0.495419 |
| 921 | 0.178932 | 1.285129 | 0.41161 |
| 923 | 0.317288 | 1.146979 | 0.387911 |
| 924 | 0.273164 | 0.914613 | 0.414757 |
| 925 | 0.19808 | 0.725391 | 0.296935 |
| 926 | 0.009777 | 0.035042 | 0.100935 |
| 927 | 0.436574 | 1.262457 | 0.683576 |
| 928 | 0.183262 | 0.813709 | 0.402288 |
| 929 | 0.094365 | 0.787482 | 0.213812 |
| 930 | 0.009025 | 0.063975 | 0.099171 |
| 931 | 0.032034 | 0.095047 | 0.131713 |
| 932 | 0.429418 | 1.050149 | 0.621605 |
| 933 | 0.0172 | 0.052524 | 0.099638 |
| 934 | 0.632772 | 1.169765 | 0.781487 |
| 935 | 0.253132 | 1.3481 | 0.278776 |
| 936 | 0.170298 | 1.000176 | 0.277753 |
| 937 | 0.15824 | 0.84717 | 0.442072 |
| 938 | 0.20538 | 0.88334 | 0.432407 |
| 939 | 0.224863 | 0.999881 | 0.380371 |
| 940 | 0.006178 | 0.021918 | 0.089462 |
| 941 | 0.011284 | 0.066173 | 0.115573 |
| 942 | 0.173491 | 0.708929 | 0.733394 |
| 943 | 0.189128 | 1.089849 | 0.316464 |
| 944 | 0.090245 | 0.422225 | 0.480858 |
| 946 | 0.230236 | 0.894889 | 0.396333 |
| 947 | 0.257151 | 0.909063 | 0.325964 |
| 948 | 0.170075 | 0.588195 | 0.260671 |
| 949 | 0.187726 | 0.806307 | 0.331384 |
| 950 | 0.22905 | 0.942413 | 0.603096 |
| 951 | 0.397644 | 0.841753 | 0.3522 |
| 952 | 0.049028 | 0.367599 | 0.253907 |
| 953 | 0.147509 | 0.791804 | 0.804695 |
| 954 | 0.16991 | 0.798194 | 0.475492 |
| 955 | 0.264691 | 0.591625 | 0.406549 |
| 957 | 0.148218 | 0.602345 | 0.46558 |
| 958 | 0.204506 | 0.863187 | 0.592641 |
| 959 | 0.255224 | 1.064249 | 0.774381 |
| 961 | 0.156063 | 1.110527 | 0.516403 |
| 962 | 0.212997 | 1.217959 | 0.365859 |
| 963 | 0.0211 | 0.144681 | 0.150198 |
| 964 | 0.489565 | 1.57383 | 0.615012 |
| 965 | 0.251985 | 0.770085 | 0.522089 |
| 966 | 0.55303 | 0.923252 | 0.527881 |
| 967 | 0.374958 | 1.224169 | 0.526617 |
| 968 | 0.07674 | 0.128785 | 0.431369 |
| 969 | 0.186199 | 0.698537 | 0.472067 |
| 970 | 0.161868 | 0.595542 | 0.889933 |
| 971 | 0.057774 | 0.497863 | 0.206401 |
| 972 | 0.089708 | 0.555687 | 0.328706 |
| 974 | 0.4611 | 1.588992 | 0.988689 |
| 975 | 0.501721 | 1.70434 | 0.729741 |
| 976 | 0.468553 | 1.572864 | 0.520521 |
| 977 | 0.465145 | 1.349452 | 0.80622 |
| 978 | 0.060567 | 1.227042 | 0.179786 |
| 980 | 0.649997 | 2.424418 | 0.991253 |
| 981 | 0.675473 | 1.395536 | 0.799773 |
| 982 | 0.493201 | 1.634458 | 0.836638 |
| 983 | 0.6355 | 4.406334 | 0.657997 |
| 984 | 0.622337 | 2.861176 | 0.393731 |
| 985 | 0.247394 | 1.921413 | 0.406224 |
| 986 | 0.098809 | 1.089629 | 0.184354 |
| 987 | 0.47511 | 2.42364 | 0.361921 |
| 988 | 0.364262 | 1.773289 | 0.713466 |
| 989 | 0.751797 | 1.903482 | 0.467399 |
| 992 | 0.251144 | 1.61049 | 0.379502 |
| 993 | 0.209284 | 1.691842 | 0.44776 |
| 994 | 0.34175 | 2.039731 | 0.798924 |
| 995 | 0.560565 | 3.12071 | 0.388763 |
| 996 | 0.407642 | 3.358356 | 0.353555 |
| 997 | 0.930576 | 2.730102 | 0.497813 |
| 998 | 0.325541 | 2.234049 | 0.512623 |
| 999 | 0.37115 | 2.362841 | 0.625508 |
| 1000 | 0.200748 | 2.565779 | 0.285251 |
| 1001 | 0.101767 | 1.532869 | 0.325446 |
| 1002 | 0.334714 | 3.270477 | 0.575591 |
| 1003 | 0.294501 | 2.785205 | 0.192242 |
| 1004 | 0.42759 | 3.329744 | 0.366353 |
| 1005 | 0.658112 | 2.554948 | 0.265405 |
| 1006 | 0.657566 | 1.865741 | 1.037788 |
| 1007 | 0.428267 | 2.664938 | 0.294918 |
| 1008 | 0.123986 | 1.595956 | 0.302035 |
| 1009 | 0.274442 | 2.817702 | 0.287299 |
| 1010 | 0.238204 | 3.007669 | 0.358667 |
| 1011 | 0.329633 | 2.440677 | 0.33232 |
| 1012 | 0.374152 | 3.023523 | 0.243111 |
| 1013 | 0.040086 | 0.407359 | 0.097212 |
| 1014 | 0.650383 | 2.577328 | 0.702306 |
| 1015 | 0.556326 | 3.822954 | 0.220832 |
| 1016 | 0.286549 | 2.359215 | 0.398523 |
| 1017 | 0.391716 | 5.493401 | 0.257803 |
| 1018 | 0.232929 | 2.135935 | 0.649378 |
| 1019 | 0.28219 | 2.371224 | 0.266729 |
| 1020 | 0.51863 | 2.875937 | 0.340747 |
| 1021 | 0.330813 | 1.726956 | 0.254804 |
| 1022 | 0.017793 | 0.063328 | 0.09479 |
| 1023 | 0.632422 | 5.001505 | 0.355245 |
| 1024 | 0.18462 | 1.771516 | 0.207356 |
| 1025 | 0.252709 | 2.019318 | 0.193805 |
| 1026 | 0.266125 | 3.425025 | 0.244887 |
| 1027 | 0.333355 | 2.88353 | 0.287246 |
| 1028 | 0.279444 | 1.656027 | 0.326932 |
| 1029 | 0.757301 | 2.168554 | 0.177607 |
| 1030 | 0.787768 | 3.103594 | 0.962656 |
| 1031 | 0.485323 | 3.727265 | 0.678268 |
| 1032 | 0.152334 | 1.921508 | 0.428204 |
| 1033 | 0.10525 | 1.592774 | 0.153351 |
| 1034 | 0.017448 | 0.092714 | 0.088247 |
| 1035 | 0.32027 | 2.717977 | 0.197946 |
| 1036 | 0.315469 | 1.59956 | 0.232083 |
| 1037 | 0.583145 | 2.318094 | 0.166805 |
| 1039 | 0.347433 | 2.874902 | 0.471893 |
| 1040 | 0.142964 | 1.920848 | 0.351992 |
| 1042 | 0.202209 | 2.100867 | 0.315035 |
| 1044 | 0.349521 | 2.320673 | 0.253838 |
| 1045 | 0.210983 | 0.761205 | 0.187876 |
| 1046 | 0.090748 | 0.371038 | 0.186849 |
| 1048 | 0.066928 | 0.667905 | 0.236017 |
| 1049 | 0.019242 | 0.114164 | 0.097972 |
| 1051 | 0.317465 | 2.158948 | 0.221567 |
| 1053 | 0.034762 | 0.16757 | 0.098127 |
| 1054 | 1.115094 | 3.572908 | 0.107919 |
| 1055 | 0.426255 | 2.279363 | 0.875474 |
| 1056 | 0.35721 | 2.140493 | 0.659378 |
| 1058 | 0.55246 | 3.14052 | 0.533825 |
| 1059 | 0.282424 | 1.535033 | 0.458698 |
| 1060 | 0.508811 | 3.071866 | 0.445119 |
| 1061 | 0.525733 | 2.601345 | 0.545443 |
| 1062 | 0.723702 | 1.828112 | 0.521941 |
| 1063 | 0.699279 | 2.002368 | 1.090698 |
| 1064 | 0.488057 | 1.746524 | 0.694956 |
| 1065 | 0.525503 | 2.352257 | 0.927797 |
| 1066 | 0.718979 | 3.256654 | 0.939838 |
| 1067 | 0.491483 | 1.809573 | 0.745394 |
| 1068 | 1.179541 | 3.74017 | 0.467877 |
| 1069 | 0.680638 | 2.4638 | 0.562974 |
| 1071 | 0.209584 | 0.500858 | 0.031699 |
| 1072 | 0.427886 | 1.498126 | 0.045503 |
| 1074 | 0.225285 | 0.934492 | 0.092819 |
| 1075 | 0.137715 | 0.599395 | 0.037514 |
| 1076 | 0.218044 | 1.024494 | 0.018691 |
| 1077 | 0.357504 | 1.710835 | 0.077848 |
| 1078 | 0.446448 | 1.518153 | 0.329426 |
| 1079 | 0.068825 | 0.57375 | 0.014851 |
| 1080 | 0.003884 | 0.019354 | 0.011699 |
| 1081 | 0.132094 | 0.892676 | 0.083692 |
| 1082 | 0.11434 | 0.923226 | 0.056705 |
| 1083 | 0.048631 | 0.398633 | 0.030346 |
| 1084 | 0.09557 | 0.924719 | 0.027728 |
| 1085 | 0.319794 | 0.776496 | 0.0123 |
| 1086 | 0.841477 | 2.348773 | 0.384012 |
| 1087 | 0.52158 | 1.199952 | 0.055537 |
| 1088 | 0.078823 | 0.411586 | 0.028465 |
| 1089 | 0.00343 | 0.019524 | 0.010609 |
| 1090 | 0.003436 | 0.019498 | 0.011946 |
| 1091 | 0.102675 | 0.821406 | 0.058983 |
| 1092 | 0.106604 | 0.815445 | 0.072592 |
| 1093 | 0.058575 | 0.476647 | 0.055827 |
| 1094 | 0.582942 | 1.352039 | 0.521226 |
| 1095 | 0.274994 | 0.998033 | 0.05091 |
| 1096 | 0.135482 | 0.659134 | 0.082443 |
| 1097 | 0.092301 | 0.934711 | 0.104868 |
| 1098 | 0.128824 | 1.226146 | 0.0726 |
| 1099 | 0.053711 | 0.584595 | 0.057494 |
| 1100 | 0.06731 | 0.735897 | 0.070774 |
| 1101 | 0.112476 | 0.815231 | 0.062219 |
| 1102 | 0.415663 | 1.212428 | 0.079545 |
| 1103 | 0.412005 | 1.754218 | 0.07277 |
| 1104 | 0.094334 | 0.470474 | 0.097149 |
| 1105 | 0.028017 | 0.537236 | 0.024877 |
| 1106 | 0.053871 | 0.742137 | 0.06444 |
| 1107 | 0.095169 | 1.103475 | 0.065829 |
| 1108 | 0.093046 | 0.820538 | 0.035385 |
| 1109 | 0.057641 | 0.482332 | 0.044518 |
| 1110 | 0.455043 | 1.55682 | 0.197962 |
| 1111 | 0.383534 | 1.350223 | 0.034935 |
| 1112 | 0.069077 | 0.719701 | 0.057509 |
| 1113 | 0.039422 | 0.485263 | 0.043295 |
| 1114 | 0.067072 | 0.91085 | 0.025613 |
| 1115 | 0.039005 | 0.503229 | 0.02457 |
| 1116 | 0.033876 | 0.323061 | 0.033704 |
| 1117 | 0.064028 | 0.56885 | 0.033787 |
| 1118 | 0.250182 | 0.508475 | 0.021224 |
| 1119 | 0.37371 | 0.826558 | 0.089181 |
| 1120 | 0.090101 | 0.592721 | 0.06047 |
| 1121 | 0.059672 | 1.02895 | 0.070457 |
| 1122 | 0.02492 | 0.538694 | 0.02872 |
| 1125 | 0.122305 | 0.680083 | 0.045805 |
| 1126 | 0.463398 | 1.267668 | 0.085815 |
| 1127 | 0.238281 | 1.080024 | 0.095938 |
| 1128 | 0.073365 | 0.521087 | 0.063778 |
| 1129 | 0.031089 | 0.393886 | 0.022686 |
| 1130 | 0.093374 | 0.767258 | 0.115614 |
| 1131 | 0.079149 | 0.574318 | 0.048331 |
| 1132 | 0.074191 | 0.643954 | 0.023463 |
| 1133 | 0.062971 | 0.480284 | 0.031931 |
| 1134 | 10.216714 | 2.20506 | 0.132402 |
| 1135 | 0.256515 | 0.844706 | 0.057365 |
| 1136 | 0.10945 | 0.887249 | 0.110266 |
| 1137 | 0.029429 | 0.352312 | 0.033672 |
| 1138 | 0.100706 | 0.864622 | 0.084684 |
| 1139 | 0.068952 | 0.846332 | 0.073941 |
| 1140 | 0.088214 | 0.797631 | 0.063666 |
| 1141 | 0.060094 | 0.359254 | 0.051047 |
| 1142 | 0.449206 | 1.015907 | 0.520133 |
| 1143 | 0.015059 | 0.08374 | 0.013579 |
| 1144 | 0.021431 | 0.415068 | 0.029096 |
| 1145 | 0.065197 | 0.376581 | 0.059013 |
| 1146 | 0.091757 | 0.625511 | 0.054384 |
| 1147 | 0.069289 | 0.534903 | 0.093464 |
| 1148 | 0.09357 | 0.984551 | 0.073067 |
| 1149 | 0.087768 | 0.722494 | 0.041795 |
| 1150 | 0.371622 | 1.089698 | 0.054021 |
| 1151 | 0.2795 | 0.947429 | 0.047765 |
| 1152 | 0.107195 | 0.384755 | 0.042152 |
| 1153 | 0.170766 | 0.881601 | 0.079923 |
| 1154 | 0.165804 | 1.199739 | 0.082085 |
| 1155 | 0.133725 | 0.619659 | 0.096667 |
| 1156 | 0.083408 | 0.615919 | 0.018728 |
| 1157 | 0.005065 | 0.022682 | 0.011868 |
| 1158 | 0.279768 | 0.567474 | 0.470594 |
| 1159 | 0.366023 | 1.092993 | 0.087006 |
| 1160 | 0.27576 | 0.987157 | 0.055226 |
| 1161 | 0.00888 | 0.211542 | 0.013514 |
| 1162 | 0.321948 | 1.123212 | 0.077234 |
| 1163 | 0.238473 | 0.676024 | 0.108033 |
| 1164 | 0.174887 | 0.553471 | 0.031922 |
| 1165 | 0.362907 | 1.060364 | 0.105512 |
| 1167 | 0.440301 | 3.41734 | |
| 1168 | 2.269595 | 6.148748 | |
| 1169 | 1.81238 | 4.676323 | |
| 1170 | 0.205013 | 0.821177 | |
| 1171 | 1.757897 | 3.916135 | |
| 1172 | 1.485171 | 1.939494 | |
| 1173 | 0.294994 | 0.522214 | |
| 1174 | 0.375652 | 1.011377 | |
| 1175 | 0.751857 | 4.08474 | |
| 1176 | 0.543517 | 3.338898 | |
| 1177 | 1.544519 | 7.245177 | |
| 1178 | 0.736878 | 2.629057 | |
| 1179 | 0.686547 | 2.072089 | |
| 1180 | 0.237255 | 0.98724 | |
| 1182 | 0.654624 | 1.237891 | |
| 1183 | 0.909645 | 4.061809 | |
| 1184 | 0.544952 | 2.024292 | |
| 1185 | 0.147863 | 1.25923 | |
| 1186 | 0.434429 | 1.954991 | |
| 1187 | 0.505786 | 3.505564 | |
| 1188 | 0.406861 | 2.548182 | |
| 1189 | 0.4624 | 2.051662 | |
| 1190 | 0.071895 | 0.226536 | |
| 1191 | 0.02375 | 0.087245 | |
| 1192 | 1.717893 | 7.465639 | |
| 1193 | 0.542623 | 4.373519 | |
| 1194 | 0.354838 | 3.577394 | |
| 1195 | 0.259933 | 3.12244 | |
| 1196 | 0.215423 | 2.052223 | |
| 1197 | 0.526893 | 2.109184 | |
| 1198 | 0.822275 | 1.940819 | |
| 1199 | 2.037406 | 9.409115 | |
| 1200 | 1.095359 | 5.130504 | |
| 1201 | 0.157644 | 0.731059 | |
| 1202 | 0.230264 | 1.923086 | |
| 1204 | 0.044579 | 0.913551 | |
| 1206 | 0.511955 | 1.209704 | |
| 1207 | 0.046192 | 0.162052 | |
| 1208 | 0.026908 | 0.124359 | |
| 1209 | 0.281822 | 3.216097 | |
| 1210 | 0.220147 | 2.427366 | |
| 1211 | 0.111229 | 1.298379 | |
| 1213 | 0.141412 | 0.865279 | |
| 1214 | 0.15488 | 0.459765 | |
| 1215 | 0.997818 | 3.321803 | |
| 1216 | 1.025901 | 4.406269 | |
| 1217 | 0.260845 | 2.930463 | |
| 1218 | 0.345315 | 3.143776 | |
| 1219 | 0.305255 | 1.957145 | |
| 1220 | 0.172212 | 1.168102 | |
| 1221 | 0.248967 | 0.814305 | |
| 1222 | 0.03732 | 0.119114 | |
| 1223 | 1.247387 | 3.024953 | |
| 1224 | 0.024175 | 0.081463 | |
| 1225 | 0.057454 | 0.455597 | |
| 1226 | 0.361586 | 4.237747 | |
| 1227 | 0.15804 | 1.518132 | |
| 1228 | 0.015375 | 0.056146 | |
| 1229 | 0.444241 | 1.249649 | |
| 1230 | 0.649691 | 1.15827 | |
| 1232 | 0.378509 | 0.925671 | |
| 1233 | 0.325411 | 2.625939 | |
| 1234 | 0.206621 | 2.051787 | |
| 1235 | 0.019165 | 0.09314 | |
| 1236 | 0.118642 | 1.658952 | |
| 1237 | 0.017709 | 0.057603 | |
| 1238 | 0.015895 | 0.043364 | |
| 1239 | 0.025104 | 0.079453 | |
| 1240 | 0.361175 | 2.493372 | |
| 1242 | 0.325351 | 1.821619 | |
| 1243 | 0.411323 | 2.267424 | |
| 1244 | 0.262681 | 1.368943 | |
| 1245 | 0.209877 | 1.009418 | |
| 1246 | 0.689115 | 0.935799 | |
| 1247 | 1.206727 | 3.45224 | |
| 1248 | 0.997846 | 3.186952 | |
| 1249 | 1.03331 | 4.151541 | |
| 1250 | 0.526962 | 1.830667 | |
| 1251 | 0.038789 | 0.160427 | |
| 1252 | 0.529876 | 1.476753 | |
| 1253 | 0.148526 | 0.512689 | |
| 1254 | 0.171619 | 0.496272 | |
| 1255 | 1.440028 | 4.650389 | |
| 1256 | 1.246323 | 3.526473 | |
| 1257 | 1.630471 | 3.27436 | |
| 1258 | 1.175351 | 3.563138 | |
| 1259 | 0.846546 | 1.714691 | |
| 1260 | 1.043862 | 0.869917 | |
| 1261 | 0.290872 | 0.44244 | |
| 1263 | 0.493679 | 0.657699 | 1.716926 |
| 1264 | 0.298742 | 0.443995 | 1.012966 |
| 1265 | 0.378744 | 0.471388 | 1.244712 |
| 1266 | 0.211218 | 0.327944 | 0.97188 |
| 1267 | 0.17315 | 0.41676 | 1.57404 |
| 1268 | 0.213092 | 0.396399 | 1.097609 |
| 1269 | 0.227781 | 0.372048 | 1.433456 |
| 1270 | 0.004499 | 0.018835 | 1.068802 |
| 1271 | 0.180553 | 0.407587 | 1.83541 |
| 1272 | 0.394666 | 0.599394 | 1.66783 |
| 1273 | 0.281898 | 0.489728 | 1.50982 |
| 1274 | 0.243913 | 0.319871 | 0.788908 |
| 1275 | 0.262209 | 0.4805 | 3.95034 |
| 1276 | 0.378342 | 0.610004 | 1.467933 |
| 1277 | 0.273883 | 0.469937 | 1.070136 |
| 1278 | 0.315846 | 0.734033 | 0.89974 |
| 1279 | 0.189246 | 0.354251 | 6.159851 |
| 1280 | 0.388472 | 0.494888 | 1.410746 |
| 1281 | 0.00514 | 0.020652 | 0.591781 |
| 1282 | 0.289013 | 0.482967 | 2.197797 |
| 1283 | 0.053841 | 0.067338 | 0.927451 |
| 1284 | 0.570301 | 0.633162 | 2.538618 |
| 1285 | 0.255977 | 0.464247 | 1.400939 |
| 1286 | 0.003738 | 0.01781 | 0.498459 |
| 1287 | 0.422493 | 0.771168 | 1.722777 |
| 1288 | 0.373076 | 0.512993 | 1.52444 |
| 1289 | 0.003707 | 0.017964 | 0.668949 |
| 1290 | 0.02527 | 0.048054 | 0.658627 |
| 1291 | 0.010359 | 0.025134 | 0.65155 |
| 1292 | 0.018398 | 0.043801 | 0.757339 |
| 1293 | 0.01987 | 0.051117 | 0.725236 |
| 1294 | 0.010602 | 0.029974 | 0.799556 |
| 1295 | 0.008196 | 0.027605 | 0.669465 |
| 1296 | 0.062396 | 0.233757 | 1.952551 |
| 1298 | 0.003269 | 0.017718 | 0.60053 |
| 1302 | 0.003654 | 0.017971 | 0.669614 |
| 1453 | 0.029035 | 0.074756 | 1.361452 |
| 1456 | 0.070888 | 0.141499 | 1.733833 |
| 1457 | 0.005302 | 0.02091 | 0.86533 |
| 1458 | 0.022487 | 0.056128 | 0.69949 |
| 1459 | 0.041481 | 0.10652 | 1.298416 |
| 1460 | 0.178585 | 0.283471 | 1.592463 |
| 1461 | 0.003819 | 0.018816 | 0.634444 |
| 1462 | 0.089803 | 0.219634 | 2.496717 |
| 1463 | 0.367361 | 0.489496 | 3.718475 |
| 1465 | 0.05509 | 0.079253 | 0.882252 |
| 1466 | 0.125624 | 0.195771 | 1.647541 |
| 1467 | 0.104653 | 0.186069 | 1.135532 |
| 1468 | 0.036721 | 0.09977 | 0.954748 |
| 1469 | 0.12058 | 0.220731 | 1.105286 |
| 1470 | 0.107829 | 0.199233 | 0.937104 |
| 1471 | 0.112351 | 0.216795 | 1.247919 |
| 1472 | 0.229734 | 0.29791 | 1.053188 |
| 1473 | 0.005236 | 0.020279 | 0.786991 |
| 1474 | 0.094218 | 0.183605 | 2.872396 |
| 1475 | 0.103852 | 0.178429 | 2.934125 |
| 1476 | 0.032997 | 0.071639 | 1.468191 |
| 1477 | 0.004763 | 0.019988 | 0.744601 |
| 1479 | 0.004862 | 0.02006 | 0.646639 |
| 1480 | 0.062493 | 0.120887 | 1.421179 |
| 1482 | 0.063512 | 0.117236 | 1.02612 |
| 1483 | 0.003687 | 0.018638 | 0.806893 |
| 1485 | 0.002923 | 0.016326 | 0.810278 |
| 1486 | 0.003046 | 0.016492 | 0.639067 |
| 1487 | 0.002997 | 0.016251 | 0.874065 |
| 1488 | 0.002931 | 0.015913 | 0.718561 |
| 1489 | 0.00278 | 0.016262 | 0.945829 |
| 1490 | 0.003396 | 0.017309 | 0.839493 |
| 1491 | 0.002835 | 0.016415 | 0.616515 |
| 1492 | 0.00337 | 0.017996 | 0.87573 |
| 1493 | 0.002838 | 0.016276 | 0.706791 |
| 1494 | 0.002936 | 0.016453 | 0.886075 |
| 1496 | 0.003021 | 0.016335 | 0.634456 |
| 1497 | 0.002921 | 0.016072 | 0.841508 |
| 1498 | 0.002932 | 0.016361 | 0.582778 |
| 1499 | 0.002819 | 0.017478 | 0.948983 |
| 1500 | 0.003006 | 0.017306 | 0.604048 |
| 1501 | 0.002807 | 0.016489 | 0.785628 |
| 1502 | 0.002769 | 0.015804 | 0.755524 |
| 1503 | 0.002882 | 0.016466 | 0.819839 |
| 1504 | 0.003412 | 0.016569 | 0.709579 |
| 1505 | 0.003997 | 0.017625 | 0.888899 |
| 1506 | 0.00289 | 0.017248 | 0.894677 |
| 1507 | 0.002795 | 0.01699 | 0.79213 |
| 1508 | 0.002911 | 0.016103 | 0.775025 |
| 1509 | 0.002935 | 0.016148 | 0.746427 |
| 1510 | 0.002847 | 0.016713 | 0.598686 |
| 1511 | 0.002895 | 0.016502 | 0.768356 |
| 1512 | 0.003954 | 0.017185 | 0.677016 |
| 1514 | 0.002815 | 0.027933 | 0.931244 |
| 1515 | 0.002933 | 0.027695 | 0.651567 |
| 1516 | 0.002785 | 0.026655 | 0.652685 |
| 1517 | 0.002783 | 0.027738 | 0.565322 |
| 1518 | 0.002828 | 0.026694 | 0.631511 |
| 1519 | 0.002834 | 0.027337 | 0.66479 |
| 1520 | 0.003453 | 0.028188 | 0.710203 |
| 1521 | 0.002992 | 0.026775 | 0.61482 |
| 1522 | 0.003072 | 0.028592 | 0.83538 |
| 1523 | 0.003473 | 0.028775 | 0.571612 |
| 1524 | 0.002805 | 0.027075 | 0.704035 |
| 1525 | 0.003615 | 0.030549 | 0.735642 |
| 1526 | 0.002812 | 0.027292 | 0.770641 |
| 1527 | 0.00283 | 0.026705 | 0.696095 |
| 1528 | 0.002794 | 0.026616 | 0.600694 |
| 1529 | 0.002883 | 0.026458 | 0.557503 |
| 1530 | 0.002978 | 0.028069 | 0.812791 |
| 1532 | 0.002984 | 0.027308 | 0.532545 |
| 1533 | 0.00285 | 0.02682 | 0.563657 |
| 1534 | 0.002846 | 0.02764 | 0.746323 |
| 1536 | 0.002799 | 0.027063 | 0.751124 |
| 1537 | 0.002812 | 0.02665 | 0.629611 |
| 1538 | 0.002753 | 0.026783 | 0.503323 |
| 1539 | 0.002909 | 0.027333 | 0.504615 |
| 1540 | 0.002819 | 0.027702 | 0.694792 |
| 1541 | 0.002759 | 0.02709 | 0.560466 |
| 1542 | 0.002733 | 0.027285 | 0.651773 |
| 1543 | 0.002765 | 0.026253 | 0.573015 |
| 1544 | 0.002706 | 0.027092 | 0.654941 |
| 1545 | 0.002874 | 0.026632 | 0.714128 |
| 1546 | 0.00294 | 0.027778 | 0.636466 |
| 1548 | 0.00279 | 0.028079 | 0.706656 |
| 1549 | 0.002731 | 0.027168 | 0.522207 |
| 1550 | 0.002677 | 0.027476 | 0.696415 |
| 1551 | 0.002816 | 0.027408 | 0.60935 |
| 1552 | 0.002864 | 0.027019 | 0.564324 |
| 1553 | 0.00289 | 0.027219 | 0.656982 |
| 1554 | 0.002904 | 0.027245 | 0.709589 |
| 1555 | 0.002857 | 0.027357 | 0.770251 |
| 1556 | 0.002779 | 0.027449 | 0.600841 |
| 1557 | 0.002804 | 0.027851 | 0.819866 |
| 1558 | 0.002822 | 0.027061 | 0.698614 |
| 1559 | 0.002789 | 0.026908 | 0.526565 |
| 1560 | 0.002867 | 0.02696 | 0.567773 |
| 1561 | 0.002954 | 0.026183 | 0.535325 |
| 1562 | 0.002832 | 0.028297 | 0.591001 |
| 1563 | 0.002851 | 0.026715 | 0.518507 |
| 1564 | 0.002773 | 0.027867 | 0.574878 |
| 1565 | 0.002829 | 0.027062 | 0.707218 |
| 1566 | 0.002787 | 0.027944 | 0.60274 |
| 1567 | 0.002789 | 0.026836 | 0.681669 |
| 1568 | 0.002819 | 0.026247 | 0.679288 |
| 1569 | 0.00288 | 0.026881 | 0.755689 |
| 1570 | 0.002853 | 0.026701 | 0.743775 |
| 1571 | 0.002811 | 0.027011 | 0.525869 |
| 1572 | 0.00285 | 0.027158 | 0.513429 |
| 1573 | 0.002801 | 0.027285 | 0.801479 |
| 1574 | 0.00283 | 0.026694 | 0.625502 |
| 1575 | 0.002879 | 0.026776 | 0.59054 |
| 1576 | 0.002797 | 0.026677 | 0.838621 |
| 1577 | 0.003048 | 0.027552 | 0.622979 |
| 1578 | 0.002889 | 0.027386 | 0.598139 |
| 1579 | 0.002955 | 0.027358 | 0.491017 |
| 1580 | 0.002857 | 0.026945 | 0.435188 |
| 1581 | 0.002782 | 0.02785 | 0.477584 |
| 1582 | 0.00277 | 0.026769 | 0.585209 |
| 1583 | 0.002882 | 0.027091 | 0.705566 |
| 1584 | 0.002823 | 0.026051 | 0.588066 |
| 1585 | 0.003011 | 0.02627 | 0.645734 |
| 1586 | 0.002783 | 0.027931 | 0.509146 |
| 1587 | 0.002834 | 0.027194 | 0.594226 |
| 1588 | 0.002788 | 0.027098 | 0.522658 |
| 1589 | 0.002909 | 0.027134 | 0.76665 |
| 1590 | 0.002772 | 0.026947 | 0.590476 |
| 1592 | 0.002841 | 0.026809 | 0.671333 |
| 1593 | 0.002895 | 0.026378 | 0.470406 |
| 1594 | 0.00308 | 0.026761 | 0.571625 |
| 1595 | 0.00292 | 0.026874 | 0.592748 |
| 1596 | 0.002734 | 0.02666 | 0.615701 |
| 1597 | 0.00288 | 0.026918 | 0.694078 |
| 1598 | 0.002796 | 0.028141 | 0.728341 |
| 1599 | 0.003183 | 0.027135 | 0.584021 |
| 1600 | 0.003303 | 0.02835 | 0.463076 |
| 1601 | 0.003179 | 0.02638 | 0.376498 |
| 1602 | 0.004066 | 0.027302 | 0.787392 |
| 1603 | 0.003293 | 0.027454 | 0.565816 |
| 1604 | 0.002846 | 0.02701 | 0.748421 |
| 1605 | 0.005887 | 0.032685 | 0.622649 |
| 1606 | 0.002889 | 0.02704 | 0.56754 |
| 1607 | 0.002831 | 0.026806 | 0.743947 |
| 1608 | 0.002965 | 0.027359 | 0.760013 |
| 1609 | 0.00396 | 0.027561 | 0.674454 |
| 1611 | 0.008586 | 0.075287 | 0.257982 |
| 1612 | 0.009539 | 0.076797 | 0.197109 |
| 1613 | 0.008018 | 0.072467 | 0.231769 |
| 1614 | 0.012023 | 0.075871 | 0.172221 |
| 1615 | 0.008328 | 0.071072 | 0.220705 |
| 1616 | 0.012023 | 0.075453 | 0.25357 |
| 1617 | 0.012384 | 0.075749 | 0.189438 |
| 1618 | 0.009907 | 0.074134 | 0.228244 |
| 1621 | 0.007789 | 0.070227 | 0.245667 |
| 1622 | 0.008908 | 0.072407 | 0.245921 |
| 1623 | 0.011175 | 0.077951 | 0.188074 |
| 1624 | 0.008036 | 0.069872 | 0.246323 |
| 1625 | 0.011073 | 0.074178 | 0.233123 |
| 1626 | 0.012397 | 0.076047 | 0.205037 |
| 1627 | 0.01196 | 0.082003 | 0.236073 |
| 1628 | 0.008087 | 0.073661 | 0.162851 |
| 1629 | 0.009228 | 0.071361 | 0.1983 |
| 1630 | 0.00787 | 0.068021 | 0.252184 |
| 1632 | 0.008463 | 0.070379 | 0.220109 |
| 1633 | 0.008069 | 0.070751 | 0.186138 |
| 1634 | 0.010343 | 0.072986 | 0.210934 |
| 1635 | 0.009638 | 0.077485 | 0.263883 |
| 1636 | 0.008719 | 0.074615 | 0.259029 |
| 1637 | 0.008512 | 0.073437 | 0.167086 |
| 1638 | 0.007929 | 0.072165 | 0.163977 |
| 1639 | 0.007868 | 0.07025 | 0.216269 |
| 1640 | 0.010217 | 0.075129 | 0.212716 |
| 1641 | 0.009846 | 0.072375 | 0.229234 |
| 1642 | 0.008044 | 0.072899 | 0.146821 |
| 1643 | 0.007903 | 0.073916 | 0.202451 |
| 1644 | 0.007997 | 0.072045 | 0.2269 |
| 1645 | 0.008005 | 0.071968 | 0.225724 |
| 1646 | 0.007868 | 0.072947 | 0.218694 |
| 1647 | 0.007874 | 0.07009 | 0.204347 |
| 1648 | 0.008126 | 0.072838 | 0.231684 |
| 1649 | 0.007985 | 0.07098 | 0.217341 |
| 1650 | 0.00805 | 0.073491 | 0.157452 |
| 1651 | 0.008583 | 0.074894 | 0.221222 |
| 1652 | 0.00782 | 0.073647 | 0.23366 |
| 1653 | 0.007727 | 0.072533 | 0.274822 |
| 1654 | 10.007898 | 0.072049 | 0.19207 |
| 1655 | 0.007809 | 0.072421 | 0.239521 |
| 1656 | 0.00814 | 0.070844 | 0.233632 |
| 1657 | 0.008044 | 0.069952 | 0.173161 |
| 1658 | 0.008147 | 0.070865 | 0.114916 |
| 1659 | 0.008054 | 0.070011 | 0.234503 |
| 1660 | 0.008051 | 0.073257 | 0.209313 |
| 1661 | 0.008006 | 0.073666 | 0.220585 |
| 1662 | 0.007882 | 0.072722 | 0.194041 |
| 1663 | 0.0079 | 0.07183 | 0.209789 |
| 1664 | 0.008074 | 0.069676 | 0.185531 |
| 1665 | 0.00878 | 0.071074 | 0.21086 |
| 1666 | 0.007895 | 0.071838 | 0.244376 |
| 1668 | 0.008053 | 0.072861 | 0.253493 |
| 1669 | 0.007873 | 0.073223 | 0.198109 |
| 1670 | 0.007816 | 0.068945 | 0.206857 |
| 1671 | 0.007989 | 0.071814 | 0.303432 |
| 1672 | 0.008207 | 0.073024 | 0.222844 |
| 1673 | 0.008259 | 0.0722 | 0.255081 |
| 1674 | 0.008145 | 0.071765 | 0.197578 |
| 1675 | 0.008243 | 0.07316 | 0.202955 |
| 1676 | 0.008121 | 0.07247 | 0.197388 |
| 1677 | 0.008023 | 0.071901 | 0.24222 |
| 1678 | 0.008907 | 0.074766 | 0.187839 |
| 1679 | 0.007883 | 0.072372 | 0.198258 |
| 1680 | 0.008303 | 0.07202 | 0.20641 |
| 1681 | 0.008051 | 0.068996 | 0.172375 |
| 1682 | 0.008184 | 0.073282 | 0.285672 |
| 1684 | 0.008361 | 0.072729 | 0.170928 |
| 1685 | 0.008716 | 0.074393 | 0.222029 |
| 1686 | 0.008059 | 0.071129 | 0.196348 |
| 1687 | 0.007953 | 0.070337 | 0.21236 |
| 1688 | 0.008643 | 0.070881 | 0.227238 |
| 1689 | 0.007905 | 0.069917 | 0.19241 |
| 1690 | 0.008127 | 0.072187 | 0.219756 |
| 1691 | 0.007958 | 0.073297 | 0.230226 |
| 1692 | 0.00806 | 0.069949 | 0.25326 |
| 1693 | 0.008331 | 0.073454 | 0.232442 |
| 1694 | 0.00995 | 0.07389 | 0.245006 |
| 1695 | 0.00813 | 0.070796 | 0.208166 |
| 1696 | 0.00828 | 0.070973 | 0.196401 |
| 1697 | 0.008427 | 0.070372 | 0.211389 |
| 1698 | 0.010244 | 0.071351 | 0.23418 |
| 1699 | 0.008127 | 0.071392 | 0.186818 |
| 1700 | 0.011627 | 0.078038 | 0.216352 |
| 1701 | 0.008158 | 0.071674 | 0.235836 |
| 1702 | 0.008405 | 0.072728 | 0.214028 |
| 1703 | 0.00931 | 0.072866 | 0.24933 |
| 1704 | 0.00834 | 0.06923 | 0.178878 |
| 1705 | 0.00998 | 0.07348 | 0.262106 |
| 1707 | 0.004095 | 0.007786 | 0.905391 |
| 1708 | 0.00319 | 0.007636 | 0.918093 |
| 1710 | 0.003179 | 0.007381 | 0.810737 |
| 1711 | 0.003206 | 0.007316 | 0.948158 |
| 1712 | 0.003223 | 0.007633 | 0.992454 |
| 1713 | 0.003147 | 0.007825 | 1.018484 |
| 1714 | 0.003156 | 0.007799 | 1.011062 |
| 1715 | 0.003144 | 0.007846 | 1.03755 |
| 1716 | 0.003126 | 0.007534 | 0.995065 |
| 1717 | 0.003303 | 0.008123 | 0.95218 |
| 1718 | 0.003174 | 0.007598 | 0.739364 |
| 1720 | 0.003107 | 0.007531 | 0.963791 |
| 1721 | 0.003184 | 0.007393 | 0.642433 |
| 1722 | 0.003234 | 0.007679 | 1.087014 |
| 1723 | 0.003183 | 0.007625 | 0.746413 |
| 1725 | 0.003166 | 0.00732 | 0.983384 |
| 1726 | 0.003192 | 0.007532 | 0.92262 |
| 1727 | 0.003216 | 0.007484 | 0.718343 |
| 1728 | 0.003213 | 0.00725 | 0.952505 |
| 1729 | 0.003225 | 0.007421 | 0.911589 |
| 1730 | 0.003281 | 0.007498 | 0.995307 |
| 1731 | 0.003053 | 0.007481 | 0.950875 |
| 1732 | 0.00316 | 0.007479 | 0.757397 |
| 1733 | 0.003214 | 0.007451 | 0.940672 |
| 1734 | 0.003219 | 0.007427 | 0.893661 |
| 1735 | 0.003254 | 0.007528 | 0.836399 |
| 1737 | 0.003227 | 0.007374 | 0.911326 |
| 1738 | 0.003214 | 0.007477 | 1.002511 |
| 1739 | 0.00327 | 0.008719 | 0.956423 |
| 1740 | 0.003147 | 0.007789 | 1.00538 |
| 1741 | 0.003279 | 0.007904 | 0.975752 |
| 1742 | 0.003162 | 0.007423 | 1.22881 |
| 1743 | 0.003139 | 0.007692 | 0.743436 |
| 1744 | 0.003205 | 0.007379 | 0.772479 |
| 1745 | 0.003182 | 0.007429 | 1.079506 |
| 1747 | 0.003253 | 0.0075 | 0.816336 |
| 1748 | 0.003362 | 0.008459 | 0.998276 |
| 1749 | 0.003015 | 0.007458 | 0.936332 |
| 1750 | 0.003212 | 0.008153 | 0.859119 |
| 1752 | 0.003259 | 0.007776 | 0.978627 |
| 1753 | 0.00325 | 0.007387 | 0.786866 |
| 1754 | 0.003162 | 0.006997 | 1.003224 |
| 1755 | 0.003259 | 0.007394 | 0.925965 |
| 1756 | 0.00318 | 0.007571 | 1.096225 |
| 1758 | 0.003337 | 0.007882 | 0.985142 |
| 1759 | 0.003418 | 0.008082 | 0.953122 |
| 1760 | 0.003232 | 0.007565 | 0.769634 |
| 1761 | 0.003209 | 0.007716 | 0.826567 |
| 1762 | 0.003197 | 0.007352 | 0.743692 |
| 1763 | 0.003236 | 0.007511 | 1.040475 |
| 1764 | 0.003251 | 0.007572 | 1.383275 |
| 1765 | 0.003257 | 0.013774 | 0.819945 |
| 1766 | 0.003138 | 0.007452 | 0.976752 |
| 1767 | 0.003206 | 0.007674 | 0.936511 |
| 1768 | 0.003234 | 0.008193 | 0.717088 |
| 1769 | 0.003178 | 0.007449 | 0.913192 |
| 1771 | 0.003187 | 0.007352 | 0.941054 |
| 1772 | 0.005576 | 0.019795 | 0.767377 |
| 1773 | 0.003294 | 0.012787 | 0.583382 |
| 1774 | 0.003183 | 0.007692 | 0.809862 |
| 1775 | 0.003131 | 0.007429 | 1.000089 |
| 1776 | 0.003174 | 0.007465 | 0.908376 |
| 1777 | 0.003238 | 0.00771 | 1.13952 |
| 1778 | 0.003232 | 0.007417 | 0.854898 |
| 1779 | 0.003218 | 0.007322 | 0.736095 |
| 1780 | 0.003511 | 0.008457 | 0.949085 |
| 1781 | 0.003302 | 0.009751 | 0.834468 |
| 1782 | 0.003093 | 0.007604 | 0.813662 |
| 1783 | 0.003061 | 0.007604 | 0.894994 |
| 1784 | 0.003161 | 0.007326 | 0.70474 |
| 1785 | 0.003225 | 0.007357 | 0.699541 |
| 1786 | 0.003164 | 0.007261 | 0.794668 |
| 1787 | 0.00315 | 0.007418 | 0.964931 |
| 1788 | 0.003283 | 0.007843 | 0.946281 |
| 1789 | 0.003291 | 0.007593 | 0.936091 |
| 1790 | 0.003761 | 0.00877 | 0.886762 |
| 1791 | 0.003112 | 0.007642 | 0.918008 |
| 1792 | 0.003268 | 0.007666 | 0.703354 |
| 1793 | 0.003133 | 0.007455 | 0.842638 |
| 1794 | 0.003159 | 0.007349 | 0.728775 |
| 1795 | 0.003246 | 0.007273 | 0.745148 |
| 1796 | 0.003613 | 0.007904 | 0.628593 |
| 1797 | 0.00427 | 0.008685 | 0.659605 |
| 1798 | 0.003091 | 0.007893 | 0.885414 |
| 1799 | 0.003119 | 0.007443 | 1.016389 |
| 1801 | 0.005041 | 0.009766 | 0.788892 |
| 1802 | 0.003799 | 0.009741 | 0.970487 |
| 1803 | 0.003191 | 0.007455 | 0.811591 |
| 1804 | 0.003256 | 0.007526 | 0.980185 |
| 1806 | 0.007832 | 0.015298 | 0.668837 |
| 1808 | 0.002099 | 0.00239 | 0.713927 |
| 1809 | 0.003792 | 0.004621 | 0.798598 |
| 1810 | 0.002017 | 0.002054 | 0.778629 |
| 1811 | 0.001935 | 0.002012 | 0.827105 |
| 1812 | 0.001955 | 0.002041 | 0.652207 |
| 1813 | 0.002017 | 0.002107 | 1.07398 |
| 1814 | 0.001992 | 0.00212 | 0.938161 |
| 1815 | 0.002057 | 0.002093 | 0.672235 |
| 1816 | 0.002067 | 0.002143 | 0.813551 |
| 1817 | 0.001993 | 0.00201 | 0.666663 |
| 1818 | 0.001943 | 0.002032 | 1.177111 |
| 1819 | 0.002001 | 0.002046 | 0.840791 |
| 1820 | 0.00202 | 0.002025 | 0.821089 |
| 1821 | 0.010528 | 0.014897 | 1.05278 |
| 1822 | 0.001978 | 0.002002 | 0.847594 |
| 1823 | 0.002033 | 0.002129 | 0.923411 |
| 1824 | 0.001995 | 0.002089 | 0.931098 |
| 1825 | 0.001951 | 0.002044 | 0.72614 |
| 1826 | 0.001901 | 0.002026 | 0.969977 |
| 1827 | 0.002017 | 0.002057 | 1.124311 |
| 1828 | 0.002003 | 0.002006 | 0.621247 |
| 1829 | 0.002024 | 0.002243 | 0.826881 |
| 1830 | 0.001924 | 0.001957 | 0.830188 |
| 1831 | 0.002058 | 0.002061 | 1.08971 |
| 1832 | 0.002021 | 0.002227 | 0.99019 |
| 1833 | 0.001961 | 0.002 | 1.043679 |
| 1834 | 0.001997 | 0.002049 | 1.079505 |
| 1835 | 0.002924 | 0.036425 | 0.9315 |
| 1836 | 0.002051 | 0.002049 | 0.764385 |
| 1837 | 0.001987 | 0.002013 | 0.939205 |
| 1838 | 0.001986 | 0.002074 | 0.945167 |
| 1839 | 0.00206 | 0.002081 | 0.757964 |
| 1840 | 0.001961 | 0.002069 | 0.963668 |
| 1841 | 0.001918 | 0.001952 | 0.824621 |
| 1842 | 0.001947 | 0.00206 | 0.828898 |
| 1844 | 0.002009 | 0.002099 | 0.812678 |
| 1845 | 0.001913 | 0.002007 | 0.924997 |
| 1846 | 0.002008 | 0.002012 | 1.067461 |
| 1847 | 0.002012 | 0.002021 | 0.910096 |
| 1848 | 0.002014 | 0.002092 | 1.070281 |
| 1849 | 0.00198 | 0.002053 | 1.115724 |
| 1850 | 0.00196 | 0.002017 | 0.780307 |
| 1851 | 0.001999 | 0.002057 | 0.88249 |
| 1852 | 0.001974 | 0.002022 | 0.630003 |
| 1853 | 0.00197 | 0.001976 | 0.893397 |
| 1854 | 0.002051 | 0.002022 | 0.767922 |
| 1855 | 0.002001 | 0.002064 | 1.128736 |
| 1856 | 0.002104 | 0.002101 | 1.08652 |
| 1857 | 0.001954 | 0.002061 | 0.814235 |
| 1858 | 0.001944 | 0.002018 | 0.855267 |
| 1859 | 0.001923 | 0.002007 | 1.245303 |
| 1860 | 0.001933 | 0.002022 | 0.820898 |
| 1861 | 0.001984 | 0.001993 | 0.92614 |
| 1862 | 0.002019 | 0.002032 | 1.0456 |
| 1863 | 0.002124 | 0.002046 | 0.904399 |
| 1864 | 0.002036 | 0.002068 | 0.957025 |
| 1865 | 0.001969 | 0.002058 | 0.878785 |
| 1866 | 0.001941 | 0.002003 | 0.88721 |
| 1867 | 0.001968 | 0.002036 | 0.765442 |
| 1868 | 0.002326 | 0.002549 | 0.633458 |
| 1869 | 0.002028 | 0.002049 | 0.630945 |
| 1870 | 0.002011 | 0.002052 | 1.044067 |
| 1871 | 0.002039 | 0.002032 | 0.858321 |
| 1872 | 0.002073 | 0.002103 | 0.894575 |
| 1874 | 0.00194 | 0.002077 | 0.741909 |
| 1876 | 0.002012 | 0.002203 | 0.77563 |
| 1877 | 0.002166 | 0.00293 | 0.909265 |
| 1878 | 0.002203 | 0.003175 | 0.764486 |
| 1879 | 0.002076 | 0.002159 | 0.870865 |
| 1880 | 0.002123 | 0.00211 | 0.974287 |
| 1882 | 0.001971 | 0.00206 | 1.194054 |
| 1883 | 0.001965 | 0.00198 | 0.850391 |
| 1884 | 0.001983 | 0.00208 | 0.739432 |
| 1885 | 0.004432 | 0.006831 | 0.921387 |
| 1886 | 0.001964 | 0.002047 | 0.905673 |
| 1887 | 0.002128 | 0.002131 | 0.970315 |
| 1888 | 0.00216 | 0.002141 | 0.900712 |
| 1889 | 0.001985 | 0.00209 | 0.904929 |
| 1890 | 0.002027 | 0.002135 | 0.942252 |
| 1891 | 0.001943 | 0.002032 | 1.031348 |
| 1892 | 0.001968 | 0.002051 | 0.673121 |
| 1894 | 0.002064 | 0.002078 | 1.215602 |
| 1895 | 0.002657 | 0.002895 | 0.952559 |
| 1897 | 0.004208 | 0.004197 | 0.877243 |
| 1898 | 0.001943 | 0.002098 | 0.720743 |
| 1899 | 0.001911 | 0.002064 | 0.771716 |
| 1900 | 0.001992 | 0.002012 | 1.042259 |
| 1902 | 0.002111 | 0.002087 | 0.877153 |
| 1903 | 0.002066 | 0.002106 | 1.055068 |
| 1904 | 0.003184 | 0.003144 | 1.09739 |
| 1909 | 0.002055 | 0.003948 | 0.847157 |
| 1912 | 0.00224 | 0.004186 | 0.742941 |
| 1914 | 0.002728 | 0.006378 | 1.015755 |
| 1915 | 0.002104 | 0.003971 | 1.11464 |
| 1916 | 0.002013 | 0.00378 | 0.838864 |
| 1917 | 0.002152 | 0.003877 | 0.908892 |
| 1919 | 0.002163 | 0.003718 | 0.800267 |
| 1921 | 0.002207 | 0.003959 | 0.605339 |
| 1922 | 0.002089 | 0.004028 | 0.664389 |
| 1923 | 0.002035 | 0.003926 | 0.807267 |
| 1924 | 0.002045 | 0.003803 | 0.75616 |
| 1925 | 0.002024 | 0.003787 | 0.78207 |
| 1926 | 0.002081 | 0.004003 | 0.919381 |
| 1927 | 0.002087 | 0.0039 | 0.87094 |
| 1928 | 0.002169 | 0.003842 | 0.85592 |
| 1929 | 0.002196 | 0.003892 | 1.04674 |
| 1930 | 0.002059 | 0.004072 | 0.758699 |
| 1931 | 0.002018 | 0.003893 | 0.935624 |
| 1932 | 0.00212 | 0.003782 | 0.741426 |
| 1935 | 0.002149 | 0.003827 | 0.781431 |
| 1936 | 0.002114 | 0.003987 | 0.983047 |
| 1939 | 0.002105 | 0.003927 | 1.012539 |
| 1940 | 0.002102 | 0.003894 | 0.972949 |
| 1943 | 0.002208 | 0.003969 | 0.819485 |
| 1944 | 0.002129 | 0.003932 | 0.90291 |
| 1949 | 0.002939 | 0.028633 | 0.702177 |
| 1951 | 0.00213 | 0.003953 | 0.756432 |
| 1954 | 0.002084 | 0.003994 | 0.716999 |
| 1955 | 0.002082 | 0.003928 | 0.924112 |
| 1956 | 0.002151 | 0.004369 | 0.83182 |
| 1959 | 0.002066 | 0.003906 | 0.943132 |
| 1960 | 0.002082 | 0.003897 | 0.845987 |
| 1962 | 0.002068 | 0.004065 | 0.677381 |
| 1964 | 0.002309 | 0.005092 | 0.691221 |
| 1965 | 0.002145 | 0.004599 | 1.02379 |
| 1966 | 0.002096 | 0.003928 | 0.821807 |
| 1967 | 0.002135 | 0.004049 | 0.784332 |
| 1969 | 0.00258 | 0.004963 | 0.869906 |
| 1970 | 0.002402 | 0.005499 | 0.802557 |
| 1971 | 0.003555 | 0.00803 | 0.915366 |
| 1972 | 0.002123 | 0.004341 | 1.002436 |
| 1973 | 0.002093 | 0.004195 | 0.739287 |
| 1974 | 0.002264 | 0.004213 | 1.090771 |
| 1975 | 0.00213 | 0.004172 | 0.890328 |
| 1976 | 0.002854 | 0.00629 | 1.03609 |
| 1977 | 0.0022 | 0.003857 | 0.750837 |
| 1978 | 0.002184 | 0.006424 | 0.789674 |
| 1979 | 0.00218 | 0.004072 | 1.041609 |
| 1980 | 0.002089 | 0.003918 | 0.742203 |
| 1981 | 0.002022 | 0.00393 | 0.802623 |
| 1983 | 0.00211 | 0.00387 | 0.823111 |
| 1985 | 0.00238 | 0.005063 | 0.920921 |
| 1987 | 0.002096 | 0.003989 | 0.820149 |
| 1988 | 0.002196 | 0.004207 | 0.733845 |
| 1993 | 0.002629 | 0.004548 | 0.923992 |
| 1994 | 0.003546 | 0.013836 | 0.780026 |
| 1996 | 0.00246 | 0.004831 | 0.793669 |
| 1998 | 0.005897 | 0.010175 | 0.864774 |
| 1999 | 0.002493 | 0.004889 | 0.91103 |
| 2001 | 0.003035 | 0.009213 | 0.760895 |
| 2004 | 0.009008 | 0.051959 | 0.315777 |
| 2006 | 0.007683 | 0.047495 | 0.479879 |
| 2007 | 0.00815 | 0.046714 | 0.350549 |
| 2009 | 0.007773 | 0.047424 | 0.356192 |
| 2010 | 0.008014 | 0.048727 | 0.376383 |
| 2011 | 0.007678 | 0.050682 | 0.388038 |
| 2012 | 0.007658 | 0.048585 | 0.40471 |
| 2013 | 0.00776 | 0.046273 | 0.269896 |
| 2014 | 0.007967 | 0.048251 | 0.353403 |
| 2015 | 0.008137 | 0.046658 | 0.338498 |
| 2016 | 0.007733 | 0.04596 | 0.356733 |
| 2017 | 0.007571 | 0.045682 | 0.396185 |
| 2018 | 0.007836 | 0.047143 | 0.396857 |
| 2019 | 0.008556 | 0.049704 | 0.356688 |
| 2020 | 0.007647 | 0.047487 | 0.406455 |
| 2021 | 0.007659 | 0.046888 | 0.36344 |
| 2022 | 0.007575 | 0.046464 | 0.411014 |
| 2023 | 0.008 | 0.046656 | 0.392491 |
| 2024 | 0.007671 | 0.046704 | 0.343154 |
| 2026 | 0.008452 | 0.049376 | 0.408859 |
| 2027 | 0.007698 | 0.046912 | 0.328525 |
| 2028 | 0.007683 | 0.046616 | 0.339399 |
| 2029 | 0.007666 | 0.046757 | 0.297973 |
| 2030 | 0.007675 | 0.046508 | 0.435685 |
| 2031 | 0.008134 | 0.04519 | 0.411958 |
| 2032 | 0.007675 | 0.045703 | 0.307964 |
| 2033 | 0.007603 | 0.046911 | 0.368773 |
| 2034 | 0.007487 | 0.046125 | 0.42095 |
| 2035 | 0.007824 | 0.048172 | 0.297846 |
| 2036 | 0.007336 | 0.048153 | 0.42074 |
| 2037 | 0.008092 | 0.047712 | 0.309579 |
| 2038 | 0.007771 | 0.046713 | 0.372379 |
| 2039 | 0.008147 | 0.047807 | 0.46323 |
| 2041 | 0.007752 | 0.046575 | 0.519016 |
| 2042 | 0.007808 | 0.047418 | 0.427933 |
| 2043 | 0.007841 | 0.048971 | 0.487233 |
| 2044 | 0.007751 | 0.04791 | 0.502666 |
| 2045 | 0.007997 | 0.04765 | 0.425789 |
| 2046 | 0.007681 | 0.047159 | 0.387429 |
| 2047 | 0.008297 | 0.04738 | 0.434821 |
| 2048 | 0.00876 | 0.04945 | 0.444633 |
| 2049 | 0.007392 | 0.046997 | 0.359452 |
| 2050 | 0.008459 | 0.051214 | 0.257893 |
| 2051 | 0.007739 | 0.048823 | 0.379033 |
| 2052 | 0.007651 | 0.047708 | 0.301475 |
| 2055 | 0.008096 | 0.046365 | 0.286331 |
| 2056 | 0.007633 | 0.045501 | 0.321644 |
| 2057 | 0.007723 | 0.04781 | 0.286926 |
| 2058 | 0.007596 | 0.047326 | 0.35697 |
| 2059 | 0.007819 | 0.048191 | 0.328469 |
| 2060 | 0.007522 | 0.049484 | 0.346836 |
| 2062 | 0.007728 | 0.04874 | 0.437359 |
| 2064 | 0.007614 | 0.047857 | 0.346887 |
| 2065 | 0.007718 | 0.04734 | 0.320753 |
| 2066 | 0.007861 | 0.048273 | 0.33439 |
| 2067 | 0.007787 | 0.048374 | 0.360579 |
| 2068 | 0.007899 | 0.047923 | 0.438593 |
| 2069 | 0.007997 | 0.047566 | 0.294398 |
| 2070 | 0.007618 | 0.047015 | 0.368413 |
| 2071 | 0.008211 | 0.047051 | 0.398477 |
| 2072 | 0.007816 | 0.045952 | 0.291645 |
| 2073 | 0.00744 | 0.047558 | 0.416445 |
| 2074 | 0.007748 | 0.047678 | 0.31422 |
| 2075 | 0.007821 | 0.049202 | 0.410995 |
| 2076 | 0.007579 | 0.048504 | 0.35862 |
| 2077 | 0.007606 | 0.048341 | 0.336701 |
| 2078 | 0.007833 | 0.047621 | 0.430521 |
| 2079 | 0.008881 | 0.04708 | 0.367176 |
| 2080 | 0.007632 | 0.046431 | 0.401737 |
| 2081 | 0.007585 | 0.047886 | 0.328978 |
| 2082 | 0.00782 | 0.048005 | 0.42346 |
| 2084 | 0.007872 | 0.048572 | 0.374299 |
| 2085 | 0.007508 | 0.048884 | 0.363426 |
| 2086 | 0.007641 | 0.04778 | 0.455748 |
| 2087 | 0.007576 | 0.046705 | 0.394438 |
| 2089 | 0.007588 | 0.050455 | 0.512216 |
| 2091 | 0.007914 | 0.049272 | 0.348157 |
| 2092 | 0.008757 | 0.085812 | 0.387008 |
| 2093 | 0.007033 | 0.04869 | 0.543809 |
| 2094 | 0.007412 | 0.048193 | 0.462981 |
| 2095 | 0.007785 | 0.048394 | 0.378497 |
| 2096 | 0.00808 | 0.04793 | 0.422319 |
| 2097 | 0.007585 | 0.052485 | 0.339995 |
| 2098 | 0.007722 | 0.077927 | 0.360082 |
| 2101 | 0.003196 | 0.02074 | 0.711343 |
| 2102 | 0.003171 | 0.019613 | 0.932187 |
| 2103 | 0.003015 | 0.019345 | 0.66012 |
| 2105 | 0.003183 | 0.019557 | 0.922989 |
| 2106 | 0.00304 | 0.019249 | 0.610898 |
| 2107 | 0.003086 | 0.020481 | 0.726218 |
| 2108 | 0.003083 | 0.01979 | 0.699435 |
| 2109 | 0.003083 | 0.019528 | 0.595743 |
| 2110 | 0.003043 | 0.01985 | 0.811218 |
| 2111 | 0.003105 | 0.019319 | 0.486517 |
| 2112 | 0.003041 | 0.018937 | 0.51889 |
| 2113 | 0.00304 | 0.019069 | 0.468082 |
| 2114 | 0.003108 | 0.018998 | 0.482694 |
| 2115 | 0.00313 | 0.019507 | 0.554585 |
| 2116 | 0.003166 | 0.020002 | 0.7362 |
| 2118 | 0.003188 | 0.01935 | 0.596176 |
| 2119 | 0.003134 | 0.019993 | 0.637627 |
| 2120 | 0.003081 | 0.019437 | 0.678214 |
| 2121 | 0.003146 | 0.019336 | 0.60839 |
| 2122 | 0.003065 | 0.019235 | 0.499429 |
| 2124 | 0.003203 | 0.019847 | 0.557828 |
| 2125 | 0.003239 | 0.02001 | 0.552858 |
| 2126 | 0.003195 | 0.019259 | 0.656 |
| 2127 | 0.003154 | 0.019186 | 0.483088 |
| 2129 | 0.003119 | 0.019051 | 0.620213 |
| 2130 | 0.003123 | 0.019615 | 0.424395 |
| 2134 | 0.003217 | 0.019331 | 0.536501 |
| 2135 | 0.003065 | 0.019226 | 0.52152 |
| 2137 | 0.003178 | 0.018652 | 0.698231 |
| 2138 | 0.003168 | 0.019197 | 0.587975 |
| 2140 | 0.003216 | 0.019528 | 0.625389 |
| 2141 | 0.00316 | 0.019709 | 0.682383 |
| 2142 | 0.003241 | 0.019746 | 0.516585 |
| 2143 | 0.00322 | 0.019625 | 0.613552 |
| 2144 | 0.003175 | 0.018746 | 0.700146 |
| 2145 | 0.003151 | 0.019352 | 0.390091 |
| 2146 | 0.003246 | 0.019676 | 0.504855 |
| 2147 | 0.00315 | 0.018806 | 0.691577 |
| 2148 | 0.00327 | 0.020065 | 0.647184 |
| 2149 | 0.003318 | 0.019742 | 0.593045 |
| 2150 | 0.003295 | 0.019112 | 0.545147 |
| 2151 | 0.003222 | 0.019324 | 0.623487 |
| 2153 | 0.003163 | 0.019031 | 0.622529 |
| 2154 | 0.003097 | 0.019212 | 0.412396 |
| 2155 | 0.003183 | 0.018864 | 0.628595 |
| 2157 | 0.003208 | 0.019445 | 0.512846 |
| 2158 | 0.00328 | 0.020175 | 0.608198 |
| 2159 | 0.00605 | 0.027206 | 0.523008 |
| 2160 | 0.003294 | 0.019204 | 0.60676 |
| 2161 | 0.003175 | 0.019186 | 0.58493 |
| 2162 | 0.003073 | 0.018774 | 0.676172 |
| 2163 | 0.003213 | 0.026017 | 0.717037 |
| 2164 | 0.003146 | 0.019228 | 0.629069 |
| 2165 | 0.003177 | 0.019712 | 0.651398 |
| 2166 | 0.015226 | 0.067595 | 0.77104 |
| 2168 | 0.003259 | 0.019199 | 0.709717 |
| 2169 | 0.003096 | 0.019088 | 0.552215 |
| 2170 | 0.003193 | 0.019073 | 0.843088 |
| 2171 | 0.003203 | 0.018715 | 0.663203 |
| 2173 | 0.003078 | 0.018872 | 0.596725 |
| 2174 | 0.003215 | 0.019295 | 0.586757 |
| 2175 | 0.003355 | 0.020379 | 0.591717 |
| 2176 | 0.00331 | 0.020075 | 0.621581 |
| 2178 | 0.003288 | 0.019762 | 0.563754 |
| 2179 | 0.023311 | 0.108889 | 0.634632 |
| 2180 | 0.003154 | 0.018821 | 0.582331 |
| 2181 | 0.003174 | 0.019114 | 0.467664 |
| 2182 | 0.003295 | 0.019446 | 0.780908 |
| 2183 | 0.003253 | 0.01977 | 0.567795 |
| 2184 | 0.003242 | 0.020002 | 0.791142 |
| 2185 | 0.003168 | 0.019575 | 0.775637 |
| 2186 | 0.003096 | 0.018948 | 0.568767 |
| 2187 | 0.003259 | 0.019195 | 0.523207 |
| 2188 | 0.003153 | 0.019022 | 0.565014 |
| 2189 | 0.003154 | 0.019989 | 0.535538 |
| 2190 | 0.003524 | 0.019646 | 0.64781 |
| 2191 | 0.004391 | 0.020707 | 0.675903 |
| 2192 | 0.00296 | 0.020679 | 0.695385 |
| 2193 | 0.00312 | 0.019868 | 0.56865 |
| 2194 | 0.003186 | 0.020148 | 0.67523 |
| 2195 | 0.003131 | 0.019043 | 0.529032 |
| 2196 | 0.003166 | 0.020125 | 0.702299 |
| 2197 | 0.003391 | 0.019802 | 0.716997 |
| 2198 | 0.007135 | 0.025543 | 0.647545 |
| 2200 | 0.006172 | 0.047972 | 0.218144 |
| 2201 | 0.006242 | 0.04465 | 0.132477 |
| 2202 | 0.00613 | 0.045688 | 0.181752 |
| 2203 | 0.006068 | 0.046964 | 0.152828 |
| 2204 | 0.005921 | 0.046084 | 0.14141 |
| 2205 | 0.006157 | 0.046238 | 0.191263 |
| 2206 | 0.006136 | 0.046016 | 0.190921 |
| 2207 | 0.005964 | 0.047186 | 0.153246 |
| 2208 | 0.006177 | 0.047117 | 0.155879 |
| 2210 | 0.006352 | 0.043635 | 0.146858 |
| 2211 | 0.006108 | 0.044772 | 0.155641 |
| 2212 | 0.006024 | 0.045543 | 0.142517 |
| 2213 | 0.005939 | 0.046344 | 0.143164 |
| 2214 | 0.006222 | 0.04614 | 0.192484 |
| 2215 | 0.006083 | 0.047678 | 0.16743 |
| 2216 | 0.006163 | 0.053998 | 0.13437 |
| 2217 | 0.006135 | 0.045467 | 0.137485 |
| 2218 | 0.006112 | 0.046402 | 0.156384 |
| 2219 | 0.006181 | 0.046612 | 0.162334 |
| 2220 | 0.006096 | 0.050543 | 0.162733 |
| 2221 | 0.006186 | 0.047334 | 0.152158 |
| 2222 | 0.006075 | 0.047502 | 0.194765 |
| 2223 | 0.006029 | 0.046467 | 0.137691 |
| 2224 | 0.006314 | 0.055065 | 0.20807 |
| 2226 | 0.006294 | 0.045913 | 0.209723 |
| 2227 | 0.006684 | 0.046979 | 0.190792 |
| 2228 | 0.006095 | 0.04607 | 0.165137 |
| 2229 | 0.006403 | 0.052747 | 0.16783 |
| 2231 | 0.006318 | 0.047325 | 0.120074 |
| 2232 | 0.006136 | 0.047645 | 0.154048 |
| 2233 | 0.008079 | 0.057783 | 0.168608 |
| 2234 | 0.006343 | 0.048289 | 0.130913 |
| 2238 | 0.006235 | 0.046307 | 0.168547 |
| 2239 | 0.006246 | 0.046488 | 0.140553 |
| 2241 | 0.006379 | 0.054148 | 0.24124 |
| 2242 | 0.006455 | 0.047961 | 0.131922 |
| 2243 | 0.006337 | 0.046456 | 0.186051 |
| 2244 | 0.006203 | 0.045602 | 0.125512 |
| 2245 | 0.006499 | 0.057369 | 0.154019 |
| 2246 | 0.006248 | 0.056398 | 0.149261 |
| 2247 | 0.006307 | 0.046397 | 0.228139 |
| 2248 | 0.006168 | 0.047874 | 0.112137 |
| 2249 | 0.006196 | 0.046805 | 0.155686 |
| 2250 | 0.00895 | 0.054401 | 0.183022 |
| 2251 | 0.00639 | 0.045554 | 0.169424 |
| 2252 | 0.006125 | 0.046755 | 0.150411 |
| 2253 | 0.00622 | 0.053633 | 0.191924 |
| 2254 | 0.006108 | 0.046631 | 0.13209 |
| 2255 | 0.00633 | 0.04723 | 0.135853 |
| 2256 | 0.006144 | 0.061456 | 0.112837 |
| 2257 | 0.006404 | 0.047664 | 0.179404 |
| 2258 | 0.00629 | 0.04559 | 0.115119 |
| 2259 | 0.006517 | 0.047495 | 0.139756 |
| 2260 | 0.006178 | 0.046241 | 0.166521 |
| 2261 | 0.006256 | 0.047309 | 0.21795 |
| 2262 | 0.006307 | 0.046961 | 0.155011 |
| 2263 | 0.006309 | 0.046877 | 0.215311 |
| 2264 | 0.00632 | 0.047891 | 0.153035 |
| 2265 | 0.006283 | 0.058641 | 0.211202 |
| 2266 | 0.006381 | 0.047328 | 0.134896 |
| 2267 | 0.006567 | 0.045783 | 0.135634 |
| 2269 | 0.006447 | 0.046908 | 0.133405 |
| 2270 | 0.006417 | 0.04824 | 0.139725 |
| 2271 | 0.00618 | 0.046553 | 0.166047 |
| 2272 | 0.006225 | 0.047393 | 0.160067 |
| 2273 | 0.006276 | 0.047685 | 0.170297 |
| 2274 | 0.00624 | 0.04688 | 0.198238 |
| 2275 | 0.006534 | 0.046315 | 0.157348 |
| 2276 | 0.007069 | 0.047997 | 0.152782 |
| 2277 | 0.009026 | 0.05061 | 0.196609 |
| 2278 | 0.014832 | 0.067865 | 0.14616 |
| 2279 | 0.006428 | 0.046196 | 0.131052 |
| 2280 | 0.006224 | 0.046989 | 0.145311 |
| 2281 | 0.006154 | 0.047328 | 0.14968 |
| 2282 | 0.006248 | 0.046031 | 0.150055 |
| 2283 | 0.006174 | 0.047343 | 0.163964 |
| 2284 | 0.008235 | 0.4302 | 0.20482 |
| 2285 | 1.795726 | 2.705619 | 0.273225 |
| 2286 | 0.008775 | 0.050342 | 0.1587 |
| 2287 | 0.00631 | 0.047599 | 0.134257 |
| 2288 | 0.006544 | 0.046959 | 0.161388 |
| 2289 | 0.008183 | 0.050593 | 0.141202 |
| 2290 | 0.006064 | 0.048815 | 0.175503 |
| 2291 | 0.00618 | 0.046271 | 0.152712 |
| 2292 | 0.007016 | 0.048265 | 0.181027 |
| 2293 | 0.008176 | 0.049316 | 0.164933 |
| 2294 | 0.006486 | 0.048746 | 0.152462 |
| 2295 | 0.006359 | 0.047944 | 0.131901 |
| 2296 | 0.00722 | 0.04902 | 0.134938 |
| 2299 | 0.001841 | 0.021836 | 0.688111 |
| 2300 | 0.086641 | 0.166328 | 0.690494 |
| 2301 | 0.001849 | 0.020911 | 0.564046 |
| 2302 | 0.001837 | 0.020036 | 0.674931 |
| 2303 | 0.001843 | 0.020641 | 0.808588 |
| 2304 | 0.001836 | 0.020295 | 0.58194 |
| 2305 | 0.001822 | 0.020215 | 0.654307 |
| 2306 | 0.002438 | 0.022581 | 0.736907 |
| 2307 | 0.00178 | 0.021066 | 0.620358 |
| 2308 | 0.001832 | 0.020095 | 0.668554 |
| 2309 | 0.00178 | 0.019898 | 0.763666 |
| 2310 | 0.003472 | 0.020626 | 0.667713 |
| 2311 | 0.001796 | 0.019725 | 0.588065 |
| 2312 | 0.001799 | 0.020161 | 0.680887 |
| 2313 | 0.001785 | 0.020109 | 0.751756 |
| 2314 | 0.001785 | 0.020767 | 0.734117 |
| 2315 | 0.001731 | 0.021027 | 0.575685 |
| 2316 | 0.001777 | 0.020545 | 0.621465 |
| 2317 | 0.001726 | 0.020462 | 0.635235 |
| 2319 | 0.001783 | 0.019558 | 0.623992 |
| 2320 | 0.001783 | 0.019848 | 0.456169 |
| 2321 | 0.001819 | 0.019947 | 0.557319 |
| 2322 | 0.001816 | 0.020314 | 0.849308 |
| 2323 | 0.001812 | 0.021185 | 0.5437 |
| 2324 | 0.002117 | 0.021167 | 0.623834 |
| 2325 | 0.001774 | 0.020086 | 0.705615 |
| 2326 | 0.001762 | 0.020397 | 0.609166 |
| 2327 | 0.001838 | 0.019555 | 0.516895 |
| 2328 | 0.001819 | 0.019407 | 0.566088 |
| 2329 | 0.001846 | 0.020255 | 0.675583 |
| 2330 | 0.001822 | 0.020372 | 0.658319 |
| 2331 | 0.00183 | 0.020907 | 0.712729 |
| 2332 | 0.001716 | 0.020645 | 0.633101 |
| 2333 | 0.001761 | 0.020053 | 0.496843 |
| 2334 | 0.001795 | 0.020116 | 0.470328 |
| 2335 | 0.001973 | 0.019994 | 0.69908 |
| 2336 | 0.002355 | 0.021316 | 0.639826 |
| 2337 | 0.002071 | 0.019995 | 0.717695 |
| 2338 | 0.003361 | 0.022952 | 0.608106 |
| 2339 | 0.002512 | 0.022295 | 0.934816 |
| 2340 | 0.001872 | 0.02124 | 0.653365 |
| 2341 | 0.001758 | 0.020188 | 0.628362 |
| 2342 | 0.00179 | 0.020031 | 0.430364 |
| 2343 | 0.00225 | 0.021727 | 0.620708 |
| 2344 | 0.487092 | 1.242389 | 0.705218 |
| 2346 | 0.62511 | 0.991799 | 0.755326 |
| 2347 | 0.007601 | 0.031311 | 0.516649 |
| 2348 | 0.003801 | 0.024391 | 0.44802 |
| 2349 | 0.001763 | 0.020418 | 0.710152 |
| 2352 | 0.001967 | 0.020354 | 0.674644 |
| 2353 | 0.002343 | 0.020885 | 0.451139 |
| 2354 | 0.005892 | 0.03064 | 0.7194 |
| 2355 | 0.002628 | 0.021243 | 0.487594 |
| 2356 | 0.002016 | 0.021037 | 0.615679 |
| 2357 | 0.002143 | 0.021701 | 0.386956 |
| 2358 | 0.00212 | 0.021198 | 0.829166 |
| 2359 | 0.001791 | 0.020172 | 0.544619 |
| 2360 | 0.001856 | 0.020163 | 0.486583 |
| 2361 | 0.001901 | 0.019958 | 0.530139 |
| 2362 | 0.001879 | 0.020308 | 0.653006 |
| 2363 | 0.001922 | 0.020067 | 0.590144 |
| 2364 | 0.001837 | 0.02092 | 0.592571 |
| 2365 | 0.001792 | 0.020929 | 0.551517 |
| 2366 | 0.001791 | 0.020276 | 0.562391 |
| 2367 | 0.001762 | 0.020237 | 0.490932 |
| 2368 | 0.001774 | 0.019958 | 0.581639 |
| 2369 | 0.002441 | 0.023886 | 0.442913 |
| 2370 | 0.001851 | 0.019744 | 0.597586 |
| 2371 | 0.001833 | 0.019874 | 0.780994 |
| 2372 | 0.001836 | 0.020828 | 0.624654 |
| 2373 | 0.002203 | 0.0221 | 0.648313 |
| 2374 | 0.001781 | 0.02029 | 0.477161 |
| 2375 | 0.001758 | 0.019773 | 0.487119 |
| 2376 | 0.001766 | 0.019771 | 0.526721 |
| 2377 | 0.001848 | 0.019724 | 0.617253 |
| 2379 | 0.001845 | 0.020022 | 0.490031 |
| 2380 | 0.001881 | 0.020903 | 0.584369 |
| 2381 | 0.329765 | 0.386006 | 0.504277 |
| 2382 | 0.002171 | 0.020794 | 0.601362 |
| 2383 | 0.001822 | 0.020056 | 0.529306 |
| 2384 | 0.001781 | 0.019899 | 0.518998 |
| 2385 | 0.002162 | 0.020271 | 0.525008 |
| 2386 | 0.001834 | 0.019886 | 0.548855 |
| 2387 | 0.002131 | 0.020496 | 0.494099 |
| 2388 | 0.002937 | 0.022063 | 0.622276 |
| 2390 | 0.001843 | 0.021049 | 0.592485 |
| 2392 | 0.001773 | 0.020597 | 0.495091 |
| 2394 | 0.001773 | 0.020237 | 0.601764 |
| 2395 | 0.001806 | 0.020086 | 0.558798 |
| 2396 | 0.001807 | 0.02021 | 0.456341 |
| 2397 | 0.002983 | 0.022137 | 0.664263 |
| 2399 | 0.002032 | 0.028561 | 0.419347 |
| 2400 | 0.001953 | 0.02732 | 0.539873 |
| 2401 | 0.001912 | 0.027274 | 0.638418 |
| 2402 | 0.001914 | 0.026898 | 0.523509 |
| 2403 | 0.001954 | 0.027389 | 0.678695 |
| 2404 | 0.001977 | 0.027124 | 0.765805 |
| 2405 | 0.00211 | 0.030541 | 0.701647 |
| 2406 | 0.00247 | 0.029078 | 0.813564 |
| 2407 | 0.002076 | 0.027414 | 0.698683 |
| 2408 | 0.001925 | 0.028973 | 0.656613 |
| 2409 | 0.002188 | 0.027465 | 0.541032 |
| 2410 | 0.001926 | 0.025909 | 0.545951 |
| 2411 | 0.00194 | 0.026781 | 0.754864 |
| 2412 | 0.00382 | 0.039591 | 0.762652 |
| 2413 | 0.002162 | 0.027084 | 0.685745 |
| 2414 | 0.002494 | 0.029168 | 0.594618 |
| 2415 | 0.002268 | 0.029022 | 0.768169 |
| 2416 | 0.001922 | 0.026555 | 0.470209 |
| 2417 | 0.002127 | 0.027122 | 0.636734 |
| 2418 | 0.001951 | 0.026994 | 0.650385 |
| 2419 | 0.001945 | 0.027143 | 0.883213 |
| 2420 | 0.002209 | 0.02794 | 0.572425 |
| 2421 | 0.003578 | 0.031521 | 0.65348 |
| 2422 | 0.4597 | 1.118984 | 0.742345 |
| 2423 | 0.002036 | 0.027481 | 0.594989 |
| 2424 | 0.001912 | 0.026795 | 0.566853 |
| 2425 | 0.002128 | 0.027336 | 0.616199 |
| 2426 | 0.004274 | 0.035029 | 0.701308 |
| 2427 | 0.002039 | 0.026637 | 0.688343 |
| 2428 | 0.002025 | 0.026834 | 0.482521 |
| 2430 | 0.002201 | 0.027234 | 0.454862 |
| 2431 | 0.002645 | 0.028863 | 0.606143 |
| 2432 | 0.002137 | 0.027883 | 0.73667 |
| 2433 | 0.001911 | 0.026777 | 0.764379 |
| 2434 | 0.002656 | 0.031144 | 0.654025 |
| 2435 | 0.357958 | 1.054187 | 0.789014 |
| 2436 | 0.002408 | 0.027834 | 0.652141 |
| 2437 | 0.002128 | 0.029482 | 0.589591 |
| 2438 | 0.002046 | 0.027328 | 0.6305 |
| 2439 | 0.002126 | 0.027527 | 0.702897 |
| 2441 | 0.001931 | 0.027353 | 0.554509 |
| 2442 | 0.00194 | 0.026835 | 0.748374 |
| 2443 | 0.00206 | 0.027504 | 0.580563 |
| 2444 | 0.002454 | 0.030028 | 0.562538 |
| 2445 | 0.002479 | 0.027979 | 0.691218 |
| 2446 | 0.002005 | 0.026464 | 0.592756 |
| 2447 | 0.00209 | 0.02736 | 0.67768 |
| 2448 | 0.00215 | 0.027489 | 0.746934 |
| 2449 | 0.001919 | 0.027314 | 0.63539 |
| 2450 | 0.001947 | 0.026788 | 0.971937 |
| 2451 | 0.002047 | 0.027081 | 0.714018 |
| 2452 | 0.00199 | 0.026765 | 0.687724 |
| 2453 | 0.002001 | 0.026884 | 0.675106 |
| 2454 | 0.002043 | 0.026814 | 0.578459 |
| 2455 | 0.002485 | 0.027898 | 0.62214 |
| 2456 | 0.003114 | 0.03194 | 0.536157 |
| 2457 | 0.002044 | 0.028064 | 0.672813 |
| 2458 | 0.015881 | 0.100316 | 0.627601 |
| 2460 | 0.00195 | 0.026811 | 0.61264 |
| 2461 | 0.001936 | 0.027321 | 0.614411 |
| 2462 | 0.001952 | 0.026879 | 0.570422 |
| 2463 | 0.001996 | 0.026846 | 0.724248 |
| 2464 | 0.003014 | 0.029551 | 0.681079 |
| 2465 | 0.851106 | 1.519622 | 0.556387 |
| 2466 | 0.001875 | 0.027585 | 0.573732 |
| 2467 | 0.001914 | 0.026865 | 0.584638 |
| 2468 | 0.001951 | 0.026667 | 0.76513 |
| 2469 | 0.001935 | 0.026646 | 0.483364 |
| 2470 | 0.001927 | 0.027128 | 0.708523 |
| 2471 | 0.002115 | 0.027369 | 0.645251 |
| 2472 | 0.002277 | 0.02739 | 0.83229 |
| 2473 | 0.003074 | 0.029112 | 0.868278 |
| 2474 | 0.001898 | 0.031517 | 0.628315 |
| 2475 | 0.001888 | 0.025737 | 0.488711 |
| 2476 | 0.001895 | 0.026321 | 0.539154 |
| 2477 | 0.001942 | 0.02957 | 0.540224 |
| 2478 | 0.001972 | 0.026698 | 0.560129 |
| 2479 | 0.002055 | 0.026361 | 0.588692 |
| 2480 | 0.002449 | 0.029257 | 0.564031 |
| 2481 | 0.002188 | 0.027339 | 0.617131 |
| 2482 | 0.001929 | 0.027532 | 0.647844 |
| 2483 | 0.001901 | 0.026611 | 0.505461 |
| 2484 | 0.001911 | 0.026331 | 0.632902 |
| 2485 | 0.001935 | 0.026733 | 0.781338 |
| 2486 | 0.00232 | 0.028127 | 0.762296 |
| 2487 | 0.002045 | 0.029716 | 0.555858 |
| 2488 | 0.002322 | 0.027239 | 0.655834 |
| 2489 | 0.003042 | 0.02839 | 0.619313 |
| 2490 | 0.001901 | 0.027794 | 0.675581 |
| 2491 | 0.001867 | 0.026896 | 0.63697 |
| 2492 | 0.001957 | 0.027113 | 0.720652 |
| 2493 | 0.00211 | 0.02692 | 0.928346 |
| 2494 | 0.001976 | 0.02681 | 0.505157 |
| 2496 | 0.005512 | 0.03457 | 0.661025 |
| 2498 | 0.001855 | 0.021094 | 1.26703 |
| 2499 | 0.001794 | 0.019382 | 1.205979 |
| 2500 | 0.001798 | 0.019209 | 1.194211 |
| 2501 | 0.001855 | 0.019647 | 1.175705 |
| 2502 | 0.001805 | 0.01951 | 1.05585 |
| 2503 | 0.001854 | 0.01969 | 0.740211 |
| 2504 | 0.001802 | 0.019108 | 1.169167 |
| 2505 | 0.001803 | 0.020364 | 1.044078 |
| 2507 | 0.001816 | 0.019238 | 0.826173 |
| 2508 | 0.0018 | 0.019457 | 0.747832 |
| 2509 | 0.001814 | 0.018725 | 0.764182 |
| 2510 | 0.001788 | 0.018705 | 0.961773 |
| 2511 | 0.001811 | 0.019187 | 1.002978 |
| 2512 | 0.00184 | 0.019337 | 0.951505 |
| 2513 | 0.001795 | 0.0198 | 0.784969 |
| 2514 | 0.001806 | 0.019423 | 1.155331 |
| 2515 | 0.001819 | 0.019277 | 0.899568 |
| 2516 | 0.001783 | 0.018727 | 0.906725 |
| 2517 | 0.001767 | 0.018491 | 1.156806 |
| 2518 | 0.001826 | 0.018843 | 0.984126 |
| 2519 | 0.001827 | 0.018971 | 1.106655 |
| 2520 | 0.001856 | 0.019129 | 0.981249 |
| 2521 | 0.001863 | 0.019361 | 0.815735 |
| 2522 | 0.001753 | 0.019788 | 0.683346 |
| 2523 | 0.00179 | 0.018958 | 0.763397 |
| 2524 | 0.001774 | 0.019189 | 0.99147 |
| 2525 | 0.001796 | 0.019005 | 1.173316 |
| 2526 | 0.00239 | 0.022053 | 0.703461 |
| 2527 | 0.001839 | 0.018912 | 0.926152 |
| 2528 | 0.002235 | 0.020166 | 0.849943 |
| 2529 | 0.001833 | 0.019542 | 1.169762 |
| 2531 | 0.001757 | 0.019516 | 0.804991 |
| 2532 | 0.001791 | 0.019332 | 0.97138 |
| 2533 | 0.00183 | 0.018744 | 0.932083 |
| 2534 | 0.001829 | 0.018966 | 0.603137 |
| 2535 | 0.001825 | 0.019067 | 0.775401 |
| 2536 | 0.001839 | 0.019239 | 1.005791 |
| 2537 | 0.001837 | 0.019027 | 0.742716 |
| 2538 | 0.00184 | 0.019119 | 1.025351 |
| 2539 | 0.001786 | 0.019252 | 1.038877 |
| 2540 | 0.001818 | 0.019031 | 1.121716 |
| 2541 | 0.001778 | 0.018762 | 0.803414 |
| 2542 | 0.00183 | 0.01897 | 0.935541 |
| 2543 | 0.001856 | 0.018641 | 0.779233 |
| 2544 | 0.001832 | 0.018997 | 0.936523 |
| 2545 | 0.001818 | 0.019351 | 0.785605 |
| 2546 | 0.001855 | 0.019618 | 1.078452 |
| 2547 | 0.001753 | 0.019425 | 0.952274 |
| 2548 | 0.001801 | 0.019016 | 0.883621 |
| 2549 | 0.001932 | 0.019884 | 0.963362 |
| 2550 | 0.001852 | 0.019493 | 0.756811 |
| 2551 | 0.001811 | 0.018994 | 0.735339 |
| 2552 | 0.001829 | 0.018641 | 0.751335 |
| 2553 | 0.001842 | 0.019264 | 0.734602 |
| 2555 | 0.001803 | 0.019524 | 0.791215 |
| 2556 | 0.001808 | 0.019326 | 1.234156 |
| 2557 | 0.001817 | 0.019034 | 0.844118 |
| 2559 | 0.0018 | 0.019361 | 0.832718 |
| 2560 | 0.001849 | 0.018958 | 1.108257 |
| 2561 | 0.001875 | 0.019191 | 0.924327 |
| 2562 | 0.00183 | 0.019757 | 0.913942 |
| 2563 | 0.001766 | 0.019449 | 1.039711 |
| 2564 | 0.001761 | 0.019642 | 0.975257 |
| 2565 | 0.001822 | 0.018907 | 0.875283 |
| 2566 | 0.001827 | 0.018953 | 30.804406 |
| 2567 | 0.00182 | 0.01881 | 0.84509 |
| 2568 | 0.001815 | 0.018919 | 0.949194 |
| 2569 | 0.00187 | 0.018963 | 0.839079 |
| 2570 | 0.001859 | 0.019606 | 0.843373 |
| 2571 | 0.001771 | 0.019425 | 0.664874 |
| 2572 | 0.001861 | 0.019316 | 0.807564 |
| 2573 | 0.001825 | 0.018896 | 1.142032 |
| 2574 | 0.001799 | 0.018916 | 0.733867 |
| 2575 | 0.001848 | 0.018948 | 0.764302 |
| 2576 | 0.001862 | 0.0189 | 0.934422 |
| 2578 | 0.001938 | 0.019715 | 0.942217 |
| 2579 | 0.001762 | 0.019242 | 0.986229 |
| 2580 | 0.001771 | 0.01972 | 0.75995 |
| 2581 | 0.001846 | 0.019138 | 0.813534 |
| 2582 | 0.001812 | 0.018893 | 1.03767 |
| 2583 | 0.001829 | 0.019116 | 0.974132 |
| 2584 | 0.001881 | 0.019667 | 0.850391 |
| 2585 | 0.002575 | 0.020133 | 1.050868 |
| 2586 | 0.002919 | 0.020784 | 0.982573 |
| 2587 | 0.001816 | 0.019662 | 0.675518 |
| 2588 | 0.001816 | 0.019437 | 0.754413 |
| 2589 | 0.001844 | 0.01968 | 0.725135 |
| 2590 | 0.00185 | 0.020018 | 0.754455 |
| 2591 | 0.001831 | 0.019558 | 0.900126 |
| 2593 | 0.001894 | 0.019772 | 0.853028 |
| 2594 | 0.003467 | 0.021701 | 0.877 |

### Example 79

### Expression of CD19-41BBζ, CD19-CD28ζ, HER2-41BBζ or HER2-CD28ζ Chimeric Antigen Receptors (CARs) Following In Vitro Administration of Circular RNAs Encoding Said CARs

[0918] Human T cells from three unique T cells donors were activated with anti-CD3 or CD28 for three days and set to rest for 24 hours. Engineered circular RNA (oRNA) encoding CD19-41BBζ, CD19-CD28ζ, HER2-41BBζ, or HER2-CD28ζ chimeric antigen receptors (CARs) were electroporated into the human T cells. 24 hours post transfection CAR expression for each of the CARs were measured using fluorescence-activated cell sorting (FACS).

[0919] As seen in FIG. 94A and FIG. 94B, the circular RNA constructs were able to express CAR for each of the different CAR constructs.

### Example 80

### Lysis of Tumor Cells Following In Vitro Transfection of CD19-41BBζ and CD19-CD28ζ Chimeric Antigen Receptors (CARs) and Cytokine Production

[0920] Human T cells were activated with anti-CD3 or CD28 for three days and rested for 24 hours. The cells were then transfected with circular RNAs encoding for mOX40L (positive control), CD19-41BBζ, CD19-CD28ζ, HER2-41BBζ, or HER2-CD28ζ chimeric antigen receptors (CARs) via electroporation. 24 hours post-electroporation, said T cells were cocultured with Nalm6 tumor cells at a 1:1 effector to target (E:T) ratio. Nalm6 killing was measured 24 hours following coculturing of the human T cells with the Nalm6 tumor cells. Coculture supernatants were collect and analyzed using Meso Scale Discovery (MSD) (Agilent Technologies, Santa Clara, CA) for IFN-g and IL-2 expression.

[0921] As seen in FIG. 95A, CD19-41BBζ and CD19-CD28ζ encoding circular RNAs surpassed tumor cell killing to the positive control, mOX40L circular RNAs, and even surpassed HER2-41BBζ and HER2-CD28ζ. The circRNAs encoding CD19-BBζ and CD19-28ζ also surpassed the IFN-g and IL-2 cytokine compared to the circRNAs encoding HER2-41BBζ, HER2-CD28ζ, or mOX40L (FIG. 95B and FIG. 95C). Antigen specific killing was observed at 1:3 effector to target (E:T) ratio following transfection of the circRNAs.

### Example 81

mOX40L Expression in Blood and Splenic Human T Cells of Humanized Mice Following Intravenous Administration of LNP-circRNA Encoding mOX40L

[0922] NOG mice (1E7 Mouse Hybridoma) were engrafted with human peripheral blood mononuclear cells (hPBMC). 3 weeks later the mice were treated with a single intravenous dose of LNP encapsulating circular RNAs encoding mOx40L at 2 mg/kg. LNP were formulated with ionizable lipid 10b-15, 10a-27, or 10a-26. 24 hours following intravenous administration, splenocytes and peripheral blood cells were isolated and analyzed for T cell expression of mOX40L.

[0923] As seen in FIG. 96A and FIG. 96B, mOX40L was detected in the human T cells of the humanized mice's spleen and peripheral blood for each of the LNP constructs. Expression was higher for all three constructs in the spleen.

### Example 82

### B Cell Aplasia in the Spleen of Humanized Mice Following Intravenous Administration of LNP-circRNA Construct Encoding for an Anti-CD19 CAR

[0924] NOG mice (1E7 Mouse Hybridoma) were engrafted with human peripheral blood mononuclear cells (hPBMC) at 50-60% human engraftment in total. 3 weeks after engraftment, the mice were treated with a single dose of LNPs encapsulating circular RNA encoding anti-CD19 CAR or IXPBS (negative control) at 2 mg/kg. Six days post dosing, splenocytes were isolated and analyzed for the presence of B cells via CD19 expression.

[0925] As seen in FIG. 97, B cell aplasia was present in the humanized mice when comparing the splenocytes of the mice receiving LNP-circRNA constructs (the left of FIG. 97) compared to the splenocytes of the mice receiving the negative control (the right of FIG. 97).

### Example 83

### Nalm6 Killing Following In Vitro Administration of Circular RNA Constructs Encoding Different CARs

[0926] T cells were activated with anti-CD3 or anti-CD28 for three days and rested for 24 hours. The cells were then treated with LNP-circRNAs encoding mOX40L (positive control), CD19-41BBζ, CD19-CD28ζ, HER2-41BBζ, or HER2-CD28ζ chimeric antigen receptors (CARs). LNPs were formulated using ionizable lipid 10b-15. Expression of the CARs was measured by fluorescence-activated cell sorting (FACS) to measure the mean fluorescence activity (MFI). T cells were then cocultured with Nalm6 tumor cells. Nalm6 killing was measured the following day.

[0927] 48 hours after co-culturing the T cells with the Nalm6 cells, the effector to target (E:T) ratio was 1:5. As seen in FIG. 98A, percent killing of the Nalm6 tumor cells post administration of the LNP-circRNA constructs was significantly greater for the constructs encoding CD19-CD28ζ or CD19-41BBζ compared to the constructs encoding HER2-41BBζ, HER2-CD28ζ, or mOX40L (the positive control). FIG. 98B illustrates that circRNAs encoding CD19-28ζ CARs has a greater killing of Nalm6 cells than circRNAs encoding CD19-BBζ CARs.

### Example 84

[0928] 1E6 (Nalm6-Luc) cells were engrafted into NSG mice. 3 days later, CD3/CD28 treated hPBMCs were engrafted ex vivo. 24 hours post engraftment, the mice were dosed via in vivo administration with LNP encapsulating circular RNA constructs (circular RNAs encoded either CD19-41BBζ CARs, CD19-CD28ζCARs, HER2-41BBζ CARs, HER2-CD28ζCARs or mOX40L (positive control)) or PBS (negative control 1) or PBMC (negative control 2)) at 2 mg/kg. All of the LNPs were formulated with ionizable lipid 10b-15. The mice were dosed every other day for a total of 5 doses. Nalm6 tumor burden over time was quantified using IVIS imaging.

[0929] As seen in FIG. 99, LNPs formulated with CD19-CD28ζCARs are more effective in tumor regression than the other CAR or controls (positive or negative).

### Example 85

Expression of gLuc oRNA by Novel IRESs in Primary Human Hepatocytes, Primary Human Myotubes, and Primary Human T Cells

[0930] 93 constructs, each containing a unique IRES sequence preceding (i.e., 5′ to) a Gaussia luciferase (gLuc) expression sequence, were synthesized. Circular RNA (oRNA) was encapsulated in Lipid A and transfected into primary human hepatocytes (50 ng/well) and primary human myotubes (100 ng/well). Primary human T cells were transfected with 5 ng/well of non-formulated oRNA via electroporation. At 48 hours, the cell supernatant was collected and read for luminescence. IRES-driven gLuc expression was then normalized to an internal control IRES having SEQ ID NO: 3282 that was transfected in triplicate on each plate to determine relative expression levels. The data comparing expression in T cells electroporated with a gLuc-encoding construct as compared to that of hepatocytes and myotubes show an increase in correlation as compared to T cell expression when gLuc-encoding constructs were delivered by a lipid nanoparticle (LNP) (see Tables 5 & 6 and FIGS. 102A & 102B).

TABLE 5
Comparison of expression of gLuc in T cells
transfected by electroporation or primary
human hepatocytes transfected with LNPs

| Construct | T cells | Hepatocytes |
|---|---|---|
| C1 | 0.781812 | 1.789967 |
| (SEQ ID NO: 693) | | |
| C2 | 0.843272 | 1.20282 |
| (SEQ ID NO: 752) | | |
| C3 | 1.084859 | 1.685733 |
| (SEQ ID NO: 785) | | |
| C4 | 0.875589 | 0.880832 |
| (SEQ ID NO: 787) | | |
| C5 | 0.702179 | 1.755608 |
| (SEQ ID NO: 791) | | |
| C6 | 1.530501 | 2.144337 |
| (SEQ ID NO: 793) | | |
| C7 | 0.669549 | 0.769599 |
| (SEQ ID NO: 820) | | |
| C8 | 1.350993 | 1.881923 |
| (SEQ ID NO: 823) | | |
| C9 | 0.823706 | 1.209531 |
| (SEQ ID NO: 839) | | |
| C10 | 1.101436 | 1.978986 |
| (SEQ ID NO: 840) | | |
| C11 | 0.69405 | 1.209325 |
| (SEQ ID NO: 843) | | |
| C12 | 0.632273 | 1.629583 |
| (SEQ ID NO: 852) | | |
| C13 | 1.38681 | 2.181173 |
| (SEQ ID NO: 857) | | |
| C14 | 1.160055 | 2.493854 |
| (SEQ ID NO: 861) | | |
| C15 | 1.093723 | 2.409856 |
| (SEQ ID NO: 862) | | |
| C16 | 0.636014 | 2.150293 |
| (SEQ ID NO: 863) | | |
| C17 | 1.131199 | 2.03697 |
| (SEQ ID NO: 864) | | |
| C18 | 0.85826 | 0.979795 |
| (SEQ ID NO: 874) | | |
| C19 | 1.607973 | 1.885157 |
| (SEQ ID NO: 876) | | |
| C20 | 0.695179 | 1.448789 |
| (SEQ ID NO: 959) | | |
| C21 | 1.145246 | 1.449374 |
| (SEQ ID NO: 983) | | |
| C22 | 0.789058 | 1.303281 |
| (SEQ ID NO: 984) | | |
| C23 | 0.740537 | 1.094131 |
| (SEQ ID NO: 1015) | | |
| C24 | 1.450209 | 1.73917 |
| (SEQ ID NO: 1017) | | |
| C25 | 1.284727 | 1.090183 |
| (SEQ ID NO: 1023) | | |
| C26 | 0.541319 | 1.36819 |
| (SEQ ID NO: 1026) | | |
| C27 | 0.00527 | 2.002515 |
| (SEQ ID NO: 1031) | | |
| C28 | 0.548442 | 1.214363 |
| (SEQ ID NO: 1041) | | |
| C29 | 0.925584 | 1.65123 |
| (SEQ ID NO: 1047) | | |
| C30 | 0.250089 | 0.687958 |
| (SEQ ID NO: 1059) | | |
| C31 | 0.775688 | 2.198663 |
| (SEQ ID NO: 1068) | | |
| C32 | 0.63106 | 1.194958 |
| (SEQ ID NO: 1134) | | |
| C33 | 1.046387 | 0.972607 |
| (SEQ ID NO: 1168) | | |
| C34 | 1.34302 | 2.317664 |
| (SEQ ID NO: 1169) | | |
| C35 | 1.369419 | 2.604943 |
| (SEQ ID NO: 1171) | | |
| C36 | 0.75288 | 2.10632 |
| (SEQ ID NO: 1177) | | |
| C37 | 0.510432 | 1.792991 |
| (SEQ ID NO: 1178) | | |
| C38 | 1.167913 | 1.339824 |
| (SEQ ID NO: 1179) | | |
| C39 | 0.9501 | 1.926039 |
| (SEQ ID NO: 1180) | | |
| C40 | 0.855226 | 1.644577 |
| (SEQ ID NO: 1189) | | |
| C41 | 1.360869 | 2.049345 |
| (SEQ ID NO: 1192) | | |
| C42 | 0.960246 | 1.204445 |
| (SEQ ID NO: 1193) | | |
| C43 | 0.881406 | 1.560716 |
| (SEQ ID NO: 1198) | | |
| C44 | 1.840964 | 2.230125 |
| (SEQ ID NO: 1216) | | |
| C45 | 0.469295 | 1.047787 |
| (SEQ ID NO: 1263) | | |
| C46 | 0.568126 | 2.36749 |
| (SEQ ID NO: 1276) | | |
| C47 | 0.632638 | 1.373936 |
| (SEQ ID NO: 1280) | | |
| C48 | 0.375273 | 1.101024 |
| (SEQ ID NO: 1282) | | |
| C49 | 1.264343 | 2.456285 |
| (SEQ ID NO: 1284) | | |
| C50 | 1.045813 | 1.955882 |
| (SEQ ID NO: 1287) | | |
| C51 | 0.601175 | 0.989625 |
| (SEQ ID NO: 3292) | | |
| C52 | 1.022958 | 1.443859 |
| (SEQ ID NO: 3293) | | |
| C53 | 0.955833 | 1.505989 |
| (SEQ ID NO: 3294) | | |
| C54 | 0.718225 | 1.640835 |
| (SEQ ID NO: 3295) | | |
| C55 | 0.092929 | 0.127566 |
| (SEQ ID NO: 3296) | | |
| C56 | 0.665661 | 0.447235 |
| (SEQ ID NO: 3297) | | |
| C57 | 1.152769 | 2.517318 |
| (SEQ ID NO: 2285) | | |
| C58 | 0.0014 | 0.002206 |
| (SEQ ID NO: 2601) | | |
| C59 | 0.051441 | 0.042088 |
| (SEQ ID NO: 2615) | | |
| C60 | 0.008382 | 0.030507 |
| (SEQ ID NO: 2616) | | |
| C61 | 0.007267 | 0.002422 |
| (SEQ ID NO: 2617) | | |
| C62 | 0.008072 | 0.021991 |
| (SEQ ID NO: 2618) | | |
| C63 | 0.000761 | 0 |
| (SEQ ID NO: 2627) | | |
| C64 | 0.564561 | 1.198385 |
| (SEQ ID NO: 871) | | |
| C65 | 0.733764 | 0.646334 |
| (SEQ ID NO: 922) | | |
| C66 | 0.016487 | 0.10179 |
| (SEQ ID NO: 2667) | | |
| C67 | 0.058548 | 0.015293 |
| (SEQ ID NO: 2681) | | |
| C68 | 1.088459 | 1.151406 |
| (SEQ ID NO: 2742) | | |
| C69 | 0.587669 | 1.156564 |
| (SEQ ID NO: 2746) | | |
| C70 | 0.325456 | 1.059696 |
| (SEQ ID NO: 2758) | | |
| C71 | 1.050785 | 1.969435 |
| (SEQ ID NO: 2777) | | |
| C72 | 1.350472 | 1.635228 |
| (SEQ ID NO: 2778) | | |
| C73 | 0.857241 | 0.628088 |
| (SEQ ID NO: 3298) | | |
| C74 | 0.445517 | 0.737632 |
| (SEQ ID NO: 3299) | | |
| C75 | 0.000962 | 0.820587 |
| (SEQ ID NO: 3300) | | |
| C76 | 0.479121 | 1.125387 |
| (SEQ ID NO: 3301) | | |
| C77 | 1.01908 | 1.169268 |
| (SEQ ID NO: 3302) | | |
| C78 | 1.35322 | 2.716134 |
| (SEQ ID NO: 3283) | | |
| C79 | 0.621993 | 2.039883 |
| (SEQ ID NO: 3284) | | |
| C80 | 0.604474 | 1.253068 |
| (SEQ ID NO: 3285) | | |
| C81 | 0.503822 | 0.481752 |
| (SEQ ID NO: 75) | | |
| C82 | 0.526345 | 0.723817 |
| (SEQ ID NO: 77) | | |
| C83 | 0.004556 | 0 |
| (SEQ ID NO: 137) | | |
| C84 | 0.546897 | 0.671198 |
| (SEQ ID NO: 3289) | | |
| C85 | 1.191477 | 1.603127 |
| (SEQ ID NO: 3290) | | |
| C86 | 2.538039 | 1.774949 |
| (SEQ ID NO: 3291) | | |
| C87 | 0.059416 | 0.114372 |
| (SEQ ID NO: 532) | | |
| C88 | 0.036736 | 0.011773 |
| (SEQ ID NO: 566) | | |
| C89 | 0.760741 | 1.602763 |
| (SEQ ID NO: 580) | | |
| C90 | 0.983704 | 1.461777 |
| (SEQ ID NO: 648) | | |

TABLE 6
Comparison of expression of gLuc in T cells
transfected by electroporation or primary
human myotubes transfected with LNPs

| Construct | T cells | Myotbubes |
|---|---|---|
| C1 | 0.781812 | 0.4959 |
| (SEQ ID NO: 693) | | |
| C2 | 0.843272 | 0.588222 |
| (SEQ ID NO: 752) | | |
| C3 | 1.084859 | 0.6651 |
| (SEQ ID NO: 785) | | |
| C4 | 0.875589 | 0.396423 |
| (SEQ ID NO: 787) | | |
| C5 | 0.702179 | 1.082975 |
| (SEQ ID NO: 791) | | |
| C6 | 1.530501 | 1.186985 |
| (SEQ ID NO:s 793) | | |
| C7 | 0.669549 | 0.613586 |
| (SEQ ID NO: 820) | | |
| C8 | 1.350993 | 1.181903 |
| (SEQ ID NO: 823) | | |
| C9 | 0.823706 | 0.961742 |
| (SEQ ID NO: 839) | | |
| C10 | 1.101436 | 0.868987 |
| (SEQ ID NO: 840) | | |
| C11 | 0.69405 | 0.727779 |
| (SEQ ID NO: 843) | | |
| C12 | 0.632273 | 0.95248 |
| (SEQ ID NO: 852) | | |
| C13 | 1.38681 | 1.306163 |
| (SEQ ID NO: 857) | | |
| C14 | 1.160055 | 1.442309 |
| (SEQ ID NO: 861) | | |
| C15 | 1.093723 | 1.106511 |
| (SEQ ID NO: 862) | | |
| C16 | 0.636014 | 0.788138 |
| (SEQ ID NO: 863) | | |
| C17 | 1.131199 | 0.765271 |
| (SEQ ID NO: 864) | | |
| C18 | 0.85826 | 0.700623 |
| (SEQ ID NO: 874) | | |
| C19 | 1.607973 | 1.090032 |
| (SEQ ID NO: 876) | | |
| C20 | 0.695179 | 0.686847 |
| (SEQ ID NO: 959) | | |
| C21 | 1.145246 | 0.662146 |
| (SEQ ID NO: 983) | | |
| C22 | 0.789058 | 0.786323 |
| (SEQ ID NO: 984) | | |
| C23 | 0.740537 | 0.657684 |
| (SEQ ID NO: 1015) | | |
| C24 | 1.450209 | 1.02179 |
| (SEQ ID NO: 1017) | | |
| C25 | 1.284727 | 1.082823 |
| (SEQ ID NO: 1023) | | |
| C26 | 0.541319 | 0.896722 |
| (SEQ ID NO: 1026) | | |
| C27 | 0.00527 | 1.341548 |
| (SEQ ID NO: 1031) | | |
| C28 | 0.548442 | 0.658859 |
| (SEQ ID NO: 1041) | | |
| C29 | 0.925584 | 1.458831 |
| (SEQ ID NO: 1047) | | |
| C30 | 0.250089 | 0.403819 |
| (SEQ ID NO: 1059) | | |
| C31 | 0.775688 | 1.086343 |
| (SEQ ID NO: 1068) | | |
| C32 | 0.63106 | 0.6557 |
| (SEQ ID NO: 1134) | | |
| C33 | 1.046387 | 1.228291 |
| (SEQ ID NO: 1168) | | |
| C34 | 1.34302 | 1.190566 |
| (SEQ ID NO: 1169) | | |
| C35 | 1.369419 | 0.84109 |
| (SEQ ID NO: 1171) | | |
| C36 | 0.75288 | 1.937973 |
| (SEQ ID NO: 1177) | | |
| C37 | 0.510432 | 0.681991 |
| (SEQ ID NO: 1178) | | |
| C38 | 1.167913 | 0.788823 |
| (SEQ ID NO: 1179) | | |
| C39 | 0.9501 | 1.25303 |
| (SEQ ID NO: 1180) | | |
| C40 | 0.855226 | 1.026352 |
| (SEQ ID NO: 1189) | | |
| C41 | 1.360869 | 1.436999 |
| (SEQ ID NO: 1192) | | |
| C42 | 0.960246 | 0.636939 |
| (SEQ ID NO: 1193) | | |
| C43 | 0.881406 | 1.035781 |
| (SEQ ID NO: 1198) | | |
| C44 | 1.840964 | 1.593485 |
| (SEQ ID NO: 1216) | | |
| C45 | 0.469295 | 0.75519 |
| (SEQ ID NO: 1263) | | |
| C46 | 0.568126 | 1.519461 |
| (SEQ ID NO: 1276) | | |
| C47 | 0.632638 | 1.441776 |
| (SEQ ID NO: 1280) | | |
| C48 | 0.375273 | 0.943528 |
| (SEQ ID NO: 1282) | | |
| C49 | 1.264343 | 1.439882 |
| (SEQ ID NO: 1284) | | |
| C50 | 1.045813 | 1.138229 |
| (SEQ ID NO: 1287) | | |
| C51 | 0.601175 | 0.897061 |
| (SEQ ID NO: 3292) | | |
| C52 | 1.022958 | 1.03281 |
| (SEQ ID NO: 3293) | | |
| C53 | 0.955833 | 1.097108 |
| (SEQ ID NO: 3294) | | |
| C54 | 0.718225 | 0.901887 |
| (SEQ ID NO: 3295) | | |
| C55 | 0.092929 | 0.084114 |
| (SEQ ID NO: 3296) | | |
| C56 | 0.665661 | 0.843353 |
| (SEQ ID NO: 3297) | | |
| C57 | 1.152769 | 1.708846 |
| (SEQ ID NO: 2285) | | |
| C58 | 0.0014 | 0.014801 |
| (SEQ ID NO: 2601) | | |
| C59 | 0.051441 | 0.024369 |
| (SEQ ID NO: 2615) | | |
| C60 | 0.008382 | 0.013367 |
| (SEQ ID NO: 2616) | | |
| C61 | 0.007267 | 0 |
| (SEQ ID NO: 2617) | | |
| C62 | 0.008072 | 0.022575 |
| (SEQ ID NO: 2618) | | |
| C63 | 0.000761 | 0 |
| (SEQ ID NO: 2627) | | |
| C64 | 0.564561 | 0.55265 |
| (SEQ ID NO: 871) | | |
| C65 | 0.733764 | 0.833352 |
| (SEQ ID NO: 922) | | |
| C66 | 0.016487 | 0.025211 |
| (SEQ ID NO: 2667) | | |
| C67 | 0.058548 | 0.060367 |
| (SEQ ID NO: 2681) | | |
| C68 | 1.088459 | 0.761185 |
| (SEQ ID NO: 2742) | | |
| C69 | 0.587669 | 0.816852 |
| (SEQ ID NO: 2746) | | |
| C70 | 0.325456 | 0.68701 |
| (SEQ ID NO: 2758) | | |
| C71 | 1.050785 | 1.647834 |
| (SEQ ID NO: 2777) | | |
| C72 | 1.350472 | 1.884789 |
| (SEQ ID NO: 2778) | | |
| C73 | 0.857241 | 0.897388 |
| (SEQ ID NO: 3298) | | |
| C74 | 0.445517 | 0.802662 |
| (SEQ ID NO: 3299) | | |
| C75 | 0.000962 | 0.230752 |
| (SEQ ID NO: 3300) | | |
| C76 | 0.479121 | 0.748166 |
| (SEQ ID NO: 3301) | | |
| C77 | 1.01908 | 1.649437 |
| (SEQ ID NO: 3302) | | |
| C78 | 1.35322 | 1.590997 |
| (SEQ ID NO: 3283) | | |
| C79 | 0.621993 | 1.020461 |
| (SEQ ID NO: 3284) | | |
| C80 | 0.604474 | 0.427239 |
| (SEQ ID NO: 3285) | | |
| C81 | 0.503822 | 0.271581 |
| (SEQ ID NO: 75) | | |
| C82 | 0.526345 | 0.447674 |
| (SEQ ID NO: 77) | | |
| C83 | 0.004556 | 0 |
| (SEQ ID NO: 137) | | |
| C84 | 0.546897 | 0.560942 |
| (SEQ ID NO: 3289) | | |
| C85 | 1.191477 | 1.854881 |
| (SEQ ID NO: 3290) | | |
| C86 | 2.538039 | 2.338184 |
| (SEQ ID NO: 3291) | | |
| C87 | 0.059416 | 0.09047 |
| (SEQ ID NO: 532) | | |
| C88 | 0.036736 | 0.005766 |
| (SEQ ID NO: 566) | | |
| C89 | 0.760741 | 1.306589 |
| (SEQ ID NO: 580) | | |
| C90 | 0.983704 | 0.880306 |
| (SEQ ID NO: 648) | | |

### Example 86

Expression of gLuc and FLuc Coding Regions by Novel IRESs in Primary Human Hepatocytes, Primary Human Myotubes, and Primary Human T Cells

[0931] 93 constructs, each containing a unique IRES sequence preceding a Firefly luciferase (FLuc) expression sequence, were synthesized. oRNA was encapsulated in Lipid A and transfected into primary human hepatocytes (50 ng/well) and primary human myotubes (100 ng/well). Primary human T cells were transfected via electroporation with 5 ng/well of non-formulated oRNA. At 48 hours, the cell supernatant was collected and read for luminescence. IRES-mediated FLuc expression was then normalized to an internal control (SEQ ID NO: 3282) that was transfected in triplicate on each plate to determine relative expression levels. The FLuc expression data was compared to the gLuc expression data shown in Example 1 to assess IRES-mediated efficacy in: (1) mediating expression of coding regions of different lengths; and (2) producing both secreted (gLuc) and intracellular (FLuc) proteins within the three tested cell types. The findings of these experiments demonstrate that there is a positive correlation between gLuc and FLuc expression in all three cell types, indicating that selected IRES sequences can drive robust expression of different target genes (see Tables 7-9 and FIGS. 103A-103C).

TABLE 7
Comparison of gLuc and FLuc expression
data - Primary human myotubes

| Construct | gLuc | FLuc |
|---|---|---|
| C78 | 1.590997 | 1.312724 |
| (SEQ ID NO: 3283) | | |
| C91 | 0.95248 | 0.531801 |
| (SEQ ID NO: 852) | | |
| C13 | 1.306163 | 1.071016 |
| (SEQ ID NO: 857) | | |
| C14 | 1.442309 | 1.562547 |
| (SEQ ID NO: 861) | | |
| C15 | 1.106511 | 1.157547 |
| (SEQ ID NO: 862) | | |
| C16 | 0.788138 | 0.595526 |
| (SEQ ID NO: 863) | | |
| C17 | 0.765271 | 0.917029 |
| (SEQ ID NO: 864) | | |
| C64 | 0.55265 | 0.837934 |
| (SEQ ID NO: 871) | | |
| C18 | 0.700623 | 0.549536 |
| (SEQ ID NO: 874) | | |
| C19 | 1.090032 | 0.836932 |
| (SEQ ID NO: 876) | | |
| C65 | 0.833352 | 0.832225 |
| (SEQ ID NO: 922) | | |
| C20 | 0.686847 | 0.927862 |
| (SEQ ID NO: 959) | | |
| C21 | 0.662146 | 0.569056 |
| (SEQ ID NO: 983) | | |
| C22 | 0.786323 | 1.216579 |
| (SEQ ID NO: 984) | | |
| C23 | 0.657684 | 1.209252 |
| (SEQ ID NO: 1015) | | |
| C24 | 1.02179 | 0.77457 |
| (SEQ ID NO: 1017) | | |
| C25 | 1.082823 | 1.487919 |
| (SEQ ID NO: 1023) | | |
| C26 | 0.896722 | 0.939609 |
| (SEQ ID NO: 1026) | | |
| C92 | 1.341548 | 1.73804 |
| (SEQ ID NO: 1037) | | |
| C28 | 0.658859 | 0.803578 |
| (SEQ ID NO: 1041) | | |
| C29 | 1.458831 | 0.976716 |
| (SEQ ID NO: 1047) | | |
| C30 | 0.403819 | 2.208373 |
| (SEQ ID NO: 1059) | | |
| C31 | 1.086343 | 1.486304 |
| (SEQ ID NO: 1068) | | |
| C32 | 0.6557 | 0.248399 |
| (SEQ ID NO: 1134) | | |
| C33 | 1.228291 | 0.097162 |
| (SEQ ID NO: 1168) | | |
| C34 | 1.190566 | 0.738396 |
| (SEQ ID NO: 1169) | | |
| C35 | 0.84109 | 1.771565 |
| (SEQ ID NO: 1171) | | |
| C36 | 1.937973 | 1.454313 |
| (SEQ ID NO: 1177) | | |
| C37 | 0.681991 | 0.797131 |
| (SEQ ID NO: 1178) | | |
| C38 | 0.788823 | 0.596369 |
| (SEQ ID NO: 1179) | | |
| C39 | 1.25303 | 0.95716 |
| (SEQ ID NO: 1180) | | |
| C40 | 1.026352 | 0.8111 |
| (SEQ ID NO: 1189) | | |
| C41 | 1.436999 | 2.857461 |
| (SEQ ID NO: 1192) | | |
| C42 | 0.636939 | 1.031387 |
| (SEQ ID NO: 1193) | | |
| C43 | 1.035781 | 0.887593 |
| (SEQ ID NO: 1198) | | |
| C44 | 1.593485 | 1.253139 |
| (SEQ ID NO: 1216) | | |
| C45 | 0.75519 | 1.124883 |
| (SEQ ID NO: 1263) | | |
| C46 | 1.519461 | 0.799936 |
| (SEQ ID NO: 1276) | | |
| C47 | 1.441776 | 0.751532 |
| (SEQ ID NO: 1280) | | |
| C48 | 0.943528 | 1.173641 |
| (SEQ ID NO: 1282) | | |
| C49 | 1.439882 | 2.416924 |
| (SEQ ID NO: 1284) | | |
| C57 | 1.708846 | 0.903192 |
| (SEQ ID NO: 2285) | | |
| C93 | 0.271581 | 0.327022 |
| (SEQ ID NO: 75) | | |
| C94 | 0.447674 | 0.596422 |
| (SEQ ID NO: 77) | | |
| C58 | 0.014801 | 0.003874 |
| (SEQ ID NO: 2601) | | |
| C59 | 0.024369 | 0 |
| (SEQ ID NO: 2615) | | |
| C60 | 0.013367 | 0.033495 |
| (SEQ ID NO: 2616) | | |
| C61 | 0 | 0 |
| (SEQ ID NO: 2617) | | |
| C62 | 0.022575 | 0 |
| (SEQ ID NO: 2618) | | |
| C63 | 0 | 0.079153 |
| (SEQ ID NO: 2627) | | |
| C83 | 0 | 0 |
| (SEQ ID NO: 137) | | |
| C87 | 0.09047 | 0 |
| (SEQ ID NO: 532) | | |
| C88 | 0.005766 | 0 |
| (SEQ ID NO: 566) | | |
| C89 | 1.306589 | 0.544577 |
| (SEQ ID NO: 580) | | |
| C90 | 0.880306 | 0.673771 |
| (SEQ ID NO: 648) | | |
| C1 | 0.4959 | 0.203921 |
| (SEQ ID NO: 693) | | |
| C2 | 0.588222 | 0.903914 |
| (SEQ ID NO: 752) | | |
| C3 | 0.6651 | 0.389754 |
| (SEQ ID NO: 785) | | |
| C4 | 0.396423 | 0.668529 |
| (SEQ ID NO: 787) | | |
| IRC1-947 | 1.082975 | 1.408435 |
| (SEQ ID NO: 791) | | |
| C5 | 1.186985 | 0.953863 |
| (SEQ ID NO: 793) | | |
| C7 | 0.613586 | 1.156583 |
| (SEQ ID NO: 820) | | |
| C8 | 1.181903 | 0.916452 |
| (SEQ ID NO: 823) | | |
| C9 | 0.961742 | 0.657186 |
| (SEQ ID NO: 839) | | |
| C10 | 0.868987 | 1.38723 |
| (SEQ ID NO: 840) | | |
| C11 | 0.727779 | 1.078516 |
| (SEQ ID NO: 841) | | |
| C66 | 0.025211 | 0.027435 |
| (SEQ ID NO: 2667) | | |
| C67 | 0.060367 | 0.224418 |
| (SEQ ID NO: 2681) | | |
| C68 | 0.761185 | 0.639208 |
| (SEQ ID NO: 2742) | | |
| C69 | 0.816852 | 1.815435 |
| (SEQ ID NO: 2746) | | |
| C70 | 0.68701 | 0.549928 |
| (SEQ ID NO: 2758) | | |
| C71 | 1.647834 | 1.814036 |
| (SEQ ID NO: 2777) | | |
| C72 | 1.884789 | 1.960701 |
| (SEQ ID NO: 2778) | | |
| C84 | 0.560942 | 1.00269 |
| (SEQ ID NO: 3289) | | |
| C85 | 1.854881 | 1.396289 |
| (SEQ ID NO: 3290) | | |
| C95 | 2.338184 | 4.600078 |
| (SEQ ID NO: 3288) | | |
| C51 | 0.897061 | 1.384093 |
| (SEQ ID NO: 3292) | | |
| C52 | 1.03281 | 1.155681 |
| (SEQ ID NO: 3293) | | |
| C53 | 1.097108 | 2.720138 |
| (SEQ ID NO: 3294) | | |
| C54 | 0.901887 | 0.93398 |
| (SEQ ID NO: 3295) | | |
| C55 | 0.084114 | 0.142769 |
| (SEQ ID NO: 3296) | | |
| C56 | 0.843353 | 0.460966 |
| (SEQ ID NO: 3297) | | |
| C73 | 0.897388 | 0.653462 |
| (SEQ ID NO: 3298) | | |
| C74 | 0.802662 | 1.949759 |
| (SEQ ID NO: 3299) | | |
| C75 | 0.230752 | 0.573199 |
| (SEQ ID NO: 3300) | | |
| C76 | 0.748166 | 0.835379 |
| (SEQ ID NO: 3301) | | |
| C77 | 1.649437 | 0.836293 |
| (SEQ ID NO: 3302) | | |
| C79 | 1.020461 | 2.118603 |
| (SEQ ID NO: 3284 | | |
| C80 | 0.427239 | 1.876227 |
| (SEQ ID NO: 3285) | | |

TABLE 8
Comparison of gLuc and FLuc expression
data - Primary human hepatocytes

| Construct | gLuc | FLuc |
|---|---|---|
| C78 | 2.716134 | 2.060788 |
| (SEQ ID NO: 3283) | | |
| C91 | 1.629583 | 1.905209 |
| (SEQ ID NO: 852) | | |
| C13 | 2.181173 | 2.246248 |
| (SEQ ID NO: 857) | | |
| C14 | 2.493854 | 1.881799 |
| (SEQ ID NO: 861) | | |
| C15 | 2.409856 | 2.552247 |
| (SEQ ID NO: 862) | | |
| C16 | 2.150293 | 1.562611 |
| (SEQ ID NO: 863) | | |
| C17 | 2.03697 | 1.603392 |
| (SEQ ID NO: 864) | | |
| C64 | 1.198385 | 1.359501 |
| (SEQ ID NO: 871) | | |
| C18 | 0.979795 | 1.02569 |
| (SEQ ID NO: 874) | | |
| C19 | 1.885157 | 1.374759 |
| (SEQ ID NO: 876) | | |
| C65 | 0.646334 | 0.752749 |
| (SEQ ID NO: 922) | | |
| C20 | 1.448789 | 1.538369 |
| (SEQ ID NO: 959) | | |
| C21 | 1.449374 | 1.136936 |
| (SEQ ID NO: 983) | | |
| C22 | 1.303281 | 2.10726 |
| (SEQ ID NO: 984) | | |
| C23 | 1.094131 | 1.689963 |
| (SEQ ID NO: 1015) | | |
| C24 | 1.73917 | 1.696402 |
| (SEQ ID NO: 1017) | | |
| C25 | 1.090183 | 2.204761 |
| (SEQ ID NO: 1023) | | |
| C26 | 1.36819 | 1.51613 |
| (SEQ ID NO: 1026) | | |
| C92 | 2.002515 | 2.372148 |
| (SEQ ID NO: 1037) | | |
| C28 | 1.214363 | 1.565902 |
| (SEQ ID NO: 1041) | | |
| C29 | 1.65123 | 1.938792 |
| (SEQ ID NO: 1047) | | |
| C30 | 0.687958 | 1.421279 |
| (SEQ ID NO: 1059) | | |
| C31 | 2.198663 | 1.311447 |
| (SEQ ID NO: 1068) | | |
| C32 | 1.194958 | 1.591302 |
| (SEQ ID NO: 1134) | | |
| C33 | 0.972607 | 0.987267 |
| (SEQ ID NO: 1168) | | |
| C34 | 2.317664 | 2.370785 |
| (SEQ ID NO: 1169) | | |
| C35 | 2.604943 | 2.325792 |
| (SEQ ID NO: 1171) | | |
| C36 | 2.10632 | 1.649129 |
| (SEQ ID NO: 1177) | | |
| C37 | 1.792991 | 1.141286 |
| (SEQ ID NO: 1178) | | |
| C38 | 1.339824 | 1.421089 |
| (SEQ ID NO: 1179) | | |
| C39 | 1.926039 | 1.567946 |
| (SEQ ID NO: 1180) | | |
| C40 | 1.644577 | 1.555664 |
| (SEQ ID NO: 1189) | | |
| C41 | 2.049345 | 2.33941 |
| (SEQ ID NO: 1192) | | |
| C42 | 1.204445 | 2.06872 |
| (SEQ ID NO: 1193) | | |
| C43 | 1.560716 | 1.265724 |
| (SEQ ID NO: 1198) | | |
| C44 | 2.230125 | 1.564512 |
| (SEQ ID NO: 1216) | | |
| C45 | 1.047787 | 0.979048 |
| (SEQ ID NO: 1263) | | |
| C46 | 1.891742 | 2.088992 |
| (SEQ ID NO: 1276) | | |
| C47 | 1.373936 | 1.276431 |
| (SEQ ID NO: 1280) | | |
| C48 | 1.101024 | 1.823506 |
| (SEQ ID NO: 1282) | | |
| C49 | 2.456285 | 2.533504 |
| (SEQ ID NO: 1284) | | |
| C57 | 2.517318 | 1.499781 |
| (SEQ ID NO: 2285) | | |
| C93 | 0.481752 | 1.004326 |
| (SEQ ID NO: 75) | | |
| C94 | 0.723817 | 1.023214 |
| (SEQ ID NO: 77) | | |
| C58 | 0.002206 | 0 |
| (SEQ ID NO: 2601) | | |
| C59 | 0.042088 | 0 |
| (SEQ ID NO: 2615) | | |
| C60 | 0.045761 | 0 |
| (SEQ ID NO: 2616) | | |
| C61 | 0.002422 | 0 |
| (SEQ ID NO: 2617) | | |
| C62 | 0.055067 | 0 |
| (SEQ ID NO: 2618) | | |
| C63 | 0 | 0.016989 |
| (SEQ ID NO: 2627) | | |
| C83 | 0 | 0.007678 |
| (SEQ ID NO: 137) | | |
| C87 | 0.114372 | 0.033199 |
| (SEQ ID NO: 532) | | |
| C88 | 0.011773 | 0.000778 |
| (SEQ ID NO: 566) | | |
| C89 | 1.602763 | 0.969482 |
| (SEQ ID NO: 580) | | |
| C90 | 1.461777 | 1.759526 |
| (SEQ ID NO: 648) | | |
| C1 | 1.789967 | 1.829363 |
| (SEQ ID NO: 693) | | |
| C2 | 1.20282 | 1.18851 |
| (SEQ ID NO: 752) | | |
| C3 | 1.685733 | 1.772856 |
| (SEQ ID NO: 785) | | |
| C4 | 0.880832 | 2.158202 |
| (SEQ ID NO: 787) | | |
| IRC1-947 | 1.755608 | 1.587946 |
| (SEQ ID NO: 791) | | |
| C5 | 2.144337 | 1.684434 |
| (SEQ ID NO: 793) | | |
| C7 | 0.769599 | 1.041986 |
| (SEQ ID NO: 820) | | |
| C8 | 1.881923 | 2.208252 |
| (SEQ ID NO: 823) | | |
| C9 | 1.209531 | 1.990984 |
| (SEQ ID NO: 839) | | |
| C10 | 1.978986 | 1.694731 |
| (SEQ ID NO: 840) | | |
| C11 | 1.209325 | 1.335431 |
| (SEQ ID NO: 841) | | |
| C66 | 0.10179 | 0.098907 |
| (SEQ ID NO: 2667) | | |
| C67 | 0.015293 | 0.025525 |
| (SEQ ID NO: 2681) | | |
| C68 | 1.151406 | 1.686267 |
| (SEQ ID NO: 2742) | | |
| C69 | 1.156564 | 1.048837 |
| (SEQ ID NO: 2746) | | |
| C70 | 1.059696 | 1.022913 |
| (SEQ ID NO: 2758) | | |
| C71 | 1.969435 | 3.111428 |
| (SEQ ID NO: 2777) | | |
| C72 | 1.635228 | 2.038087 |
| (SEQ ID NO: 2778) | | |
| C84 | 0.671198 | 1.845161 |
| (SEQ ID NO: 3289) | | |
| C85 | 1.603127 | 1.462123 |
| (SEQ ID NO: 3290) | | |
| C95 | 1.774949 | 1.966788 |
| (SEQ ID NO: 3288) | | |
| C51 | 0.989625 | 1.875905 |
| (SEQ ID NO: 3292) | | |
| C52 | 1.443859 | 2.102649 |
| (SEQ ID NO: 3293) | | |
| C53 | 1.505989 | 2.853261 |
| (SEQ ID NO: 3294) | | |
| C54 | 1.322062 | 1.64633 |
| (SEQ ID NO: 3295) | | |
| C55 | 0.127566 | 0.11069 |
| (SEQ ID NO: 3296) | | |
| C56 | 0.649718 | 1.310716 |
| (SEQ ID NO: 3297) | | |
| C73 | 0.628088 | 0.936313 |
| (SEQ ID NO: 3298) | | |
| C74 | 0.737632 | 1.187904 |
| (SEQ ID NO: 3299) | | |
| C75 | 0.820587 | 0.579661 |
| (SEQ ID NO: 3300) | | |
| C76 | 1.125387 | 1.069279 |
| (SEQ ID NO: 3301) | | |
| C77 | 1.169268 | 1.173599 |
| (SEQ ID NO: 3302) | | |
| C79 | 2.039883 | 1.583805 |
| (SEQ ID NO: 3284) | | |
| C80 | 1.253068 | 1.620713 |
| (SEQ ID NO: 3285) | | |

TABLE 9
Comparison of gLuc and FLuc expression
data - Primary human T cells

| Construct | gLuc | FLuc |
|---|---|---|
| C78 | 1.35322 | 0.694504 |
| (SEQ ID NO: 3283) | | |
| C91 | 0.632273 | 0.741893 |
| (SEQ ID NO: 852) | | |
| C13 | 1.38681 | 1.413992 |
| (SEQ ID NO: 857) | | |
| C14 | 1.160055 | 1.287027 |
| (SEQ ID NO: 861) | | |
| C15 | 1.093723 | 1.820246 |
| (SEQ ID NO: 862) | | |
| C16 | 0.636014 | 0.907711 |
| (SEQ ID NO: 863) | | |
| C17 | 1.131199 | 1.891654 |
| (SEQ ID NO: 864) | | |
| C64 | 0.564561 | 1.110898 |
| (SEQ ID NO: 871) | | |
| C18 | 0.85826 | 1.041825 |
| (SEQ ID NO: 874) | | |
| C19 | 1.607973 | 0.910107 |
| (SEQ ID NO: 876) | | |
| C65 | 0.733764 | 2.255002 |
| (SEQ ID NO: 922) | | |
| C20 | 0.695179 | 1.435898 |
| (SEQ ID NO: 959) | | |
| C21 | 1.145246 | 0.792179 |
| (SEQ ID NO: 983) | | |
| C22 | 0.789058 | 0.666628 |
| (SEQ ID NO: 984) | | |
| C23 | 0.740537 | 1.420103 |
| (SEQ ID NO: 1015) | | |
| C24 | 1.450209 | 0.95303 |
| (SEQ ID NO: 1017) | | |
| C25 | 1.284727 | 0.659544 |
| (SEQ ID NO: 1023) | | |
| C26 | 0.541319 | 0.730967 |
| (SEQ ID NO: 1026) | | |
| C92 | 0.00527 | 1.511334 |
| (SEQ ID NO: 1037) | | |
| C28 | 0.548442 | 1.278064 |
| (SEQ ID NO: 1041) | | |
| C29 | 0.925584 | 1.340266 |
| (SEQ ID NO: 1047) | | |
| C30 | 0.250089 | 0.888613 |
| (SEQ ID NO: 1059) | | |
| C31 | 0.775688 | 2.897512 |
| (SEQ ID NO: 1068) | | |
| C32 | 0.63106 | 0.733483 |
| (SEQ ID NO: 1134) | | |
| C33 | 1.046387 | 0.208604 |
| (SEQ ID NO: 1168) | | |
| C34 | 1.34302 | 1.69471 |
| (SEQ ID NO: 1169) | | |
| C35 | 1.369419 | 2.275963 |
| (SEQ ID NO: 1171) | | |
| C36 | 0.75288 | 1.034014 |
| (SEQ ID NO: 1177) | | |
| C37 | 0.510432 | 0.79276 |
| (SEQ ID NO: 1178) | | |
| C38 | 1.167913 | 0.700155 |
| (SEQ ID NO: 1179) | | |
| C39 | 0.9501 | 1.236702 |
| (SEQ ID NO: 1180) | | |
| C40 | 0.855226 | 2.311516 |
| (SEQ ID NO: 1189) | | |
| C41 | 1.360869 | 2.100648 |
| (SEQ ID NO: 1192) | | |
| C42 | 0.960246 | 0.557141 |
| (SEQ ID NO: 1193) | | |
| C43 | 0.881406 | 1.044061 |
| (SEQ ID NO: 1198) | | |
| C44 | 1.840964 | 1.301044 |
| (SEQ ID NO: 1216) | | |
| C45 | 0.469295 | 0.806161 |
| (SEQ ID NO: 1263) | | |
| C46 | 0.568126 | 1.365778 |
| (SEQ ID NO: 1276) | | |
| C47 | 0.632638 | 0.991396 |
| (SEQ ID NO: 1280) | | |
| C48 | 0.375273 | 1.474358 |
| (SEQ ID NO: 1282) | | |
| C49 | 1.264343 | 0.887098 |
| (SEQ ID NO: 1284) | | |
| C57 | 1.152769 | 1.55509 |
| (SEQ ID NO: 2285) | | |
| C93 | 0.503822 | 1.576826 |
| (SEQ ID NO: 75) | | |
| C94 | 0.526345 | 2.45618 |
| (SEQ ID NO: 77) | | |
| C58 | 0.0014 | 0.003517 |
| (SEQ ID NO: 2601) | | |
| C59 | 0.051441 | 0.00131 |
| (SEQ ID NO: 2615) | | |
| C60 | 0.008382 | 0 |
| (SEQ ID NO: 2616) | | |
| C61 | 0.007267 | 0.006067 |
| (SEQ ID NO: 2617) | | |
| C62 | 0.008072 | 0.00268 |
| (SEQ ID NO: 2618) | | |
| C63 | 0.000761 | 0.040465 |
| (SEQ ID NO: 2627) | | |
| C83 | 0.004556 | 0.002569 |
| (SEQ ID NO: 137) | | |
| C87 | 0.059416 | 0.133348 |
| (SEQ ID NO: 532) | | |
| C88 | 0.036736 | 0.168426 |
| (SEQ ID NO: 566) | | |
| C89 | 0.760741 | 0.697294 |
| (SEQ ID NO: 580) | | |
| C90 | 0.983704 | 2.273875 |
| (SEQ ID NO: 648) | | |
| C1 | 0.781812 | 0.102251 |
| (SEQ ID NO: 693) | | |
| C2 | 0.843272 | 2.085294 |
| (SEQ ID NO: 752) | | |
| C3 | 1.084859 | 0.915046 |
| (SEQ ID NO: 785) | | |
| C4 | 0.875589 | 0.920996 |
| (SEQ ID NO: 787) | | |
| IRC1-947 | 0.702179 | 1.6859 |
| (SEQ ID NO: 791) | | |
| C5 | 1.530501 | 1.885392 |
| (SEQ ID NO: 793) | | |
| C7 | 0.669549 | 1.033134 |
| (SEQ ID NO: 820) | | |
| C8 | 1.350993 | 2.682581 |
| (SEQ ID NO: 823) | | |
| C9 | 0.823706 | 0.94879 |
| (SEQ ID NO: 839) | | |
| C10 | 1.101436 | 1.308508 |
| (SEQ ID NO: 840) | | |
| C11 | 0.69405 | 1.890697 |
| (SEQ ID NO: 841) | | |
| C66 | 0.016487 | 0.09984 |
| (SEQ ID NO: 2667) | | |
| C67 | 0.058548 | 0.213187 |
| (SEQ ID NO: 2681) | | |
| C68 | 1.088459 | 1.130929 |
| (SEQ ID NO: 2742) | | |
| C69 | 0.587669 | 1.383575 |
| (SEQ ID NO: 2746) | | |
| C70 | 0.325456 | 0.78795 |
| (SEQ ID NO: 2758) | | |
| C71 | 1.050785 | 1.64216 |
| (SEQ ID NO: 2777) | | |
| C72 | 1.350472 | 0.19906 |
| (SEQ ID NO: 2778) | | |
| C84 | 0.546897 | 1.306713 |
| (SEQ ID NO: 3289) | | |
| C85 | 1.191477 | 1.458442 |
| (SEQ ID NO: 3290) | | |
| C95 | 2.538039 | 3.547121 |
| (SEQ ID NO: 3288) | | |
| C51 | 0.601175 | 1.176565 |
| (SEQ ID NO: 3292) | | |
| C52 | 1.022958 | 2.268061 |
| (SEQ ID NO: 3293) | | |
| C53 | 0.955833 | 1.218078 |
| (SEQ ID NO: 3294) | | |
| C54 | 0.718225 | 1.145427 |
| (SEQ ID NO: 3295) | | |
| C55 | 0.092929 | 0.047994 |
| (SEQ ID NO: 3296) | | |
| C56 | 0.665661 | 0.970387 |
| (SEQ ID NO: 3297) | | |
| C73 | 0.857241 | 2.009902 |
| (SEQ ID NO: 3298) | | |
| C74 | 0.445517 | 0.65993 |
| (SEQ ID NO: 3299) | | |
| C75 | 0.000962 | 0.903645 |
| (SEQ ID NO: 3300) | | |
| C76 | 0.479121 | 1.038262 |
| (SEQ ID NO: 3301) | | |
| C77 | 1.01908 | 1.176483 |
| (SEQ ID NO: 3302) | | |
| C79 | 0.621993 | 2.738178 |
| (SEQ ID NO: 3284) | | |
| C80 | 0.604474 | 2.219763 |
| (SEQ ID NO: 3285) | | |

### Example 87

### IRES Screening

[0932] Approximately 12,400 potential internal ribosome entry sites (IRES) sequence candidates were computationally identified from untranslated regions (UTRs), e.g., viral UTRs, in partial and complete publicly-available viral sequences available (e.g., Genbank). Sequences lacking a Xbal site and less than a certain number of homopolymers were removed as potential candidates. The remaining 8,077 sequence candidates were attached to the 3′ end of a unique barcode sequence. Barcode sequences were developed using batch barcode sequences and by removing the Xbal site along with the last 2 nucleotides of the linker sequence. Additional 107 IRES candidate were selected from known IRES sequences (e.g., IRES Base). These additional IRES candidates were narrowed using the same parameters as the UTR-derived IRES sequences and added to the 3′ end of a unique barcode sequence. As a control, five IRES sequences, SEQ ID NOs: 3282-3285 and 3288, and were repeated eight times, and each attached to the 3′ end of a unique barcode sequence. Redundant sequences were removed. “caaaacaaacacaaaccaacaaaaa” (SEQ ID NO: 24897) and “ATGGGAGTGAAGGTGCTGTTCGCCC” (SEQ ID NO: 24898) were added to the 5′ and 3′ ends of all the sequences. Any sequences that acquired an additional Xbal site were removed. 1,0763 sequences remained and were analyzed.

### Functional Screening in T Cell Culture

[0933] Each DNA template is cloned to include an IRES sequence selected from a sequence set forth in in any one of SEQ ID NOS: 14067-24829 (GIRES-1 through GIRES-10762) or a fragment thereof. In the constructs set forth herein, each IRES sequence of SEQ ID NOs: 14067-24829 is optionally barcoded with one barcode sequence of SEQ ID NOs: 3304-14066 (e.g., the IRES of SEQ ID NO: 14067 is barcoded with the barcode sequence of SEQ ID NO: 3304, the IRES of SEQ ID NO: 14068 is barcoded with the barcode sequence of SEQ ID NO:3305, the IRES of SEQ ID NO: 14069 is barcoded with the barcode sequence of SEQ ID NO: 3306, etc.). Exemplary constructs include a 5′ enhanced intron element, a 5′ enhanced exon element, a putative IRES, a coding element encoding Gaussia Luciferase, a 3′ enhanced exon element, and a 3′ enhanced intron element. Engineered circular RNA (oRNA) are generated from the DNA template by in vitro transcription (IVT), and oRNA are subsequently purified from non-circular RNA components of the IVT reaction. Illumina sequencing and polysome profiling are performed after delivering the oRNA to primary human T cell culture. Time-course experiments on total and ribosome fractions after delivering the oRNA to primary human T cell culture, and validation experiments are also performed on the oRNA constructs.

oRNA-LNP Formulations

[0934] Purified oRNA is nanoprecipitated with lipids to form LNP-oRNA formulations. LNPs are formulated first by creating empty lipid nanoparticles using a Precision Nanosystems Ignite instrument with a “NextGen” mixing chamber. Ethanol phase contains Lipid 39 from Table 2, DSPC, cholesterol, and DMG-PEG 2000 (Avanti Polar Lipids, Inc., Alabaster, AL) at a molar ratio of 45:9:44:2 are combined with 50 mM sodium acetate buffer at pH 4.5. A 3:1 aqueous:ethanol mixing ratio is used. The empty LNPs are dialyzed in 1 L of 1×PBS and exchanged 2 times over 18 hours. Dialyzed empty LNPs are then mixed with a final circular RNA concentration of 40 g/mL in 50 mM sodium acetate buffer at pH 4.5. A 3:1 aqueous:empty lipid nanoparticle mixing ratio is used. The LNPs final ionizable lipid:RNA phosphate ratio is at 6.0.

### IRES Screening In Vivo

[0935] oRNA-LNP constructs are delivered to mice or non-human primates. Polysome profiling and time course experiments are performed for target organs and tissues. Further validation experiments are conducted in the respective animal models.

### Example 88

### IRES Library Cloning

[0936] Naturally occurring and optionally truncated untranslated region (UTR) sequences were selected as internal ribosome entry sites (IRES) candidates. 10,304 IRES sequences were synthesized by a gene synthesis vendor in 11 pools (each pool comprised of approximately 701-999 sequences per pool). IRES sequences received one out of 8 different barcode sequences. To clone the TRES sequences, a plasmid backbone was designed to comprise a 5′ enhanced intron element, a 5′ enhanced exon element, a Gaussia luciferase expression sequence, a 3′ enhanced exon element, and a 3′ enhanced intron element along with a 5′ primer (e.g., ATGGGAGTG AAGGTGCTGTTCGC, SEQ ID NO: 24899) and a 3′ primer (e.g., TTTTTGTTGGTTTGTGTTTGTTTTGTT TGGTGTTTGC, SEQ ID NO: 24900). The 5′ and 3′ enhanced intron and exon elements of the plasmid backbone were derived from Anabaena. The plasmid backbones were then amplified, and the original backbone attached to the IRES sequences were digested using Dpnl.

[0937] Each pool was cloned individually by combining the plasmid backbone and the IRES sequence at a 1:2 ratio, respectively, and incubated with a Gibson Assembly HiFi master mix at 50° C. for 30 minutes. 2 μL of the solution was transformed into 5-alpha competent cells. Transformants were pooled and grown in 1 L LB-ampicillin overnight and plasmid was isolated using Qiagen MaxiPrep kit. Estimated clones per fragment were determined by back calculating from the number of bacterial colonies. FIG. 104 shows the estimated number of clones produced per TRES for the number of sequences contained in each of the 11 pools.

Generating Circular RNAs from a IRES Cloning Library

[0938] Circular RNA was generated from the pooled plasmid output of the TRES cloning library. The plasmids of the pooled plasmid output was linearized with XbaI, and incubated with NO NTPs, GMP, in vitro transcription (IVT) buffer, RNase Inhibitor, Pyrophosphatase, and T7 polymerase for 2 hours at 37° C. in a thermomixer shaking at 350 RPM. DNaseI was then added to the reaction mix and incubated for 15 minutes at 37° C. Triplicates of resulting IVT product were purified using Monarch RNA purification column to conduct an IRES circularization assay. For enrichment of the circularized product, each replicate of the IVT product was subjected to exonuclease treatment of 15 μg of cleaned IVT product was incubated with RNase R buffer (Fisher Scientific), 10 U of RNase R (Fisher Scientific), 1U of XRN-1 (New England Biolabs) for 45 min at 37° C. Circular RNA enriched product was purified using Monarch RNA purification column.

[0939] For polysome and stability profiling, the IVT products were then diluted with 2.5× volumes of water with 3.5× volumes of dT resin binding buffer and incubated at 55° C. for 10 minutes. The IVT products in dT resin binding buffer are then bound to 2.5× volumes equilibrated Poros dT resin, and then incubated at 70° C. for 15 minutes at 700 RPM of shaking. Supernatant was then spun through the resin and purified using Monarch RNA purification column using manufacturer specifications.

[0940] A circular RNA ladder was generated by cloning 8 scrambled IRES sequences to the same plasmid backbone as the IRES library. For circularization profiling, the IVT products of these plasmids were mixed at defined concentrations across 4 orders of magnitude. The IVT products spiked-in to the IRES IVT product and were subjected to exonuclease treatment with the TRES IVT product. For polysome and stability profiling experiments, the IVT products of these ladders were cleaned up using dT resin and the purification column as described above. The purified products were mixed at defined concentrations across 4 orders of magnitude. FIG. 105 depicts the IVT reaction of the pooled plasmid output. FIG. 106 illustrates the IVT reaction of the pooled plasmid output before and after RNase R digestion.

### Example 89

### Cytoplasmic Polysome Profiling and Total RNA Isolation of Circular RNA Comprising IRES

a. T Cell Electroporation

[0941] Human pan-T cells were grown with Advanced RPMI media, supplemented with Normocin, 10% FBS, Penicillin and Streptomycin, and GlutaMAX. T-cells were activated after thawing by adding CD3 and CD34 for 3 days, and then replaced with media containing IL-2. Cells were expanded in this media, keeping density under 3×10⁶/ml, to appropriate cell numbers. Electroporation was performed using the 4D Nucleofector X unit and P3 primary cell 4D Nucleofector X kit L. Cells were resuspended in P3 solution containing 50 μg IRES library/mL at a density of 5×10⁷ cells/mL. 100 μL of the resuspended solution was transferred to a cuvette and electroporated. Cells were then resuspended in 5 mL T cell media per 100 μL electroporated cells (density of 1×10⁶ cells/mL) and placed in a growth container.

b. T-Cell Collection

[0942] 60M of the resuspended cells were electroporated for polysome experiments, and 30M of the resuspended cells were electroporated for stability experiments. Polysome collection was performed by taking all cells in the growth container at 6 hours post electroporation and adding cycloheximide at 100 μg/ml. These cells were then incubated at 37° C. for 15 minutes and received 2 washes with PBS+ cycloheximide at 100 μg/ml per wash. After removal of the final wash (i.e., the second wash), the cells were flash frozen on dry ice and stored at −80° C. The same process was performed for 4 different time points (e.g., 1.5 hours, 6 hours, 24 hours, and 48 hours) with a portion of the cell pool removed to a conical tube and treated with cycloheximide.

c. Polysome Profiling and RNA Isolation

[0943] Cell pellets were thawed briefly on ice, and then resuspended in polysome isolation buffer (e.g., 25 mM Tris-HCl pH 7.5, 100 mM KCl, 5 mM MgCl₂, 1% IGEPAL-CA630, 1% Sodium Deoxycholate, 100 μg/ml Cycloheximide, 1 mM DTT, 60 U/ml Superase Inhibitor, 1× complete EDTA free Protease Inhibitor). The solution was then incubated on ice for 30 minutes. After 30 minutes, the debris was spun down at 21,000×g, 10 minutes, 4° C. For the stability experiment, RNA extraction was directly performed. Trizol LS was added at 4× volume, and 100% Ethanol was added at 5× volume, then RNA extraction was performed using Zymo Direct-zol magbead RNA kit using manufacturer's recommendations.

[0944] For polysome experiments, 10-50% sucrose gradients were created using guidelines and standard protocols from a Biocomp Gradient Master instrument. Gradients were layered with the RNA extracts and centrifuged using Beckman XE-90 ultracentrifuge and SW-41Ti rotor at 41,000 RPM for 1.5 hours. These gradients were then fractionated using Biocomp Piston Gradient Fractionator and Gilson Fraction collector, where it collected 250 μL fractions along the gradient.

[0945] The circRNA ladder with scrambled IRES sequences was then spiked into each fraction at 2% v/v, and RNA was extracted from each fraction as described in Example 88.

[0946] FIG. 107 provides the 260 nm absorbance profile of some of the polysome species contained in several of the sucrose gradients following centrifugation.

### D. Total RNA-Seq Library Generation

[0947] For the circularization profiling, IVT and exonuclease treated RNA samples were made to RNA-seq libraries using NEBNext Ultra II Directional RNA-seq library kit and NEBNext Multiplex Oligos for Illumina with Unique Dual Index for RNA following their manuals. Libraries were then pooled in equimolar amounts and sequenced using Illumina Nextseq 2000, P2 kit reagents.

### E. circRNA Library Generation

[0948] For the stability profiling, total RNA from each timepoint and replicate was spiked in at 0.01% concentration, and measured by RNA concentration, using the scrambled circular RNA ladder described above. For the polysome profiling, all fractions corresponding to RNA bound to 4 or more ribosomes were pooled equally (henceforth “high” library), and all fractions corresponding to RNA bound to less than 4 ribosomes were pooled equally into a separate pool (henceforth “low” library). For each of these polysome pools and stability samples, RNA integrity was measured using Tape Station to validate that the RNA Integrity score was 9 or greater. These RNA samples were then depleted of rRNA using Ribo Minus rRNA depletion kit, using the low input or high input protocol depending on RNA amount. The output was then treated with 5 Units RNase R from Lucigen for 15 minutes at 37° C. The resulting RNA was purified using Beckman RNAclean XP beads. RNA libraries were prepared using NEBNext Ultra II Directional RNA-seq library kit and NEBNext Multiplex Oligos for Illumina with Unique Dual Index for RNA using the pre-enriched protocol. Libraries were then pooled in equimolar amounts and sequenced using Illumina Nextseq 2000, P3 kit reagents.

f. Bioinformatic Analysis of the IRES Library

[0949] Each circRNA within the IRES library and scrambled spike in was quantified by a custom RNA-seq protocol. Sequence reads were monitored for quality, and low-quality reads were trimmed using cutadapt. The sequence readings were then mapped to the library reference using BWA, and UMIs. Next, the sequence readings were grouped, called for consensus, and filtered for PCR duplicates and low-quality mappings using fgbio tools. The resultant files were quantified using Kallisto. Kallisto quantities were compiled into a counts table for each of the profiling experiments.

[0950] For the circularization experiment, the enrichment of each construct in each replicate was calculated by contrasting the count in the exonuclease treated library to the IVT library after filtering for a minimal count after library size normalization.

[0951] For polysome and stability profiling experiments, each count was normalized using linear regression for spiked-in counts and quantities, then filtered for a minimal count after normalization.

[0952] For polysome profiling experiment, proportion high values were calculated as follows:

$${Proportion}_{high} = \frac{{count}_{high}}{{count}_{high} + {count}_{low}}$$

[0953] In the stability experiment, after normalization constructs were filtered for having a minimal count in at least 3 timepoints. These values were then normalized to the first time point being 1, and natural log transformed. Each remaining construct then had linear regression performed, and high confidence linear regressions were selected by filtering for a p-value of 0.05 on the regression and an R² value of >0.6. Half-life was then calculated using the following formula:

$${t}_{1 / 2} = \frac{ln ( 10 ) - b}{a} - \frac{ln ( 20 ) - b}{a}$$

[0954] Where a is the coefficient of the linear regression and b is the intercept of the linear regression. FIGS. 108-110 provides the average portion in heavy polysomes, estimated half-life of the circular RNAs, and relative circularization efficiency.

### Example 90

Expression from Circular RNA Constructs In Vitro

[0955] Circular RNA constructs were engineered from vectors to express dystrophin protein. Vector constructs used comprised a 5′ enhanced intron element, a 5′ enhanced exon element, an IRES, an expression sequence encoding for a dystrophin protein comprising approximately 2,014 amino acids, a 3′ enhanced intron element, and a 3′ enhanced exon element. The IRES of the circular and vector constructs comprised of sequences from Tables 5 and 6 [SEQ ID NO: 3283, SEQ ID NO: 3282, SEQ ID NO: 1284, SEQ ID NO: 1177, SEQ IDNO: 2285, SEQ IDNO: 3287, SEQ IDNO: 3291, SEQ IDNO: 24893, SEQ IDNO: 24894]. The 5′ and 3′ enhanced intron elements comprised a sequence from Anabaena intron. The vector and circular RNA constructs further comprised an V5 antibody tag sequence upstream to the expression sequence but downstream to the IRES.

### Myoblast Culture

[0956] C2C12 (ATCC CRL-1772) myoblast cultures were thawed in a 37° C. water bath and plated at recommended seeding density (5,000 per cm²) in growth media consisting of DMEM, high glucose (Gibco) supplemented with 10% fetal bovine serum (FBS) (R&D Systems) and 2% Penicillin Streptomycin (PSG) (Gibco) and allowed to grow in a tissue culture incubator at 37° C. and 5% CO₂ atmosphere. If necessary to subculture, the cells were detached using TrypLE Express (Gibco) and replated in growth media. Media was changed every 2 days.

### Myotube Differentiation

[0957] C2C12 myoblasts were grown to 70-80% confluency in 0.1% gelatin (Sigma) coated tissue culture plates. Once at 70-80% confluency growth media was removed, cells were washed twice in 1×PBS (Gibco) and media was changed to differentiation media consisting of dulbecco's Modified Eagle Medium (DMEM) (Gibco) supplemented with 2% horse serum (Gibco) and 2% Penicillin-Streptomycin (PSG) (Gibco). Media was changed daily for 6-7 days until nearly all myoblasts had differentiated into myotubes.

Transfection of the Circular RNAs into the Myotube Cells

[0958] For each 96-well plate reaction, 0.3 μL of Lipofectamine-3000 transfection reagent (Lipo3K) (ThermoFisher) was mixed with 5 μL Opti-MEM reduced serum media (ThermoFisher). In a separate tube, per reaction, circular RNA encoding firefly luciferase (fluc) (at 10-200 ng) was combined with 5 μL Opti-MEM and 0.2 μL P3000TM enhancer reagent. 5 μL of Lipo3K/Opti-MEM was then added to 5 μL of circular RNA/Opti-MEM and incubated at room temperature for 15 mins. 10 μL of Lipo3000/circRNA mixture was then added to each well to be transfected and placed in a tissue culture incubator at 37° C. and 5% CO² atmosphere for 24-hrs (for luciferase assay readout) or 48-hours (for immunoblotting readout).

### LNP Transfection

[0959] Once myotubes were fully formed and ready for transfection, new differentiation media was added (e.g., 1 mL per 12-well plate), formulated LNPs comprising ionizable lipid 123 of Table of Additional Exemplary Ionizable Lipids (Table B) were then added directly into the differentiation media and cells were placed in a tissue culture incubator at 37° C. and 5% CO₂ atmosphere for 48-hours prior to collection.

### Cell Collection

[0960] 48-hours post transfection differentiation media was removed and cells were washed twice with 1×PBS (Gibco), 500 ul of trypsin (ReagentPack Lonza) were added and kept at room temperature until cells detach. The trypsin was then quenched with 700 μL of trypsin neutralizing solution (ReagentPack Lonza). The cells then were collected and spun down at 220×g for five minutes. The supernatant was removed, and cells were resuspended in RIPA buffer (Thermo) supplemented with proteinase inhibitor cocktail (Complete Sigma). Cells were vortexed and allowed to sit on ice for about 20 mins and then spun down at 10,000×g for 10 minutes, supernatant is protein lysate.

### Bradford Assay

[0961] To quantify protein concentrations 5 μL of pre-diluted bovine serum albumin (BSA) standards (Thermo) were loaded onto a 96-well plate in triplicate. Protein lysates were loaded at 1 ul in triplicate as well. Room temperature Quick Start Bradford Dye (BioRad) was added at 200 μL per well and allowed to sit for at least 5 mins. Absorbance was read at 595 nm using Cytation 5 plate reader (Bio-tek). Concentrations were calculated based on a standard curve.

### Western Blot Analysis

[0962] For the western blot analysis, protein lysate samples (cell or tissue) were made up at 1 μg/μL using NuPAGE 4× sample buffer (Thermo) and 1× NuPAGE reducing agent (Thermo). Samples were then heated at 95° C. for 8 minutes and spun down before loading. Samples were then loaded onto a3-8% Tris-Acetate gel (Thermo), placed in a XCell SureLock Mini-Cell Module (Thermo) and run at 80V for 10 mins, the module was then placed on ice and run at 120V for 80 mins. Proteins were then transferred to a nitrocellulose membrane (Thermo) using a wet transfer system (BioRad) in the cold room for 2 hrs at 80V. Membranes were then taken out and blocked in Intercept blocking buffer (LICOR) for 1 hr and then placed in diluted in Intercept T20 antibody diluent (LICOR) overnight at 4° C. The next day, the membranes were washed 3 times for 5 mins in 1× TBST, secondary antibody was then added at 1:5000 for 1 hr at room temperature. The membranes were then washed 3×5 mins in 1× TBST and imaged using Odyssey CtX.

### Immunoprecipitation

[0963] Immunoprecipitation of V5-tag was carried out by first adding 7.5 μg of anti-V5-tag antibody (abcam) to 1-1.5 mg of protein lysate (250 μL total volume) and incubating overnight at 4° C. 100 μL of Pierce protein A/G magnetic agarose beads (Thermo) were magnetized using DynaMag-2 magnet (Invitrogen) and washed twice with 1×PBS-0.1% triton. Lysate-antibody mix was added to the magnetized beads, mixed gently and incubated at 4° C. for 3 hours. Beads were then magnetized and supernatant discarded, beads were washed 5× with 700 μL of 1×PBS-0.1% triton and magnetized again. 20 μL of 4× NuPAGE sample buffer and 1× NuPAGE reducing agent (Thermo) was added to re-suspend the beads, heated to 90° C. for 7 minutes and vortexed vigorously to detach protein from bead. Beads were magnetized and supernatant moved to a clean tube to later run on a western blot as described above. Blot was probed for dystrophin using a rabbit anti-dystrophin antibody (abcam). FIGS. 111-114 provide the immunoprecipitation results.

TABLE 10

| Construct | | | % | AUC/% | Norm to |
|---|---|---|---|---|---|
| # | IRES Sequence | RNA | splice | splice | 10.0000% |
| 81 | SEQ ID NO: 3282 | 10.0006 | 72.5 | 1.19 | 100 |
| 82 | SEQ ID NO: 1177 | 07.0074 | 49.7 | 3.04 | 255 |
| 83 | SEQ ID NO: 2285 | 07.0075 | 53.3 | 2.47 | 207 |
| 84 | SEQ ID NO: 3287 | 07.0076 | 55.2 | 2.48 | 209 |
| 85 | SEQ ID NO: 3291 | 07.0077 | 60.4 | 4.43 | 372 |
| 86 | SEQ I NO: 24893 | 07.0078 | 42.8 | 4.43 | 372 |
| 87 | SEQ ID NO: 24894 | 07.0079 | 61.2 | 3.06 | 257 |

TABLE 11

| Construct | | | % | AUC/% | Norm |
|---|---|---|---|---|---|
| # | IRES Sequence | RNA | splice | splice | to 100.000% |
| 88 | SEQ ID NO: 3283 | 07.0070 | 0.62 | 1.81 | 172 |
| 89 | SEQ ID NO: 1284 | 12.0022 | 0.58 | 2.35 | 224 |
| 90 | SEQ ID NO: 3282 | 12.0023 | 0.43 | 1.26 | 121 |
| 85 | SEQ ID NO: 3291 | 12.0024 | 0.66 | 2.72 | 259 |
| 81 | SEQ ID NO: 3282 | 10.0006 | 0.725 | 1.05 | 100 |

TABLE 12

| | | | | | | | Construct | AUC/ | (AUC/splice)/ |
|---|---|---|---|---|---|---|---|---|---|
| Construct | IRES | | Splice | | AUC/splice | Construct | 81/% | Construct | Construct 81 |
| # | Sequence | RNA | percent | AUC | perc. | 81 | splice | 81 (%) | (%) |
| 82 | SEQ ID | 7.0074 | 0.5 | 1.543 | 2.86 | 1.71 | 2.377 | 83 | 120 |
| | NO: 1177 | | | | | | | | |
| 83 | SEQ ID | 7.0075 | 0.53 | 1.98 | 3.73 | 1.71 | 2.377 | 115 | 157 |
| | NO: 2285 | | | | | | | | |
| 85 | SEQ ID | 7.0077 | 0.6 | 3.49 | 5.81 | 1.71 | 2.377 | 204 | 245 |
| | NO: 3291 | | | | | | | | |
| 86 | SEQ I NO: | 7.0078 | 0.43 | 1.607 | 3.73 | 1.71 | 2.377 | 94 | 157 |
| | 24893 | | | | | | | | |
| 87 | SEQ ID | 7.0079 | 0.61 | 3.02 | 4.96 | 1.71 | 2.377 | 177 | 209 |
| | NO: 24894 | | | | | | | | |
| 91 | SEQ ID | 8.0041 | 0.76 | 4.14 | 5.45 | 1.71 | 2.377 | 242 | 230 |
| | NO: | | | | | | | | |
| | 24895 | | | | | | | | |

### Example 91

Muscular Dystrophy Expressed from Circular RNA Construct Having Various IRESes In Vivo

[0964] Circular RNA constructs were engineered from vectors to be able to express a dystrophin protein. Vector constructs used comprised a 5′ enhanced intron element, a 5′ enhanced exon element, an IRES, an expression sequence encoding for a dystrophin protein, a 3′ enhanced intron element, and a 3′ enhanced exon element. The IRES of the circular and vector constructs comprised of sequences SEQ ID NO: 3283, SEQ ID NO: 3291, SEQ ID NO: 24894, SEQ ID NO: 24895]. The 5′ and 3′ enhanced intron elements comprise a sequence from Anabaena intron. The vector and circular RNA constructs further comprised an V5 antibody tag sequence upstream to the expression sequence but downstream to the TRES.

[0965] Circular RNAs were encapsulated into LNPs comprising an ionizable lipid of Lipid 123 of Table B, ethanol, exemplary helper lipid, cholesterol, and PEGylated lipids. The circular RNA encapsulated in LNPs were then intramuscularly injected into female mdx mice (aged 6-8 weeks, weighted at 18 to 22 g). As a control, 3 μL of dystrophin human skeletal muscle cell lysate was spiked into 200 μL PBS tissue. Gastrocnemius muscle, quadricep, diaphragm, splenic, and liver tissue samples were extracted from the mice either 1 day or 6 days after the injection of the circular RNA. Immunoprecipitation and western blot analysis was conducted thereafter.

### Muscle Tissue Lysis Preparation

[0966] Quadriceps muscles were collected 48 hr post intramuscular injection and flash frozen in liquid nitrogen. For 1 whole quadriceps muscle, 2 mL of RIPA buffer (Thermo) was supplemented with proteinase inhibitor cocktail (cOmplete Sigma). RIPA was placed in a gentleMACS M-tube (Miltenyi Biotec) on ice and a whole quadriceps muscle was added. Tube was placed in the gentleMACS Octo Dissociator (Miltenyi Biotec) and Protein_01 protocol selected. After dissociation tubes were placed on ice for 5 mins and then centrifuged at 4,000×g for 5 minutes to collect supernatant. Supernatant was then placed in a 1.5 ml tube and spun again at 10,000×g for 10 minutes to collect debris. Supernatant is protein lysate.

### Bradford Assay

[0967] To quantify protein concentrations 5 μL of pre-diluted bovine serum albumin (BSA) standards (Thermo) were loaded onto a 96-well plate in triplicate. Protein lysates were loaded at 1 ul in triplicate as well. Room temperature Quick Start Bradford Dye (BioRad) was added at 200 μL per well and allowed to sit for at least 5 mins. Absorbance was read at 595 nm using Cytation 5 plate reader (Bio-tek). Concentrations were calculated based on a standard curve.

### Western Blot Analysis

[0968] For the western blot analysis, protein lysate samples (cell or tissue) were made up at 1 μg/μL using NuPAGE 4× sample buffer (Thermo) and 1× NuPAGE reducing agent (Thermo). Samples were then heated at 95° C. for 8 minutes and spun down before loading. Samples were then loaded onto a 3-8% Tris-Acetate gel (Thermo), placed in a XCell SureLock Mini-Cell Module (Thermo) and run at 80V for 10 mins, the module was then placed on ice and run at 120V for 80 mins. Proteins were then transferred to a nitrocellulose membrane (Thermo) using a wet transfer system (BioRad) in the cold room for 2 hrs at 80V. Membranes were then taken out and blocked in Intercept blocking buffer (LICOR) for 1 hr and then placed in primary antibody (e.g., anti-V5 tag and/or vinculin recombinant antibody) diluted in Intercept T20 antibody diluent (LICOR) overnight at 4° C. The next day, the membranes were washed 3 times for 5 mins in 1× TBST, secondary antibody was then added at 1:5000 (e.g, anti-dystrophin antibody, goat anti-mouse 800, or goat anti mouse 680) for 1 hr at room temperature. The membranes were then washed 3×5 mins in 1× TBST and imaged using Odyssey CtX. Western blots result for the circular RNAs comprising either SEQ ID NO: 3282 and SEQ ID NO: 3291 are shown in FIGS. 116A-C.

### Immunoprecipitation

[0969] Immunoprecipitation of V5-tag was carried out by first adding 7.5 ug of anti-V5-tag antibody (abcam) to 1-1.5 mg of protein lysate (250 μL total volume) and incubating overnight at 4° C. 100 μL of Pierce protein A/G magnetic agarose beads (Thermo) were magnetized using DynaMag-2 magnet (Invitrogen) and washed twice with 1×PBS-0.1% triton. Lysate-antibody mix was added to the magnetized beads, mixed gently and incubated at 4° C. for 3 hours. Beads were then magnetized and supernatant discarded, beads were washed 5× with 700 μL of 1×PBS-0.1% triton and magnetized again. 20 μL of 4× NuPAGE sample buffer and 1× NuPAGE reducing agent (Thermo) was added to re-suspend the beads, heated to 90° C. for 7 minutes and vortexed vigorously to detach protein from bead. Beads were magnetized and supernatant moved to a clean tube to later run on a western blot as described above. Blot was probed for dystrophin using a rabbit anti-dystrophin antibody (abcam). Immunoprecipitation results for the gastrocnemius muscle and diaphragm are shown in FIGS. 115A-B.

### Jess Assay:

[0970] EZ Standard pack reagents were prepared according to manufacturer directions (bio-techne). Protein lysate samples (cell or tissue) were diluted using 4-parts 0.1× sample buffer (bio-techne) combined with 1-part 5× fluorescent master mix. Samples were denatured in a 95° C. heat block, then spun down before loading. Equal parts luminol-S (bio-techne) and peroxide (bio-techne) were combined by pipetting up and down in a microcentrifuge tube and storing on ice. Primary antibodies were diluted in antibody diluent 2 (bio-techne) in a microcentrifuge tube. If two primary antibodies were used, secondary antibodies were combined in equal parts anti-rabbit secondary HRP antibody (bio-techne) and anti-mouse secondary HRP antibody (bio-techne) in a microcentrifuge tube. Reagents were added to the 66-440 kDa Pre-filled Plate (bio-techne) according to the manufacturer's protocol. The 66-440 kDa Pre-filled Plate was spun for 5 minutes at 2500 rpm, then inserted in the Jess machine. Capillary Cartridges (bio-techne) were inserted into the Jess machine. The Jess was run using the 66-440 kDa separation on the chemiluminescence channel.

### Example 92

### Expression of Circular RNAs Comprising an IRES in the Liver or Spleen

[0971] Circular RNA comprised a IRES with a sequence of either SEQ ID NO: 1284, SEQ ID NO: 24896, SEQ ID NO: 3282, SEQ ID NO: 3291 and an expression sequence encoding for firefly luciferase (fluc) or human erythropoietin (hEPO). The circular RNAs were then encapsulated within a LNP comprising ionizable lipid Lipid 123. Wild type Bab1/C mice were dosed with the circular RNAs encapsulated within the LNPs at 0.5 mpk. A terminal bleed was conducted at 6 hours, 24 hours, and 48 hours post administration of the circular RNA-LNP. Post 24-hr transfection, plate was removed from the incubator and allowed to equilibrate to room temperature for 15 mins. A volume of 100 μL of fluc one-step glow assay working solution (Pierce) was added to each well. The plate was placed on a plate shaker and mixed at 250 rpm for 3 min. Post-mixing, the plate was placed at room temperature for 10 min. Luminescence was read using a Cytation 5 instrument (Bio-Tek). Ex-vivo IVIS was conducted on the mice's liver and spleen. hEPO ELISA analysis was conducted to determine serum hEPO concentrations. FIGS. 117A and B provide the liver and splenic total flu expression and expression decay of the circular RNAs. FIG. 118 provides the hEPO expression and expression decay of the circular RNAs.

### Example 93

Expression of Circular RNAs Comprising an IRES In Vitro within Primary Human Hepatocytes

[0972] Circular RNA comprised a TRES with a sequence of either SEQ ID NO: 1284, SEQ ID NO: 24896, SEQ ID NO: 3283, SEQ ID NO: 3282, SEQ ID NO: 3291 and an expression sequence encoding for firefly luciferase (fluc), human erythropoietin (hEPO), or human factor X (FIX). Primary human hepatocytes were transfected with 50 ng of the circular RNA using lipofectamine messenger max reagent. After 24 hours following transfection, fluc, hEPO and FIX protein expression was measured using Promega one-glo reagent, hEPO ELISA, and FIX ELISA respectively. FIGS. 119A-C depicts the expression of fluc, hEPO, and FIX in the primary human hepatocytes.

### Incorporation by Reference

[0973] All publications, patents, and patent applications mentioned in this specification are herein incorporated by reference to the same extent as if each individual publication, patent, or patent application was specifically and individually indicated as being incorporated by reference herein.

### Other Embodiments

[0974] Various modifications and variations of the described disclosure will be apparent to those skilled in the art without departing from the scope and spirit of the disclosure. Although the disclosure has been described in connection with specific embodiments, it should be understood that the disclosure as claimed should not be unduly limited to such specific embodiments. Indeed, various modifications of the described modes for carrying out the disclosure that are obvious to those skilled in the art are intended to be within the scope of the disclosure. Other embodiments are in the claims.

What is claimed is:

1. A circular RNA polynucleotide (oRNA) comprising a translation initiation element (TIE), wherein the TIE comprises a sequence having at least 85% sequence identity to a sequence set forth in any one of SEQ ID NOS: 14067-24829 (GIRES-1 through GIRES-10762), or a fragment thereof, or having a consensus sequence set forth in any one of SEQ ID NOS: 24867-24892, optionally barcoded with a barcode sequence selected from SEQ ID NOs: 3304-14066; or a precursor RNA polynucleotide capable of producing said oRNA.

2. The oRNA or precursor RNA polynucleotide of claim 1, wherein the TIE comprises an internal ribosome entry site (IRES) or a fragment thereof.

3. The oRNA or precursor RNA polynucleotide of claim 1 or 2, wherein the IRES is in whole or in part from an untranslated region (UTR).

4. The oRNA or precursor RNA polynucleotide of any one of claims 2-3, wherein the IRES has at least 90% identity to a sequence set forth in any one of SEQ ID NOS: 14067-24829.

5. The oRNA or precursor RNA polynucleotide of any one of claims 2-4, wherein the IRES has at least 95% identity to a sequence set forth in any one of SEQ ID NOS: 14067-24829.

6. The oRNA or precursor RNA polynucleotide of any one of claims 2-5, wherein the IRES has at least 98% identity to a sequence set forth in any one of SEQ ID NOS: 14067-24829.

7. The oRNA or precursor RNA polynucleotide of any one of claims 2-6, wherein the IRES comprises a sequence set forth in any one of SEQ ID NOS: 14067-24829.

8. An oRNA or precursor RNA polynucleotide capable of producing the oRNA, comprising a core functional element, and a pharmaceutically acceptable salt, buffer, diluent, or combination thereof, wherein the core functional element comprises a translation initiation element (TIE), wherein the TIE comprises at least 85% sequence identity to a sequence set forth in any one of SEQ ID NOs: 793, 876, 1017, 1216, and 3291, wherein the oRNA is capable of expressing a therapeutic protein in a T cell.

9. An oRNA or precursor RNA polynucleotide capable of producing the oRNA, comprising a core functional element, and a pharmaceutically acceptable salt, buffer, diluent, or combination thereof, wherein the core functional element comprises a translation initiation element (TIE), wherein the TIE comprises at least 85% sequence identity to a sequence set forth in any one of SEQ ID NOs: 785, 823, 840, 857, 861, 862, 864, 983, 1023, 1168, 1169, 1171, 1179, 1192, 1284, 1287, 2285, 2742, 2777, 2778, 3283, 3290, 3293, and 3302, wherein the oRNA is capable of expressing a therapeutic protein in a T cell.

10. An oRNA or precursor RNA polynucleotide capable of producing the oRNA, comprising a core functional element, and a pharmaceutically acceptable salt, buffer, diluent, or combination thereof, wherein the core functional element comprises a translation initiation element (TIE), wherein the TIE comprises at least 85% sequence identity to a sequence set forth in any one of SEQ ID NOs: 75, 77, 137, 532, 566, 580, 648, 693, 752, 787, 791, 820, 839, 843, 852, 863, 871, 874, 922, 959, 984, 1015, 1026, 1041, 1047, 1059, 1068, 1134, 1177, 1178, 1180, 1189, 1193, 1198, 1263, 1276, 1280, 1282, 2601, 2615, 2616, 2617, 2618, 2627, 2667, 2681, 2746, 2758, 3284, 3285, 3289, 3292, 3294, 3295, 3296, 3297, 3298, 3299, and 3301, wherein the oRNA is capable of expressing a therapeutic protein in a T cell.

11. The oRNA or precursor RNA polynucleotide of any one of claims 8-10, wherein the TIE comprises an internal ribosome entry site (IRES) or a fragment thereof.

12. The oRNA or precursor RNA polynucleotide of claim 11, wherein the IRES is in whole or in part from an untranslated region (UTR).

13. The oRNA or precursor RNA polynucleotide of claim 11 or 12, wherein the IRES sequence has at least 90% sequence identity to a sequence set forth in any one of SEQ ID NO: 793, 876, 1017, 1216, and 3291.

14. The oRNA or precursor RNA polynucleotide of any one of claims 11-13, wherein the IRES sequence has at least 95% sequence identity to a sequence set forth in any one of SEQ ID NO: 793, 876, 1017, 1216, and 3291.

15. The oRNA or precursor RNA polynucleotide of any one of claims 11-14, wherein the IRES sequence has at least 98% sequence identity to a sequence set forth in any one of SEQ ID NO: 793, 876, 1017, 1216, and 3291.

16. The oRNA or precursor RNA polynucleotide of any one of claims 11-15, wherein the IRES sequence has at least 99% sequence identity to a sequence set forth in any one of SEQ ID NO: 793, 876, 1017, 1216, and 3291.

17. The oRNA or precursor RNA polynucleotide of any one of claims 11-16, wherein the IRES sequence comprises a sequence set forth in any one of SEQ ID NO: 793, 876, 1017, 1216, and 3291.

18. The oRNA or precursor RNA polynucleotide of claim 11 or 12, wherein the IRES sequence has at least 90% sequence identity to a sequence set forth in any one of SEQ ID NO: 785, 823, 840, 857, 861, 862, 864, 983, 1023, 1168, 1169, 1171, 1179, 1192, 1284, 1287, 2285, 2742, 2777, 2778, 3283, 3290, 3293, and 3302.

19. The oRNA or precursor RNA polynucleotide of any one of claim 11, 12, or 18, wherein the IRES sequence has at least 95% sequence identity to a sequence set forth in any one of SEQ ID NO: 785, 823, 840, 857, 861, 862, 864, 983, 1023, 1168, 1169, 1171, 1179, 1192, 1284, 1287, 2285, 2742, 2777, 2778, 3283, 3290, 3293, and 3302.

20. The oRNA or precursor RNA polynucleotide of any one of claim 11, 12, 18, or 19 wherein the IRES sequence has at least 98% sequence identity to a sequence set forth in any one of SEQ ID NO: 785, 823, 840, 857, 861, 862, 864, 983, 1023, 1168, 1169, 1171, 1179, 1192, 1284, 1287, 2285, 2742, 2777, 2778, 3283, 3290, 3293, and 3302.

21. The oRNA or precursor RNA polynucleotide of any one of claims 11, 12, or 18-20, wherein the IRES sequence has at least 99% sequence identity to a sequence set forth in any one of SEQ ID NO: 785, 823, 840, 857, 861, 862, 864, 983, 1023, 1168, 1169, 1171, 1179, 1192, 1284, 1287, 2285, 2742, 2777, 2778, 3283, 3290, 3293, and 3302.

22. The oRNA or precursor RNA polynucleotide of any one of claims 11, 12, or 18-21, wherein the IRES sequence comprises a sequence set forth in any one of SEQ ID NO: 785, 823, 840, 857, 861, 862, 864, 983, 1023, 1168, 1169, 1171, 1179, 1192, 1284, 1287, 2285, 2742, 2777, 2778, 3283, 3290, 3293, and 3302.

23. The oRNA or precursor RNA polynucleotide of claim 11 or 12, wherein the IRES sequence has at least 90% sequence identity to a sequence set forth in any one of SEQ ID NO: 75, 77, 137, 532, 566, 580, 648, 693, 752, 787, 791, 820, 839, 843, 852, 863, 871, 874, 922, 959, 984, 1015, 1026, 1041, 1047, 1059, 1068, 1134, 1177, 1178, 1180, 1189, 1193, 1198, 1263, 1276, 1280, 1282, 2601, 2615, 2616, 2617, 2618, 2627, 2667, 2681, 2746, 2758, 3284, 3285, 3289, 3292, 3294, 3295, 3296, 3297, 3298, 3299, and 3301.

24. The oRNA or precursor RNA polynucleotide of any one of claims 11, 12, or 23, wherein the IRES sequence has at least 95% sequence identity to a sequence set forth in any one of SEQ ID NO: 75, 77, 137, 532, 566, 580, 648, 693, 752, 787, 791, 820, 839, 843, 852, 863, 871, 874, 922, 959, 984, 1015, 1026, 1041, 1047, 1059, 1068, 1134, 1177, 1178, 1180, 1189, 1193, 1198, 1263, 1276, 1280, 1282, 2601, 2615, 2616, 2617, 2618, 2627, 2667, 2681, 2746, 2758, 3284, 3285, 3289, 3292, 3294, 3295, 3296, 3297, 3298, 3299, and 3301.

25. The oRNA or precursor RNA polynucleotide of any one of claim 11, 12, 23, or 24, wherein the IRES sequence has at least 98% sequence identity to a sequence set forth in any one of SEQ ID NO: 75, 77, 137, 532, 566, 580, 648, 693, 752, 787, 791, 820, 839, 843, 852, 863, 871, 874, 922, 959, 984, 1015, 1026, 1041, 1047, 1059, 1068, 1134, 1177, 1178, 1180, 1189, 1193, 1198, 1263, 1276, 1280, 1282, 2601, 2615, 2616, 2617, 2618, 2627, 2667, 2681, 2746, 2758, 3284, 3285, 3289, 3292, 3294, 3295, 3296, 3297, 3298, 3299, and 3301.

26. The oRNA or precursor RNA polynucleotide of any one of claims 11, 12, 23-25, wherein the IRES sequence has at least 99% sequence identity to a sequence set forth in any one of SEQ ID NO: 75, 77, 137, 532, 566, 580, 648, 693, 752, 787, 791, 820, 839, 843, 852, 863, 871, 874, 922, 959, 984, 1015, 1026, 1041, 1047, 1059, 1068, 1134, 1177, 1178, 1180, 1189, 1193, 1198, 1263, 1276, 1280, 1282, 2601, 2615, 2616, 2617, 2618, 2627, 2667, 2681, 2746, 2758, 3284, 3285, 3289, 3292, 3294, 3295, 3296, 3297, 3298, 3299, and 3301.

27. The oRNA or precursor RNA polynucleotide of any one of claims 11, 12, 23-26, wherein the IRES sequence comprises a sequence set forth in any one of SEQ ID NO: 75, 77, 137, 532, 566, 580, 648, 693, 752, 787, 791, 820, 839, 843, 852, 863, 871, 874, 922, 959, 984, 1015, 1026, 1041, 1047, 1059, 1068, 1134, 1177, 1178, 1180, 1189, 1193, 1198, 1263, 1276, 1280, 1282, 2601, 2615, 2616, 2617, 2618, 2627, 2667, 2681, 2746, 2758, 3284, 3285, 3289, 3292, 3294, 3295, 3296, 3297, 3298, 3299, and 3301.

28. The oRNA or precursor RNA polynucleotide of any one of the preceding claims, wherein the precursor RNA further comprises an accessory element.

29. The oRNA or precursor RNA polynucleotide of claim 28, wherein the accessory element comprises a miRNA binding site or a fragment thereof, a restriction site or a fragment thereof, an RNA editing motif or a fragment thereof, a zip code element or a fragment thereof, an RNA trafficking element or a fragment thereof, an endonuclease site or a fragment thereof, or a combination thereof.

30. The oRNA or precursor RNA polynucleotide of claim 28 or 29, wherein the accessory element comprises a binding domain to an IRES transacting factor (ITAF) and/or a translation initiation factor.

31. The oRNA or precursor RNA polynucleotide of claim 30, wherein the binding domain comprises a polyA region, a polyC region, a polyAC region, a polypyrimidine tract, or a combination or variant thereof.

32. The oRNA or precursor RNA polynucleotide of claim 30 or 31, wherein the ITAF comprises a poly(rC)-binding protein 1 (PCBP1), PCBP2, PCBP3, PCBP4, poly(A)-binding protein 1 (PABP1), polypyrimidine-tract binding protein (PTB), Argonaute protein family member, HNRNPK (heterogeneous nuclear ribonucleoprotein K protein), or La protein, or a fragment or combination thereof.

33. The oRNA or precursor RNA polynucleotide of any one of the preceding claims, wherein the core functional element further comprises a coding sequence and, optionally, a termination sequence located downstream to the coding sequence.

34. The oRNA or precursor RNA polynucleotide of claim 33, wherein the coding sequence is located downstream to the IRES.

35. The oRNA or precursor RNA polynucleotide of claim 33, wherein the coding sequence is located upstream to the IRES.

36. The oRNA or precursor RNA polynucleotide of any one of claims 33-35, wherein the termination sequence is a stop codon or a stop cassette.

37. The oRNA or precursor RNA polynucleotide of claim 36, wherein the stop cassette comprises one or more stop codons in two or more open reading frames.

38. The precursor RNA polynucleotide of any one of the preceding claims, wherein the precursor RNA polynucleotide comprises:
a. a 5′ enhanced intron element,
b. a 5′ enhanced exon element,
c. the core functional element,
d. a 3′ enhanced exon element, and
e. a 3′ enhanced intron element.

39. The precursor RNA polynucleotide of claim 38, wherein elements (a)-(e) are arranged in order from (a) to (e).

40. The precursor RNA polynucleotide of claim 38 or 39, wherein the 5′ enhanced exon element and/or the 3′ enhanced exon element are each comprised within the core functional element.

41. The precursor RNA polynucleotide of claim 40, wherein the 5′ enhanced exon element and/or the 3′ enhanced exon element are each comprised within the coding sequence.

42. The precursor RNA polynucleotide of any one of claims 38-41, wherein the 5′ enhanced intron element comprises a 3′ intron segment.

43. The precursor RNA polynucleotide of claim 42, wherein the 3′ intron segment further comprises a first or a first and a second nucleotides of a 3′ group I intron splice site dinucleotide.

44. The precursor RNA polynucleotide of claim 42 or 43, wherein the 3′ intron segment is located at the 3′ end of the 5′ enhanced intron element.

45. The precursor RNA polynucleotide of any one of claims 42-44, wherein the 5′ enhanced intron element comprises a leading untranslated sequence located at the 5′ end.

46. The precursor RNA polynucleotide of claim 45, wherein the leading untranslated sequence comprises a spacer.

47. The precursor RNA polynucleotide of claim 45 or 46, wherein the leading untranslated sequence comprises the last nucleotide of a transcription start site.

48. The precursor RNA polynucleotide of any one of claims 45-47, wherein the leading untranslated sequence comprises 1 to 100 additional nucleotides.

49. The precursor RNA polynucleotide of any one of claims 42-48, wherein the 5′ enhanced intron element comprises a 5′ affinity sequence.

50. The precursor RNA polynucleotide of claim 49, wherein the 5′ affinity sequence comprises a polyA, polyAC, or polypyrimidine sequence.

51. The precursor RNA polynucleotide of claim 49 or 50, wherein the 5′ affinity sequence comprises 10 to 100 nucleotides.

52. The precursor RNA polynucleotide of any one of claims 38-51, wherein the 5′ enhanced intron element comprises a 5′ external spacer sequence.

53. The precursor RNA polynucleotide of claim 52, wherein the 5′ external spacer sequence is located between the 5′ affinity sequence and the 3′ intron segment.

54. The precursor RNA polynucleotide of claim 52 or 53, wherein the 5′ external spacer sequence has a length of about 6 to 60 nucleotides.

55. The precursor RNA polynucleotide of any one of claims 52-54, wherein the 5′ external spacer sequence comprises or consists of a sequence selected from SEQ ID NOs: 3094-3152.

56. The precursor RNA polynucleotide of any one of claims 38-55, wherein the 5′ enhanced intron element comprises:
a. a leading untranslated sequence;
b. a 5′ affinity sequence;
c. a 5′ external spacer sequence; and
d. a 3′ intron segment including the first nucleotide of a 3′ Group I intron splice site;
wherein the leading untranslated sequence comprises the last nucleotide of a transcription start site and 1 to 100 nucleotides.

57. The precursor RNA polynucleotide of claim 56, wherein (a)-(d) are arranged in the order from (a) to (d).

58. The precursor RNA polynucleotide of any one of claims 38-55, wherein the 5′ enhanced intron element comprises:
a. a leading untranslated sequence;
b. a 5′ external spacer sequence;
c. a 5′ affinity sequence; and
d. a 3′ intron segment including the first nucleotide of a 3′ group I splice site;
wherein the leading untranslated sequence comprises the last nucleotide of a transcription start site and 1 to 100 nucleotide.

59. The precursor RNA polynucleotide of claim 58, wherein (a)-(d) are arranged in the order from (a) to (d).

60. The precursor RNA polynucleotide of any one of claims 38-55, wherein the 5′ enhanced intron element comprises:
a. a leading untranslated sequence;
b. a 5′ external spacer sequence;
c. a 5′ affinity sequence; and
d. a 3′ intron segment including the first and second nucleotides of a 3′ Group I splice site;
wherein the leading untranslated sequence comprises the last nucleotide of a transcription start site and 1 to 100 nucleotides; and wherein the 5′ enhanced exon element comprises a 3′ exon segment lacking the second nucleotide of a 3′ group I splice site dinucleotide.

61. The precursor RNA polynucleotide of claim 60, wherein (a)-(d) are arranged in the order from (a) to (d).

62. The precursor RNA polynucleotide of any one of claims 38-61, wherein the 5′ enhanced exon element comprises a 3′ exon segment.

63. The precursor RNA polynucleotide of claim 62, wherein the 3′ exon segment further comprises the second nucleotide of a 3′ group I intron splice site dinucleotide.

64. The precursor RNA polynucleotide of claim 62 or 63, wherein the 3′ exon segment comprises 1 to 100 natural nucleotides derived from a natural exon.

65. The precursor RNA polynucleotide of claim 64, wherein the natural exon is derived from a Group I intron containing gene or a fragment thereof.

66. The precursor RNA polynucleotide of claim 64 or 65, wherein the natural exon derived from an anabaena bacterium, T4 phage virus, twort bacteriophage, tetrahymena, or azoarcus bacterium.

67. The precursor RNA polynucleotide of any of claims 38-66, wherein the 5′ enhanced exon element comprises a 5′ internal spacer sequence located downstream from the 3′ exon segment.

68. The precursor RNA polynucleotide of claim 67, wherein the 5′ internal spacer sequence is about 6 to 60 nucleotides in length.

69. The precursor RNA polynucleotide of claim 67 or 68, wherein the 5′ internal spacer sequence comprises or consists of a sequence selected from SEQ ID NOs: 3094-3152.

70. The precursor RNA polynucleotide of any one of claims 38-69, wherein the 5′ enhanced exon element comprises in the following order:
a. a 3′ exon segment including the second nucleotide of a 3′ group I intron splice site dinucleotide; and
b. a 5′ internal spacer sequence,
wherein the 3′ exon segment comprises 1 to 100 natural nucleotides derived from a natural exon.

71. The precursor RNA polynucleotide of any one of claims 38-69, wherein the 5′ enhanced exon element comprises in the following order:
a. a 3′ exon segment; and
b. a 5′ internal spacer sequence,
wherein the 3′ exon segment comprises 1 to 100 natural nucleotides derived from a natural exon; and wherein the 5′ enhanced intron element comprises a 3′ intron segment comprising the first and second nucleotides of a 3′ group I splice site dinucleotide.

72. The precursor RNA polynucleotide of any one of claims 38-71, wherein the 3′ enhanced exon element comprises a 5′ exon segment.

73. The precursor RNA polynucleotide of claim 72, wherein the 5′ exon segment comprises the first nucleotide of a 5′ group I intron segment.

74. The precursor RNA polynucleotide of claim 72 or 73, wherein the 5′ exon segment further comprises 1 to 100 nucleotides derived from a natural exon.

75. The precursor RNA polynucleotide of claim 74, wherein the natural exon is derived from a Group I intron containing gene or a fragment thereof.

76. The precursor RNA polynucleotide of any one of claims 38-75, wherein the 3′ enhanced exon element comprises a 3′ internal spacer sequence.

77. The precursor RNA polynucleotide of claim 76, wherein the 3′ internal spacer sequence is located between the termination sequence and the 5′ exon segment.

78. The precursor RNA polynucleotide of claim 76 or 77, wherein the 3′ internal spacer is about 6 to 60 nucleotides in length.

79. The precursor RNA polynucleotide of any one of claims 76-78, wherein the 3′ internal spacer comprises or consists of a sequence selected from SEQ ID NOs: 3094-3152.

80. The precursor RNA polynucleotide of any one of claims 38-79, wherein the 3′ enhanced exon element comprises:
a. a 3′ internal spacer sequence; and
b. a 5′ exon segment including the first nucleotide of a 5′ group I intron splice site dinucleotide,
wherein the 5′ exon segment comprises 1 to 100 nucleotides derived from a natural exon.

81. The precursor RNA polynucleotide of any one of claims 38-79, wherein the 3′ enhanced exon element comprises:
a. a 3′ internal spacer sequence; and
b. a 5′ exon segment,
wherein the 5′ exon segment comprises 1 to 100 nucleotides derived from a natural exon; wherein the 3′ enhanced intron element comprises a 5′ intron segment comprising the first and second nucleotide of a 5′ group I intron splice site dinucleotide.

82. The precursor RNA polynucleotide of any one of claims 38-81, wherein the 3′ enhanced intron element comprises a 5′ intron segment.

83. The precursor RNA polynucleotide of claim 82, wherein the 5′ intron segment comprises a second nucleotide of a 5′ group I intron splice site dinucleotide.

84. The precursor RNA polynucleotide of any one of claims 38-83, wherein the 3′ enhanced intron element comprises a trailing untranslated sequence located at the 3′ end of the 5′ intron.

85. The precursor RNA polynucleotide of claim 84, wherein the trailing untranslated sequence comprises 3 to 12 nucleotides.

86. The precursor RNA polynucleotide of any of claims 38-85, wherein the 3′ enhanced intron element comprises a 3′ external spacer sequence.

87. The precursor RNA polynucleotide of claim 86, wherein the 3′ external spacer sequence is located between the 5′ intron segment and trailing untranslated sequence.

88. The precursor RNA polynucleotide of claim 86 or 87, wherein the 3′ external spacer sequence has a length of 6 to 60 nucleotides in length.

89. The precursor RNA polynucleotide of any of claims 86-88, wherein the 3′ external spacer sequence comprises or consists of a sequence selected from SEQ ID NOs: 3094-3152.

90. The precursor RNA polynucleotide of any of claims 38-89, wherein the 3′ enhanced intron element comprises a 3′ affinity sequence.

91. The precursor RNA polynucleotide of claim 90, wherein the 3′ affinity sequence is located between the 3′ external spacer sequence and the trailing untranslated sequence.

92. The precursor RNA polynucleotide of claim 90 or 91, wherein the 3′ affinity sequence comprises a polyA, polyAC, or polypyrimidine sequence.

93. The precursor RNA polynucleotide of any one of claims 90-92, wherein the affinity sequence comprises 10 to 100 nucleotides.

94. The precursor RNA polynucleotide of any one of claims 38-93, wherein the 5′ enhanced intron element further comprises a 5′ external duplex sequence; wherein the 3′ enhanced intron element further comprises a 3′ external duplex sequence.

95. The precursor RNA polynucleotide of claim 94, wherein the 5′ external duplex sequence and 3′ external duplex sequence are fully or partially complementary to each other.

96. The precursor RNA polynucleotide of claim 94 or 95, wherein the 5′ external duplex sequence comprises fully synthetic or partially synthetic nucleotides.

97. The precursor RNA polynucleotide of any one of claims 94-96, wherein the 3′ external duplex sequence comprises fully synthetic or partially synthetic nucleotides.

98. The precursor RNA polynucleotide of any one of claims 94-97, wherein the 3′ external duplex sequence is about 6 to about 50 nucleotides.

99. The precursor RNA polynucleotide of any one of claims 94-98, wherein the 5′ external duplex sequence is about 6 to about 50 nucleotides.

100. The precursor RNA polynucleotide of any one of claims 38-99, wherein the 5′ enhanced exon element further comprises a 5′ internal duplex sequence; wherein the 3′ enhanced exon element further comprises a 3′ internal duplex sequence.

101. The precursor RNA polynucleotide of claim 100, wherein the 5′ internal duplex sequence and 3′ internal duplex sequence are fully complementary to each other.

102. The precursor RNA polynucleotide of claim 100, wherein the 5′ internal duplex sequence and 3′ internal duplex sequence are partially complementary to each other.

103. The precursor RNA polynucleotide of claim 102, wherein the 5′ internal duplex sequence and 3′ internal duplex sequences form a double-stranded duplex structure comprising at least one mismatched nucleotide pair.

104. The precursor RNA polynucleotide of claim 103, wherein the double-stranded duplex structure comprises at least two mismatched nucleotide pairs.

105. The precursor RNA polynucleotide of claim 103 or 104, wherein the double-stranded duplex structure comprises at least three mismatched nucleotide pairs.

106. The precursor RNA polynucleotide of any one of claims 103-105, wherein the double-stranded duplex structure comprises at least four mismatched nucleotide pairs.

107. The precursor RNA polynucleotide of any one of claims 103-106, wherein the double-stranded duplex structure comprises at least five mismatched nucleotide pairs.

108. The precursor RNA polynucleotide of any one of claims 100-107, wherein the 5′ internal duplex sequence comprises fully synthetic nucleotides.

109. The precursor RNA polynucleotide of any one of claims 100-108, wherein the 5′ internal duplex sequence comprises partially synthetic nucleotides.

110. The precursor RNA polynucleotide of any one of claims 100-109, wherein the 3′ internal duplex sequence comprises fully synthetic nucleotides.

111. The precursor RNA polynucleotide of any one of claims 100-109, wherein the 3′ internal duplex sequence comprises partially synthetic nucleotides.

112. The precursor RNA polynucleotide of any one of claims 100-111, wherein the 3′ internal duplex sequence is about 6 to about 19 nucleotides.

113. The precursor RNA polynucleotide of any one of claims 100-112, wherein the 5′ internal duplex sequence is about 6 to about 19 nucleotides.

114. The precursor RNA polynucleotide of any one of claims 38-113, wherein the 3′ enhanced intron element comprises in the following order:
a. a 5′ intron segment including the second nucleotide of a 5′ group I intron splice site dinucleotide;
b. a 3′ external spacer sequence; and
c. a 3′ affinity sequence.

115. The precursor RNA polynucleotide of anyone of claims 38-114, wherein the 3′ enhanced exon element comprises in the following order:
a. a 5′ intron segment including the first and second nucleotide of a 5′ group I intron splice site dinucleotide;
b. a 3′ external spacer sequence; and
c. a 3′ affinity sequence wherein the 3′ enhanced exon element comprises a 5′ exon segment lacking the first nucleotide of a 5′ group I intron splice site dinucleotide.

116. The precursor RNA polynucleotide of claim 38-115, wherein the precursor RNA polynucleotide comprises:
a. a leading untranslated sequence;
b. a 5′ affinity sequence;
c. 5′ external duplex sequence;
d. 5′ spacer sequence;
e. 3′ intron segment;
f. 3′ exon segment;
g. 5′ internal duplex sequence
h. 5′ internal spacer sequence;
i. a translation initiation element;
j. a coding sequence;
k. a termination sequence;
l. a 3′ internal spacer sequence;
m. a 3′ internal duplex sequence;
n. a 5′ exon segment;
o. a 5′ intron segment;
p. a 3′ external duplex sequence;
q. a 3′ affinity sequence; and
r. a trailing untranslated sequence.

117. The precursor RNA polynucleotide of claim 116, wherein (a)-(r) are arranged in the order from (a) to (r).

118. The precursor RNA polynucleotide of any one of claims 38-115, wherein the precursor RNA polynucleotide comprises:
a. a leading untranslated sequence;
b. a 5′ affinity sequence;
c. a 5′ external spacer sequence;
d. a 3′ intron segment;
e. a 3′ exon segment;
f. a 5′ internal duplex sequence;
g. a 5′ internal spacer sequence;
h. a translation initiation element;
i. a coding sequence;
j. a termination sequence;
k. a 3′ internal spacer sequence;
l. a 3′ internal duplex sequence;
m. a 5′ exon segment;
n. a 5′ intron segment;
o. a 3′ external spacer sequence;
p. a 3′ affinity sequence; and
q. a trailing untranslated sequence.

119. The precursor RNA polynucleotide of claim 118, wherein (a)-(q) are arranged in the order from (a) to (q).

120. The precursor RNA polynucleotide of any one of claims 38-115, wherein the precursor RNA polynucleotide comprises:
a. a leading untranslated sequence;
b. a 5′ affinity sequence;
c. a 5′ external spacer sequence;
d. a 3′ intron segment;
e. a 3′ exon segment;
f. a 5′ internal spacer sequence;
g. a translation initiation element;
h. a coding sequence;
i. a termination sequence;
j. a 3′ internal spacer sequence;
k. a 5′ exon segment;
l. a 5′ intron segment;
m. a 3′ external spacer sequence;
n. a 3′ affinity sequence; and
o. a trailing untranslated sequence.

121. The precursor RNA polynucleotide of claim 120, wherein (a)-(o) are arranged in the order from (a) to (o).

122. The precursor RNA polynucleotide of any one of claims 38-115, wherein the precursor RNA polynucleotide comprises:
a. a leading untranslated sequence;
b. a 5′ affinity sequence;
c. 5′ external duplex sequence;
d. 5′ spacer sequence;
e. 3′ intron segment;
f. 3′ exon segment;
g. 5′ internal duplex sequence
h. 5′ internal spacer sequence;
i. a termination sequence;
j. a coding sequence;
k. a translation initiation element;
l. a 3′ internal spacer sequence;
m. a 3′ internal duplex sequence;
n. a 5′ exon segment;
o. a 5′ intron segment;
p. a 3′ external duplex sequence;
q. a 3′ affinity sequence; and
r. a trailing untranslated sequence.

123. The precursor RNA polynucleotide of claim 122, wherein (a)-(r) are arranged in the order from (a) to (r).

124. The precursor RNA polynucleotide of any one of claims 33-123, wherein the coding sequence comprises two or more protein coding regions.

125. The precursor RNA polynucleotide of claim 124, wherein the coding sequence comprises a sequence encoding a proteolytic cleavage site and/or a ribosomal stuttering element between the first and second expression sequence.

126. The precursor RNA polynucleotide of claim 125, wherein the ribosomal stuttering element is a self-cleaving spacer.

127. The precursor RNA polynucleotide of claim 125 or 126, comprising a polynucleotide sequence encoding 2A ribosomal stuttering peptide.

128. The precursor RNA polynucleotide of any one of the preceding claims, wherein the precursor RNA polynucleotide comprises the following sequences operably linked to the IRES and/or operable linked to one another: (1) a 3′ group I intron segment; (2) a coding sequence that encodes the therapeutic protein; and (3) a 5′ group I intron segment.

129. The precursor RNA polynucleotide of claim 128, wherein the 3′ group I intron segment and the 5′ group I intron segment are each derived from a bacterial phage, a viral vector, an organelle genome, or a nuclear rDNA gene.

130. The precursor RNA polynucleotide of claim 129, wherein the 3′ group I intron segment and the 5′ group I intron segment are each derived from an anabaena bacterium, a T4 phage virus, a twort bacteriophage, a tetrahymena, or an azoarcus bacterium.

131. The precursor RNA polynucleotide of any one of the preceding claims, wherein the precursor RNA polynucleotide comprises one or more spacer sequences, said one or more spacer sequences being operably connected to at least one of the 3′ group I intron segment, IRES sequence, coding sequence, and 5′ group I intron segment.

132. The precursor RNA polynucleotide of claim 131, wherein the precursor RNA polynucleotide comprises two spacer sequences.

133. The precursor RNA polynucleotide of claim 132, wherein the two spacer sequences comprise a 5′ external spacer sequence and a 3′ external spacer sequence, or a 5′ internal spacer sequence and a 3′ internal spacer sequence.

134. The precursor RNA polynucleotide of claim 131, wherein the precursor RNA polynucleotide comprises four spacer sequences.

135. The precursor RNA polynucleotide of claim 134, wherein the four spacer sequences comprise a 5′ external spacer sequence, a 3′ external spacer sequence, a 5′ internal spacer sequence, and a 3′ internal spacer sequence.

136. The precursor RNA polynucleotide of any one of the preceding claims, wherein the precursor RNA polynucleotide comprises a 5′ internal duplex sequence and a 3′ internal duplex sequence.

137. The precursor RNA polynucleotide of claim 136, wherein the 5′ internal duplex sequence and 3′ internal duplex sequence are fully or partially complementary to each other.

138. The precursor RNA polynucleotide of any one of the preceding claims, wherein the precursor RNA polynucleotide comprises a polyA region, polyC region, polyAC region, polypyrimidine tract, or a combination or variant thereof.

139. The precursor RNA polynucleotide of any one of the preceding claims, wherein the precursor RNA polynucleotide comprises a 3′ exon segment and a 5′ exon segment, each derived from a natural exon.

140. The precursor RNA polynucleotide of claim 136, wherein the precursor RNA polynucleotide comprises the following elements operably linked to one another:
(a) the 5′ external spacer sequence;
(b) the 3′ group I intron segment;
(c) the 5′ exon segment;
(d) the 5′ internal duplex sequence;
(e) the IRES sequence;
(f) the coding sequence;
(g) the 3′ internal duplex sequence;
(h) the 3′ exon segment;
(j) the 5′ group I intron segment; and
(k) the 3′ external spacer sequence.

141. The precursor RNA polynucleotide of claim 140, wherein elements (a)-(k) are arranged in the order of (a)-(k).

142. The precursor RNA polynucleotide of claim 136, wherein the precursor RNA polynucleotide comprises the following elements operably linked to one another:
(a) the 3′ group I intron segment;
(b) the 5′ exon segment;
(c) the 5′ internal duplex sequence;
(d) the 5′ internal spacer sequence;
(e) the IRES sequence;
(f) the coding sequence;
(g) the 3′ internal spacer sequence
(h) the 3′ internal duplex sequence;
(i) the 3′ exon segment; and
(j) the 5′ group I intron segment.

143. The precursor RNA polynucleotide of claim 142, wherein elements (a)-(j) are arranged in the order of (a)-(j).

144. The precursor RNA polynucleotide of claim 136, wherein the precursor RNA polynucleotide comprises the following elements operably linked to one another:
(a) the 5′ external spacer sequence;
(b) the 3′ group I intron segment;
(c) the 5′ exon segment;
(d) the 5′ internal duplex sequence;
(e) the 5′ internal spacer sequence;
(f) the IRES sequence;
(g) the coding sequence;
(h) the 3′ internal spacer sequence
(i) the 3′ internal duplex sequence;
(j) the 5′ exon element;
(k) the 5′ group I intron segment; and
(l) the 3′ external spacer sequence.

145. The precursor RNA polynucleotide of claim 144, wherein elements (a)-(l) are arranged in the order of (a)-(l).

146. The oRNA or precursor RNA polynucleotide of any one of the preceding claims, wherein the precursor RNA polynucleotide comprises partially synthetic nucleotides.

147. The oRNA or precursor RNA polynucleotide of any one of claims 1-145, wherein the precursor RNA polynucleotide comprises fully synthetic nucleotides.

148. The oRNA or precursor RNA polynucleotide of any one of the preceding claims, wherein the precursor RNA polynucleotide is transcribed from a vector or DNA polynucleotide comprising a PCR product, a linearized plasmid, a non-linearized plasmid, a linearized minicircle, a non-linearized minicircle, a viral vector, a cosmid, a cDNA, or an artificial chromosome.

149. An oRNA produced using the precursor RNA polynucleotide of any one of the preceding claims.

150. The oRNA of claim 149, comprising the IRES sequence and the coding sequence.

151. The oRNA of claim 150, wherein the IRES sequence is upstream of the coding sequence.

152. The oRNA of claim 150, wherein the IRES sequence is downstream of the coding sequence.

153. The oRNA of any one of claims 149-152, comprising:
(a) the 5′ exon segment;
(b) the 5′ internal duplex sequence;
(c) the 5′ internal spacer sequence;
(d) the IRES sequence;
(e) the coding sequence;
(f) the 3′ internal spacer sequence
(g) the 3′ internal duplex sequence; and
(h) the 5′ exon element.

154. The oRNA of claim 153, wherein (a)-(h) are arranged in the order from (a) to (h).

155. A pharmaceutical composition comprising an oRNA comprising an IRES sequence having at least 85% sequence identity to a sequence set forth in any one of SEQ ID NOS: 14067-24829 or having a consensus sequence set forth in any one of SEQ ID NOs: 24867-24892, and a pharmaceutically acceptable salt, buffer, diluent, or combination thereof, wherein the oRNA is capable of expressing a therapeutic protein in a cell or a pharmaceutical composition comprising the oRNA of any one of claims 1-37 or 146-154.

156. A pharmaceutical composition comprising an oRNA comprising an IRES sequence having at least 85% sequence identity to a sequence set forth in any one of SEQ ID NOS: 14067-24829 or having a consensus sequence set forth in any one of SEQ ID NOs: 24867-24892, a cell, and a pharmaceutically acceptable salt, buffer, diluent, or combination thereof, wherein the oRNA is capable of expressing a therapeutic protein in the cell.

157. A pharmaceutical composition comprising an oRNA comprising an IRES sequence having at least 85% sequence identity to a sequence set forth in any one of SEQ ID NOS: 14067-24829 or having a consensus sequence set forth in any one of SEQ ID NOs: 24867-24892, a transfer vehicle capable of delivering the oRNA to a cell, and a pharmaceutically acceptable salt, buffer, diluent, or combination thereof; wherein the oRNA is capable of expressing a therapeutic protein in a cell.

158. The pharmaceutical composition of any one of claims 155-157, wherein the IRES has at least 90% identity to a sequence set forth in any one of SEQ ID NOS: 14067-24829.

159. The pharmaceutical composition of any one of claims 155-158, wherein the IRES has at least 95% identity to a sequence set forth in any one of SEQ ID NOS: 14067-24829.

160. The pharmaceutical composition of any one of claims 155-159, wherein the IRES has at least 98% identity to a sequence set forth in any one of SEQ ID NOS: 14067-24829.

161. The pharmaceutical composition of claim any one of claims 155-160, wherein the IRES has at least 99% identity to a sequence set forth in any one of SEQ ID NOS: 14067-24829.

162. The pharmaceutical composition of claim any one of claims 155-161, wherein the IRES comprises a sequence set forth in any one of SEQ ID NOS: 14067-24829.

163. A pharmaceutical composition comprising an oRNA comprising an IRES sequence having at least 85% sequence identity to a sequence set forth in any one of SEQ ID NO: 793, 876, 1017, 1216, and 3291, and a pharmaceutically acceptable salt, buffer, diluent, or combination thereof, wherein the oRNA is capable of expressing a therapeutic protein in a T cell.

164. A pharmaceutical composition comprising an oRNA comprising an IRES sequence having at least 85% sequence identity to a sequence set forth in any one of SEQ ID NO: 793, 876, 1017, 1216, and 3291, a T cell, and a pharmaceutically acceptable salt, buffer, diluent, or combination thereof.

165. A pharmaceutical composition comprising an oRNA comprising an IRES sequence having at least 85% sequence identity to a sequence set forth in any one of SEQ ID NO: 793, 876, 1017, 1216, and 3291, a transfer vehicle capable of delivering the oRNA into a T cell, and a pharmaceutically acceptable salt, buffer, diluent, or combination thereof.

166. The pharmaceutical composition of any one of claims 163-165 or 155, wherein the IRES sequence has at least 90% sequence identity to a sequence set forth in any one of SEQ ID NOs: 793, 876, 1017, 1216, and 3291.

167. The pharmaceutical composition of any one of claims 163-166 or 155, wherein the IRES sequence has at least 95% sequence identity to a sequence set forth in any one of SEQ ID NOs: 793, 876, 1017, 1216, and 3291.

168. The pharmaceutical composition of any one of claims 163-167 or 155, wherein the IRES sequence has at least 98% sequence identity to a sequence set forth in any one of SEQ ID NOs: 793, 876, 1017, 1216, and 3291.

169. The pharmaceutical composition of any one of claims 163-168 or 155, wherein the IRES sequence has at least 99% sequence identity to a sequence set forth in any one of SEQ ID NOs: 793, 876, 1017, 1216, and 3291.

170. The pharmaceutical composition of any one of claims 163-169 or 155, wherein the IRES sequence comprise a sequence set forth in any one of SEQ ID NOs: 793, 876, 1017, 1216, and 3291.

171. A pharmaceutical composition comprising an oRNA comprising an IRES sequence having at least 85% sequence identity to a sequence set forth in any one of SEQ ID NOs: 785, 823, 840, 857, 861, 862, 864, 983, 1023, 1168, 1169, 1171, 1179, 1192, 1284, 1287, 2285, 2742, 2777, 2778, 3283, 3290, 3293, and 3302, and a pharmaceutically acceptable salt, buffer, diluent, or combination thereof, wherein the oRNA is capable of expressing a therapeutic protein in a T cell.

172. A pharmaceutical composition comprising an oRNA comprising an IRES sequence having at least 85% sequence identity to a sequence set forth in any one of SEQ ID NOs: 785, 823, 840, 857, 861, 862, 864, 983, 1023, 1168, 1169, 1171, 1179, 1192, 1284, 1287, 2285, 2742, 2777, 2778, 3283, 3290, 3293, and 3302, a T cell, and a pharmaceutically acceptable salt, buffer, diluent, or combination thereof.

173. A pharmaceutical composition comprising an oRNA comprising an IRES sequence having at least 85% sequence identity to a sequence set forth in any one of SEQ ID NOs: 785, 823, 840, 857, 861, 862, 864, 983, 1023, 1168, 1169, 1171, 1179, 1192, 1284, 1287, 2285, 2742, 2777, 2778, 3283, 3290, 3293, and 3302, a transfer vehicle capable of delivering the oRNA into a T cell, and a pharmaceutically acceptable salt, buffer, diluent, or combination thereof.

174. The pharmaceutical composition of any one of claims 171-173 or 155, wherein the IRES sequence has at least 90% sequence identity to a sequence set forth in any one of SEQ ID NOs: 785, 823, 840, 857, 861, 862, 864, 983, 1023, 1168, 1169, 1171, 1179, 1192, 1284, 1287, 2285, 2742, 2777, 2778, 3283, 3290, 3293, and 3302.

175. The pharmaceutical composition of any one of claims 171-174 or 155, wherein the IRES sequence has at least 95% sequence identity to a sequence set forth in any one of SEQ ID NOs: 785, 823, 840, 857, 861, 862, 864, 983, 1023, 1168, 1169, 1171, 1179, 1192, 1284, 1287, 2285, 2742, 2777, 2778, 3283, 3290, 3293, and 3302.

176. The pharmaceutical composition of any one of claims 171-175 or 155, wherein the IRES sequence has at least 98% sequence identity to a sequence set forth in any one of SEQ ID NOs: 785, 823, 840, 857, 861, 862, 864, 983, 1023, 1168, 1169, 1171, 1179, 1192, 1284, 1287, 2285, 2742, 2777, 2778, 3283, 3290, 3293, and 3302.

177. The pharmaceutical composition of any one of claims 171-176 or 155, wherein the IRES sequence has at least 99% sequence identity to a sequence set forth in any one of SEQ ID NOs: 785, 823, 840, 857, 861, 862, 864, 983, 1023, 1168, 1169, 1171, 1179, 1192, 1284, 1287, 2285, 2742, 2777, 2778, 3283, 3290, 3293, and 3302.

178. The pharmaceutical composition of any one of claims 171-177 or 155, wherein the IRES sequence comprise a sequence set forth in any one of SEQ ID NOs: 785, 823, 840, 857, 861, 862, 864, 983, 1023, 1168, 1169, 1171, 1179, 1192, 1284, 1287, 2285, 2742, 2777, 2778, 3283, 3290, 3293, and 3302.

179. A pharmaceutical composition comprising an oRNA comprising an IRES sequence having at least 85% sequence identity to a sequence set forth in any one of SEQ ID NOs: 75, 77, 137, 532, 566, 580, 648, 693, 752, 787, 791, 820, 839, 843, 852, 863, 871, 874, 922, 959, 984, 1015, 1026, 1041, 1047, 1059, 1068, 1134, 1177, 1178, 1180, 1189, 1193, 1198, 1263, 1276, 1280, 1282, 2601, 2615, 2616, 2617, 2618, 2627, 2667, 2681, 2746, 2758, 3284, 3285, 3289, 3292, 3294, 3295, 3296, 3297, 3298, 3299, and 3301, and a pharmaceutically acceptable salt, buffer, diluent, or combination thereof, wherein the oRNA is capable of expressing a therapeutic protein in a T cell.

180. A pharmaceutical composition comprising an oRNA comprising an IRES sequence having at least 85% sequence identity to a sequence set forth in any one of SEQ ID NOs: 75, 77, 137, 532, 566, 580, 648, 693, 752, 787, 791, 820, 839, 843, 852, 863, 871, 874, 922, 959, 984, 1015, 1026, 1041, 1047, 1059, 1068, 1134, 1177, 1178, 1180, 1189, 1193, 1198, 1263, 1276, 1280, 1282, 2601, 2615, 2616, 2617, 2618, 2627, 2667, 2681, 2746, 2758, 3284, 3285, 3289, 3292, 3294, 3295, 3296, 3297, 3298, 3299, and 3301, a T cell, and a pharmaceutically acceptable salt, buffer, diluent, or combination thereof.

181. A pharmaceutical composition comprising an oRNA comprising an IRES sequence having at least 85% sequence identity to a sequence set forth in any one of SEQ ID NOs: 75, 77, 137, 532, 566, 580, 648, 693, 752, 787, 791, 820, 839, 843, 852, 863, 871, 874, 922, 959, 984, 1015, 1026, 1041, 1047, 1059, 1068, 1134, 1177, 1178, 1180, 1189, 1193, 1198, 1263, 1276, 1280, 1282, 2601, 2615, 2616, 2617, 2618, 2627, 2667, 2681, 2746, 2758, 3284, 3285, 3289, 3292, 3294, 3295, 3296, 3297, 3298, 3299, and 3301, a transfer vehicle capable of delivering the oRNA into a T cell, and a pharmaceutically acceptable salt, buffer, diluent, or combination thereof.

182. The pharmaceutical composition of any one of claims 179-181, wherein the IRES sequence has at least 90% sequence identity to a sequence set forth in any one of SEQ ID NOs: 75, 77, 137, 532, 566, 580, 648, 693, 752, 787, 791, 820, 839, 843, 852, 863, 871, 874, 922, 959, 984, 1015, 1026, 1041, 1047, 1059, 1068, 1134, 1177, 1178, 1180, 1189, 1193, 1198, 1263, 1276, 1280, 1282, 2601, 2615, 2616, 2617, 2618, 2627, 2667, 2681, 2746, 2758, 3284, 3285, 3289, 3292, 3294, 3295, 3296, 3297, 3298, 3299, and 3301.

183. The pharmaceutical composition of any one of claims 179-182, wherein the IRES sequence has at least 95% sequence identity to a sequence set forth in any one of SEQ ID NOs: 75, 77, 137, 532, 566, 580, 648, 693, 752, 787, 791, 820, 839, 843, 852, 863, 871, 874, 922, 959, 984, 1015, 1026, 1041, 1047, 1059, 1068, 1134, 1177, 1178, 1180, 1189, 1193, 1198, 1263, 1276, 1280, 1282, 2601, 2615, 2616, 2617, 2618, 2627, 2667, 2681, 2746, 2758, 3284, 3285, 3289, 3292, 3294, 3295, 3296, 3297, 3298, 3299, and 3301.

184. The pharmaceutical composition of any one of claims 179-183, wherein the IRES sequence has at least 98% sequence identity to a sequence set forth in any one of SEQ ID NOs: 75, 77, 137, 532, 566, 580, 648, 693, 752, 787, 791, 820, 839, 843, 852, 863, 871, 874, 922, 959, 984, 1015, 1026, 1041, 1047, 1059, 1068, 1134, 1177, 1178, 1180, 1189, 1193, 1198, 1263, 1276, 1280, 1282, 2601, 2615, 2616, 2617, 2618, 2627, 2667, 2681, 2746, 2758, 3284, 3285, 3289, 3292, 3294, 3295, 3296, 3297, 3298, 3299, and 3301.

185. The pharmaceutical composition of any one of claims 179-184, wherein the IRES sequence has at least 99% sequence identity to a sequence set forth in any one of SEQ ID NOs: 75, 77, 137, 532, 566, 580, 648, 693, 752, 787, 791, 820, 839, 843, 852, 863, 871, 874, 922, 959, 984, 1015, 1026, 1041, 1047, 1059, 1068, 1134, 1177, 1178, 1180, 1189, 1193, 1198, 1263, 1276, 1280, 1282, 2601, 2615, 2616, 2617, 2618, 2627, 2667, 2681, 2746, 2758, 3284, 3285, 3289, 3292, 3294, 3295, 3296, 3297, 3298, 3299, and 3301.

186. The pharmaceutical composition of any one of claims 179-185, wherein the IRES sequence comprise a sequence set forth in any one of SEQ ID NOs: 75, 77, 137, 532, 566, 580, 648, 693, 752, 787, 791, 820, 839, 843, 852, 863, 871, 874, 922, 959, 984, 1015, 1026, 1041, 1047, 1059, 1068, 1134, 1177, 1178, 1180, 1189, 1193, 1198, 1263, 1276, 1280, 1282, 2601, 2615, 2616, 2617, 2618, 2627, 2667, 2681, 2746, 2758, 3284, 3285, 3289, 3292, 3294, 3295, 3296, 3297, 3298, 3299, and 3301.

187. The pharmaceutical composition of any one of claims 155-186, wherein the oRNA comprises the following elements, in the following order: (1) the IRES sequence; and (2) a coding sequence encoding a therapeutic protein, wherein elements (1) and (2) are operably linked to one another.

188. The pharmaceutical composition of any one of claims 155-187, wherein the IRES is capable of facilitating expression of the therapeutic protein encoded by a precursor RNA or polynucleotide in a cell.

189. The pharmaceutical composition of claim 188, wherein the cell is a T cell.

190. The pharmaceutical composition of claim 188, wherein the IRES is capable of facilitating expression of the therapeutic protein in the cell, such that the expression level of the protein in the cell is comparable to or higher than when a control IRES is used.

191. The pharmaceutical composition of claim 189, wherein the IRES is capable of facilitating expression of the therapeutic protein in the T cell, such that the expression level of the protein in the T cell is comparable to or higher than when a control IRES is used.

192. The pharmaceutical composition of any one of claims 155-189, wherein the therapeutic protein comprises a chimeric protein.

193. The pharmaceutical composition of claim 192, wherein the chimeric protein comprises a chimeric antigen receptor (CAR), a T-cell receptor (TCR), a B-cell receptor (BCR), an immune cell activation or inhibitory receptor, a recombinant fusion protein, a chimeric mutant protein, or a fusion protein, or a combination thereof.

194. The pharmaceutical composition of any one of claims 155-193, wherein the therapeutic protein comprises an antibody, a nanobody, a non-antibody protein, an immune modulatory ligand, a receptor, a structural protein, a growth factor ligand or receptor, a hormone or hormone receptor, a transcription factor, a checkpoint inhibitor or agonist, a Fc fusion protein, an anticoagulant, a blood clotting factor, a chaperone protein, an antimicrobial protein, a structural protein, a biochemical enzyme, a tight junction protein, a mitochondrial stress response, a cytoskeletal protein, a metal-binding protein, or a small molecule, or combinations thereof.

195. The pharmaceutical composition of claim 194, wherein the immune modulatory ligand comprises an interferon, a cytokine, a chemokine, or an interleukin.

196. The pharmaceutical composition of claim 194, wherein the structural protein comprises a channel protein or nuclear pore protein.

197. The pharmaceutical composition of any one of claims 187-196, wherein the coding sequence is codon-optimized.

198. The pharmaceutical composition of claim 197, wherein the coding sequence is optimized to lack at least one microRNA binding site present in an equivalent pre-optimized polynucleotide.

199. The pharmaceutical composition of claim 197 or 198, wherein the coding sequence is optimized to lack at least one RNA-editing susceptible site present in an equivalent pre-optimized polynucleotide.

200. The pharmaceutical composition of any one of claims 197-199, wherein the coding sequence is optimized to have G-C content that is between 50% and 70%.

201. The pharmaceutical composition of claim 200, wherein the coding sequence is optimized to have G-C content that is between 55% and 64%.

202. The pharmaceutical composition of any one of claims 155-201, wherein the oRNA is from about 0.1 to about 15 kilobases in length.

203. The pharmaceutical composition of any one of claims 155-202, having an in vivo duration of therapeutic effect in humans of at least 20 hours.

204. The pharmaceutical composition of any one of claims 155-203, having a functional half-life of at least 6 hours.

205. The pharmaceutical composition of any one of claims 155-204, having a duration of therapeutic effect in a human cell greater than or equal to that of an equivalent linear RNA polynucleotide comprising the same expression sequence.

206. The pharmaceutical composition of any one of claims 155-205, having an in vivo duration of therapeutic effect in human greater than that of an equivalent linear RNA polynucleotide having the same expression sequence.

207. The pharmaceutical composition of any one of claims 155-206, wherein the oRNA consists of natural nucleotides.

208. The pharmaceutical composition of any one of claims 155-207, wherein the pharmaceutical composition is formulated for delivery to a T cell via electroporation.

209. The pharmaceutical composition of any one of claims 155-208, wherein the oRNA is comprised in a nucleic acid expression vector.

210. The pharmaceutical composition of claim 209, wherein the nucleic acid expression vector is selected from the group consisting of a PCR product, a linearized plasmid, a non-linearized plasmid, a linearized minicircle, a non-linearized minicircle, a cosmid, a cDNA, or an artificial chromosome.

211. The pharmaceutical composition of any of claims 155, 157, 165, 173, and 181, wherein the transfer vehicle comprises a nanoparticle.

212. The pharmaceutical composition of claim 211, wherein the nanoparticle is a lipid nanoparticle, a core-shell nanoparticle, a biodegradable nanoparticle, a biodegradable lipid nanoparticle, a polymer nanoparticle, a polyplex or a biodegradable polymer nanoparticle.

213. The pharmaceutical composition of claim 211 or 212, wherein the nanoparticle is a lipid nanoparticle, a core-shell nanoparticle, or a biodegradable nanoparticle.

214. The pharmaceutical composition of any one of claims 211-213, wherein the nanoparticle comprises one or more cationic lipids, ionizable lipids, or poly p-amino esters, or combinations thereof.

215. The pharmaceutical composition of any one of claims 211-214, wherein the nanoparticle comprises one or more non-cationic lipids.

216. The pharmaceutical composition of any one of claims 211-215, wherein the nanoparticle comprises one or more PEG-modified lipids, structural lipids, helper lipids, polyglutamic acid lipids, or hyaluronic acid lipids or combinations thereof.

217. The pharmaceutical composition claim 216, wherein the one or more structural lipids comprise cholesterol.

218. The pharmaceutical composition of any one of claims 211-217, wherein the nanoparticle comprises arachidonic acid, leukotriene, oleic acid, or combinations thereof.

219. The pharmaceutical composition of any one of claims 214-218, wherein the molar ratio of the ionizable lipid in the transfer vehicle is from about 40 to about 60% of the total lipid present in the transfer vehicle.

220. The pharmaceutical composition of claim 214-219, wherein the molar ratio of the helper lipid in the transfer vehicle is from about 3.5% to about 14% of the total lipid present in the transfer vehicle.

221. The pharmaceutical composition of any one of claims 214-220, wherein molar ratio of the PEG-lipid in the transfer vehicle is from about 0.5% to about 5% of the total lipid present in the LNP.

222. The pharmaceutical composition of any one of claims 214-221, wherein structural lipid in the transfer vehicle is from about 28% to about 50% of the total lipid present in the transfer vehicle.

223. The pharmaceutical composition of any one of claims any one of claims 214-222, wherein the molar ratio of ionizable lipid:helper lipid:structural lipid:PEG-lipid is about 45:9:44:2, about 50:10:38.5:1.5, about 41:12:45:2, about 62:4:33:1, or about 53:5:41:1.

224. The pharmaceutical composition of any one of claims 214-223, wherein the nanoparticle has a lipid to phosphate (IL:P) ratio of about 3 to about 6, such as about 3, about 4, about 4.5, about 5, about 5.5, or about 6.

225. The pharmaceutical composition of any one of claim 155, or 157-224, wherein the transfer vehicle is formulated for endosomal release of the circular RNA polynucleotide.

226. The pharmaceutical composition of claim 211-225, wherein the nanoparticle comprises a targeting moiety operably connected thereto, wherein the targeting moiety mediates receptor-mediated endocytosis, endosome fusion, or direct fusion into T cells in the absence of cell isolation or purification.

227. The pharmaceutical composition of claim 226, wherein the targeting moiety comprises a small molecule, a scFv, a nanobody, a peptide, a cyclic peptide, a di- or tri-cyclic peptide, a minibody, a polynucleotide, an aptamer, an engineered scaffold protein, a heavy chain variable region, a light chain variable region, or a fragment thereof.

228. The pharmaceutical composition of any one of claims 155-227, wherein the transfer vehicle comprises a liposome, a dendrimer, a carbohydrate carrier, a glycan nanomaterial, a fusome, an exosome, or a combination thereof.

229. The pharmaceutical composition of any one of claims 155-228, wherein the T cell is a CD8+ cytotoxic T cell, a CD4+ helper T cell (Th), a regulatory T (Treg) cell, a memory T cell, or an innate-like T cell.

230. The pharmaceutical composition of claim 229, wherein the Th cell is a Th1 cell, a Th2 cell, a Th17 cell, a Th9 cell, a Tfh cell, or a Th22 cell.

231. The pharmaceutical composition of claim 229, wherein the memory T cell is a central memory T cell (Tcm), an effector memory T cell (Tem), a tissue-resident memory T cell (Trm), or a virtual memory T cell.

232. The pharmaceutical composition of claim 229, wherein the innate-like T cell is a natural killer T (NKT) cell, a mucosal-associated invariant T cell (MAIT), or a gamma delta T cell (γδ T cell).

233. A T cell comprising oRNA or precursor RNA polynucleotide of any one of claims 1-154 or the pharmaceutical composition of any one of claims 155-232.

234. The T cell of claim 233, wherein the T cell is a human T cell.

235. The T cell of claim 233 or 234, wherein the T cell is a CD8+ cytotoxic T cell, a CD4+ helper T cell (Th), a regulatory T (Treg) cell, a memory T cell, an innate-like T cell.

236. The T cell of claim 235, wherein the Th cell is a Th1 cell, a Th2 cell, a Th17 cell, a Th9 cell, a Tfh cell, or a Th22 cell.

237. The T cell of claim 235, wherein the memory T cell is a central memory T cell (Tcm), an effector memory T cell (Tem), a tissue-resident memory T cell (Trm), or a virtual memory T cell.

238. The T cell of claim 235, wherein the innate-like T cell is a natural killer T (NKT) cell, a mucosal-associated invariant T cell (MAIT), or a gamma delta T cell (γδ T cell).

239. A eukaryotic cell comprising the oRNA or precursor RNA polynucleotide of any one of claims 1-154, or the pharmaceutical composition of any one of claims 155-228.

240. The eukaryotic cell of claim 239, wherein the eukaryotic cell is a human cell.

241. The eukaryotic cell of claim 239 or 240, wherein the eukaryotic cell is an immune cell.

242. The eukaryotic cell of claim of any one of claims 239-241, wherein the eukaryotic cell is a T cell, dendritic cell, macrophage, B cell, neutrophil, or basophil.

243. A prokaryotic cell comprising the oRNA or precursor RNA polynucleotide of any one of claims 1-154, or the pharmaceutical composition of any one of claims 155-228.

244. A method of expressing a therapeutic protein in a cell, comprising contacting the cell with the oRNA or precursor RNA polynucleotide of any one of claims 1-154, or the pharmaceutical composition of any one of claims 155-232, thereby expressing the therapeutic protein in the cell.

245. A method of expressing a protein from an oRNA molecule, comprising providing oRNA comprising an IRES selected from a sequence set forth in any one of SEQ ID NOS: 14067-24829 or having a consensus sequence set forth in any one of SEQ ID NOs: 24867-24892 adjacent to a coding sequence.

246. A method of expressing a protein from an oRNA molecule in a T cell, comprising providing the T cell with an oRNA comprising an IRES selected from a sequence set forth in any one of SEQ ID NOs: 793, 876, 1017, 1216, and 3291 adjacent to a coding sequence.

247. A method of expressing a protein from an oRNA molecule in a T cell, comprising providing the T cell with an oRNA comprising an IRES selected from a sequence set forth in any one of SEQ ID NOs: 75, 77, 137, 532, 566, 580, 648, 693, 752, 787, 791, 820, 839, 843, 852, 863, 871, 874, 922, 959, 984, 1015, 1026, 1041, 1047, 1059, 1068, 1134, 1177, 1178, 1180, 1189, 1193, 1198, 1263, 1276, 1280, 1282, 2601, 2615, 2616, 2617, 2618, 2627, 2667, 2681, 2746, 2758, 3284, 3285, 3289, 3292, 3294, 3295, 3296, 3297, 3298, 3299, and 3301 adjacent to a coding sequence.

248. A method of delivering an oRNA or a RNA precursor thereof to a T cell, comprising the oRNA or precursor RNA polynucleotide of any one of claims 1-154, or the pharmaceutical composition of any one of claims 155-232.

249. The method of claim 248, wherein the delivery to the T cell is performed using electroporation.

250. A method of treating a subject having a disease or disorder, the method comprising administering the pharmaceutical composition of any one of claims 155-232 to the subject.

251. A method of treating a subject having a disease or disorder, the method comprising administering the T cell of any one of claims 233-238 to the subject.

252. The method of any one of claim 250 or 251, wherein the disease or disorder is a cancer.

253. The method of any one of claim 250 or 251, wherein the disease or disorder is an autoimmune disease or disorder.

254. The method of any one of claims 250-253, wherein the subject is a human.

255. A method for identifying a translation initiation element (TIE) sequence capable of driving protein expression comprising:
a. obtaining a pool of RNA molecules comprising TIE,
b. transfecting the RNA molecules into a cell comprising one or more ribosomes,
c. lysing the cell and adding the content of the lysed cell into a gradient to fractionate based on a ribosomal load, and
d. selecting the RNA and TIE combination capable of loading the RNA into the ribosome.

256. The method of claim 255, wherein the RNA molecule comprises a circular RNA or a linear RNA.

257. The method of claim 255, wherein the TIE is an internal ribosome entry site (IRES).

258. The method of claim 255, wherein the cell is a mammalian cell.

259. The method of claim 255, wherein the gradient is a sucrose gradient.

260. The method of claim 255, further comprising centrifuging the content of the lysed cell before fractionation.

261. A method for identifying a circular RNA sequence capable of driving protein expression comprising:
a. obtaining a pool of RNA molecules comprising TIE,
b. transfecting the RNA molecules into a cell comprising one or more ribosomes,
c. lysing the cell and adding the content of the lysed cell into a gradient to fractionate based on a ribosomal load, and
d. selecting the RNA and TIE combination capable of loading the RNA into the ribosome.

262. The method of claim 255 for identifying a TIE sequence capable of driving protein expression in a circular RNA comprising the TIE operably linked to a sequence encoding said protein.

263. The method of claim 262 for identifying a TIE sequence capable of high translation efficiency as compared to a TIE comprising SEQ ID NO: 3282 under comparable conditions.

The application's sequence listing, which the Patent Office published only in electronic form, follows.

SEQUENCE LISTING (24900 sequences)

SEQ ID NO: 1 - DNA, 367 bp, unidentified
  source 1..367: mol_type = unassigned DNA; note = Human parechovirus 4 strain R12644/1999/HUN 5' UTR
tgaggtgtctgatgaggtgtgggaacttattggaagtgattacttgctgcaaagcatcctattgccagcggatcaacacctggtgacaggtgcccctggggccaaaagccaaggtttaacagaccctctaggattggtttaaacctgagtagtcatggaaaatacttagtacctgccaatttggtaacagtgcaaacactagttgtaaggcccacgaaggatgcccagaaggtacccgtaggtaacaagtgacactgtggatctgatctggggccatctacctctatcttggtgaggtggttaaaaaacgtctagtgggccaaacccaggggggatccctggtttcctttatcataccactatcatt

SEQ ID NO: 2 - DNA, 368 bp, Parechovirus A
  source 1..368: mol_type = genomic DNA
tgagacgtctgatgacgtgtgggaacttattggaagtaacaatttgctgcaaagcatcctattgccagcgggtgaacacctggtaacaggtgcctctggggccaaaagccaaggtttaacagaccctctaggattggttaaaacctgaattgttatggaaaatatttagtacctgccaatttggtagtattgcaaacactagttgtacggcccacgaaggatgcccagaaggtacccgaagttaacaagtgacactatggatctgatctggggccaactacctctatcttggtgagttggttaaaaaacgtctagtgggccaaacctgggggggatccccagtttccttttattttatcattgccact

SEQ ID NO: 3 - DNA, 373 bp, unidentified
  source 1..373: mol_type = unassigned DNA; note = unclassified Parechovirus sequence
tttgtaagacgtctggtgacgtgtgggaacttattggaaataacatattgctgcaaagcatcctattgccagcggaacaacacctggtaacaggtgcctctggggccaaaagccaaggtttaacagaccctctaggattggtttaaaacctgatatgttgtggaagatacttagtacctgttgatctggtagtagtgcaggcactagttgtaaggcccacgaaggatgcccagaaggtacccgtaggtaacaagtgccactatggatctgatctggggccaggtacctctatcttggtgacctggttaaaaaacgtctagtgggccaaacccgggggggatccccggtttctttttattttattaatagcatt

SEQ ID NO: 4 - DNA, 389 bp, Pegivirus B
  source 1..389: mol_type = genomic DNA
ggcatgggtccactggcgcgctgacgaaggtgcgcgtgctttgtaggcacggtccacaggtgtgcccactaccggtgtgaataagtgggggtctggagcgtcagaccttaaacctagtggtgcctgggatcgcaacgtggctcacgtacgccaacgccgcttaaaaccttcgggacagctatgcgggttgacaatggcagtgaggcgcggcaccgaccgtggatccggaatcggtgtgcgagttccccagtcgctagcccgtaagggcaagcatgggtccccccagctggcgcagcgctacatgcggcaagaggaagaaccttcgggtgacctcggggggaatgtccgttctcaatgagctgaggagcatcgcacggctcgtcgccaag

SEQ ID NO: 5 - DNA, 398 bp, Parechovirus D
  source 1..398: mol_type = genomic DNA
ctacctatcctacttcttgtatatcattctttgctattaagtagggatcccctgctatttgcaggtgtgcttgcagtggagctacacaactgtggccgaggcacggctcgcccccgtgtattaggactcttttgtgccactgttaagcggacgtatgtcagttgagtgatatctcagtgataaaccatgagtacatggtaatcctggcgtggactcattgggacggtatttcctatcccgtagactccttgtagccaggtgggcatgcccaatcacaatggtagcacctctcatgggagtgagggggcctgagttagtactcagtcacacagcctgatagggtagcggctctgctactgaccagcgtctttaaataactgagagctgtttattaacct

SEQ ID NO: 6 - DNA, 419 bp, Pegivirus B
  source 1..419: mol_type = genomic DNA
gtggtaaatcccggctacggtggatccatgaatagcgtagggtgtgccaccactgctgggtgggacgacgcaggatcaaaggggacggcacggtccacaggtgagccaaccggtgtgaatatggcacgtctttgggcatgacgttaaactgagacgccctgcaggatgacaacatggctgagggttgcggaacgccgcttaaaaccattcgtggacagcgatgcgggttgacaatccgtcctcaggcgtggcggccatattggttggtcgtgtcagttcccttcagggtgcgcttcggcgaagcatggccccccccagctggcgcaggcccacatgcggcaagacgaaaaatccttcgggtgacgtcgggggggattttccctttacctacatgcatgttgttccgtttcggcgcaacc

SEQ ID NO: 7 - DNA, 421 bp, Parechovirus A
  source 1..421: mol_type = genomic DNA
tctattagtgagataccacgcttgtggaccttatgctcacacagccatcctctagttagttggtgaggtgtctggtgacgtgtgggaacttaccggaagcattattttgctgtaaggcatccattagccagcggaacaacacctggtaacaggtgcccctggggccaaaagccaaggtttaacagaccctaatggattggttcaaacctggaataatgtggaaggtacttagtacctgccgaactggtagcaatgccaacactagttgtaaggcccacgaaggatgcccagaaggtacccgtaggtaacaagagacactatggatctgatctggggccaactacctctatcttggtgagttggttaaaaaacgtctagtgggccaaacccaggggggatccctggtttcctaatttttact

SEQ ID NO: 8 - DNA, 426 bp, unidentified
  source 1..426: mol_type = unassigned DNA; note = unclassified Pestivirus sequence
gtataagggatgggatccttgtacatttcatacctctaccgaacagtatttgggagttctttttacctgccgtacagtattgggatttaaacaactaaatgtttacaaatcacgtgtgtggtggcggggatagaccgtgccagcggttgtgtaccagcaatcacaaacaacacgtggactgcaatccaggagagcacctaggtctgttaagttgtgagtacacgacattcgtcaatgagtcagctggtaaggatcacccacctggatactcatgtggacgagggagtttcccaaacagtaacctactctgggggaggggtcccccagagacaatttgtctcaaatatgggataagttggggtgtgctgcctgacagggtctcggctgatagcctggaaagcagtataatatcagttgaattggcat

SEQ ID NO: 9 - DNA, 436 bp, unidentified
  source 1..436: mol_type = unassigned DNA; note = unclassified Parechovirus sequence
ataattctatcagtgggataccacgcttgtggatcttatgcccacacagccatcctctagtaagtttgtaagacgtctgatgacgtgtgggaacttattggaagtgacattttgctgcaaagcatcctattgccagcggaataacacctggtaacaggtgcctctggggccaaaagccaaggtttaacagaccctttaggattggtgttaacctgaagtgttatggaaaatatttagtacctgctgatttggtagtaatgcaaacactagttgtaaggcccacgaaggatgcccagaaggtacccgtaggtaacaagagacactatggatctgatttggggccaactacctctattaaggtgagttggttaaaaaacgtctagtgggccaaacccaggggggatccctggtttccttttattttactacattcaac

SEQ ID NO: 10 - DNA, 439 bp, Parechovirus A
  source 1..439: mol_type = genomic DNA
tgccataactctattagtgagataccatgcttgtggaacttatgctcacacagccatcctctagtaagtttgtaagacgtctggtgacgtgtgggaacttgtgggaatcaatgccttgctgtaaagcatccattagccagcggacaaacacctggtaacaggtgcctctggggccgaaagccaaggtttaacagaccctaatggattggttcaaacctgagacattgtggaacacacttagtacctgctaatctggtagtaatgcaaacactagttgtaaggcccacgaaggatgcccagaaggtacctgtaggtaacaagtgacactatggatctgatctggggccagttacctctatcttggtgaactggttaaaaaacgtctagtgggccaaacccaggggggatccctggtttcctttttattttactagtcatt

SEQ ID NO: 11 - DNA, 441 bp, Parechovirus A
  source 1..441: mol_type = genomic DNA
cataactctattagtgagataccatgcttgtggaccttatgctcacacagccatcctctagtgagtttgcaagacgtctgatgacgtgtgggaacttaatggaaacaatatcttgctataaagcatcttactgccagcggaacaacacctggtgacaggtgcctctggggccaaaagccaaggtttaacagaccctttaagattggttcaaacctgaggtattgtggaaattatttagtacctgccgatttggtagtagtgcaaacactagttgtaaggcccacgaaggatgcccagaaggtacccgtaggtaacatgtgacactatggatctgatctggggccaactacctctatcaaggtgagttggttaaaaaacgtctagtgggccaaacccaggggggatccctggtttcctttatcttatcacacaattatcatt

SEQ ID NO: 12 - DNA, 471 bp, unidentified
  source 1..471: mol_type = unassigned DNA; note = Kobuvirus cattle/Kagoshima-1-22-KoV/2014/JPN genomic RNA, nearly1 sequence
catccccaatatgttcggtgaggaatgctaccacgtaactattagtgaacccattgactgttctgccctggcaaggctatagagtacagtgttccgctgtggatgccgtcctggtaacaggatccccagtgtgtgtagctgtatgttcaacttcggttgttcacagtccttggtctagcttttagtgaaatggtgtgcgccatatccctacatttgggtgccacctctcaacccctaggaatgctaggaaggtaccccaccctccggtgggatctgatcctaggctaattgtctatggggttgtttccttttcttttcaccactcattactggctcacagattgtttgttgtgttccctgctctctctagctcccaacacggcacacagtctcagccacaccgcctttgcaaacgactaccagatttgtttctttgactcctctgattctcacatcttcactgaaccagac

SEQ ID NO: 13 - DNA, 481 bp, unidentified
  source 1..481: mol_type = unassigned DNA; note = unclassified Avihepatovirus sequence
gttgggtttacgtaagtattacccaaccctcctttcaacgtctggcccacgatacgggccaccctttcctatctcctctctttccaagtaagatattttattggttaactgacctctgtgcggcacgacaatgatgtggacaagtgttttacttaggtggtttagccagccatttcctcggcaatagcttctaggagaggagaaatggtaggtgcaacctggtaatggttctcctgaaatcgtccagtagggaggatcctcttccagataattgtactgactaggtgaagtagactggactagctgtgaggtccggggccagcattgctataccccctctaatccggcgtggatttccggccattggatagagcttacagctagcagggtattggggtaaccctgttgatccagactcctgataaggggaactgcctgtttcacgacccacctagtataaaatacaggctgtatttatgaa

SEQ ID NO: 14 - DNA, 488 bp, unidentified
  source 1..488: mol_type = unassigned DNA; note = Eel picornavirus 1 strain F15/05, complete genome.1 sequence
cacatggaaagcttttcgcttccatgtttacgcacacactctctttgacaccctgttgtatggtgttaaactacaacatttgtctgtctataatcgtttattttgtttaccctatatgtacccaagtatttgattgcttgactcacataagcatcggtaacccatactgttttatgagctactacctctgctgtctacatacattttatatgaatggtttgagctctgcctcaggatcaaacatggtaacatgttcctttggtcagttagaatcttattgtataatctaaggtgtctattagtacgtagaaagttgtaacacatatggggcctgatagccgctatctctgatggatgtaaggtaaccttctttaggtctgatacattctgcacaggatccaattttcggtgccctgtacgagtgcactcttatgcacgaggacgagatatgctacaacccactgcaaatttaaacccaaactttaaca

SEQ ID NO: 15 - DNA, 509 bp, unidentified
  source 1..509: mol_type = unassigned DNA; note = unclassified Picornaviridae sequence
ctccccccccttccccttcccgagtaggagattggcatgtatgctctacatgcccgattctctcttgctcactctcttaaatcctggtggcggtctcggattaaacatttatgtcgtatctgggatcgtcttacttggtggtaattcctctgttgcctagggacctccggactgccggattaaaggtctcaacagagggcaatgtacaaggaagtcattatacgctaattaagtatttgatgaatgactagtgtgacagggctgaggaactccccccgggtaaccggtgcctcagcgtccgaaagacacgtggataggatccaccctgttatacccagcacgatgtaatagtcaaatacctctgatttgtgtaggatgtataaattgtgcattgtaaattttgggcgtagagatgctccgaaggtaccccgttttacgggatctgatcggaggctaattacccaatgcgccctaaataacttcatataatttctttttctttattcaaa

SEQ ID NO: 16 - DNA, 519 bp, unidentified
  source 1..519: mol_type = unassigned DNA; note = Goose megrivirus isolate W18, complete genome.1 sequence
ttcgggacactggatgggcgacttggtggggctgccactctatcttgacctttcgttactgactttcggatctctgactcctccttgtctcttgcgtttggtccacggacggactaattggaatgtttactggctaagcctcgttctgaaataccctagccaatgggttgtagtaggatcctggtgtttccattaaacctcttccgaccatagtagctagagttatggctgtgtaggatgtgggtaagaccgctttttgcgtatctcccacaagacaccggattatggatgtgtccgctggataaggctcgaaacctcccaactgaaggtggtgctgaaatattgcaagcctaggttgtgtagaggcaagtagatgcctgccgcgacattcgtcttccgcccttttgggttagtagtgtacctacatggacgtggggctgggaatccccaccttgcataacactggttgatagacctgcggctggtcaagttactatggtataaccagttgaaatggct

SEQ ID NO: 17 - DNA, 519 bp, unidentified
  source 1..519: mol_type = unassigned DNA; note = unclassified Kobuvirus sequence
accctcttttccggcggcgcaagttcgcgtcgtcgtaagcctggactcccatggtgtacatcggtttccgggcaaatacaagaaccccagttttcctggtaattccttgactgggtcaaagaaataaggaaccagcccctctaacgccagacgagcggctttaaacttgaacttctggcacaatttcttccactaccctttccccaaactcggactgactcactggattttgaccttccccctttgtctgaccactcttttggatctccctccaatatgccggtggtgcctggcggaaaaagcacaagttgtgtgagcaacacccccacaggtctcacggaacggtctgtgcccgcagatctagtacgtgcggatccctggttgcttccactgctcgcctgtgagtagagtaggtgctgggtgtgatgtgtcttcggacacctcgggcatagcattgctcccccgagaatcaagccatcgagatttctctggcctctgaagtcacgcctggacgcgtag

SEQ ID NO: 18 - DNA, 528 bp, unidentified
  source 1..528: mol_type = unassigned DNA; note = unclassified Pegivirus sequence
gtcaggtggaaggcctgaaaccgatcctacaattggagagtaaccaacatgctcattaacacctcgggctggctcgaaagccggtgttgggcagatggcagggttcttagggtaaatcccggtctgtctggatccggtatagagctggcactggaggtccactgttggcttgctgaagtgctcagaagattgatggacacggtacacaggtttggatgcaccggtgtgaatagcgtcccgtcaggagcgtctgacgttaaactgagtccccctcaacgatcgcaacatgggattgcgtacggacacgccgccaaaacccttcggggacagctatgcgggttgacaagtccagcagtcgcgtggggcctatattgtttaggcctgcgagttccggtttgggggagccgaaaggcagccatgggggtaccaaggcggcgtcgcgctacaggcggcaaggggaaaaatccttcgggtgacccctggtaccatttttccttattgggtgttatgggtgtcggaaacgccacc

SEQ ID NO: 19 - DNA, 528 bp, Parechovirus A
  source 1..528: mol_type = genomic DNA
ttgtgtcaaatttgtagtgtttacagtagttgtagcttgcacgacatccttgttctccggttgggctgtggttgcaaaactatttggtcctagtaaattagaagcatcatctgcaactttggttattatttccccgccaacttcattgccagaaataatattattagcttcagtttctacattagacaaggagagagtatccatagcaccagtagcaacattaactaaatccttgatagactccataatggctgtttaaaattaaaagaaaaccagggatcccccttgggattggtttaaacctgaactactatggaagacatttagtacctgccaatttggtagtagtgcaaacactagttgtaaggcccacgaaggatgcccagaaggtacccgtaggtaacaagagacactatggatctgatctggggccaactacctctatcttggtgagttggttagaaaacgtctagtgggccaaacccgggggggatccccggtttcctttatttaataattagattcatt

SEQ ID NO: 20 - DNA, 531 bp, unidentified
  source 1..531: mol_type = unassigned DNA; note = unclassified Pegivirus sequence
gccgggtggaaggcccggaaccgccccaccacctcaactaggtggtaagggtacgtctatcggtccggctggcccgaaaggcggtggatcctgtgtgttagggttcgtaggtggtaaatcccagcacaggtggtaatcgctatagggcaggcttatcccggtgaccgcttccctggatcctggagcgggtcgtggcggcacggtccacaggagtggggcctccggtgtgaataagccctcgtctggagcatcagacgttaaactgagacgtcccgaagagatcggaacgacgccccacgtatggcaacgccgcttaaaacccttcggggacagctatgcgggttgacaatgccagtggggggccgggcccactattgttgtgggctccgagttcctctagggatggccgaaaggcagccatggggccacccaggcggcgccgtgctacaggcggcaaggggaaaaatccttcgggtgaccccgggtggcattccctcccttagcagcatgagtgtggtggtagctgcaacc

SEQ ID NO: 21 - DNA, 537 bp, Parechovirus A
  source 1..537: mol_type = genomic DNA
gatatcatcttgcaataagaagagtggggttaagacgcttaaagcatagagacaattttcttttctaacccacatttatgtggggtggcagatggcgtgccatgactctattagtgagataccacgcttgtggaccttatgctcacacagccatcctctagtaagtttgtgagatgtctgatgacgtgtgggaacttattggaagcaacattttgctgtaaagcatcctattgccagcggaacaacacctggtaacaggtgcctctggggccaaaagccaaggtttaacagaccctttaggattggttcaaacctgaaatgctgtggaaaatatttagtacctgccaatttggtagtaatgcaaacactagttgtaaggcccacgaaggatgcccagaaggtacccgtaggtaacaagtgacactatggatctgatctggggccaaatacctctatcttggtgatttggttaaaaaacgtctagtgggccaaacccaggggggatccctggtttccttttattttataatcgctatt

SEQ ID NO: 22 - DNA, 544 bp, unidentified
  source 1..544: mol_type = unassigned DNA; note = unclassified Aphthovirus sequence
tggcacaccttacctcgaaacaagctcgtccttttgctgtgcaacacagtctgtcctgttacacttgtgacggctcgcgacactgtttgcatagtgaaatcgaccaagacagcaattccaaatggtgaacctcgaacacccaagctggatccgtagctggacatgttagggtaaggaattcctccctggtaacagggaccttactggccaaaagccctgctctttgagcctagcatgttgttgaccccgaactgtccagtttggttagtacagggaattcatttgttgtggttgttcagaactcgacttctagtgagacagcctaaggatgccctccaggtaccctggggtaacaagtgacacccaggatctgaggaggggatcaccctgcgtgatttaaaaaacttctaagctgtcacggtgaccagaggctggcacctttcacttttaccacttctcaattgatcacaaacaaaggaattacgtaattgcagacccacaaactagttacacgagtactgttcttacttttaatacttgttat

SEQ ID NO: 23 - DNA, 546 bp, unidentified
  source 1..546: mol_type = unassigned DNA; note = unclassified Hepacivirus sequence
tgccatagagtggaacgtgtctacattgcgaaaatcaggtgtgaaaggcattgttggagcagaagggtgctgagtcaagttagttgtgttgacagttgttgtagcttgtacgacatccttgttttcaggtgttgaagtcgttgcaaaacaatttggtcccagaacattcgatgcatcatcagccactttggttaacatgtcaccaccagctgcattactggggtttgtgatggtctcattaacagtgttgacagtagagtcaattgtcttagtgattccagtagccatatctgcaacacccttgattgtctccatagctgtgaataaaaataaaaggaaaccagggtcccccctggatttggtaaccgtgcttatactagttgtaaggcccacgaaggatgcccagaaggtacccgtaggtaacaagtgacactatggatctgatctggggccaactacctctatcttggtgagttggttaaaaaacgtctagtgggccaaacccaggggggatccctggtttccttttattttatcataatcact

SEQ ID NO: 24 - DNA, 560 bp, unidentified
  source 1..560: mol_type = unassigned DNA; note = unclassified Riboviria sequence
gccgggtggaaggcccggaaccgaccctagggtggaacctggatgagggtgtggaagagactcccccatcggtccgaaagctggtggatggcgtgcggcagggttccgcaggtgggtaaatcccggcacgcttggatccggtataggataggtgggagccgaccggtcgaccccggtctggaccaccacggaagcacctgagcccggcggaagccccgtgggcacggtacacaggttgggcctaccggtgtgaataaggccccgtctcgagcggagacgttaaactgagaggtcctggtggatgggaacccggccctgcgtgttggaacgtcgctaaaacccttaggggacaatttccgaccgcgagttggcaaacctagcaggggcgggggcagtaggatggatctccgatctgctcccagttcccaccagggtcgccgtaaggcaagcatggggcccccaagctggcgcggcgctacacgcggcaagaggaagaaccttcgggtgacctctgggggcatgttggcttttcatgatgatgtgtggttgcagctgcaatc

SEQ ID NO: 25 - DNA, 563 bp, unidentified
  source 1..563: mol_type = unassigned DNA; note = unclassified Rabovirus sequence
cctcttttcttggcaaataagatggtggaccaaggtcgtctgtagttgtttggaacatttctttctaatgacttatgtcagcggtgaactcacaccgtaactcttctaccctatccccacacttgtggaactaggaggggatgagtgattcaagtaagtactgtcagaatggtgaaaatgatctgattctgaaacatcatggatccatcgtaagatggggctacacgcctgcggaacaacacatggtaacatgtgccccaggggccaaaagccacggtgataggatcacccgtgtagtttgagatcatatcaatgttcatggtctagtaagatgatttgaaatctaactgagctgatggctaactgcttgtcttattgcggcctaaggatgccctgcaggtacctttagataaccttaagagactattgatctgagcaggggccaaggtggtctttcccagccttggttaaaaagcgtctaagccgtggcagggggcgggaggccccctttcctcccaaactttaatattgattgtatggtgacaactgaaagacatagcaca

SEQ ID NO: 26 - DNA, 570 bp, unidentified
  source 1..570: mol_type = unassigned DNA; note = unclassified Parechovirus sequence
ctattaactatagccttgtgcctggtccccactagtcgaaggcatcttgcaataagataagtggaataaggacgcttaaagcacaatgaaagttaacttttctaacccacactatggtgtggggtggcagatggcgtgccataactctattagtgagataccacgcttgtggaccttatgctcacacagccatcctctagtaagtttgtaagacgtctggtgacgtgtgggaacttgtgggaatcaatattttgccgtaaggcatccattagccagcggataaaacacctggtaacaggtgcctctggggccaaaagccaaggtttaacagaccctaatggattggttttgaaacctgaaatattgtggaacacacttagtacctgctgatctggtagttatgcaaacactagttgtagggcccacgaaggatgcccagaaggtacccgtaggtaacaagagaaactatggatctgatctggggctgactactcctatctttgtgagtcagttaaaaaacgtctagtgggccaaacccaggggggatccctggtttcctttaattctatc

SEQ ID NO: 27 - DNA, 589 bp, Bovine rhinitis B virus
  source 1..589: mol_type = unassigned DNA
cgggtttgctgctttcacatagtaaagcagatagaggttttgtaatggcgcactttacctcgaaacaagctcgttgttttgctgtgtaacacggtctgtcctgtcacacttgtggcggctcgtgacactgtgcgcatagtgaaatcgaccaagacagcaacttcaaatgatgaacctcgaacacccaagctggatccgtagctggacatgttagggtaaggaattcctccctggtaacagggaccttactggccaaaagccctgctctttgagcctagcatgttgttgaccccgaactgtccagtttggttagtacagggaatttatctgttgtggttgttcagaactcgatttctagtgagacagcctaaggatgccctccaggtaccctggggtaacaagcgacacccaggatctgaggaggggatcaccttgcgtgatttaaaaaacttctaagctgtcacggtgaccagaggctggcacctttcacttttatcacttttaaactgaccacaagcaaaggaattacgtgactacaggctctcaaactagttacacgagtactgtttttacttttgacatttgttgt

SEQ ID NO: 28 - DNA, 591 bp, unidentified
  source 1..591: mol_type = unassigned DNA; note = unclassified Parechovirus sequence
caacaaacatctaagacaattacatacaaccttgtacctggtccccaccagtcgaaggcatctagcaataagatgggtggaacaaggatgcttaaagcacaaagacaattaacttttctaacccacaatttattgtggggtggtagatggcgtaccataactctattagtgagataccatgcttgtggatcttatgctcacacagccatcctctagtaagtttgtaaggtgtctgatgatgtgtgggaacttattggaaacaacattctaccgtaaggtatccattagccagcggaacaacacctggtgacaggtgcctctggggccaaaagccaaggtttaacagaccctaatggattggttcaaacctgggatgttgtggaaaatatttagtacctgctgatttggtagcagtgcaaacactagttgtaaggcccacgaaggatgcccagaaggtacccgtaggtaacaagagacactatggatctgatctggggtcaactacctctatcttggtgagttgattaaaaaacgtctagtgggccaaacccaggggggatccctggtttccttttacttatcaaaatgatc

SEQ ID NO: 29 - DNA, 592 bp, unidentified
  source 1..592: mol_type = unassigned DNA; note = unclassified Parechovirus sequence
aatgtaactaacatctaagacaactattttacaaccttgtacctggtctccactggtcgaaggcaacttgcaataagataagtggaatgaagacgcttaaagtacaatgtaagtaatcttttctaatccacaattctgtggagtggcagatggcgtgccataactctaatagtgagataccatacttgtggacctcatgctcacacagccatcctctagtaagtttgtaagacgtctggtgacgtgtgggaacttatgggaatcaatgttttgctgcaaggcatctattagccagcggataaacacctggtaacaggtgcctctggggccaaaagccaaggtttaacagaccctaatagattggtttatacctgaaacattgtggaacatattcagtacctgccgatctggtagtaatgcaaacactagttgtaaggcccacgaaggatgcccagaaggtacccgtaggttacaagggacactatggatctggtctggggctgagtacctctatcttggtgactcagttaaaaagcgtctagtgggccaaacccgggggggatccctggtttcttttattttaatggtcact

SEQ ID NO: 30 - DNA, 592 bp, Parechovirus A
  source 1..592: mol_type = genomic DNA
cgtaacaaacatctaagattatcatattaaccccatgcctggtctccattagttgaaggcaacttgcaataaaataagtggaaataagacgcttaaagcatggtgtaagttttcttttctaactcacatcttgtgtggggtggcagatggcgtgccataactctattagtgagataccacacttgtggaccttatgctcacacagccatcctctagtaagcttgtaagacgtctggtgacgtgtgggaacttattggaaacatcattttgctgcaaagcatcctattgccagcggaacaacacctggtaacaggtgcccctggggccaaaagccaaggtttaacagaccctttaggattggttctaaacctgaaatgttgtggaagatatttagtacctaccaatctggtagtattgcaagcactagttgtacggcccacgaaggatgcccagaaggtacccgtaggtaacaagtgacactatggatctgatctggggtcaactacctctatctaggtgagttggttaaaaaacgtctagtgggccaaacccaggggggatccctggtttccttttatcttaaatagtgact

SEQ ID NO: 31 - DNA, 592 bp, Parechovirus A
  source 1..592: mol_type = genomic DNA
taacaaacatctaagacaaacaattacgaccttatgcctggtccccaccagtcgaaggcatctagcaataagataggtggaacaaggacgcttaaagcataaagacaataatcttttctaactcacacattggtgtgaggtggcagatggcgtgccataactctaatagtgagataccacgcttgtggaccttatgctcacacagccatcctctagtaagtttgtgaggtgtctgatgacgtgtgggaacttgttggaaatgacagcttgctgcaaagcatcccattgccagcggactaacacctggtaacaggtgcctctggggccaaaagccaaggtttaacagaccctttgggattggttcaaacctgagctgtcatggaagacacttagtacctgctgatttggtagcaatacaaacactagttgtaaggcccacgaaggatgcccagaaggtacccgtaggtaacaagtgacactatagatctgatctggggccggctacctctatcttggtgagtcggttaaaaaacgtctagtgggccaaacccaggggggatccctggtttccttttattttactaatgcaact

SEQ ID NO: 32 - DNA, 593 bp, unidentified
  source 1..593: mol_type = unassigned DNA; note = unclassified Parechovirus sequence
tgtaataatcttagatgtttgttacattaaccccatgcctggtctccactagttgaaggcagcttgcaataaaatgagtggaagcaagacgcttaaagcatggtgtaaattagcttttccagcccacaccttgtgtggggtggcagatggcgtgccataactctattagtgagataccatgcttatggaccttatgctcacacagccatcctctagtaagtttgtgagacgtctggtgacgtgtgggaacttattggaagcaacattttgctgtaaagcatcctattgccagcggaacaacacctggtaacaggtgcctctggggccaaaagccaaggtttagcagaccctttaggattggtttaaaacctgaaatgttgtggaagatacttagtacctaccgatctggtagtagtgcaaacactagttgtaaggcccacgaaggatgcccagaaggtacccgtaggtaacaagagacactatggatctgatctggggccgggtacctctatcttggtgacctggtttaaaaacgtctagtgggccaaacccgggggggatccccggtttccttttattttatcaatgccact

SEQ ID NO: 33 - DNA, 594 bp, unidentified
  source 1..594: mol_type = unassigned DNA; note = unclassified Parechovirus sequence
actgtaactaacatctaagacaactattatacaaccttgtacctggtccccactagtcgaaggctacttgcaataagataagtggactaaggacgcttaaagtacaatgtaaacaatcttttctaatccacaattttgtggagtggcagatggcgtgccataaccctattagtgagataccacgcttgtggaccttatgctcacacagccatcctctagtaagtttgtgagatgtctggtgatgtgtgggaacttatgggaagtaatgtcttgctgtaaagcatccattagccagcgggtaaacacctggtaacaggtgcctctggggccaaaagccaaggtttaacagaccctaatggattggttcaaacctgggacattgtggaacatacttagtacctgctgatctggtagttatgcaaacactagttgtaaggcccacgaaggatgcccagaaggtacccgtaggtaacaagagacactatggatctgatctggggctgagtacttctatcttagtgactcagttaaaaaacgtctagtgggccaaacccgggggggatccccggtttcctttattttacaactaccatc

SEQ ID NO: 34 - DNA, 595 bp, unidentified
  source 1..595: mol_type = unassigned DNA; note = unclassified Parechovirus sequence
gcacacacgaaaaggaatgcctgttgcattaaccccatgcctggtctccactagttgaaggcaacttgcaataaaatgagtggaaacaagacgcttaaagcatggtgtaaattaacttttctaacccacaccttgtgtggggtggcagatggcgtgccataactctattagtgagataccacgcttgtggaacttatgctcacacagccatcctctagtaagtttgtgagatgtctggtgacgtgtgggaacttattggaaacaacattttgctgtaaagcatcctattgccagcggaactacacctggtaacaggtgcctctggggccaaaagccaaggtttaacagaccctttaggattggtttaaaacctgaaatgttgtggaagatacttagtacctaccgatctggtagtattgcagacactagttgtaaggcccacgaaggatgcccagaaggtacccgtaggtaacaagagacactatggatctgatctggggccaggtacctctatcttggtgacctggttaaaaaacgtctagtgggccaaacccgggggggatccccggtttcattttgttttaccaatgccact

SEQ ID NO: 35 - DNA, 595 bp, unidentified
  source 1..595: mol_type = unassigned DNA; note = unclassified Parechovirus sequence
actgtaacaaacatctaagattattgcatgctttaagcgtcttgtttccactagttgaaggcaacttgcaataaaataagtggaaacaagacgcttaaagcatggtgtaagttaacttttctaacccacatctcatgtggggtggcagatggcgtgccataactctattagtgagataccacgcttgtggaccttatgctcacacagccatcctctagtaagtttgtgagacgtctggtgacgtgtgggaacttattggaaacagcattttgctgtaaagcatcctactgccagcggaacaacacctggtaacaggtgcctctggggccaaaagccaaggtttaacagaccctttaggattggtttaaaacctgaaatgttgtggaagatactcagtacctaccgatctggtagtattgcaaacactagttgtagggcccacaaaggatgcccagaaggtacccgtaggttacaagagacactatggatctggtctggggccaggtacctctatctcggtgacctggttaaaaaacgtctagtgggccaaacccgggggggatccccggtttccttttgttttactaatgccatt

SEQ ID NO: 36 - DNA, 596 bp, unidentified
  source 1..596: mol_type = unassigned DNA; note = unclassified Parechovirus sequence
actgtaactaacacctaagcttacatcacagataccctatgcctggtccccaccagtcgaaggcatctagcaataagatgggtggagcaaggacgcttaaagcatagtgttattatgcatttctaactcgtgttcaacacgaggtggcagatggcgtgccataactctattagtgagataccacgcttgtggatcttatgctcacacagccatcctctagtaagcttgcaaggcgtctgatgacgtgtgggaacttattggaaataacagtttgctgcaaagcatcctattgccagcggatcaacacctggtaacaggtgcctctggggccaaaagccaaggtttgacagaccctctaggattggttcatacctgaactgttatggaagatacttagtacctaccaatttggtagttaggcaagcactagttgtaaggcccacgaaggatgcccagaaggtacccgtaggtaacaagtggcactatggatctgatctggggccaactacctctatcctggtgagttggttaaggcatccttcgtgggccaaacccaggggggatccctggtttcctttaaatttaatacaatcaat

SEQ ID NO: 37 - DNA, 597 bp, unidentified
  source 1..597: mol_type = unassigned DNA; note = unclassified Parechovirus sequence
actgtaactaacatctaagctgatattccagccacctcaaggctggtccccactcgtcgaaggcatctagcaataagataagtggaagaaggatgcttaaagcatagtgttaatatgcatttctaacctgtgattatcacggggtggcagatggcgtgccataactctattagtgagataccacgcttgtggaccttatgctcacacagccatcctctagtaagtttgcaaggcatctgatgacgtgtgggaacttattggaaacaacagtttgctgcaaagcatcctactgccagcggaacaacacctggtaacaggtgcctctggggccaaaagccaaggtttaacagaccctttaggattggttcacacctgaactgttgtgaaagatatttagtacctactgacttggtagttaggcaaacactagttgtaaggcccacgaaggatgcccagaaggtacccgtaggtaacaagagacactatggatctgatctggggccaactaccactatcatggtgagttggttaaaaaacgtcttagtgggccaaacccaggggggatccctggtttccttttactttaatacaatcatt

SEQ ID NO: 38 - DNA, 603 bp, Bovine rhinitis B virus
  source 1..603: mol_type = genomic DNA
tatcattcgaagatgtgcggttttgctgctttcacagagtaaagcagatagaggttctggactggcaaactttacctcgaaacacgcccgttttcctgctgtgttttacagactgtcctgccacacttgtggcggcttgtgacactgtgaacatagtgagaccgaccaagagaacagttccaagtgatgaacaccgaacacctagactggatccgtagctggacatgttagggcaaggatttcccccctggtaacaggagccttgctggccaaaagccccgctctttgagcctagcatgttgtcgaccccggactgtccagtctagttagtacatgggattcacttgtcatggttcttctaaactcggtctctagtgcggcagcctaaggatgccctccaggtaccccggggtaacaagcgacacccgggatctgaggaggggactactttacgtagtttaaaaaacgtctaagctgttacggtgaccagaggctggcacctttcattttttaaaacaaactactgattacaattgaagtgataacggttttacagactttcaaactagtagcacaagtactgttttccaacgcacacatttt

SEQ ID NO: 39 - DNA, 604 bp, unidentified
  source 1..604: mol_type = unassigned DNA; note = unclassified Parechovirus sequence
atcataaccaatacgatttctcattccatctcgaccgcttctaccacctctaccgccacgtcctccacgagcatcaagaaattcacgaaattcatcgagaatgcttaaagcatagtgttagtatgcattcttgatgctcgtggaggacgtggcggtagatggcgtgccataactctatcagggtgataccacgcttgtggatcttatgctcacacagccatcctctagtaagcttgcaaggcgtctgatgacgtgtgggaacttattggaaataacagtttgctgcaaagcatcctattgccagcggatcgacacctggtaacaggtgcctctggggccaaaagccaaggtttaacagaccctctaggattggttcacacctgaactgttatggaaaatacttagtacctaccgatttggtagttgtgcaagcactagttgtagggcccatgaaggatgcccagaaggtacccgtaggtaacaagtgacactatggatctgatctggggccaactacctctatcctggtgagttggttaaaaaacgtctaatgggccaaacccaggggggatccctggtttcctttaaatttactacaaccaat

SEQ ID NO: 40 - DNA, 604 bp, unidentified
  source 1..604: mol_type = unassigned DNA; note = unclassified Aphthovirus sequence
ctgcagatatcaagatgtgcgggtttgctgctttcacagagtaaagcagatagagattttgtattggcacacttaatctcgaaacgcgctcgttctgctgtgtagttcagtctgtcctgtcacacttgtgacggctcgcgacactgtacacatagtgaaaccgaccaagacaaaagcttcaaataatgaacctcgaaatcccaaactggatccgtagctggacatgttagggtaaggaacacccccctggtaacagggaccttactggccaaaagccccgctctttgagcctagcatgttgttgatcccgaactgttcagtttggttagtacagggaatttctttgctgtctttgttcagaactcggtttctagtgagacagcctaaggatgccctccaggtaccccggggtaacaagcgacacccgggatctgaggaggggaccgccccgcgcggtttaaaaaacttctaagctgttgtggtgaccagaggctggcacctttcactttaaaacacttattaactggtcacaaacaaaagaattccgttttacagactttcaaactagttacacaagtactgtttcacttacaacaattgttat

SEQ ID NO: 41 - DNA, 606 bp, Cyprivirus A
  source 1..606: mol_type = genomic DNA
aaataccctttcccccggagcctcaccggggaccgcctcatggtgacctgctcggtcactactgtggtggtgaacaaatgtctaggacctttcactccaaatccctttcccctttttctacttcttagtacgcctcggctcgctcatccgttgtgtgctcaaactccccttctcctacacccctttcccccccctcccgagtgactcgcacttagtcgtaggtttggtgtctttcaccatttctgtgcctatctatgtgtcctttggatccgccctcgaatgccctctagggtcttctgcgaaagcttgcaaagccgcgccccccctccactgttcttggggaccgtgcgcagccggaacttttgacatttgactgaacagtacagcaatgtagcatgtctcttgtctttgccggttagccctcgtggtcaaactttgtaagttagtacacttaagcactctcctgtggtttctcttgggaccttccaattgtaggaatccttggtatgccttcgaatagggacggacgctctaaatgccccgttcgcgaagtcgacgcctgaatgaccaaggtttttccacctttcctcaaaacccctcttttta

SEQ ID NO: 42 - DNA, 608 bp, Rhinovirus A
  source 1..608: mol_type = genomic DNA
ttaaaactggatccagattgttcccatctggatttcccacgtggagttgtacactattattccggtaattttgtacgccagttttatgtacccccccctgtaacttagaagttttgaacaaggaccaataggcagtaaccacccaggttgctaaaggtcaagcacttctgtttccccggtcaaagttgatatgctccaacagggcaaaaacaactgagatcgttacccgcaaggtgcctacgcaaagcctagtaaccccttgaacgatgtgtggttggtcgttcggctgtaccccacagtagacctggcagatgaggctagatgttccccactggcgacagtgttctagcctgcgtggctgcctgcgcactctctgagtgcgaagccatacatttgacaaggtgtgaagagccccgtgtgctcaccttgagtcctccggcccctgaatgtggctaaccttaaccctgcagctagtacatgcaatccagcatgcagctagtcgtaacgagcaattgcgggacgggaccaactactttgggtgtccgtgtttcactttttccttttatatttgcttatggtgacaatatatagatttatatattgtcacc

SEQ ID NO: 43 - DNA, 608 bp, Rhinovirus A
  source 1..608: mol_type = genomic DNA
ttaaaactggatccaggttgtccccacctggatctcccacagggagtggtactctgttattacggtaactttgtatgccagttttatcctccccacccctatgtaacttagaagttttacataaagaccaataggtagtaatcatccagattacttaaggtcaagcacttctgtttccccggttgatgttgatatgctccaacagggcaaaaacaacagaaatcgttacccgcaaagtgcctacgcaaagcctagtagcactttagaagttgtctggctggtcgctccgccatttcccctggtagacctggcagatgaggctagaaataccccactggcgacagtgttctagcctgcgtggctgcctgcacaccctatgggtgtgaagccatacaatggacaaggtgtgaagagccccgtgtgctcactttgagtcctccggcccctgaatgtggctaaccttaaccctgcagctagggcacacaatccagtgtgtatctagtcgtaatgagcaattgcgggacgggaccaactactttgggtgtccgtgtttctcttttatccttatgtttgcttatggtgacaatatatgaatatatattgacacc

SEQ ID NO: 44 - DNA, 609 bp, unidentified
  source 1..609: mol_type = unassigned DNA; note = unclassified sequence
ttgaaagcgaatgtatggccgcatttccacactagtaactagtagtggtatgcggctgtgcattcgctttccccccctctttataggggcggtctttgtatctttactaatttcctacttttctatcatctctttttaaggtagggactaaggtctcctagcccttccccccctgggctttccaggatcaagggggttctaaagctaggccatgtttcctgagcctcatttagtacggagagttagtagtcataaaacatgccagtaaccttctagtgcccaagggtgacagagtggtaacactctccttggggcccgaaaggctagtgggcatagttgttaccaaggaaggggtccccaccccaacctgaactaacagctagaagctcaccttagaagaagtgctggatcccaacatgtcttataatgaaagctcaatggaaaggtgaggagatggaagcatgggggttcactgagtagatgccctgaaggagaaatctgatcaggggcccgtgactatacattaggtaaaccgggtataaaaaccatgaaaggtgacccacaaattttcctttatttttatgttttgttggtgtgaattcaggcaag

SEQ ID NO: 45 - DNA, 610 bp, unidentified
  source 1..610: mol_type = unassigned DNA; note = Livupivirus A1 strain newt/II-5-Pilis/2014/HUN, complete genome.1 sequence
tatctacatggggatccaggctgtatggaatgtctgtcttaacaagcactataccagaaagatccacccaaagtggtgggactgggactgtgaggtgagaaatcccgaaaccagccttctcaagcgtcggacgatctttctgttttagtgaacaccttgccttttaaatggatgacaacaccccttcagcaaatcgcaatctgaaatcccaaaagactgtttagccgaactctggtaatcactccggagaagtaggatacgcagcccctgtggactcttgatttcaggactcaaggtagctagagctggaacttcatggaatgacaaaggaatatatgcacattgtgcgctttcctggccttgtagcccgtcgtgaggatatgtcgttgggaatcgacatcttagtccagtactgcttgatagagtgtcggctggcacagttacctgagaataagtcagttgtacttaacatgaacaaaaaaaataactaccacaactaccacaatctaccaatacttgaattatgctgaatctcgtacagtaaaaacgttccgtggaaggacaagtattgaagtgcggttacatcatccgatacgcgctggatccctca

SEQ ID NO: 46 - DNA, 610 bp, Parechovirus A
  source 1..610: mol_type = genomic DNA
gtcaataaaagcctcaaacgtaacaaacatctaagataactaaacaaaccctatgcctggtctccactattcgaaggcaacttgcaataagaagagtgggcacaagacgcttaaagcatagagagagtttccttttctaacccacgttcgcgtggggtggcagatggcgtgccataactctaatagtgagataccatgcttgtggatcttatgctcacacagccatcctctagtaagtttgtaaggcgtctggtgacgtgtgggaatttattagaagcaacatcgtgctgtaaagcatcctattgccagcggaataacacctggtaacaggtgcctctggggccaaaagccaaggtttaacagaccctctaggattggttttgaacctgcgatgttgtggaaaatatttagtacctgccaatctggtagtcatgcaaacactagttgtaaggcccacgaaggatgcccagaaggtacccgtaggtaacaagagacactatggatctgatctggggccaactacctctatcttggtgagttggttaaaaaacgtctagtgggccaaacccaggggggatccctggtttccttttattttatcaatttcatt

SEQ ID NO: 47 - DNA, 610 bp, Rhinovirus A
  source 1..610: mol_type = genomic DNA
ttaaaactggatccgggttgttcccacccggatctcccacgtggagttgtacactattattacggtaattttgtacgccagttttatatcccttaccccaagtaacttagaagataaacacacagaccaataggaggtggtcatccagatcactaagggtcaagcacttctgtttccccggtcaaggttgatatgctccaacagggcaaaaacagctgagatcattatccgcaaagtgcctacgcaaagcctagtaactacctcgaaagtacttgactggtcgctccgccataccccatggtagacctggcagatgaggctagaaatcccccactggtgacagtgttctagcctgcgtggctgcctgcacaccctttgggtgtgaagccaagtaatggacagggtgtgaagagtcgagtgtgctcactttgagtcctccggcccctgaatgtggctaaccctaaccctgcagctagggcacacaatccagtgtgtatctagtcgtaatgagcaattgcgggatgggaccaactactttgggtgtccgtgtttcttgtttttcatttataattgcttatggtgacaatatatagtattatatattggcgtc

SEQ ID NO: 48 - DNA, 610 bp, Rhinovirus A
  source 1..610: mol_type = genomic DNA
ttaaaactggatccaggttgttcccacctggatttcccacagggagtggtactctgttattacggtaactttgtacgccagttttatctcccttcccccatgtaacttagaagtttttcacaaagaccaatagccggtaatcagccagattactgaaggtcaagcacttctgtttccccggtcaatgttgatatgctccaacagggcaaaaacaactgcgatcgttaaccgcaaagcgcctacgcaaagcttagtagcatctttgaaatcgtttggctggtcgatccgccatttcccctggtagacctggcagatgaggctagaaataccccactggcgacagtgttctagcctgcgtggctgcctgcacaccctatgggtgtgaagccaaacaatggacaaggtgtgaagagccccgtgtgctcgctttgagtcctccggcccctgaatgtggctaaccttaaccctgcagctagagcacgtaacccaatgtgtatctagtcgtaatgagcaattgcgggatgggaccaactactttgggtgtccgtgtttcactttttcctttatatttgcttatggtgacaatatatacaatatatatattggcacc

SEQ ID NO: 49 - DNA, 612 bp, Rhinovirus A
  source 1..612: mol_type = genomic DNA
ttaaaactggatccaggttgttcccacctggatctcccatagggagtggtactctgctattacggtagccttgtatgccagttttatctcccctcccccatgtaacttagaagttttacacaaggaccaatagtcggtaatcagccagattactaaaggtcaagcacttctgtttccccggtcaatgctgatatgctccaacagggcaaaaacagcagcgatcgttatccgcaaagcgcctacgcaaagcttagtagcatctccgaaattgtctggttggtcgttccgccattttccccttggtagacctggcagatgaggctagaaataccccactggcgacagtgttctagcctgcgtggctgcctgcacaccctatgggtgtgaagccaaacaatggacaaggtgtgaagagccccgtgtgctcgctttgactcctccggcccctgaatgtggctaaccttaaccctgcagctagagcacgcaaaccagcgtgtttctagtcgtaatgagcaattgcgggatgggaccaactactttgggtgtccgtgtttcactttttctttttatattgcttatggtgacaatatatacatcatatatattgacacc

SEQ ID NO: 50 - DNA, 613 bp, Rhinovirus A
  source 1..613: mol_type = genomic DNA
ttaaaactggatccaggttgttcccacttggatcccccaagaggggtagtactctattattacggtaattttgtacgccagttttatctcccttaccccctttgtaacttagaagatttaaacacagaccaataggcgacgatcatccagatcgtttaaggtcaagcacttctgtttccccggtcaatgctgatatgctctaccagggcaaaaacagtagagatcgttatccgcaaggtgcctacacaaagcttagtaacattttgaagagcatttggttggtcgctcagctattaccccatagtagacctggcagatgaggctagaagttccccactggcgacagtgttcttgcctgcgtggctgcctgcgcactctcatgagtgcgaagccatatgtttgacaaggtgtgaagagccccgtgtgctcaccttgagtcctccggcccctgaatgtggctaaccttaaccctgcagctagtgcatgaaatccatcatgtaactagtcgtaatgagcaattgcgggatgggaccaactactttgggtgtccgtgtttcactttttccttttatatttgcttatggtgacaatatatatagcatatattgacacc

SEQ ID NO: 51 - DNA, 613 bp, Rhinovirus A
  source 1..613: mol_type = genomic DNA
ataaaactggatccaggttgttcccacctggatctcctacgtggagttgtactctattattccggtaatcttgtacgccagttttatatcccctacccctttgtaacttagaagttaaacacacagaccaataggcggtggctatccaagtcactaatggtcaagcacttctgtttccccggtcaagattgatacgctccaacagggcgaaaacagtcaagatcgttaaccgcaaagtgactacgcaaagcttagtaatgccttgaagagtctatggctggtcgttccgctataaccccctagtagacctggcagatgaggctagaaacaccccactggcaacagtgttctagcctgcgtggctgcctgcacaccctttcgggtgtgaagccatatatttgacaaggtgtgaagagccccgtgtgctcactttgagtcctccggcccctgaatgtggctaaccttaaccctgcagctagcgtatgtaatccaacatattgctagtcgtaatgagcaattgcgggatgggaccaactactttgggtgtccgtgtttcacttttttccttttatttgcttatggtgacaatatatatagtatatatattggcatc

SEQ ID NO: 52 - DNA, 614 bp, Parechovirus A
  source 1..614: mol_type = genomic DNA
ggctggttaataaaagcctcaactgtaacaaacatcttaagcaactatagcaaccccatgcctggtctccactagttgaaggcacctagcaataaaatgagtggaaataagacgcttaaagcatggagtaaattttcttttctatcccatattttgtatggggtggcagatggcgtgccataattctattagtgggataccatacttgtggatcttatgcccacacagccatcctctagtaagtttgtaagacgtctggcgatgtgtgggaacttattggaagcaacattttgctgcaaagcatcctactgccagtggaacaacacctggtaacaggtgcccctggggccaaaagccaaggtttaacagaccctttaggattggtattaacctgaaatgttgtggagaatagttagtacctgctgacctggtagtaatgcaaacactagttgtaaggcccacgaaggatgcccagaaggtacccgtaggtaacaagagacactatggatctgatttggggccaactacctctattaaggtgagttggttaaaaaacgtctagtgggccaaacccaggggggatccctggtttcttttattttaccatatctaac

SEQ ID NO: 53 - DNA, 614 bp, Rhinovirus A
  source 1..614: mol_type = genomic DNA
taaaactggatccaggttgttcccacctggatctcctattgggagttgtactctattattccggtaattttgtacgccagttttatcttccccctccccaattgtaacttagaaggttatcaatacgaccaataggtggtagttagccaaactaccaaaggtcaagcacttctgtttccccggtcaaagttgatatgctccaacagggcaaaaacaactgagatcgttatccgcaaagtgcctacgcaaagcctagtaacacctttgaagatttatggttggtcgttccgctatttcccatagtagacctggcagatgaggctagaaatcccccactggcgacagtgctctagcctgcgtggctgcctgcgcaccccttgggtgcgaagccatacattggacaaggtgtgaagagccccgtgtgctcactttgagtcctccggcccctgaatgtggctaaccttaaccctgcagctagtgcatgtaatccaacatgttgctagtcgtaatgagtaattgcgggacgggaccaactactttgggtgtccgtgtttcactttttccttttaatattgcttatggtgacaatatatatagctatatatattgacacc

SEQ ID NO: 54 - DNA, 614 bp, Rhinovirus A
  source 1..614: mol_type = genomic DNA
ttaaaactggatccaggttgttcccacctggatttcctacatggagttgtactctgttattccggtaaccttgtacgccagttttatatcccttcccccttgcaacttagaagttaagcacgcagaccaataggtggtgattatccaaatcactaacggtcaagcacttctgtttccccggtttaaactgatacgctccaacagggcgaaaacagtgcaaatcgttatccgcaaggtgcctacacaaagcttagtagcgctttggagaatgtgtggttggtcgctcagctataccccctagtagacctggcagatgaggctagaagcaccccactggcgacagtgttctagcctgcgtggctgcctgcacacccttatgggtgtgaagccatacatttgacaaggtgtgaagagccccgtgtgctcactttgagtcctccggcccctgaatgtggctaaccttaaccctgcagctggtgcatgtaatccaacatgttgctagtcgtaatgagcaattgcgggatgggaccaactactttgggtgtccgtgtttcactttttaccttttaatttgcttatggtgacaatatatatacaacatatatattggcatc

SEQ ID NO: 55 - DNA, 614 bp, Rhinovirus A
  source 1..614: mol_type = genomic DNA
ttaaaactggatccaggttgttcccacctggatctcctacgggagttgtactctgttatttcggtaaccttgtacgccagttttatctcccctcccccaattgtaacttagaagcaatacacaaggaccaataggcagtgattaaccagatcacttaaggtcaagcacttctgtttccccggtctgagttgatatgctctaacagggcaaaaacaagtcagatcgttatccgcaaagtgcctacgcaaagcctagtatcatctttgaaaatgtatggttggtcattccgctgaaccccacagtagacctggcagatgaggctagaaaccccccactggcgacagtgttctagcctgcgtggctgcctgcacacccttatgggtgtgaagccatatatttgacaaggtgtgaagagccccgtgtgctcactttgagtcctccggcccctgaatgtggctaaccctaaccctgcagctagtgcatacaagccagtatgttgctagtcgtaacgagcaattgcgggatgggaccaactactttgggtgtccgtgtttcactttttacctttatactgcttatggtgacaatatatatatagcatatatattgacacc

SEQ ID NO: 56 - DNA, 614 bp, Rhinovirus A
  source 1..614: mol_type = genomic DNA
ttaaaactggatccaggttgttcccacctggatctcccaagtggagtggtacactattatcccggtaattttgtacgccagttttataacccctcccccccttgtaacttagaagatgtaaacacagaccaataggtggtaactaaccaagttactaaaggtcaagcacttctgtttccccggctgatattgatatgctccaccagggcaaaaacaatagaagtcgttatccgcaaagtgcctacgcaaagcctagtagcactttagattgtgtatggttggtcgctcagctattccccctagtagacctggcagatgaggctagaaataccccactggtaacagtgttctagcctgcgtggctgcctgcgcaccctttcgggtgcgaagccatatacatgacaaggtgtgaagagccccgtgtgctcactttgagtcctccggctcctgaatgtggctaaccttaaacctgcagccagtgcacataagccaatgtgtagctggtcgtaatgagtaattgcgggatgggaccaactactttggatgtccgtgtttcttgtttttcctttaattttgcttatggtgacaatatatagataatatatattggcatc

SEQ ID NO: 57 - DNA, 617 bp, unidentified
  source 1..617: mol_type = unassigned DNA; note = unclassified Picornaviridae sequence
gggccccctttccgtccaagtcgcggacgttaaatgcggcacggcagtgcctcggtgctgtcctgctgctagtggcggcaaccctctcccttactgtatgaatgagtttgtgtgaatgaaatccgtgtggatccccagcttttgggtctcaaacagaacacacggtggcggcccatgttccaccatagaggctaccttagtagctttaagtggaatctttgagtgagcaggtatcgcagccgttaaagactggtattcccggtgtagaggcgagcgcaggtaactgcggtctacattgtgtgtgagccagtacccgcaaggggtagctcaaagtggaaacttaaggtgaaccggtaagcgctattgtgacgcatgttggtcccaaggtgcgatgatagacatgttgcgcaggtaccccttaaatgggatctgagcgtaagctaattagtcactgtcgtcgcgctgaccttttctctttgtcttaattattgttaacacaatatcattgtttgttgtgtgtttttgctcgcaaggtcactagcagtcttacttaaaacactcaagacggactttttgtataattcaattagtgcttatttcaattctaccttctacag

SEQ ID NO: 58 - DNA, 618 bp, unidentified
  source 1..618: mol_type = unassigned DNA; note = Human parechovirus 1 isolate 121Chzj091, complete genome.1 sequence
cacgagttagaaatacatactaacactatgctttaagcgtccttgctccactcatcttattgcctggtccccactagtcgaaggtatctagcaataagatgagtggagcaaggacgcttaaagcatagtgttagtatgtatttctaactcgtgttcaacgcgaggtggcagatggcgtgccataactctattagtgagataccacgcttgtggatcttatgctcacacagccatcctctagtaagcttgcaaggcgtctgatgacgtgtgggaacttattggaaataacagtttgctgcaaagcatcctattgccagcggatcaacacctggtaacaggtgcctctggggccaaaagccaaggtttaacagaccctctaggattggttcacacctgaactattatggaagatatttagtacctaccgatttggtagttaggcaagcactagttgtagggcccacgaaggatgcccagaaggtacccgtaggtaacaagtgacactatggatctgatctggggccaactacctctatcctggtgagttggttaaaaaacgtctagtgggccaaacccaggggggatccctggtttccctttaaatttaatacaaccaat

SEQ ID NO: 59 - DNA, 618 bp, unidentified
  source 1..618: mol_type = unassigned DNA; note = Human rhinovirus 11, complete genome.1 sequence
ttcaaactggatccaggttgttcccacctggatctcccacgtggagttgtactctattattccggtaattttgtatgccagttttatctccccttcccttttgtaacttagaagatgaactcaccgaccaataggtggcatttatccagaatgtcaaaggtcaagcaccttctgtttccccggtcaaagttgatatgctccaacagggcaaaaacatctgcgatcgttatccgcaaagcaactacgcaaagcctagtatcacttttgagagtatgtggttggtcgctccactataaacccaatagtagacctggcagatgaggctagaagtcccccactggtaacagtgttctagcctgcgtggctgcctgcgtgcctctggtaggcacgaagccatatatttgacaaggtgtgaagagccccgtgtgcttgctttgagtcctccggcccctgaatgtggctaaccttaaccctgcagctagtgtgcataatccaatgcatggctagtcgtaatgagcaattgcgggatgggaccaactactttgggtgtccgtgtttctcatttttccttttatttgcttatggtgacaatatatataatacatatatattggcatc

SEQ ID NO: 60 - DNA, 620 bp, Megrivirus B
  source 1..620: mol_type = genomic DNA
aaacgggaggatcggctttggcttatcctcttaatagtctacaaaactgggctgactggtgggggagctactagatccgggagaggactagttaccccgcgtaacttccctttttgtcactccctccacctaccccttccctgtcccttagactcttaagtaggtgtgcaggcctggccccccggaaatgggcaaatcggacgtttgcgtgtagggtcgttctgaaaggtggggcccactccaccgtagtaggatcttcctgtttcacgtttaaacctctccgggcaggtatcgctagacactaggctgtataggatggcacgcacttaggtttcgcaccttcctagtgcgccaagatcccgcttttgagctcaagtacatggttctttgtaagatgtctaaccagaggaggtggtgctgaaatattgcaagccactctggcgaacgtccactgcattgcctggaacaggctctctagcgccctccactggtagcgcggtggtgggttagtaggatacctatatggacaggggatgcgggaatacccctcactagctagtgactggttgatcgactggcggcggatccagtgatacttgcataatccgcagacttgggag

SEQ ID NO: 61 - DNA, 620 bp, Parechovirus A
  source 1..620: mol_type = genomic DNA
gggtcggctggtcaataaaagcctcacatataactaacatctaagacaataatgtacaaccttgtgcctggtccccaccggtcgaaggcatctagcagtaagataggtggaacaaggacgcttaaagcacaaagacaacctatttttctaacccgcaaattattgtggggtggtagatggcgtaccataattctactagtgagataccatgcttgtggatcttatgctcacacagccatcctctagtaagtttgcaaggcgtctggtgacgtgtgggaacttattggaaataacatcttgctgcaaggcatccattagccagcggaataacacctggtaacaggtgcctctggggccaaaagccaaggtttagcagaccctaatggattggttcaaacctgggatgttgtggaagatacttagtacctaccgatctggtagcaatgcaaacactagttgtaaggcccacgaaggatgcccagaaggtacccgtaggtaacaagagacactatggatctgatttggggccaactacctctatcctggtgagttggttaaaaaacgtctagtgggccaaacccaggggggatccctggtttcttttacttatcactgtcatt

SEQ ID NO: 62 - DNA, 621 bp, Rhinovirus B
  source 1..621: mol_type = genomic DNA
ttaaaacagcggatgggtatcccaccatccggcccactgggcgtagtacactggtattctgtacctttgtacgcctgtttgccgcccctcccccttttattaccacatttgtggtcgctgcaacgttagaagattttaaagtagtgcaataggaagcatcacaaccagtggtgttatgcacaaacacttctgtttccccggagcgaggtatagacggtccccactgtcaaaagcctttaaccgttatccgccaaccaactacgagacagctagtaatgccctgttctcctgcaaggcgttcgatcagacagatttcccctctgttagtctggtcgatgaggctagaagtaccccacaggtaactgtgttctagcctgcgtggcggccagcccagcttctgctgggacgcctttcaagagacatggtgtgaagactcaattgtgcttggttgtgagtcctccggcccctgaatgcggctaaccttaaacccggatccatgctatgcaaaccagcatagttatggtcgtaatgggcaactctgggatgggaccgactactttgggtgtccgtgtttccatttttactttttgtgtcatttatggttacaattaagttgtaacc

SEQ ID NO: 63 - DNA, 621 bp, Rhinovirus A
  source 1..621: mol_type = genomic DNA
ttaaaactggatccaggttgctcccacctggatctcctacatggagttgtactctattattccggtaattttgtacgccagttttatctccccctacccccttacgtaacttagaagttttacacacaccgaccaataggtggtatttacccaaaataccaaaggtcaagcacttctgttaccccggtcaaaattgatatgctccaccagggcaaaaacaattgcgatcgttatccgcaaagcaactacgcaaagcctagtaccatttttgatgatgtgtggttggtcgttccactatgaacccgatagtagacctggcagatgaggctagaaattccccactggcaacagtgttctagcctgcgtggctgcctgcgtaccccctgtgggtacgaagccatacatttgacaaggtgtgaagagccccgtgtgcttgctttgagtcctccggcccctgaatgtggctaaccttaaccctgcagctagtgtgtacaatccagtacatagctagtcgtaatgagcaattgcgggatgggaccaactactttgggtgtccgtgtttcttgtttttctttcatatttgcttatggtgacaatatatataacacatatattggcacc

SEQ ID NO: 64 - DNA, 625 bp, unidentified
  source 1..625: mol_type = unassigned DNA; note = Bovine rhinitis B virus isolate TCH8 polyprotein gene, complete1 sequence
gtccagctacggatccagtttagacgttcgaagatgtacggttttgctgctttcacagagtaaagcagatagaggttctggactggcaaactttacctcgaaacacgcccgtttttctgctgtgttttacagactgtcctgccacacttgtggcggcttgtgacactgtgaacatagtgagactgaccaagacaacagtttcaagtggtgaacatcgaacgtctaaactggatccgtagctggacatgttagggcaagggtctcccccctggtaacaggagccttgctggccaaaagccccgctctctgagcctagcatgttgtcgaccccggactgttcagtttagttagtacatgggattcacttgtcatggttcctctgaactcggtctctagtgcggcagcctaaggatgccctccaggtaccccgaggtaacaagcgacactcgggatctgaggaggggactactttacgtggtttaaaaaacgtctaagctgccacggtgaccagaggctggcacctttcactttttaaacacactactgactacaattgaagtgataacggttttacagactttcaaactagttacacaagtactgtttttccaacacacacaatttt

SEQ ID NO: 65 - DNA, 630 bp, unidentified
  source 1..630: mol_type = unassigned DNA; note = Human rhinovirus 37, complete genome.1 sequence
tttaaacagcggatgggtatcccaccatccgacccactgggtgtagtactctggtattttgtacctttgtacgcctgttgttcctaatgtacccaccctaaaacttcctacccaagtaacgttagaagtttcatcaacaagtacaataggaagcatcacatccagtggtgttttgtacaagcacttctgtttccccggagcgaggtataggctgtacccactgccgaaagcctttaaccgttatccgccaaccaactacgtaaaagctagtatcatcatgttttaaaataggcgttcgatcaggtggatcccccctccactagtttggtcgatgaggctaggaactccccacgggtgaccgtgtcctagcctgcgtggcggccaacccagcttctgctgggacgcctttttatggacatggtgtgaagactcgcatgtgcttggttgtgactcctccggcccctgaatgcggctaaccttaaccccggagccctgtgttgcaatccagtaacattagggtcgtaatgagcaatttcgggacgggaccgactactttgggtgtccgtgtttctcatttttcttattattgtcttatggtcacagcatatatataacgtatatactgtgatc

SEQ ID NO: 66 - DNA, 635 bp, unidentified
  source 1..635: mol_type = unassigned DNA; note = unclassified RNA viruses ShiM-2016 sequence
cccctaggatccactggatgttagtacactggtatcgcggtacctttgtacgcctgttttatatccccttccccgcaactttagaagtatcaaaagtaccgctcaatagccgccacgctcccagtgtggtttcgagcaagcacttctgttttcccggttgcgtcccatatgctgtgcaaacggcaaaaagggacaatatcgttacccgcttgtatactacgggaaacctagtaccgccattgattgtattgagggttgcgctcatcacctttcccggtgtagctcaggctgatgaggctcagaatcccccacaggtaactgtgtctgagcctgcgttggcggcctgccctcgccttatggcgtgggacgctcactacatgacatggtgcgaagagtctactgtgctatacaagagtcctccggcccctgaatgtggataatcctaaccactgatcccacgtacgcaaaccagcgtgtagtgggtcgtaacgcgcaagtcggtggcggaaccgactactttgggtgaccgtgtttcctttattacctattgaatgtttatggtgacaattgtttgattcagttgttaccatttgctacattcaataacctagtgtcaaaccgattgaattgctaca

SEQ ID NO: 67 - DNA, 636 bp, Oscivirus A
  source 1..636: mol_type = genomic DNA
cctcggtccctctttccgtcgccgcccacgacgttaaatgcggtgttgtggtgcttaggtgccacaccactgctatttgggtccccctttcccctatatatgtttgtttgtttatttcaatttcttgaggattggcacctccttatgccaaatctaaatcgtggaggatcccaggctttctggtctttaacagaactccacgtccaggtcatagaaactggttggtaggctgcctgagtagtccatttgctagtagtcccttgtgaacagggtggctcccgtttactgctggtattcccggtgtaggtcgccatggtggtaacaccatcctgcattgtgtgtgaaccagtaccgcaaggatagcaaggtatgaacacttgtggacgaaatggtaagtgatcaattcactttcatggccggaaggtcacgtggcaatcatgccacccaggtaccctcctctgggaggatctgagggtgggctaagcagaccctgccatgtggctgaacttttcccttattgttttactttgtaacatttatagttgtgttagtgatttgtgtgttgtgcccttgtgagctatatccagtataagttcgcagctagaagttaatccttcgacatcggctgtattggaa

SEQ ID NO: 68 - DNA, 636 bp, Parechovirus A
  source 1..636: mol_type = genomic DNA
ccctttcccagccctgagacggctggctaataaaagtctcacctgtaactaacatctaagacaatcatgtataaccttgtgcctggtccccaccagtcgaaagtatcttgcaataagataggtggatcaaggatgcttaaagcacaaagacaattaacttttctaacccacaagttgttgtggggtggtagatggcgtaccataactctactagtgagataccacgcttgtggaccttatgctcacacagccatcctctagtaagtttacaaggcgtctggtgatgtgtgggaacttattggaagcaatattttgccgaaaggcatccattagccagcggaataacacctggtaacaggtgcctctggggccaaaagccaaggtttagcagaccctaatggattggttcaaacctggaatattgtggaaaatatttagtacctacggatctggtagcagtgtaaacactagttgtaaggcccacgaaggatgcccagaaggtacccgtaggtaacaagagacactatggatctgatctggggccagctacctctatcttggtgagttggttaaaaaacgtctagtgggccaaacccaggggggatccctggtttcctttacttaaccgggatcact

SEQ ID NO: 69 - DNA, 636 bp, Enterovirus C
  source 1..636: mol_type = genomic DNA
cccctaggatccactggatgtcagtacactggtatcgtggtacctttgtacgcctgttttatacccccttccccgcaactttagaagcatcaaaagcaccgctcaatagtcaccacacccccagtgtggtttcgagcaagcacttctgttttcccggttgcgtcccatatgctgtgcaaacggcaaaaagggacaatatcgttacccgcttgtatactacgggaaacctagtaccaccattgattgtgttgagagttgcgctcatcacctttccccggtgtagctcaggccgatgaggctcagaatcccccacaggtgactgtgtctgagcctgcgttggcggcctgccctcgccttatggcgtgggacgcttgatacatgacatggtgcgaagagtctactgtgctatgcaagagtcctccggcccctgaatgtggctaatcctaaccactgatcccacgcacgcaaaccagtgtgtagtgggtcgtaacgcgcaagtcggtggcggaaccaactactttgggtgaccgtgtttcctttattacttattgaatgtttatggtgacaattgtttgattcagttgttgccattctctacattcatttacccagcatcaaaccaattgaactgttaca

SEQ ID NO: 70 - DNA, 637 bp, Oscivirus A
  source 1..637: mol_type = genomic DNA
cctcggtccctctttccgtcgccgcccacgacgttaaatgcggtgctgtggtgcttaggtgccacaccactgcggtttgggttcccctttcccctatatatgtttgtctgtttatttcaaattcttgaggattggcacctccttatgccaaatctaaatcgtggaggatcccaggctttctggtctcaaacagaactccacgtccaggtcataggaactggttagtaggctatttgagtagtccgtttgttagtaatgccttgtgaacagggtggctcccgtttactgctggtattcccggtgcaggttgccgtggtggtgacaccatcctgcattgtgtgtgaaccagtaccgcaaggatagcaaggtatgaacacttatgggtgaaataataagtgactaatccactttcatggccggaaggtcatgtggcaatcatgccacccaggtaccctcttaggaggatctgagggtgggctaagcagaccctgccatgtggctgaaattttctattattttattccataacatttatagctatataggtgttttgtgtgttgtgctctccttttccgagttatttccagtactagttcgcagctagaagtttaactcttcgatatcggctacattggaa

SEQ ID NO: 71 - DNA, 637 bp, Enterovirus C
  source 1..637: mol_type = genomic DNA
ttcccacccctaggatccactggatgttagtacactggtatcacggtacctttgtatgcctgttttataacccctcccctgcaactttagaagtatcaaagacactgctcaatagccgccacacctccagtgtggtttcgagcaagcacttctgttctcccggttgcgtcccatatgctgtgcaaacggcaaaaaggggcaatatcgttacccgcttgtatactacgggaaacctagtaccatcattgattgtgttgagggttgcgctcatcacccttccccggtgtagctcaggtcgatgaggctcagaatcccccacaggtgactgtgtctgagcctgcgctggcggcctgccctcgcctcacggcgtgggacgctcaatacatgacatggtgcgaagagtctactgtgctatacaagagtcctccggcccctgaatgtgtcctaaccactgatcccacgtacgcaaaccagtgtatagtgggtcgtaacgcgcaagtcggtggcggaaccaactactttgggtgaccgtgattcccttattacttattgaatgtttatggtgacaattgtttgattcagttgttaccatttaccacattcatcaacctagtgtcaaaccgattaaactgctaca

SEQ ID NO: 72 - DNA, 638 bp, Parechovirus A
  source 1..638: mol_type = genomic DNA
tctaggagagtccctttcccagccagaggtggctggttaaacaatacctaatgtaacaaaacatctaagactttgtaacccatacctggtctccacccgttgaaggcaactagcaataaaataggtgggcttagacgcttaaagtatggtgtaaacaatcttttctagcctgtgcctagcatagggtggcagatggcgtgccataactctattagtgagataccacacttgtggaccttatgctcacacagccatcctctagtaagtttgtgaggcgtctgatgacgtgtgggaacttattggaaataacagtttgctgaaaagcatctcattgccagcggatcaacacctggtaacaggtgcctctggggccaaaagccaaggtttaacagaccctttgagattggttcaaacctgaattgttatggaaaatatttagtacctgctgatttggtagcaatacaaacactagttgtaaggcccacgaaggatgcccagaaggtacccgtaggtaacaagtgacactatggatctgatttggggccaactacctctatcttggtgagttggttaaaaaacgtctagtgggccaaacccaggggggatccctggttttcttttattgtatcactatcact

SEQ ID NO: 73 - DNA, 644 bp, unidentified
  source 1..644: mol_type = unassigned DNA; note = Human parechovirus 4 clone V2A polyprotein gene, partial cds.1 sequence
ggatagatagtccctttcccagccttgaggcggctggtcaataaaagcctcaaacgtaactaacatctaagaagatttgtaaaccctatgcctggtctccactattcgaaggcaacttgcaataagaagagtggaattaagacgcttaaagcatagtgatagttttcttttctaacccacattcgtgtggggtggcagatggcgtgccataactctaatagtgagataccacacttgtggaccttatgctcacacagccatcctctagtaagtttatgagacgtctggtgacgtgtgggaacttattggaaacaacattttgctgcaaagcatcctattgccagcggaacaacacctggtaacaggtgcctctggggccaaaagccaaggtttgacagaccctttaggattggttctaaacctgaaatgttgtggaaaatatttagtacctgctgatctggtagtaatgtaaacactagttgtaaggcccacgaaggatgcccagaaggtacccgtaggtaacaagtgacactatggatctgatctggggctgactacctctatcttggtgagttggttaaaaaacgtctagtgggccaaacccaggggggatccctggtttcttttattttaacacagctaat

SEQ ID NO: 74 - DNA, 647 bp, unidentified
  source 1..647: mol_type = unassigned DNA; note = unclassified Parechovirus sequence
cttaggagagtccctttcccagccttgaggcggctggccaataaaagcctcaaatgtaacaaacatctaagaagattgtgtggaaccctatgcctggtctccactattcgaaggcagcttgcaataagaagagtggaattaagacgctcaaagcatagagacaattttcttttctaacccatacttgtatggggtggcagatggcgtgccataactctaatagtgagataccatgcttgtggaccttatgctcacacagccatcctctagtaagtttgtgagacgtctggtgacgtgtgggaacttattggaaacaacattttgctgcaaagcatcctattgccagcggaacaacacctggtaacaggtgcctctggggccaaaagccaaggtttaacagaccctttaggattggttctaaacctgaaatgttgtggaagacacttagtacctgccgatctggtagtaatacaaacactagttgtaaggcccacgaaggatgcccagaaggtacccgtaggtaacaagtgacactatggatctgatctggggccaactacctctatcttggtgagttggttaaaaaacgtctagtgggccaaacccaggggggatccctggtttccttttattttatcattactaat

SEQ ID NO: 75 - DNA, 648 bp, unidentified
  source 1..648: mol_type = unassigned DNA; note = Human parechovirus 14 clone V10C polyprotein gene, partial cds.1 sequence
ggaggatagagtccctttcccagccttgaggcggctggtcaataaatgcctcaaatgtaactaacatctaagattaacttagacaaccctatgcctggtctccgctagtcgaaggcgccttgcaataagacgagtggaacaaagacgcttaaagcatagtgaaaatatacatttctaacctgtggcctccacagggtggcagatggcgtgccataactctattagtgagataccacacttgtggaccttatgctcacacagccatcctctagtaagtttgtaagacgtctgatgacgtgtgggaagttattggaagtaacaatttgccgtaaggcatcctagagccagtggattaacacctggtaacaggtgcccctggggccaaaagccaaggtttaacagaccctttaggattggttcaaacctgggttgttatggaagatatttagtacctgctgatttggtagtaatacaaacactagttgtaaggcccacgaaggatgcccagaaggtacccgtaggtaacaagtgacactatggatctgatttggggttgactacctctgtcctggtgagtcaattaaaaaacgtctagtgggccaaacccaggggggatccctggtttccttttattttattacaaccatt

SEQ ID NO: 76 - DNA, 649 bp, Parechovirus A
  source 1..649: mol_type = genomic DNA
ctctaggagagtccctttcccagccctgaggcggctggtcaataaaagcctcaatcgtaactaacatctaagaatattatttcaaccccatgcctggtctccactagttgaaggcaacttgcaataaaatgagtggaaacaagacgcttaaagcatggtgtaaattaccttttctaacctacactttgtgtggggtggcagatggcgtgccataattctattagtgagataccacgcttgtggaccttatgctcacacagccatcctctagtaagtttgcaagatgtctggtgacgtgtgggaacttattggaaacaacattttgctgcaaagcatcctactgccagcggaataacacctggtgacaggtgcctctggggccaaaagccaaggtttaacagaccctttaggattggttttaaaacctgaaatgttgtggaagatacttagtacctgccgatctggtagtagtgcaaacactagttgtaaggcccacgaaggatgcccagaaggtacccgtaggtaacaagtgacactatggatctgatctggggccaagtacctctatcttggtgacttggttaaaaaacgtctagtgggccaaacccgggggggatccctggtttccttttattttaccaatgccact

SEQ ID NO: 77 - DNA, 651 bp, Parechovirus A
  source 1..651: mol_type = genomic DNA
ctggaggatagagtccctttcccagccttgaggcggctggtcaataagagcctcaaatgcaacaaacatctaagactattgagaacaaccctgtacctggtccccactagtcgaaggcatctagcaataagatgagtggaatatgggcgcttaaagtacagagtcaatgatcttttctagcctacgcttatgcgtggggtggcagatggcgtgccataaccctattagtgagataccacacttgtggaccttatgctcacacagccatcctccagttagtttgtaagatgtctggtgatgtgtgggaacttgttggaaataacattttgctgtaaggcattcattagccagcggataaaacacctggtaacaggtgcctctggggccaaaagccaaggtttaacagaccctaatgaattggttcaaacctggaatgttatggaagatacttagtacctgctgatctggtagtaatgcaaacactggttgtaaggcccacgaaggatgcccagaaggtacccgcaggtaacaagagacactgtggatctgatctggggctagttgcctctttaaggtgaactagttaaaaaacgtctagtgggccaaacccaggggggatccctggtttcctttattatttgaatgttcatc

SEQ ID NO: 78 - DNA, 653 bp, unidentified
  source 1..653: mol_type = unassigned DNA; note = Human parechovirus 5 strain CH-ZJ1, complete genome.1 sequence
atttgctgagtttctctaggagagtccctttcccagccttgaggtggctggttaataaaacctcaagcgtaactaacatctaagacaaatttatcaaccccatgcctggtccccactagtcgaaagcaacttgcaataagatgagtggaacaaggatgcttaaagcatggtgcaaataaacttttctaacccatttacttggggtggcagatggcgtgccataactctattagtgagataccacgcttgtggaccttatgctcacacagccatcctctagtaagtttgtaagacgtctgatgacgtgtgggaacttattggaatctacaatttgccgaaaggcatcctactgccagcggaacaacacctggtaacaggtgcccctggggccaaaagccaaggtttaacagaccctttaggattggtgaaaacctgaattgtagtggaaaatatttagtacctgctaatttggtagtagtgcaaacactagttgtaaggcccacgaaggatgcccagaaggtacccgtaggtaacaagtgacactatggatctgatctggggctggctacctctatcttggtgagtcggttaaaaaacgtctagtgggccaaacccaggggggatccctggtttccctttatatcattatagct

SEQ ID NO: 79 - DNA, 654 bp, unidentified
  source 1..654: mol_type = unassigned DNA; note = unclassified Parechovirus sequence
ttgttacagttgaggcttccctttcccagccctgaggcggctggtcaataaaagcctcaactgtaacaaacacctaagattattacaataaccccatgcctggtctccactagttgaaggcaacttgcaataaaataagtggaaacaagacgcttaaagcatggtgtgaattaacctttctaacctgcactttgtgtggggtggcagatggcgtgccataattctattagtgagataccacgcttgtggaccttatgctcacacagccatcctctagtaagtttgtgagacgtccggtgacgtgtgggaacttattggaaacaacattttgctgcaaagcatcctattgccagcggaataacgcttggtaacaagcgcctctggggccaaaagccaaggtttaacagaccctttaggattggttcggaacctggaatgttgtggaagatacttagtacctgctgatctggtagtaatgcaaacactagttgtaaggcccacgaaggatgcccagaaggtacccgtaggtaacaagtgacactatggatctgatctggggccaggcacctctatcttggtggcctggttaaaaaacgtctagtgggccaaacccgggggggatccccggtttccttttatttgttcaaagtcact

SEQ ID NO: 80 - DNA, 663 bp, Parechovirus A
  source 1..663: mol_type = genomic DNA
gtacattagatgcgtcatctgcaactttagtcaataaattacctccaatgtcattaccaacattccctaccttttcactaacacctaagacaacaagtacctatgcctggtctccactattcgaaggcaacttgcaataagaagagtggaattaagacgcttaaagcatagagctagttatcttttctaacccacaaagttttgtggggtggcagatggcgtgccataactctattagtgagataccatgcttgtggatcttatgctcacacagccatcctctagtaagttgataaggtgtctggtgatatgtgggaactcacatgaaccattaatttaccgtaaggtatcctatagccagcggaatcacatctggtgacagatgcctctggggccgaaagccaaggtttaacagaccctataggattggtttcaaaacctgaattgatgtggattgtgtatagtacctgttgatctggtaacagtgtcaacactagttgtaaggcccacgaaggatgcccagaaggtacccgtaggtaacaagtgacactatggatctgatctggggccagctacctctatcatggtgagttggttaaaaaacgtctagtgggccaaacccaggggggatccctggtttccttttacctaatcaaagccact

SEQ ID NO: 81 - DNA, 664 bp, Parechovirus A
  source 1..664: mol_type = genomic DNA
ccgcattgctgagcttctctaggagagtccctttcccagccttgaggcggctggtcaataaaagcctcaattgtaacaaacacctaagcttatcatacaagccccatgcctggtctccactagtcgaaggcaacttgcaataagatgagtggaaacaagacgcttaaagcatggtgtaaattagcttttctaacccacatattgtgtggggtggcagatggcgtgccataattctattagtgagataccacgcttgtggaccttatgctcacacagccatcctctagtaagtttgtgagacgtctggtgacgtgtgggaacttatcggaaacagtattttgctgcaaagcatcctattgccagcgggacaacacctggtaacaggtgcctctggggccaaaagccaaggtttaacagaccctttaggattggtttaaaacctgaaatattgtggaagatacttagtacctactaatctggtagtagtgcaaacactagttgtaaggcccacgaaggatgcccagaaggtacccgtaggtaacaagtgacactatggatctgatctggggccaggtacctctatcttggtgacctggttaaaaaacgtctagtgggccaagcccgggggggatccccggtttccttttattttatcaatgccact

SEQ ID NO: 82 - DNA, 667 bp, Parechovirus A
  source 1..667: mol_type = genomic DNA
gtaataatcttagatgtttgttacagttgaggcttttattgaccagccgcctcagggctgggaaagggactcaactgtaacaaacatctaagattattacattaaccccatgcctggtctccactagttgaaggcaacttgcaataaaatgagtggaaacaagacgcttaaagcatggtgtaaattaattttctaacccacattaagtgtggggtggcagatggcgtgccataactctactagtgagataccatgcttgtggaccttatgctcacacagccatcctctagtaagtttgtgagacgtctggtgacgtgtgggaacttattggaaacaacaccttgctgtaaagcatcctattgccagcggaacaacacctggtaacaggtgcctctggggccaaaagccaaggtttaacagaccctttaggattggttctgaacctgagatgttgcggaagatatttagtacctgccgatctggtagtaatgcaaacactagttgtaaggcccacgaaggatgcccagaaggtacccgtaggtaacaagagacactatggatctgatctggggtcaggtacctctatcttggtgacctggttaaaaaacgtctagtgggccaaacccgggggggatccccggtttccttttactttatcaatgccact

SEQ ID NO: 83 - DNA, 668 bp, Parechovirus A
  source 1..668: mol_type = genomic DNA
taccccgacttgctgagctcctctaggagagcccctttcccagccttggggcggctggtcaataaaagcctcaaatgtaactaacatctaagatagattataaccaccctatgcctggtccccactagtcgaaagcacctggcaataagacgagtggaataaggacgcttaaagcatagtgttagcatacacttctaacttgtgattttcacaaggtggcagatggcgtgccataactctatcagtgagataccacgcttgtggaccttatgctcacacagccatcctctaataagtttgtaagacgtctgatgacgtgtgggaacttattggaaacaacaatttgctgcaaagcatcctactgccagtggactaacacctggtaacaggtgcccctggggccaaaagccaaggtttaacagaccctttaggattggtatatacctgagttgttgtggaaaatacttagtacctactgatttggtagccggacaaacactagctgtaaggcccacgaaggatgcccagaaggtacccgtaggtaacaagtgacactatggatctgatctggggtcgaccacccctatccaggtgggtcgattaaaaaacgtctagtgggccaaacccaggggggatccctggtttccttttattttatcacagtcact

SEQ ID NO: 84 - DNA, 669 bp, Parechovirus A
  source 1..669: mol_type = genomic DNA
taccccgacttgctgagcttctctaggagagcccctttcccagccctgaggcggctggtcaataaaagcctcacacgtaactaacatctaagacaatcttatacaaccttgtgcctggtccccaccagtcgaaggcatctagcaataagataggtggaacaaggacgcttaaagcacaaagacaattaacttttctaactcacaatttgttgtggggtggtagatggcgtaccataattctattagtgagataccacgcttgtggaccttatgctcatacagccatcctctagtaagtttgtaaggtgtctggtgatgtgtgggaacttattggaaacaacattttgccgcaaggcatccattagccagcggaataacacctggtaacaggtgcctctggggccaaaagccaaggtttaacagaccctaatggattgatttaaatctggaatgttgtggaatatatttagtacctgctgatctggtagcaatacaaacactagttgtaaggcccacgaaggatgcccagaaggtacccgtaggtaacaagtgacactatggatctgatctggggctggatacctctatcttggtgatccagttaaaaaacgtctagtgggccaaacccaggggggatccctggtttccttttattttattactgccatt

SEQ ID NO: 85 - DNA, 672 bp, Parechovirus A
  source 1..672: mol_type = genomic DNA
cgtcgggccttataccccgacttgctgagcttctctaggagagtccctttcccagccagaggtggctggtcaaataatacctactgtaactaaacatctaagaaataacaaccacacacctggtctccaccagccgaaagcaactagcaataaggtgggtggatatagacgcttaaagtgtgttgtgcattttcttttctagcctgtgttttacacagggtggcagatggcgtgccataactctaatagtgagataccacgcttgtggaccttatgctcacacagccatcctctagtaagtttgtaagacgtctgatgacgtgtgggaacttgttggaaatagcagtttgctgcaaagcatcccattgccagcggatcaacatctggtgacagatgcctctggggccaaaagccaaggtttaacagaccccttgggattggttcaaacctgaactgctatggaaagcacttagtacctgctgatttggtagtaatgcaaacactagttgtaaggcccacgaaggatgcccagaaggtacccgtaggtaacaagtgacactatggatctgatctggggccaactacttctatctaagtgagttggttaaaaaacgtctagtgggccaaacccaggggggatccctggtttcctctcaattttaaacagtcact

SEQ ID NO: 86 - DNA, 673 bp, unidentified
  source 1..673: mol_type = unassigned DNA; note = unclassified Avisivirus sequence
gagctaatggggtccctatcttcatagccaagatccatagtggctcaggaaatagaggggggttcccagggtggattttccgaatcttagatttcggatatccgccttgggacaccccctttccccagccatgggttaaatggcccttcaccaggttaggtgctgtctaggcttccagtaaagaagtcactcgagctacgaacaaatcctaagagggaatggtggttagccccgtccactgggtgtctttcacccactttcagtggatcaatccaccccaactcccccctctatttcctgagccactatggatcttggctatgaagatagggaccccattagctccagtgccaagggatctcccccctcgtaagaggtgcccttgggcccaaaaggctagttggcaaggtgaagtgaaggaagctgctaacgtggtgaccttaagcggatcctgaagctgaccttggagtgaaaccctattggatggctgcgtgaagttgtggaggtggaaatggagaaagttggccgcttgtgagtagatgcccagaaggcataaggctgatctggggccagtgactataccgttccggtaaacctggtataaaaaccatgaaagcaaacgggttaaatttctctatttttattttctcttactgcagtgactacaggcaaa

SEQ ID NO: 87 - DNA, 674 bp, unidentified
  source 1..674: mol_type = unassigned DNA; note = Human parechovirus 1 isolate SH401, complete genome.1 sequence
ggccttataccccgacttgccgagtttctctaggagagtccctttcccagccgtgaggtggctggtcaataaaaacctcaaatgtaactaacatcaaagaaaaatcactcaaccccatgcctggcccccgctagtcgaaagcaacttgcaataagatgagtggaccaagggcgcttaaagcatggtgtcagcaatcttttctaacccatgtttcacatggggtggcagatggcgtgccataactctattagtgggataccacccttgtggaccttatgcccacacagccatcctctagtaagtttgtatgacgtccgatgacgtgtgggaacttattggaagcaacaatttgccgaaaggcatcctattgccagcggattaacacctggtaacaggtgcccctggggccaaaagccaaggtttaacagaccctttaggattggtttaaacctgaattgttgtggaagatatttagtacctgctgatttggtagtaatgcaaacactagttgtaaggcccacgaaggatgcccagaaggtacccgtaggtaacaagtgacactatggatctgatctggggctgactaccactatcctggtgagtcagttaaaaaacgtctagtgggccaaacccaggggggatccctggtttctttttattttataactgtcaat

SEQ ID NO: 88 - DNA, 677 bp, Parechovirus A
  source 1..677: mol_type = genomic DNA
ggccgtcgggccttataccccgatttgctgagcttctctaggagagcccttttcccagccagaggtggctggttaaacaatacctattgtaacaaaacatctaagacataacaaccgtacacctggtctccactggccgaaggcaactagcaataaggtaggtgggttcagacgcttaaagtgtgttgtatatattcttttctaacctgtgttttacacagggtggcagatggcgtgccataaccctaatagtgagataccacgcttgtggaccttatgctcacacagccatcctctagtaagtttgtaagacgtctgatgacgtgtgggaacttgttggagataacattttgctgcaaagcatcccattgccagcggatccacatctggtaacagatgcctctggggccaaaagccaaggtttaacagaccctttgggattggttcaaacctgaattgttatggaagacatttagtacctgctgatttggtagtagtgcaaacactagttgtaaggcccacgaaggatgcccagaaggtacccgtaggtaacaagtgacactatggatctgatctggggccaactacctctatctaggtgagttggttaaaaaacgtctagtgggccaaacccaggggggatccctggtttccttttttaaatttgaataatcact

SEQ ID NO: 89 - DNA, 679 bp, unidentified
  source 1..679: mol_type = unassigned DNA; note = unclassified Sapelovirus sequence
gggaaatacggggggggattacccccctcccgtatttccccctgttgcccgggggtagtgaacgatggatctacggatcctttgttcacagggccaaggttcaagcccacttttgtgagaagcatgctttactaggctatgggttgagtggcccataggcaaccctatgaagaggctacactcactacatccgccaacaggcccaggcgtatgtgggcctataagaaatgtacgttcgtccgcttatggtgcctaatccataggcatctaggacaagtacttctgtttccccggtcacgaggaatatgctgtacccacggcagaagccagacatgatcgttacccgactccgaactgtgcgaaacctagtaccttcaagtgaaacagagatcattgatccggggtgaccctgaccccagaaactcatgatgggtgtcgccgttccgacaggggagaccctgggcgtcgccgcgctggcatgagggcccattagggcatgatcaatgcggaccttgaggcgaagagtctagtgcgcttcggtttattcctccaggcccctgaatgcggctaatcctaaccccggagcgtatcacaccaatccaggtgctggtgcgtcgtaatgcgtaagtctgggatggaaccgactactttgggtgtcctgtgtttctaatttctcttg

SEQ ID NO: 90 - DNA, 680 bp, Parechovirus A
  source 1..680: mol_type = genomic DNA
cgtcgggccttacaccccgacttgctggacttctctaggagagtccctttcccagccctgaggcggctggtcaataaaagcctcaattgtaacaaacatctaagcttattacaataaccccatgcctggtctccactagttgaaggcaacttgcaataaaatgagtggaaatgagacgcttaaagcatggtgtaaactaacttttctagcccacactttgtgtggggtggcagatggcgtgccataattctaatagtgggataccacgcttgtggaccttatgctcacacagccatcctctagtaagtttgtgtgacgtctggtgacgtgtgggaacttattggaaacaacattttgctgtaaagcatcctattgccagcggaacaacgcctggtaacaggtgcctctggggccaaaagccaaggtttagcagaccctctaggattggtttaaaacctgaaatgttgtggaagatacttagtacctaccgatctggtagtaatgcagacactagttgtaaggcccacgaaggatgcccagaaggtacctgtaggtaacaagcgacactatggatctgatctggggccaggtacctctatcttggtgacctggttaaaaaacgtctagtgggccaaacccgggggggatccccggtttccttttattttatcaatgccact

SEQ ID NO: 91 - DNA, 680 bp, unidentified
  source 1..680: mol_type = unassigned DNA; note = Parechovirus A strain NIG13194, complete genome.1 sequence
cgtcgggccttataccccgacttgctgagcttctcgaggagagtcccttttccagccctgaggcggctggtcaataagagcctcaatcgtaacgaacatctaagactgtcaaatcaaccctatgcctggtctccactattcgaaggcaactagcaataagaagagtggatcaatagacgcttaaagcatagtgtacgtaaacctttctaacttgtgttatacacaaggtggcagatggcgtgccataattctattagtgagataccacgcttgtggaccttatgctcacacagccatcctctagtaagtttgtaaggtgtctgatgacgtgtgggaacttattggaaataatagtttgctgcaaagcatcctactgccagcggattaacatctggtaacaggtgcctctggggccaaaagccaaggtttaacagaccctttaggattggttcaaacctgaactattatggaagatacttagtacctgctgatttggtaacagtgcaaacactagttgtaaggcccacgaaggatgcccagaaggtacccgtaggtaacaagtgacactatggatctgatctggggctgactacctctatcttggtgagtcagtcaaaaaacgtctagtgggccaaacccaggggggatccctggttttcttttattttatctcttgcaat

SEQ ID NO: 92 - DNA, 681 bp, Parechovirus A
  source 1..681: mol_type = genomic DNA
cgtcgggccttataccccgacttgctgagcttctccaggagagcccctttcccagccctgaggcggctggtcaataaaagcctcatctgtaacaaacatctaagattatgacattaaccccatgcctggtctccactagttgaaggcaacttgcaataaaatgagtgggaacaagacgcttaaagcatggtgtaaatttgcttttctaacccacactttgtgtggggtggcagatggcgtgccataattctattagtgagataccacgcttgtggaccttatgctcacacagccatcctctagtaagttcgtgagatgtctggtgacgtgtgggaacttattggaaacaacattttgctgaaaagcatcctatcgccagcggaacaacacctggtaacaggtgcctctggggccaaaagccaaggtttaacagaccctttaggattggtttaaaacctggaatgttgttgaagatacttagtacctgccgatctggtaatagcacaagcactagttgtaaggcccacgaaggatgcccagaaggtacccgtaggtaacaagtgacactatggacctgatctggggctaggtacctctatcttggtgacctggttaaaaaacgtctagtgggccaaacccgggggggatccccggtttccttttaatttcatcaatgccatt

SEQ ID NO: 93 - DNA, 683 bp, Parechovirus A
  source 1..683: mol_type = genomic DNA
tggccgtcgggccttataccccgacttgctgagtttctctaggagagtccctttcccagccttgaggtggctggtcaataaaaacctcaactgtaactaacatctaagctgattttatagataccccatgcctggtccccactagtcgaaagcacctggcaataagatgagtggaaaagggcgcttaaagcatggtgttagtatacatttctaacctgtgactatcacggggtggcagatggcgtgccataactctattagtgagataccacgcttgtggaccttatgctcacgcagccatcctctagtaagcttgcaaggcgtctgatgacgtgtgggaactaattggaaatgacagtttgctgctaagcatcctattgccagcggatcaacacctggtaacaggtgcctctggggccaaaagccaaggtttaacagaccctttaggattggttcaaacctgaactgttgtggaagattctcagtacctgctaatttggtagttaggcaagcactagttgtaaggcccacgaaggatgcccagaaggtacccgtaggtaacaagtgacactatggatctgatctggggccagctacctctttcatggtgagttggtcaaaaaacgtctagtgggccaaacccaggggggatccctggtttcctttattttatcatagtcatt

SEQ ID NO: 94 - DNA, 692 bp, Parechovirus A
  source 1..692: mol_type = genomic DNA
agagcttggccgtcgggccttataccccgacttgctgagcttctctaggagagtccctttcccagccctgaggcggctggtcaataaaagcctcaattgtaacgaacacctaagacgataatgataaccctatgcctggtctccactattcgaaggcaccttgcaataagaagagtgggctcaagacgcttgaagcatagagtgcgttttcttttctaatccacacccatgtggagtggcagatggcgtgccataactctattagtgagataccatgcttgtggaccttatgctcacacagccatcctctagtaagtttgtaagacgtctggtgacgtgtgggaacttattggaaacaacattttgctgtaaagcatcctactgccagcggaacaacacctggtaacaggtgcctctggggccaaaagccaaggtttaatagaccctttaggattggtttaaaacctgaaatgttgtggaaaatatttagtacctgccaatctggtagtaatgcaaacactagttgtaaggcccacgaaggatgcccagaaggtacccgtaggtaacaagagacactatggatctgatctggggccagctacctctatcttggtgagttggttaaaaaacatctagtgggccaaacccaggggggatccctggtttccttttattttacctcaaatactatc

SEQ ID NO: 95 - DNA, 695 bp, unidentified
  source 1..695: mol_type = unassigned DNA; note = unclassified Parechovirus sequence
tctcctagagagcttggccgtcgggccttataccccgacttgctgagtttctctaggagagtccctttcccagccttgaggcggctggtcaataaaagcctcaaatataacgaacatctaagacaattaaacataccctatgcctggtctccactattcgaaggcaacttgcaataaggagagtggaattaagacgcttaaagcatggagacagtttccttttctaacccacattagtgtggggtggcagatggcgtgccataactctaatagtgagataccacgcttgtggaccttatgctcacacagccatcctctagtaagtttgcaagacgtctggtgacgtgtgggaacttattggaaacaacattctgctgtaaagcatcctaatgccagcggaacaacacctggtaacaggtgcctctggggccaaaagccaaggtttaacagaccctttgggattggttcaaacctggaatgttgtggaaaatacttagtacctgccgatctggtagtagtgcaaacactagttgtaaggcccacgaaggatgcccagaaggtacccgtaggtaacaagtgacactatggatctgatctggggctggatacctctatcttggtgattcagttaaaaaacgtctagtgggccaaacccaggggggatccctggtttctttttattttataatgtcact

SEQ ID NO: 96 - DNA, 696 bp, Parechovirus A
  source 1..696: mol_type = genomic DNA
gaaccattctacaacttctttagcggctttccgtgtttggtttgcaaccttagttgcaaaacatttgaaaacacttggccttgggtcaataaaagcctcaactgtaacaaacatctaagattattacattaaccccatgcctggtctccactagttgaaggcaacttgcaataaaatgagtggaaacaagacgcttaaagcatggtgtaaattaacttttctaacccacattttgtgtggggtggcagatggcgtgccataattctactagtgagataccacgcttgtggaccttatgctcacacagccatcctctagtaagtttgtgagatgtctggtgacgtgtgggaacttattggaaacaacattttgctgtaaagcatcctatcgccagcggaacaacacctggcaacaggtgcctctggggccaaaagccaaggtttaacagaccctttaggattggttttaaaacctgaaatgttgtggaagatacttagtacctgccgatctggtagtaatgcaaacactagttgtaaggcccacgaaggatgtccagaaggtacccgtaggtaacaagtgacactatggatctgatctggagctaggtacctctatcttggtgacctggttaaaaaacgtctagtgggccaaacccgggggggatccccggtttccttttattttatcaatgccaat

SEQ ID NO: 97 - DNA, 696 bp, Parechovirus A
  source 1..696: mol_type = genomic DNA
tcctagagagcttggccgtcgggccttatacccgacttgctgagtttctctaggagagtccctttcccagccctgaggcggctggtcaataaaagcctcaaatgtaactaacatctaagacatttatgattcaaccccatgcctggtccccactagtcgaaagcatctagccataagatgagtggactaaggacgcttaaagcatggagccaacaaccatttctaacccatgttttgcatggggtggcagatggcgtgccataactctactagtgggataccacgcttgtggaccttatgcccacacagccatcctctagtaagtttgtaagacgtctgatgacgtgtgggaaaacactagaaatattaacttgctgtaaagcatcctactgccagcggaatcacatctggtaacagatgcctctggggccaaaagccaaggtttagcagaccctttaggattggttcaatacctgagttaatatggaaagtgcttagtacctgctgacttggtagtagtgcaaacactagttgtatggcccgcgaaggatgcccagaaggtacccgtaggtaacaagtgacactatggatctgatctggggctggatacctctatcttggtgatccagttaaaaaacgtctagcgggccaagcccaggggggatccctggtttccctatttttattattatcact

SEQ ID NO: 98 - DNA, 697 bp, unidentified
  source 1..697: mol_type = unassigned DNA; note = unclassified Parechovirus sequence
tctcctagagagcttggccgtcgggccttataccccgacttgctgagcttctctaggagagcccctttcccagccttgaggcggctggtcaataaaagcctcaaacgtaactaacacctaagataaatctcataaccctatgcctggtccccactagtcgaaagcacctagcaataagatgagtggaccatggacgcttaaagcatagtgccaatatacatttctaacctgtggattcccatggggtggcagatggcgtgccataattctattagtgggataccacgcttgtggatcttatgcccacacagccatcctctagtaagtttgtaaggcgtctgatgacgtgtgggaacttatcggaaacaacaatttgctgcaaagcatcctattgccagcggacaaacacctggtaacaggtgcctctggggccaaaagccaaggtttaacagaccctttaggattggttcttacctggattgttgtggaaggtacttagtacctgctgatttggtagttggacaaacactagttgtaaggcccacgaaggatgcccagaaggtacccgtaggtaacaagggacactatggatctgatttggggtcacctacctctatcttggtgaggtgattaaaaagcgtctagtgggccaaacccaggggggatccctggtttccttttattttacacagacact

SEQ ID NO: 99 - DNA, 701 bp, Parechovirus A
  source 1..701: mol_type = genomic DNA
ttttgaaaggggtctcctagagagcttggccgtcgggccttataccccgatttgctgagcttctctaggagagcccctttcccagccagaggtggctggcaaaataatacctactgtaacaaaacatctaagatgcaataaccacacacctggtttccactggccgaaggcaactagcaataaggcaggtgggttcagacgcttaaagtgtgttgtaaatattcttttctaacctgtgttctacacagggtggcagatggcgtgccataactctaatagtgagataccacgcttgtggaccttatgctcacacagccatcctctagtaagtttgtaagacgtctgatgacgtgtgggaacttgttggaaataacagtttgctgcaaagcatcccactgccagtggattcacatctggtaacagatgcctctggggccaaaagccaaggtttaacagaccctttgggattggttcaaacctgaactgttatggaagacacttagtacctgctgatttggtagtaatgcaaacactagttgtaaggcccacgaaggatgcccagaaggtacccgtaggtaacaagtgacactatggatctgatctggggccggctacctctatctaggtgagttggttaaaaaacgtctagtgggccaaacccaggggggatccctggtttctttttactttgagtagtcatt

SEQ ID NO: 100 - DNA, 702 bp, Parechovirus A
  source 1..702: mol_type = genomic DNA
tttgaaaggggtctcctagagagcttggccgtcgggccttacaccccgacttgctgagtttctctaggagagtccctttcccagccagaggtggctggtcaaacaataccaaacgtaactaaacatctaagataacatagccctatgcctggtctccaccagttgaaggcatcttgcaataaaatgggtggattaagacgcttaaagcatggagtcaattatcttttctaactagtgatcttcactgggtggcagatggcgtgccataactctattagtgggataccacgctcgtggatcttatgcccacacagccatcctctagtaagtttgcaaggtgtctgatgaggcgtgggaacttattggaaataattacttgctgcgaagcatcctactgccagcggatcaacacctggtaacaggtgcccctggggccaaaagccacggtttaacagaccctttaggattggttaaaacctgagtaattatggaagatacttagtacctaccaacttggtaacagtgcaaacactagttgtaaggcccacgaaggatgcccagaaggtacccgcaggtaacaagagacactgtggatctgatctggggccacctacctctatcctggtgaggtggttaaaaaacgtctagtgggccaaacccaggggggatccctggtttccttattttagtgtaaatgtcatt

SEQ ID NO: 101 - DNA, 705 bp, Parechovirus A
  source 1..705: mol_type = genomic DNA
gaaaggggtctcctagagagcttggccgtcgggccttataccccgacttgctgagtttctctaggagagtccctttcccagccctgaggcggctggataataaaggcctcacatgtaacaaacatctaagacaaaataatttgccttgcacctggtccccactagttgaaggcatctagcaataagatgagtggaacaaggacgcttaaagtgcaatgatagttatcttttctaacccactatttatagtggggtggtggatggcgcaccataattctaatagtgagataccacgcttgtggaccttatgctcacacagccatcctctagtaagtttgtgagacgtctggtgacgtgtgggaacttactggaaacaatgctttgccgtaaggctttcattagccagcggaccaccacctggtaacaggtgcctctggggccaaaagccaaggtttaatagaccctaatggaatggttcaaacctggagcattgtggaaagtacttagtacctgctgatctggtagtaatgcaaacactagttgtacggcccacgaaggatgcccagaaggtacccgtaggtaacaagtgacactatggatctgatctggggccaactacctctatcttggtgagttggttaaaaaacgtctagtgggccaaacccaggggggatccctggtttccttttattttactttgtcaat

SEQ ID NO: 102 - DNA, 706 bp, unidentified
  source 1..706: mol_type = unassigned DNA; note = unclassified Potamipivirus sequence
cttattttataagtttcttgcagttggcctttttcaacgtcgtggctgacgttaaaaagccacaattccacttaccttttaccttttatgtttaatgtttgttagttttgtgatctttaacaaatagatctaaataatttgttggtaaccaatctcggatgtttcggctgcattgtagtttatttatttcattttagttgtaggtggccactacgtcctggaatcatacatggtaacatgtacctcggcggttatccactattacgctaatctaagaatatttaaatgaaaatgtaagtgttacggctgactttgggcctgatagttaaatgctcgcactgacagatagtaccctcctttaggatcgattctgttacatgggatccattttggtgccccactgattcaacctctttgttgaaaaagagttagcatactacaaattttccaaacaaaaaccctttttaatgactacaacttatgattttatgaattttactgctcttgaaaaagatattttgacattgatcgctgtactgtttcagacattcattgcatccatttttgttggctactcctcacaaactcaaaacttttccacacgagaaaccttgtttattgaattttgcctttatattttggaacttgttgttggatttattgtttgcttaattattgacctcacacctgttttaaacactacaat

SEQ ID NO: 103 - DNA, 707 bp, unidentified
  source 1..707: mol_type = unassigned DNA; note = unclassified Hepatovirus sequence
ggtctctggagagttccggagtccctcttggaggtccatggtgaggggacctgatacctcaccgccgtttgcctaggctataggctatttttccctttcccttttccctgttttgtgtaaatattaattcctgcaggctcagggttctttaatctgtttctctataagaacactcattttcacgctttctgtctgctttcttccagggctctccccttgccctaggctctggccgttgcgcccggcggggtcaactccatgattagcatggagctgtaggagtctaaattggggacgcagatgtttgggacgtcaccttgcagtgttaacttggctctcatgaagctctttgatcttccacaagaggtaggctacgggtgaaacctcttaagctaatacttctatgaagagatgctttggatagggtaacagcggcggatattggtgagttgttaagacaaaaacctttcaacgccggaggactggctctcatccagtggatgcattgagtggattgtttgtcagggctgtctctaggcttaatctcagacctctctgcgcttagggcaaacattacttggccttaaatgggattctgtgagaggggatccctccattgactgctggacttttctttggggccttaggtagtgtttgcctctgaggtactcaggggcatttaggtttttcctcactctcaaataatt

SEQ ID NO: 104 - DNA, 707 bp, Parechovirus A
  source 1..707: mol_type = genomic DNA
tttgaaaggggtctcctagagagcttggccgtcgggccttataccccgacttgctgagtctctctaggagagtccctttcccagccttgaggcggctggacaataaaagcctcaactgtaacaaacacctaagattattatattaaccccatgcctggtctccactggttgaaggcaacttgcaataaaatgagtggaaattagacgcttaaagtgtgttgtacatattcttttctaacctgtgttctacacagggtggcagatggcgtgccataactctaatagtgagataccacgcttgtggaccttatgctcacacagccatcctctagtaagtttgtaagacgtctgatgacgtgtgggaacttgttggaaataacagtttgctgcaaggcatcccactgccagcgggttcacatctggtaacagatgcctctggggccaaaagccaaggtttaatagaccctttgggattggttcaaacctgaactgttatggaagacatttagtacctgctgatttggtagtaatgcaaatactagttgtaaggcccacgaaggatgcccagaaggtacccgtaggtaacaagtgacactatggatctgatctggggccggctacctctatctaggtgagttggttaaaaaacgtctagtgggccaaacccaggggggatccctggtttctttttaatttgagtagtcact

SEQ ID NO: 105 - DNA, 708 bp, Parechovirus A
  source 1..708: mol_type = genomic DNA
tttgaaaggggtctcctagagagcttggccgtcgggccttataccccgacttgctgagtttctctaggagagcccttttcccagccctgaggcggctggtcaataaaagcctcaaacgtaactaacacctaagaagatcatgtaaaccctatgcctggtctccactattcgaaggcaacttgcaataagaagagtgggatcaagacgcttaaagcatagagacagttttcttttctaacccacatttgtgtggggtggcagatggcgtgccataactctaatagtgagataccacgcttgtggaccttatgctcacacagccatcctctagtaagtttgtgagacgtctggtgacgtgtgggaacttattggaaacaacattttgctgcaaagcatcctactgccagcggaaaaacacctggtaacaggtgcctctggggccaaaagccaaggtttaacagaccctttaggattggttctaaacctgagatgttgtggaagatatttagtacctgctgatctggtagttatgcaaacactagttgtaaggcccatgaaggatgcccagaaggtacccgtaggtaacaagtgacactatggatctgatttggggccagatacctctatcttggtgatctggttaaaaaacatctaatgggccaaacccgggggggatccccggtttcctcttattctatcaatgccact

SEQ ID NO: 106 - DNA, 708 bp, Parechovirus A
  source 1..708: mol_type = genomic DNA
tttgaaaggggtctcctagagagcttggccgtcgggccttataccccgacttgctgagcttctctaggagagtccctttcccagccctgaggcggctggttaataatagcctcaagcgtaactaatatctaagaagattgtgcaaaccctatgcctggtctccactattcgaaggcaacttgcaataagaagagtggaatcaagacgcttaaagcatagagacagtattcttttctaacccacattactgtggggtggcagatggcgtgccataattctaatagtgagataccacgcttgtggaccttatgctcacacagccatcctctagtaagtttgtgagacgtctggtgacgtgtgggaacttattggaaacaacattttgctgcaaagcatcctactgccagcggaacaacacctggtaacaggtgcctctggggccaaaagccaaggtttaatagaccctttaggattggttctaaacctgagatgttgtggaaaatatttagtacctgctgacctggtagtaatacaaacactagttgtaaggcccacgaaggatgcccagaaggtacccgtaggtaacaagtgacactatggatctgatctggggccaaccacctctatcttggtgggttggttaaaaaacgtctagtgggccaaacccaggggggatccctggtttccttttattttatcatatttaat

SEQ ID NO: 107 - DNA, 708 bp, Parechovirus A
  source 1..708: mol_type = genomic DNA
tttgaaaggggtctcctagagagcttggccgtcgggccttataccccgacttgccgagtttctctaagagagtccctttcccagccttgaggcggctggtcaataaatgccttaaatgtaactaacacctaagattgctttaacaaccctatgcctggtctccactagttgaaggcatctagcaataaaatgagtggaatcaagacgcttaaagcatagtgccagcatgcatttctaacctgcagtttttgcagggtggcagatggcgtgccataattctattagtgagatactacgcttgtagatcttatgctcacacagccatcctctagtaagtttgtaagatgtctgatgacgtgtgggaacttattggaaataacaccttgctgtaaagcatcttattgccagcggaacaacacctggtaacaggtgcctctggggccaaaagccaaggtttaacagaccctttaagattggttcaaacctgaggtgttatggaaaatattcagtacctgctgatttggtagtaatgcaaacactagttgtaaggcccacgaaggatgcccagaaggtacccgtaggtaacaagtgacactatggatctgatctggggccaactacctctatcttggtgagttggttaaaaaacgtctagtgggccacacccaggggggatccctggttttcttttattacacaattgtcatt

SEQ ID NO: 108 - DNA, 709 bp, Parechovirus A
  source 1..709: mol_type = genomic DNA
tttgaaaggggtctcctagagagcttggccgtcgggccttataccccgacttgctgagctcctctaggagagtccctttcccagccttgaggcggctggtcaataaaagcctcaattgtaacaaacatctaagattattatattaaccccatgcctggtctccgttagttgaaggcaacttgcaataaaatgagcggaaacaagacgcttaaagcatggtgtaaattaacttttctaacccacatcttgtgtggggtggcagatggcgtgccataactctattagtgagataccacgcttgtggaccttatgctcacacagccatcctctagtaagtttgtgagacgtctggtgacgtgtgggaacttattggaaacaacattttgctgtaaagcatcctattgccagcggaacaacacctggtaacaggtgcctctggggccaaaagccaaggtttaacaaaccctttaggattggttctaaacctgagatgttgtggaagatacttagtacctaccgatccggtagtagtgcaaacactagttgtaaggcccacgaaggatgcccagaaggtacccgtaggtaacaagcgacactatggatctgatctggggccaggtacctctatcttggtgatctggttaaaaaacgtctagtgggccaaatccgggggggatccccggtttccttttattttatcaatgccact

SEQ ID NO: 109 - DNA, 709 bp, Parechovirus A
  source 1..709: mol_type = genomic DNA
tttgaaaggggtctcctagagagcttggccgtcgggccttataccccgacttgctgagtctctctaggagagtccctttcccagccttgaggcggctggacaataaaagcctcaactgtaacaaacacctaagattattatattaaccccatgcctggtctccactggttgaaggcaacttgcaataaaatgagtggaaataagacgcttgaagcatggtgcaaatctacttttctaacccacactttgtgtggggtggcagatggcgtgccataattctattagtgagataccacgcttgtggaccttatgctcacacagccatcctctagtaagtttgtgaggcgtctggtgacgtgtgggaacttattggaagcaacattttgctgtaaagcatcctatcgccagcggaacaacgcctggtaacaggtgcctctggggccaaaagccaaggtttaacagaccctttaggattggtttaaaacctgaaatgttgtggaaaatacttagtacctaccgacctggtagtaatgcaaacactagttgtaaggcccacgaaggatgcccagaaggtacccgtaggtaacaagtgacactatggatctgatctggggccaggtacttctatcctagtgacctggttaaaaaacgtctagtgggccaaacccgggggggatccccggtttccttttattttactaatgctatt

SEQ ID NO: 110 - DNA, 709 bp, Parechovirus A
  source 1..709: mol_type = genomic DNA
tttgaaaggggctctcctagagagcttggccgtcgggccttacaccccgacttgctgagcttctctaggagagcccctttcccagccttgaggcggctggtcaataaaagcctcacatataaataacatctaagaatagcttcataaccctacacctggtccccactagtcgaagacaacttgtaataagatgagtggaacaaggacgcttaaagtgtagtgaaaatattcctttctaacccatgcacctcatggggtggcagatggcgtgccataactctaatagtgagataccatgcttgtggaccttatgctcacacagccatcctctagtaagtttgtgagatgtccgatgacgtgtgggaacttattggaaacaacaatttgccgtaaggcatcctaatgccagcggattcacacctggtaacaggtgcccctggggccaaaagccaaggtttaacagacccgttaggattggtttaaacctgaattgttgtgaaagatactcagtacctgctgatttggtagtaatacaaacactagttgtaaggcccacgaaggatgcccagaaggtacccgtaggtaacaagtgacactatggatctgatctggggccaactacctctatcttggtgagttggttaaaaaacgtctagtgggccaaacccgagggggatcctcggtttctatttattttatatttgctaac

SEQ ID NO: 111 - DNA, 709 bp, Parechovirus A
  source 1..709: mol_type = genomic DNA
tttgaaaggggtctcctagaaagcttggccgtcgggccttataccccgacttgccgagtttctctaggagagtccctttcccagccctgaggcggctggtcaataaaagcctcaaacgtaactaacatctaagattgatttaataacaccatgcctgatccccaccagtcgaagacaactagtaataagacgggtggaataaggatgcttaaagcatggcgtaaatattcttttctaacccatgatttcatggggtggcagatggcgtgccataactctattagtgagataccacgcttgtggaacttatgctcacacagccatcctctagtaagtttgtgagatgtctaatgacgtgtgggaacttattggaagcaacaatttgccgtacggcatcctactgccagcggattcacacctggtaacaggtgcccctggggccaaaagccaaggtttaacagaccctttaggattggttaaaacctgaattgttgtggaagatactcagtacctgctgatttggtagtaatgcaaacactagttgtaaggcccacgaaggatgcccagaaggtacccgtaggtaacaagtgacactatggatctgatctggggccaactacttctatcatggtgagttggttaaaaaacgtctagtgggccagacccaggggggatccctggtttccttttttatttcactacagccaat

SEQ ID NO: 112 - DNA, 709 bp, Parechovirus A
  source 1..709: mol_type = genomic DNA
tttgaaaggggtctcctagagagcttgcctagggccttataacccgacttgctgagcttctataggaaaaaaccctttcccagccttggggtggctggtcaataaaaacccccatagtaaccaacacctaagacaatttgatcaaccctatgcctggtccccactattcgaaggcaacttgcaataagaagagtggaacaaggatgcttaaagcatagtgtaaatgatcttttctaacctgtattatgtacagggtggcagatggcgtgccataaatctattagtgggataccacgcttgtggaccttatgcccacacagccatcctctagtaagtttgtaaaatgtctggtgagatgtgggaacttattggaaacaacaatttgcttaatagcatcctagtgccagcggaacaacatctggtaacagatgcctctggggccaaaagccaaggtttgacagacccattaggattggtttcaaaacctgaattgttgtggaagatattcagtacctatcaatctggtagtggtgcaaacactagttgtaaggcccacgaaggatgcccagaaggtacccgcaggtaacaagagacactgtggatctgatctggggccaactacctctatcaggtgagttagttaaaaaacgtctagtgggccaaacccaggggggatccctggtttccttttattgttaatattgacatt

SEQ ID NO: 113 - DNA, 712 bp, Parechovirus A
  source 1..712: mol_type = genomic DNA
cacatgagttatctgatgtcctctagcccatgttggtgtccactcatgtgtttccaatctaaccagtctaggagagtccctttcccagccttgaggcggctggtcaataaaaacctcaattgtaacaaacatctaagattattacattaaccccatgcctggtctccactagttgaaggcaacttgcaataaaatgagtgggaacaagacgcttaaagcatggtgtgaattaattttctaacccacatcgagtgtggggtggcagatggcgtgccataactctactagtgagataccatgcttatggaccttatgctcacacagccatcctctagtaagtttgtgaggcgtctggtgacgtgtgggaacttattggaaacaacaccttgctgtaaagcatcctattgccagcggaacaacacctggtaacaggtgcctctggggccaaaagccaaggtttaacagaccctttaggattggttttgaacctgagatgttgcggaagatatttagtacctgccgatctggtagtaatgcaaacactagttgtaaggcccacgaaggatgcccagaaggtacccataggtaacaagtgacactatggatctgatctggggccaggtacctctatcttggtgacctggttaaaaaacgtctagtgggccaaacccgggggggatccccggtttccttttactttattaatgccact

SEQ ID NO: 114 - DNA, 713 bp, unidentified
  source 1..713: mol_type = unassigned DNA; note = unclassified Rosavirus sequence
ggaccggcgctcacccgtttcgacgagtgaccgcctaggattctctctgcccttgctttggacgcccgccacggcgttaaactggcacttcccctcacccctaccctgtaactaagtttgcacctcgcccagacaggctgctaagacgcttgttgctacagtatgtctggatccgcgagttctccttaagaaatcttttccacctccgccggtgcctatgccggtcgagacgggttaggaccccgttggctcaggccagagacaatcggtagtagtctttctactctcgcccatgccggttgtcacaccctcactagtcttaccaaggttgtaaattgtctgtgaaagctttacatgaactctgctgtgttgtagcgatggatgtgttgtgagcggatttccccacgtggtaacacgtgcctctcagaccaaaagtcacggtgttaacagcacccgcacatctggctgccttcccccgcagcccacagctttgtgattgtttagttagtaacggaacatttggcaatcctgaactaaggttagtgcaacggctaaggatgccctgaaggtacccgcaggtaacgttaagacactgtggatctgatcaggggccctcggtgcgcgtgctttacacgcgtagccagggttaaaaaacgtctatgccgtttcccccccgggagggggggttccttacccccatcacaattggcatt

SEQ ID NO: 115 - DNA, 717 bp, Megrivirus E
  source 1..717: mol_type = genomic DNA
gtttgggggggcgttcccccaggggctcctttccggtgtgaggcttggcaacctcatatcgttactctgccgaccagtctgggtcgtgtggccacacaatgggattcgttctgttgtgtagagtcacatggcattactgggctgatcggtggggatccgttgccacccctaaacccttacatttactggactgcttttcttggccccggaatgattcgctcacccgcgatgaggactgttgttcttattatggcaggattacgcgtctggtccgcgtaaggactaattcctatgtttatacgttactaccttgttctgaacggtgggcgccaccccgcctagtaggatcctggcttatcgtgtagacctctagggaccacattagctagagtgtaggctgctatggatggagtagtgacccctttttgggtatcactctctaagactccggaatgtgtcatagtacgctggaaatccttacttgtttttccatgagggggaggtggtgctgaaatattgcaagccacccctcggttaaaacagtttggtgccgcttatgccatattaccgccccttgtagttgggctgtttttgcagctccgggttagtagagtaccatagtggacgcggtgttgggaatcaccgccttggctgcacactgcttgatagagctgcggctggtcaagctaattgtggtataaccagttgatttggcat

SEQ ID NO: 116 - DNA, 736 bp, unidentified
  source 1..736: mol_type = unassigned DNA; note = unclassified Hepatovirus sequence
ttcaagaggggtctccggggatttccggagtccctcttggaagtccatggtgaggggacttgatacctcaccgccgtttgcctaggctataggctaaattttccctttccccttccccttccttgttttgattgtaaatatcaattcctgcaggttcagggttcttaaattggcattaaatttgtttctctataagaacactcaattttcacgctttctgtcttctttcttccagggctctccccttgccctaggctctggccgttgcgcccggcggggtcaactccatgattagcatggagctgtaggagtctaaattggggacacagatgtttggaacgtcaccttgcagtgttaacttggctttcatgaatctctttgatcttccacaagaggtaggctacgggtgaaacctcttaggctaatacttctatgaagagatgctttggatagggtaacagcggcggatattggtgagttgttaagacaaaaaccattcaacgccggaggactgactctcatccagtggatgcattgagtggattgactgtcagggctgtctctaggcttaattccagacctctctgtgcttggggcaaacatcatttggccttaaaaggggttctgtgagaggggatccctccattaacagctggactgttctttggggccttatgtggtgtttgccgctgaggtactcaggggcatttaggtttttcctcattctcaaataata

SEQ ID NO: 117 - DNA, 737 bp, unidentified
  source 1..737: mol_type = unassigned DNA; note = unclassified Hepatovirus sequence
cttcaagaggggtctccggaggtttccggagcccctcttggaagtccatggtgaggggacttgatacctcaccgccgtttgcctaggctataggctaaatttccctttccctgtccttcccttatttccctttgttttgcttgtaaatattgattcctgcaggttcagggttctttaatcatgtttccctataagaacactcaattttcacgctttctgtcttctttcttccagggctctccccttgccctaggctctggccgttgcgcccggcggggtcaactccatgattagcatggagctgtaggagtctaaattggggacgcagatgtttgggacgtcaccttgcagtgttaacttggctctcatgaacctctttgatcttccacaaggggtaggctacgggtgaaacctcttaggctaatacttctatgaagagatgctttggatagggtaacagcggcggatattggtgagttgttaagacaaaaaccattcaacgccggaggactggctctcatccagtggatgcattgagtggattgattgtcagggctgtctctaggtttaatctcaagacctctctgtgcttagggcaaacaccatttggccttaaatgggatcctgtgagagggggtcccctccattgacagctggactgttctttggggccttatgtggtgtttgcctctgaggtactcaggggcatttaggtttttcctcattcttaaacaata

SEQ ID NO: 118 - DNA, 742 bp, unidentified
  source 1..742: mol_type = unassigned DNA; note = unclassified Enterovirus sequence
ttaaaacagctctggggttgcacccaccccagaggcccacgtggcggctagtactccggtaccacggtacccttgtacgcctgttttatactcccttcctccgcaatttagaagctcatgatcaagttcaataggagggggtacaaaccagtaccaccacgaacaagcacttctgtttccccggtgatgttgtatagactgctcgcgcggttaaaagcgacggatccgttatccgctcatgtacttcgagaagcctagtattacctcgggatcttcgacgcgttgcgctcagcactcaaccccagagtgtagcttaggtcgatgagtctggacattcctcaccggcgacggtggtccaggctgcgttggcggcctatctatggctaacgccataggacgctagttgtgaacaaggtgtgaagagcctattgagctacatgagagtcctccggcccctgaatgcggctaatcccaacctcggagcaggcgatcacaagccagtgattggcctgtcgtaatgcgtaagtccgagacggaaccgactactttgggtgtccgtgtttccttttatttttatcatggctgcttatggtgacaatcagtgattgttgtcatagagcgaattggattggccatccggtgaaaacaaagtcaattactttctcacttgttggacctacacccgatacgctttacccccaagctaattaaaattattagaagttaggactacggtgtcaca

SEQ ID NO: 119 - DNA, 743 bp, Enterovirus C
  source 1..743: mol_type = genomic DNA
ttaaaacagcctgtgggttgttcccaccccagaggcccacgtggcggctagtacaccggtatcacggtacccttgtacgcctgttttatactccctaccccgtaacttagaagcaataatccaagttcaatagtaggggtacaaaccagtaccaccacgaacaagcacttctgtttccccggtgatatcgtatagactgtacccacggtcgaaaatggtggatccgttatccgcttttgtacttcgagaagcccagtaccatcttggaatcttcgatgcgttgcgctcagcactcgaacccggagtgtagcttaggccgatgagtctggacaatccccaccggcgacggtggtccaggctgcgttggcggcctacctgtggcccaaagccacaggacgctagttgtgaacaaggtgcgaagagcctattgagctacaaaagagtcctccggcccctgaatgcggctaatcccaaccatggagcaggtgatcacaaaccagtggtaagcctgtcgtaacgcgcaagtccgtggcggaaccgactactttgggtgtccgtgtttccttttatttttgtatggctgcttatggtgacaatcaaagattgttatcataaagcgaattggattggccatccagtgagagtaaagcacattatttacttgcttgttgggtttgcccctttgatttgtaacactctttatctaccttatattgtacttttggttagacaacagtatcacg

SEQ ID NO: 120 - DNA, 743 bp, Enterovirus C
  source 1..743: mol_type = genomic DNA
ttaaaacagctctggggttgcacccaccccagaggcccacgtggcggctagtactccggtattgcggtacccttgtacgcctgttttatactcccttcccgtaacttagacgcacgacaccaagttcaatagaagggggtgcaaaccagtaccaccacgaacaagcacttctgtttccccggtgatgttgtatagactgcttgcgtggtcgaaagcgacggatccgttacccgcttatgtacttcgagaagcccagtaccacctcggaatcttcgacgcgttgcgctcagcactcaaccccagagtgtagcttaggctgatgagtctggacgtcccccaccggtgacggtggtccaggctgcgttggcggcctacctatggcttacgccatgggacgctagttgtgaacaaggtgtgaagagcctattgagctacataagaatcctccggcccctgaatgcggctaatcccaacctcggagcaggtggtcacaaaccagtgattggcctgtcgtaacgcgcaagtccgtggcggaaccgactactttgggtgtccgtgtttccttttattttattatggctgcttatggtgacaatcacagattgttatcataaagcgaattggattagccatccggtgaaagtgagactcattatctacctgttcgctggattcgctccattgagtgtgtttactctaagtacaatttcaacagttatttttaatcagacaattgtaccata

SEQ ID NO: 121 - DNA, 744 bp, Enterovirus C
  source 1..744: mol_type = genomic DNA
ttaaaacaagtctggggttgttcccaccccagaggcccacgtggcggccagtacaccggtatcacggtacccttgtacgcctgttttatactccctaccccgtaacttagaagcaacaatccaagttcaatagtaggggtacaaaccagtaccaccacgaacaagcacttctgtttccccggtgataccatatagactgtacccacggtcaaaaatggtggatccgttacccgcttttgtacttcgagaagcccagtatcatcttggaatcttcgatgcgttgcgttcagcactcgaacccggagtgtagcttaggtcgatgagtctggacaatcctcaccggcgacggtggtccaggctgcgttggcggcctacctgtggcccaaagccacaggacgctagttgtgaacaaggtgtgaagagcctattgagctacaaaagagtcctccggcccctgaatgcggctaatcccaaccatggagcaggtggtcacaaaccagtgactagcctgtcgtaacgcgcaagtccgtggcggaaccgactactttgggtgtccgtgtttccttttattttatgtatggctgcttatggtgacaatcaaagattgttatcataaagcaaattggattggccatccagtgagagtaaaacacattatctacttatttgttggatttgtccctttaattcatcacactcttcatctaatttacattgtggttctaattagacagcagtatcaca

SEQ ID NO: 122 - DNA, 744 bp, Enterovirus C
  source 1..744: mol_type = genomic DNA
ttaaaacagctctggggttgtacccaccccagaggcccacgtggcggctagtactccggtattacggtacccttgtacgcctgttttatactccctccctcgtaacttagaagcacaaaaccaagttcaatagaagggggtgcaaaccagtaccaccacgaacaagcatttctgtttccccggtgatgttgtatagactgcccgcgcggttgaaagcaacggatccgttacccgctcaagtacttcgagaagcctagtattaccttggaatcttcgatgcgttgcgttcagcactcgaccctggagtgtagcttaggctgatgagtctggacgtccctcaccggtgacggtggtccaggctgcgttggcggcctacctatggctaacgccataggacgctagttgtgaacaaggtgtgaagagcctattgagctacttgagagtcctccggcccctgaatgcggctaatcctaaccatggagcaggcggtcacagaccagtgactagcttgtcgtaatgcgcaagtctatggcggaaccgactactttgggtgtccgtgtttccttttatttttattatggctgcttatggtgacaatcattgattgttatcataaagcgaattggattggccatccggtgaaagcgagacttactatttacttacttgttggacttaccacacttaatacatttattctaggtgtcacttgtatagcaattagaatcaaacagttgcatcata

SEQ ID NO: 123 - DNA, 744 bp, Enterovirus C
  source 1..744: mol_type = genomic DNA
ttaaaacagctctggggttgttcccaccccagaggcccacgtggcggctagtacactggtatcacggtacctttgtacgcctgttttatactccctcccccgcaacttagaagcatacaattcaagttcaataggagggggtgcaagccagcgcctccgtgggcaagcactactgtttccccggtgaggccgcatagactgttcccacggttgaaagtgtccgatccgttatccgaccatgtacttcgagaagcctagtaccgctctggaatcttcgacgcgttgcgctcagcactcaaccccggagtgtagcttgggccgatgagtctggacagtccccactggcgacagtggctccagctgcgctggcggccgcgacctgtggcccaaagccacgggacgctagttgtgaacagggtgtgaagagcctattgagctacatgaagagcctccggcccctgaatgcggctaattctaaccatggagcaggcagctgcaacccagcagccagcctgtcgtaacgcgcaagtccgtggcggaaccgactactttgggtgtccgtgtttccttttattcttgaatggctgcttatggtgacaatcatagattgttatcataaagcgagttggattggccatccagtgtgaatcagattaattactcccttgtttgttggatccactcccgaaacgttttactccttaacttattgaaattgtttgaagacaggatttcagtgtcaca

SEQ ID NO: 124 - DNA, 746 bp, Enterovirus C
  source 1..746: mol_type = genomic DNA
ttaaaacagcctgtgggttgtacccaccccagaggcccacgtggcggccagtacaccggtattacggtacccttgtacgcctgttttatactccctaccccgtaacttagaagcaataacttaagttcaatagtagggggtacaaaccagtaccaccacgaacaagcacttctgtttccccggtgacattgtatagactgtgcccacggttgaaaacgatggatccgttatccgctcttgtacttcgagaagcctagtaatactttggaatcttcgatgcgttgcgctcagcactcatccccagagtgtagcttaggccgatgagtctggacattcctcaccggcgacggtggtccaggctgcgttggcggcctacctgtggcccaaagccacaggacgctagttgtgaacaaggtgtgaagagcctattgagctacaagagagtcctccggcccctgaatgcggctaatcccaaccatggagcaggtgatcgcaaaccagcggttagcctgtcgtaacgcgcaagtctgtggcggaaccgactactttgggagtccgtgtttctctttatttttacttatggctgcttatggtgacaatcatagattgttatcataacgcgaattggattggccatccggtgatatacaaacacattgtttacctatttattgggtttacacctttaagttctttcactctacaccttactcgtgttgtgttattaaccagacagtggtgccaac

SEQ ID NO: 125 - DNA, 748 bp, unidentified
  source 1..748: mol_type = unassigned DNA; note = unclassified Rabovirus sequence
ggagttttagtggtgttccaacactatgcgccatgatgtgttctacggaacatgttatgacgtatctttcatctaccccaacccttgtgtcaaccgatacgcctacacaggtgggtaaagcaccggcccactgaatggaacaaaatgctaggtgcaaagtcaggcccataggccatcggtcgaagcccgcttgggaataagactgatggattaccctattctggcgcctgaccacttgtttcttttctgaatcacacacctgtgtgaacggtggacctgcaccgtaactcttctagcctactaccacacttgtggaactataggggcacaggaacttcaaccaagtgctgttggaatggagaaaataatccaatcctgaaacgtcatggatccacactctgtgtggggctactagcctgcggaacaacacatggtaacatgtgccccaggggccgaaagccacggtgataagatcaccctagtagtttgagattgtatcaatgttcatgtcttagtaaggggaggtgaaatctatctgtgacaccggattactggttgtcgtatagcggctgaaggatgtcctgctggtacctttagggaaccttaagagactattgatcgaagcaggagcctggttggtctctcccactccaggttaaaaaacgtctaggccgtggaaccgggcgggaggcccggttttcctcccaaaattataatattgtgtatggtgacaactgaaggcttaaca

SEQ ID NO: 126 - DNA, 751 bp, Aichivirus E
  source 1..751: mol_type = genomic DNA
ttgaaagaaactccgggtattaaccatacccggagttttggcagggtgttccaacctgtcctggccatgcatttatctacggatatttgcatgacccgctttctatcgccccaacaatcccctttgtaaccacaagctttactcaggctagcagcccgactagctgtttggaagaaaaggctagggcacacaccaacaacaccgaccccactggtcgaaggccgcttggcaataagactggtggaacagggtcgcctgtagttgtttggaacattctttctaatgactttgtcagcggtgctactcacaccgtaactcttctaccctatccccacgcttgtggaactaggaggggatgagtgattcaagtaagtactgtcagaatggtgaaaatgatctgattctgaaacgctatggatccatcgaaagatggggctacacgcctgcggaacaacacatggtaacatgtgccccaggggccgaaagccacggtgataggatcacccgtgtagtttgagatcatatcaatgttcatagtctagtaagatgatttgaaatctaactgagctgatggctaactgcttgtcttattgcggcctaaggatgtcctgcaggtacctttagataaccttaagagactattgatctgagcaggagccaaagtggtctttcccagctttggttaaaaaacgtctaagccgcggcagggggcgggaggccccctttcctcccaaaacttaatattgattgt

SEQ ID NO: 127 - DNA, 751 bp, Enterovirus C
  source 1..751: mol_type = genomic DNA
gaaattaaaacagctctggggttgttcccaccccagaggcccacgtggcggctagtacactggtattacggtacccttgtacgcctgttttacacccctttcccccgtaacttagaagcttttaaattcaagttcaacagtgagtggtacaacccagtactactatgaacaagcacttctgttaccccggtgagattgcataagctgtccccacggctaaaagcgattgatccgttatccgctcttgtacttcgagaagcccagtaaaaccttgggatcctcgatgcgttgcgctcaacactcaaccccagagtgtagcttgggctgatgagtctgggcattcctcaccggcgacggtggtccaggctgcgttggcggcctacctgtggcccaaagccacaggacgctagttgtgaacaaggtgtgaagagcctattgagctacaagagagtcctccggcccctgaatgcggctaatcccaaccacggagcaggtgattgcaacccagcaactagcctgtcgtaacgcgcaagtctgtggcggaaccgactactttgggtgtccgtgtttccttttattacataatggctgcttatggtgacaatcatagattgttgtcataaagcgagttggattggccatccggtgagaattaaaacaattatttacttgtttgttggatttgttcctatacacacccatacaccttgcttgattgaagtaattctgttgataagacaacactattacg

SEQ ID NO: 128 - DNA, 752 bp, unidentified
  source 1..752: mol_type = unassigned DNA; note = unclassified Salivirus sequence
tttcctcctttcgaccgccttacggcaggcgggtccgcggacggcttcggcctacccgcgacaagaatgccgtcatctgtccttatcacccatattctttcccttcccccgcaaccatcacgcttactcgcgcacgtgttgagtggcacgtgcgttgtccaaacagttacactcacacccttggggcgggtttgtcccgccctcgggttcctcgcggaaccctccctcttctctctccctttctatccgccttcactttccataactacagtgctttggtaggtaagcatcctgaccccccgcggaagctgccaacgtggcaactgtggggatccaggcaggttatcaaaggcacccggtctttccgccttcaggagtatccctgccggtgaattccgacagggctctgcttggtgccaacctcccccaaatgcgcgctgcgggagtgctcttccccaactcatcttagtaacctctcatgtgtgtgcttggtcagcatatctgaggcgacgttccgctgtcccagaccagtccagcaatggacgggccagtgtgcgtagtcgctttccggtttcccggcgcatgtttggcgaaacgctgaggtaaggttggtgtgcccaatgcccgtaatttggtgacacctcaagaccacccaggaatgccagggaggtaccccacttcggtgggatctgaccctgggctaattgtctacggtggttcttcttgcttccacttctcttttttctggcatg

SEQ ID NO: 129 - DNA, 754 bp, Parechovirus C
  source 1..754: mol_type = genomic DNA
gaaagggggccaccctgcccatagggcagggtccttcttggctgggtggctcgtatccactccatgggttgtgcctatccggtcatccccctttccccacagccggtgtgggttctaatcggctcctactaaacacctaagcatcactgcgcctctatctctcctatccacaggtctaagacgcttggaataagacatgtgggtgcaataggaagattagctagtccaatctctccttccagctacgcttctcccttcgatgagcgtagggggggcccccacctccctcatctctggatagggctcttgctacggggctttcccgtctggaccagcaggcccactggtgcgcttccattcaagtttagtgtgcattactgtctgaaatattgctttgctaggatctagtgtagcgacctgcatattgccagcggacttccccacatggtaacatgtgcctctgggcccaaaaggcatgtctttgaccgtatgcagtacaaccccagtataggtcctttctatggcagtatggatctcagtgatgagtctatacagaatatggaagtggttcggatatgtcagcccgaaggatgcccagaaggtacccgcagataaccttaagagactgtggatctgatctggggcccaccaccttcgggtgggtagaagctaaccatgccttgggttaaaaaacgtctaagggctgaccagacccgggggatccgggttttccctatcttgacctactctaatc

SEQ ID NO: 130 - DNA, 762 bp, unidentified
  source 1..762: mol_type = unassigned DNA; note = unclassified Hepatovirus sequence
tttccctttcccttttttcaagaagggtctccgggaatttccggagtccctcttggaagtccatggtgaggggacttgatacctcaccgccgtttgcctaggctataggctaaattttccctttcccttttccctttcctattccctttgttttgcttgtaaatattgatttgtaaatattgattcctgcaggttcagggttcttaaatctgtttctctataagaacactcatttcacgctttctgtcttctttcttccagggctctccccttgccctaggctctggccgttgcgcccggcggggtcaactccatgattagcatggagctgtaggagtctaaattggggacacagatgtttggaacgtcaccttgcagtgttaacttggctttcatgaatctctttgatcttccacaaggggtaggctacgggtgaaacctcttaggctaatacttctatgaagagatgccttggatagggtaacagcggcggatattggtgagttgttaagacaaaaaccattcaacgccggaggactgactctcatccagtggatgcattgagtggattgactgtcggggctgtctttaggcttaattccagacctctctgtgcttggggcaaacatcatttggccttaaatgggattctgtgagaggggatccctccattgccagctggactgttctttggggccttatgtggtgtttgccgctgaggtactcaggggcatttaggtttttcctcattcttaaataata

SEQ ID NO: 131 - DNA, 788 bp, Poecivirus A
  source 1..788: mol_type = genomic DNA
aggtcggtgctgtgacttttgtagttggattggatcctcactttgggtgaggttccactccaagtttgagtgttttgtgtgtgtgtgggcataattaattgtttattatgggaactacacaatcgcaacacgcgcaagtttgtagtttgattggcgtgcaaatgtcaaatcaagcatataacacaatttggtggctgttggtgtttgttataggaattttggttgtgttgaaattgtggatgtgtaggaaatatgcacaattacgtcagcgtcaggagttttataacctggcgcaacaccaaaatggtcttcgcgctttaacatcaccagcgaggtgtaaacaaattgaagttgaattagatcgtgtataggccagggaaccatccctcccaacgccacatcttgtggggaagttgggataatggtgggtctatatgaattggtctgtagacccacagtgaagagtgaatagtatgcttgcggttccatttgttaatggtctagcatgggtgggggcggcaaccccgtgaggggttccccactggccaaaagcccaggggttagtcatttcaaccaaggaagctggtaacctggtgacctgaacttgagtggtgagacccccttgctagagtgtgtaaaccgattgtaagcattttgtttgcttagtatctgtggtataagcagtcaattttgtataggctcaaggctgtggtagttagtagatgcccggaaggttattactgatccggggaccgtgactatacattaggtaaaccggtttaaaaacc

SEQ ID NO: 132 - DNA, 816 bp, unidentified
  source 1..816: mol_type = unassigned DNA; note = unclassified Picornaviridae sequence
gttcagttgccatccccgttcgggtggtttctcacggctaggcggaagtccagcccattcaacgtgagtccgggagttgggatatccaaaaaggagtcccgttttacttacacaccctcatgtctagccacagagggactgtgcggtagccactccgcacaaacggaaaagaggccagaggggatactcccccctggaccccttttccgtttgtgcggagtggcgaccgcacaggcgttaggctgctaagtagtctgcaagtagcttgcccactctctggggacaaagttctctggattggggtaagtgaagtgcgtgggctaacttggtggctgtagcccggatctggccggcctatgaaaccacggatccgcttcttttccctataccttttcccgagtgtttgtctgcaacttgttaagtgatttcttggtttgtttgacacaatcgctttggattttgttcttattttggtattttgaccactctagtatttgtgttctacctgaaattcccttgcaaggggtgtagtagggtgttgctcgtactagttgtggactccctctgtggctagacatgagggtgtgtaagtaaaacgggactcctttttggatatcccaactcccggactcacgttgaatgggctggacttccgcctagccgtgagaaaccacccgaacggggatggcaactgaacctagtagggctcgtaggaggcttgcacatacaccagattgggaattctggtcttgctcatgactgggtgatagccttgcggcggatcaagtcacagttgtaatccgttgatttgcaccc

SEQ ID NO: 133 - DNA, 833 bp, Megrivirus D
  source 1..833: mol_type = genomic DNA
tttgacaacctggcaaccctatctctaggtaggatgctgtctttggcccccgcctcccccatcctcccgaccatatctctattgggatgtgttcgggtcgtcacggatccgacattcctaccggggtccttctggctacggctggtctgactttggtggatgtgtgacggtgtaattactttccggatcccactttcctattataactctttcatcccaaggttagggaaagaacctggctcggtaccaccagaccctccgccacgctagtggactctccggagataacggtaccccctttgtagtcacctgtgctggtgaagaaccacctagtattgcttgggtgcgtgccgcctagcttccatttcttctggagcactgtgcaatgaggtttccccacttggtaacaagtgcctcaggtcccgcaaggatactgtggggtggtgtgaccgcagggagctgtctccacggctcctctaatgttacgccgctatccacaggccagtgcgtgtcatcgatcccggatgacagagctagtattgcgaacccccaagtaagaaaagtggctagtaacctgatagctggtgaagagggtgggtcagttgagtagatgccctagaggtacccgaaaggatctgactagggacccgtgactatacattaggtaaaccgggtataaaaaccatgaaaaactgaccacttttcttttaacctcttctttctttttatgtgtgttaagtgttttgagtttggactgtaccttgcccgcctttcttggattttctctatcgctcttcttacacctactgttatcaaggcactctttagagata

SEQ ID NO: 134 - DNA, 894 bp, Erbovirus A
  source 1..894: mol_type = genomic DNA
ttttgtaactgaggttttgacatctcattgtttttgagccccaacgtcttggtggatgctcaaagaagattactcttgatgcttggctctcagaaagaatggcacctcaatgttttgagacccgattcttttgagtcgagaccatttccccttccctgaagattgcttttcttccaactaaacccctattgatgtgttggtcgtttgccaatcggagggcgacaggcacaggtcgctccgagttctagtagtgtgggaacttgttactactgatgaaacgaggtagtgacactcagtacctgcgaacgaggtcggggccctcccttcttccttcacccaactttcacttttcgttccactttagcaggggtcttctttctatccccctggcggcattggaactagccgtcgcgtcttaacgcgcagccctgaaggccccacaccttgtggatcttgccgtgggtatgtttctggcatgtgtttctcaagcctgcaaccgaagccgaacagccacatgaacagtttgagcgtggtagcgctgtgtgagttggcggtggatccccctcgtggtaacacgagcccccgtggccaaaagcccagtgtttacagcacctctcacatccaggacgaccccatcctggcgctcactcttagtagtatggcttagtacgcattaggtggtaagccgagctctccctcggccttgttctgaatgcacacatgtctaggggctaaggatgtcctacaggtacccgcacgtaaccttcagagagtgcggatctgagtaggagaccgtggtgcactgctttacagatgcagcccggtttaaaaagcgtctatgcccctacagggtagcggtgggccgcgccctttccttttaaaactacttgttct

SEQ ID NO: 135 - DNA, 897 bp, unidentified
  source 1..897: mol_type = unassigned DNA; note = unclassified Erbovirus sequence
ttttgtaactgaggttttaacatctcattgtttttgagccccaacgtcttggtggatgctcaaagaagattactcttgatgcttggctctcagaaagaatggtacctcaacgtgttgagacccgattcttttgagtcgagaccactcccccttccccttgaaagattgcttttcttccaactaaacccctatcgatgtgttggtcgtttgccaatcggagggcgataggcacaggtcgccctacggtctagtagtgtgggaacttgccgctactgatgaaacgaggtagtgacacttagtacctgcgaacaaccctagggcaactcccttcttccttcacctacttttcctttccgttctgctttagcaggggtcttctttctatccccctggcggcattggaactagccgttgcgccttagcgcacagccctgaaggccccacaccttgtggatcttgccgtgggcatgtttctggcgtgtgtttctcaagcctgcaaccaaatgccgaacgggcacgtgaacagtttgagcgtggtagcgctgtgtgagttggcggtggatccccctcgtggcaacacgagcccccgcggccaaaagcccagtgttagcagcacctctcacatccagggaaaccccaccctggcgctcactcttagtaatgtgtcttagtacgcactaggtggtaagccgagctctccctcggtcttgtactgaatgcacacacgtctaggggctaaggatgccctacaggtacccgtacgtaaccttcagagagtatggatctgagcaggagaccgtggtgcgctgctttacagtcgtagcccggtttaaaaaacgtctatgcccctacagggtagcggtgggccgcgccctttcccttttaaaacttggtttc

SEQ ID NO: 136 - DNA, 1000 bp, unidentified
  source 1..1000: mol_type = unassigned DNA; note = unclassified Sicinivirus sequence
gggtgggatggatcccgttgcgtgcctgcagccgctcggtgtccatccttcctgttacccaccatgtctggtggtaccccccggtcccttccctatccccccatacagccgggacggaccacttacctccgggtctgtggcccaaccccgactcggggttgtggcggtggtcacagctccggctgtgacctcctaaccactcccttcacctactcccttatatagaaacttaagtttgactccccctatcccaaggtcttggctcatgccctttaaggctatctagcacaaacactctttgtttggcgtctggagacccactgagctaccactcatccgcgctcaatgtaacccccattagtattcgtgcaattttaatagtagttctgctccggcagcatctaagtgcccagggagcccaactggtgacagttgccctggggcccgaaaggctaggtggcaggggcccggtcaagcaaggggttcccaccctgagctgatcccgcggtcccgaagccaccctttggatggaggttccacacccgactgctatttcttttgcccggtgaacctggctggaaacatttagtttatggatttgttggtctgtggtgattagtagaccccctggaggtacccgtttggatctgaccagggacccgtgactatgccgttccggtaatccgggtttaaaaccatgaacgtcaccactcgctttcttttccttgttcttatttcttttatattgcaaactattagtgagaattcgtgttccctgacctctgcgtttggtctgcattctcagttattcagtttggctggtctggattgtttgtttagatgctcctagagcttctgctggttgttgtcacacttgttatagtcgttgcttctcccggcgagttttaccagttgcttgctatctgcacctacaacttcctgttgatctttctctggctagttggcttgattgaactttccaactatcctaccattcaac

SEQ ID NO: 137 - DNA, 1000 bp, unidentified
  source 1..1000: mol_type = unassigned DNA; note = unclassified Sicinivirus sequence
atacctttaccttcccccactcactgatcggtgccaaccccaactccccagtgtcagatgcttttacaaactttatgctatggcgcgctggagtggcagtccacatttccacgtcggccagccccgctatggcaggagcgctactcgtggtggcatcacccgagggctttgaggacgtgcaacagcgcccatggaatgcgcaagttagcgggctaactacaatcccatatgtacttcttaacctgtgccaatccaattcagccactgtaatcctccctccttgtacagtcactccgtttgatgatgcccgctcccatacatcttggtctgtgcgcgtgtatgtcttcacacagctaaatgtccctaccggcgttgcaaatcaaatcacaattcaattgatgtttgctccccttgcttcccggtttttgtttgcatgtgttcccataaagcaccacctgcgcacccgcatactacccggttccggggatggctattcatttaacatcccccagaaccagggcgtccctatggctcaatatcttcctgaacatgagtccgcagactacatccctgggcattttgataattttgcacggtttgctaacgcccccgggctcttgcgcactgtgcgttggctctctgagtatactcccaacacacctcttcttcggcttaatttgaattctattagtctcggtcccgatacccacacccccttatcctatgtacttagtgcttttgctcaacaacgtgggtctctctcttttgatttggtgtttgttggggcccaggtccaatctgggcgcctgctcatatctataacccccccctcgcaggcccctcctgccagtgtcgaggaagccctccgtggccattccctgacctgggacgtgactgtgtcttgctgcagctcatttcacgcccccttcttctctgcgactgcctggcgatctctagctattgatggatccgctacaaaaactctctacaattcgtgggg

SEQ ID NO: 138 - DNA, 1000 bp, unidentified
  source 1..1000: mol_type = unassigned DNA; note = unclassified Cardiovirus sequence
ccccacggtaaccccctttggacgcgggacctgcgatagtgccaaccccagcctttcctacacccgactcccgaccctaacccagggtcctcggaagaggatcatacatctcatcccctgaatgctgactaatcagaggaaagttagcattttccggcccaggctaagagaagtagataagttagattcaaattgatacaacatccccttgacgaattcgcaacgaaaagtcgtccctcacttgccgcttgatcacacccacgaactcacaattcggcccctcgtgacaagccccttgttgaaacgacctctttcaatgcgacgtggttggagatttgtcatcttacgactccgacgtaactaccgtcatgcctccccgattatgtgatgctatccgccctgctgggtggagcattctcgggttgagtaacctacatcctttactccttggactccggtcccccggtctaagccgcttggaatatgacagggttattttccaaacatcttctttctactcttaagtgttctatacttaagaagggtatgtgttgccccttccttcttggagaacgtgcgcggcggtctttccgtctctcgaaaagcgtgcgtgcaacatgcagagacctgtgaagaaagcagtctttgaactagccttagtgcagacaagaaactggctgtagcgacctcacactagcagcggacacccctcctggtaacaggagcccctgcggccaaaagccacgtggataggatccactggtgtgagcggtgcatccccagcaccctggtttcttggttgtactctggtgaacccagagatggcaatcttaagcaactctgtagagaagccaagaatgtccggaaggtaccccgcttcggtgggatctgatccggagactcgtccacagtgctctacactgtggctcgggtttaaaaactgtcacagcttctccaaaccaagtggtcttggttttccctttttactcattgtgtcacg

SEQ ID NO: 139 - DNA, 1000 bp, Mischivirus C
  source 1..1000: mol_type = genomic DNA
aagcttgcttcaccagaattgctaggggcgaaccgacaacaccttgttgagtttccgtcccgagacaattcatacaagttccaagactcatgaagcaattggtgcgtactgacgattggtttggctcgagcacgtgttccgtccttgggataatacacaacgctaagtatccaagaaaggccttgtgtagtccctcacgattatgtcatgtctcgatgtcactccacgtggagtacaaacctctttccatctgtctaagcttttatggagtctcccacgattatgtgctctcaatcgtggttgtcgcgcggtctagttctcagcgcgaagtttaagctaagcaccctcgggcgttcccggattatgtgatcacatcaatttgatggctggtcaccacgcaacgcctggagagatactcttacttttctcttaagatccccggtcatttgacgcttgtaggatgatagggttattttccactataaatactttcatactcttggatgttctatatccaagacgggaggacctaccccgtaccccttagaggtgagatgccaagaacaggccctttctgttctctcgacaatggcatcataggcaacaagcatcacaccaagattgctaagttttgttaagagttcttcaagctatagggtggctgtagcgaccttctgatgcctgcggatttccccacggagcgatccgtgccacaggggccaaaagccacggctaacgcccatcaggagcggcacttaccccgtgccccacccttgaaacttgaatgttcacactggcttctctcggctttctgaactgtctgcttgttggggccccgaaggatgccctggaggtaccccattttatgggatctgaccaggggacacctcagctctctaagttgctggtgtttaaaaaacgtctaagggcccccaccccttaggtggagggatccacctttcctttattttttaaaactcttttatggtcacaattgttt

SEQ ID NO: 140 - DNA, 1000 bp, unidentified
  source 1..1000: mol_type = unassigned DNA; note = unclassified Picornaviridae sequence
actaacaggtgaaccctgtgagtttccggcccaggatttaggatgacatgttccaagtcagatgccaacgacttggtaaggacgaatttgcccgcattatgctacagttcccgcccgggacaactgacaccccattaagctacaacatggctgaaaagggtgttgggtccccccggattgtgtctgttcatagtgtgtgtaacgtggtttaccatctccactaacattggactaagcatttcatctttcctccccgattgtgtactcacttggctaacgctgggtggtcgcggttgggtccttgatttactttttctcgtctaagcattccaactgtcctccccgattatgtgctcattcagttaactgctgggtggtcatgactaacatcgaggaatcttctgtctacgcttactttgagctccggtcgcttgacgcttgtagggcgatagggttatcttcctgacaacatctttattctacctccataggctctatctatggagacggagtgtggcacccgtcccttctttgggagcttcggtagtgacgccctttgtcactctcgccagccgaggcatgcctggtgccaggtagcaaagaaagtatatgcttaaggacttgactgatttagcgcaagagtttgtagtgatgtccatagtgtctgcggatcccccacacggcgacgtgtgccgcggaggccaaaagccacggtgttcacagcacccctatggatgcccacagaccccagtgggcactcttgttgccggactttcaggaaattaggtataggctcttctcaaactcctggcattggactaggtaagaatgccccggaggtaccccagtactccttcgggagtctgggatctgaccgggggccccacaaacatgctttacgtgtttcgtgcggtcaaaaattgtctaactagtcccaaccttgaacaagggattgttctttccttttattactgagactggcctatggtgacaacagaga

SEQ ID NO: 141 - DNA, 1000 bp, unidentified
  source 1..1000: mol_type = unassigned DNA; note = unclassified Picornaviridae sequence
aatagagttttgccattctctaacttgtcaagatgggcacaatgatgctttgtttaacaaggctgatttttccttttgtaatatgagtggaattgtgttccactctattcttcttttatatacatcttatgtatgagactgactgcgtgtataagagaggtaagcaactaagacttgtaaccctcggagtgggttggaatgctgagctctacgcatgtggcgtagagacgatctcgggaatctgtctaaaagttgacataccgacctgtcgagactaataactcgattccattttaaatttccttcgtgttttagtcactttgtacacctaaaggggagtggcagtgggtctggatcctcattgttctgcaatgggttgtatcgctggtttaccacgtaagtccgcaaaaataggatcccatgttagagtgggaggaaggagcagtattagggctcctggccaaccctaaacaaagtgaatacattgtaaggtatgagtcatattactcaaccctttaaaggtgtaagtgttgatcttgtttcctggtaggctacgggtgaaaccaggagcgtagggagaccgtgaataatggtctttctgcaggggagacggaaatggtgtgaggtattccagtcatcgtttagatgccgtgtctaaatcactgtgccccatctgtaatcccaacatgcgacacccaaacttttaattgaatgggtagtttgatgagtgccccaaggtgtataggtcttgtgattgataaaaatgctatgcaggtaccaaatgctttcgcatgcgatctgagcataggtgggtgatcctgacccgtaattgttccctgtcaatcacgattcctctttctagtctaagctaggtttatggcacaatgtctaactatatgagattataagatattaacttacagaaatttagcagtcttattgtattttgttgctaacatactttcatttactgtctataattaatttagttctctttaaa

SEQ ID NO: 142 - DNA, 1000 bp, unidentified
  source 1..1000: mol_type = unassigned DNA; note = unclassified Picornaviridae sequence
cacatcttatgatgataggtctgcacctctcataagtaagtgtgtgtgtgtataatacagggtaagcaactgagacttgtaatcctgtaggagtgagttggagtgctgggcctgttccatgtgggttcaggacgatctcgggaatctgcataacagttcgcataccgacctgccgagactaataactcggttccaattgtttgttatttttatcctttgggttttagtcgctttgtactcctagaggggagtggccgcgggtctgctccgcctttcgcctgagtgacaggcactggcgttggatgctggtttaccgcgtaagtccgcaaaaataggatcccatgttagagtgggaagaagaggaagtcttaggtcctctgcccaaccctaaacaaagcgaactacacgtaaggacagcggtagcgtggtaaccctatacacacgtaacgtttgatcttgccaaccagtaggctacgggtgaaactggttgcgactggccactgctaacgtggtgtctgggcaagggggaacggtaacgaagcaagatattccagaaccttagggtccgagtctaaattgctgtgccacggctgtaaccccggcatgcgaacgccaagtgtgtgtttgaatatcacgttatttaaatccccaagtgtagtagggattgattggtgataaaaatgctgcgaaggtaccaaggcaactaaaatggtaacccgggaggaatcttaggacgaattggctgagtcctaagtggaccgggttccaatttaggggcacctcagggtgcctgctgcgatctgatcgcaggtgagtgaacccgactcgtaattgttccctatcaccatcatctctctttctagtctaagtaggtttatggcacaataaaagctacatgaaagagatttaattgttgttgttgagttgttattactttcaaaataaccaattggcttttatttgttttctctgctgtttaatttgctgcaattagtttaca

SEQ ID NO: 143 - DNA, 1000 bp, unidentified
  source 1..1000: mol_type = unassigned DNA; note = unclassified Picornaviridae sequence
ggccatggtaggtctgcacctcatggttcacaaaagtatggacatacaaatttagtataacaaaattgtgtgtgtgtataattgtaggtaagcaactaagacttgtaccttcaaggagtgagttggaatgctggcaccctgtcatgtgggcaggggtcgatctcgggaatctgcataagtgtttgcataccgacctgccagatttagtagtctggttcccaccggtttgttattttcttccttcgtgttttagtcgctttgtacacctaaaggggagtggcagcgggtctgctccgcttcggcgttggatgctggtttaccgcgtaagtccgcagaaataggatcccatgctagagtgggaggaaggagaagttttaggtctcctggccaaccctaaacaaagcgaacattgtgtaagtatgtaggctgcatgctaaccctttgtatgtgtaagtagtgatcttgtcaaccagtaggctacgggtgaaactggttgcgtttggcagctgtatccacggcatgccgagcaagggaaatggtaacggtgtgaggtattccatgacttcggtccgtgtctaaatcacagtgccccggctgtattcccgacatgcgctacccaagcatgcaattgaatagtatgtagttgaaatacccaaacaacgtagagtctagtgttgaataaaaatgctgcgaaggtaccaaagcggctcccaaaaattgaagccgggaggaagctagtggcaaatctggccccacgctgctagtggatcggcttctgggagtgtgaggggaaaccctcacggctgcgatctgatcgcaggtgaacaaacccagttcgtaattattccctgttcaacctaactctctttcttgtctaggctaggtctggcacaatgaaatgctatatgaaaagagttttataagagattttgtgttttgtgcgctttgtctgattctttcaggtttttactattaaagctagttataaagtaaatttgaa

SEQ ID NO: 144 - DNA, 1000 bp, unidentified
  source 1..1000: mol_type = unassigned DNA; note = Picornaviridae sp. isolate ybw202pic01nc genomic sequence.1 sequence
taacatttccaagtcagaccgtgaaatccatctcagtgggatgttttaggtctatcccaaagaccaaatgcagtttaacgacttgcaggtcggaaagagggatgcacgtacagggaacatagccctgaaaacgtgcaccccgctttccgacctgcaagtcgttaaactgcatttggtctttgggatagacctaaaacatcccactgagatggatttcacggtctgacttggaaatgttaacctggacttgagtttggattgtgattccccgggaatgtggagtacccggttaggcaggacttatttttactgcctctccaccttagtttatcacctccttatgaaggatccattagtactattatgatgaaaatggatgaatgggctagcgccagttagattgcctagagactacctccctggtaacagggactctagggcccaaaaggctaggtggtcggattagcaaccaagaaagggtttatgattaacccaatctgaacttgcgtcctaagccacccgtctaacccctgaccccgaggcattcatccactagtagttgtaatgtggaaagtgttggtcttttgtaaggatagtttaagctaagaaatcttggacccgtgggagtagatgccctggaggttattactgaccaggggaccgtgactatagcgttccgctaaaccggtttaaaaaccatgaaactatgggtccaagtgcttttcttaatcttattttactttaatggattgcattgacgaagttgattgtgcacagtgtgatcaaccatcgattaccttgagagtggtattgaaagtgattcaattttttgagtgtgcttttgaatgggtgcatcacctaccaaagactccagagatagtggaagaagtcaaagaagccaattgccatcagctagagaattcagaggattgagttgggaagaaaaaccttgcacacagttgacaaccaattgttgtaagggaggtcaattgattggaaa

SEQ ID NO: 145 - DNA, 1000 bp, unidentified
  source 1..1000: mol_type = unassigned DNA; note = unclassified Picornaviridae sequence
agaccgttgttcactctaaaccttctaaagccacaatgcggttggacaaacatggcaatctcggtcttccgggaaaacctaaactatctggcatacaacagatcgctgtaccgccatctcgcccgaaagctggttcaattcttgatgaacttttctctaaaggtcatccaggaattgtcaccaaaccacgtcctaccgggccaaatgctgttactgcggggtcatataaccctgcgcctgcacctgagtcctatgaagacttggctgctcgggctgctcgatatgccgctagtcgtatcggatcctgggcatctactcaatcccaggtacctaccagctgggacgaagatttggctaccgacgtcaccgacccctgcacatctgggcccggtgacctatctgtcaaatcagaacaagcaaatgatggtgatacagggtcgcacgtatctgtcggatcgaaaggatcagctgatgatctgccagaggatcaagtcatcctggtatcagacccacaaaccacgtgtctggaccaggttgactcctgctaatttgtcccgcccacccttctcctaccagggagtctacggtgccttcctcgccgtggatgacaccatatgggcagggccccaaatggtgccggtaccacacaagcttgtgatgtacctccttggaatgagtcaatctccccccaaccacctgaggcttgcacaaaccatcttagcctcagttcctttaacggaacgagctggtctcacccccgaaagcttgctggaatttgcagtggcctacctaaagcacctcaaggctgttccagtaaatctacgacacgaggatgatacaattgcacgccctgataactggctagctcctgacgtcccagtacccatggcagaaggggtgggtctctgggaagggcccgactttgccaatcggcccttttcgtcatagggggacggttctctgtcccccgctcataactggcttcactcccggtttattc

SEQ ID NO: 146 - DNA, 1000 bp, Hepatitis B virus
  source 1..1000: mol_type = genomic DNA
ggtctggggcaaacattatcggtactgacaactctgttgtgctgtcgcggaaatatacatctttcccatggctgctaggttgtgctgccaactggatcctgcgcgggacgtcctttgtttacgtcccgtcggcgctgaatcccgcggacgacccttcccggggtcgattggggctctaccgcccccttctctgtctgccgttccggccgaccacggggcgcacctctctttacgcggtctccccgtctgtgccttctcatctgccggtccgtgtgcacttcgcttcacctctgcacgttgcatggagaccaccgtgaacgccccccggaacttgccaaaggtcttgcataagaggactcttggactgtcaacaatgtcaacgaccaggattgagacatacttcaaagactgtgtgttcaaagactgggaggagctaggggaggagattaggttaaaggtctttgtattaggaggctgtaggcataaattggtctgttcaccagcaccatgcaactttttcacctctgcctaatcatctcatgttcatgtcctactgttcaagcctccaagctgtgccttgggtggcttttgggcatggacattgacccttataaagaatttggagctactgtggagttactctcttttttgccttcggacttctttccgtctgtcagagatctacttgacaccgcatcagccctgtatcgggaagccctagaatcgccagaacattgttcacctaaccacacagcactcaggcaagctgttctgtgctggggtgagttaatgactctggcttcctgggtgggtaataatttggaggacccagcatctagggagttagtagttaactatgtcaataacaatatgggtctaaaaattagacaactgctgtggtttcacatttcctgtcttacttttggaagagaaacagttttagaatatttggtgtctttcggagtgtggattcgcactcctccagcttacagaccaccaa

SEQ ID NO: 147 - DNA, 301 bp, unidentified
  source 1..301: mol_type = unassigned DNA; note = unclassified viruses sequence
gtcatctataaggatgtcggtggtaaccccacaacggatgaccactgcaatcagtggcacgtgtaaagtcgagataaaataaacaaataagtgaaactctgctggatcctcacccgatccactaccgtaccactttcccaaatcttcagacgaaagaaatttttgtctgttcgctctgctcatcctaatccggtgagaataaacctgctcctcctaactcggggagtactaaactcgtcataatccgacgagaactgtcacttttaaccaaagtggtcaactgaattttcgcaaattcaaa

SEQ ID NO: 148 - DNA, 308 bp, unidentified
  source 1..308: mol_type = unassigned DNA; note = unclassified Solemoviridae sequence
gtaaatggttcaatgaatcatttaattctgcgcttttagatttagaccttgcttctgtacccggcgtaactaccttaagtcggtatggtaccacattaggagagatcttaggttttgacggtcaaacgttggatcctgagagagtggccatactgcgtcactatgtggtggacaggattcaggatcttttgcatgggaaacatgtagctgatcctattaaactgttcataaagcaggaacctcataaactgtcaaaaattgaagagggccgtttgcggttaatcagtgcagtatcagtagtcgatact

SEQ ID NO: 149 - DNA, 321 bp, unidentified
  source 1..321: mol_type = unassigned DNA; note = unclassified RNA viruses ShiM-2016 sequence
aacaacaacaacaacaacaaccgcaacaagaaaccgcgtgcccctaggcgtggtaaccgcaacttggttgctgatcaggctatcaaggatgtccaacgtctccagggtgagttggacgcattaagggacgaaaaatcccaaaaagagcgagctcgagaacagaaggaacaggaacatgaagagctccgcgatgaaattaaagcgcgcttatctggcggctttaatattaaatgggatccacaagttcatcgtgtggaccgtagtcgtgtgtggcgagcgttagcttactgcatttgggtgcttgcaatcaccagtattgca

SEQ ID NO: 150 - DNA, 326 bp, unidentified
  source 1..326: mol_type = unassigned DNA; note = unclassified ssRNA positive-strand viruses sequence
ctcaggtttagtgcttgcctccgctgcttttagcttgcttgtaggctgtttctttggacctgagtagcttatttgctaggcgatagttcgtgcttacttcttcggaagttactcttatttgatttctttcttcgcgacgagaggacggagccttgtctttcccttggaaagtttgcgtgtggtaacgcccacctgtaatcaaggacgctgctcccggctagggatccccgaccgtttaaaggttctacacattgctccgggtgtagaggtaggaagaaataaattttttcaaattaattcttgtttaagacttgaaaccggtaaaa

SEQ ID NO: 151 - DNA, 333 bp, unidentified
  source 1..333: mol_type = unassigned DNA; note = unclassified dsRNA viruses sequence
gatttaaaccctggttttcttcatctttttgaaggagattttttagggttttaaatccctttctcagttgggtgttcgcactcgattgtttgagaccttcgggcggcctacgtcactacccattcgggtaggtacaggtttctgatctcttgaacttttgagtgcgttccatcaacccgagaaactggggacttgacccggatcctgatgcgtggcggtaaagaccgaagcaggattcggaccccaaggccctgagggagtggtagggaagaggtccggtgctctaaataaaaccctacgctcaacacccctcagggtgacgagcactgagcc

SEQ ID NO: 152 - DNA, 341 bp, unidentified
  source 1..341: mol_type = unassigned DNA; note = unclassified RNA viruses ShiM-2016 sequence
gagatgtttgcgtgggccgttgcgctgcgggcggcccacctccctacggggaccgtgagacaccgctggggaaggcccccacccccggccaaggggatcctgccgagaggcaggagaaagaggcccagccctctggggcgcctttaggggcgcctgggagggaagtacccgagccgggcggccggtcgggtgcggctgtgcagttcgaggctaaccgtaaggaaggcctgagctgcctcggcttgtcggaaaggaagacgaaggcacttatcaaggctttcaggaagcaggagcgcaattacagcgcgcgccgtgcggcctggattaaccgcatttggccg

SEQ ID NO: 153 - DNA, 346 bp, unidentified
  source 1..346: mol_type = unassigned DNA; note = unclassified Arenavirus sequence
tgttacagaactgtgtcccaaaatagataaccactatgcctaggatccccggtgcgcagccaaacacccttatttgtggattaaggtcaatgcttaacaaagtcaagtcaatgaaggtcctaaatactagaaggaagatgctcctactatttgatacatttatcctgatggctcatgtaagattcttcaaagaagagtcattgtatgcagaaacagagtggttaggttcatccttttgcagcgtcaatgataggctggtctccttagatgaaacggtgcagtctttgactaagtgggttagggccagacagagaaattactctaagaaagtgcctgagtgtgtgac

SEQ ID NO: 154 - DNA, 348 bp, unidentified
  source 1..348: mol_type = unassigned DNA; note = unclassified Benyvirus sequence
agttgattgtctgtaaaacaattccagttgtttgtctgtaaaacaaacatatatgcttgatcagctttgtagatccttgactatcaattttatttctatcattgaattcgaattgtttctgttgagattctctttacgatttgtgtcgtcatttcgtatattggaagacgggcctgattccagtattaattggtcagtttgtaggtgcagaacgcttttaagtgagacctaagactgcgtcggaaccttagattcacgagccgcgtgattaattgggtttgtcactgggatccagtctatcagtaaggggtaggttttttgttgagacttatctgattagtaacattt

SEQ ID NO: 155 - DNA, 362 bp, unidentified
  source 1..362: mol_type = unassigned DNA; note = unclassified RNA viruses ShiM-2016 sequence
actgtgtagttgatttctagcacagcggtattaaaatttatcattgaatatatcataactatatttcggttttcactgagtataggatcctttactaggactcggggtgtcattgacgctttcgtaggtggatcacttgatagacgtcaatataaagttatcaatacagagaatcatttatgcgctgatttgtaatcggttcatatagcaatttatttatgcatagatctgtgatcagtgtatatagcacaatagggataatttgtgtacttttctgtgattagtacgcatagcaaaatttatagtattttgtgggattttctgtgattataccacatagcaaaatagttaagtatttgaac

SEQ ID NO: 156 - DNA, 367 bp, unidentified
  source 1..367: mol_type = unassigned DNA; note = unclassified Picornavirales sequence
aacatgacccgatcgcacagttgaaacaatacaatgatgtcgtccagcgcccaaacggggggagagtaaaccggatgaaaacgaatgataccctatttgaagagctttggatcctgaagaacagcatggataagggagcacgatgaggaataagatccagtgcttcatccaataacaatgtcgggaacaggggagaagtttaaactctttggtagggtagatatgtctaattggaaggtgagtctccctagactagttgattgcggagacaatctaggataacggcaacggtagaataataaatgtagcgtgtccttaaggagcgcttgtatcgtccccaaatcagaaacataaacataaaacaaac

SEQ ID NO: 157 - DNA, 370 bp, unidentified
  source 1..370: mol_type = unassigned DNA; note = unclassified Riboviria sequence
gcctgaagaaaacgtcgggaaccccgacatccgtcaactatgcggatccttctaacctaaatactacggttaaggtccgtgcccgtatacagcccgttaacaaacgggatgggaagtacaatcatgttcgccaagaaattcgcgtcggtttcgaaacgaaacctcctcgcgcttgcgaacagagttgtgccacctctccagttgtgctcacccttgtttggagcgcgccggaaggtgtccaggccgatgtccctaaagcagtgttggacaaagtcctcgagcatatcgctcttggtactgctttcttggctggacctgatacacttgacgttgatacaacgctaactactaactaaatggagtaatactc

SEQ ID NO: 158 - DNA, 373 bp, unidentified
  source 1..373: mol_type = unassigned DNA; note = unclassified RNA viruses ShiM-2016 sequence
aagcattgacacatatgtcattgccccggttatatgcttaagtgagtctactactcagactttaagagagaggagggcgatgcggtgtgcttgtttgagcgacagcacacatgaaatttagcttacaagtgatataacaattaaagagcaagagtgctcatcgtttgaaggtttagcgttaaaaccggatccagaagtgattggagtttcatcttttagtaatgaggcaggacaatgtgttgaagttaaggcttcggatagcttttattctgttaatcaggttgctgatttgcagtctgttaaggagtatttagctagacctaggctttttgacacttttgtgtttggtactagtcctggtgtggttacgacg

SEQ ID NO: 159 - DNA, 379 bp, unidentified
  source 1..379: mol_type = unassigned DNA; note = unclassified RNA viruses ShiM-2016 sequence
ggcggtgtttgattacatcgtagcctcggcggagtttgtgagacagaagttgcagttgtcaccttatacttggtttcaactcatcctctgtttcttagtgctcctcccggcagttgccttttaccttagggtattttggtggctgttgagaacctcttggagattctcttgcggattgggacgttggttttgttacgttggatcatgcttgaaatggaatgttaagaaggtttttagggttttccggaaaactcccttacagtatgaaccggaggcctatgtcgctggatccgaatatgagcaagtgaaagaactgccagcttgtcagtttttgatcttaggaaatttggaatgcggtgacgttttgactccggttggt

SEQ ID NO: 160 - DNA, 384 bp, unidentified
  source 1..384: mol_type = unassigned DNA; note = unclassified Picornavirales sequence
tcatgaacccacagctcccgtattacggagctatataagtagttttactatgcgttagaaaacgacttaatgtattagttacaggattggtaactcgaagactatgagagtttaccgattatcggatacattattaaaagttctgcttaggtgcaaactaatcagatggaactataaaacgtcagattgatagtctatatccctaatctttaacgcgagcatgggatgaatataagcgttgctgaatcaaataatttaaaaataaatcagtcggaaaccactagcgagactattggaatcgtagactttaaacaggatggagaaattcatgaagcagaaatcaagaatgagattatgttggatcctactttaggacagactatt

SEQ ID NO: 161 - DNA, 386 bp, unidentified
  source 1..386: mol_type = unassigned DNA; note = unclassified RNA viruses ShiM-2016 sequence
gtttgggctcagttttccctatttagggaagtgtacacggtgaggattcactgcgtagacaggatccactgcggcctggaccaccgtagttcctgtctacgatccttgaatcggatctgatgtgcacgtacgtctcagaggttttgcctaaaacgctctgatgcgcagtctgggttagctgcgcactcgaattatgacctgctaaccaaaaaggaaagcatgatcatgcggacggcgtgagcctgtccattgatcgagggcaactaaactgtttggaggacgttctctattcctatgagaacgtggttccaaacggcaggcgaccacccaatatcgacaagttaaaagaatgtcttgtcgatctccggaccctcagggtcaacggc

SEQ ID NO: 162 - DNA, 389 bp, unidentified
  source 1..389: mol_type = unassigned DNA; note = unclassified Tymovirus sequence
ttcgccaagctcatgatctgcgttgatgatggaagccttgaggacaaaaaactgtcttacttgtctgaattctcagtaggtcatctctccggcgactgcatccaagccatcttacctccatcgctcatcaagtatcagtcagcatgtcatgacttcttctgccacaattgcaccccatcccaaaaaatccttctcagcctggatcccatccctgagaacaagatccttcaactcctcctcaaagttcgttgggcttcacaggccttcttttcttaccttccccaaaaagccagagagttgctaatctctcgctccagccttccttcccttcactctgatcccaaaatctccctactagagtctgaattgcttccctttttcaattaatt

SEQ ID NO: 163 - DNA, 390 bp, Mossman narmovirus
  source 1..390: mol_type = genomic DNA
gacaaagggggcatgactgaccagtgctagtatacttatcccctgttcacaaatatggagtcagcagaatattcttttaaagaacagatcatgcaaacatcagccatctacttccatgataaatccagataatacagtgtgtatgtgtgtaaaagaccccccaaatcctatctgtacccttcacaagatgaatataatcctttcttcagccatatattctctatgcctaatagttgatctccatgaagtacaagatttagaccgtaatgtaatactgtcctttgtcatttttgttcccacagaatcccagtaagttactctagtgttagtggtgatgactaaagaaaaacgtaggatccaggatcctaaagccaacttttggggttcaaa

SEQ ID NO: 164 - DNA, 393 bp, unidentified
  source 1..393: mol_type = unassigned DNA; note = unclassified Reoviridae sequence
tttaattgcaattctagtattgcaattctctagggaaagccaatcttatttttattcattctcaaattattaagatttatgatttaattcagatttaacaatttataaaaccccagtaaccaaattttgaaagcaagatgggctttccctagagaactgtaatacctttcatttgacactaaaatcaatttttttcgacaattgatggctaccagtgatgactcttaagcactcttgactgattcacacttgttagtatggatccaaacttcgtatggatttagtaaattgagcatgtcaagactacttttcacaggatttaacactaaatagacccccccctctcttaaacaggtgcttctccaattggctgggtgggttcatgtacaaaaa

SEQ ID NO: 165 - DNA, 400 bp, unidentified
  source 1..400: mol_type = unassigned DNA; note = unclassified RNA viruses ShiM-2016 sequence
tagagggtatttacatcctgcgatcttgaactttacttaacagttatacaagtttggtcgtcggatgtacggttgttgactcgctgagaactctcttttgaaatctatccagacattcttagagatcgatctcgcctctcgacaatcacatactggatcctccggaagagattccgttagaggaactggtccaaccagattttcggatctttgctggtaatcctcttcgtttcgtggagttttatcgcatactaaattttctcagtttttctttattgttattttttattttatatttagattattacgcggtctattataataccttctacttttatcattctccttatttttctcttccttattcaccttatccttatcctgtttctttcgcttgggt

SEQ ID NO: 166 - DNA, 411 bp, unidentified
  source 1..411: mol_type = unassigned DNA; note = unclassified Totiviridae sequence
tgataagcatccagctaactatcgtatcgcgttagtgctagtaggttgcttatactcggagtgtgttctccgatccctttttagggaaacccggagtcaatatgacttcaaggtcgattttatcggcctattcagtgtggccgcaggaactctaaccgctacctccgcgaagcgattacgtgggaccgatgaggagcgaggacgagtcagcgttgcactagtacgaccagggagggttccgttgatctgagcttgtgctaatttcaccggatccccctgagcaaaatttcgattctcttcgttcttctgttctccctagtcgttactagtgtaacgctcgcctacggcctcactcactcagttttcatttatcgtctcggtttcccctccccctacccgatccgaccaaag

SEQ ID NO: 167 - DNA, 411 bp, Mossman narmovirus
  source 1..411: mol_type = genomic DNA
gcagcagtaaattgtttctaatgaactcagtttataatccatgctatataagagtccataggttgaacccctgcagacttacaacacccttttggctctgtcttagagaattatctacaatcagtattgcagtggattccttaatacttgggcattatatttcctccaacacatatcatggtctgtataatgcttatcagattgtaagacacctagggtatgagaactaaaaatggtactcagtaagagaatagattaaaactactagatattaagcctcatcagtatagacttaatagtgttttaacaattatgttaatttgatatttcggtcagtagtattaactaacctcatttgttagaatattacaaaaaacttaggatccaagaggagctccgtaagctccaata

SEQ ID NO: 168 - DNA, 412 bp, unidentified
  source 1..412: mol_type = unassigned DNA; note = unclassified environmental samples sequence
ggccaattgcctacttctatacattttatgtgtccccgtttcaattgaaaaattgaattgaactcaggaagactagggaccgtgcctgagttggatcctagatccatgtgcgtgaagcatacatagtaaatgtaagaaatataattaatattcttcttttttaaagattaaaaggtattttatattgtccgagcatttacgacctagtttttactaggaacgcccctttgacaacttggggcaaacccgcggcggtctgctattgcgacacgtcgaaatggtcactgttagaattgtataggtggcctgttaaccatatatggggtaactgtaaaaatagttatggccaaaatcgtcttaatagcctacagggaggcaacagggcgtgctaagtggtaatttatttacctaa

SEQ ID NO: 169 - DNA, 413 bp, Mivirus amblyommae
  source 1..413: mol_type = genomic DNA
atttaaggggatccctggaaaacatatgtattattgaatgcggcccatatagcccttattgccgcaaactttccaggtagttatataacccattttactatgagcccagtaggaatataacctctcactgtgggcatattgtatgtttgtttgagctgtattaaaaaccatcttgggccatagagccattttgctagacagctgatccggagagaccagattccgttcatacagtgcgattgtgagttttcaccattgcgtttcttgctttgcttgtggagtttaatcaagtgtttcgtgaaatacttgacttctccaccgaagtagagacctcccgtgacatcctagtcgctatcgacctgctcgagagagcacacgaacttagtgaagacatacttgatctttacacaaca

SEQ ID NO: 170 - DNA, 414 bp, unidentified
  source 1..414: mol_type = unassigned DNA; note = unclassified Riboviria sequence
aggaagaagaattctcagtagtttgattgttttttagacctgcttggcataacgggacaagaaattgtgatgactccctatacatatcgctttgccaaattaatcttaagtcccggtacagagctggtctctgaatcggatcctatatatccttatatataaaggcctaatactgctaagtactgacatttactagtttgtaagaatcaacccagggggaaatgttggacggatacagattaagtgcaaggttcttgtacttaaggatgggaatctcagggttttgcattagaatcgtctccaataagggatggattacatcagggggttggagtgttttatcaattacttaaatttaagccggatgttaattaagatgtataaattgttctgaaaaaaactaacagacgtaat

SEQ ID NO: 171 - DNA, 429 bp, unidentified
  source 1..429: mol_type = unassigned DNA; note = unclassified Negevirus sequence
gaaaataaaaccaatacaatccacttttctcagttattccctgacccggaataaccccgaaaaacaaaaattccctggtaccctaacccggtatcacgaaatcgcttaccctgacccggtaagtccaaatccgctggctaacccccagttaactggtacgcgagtaattcccgtactttgctcccttcgcttaccacgaaggtaactgcccaactaacccttgggataaattctggttgacttaccctcaacttttctcgcacggctcacccccgtgttatctgttctcgctaaccccgagaaacttctcagaaccctcacccggttccaactgatccgctaaacccggaatcaattctcaggatcctaacccgatcctcttcttctacaggaccctcacccggccctctaatccacatcggattaaca

SEQ ID NO: 172 - DNA, 440 bp, Lunk mammarenavirus
  source 1..440: mol_type = genomic DNA
cgcaccgaggatcctaggctattttgatgcgcatttttggtatctggaatggaagacattattggagagataaggcatctgtgtttaagttacatgagtcaagatgagcgtctgtccaggcaaaattaaacttcttaagtcagtcagagccgaagctgactttgatagaagggttgaagttgttatcaaggtgcatagagatagacagtgctgacaagaatggctgtgttcacaatcatgaagacaaatcagtggagaccatcttgattgaggctggtgtcatctgccccgggttacccctgattattccagatggttataaactgattgacaacaccttaatcttgttagaatgctttgtgaggagttccccggctgggtttgaggcaaaattcatagaggacactaataagctttcaagcatcaaagacgatttggca

SEQ ID NO: 173 - DNA, 464 bp, Hermit mivirus
  source 1..464: mol_type = genomic DNA
aatccttctccaacaatctccctccctctcctcaagagtatcctattattagggatcctcattcctcttgcatgctgtaaatagttctcagtatagtagtggacccatatattcttgccatagtattttccatgcttttcatacaatattagtatagcccaatgctcttgtccatgtctgcctgtatatttgcttatgtcgtgtgctgctttaaaaaacaatcaacaacctcgagtagacccttaaaaaaagtgtcctaaacaatttagttaaaaattagaattgatcctttaattcttgctagtcttcattacccagtgaattttcgattactcagtttttgttttttgtggatcggaagattaattctctaatttgatcggaacacagagtctatcaacctgtctccctgggaaaagacagccctggttgttggtggtttgggtcttgtggcgtgttggagg

SEQ ID NO: 174 - DNA, 468 bp, unidentified
  source 1..468: mol_type = unassigned DNA; note = unclassified Closterovirus sequence
acacgaagtgaccgttcggatttaattgctgcgatgagtattcgacgcgtgtggttaaaggttatagctgtaattacagtgttgtggtacggtaaggaaccttccattagtgaaggttacaatgctcttatgaacgatgactttaagtttatcgatacacacttctcaaacgtttcttatgctaagaaatgttatgatttggctaatttcgatttggactttctgcgcatcgttattattcctttgagtggtggtacggtaaacgaatcgcgtgccgatcgcactaacgtttcagagattgtcgaatcgcacatgagcgaccgagacagaatgaatatcttgttgcgtaataagcggatccagattccttcgctcttaccttgcgataactagagtctactcagtagtgcgtctactagtataacgtattaaacactttagtaaagagttttgtttaagttaaacaat

SEQ ID NO: 175 - DNA, 471 bp, unidentified
  source 1..471: mol_type = unassigned DNA; note = unclassified Sinaivirus sequence
ccgttgcgcaccctctctaagattcacgtgtgttgcgccgatggatcccccaataacctcattgttgctaaggcccttagtgttctgaatctcaatccctccacacccattatcacagccttttgtcgacatatacttaatgtcgttcgttccaggttgctgaatccgcgaaatcgtaacagacttgctgctgccgttaagcgtgtcgcaccttggatggtttacatgccttttcgttacacgccttattatgctgagccatgtcctgccactcgcgccgcgtttgctgtgcgcacaggcatttcccctgccttgcagatcgagtacgagaagtacttgctttctctaacgtttgtaccatctaggtatgtcctgcttaagcgcgatgttgagctcgatggcctcagtactgtcctacttggcgacttccggtctgtcctttacgcgtagaatcaagaaatttactacgcc

SEQ ID NO: 176 - DNA, 473 bp, unidentified
  source 1..473: mol_type = unassigned DNA; note = unclassified Fusariviridae sequence
tgggctctggggctggcaacatttctgcatctgcaaatcaagatcgtgcagatttggtcacaaaatgcacaaatttgatttctgccagtcttgaagctgcatcctctggtgacccttcattgttgaatgggatggaggaattagcctattttaacggcgcaactggtattgtgttgaaaatgtctaatttcctttttaaacttgtgtcagacccagttggtgaggtgtctgaaatgttcaatccaaacaatagggatccaactggtacactacgggacgtagcaaacgtgttttctatccttacaagcctggcttcaatcagtaatgattaagcattggcaaaaatcttatgatcctgaagagtctgttttacagcgaaaccgtcaaggtaggtcaacatgagtaccaaaaattcaaaagcccctagtgtggcatcgaatgagtcagctggtcaatcgttagttcgagagatc

SEQ ID NO: 177 - DNA, 475 bp, unidentified
  source 1..475: mol_type = unassigned DNA; note = unclassified Hypoviridae sequence
gggggtgtgaaaacctacacctattcacaatgttttcattatgaatcgtaggttcgcttcgttgcacagggttaaaatcccgcgctattttgtccgttacagacgcatagcagtgcaagcatacttagtcttaggagtatgcatcctggaagtttgaccggccctcatgggttagtcttttaaaatctcgggagagatctttgtggatcctagcgagcatcaatcgtggtaagacaattttaaaattggtgcgtgttaagacacacttgttagaaatttcattcagaaaccgttggcagttagcgaataactgtgatttgactgaaccccattatcagaacggcaagaaagatgaatctgtggagtagtgccctagaagattcaatcctctttctcgttaatggcttgtcacccaggccctggccgctaaaccagtttatatttcatcctagtttcttttaggattattagctca

SEQ ID NO: 178 - DNA, 483 bp, unidentified
  source 1..483: mol_type = unassigned DNA; note = unclassified RNA viruses ShiM-2016 sequence
ctggtgtaaactactttgctccccgggtagcttacggtcgagtcgaacggcattgaaaatgccttacgactcgatcagatgacggggagcgccccccccaggtgtttggtcgcacctggggggaatgacggtaattcacagaatagcgccgagctggaactggtgaattggtggacgtggatctaggtcttttgggttgacttaggtgtgagtgtaaagtgggtgaaaccgcagcccgaataagctcgcacgacggatccatgtatcaatactattactcgaacgcccaaaacacaggccgtgtaataggaacctgcgaaagcagtgcaattgggagaagcccaccgttgcatcaccaatcacctccaggcagttctgtggagggcccgatatgtcgacctcactcggcacgcgcgctcagcgtcaggcacgccacggtgcctgacgtttacacacacaacacacacacagcactttccttat

SEQ ID NO: 179 - DNA, 500 bp, unidentified
  source 1..500: mol_type = unassigned DNA; note = unclassified Picornavirales sequence
acgtacgcactctattaactaaaaggtatgcccgaagttcctaaatattcgggggtttactctttccacaaaaagagattaacatggttgacttgctccataatgcaagcgcttgagaacaagctatagttctgatggtaataccccttgaggaatccatatttctaggatccgttcaagtccgaagaattgcgcctcattgaattgagcataatatcgcgcgtgtcgtaggtgggccaccacgcgtatgatttaagtccactgctgattcaggtaatgaattaaaacttgggaatgaaacccaaacaaaaacagaaatcgactctggtttagtaacttttgaaatcaaggaagaagagataatttcggttagtcccgaaattgtaccaagcttcccggttcaaaatccttaccagaatcaaacagcctctcagatattatctaggtggcgagcaataggttcccaatcactgggtttaacgactcagtttgggacaaaa

SEQ ID NO: 180 - DNA, 504 bp, unidentified
  source 1..504: mol_type = unassigned DNA; note = unclassified Totiviridae sequence
tgaatatgagcgagagcaccccataggtacccttctcatacaccaggtagtcctgggggtgacacttcgcctagctatgcaagagctttgaaagtgttcacctgagcacgcggcctcgtcagacaaggttagcgccgaaccccactagctaagttgatgctcaatcgtagtgtgtgtgttttctagcattcacgccgaaggttactgagctctgtaagattcacgtctgcggagtagtgattcaccgttaagtcgggatagcttcctgtttggaaacactcaggatcagggctaagaccccgtagaacagtagccgagtagtacaaactcaaagttagtcttgtcgagtctttcgcgcagtacaatcagggtaagaagccattggtaattgatggtggatcctatgaagttgtagctagctgagattctcatatatcttagttctagtaacaaaatcataggcgtgctgcacgaagcagaaggttttaagtgatattatcgctg

SEQ ID NO: 181 - DNA, 508 bp, unidentified
  source 1..508: mol_type = unassigned DNA; note = unclassified RNA viruses ShiM-2016 sequence
tccatttggagcgtgggtgcgctccttaaatatacgcccttttaagtggctggcaccacagacggatcctctggattgtctaaacgccctttttcattcgcgatccgcttagttttcctgttcttagttttgcgtgaatggaatcgtattaggaaatgttgtgctagtgcgagatattcggtctgatctcgtaccttattttagacctgcaagtttatcagaaacacaaactactgctgatgttcagattcagcaaacttttgcctttgacgatagtgaaaagcaatttatacaaactgtccgggagggggaggatccttcccatgattgggggtcatattcggatgttgatttagctaattggcttcagcgtcccatattggccaccacaaagatttggaacgtaggtgagggttttcctgaaatttatttcaacccttggtctgcttttttggacagccctagtgtagctcagaaattgtcaaatttttatctccttagatgcaag

SEQ ID NO: 182 - DNA, 515 bp, unidentified
  source 1..515: mol_type = unassigned DNA; note = unclassified Mitovirus sequence
ctcctttacagagcatacctggctgaatcgtagtcacgacccaacctatggccttatatggctgtactcgggttcccgaaacgcgaagtaacgttcggtgtttgcaatagttctactattaataatactgaatgcgggtggagtctcaagtgagttagactaacggggtaaggtacctttacaggtaagaatccttattcctaggtctttctcatcctgagaatgtccacatatgcgtaagcataagagaattactctctggctgcagcccggggcctcattgaggatccggaaactgaagtttaaaccgctttactttgtacaacaacctattgcctcttatggtgatactaggatcagatataactagacggggttaccccctagcgacttgagtgtcgtcgtgtagtgagatgataaaacaaacagtgtttggttaccacttaaaactcgtgacctcatcgaaatctccctagtccctcccataggaaccgacaggcggatatttacctaaa

SEQ ID NO: 183 - DNA, 523 bp, unidentified
  source 1..523: mol_type = unassigned DNA; note = unclassified Dicistroviridae sequence
cgatctatatttttcatacacaatttggcccacagttaagatggactctgtaacagacaaaatatcgaccgatttgcagcaatcaaatgaagcatatttcgacagaaaacatgaaccatgcggacgatatattcttaatagttatatcttacttgaacctttgagtacgttgattatggaacacacatggaactgattaggtcgatacgattttaacacaaactttttgcaagtataaagcaatgactagttttcaaaaagaaaaccggtatttacaccgtaagtaaaaaataattttttccagccttcctgaatatagtaaggaaaggtattggcgaaatggaaaattttattttatttaaacatagtttgttgaaaactattcaaaatttcattatgcgatttttaattgagacgtcttattaatagactaggtactaattaatctaacgcatagttttacaaggcagcaacaccgcatcaatggatcctaaccatagatgaaaagaagaaaaaacaaatc

SEQ ID NO: 184 - DNA, 528 bp, unidentified
  source 1..528: mol_type = unassigned DNA; note = unclassified RNA viruses ShiM-2016 sequence
gtaaatcaaggcgtcgtgtatgcctattgtaaaagcacaccccgttttgccgatggggttccagagtaaagttgaacaggcatgtgtgtatatggttacatatggtgaaaatgttttatatattttgtattttcgttagaatgctttgcacataaataatatcctacagaaagggtacccgtatttacgggatgtgggattggatcccatatcaagatatgtacttctgcaggtttaatcgggcctgtagtcgcaaacaaatagattggtaattgtataaaagaattgtgttttgataataactgtaataaattagtttgtatatttggtaagagttcagcaattgttaacgctgaacctagtgctcacatttcatgtgggcgagaagaagacgctggccatcccggggccagcgcagtgcaactacgatccatagatgagatcgaggaagcacttggaattgtggagagcgatgctgacagcatatgcaccatattcgagcctcattccgggacaacggatgacaac

SEQ ID NO: 185 - DNA, 530 bp, unidentified
  source 1..530: mol_type = unassigned DNA; note = unclassified Picobirnavirus sequence
tagatttacaaataaaatataggaggaagtgctatgaataacatgcattttaaagtagtttcagcgctactgaagttggcgcgacgtgttaagtacgttgtgtcgttattgctgacagccatctctgctgtaaaagagaaaattaattcatcaaaggaggttaatgatgatgaaaacaagtaacaataacaattcccagcggtcgggccgcactgcagtcaaatgtgatgtaagttttgaagagcttatagctgatttggatccaagtgacatccaatcccttgtgtctcagcctaagtgtcgcattctgtctcacgatcaactttcatcatatttgggtactttatgttctaatcattcaatggttgaaaatctcaaaattaagcaccaggaattttcttcaagaggatatcatggagtagtaactacagtcagttattacaagagatttaaatacagatatgtgtatgagcgcatatatacaattgaatatgttagtatttctgaaatggttatgggggtagaaaata

SEQ ID NO: 186 - DNA, 535 bp, unidentified
  source 1..535: mol_type = unassigned DNA; note = unclassified RNA viruses ShiM-2016 sequence
tttatgcccccccttctttcgagaattcataccgtgtagatcgctaactaattttgtaagcaactaactttaggtcaatgactgtgcgacctattgtaagtatatctactgccaacttccatgagatggtttgttgtggtatgccgagctgatattacgttgtcagcttggatttagcggaaacgttacaccccttcctcctgcaacatggcgtcttgttgctttagtgtagtgtccgcgtcttagtattatgaatgacgcccttatatatattatatgttcgtaagactgaaattgtactcccgaagctatcacggagacgcatctatcacagtcggatttagatagatgtaggcaatagccccatgcaccacgggttgctatatacccctaaggcgtctaattcgtttaggcgtctcattgaacctggttaagaatctttaggtgcaacgggtgcgaaggcacccaatctgcccgtgtggatcccgtcctaacacgacgtttaggtcccgaaacggattctttgtccgtaagc

SEQ ID NO: 187 - DNA, 560 bp, unidentified
  source 1..560: mol_type = unassigned DNA; note = unclassified Picornavirales sequence
ggtaggattatagatggacggaacatcttaaaaattctgttatgtcctgattatgacagcactaagtgacaataaactaatcacccaaatttaaaactttgatttgatattcaagttgacgattataggcattcttaaaggaattgatttcgatttataaatggaaatatgttaatacatcaatataggactaagcgattgaaatgaatcaggaatttatttatggcgacagatcttaattacttgaatgacatatcctgtctcttatcatgtgttctcctatggatcccggtggagaacaagcacgacatgatttatattattgtatttcggtatgcacatagcaagtagtgcgtagccttcagtgatcagttagaaatttggtatatggtgactaattgtcaagtatattaaataacgttgttctgatcaatactgattgagcgtaaccttgttctattagcgctaggagtacaattttatagaagcttgcttcagagaagtcccggaagttatttatttaattaaatatttcatataggctaattctaacgatattg

SEQ ID NO: 188 - DNA, 562 bp, unidentified
  source 1..562: mol_type = unassigned DNA; note = unclassified ssRNA viruses sequence
cgttaataaattcaaggatttattagctattttatttgatagttttgcttctgttcagaagtgtgccctgcatgcaatacatgcaaataggttaggcagtagaaatacagatcgccggggaccagcattcattctttacgaatcactgggttacagctactttgactagatcatatactgtatttatcattcgcgttggttggacctgtaatagcagggttccggtcttggaaatcaaaacgagggcactcgccaagatgcgttacgtcgtaacaacctgaaaaagtgggcttgacaacctggcctatcatacactggcaagtgatatgagaggtgatcaaatataccgagtagcatgaatatcgctacacgtagtcacaatttaaaaaaaaagcattctgacactgggaaagactagaaacaatcgtgggatccaacgatggtaaaatgacgcttgggaatcaacgtgcccaataccgaatcgatcacagttagtcaccaaagaaggtgcaattaaaagaacacatagttagtatcctgaacacgactcgtacaataactc

SEQ ID NO: 189 - DNA, 569 bp, unidentified
  source 1..569: mol_type = unassigned DNA; note = unclassified Riboviria sequence
ggtggggatgcgcgcatcatacgtgatgtgtgcatccacccccccttttctcccctccccctccaactaccctttccccctcgttcggatgggttcttggttaacgtgaagtttggacgacgatacggcccttacacctcacgggctattggcacgctcgtgttgtattgcaagttgctcctaagtatgtacactggaaacgcacttggcacgtgcgcggaatgtcgtaccaatgttaggatctaagcagcgaaccttcgtagctagacatactactgcgtaggatgatgatgaccagttttctgtatctgattcaaggcactccacaagatcattgtacgccggatacggttctgacactgcgccctaacctggtgctgaaatattgcaagggcactggggcgttgttgttggttcccgccgctggtgatcgagtgggccccacatttgtgagtgcagttgttctgccgggtaaatgtgcacctacgtggatccgcagttgggaatctgcggttttaagtatgactgggtgatagccttgcggctggccaagttacgattgtagccag

SEQ ID NO: 190 - DNA, 572 bp, unidentified
  source 1..572: mol_type = unassigned DNA; note = unclassified dsRNA viruses sequence
gtcacacacccacccgtgtgtgttcggcttgcggggaaacttactgcttgcaggaacgaaaaacaagagcagcacaaccgaacacacacgagtgtcccgtagggaccgagtcgggtgtgttgatgcaaagaagagagaagccgacagctctctactaggctgggggatagctctagcgggatgtatccgctttgggattttctgcccagtgcccaaaatcagggccgccaattcgacttaaaagggattggatggcgcctgtgccaagggtgctaccaagcacctggagtgccgatcgactacaacgggtcataggcatggccagctcaggctgggcccagcctgctagtaggggggatagtcacctgggggatccagggtatcgccaagtcaggtatccactgttctttgcttttgccaggtgctcagccgtttaactgagcaaattgctaggtcccagccgtatctggatttattatcttcgctgttgtttgacagtgctataaccctgctactctccttactctaccctctccttttgattcccattctggattcgactggagatagac

SEQ ID NO: 191 - DNA, 572 bp, unidentified
  source 1..572: mol_type = unassigned DNA; note = unclassified RNA viruses ShiM-2016 sequence
attcaatggtatcggcggcattggcacagatggtttcgtctgtgctcgacgaggggcccaggatcctcctattcctggtggtgtgggttgttgtgcgtagggtgtggcgctggtttcggccgggccccactgctggcgcgcaactggtggccgagctggatgctggcccagactgggacaccgtgggtcacaccacgcgttaccagcgggagctggcgtatcggttcaaggcggagtttggcgagttgcgctataacaaggctaaccgcattgtcgcatcggcctgggtcctcaagaccatggccgctgatgacgtgcggtacgtggaccgtgttatgctcgagccattggcagtgcagttatgcctgctgcccacacgggctgcagtcctcgccgcggcgtttgcaaagacccatgaggtcaatgcgcgccgcgacgaggctgagctcgttaaatagggatgccctgctgaggtgcctggagtaaccacgtctgtcgaccgtcgtggtgaagcatgcttgcgtgtccgggcaagtgtcggcaagggtataaggtccggtgttgaccgtaca

SEQ ID NO: 192 - DNA, 580 bp, unidentified
  source 1..580: mol_type = unassigned DNA; note = unclassified Partitiviridae sequence
cgccacgtcgctcgtggattgctcgacagtggctggctcagtacgatgagtctcggcctcggatggtggcgcagcaaccttttctagggcgtgctctgcgcgccgcagcgattaagtcggcgcgttctgtggctacagtgcgtactggtgtctctactggtaaggatactttggtgacgacccttcgagccctgcattttggggtcgttaaagccgtcgagcgcgtcgactctgttccaggagcacagcttcgcaatccatcacctttcacccgaacgcgtaaattgcctctcccacagaccaaggtatgtactttcttgggaacatggccgtttaaagttggaagtcaaccagctatcgtgcgacgtacgacaaagtccctctttaagtggtggtctagtccggccggtgcaccgtaccgtgcgacatgtccggatccacgtaactattttcttgtcaacgggtcttggctgcgaatatgcatgtacttcgcgcgtttgcgacaccttctgatgcgaccgttactcgtgcggagctattacggtgtctctctttcgtacacacattgaacatccctttt

SEQ ID NO: 193 - DNA, 583 bp, unidentified
  source 1..583: mol_type = unassigned DNA; note = unclassified Riboviria sequence
gaaggttaaaggagacaagttatacgcgaatggagttcgaaagaacgccaccgtggatccccctccgtatgcaggcaaatcacttcaggcggctgcacttaagggccaggtagtgaccaacagtcggcccccattctgcgctacagaaaccatactggtcaagcgccccatttctaccagtaccaagagcaaagtgtgttctgaatctgccgatgagattaaatgcgatgccacgttgtactattatctcatcgacaagtttgcttacatgccacgcgacaaccgcatcatggggttgatgcataatgccctaacccgttacctaactgattatgactgttctaattattcgattggacagatttatcggttaaagattgacgctgttagggcagcattgtttccgcccagagaggagcaggaaacacgggtgttgttgcgtgattacgatcctaaggttttggagaagcacgcccagtggactggagagggcattttaggacgtaattcttggtggcaatcttccgaaaggaggatgcctaaggttaagaagtaggggtcgctagtttcaccctctatttgc

SEQ ID NO: 194 - DNA, 595 bp, unidentified
  source 1..595: mol_type = unassigned DNA; note = unclassified Picornavirales sequence
gtaacacgtcgaacctgttatggcttatcgtatgccctgctatggcgaaaatgctactatgcgatgggagactcctatgtctcaaactaggaaatccaatttcttttggattgccatttgtttgttcatttggccgctctagctccgagtgcgttgcacttgtaacttcgtgcgtaacgaagatagttgcttatttcgagaagcaacacttccgcctatatggctgaacctggattggatccctgttctggaaaaggaaagatcccctcccctctggttacccaagacactataccacgtagtgtcctatggcttaggggttgatgtgtgtccctcatggggatacccctttttaggggagacagcactgtcagtgggaccctgctttcaatcaaaaaagtgtagattgttagctgatacgtcacttactgaaaatacgaataataaaactaactcgtctgattcacatcaggcgttcgacaatgaccaatcggtaacctctactagcaacgttgtttctgctgatcataccactgacgtggtggtggttagtggacatggccacgctgatggaggtacaaccgatgattcctta

SEQ ID NO: 195 - DNA, 600 bp, unidentified
  source 1..600: mol_type = unassigned DNA; note = unclassified RNA viruses ShiM-2016 sequence
tggcgtttttggcagctatgctcggtggtgaagttttgaatatggggggtagtttaattggcgcaaaagtaaattatgattataattctatgttattaaatcaacaattggcaaatgctgaaaagtttcagcaatttaatgcaaatttaatgcaacagcaaggtttaccgtatttggctaacggtggccaaggatataatcctcaaatttctaatatgtacaatgccggaacgtctaatggatttaataatattataccattaatggctggagcgtctgccggaattttcggtggacgtggttcaaactttttcggatcccaaactagaagttcctccacacaaactggacagtcgacctccaattccttttcacagacaggacagtttacttccaattcttttgcgcaaacttatgcatcagcttatgaacagccttatacaggggcagatacggacttttacatctctccgccacccctaactggtactgctgtaaatactatggcagatgcagcaactgatgcgggtgccatgatggctgcgtagtcctgatttcatcttactacgtgataggataggcgctttgtatactgtaaag

SEQ ID NO: 196 - DNA, 600 bp, unidentified
  source 1..600: mol_type = unassigned DNA; note = unclassified RNA viruses ShiM-2016 sequence
ggaccatccaggcaggtgtaggctagtaccctcacctgacctgtcgcgatgtttggctttgtgaggcttgtgggaggatcccttggcccatgcattgctgctgtcatcgtgaaaaatgttgtatgctcgcacctggcgtggaggaaacggcatttgacggatgctaaggaggatttgaaggtcctcaactcccatgccttattacaagtcccctttccttcaagcttcgagcccacgtctgtgacgagcagaggtgaggttggagtcaagaggagtcctattcaagctgttcgcagcaagaaccataaaactttcattgctcaatgggcaagagcggctaaggctcggttctcgtttgcacgacagtgtgagcggagccctgtaaatgtcgcggcccttcatcggtggtttgcatcggagtttaagaaaattggcatgaacttgctccaggtttcgtacgtgatcgatgaggttgttgaacttagtttggaaccaacgtatgagcgtatggtgtccgaaactaagaagcaattccgtcatcgggcacgtatggaatactacaacgagaaaaaatgccttgaaaagatccactaggaacgc

SEQ ID NO: 197 - DNA, 608 bp, unidentified
  source 1..608: mol_type = unassigned DNA; note = unclassified Nodaviridae sequence
tattatcatactgacaatggtaatatgcgagagcgatagcaagcactagaaacgagttacgcaaccacagacagcaagcccggaaggcgcgcagagactgaacacctctgtgtggctgaaggctccccactaaccctggagagaagtggcagaaccacagcctagtactagccgcaaggcttaagaaactaggtgtagctgagtcctttcccttaaacaaggattggaccacttgtaggatccgtgtattcaaacgatctggcagcactatggctcggacaggtacaaccaataaacacaagcgttttgagaaaccggcgtgattgtaccgcagttttaaaggagcttcaaaccctcccagccgaaagatcaaacgaagtcgtagttgaactaacgtagtaggggagcggcgtttgaggatgttcacgggtcagtaacgtgaatagcttcattcgtgacgtgctcaaaccaccgtataggttcgccttagtcattagcagggatggctaggttcagctgcgcatgcacaaaccacaacaataaactaaactttattcgcgtatttgtgcattcccgttgcccacccacactcctaacaaatttcaagt

SEQ ID NO: 198 - DNA, 619 bp, unidentified
  source 1..619: mol_type = unassigned DNA; note = unclassified Totivirus sequence
caacaaccgacgctccccacgtccgggtcgagcgtcggttgcagggttttaaaccagttctagccggtaacggctagaatgtgattcatcacacttggggagacccgagtgtgttgttctcgtcatttctcaattggctctcggacatcaatgcaccgagttacccaactaacataaaacacgagagttgagataatgaagaactaaacaaaaagcacttcgaacactttaatacaaacctagggatatgacaatctttgcttgaggcttggttataccagccggacaacaaatgttggagtctcactacgcctacctgattatggtcggtggccaaaacgttagccctatgttgagagggtgcgggcgtgctaagtttcccgagaagggatcccaaatgccgaacgactggaacggccgcaatgtagtggggggacagtctattccgcgcaccccaagttagcgcggagtgctcaaattcagctccagggacagctcaacagacaaccagttagtatcgaaagtcgaccacagacgaaatcttattactaggtgttatacatccggatatacaaacagtctttttcaagactagggatttcagtgcataggacttgta

SEQ ID NO: 199 - DNA, 628 bp, unidentified
  source 1..628: mol_type = unassigned DNA; note = unclassified RNA viruses ShiM-2016 sequence
cgtgtagcacgattattagttggatgcttatatggtatatgttgcgcaaacgctcatatgccatgtaggcactgattataagagtctacccagttttaactaaactctgcttctagttcctttagaagccacctaccgcgaggtagtttgtataatagtgtgtatatgtaagacctatttaataaaaattattcatatcttataaagaaaaaacttaggtctgtgatttgtataatatagtccatcagaaggatccctgaattactactagtcatgtagtaaggttgaaaatggaaatcctgcttgttgaatgcttagggtgcgattcactcactgtgtgttgtgatagtacttggataagtatttagtgacgcttgaatggtcactattgtcgcattcggaattgtgtgcgactgattcaagaggatatggtggaaaaagatcactggcgtaaggcaatccagtgaacactccaaagggaggagttagttcaagtttctccgtgtcaggctcaggaaagccgggtgtggacatccacctactgaaccggttttgtctatttccaataaaatagtcactcccaattcgcgcgttcctaacccgtccccgcaaaattaaagaattaatc

SEQ ID NO: 200 - DNA, 630 bp, unidentified
  source 1..630: mol_type = unassigned DNA; note = unclassified Triatovirus sequence
gggaatccctatgcgcaattatttgcaactccgacgtggctgagtataaacgatcccgtatgtcctgaacatgacagcttagtcaataaaccgttcaccccaaactcatcaaatttacagtatttagatgtaactaaaatctttcactggattaacccaattaagaaagatgattagtataagttagttttaattattagtggaaatctatttcttttcccgtgtataagagagacctatttgcacgttaaatatttaaatggaatacatgatggtgtcatgttaaaaacactcttactactggcgtaagtattctcgcttttagtatcgtattaaagaaataccgtataaaagattgtgtatcgcgattgcgaaagctaagacaatgggtgtaacccaggtcgataaccattagcacgcggcatttgcagcaagcaaagcacttcccttttatattgcctcatactcgcgaggttcgactatgagtgtatggagcatgaaattgaattatctttcatgttctgtaaccttcgcttgggaaggacggatcctttctatttttattaatgacaactaaatcttttgttcagttgttatcaaagctatcaaagtttaaacaaataaattaaa

SEQ ID NO: 201 - DNA, 647 bp, Ghanaian bat henipavirus
  source 1..647: mol_type = genomic DNA
ttgtatgtaatcagttaaaggaatctattatttctcttctccattatctgattatatcctaagaaaaacttaggaattcagggtactgcccttaatgacttgcactaatatcaaaatttcaatatacgacgaatgtgattggcttgtattatcatcataactacctccagccgtatcactgacaaaagatttataagcactggatcacggagtcagagttcaaagcttactaacgtcaacctcattatatctagttggtgttacagggttacttcgagtcatatatgtaattgcacctgataatacctctctcatctagtacattacctcaacagtatgatctcggggatccaactacacctcgacaactcataacaatcaactaaatctgcctcacaattgaccattgccattctctcagtcataaaaaggatcatcccaactgattgattatttctttaaaccctaaacgtaaattattcaatcatgtaaaataaacataatactttcagatctacagtgatagagttcttaaatttattccaatataatcctattaattagcattgagagatctcccatgacatcacttttccagtcagttaaatctcagaaatccactaactgagctaccgtcgaagtcaagc

SEQ ID NO: 202 - DNA, 655 bp, unidentified
  source 1..655: mol_type = unassigned DNA; note = unclassified Riboviria sequence
gaggtgttattcaaggcgaatacaacaaaagcatcaacaactccaccaatgaatccaatcaaaagatcgctaagatgaacaatgacacctggacccttacaacagacaaaaacatccagggccagaaagacatccaaaagcatacagaggaccaattcacaaacaatggccttccatcttacatggcatatcaaaacaatgggggaaacgacaaattaccacatcagcaataccatctggggggaaacaactattatcaatctggaaactatggctcttcacagccatccatttcaaataattaccagcaatttaatcacgtgggagtcccttcaaaatttgaaaacaaaactgggaaacaaaaatttgttccgggtggaacactacaaccgaaagaacctactgccgttccgaatactatggtaaaaacaccattccctacttcaactggtactcaaaccagccgttcaggactcggatcccgtgttccttcaacttccaattttcaattttccaatatggacccaaaattttcttcaatgcttaataatcaggtttcaaaaagcaataaggccttcataccttccgataaagcaaaatttaaggatacctggactcagacaaaacaatcaagtactgccacttccatgatccc

SEQ ID NO: 203 - DNA, 660 bp, unidentified
  source 1..660: mol_type = unassigned DNA; note = unclassified RNA viruses ShiM-2016 sequence
cctaaaggtaaacaaaaaccaacggcttgtcccgtaaggacgcaggaaactgcgagacaagaaaagaaaccacgagtgattaacacttgtaaacttaaggatgttcctttgtcggaactccaaattttcataaggaattatgaaaatgctaaggcgactgggattgagcctgatttaaaattcctttcaagacagaaagaaattttgacaaaacacaatcccaacagaaaagtgaagacattaggacccgacaagaatattgccaagttgttagctgataagagaactagatcagctgccttggattatgtagcgcaaacatcttcacttgacaccgatctttatggatcctatttagaagatgaggaatttccaacttatttggataactgtaaagatcgccagtatagacttaagaccgagccatgtcgatcgtcttatattgagaacttcaatgaaccttccacattggtaccacccaaagatttggttaatgaagttttcgaacagcctaaaataaaagattacactttaatagaagtggcttcatttaagtacgtccgagagaacgtcctaacagaagtatgttttaataacactattgagatcagaaatagtgttgaagattctaggttagatgttttgactaatactgatttg

SEQ ID NO: 204 - DNA, 667 bp, unidentified
  source 1..667: mol_type = unassigned DNA; note = unclassified Iflavirus sequence
ataacttttaaaattgcacgtaatgtgcactgcaattttaaaagttatttttctagtaacagtacaatgcacaatctaggcaattcatgtctcttatggcatgctttgtttggatgagttagtcctctgttgtactgggaaagctttagcatcccaaggaaatttagcgaaaccccaaacctgtctcctcgacacaaaattggaaaacaaacattatcgaaagataataaggtgattccgtattaatccaagagtagactccatcacaactcttgtaaataaaattgtgaattttatctatatttgtacccgcaatagcgctgacgcctataaattgaatttataagtatgcatttgaatttctatttcctattccatacgttttggataggacacacccctctaacaccacctcagacgtggcgcattgagtgtgtaacgaatagaaactattttgcatcttgtttaggaaatttgtagaaacgaaccgcgacagtatagtaaccttactgtataaagacaaggtttatcaagtatttcacacttgagatgtctgatgtaaattccagactatgtactatagtgatctaaattgatgttttacaaggtatgtttcttccgcttcaaaggatcctaaccttagaagaaatcgaaacaaaatgaaaat

SEQ ID NO: 205 - DNA, 667 bp, unidentified
  source 1..667: mol_type = unassigned DNA; note = unclassified ssRNA viruses sequence
gcgtccggttatttcacccacctcttatatctggccgaccaggatatctgaggtagcaatataatggccagaaggttgtgaaagcttatttctaacggcgcaatcgggaaagttaattcttagcccgtaagcctaggatatcaacctggacagaacgagccatagcataggcatggtgagcgagattccacagcaacatttagagaatgagagacaaaaaccccataaaaataaatataactctcttatctaggtgaccgtaaatgtattgcactttttgtttaaatcgcgggaattgcggcatatgccgtcgctcttgacagcgtcctccggagattgttcttactccgagtgcgttaatgtgtagtctcacttcggtgccactactgggcccacagacgagaagagatcactcttggtgcaaattggaagtgcgtacaactgtacgaacggtggccgaaacctagtgccacagcatcgagagtaaagatttcttgtggatccacgttgtcaatagagttgcgtaggtagtctgtgtgtgagcgcgactggttatgatcgaaagctatccattagcttccgaaactgttagttcaggattaggctgagtagcatcttgaaagaggtgtgcggggactcgggcagtggactttcataatcactactt

SEQ ID NO: 206 - DNA, 667 bp, unidentified
  source 1..667: mol_type = unassigned DNA; note = unclassified RNA viruses ShiM-2016 sequence
ttcacaccctgcattaatttgtgaacactttaaagggggggtcaggaggaaatgcctgactcgagatggcgtgtgggtcatgcaaacacccgttcccaggccgggccgggacccacgcaggtgagatgggacacctgtttgaatcgacgcgcataagttgttgtcgatcgggcgccagccttgttcttcttcactctgattccggagcttcagagtggcgagcctgtgcgatacgtaccggcgtatctgaggtgaggctgacaggggatccagaaagtagcgtcctggatggtttggccacctataaactccctgcccccgagtccaccgtccctgggcacggttaaaccgtgtcaacactggtcactgcgcggcgacgcgttgttggttggttagtggatctgagggaatggttgcggtccgctaccgggggcgttatcccgggcccctattttagggaaggactggtgcaccattttggaaagccagtcgacgctagtctccgtgagttgttcagtttttcgttgcttaaagtgacctaattaaggtgttcacagaccgttacttcagcttgactttgccgccaaacgtgcggccacatacatcccaatagggaacttttgtctgcacgagactgagcccagctcaacttgtccgttaaaccgag

SEQ ID NO: 207 - DNA, 674 bp, Neofusicoccum penoulivirus
  source 1..674: mol_type = genomic DNA
gcggtttttggccgccctcccggaatttgtggctttcctaaccgtgtgaaggtcatgtggtgttcgcgtgagtgtgtctagcggccctctaagggagcggtgggggttaaagcccgaccactagctgcacgtgtaaccatatgacatgtaacatccagccaccttccggcggtgaactggcgcgtctgagaacgctccggattctccggcccccagagggtccatcgtaaacggtgcggtaactcaaagtacgaaattgaggggtctcagccccataaaacaaaggaaatgagttataaagagggtagcgtgcggcaatcgcgcgtccataccgctaaaccggatgggttctcggcagggagtgtgtgcgacagtaacgagtagtgtcgactgcgcgggatttggccgctgtgaaatgcggtctgtaaaaagggatgttggggccttaccggtgattgagcttagtaactcttcccagtaccaggactccgtgactgtgcctcgcgcgcgacggagcttacgcaagtgtgtcttcggatcctgggaccggttcggttgacatggtggttcccattccctatcctattctcgctggcgaaacaccgcgtctccggagacgctgatgtgtataaaggcgaattgaaatttggaccaaaacaaaagaaaacgatcga

SEQ ID NO: 208 - DNA, 679 bp, unidentified
  source 1..679: mol_type = unassigned DNA; note = unclassified RNA viruses ShiM-2016 sequence
gcgccaactgttcgtcgtattatccaacgtcatggattccacaagctccgcagttcaagcagcttttgtggcctgcaccatcgggaaaatcggtttaactctgtataaaaaatggatggcaccccggtgggctgctgaccgctatctggctaaagctgatgctacaacccgtgtgatcatggaagaggttgagaatggacatgactttgaagtccatcaactcacagtcgacatatcctctcagaccatggacactccggaaaatagcaccaccaaacgtcgggttcggtctaaagccccctttcgtgcttaccttgtgaggtctggcaaggctaaatttggtctcatgaagcgaacacccgccaacgtcatgtgcgttcgcaaatacttgtacgacctatgtgttgtgcatggggtgatagcacgacatatttgtgagaacgtagacattgcttcagagcttgtcttcattcccaccgctcatgagttagaaacacttgctatgcagtctagccgatatggaaaacgtcagcatacagttaagaacatcctctctgaggatgcctctgactgttgatggggccctgctaagttggagggggtagacactgatccaagcgactaccccggactcactccaacctacgctgggatcccaaaacgacgaaagtgtttgtat

SEQ ID NO: 209 - DNA, 681 bp, unidentified
  source 1..681: mol_type = unassigned DNA; note = unclassified RNA viruses ShiM-2016 sequence
cagttctcaacacagaacaacgggtcatttgtcgaatgatgggatgcgacagttcccattttcccttgacactggaaatattatttcgttagataattactcatgtgtcagttgccttgccggagatccgcttagcaacactttacatcttcccctgtgccattttctggatggcctgcaaagccttacggggccgagctcgagtttcgtttatgcgttacgacaagtttacgattcaggttggaataccgccgtgatttcacgtatgccaagtgcgggtgtgcgtgccctctaagttagaggggttaagcagggatagggatgtttagtgtgtgttttgggatgtgaaggaagaaacagctgatatgtggggagctaaggagcgttttagttttattccagcgggtggatgagaagttgggagagaaatcgaccgcactggggcctgaacttgccctataccaacctcaccaaacccccctggggaaatgtccacggtgccaccttacggtggttccactcttttcatcgtgagtgcaacgacggtacttccatttaatattgccgagcggatccatgaaaccgctgagcgattgcgagtgacaaattgcgactgtgcctaacggcattggcgcgacggttaaaattgcacaacaataaagtaatccaggcctgaggcca

SEQ ID NO: 210 - DNA, 687 bp, unidentified
  source 1..687: mol_type = unassigned DNA; note = unclassified Sopolycivirus sequence
aaagttgtggtcttttgctccacatcacgtctaagcgtgagcaatcaacgtgattaaataaatgaatgcatagcgttttgtgtatacgtttacggactgtaaccctgaatacacaccttaataaaggcgaaaccctaatcgtctctattattgtagtcctccttgtcacgggacaaatgcagggcgttcacgcatcaaacctacgagcgttcaagagccttactccaatattgtttgaggttaaggcagccaccccatagaggcttaattcggcatttagagtccaaggttggagcacatgaatcaagtaatgtgtaattcgaagatggcgattaagtttaatcattctgaagtcctagcaagatggaagaaagatgtggatccgtgtggccgttagctttgatgtaatgtgaattgctgtccacccgtgtgggtcggctggacagaaaggggtacgacttggtccgcgcactctacggagggcataccctgtacccattctggcgatggatacaccgtctcaaacttttaaatacaacttatgtgctattatttttgctgctttatacgctgccctcaacctgctattttatatgctacaatattgatactgctatatttgctaacaattatattgctatatttcttataagttgaaaagtaagagacgctatatcctgagataaa

SEQ ID NO: 211 - DNA, 724 bp, unidentified
  source 1..724: mol_type = unassigned DNA; note = unclassified Mitovirus sequence
gggacctgatggtcctcgacggcggagaagagctttcgccctctcgccttcaacggttagttccgtgtaactcaacattacagttgaggtgcattgcgctgccttagaggggagacccccaaagccttaagtggtggataagtgttggacattatttgtttaacggctgtccgccgtaggttattaactctgtgtttaaaccttcgaagtatggaggatctgaagaacggtaatttattactgtaactttgggttagtacatacgaggaggtacatatgatttatgtccctacaatactaacgtatagcttactaaagctggctgcggcccaactgctgtaatggcggttggaaaccgaaggttagtgttcttaaattactttacaaacctatatatggacagtataccaggcactgattagttcataatcaggaaggagtaccggaaccctgtgcgaagaaaacctcgaaagaggcatgttttcacctgaaatcctcatagcagtaccttagacagtactcactagatggataggcagtcactggaaaccatgcatggtgctaacgggaaatgaccaaaaagtctagttatccgagagctacatatatagtaacccgagctgagtaacactcagaaggagggtagtgaaccatattggattggtccgtaacgttagaagtgatactaacaggatccctttgtggagctccagatattaatact

SEQ ID NO: 212 - DNA, 741 bp, unidentified
  source 1..741: mol_type = unassigned DNA; note = unclassified RNA viruses ShiM-2016 sequence
atgcactagtgcataactaagtgaagtttcagtgagcttttgtggattacccgctattagctcatatagctattagactgtgattttcgaaagcgaacgaaatggatctaagttttgtgttattgtgttgcgagtttttgcccctcctcgggttaccaggaaaacaagaaaaagctacgaaggccggctaagtgccttcaatttcgttttcgttttagggcgttgtctgaagtaggttcccaatctatttcagcctagtttatggtgcaaaagttattgctgagtgattaggataaatgagcctaaacgttatccgccttgacaaccgtttggtttatgcggaaatcatggatccccgtgggtgaagtgatattccggtaattgttaacggctcaagccagggtgcggtatgcgagtcagatccgaaatccataaatattcttccggtccaatattccgatacataatgtagagcaagaggccaaaggttaattatgaatgaatgatcgtgattcataatgtccccccttttcgttcccgtaattatgtattagctactggcccatcacaggatgatgggacactagtgaaagcgtgctcttctgggaggttgagcggcgctaggcgggcgacctgaacgcatatatggcaagtttgttctaatcacaaagataacaataagcgtgctgcataattaagctagttttgggagtcagcgggctactgaagtccgcacaccca

SEQ ID NO: 213 - DNA, 743 bp, unidentified
  source 1..743: mol_type = unassigned DNA; note = unclassified Mitovirus sequence
gggcgcgagcccacagtttcactaaataaccttgtgaaatggttatctttgtgacctgccttaattggcggcgcgcactggtaatttccctataggaaaattcctttaacgtggatttagtttcgtagttgttggtcataaggccgcctttcgcgagggcagcagttgacttgggtttgcaccccatttcactgtggtataaagccaacagttactttctatataaagcgttattgaagggtagttatcctgcctttctttttagtcggaaacagcgaaagatcaccgatctcgggtttgaaatagaacaccgatcacggaattgagctgcccggtagtaatactggggggtccgaggaaaagagggtaaggctaatttagccctatctgtacgatcagaaccttgaataaggcggctgcagcccgtagtgatacggaaactgaagtctttactcgatacacaataaagaactaaagcaacacaaacatataatttaaataaaatattgttcgcgactgccactaggtctttaaagtcactgtcaaagtgaagtgccgggatccaagtaaaattgggtcgcccgttgctgggtctcttattgagattcattcccgcaacgggtattaagatcgacagaggtcgggttaaggtaacgttatccttcctagcgacgtgtcataatcttttcaagtcaaatggtttaccttttttggttaaatcattgaaagcttgatctgttatt

SEQ ID NO: 214 - DNA, 748 bp, Reptilian ferlavirus
  source 1..748: mol_type = genomic DNA
gcaggttggcgagatatccatggcagtttcggatctaggtgtcattgttagaaaagtcataatgggcaattccgagagggacgaaaacttaacagcactaatgatgaagatgcaaaaacagcttgcaatccaggagggaaagctggaaactctgcaatccactgttgggaaaatctatgctaaagttgacctgatcaaggatcatgtctcgaagtacatgatattaacaagagaaggaggtaaagacagtcaagaacatgaacctaggagattgatacagtcttacacaggcccagggaaacccgaagccgtgatcaatgagcatggccaaatcaggctcaaaggaacgaccaggagtggcaccagttggaacacgaccccacatgatttggtggatcccacaagactgacgatgtccagagatgaatcaaatgctacaaggtttatacccaagcttgatgatgcttctagggcaactctcctcagcctcctaaccatgtccggcctggacaatgacactcaaagcacacttgaaggaataattatgagtgccacaagagtagatcagctaattgaggttcatgagatactcttggaaccataacaaccccatatatgatagacccagtatatctgtgcaatgtcgactctccaacctgacatctgagccacaccgccatagaacaaattccatccagtcatcaccttattaagaaaaacctaggaacaaagttccactggttccaga

SEQ ID NO: 215 - DNA, 752 bp, unidentified
  source 1..752: mol_type = unassigned DNA; note = Picornavirales sp. isolate war204pic2 genomic sequence.1 sequence
attggatatcctgacggatccagtccaaattttctttaatagaataacaaccatgagaatgcatgggcgcatactgttggatatatctagtttcgtaagatatatggtatttacagttttaacctaattgacgccatttttagataaatggtaactagtttcaaaaccctcgagattcgaaagaactcacccttccgtttgcgaaggcaaagaagttccgaaaatcccgtaacccccccaagatcggggatgaagggagaaggaaatctaatccttgtaattattattattttaagcgtctttctatatgtagttgtagagagagagtagagtagagagagagagaagaagagtaccaacagagaagtactattaacgaaagactcttaatttaatataatgaaaaggtcattacgatgaattccccagaagtgaatctaacatcaaaagttcatttcgaaggttttgaaactagttaccatttatctaaaaatggcgtcaattaggttaaaactgtaaataccatatatcttacgaaactagatatatccaacagtatgcgcccatgcattctcatggttgttattctattaaagaaaatttggactggatccgtcaggatatccaatactatttattagttaacatgttagtgacaggccttgtagccctaactatcgcatctgagtaaacagattagacaaatccaacgaatttattaggctttatcgccaatcttctacgtgtaacca

SEQ ID NO: 216 - DNA, 760 bp, unidentified
  source 1..760: mol_type = unassigned DNA; note = unclassified Picornavirales sequence
ggctcgtgaggctggttactagctgagacgctagcaagcacacggcacagaagggatccctcgtcgtcacaatatcaacttgaatttctgtttggttgataaacccattccattggtcagttaaaatcgttggtcataactctcgcggtcaagatctctgggatagaaaatccatcatttataaccgccctcacttgtcggatatgtctcattcttttgattgaatcctcttccttgtaaactgacctagtcctttacattgcggaccgattcctcaaatttatgactcagatgtgaaacccccttttctcaaaaaccccacttttctttgacttggcatgaatttggattattctgactatcgattttaggtttaaggcaattttggtaaatgagtgttgtggcttgtaaaccgcagctcatatgtttgacagaaagatcttgagaaacatgatactatttagtaggacctccgaacaatagtccctcatgactactcttgagatgaagttgtttattatatcttgttatattgatttagttcggtatactgagagcattcatctaacccacatcagtcccctaagttttcggacgacaaggctgattggagtatttgtctaaggtaataaatgatggattttctatcccagagatcttgaccgcgagagttatgaccaacgattttaactgaccaatggaatgggtttatcaaccaaacagaaattcaagttgatattgtgacgacgagggatccctt

SEQ ID NO: 217 - DNA, 762 bp, unidentified
  source 1..762: mol_type = unassigned DNA; note = unclassified Luteovirus sequence
tagacgtaggcaagtttaatcttgcaccaatatagaagtagttagcgctttccattgttacttataggagccaaatttggtgagtcccgatcgatggatcctgggaaacaggttcggtgaacaaaaagccggtaatctcggggagatgtcagctcccgtcgtatcactttcggttgcatatccaaagaataaccctatatttgacaactaaaaaatagatagtttccgcctctcttgtaaaccacatacaagatgcgagcttgtggagagtaccttcccttgaataaggagggttgaaagtttctggttcccaaaccattgatcaaaattggctctgcttctggtgattacactgccgctgaatcaacagcgtaaacaaattcctattggccgctccgtgaaaagagagtggctaatacgcccctttgatggcgttaaatgaaagcgtaggtcgtacgacaccccctgtcaaggacagccaaccttgcgaagtcgggagaatacccgatagactgtggtctagtattaaaatgactcgagggctcttcctcgttaaaaagggggcgacggcaggcaactgctgtcattaggcgaaagcctctttgttgttaaggtggccatcgggtccacctgccccgtaaagttgacacctttacagaagtgttcttgctagtaagagttatttccttgtgaagtaatacaagaacctcctcccggcatcttcgtatcgtgtttgaggaatctctagtgttattgttagtt

SEQ ID NO: 218 - DNA, 773 bp, Mumps orthorubulavirus
  source 1..773: mol_type = genomic DNA
acgggaatggagcctcagctgggtccaaggagaggtccgggtctttgagtggtgcaaccctatatgctcacctatcactgccgcagcaagattccactcctgcaaatgtgggaattgccccgcaaagtgcgatcagtgcgaacgagattatggacctccttagggggatggatgctcgcctgcaacatcttgaacaaaaggtggacaaggtgcttgcacagggcagcatggtgacccaaataaagaatgaattatcaacagtaaagacaacattagcaacaattgaagggatgatggcaacagtaaagatcatggatcctggaaatccgacaggggtcccagttgatgagcttagaagaagttttagtgatcacgtgacaattgttagtggaccaggagatgtgtcgttcagctccagtgaaaaacccacactgtatttggatgagctggcgaggcccgtctccaagcctcgtcctgcaaagcagacaaaatcccaaccagtaaaggatttagcaggacagaaagtgatgattaccaaaatgatcactgattgtgtggctaatcctcaaatgaagcaggcgttcgagcaacgattggcaaaggccagcaccgaggatgctctgaacgatatcaagagagacatcatacgaagcgccatatgaattcaccaggagcaccagactcaaggaaaaatctatgaactgagagccacaatgattccctattaaataaaaaataagcacgaacacaagtcaaatccaaccatagcagaa

SEQ ID NO: 219 - DNA, 774 bp, unidentified
  source 1..774: mol_type = unassigned DNA; note = unclassified RNA viruses ShiM-2016 sequence
agaacccctcgcgggtcttgcatgcaattaacgactcctctaattagaaggggtgtcacggggaagacaacgccccgtggcgagaaacgcacgactacatttctttgaccggtttacctgccgccgcccggtagtcgcacctgtagaaggacccaggtgttagcagagtgcgccgaagcgtgcacaatgctggtgcgtgccttattcttttgccgagtccgcccacggatcggtggaagcctggtggaggggacgggaccctcctgaggtgaaggcctgtggaaggggggggataggcacccctaaggattggcctcctgtacttccatgctacgagtcggcccggtccggggcttcattgtcaaccgtggcccacacgctggtaacggcggtgggttgctagccgaccttgcaaatggctacgaacccgaggtgtggcggatccacatcggcctattgctatttcgtgcgaattactgcccctgaggggaggtgacaaggctagagccagccgttggtagcttgccctctcaggcccagtaaggaatgcccgttgggacgcacgtaacagtagggtcgcctttgtacatagtgggacatgcatgccacctgatcaacgctggaagtacttccggtcccagtagttgtttcttgtccgggttacctacggtgcaaatcgtggatgccccgtatgagaaatgaccattgggaccgaaagcgcgaaaccaacgttagcaggccaaagggaatccccttgagcgaaattagcttgca

SEQ ID NO: 220 - DNA, 779 bp, unidentified
  source 1..779: mol_type = unassigned DNA; note = unclassified Mitovirus sequence
ggggggggtcccccgcgcaagcggtgtgggctcttcattgagcggtagctaccaactactctccacatgatggaaggaccttggttattccagatttactctggaccctggcttggttaagactgcaaacgccactaggcagttctataaaacggacatcagtgccccctatgctgttacttggtaaggaagaagaacccttcttcatcccgtcagcatctccatggctggagtataacaaaacgggtgagtgcacgacctgggtaaggacccagtgaggctccgaaagtaaggcttcgttgattgtagcgtaggtaacggtctatcactagacaagtgccccttaactctggaatctcgctaatcagagatcaacgaaataaccaaagataatcaggaacaccggacttatacctctgtatgtcgggggggagagactccccacctagtacttggacgacttcctcggaaggagtctaaggaacggtcaagggaatctcctacggtagagctggccaagtcagtttaagattatagtgatatagtcttcagagcaagtagatccttcccttcagaaaggaaggactctcctgatgatcctcgtgagaggagtcacctcacttcagacctcgtacgtgtggtacggaaggatccccagacggggagaaatctgtatctgtcggcgacaactcccaccatgccctcttgggggggattgaaaacccttttaacccttgagagtaaggaagcccttctctgaaaccccacttaacttcgtc

SEQ ID NO: 221 - DNA, 781 bp, unidentified
  source 1..781: mol_type = unassigned DNA; note = unclassified Mitovirus sequence
cttcgccaacaattacggtggcttccgatgatctgcgccagtaaggtagacgtaccccagaggatccttttaaaggcagtcatcttctccttgcacttgcagtgctggccacattgtaatggaacgtaaggaataccttaatatactactggccatagttatattccatcctgagggtaacctcttgtatatccagggtgccgccttttactaaaatatatacttcaaaactgttacctgtccgctaaaacctattggtaatctcaactacacataaagcaaggtttacgccgtctagttctattgtaccactgagaggctatctgtaacgggccccctgccgccagaggtagtacgatatgggttaaaggacccaatgttccccatcaagatataccatcgtcactggtagttcatcacactagctcacctagctctcccgaagattggtcgcttctgggtcttggggtgcctgagataggtacaggcataaatacaccacttacccgtgcagggtaccataccaaaactccccttaaatagcttccacatggttactgtccctaaactctctgagaaggaagtcgttaccagagggcatacgtgctcagtaataacaatggcgaccgaggagggtggtttactaactatagtacgtatttggagatactacgtgtgcgagatctccggccgacctaccccatggtagattgtgcccccctgctctgcagacgaaacacatgggacactgtataggaaacaaaacatatgcgaaattgtt

SEQ ID NO: 222 - DNA, 807 bp, unidentified
  source 1..807: mol_type = unassigned DNA; note = unclassified Alphachrysovirus sequence
tgataaaaaacaaaaaaccgctttttgccattatcactcaatcaactactagatatgaataaattagacgattttagcgatgaaggcggtgcccccgcgctaccggggggatggcgcagaacggaggtaggcaagactataactggctacctacgtgataacaatttaggcccatggaataagttaactcacggacaaactaaccaggtcagacggatgttctcagcccttactgttagcagtttagaaagcgtgtcatcgcctggcccaccaaggaggcggttaggatacattgtactgccgcctggtcacggtaaaagctatatactgaagataccaccgcgacctgtccaattggttgaagctgatcaggtgatggattaccacctggatcccaccctggcacggttgcgtaagaacgcaaaagctagtgggtattggcaagaatacgatactaactatgctcagaggttggattcacgattgccgttcggcgattgggtaatcatgctacctagcgatgagttgggagtaacgatggggtggagtagacttgggacttatatattggctctggacgcgtgggcaaataatctcaagggacgtaaaggctcgatatctgagtatagtactgtatatagtagggctcagctgattgaaggtgttaaatgtttcggtacaaacgcagaactacaggcagctgtattaagggatgttaacaagttcctgaccgcctgaagtacctgatgagtctcccccaggggaacgaaacgctgtcgcgtcgtaccaggggcaacgcaacgaaca

SEQ ID NO: 223 - DNA, 808 bp, unidentified
  source 1..808: mol_type = unassigned DNA; note = unclassified Orthorubulavirus sequence
gctcttaaagggacttgatcttcgccttcagactgtagaagggaaagtagataaaattcttgcaacttctgcaactataatcaatcttaaaaatgaaatgactagtctcaaggcgagtgttgcaactatggaaggtatgataacaacaattaaaatcatggatcccagtacaccaactaatgtccctgtagaggagatcagaaagagtttacacaatgttccagtagtaattgccggtccaactagtggaggcttcacagccgaacaggtgatattgatttcaatggatgaactagctagacctacactctcatcaacaaaaaggatcacacgaaagcctgaatccaagaaagatttaacaggcataaaactaactttgatgcagcttgcaaatgactgcatctcgcgtccagataccaagactgagttcgtgactaagattcaggcagcaaccacagaatcacagcttaacgaaattaaacggtcaataatacgctctgcaatataaaatgaggtgcagtcacacaagagacactcaacatgcatccaatcaagatccagactccatccatccaaaaacacgcccacaattgtcaacaccaagaaacaaccacagccgaaccatgctcaaccaaaagacccaaacaacacctcacatcaatagaaggctggacatgataaatttaataaaaaaagaaaagaagttaagtaaaatttaaaggacacaatagagaaaatctaggtccgaaagcttgcctctcagacagatcccaaaatcatagtccaaaccccaaacacagcagcagac

SEQ ID NO: 224 - DNA, 812 bp, unidentified
  source 1..812: mol_type = unassigned DNA; note = unclassified Dicistroviridae sequence
actggcctcccttattattaggagacttcaaaatgcgtacggggttaaacccgtacgcaattttgaagtctcctaataataagggaggccagtccgtctaggtagactcgtcatatatacatttattgttacggcaattaatttatatatttgaagaggcctattccggctgcccatagtgttattgtatccctctgatagattcaccgtttctaacactccaaaccaatgcaaaactgactttgtcgacattgatcgttaagagagaaacaaagatgttcaaggtactagctatggcgtcttaggagggcgtaaaactcccgcagtgacaggcgtatctgtctaccccttgactgtaatataagttgtatgaatgagtgcgtgctcccgcaagtaataatagtgagcaaaattaattttaagttagttttaagtctttcatatatatttatttcattggcatgtcacaaatcgtgcagtttattagtacctatacgaatcactgacttatgaaaatattatttcgatatctctaagatatagttttgcccagtgggagtctatatgatttcctgcgtgcttcggctgaggcaaaatttaagatttaatatgagtagtggaatatgtgaggatcatgtgggaaaatttaccggtgctggatctttcatttttattataggtccttccgcacggacaggttaaccgaatttggcacttcggatccctggataataattgccccctttccacctcagcaaagtttttgggttaataaagcttggatttgaggatcaaaatatttttctctcatc

SEQ ID NO: 225 - DNA, 814 bp, unidentified
  source 1..814: mol_type = unassigned DNA; note = unclassified Picornavirales sequence
cattgctacagcccttagagaatttactttacatggtaaaaacacgtataaatactggtattctgaattaatcaaactaaaagaagattattacgaaggatatgaatttgaatgtcttgttcaccgtgattaccacatggctctcaccgaaactcttggtggagatcatgtttggtacatgtaaagtccaaaactaaaactgtaaatatgtaaatacttttaaaatacgcccgtaatggcgttaaactattttggaaacattatatttaatggatccatgccccaaaggcaaatttgatgtgtgatcttgctcccttataggctcatcattataatctagtagtgctgcatcaaataatctcaggactttttagtcactacgcccaaactgagagttggcaatcccaatgaacaaaagttagatgaaccctgatttagtgttaattgaaactaaattgggttaaataaaccaattgctaacactaactcaaatcaaactaccactagtgttactagtggaatcctcaatattggagattcaacccccactcccgtccaaggtacacccgaggacgctcacactgaagctgctgttaatcaagtttttcagcatgctactaccaaattcatcgatgataatgataccgttaacagagatgaatccaccgtcgaacatatcaactctagttggttatcactcaacgacacacaatccactgagcaaactattattgattttctttcgaaacctatcattcttaattcaggtactttttccatttctgatacttattcttttcttaactactatact

SEQ ID NO: 226 - DNA, 827 bp, unidentified
  source 1..827: mol_type = unassigned DNA; note = Fesavirus 1 polyprotein gene, complete cds.1R sequence
gttttcatcaaagttgaagctcctgaaattgacagaagtgatagaagatttcaggagcttcaactttgatgaaaacattaatacgccttttgagtgcttcaggatccgtcatacgagactggagctccgcttgttgagcatcgatgtcgaaatttgaagttagaacgacgaatggggaagagaaatacacattgcctttgcctgaacactcagcaatattgagtggatagggagactcgtctgtcatttggataagattgaatatttcattatttcgatactctggatctttcatttgaaaaacgtcgttacacactgcgaatctctgataggcgtactggtcatggtatggggtgtttgacatgactgcgtatatatcccgggatttgtcaaagtcaggctctccaaggacagcacacaagtcatgtgccaattgtggaaccatgactgtcttcccaatacctgggacgccataaatatagattgtgtaaggtttcattttaccctcacagccgacgaatgatgctaagtttccagatatgattttttcgagcttacgaacccgatcctggattggtttaacttggtcagttggaatttcgtgcttctcggactttcgcacaaactgtcttccctgagacagcagggacaaaacctggagacgagaaactcgtgatttagttagttcagccaatacattccaggatcagcaggctcaggctgttgattggtggggtttggtgcgccttctccgccttgatatcattcaaacattctcgctatctgatgctatatcgaaaattggagttaaccagcaggaggaggaa

SEQ ID NO: 227 - DNA, 834 bp, unidentified
  source 1..834: mol_type = unassigned DNA; note = unclassified Marnaviridae sequence
tcaagcacgtaaacgtgacataggaaaatctgtttttgagcagaatttttcctatatcacgtttacgtgcttgacaatgtcaagtgtaatccgattgaggtgcaaggcctcatctgccgcgttagcggcgcgctaggaccgaaaaagcaaaccctatgtattctgctatttcgattcgtatacattgggcgttgtgatcgacccaaagcgcgctgcttacgcggcatagggcggtgtcgcaagacaccgcccgttgggggtgtaatccccccctttggagggttgaaccctccaccttagtcccagtaggttcccactgagcaaacccagcaatggatcccgtggaccattcggccagaccaacactctccggagttagtaattcatccgtttggacacgctacacatcgtcgactgctaatcacttcgtgcgtgctattgtgggccgtccgcgtccactctaagactttgtgctatatatttcaggggggggcccctgcctcccccactgcatatacattgacggaacccaccgtcgttaaacaagtggagaaaaacagcgagaactgaaactcgcagaaaccattgtgtcgctaaggctgccagaataggcttgcctggtgcagaaaggaacccataacctccgacctctccgttccgataaaggacgacgtcgaaggcgaaactgtaagttgatacttttgtgtatttgccaaacgagctcgtcgtaagaccctacgctcgtgtaacatttgcacaattgagatactgattggaccctctatgccctgatagctagatcgatacatttactcatcacagtaaaaggctgag

SEQ ID NO: 228 - DNA, 855 bp, unidentified
  source 1..855: mol_type = unassigned DNA; note = unclassified Picornavirales sequence
ggtgcaagccctccctcccacttggtggttggaggtgcacgttcaattccaaggcgtcctgcgcagtcgtcatgctgtgcggtgtacgtggtaccggctagtagatccgagagtgtacctggtgcgcagcccgttcctgatactcactagtggcaacccctgtatgaatgagccgtcttcagggttagttagtggcttaccgaatctatttctacctttcaacgcaccgacttaggtgtatacaatcaggacgttagtggtccttctgtaagtagtggcacaacttcttttgtggcagaccccgtggctgccatccagccggtcggccggtccgaccaggttgaagagttgtttgccccgaattccgttagttctattagtgactatttagctaagccgtatcaagtatttcaaggccctttcactgttgtggatccaattggtgccattttgtattccgccgacacttttacttattacactaacttgttaaaaataaacaagcttagaggtttctatggtctgcgggcaacgctgtgcgttcgccttgatctcaatggcactccttatcacgctggtcgtttgaggttgtgttattatccttgttattctgagaatccaaggaaggggtctgcccatgttcaaaatgttatttctatttctcagttgcctggtgttgacatcgaggcaaacgagacttctgttttacttcgcatcccttatgttgctactactcacttcattgaacttactgctggccctgttgattggggtcgtgtttacgtttctgttatttctcctttgcgtacggggcctgacaaccaacagcagatcaattatagggtctggacttgg

SEQ ID NO: 229 - DNA, 859 bp, unidentified
  source 1..859: mol_type = unassigned DNA; note = unclassified Bunyavirales sequence
gtttgaaataagctgtatgtgtgattgagatattgctattccgtcacatagaatttctgtgaatccactcttatctgatgtgaatgatgattcaaccactaatccactttcacatttgaaacaaccgtggcatgctgttagtttgaaatttgttattgctgccttttcaattagtgtttcaggttttttacctttgatagtgaaaatgaagtttagatcattcattacttctccaactttgtaaattttgtcagcaacatgtctgagattgtgctcagaatgcaaatttctaatcaatttgaagttatttttgcagcaagatttgaaagtgaaaaatcgatttcttgaaaagaaacaattatgtttgtaatcagcatcatcagaatcacaatcaaaatatggagtcattccgtcaacatgttgcagtgtgccaaatctatttgaaaattcagacctatcattaattgggccagaatacaaatggcctttgtaagatgcaaatatcttaccaacatcatctttggaatctccatcgaatgtgaatccatatttcttctgtgcaattagttctgttgaagatatatttctgcagaaggcttttgattgaaataatacacataattcaattgatttcttctctcctgttatcttgtagacatcagcacaatcacctaattttggttccatccagcaggttccacatgtgcaaccggtacctattgagaaacatccggatccgtcacaagaccaactacttgtatcttctgacgaaattattttgttgttcacagtttttgaaccaagtttgtctttacacttgtcacaattttctgtacaagtatcggtgctttcatatttc

SEQ ID NO: 230 - DNA, 861 bp, unidentified
  source 1..861: mol_type = unassigned DNA; note = unclassified Sopolycivirus sequence
aagaccaataagagctctatggaatgaacatgtagagcaatgtccaaattgcaaatatgtttattctgttttacgcagaccatatatagttccttcagttccttatttcagcactccaaaattccaaacttcagaaacctcatttccttttcctgaattcactaaacccataagaaaagaagaaaaatcgtcttctggtgaagatactgttgatgattaagtattctttatgagttgcagtctcttactctgcactgtgtctaggtggaaactatcagcacagtaaataagtgaatgtaacaagtttggtggatacttgtcggactgacgttataattcaccctgtatgtttggcgaaaaccctatcgtcttcatatggaagttctccttgtcacagaacaaatatgggttgcccccagcattaaccactaagcgtttaagagctcatgtctctctttagagatttgatgtatgagcaactctcccggggaggagaatttaggctgactcctaccaaggttggatcttgtgatacgtagcaagtataggatgatggctaattcttttattaaattcagaaggactagcaatctggatgaatttaccggatccgtagagtcatgtgtttaatgtaatgggggttactgtatactcgtgtgggtcgactatgcagaaagggggatctcgccatagagatgtcctgtacccattcttgcggtggacacatcgtacttaaattttaaatgtatttaatgctattattttgctgctttttgctagttatttgcttattttattgctattaataaccattttgctgactaagttgctttcgttaagttatattgctattcaactacg

SEQ ID NO: 231 - DNA, 863 bp, unidentified
  source 1..863: mol_type = unassigned DNA; note = unclassified Mononegavirales sequence
ggatcgatgaaggagatcctgggaattagtcttagaaaaacccgacagttactagtcaagcaatcatgaactatataacgccgacgattttggttgccgtcattgtgatcgcccatacagtggccattcggtcactgtcttacgacatgacggacagggtacctgtgatcgccctcatcaatgaccacgcttcgtggtttatgaaattgaccgtcagcccggtgactatcaatttttacgcgacgctgacctccttcttcgccaccttagccctgatgggtgtggtggtcaaaaattggcgggcgtatgtccgggacatacaacgaggggtggtgagggcggaagtgttgatgaggtcagcgtgactgcgctggtctgcttctagtttctccctgagagagttaatctgtggaacccgggatctcctgaggcggacacacgacagcattgtgcagcttacatcttgcataagatgctgtcgtgcttattttgagcgaattaaactcctcaattctgccgaagcagggggatcctagatttcaactagttattctctcagaggaatagtttggtttattttgttagtttcattgtttttttatgcatagttctatgtgtgtttgtttgttacacatattttgttttatatatatacacatgtatttttgatgttggtcatgtttgtctagcaattcggagccctatacactcatcttccctgattctaaattctctgtagaaattcacatatatgtgtatatgtatatatattttgatactgacctgctctacaaggagcttataacaaattgagaagtggcatatcttcttagaaaaacccgctagttactattcaaatcaaa

SEQ ID NO: 232 - DNA, 867 bp, unidentified
  source 1..867: mol_type = unassigned DNA; note = unclassified Dicistroviridae sequence
ttaaatagaatccagatcaattcgaagctttttaagtagccgatgtgtagaattttagtattgtccattttatagggtacagatcaattcgaaactataattgtaggtggccgtcacaagagcaaacaaaggtagatttattagagtccagatcaattcgaagctaataagtcaaaattataacaagttgaataactttaaaatattcaaaatcaaatttatttaaagaatagtactctctttttcgatagaatgttttaggaaaagagctcaatattactttattgttttcaaattattatgttttaacacaaaatatatttttgatagtagtgacagtctatttctctgtctaatgtcgatttcccgttatatgtggatcctagtgtgaattactagtaaaattttattccgtgtgcattcgtataatgtacttattgtttcaggcgatttagtaatgctgtttcaataatattaagaactaagattatttctatattctaatcaaagataaaatatagactcttgttatgaggaaagttttcccctctttcaagttttaataacgaaacaaatatagcaggttatttgttgaacgatcggtagttactccgatgattcgattacttccccttgacccaactttggttgaacttttagttcaggtatatgttgcattttccacgtgtgagaagcgtgttcttaagtgaaaggtaagttaggaaagaatttagtgttgcaaataatatagtgttatgtttcctcaaaccaggtgtgttcccctcgtttgttgtatttttagggcatccgtaattaaaggattttaattaattaaataagtacaccattaatgtaaatttttgttgt

SEQ ID NO: 233 - DNA, 892 bp, Achimota pararubulavirus 1
  source 1..892: mol_type = genomic DNA
caggagttcagcaacaagttcagaactcaagagacgccatcggagagagtttgatcttagatggactggaagaagaccccatgtcagtgaatggtgcaaccccatatgtgccccaatcactccaatcccacggagatttacatgccgctgtggagactgccctgatgtctgccccatgtgtgagggagattttaaggtacttaaaattgctggagaaccgttttaatcaaatggattggaagttggacaagctgattggacaacagagtacaataacccaaattaggaatgaacagatgggactaaaagctaatatggctatgatagaggggttgattacctctatcaaaatcatggatcctggggttggtactggagcaaacgccgcacaggccaaaaaattgttcaaagaagtgccggttgttattagtggtcctgttgtgggagagaacccattggtgacagctactgagcttgagatccaagatcttggcaaaccagcaataccatctaaagggagttcgaaaaaggctggactgactgaagcagatttggctgggtacaagatgaccctgatgacattgatcaaggattgcattcccaatgcttcgatgcaacaagagtttgagaggagagtaaatcaaatcaagaatgaagttgatttcaaggcgctcaagagagagatattaagagctgctgtctaagaagaatccaaattatgcttagtacccatactgcaaggctttcaaggaatcatgctgcttaaatagtgcacataatcaatacattccatgcaaacaaatgacatcctgattagtagatatagttaatttgcaatttaagaaaaaaccaaaagtgggcccggacccatcaagcccaggagccctcaacc

SEQ ID NO: 234 - DNA, 898 bp, unidentified
  source 1..898: mol_type = unassigned DNA; note = unclassified Orthonairovirus sequence
ctcgaagatatctaacccccgagaattacaaaccattcaaccaagagaacgggaagtggcatctgcctcggggacacttccttgtgaagtttagattcagagattcaaccttagtcatctcaagggattcacctctttctcaaaccctcttacagagaagttggctcactgtagaccaagtggagagtgaccaaccgtggatcccaacttaattgctctagtcatttaccttttgagcttgatctccattacagtttatcacctgtcaggtcccaactggccaagaataactgagaaagaagaggggccaagagacatacccaggcttctacaggagaatccctgccaactagtctctttccagaagctagtcactccaggaagaagtgtctgtgtaacctcacagaaaacaaagccaggaaacaggagtccagcagaaactctgggtgaggtccaggctgatgaagctgacgaactgatctgtgtagttgaacaacaactgcaagacttgggtgccaatgctgtcgctttggtagatcagaaagcaaaaggactccaggaaagactagtaagcacgtggaactacagcgaagataacctctcaacatcgccagtgttctggctggttatacttgtgttggctggttttctggtgctccgcagttctaatccaaggtacatccctagctgtccgagctgctgtaacaagtcagcaggtgaaagaaaagtagtgtacctagagtctgtacacactcagacgggaagaccaagaaggaaaagctcgagtactcaaaccgaagcagtccctgagaggataagccggtcatctcaaacagaaggaccactgacaaatccagtgcgagaaagtctacagctgctggaaatctgaccaatcaca

SEQ ID NO: 235 - DNA, 908 bp, unidentified
  source 1..908: mol_type = unassigned DNA; note = unclassified RNA viruses ShiM-2016 sequence
cgcggcaacgcgtacgtagagtctgtctcgatttggggtttaaccacccctggttcttctgatcaatatatatatgtagcaatggttttccttgtgttattttacgaatgatcacaagatttaaaacccctacatgtatgcatatcgagcagacaggttttttgagcgctagcagtcgatctactgccaccaacggattttaccaattcaatcctaacagcaattggaccgcgccccccttcgggggggcgcattcaggcactttgtgccgccgctttatgcggtttaagatgcatttgcatctggaatatcccgggattccactagaacaccgatttaacggtaccggggaccccccgcttatgcggggggtctcggcccatctgggccaaagatcttacgtcgatctcaacagcacgtaaacacgctctcccatcaacgggattgagcacttcttatacctttgaagtaaatttgggaacctttctacttccagtgatagtgaatcacaggacaatctgttcacggaacagggtacttacggatccaccgtaagcgtgaaattagtttggggagcgaaataccccatttgaccgtagttacgcactcgcgaagatgcacttacgtgcgtcttgcgaggaaaaaaatatctcgtgtggttacgcggtttgatgtaaaccacctgttgagagtctcatgatactcgtccggtacgccgggtagacaggacaggtccctgcaagccataaccttaaactggtaggttgcctcacatggtttttgaaatacatgctgtggaggctttccctattggataataaagcacgtgaccgacaattgataccaccttcgcggtggtatcaatcgtcggaaaatttcctccaagaagttttccggtgattgatatc

SEQ ID NO: 236 - DNA, 909 bp, unidentified
  source 1..909: mol_type = unassigned DNA; note = unclassified RNA viruses ShiM-2016 sequence
tgcaggtttccttttataggagacctgcacgtgtttttgtcgagatgaagagtagctgctcttctcagtattattgtatgatattttcattcatattctgcgttattttggataactaagaattggtgtaatttcacagtagtactgtgatttgcacttttttcttaccaatctgcgtatgaatccctgtttgggtttacatacacattttatttgaattcgacaatgaagtttagcaacttctttctgaaaactagctagagttcgacgatctctctggctaatgacaaataaccaatcaaaaagtcaaatgttcatgtatatatatatttagtagtgacctttatttagaaaaactttagatgatttatcgtcaagttgccctttgtgaagcgatcagctttttatatcgtttcatttttgtatacgtcttaattgacgttgtaagtacgttttgcatacctcacattgaggatagtatcgtttcctgactaagaagttaaactagtctaccaatagcaaccatataggatatagctttgtttttaacaaggtttaatctgatcttatgctcttgcttacggtgttttatgtatagaaaaatttttataaaaactacataattgtcaaaagaaaaagcgttacgtactgacgcatttatgttcacagtgtgacacaaaccttctatattttgattgtaaaataggctttgcctgaccatttatcaaatacaaactgtttcaaacgcctctccgagccatattggccgacgcgaatcgacataacagggtgagtttacagctgcagttgcagccgaggatccacttatttgagagagaattactcttaacgaaattttgaagtcacttctacacagttaagtctgagtaggcgttatccaaacgtaaa

SEQ ID NO: 237 - DNA, 911 bp, unidentified
  source 1..911: mol_type = unassigned DNA; note = unclassified RNA viruses ShiM-2016 sequence
aggaagctccacacaccctagccagtaacagttgttgcaatagctggaagggtaaagccaacgaaagcacaaactggacacacatttcttaatcggggttctgtccgggataatcgtaaccacccccgtcatcgcgtttgtgctatatagatttgtctaccttcctatccaggccaatatcagaggtcttgtcaacgaatatggccgtggctaggactaataggagaagacgtatgcggcgacttcgtcgcccccaaagagcgcgaccacccgttgtggtcgtagcggcgccacctggccgccggcgccggcaggcaccggctcagcgcccaggtgctagtagtatgtcccaagaaacctttgtgttttccaaggacagcctggctgggaacgcttcaggcgttctcacctttggaccgagcctcactgattgtgcagccttttcctcgggaatcctaaaggcttaccatgagtatcgtattaccatggtgcttctggagtacatcacagaagcctctagcaccgcttatgggtccatagcatacgagctggatccacattgtaagattaccagcctctcatccaccgtcaacaaattcggagtcacgaagaacggtcggaggagcttctcccggcgccaaattaatggcaccgagtggcacgatgcaacggaggaccaattccggatcctttataagggtaatggcgattcgaagatcgccgggtcttttcgtgtcacgattcgggttgagactcaaaacccgaaataggtagacgagagctcgcctcccactcccacaccagagccgactccggctccacctcaaccagaacccaccccctgcccccctgctaaacaagacagattttggggttatgagggtgtaccacaatcgaaaatttcctcgggc

SEQ ID NO: 238 - DNA, 930 bp, unidentified
  source 1..930: mol_type = unassigned DNA; note = unclassified Sobemovirus sequence
ctgcttgggatccgaccgatctcctaatgctaaaaccctccgctatggtccgtatgggcctggtagacccggccagagtgttcgtgaaacaagaaccccacaccaacaagaagctgagtgaaggtcgctataggctgatctcctcggtttccatcgtggaccagatcatcgaaagattgttatttggtccacagaaccagcttgagatagctacttggtcgaccataccgtctaaacccggtatgggcctaagtttgcggtcacaagctgagttgttgtggaatgatttgaagcataagcaccgactgagtcccgcgtctgaggcagacatttctggatttgattggtcggttcaagagtgggagctttggtctgatttaagcatgagggtaaatttgtgtgatgatatgcatgagggccttaagagattaatgatcaacaggtttaggtgctttatgttttcagttttccagttatccaacggagagctactagagcagacctcacctggaattatgaaatcaggttcttattgcacgtcctcgactaactccagaatcagatgcctcatgggcgtcctcattggctctccttggattgtagctatgggtgatgattctgtggaaggttgggtgaccggagctaaagagaagtacctcgagttaggtcatgtatgtaaggagtatagaccttgtgagaccaccagagatggtgagctatccaaggttaatttctgttcgcatgaactctctgagggaagattctggctcactagttgggccaagactctctataagttcctggactcacctaatgaatctcatgttgagttggagagagagctgagttctgggcccatgtggccccgcgtaaaacgttacttgtgtcaggtaggactgatccctgacaaaacattagaggaaaggaaag

SEQ ID NO: 239 - DNA, 936 bp, unidentified
  source 1..936: mol_type = unassigned DNA; note = unclassified Carlavirus sequence
gtttacaggcttgaaattgatatagtaagatacaggacaaatggccgatcaagatcaacgcaaacgcgagcaggaaatgaaagagagggcggcggaggagcaagctcgtcggaaggctcaagaaagcaagttgaaatcaccagaagcaaccggtagtggattgggtcattccatgatccaaacgcaacaacgattaactactctggaaggtctactgagggaggataggtctggcttgcaaatcacaaatgctagctttgaaaccgggagaccaccgttgcaaccaactgaagacatgagaggtgatccacaaaatatctacaacaggccatcaacagactttctgtgggaactgaaaccaaaacctgtttcaaacaatatggcaaattccgaagaaatgtcaaagatcaaagttaggctggaaggactgggtgtacccacagagtatgtatattcagtcattcttcaactggtgttcaagtgtgcaagtactagtagttcctcctatcaggatcctcaagggaccttcgaattcccaggtggtgctatcatggctgatgatgtggtgggaacagtgcaggagattgctggactccgtcgagtctgccgactctatgcgcccgtgacatggaattacatgcacctgcataataaaccaccttctgactgggcggctctgggttttcaatccagcactagatatgctgcatttgactgctttgactatgttgaaaatgaagcagctatcaaaccaagtggtggaatttcccctagacctagcagagctgaatatgtggcatacaacacgtataagcgacttgcgttggatcaagcgaataacaatgatacatatgcaaataatgattcggcaattactggtggtagaatgggtcctgaaattactaggaatttcaataatgcgaataataagaaact

SEQ ID NO: 240 - DNA, 942 bp, unidentified
  source 1..942: mol_type = unassigned DNA; note = Dicistroviridae sp. isolate rfb199dic1 genomic sequence.1 sequence
ttataattatatcgtattaaaggattttcattagttgtcatggttaaatcataaatacttggctaaaatggtttcttcgacaagtatcgtgtaaagttcttaaaactaataatcgtccagatcaacggtcagtgtacaggcgtgacatcctaatctcggccttacattctccactccatacgggggaatgacgcccctctcctaagagtgccgagagcgccacatgtatgtcttaagtttcttaaactctcttcaattgtacgtagggtatgtccctacgtacaattgaagagagtttaagaaacttaagacatacatgtggcgctctcggcactcttaggagaggggcgtcattcccccgtatggagtggagaatgtaaggccgagattaggatgtcacgcctgtacactgaccgttgatctggacgattattagttttaagaactttacacgatacttgtcgaagaaaccattttagccaagtatttatgatttaaccatgacaactaatgaaaatcctttaatacgatataattataacctgacctttacttagtgatttcacaaacggatcccgggtgatttcacgcacgactaagttttataatttgataaagattatgcgagtaataggctcttttgtagcttttagtgcatgtttagaaatttatttgttagcgaccattgaaaagcgaccctcgatgattacgatcacagaggttagcctgtcaagacatttaaataacgaaccagcatgctatactaattgagcaataccctagtttatcagcgattgatatcaaaatataagattcctcggaatcaaggtagtcccggtaaattatatttgtagcgaagacccccggaactgtaagcgatacacgaatgaagacgacgattcaagacggaatcagaatgcctcgtgggcgtaaacacaaacc

SEQ ID NO: 241 - DNA, 943 bp, Mivirus dermacentoris
  source 1..943: mol_type = genomic DNA
cgctgatagactcttagttttcgaccacatgcgcgcaacggaggttggtcgtgttctgttttaaaaacaaatcatgccggaaggcacagttttcagagatctcgttgttcgtttgcgctctattagtctccgctttgctagcctgaggcgttccgagccactgtgtacttccggtaccatcagtcaatcttgacgggcattcccctgagagattgaccagccagggggtaaccccggcagcgcgaggcgtcagccttcggcccgccgtcgcgctccaacgagatctccacgttcaccaggtcatccccatcgaccttccccccactctgacagctccccggaaagaggtgatctttccgtagaagatcggttgagcttgtcgacgacccaacgacgtcccagacctgtgttaggtgcagctggagtgtcttttgcaaaggccttgctctcaccgccccctggtcgccacgagccttgcccgccacccgctcgtcgtgtctcctcccctgagccacagccaggtccttccggctatctgagacacagcccgcgagaggttgccactccaggatccccacctgagtcaccctatctgaccccccgatcctctcctgaaccagacccggctggtctcttagccgaggaaggtcagggtgatcaggatcctgtggaagatcctgcgcttgtacagcacctcgccaggcttctcgagctaagcctagacctggagggagggatagaaggcggtgtgcaagctctgtttgcacaacaggaaggtgatcaagccgcaggaccagcccagccaccagcacccgaggccccccaagcggttgcagccccaccacctccgccgcggcccgatcgacgacagccagcggttcccgtcgcagttgcagcacctgctccaccagcccccgcagcagaaccggtcatccggccagcg

SEQ ID NO: 242 - DNA, 945 bp, unidentified
  source 1..945: mol_type = unassigned DNA; note = unclassified Hypovirus sequence
tccgaattcccgggatccgcctttgagatcttcctaggaaggccacctaaggaacttgccatagcccgtgtgagtgcttttatgcattctcatcacagttttctctcttggagaactatggttaagtttaggatttcattggtgaggccagtgggtctcggtcaaggcacagtgagggcctgtgcgtggttgtctccctcctctcccgcaggggaagtaaaacatacttgcaccgggacgcgatgacgtccgttatgtggataaaccatctctttaattaaaactcatcaaccgggggttgcacccgattgcaagtcaccactagaaatgacgacgaaagtagaagggtggcagagaagatgaaaaggtcggcggctaagatggtgtcttcttagtttgctttaagcgcggcaattcaacattgtcccgtcagattggccgcaatgcctcaaccttcaatcgcttcgggtactgagctcgcggtaaaccattgtaaacggtaacgcgtaggagtatagcactcttgcgtagtccctagtcattaaggaattactgtctctttacactacaccaagtggtcgggtccgtagggcctgatctttagcctctccggctatcgctgcgtatactgcagtctgttagtaggagtcatttcgaaatggtgatcccattcatacgaccgtgacgaactgaagtcactgatgtctctaaaagctaactaaaatttagtctgcggggtcgcagtacggctccctcatcgatctttttctggatgtaaaactccgcgtctcatcgctcaagagtataaaaggaaattgaatggtgacagctggaaagacagcaccccaattcttcaagtggtcacaaacatcgagctttagtttgcaaccaccaccgtttcaagaatatcgccgtttcgcaataccgtaaattgccattttcaac

SEQ ID NO: 243 - DNA, 946 bp, unidentified
  source 1..946: mol_type = unassigned DNA; note = unclassified Marnavirus sequence
gctaactgtttgccctatatagacaagtgtttagccctttaccgagaactggactgcacggagaggtagtcctagctcgttacgttggtcttccttggtataggtcatcaatggttatttgatgagagctttgatgtaattggatagagacgttttactcagataggtgatttctgtccgacacgcatgtcggtaaatatcaccaactttcgggataaccggatcctttgttatttgggattgttatattcttttgctccggagcatttgatattttataacaatttgcaggtggcgctgcatttacccgtagccatataaatagttgtaattatattgtatatatatacaactggtcgtcacttaatttgatctgtagataattttgatacacaattttgtttacaggtctttactgatcagtctctctgcctaaagaggcagaactaaccgtaattaacggacgacccctatgagtggaggatccacttggcgcgacattagttcatggtcatggcgcattatatgacccccgaagggtggctcccgaaacagccttttttgatggtcggaaatgtacatgaatttatttatgtgctgagtacggacatcgcaccctccaggagtattggattattcgagctacctgacttagtatggtcacctctttctcaatagaaattgcatacaagagggtaagggttcatgacctacattatgttttgcataatgataccgttccgataccaaggcattatttggtggcaacatcattagtgctaatgattacctgtgccacaccgtcgaacgtgtgaaattatcaggaggaatctggggggacctgctgtgacaagatagttggggcgactttcccccgactcttcttgttactgcaggtgcttcaattcgttgaagcatttgcggtaacaaccatctctattatttc

SEQ ID NO: 244 - DNA, 956 bp, unidentified
  source 1..956: mol_type = unassigned DNA; note = unclassified Allexivirus sequence
gtttacagtgtggtatattgataacaatgggaaacgagaatgaacaagacacagatccaaaacttgcagggcgaaaaggcactagaactgatgtaaacagccttgtccacacagaggagcaactcagggatccaaactacggccgtagacaagtgaatgacgttaatgtctctgaacacgattcttactctgaacttatgaagaagtacgaagatagattcaacaaactcaaagaaagctgcttcagggatctttcaagcgtgtcgatttcaaacagtggttgggaaactgggaggcccaaggctgtcattgctgacaatctaaaaggcgatgctgctaatatcttcacaaggccttcgatcgatgcattgctcgttcgtaatacagtacccgagtcaaataacatggccacagctgaagaattggccagaatatcagctaaggttcaagcactgggagctcctgaagaacatttggcagaggtcttttgggacgtggctaagtattgcgcaacagctggcagctcgccagctgtcaatccccagggtactattcagcttggtgggaggacaattacaagagacatggtgttcgctgttattaaagagtattcaacactccgtagagtttgcaggagttatgcacctattacttggaacaacatgcttttaaacaaccaacctccagcgaactgggatgctaaaggtttcactgaagacaccaagtttgcagcatttgacgtttttgatgccgttactaataaagctgctattcagcctctggaaggtctaattaggcacccgactcaggctgagcggattgcatatgccacccataagaagttggctctggaaaagagcgcacaaaatagcaggtatgccaacacttcggctgaagttactgggggcttgttcggctgttcccctcgcaacaatttccgtgagagtcgatgttaa

SEQ ID NO: 245 - DNA, 959 bp, unidentified
  source 1..959: mol_type = unassigned DNA; note = unclassified Hypovirus sequence
ttccaaaggatccactttgggaccccgcgttaaggtactatgattttgtacttacgtctcttggacgaccttaacatggtttatactctgtcgagttgctggtttcagtaattcagccacacattgtggttggccagcaggcggagtgtgatccagcttgggtgcaaccttcgttagctaatcgcagtagctaacctggggtgccctaaggccggaggaactcgttggttaagaataacccatttatcggtttcacaagctatgtagcctagatgatgttctcatcctacgtaaaactatgaaacgcgcagcttctcccacccctttagagagaggggaattggttgggtgcctagatcccaggagcactgagtagtgcactgtagctgatgttagacgttggtgtgaccatctgacattgtctctagccatgtccatcgaggttggcaacctaatgaggcctgggatgccttgtttcgcttctgacttcgcgatcagatcgttgactgagaacagtcgattaaacagcatgcattcttttgggtagatgtatgaaggtaaaagccgtaaagcgaccctcctcgactgatgcctttgtgccagcttgagagaactgaggacctggcgaagccagtgggtcaccttcaataggttcatggtgtgtgagttcatctcaccacaaacgttttccctctgtttagagattctggaatcgctagccgagaacggctgcccttgtattgctttggttctggtttatacgcttgagatcgtggaagttctcaaatccgaaatcaacgtgtgtagcacgaagacgtggtgtgcttgcacaagtcttcattctcaaggatagctgggttctttactagggcaaccccctagagccagccggttcggcacaagaacggtggaagatgtgggatgaaaactcctagcatcagaagtgcacttccatagat

SEQ ID NO: 246 - DNA, 993 bp, unidentified
  source 1..993: mol_type = unassigned DNA; note = unclassified RNA viruses ShiM-2016 sequence
atgcagtgtgttttacacactgcatgttatgttttggagagaaagtatttacgatatacttggatcctccgcttgattgcgtcggatcctttcatggtacattcactgcgagacataatgtaccataggaaggaattcgcaacatgacgaaggaagagtcaatttcgtggaatgccaattgatattacaattattttcatacgtctgtaacacgatacgtacaacccctaacttaatcgtaggttaccaacgcctacttcactgaatttatccacaataattcagtatttgtttagagtacctcaacactctatgtgtcgaagttgagacaggtttttaagtttgctctctgtatggttatttccgacagatgagcttacaatgcgttatgaagatgctatttttcctggagtcaatagtcgatgtcatttagacgtcgtgagatttataataaaaatgttagtcgtagctgctatgtgaaggcgtacgaccgaatgtttgaacgagattatcaggtttacttgatttatctacacttttgggcaactttgttgccatagcctcattttgattgtcgaattttgagtttgatctaaagattagacattgggactgattagtaaagaaaagacaagagttgatgggaattaactcgggacacgtcatacggtggacgtgaacgagttgcagggttctcatgatgtagagatacgtcataaaagggtgtggcacctcaaccacacttcgaaagctatcccctaagtgcatgggatgatatatttaagctgtttatgtttgcgccattgccatcgcttttgagccattggtggtaattcgcacattcctctatacagtggagattatttgaacttgtacattgagaagcgttacatactgtttgttggtcacggcagatgtatactcaaactttgattgaacattggaagaattgtcgaaatttcggtgataactcatgatttttggtgcttggaa

SEQ ID NO: 247 - DNA, 1000 bp, unidentified
  source 1..1000: mol_type = unassigned DNA; note = unclassified viruses sequence
tttgacaaaaaaacctcaaaaagtgcagctactattgaaaatcataatatacgctcttgcagggattggcttctggatatgactcaagtgttttcaaagagccaattatgcactaaatttgacaaccgatttaggtcggcaaaggcagcgcaaacaattgtttgctttcagcacgcagtgctgtgtagatttgcgccttatatgaggtacatcgagatgaagttgaaggaatccttgccgaaaaagtattatatacattcaggcaagggcctagatgagctgaacgattgggtcatcaagaacaagtttgacggcacttgcaccgaatcagattatgaggcctttgatgcttcacaagatcagtacattgtcgccttcgaattagagctaatgaggtacctcggtttacccaacgatttgatcgctgactatgaattcatcaagctgcacttgggatccaaacttggatcattcgcaattatgagattcacaggggaagcaagcactttcctattcaacactatggcaaacatgctctttacttttttgaggtatgacattaagggcaacgagagcatatgttttgctggtgatgatatgtgttcatcaaagcggctaacagtcaaaagagaattcgaaagcttcctatctatgatcaaactgaaggctaaagtgcaacatactaaaaatcccactttttgtggttggcacttgtgtccagaagggatttacaaaaaaccgcaattggtcttcgaaaggatgtgcatagctagggaaaccaacaatttacacaattgcattgacaattatgctattgaggtttcctacgcttatcggaagggtgaactgattacagcaagaatggatgaggaggagctgggggcatattatggctgtgttcgaactataatcaaacacaagcacctcttaaaatcagatgtcaagaagttattcgaaggtgcaacgatgtgatcttaggttgtagatatttaaattgaat

SEQ ID NO: 248 - DNA, 1000 bp, unidentified
  source 1..1000: mol_type = unassigned DNA; note = unclassified dsRNA viruses sequence
ttttcgtttgaggtacgaaagacgatgcgagccgaaagcgtcacttagaaccttgtccgttagattgattttgataacccagaaaaaacgtgccacgggtaacaacacgctaaacaactggaatctgctttacagtcaaagcagcaaagaccagcgacctaacacctttaagaaagaccgacttgtgctggggaaccgcctactcagcttttcaccggaacccgaagccttagcgattttacgaatcgaacgcgctactgaacgatagtgctcttttccaactgcgtatgagcataatgacgcatgccccaaagcgtcaatctcgtatcgaaacaaatgactcgagacgggttatcaccaaagtgacactaccacttttgccttagatgtcccaacagagaaagatagcgtgtaaggggcggctaccaccacaggatatagcagccgcaggtgttcgtcgccgggagacgcgccttgctgaggaccgaacgacgaaataaagtaggacctgactcgtctcgcaatgactgttttcagatgccgtggacttttgacgagtctcgcgcgtatggtccgaacgcggggatcgaaaggagccacacgtatcttgcattggtcttacgcatacacgtaatactaccatctattggtcttacgcatggagatcacacgtaacaccgcatgttgccgaggcgtaactctcggtgcaaggcgtgggtgagtggccggccgaagcctcatcagtctcgctgcgctaaggcaaacgacggactggtgtgagaaagggaggagagagggatcctgagtaacgacagactacggtaggaaggaatgtaagggtggggcttaggaacgaatcgaaagcccgcggtgtggaaacttggaggaaagaataggacttaggacgaatcgaaagcccagggtgtggagttactcactacctccccgctactacaccgccaaggatgttggatcgttcctgcctcaggcaaggatcggt

SEQ ID NO: 249 - DNA, 1000 bp, unidentified
  source 1..1000: mol_type = unassigned DNA; note = unclassified dsRNA viruses sequence
aagaaaatgaagactgtggtcattttcttccaccaacctcactctccctacggggagtgttcaggctggtgttcaaaatcacagtacacacatgcttgaagtgtgacaagggcgggctccggtccgcggctaaactttggccgtactctgtattacagtttgcctaagtatgctgatagctcaaatcgggaagtggtttggtggaccagagcccgttattcacacaccacacgatccaggacggctctggctaaggcgatccaggatgcgtataaacccactgccaattagctgaaccgccgactaggggatccgcgacatcgtctgggcctgtagcgtaccgtcatcactcttttaaggtacgcgcctgtgtctgggccgtcaactgcggggctggagcttagcgtctagctgcggcgttagtctgttttactgtttacgttgtaggcagtactaagacacacctcctaattttacacttttccaacctactcagcttgccgctttggttgggaagttcttaaaatgagctcctattttatagagctcaagtaacttttgtgcttataatccatcaatgtctcaggctgacaataaacgcggctccggtacatcggcggcgtgtgctcccggaatcataattagccgcaaatccttcctgtttggtcattgtgaccatccattggggtaactctcttttgaggggtgtggtcaaggcgaactcggatagctgaagactgctaacgtagtgcacatcaccgacttgaagatgtgttcgaacgtgccagggcacagcagcttaggctggcttccttggtggacagactgacacccattggggacctcttcctcacggtaagcgctcacgctcaacttccttcgacctgctatgcattcacatttatgtgaaataagtctccgctaactgaacgaaaccgagatagacgaaacttatttggtaagtccgcagcaaacagtcgcacgggttttaggcccgtgg

SEQ ID NO: 250 - DNA, 1000 bp, unidentified
  source 1..1000: mol_type = unassigned DNA; note = unclassified dsRNA viruses sequence
ggccaaccattgatatcttctttaactcccttggctgggttacagctgggatatctaagtgctacccaccatacaagcatgccctcactgcgggagcagtgcttcagctagttggccgcctaactggagtagttacaggccctttaaggagtcgggtcaccccttatagtatacagacccgtgccaggtttaacgagcctggctactactagttgtgtgcatggacctccgcaatcaatgcattctatttcctgcggctctaatcggtgtgactaaccgttggagtataaaagtcgggtcacatagtactacatctggccgcggcgcggtatcttgccccacacttattatttaccgccgtgcttcggaattacagatcggagaggcttctgcgctcttctgtgcccctcaggagtgagatctaactatgtctcatgtgtagttaactactccgcgtactctcattttccacctctgcaagaaaactaccagcggagggagcagtgaataaattgagctgcacgtctcgaggaaagccgggacgttaaactaggcccgcgcatcgaaggcgctcaacatgaggctagcttcggcaaaggcttaaccgttgcaatcaccccgtcgcggcctgggccccgggtcgcgattcgccagctgctggttcatcatgcagttaggggccccatggaatagtctatgcgttagcatgcggagcacttagtcccggtacagttgacagtaagtcaaagggattgctcttagcatgtggctggaacgggttttatgtccgtgcgaggagtgggaggatccccacccgagtgtaacgactgcgaagtcttaactagcgtgtaggaacagtctctctcgaagtgatgactcgaggggtaggccaccgttccaatcttcagtggtgtccttgcttataggcgtcactttaatcccaaaaatttctaagcagagagtagtgttagtagcattattctcgaaaccaaatttaaaa

SEQ ID NO: 251 - DNA, 1000 bp, unidentified
  source 1..1000: mol_type = unassigned DNA; note = unclassified dsRNA viruses sequence
gcggtttaaggagaagtgccagactctggacgtttcctcacacgcacgacaggctcggctgttgtgcgtgcttatcaaaccgagactctggtgcaagagggcttcttgtagcaccagcgaacgctagtggtggtgaagccagttcttatttgaatggttggctgacgagatgagaccggcgtacttgaagcttggacctctggtaagaggtgataaataactactcgcagatccctggcgtcagttcagtgggcaggaaggctggaaggccttgtggggtttatcgtcacgcagagcggtttggctcgctgtggccccacactacgcactctaaggtctcaataccgcgtggcgtaggccagcttttatagcgatttatctcctgaatactccgagcttcgagtttcggaggttggagtaaatttagcgttacctccgcgggcggcacgcggtttagcaaatatgcctaaaactggacctcgcattcaatcaggtgcttgcgagtcgcctaacacgtgggttgaaccttcgggatcccctttaccgccgcgaggtggagtgtaaccctgcgccatagtgactcagagacagaccctgccccttcaccctcaaaagtgataccgcgggattctggtgagtggaacgggaggtggaatccgcaaggcccaccacgcttgtccgtgcaagggaacacgcttgcaacttggagtgccaccgcgtaggcggcagacaggaatttattctctgtcgttcggcgatatcctaatacagttgtaatgcagtttccgagtgtaacgactgcgaactccttattctgagtaactgaacagtctctgacccaggcctcaagtgggcatacagtggggagggtgctatcatggctttcctttgcggatcgtcgatttcttcggttatttattagccgtcgtacaactcagaatcgtcctctttagagacggggtagcaacctagatagctatatattttctaactcacaaaa

SEQ ID NO: 252 - DNA, 1000 bp, unidentified
  source 1..1000: mol_type = unassigned DNA; note = unclassified dsRNA viruses sequence
acgcttatgctggcatgtccctagtgccggtagatttctcaccagttagcatggcagattacaaacccgctagcaacctcactttcccatccctcactcgtccgagcgcagtggatacaagcgacgtcgctaggaacccgcgagtagctagctctaaacgagctcctcgcgctgcagcttctgatattttaaacaggtttaaagagtttaacgcaccaccaccacccgaacccgcgcccgcacagtatgataatgacgcgccggctgcccagctgagctacgaggctaaataccccgttgaacaggcccaggttccaggtgatttcaaatattaccaacctgtggtggcagaagaccgagtacatgtggaacctgctgcagcgcctgatgcttacgatcgcttatctaagcaacaactgaaattagcgatcgaaaacaacatgcaactcttggctaagattcaaaactcacctattctaggtgagttagatttagatgctgaacgtaaacgccaggatgagttccgtcagcttgaagccacgcgtaatgcgcgaattcaacgcaggtctagctacgtaccttttggtcctgctcgtccacgcccggtgctcagccctcgctctacgccgaacaaacctcctgtcgtgcatggcaaactctctgaaaacgaagttaaccatgcacctgtagaggttaacgatgctgctgctgaacaggttcagcgtgaagttcgatctctaggtcgaccgataccaccgcctactaccgcggatccttttgccactctcgctagtgataagcgccgcccaggcacttattatcagaagaatgaggctactctcaatttcgatgacttggtaaaggagcagctcccagcaactaactttggacatactggcgcggacgttaacgtgcaggatgggatggcaactgactcactagcgaaaaactagtgtggaacgttgcttattaccgctctgcgcgtaacgttctcgccagt

SEQ ID NO: 253 - DNA, 1000 bp, unidentified
  source 1..1000: mol_type = unassigned DNA; note = unclassified Hypovirus sequence
ggcgacctccttccggcacgtcgtagacggcgaccggattaatcaatacagctagtacttctcagcacgctatagcgcagagaacaccaggggacgtcagggagaacgaagcacgtcgcgacctcgcgaggtttctacctccaaggggggctgcaggctaaggccgtatgaacgttgtactcccgcattttggatagatactgatcacgtgcgtccagcgaatcacgagatccctcgtccctgtagacgttaaatggcagcgcaggcggcgacaccgccctttcggttcttactaatcaccgcatccataaaagcggagataggcatgggtgtccaattaatcagtatgagatgggcagtgccgatcgctagcggcccacgggtctgacgatagcgttccgaaaggaaaagggctgatatcagatatcagatatataggccggcccacgtccgtagttccggctgtgtgcaaaccggtggcctagcttgggacttcgatcaccccaatgacgccatgaaaacgattcatccaattcttgctgtgttaacggtttatcttgggcgatagagccaactagctaagatcgtggtgaaatggttcgccttcgtggatcctcccgacactgtggtttcgacaccacaggtgctttcgaacttgaacttttatgcaattaccggcgcgggagcgccacattttggagtcgagactaagattacatcagttctatatgacgtagccacagagagcttgcgcctctcgcgttggacagcttatgccagtgactaacgatatcagatgaagctctgcgggatcttcggtgaaccaacttctttacctgtacgaaataaagggatctgtacctcgtcttgcgtgtctgaacgggaccgaaaatcgacttctaatgtagcagtttgcgtatggaagggatggcttgatagtgcggtttggaggtggtagcgtaggttgaaagagttctagggaacaaaacctccatacaat

SEQ ID NO: 254 - DNA, 1000 bp, unidentified
  source 1..1000: mol_type = unassigned DNA; note = unclassified Nodaviridae sequence
taagttgggcgctggaatagcgaaatccattaaagaaacttatggtgctcctaaatgtagagcgccggttggttacgcagcagtgcaatctactgaagacggccgtatattgcacttggttaccaaagctgtgagtagtgttccagctattaaacagaggaatgcatatactaagttcacggctgccctcttgcatgcttgtgaattatctatttctaaggaaataggtgtgccgaacggaataggttgtggcttagacaaattagatgcgaatatagttcggaatatactcgctgaagttggtcacatgaggggtaaggtctttgtaatttacaataatgcttaagtcagctattgatgtagcatttaaagctgtccgtgcttcagctaaaagtgcgttgacggcttggagagtgacgcctaatccaacgatggttgttgctaaaacaaaggtcggatccttggtccaaaccgttgccttagaactaagacaaagagcaatcaggcgcgaacatctaaacttatggaagcatcgcccagttcagccggttggttatataactgccatggtgcccaggcccaccctgcttaatagatttgttgaacatgtcttaagtaagttaatgtctgctataagggttattaaaacctatacatttaggttggtagcattaacagggacgggactttactggctcttttcaaccctcattcaggggccagcagttgtagttggtggcacctgtagtagaatatggcaagcaattgtcaggttctattataggcttaaagcccgatttaaaaggagtaagattaaaggaaccaatcggttcagaaaattagcgtcgaaggctgattataggataagagcagcatatatactctatcgagttaccaaacatagagttgctgatgcagttcaattctactccaagaaactggcgcgtatggcttgggacaagcaagcatacttttggtggacagctctgggagcagaaac

SEQ ID NO: 255 - DNA, 1000 bp, unidentified
  source 1..1000: mol_type = unassigned DNA; note = unclassified Vitivirus sequence
gtcctgagattcttcttgtggcctgaggagttaatacaagagtacaaaacactgaaactcatgatgggttgctccatgggagatctggcaataatgcgattctctggggagttcgggacattcttcttcaacactatctgcaacatggccttcacctgcctgacatacaacatcaggagggagacccccatttgttatgcaggggatgatatgtatgcgcctggagcacttgtggttagaaaggattatgagaaggtgctgggtgaactacagttgaaggccaaagtgaatgtcagttgttcaccacttttttgcggatggcggatgagtccctacggcattgtgaaggatccgaatctcttgttggatagatggaagatagccaagttctccggaaacctcgagaactgttttgtgaattacgcggtcgaggccatctatggatacaggttaggcgagatcctctatgacatcaatatcgatatcgatgcgcagcaagaattggtgagagagattgtgctggttaaacacaagctgccagcggccatagctaagtatttctctagcgacgtcaatgaagcgcattccgacggagaggaggtagatctacatctgagccctgaaggtgaactacttgattacactgatgccagagggagaggtggcactttttctaagtgggtcaaaggaaaagggaagatcaggtgaggaaaaaataaattaaaaccgaataaaaatagaggtgtgtagaaggttacttagctacggggtaactgctgacctctttaagttaggtgtgaataaaaacctaataatatagaaaccatcttacgtgtttgtgacttgttactgtctgattacggattgaatagagagagcgtagtgaggttactctcagaagtggacgcgaaggaagcggggaaaccggctctgagtttcaagagcctgatttgcaatctttgccgtggggtatcgccttccaacctgagtttacgaacga

SEQ ID NO: 256 - DNA, 1000 bp, unidentified
  source 1..1000: mol_type = unassigned DNA; note = unclassified Polerovirus sequence
ctagtagatcaattggtagcccgggttctgttccaaaaccagaacaagcgagaaatcgctctttggagggcaaatccctcaaaacccggttttggcttatctacggatgagcaagtgctggagtttgtacaggctctggccgcacaagtggaagtctcaccagaagaaatgattacctcgtgggagaagtaccttgtgccaactgattgctccggctttgactggagcgttgcggaatggatgctacatgacgatatggtcgtccgcaataaactcacactggacttaaatcctacaacggagaagttacgatctgcgtggctaaaatgcatctgcaatagtgtcctgtgtttgagcgatggcactctcctcgcccaaagggtccccggcgttcagaagtctggtagctacaacacaagtagttcaaattcaaggatccgagttatggccgcctaccactgtggggctgactgggccatggcgatgggagatgatgcccttgaatcagtcaacaccaacctagaggtgtataaaagtctaggtttcaaagtcgaggtttcaggacaactggaattctgctctcacatttttagagcgcctgacctcgcccttcccgtgaatgagcgcaaaatgctgtataagctcatcttcggatacaatccgggaagtgggaatctggaagtagtcgcgaactacattgccgcctgcgtatcagttctgaatgaactgcggcatgacccagatttagttgctctccttcactcgtggctagtctctccagtgctgccacaaaataattgaagagagagccgataactagccaagcatacatcagttgcaagcgttggaaagttttagtctgattaccaacagcctgacataatagattataaatttttagcaggatttgcgtttggattcttatccgcaatcccaatttctgtagcaggcatatacctagtctaccttaagatctcagcccacgttcgcgcaatcgtta

SEQ ID NO: 257 - DNA, 1000 bp, unidentified
  source 1..1000: mol_type = unassigned DNA; note = unclassified Metaavulavirus sequence
ccccagattatgttggcagcacaggcaaccaaagtgcagtgaatgtccatctggatcattctggattcctgggcacagaagagaatatgcattttccacaaataatggcctcacatacctctccagctggtgtaacccagtctgttctccagtcagaacaaatccaagagtcgagcaatgcagatgcggctattgtccatcagtctgcatcctatgcagagacgattcttcatagtgattccatggtgctgggtcggcttgcgaaaattgatgaaaaattatcagagattatgaagataataggaattataccatctatcaagaatgatattaatcagctcaaagctacaactgcccttcttagcaaccaacttgcagctattcaaatattggacccagggaatgctcagtgcaaatcactgaatgagatgcgagctgcatcaaggagtgctactgttgttgtatcaggcccaggagaactatctccacagttagtgagtgataaacttatatgtaaaaatgagctgggccaaccaattcccagagaggaatatagagccagtcaaccgaccaaatcatcgcccaatatggttacagatgctgagctagagagtttacaagcactcattgagacactggtagaacctgggaaaaagagggatagactagtctcacagctcaccaaagttaagactaaagatgattggaatagacttaaacgcgcaatctacaattcataactgtgaattcacgcctgcaactggaacattataaatgcctgacttaacacattaatccctataatcaccttacgctttaagttagctagataggatccttttcttgataccatttttctctctattactctctgaccttaccaaattataaatgtctctgagttacacgcctaatctcctgtacaattaataaaaaagaataacttgggggcgaccctatccacaccggcccagagaccccacagactcccaaactcacc

SEQ ID NO: 258 - DNA, 1000 bp, Mossman narmovirus
  source 1..1000: mol_type = genomic DNA
ataatggataagctcaagatcctagatgagatcaagcatgatgtagagagcatcaggaagacagttatgaagcatagtctgtctctcgcaactctggaagggcagttgagctcggtaatgattgcagtcccttcaactgggtcccaaccacatcaagtagaggtgaatcaggaccttaggcccctgcttgggcgagacaagggaagagggatccctgaagttggaaaaatgaaagtccaaacagtttcgtttgatgagcccaatcaatcaaggagtagtcgtgctcaactgccgaagattagagttgagcttgataagaagatactccctcctccaattgactcaagcaaaactaatgcaacaggatacaaacctgctcctactctaatctcaaaggaagtgatcatagcactgattgattctcggattaaggacaaggatatgaacactagaatgaggaggctacttaatacagccaagacacagagagaactagtggagatacataaggcaatcatcagtgctttaaagaatcaaggcagctaagcaacagtcagtttccattgggtatcaggtaaatttgatacgacattgcttgatacaaaactaaaaagtcaaatttagaatattcatcttagactacattagccctataaagtcagtagctcccttaatagattattggatacactccttagggtgatatcagttcaagataagcttcaaactaactcaggggtttatagaaaaatcggctggtattgacttgaatatttaaagatttctcaacatgttttcggtaataaagtatagtcaaccagcaccacaagtatcgtacttttagaggggatgatctttacacttatcaaagaccagaatactaatattaatctagtattgcttagctaaattagaccttaagatacatgcaacttactggccgctaatagcatattacaaaaaacttaggacgcaggtccatccctttactccagcaacc

SEQ ID NO: 259 - DNA, 1000 bp, Rinderpest morbillivirus
  source 1..1000: mol_type = genomic DNA
tggtgccgccgatcccctctcaggagaggccaactgcatcagagaaacccattaaaaagggcacagacgtgaaatcgacctcatctggaacgatggccgagtcttcatcgacaggtggtgcaacccgacctgctctaaagtcacagtggggaccgtcagggccaaatgcatctgcggagaatgccctcgcgtctgcgagcaatgtatcaccgactcagggatcgaaaacagaatctggtaccacaacctcgcggatatcccagagtaacattgagcctgaggatgattacgatgatgagctgttctcggatatccaagacatcaaaacagctctagctaaattgcatgatgaccagcaaattataattaccaggttagagtcactgctttcgctcaagggagagattgattcgatcaagaagcaaatcagtaagcagaacattagcatctctaccatagaaggccatctctccagcgtcatgatcgcaatcccgggatttggcaaggatcccaacgatcccactgccgatgtcgacatcaaccctgatctgagacccataattggtcgggactccgggagagcccttgctgaagtactcaaaaagccggcctcagaaaggcaatccaaggacactggcaaattagggatcgagtccaaaggcctgttgaagaaagagttccaactgaaaccaatagaaaagaaatctagttcggctatcagattcgtcccggacggcagtgttgcatctcgcagtgtgatccgttcaatcatcaagtcaagtcatctcggggaggatcgcaaggattacctgatgagtctcttgaatgacattcagggctccaaggatcttgctcagttccatcagatgctggtcaaaattctaaagaactagactcggcacaacatagctgatctcctcgcttcccctcagcttagctacagcttgcatgctcattataaaaaacttaggagcaaagcataacgcctcgcactcccaac

SEQ ID NO: 260 - DNA, 1000 bp, unidentified
  source 1..1000: mol_type = unassigned DNA; note = unclassified vectors sequence
atgttcctccgcccccgaaccccagtagggccagcacttccgagacacccattaaaaagggcacagacgcgagattggcctcatttggaacggagatcgcgtctttattgacaggtggtgcaacccaatgtgctcgaaagtcaccctcggaaccatcagggccaggtgcacctgcggggaatgtccccgagtgtgtgagcaatgccgcactgatacaggagtggacacccgaatctggtaccacaatctccccgagatcccagaataatgaagaagggggagactattatgatgatgagctgttctccgatgtccaagacatcaaaacagccttggccaaaatacacgaggataatcagaagataatctccaagctagaatcattgctgttattgaagggagaagttgagtcaattaagaagcagatcaacaggcaaaatatcagcatatccaccctggaaggacacctctcaagcatcatgattgccattcctggacttgggaaggatcccaacgaccccactgcagatgtcgaactcaatcccgacctgaaacccatcataggcagagattcaggccgagcactggccgaagttctcaagaagcccgttgccagccgacaactccagggaatgactaatggacggaccagttccagaggacagctgctgaaggaatttcaactaaagccgatcgggaaaaaggtgagctcagccgtcgggtttgttcctgacaccggccctgcatcacgcagtgtaatccgctccattataaaatccagccggctagaggaggatcggaagcgttacctgatgactctccttgatgatatcaaaggagccaacgatcttgccaagttccaccagatgctgatgaagataataatgaagtagctacagctcaacttacctgccaaccccatgccagtcgacctaattagtacaacctaaatccattataaaaaacttaggagcaaagtgattgcctcctaagttccaca

SEQ ID NO: 261 - DNA, 1000 bp, unidentified
  source 1..1000: mol_type = unassigned DNA; note = unclassified Nidovirales sequence
tattgaaaaactctctctttttcaaccaacttaaccagttgtttgaccgcctgcacagtgggcacttgagtatatttttcatatccccaaacagtttagatccgtccaattattaaacaaacaaaacaattgaaatattttatttttattggcagagtagttaactgcttgtttgtcaattgtgtaccagcacaccaaccccttgccaacctccactcagagcccaggatatccccgaaaggggcttcctgctggtgtgagctcttggccccacccctctcaagactcgtaaaacagtctctacccagatattctgcgaaagtagaaatcactcaatctttctcccatagctacaccgagaacaggataaccccgaaaggggcatcctgcgggtagctctctgagcgtgccagtagatatcttcaccgactctgctgggcgtatcggaaccagtccgtcccaaagtccgcaaccatccaagtagctcgaacgagcgaaaggatagggagtacctccttagtaggcctcagccgaaaagggtgggaaacagcggcgaggcccttgtggcctgaccgcagaaacgacctggtagtcgcttctcaacaacagacccgactggatgtgaaaacgtccgatgtggtcagcttgtaactagctatatacttggatatccctcacaaggggactccaggggggaggaactgacccctcccctaggtatatagtaagcaaaaccaggggcgatctgcgaagacacccttcaccacacagccggagaacgctgagtgaagccaagaatcctgtccagcgtaagcacacagggacacattcttgaagaatacctcataactagcttaaggcggttatttggatccgaaagctgaccaccgtcactttcgtggaattctatctgacaccaacacagtcggaaggaattattacatttcaacccccaaaagggaaggtgcaagaacacagcacgaacaaaaattaactaact

SEQ ID NO: 262 - DNA, 1000 bp, unidentified
  source 1..1000: mol_type = unassigned DNA; note = unclassified Picornavirales sequence
aaatccagcatcccccctgtggccccgcgcaggaaaggggataaagcgttagaaagtccgctttgttgacacacgtggataggttgagtggagagatatagccacttgatcgaatgtgttgaaagacacgctatgtatcactgacccccctaaggaatccagccgagaaactggatatcagtacgctcttttcaaaaaagagcaagaaagagagaagaagcacagacaatttgttaatagcagacccgctaaggttttcacaaaaacaaatttgaagtccgctaactctaaatcagccccggttaccaaagatccagctgttaccgttttgaataagaaaaagaaacacaagtttgatgataaagttgtcaaaactgtggatccttttgatatacaggatgaatcagaggttcccgtgattaatcctaatgagaattatgaagaattaggtcttgaaattcccagtcgccaagaggtcgttcccgaagaggtcatagctcaagaagcatttgaaaccctagatcaaggatcttgggatattgtacaagagtataccaaaactcaagaagatcttgatgatgagaaagtttttcttgaaagtttagccacagttcctcttacacctgttgaagaagataagaattatgaacctgaaccttttgaatatcaccctaactggagtgatcagtctcctgaagaggcgccaaagaaaccaaagttttcttttgagcctgagaccgtttcagattctgaagtcaaagaagagcttttaactgttaagaaaaagtctaatcctggactcgtagcttatagaaagaaagttgaagctcagcgcaaacaggttagagatgatcgccgtgaagagagagctcgtgccactgaatcagatattcgcaaaagtcgtgataacaagtacttaggagatcgcgagaatgctgaattcaatttccgtaacctgaagacaaagaagatacggtctaggacaaagaacacgactctt

SEQ ID NO: 263 - DNA, 1000 bp, unidentified
  source 1..1000: mol_type = unassigned DNA; note = unclassified Picornavirales sequence
tttccagagatttgatgccctttggtctaatttgagtattgatttgtacctgcattcgcagggtgggtttatcccatgcaccccgggttcattgagttgatttatcctcattgttcccacccgtttttgttgacccgtctgattttgattagttagcattgccacccttgccagaggttttctggtatttctgcactattgtatcattcatgctagtttgatagtagtgccccctgattgaggaatgatcttattcctaccttcaggttcacaccgcctagtaataggcctattgactcactgtaaaaggaaatgtcgtacataccttgtgatattactgattaagaagctgcgttttggacacgcgagaaagtccagaattagtttttgaccattgttttgtatggggaaatgaccccctaggatccgccataataaagtgacgattattttaaaggagttgtttgaagcctcagtttaactgatagctgataatgacaccatcctgtataacttaaagaatatatagcgccccgtgaaactactcgaatggtgaatcgagaacgtaccgggggttagtattaacgccttattccttgagatgtgtcaggtagtgtttccgtctgccgcccgctataggaacgcgaggttaatcccttgcatacattgccccactactcaactcatagagtaagaaaaagacgtgagtccgtgtttttactatgtctatctaggttattcggtacttgatacgaggcaagagaggcacaggccccgagtatcaagtataaagctaaagtcctgttataccataatggatgcggcagacggctcagctgttgaccaagtagggttaccaattgagattactgaaattaacatatttgtagaagaattacattattcagtaccgtccccttcacaggagttccgatctttgtatcggcctgtgttggaagaagtgagatttgtgtctcgcttacacgtggaaagagacagc

SEQ ID NO: 264 - DNA, 1000 bp, unidentified
  source 1..1000: mol_type = unassigned DNA; note = unclassified Picornavirales sequence
tggtaagatcagtggaaagcacaacaccgcttcccccgattatgtgacatctggcaagtgggcggatgggagcccctcagaatccctgtctctcttgacaggttgatttttaaatttcccatgccggacgaaggcgcttgcaataagtcaggcttattttcaggattctctttcttctcattcacgcgcgtcctatgcgtagtgagcggtttcgtgaggacccgttctcaggtgaccaccagacgcttgtttggaactatggcaccacctcaggtgtagactagtgaagacagtgtatctctacaggaaacctttggaggaaaagatttgtagtgcacctcttggaatagactgtgaaaacggttgagaccaagagctctgctatgtaaagaggctgtggagcaacgtgtggtaacacacgccacagtggccaaaagccaagtgggcagaaactctcttctaatatgctgtacccacggcagaagattggagagcaacgagttcaccctttacctccgcttcggcggctgcaatcctagtaacccaattgtggaatgtaccgacgaactgcctcaagctgtctgcattggtttgtgtaggaatgctatgcaggtaccctggttacaggatctgagcataggctaattgtctaagcaaacccaaaccaatttccccttttcttttccattggtgacgaactgcggatgtcgatatggcttcccaggcaattcacggtgttttcaacctcccaatggatcccctagaaggttttcagatgattagagtcttttattcccaaaataatttaaattttgatgagtattgcgcatctgttgtgcgcacttatccagctgttttgcaagaattggctccttttgttagagaaccggatcgtttcgtactcttttgtgctctttggtggcaagccaatcacgatgagggttatgagactgatccagaacccgaaccagaacaacagagttcggatgaagaagaacca

SEQ ID NO: 265 - DNA, 1000 bp, unidentified
  source 1..1000: mol_type = unassigned DNA; note = unclassified Riboviria sequence
tcgcgttacagccttccagctccgccgaataacactcattataagattcctcccccggcttatcctagttctggggttgtcctattccttttgtttttccttatcactgccatcccagtggtactttacttgtgatacatcattatgtctatcctgtaggagaatttccgaaatcattcacaattggagaaactgcatatacactttttcatccatcgttgaagattacgatgtttcatcctcgtcggtttttctaagtaggagatactctcaattagatcatcatccactggtaagaatgcatatacactttcttgccttctgttggagatgaagggtttatcatcctcatgaaagtgacttttagagatgttcactggtatttgtattccgtggaagacactgattgtctttcctttctctggacaacccctagcactacttttaccggtgcggaggagttagaggttaattcgaggcgtttattattgtccgcaatgacgttaaactattaatgattcttatattaacgatttataatacttaatactgtaatacatttaacactacaaccgataactatcggtgatgggaattagagtcaacttcgatcttgaattgaagctctgttatctattccaatgccgctactctcccggcacgtaggagaaacacgggcgcatggctgcggctcggatcactattcactttggattttgatttaatacatgatttgctgttcccctgggtagttcccagtagcggagttggcaatgataacagccttagatggagcagggatgtagggaatatgttcgggtgaacctcaaaaggggaatctcatttaactaggttaaaatgacgtgtgggataacaacgtgcccactaaccattatagttatctaaataaccactatcccgtgcaattagcgcatgccctaaacgacgttttccatccgtgtatagagtggatcccttggattgagatctcaacaatctc

SEQ ID NO: 266 - DNA, 1000 bp, unidentified
  source 1..1000: mol_type = unassigned DNA; note = unclassified RNA viruses ShiM-2016 sequence
agttccggagaaggagcactgtcggaacattatataataccacgcttcacgtggtcttgtataccggcattgtgaataccgtaaacctcttcaaggtacctcagtgtttgaattatttagctgaggataaattttcttaaatgagttgtcactgtacataatactcttcaagtagtacatacctcacgtaatttagaaaaggtgtttgaattctttaaccttttcaccttgaatttggcttaatcaatcatgtggatcttatgagcacggatcctgatgctgaaaagtgagcctagacgtggaggaacctgcaaggcgggtgttctttaaggctgtcgtaccctagctgagacagggggggtcccaatactgtcgaagccagacttttagaacatgtgccgctatcgaagggtagcacgcgggcgcgccctcctagagcgaagttcagccagtaagtatcgattgattaatcgacggtggacatgagcacccatcagtcaataaacaccccgttgggagagagaaacgaacgaggaatggcacacctcacaataaaaagccgttgtattctctttccggcctgggagtctcaaaccttcgaaccaattggttccgctacatatattggggacaattatgtggtgctacatccctcggacctaaggtagatcgtgtttatctacttgatagaacctcctgcacctcagagtgcggtccgtagtagaggcaagagaatagtatagcggtcagaaacaaactggattcttcaaaggtacgatttctcagactgagcagactgggtaaacctgctcctaaaaagcataaggggaaacccactgcaggcgtgaggcatttttcaaatgcctttttcgctaaatgggccatcgacccaactaagtccctcctagaggagctcctcggaacgcccgtaactgaggaggaattccggactttcgagcggggtttgtggaggcggccagtgattgtgccggcgcggtgt

SEQ ID NO: 267 - DNA, 1000 bp, unidentified
  source 1..1000: mol_type = unassigned DNA; note = unclassified RNA viruses ShiM-2016 sequence
cgggatcccgatcccggtgtagttttattctgttatgtggcgaacgataacggatgtataaactttgactcgatatcaaaatagactagatgcctatactcgataattgtcctaacggacattgtttcacccagaagtggtgttatgcagtgtcctattaggacctgcatagagatagtatgttgtaagctccaacctctttgtcttaacgcatattgtttatgaagttcatgctaaaactcaatacgcaaaagatgccttcctttgttgggctgtaaatacgatgaaggaccattcctctttaaaaagtcaaaacgacggtatattctgtacgtttgaataacccgtgtctcacggaaatgtgaggaatgttttctggtgtgacatttaaaaagcacaccagtgcaagatgttaatgatatattgagtggtgtatcatatacttgtatagcttaaagccttcacacgatggagtagaattcgtacgtgtgtcgtataattccagtacattccatattgagcgctccgctcttatggaagtgattagattaggagaactctctacgtggtacggtgcagtactttaaagcacttaatacacggagaactgtatgttcgtgtacgatcttactataggatagtaattgtctcgaaacaaacgacatttttgttgaagattagtatgtgcagattgctttagaatggcgctgccgattggaaaagaaatctgaattgaaacttttgtatgataatgccaaattaacttttggatggctctgcaactggaaaagatgtttagacgacaacttcggttagataatgtctaattacgatctgagaacactattattttggatgcattgtgttgcgcgtttctctgagcgctaccaaagtagtaattgaaacctccttttggagggtagtagagcacggatgtcgcaatgaataacaaaccaaaactttttggtttgagttcattgcgtcaagttctgttattaac

SEQ ID NO: 268 - DNA, 1000 bp, unidentified
  source 1..1000: mol_type = unassigned DNA; note = unclassified RNA viruses ShiM-2016 sequence
aaagggcaacaacaatgtttatgcttatcacaaaagcaattaaggaacgtgtgttatagttcccactttatgtgacctaatgacggtgagcttccgtaagcaagtccgtacatactgaagaatactttgaaagaatctgcaacatggttctctctcgatagtatatatcaggtgacaaacacacactcaacccgattatttcgcgagttctcgataagagaccgcaccaggtcgagctggaggggtgtaccaatccccgcctaacgttgaacttataacgtctgttagtattgttgtaacaaaacaatcctagatgattttggatcctcaatgtatagattgatcacaagagtagtatggtattgattgaaattgaggctatatttaattcgaagattgtagagttcaatatgaaagcattccaagcaggggaccctgtgttagtacgttagaaattggaatcccccgttcagaggtttctgacaaataggatggttgacacatatgtgaatgttattcagttagagtagatttaattttggtacgtgagcagccaactcatgtacaaactgggtcagttaattggaaaacgcaaggagagttttcactgcaatgcagtctagctttagcaggaccaaaattaagttgtagaagactgaatatttacataggaggacgtacactgatggatttaactcgacctctgtgtcgagacggtgaggattaggaaagttccctactacttctcctaggacgccggtgcgactgtgtacgagtcgtacggaaagtgtgatctttagagagcacgaagtttaagtggggcctgacatggtaaagagtctgaaacagttcactgtaaaggtgaaccttggcaagctcgtgatcgatacgagattataaagcaagttcgatgtttccagatttcccttccccgcgccccaccccagaacactcacactttagtcttgtaaattttgaacaagactaaagattattgaaa

SEQ ID NO: 269 - DNA, 1000 bp, unidentified
  source 1..1000: mol_type = unassigned DNA; note = unclassified RNA viruses ShiM-2016 sequence
tttgttaccaaaatatttattcgtgtgttttatttgagcgattcgttagagtggctttcctagaacgccaccctatccggattcgtaaaacctcctagcaggtttcctcgaaccctgttagttatttgtttttacattgcatttattctcgttgatagagaactatcactttgctcgctccacagcgatacgtggatccccgcgcattacgcgcaagggaactttcacttgagtacggaaactttgtattcagatctattagattaattatgctacctatagcttgactataggtgttaaagtcccttcaagaaaactttagcagacgtgtgagactagaggacttcggtctagcgtctattagattctgtcatgaattggaaaagaactacttcttgtttttgattcccgaccccggttgtgttaagtaagatatcatctagcacccatgagtggttaaccccacatagatacagatattaaaattagccggcgaaagccttgagggtttgcacccctctctaagcctccatcaccgcttcatcgcggcgggggttactttttatttgcttctgaaagtctaacttttatttacgctctacttgaagagaaactagcgttcaaggcggtcgtcacccagactgtgactagcattgagagtgcgaatactctctcgtttattacttaccttgcttttgctttgcttattggctacattgttggcctatgggcttggcacgagagcattgtcccttcccaatctggtaaggctgagcgtaaagctcagtgggataaaaaacaaaagaacaagcgtaaggccgctgagaagcgtgccaaagcgcaacaagccaaagagaaacgtgaacttgagtctaagaagaaagtgactttcgagtcatctggacccaagtacgaatctcagtcaggcttttggtttggtgattccaaatggactaagtaccattggaccaaatttttcctgattggcacctacacgttc

SEQ ID NO: 270 - DNA, 1000 bp, unidentified
  source 1..1000: mol_type = unassigned DNA; note = unclassified RNA viruses ShiM-2016 sequence
ctttataatatgtttttcgtgtatacgtcgtttagatgtgcgtcggcagcgattgtcccgtcgcatttataacatgacggtgtagatttactgcaatatttctacatgcggtgtgcaggaccctggagtagtgtatgttctcctttagacctgtgactacgtgagcgtgctaggttctcccttggaattacggttgcgtggttccttgggcgtgcttagccttgtccattggaggctgtacatatcctgttgagttgtggctctcattcaaaagccccggtgttgtgtgttgtttgctcacccggaagccttttgcagaaggcacgtcttcccacagacttgtaaatagtgggcggtgcttcctgtcgtaaccaggatccccctttccttgccttgagggtatcaaggcgaattgtgttgagatccccggatgggtctcctcactcttatgctaccatccaatcccttactgccgcgaggattatgtgcggtagactgggtcctactcctcgggtggggtagttcccttttatattaccacccaaacagttattttgatcttaactccttatttatatatccatttatgatttttatcaattgtgttaatggtttgccgcaattgagttttttgtattctagtggagttttgtgataaatggctgccatcgacggacgtcgatttgaacattaatgatatagtagtgaaaaatagaagtacattgatgttcttgtgtcggacagcaatatttgaccagtatgaaaaatattgtaaataacctttctttctgattggttctgtccggctgcgatacggtgagaaaacctgttccacagcgttgacatcgtctggtgttaagtttttgccatttgactgatagccatctcaattgagatgttgccctactaaactcttttggtcttaatacctggtgtcactgtgagttctgcgagtcaattctcacttacatccccggcccaaccctcctttccatcaaaa

SEQ ID NO: 271 - DNA, 1000 bp, Sclerotimonavirus penicillii
  source 1..1000: mol_type = genomic DNA
cgctcctcacctaccgctttcttgagagtttgttgagccttgttagccgcttcaagctcaggtcgtagttccgggaactcactcagaatccatttgttcttgatcaccgcctctttaattatgcgaagcgctcccatcccgaagtcggcgagaaggaggaacatattcatgaaagataaggcggatcccatccacggccgaccgatcatctgcaccactttgcttgtcatctgagaccggacaggctgatacgataaaaaagacgcgtagaccttcttcaagactgagtcagcaaggaatacagagtcggatacaaaaatctttggttcaccaatcactgaggcaagtgctgcaccttgacgtcgttcattgaacgcagaacgattcttgtcggtaactggtttattaccggctaggtaaagaagaccaaagtaggctccaagctcatcaacatccgtatccagaagagtaagaagctcctctgcagtgacgtcctctgcatcttcgaagttcgttttgagaacagattgttcttctgcctgactcagatcatctctaccaagacctgttatgtcgataggagtagcgcttgatccagtgaagttgaccctagcgttcagtaagattgctgtggcagatgcaagcgctctaatgatgaccgctttatctttactcttcaaaatttgaagcgcaaggaaggcaagagtctcatgacctcctccgtagaccacgttgatagtcacatcaattttcggcagatccggaatttcatatctaacgcgctgatcattcagttcgacagatgagtcgtcccacatactcaattgacccggagtgggtgggatgactttaggcaagtttccagtgttagcggaagacatagttgttcttaggattgaagtagatgaataagattatcgtttctcctagtttctttaaatgtacagaacgacctattctacaggatctgtaggtcctccgtgataagcatactaccaag

SEQ ID NO: 272 - DNA, 1000 bp, unidentified
  source 1..1000: mol_type = unassigned DNA; note = unclassified RNA viruses ShiM-2016 sequence
acctgaatgtgccaaagaaatggtctgggcttaaatccattaaaccacatggatccccaaccactatcaagaaggggtatttgtggctggtgcgtgacgaccagccaaccctggttgcagtgaagttggggtggatgccaggcataattgcacatgatggatccactatccctggggatagtggcgcaccaatcactgatgagcatggcaacattttagccatacacaatgggtatttgcgtgacagtcaggttaatgccgcgttggcgcccccacaagtagttgttggtgggggtgttcaggacgaactggtcaatcttcgtgctacgaaccgtagaaatgaggagaagatgactgagatgttcgagcaaatgcggcagcttaagttgttgtgcgaaaagcatggtatcatgggtgaggttgaacaggaagcgcgtggtgcgagaaagcgaatggtcaatcatcagcggaagccattgcgcatatggagtgaccaagaatatgagaaattattggatgatggattcacacgagacgaacttaaggcgatagccacaaagcgccgtaaggaatatgattactatgaggatgttgagcctgagggttatgccaaagttcaggttaattcacgcgatgataaagttgacaacatgaaatccagttgtgtcagtgagacaacgactgaaaagcatgatcagaaacttgctaaagcgattacgaagtttgagcaagctgttgatggactcaagactgatgtgatagacgagacctaccctgacaaacaagttgaggtcgcgattgatctacacacggggcttgaccacaaacatgttagcgtgactaagacattgggcgatgcaggcaaacaggatttacgggaagccctggctaccattcagaactttatggttcagtggtcagctggggccaaccagcctcgagaggagatcgaactggaaacacggagagtaaaagagcactgccccctatatcaaatggg

SEQ ID NO: 273 - DNA, 1000 bp, unidentified
  source 1..1000: mol_type = unassigned DNA; note = unclassified Riboviria sequence
cggcaggggatgtgagggacagacagtttcgtcaacttcgtgactactctatctcgtccggtcactgggtagtccacatgagatttgaaagaatctaagtgtacgcctttgatccactctctgccattcaaggtgaattgctccgcgtttccctctggagagcccttgcgctgatgacccaatctacggtgcctgcgttcccattatagcttatttgatatgtcgaccacaacgatcccccaatccgagattgatgcggctcttgtcgtactcgccgagtccccctctgagcgccaggaagtagcacccgaaatcgccgaacttgggcttaacgcgatccgtactgcaacaagcgatattgcctggaatggtgctccgctctggatccaacccaattacgccttgtatcgcgatcacatcgcacaattcatctatggagggaagaataaggttcctatcgtgttagcgggttcaacattctgtgatgttgcctatactggggagaaattgcccattcctcttccgattctcgtcattggctgggggaagacgcgcgttgccgaagaagttgcagaacagttcaggaattctggctttaaagattcgatgatccgctccgtcccggtccttgttaaggcgaatccaaccatcgaggacgctcgtcaggctattaatgccaaagcttcccttacctccccctgctctgccgagcatatgaacgtcttcgccttccgccagctaaacacgatcctaaacttggcctcttgtttcttgaagatccaccaatatcccgctttccttgacgaagatgccgtgtccgacttttgcatggctgattggcaacaggttgatcccgatgctgacaaacacaccactcatatggacgttgatgatgagaatgttcgagataagaagacttcaggctggaaggtacctagagattagtacaatggagtttccgaaccgtgctgacctttttgtaattcgctagggattgaag

SEQ ID NO: 274 - DNA, 1000 bp, unidentified
  source 1..1000: mol_type = unassigned DNA; note = unclassified Riboviria sequence
ttgcaagcatgcaattcgctctcctcttaattagaaggggtgctccggggaagacaacgccccggggtgagaaactcgtgtcccataattcaatccggtctgcctgccgccgcccgtgggacgtacctgtagaaggacccaggtattggacagtttgcagcgtggtttttactgagtggcgacgtcgaaaaatgaaaactaaaaatgctccctgcggtgtgtcgtcacctcggatggggcctgtcgtcacttgggggtcgcgcatcacttataagtgcgtggctttgttcgtttgctgcagtccggcgagtgccttattcttttgcctgtccggcctgtgacaggtggaagcctggtgtgcggggacgggacccgcctgaggtgaaggccggtgtggggggggagataggcaccctaagctcgccaagctgaaccccacacactacgagtcggcccggtccggggctgccccatctgcataggggttagtcaacagtggtcacgcgctggtaacggcgtgtggttgcaagccgaccttgtgaatggttgcggagccgagtcgcagcggtactgcgatgacagtcgtctgtggtgtggtgctctcgtgctgcccgtggaggaggtgaagaggtttgagccagccgcaagtagcttgccctcttaccggtggtgcggaaatttcccccttggggccgcccccgcggatgctgtcgcctttgtacataacaggtagcatgcgtatcccatacattacgtgtacgttaatatacccaccccgctggccggattcgtgcgagctgttggccgtagtgcccttgggccgtgcctggcttgtcgtcgcggattccgccagccacggggggctttacgtcgtctctgctaggagaggcggcgtctaaagggatccccttgagtcgaattcgtcagcttacctagccgtggcgtcgccaccgctagcgtgtgtttgcgcacggttcaccgtgcgtgtggtgttcgggtg

SEQ ID NO: 275 - DNA, 1000 bp, unidentified
  source 1..1000: mol_type = unassigned DNA; note = unclassified RNA viruses ShiM-2016 sequence
ttgccgatgttcaagcgtgggaacgctgggctaatgacccgactatcgatgccgcgcaaaaatggcgtgagcatcagccgtggtcgcggaagtcaggatcgcacacgtgcggtggatccaacgaggtttggtttgcaaccgaccatcgagacagagtcatgactttccttcgttatgattatactgtcacttccagcgcgacagtttggattaaagaacccagacctacgctttcgcgtagtatggggcttgacctccaaggtgtcatcccagccgcttgggatttgactgcgttttcctgggcggccgattggtttgggaattgctctcaagttatcaaggctgcaaattgccttttacttgggcccgagccaatgggtggatgggttacgactgtagttcgtggtaaagttaccgtgaagaaaagtccacacccacaagataaacagacagaagtccgtcaccatgagacctttaatgttaagtggaagaagcgtaggcccctagctttttgggaccgcttcccctcgttagagtataggcctaatctcgacccgtggagggtcgttgacatggcttctcttggtataatattctctaaagggcacaaagtgccaggagttatcaaacatggataagagtgcttacaagctctataccattggtcgggacgaggtagtttatgccacgcctgaccacacagtgtcaaattcagacactctcactatgcgacgtacgtcttccaaaaaacgtacagtcaagggaggtaatgttgaacttacgccacagcgcgtaaattacaactttaccaagactattgacgggaacttgatcacgctgtccgtcacaagtacaattgtacctgggactgatacagctcaggcgaagaccttctttagtgacgcgcttaccgcgttcgcagaggaatttgccggatctgcaatctccggtgacatcactcggactccctttaactaactttttataaggaacaattttt

SEQ ID NO: 276 - DNA, 1000 bp, unidentified
  source 1..1000: mol_type = unassigned DNA; note = unclassified ssRNA positive-strand viruses sequence
tcatccgacatactccgggacgccaagaaccctgagccgccattctcatcctgcggcggtcgtggcgaggtctgtccctcccgtcatgatttccccggagccttgctctgtcactccgattactacctctacgacgagctctcttatgtcattcgtgggcacacttttatcatcaatcactcgtttcttgaagagaataagcacttccacaatgaagcgttcatcacgaagaaaggcgacggagtaatcatgtccacccctgacggcactgaatatcagcacccatacaacatctggaaagccgaaggttgtatcataggatccggtggtgctgccgtctatgcccgagtctatcgtgggccctcaatggatgtttactacgcctatcccgcttctggcacttatcatagtgatgatccacaccgcttaaaacgctcagaccaattcgagaatctccgccttagtagtggcaacattgccagactctctttcaaatccgtcaagattcaaaccacctccggtgacaccatcctcgattgccctcgcgatccctttgaaagagcagttgccaaatgcggtagcggtgtccgtgatctgaagttcttacccacgctatcttcatatatcatatccaaattaaccatgcacgatttagagattaataacgcacaagacatcttagaattagcaaacatcatgtgtgagcgcttcgcttttgacttctactcccactcccatcttgagtatgatcccaccaacataaacatcttcactaggtgtcgtcgtcatgctatgctgctggcccgcgctattcgccacaccctagcacgcaatataacatgttcgattattaatcgtcccatcttacggcaatttacaccttgggcatttaaaagcatcaccatgcctgcttacatcaagcaccgacgtgcacgtcacatcgacttaagacttgcgtctgacaggcctaagccctttcgtgacgggcgcccgatacttg

SEQ ID NO: 277 - DNA, 1000 bp, unidentified
  source 1..1000: mol_type = unassigned DNA; note = unclassified ssRNA positive-strand viruses sequence
gggcacataccgttatgagaaaacggggggcagatgttccggcgatagtgacacatcgttaggcaacgtgagcatcatgctggcgattacgagggtggtttgtgagaggctaaaaggcatacacgtcgagatagcaaacgacggagacgatcaggtactgatggttgaggaaaaccacctcaacagcctggtcgaggagctcagccccacattcatgcggtttggtttccgcgtgaaagtagaggacccggtttgggaattcgagagaatagatttttgccaaaccagaccgatcttcctgtcacccaacgcgccaattatgtgccggtacccaatgcaatctatgtctaaagatgtagcgtcgttcctcaatatagaaagatctgagggatggaaatacatgctgcgagcgataggagcttgcgggtcttctagtttctcacaagtaccagtacttgggaagttctacagagcgttaagttccacatcaaacaagtcagaacacacatggtggaaacgcactggggtagatcttggattcaaacaactcacgaccaacgtgggcccggtccaatatgacgaaataacggcacgaagctccttctataaggctttcggcatactacctgacacccaaatggccctagagagggcaatagacgaatggtacataagccccacaccaccaattgagcacgtccataagttctcgagtgagtacccagtggttgaaggttgggcctaattgtagggtagcaataggtatagctagcctgcccccccccgcttgctgggccggtgggggcagcaccgcagacaacgtggttgagtttgggaacatagatccgaacaccacgtcacgggtaggccacacccgcggagtcaggctgattgccataattggcaggtggggccacgccgtttggccaaaccacccgggtcaccggtagggagaggtctctagggatccgagtgctgccctgttgtaggggcacgctca

SEQ ID NO: 278 - DNA, 1000 bp, unidentified
  source 1..1000: mol_type = unassigned DNA; note = unclassified ssRNA positive-strand viruses sequence
tacacattgaagtagccaatgatggagatgaccaggtgttgatggtcgagacaaaccaactcgacaacctggtcaaggagcttagtcccacattcgcgcgatttggttttcgcgtgaaagtagaggatcctgtctgggaattcgagagaatagatttttgccaaaccagaccgatcttcctatcaccaggtgagcccataatgtgccgatacccaatgcagtctatgtccaaagacgttgcgtccttcctcaatatagaaagatcagagggatggaaatacatgctcagagctataggagcatgtgggtcttctagtttctctcaagttccagtgcttggtgagttttatagtgcgctcagctccacatcaaacaaagatgaaaccaaatggtggaggcgcacgggagttgatttggggtttaaacagcttaccaacaatgtaggcacgatcccttacgacgaggtcacggcacgaagctccttctataaggccttcggaatcctcccagacacccaagcagcactcgaaagcaaaatacgcaactggaatatgagctccgtaccacacatcgagcaagtccacaaattctcgagtgagtttcccgtggttgacggatgggcctaacttagggaatacagttaggttaagttagtcggcccctcctcttgctggctgggtgagagggggggccagcgcagactggttggataggtttgggaacatagatccgaactccaatcaacgggtaggtcgcacccgcgtagtcgagaatgattaccataattggtaggtgaggtcacgccgtatggccaagtcacccgagctttcggtagggggtctagttgttgagtgccattatgacataaccaactagacaccccacatttggagaagcggcttgcccacgctccaacattccatggatagattgaacgacgaaatgtcattgtcttgccgtcagaggcgttcccctctccaaggctagcccgacgtgcgcc

SEQ ID NO: 279 - DNA, 300 bp, Pestivirus A
  source 1..300: mol_type = genomic DNA
gcgaaggccgaaaagaggctagccatgcccttagtaggactagcataaagaggggggtagcaacagtggtgagttcgttggatggcttaagccctagtacagggtagtcgtcagtggttcgacgccttggcataaaggtctcgagatgccacgtggacgagggcacgcccaaagcacatcttaacctgagcgggggtcgctcaggcgaaaacagtttgatcaactgctacgaatacagcataataggttaggccagaggcccactgttctgctactaaaaatctctgctgtacatggcac

SEQ ID NO: 280 - DNA, 301 bp, unidentified
  source 1..301: mol_type = unassigned DNA; note = unclassified Sicinivirus sequence
tgtggtgattagtagaccccctggaggtacccgttttggatctgaccagggacccgtgactataccgttccggtaattcgggtttaaaacaatgaacgtcaccacacactttctttttccctttattttatttgtttgttcagtatgttttatgagttgctcattattgctgcccttgtcgtgattcttgtttcaccgcatgatacccagtgtcttattgtcgtctgtttggtcaattttcttgtatactttctttggacaattccagggttagaccttccattatacccagcaatacaac

SEQ ID NO: 281 - DNA, 303 bp, unidentified
  source 1..303: mol_type = unassigned DNA; note = unclassified Picornaviridae sequence
tggccaccggggaaaaacggctactgtgcaccacctctgcaccccacgccgaccacgcctaaccatggcgttagtaggagtggaggaccactgcagagggtcctggtgtgcgacagtcagtggtagagtagacagtcctgactgggcaatgggaccgcgttgcgtatccctaggtggcattgagatttctctgccacccaccagcatggattcctgtggggggggccccatgggctaggtctatactgcctgatagggtcgcggctggtcgactgctgactgtataaccagttgtaacttact

SEQ ID NO: 282 - DNA, 304 bp, Enterovirus B
  source 1..304: mol_type = genomic DNA
tagttggtagtcctccggcccctgaatgcggctaatcccaactgtggagcagatacccacgcaccagtgggcagtctgtcgtaatgggcaactctacagcggaaccgactactttgggtgtccgtgtttcttttatttattcctacgctggctacttatggtgacaattgagagactgtagttatattgccatcagattggtcatccggtggagaataaaacagttgctcacctgtttgtcagtcctgcaccgtcgtgccatagagtcttaactgcccctcaacatcgtcgtaaacacgctgga

SEQ ID NO: 283 - DNA, 305 bp, unidentified
  source 1..305: mol_type = unassigned DNA; note = unclassified Picornaviridae sequence
gtggctggccaccacggaataacggcaattgtttgtatgtgggaggtcaagcctgcctagccgataacctttgaccgggtgtgtaggatagaacaggaacccactacaggcgacaggttatggtagagtggatacctagccaggggcaatgggactgcgttgcatatccctaatgagccatcgagatttctctggccattacccggtgatggttgtgtggggggggccccacacactagatccatactgcctgatagggtcgcggctggccgaccataacctgtatagtcagttgactttgaatc

SEQ ID NO: 284 - DNA, 306 bp, Enterovirus B
  source 1..306: mol_type = genomic DNA
taactggtagtcctccggcccctgaatgcggctaatcctaactgcggagcagatacccacatgccagtgggcagtctgtcgtaacgggcaactctgcagcggaaccgactactttgggtgtccgtgtttccttttattcttatactggctgcttatggtgacagttgaaagattgttaccatatagctattggattggccatccggtgacgaacagagcaattatttacctatttgttggttttgtaccattaaatcacaaagttttaaaaacattgaaccttgttttagcatttaatacagcaaa

SEQ ID NO: 285 - DNA, 306 bp, Enterovirus B
  source 1..306: mol_type = genomic DNA
tagtcggtagtcctccggcccctgaatgcggctaatcctaactgtggagcagatacccacgcaccagtgggcagtctgtcgtaatgggcaactccgcagcggaaccgactactttgggtgtccgtgtttcatttgttcctacactgactatttatggtgacaattgagagactgtaactatactactatcagattgaccacctggtataaaataaaacagttgttcacctgtttatcagcctcgcaccgttgtactgtaaagcctcagacaccccccaacactatcataacacgtagatcattaaa

SEQ ID NO: 286 - DNA, 306 bp, Enterovirus B
  source 1..306: mol_type = genomic DNA
tagttggtgatcctccggcccctgaatgcggctaatcctaactgcggagcacatgctcacaaaccagtgggtggtgtgtcgtaacgggcaactctgcagcggaaccgactactttgggtgtccgtgtttctttttattcctatactggctgcttatggtgacaattgagagattgttgccatatagctattggattggccatccggtgtcgaacagagcgatcatttatctgtttgttgggtttgtacccttaaatcttagagttttcaaaactctcaacctcgtactacaactaaactcagcaaa

SEQ ID NO: 287 - DNA, 306 bp, Enterovirus B
  source 1..306: mol_type = genomic DNA
tggttggtagtcctccggcccctgaatgcggctaatcctaactgcggagcacatgcccacaaaccagtgggtggtgtgtcgtaacgggcaactctgcagcggaaccgactactttgggtgtccgtgtttctctttatccctatactggctgcttatggtgacaattgagagattgttgccatatagctattggattggccatccggtgtcaaatagagcgattatctacctatttgttggatttatacctttgaattttgaagtatttaagaccctcaaccttatattacaactcaattcggtaaa

SEQ ID NO: 288 - DNA, 306 bp, Enterovirus B
  source 1..306: mol_type = genomic DNA
tagttagtagtcctccggcccctgaatgcggctaatcctaactgcggagcacatgcccacaaaccagtgggtggtgtgtcgtaacgggtaactctgcagcggaaccgactactttgggtgtccgtgtttctctttattccaatactggctgcatatggtgacaattgagagattgttgccatatagctattggattggccatccggtgtcgaacagagcgatcatctacctatttgttggatttgtgcctttgaattttgaagtattcaagactctcaaccttgtactacaactcaattcggcaaa

SEQ ID NO: 289 - DNA, 307 bp, Enterovirus B
  source 1..307: mol_type = genomic DNA
taattggtagtcctccggcccctgaatgcggctaatcctaactgcggagcagatacccacgcaccagtgggcagtctgtcgtaatgggcaactctgcagcggaaccgactactttgggtgtccgtgtttccttccgttcttatattggctgcttatggtgacaattggaagattgttaccatatcgctattggattggccatccggtgacgattagaacacttgtatacctatttgttagctttgcaccgctgaactacagagccttaagcaccctttgatcacattacaacacccaacacgtcaaa

SEQ ID NO: 290 - DNA, 307 bp, Enterovirus B
  source 1..307: mol_type = genomic DNA
taattggtagtcctccggcccctgaatgcggctaatcctaactgcggagcagatacccacgcaccagtgggcagtctgtcgtaatgggcaactctgcagcggaaccgactactttgggtgtccgtgtttccttttattcttatactggctgcttatggtgacaattgagagattgttaccatattgctattggattgtccacccggtgacaaatagaacagttgcttacctgattattagtttcgcaccactgaactacaaaaccttaaacaccctttaatttcatcacaacgcacaatacgttaaa

SEQ ID NO: 291 - DNA, 307 bp, Enterovirus B
  source 1..307: mol_type = genomic DNA
tagttggtagtcctccggcccctgaatgcggctaatcctaactgcggagcagatacccacgcaccagtgggcagtctgtcgtaatgggcaactctgcagcggaaccgactactttgggtgtccgtgtttccttttactctcatactggctacttatggttacaattgagagattgtgaccatattgctattggattggccatccagcgacgaatagaatagttgcttacctgtttgttaacctcgtatcactgaactacaaagccttgaataccctttaacttcatcataacgctcagtacgctaaa

SEQ ID NO: 292 - DNA, 307 bp, Enterovirus B
  source 1..307: mol_type = genomic DNA
tagttggtagtcctccggcccctgaatgcggctaatcctaactgcggagcagatacccacgcaccagtgggcagtctgtcgtaacgggcaactctgcagcggaaccgactactttgggtgtccgtgtttccttttattcttatactggctgcttatggtgacaattgaaagattgttaccatattgctattggtttggccacccggtgacgaatagaacagttgtttacctaattgttagtttcgtaccactgaactacaaagccttaaacaccctttaatttcatcataacactcaacacgttgaa

SEQ ID NO: 293 - DNA, 308 bp, Enterovirus B
  source 1..308: mol_type = genomic DNA
taattggtagtcctccggcccctgaatgcggctaatcctaactgcggagcagatacccacgcaccagtgggcagtctgtcgtaatgggcaactctgcagtggaaccgactactttgggtgtccgtgtttccttttgttcttatactggctgcttatggtgacaattgagagattgttaccatattgctattggattggccatccggtgacgaatagaacaattgtttaactatttgttggttttgtaccgctgaaccacaaagccttaaacaccctttaatttcatcataacgctcaatacgttagaa

SEQ ID NO: 294 - DNA, 308 bp, Enterovirus B
  source 1..308: mol_type = genomic DNA
tagttggtagtcctccggcccctgaatgcggctaatcctaactgcggagcagatacccacgcaccagtgggcagtctgtcgtaatgggcaactctgcagcggaaccgactactttgggtgtccgtgtttccttttgttcttatactagccacttatggtgacaattgagagattgtaaccatattgctattggattggccacccggcgacgaatagaacagttacttacctgtttgctatcctcgtatcgccgaactacaaatccttaaacaccctttaatttcgtcacaacgctcaatacgttaaaa

SEQ ID NO: 295 - DNA, 308 bp, Enterovirus B
  source 1..308: mol_type = genomic DNA
tagttggtagtcctccggcccctgaatgcggctaatcctaactgtggagcagatacccacgcaccagtgggcagtctgtcgtaatgggcaactccgcagcggaaccgactactttgggtgtccgtgtttcttttttgttcctacactggctacttatggtgacaattgagagactgtaaccatattgctaacggattggccacctggtatagaatagaacaattgcttacctgtctggcagtctcacaccgttgtaccataaagcctctgacacccctcaacaccgtcataacacttaacacgttgaa

SEQ ID NO: 296 - DNA, 308 bp, unidentified
  source 1..308: mol_type = unassigned DNA; note = Human rhinovirus B strain HRV-B06_p1159_sR2067_2009 polyprotein1 sequence
gctgtgaccataagacaataatgagtaaaaagagaaacacggacacccaaagtagtcggtcccgtcccggaattgctcattacgaccttaatatcactggtttgtaatacaaggctccagggttaaggttagccgcattcaggggccggaggaatcacaaccaagcacatgcgagtcttcacaccatgtctataaaagggcgtaatgagcaattccgggacgggaccgactactttgggtgtccgtgtttctctttttactcattattgtcttatggtcacagcatatttgttaaatatactgtgatc

SEQ ID NO: 297 - DNA, 310 bp, Pestivirus B
  source 1..310: mol_type = genomic DNA
gcagccccggacatctaagggcatggctagccatgcccttagtaggactagcaaaaggaggggactagcagtagcagtgagttcattggatggccgaatccctgagtacagggaagtcgtcaatggttcgacactccattaaccgaggagtctcgagatgccatgtggacgagggcatgcccacggcacttcttaacctatgcgggggttgcatgggtgaaagcaccattcgtggtgttatggacacagcctgatagggtgtagcagagacctgctattctgctagtaaaaactctgctgtacatggcac

SEQ ID NO: 298 - DNA, 310 bp, unidentified
  source 1..310: mol_type = unassigned DNA; note = unclassified Enterovirus sequence
atgctgtgaccataagacaataataagtaaaataagaaacacggacacccaaagtagtcggtcccgtcccggaattgctcattacgcccttttatagacatggtgtgaagactcgcatgtgcttggttgtgattcctccggcccctgaatgcggctaaccttaaccctggagccttgtattacaaaccagtaatattaaggtcgtaatgagcaattccgggacgggaccgactactttgggtgtccgtgtttcttattttacttattattgtcttatggtcacagcatatttgttaaatatactgtgatc

SEQ ID NO: 299 - DNA, 315 bp, unidentified
  source 1..315: mol_type = unassigned DNA; note = unclassified Picornaviridae sequence
ttctgcttgctctacgtgcggcgcacgttaaaacgtcccggtggtgtctgtgagcatcatcgttactcttaggagaaacaattatcacaacatgttagtgcggcgcacttcaaacgtcccggggacattcgtgaatgtcatcgtaactccatggagaaatcaaaatcacgatagaagtactgattacggcagcctacaaaggcttgaagtttaccatgtacctgacgcttgcttctatttggacttacaactcttcagttgtgcggcaaccaccgcagaaaaacttagacagggtcctaccatgatgttggtagg

SEQ ID NO: 300 - DNA, 315 bp, unidentified
  source 1..315: mol_type = unassigned DNA; note = unclassified Cosavirus sequence
ctacaagctttgtgtaaacaaacttttgtttggcttttctcaagcttctctcacatcaggccccaaagatgtcctgaaggtaccccgtgtatctgaggatgagcaccatcgactacccggacctgcaaaattttgcaaacgcatgtggtatcccagccccctcctctcggggagggggctttgctcactcagcacaggatctgatcaggagatccacctccggtgctttacaccggggcgtggatttaaaaattgcccaaggcctggcgcacaacctaggggactaggttttccttatattttaaagctgtcaat

SEQ ID NO: 301 - DNA, 316 bp, unidentified
  source 1..316: mol_type = unassigned DNA; note = unclassified Picornaviridae sequence
gatgtcggatgacggctggccaccggggaaaaacggcaaatgtgcaccacctctgcaacccacgccgaccacgtttaaccatggcgttagtaggagtggaccactgcagtgggctctggtgtgcgacagtcagtggtagagtagacagtcctgactgggcaatgggaccgcgttgcgtatccctaggtggcatcgagattcctctgctacccaccagcgtggactcctatggggggggccccataggctaggtctatactgcctgatagggtcgcggctggtcgaccactgactgtataaccagttgtaactcact

SEQ ID NO: 302 - DNA, 317 bp, unidentified
  source 1..317: mol_type = unassigned DNA; note = unclassified environmental samples sequence
atcctcggctccgtcccggaaagacttaaaacttgtccctctgagcgcactagcgtgctcactaaaccaaagacagtattctgccatggataccataccggacacacactctttattgtcccaaaaggcttggcattgtaggcttgaaggctatttagccttggattcaccatccaagagaaccccacgtgcgtagcttgagtcagctagcacatagtggtccccgacttacttcaaaacttacaacaatcagctctgctcctaacgatcataaggagtatagcgtgaaatttcatgatcaaacccctgactgggtt

SEQ ID NO: 303 - DNA, 318 bp, Pestivirus A
  source 1..318: mol_type = genomic DNA
ggaacaaatcctcctcagcgaaggccgaagagaggctaaccatgcccttagtaggactagcatatagaggggggtagcaacagtggtgagttcgttggatggctgaagccctgagtacagggtagtcgtcagtggttcgacgctccagaatgcgagcctcgagatgccacgtggacgagggcatgcccacagcacatcttaacctaggcaggggtcgcctaggtgaaagcgggtggaccaaccgttacggacacagcctgatagggtgctgcagaggcccactggactgctactaaaaatctctgctgtacatggcac

SEQ ID NO: 304 - DNA, 319 bp, Pasivirus A
  source 1..319: mol_type = genomic DNA
acatggggtatgttgtctgtcctgttttgttgaaacaatatataagatcctttccgccgatatagacctcgacagtctagtgtaggaggattggtgatagtaacttgccccagaagagtgaccgtgacacatagaaaccatgagtacatgtgtatccgtggaggatcgcccgggactggattccatatcccattgccatcccaacaaacggagggtatacccactatgtgcgcgtttgcagtgggagcctgcaaatttagtcatactgcctgatagggtgtgggcctgcactctggggtactcaggctgtttatataat

SEQ ID NO: 305 - DNA, 319 bp, unidentified
  source 1..319: mol_type = unassigned DNA; note = unclassified Enterovirus sequence
gaatgcggctaatcctaaccacggagcacccaccagtaaaccagctgggagggtgtcgtaacgggtaactctgtggcggaaccgactactttgggtgtccgtgtttccttttgatcctattttggctgcttatggtgacaacgataagttgttatcataaagcttttgggttggccacctggaaaaagttatcagtgtttgatattgctcggctttcacgcctaccaataaaacaagctttatattacttaatttccttttacccaaaggaagaaatctctgaatttcatcttcaactgctcttaacattatcagcaag

SEQ ID NO: 306 - DNA, 321 bp, Enterovirus B
  source 1..321: mol_type = genomic DNA
agagtctattgagctaattggtagtcctccggcccctgaatgcggctaatcctaactgcggagcagatacccacacaccagtgggcagtctgtcgtaacgggcaactctgcagcggaaccgactactttgggtgtccgtgtttccttttattttttacactggctgcttatggtgacaattgagaaattgttaccatatagctattggattggccatctggtgacaaacagagcgattatttacctatttgttggttttgtaccattgaattttaaagtattaaaaacccttaacctcattctaacatttaacacagtaac

SEQ ID NO: 307 - DNA, 322 bp, unidentified
  source 1..322: mol_type = unassigned DNA; note = unclassified Enterovirus sequence
agagagttatgtatggacatgtccagtcaggtctaggggtcctgctggcgacagtgttctagcctgcgtggctgcctgcgtgtcctcacgggcacgaagccatttacttgacaaggtgtgaagagtcccgtgtgctcgtcttgagtcctccggcccctgaatgtggctaaccttaaccctgcagccagtacacacaaaccagtgtgtagctggtcgtaatgagcaattgcgggatgggaccaactactttgggtgtccgtgtttcactttttaccttttattatgcttatggtgacaatatatagacatatatattgacacc

SEQ ID NO: 308 - DNA, 323 bp, Pegivirus B
  source 1..323: mol_type = genomic DNA
ggtgcgcgtgaaaccttctcgtcacagaagattagcgcgctaggtacgccaaaggcgtaggcccccggcggtttgcaccgacgtgggacaatgcgctggaggattttacagccgacagagctgcaaaacctgtagtaaggccggagtaccggcctcccagcccgcgtcagcctaaacctggctgtcatacgcggtgtatggaggacatgtccaactatgggtgccttggggtggttccccttggcgtggtgtgacgaccatagcagtactgcctgatagggtcccggcggatgggtcggctgtgtacatccgttgtccccccc

SEQ ID NO: 309 - DNA, 323 bp, unidentified
  source 1..323: mol_type = unassigned DNA; note = unclassified Picornaviridae sequence
ggaatgtggatgacggatgacggttggccaccggggaaaaacggcaattgtgcacctcctctacaacctacgccgaccatgcctaaccatggcatcagtaggagtgggcccctgtagtgggtcaaggtgtgcgacagtcagtggtagagtagacaatcctgaccgggcaataggactgcattgcatatccttaggcggcattgagaagcctctgccacccaccggcatggatttctatggggggggccccatagactaggtctatactgcctgatagggtcgcggctggtcgaccactgactgtataaccagttgtgtataac

SEQ ID NO: 310 - DNA, 324 bp, unidentified
  source 1..324: mol_type = unassigned DNA; note = unclassified Enterovirus sequence
agcctactgagctacttgagagtcctccggcccctgaatgcggctaatcccaaccacggagcaggtgaccataaaccaatggttggcctgtcgtaatgcgcaagtctgtggcggaaccgactactttgggtgtccgtgtttccttttacctttttcattggctgcttatggtgacaatcatagattgttatcataaagcgaattggattggccatccggtgaaaatcagagcgattgtatacttgtttattggattcactccattaacaccaaactccctaacactcatcaaactagttttgttgataagacactactatcata

SEQ ID NO: 311 - DNA, 327 bp, Enterovirus B
  source 1..327: mol_type = genomic DNA
ggtgtgaagagtatattgagctagctggtagtcctccggcccctgaatgcggctaatcctaactgcggggcaagcacccacaatccagtgggcagcttgtcgtaacgggtaaccctgcagcggaaccgactactttgggtgtccgtgtttcctttatttttaaaactggctgcttatggtgacaattgagagattgttaccatatagctattggattggccatccagtcaccaacagagcaattgtgtacctctttgtagggttcataccacttaattttactagctacaacacactgtgtttcattatcgatttaaacacagcaag

SEQ ID NO: 312 - DNA, 328 bp, unidentified
  source 1..328: mol_type = unassigned DNA; note = unclassified Enterovirus sequence
ccggcccctgaatgtggctaatcccaaccacggagcgctcgccaacaaaccagttggtagggcgtcgtaacgggtaactctgtggcggaaccgactactttgggtgtccgtgtttccttttgatcctatattggctgcttatggtgacaacgataagttgttatcataaagcttttgggttggccacctggaaaaagttatcagtgtttgatattgttcggctctcgcgcctaccagtaaaacaagcattatactatttaatttccttttatccaaaggaagagatttctgagtttcatttacagttgctcttagtgttgtcaacaag

SEQ ID NO: 313 - DNA, 329 bp, Pegivirus H
  source 1..329: mol_type = genomic DNA
tgaactgttgttgtagcaatgcgcatattgctacttcggtacgcctaattggtaggcgcccggccgaccggccccgcaagggcctagtaggacgtgtgacaatgccatgagggatcatgacactggggtgagcggaggcagcaccgaagtcgggtgaactcgactcccagtgcgaccacctggcttggtcgttcatggagggcatgcccacgggaacgctgatcgtgcaaagggatgggtccctgcactggtgccatgcgcggcaccactccgtacagcctgatagggtggcggcgggcccccccagtgtgacgtccgtggagcgcaac

SEQ ID NO: 314 - DNA, 329 bp, unidentified
  source 1..329: mol_type = unassigned DNA; note = unclassified Teschovirus sequence
ttcccaccctcaccctctggatttgtaactgataagtgatgatccttggaagctaggtactcgttacgctggttttggattgtcttgtgcccaacactagttttcggactcttgttgtgtttaaacacagaaatctgattatttggttgtagatttactggacccaccctttgaaagacctgctctggcgcgagctaaagcgcaattgtcaccgggtattgcaccaatggtggcgacagggtacagaagagcaagtactcctgactgggtaatgggactgcgttgcatatccctaggcacctattgagatttctctggggcccaccagc

SEQ ID NO: 315 - DNA, 331 bp, Teschovirus A
  source 1..331: mol_type = genomic DNA
actagtccttggacttttgttgtgtttaaacacagaaatttaattacctggccatgaattcattggattaacccttctgaaagacttgctctggcgcgagctaaagcgcaattgtcaccaggtattgcaccagtggtggcgacagggtacagaagagcaagtactcctgaccgggcaatgggactgcattgcatatccctaggcacctattgagatttctctggggcccaccggcgtggagttcctgtatgggaatgcaggactggacttgtgctgcctgacagggtcgcggctggccgtctgtactttgtatagtcagttgaaactcacc

SEQ ID NO: 316 - DNA, 331 bp, unidentified
  source 1..331: mol_type = unassigned DNA; note = unclassified Teschovirus sequence
actagacctcggtcttctgttgtgtttaaacacagaaatcttgctatctgactatgaattcataggactaacccctctgaaagacttgctctggcgcgagcaaaagcgcaattgtcaccaggtattgcaccaatggtggcgacagggtacagaagagcaagtactcctgactgggcaatgggactgcgttgcatatccctaggcacctattgagatttctctggggcccaccagcgtggagttcctgtatgggaatgcaggactggacttgtgctgcctgacagggtcgcggctggccgtctgtactttgtatagtcagttgaaactcatc

SEQ ID NO: 317 - DNA, 332 bp, Teschovirus A
  source 1..332: mol_type = genomic DNA
actagaccttggtctcttgttgtgtttaaacacagaaatttttcctatttggttatgaattcattggatcaatccctctgagagacctgctctggcgcgagcaaaagcgcaattgtcaccaagtactgcactaatggtggcgacagggtacagaagagcaagtactcctgactgggcaatgggactgcgttgcatatccctaggtacctattgagatttctctggggcccaccagcgtggagttcctgtatgggaatgcaggactggacttgtgctgcctgacagggtcgcggctggccgtctgtactttgtatagtcagttgaaactcact

SEQ ID NO: 318 - DNA, 333 bp, Pestivirus A
  source 1..333: mol_type = genomic DNA
caatgattaggcctagggaatgaatcccccttagcgaaggccgaaaagaggctagccatgcccttagtaggactagcataatgaggggggtagcaacagtggtgagtttgctggatggcttaagccctgagtacagggtagtcgtcagtggttcgacgcctcagtgaggaggtctcgatatgccacgtggacgagggcatgcccaaagcgcatcttaacctgggcgggggtcgctcaggcgaaagcggtttattaactgctgcaaatacagcctgatagggtgctgcagaggcccactgtattgctactaaaaatctctgctgtacatggcac

SEQ ID NO: 319 - DNA, 333 bp, Pestivirus K
  source 1..333: mol_type = genomic DNA
tgctgtgagccccgtggtgagtgggggaaaggggttaaccaggcctctagtaccacaggcaccattggacagggcaactcgaacctgagagagaggtaccgaacccttaagccccgagtacggggtagacgtcaccgagtagtacacccaaagaccaccacattcaggtgtagggtctactgaagctcgggtggacgtgggcgtgcccaaagggaaatcggtggtggacctgggggttgggcccgccatgccccttcatggggtagacctcactgcttgatagagtgccggcggatgcctcaggtaagagtataaaatccgttgttcattaac

SEQ ID NO: 320 - DNA, 335 bp, Teschovirus A
  source 1..335: mol_type = genomic DNA
caacactagacctcggtctactgttgtgtttaaacacagaaatctcgctacttggttatgaattcattggatcaatccctttgaaagacctgctctggcgcgagcaaaagcgcaattgtcaccaggtattgcaccaatggtggcgacagggtacagaagagcaagtactcctgactgggcaatgggactgcattgcatatccctaggcacctattgagatttctctggggcccaccagcgtggagttcctgtatgggaatacaggactggacttgtgctgcctgacagggtcgcggctggccgtctgtactttgtatagtcagttgaagcacact

SEQ ID NO: 321 - DNA, 337 bp, Shanbavirus A
  source 1..337: mol_type = genomic DNA
accttttccccctctaaggcaatgcactttggtttattctcatggatcatgattttagaggctggccacctaggttaaacggcaattattagtgataggggtcaaacactcatcgtgaaaccgtccagtagcgaggagtagttccctatctactagtgactagtgtgagcagagtaggaggtatacaaggaagtgggacgctatttgctatccccgtattgagagttctctacaccttgtgtatacagtggattgggaagtccactctggtcctatactgcctgatagggttgttaactgtcagctcacacttagtataacagtttgtcaaacactt

SEQ ID NO: 322 - DNA, 337 bp, unidentified
  source 1..337: mol_type = unassigned DNA; note = unclassified Enterovirus sequence
tacccatggctaacgccatgggacgctagttgtgaacaaggtgtgaagagcctattgagctacttaagagtcctccggcccctgaatgcggctaatcctaaccacggagcaagtgcccacaaaccagtgggtagcttgtcgtaacgcgtaagtctgtggcggaaccgactactttgggtgtccgtgtttccttttatttttatcatggctgcttatggtgacaatctaagattgttatcatatagctgttggattggccatccggtgatttacagagacttgagaactaacccgcctttctacaacactcatttacttattaatctcacaatacaaa

SEQ ID NO: 323 - DNA, 338 bp, unidentified
  source 1..338: mol_type = unassigned DNA; note = unclassified Picornaviridae sequence
ctcgtgagtagtacttggccctgcccattacttgaggaccgactcttcttgactacaatgtgtttaaagtaacctggaccacattgtgtatccagacaactccattaggtaatgtacgctggagacgttttcagtgcatagggttctaaagtggtgctgaaatattgcaagctcaatggaatactgaacgctgaaaaccgccgctattatcttttgggccccttgtgggcaaacgttggctttaagcatatactgcttgggaatgcagtactggttgtagacagggtgatagcctaccggctggcgtagttgagttggtatagccagttgattgccat

SEQ ID NO: 324 - DNA, 341 bp, synthetic construct
  source 1..341: mol_type = other DNA
gccagcccccgattgggggcgacactccaccatagatcactcccctgtgaggaactactgtcttcacgcagaaagcgtctagccatggcgttagtatgagtgtcgtgcagcctccaggaccccccctcccgggagagccatagtggtctgcggaaccggtgagtacaccggaattgccaggacgaccgggtcctttcttggatcaacccgctcaatgcctggagatttgggcgtgcccccgcgagactgctagccgagtagtgttgggtcgcgaaaggccttgtggtactgcctgatagggtgcttgcgagtgccccgggaggtctcgtagaccgtgcacc

SEQ ID NO: 325 - DNA, 343 bp, unidentified
  source 1..343: mol_type = unassigned DNA; note = unclassified Flavivirus sequence
atataaatcccagtttggttaaacctatttcaaggcttaagttgtttattattttatcgccgctcgtgactataaagttgcctagcggagagagataaagaagaaggagttcaaggctcagggcagggcgcaagttccctggtccctaggccgctcgcaggaaggaggagtgaagaagaagaaagagaaggagaggaccaccgccgaaagaaggcaggtgcctcacaagagggccaaccagcgtgttggaccagtggccaacgccggacggcgtggtggcctgctgggacgcctggggattggatggagtgccttcctacaggaagacatcgttcaagccatc

SEQ ID NO: 326 - DNA, 343 bp, unidentified
  source 1..343: mol_type = unassigned DNA; note = unclassified Parechovirus sequence
acatggggcaggtgtgctgtgccaagagcaacactacggtggccgagccgatggttcgtcaccacgtagtaggactccgtagtgcttggttacggcggacgtaagtcagttgagtgatgtctaagtggcaaaccatgagtacatggtaaccttgtgtggactcgcgggacggaatttcctatcccattgactccttgtagcaaggtgggtatacccaaccacaatggcagcaccctgggtgggaacccaggggcctggattagtatccagtcacacagcctgatagggtggcggctcagccactgaccagcgtctctaaataattgtgagctgttcatgcacc

SEQ ID NO: 327 - DNA, 343 bp, Teschovirus A
  source 1..343: mol_type = genomic DNA
cttgtgcccaacaaaaggctttggtctcttgttgtgtttaaacacagaaattttgttactcggttatgaattcactggattaacccctttgaaagacctgctctggcgcgagctaaagcgcaattgtcaccgggtattgcaccaatggtggcgacagggtacagaagagcaagtactcctgactgggcaatgggactgcattgcatatccctaggcacctattgagatttctctggggcccaccagcgtggagttcctgtatgggaatgcaggactggacttgtgctgcctgacagggtcgcggctggccgtctgtgctttgtatagtcagttgaaattcact

SEQ ID NO: 328 - DNA, 343 bp, Teschovirus A
  source 1..343: mol_type = genomic DNA
cttgtgcccaacattggtcctcggacttctgttgtgtttaaacacagaaattcaactattcggttatgaattcattggatcaaccctcttgaaagacctgctctggcgcgagctaaagcgcaattgtcaccaggtattgcaccatcggtggcgacagggtacagaagagcaagtactcctgactgggcaatgggactgcattgcatatccctaggtacctattgagatttctctggggcccaccagcatggagttcctgtatgggaatgcaggactggacttgtgctgcctgacagggtcgcggctggccgtctgtactttgtatagtcagttgaaatgcact

SEQ ID NO: 329 - DNA, 347 bp, Pestivirus A
  source 1..347: mol_type = genomic DNA
aattccaaaacagaaatcaggcctagggaacaaaatcctcctcagcgaaggccgaaaagaggctaaccatgcccttagtaggactagcaaattggggggggtagcaacagtggtgagttcattggatggccgaagccctgagtacggggtagtcgtcagtggttcgacgccttaaggaaactaggtctcgagatgccacgtggacgagggcatgcccacggcatatcttaacctgcgcgggggtcgctcaggtgaaagcggcataaatgaccgttatggacacagcctgatagggtgctgcagaggcccactgtattgctactgaaaatctctgctgtacatggcac

SEQ ID NO: 330 - DNA, 347 bp, unidentified
  source 1..347: mol_type = unassigned DNA; note = unclassified Picornaviridae sequence
atgtttgtttcatcatatcactatttttgtatcctatcttgattaatcgcttagattggcttggggaagccgatgcgaatttccgccacctcacccccctcaattgtccaaatcagggactgggaaggttttaactaagggcataatttgtcagtggatggtctaggtacagagaatggcgcggtcacttcttctcagtgaacaccgtttgtcctaccctcttaggcccgccatctgctgaatttctgttgcagctggtagtcgcttttgtaattaatcactatagaaatacaatccactttcgtcttctttttgtatccccttctctatagattcgtgtgttttac

SEQ ID NO: 331 - DNA, 348 bp, Pestivirus A
  source 1..348: mol_type = genomic DNA
cgaaccactgacgactaccctgtactcagggcttcagccatccaacgaactcaccactgttgctaccccccccgggatgcccttagtaggactagcataccggggggggtagcaacagtggtgagttcgttggatggctgaagccctgagtacagggtagtcgtcagtggttcgacaccttagaatttaggtctcgagatgccacgtggacgagggcacgcccacagcacatcctaacctggacaggggtcgtccaggtgaaagcgggcaaccgttacggacacaacctgatagggtgctgcagaggcccactgtattgctactaaaaatctctgctgtacatggcac

SEQ ID NO: 332 - DNA, 349 bp, unidentified
  source 1..349: mol_type = unassigned DNA; note = unclassified Pegivirus sequence
ggacttcggtccccctgttactctgcgagccaccgcagagccagggttggtacgcccgaggtgttagaccccggccgaaagctcctaaccatggggttagtaggacgtggtaaatgccactgaggggttggagagctggtagagcgagtaagtcggcgtaaggcccgagtacgggcctcccagcccgggtcagcctaaacctggctgtgatacccggtgcatggagggcgtgtcccaacgctcgatcgctgtagggtgggtccctgcagttgggtgtggctaccctgctcgtactgcttgatagagtcccggcggacggaccagctctcgtcagtccgtggagttgcac

SEQ ID NO: 333 - DNA, 353 bp, Enterovirus B
  source 1..353: mol_type = genomic DNA
cccgtaggacgctctaatactgacatggtgcgaagagtcgattgagctagttagtaatcctccggcccctgaatgcggctaatcctaaccgcggaacacatgctcacataccagtgaggagtgtgtcgtaatgggcaactctgcggcggaaccgactactttgggtgaccgtgtttctttttattctcatactggctgcttatggtgacaattgaaagattgttaccatatagctattggattggccatccggtgacgaatagagcaattatatacttattcgttggatacatcccactcaactttaaagaactaagaactcttaattatatattgcaattaaatttcgcaaa

SEQ ID NO: 334 - DNA, 354 bp, unidentified
  source 1..354: mol_type = unassigned DNA; note = unclassified Enterovirus sequence
acccataggacgctctaatgtggacatggtgcgaagagtctattgagctagttagtagtcctccggcccctgaatgcggctaatcctaactgcggagcgcatgcccccaaaccagggggaggtgcgtcgtaacgggcaactctgcagcggaaccgactactttgggtgtccgtgtttccttttatctttgcaatggctgcttatggtgacaattgagagattgttaccatatagctattggattggccatccggtgagcaatagagcgatcatctattcctttattggatttgtaccattggactatactgcctttgtcacattgaaatacattctattgttgaacactataaa

SEQ ID NO: 335 - DNA, 355 bp, Pestivirus K
  source 1..355: mol_type = genomic DNA
gcattatgtatgggacatcctaaattggagtgagccccgtggtgagtgggggaaaggggttaaccaggcctctagtaccacaggcaccaatgaacagggcaactcgaacccgagagagaggtaccgaactcttaagccccgagtacggggcagacgtcaccgagtagtacacccaaagaccaccactaggtgtagggtctactgaggctcgggtggacgtgggcgtgcccaaagagaaatcggtggtggacctgggggtcggggccaccatacccctaaacagggtagaccttactgcttgatagagtgccggcggatgcctcgggcaagagtataaaatccgttgtctatcaac

SEQ ID NO: 336 - DNA, 356 bp, Pestivirus D
  source 1..356: mol_type = genomic DNA
gaactacatcatactcgtgtacaaaattggacattccaaaactcgattgggttagggagccctcctagcgacggccgaaccgtgttagccatacacgtagtaggactagcagacgggaggactagccatcgtggtgagatccctgagcagtctaagtcctgagtacaggacagtcgtcagtagttcaacgcaaacatgctctgcctgaaatgctacgtggacgaggcatgcccaagactgcttaatctcggcggggtcgccgaggtgaaacacctaccggtgttgggttacagcctgatagggcgctgcagggcccacgtataggctagtataaaaatctctgctgtacatggcac

SEQ ID NO: 337 - DNA, 358 bp, unidentified
  source 1..358: mol_type = unassigned DNA; note = unclassified Pestivirus sequence
gttcattctcgtgtacaaaattgggcatataaatttctgattcgattagggaatccctctagcgacggccgaactgggctagccatgcccatagtaggactagcaaacggagggactagccgtagcggtgagctccctgggaagtctaagccctgagtacagggtagtcgtcagtagttcgacgtggacgagagtccatctcgagatgctacgtggacgagggcatgcccaagacataccttaacccaggcgggggtcgtctgggtgaaatcacttagcgtgatgggggtacaacctgatagggtgctgcagaggcccgctattaggctagtataaaaatctctgctgtacatggcac

SEQ ID NO: 338 - DNA, 359 bp, Pegivirus A
  source 1..359: mol_type = genomic DNA
gtgatgccagggttggtaggtcgtaaatcccggtcatcttggtagccactataggtgggttttaagggagggttaaggtccctctggcgcttgtggcgagaaagcgcacggtccacaggtgttggccctaccggtgtgaataagggcccgacgtcaggctcgtcgttaaccaataggcaatgccggcgagttgacaaagaccagtgggggccgggcggcgggggaaggacccccgtcgccgcccttcccgggaggggtgggaaatgcatggggccacccagctccgcggcggcctgcagccggggtagcccaagagccttcgggtgagggcgggtggcatttcctttcttgtaccgatc

SEQ ID NO: 339 - DNA, 360 bp, Pestivirus B
  source 1..360: mol_type = genomic DNA
atacagattggatgttggcaaaaagtgaatcgataaatagggaaccttcccctcagcgaaggccgaaaggaggctagccatgtccttagtaggactagcaaagagaggggactagcggtagcagtgagttcattggatggccgaatccctgagtacagggaagtcgtcaatggttcgacgctctggcaacaaagagcctcgagatgccatgtggacgagggcatgcccacggcacatcttaacctatgcgggggttgcgtaggtgaaagcatcatcttgagatgttatggacacagcctgatagggtgtagcagagacctgctattccgctagtataaaaaactctgctgtacatggcac

SEQ ID NO: 340 - DNA, 363 bp, unidentified
  source 1..363: mol_type = unassigned DNA; note = unclassified Enterovirus sequence
cagggtcgcctttgtgtttgatgggttagtcgctcagtcagttaccccctgatagacctggcagatgaggttggaaacaccccactggtaacagtgttccagcctgcgtggctgcctgcccctctttttgaggggaagcccatatgtagacaaggtgagaagagccgcgtttgctaatcatgagtcctccggcccctgaatgcggctaatccaaccccacagctactgcgcagaaaccactgcgtgggtagtcgtaatgagcaattgtgggacggaaccgactactttgggtgtccgtgtttcctgttttaccttacattgcttatggtcacaacatatatgaaatcgtatatgttgttcacc

SEQ ID NO: 341 - DNA, 365 bp, Pestivirus A
  source 1..365: mol_type = genomic DNA
gctcttgtatacaaattggacatccacaaattaaaaatccggcctagggaaaaatccctctcagcgaaggccgaaaagaggctaaccatgcccttagtaggactagcaaaaggagaggggtagcaacagtggtgagttcgttggatggctgaagccctgagtacagggtagtcgtcagtggttcaacacctcggaaagaaggtcttgagatgccacgtggacgagggcatgcccacagcacatcttaacctggacgggggtcgcccaggtgaaagcagttttaaccaactgttatgaacacagcctgatagggtgctgcagaggcccactgcattgctactaaaaatctctgctgtacatggcac

SEQ ID NO: 342 - DNA, 366 bp, Pestivirus C
  source 1..366: mol_type = genomic DNA
aggttagttcgttctcgtatgtaatatcggacaaactaaaattctgatttggtttagggcacccctccagcgacggccgaactgggctagccatgcctatagtaggactagcaaacggagggactagccgtagtggcgagctccctgggtggtctaagtcctgagtacaggacagtcgtcagtagttcgacgtgagcaggggctcacctcgagatgctatgtggacgagggcatgcccaggacacaccttaaccctagcgggggtcgctagggcgaaatcacgctatgtgatgggggtacgacctgatagggcgctgcagaggcccactaacaggctagtataaaaatctctgctgtacatggcac

SEQ ID NO: 343 - DNA, 367 bp, unidentified
  source 1..367: mol_type = unassigned DNA; note = unclassified Pestivirus sequence
tataagctgggggtgggagcccagcttgtactaaagtttacagcacgtgtgtgaagtttacttagtcctgtagaggtgacggggataacctatgccagtgggtgtgtaccagtaaccattgaactacagggactgcaacctgggagagcacctagagcccctaaggcatgagcacatgccattcgtcaagtggtcagctggaaaggatcacccacctggaaaccactgtggacgagggtattcacccaagggtaactctattaattggggggggccccaattatcaacacaattgtgttgggtgtgctgcctgacagggtcccggctgatggcccaggaagcagtataatatcagttgttttggcac

SEQ ID NO: 344 - DNA, 369 bp, Pestivirus D
  source 1..369: mol_type = genomic DNA
gtatacgagagtagctcatgctcgtatacaaaattggacattctaaaagattaattggactaggattccctcccagcgacggccgaaccgggttagccatacctgcagtaggactagcagacgggaggactagctatcgtggtgaggtccctgagtggtctaagtcctgagtacaggacagtcgtcagtagttcgacacaaacttttgtctcgaggtgctacgtggacgagggcgtgcccaagacacactttaaccctggcgggggtcgctagggtgaaagcgcctaacggcgttggaactacagcctgatagggtgctgcagaggcccacgtaccagctagtataaaaatctctgctgtacatggcac

SEQ ID NO: 345 - DNA, 369 bp, Pestivirus E
  source 1..369: mol_type = genomic DNA
gtatacgcagttagttcatcctgtgtatacagattggagactctaaaaacaacgattcggaataggggcccgcggcgaagaccgaagacaggctaaccatgccgttagtagggctagcaccaaaacgcgggaactagacacttaggagagtggtctggctactctaagaggtgagtacaccttaaccgtcaagggttctactcctcagttgaggactagagatgccctgtggacgggggcatgcccaagagttagcttagccggggcgggggttgttccggtgaaagtagcaatattgaccacactgcctgatagggcggagcaggccccctaggtagtctagtataaaatgtctgctgtacatggcac

SEQ ID NO: 346 - DNA, 369 bp, Pestivirus K
  source 1..369: mol_type = genomic DNA
ggccaattaaagcattatgcgtgggacatcctaaatatttatgagccctgcggtgagtgggggaaagaggttaaccaggcctctagtaccacaggcaccaatggacagggcaactcaaacctgagagagaggtaccgaactcttaagccccgagtacggggcagacgtcaccgagtagtacacccaaagaccaccacttctaggtgtagggtctactgaggctcgggtggacgtgggcgcgcccaaagagaaatcggtggtggacctgggggtcggggccaccatgcccctttacggggtagaccttactgcttgatagagtgccggcggatgcctcaggtaagagtataaaatccgttgttcattaac

SEQ ID NO: 347 - DNA, 370 bp, Pestivirus D
  source 1..370: mol_type = genomic DNA
gtatacgaaagtagctcacgttcgtatacaaaattgactgtaccaaatccccaattcggttagggcccctcccagcgacggccgaaccgggttagccatacccgtagtaggactagcaaacgggaggactagcttacgtggtgagatccctgagtggtctaagtcccgagtacggggcagtcgtcagtagttcaacgcaatgtggagttgccttgagatgctacgtggacgagggcatgcccaagacacactttaaccctggcgggggtcgccaggtgaactcacctaatggtgttgggattacagcctgatagggtgctgcagaggcccacgcataagctagtataaaaatctctgctgtacatggcac

SEQ ID NO: 348 - DNA, 370 bp, Pestivirus D
  source 1..370: mol_type = genomic DNA
gtatacgagagtagctcaagtctcgtatgcagattggatacacaaaattgttgaattggtgtagggcccccagcgacggccgaactaggctaaccatgcccacagtaggactagcatacggggggactagctttcgtggtgagatccctgagcggtctaagccctgagtacagggtagtcgtcagtagttcgacacaaacgtggttttgtctcgagatgctacgtggacgagggcatgcccatgacacgctttaggcccggcaggggtcgccgggtcgaaaacacctcactgtgttggggttacagcctgatagggtgctgcagaggcccacgcataagctagtataaaaatctctgctgtacatggcac

SEQ ID NO: 349 - DNA, 370 bp, Pestivirus A
  source 1..370: mol_type = genomic DNA
gtaaaatactcgtatacatattggaaaagaaaaaaataataattaggcctagggaacaaatcctcctctgcgaaggccgaaaagaggctagccatgcccttagtaggactagcacaatgaggggggtagcaacagtggtgagttcgttggatggcttaagccctgagtacagggtagtcgtcagtggttcgacaccttggcataaaggtctcgagatgccacgtggacgagggcatgcccaaagcacatcttaaccagggcgggggtcgctctggtaaaagcagttagatcaactgttatgaatacagcctgatagggtgctgcagaggcccactgtattgctactaaaaatctctgctgtacatggcac

SEQ ID NO: 350 - DNA, 370 bp, Sicinivirus A
  source 1..370: mol_type = genomic DNA
cccgattgctgtcctgcttgtctggtgaactcggctggaagcattcagtttctggatttgctggtttgtggtgattagtagaccccctggaggtacccgtctggatctgaccagggacccgtgactataccgttccggtaattcgggtttaaaactatgaacgtcaccacccattttgttttgtttggttgggctggattgtttgtttagatgctcctagaatccctgttggtgattgtagcacttgttgtagtggtcgtctctcctagtgaattaccccagctgtttgctatttgcatctacaactttgtcttgatttttctctggttatttggtaccttagagctccccaattatcccaccattcatc

SEQ ID NO: 351 - DNA, 370 bp, Deltapapillomavirus 1
  source 1..370: mol_type = genomic DNA
tacctaaaggttcggacacaactccgcgcttcagcctccttaccaaaacaggtgggcagccctgtcttatacttagtggaaacgggaaccaaacgaagtgctttcggttccgttgcaaaaagcatttccgcaggcattacgagcacgtcacgaccacctggtggactgtgggcgagcgtggatctgagagacagggggatgcctgcattttagtaactttcaaaaactcctgtcaaagacaggacttcctcaaaactgtgcctttgccgccaggaatgcaagcgcaaggaattaccatgcatttagactattaacagacaatcttgcattgcacctgcagtgaaggacatctttgtgcagaaaaactgtg

SEQ ID NO: 352 - DNA, 371 bp, Pestivirus A
  source 1..371: mol_type = genomic DNA
agttctcgtatacacattggacactctaaaaatatattgtaattaggtctaggggactaaatcctccttagcgaaggccgaaaagaggctagccatgcccttagtaggactagcacaataaggggggtagcaacagtggtgagttcgttggatggctgaagccctgagtacagggtagtcgtcagtggttcgacgcctcggaggacaggcctcgagatgccacgtggacgagggcacgcccacagcacatcttaacctgaacgggggtcgtttaggtgaaagcggtttaaccaaccgctacgaatacagcctgatagggtgctgcagaggcccactgtattgctactgaaaatctctgctgtacatggcac

SEQ ID NO: 353 - DNA, 372 bp, Pestivirus D
  source 1..372: mol_type = genomic DNA
gtatacgggagtagctcatacccgtatgcaaaattggacgtctcaaaattcgattgggtgagggagccctcctagcgacggccgaaccgtgttaaccatacacgtagtaggactagcaaacgggaggactagccatcgtggtgagatccctgagcagtctaagtcctgagtacaggatagtcgtcagtagttcaacgcaggcgtggttctgccttgagatgctacgtggacgagggcatgcccaagacatgctttaatcccgacgggggtcgccgggatgaaaacacctactggtgttgggattacagcctgatagggtgttgcagagacccacgtataggctagtataaaaatctctgctgtacatggcat

SEQ ID NO: 354 - DNA, 372 bp, Pestivirus D
  source 1..372: mol_type = genomic DNA
gtatacgggagtagctcatgcccgtatacaaaattggatattccaaaactcgattgggttagggagccctcctagcgacggccgaaccgtgttaaccatacacgtagtaggactagcagacgggaggactagccatcgtggtgagatccctgagcagtctaaatcctgagtacaggatagtcgtcagtagttcaacgcaggcacggttctgccttgagatgctacgtggacgagggcatgcccaagacttgctttaatctcggcgggggtcgccgaggtgaaaacacctaacggtgttggggttacagcctgatagggtgctgcagaggcccacgaataggctagtataaaaatctctgctgtacatggcac

SEQ ID NO: 355 - DNA, 372 bp, Pestivirus C
  source 1..372: mol_type = genomic DNA
gtatacggtgttagctcatcaccgtatgcaagattggacaaaccaaatctcaatctggctcagggcatccctccagcgacggccgaactgggctagccatgctcatagtaggactagcaaacggagggactagccgtagtggcgagctccctgggtggtctaagtcctgagtacaggacagtcgtcagtagttcgacgtaagcggaagctcacctcgagatgctacgtggacgagggcatgcccaagacacaccttaaccctggcaggggtcgccagggtgaaatcacactatgtgaggggggtacgacctgatagggtgctgcaggggcccactattaggctagtataaaaaactctgctgtacatggcac

SEQ ID NO: 356 - DNA, 372 bp, unidentified
  source 1..372: mol_type = unassigned DNA; note = unclassified Megrivirus sequence
tgggctcttttccgtacggtggcgtgacgaaccaccgtgcgtgaccctgctaagtcgtctgtgcctctcgggcatgtcgtggctccggctccgatatgcttgggacaacggatgggcggcttggtggggctagtcaccccgtttttggacttcctggttttgactccctctttgtctttcgggcttggtccaccgacggactaattggtatctgcaaggcctatagcctcgttctgaaatgccctagccaaagggacgtagtaggatcttggtgtttcccttgcagctctaccgaccgtattagctagagctaggactgtgcaggatgtttcagacctctttttgagcaatctgggacaagaccccggtctg

SEQ ID NO: 357 - DNA, 373 bp, Pestivirus A
  source 1..373: mol_type = genomic DNA
actagataaaatactcgtatacgtattgggcatttaaaaatataattaggcctagggaataaatccccctctgcgaaggccgaaaagaggctagccatgcccttagtaggactagcataatgaggggggtagcaacagtggtgagttcgttggatggcttaagccctgagtacagggtagtcgtcagtggttcgacgccttgtcgcaaaggtctcgagatgccacgtggacgagggcacgcccaaagcacatcttaacctgagcgggggtcgctcaggcgaaagcagtttaaccaactgttacgaatacagcctgatagggtgctgcagaggcccactgtattgctactaaaaatctctgctgtacatggcac

SEQ ID NO: 358 - DNA, 373 bp, Pestivirus C
  source 1..373: mol_type = genomic DNA
gtatacgaggttagttcattctcgtatgcattattggacaaatcaaaatttcaatttggttcagggcctccctccagcgacggccgaactgggctagccatgcccatagtaggactagcaaacggagggactagccatagtggcgagctccctgggtggtctaagtcctgagtacaggacagtcgtcagtagttcgacgtgggcagaggcccatctcgagatgctatgtggacgagggcatgcccaagacacaccttaaccctggtgggggtcgctagggtgaaatcacacaacgtgatgggggtacgacctgatagggtgctgcagaggcccactaacaggctagtataaaaatctctgctgtacatggcac

SEQ ID NO: 359 - DNA, 373 bp, Pestivirus C
  source 1..373: mol_type = genomic DNA
gtatacgaggttagttcattctcgtatgcatgattggacaaattaaaatttcaatttggatcaggtcctccctccagcgacggccgaagtgggctagccttgcccgcagttggactagcaaacggagggactagccgtattggcgagctccctgggtggtctaagtcctgagtacaggacagtcgtcagtagttcgacgtgagcagaagcccacctcgatatgctatgtggacgagggcatgcccaagacacatcttaaccctagcgggggtcgctagggtgaaatcacaccacgtgatgggagtacgacctgatagggtgctgcagaggcccactattaggctagtataaaaatctctgctgtacatggcac

SEQ ID NO: 360 - DNA, 373 bp, unidentified
  source 1..373: mol_type = unassigned DNA; note = unclassified Sicinivirus sequence
gtgtcattaaggtgtgtttggaagttcgaattagctggtttgtggtgattagtagaccccctggaggtacccaattcggatctgaccagggacccgtgactataccgctccggtaattcgggtttaaaacaatgaacgtcaccacacaattacttttctcattttattttcatcattgtcttcctatttaccgattacactcgatttccttggatgttcctggagatttccctggttacctggaccctcattattgttgttgtttcacccagcgagctgtcccaattgcttattatttgcgcttacaacttcgtcctaatatttttctggttgatcgggttgattgagctcccgggctatcctgccattcaac

SEQ ID NO: 361 - DNA, 374 bp, Pestivirus C
  source 1..374: mol_type = genomic DNA
gtatacgaggttagctcattctcgtatacatgatcggacaaatcaaaatctcaatttggttcagggcctccctccagcgacggccgaactgggctagccatgcccacagtaggactagcaaacggagggactagccatagtggcgagctccctgggtggtctaagccctgagtacagggcagtcgtcagtagttcgacgtgagcagaagcccacctcgagatgctatgtggacgagggcatgcccaagacacaccttaactctagcgggggttgctagggtgaaatcacaccatgtgatgggagtacgacctgatagggcgctgcagaggcccactattaggctagtataaaaaatctctgctgtacatggcac

SEQ ID NO: 362 - DNA, 374 bp, Pestivirus D
  source 1..374: mol_type = genomic DNA
gtatacggggtagctcatgcccgtgtacaaaattggactttccaaaaaactcaattggattagggagccctcctagcgacggccgaaccgtgttagccatacacgtagtaggactagcagacgggaggactagccatcgtggtgagatccctgagcggtctaagtcctgagtacaggatagtcgtcagtagttcaacgcagacatggttctgccttgagatgctacgtggacgagggcatgcccaagacgcgctttaatcctggcgggggtcgccagggtgaaaacacataccagtgttggggttacagcctgatagggtgctgcagaggcccacgtataggctagtataaaaaatctctgctgtacatggcac

SEQ ID NO: 363 - DNA, 374 bp, Pestivirus C
  source 1..374: mol_type = genomic DNA
gtatacgaagttagctcaccctcgtatacataattgggcaggtcaaaattccaatttggttcagggcccccctccagcgacggccgaactgggctagccatgcccacagtaggactagcagacggagggactagccgtagtggcgagctccctgggtggtctaagtcctgagtacaggacagtcgtcagtagttcgacgtgagcagcagctcatctcgagatgctatgtggacgagggcatgcccaagacacaccttaatcctggcgggggtcgccagggtgaaatcacactgcgtgatgggggtacgacctgatagggtgctgcagaggcccactattaggctagtataaaaaatctctgctgtacatggcac

SEQ ID NO: 364 - DNA, 374 bp, Pestivirus C
  source 1..374: mol_type = genomic DNA
gtatacgaggttagctcgttctcgtatacgatattggatacactaaatttcgatttggtctagggcacccctccagcgacggccgaaatgggctagccatgcccatagtaggactagcaaacggagggactagccgtagtggcgagccccctgggtggtctaagtcctgagtacaggacagtcgtcagtagttcgacgtgagcaccagcccacctcgagatgctacgtggacgagggcatgcccaagacacaccttaaccctggcgggggtcgctagggtgaaatcacattatgtgatgggggtacgacctgatagggtgctgcagaggcccactattaggctagtataaaaaaatctctgctgtacatggcac

SEQ ID NO: 365 - DNA, 374 bp, Pestivirus A
  source 1..374: mol_type = genomic DNA
ggaaaaaacactcgtatacatattgggcgattctaaaacgataattaggcctagggaatgaatccccttcagcgaaggccgaaaagaggctagccatgcccttagtaggactagcataatggagggggtagcaacagtggtgagttcgttggatggcttaagccctgagtacagggcagtcgtcagtggttcgacaccttggaagaacaaggcctcgagatgccacgtggacgagggcatgcccaaagcacatcttaacccgggcgggggtcgctcaggtgaaagcagtttaaccaactgttacgaatacagcctgatagggtgctgcagaggcccactgtattgctactaaaaatctctgctgtacatggcac

SEQ ID NO: 366 - DNA, 374 bp, unidentified
  source 1..374: mol_type = unassigned DNA; note = unclassified Enterovirus sequence
ggtacctgtggctaaaagccacaggacgctagttgtgaacaaggtgtgaagagtctattgagctacaagagagtcctccggcccctgaatgcggctaatcccaaccatggagcaagtgctcacgcaccagtgagtagcttgtcgtaacgggtaactctgtggcggaaccgactactttgggtgtccgtgtttccttttatttttataatggctgcttatggtgacaatctcagattgttatcataaagcgaattggattggccatccggtgaaagtgagatatattatatacctttttgttggatttactccaatcaattccttcacttatcagctcatcactataactctgttgattagaagcatataccaca

SEQ ID NO: 367 - DNA, 375 bp, Pestivirus C
  source 1..375: mol_type = genomic DNA
gtatacgaggttagttcgttctcgtgtacaatattggacaagaccaaaattccgatttggcctagggcacccctccagcgacggccgaactgggctagccatgcccacagtaggactagcaaacggagggactagccgtagtggcgagctccctgggtggtctaagtcctgagtacaggacagtcgtcagtagttcgacgtgagcaggagcccacctcgagatgctatgtggacgagggcatgcccaagacacaccttaaccctggcgggggtcgccagggtgaaatcacaccatgtgatgggggtacgacctgatagggtgctgcagaggcccactaacaggctagtataaaaaatctctgctgtacatggcac

SEQ ID NO: 368 - DNA, 375 bp, Pestivirus I
  source 1..375: mol_type = genomic DNA
gtatacgagattagctcacactcgtatacaaattggatatgacaaattcaaattggactagggactccctctagcgacggccgaacggggttaaccatacctctagtaggactagcaaacggagggactagctatagtggtgagctccctgggaggtctaagttccgagtacggaatagtcgtcagtggttcaacgccggtaaaccccggccttgagatgccacgtggacgagggcatgcccaagacacaccttaacctgggcgggggtcgtccaggtgaaaacacccctttttgggtgctgggggtacagcctgatagggtgctgcagaggcccactaataggctagtataaaaatctctgctgtacatgagac

SEQ ID NO: 369 - DNA, 375 bp, Pestivirus A
  source 1..375: mol_type = genomic DNA
atttagaaaaggttctcgtatacgtattgggcaatcaaaaataatgattaggcctagggaacaaaccctctcagcgaaggccgaaaggaggctagccatgcccttagtaggactagcaaaatgaggggggtagcaacagtggtgagttcgttggatggctgaagccctgagtacagggcagtcgtcagtggttcgacacctaggatggtaggtctcgagatgccacgtggacgagggcatgcccacagcacatcttagcctgagcgggggtcgcccaggtgaaagcggtacagacagaccgctacgaatacagcctgatagggtgctgcagaggcccactgcaatgctactaaaaatctctgctgtacatggcac

SEQ ID NO: 370 - DNA, 376 bp, Pestivirus D
  source 1..376: mol_type = genomic DNA
gtatacgagagtagttcaggctcgtatgcaaaattgggtgtttcaaattttaaaattcgactagggccaccccccagcgacggccgaaacgggttagccatacccttagtaggactagcggacggggggactagccatcgtggtgagatccctgagcggtctaagtcctgagtacaggacagtcgtcagtggttcgacgcggtcatcgcatcgtctcgagatgccacgtggacgagggcatgcccaagacacgctttaatcctggcgggggtcgccagggtgaaaacgtcctagtggcgttggggttacagcctgatagggtgctgcagaggcccacgcataggctagtataaaaaaactctgctgtacatggcac

SEQ ID NO: 371 - DNA, 376 bp, Pestivirus D
  source 1..376: mol_type = genomic DNA
gtatacgagagtagctcatgctcgtatacagattggacacgctaaattttttaattagggttagggtgttccccccagcgacggccgaactgggttagccatacccatagtaggactagcagacgggaggactagccatcatggtgaggtacctgagcggtctaagccctgagtacagggcagtcgtcagtagttcgacactaacttggcttagtctcgagatgctacgtggacgagggcatgcccatgacacgctttagccccagcgggggtcgttggggtgaaaacacattacggtgctggtatcacagcctgatagggtgctgcagaggcccatgaataggctagtataaaaaatctctgctgtacatggcac

SEQ ID NO: 372 - DNA, 376 bp, Pestivirus A
  source 1..376: mol_type = genomic DNA
agatttaggaaagctctcgtatgcatattgggcaatctaaaataataattagacctagggaacaatccctctcagcgaaggccgaaaggaggctagccatgcccttagtaggactagcaaaatgaggggggtagcatcagtggtgagttcgttggatggctgaagccctgagtacagggcagtcgtcagtggttcgacgcctaggatgataggtctcgagatgccacgtggacgagggcatgcccacagcacatcttagcccgagcgggggtcgcccgggtgaaaacggtaaatacagaccgctacgaatacagcctgatagggtgctgcagaggcccactgtaatgctactaaaaaactctgctgtacatggcac

SEQ ID NO: 373 - DNA, 377 bp, Pestivirus D
  source 1..377: mol_type = genomic DNA
gtatacgagagtagttcatgctcgtatacagaattggatattctaaaatttgttaattggactagggtctcctcctggcgacggccgaaccgggttagccatacccgtagtaggactagcatatgggaggactagctttcgtggtgaggttcctgagtggtctaagtcctgagtacaggatagtcgtcagtagttcgacacaaacggagttttagtctcgagatgctacgtggacgagggcatgcccaagactcactttaatcctggcgggggtcgccagggtgaaaacgcccaatggcgttggaactacagcctgatagggtgctgcagaggcccacgcaacagctagtataaaaaatctctgctgtacatggcac

SEQ ID NO: 374 - DNA, 377 bp, Pestivirus I
  source 1..377: mol_type = genomic DNA
gtatacgagattagctcatactcgtgtacaaattggacgtagcaaatttaaaaattcggatagggtccccatccagcgacggccgaacggggttaaccatacctctagtaggactagcagacggatggactagccacagtggtgagctccctgggaggtctaagttctgagtacagaacagtcgtcagtagttcaacgctggtaaaccccagccttgagatgctacgtggacgagggcatgcccaagacacaccttaacctggacgggggtcgtccaggtgaaagtacccatctttgggtgctgggagtacagcctgatagggcgctgcagaggcccactgacaggctagtataaaaatctctgctgtacatggaac

SEQ ID NO: 375 - DNA, 377 bp, Pestivirus A
  source 1..377: mol_type = genomic DNA
agatttagctcaatctctcgtatgcacattgggcaagcaaaataacaattaggcctagggaaaaaataatcctcctcagcgaaggccgaaaagaggctagccatgcccttagtaggactagcatattggggagggtagcaacagtggtgagttagttggatggctgaagccctgagtacagggtagtcgtcagtggttcgacgccttagaatacaggcctcgagatgccacgtggacgagggcatgcccacagcacatcttaacctgagcgggggtcgcccaggtaaaagcggatgaaaaccgttactaacacagcctgatagggtgctgcagaggcccactgcactgctactaaaaatctctgctgtacatggcac

SEQ ID NO: 376 - DNA, 377 bp, Pestivirus K
  source 1..377: mol_type = genomic DNA
gcataatgcttagattggctgcattatgtttgggacatcctaaatttttatgagccctgtggtgagtgggggaaaggggttaaccaggcctctagtaccacaggcaccaatggacagggcaactcgaacctgagagagaggtaccgaactcttaagtcccgagtacggggcagacgtcaccgagtagtacacccaaagaccaccacttttaggtgtagggtctactgaggctcgggtggacgtgggcgtgcccaaagagaaatcggtggtggacccgggggtcgggaccaccatgcccttcacggggcagaccttactgcttgatagagtgccggcggatgcctcgggtgagagtataaaatccgttgtttattaac

SEQ ID NO: 377 - DNA, 378 bp, Pestivirus B
  source 1..378: mol_type = genomic DNA
ttgcatggtacgggctgagctacggattggatgttgacaaattttgaattggcaaagtaggtaactttcccctcagcgaaggccgaaaagaggctagccatgcccttagtaggactagcaaaaggaggggactagcggtagcagtgagttcattggatggccgaacccctgagtacaggggagtcgtcaatggttcgacactccatcattcatggagtctcgagatgccatgtggacgagggcatgcccacggcacatcttaacctatgcgggggttgcatgggtgaaagcgccattcgtggcgttatggacacagcctgatagggtgtagcagagacctgctattccgctagtaaaaaactctgctgtacatggcac

SEQ ID NO: 378 - DNA, 378 bp, Pestivirus K
  source 1..378: mol_type = genomic DNA
gcataatgctttgattggctgcattatgtgttggacacctcaaattaccacgcgccctgcggtgagtgggggaaaggggttaaccaggcctctagtaccacagacaccaattggcagggcaactcaaacctgagagagaggtaccgaactcttaagccccgagtacggggcagacgtcaccgagtagtacacccaaagaccaccatgtttaggtgtagggtctactgaggcttgggtggacgtgggcgtgcccaaagagaaatcggtggtggacctgggggtcgggcccaccacacccctttatggggtggaccttactgcttgatagagtgccggcggatgcctcaggtaagagtataaaatccgttgtttattaac

SEQ ID NO: 379 - DNA, 378 bp, Pestivirus K
  source 1..378: mol_type = genomic DNA
gcataatgctttgattggctgcattatgtgtgggacatcctaaattgtcataagccctgcggtgagtgggggaaaggggttaaccaggcctctagtaccacaggcacctatggacagggcaactcaaacctgagagagaggtaccgaactcttaagtcccgagtacggggcagacgtcaccgagtagtacacccaaagaccaccatttctaggtgtagggtctactgaggctcgggtggacgtgggcgtgcccaaagagaaatcggtggtggacctgggggtcggggccaccataccccgttatggggtagaccttactgcttgatagagtgccggcggatgcctcgggtaagagtataaaatccgttgtctattaac

SEQ ID NO: 380 - DNA, 378 bp, Pasivirus A
  source 1..378: mol_type = genomic DNA
gcataatgctttgattggctgcattatgtatggaacatcctaaattgttgtgagccccgtggtgagtgggggaaaggggtttaccaggcctctagtaccacaggcaccgatagacggggcaactcgaacctgagagagaggtaccgaactcttaagtcccgagtacggggcagacgtcaccgagtagtacacccaacgaccaccactcctaggtgtagggtctactgaggctcgggtggacgtgggcgcgcccaaagagaaatcggtggtggacctgggggccggggccaccatgctcctttacggggtagaccttactgcttgatagagtgccggcggatgcctcgggtaagagtataaaatccgttgtctattatt

SEQ ID NO: 381 - DNA, 378 bp, Pestivirus B
  source 1..378: mol_type = genomic DNA
gcttttgaccagtggctctgggttacttagccaagtccctttctcttattttcactagtttatgttgtgtgttgtctgttttgttttgtttaaattgtatacaagatccttcccgccgacacagacctcgacagtctggtgtaggagggttggtgatattaatttgccccaaaagagtgaccgtgatacgtggaaaccatgagtacatgtgtatccgtggaggatcgcccgggactggattccatatcccattgccatcccaacaaacggagggtatacccaccacgtgcgcgtttgcagtgggaatctgcaaatttagtcatactgcctgatagggtgtgggcctgcactttggggtactcaggctgttcatataat

SEQ ID NO: 382 - DNA, 379 bp, Pestivirus C
  source 1..379: mol_type = genomic DNA
tcctcgttgaaattctcgtatacagattgggtgttggcaaacagttaattagtgaagtagggaaccttcccccctctgcgaaggccgaaaagaggctaaccatgcccttagtaggactagcaaaaagagggggctagcggtagcagtgagtttattggatggccgaatccctgagtacagggaagtcgtcaatggttcgacactctggtaatataagagtctcgagatgccatgtggacgagggcatgcccacggcacatcttaacctatgcgggggttgcatgggtgaaagcaccatttacggtgttataaacacagcctgatagggtgtagcagagacctgctatcccgctagtaaaaactctgctgtacatggcac

SEQ ID NO: 383 - DNA, 379 bp, Pestivirus K
  source 1..379: mol_type = genomic DNA
gcatactcaggacttagaccaccctcgcatctgcatgatatcggacaaatcaaatttcaatttggttcagggcctccctccagcgacggccgaactgggctagccatgcccacagtaggactagcaaacggagggactagccgtagtggtgagctccctgggtggtctaagtcctgagtacaggacagtcgtcagtagttcgacgtgagcagaagcccacctcgagatgctacgtggacgagggcatgcccaagacacaccttaaccctagcgggggtcgctagggtgaaatcacaccacgtgatgggagtacgacctgatagggtgctgcagaggcccactattaggctagtataaaaatctctgctgtacatggcac

SEQ ID NO: 384 - DNA, 379 bp, Pestivirus K
  source 1..379: mol_type = genomic DNA
gcataatgctttgattggctgcattatgtatgggacatcctaaattgctacgagccctgcggtgagtgggggaaaggggttaaccaggcctctagtaccacaggcaccaataaacagggcaactcgaacctgagagagaggtaccgaactcttaagtcccgagtacggggcagacgtcactgagtagtacacccaaagaccaccacatctaggtgtagggtctactgaggctcaggtggacgtgggcgtgcccaaagagaaatcggtggtggacctgggggtcgggtccaccatgccccctttagggggtagaccttactgcttgatagagtgccggcggatgcctcgggtaagagtataaaatccgttgttcattaac

SEQ ID NO: 385 - DNA, 380 bp, unidentified
  source 1..380: mol_type = unassigned DNA; note = unclassified Sicinivirus sequence
tgcataatgcttcgattggctgcattatgtgtgggacatcctaaattgttaagcgccctgcggtgagtgggggaaaggggttaaccaggcctctagtaccacaggcaccattggacagggcaactcgaacctgagagagaggtaccgaactcttaagctccgagtacggggcagacgtcaccgagtagtacacccaacgaccaccatgtttaggtgtagggtctactgaagctcgggtggacgtgggcgtgcccaaagagaaatcggtggtggacctgggggtcgggcccaccatgccccccttacggggtagacctcactgcttgatagagtgccggcggatgcctcaggtgagagtataaaatccgttgttcgttaac

SEQ ID NO: 386 - DNA, 380 bp, Teschovirus A
  source 1..380: mol_type = genomic DNA
ttttgtcccgattgttgcaacattggcttggggaaccgaactcggttgcatttaagttgtgaacttgttggtctgtgatgattagtagaccccctggaggtacccgtctggatctgaccagggacccgtgactataccgttccggtaattcgggtttaaaacaatgaacgtcatcactcaacattctttcccattttattttgtatcttactgtcttagtatgctcattgagatttcgctggtagttgttgctttggttgtagtggttgtttcgcacagtgagtctcatcagcttctcacagtttgtatctacaattttgctttgaccttcctttggctgttcggatttcttgaacttcctaactatcctgctgttcaac

SEQ ID NO: 387 - DNA, 380 bp, unidentified
  source 1..380: mol_type = unassigned DNA; note = unclassified Pestivirus sequence
ttggaagctaggtacttgttacgctagttttggattgtcttgtgcccaacattagtctttggacttctgttgtgtttaaacacagaaatttgaacatttggctatagattcacaggataaaccctttgaaagacctgctctggcgcgagctaaagcgcaattgtcaccgggtattgcaccaatggtggcgacagggtacagaagagcaagtactcttgactgggtaatgggactgcgttgcatatccctaggcacctattgagatttctctggggcccaccagcgtggagttcctgtatgggaatgcaggactggacttgtgctgcctgacagggtcgcggctggccgtctgtactttgtatagtcagttgaaactcact

SEQ ID NO: 388 - DNA, 381 bp, Pestivirus Giraffe-1
  source 1..381: mol_type = genomic DNA
gtatagcagcagtagctcaaggctgctatacgattggacataccaaattccaattggtgttagggaccacctaggtgaaggccgacgacaggtagccattcctgttagtaggacgaaccgttatggtggactggttgctcaggtgagcaggctgcaatgcgtaagtggtgagtacaccacagccgtcaaaggtgccactggtaaggatcacccactggcgatgccttgtggacgggggcgtgcccaacgcaatgttagcggtggcgggggctgccatcgtgaaagctaggtcttgatggaccttgttgcctgtacagtctgataggatgccggcggatgccctgtgacagccagtataaagaatatccgttgtgattgcac

SEQ ID NO: 389 - DNA, 381 bp, Pestivirus G
  source 1..381: mol_type = genomic DNA
gtatacgagattagctcatcactcgtatacataatcggatataaccaaaacaatgatttggcataggaaataccccgatgcgaaggccgaaacaggctaaccatgcctttagtaggactagcacaaaatcggggactagccaaggtggcgagcttcctggatgaccgaagtcctgagtacaggacagtcgtcaacagttcaacgcgcaggacaggtctgcgtcttgatatgctgtgtggacgagggcatgcccacggtacatcttaacccagccgggggtcggttgggtgaaagtccaataggactggaagtacggcctgatagggtgtagcagagacccacctgttaggctagtataaaatactctgctgtacatggcac

SEQ ID NO: 390 - DNA, 382 bp, Pestivirus A
  source 1..382: mol_type = genomic DNA
gtatacgagtttagctcaatcctcgtatacaatattgggcgtcaccaaatatagatttggcataggcaacaccccgatgcgaaggccgaaaagggctaaccatgcccttagtaggactagcaaaaaatcggggactagcccaggtggtgagcttcctggatgaccgaagccctgagtacagggcagtcgtcaacagttcaacacgcagaataggtttgcgtcttgatatgctgtgtggacgagggcatgcccacggtacatcttaacctatccgggggtcggataggcgaaagtccagtattggactgggagtacagcctgatagggtgttgcagagacccatctgataggctagtataaaaaactctgctgtacatggcac

SEQ ID NO: 391 - DNA, 382 bp, unidentified
  source 1..382: mol_type = unassigned DNA; note = unclassified Pestivirus sequence
gtatacgagaattagatcaatctctcgtatacacattgggcatcccaaacagcaattaggcatagggaaaatcctcctcagcgaaggccgaatagaggctagccatgcccttagtaggactagcaaattgaggggggtagcagcagtggcgagttcgttggatggctgaagccctgagtacagggtagtcgtcagtggttcgacgccttaggatctaaggcctcgagatgccacgtggacgagggcatgcccacagcacatcttaatccgagcgggggtcgctcgggtgaaagctgttgtgctaacagttatgaacacggcctgatagggtgctgcagaggcccactgtgttgctactaaaaatctctgctgtacatggcac

SEQ ID NO: 392 - DNA, 382 bp, Pestivirus A
  source 1..382: mol_type = genomic DNA
gtatacacaaggttagctcaatccattgtgtgtacgattggatgttgcaaatttataatttgagatatagggacccattcatcacagcgaaggccgaacaagggtagccaatcccttcattaggactagcacaagtgatggactggagacgtggatgagtgagctgtagagaggaagtggtgagtacaccacagtcgtcaagagtactaccggtaaggatcacccgctagttatgctctgtggacgagggcatgcccaccttttctactagataccccgggggttggggtgtcgaaagtcgaaatatcgattgctcacacagtctgataggatgccggcggatgctccacgtataccagtataaaaatccgttgaatagcac

SEQ ID NO: 393 - DNA, 383 bp, Pestivirus H
  source 1..383: mol_type = genomic DNA
atgtatacgagaatttgcctaacctcgtatacatattgggcattctaaaaataaattaggcctaagggacaaatcctccttagcgaaggccgaaaagaggctagccatgcccttagtaggactagcaaaacaaggagggtagcaacagtggtgagttcgttggatggctgaagccctgagtacagggtagtcgtcagtggttcgacgcttcgtgtgacaagcctcgaggtgccacgtggacgagggcatgcccacagcacatcttaacctgagcgggggtcgttcaggtgaaagcggtttaaccaaccgctacgaatacagcctgatagggtgctgcagaggcccactgtattgctactaaaaatctctgctgtacatggcac

SEQ ID NO: 394 - DNA, 383 bp, Pestivirus A
  source 1..383: mol_type = genomic DNA
gtatacgcccagttagttcaggtggacgtgtacgattgggtatcccaaattaataatttggtttagggactaaatcccctggcgaaggccgaaacaggttaaccatacctttagtaggacgagcataatgggggactagtggtggcagtgagctccctggatcaccgaagccccgagtacggggtagtcgtcaatggttcgacgcatcaaggaatgcctcgagatgccatgtggacgagggcgtgcccacggtgtatcttaacccaggcgggggccgcttgggtgaaatagggttgttatacaagcctttgggagtacagcctgatagggtgttgcagagacctgctacaccactagtataaaaactctgctgtacatggcac

SEQ ID NO: 395 - DNA, 383 bp, Pestivirus A
  source 1..383: mol_type = genomic DNA
gtatacgagaattagttaaaactatcgtatacacattgagcattccaaaatgataattggacctagggaacaatccctcccagcgaaggccgaaaagaggctagccatgcccttagtaggactagcaaaatggggggggtagcaacagcggtgagttcgttggatggccgaagccccgagtacggggcagtcgtcagtggttcgacgcctggcgcgacaggcctcgagatgccacgtggacgagggcacgcccacggcacatcttagccagagcgggggtcgctcgggtgaaagtggtcaaacagactactacgaatacagcctgatagggtgctgcagaggcccgctgtaatgctactaaaaatctctgctgtacatggcac

SEQ ID NO: 396 - DNA, 384 bp, Pestivirus A
  source 1..384: mol_type = genomic DNA
gtatacgagaatttgcctaggacctcgtttacaatatgggcaatctaaaattataattaggcctaagggacaaatcctcctcagcgaaggccgaaaagaggctagccatgcccttagtaggactagcaaaataaggggggtagcaacagtggtgagttcgttggatggctgaagccctgagtacagggtagtcgtcagtggttcgacgcttcggaggacaagcctcgagataccacgtggacgagggcatgcccacagcacatcttaacctggacgggggtcgttcaggtgaaaacggtttaaccaaccgctacgaatacagcctgatagggtgctgcagaggcccactgtattgctactgaaaatctctgctgtacatggcac

SEQ ID NO: 397 - DNA, 384 bp, Pestivirus A
  source 1..384: mol_type = genomic DNA
gtatacgagatttagaaaagtctctcgtatacacattggacataacaaaataacaattaggcctagggaacgaatccctctcagcgaaggccgaaaagaggttaaccatacccttagtaggactagcaaacgagaggggtagcaatggtggtgagttcgttggatggctgaagccctgagtacagggtagtcgtcaatggttcgacacctatggaacgtaggtctcgagatgccatgtggacgagggcatgcccacagcacatcttaactttggcaggggtcgccaaagtgaaagtggcctaaccaaccactacgaacacagcctgatagggtgctgcagaggcccaccttcttgctactaaaaatctctgctgtacatggcac

SEQ ID NO: 398 - DNA, 384 bp, Pestivirus A
  source 1..384: mol_type = genomic DNA
gtatacaggaattaggaaaagctcctgtatacaaattgggcaattaaaaattgaagattaggcctagggaaagatccctctcagcgaaggccgaaaagaggctagccatgcccttagtaggactagcaaaatgagaggggtagcaacagtggtgagttcattggatggctgaagccctgagtacagggtagtcgtcagtggttcgacacctcggaaagaaggtctcgagatgccacgtggacgagggcatgcccacagcacatcttaacctggacgggggtcgcccaggtaaaagcagtttaactaactgttatggacacagcctgatagggtgctgcagaggcccactgcattgctactaaaaatctctgctgtacatggcac

SEQ ID NO: 399 - DNA, 384 bp, unidentified
  source 1..384: mol_type = unassigned DNA; note = unclassified sequence
cctacctcaagcagcagtagcagtagaaaagcagagaagcgctctcaaggtctgcaggttggagaatgagcgtaagaggaagaagggttgaagatatagagaggtgatagcaaggaggaggtgctcaggttaggagaccaatggtagcagggggtaagggtactttccctagttgagatagctatatatggctgggggaggtgctgggattgtttaaagattgtctaaatgtggcgcaagttctgttaatattttacctgacctttaccgtaaaaggaacaaggaagcatgtctttgcattacataacgcatgagtggttttaatctgttaccaattaacagagtacggtcagggttcgttgcggcttcctttgatacgtgggc

SEQ ID NO: 400 - DNA, 385 bp, Pestivirus A
  source 1..385: mol_type = genomic DNA
gtatacgagagttagataaaaatactcgtatacacattgggcaattaaaagtaataattaggcctagggaacgaatcctcctccgcgaaggccgaaaagaggctagccatgcccttagtaggactagcatagcgaggggggtagcaacagtggtgagttcgttggatggcttaagccctgagtacagggtagtcgtcagtggttcgacgccttaacatgaaggtctcgagatgccacgtggacgagggcacgcccaaagcacatcttagcccgagcgggggtcgctcggacgaaaacagtttgatcaactgctacgaatacagcctgatagggtgctgcagaggcccactgtattgctactaaaaatctctgctgtacatggcac

SEQ ID NO: 401 - DNA, 385 bp, unidentified
  source 1..385: mol_type = unassigned DNA; note = unclassified vectors sequence
gtatacgagaactagataaaatactcgtatacatattggacaacagaaaataactattaggcctagggaatgaatccctctcagcgaaggccgaaaggaggctagccatgcccttagtaggactagcataatgaggggggtagcaacagtggtgagttcgttggatggcttaagccctgagtacagggtagtcgtcagtggttcgacgcctcggtataaaggtctcgagatgccacgtggacgagggcacgcccaaagcacatcttaacctgagcgggggtcgcccaggcaaaagcagatcgaccaatctgttacgaatacagcctgatagggtgctgcagaggcccactgtattgctactaaaaatctctgctgtacatggcac

SEQ ID NO: 402 - DNA, 385 bp, Pestivirus B
  source 1..385: mol_type = genomic DNA
gtatacgaaattagctaaagtactcgtatacggattggacgttggcaaacattgaattgacaaggtagggaattttcccctcagcgaaggccgaaaagaggctagccatgcccttagtaggactagctaaaagaggggactagcggtagcagtgagttcattggatggccgaatccctgagtacagggaagtcgtcaatggttcgacactccgtcagtcgaggagtctcgagatgccatgtggacgagggcttgcccacggcacatcttaacccatgtgggggttgcatgggtgaaagcaccattctaggtgttatggacacagcctgatagggtgtagcagagacctgctattctgctagtaaaaactctgctgtacatggcac

SEQ ID NO: 403 - DNA, 385 bp, Pestivirus K
  source 1..385: mol_type = genomic DNA
atatggggcataatgcatagattggctgcattatgtgtataacatcccaaattgccataggctctgtggtgagtgggggaaaggggttaaccaggcctctagtaccacaggcaccatttaacagggcaactcaaacctgagagagaggtaccgaactcttaagcctcgagtacggggcagacgtcaccgagtagtacacccaacgaccaccacatttaggtgtagggtctactgaggctcgggtggacgtgggcatgcccaaagagaaaacggtgggggacctgggggtcgggtccgccatgcccctcaatggggtagaccttactgcttgatagagtgccggcggatgcctcaggtaagagtataaaatccgttgtttattaac

SEQ ID NO: 404 - DNA, 385 bp, Pestivirus B
  source 1..385: mol_type = genomic DNA
gtatacgagattagctaaagtactcgtatacggattggacgtcgacaaactttgaattggcaacacagggaaccttcccctcggcgaaggccgaaaagaggctagccatgcccttagtaggactagacaaaggaggggactagtggtagcagtgagtccattggatggccgaacccctgagtacaggggagtcgtcaatggttcgacactcctttagtcgaggagtctcgagatgctatgtggacgagggcatgcccacggcacatcttaacccacgcgggggttgcgtgggtgaaagcgccattcgtggcgtcatggacacagcctgatagggtgtagcagagacctgctactccgctagtaaaaactctgctgtacatggcac

SEQ ID NO: 405 - DNA, 386 bp, Pestivirus B
  source 1..386: mol_type = genomic DNA
gtatacgagattagctaaagtactcgtatacagattggatgttgacaaaatattgaattgacaaggtagggaattttcccctcagcgaaggccgaaaagaggctagccatgcccttagtaggactagcaaaaggaggggactagcggtagcagtgagttcattggatggcctaatccctgagtacagggaagtcgtcaatggttcgacactccatcagttgcggagtctcgagatgccatgtggacgagggcatgcccaaggcacatcttaacctatgcgggggttgcataggcgaaagcaccattcgtggtgttatggacacagcctgatagggtgtagcagagacctgctattccgctagtaaaaactctgctgtacatggcac

SEQ ID NO: 406 - DNA, 386 bp, Pestivirus A
  source 1..386: mol_type = genomic DNA
gtgtatacgagatttagaaaaagctcttgtatacatattgggcaatctaaacaacaatcaggcctagggaattaatcctcctcggcgaaggccgaaaagaggctagccatgcccttagtaggactagcataacgaggggggtagcaacagtggtgagttcgttggatggcttaagccctgagtacagggtagtcgtcagtggttcgacgcctcggaaatagaggtctcgatatgccacgtggacgagggcacgcccaaagcacatcttaacctgagcggggggtcgctcaggtgaaagcggttcaaccaaccgttacggatacagcctgatagggcgctgcagaggcccactgttttgctactaaaaatctctgcttacatggcac

SEQ ID NO: 407 - DNA, 386 bp, Pestivirus A
  source 1..386: mol_type = genomic DNA
gtatacgagaattattcgcccttctcgtatacgtattgggcaattaaaataataattaggcctagggaacaaaagtccccctcagcgaaggccgaaaagaggctagccatgcccttagtaggactagcataaagaggggggtagcagcagtggtgagttcgttggatggcttaagccctgagtacagggtagtcgtcagtggttcgacgccttggaataaaggtctcgagatgccacgtggacgagggcatgcccaaagcacatcttaacctgagcgggggtcgcccaggtaaaagcagttctaaccgactgttacgaatacagcctgatagggtgctgcagaggcccactgttctgctactaaaaatctctgctgtacatggcac

SEQ ID NO: 408 - DNA, 386 bp, Pestivirus B
  source 1..386: mol_type = genomic DNA
gtatacgagtactttagctaacctcgtatacagattggatgttgacaaacattgaattggcaaagtagggaacctttcccctcagcgaaggccgaaaagaggctagccatgcccttagtaggactagcaaaaggaggggactagcggtagcagtgagttcattggatggccgaatccctgagtacagggaagtcgtcaatggttcaacactccactaatcgaggagtcttgagatgccatgtggacgagggcatgcccacggcacatcttaacctatgcgggggttgcatgggtgaaagcaccatttgtggtgttatggacacagcctgatagggtgtagcagagacctgctattccgctagtaaaaactctgctgtacatggcac

SEQ ID NO: 409 - DNA, 386 bp, Pestivirus C
  source 1..386: mol_type = genomic DNA
tttgcccgattgtgcatacgaggttagttcattctcgtatgcacaatcgggcaaatggaaacttcaatttggttcagggcctctctccagcgacggccgaactgggctagccatgcccatagtaggactagcaaatggagggactagccgtagtggcgagctccctgggtggtctaagtcctgagtacaggacagtcgtcagtagttcgacgtgagcagaagctcacctcgagatgctatgtggacgagggcgtgcccaagacacaccttaactctagcgggggtcgctagggtgaaatcacaccatgtgatgggagtacgacctgatagggtgctgcagaggcccactattaggctagtataaaaatctctgctgtacatggcac

SEQ ID NO: 410 - DNA, 386 bp, Pestivirus A
  source 1..386: mol_type = genomic DNA
gtatacgaggttaggcaagttctcgtatacatattggacactctaaaaaaaaataattaggtctaggggacaaaaatcctccttagcgaaggccgaaaagaggctagccatgcccttagtaggactagcaaaataaggggggtagcaacagtggtgagttcgttggatggctgaagccctgagtacagggtagtcgtcagtggttcgacgctttgaagaacaagcctcgagatgccacgtggacgagggcatgcccacagcacatcttaatctggacgggggtcgttcaggtgaaaacggtttaaccaaccgctacgaatacagcctgatagggtgctgcagaggcccactgtattgctactaaaaatctctgctgttcatggcac

SEQ ID NO: 411 - DNA, 386 bp, Pestivirus A
  source 1..386: mol_type = genomic DNA
gtatacgagaagatttagctaaaaactctcgtatacaaattgggcattccaaacaacaattaggtctagggaagaatcctcctcagcgaaggccgaaaagaggctagccatgcccttagtaggactagcaaattggggagggtagcagcagtggtgagttcgttggatggctgaagccctgagtacagggtagtcgtcagtggttcgacacctcaaggttgaggtctcgagatgccacgtggacgagggcatgcccacagcacatcctagtctgggcaggggtcgctcagatgaaagcggttgagtcaaccgttacggacacagcctgatagggtgctgcagaggcccactgtgttgctactaaaaatctctgctgtacatggcac

SEQ ID NO: 412 - DNA, 386 bp, Sapelovirus A
  source 1..386: mol_type = genomic DNA
ccttccaaatcggatggactactggacttgaaactatggaaagtaaattggtgagattttggatacacttgaacggtagtagcgtggcgagctatggaaaaatcgcaattgtcgatagccatgtcagtgacgcgcttcggcgtgctcctttggtgattcggcgactggttacaggagagtagacagtgagctatgggcaaacccctacagtatttcttagggggaatgtgcaattgagacttgacgagcttctctcagagatgtggcgcatgctcttggcattaccatagtgagcttccaggttgggaaacctggactgggtctatactacctgatagggtcgcggctggccgcctgtaactagtatagtcagttgaaaccccccc

SEQ ID NO: 413 - DNA, 387 bp, Pegivirus C
  source 1..387: mol_type = genomic DNA
tagccactataggtgggtcttaaggggaggttatggtccctctcgcgcttatagagagaaagcgcacggtccacaggtgttggccctaccggtgtaataagggcccggcgctaggcacgccgttaaaccgagaccgttacccccctgagcaaacgacgcccacgtacggcctacgtcgcccttcaatgtctctcttgaccaataggcgatgccggcgagttgacaaaggccagtgggggccgggcggcaggggaaggacccctgtcgctgctcttcccgggggggcgggaaatgcatggggccacccagctccgcggcggcctacagccggggtagcccaagagccttcgggtgagggcgggtggcatttttcttccttaactgatc

SEQ ID NO: 414 - DNA, 387 bp, Pestivirus A
  source 1..387: mol_type = genomic DNA
cgtatacgagagttagacaaaatgctcgtatacacattgggcaaactaaataataataattgggcctagggtactaatccccctctgcgaaggccgaagagaggctagccatgcccatagtaggactagcataatgaggggggtagcaacagtggtgagttcgttggatggcttaagccctgagtacagggtagtcgtcagtggttcgacgccttagtataaaggtctcgagatgccacgtggacgagggcacgcccaaagcacatcttaacctgagcgggggtcgctcaggcgaaagcagtttaaccaactgttacgaatacagcctgatagggtgctgcagaggcccactgtactgctactaaaaatctctgctgtacatggcac

SEQ ID NO: 415 - DNA, 387 bp, Pestivirus B
  source 1..387: mol_type = genomic DNA
gtatacgaggttagttaaagttatcgtatacagattggacgtttacaaaacagtgaattggcaaaatagggaaccttcccctcagcgaaggccgaaaagaggctagccatgcccttagtaggactagcaaaaagaggggactagcggtagcagtgagttcattggatggccgaatccctgagtacagggaagtcgtcaatggttcgacgctctagcaattgcagagcctcgagatgccatgtggacgagggcatgcccacggcacaccttaacctatgcgggggttgcgtaggtgaaagcaccattttgtggtgttatgaacacagcctgatagggcgtagcagagacctgctactccgctagtaaaaactctgctgtacatggcac

SEQ ID NO: 416 - DNA, 387 bp, Pestivirus B
  source 1..387: mol_type = genomic DNA
gtatacgagattagctaaagtactcgtatacggattggacgttgacaaaatattgaattgaaaatgtagggaatcttcccctcagcgaaggccgaaaagaggctaaccacgcccttagtaggactagcaaaaggaggggactagcggtagcagtgagttcattggatggccgaacccctgagtacaggggagtcgtcaatggttcgacactccttcagttaaggagtctcgagatgccatgtggacgagggcatgcccacggcacatcttaacccatgcgggggctgcatgggtgaaagcgccattcgtggcgttatggacacagcctgatagggtgtagcagagacctgctatcccgctagtaaaaaactctgctgtacatggcgc

SEQ ID NO: 417 - DNA, 387 bp, Pestivirus A
  source 1..387: mol_type = genomic DNA
cgtatacgaggatttaggaaaaactctcgtatacagattgggcactcaaaaataacaattaggcctagggatcaaatcctcctcagcgaaggccgaaaagaggctagccatgcccttagtaggactagcaaattgaggggggtagcaacagtggtgagttcgttggatggctgaagccctgagtacagggtagtcgtcagtggttcgacacctacggcgtgtaggtctcgagatgccacgtggacgagggcatgcccacagcacatcttagcctgggcgggggtcgctcaggtgaaagcggtttaaccaactgctacgaatacagcctgatagggtgctgcaggggcccactggactgctactaaaaatctctgctgtacatggcac

SEQ ID NO: 418 - DNA, 387 bp, unidentified
  source 1..387: mol_type = unassigned DNA; note = unclassified Sapelovirus sequence
ccccaatccactaaccttttccccctcctttaatcggactgatatttgtgttttgacgcttgttttccttttgcggatgtcggttgcgtggctggccaccacgggaaaaatggcaattgtggattgatgggtctacacattctcaccgaacgccttgtgttattaggggagtctaagtgtccatcatgaagcgagtgtactggtaagagaggagacctagctaggggcaatgggacggcgttgcctatccctaattagccatcgagatttctctggcgattacccagtgatggtcgggttgtcggggggcaacctgcttagctccttactgcctgatagggtcgcggctggccgtatcagtacactatagtcagttgatgttcgaat

SEQ ID NO: 419 - DNA, 387 bp, Rosavirus B
  source 1..387: mol_type = genomic DNA
taaggtagcagatgatttagtgaaaagctttggattgtttggagttttgtagcgatgctagtagtgtgtgtggacctccccacgtggtaacacgtgccccacaggccaaaagccaaggtgttgaaagcacccctactagtcccagaccctcccatctgggaactcctctcatgaaaaaccctagtaactaatgatttggcttctcatcaacctctctagtcaaggctgaaggatgcccggaaggtacccgcaggtaacgataagctcactgtggatctgatccggggctctggtgcgaccgactgtccggcgtagcagggttaaaaaacgtctaggcccttctaccccaagggattggggtttccccaatcattttagaagttcact

SEQ ID NO: 420 - DNA, 388 bp, Pegivirus C
  source 1..388: mol_type = genomic DNA
tagccactattggtgggtcttaaggggtggtcaaggtccctctggcgcttgtggcgaaaaagcgcacggtccacaggtgttggccctaccggtgggaataagggcccgacatcaggctcgtcgttaaaccgagcccattatccccctgggcaaacgacgcccacgtacggtccacgtcgcccttcaatgtctctcttgaccaataggcgatgccggcgaattgacaaggaccaatgggggccgggcgtcaggaaatggactcctgccgctgcccttcccgggggagtgggaaatgcatggggccacccagctccgcggcggcctgcagccggggtagcccaagagccttcgggtgagggcgggtggcatttttcttcctgtaccgatc

SEQ ID NO: 421 - DNA, 388 bp, unidentified
  source 1..388: mol_type = unassigned DNA; note = Bovine viral diarrhea virus genotype 2 strain 1373 polyprotein1 sequence
gtatacgagattagctaaagtactcgtatatggattggacgtcaacaaatttttaattggcaacgtagggaaccttcccctcagcgaaggccgaaaagaggctagccatgccctttagtaggactagcaaaagtagggggactagcggtagcagtgagttcgttggatggccgaacccctgagtacaggggagtcgtcaatggttcgacactccattagtcgaggagtctcgagatgccatgtggacgagggcatgcccacggcacatcttaacccatgcgggggttgcatgggtgaaagcgctaatcgtggcgttatggacacagcctgatagggtgtagcagagacctgctattccgctagtaaaaaactctgctgtacatggcac

SEQ ID NO: 422 - DNA, 388 bp, Pestivirus A
  source 1..388: mol_type = genomic DNA
acatggggtatacgagatttagatcaatctctcgtatacacattgggctatcaaaaaagaaaattaggcctagggaacaatcctcctcagcgaaggccgaaaagaggctagccatgcccttagtaggactagcaaattggggggggtagcaacagtggtgagcttgttggatggctgaagccctgagtacagggtagtcgtcagtggttcgacgccagagatgaggcctcgagatgccacgtggacgagggcatgcccacagcacatcttaatctgggcgggggtcgctcagacgaaagcggttgtaccaaccgttacaagcacagcctgatagggtgctgcagaggcccactgcactgctactaaaaatctctgctgtacatggcac

SEQ ID NO: 423 - DNA, 389 bp, Pegivirus C
  source 1..389: mol_type = genomic DNA
tagccactataggtgggtcttaagggtgggtcaaggcacctcttactcctgcggcgggacagcgcacggtccacaggtgatggccctaccggtgtgaataagggcccgacgtcaggctcgtcgttaaaccgagcccgttacccacctgggcaaacgacgcccacgtacggtccacgtcgccctacaatgtctctcttgaccaataggctatgccggcgagttgacaaggaccagtgggggccgggcgttatggggaaagaccccctgcgctgcccttcccggtggggcgggaaatgcatggggccacccagctccgcgggggcctgcacccggggtagcccaagaaccttccggtgaaggcgggtggcatttttctttcctgactaatc

SEQ ID NO: 424 - DNA, 390 bp, Pestivirus A
  source 1..390: mol_type = genomic DNA
acatggggtatacgagatttagctaaaactctcgtatacatattggacattccaaacaataattaggcatagggaaaatcctcctcagcgaaggccgaaaagaggctagccatgcccttagtaggactagcaaattgaggggggtagcagcagtggcgagttcattggatggctgaagccctgagtacagggtagtcgtcagtggttcgacgccttaggatctaaggcctcgagatgccacgtggacgagggcacgcccacagcacatcctaatccgggcgggggtcgctcggatgaaagcggttgtaataaaccgttatggacacggcctgatagggcgctgcaggggcccactgtgttgctactaaaaatctctgctgtacatggcac

SEQ ID NO: 425 - DNA, 391 bp, Pestivirus H
  source 1..391: mol_type = genomic DNA
gtatacgcccggttagctcatgtcggcgtatatgattgggtatcccaaattaatgatttggtttagggactaaattcccctagcgaaggccgaaataggttaaccataccttcagtaggacgagcataatgggggactagtggtagcagtgagctccttggattaccgaagccccgggtacagggtcgtcgtcaataaggttcgacgcatcaacgagtggatgcctcgagatgccatgtggacgagggcgtgcccacggtatgtcttaacccaagcgggggccgcttgggtgaaagatggtcgattatgtggccctttgggagtacagcctgatagggtgttgcagagacctgctatatcactagtataaaaactctgctgtacatggcac

SEQ ID NO: 426 - DNA, 391 bp, Pestivirus H
  source 1..391: mol_type = genomic DNA
gttgggtgtgtttgggccgggtagctcatgtcggcgtatatgattgggtatcccaaattaataatttggtttagggactaactcccctagcgaaggccgaaatgggttaaccataccttcagtaggacgagcgtaatgggggactagtggtagcagtgagctccttggattaccgaagccccgagtacggggtagtcgtcaatggttcgacgcatcaaggaatgcctcgagatgccatgtggacgagggcgtgcccacggtgaatcttaactcaagcgggggccgcttgggtgaaagagggtcattatatggctctttgggagtacagcctgatagggtgttgcagagacctgctacattactagtataaaaactctgctgtacatggcac

SEQ ID NO: 427 - DNA, 391 bp, unidentified
  source 1..391: mol_type = unassigned DNA; note = unclassified Pestivirus sequence
tgcataaccctgattgtaattggctgggttatgcatgtgagaacgcaaaattttttaaattatgttaccggctttgaggttggcggaccagagttaaccaggctctcagtacgacaccctcctaaacaaagtcggaactgctgactaggagactatgcactcagcactaagcccggagtaccgggcattctactacagctctgcactcaacgacggctcttgaggcctagagtccaggatggctgtgtaagtagaggacatgtccaagtgtgaggtgtaatccggtgggggttgccggatttgctactggtagaccagtagtcatagactgcctgatagggtcccggcggacggcctaggcttagcagtataatagtccgttgtattcaac

SEQ ID NO: 428 - DNA, 392 bp, unidentified
  source 1..392: mol_type = unassigned DNA; note = unclassified Picornaviridae sequence
taactccttggctagcaaggagctgtggccgccaaaagtggtgatacactgactaatactctacttgggtacagtgagttggtccctttggaaagtcacctgatgatctttcaattggggtaggctacgggtgaaaccccttctccctccatttgttatacaaatgtggagtgacaacgctaaggccctggatagaaatgagttctttatggacaagaatttctcaacagggggagcaccggtgtatgtctttgaatgcgtcttgtgactgaaaaaggagcaggcttattgtgttcacatagagttaaggtgtaccctatgagtttagggctactcaggggcatgttaggttttaaaatgctcatttattgttttctatgagttgagagaag

SEQ ID NO: 429 - DNA, 393 bp, unidentified
  source 1..393: mol_type = unassigned DNA; note = unclassified sequence
agcgaagcgatcggtgtctcgggcactgtgacgataagcaaactcagcatcagggacgaggctggaggaagaacctacttatctaagcgccccgtctgagcagcagcgtcgaaaatcaacttcgtcttcgtcgtgaactgcgacgactggttgtgcgaacggcaacgatcctagtcgtagtgttggttctcgcccgtcgagacgcgcccccgcggactcggcgcctgctgacgcgtcgtctccgacgcgacctagcagcacccaatcctaagagtgtgcgaagggtcagagctccgcgtcggagcccaactccccgcataccgtgacgggagatacgtcgtggtctcatggcgccccaaccgcggttgtcgctgggtgagatcaaaatggaca

SEQ ID NO: 430 - DNA, 393 bp, unidentified
  source 1..393: mol_type = unassigned DNA; note = unclassified sequence
gattttctggttatcccttttggacttggtaggggcccacgtgcccacccacctctgtgtgtgttgatttctaatcgatgcctggcagtggcggccacctctccttactggtaaacctccggtgagtgaagttgtcaagctacaggtaccgtgcaggatgaaatgcgcacatgtgaacaaactaggagtcatacaccgggtcaaactctggaaacggagtccgggactctgaccttggttgggtgagctcgaggcatcacattgatggacgcgattcgctatccttccctagtaggaccttgtggtgtacccctggttgggaatccagggctggtcgggtgcagggtgacagcctgttctccacctcaaccattgtaggagaaatcaacccct

SEQ ID NO: 431 - DNA, 395 bp, unidentified
  source 1..395: mol_type = unassigned DNA; note = unclassified Kobuvirus sequence
accacgtctttcctccagatcgacagtcctgctgtgtgaattcccattgcgcacttagtggtgtcactgtgcgctcccaatctcggccgcggagtgctgttccccaagccaaacccctggcccttcactatgtgcctggcaagcatatctgagaaggtgttccgctgtggctgccagcctggtaacaggtgccccagtgtgcgtaaccttcttccgtcttcggacggtagtgattggttaagatttggtgtaaggttcatgtgccaacgccctgtgcgggatgaaacctctactgccctaggaatgccaggcaggtaccccacccccgggtgggatctgagcctgggctaattgtctacgggtagtttcatttccaattcctttatgtcggagtc

SEQ ID NO: 432 - DNA, 396 bp, Pestivirus D
  source 1..396: mol_type = genomic DNA
ctctgcagatatcaggggtgtatacgaaagtagctcaagttcgtatacaaattgactatgaccaaaatagtattcggcgtagggacaccctccagcgaaggccgaacggggttaaccatacccttagtaggactagcagacggagggactagccatcatggtgagcttcctgaggggtctaagtcctgagtacaggacagtcgtcaatagttcgacacgtgcgagtcgcacgtctcgagatgctatgtggacgagggcatgcccaagacactttctctagcctgggcgggggtcgcccaggtgaaagcacctgataggtgttgggagtacagcctgatagggtgctgcagaggcccatgcataggctagtataaaaatctctgctgtacatggcac

SEQ ID NO: 433 - DNA, 396 bp, unidentified
  source 1..396: mol_type = unassigned DNA; note = unclassified Teschovirus sequence
gataagtgatagtccttggaagctaggtacttgttacgctagttttggattatcttgtgcccaacaattgtctttggacacttgttgtgtttaaacacagaaatctttgattattggttgtgaatttaatggattcttcccttgaaagacttgccttggcgcgggctagagcgcaattgtcaccaggtattgcaccaacggtggcgacagggtacagaagagcaagtactcctgactgggcaatgggactgcattgcatatccctaggcatctattgagatttctctggagcccaccagcatggagttcctgtatgggaatgcaggactggacttgtgctgcctgacagggtcgcggctggccgtctgtactttgtatagtcagttgaaactcatt

SEQ ID NO: 434 - DNA, 399 bp, Pestivirus F
  source 1..399: mol_type = genomic DNA
tacgcggggtataacgacagtagttcaagtgtcgttatgcatcattggccataacaaattatctaatttggaatagggacctgcgacctgtacgaaggccgagcgtcggtagccattccgactagtaggactagtacaaataggtcaactggttgagcaggtgagtgtgctgcagcggctaagcggtgagtacaccgtattcgtcaacaggtgctactggaaaggatcacccactagcgatgcctgtgtggacgaggacatgtccaagccaatgttatcagtagcgggggtcgttactgagaaagctgcccagaatgggtagttgcacatacagtctgataggatgccggcggatgccctgtattttgaccagtataaatattatccgttgtaaagcat

SEQ ID NO: 435 - DNA, 399 bp, unidentified
  source 1..399: mol_type = unassigned DNA; note = unclassified Pasivirus sequence
attttctggccgtgtagctgcttttgaccagtggctctgggttacttagccaaatcccccttccttcacccttttaaatttgatggtctgtgttgtttgttttgtcttgtctaaataatatataagatccttcccgccgatacagacctcgacagtctggtgtaggagggttggtgttattaatttgccccagaagagtgaccgtgacacatagaaaccatgagtacatgtgtatccgtggaggatcgcccgggactggattccatatcccattgccatcccaacaagcggagggtatacccactatgtgcgcgtttgcagtgggaatctgcaaatttagtcatactgcctgatagggtgtgggcctgcactctggggtactcaggctgttcatataat

SEQ ID NO: 436 - DNA, 400 bp, Pegivirus C
  source 1..400: mol_type = genomic DNA
ggtcatcttggtagccactataggtgggtcttaagggtgggtcaaggtccctctggcgcttgtggcgagaaagcgcacggtccacaggtgttggccctaccggtgtgaataagggcccgacgtcaggctcgtcgttaaaccgagcccatttcccacctgggcaaacgacgtccacgtacggtccacgtcgcccttcaatgtctctcttgaccaataggctttgccggcgagttgacaaggaccagtgggggccgggcagcaggggaaggacccctgttgtcgcccttcccggtggggatgggaaatgcatggggccacccagctccgcggcggcctgcagccggggtagcccaagaaccttcgggtgagggcgggtggcatttttcttcctataccgatc

SEQ ID NO: 437 - DNA, 401 bp, unidentified
  source 1..401: mol_type = unassigned DNA; note = unclassified Enterovirus sequence
tttgatcgttatccgcaaaacaactacgcaaagcctagtatcatcttcaaagatatgtggttggtcgctccgctataaacccaatagcagacctggcagatgaggctagaaattccccactggcgacagtgttctagcctgcgtggctgcctgcgtaccctgcatgggtacgaagccatatattggacaaggtgtgaagagccccgtgtgcttgttttgagtcctccggcccctgaatgtggctaaccttaaccctgcagctggtgtgtgcaatccagcacatggccagtcgtaatgagtaattgcgggatgggaccaactactttgggtgtccgtgtttcctgttttacctttatatttgcttatggtgacaatatatatataacatatatattggcatc

SEQ ID NO: 438 - DNA, 402 bp, Pegivirus A
  source 1..402: mol_type = genomic DNA
tggtcaccttggtagccactataggtgggtcttaagagaaggttaagattcctcttgtgcctgcggcgagaccgcgcacggtccacaggtgttggccctaccggtgtgaataagggcccgacgtcaggctcgtcgttaaaccgagcccatttcccgcctgggcaaacgacgcccacgtacggtccacgtcgcccttttaatgtctctcttgaccaataggttcatccggcgagttgacaaggaccagtgggggccgggggtcacagggatggaccctgggccctgcccttcccggcggggtggggaaagcatggggccacccagctccgcggcggcctgcagccggggtagcccaagaaccttcgggtgagggcgggtggcatttttcttcctataccgatc

SEQ ID NO: 439 - DNA, 403 bp, unidentified
  source 1..403: mol_type = unassigned DNA; note = unclassified Pasivirus sequence
gcggctggatattctggccgtgcaactgcttttgaccagtggctctgggtaacttagccaaagtgtccttctccctttccctattatatgttttatggctttgtctggtcttgtttagtttatatataagatcctttccgccgatatagacctcgacagtctagtgtaggaggattggtgatattaatttgccccagaagagtgaccgtgacacatagaaaccatgagtacatgtgtatccgtggaggatcgcccgggactggattccatatcccattgccatcccaacaagcggagggtatacccactatgtgcacgtctgcagtgggagtctgcagatttagtcatactgcctgatagggtgtgggcctgcactctggggtactcaggctgtttatataat

SEQ ID NO: 440 - DNA, 404 bp, unidentified
  source 1..404: mol_type = unassigned DNA; note = unclassified Pasivirus sequence
gctggactttctggctgcgcaactgcttttaaccagtggctctgggttacttagccaaaaccccctttccccgtaccctagtttgtgtgtgtattattattttgttgttgttttgtaaatttttatataagatcctttccgccgatatagacctcgacagtctagtgtaggaggattggtgatattaatatgccccagaagagtgaccgtgacacatagaaaccatgagtacatgtgtatccgtggaggatcgcccgggactggattccatatcccattgccatcccaacaaacggagggtatacccgctatgtgcgcgtctacagtgggaatctgtagatttagtcatactgcctgatagggtgtgggcctgcactctggggtactcaggctgtttatataat

SEQ ID NO: 441 - DNA, 405 bp, unidentified
  source 1..405: mol_type = unassigned DNA; note = unclassified Aalivirus sequence
gctcttccctccacctcctttcaacgtctggcccacgaaacgggccacttttcaatcttaaataactatcccttttcttgttttgactttccggttaagaataatatggatcacacaattggattttctctaaggataatggataggatactttcgggataccactccctttctgtgctaacacaaattctaattctctacatctcttatatgctcgaagaggtggtgctgaaatattgcaagccattcttgcatgtaggtggtttagactcaagatgaatgttgtgttactcaagacaagtgtagctatcaccatggtattggtagcgtgaatcggattaccggtagtagcgcaatcttccgccatggtgctctagtgactagaggacaacgacatggcattgg

SEQ ID NO: 442 - DNA, 405 bp, unidentified
  source 1..405: mol_type = unassigned DNA; note = unclassified Enterovirus sequence
caaaaacctcaaagatcgttatccgctcattaactacgcaaagcctagtaacatcttggatgtggtaaagttggtcgctccctgcattcccagcagtagacctggcagatgaggctggatgttccccactggcgacagtgatccagcctgcgtggctgcctgctcacccaaacgggtgagaagccttattactgacatggtgtgaagagccccgtgtgcttaatgtgagtcctccggcccctgaatgtggctaaccttaaccctgtagccgttgctcataatccaatgagtatgcggtcgtaatgcgcaagtacgggatgggaccaactactttgggtgtccgtgtttcttatttttctttatctgcgttatatggtgacaatttatagaatatagattgtcatc

SEQ ID NO: 443 - DNA, 405 bp, unidentified
  source 1..405: mol_type = unassigned DNA; note = unclassified Enterovirus sequence
tgtgcttgtaacgccatgggggaaatcacttgatcgaacgcctagtaccatcatgtctttgactaggcgttcgatcaagtgatttcccccatcactagtttggtcgatgaggctaggaattccccacgggcgaccgtgtcctagcctgcgtggcggccaacccagcagttgctgggacgccttttttagggacatggtgcgaagactcgcatgtgcttggttgtgactcctccggcccctgaatgcggctaaccttaaccctggagccttgtgctacaatccagtagcattaaggtcgtaatgagtaattccgggatgggaccgactactttgggtgtccgtgtttcctgttttttccaaatgttttcttatggtcacagcatatagcatatatatactgtgatc

SEQ ID NO: 444 - DNA, 407 bp, unidentified
  source 1..407: mol_type = unassigned DNA; note = unclassified Picornaviridae sequence
ccactgtatatacatttaatcatttccccttctttttggtctctcttgtacataaggataaaacccctctaacaaagcctgttcttcagactattaagtatgacaatatattacattatctaactacacatgaaggccgtcgtgctttctcacgccttcccacctacttccatcttcacagacattgggtagaggcactttatcctgaaggactccagcccacatccactcatttatcttctgagactttccattgtaaatatctttgcggccattttcttcagacgtgtgagtggcatgcaaacgttcaagtccctccttttattttagttcgtaggcaacttatttataatattctttgcaaattgaatcttcttgatagtcttcctttcttcctttcagtggca

SEQ ID NO: 445 - DNA, 407 bp, unidentified
  source 1..407: mol_type = unassigned DNA; note = unclassified Hepatovirus sequence
ggataccaatggaacgaccgctgcgcccggcggggttaacttgttgattagcaacaagctgtagtttctaaaagtcctgacaccataggtccacgtcccgacctttggcattttaacttcattttggtgaagtccattgatcttctaggaggagtaggctatgggtgaaactcctcatgctagtacctatattaggagatgcattgtgtaggtgaaggtttccggtagaggtgagttttacgacgcaacctctcaacggatgtgggcccatctcacacactagatgctttggatgaatccaatctgagggtgtcattgttagggatctggatactaggtgccctcccgagaggtcgtaggggtaatcaggggcatataggtttccacacattaaatgttattatgtt

SEQ ID NO: 446 - DNA, 410 bp, unidentified
  source 1..410: mol_type = unassigned DNA; note = unclassified Picornaviridae sequence
gaaacccgtatacaccggaccttttctcccctccctctccacttacctttttcccctcttcggcatgaaacaaggattattcaagtggaaacgcgatttaatatgcggctggccaccgcggaataacggcaattgtgtatctgctggaagccaagcctgcctagccgatagcccttgaccgggtgtgtaggatagcccaggaaccagcaatacgcgacaggttatggtagagtagatacctagccaggggcaatgggactgcattgcatatccctaatgaaccattgagatttctctggtcattacccggtgatggttactagaggggggcctctagtactagatctatactgcctgatagggtcgcggctggccgaccatgacctgtatagtcagttgatttgagcaat

SEQ ID NO: 447 - DNA, 410 bp, unidentified
  source 1..410: mol_type = unassigned DNA; note = unclassified Enterovirus sequence
ttgaagctgtagcgttcgttacccgcacacgtactgcgtgacggctagtagcatcttgcattttcctttaggtgtttcgctcattgtggttaccccaccacatagatcagggcaatggggctacacaatccccactggcgacagtggtgtagcccgcgtggtgccccgcccaggctttgcctgggacgccttaggaaagacagggtgtgaagaccttaatgcgctacgtgtgagtcctccggcccctgaatgcggctaatcctaaccccgtagccatggtgcgcaatccagcgcatgtgtggtcgtaacgagcaattacgggatggaaccgactactttgggtgtccgtgtttcactttttatttgaaattgtctcatggttacagatttgtgtatacagatttgtaatc

SEQ ID NO: 448 - DNA, 411 bp, Pegivirus C
  source 1..411: mol_type = genomic DNA
ccgacgcctatcttaagtgagacgtaatggccccgcgccgaactggcgaccggccaaaaggtggtggatgggtgatgacagggttggtaggtcgtaaatcccggtcatcctggtagccactataggtgggtcttaaagggaggctacggtccctcttgcgcttatggcgagaaagcgcacggtccacaggtgttggccctaccggtgtgaataagggcccggcgctaggcacgccgttaaaccgagcccgtcatccccctgggcaaacgacgcccatgtacggtccacgtcgcccttcaatgtctctcttgtaccaataggttttgccggcgttgttgacaaggaccagtgggggctgggcggtaggggaaggacccctgccgctgcccttcccggtggggtgggaaatgc

SEQ ID NO: 449 - DNA, 412 bp, Deltapapillomavirus 1
  source 1..412: mol_type = genomic DNA
ttagtcatactcaaggtgtaaatattcatttgatctttgtacagtttttataccatatttacattattataggttactggttgctacatcctggtcatagtcacatcatcatcataggtctaggtcacaattaggtttgtcagatactcaagacgacgtggaatctctcttgtcacctgaatcctatcctttactgtcctatcctatcctatactgcctttgttttgttatccaaagtcagcaagtgccatctttctccaagtgcaatgtcatctgcctgtaatcccaaaagctggtgtcatccttgtcagtagaacagtcaaactaagcctttgaaaagaaagcctcacacggaaaccttgtatgtatacctcgtgaaaaagctttgaactgccacgacattgacgcctgc

SEQ ID NO: 450 - DNA, 413 bp, unidentified
  source 1..413: mol_type = unassigned DNA; note = unclassified Sapelovirus sequence
gttgtatcccccataccttaccctcccttccacacaggacggacaaatggacttggacttacggcaagaacatatggtatggcttttggatacggatgaatggcagtagcgtggcgagctatggaaaaatcgcaattgtcgatagccatgttagtgacgcgctccggcgtgctcctttggtgattcggcgactggttacaggagagtaggcagtgaactatgggcaaacctctgcagtattactcagggggaatgtgcaattgagacttgacgagcgtctccttggagatgtggcgcatgctcttggcattaccatagtgagcttccaggttgggaaacctggactaggcctatactacctgatagggtcgcggctggccgcctgtaactagtatagtcagttgaaacccccc

SEQ ID NO: 451 - DNA, 414 bp, Tremovirus A
  source 1..414: mol_type = genomic DNA
ggagcgcacggtatatatgtgctcccgcatggcaggggcgtgctaccttgccccttgacgcatggtatgcgtcaaactgattttggatttgtcttaaggattagtcgctttgtgccgaaaatctctttgcgtttcacagaaccatcctaaccatggatgtagtatgggaggcgtgtataggggtgagtaggatctctcatagagggataggcatgccattcaaatccggggagtactccggctctgacattgggacatttgatttaaccggacctggttcagtatccgggttgtcctgtattgtcacggtgtatccgtcttggcatgttgaaaaggtatctttgggtaatcccttcctactgcctgatagggtggcgtgcccggccatgagagattaagggtagcattttaacc

SEQ ID NO: 452 - DNA, 415 bp, unidentified
  source 1..415: mol_type = unassigned DNA; note = unclassified Teschovirus sequence
cccctttgaacttgtaactgataagtgatagtccttggaagctaggcacttgctgcgctagttttggattatcttgtgcccaacactagtcttcggactcttgttgtgtttaaacacagaaattttgttatctggttatgaattcattggatcaatccttctgaaagacctgctctggcgcgagcgaaagcgcaattgtcaccaggtattgcaccaatggtggcgacagggtacagaagagcaagtactcctgactgggcaatgggactgcgttgcatatccctaggcacctattgagattcctctggggcccaccagcatggagttcctgtatgggaatgcaggactggacttgtgctgcctgacagggtcgcggctggccgtctgtactttgtatagtcagttgaaactcacc

SEQ ID NO: 453 - DNA, 415 bp, unidentified
  source 1..415: mol_type = unassigned DNA; note = unclassified Teschovirus sequence
ctccctttgaatttgtaactgataagtgatgatccttggaagctaggtacttgttacgctagttttggattgtcttgtgcccaacactagtcttcggactcttgttgtgtttaaacacagaaatctgattgtctggttgtggatttattggattaaccctttgaaagacctgctctggcgcgagctaaagcgcaattgtcaccgggtactgcaccaatggtggcgacagggtacagaagagcaagtactcctgactgggcaatgggactgcgttgcatatccctaggcacctattgagatttctctggggcccaccagcatggagttcctgtatgggaatgcaggactggacttgtgctgcctgacagggtcgcggctggccgtctgtactttgtatagtcagttgaaactcatc

SEQ ID NO: 454 - DNA, 415 bp, Rhinovirus B
  source 1..415: mol_type = genomic DNA
ggttgtacccacgaccaaaagcctttaaccgttacccgccaatcaactacgtaacggctagtaccatcatgtttttaatctggtgttcgatcaggtggtatcccccactagtctggtcgatgaggctaggaattccccacgggtaaccgtgtcctagcctgcgtggcggccagcccagcttatgctgggacgcctttttaaagacatggtgtgaagacccgcatgtgcttgattgtgagtcctccggcccctgaatgcggctaaccctaaccccggagcccagcaacataatccaatgttgtttgggtcgtaatgagtaattctgggatgggaccgactactttgggtgtccgtgtttccttttattcttatattgtcttatggtcacagcatatatatcatatatactgtgatc

SEQ ID NO: 455 - DNA, 416 bp, unidentified
  source 1..416: mol_type = unassigned DNA; note = unclassified Teschovirus sequence
cttccttttaattcgtaactgataagtgatagtccttggaagctaggtatttgttacgctagttttggattatcttgtgcccaacatttgttttcgaacatatgttgtgtttaaacacagaaatctagtttctttggttatgagtttaatggaatatccttttgaaagacttgccttggcgcgggctagagcgcaattgtcaccaggtattgcaccaatggtggcgacagggtacagaagagcaagtactcctgactgggtaatgggactgcattgcatatccctaggcatctattgagatttctctggagcccaccagcatggagttcctgtatgggaatgcaggactggacttgtgctgcctgacagggtcgcggctggccgtctgtactttgtatagtcagttgaaactcatt

SEQ ID NO: 456 - DNA, 419 bp, unidentified
  source 1..419: mol_type = unassigned DNA; note = unclassified Picornaviridae sequence
gggttttacgaaacccgtatacaccagaccttttctcccctccccctccacctaccttttccccctctttggaccgaaacaaggacacgtaagtggaaacgcgattttatatgtggttggccaccacggaataacggcaattgtctacatgtgggaagtgcaacctccctagccgataacccctgaccgggtgtgtaggataggaaaggtgcccactgtgggcgacaggttatggtagagtggatacctagccaggggcaatgggactgctttgcatatccctaatgaagtattgagatttctctgctcattacccggtgatggttgtgtggggggggccccatacactagatccatactgcctgatagggtcgcggctggccgaccataacctgtatagtcagttgaattcagccaag

SEQ ID NO: 457 - DNA, 419 bp, unidentified
  source 1..419: mol_type = unassigned DNA; note = unclassified Sapelovirus sequence
tattacggtaccggtatatcttagtccatttcccccttccctctccacttaccttttccccctcttgtgacggatacttttggttttgactgtatgctagaaaaccctctgatatctggatggcctccagggaataaaggcaattgtggatcgctggtattgggctctgtcggggaaagtaggttaaccataccactagtaccagtctgagcaccccagtgtgaagcgacagtacatagtagagttgggagtgaggcttgggaaatgggactgcattgcatatccctagtgacctattgagatttctctgggcaccaccttgctgagcttaccaggggggggcccctggtactggcccattactgcctgatagggtcgcggctggccgactgtgtattgtatagtcagttgaatttaac

SEQ ID NO: 458 - DNA, 419 bp, Sapelovirus A
  source 1..419: mol_type = genomic DNA
cttaaggtggttgtatcccctaccccatcctcccctccaaacaggacggacaatcggacctgacatctggcgagaagaattggaatggtatttggacacacttgaatggcagtagcgtggcgagctatggaaaaatcgcaattgtcgatagccatgttagtgacgcgcttcggcgtgctcctttggtgattcggcgactggttacaggagagtagacagtgagctatgggcaaacccctacagtgttacttagggggaatgtgcaattgagacttgacgagcgtctcgtagagatgtggcgcatgctcttggcattaccatagtgagcttccaggttgggaaacctggactgggtctatactacctgatagggtcgcggctggccgcctgtaactagtatagtcagttgaaaccccccc

SEQ ID NO: 459 - DNA, 420 bp, Pegivirus C
  source 1..420: mol_type = genomic DNA
gttggtaggtcgtaaatcccggtcatcttggtagccactataggtgggtcttaagggtgggtcaaggttcctcttacgcctgtggcgggacagcgcacggtccacaggtgttggccctaccggtgtgaataagggcccgacgtcgggctcgtcgttaaaccgagaccattacccgcctgggcaaacgacgcccacgtacggtccacgtcgcccttcaatgtctctcttgaccaataggctttgccggcgagttgacaaggaccagtgggggccgggtgcagggggaaggaccccctgtactgcccattccggcggggtgggaaatgcatggggccacccagctccgcggcggcctgcagccggggtagcccaagaatccctcgggtgagggcgggtggcatttttctttctgtaccaatc

SEQ ID NO: 460 - DNA, 420 bp, Aichivirus B
  source 1..420: mol_type = genomic DNA
cccggtggtttgatggtagctctcttatggttctgccctggcaaggctatagagtactgtgatccgctgcggacgccatcctggtaacaggacccccagtgtgcgcaacagtatgctcacggttcgccgtgtccaccatgactggaacactgctttcatgaaacagtgtgtgtccaatccctgtgatcagtatcaaccacaccacctaggaatgctaggaaggtaccccaattcgttgggatctgatcctaggctaattgtctacggtggtgctcctttttattttcacttcacttctctggtcacaactgcttgattctgtgtttgctgcttcctccgctctcactgccattctcaagtgttcacactgtccaagttcctttggttgatctcttccacttgccactgtcaactcttgtc

SEQ ID NO: 461 - DNA, 421 bp, unidentified
  source 1..421: mol_type = unassigned DNA; note = unclassified Teschovirus sequence
ccccccctcctttgaatttgtaactggtaagtgataatccttggaagctaggtacttgttacgctagttttggattgtcttgtgcccaacattggtcttcggacttctgttgtgtttaaacacagaaattttaacacctgactatgaattcaatggaccaccccttttgaaagacctgctctggcgcgagctaaagcgcaattgtcaccaggtactgcaccaatggtggcgacagggtacagaagagcaagtactcctgactgggcaatgggactgcattgcatatccctaggcacctattgagacttatctggggcccaccagcgtggagttcctgtatgggaatgcaggactggacttgtgctgcctgacagggtcgcggctggccgtctgtactttgtatagtcagttgaaactcacc

SEQ ID NO: 462 - DNA, 421 bp, Enterovirus C
  source 1..421: mol_type = genomic DNA
agtctggacatccctcaccggcgacggtggtccaggctgcgctggcggcctacctgtggtccaaagccacgggacgctacatgtgaacaaggtgtgaagagcctattgagctacaaaagagtcctccggcccctgaatgcggctaatcccaaccacggatcaagggtgcacaaaccagtgtacaccttgtcgtaacgcgcaagtctgtggcggaaccgactactttgggtgtccgtgtttcctttttaattttgatggctgcttatggtgacaatcatagattgttatcataaagctaattggattggccatccggtgagagtgaaatatattgtttacctccctgttgggtttactctaactaacttctccatttataaacttgtcatcacagttttaataattagaagtgcagtttaca

SEQ ID NO: 463 - DNA, 423 bp, Pegivirus C
  source 1..423: mol_type = genomic DNA
catggacgaaagcccgtggatggacggtgacagggttggcaggtcgtaaatcccggccgccctggtagcgggtataagtctgagggaaacccactagaggcttacgtgttcttgtccgagtggacgtgcacggtccacaggagacgcctattccggtgtgaataataggccgactcgagcggagtcgttaaactgaggaccgtctgagagatggtaacttggcctgcgtacgggaacgccgctaaagaatacagtgggttaagtccggcgggttggcaatcccagcagggcgggggggttctactgttgaatcctgccagttcctctcagatggtaggcatggggggacccagctccgcggcgcgctacagccggggtagcccaaaatccttcgggtgagggcgggtcccatgtccctttttg

SEQ ID NO: 464 - DNA, 423 bp, Pegivirus C
  source 1..423: mol_type = genomic DNA
gtgcaagccccacaaaccgacgcctatttaaatagacgttaagaaccggcgcctgcccggcgaccggccaaaagttggtggatgggtgatgccagggttggtaggtcgtaaatcccggtcatcttggtaaccactataggtgggtcttaagggttggtcaaggtccctctgaaccctgtggcgagaaagcgcacggtccacaggtgttggccctaccggtgtgaataagggcccgacgtcaggctcgtcgttaaaccgagcccattacccacctgggcaaacaacgcccacgtacggtccacgtcgcccttcaatgtctctcttgaccaataggctttgccggcgagttgacaaggaccagtgggggctgggcgtcgggggaaggacccccggcgctgcccttcccggtggggtgggaaatgc

SEQ ID NO: 465 - DNA, 424 bp, Hepatovirus G
  source 1..424: mol_type = genomic DNA
gtcttcttttatccgggctcacgtgatgccaatggtccgacccatgcgcccgtgggggttaacacatggattagccatgtgctgtaggccctaaaagtcacgttcacgtaaggcttggatgaaactcatgtctgttaactgagggtggtaagttacattgatcttctaaagagggtaggctacgggtgaaaccctctaggttagtactcatattgagagatacctccagtaggtgaaggtttccggatattggtgagtttaacgacaataaccattcaacggatgtgggcccacctcactggttagatgccttgtaatccaacacccaaggggatatgagtgaattcttagtcccaagtgaccctcccgaaaggttgtaggggtactcaggggcatttaggttttccacatttaaagtgaattg

SEQ ID NO: 466 - DNA, 426 bp, unidentified
  source 1..426: mol_type = unassigned DNA; note = unclassified Teschovirus sequence
ccccccccctccccctttgaacttgtaactggtaagtgatgatccttggaagctaggtacctgttacgctagttttggattatcttgtgcccaacactagtctttggacttctgttgtgtttaaacacagaaatctgattgcttggttatgaattcactggactaacccttttgaaagacctgctctggcgcgagctaaagcgcaattgtcaccgggtattgcaccaatggtggcgacagggtacagaagagcaagtactcctgactgggcaatgggactgcattgcatatccctaggcacctattgagatttctctggggcccaccagcgtggagttcctgtatgggaatgcaggactggacttgcgctgcctgacagggtcgcgggtggccgtctgtactttgtatagtcagttgaaactcacc

SEQ ID NO: 467 - DNA, 426 bp, Teschovirus A
  source 1..426: mol_type = genomic DNA
ttgaaaccccctccctttgaatttgtaattgataagtgatgatccttggaagctaggtacttgatacgctagttttggattgtcttgtgcccaacattagtctttggacttctgttgtgtttaaacacagaaattttgttatctggctacgaattcattggattaatccctctgaaagacctgctctggcgcgagcgaaagcgcaattgtcaccgggtattgcaccaatggtggcgacagagtacagaagagcaagtactcctgactgggcaatgggactgcattgcatatccctaggtacctattgagatttctctggggcccaccagcgtggagttcctgtatgggaatgcaggactggacttgtgctgcctgacagggtcgcggctggccgtctgtactttgtatagtcagttgaaactcact

SEQ ID NO: 468 - DNA, 426 bp, Teschovirus A
  source 1..426: mol_type = genomic DNA
cccccctcctctccttttggactcgtaactgataagtggtagtccttggaagctaggtactcgttacgctagttttggattatcttgtgcccaacattggacctcggtcctgtgttgtgtttaaacacagaaatcttgacacttggttatgaattcattgtatcaacccttttgaaagacctgctctggcgcgagcaaaagcgcaattgtcaccaggtattgcaccaatggtggcgacagggtacagaagagcaagtactcctgactgggtaatgggactgcattgcatatccctaggcacctattgagatttctctggggcccaccagcatggagttcctgtatgggaatgcaggactggacttgtgctgcctgacagggtcgcggctggccgtctgtactttgtatagtcagttgaaaagcacc

SEQ ID NO: 469 - DNA, 427 bp, Pegivirus A
  source 1..427: mol_type = genomic DNA
ctggacgaaagcccgtggacgggcggtgacagggttggcaggtcgtaaatcccggccgccctggtagcgggtataagtctggaggaaacccgtgaaccggcagcgtgaagctctgctagcgaacgtgcacggtccacaggagacgccgattccggtgtgaataatcggccgactcgagcggagtcgttaaactgaggaccatcagggagatggcaacttggcttgcgtacgggaacgccgctaaagtcacagtgggttaagtccggcgggttgacaatcccagcaaggcgagggggtgctattgttgcaccctgccagtccctcccttttggtaggcatggggggacccagctccgcggcgcgctacagccggggtagcccaaaatccttcgggtgagggcgggtcccatgtcccttttattcaggc

SEQ ID NO: 470 - DNA, 427 bp, Pegivirus C
  source 1..427: mol_type = genomic DNA
tggacgaaagcccgtggatggacggtgacagggttggcaggtcgtaaatcccggccgccctggtagcgggtataagtctgagggaaacccactagaggcttacgtgtacttgtccgcgtggacgtgcacggtccacaggagacgcctattccggtgtgaataataggccgactcgagcggagtcgttaaactgaggaccatttgtaagatggcaacctggcctgcgtacgggaacgccgctaaagaatacagtgggttaagtccggcgggttggcaatcccagcagggcggggggactctattgttgagccctgccagttccttacaagtggtaggcatggggggacccagctccgcggcgcgctacagccggggtagtccaaaatccttcgggtgaggacgggtcccatgtccctttttatggctc

SEQ ID NO: 471 - DNA, 427 bp, Pegivirus D
  source 1..427: mol_type = genomic DNA
cggcgcggtgttttgggttcagggcagtaggggcagccgggccagcagtagctggctcctggtaccaccaccctacccggacgacctccctcgcgaaaggtcgccacggtctgtggctcgacgacgcctacaattcagtccgaggggcgcagccctcgttaaactcagacttgattcctcgcctttgatctggccaggggtttaagtgaacgccgcccttttaatgtttaatagggttctttcccggcgggttgacaaacacttccctgggcttttcttcggcttcggtttcatgttgcttcggcacccatgagcgcacaggggggggaccctgcgacagtccgccaagaggaaaatccttcgggtgacctcgtgcgcaacccaatccctttctcttccacatggcgtgtctgtggtgcatgctgtg

SEQ ID NO: 472 - DNA, 428 bp, unidentified
  source 1..428: mol_type = unassigned DNA; note = Sicinivirus sp. strain RS/BR/2015/1R-1 polyprotein gene, complete1 sequence
tggctggaagcattcagtttctggatttgttggtttgtggtgattagtagaccccctggaggtacccgttctggatctgaccagggacccgtgactataccgttccggtaattcgggtttaaaactatgaacgtcaccacccattttcttttcctattttattttttcttatattctgatatacgtgtgagtattgatgttccctgatctttgtgtctggtctgcattttcagttattcaatttggttgggctgggctctttatttagatgtttttagaggtctttcttgttattgtagcgctcgttgttgtggtattgtctcctagcgaattatcccagctgttgactatttgcatctacaactttgtcttgatttttctctggttatttggtaccttagagctccccaattatcccaccattcatc

SEQ ID NO: 473 - DNA, 430 bp, unidentified
  source 1..430: mol_type = unassigned DNA; note = unclassified Sapelovirus sequence
cccctccacccttaaggtggttgtatcccacataccccaccctcccttccaaagtggacggacaactggattttgactaacggcaagtctgaatggtatgatttggatacgtttaaacggcagtagcgtggcgagctatggaaaaatcgcaattgtcgatagccatgttagtgacgcgcttcggcgtgctcctttggtgattcggcgactggttacaggagagtaggcagtgagctatgggcaaacctctacagtattacttagagggaatgtgcaattgagacttgacgagcgtctctttgagatgtggcgcatgctcttggcattaccatagtgagcttccaggttgggaaacctggactgggcctatactacctgatagggtcgcggctggccgcctgtaactagtatagtcagttgaaaccccccc

SEQ ID NO: 474 - DNA, 430 bp, unidentified
  source 1..430: mol_type = unassigned DNA; note = unclassified Sapelovirus sequence
cctccacccttaaggtggttgtatccccataccctaccctcccttccaaagcggatggatatacggacctgaacttttggcgagtacatatggtatgattattggatacaccctgaatggcagtagcgtggcgagctatggaaaaatcgcaattgtcgatagccatgttagtgacgcgcttcggtgtgctcctttggtgattcggcgactggttacaggagagtaggcagtgagctatgggcaaacctctacagtattacttagagggaatgtgcaattgagacttgacgagcgtctcctagagatgtggcgcatgctcttggcattaccatagtgagcttccaggttgggaaacctggactgggcctatactacctgatagggtcgcggctggccgcctgtaactagtatagtcagttgaaaccccccc

SEQ ID NO: 475 - DNA, 430 bp, unidentified
  source 1..430: mol_type = unassigned DNA; note = unclassified Enterovirus sequence
cgcgaggcataggttgtacccacggccaaaaaccttcaaccgttacccgccaatcaactacgtaacagctagtatcatcatgtctttgtctaggcgttcgatcaggtggttttcccctccactagtttggtcgatgaggctaggaaatccccacgggtgaccgtgtcctagcctgcgtggcggccaacccagcatcagctgggacgccttttcagagacatggtgtgaagactcgcatgtgcttgattgtgattcctccggcccctgaatgcggctaacctcaaccccggagccttgtattgcaatccagcaatattaaggtcgtaatgagcaattctgggacgggaccgactactttgggtgtccgtgtttcctgtttttcataaatttttcttatggtcacagcatatagtacatatatactgtgatc

SEQ ID NO: 476 - DNA, 431 bp, unidentified
  source 1..431: mol_type = unassigned DNA; note = unclassified Enterovirus sequence
aggtcgatgagtcactgcattccccacaggcgactgtggcagtggctgcgttggcggcctgcctatggggcaacccataggacgctttaatgttgacacggtgcgaagagtctactgagctagttagtagtcctccggcccctgaatgcggctaatcctaactgcggagcgcacaccagcaaaccagctggtaatgcgtcgtaacgggcaactctgcagcggaaccgactactttgggtgtccgtgtttccttttattcttattatggctgcttatggtgacaatctaagattgttatcatatagctattggattggccatccggtgactaacagacacatcatttacctttttgttggatttgttccactaaactcactctcatatcaaaccttattgtacatccttaagtccaattatttaaagcaact

SEQ ID NO: 477 - DNA, 432 bp, Pegivirus C
  source 1..432: mol_type = genomic DNA
gggtgatgacagggttggtaggtcgtaaatcccggtcatcttggtagccactataggtgggtcttaagggctggtcaaggtccctctggcgcttgtggcgagaaagcgcacggtccacaggtgttggccctaccggtgtgaataagggcccgacgtcaggctcgtcgttaaaccgagcccgttacccacctgggcaaacaacgcccatgtacggtccacgtcgcccttcaatgtctctcttgaccaataggctttgccggcgagttgacaaggaccagtgggggttgggcggtgggggaaggacccctttcgctgcccttcccggtggggcgggaaatgcatggggccacccagctccgcggcggcctgcagccggggtagcccaagaaccttcgggtgagggcgggtggcatttccttttctgtaccgatc

SEQ ID NO: 478 - DNA, 433 bp, Parechovirus A
  source 1..433: mol_type = genomic DNA
ctctattagtgagataccacgcttgtggaccttatgctcacacagccatcctctagtaagtttgtaagacgtctggtgacgtgtgggaacttgtgggaatcaatattttgctttaaagcatccattagccagcggataaaacacctggtaacaggtgcctctggggccaaaagccaaggtttaacagaccctagtggattggtttcaaaacctgaaatattgtggaacacactcagtacctactgatctggtagtaatgcaagcactagttgtaaggcccacgaaggatgcccagaaggtacctgtagggaacaagagacactatagatctgatctggggctggctacctctattttggtgagtcagttaaaaaacgtctagtgggccaaacccaggggggaccctggtttccatttattttacaaaggcact

SEQ ID NO: 479 - DNA, 433 bp, unidentified
  source 1..433: mol_type = unassigned DNA; note = unclassified Picornaviridae sequence
agtagtggccgtaagccacttttctttctttataacctatcactatactccaacttaatcttctctacttggactaggatctactggttatcgatgagtcgtgatgcttagtgatttggatagggaaatcccacctgagggtaccgatggtatcactcaaacgggtaggggagatacccatttgctattggctgaaccggattaccgatgtacgccagtattagcagtggggcaaatacctccccgagcattatggttagagacagaactacgggtgctagccccggtggcattgcctagtagggttccgacctaatggtattggaaaccacccgtagtaaggtgagtgttggggaacctcaccagtgtctgttactgcctgatagggtcgcggctggccgaatcataatgcttaatgtcagttgaactagtc

SEQ ID NO: 480 - DNA, 438 bp, Rhinovirus C
  source 1..438: mol_type = genomic DNA
ttccccggacgtgtgaataggctccaccaggggctgaagctgtagcgttcgttacccgcactgctactacgcaagggttagtatctaactgaaaacattgtggagtttcgctcagcagaaccccactgtagatcggggtaatggggctacacaacccccaccggcgacggtggtgtagcccgcgtggtgccccgcctgaggcttgtgcctcaggacgccacaatgttgacagggtgagaaggcctacgtgtgctagcagtgagtcctccggcctctgaatgcggctaatcctaaccccatagccatcacacacaatccagtgtgcaggtggtcgtaacgggtaactatgggatggaaccgactactttgagtgtccgtgtttcctattttacctttacatgtcttatggtcacaatatagtgtatacatattgtgatc

SEQ ID NO: 481 - DNA, 439 bp, unidentified
  source 1..439: mol_type = unassigned DNA; note = unclassified Enterovirus sequence
gttaccccggagcggagtatagatggccaccgctgtcaaaagctcttaaccgttacccgccagttaactacgcaacggctagtagcatcctgttgccttcatggcgttcgatcaggtgagacttccctcctcactagtctggtcgatgaggctgagaactccccacgggcgaccgtgtctcagcctgcgtggcggccagcccagcttttgctgggacgccttgattgagacatggtgtgaagacccgcgtgtgcttaactgtgagtcctccggcccctgaatgcggctaacctaaaccctggagccttgaaacacaatccagtgttcgcaaggtcgtaatgagcaattccgggacgggaccgactactttgggtgtccgtgtttcctttttacctttcaattgttcttatggtcacaatataagtgttatattgtgatc

SEQ ID NO: 482 - DNA, 439 bp, unidentified
  source 1..439: mol_type = unassigned DNA; note = unclassified Enterovirus sequence
tccccggcatgagaggaatagactctttcagggttgaagccacgagtgtcgttacccgcactggtactacgcaaagcctagtaacatcttgaaactctttttggttggtcgttccactagttaccccctagtagacctggcagatgaggcaggacgctccccactggcgacagtggtcctgcctgcgtggctgcctgcacacccttcggggtgtgaagccaaaagaaagacaaggtgtgaagagccccgtgtgctaccagtgaatcctccggcccctgaatgcggctaatcttaccccacagctattgcacacaatccagtgtgtatgtagtcgtaatgagcaattgtgggacggaaccgactactttgggtgtccgtgtttccttttattcccatgtttctgcttatggtgacaatactgacgtatagtgttgttacc

SEQ ID NO: 483 - DNA, 439 bp, Enterovirus C
  source 1..439: mol_type = genomic DNA
tgtagatcaggctgatgagtcactgcactcctcacgggcgaccgtggcagtggctgcgttggcggcctgcctatggggcaacccataggacgctctaaagtggacatggtgcgaagagtctattgagctagttagtagtcctccggcccctgaatgcggctaatcccaaccacggagcaagtgctatcaaaccagagagtggcttgtcgtaatgcgcaagtctgtggcggaaccgactactttgggtgaccgtgtttccttttatttttatcgtggctgcttatggtgacaatctcagattgttatcataaagcaaattggattagccatccggtgaaagtcaaatcgattatttacttacttgttagtttttctccactaacaccacaaacacttaaaattattgaaatagtgctgctaattagataccactatcata

SEQ ID NO: 484 - DNA, 442 bp, unidentified
  source 1..442: mol_type = unassigned DNA; note = unclassified sequence
aagcgactcttccgacgacgaggagcagtgggacgccttcgagtcaactgaccgcccgaagaaggagaaacggcgggaacagaagactcgagagatcacccagccccgatctccaaggaaaaagtcaccgccgcgacactaaacgacctccacccctgcattgagtctgccaataaaccctcgaatactttctgtcgtcctcttttttcctttaacctttcgtgggagagcagcgccgcgcggtcctcctcctctttccgacaccgttccatcgcattcaggaacgggtccaacccctcaccgcaattacgcacttccgcaaggccacgcaaaaagtgaccattgcaccgtgccaaacccctccctcagttaatattaacagccgtcctcaatatccttctaccttccgtgacaggacacagtctccgaacaacccagagca

SEQ ID NO: 485 - DNA, 443 bp, Sapelovirus A
  source 1..443: mol_type = genomic DNA
acactcatttcccccctccacccttaaggtggttgtatcccctacaccctaccctcccttccacataggacgaataaacggacttgagattaaggcaagtacataaggtatggtttttggatacacttaaatggcagtagcgtggcgagctatggaaaaatcgcaattgtcgatagccatgttagcgacgcgcttcggcgtgctcctttggtgattcggcgactggttacaggagagtagacagtgagctatgggcaaacccctacagtattacttaggggaatgtgcaattgagacttgacgagcgtctctttgagatgtggcgcatgctcttggcattaccatagtgagcttccaggttgggaaacctggactgggtctatactgcctgatagggtcgcggctggccgcctgtaactagtatagtcagttgaaaacccccc

SEQ ID NO: 486 - DNA, 443 bp, Sapelovirus A
  source 1..443: mol_type = genomic DNA
acacccatttcccccctccacccttaaggtggttgtatcccctataccctatcctcccttccaaacaggatggacaaatggacttgacattatggcaagtacataaggtatggtctttggatacacctgaatggtagtagcgtggcgagctatggaaaaatcgcaattgtcgatagccatgtcagtgacgcgcttcggtgtgctcctttggtgattcggcgactggttacaggagagtaggcagtgagctatgggcaaacccctgcagtattactcaggggaatgtgcaattgaggcttgacgagcgtctcttagagatgtggcgcatgctcttggcattaccatagtgagcttccaggttgggagacctggactgggcctatactacctgatagggtcgcggctggccgcctgtaactagtatagtcagttgaaaacccccc

SEQ ID NO: 487 - DNA, 443 bp, Kappapapillomavirus 1
  source 1..443: mol_type = genomic DNA
ctacgtctgataagattgatctgaaatctgagaatagagatttatttagaattgtttcatattcgggaaccgtgcagtggagagcattgtgcggtccttgcagacggggggtggggacattgcctcaaatacctttgcttgaaaggcctttgccaacacagcctttgtgcaactgcagcttttgcagcccattgcttgcagaagcagcacctttagttactgtagattctggaggtggttccagatcagcgattcctactgggccttgcgactgcgaggagtgcagtggtaataggacacccgacggggaggaggaaccaggagcaagaaatacaagtagccctgacagttctgtttgtggttgtcctctttgcgagggagaaattattaacgtttaagcttcttgctcatatttggggcgtaggtataataaagcaaaaatt

SEQ ID NO: 488 - DNA, 445 bp, synthetic construct
  source 1..445: mol_type = other DNA
accacaaacactccagtttgttacactccgctaggaatgctcctggagcaccccccctagcagggcgtgggggatttcccctgcccgtctgcagaagggtggagccaaccaccttagtatgtaggcggcgggactcatgacgctcgcgtgatgacaagcgccaagcttgacttggatggccctgatgggcgttcatgggttcggtggtggtggcgctttaggcagcctccacgcccaccacctcccagatagagcggcggcactgtagggaagaccggggaccggtcactaccaaggacgcagacctctttttgagtatcacgcctccggaagtagttgggcaagcccacctatatgtgttgggatggttggggttagccatccataccgtactgcctgatagggtccttgcgaggggatctgggagtctcgtagaccgtagcac

SEQ ID NO: 489 - DNA, 445 bp, Enterovirus B
  source 1..445: mol_type = genomic DNA
gcacaacccaagtgtagatcaggctgatgagtcaccgcattccccacgggtaaccgtggcggtggctgcgttggcggcctgcccatgaggcaactcatgggacgcttcaatactgacatggtgcgaagagtctattgagctaattggtagtcctccggcccctgaatgcggctaatcctaactgcggagcagatacccacatgccagtgggcagtctgtcgtaacgggcaactctgcagcggaaccgactactttgggtgtccgtgtttccttttatttctattttggctgcttatggtgacaattgagagattgttaccatatagctattggattggccatccggtgacaagtagagcaattatctacctatttgttggctttgttccactgaattttagagttctaaaaaccttaacttcattttagcactcaatacggcaaa

SEQ ID NO: 490 - DNA, 446 bp, unidentified
  source 1..446: mol_type = unassigned DNA; note = unclassified Enterovirus sequence
gcacttctgtttccccggacgtgtgaataggcctcaccaaggctgaagctgtagcgttcgttatccgctcacctactgcgcaaagactagtaactaactagatacttagtggtgtttcgctcagcagtaccccactgtagatcggggcaatgaggctacgcatcccccactggcgacagtggcgtagcctgcgtggtgccctgcccaggcttcggtctgggacaccactatgttgacagggtgtgaagaccggcgtgcgctaggtgtgactcctccggcccctgaatgcggctaatcctaaccccgcagccaccgcatgcaacccagcatgtagatggtcgtaacgagtaattgtgggatggaaccgactactttgggtgtccgtgtttcctgtttttctttattgttgtcctatggttacaaatttgtgtatcagatttgtgacc

SEQ ID NO: 491 - DNA, 449 bp, Rhinovirus C
  source 1..449: mol_type = genomic DNA
agctctgcagatatctccccggacgtgtgaataggccctaccagggctgaagctgtagcgttcgttatccgcatgcctactgcgcaaaggttagtaactaactagatacttagtggtgtttcgctcagcagtaccccactgtagatcagggtaatgaggctacgcatcccccactggcgacagtggcgtagcctgcgtggtgccctgcccaggtttatacctgggacaccactatttggacagggtgtgaaggccagcgtgcgctaggcatgagtcctccggcccctgaatgcggctaatcctaaccctgcagccattgcatgcaaaccagcatgttggtggtcgtaatgagcaattgcgggatggaaccgactactttgggtgtccgtgtttcttgtttttccattaattgtcttatggttacaagtttgtgcaacaaatttgtgacc

SEQ ID NO: 492 - DNA, 450 bp, Pegivirus A
  source 1..450: mol_type = genomic DNA
tagagtggttgcgctggaatctggacgaaagccagcggatgggtggtgacagggttggcaggtcgtaaatcccggccatcctggtacctggtataagtctgaaggaacgcgcaagcaactagtgcgatttgttggcaaagtttgagtgcacggtccacaggtgacgcctataccggtgtgaataataggccgactcgagcggagtcgttaaactgaggacccccttggcgatcgcaacttggcctgcgtacgggaacgccgctaaagtcacagtgggttaataccggcgggttgacaatcccagcagggcgggggggagctactgttgcatcctgcgagttccgtcttgggggtaggcatggggtggcccagctccgcggcgcgctacagccggggtaggccaaaaatccgaaaggtgaggccgggccacatgtccgtttttatttaccc

SEQ ID NO: 493 - DNA, 452 bp, Pegivirus B
  source 1..452: mol_type = genomic DNA
taaatcccggtccaggtttattcagtatatgataggtggagtcgagccccccgaccggggctctgtgaccactgtccagccggacgaggtggtgaaagttgttcgggcacggtccacaggttgggttcaccggtgtgaatagagccccgtctcgagcggagacgttaaacttagatggtctgcaggatggcaacgcggcccgcgtacgggaacgtcgcaaaataccttcgggaacagtgcatgcagcgggttgtcaaacccagcggtggcgcgctccggagaggtggagccctcaatggaggccagttccctgcagaaccagcccttcggggcaggcatggccccccccagccggcgcggcgctacacgcggcaagaggaagagccttcgggtgacctcgggggggatttgtccctttcaacccaatgagagttcgtgcgttggtcgcagtc

SEQ ID NO: 494 - DNA, 455 bp, Sapelovirus A
  source 1..455: mol_type = genomic DNA
cgcatgtattccacactcatttcccccctccacccttaaggtggttgtatccacttaccctatcccccccctccaaagcggacggactcttggacctgaaactctggcaagttaaatgataagatatctggatacacttgaatggcagtagcgtggcgagctatggaaaaatcgcaattgtcgatagccatgttagtgacgcgcttcggcgtgctcctttggtgattcggcgactggttacaggagagtagacagtgagctatgggcaaactcctacagtattacttaggaggaatgtgcaattgagacttgacgagcgtctcttagagatgtggcgcatgctcttggcattaccatagtgagcttccaggttgggaaacctggactgggtctatactacctgatagggtcgcggctggccgcctgtaactagtatagtcagttgaaaccccccc

SEQ ID NO: 495 - DNA, 455 bp, Enterovirus C
  source 1..455: mol_type = genomic DNA
gcagtagagatgggagtgtagcttaggtcgatgagtctggacattcctcaccggcgacggtggtccaggctgcgttggcggcctacctgtggcccaaagccacaggacgctagttgtgaacaaggtgtgaagagcctattgagctacaaaagagtcctccggcccctgaatgcggctaatcccaaccacggagcaagtgctcacaaaccagtgagtggcttgtcgtaacgggtaactctgtggcggaaccgactactttgggtgtccgtgtttccatttatttttacaatggctgcttatggtgacaatcgttgattgttatcataaagcgatttggattggccatccggtgaaagtgaaatatattatttatctttttgttggattcgctccaatcaactcctttacttacaaactcatcacaacagtactactaattaggaacatataccact

SEQ ID NO: 496 - DNA, 455 bp, unidentified
  source 1..455: mol_type = unassigned DNA; note = unclassified Enterovirus sequence
tgcacttctgtttccccggtactagggtgttaaacttccccagaggttgaagcccgatgtatcgttacccgcatggttactaagcagagcctagtagcatcttgctttgcatatgagctggtcgttcagtcagtaaaccccctgatagacctggcagatgaggctggaaataccccactggtaacagtgttccagcctgcgtggctgcctgcccctcttttgaggggaagcccatatgtagacaaggtgtgaagagccgcgtttgctaactatgagtcctccggcccctgaatgcggctaatccaaccccacagctactgcgcagaaaccactgcgtaggtagtcgtaatgagcaattgtgggacggaaccgactactttgggtgtccgtgtttcctgttttactttacattgctcatggacacaacatatataaaatcgtatatgttgttcacc

SEQ ID NO: 497 - DNA, 457 bp, Avisivirus C
  source 1..457: mol_type = genomic DNA
gggtatggtggttaaccccgtccactgggcatctttgccctctcagaagtggatcaatccaccccaactccccccctggttacctgagccacagtggactccggtgacgaagctagggaccccaatacctcaagtgccaagagagtccccccctcgcgagaggtgctcttgggcccaaaaggctagttggcagagtgaagtgaaggaagctgctaacgtggtgaccttaagcgtaattcgaagctgacctttgaggttaaccctagtggaccactggaggaatctgtggaggtggtggttaggaaagttggccacttgtgagtagatgcccagaaggcataaggctgatctggggccagtgactataccgttccggtaaacctggtataaaaaccatgaaagcaagtgggtgaaattttctctttttatccttcattcagcagttgatattggcaaa

SEQ ID NO: 498 - DNA, 460 bp, unidentified
  source 1..460: mol_type = unassigned DNA; note = Picornaviridae sp. isolate ybb044pic01nc genomic sequence.1 sequence
aaaagactcgctaactcaaaactctctcactctcactctccactcccaaactattatccgactaagtgacccactaactaatccaaaattccaatcctacactatcttgcacctttcactctcctctatctaatctataaagctcttacaactaaacctctccataccccattacaaccgcaaaatctacgaattcaaataaactcccaattgcccgaaaattcacttccacctaattctctcaaaatttctgactcactctcagaacaaaccaattcagtgcaaactgaacatacactctcccctgaacaaacgcagcaactcctccaaaccactcttaagactgcgtctcaaatttttgctcaactccaagagaaacaaatctcttctccccagaaagttaatactccaacgctctctgattcctcctccgaccccactcttcaacaagcttcatatc

SEQ ID NO: 499 - DNA, 460 bp, unidentified
  source 1..460: mol_type = unassigned DNA; note = unclassified Picornaviridae sequence
ctccactctcctttctcccttccccctccctttaccttttccccctctgtaactaagttttgtccctgcagagcagtgatacgacataaccgagttggaacgcgtattgggtattggtgaatatctatctcatgtggttaagctaaggcttgaaatacctttggcattgggttatagtagggcattagtgttcccacatgagagaaccatctatccacttgacacagtgggtgtatagtacaaaggaccctatttggtatcctgacgcgtgggcgagtaagtcttgctggatttccgcgagcatcaaccacaccctgatagtctcaatggggtcactcccgagacggggcaagtcacctatacactacctatggttgggaagccatagctggactgtgacagcttgatagagtgtcggcgggcacagtggattggatgtaaagtccgttgaaatgccatt

SEQ ID NO: 500 - DNA, 464 bp, unidentified
  source 1..464: mol_type = unassigned DNA; note = unclassified Sapelovirus sequence
ttcggcacgcatgtattccacactcatttcccccctccgcccttaaggtggttgtatcccataacctttaccctcccccttcccagtcggacggaactatagttcatagacttagattctgtattaaggtgtgactaggatcaaccccatgtggcagtagcgtggcgagctatggaaaaatcgcaattgtcgatagccatgttagtgacgcgcttcggcgtgctcctttggtgattcggcgactggttacaggagagtaggcagtgagctatgggcaaacctctacagtgttacttagagggaatgtgcaattgaggcttgacgagcgtctccttgagatgtggcgcatgctcttggcattaccatagtgagcttccaggttgggaaacctggactgggcctatactacctgatagggtcgcggctggccgcctgtaactagtatagtcagttgaaaccccccc

SEQ ID NO: 501 - DNA, 465 bp, unidentified
  source 1..465: mol_type = unassigned DNA; note = unclassified Enterovirus sequence
cagcggtcaagcacttctgtctccccggcatagggatgttaggcttctcacgaggctgaagtcccgattgtcgttatccgcacaactactggacaaagcctagtaacaccctacgacgtagtatggttggtcgttccaccagtgaatccccccctggtagacctggcagatggggctagaaattcctcactggcgacagtgttctagcccgcgtggctgcctgctccctaacgggagaagccatcctactgacaaggtgtgaagagccccgtacgctagttgtgagtcctccggcccctgaatgcggctaatccaaccctgcagccattgcatggaagccaccatgtagatggtcgtaatgagtaattgcgggacggaaccgactactttgggtgtccgtgtttcttttatttcttgtatattgcttatggtgacaatatatatacagcatatatattgttcatc

SEQ ID NO: 502 - DNA, 466 bp, Cardiovirus B
  source 1..466: mol_type = genomic DNA
atggggaagggtatgacgtgccccttccttcttcggagaactcgctctagtggtctttccacttctggaaaagagtgagtgcacgtgatcaggaccgtcgaagacgacaaatacctggtgctctatctcatagacgtttcacagctgtagcgacccctcagtagcagcggaagccccctcctggtgacaggagcctctgcggccaaaagccacgtggataagatccactgctgagggcggtgcgaccctagcaccctgtgatgcatactagttgtagcgtgccggactattggtctgtcataagacacctgatagagagaccaagaatgtcctggaggtaccccgcgtgcgggatctgaccaggagaccattgcccaatgctttacaacgggtctatggtttaaaaactgtcgcagtctctccaaaccaagtggtcttggttttcaattactttgaatatttcact

SEQ ID NO: 503 - DNA, 468 bp, unidentified
  source 1..468: mol_type = unassigned DNA; note = unclassified Picornaviridae sequence
aaaaggagggatacaaatggtaccacggacaagcgtggaaaaccacctgtatccccccttttgggcttggcaacccattaatcaagatgccttctcttttgccggttttaagactccattttgcctgctgaatctgatgtgttctcactagacgtgtagcttagcacgatggccaggtcttgtttatactggcataagccgggagaacggtcttacagtgatcttggagtttggttagtatctgctagagtggcgtaactgcagacatgttgcccagggccgtaggctaggtaactagcaccctgggggccgcaagcctaggtggtcacaaccaccctcatgtaacccttgtcgggcattcttgtagtagaacccctaactccacttttgctgggaccaagtaccctgtgagagcaatgtaagtagatgccctgtaggtacccgtttaggatctgagcaggggccggg

SEQ ID NO: 504 - DNA, 475 bp, unidentified
  source 1..475: mol_type = unassigned DNA; note = unclassified Sapelovirus sequence
gtacatgcgtattacggtacgcatgtattccacactcatttcccccctccacccttaaggtggttgtatccactcaccctaccctcccttccaaagcggatggactttatgtgtttgaaactttggcaaccataaaaggaatggtatttggatacggatgaatggcagtagcgtggcgagctatggaaaaatcgcaattgtcgatagccatgttagtgacgcgcttcggcgtgctcctttggtgattcggcgactggttacaggagagtaggcagtgagctatgggcaaacctctacagtattacttagagggaatgtgcaattgagacttgacgagcgtctctttgagatgtggcgcatgctcttggcattaccatagtgagcttccaggttgggaaacctggactgggcctatactacctgatagggtcgcggctggccgcctgtaactagtatagtcagttgaaaccccccc

SEQ ID NO: 505 - DNA, 476 bp, unidentified
  source 1..476: mol_type = unassigned DNA; note = unclassified Enterovirus sequence
aacacatcgctcaacagcagttccacatccagtgggattatgagcaagcactcctgtttccccggaagggactaacggtacgctgtacccacggcggaagtatgtcctaccgttaaccggccatgtacttcgagaagcctagtaccattatgaaggttgattgatgttacgctccccggtatccccaaccggtagttctggtcgatgagtctcggcatcccccacgggcgaccgtggccgaggctgcgttggcggccagcctacacccaccagggtgtaggacgtcatgatactgacatggtgtgaagagcctattgagctacgtggtagtcctccggcccctgaatgcggctaatcctaactccggagcatccgctaacaatcccgttagaagggtgtcgtaacgcgaaagtctggagcggaaccgactactttgggtgtccgtgtttcctgttttacttactgtttggctgctt

SEQ ID NO: 506 - DNA, 478 bp, unidentified
  source 1..478: mol_type = unassigned DNA; note = unclassified Shanbavirus sequence
tgaaaagggggcgcagggtggtggtggttactaaatacccaccatcgccctgcacttcccttttcccctgtggctcagggtcacttagccccctctttgggttaccagtagttttctacccctgggcacagggttaactatgcaagacggaacaacaatctcttagtccccctcgccgatagtgggctcgacccccatgtgtaggagtggataagggacggagtgagccgatacggggaagagtgtgcggtcacaccttaattccatgagcgctgcgaagaaggaagctgtgaacaatggcgacctgaaccgtacacatggagctccacaggcatggtactcgttagactacgcagcctggttgggagtgggtataccctgggtgagccgccagtgaatgggagttcactggttaacacacactgcctgatagggtcagggcctcctgtccccgccgtaatgaggtagaccatatgcc

SEQ ID NO: 507 - DNA, 478 bp, unidentified
  source 1..478: mol_type = unassigned DNA; note = unclassified Enterovirus sequence
gtgcgccacatccagtggtgttttgtacaagcacttctgtttccccggagcgaggtataggctgtacccactgccaaaagcctttaaccgttatccgccaaccaactacgtaaaagctagtaacatcttgtttgtaatctggcgttcgatcaggtggatttcccctccactagtttggtcgatgaggctaggaatccctcacgggcgaccgtgtcctagcctgcgtggcggccaacccagcatatgctgggacgcccttttatagacatggtgtgaagactcgcatgtgcttggttgtgattcctccggcccctgaatgcggctaaccttaaccctggagccttgtattacaaaccagtgatattaaggtcgtaacgagcaattccgggacgggaccgactactttgggtgtccgtgtttctctttttactcattattgtcttatggtcacagcatatttgttaaatatactgtgatc

SEQ ID NO: 508 - DNA, 478 bp, unidentified
  source 1..478: mol_type = unassigned DNA; note = unclassified sequence
gtgacaatcagccagattgttaacggtcaagcacttctgtttccccggtacccttgtatacgcttcacccgaggcgaaaagtgaggttatcgttatccgcaaagtgcctacgagaagcctagtagcacttttgaagcctatggctggtcgctcaactgtttacccagcagtagacctggcagatgaggctagatgttccccaccagcgatggtgatctagcctgcgtggctgcctgcacactctattgagtgtgaagccagaaagtggacaaggtgtgaagagcctattgtgctcactttgagtcctccggcccctgaatgtggctaatcctaaccccgtagctgttgcatgtaatccaacatgtctgcagtcgtaatgggcaactatgggatggaaccaactactttgggtgtccgtgtttcttgtttttctttatgcttgcttatggtgacaactgtagttattacatttgttacc

SEQ ID NO: 509 - DNA, 480 bp, unidentified
  source 1..480: mol_type = unassigned DNA; note = unclassified Enterovirus sequence
gtggtaaatccataccactaatggtcaaacacttctgttcccccggcatgtgaggaataggctccaaaagggctaaagccactagtgtcgttatccgcattggtactacgcaaagcctagtatcactctggaagtctctcggttggtcgctccaccaggtaccccactggtagacctggcagatgaggcaggactcaccccactggcgacagtggtcctgcctgcgtggctgcctgcacacccctacggggtgtgaagcctagagatagacagggtgtgaagagccccgtgtgctaccaatgagtcctccggcccctgaatgcggctaatcttaccccacagctgttgcacgcaatccagcgtgtatgcagtcgtaatgagcaattgtgggatggaaccgactactttgggtgtccgtgtttccttttattcctattatttgcttatggtgacaatattgatagcatcagtgttgtcatc

SEQ ID NO: 510 - DNA, 480 bp, unidentified
  source 1..480: mol_type = unassigned DNA; note = unclassified Enterovirus sequence
gtgcttgaccgtcagtaacctggatggtcaccacctattggtcattgtgtacaagcttctatatgtttcaccagaggcgaaaaacgaggttatcgttatccgcaaagtgcctacgagaagcctagtagcactttcgaaacctatggctggtcgctcagctgcttgcccagcagtagacctggtagatgaggctagacattccccaccagcgatggtggtctagcctgcgtggctgcctgcacacccaatcgggtgtgaagccagaaagtggacaaggtgtgaagagcctattgtgctcactttgagtcctccggcccctgaatgtggctaatcctaaccccgtagctgttgcatgcaacccagcatgtatgcagtcgtaatgggcaactatgggatggaaccaactactttgggtgtccgtgtttcttgttttacttttcattgcttatggtaacaattgtagttgatacacttgttacc

SEQ ID NO: 511 - DNA, 487 bp, Rafivirus B
  source 1..487: mol_type = genomic DNA
gtgtccgggaagcgactcaagcttttgactgagtctctacaccttcatccgtaacatctttaagtttatgtgcctatggacctctagtgcactgccatcaccgggggtgtattggactggtttttccacaatccattcatcctgaggaattttggctttgttactaggatggtcccaccacacgcttatctgtgcctattgtgtcaaccatgttcttaagtagttgtgcccgtgggtgagtagataaccacaacaatccgataaagcatctcgcaaggatgtgagtaatggagtgtatgtgctacagagacccacaacctgaaccaagagagacacagtgaggattgtaaagggggaactctttgaaagggcatgtcccgcaattcctactgactgacaccgggggttggtgtcggtggattttagcaaatcctgttactgggtgatagccttgtgcacttcacttggttcttgtataagtgctgta

SEQ ID NO: 512 - DNA, 488 bp, Tremovirus A
  source 1..488: mol_type = genomic DNA
tttgaaagaggcctccggagactccggaggtattctttcgacccaacccatactggggggagtgtgggaccgtacttggagcgcacggtatatatgtgttcccgcatggcaagggcgtgttaccttgctccctgacgcatggtatgtgtcgatttgattttcaacttatcctaaggtctaggcgtttcgtgccgaaaacctctttgcgtttcacagaaccatcctaaccatgggtgcagtatgggaatcgtgtatgggggtgattaggatctctcatagagggataggtatgtcatcaaaccggggagtactccggctctggcattgggacatttgaattaaccggacctggttcagtatccgggttgtcctgtattgttacggtgtatccgtcttggcatactgaaagggtattcttgggtaatcctttcctactgcctgatagggtggcgtgcccggccatgagagattaagggtagcatttaacc

SEQ ID NO: 513 - DNA, 489 bp, unidentified
  source 1..489: mol_type = unassigned DNA; note = unclassified Sapelovirus sequence
ttgaaatgggtgtggggtacatgcgtattacggtacgcatatattccacactcatttccccccctccacccttaaggtggttgtatccccataccttaccctcccttctaaaacagatggacaaatggatttgaacttatggcaagtgaatatggtatgactttggatacactttaacggcagtagcgtggcgagctatggaaaaatcgcaattgtcgatagccatgttagtgacgcgcttcggcgtgctcctttggtgattcggcgactggttacaggagagtaggcagtgagctatgggcaaacctctacagtattacttagagggaatgtgcaattgagacttgacgagcgtctcttagagatgtggcgcatgctcttggcattaccatagtgagcttccaggttgggaaacctggactgggcctatactacctgatagggtcgcggctggccgcctgtaactagtatagtcagttgaaacccccc

SEQ ID NO: 514 - DNA, 489 bp, unidentified
  source 1..489: mol_type = unassigned DNA; note = unclassified Cardiovirus sequence
gttcgtctgctttctgagtactattcatgaaaagggtatgtgctaccccttccttcttggagaatctgcgtggcggtctttccgtctcttgaaaagcgcagatgtagcatgctggaaccggtgaagaaaacagttctctgtggagacttagagcagacatcgaaacagctgtagcgacctcacagtagcagcggaaccccctcctggtgacaggagcctctgcggccaaaagccacgtggataagatccactgctgtgagtggtgcaaccccagcaccctggttcgatggttgttctctgtggaatcagggaatggttattctcaagccctccagtagagaagccaagaatgtcctgaaggtaccccgcgtgcgggatctgatcaggagatcagttaccagtgctctacactggtactctgatttaaaaaatgtcacagcttctccaaaccaagtggtcttggttttccttttacctacaaagttcatg

SEQ ID NO: 515 - DNA, 489 bp, unidentified
  source 1..489: mol_type = unassigned DNA; note = unclassified Enterovirus sequence
gaagaccaataggcggtggttatccaaaccatcaacggtcaagcacttctgtttccccggttagattgatacgctccaacagggcgaaaacaactctaatcgttatccgcaagatgcctacgcaaagcttagtatcacctttgattctatttggttggtcgctcagctacaaacccagtagtagacctggcagatgaggctagaaacaccccactggtaacagtgttctagcctgcgtggctgcctgcacaccctatgggtgtgaagccgactagttgacaaggtgtgaagagccccgtgtgctcatcttgattcctccggcccctgaatgtggctaaccttaaacctgcagccaatgtacacgatccagtgtgctgttggtcgtaatgagtaattgcgggatgggaccaactactttgggtgtccgtgtttctctttttacctttattattgcttatggtgacagtatatggtatatatattgtcact

SEQ ID NO: 516 - DNA, 491 bp, unidentified
  source 1..491: mol_type = unassigned DNA; note = unclassified Sapelovirus sequence
ttgaaatgggtgtggggtacatgcgtattacggtacgcatgtattccacactcatttcccccctccacccttaaggtggttgtatccacataccctaccctcccttccacacaggacggacttttggacttggaccttcggcaagcacatatggtatgattactggatacaccttgaatggcagtagcgtggcgagctatggaaaaatcgcaattgtcgatagccatgttagtgacgcgcttcggcgtgctcctttggtgattcggcgactggttacaggagagtaggcagtgagctatgggcaaacctctgcagtattactcagagggaatgtgcaattgagacttgacgagcgtctctttgagatgtggcgcatgctcttggcattaccatagtgagcttccaggttgggaaacctggactgggcctatactacctgatagggtcgcggctggccgcctgtaactagtatagtcagttgaaaccccccc

SEQ ID NO: 517 - DNA, 491 bp, unidentified
  source 1..491: mol_type = unassigned DNA; note = unclassified Enterovirus sequence
aaagtgaccaataggcggcaatcacccagattgtcaaaggtcaagcacttctgtttccccggtcgaagctgatatgctccaacagggcaaaaacagctgagatcgttatccgcaaagtgcctacgcaaagcctagtaacattttcgaagttatatggttggtcgctcagccaaaccccatggtagacctggcagatgaggctagaaataccccactggtgacagtgttctagcctgcgtggctgcctgcacaccctctgggtgtgaagccatataatagacaaggtgtgaagagccccgtgtgctcactttgagtcctccggcccctgaatgtggctaaccttaaccctgcagctagtgcatgcaatccagcatgtatctagtcgtaatgagtaattgcgggatgggaccaactactttgggtgtccgtgtttcctttttatccttattgattgcttatggtgacaatatatagtactatatattgacacc

SEQ ID NO: 518 - DNA, 492 bp, Avisivirus B
  source 1..492: mol_type = genomic DNA
caccccctactgccctaacccccaaagttagttatagggtggctccctacccttactccacggggtaagccctaacccggttgaatctcaagatcagccttagcgaggactattagtaccgctcaaaccctttgcctgtagtgcccaggggtcacagaggggtgaccctctccctggggcccaaaaggctaggtggcaagacagggtccaagtgaggggctactctaagtagccccaagctgaacatcctgtctgaagccacccttgcagggccaggtttgattggggaaactagacaccagctttgtcctgggattggggggatatcgagttagtccaggaggtgcgagtagatgcccccgaaggtaccccaggcacatctgggatctgatcgggggcccgtgactatacaataggtaaaccgggttaaaaaacatgaaagcgcctctctctttcctacttcttttattgactggtgacaaaaatagcagt

SEQ ID NO: 519 - DNA, 493 bp, Tremovirus A
  source 1..493: mol_type = genomic DNA
tttgaaagaggcctccggggtatccggaggtcctttttcgacccaacccatactggggggtgtgtggggccgtatttggagtgcacggtatatatgcattcccgcatggcaagggcgtgccaccttgccccttgacgcatggtatgtgtcatcatttgccttggttaaaccccataaaacgaggcgccacgtgccgaaaatccctttgcgtttcacagaaccatcctaaccatgggtgtagtatgggaatcgtgtatgggggtgattaggatctctcgtagagggataggtgtgtcattcaaatccagggagtactctggctctgacattgggacatttgatgtaaccggacctggttcagtatccgggttgtcctgtattgttacggtgtatccgtcttgacacactgaaagggtattcttgggtaatcccttcctactgcctgatagggcggcgtgcccggccacgagagattaagggtagcaatttaaac

SEQ ID NO: 520 - DNA, 494 bp, unidentified
  source 1..494: mol_type = unassigned DNA; note = unclassified Picornaviridae sequence
tttgcatcagttcgcccctcccctcaccatacctttttcccctctttaggactgatacttggttatgatgagcagaggatttcgcaagttatgcttcttgataaaaagtaattcacgaatcatgggattatagcctggaagtgaacactcatgtggcaagtgggttagtagctctccatgttcccatgtgcagtggactgacaacagtgagttcggggttgtgtagtaaagggaaagtattacttacccgcacctgctatacgtggtgtacgtaggatacgagttagtagtgcttagcaactttaaactggtgctgaaatattgcaaggtcactgaagttgtgaacgcgaacgctccgccactgccatgtatagcgtgcaatgcataaatggtgcactacatgatacgagggaatgggaaaccctccatggccgaatgcagggtgacagcctgccggcggatgcctgttgttagtataatccgttgtttgccac

SEQ ID NO: 521 - DNA, 494 bp, Tremovirus A
  source 1..494: mol_type = genomic DNA
tttgaaagaggcctccggagtgtccggaggctctctttcgacccaacccatactggggggtgtgtgggaccgtacctggagtgcacggtatatatgcattcccgcatggcaagggcgtgctaccttgccccttgacgcatggtatgcgttatcatttgccttggttaagccccatagaaacgaggcgtcacgtgccgaaaatccctttgcgtttcacagaaccatcctaaccatgggtgtagtatgggaatcgtgtatggggatgattaggatctctcgtagagggataggtgtgccattcaaatccagggagtactctggctctaacattggcacatttgatgtaaccgaacctggttcagtatccgggttgtcctgtattgttacggtgtatctgtcttggcacactcacagggtatttttgggtaatcctttcctactatctgatagggtggcgtgcccggccacgagagattaagggtagcaatttaaac

SEQ ID NO: 522 - DNA, 494 bp, unidentified
  source 1..494: mol_type = unassigned DNA; note = unclassified Enterovirus sequence
atcgagaaacctagtaccaccatgaaggttgcgcagcgtttcgctccgcacaaccccagtgtagatcaggccgatgagtcaccgcgttccccacgggtgaccgtggcggtggctgcgttggcggcctgcccatggggcaacccatgggacgcttcaatactgacatggtgtgaagagtctattgagctaattggtagtcctccggcccctgaatgcggctaatcccaactgcggagcagatacccacacgccagtgggcagtctgtcgtaatgggcaactctgcagcggaaccgactactttgggtgtccgtgtttccttttattttttgtactggctgcttatggtgacaattgagagattgttaccatatagctattgggttggccatccggtgtcaaacagagcgatcatctatttgtttgttggattcatacccttaaaccttaaagccctaaacactcttaattttgtgttgcaactgaactcagcaaa

SEQ ID NO: 523 - DNA, 496 bp, unidentified
  source 1..496: mol_type = unassigned DNA; note = unclassified Picornaviridae sequence
taagcggaaagcattcttgtcccccggtcagtaacctataggctgttcccacggctgaaagggtgaacatccgttacccgcctcagtacttcgagaaacctagtacgcctgatgattccaaattggtatgatccggtcaaccccagaccagaaactgtggatgggggtcaccattcctagtatggcaacatacaggtgtccccgcgtgtgtcacaggcccttacgggtgccatttcggatgagtctggccgaagagtctattgagctactgttgatacctccggccccctgaatgcggctaatctcaaccccggagccactgggtggtgaaccaaccacttggtggtcgtaatgagcaattctgggacggaaccgactactttggggtgtccgtgtttcttttgttcatattaaactgttttatggtcacaacacaacttggtacgatttgtgattattcactgctcacttgtcacagtaaatatacacaatcatc

SEQ ID NO: 524 - DNA, 496 bp, Enterovirus B
  source 1..496: mol_type = genomic DNA
tacttcgagaaacccagtaccaccatgaaggttgcgcagtgtttcgctccgcacaaccccagtgtagatcaggtcgatgagccaccgcattccccacgggcgaccgtggcggtggctgcgttggcggcctgcccatggagcaatccatgggacgcttcaatactgacatggtgtgaagagtctattgagctaattggtagtcctccggcccctgaatgcggataatcctaactgcggagcagacgctagcaaaccagcgagtagtctgtcgtaacgggcaactctgcagcggaaccgactactttgggtgtccgtgtttccttttattctcatactggctgcttatggtgacaattgaagaattgttgccatatagctattggattggccatccagtgacaaatagagcaattgtctatttatttgtcggttttgtaccgttaaactacaaagttctaaacactctcaatcttgttttatcactcaatacatcaaa

SEQ ID NO: 525 - DNA, 498 bp, Pegivirus A
  source 1..498: mol_type = genomic DNA
gcttcggcgcctagccgaaaccgacaccctgttcgaaatctttccgaaacatagagcggttgtggggaaactggacgaaagccagcggatggggggtgacagggtaggcaggtcgtaaatcccggcctccctggtacctggtataagtctggtggaaccatagcttaactgtgtggactttggacgtaggcagagtgcacggtccacaggtgacgcctataccggtgtgaataataggccgactcgagcggagtcgttaaactgaggacccattctaggatcacaacttggctgccgtacggtgacgccgctaaagtcacagtgggttaagtccggcgggttgacaacaccaggcaggcggggggacgctactgttgcgccctgtgagttccctagttgggtaggcatggggggacccagctccgcggcgcgctacagccggggtaggccaaaaatccgaaaggtgaggccgggtcccatttttcctttttgagtctc

SEQ ID NO: 526 - DNA, 498 bp, unidentified
  source 1..498: mol_type = unassigned DNA; note = unclassified Pestivirus sequence
gtataagggttgggaaccttgtaccaagctacctctgccattcagtatttgggagtagaagtagatgtgtttacaaactcacacgtgtgggggcggggatagactgtgccagcggtcgtgtaccagcacctacgcatacgtgtggactgcgaaccaggagagcacctaggtctgacaagctgtgagaacacagtagtcgtcagtgagtcagctggtaaggatcacccacctggatactcacgtggacgagggagtttcccagtcagaaacctacaccagaggaggggtcctctggagacatggatggtctgagtaacagactatctactggggtgtgctgcctgacagggtctcggctgatagcctggctagcagtataaaaatcagttgaattggcatatgagttgtgaacatctagtaaacaatgaaagacaaaaacaaaaaatgagcataataaaaaaattgtacaatccactactcaggtgtggctgcagactt

SEQ ID NO: 527 - DNA, 500 bp, unidentified
  source 1..500: mol_type = unassigned DNA; note = unclassified sequence
tttcaaatcggactccggtagttataccggagcccggtttggacgcttgggccgcgttaacagccccccacccctttcccactgactgatttctcggattggactcatttgcattgctaactctgattctggatttccccgtttatgtcgtcgcggtcggaagtgcacgtacttcgacgttgatctgatggcgtttgtttccaggggggaggtggcggcagaaacgcccccgccgtaaacttcggcgggccacgcctgtcaagccactccctggggccgagcgcctgaggtgatacagagagataagcacactgggcgctgacaacgcccgggacctcagtgagaagagcagtagggccgtgtttatgggactccattggatatcccccgcttgtcggaactcacggctactccgggttgggaagcccgcgactggtactgtactgggtgatagcctggtgccttccctctcactgttgtatgaaggctgaaaaccccct

SEQ ID NO: 528 - DNA, 501 bp, Pegivirus C
  source 1..501: mol_type = genomic DNA
accgacgcctatcaaagtaggcaataaggcctcgcgccgaaccggcgaccggccaaaaggtggtggatgggtgatgccagggttggtaggtcgtaaatcccggtcatcttggtagccactataggtgggtcttaaggggaggctacagtccctctagtgcctgtggagagaaagcgcacggtccacaggtgttggtcctaccggtgtgaataaggacccgacgtcaggctcgtcgttaaaccgagcccgttaaccccctgggcaaacgacgcccacgtacggcccacgtcgcccttcaatgtctctcttgaccaataggcaaagccggcgagttggcaagggccagtgggggccgggggcagggagaaggactccctgtcctgcccttcccgggggtgcgggaaatgcatggggccacccagctccgcggcggcctgcagccggggtagcccaagagccttcgggtgagggcgggtggcatttttctttcctataccgatc

SEQ ID NO: 529 - DNA, 502 bp, unidentified
  source 1..502: mol_type = unassigned DNA; note = unclassified Enterovirus sequence
ctttgtgtttgagggccaataggtgagtggtaaaccataccactaaaaggtcaagcacttctgtttccccggtgtgcagggaataagctctacccgggctgaagccttaaacatcgttatccgcacaattactacgcaaagcttagtagtaccttgaaagctccttgactggtcgctccgctagattacccatctagtagacctggcagatgaggctggatactccccactggcgacagtgatccagcctgcgtggttgcctgcacacctggtaacaggtgtgaagccaatgagtagacagggtgtgaagagccccgtgtgctaattgtgagtcctccggcccctgaatgcggctaatctaaccccacagctaatgcatacaaaccagtatgtatttagtcgtaatgggcaactgtgggacggaaccgactactttgggtgtccgtgtttcctttattctcattattttgcttatggtgacaaatacgatatatttgtcatc

SEQ ID NO: 530 - DNA, 506 bp, Anativirus B
  source 1..506: mol_type = genomic DNA
gtgtgtcatttctcccctccccctcccaaaccttttccccctctaatcggattgattaacccggttaaagatgattaatggtttgtgagttgatatgatggcccggcattgaatccgggaattcttaagtaatggaattgcatccaatatgaaagtgagtgtggcaagctcacaagtagtacttggctctgcccattatttgaggaccaactcttcttgactacaatgtgtttaaagtaaactggaccacattgtgtatccagacaactccatttgataatgtacgctggaaacgttttcagtgcatagggtcctaaagtggtgctgaaatattgcaagctcaatgggatactgaacgctgaaaaccgccgctgttatcatatgggcccctagtgggtaaatgttggctttaggcatatactgcttgggaatgcagtactggttgtagacagggtgatagcctaccggctggcgtagttgagttggtatagccagttgattgccat

SEQ ID NO: 531 - DNA, 506 bp, Aquamavirus A
  source 1..506: mol_type = genomic DNA
ttcaaaggtggcgggagagttggcctcacgctgtttagcgtgagagctggctctcctgccccttcccctgagccggggatcttggctcattcccctcttttctatcctccctcattggactttacggatgacccggcataaacttgacaaccgatgttggatttcccttgtggctgtgatggaggacataccctcgggtgtagttgtgtgcgtgtcgctctgcgactcgagcttcaaagtggtgctgaaatattgcaagcgtcgttgctcgattaacggagtggtacaatcctatgaacccaagtgcattcatgcgaaagccccggaggggtgagtagcatggactcgaatcagaagagctggagctcgcttggtacggcacgtagcattgctttgcctaaagaccaagggggtatggctataggtgggggcctatagcttgtccagtgctggttgacagactcgtgctacgcgtctggttcgagtataagtagctgcaactcact

SEQ ID NO: 532 - DNA, 508 bp, unidentified
  source 1..508: mol_type = unassigned DNA; note = unclassified Crohivirus sequence
gtataagagacaggtgtttgccttgtcttcggactggcatcttgggaccaaccccccttttccccagccatgggttaaatggcaataaaggacgtaacaactttgtaaccattaagctttgtaattttgtaaccactaagctttgtgcacataatgtaaccatcaagcttgttagtcccagcaggaggtttgcatgcttgtagccgaaatggggctcgaccccccatagtaggatacttgattttgcattccattgtggacctgcaaactctacacatagaggctttgtcttgcatctaaacacctgagtacagtgtgtacctagaccctatagtacgggaggaccgtttgtttcctcaataaccctacataataggctaggtgggcatgcccaatttgcaagatcccagactgggggtcggtctgggcagggttagatccctgttagctactgcctgatagggtggtgctcaaccatgtgtagtttaaattgagctgttcatatacc

SEQ ID NO: 533 - DNA, 509 bp, Aquamavirus A
  source 1..509: mol_type = genomic DNA
gctcaggggaaggggtagggtggctggacgcccgccatacaggcgggctccaaccaccccaccccttcccctgagccggggttctttggctcatcccccttctttatctatctccctcatgtacggattaaactggcataaatttgatatcgatgttggattatcccttaaatggttttggtgggggacatagccccgggcgacctctagtcggacatgctggctttcctagattcaaagtggtgctgaaatattgcaagcgtcgtttctaggtaggttggtatgaatggctttagtgaacccaactgcaatcatttgaacgcccctgaggggttagtaaaatggactcacagctggagagctggagtgagtgcaccacggtacatagcattgctctacctatagggtgtacttgcatggctaagggtgggggcccttagcttgtccagtgctgggtgacagcctcgtgccacgcgctggcctgtgagtataagtggctgaatatcgct

SEQ ID NO: 534 - DNA, 510 bp, Pegivirus C
  source 1..510: mol_type = genomic DNA
aagccccagaaaccgacgccccacggaatagtgggactaaggcccaatcaaagccaggaattccggccgaaagggtgtggatggtggtgacagggttggcaggtcgtaaatcccggccattctggtagcacctataggtgggttgaactggcggcgagaagtccctaatacctcttgcacgtgttgcgcacggtccacaggattggtctttccggtgtgaatagagacccgacgccagtcacgtcgttaaacagagtgcctttccccatcgcaacgccggccctcgtacgggaacgtcgcccttttaataccactctggtcagtagcatgtgcggcgagttggcaatcccagggggcgggcggggcgtacacggtaggaccgtgccgcctgcgttgtcggggtctggtattaatgcatggggccacccagctccgcggcggactgcagccggggtagaccaagatccttcgggtgaggtcgggtggcatctttctttctttgacatcatg

SEQ ID NO: 535 - DNA, 512 bp, Bopivirus A
  source 1..512: mol_type = genomic DNA
ttttctcccctccccctccacttaccttttccccctcttgtaacgctagaagtttgtgcaaatcgcctgtagggtactgcaatccagcagtgcataggcaaagcttttcttgttaccccaccccacattatactgaggaggatggtgaaattgtgttagtatgggttagtagcggtgacccgggtaaccccaacccagaaactcacggatgagatgaacaggaccccacatggtaacgtgtgtgttcgtctgccccgcaaggtgaggccgtgagagctccgcacgcgaaaaccttgaaaacccaaaagtaccttgagctcttcgctattttgtgtttcctccaggaccctgaatgcggctaaacccaacccgcgatccgcacgtagcaacccagctagagtgtggtcgtaatgcgcaagttgcgggcggtaccgactactttggtgttcctgtgtttcctttattttattttaaatttttatggtgacaacagctggaaaataagagtgatc

SEQ ID NO: 536 - DNA, 512 bp, Bopivirus A
  source 1..512: mol_type = genomic DNA
ttttctcccctccccctccccttaccttttccccctctagtaacgttagaagctagcactaaccgcctgtagggtactgcaatccagcagtgcataggcaaagtctttcttgtcaccccaaccccacactatactgaggaggatgacgaaatttgactagtatgggttagtaacggtgatccgggtgaccctgacccagaaactcacggatgaggtgaacagaaccccgcacggtaacgtgtgtgttcgcctgccccgcaaggtgaggccgtgagagctttgcacgtaaaacccctgaaagtccgagagtagtttgagctcttcgctattttgtgtttcctccaggaccctgaatgcggctaaacctaacccgcgatccacacatggcaatccagctagggtgtggtcgtaatgcgcaagttgcggacggtaccgactactttggtgttcctgtgtttcttttattttattttaaatttttatggtgacagcaatccagaaaagagataaac

SEQ ID NO: 537 - DNA, 512 bp, unidentified
  source 1..512: mol_type = unassigned DNA; note = unclassified Picornaviridae sequence
gagtgcttgatttgtaatggaaaaagcaaagcttatccaaatacaaatcaagcacccgtttggggagttcaccgtccccttaattcataggtgattggactgattttgatactgatttaggatttcctttgacctggattgggataaagacttaaacatgttgaataaggatggattagctcgatccattaggtgggtctcatatataccaccacagagccggagaataaccttacaaaggatgttagtaattaaatacacttgttgggtggcgtaactgcagaccatgtggacatgggcctatgttgtggtaacacaatcccatgtggccaaaagcctagtggataacaatccacccatggtaatccaatttggacactcaacatttaagtgtttagtgaaagtatctgatggggtgacactctgtgagaacccagggagtagatgcccaggaggtacccttttaaaggatctgacttggggcctagacacttaatgctaggttaaaaact

SEQ ID NO: 538 - DNA, 513 bp, Pegivirus A
  source 1..513: mol_type = genomic DNA
cctccccctcccccgaccggagcggaactccggaaaaccgacacctagtgaacatttcggatcattggcgcggatctggtgttaatctggacgaaagcccgtggacgggcggtgacagggttggcaggtcgtaaatcccggccgccctggtagcgggtataagtctggaggaaaccagtgaaccctcagtgtgaagtcagactaacgaaagtgcacggtccacaggagacgccgattccggtgtgaataatcggccgactcgagcggagtcgttaaactgaggacctccttggggatggcaacttggcttgcgtacgggaacgccgcaaaagtcacagtgggttaagtccggcgggttgacaatcccagcaaggcgggggggcactattgttgtgccctgccagttcccccaagggggtaggcatggggggacccagctccgcggcgcgctacagccggggtagcccaaaatccttcgggtgagggcgggtcccatgtcccttttttgtatgc

SEQ ID NO: 539 - DNA, 513 bp, Pegivirus C
  source 1..513: mol_type = genomic DNA
cccccccccggcactgggtgcaagccccagaaaccgacgcctactgaagtagacgtaatggtccagcgccgaactggcgaccggccaaaaggtggtggatgggtgatgacagggttggtaggtcgtaaatcccggtcatcctggtagccactataggtgggtcttaaagggaggttatggtccctcttgcgcatatggagggaaagcgcacggtccacaggtgttggtcctaccggtgtaataaggacccggcgctaggcacgccgttaaaccgagcccgttactcccctgggcaaacgacgcccatgtacggtccacgtcgcccttcaatgtctctcttgaccaataggcttagccggcgagttgacaaggaccagtgggggccccccccgttgcccttcccggggaggcgggaaatgcatggggccacccagctccgcggcggcctacagccggggtagcccaagagccttcgggtgagggcgggtggcatttttctttcctgtaccgatc

SEQ ID NO: 540 - DNA, 513 bp, unidentified
  source 1..513: mol_type = unassigned DNA; note = unclassified Picornaviridae sequence
gttaggcatagacacctacgaggcccaggacatacgcaatttcaattgcgaaaatgccctgggccccgtaggtgtctatgcctaacttcaacgagtagtggccgtaagccactttctttctaaactctctaactctacattttcctccttgtttgcaggttttatggtcttaaacttggaacgcgaatgacgatgaaactggaacaactttctgattgggctacccgccttccaaccggcaatggtgtaaaggtaaaagggtagattgctaccacttatggcatgtgaactggattaccaatgtagcatggaccctctaggtggggaatggcaatcgactatcctagctagattggaccactcatgggctttgggcgcgaattacgcagaacctaccgacaacatgtctggaaaccccatgagtggaggggaattgggaaaacccctttgatccaaactgcctgatagggtcgcggctggccgagttaggattagtagtcagtagaatttaac

SEQ ID NO: 541 - DNA, 516 bp, Rosavirus A
  source 1..516: mol_type = genomic DNA
tatgcatcactggacggcctaacctcggtcgtggcttcttgccgatttcagcgctaccaggctttctggtctcgccaggcgttgattagtaggtgcactgtctaagtgaagacagcagtgctctctgtgaaaagttgatgacactcttcaggtttgtagcgatcactcaaggctagcggatttccccgtgtggtaacacacgcctctaggcccagaaggcacggtgttgacagcaccccttgagtggctggtcttccccaccagcacctgatttgtggattcttcctagtaacggacaagcatggctgctcttaagcattcagtgcgtccggggctgaaggatgcccagaaggtacccgcaggtaacgataagctcactgtggatctgatctggggctgcgggctgggtgtctttccacccagccaaaacccgtaaaacggtagtcgcagttaaaaaacgtctaggccccacccccccagggatggggggttcccttaaaccctcacaagttcaac

SEQ ID NO: 542 - DNA, 517 bp, unidentified
  source 1..517: mol_type = unassigned DNA; note = unclassified Crohivirus sequence
gttgaagtccatttcttgcttgcccccgatgaatcctgttaaggcctcacggccctaagggtgaaactcggttatcccctcctgtacttcgagaagattagtacaacactatgaaatctacatcttgtgatccgggataaccccaatcccagaaacctgtgatgggcgtcaccacccctcttatggtaacataagggtgtcgccgcgttggcacaggaccctttgggctggatgtttttagtaatggtgtcgaaggtcctattgagctacaggagtttcctccgccctggtgaatgcggctaatcttatccctgagcctaaggttgcgatccagcaacttgatggtcgtaatgcgtaagttgggggcggaaccgactactttccagaaggcgtgtttctttgttttgtctgttactatggtgcatgatatagatattgaatatttgatctttttgagctgtttcttatcttattgctacatcctttcaggtgttggatttacattttggttaataag

SEQ ID NO: 543 - DNA, 518 bp, Foot-and-mouth disease virus
  source 1..518: mol_type = genomic DNA
gacgtcagcgcacgaaacgcgccgccacttcggaacactcgtacaaacacgatcacacgcgggtttcccaactggcatcctcgtgcaacctggagtttcgcctggtctttccaggtctggagagatgacacgttgtactggaaccaactccacgatcggtctactggcgggtgctagtaacgacattgttgcttcgtagcggagcatgcaagccgtgggaactcccccctggcaacagggacccacggggccaaaagccacgttctccgaaccttgcatgtgtgcaaccccagcacggtaacactgttgtgaaacacgctttaaggtaacactgagactggtacttggtttctggggacaggctaaggatgccctccaggtaccctgaggtaacaagcgacactcgggatctgaggaggggactgggacttctataaaagtgcccagtttaaaaagcttctatgcctgaataggtgaccggaggccggcaccttttccttttacacacaaaccactac

SEQ ID NO: 544 - DNA, 518 bp, Cardiovirus A
  source 1..518: mol_type = genomic DNA
ccggtgtgcgtttgtatacatgttacttccaccacgttgtcgtcttttgacaacgtgagggcccggaacctggccctgtcttcttggcgagtattcctaggagtctttctcctctcgacaaaggaatacaaggtctgttgaatgtcgtgaaggaagcagttcctctggaagcttcttgaagacaagcaacgtctgtagcgaccctttgcaggcagcggaatcccccacctggtaacaggtgcctctgcggccgaaagccacgtgtataagatacacctgcaaaggcggcacaaccccagtgccacgttgtgagttggatagttgtggaaagagtcaaatggctctcctcaagcgtattcaacaaggggctgaaggatgcccagaaggtactccactggctggaatctgatctggggcctcggtgcacgtgctatacacgtgttgagtcgaggttaaaaaacgtctaggccccccgaaccacggggacgtggttttcctttgaaaaccacgaagataat

SEQ ID NO: 545 - DNA, 520 bp, Foot-and-mouth disease virus
  source 1..520: mol_type = genomic DNA
gggacgtcagcgcacgaaacgcgctgttgctctttgcattcttgtacaaacacgatctcacgcaggaatcttagaccaacccaacccgtgcaactgcaagtttcacccggtctttccgggcctagagagacgaacagctgtactgagactgactccacgatcggtctactagcgggtgctagtaacactcactttgcttcgtagcggagcacatgagcggtgggaacccccccatggtaacatggacccaccgggccaaaagccacgcctcacggcctcatgtgtgtgcaaccccagcacggcaacttgtttgtgaaacacatcttaaggtaacactgagactggtactcggtttctggagacaggctaaggatgcccttcaggtaccccgaggtaacaagagacactcgggatctgagaaggggaccaggagttctttaaaactgcttggtttaaaaagcttctatgcctgaataggtgaccggaggccggcaccttttcctttatccacaacaacttt

SEQ ID NO: 546 - DNA, 520 bp, Enterovirus C
  source 1..520: mol_type = genomic DNA
ccagtgtggtttcgagcaagcacttctgtttccccggccgcgccctatatgctgtgcaaacggcagaaaggggcaacgtcgttacccgcttgcatactacgggaaacccagtaccaccattgattgtattgagagttgcgttcagcgcctctcccccctggcgtagctcgggccgatgaggctcagaagcccccacaggtgactgtgtctgagcctgcgttggcggcctgcccgcacctcttggtgtgggacgcttaatacatgacatggtgcgaagagtctactgtgctatgtaagattcctccggcccctgaatgtggataatcctaaccactgatcccatgtgcgcaaaccagcgtgcggtgggtcgtaacgcgcaagtcggtggcggaaccaactactttgggtgtccgtgtttcctttattacctattgaatgtttatggtgacaattgcttgattcagttgttgccatttattacattcgttgacctagactgaaaaccaactgaaccattaca

SEQ ID NO: 547 - DNA, 522 bp, unidentified
  source 1..522: mol_type = unassigned DNA; note = unclassified sequence
ccgggtataacccggagttttggggcaggtccaagccccacataggaacatacgatccacggatcgtgtgttcttttatgctttctaaccttaccctttgtaaccattacgctttacgccgcatggtgtttggcggcaccatgacgtggacaagaggttacgccattacgatatgtaccctccccttttggggagagaccgaccaattatggtacagtatccaactgtattgtggtcaagtacttctgtttccccggtgatgcgggataggctgtacccacggccaaaacctgctgatccgttacccgactcacatctacgaggaggctagtaaaaggcatgaagttcaagagtatgatccaaccagatccccactggtaaactagtgatgagggttcccgttccgaacatggcaacatgtgggttccctgcgttggcactaggccccttccgaggggtgctctgaagatggattgttgatgaagaccaatttgtgcatgtgtttatcctccggccctctga

SEQ ID NO: 548 - DNA, 523 bp, Pegivirus A
  source 1..523: mol_type = genomic DNA
ggggaatctcacccccccccgtccggttccggaagaatcggaaaccgacaccctgaccaatcattcttgatcatagagtggatgttagtgaaagccagacgaaagccggcggatgggtggtgacagggttggtaggtcgtaaatcccggccaccctggtacccggtataagttgggcggaagctgactgaagctccgtgctcttttctgtgcgttcttggtgcacggtccacaggtgacgcctataccggtgtgaataataggccgactcgagcggagtcgttaaactgagaacctccatacggatggcaacttggcttgcgtacggggacgccgctaaagtcacagtgggttaagtccggcgggttgacaaccccagcaaggcgagggggtcctattgttggactctgccagttcccggtggaggtaggcatggggtggcccagctccgcggcgcgctacagccggggtagcccaaaatccgaaaggtgagggcgggccacatgtccgaaatttagtcaagc

SEQ ID NO: 549 - DNA, 523 bp, Enterovirus B
  source 1..523: mol_type = genomic DNA
ggaaaaaacgtccgttatccggccaattacttcaagaaacccagtaccaccatgaaggttgcgcagcgtttcgctccgcacaaccccagtgtagatcaggtcgatgagtcaccgcattcctcacgggcgaccgtggcggtggctgcgctggcggcctgcccatggggcaacccatgggacgcttcaatactgacatggtgcgaagagtcaattgagctaattggtagtcctccggcccctgaatgcggctaatcctaactgtggagcagattcccgcatgccagcgggtggtctgtcgtaacgggcaactctgcagcggaaccgactactttgggtgaccgtgtttccttttattcctatattggctgcttatggtgacagttgagagattgttaccatatagctattggattggccatccggtgacaaacagagcaattatctaccaatttatcggttttgtaccattgaatttcaacgcattcaaaaccctcaactttattttgactcttaatacagcaaa

SEQ ID NO: 550 - DNA, 524 bp, Pegivirus C
  source 1..524: mol_type = genomic DNA
cactgggtgcaagccccagaaaccgacgcctatctaagtagacgcaatgactcggcgccgacccggcgaccggccaaaaggtggtggatgggtgatgccagggttggtaagtcgtaaatcccggtcatcttggtagccactataggtgggtcttaagggaaggttaagattcctcttgtgcctgtggcgagacagcgcacggtccacaggtgttggccctaccggtgtgaataagggcccgacgtcaggctcgtcgttaaaccgagaccgacacccacctgggcaaacgacgcccacgtacggtccacgtcgcccttcaatgtctctcttgaccaataggctttgccggcgagttgacaaggaccagtgggggccggggacgggggggagggacccccccgccccgcccttcccggtgggacgggaaatgcatggggccacccagctccgcggcggcctgcagccggggtagcccaagagccttcgggtgagggcgggtggcatttttcctttctgtactaatc

SEQ ID NO: 551 - DNA, 524 bp, Limnipivirus B
  source 1..524: mol_type = genomic DNA
agctacaggaaagagagagataatcacagcacataaatacaactacagaagagagcctttccctgagcactatttacagcaaaccacgctgggaaaagtggtagcatgacccacttacgggttacttagtataggattttaatatcttcgattctttattttcttttcttaactaagttcgcccggactttatccgtgttttattttagtttaagcaaaattgagtaactaagtttttaacctgccaaatggtgagaagtaactctgtgaaaataccatttgtgcatgaaattgtcttgaaaactcttaggcttttggggggtcccactgctgtttggaggactattgacagactctattgtagttgagtagtgactaatgataacgatttgcgtattacgcaatgggctgtacccgttagatttagtatgccggggggaggggtcccactggattgcactatgtaacctgacagggcgtctgccgacgcactacaatgaggataagatcggctgtttttattt

SEQ ID NO: 552 - DNA, 527 bp, unidentified
  source 1..527: mol_type = unassigned DNA; note = Human pegivirus isolate GBV-C-ZJ-180501, complete genome.1 sequence
cccggcactgggtgcaagccccagaaaccgacgcctatttaaacagacgttatgaaccggcgccgacccggcgaccggccaaaaggtggtggatgggtgatgccagggttggtaggtcgtaaatcccggtcatcttggtagccactataggtgggtcttaagggttggtcaaggtccctctggcgcttgtggcgagaaagcgcacggtccacaggtgttggccctaccggtgtgaataagggcccgacgtcaggctcgtcgttaaaccgagcccattacccacctgggcaaacaacgcccacgtacggtccacgtcgccctacaatgtctctcttgaccaataggctttgccggcgagttgacaaggaccagtgggggctgggcgacgggggtcgtataggaagaaaaatgccacccgccctcacccgaaggttcttgggctaccccggctgcaggccgccgcggagctggggtagcccaagaaccttcgggtgagggcgggtggcatttttcttcctataccgatc

SEQ ID NO: 553 - DNA, 527 bp, Hepatovirus C
  source 1..527: mol_type = genomic DNA
ttcaaaagccccagcggggtttcattaccccgctgtggcttttggacttccctaggatggggaagtaaattaccatcctcgcgtttgccgtgcgttaacggctacttttcttctagctgtagaagtaaaattcagcatgttttatgtttgtttgtcttgtttgttatatacatttttacactcctacaaatgcacatgaagaacagtttgtagagattaacaaacgcttagctgaacctaggtggtgaatctagtagtaagataagtagaggaagctataccttaagttggttgggccctcgtgtttgctctataaacaaaaccaagtgagtagagtggatgaacagtactaaatccctgagtacagggaacctcacaggtgtgatacacttatgtctatgtgacctggttggaggttgggcgtgccctatgatactggagtgggagatcttttggggaacccacgttttcacactgcctgatagggtcttgccgagagactcacttgtttcggctgtacttgtaac

SEQ ID NO: 554 - DNA, 527 bp, unidentified
  source 1..527: mol_type = unassigned DNA; note = unclassified Picornaviridae sequence
gggctacacatgtgataccatgttctagcatggaaaatcacacatgcagcccgatttcgggcttgggaacccgttcatcaagatcccataacctttcttttcttttgtctatcccttgagtagctaggctcgcggcagggtcttgtatatacctgcactagctgccacgaagtgctacagaaaccattagtatatatttagaaaccacctgttgacgtaactgtgattgattgcctggggctgagggcatggtaacatgcaccccaggggccaaaagcctagtgggtaacaacccaccattcatgatgcccttcttggcacaacaagtggatctctctatctatagaacatgggagtatggtatggagtggtgtaaggagcacgctagtagatgccccataggtacccttctggatctgagtgggggccatgaggaggtctttccctctgaattggttaaaaaccatgaacgtttgctccgcccatctttcttctaattttatcaacttacttgaattctgatcaca

SEQ ID NO: 555 - DNA, 528 bp, unidentified
  source 1..528: mol_type = unassigned DNA; note = unclassified Hepatovirus sequence
cttttcacgctttctgtcatcttatttcctgggctctccccttgcccaaggctctggccgttgcgcccggcggggtcaactccatggttagcatggagctgtaggagtctaaattggggacgcagatgctgggaacgtcaccctgcagtgttaacttggctttcatgaagctctttgatcttctacaagaggtaggctacgggtgaaacctcttagattaatactcctatggagagatatcttgaatagggtaacagcggtggatattggtgagttcctttgggacaagaaccattcaacaccggaggactggctctcattcagtagttgcattgagtgaattgtctgtcagggctgtctctgggtttaattcctggcctctctgtgcttagggcaaaccatttcctggccttaaatggagttctgtgagaggggactcctcctttatatgctggacatattttggggccttagggttctggtttgcctctgaggtactcaggggcatttaggtttttcctcacttat

SEQ ID NO: 556 - DNA, 529 bp, Pegivirus C
  source 1..529: mol_type = genomic DNA
ccccccggcactgggtgcgagccccagaaaccgacgcctatcaaagtagacgtaatggccctgcgccgaaccggcgaccggccaaaaggtggtggatgggtgatgacagggttggtaggtcgtaaatcccggtcaccttggtagccactataggtgggtcttaaggctaggtaatggtccctcttgcgcttatggcgagaaagcgcacggtccacaggtgttggtcctaccggtgtaataaggacccggcgctaggcacgccgttaaaccgagcccgttatccccctgggcaaacgacgcccacgtacggcccacgtcgcccttcaatgtctctcttgaccaataggcttagccggcgagttgacaaaggccagtgggggccgggcgtagagggaaggaccctctgcgctgcccttcccgggggagcggtaaatgcatggggccacccagctccgcggcggcctacagccggggtagcccaagagccttcgggtgagggcgggtggcatttttctctcctataccaatc

SEQ ID NO: 557 - DNA, 529 bp, Sapelovirus B
  source 1..529: mol_type = genomic DNA
ctgacctgtttatgaacatgagcagcggcactgctccacgggctatccgtgtaagaaatattgattattcttatggatcatgatttcagggttggccgcccagtctaaaaggcaattgtggtaagctatgtaagtagttggctgttgaaaggagccaagtacatcctaggtctacgctgtgcgggccgaagtaagacttggaacaactctgagtaggcagtttttctctttagcccaacacgaccgcatactgaagagctagaggcactttggggcaaaggtaaaagcattgcttagaccgaatgttcaatgagaccttgacgagtgctgtcacagtgtcccctgatggcagtatggcgcatgctcttggcattacccatatgtgtatctatagggggggggccccctatacttagtctagtgctacctgacagggccgcggctggtcgtcggtgtgtggtataaccagtagtaatcccccatggattgctttaactccccctcctccctcaacaaaactttctctaag

SEQ ID NO: 558 - DNA, 529 bp, Cardiovirus A
  source 1..529: mol_type = genomic DNA
ttggaataagaccggtgtgcgtttgtctatatgttgcttctactacactgttgcctgtgacagtgtaagggcccagaacctggccctgtcttctcgacgagtgttcctaggggtctttcccctcttgacaaaggaatacaaggtctgttgaatgtcgtgaaggaagcagttcctctggaagcttcttgaagacaaacaacgtctgtagcgaccctttgcaggcagcggaatcccccacctggtaacaggtgcctctgcggccaaaagccacgtgtataagatacacctgcaaaggcggcacaaccccagtgccacgttgtgcgttggatagtttcggaaagagttaaacggctctccccaagcgtattcaacaaggggctgaaggatgcccagaaggtaccccactggttgggatctgatctggggccccggtgcacgtgctttacacgtgttgagccggggttaaaaaacgtctaagcccccctaaccacggggacgtggttttccttttgaaaaccacgataacaat

SEQ ID NO: 559 - DNA, 529 bp, unidentified
  source 1..529: mol_type = unassigned DNA; note = unclassified Enterovirus sequence
ccccccacctaacatatccaagtaacttagaagatttgaacactgcacaatagggactattgcaaccagcaatagtcagtgcaagcacttctgtctccccggagcggagtatagacggccaccgctgtcaaaagctcttaaccgttatccgccagttaactacgcaacagctagtaacatcttgttgttcttagggtgttcgatcaggtgagtttaccccctcactagtctggtcgatgaggctgagaaatccccacgggtgaccgtgtctcagcctgcgtggcggccagcccagcatatgctgggacgccttaagtatgacatggtgtgaagactcgcgtgtgcttagctgtgagtcctccggcccctgaatgcggctaacctaaaccccggagccttgaggcacaatccagtgcccgcaaggtcgtaatgagtaattctgggacgggaccgactactttgggtgtccgtgtttccttttatctttttgatgttcttatggttacaatatatagagtatattgtaatc

SEQ ID NO: 560 - DNA, 529 bp, unidentified
  source 1..529: mol_type = unassigned DNA; note = unclassified Enterovirus sequence
cccccctccttaatgtaacttagaagcttgaacaatcgcccaataggatatgaccactccatggttatgaagggcaagcacttctgtttccccgggtgtgtgaataggctctaacagggctgaagctgtagcactcgttatccgcgcatctactacgcagaggttagtagggccatgtcaatcctttaggcgtttcgctcagcgtgtacccccacgtagatcagggcaatggggctacacattccccatcggcgacgatggtgtagcccgcgtggtgccccgcctaggcctatttggcctaggacgccaaaggaaagacagggtgtgaagacccgagtgtgctaggtgtgagtcctccggcccctgaatgtggctaatcctaaccccgtagccatggtgtacaagccagtacaaacatggtcgtaatgggcaactatgggatggaaccaactactttgggtgtccgtgtttctctttttaccctttactgcatttatggttacaagcttgtgaatacagacttgtaatc

SEQ ID NO: 561 - DNA, 530 bp, Pegivirus A
  source 1..530: mol_type = genomic DNA
cccccggcactgggtgcaagccccagaaaccgacgcctactaaagtagacgtgatggccccgcgccgaaccggcgaccggccaaaaggtggtggatgggtgatgccagggttggtaggtcgtaaatcccggtcatcttggtagccactataggtgggtcttaaggggaggtaaaggtccctctcgcgcttacggagggaaagcgcacggtccacaggtgttggtcctaccggtgtaataaggacccggcgataggcacgccgttaaaccgagcccgtaagccccctgggctaacgacgcccacgtacggtccacgtcgcccttcaatgtctctcttgaccaataggcttagccggcgagttgacaaggaccagtgggggccgggcgagggggggaaggaccccccctcgctgcccttcccgggggttgcgggaaatgcatggggccacccagctccgcggcggcctacagccggggtagcccaagagccttcgggtgagggcgggtggcattttttttcttgtaccgatc

SEQ ID NO: 562 - DNA, 530 bp, unidentified
  source 1..530: mol_type = unassigned DNA; note = unclassified Rosavirus sequence
ggagtgtcttaagtgatcccctccagtctctttagtgcctatgcttcagagagcggtgaactgacaccgttgcttcttgcacagcccttcgtgccggtctttccggttctcgacagcgttgggcatcatggctagttaggctaagatggcaaatgatctggtgaaaagttttggattgtttggagctttgtagcgatgctagtagtgtgtgtggatctccccacgtggtaacacgtgccccacaggccaaaagccaaggtgttaaaagcacccctactagtcccagatacccccatctgggagctcctctcatgaaaaatcttagtaccctttgatttggctgttcatcaacctctctagtcaagggctgaaggatgcccggaaggtacccgcaggtaacgataagctcactgtggatctgatccggggccctggtgcgaccgtctgtccggcgtagctagggttaaaaaacgtctaggcccttccaccccaagggattggggtttccccaatcattttagaagttcact

SEQ ID NO: 563 - DNA, 530 bp, unidentified
  source 1..530: mol_type = unassigned DNA; note = unclassified Enterovirus sequence
cttccgatctcctaaagtaacttagaagttgagcacaatgaccaataggcgacatttctccagaatgtcaaaggtcaagcacttctgtttccccggtcaaggttgatatgctccaacagggcaaaaacagctgcgatcgttatccgcaaagcaactacacaaagcctagtatcacttttgagaatgtatggttggtcgctccactataaacccaatagtagacctggcagatgaggctagaagttccccactggtaacagtgttctagcctgcgtggctgcctgcgtgctccttgtgggcacgaagccatatatttgacaaggtgtgaagagccccgtgtgcttgttttgattcctccggcccctgaatgtggctaaccttaaccctgcagctagcgtgtgcaatccagcacaaagctagtcgtaatgagcaattgcgggatgggaccaactactttgggtgtccgtgtttcttgtttttcttttatacttgcttatggtgacaatatatataatatatatattggcatc

SEQ ID NO: 564 - DNA, 531 bp, Pegivirus A
  source 1..531: mol_type = genomic DNA
ccccccggcactgggtgcgagccccagaaaccgacgcctatcaaagtagacgttatggccccgcgccaaactggcgaccggccaaaaggtggtggatgggtgatgacagggttggtaggtcgtaaatcccggtcatcctggtagccactataggtgggtcttaaagggaggctacggtccctctagcgcttatggagagaaagcgcacggtccacaggtgttggtcctaccggtgtaataaggacccggcgctaggcacgccgttaaaccgagaccgttatccccctgggcaaacgacgcccatgtacggcctacgtcgcccttcaatgtctctcttgaccaataggcagttctgccggcgagttgacaagggccagtgggggccgggcggcgggggaaggacccccgtcgctgcccttcccgggggagcggtaaatgcatggggccacccagctccgcggcggcctacagccggggtagcccaagaaccttcgggtgagggcgggtggcattttctttcctataccgatc

SEQ ID NO: 565 - DNA, 531 bp, unidentified
  source 1..531: mol_type = unassigned DNA; note = unclassified Enterovirus sequence
accgcctattggtctttgtgtaaacttctaagttacgcaaaagggaaggggtggcaaatccataccactaacggtcaaacacttctgtttccccggcatgcgaggaataggctccaaaagggctgaagccactagtgtcgttatccgcattggtactacacaaagcctagtattaccttgaaaatttcttggctggtcgttccaccagataccccgctggcagacctggcagatgaggcaggacttaccccactggcgacagtggtcctgcctgcgtggctgcctgcacaccccttacggggtgtgaagcccagaaacagacagggtgtgaagagccccgtgtgctaccaatgagtcctccggcccctgaatgcggctaatcttaccccatagctgttgcacgcaaaccagcgtgtatgcagtcgtaatgagcaattgtgggatggaaccgactactttgggtgtccgtgtttctttttattcctattatttgcttatggtgacaatattgatattatcagtgttgtcatc

SEQ ID NO: 566 - DNA, 532 bp, Kunsagivirus C
  source 1..532: mol_type = genomic DNA
ttttgaacgccacctcggagcgatatccggggaccccctcccctttttccttcctaccttcttcccaaatttccctcttcccttgttattttggtttggatttcctggacatgactcggacggatctatctcatttgctttgtgtctgctccaccagtggcatggtcgaaagatcatcaacactggacgtgtactgtaatggccaaacgtgcccacaggggaaaccatgccggtcgctgtagcggcgggtggacgtggtggacccctctccctgctcataaactttgggtaggtgaagggttcaagcgacgcttgccgtgagggcgcatccggatggtgggaaccaacaaactaggctgtaatggccgacctcaggtggatgagctagggctgctgcaccaaaagggactcgattcgatatcccggcctggtagcctagtgcagtggactcgtagttgggaatctacgactggcctagtacagggtgatagccccgtttcccacgcccacctgttgtagggacacccccccc

SEQ ID NO: 567 - DNA, 532 bp, unidentified
  source 1..532: mol_type = unassigned DNA; note = unclassified Enterovirus sequence
cccctaccccttttatgtaacttagaagttttgtacacaccgaccaataggtggtatttaaccaaaataccaaaggtcaagcacttctgttaccccggtcaagattgatatgctctaccagggcaaaaacaatcgcgatcgttacccgcaaagcaactacgcaaagcctagtatcatttttgatggtgtatggttggtcgttccgctatgaacctgatagtagacctggcagatgaggctagaaaatccccactggtaacagtgttctagcctgcgtggctgcctgcgtaccccttgtgggtacgaagccgtacatttgacaaggtgtgaagagccccgtgtgcttgctttgagtcctccggcccctgaatgtggctaaccttaaccctgcagctagtgtgcacaagccagtgcatagctagtcgtaatgagcaattgcgggatgggaccaactactttgggtgtccgtgtttcttgtttttcttttatatttgcttatggtgacaatatattcaatacatatattgacacc

SEQ ID NO: 568 - DNA, 533 bp, Pegivirus C
  source 1..533: mol_type = genomic DNA
cccccccccggcactgggtgcaagccccagaaaccgacgcctactgaagtagacgtaatggtccagcgccgaactggcgaccggccaaaaggtggtggatgggtgatgacagggttggtaggtcgtaaatcccggtcatcctggtagccactataggtgggtctaaaagggaggttatggtccctcttgcgcatatggagggaaagcgcacggtccacaggtgttggtcctaccggtgtaataaggacccggcgctaggcacgccgttaaaccgagcccgttactcccctgggcaaacgacgcccacgtacggtccacgtcgcccttcaatgtctctcttgaccaataggcttagccggcgagttgacaaggaccagtgggggccgggcgggagggggaaggacccccaccgctgcccttcccggggaggcgggaaatgcatggggccacccagctccgcggcggcctacagccggggtagcccaagagccttcgggtgagggcgggtggcatttttctttcctgtaccgatc

SEQ ID NO: 569 - DNA, 533 bp, Pegivirus C
  source 1..533: mol_type = genomic DNA
cccccccacggcactgggtgcaagccccagaaaccgacgcctatctaagcaggcaataaggcctcgcgccaaaccggcgaccggccaaaaggtggtggatgggtgatgccagggttggtaggtcgtaaatcccggtcatcttggtagccactataggtgggtcttaaggggaggctacagtccctctgtcgcccgtggcgagaacgcgcacggtccacaggtgttgaccctaccggtgtgaataagggtccgacgtcaggctcgtcgttaaaccgagcccattatccccctgggcaaacgacgcccacgtacggtctacgtcgcccttcaatgtctctcttgaccaataggcaatgccggcgagttgacaaagaccagtgggggccgggggtgagggagaaggactccccaccctgcccttcccgggggagtgggaaatgcatggggccacccagctccgcggcggcctgcagccggggtagcccaagagccttcgggtgagggcgggtggcattttctttcttataccgatc

SEQ ID NO: 570 - DNA, 533 bp, unidentified
  source 1..533: mol_type = unassigned DNA; note = unclassified Picornaviridae sequence
ccttttaacgtaccgtagcacgttagctacaaacttagcatttattttattttaattctaaatttattttaatttacataatttcggctctagtaacaaaaaccttattatcgtatttatacgaacagcatttattatttaatacatatccttatttttaaattacaaatacataccccccttttaacttactataattgctaatcaccaacaaccttcaaatttgatctagtacacattttaaaattccgtttctaaattttattaacttgcatctttgattataactctgggagtctattcagacttggcaaacccttgagcagccctcaaaatttgtagaacacctcaggcgatcttttaatacatgacccctgttgtaataacgtattactgaaaacacaaacacaactgaattaacagaagacattaatacaacccaagaacaacaatttactttcgataaccaacgcacagttaagacagaaaactcttatctgttgcctccaataaattcaatttcggctcagaaa

SEQ ID NO: 571 - DNA, 534 bp, Pegivirus C
  source 1..534: mol_type = genomic DNA
cccccccccggcactgggtgcaagccccagaaaccgacgcctactaaagcaggcattaaggcctcgcgccgaaccggcgaccggccaaaaggtggtggatgggtgatgccagggttggtaggtcgtaaatcccggtcatcttggtagccactataggtgggtcttaaggggaggctacagtccctctattgcccgtggcgggaacgcgcacggtccacaggtgttggccctaccggtgtgaataagggcccgacgtcaggctcgtcgtaaaaccgagcccgttgtctccctgggcaaacgacgcccacgtacggctcacgtcgcccttcaatgtctctcttgaccaataggcttagccggcgagttgacaagagccagtgggggccgggggtgagggggatggaccccccaccctgcccttcccgggagagcgggaaatgcatggggccacccagctccgcggcggcctgcagccggggtagcccaagaaccttcgggtgagggcgggtggcattttcttttcctgtaccaatc

SEQ ID NO: 572 - DNA, 534 bp, Rhinovirus A
  source 1..534: mol_type = genomic DNA
ccaaagtagttggtcccgtcccgcatgcaacttagaagctttgcacaaagaccaatagccagtaatcatccagattacttaaggtcaagcacttctgtttccccggtcaaagttgatatgctccaccagggcaaaaacaactgcgatcgttatccgcaaggcgcctacacaaagcttagtagcattctgaaagttgtctggttggtcgttccaccattccccctggtagacctggcagatgaggctagaaactccccactggcgacagtgttctagcctgcgtggctgcctgcacaccctctgggtgtgaagccatacgatggacagggtgtgaagagccccgtgtgctcgctttgagtcctccggcccctgaatgtggctaaccttaaccctgcagctagagcacacaatccagtgtgtttctagtcgtaatgagcaattgcgggacgggaccaactactttgggtgtccgtgtttccttgttctctttgaatatctgcttatggtgacaatatatacgtatatattgacacc

SEQ ID NO: 573 - DNA, 534 bp, Enterovirus D
  source 1..534: mol_type = genomic DNA
tttcaaatcaaagctcaataggtggggcacagacgtgcgcattaagtctcaagcacctctgtttccccggtgtggttgtataaactgttcccacggttgaaaacaacctatccgttatccgctatagtacttcgagaaacctagtatcacctttgaattgttgacgcgttgcgctcagcacactaacccgtgtgtagcttgggtcgatgagtctggacgtaccccactggtgacagtggtccaggctgcgtcggcggcctactcatggtgaaaaccatgagacgctagacatgaacaaggtgtgaagagtctattgagctactatagagtcctccggcccctgaatgcggctaatcctaaccatggagcaagtgttcacaggccagtgagttgcttgtcgtaatgcgcaagtctgtggcggaaccgactactttgggtgtccgtgtttcactttttacttttatgactgcttatggtgacaatttgatattgttaccatttagcttgtcaaattaattgcaaaagatcctaagt

SEQ ID NO: 574 - DNA, 535 bp, unidentified
  source 1..535: mol_type = unassigned DNA; note = unclassified Enterovirus sequence
ccccgtttccatttacacccaaccctatgtaacttagaagcagtacactggaccaataggtggtaacaatccatgttgccaaaggtcaagcacttctgtctccccggcatgcgtggaataaacagtgcaaacggttgaaaccacaaatgtcgttatccgcgcatgaactacgcagagcctagtatctccctgaaaatctgttggttggtcgttcagctaatccccatagtagacctggcagatgaggcaagacgcaccccactggcgacagtggtcttgcctgcgtggctgcctgcacacccccccccggggtgtgaagccaattgatagacagggtgtgaagagccgagtgtgcttcatgtgagtcctccggcccctgaatgcggctaatctaaccccgcagctgtggcacacaagccagtgtgtatgcagtcgtaacgggcaactgcgggacggaaccgactactttgggtgtccgtgtttccttttattcttttatcaggtacttatggtgacaatagtgaatattgttacc

SEQ ID NO: 575 - DNA, 537 bp, Grusopivirus B
  source 1..537: mol_type = genomic DNA
gccatccgtaggttctggtaaggttccatcaactgttggggcgctagttgctatgaccgcattcacggacggatgatttatagtatcacccaatccgggcacaacttctttagccacttcttccacattactaagggctctcttgccgagtttcaacgtctagtccacgacacggaccttcctacttttctatcttcttattttctctactaaattggtatctggtactgaagatatgcggattgtgattttgtgcctgtctaaactaaccctattctagggttaggtgggtaccatatactaatggtgaacaggattacctatgtatccattagtccctatggatctggcgacccacaaactcatgttcatagagaggctaagctgagtgctcgccgaataagcattgcttcaggtgccgactattgtctggaaaccactcagtgatagctataggggggggccccgtagcatctgccttactgcctgatagggtggcggctggtccatgaacatgcagtaaccagttgacttgac

SEQ ID NO: 576 - DNA, 538 bp, unidentified
  source 1..538: mol_type = unassigned DNA; note = unclassified Rosavirus sequence
cagggagatctccatgaataatcttttccaccctctttagcgtctatgctattgaggacgggttggagccccgttgacccagcgtcagagtgtgtcggtagcaggctttctgctctcgccccatgccggccacacctcccattagtgatgtgaaggttgtaagttacatgtgaaaaggtttctaataattgagctgaatgtagcgattacctaaggtgagcggattcccccacgtggtaacacgtgcctctcaggccaaaagccaaggtgttaaaagcaccccttaggtaggccactaccccgtggcctcagttctcttagaagattcacttagtagtgtgtgcactggcaactcttaagcagagctagtgagtgggctaaggatgccctgaaggtacccgcaggtaacgttaagacactgtggatctgatcaggggctcgagtgctgaagctttacagaggtagctcgagttaaaaaacgtctatgcccctcccccacgggagtgggggttcccccacaccaattttagattgcact

SEQ ID NO: 577 - DNA, 539 bp, Bovine rhinitis A virus
  source 1..539: mol_type = genomic DNA
tttgttttgcggctttgccgttgttcgggttttacctgttttcacacagcaaaacaggccttctagtttcgtgcttaaacgagatcatgctcgaactagaactacatagctggtcactggactcataccacaccttgtggagctttatgggaaaggtggctagtgggctgtggaagtgactctgaccacatgcctctcaagtgtgggaaatcacggatcggtgtagcgacgacaacaggccttgggacaccctctccagtaatggagacccaaggggccaaaagccacgcctcgtgccctgttgttcacaaccccagtgcgacccgtgttagtacctatttgcgagaactgtgtctggacagctaaacacaaccctagtgggagactaaggatgcccaggaggtacccggaggtaacaagtgacactctggatctgacctggggagagagggcttgctttacaggcgcctctctttaaaaagcttctatgtctcatcaggcaccggaggccgggccttttccttttaaaattacactta

SEQ ID NO: 578 - DNA, 539 bp, unidentified
  source 1..539: mol_type = unassigned DNA; note = unclassified Aphthovirus sequence
tttgtttcgcggctctgccgctgttcgggttttacctgttttcacagagcaaaacaggacatctagtttcgtgcttaaacgatatcatgctcgaactagaactacaatgctggttaccgaacccgcaccacaccttgtggaactttgcggggaaagtgactagtgggctgtagaagtgactctgaccacatgccccatcagcgtgggaaaccacaaatcggtgtagcgacgacaacaggccttgggacaccctctccagtgatggagacccgaggggccaaaagccacgccttgtgccctgttgttcacaaccccagtgcgatttgtgttagtacctactcatgggaattgtgtttggacagctgaacacaaccctagtgggagactaaggatgcccaggaggtacccggaggtaacaagtgacactctggatctgacctggggagagggggcctgctgtacaggcgcccctctttaaaaaacttctatgtctcatcaggcaccggaggccgggccttttccttttaaaacaacatttt

SEQ ID NO: 579 - DNA, 540 bp, unidentified
  source 1..540: mol_type = unassigned DNA; note = unclassified Enterovirus sequence
taactttgtgtttgactcccctaacatgtaacttagaagtttgaacgataagaccaataggtgataatcatccagattatcaaaggtcaagcacttctgtttccccggtcgatgaggatatgctttacccgaggcaaaaaccttagagatcgttatccacacactgcctacacagagcctagtaccacttttgacgtaactaggttggtcgctccctgcaaacccagcagtagacctggcagatgaggctggacgttccccactggcgacagtggtccagcctgcgtggctgcctgctcaccctattgggtgagaagcctatttattgacaaggtgcgaagagccgcgtgtgctcagtgtgcttcctccggcccctgaatgtggctaaccttaaccctgcagccgctgcccataatccaatgggtttacggtcgtaacgcgtaagtgcgggatgggaccaactactttgggtgtccgtgtttcttgtttttcctttatttgcattttatggtgacaatttatggtatatagattgtcatc

SEQ ID NO: 580 - DNA, 541 bp, unidentified
  source 1..541: mol_type = unassigned DNA; note = unclassified Picornaviridae sequence
aaaatggggtgcatatagcatggttcccatgctgtatgctaccccattttcttccctccccctccaactaccttttccccctctattgtaacttagaagctaatacacatagcccaataggggcaccacacccagtggtgtatagggcaagcacttctgtttccccggctttgccgttaacccccacagtactacgcgactgttagtaggtaacgtaactagtgaaggttgatccggaggtaaaccccaacctccagaaacgtgagatgagggttcagtaaccccctatggtaacatagactgatccctgcgctggctcacgggcttcgtgcactgaatctaggtaaagttactgaagccacgagtgtgctactgtggtttcctccagcgccttgaatgcggctaaccctaaccccggagcacatgcatataatccaatatgtagtgtgtcgtaatgagtaattctgggacgggaccgactactttaggttgctgtgtttcctttatttttatatatcaatttatggtgacaagttacaag

SEQ ID NO: 581 - DNA, 541 bp, unidentified
  source 1..541: mol_type = unassigned DNA; note = unclassified Enterovirus sequence
ccagttttatctcccccccccttttatgtaacttagaagttctgcacaccgaccaatagtgaacaatcagccagattgttttaggtcaagcactcctgtttccccggtcaacgttgatatgctccaacagggcaaaaacaacagcgatcgttatccgcaaggtgcctacacagagcctagtatcatcttagaagaattgtggttggtcgctcagttgcaaacccagcaatagacctggcagatgaggctggacattccccactggtgacagtggtccagcctgcgtggctgcctgcacacctctatgaggtgtgaagccagaatttcgacaaggtgtgaagagccgcgtgtgctcaccttgagtcctccggcccctgaatgcggctaaccttaaacccgcagccatggtccacaaaccagtggatgtgtggtcgtaatgagtaattgtgggatgggaccgactactttgggtgtccgtgtttcctgtttttctttttatactgcttatggtgacaatatatataggatatatattgacacc

SEQ ID NO: 582 - DNA, 542 bp, unidentified
  source 1..542: mol_type = unassigned DNA; note = unclassified Aphthovirus sequence
acgatctttgcggctctgccgccgttcgggttttacctgttttcacagagcaaaacaggacctctagtttcgtgcttaaacgagatcatgctcgaactagaactataacgctggtcactggacccgtgccgcgccttgcggatctttgcgggaatggtggctagtgggctgtggaagtgactctaaccacacgcccctcaagtgtgggaaaacacgaactggtgtagcgacgacgataggccttgggacaccctctccagtgatggagacccaaggggccaaaagccacgccttgtgccctgtcgttcacaaccccagtgcagttcgtgccagtacctgcttttgggaagtgtgctttggacagctgaaaacagtcctagtgggagactaaggatgcccaggaggtacccggaggtaacaagtgacactctggatctgacttggggagagcgggtctgctttacagacgccactctttaaaaaacttctatgtctcgtcaggcaccggaggccgggccttttcctttaaaacaatacacttt

SEQ ID NO: 583 - DNA, 542 bp, unidentified
  source 1..542: mol_type = unassigned DNA; note = unclassified Enterovirus sequence
cccccccctccccaacccttttatgtaacttagaagtttctaaacacaagaccaatagcaggcaactctccaggttgtctaaggtcaagcactcctgtctccccggttgacgttgatatgctccaacagggcaaaaacaactgatatcgttatccgcaaagtgcctacacagagcttagtagtgctctgaaagatttttggttggtcgctcagctgcatacccagcagtagaccttgcagatgaggctggacattccccactggtaacagtggtccagcctgcgtggctgcctgcacacctctcacgaggtgtgaagccaaagattggacagggtgcgaagagccgcgtgtgctcactttgagtcctccggcccctgaatgcggctaaccttaaacccgcagccatggttcacaaaccagtgaacttatggtcgtaatgagcaattgtgggatgggaccgactactttgggtgtccgtgtttcactttttcctttattgattgcttatggtgacaatatatatatagatatatattggcatc

SEQ ID NO: 584 - DNA, 544 bp, Cardiovirus A
  source 1..544: mol_type = genomic DNA
atgtggtcgaagccacttggaataagaccggcgtgcgcttgtctatatgttacttccaccacattgccgtcttttggcaatgtgagggcccggaacctggccctgtcttcttgacgaacattcctaggggactttcccctctcgccaaaggaatgtaaggtctgttgaatgtcgtgaaggaagcagttcctctggaagcttcttgaagacaaacagcgtctgtagcgaccctttgcaggcagcggaaccccccacctggtaacaggtgcctctgcggccgaaagccacgtgtataagatacacctgcaaaggcggcacaaccccagtgccacgttgtgcgttggatagttgtggaaagagtcaaatggctttccccaagcgtattcaacaaggggctgaaggatgcccagaaggtaccccactggttgggatctgatctggggcctcggtgcaggtgctttacacctgttgagtcgaggttaaaaaacgtctaggccccccgaaccacggggacgtggttttcctagaaaaccactatgacaat

SEQ ID NO: 585 - DNA, 546 bp, Pegivirus A
  source 1..546: mol_type = genomic DNA
ggggggttgatccccccccctcggcactgggtgcaagccccagaaaccgacgcctatctaagtagacgcaatgactcggcgccgactcggcgaccggccaaaaggtggtggatgggtgatgacagggttggtaggtcgtaaatcccggtcaccttggtagccactataggtgggtcttaagagaaggttaagattcctcttgtgcctgcggcgagaccgcgcacggtccacaggtgttggccctaccggtgtgaataagggcccgacgtcaggctcgtcgttaaaccgagcccgttccccacctgggcaaacgacgcccacgtacggtccacgtcgcccttcaatgtctctcttgaccaataggcgtagccggcgagttgacaaggaccagtgggggccgggggcctggagagggactccaggtcctgcccttcccggtgggccgggaaatgcatggggccacccagctccgcggcggcctgcagccggggtagcccaagaacccttcgggtgagggcgggtggcatttctcttttctataccatc

SEQ ID NO: 586 - DNA, 548 bp, unidentified
  source 1..548: mol_type = unassigned DNA; note = unclassified Sapelovirus sequence
ggtaaactggtgttgcggcaccagtttatcctcatctcatttcccccctccccctccaaataccttttccccctcaatcggacggattctcaggcttaaacggtggaggataccccttcaaggtccgcaggtgccaagtctaaaacctgaattggaagccctttgctatcagctcatttggccgataacccctgaccgggtgtgtaggacaattgagacgctctgggtgtacgactgcctatggtagaggtagagtgtacaagtaaaggctcctttttggataccgctaggcgaatgttgagatttctcctaccctagcacttgtgcatatgactaaggggggggccccttagtttgtctactgctgcctgacagggtcgcggctggccgaccataggtagtatagtcagttgatttaacacatggattgcttcaagttccttacaacctacaaacaaaccttcaaagctcaccagtgccaccagtattggttcactgtgtgtgaacaaaaacaagtaactgtagcaaagaagagccccggccccaaa

SEQ ID NO: 587 - DNA, 548 bp, Avisivirus A
  source 1..548: mol_type = genomic DNA
ttcactcgctttccccccctctctataggggcggtcttttaattcttattaatttcctactttactatcaaatttcttctaagtagggactgaggtcacttagccctccctctcctgggctttccagggttatagaggttctaaagctaagccatgtgtcttgagctacacttagtacaaaggtttagtaatgattgtacatgccagtaaccttctagtgcccatggattaaagagtggtaacactctccatggggcccgaaaggctagtgggcatagttggcatcaaggaaggggtccccaccccaacctgaattgctggctagaagctcaccttagaagaagtgctgggtgacaacgtgtccaatcgtgaacgactgatggaaacgtgtggagatggatatgtgggggttcactgagtagatgccctgaaggagaaatctgatcaggggcccgtgactatacgctaggtaaaccgggtataaaaaccatgaaaggtggcccaaaatctcttccttttattttatttctatgttggtgacagtcaag

SEQ ID NO: 588 - DNA, 548 bp, Parechovirus A
  source 1..548: mol_type = genomic DNA
gatacactattcgaaggcatctagcaataagaagagtggatttagggcgcttaaagcatagtgcaaataatcatttctagcctgtgttttacacagggtggcagatggcgtgccataactctactagtgagataccacgcttgtggaccttatgctcacacagccatcctctagtaagtttgtaaagcgtctgatgacgtgtgggaacttattggaaacaatagtttgctgcaaagcatcctactgccagcggaataacacctggtaacaggtgcctctggggccaaaagccaaggtttaacagaccctttaggattggttcaaacctgaactattgtggaagatatttagtacctgctgatttggtagttgtgcaaacactagttgtaaggcccacgaaggatgcccagaaggtacccgtaggtaacaagtgacactatggatctgatctggggccaactatctctatcttgatgagttggttaaaaaacgtctagtgggccaaacctgggggggaccccagtttccttttattttataatgccact

SEQ ID NO: 589 - DNA, 548 bp, unidentified
  source 1..548: mol_type = unassigned DNA; note = unclassified Enterovirus sequence
catgtacgccagttttatatcccctctccccttttgtaacttagaagataagcacaaagaccaataggtggtggctatcccagtcactaaaggtcaagcacttctgtttccccggtcgatgttgatatgctccaccagggcaaaaacaacagagatcgttatccgcaaagtgcctacacaaagcctagtaacactttgaatggtatgtggttggtcgctccgctattccccatagtagacctggcagatgaggctagaaatcccccactggcgacagtgttctagcctgcgtggctgcctgcgtgtcctaacgggcacgaagccatatacttgacaaggtgtgaagagccccgtgtgctcactttgagtcctccggcccctgaatgtggctaaccctaaccctgcagctgaggcacacaacccagtgtgaactcagtcgtaatgagcaattgcgggatgggaccaactactttgggtgtccgtgtttcacttttttttcttttataatgcttatggtgacaatatataacaatttatatattggcacc

SEQ ID NO: 590 - DNA, 548 bp, unidentified
  source 1..548: mol_type = unassigned DNA; note = unclassified Enterovirus sequence
cgtgaagccagttttgccacccttccctaatatgtaacttagaagtttgagcaacaagaccaataggtgataatcatccagattatcaaaggtcaagcacttctgtttccccggtcgatgaggatatgctttacccaaggcaaaaaccttaaagatcgttatccacacactgcctacacagagcctagtaccacttttgatgtaattaggttggtcgctccctgcaaacccagcagtagacctggcagatgaggctggacattccccactggcgacagtggtccagcctgcgtggctgcctgctcaccctattgggtgagaagcctacttattgacaaggtgtgaagagccgcgtgtgctcagtgtgcttcctccggcccctgaatgtggctaaccttaaccctgcagccgctgcccataatccaatgggtctacggtcgtaacgcgtaagtgcgggatgggaccaactactttgggtgtccgtgtttcttatttttcctatatatttgcttatggtgacaatatataattacttgtatattggcacc

SEQ ID NO: 591 - DNA, 550 bp, Parechovirus A
  source 1..550: mol_type = genomic DNA
ggaccccattattcgagggcatctagcaataagaactggagattaaggacgctcaaagcatagtgtaagtattcttttctaacctgtgttttacacagggtggcagatggcgtgccataaccctattagtgagataccacacttgtggaccttatgctcacacagccatcctctagtaagtttgtaaggcgtctgatgacgtgtgggaacttgttggaaataatggtttgctgtaaagcatcctactgccagtgggtaaacacctggtaacaggtgcctctggggccgaaagccaaggtttaacagaccctttaggattggttcaaacctgaactattatggaagacacttagtacctgctgatttggtagttgtgcaaacactagttgtaaggcccacgaaggatgcccagaaggtacccttaggtaacaagtgacactatggatctgatctggggccaaccacctctatctcggtgggttggttaaaaaacgtctagtgggccaaacccaggggggaccctggtttccttttatttatcataaacaat

SEQ ID NO: 592 - DNA, 550 bp, Enterovirus A
  source 1..550: mol_type = genomic DNA
tatcagtagactgcttacgcggttgaaggagaaaacgttcgttacccggctaactacttcgggaaacctagtaacaccattgaagctgcagagtgtttcgctcagcacttcccccgtgtagatcaggtcgatgagtcactgcaaacctcacgggcgaccgtggcagtggctgcgttggcggcctgcctatggggtaacccataggacgctctaatgtggacatggtgtgaagagtctactgagctggttagtagtcctccggcccctgaatgcggctaatcctaactgtggagcgcatacttccaaaccagggagcagtgcgtcgtaatgggcaactccgcagcggaaccgactactttgggtgtccgtgtttccctttattcttatattggctgcttatggtgacaattgaagagttgttaccatatagctattggattggccatccggtgtgcaacagagcaattatatacctatttgttggatatattccactgacatttaagtcactcaatactctacagtacatcttgaatttaaacaccagaaa

SEQ ID NO: 593 - DNA, 550 bp, unidentified
  source 1..550: mol_type = unassigned DNA; note = unclassified Enterovirus sequence
ggctcttccgatctgccgcaactttctttcactctttgtttctggtaatttagaagttgacacagagtccaatagggtgcagctaatccaagactgctacggacaagcacttctgtctccccgggtgtgtgaatagactctaacagggttgaagctgtagcactcgttatccgcacaactactacgcgaatgttagtaacaccctctaagtatagtgggatttcgctccgcagataccccatctgtagattggggtaatgaggctacacataccccactggcgacagtggtgtagcctgcgtggtgccctacctggggttctttaccccaggattccactttactgacagggtgtgaaggcgctagtgtgctagttgtgagtcctccggtccctgaatgtggctaatcctaaccccgtggccattacatgtaacccaacatgcagatggtcgtaacgagtaatcacgggatggaaccaactactttgggtaaccgtgtttcctgttttactttaatgtgtgtatcttatggttacaactatagagtaacc

SEQ ID NO: 594 - DNA, 551 bp, Cardiovirus A
  source 1..551: mol_type = genomic DNA
aaatactggtcgaaaccgcttgggataagaccggggtttgttaatgtctcaatgttattctccacccaattgacgtcttttgtcaattggagggcagtgaaaccttgcccttgcttcttgcagaggattcccagtggtctttccgctctcgacaagggaattcatgatccaccaaaagttgtgaagagagcaggtcccatggaagctttctgacgactgatgatgactgtagcgaccctttgcaggcagcggacccccccacctggtgacaggtgcctctgcggccaaaagccacgtgtttaacagacacctgcaaaggcggcacaaccccagtgcctcatcaaaagtctgatgactgtggaaatagtcaaccggcttttcttaagcaaatttggtgtcggggctgaaggatgcccggaaggtaccacactggttgtgatctgatccggggccacagtacatgtgctttacacatgtagctgcggttaaaaaacgtctaggccccccgaaccacggggacgtggttttcctttgaaaaccacgattacaat

SEQ ID NO: 595 - DNA, 552 bp, Enterovirus C
  source 1..552: mol_type = genomic DNA
agactgtacccacggttgaaaacgactgatccgttatccgctttagtacttcgagaagcctattaacaccttggaatcttcgatgcgttgcgctcagcactcaaccccagagtgtagcttaggtcgatgagtctggacatacctcaccggcgacggtggtccaggctgcgttggcggcctacctgtggtccaaagccacaggacgctagttgtgaacaaggtgcgaagagcctattgagctactaaggagtcctccggcccctgaatgcggctaatcccaaccacggatcaggtgctcacgagccagtgagcggcctgtcgtaacgcgcaagtctgtggcggaaccgactactttgggtgtccgtgtttcctttttaactttatcatggctgcttatggtgacaatcgaagattgttatcataaagcgaattggattggccatccggtgaaaattaaatatatagtttacctgtttgttggatttattccactaacacaacatacttggaaattactcaactttgtgttgttaatcagacactgttaccaca

SEQ ID NO: 596 - DNA, 552 bp, unidentified
  source 1..552: mol_type = unassigned DNA; note = unclassified Enterovirus sequence
ttccggtaactttgtatgccagttttatcacccttcccccacgtaacttagaagatgtacacttggaccaataggcgataatcctccagattatctaaggtcaagcacttctgtttccccggtctaaactgatatgctccaacagggcaaaaacagtgcagatcgttatccgcaggatgcctacgcaaagcctagtaattcctttgaagatatttggttggtcgttccactattccccatagtagacctggcagatgaggctagaaactccccactggcgacagtgttctagcctgcgtggctgcctgcacaccctcttgggtgtgaagccaaatattggacaaggtgtgaagagccccgtgtgctcatcctgagtcctccggcccctgaatgtggctaaccttaaccctgcagctagtgcatgcaatccagcatgtagctagtcgtaatgagtaattgcgggatgggaccaactactttgggtgtccgtgtttcactttttaccttatatttgcttatggtgacaatatatatagtatatatattggcatc

SEQ ID NO: 597 - DNA, 553 bp, Bopivirus A
  source 1..553: mol_type = genomic DNA
ttgaaagacctcggcatatatcgttgtcacaacggtatatgtcgagatctttctccccaccccctccaattcccttttccccctcttgcaacttagaagtttgtacacacagggcaataggatacgtgatccagccaggacacgtgagctcaagcacttctgtttccccgtccccttcacgtactacgggaatgttagtaatttgtgtgcactttagtaaggttgatccgggattaaccccaaatcccagaaactggtgatgagcgttaccacccccgccgggcgaccggaaggtttcgctgcgttggcaccagggcttcggcaccagaaaaaggtaaagcaaatgaaggcgctactgtgctacgagaagtttcctccaggcccctgaatgcggctaatcctaaccagtgatccaccggtgcaaaaccatgtactaggtggtcgtaacgcgcaagtcgctggcggaaccgactactttgggtgtcctgtgtttccatattttattttattcaattttatggtgacaagagtaaagagatacagatttgcagcc

SEQ ID NO: 598 - DNA, 554 bp, unidentified
  source 1..554: mol_type = unassigned DNA; note = unclassified Enterovirus sequence
taggtaactttgtgtttgatgccagttttatcctcccctcccccatgcaacttagaagttttgcacagagaccaataggcagtaatcatccagattacttacggtcaagcacttctgtttccccggtcaaagttgatatgctccaccagggcaaaaacagctgcgatcgttatccgcaaagcgcctacgcaaagcttagtagcattctggaagttgtctggctggtcgctccaccatttcccctggtagacctggcagatgaggctagaaattccccactggcgacagtgttctagcctgcgtggctgcctgcacaccctctgggtgtgaagccatacaatggacagggtgtgaagagccccgtgtgctcgctttgagtcctccggcccctgaatgtggctaaccttaaccctgcagctagagcacacaatccagtgtgtttctagtcgtaacgagcaattgcgggatgggaccaactactttgggtgtccgtgtttccttgttttctttaaatatttgcttatggtgacaatatatacgcatatattgacacc

SEQ ID NO: 599 - DNA, 554 bp, Enterovirus C
  source 1..554: mol_type = genomic DNA
gtataggctgtactcacggctgaaaacaaacgatccgttatccgcttaggtacttcgagaagcctagtaccatcttggaatcttcgacgcgttgcgctcagcactctaccccgagtgtagcttaggctgatgagtctgggcgttccccaccggtgacggtggcccaggctgcgttggcggcctacccatggctcacgccatgggacgctagttgtgaacaaggtgtgaagagcctattgagctacctaagagtcctccggcccctgaatgcggctaatcctaaccacggagcaagtgccttcagcccagaaggtagcttgtcgtaacgcgcaagtctgtggcggaaccgactactttgggtgtcccgtgtttccccttattttcattgtggctgcttgcgggactataattgattgccatcataaagcgatttggattggccatccggagaaagttaaacacgttgtttatttattcgttggattcacctcattaacccaaattacacccagcttgatatatatagtgttgccgactagacaaaatcaccacca

SEQ ID NO: 600 - DNA, 557 bp, unidentified
  source 1..557: mol_type = unassigned DNA; note = unclassified Picornaviridae sequence
atcttattaacaatacgtattttaaaagctcttactctagtaagggtatgtggttaacataggatgtaatacccatttatggatattgcatcttgtggagttagtcctcacacatacttgtctagcacctgcattccaaggagtatttgcgaaaatcttattcttaaaaccaattcttaattttaagtacaaacctcgcagaacttacaaatcgtgctcacgccttttgttctatttagttaatttgtatttgaagaatttagacgaataatataacgtgcttattattcacgagaccctctaacgtttttaacgcattgatctcgtaaaatctaaagactgatcttacattgatattgaattaaactaaagaaacgcaccacgacagtagtgtggccttactgttaaaacaactaggcctaacgagtatttctaactgtgacgttcgatgaattattccgaactatgtactaactgatctaaatcgttgttctacaaggaacgtttcaccgcctcaatagatcctaactatagaggaaaagaaacaacaaacaaac

SEQ ID NO: 601 - DNA, 557 bp, Limnipivirus C
  source 1..557: mol_type = genomic DNA
ttgaaagagagtccatacggggaactgcggttctcctattggattctgctttcacagtttctgagcactggtaagagcttagacaaacgtttttaaaatttattttctctgcaacttttgtttgtgtttatttttatttgttaattttgtgcctaaacatttgttgcgaagtatttgattcattagcaatattcattattgtttatttagatggcattcaaagtggtgggagtatcgaacccaagcgtcgtatgttatctccttgaataattttggattttttcgacatgatcattgaaaaggataagtgtttaagaactcaaggagtgttaacaatggtgggtgacaggtgtccccatataatttgttaacatgatttggactggttatctagtaagaagaaccatcgaacgcacgagcgagcattgcttgcggggcagttaccctgcgtcgatgtaagtgtgtaccggggggtgcacatgttgattctttatggcctgatagggtgcgtcattcgcgcctagataattagtataatgcgaatggaataaatttac

SEQ ID NO: 602 - DNA, 557 bp, Foot-and-mouth disease virus
  source 1..557: mol_type = genomic DNA
acaagttcagcagttttgcccgttttcaggagaaacgggacgtcagcgcacgaaacgcgccgccactttcggaacacttgtacaaacacgatctgacgcaggtatccctaactggcattctcgtgcaacttggagtctcgcctggtctttccaggtctagggaggcaacactttgtactgaaaccaactccacaactggtctactggcgggtgctagtaacgactttgttgcttcgtagcggagcatgcgagccgcgggaactcccccctggtaacagggacccgcggggccgaaagccacgtccctcggacctcgcatgtgtgcaaccccagcacggcaacactgtagtgaaacacactttaaggtaacactgagactggtacttggtttctggggacaggctaaggatgccctccaggtaccccgaggtaacaagcgacactcgggatctgaggaggggactggggcttctataaaagcgcccagtttaaaaagcttctatgcctgaataggtgaccggaggccggcaccttttcttttgtacacgaatcacttt

SEQ ID NO: 603 - DNA, 557 bp, Enterovirus A
  source 1..557: mol_type = genomic DNA
ggataaagaggctactcacgtggttgaaggagaaaacgtccgttacccgactaactacttcgagaaacctagtagcaccattgaacctgcggagcgtttcgctcagcacttcccccgtgtagatcaggctgatgagtcactgcactcctcacgggcgaccgtggcagtggctgcgttggcggcctgcctatggggcaacccataggacgctctaaagtggacatggtgcgaagagtctattgagctagttagtagtcctccggcccctgaatgcggctaatcctaactgcggagcgcataccctcaatccagggggtggtgtgtcgtaacgggcaactctgcagcggaaccgactactttgggtgtccgtgtttccttttattcttacactggctgcttatggtgacaattaaagaattgttaccatatagctattggattggccatccggtgtgcaacagagcgatcatttactcctttgttgcttttattcccttgaacttcacttctttgagcacactaaattatatactccatctcaactccaagaagcgagt

SEQ ID NO: 604 - DNA, 558 bp, unidentified
  source 1..558: mol_type = unassigned DNA; note = unclassified Picornaviridae sequence
tttgtggggtgggctcccactttattcatagcccatctgctctgactctacctattgacccgtaactggtactcgtttgagattgactggtttaaagattttggtgtggttctttaggaaggattagctcgatcctttaggtgggacttatttttaccactacagagcacctatgattagttatagacagtggaggaaccattagtaactctttggaatgcgtaactgctaatcctgtgcccttggccaagacatagtaatatgttccaaggggcccaaaaggctagtgggtaaaaacccacctgggatggtcacttctgtgaattctgattagtgaagtttggattccgaatcctgtctagctaaaagtggggttagatggcactgagtagatgccctggaggtaccaattgatctgaccaggggcctagatacttaatgctaggttaaaaactatgaaaggtaagccatcgaaaattattttcctatttttactttgtttaactgattagtgaaatttactaatatttagctaggccttgctttattttattaagg

SEQ ID NO: 605 - DNA, 560 bp, unidentified
  source 1..560: mol_type = unassigned DNA; note = unclassified Megrivirus sequence
gggggttttccccctgggagtcttttccgttgggtctgtggcttggttgaaccatggatctggcgttagccggcatagtggtctgcggaaaagggccctcacgcggctgcggcttcgtgagctgttcttttccactagtgggccatctatgttggtataagctcaaccacccaaattttgtaacggccaattaagcttaggtcccgcacagattcgttctggcgtgctttataggaataggcggtctgactcggttttgtcttgacaactctcttgtttttccctttggctttgttttctttttaggctaacggttcagccttgttcagaacggccctatggcaagtgggcctagtaggttcttggtgttttccgttagtcgacccatccatagtgctagactaggtgggcgtgaggtaaaacgggacgcgtttttcgctatcccaatgaccggacctctgttgaatgcgctggatctccgcgtagccagaggaaaccacccgaaccctgatggcaactgacggtagtagggctcgtagtcagcctcatgttacccgtgg

SEQ ID NO: 606 - DNA, 560 bp, Hepatovirus H
  source 1..560: mol_type = genomic DNA
gtcatgtttctctttaagaacactcaattttggccataagtgagactcttgtcgaacctttcatgtcaggaccatgttagggccattatccttttccctggggcattcttcttgcccctgtttcatctttctatcatctttcttccgggctctcacaatgccaatggagcgaccgatgcgcacgtcggggttaacccatggattagccatgggctgtagctgctaaaagttgtgactcctgaagcatactatcaatggtagtagatgtaactgaaacactgaagcttctctgatcttgaaagaagggtaggctacgggtgaaacccttcaggttaatactcatattgagagatacctttggtaggttaacgttggcggataatgttgagtttaacgacaataaacattcaacgcctgtgggcgaacctcaccaatttcatgctttgaagtgaatgtgcgtagggtctctatcggagatgctatgtggatggtgccctccctggaaacaggttgtaggggtactcaggtgcacttaggtttccacattttaaagatttttc

SEQ ID NO: 607 - DNA, 560 bp, unidentified
  source 1..560: mol_type = unassigned DNA; note = unclassified Picornaviridae sequence
tgcgaatttattcgcacagtctcttttcccccatcttgtgtgtgtgatggggtaagccgcagagtaatacctactctgctgcaaacacactcactcttttctatctactttatatcatgtaataataagtagggaacatattcaattcatattgttcatctcactgaacccgcatgaaggactgcattgcatatcctggacgaagtgacgtggaatatttggacatttatggattggacaccattacgctttgtgcctctacggagatgtaaccataatcttaagtagtagtaccccagcacaagaggataaagtggcatacacgacaacgggtgttgctcgcaccttagtaatgtggatgttcacccttggagcgtgctgaaactctgtgggtaaagacacacattagtacaaatgtgggggaactcactgaaagggcatgtcccgtgtactggtgtgccggaaagtgggggtcgctttctggagaacttagtagttcttgttattgggtgatagccttgcggcggatcaactcacagttttaatccgttgttttgcat

SEQ ID NO: 608 - DNA, 560 bp, Enterovirus A
  source 1..560: mol_type = genomic DNA
tccccggactgagtatcaataggctgcttgcgcggctgaaggagaaaacgttcgttacccggccaactacttcgaaaagcctagtaccaccatcaatgaggcagagcgtttcgctcggcactaccccagtgtagatcaggctgatgagtcactgcaatccccatgggcgaccatggcagtggctgcgctggcggcctgcccatggaggaatccataggacgctctaatttggacatggtgcgaagagcctattgagctagttggtagtcctccggcccctgaatgcggctaatcctaactgcggagcgcacacccacaaaccagtgggcagtgcgtcgtaacgggcaactctgcagcggaaccgactactttgggtgtccgtgtttccttttattcctatattggctgcttatggtgacaaacgaagagttgttaccatatagctattggattggccatccggtgtgtaacagagcaattgtctatcagttcgttggttttgtaccattacattaaagtccttaacacattacatttatcttgaccctaaatacaaaagc

SEQ ID NO: 609 - DNA, 560 bp, Rhinovirus C
  source 1..560: mol_type = genomic DNA
cggtacacttgcacgccagtttgcctccctttccctttcccttgccaaacccccttggaacttagaagcaatacattagaccaataggaggtaacgatccatgttacctaaggtcaagcacttctgtctccccggtatgcgtggaataaacagtgcaaacggttgaagccacaattatcgttatccgcgcacaaactacgcagagcctagtactaccctgaaagtctgtaggttggtcgatcagctaatccccatagtagacctggcagatgaggcaagacactccccactggcgacagtggtcttgcctgcgtggctgcctgcacaccctctggggtgtgaagcctactgacggacagggtgcgaagagccgagtgtgctttgtgtgagtcctccggcccctgaatgcggctaatccaaccccacagctgtggcatacaagccagtatgtacgcagtcgtaacgggtaactgtgggacggaaccgactactttgggtgtccgtgtttcctgtttttctttatatatatgcttatggtgacaatagtgaatattgttacc

SEQ ID NO: 610 - DNA, 561 bp, unidentified
  source 1..561: mol_type = unassigned DNA; note = unclassified Avisivirus sequence
cattcccctttccccagccatgggttaaatggcccctcaccaggttcggtgctgtctaggcttccagtaaagaagtcaaccgagcattgaacaaaacctcagtgggtatggtagttaaccccgtccactggacaactttgtcctcttaaaagtggatcaatccaccccaactccccccctagccacctgagccatggtggatagcagtgacgaaactagggaccccaatacctctagtgccaagagaattcccccctcgcgagaggtgctcttgggcccgaaaggctagttggcagggtgaagtgaaggaagctgctagcgtggcaaccttaagcgtagcccgaagctgaccttagaggttaaccctagtggaccactggatgaagctgtggaggtggtggataggaaagttggccacttgtgagtagatgcccagaaggcataaggctgatctggggccagtgactataccgttccggtaaacctggtataaaaaccatgaaagcaagtgggtttaaaatttcttctaattccttcatttcagtagtgataactggcaga

SEQ ID NO: 611 - DNA, 564 bp, Enterovirus C
  source 1..564: mol_type = genomic DNA
tgacgttgcatagactgctcacgcggttgaaagcgattgatccgttatccgcttgtgtacttcgagaagcctagtatcgccttgggatcttcgacgcgttgcgctcagcacccgaccccggggtgtagcttaggctgatgagtctggacattcctcaccggtgacggtggtccaggctgcgttggcggcctacctatggctaacgccataggacgctagatgtgaacaaggtgtgaagagcctattgagctacacaagagtcctccggcccctgaatgcggctaatcctaaccacggagcaggcggtcgcaaaccagcgattggcctgtcgtaatgcgcaagtctgtggcggaaccgactactttgggtgtccgtgtttcctgttatttttatcatggctgcttatggtgacaatcagagattgttatcataaagcgaattggattggccatccggtgagaattgtgtcaagcgtacaactgtttgttggaatcactgtgttagctttaattctcatttaaccgattaatcaaaactacacgagaacaaaacactagcatcact

SEQ ID NO: 612 - DNA, 565 bp, Enterovirus B
  source 1..565: mol_type = genomic DNA
ttaccccggactgagtatcaatatgctgctcacgcggctgaaggagaaaacgttcgttacccggccaattacttcgagaaacctagtaccaccatgaaggttgcgcagtgtttcgctccgcacaaccccagtgtagatcaggccgatgagtcaccgcaatcctcacgggcgaccgtggcggtggctgcgttggcggcctgcccatggggcaacccatgggacgcttcaataccgacatggtgagaagagtctattgagctaattggtagtcctccggcccctgaatgcggctaatcctaactgcggagcagatgcctgcatgccagcgggtagtctgtcgtaacgggcaactctgcagcggaaccgactactttgggtgtccgtgtttccttttattcttgtgttggctgcttatggtgacagttgagaagttgttaccatatagctattggattggccatccgttaacaaatagagcaattatcttctcttttgttggattcgttccactgaattacaaggcactaaacacacttaatttcattttaatacttaacacatcaaa

SEQ ID NO: 613 - DNA, 565 bp, Enterovirus C
  source 1..565: mol_type = genomic DNA
tgacgttgcatagactgctcacgtggttgaaagcgatcgatccgttatccgctcgcgtacttcgagaagcctagtatcgccttggaatcttcgatgcgttgcgctcagcgcccgaccccggggcgtagcttaggctgatgagtctggacgttcctcaccggtgacggtggtccaggctgcgttggcggcctacctatggctaacgccataggacgctagatgtgaacaatgtgtgaagagcctattgagctacacgagagtcctccggcccctgaatgcggctaatcccaaccacggagcaagcggtcacaaaccagtggctggcttgtcgtaacgcgcaagtctgtggcggaaccgactactttgggtgtccgtgtttcctgttatttttatcatggctgcttatggtgacaatctgtgattgttatcataaagcgatttggattggccatccggtgagtgttatatcgaatacttgactgtttgtcagacccactgtattagaatcacttcatatttaagtagtcaatcaaaaacagcacgaagataagacaatagtaccaca

SEQ ID NO: 614 - DNA, 565 bp, Enterovirus C
  source 1..565: mol_type = genomic DNA
tgacgttgcatagactgctcacgcggttgaaagcgatcgatccgttatccgctcgcgtacttcgagaagcctagtatcaccttggaatcttcgatgcgttgcgctcagcgctcgaccccggggcgtagcttaggctgatgagtctggacgttcctcaccggtgacggtggtccaggctgcgttggcggcctacctgtggctaatgccataggacgctagatgtgaacaaggtgtgaagagcctattgagctacacgagagtcctccggcccctgaatgcggctaatcctaaccacggagcaagcggtcacaaaccagtgactggcttgtcgtaatgcgcaagtctgtggcggaaccgactactttgggtgtccgtgtttcctgttatttttatcatggctgcttatggtgacaatctgtgattgttatcataaagcaatttggattggccatccggtgagtgttgtatcgaatacttgactatttgccaggactactatattaaattcattttatatttgagaaatcagttaaaaacagtaggaagataaaacaataataccaca

SEQ ID NO: 615 - DNA, 566 bp, unidentified
  source 1..566: mol_type = unassigned DNA; note = unclassified Rosavirus sequence
tgtcttctccggatgctgttacagcatgtggacccaggagtgttttaagtgatcttctacagtctctttagtgtctatactttagagagcggtgaactgacaccgttgcttcttgcacagcccttcgtgctggtctttccggttctcgacagcgttgggcatcatggctagtcaggctaagatagcagatgatttagtgaaaagttttggattgtttggagctttgtagcgatgctagtagtgtgtgcggacttccccacgtggtaacacgtgcctcacaggccaaaagccaaggtgttaaaagcacccctactagtcccaggctttcccacctgggagctcctctcatgaaaattcctagtaattaatgattgggctattcatcaacctttctagtcaatggcttaaggatgcccggaaggtacccgcaggtaacgatgagctcactgtggatatgatccggggctctggtgcgaccgtctgtccggcgtagtcagagttaaaaaacgtgtaagcccttccaccccaagggattggggtttccccaatcatttaacaggttcatt

SEQ ID NO: 616 - DNA, 567 bp, unidentified
  source 1..567: mol_type = unassigned DNA; note = unclassified Enterovirus sequence
aaaccagtaccaccacgaacaagcacttctgtttccccggtgaagctgtatagactgttcccacggttgaaaatggcagatccgttatccgcttaagtacttcgagaagcctagtatcactttggaatcttcgatgcgttgcgctcagcactctaccccgagtgtagcttaggctgatgagtctgggcataccccaccggcgacggtggcccaggctgcgttggcggcctacccatggctaacgccatgggacgctagttgtgaacaaggtgtgaagagcctattgagctacttaagaatcctccggcccctgaatgcggctaatcccaaccacggagcaagtgcttacaaaccagtgagtagcttgtcgtaacgcgtaagtctgtggcggaaccgactactttgggtgtccgtgtttcctttttatttccattgtggctgcttatggtgacaatctaagattgttatcatatagctattggattggccatccggtgatttactgagatcaaacacttgcccatttccttgttgcacccacccatttgttatatttatacaattaca

SEQ ID NO: 617 - DNA, 568 bp, Rhinovirus A
  source 1..568: mol_type = genomic DNA
gagttgtactctgttattccggtaactttgtatgccagttttatttccctccccaattgtaacttagaagatgtacataaagaccaataggtggtgatcacccagatcactaaaggtcaagcacttctgtttccccggtcaaagttgatatgctccaacagggcaaaaacaacttggatcgttatccgcaaagtgcctacgcaaagcttagtaccatctttgagagcctatggttggtcgctccactgaaccccacagtagacctggcagatgaggctagaagacccccactggcgacagtgttctagcctgcgtggctgcctgcacacccctacgggtgtgaagccatacgtttgacaaggtgcgaagagccccgtgtgctcactttgagtcctccggcccctgaatgtggctaaccttaaccctgcagctagtgcatacaaaccagtatgttgctagtcgtaacgagcaattgcgggatgggaccaactactttgggtgtccgtgtttcactttttacctttattttgcttatggtgacaatatatatagcatatatattgacacc

SEQ ID NO: 618 - DNA, 569 bp, Aichivirus C
  source 1..569: mol_type = genomic DNA
aagggggtgggggggcttcggccctctcaccctcttttccggtggccacccgcccgggccaccgttactccactccactccttcgggactggtttggaggaacacaacagggcttcccacccctgtttaccccgatttcatctacccttctcccgaactgaccctatccacaccccactgactaactcctttggattagacctcggaatgcctacttgacctcccacttgcctctccctttctggattgccggtggtgcctggcggaaaaagcacaagtgtgttgcaggctaccaaactcctacccgacaaaggtgcgtgtccgcgtgctgagtaatgggataggagatgcctacaacaggctcgcccatgagtagagcatggactgcggtgcatgcgacttcggtcgccacgggcatagcattgctcacccgtgaatcaagtcatcgagatttctctgacctctgaagtgcactgtggttgcgtggctgggaatccacgcttgaccatgtactgcttgatagagtcgcggctggccgactcatgggttaaagtcagttgacaagacac

SEQ ID NO: 619 - DNA, 571 bp, unidentified
  source 1..571: mol_type = unassigned DNA; note = unclassified Picornaviridae sequence
ttcgtgttgggagaaccgtccaaaagaccctccggggttaaaccccggaagggcttttggacggttctcccaacacgaaagattgggacacttctcgtggtgagtgcttcactgcgacccgatggtgttatggagggcttccatcccgccgtttgcctaggctataggctgttttatttcttctttatttttctctatttccaggttgtctccataccgagagctgctaccgctgcgcccggcggggttaactccagggctagcctggagctgtggccgccaaaagtggagagagtgtgactaactgggatggtccgtcctgagtggctgtttccttgcacatactaaacattgatctgggtgctcaggtaggctacgggtgaaacctgaggtgtaataatgttcttctgttgaagaaactgcacgtcaaacgctaaccttatcagatatagctgagatttaagtgtcaaaaagctatcaatgattgcgggggggtgtaaggccaccttgcgatgtttggttgtgtgaggttaagaggccctcttgatggggtttccctaggcactcccct

SEQ ID NO: 620 - DNA, 571 bp, unidentified
  source 1..571: mol_type = unassigned DNA; note = unclassified Enterovirus sequence
tttccccggtgatgttgtatagactgtacccacggttgaaaatgactgatccgttatccgcttttgtacttcgagaagcccagtatcatcttggaatctccgatgcgttgcgctcagcactcgaccccagagtgtagcttaggtcgatgagtctggacgttcctcaccggtgacggtggtccaggctgcgttggcggcctacctgtggcccaaagccacaggacgctaggtgtgaacaaggtgtgaagagcctattgagctacagaagagtcctccggcccctgaatgcggctaatcccaaccacggagcaagggtgcacgaaccagtgtatgccttgtcgtaatgcgcaagtctgtggcggaaccgactactttgggtgtccgtgtttccttttatttttatattggctgcttatggtgacaatcatagattgttatcataaagcgaattggattggccatccggtgaaagcaaaacacattatttacttatttgttggatttactccactcaataattttacctataaactcattacatcagtcttgctgattagaaataagtatcata

SEQ ID NO: 621 - DNA, 572 bp, Enterovirus B
  source 1..572: mol_type = genomic DNA
acttctgtttccccggaccgagtatcaataaactgctcacgcggtcgaaggagaaaacgtccgttacccggccaactacttcgagaaacctagtaacaccatggaaattgcaaagtgtttcgctcagcacacccccagtgtagatcaggccgacgagtcaccgcgttccccacaggcgactgtggcggtggctgcgttggcggcctgcccgtgggacaacccatgggacgctttaatatggacatggtgtgaagagtctattgagctagttggtagtcctccggcccctgaatgcggctaatcctaactgcggagcatgcgcccccattccagagggtagcgtgtcgtaacgggcaactctgcagcggaaccgactactttgggtgtccgtgtttccttttatcttctcattggctgcttatggtgacaattgcgagattgttaccatatagctattggattggccatccggtgtctaacagagctataatataccaatttgtgggattcgttccattaagtttgaaagtcttacaaaccctcaacttgatactgcaactcaatagtgtaaa

SEQ ID NO: 622 - DNA, 573 bp, Cardiovirus A
  source 1..573: mol_type = genomic DNA
cccccccctccccctcccccttattttcctggtcgaaaccgctcggaataagaccggggtcttgtaatgtctaaatgttacttctacccaaccattgtctatgatggttggagggctgtagaacctagcccttgcttcttgcagagaaatccaagtggtctttccactctcgacaatgggtttcatggctcgccaaaagttgtgaagaaagcaagtcctatggaagctttctgacgaccgatgatgtctgtagcgaccctttgcaggcagcggaatcccccacctggtaacaggtgcctctgcggccaaaagccacgtgtttaacagacacctgcaaaggcggcacaaccccagtgccacatcaagagtctgatgactgtggaaatagtcaactggcttttcttaagcaaatttggtgtcggggctgaaggatgcccggaaggtaccacactggttgtgatctgatccggggcccatgtgcatgtgctatacacatgtagcctgggttaaaaaacgtctaggccccccgaaccacggggacgtggttttccttttgaaaaccacaatgataat

SEQ ID NO: 623 - DNA, 574 bp, unidentified
  source 1..574: mol_type = unassigned DNA; note = unclassified Pegivirus sequence
cgcaccggtacttggtgcacacagtcaggttagtccgctgtgtgcaagtggtggtcccacaaaccgactgccgccctctaacgtggttttagaatgcggacgccaagtctgcaactggacgaagcgctaccggcagcgctctcctggtcgcttgagggactggagggttgcactgttagtgaataagtccggggggataagctaagggggccgtacccacggcccgcctcacgcctctgccctgctcacctaagctgatgcggacgactccatgctatggtagcagcacggtctcacaggttgtgcaaccggtggaaaaatgctccgtcaggcgcagctgacgttaaactcagtgcccccgcgctcttgcgtggtttccgggctggaagtacgccgccttcctaaagtcgttactcggccaatacattctcgggcgggttgacaaacggaaagcgcggacccatagctccgggcgggggggtatagtccatgggggggcccaggcggcacgcctgcgacacgtggcaaggggaaaaatccttcgggtgaccccgggccccatcttcttttcttt

SEQ ID NO: 624 - DNA, 574 bp, unidentified
  source 1..574: mol_type = unassigned DNA; note = unclassified Enterovirus sequence
ttgagtgctctgttattccggtaactttgcacgccaattttataacccctcttccccatgtaacttagaagttttacaaatagaccaatagcaagcagcgaaccagctgtacaaggtcaagcacttctgtttccccggtcaatgttgatatgcttcaacaaggcaaaaacaacagcgatcgttatccgcaagatgcctacacaaagcttagtacctccttcgatggtatttgtctggtcgctcaggtgtttccccaacactagacctggcagatgaggctagaaactccccactggcgacagtgttctagcctgcgtggctgcctgcacaccctttcgggtgtgaagccaaatactggacaaggtgtgaagagccccgtgtgctcatcttgagtcctccggcccctgaatgcggctaaccttaaacccgcagccattgctcacaatccagtgagcagatggtcgtaatgagcaattgtgggatgggaccgactactttgggtgtccgtgtttcactttttcctttatcaattgcttatggtgacaatatatatataaatatatatattggcatc

SEQ ID NO: 625 - DNA, 575 bp, unidentified
  source 1..575: mol_type = unassigned DNA; note = unclassified Picornaviridae sequence
cccgttggtagggggtgctaatacctaccacccgtttgccgtgggaaacggctatggagggtcgggacgcctcgttaatcacgttctagtaattgagtgtgttactttaaatcttacacttatctatttagagtagttaatgtttctactattctttactatatatatcatagctgtcgtcttgctaagagctccgaccactgcgcccggtggggttaaccaatggactagccattggctgtaggcgccagaagagacgacctcctgactatgattgagatttgtcttgcttcagggctgtggaccatggatgtgatcgatcgaaccagggaaggtaggctacgggtgaaaccttccatgtaatgatgatgtcatattgacataccgcatccatacgctaatgcagcggatattgctgagatgataagtcaataagcattcaacgttggtgcccaggtgtcatggctggggcgcggttgcgtgcgtggttcacagtataacttgaagtgtcccttaagataaatctcactctaagggaggaccctgctagtaatagtacagggctaatcaggggc

SEQ ID NO: 626 - DNA, 576 bp, Aichivirus C
  source 1..576: mol_type = genomic DNA
tttggaaaaaggtggggggggcttcggccctctcaccctcttttccggtggccacccgcccgggccaccgttactccactccactccctcgggactggtttggaggaacacaacagggcttctcatccctgtttacccttattccacttacccttctccccgaactacccaacccactccccactgattgactcccttggattaagacctcggaatgtcttcctgaccttcttcttggttttcccttttcggattgccggtggtgcctggtggaaaaagcacaagtgtgttgttggctaccaaactcctacccgacaaaggtgcgtgtccgcgtgctgagtaatgggataggagatgccaataacaggctcgcccatgagtagagcatggactgcggtgcatgtgacttcggtcaccaggggcatagcattgctcacccctgaatcaagtcatcgagatttctctgacctctgaagtgcactgtggttgcgtggctgggaatccacgcttgaccatgtactgcttgatagagtcgcggctggccgactcatgggttaaagtcagttgacaagacac

SEQ ID NO: 627 - DNA, 576 bp, Cardiovirus A
  source 1..576: mol_type = genomic DNA
tccccccctttctcttccccttccttaatttaactggccgaaaccacttgggataaggccggtgtgtgtttgtctatatgtcacttctaccacaccactgtcttttggtggtgtgggggcccagaacctggccctgtcttcttgacgagcactcctaggggtctttcccctcttgccaaaggagtgtaaggtctgttggatgtcgcgaaggaagcaatctctctgtaagcttctggaagacaagcaacgtctgtagcgaccctttgcaggcagcggatttccccacctggtaacaggtgcctctgcggccaaaagccacgtgtataacatacacctgcaaaggcggcacaaccccagtgccacgttgtgagttggatagtcgtggaaagagtttgatggctttcctcaaacgtatccagcaaaagggctgaaggatgcccagaaggtaccccattttatgggatctgatctggggccacggtgcacgtgctttacacgtgtcgagccggggttaaaaaacgtctaagcccttaagtcacggggacgtggctttccctgttaaattaacactgaaac

SEQ ID NO: 628 - DNA, 576 bp, Enterovirus B
  source 1..576: mol_type = genomic DNA
gcctattggtactcggtccggggtaacagaagtgcttggccaaggtggctgaaggggaaaacgttcgttaaccgactaataacttcgagaaacctagtaccaccatgaaagttgcgcagtgtttcgctccacacaaccccagtgtagatcaggtcgatgagtcaccgcgttccccacgggtgaccgtggcggtggctgcgttggcggcctgcccatggggcaacccatgggacgcttcaatactgacatggtgcgaagagtctattgagcttattggtagtcctccggcccctgaatgcggctaatcctaactgcggagcaggtacccacaagccagtgggtggcctgtcgtaacgggcaactctgcagcggaaccgactactttgggtgtccgtgtttccttttattcttaaattggctgcttatggtgacaattgaaaggttgttgccatatagctattggattggccatccggtgtctaatagagcaattatctacctttttgttggattcattccactcaactataaaacactcaaaacactcatatacattgtaggtctcaacacagcaaa

SEQ ID NO: 629 - DNA, 576 bp, unidentified
  source 1..576: mol_type = unassigned DNA; note = unclassified Enterovirus sequence
acccaagtggtgtagtactcttgtatttcggtacacttgtacgccagtttgccaccccttccccaagcgaacgtagaagcttacaatcccggtcaataggaggtggtgaaccacaccacttaagaccaagcacttctgtttccccggctcaagaggaatatgctttgcaaagggctgaagccccgagagtcgttatccgcatacatactacgcaaagcctagtactgtcctggaagtctgttggttggtcgctccgtcaattccccattgatagacctggcagatgaggcaggaaatcccccactggcgacagtgttcctgcctgcgtggctgcctgcacaccctcacgggtgtgaagccaactgatggacagggtgagaagagccccgtgtgctatgtatgagtcctccggcccctgaatgcggctaatccaaccccacagctgccgcacacaaaccagtgtgttgacagtcgtaatgggtaactgtgggacggaaccgactactttgggtgtccgtgtttcctttattctttcaattgatgcttatggtgacaacatcaagtgatattgttacc

SEQ ID NO: 630 - DNA, 578 bp, Aichivirus C
  source 1..578: mol_type = genomic DNA
tttgaaaagggggtgggggggcttcggccctctcaccctcttttccggtggccacccgcccgggccaccgttacttcactccactccttcgggactggtttggaggaacataacagggcttcccaatcccctgttatcctttatcccaaacaccttttcccttaaccaaccctatccacaccccactgactgattcctttggattttgacctcagaatgcctacctgacctcccactcgcctctcccttctcggattgccggtggtgcctggcggaaaaagcacaagtgtgttgcaggctaccaaactcctacccgacaaaggtgcgtgtccgcgtgctgagtaatgggataggagatgcctacaacaggctcgcccatgagtagagcatggactgcggtgcatgtgacttcggtcaccacgggcatagcattgctcacccgtgaatcaagtcatcgagatttctctgacctctgaagtgcactgtggttgcgtggctgggaatccacgcttgaccatgtactgcttgatagagtcgcggctggccgactcatgggttaaagtcagttgacaagacac

SEQ ID NO: 631 - DNA, 578 bp, Enterovirus C
  source 1..578: mol_type = genomic DNA
gcacttctgtttccccggtacgacgacatagattgtgcccacggtcgaaagtcgtcaatccgttatccgctttggtacttcgaaaagcctagtatcaccttggaattctcgatgcgttgcgctcagcacccaaccccagagtgtagcttaggctgatgagtctgggcactccccaccggcgacggtggcccaggctgcgttggcggcctacccatggctaacgccatgggacgctagagttgaacaaggtgtgaagagcctattgagctaccaaagagtcctccggcccctgaatgcggctaatcccaaccatggatcaagtgcgtgcaatccagcatgtagcttgtcgtaatgcgcaagtccgtggcggaaccgactactttgggtgtccgtgtttccttttatttttattatggctgcttatggtgacaatctcggattgttatcatatagcaattggattggccatccggtgagagtgagagatattatctatttgtttgtggcatttactccactagatactaacacaccaattctaattagagcagttatactaattagatcaatacatcaca

SEQ ID NO: 632 - DNA, 579 bp, Aichivirus C
  source 1..579: mol_type = genomic DNA
tttgaaaagggggtgggggggcctcggccccctcaccctcttttccggtggccactcgcccgggccaccgttactccactccactccctcgggactggtttggaggaacataacagggcttcccatccctgtttttacccttatttccatctaccctttcccttaaccaaccctatccacaccccactgactgactcctttggattttgacctcagaatgcctacttgacctcccacttgcctctcccttatcggattgccggtggtgcctggtggaaaaagcacaagtgtgttgttggctaccaaactcctacccgacaaaggtgcgtgtccgcgtgctgagtaatgggataggagatgccaatgacaggctcgcccatgagtagagcatggactgcggtgcatgtgacttcggtcaccaggggcatagcattgctcacccctgaatcaagtcatcgagatttctctgacctctgaagtgcactgtggttgcgtggctgggaatccacgcttgaccatgtactgcttgatagagtcgcggctggccgactcatgggttaaagtcagttgacaagacac

SEQ ID NO: 633 - DNA, 579 bp, Enterovirus C
  source 1..579: mol_type = genomic DNA
gcacttctgtttccccggtgcgatgacatagactgtacccacggttgaaagtcgttaatccgttatccgctttggtacttcgagaagcctagtacctccttggaattttcgatgcgttgcgctcaacactcaaccccagagtgtagcttaggctgatgagtctgggcattcctcaccggcgacggtggcccaggctgcgttggcggcctacccatggctaacgccatgggacgctagatttgaacaaggtgtgaagagcctattgagctaccaaagaatcctccggcccctgaatgcggctaatcccaaccatggatcaagtgcatgcaaaccagcatgtggcttgtcgtaacgcgtaagtccgtggcggaaccgactactttgggtgtccgtgtttcctttttatttttataatggctgcttatggtgacaatctcagattgttatcatatagcgattggattggccatccggtgagaataagagatattatctatttgtttgtggcattcactccacttaactcatacacaccaagtttaatcaaagcagttttactaattagatcagcataccaca

SEQ ID NO: 634 - DNA, 581 bp, unidentified
  source 1..581: mol_type = unassigned DNA; note = unclassified Picornaviridae sequence
aatgcaaataacaatcaaggacccgtttgtggggtgggctcccactttattcatagcccataacattggtatcctgttaaactgactactggctgttctactaggtatttcaactggtttaaagattttaattttgttgaaacaggaaggattagctcgatcctttaggtgggacttatttttaccaccacagagcgcccatgaacaattaaaggtagtggaggaactattagtaaccatgtgaaatgcgtaactgctatccctgtgcccttggccttggcatagtaatatgctccaaggggcccgaaaggctagtgggtagaaactcacctagggtggtcactctgtgaatttcacatggcgaagtttagattctgaatcctactttgttgtgagtggggtcaggtgacactgagtagatgccctggaggtaccaattgatctgaccaggggcctggatacttaatgccaggttaaaaattatgaaaagtaagtcaccgaactgaaatgtttttcctttttatttcatctcatactgctgtgttgtttggtgtaatagtttgaagacacaattttccagg

SEQ ID NO: 635 - DNA, 584 bp, Cadicivirus A
  source 1..584: mol_type = genomic DNA
gtccgtataccaacggatcgatttccctgttacagcctctttgcttccccaccccactcctctccgtggagagcctagtaggattcttgaaagcaaatgtctgttgaccccaccttcaatcccggaaggaagaaaccgagaatgagactcgtctattcccccatggtgacatggagacttgtctgcgtgtgtctcgggctcccttatgagtattgtgggagaaccgctaccctgactccgaggagtctgatgggatatgttagtacctatgaaagtaaggtgacagactttgttagtatggatacgaagagccgactgccgttggagtgtatcctccggacccgtgaatgcggctaaccctaaccccggatcaagtgcccacaaaccagtgggtggcttgtcgtaatgcgtaagtctgggatgggaccgactactttcggtgttccgtgtttcctatttattttatcaataaagtatatggtgacaatattactagtgtgatatatagcctctattgtatttttattgatcaattttaataggttatttggtggtgatttaaatagagatagttactattagag

SEQ ID NO: 636 - DNA, 584 bp, Rhinovirus B
  source 1..584: mol_type = genomic DNA
tactctggtattatgtacctttgtacgcctgtttcttccctacaaccccttcctaaaactcccacccatgaaacgttagaagcttgacatttaagtacaataggtggcaccacatccagtggtgtctacgtacaagcacttctgtttccccggagcgaggtataggctgtacccactgccaaaagcctttaaccgttatccgccaaccaactacgtaacagctagtatcatcttgttcttcactggacgttcgatcaggtggattccccctccactagtttggtcgatgaggctaggagctccccacgggtgaccgtgtcctagcctgcgtggcggccaacccagctcatgctgggacgcccttttaaggacatggtgtgaagactcgcatgtgcttggttgtgagtcctccggcccctgaatgcggctaaccttaaccctggagccttatgccacgaaccagtggttgtaaggtcgtaacgagcaattccgggatgggaccgactactttgggtgtccgtgtttcctatttttctttatattgtcttatggtcacagcatatatataagtatatactgtgatc

SEQ ID NO: 637 - DNA, 587 bp, Rhinovirus C
  source 1..587: mol_type = genomic DNA
catggttacccacgaggtgcagtggtcttgtattacggtacatttccataccagttttataaaccctaccctgaaacttatagaagcttgtacacaccgaccgacaggtggcaatcatccagattgtcgaaggtcaagcacttctgtttccccggtatccttgtatacgcttcacccgaggcgaaaaccgaggttatcgttacccgcaaagtgcctacgagaagcctagtatcactttggaaacctatggttggtcgctcagctgttttcccaacagtagacctggcagatgaggctggacgctccccaccagcgatggtggtccagcctgcgtggctgcctgcacaccctgtggggtgtgaagccagaaagtggacaaggtgtgaagagcctattgtgctcactttgagtcctccggcccctgaatgtggctaatcctaaccccgtagctgttgcatgtaatccaacatgtatgcagtcgtaatgggcaactatgggatggaaccaactactttgggtgtccgtgtttcttgtttttctttatatactgcttatggtgacaatagtaattcattactcttgttacc

SEQ ID NO: 638 - DNA, 588 bp, Cadicivirus A
  source 1..588: mol_type = genomic DNA
gttcgtatgccaacggattgatttccctgttacagcctctttgcttccccaccccactcctctctgtggagagcctagtaggattcttgaaagcaaatatctgttgaccccaccttcaatcccggaaggaagaaaccgagaatgagactcgtctattcccccatggtgacatggagacttgtctgcgtgtgtctcgggctcccttatgagtattgtgggagaaccgctaccctgactccgaggagtctgatgggatatgttagtacctatgaaaataaggtgacaggttttgttagtatggatacgaagagccgactgccgttggagtgtatcctccggacccgtgaatgcggctaaccctaaccctggatcaagtgctcacaaaccagtgagtggcttgtcgtaacgcgcaagtctgggatgggaccgactactttcggtgttccgtgtttctatttattttatcaataaagttttatggtgacaatcttgtgatattaagatataaagcttttatccttttgtttattgattatcttaaatagattgcttggtggtgatttaaaatagagatagttattattagag

SEQ ID NO: 639 - DNA, 588 bp, unidentified
  source 1..588: mol_type = unassigned DNA; note = unclassified Enterovirus sequence
ggctcttccgatctgggggttgtactctattattccggtaattttgtacgccagttttatctccccttcccccgactgtaacttagaagtttatcattacggccaataggtggtagttatccaaactaccaaaggtcaagcacttctgtctccccggtcaaagttgatatgctccaacagggcaaaaacaactaagatcgttatccgcaaagtgcctacgcaaagcctagtaatgtctttgaaaatttatggttggtcgctccgctattccccatagtagacctggcagatgaggctagaaattccccactggtgacagtgttctagcctgcgtggctgcctgcgcaccctttgggtgcgaagccatacattggacaaggtgtgaagagccccgtgtgctcactttgagtcctccggcccctgaatgtggctaaccttaaccctgcagctagtgcatgtaatccaacatgttgctagtcgtaatgagcaattgcgggacgggaccaactactttgggtgtccgtgtttcactttttccttttattattgcttatggtgacaatatatatagatatatatattgacacc

SEQ ID NO: 640 - DNA, 589 bp, Rhinovirus A
  source 1..589: mol_type = genomic DNA
ccatgtggagttgtactctattattccggtaattttgtacgccagttttatctcccctcccccttttacataacttagaagtttgtacacatcgaccgataggtggcatttatccaaaatgttgaaggtcaagcacttctgttaccccggttaaaattgatatgctccaacagggcaaaaacagttttaatcgttatccgcaaagcaactacgcaaagcctagtatcatttttgataatatacggttggtcgctccactgtgaacccgacagtagacctggcagatgaggctggaaaccccccactggtgacagtgttccagcctgcgtggctgcctgcgtacccctttgtgggtacgaagccatatgtttgacaaggtgtgaagagccccgtgtgcttgttttgagtcctccggcccctgaatgtggctaaccttaaccctgcagctagtgtgtacaatccagtacatagctagtcgtaatgagtaattgcgggatgggaccaactactttgggtgtccgtgtttcctgtttttcttttatatttgcttatggtgacaatatatatacatcacatatatattggcacc

SEQ ID NO: 641 - DNA, 591 bp, Shanbavirus A
  source 1..591: mol_type = genomic DNA
ccccccctccctccttttcatcggctgtccgttgccgtggagcttcactatccgtagtgttgttccggaaaacggacacagcaacaccttcctccgggttggtgcttgcaatccctttccccttttgttgacttcccggactcattcgttttggctttcacattggccctagaggctatcttgttggattcctgtaccctggcaatctgaactccttcgcatgccctcccacatggtcgaggacagtaaggcgcgggaccaagagagccgggcaccagacccatttctgaattggactgccaccgccaagaattgcggagcggctctgttgtgtgagatcctcctttcccacagatagcgcatcccagtgcgtgtgtatgggggttagggtgcatacagcatccgcgactgtggtcagatgagcggaagcatctgctaggataaaggggacgcgattcgctatccccgaagcatccctcattgaggtaaagccctagtaggtgacggtggactggaatgccaccctggttccgtgcagcttgacagagtgccggccggtgctctggccacagaaatcggctgttttgggac

SEQ ID NO: 642 - DNA, 591 bp, unidentified
  source 1..591: mol_type = unassigned DNA; note = unclassified Enterovirus sequence
cccgtaggcagtatgggtgtagtactcttgtattctggtacatttgtacgccagtttttcttcccacccccaagtaacctttagaagcaattgcatccagacgagcaggcgaccaacactccacgttggttcacgtcaagcacttctgtttccccggtattagagtgttaggcttctcaagaggctgaagctcgaggtatcgttatccgcacagttactaagcagagcctagtatcactctgaccttctcactggctggtcgttcaatgagagacccactcatagacctggcagatggggctggaagtaccccactggcgacagtgttccagcccgcgtggctgcctgtccccctttctgggggaaagccgatgttaagacagggtgtgaagagccgcgtttgctaactgtgagtcctccggcccctgaatgcggctaatcttaccccacagctattgcatggaaaccaccatgtggatagtcgtaatgggcaactgtgggacggaaccgactactttgggtgtccgtgtttccttttattccatttattatctcatggtgacaacgtataagagttatatgttgtttacc

SEQ ID NO: 643 - DNA, 591 bp, unidentified
  source 1..591: mol_type = unassigned DNA; note = unclassified Enterovirus sequence
ccgtctacggacgtagtactcttgtatttcggtacacttgtacgccagttttcctccctccaccccttatgcaacttatagaagcttgaacttacaggcgaataggaggccagcaatccatgctggtaaacgccaagcacttctgtatccccggtattagagtgttaggcttctcacgaggctgaagcttgatatatcgttatccgcacagttactaagcagagcctagtatcatcttactctttatgctggttggtcgctcagtcagtttcccctgatagacctggcagatggggctggaaatccctcactggtaacagtgttccagcccgcgtggctgcctgtccccctccttagggggaaagccaatataaagacaaggtgtgaagagccgcgtttgctaattgtgagtcctccggcccctgaatgcggctaatccaaccccacagctatcgcatggaatccaccatgtaggtagtcgtaatgggcaactgtgggacggaaccgactactttgggtgtccgtgtttccttttataccttatctgatctcatggtgacaacatatattgacaagtgtatgttgttcacc

SEQ ID NO: 644 - DNA, 596 bp, unidentified
  source 1..596: mol_type = unassigned DNA; note = unclassified Enterovirus sequence
gtaccaccacgaacaagcacttctgtttccccggtgaagttgcatagactgtgcccacggttgaaagcgactgatccgttatccgctcttgtacttcgagaagcctagtaccatcttggaatcttcgacgcgttgcgctcagcactcaaccccagagtgtagcttaggctgatgagtctggacattccccatcggtgacgatggtccaggctgcgttggcggcctacctgtggcccaaagccacaggacgctagttgtgaacaaggtgtgaagagcctattgagctacatgagagtcctccggcccctgaatgcggctaatcccaaccacggagcaggtggtcataatccaatgactggcctgtcgtaacgcgcaagtctgtggcggaaccgactactttgggtgtccgtgtttccttttatttttacaatggctgcttatggtgacaatcatagattgttatcataaagcgaattggattggccatccggtgagaatcaaatcgcttgtatatttgtttgttggatttgctccattaacattaaacaccttaacacttattaaagtagttctattgataagacattgctattaca

SEQ ID NO: 645 - DNA, 596 bp, Rhinovirus B
  source 1..596: mol_type = genomic DNA
gacccactgggtgtagtgctctggtattttgtacccttgcacgcctgtttcccatttgtacccttccttgatttcctccccatgtaacgttagaagtttcggaattttaaagtacaataggaagcgccacatccagtggtgttgtgtacaagcacttctgtttacccggggcgaggtataggctgtgcccacggccaaaaacctttaaccgttatccgccaaccaactacgtaacggctagtatcatcttgtttctgacttggcgttcgatcaggtggtaacccccactagtctggtcgatgaggctaggaattccccacgggcgaccgtgtcctagcctgcgtggcggccagcccagcttttgctgggacgccttttcaaagacatggtgtgaagacccgcatgtgcttggttgtgagtcctccggcccctgaatgcggctaaccttaaccctggagcccagtgacataatccaatgttatttgggtcgtaatgagtaattccgggatgggaccgactactttgggtgtccgtgtttccttttattctttataatgtcttatggtcacagcatatatattgtatatactgtgatc

SEQ ID NO: 646 - DNA, 596 bp, Rhinovirus C
  source 1..596: mol_type = genomic DNA
atcccaccatgattgttcactgaacgttgtactcttgtattacggtacacttgtacgccagttttataatcccctccccttgtaacttagaagcaagtacacacaggccaatagcaagtagcaagccatgctacttatggtcaagcacttctgtttccccggtctgacgggatatgcttcacccgaggcagaaactcagatgatcgttatccgcaaagtgcctacgggaagcctagtagcaccctggaaactgttaggttggtcgctcaattgctgaccccgagcaatagacttggcagatgaggctagacataccccaccagcgatggtggtctagcctgcgtggctgcctacccaccctaatagggtgggaagcctatcaatggacagggtgtgaagagcctactgtgctcactttgactcctccggcccctgaatgtggctaatcctaaccccgtatctatcgcatgcgcaccagcatgtaggtagtcgtaatgggcaactacgggatggaaccaactactttgggtgtccgtgtttcctgttttctttattatttgcttatggtgacaattgtatgaaatacgattgacacc

SEQ ID NO: 647 - DNA, 597 bp, Rhinovirus A
  source 1..597: mol_type = genomic DNA
gttgttcccacctggacttcctatgtggagttgtacactgttatcccggtaaccttgtacgccagttttatacacccttccctgtaacttagaagttataagcacgaggaccaataggtagtgactttccaggtcactaaaggtcaagcacttctgtctccccggtcaaagttgatatgctctccccagggcaaaaacaattgagatcgttatccgcaatgtgcctacgcaaagcctagtaatatcttagatgatatatggttggtcgctccgccatttcccatggtagacctggcagatgaggctagaaactccccactggcgacagtgttctagcctgcgtggctgcctgcgcactctctgagtgcgaagccatatatttgacaaggtgtgaagagccccgtgtgctcacattgaatcctccggcccctgaatgtggctaaccttaaacctgcagctagtgcacacaaaccagtgtgtagctagtcgtaacgagcaattgcgggatgggaccaactactttgggtgtccgtgtttcacttttttccttttatatttgcttatggtgacaatatatataatacatatattgacacc

SEQ ID NO: 648 - DNA, 598 bp, unidentified
  source 1..598: mol_type = unassigned DNA; note = unclassified Enterovirus sequence
cccagtaacgttagaagaaagtacaaatgacacttagcaaatccaccaacccaggtgggttttcgtcaagcacttctgtttccccggacctagtaccaataggctgtacccacggctgaaggggaaaacgttcgttacccggctacctacttcgaaaagcctagtatcatcatagaatgtctcaagtgttacgctcagcacaaccccagtgtagttcaggtcgatgagtcaccgaattccccacgggcgaccgtgtcggtggctgcgttggcggcctgcctgcgagtttcactcgcaggacgcttgattcatgacatggtgtgaagagcctattgagctaggtagtagtcctccggcccctgaatgcggctaatcctaaccacggagccatgcgtcacaatccagtgatgtcgtggtcgtaacgagcaattctgtggcggaaccgactactttgggtgtccgtgtttcctgttttatttaccttggctgcttatggtgacaattgtatagttgtcatcatatagctattggattggccatccggatatatacaagcaactagtgttcacactacctcttttgctataacacaagtatc

SEQ ID NO: 649 - DNA, 598 bp, Rhinovirus C
  source 1..598: mol_type = genomic DNA
ccaccgggcacactgtgcgtagtactctgtgattacggtcactttgtacgcctgtttgcatccccaacccacatttcctatcatcttttatatccgtaacttagaagcataacacacagtccaataggaagcagctaaaccaagactgctaaggacaaatacttctgtttccccgggcgtgtgaatagactccaacagggttgaagctgtagcgctcgttatccgcacaactactacgcgactgttagtagcactttggatagcatgtggggttccgctccacagaaaccccatctgtaggtcagggcaatggggctacacataccccactggcgacagtggtgtagcccgcgtggtgccctgcctgggactgtgtcccaggactccacttgtttgacagggtgtgaaggcactagtgtgctagttgtgagtcctccggcccctgaatgcggctaatcctaaccctgcagccattgcaaacattccagtttgtgggtggtcgtaacgagtaattgcgggatggaaccgactactttgggtgtccgtgtttctctttttaacttgatgagtgtcttatggttacaattatacagtaacc

SEQ ID NO: 650 - DNA, 600 bp, unidentified
  source 1..600: mol_type = unassigned DNA; note = unclassified Hunnivirus sequence
agctttcttacccttcatttgtgaacccactagtctaagccgcttggaatacgatgagtggaaacgttcattctaaatggagtgaaacatgctcaattttctagctcgtgctggtctttccagtgcggggcggccctgtctggccgtaactctacagagtgtcacgccgtgcttgcggatctcacgtggcacatgacaaggctctcgctggaactgtgagtctgatgcatgtggagtaacagtgaaaagtgcatgatcacacatttgtgtgggctatgagcctgcggaacaacaactggtaacagttgcctcaggggccgaaagccacggtgttaacagcaccctcatagtttgatctatcccaggatagtgatgttgtgtacctagtaattgccaatcctcatgtcttggtatcacggcataccggagagttcgcgggtgaaggatgcccagaaggtacccgtaggtaaccttaagagactatggatctgatctggggccctgtctggagtgctttacacacagctcagggttaaaaaacgtctagcccgccaggacccgagggattcgggttttcccttaaaaacccgattagagcat

SEQ ID NO: 651 - DNA, 600 bp, unidentified
  source 1..600: mol_type = unassigned DNA; note = unclassified Enterovirus sequence
cggtaagccacccgagttctggccaagcacttctgtttccccggactgagtatcaataagttgctcgcgcggctgaaggagaaaacgttcgttacccgaccaactacttcaagaaacccagtatcaccatggaagttgcgcagtgtttcgctccgcacaaccccagtgtagatcaggtcgatgagtcaccgcaacccccacgggtgaccgtggcggtggctgcgctggcggcctgcccatggggcaacccatgggacgcttcaatactgacatggtgtgaagagtctattgagctagttggtagtcctccggcccctgaatgcggctaatcctaactgcggagcagacgctcgcatgccagcgggtagtctgtcgtaacgggtaactctgcagcggaaccgactactttgggtgtccgtgtttccttttattcttatactggctgcttatggtgacaattgaaaggttgttaccatatagctattggattggccatccggtgacaaacagagcgattatatactcttttgttgggttcatcccattgaattacaaggtattaaacaccctcagttttatcctgatactaaatacaacaaa

SEQ ID NO: 652 - DNA, 601 bp, Rhinovirus C
  source 1..601: mol_type = genomic DNA
acccacaccgtctacggacgtagtactcttgtatttcggtacatttgtacgccagttttccctccctcccccctttcacgtaacttatagaagcttgaacatacaggcgaataggaagccaacaaaccatgttggtaaacgccaagcacttctgtttccccggtattagagtgttaggcttctcacgaggctgaagcttgatatatcgttacccgcacagttactaagcagagcctagtaacactttgatctctatactggctggtcgctccgtcagaaaccccctgatagacctggcagatggggctggaaattccccactggtgacagtgttccagcccgcgtggctgcctgtccccctttcttgggggaaagccaatatatagacaaggtgccaagagccgcgtttgctaattgtgagtcctccggcccctgaatgcggctaatccaaccccacagctatcgcatggattccaccatgtaggtagtcgtaatgggcaactgtgggacggaaccgactactttgggtgtccgtgtttccttttataccttattttatctcatggtgacaacatatattgacaagtatatgttgactacc

SEQ ID NO: 653 - DNA, 602 bp, unidentified
  source 1..602: mol_type = unassigned DNA; note = unclassified Enterovirus sequence
ttaaaacagctgtgtggttgcacccaccaccaggcacaatgtgcgttgtacactgggattccggtcactttgtacgcctgtttgaccacccccccccatgcaacttagaaaatatacacatagcccaataggatgcggccaaaccaggttcgtcacgggcaagcacttctgtttccccgggtgtgtgaatagaccctaccagggttgaagctgtagcactcgttatccgcatggctactacgcaaatgttagtaacaccctctattgtacttgggatttcgttccgcagataccccatctgtagattagggcgatgaggctacacactccccactggcgacagtggtgtagcctgcgtggcgccctacctgggtctcctgacccaggattccacttacaagacagggtgtgaaggcacaagtgtgctagtcatgagtcctccggcccctgaatgcggctaatcttaaccccgtagccattgcaggcaaaccagtctgtggatggtcgtaatgggtaactacgggatggaaccgactactttgggtgaccgtgtttctcttttttctttatgtaggcactttatggttacaacataagtaacc

SEQ ID NO: 654 - DNA, 603 bp, Rhinovirus A
  source 1..603: mol_type = genomic DNA
ttgtacccacccacactgtctacggacgtagtgctctcatattacggtatgcttgcacgccagtttttaccccccttttcccaatttgtaacattagaagtttgtactattaatttggtcaataggaggtagcaagccatgctatctaagaccaagcacttctgttaccccggtatacggagaatagactccaaaagggttgaagctccaaatatcgttatccgcacaattactacgcaaagcctagtaacatcttgataagctctttggttggtcgctcagctgttacccccagtagacttggcagatgaggctgggtattccccactggcgacagtgacccagcctgcgtggctgcctacacacctggcgacaggtgtgaagccaaaagtggacaaggtgtgaagagccccgtgtgctaattgtgattcctccggcccctgaatgcggctaatccaaccccacagccaatgcatgtaaaccaacatgtatttggtcgtaacgggcaactgtgggacggaaccgactactttgggtgtccgtgtttccttttattttaaatgacttgcttatggtgacaaatattggtgtatatttgtcatc

SEQ ID NO: 655 - DNA, 603 bp, unidentified
  source 1..603: mol_type = unassigned DNA; note = Human rhinovirus A strain HRV-A80_p1187_sR2954_2009 polyprotein1 sequence
ggcttgacctttgacaactttgtgtttgaggagcagtactctactattccggtagttttgtacaccagttttatctcccttcccctatgtaacttagaagacaagcactcaagaccaataggatgataactaaccaagttgtcaaaggtcaagcacttctgtttccccggtcaaaattgatatgctccaccagggcaaaaacagttttggtcgttatccgcaaagtgcctacgcaaagcttagtaacactttgaagaatgtatggttggtcgttccgctattccccatagtagacctggcagatgaggctagaaaatccccactggcgacagtgttctagcctgcgtggctgcctgcgcacctctttgaggtgcgaagccattcctttgacaaggtgcgaagagccccgtgtgctcactttgagtcctccggcccctgaatgtggctaaccttaaccctgcagctagtgcatgcaatccagcatgtctctagtcgtaatgagcaattgcgggatgggaccaactactttgggtgtccgtgtttctctttttacttttaaattgcttatggtgacaatatatataacacatatatattgacacc

SEQ ID NO: 656 - DNA, 604 bp, Aalivirus A
  source 1..604: mol_type = genomic DNA
ttgaaagggggtgctcagggtagctccctgagctcttccctccaccctctttcaacgtctggcccacgatacgggccacctttcaatcttaactaactatccctttaatctatttggattttctggtttagaataatttggaacacataattggattatcttttaggattgtggataggatttgttcgggatatcactcccttcctgtgctaacacatattctaattccctcctttgtctattatctcttggaggtggtgctgaaatattgcaagccacttgagtgtatagatgaagtaggctcaagatgaatgttgtgttactcaaggcaagtgtagctatcactaagatattggtaacgtgaaacggattaccggtagtagcgtgatcttccgtcttagtgctctagtgactagaggacaacgacatggcatcacatatcttaaccctccagttttggcatccgggacagaatgggctggatatccgctttctttctggggtatgtgatgggtggtattggggtaaccaccttgaccatgacgctcgataagagtgaccgcctgatcattgaaacctctagtataaaattcaggctgaaatc

SEQ ID NO: 657 - DNA, 605 bp, Enterovirus C
  source 1..605: mol_type = genomic DNA
aactttagaagcaattcaaagagttcaatacagggggtacaaaccagtaccaccacgaacaagcacttctgtttccccggtgaggctgtatagactgtgcccacggtctaaaacggcagatccgttacccgctcaagtacttcgagaagcctagtatcaccttggaatcttcgatgcgttgcgctcagcaccctacccccgggtgtagcttaggtcgatgagtctgggcatgccccaccggcgacggtggcccaggctgcgttggcggcctacccatggctaacgccatgggacgctagttgtgaacaaggtgtgaagagcctattgagctacttgagagtcctccggcccctgaatgcggctaatcccaaccacggagcaagtgcctgcatgccagcaggtagcttgtcgtaacgcgcaagtctgtggcggaaccgactactttgggtgtccgtgtttccttttattcttataatggctgcttatggtgacaatctaagattgttatcatatagcttttggattggccatccggtgattatttgacttttgagcacttgtttaccttatctcatcacatattcatttaattgcttgattgcata

SEQ ID NO: 658 - DNA, 606 bp, Rhinovirus A
  source 1..606: mol_type = genomic DNA
taataatagtgtactactccacgtgggaagtacgggtggagtagtacactattattacggtaatcttgtacgccagttttataaccccttcccctatgtaacttagaagtttgaactcaagaccaacaggtggtaatcaaccagattactaaaggtcaagcacttctgtttccccggtcaatattgatatgctccaccagggcaaaaacaattgcgatcgttatccgcaaagtgcctacgcaaagcttagtaacattttgaataatatatggttggtcgttccgctattccccatagtagacctggcagatgaggctggaaactccccactggcgacagtgttccagcctgcgtggctgcctgcgcactctcacgagtgcgaagccatatatttgacaaggtgtgaagagccccgtgtgctcactttgagtcctccggcccctgaatgtggctaaccttaaccctgcagctagtgcatacaagccagtatgtagctagtcgtaatgagcaattgcgggatgggaccaactactttgggtgtccgtgtttcacttttatctttattatttgcttatggtgacagtatatagtgtatatattgttacc

SEQ ID NO: 659 - DNA, 607 bp, Rhinovirus C
  source 1..607: mol_type = genomic DNA
ttaaaacagctgtgtggttgttcccaccaccaggcacactgtgcgttgtacactgggattccggtcactttgtacgcctgtttgctatcccccccaacttatgtaatttagaagatgtacacaacgcccattaggatgcggccaaaccaggtccgcttagggcaagcacttctgtttccccgggtgtgtgaatagactctaacagggttgaagctgtagcactcgttatccgcgcaactactacgcgaatgttagtagcatcctgtgttgcatttgggatttcgctccgcagaaaaccccatctgtagattagggcaatgaggctacacataccccactggcgacagtggtgtagcctgcgtggtgccctacccaggccttcttggcctgggattccacttacaagacagggtgtgaaggcactagtgtgctagttgtgagtcctccggcccctgaatgcggctaatcttaaccccgtagcccccgcaagtaaaccaacttgtaggtggtcgtaatgagtaattacgggatggaaccgactactttgggtgtccgtgtttccttttattctttatatttgcatcctatggttacaacataagtaatc

SEQ ID NO: 660 - DNA, 608 bp, unidentified
  source 1..608: mol_type = unassigned DNA; note = unclassified Enterovirus sequence
ttaaaactgggtataggttgttcccacctgtaccacccacgtggtgtagtgctcctgtattccggtacacttgcacgccagtttgccctcccttcctgtaacgtagaagtaatataaacagaccaataggggatggcgaaccacgccgttcaaggtcaagcacttctgtttccccggcatgcgaggaatagaccttttcaagggttgaagccacaagtgtcgttacccgcattggtactacacagagcttagtaccgctctggaaacttattggttggtcgttcagccattttcccctggtagacccggcagatgaggcaagaagctccccactggtaacagtgttcttgcctgcgtggctgcctgcacaccctaatgggtgtgaagccaataagtagacagggtgtgaagagccgcgtgtgctaccaatgagtcctccggcccctgaatgcggctaatccaaccccacagctatggcatgcaatccagcatgtgcgtagtcgtaatgagtaattgtgggacggaaccgactactttgggtgtccgtgtttcccttattctcttatgtcttgcctatggtgacaatattaagtattaatattgctacc

SEQ ID NO: 661 - DNA, 608 bp, Rhinovirus C
  source 1..608: mol_type = genomic DNA
ggcatgggttgtacccacccatgccacccaagtggtgtagtgctcctgtatcccggtacacttgcacgccagtttgccctcccttttccccaagtaacttagaagcttacacacaggccactaggaggtggtaatccataccactgatggtcaagcacttctgtctccccggcacgcatggaatagaccttgaaaagggttgaagccataaatgtcgttatccgcattggtactacacaaagcctagtaatgccttgaaacttctacggttggtcgttccgctagatgcacccctctagtagacctggcagatgaggcagggcaaaccccactggcgacagtggccctgcctgcgtggctgcctgcgcgcccacttgggtgcgaagccgatgaacagacaaggtgtgaagagccccgtgtgctaccaatgagtcctccggcccctgaatgcggctaatccaaccccacagctattgcacacaaaccagtgtgtatgtagtcgtaatgagtaattgtgggacggaaccgactactttgggtgtccgtgtttccttttattctttaaatttgcacatggtgacaatattggtagtatcagtattgtcatc

SEQ ID NO: 662 - DNA, 608 bp, Rhinovirus C
  source 1..608: mol_type = genomic DNA
ttaaaactgggttatagttgctcccactataaccacccacgcggtgttgtggacttgtatttcggtacacttccatgccagttttatcttcccccctgcaacacttagaagaaatgtacttatggaccaataggcggcggccacccaggtcgttgacggtcaagcacttctgtctccccggtgatactggatacgctttacccaaggcgaaaaccgggctcatcgttatccgcaaagtgcctacgagaagtctagtagcactctgaaaacctatgactggtcgctccactgcaatcccagcagtagacctggcagatggggctagacataccccaccagcgatggtggtctagcccgcgtggctgcctgcacaccctatgggtgtgaagccagaaagtggacagggtgtgaagaacctattgtgctcactttgagtcctccggcccctgaatgtggctaatcctaaccctgcaaccgttgcgcacaacccagtgcgtatgcggtcgtaatgagcaattgcgggatggaaccaactactttgggtgtccgtgtttcttgttattcttttatttgcttatggtgacactgtatagctatacattgtcatc

SEQ ID NO: 663 - DNA, 609 bp, unidentified
  source 1..609: mol_type = unassigned DNA; note = unclassified Enterovirus sequence
taaaactgggtacaggttgttcccacctgtaccacccacgtggtgtggtgctcttgtattccggtacatttgcacgccagtttgctacccctcaccctttgtaacctagaagctattaactcgaccaataggcggtggtaaaccataccacttacggtcaagcacttctgtttccccggtatgcgaggaatagactctcacagggttgaagcctcaagtatcgttatccgcattggtactacgcaaagcctagtagcgcctcggaaatcccttggttggtcgttccgctagtttcccctagtagacctggcagatgaggcaggacattccccactggtgacagtggtcctgcctgcgtggctgcctgcgcacccttcggggtgcgaagccaagtgatggacaaggtgtgaagagccccgtgtgctactaatgagtcctccggcccctgaatgcggctaatccaaccccacagctattgcacacaaaccagtgtgtatatagtcgtaatgagcaattgtgggacggaaccgactactttgggtgtccgtgtttccttttattctcattatcttgcttatggtgacaatactgtgatatagtgttgttacc

SEQ ID NO: 664 - DNA, 609 bp, unidentified
  source 1..609: mol_type = unassigned DNA; note = unclassified Enterovirus sequence
aactgggcttgggttgtgcccacccaagctgcccacgtggcgttgtgctcttgtattccggtacacttgcacgccagtttgcctcccctaccctgcaacgaatttagaagaatggacacaaatagaccaataggtggtgacaatccatgtcactaatggtcaagcacttctgtttccccggtgtgatgtggaataaactcccccagggttgaagccataagcatcgttacccgctacgtgcctacgcaaaacctagtagcattctggagtctacttggttggccgttcagccactaacccgtggtaggcctggcagatgaggctgggcgtaccccactggtaacagtggcccagcctgcgtggctgcctgcccctctttgaggggaagccaattaggtgacagggtgtgaagagtcccgtgtgctcacgtagagtcctccggcccctgaatgtggctaatcctaaccccgcagctattgcacacaatccagtgtgttagtagtcgtaatgggcaactgtgggatggaaccaactactttgggtgtccgtgtttcttgtttttcttttatacttgcttatggtgacaaatagtgcatactgtttgacacc

SEQ ID NO: 665 - DNA, 610 bp, unidentified
  source 1..610: mol_type = unassigned DNA; note = unclassified Kobuvirus sequence
gtaacttcaagtgtgtgtgctcgtaatcttgactcctgccggaatgccgcccggttcagtgaacaaacagctaggcaagtccctcccttcccctgtggtcggttctcaccggccaccatccctcccccagcctgacgtgttacaggctgtgcaaagcccccgcgaaagctgctcacgtggcaattgtgggtcccccctttgtcaagacaccgagtctttctcccttaaggctagcccggtcccacgaacgtggaactggcaactagtggtgtcactacacgcctccgacctcggacgcggagtgctgttccccaagctgtaaccctgacccaagactgtgctgcctggcaagcaccgtctgggaagatgttccgctgtggctgccaaacctggtaacaggtgccccagtgtgtgtagtcttcctccagtctccggactggcagtcttgtgtaaagatgcagtgtaaggttcaagtgccaaatccctggaaggagtgaccctctactgccctaggaatgctgtgcaggtacccccaacttcggttggggatctgagcacaggctaattgtctacgggtagtttcatttcccatcctctcttttttggcatc

SEQ ID NO: 666 - DNA, 610 bp, unidentified
  source 1..610: mol_type = unassigned DNA; note = unclassified Enterovirus sequence
ttaaaactgggtacaggttgttcccacctgtatcacccacgtggtgtggtgctcttgtattccggtacacttgcacgccagtttgccacccctcacccgtcgtaacttagaagctaacaactcgaccaacaggcggtggtaaaccataccacttacggtcaagcactcctgtttccccggtatgcgaggaatagactcctacagggttgaagcctcaagtatcgttatccgcattggtactacgcaaagcttagtagtgccttgaaagtcccttggttggtcgctccgctagtttcccctagtagacctggcagatgaggcaggacactccccactggcgacagtggtcctgcctgcgtggctgcctgcgcacccttaggggtgcgaagccaagtgacagacaaggtgtgaagagccccgtgtgctaccaatgagtcctccggcccctgaatgcggctaatccaaccccacagctattgcacacaagccagtgtgtatgtagtcgtaatgagcaattgtgggacggaaccgactactttgggtgtccgtgtttccttttattcttatcattctgcttatggtgacaatactgtgaaatagtgttgttacc

SEQ ID NO: 667 - DNA, 610 bp, Rhinovirus A
  source 1..610: mol_type = genomic DNA
ttaaaactggatctaggttgttcccacctagatctcctacatggagttgtactctattattccggtaattttgtacgccagttttatatccctacccccatgtaacttagaagttaagcacaacgaccaataggaggcaattgaccaaattgctaaaggtcaagcacttctgtttccccggtcaagattgatacgctccaccagggcgaaaacaattgagatcgttatccgcaaagtgcctacgcgaagcctagtaacactttgaagagtttatggttggtcgctccgctattccccatagcagacctggcagatgaggctagaagctccccactggtgacagtgttctagcctgcgtggctgcctgcacacccttatgggtgtgaagccatatacttgacagggtgtgaagagcctagtgtgctcactttgagtcctccggcccctgaatgtggctaaccttaaacccgtagctagtgcacacaatccagtgtgtggctagtcgtaatgagcaattacgggatgggaccaactactttgggtgtccgtgtttcactttttccttttgtatttgcttatggtgacaatatatagattatatattgacacc

SEQ ID NO: 668 - DNA, 610 bp, Rhinovirus A
  source 1..610: mol_type = genomic DNA
ttaaaactgggtctaggttgttcccacctaggcctcctacatggagttgtactctattattccggtaattttgtacgccagttttatatcccttcccccatgtaacttagaagtttgacacactgaccaataggtggcaattaaccaaattgctaaaggtcaagcacttctgtttccccggtcaagattgatacgctctaccagggcgaaaacaattgagatcgttatccgcaaagtgcctacgcgaagcctagtaatatcttgaagaatttatggttggtcgctccgccattacccatggtagacctggcagatgaggctagaaattccccactggtgacagtgttctagcctgcgtggctgcctgcacaccctcacgggtgtgaagccatacgtttgacaaggtgtgaagagcctagtgtgctcactttgagtcctccggcccctgaatgtggctaaccttaaacccgtagctggtgcacacaaaccagtgtgtagctagtcgtaatgagcaattacgggatgggaccaactactttgggtgtccgtgtttcactttttccttttatatttgcttatggtgacaatatatagattatatattggcacc

SEQ ID NO: 669 - DNA, 610 bp, Rhinovirus A
  source 1..610: mol_type = genomic DNA
ttaaaactgggtttgggttgatcccacccaaacctcccaagcggagtggtactctgttatttcggtaactttgtacgccagttttatattccctcccccctttaaactgtaaagctaagcacacagaccaatagctgacaatcatccagattgttaatggtcaagcacttctgtttccccggtcaacgttgatatgctccaacagggcaaaaacaactgcgatcgttatccgcaaagtgcctacgcaaagcctagtagcacctttgaagtcatttggttggtcgctccgctgttccccacagtagacctggcagatgaggctagaaataccccactggtgacagtgttctagcctgcgtggctgcctgcacaccctttgggtgtgaagccaaatcatggacaaggtgtgaagagccccgtgtgctcactttgagtcctccggcccctgaatgtggctaaccttaaccctgcagctagagtgcacaatccagtgcatttctagtcgtaatgagcaattgcgggatgggaccaactactttgggtgtccgtgtttcactttttacctattatttgcttatggtgacaatatatataattatatattggcacc

SEQ ID NO: 670 - DNA, 610 bp, Rhinovirus A
  source 1..610: mol_type = genomic DNA
ttaaaactgggtccaggttgttcccacctggatctcctaatgggagttgtactctgttattccggtaactttgtatgccagttttatctccctacccccaatgtaacttagaagatgtacacaacgaccaataggtgatgatcaaccagattatcaaaggtcaagcacttctgttttcccggttagagttgatatgctccaacagggcaaaaacaactttaatcgttatccgcaaagcgcctacgcaaagcctagtaacagcttcgaagatttatggttggtcgttccgctgttccccacagtagacctggcagatgaggctagagattccccactggtaacagtgttctagcctgcgtggctgcctgcgcacccttcgggtgcgaagccatatttcggacaaggtgcgaagagccccgtgtgctcgctttgagtcctccggcccctgaatgtggctaaccttaaccctgcagctagtgcatacaaaccagtatgtggctagtcgtaatgagcaattgcgggatgggaccaactactttgggtgtccgtgtttctctttttccttttattattgcttatggtgacaatatatagtttatatattggcacc

SEQ ID NO: 671 - DNA, 610 bp, Rhinovirus C
  source 1..610: mol_type = genomic DNA
ttaaaactgaaccatagttgttcccactgtggttgcccaaggggcgtggtggtcttgtattacggtacatttccatgccagttttatcaccccttcccgaaacatagaagaaatgcacacaccgaccaataggaggtggtcaaccagaccactaaaggtcaagcacttctgtttccccggttggcttggatatgcttcacccgaggcaaaaaccgagccaatcgttatccgcaaagtgcctacgagaagcctagtagcacccttgaagccaatggttggtcgctccgttgcaaccccagcagcagacctggcagatgaggctgagcattccccaccagcgatggtggctcagcctgcgtggctgcctgcgcatccttcgggatgcgaagccagaaagtggacaaggtgtgaagagcctattgtgctcactttgagtcctccggcccctgaatgtggctaatcctaaccccgcagctactacacataagccaatgtgcaggtagtcgtaacgggcaactgtgggatggaaccaactactttgggtgtccgtgtttccttgttatctttttgaatgcctatggtgacaattgtacagtatacatttgttacc

SEQ ID NO: 672 - DNA, 611 bp, Rhinovirus A
  source 1..611: mol_type = genomic DNA
ttaaaactgaatccagattgttcccatctggatttcctacatggagttgtactctattattccggtaattttgtacgccagttttatcaccccttcccccgtaacttagaagtttgaaacaaaagaccaataggaggtaactatccaagttactataggtcaagcacttctgtttccccggtcaaagttgatatgctccaccagggcaaaaacaattgagatcgttatccgcaaagtgcctacgcaaagcctagtagtatcttgaaaagcatgtggttggttgctccgctgtaccccacagtaaacctggcagatgaggctagaagttccccactggtgacagtgttctagcctgcgtggctgcctgcgcactctttgagtgcgaagccatatgtttgacaaggtgtgaagagccccgtgtgctcactttgagtcctccggcccctgaatgtggctaaccttaaccctgcagctagtgcatgcaatccagcatgtggctagtcgtaatgagcaattgcgggatgggaccaactactttgggtgtccgtgtttcacttttttccttttataattgcttatggtgacaatatatagtgatatatattgacacc

SEQ ID NO: 673 - DNA, 611 bp, Rhinovirus A
  source 1..611: mol_type = genomic DNA
ttaaaactggatctaggttgttcccacctagatctcccaagtggagtggtacactattatcacggtaattttgtacgccggttttatctccccttaccccaagtaacttagaagtattacataaagaccaacaggcagtgattatccagatcactaaaggtcaagcacttctgtctccccggtcaaagttgatatgctccaacagggcaaaaacaactgagatcgttatccgcaaagtgcctacgcagagcctagtaactaccttgaaattacttggttggtcgttccaccaaaccccatggtagacctggcagatgaggctagaaattccccactggtaacagtgttctagcctgcgtggctgcctgcacaccctttgggtgtgaagccaagtaatggacagggtgtgaagagccgagtgtgctcactttgagtcctccggcccctgaatgtggctaaccttaaccctgcagctagagcgcgcaaaccagcgtgtatctagtcgtaatgagcaattgcgggacgggaccaactactttgggtgtccgtgtttctttttattcttatatttgcttatggtgacaatatataattatttgtatattggcacc

SEQ ID NO: 674 - DNA, 611 bp, Rhinovirus A
  source 1..611: mol_type = genomic DNA
ataaaactggcgtgcatagttcccatccagatcacccaagtggtgtagtgctctgttattccggtaactttgcacgccagttttattacccctttccccagtaacttagaagctttaatacactgaccaatagggtgcgacaaccagtcgtacaaggtcaagcacttctgtttccccggtcaatgttgatatgctcctccagggcaaaaacaatagcgatcgttatccgcaagatgcctacgcaaagcctagtagcatctttgaaaatacttggttggtcgctcatgtgcaaccccagcattagacctggcagatgaggctagaaattccccactggcgacagtgttctagcctgcgtggctgcctgcacaccctaacgggtgtgaagcctggtattggacaaggtgtgaagagccccgtgtgctcatcttgagtcctccggcccctgaatgcggctaaccttaaacctgcagccattgcttacaatccagtgagtttatggtcgtaatgagcaattgcgggatgggaccgactactttgggtgtccgtgtttctctttttacttaaatttgagcttatggtgacaatatatagcaatatatattggcatc

SEQ ID NO: 675 - DNA, 611 bp, unidentified
  source 1..611: mol_type = unassigned DNA; note = unclassified Enterovirus sequence
ttaaaactgaatcatggttgttcccaccatgattacccacgcggtgcagtggtcttgtattacggtacatttccataccagttttatacaccccaccccgaaacatatagaagtttgtacacaatgaccaataggtggtggccatccaggttactgacggtcgagcacttctgtttccccggtacccttgtatacgcttcacccgaggcgaaaaacgaggttatcgttatccgcaaagtgcctacgagaagcctagtaacacttttgaaacctatggctggtcgctcagctgctcacccagcagtagacctggcagatgaggctagacattccccaccagcgatggtggtctagcctgcgtggctgcctgcacaccctattgggtgtgaagccagaaagtggacagggtgtgaagagcctattgtgctcactttgagtcctccggcccctgaatgtggctaatcctaaccccgtagctgttgcatgcaacccagcatgtatgcagtcgtaatgggcaactatgggatggaaccaactactttgggtgtccgtgtttctcgtttcacttttcattgcttatggtgacaattgtagttgatacacttgttacc

SEQ ID NO: 676 - DNA, 611 bp, Rhinovirus A
  source 1..611: mol_type = genomic DNA
ttaaaactgggtgcgagttgttcccactcgcacttcctacgtggagtagtacactattattacggtaattttgtacgccagttttataacccttccccttttgtaacttagaagtttgaacttgagaccaataggtggtgatcaaccagatcgccaaaggtcaagcacttctgtttccccggtcaacattgatatgctccaccagggcaaaaacaattgcgatcgttacccgcaaagtgcctacgcaaagcttagtaatatcttgaacgatatatggttggtcgctccactaatccccatagtagacctggcagatgaggctggaaactccccactggcgacagtgttccagcctgcgtggctgcctgcgcactctcacgagtgcgaagccatatatttgacaaggtgtgaagagccccgtgtgctcactttgagtcctccggcccctgaatgtggctaaccttaaccctgcagctagtgcatacaaaccagtatgtggctagtcgtaatgagcaattgcgggacgggaccaactactttgggtgtccgtgtttcactttttcttttatggtttgcttatggtgacagtatatagtgtatatattgttacc

SEQ ID NO: 677 - DNA, 611 bp, Rhinovirus A
  source 1..611: mol_type = genomic DNA
ttaaaactgggtccaggttgttcccacctggacttcccacgtggagttgtgcactgttattccggtaactttacacgccagttttatctcccttcccaaatgtaacttagaagatgtacacagcgaccaataggtggcaactagccaagttgcttaaggtcaagcacttctgtccccccggtcaatgttgatacgctctcccagggcgaaaacaactgagatcgttatccgcaaggcgcctacacaaaacctagtaacatcttgaatggtatgtggctggtcgttccgctaaaccccatagtagacctggcagatgaggctagaaattccccactggcgacagtgttctagcctgcgtggctgcctgcgtgtccttacggacacgaagccatatacttgacaaggtgtgaagagtcccgtgtgctcgtcttgagtcctccggcccctgaatgtggctaaccttaaccctgcagccagtgcgcacaaaccagtgtgtagctggtcgtaatgagtaattgcgggatgggaccaactactttgggtgtccgtgtttcactttttaccttttattatgcttatggtgacaatatatagatgcatatattgacacc

SEQ ID NO: 678 - DNA, 611 bp, Rhinovirus A
  source 1..611: mol_type = genomic DNA
ttaaaactgaatccaggttgttcccacctggatttcccatgtggagtagtacactgttattccggtaactttgtacgccagttttataaccccttccccttatgtaacttagaagataagcacaaagaccaataggtggtggctatcccagtcactaaaggtcaagcacttctgtttccccggtcaacgttgatatgctccaccagggcaaaaacaaccgagatcgttatccgcaaagtgcctacgcaaagcctagtagcactttgaatagcatgtggttggtcgctccactattccccatagtagacctggcagatgaggctagaaatcccccactggcgacagtgttctagcctgcgtggctgcctgcgtgtcctaacggacacgaagccatatgtttgacaaggtgtgaagagccccgtgtgctcactttgagtcctccggcccccgaatgtggctaaccttaaccctgcagctggggcatacaatccagtgtgaactcagtcgtaatgagcaattgcgggatgggaccaactactttgggtgtccgtgtttcacttttttttataatgcttatggtgacaatatataataatttgtatattggcacc

SEQ ID NO: 679 - DNA, 611 bp, Enterovirus B
  source 1..611: mol_type = genomic DNA
attagctggcccggtacaccaatcgggtcttgaccaagcacttctgttaccccggactgagtatcaataggctgctcacgcggctgaaggagaaaacgttcgttatccggccaattacttcgagaaacctagtaacaccgtgaaggttgcgcagcgtttcgttccgcactaccccagtgtagatcaggtcgatgagtcaccgcatcccccacgggtgaccgtggcggtggctgcgttggcggcctgcccatggggaaacccatgggacgcttcaatattgacacggtgcgaagagtctattgagctaattggtagtcctccggcccctgaatgcggctaatcctaactgcggagcagatacccgcacaccagcgggcagtctgtcgtaatgggtaactctgcagcggaaccgactactttgggtgtccgtgtttccttttatttttatattggctgcttatggtgacaattgaaagattgttaccatatagctattggattggccatccagtgagcaacagagcgattgtatttctctttgttggattcataccactaaactacaatagttataacactctattgtatatcattcatctgaacacaaaaag

SEQ ID NO: 680 - DNA, 612 bp, unidentified
  source 1..612: mol_type = unassigned DNA; note = unclassified Kobuvirus sequence
tttcccctgttcgtaactaagtgtgtgcccaatctcctcactcctgctggcttcaccgaccggcagtgtccaaaatgctaggtgaatcccctccctttcctctgggcttctgcccagcttcctccccccagcctgacgtgacacaggctgtgcaaagaccccgcgaaagctgccaaaagtggcaattgtgggtcccccctttgtaaaggcgtcgagtctttctccctcaaggctagacccgtcagtgaattctgtcgggcaactagtgacgccactgcacgcctctgacctcggccgcggagtgctgccccccaagtcgtgcccctgaccacaagttgtgctgtctggcaaacattgtctgtgagaatgttccgctgtggctgccaagcctggcaacaggctgccccagtgtgcgtagttctcatccagacttcggtctggcaacttgctgttaagacacggcgtaaggggcgtgtgccaacgccctggaacgagtgtccactctaataccccgaggaatgctacgcaggtacccctggttcgccagggatctgagcgtaggctaattgtctaagggtattttcatttcccattctttctttcttgttcata

SEQ ID NO: 681 - DNA, 612 bp, Rhinovirus A
  source 1..612: mol_type = genomic DNA
ttaaaactggatctgggttgttcccacccagatttcccatgtggagtagtactctattattccggtaattttgtacgccagttttatattccctaccccgagtaacttagaagataagcacacaaggccaatagtgggtgattagccaaatcatcaaaggtcaagcacttctgtttcccccggtcaaggttgatatgctctaccagggcaaaaacaactgagatcgttatccgcaaaatgcctacacaaagcctagtatcatcttggaaggcacagagttggtcgctccactattccccatagtagacctggcagatgaggctagaaaatccccactggcgacagtgttctagcctgcgtggctgcctgcgtgccttgcgaggcacgaagccctgtgtttgacaaggtgtgaagagccccgtgtgctcattttgattcctccggcccctgaatgtggctaaccttaaccctgcagctagtgcacacaaaccagtgtgtatctagtcgtaatgagtaattgcgggacgggaccaactactttgggtgtccgtgtttcactttttaccttttaattgcttatggtgacaatatatataaatatatattgacacc

SEQ ID NO: 682 - DNA, 612 bp, Rhinovirus A
  source 1..612: mol_type = genomic DNA
ttaaaactggatctgggttgctcccacccagattacccaagtggtgtagtactctgttattacggtagctttgtacgccagttttatcacccctccccacaatgtaacttagaagttttacacttacagaccaataggatgtgattatccaaatcactaaaggtcaagcacttctgtttccccggttagatttgatacgctccaacagggcgaaaacagatctgatcgttatccgcaagatgcctacgcaaagcttagtagcgctctgaatgctttttggctggttgttccactacaaacccagtagtaaacctggcagatgaggctagaagttccccactggcgacagtgttctagcctgcgtggctgcctgcacaccctatgggtgtgaagccaatcagttgacagggtgtgaagagccccgtgtgctcatcttgagtcctccggcccctgaatgtggctaaccttaaacccgcagccaaggtgtgcaaaccagcacattcttggtcgtaacgagtaattgtgggatgggaccaactactttgggtgtccgtgtttctttttattcttttacaatgcctatggtgacaatatatagtatatattgtcatt

SEQ ID NO: 683 - DNA, 612 bp, Rhinovirus A
  source 1..612: mol_type = genomic DNA
ttaaaactgggtccaggttgttcccacctggatctcctacatggagttgtactctgttattccggtaaccttgtacgccagttttatatcccctccccaaatgtaacttagaagttatacacacagaccaataggcggtgatcctccagatcactaacggtcaagcacttctgtctccccggtttgaattgatacgctccaacagggcgaaaacaatttgaatcgttacccgcaaagtgcctacgcaaagcctagtagcactttagaaaatttatggttggtcgctcagctataccccctagtagacctggcagatgaggctagaagtaccccactggcgacagtgttctagcctgcgtggctgcctgcacaccctcacgggtgtgaagccatatatttgacaaggtgtgaagagccccgtgtgctcactttgagtcctccggcccctgaatgtggctaaccttaaccctgcagctagtgcatgtaatccaacatgttgctagtcgtaatgagcaattgcgggatgggaccaactactttgggtgtccgtgtttcactttttaccttttatttgcttatggtgacaatatatataatatatatattggcatc

SEQ ID NO: 684 - DNA, 612 bp, unidentified
  source 1..612: mol_type = unassigned DNA; note = unclassified Enterovirus sequence
ttgaaactgagtgtgggttgttcccacccacacttcccatgtggagtagtacactgttattacggtaaccttgtacgccagttttatcatccctttccctttgtaacttagaagttttaaacttgagaccaataggtggtgatcagccagatcactaaaggtcaagcacttctgtctccccggtcaacgctgatatgctccgccagggcaaaaacagctgcgatcgttatccgcaaagtgcctacgcaaagcctagtaatatcttgaatgatatatggttggtcgttcagctaaaccccatagtagacctggcagatgaggctggaaataccccactggtgacagtgttccagcctgcgtggctgcctgcgcactcttgcgagtgcgaagccatatatttgacaaggtgtgaagagccccgtgtgctcactttgagtcctccggcccctgaatgtggctaaccttaaccctgcagctagtgcatacaatccagtgtgtggctagtcgtaatgagcaattgcgggatgggaccaactactttgggtgtccgtgtttcactttttcctttataatttgcttatggtgacagtatatagcttatatattgttacc

SEQ ID NO: 685 - DNA, 612 bp, Rhinovirus C
  source 1..612: mol_type = genomic DNA
ttaaagctggatcatggttgttcccaccatgattacccacgcggtgcagtggtcttgtattacggtacatttccataccagttttatacaccccaccccgaaactcatagaagtttgtacacaatgaccaataggtggtggccatccaggtcgctaatggtcaagcacttctgtttccccggcacccttgtatacgcttcacccgaggcgaaaaatgaggttgtcgttatccgcaaagtgcctacgaaaagcctagtaacactttgaaaacccatggttggtcgctcagctgtttacccaacagtagacctggcagatgaggctagacattccccaccagcgatggtggtctagcctgcgtggctgcctgcacaccctgccgggtgtgaagccagaaagtggacaaggtgtgaagagcctattgtgctcactttgagtcctccggcccctgaatgtggctaaccctaaccccgtagctgttgcatgtaacccaacatgtatgcagtcgtaatgggcaactatgggatgggaccaactactttgggtgtccgtgtttcctgttttactttttcattgcttatggtgacaattgtatctgatacacttgttacc

SEQ ID NO: 686 - DNA, 612 bp, Rhinovirus A
  source 1..612: mol_type = genomic DNA
ttaaaactgggtccaggttgttcccacctggatctcctacatggagttgtactctattatcccggtaatcttgtacgccagttttatatcccttccctttttgtaacttagaagttaaacacacagaccaataggtggtggctatccaagtcattaatggtcaagcacttctgtttccccggtttagattgatacgctccaccagggcgaaaacaatttaaatcgttatccgcaaaatgactacgcaaagcctagtaatatcttgaaggacttatggttggtcgctccactaaaccccatagtagacctggcagatgaggctagaaataccccactggagacagtgttctagcctgcgtggctgcctgcacaccctatgggtgtgaagccatactttcgacaaggtgtgaagagccccgtgtgctcattttgagtcctccggcccctgaatgtggctaaccttaaccctgcagctagtgcatgcaatccagcatgttgctagtcgtaacgagcaattgcgggatgggaccaactactttgggtgtccgtgtttcactttttccttttatttgcttatggtgacaatatatatagtacatatatattggcatc

SEQ ID NO: 687 - DNA, 613 bp, Rhinovirus A
  source 1..613: mol_type = genomic DNA
ttaaaactggatctgggttgttcccactcaggtctcccacgtggagtagtacactgttattacggtaactttgtacgccagttttacatcccctccccccaagtaacttagaagataagcacacaggccaataggagatgatcagccagatcattatgggccaagcacttctgtttccccggtcgaagttgatatgctccaacagggcaaaaacaactgagatcgttatccgcaaagcgcctacgcaaagcctagtaactatctggaaattacttggttggtcgctccgccataccccatggtagacctggcagatgaggctagaaattccccactggcgacagtgttctagcctgcgtggctgcctgcacaccctttttgggtgtgaagccaagtaatggacagggtgtgaagagccccgtgtgctcgctttgagtcctccggcccctgaatgtggctaaccttaaccccgcagctagagcacacaacccagtgtgtatctagtcgtaatgagcaattgcgggatgggaccaactactttgggtgtccgtgtttcttgtttttcttttatatttgcttatggtgacaatatatagtgatatatattggcatc

SEQ ID NO: 688 - DNA, 613 bp, Rhinovirus A
  source 1..613: mol_type = genomic DNA
ttcaaactgggttgtggttgatcccaccacaactgctcactgagcgtagtgctctcatattccggtatgcttgcacgccagttttactcccctcccctcattgtaacttagaagcaaagcacacctgatcaataggagataacttgccaggttatctaagatcaagcacttctgtttccccggcaagtgtgaatatgctttacccaaggcaaaagctgatcttgtcgttatccgcaaggtgcctacgagaagcctagtaatgctcaagatgtggtttgactggtcgctccgctgttccccacagtagacctggcagatgaggctggacattccccaccagcgatggtggtccagcctgcgtggctgcctgcacaccctatgggtgtgaagccaaatttactgacagggtgtgaagagcctattgtgctcaccttgattcctccggcccctgaatgtggctaatcctaaccccgctgctattgcacacgaaccagtgtgtagatagtcgtaatgagcaatagtgggatggaaccaactactttgggtgtccgtgtttcttgtttttctttatttgtcttatggtcacaatatatatataacgtatattgtgatc

SEQ ID NO: 689 - DNA, 613 bp, unidentified
  source 1..613: mol_type = unassigned DNA; note = unclassified Enterovirus sequence
tgtggttgtacccaccaccgggcatactgtgcgtggtacactgtgattccggtcaccttgtacgcctgtttgctaccctaccccaactttctttcgttctttacttccagtaacttagaagttgacacagagtccaataggatgcagctaatccaagtctgccacggacaagcacttctgtttccccgggtgtgtgaatagactccaacagggttgaagctgtagcactcgttatccgcataactaccacgcgaatgttagtaacaccctctaggtatagtgggatttcgctccgcagaaaccccatctgtagattagggcaatgaggctacacggaccccactggcgacagtggtgtagcctgcgtggtgccctacctggggtttcataccccaggattccactttactgacagggtgtgaaggcgctagtgtgctagttgtgagtcctccggtccctgaatgtggctaatcctaaccccgtggccatttcatgtaaaccaacatgcaggtggtcgtaacgagtaatcacgggatggaaccaactactttgggtaaccgtgtttcctgttttactttaatgtgtgtcttatggttacaactatagagtaacc

SEQ ID NO: 690 - DNA, 614 bp, Rhinovirus A
  source 1..614: mol_type = genomic DNA
ttcaaactggatctgggttgttcccacccagatcacccaagtggtgtagtactctgtcattccggtgactttgtacgccagtttttacaccccccccttcttgtaacttagaagaattaagttcagaccaataggaaaacgacaaaccagtcgtttaaggtcaagcacttctgtttccccggtcaatgctgatatgcttcaccaaggcaaaaacagcagcgatcgttacccgcaagacgcctacgcaaagcctagtaatgcctttgaagatatttgtctggtcactcaggtacaatcccagtactagacctggcagatgaggctggaaaatccccactggcgacagtgttccagcctgcgtggctgcctgcacacccatacgggtgtgaagccaaatattggacaaggtgtgaagagccccgtgtgctcgtcttgagtcctccggcccctgaatgcggctaaccttaaccccacagccattgcttgcattccagcaagtctatggtcgtaatgagcaattgtgggatgggaccgactactttgggtgtccgtgtttcactttttaccttttattatgcttatggtgacaatatatagcgttatatattggcatc

SEQ ID NO: 691 - DNA, 614 bp, Rhinovirus A
  source 1..614: mol_type = genomic DNA
cacttgggtgatctgggtgggaacaacccagatcccccaagtggtgtagtgctctgttattccggtaaccttgcacgccagttttatcacccctttccccatgtaacttagaagttttaaacacagaccaatagggagcgacaaaccagtcgtgaaaggtcaagcacttctgtttccccggtcaacgttgatatgctctcccagggcaaaaacaacagcgatcgttacccgcaagatgcctacgcaaagcttagtaacgccctcgaagatactcggttggtcgttcatgtgcaaccccagcattagacctggcagatgaggctagaaattccccactggcgacagtgttctagcctgcgtggctgcctgcacaccctgacgggtgtgaagcctagtattggacaaggtgtgaagagccccgtgtgctcatcttgagtcctccggcccctgaatgcggctaaccttaaacctgcagccattgctcacaatccagtgagtttgtggtcgtaatgagcaattgcgggatgggaccgactactttgggtgtccgtgtttctctttttaccttacattttagcttatggtgacaatatatagtgatatatattggcatc

SEQ ID NO: 692 - DNA, 614 bp, unidentified
  source 1..614: mol_type = unassigned DNA; note = unclassified Enterovirus sequence
ttaaaactgaaccatggttgttcccaccatggttacccacgtggtgcagtggacttgtattacggtacatttccataccagttttataacccctaccctgaaacttttagaagcatgtacacatacagaccaacaggtggcaatcagccagattgctaacggtcaagcacttctgtttccccggtaatcttgcatacgcttcacccgaggcgaaaagtgagattatcgttatccgcaaagtgcctacgagaagcccagtagcacattgaaagcctatggttggtcgctcagctgttcacccaacagtagacctggcagatgaggctagatattccccaccagcgatggtgatctagcctgcgtggctgcctgcacaccctatcgggtgtgaagccagaaagtggacaaggtgtgaagagcctattgtgctcactttgagtcctccggcccctgaatgtggctaatcctaaccccgtagctgttgcatgtaacccaacatgtctgcagtcgtaatgggcaactacgggatggaaccaactactttgggtgtccgtgtttcttgtttttctttatatttgcttatggtgacaattgtagatactacacttgttacc

SEQ ID NO: 693 - DNA, 615 bp, Enterovirus A
  source 1..615: mol_type = genomic DNA
cgaccaatagtgggcgtgacgcaccagtcacgtcttggtcaagcacttctgtttccccggaccgagtatcaatagactgcttacgcggttgaaggagaaaacgttcgttacccggctaactacttcgagaaacctagtagcaccatgaaagttgcagagtgtttcgctcagcacttcccccgtgtagatcaggtcgatgagccactgtgaaccccacgggcgaccgtgacagtggctgcgttggcggcctgcccatggggcaacccgtgggacgctctaatacagacatggtgtgaagagtctattgagctagttagtaatcctccggcccctgaatgcggctaatcctaactgcggagcacgcaccctcaatccagggggcagtgtgtcgtaacgggtaactctgcagcggaaccgactactttgggtgtccgtgtttccttttattccttactggctgcttatggtgacaatcaaagagttgttaccatatagctattggattggccatccggtgtctaacagagctattgtctacctgttcattggatacgtccctctcaattacaagactctccaaactcttaactacatactgctacttaatcataagaa

SEQ ID NO: 694 - DNA, 615 bp, Rhinovirus A
  source 1..615: mol_type = genomic DNA
ttaaaactgggtttgggttgatcccacccaaaccacccacgtggtgtagtacactgttatctcggtaactttgtacgccagttttatctccccctcccccctttgtaacttagaagtcatgcacaatgaccaatagcaggcaatcatccagattgtcatcggtcaagtacttctgtttccccggttcagattgatatgctccaacagggcaaaaacaacctggatcgttatccgcaagatgcctacgcagaacctagtatcacactggaagattctcggttggtcgctcagttacaaccccagtaacagacctggcagatgaggctagaaattccccactggcgacagtgttctagcctgcgtggctgcctgcacacccgtttgggtgtgaagcctagaattggacagggtgcgaagagtcgagtgtgctcatcttgagtcctccggcccctgaatgcggctaaccctaaccctgcagccattgcccacaaaccagtgggtctatggttgtaatgagcaattgcgggatgggaccgactactttgggtgtccgtgtttcactttttacttattatttgcttatggtgacaatatatagatacatatattgacacc

SEQ ID NO: 695 - DNA, 615 bp, Rhinovirus A
  source 1..615: mol_type = genomic DNA
ttaaaactgggtttgggttgttcccacccaaaccacccacgcggtgttgtacactgttattccggtaaccttgtacgccagttttatatcccttcccccccttgtaacttagaagacatgcgaatcgaccaatagcaggcaatcaaccagattgtcaccggtcaagcacttctgtttccccggctctcgttgatatgctccaacagggcaaaaacaattggagtcgttacccgcaagatgcctacgcaaaacctagtagcatcttcgaagatttttggttggtcgctcagttgctaccccagcaatagacctggcagatgaggctagaaataccccactggtgacagtgttctagcctgcgtggctgcctgcacacccacacgggtgtgaagccaaagattggacaaggtgtgaagagtcacgtgtgctcatcttgagtcctccggcccctgaatgcggctaaccttaaccccgtagccattgctcgcaatccagcgagtatatggtcgtaatgagtaattacgggatgggaccgactactttgggtgtccgtgtttcactttttacttatcaatttgcttatggtgacaatatatatagatatatattgacacc

SEQ ID NO: 696 - DNA, 615 bp, Rhinovirus A
  source 1..615: mol_type = genomic DNA
ttaaaactgggttcaggttgatcccacctgaacctcccaagcggagtagtactctgttatttcggtaactttgtacgccagttttatatccccctccccatgtaacttagaagatgagctcacagaccaatagccggcaatcatccagattgtcaatggtcaagcacttctgtttccccggtcaacgttgatatgctccaacagggcaaaaacaactgagatcgttatccgcaaagtgcctacgcaaagcctagtaatgctttcgaagtcatttggttggtcgctccgctgtaacccacagtagacctggcagatgaggctagaaactccccactggcgacagtgttctagcctgcgtggctgcctgcacaccctttgggtgtgaagccaaattacggacaaggtgtgaagagccccgtgtgctcactttgagtcctccggcccctgaatgtggctaaccttaaccctgcagctagagtgcacaatccagtgtatttctagtcgtaatgagcaattgcgggatgggaccaactactttgggtgtccgtgtttcactttctttttttatcttttatttgcttatggtgacaatatattgaattatatattgacacc

SEQ ID NO: 697 - DNA, 615 bp, Rhinovirus A
  source 1..615: mol_type = genomic DNA
ttcaaactggatctgggttgttcccacccagatcacccaagaggtgtagtgctctgtcattccggtgaccttgcacgccagttttatcaccccttccctcttgtaacttagaagaattaaactcagaccaataggaagcgacaagccagtcgtgacaggtcaagcacttctgtttccccggtcaaagttgatatgcttcaccaaggcaaaaacaacagcgatcgttatccgcaagatgcctacgcaaagcctagtagtgcctttgaaaatatttgtctggttgctcaagtacaaccccagtactaaacctggcagatgaggctggagcttccccactggtaacagtgttccagcctgcgtggctgcctgcacacccttacgggtgtgaagccaaatattggacaaggtgtgaagagccccgtgtgctcatcttgagtcctccggcccctgaatgcggctaaccttaaccccacagccattgctcacaatccagtgagtgtatggtcgtaacgagcaattgtgggatgggaccgactactttgggtgtccgtgtttctcttttttcctttttaattctgcttatggtgacaatatatagtgttatatattggcatc

SEQ ID NO: 698 - DNA, 615 bp, Rhinovirus A
  source 1..615: mol_type = genomic DNA
ttaaaactggatcatggttgttcccaccatgattacctacgggtgtagtatacttgtatcccggtacatttatacgccagttttataacccccaccccaaatgtaacttagaagcatgtacacaatgatcaatagggtggtggctatccaagtcatctaagatcaagcacttctgtctccccggtgagtgtgaatatgctttacccaaggcaaaagctaatctcatcgttatccgcaaggtgcctacgggaagcctagtaacattctgaagatattttggttggtcgatcagttgcactcacccatgcaatagacctggcagatggggctaggcatacctcactggtaacagtggcctagcccgcgtggctgcctgcacaccttcgggtgtgaagccataatattgacagggtgcgaagagcctactgtgctcaccttgagtcctccggcccctgaatgtggctaatcctaaccccgtatccattgcacacaaaccagtgtgtctatggtcgtaatgggtaactacgggatggaaccaactactttgggtgtccgtgtttcttgtttttctttaatactgcttatggtgacattatatattgatatagtgtcatc

SEQ ID NO: 699 - DNA, 615 bp, unidentified
  source 1..615: mol_type = unassigned DNA; note = unclassified Enterovirus sequence
ttaaaactgggcaggagttgttcccactcttgccacccacagggtgtggtgctcttgtattacggtacacttgcatgccagttttatctcccccctccccacaatgtaatttagaagccaatcacatgaccaataggaagtggtaagccataccacttaaggtcaagcacttctgtttccccggtatgcgtggaataggcctcttaaggggctgaagccacaattatcgttacccgcatgtgaactacgcgaaacctagtactaccttgaaagtacattgtctggtcgctcagccaatccccatggtagacctggcagatgaggcaagaggtaccccactggtaacagtgttcttgcctgcgtggctgcctgcacacccttaccgggtgtgaagccaatgtatagacagggtgagaagagtcgagtgtgcttcacatgagtcctccggcccctgaatgcggctaatccaaccccgcagctgtagtatgcaagccagcatatgtgcagtcgtaatgggtaactgcgggacggaaccgactactttgggtgtccgtgtttcctgtttttcctttattcatgcttatggtgacaatattgagaattaatattgtcact

SEQ ID NO: 700 - DNA, 615 bp, Rhinovirus A
  source 1..615: mol_type = genomic DNA
ttaaaactggatctgggttgttcccacttggatctcccaaagggagtggtactctgttattacggtaactttgtacgccagttttatcctccccttaccccatgtaacttagaagtttttcataaagaccaatagttggtaatcatccagattacttaaggtcaagcacttctgtttccccggtcaatgttgatatgctccaacagggcaaaaacaactgcgatcgttatccgcaaagcgcctacgcaaagcttagtagcacctttgagattgtttggttggtcgttccgccatttcccctggtagacctggcagatgaggctagaagtaccccactggcgacagtgttctagcctgcgtggctgcctgcacaccctgtgggtgtgaagccaaataatggacaaggtgtgaagagccccgtgtgctcgctttgagtcctccggcccctgaatgcggctaaccttaaccctgcagctagagcatacaaaccagtgtgtatctagtcgtaatgagcaattgcgggatgggaccgactactttgggtgtccgtgtttcactttttttttacttataattgcttatggtgacaatatatatatagtatatattgacacc

SEQ ID NO: 701 - DNA, 616 bp, Rhinovirus A
  source 1..616: mol_type = genomic DNA
ttaaaactgggtctgggttgttcccacccaaaccacccacgcggtgtagtacactgttattccggtaactttgtacgccagttttatatccccaccccccttttgtaacttagaagttatgcacactgaccaatagtgggcaatcatccagattgtcatcggtcgagcacttctgtttccccggtttgagttgatatgctccaccagggcaaaaacaactcagatcgttatccgcaagatgcctacacagaacttagtaccattctggaaaattcttggctggtcgttcaattactaccccagtaatagacctggcagatgaggctagaagttccccactggcgacagtgttctagcctgcgtggctgcctgcacacccttctggggtgtgaagcctagaattggacagggtgtgaagagtcgcgtgtgctcatcttgagtcctccggcccctgaatgcggctaaccctaaccctgcagccattgcccacaatccagtgggtttatggtcgtaatgagcaattgcgggatgggaccgactactttgggtgtccgtgtttcactttttacttattatttgcttatggtgacaatatatagatacatatattgacacc

SEQ ID NO: 702 - DNA, 616 bp, Rhinovirus A
  source 1..616: mol_type = genomic DNA
ttaaaactgggagtgggttgttcccactcactccacccatgcggtgttgtacactgttattacggtaaccttgtacgccagttttgccacccttccccattatgtaacttagaagtttgtacaacaagaccaataggtgataattatccagattatcaaaggtcaagcacttctgtttccccggtcgatgaggatatgctttacccaaggcaaaaaccttaaagatcgttatccccacactgcctacacagagcctagtaccacttttgatgtaattaggttggtcgctccctgcaaacccagcagtagacctggcagatgaggctggacactccccactggtgacagtggtccagcctgcgtggctgcctgctcaccctattgggtgagaagcctacttattgacaagatgtgaagagccgcgtgtgctcagtgtgcttcctccggcccctgaatgtggctaaccttaaccctgcagccgctgcccataatccaatgggtttacggtcgcaacgcgcaagtgcgggatgggaccaactactttgggtgtccgtgtttcctatttttcttttatttgcattttatggtgacaatttatagtatatagattgtcgtc

SEQ ID NO: 703 - DNA, 616 bp, Rhinovirus A
  source 1..616: mol_type = genomic DNA
ttaaaactggatctaggttgttcccacctagatctcccatgtggagtagtactctattattacggtaattttgtacgccagttttatatccccttccccttttgtaacttagaagtcgtgaacacagaccaataggtggcgatcacccagatcgcttaaggtcaagcacttctgtttccccggtcaacgttgatatgctccaccagggcaaaaacaacggagatcgttatccgcaaggtgcctacgcaaagcctagtaacctcttggaggatatatggttggtcgctcagctataccccatagtagacctggcagatgaggctagaaactccccactggcgacagtgttctagcctgcgtggctgcctgcgcactcttatgagtgcgaagccatatatttgacaaggtgtgaagagccccgtgtgctcaccttgagtcctccggcccctgaatgtggctaaccctaaccctgcagctagtgcatgaaatccatcatgttgctagtcgtaatgagcaattgcgggatgggaccaactactttgggtgtccgtgtttcactttttccttttatatttgcttatggtgacaatatatatataacatatatattggcatc

SEQ ID NO: 704 - DNA, 616 bp, Rhinovirus A
  source 1..616: mol_type = genomic DNA
ttaaaactgggttcaggttgttcccacctgaatctcctacatggagttgtactctattatcccggtaattttgtacgccagttttatcctcccctccccatgtaacttagaagctgtacacaacgaccaacaggtaacattcatccagagtgttaaaggtcaagcacttctgtttccccggtcaaagttgatatgctccaacagggcaaaaacaactgcgatcgttatccgcagagcaactacgcaaagcttagtaccactttcaatggtgtatggctggtcgctccactataaacccaatagtagacctggcagatgaggctagaaactccccactggtaacagtgttctagcctgcgtggctgcctgcgtgcccttttgggcacgaagccttacatttgacaaggtgcgaagagccccgtgtgcttgctttgagtcctccggcccctgaatgtggctaaccttaaccctgcagctagtgtgtgcaatccagcacatggctagtcgtaatgagcaattgcgggatgggaccaactactttgggtgtccgtgtttcttgtttttcttttatatttgcttatggtgacaatatatatagaatatatatattggcatc

SEQ ID NO: 705 - DNA, 616 bp, Rhinovirus C
  source 1..616: mol_type = genomic DNA
ttaaaactgggtacaggttgttcccacctgtaccacccaagtggtgtagtgctcttgtattccggtacatttgcacgccagtttgccacccctaccctctatgtaacttagaagcttacacaaagaccaataggcggtggtaaacccataccactaacggtcaaacacttctgtttccccggcatatgaggaataggctccaaaagggctgaagccactagtgtcgttatccgcattggtactacgcaaagcctagtatcggcctgaaaatttcttggttggtcgttcggccagttaccccactggtagacctggcagatgaggcaggacttaccccactggcgacagtggtcctgcctgcgtggctgcctgcacacccttatggggtgtgaagcctaggaacggacagggtgtgaagagccccgtgtgctaccaatgagtcctccggcccctgaatgcggctaatcttaccccgcagctgttgcacacaatccagtgtgtatgcagtcgtaatgagcaattgtgggatggaaccgactactttgggtgtccgtgtttccttgttttccttatatttgcttatggtgacaatattgatattatcagtgttgtcatc

SEQ ID NO: 706 - DNA, 617 bp, Pegivirus D
  source 1..617: mol_type = genomic DNA
tgataccgtgtcccggtacgacctcgcgcgtccccaagctcgccctgaggggggagcgtaagggcgcgtagtggggtagccccccaaaccgagccaccctagtgagtgactttagaatggttagggagactaccgccttcgctgtttggggacctaatgatccgcgtgccagggttcttcgggtaaatcccggcgcggtgttttgggttcagggcagtaggggcagacgggccagcagtcgctggttcctggtaccaccaccctatccggacgacctccctcacgaaaggtcgccacggtctgtggctcgacgacgcctataattcagtccgaggggcgcagccctcgttaaacttaggcaaggttcctcgccattgatttggccaggggtttaagtgaacgccgcccttttaatgtttaatagggttctttcccggcgggttgacaaacacttccctgggctcttcgttggcctcggttccttgatgcttcggcacccatgagcgcacaggggggggaccctgcgacagtccgccaagaggaaaatccttcgggtgacctcgtgcgcaacccaatcccttcttcttccacatggcgtgtctgtggtgcatgctgtg

SEQ ID NO: 707 - DNA, 617 bp, Rhinovirus A
  source 1..617: mol_type = genomic DNA
ttaaaactgggtctgggttgtccccacctagatcacccaagtggtgtagtacactgttatttcggtaaccttgtacgccagttttataaccccctccccaaatgtaacttagaagctgtacacaacgaccaatagagggtaatcatccagattacttacggtcaagcacttctgtctccccggtttactttgatatgctccaacagggcaaaaacaaagtgaatcgttacccgcaagatgcctacgcaacgcctagtaacatcctgaattgtttatggttggtcgctcaattacaaccccagtaatagacctggcagatgaggctagatattccccactggcgacagtgatctagcctgcgtggctgcctgcacaccccttgtgggtgtgaagccataatcatgacagggtgcgaagagccacgtgtgctcatcttgagtcctccggcccctgaatgcggctaaccctaaccctgcagccattgcctacaaaccagtgggtatgtggtcgtaacgagaaattgcgggatgggaccgactactttgggtgtccgtgtttcactttttaccttatatttgcttatggtgacaatatatacgagtttatatattgacacc

SEQ ID NO: 708 - DNA, 617 bp, unidentified
  source 1..617: mol_type = unassigned DNA; note = unclassified Enterovirus sequence
ttaaaactgagtgtgggttgcacccacccacactgtctacggacgttgtacacttgtatcccggtacatttgtacgccagtttgcctccccttccctttatgtaacgtaagaagcctcagcacaatggccaacaggtggtaacaatccatgttacctacggtcaagcacttctgtctccccggtacgaagagtgttaagtcttacccaagaccgaagctttgagtatcgttatccgcataactactggacaaagcccagtaacaccccacgatgtaggatggttggtcgttccaccagtgtaaccccctggtagacctggcagatgaggctagagtttccccactggtgacagtgttctagcctgcgtggctgcctgctcccttatgggagaagccattctattgacaaggtgtgaagagccccgtgcgctagttatgagtcctccggcccctgaatgcggctaatccaaccctgcagccattgcatggaaaccaccatgtagatggtcgtaatgagcaattgcgggacggaaccgactactttgggtgtccgtgtttcttgtttttcttatcaattgcttatggtgacaatatatacagctaatatattgttcacc

SEQ ID NO: 709 - DNA, 617 bp, Rhinovirus A
  source 1..617: mol_type = genomic DNA
ttaaaactggatctgggttgttcccacccagatcacctacatggtgttgtacactattattacggtaattttgtacgccagttttatatccccttccccaaatgtaacttagaagcaatgcaaactgatcaatagggggcaatcatccagattgctaatgatcaagcacttctgtttccccggtcaaggttgatatgctccacaagggcaaaaacaaccgagatcgttatccacaagatgcctacgcaaagcctagtaatgcttttgaagatacttggttggtcgctcagctgtgcacccgacagtagacctggcagatgaggctagaagtacccctctggcgacagagttctagcctgcgtggctgcctgcacacccttttgggtgtgaagccaagtattggacaaggtgtgaagagccccgtgtgctcatcttgaatcctccggcccctgaatgtggctaaccttaaacctgcagccagtgcacacaaaccagtgtgtagctggtcgtaatgagcaattgcgggatgggaccaactactttgggtgtccgtgtttcactttttacctttatattgcttatggtgacaatatatatagcacatatatattgttatc

SEQ ID NO: 710 - DNA, 617 bp, unidentified
  source 1..617: mol_type = unassigned DNA; note = unclassified Enterovirus sequence
ttaaaactgaatcatggttgttcccaccatgattgtctactggacgttgtactcttgtattccggtacacttgtacgccagttttataaccccttcccctttgcaacttagaagaaagtaaacactggccaataggaaatagcaaaccacgctatttacggtcaagcacttctgtttccccggtctgacgggatatgcttcacccgaggcagaaactcagatgatcgttatccgcaaagtgcctacgggaagcctagtagcactttggaagttgttgggctggtcgctcaattgctgaccccgagcaatagacttggcagatgaggctggacgtgccccaccagtgatggtggtccagcctgcgtggctgcctactcaccctaacagggtgagaagcctatcaatagacaaggtgtgaagagcctactgtgctcactttgattcctccggcccctgaatgtggctaatcctaaccccgtatctatcgcatgcacaccagcatgtaggtagtcgtaatgggcaactacgggacggaaccaactactttgggtgtccgtgtttccttgttcttttattacttgcgtatggtgacaattgtatgaaatacgattgacacc

SEQ ID NO: 711 - DNA, 618 bp, Rhinovirus A
  source 1..618: mol_type = genomic DNA
ttaaaactgggagtgggttgttcccactcactccacccatgcggtgttgtactctgttattacggtaactttgtacgccagtttttcccacccttccccataatgtaacttagaagtttgtacaatatgaccaataggtgacaatcatccagactgtcaaaggtcaagcacttctgtttccccggtcaatgaggatatgctttacccaaggcaaaaaccttagagatcgttatccccacactgcctacacagagcccagtaccatttttgatataattgggttggtcgctccctgcaaacccagcagtagacctggcagatgaggctggacattccccactggcgacagtggtccagcctgcgtggctgcctgctcacccttcttgggtgagaagcctaattattgacaaggtgtgaagagccgcgtgtgctcagtgtgcttcctccggcccctgaatgtggctaaccttaaccctgcagccgttgcccataatccaatgggtttgcggtcgtaatgcgtaagtgcgggatgggaccaactactttgggtgtccgtgtttcctgtttttcttttgattgcattttatggtgacaatttatagtgtatagattgtcatc

SEQ ID NO: 712 - DNA, 618 bp, Rhinovirus A
  source 1..618: mol_type = genomic DNA
ttaaaactgggagtgggtgttcccactcactccacccacgtggtgctgtacactgttattccggtaactttgtacgccagtttttccctcccttccctcattatgtaacttagaagcatgaacatatggaccaataggcaataatcatccagattattgaaggtcaagcacttctgtttccccggtcaataaagatatgctttacccaaggcaaaaacttttgagatcgttacccgcacatcaactacgcaaagcctagtatcacctttgatgtactaagactggtcgtttcctgcaaccccagcagtagacctggcagatgaggctggacgtaccccactggcgacagtggtccagcctgcgtggctgcctgctcgcccatatgggcgagaagccttattattgacaaggtgtgaagagccgcgtgtgcttggtgtgagtcctccggcccctgaatgtggctaaccttaaccctgcagccattgctcataatccaatgagttagtggtcgtaatgcgcaagtgcgggatgggaccaactactttgggtgtccgtgtttcttattttttctttcatgtgtgttatatggtgacaatttatagtatataagttgtcatc

SEQ ID NO: 713 - DNA, 618 bp, Rhinovirus A
  source 1..618: mol_type = genomic DNA
ttaaaactgggtccaggttgttcccacctggacctcctaagtggagtggtacactattattccggtaattttgtacgccagttttatctccccaccccccttttgtaatttagaagttatgaacacagaccaataggtggcaactagccaagttgttaaaggtcaagcacttctgtctccccggctgacgttgatatgctccaacagggcaaaaacaatgaaagtcgttatccgcaaagtgcctacgcaaagcctagtaacactttgaaatgtctatggttggtcgctcagctattccccatagtagacctggcagatgaggctagaaataccccactggtaacagtgttctagcctgcgtggctgcctgcgcaccctccccgggtgcgaagccatatatatgacaaggtgcgaagagccccgtgtgctcactttgaatcctccggctcctgaatgtggctaaccttaaccccgcagccagtgcacataagccaatgtgtggctggtcgtaatgagcaattgtgggatgggaccaactactttggatgtccgtgtttcctgtttttcttttattcttgcttatggtgacaatatatatagtttatatatattggcatc

SEQ ID NO: 714 - DNA, 618 bp, Rhinovirus C
  source 1..618: mol_type = genomic DNA
ttaaaactggatacaggttgttcccacctgtatcacccaagtggtgtggtgctcttgtatttcggtacgtttgcacgccagtttgctaccccttcccttttacgtaacttagaagtttacacaaagaccaataggcggtggtaaatccataccactaacggtcaaatacttctgtttccccggcatgcgaggaataggctccaaaagggctgaagccactagtgtcgttatccgcattggtactacgcaaagcctagtattaccttgaaaatttcttggctggtcgctccaccagataccccactggtagacctggcagatgaggcaggacttaccccactggcgacagtggtcctgcctgcgtggctgcctgcacaccccttacggggtgtgaagcccagaaacagacaaggtgtgaagagccccgtgtgctactagtgagtcctccggcccctgaatgcggctaatcttaccccacagctgttgcacgcaaaccagcgtgtatgcagtcgtaatgagcaattgtgggatggaaccgactactttgggtgtccgtgtttctttttattcctattatttgcttatggtgacaatattgatattatcagtgttgtcatc

SEQ ID NO: 715 - DNA, 619 bp, Shanbavirus A
  source 1..619: mol_type = genomic DNA
tttcaaaaggccctgggcatacggcgttattcgtaacgtcgtatgtccagggcggtagcatcaggccaaggcctgatgctaccacgtgtggactaaaccacacactcttcttgtgacacgttgtgtcacctatccctttcttggtaacttagaagcttgtacacttacgcacgtaggtgccccacatccagtggggtttgtgcaaagcaatcttgttccccggtaaaccctgataggctgtaaccacggccgaaacaaggtttgtcgttacccgactcactactacacaaagcctagtaaagttcaatgaaagtgcgcagcgtgatccggtcaaaacccccttgaccagaaacacatgatgagggtcaccaacccccactggcgacagtgtggtgtccctgcgttggcatgtggcctcgtagaggcgttgcaatctggatttgctccgaagagccccgtgtgctagtgtttatacctccggccccttgaatgcggctaatcctaacccccgagcatgtacacacaagccagtgtgtagcatgtcgtaatgagcaatttggggatggaaccgactactttagggtgtccgtgtttctcattattctttgtttgatgtttt

SEQ ID NO: 716 - DNA, 619 bp, Enterovirus B
  source 1..619: mol_type = genomic DNA
cacacggtcaatagataactcagcaaaccagctgggtcttgaccaagcacttctgttaccccggactgagtatcaataagctgctcgcgcggctgagggagaaaacgtccgttacccggccaattacttcgagaaacccagtatcaccatgaaggttgcgcagcgtttcgttccgcacaaccctagtgtagatcaggtcgatgagccaccgcgttccccacgggcgaccgtggcggtggctgcgctggcggcctgcccatggggtgacccatgggacgcttcaacactgacatggtgcgaagagtctattgagctaattggtaatcctccggcccctgaatgcggctaatcctaactgcggagcagatacccacacaccagtgggcagtctgtcgtaatgggcaactctgcagcggaaccgactactttgggtgtccgtgtttcctcttattcttgattggctgcttatggtgacaattgggagattgttaccatatagctattggattggccatccagtgacaaacagagcaattatctactcgttcattggttttgtgccactgaattataaggttttaatcaccctcaaattcatattagcactcaacacatcaaa

SEQ ID NO: 717 - DNA, 619 bp, Rhinovirus A
  source 1..619: mol_type = genomic DNA
ttaaaactggatctaggttgttcccacctagatctcctacacggagttgtactctgttattccggtaactttgtacgccagttttatacccccttccccctttgtaacttagaagctgaacatactgaccaataggcggcattcaaccagaatgtcaaaggtcaagcacttctgtttccccggttaaagctgatatgctccaacagggcaaaaacagccttaatcgttatccgcaagacaactacgcaaagcctagtatcatctttgaaagtatgtggttggtcgctccgctataaactcaatagcagacctggcagatgaggctagaaactccccactggcgacagtgttctagcctgcgcggctgcctgcgtgccctatacgggtacgaagccatatatttgacaaggtgtgaagagccccgtgtgcttgtcttgagtcctccggcccctgaatgtggctaaccttaaccctgcagctggtatgcacaatccagtacatggccagtcgtaatgagcaattgcgggatgggaccaactactttgggtgtccgtgtttcctattttacctttatatttgcttatggtgacaatatatatataacatatatattggcatc

SEQ ID NO: 718 - DNA, 619 bp, Rhinovirus A
  source 1..619: mol_type = genomic DNA
ttaaaactgggtctgggttgtccccacccagaccacccacgtggtgttgtacactgttattccggtaactttgtacgccagttttgaactccccttaccccttttgtaacttagaagttaaacaaaccgaccgatagcaggcaatcacccagattgcttatggtcaagcacttctgtctccccggtctcctttgatatgctccaccagggcaaaaacagagtagatcgttatccgcaagatgcctacgcaacgcctagtagcattttgaagtaattttggctggtcgctcatttacaaccccagtaatagacctggcagatgaggctagatactccccactggtgacagtgatctagcctgcgtggctgcctgcacaccctttccgggtgtgaagccaaacttatgacaaggtgtgaagagccacgtgtgctcatcttgagtcctccggcccctgaatgcggctaaccttaaccctgcagccattgcctacaagccagtgggtatgtggtcgtaatgagaaattgcgggatgggaccgactactttgggtgtccgtgtttcactttttaccttatatttgcttatggtgacaatatatatatagatatatattgacacc

SEQ ID NO: 719 - DNA, 619 bp, Rhinovirus C
  source 1..619: mol_type = genomic DNA
ttaaaactgagtatgggttgttcccacccatactgcctacgggcgtagtactcttgtgctccggtacatttgtacgccagtttttcacccccaccccctaggtaactcttagaagcacttgcacacagacgaataggcagccaacactccacgttggtcaacgtcaagcacttctgtttccccggtattaggggttaggcttttcaagaggctgaagcctgaagtatcgttacccgcgcaattactaagcagagcctagtatcacttcgacccttccactggctggtcgttcaatgagaaaacccactcatagacctggcagatggggctggaaataccccactggcgacagtgttccagcccgcgtggctgcctgtcccccattttgggggaaagccaatgtaaggacaaggtgtgaagagccgcgtttgctaattgtgagtcctccggcccctgaatgcggctaatcttaccccacagctattgcatggaagccaccatgtggatagtcgtaacgggcaactgtgggacggaaccgactactttgggtgtccgtgtttccttttattccatttattatctcatggtgacaacgtatacagattatatgttgtttacc

SEQ ID NO: 720 - DNA, 620 bp, Rhinovirus B
  source 1..620: mol_type = genomic DNA
ttaaaacagcggatgggtatcccaccatccgacccactgggtgtagtactctggtactttgtacctttgtacgcctgtttctccctcccttcccaacctaaacaatccttgtaacttagaaggtttcgattatcgcacaatagggactattgcaaccagcaatagtcagtgcaagcacttctgtttccccggagcggagtgtagatggccaccgctgtcaaaagctcttaaccgttatccgccagttaactacgcaacggctagtagtgccttgttgcttttatggcgttcgatcaggcgagatttaccccctcgctagtctggtcgatgaggctgagaattccccacgggcgaccgtgtctcagcctgcgtggcggccagcccagcctttgctgggacgccttgattgcgacatggtgtgaagacccgcgtgtgcttaactgtgagtcctccggcccctgaatgcggctaacctaaaccctggagccttgaaacacaacccagtgttcgcaaggtcgtaacgagcaattccgggacgggaccgactactttgggtgtccgtgtttcctttattctttcaattgttcttatggtcacaatataagtgttatattgtgatc

SEQ ID NO: 721 - DNA, 620 bp, Rhinovirus A
  source 1..620: mol_type = genomic DNA
ttaaaactgggagtgagttgtccccactcactctacccacgcggtgttgtacactgttattacggtaactttgtatgccagtttttgttcccctatccccctttaaagtaacttagaagcatgaacttacagaccaaaaggtgatgatcacccagatcattaaaggtcaagcacttctgtttccccggtcaatgttgatatgcttcaacaaggcaaaaacaacagcgatcgttatccgcaagatgcctacacaaagcttagtacctcctttgatggtatttgtctggtcgctcaggtgtttccccaacactagacctggcagatgaggctagaaactccccactggcgacagtgttctagcctgcgtggctgcctgcacaccctttcgggtgtgaagccaaatactggacaaggtgcgaagagccccgtgtgctcatcttgagtcctccggcccctgaatgcggctaaccttaaacccgcagccattactcacaatccagtgagcagatggtcgtaatgagcaattgtgggatgggaccgactactttgggtgtccgtgtttcatgttttactttatgacttgcttatggtgacaatatatagagatatatattggcatc

SEQ ID NO: 722 - DNA, 620 bp, unidentified
  source 1..620: mol_type = unassigned DNA; note = unclassified Enterovirus sequence
ttaaaactgagtgtgggttgttccccacccacactgtctacgggacgttgtactcttgtattccggtacacttgtacgcccagtttgccaccctaaacaccccgtaacaatagaagtctacgcacacttagaccaatagggggtgttcatccagttcacccaaggtcaagcacttctgtttccccggcataggggtgttaggcttcgcccgaggccaaagctctgattgtcgttatccgcacaactactggacaaagcctagtagcaccctacgatgtagcatggttggttgttccgccagtatcccctggtaaacctggcagatggggctagaagttcctcactggcgacagtgttctagcccgcgtggctgcctgctcccttatgggagaagccattctactgacaaggtgtgaagagccccgtacgctagttgtgattcctccggcccctgaatgcggctaatccaaccctgcagccattacatggaagccaccatgtggatggtcgtaatgagtaattgcgggacggaaccgactactttgggtgtccgtgtttcttgtttttcttttactgacgtttatggtgacaatatatatataacgtatatattgttcatc

SEQ ID NO: 723 - DNA, 621 bp, unidentified
  source 1..621: mol_type = unassigned DNA; note = unclassified Picornaviridae sequence
gggggctcttcaagcccccccaaccgaattttcttcaacaactactatgtaagttgcattatactctccagatcaattcgaatttgtataatgtactttagtttttgttgtcgactacagtgattataagtaagtagcaatatgtgtccagatcaattcgaatcacaatattgttcattataattgtatgtaggtctcagttgagagaaaaattttgttttgaaaacccagttttttcacaccggaggaatgaatctcaaatcttgggttttcgaggttgtcgtgcggacacttctcgagtagttgaatgatgctgatttgactgctttggaatgttgtcttttgcgatgatgtcggattcacacgggcttcacatgccgagagatggcttcgaacacgctcgtgataatgtcagtggttgcttcgagatttacaaatgtatgcgtacccggaaacagaacttggaaattgatgtcacggtgattgagttctgcacgatggcgatagtacctctttgtactgatcgttgaactggtcaaggcccctgcaggaagtacctgtttcgggctagttgactggcattgagcaccagagtcgaagtttgcccttcaaattgcaaca

SEQ ID NO: 724 - DNA, 621 bp, Rhinovirus A
  source 1..621: mol_type = genomic DNA
ttaaaactgagtgtgggttgtccccacccacactgtctacggacgtagtactctcatatcacggtatgtttgtacgccagtttgcctcccctcccaagtgtaacttagaagtttgtactttataaaggccaataggcgggtagtcaaccacactactcatggtcaagcacttctgtttccccggtatgcgaagaataagctttaacaaaggctgaagcttcaattatcgttatccgcatgataactacgcaaagcttagtagcattttgaaagtttattggttggtcgctccactggaaaacccccccagtagacctggcagatgaggctaagtaatccccactggcgacagtgacttagcctgcgtggctgcctgcacacctggagacaggtgtgaagccaagtaatggacaaggtgtgaagagccccgtgtgcttatcatgagtcctccggcccctgaatgcggctaatccaaccccacagctattgcacataatccaatgtgtatttagtcgtaacgggcaactgtgggacggaaccgactactttgggtgtccgtgtttcctttattctcatttaagtttcctatggtgacaaatataagtgattatatctgtcatc

SEQ ID NO: 725 - DNA, 621 bp, unidentified
  source 1..621: mol_type = unassigned DNA; note = unclassified Enterovirus sequence
tctgcagatatcttaaaactgggttcaggttgttcccacctgaacttcccacgtggagtagtacactattattacggtaattttgtacgccagttttgcttccctccccaatggtaacttagaagatgtacacaacgaccaacaggcggtggttacccaaaccatcaaaggtcaagcacttctgtttccccggtcaacgttgatatgctccaacagggcaaaaacaaccacgatcgttacccgcaagatgcctacgcaaagcctagtaatacactggaagatttatggctggtcgctccactataccccatagtagacctggcagatgaggctagaagtaccccactggcgacagtgttctagcctgcgtggctgcctgcgcaccctatgggtgcgaagccatatattggacagggtgtgaagagccccgtgtgctcatcttgagtcctccggcccctgaatgtggctaaccttaaccccgcagccagagcacgcaatccagtgtgtttctggtcgtaatgagtaattgtgggatgggaccaactactttgggtgtccgtgtttcacttttttcctttattatgcttatggtgacaatatatacacatatatattgacacc

SEQ ID NO: 726 - DNA, 621 bp, Rhinovirus A
  source 1..621: mol_type = genomic DNA
ttaaaactgggagtgagttgtccccactcactctacccacgcggtgttgtacactgttattacggtaactttgtatgccagtttttgttcccctatccccctttaaagtaacttagaagcatgaacttacagaccaaaaggtgatgatcacccagatcattaaaggtcaagcacttctgtttccccggtcaatgaggatatgctttacccaaggcaaaaaccttaaagatcgttatccgcacattaactacgcaaagcctagtatcgcctttgatgtattaagactggtcgttccctgcatacccagcagtagacctggcagatgaagctggacgttccccactggcgacagtggtccagcctgcgtggctgcctgctcacccatttgggtgagaagccttattattgacaaggtgtgaagagccccgtgtgcttaatgtgaatcctccggcccctgaatgtggctaaccttaaccccgcagccgttactcacaatccagtgaaatgacggtcgtaacgcgaaagtgtgggatgggaccaactactttgggtgtccgtgtttcctattttttccttaatgtgtgttatatggtgacaatttatagcgtataagttgtcatc

SEQ ID NO: 727 - DNA, 621 bp, Rhinovirus A
  source 1..621: mol_type = genomic DNA
ttaaaactggatctaggttgttcccacctaaatctcctacatggagttgtactctattattccggtaattttgtacgccagttttatcctcccctccccttaaagtaacttagaagttggacatatcgaccaataggtaacatttatccaaaatgttaaaggtcaagcacttctgtttccccggtcaaggttgatgtgctctaacagggcaaaaacagctgcgatcgttatccgcaaagcaactacgcaaagcctagtagcattttttgagagtatgtggttggtcgctccactataaacccaatagtagacctggcagatgaggctagaaattccccactggtaacagtgttctagcctgcgtggctgcctgcgtgctccttgtgagcacgaagccatatatttgacaaggtgtgaagagccccgtgtgcttgctttgagtcctccggcccctgaatgtggctaaccttaaccctgcagctagcgtgtacaatccagtacaaagctagtcgtaatgagcaattgcgggatgggaccaactactttgggtgtccgtgtttcctgtttttcttttatatttgcttatggtgacaatatatatataacatatatattggcatc

SEQ ID NO: 728 - DNA, 622 bp, Rhinovirus B
  source 1..622: mol_type = genomic DNA
ttaaaacagcggatgggttccctaccatccgacccactgggtgtagtactctggtactctgtacctttgtacgcctgtttatccactacccttttcctaaattttccacccgtgtaaccttagaagcaaacaaattgtacaatagggtgcatcacaaccagtgatgtacagtacaagcacttctgtttccccggagcggggtatagacggtcaccactgtcaaaagcccttaaccgttacccgccaaccaactacgtaacggctagtaacaccatgaatttgtcttgacgttcgatcaggtggtaaccccccactagtttggtcgatgaggctgagaactccccacgggtaaccgtgtctcagcctgcgtggcggccaacccagcttctgctgggacgccaattcattgacatggtgtgaagacctgcatgtgcttggttgtgattcctccggcccctgaatgcggctaaccctaaccccggagccacgcggcataatccaatgtcgtatgggtcgtaatgagtaattctgggatgggaccgactactttgggtgtccgtgtttcctgtttttccaaattattcttatggtcacagcatataaatagatatatactgtgatc

SEQ ID NO: 729 - DNA, 622 bp, Rhinovirus B
  source 1..622: mol_type = genomic DNA
ttaaaacagcggatgggtatcccaccatccgacccactgggtgtagtactctggtactctgtacctttgtacgcctgtttctcctcaaccctcccctacccgttatatatctcagtaacttagaagatatcattaccgcacaatagggaccgttgtaaccagcaacggtcagtgcaagcacttctgtttccccggagcggagtatagacggccactgctgtcaaaagctcttaaccgttacccgccagttaactacacaacagctagtaacatcttgttgttcttagggcgttcgatcaggtgagtttaccccctcactagtctggtcgatgaggctgagaaatccccacgggtgaccgtgtctcagcctgcgtggcggccagcccagcttatgctgggacgccttaagtatgacatggtgtgaagactcgcgtgtgcttagctgtgagtcctccggcccctgaatgcggctaacctaaaccccggagccttgaggcacaatccagtgcccgcgaggtcgtaacgagaaattctgggacgggaccgactactttgggtgtccgtgtttccttttatctttttgatgttcttatggttacaatatataaagtatattgtaatc

SEQ ID NO: 730 - DNA, 622 bp, Rhinovirus A
  source 1..622: mol_type = genomic DNA
ttaaaactgggtccaggttgttcccacctggatctcctacgtggagttgtactctattattccggtaattttgtacgccagttttatctcccctacccctctatgtaacttagaagtttatgcacagcggccaataggtgacatttatccaaaatgtcaaaggtcaagcacttctgttaccccggttagaattgatatgctccaacagggcaaaaacaattttgatcgttatccgcaaggcaactacgcaaagcctagtaccatttttgatgatgtgtggttggtcgctccactgtgaacccgacagtagacctggcagatgaggctagaaattccccactggtaacagtgttctagcctgcgtggctgcctgcgtacccttttgcgggtacgaagccatacatttgacaaggtgtgaagagccccgtgtgcttgccttgagtcctccggcccctgaatgtggctaaccttaaccctgcagctagtgtgcacaatccagtgcatggctagtcgtaacgagcaattgcgggatgggaccaactactttgggtgtccgtgtttcttgtttttcttttatatttgcttatggtgacaatatatacataatatatatattggcacc

SEQ ID NO: 731 - DNA, 622 bp, Rhinovirus A
  source 1..622: mol_type = genomic DNA
ttcaaactgaatcatggttgttcccaccatgattacctacgggtgtagtacacttgtatcccggtacatttgtgcgccagttttatatcccctaccccaattgtaacttagaagttaagcaacacaagatcaataggcggtggttatccaaaccatcaatgatcaagtacttctgtctccccggtaggtgtgaatatgctttaaccaaggcagaagctaatcctatcgttatccgcaaggtgcctacgggaagcctattaacactttgaaagaaatttggctggtcgctcagttgcgcaatcccacgcaatagacctggcagatggggctagacaaaccccaccagcgatggtggtctagcccgcgtggctgcctgcacacccttttttgggtgtgaagccagaaattggacagggtgcgaagagcctactgtgctcaccttgagtcctccggcccctgaatgtggctaatcctaaccctgcagctgttgcacaagatccattgtgtatacagtcgtaatgagcaattgcgggatggaaccaactactttgggtgtccgtgtttccttgttttcttttatcattgcttatggtgacaagtatatatagatatatttgtcatc

SEQ ID NO: 732 - DNA, 623 bp, Avihepatovirus A
  source 1..623: mol_type = genomic DNA
tttgaaagcgggtgcatgcatggccattttccagcacaggttcagctggtatggcatgcatgcatcgactgcttgggggtgtccctgacccccttaattcaacgtctagcccacgatacgggcaccctatccaatttgtatccctttacctcccatggactgacttgtatggacttggatctaaattggattatcctttacttgtggtggttagccaaccatgctctggtgtaatgattccatgtgttcatttggctaagtgccgaccttggaggtgggggtgaaattttgcaagccactagcgtcgtcaactttagcctctggagatgttggattagttgcattctggacagaccaagcctcgtctataccgtgggctaatggtcttcgttgtgaagcggattaccggtagtagcatcttagacttccaaggttgtcatgagtgtgtctgtagagtaggcacacatctgtccaggcacaagcacatctctcgatcgctccagactagttcctgagggacagatgttgtggggggcttgggaaaacccccttaacctacactaccggatagggtcgcggctggtcgagtcccacacactataatatcactagactttcatgca

SEQ ID NO: 733 - DNA, 623 bp, Rhinovirus B
  source 1..623: mol_type = genomic DNA
aaaacagcggatgggtatcccaccatccgacccactgggtgtagtactctggtactttgtacctttgtacgcctgttcttcccattgtaccctcccttaacttccaacccaagcaacattagaagttatcaattttcagtacaataggaagcatcacatccagtgatgttgtgtacaagcacttctgtctccccggagcgaggtataagcagtacccactgctaaaagcctttaaccgttacccgccaatcaactacgtaacagctagtatcatcatgtttttgactggacgttcgatcaggtggttcccccccactagtttggtcgatgaggctaggaataccccacgggtaaccgtgtcctagcctgcgtggcggccaacccagcatttgctgggacgcccttttaaagacatggtgtgaagactcgcatgtgcttgattgtgattcctccggcccctgaatgcggctaaccttaaccccggagccttgtgttgcaatccagcaaaagcaaggtcgtaatgagcaattctgggacgggaccgactactttgggtgtccgtgtttctcattttacattacttttcttatggtcacagcatatataataaatatactgtgatc

SEQ ID NO: 734 - DNA, 623 bp, Rhinovirus A
  source 1..623: mol_type = genomic DNA
ttaaaactgggtgtgggttgcacccacccacactgtctacggacgtagtgctctcatattacggtatgcttgcacgccagtttgtttcccctttccccttttgtaactatagaagattgcacttaatctcgaccaataggcagtagtgatccacactacttacggtcaagcacttctgttaccccggtatgcggagaataggctctgaaaagggctgaagcttcaattatcgtcatccgcgcaattactacgcaaagcttagtaacttcccaagaaattctttggttggccgttccgctggtaccccaccagtaggcttggcagatgaggctgagtaatccccactggcgacagtgactcagcctgcgtggctgcctacacacctggtaacaggtgtgaagccatagaaaggacagggtgtgaagagccccgtgtgctaattgtgattcctccggcccctgaatgcggctaatctaaccccacatccaatgcgcataagccaatgcgtatttggtcgtaatgggcaactgtgggacggaaccgactactttgggtgtccgtgtttctttttattccttataattagttcatggtgacaagtataagtgtttatatttgtcatc

SEQ ID NO: 735 - DNA, 624 bp, unidentified
  source 1..624: mol_type = unassigned DNA; note = unclassified Picornaviridae sequence
ttttcatgttgtataattcgagttctccaattatatttaatagaagattttcatttatgatcatgcaataatataatgaattcatgtagaaaatgttatattattccttcgtcctttgtgaaccggagagttagtattggaaatgagggatttattttaaaacaaatgtcttatttcctctctttaacgttatatttattgacagtttgtgatttatatatcatggttattgagagaaaattagcttttatataaattagtgtttttatttaaaagttttaattcttggcagtgtattaatgaatttaatttggcagtataagtttattcaaaacataccttccatatgtagtagggaacttgctgtatttaatacaatactgattattaagtgtttttcttgtcgtataataattgaagtagaatcttttgttattccgactatagacttgattaataactgataatctttattttattttgtatagtattattaggttctagggaagtttccccctatgagaacctcctaaccttttggcaattaggcgaactaagaaaattgcctggacaatgggaagacccatataatattcccttttcctttataaatttaaatcaagt

SEQ ID NO: 736 - DNA, 624 bp, unidentified
  source 1..624: mol_type = unassigned DNA; note = unclassified Salivirus sequence
ttcccctgcaaccattacgcttactcgcatgtgcattgagtggtgcatgtgttgaacaaacagctacactcacatgggggcgggttttcccgccctacggcttctcgcgaggcccacccctcccctttctcccataactacagtgctttggtaggtaagcatcctgatcccccgcggaagctgctcacgtggcaactgtggggacccagacaggttatcaaaggcacccggtctttccgccttcaggagtatccctgctagcgaattctagtagggctctgcttggtgccaacctcccccaaatgcgcgctgcgggagtgctcttccccaactcaccctagtatcctctcatgtgtgtgcttggtcagcatatctgagacgatgttccgctgtcccagaccagtccagtaatggacgggccagtgtgcgtagtcgtcttccggcttgtccggcgcatgtttggtgaaccggtggggtaaggttggtgtgcccaacgcccgtactcaggggatacctcaaggcacccaggaatgccagggaggtaccccgcttcacagcgggatctgaccctggggtaaatgtctgcggggggtcttcttggcccacttctcagtacttttcagg

SEQ ID NO: 737 - DNA, 624 bp, Parechovirus A
  source 1..624: mol_type = genomic DNA
tattagagttatggcacgccatctgccaccccacacaaatgtgggttagaaaagaaaactgtccctatgcctggtctccactattcgaaggcaacttgcaattagaagagtggaattaagacgcttaaagcatagagacagttttcttttctaacccacatttgtgtggggtggcagatggcgtgccataactctaatagtgagataccatgcttgtggaccttatgctcacacagccatcctctagtaagtttgtgagacgtctggtgacgtgtgggaacttattggaaacaacgttttgctgcaaagcatcctactgccagcggaaaaacacctggtaacaggtgcctctggggccaaaagccaaggtttaacagaccctttaggattggttctaaacctgagatgttgtggaagatatttagtacctgctgatctggtagttatgcaaacactagttgtaaggcccacgaaggatgcccagaaggtacctgtaggtaacaagtgacactatggatctgatttggggccagatacctctatcttggtgatctggttaaaaaacgtctagtgggccaaacccgggggggacccccggtttcctcttatcctattaatgccact

SEQ ID NO: 738 - DNA, 624 bp, Rhinovirus B
  source 1..624: mol_type = genomic DNA
ttaaaacagcggacgggtatcccaccatccggctcactgagcgtagtactctggtattgtgtacctttgtacgcctgttttccccaaatcccctaccctttatatctcctaccccgtaacgtaagaagttttcaaacagtacaataggaagcaccacatccagtggtgttatgtacaagcacttctgtttccccggagcgaggtataggtggtcaccaccgccaaaagcctttaaccgttacccgccaaccaactacgtaatggctagtaacatcattgatttagattggcgttcgatcaggtggtatccccccactagtttggtcgatgaggctaggaataccccacgggtgaccgtgtcctagcctgcgtggcggccaacccagcatacgctgggacgccagtttactgacatggtgcgaagacttgcatgtgcttggttgagagtcctccggcccctgaatgcggctaaccttaaccccggagcctcgcagcataatccaatgttgtagaggtcgtaacgagtaattctgggatgggaccgactactttgggtgtccgtgtttcctgtttttctttaaaatgtcttatggtcacagcatatatactgtatatactgtgatc

SEQ ID NO: 739 - DNA, 624 bp, Rhinovirus B
  source 1..624: mol_type = genomic DNA
acagcggatggataccccaccatccgacccactgggtgtagtacactggtactctgtacctttgtacgcctgtttctccccttgcaccctccctcattatcctaacccttgtaacattagaagatgagcaacccgtgcaataggagataccacaaccagtggtgttaagcacaagtacttctgtttccccggagcggagtatagacggtccccactgtcaaaagctcttaaccgttatccgccaaccaactacgtgacgactagtagcatcattttgacactttgacgttcgatcaggtaggttcaccccacctactagtttggtcgatgaggctgggagtccctcacaggtaactgtgtcccagcctgcgtggcggccaacccagcaattgctgggacgccaatttgttgacatggtgtgaagatcctaatgtgcttggttgtgagtcctccggcccctgaatgcggctaaccttaaccccggagccttgtggcacaagccagtgacattaaggtcgtaaggagcaattctgggatgggaccgactactttgggtgtccgtgtttcctatttttctttaaattgtcttatggtcacagcatatattaattatatactgtgatc

SEQ ID NO: 740 - DNA, 625 bp, unidentified
  source 1..625: mol_type = unassigned DNA; note = unclassified Sapelovirus sequence
ccccatttctccccttcggcttcgtgccgtcgcacccctttacccttttccttaccctcttaagaatgattgtagattgttttagaaaggaaggttagtacacctgaaagtacaacaatttgcttctctggtttggataaaaggttaaagacattagaaggttaacacaggtccttgcaaaacctgagtacaattttgttttgacgacgagactggattatgatttcacggttggtcgccgaggttaaaagactattgtgctagctagagtaagtggttggcaattgaaagctaccaaaggggtgtaggtctacgctttgcgggctgaagctaccaatggattaatagtgagtatgttgtttttcccttctagtgatgcgcgaccgcacacaaaagagctaggggcacataggggcaaaaggaaaagtattacttatcctgaatgtgcaattgagtcggtgacgagtgcgtcagatgtgaatccagcatactggcgtatggcgcatcctcttggcattaccctaatgtgtatcttggtagggggggccctatcaacttagcctagtgctgcctgacagggttgcggctggtcatttgtgtgtggtataaccagtagtaatccctc

SEQ ID NO: 741 - DNA, 625 bp, Rhinovirus B
  source 1..625: mol_type = genomic DNA
ttaaaacagcggatgggtttcccaccatccgacccactgggtgtagtgctctggtattttgtacctttgcacgcctgtttcccatttgtacccttccttaatctccttcccccgtaacgttagaagttttggaattttaaagtacaataggaagcgccacatccagtggtgttgcgtacaaatacttctgtttacccggagcgaggtataggttgtacccacggccaaaagcctttaaccgttatccgccaatcaactacgtaacggctagtatcatcttgcttttgatttggtgttcgatcaggtggtatcccccactagtctggtcgatgaggctaggaattccccacgggcgaccgtgtcctagcctgcgtggcggccagcccagcttttgctgggacgccttttcaaagacatggtgtgaagacctgcatgtgcttggttgtgagtcctccggcccctgaatgcggctaaccttaaccctggagcccagcagcataatccaatgttgtttgggtcgtaatgagcaattccgggacgggaccgactactttgggtgtccgtgtttccttttattcttacattgtcttatggtcacagcatatatattatatatactgtgatc

SEQ ID NO: 742 - DNA, 625 bp, Rhinovirus B
  source 1..625: mol_type = genomic DNA
ttaaaacagcgggtgggtatcccaccacccgacccactgggtgtagtacactggtattttgtacctttgtatgcctgtttgccatccctccctctcctcttacccttacccttattttgcggtaactttagaagtttgtaaatcacgcgcaatagggtataccacatccagtggtatgaagcacaagcaattcttgttccccggagctggatataaactgctaacgtggttgaaagtccttaaccgttatccgccagttaactgcgagaagactagtaactccatgtttgtttttaagcgttcgatcaggtggataccccattcactagtttggtcgatgaggctgggaatcccccacaggtaactgtgtctcagcctgcgtggcggccaacccagcttttgctgggacgcttactgacagacatggtgtgaagatcctattgcgcttaactgtgagtcctccggcccctgaatgcggctaacctcaaccccggagccttgtggtgtaaaccaacactcgcaaggtcgtaacgagtaattctgggacgggaccgactactttgggtgtccgtgtttcctttatttcttattgattgtctcctatggttacaaatttactgtaatc

SEQ ID NO: 743 - DNA, 625 bp, Rhinovirus B
  source 1..625: mol_type = genomic DNA
ttaaaacagcggatgggtttcccaccatccgacccactgggtgtagtgctctggtattttgtacctttgcacgcctgtttcccctttgtacccatcctgaatttcctccctctgcaacgttagaagtttgtgaaattaaaagtacaataggaagcatcacatccagtggtgttcagtacaagcactcctgtttccccggagcgaggtataggttgtacccacgaccgaaagcctttaaccgttatccgccaatcaactacataacggctagtatcatcatgtttttgatctggcgttcgatcaggtggtttcccccactagtctggtcgatgaggctaggatttccccacgggcgaccgtgtcctagcctgcgtggcggccagcccagcttatgctgggacgcctttttaaagacatggtgtgaagacctgcatgtgcttgattgtgagtcctccggcccctgaatgcggctaaccttaaccctggagcccgacagcataatccaatgttgtttgggtcgtaatgagcaattccgggatgggaccgactactttgggtgtccgtgtttctttttattcttatattgtcttatggtcacagcatatatagtatatatactgtgatc

SEQ ID NO: 744 - DNA, 625 bp, Rhinovirus A
  source 1..625: mol_type = genomic DNA
ttaaaactgagtgtgggttgttcccacccacactgtctacggacgtagtgctctcatattccggtatgtttgcacgccagtttgcctctccttttcccacgtaacgttagaagcttatgcactaaatcgaccactaggtgagtgataaaccatatcattctttggtcaagcacttctgtttccccggtatgcagggaataggccctccccagggctgaagccttaattatcgttatccgcacatttactacgcaaagcctattagcgttctggaagttcactggctggtcgttccgctagactaacccgtctagtagacctggcagatgaggctggataaaccccactggcgacagtgatccagcctgcgtggctgcctgcacacctggaaacaggtgtgaagcccatgaatggacagggtgtgaagagccccgtgtgctaagtgtgagtcctccggcccctgaatgcggctaatctaaccccacagctaatacacacaaaccagtgtggatttagtcgtaatgggtaactgtgggacggaaccgactactttgggtgtccgtgtttccttttattccttttatattgcttatggtgacaggtatatagatatatatttgttacc

SEQ ID NO: 745 - DNA, 625 bp, Rhinovirus A
  source 1..625: mol_type = genomic DNA
ttaaaactggatctgggttgttcccacccagatcacctacatggtgttgtacactattattacggtaatcttgtacgccagttttatactccctttcccaaatgtaacttagaagcaaagcaaactgatcaataggggacaatcatccagattgtcaaagatcaagcacttctgtttccccggtcaaagttgatatgctccacaagggcaaaaacaactgagatcgttatccgcaagatgcctacgcaaagcctagtaatacattgaaagatacttggttggtcgctcagctgttaacccaacagtagacctggtagatgaggctagagattcccctccggcgacggagttctagcctgcgtggctgcctgcacacccactgggtgtgaagccaagtattggacaaggtgtgaagagccgcgtgtgctcatcttgagtcctccggcccctgaatgtggctaaccttaaacctgcagccagtgcacacaatccagtgtgtagctggtcgtaatgagcaattgcgggatgggaccaactactttgggtgtccgtgtccgtgtttcactttttttccttttattattgcttatggtgacaatatatatagcatatatatattgttatc

SEQ ID NO: 746 - DNA, 625 bp, unidentified
  source 1..625: mol_type = unassigned DNA; note = unclassified Enterovirus sequence
ttaaaactgggtaggggttgttcccacccctaccacccacgtggtgtagtgctcctgtattacggtacacttgcacgccagtttgcctccctacccccttcccattcacacccaaccctgcgtaacttagaagctatgcacaagaccaataggtggtaacaatccatgttactaaaggtcaagtacttctgtttccccggcatgcgtggaataaacagtgcaaacggttgaggccacaaatgtcgttacccgcgcatgaactacgcagagcctagtatccccctgaaagtccattggttggtcgctcagctaatccccatagtagacctggcagatgaggcaagacgcaccccactggcgacagtggtcttgcctgcgtggctgcctgcacacccttcggggtgtgaagccaattgatagacagggtgtgaagagccgagtgtgcttcatgtgagtcctccggcccctgaatgcggctaatccaaccccgcagctgtggcacacaatccagtgtgtatgcagtcgtaacgggcaactgcgggacggaaccgactactttgggtgtccgtgtttccttttattctttaatcaagtacttatggtgacaataataaatattgttacc

SEQ ID NO: 747 - DNA, 626 bp, Rhinovirus B
  source 1..626: mol_type = genomic DNA
ttaaaacagcggatgggtatcccaccatccgacccactgggtgtagtactctggtattttgtacctttgtacgcctgtttcttccctttgtacccgccccttaaacttccaccccacgtaacgttagaagtttatacaagcagtacaataggttgcaccataaccagtggtgtttcgtacaagcacttctgtttccccggagcggggtatagacggtacccactgtcaaaagcccttaaccgttatccgccaatcaactacgtaatggctagtaacaccatgaaggtaagttgacgttcgatcaggtggtaacccccactagtttggtcgatgaggctaggaattccccacgggtaaccgtgtcctagcctgcgtggcggccaacccagcatttgctgggacgccaatttactgacatggtgtgaagacttgcatgtgcttgattgtgactcctccggcccctgaatgcggctaaccttaaccccggagccttgcagcataatccaatgttgtggaggtcgtaatgagcaattctgggatgggaccgactactttgggtgtccgtgtttcctgttttctttaagttgtcttatggtcacagcatatatactatatatactgtgatc

SEQ ID NO: 748 - DNA, 626 bp, Rhinovirus B
  source 1..626: mol_type = genomic DNA
ttaaaacagcggatgggtaccccaccatccgacccactgggtgtagtactctggtacttcgtacctttgtacgcctgttcttcccattgtacccttcctgaacttccaacccaagtaacgttagaagctcaacatttagtacaacaggaagcaccacatccagtggtgtttagtacaagcacttctgtttccccggagcgaggtataggctgtacccactgccaaaaacctttaaccgttatccgccaaccaactacgtaaaagctagtagtattatgtttttaactaggcgttcgatcaggtggatttcccctccactagtttggtcgatgaggctaggaattccccacgggtgaccgtgtcctagcctgcgtggcggccaacccagcttatgctgggacgcctttttatagacatggtgtgaagactcgcatgtgcttggttgtgattcctccggcccctgaatgcggctaaccttaaccctggagccttgtgtcacaaaccagtgatgataaggtcgtaatgagcaattccgggacgggaccgactactttgggtgtccgtgtttcttatttttcttattattgtcttatggtcacagcatatatataacatatactgtgatc

SEQ ID NO: 749 - DNA, 626 bp, unidentified
  source 1..626: mol_type = unassigned DNA; note = unclassified Enterovirus sequence
aacagccgtctggttgatcccaccagcgggcacaatgtgcgttgtacactgcgatctcggtcgctttgtatgcctgtttttaccacccaccccaactttactatcttctttacttcacaagtaacatagaagcatgtacatgacgcccaataggacaacgtctcacccagagatgttaagggcaagcacttctgtttccccggatgtgtgaataggcttcacccgaggctgaaactgtagcattcgttatccgcatgactactacgcgactgctagtagcgttctgtgtgacatgtggggtttcgttcagcagagacccagtctgtagatcagggtaatgaggctacacaatccccactggtgacagtggtgtagcctgcgtggtgccctgcccgaggttcgtcctcgggaccctccatgttagacagggtgtgaagacactagtgtgctagtcatgagtcctccggcccctgaatgcggctaatcttaaacctgcagccaccacatgcacgccagcatgcaggtggtcgtaatgagcaattgcgggatggaaccgactactttgggtgtccgtgtttctctttttacatttatgtgtctcttatggttacatcattggtgtaatc

SEQ ID NO: 750 - DNA, 627 bp, unidentified
  source 1..627: mol_type = unassigned DNA; note = unclassified Picornaviridae sequence
ttcaaggttcagccggccgggggttttgaggggttttggctggtccctatggaggcatagttatcgggactgtattcccgatggtttgagttagggccgacctgctcctgtattgcccacagctttgggctatcttgaggtgtttgtttgtgggaccctctcttgggtctcatttgtttttcttctgttttatgtctatcttttcccggttgtctccatacctatgctgctaccgctgcgcccggcggggttaaccctggggctagcccatggctgtggccgccaaaagtggagatgtcatgactattccatggcttgggctttgggtgtgtccagcaggtgacaggaacttagctgatcttggcaggggggtaggctacgggtgaaacccccccgtcctctcactcatattgagtgatgtcgtgtacacgtgaaccttggtggataggggtgagatcgtttggtcaaaaacccctcaacgcctggtgcgggcatgtcgtcatgtcatgcggctttgttcgtgtttcctgtctgttggcacccagtgctgaactcatggtaattggcaccctatgagtttagggctaatcaggggcatttaggtttttagcaccactgcttaatttg

SEQ ID NO: 751 - DNA, 627 bp, Rhinovirus B
  source 1..627: mol_type = genomic DNA
ttaaaacagcggatgggtatcccaccatccggcccactgggtgtagtactctggtacattgtacctttgtacgcctgttttccccctcttgtacccgcccttcaagctccttgcccaagtaacgttagaagtttgaacattggtacaataggaagcatcacatccagtggtgtactgtacaaacacttctgttgccccggagcgaggtatagatggtccccaccgtcaaaagcctttaaccgttatccgccaatcaactacgtaatggctagtagcaccttggatttaagttggcgttcgatcaggtggtaacccccactagtttggtcgatgaggctaggaattccccacgggtgaccgtgtcctagcctgcgtggcggccaacccagcatccgctgggacgccaatttaatgacatggtgtgaagacctgcatgtgcttgattgtgagtcctccggcccctgaatgcggctaaccctaaccccggagccttgcagcacaatccagtgttgttaaggtcgtaatgagcaattctgggatgggaccgactactttgggtgtccgtgtttcttatttttcttgaatttttcttatggtcacagcatatatacattatatactgtgatc

SEQ ID NO: 752 - DNA, 627 bp, Rhinovirus B
  source 1..627: mol_type = genomic DNA
ttaaaacagcggatgggtatcccaccatccgacccacagggtgtagtgctctggtattttgtacctttgcacgcctgtttccccattgtacccctccttaaatttcctccccaagtaacgttagaagtttaaggaaacaaatgtacaataggaagcatcacatccagtggtgttatgtacaagcacttctgtttccccggagcgaggtataagtggtacccaccgccgaaagcctttaaccgttatccgccaatcaactacgtaatggctagtattaccatgtttgtgacttggtgttcgatcaggtggttccccccactagtttggtcgatgaggctaggaactccccacgggtgaccgtgtcctagcctgcgtggcggccaacccagcttttgctgggacgcctttttacagacatggtgtgaagacctgcatgtgcttgattgtgagtcctccggcccctgaatgcggctaaccttaaccccggagccttgcaacataatccaatgttgttgaggtcgtaatgagtaattctgggatgggaccgactactttgggtgtccgtgtttccttttattctttatattgtcttatggtcacagcatatatagcatatatactgtgatc

SEQ ID NO: 753 - DNA, 628 bp, Rhinovirus B
  source 1..628: mol_type = genomic DNA
ttaaaacagtggatgggtttcctaccatccgacccactgggtgtagtgctctggtatattgtacctttgcacgcctgttttcccattgtacccttccttaaattcctccccatgtaacgttagaagtttaagaacataaatgtacaataggaagcatcacatccagtggtgtatggtacaagcacttctgtttatccggagcgaggtataagcggtacccactgctgaaagcctttaaccgttaaccgccaatcaactacgtaacggctagtattaccttgtttgcaatctggcgttcgatcaggtggttccccccactagtttggtcgatgaggctaggagttccccacgggcgaccgtgtcctagcctgcgtggcggccaacccagcatttgctgggacgcctttttgtagacatggtgtgaagacctgcatgtgcttgattgtgagtcctccggcccctgaatgcggctaaccttaaccccggagccttgtgacataatccaatgtcattaaggtcgtaatgagcaattctgggacgggaccgactactttgggtgtccgtgtttctctttattctttacattgtcttatggtcacagcatatataatacatatatactgtgatc

SEQ ID NO: 754 - DNA, 628 bp, Rhinovirus B
  source 1..628: mol_type = genomic DNA
ttaaaacagcggatgggtatcccaccattcgacccattgggtgtagtactctggtactatgtacctttgtacgcctgtttctccccaaccacccttccttaaaattcccacccatgaaacgttagaagcttgacattaaagtacaataggtggcgccatatccaatggtgtctatgtacaagcacttctgtttcccaggagcgaggtataggctgtacccactgccaaaagcctttaaccgttatccgccaaccaactacgtaacagttagtaccatcttgttcttgactggacgttcgatcaggtggattttccctccactagtttggtcgatgaggctaggaattccccacgggtgaccgtgtcctagcctgcgtggcggccaacccagcttatgctgggacgcccttttaaggacatggtgtgaagactcgcatgtgcttggttgtgagtcctccggcccctgaatgcggctaaccttaaccctagagccttatgccacgatccagtggttgtaaggtcgtaatgagcaattccgggacgggaccgactactttgggtgtccgtgtttctcatttttcttcatattgtcttatggtcacagcatatatatacatatactgtgatc

SEQ ID NO: 755 - DNA, 630 bp, Rhinovirus B
  source 1..630: mol_type = genomic DNA
ttaaaacagcggatgggttctcccaccatccgacccactgggtgtagtactctggtatgatgtacctttgtacgcctgtttattcccaaacccccacccgttattcgcccaacccctgtaacgttagaagtttggaacttaattgtacaatagggagcaccatatccaatggtgtaacgtacaagcacttctgtttccccggagcgaggtataggtggtacccactgccgaaagcctttaaccgtcatccgccaatcaactacgtaacagctagtaacatcttgttgttgattggacgttcgatcaggtggttcaccccccactagtttggtcgatgaggctgggaatcccccacgggtgaccgtgtcccagcctgcgtggcggccaacccagcttatgctgggacgccctttcaatgacatggtgtgaagactcgcatgtgcttgattgtgagtccgccggcccctgaatgcggctaaccctaaccctggagccttgcaccacaatccagtggtgtctgggtcgtaatgagtaattctgggatgggaccgactactttgggtgtccgtgtttctcatttttcttttaattgtcttatggtcacagcatatagtattatatactgtgatc

SEQ ID NO: 756 - DNA, 631 bp, Rhinovirus B
  source 1..631: mol_type = genomic DNA
ttaaaacagcgggtgggtatcccaccacccgacccactgggtgtggtacactggtactttgtacctttgtatgcctgtttgcttccactcccctttacctaatattcttccccaagtatattttgcggtaacgttagaagaagcaaagttagtgcaataggatgtatcacaaccagtggtataaagcacaagcaattcttgttccccggagctggatatagactgctaacgtggtcaaaagtccttaaccgttatccgccagctaactgcgagaagactagtaacaccatgtttgtttttagacgttcgatcaggtgaataccccattcactagtttggtcgatgaggctgagaataccccacaggtaactgtgtctcagcctgcgtggcggccaacccgactcatgtcgggacgcctactaatagacatggtgtgaagatcctattgcgcttagttgtgagtcctccggcccctgaatgcggctaaccctaaccccggagccttgtggtgtaaaccaacatttgcaaggtcgtaatgagtaattctgggatgggaccgactactttgggtgtccgtgtttcctttatttttattgtgtgtgtcttatggttacaaatacaatttgtaatc

SEQ ID NO: 757 - DNA, 632 bp, unidentified
  source 1..632: mol_type = unassigned DNA; note = unclassified Picornaviridae sequence
ttgaaaactggcccccctggggatctttgcacctttgaagtgcatatcctcaggggttaaccaggtggtggacataatgtccacctttgtttcaacatggttctttggcattttctccagagtaactaaaagataaatgccatctggatggattttctggttataaaatgactttctcgttgatcggtttttccactatcttcattgccgggtggttgccaagcccggaagtgctatcactctaggattcgagtcttcatccgtcgcggatttctagggcccatatctggtgctgaaatattgcaaggaatggtgaaccctagttgtctaacactgtaagtctcgatgtcttagaccaggtagccttggcacaattcctaaccaccaacatgtttctcgtgaaattccctcgccggggtgtagtagcgagtctcctctgttgggctcatggttaggggatgctcctaggtagagtggaacctcttcttcattttaaggtgggacctgattcagtatcccactggaagttagaggtctgggtattggggtaacccagcttggtccacactgcttgatagagtcgcggctggccgacctaggacatctttaaaaagtcagttgattttaacctt

SEQ ID NO: 758 - DNA, 633 bp, unidentified
  source 1..633: mol_type = unassigned DNA; note = unclassified Megrivirus sequence
gggggctcttccccctgggctcttttccggtaatccgattggcgaccggattatcgtgactctgctgagtcgtccgtgcctctaggaaacttgttggctccggctgacactttttctggacatcggatgggcggcttggtggggctagccaaccctgactgactttatgtgtatgacctcttttcctcttgcgctttagtctgtcgcgtctgatccacgtacggattaaatggtatgtcataaggctaagcctcgttctgaaatcccctagccaaaggggcctagtaggatcttggtgtttccttatgacctctaccgaccatgttagctagagctagggctgaataggatgcatcccagactcctttttggatatctggagcaagacaccggagtttaactatgtacgctggataaggctcgaacacacccagattgaaggtggtgctgaaatattgcaagcctaggtctgtgtagtgttagtagatgcccgccgctatagttttctccgccccctgtgggttagtagtgtacctatttggacgcagagccggcaatctctgcctttgcctagtactggttgatagacccgcggctggtcgagttaacatggtataaccagttgaaacggct

SEQ ID NO: 759 - DNA, 633 bp, Enterovirus B
  source 1..633: mol_type = genomic DNA
cacccacagggcccactgggcgctagtacactggtatcacggtacctttgtgcgcctgtttgacccaccttccccaaacgtaacttagaagcacaactcaaatgatcattagacggctcagtatgccaactgggtctcgatcaagcacttctgttaccccggactgagtaccaataggctgctcacgcggctgaaggggaaaccgttcgttacccgaccaactacttcgagaaacctagtaccaccatgaaagttgcgcagcgtttcgctccgcacaaccccagtgtagatcaggccgatgagtcaccgcaaaccccacgggcgaccgtggcggtggctgcgctggcggcctgcccatgggacaactcatgggacgctacaatactgacatggtgtgaagagtctattgagctagttggtagtcctccggcccctgaatgcggctaatcctaactgtggagcagatacccacgcaccagtgggcagtctgtcgtaatgggcaactccgcagcggaaccgactactttgggtgtccgtgtttcttttattcctacgctggctacatatggtgacgatttgtaccataaagccttaaccgctcctcaacaccgtcataacacttaacacgctgag

SEQ ID NO: 760 - DNA, 633 bp, Rhinovirus A
  source 1..633: mol_type = genomic DNA
ttaaaactgggtgtgggttgttcccactcacaccacccaatgggtgttgtactctgttattccggtaactttgtacgccagttttccctcccttctccccctcctacccttttacgtaacttagaagctttaaacatgagaccaatagcaggcaactttccaggttgtctaaggtcaagcacttctgtttccccggttgacgttgatatgctccaacagggcaaaaacaactgatatcgttatccgcaaagtgcctacacagagcctagtaggattctgaaagatctttggttggtcgctcagctgcatacccagcagtagacctcgcagatgaggctggacattccccactggtaacagtggtccagcctgcgtggctgcctgcacacctcttacgaggtgtgaagccaaggattcgacagggtgtgaagagccgcgtgtgctcactttgagtcctccggcccctgaatgcggctaaccttaaacctgcagccatagctcataagccaatgagtttatggtcgtaatgagtaattgcgggatgggaccgactactttgggtgtccgtgtttcattttttccttttatcaattgcttatggtgacaatatatatatatatatatattggcatc

SEQ ID NO: 761 - DNA, 634 bp, Parechovirus B
  source 1..634: mol_type = genomic DNA
agaatagccaatctgtaacttcaacacctaagcgcatcttgcccgccgttatctggtcgaaggcacttgcaataagactggttaaccctccatgcgtgattcacaatcctatctgtctctcgagtgctttacgctcgggtaggggctcacccaggaggtcccactctttacagaggtctgcgcaggtggctttcacctctcgacagcgcccctcaatcctgccttaggtgtgaaggttgcacgtattccaatgtgaacagtgcttgaattttgttggtaggtgtagcgaccacacatgagccagcggatttcccctggtggtaacaccagcctctgggcccaaaaggcatgtctttgacctcatgtgtgcacaatcccagtgatgccaatgattagtaaagcacttagtatatatatgggatataccaatctcaagcacctaagggtgtaggtatggtaggctgaaggatgccctggaggtacccgcaggtaacgattggttcactgtggatctgaccaggggcccaccggaacttcgttctgggtagaagctctcgagccttgggttaaaaaacgtctaggcctatcccccggggggacccggggtttcccttataaccccatattttgcatc

SEQ ID NO: 762 - DNA, 636 bp, Pestivirus A
  source 1..636: mol_type = genomic DNA
tggagtctatacgaggaggacagcctgttaataacccagttagaaatatcaaataatttactcatatcagaagacttgccagccgctgtcaagaacataatggccaggactgatcacccagagccgatccaacttgcttacaacagttatgaggtccaggtcccagtcctgttcccaaaaataaggaacggagaggttacagacacctacgaaaactactcatttctaaacgctaggaagttaggagaggatgtgcccgtatacatctatgccactgaagatgaggacctggcagttgacctcctagggctggactggcccgaccctgggaatcagcaggtcgtggagaccagcaaagcactgaagcaagtggccggattgtcttcagctgagaatgccttgctcatagctttatttgggtatgtaggttaccaagctctatcaaagaggcatgtcccaatggtcacagatatatacactatagaggaccagagactggaagacaccacccacctccagtatgcacccaacgccataaaaaccgaagggacagagactgaattgaaggaattgccggcgggtgacgtggagaaaatcatgggagccatctcggattatgcagctggaggactggaa

SEQ ID NO: 763 - DNA, 637 bp, Enterovirus A
  source 1..637: mol_type = genomic DNA
acttagaagcttcacacaatcacgaccatcagtaggcctggcatcccagtcacgtcttggtcaagcacttctgttccccctgactgagtatcaataaactgctcacgcgggtgaaggagaaaacgttcgttatccggctaagtacttcgagaaccccagtagcaccgtgaaagttgcggagtgtttcgctcagcacttcccccgtgtacatcaggtcgatgagttactgttaaccccacgggcgaccgtgacagtggctgcgttggtagcctgcccatggggttacccttgggacgctctcatacagacctggtgtgaagagtctattgagctagttagtagtcctccggcccctgaatgcggctaatcctaactgcggagcacgcaccctcaacccagggggcggcgtgtcgtaacgggtaactctgcagcggaaccgactactttgggtgtccgtgtttccttttattccttactggctgcttatggtgacaattgaaaagttgttaccatatagctattggattggccatccggtgtctaacagagctattgtttacctatttattggatacgtccctcttaatctcaaggccattcaaactcttaattatatattgctccttaactgtaagaa

SEQ ID NO: 764 - DNA, 638 bp, Hepatovirus B
  source 1..638: mol_type = genomic DNA
gggagtaaacctcaccaccgtttgccgtggtttacggctacctatttttggatgtaaatattaattcctgcaggttcaggtctcttgaattatgtccacgctagtggcactctcttacccataagtgacgccttagcggaacctttctacacttgatgtggttaggggttacattatttccctgggccttctttggccctttttcccctgcactatcattctttcttccgggctctcagcatgccaatgttccgaccggtgcgcccgccggggttaactccatggttagcatggagctgtaggccctaaaagtgctgacactggaactggactattgaagcatacactgttaactgaaacatgtaactccaatcgatcttctacaaggggtaggctacgggtgaaaccccttaggttaatactcatattgagagatacttctgataggttaaggttgctggataatggtgagtttaacgacaaaaaccattcaacagctgtgggccaacctcatcaggtagatgcttttggagccaagtgcgtaggggtgtgtgtggaaatgcttcagtggaaggtgccctcccgaaaggtcgtaggggtaatcaggggcagttaggtttccacaattacaatttgaa

SEQ ID NO: 765 - DNA, 639 bp, unidentified
  source 1..639: mol_type = unassigned DNA; note = unclassified Megrivirus sequence
ttcccgaccggtctggcaaaccggacggttatcctggttagatgtctgatggttgctggaacgtggtggctactgctgccaccttctggcttcctttaatgggcatctagctgggttctttgccacaatccatcttactctcttacccattttctattacccagacttgttgttaactggtaaagttgacctactggcttcgttttgagactattctggtgttggtggacactctttccacaagtagattgtatggagttcatgctcgttttgaaccgggaatggcacaacccgtagtaggatcttgcctctgccatactaatctgcgcctgttgcttttagactatgggctgctaaggatgacattggaacccctttttggatattccatgtcaagtcaactgtttcatctggtgtacgctggaaatccttgttccgaggtcttgtctggaggtggtgctgaaatattgcaagccacaggcagttccttggacttggtgccgctatcagatgctacaccctctatgggcaaatgttgaaccttagtggacgcgtgagatgggaatccacgccggccatagactggctgataagctcgcggctgatcgagttgcaacagtaatcagttgatttgccact

SEQ ID NO: 766 - DNA, 639 bp, Rhinovirus C
  source 1..639: mol_type = genomic DNA
ttaaaacagccgtgtggttgtacccaccaccgggcacattgtgcgtggtacactggaattacggttcctttgtacgcctgttttcccttcccactttctttcttccttcacttcctaattgtaacataattagaagcatgacatacagtccaataggaggcggttaatccataaccgtcatagacaagcacttctgtttccccggatgtgtgaataggcttccaccgaggctgaagctgtagcattcgttatccgcacacgtactacgcgaaaactagtaacaccttgattggtggtgtggtgtttcactcggcgctaccccagcgtagatcagggcaatggggctacggaaaccccaccggcgacggtgtcgtagcccgcgtggtgccctgcccagatccttgcgatctgggacaccatatcattgacagggtgtgaagattctagtgtgctacgtgtgagtcctccggcccctgaatgtggctaaccttaaccccgcagctatggtgtgcaaaccagcacattcgtagtcgtaatgggcaactgtgggatgggaccaactactttgggtgtccgtgtttccttttattcttataattttccttatggttacaagcttatggttataggtttgtaacc

SEQ ID NO: 767 - DNA, 639 bp, unidentified
  source 1..639: mol_type = unassigned DNA; note = unclassified Enterovirus sequence
gacataagcgccgggtttgttaaaacagctgcgtggttgttcccaccaccaggcacacagtgcgtggtacactggaatttcggttcctttgtacgcctgttttcccaccctcatgtttgtttgtctttacgcgtaacttagaagcattgcaaacagctcaataggaatagtccatccaggactgttacgagcaagcacttctgtctccccggacgtgtgaatagacctcaccaaggttgaagctgtagcgttcgttatccgctcatctactgcgcaaagactagtaactaactgaagccttaatggtgtttcgctcagcagtaccccactgtagatcagggcaatgaggctacgcattccccactggtgacagtggcgtagcctgcgtggtgccctgcccaggtttcggcctgggacaccattttgacgacagggtgtgaagaccggcgtgcgctaggtgtgagtcctccggcccctgaatgcggctaatcctaaccctgcagccattgcatgtgatccaacatgtggatggtcgtaatgagtaattgcgggatggaaccgactactttgggtgtccgtgtttcctgttttaccaattactgtctcatggttacaaatttgtgtatcaagtttgtaact

SEQ ID NO: 768 - DNA, 640 bp, unidentified
  source 1..640: mol_type = unassigned DNA; note = unclassified Picornaviridae sequence
ttttgaaaagggtcccagggggatcttttattccctctgggcccttttcacgtagtagggagtggcgcccctactgcgttactctgccaggtagtctgggtaggtaaacgggagatcggcttcgggcttatcttcttaatagcctacgtaactgggctgactggtgggggagctactagatccgggaaaggactagttaccccttgtaactctccttcgtgtcaccccatccacttaccctttttccctaccccttagaatcttaagtagatgtgcaggcctggccccccggaaatgggcaaatcggacgtttgcgtgtagggtcgttctgaaaggtggggcccactccaccgtagtaggatcttcctgtttcacgtttaaacctctccgggcaggtgtcgctagacactaggctgtataggatggcaagcacttaggtttcgcaccttcctagtgcgccaagaccccgtcttttagttttagtacatggttctttgtaagatgtctaaccagaggaggtggtgctgaaatattgcaagccactctggcgaacgtccgctgcattgcctggaacgaactttctgacgtctagcactggtagcgcggtactagattagtagggtacctatatggacagggg

SEQ ID NO: 769 - DNA, 640 bp, unidentified
  source 1..640: mol_type = unassigned DNA; note = unclassified Enterovirus sequence
ttaaaacagccgtgtggttgttcccaccaccggacacactgtgtgttgtgcactggaatctcggttcctttgcatgcctgttttataaccccttcccctttactttctatcattcttttcttccaagtaacttagaagctgaacaacagtccaataggaagtgaccaacccatggtcactaaggacaagcacttctgtttccccggatgcgtgaatagactctaaaagggttgaagctgtagcattcgttatccgcacttgtactacgcgatggctagtatcatcctgctctttccattggcgtttcgctcagcgtggtatcccccacgtagatcagggtaatgaggctacatgtaccccaccggcgacggtgatgtagcctgcgtagtgccccgcctgggtcttgtgcccaggacgccataggtcagacagggtgtgaagacttgagtgtgctacaagtgagtcctccggcccctgaatgcggctaatcctaaccccgcggctatcgtacgcaatccagcgtattggtagtcgtaatgagcaattgtgggatggaaccgactactttgggtgtccgtgtttcctttatttcttgacatgttgcttatggtcacaagtttatggttataaatttgtgatc

SEQ ID NO: 770 - DNA, 641 bp, unidentified
  source 1..641: mol_type = unassigned DNA; note = unclassified Kobuvirus sequence
ggatttaggccgtggtgcccgtgggcacgacggccacggctccagccgcactcctctccacgccttgtcccacgggacataaagtggagccctaagccctaaacccccatgttacccaattttcttatccacttccctttttccctttgactcacatttttcttgaccgcgcttgtgaggcggttcccgtacagttgagttgacgggtcccgcgcgggacctgaaaattactccatactgattaggaaaggttctagtacgcttgtacccttaaggccagcgggctacctcctttaggtcttatagccccaactggttagaaccactccagctcacctctatcggtgcgggagtgctaccacccctgcctgcgtcaagcccgtttttctagtgatctgtccacaaacacttggattcccgtcgcgactgacagaacctggcgacaggtgtctcgatgtgtgtgaccaagtggcatgagaatcggaaactaacgctggtaagatggtaagtgcccaatccctgtggggtgatgtttttctctgcataggaatgctgcgaaggtaccccggccttgagtcgggatctgatcgcaggctaattgtcctctgtgcagttcatttccttttcttttcattggcatc

SEQ ID NO: 771 - DNA, 641 bp, Rhinovirus C
  source 1..641: mol_type = genomic DNA
ttaaaacagccgtgtggttgtacccaccaccggacacactgtgtgttgtgcactggaatctcggttcctttgcatgcctgttttaaaccccccttcccccactctttctatcattcttttcttcctaatgtaacttagacgttataccacagtccaataggacgtggccaatccaggccatgacggacaagcacttctgtctccccgggcgtgtgaataggcctcaacaaggctgaagctgtagcgctcgttatccgcatttgtactacgcgatggctagtatcatccttctcttggtcttggcgtttcgctcagcgtggtaaccccccacgtagatcagggcaatgaggctgcatatgccccaccggcgacggtgatgcagcctgcgtggtgccccgcctgggttaacccccaggacgccacaatcaagacagggtgagaagacctgagtgtgctacagatgagtcctccggcccctgaatgcggctaatcctaaccctgcagctatcgtatgcaaaccagcatattggtagtcgtaacgagcaattgcgggacggaaccgactactttgggtgtccgtgtttctctttttatttgaaatgttgcttatggttacaagttttggtattaaacttgtgacc

SEQ ID NO: 772 - DNA, 641 bp, unidentified
  source 1..641: mol_type = unassigned DNA; note = unclassified Enterovirus sequence
tgtgtacatctcttctagtttcggggaggggtttaaaactgaaccacggttgttcccactgtggttacctaaagggtgtagtggtcttgtattacggtacatttccatgccagttttatcacccctccccgaaattagaagagatgtacacaccgaccaatagggagtggccaaccaggtcgctaaaggtcaagcacttctgtttccccggttggtttggatatgctttacccaaggcaaaaaccgaaccagtcgttatccgcaaagtgcctacgagaagcctagtagcatcttcgaaaccaatggttggtcgctccattgcaaccccagcaatagacctggcagatgaggctgagcagtccccgccagcgatggtggctcagcctgcgcggctgcctgcgcaccccttagggtgcgaagccagaaagtggacaaggtgtgaagagcctattgtgctcactttgagtcctccggcccctgaatgtggctaatcttaaccccgcagctatcgcacataaaccaatgtgtaggtagtcgtaatgggcaactgtgggatggaaccaactactttgggtgtccgtgtttccttgttttctttacaaatgcttatggtgacaattgtgtgatatacagttgtcgcc

SEQ ID NO: 773 - DNA, 642 bp, Enterovirus B
  source 1..642: mol_type = genomic DNA
taatgtaacgtagaagttttacacactgatcaacagtaggcacagcgcaccagttgtgtctcgatcaagcacttctgtctccccggaccgagtatcaatagactgctcacgcggttgaaggagaaagcgttcgttacccggctgactacttcgagaaacctagtagcactatgaaagttgcgaagtgtttcgttcagcacttcccccgtgtagatcaggtcgatgagtcactgtattccctacgggtgaccgtagcagtggctgcgttggcggcctgcccatggggcaacccatgggacgcttcaatacagacatggtgcgaagagtctattgagctagtcagtagtcctccggcccctgaatgcggctaatcctaactgcggagcatgtgccttcgatccagagggtagcatgtcgtaatgggcaactctgcagcggaaccgactactttgggtgtccgtgtttccttttattcttatactggctgcttatggtgacaattgagagattgttgccatatagctattggattggccatccggtgagtaatagagctattatctactcctttgtgggttttgtatcattgaactataaggtcttgaagactctcaactttattttgacactcaacaccgcaaa

SEQ ID NO: 774 - DNA, 643 bp, Enterovirus B
  source 1..643: mol_type = genomic DNA
aagcgtaacttagaagcttacctcacgtggtcaataggcggctcagtacaccaactgggtcttgaccaagcacttctgttaccccggaccgagtatcaataggctgcccacgcggctgaaggagaaaacgttcgttacccggccaattacttcgagaaacctagtatcaccatggaagttgcgcggcgtttcgctccacacaaccccagtgtagatcaggctgatgagtcaccgcactcctcacgggcgaccgtggcggtggctgcgttggcggcctgcccatggggcaacccatgggacgcctcaatactgacatggtgtgaagagtctattgagctaattggtagtcctccggcccctgaatgcggctaatcctaactgcggagcagacactcacaagccagtgggcggtctgtcgtaacgggcaactctgcagcggaaccgactactttgggtgtccgtgtttccttttattcctacattggctgcttatggtgacaattgagagattgttaccatatagctattggattggccatccggtgacaaacagagcgattgtctattcatttgtcggttttgtaccattaaactccaaagtcttgaaaaccctcaacctaatcatcctacttaactcagtaaa

SEQ ID NO: 775 - DNA, 643 bp, Enterovirus D
  source 1..643: mol_type = genomic DNA
ccaagggcccacgtggcggctagtactctggtacttcggtacctttgtacgcctgttttatctcccttcccaatgtcaataggtggggcgcaaaccagcgctctcatgagcaagcactcctgtctccccggtgtggttgtataaactgttcccacggttgaaaacaacctatccgttatccgctatagtacttcgagaaacctagtatcacctttggattgttgacgcgttgcgctcagcacactaacccgtgtgtagcttgggtcgatgagtctggacataccccactggcgacagtggtccaggctgcgttggcggcctactcatggtgaaaaccatgagacgctagacatgaacaaggtgtgaagagtctattgagctactatagagtcctccggcccctgaatgcggctaatcctaaccatggagcaagtgctcacaggccagtgagttgcttgtcgtaatgcgcaagtccgtggcggaaccgactactttgggtgtccgtgtttcactttttacttttatgactgcttatggtgacaatttgatattgttaccatttagctgtcaaattaattgcaaaagatcctaagtcttacttaccaatttgcattttgataaccttgatttgaaaattttaata

SEQ ID NO: 776 - DNA, 643 bp, unidentified
  source 1..643: mol_type = unassigned DNA; note = unclassified Enterovirus sequence
cggataacgtttaaaacagcggatgggttcccccaccatccgacccactgggtgtagtactctggtattatgtacctttgtacgcctgtttactcccaaaccccccctcccgttacatttccaacccctgtaacgttagaagtttggaatttaacagtacaataggaggcaccatacccaatggtgtaatgtacaagcacttctgtttccccggagcgaggtataggtggtacccaccgctgaaagcctttaaccgttatccgccaatcaactacgtaacagctagtagcattttgtcgttgactggacgttcgatcaggtggtttacccccccactagtttggtcgatgaggctggaaattccccacgggtgaccgtgttccagcctgcgtggcggccaacccagctcatgctgggacgccctttcaatgacatggtgtgaagactcgcatgtgcttggttgtgaatcctccggcccctgaatgcggctaaccctaaccccggagccttgcatcgcaatccagtgatgttggggtcgtaatgagtaattctgggatgggaccgactactttgggtgtccgtgtttctcatttttctttgaattatcttatggtcacagcatatagtaatatatactgtgatc

SEQ ID NO: 777 - DNA, 644 bp, unidentified
  source 1..644: mol_type = unassigned DNA; note = unclassified Picornaviridae sequence
gaaaagagtcccaggaggaattccccctgggaacccttttccgttgggaaggcttggcaaccttcctggcgttaggctgcttagtagtctgcgtattgcgcgccagtttggcttcggctgagctgccgttcaatacactagtgggctattctaggtggctgtagttgccctacagtggccggccagtgaaaccacactgtagtttacccctaccccaaaatctctaatttatgaccgtaatccctaagtgactttcttgtttgctctcacacatgggctttggatcttgttttggattttggtatctgatctctatctggatgtatcagtaatctgaagtgcggacgcaatccgcctagtaggatgactgttgtccttttagaggaaaacctctgtggctagacatagtggtgtatagattcaacaggactcctttttggatatcctaactcccggacccttgttgaatgggctggatttccgcctagccaagggaaaccaccggaacggggatggcaactgaacctagtacggctagtaggaggtctatacatacgatgggctgggaaacccatcctggactatgactgggtgatagcctcgcggcggatcgagtcacagttgtaatccgttgttttgcactc

SEQ ID NO: 778 - DNA, 644 bp, unidentified
  source 1..644: mol_type = unassigned DNA; note = unclassified Enterovirus sequence
aattggcggataacggttaagagcttaaaacagcggatgggttccccaccatccgacccaatgggtgtagtactctggtattctgtacctttgtacgcctgtttctcccctccctcccatcctaaattgtcccagtaacttagaagacttgaattaccgtacaataggtgctgtcacatccagtgatggcttgtacaagcacttctgtttccccggagcggagtatagatggccaccgctgtcaaaagctcttaaccgttatccgccaattaactacgcaacggctagtaacatcttgttattcttagggcgttcgatcaggtgagtacacccctcactagtctggtcgatgaggctgagaattccccacgggcgaccgtgtctcagcctgcgtggcggccagcccagcttatgctgggacgccttaattgtgacatggtgtgaagacccacgtgtgcttaattgtgagtcctccggcccctgaatgcggctaacctaaaccctggagccttgagacacaatccagtgttggcaaggtcgtaatgagcaattccgggacgggaccgactactttgggtgtccgtgtttcctgttatttccaaattgttcttatggtcacaatataagctatatatattgtgatc

SEQ ID NO: 779 - DNA, 644 bp, unidentified
  source 1..644: mol_type = unassigned DNA; note = unclassified Enterovirus sequence
cgaatccttgtagtaatttatgttaaagtacttgatgagacctccattggtggcagtaatagcattctcatgtgatccggtggtattccggtacacttgtacgccagtttgccaccctaaataccccgtaacaatagaagtctacacacacttagaccaatagggggtgttcatccagttcacccaaggtcaagcacttctgtttccccggcataggggtgttaggtttcacccgagactgaagctctgattgtcgttatccgcacaactactggacaaagcctagtaacaccctacgatgtaccatggttggttgttccgccagtaccccctggtaaacctggcagatggggctagaagttcctcactggtgacagtgttctagcccgcgtggctgcctgctcccttatgggagaagccattttactgacaaggtgtggagagccccgtacgctagttgtgactcctccggcccctgaatgcggctaatccaaccctgcagccattgcatggaagccaccatgtagatggtcgtaatgagtaattgcgggacggaaccgactactttgggtgtccgtgtttcttgtttttcttttactgacgtttatggtgacaatatatatataacatatatattgttcatc

SEQ ID NO: 780 - DNA, 645 bp, unidentified
  source 1..645: mol_type = unassigned DNA; note = unclassified Enterovirus sequence
ttaaaactgggcattggttgtccccaccaatgcacaccaagtgtgttagtgctctggaatcttcgttcctttgcacgccagtttgccctcccttccccaagtctttctatcattcttttcttcctaatgtaacttagacgttataccacagtccaataggacgtggccaatccaggccatgacggacaagcacttctgtctccccgggcgtgtgaggaataggcctcaaaaaggctgaagctgtagcgctcgttatccgcattggtactacgcgatggctagtatcatcctggaagtctcttggttggtcgctcagcgtggtaaccccccacgtagatcagggcaatgaggctgcatatgccccaccggcgacggtgatgcagcctgcgtggtgccccgcctgggttaacccccaggaagccaatgagtggacagggtgtgaagagccgcgtgtgctaccaatgagtcctccggcccctgaatgcggctaatccaaccccacagctatggcatgcaagccagcatgtgcgtagtcgtaatgagtaattgtgggacggaaccgactactttgggtgtccgtgtttcctttattctttgaaatgttgcttatggtgacaatattggtattataccattcttgtcatc

SEQ ID NO: 781 - DNA, 647 bp, unidentified
  source 1..647: mol_type = unassigned DNA; note = unclassified Enterovirus sequence
tgtgacctcaccggggaaacagaagtgcttgttcgtggtggtactggtttgtaccaccacgaacaagcacttctgtttccccggtgaggtcacatagactgttcccacggttgaaagtgatcaatccgttatccgctcatgtacttcgggaagcctagtatcacctttggatcttcgacgcgttgcgctcagcactcaaccccagagtgtagcttaggctgatgagtctggacgttccccactggtgacagtggtccaggctgcgttggcggcctacctgtggttcaaagccacaggacgctagttgtgaacaaggtgtgaagagcctactgagctacctgagattcctccggcccctgaatgcggctaatcctaaccacggagcaggtgatcataaaccaatgataggcctgtcgtaatgcgcaagtctgtggcggaaccgactactttgggtgtccgtgtttccttttattctttacattggctgcttatggtgacaatcatagattgttatcataaagcgaattggattggccatccggtgaaaatcagagcgattatatatttgtttattggattcactccattaacaccaatttctcctacactcattaagctagtcctattaataaggtactattatcata

SEQ ID NO: 782 - DNA, 647 bp, Enterovirus C
  source 1..647: mol_type = genomic DNA
cggtacctttgtacgcctgttttatatcccctcccccatgcaactttagaagcaattcaaacagttcaatagagggggtacaaaccagtaccaccacgaacaagcacttctgtttccccggtgaagctgtatagactgtgcccacggttgaaaatggctaatccgttatccgcttaagtacttcgagaagcctagtatcaccttggaatcttcgacgcgttgcgctcagcactctaccccgagtgtagcttaggctgatgagtctgggcataccccaccggcgacggtggcccaggctgcgttggcggcctacccatggctaacgccatgggacgctagttgtgaacaaggtgtgaagagcctattgagctacttgagagtcctccggcccctgaatgcggctaatcccaaccacggagcaagtgctcacaaaccagtgagtggcttgtcgtaacgcgcaagtctgtggcggaaccgactactttgggtgtccgtgtttccttttatttttatcatggctgcttatggtgacaatctaagattgttatcatatagcgtttggattggccatccggtgatttcaaaagtgatatatttgacctatcgccttactgtgtttacctactcattacatccactcaaccata

SEQ ID NO: 783 - DNA, 648 bp, Enterovirus C
  source 1..648: mol_type = genomic DNA
tcacggtacctttgtacgcctgttttacatcccctccccaagtaactttagaagtaaatcataaagttcaatagaagggggtgcaagccagcaccaccacgaacaagcacttctgtttccccggtgaagccgtatagactgcccccgcggttgaaaatggcagatccgttatccgctcacgtacttcgagaagcctagtatcaccttggaatcttcgacgcgttgcgctcagcactctaccccgagtgtagcttaggtcgatgagtctgggcataccccaccggtgacggtggcccaggctgcgttggcggcctacccatggttaacaccatgggacgctagttgtgaacaaggtgtgaagagcctattgagctacctgagagtcctccggcccctgaatgcggctaatcccaaccacggagcaagtgctcacaaaccagtgggtagcttgtcgtaacgcgcaagtctgtggcggaaccgactactttgggtgtccgtgtttccttttatttttatcatggctgcttatggtgacaatctaagattgttatcatatagctattggattggccatccggtgatttttgaaagtgatatttgccttgctatttcattgcatttgcttacttataatactgcaaactcaca

SEQ ID NO: 784 - DNA, 648 bp, unidentified
  source 1..648: mol_type = unassigned DNA; note = unclassified Enterovirus sequence
tactaatacagagtactacacccagtgggtcggatgggtatcccaccatccgacccactgggtgtagtactctggtattatgtacctttgtacgcctgttcttcccattgtaccctccctaaatttccaacccaagtaacgttagaagttccacataacagtacaataggaagcaccacatccagtggtgttttgtacaagcacttctgtctccccggagcgaggtataggctgtacccactgccaaaagcctttaaccgttatccgccaaccaactacgtaaaagctagtaacatcttgtttgtaacttggcgttcgatcaggtggattccccctccattagtttggtcgatgaggctaggaattccccacgggcgaccgtgtcctagcctgcgtggcggccaacccagcatttgctgggacgcccttttatagacatggtgtgaagactcgcatgtgcttggttgtgactcctccggcccctgaatgcggctaaccttaaccccggagccttgtgttgcaagccagcaacattaaggtcgtaatgagtaattctgggacgggaccgactactttgggtgtccgtgtttccaatttttcttattattgtcttatggtcacagcatatttgacaaatatactgtgatc

SEQ ID NO: 785 - DNA, 649 bp, Enterovirus B
  source 1..649: mol_type = genomic DNA
ccaccccgtcgtaacttagaagctaatcaactatggtcactaggcggcccagtatgccaactgggtcttgaccaagcacttctgttaccccggactgagtatcaataggctgctcacgcggctgaaggagaaaacgttcgttacccggccagttacttcgagaaacctagtaccaccatgaaggttgcgcagcgtttcgctccgcacaaccccagtgtagatcaggccgatgagtcaccgcatccctcacgggcgaccgtggcggtggctgcgttggcggcctgcccatggggcaacccatgggacgcttcaatactgacatggtgcgaagagtctattgagctaattggtagtcctccggcccctgaatgcggctaatcctaactgcggagcagatacccgcgtgccagcgggcagtctgtcgtaatgggcaactctgcagcggaaccgactactttgggtgtccgtgtttccttttattcttacactggctgcttatggtgacaattgaaagattgttaccatatagctattggattggccatccggtgactaacagagcgattatctatcaatttgttggttttgtgccattggatttcccaaccctaagaacccttaattttatattggtacttaacacgacaag

SEQ ID NO: 786 - DNA, 651 bp, unidentified
  source 1..651: mol_type = unassigned DNA; note = unclassified sequence
ggttaacttgtttaaccaaggcttccgtgcagggcttgcacgttaggagttcatgttgattcatgctccaatgcccaaaactttgtgtgtttgtttatgtctttcccaaagtttcccccaaggtttcggtactcaaaccttaattcctagtcccatcttttgggccttagtatctaggaaatgtacccgtgccttgacgaacgtaagaaagctgtcttttattgaacggttctaatgaactaagtataactggctcgcgccacctggtgtgtgccgttggaattcccccatggtaacatggtccaacgggcccgaaaggctagtgggcaatcggtcctccaaggaaggggttcccaccccgacctgaacaggatttgatgaagctcacctcccaggctcctaaccccaaggaagtttacttatagtaattagaatttagtatgtaattgctggcaatcttgctagtagtcaggaacgttatgaccaaatgagtagacccccagaaggtaccccattatatgggatctgatctgggcctcatactgtgtgtctccccacatatgaggttaaaaccatgaaagtttggtccaaaatattcttttccttttatcttttctttagtggtgacgccattatatcagcagtttgctg

SEQ ID NO: 787 - DNA, 651 bp, Enterovirus C
  source 1..651: mol_type = genomic DNA
ccccgtaacttagaagcataaaaccaagttcagcaggaaggggtgcaaaccagtacctctatgaacaagcacttctgtttccccggtgacattgcatagactgctcacgcggttgaaagcgatcgatccgttatccgcttgtgtacttcgaaaagcctagtatcgccttggaatcttcgacgcgttgcgctcagcacccgatcccggggtgtagcttaggctgatgagtctggacgtccctcaccggcgacggtggtccaggctgcgttggcggcctacctatggctaacgccataggacgctagatgtgaacaaggtgtgaagagcctattgagctacacgagagtcctccggcccctgaatgcggctaatcctaaccacggagcaagcggtcacgaaccagtggctggcttgtcgtaacgcgcaagtctgtggcggaaccgactactttgggtgtccgtgtttcctgttatttttatcatggctgcttatggtgacaatctgtgattgttatcataaagcgatttggattggccatccggtgagtgttgtatcgaacatttgactgttcatcagaactactgtgttagattcacttcttattcaactaattaatcaaaaacagtacgaagacaaaacaacaatactaca

SEQ ID NO: 788 - DNA, 651 bp, unidentified
  source 1..651: mol_type = unassigned DNA; note = unclassified Enterovirus sequence
cccctaccccttgcaacatagaagcattgtaccacggatcaatagcaggtgtgtcgatccagacgcatcttgatcaagcacttctgttcccccggaccgagtatcaataagctactaacgtggctgaaggagaaaatgtccgttacccggccaactacttcgagaagcccagtaccaccatgaacgttgcagagtgtttcgctcagcacaaccccagtgtagatcaggccgatgagtcaccgcattcctcacgggcgaccgtggcggtggctgcgctggcggcctgcctatggggaaacccataggacgctctaatactgacatggtgcgaagagcctattgagctagttggtagtcctccggcccctgaatgcggctaatcctaactgcggagcatgtgctcacaatccagtgagtggcatgtcgtaacgggtaactctgcagcggaaccgactactttgggtgtccgtgtttccttttatatttatactggctgcttatggtgacaatcaaggaattgttaccatatagctattggattggccatccggtgactaatagagctataatttacctatttgttggattcgtccccctgaacacaaaaacagttcagactctacagtacatcttatttttgaacttgaagaa

SEQ ID NO: 789 - DNA, 652 bp, unidentified
  source 1..652: mol_type = unassigned DNA; note = unclassified Enterovirus sequence
gggggttgtacccacccctggggcccacgtggcgccagtactctggtacgctagtacctttgtacgcctgttttcccctcccgtaaataaatcaagattgctggtcctgtggggagtagtccgactccgcaccgatacgtcgcaccagtactccggtacgcctagtaccctagtacggaggtaccagtactcctctcccgtaacttagaagcaaagcaccaaaccgacccaaaaggacgcgttgcacccagcagcgtgatggtcaagcacttctgtttccccggccgcaaggtcgttacccacccgcaccactacgagaagcctattagacagccaagcttgcaaagcgttgcgttcaaccacaaccccagtggtagctctgagagatgggactcgtcgttcccccatggcaacatggtgacttgtccgcgtgtgctctcgggttcgccaataggcgttcacgccgcacaagtgtaactgttgaagagcctattgtgctggagcggttttcctccggagccgtgaatgctgctaatcccaacctccgagcgtgtgcgcacaaaccagtgttgctacgtcgtaacgcgtaagttggaggcggaacagactactttcggtactccgtgtttccttattttatattactcaatct

SEQ ID NO: 790 - DNA, 652 bp, unidentified
  source 1..652: mol_type = unassigned DNA; note = unclassified Enterovirus sequence
gagcctggtggagcgtatcaatctaaaccggggagacagaagtgcttgaccgttaatgacttggatagccatctcctacatggagttgtactctattattccggtaatcttgtacgccagttttatatcccttccccctttgtaacttagaagttaagcacacagaccaataggtgatggctatccaagtcattaacggtcaagcacttctgtctccccggtttagattgatacgctccaccagggcgaaaacaatctaaatcgttatccgcaaagtgactacgcaaagcctagtaataccttgaagaacttatggttggtcgctccactaaaccccatagtagacctggcagatgaggctagaagtaccccactggtaacagtgttctagcctgcgtggctgcctgcacaccctttgggtgtgaagccatatttttgacaaggtgtgaagagccccgtgtgctcactttgagtcctccggcccctgaatgtggctaaccttaaccctgcagctagtgcatgcaatccagcatgttgctagtcgtaacgagcaattgcgggatgggaccaactactttgggtgtccgtgtttcactttttaccttttatttgcttatggtgacaatatatatagtacatatatattggcatc

SEQ ID NO: 791 - DNA, 654 bp, Enterovirus J
  source 1..654: mol_type = genomic DNA
tttgtacgcctattttaaaacccctacccccgtaacttagaagcatttgacacaagttcaatagtaggaccatcatccaggtggttcatcgaacaagcacttctgttaccccggtcctagtacctgtgaagctgtacccacggcggaaggggaaaacgatcgttacccggctatctacttcgagaagcctagtaacagcattgaaactcttgagcgttgcgttcagcacagtaacccctgtgtagctttggctgatgagtctgggcattccccactggcgacagtggcccaggctgcgttggcggccaaccgatccgggcaaccgggtcggacgcttatttgtggacatggtgtgaagagcctattgagctagatagtagtcctccggcccctgaatgcggctaatcctaactccggagcaaatgcacgcaacccagcgtgtagtttgtcgtaacgcgtaagtctggagcggaaccgactactttgggtgtccgtgtttcctgttttaccttatttggctgcttatggtgacaatatagtattgttaccatatagctattggattggccatccggtgaacagatttcgacaaactctattttactgttgttcacagcctaaagttacaaatcttactctgactcagtagtaatc

SEQ ID NO: 792 - DNA, 655 bp, Parechovirus A
  source 1..655: mol_type = genomic DNA
ctggatttctctaggagagtccctttcccagccctgaggcggctggtaaataaaagcctcaattgtaacaaacatctaagaacactacattaaccccatgcctggtctccactagttgaaggcgacttgcaataagatgagtggaaacaagacgcttaaagcatggtgtaaatcaacttttctaacctgtacattgtatggggtggcagatggcgtgccataattctatcagtgagataccacgcttgtggaccttatgctcacacagccatcctctagtaagtttgtgagacgtctggagacgtgtgggaacttattggaaacaacattttgctgtaaagcatcctactgccagcggaacaacacctggtaacaggtgcctctggggccaaaagccaaggtttaacagaccctctaggattggtttaaaacctgagatgttgtggaaaatattcagtacctaccaatctggtagtagtgcaaacactagttgtaaggcccacgaaggatgcccagaaggtacccgtaggtaacaagtgacactacggatctgatctggggccaggtacctctatctaggtgacctggttaaaaaacgtctagtgggccaaacccgggggggaccccggtttccttttattttatcaatgccact

SEQ ID NO: 793 - DNA, 655 bp, Enterovirus A
  source 1..655: mol_type = genomic DNA
ctgttttatctcccctcccccgtaacgttagaagattaaacaaatgacaaatagcaaatccaccaacccaggtgggttttcgtcaagcacttctgtttccccggacctagtaccaataggctgtacccacggctgaaagggaaaacgttcgttacccggctacctacttcgagaagcctagtaccatcattgaatgtctcaagtgttacgctcagcacaaccccagtgcagttcaggctgatgagtcaccgaatcccccacgggcgaccgtgtcggtggctgcgttggcggcctgcctgcgagttccactcgcaggacgcttgattcatgacatggtgcgaagagcctattgagctaggtagtagtcctccggcccctgaatgcggctaatcccaaccacggagcatccactgacaaaccagtcagcagggtgtcgtaatgggcaactctgtggcggaaccgactactttgggtgtccgtgtttcctgttttatttactctggctgcttatggtgacaatttacggattgttaccatatagctattggattggccatccggattacaagcaagtaatattactgtttgtgggatttttacccttgaatcacattaactacttcattctactaatagtcttgaagttaagtacatc

SEQ ID NO: 794 - DNA, 656 bp, unidentified
  source 1..656: mol_type = unassigned DNA; note = unclassified Picornaviridae sequence
cgaattccggacatctcctttcgggggcgagcgtcaccgtgcccctcatggaggcaactgtgcctctaatcggtgacccactgagaaaattttctttctacgtggctaaacaatgcaactttataataacacaaatttaatgcttaatcttaacaccaaagatttgaacatatgtttggaaagtggcacacttcaaacattgcatagttgctaggggtgaagtccctttaaggggttgcagaggatctttcctctttatgagcggctaggagtatcttcttgatattatgtggtcgtgcaactcacttcccagatgtatgacggtgtactaagcgattggaactagtcataacctctttgaattttggtattgcgagtctagcagggggatatttaccgctaaagggtgacacactcgtgagggtggcctttggtgtgtgtatatttattccgcccatcttgcatggggtgctaaaattctaatgctgtgaaataaccattttctgaatacattctctacatttggagtcaaatatgaggaatgccactcaggtacccttgacatgatcttggatctgagagtgggctaattatctaattatttggcgactttctaaaatcttctgtttttagtggtgacaatttatggttataaa

SEQ ID NO: 795 - DNA, 656 bp, unidentified
  source 1..656: mol_type = unassigned DNA; note = unclassified Enterovirus sequence
gaaaggaggggaaggggttttaaaacagtcgaccggttgttcccaccggcgagcacactgtgcgttgtacactggaattacggttcctttgtatgcctgttttataaccccttcccctcctttctatcacctctaacttccatgtaacttagaagcaacgtacatgagcccaataggagcggctaatccacagccgtatagggcaagcacttctgttaccccggatgtgtgaatagacttctcacgaggttgaagctgaagcattcgttatccgcgcttgtactgcacggaaattagtagcactcttgccagcctcatggtgtttcgctcagcgtttcccccacgtagatcagggcaatggggctacacaacccccaccggcgacggtggtgtagcccgcgtggtgccccgcccgagctactagctcgggacgccatgatgaagacagggtgtgaaggttcgagtgcgctacaagtgagtcctccggcccctgaatgcggctaaccttaaccccgtagctgtggtgtgcatgccagtacaaacacagtcgtaatgggtaactacgggatgggaccgactactttgggtgtccgtgtttcactttttcctttaaatttgtcttatggttacaggtttatgcaaatagatctgtaatc

SEQ ID NO: 796 - DNA, 657 bp, Enterovirus B
  source 1..657: mol_type = genomic DNA
gcggccccctcccccactgtaacttagaagcaatgcataccgatcaacagtgggcgtggcaaaccagccatgtcttgatcaaacacttctgtttccccggactgagtatcaatagactgctcgcgcggttgaaggagaaaacgttcgttatccggccaactacttcgagaagcttaagtaacatcatgaaagttacggagcgtttcgttcagcacatccccagtgtagatcaggccgatgagtcactgctctccccacgggcgaccgtggcagtggctgcgctggcggcctgcccatggggtgacccatgggacgctctaagatggacatggtgcgaagagcctattgagctagttggtagtcctccggcccctgaatgcggctaatcccaactgcggagcatgtgtcttcactccagaagatagcatgtcgtaacgggcaactctgcagcggaaccgactactttgggtgtccgtgtttccttttattcctacactggctgcttatggtgacaattcaagaattgttaccatatagctattggattggccatccggtgagcaatagagcaattatctaccaatttgttggatttgtacccctcgattttacagccattggaacacttaaatacatcttagtactcaacacgacaaa

SEQ ID NO: 797 - DNA, 660 bp, Enterovirus L
  source 1..660: mol_type = genomic DNA
acatgggccagcccaccacacccactgggtgtagtagtctggttctatggaacctttctacgcctcttttgcttccctcccccatttctccttcgattgctccacctgtgatctttgcaacttagaagaaataatgaacccgcacaatagcgggcgctgagccacagcgtcaatgtgcaagcacttctgtttccccggaatgggcccataggctgtacccacggctgaaagggaccggcccgttacccgccttggtactgcgagaatgttagtaactccctcgatagctttaggcgttacgctcagccctttgagcccgaagggtagttcgggtcgatgaggctcgtcattccccactggcgacagtgtgacttgcctgcgttggcggcccggggtggggggcaacccccatccacgcctactgaaggacagggtgtgaaggcgctattgcgctactaaggagtcctccggcccctgaatgcggctaacccgaaccccgagcccacggtggtaaacccgccacaagtgggtcgtaatgagtaatttggggcagggaccgactactttgggtgtccgtgtttcctgtttttccatacgatggctgcttatggtgacaaccataagcaattggattggccatccggtgttcatattgcgaat

SEQ ID NO: 798 - DNA, 662 bp, Cardiovirus A
  source 1..662: mol_type = genomic DNA
ctctttccgagggaaaggaagcgccccagtctgcattcacaagctggtgcttccccgcccagactaagcgccgcacggagggaatcagggtcccggtgccccccctccctaacagtactggtcgaaaccacttgggataagaccggtgtcttgtttagtctatatgttatttctactcatctggtttctttgccagatgatgggcagtgtaaccttgccctcgcttcttgcggagaattcctagtggtctttccactctcgacaaaggaattcatgttccaccaaaagttgtgaagaaagcaagtcctatggaagctttctgatgactgatgatgactgtagcgaccctttgcaggcagcggactcccccacctggtaacaggtgcctctgcggccaaaagccacgtgtttgacagacacctgcaaaggcggcacaaccccagtgcctcatcaaaagtctgatgactgtggaaatggtcaactggcttttcttaagcaaatttggtgtttggggctgaaggatgcccggaaggtaccacactggttgtgatctgatccggggctttagtgcatgtgctttacacatgtagctaaggttaaaaaacgtctaggccccccaaccacggggacgtggttttcctttgaaaaccacaatttataat

SEQ ID NO: 799 - DNA, 663 bp, unidentified
  source 1..663: mol_type = unassigned DNA; note = unclassified Hunnivirus sequence
gccctcacctgtcaattgggaccaccactttcagtgaccccatgcgaagtgctgagagaaggaagctttcttacccttcatttgtgaacccactagtctaagccgcttggaatacgatgagtggaaaagttcattctaaatggagtgaaacatgcttaatttttctagtcaggcacacccttgtgtgtctgagcgccactgtcttggcgtaagtcttcagagtgtcacgccgtgcttgcggatctcacgtggcacatgacgaggctctcgctggaactgtgagtctggaacaagtgaagtaacagtgaaaagtgcatgatcacacattgtgtgggctatgagcctgcggaacaacaactggtaacagttgccccaggggccgaaagccacggtgttaacagcaccctcatagtttgatccatcccaggatggtgatgttgtgtacctagtaattgccaatttgcttgttttggtatcatggcataccggagagtttgcgggtgaaggatgcccagaaggtacccgtaggtaaccttaagagactatggatctgatctggggccctgtctggagtgctttacacacagctcagggttaaaaaacgtctagcccgcatcaacccgagggattcgggttttccctttaaaaacccgactggcattt

SEQ ID NO: 800 - DNA, 663 bp, Enterovirus C
  source 1..663: mol_type = genomic DNA
tttaaaacagcctgggggttgttcccacccccagggcccactgggcgttagtactctggtatcgcggtaccttagtatgcctgttttatgtctcctttcccccgcaactttagaagtaatcaagttatggctcaacagtcgccacacccccagtgtggttccgagcaagcacttctgttccccggttgcgtcttatatgctgtgtgaacggcagaaagggacaatatcgttatccgctcaactactacgggaagcctagtaccaccatggattgacctgaaagttgcgttcagcgcacccccagcgcagctcaggccgatgaggctccgaataccccacgggcgaccgtgtcggagcctgcgttggcggcctgcccacgttgcaaaacgtgggacgctcatttcatgacatggtgcgaagagcctactgtgctagttgagagtcctccggcccctgaatgtggataatcctaaccactgaacctacgggcgcaaaccagcgtctggtaggccgtaacgcgcaagtcggtggcggaaccaactactttgggtgtccgtgtttccttttatctttttgaatgtttatggtgacaattgttgtgtacagttgttaccatagtttgcattcagaaataaacctaacactttccaattatttgttaca

SEQ ID NO: 801 - DNA, 664 bp, Tottorivirus A
  source 1..664: mol_type = genomic DNA
cccctttacgtaactgcaacttaaagagtaccctactgcattggatgtgtggtaaacttttacgcacacatttgtagtagtgttagttatgttctacctaatgagtatgcatgcacccgtcgaaacacgcttgtgataagataggtgagtccatgtgactaatctcattaagataaataagcaccctacaacgcacggcacgctcgtgtcttccgtgcggggccgggacaacagcggcctaaatcttctaggtgaccaccatgcttttgggactatggcaccactgtggacgtgagtacctggcagtaagtctgtgaaaagatggaaggtgtcccaagctatggggcgtatgcatatagcctgcggaacaaacaacggcgacgttgtccccagggcccaaaaggcacgtggataagatccacctatatgtttaccccatagtgtaagtcactggaagtcctagtaatggatgtctggagtaaggctcacggggtagggcgaaggatgcccagaaggtacccgtaggtaaccttaagagactatggatctgatctggggaccggatggcgccatcaccatgacgtggaggccggtttaaaaaacgtctaagcccgaccaacaacctaggggactaggttttccttttttattcatgtatgacgtt

SEQ ID NO: 802 - DNA, 664 bp, unidentified
  source 1..664: mol_type = unassigned DNA; note = unclassified Enterovirus sequence
ccacgcggcgttagtactctggtatcacggtacctttgtatgcctgttttatctcccttcccccgtaacgttagaagaaaacacaaccgacaactagcagattcaccaatccaggtgagtcttcgtcaagcacttctgtttccccggacttagtaccaataggctgtacccacggctgaaggggaaaacgttcgttatccggctacctacttcgagaagcctagtaccaccattgaatgtctcaagtgttacgttcagcacaaccccagtgtagttcaggtcgatgagtcaccgaattccccacgggcgaccgtgtcggtggctgcgttggcggcctgcctgcgggtttcacccgcaggacgcttgattcatgacatggtgcgaagagcctattgagctaggtagtagtcctccggcccctgaatgcggctaatcctaaccacggagccatgcgttacaatccagtaacgttgtggtcgtaacgagtaattctgtggcggaaccgactactttgggtgtccgtgtttcctgttttactcattttggctgcttatggtgacaatctagggttgtcatcatatagcgattggattggccatccggatttgtctttgtgtgatttatctcttgctcacaagcaattttcataggtcatagcatcatc

SEQ ID NO: 803 - DNA, 665 bp, Tremovirus B
  source 1..665: mol_type = genomic DNA
ttcaaatggcccctgggttgatacccagtggtcatttggacactttggtaaggaggtgtaattatccttcccatgtggaacctagtgcttaggtttactttatatgttctttgtttgtcctttgtactttctatcgggcaatcttgttgttcaatacaatatgtatttgaactgcctaagataaattcagttttcaaccaacccctctcttggggttgtgtctttctttctttcttatatcctcttaagctgacttacttgctaatccgactcctcgtcaacgggagggtaaagcagtatcactagggtattgtgatgtaggagaaaaagtaagtagagatagtgcatgtaacgaaagtgacttggtactttaaactctcttaatcccaaagtgtggtattggtcatgttggagtaggctacgggtgaaactccttcacatttagtaatgtgttcacacgctaacgctacggtagatgacagactaggtcttattctcaacgtagggggacgggtgtatgttcatgattagccacatattaaggttttgaggggctgagtcatataagtatgtgcattaatttctggtactggtccctggggactggcccttttctaggttgattttagtttccccaatttttaaaaactaatgagatttacgac

SEQ ID NO: 804 - DNA, 666 bp, unidentified
  source 1..666: mol_type = unassigned DNA; note = unclassified Hunnivirus sequence
cggcggctgagatgatgttcattctaatggagtgaaacatgtctttgattttctagtgcgtgttaggctttctagcacgcagcggcactgtcttgccgtaactctccagaccgtcacgccgtgcttgcggatctcacgtgccggatgacaaggctgtagctggaactgagtgtctagtgcacattgtgtaacagtgaaaactttgtgatcaccgaaaggtgggctagtagcctgcggaacaacaactggtaacagttgcctcaggggccaaaagccacggtgttaacagcaccctactagtttgatggaagcaattcctgatgttgcagagctagtaattgccaagctttgtacattagtatctcggcataccgtgcagtctgtgccagtgaaggatgccctgaaggtacccgtaggtaaccttaagagactatggatctgatcaggggctctctccgtactgctttacaggcggctgagagttaaaaaacgtctagctggccccagcccaagggattgggctttccctttaaagcccacaactcgcatatggtgacaataattgctgttcagacgaacagtgttattgttgtctattctcagagctttttccagacgcactcacacaacggaacttcttggcaagcaaatccaacaacagtcaat

SEQ ID NO: 805 - DNA, 666 bp, Senecavirus A
  source 1..666: mol_type = genomic DNA
tttgaaatggggggctgggccctgatgcccagtccttcctttccccttccggggggttaaccggctgtgtttgctagaggcacagaggggcaacatccaacctgcttttgcggggaacggtgcggctccgattcctgcgtcgccaaaggtgttagcgcacccaaacggcgcacctaccaatgttattggtgtggtctgcgagttctagcctactcgtttctcccccgaccattcactcacccacgaaaagtgtgttgtaaccataagatttaacccccgcacgggatgtgcgataaccgtaagactggctcaagcgcggaaagcgctgtaaccacatgctgttagtccctttatggctgcaagatggctacccacctcggatcactgaactggagctcgaccctccttagtaagggaaccgagaggccttcgtgcaacaagctccgacacagagtccacgtgactgctaccaccatgagtacatggttctcccctctcgacccaggacttctttttgaatatccacggctcgatccagagggtggggcatgacccctagcatagcgagctacagcgggaactgtagctaggccttagcgtgccttggatactgcctgatagggcgacggcctagtcgtgtcggttctataggtagcacatacaaat

SEQ ID NO: 806 - DNA, 666 bp, Enterovirus H
  source 1..666: mol_type = genomic DNA
ttaaaatagctgctgggttgttcccatccagcaggcccactgggcgtgatactctggtattgcggtacctttgtatgcctattttacctcccttccccctgaaacttagaagaaagaaacaaacacgctcactaggtacactgcatccagcagtgtaatgagcaagcacttctgtttccccggaagggatatatggtacgctgtgcaaacggcggaaattaatcctaccgttaaccgcccatctactccgagaagcctagtacctaattgaacttatcaatggagttgcgctcagcaggtgaccctgacctgccagctccggctgatggacctgggcatcccccacaggcgactgtggcccaggtcgcgtggcggccggcccactcttttgagtgggacgccttgataatgacaaggtgggaagagcctattgggctagctggtttcctccggcctcctgaatgcggctaaccctaaccccggagcatatggtggcaacccagccactggtatgtcgtaacgcgtaagtctgggatgggaccgactactttggagagtccgtgtttccattattttctttattgaatcttatggtgacaaattgggagttactcgggtgacgattgattattacttctgaaaacgtagagatatagaatcaacaca

SEQ ID NO: 807 - DNA, 667 bp, unidentified
  source 1..667: mol_type = unassigned DNA; note = unclassified Rosavirus sequence
gggtttctctgccctgtgctttggacgcccgccatggcgttaaactggcaatccccccttttccctacccgtaactaagtttttcctcggtcctttaggctgctaagacgcttgttgctacagcatattggaaccaccgagtcctccataagtaatcatttccacctctttgggtgtctatgcccttagagacggtttggagccccgttgactatgtcagagtgtgtcggtagcaggctttctgctctggacccatgccggccacacctcccagtagtgttgtgaaggaagtaagggattagtgaaaagattaggaatgttgccttggaatgtagcgattactgtaggtgagcggacttccccgggtggtaacacccgcctctcaggccaaaagccacggtgttaacagcacccctacagtaggccactaccccgtggtctccaagaatacagacctcttcttagtaactatccccctagctttcctgaagcatgctgctgtaaaggctaaggatgccctgaaggtacccgcaggtaacgttaagacactgtggatctgatcaggggcttgagtactgaagctttacagaagtagctcaagttaaaaaacgtctatgcctttcccccacgggagtgggggttcccccacacaatttcaacaggcact

SEQ ID NO: 808 - DNA, 667 bp, Mischivirus D
  source 1..667: mol_type = genomic DNA
ttatttttcaaaatgccactggcattacaccatattcgtatggtgtaatgtcagtggttggatgctcagtcctgagggactgtgcatccagtggttaagagccacattctttatttatcaactattgatctttgtaactaagtttaagccagagttctattatggttccacatccagtgggattcagaacaagtacttctgttaccccggtcattattagctgttaagacgtacccacgtctgaaggctgagaagatcgttacccggctgttgtctacgggaaggttagtaacttttagtgaaaggtgatttcattgatccgagaggtgaccccgacctctcagaaactagtgatgagtgtccacatccctcttatggtaacataaggtggtcgctgcgctggcactagggcccaaaaggcatgaatgaaccaagatctgattgtgaagacccaactgtgcacttcagtattcctccggcccctgaatgcggctaatcctaacccatctgcatgtgcctacaacccagtaggtagcatgtcgtaatgcgtaagagatggatggaaccgactactttgggtgaccgtgtttcttttatttttatcaagtctcttatggtcacaagcatagaaaacaagatgcctgtgatcacacgtgagacatccaat

SEQ ID NO: 809 - DNA, 667 bp, unidentified
  source 1..667: mol_type = unassigned DNA; note = Human parechovirus 17 isolate 157Chzj058, complete genome.1 sequence
cttgtttccactcattttattgcaagttgccttcaactagtggagaccaggcatgaggttaatgctataatcttagatgtttgttacagttgaggtttttattaacctcatgcctggtctccactagttgaaggcaacttgcaataaaatgagtggaaacaagacgcttaaagcatggtgtaaattagcttttctaacccacactttgtgtggggtggcagatggcgtgccataactctattagtgagataccacgcttgtggaacttatgctcacgcagccatcctctagtaagtctgtgagatgtctggtgacgtgtgggaacttattggaaacaacattttgctgtaaagcatcctattgccagcggaacaacacctggtaacaggtgcctctggggccaaaagccaaggtttaacagaccctttaggattggttcataacctgaaatgttgtggaagatacttagtacctaccgatctggtagtattgcagacactagttgtaaggcccacgaaggatgcccagaaggtacccgtaggtaacaagagacactatcgatctgatctggggccaggtacctctatcttggtggcctgttaaaaaaacgtttggggggccagcccggggggggtccccgggtttcttttatcttacaactgctata

SEQ ID NO: 810 - DNA, 668 bp, unidentified
  source 1..668: mol_type = unassigned DNA; note = unclassified Picornaviridae sequence
ctgtctcttatacagatgtcagtcagccaacaggctggctgggatgtgcccattttggacgcatgcccccgcgagagtggggcaccttgggggcgggtgagccccccatgttcgccaggtgttactgtcggcccttttatagaggcttttgtgggtatcagaagccgtttttgggtttggtgatggcgaccagcattgtcttgctggttgtgactgtctttttctcctgtttcttttcttattatctccaggctgtctccatgccaatgctgctaccgctgcgcccggcggggttaacccctggattagccaggggctgtggccgctagaagtggagatgcggtgactaatgtagtgtcatgggtaattgatgaggtcatggctgtggtgtggattggtgatcttccattgggggtaggctacgggtgaaacccccacgattgcaccatactatgtatggtgtccggtggtacgtgaaccccctggataggtttgagttttacgacaagaaagcctcaacagggagcgcaggcacggtacgcgtggatgcgccctccactaagcagtcatgcatcatttgttgtctgtcacactactaagccgtaccctatgagtttagggctactcaggggcatttaggtttttaaagcgcatgttgtaaatcactt

SEQ ID NO: 811 - DNA, 671 bp, Parechovirus A
  source 1..671: mol_type = genomic DNA
cgtcgggccttataccccgatttgctgagcttctctaggagagtccctttccccagccagaggtggctggtcaaataataccaattgtaacaaaacatctaagatacaacaaccacacacctggtctccaccagtcgaaggcaactagcaataagataggtgggttgagacgcttaaagtgtgtagtacatttacttttccaacctgtgctttgcacagggtggcagatggcgtgccataactctaatagtgagataccacgcttgtggaccttatgctcacacagccatcctctagtaagtttgcaagacgtctgatgacgtgtgggaacttgttggaaataatagtttgctgtaaagcatcccattgccagcggaatcacatctggtaacaggtgcctctggggccaaaagccaaggtttaacagaccctttgggattggttcaaacctgaactattatggaaaatatttagtacctgccgatttggtagtagtgcaaacactagttgtaaggcccacgaaggatgcccagaaggtacccgtaggtaacaagtgacactatggatctgatctggggccaactacctctatcttggtgagttggttaaaaaacgtctagtgggccaaacccgggggggaccccggtttccttttatttaataatgccact

SEQ ID NO: 812 - DNA, 672 bp, unidentified
  source 1..672: mol_type = unassigned DNA; note = unclassified Picornaviridae sequence
gggagagcttattgctctcccgccgtcttgcctatctataggtccaatctgtgtgatattccctaattaattaggtttgtcagttttcagatggatataatagtcattaatttatatttaatcatattagttcaaagggctataacttacccctgaatagtaacaaaatataaaatactcggtaccgaccggggtccgatctaatactaattattatatgatttgaccttatgataagttcaagaagtttctcttgattccagataaacccccctggaatttccccttatctttttcatataataactagtaatttcggatgcataaatactagttgtaagtcaaggtataattattaaaccgaacatttaattacttattagcactaatgaatgcccccatataaatagttatgggtatgagttcgcgattttcaacaacgatgcatgatttagagtaatgttaataagtgattttattagtaaagttttctaatgtatatgtcggcagttgcctacaacacgttaacctctgtgttaaaacctcgatgatatgtttatccatagacttcgggcatatacttctaaagtatgcgtgttcttctgaaaactcggtatgattgtcgcatgagtaagatagcgttccaatcaattccttttaatttctttcacg

SEQ ID NO: 813 - DNA, 672 bp, unidentified
  source 1..672: mol_type = unassigned DNA; note = unclassified Senecavirus sequence
ccctttttgaatggggggctgggccctcatgtccagcccttcctttccccttccggggggtaaaccggctgtgtttgctagaggcacagaggagcaacatccaacctgcttttgtggggaacggtgcggctccaattcctgcgtcgccaaaggtgttagcgcacccaaacggcgcatctaccaatgctattggtgtggtctgcgagttctagcctactcgtttctcccctgctcactcatttacacacaaaaactgtgttgtaactacaagatttggccctcgcacgggatgtgcgataaccgcaagactgactcaagcgcggaaggcgctgtaaccacatgctgttagtccctttatggctgcgagatggctatccacctcggatcactgaactggagttcgaccctccttagtaagggaaccgagaggccttcccgcaacaagctccgacacagagtccacgtgattgctaccaccatgagtacatggttctcccctctcgacccaggacttctttttgaatatccacggctcgatccagagggtggggcatgatccccctagcatagcgagctacagcgggaactgtagctaggccttagcgtgccttggatactgcctgatagggcgacggcctagtcgtgtcggttctataggtagcacatacaaat

SEQ ID NO: 814 - DNA, 672 bp, Enterovirus C
  source 1..672: mol_type = genomic DNA
tttaaaacagcttgagggttgttcccaccctcaaggcctactgggcgctagtacaccggtatctcggtacccttgtacgcctgttttatcttccctccccaaaagtaactttagaagcaagtaaactcacagctcaatagccgtcgcaccgccagtgcgactatgagcaagcactcctgtttccccggttgcgtcctatatgctgtggaaacggcagaaggggacaatatcgttacccgcttatctactacgggaagcctagtaacaccattgaacactttgagggttgcgttcagcgccaaacccggcgtagctcaggccgatggggcttcggaatccccacgggtgaccgtgtcgaagcccgcgttggcggcctgcccacaccaatgggtgtgggacgctcaatttgtgacatggtgcgaagagcctactgtgctaggtgagagtcctccggcccctgaatgtggctaatcccaaccaccgaacccgtggttgcaatccagcaactagcgggccgtaatgcgcaagtcggtgacggaaccaactactttgggtgaccgtgtttcctttatctcttatattgcaattttatggtgacatttatagtatttaagtgttaccatatattgcgcaaacatattgtaataatacagagttactactgcagaaatc

SEQ ID NO: 815 - DNA, 673 bp, Harkavirus A
  source 1..673: mol_type = genomic DNA
taaaaggggacgcggtgtggcagctttggctgtcatgccgtgttctccttttaccccaaggactagccttgggggttttccaaattcctttccctgtaggctttacttctctttatctatcttttctgtaactaagttttgcctattctaaaaatattttagaatgtgtttggatgtaactaagtttgtgcctgccctaaaaatattttagggcttgtttggataacctcgtcccttgtgttcagtgccgcacaatttgctaggcactgttcacttcctttgtttgtccattatgtatgctaaggtatgaattccatcatatgcttagcctctacatgcataatcttattccctccctggtgcaaactacgcccccaacatatgtgaatcttttaagcatattcctgaccccacacatatatatgtgttctcgtgaattcccccaccgtgaggtggtcacttggacgtggtgtgtgtcacacagcatatatatgatgcaggatgttgtttttaagataagcatatgtccttagtgctttgcatcatttcctccacaccccgtgaatgcggctaatcttaaccctgttgggtccgtgggtaaaccaacccattaaccacaggacggaaccgactactttcgggagtgtgtgtttctttttcttcttttgtcact

SEQ ID NO: 816 - DNA, 673 bp, unidentified
  source 1..673: mol_type = unassigned DNA; note = unclassified Enterovirus sequence
agggcccacgtggcgtagtactctggtatcacggtacctttgtacgcctattttacccccccttccccattgtaacttagaagataatcaaacagttcaatagtcgggctgccacccaggtagcttactgaacaagcacttctgttaccccggtcttagtacctgagaagctgtacccacggcggaaggggaaagtgatcgttacccggctatctacttcgagaagcctagtaacaccattgaacttgctgagtgttgcgctccacacagtaaccccctgtgtagctttggctgatgagtctgggcattccccactggcgacagtggcccaggctgcgttggcggccaaccgatccaggcaactgggtcggacgctgagtaacggacatggtgtgaagagcctattgagctagatagtagtcctccggcccctgaatgcggctaatcctaaccccggagcaggtacgcacaatccagtgtggagcctgtcgtaatgcgtaagtccgggacggaaccgactactttgggtgtccgtgtttcctgttttatttaccttggctgcttatggtgacaaactagtgttgtcatcatatagcgtttggattggccatccggttttgtacacgagtgtttcactacccgagactctatcacctctaccttattgagaaaa

SEQ ID NO: 817 - DNA, 675 bp, unidentified
  source 1..675: mol_type = unassigned DNA; note = unclassified Enterovirus sequence
gtattggtactggtttatactcccttcccctgtaacttagaagatataaaccaagttcaatagaagggggtacaaaccagtaccaccacgaacaagcacttctgtttccccggtaaagttgcatagactgtacccacggttgaaggcgactgatccgttatccgctcttgtacttcgagaagcctagtaacatcttggaatcttcgatgcgttgcgctcatcactcaaccccagagtgtagcttaggtcgatgagtctggacattccccaccggtgacggtggtccaggctgcgttggcggcctacctgtggtccaaagccacaggacgctagttgtgaacaaggtgtgaagagcctattgagctacaagagagtcctccggcccctgaatgcggctaatctcaaccacggagcaagtgctcacaaaccagtgagtggcttgtcgtaacgggtaactctgtggcggaaccgactactttgggtgtccgtgtttccttttatttttataatggctgcttatggtgacaatcacagattgttatcataaagcgaattggattggccatccggtgaaagtgagatatattatttatctttttgttggatttactccgattacttctttcacttacaaaatcatcaccacagttttgctaattagaaatacataccata

SEQ ID NO: 818 - DNA, 679 bp, unidentified
  source 1..679: mol_type = unassigned DNA; note = unclassified Enterovirus sequence
ggtacctttgtgcgcctgttttatactcccttccccgagtaactttagaagcaattcaacaagttcaatagagggggtgcaatccagcgccaccacaacaagcacttctgtctccccggtgactttacataagctgtacccacggctgaaagtgaatgatccgttatccgcttgtgtacttcgagaagcctagtaccaccttggaatctccgacgcgttgcgctcagcactctaccccgagtgtagcttaggttgatgagtctgggcattccccaccggcgacggtggcccaggctgcgttggcggcctacccatagctaacgctatgggacgctagttgtgaacaaggtgtgaagagccgattgagctactcaagagtcctccggcccctgaatgcggctaatcccaaccacggagcaagtgccttcaaaccagagggtggcttgtcgtaatgcgcaagttcgtggcggaaccgactactttgggtgtccgtgtttccttttattccattactggctgcttatggtgacaatcatagattgttatcataaagcgacttggattggccatccggtgaaatataaacacattgtctacttgtttgtcgggtttaccccactcactcagtccaccctcagcataataaacattgtgtcactgataagatattactactaca

SEQ ID NO: 819 - DNA, 682 bp, Enterovirus B
  source 1..682: mol_type = genomic DNA
ggtacctttgtgcgcctgttttatatacccttccccctctacagtaacttagaagtttgaatcatacggtcaatagacaacccagtgcaccagctgggccctgaccaagcacttctgttgccccggaccgagtatcaataagctgctcacgcggctgaaggagaaaacgttcgttacccggccatttacttcgagaaacctagtaacaccatgaaggtagcgcagcgtttcgctccgcacaaccccagtgtagatcaggtcgatgagccaccgcactccccacgggtgaccgtggcggtggctgcgttggcggcctgcccatggggcaacccatgggacgcttcaatactgacatggtgcgaagagtctattgagctaaatggtagtcctccggcccctgaatgcggctaatcccaactgcggagcagatacccacacaccagtgggcagtctgtcgtaacgggcaactctgcagcggaaccgactactttgggtgtccgtgtttccttttattctcacattgactgcttatggtgacaattgaaagattgttaccatatagctattggattggccatccagtgacaaacagagcaattgtgtatctttttgttggtttcataccactgaactgcaaagttttgaaaacccttgacctcattttgctactcaacacaacaaa

SEQ ID NO: 820 - DNA, 683 bp, unidentified
  source 1..683: mol_type = unassigned DNA; note = unclassified Kobuvirus sequence
tttgaaaagggggtggggggggcctcggccccctcaccctcttttccggtggccacgcccgggccaccgatacttcccttcactccttcgggactgttggggaggaacacaacagggctcccctgttttcccattccttcccccttttcccaaccccaaccgccgtatctggtggcggcaagacacacgggtctttccctctaaagcacaattgtgtgtgtgtcccaggtcctcctgcgtacggtgcgggagtgctcccacccaactgttgtaagcctgtccaacgcgtcgtcctggcaagactatgacgtcgcatgttccgctgcggatgccgaccgggtaaccggttccccagtgtgtgtagtgcgatcttccaggtcctcctggttggcgttgtccagaaactgcttcaggtaagtggggtgtgcccaatccctacaaaggttgattctttcaccaccttaggaatgctccggaggtaccccagcaacagctgggatctgaccggaggctaattgtctacgggtggtgtttcctttttcttttcacacaactctactgctgacaactcactgactatccacttgctctcttgtgcctttctgctctggttcaagttccttgattgtttttgactgcttttcactgcttttcttctcacaatccttgctcagttcaaagtc

SEQ ID NO: 821 - DNA, 683 bp, Foot-and-mouth disease virus
  source 1..683: mol_type = genomic DNA
cccccccataaagaacgttaccgtcttttccgacgttaaagggatgcaaccaaacgcctcttaccgtcctttccgacgttaaaggattgcaaccatacgacttgccttcttttccgaagtaaaaggatacaagcatacagttttgcccgttttcatgagaaatgggacgtccgcgcacgaaacgcgccgttgctctttgcattcttgtacaaacacgatcttgacgcaggaatcctagaccaacccaacccgtgcaactgcgagtttcgcccggtctttccgggtcttgagagacaaacagatgtactgagaccaactccacgattggtctactagcgggtactagtaacactcattttgcttcgtagcggagcacatgagcggtggggactcccccatggtaacatggacccaccgggccaaaagccacgcctcacggcctcatgtgtgtgcaaccccagcacggcaacttgtttgtgaaccacaccttaaggtaacactgagactggtacttggtttctggagacaggctaaggatgcccttcaggtaccccgaggtaacacgagacactcgggatctgagaaggggaccgggagttctatcaaactgcccgatttaaaaagcttctatgcctgaataggtgaccggaggccggcaccttttctttattttaaaccacttt

SEQ ID NO: 822 - DNA, 685 bp, Hepatovirus A
  source 1..685: mol_type = genomic DNA
cttttggagttctttggtctggggaactaaaataccagacccgcgtttgcctagcgatataggctttaattgttgtttgtcattgtgcgtttgatatgtgttttaatgtaaataataattctagcaggttctagttcttgatcatgtcctctttaaggcactcatttcaacttgctatctttcttttcttccttggttctccctacaccaaatgcactggccgctgcgcccggcggggtcaaccacatgattagcatgtggctgtaggtgttgaaggctgggacatgaacatcaatggaatagtgcgcatgcttactggggtccattgaagtagtgggatctttctattggggtaggctacgggtgaaaccccttaggttaatactcatattgagagataccttggataggttaactgtgctggatatggttgagtttaacgacaaaaagccatcaacagctgtggacagaacctcatccttagattgctcactatggatatgtgctctgggcgtgtttcttgcatgatggccattggtcaattcatgcctgggccaatgtaggattagccttaaattactttttaaaagtagcctcatttagctggactaatggtggggcgtatgatcctgcatttggcctctggggtaatcaggggcatttaggtttccacataatagcaaat

SEQ ID NO: 823 - DNA, 686 bp, Enterovirus C
  source 1..686: mol_type = genomic DNA
caccccagaggcccacgtggcggccagtactctggtatcacggtacctttgtacgcctgttttatatcccttccccatgtaactttagaagcaattcacatagttcaatagagggggtacaaaccagtgccaccacgaacaagcacttctgtttccccggtgaagctgtatagactgtccccacggtcaaaaacggcagatccgttatccgctcatgtacttcgagaagcctagtagcatcttggaatcttcgatgcgttgcgttcagcactctaccccgagtgtagcttaggtcgatgagtctgggcataccccaccggcgacggtggcccaggctgcgttggcggcctacccatggctaacgccatgggacgctagttgtgaacaaggtgtgaagagcctattgagctacatgagagtcctccggcccctgaatgcggctaatcctaaccacggagcaagtactcacaacccagtgagcagcttgtcgtaacgcgtaagtctgtggcggaaccgactactttgggtgtccgtgtttccttttatttttgatatggctgcttatggtgacaatcaaagattgttatcatatagcttttggattggccatccggtgatttttgagactataacgtttacttgccttaccacacaacttagtactttgctacattcacacagtcata

SEQ ID NO: 824 - DNA, 687 bp, Enterovirus B
  source 1..687: mol_type = genomic DNA
tggtatcacggtacctttgtgcgcctgttttatctacccctccccaatgtaatttagaagcatatgaaaagcggtcaatagccggctcagtatgccaactgagtcttgaccaagcacttctgttaccccggactgagtatcaataagctgctcgcgcggctgaaggagaaaacgttcgttacccggccaattacttcgagaaacccagtaccaccatggaggttgcgcggcgtttcgctccacacaaccccagtgtagatcaggtcgatgagtcaccgcgttccccacgggcgaccgtggcggtggctgcgttggcggcctgcccatgggttagcccatgggacgcttcaatactgacatggtgcgaagagtctattgagctaattggtagccctccggcccctgaatgcggctaatcctaactgcggagcagacgcctacatgccagtgggtagtctgtcgtaacgggcaactctgcagcggaaccgactactttgggtgtccgtgtttccttttatctttgtattggctgcttatggtgacaattgaaagattgttaccatatagctattggattggccatccagtgacaaacagagcgattgtttactcatttataggttttgtaccacttgactacaaggccctaatcactctcaattatatattgatactaaatacgacaaa

SEQ ID NO: 825 - DNA, 687 bp, unidentified
  source 1..687: mol_type = unassigned DNA; note = unclassified Enterovirus sequence
tggtatcacggtacctttgtgcgcctgttttatttaccctctccccagtgtaacttagaagcacgcttcatgcggtcaataggcggctcagtataccaactgagtctcgaccaagcacttctgttaccccggaccgagtatcaataagctactcacgtggctgaaggagaaaacgtccgttacccggccaactacttcgagaaacctagtaccaccatgaatgttgcgcggcgtttcgctccgcacaaccccagtgtagatcaggtcgatgagtcaccgcatccctcacgggcaaccgtggcggtggctgcgctggcggcctgcctatggggcaacccataggacgcttcaatacggacatggtgagaagagtctattgagctagttggtagtcctccggcccctgaatgcggctaatcctaactgcagagcagattcccacacgccagtgggtagtctgtcgtaacgggcaactctgcagcggaaccgactactttgggtgtccgtgtttccttttattcttgtactggctgcttatggtgacaattgaaagattgttaccatatagctattggattagccacccagtgtctaatagagcaattatttatctttttgttggatttatcccacttgactataaagcacttgtaacgctcaagtatattatagatctcaacacaacaa

SEQ ID NO: 826 - DNA, 689 bp, Enterovirus C
  source 1..689: mol_type = genomic DNA
ttcccactccagaggcccacgtggcggctagtactctggtattgcggtacctttgtacgcctgttttataccccctccccaagtaactttagaagcaattcacaaagttcaatagagggggtacaaaccagtaccaccacgaacaagcacttctgtttccccggtgaagctacatagactgtccccacggtcgaaggtggcagatccgttatccgctcaagtacttcgagaagcctagtaccaccttggaatcttcgatgcgttgcgctcagcactctaccccgagtgtagcttaggtcgatgagtctgggcatgccccaccggtgacggtggcccaggctgcgttggcggcctacccgtggctaacgccatgggacgctagttgtgaacaaggtgtgaagagcctattgagctacttgagagtcctccggcccctgaatgcggctaatcctaaccacggagcaagtgctcacaaaccagtgagtggcttgtcgtaacgcgtaagtctgtggcggaaccgactactttgggtgtccgtgtttccttttattttcattatggctgcttatggtgacaatctaagattgttatcatatagcttttggattggccatccggtgatttgaaagagatatatttaccttattgttctaccatatctaattactcatcacagccacataatcaca

SEQ ID NO: 827 - DNA, 689 bp, unidentified
  source 1..689: mol_type = unassigned DNA; note = unclassified Enterovirus sequence
gacagttgggtagcattgtgcgcctgttttatacaccctttcccacaatgcaacttagaattataactaaaccggccaatagaaagctcggcaaaccagccgagttctggtcaagcacttctgttgccccggactgagtatcaataagctgctcgcgcggctgaaggagaaaacgttcgttacccgaccaactacttcgagaaacccagtatcaccatgaaagctgcgtagcgtttcgttccgcacaaccccagtgtagatcaggccgatgagtcaccgcaatccccacgggcgaccgtggcggtggctgcgctggcggcctgcccatggggcgacccatgggacgcttcaataccgacatggtgtgaagagtctattgagctagttggtagtcctccggcccctgaatgcggctaatcccaactgcggagcagacgcttgcataccagcaagtagtctgtcgtaacgggcaactctgcagcggaaccgactactttgggtgtccgtgtttccttttattttttatactggctgcttatggtgacaattgaaagattgttgccatatagctattggattggccatccggtgacgaacagagctatcatatactcttttgttgggtttgtcccattgaactacaaggcattgaataccctcaatttcattctagcactaaatacaataaa

SEQ ID NO: 828 - DNA, 691 bp, unidentified
  source 1..691: mol_type = unassigned DNA; note = unclassified Cosavirus sequence
tggaatactgcaaagatgtcaccgtgctatacacggtctttgaaccacacaccggctacttggcacttgcagcgcagtaagtttattttccacttatccttgatttttagccgtacagtttctctctgcatgggcggcgtgatactcccgttccttcttggacagattgcctccgcgttctctgtggatctcaaggtggtcaagtcactggtgagtagagcgaaggttaaggagatctgaggcattcccacgtggcgttgccgggagttgtagcaatgctgcgtgtgtgtacggatctcgcctcatggcgtcatgagcctcacacgccaaaagctctgtccgagaggacctacacagtcgagcaaccctagctccttcctacaaagccttgtgtgaatgagctcacgtttactcaactttattctctactcacatcaggcgccaaagatgtcttgaaggtacctcgtgtatctgggcacgagcaccatcgactacccggacttgcacttcggtgcagacacatgtggtgtcccagcccccttgctccggcaagggggctctgctcgctcagcacgagatctgatcaggagtctcccccggtgtaaagcaccttgacagggatttaaaaattgaccaaggccttgcacacaacctaggggactaggttttcctttttatttacaaggttttc

SEQ ID NO: 829 - DNA, 693 bp, Enterovirus A
  source 1..693: mol_type = genomic DNA
gttgtacccactcacagggcccactgggcgttagcactctggtaccccggtacctttgtgcgcctgttttatatccccccaagtaatgcacctcgatcaatagcgggcgtggcgcaccagccacgtcatgatcaagcacttctgtttccccggaccgagtatcaatagactgctaacgcggttgagggagaaaacgtccgttacccggccaactgcttcgagaaatccagtaacatcatgaaaattgcagagtgtttcgctcagcacttccccagtgtagatcaggtcgatgagtcaccgcgttccccacgggcgaccgtggcggtggctgcgttggcggcctgcctgtggggcaacccgcaggacgctctaatatggacatggtgtgaagaatctattgagccagttggtagtcctccggcccctgaatgcggctaatcctaactgcggagcacgcgccttcaatccagtgggtagcgtgtcgtaatgggtaactctgcagcggaaccgactactttgggtgtccgtgtttccatttattcttacattggctgcttatggtgacccatatagctattggattggccatccggtatcgaatagagcgattatctatcagtttgttggatttattccgttgagtgtgcagcagtatcgcactttgcttttaatagtgagactgaatagtgcaaa

SEQ ID NO: 830 - DNA, 693 bp, Enterovirus A
  source 1..693: mol_type = genomic DNA
ctgattctgcggaatctttgtgcgcctgttttatactccctcccccaacacagtaacttagaagtcataaactcacatgaccaatagtgggcatgacgcaccagtcatgtctcggtcaagcacttctgtctccccggactgagtatcaataagctacttgcgtggctgaaggagaaaacgttcgttatccggctaactacttcgagaagcttagtagcaccatgaaagttgcggagtgtttcgctcagcacttcccccgtgtagatcaggtcgatgagtcactgcgttcctcacgggagaccgtggcagtggctgcgttggcggcctgcctatggggcaacccataggacgctctaatatggacatggtgtgaagagcctattgagctagttagtggtcctccggcccctgaatgcggctaatcctaactgcggagcacataccctcaacccagggggcagtgtgtcgtaacgggcaactctgcagcggaaccgactactttgggagtccgtgtttccttttattcttatattggctgcttatggtgacaattgagagattgttaccatatagctactggattggccacccggtgtctaatagagccctggtttaccaatttattggatttgtgcctttatcacccacagtttattcaaccttagtatttttgatatatcttaacaataggcg

SEQ ID NO: 831 - DNA, 693 bp, Enterovirus C
  source 1..693: mol_type = genomic DNA
tacgttatcgcggtacccttgtacgcctgttttatactcccttcacccgtaacttagaagcaagcaaaccaagttcaatagaagggggtacaaaccagtaccaccacgaacaagcacttctgtttccccggtgaggttgcatagactgtacccacggtcaaaagcgattgatccgttatccgctctagtacttcgagaagcctagtatcaccttgggatcttcgatgcgttgcgctctgcactcgaccccggagtgtagcttaggtcgatgagtctggacacccctcaccggtgacggtggtccaggctgcgttggcggcctacctgtggcccaaagccacaggacgctagttgtgaacaaggtgtgaagagcctattgagctaccagagagtcctccggcccctgaatgcggctaatcccaaccacggagcaagtgctctcaaaccagagagtggcttgtcgtaacgcgcaagtctgtggcggaaccgactactttgggtgaccgtgtttccttttatttttatcatggctgcttatggtgacaatctcagattgttatcataaagcaaattggattagccatccggtgaaagtcaaatcgattatttacttatttattggtttttctccactaacaccacaaacacttaaaattattgaaatagtgctgctaattagataccactatcata

SEQ ID NO: 832 - DNA, 694 bp, unidentified
  source 1..694: mol_type = unassigned DNA; note = unclassified Enterovirus sequence
cgtcgaccggggagacagaagtgcttgaccttatacagctggtatgctgcttgctattggtctgtgtgcaaaacttctaagttaaaattgggtctgggttgctcccacccagatcacccacgtggtgttgtgctctgttattccggtaactttgcacgccaattttataaccccttcccccatgtaacttagaagttttgcacacagaccaatagcaagcagcataccagctgtataaggtcaagcacttctgtctccccggtcgacgttgatatgcttcaacaaggcaaaaacaacagagatcgttatccgcaagatgcctacacaaagcctagtacctcctttgacggtgtttgtctggtcgctcaggtgcttccccagcactagacctggcagatgaggctagaaactccccactggcgacagtgttctagcctgcgtggctgcctgcacacccttctgggtgtgaagccaaatactagacaaggtgtgaagagccccgtgtgctcatcttgagtcctccggcccctgaatgcggctaaccttaaacccgcagccattgctcacaatccagtgggtagatggtcgtaatgagcaattgtgggatgggaccgactactttgggtgtccgtgtttcatgttttactttatgatttgcttatggtgacaatatatagtgatatatattggcatc

SEQ ID NO: 833 - DNA, 694 bp, Enterovirus C
  source 1..694: mol_type = genomic DNA
tccggtattacggtacccttgtacgcctgttttatactcccctcccccgtaacttagaaaacttcaaaatcaaagttcaataggagggggtacaaaccagtaccaccacgaacaagcacttctgtttccccggtgatgttgtatagactgtctccacggttgaaaacgactgatccgttatccgctctagtacttcgagaagcccagtaccaccttggaatcttcgatgcgttgcgctcagcactcaatcccagagtgtagcttaggttgatgagtctggacatccctcaccggcgacggtggtccaggctgcgttggcggcctacctgtggcccaaagccacaggacgctagttgtgaacaaggtgcgaagagcctattgagctactagagattcctccggcccctgaatgcggctaatcccaaccacggagcaggtactcacaacccagtgagcagcctgtcgtaacgcgcaagtctgtggcggaaccgactactttgggtgtccgtgtttccttttatttttatatggctgcttatggtgacaatcattgattgttatcataaagcgaattggattggccatccggtgaaagttagacttatcatttacttgtttgttggattcactcctttgactaaattcacccctgacatcatcttagttgtgatactgattaggagacttcatcata

SEQ ID NO: 834 - DNA, 695 bp, Enterovirus A
  source 1..695: mol_type = genomic DNA
tctgattctgcggaatccttgtgcgcctgttttatatcccctttcccaatttgaaacatagaagtgatgcgcaccattgatcaatagtaggcgtaacgcgccagttacgtctcgatcaagcacatctgtttccccggaccgagtatcaatagactgctcacgcggttgaaggagaaagcgttcgttacccggctaactacttcgagaaacccagtagcaccatggaagctgcagggtgtttcgctcagcacttcccccgtgtagatcaggtcgatgagccactgcaatccccacgggcgaccgtggcagtggctgcgttggcggcctgcctatggggagacccataggacgctctaatgtggacatggtgcgaagagtctattgagctagttagtagtcctccggcccctgaatgcggctaatcctaactgcggagcacatgccttcaacccagaaggtggtgtgtcgtaacgggcaactctgcagcggaaccgactactttgggtgtccgtgtttcctttcattcttatatcggctgcttatggtgacaattacggaattgttaccatatagctattggattggccatccggtgtgtaatagagctattatatatctgtttgttggctttgtgccattaactttaaagtctacaactactcttgattttatattgaccctcaacacagttaaac

SEQ ID NO: 835 - DNA, 696 bp, Cardiovirus A
  source 1..696: mol_type = genomic DNA
ttgccagtctgctcgatatcgcaggctgggtccgtgactacccactccccctttcaacgtgaaggctacgatagtgccagggcgggtactgccgtaagtgccaccccaaacaacaacaacaaaacaaactccccctccccccccttactatactggccgaagccacttggaataaggccggtgtgcgtttgtctacatgctattttctaccgcattaccgtcttatggtaatgtgagggtccagaacctgaccctgtcttcttgacgaacactcctaggggtctttcccctctcgacaaaggagtgtaaggtctgttgaatgtcgtgaaggaagcagttcctctggaagcttcttaaagacaaacaacgtctgtagcgaccctttgcaggcagcggaaccccccacctggtgacaggtgcctctgcggccaaaagccacgtgtataagatacacctgcaaaggcggcacaaccccagtgccacgttgtgagttggatagttgtggaaagagtcaaatggctctcctcaagcgtattcaacaaggggctgaaggatgcccagaaggtaccccattgtatgggatctgatctggggcctcggtgcacgtgctttacacgtgttgagtcgaggtgaaaaaacgtctaggccccccgaaccacggggacgtggttttcctttgaaaaccacgattacaat

SEQ ID NO: 836 - DNA, 697 bp, Enterovirus B
  source 1..697: mol_type = genomic DNA
ctagcactccggtattgcggtacccttgtgcgcctgttttatcctccctccccctaacgtaatttagaagcaagactttaacggtcattaggtggctcagcacaccagccgagtcaagaccaagcacttctgttaccccggactgagtatcaataagctgctcacgtggctgaaagagaaaacgttcgttacccggccaattacttcgagaaacctagtaccaccatggaggttgcgcagcgtttcgctccgcactaccccagtgtagatcaggtcgatgagtcaccgcattccccacgggcgaccgtggcggtggctgcgttggcggcctgcccatggggaaacctatgggacgcttcaatactgacatggtgtgaagagtctattgagctaattggtaatcctccggcccctgaatgcggctaatcctaactgcggagcagacacccacaagccagtgagcagtctgtcgtaacgggcaactctgcagcggaaccgactactttgggtgtccgtgtttccttttattccattactggctgcttatggtgacaattgagagattgttaccatatagctattggattggccatccggtgagcaacagagcacttatatatctctttgttggattcataccactagacaccaggagttttacgtctttggtttatattttaaggttgaacacagcaaa

SEQ ID NO: 837 - DNA, 697 bp, unidentified
  source 1..697: mol_type = unassigned DNA; note = unclassified Enterovirus sequence
aacagaagtgcttgaccattgacaatttggttaattgccgcctattggtcgttatgtactttcttctaagttacaaggggggggtgttaaaactggatctgggttgttcccactcaggtctcccacgtggagttgtactctattattccggtaatcttgtacgccagtttttacacccccccccttgtaacttagaagaaagtacataacgaccaataggcggcaattaaccaaattgtcaatggtcaagcacttctgtttccccggtcaagattgatacgctccaacagggcgaaaacaatcgagatcgttatccgcaaagtgcctacgcaaagcttagtaacattttggaaagtttatggttggtcgctcagctaaaccccatagtagacctggcagatgaggctagagactccccactggcgacagtgttctagcctgcgtggctgcctgcacaccctcacgggtgtgaagccatatactcgacaaggtgcgaagagccccgtgtgctcactttgagtcctccggcccctgaatgtggctaaccttaaccccgcagctagcgcatgcaaaccagtatgtagctagtcgtaatgagcaattgtgggatgggaccaactactttgggtgtccgtgtttcactttttaccttttatttgcttatggtgacaatatatatatagtatatattgacacc

SEQ ID NO: 838 - DNA, 697 bp, unidentified
  source 1..697: mol_type = unassigned DNA; note = unclassified Enterovirus sequence
ggcaccttgcggataacgatcgctgttgtttttgccctgttggagcatatcaacattgaccggggaaacagaagtgcttgacctattaaaactggatctgggttgttcccacccagatcatccacgtgatgttgtgctctattattccggtaattttgcacgccagtttttcatccctttccctttgtaacttagaagattgaacaaatgaccaataggacgcaacaaaccagttgtaataggtcaagcacttctgtttccccggtcaatgttgatatgctccaacagggcaaaaacaacagcgatcgttatccgcaaggtgcctacgcaaagcctagtagcactcttgaaattgcttggttggtcgctcaggtgcaaacccagcactagacctggcagatgaggctagaaaatccccactggtgacagtgttctagcctgcgtggctgcctgcacacccatttgggtgtgaagccaaacaatggacagggtgtgaagagccccgtgtgctcatcttgattcctccggcccctgaatgcggctaaccttaaacctgcagccattactcacaatccagtgagttggtggtcgtaatgagtaattgcgggatgggaccgactactttgggtgtccgtgtttcactttttaccttattttatgcttatggtgacaatatattgtaatatatattgacacc

SEQ ID NO: 839 - DNA, 698 bp, Enterovirus A
  source 1..698: mol_type = genomic DNA
ttaaaacagcctgtgggttgttcccacccacagggcccactgggcgctagtactctggtattacggtacctttgtacgcctgttttacaacccttcccccatgtaacttagaagcaacaaataaacgaccaatagcacactcaccaatccagatgagtgatggtcaagcacttctgttaccccgggcttagtaccaatagactgccatcgcggttgaaggggaaaacgctcgttatccggctctctactgcgagaagcctagtaacgccttagaaatgctcaagcgttgcgctcagcacaaccccagtgtagctcaggtcgatgagtcactgcattccccacgggcgaccgtggcagtggctgcgtttgcggcctgcctacagctctacgctgtaggacgcttgtgtatggacatggtgtgaagagcccattgcgctagggagtagtcctccggcccctgaatgcggctaatcctaaccccggagctggtgcttgtaaaccaacaagtggccagtcgtaatgggcaactctgggatggaaccgactactttgggtgtccgtgtttcctgttttatttaccttggctgcttatggtgacaatctagtgttgttgccatatagcgattggattggccatccggatattgttttagacacttgtgtttgtgagtagatctcttctgacataggatataaca

SEQ ID NO: 840 - DNA, 698 bp, Enterovirus D
  source 1..698: mol_type = genomic DNA
ttaaaacagccttggggttgttcccactccaagggcccatgtggcggctagtactctggtacttcggtacctttgtacgcctgttttatctcccttcccaatgtaatttagaagctcttaaatcaaggctcaataggcggggcgcaacccagcgctctcatgagcaagcacttctgtctccccggtgtggttgtataaactgttcccacggttgaaaacaacctatccgttatccgctatagtacttcgagaaacctagtatcacctttggattgttgacgcgttgcgctcagcacactaacccgtgtgtagcttgggtcgatgagtctggacataccccactggcgacagtggtccaggctgcgttggcggcctactcatggtgaaaaccatgagacgctaaacatgaacaaggtgtgaagagtctattgagctactatagagtcctccggcccctgaatgcggctaatcctaaccatggagcaagcgctcacaagccagtgagttgcttgtcgtaatgcgcaagtccgtggcggaaccgactactttgggtgtccgtgtttcactttttacttttatgactgcttatggtgacaatttgatattgttaccatttagcttgtcaaattaattacaaaaggttctaaatcttacttaccaacctgcattttgataaccttgatttgaaaattttaata

SEQ ID NO: 841 - DNA, 699 bp, Enterovirus J
  source 1..699: mol_type = genomic DNA
ttaaaatagcctcagggttgttcccaccctgagggcccacgtggcgtagtactctggtatcaaggtacctttgtacgcctattttatttcccttcccccacagtaacttagaagcttatctcatagttcaacagtagggtcactaaccaagtggctcagcgaacaagcacttctgtttccccggtcctagtacctgtgaagctgtacccacggcggaaggggaaaaagatcgttatccggccccctacttcggaaagcctagtaacaccattgaagcaatcgagtgttgcgctcagcacagtaacccctgtgtagctttggttgatgagtctgggcactccccactggcgacagcggcccaggctgcgttggcggccaaccgactcgggcaaccgggtcggacgctcgtttgtggacatggtgtgaagagcctactgagctagagggtagtcctccggcccctgaatgcggataatcctaaccccggagcacccacactcaatccagagtgcaggatgtcgtaacgcgtaagtctgggacggaaccgactactttgggtgtccgtgtttcctgttttacttactttggctgcttatggtgacaatctagtgttgttaccatatagctattggattggccatccggtgttttgaattgtgtgtttatactaattcttttacatatcacagacaaccaaat

SEQ ID NO: 842 - DNA, 699 bp, unidentified
  source 1..699: mol_type = unassigned DNA; note = unclassified Enterovirus sequence
tagtactccggtatcgcggtacccttgtacgcctgttttatactcccttcccccgtaacttagaagcaatcaaaccaagttcaatagaagggggtacaaaccagtaccaccacgaacaagcacttctgtttccccggtgaggttgcatagactgtacccacggttgaaagcgactaatccgttatccgctcaagtacttcgggaagcctagtaccaccttcggatcttcgatgcgttgcgctcagcactcaaccccagagtgtagcttaggctgatgagtctggacattcctcactggcgacagtggtccaggctgcgttggcggcctacctgtggcccaaagccacaggacgctagttgtgaacaaggtgtgaagagcctactgagctacttgagattcctccggcccctgaatgcggctaatcccaaccacggagcaggtggtcataaaccaatggctggcctgtcgtaatgcgcaagtctgtggcggaaccgactactttgggtgtccgtgtttccttttatcttttcattggctgcttatggtgacaatcatagattgttatcataaagcaaattggattggccatccggtgaaaatcagagcgattatatatttgtttactggatttacatcactgacaccatactctccaatactcattaggttggttttattaataaggtattattaccata

SEQ ID NO: 843 - DNA, 700 bp, Enterovirus A
  source 1..700: mol_type = genomic DNA
ttaaaacagcctgtgggttgtacccacccgcagggcccactgggcgctagtacactgatatcacggtacctttgtacgcctgttttatctccctacccccatcgtaacttagaagcttaacaatacagatcaatagcctctgcaccaaaccaggtgtggaatgatcaagcatttctgttaccccggacctagtaccaataggctgtgtcaaacggctgaaggggaaaaagttcgttacccggccacctacttcgagaagcctagtagcatcactgaagctgtgaagcgttacgatcagcacaaccccagtgtagttcaggtcgatgagtcactgcattccccacaggcgactgtagcagtggctgcgttggcggcctgcccttggtctctgaccaagggacgctttggagtggatatggtgcgaagagcctattgagctaggtggtagtcctccggcccctgaatgcggctaatcctaaccccggagctggtgcacacaaaccagtgtgtggccagtcgtaatgagcaattctgggatggaaccgactactttgggtgtccgtgtttcctgtttcacttaccttggctgcttatggtgacaattgtatagttgtcatcatatagctattggattggccatccggatattattcttgtgtttatttgtgtaatttgatataatttagaaccctgtataaga

SEQ ID NO: 844 - DNA, 702 bp, Enterovirus A
  source 1..702: mol_type = genomic DNA
gcgttagcacactgattctacggaatctttgtgcgcctgttttataaccccttccccaagcagcaacttagaagcttcgcgccaccacgaccagtagtgggcgtgacacaccagtcacgttttggtcaagcacttctgtttccccggactgagtatcaatagactgctcacgcggttgaaggagaaaacgttcgttatccggccaactacttcgagaaacctagtagcatcgtggaagttgcggagtgtttcgctcagcacttcccccgtgtagatcaggtcgatgagtcactgtaaaccccacgggcgaccgtgacagtggctgcgttggcggcctgcccatggggcaacccatgggacgctctaatacagacacggtgtgaagagtctattgagctagttggtagtcctccggcccctgaatgcggctaatcctaactgcggagcgcgcaccctcaacccagggggcagtgcgtcgtaacgggtaactctgcagcggaaccgactactttgggtgtccgtgtttccttttattctctattggctgcttatggtgacaattgaaaagttgttaccatatagctattggattagccatccggtgaccaacagagctattatttacctgtttgttgggtatatccctctcactctcaaggccattcaaactcttaactatatattactccttaactgtaagag

SEQ ID NO: 845 - DNA, 704 bp, Cardiovirus A
  source 1..704: mol_type = genomic DNA
tgtgctcttccgatctgggagatccagattgccagtctgctcgatatcgcaggctgggtctgtgactacccactccctctttcaacgtgaaggctacgatagtgccagggcgggtactgccgaaagtgccaccccaaagtacacaaccccccccgtacattactggccgaagccgcttggaataaggccggtgtgtgtctgtctacatgttatttctactacattgtcgtctatggcaatgtaagggcccggaacctggccctgtcttcttgacgaatattcctaggggtctttcccctctcgacaaaggaatataaggtctgttgaatgtcgtgaaggaagcagttcctctggaggcttcttgaagacaaacagtgtctgtagcgaccctttgcaggcagcggaaacccccacctggtaacaggtgcctctgcggccaaaagccacgtgtataagatacacctgcaaaggcggcacaaccccagtgccacactgtgcgttggatagttgcggaaagagccaaatggctctccttaagcgtattcaacaaggggctgaaggatgcccagaaggtaccccactagttgggatctgatctggggcctcggtgcacgtgctctacacgtgttgagtcgaggttaaaaaacgtctaggccccccgaaccacggggacgtggttttcctttgaaaaccacgatgacaat

SEQ ID NO: 846 - DNA, 704 bp, Enterovirus C
  source 1..704: mol_type = genomic DNA
tagtactccggtatcacggtacccttgtacgcctgttttaaactcccttccctcgtaacttagaagcaaacaaaccaagttcaatagaaaggggtacaaaccagtaccaccacgaacaagcacttctgttgccccggtgatgtcgtatagattgtacccacggtcgaaaacgattgatccgttatccgcttttgtacttcgagaagcctagtaccaccttggaatcttcgatgcgttgcgctcggcactcaatcccagagtgtagcttaggtcgatgagtctggacataccccaccggtgacggtggtccaggctgcgttggcggcctacctgtggcccaaagccacaggacgctagttgtgaacaaggtgtgaagagcatattgagctacaaaagagtcctccggcccctgaatgcggctaatcctaaccacggagcaagggtgcacaaaccagtgtataccttgtcgtaacgcgtaagtctgtggcggaaccgactactttgggtgtccgtgtttcctgttattttttatcatggctgcttatggtgacaatcagagattgttatcataaagcaaattggattggccatccggtgagtgttgtgtcaagtatacaactgtttgttggaaccactgtgttagcttcacttctcatttaaccaattaatcaaaaacaatacgaggataaaacaataatactaca

SEQ ID NO: 847 - DNA, 704 bp, Enterovirus B
  source 1..704: mol_type = genomic DNA
atgggcgctagcacactggtatcccggtacctttgtgcgcctgttttatctacccctccccaaacgtaacttagaagcacatcacacatggtcaacaggtggcacagtacaccaactgggccgtgaccaagcacttctgttaccccggaccgagtatcaatagactgctcgcgcggttgaaggagaaaacgttcgttacccggccaattacttcgagaaacccagtaccaccgtgaaggttgcgcagcgtttcgctccgcacaaccccagtgtagatcaggtcgatgagccaccgcattccccacgggtgaccgtggcggtggctgcgttggcggcctgcccatggggcaacccatgggacgcttcaatactgacacggtgcgaagagtctattgagctaattggtattcctccggcccctgaatgcggctaatcctaactgcggagcagatacccacaagccagtgggcagtctgtcgtaacgggtaactctgcagcggaaccgactactttgggtgaccgtgtttccttttattcttatattggctgcttatggtgacaattgaaagattgttgccatatagctattggattggccacccagtgacaaacagagctattgtttacctatttgttggctttataccactgaatcttaaagttttagaaactctcaacctgatcttattactcaattcggtaaa

SEQ ID NO: 848 - DNA, 705 bp, Enterovirus B
  source 1..705: mol_type = genomic DNA
cacggggcgcaagcacactggtattacggtacctttgtgcgcctgttttacccacccttccccaatgaaatttagaagcttgacttaaacggtcagtagacaacccagtatgccaactgggtcccgaccaagcacttctgtctccccggactgagtatcaataggctgcttgcgcggctgaaggagaaaacgttcgttacccgaccaactacttcgagaaacctagtaccaccatgaacgttgcgcagcgtttcgctccacacaaccccggtgtagatcaggtcgatgagtcaccgcaatccccacgggcgaccgtggcggtggctgcgctggcggcctgcccatggggcaacccatgggacgcttcaacactgacatggtgcgaagagtctattgagctagttggtagtcctccggcccctgaatgcggctaatcctaactgcggggcagatacccacataccagtgggcagtctgtcgtaacgggcaactctgcagcggaaccgactactttgggtgtccgtgtttccttttatccttatattggctgcttatggtgacaattgaaagattgttaccatatagctattggattggccatccagtgagcaacagagcgatcatactcctctttgttgggtttataccacttgactacagcagttacaacaccttgttgtacatcgtttatttgaatacgagaaa

SEQ ID NO: 849 - DNA, 707 bp, unidentified
  source 1..707: mol_type = unassigned DNA; note = unclassified Enterovirus sequence
aggctagtacaccgggtaccgtgataccggtgtactagcctgttttatactcccttcccccgtaacttagaagtaaataacacaagttcaatagaagggggtacaaaccagtaccaccacgaacaagcacttctgttcccccggtgaggtcacatagactgtctccacggttgaaagtgactgatccgttatccgctcttgtacttcgggaagcctagtagcatcttcggatcttcgatgcgttgcgctcagcactcaatcccagagtgtagcttaggtcgatgagtctggacatccctcactggcgacagtggtccaggctgcgttggcggcctacctgtggcccaaagccacaggacgctagttgtgaacaaggtgtgaagagcctactgagctacttgagagtcctccggcccctgaatgcggctaatcccaaccacggagcaaatgactgcaatccagcagttagtttgtcgtaatgcgtaagtctgtggcggaaccgactactttgggtgtccgtgtttccttttatattttatattggctgcttatggtgacaatcactgattgttatcataaagcgacttggattggccatccggtgaaaataagagttattatctacttatttgttggatttactccactatcaacctacacaccagagctcatacgcattgttatagtactaagaaatatacatcaca

SEQ ID NO: 850 - DNA, 707 bp, Enterovirus C
  source 1..707: mol_type = genomic DNA
taaaacagctctggggttgttcccaccccagaggccacgtggcggccagtactctggtatcaaggtacctttgtacgcctgttttatatcccctcccccaagtaactttagaagcaattcaaacagttcaatagagggggtacaaaccagtaccaccacgaacaagcacttctgtttccccggtgaggctgtatagactgttcccacggttgaaaatggctgatccgttatccgctcatgtacttcgagaagcctagtatctccttggaatcttcgatgcgttgcgctcagcactctaccccgagtgtagcttaggctgatgagtctgggcataccccaccggtgacggtggcccaggctgcgttggcggcctacccatggctaacgccatgggacgctagttgtgaacaaggtgtgaagagcctattgagctacttgagagtcctccggcccctgaatgcggctaatcccaaccacggagcaagtgcctgcataccagcaggtagcttgtcgtaacgcgcaagtctgtggcggaaccgactactttgggtgtccgtgtttccttttattcttatcatggctgcttatggtgacaatctaagattgttatcatatagcttttggattggccatccggtgattgtttgatatttgaacacttgtttaccttatcttattacacaccaatttacatacctaacttcatt

SEQ ID NO: 851 - DNA, 708 bp, Enterovirus B
  source 1..708: mol_type = genomic DNA
cccactgggcgctagcacactggtattacggtacctttgtgcgcctgttttatctaccctccccccaacgcaacttagaagcataacttaaatggtcaacagataactcagtatgccaactgagccctgaccaagcacttctgttatcccggactgagtaccaataggctgctcacgcggccgaaggggaaaccgttcgttacccggccaattacttcgagaaacctagtaccaccatgaaagttgcgcagtgtttcgctccgcacaaccccagtgtagatcaggtcgatgagtcaccgcaaaccccacgggcgaccgtggcggtggctgcgttggcggcctgcccatggggcaacccatgggacgcttcaatactgacatggtgcgaagagtctattgagctaattggtagtcctccggcccctgaatgcggctaatcccaactgcggagcagatacccacacaccagcgggcagtctgtcgtaatgggcaactctgcagcggaaccgactactttgggtgtccgtgtttccttttattctcatactggctgcttatggtgacaattgagagattgttaccatatagctattggattggccatccggttacaaacagagcaattatttacttatttgttggttttgtaccactgaactacagagtcctgaaaaccctcaatctcattataacactcaatacgttaaa

SEQ ID NO: 852 - DNA, 708 bp, Enterovirus B
  source 1..708: mol_type = genomic DNA
gcccactgggcgttagcactctggtattaaggtacctttgtgcgcctgttttataatcccttcccaacttgcaacttagaagtaacacactatgaccaatagggggcgtggcaaaccagccatgccttggtcaagcacttctgtttccccggactgagtatcaataagctgtccacacggctgaaggagaaaacgtccgttacccggccagttacttcgagaaacctagtaccaccatgaaagttgcgtagcgtttcgctccgcacatccccagtgtagatcaggtcgatgagtcaccgcaatccccacgggcgaccgtggcggtggctgcgctggcggcctgcccatggggcaacccatgggacgctacaatactgacatggtgtgaagagtctattgagctaactggtagtcctccggcccctgaatgcggctaatcctaactgcggagcagatacccacacgccagtgggcagtctgtcgtaacgggcaactctgcagcggaaccgactactttgggtgtccgtgtttccttttattcatattttggctgcttatggtgacaattgagagattgttaccatatagctattggattggccatccggtgacaaacagagctatcatctatcttttcatcggcttcgtaccgctgaaccacaaagtatttaacaccctcaatttagtattggccttcaatatagcaaa

SEQ ID NO: 853 - DNA, 708 bp, unidentified
  source 1..708: mol_type = unassigned DNA; note = unclassified Enterovirus sequence
ccactgggcgttagcacactggtatcacggtacccttgtgcgcctgttttatatacccttccccgtagagtaacttagaagcttgactacgacggtcaataggaaacccagtgcaccaactggggcgcgaccaagcactcctgtaaccccggactgagtatcaataagctgcttgcgtggctgaaggagaaaacgttcgttacccggccaattacttcgagaaacctagtaccaccatgaaagttgcgcagcgtttcgctccgcacaaccccagtgtagatcaggccgatgagtcaccgcattccccacgggcgaccgtggcggtggctgcgttggcggcctgcccatgggataacccatgggacgcttcaatactgacatggtgcgaagagtctattgagctaattggtagtcctccggcccctgaatgcggctaatcctaactgcggagcagacacccacaagccagtgggcagtctgtcgtaacgggtaactctgcagcggaaccgactactttgggtgtccgtgtttccttttatttctatactggctgcttatggtgacaattgaaaggttgttaccatatagctattggattggccatccggtgtctaacagagcaatcatttatttatttgttggattcgtacccctaaatcctaaagtctttaacactctcaacttcatattacgattaaatacagcaag

SEQ ID NO: 854 - DNA, 709 bp, Enterovirus B
  source 1..709: mol_type = genomic DNA
gggcccactgggcgctagcactctggtattacggtacctttgtgcgcctgttttacgctccttcccccaagtgcaacttagaagccaaacaccacgaccaatagtaggcaaggcgcaccagccgtgtctcggtcaagcacttctgtctccccggactgagtatcaataaactgctcacgtggttgaaggagaaaacgttcgttacccggctaattacttcgagaagcctagtaacaccatggaggttgcgaggcgtttcactcagcacgcccccggtgtagttcaggtcgatgagtcaccgcgttccccacaggcgactgtggcggtggctgcgttggcggcctgcccatggggcaacccatgggacgcttcaatgtcgacatggtgtgaagagcctattgagctagttagcagtcctccggcccctgaatgcggctaatcctaactgcggagcacgcgcccccaacccagagggtagcgtgtcgtaacgggtaactctgcagcggaaccgactactttgggtgtccgtgtttctttttatcttttattggctgcttatggtgacaattgagagattgttaccatatagctattggattggccatccggtgacgaacagagctataatttaccaatttgtaggatttattccattaagtttgaaagccttaaagacccttagtttaatactattgctcaatagtgtaaa

SEQ ID NO: 855 - DNA, 709 bp, Enterovirus B
  source 1..709: mol_type = genomic DNA
ggcccactgggcgccagcacactggtatcacggtacccttgtgcgcctgttttatttacccccccccaacgtaacttagaagcacaacctaatcggtcaatagataactcagtacaccaactgagtccagaccaagcacttctgttaccccggaccgagtatcaataagctgctcgcgcggctgaaggagaaaaggttcgttacccgaccaattacttcgagaaacccagtaccaccatggaagttgcgcagtgtttcgctccgcacaaccccagtgtagatcaggtcgatgagtcaccgcgttccccacgggcgaccgtggtggtggctgcgttggcggcctgcccatgaggtaacccatgggacgcttcaatactgacatggtgcgaagagtctattgagctaattggtagtcctccggcccctgaatgcggctaatcctaactgcggagcagatacctacacgccagtaggcagtctgtcgtaatgggcaactctgcagcggaaccgactactttgggtgtccgtgtttccttttattcttacattggctgcttatggtgacaattgagagattgttaccatatagctattggattggccatccagtgacaaacagagcgatcatctacttgtttgttggttttataccactaaattacaaagtcttaaacacactcaatttcattctgtcacttaatacattgag

SEQ ID NO: 856 - DNA, 710 bp, Cardiovirus A
  source 1..710: mol_type = genomic DNA
ttgaaagccgggggtgggagatccggattgccagtctgctcgatatcgcaggctgggtccgtgactacccactccccctttcaacgtgaaggctacgatagtgccagggcgggtactgccgtaagtgccaccccaaaataacaacagaccccccccctaacgttactggccgaagccgcttggaataaggccggtgtgcgtttgtctatatgttattttccaccatattgccgtcttttggcaatgtgagggcccggaaacctggccctgtcttcttgacgagcattcctaggggtctttcccctctcgccaaaggaatgcaaggtctgttgaatgtcgtgaaggaagcagttcctctggaagcttcttgaagacaaacaacgtctgtagcgaccctttgcaggcagcggaaccccccacctggcgacaggtgcctctgcggccaaaagccacgtgtataagatacacctgcaaaggcggcacaaccccagtgccacgttgtgagttggatagttgtggaaagagtcaaatggctctcctcaagcgtattcaacaaggggctgaaggatgcccagaaggtaccccattgtatgggatctgatctggggcctcggtgcacatgctttacatgtgtttagtcgaggttaaaaaacgtctaggccccccgaaccacggggacgtggttttcctttgaaaaacacgatgataat

SEQ ID NO: 857 - DNA, 710 bp, Enterovirus C
  source 1..710: mol_type = genomic DNA
ttaaaacagctctggggttgttcccaccccagaggcccacgtggcggctagtactctggtattgcggtacctttgtacgcctgttttatacccccttccccagtaactttagaagcaattcattcagttcaatagagggggtacaaaccagtaccaccacgaacaagcacttctgtttccccggtgaagccgtatagactgtacccacggttgaaaatggcagatccgttatccgctcatgtacttcgagaagcctagtatcatcttggaatcttcgatgcgttgcgctcagcactctaccccgagtgtagcttaggctgatgagtctgggcataccccaccggcgacggtggcccaggctgcgttggcggcctacccatggctaacgccatgggacgctagatgtgaacaaggtgtgaagagcctattgagctacttgagagtcctccggcccctgaatgcggctaatcctaaccacggagcaagcgcttacaaaccagtaagtagcttgtcgtaacgcgcaagtctgtggcggaaccgactactttgggtgtccgtgtttccctttatttttattgtggctgcttatggtgacaatctaagattgttatcatatagctattggattggccatccggtgatttgtcgagtttcaaacgcttgtttatttctccacaacacttgcctactcaatacatttacaaaccata

SEQ ID NO: 858 - DNA, 710 bp, Enterovirus D
  source 1..710: mol_type = genomic DNA
tttaaacgcttctaaggttgtttacattgggggaggggagataaaaaccgtatttctgggtcttcggtacctttgtacgcctgttttatctccctccccaatgtaacttagaagctttcaaatcaaagctcaataggtggagcgcaaaccagcgctttcgtgagcaagcactcctgtttccccggtgcggttgtatagactgttcccacggttgaaaacaacctatccgttatccgctatagtacttcgagaaacctagtatcacctttggattgttgatgcgttgcgctcaacacactaacccgtgtgtagcttgggtcgatgagtctggacataccccactggtaacagtggtccaggctgcgttggcggcctactcatggtgaaaaccatgagacgctagacatgaacaaggtgtgaagagtctattgagctactatagagtcctccggcccctgaatgcggctaatcttaaccatggagcaagtgctcacaaaccagtgagttgcttgtcgtaatgcgcaagtccgtggcggaaccgactactttgggtgtccgtgtttcactttttacttttatgactgcttatggtgacaatttaatattgttaccattcagctagtcgaaataatcgcataaaactttaaatcctatctaacaattcacatttggatagtttcattttgaggactttaaacctacttacaaag

SEQ ID NO: 859 - DNA, 711 bp, Hepatovirus D
  source 1..711: mol_type = genomic DNA
ttcaaagggtggtgggcggtttccccgccctcccctctttggatgcccatagtgcgggggtataaataccgcactccctttagctgttccgagggtatcggaacctatatgtttgttttctgtctgtctgtcagctttatgtgtgctcgtcccctttagggcactcatttcagcttgctttcattcttttcttccccggttctcaccttaccggaggcactggccgttgcgcccggcggggtcaacctagtgattagcactaggctgtaggtgtctaaagtggtgacattaagacttggtaactgatttcagcactgttaactgatgttggggatgacttgattgatcttctggaaggggtaggctacgggtgaaaccccttatcttaataccactatgtagagatagattcagtaggttaagggcagtggataaggttgagttcattttggacaataaaccttcaacactggtggacccaatctcactgaccagatgctttcttgactgatccttcagaggggtgattcttctgaataggttgccttgacactgatgcctgagacccattgggtcgggccttaaatcatggaactccactggactttcatggcctagcttctgccttagacagactctggggccccacgaccctctgggcccttcggggtactcaggggcatttaggtttttccacaattaaaagagtta

SEQ ID NO: 860 - DNA, 711 bp, Hepatovirus F
  source 1..711: mol_type = genomic DNA
ttcaaagggtggctgggattttgtcccagcctccctttggagttccttggctctggggaactaaattaccaggcccgcgtttacctagcgcttaggttaaaacccccatcccttatttgtaaatattgatttctgcaggttcagagtttcttaatcatgttccctttaggacactcactccacttgctttcattcttgtttccgtggttctcccatcaccacaagcactgaccattgcgcccggtggggttaaccatatgattagcatatggctgtaggtgtttaagggtgggacaataatggaaggtcaaatagcaggcttgtttaacttccttttgtttcatctcatgtatctttctgaaggggtaggctacgggtgaaaccccttaggttaatactcatattgagagatacctgtggtaggttaattgccctggataaacttgagttgttagacaataaagtttcaacaggggtggacaagatctcaccaccagactggcatgttgtgggacatctgggaggcaagtttcttcctgtgatgttggcctttacatattgcctgggtgttaagaaggagcccttaaattcacttttctgtgagcctagcttccgctggacggactttgggggcagcatccttcttgatgcttctggggtactcaggggcatttaggtttttccacattataaatatatagatgaatagag

SEQ ID NO: 861 - DNA, 711 bp, Enterovirus C
  source 1..711: mol_type = genomic DNA
ttaaaacagctctggggttgttcccaccccagaggcccacgtggcggctagtactctggtatcgaggtacctttgtacgcctgttttacaccccttcccctgtgcaactttagaagcaaatcacaaagttcaatagagggggtgcaaaccagcaccaccacgaacaagcacttctgtttccccggtgatgctgtatagactgttcccacggtcaaaaatggcagatccgttatccgcttgagtacttcgagaagcctagtaccaccttggaatcttcgatgtgttgcgctcagcactctaccccgagtgtagcttaggctgatgagtctgggcataccccaccggcgacggtggcccaggctgcgttggcggcctacccatggctaacgccatgggacgctagttgtgaacaaggtgtgaagagcctattgagctactcaagagtcctccggcccctgaatgcggctaatcctaaccacggagcaagtactcacaaaccagtgagcggcttgtcgtaacgcgtaagtctgtggcggaaccgactactttgggtgtccgtgtttccttttatttttattgtggctgcttatggtgacaatctaagattgttatcatatagcttttggattggccatccggtgattgttgagattatattactcatttgttttactacggttcttgcccaattgttacatttgcactaacata

SEQ ID NO: 862 - DNA, 711 bp, Enterovirus C
  source 1..711: mol_type = genomic DNA
ttaaaacagctctggggttgttcccaccccagaggcccacgtggcggctagtacactggtatcacggtacctttgtacgcctgttttatatcccctcccccatgcaactttagaagtaattcaaatagttcaatagagggggtacaaaccagtaccaccacgaacaagcacttctgtttccccggtgaggctatatagactgttcccacggtcgaaggtggctgatccgttatccgcttgagtacttcgagaagcctagtaccacctttggatcttcgatgcgttgcgctcagcactctaccccgagtgtagcttaggctgatgagtctgggcataccccaccggcgacggtggcccaggctgcgttggcggcctacccgtggctaacgccatgggacgctagttgtgaacaaggtgtgaagagcctattgagctacttaagagtcctccggcccctgaatgcggctaatcccaaccacggagcaagtgctcacaaaccagtgggtggcttgtcgtaacgcgcaagtctgtggcggaaccgactactttgggtgtccgtgtttccttttatttttatcatggctgcttatggtgacaatctaagattgttgtcatatagcgtttggattggccatccggtgacttcgaaagcgatatatttgactcattgtcttactgaatttacctatttattacacttgtataacaata

SEQ ID NO: 863 - DNA, 711 bp, Enterovirus C
  source 1..711: mol_type = genomic DNA
ttaaaacagctctggggttgttcccaccccagaggcccacgtggcggccagtactctggtattgcggtacctttgtacgcctgttttatatcccctccccaagtaactttagaagcaattcacaaagttcaatagagggggtacaaaccagtaccaccatgaacaagcacttctgtttccccggtgaagctgtatagactgttcccacggtcgaaaatggcagatccgttatccgctcacgtacttcgagaagcctagtatcatcttggaatcttcgacgcgttgcgctcagcactctaccccgagtgtagcttaggccgatgagtctgggcataccccaccggcgacggtggcccaggctgcgttggcggcctacccatggctaatgtcatgggacgctagttgtgaacaaggtgtgaagagcctattgagctacttgagagtcctccggcccctgaatgcggctaatcctaaccatggagcaagtgcccacaagccagtgggtggcttgtcgtaatgcgcaagtctatggcggaaccgactactttgggtgtccgtgtttccttttattcttattatggctgcttatggtgacaacctaagattgttgtcatatagcttttggattggccatccggtgatctttgagattaatataccttccttattacttcatagtactcatttattcattacactactgtagttaca

SEQ ID NO: 864 - DNA, 711 bp, Enterovirus D
  source 1..711: mol_type = genomic DNA
ttaaaacagccttggggttgttcccacctcaagggcccacgtggcggctagtactctggtatttcggtacccttgtacgcctgttttatctccctccccaatgtaacttagaagctttcaaatcaaagctcaataggtggagcgcaagccagcgcttccgtgagcaagcactcctgtttccccggtgcggttgtatagactgttcccacggttgaaaacaacctatccgttatccgctatagtacttcgagaaacctagtatcacctttggattgttgatgcgttgcgctcagcacactaacccgtgtgtagcttgggtcgatgagtctggacataccccactggtgacagtggtccaggctgcgttggcggcctactcatggtgaaaaccatgagacgctagacatgaacaaggtgtgaagagtctattgagctactatagagtcctccggcccctgaatgcggctaatcttaaccatggagcaagtgctcacaaaccagtgagttgcttgtcgtaatgcgcaagtccgtggcggaaccgactactttgggtgtccgtgtttcactttttacttttatgactgcttatggtgacaatttaatattgttaccatttagctagtcaaattaatcacataaaaactttaaatcctatctaacaattcacatttggatagcttcattttgaggactttaaacctatttacaaag

SEQ ID NO: 865 - DNA, 711 bp, Enterovirus B
  source 1..711: mol_type = genomic DNA
agggcccactgggcgctagcacactggtatcacggtacctttgtgcgcctgttttatttccccatccccgccgtaacttagaagtctcacttaagcggtcaatagatagcccagtaaaccaactgggttccgaccaggcacttctgttaccccggaccgagtatcaataggctactcacgtggccgaaggagaaaacgttcgttacccggccaattacttcgagaaacttagtaacaccatggaagttgcgcagtgtttcgctccgcacaaccccagtgtagatcaggtcgatgagtcaccgcgtaccccacgggcgaccgtggcggtggctgcgttggcggcctgcccatggggcaacccatgggacgcttcaataccgacatggtgcgaagagtctattgagctaattggtagtcctccggcccctgaatgcggctaatcctaactgcggagcagacgcctacgaaccagtgggtagtctgtcgtaacgggcaactctgcagcggaaccgactactttgggtgtccgtgtttccttttattcttacactggctgcttatggtgacaattgagagattgttaccatatagctattggattggccatccggtgacaaacagagctattgtttatctatttattggtttcataccactaaacttcaaggtcctaggaaccctcaatttaatattactacttaatagtgcaaa

SEQ ID NO: 866 - DNA, 712 bp, Aichivirus A
  source 1..712: mol_type = genomic DNA
tcaccctcttttccggtggtccggacccagaccaccgttactccattcagcttcttcggaacctgttcggaggaattaaacgggcacccactcaccctctcccccctctcgtaaccaagtgtgtgcccaatctcttcactcctgctggcttcaccgaccagcagtgtccaaaatgctaggtgaacctcctccctcccccactgggctcttgcccagtttcctccccccagcctgacgtgtcacaggctgtacaaagaccccgcgaaagctgccaaaagtggcaattgtgggtcccccctttgtgaaggcgtcgagtctttctcccttaaggctagacccgccagtgaattctgtcgggcaactagtgacgccactgcatgcctccgacctcggccgcggagtgctgccccccaagtcgagcccctaagccacaagttgtgctgtctggcaaacactgtctgtgagaatgttccgctgcggctgccaagcctggcaacaggctgccccagtgtgcgtagttctcatccagacctcggtctggcaacttgctgttaagacacggcgtaaggggcgtgtgccaacgccctggaacgagtgtccactctaataccccgaggaatgctacgcaggtacccctggcccgccagggatctgagcgtaggctaattgtctaagggtattttcatttcccactctttttctcttgttcata

SEQ ID NO: 867 - DNA, 712 bp, Aichivirus A
  source 1..712: mol_type = genomic DNA
tcacgcacttttccggtggtccggacccagaccaccgtcactccattcagcttcttcggaacctgttcggaggaattaaatgggcacccactcacccttcccctcttctcgtaactaagtgtgtgcccaatctcttgactcctactggctccaccgaccggtagtgtccaaaatgctaggtggacttcctcccttcccttctgggcatcttgcccagcttcctccccccagcctgacgtgtcacaggctgtgcaaagaccccgcgaaagctgccaaaagtggcaattgtgggtcccccctttgtcaaggcgtcgagtctttctcccttaaggctagtcccatcagtgaattctgatgggcaactagtgacgccactgcatgcctccgacctcggccgcggagtgctgccccccaagtcgtgcccctgaccacaagttgtgctgtctggcaaacattgtctgtgagaatgttccgctgtggctgccaagcctggtaacaggctgccccagtgtgcgtagttctcatccagacttcggtctggcaacttgttgttaagacacggcgtaaggggcgtgtgccaacgcccaggaacgagtgtccactctaataccccgaggaatgctacgcaggtacccctggtccaccagggatctgagcgtaggctaactgtctaagggtattttcatttcccactctctctttctcgttcata

SEQ ID NO: 868 - DNA, 712 bp, Limnipivirus A
  source 1..712: mol_type = genomic DNA
tttaaatggtgaccttaaacgggaaatgcgttttccgttctttggatatccatttaacgtgtaccctatacgataattggggtggattctggatgcctagttccagtgattggttaagaactcgtttactacgtatagtatgattagcaaagtgctcgattgatcacgtaatgatctatgtggttaaaaacccagtagtatggtatatactcagtagtgtacactgtgagtacaactcttggcgtagagagaacaattcacccgaatccgtggcgtatccatggaaataagtttacctaattgtatgttacaaggcatatgagacatttatgagatatggtttattttgactaaacgagtgtagaggtggtggagtctatccaacttcaagccatgcaattgttgtgttgattgatatcattgaccatttttgtggattgtgtacacatacaatttgaaaattaaccccctcaagaataagacatgggaccattcgtggtagataccgtgctcggatgcttgagattagatgggttagactagttttggaatgagattgccgagaaagtcccgctagacatgttttacaagtcgtggtattccgctagactttttcgcagacacatggaagggtccatgtgttgtgcaattgcagggtgacagcccaactgcagagttttccttactagaataaaaatctgttgtcaatttt

SEQ ID NO: 869 - DNA, 712 bp, Enterovirus C
  source 1..712: mol_type = genomic DNA
ttaaaacagctctggggttgatcccaccccagaggcccacgtggcggctagtactctggtattacggtacctttgtacgcctgttttatatcccctcccccaagtaactttagaagcaattcaaacagttcaatagagggggtacaaaccagtaccaccacgaacaagcacttctgtttccccggtgaagctgtatagactgttcccacggttgaaaatggcagatccgttatccgcttgagtacttcgagaagcctagtatcaccttggaatcttcgacgcgttgcgctcagcactctaccccgagtgtagcttaggtcgatgagtctgggcataccccaccggcgacggtggcccaggctgcgttggcggcctacccatggccaacgccatgggacgctagttgtgaacaaggtgagaagagcctattgagctacttaagagtcctccggcccctgaatgcggctaatcccaaccacggagcaagtgctcacaaaccagtgagtagcttgtcgtaacgcgcaagtctgtggcggaaccgactactttgggtgtccgtgtttccttttatttttactatggctgcttatggtgacaatctaagattgttatcatatagctgttggattggccatccggtgatttattgagatttaacgttcgcctgtttttcttactacatctacccaccagtttcactcatataacaaca

SEQ ID NO: 870 - DNA, 712 bp, Enterovirus C
  source 1..712: mol_type = genomic DNA
cccacgtggcggccagtactccggtatcacggtacccttgtacgcctgttttatactcccttcccccgtaacttagaagcaatgaaaccaagttcaatagaagggggtacaaaccagtaccaccacgaacaagcacttctgtttccccggtgacgttgcatagactgtccccacggttgaaggcggctgatccgttatccgcttgtgtacttcgagaagcctagtaccatcttggaatctccgatgcgttgcgctcagcactcaaccccagagtgtagcttaggctgatgagtctggacattccccaccggcgacggtggtccaggctgcgttggcggcctacctgtggtccaaaaccacaggacgctagttgtgaacaaggtgtgaagagcctattgagctacatgagagtcctccggcccctgaatgcggctaatcccaaccacggagcaggtgtttgcaatccagcaaatagcctgtcgtaacgcgcaagtctgtggcggaaccgactactttgggtgtccgtgtttccttttattttcatactggctgcttatggtgacaatctcggattgttatcatagagcaaattggattggccatccggtgaaaatcagattgattatttaactttttgttggatttacatctttgacatcacatactccgaatctcattaagatagtgctcttgatacgacatcatcgtcatt

SEQ ID NO: 871 - DNA, 713 bp, unidentified
  source 1..713: mol_type = unassigned DNA; note = unclassified Kobuvirus sequence
tcacgcacttttccggtggtccggtctcagaccaccgttactccattcagcttcttcggaacctgttcggaggaattaaacgggcacccactaaccccaacccccttctcgtaactaagtgtgtgcccaatctcttgactcctgctggaaccaccgaccagtagtgtccaaaatgccaggtggaaaatcctcccttcccctctgggctacatgcccagcatcctccccccagcctgacgtgccacaggctgtgcaaagaccccgcgaaagctgccaaaagtggcaattgtgggtcccccctttgtcaaggcgtcgagtctttctcccttaaggctagccccgtcagtgaactctgtcgggcaactagtgacgccactgcatgcctccgacctcggccgcggagtgctgccccccaagtcatgcccctgaccacaagttgtgctgcctggcaagcactgcccgtgagaatgttccgctgtggctgccaagcctggtaacaggctgccccagtgtgcgtagttctcatccagacctcggtctggcaacttgctgttaagacatggcgtaaggggcgtgtgtcaacgccctggaacgagtgtccactctaataccccgaggaatgctacgcaggtacccctggctcgccagggatctgagcgtaggctaattgtctaagggtattttcatttcccactctctctttcttgttcata

SEQ ID NO: 872 - DNA, 713 bp, unidentified
  source 1..713: mol_type = unassigned DNA; note = unclassified Hepatovirus sequence
atttaaaccctctcccttttggacttctctagtctggggaagtaaaataccagactcccgtttgcctagggtataggctattatttatgtttgttttgttatgtttgtcttttaatgttttgtaaatattaattccagcaggttctggtttctgaatttgtcctctttaaggcactcataatgctttctttcatcttcatttccctggctctcaccttgccagatggactgacccatgcgcccgtgggggttaaccacaggactagcctgtggctgtaggttctgaaagaggtgacattaagactatggttgtgattccacatgttttaactggtatgatgtagtagcaattgatctttggtatggggtaggctacgggtgaaaccccataggttaatactaatatttagagatacctccagtaggtgaagtgcacaggataagattgagttattttgacaaaagatcttcaactgtggtggacaccatctcactgggccaatgcttttgttatgaaaccatattgggcatgtctcttggatgagcattcatggacactgatgcctagactagggtgaatattgccttaaatcatagagttctttgggattttatggccttgcttctgttgaacagacactggggcttatggtattcaccctggcctctggggtaatcaggggcatttaggttttccacatttatataatgct

SEQ ID NO: 873 - DNA, 713 bp, unidentified
  source 1..713: mol_type = unassigned DNA; note = unclassified Senecavirus sequence
gctcctctgtgcctctagcaaacacagccggtttaccccccggaaggggaaaggaaggactgggcatgagggcccggccccccctttccccttccggggggtaaaccggctgtgtttgctagaggcacagaggagcaacatccaacctgcttttgtggggaacggtgcggctccaattcctgcgtcgccaaaggtgttagcgcacccaaacggcgcatctaccaatgctattggtgtggcctgcgagttctagcctactcgtttctcccctattcactcactcacgcacaaaaagtgtgttgtaactacaagatttagccctcgcacgggatgtgcgataaccgcaagattgactcaagcgcggaaagcgctgtaaccacatgctgttagtccctttatggctgcgagatggctatccacctcggatcactgaactggagctcgaccctccttagtaagggaaccgagaggccttcttgcaacaagctccgacacagagtccacgtgattgctaccaccatgagtacatggttctcccctctcgacccaggacttctttttgaatatccacggctcgatccagagggtggggcatgatccccctagcatagcgagctacagcgggaactgtagctaggccttagcgtgccttggatactgcctgatagggcgacggcctagtcgtgtcggttctataggtagcacatacaaat

SEQ ID NO: 874 - DNA, 713 bp, Enterovirus B
  source 1..713: mol_type = genomic DNA
acagggcccactgggcgtcagcactctggtattgaggtacctttgtgcgcctgttttataaccctctccccatttgaaaattagaagcaatacacaatggtcagtagctggcatggcaaaccagtcatgttttgaccaagcacttctgtttccccggaccgagtatcaatagactgctcacgcggttgaaggagaaagcgttcgttacccgaccaactacttcgagaaacctagtaacgccatgaaagttgcagagcgtttcgctcagcacatccccagtgtagatcaggccgatgagtcaccgcattccccacgggcgaccgtggcggtggctgcgctggcggcctgcttgtggggcgacccacaagacgctccaaaacagacatggtgtgaagagtctattgagctagttggtagtcctccggcccctgaatgcggctaatcctaactgcggagcacgtgcctccaacccaggaggtggcgtgtcgtaacgggtaactctgcagcggaaccgactactttgggtgaccgtgtttccttttattcttatattggctgcttatggtgacaattgaaaggttgttaccatatagctattggattggccatccggtgacaaacagagcaattatatatctctttgttgggtatattccactcgattacaaggaattcagaactctcaattatatactgtctttaaactccgcaag

SEQ ID NO: 875 - DNA, 714 bp, Enterovirus C
  source 1..714: mol_type = genomic DNA
ttaaaacagcctgtgggttgttcccaccccagaggcccacgtggcggctagtactctggtatcacggtacctttgtacgcctgttttatatcccttcccccgcaactttagaagcttaacaaaagttcaacagcaggggtacaaaccagtgcctctacgaacaagcacttctgtttccccggtgaaatcacatagactgtacccacggtcaaaagtgattgatccgttatccgcttgagtacttcgagaagcctagtatcaccttggaatcttcgacgcgttgcgctcaacactctaccccgggtgtagcttaggctgatgagtctgggtactccccaccggtgacggtgacccaggctgcgttggcggcctacccatggctaatgccatgggacgctagttgtgaacaaggtgtgaagagcctattgagctactcaagaatcctccggcccctgaatgcggctaatcctaaccacggagcaatcgctcacgacccagtgagtaggttgtcgtaatgcgtaagtccgtggcggaaccgactactttgggtgtccgtgtttcccttttttattcatattggctgcttatggtgacaatttacagattgttaccatatagctattggattggccatccagtattgtgtcatacatattaaaatacttttctacaagcaataacaacattgtatttgaaccacaatagccattacaa

SEQ ID NO: 876 - DNA, 714 bp, Enterovirus D
  source 1..714: mol_type = genomic DNA
ttaaaacagcctgtgggttgttcccaccccagaggcccacgtggcggccagtactctggtatcacggtacctttgtacgcctgttttatatccccttcccccgcaacttagaagaaaacaaatcaagttcactaggagggggtacaaaccagtaccaccacgaacaagcacttctgtttccccggtgatgtcgtatagactgtaaccacggttgaaaacgattgatccgttatccgctcttgtacttcgaaaagcccagtatcaccttggaatcttcgatgcgttgcgctcagcactcaaccccagagtgtagcttaggtcgatgagtctggacactcctcaccggcgacggtggtccaggctgcgttggcggcctacctgtggtccaaagccacaggacgctagttgtgaacaaggtgtgaagagcctattgagctacaagagaatcctccggcccctgaatgcggctaatcctaaccacggagcaagggtacacaaaccagtgtatatcttgtcgtaacgcgcaagtctgtggcggaaccgactactttgggtgtccgtgtttccttttgtttttatcatggctgcttatggtgacaatctaagattgttatcatatagctgttggattggccatccggtaatttattgagatttgagcatttgcttgtttcttcaacaatttcacctattcattgcatttcagcagtcaaa

SEQ ID NO: 877 - DNA, 714 bp, Enterovirus B
  source 1..714: mol_type = genomic DNA
cacagggcccactgggcgctagcactctggtattgcggtacctttgtgcgcctgttttatggcccccccccagttggaacttagaagtgaagcctctcgaccaatagtgggcgtggcacaccagccacgtcttggtcaagcacatctgtttccccggactgagtatcaataaactgctcgcgcggttgaaggagaaaacgttcgttacccggctaactacttcgggaaacccagtagtatcatggaaattgcgaggcgtttcgctcagcactccccccgtgtagatcaggtcgatgagtcactgcaccccccacgggtgaccgtggcagtggctgcgttggcggcctgcctatggggtgacccataggacgcttcaaaatggacatggtgcgaagagtctactgagctagttagtagtcctccggcccctgaatgcggctaatcctaaccgcggagcaagtgtccacaaaccagtgggttgcttgtcgtaatgggtaactctgcggcggaaccgactactttgggtgtccgtgtttccttttatcttttattatggctgcttatggtgacaattgagagattgttaccatatagctattggattggccatccggtgaacaacagagcgatcatttacctctttgttggtttcgttccattgagtcccaaagtttttacgacactcaaatttattctcctacttaacaaagcaaa

SEQ ID NO: 878 - DNA, 714 bp, Enterovirus B
  source 1..714: mol_type = genomic DNA
cagggcccactgggcgccagcacactggtatcaaggtacctttgtgcgcctgttttgcttccctttttccccagaggcaacttagaagcaatactccacgaccaatagcaggcgtggcacaccagccatgtctcggtcaagcacttctgtggccccggactgagtatcaataaactgctcacgcggtcgaaggagaaaacgtccgttacccggctagctacttcgagaaacctagtaacgccatgaaaattgcgaggcgtttcgctcagcacatccccagtgtagatcaggtcgatgagtcaccgcattccccacaggtgactgtggcggtggctgcgttggcggcctgcccatggggtaactcatgggacgcttcaatacggacatggtgtgaagagtctattgagctagttagtattcctccggcccctgaatgcggctaatcctaactgtggagcatgcgcccccattccagagggtagcatgtcgtaacgggtaactccgcagcggaaccgactactttgggtgtccgtgtttccttttattttatcattggctgcttatggtgacaattgaaagattgttaccatatagctattggattggccatccggtgacgaacagagctataatttaccaatttgtgggatttgttcctataagtttgaaagtcttaaagacccttaatttaatattactactcaatagtgcaag

SEQ ID NO: 879 - DNA, 714 bp, Enterovirus C
  source 1..714: mol_type = genomic DNA
tattaaaacagctctggggttgttcccaccccagaggcccacgtggcggccagtacactggtattacggtacctttgtacgcctgttttatatccccttacccagtaactttagaagtaattcacacagttcaatagagagggggtacaaaccagtaccaccacgaacaagcacttctgtttccccggtgaagctacatagactgtccccacggttgaaagtggcagatccgttatccgcttaagtacttcgagaagcctagtatcaccttggaatcttcgacgcgttgcgctcagcactctaccccgagtgtagcttaggctgatgagtctgggcataccccaccggcgacggtggcccaggctgcgttggcggcctacccatggctaacgccatgggacgctagttgtgaacaaggtgtgaagagcctattgagctacttaagagtcctccggcccctgaatgcggctaatcctaaccacggagcaagtgcccacaaaccagtgggtggcttgtcgtaacgcgtaagtctgtggcggaaccgactactttgggtgtccgtgtttccttttatttttatcatggctgcttatggtgacaatctaagattgttatcatatagctattggattggccatccggtgattcacagagacttgaaagctaactcaccttcctataacactcatttgtttatcaatcttatagcacaca

SEQ ID NO: 880 - DNA, 714 bp, Enterovirus B
  source 1..714: mol_type = genomic DNA
ggcttaccaactatgcttacaccaggcagcacgcagtttttgacgtcagatgattttcaatcaccatcagctatgccacagtttgatgtgaccccagagatgaacattccagggcaagtgaggaacctgatggaaattgcggaagttgattctgtggtaccaatcaataacttgaaagctaatctgatgacgatggaggcttaccgggtgcaggttaggtccactgacgagatgggaggacagatatttggcttccccttacagccaggggcatcaagcgtgttacaaagaacactactgggagagatattaaattactacactcattggtcagggagcctcaagttaacatttgtgttctgtgggtcggcaatggcaactggcaaattcttactagcatactcaccacctggagcaggggcaccagacagcaggaagaacgctatgttagggacccacgtcatatgggacgttggactgcaatccagctgtgtgctctgtgtaccgtggatcagccagacgcactacaggtatgttgttgatgacaagtacacggctagtggtttcatttcgtgctggtaccaaactaatgtcatagtcccagctgaagctcagaaatcgtgctacataatgtgctttgtgtcagcatgcaacgatttctctgtacgcatgttgagggacacgcaattcattaagcaaacaaacttttatcag

SEQ ID NO: 881 - DNA, 715 bp, Hunnivirus A
  source 1..715: mol_type = genomic DNA
tctttcccccctcccctttccctttacctcttgcaacgaaacagtttttgacaaggaccctcacctgtcaatcgggaccaccactttcagtgaccccgtgcgaagtgttgagagaaagtgagctttcttacccttcatttgtgaacccttcagtcgaagccgcttggaataagatggaaggaaatgttcattctaaatggagtgaaacatatacttaatttccagtgtttagtggtctttccactagacaacggcactgtcttgccggaactctacacaccaacattccacgcttgtgggactcaaatgttggatgacacagttgtagctggaactgagtgtttagtgcactctgtgtaacagtgaaaacaatgtgatcacttcggtgggctagtagcctgtggactaacaactggtaacagttgcctcaggggccaaaagccacggtgttaacagcaccctactagtttgattggagcaatccatgatgttacagagttagtaactgccaaacagattgtactggtatcttggcataccgtgcaacttaggatagtgaaggatgccctggcggtacccataggtaacaagtgacactatggatctaaacaggggctcactctacgttgctttacaactagctgtgagttaaaaaacgtctaactatccacaacctaggggactaggttttcctttttatttttatacacaacta

SEQ ID NO: 882 - DNA, 715 bp, Enterovirus C
  source 1..715: mol_type = genomic DNA
ttaaaacagctctggggttgttcccaccccagaggcccacgtggcggctagtactctggtattacggtacctttgtacgcctgttttacactcccttccctacgcaactttagaagtttaacataaagttcaatagagggggtacaaaccagcaccaccacgaacaagcacttctgtttccccggtgaaactgcatagactgtaaccacggttgaaagcggttgatccgttatccgcttgagtacttcgagaagcctagtaccaccttggaatctccgatgcgttgcgctccacactctaccccgagtgtagcttaggccgatgagtctgggcgttccccaccggcgacggtggcccaggctgcgttggcggcctacccatggttaacgccatgggacgctagttgtgaacaaggtgtgaagagcctattgagctactcaagagtcctccggcccctgaatgcggctaatcccaaccacggagcgagtgctcacaatccagtgagtggcttgtcgtaacgcgcaagtctgtggcggaaccgactactttgggtgtccgtgtttccttttatttttactatggctgcttatggtgacaatctaggattgttatcatatagcttttggattggccatccggtgacttctaacgttcaagtagtttactcgcttaattttctaaacacattctcagttgttgaattataaacttcaca

SEQ ID NO: 883 - DNA, 715 bp, Enterovirus C
  source 1..715: mol_type = genomic DNA
ttaaaacagcctggggttgttcccaccccagaggcccacgtggcggccagtactctggtattacggtacctttgtacgcctgttttatatcccctcccctgagtaactttagaagcaattcaaaaggttcaatagagggggtacaatccagtaccaccatgaacaagcacttctgtttccccggtgaggctacataaactgtacccacggttgaaagtggctaatccgttatccgctcaagtacttcgagaagcctagtaataccttggaatcttcgacgcgttgcgctcagcactctaacccgggtgtagcttaggtcgatgagtctgggcataccccaccggtgacggtggcccaggctgcgttggcggcctacccatggctaacgccatgggacgctagttgtgaacaaggtgtgaagagcctattgagctacttgagagtcctccggcccctgaatgcggctaatcctaaccacggagcaagtgctctcaaaccagagagtggcttgtcgtaacgcgtaagtctgtggcggaaccgactactttgggtgtccgtgtttccttttatttttatcatggctgcttatggtgacaatctaagattgttatcatatagcttttggattggccatccggttgttgtttagagcgtttcatctgtgctttgtttgtttgaccagatcaatataaacactacatcctatttgttcata

SEQ ID NO: 884 - DNA, 715 bp, Enterovirus B
  source 1..715: mol_type = genomic DNA
acagggcccactgggcgttagcacactggtatctcggtacccttgtgcgcctgttttatacacccttcccccaaaagaaacttagaagcttgactataacggtcaataggaaacccagtataccagctgggttacgaccaagcacttctgtaaccccggactgagtatcaataggctgctcacgcggctgaaggagaaaacgttcgttacccggccaattacttcgagaaacctagtaccaccatgaaagttgcgcggcgtttcgctccgcacaatcccagtgtagatcaggtcgatgagccaccgcgttccccacgggtgaccgtggcggtggctgcgttggcggcctgcccatggggcaacccatgggacgcttcaatactgacatggtgcgaagagtctattgagctaattggtagtcctccggcccctgaatgcggctaatcctaactgcggagcagatacccacataccagtgggctgtctgtcgtaacgggtaactccgcagcggaaccgactactttgggtgtccgtgtttccttttattcttatactggctgcttatggtgacaattgagagattgttaccatatagctattggattggccatccggtgtctaacagagcgatcatctatctgtttgttggtttcatacccttgaattttaaagtcctcaacactcttaaccttgtgctacaactaaactcggtaaa

SEQ ID NO: 885 - DNA, 715 bp, Enterovirus C
  source 1..715: mol_type = genomic DNA
tgttcccaccccagaggcccacgtggcggctagtactctggtatcacggtacctttgtacgcctgttttatacccccttcccccgcaacttagaagcatgaaatcttaagctcaacaggaggggtgcaaaccagcacctctacgagcaagcactactgtctccccggtgaggttacatagactgttcccacggttgaaagtagccgatccgttatccgctcatgtacttcgagaagcctagtattgctctggaatcttcgatgcgttgcgctcaacactcgaccccggagtgtagcttaggccgatgagtctggacattccccactggcgacagtggtccaggctgcgttggcggcctacctgtggtccaaagccacaggacgctagttgtgaacagggtgtgaagagcctattgagctacatgagagtcctccggcccctgaatgcggctaatcccaaccatggagcaggcaactgcaacccagcagtcagcctgtcgtaacgcgcaagtccgtggcggaaccgactactttgggtgtccgtgtttccttttatcttttgaatggctgcttatggtgacaatcatagattgttatcataaagcgaattggattggccatccagagaattactaccgtgtttattgagtctactcttgaaaaacctaactcctcaacgtactagaattatttgaagacaggatatcgacacgaca

SEQ ID NO: 886 - DNA, 716 bp, unidentified
  source 1..716: mol_type = unassigned DNA; note = unclassified Hepatovirus sequence
ttcaagaggggtctccggagatttcctgagtccctcttgggagtccatggtgaggggacttgatacctcaccgccgtttgcctaggctataggctaaacttccctttcccctttccctttattgttgtaaatattaattcctgcaggttcaggtctcttggatttgttccactttatggacactcatttcacgctttctgtctgcttttcttccagggctctccccttgccctaggctctggccgttgcgcccggcggggtcaactccatgattagcatggagctgtaggagtctaaattggggacacagatgttgggaacgtcaccttgcagtgttaacttggctttcatgaagctttttgatcttccacaagaggtaggctacgggtgaaacctcttaagctaatacttctatgaagagatgctttggatagggtaacagcggcggatattggtgagttgtttgacaaaaaccattcaacgccggaggactggctctcatccagtggatgcattaagtggattgtctgtcagggctgtctctaggtttaattcctggcctctctgtgcttagggcaaacaaaacttggccttaaatgaggtcctgtgagaggggacctcgccattgaatgctggacatttctttggggccttatgttttgtttgcctctgaggtactcaggggcatttaggtttttcctcatcaataaataatt

SEQ ID NO: 887 - DNA, 716 bp, unidentified
  source 1..716: mol_type = unassigned DNA; note = unclassified Hepatovirus sequence
ttcaagaggggtctccgggtttttccggagcccctcttgggagtccatggtgaggggacttgatacctcaccgccgtttgcctaggctataggctaattttcccttttccttttccctgtgttattgtaaatattaattcctgcaggttcagggttcttgaatttgttctgctgtacggacactcttttcacgctctctgtctgcttttcttccagggctctccccttgccctaggctctggccgttgcgcccggcggggtcaactccatgattagcatggagctgtaggagtctaaattggggacacagatgttgggaacgtcaccttgcagtgttaacttggctttcatgaaactccttgatcttccacaagaggtaggctacgggtgaaacctcttaagctaatacttctatgaagagatgctttggatagggtaacagcggcggatattggtgagttgtatgacaaaaaccattcaacgccggaggactggctctcatccagtggatgcattgagtgaattgactgtcagggctgtctttaggcttaattcctgacctctctgtgcttagggcaaacaaaatttggccttaaatgaggctctgtgagagggggcctcgccattgaatgctggacatttctttggggccttatgttttgtttgccgctgaggtactcaggggcatttaggtttttcctcatcaataaataaat

SEQ ID NO: 888 - DNA, 716 bp, Enterovirus J
  source 1..716: mol_type = genomic DNA
aaaatagcctcagggttgttcccaccctgagggcccacgtggcgtagtactctggtatcacggtacctttgtacgcctattttacatcccttccccgtaacttagaagctttcaactataagttcactagcagggctaccaaccaggtagttcatcgaacaagcacttctgttaccccggtcctagtacctgagaagctgtacccacggcggaaggggaaaaagatcgttacccggctatctacttcgagaagcctagtaacgtcattgaaactcttgagcgttgcgttcagcacagtaccccctgtgtagctttggctgatgagtctgggcattccccactggcgacagtggcccaggctgcgttggcggccaaccgatccgggcaaccgggtcggacgctcatttgtggacatggtgtgaagagcctattgagctaggtagtagtcctccggcccctgaatgcggctaatcccaactccggagcaagtgcgcacaatccagtgtgtggcttgtcgtaatgcgtaagtctggagcggaaccgactactttgggtgtccgtgtttcctgtttttccttatttggctgcttatggtgacaatctagtgttgttaccatatagcgattggattggccatccggtgaatagctttgtgacaattccctacgttatttttcataactcaacttcacgagagtcattgagtttgactaatt

SEQ ID NO: 889 - DNA, 716 bp, Enterovirus B
  source 1..716: mol_type = genomic DNA
cacagggcccactgggcgctagcacactggtatcccggtacctttgtgcgcctgttttataccccctttcccgctttgtaacttagaagtaacacaacttcggtcaatagtcgacgcaacaacccagttgcgttttgatcaagcacctctgtgaccccggactgagtatcaataggctgctcgcgcggctgaaggagaaaccgttcgttacccggctaactacttcgagaagcctagtagcatcatgaacgttgcggagtgtttcgctcagcacttcccccgtgtagatcaggtcgatgagtcaccgcgttccccacgggtgaccgtggcggtggctgcgttggcggcctgcctgtggggcaacccacaggacgctctaatacagacatggtgcgaagagtctattgagctagttagtagtcctccggcccctgaatgcggctaatcctaactgcggagcacattctcacaagccagtgagcggtgtgtcgtaacgggcaactctgcagcggaaccgactactttgggtgtccgtgtttccttttattctaatactggctgcttatggtgacaattgagagattgttaccatatagctattggattggccatccggtgtctaacagagcaattatttacctgtttgttggtttcacacccctaaatctcaaggttttaaataccctcaatttcgtactgaaactaaactcagtaaa

SEQ ID NO: 890 - DNA, 716 bp, Enterovirus D
  source 1..716: mol_type = genomic DNA
cagccttggggttgttcccactccaagggcccacgtggcggctagtactctggtacttcggtacctttgtacgcctgttttatctcccttcccaatgtaacttagaagttcttaaatcaatgctcaataggtggggcgcaaaccagcgctctcatgagcaagcactcctgtctccccggtgaggttgtataaactgttcccacggttgaaaacaacctatccgttatccgctatagtacttcgagaaacctagtaccacctttggattgttgacgcgttgcgctcagcacactaacccgtgtgtagcttgggtcgatgagtctggacatacctcactggcgacagtggtccaggctgcgttggcggcctactcatggtgaaagccatgagacgctagacatgaacaaggtgtgaagagtctattgagctactatagagtcctccggcccctgaatgcggctaatcctaaccatggagcaagtgctcacaggccagtgagttgcttgtcgtaatgcgcaagtccgtggcggaaccgactactttgggtgtccgtgtttcactttttacttttatgactgcttatggtgacaatttgatattgttaccatttagcttgtcaaatcaattgcaaaagatcctaactcttatttatcaacttgcatctcgataactctaatttgaaaatatcatctctaaccaatttgaaaattttaaca

SEQ ID NO: 891 - DNA, 717 bp, Enterovirus A
  source 1..717: mol_type = genomic DNA
acagggcccactgggcgctagcactccgattctgcggaatctttgtgcgcctgttttataaccctcccccgaaacttgcaacttagaagttatgtacgttactgatcaacagcaggcgtggcacaccagccatgtcttgatcaagcacttctgtaaccccggactgagtatcaatagactgctcacgtggtcgaaagagaaaacgttcgttatccggctaactacttcgagaaacttagtagcaccactgaaactgcggagtgtttcgctcagcacttcccccgtgtagatcaggtcgatgagtcactgcttaccccacgggtgaccgtggcagtggctgcgttggcggcctgcctatggggcaacccataggacgctctaaagtggacatggtgtgaagagtctattgagctagttagtagtcctccggcccctgaatgcggctaatcctaactgcggagcacatgccctcaatccagggggtggtgtgtcgtaacgggcaactctgcagcggaaccgactactttgggtgtccgtgtttcttttattctcataatggctgcttatggtgacaattgaggaattgttgccatatagctattggattggccatccagtgacaaacagagctttgatatacttgttcgtgggtttcgttccactcaccagtcgtacagttcatactctaaagtacattctgattctgaacaatagaaa

SEQ ID NO: 892 - DNA, 717 bp, Enterovirus C
  source 1..717: mol_type = genomic DNA
ttaaaacagcttgggggttgttcccacccccagggtccaatggacgctagtacaccggtatcacggtacccttgtacgcctgttttataatccccttcccccgtaacattagaagcacaaaagcaaccgctcaatagacaccatacatccagtgtggttacgagcaagcacttctgtctccccggttgcgccctatatgctgtgcgaacggcaaaaaggggcaatatcgttacccgcttgactactacgggaaacccagtatcatcttcgattgatttgagagttgcgttcagcgccttacccccggcgtagctcaggctgatgaggctccgaacaccccacaggcgactgtgtcggagcctgcgttggcggcctgcccataccctgcggtatgggacgctcacttcatgacatggtgcgaagagtctactgtgctagtcaagattcctccggcccctgaatgtggataatcccaaccactgatcctacgttcgcaatccagcgttcagtaggtcgtaacgcgcaagtcggtggcggaaccaactactttgggtgtccgtgtttcctttatttcctactgaatgcttatggtgacaattgttttgatcagttgttgccaatactcgcgttcagtgtgtaattacaaaaacaagattatcagttattacaatccctcacgttcagtgcacaattacgaaaacgagattttctgtcata

SEQ ID NO: 893 - DNA, 719 bp, Enterovirus A
  source 1..719: mol_type = genomic DNA
acagggcctactgggcgctagcactctgattctacggaacctttgtgcgcctgttttataacccctcccccaaactatgtaacttagaagttatgcactctaccgatcaacagcaggcatggcgctccagccatgtctcgatcaagcacttctgtttccccggactgagtatcaatagactgctcacgtggtcgaaggagaaaacgttcgttatccgactaactacttcgagaagcctagtagcaccatcgagactgcggagcgtttcgttcagcactccccccgtgtagatcaggtcgatgagtcactgcataccccacgggcgaccgtggcagtggctgcgttggcggcctgcctatggggtgacccataggacgctctaaagtggacatggtgtgaagagcctattgagctagttagtagtcctccggcccctgaatgcggctaatcctaactgcggagcgcatgccctcgaaccagagggtagtgcgtcgtaacgggcaactctgcagcggaaccgactactttgggtgtccgtgtttctttttattcacttattggctgcttatggtgacaatcaaggaattgttaccatatagctgttggattggccatccggtgtgtaatagagcaattatctatttgtttgttggttacattccattaacatttaagtccctcaatacattacactacattttaaccctaaacgcaagaag

SEQ ID NO: 894 - DNA, 719 bp, Enterovirus C
  source 1..719: mol_type = genomic DNA
ccagaggcccacgtggcggctagtactccggtattacggtacccttgtacgcctgttttatactcccttccccgtaacttagaagaaccaaaccaagttcaatagaagggggtacaaaccagtaccaccacgaacaagtacttctgtttccccggtgaagttgtatagactgtacccacggttgaaaacgactgatccgttatccgctttcatacttcgagaagcctagtatcatcttggaatcttcgatgcgttgcgctcaacactcaaccccagagtgtagcttaggctgatgagtctggacgtccctcaccggcgacggtggtccaggctgcgttggcggcctacctgtggcccaaagcctcaggacgctagttgtgaacaaggtgtgaagagcctattgagctatgaaagagtcctccggcccctgaatgcggctaatcccaaccacggagcgagagtgtgcaaaccagcgcatttatcgtcgtaacgcgcaagtctgtggcggaaccgactactttgggtgtccgtgtttccttttatttttctacattggctgcttatggtgacaatcatagattgttatcataaagcgaattggattggccatccggtgaaagtgaaacatattattcacctccttgttggatttactccaatcaacctctccacttataagattatcatcacagtcttaccaaatagaagcatattcaaca

SEQ ID NO: 895 - DNA, 720 bp, unidentified
  source 1..720: mol_type = unassigned DNA; note = Chicken picornavirus 1 isolate 55C, complete genome.1 sequence
ctgcttaaggacgttcccggtgctgttgatgctttccgtcaggcagtggccgacttgcagaacttcctaccgaaccaccacctcacccccataactccttccctctacaccttccgctatggtggttaccactgctttattgccttgactgagaatggccaccccctcgacacctgccccctactgccccaccgcgcaaccttttgcttgtccactcggttggagaggcatgggggccccgttcatatccccagtccagttggtgaccttccccctccccgtccggtagatggtccagagggctttgccgacgccctctatgatgcttgcttgtctttcctccgtcagcgcgagcatgcacttgtcgagcccacggaaacacagcctagcttttgcttctctcaccctgcgtaccctgggcgccttccgctcgagattcgctttgttcgacaccctggcgtccccccaccgctacgtgattttactcgtggcatacaccgccctggcgttcagtacattccactgcctaatttgggtggcctccctcaatctcccgcaccccccattgcgcacgtcatcaccgccgccgctaacgcgatccggcgcggttctcactggcactgtcccctcgtccgccgggtttccactcatggttggcttttcacttattctggttactggtgttccatcctacttcatgatggtcgccatgaccatgac

SEQ ID NO: 896 - DNA, 721 bp, unidentified
  source 1..721: mol_type = unassigned DNA; note = unclassified Rosavirus sequence
gggatgggtctggtgctgcgccgcgtgtgtcttgacaccgcgctgctcaggatgcttctgccccgtgctttggacgcctaccagggcgttaaactggtcccccccttaccctttccccgtaactaagtttgtacctcccccatataggctgctaagacgcttgttgctacagcatatgtggatcagggagttctccatgagtaatcttttccaccctctctagtgtctatgctattgaggacgggttggagccccgttgacctagtgtcagagtgtgtcggtagcaggctttctgctctcgccccatgccggccacacctcccgtcagtaatgtgaagactgcaagttgcatgtgaaaaggtttctaatatttgagctgaatgtagcgattacccaaggtgagcggacttccccacgtggtaacacgtgcctctcaggccaaaagccaaggtgttaaaagcaccccttgggtagaccactaccccgtggtctcagttctcttagaagattcacttagtaatgtgtatactggcagctcccaagcagagctggcgagcgggctaaggatgccctgaaggtacccgcaggtaacgttaagacactgtggatctgatcaggggctcgagtgctgaagctttacagaggtagctcgagttaaaaaacgtctatgcccctcccccacgggagtgggggttcccccacaccaattttagattgcact

SEQ ID NO: 897 - DNA, 721 bp, unidentified
  source 1..721: mol_type = unassigned DNA; note = unclassified Picornaviridae sequence
aaactattgggtgtcaattcagaaactgcagccaaagctgaggtggtaactgactcctcaagagcagcagctgttgcagcagcattctgggcaatttgatccaaaccagtcactctatcagttgccatttttcacaccatacataaaattttcaatggaataaaagggaaaatgctcaaacatgtttttcataattttaaacccataacctggtaaagccaaactatgggtcccagatcagattcataaaatgagtaccttttggagcttggaaactccttgggaaagatgctaaaggagtatctgttacaaggttggtaacctgtcctcttttataggcaaacaactcatacataaatgaccaagacaagatctcctttgacagaacttggatgagttacttttgttccctctgtgcccagggccttaggtatggtaacatacaccctgggggccaaaagcctagtgagtcgaaactcacctggaggtgggcctttacggccacttgtccattagtatgcattggatgctgtcctgtctgaactcatttatgtgtgcaagtcttgaacatgttgagtagacccccagaaggtactcattttatgaatctgatctgggacccatagtttggctttaccaggttatgggtttaaaattatgaaaaacatgtttgagcattttcccttttattccattgaaaattttatgtatggtgtgaaaa

SEQ ID NO: 898 - DNA, 721 bp, Enterovirus A
  source 1..721: mol_type = genomic DNA
ccacccacagggcccactgggcgctagcacactgattctacggaaactttgtgcgcctgttttatacccctccccaaatgagtaacttagaagtttaatatgttcatgaccaatagcaggcgtgacacaccagtcacgtcttggtcaagcactcctgtttccccggactgagtatcaataagctgctcacgcggctgaaagagaaaacgttcgttacccggctaactacttcgagaaacctagtaacaccatgaaagttgcagagtgtttcgttcagcacttcccccgtgtagatcaggtcgatgagtcactgcaaaccccacgggtgaccgtggcagtggctgcgttggcggcctgcccatggggtaacccatgggacgctctaatacagacatggtgcgaagagtctattgagctagttagtagtcctccggcccctgaatgcggctaatcctaactgcggagcacataccctcaatccagagggcagtgtgtcgtaacgggcaactctgcagcggaaccgactactttgggtgtccgtgtttccttttatctcattatggctgcttatggtgacaattgaagaattgttaccatatagctattggattggccatccggtgtctaacagagcaattgtatttctatttgttggatttgttcctttgtcgcacacatctctcaatactttatactacattataaagttaaatacaggaag

SEQ ID NO: 899 - DNA, 721 bp, Enterovirus B
  source 1..721: mol_type = genomic DNA
cccacccatagggcccactgggcgctagcacactggtatcacggtacctttgtgcgcctgttttatttaccctcccccaactgaaaattagaagccaaactcaaacggtcaataggaaacccagtgaaccaactgggctgcgaccaagcacttctgttaccccggactgagtatcaataggctgctcgcgcggctgaaggagaaaacgttcgttacccggccaattacttcgagaaacctagtaccaccatgaaagttgcgaaacgtttcactccgcacaaccccagtgtagatcgggtcgatgagtcaccgcattccccacgggtgaccgtggcggtggctgcgttggcggcccgcccatggggcaacccatgggacgcttcaatactgacatggtgtgaagagtctattgagctaattggtagtcctccggcccctgaatgcggctaatcctaactgcggatcagacacccacacgccagtgggcagtctgtcgtaatgggcaactctgcagcggaaccgactactttgggtgtccgtgtttctttttatccttatactggctgcttatggtgacaattgaaagattgttaccatatagctattggattggccatccggtatctaacagagctattatttacttatttgttggtttcgtacctctcagtatcagagttttgagaacacttaacttcatactactgctaaacactgcaag

SEQ ID NO: 900 - DNA, 722 bp, Enterovirus B
  source 1..722: mol_type = genomic DNA
ttaaaatagcctgtgggttgctcccacccacagggcccaagtggcgtagtacttggtattccggtacctttgtacacctatttacaaaccctaccccttgtaaccttagaagcaattatttaaccgctcactagggggtgtgctatccaagcacatcaagagcaagcacttctgtctccccgggaggggctaatggtacgctgtgcccacggcggaaatgagccctaccgttaaccggcagtctacttcgggaagcccagtaactacattgaaactttgaggcgttacactcagcacataaccccaatgtgtagttctggtcgatgagccttggcatcccccacaggcgactgtggccaaggctgcgttggcggccagcctgcggaccaaaagtccgtaggacgcctaattgtggacatggtgtgaagagcctactgagctagactgtagtcctccggcccctgaatgcggctaatcctaaccctggagcatccgcgtgcaacccagtacgtagggtgtcgtaatgcgtaagtctgggatggaaccgactactttgggtgtccgtgtttcttgtttttcatactgggtcgcttatggttacaactaattgttgtaatcattggcagtgcgcgctgaccacgcgattattgatatttccatttgttggatactccaatagtgtcaactcatatacacaacttttaccactgatcaagataaaa

SEQ ID NO: 901 - DNA, 723 bp, Hepatovirus G
  source 1..723: mol_type = genomic DNA
ttcaaaagtccctccgggaatttcccggaggacttttgggccaccattgcaaggggtggttttaaccttgcacgcgtttaccgtgcgttaacggttttccatgtttgtatgtcttgtttgtattatgtgttttgtaaatattaattcctgcaggttcagggttctttaatcatgttgggctgtacccacactcaacttttggccataagtgagtttcttaacgaaccttttaacacaggatgttattagggcccaatattttccctgaggccttctttggcctctattttttccccttttctatctccttgtattccgggctcacgtgatgccaatggactgacccatgcgcccgtgggggttaactactggagtagccagtagctgtaggtgctaaaagtcacgtacgtgtaagactggacgagacctctcagctataactgaaagtagtaagtatgtctgaacttcttgaaggggtaggctacgggtgaaaccccttaggttaatactcatattgagagatacctctgataggtgaaggtttccggtagaggtgagtttaacgacaaagcctctcaacggatgtgggcccacctcatcagcaagatgctttcatacccaataccgtaggggctgggttgttgagttcagtcccaagcgtccctcccgcaaggttgtaggggtactcaggggcatttaggtttccacaattaaacaaataca

SEQ ID NO: 902 - DNA, 723 bp, Enterovirus A
  source 1..723: mol_type = genomic DNA
ccacccacagggcccactgggcgttagcactctggtaccacggtacctttgtgcgcctgttttatccccccaaacccccgtaacactacactagaagatagacaatgcgaccaatagccagtggggcaacccagcctcaccttggtcaagcacctctgttttcccgggcttagtaccaataagctgctcgcgtggctgaaggggaacgcgctcgttatccggctaactacttcgagaaacctagtatcaccatggaagttgcagagtgtttcgatcagcacaaccccagtgtagatcaggccgatgagtcaccgtgtaccccacgggcgaccgtgacggtggctgcgttggcggcctgcccatggagtacaccatgggacgctctaatacagacatggtgcgaagagtctattgagctagttagtagtcctccggcccctgaatgcggctaatcctaactgcggagcacgcgctctcaacccagagagtagcgtgtcgtaacgggcaactctgcagcggaaccgactactttgggtgtccgtgtttctctttattcttacattggctgcttatggtgacaattgaaagattgttaccatatagctattggattggccatccggtgtgcaacagagctatcatatattcttttgttggctttgtgccactagattatactgcaattattactttaaggtatatcttgcttttgaacacagcaaa

SEQ ID NO: 903 - DNA, 723 bp, Enterovirus B
  source 1..723: mol_type = genomic DNA
ggttgcccacccacagggcccactgggcgctagcacactggtatcacggtacctttgtgcgcctgttttatccaccctccccaacgtaacttagaagcttatttaaaccgaccaacagacggtccagcataccagctgggttacggtcaagcacttctgttaccccggactgagtatcaataggccgctcgcgcggctgaaggagaaaacgttcgttacccggccaattacttcgagaaacctagtaccaccgtggaggtcgcgaagtgtttcgctccgcacaaccccagtgtagatcaggtcgatgagtcaccgcattccccactggcgacagtggcggtggctgcgtggcggcctgcccatggggtaacccatgggacgcttcaatactgacacggtgtgaagagtctattgagctaattggtagtcctccggcccctgaatgcggctaatcctaactgcggagcagatatccacgagccagtggacagtctgtcgtaatgggtaactctgcagcggaaccgactactttgggtgtccgtgtttccatttattcctatactggctgcttatggtgacaattgagagattgttaccatatagctattggattggccatccggtgacaaacagagcaattatatatctctttgttggttatattccactcaacattaaggttttaagaacgcttaattacatcctattgttaaacacattaag

SEQ ID NO: 904 - DNA, 723 bp, Enterovirus B
  source 1..723: mol_type = genomic DNA
ttcccactcacagggcccactgggcgctagcacactggtatcccggtacctttgtgcgcctgttttataccccctcctccaaccgtaacctagaagcagcaccatatggccaatagtagacgtggcgcaccagccacgttttggtcaagcacttctgtttccccgggccgagtatcaataggctgctcacgcggctgaaggagaaagcgtccgttacccggccaattacttcgagaaacctagtaccaccatggaagttgcgcggcgtttcgctccacacaaccccagtgtagatcgggtcgatgagtcaccgcatttccccacgggtgaccgtggcggtggctgcgttggcggcctgcccatgaggaaactcatgggacgcttcaatactgacatggtgtgaagagtctattgagctaattggtagtcctccggcccctgaatgcggctaatcctaactgcggagcagatgctcacaaaccagtgggtggtctgtcgtaatgggcaactctgcagcggaaccgactactttgggtgtccgtgtttccttttattttcacactggctgcttatggtgacaattgaaggattgttaccatatagctattggattggccatccggtgacaaacagagcgattgtctatctatttgttggttttgtaccattagatttcaaagtcctgaaaaccctcaatttcgtcttaacactcaattcggcaag

SEQ ID NO: 905 - DNA, 723 bp, unidentified
  source 1..723: mol_type = unassigned DNA; note = unclassified Enterovirus sequence
tgatcccacccatagggcccactgggcgccagcacactggtattacggtacctttgtgcgcctgttttatctaccccccccaacgcaactcagaagctcaactgaaccgaccaatagatgacccggcaagccagcagggccctggtcaagcacttctgttaccccggactgagtatcaataagctgctcgcgcggctaaaggagaaaacgttcgttacccggccaattacttcgagaaacccagtaccaccgtgaaagttgcgcagtgtttcgctccgcacaaccccagtgtagatcaggccgatgagtcaccgcattccccactggtgacagtggcggtggctgcgttggcggcctgcccatggggcaacccatgggacgcttcaatactgacacggtgcgaagagtctattgagctaattggtagacctccggcccctgaatgcggctaatcctaactgcggagcagatacccacgcgccagtgggcagtctgtcgtaatgggcaactctgcagcggaaccgactactttgggtgtccgtgtttccttttattcttatactggctgcttatggtgacaattgaaagattgttgccatatagctattggattggccatccagtgactaacaaagcaattgtctatctatttgttggttttataccattaaactacaaagctataagcacactcaaatttatattggtactcaactcagcaaa

SEQ ID NO: 906 - DNA, 724 bp, Enterovirus A
  source 1..724: mol_type = genomic DNA
ccacccgcagggcccactgggcgccagcactctgattctgcggaatctttgtgcgcctgttttataaccccttccccaaatttgcaatttagaagcaaagcacactaacgatcaacagcaggcgtggcataccagctacgtcacgatcaagcacttctgtttccccggactgagtatcaataagctgcttgcgcggctgaaggagaaaatgtccgttatccggctaactacttcgagaaacctagtagcaccattgaagctgcagagtgtttcgctcggcacttcccccgtgtagatcaggtcgatgagtcactgcactccccacgggcgaccgtggcagtggctgcgttggcggcctgcctatggggcaacccataggacgctctaatgtggacatggtgtgaagagtctattgagctagttagtagtcctccggcccctgaatgcggctaatcctaactgcggagcgcatgcccccaaaccagggggaggtgcgtcgtaatgggcaactctgcagcggaaccgactactttgggtgtccgtgtttccttttatctttatattggctgcttatggtgacaattgagagattgttaccatatagctattggattggccatccggtgagcaatagagcaattatttattcctttattggatttgtaccgttgaattatactgcttttattacactgaaacacatcctattgttgaacacaataaa

SEQ ID NO: 907 - DNA, 724 bp, Enterovirus C
  source 1..724: mol_type = genomic DNA
ggggttgttcccaccccagaggcccacgtggcggccagtacaccggtatcacggtacccttgtacgcctgttttatactcccttccccgtaacttagaagtaacaaacctatgttcaatagaagggggtacaaaccagtaccaccacgaacaagcacttctgtttccccggtgagatcacatagactgttcccacggttgaaagtgatcgatccgttatccgctcttgtacttcgagaagcctagtattatcttgggaccaacgatgcgttgcgatcagcactcgaccccagagtgtagcttaggtcgatgagtctggacattcctcaccggtgacggtggtccaggctgcgttggcggcctacctgtggcccaaagccacaggacgctagttgtgaacaaggtgtgaagagcctattgagctacatgagagtcctccggcccctgaatgcggctaatcctaaccacggagcaggcgattgcaaaccagcaattagcttgtcgtaatgcgtaagtctgtggcggaaccgactactttgggtgtccgtgtttccttttattttatcaatggctgcttatggtgacaatcatagattgttgtcataaagcgaattggattggccatccggtgacgttcagagttatttgtttgtgaaattcattctctcaatcctgtccacatttgacatacttccttaaatctttatacagaacaccttaacaca

SEQ ID NO: 908 - DNA, 724 bp, Enterovirus C
  source 1..724: mol_type = genomic DNA
caccccagaggcccacgtggcggctagtactccggtatcacggtacccttgtacgcctgttttatgctcccttccccttgtaacttagaagcaaacaacactagttcaataggagggggtacaaaccagtaccaccacgaacacgcacttctgtttccccggtgaagctgcataagctgttcccacggctgaaagcgactgatccgtcatccgctcaggtacttcgggaagcctagtaccatcttggaatcttcgatgcgttgcgctcagcactcaaccccagagtgtagcttaggctgatgagtctggatgtgcctcactggtgacagtggtccaggctgcgttggcggcctacccatggcccaaagccatgggacgctagttgtgaacaaggtgtgaagagcctactgagctacctgagagtcctccggcccctgaatgcggctaatcccaaccacggagcgagtgcccacaatccagtgagtggctcgtcgtaatgcgcaagtctgtggcggaaccgactactttgggtgtccgtgtttccttttaaccttattatggctgcttatggtgacaatcatagattgttatcataaagcgaattggattggccatccggtgaaagtcagaacgctaatttatctgtttgttggatacaccaaagttaactgcaatacactaaccttgattcgcatagtgttgttaattagatatcattaccaca

SEQ ID NO: 909 - DNA, 725 bp, unidentified
  source 1..725: mol_type = unassigned DNA; note = unclassified Sapelovirus sequence
tggggaggtgcctcctccccattgcagagtgctttgtcctacgggtcaagtacctgccgttgttggtgttcccacgggtgcagtcagcaaagcccccttttcgccccttccccctcacctaacctttttcccctctctttggcaagcgatgaaaggattacgagcaaggtttgcggaagaattgttatggcgattgcggaagaatatggattaaggattttccacgtaccttagatgatcataggtggctttcacctctggaccagtgatcaaacgtggaccatagtttaagtgaagtaagcatgttccaggtgaaaacgcatattgaaatgaacgtgtctgtagcgacctccaagtgcgcatggcctcccatgatggtgacatcatccatgcggaccaaaagtcaagtgtgcagtgacgtgcgaataatagactgtacccacggttgaagattcgcacggcatgagttcaccacttggagcggccgaccccgggccacacgggattggagatgtgcttgagtaatctggaagaggcttatataaacactctatgggggctgtgaagaatgccatgcaggtaccctcacacagaggatctgagcattgggccacggagacgatctataaactcgaagtggttgaaaagtatctaagcagcccgcaaggggcccatggttgggcccctctattttccccttattattttatcagtggtgacaatag

SEQ ID NO: 910 - DNA, 725 bp, Enterovirus A
  source 1..725: mol_type = genomic DNA
ttcccacccacagggcccactgggcgctagcacactgattctacggaaactttgtgcgcctgttttatacctcctccccgaagagtaacttagaagcttaacatacccatggccagcagcaggcgtgacataccagtcatgccccggtcaagcacttctgtctccccggactgagtatcaatagactgctcgcgcggttgaaggagaaaacgttcgttatccggctaactacttcgagaaacctagtaacaccatgaaagttgcagagtgtttcgttcagcacttcccccgtgtagatcaggtcgatgagtcactgcaaaccccacgggcgaccgtggcagtggctgcgttggcggcctgcccatgggaccacccatgggacgctctaatacagacatggtgtgaagagtctattgagctagttagtagtcctccggcccctgaatgcggctaatcctaactgtggagcacacgccctcaacccagggggtagtgtgtcgtaatgggcaactctacagcggaaccgactactttgggtgtccgtgtttccttttatctttatattggctgcttatggtgacaattgaagaattgttaccatatagctattggattggccatccggtgtctaatagagcaattgtatacctatttgttggatttgtccccttgtcatacacatctataaacaccctacaatatattgtaaaattgaatacaggaaa

SEQ ID NO: 911 - DNA, 725 bp, Enterovirus A
  source 1..725: mol_type = genomic DNA
ccacccacagggcccactgggcgttagcacactgattctaaggaatctttgtgcgcctgttttatatccctcccccccaaaagtgtaacgtagaagtttaatacactcacgaccaatagcaggcgtgacgcaccagtcacgtcttggtcaagtacttctgtctccccgggccaagtatcaatagactgcttacgcggttgaaggagaaaacgctcgttacccggctaactacttcgagaaacccagtagcaccatgaaagttgcagggtgtttcgttcagcacttcccccgtgtagaccaggtcgatgagtcactgcaaaccccacgggcgaccgtggcagtggctgcgttggcggcctgcccatggggtaacccatgggacgctctaatacagacatggtgtgaagagtctattgagctagttagtagtcctccggcccctgaatgcggctaatcctaactgcggagcacacaccctcaacccagggggcggtgtgtcgtaacgggtaactctgcagcggaaccgactactttgggtgtccgtgtttccttttatatttattatggctgcttatggtgacaattgaagaattgttaccatatagctattggattggccatccggtgtctaacagagcaattgtatacctatttgttggatttgtccctctgtcacacacacctctcaataccctatactatattatagagttgaatacaggaag

SEQ ID NO: 912 - DNA, 725 bp, Enterovirus A
  source 1..725: mol_type = genomic DNA
ttgctcccacccacagggcccactgggcgctagcaccctggtgccacggcacctttgtgcgcctgttttatcaccctaccccatatgaaacttagaagtaatacatagccgaccaatagcaggtgtggcgtgccagccacatcttggtcaagcacttctgtttccccgggtcgagtatcaataagctgttcacacggctgaaggagaaaacacccgttatccggccaactacttcgagaaacctagtaccaccatgaacgttgcaaggtgtttcgctcagcacttcccccgtgtagatcaggccgatgagtcaccgcataccccacgggtgaccgtggcggtggctgcgttggcggcctgcctatgggttaacccataggacgccttaatactgacatggtgcgaagagtctattgagctagttggtagtcctccggcccctgaatgcggctaatcctaactgcggagcacacactcacaaaccagtgagcggtgtgtcgtaacgggcaactctgcagcggaaccgactactttgggtgtccgtgtttccttttacctttatattggctgcttatggtgacaatcagagaattgttaccatatagctattggattggccatccggtgtctaatagagctattgtatatctgtttgttggattcactccgctgacctacaaatctctaaacaccttgtgctatattttgaatctaaatacacgaaa

SEQ ID NO: 913 - DNA, 725 bp, unidentified
  source 1..725: mol_type = unassigned DNA; note = unclassified Enterovirus sequence
ttaaaatagcctgagggttgttcccacccacagggcccacgtggcgcagtactctggtatcacggtacctttgcacgcctattttataccccttccccatcgtaacttagaagcaacaaacaaactgcccaatagcagcacaacacccagttgtgttaggggcaagcacttctgtttccccggaagggtctgacggtatgctgtacccacggcagaagtatgacctaccgttaaccggccatgtacttcgagaagcctagtaccattatgaaggttgattgatgttacgctccccagcaaccccagctggtagttctggtcgatgagtctcggcattccccacgggcgaccgtggccgaggctgcgttggcggccagcctacaccatacggtgtaggacgtcaagatactgacatggtgtgaagagcctattgagctacgtggtagtcctccggcccctgaatgcggctaatcctaactccggagcatccgccagtaagcccactggaagggtgtcgtaatgcgaaagtctggagcggaaccgactactttgggtgtccgtgtttcctgttttacttattgtttggctgcttatggtgacaacttatagttatcatcataagctacttggtcttgccaaccggagaattatttggttatttgttggtttcataaacctacagtcgtattttcctgtcttattaattgttctcaaaattaacaaca

SEQ ID NO: 914 - DNA, 725 bp, unidentified
  source 1..725: mol_type = unassigned DNA; note = unclassified Enterovirus sequence
ttcccaccctagaggcccacgtggcggctagtactctggtattacggtacctttgtacgcctgttttatattccttcccctatcgtaacttagaagtttcaaacacagctcaacagacagtagtacataccagtactgctacgagcaagcacttctgttaccccggtgaagtcacatagactgtgcccacggttgaaagtgactgatccgttacccgctttagtacttcgagaagcctagtaatatcttggaatcttcgatgcgttgcgctcaacactcaaccccagagtgtagcttaggtcgatgagtctggacactccccaccggcgacggtggtccaggctgcgttggcggcctacctgtggcccaaagccacaggacgctagttgtgaacaaggtgtgaagagcctattgagctactaaagagtcctccggcccctgaatgcggctaatcccaaccacggagcaagtgctcacaatccagtgagtggcttgtcgtaacgagcaattctgtggcggaaccgactactttgggtgtccgtgtttccttttatttttatcattggctgcttatggtgacaatctaagattgccatcatatagcttttggattggccatccggtgatattttgaattactcagcttgctgttcacagcactcttcaaatagtaattatttattaccacctgcagtttgttcttaaattgtctccagacagtcaaa

SEQ ID NO: 915 - DNA, 725 bp, unidentified
  source 1..725: mol_type = unassigned DNA; note = unclassified Enterovirus sequence
atcccacccacagggcccattgggcgctagcacaccggtattacggtacccttgtgcgcctgttttatacaccctacccccaaaacgtaatttagaagcaagtcaacaaagaccaatagcaagcacggcacaccagctgtgttttggtcaagcacttctgttaccccggactgagtatcaataggctactcacgtggctgaaggagaaaacgttcgttatccgtccaattacttcgagaagcctagtaacaccatagaggttgcgcagcgtttcgctccgcactaccccagtgtagatcaggtcgatgagtcaccgcattccccacgggtgaccgtggcggtggctgcgttggcggcctgcccatggggcaacccatgggacgcttcaatactgacatggtgcgaagagcctattgagctaattggaagtcctccggcccctgaatgcggctaatcctaactgcggagctggtacccacaaaccagtgggtggccagtcgtaacgggcaactctgcagcggaaccgactactttgggtgtccgtgtttcattttattcctatactggctgcttatggtgacaattgaaagattgttgccatatagctattggattggccatccggtgacaaataaagcgattgtttatcagttcattggtttcgtaccgctaaactacacaacattaaacaccctcaactttatcctattgctcaacacaacaag

SEQ ID NO: 916 - DNA, 726 bp, Enterovirus A
  source 1..726: mol_type = genomic DNA
gtacccaccctcagggcccactgggcgctagcactctgattctgcggaatccttgtgcgcctgttttataaccctcccccgattcgtaacttagaagcaatgagcctcactgatcaacagtaggcgcggcgcaccagccgtgtcttgatcaagcactcctgtttccccgggctgagtatcaatagactgcttgcgcggttgaaggagaaaacgctcgttacccggctaactacttcgagaaacctagtagcaccatcgaaattgcagagtgtttcgctcagcacttcccccgtgtagatcaggtcgatgagtcactgcaacccccacgggcgaccgtggcagtggctgcgttggcggcctgcctatggggcaacccataggacgctctaaaatggacatggtgtgaagagtctattgagctagttagtagtcctccggcccctgaatgcggctaatcctaactgcggagcgcatgcccccaaaccagagggtggtgcgtcgtaacgggcaactctgcagcggaaccgactactttgggtgtccgtgtttccttttattcttactatggctgcttatggtgacaattgaagaattgttaccatatagctattggattggccatccggtgtctaatagagctattgtatatttatttgttggatttgttccattgacatatacatcacttaatacattaaacttcattgtgagattaaacacaagaaa

SEQ ID NO: 917 - DNA, 726 bp, Enterovirus C
  source 1..726: mol_type = genomic DNA
ttaaaacagctctggggttgttcccaccccagaggcccacgtggcggccagtacaccggtatcacggtacccttgtacgcctgttttatactccctaccccgtaacttagaagcattgactcaagttcaatagtaggggtacaaaccagtaccaccacgaacaagcacttctgtttccccggtgatgtcgtatagactgtacccacggttgaaagtgacagatccgttacccgcttttgtacttcgagaagcccagtaccaccttggaatcttcgatgcgttgcgctcagcactcaatcccagagtgtagcttaggtcgatgagtctggacgttcctcaccggcgacggtggtccaggctgcgttggcggcctacctgtggcccaaagccacaggacgctagttgtgaacaaggtgtgaagagcctattgagctacaaaagagtcctccggcccctgaatgcggctaatcctaaccacggagcaggtgatcacaagccagtgattagcctgtcgtaatgcgcaagtctgtggcggaaccgactactttgggtgtccgtgtttccttttatttcatttatggctgcttatggtgacaatcatagattgttgtcataaagcgaattggattggccatccggtgagagtttagcgctttatttgtctgctcatcgaacttgcacttttgaattcttaccccttgcaccttattagacagtggtatcatc

SEQ ID NO: 918 - DNA, 726 bp, Enterovirus C
  source 1..726: mol_type = genomic DNA
gttcccaccccagaggcccacgtggcggccagtacaccggtattacggtacccttgtacgcctgttttatactccctaccccgtaacttagaagcaaaaactcaagttcaatagcaggggggtacaaaccagtaccaccacgaacaagcacttctgtttccccggtgacttcgcataaactgtacccacggttgaaagcgatagatccgttatccgcttttgtacttcgagaagcctagtaccatcttggaatcttcgatgcgttgcgatcagcactcaaacccagagtgtagcttaggtcgatgagtctggacgatcctcaccggcgacggtggtccaggctgcgttggcggcctacctgtggtccaaagccacaggacgctagttgtgaacaaggtgtgaagagcctattgagctacaaaagagtcctccggcccctgaatgcggctaatcccaaccacggagcaggcgatcacaacccagtgactagcctgtcgtaatgcgcaagtctgtggcggaaccgactactttgggtgtccgtgtttctctttattccattaatggctgcttatggtgacaatcatagattgttatcataaagcgattcggattggccatccagtgaaaatcaagtgtactactcacttatttattgagtttacaactctaacccatcactcactacaacccattttattgtgtcactatccagacagtggtatcatc

SEQ ID NO: 919 - DNA, 726 bp, Enterovirus B
  source 1..726: mol_type = genomic DNA
ttcccacccacaaggcccaccgggcgttggcacactggtatcacggtacctttgtgcgcctgttttaaaacccctacccccaaacgcaacttagaagataagcacacagtccaatagagggcgtggcactccagccatgtcttggacaggcactcctgttaccccggactaagtaccaataaactgctcacgcggttgaaggggaaaacgttcgttatccggctaactacttcgaggaacctagtaacaccgtgaaagttgcagagtgtttcgctcagcacaaccccagtgtagatcaggtcgatgagtcaccacgttccccacgggcgaccgtggtggtggctgcgctggcggcctgcctatgggtcaacccataggacgctctaacacagacacggtgtgaagagtcgattgagctagttagtagtcctccggcccctgaatgcggctaatcctaactgcggagcgtgcgtccccaaaccaggagatagcgcgtcgtaacgggcaactctgcagcggaaccgactactttgggtgtccgtgtttccttttttttacctctatttggctgcttatggtgacaattgaagaattgttaccatatagctattggattggccatccggtgactaatagagctattgtttacctctttgttggttttgtaccactgaacctcatagttctaaatacccttaatttgattttagtgcttaacacatcaaa

SEQ ID NO: 920 - DNA, 727 bp, Enterovirus D
  source 1..727: mol_type = genomic DNA
ttaaaacagctctggggttgttcccaccccagaggcccacgtggcggctagtactccggtaccccggtacccttgtacgcctgttttatactccctttcccaagtaactttagaagaaataaactaatgttcaacaggagggggtacaaaccagtaccaccacgaacacacacttctgtttccccggtgaagttgcatagactgtacccacggttgaaagcgatgaatccgttacccgcttaggtacttcgagaagcctagtatcatcttggaatcttcgatgcgttgcgatcagcactctaccccgagtgtagcttgggtcgatgagtctggacaccccacaccggcgacggtggtccaggctgcgttggcggcctacccatggctagcaccatgggacgctagttgtgaacaaggtgcgaagagcctattgagctacctgagagtcctccggcccctgaatgcggctaatcccaaccacggagcaaatgctcacaatccagtgagtggtttgtcgtaatgcgcaagtctgtggcggaaccgactactttgggcgtccgtgtttccttttatttttattatggctgcttatggtgacaatctgagattgttatcatatagctattggattagccatccggtgatatcttgaaattttgccataactttttcacaaatcctacaacattacactacactttctcttgaataattgagacaactcata

SEQ ID NO: 921 - DNA, 728 bp, unidentified
  source 1..728: mol_type = unassigned DNA; note = unclassified Enterovirus sequence
ttcccaccctagaggcccacgtggcggctagtactctggtattacggtacctttgtacgcctgttttatatccctttccccattgtaacttagaagtttcaaagtacagttcaatagacagtagtacaaaccagtactgctacgaacaagcacttctgttgccccggtgtagttgcatagactgtacccacggttgaaagcaactgatccgttatccgctttagtacttcgagaagcctagtagcaccttgggatcttcgatgcgttgcgctcagcactcaaccccagagtgtagcttgggtcgatgagtctggacattcctcaccggcgacggtggtccaggctgcgttggcggcctacctgtggcccaaagccacaggacgctagttgtgaacaaggtgtgaagagcctattgagctactaaagagtcctccggcccctgaatgcggctaatcctaaccacggagcaagtgctcacagtccagtgagtagcttgtcgtaatgagcaattctgtggcggaaccgactactttgggtgtccgtgtttccttttatttttatcattggctgcttatggtgacaatctaaggttgccatcatatagcttttggattggccatcccggtgatatttcgaattattcaatttgctgtttgcagctccttttaaacagtattcactcaccagcattcatattttactcttgagttattaacaaatagtcaaaa

SEQ ID NO: 922 - DNA, 729 bp, Aichivirus B
  source 1..729: mol_type = genomic DNA
attcccaaggcccactcggttcaacttcggtttccggacaaatataaagaacctcagtcctcttggtactttctcgcctgagtcaacaaagcgagaaacctgcccctccagcgccagacgagcggcataaaacttgaacttctggcatgctccaccacccttttccccattccaacccccattgcgctctcaaggtcgcgctttttcgagactagctcggattcaaaagttcctggcaccctttgccccttcaggcccttaaggtaggaactgaccttgtgctgtgccctcggtgcggaagtgctactgcgtagcgattgtaagatccctttgtggttctgccctggcaaggttatagagtactgtgatccgctgcggatgccatcctggtaacaggacccccagtgtgcgcaacagtatgttcacggtcttccgtgtccaccacattcggaacactgctctcgtgaaacagtgtgtgtccaatccctgcaatcagtatcaactacaccacctaggaatgctaggaaggtaccccggtccgccgggatctgatcctaggctaattgtctacggtggtgctcctttttattttccacttcaattcattggttacaactgctcgatccctgtgtttgctgcccttctctgctctcatcgccattctcaagtgttcacactgtccaagttcctttggttgttcgcttccacttgccactgtcaactcttgtc

SEQ ID NO: 923 - DNA, 729 bp, Enterovirus A
  source 1..729: mol_type = genomic DNA
gttgcacccacccacagggcccaccgggcgctagcactctgattttacgaaatctttgtgcgcctgttttatatccccttccctattcgtaacttagaagtaatgagcaacaacgatcaatagcaggcgtggcgcaccagccatgtcttgatcaagcacttctgttaccccggactgagtatcaatagactgctcacgcggttgaaggagaaaacgttcgttacccggctaaccacttcggaaaacctagtagcaccattgaagctgcagagtgtttcgctcagcacttcccccgtgtagatcaggtcgatgagtcactgcaacccccacgggcgaccgtggcagtggctgcgttggcggcctgcctatggggtaacccataggacgctctaatgtggacatggtgtgaagagtctactgagctggttagtagtcctccggcccctgaatgcggctaatcctaactgtggagcgcacactctcaaaccagggagcagtgcgtcgtaacgggcaactccgcagcggaaccgactactttgggtgtccgtgtttccttttatccttatattggctgcttatggtgacaatcacggaattgttgccatatagctattggattggccatccggtgtctaatagagctattgtgtacctatttgttggatttactccactgtcatataaatctctgaacactttgtgctttatattgaacttaaacacacgaaa

SEQ ID NO: 924 - DNA, 729 bp, Enterovirus C
  source 1..729: mol_type = genomic DNA
ttaaaaacagctctggggttgttcccaccccagaggcccacgtggcggctagtactctggtattacggtacctttgtacgcctgttttatatcccctttcccctgtaactcagaagcatgaagtttaagctcaacaggaggggtgcaaaccagcacctctacgagcaagcactactgtttccccggtgaagttacatagactgttcccacggttgaaagtgattgatccgttatccgctcatgtacttcgagaagcctagtatcgctctggaatcttcgatgcgttgcgctcaacactcgaccccggagtgtagcttaggccgatgagtctggacattccccactggcgacagtggtccaggctgcgttggcggcctacctgtggtccaaagccacaggacgctagttgtgaacagggtgtgaagagcctattgagctgcatgagagtcctccggcccctgaatgcggataatcctaaccatggagcaggcaactgcaacccagcagtcagcctgtcgtaacgcgtaagtccgtggcggaaccgactactttgggtgtccgtgtttccttttatttttgaatggctgcttatggtgacaatcacagattgttatcataaagcaaattggattggccatccagtgaatcactaccgagtttgttaaatctatttcagagacacacaactcctcaacgcactatacctaaacagaggattatactacagcg

SEQ ID NO: 925 - DNA, 729 bp, Enterovirus B
  source 1..729: mol_type = genomic DNA
catgctcccacccatagggcccactgggcgtcagcacactggtattgcggtacctttgtgcgcctgttttatccaccccaccccctcaacgtaacttagaagcacatcccacacggtcaatagttggctcgataagccaatcgagtctggatcaagcacttctgttaccccggactgagtatcagtaagctgcttgcgcggctgatggagaaaacgttcgttacccggccatttacttcgggaaacctagtaccaccatgaatgttgcgcagcgtttcgctccacactaccccagtgtagatcaggtcgatgagtcactgcataccccacgggcgaccgtggcagtggctgcgctggcggcctgcccatggggcaacccatgggacgcttcaatactgacatggtgcgaagagtctactgagctaagtggtagtcctccggcccctgaatgcggctaatcctaactgcggagcagatacccacgaaccagtgggcagtctgtcgtaatgggcaactctgcagcggaaccgactactttgggtgtccgtgtttccttttattctaatactggctgcttatggtgacaattgaacgattgttaccatatagctattggattggccatccggtgacaaacagagcgattatatactcatttgttgggttcgtaccacttaattacaaagttctaaacacccttaactatatactagcactcaacacatcaaa

SEQ ID NO: 926 - DNA, 730 bp, unidentified
  source 1..730: mol_type = unassigned DNA; note = unclassified Hepatovirus sequence
ttcaaaggcggtgtcccggattgtttccgggccgcctttgggcaaccatgatgaggggttgtaaatcacctcatccccgtttgcctagggtgataggctttttatgttttatgtttgttggtctagttcgtcaattgtaaatattgatttctgcaggttcagagttcttaattatgttcctctataaggacactctctttaagtctaggccataagtgatcctagagataggtgaacctttcatatctggtctatgttagggcctttatatccctaggggcaatctttgtgccccttatttctcctatctttcttcttttcttccgggctctcacggtgccaatggaacgaccggtgcgcccgccggggttaactccaagattagcttggagctgtagttgctaaaagccgtgatgaaggaagcagactatcaagttagttaggtgttaactgaaacatgaattctattatgatctttgtgagtgggtaggctacgggtgaaacccactaggttaatactcatattgagagatacctccattaggctaaggttggcggtaaaggtgagtttaacgacgtatcctttcaacgcctgtgggccggtctcaatggcacaatgcgtagtagatgaagtgtgtagggcctactaaggagatgctctgtggaattcaccctcccgaaaggtcgtaggggtactcaggggcatttaggtttccacattttaaatttc

SEQ ID NO: 927 - DNA, 730 bp, Enterovirus A
  source 1..730: mol_type = genomic DNA
tttaaaacagcctgtgggttgtacccactcacagggcccacgtggcgttagtactctggtatcacggtacctttgtatgcctgttttatctcccttcccccgtaacgttagaagaataaacaaatgacaactagcaaatccaccaacccaggtgggttttcgtcaagcacttctgtttccccggacttagtaccaataggctgtacccacggctgaaggggaaaatgttcgttacccggctacctacttcgaaaagcctagtaccaccaatgattgtctcaagtgttacgttcagcacaaccccagtgtagttcaggccgatgagtcaccgaattccccacgggcgaccgtgtcggtggctgcgttggcggcctgcctgcgggtttcacccgcaggacgcttgattcatgacatggtgcgaagagcctattgagctaggtagtagtcctccggcccctgaatgcggctaatcctaaccacggagcattcactggcaaaccagccagcagaatgtcgtaatgggtaactctgtggcggaaccgactactttgggtgtccgtgtttcctgttttacttattttggctgcttatggtgacaatttacggattgttaccatatagctattggattggccatccggattattgcaatactactatttgtgggatttctccctttgtgttataataactaccccattctaacattagctctcaagtttaatacact

SEQ ID NO: 928 - DNA, 730 bp, Enterovirus A
  source 1..730: mol_type = genomic DNA
tgcacccacccacggggcccactgggcgccagcactctgattctacggaatccttgtgcgcctgttttataaccccccccctcaattaggtaacatagaagttagaaacatatatggccaatagcaggcgtggcgcaccagtcgcgtctcggtcaagcacttctgtttccccggactgagtatcaataagctgctcgcgcggctgaaggagaaaacgttcgttatccggctaactacttcgagaaacctagtagcaccatgaaagttgcggagtgtttcgctcagcacttcccccgtgtagatcaggtcgatgagtcactgcattccccacgggcgaccgtggcagtggctgcgttggcggcctgcctatggggtaacccataggacgctctaatacggacatggtgcgaagagtcaattgagctagttagtagtcctccggcccctgaatgcggctaatcctaactgcggagcacataccctcaatccagggggcggtgtgtcgtaatgggcaactctgcagcggaaccgactactttgggtgtccgtgtttccttttattcttatattggctgcttatggtgacaattgagagattgttaccatatagctattggattggccatccggtgtccaacagagctctggtttacttgttcgttggctttatacctctgtcacccacagtttattcaactctagtgttcttaatacgccttaacagtaagag

SEQ ID NO: 929 - DNA, 730 bp, Enterovirus A
  source 1..730: mol_type = genomic DNA
gttgcacccacctacagggcctactgggtgctagcactctgattctacggaatctttgtgcgcctgttttataaccccctccccaatttgtaacttagaagcaatgaaccccatcgatcaatagcaggcataacgcaccagttatgtctcgatcaagcacttctgttttcccggactgagtatcaatagactgcttgcgcggtcgaaggagaaaacgttcgttacccggctaactacctcgagaagcctagtagcaccactgaaactgcagagtgtttcgttcaacacttcccccgtgtagatcaggtcgatgagtcactgctctccccacgggtgaccgtggcagtggctgcgttggcggcctgcctatggggtaacccataggacgctctgaagtggacatggtgtgaagagcctattgagctagttagtagtcctccggcccctgaatgcggctaatcctaactgtggagcgcatgccctcaaaccagggggtggtgcgtcgtaacgggtaactccgcagcggaaccgactactttgggtgtccgtgtttccttttattatcctattggctgcttatggtgacaattaaagaattgttaccatatagctattggattggccatccggtgtgtaatagagcgattatctacctatttgttggatacattccgttaacattcaaatctctcaacacattatactacattctgaccttgaacacaagaaa

SEQ ID NO: 930 - DNA, 730 bp, unidentified
  source 1..730: mol_type = unassigned DNA; note = unclassified Enterovirus sequence
ggggttgttcccaccccagaggcccacgtggcggctagtacactggtatcacggtacctttgtacgcctgttttatactccttcccccgcaatttagaagcatacaattcaagctcaataggagggggtgcaagccagcgcctccgtgggcaagcactactgtttccccggtgaggccacatagactgttcccacggttgaaagtgtccgatccgttatccgctcatgtacttcgagaagcctagtatcgctctggaatcttcgacgcgttgcgctccacactcagtcccagagtgtagcttaggctgatgagtctggacattcctcaccggcgacggtggtccaggctgcgttggcggcctacctgtggcccaaagccacaggacgctagatgtgaacaaggtgtgaagagcctattgagctataagagagtcctccggcccctgaatgcggctaatcccaaccatggagcaggcagccgcaatccagcagccagcctgtcgtaacgcgcaagtctgtggcggaaccgactactttgggtgaccgtgtttccttttattatttcaatggctgcttatggtgacaatcatagattgttatcataaagcgagttggattggccatccagtgtgaatcggattatttactcccttgtttgttggattcactcccgaaacgttttaccccttaacttattgaaattgtttgaagacaggatttcagtgtcaca

SEQ ID NO: 931 - DNA, 731 bp, unidentified
  source 1..731: mol_type = unassigned DNA; note = unclassified Salivirus sequence
gtgtttctcccccctttcgaccgccctatggcaggcgggcttgtggacggcttcggcccacccacagcaagaatgccatcatctgtcctcacccccatcttcccctttcttcccctgcaaccgtcacgcttactcacatgtgcattgagtggtgcacgtgttgaacaaacagctacactcacatggggcgggttttcccgccttgcggcctctcgcgaggcccacccctccctctcctcccataactacagtgctttggtaggtaagcatcctgatcccccgcggaagctgctcacgtggcaactgtggggacccagacaggttatcaaaggcacccggtctttccgccttcaggagtatccctgctagtgaattctagtagggctctgcttggtgccaacctcccccaaatgcgcgctgcaggagtgctcttccccaactcaccctagtatcctctcatgtgtgtgcttggtcagcatatctgagacgatgttccgctgtcccagaccagtccagtaatggacgggccagtgtgcgtagtcgtcttccggcttgcccggcgcatgtttggtgaaccggtggggtaaggttggtgtgcccaacgcccgtactttggtgatacctcaagaccacccaggaatgccagggaggtaccccgcttcacagcgggatctgaccctgggctaattgtctacggtggttcttcttgcttccacttctttctactgttt

SEQ ID NO: 932 - DNA, 731 bp, unidentified
  source 1..731: mol_type = unassigned DNA; note = unclassified Enterovirus sequence
ttaaaatagcctgagggttgctcccacccacggggtccacgtgacgtagtactctggtatctcggtacctttgtacgcctattttatatccccttccccctttgtaacttagaagaaataagcaaactgcccaatagcggcacaatacccaattgtgttacgggcaagcactcctgtttccccggaagggtctatcggtatgctgtacccacggcagaagtatgacctaccgttaaccggccatgtacttcgagaagcctagtaccaccatgaaggttgattgatgttacgttccccagcaaccccagctggtagttctggtcgatgagtctcggcatcccccacgggcgaccgtggccgaggctgcgctggcggccagcctacacctctttggtgtaggacgtcaagatattgacatggtgtgaagagcctattgagctacgtggtagtcctccggcccctgaatgcggctaatcctaactccggatcgtccgctggcaatcccgccagaagggcgtcgtaatgcgcaagtctggagcggaaccgactactttgggtgtccgtgtttcctgttttatttactgtttggctgcttatggtgacaacttatagttatcatcataagctacttggtcttgccaaccggagaataatttggttatttgttggttttacaaacctacaagagtcagtactcatcctattaattgttctaagaataaacacacaag

SEQ ID NO: 933 - DNA, 732 bp, Hunnivirus A
  source 1..732: mol_type = genomic DNA
tcgcccctcctttccccccttattttcccttttccctctctccctccctttgtaacttaacgtttggcaagaaccctcacctgtcaattgggaccaccactttcagtgaccccatgcgaagtagtgagagagaataagctttcttacccttcatttgtgaacccttcagtcgaagccgcttggaataagataggaggaaaagttcattctaaatggagtgaaacatgtacttcagaatttctagcacgcgctgggctttcttgcgtgtgacggcactgtcttgccggagctctccacactgacaccccacgcttgtggaccttggtggcagatgacaacactgcagctggaattgagtgtctggtacactctgtgtaacagtgaaaacaatgtgatcacttcggtgagctagtagcctgtggaccaacaactggtaacagttgcctcaggggccaaaagccacggtgtttacagcaccctactggtttgattggagcaatccaagatgtcacagagttagtaattgccaagcagtccgtactggtatcttgacataccgtgcagttttggatagtgaaggatgccctgacggtacccataggtaacaagtgacactatggatctaagcaggggctcactctacgctgctttacagctggctgtgagttaaaaaacgtctagctatccacaacctaggggactaggttttccttttatttagattacaattat

SEQ ID NO: 934 - DNA, 732 bp, Enterovirus C
  source 1..732: mol_type = genomic DNA
ttaaaacagctctggggttgttcccaccccagaggcccacgtggcggctagtacaccggtattgcggtacccttgtacgcctgttttatactcccttttccctgtaacttagaagaaacaaaccaagttcaatagaagggggtacaaaccagtaccaccacgaacaagcacttctgtttccccggtgatgttgcatagactgtacccacggttgaaagcgattgatccgttacccgctcttgtacttcgagaagcctagtatcatcttggaatcttcgatgcgttgcgctcagcactcaaccccagagtgtagcttaggtcgatgagtctggacattcctcaccggcgacggtggtccaggctgcgttggcggcctacctgtggcccaaagccacaggacgctagttttgaacaaggtgtgaagagcctattgagctacatgagagtcctccggcccctgaatgcggctaatcccaaccacggagcaagggtgcacatgccagtgtataccttgtcgtaacgcgcaagtctgtggcggaaccgactactttgggtgtccgtgtttccttttatttttacattggctgcttatggtgacaatcgaagattgttatcataaagcgagttggattggccatccggtgaaagtaaagcatattatttacttggttgttgggattataccactcaatccttttactaacaatacgaggataaaacaacaatactaca

SEQ ID NO: 935 - DNA, 732 bp, Enterovirus B
  source 1..732: mol_type = genomic DNA
tgtgggttgttcccacccacagggcccactgggcgctagtacactggtaccaaggtacctttgtacgcctgttttataccccctccccgatccgaaacttagaagtaaagcaaacccgatcaatagtaggtgcgacactccagtcgtatctcgatcaagcacttctgtttccccggactgagtatcaatagactgcccacgcggttgaaggagaaaacgtccgtcatccggctaactacttcgagaaacccagtagcaccatggaagttgcagagtgtttcgctcagcactaaccccgtgtagatcaggctgatgagtcaccgcattccccacgggtgaccgtggcggtggctgcgttggcggcctgcctatggggcaacccataggacgctctaatacggacatggtgtgaagagtctattgagctagttagtaatcctccggcccctgaatgcggctaatcctaactgcggagcacatactcctactccaaggagcagtgtgtcgtaacgggcaactctgcagcggaaccgactactttgggtgtccgtgtttcctattaacatatcactggctgcttatggtgacaattgaaagattgttaccatatagctattggattggccatccggtgtcaaacagagcaatagtgtacctattcgctgggtttatcccattgactgttaaagatatacaaactctctacttgataatacaactaaacactgtaaa

SEQ ID NO: 936 - DNA, 732 bp, unidentified
  source 1..732: mol_type = unassigned DNA; note = unclassified Enterovirus sequence
ctgtgggttgttcccactcacagggcccactgggcgttagcacactggtattgcggtacctttgtgcgcctgttttatccaccctttccccatagtaacttagaagtacgttcaaatggtcaataggcggctcagtataccaactgagtctcgaccaagcacttctgttaccccggaccgagtatcaataagctactcacgtggctgaaggagaaaacgttcgttacccggccaactacttcgagaaacctagtaccaccatggatgttgcgcggcgtttcgctccgcactaccccagtgtagatcaggtcgatgagtcaccgcattcctcacgggcgaccgtggtggtggctgcgctggcggcctgcccatggggcaacccatgggacgcttcaatacagacatggtgtgaagagtctattgagctagttggtagtcctccggcccctgaatgcggctaatcctaactgcggagcagatccccacacaccagtgggcagtctgtcgtaatgggtaactctgcagcggaaccgactactttgggtgtccgtgtttccttttattcttatactggctgcttatggtgacaattgaaagattgttaccatatagctattggattggccatccagtgtctaacagagcaataatctatctttttgttggattcgtcccacttgactacagagcacttgcaacgctcaattacattatagatctcaacacaacgaa

SEQ ID NO: 937 - DNA, 733 bp, unidentified
  source 1..733: mol_type = unassigned DNA; note = unclassified Enterovirus sequence
cttgtacccactcacagggcccactgggcgctagcactctgattccacggaatctttgtgcgcctgttttataaccccttccccaacttgaaacgtagaagcaatacacataaccgatcaatagcaggcgtgacgcaccagtctcgtctcgatcaagcacttctgtttccccggaccgagtaacaatagactgctaacgcggttgaaggtgaaaacgttcgttatccggctaactacttcgagaagcccagtaacactatgaaagctgcggagcgttacgttcagcactcccccccgtgtagttcaggccgatgagtcactgcgatccctacgggcgaccgtagcagtggctgcgctggcggcctgcctatggggcaacccataggacgctctaaagtggacatggtgcgaagagctaattgagctagttagtagtcctccggcccctgaatgcggctaatcctaactgcggagcgcacgcctccaacccagggggtggtgcgtcgtaacgggcaactctgcagcggaaccgactactttgggtgtccgtgtttccttttattcttatattggctgcttatggtgacaatcacagagttgttaccatatagctattggattggccatccggtgtgcaacagagctatcatttatctatttataggttttgtaccattaactttgagatctacgaccaccctagagtacatattggttttaaattcaattagac

SEQ ID NO: 938 - DNA, 733 bp, Enterovirus B
  source 1..733: mol_type = genomic DNA
ctgtgggttgttcccacccacagggcccactgggcgccagcactctgattccacggaatctttgtgcgcctgttttacaaccctccccaatttgtaacgtagaagcaatacacactactgatcaatagtaggcatggcgcgccagtcatgtcatgatcaagcacttctgttccccggactgagtatcaatagactgctcacgcggttgaaggagaaaacgttcgttacccggctaactacttcaagaaacctagtagcaccatggaagctgcggagtgtttcgctcagcacttcccccgtgtagatcaggtcgatgagtcactgcaatccccacgggcgaccgtggcagtggctgcgttggcggcctgcctatggggtaacccataggacgctctaatgtggacatggtgcgaagagtctattgagctagttagtagtcctccggcccctgaatgcggctaatcctaactgcggagcacatgccttcaacccaggaggtggtgtgtcgtaacgggtaactctgcagcggaaccgactactttgggtgtccgtgtttccttttatccttatattggctgcttatggtgacaatcacggaattgttgccatatagctattggattggccatccggtgtctaacagagctattgtatacctatttgttggatttgtaccactaaattacaaggttttaaacactctcaaccttataatactactcaactcagcaaa

SEQ ID NO: 939 - DNA, 733 bp, Enterovirus D
  source 1..733: mol_type = genomic DNA
ttaaaacagccttggggttgttcccacctcaagggcccacgtggcggccagtactctggtatctcggtacctttgtacgcctgttttaattccctccccaacgtaacttagaagcttttaaaccaaagctcaataggcggagcgcaaaccagcgctcttatgagcaagcacttctgtctccccggtgtggttgtatagactgtccccacggttgaaaacaacttatccgttaaccgctatagtacttcgagaaacctagtattgccttcggagtgtcgatgcgttgcgctcagcacactaacccgtgtgtagcttgggtcgatgagtctggacgtaccccactggcgacagtggtccaggctgcgttggcggcctactcgtggtgaaaaccatgagacgctagacatgaacaaggtgtgaagagtctattgagctactatagagtcctccggcccctgaatgcggctaatcctaaccatggagcaagtgctcacaaaccagtgggttacttgtcgtaatgcgcaagtccgtggcggaaccgactactttgggtgtccgtgtttcactttttacttttatgactgctaatggtgacaatttaatattgttaccatttggcttgtcgaattgatcacataagatctatagttttgttcactgatttgctttcaaataatctcacctcaaaacctccagtacataacatttaaagagtttaaacttatttataaca

SEQ ID NO: 940 - DNA, 734 bp, unidentified
  source 1..734: mol_type = unassigned DNA; note = unclassified Picornaviridae sequence
ctccagcacatgtctattggtgcacttgagctgatccaagcaacggatgtacacacccggttcactaacactttcgcgacagctacccctcactgggaccggttcacaacaacgggccacggggttgcccccggtggtacggcacgtctggaataccggcaatgtgtaccacacactcaggtgagactgccactacttgagttagctactaggagtagccgcacccgccgaatgtcacaacccgcgcagttctgcattcccccgcacctggcggggagctggatggtgttgtaatgctcaccaccgctaatccgggaatcctaggactgacctgttgtgttttagacctcaagaagttaatcactacgagatcgcctagtgcccagttcgcgcgctggagcaggacccaccacggcctttgtgatgggggaatgcagaactgcgcgggttgtgacattcggcgggtgcggctactcctagtagctaactcaagtagtggcagtctcacctgagtgtgtggtacacattgccggtattccagacgtgccgtaccaccgggggcaaccccgtggcccgttgttgtgaaccggtcccagtgaggggtagctgtcgcgaaagtgttagtgaaccgggtgtgtacatccgttgcttggatcagctcaagtgcaccaatagacatgtgctggaggtacccgtaaggatctgaccagtagctaattagtccctgttggtgt

SEQ ID NO: 941 - DNA, 734 bp, unidentified
  source 1..734: mol_type = unassigned DNA; note = unclassified Orivirus sequence
ttctctcccccctctgggccgccatccttggccagaaaccctcacgagtgcttgtggtaggtcccaggccaatattcttcgtaaggcttggttccaattttccaccactcgtgtttgggttctggcctatggtacccagaggggcggtttgggggaattaactccccctcccctgtggtcctataccaccccacacctctgtgggctttctttactatcttcttgttttccgacttttaaacactaggcaggcgcgcctagtcatacaccgcccggctggtctttccagctcttgtgggcggtgcgcgctggtccatcgtgcccagcgacatagcaccttgtggacacctccgaacgccctcccctgtatggggtggtgcccaggggtttcagtgtggtgacacactccctggggcccgaaaggctagtgtgcaacaggtgaggtacagccagctgcccccgtggctggagggaccaagcttgtgaagcacacctcaccttcttgggggtgggctagtaagtggtgaaagcatagtgtccgtgtcgctggccaacactttgggtcaagtccagccactcagtgagtagatgcccaggaggtacccctagtggatctgacttggggcctgttacttaatgcaggttaaaaactatgaaagctgagtagtgtagcccggctggtggcttctcttccttattcattctattttatggtgacaaacgcaactgaagcc

SEQ ID NO: 942 - DNA, 734 bp, Enterovirus A
  source 1..734: mol_type = genomic DNA
gcctgtgggttgtacccacccacagggcccactgggcgctagcactctggcaccacggtacctttgtgcgcctgttttatcaccctaccccattcggaacttagaagcaatacacaaccgaccaatagtgggtgtggcacaccagccgcatcttggtcaagtacttctgtttccccgggttgagtatcaataagctgctcacacggctgaaggagaaaacacccgtcacccggccaactacttcgagaaacctagtaccactatgaatgttgcaaggcgtttcgctcagcacttcccccgtgtagatcaggtcgatgagtcaccgcattccccacgggcgaccgtggcggtggctgcgttggcggcctgcctatgggttaacccatgggacgccttaatactgacatggtgcgaagagtctattgagctagttggtagtcctccggcccctgaatgcggctaatcctaactgcggagcacatactcacaagccagtgagcggtgtgtcgtaacgggtaactctgcagcggaaccgactactttgggagtccgtgtttccttttatccttatattggctgcttatggtgacaattggagaattgttaccatatagctattggattggccatccggtgtctaatagagctattatatacctatttgttggatttactccactaacacacaaatccctaaacactttgtgctttatcttaaacttaaatacacgaaa

SEQ ID NO: 943 - DNA, 734 bp, Enterovirus C
  source 1..734: mol_type = genomic DNA
gggggttgttcccaccccagaggcccacgtggcggctagtactccggtatcacggtacccttgtacgcctgttttatacccccttcccccgtaacttagaagcaataatccaagttcaatagaagggggtacaaaccagtaccaccacgaacaagcacttctgttaccccggtgaagttgtatagactgtgcccacggttgaaagcgaccgatccgttatccgctcttgtacttcgagaagcccagtatcatcttggaatcttcgatgcgttgcgctcagcactcaaccccagagtgtagcttaggtcgatgagtctggacggtcctcaccggtgacggtggtccaggctgcgttggcggcctacctgtggtccaaagccacaggacgctagttgtgaacaaggtgtgaagagcctattgagctacatgagagtcctccggcccctgaatgcggctaatcctaaccacggagcaagtgctcacaacccagtgagtggcttgtcgtaacgagcaattctgtggcggaaccgactactttgggtgtccgtgtttcctttattttattatatggctgcttatggtgacaatcattgattgttatcataaagcgagttggattggccatccggtgaaagtaaagcacattatttatctttttgttggatttactccattgagtgtttttactccagacgtgattcgagcagtcttattgattagaagcatctgccaca

SEQ ID NO: 944 - DNA, 734 bp, Enterovirus C
  source 1..734: mol_type = genomic DNA
ttaaaacagctctggggttgttcccaccccagaggcccacgtggcggctagtacaccggtattacggtacccttgtacgcctgttttatactccctcccccccgtaacttagaagtacaaaactcaagttcaataggagggggtacaaaccagtaccaccacgaacgagcacttctgtctccccggtgaggttacatagactgtccccgcggttgaaagtaaccgatccgttatccgctcttgtccttcgagaagcccagtaccatcttggaatcttcgatgcgttgcgctcaacactcaaccccagagtgtagcttaggtcgatgagtctggacactccccaccggcgacggtggtccaggctgcgttggcggcctacctgtggcccaaagccacaggacgctagttgtgaacaaggtgtgaagagcctattgagctacaagagagtcctccggcccctgaatgcggctaatcccaaccacggagcaggtgacttcaagccagaagttggcctgtcgtaacgcgtaagtctgtggcggaaccgactactttgggtgtccgtgtttccctttattcttacaatggctgcttatggtgacaatcatagattgttatcataagccgaattggattggccatcgggtgagaatcagatcagttacttacctgtttgttggattcactccgttgacactttacatactaacccttgtcaatacacctgtattatcata

SEQ ID NO: 945 - DNA, 734 bp, Enterovirus B
  source 1..734: mol_type = genomic DNA
gcctgtgggttgttcccacccacagggcccactgggcgttagcacactggtattccggtacctttgtgcgcctgttttatccaccctccccaatgtaacgtagaagctacgctcaaacggtcaacagatagtccagtaatccagctgggccacgaccaagcacttctgtttccccggacagagtaccaataagctgctcgcgcggctgaaggggaaaacgttcgttacccggccaattacttcgagaaacctagtaccgccatggacgttgcgcagcgtttcgctccacacaaccccagtgtagatcaggtcgatgagccaccgcattccccacgggcgaccgtggcggtggctgcgttggcggcctgcccatggggtaacccatgggacgcttcaatacagacatggtgcgaagagtctattgagctaattggtagtcctccggcccctgaatgcggctaatcctaactgcggagcaggtacccacaacccagtgggtcacctgtcgtaatgggcaactctgcagcggaaccgactactttgggtgtccgtgtttccttttaacctttacactggctgcttatggtgacaattgaaagattgttaccatatagctattggattggccatcctgtgagtaatagagcgattgtatacttatttgttggctttataccactcaatttgaaagctttacagacactgaattatattgtggcattaaacacagcaaa

SEQ ID NO: 946 - DNA, 734 bp, Enterovirus B
  source 1..734: mol_type = genomic DNA
cctgtgggttgtccccactcacagggcccactgggcgccagcacactggtatcaaggtacctttgtgcgcctgttttatagccccttccccgaatgtaacgtagaagctgaacccaagcggtcaacaggcggctcagaacaccatctgggtcttgaccaagcacttctgttaccccggactgagtatcaataagctgctcacgcggctgaaggagaaaatgttcgttatccggccaattacttcgagaaacctagtaccaccatgaaggttgcgcagtgtttcgctccgcacaatcccagtgtagatcaggtcgatgagtcaccgcgttcctcacgggcgaccgtggcggtggctgcgctggcggcctgcccatggggcaacccatgggacgcttcaatactgacatggtgcgaagagtcaattgagctaattggtagtcctccggcccctgaatgcggctaatcctaactgcggagcagatgcccaagctccagtgggtagtctgtcgtaacgggtaactctgcagcggaaccgactactttgggtgtccgtgtttccttttattcttacattggctgcttatggtgacaattgagaaattgttgccatatagctattggattggccatccggtgacgaatagagcaattgtgtatctttttgttggattcataccactagataatacaaacttcaaaaccttgtgttacatcattaggttaaacacagcaag

SEQ ID NO: 947 - DNA, 735 bp, Aichivirus A
  source 1..735: mol_type = genomic DNA
ggggggcctcggccccctcaccctcttttccggtggtctggtcccggaccaccgttactccattcagcttcttcggaacctgttcggaggaattaaacgggcacccactcacccccatctccccctgtaacttgaagtgtgtgctcgtgaccttgactcctgcgggcttcaccgacccgtccagtgaacaaactgctaggtgatttcttcccctcccctagcctggatgttccacatccaggtcttcttcccccagcccgacatgtcatgggctgtttggaatccccgcgaaagctgctaacgtggcaattgtgggtcccccttccaacaagacaccgagtctttctcccttaaggctagccccgtgtggtgaattccaccgggcaactagtggtgtcaatgcatgcctccgacctcggccgcggagtgctgccccccaagttgcgaaactgaccaaggattgtgctgcctggcaagcatagtctgaggagatgttccgctgtggttgccaaacctggtaacaggtgccccagtgcgcgtagtctccttccggttcgtccggctgtcctttggtaaagacacaatgtaaggggcgtgtgccaacgccctggaaagagtgaacttctactgccctaggaatgccacgcaggtacccctggtttcttaccagggatctgagcgtgggctaattgtctaacgggtagtttcatttccctcccttcttttgttgacatc

SEQ ID NO: 948 - DNA, 735 bp, unidentified
  source 1..735: mol_type = unassigned DNA; note = unclassified Kobuvirus sequence
gggtgggggggtgtcggccccctcaccctcttttccggtggtctggacccggaccaccgttactccattcagcttcttcggaacctgttcggaggaattaaacgggcacccactttcctgtcctctccccttttctgtaactccaagtgtgtgctcgtaatcttgactcccgcggattgaccgctccgctggtgaacaaactgctaggtcatctcctccccacccttgggcgtccttccgggcgtccacaccctccccccagcctgacgtgtcacaggctgtacaaagaccccgcgaaagctgctaacgtggcaattgtgggtcccccctttgtaaaggaaccgagtctttctcccttaaggctagacccctgtgtgaattcacaggtggcaactagtggttccactgcatgctcccgacctcggccgcggagtgctgttccccaagtcgtaacactgaccttcacttatgtgcctggcaagcatatctgagaagatgttccgctgtggctgccaaacctggtaacaggtgccccagtgtgcgtagtcttcttccgtcttcggacggtaggtgttaggtaaagatgcggcgtaaggttcaagtgccaacgccctggaagggatgacccttctactgccctaggaatgccgcgcaggtaccccaggttcgcctgggatctgagcgcgggctaattgtctacgggtagtttcatttccctcttcttccactggcatc

SEQ ID NO: 949 - DNA, 735 bp, Enterovirus B
  source 1..735: mol_type = genomic DNA
cttgtgggttgttcccacccacaaggcccactgggcgctagcacactggtattacggtacccttgtgcgcctgttttattcaccccctccccctacgtaacttagaagcgatacctacatggtcaacaggtgccccagcataccagctgggtcatgaccaagcaattctgttaccccggactgagtatcaataagctgctcgcgcggctgaaggagaaaacgttcgttacccggccagttacttcgagaaacccagtaccaccatgaaggttgcgcagtgtttcgctccgcacaaccccagtgtagatcaggtcgatgagtcaccgcgttccccacgggtgaccgtggcggtggctgcgttggcggcctgcccatggggcaacccgtgggacgcttcaatactgacatggtgtgaagagtctattgagctaactggtagtcctccggcccctgaatgcggctaatcctaactgcggagcagatgcccacatgccagtgggtggtctgtcgtaacgggcaactctgcagcggaaccgactactttgggtgtccgtgtttccttttattcctaaactggctgcttatggtgacaattgagagattgttaccatatagctattggattggccatccggtgacgaacagagctatcatttatttatttgttggttttgtgccgttgaaccgcaaagttctacacaccatcaatttcatcctactgcttaactcgacaaa

SEQ ID NO: 950 - DNA, 735 bp, Enterovirus B
  source 1..735: mol_type = genomic DNA
agcctgtgggttgcacccacccacagggcccactgggcgccagcactctggtactgcggtacctttgtgcgcctgttttatcaccccaccccatccggaacgtagaagctagacttaaatggtcaatagacggcccagtatgccaattgggtctcgaccaagcactcctgtttccccgggtttagtatcaataagctgctcacgtggctgaaggagaaaacacccgttatccggccaactacttcgagaaacttagtaccgctatgaacgttgcaaggcgtttcgctcagcacttcccccgtgtagatcaggccgatgagtcaccgcattcctcacgggcgaccgtggcggtggctgcgctggcggcctgcctatgggcttgcccataggacgccttaatactgacatggtgcgaagagtctattgagctagttggtagtcctccggcccctgaatgcggctaatcctaactgcggagcacatactcacaaaccagtgagcagtgtgtcgtaacgggcaactctgcagcggaaccgactactttgggtgtccgtgtttccttttattcctacactggctgcttatggtgacaattaaagaattgttaccatatagctattggattggccatccggtgtctaacagagctattatatacttgtttgttggattcataccacttgattccaatagctataacaccctactttacatcgttcatttgaacacgagaaa

SEQ ID NO: 951 - DNA, 736 bp, unidentified
  source 1..736: mol_type = unassigned DNA; note = unclassified Kobuvirus sequence
gggtgggggggcctcggccccctcaccctcttttccggtggtctggacccggaccaccgttactccattcagcttcttcggaacctgttcggaggaattaaacgggcacccactttcctgtcctctccccctttctgcaactcaagtgtgtgctcgtaatcctgactcccacgggttgaccgccccgttggtgaacaaacagctaggtcattccctccctacccctgggcgccatttcagtggcgttcatatcctccccccagcctgacgtgtcacaggctgtgcaaagtccccgcgaaagctgctcacgtggcaattgtgggtcccccctttgtgaaggaaccgagtctttctcccttaaggctagacccctgtgtgaactcacaggtggcaactagtggttccactgcatgctcccgacctcggccgcggagtgctgttccccaagtcgtgacactgacctccacttatgtgcctggcaagcatatctgagaagatgttccgctgtggctgccaaacctggtaacaggtgccccagtgcgtgtagtcttcttccgtctccggacggtaagtgtgtggtaaagatgcggcgtaaggttcaagtgccaacgccctggaagggatgacccttctactgccctaggaatgccgcgcaggtaccccaggttcgcctgggatctgagcgcgggctaattgtctacgggtagtttcatttccctctcttttcactggcatc

SEQ ID NO: 952 - DNA, 736 bp, Enterovirus C
  source 1..736: mol_type = genomic DNA
cccactggaggatattcactatatcctccagtgtttcccactggaggatatggtactgcggtatcacggtacccttgtacgcctgttttatactccccttccctgcaacttagaagattgtgaaaacctgtgttcaataggaagggggtacaaaccagtaccaccacgaacaagcacttctgtttccccggtgaagttgtataaactgtatccacggttgaaaacgactgatccgttacccgctctagtacttcgagaagcctagtatcatcttggaatcatcgatgcgttgcgttcatcactcaaccccagagtgtagcttaggctgatgagtctggacaatcctcaccggtgacggtggtccaggctgcgttggcggcctacctgtggcccaaagccacaggacgctagatgtgaacaaggtgtgaagagcctattgagctactagagagtcctccggcccctgaatgcggctaatcccaaccacgaagcaagtgctcacaacccagtgagtagcttgtcgtaatgcgcaagtttgtggcggaaccgactactttgggtgtccgtgtttcctttttacttttgtatggctgcttatggtgacaatcattgattgttatcataaagcgaattggattggccatccggtgagagcgagcacaatcacttatttgttcgttggattcactcctttaacaaaattttattgttctcttaattagaaaacatcatcaca

SEQ ID NO: 953 - DNA, 736 bp, Enterovirus C
  source 1..736: mol_type = genomic DNA
ccggggttgttcccaccccggaggcccacgtggcggctagtactctggtaccacggtacccttgtacgcctgttttatatcccctccccacgcaactttagaagaaattcaccaagttcaatagggggggtacgaaccagtaccaccacgaacaagcacttctgtttccccggtgattttacataggctgtacccacggctgaaagtgaatgatccgttacccgcttgagtacttcgagaagcctagtaccaccttggaatctccgatgcgttgcgttcagcactctaacccgagtgtagcttaggctgatgagtctgggcgatccccaccggcgacggtggcccaggctgcgttggcggcctacccgtggctaacgctacgggacgctagttttgaacaaggtgtgaagagcctattgagctacccaagaatcctccggcccctgaatgcggctaatcccaaccatggagcaagtgccctcaagccagggggtggcttgtcgtaacgcgtaagtctgtggcggaaccgactactttgggtgtccgtgtttccttttatttcatatttggctgcttatggtgacaatcacagattgttatcataaagcgaattggattggccatccagtgaaatataagctcattgtttatctccttgttggatttgttctgttaggaaattcctcaataaagttgactcgggtaatcttagtgattagaagtcatcatttcaaca

SEQ ID NO: 954 - DNA, 736 bp, Enterovirus B
  source 1..736: mol_type = genomic DNA
agcctgtgggttgttcccacccacagggcccaccgggcgctagcacactggtatcccggtacctttgtgcgcctgttttacacaccctcccccgatggcaacttagaagatttccacacacggtcaataggcggctcagtataccaactgggtcatgaccaagcacttctgttcccccggactgagtatcaataagctgctcacgtggctgaaggagaaaacgttcgttatccggccaattacttcgagaagcttagtaccaccatagaggttgcgcagtgtttcgctccgcacaaccccagtgtagatcaggtcgatgagtcaccgcactcctcacgggcgaccgtggcggtggctgcgctggcggcctgcccatggggcaacccatgggacgcttcaatactgacatggtgcgaagagcctattgagctaattggtattcctccggcccctgaatgcggctaatcctaactgcggagcagatacccacgagccagtgggcagtctgtcgtaatgggtaactctgcagcggaaccgactactttgggtgtccgtgtttccttttattcctatattggctgctaatggtgacaattgagagattgttgccatatagctattggattggccatccggtgacaaacagagcgattatctatctatttgttggcttcataccattaaaccttagagtcctaaagaccctcaacttaattatacaatttaactctgcgaa

SEQ ID NO: 955 - DNA, 737 bp, unidentified
  source 1..737: mol_type = unassigned DNA; note = unclassified Kobuvirus sequence
ggggcttcggccctcacaccctcttttccgatggtctggtcccggaccaccgtcactccattcagcttcttcggaacctgttcggaggaattaaacgggcaccccacttcccccccccaccctcgcaacttcaagtgtgtgtgcccataaccttgacccctgccggtatgccgcccggttcagtggacaaactgctaggcaaattcccccctccccctgtggctggtccttcaaccagccactctcttccccccagccggacgtgctacaggctgtgcaaagcccccgcgaaagctgctcacgtggcaattgtgggtcccccctttgtcaaggcttcgagtctttctcccttaaggctagtcccgtactgtgaaatcagtgtgggcaactagtgaagccactgcacgctcccgaccacggacgcggagtgctgtcccccaagtcatgacactaacaccaagctgtgctgcctggcaagcatagcctgggaaggtgttccgctgtggctgccaaacctggtaacaggtgccccagtgtgtgtaaccttcctccagtcttcggactggcagctttgtgtgaagacgtgacgtaaggttcaagtgccaactccctggaagggatgacccctctactgccctaggaatgctacgcaggtacccctggttcgccagggatctgagcgtaggctaattgtctacgggtagtttcatttcccacctttttatttctttagcatc

SEQ ID NO: 956 - DNA, 737 bp, Enterovirus A
  source 1..737: mol_type = genomic DNA
ccgatctgttgtacccacccacagggcccactgggcgctagcactccgattctgcggaatctttgtgcgcctgttttatgaccctcccccgaaacttgtaacttagaagttatgtacatcaccgatcaatagcaggcgtggcgcaccagccatgtcttgatcaagcacttctgtacccccggactgagtatcaatagactgctcacgcggttgaaggagaaaatgttcgttacccggctaactacttcgagaaacctagtaacaccattgaaactgcggagtgtttcgctcagcattccccccatgtagatcaggtcgatgagtcactgcttaccccacgggcgaccgtggcagtggctgcgttggcggcctgcctatggggcaacccataggacgctctaaagtggacatggtgcgaagagtctattgagctagttagtagtcctccggcccctgaatgcggctaatcctaactgcggagcgcatgtcctcaaaccagagggtggtgcgtcgtaatgggtaactctgcagcggaaccgactactttgggtgtccgtgtttcttttgttcttaaaatggctgcttatggtgacaatcgaggaattgttaccatatagctattggattggccatccggtgtgcaacagagctattatctacttgtttgtcggatacatccccttaacacctaaatcctttaatacattgcattatattttaacattgaacgcgagaaa

SEQ ID NO: 957 - DNA, 737 bp, Enterovirus C
  source 1..737: mol_type = genomic DNA
ctgggggttgttcccaccccagaggcccacgtggcggctagtactccggtattacggtacccttgtacgcctgttttatactccctttccccgtaacttagaagcaacaatccaagttcaatagaagggggtacaaaccagtaccaccacgaacaagcacttctgtttccccggtgaagttgcatagactgtacccacggttgaaagcgactgatccgttatccgctcttgtacttcgagaagcctagtatcactttggaatcttcgatgcgttgcgctcagcacccaaccccggggtgtagcttaggtcgatgagtctggacgttcctcaccggcgacggtggtccaggctgcgttggcggcctacctgtggcccaaagccacaggacgctagttgtgaacaaggtgtgaagagcctattgagctacatgagattcctccggcccctgaatgcggctaatcccaaccacggagcaaatgcccacaacccagtgggtggtttgtcgtaacgagcaattctgtggcggaaccgactactttgggtgtccgtgtttccctttttattattatgtggctgcttatggtgacaatcattggttgttatcataaagcgaattggattggccatccggtaagagtaaaacatatcatttacctttttgttggatttactccattgagtgttttcaccccagacgtaattcgtgtggttctgctgattagaagtttctatcaca

SEQ ID NO: 958 - DNA, 737 bp, Enterovirus J
  source 1..737: mol_type = genomic DNA
ttaaaatagcctcagggttgttcccaccctgagggcccacgtggcgtagtactctggtattacggtacctttgtacgcctattttacccccttccccttgtaacttagaagcaaagcaaaccagttcaatagtaagcaacacaacccagtgttgtgacgaacaagtacttctgtttccccgggagggtctgacggtaagctgtacccacggctgaagtatgacctaccgttaaccggctacctacttcgagaagtctagtaataccattgaagttttgttggcgttacgctcaacacactaccccgtgtgtagttttggctgatgagtcacggcattccccacgggcgaccgtggccgtggctgcgttgcggccaaccaaggggcgcaagctccttggacgtcacttaacagacatggtgtgaagaacctattgagctaggtagtagtcctccggcccctgaatgcggctaatcctaactccggagcacatcagtgcaacccagcatttggtgtgttgtaatacgcaagtctggagcggaaccgactactttgggtgtccgtgtttcctgttttaccttatttggctgcttatggtgacaatttgatattgttaccatatagctgttggattggccatccggatttttgaaagagacccaaaactttcttctctacttcagattcaagtgcgaagttttccttttcatatattacttactaatttgaagtaccaaag

SEQ ID NO: 959 - DNA, 737 bp, unidentified
  source 1..737: mol_type = unassigned DNA; note = unclassified Enterovirus sequence
ttaaaatagcctcagggttgttcccaccctgagggcccacgtggtgtagtactctggtattacggtacctttgtacgcctattttatacccccttccccaagtaatttagaagcaagcacaaaccagttcagtagtaagcagtacaatccagtactgtaatgaacaagtacttctgttaccccggaagggtctatcggtaagctgtacccacggctgaagaatgacctaccgttaaccggctacctacttcgagaagcctagtaatgccgttgaagttttattgacgttacgctcagcacactaccccgtgtgtagttttggctgatgagtcacggcactccccacgggcgaccgtggccgtggctgcgttggcggccaaccaaggagtgcaagctccttggacgtcatattacagacatggtgtgaagagcctattgagctaggtggtagtcctccggcccctgaatgcggctaatcctaactccggagcatatcggtgcgaaccagcacttggtgtgttgtaatacgtaagtctggagcggaaccgactactttgggtgtccgtgtttcctgttttaacttttatggctgcttatggtgacaatttaacattgttaccatatagctgttgggttggccatccggattttgttataaaaccatttcctcgtgccttgacctttaacacatttgtgaacttctttaaatcccttttattagtccttaaatactaaga

SEQ ID NO: 960 - DNA, 738 bp, Enterovirus C
  source 1..738: mol_type = genomic DNA
ttaaaacagctctggggttgttcccaccccggaggcccacgtggcggctagtactctggtatcacggtacccttgtacgcctgttttatactcccctccccgtaatttagaagttcaaaacttaagttcaatagaagggggtacaaaccagtaccaccacgaacaagcacttctgtttccccggtgaggttgcatagactgtacccacggttgaaggcgactgatccgttatccgctcttgtacttcgggaagcccagtatcatcttcggatcttcgatgcgttgcgctcagcactcaaccccagagtgtagcttaggctgatgagtctggacaatcctcactggtgacagtggtccaggctgcgttggcggcctacctgtggcccaaagccacaggacgctagatgtgaacaaggtgtgaagagcccactgagctacaagagagtcctccggcccctgaatgcggctaatcccaaccacggagcaggtagttgcaaaccagcagccggcctgtcgtaacgcgcaagtctgtggcggaaccgactactttgggtgaccgtgtttccttttatcttttcaatggctgcttatggtgacaatcattgattgttatcataaagcgacttggattggccatccggtgaaatttaagtgcgtcagctatccatttattggatttaccccactaaaaccacatacgcctggccttagtgttgttggtgagacgctaccatcaaa

SEQ ID NO: 961 - DNA, 738 bp, Enterovirus B
  source 1..738: mol_type = genomic DNA
cagcctgtgggttgtacccacccacagggcccacgtggcgctagcacactggtattccggtacctttgtgcgcctgttttatccaccccgtcccccactgtaacttagaagatatgcaaccctgatcaacagcaggtgtgacactccagtcacatcacgatcaagcacttctgttgccccggaccgagtatcaataagccactcgcgtggctgaaggagaaaacgttcgttatccgaccaactacttcgagaaacctagtaccaccctggaagttgcgtagcgtttcgctccacacaaccccagtgtagatcgggtcgatgagtcaccgcgttcctcacgggcgaccgtggcggtggctgcgttggcggcctgcccatggggcaacccatgggacgcttcaatactgacatggtgcgaagagtctattgagctagttggtggtcctccggcccctgaatgcggctaatcctaactgcggagcagatacccacatgccagtgggcgatctgtcgtaatgggtaactctgcagcggaaccgactactttgggtgtccgtgtttccttttattcttatattggctgcttatggtgacaattgagaagttgttaccatatagctattggattggccatccggtgacaaatagagcgattgtttatttgtttgttggatttataccactgaacttcaaggttttaaacaccctcaattttgtactagttcttaatacatcaaa

SEQ ID NO: 962 - DNA, 739 bp, unidentified
  source 1..739: mol_type = unassigned DNA; note = unclassified Enterovirus sequence
acagctctggggttgtacccaccccagaggcccacgtggcggctagtactctggtgtcacggtacctttgtacgcctgttttataccccctcccccgtaacttagaagctataaaccaagttcaatagaagggggtacaagccagtaccaccacgaacaagtacttctgttaccccggtgacgttgtatagactgctcgcgcggtcgaaagcgacagatccgttacccgcttgtgtacttcgagaagtctagtaccaccttggaatcttcgatgcgttgcgctcagcactttaccccagagtgtagcttaggctgatgagtctgggcgctccccatcggcgacgatggcccaggctgcgttggcggcctacctatggctaacgccataggacgctagtagtgaacaaggtgtgaagaacctattgagctacacaagagtcctccggcccctgaatgcggctaatcctaaccatggagcaagtgatcacaatccagtgatattcttgtcgtaacgcgcaagtccgtggcggaaccgactactttgggtgtccgtgtttccctttatttttattatggctgcttatggtgacaatcattgattgttatcatagagcgaattggattggccatccggtgaaagtgaaactcattatctacttatttgttggattcactccatcaaacacattcacttatagtatcatcttgacagtgattagaattagacagtcgtatcaca

SEQ ID NO: 963 - DNA, 739 bp, Enterovirus B
  source 1..739: mol_type = genomic DNA
ttaaaacagcctgtgggttgtacccacccacagggcccactgggcgccagcactctggtatcgcggtacctttgtgcgcctgttttgtttccctttaccccgaatggaacttagaagtaatgcacactgatcaatagcaggcgtggcaccagccacgtgatgatcaagcactactgtttccccggaccgagtatcaatagactgcttgcgcggttgaaggagaaaacgttcgttatccggctaactacttcgagaaacccagtaacaccatgaaggttgcaggcgatttcgctcagcacatccccagtgtagatcaggtcgatgagtcaccgcgttcccacgggcgaccgtggcggtggctgcgttggcggcctgcctatggggtaacccataggacgctctaatacggacatggtgcgaagagtctattgagctagttagtgttctccggcccctgaatgcggctaatcctaactgtggagcacatgcccctaatccaaggggtagtgtgtcgtaacgggcaactccgcagcggaaccgactactttgggtgtccgtgtttccttttattcttacattggctgcttatggtgacaattgagagattgttgccatatagctattggattggccatccggtgtctaatagagcgataatctaccagtttgttggatttgtaccactcaacttttcaacactcaagacactcaactacatactagcactcaacacagtaaa

SEQ ID NO: 964 - DNA, 739 bp, Enterovirus B
  source 1..739: mol_type = genomic DNA
ttaaaacagcctgtgggttgtacccacccacagggcccattgggcgcttgcacactggtattccggtacctttgtgcgcctgttttatacatcctacccccgtaacttagaagcaagatcacccgatcaccaggaaatgtggcaaaccagtcacattctgatcaagcacttctgtttccccggactgagtatcaataggctgttcacacggctgaaggagaaaacgttcgttacccggccaactacttcgaaaaacctagtatcaccgtgaacgttgcagagtgtttcgctcagcactttccccgtgtagatcaggtcgatgagtcaccgcattccccacgggcgaccgtggcggtggctgcgttggcggcctgcctgcggggcaacccgtaggacgctctaatacagacacggtgtgaagagtctattgagctagttggtagtcctccggcccctgaatgcggctaatcctaactgcggagcgagcgcttgtaatccaacaggtagctcgtcgtaacgggtaactctgcagcggaaccgactactttgggtgaccgtgtttccttttatttcattactggctgcttatggtgacaatcacagagttgttaccatatagctattggattggccatccggtgtcaaatagagcaattgtgtttctttttgttgggtttgtaccacttgacttgaccagctacaacactctgtgctacattgttagattgaacacagcaaa

SEQ ID NO: 965 - DNA, 740 bp, Enterovirus A
  source 1..740: mol_type = genomic DNA
ttaaaacagcctgtgggttgcacccactcacagggcccactgggcgtcagcactctggtacctcggtacctttgtgcgcctgttttatatcccccccccattgaaacttagaagcaatgcacttcgatcaatagcgggcgcggcgcaccagccacgtcatgatcaagcacttctgtttccccggaccgagtatcaatagactgctaacgcggttgagggagaaaacgtccgttacccggccaactgcttcgagaaatccagtaacatcatgaaaattgcagagtgtttcgctcagcacttccccagtgtagatcaggtcgatgagtcaccgcgttcctcacgggcgaccgtggcggtggctgcgttggcggcctgcctgtggggcaacccgcaggacgctctaatatggacatggtgtgaagaatctattgagccagttggtagtcctccggcccctgaatgcggctaatcctaactgcggagcacgcgccctcaatccagtgggtagcgtgtcgtaatgggtaactctgcagcggaaccgactactttgggtgtccgtgtttccttttattcttacattggctgcttatggtgacaattgagagattgttaccatatagctattggattggccatccggtatcgaatagagcggttatctatcaatttattggatttactccgttgagtgtgcagcagtatcgcactttgcttttaatagtgagactgaatagtgcaaa

SEQ ID NO: 966 - DNA, 740 bp, Enterovirus A
  source 1..740: mol_type = genomic DNA
tgtgggttgttcccacccacagggcccactgggcgccagcactctgattccatggaatctttgtgcgcctgttttataacccttccccaatttgcaacttagaagtaatacacactacagatcaatagtaggcatggcgcgccagtcatgtctcgatcaagcacttctgtttccccggactgagtatcaatagactgcccacgcggttgaaggagaaaacgtccgttacccggctaactacttcgagaaacctagtagcaccaaataagctgcagagcgtttcgctcagcacctcccccgtgtagatcaggctgatgagtcactgcaatccccacgggcgaccgtggcagtggctgcgctggcggcctgcctatggggcaacccataggacgctctaatgtggacatggtgcgaagagtctattgagctagttagtagtcctccggcccctgaatgcggctaatcctaactgcggagcacataccttcaatccaggaggtggtgtgtcgtaacgggtaactctgcagcggaaccgactactttgggtgtccgtgtttccttttatccttatattggctgcttatggtgacaatcacggaattgttgccatatagctattggattggccatccggtgtctaatagagctattgtatacctatttgttggatttaccaagttaaatatcaccaactacaccacccttctttatattatattactgaatattagaaagagaaa

SEQ ID NO: 967 - DNA, 740 bp, Enterovirus B
  source 1..740: mol_type = genomic DNA
ttaaaacagcctgtgggttgtacccacccacagggcccactgggcgctagcactctggtattacggtacctttgtgcgcctgttttacatcccttcccaatcgtaatttagaagccaaacactacgatcaatagtgggcgtggcacgccagccatgtctcgatcaagcactcctgtttccccgggccgagtatcaatagactgctcacgtggttgaaggagaaaacgctcgttatccggctaactacttcgagaaacctagtaacaccatggaagttgcagagtgtttcgttcagcacttccccagtgtagatcaggccgatgagtcaccgcgttccccacgggtgaccgtggcggtggctgcgttggcggcctgcccatggggtaacccatgggacgctctaatatggacatggtgtgaagagtctattgagctagttggtagtcctccggcccctgaatgcggctaatcctaactgcggagcatgtacctccaatccaggaggtggcgtgtcgtaatgggcaactctgcagcggaaccgactactttgggagtccgtgtttccttttattcttacactggctgcttatggtgacaattgagagattgttaccatatagctattggattggccatccggtgactaacagagcagttatctaccagttcgttggtttcattccattgtgtactcgcgaatacaacactcttcttttaatactagatttaaacaaagcaaa

SEQ ID NO: 968 - DNA, 741 bp, Sapelovirus B
  source 1..741: mol_type = genomic DNA
ctcacactcatttcccccctcgcctgtcacaggcaacccccaccccttctcttacgggagttagggccaaggatctgttgcataggcgttgtatcccctaaccttttacctacccatcccaataggactggtatttcggttttgattgagtaatggatactgattctatacctgttacccattcaggggaaaaatggagtttctttcatggatctgacttgatatgaccaagagtcaacactttgcgtgttggccgtatggaatgctttaaggtttattctttggattatgacttcagggttggccgcccaggataaaaggcaattgtggtaagtgatgttagtcattggtggttgaaacctgcctaagacgtcctaggtctacgctgtgcgggccgaagtaagcttaggaataacagggagtatgccattttctgctttcacccaacacgaccgtacacgaaagagctagaggcactttggggcaaagggaaaagctttgcttagcccgaatgttcatttgagtccttgacgaatgcgtcccgtctgtcccgacggtgaggcgtatggcgcatgctcatggcattacccaatggtgtatctgtgaggggggggctcctcacacttagtctagtgctacctgacagggccgcggctggtcgtttgtgtatggtataaccagtagtaatcccccatggattgctttaacttcccctcctcccttaccaagacattctctaag

SEQ ID NO: 969 - DNA, 741 bp, Enterovirus A
  source 1..741: mol_type = genomic DNA
ccgatgtgtgggttgtacccacccacagggcccactgggcgctagcactctaatcctacgggattcttgtgcgcctgttttataaccccttccccgatttgtaacttagaagcaatttacattagcgatcaatagacgacatggcacgccagccatgtcttgatcaagcacttctgtttccccgggctgagtatcaatagactgcttacgcggttgaaggagaaaacgctcgttacccggctaactacttcgagaaacctagtagcatcatgaaaactgcagagcgtttcgttcagcactccccccgtgtagatcaggtcgatgagtcactgcaatccccacgggtgaccgtggcagtggctgcgttggcggcctgcctatggggcaacccataggacgctctaatgtggacatggtgcgaagagtctattgagctagttagtagtcctccggcccctgaatgcggctaatcctaactgcggagcgcatactcccaacccagggggtggtgcgtcgtaatgggcaactctgcagcggaaccgactactttgggtgtccgtgtttccttttatccttttattggctgcttatggtgacaattagagaattgttaccatatagctattggattggccatccggtgagcaacagagcaattgtgtatctttttgttggatacgtccccttgacacttagaacctacaacacgctacactatattctaatcttgaactcgagacg

SEQ ID NO: 970 - DNA, 741 bp, Enterovirus A
  source 1..741: mol_type = genomic DNA
ttaaaacagcctgtgggttgcacccacccacagggcccactgggcgccagcactctggtatcgcggtacctttgtgcgcctgttttatgacccctccccaaccgaaacttagaagttacacataccgatcaatagtgggcatagcacgccagctgtgtcttgatcaagcacttctgtttccccggaccgagtatcaatagactgctcacgcggttgaaggagaaagcgttcgttatccggctaactacttcgagaaacctagtaacaccatgaaagttgcggagtgtttcgctcagcacttccccagtgtagatcaggtcgatgagtcaccgcgttccccacgggcgaccgtggcggtggctgcgctggcggcctgcctatgggatgacccataggacgcttcaacacagacatggtgtgaagagtctattgagctagttagtagtcctccggcccctgaatgcggctaatcctaactgcggagcacgtgccctcaagccagagggtggcgtgtcgtaacgggcaactctgcagcggaaccgactactttgggagtccgtgtttccttttattcttacactggctgcttatggtgacaattgagagattgttaccatatagctattggattggccatccggtgagcaacagagcgattgtatactcttttgtgggttttgtgccattaaatcttactgtgattaccacactgaaactcatcttgcagtttaatacagcaaa

SEQ ID NO: 971 - DNA, 741 bp, Enterovirus A
  source 1..741: mol_type = genomic DNA
gcattggaggctagcccccattggggcgtagcacttccactgggggctagcactccgattctgcggaatctttgtgcgcctgttttataaccctcccccaacttgcaacttagaagttatgtacgttgatcaatagcaggcgtggcacaccagccatgtcttgatcaagcacttctgtaaccccggactgagtatcaatagactgctcacgtggtcgaaagagaaaatgttcgttatccggctaactacttcgagaaacctagtagcaccactgaaactgcggagtgtttcgctcagcacttcccccgtgtagatcaggtcgatgagtcactgcttaccccacgggtgaccgtggcagtggctgcgttggcggcctgcctatggggcaacccataggacgctctaaagtggacatggtgtgaagagtctattgagctagttagtagtcctccggcccctgaatgcggctaatcctaactgcggagcgcatgcccccaaaccagagggtggtgcgtcgtaacgggtaactctgcagcggaaccgactactttgggtgtccgtgtttcttttattctcataatggctgcttatggtgacaattgaggaattgttaccatatagctattggattggccatccggtgtgcaacagagctattatctacttgtttgttggatacattccattgacacctaaatccttcaatacattgcactatattctaacgttgaacgcaagaaa

SEQ ID NO: 972 - DNA, 741 bp, Enterovirus B
  source 1..741: mol_type = genomic DNA
taaaacagcctgtgggttgttcccacccacagggcccactgggcgctagcacactggtatcacggtacccttgtgcgcctgttttatccacccgccccctatgtaacttagaagcacatcacaaacggtcaacaggcagctcagtaaaccaactgagccacgaccaggtacttctgttaccccggaccgagtatcaatagactgctgacgcggtcgaaggagaaaacgttcgttacccggccaactacttcgagaaacccagtaccaccatggaggttgcgtggcgtttcgctccacacaaccccagtgtagatcaggtcgatgagtcaccgcattccccacgggcgaccgtggcggtggctgcgttggcggcctgcccatgaggtaactcatgggacgctacaataccgacatggtgcgaagagtctattgagctagttggtagtcctccggcccctgaatgcggctaatcctaactgcagagcggacacctacaaaccagtgggcagtccgtcgtaacgggcaactctgcagcggaaccgactactttgggtgtccgtgtttccttttattctcatattggctgcttatggtgacaattgagagattgttgccatatagctattggattggccatccggtgactaacagagctattgtctacttatttgttggttacgcaccgctcaatttcaaagtcttaaacacgattaatttcatattatcactcaacacaacaaa

SEQ ID NO: 973 - DNA, 741 bp, Enterovirus B
  source 1..741: mol_type = genomic DNA
ttaaaacagcctgtgggttgttcccacccacagggcccatgggcgctagcacactggtatcgtggtacctttgtgcgcctgttttatacaccctccccatttgtaacttagaagtaaagcaatattgatcaatagcaagcatggcacaccagccgtgttcagatcaagcacttctgtaaccccggactgagtatcaataggctgccaaagcggctgaaggagaaaacgttcgttaaccggccaactacttcgagaagcccagtatcaccatgaaagttgcagagcgtttcgctcagcactccccccgtgtagattaggtcgatgagtcaccgcatcccccacaggcgactgtggcggtggctgcgttggcggcctacctacggggcaacccgtaggacgctctaatacagacatggtgagaagagcctattgagctagttggtagtcctccggcccctgaatgcggataatcctaactgcggagcatgtgctcgcaatccagcgagaggcatgtcgtaacgggcaactctgcagcggaaccgactactttgggtgtccgtgtttccttttattccttgtttggctgcttatggtgacaattgaaagattgttgccatatagctattgggtcggccacctggtatctaacagagcaattatttacttgtttgttggttttgtacccttaaatctcaaggttcttgaaacccttaactacacattgaaactcaattcattgaa

SEQ ID NO: 974 - DNA, 741 bp, Enterovirus B
  source 1..741: mol_type = genomic DNA
ttaaaacagcctgtgggttgttcccactcacagggcctactgggcgctagcactctggtatcacggtacctttgtgcgcctgttttacacacccccctccctaggaatttagaagcaatacacaatgatcaatagtaggcgtggtacgccaaccatgtcttgatcaagcacttctgttcccccggactgagtatcaatagactgctcacgcggttgaaggagaaaacgttcgttacccggccagctacttcgagaaacccagtaacaccatggaaatagcggggcgtttcgctcggcacatccccagtgtagatcaggtcgatgagtcaccgcattccccacgggtgaccgtggcggtggctgcgttggcggcctgcctacagggcgacctgtaggacgcttcaatatggacatggtgcgaagagtctattgagctagctggtagtcctccggcccctgaatgcggctaatcctaactgcggagcgcgcgcctccaatccagggggtggtgcgtcgtaatgggtaactctgcagcggaaccgactactttgggtgtccgtgtttccatttatccttatattggctgcttatggtgacaattgaaaggttgttaccatatagctattggattggccatccagtgtctaacagagcgattgtattcctcttcgttggatttgttccacttaacaaaacaaattaccaaactttgtgttatattgtcaaactaaacacagcaaa

SEQ ID NO: 975 - DNA, 741 bp, Enterovirus B
  source 1..741: mol_type = genomic DNA
ttaaaacagcctgtgggttgttcccacccacagggcccaccgggcgctagcacactggtatcgcggtacctttgtgcgcctgttttatttaccctgccctgatgtaacttagaagcatgacaccaacgatcaatagcaggctcaatgcaccaattgggtcaagatcaagcacttctgttaccccggactgagtatcaataagctgctagcgcggctgaaggagaaaaagttcgttacccggccagctacttcgagaaacctagtatcaccatgaaagttgcgtggcgtttcgctccgcacaaccccagtgtagatcaggtcgatgagtcaccgcattccccacgggcgaccgtggcggtggctgcgttggcggcctgcccgtggagcaatccatgggacgctataatacagacatggtgtgaagagtctattgagctagctggtagtcctccggcccctgaatgcggctaatcctaactgcggagcaggtacccacgaaccagtgggcagtctgtcgtaatgggcaactccgcagcggaaccgactactttgggtgtccgtgtttccttttatttcaacttggctgcttatggtgacaattgagagattgttaccatatagctattggattggccatccggtgactaacagagctatcatatacctttttattggctttgtgccacttactctgaaagaggtcaagactctgcattatatcatactattgaatgctataaa

SEQ ID NO: 976 - DNA, 741 bp, Enterovirus B
  source 1..741: mol_type = genomic DNA
ttaaaacagcctgtgggttgttcccacccacagggcccactgggcgctagcacaccggtatcacggtacccttgtgcgcctgttttatccacctcccccgttgtaacttagaagctcaatacaaatggtcgatagccagcccgatacgccaattgggttttgaccaagcacttctgttaccccggactgagtaccaataggctgccaaagcggctgaaggggaaaacgttcgttaccccaccaactacttcgagaaacctagtaccaccatgaagattgcgcagcgtttcgctcagcacaaccccagtgtagatcaggtcgatgagtcaccgcattccccacaggcgactgtggcggtggctgcgttggcggcctgcccatggggctacccatgggacacttcaatatcgacatggtgcgaagagtctattgagctagttggtagtcctccggcccctgaatgcggataatcctaactgcggagcaggcacccacaagccagtgggcagcctgtcgtaacgggcaactctgcagcggaaccgactactttgggtgtccgtgtttctttttattcttacactggctgcttatggtgacaattgaagaattgttaccatatagctattggattggccatccagcgactaacagagctattatcttcttgtttgtggggtacgtaccactcaatttcacagtagtaaggactctcaatttcattttgtgcttgaataaggcgaa

SEQ ID NO: 977 - DNA, 741 bp, Enterovirus B
  source 1..741: mol_type = genomic DNA
ttaaaacagcctgtgggttgtacccactcacagggcccactgggcgctagcacactggtatcacggtacctttgtgcgcctgttttataatcccttccccaccgtaacatagaagctacacacactgatcaacagcaggcacagcacaccagttgtgtctcgatcaagcacttctgtctccccggaccgagtatcaatagactgcttacgcggttgaaggagaaaacgttcgtcacccggctgactacttcgaaaagcctagtagtaccatgaatgttgcggagtgtttcgctcagcacttcccccgtgtagatcaggctgatgagtcactgcattccccacgggtgaccgtggcagtggctgcgttggcggcctgcccatggggcaacccatgggacgcttcaatacagacatggtgcgaagagtctattgagctagtcagtagtcctccggcccctgaatgcggctaatcctaactgcggagcatgcgcctccgacccagggggtagcatgtcgtaatgggcaactctgcagcggaaccgactactttgggtgtccgtgtttccttttattcttatattggctgcttatggtgacaattgagagattgttgccatatagctattggattggccatccggtgagtaatagagctattatatactcctttgtgggttttgtgccactggatcacaaggtcttgaaaactctcacttttgtcataatactaaacactgcaaa

SEQ ID NO: 978 - DNA, 741 bp, Enterovirus B
  source 1..741: mol_type = genomic DNA
taaaacagcctgtgggttgttcccacccacagggcccattgggcgctagcacactgatatcacggtacctttgtgcgcctgttttatctacccctccccgatgcaacttagaagcatgttacaaacggtcaataggtggttcagttaaccaactgagcctcgaccaagcacttctgttaccccggactgagtatcaataggctgctcgcgtggctgatggagaaaacgtccgttacccggccaattacttcgagaaacctagtaccaccatggaagttgcgcagcgtttcgctccgcacaaccccagtgtagatcaggtcgatgagtcactgcgttccccacgggtgaccgtggcagtggctgcgttggcggcctgcccatggggtatcccatgggacgcttcaatactgacatggtgtgaagagtctattgagctaattggtagtcctccggcccctgaatgcggctaatcctaactgcggagcagatacccacgcaccagtgggcagtctgtcgtaacgggcaactctgcagcggaaccgactactttgggtgaccgtgtttccttttattttaatattggctgcttatggtgacaattgaaagattgttgccatatagctattggattggccatccggtaacaaacagagcaattatttacctgtttattggttttatacctctcaaccacaaggttataagtactctcaaccttgttttagcatttaacacagcaaa

SEQ ID NO: 979 - DNA, 741 bp, Enterovirus B
  source 1..741: mol_type = genomic DNA
ttaaaacagctctggggttgttcccacccacagggcccactgggcgctagcatactggtatcacggtacctttatgcgcctgttttatccacccctccccaacgtaacctagaagacactcatggatgatcaataggaggctcggcatgccagctgagtctggatcaagcacttctgttgccccggaccgagtatcaataggctgctcacgcggctgaaggagaaaaagttcgttatccggccaattacttcgagaaacccagtaccaccatgaaggttgcgtggcgtttcgctccgcacagccccagtgtagatcaggtcgatgagtcaccgcgttccccacgggcgaccgtggcggtggctgcgttggcggcctgcccatggggtaacccatgggacgcttcaatactgacatggtgcgaagagtctattgagctaattggtagtcctccggcccctgaatgcggctaatcctaactgcggagcagacgtccacaaaccagtgggtggtctgtcgtaacgggcaactctgcagcggaaccgactactttgggtgtccgtgtttcctttattcttatattggctgcttatggtgacaattgagagattgttgccatatagctattggattggccatccggtttgcaatagagcgattatactcctctttgttgggtttgtacctctcaacctcaatagttacaggacattattatacattatccagctgaacacgaaaag

SEQ ID NO: 980 - DNA, 741 bp, unidentified
  source 1..741: mol_type = unassigned DNA; note = unclassified Enterovirus sequence
taaaacagcctgtgggttgttcccacccacagggcccactgggcgctagcacactggtatcacggtacctttgtgcgcctgttttatttaccctcccccaacgtaacttagaagcatgactcaaatggtcaacagacaactcagcatgccagctgagcctcgaccaagcacttctgttaccccggactgagtaccagtaagctgctcacgcggctgagagggaaaccgttcgttacccggccaattacttcgagaaacctagtaccaccatgaaagttgcgcagtgtttcgctccgcacaaccccagtgtagatcaggtcgatgagtcaccgcaaaccccacgggtgaccgtggcggtggctgcgctggcggcctgcccatggggcagcccatgggacgcttcaatactgacatggtgcgaagagtctattgagctaattggtgatcctccggcccctgaatgcggctaatcctaactgcggagcagatacccacgcaccagtgggcagtctgtcgtaatgggcaactctgcagcggaaccgactactttgggtgtccgtgtttccttttattcttatactggctgcttatggtgacaattgagagattgttgccatatagctattggattggccatccggttacaaacagagcaattacttacctatttgttggttttgtaccactgaactacaaagtcttgaacaccctcaatttcattacaacacctaacacgttaaa

SEQ ID NO: 981 - DNA, 741 bp, Enterovirus B
  source 1..741: mol_type = genomic DNA
ttaaaacagcctgtgggttgttcccacccacagggcccactgggcgctagcacactggtatcatggtacctttgtgtgcctgttttatttcccttccccagatgcaacttagaagcaacactccacgaccactagcaggcgtggcacaccagccatgtcttggtcaagcacttctgtaaccccggactgagtatcaataaactgctcacgcggtcgaaggagaaaacgtccgttacccggccaactacttcgagaaacctagtaacgccatgaaaattgcgaggtgtttcgctcagcacatccccagtgtagatcaggtcgatgagtcaccgcattccccacaggtaactgtggcggtggctgcgttggcggcctgcccatggggtgacccatgggacgcttcaatacggacatggtgtgaagagtctattgagctagttggtagtcctccggcccctgaatgcggctaatcctaactgtggagcatgcgcccccactccagagggtagcgtgtcgtaacgggtaactccgcagcggaaccgactactttgggtgtccgtgtttctttttattcttatattggctgcttatggtgacaattgaaagattgttaccatatagctattggattggccacccagtgacaaacagagcaataatttaccaatttgtgggatttattccaataagtttgaaagtcttgaagacacttaatctagtattacaactcaatagcgcaaa

SEQ ID NO: 982 - DNA, 741 bp, unidentified
  source 1..741: mol_type = unassigned DNA; note = unclassified Enterovirus sequence
ccagggggccctgtgggtgggtgcaacccacagggcccactgggcgctagcacactggtattacggtacctttgtgcgcctgttttatacacccttaccctatgcaatatagaagcaaaacgacaaggtcaatagagagcccagtgagccaactgggtcgagaccaagcacttctgtttccccggaccgagtatcaataggctgcttacgcggctgaaggagaaaacgttcgttacccggctaactacttcgaaaaacctagtaacgccatggaagttgcgaaccgtttcgctcggcacttccccagtgtagatcaggtcgatgagtcaccgcattccccacgggcgaccgtggcggtggctgcgttggcggcctgcctatggggcaacccataggacgcttcaatatggacatggcgtgaagagtctattgagctagttagtagtcctccggcccctgaatgcggctaatcctaactgcggagcacatgcccccaacccaggaggtggtgtgtcgtaatgggtaactctgcagcggaaccgactactttgggtgtccgtgtttccttttatcccaatgttggctgcttatggtgacaattgaaagattgttaccatatagctattggattggccatccggtgactaacagagcaatcgtttacctattcattggttacgttccattaaatctcaaggaactaacgactctcaattacattttgctcttgaactctgcaaa

SEQ ID NO: 983 - DNA, 741 bp, Enterovirus B
  source 1..741: mol_type = genomic DNA
ttaaaacagcctgtgggttgttcccacccacagggcccattgggcgctagcactctggtatcacggtacctttgtgcgcctgttttacatcccctccccaaattgtaatttagaagtctcacacaccgatcaatagcaagcgtggcacaccagccatgttttgatcaagcacttctgttacccggactgagtatcaatagaccgctaacgcggttgaaggagaaaacgttcgttacccggccaactacttcgaaaaacctagtaacaccatggaagttgcggagtgtttcgctcagcactaccccagtgtagatcaggtcgatgagtcaccgcgttccccacgggcgaccgtggcggtggctgcgttggcggcctgcctacggggaaacccgtaggacgctctaatacagacatggtgcgaagagtctattgagctagttggtaatcctccggcccctgaatgcggctaatcctaactgcggagcacataccctcaaaccagggggcagtgtgtcgtaacgggcaactctgcagcggaaccgactactttgggtgtccgtgtttcattttattcctatactggctgcttatggtgacaattgacgggttgttaccatatagttattggattggccatccggtgactaacagagcaattatatatctctttgttgggtttataccacttagcttgaaagaggttaaaacactacatctcatcattaaactaaatacaacaaa

SEQ ID NO: 984 - DNA, 741 bp, Enterovirus B
  source 1..741: mol_type = genomic DNA
ttaaaacagcctgtgggttgttcccacccacaggcccattgggcgctagcactctggtatcacggtacctttgtgcgcctgttttatacacccttcccaagtgtaacttagaagcttaccacacacggtcaataggcgactcagtaagccaactgggtcttgatcaagcacttctgtttccccggactgagtatcaataagctgctcacgcggctgaaggagaaaacgttcgttaaccggccaattacttcgagaaacctagtaacaccatggaggttgcgcagcgtttcgctccgcacaaccccagtgtagatcaggccgatgagtcaccgcactcctcacgggcgaccgtggcggtggctgcgctggcggcctgcccatggggtaacccatgggacgcttcaatactgacatggtgcgaagagtctattgagctaattggtagtcctccggcccctgaatgcggctaatcctaactgcggagcagatacccacatgccagtgggcagtctgtcgtaatgggcaactctgcagcggaaccgactactttgggtgtccgtgtttccttttattcttatactggctgcttatggtgacaattgagagattgttaccatatagctattggattggccatccagtgacaaacagagcgattatttatttgtttgttggttatatcccattaagccaaaaagtcttagccactctcaatttcatactattgcttaatacaacgaa

SEQ ID NO: 985 - DNA, 742 bp, Enterovirus A
  source 1..742: mol_type = genomic DNA
ttaaaacagcctgtgggttgttcccacccacagggcctactgggcgctagcacactggtatcccggtacctttgtgcgcctgttttatctacccctccccaagtgaaacttagaagatcatcacatatggtcaataggcggctcagtacaccaactgcgtctcgaccaagcacttctgtatccccggactgagtatcaatagactgctcacgcggttgaaggagaaaacgttcgttatccggctaactacttcgggaagcctagtagcaccttgaaagttgcggagtgtttcgctcagcacttcccccgtgtagatcaggccgatgagccactgtaaaccccacgggcgaccgtgacagtggctgcgctggcggcctgcccatgggggaacccatgggacgctctaatactgacatggtgtgaagagtctactgagctagttagtagtcctccggcccctgaatgcggctaatcctaactgcggagcacacaccctcaacccagggggcagtgtgtcgtaatgggtaactctgcagcggaaccgactactttgggtgaccgtgtttccttttattccttattggctgcttatggtgacaattgaaaagttgttaccatatagctattggattggccatccggtatctaatagagctattgtttacttatttattggatacgtccctcttaatttcaaggctatccaaactcttgattatatattgctccttaattataagaa

SEQ ID NO: 986 - DNA, 742 bp, Enterovirus A
  source 1..742: mol_type = genomic DNA
ttaaaacagcctgtgggttgttcccactcacagggcccactgggcgctagtacactggtatctcggtacctttgtacgcctgttttataccccctccctgatttgcaacttagaagcaacgcaaaccagatcaatagtaggtgtgacataccagtcgcatcttgatcaagcacttctgtatccccggaccgagtatcaatagactgtgcacacggttgaaggagaaaacgtccgttacccggctaactacttcgagaaacctagtaacgccattgaagttgcagagtgtttcgctcagcactccccccgtgtagatcaggtcgatgagtcaccgcattccccacgggcgaccgtggcggtggctgcgttggcggcctgcccatggggtaacccatgggacgctctaatatagacatggtgcgaagagtctattgagctagttagcagacctccggcccctgaatgcggctaatcctaactgcggagcgcgcaccctcaacccagggggcggcgtgtcgtaatgggtaactctgcagcggaaccgactactttgggtgtccgtgtttccttttattctttattggctgcttatggtgacaattgaaaagttgttaccatatagctattggattggccatccggtgtctaacagagctattgtctacctatttattggatacgtccctcttaatctcaaggccattcaaactcttgattatatattgctcctcaactgtaggaa

SEQ ID NO: 987 - DNA, 742 bp, Enterovirus A
  source 1..742: mol_type = genomic DNA
tttaaaacagcctgtgggttgtccccacccacagggcccactgggcgttagcactctggtattacggtacctttgtgcgcctgttttataacccctccccaactgtaaattagaagcaacacacgtcgatcaatagtaggcgtgacgcaccagtcacgtcttgatcaagcacttctgtttccccggaccgagtatcaatagactgctcacgcggttgaaggagaaaacgttcgttacccgaccaactacttcgaaaaacctagtagcaccatgaaggttgcggagtgtttcgctcggcacttccccagtgtagatcaggtcgatgagtcaccgcattccccacgggcgaccgtggcggtggctgcgctggcggcctgcctatggggtaacccataggacgctctaatacggacatggtgcgaagagtctattgagctagttggtagtcctccggcccctgaatgcggctaatcctaactgcggagcgcgcgcccccattccaggaggtagcgcgtcgtaacgggcaactctgcagcggaaccgactactttgggtgtccgtgtttccttttatctttattctggctgcttatggtgacaattgacagattgttaccatatagctattggattggccatccggtcacaagcagagcgattatctaccaatttattggatttatcccactgcacactcgtgaatataacacattactgctgatactgagtttggacaaagcaaa

SEQ ID NO: 988 - DNA, 742 bp, Enterovirus A
  source 1..742: mol_type = genomic DNA
ttaaaacagcctgtgggttgcacccacccacagggcccactgggcgctagcactctggtatcacgatacctttgtgcgcctgttttatatccccaccccgagtaaacgttagaagttacgcaaccccgatcaatagtaggtgtagcactccagctgcatcgagatcaagcacttctgtctccccggaccgagtatcaatagactgctaacgcggttgaaggagaaaacgttcgttacccggccaattacttcgagaagcccagtagtgccgtgaaagttgcggagtgtttcgctcagcacttcccccgtgtagatcaggctgatgagtcaccgcgatccccacaggtgactgtggcggtggctgcgttggcggcctgcctatggggcaacccataggacgctctaatacagacatggtgcgaagagcctattgagctaattggtagtcctccggcccctgaatgcggctaatcctaactgcggagcacatgccctcaaaccagggggtggtgtgtcgtaacgggtaactctgcagcggaaccgactactttgggtgtccgtgtttctttttattcttataatggctgcttatggtgacaattaaagaattgttaccatatagctattggattggccatccggtgactaacaaatcgctcatataccagtttgttggttttgttcccttatcacatacagctcataacaccctcttatatttactacaattgaatagcaagaa

SEQ ID NO: 989 - DNA, 742 bp, Enterovirus A
  source 1..742: mol_type = genomic DNA
ttaaaacagcctgtgggttgtacccacccacagggcccactgggcgctagcacactggtattacggtacctttgtgcgcctgttttataccccccccaacctcgaaacttagaagtaaagcaaacccgatcaatagcaggtgcggcgcaccagtcgcatcttgatcaagcacttctgtaaccccggaccgagtatcaatagactgctcacgcggttgaaggagaaaacgttcgttacccggctaactacttcgagaaacccagtagcatcatgaaagttgcagagtgtttcgctcagcactacccccgtgtagatcaggccgatgagtcaccgcacttccccacgggcgaccgtggcggtggctgcgttggcggcctgcctatggggcaacccataggacgctctaatacggacatggtgcgaagagtctattgagctagttagtagtcctccggcccctgaatgcggctaatcctaactgcggagcacatacccttaatccaaagggcagtgtgtcgtaacgggtaactctgcagcggaaccgactactttgggtgtccgtgtttccttttaatttttactggctgcttatggtgacaattgaggaattgttgccatatagctattggattggccatccggtgactaacagagctattgtgttccaatttgttggatttaccccgctcacactcacagtcgtaagaacccttcattacgtgttatttctcaactcaagaaa

SEQ ID NO: 990 - DNA, 742 bp, Enterovirus B
  source 1..742: mol_type = genomic DNA
ttaaaacagcctgtgggttgatcccacccacagggcccactgggcgctagcacactggtatcccggtacctttgtgcgcctgttttatttacccttccccaatgtaatttagaagtttatcccaaatggtcaatagacaacccagcacgccagctgggcttcgaccaagcacttctgttaccccggaccgagtatcaataggctgctcacgcggctgaaagagaaaatgttcgttacccggccaaccacttcgagaaacttagtatcaccatgaaagttgcgcagtgtttcgctccgcacagccccagtgtagatcaggtcgatgagtcaccgcgttccccacgggcgaccgtggcggtggctgcgttggcggcctgcccatggggcaacccatgggacgcttcaatactgacatggtgcgaagagtctattgagctggttggtagtcctccggcccctgaatgcggctaatcctaactgcggagcagatacctacacaccagtgggcagtctgtcgtaacgggcaactctgcggcggaaccgactactttgggtgtccgtgtttccttttattcttatattggctgcttatggtgacaattgaaagattgttaccatatagctattggattggccatccagtgacaaacagagctatcgtgtacctatttgttggttttgtaccactgaaccgtaaggtgttagacactctaaacctcataattctgttcaattcagcaaa

SEQ ID NO: 991 - DNA, 742 bp, Enterovirus B
  source 1..742: mol_type = genomic DNA
ttaaaacagctctggggttgttcccacccacagggcccaccgggcgccagcactctggtatcacggtacctttgtgcgcctgttttatacccccgtccccggttgtaacttagaagtaacactccacgaccgatagtaggtgtggcacgccagccatgtcttggtcaagcacttctgtttccccggattgagtatcaataggctgttcacacggccgaaggagaaaacatccgttatccggccaactacttcgagaaacctagtaccaccatgaaggttgcgcagtgtttcgctccgcacaaccccagtgtagatcaggccgatgagtcaccgctttccccacgggcgaccgtggcggtggctgcgttggcggcctgcccatggggaaatccatgggacgcttcaatactgacatggtgcgaagagtctattgagctagttggtattcctccggcccctgaatgcggctaatcctaactgcggagcagacacccacatgccagtgggcagtctgtcgtaacgggcaactctgcagcggaaccgactactttgggtgtccgtgtttccttttattcttatactggctgcttatggtgacaattgaaagattgttaccatatagctattggattggccatcctgtgactaacagagctattgtatacctatttgttggttttgtgccactgaattacaaggctttaaacaccctcaactttataatactactcaactcattaaa

SEQ ID NO: 992 - DNA, 742 bp, Enterovirus B
  source 1..742: mol_type = genomic DNA
ttaaaacagctctggggttgttcccacccacagggcccactgggcgccagcactctggtattccggtaccctagtgcgcctgttttatcctcccctccccgttgaaacttagaagcaagtcacatgcggtcaatagggggcctagtatgccaactaggtcacgaccaagcactcctgttaccccggactgagtatcaataagctgctcgcgcggctgaaggagaaaacgttcgttacccggctaattacttcgagaaacccagtaccaccgtgaaggttgcgcagcgtttcgctccgcacaaccccagtgtagatcaggtcgatgagtcaccgcaatccccacaggcgactgtggcggtggctgcgttggcggcctgcccatgggacaacccatgggacgcttcaatactgacatggtgcgaagagtctattgagctaattagtaatcctccggcccctgaatgcggctaatcctaactgcggagcagatacccacacaccagtgggcagtctgtcgtaacgggcaactctgcagcggaaccgactactttgggtgtccgtgtttccttttattcttatactggctgcttatggtgacaattgacagattgttaccatatagctattggattggccatccggtgacgaacagagcgattatttacctgtttgttggttttataccacttaattacaaggttctaaacactctcaacttcattctaacactcaactcaacaaa

SEQ ID NO: 993 - DNA, 742 bp, Enterovirus C
  source 1..742: mol_type = genomic DNA
ttaaaacagctctggggttgttcccaccccagaggcccacgtggcggctagtactccggtatcacggtacccttgtacgcctgttttatactccctgccccgtaacttagaagcaaaccaaacaagttcaataggagggggtgcaagcccgcaccaccacgaacaagtactcctgtctccccggtgaggttgtatagactgtacccacggttgaaaacgactgatccgttatccgctctagtacttcgggaagcctagtagcattttggaatcttcgatgcgttgcgctcagcactcaaccccggagtgtagcttaggtcgatgagtctggacatcccccaccggtgacggtggtccaggctgcgttggcggcctacctgtggtccaaagccacaggacgctagttgtgaacaaggtgtgaagagcctactgagctactagagagtcctccggcccctgaatgcggctaatcctaaccacggagcaggtagttgcaacccagcaaccagtctgtcgtaatgcgcaagtctgtggcggaaccgactactttgggtgaccgtgtttccttttattttcatatatggctgcttatggtgacaatcattgattgttatcatatagcgacttggattggccatccggtgagaattagaactactgtttacccgtttgctgatttttgataacactccacacacttaccatttgagaattgtactgttggcaagacagcaccattata

SEQ ID NO: 994 - DNA, 742 bp, Enterovirus B
  source 1..742: mol_type = genomic DNA
ttaaaacagcctgtgggttgttcccacccacagggcccattgggcgctagcacactggtatcacggtacccttgtgcgcctgttttatccacccctccccatcgtaacctagaagcatgactccaacggtcaatagacagctcagtaaaccaattgagccttgaccaagcacttctgttaccccggactgagtatcaataggctgctcacgcggccgaaggagaaaatgttcgttacccggccaattacttcgagaaacctagtaccaccatgaaggttgcgcggtgtttcgctcagcacaaccccagtgtagatcaggccgatgagtcaccgcattccccacgggtgaccgtggcggtggctgcgctggcggcctgcccatggggcaacccatgggacgcttcaatactgacatggtgtgaagagtctattgagctaattggtagtcctccggcccctgaatgcggctaatcctaactgcggagcagatacccacgcaccagtgggcagtctgtcgtaacgggcaactctgcagcggaaccgactactttgggtgtccgtgtttccttttattcttgtactggctgcttatggtgacaattgagagattgttaccatatagctattggattggccatccagtgtcaaacagagcgattgtctacttgttcattggttttataccattgagttacaaggttctagccactcttaacttcattttaacactcaatacatcaaa

SEQ ID NO: 995 - DNA, 742 bp, Enterovirus B
  source 1..742: mol_type = genomic DNA
ttaaaacagcctgtgggttgttcccacccacagggcccatggggcgcaagcacactggtattgcggtacctttgtgcgcctgttttatccacccttccccaatgaaacttagaagcttgactcaaacggtcaatagacagcccagtgcaccaactgggtctcgaccaggcactcctgtttccccggactgagtatcaataggctgcttgcgcggctgaaggagaaaacgttcgttacccggccaattacttcgagaaacctagtaccaccatggacgttgcgcagtgtttcgctccacacaaccccggtgtagatcaggtcgatgagtcaccgcaatccccacgggcgaccgtggcggtggctgcgctggcggcctgcccatggggcaacccatgggacgcttcaatactgacatggtgcgaagagtctattgagctaattggtagtcctccggcccctgaatgcggctaatcctaactgcggagcagatacccacataccagtgggcagtctgtcgtaacgggcaactctgcagcggaaccgactactttgggtgtccgtgtttccttttattcttatattggctgcttatggtgacaattgaaaggttgttaccatatagcttttggattggccatccagtgagcaacagagcgatcatactcctttttgttgggtttgtaccacttgattatagtagttacaacaccttgctatacgtcattcatttaaacacgagaaa

SEQ ID NO: 996 - DNA, 742 bp, Enterovirus B
  source 1..742: mol_type = genomic DNA
ttaaaacagcctgtgggttgttcccacccacagggcccactgggcgccagcactctggtattacggtacctttgtgcgcctgttttatatccccctccccacttgaaacttagaagtgaaacacactgatcaatagttgacatggcaagccagccatgtcttgatcaagcacctctgtttccccggacctagtatcaatagactgctcgcgcggttgaaagagaaagcgttcgttacccggctaactacttcgagaaacttagtaacaccatggaagttgcggagtgtttcgctcagcacatccccagtgtagatcaggccgatgagtcaccgcattccccacgggcgaccgtggcggtggctgcgttggcggcctgcctgtggggcaacccacaggacgctctaatacaaacatggtgcgaagagtctattgagctagttagtagtcctccggcccctgaatgcggctaatcctaactgcggagcacgtgcttccaatccaggaggtggcgtgtcgtaacgggtaactctgcagcggaaccgactactttgggtgtccgtgtttccttttattcttgcattggctgcttatggtgacaattgagagattgttaccatatagctattggattggccatccggtgacaaacagagcaattatatatctctttgttggatacattccattgaactacaaggagttaaaaaccctcaattatattctgttcttgaattccgcaag

SEQ ID NO: 997 - DNA, 742 bp, Enterovirus B
  source 1..742: mol_type = genomic DNA
ttaaaacagcctgtgggttgttcccacccacagggcccactgggcgcaagcacactggtattacggtacctttgtgcgcctgttttacatcccctctcccattataacttagaagcacatacaaaacgaccaataggtggtccagcactccagctgggctctggtcaagtacttctgttaccccggactaagtatcaataagcggctaacgcggctgaaggagaaagcgtccgttacccggccaactacttcgggaaatctagtaacaccatgaaggttgcgcagtgtttcgctccgcacaaacccagtgtagatcaggtcgatgagtcaccgcattccccacaggcgactgtggcggtggctgcgttggcggcctgcccatggggcaacccatgggacgcttcaatactgacatggtgcgaagaatctactgagctagttggtagtcctccggcccctgaatgcggctaatcctaactgcggagcacatacccctaacccaaggggcagtgtgtcgtaacgggcaactctgcagcggaaccgactactttgggtgtccgtgtttccttttattcttatactggctgcttatggtgacaattgagaaattgttaccatatagcttttggattggccatccagtgactaacagagctattatttacttgtttgttggctttgtaccactcaaccttagagttttaaggactctcaatttggttctgctatcgaatacaacaaa

SEQ ID NO: 998 - DNA, 742 bp, unidentified
  source 1..742: mol_type = unassigned DNA; note = Sequence 2 from Patent WO2015007788.1 sequence
ttaaaacagcctgtgggttgttcccacccacagggcccactgggcgctagcacactggtatcacggtacctttgtgcgcctgttttatatccccctccccactgtaacttagagaaatcacataaacgatcaatagaaggcgcagcacaccagctgagtcttgaccaagcacttctgtttccccggactgagtatcaatagactgctcacgcggttgaaggagaaaacgttcgttacccggccaactacttcgagaaacctagtaccaccatgaaagttgcgcagtgtttcgctcagcacaaccccagtgtagatcaggtcgatgagtcaccgcattccccacgggcgaccgtggcggtggctgcgttggcggcctgcctatggggcaacccatgggacgcttcaatactgacatggtgcgaagagtctattgagctagttggtagtcctccggcccctgaatgcggctaatcctaactgcggagcaagtgcccacaaaccagtgggtagcttgtcgtaacgggcaactctgcagcggaaccgactactttgggtgtccgtgtttccttttattcttattctggctgcttatggtgacaattgagagattgttaccatatagctattggattggccatccggtgactaacagagcaatcatattcctctttgttggatttataccacttgattccactagttacaacactctgctacacattatttacttaaaaccaagaag

SEQ ID NO: 999 - DNA, 742 bp, Enterovirus B
  source 1..742: mol_type = genomic DNA
ttaaaacagcctgtgggttgcacccacccacagggcccactgggcgctggtacactggtattaaggtacccttgtacgcctgttttatatccctcccccgatttgtaacttagaattaaagcaaacccgatcaatagtaggtgtggcaaaccagccacatcttgatcaagcacttctgtttccccggaccgagtatcaatagactgctgacgcggttgaaggagaaaacgttcgttacccggccaactacttcgggaaacctagtaccaccatgaaggttgcgcagtgtttcgctccgcacaaccccagtgtagatcaggtcgatgagccaccgcattccccacaggcgactgtggcggtggctgcgttggcggcctgcccatggggtaacccatgggacgcttcaatactgacatggtgcgaagagtccactgagctagttggtattcctccggcccctgaatgcggctaatcctaactgcggagcaggcacccacgagccagtgggcagcctgtcgtaatgggtaactctgcagcggaaccgactactttgggtgtccgtgtttccattttctttttattggctgcttatggtgacaatcacggaattgttaccatatagctattggattggccatccagtgactaacagagcagtaatattcctttttgttggttttgtaccactcaccgtcacgagcctcagaacactcgtattcatcttaacccttaacaagataaa

SEQ ID NO: 1000 - DNA, 742 bp, Enterovirus B
  source 1..742: mol_type = genomic DNA
ttaaaacagcctgtgggttgtacccacccacagggcccaatgggcgctagcactccggtattacggtacccttgtgcgcctgttttatttccccttccccaactgaaacttagaagaaatacacaatgatcgacagtaagcgtggcgcaccagccatgttttgatcaagcacttctgtttccccggaccaagtatcaatagactgctcacgcggttgaaggagaaagcgttcgttaaccggctaactacttcgagaaacccagtaacaccatgaaagttgcagagtgtttcgctcagcactcccccagtgtggatcaggtcgatgagtcactgcgttccccacgggtgaccgtggcagtggctgcgttggcggcctgcctgtggggcaacccacaggacgctctaatacggacatggtgtgaagagtctattgagctagttagtagtcctccggcccctgaatgcggctaatcctaactgtggagcacatgcccctaacccaaggggtggtgtgtcgtaatgggtaactccgcagcggaaccgactactttgggtgaccgtgtttccttttatttttacattggctgcatatggtgacgattgagagattgttgccatatagctattggattggccatccagtgtctaacagagctattgtatatctttttgttggatttgtaccacttgacttgaaagaggtcaggacactacaatacattatactgctgaatactgcaaa

SEQ ID NO: 1001 - DNA, 742 bp, Enterovirus B
  source 1..742: mol_type = genomic DNA
ttaaaacagcctgtgggttgcacccacccacagggcccacagggcgctagcactctggtatcacggtacctttgtgcgcctgttttattaccccttccccaattgaaaattagaagcaatgcacaccgatcaacagcaggcgtggcgcaccagtcacgtctcgatcaagcacttctgtttccccggaccgagtatcaatagactgctcacgcggttgaaggagaaagtgttcgttatccggctaaccacttcgagaaacccagtaacaccatgaaagttgcagggtgtttcgctcagcacttccccagtgtagatcaggtcgatgagtcaccgcgttccccacgggcgaccgtggcggtggctgcgttggcggcctgcctatgggttaacccataggacgctctaatacagacatggtgcgaagagtttattgagctggttagtatccctccggcccctgaatgcggctaatcctaactgcggagcacgtgcctccaatccagggggttgcatgtcgtaacgggtaactctgcagcggaaccgactactttgggtgtccgtgtttccttttattcttatactggctgcttatggtgacaatcgaggaattgttaccatatagctattggattggccatccggtgtctaacagagcgattatatacctctttgttggatttatgcagctcaataccaccaactttaacacattgaaatatatcttaaagttaaacacagcaaa

SEQ ID NO: 1002 - DNA, 742 bp, Enterovirus B
  source 1..742: mol_type = genomic DNA
ttaaaacagcctgtgggttgatcccacccacagggcccattgggcgctagcactctggtatcacggtacctttgtgcgcctgttttataccccctcccccaactgtaacttagaagtaacacacaccgatcaacagtcagcgtggcacaccagccacgttttgatcaagcacttctgttaccccggactgagtatcaatagactgctcacgcggttgaaggagaaagcgttcgttatccggccaactacttcgaaaaacctagtaacaccgtggaagttgcagagtgtttcgctcagcactaccccagtgtagatcaggtcgatgagtcaccgcattccccacgggcgaccgtggcggtggctgcgttggcggcctgcccatggggaaacccatgggacgctctaatacagacatggtgcgaagagtctattgagctagttggtagtcctccggcccctgaatgcggctaatcctaactgcggagcacacaccctcaagccagagggcagtgtgtcgtaacgggcaactctgcagcggaaccgactactttgggtgtccgtgtttcattttattcctatactggctgcttatggtgacaattgagagattgttaccatatagctattggattggccatccggtgaccaatagagctattatatatctctttgttgggtttataccacttagcttgaaagaggttaaaacattacaattcattgttaagttgaatacagcaaa

SEQ ID NO: 1003 - DNA, 742 bp, Enterovirus B
  source 1..742: mol_type = genomic DNA
ttaaaacagcctgtgggttgttcccacccacagggcccactgggcgccagcacactggtatcacggtacccttgtgcgcctgttttataaacccttccccaatgcaacttagaagctcaactttaccggtcaatagacagtccagtacgccaactgggcttcgatcaagcacttctgttaccccggactaagtatcaataggctgctcacgcggctgaaggagaaaacgttcgttacccggccaattacttcgagaaacccagtaacactatggaggttgcgcagtgtttcgttccacacaaccccagtgtagatcaggtcgatgagtcaccgctttccccacgggcgaccgtggcggtggctgcgttggcggcctgcccatggggcaacccatgggacgcttcaatactgacatggtgtgaagagtctattgagctaattggtattcctccggcccctgaatgcggctaatcctaactgcggagcagatactcacgagccagtgggcagtctgtcgtaacgggtaactctgcagcggaaccgactactttgggtgtccgtgtttccttttattcatatattggctgcttatggtgacaattgagagattgttaccatatagctattggattggccatccggtgactaatagagcaattgtttacctatttgttggctttgtgccgttgaactacaaggttttaaaaactattaactacatcctagtacttaacacgttgaa

SEQ ID NO: 1004 - DNA, 742 bp, Enterovirus B
  source 1..742: mol_type = genomic DNA
ttaaaacagcctgtgggttgttcccacccacagggcccattgggcgtcagcaccctggtatcacggtacctttgtgcgcctgttttatatcccttcccccaattgtaacttagaagaaacacacaccgatcaacagcaagcgtggcacaccagccatgttttggtcaagcacttctgttaccccggactgagtatcaatagactgctcacgcggttgaaggagaaagcgtccgttatccggccagctacttcgagaaacctagtaacaccatggaagttgcggagtgtttcgctcagcactaccccagtgtagatcaggtcgatgagtcaccgctttccccacgggcgaccgtggcggtggctgcgttggcggcctgcctatgggggaacccataggacgctctaatacagacatggtgcgaagagtctattgagctagctggtattcctccggcccctgaatgcggctaatcctaactgtggagcacatgcccctaatccaaggggtagtgtgtcgtaatgagcaattccgcagcggaaccgactactttgggtgtccgtgtttcctcttattcttgtactggctgcttatggtgacaattgagagattgttaccatatagctattggattggccatccggtgactaatagagctattgtgtatctctttgttggatttgtaccacttaatttgaaagaaatcaggacactacgctacattttactattgaacaccgcaaa

SEQ ID NO: 1005 - DNA, 742 bp, Enterovirus B
  source 1..742: mol_type = genomic DNA
ttaaaacagcctgtgggttgtacccacacacagggcccactgggcgctagcacactggtatcacggtacctttgtgcgcctgttttataaccccttccccaaacgtaacgtagaagccacacacactgatcaacagtgggcacagcgcaccagccgtgtctcgatcaagcacttctgttttcccggactgagtatcaatagactgctcacgcggttgaaggagaaaacgttcgttacccggctgactacttcgagaagcttagtaacgctatgaaagttgcgaagtgtttcgttcagcactccccccgtgtagatcaggtcgatgagtcaccgcattccccacgggtgaccgtggcggtggctgcgctggcggcctgcccatggggtgacccatgggacgcttcaatacagacatggtgcgaagagcctattgagctagtcagtagtcctccggcccctgaatgcggctaatcctaactgcggagcatgtgccctcaatccagagggtagcgtgtcgtaacgggcaactctgcagcggaaccgactactttgggtgtccgtgtttctttttattcttatattggctgcttatggtgacaattgagagattgttgccatatagctattggattggccatccggtgagtaacagagctattatttactccatcgtaggcttcgtgccattgaactacaaggtcttgaaaactctcaactttgttataatacttaataccacaaa

SEQ ID NO: 1006 - DNA, 742 bp, Enterovirus B
  source 1..742: mol_type = genomic DNA
ttaaaacagcctgtgggttgttcccacccacagggcccactgggcgctagcacactggtatcacggtacccttgtgcgcctgttttatcttcccctccccactgtaacttagaagaatgacataaacggtcaacagatagctcagtacaccaactgagccccgaccaagcacttctgttaccccggaccgagtaacaataggctgctcgcgcggctgaaggtgaaaacgttcgttacccggccaattacttcgagaaacctagtaccaccatgaaggttgcgcagcgtttcgctccgcacaaccccagtgtagatcaggtcgatgagtcaccgcactccccacgggcgaccgtggcggtggctgcgctggcggcctgcctatggggcaacccatgggacgcttcaatactgacatggtgcgaagagtctattgagctaattggtagtcctccggcccctgaatgcggctaatcctaactgcggggcaagtgcccacaaaccagtgggtggcttgtcgtaacgggtaaccctgcagcggaaccgactactttgggtgtccgtgtttccttttattcttattctggctgcttatggtgacaattgagagattgttgccatatagctattggattggccatctggtgagtaacagagcaatcatattcctctttgttggatttataccacttgattccactagttacaacactctgctacatattatttgcttaaatacaagaag

SEQ ID NO: 1007 - DNA, 742 bp, Enterovirus B
  source 1..742: mol_type = genomic DNA
ttttaaagcctgtgggttgttcccacccacagggcccattgggcgctagcactctggtattgcggtacctttgtgcgcctgttttatatccccctcccccatttgaaacttagaagcaagacacaccgatcaatagctgatatggcaagccagccatatcttgatcaagtacttctgtttccccggaccgagtatcaatagactgcttgcgcggtcgaaggagaaagcgttcgttacccggctaattacttcgagaaacctagtaacaccatgaaagttgcagagtgtttcgctcagcacaaccccagtgtagatcaggctgatgagtcaccgcattccccacgggtgaccgtggcggtggctgcgttggcggcctgcctgtggggcaacccacaggacgctctaatacagacatggtgtgaagagtctattgagctaattagtagtcctccggcccctgaatgcggctaatcctaactgcggagcacgtacccccattccaggaggtggcgtgtcgtaacgggtaactctgcagcggaaccgactactttgggtgtccgtgtttccttttatctttacactggctgcttatggtgacaattgaaagattgttaccatatagctattggattggccatccggtgacaaatagagcgattgtatatttgttcattggatttgtaccactaagctataaagcattaaacactcttaaccttatcctagtgcttaactcaacaaa

SEQ ID NO: 1008 - DNA, 742 bp, Enterovirus B
  source 1..742: mol_type = genomic DNA
ttataaacagcgggctgggttgctcccactacagggcccacggcgcgcaagcacactggtatcacggtacttttgtgcgcctgttttatccaccctcccccaatgaaacttagaagcttgattcaaacggtcaatagacaacccagtacaccaactgggtctcgaccaagcacctctgtttccccggactgagtatcaataggctgcttacgtggctgaaggagaaaacgttcgttacccggccaattacttcgagaaacctagtaccaccatgaacgttgcgcagtgtttcgctccacacaaccccagtgtagatcaggtcgatgagtcaccgcattccccacgggtgaccgtggcggtggctgcgctggcggcctgcccatggggtaacccatgggacgctacaatactgacatggtgtgaagagtctattgagctaattggtagtcctccggcccctgaatgcggctaatcctaactgcggagcagatactcacatgccagtgggcagtctgtcgtaacgggcaactctgcagcggaaccgactactttgggtgtccgtgtttccttttattctcatctggctgcttatggtgacaatcgaaagactgttaccatatagctattggattggccatccagtgagtaacagagcgatcattttcctttttgttgggtttataccacttgattacaatagttacaataccttgctatacatcgttcatttgaacacaacaag

SEQ ID NO: 1009 - DNA, 742 bp, Enterovirus B
  source 1..742: mol_type = genomic DNA
ttaaaacagcctgtgggttgttcccacccacagggcccactgggcgctagcacactggtatcacggtacccttgtgcgcctgttttatcaaccccttcccgatgtaacttagaagccaaatcttaccggtcaacaggtggtccagtatgccaactgggctctgaccaagcacttctgttaccccggactgagtatcaataggctgctcacgcggctgaaggagaaaatgtccgttacccggccaattacttcgagaaacctagtaccaccatgaaggttgcgcggcgtttcgctccacacaaccccagtgcagatcaggtcgatgagccaccgcttcccccacgggcgaccgtggcggtggctgcgttggcggcctgcccatgggacaacccatgggacgcttcaatactgacatggtgcgaagagtctattgagctaattggtagtcctccggcccctgaatgcggctaatcctaactgtggagcagatgcccgcaagccagcgggtggtctgtcgtaacgggcaactccgcagcggaaccgactactttgggtgaccgtgtttccttttatttttatactggctgcttatggtgacaattgaaagattgttaccatatagctattggattggccatccggtgactaacagagctatcatatatctatttgttggttacgtcccacttgactatagagttctacgcaccttatatttcattttagatctgaacaaagcgag

SEQ ID NO: 1010 - DNA, 742 bp, Enterovirus B
  source 1..742: mol_type = genomic DNA
ttaaaacagcctgtgggttgttcccacccacagggcccatggggcgccagcacactggtattgcggtacctttgtgcgcctgttttattcaccctttcccaatgaaacttagaagcttaactcaaccggtcgatagacagcccagtacaccaactgggttttgaccaagtactcctgtttccccggactgagtatcaataagctgctcgcgcggctgaaggagaaaacgttcgttacccggccaattacttcgagaaacctagtaccaccatgaacgttgcgcagtgtttcgctccgcacaaccccagtgtagatcaggtcgatgagtcaccgcaatccccacgggcgaccgtggcggtggctgcgctggcggcctgcccatggggcatcccatgggacgcttcaatactgacatggtgcgaagagtctattgagctaattggtaatcctccggcccctgaatgcggctaatcctaactgcggggcagacacccacacgccagtgggcagtctgtcgtaacgggtaactccgcagcggaaccgactactttgggtgtccgtgtttccttttatctttatattggctgcttatggtgacaattgaaagattgttgccatatagctattggattggccatccggtgtctaatagagcaattatatatctctttgttggcttcatcccgttaaataaagtgagctaccagaccctgtgctatattatcaaattgaacacaataaa

SEQ ID NO: 1011 - DNA, 742 bp, Enterovirus B
  source 1..742: mol_type = genomic DNA
ttaaaacagcctgtgggttgcccccacccgcagggcccattgggcgctagcacactggtatcacggtacctttgtgcgcctgttttatcctccctccccaagtgcaacgtagaagcaagacacaaaaggtcaacagatagcccagcacaccagttgggtttcgaccaagcacttctgtctccccggaccgagtatcaataagctgctcacgcggctgaaggagaaagcgttcgttacccggctagttacttcgagaaacccagtaccaccatgaaggttgcgcagcgtttcgctccgcacaaccccagtgtagatcaggtcgatgagtcaccgcgttccccacgggcgaccgtggcggtggctgcgttggcggcctgcccatggggcaacccatgggacgcttcaatactgacatggtgcgaagagtctattgagctaactagtagtcctccggcccctgaatgcggataatcttaactgcggagcaggtgctcacaatccagtgggtggcctgtcgtaacgggcaactctgcagcggaaccgactactttgggtgtccgtgtttccttttatctctttgttggctgcttatggtgacaattgaatgattgttgccatatagctattggattggccatccggtgagcagcagatccattatttaccagtttgttggatttgtaccacttgatcacatagtctttagaacacttgtctttattctaaatcttaacaaggcaag

SEQ ID NO: 1012 - DNA, 742 bp, Enterovirus B
  source 1..742: mol_type = genomic DNA
ttaaaacagcctgtgggttgttcccacccacagggcccaccgggcgctagcacactggtattgcggtacctttgtgcgcctgttttatacacccctccttaatgtaactcagaagtacaacattaccggtcaacagatgactcagtaaaccaactgagcctcgaccaagcacttctgtttccccggaccgagtatcaataggctgctcacgcggctgaaggagaaagtgttcgttacccggccaattacttcgagaagcccagtaccaccatggaggttgcgcggcgtttcgctccgcacatccccagtgtagatcaggctgatgagtcaccgcgttccccacgggtgaccgtggcggtggctgcgctggcggcctgcccatggggtaacccatgggacgcttcaatactgacatggtgtgaagagcctattgagctaattggtagtcctccggcccctgaatgcggctaatcctaactgcggagcagatacccacacaccagcgggcagtctgtcgtaacgggcaactctgcagcggaaccgactactttgggtgtccgtgtttccttttatttttatgctggctgcttatggtgacaattgaggaattgttaccatatagctattggattggccatccagtgtccaacagagcgatcatttacctgttcgttgggttcgtaccactaaaccacaagtcactcagcacacttaattacattataactctcaacacaacaag

SEQ ID NO: 1013 - DNA, 742 bp, Enterovirus B
  source 1..742: mol_type = genomic DNA
ttaaaacagcctgtgggttgttcccatccacagggcccactgggcgctagcacactggtatcacggtacctttgtgcgcctgttttatttcccccctcccgaagtaacctagaagcaggtaatatacggtcaataggtgacacagtataccaactgggtcttgaccaagcacttctgttaccccgggctgagtatcaataagctacttacgtggctgaaggagaaaacgctcgttacccggccaattacttcgagaaacctagtaacaccatgaaggttgcgcagtgtttcgctccgcacaaccccagtgtagaccaggtcgatgagtcaccgcattccccacgggcgaccgtggcggtggctgcgttggcggcctgcccatggggcaacccatgggacgcttcaaaactgacatggtgcgaagagtctattgagctaattggtagtcctccggcccctgaatgcggctaatcccaactgcggagcaaatacccacatgccagtgggcagtctgtcgtaatgggtaactctgcagcggaaccgactactttgggtgtccgtgtttctttttattcttatactggctgcttatggtgacaattgaggaattgttgccatatagctattggattggccatccggtgacaaacagagcaattatttacttgtttgttggattcgtaccgctaaaccacagagtactaagcacccttaattttattatattacttaactcgacaaa

SEQ ID NO: 1014 - DNA, 742 bp, Enterovirus B
  source 1..742: mol_type = genomic DNA
ttaaaacagcctgtgggttgttcccacccacagggcccactgggcgctagcacactggtattacggtacctttgtgcgcctgttttatctacccttgcccaatgcaacatagaagcttagtccaaaaggtcaataggcagcccagtgcaccaactgggtccagaccaagcacttctgttaccccggaccaagtatcagtaggctgctcacgcggctgaaggagaaaacgttcgttacccggccaactacttcgagaaacctagtagcaccatgaaggttgcgcagtgtttcgctccgcacagccccagtgtagatcaggtcgatgagccaccgcattccccacgggtgaccgtggcggtggctgcgttggcggcctgcccatggggtaacccatgggacgcttcaatactgacatggtgtgaagagtctattgagctagttggtagtcctccggcccctgaatgcggctaatcctaactgcggagcgtgcgcttgcaacccagtgagtagcacgtcgtaatgggtaactctgcagcggaaccgactactttgggtgtccgtgtttccttttattccttgtctggctgcttatggtgacaattgagagattgttgccatatagctattggattggccatccggtatctaacagggcgatcatttacctgtttgttggtttcatacccttgaatcttgaggtttataataccctcactcttataataaaactcaatacatcaag

SEQ ID NO: 1015 - DNA, 742 bp, Enterovirus B
  source 1..742: mol_type = genomic DNA
ttaaaacagcctgtgggttgtacccacccacagggcccactgggcgccagcacactggtatcacggtacccttgtgcgcctgttttatccacccctccccgaagtaacttagaagctctaaataagcggtcagcagccagcccagcacaccagctgggttttgaccaagtacttctgttaccccggaccgagtatcaataggctgcacacgcggctgaaggagaaaacgttcgttacccggccatctacttcgagaaacctagtaccactatgaaagttgcgaagcgtttcgctccacacaaccccagtgtagatcaggctgatgagtcaccgcattccccacaggtgactgtggcggtggctgcgttggcggcctgcccatggggcaacccatgggacgcttcaataccgacatggtgcgaagagtctattgagctagatggtagtcctccggcccctgaatgcggctaatcctaactgcggagcaggtgcacacaaaccagtgagtagcctgtcgtaatgggcaactctgcagcggaaccgactactttgggtgtccgtgtttctttttattcttatattggctgcttatggtgacaattgaaagattgttaccatatagctattggattggccatccggtgactagcagagcactgatatacctatttgtgggctttgtaccactcaactttgtcagctacaccacattgctatatattgtccaactgaacgcaagaag

SEQ ID NO: 1016 - DNA, 742 bp, Enterovirus D
  source 1..742: mol_type = genomic DNA
ataaaacagcctgtgggttgttcccacccacagggcctactgggcgctagcacactggtattgcggtacctttgtgcgcctgttttatctgcccttccccaatgtaacttagaagttaaactcagacggccaatagacagcccagtacaccaactgggtctcggccaggcacttctgtttccccggactgagtatcaataagctgctcgcgcggctgaaggagaaaacgttcgttatccggccaattacttcgagaaacctagtaccaccatggacgttgcgcagtgtttcgctccgcacaaccccagtgtagatcaggtcgatgagtcaccgcaatccccatgggcgaccgtggcggtggctgcgctggcggcctgcccatgggtcaacccatgggacgcttcaatactgacatggtgtgaagagtctattgagctaattggtagtcctccggcccctgaatgcggctaatcccaactgcggagcagatacccacacgccagtgggcagtctgtcgtaacgggcaactctgcagcggaaccgactactttgggtgtccgtgtttccttttatccttacattggctgcttatggtgacaattgagagattgttaccatatagctattggattggccatccagtgagcaacagagcaattatatttctctttgttgggtttgtaccacttgattttgatagttacaacaccctactttatattgttcgcctgaacacgagaaa

SEQ ID NO: 1017 - DNA, 742 bp, Enterovirus B
  source 1..742: mol_type = genomic DNA
ttaaaacagctctggggttgttcccaccccagaggcccacgtggcggccagtactccggtattgcggtacccttgtacgcctgttttatactcccttcccccgtaacttagaagaaataaaccaagttcactaggagggggtacaaaccagtaccaccacgaacaagcacttctgtttccccggtgacattgcatagactgtacccacggttgaaagcgactgatccgttacccgctactgtacttcgagaagcctagtaccatcttggaatcttcgacgcgttgcgctcagcactcaaccccagagtgtagcttaggtcgatgagtctggacaatccccaccggtgacggtggtccaggctgcgttggcggcctacctgtggcccaaagccacaggacgctagttgtgaacaaggtgtgaagagcctattgagcttcagtagagtcctccggcccctgaatgcggctaatcccaaccacggagcaggtggtcataatccaatgactggcctgtcgtaacgcgcaagtctgtggcggaaccgactactttgggtgtccgtgtttccttttattttgtcaatggctgcttatggtgacaatctaagattgccatcatatagcttttggattggccatccggtattattttgagttatttgatttgttgtccacagctctttacagtatcacttaactattattgtttgtattttgctccttggatcacaaccaggtaatcaga

SEQ ID NO: 1018 - DNA, 742 bp, Enterovirus B
  source 1..742: mol_type = genomic DNA
ttaaaacagcctgtgggttgttcccacccacagggcccattgggcgctagcactctggtattacggtacctttgtgcgcctgttttatgtcccctcccccaatcgcaacttagaagcaacacacactgatcaacagtaagcgtggcataccagccacgttttgatcaagcacttctgttaccccggactgagtatcaatagactgctcacgcggttgaaggagaaagcgttcgttatccggccaactacttcgagaaacctagtaacaccgtgaaagttgcagagtgtttcgctcagcactaccccagtgtagatcaggtcgatgagtcaccgcattccccacgggcgaccgtggcggtggctgcgctggcggcctgcctacggggaaacccgtaggacgctctaatacagacatggtgcgaagagtctattgagctagttggtagtcctccggcccctgaatgcggctaatcctaactgcggagcacacacccccaagccagggggcagtgtgtcgtaacgggtaactctgcagcggaaccgactactttgggtgtccgtgtttcattttattcctatgctggctgcttatggtgacaattgacagattgttaccatatagctattggattggccatccggtgactaatagagccattatataccactttgttgggtttataccactcaacttgaaagaggtcaaaacactacagctcatcattaaattgaacacaacaaa

SEQ ID NO: 1019 - DNA, 742 bp, Enterovirus B
  source 1..742: mol_type = genomic DNA
tttaaaacagcctgtgggttgttcccacccacagggcccactgggcgctagcactctggtatcacggtacccttgtgcgcctgttttatatccccaccccagtggaacattagaagcagcacacctatgatcaatagtgggcgtggcatccagtcacgttatgatcaagcacttctgtgaccccggactgagtatcaatagactgctcacgcggttgaaggagaaaacgttcgttacccggccagttacttcgagaaacccagtaacaccatgaatgttgcagagtgtttcgctcagcacttcccccgtgtagatcaggtcgatgagccactgcattccccacgggcgaccgtggcagtggctgcgttggcggcctgcctatggggtcacccataggacgctctaatactgacatggtgcgaagagtctattgagctaactggtagtcctccggcccctgaatgcggctaatcctaactgtggagcacattcccccaatccagggggcagtgtgtcgtaacgggcaactctgcagcggaaccgactactttgggtgtccgtgtttctttttattctcatattggctgcttatggtgacaattacagaattgttaccatatagctattggattggccatccggtgactaacagagcaattatttatcaattcgttggatttgtcccactcgatttcaaagcagtcaatacactctcatatatcgttacactcaacacaacaaa

SEQ ID NO: 1020 - DNA, 742 bp, unidentified
  source 1..742: mol_type = unassigned DNA; note = unclassified Enterovirus sequence
ttaaaacagcctgtgggttgttcccacccacagggcccactgggcgctagcacactggtatcacggtacctttgtgcgcctgttttatccacccttccccaagtgacttagaagcataccacacacggtcaacaggcggctcaatgcaccaattgagtcatgaccaagtacttctgttaccccggacttagtatcaataagctgctcacgcggctgaaggagaaaacgttcgttacccggccaattacttcgagaaacctagtagcaccatggaggttgcgcggcgtttcgctccacacaaccccagtgtagatcaggctgatgagtcaccacaatcctcacgggcgaccgtggtggtggctgcgctggcggcctgcccatggggtaacccatgggacgctacaatactgacatggtgtgaagagtctattgagctaattggtagtcctccggcccctgaatgcggctaatcctaactgcggagcagatacccacacaccagtgggcagtctgtcgtaacgggcaactctgcagcggaaccgactactttgggtgtccgtgtttccttttttctcttatactggctgcttatggtgacaattgaaagattgttaccatatagctattggattggccatccagtgacaaacagagcgattgtttacctgttcattggtttcgtaccgctgaattacacagttttaaacacccttaatcttattttggcacttaatacatcaaa

SEQ ID NO: 1021 - DNA, 742 bp, Enterovirus B
  source 1..742: mol_type = genomic DNA
ttaaaacagctctggggttgtacccactcacagggcccactgggcgctagcacactggtatcacggtacctttgtgcgcctgttttataaccccttccccaaacgtaacgtagaagctacacacactgatcaatagtaggcacagcgcaccagttgtgtcccgatcaagcacttctgtctccccggaccgagtatcaatagactgctcacgcggttgaaggagaaaacgttcgttaaccggctgactacttcgagaaacctagtagtactatgaaagttgcgaagcgtttcactcagcacttcccccgtgtagatcaggctgatgagtcactgcgttccccacgggtgaccgtggcagtgactgcgttggcggcctgcccatggggtaacccatgggacgcttcaatacggacatggtgcgaagagtctattgagctagccagtagtcctccggcccctgaatgcggctaatcctaactgcggagcatgtgccctcgatccagggggtagcgtgtcgtaacgggcaactctgcagcggaaccgactactttgggtgtccgtgtttctttttattcttatattggctgcttatggtgacaattgagagattgttaccatatagctattggattggccacccggtgactaatagagctattatctactcctttataggttttgtgccgttgaactacaaggtcttaaggactctcaactttatcataatacttaatactgcaaa

SEQ ID NO: 1022 - DNA, 742 bp, Enterovirus B
  source 1..742: mol_type = genomic DNA
ttaaaacagcctgtgggttgttcccatccacagggcccactgggcgcttgcactctggtatcacggtaccattgtgcgcctgttttatatcccctatccccagttgtaacttagaagcgatgccttccgaccaatagtgggcatggcacaccagtcatgtcttggtcaagtacacctgtttccccggactgagtatcaatagactgctcacgcggttgaaggagaaaacgttcgttacccggctaactacttcgagaaacctagtaacaccatgaatattgcgaagtgtttcgttcagcaccccccagtgtagatcaggccgatgagtcaccgcgttccccacaggcggccgtggcggtggctacgctggcggcctgcctatggggcaacccataggacgcttcaatgtggacatggtgtgaagagtctattgagctagttagtagtcctccggcccctgaatgcggctaatcctaatctcggagcaggcacccacaaaccagtgggcaacctgtcgtaatgggtaactctgcggcggaaccgactactttgggtgtccgtgtttccctttattcttgtattggctgcttatggtgacaattaggagattgttaccatatagctattggattggccatccggtgtctaacagagcaattatttacctctttgttggttacgtaccattaaactttaaggttatagcaacgctcaagtttatcctacttctcaataaagtaaa

SEQ ID NO: 1023 - DNA, 742 bp, Enterovirus A
  source 1..742: mol_type = genomic DNA
ttaaaacagcctgtgggttgttcccacccacagggcccactgggcgttagcacactggtatcaaggtacctttgtgcgcctgttttattcacccttccccttcgtaacttagaagcatagctcagacggtcaatagacagcccagcataccagctgggtcatgaccaagcacttctgttgccccggactgagtatcaataggctgcttgcgcggctgaaggagaaaagttcgttacccggccagttacttcgagaaacctagtaacaccatggaagttgcgtagtgtttcgctccgcacaaccccagtgtagatcaggtcgatgagtcaccgcataccccacgggtgaccgtggcggtggctgcgttggcggcctgcccatggggcatacccatgggacgctacaatactgacatggtgcgaagagtctattgagctaattggtagtcctccggcccctgaatgcggctaatcctaactgcggagcagatacccacacaccagtgggcggtctgtcgtaacgggtaactctgcagcggaaccgactactttgggtgtccgtgtttccttttattcctaatctggctgcttatggtgacaattgagagattgttaccatatagctattggattggccatccggtgactaacagagcgatcatctacctgtttgttggtttcattccactaaactacaaagtactaaacactctgaattacattttactgcttaactcatcaaa

SEQ ID NO: 1024 - DNA, 743 bp, Enterovirus A
  source 1..743: mol_type = genomic DNA
ttaaaacagctgtgggttgtcacccacccacagggtccactgggcgctagtacactggtatctcggtacctttgtacgcctgttttataccccctccctgatttgcaacttagaagcaacgcaaaccagatcaatagtaggtgtgacataccagtcgcatcttgatcaagcacttctgtatccccggaccgagtatcaatagactgtgcacacggttgaaggagaaaacgtccgttacccggctaactacttcgagaagcctagtaacgccattgaagttgcagagtgtttcgctcagcactccccccgtgtagatcaggtcgatgagtcaccgcattccccacgggcgaccgtggcggtggctgcgttggcggcctgcctatggggtaacccataggacgctctaatacggacatggcgtgaagagtctattgagctagttagtagtcctccggcccctgaatgcggctaatcctaactgcggagcacatacccttaatccaaagggcagtgtgtcgtaacgggcaactctgcagcggaaccgactactttgggtgtccgtgtttctttttattcttgtattggctgcttatggtgacaattaaagaattgttaccatatagctattggattggccatccagtgtcaaacagagctattgtatatctctttgttggattcacacctctcactcttgaaacgttacacaccctcaattacattatactgctgaacacgaagcg

SEQ ID NO: 1025 - DNA, 743 bp, Enterovirus A
  source 1..743: mol_type = genomic DNA
ttaaaacagcctgtgggttgcacccactcacagggcccactgggcgcaagcactctggcacttcggtacctttgtgcgcctgttttatatcccctcccccaatgaaatttagaagcagcaaaccccgatcaatagcaggcataacgctccagttatgtcttgatcaagcacttctgtttccccggactgagtatcaatagactgctcacgcggttgaaggagaaaacgttcgttatccggctaactacttcggaaagcctagtaacaccatggaagttgcggagagtttcgttcagcacttccccagtgtagatcaggtcgatgagtcaccgcattccccacgggcgaccgtggcggtggctgcgttggcggcctgcccatggggtaacccatgggacgctctaatacggacatggtgtgaagagtctactgagctagttagtagtcctccggcccctgaatgcggctaatcccaactgcggagcacacgcccacaagccagtgggtagtgtgtcgtaacgggcaactctgcagcggaaccgactactttgggtgtccgtgtttccttttattcttatgttggctgcttatggtgacaattaaagagttgttaccatatagctattggattggccatccggtgtgcaacagagcgatcgtttacctatttattggttttgtaccattgacactgaagtctgtgatcacccttaattttatcttaaccctcaacacagccaaac

SEQ ID NO: 1026 - DNA, 743 bp, Enterovirus A
  source 1..743: mol_type = genomic DNA
ttaaaacagcctgtgggttgtacccaccctcagggcccactgggcgccagcactctggtaccacggtacctttgtgcgcctgttttatcatcccacccctacctgaaacgtagaagcaataatcagtcgaccaatagtgggtgtggcacaccagccacatcttggtcaagcacttctgtttccccgggttgagtatcaatatgctgttcacacggctgaaggagaaaacgcccgttatccggccaactacttcgagaagcctagtatcgccatgaacattgcaaggcgtttcgctcagcacttcccccgtgtagatcaggccgatgagtcaccgcattccccacgggcgaccgtggcggtggctgcgttggcggcctgcctgtgggttgacccacaggacgccttaatatagacatggtgtgaagagcctattgagctggttggtattcctccggcccctgaatgcggctaatcctaactgtggagcacatactcacaagccagtgggtggtgtgtcgtaatgggcaactctgcagcggaaccgactactttgggtgtccgtgtttccttttatacttatactggctgcttatggtgacaatcagagaattgttaccatatagctattggattggccatccggtgtgcaacagagctattgtgtatttatttgttggatttgtcccactatcacatacatcccttaacactttgtattttattttgaaattaaacgcaagaaa

SEQ ID NO: 1027 - DNA, 743 bp, Enterovirus A
  source 1..743: mol_type = genomic DNA
tttaaaacagcctgtgggttgcacccacccacagggcccactgggcgctagcactctggtactgcggtacctttgtgcgcctgttttatcaccccaccccatctggaacgtagaagcaatgcacaactgaccaatagtgggtgtggcgcaccagccacatcttggtcgagcacttctgtttccccgggtttagtatcaataagctgctcacgcggctgaaggagaaaacacccgttatccggccgactacttcgagaaacctagtaccgctatgaacgttgcaaggcgtttcgttcagcacttcccccgtgtagatcaggccgatgagtcaccgcattcctcacgggcgaccgtggcggtggctgcgttggcggcctgcctatgggcttgcccataggacgccttaatactgacatggtgcgaagagtctattgagctagttggtagtcctccggcccctgaatgcggctaatcctaactgcggagcacatactcacaaaccagtgagcggtgtgtcgtaacgggcaactctgcagcggaaccgactactttgggtgtccgtgtttccttttattcttatactggctgcttatggtgacaattaaagaattgttaccatatagctattggattggccatccggtgtctaacagagctattatatacttgtttgttggattcatctcgttatcacacaaatcccttaacactttgtgttttatcttgaatttgaactcaaaaag

SEQ ID NO: 1028 - DNA, 743 bp, Enterovirus A
  source 1..743: mol_type = genomic DNA
tttaaaacagcctgtgggttgtacccacccacagggcctactgggcgccagcactctggtactatggtacctttgtgcgcctgttttatattcctcccccaaattgcaacttagaagacatgcactccgatcaatagcaggcgtggcgcaccagctgcgtcttgatcaagcatttctgtttccccggactgagtatcaatagactgctcacgcggttgagggagaaaacgtccgttacccggccaactacttcgagaagcctagtaacactatgaaagttgcggggcgtttcgctcagcactcccccagtgtagatcaggtcgatgagtcaccgcattccccacgggcgaccgtggcggtggctgcgttggcggcctgcctatggggcaacccatgggacgctctaatatggacatggtgtgaagagcttattgagctagttggtagtcctccggcccctgaatgcggctaatcctaactgcggagcacgtgcctccaaaccagaaggtggcgtgtcgtaatgggcaactctgcagcggaaccgactactttgggtgtccgtgtttccttttattcttactctggctgcttatggtgacaattgacagattgttaccatatagctattggattggccatccggtgacgaacagagcgattgtgtaccagtttattggtttcgtccacttgaatacacgtgaattcaataccttgctgttggtattgaatttcaatacaacaaa

SEQ ID NO: 1029 - DNA, 743 bp, Enterovirus A
  source 1..743: mol_type = genomic DNA
ttaaaacagcctgtgggttgcacccacccacagggcccaatgggcgtcagcactctggtaccgaggtacctttgtgcgcctgttttatttccccttcccctgatgcaacttagaagctccgaactaatgatcaatagtaggtgtggcacgccagccacatcttgatcaagcacttctgtttacccggaccgagtatcaataagctgcgcaagcggctgaaggagaaagcgttcgttatccggccaactacttcgagaagcttagtaccaccatgaacgttgcagagtgtttcgttcagcacaaccccggtgtagatcaggccgatgagtcaccgcgttccccatgggcgaccatggcggtggctgcgttggcggcctgcccatggagcaatccatgggacgctctaatactgacatggtgcgaagagcctattgagctagttggtgatcctccggcccctgaatgcggctaatcctaactgcggagcatgcgcccacaagccagtgggtggtgtgtcgtaacgggtaactctgcagcggaaccgactactttgggtgtccgtgtttccttttatctttacattggctgcttatggtgacaattgaagaattgttaccatatagctattggattggccatccggtgtgcaatagagcgattatatacctatttgttggatttgttccattgacatatagatctcttaacactctacaacacatcttgatcttgaacacgagaaa

SEQ ID NO: 1030 - DNA, 743 bp, Enterovirus A
  source 1..743: mol_type = genomic DNA
ttaaaacagcctgtgggttgtacccacccacagggcccactgggcgctagcactctgattctacggaatctttgtgcgcctgttttacaaccccctccccctatgtaacttagaagcaatgcaccaatgatcaacagcaggcgtggcgcaccagccatgtcttgatcaagcacttctgtttccccggacagagtatcaatagactgctcgcgtggtcgaaggagaaaacgtccgttacccggctaactacttcgagaaacctagtagcaccaatgaagctgcagagcgtttcgctcagcacttaccccgtgtagatcaggccgatgagtcactgcgttccccacgggcgaccgtggcagtggctgcgttggcggcctgcctatggggtcacccataggacgctctaatgtggacatggtgcgaagagtctattgagctagttagtagtcctccggcccctgaatgcggctaatcctaactgcggagcgcataccctcaaaccagggggtggtgcgtcgtaacgggtaactctgcagcggaaccgactactttgggtgtccgtgtttccttttattttcttaatggctgcttatggtgacaattgaggaattgttaccatatagctattggattggccatcaggtgtgtaacagagcaattatctacttgtttgtaggatataccccattaacgttcaaatctcttaacacactacagtacatactaactttgaacacaagaaa

SEQ ID NO: 1031 - DNA, 743 bp, Enterovirus A
  source 1..743: mol_type = genomic DNA
ttaaaacagcctgtgggttgtacccacccacagggcccactgggcgccagcactctggtaatacgttacctttgtgcgcctgttttacctccccctaccctggaacactttagaagtaaagcatatctggtcaatagaaggtgtggcgaaccagctgcatctcgaccaagcacttctgtttccccggactgagtatcaatagactgctaacgcggtcgaaggagaaaacgttcgttatccggctagctacttcgagaagcctagtaacaccatgaaagttgcagagtgtttcactcagcacttcccccgtgtagatcaggtcgatgagtcaccgcgacccccacgggcgaccgtggcggtggctgcgttggcggcctgcctgtggggcaacccataggacgctctaatacagacatggtgtgaagagcctattgagctagctagtagtcctccggcccctgaatgcggctaatcctaactgcggagcacatgctcgtgaaccagcgagtagtgtgtcgtaatgggtaactctgcagcggaaccgactactttgggtgtccgtgtttctttttattcttacattggctgcttatggtgacaattaaagaattggcaccatatagctattggattggccatcctgtgactaacagagctattatatatctctttgttggatttgttcccttgaggctcactacttataacacactttgttttatattgactctcaattcagcaaa

SEQ ID NO: 1032 - DNA, 743 bp, Enterovirus A
  source 1..743: mol_type = genomic DNA
ttaaaacagcctgtgggttgtacccacccacagggcccactgggcgcgagcactctggtatcacgatacctttgtgcgcctgttttatatcccttccccattaatgtaacatagaagttatgcaccccgatcaatagcaggcatggcgctccagctatgtcttgatcaagcacttctgtttccccggactgagtatcaatagactgcttgcgcggttgaaggagaaaacgttcgttatccggctaactacttcgggaagcttagtaatgccatggaagttgcggagagtttcgctcagcacttccccagtgtagatcaggctgatgagtcaccgcattccccacgggtgaccgtggcggtggctgcgttggcggcctgcccatagggagacctatgggacgctctaatacggacatggtgtgaagagcctactgagctagttagcagtcctccggcccctgaatgcggctaatcctaactgcggagcacgcgtctccaatccaggggatagcgtgtcgtaatgggcaactctgcagcggaaccgactactttgggtgtccgtgtttccttttattcttacactggctgcttatggtgacaattgaggaattgttaccatatagctattggattggccatccggtgactaacagagctattatttaccaatttgttggatttgtacctctttcactcaccgtttaccacacccttctatacctattacaactgaatagtagaag

SEQ ID NO: 1033 - DNA, 743 bp, Enterovirus C
  source 1..743: mol_type = genomic DNA
ttaaaacagcctgtgggttgttcccaccccagaggcccacgtggcggctagtactctggtattacggtacctttgtacgcctgttttatactccctccccatgtaactttagaagcaattcaataagttcaatagagggggtacaaaccagtaccaccacgaacaagcacttctgtctccccggtgatcttgcatagactgttcccacggttgaaagcgagtgatccgttatccgcttgagtacttcgagaagcctagtaccaccttggaatcttcgatgcgttgcgctcagcactctgccccgagtgtagcttaggctgatgagtctgggctttccccaccggcgacggtggcccaggctgcgttggcggcctacccgtggtcaacaccacgggacgctagttgtgaacaaggtgtgaagagcctattgagctactcaagagtcctccggcccctgaatgcggctaatcctaaccatggagcaggtactctcaacccagagggcagcctgtcgtaacgcgtgagtccgtggcggaaccgactactttgggtgaccgtgtttccttttatttttgactggctgcttatggtgacaatcatagattgttatcatagagcgaattggattggccatccagtgaaatataaacacgttatctacttgtttgttggatttactccactcactcagtttacccctagcataataatagcagtactactgataaggaattattgccacc

SEQ ID NO: 1034 - DNA, 743 bp, Enterovirus B
  source 1..743: mol_type = genomic DNA
tttaaaacagcctgtgggttgttcccacccacaggcgccaccgggcgttagcacactggtatcacggtacccttgtgcgcctgttttataaccccaccccgagtaaaccttagaagcaatgcacctctggtcaatagtaggtgtgacacaccagtcacatcgtgaccaagcacttctgtctccccggactgagtatcaataggctgctcgcgcggctgaaggagaaagcgttcgttacccggccagctacttcgagaagcctagtaacaccatgaaggttgcagagtgtttcgctcagcacttcccctgtgtagatcaggccgatgagtcaccgcgttcctcacgggcgaccgtggcggtcgctgcgctggtggcctgcctatggggcaacccataggacgctctaatgctgacatggtgcgaagagtctattgagctagctggtagtcctccggcccctgaatgcggctaatcccaactgcggagcacgcaccctcaaaccagggggcagcgtgtcgtaacgggcaactctgcagcggaaccgactactttgggtgtccgtgtttctttttattcctatattggctgcttatggtgacaattgagagattgttaccatatagctattggattggccatccggtgagcaacagagctattgtgtatctgtttactggtttcataccccttaattacaaagaagtcaaaacccttcacttgatcttgttattcaatacaacaaa

SEQ ID NO: 1035 - DNA, 743 bp, Enterovirus C
  source 1..743: mol_type = genomic DNA
ttaaaacagctctggggttgttcccaccccagaggcccacgtggcggccagtactctggtatcacggtacctttgtacgcctgttttatactcccttcccgcaacttagacgcataaaaaccaagttcaatagaagggggtacaagccagtaccaccacgaacaagcacttctgtttccccggtgatgttgtatagactgctcgcgtggttgaaagcgacagatccgttatccgcttgtgtacttcgagaagcccagtaccaccttggaatcttcgatgcgttgcgctcagcactcaaccccagagtgtagcttaggctgatgagtctggacatcccccaccggtgacggtggtccaggctgcgttggcggcctacccatggctaacgccatgggacgctagttgtgaacagggtgtgaagagcctattgagctacataagagtcctccggcccctgaatgcggctaatcccaacctcggagcaggtggtcacataccagtgactggcctgtcgtaacgcgcaagtccgtggcggaaccgactactttgggtgtccgtgtttccttttattttataatggctgcttatggtgacaatcacagattgtcgtcataaagcgaattggattggccatccggtgatagtgaaattcattacttaactgtttactggattcgctccaccgcaagtgtttgctctgagtacaatttcaatagttactttaagtagacaattgtattaca

SEQ ID NO: 1036 - DNA, 743 bp, Enterovirus B
  source 1..743: mol_type = genomic DNA
ttaaaacagcctgtgggttgtacccacccacagggcccactgggcgctagcactctggtattacggtacccttgtgcgcctgttttatataccccgccccaagcaaacgctagatgtaacgcacttatgatcaatagcaggcgtggcactccagccacgttatgatcaagcacttctgtctccccggaccgagtatcaatagactgctcacgcggtcgaaggagaaaacgttcgttacccgaccagctacttcgagaaacctagtaactccatggaggttgcagagtgtttcgttcagcacttcccccgtgtagatcaggctgatgagtcaccgcgttcctcacgggcgaccgtggcggtggctgcgttggcggcctgcctatgggtatacccataggacgctctaatactgacatggtgcgaagagtctattgagctagttggtagtcctccggcccctgaatgcggctaatcctaactgcggagcacatacccccaacccagggggcagtgtgtcgtaacgggtaactctgcagcggaaccgactactttgggtgtccgtgtttccttttattcttacattggctgcttatggtgacaattgagagattgttaccatatagctattggattggccatccagtgactaacagagctattatttacctttttgttggcttcgtatcacttggtttaaaagaggttagtactttatattgcattatattactaaacacgagaaa

SEQ ID NO: 1037 - DNA, 743 bp, Enterovirus B
  source 1..743: mol_type = genomic DNA
ttaaaacagcctgtgggttgttcccacccacagggcccactgggcgttagcactctggtatcgcggtacccttgtgcgcctgttttatccgccctttcccaaacgtaacttagaagctcaacttgaatggtcagcaggaaacccagtacgccaactgggtcacgaccaagcacttctgtaaccccgggccgagtatcaataagctgctcacgcggttgaaggagaaaacgcccgttacccggccaattacttcgagaaacctagtaccaccatggaggttgcgtagtgtttcgctccgcacaaccccagtgtagatcaggccgatgagtcaccgcgttccccacgggcgaccgtggcggtggctgcgttggcggcctgcccatgggataacccatgggacgcttcaatactgacatggtgcgaagagtctattgagctaattggtagtcctccggcccctgaatgcggctaatcccaactgcggagcagatacccacatgccagtgggcagtctgtcgtaacgggcaactctgcagcggaaccgactactttgggtgtccgtgtttccttttattcatacattggctgcttatggtgacaattgaaagattgttaccatatagctattggattggccatccggtgtctaatagagcgattgtctacttgttcattgggtttgtacctttaaaccttaaagttcttaacactctcaaccttgtgctacaactcaacacggcaaa

SEQ ID NO: 1038 - DNA, 743 bp, Enterovirus B
  source 1..743: mol_type = genomic DNA
ttaaaacagcctgtgggttgatcccacccacagggcccactgggcgtcagcactctggtatcacggtacctttgtgcgcctgttttatactccctccccccaaccgtaacttagaagcagcactaactgatcaatagccagcgcggcatgccagccacgcttcgatcaagcacttctgttaccccggactgagtatcaatagactgctcacgcggttgaaggagaaaacgttcgtcatccggccaactacttcgagaaacctagtaacaccatggaagttgcggagtgtttcgctcagcactaccccagtgtagatcaggtcgatgagtcaccgcattccccacaggcgactgtggcggtggctgcgttggcggcctgcccatggggaaacccatgggacgctcttatatagacatggtgcgaagagtctattgagctagttggtagtcctccggcccctgaatgcggctaatcctaactgcggagcatacaccctcaaaccagagggcagtgtgtcgtaatgggcaactctgcagcggaaccgactactttgggtgtccgtgtttcactttatttctaaattggctgcttatggtgacaattgagagattgttaccatatagctattggattggccatccggtgaccaatagagctattatatatctctttgttgggttcataccacttagcttgaaagaggttaaaactctgcattacattatactattgaattccgcaaa

SEQ ID NO: 1039 - DNA, 743 bp, Enterovirus B
  source 1..743: mol_type = genomic DNA
ttaaaacagcctgtgggttgttcccacccacagggcccattgggcgtcagcactctggtatcacggtacccttgtgcgcctgttttataatccctttccccacaagtaacttagacacagcacaaaccgatcaacagtaggcgtgacactccagtcatgtcgtgatcaagcacttctgttaccccggaccgagtatcaatagactgcttacgcggttgaaggagaaaacgcccgttacccggccaactacttcgagaaacccagtaacaccatggaaattgcggagtgtttcgctcagcacaaccccagtgtagatcaggtcgatgagccaccacattccccacgggtgaccgtggtggtggctgcgttggcggcctgcctatgggggaacccataggacgcttcaatacggacatggtgcgaagagtctattgagctagttggtaatcctccggcccctgaatgcggctaatcctaactgcggagcgcgtgcccccaaaccaggaggtggcgcgtcgtaatgggcaactccgcagcggaaccgactactttgggtgtccgtgtttccttttatatttttattggctgcttatggtgacaattgagaaattgttaccatatagctattggattggccatccggtgtctaacagagcgattatttatctttttgttggatttgtaccactcaacataacaaactatcagactttgtgttgcattattggattgaacacagcaaa

SEQ ID NO: 1040 - DNA, 743 bp, Enterovirus B
  source 1..743: mol_type = genomic DNA
tgtgctcttccgatctggttgttcccacccacagggcccactgggcgccagcacactggtattacggtacccttgtgcgcctgttttatccacccccccccactgtaacttagaagataaccacacgcggtcaataggtgactcagtacgccaactgggtcgcgaccaagcacttctgttaccccggaccgagtatcaataagctgctcgcgcggctgaaggagaaaacgttcgttacccggccaattacttcgagaaacctagtaccaccatggaggttgcgcagcgtttcgctccgcacaaccccagtgtagatcaggtcgatgagtcaccgcaatccccacaggcgactgtggcggtggctgcgttggcggcctgcccatggggaaacccatgggacgcttcaatatcgacatggtgcgaagagtctattgagctaattggtagtcctccggcccctgaatgcggctaatcctaactgtggagcagatacccacactccagtgggcagtctgtcgtaatgggcaactctgcagcggaaccgactactttgggtgtccgtgtttccttttattcctatgctggctgcttatggtgacaattgacagattgttaccatatagctactggattggccatccggtgacaagcagagcgattgtttacttatttgttggtttcattccactcaattataaagtactaaacacccttaatttcattataactcttaacacgttaaa

SEQ ID NO: 1041 - DNA, 743 bp, Enterovirus B
  source 1..743: mol_type = genomic DNA
ttaaaacagcctgtgggttgaacccatccacagggcccactgggcgcaagcacactggtatcacggtacctttgtgcgcctgttttatccacccttccccgaacgaaacttagaagtttgacttaaacggtcaatagaaagcccagtacaccaactgggtcgtgaccaagcacttctgtgaccccggactgagtatcaataagctactcacgtggctgaaggagaaaacgttcgttatccggccaattacttcgagaaacttagtaccaccatgaaggttgcgtagcgtttcgctccgcacaaccccagtgtagatcaggtcgatgagtcaccgcgttcctcacgggcgaccgtggcggtggctgcgttggcggcctgcccttggggcaacccaagggacgcttcaatactgacatggtgcgaagagtctattgagctaattggtagtcctccggcccctgaatgcggctaatcctaactgcggagcagatacccacatgccagtgggcagtctgtcgtaatgggcaactctgcagcggaaccgactactttgggtgtccgtgtttccttttattcttatactggctgcttatggtgacaattgagaaattgttaccatatagctattggattggccatccagtgtccaatagagcaatcatttaccttttcgttggatttattccacttgactacaaagcactcaaaacactcgaatacattgtagacctcaatacaacaaa

SEQ ID NO: 1042 - DNA, 743 bp, Enterovirus B
  source 1..743: mol_type = genomic DNA
ttaaaacaaggctgtgggttgtacccacccacagggcccaccgggcgctagcacactggtatctaggtacccttgtgcgcctgttttattcgccccaccccatcgtaacttagaagttgatcaataatggtcgttaggtagcccagcacgccagctgggtcttgaccaagcacttctgttaccccggaccgagtatcaatacgctgctcacgcggctgaaggagaaaacgttcgttacccggccaattacttcgagaagcctagtaccaccatgaaggttgcgcagcgtttcgctccgcacaaccccagtgtagatcaggccgatgagtcaccgcactcctcacgggcgaccgtggcggtgactgcgttggcggcctgcccatggggtgacccatgggacgcttcaatactgacatggtgcgaagagcctattgagctaattggtagtcctccggcccctgaatgcggctaatcctaactgcggagcagatacccacacaccagtgggcagtctgtcgtaacgggcaactctgcagcggaaccgactactttgggtgtccgtgtttccttttattctaatattggctgcttatggtgacaattgaaaaattgttaccatatagctattggattggccatccggtgacaaatagagcgattgtttacctgtttgttggtttcataccattaaatcttaaagtcttaaaaacccttgattttatactagcactcaattcagcaaa

SEQ ID NO: 1043 - DNA, 743 bp, unidentified
  source 1..743: mol_type = unassigned DNA; note = Human enterovirus 87 strain BAN01-10396, complete genome.1 sequence
ttaaaacagcctgtgggttgttcccacccacagggcccactgggcgctagcacactggtatcacggtacccttgtgcgcctgttttatacacccttcccctactgtgacttagaagcaaaacaatgatgaccaatagcaagcgcagcactccagctgtgtttcggtcaagcacttctgtttccccggactgagtatcaataggccactcacgtggccgaaggagaaaacgtccgttacccggccaattacttcgagaaacccagtaacaccatagaggttgcgcagcgtttcgctccgcactcccccagtgtagatcaggtcgatgagtcaccgcgttccccacgggcgaccgtggcggtggctgcgttggcggcctgcccatggggtaacccatgggacgcttcaatactgacatggtgcgaagagtctattgagctaattggtagtcctccggcccctgaatgcggctaatcctaactgcggagcagatacccacgctccagtgggcagtctgtcgtaacgggtaactctgcagcggaaccgactactttgggtgtccgtgtttccttttattcttatattggctgcttatggtgacaattgaaagattgttaccatatagctattggattggccatccggtgtctaatagagcaattatattcctgtttgttggttttataccactgaatatcacagtttacaagaccctcaattacatcctacgtttaaacaagacaaa

SEQ ID NO: 1044 - DNA, 743 bp, Enterovirus B
  source 1..743: mol_type = genomic DNA
ttaaaacaggcctgtgggttggttccacccacagggcccactgggcgccagcacactggtattacggtacctttgtgcgcctgttttatccacccttccctgatgtaacttagaagtaaaacataggcggtcaataggtagcccaacacaccagttgggtttcgaccaaacacttctgttaccccggaccgagtatcaataggctgctcacgcggctgaaggagaaaacgttcgttacccgaccaattacttcgagaaacccagtaacaccatgaaagttgcgcagtgtttcgctccgcacaaccccagtgtagatcaggtcgatgagtcaccgcattccccacgggcgaccgtggcggtggctgcgttggcggcctgcccatgggctaacccatgggacgctacaataccgacatggtgcgaagagtctattgagctaattggtagtcctccggcccctgaatgcggctaatcctaactgcggagcagatacccacacaccagtgggcggtctgtcgtaacgggcaactctgcagcggaaccgactactttgggtgtccgtgtttccttttattcctatattggctgcttatggtgacaattgagagattgttaccatatagctattggattggccatccggtgacaaacagggcggtcatttacctatttgttggttttgtaccattgaattttaaggtattgaaaaccctcaaccttgttttagcactcaatacagcaaa

SEQ ID NO: 1045 - DNA, 743 bp, Enterovirus B
  source 1..743: mol_type = genomic DNA
ttaaaacagcctgtgggttgttcccacccacagggcccattgggcgctagcactctggtattgcggtacctttgtgcgcctgttttatattccctccccctgaccgtaacttagaagtaacacacaccgatcaacagtaagcatggcacaccagccatgttttgatcaagcacttctgttatcccggactgagtatcaatagactgctcacgcggttgaaggagaaaacgttcgttacccggccaactacttcgaaaaacctagtaacaccatggaagttgcagagtgtttcgctcagcactaccccagtgtagatcaggtcgatgagtcaccgcattccccacgggcgaccgtggcggtggctgcgttggcggcctgcctatggggaaacccataggacgctctaatacagacatggtgcgaagagtctattgagctagttggtagtcctccggcccctgaatgcggctaatcctaactgcggagcacacaccctcaagccagggggcagtgtgtcgtaacgggcaactctgcagcggaaccgactactttgggtgtccgtgtttccccttactcttgtattggctgcttatggtgacaattttggaattgttgccatatagctattggattggccatccggtgacaaacagagcgattgtatacctattcgttggacttgtaccgctcaacgttacgagtctaacgactttatactacatcatctggttgaacacagcaaa

SEQ ID NO: 1046 - DNA, 743 bp, Enterovirus B
  source 1..743: mol_type = genomic DNA
ttataacagcctgtgggttgtacccacccacagggcccacagggggccagcacactggtatctcggtacctttgtgggcctgttttatccacccttcccccattttatttagaagcatgcaccaaaacggtcaacagggagcccagtaagccacttgttcattgaccaagtacttctgttaccccggaccgagtatcaataggctgctcgcgcggctgaaggagaaaacgttcgttacccggccaattacttcgagaaacccagtagcgccatggaggttgcgcagcgtttcgctccgcacaaccccagtgtagatcaggtcgatgagccaccgcgttccccacgggcgaccgtggcggtggctgcgttggcggcctgcccatgggactacccatgggacgcttcaatactgacatggtgtgaaaagtctattgagctaattggtagtcctccggcccctgaatgcggctaatcctaactgcggagcagacgcccacacaccagtgggcgatctgtcgtaatgggcaactctgcagcggaaccgactactttgggtgtccgtgtttccttttattcttaccctggctgcttatggtgacaattgagaagttgttgccatatagctattggattggccatccggtgacgagcagggcgataatttatttgtttatcgggtttgtaccactgaactacaaggttttaaacactttggattttattctgatcctcaactcactaaa

SEQ ID NO: 1047 - DNA, 743 bp, Enterovirus B
  source 1..743: mol_type = genomic DNA
ccagtgggccctgtgggttgtacccacccacagggcccactgggcgctagcactctggtatcacggtaccttagtgcgcctgttttatatcccccacccccacttgaaacttagaagcaaaacatactgaccaatagttgacatggcaagccagccgtgccttggtcaagcacctctgtttccccggaccgagtatcaatagactgctagcgcggttgaaggagaaagcgttcgttacccgactaactacttcgaaaaacctagtagcatcatgaaagttgcagagtgtttcgctcagcacaaccccagtgtagatcaggccgatgagtcaccgcattcctcacgggtgaccgtggcggtggctgcgctggcggcctgcctgtggggcaacccacaggacgctctaatacagacatggtgcgaagagtctattgagctagttagtagtcctccggcccctgaatgcggctaatcctaactgcggagcacgtgcctctaatccaagaggtagcgtgtcgtaacgggcaactctgcagcggaaccgactactttgggtgtccgtgtttccttttatttttatactggctgcttatggtgacaattgagagattgttaccatatagctattggattggccatccggtgactaatagagctattgtatacctctttattggttacgttccattaaaccgcaaggaattaaggaccctcaattacatcttgcttttgaattcagcaaa

SEQ ID NO: 1048 - DNA, 743 bp, Enterovirus B
  source 1..743: mol_type = genomic DNA
ttaaaacagcttgtgggttgttcccacccacagggcccactgggcgccagtacactggtatcacggtacctttgtgcgcctgtttgactcaccttccccaaacgcaacttagaagcataacttaaatggtcattaggcggctcagtatgccaactgagtctcgatcaagcacttctgttaccccggactgagtaccaataggctgctcacgcggctgaaagggaaaccgttcgttacccgaccaactacttcgagaaacctagtaccaccatgaaagttgcgcggcgtttcgctccgcacaaccccagtgtagatcaggccgatgagtcaccgcaaaccccacgggcgaccgtggcggtggctgcgctggcggcctgcccatgggacaacccatgggacgccacaatactgacatgatgcgaagagtctattgagctagttggtagtcctccggcccctgaatgcggctaatcccaactgtggagcagatacccacgcaccagtgggcagtctgtcgtaatgggcaactctacagcggaaccgactactttgggtgtccgtgtttctttttattcctacgctggctacttatggtgacaattgagagactgtaaccatattgctatcgggttggccacctggtgaagaataaaacagttgctcactcgtttgtcagtcttgcaccgtcgtgccacaaagtcttaactgcccctcaacatcgtcataatactaaatacgctgaa

SEQ ID NO: 1049 - DNA, 743 bp, Enterovirus B
  source 1..743: mol_type = genomic DNA
ttaaaacagcctgtgggttgtacccacccacagggcccactgggcgctagcactctggtaccgcggtacctttgtgcgcctgttttatatcccccctccccttaaccggaacttagaagttacacacactgatcaacagtgggcatagcatgccagctatgtcttgatcaagcacttctgtctccccggaccaagtatcaatagactgctcacgcggttgaaggagaaagcgttcgttacccgactaactacttcgagaaacccagtagcactatgaaagttgcgaggcgtttcgctcaacacttccccagtgtagatcaggtcgatgagtcaccgcattccccacggcgaccgtggcggtggctgcgttggcggcctgctacggggcaactcgtaggacgcttcaatacagacatggtgcgaagagtctattgagctagttagtagtcctccggcccctgaatgcggctaatcctaactgcggagcacataccctcaacccagggggcagtgtgtcgtaacgggtaactctgcagcggaaccgactactttgggtgtccgtgtttccttttatccttacattggctgcttatggtgacaattgaaagattgttaccatatagctattggattggccatccagtgtctaatagagctattatatacctctttgttggatttataccacttagcctaaaagaagttaagacactacagcttattgtacaattaaacacagcaaa

SEQ ID NO: 1050 - DNA, 743 bp, unidentified
  source 1..743: mol_type = unassigned DNA; note = Coxsackievirus B5 isolate 3936/09, complete genome.1 sequence
ttaaaacagcctgtgggttgtacccacccacagggcccactgggcgctagcactctggtatcacggtacctttgtgcgcctgttttatgcccccttcccccaattgaaacttagaagttacacacaccgatcaacagcgggcgtggcataccagccgcgtcttgatcaagcactcctgtttccccggaccgagtatcaatagactgctcacgcggttgaaggagaaaacgttcgttacccggctaactacttcgagaaacctagtagcatcatgaaagttgcgaagcgtttcgctcagcacatccccagtgtagatcaggtcgatgagtcaccgcattccccacgggcgaccgtggcggtggctgcgttggcggcctgcctacggggcaacccgtaggacgcttcaatacagacatggtgcgaagagtcgattgagctagttagtagtcctccggcccctgaatccggctaatcctaactgcggagcacataccctcaacccagggggcattgtgtcgtaacgggtaactctgcagcggaaccgactactttgggtgtccgtgtttccttttattcttataatggctgcttatggtgacaattgaaagattgttaccatatagctattggattggccatccggtgtctaacagagctattatatacctctttgttggatttgtaccacttgatctaaaggaagtcaagacactacaattcatcatacaattgaacacagcaaa

SEQ ID NO: 1051 - DNA, 743 bp, Enterovirus B
  source 1..743: mol_type = genomic DNA
ttaaaacagcctgtgggttgttcccacccacagggcccactgggcgctagcacactggtatcacggtacctttgtgcgcctgtttgacttaccctccccaaacgcaacttagaagcacaacttaaatggtcaatagacggctcagtatgccaactgagtctcgatcaagcacttctgttaccccggactgagtaccaataggctgctcacgcggctgaaggggaaaccgttcgttacccgactaactacttcgagaaacctagtaccaccatgaaagttgcgcagcgtttcgctccgcacaaccccagtgtagatcaggccgatgagtcaccgcaaaccccacgggcgaccgtggcggtggctgcgctggcggcctgcccatggggcaactcatgggatgcttcaatactgacatggtgcgaagagtctattgagctagttggtagtcctccggcccctgaatgcggctaatcctaactgcggagcagatacccacgcaccagtgggcagtctgtcgtaatgggcaactctgcagcggaaccgactactttgggtgtccgtgtttccttttatccttatactggctacttatggtgacaattgagagattgtaaccatattgctattggattggccacccggcgacgaatagaacagttgcttacctgtttgttagtctcgtgtcactgaactgcaaggccttaaacaccctttaatttcatcataacgctcaatacgttaaa

SEQ ID NO: 1052 - DNA, 743 bp, Enterovirus B
  source 1..743: mol_type = genomic DNA
ttaaaacagcctgtgggttgatcccacccgcagggcccactgggcgtaagcacactggtattacggtacctttgtgcgcctgttttatacacccctcccccgatgtaacttagaagttcaatgcaagcggtcgatagccagcccaacacaccagttgggttcagatcaagcacttctgttaccccggactgagtatcaataagctgctcacgtggctgaaagagaaaacgttcgttacccggccagttacttcgggaagcctagtaccaccatgaaagttgcgcagtgtttcgttccgcacaaccccagtgtagatcaggtcgatgagtcaccgcattccccacaggcgactgtggcggtggctgcgttggcggcctgcccatggggttacccatgggacgctacaatactgacatggtgcgaagagcctactgagctaactggtattcctccggcccctgaatgcggctaatcctaactgcggagcaagtacctgcagaccagcaggcagcttgtcgtaacgggcaactctgcagcggaaccgactactttgggtgtccgtgtttccttttattcttgttatggctgcttatggtgacaatcacagaattgttaccatatagctattggattggccatccagtgactaacagagcaattatatacttgtttgtcggatttgtcaaattagattttaacaacctacgcacgctttgttatattattgaattaaatacagcaag

SEQ ID NO: 1053 - DNA, 743 bp, Enterovirus B
  source 1..743: mol_type = genomic DNA
tttaaaacagcctgtgggttgttcccacccacagggcccaatgggcgctagcacactggtatcatggtacctttgtgcgcctgttttattcaccccatcacaataaaatggagaagcataacgtaataggtcaataggtggctcagtgcgccacttgggtttagaacaaacaattctgttttcccgcaccgagtatcaataaggtgctagcgtggatgaaggagaaaacgttagttacccgagtaattagttcgagaaagacagtaccaccatgaaggatgcgcagtgtttcgttcagcactaccccagtgtagatcaggtcgatgagtcaccgcgatccccacgggtgtccgtggcggtcctgtgttggcggcaaaaccatggggtaacccatagaacgataaaattaagacatggtgagaagagtttattgagctagttggtaatcatccggcccgggaatgcggctaatcttacatgcgcagcgggcacccacaaaccagtggaaacgtttgtcgtaacgggcaactctgcagcggaaccgactactgtggggggccgggttgccttgtattcatatattggctgcttatggggacgattgaaagattgttgccatatagctattggattggccatccggaaacaaacagagctattatttacctttttgttggctttgtgccgttgaatttcaaagttgtaaaaactataaacttcattttgacactcaatacagcaaa

SEQ ID NO: 1054 - DNA, 743 bp, Enterovirus B
  source 1..743: mol_type = genomic DNA
ttaaaacagcctgtgggttgtacccacccacagggcccactgggcgctagcactctggtattgcggtacctttgtgcgcctgttttacccaccctcccccaacgtaacttagaagcctgacatatacggtcacaagccagcccagtacgccaactgggtaccgaccaagcacttctgttaccccggactgagtatcaataagctgccaaagcggctgaaggagaaaacgttcgttacccggccaattacttcgagaaacccagtaacaccatgaaagttgcgtagcgtttcattcagcacaatcccagtgtagatcaggtcgatgagtcaccgcattccccacaggcgactgtggcggtggctgcgttggcggcctgcccatggggcaaacccatgggacgcttcaatactgacatggtgcgaagagtctattgagctaattggtagtcctccggcccctgaatgcggctaatcctaactgcggagcaggcactcgcagaccagcgagcagcttgtcgtaatgggcaactccgcagcggaaccgactactttgggtgtccgtgtttcctatttcctttacactggctgcttatggtgacaattgagaaattgttaccatatagctattggagtggccatccggtgactaacagagcaataatatatttgtttgttggctttgtgccacttaatttgaaggttgttaagacgctcaatctgatactacttctaaataaagcaaa

SEQ ID NO: 1055 - DNA, 743 bp, Enterovirus B
  source 1..743: mol_type = genomic DNA
ttaaaacagcctgtgggttgttcccacccacagggcccactgggcgttagcacactggtatcacggtacctttgtgcgcctgttttatactcccccccctaaggaaactttagaagcaaagcaattgtgatcaatagtgggtatggcacaccagtcatatcttgatcaagcacttctgttcccccggacttagtaccaatagactgctcaagcggttgaaggggaaaacgttcgttatccggccaactacttcgagaaacctagtagcaccatgaaagttgcggagtgtttcgctcagcacttcccccgtgtagatcaggctgatgagtcaccgtattccccacgggcgaccgtgacggtggctgcgttggcggcctgcccatggggtaacccatgggacgctctaaaacagacacggtgcgaagagtctattgagctagttggtagtcctccggcccctgaatgcggccaatcctaactgcggagcacatactcccaatccagggagcagtgtgtcgtaatgggtaactctgcagcggaaccgactactttgggtgtccgtgtttccttttattctcacattgactgcttatggtgacaattgaaagattgttaccatatagctattggattggtcatccggtgagcaatagagctattgtttatcaatttgttggatttgtaccactcaacttttctgttttgagaacactcaactacatcttactgctaaacacatcaaa

SEQ ID NO: 1056 - DNA, 743 bp, Enterovirus B
  source 1..743: mol_type = genomic DNA
ttaaaacagcctgtgggttgttcccacccacagggcccacgtggcgttagcacactggtatcccggtacctttgtgcgcctgttttatacaccccaaaccccaatgtaaattagaagaaaataacaccgatcaatagtgggtgtggcacaacagccacatcatgatcaagcactactgttcccccggactgagtatcaataagctgctcgcgcggctgaaggagaaaacgttcgttatccggccaattacttcgagaaacctagtaccaccatgaaggttgcgcagtgtttcgctccacacaaccccagtgtagatcaggtcgatgagtcaccgcattccccacaggcgactgtggcggtggctgcgctggcggcctgcccatggggtgacccatgggacgcttcaatactgacatggtgtgaagagtctattgagctaattggtagtcctccggcccctgaatgcggctaatcctaactgcggagcagatacccacgcaccagtgggtagtctgtcgtaacgggtaactctgcagtggaaccgactactttgggtgtccgtgtttccttttattctcacattggctgcttatggtgacaattgaaagattgttaccatatagctactggattggccatccggtgacaaacagagcaattgtgttcctcttcgatgggttcatacctctcaacaagatcagctttcgaactttgtgctacatcatcaagctaaacacaacaaa

SEQ ID NO: 1057 - DNA, 743 bp, Enterovirus B
  source 1..743: mol_type = genomic DNA
ttaaaacagcctgtgggttgttcccacccacagggcccattgggcgctagcacactggtatcacggtacccttgtgcgcctgttttatccaccccccccttaacgtaacttagaagcataaatcaaatggtcaatagataacccagtatgccaactgggtcccgaccaagtacttctgttaccccggactgagtatcaataagctgcttacgtggctgaaggagaaaacgttcgttacccgaccaattacttcgagaaacctagtaacaccatgaaggttgcgcagtgtttcgctcaacacaaccccagtgtagatcaggtcgatgagtcaccgcgttccccacaggcgaccgtggcggtggctgcgttggcggcctgctcatggggcaacccatgagacgcttcaatactgacatggtgcgaagagtctattgagctaactggtagtcctccggcccctgaatgcggctaatcctaactgcggagcaggcgctcgcaaaccagtgagtagcctgtcgtaacgggtaactctgcagcggaaccgactactttgggtgtccgtgtttccttttattcttatattggctgcttatggtgacaattgagagattgttaccatatagctattggattggccatccggtgtctaacagagcaatcatttacctctttgttggttacgtaccattaaatcttaaggtcgtagcaacgcttaagtttatcctacttctcaacaaagcaaa

SEQ ID NO: 1058 - DNA, 743 bp, Enterovirus B
  source 1..743: mol_type = genomic DNA
ttaaaacagcctgtgggttgatcccacccacagggcccattgggcgctagcactctggtatcacggtacctttgtgcgcctgttttatatccctttcccttaattggaacttagaagttacacacaccgatcaacagcaggcgtggcatgccagctacgtcttgatcaagcacttctgtttccccggaccgagtatcaatagactgctcacgcggttgaaggagaaagtgttcgttacccggctaactacttcgagaaacccagtagcatcatgaaagttgcgaggtgtttcgctcagcacttccccagtgtagatcaggtcgatgagtcaccgcattccccacgggcgaccgtggcggtggctgcgttggcggcctgcctacggggcaacccgtaggacgcttcaatacagacatggtgcgaagagtcaattgagctagttagtattcctccggcccctgaatgcggctaatcctaactgcggagcacataccctcaatccagggggcattgtgtcgtaacgggtaactctgcagcggaaccgactactttgggtgtccgtgtttccttttgttcttatactggctgcttatggtgacaattgaaagattgttgccatatagctattggattggccatccattgtctaatagagctgttatatacctctttgttggttttgtaccgctcaatctaaaagaagttaagacactacaacttattatacagctgaacacagcaaa

SEQ ID NO: 1059 - DNA, 744 bp, Aichivirus A
  source 1..744: mol_type = genomic DNA
tttgaaaagggggtgggggggcctcggccccctcaccctcttttccggtggtctggtcccggaccaccgttactccattcagcttcttcggaacctgttcggaggaattaaacgggcacccatactccccccaccccccttttgtaactaagtatgtgtgctcgtgatcttgactcccacggaacggaccgatccgttggtgaacaaacagctaggtccacatcctcccttcccctgggagggcccccgccctcccacatcctccccccagcctgacgtatcacaggctgtgtgaagcccccgcgaaagctgctcacgtggcaattgtgggtccccccttcatcaagacaccaggtctttcctccttaaggctagccccggcgtgtgaattcacgttgggcaactagtggtgtcactgtgcgctcccaatctcggccgcggagtgctgttccccaagccaaacccctggcccttcactatgtgcctggcaagcatatctgagaaggtgttccgctgtggctgccaacctggtgacaggtgccccagtgtgcgtaaccttcttccgtctccggacggtagtgattggttaagatttggtgtaaggttcatgtgccaacgccctgtgcgggatgaaacctctactgccctaggaatgccaggcaggtaccccacctccgggtgggatctgagcctgggctaattgtctacgggtagtttcatttccaatccttttatgtcggagtc

SEQ ID NO: 1060 - DNA, 744 bp, Enterovirus A
  source 1..744: mol_type = genomic DNA
ttaaaacagcctgtgggttgtacccactcacagggcccactgggcgtcagcactctggtactgaggtacctttgtgcgcctgttttaactcccttcccctgaagtaacttagaagcaataaactaacgatcaacagtgggcatgacataccagtcatgtctcgatcaagcacttctgtttccccggactgagtatcaataggctgctcgcgcggctgaaagagaaaacgttcgttacccggccagctacttcgagaagcttagtaccatcatgaacgaagcagagcgtttcgctcagcacaatcccagtgtagatcaggctgatgagtcactgcgacccccatgggcgaccatggcagtggctgcgttggcggcctgcccatggagaaatccatgggacgctctaattctgacatggtgcgaagagcctattgagctagctggtagtcctccggcccctgaatgcggctaatcctaactgcggagcacgcacccacaaaccagtgggcagtgtgtcgtaacgggtaactctgcagcggaaccgactactttgggtgtccgtgtttccttttattcttatattggctgcttatggtgacaatcaaagagttgttaccatatagctattggattggccatccggtgtgcaacagagcaattgtttacctatttattgggtttgtaccactaacgttgaagtctgtgaccacactcaactttatcctgaacctcaatacagtaaaac

SEQ ID NO: 1061 - DNA, 744 bp, Enterovirus A
  source 1..744: mol_type = genomic DNA
ttaaaacagcctgtgggttgcacccacccacagggcccactgggcgccagcactctggtacttaggtacctttgtgcgcctgttttatctcccttcccccgaagtaacttagaagctgtgagctaacgatcaacagtaggtgtgacataccagtcatatcttgatcaagcacttctgtttccccggactgagtatcaataggctgctcgcgcggctgaaagagaaaacgttcgtcacccggccaactacttcgagaagcttagtaccaccatgaacgaggcagagtgtttcgctcggcacaaccccagtgtagatcaggctgatgagtcactgcaatccccatgggcgaccatggcagtggctgcgttggcggcctgcccatggagaaatccatgggacgctctaattctgacatggtgcgaagagcctattgagctagctggtagtcctccggcccctgaatgcggctaatcctaactgcggagcacacacccacaagccagtgggcagtgtgtcgtaacgggcaactctgcagcggaaccgactactttgggtgtccgtgtttccttttattcttgtattggctgcttatggtgacaatcaaagagttgttaccatatagctattggattggccatccggtgtgcaacagagcaattatttacctatttattggttttgtaccattgacactgaagtctgtgattacccttaattttattttgaccctcaacacagtcaaac

SEQ ID NO: 1062 - DNA, 744 bp, Enterovirus A
  source 1..744: mol_type = genomic DNA
ttaaaacagcctgtgggttgcacccactcacagggcccactgggcgctagcactctggtaccgtggtacctttgtgcgcctgttttatacccccttccccgtttgaacattagaagtaacgcacctcgatcagtagcaggcgcggcgcaccagccgtgtcttgatcaagcacttctgtttccccggaccgagtatcaatagactgctcacgcggttgaaggagaaaacgttcgttatccggctaactacttcgagaaacttagtagcaccatggaagttgcagagtgtttcgctcagcactccccccccagtgtagatcaggctgatggatcaccgcgttcctcacgggtgaccgtggcggtggtcgcgttggcggcctgcccatggggcaacccatgggacgctctaatatggacatggtgtgaagagtctattgagctagttagtagtcctccggcccctgaatgcggctaatcctaactgcggagcacgtgtccccaacccaggggatagcgtgtcgtaacgggtaactctgcagcggaaccgactactttgggtgtccgtgtttcctttattcttatcctggctgcttatggtgacaattgagagattgttaccatatagctattggattggccatccggtgtctaacagagctataatatatctttttgttgggttcgtacccctcaattttgaggttgttctcacattaaagtacatcttggtgttaaatatcagaag

SEQ ID NO: 1063 - DNA, 744 bp, Enterovirus A
  source 1..744: mol_type = genomic DNA
ttaaaacagcctgtgggttgtccccacccacagggcccactgggcgctagcacactgattttgcgggatctttgtgcgcctgttttataacccctccctaaacggcaatttagaagttctgcacatccacgaccagtagtaagcgtgacgcgccagtcacgtcttggtcaagtacttctgtatccccggactgagtatcaatagactgctcacgcggttgaaggagaaaacgttcgttatccggctaactacttcgagaaacctagtaacaccgtgaaagttgcggagtgtttcgctcagcacttcccccgtgtagatcaggccgatgagtcactgtaaaccccacgggcgaccgtgacagtggctgcgttggcggcctgcccatgaggcaactcatgggacgctctaatacagacatggtgtgaagagtctattgagctagttagtagtcctccggcccctgaatgcggctaatcctaactgcggagcacgcaccctcaacccagggggcggcgtgtcgtaatgggtaactctgcagcggaaccgactactttgggtgtccgtgtttccttttattccttattggctgcttatggtgacaattgaaaagttgttaccatatagctattggattggccatccggtatctaatagagctattgtttacctgttcattggatacgtccctcttagtcttaaggtcattcaaactcttgattacatattactccttaaccacaagaa

SEQ ID NO: 1064 - DNA, 744 bp, Enterovirus A
  source 1..744: mol_type = genomic DNA
ttaaaacaggctgtgggttgtacccactcacagggcctactgggcgctagcactctggcactaaggtacctttgtgcgcctgtttttacttccctttcccaaagaaacttagaagttgtgtaccaatgatcaatagcaggtgtgacgtacaaataacatcttgatcaatcacttctgtttccccggaccgagtatcaataggctgctcgcgcggctgaaggagaaaacgttcgttacccgaccagctatttcgagaagcttagtaccaccatgaacgaggcagagtgtttcgttcagcacaaccccagtgtagatcaggctgatgagtcactgcaacccccatgggcgaccatggcagtggctgcgttggcggcctgcccatggagaaatccatgggacgctctaattctgacatggtgtgaagagcctattgagctagctggtagtcctccggcccctgaatgcggctaatcctaactgcggagcacatgctcacgagccagtgggtggtgtgtcgtaatgggcaactctgcagcggaaccgactactttgggtgtccgtgtttccttttattcttatgttggctgcttatggtgacaatcaaagaattgttaccatatagctattggattggccatccggtgtgcaacagagcaattgtttatctatttattggtttcgtaccactatcactgaagtctgtgaccactctcgaattcattttgaccctcaactcaatcaaac

SEQ ID NO: 1065 - DNA, 744 bp, Enterovirus C
  source 1..744: mol_type = genomic DNA
ttaaaacagctctggggttgttcccaccccagaggcccacgtggcggccagtacaccggtatcacggtacccttgtacgcctgttttatactccctaccccgtaacttagaagcatcaactcaagttcaatagtaggggtacaatccagtaccaccacgaacaagcacttctgtttccccggtgatattgtatagactgtgcccacggttgaagacaatagatccgttatccgcttttatacttcgagaagcccagtaccaccttggaatcttcgatgcgttgcgatcagcactcgaacccggagtgtagcttaggtcgatgagtctggacgctcctcaccggcgacggtggtccagactgcgttggcggcctacctgtggcccaaagtcacaggacgctagttgtgaacaaggtgtgaagagcctattgagctataaaagagtcctccggcccctgaatgcggctaatcccaaccacggagcaggtgatcacaaaccagtgactagcctgtcgtaacgcgcaagtctgtggcggaaccgactactttgggtgtccgtgtttccttttatttcatttatggctgcttatggtgacaatcatagattgttatcataaagcgaattggattggccatccggtgaaaatcaagcacatcatttatctgtttgttggatttacacctttagtttcttactccccgcgccttattcatattgtgttgttgattagacagtggtattacc

SEQ ID NO: 1066 - DNA, 744 bp, Enterovirus C
  source 1..744: mol_type = genomic DNA
ttaaaacagctctggggttgttcccaccccagaggcccacgtggcggccagtacaccggtatcacggtacccttgtacgcctgttttatactccccgcccgtaacttagaagcaataactcaagttcaacagcagggggtacaaaccagtacctccacgaacaagcacttctgtttccccggtgacattgtatagactgtacccacggttgaaaacaatagatccgttatccgcttttgtacttcgagaagcccagtaccgtcttggaatcttcgatgcgttgcgctcagcactcgaacccggagtgtagcttaggtcgatgagtctggacagtcctcaccggcgacggtggtccaggctgcgttggcggcctacctgtggcccaaagccacaggacgctagttgtgaacaaggtgcgaagagcctattgagctacagaagagtcctccggcccctgaatgcggctaatcccaaccatggagcaggtgatcacgaaccagtgattagcctgtcgtaatgcgcaagtctgtggcggaaccgactactttgggtgtccgtgtttccttttatttcatttatggctgcttatggtgacaatcatagattgttgtcataaagcgaattggattggccatccggtgaaagtcaaacacattgtttatttgtttgttggcttcacgcctttaacttatcacaccttaaacctcattcacattaccttgttgatcagacagtggtatcacc

SEQ ID NO: 1067 - DNA, 744 bp, Enterovirus C
  source 1..744: mol_type = genomic DNA
ttaaaacagctctggggttgttcccaccccagaggcccacgtggcggccagtactccggtattgcggtacccttgtacgcctgttttacactcccttccccgtaacttagacgcaataaaccaagttcactaggaggggtgcaaaccagcaccaccacgaacaagcacttctgtttccccggtgacattgtatagactgtatccacggttgaaaacgattgatccgttatccgctcttgtacttcgagaagcctagtatcatcttggaatcttcgacgcgttgcgctcagcattcaaccccagaatgtagcttaggtcgatgagtctggacattcctcaccggtgacggtggtccaggctgcgttggcggcctacctgtgacccaaagtcacaggacgctagttgtgaacaaggtgtgaagagcctattgagctacaagagagtcctccggcccctgaatgcggctaatcctaaccacggagcaagtgctcacgaaccagtgagtggcttgtcgtaacgagcaattctgtggcggaaccgactactttgggtgtccgtgtttcctttttaactttaaatggctgcttatggtgacaatcattgattgttatcataagccgaattggattggccatccggtgaaaatcaagttgatcatttatttgtttgttggattcactccattaactcatttttcaattgacctaatacgtattgtattattagttagaaacatacatcaca

SEQ ID NO: 1068 - DNA, 744 bp, Enterovirus C
  source 1..744: mol_type = genomic DNA
ttaaaacagctctggggttgttcccaccccagaggcccacgcggcggccagtacaccggtatcacggtacccttgtacgcctgttttatactcccttccccgtaacttagaagccacaaaccaagttcgataggagggggtacaaaccagtaccaccgtgaacaagcacttctgtttccccggtgatgtcacatagactgtccccacggttgaaagtgattgatccgttacccgccttggtacttcgagaaacctagtatcatcttggaatcaatgacgcgttgcgctcagcactcaaacccggagtgtagcttaggctgatgagtctggacgtccctcactggcgacagtggtccaggctgcgctggcggcctacctgtggtggaagccacaggacgctaattgtgaacaaggtgtgaagagtctattgagctaccatggagtcctccggcccctgaatgcggctaatcccaaccacggagcaagtattcacaaaccagtgaaatgcttgtcgtaacgcgaaagtctgtggcggaaccgactactttgggtgtccgtgtttccttttattctttatatggctgcttatggtgacaatcatagattgttatcataaagcgcattggattggccatccggtgaaaatcaagcaaatcatttacttatttgttggatttactccaatcacaccatttacattgcatttaattactcttgtgttgacaatcagaagatactaccaca

SEQ ID NO: 1069 - DNA, 744 bp, Enterovirus C
  source 1..744: mol_type = genomic DNA
ttaaaacagcctgtgggttgttcccaccccagaggcccacgtggcggctagtactctggtatcacggtacctttgtacgcctgttttataccccttccccaagtaaccttagaagcaactcaacaagttcaatagagggggtacaaaccagtaccaccacgaacaagcacttctgtttccccggtgattttgcataggctgtacccacggccaaaagtgaatgatccgttatccgcttgagtacttcgagaagcttagtaccaccttggaatcttcgatgcgttgcgctcagcactctaccccgagtgtagcttaggctgatgagtctgggcattccccaccggcgacggtggcccaggctgcgttggcggcctacccatggctaacgccatgggacgctagttgtgaacaaggtgtgaagagcctattgagctactcaagagtcctccggcccctgaatgcggctaatcctaaccatggagcaagtgccctcaacccagagggtggcttgtcgtaacgcgcaagtccgtggcggaaccgactactttgggtgtccgtgtttccttttatcttatatatggctgcttatggtgacaatcatagattgttatcataaagcgaattggattggccatccggtgaagtataaacatattatttacctgtttgtcggattcaccccgctcactttatacacacccaatatagtatctattgtactgctactgaggcactaccaccgca

SEQ ID NO: 1070 - DNA, 744 bp, unidentified
  source 1..744: mol_type = unassigned DNA; note = Human enterovirus 88 strain BAN01-10398, complete genome.1 sequence
ttaaaacagcctgtgggttgatcccacccacagggcccactgggcgctagcacactggtattccggtacttttgtgcgcctgttttatacacccttccccttcatgtaacttagaagtaaaacacaaacggtcaataggtagctcagcaaaccagctgagcctcggccaagcacttctgttaccccggactgagtatcaataagctgttaacacggctgaaggagaaaacgttcgttatccggccaattacttcgagaaacctagtaacaccatgaaggttgcgtagcgtttcgctccacacaaccccagtgtagatcaggtcgatgagtcaccgctctccccacgggtgaccgtggcggtggctgcgttggcggcctgcccatggagcactccatgggacgcttcaatactgacatggtgtgaagagtctattgagctaattggtagtcctccggcccctgaatgcggctaatcctaactgcggagcagacacccacacgccagtgggcagtctgtcgtaatgggcaactctgcagcggaaccgactactttgggtgtccgtgtttccttttattcttacattggctgcttatggtgacaatcaaggaattgttaccatatagctattggattggccatccggtatctaacagagcaattgtttacctcttcaccggttttgtaccattgaattgcaatagtctcaacaccctttgctatatcattaaattgaactcagcaaa

SEQ ID NO: 1071 - DNA, 744 bp, Enterovirus B
  source 1..744: mol_type = genomic DNA
ttaaaacagcctgtgggttgctcccacccacagggcccactgggcgctagcacactggtatcccggtacctttgtgcgcctgttttatccaccccacccccagctgtaatttagaagttcgacacacatggtcaatagatggctcagtgcaccaactgggtttagaccaagcacttctgttaccccgggccgagtatcaataagctgctcgcgcggctgaaggagaaaacgctcgttatccggccaattacttcgagaaacctagtaccaccatggaggttgcgcagcgtttcgctccgcacagccccagtgtagatcaggccgatgagtcaccgcgttcctcacgggcgaccgtggcggtggctgcgttggcggcctgcccatggggcaacccatgggacgcttcaatactaacatggtgtgaagagtctattgagctaattggtagtcctccggcccctgaatgcggctaatcctaactgcggagcagatactcacatgccagtgggcagtctgtcgtaacgggcaactctgcagcggaaccgactactttgggtgtccgtgtttccttttattcttatactggctgcttatggtgacaattgagaaattgttaccatatagctattggattggccatccagtgacaaacagagcgattgtttacctatttgtcggtttcataccgttgaactttagagttttgaagaccctcaacttgattatattattcaactctgtaaa

SEQ ID NO: 1072 - DNA, 744 bp, Enterovirus B
  source 1..744: mol_type = genomic DNA
taaaacagcctgtgggttgttcccacccacagggcccactgggcgccagcactctggtattatggtaccttagtgcgcctgttttatacaccccttccccaaatgtaatttagatgcatgtaaacaaaggccaatagcaggcgcagcataccagctgtgtctcggtcaagcacttctgttaccccggactgagtatcaataggctactcacgtggctgaaggagaaaacgttcgttatccggccaattacttcgagaaacctagtaataccatgaaggttgcgaagtgtttcgctcagcacaaccccagtgtagatcaggtcgatgagtcaccgcattccccacgggtgaccgtggcggtggctgcgctggcggcctgcccatgggattacccatgggacgcttcaatattgacatggtgtgaagagtctattgagctaattggtattcctccggcccctgaatgcggctaatcccaactgcggagcaggtacccacatgccagtgggcagcctgtcgtaatgggcaactctgcagcggaaccgactactttgggtgtccgtgtttctctttattcttatactggctgcttatggtgacaattgagaaattgttgccatatagctattggattggccatccggtgacaaatagagcaattgtgcatccatttgttggttttatactaactcaatctcaaagttttaactaccctcaatctcattatatcattcaatacagcaaa

SEQ ID NO: 1073 - DNA, 744 bp, Enterovirus B
  source 1..744: mol_type = genomic DNA
ttaaaacagcctgtgggttgttcccacccacagggcccactgggcgttagcactctggtatcacggtacctttgtgcgcctgttttatctaccctccctaaaaatgtaatttagaagcatgatccgaacggtcattaggtagctcagtgcaccaactgagcccagaccaagcacttctgttaccccggactgagtatcaataggctgctcgcgcggctgaaggagaaaacgttcgttatccggccaattacttcgagaaacccagtaccactatgaaagttgcgcagcgtttcgttccgcacaaccccagtgtagatcaggtcgatgagtcaccgcgttccccacgggcgaccgtggcggtggctgcgttggcggcctgctcatggggcaacccatgagacgcttcaatactgacatggtgcgaagagtctattgagctaattggtagccctccggcccctgaatgcggctaatcccaactgcggagcagatacccacaaaccagtgggcagtctgtcgtaatgggtaactctgcagcggaaccgactactttgggtgtccgtgtttccttttgttcttacactggctgcttatggtgacaattgagagattgttgccatatagctattggattggccatccggtgactaacagagcaattgtttacttatttgttggttttataccgttagattacaaagtcctaaacaccctgaatctcattataacacttaattcagcaaa

SEQ ID NO: 1074 - DNA, 744 bp, Enterovirus B
  source 1..744: mol_type = genomic DNA
tttaaaacagcctgtgggttgtttccacccacagggcccacagggcgctagcactttggtatcacggtacctttgtgcgcctgttttataacccttcccccccacagaaacttagaagcaccacacaccgatcaatagaaagcgtggcgcaccagccatgtcttgatcaagcacttctgtttccccggaccgagtatcaatagactgctcgcgcggtcgaaggagaaaacgtccgttatccggctgactacttcgagaaacccagtaacaccatggaaattgcggagtgtttcgatcagcacatccccagtgtagatcaggtcgatgagtcaccgcattccccacgggtgaccgtggcggtggctgcgttggcggcctgcctacggggcatcccgtaggacgcttcaaaatggacatggtgcgaagagtctattgagctagtcagtagtcctccggcccctgaatgcggctaatcctaactgcggagcgcgcgcctccaacccagggggtagcgcgtcgtaacgggtaactctgcagcggaaccgactactttgggtgtccgtgtttctttttatcattacattggctgcttatggtgacaattgaaaggttgttaccatatagctattggattggccacccggtgtctaatagagcgattgtgtacctttttgttgggtttgtgccactttgtaaaacagcctatcagactttgtgctttatagtcaaactaaatacagcaaa

SEQ ID NO: 1075 - DNA, 744 bp, Enterovirus B
  source 1..744: mol_type = genomic DNA
ttttaaaacaagctgtgggttgatcccacccacagggcccactgggcgctagtacactggtatcacggtacctttgtgcgcctgttttacctacccctccccgaaagaaacttagaagctcaacttatgtggtcaatagtaagctcagtacgccaactgagccacgaccaagcacttctgtcgccccggactgagtatcaataagctgctcacgtggctgaaggagaaaacgttcgttatccggccaattacttcgagaaacccagtaccaccatgaaagttgcgcggcgtttcgctccgcacaaccccagtgtagatcgggccgatgagtcaccgcgttccccacgggcgaccgtggcggtgactgcgttggcggcctgcccatggagcaatccatgggacgcttcaatactgacatggtgcgaagagtctattgagctaattggtagtcctccggcccctgaatgcggctaatcctaactgcggagcagatacccacacaccagtgggcagtctgtcgtaacgggcaacttcgcagcggaaccgactactttgggtgtccgtgtttccttttattttatactggctgcttatggtgacaattgagagattgttaccatatagctattggattggccatccggtgtccaacagagcgatcatttacttgtttgttggattcgtgcccttgaactacaaagcactcctaacacttaaatacattgtagacctcaacacagcaaa

SEQ ID NO: 1076 - DNA, 744 bp, Enterovirus B
  source 1..744: mol_type = genomic DNA
ttaaaacagcctgtgggttgttcccacccacagggcccactgggcgctagcacactggtattacggtacctttgtgcgcctgttttatataccccccccaagtgcaacttagaagcaagacatgaccggtcagcaggtgattcagtaaaccaactgagtcttgaccaagcacttctgtttccccggaccgagtatcaataggctgcttacgcggctgaaggagaaagtgttcgttacccggccaattacttcgagaagcctagtaccaccatggaggttgcgcggcgtttcgctccgcacacccccagtgtagatcaggccgatgagccaccgcattccccacgggtgaccgtggcggtggctgcgttggcggcctgcccatggggtaacctatgggacgcttcaatactgacatggtgcgaagagcctattgagctaattggtagtcctccggcccctgaatgcggctaatcctaactgcggagcaggtacccacataccagtgggcagcctgtcgtaacgggtaactctgcagcggaaccgactactttgggtgaccgtgtttccttttattttttcctattggctgcttatggtgacaatcgaggaattgttgccatatagctattggattggccatccggtgtcaaatagagcgattatttacctgtttgttggatttgtaccactgaactttaaggcgctcatcactctcaactatattttatcccttaacgcaacaaa

SEQ ID NO: 1077 - DNA, 744 bp, Enterovirus B
  source 1..744: mol_type = genomic DNA
ttaaaacagcctgtgggttgttcccacccacagggcccaccgggcgccagcacactggtatcacggtacccttgtgcgcctgttttatccaccccttcccacagtaacttagaagcacaccatgtatacggtcaataggcggctcagtacaccaactgggccacgaccaagcacttctgttaccccggactgagtatcaataagctgctcacgcggctgaaggagaaaacgttcgttacccggccaattacttcgagaaacccagtaccaccatgaaggttgcgcagcgtttcgttccgcacaaccccagtgtagatcaggtcgatgagtcaccgcgttcctcacgggtgaccgtggcggtggctgcgttggcggcctgcccatggggcaacccatgggacgcttcaatactgacatggtgcgaagagtctattgagctaattggtagtcctccggcccctgaatgcggctaatcctaactgcggagcagatacccacaaaccagtgggcagtctgtcgtaacgggcaactctgcagcggaaccgactactttgggtgtccgtgtttccttttatccttacactggctgcttatggtgacaattgagaaattgttaccatatagctattggattggccatccggtgacaaacagagcagttgtttacctatttgttggtttcgtaccgctgaaccttaaagttctaaagaccctcaattttatcttagcacttaacacagcaaa

SEQ ID NO: 1078 - DNA, 744 bp, Enterovirus C
  source 1..744: mol_type = genomic DNA
ttaaaacagctctggggttgttcccaccccagaggcccacgtggcggccagtacaccggtattacggtacccttgtacgcctgttttatactcccttccccgcaacttagaagttaaacaaaccaagttcaatagaagggggtgcaaaccagtaccaccacgaacaagcacttctgtttccccggtgacgtcatataggttgtaaccacggccaaaagtgactgatccgttatccgctcttgtacttcgagaagcccagtaccatcttgggatcttcgatgcgttgcgctcagcactcgaacccggagtgtagcttaggccgatgagtctggacattccccaccggtgacggtggtccaggctgcgttggcggcctacctgtggtccaagccacaggacgctagatgtgaacaaggtgtgaagagcctattgagctacaagggaatcctccggcccctgaatgcggctaatcctaactacggagcagacggtcacaaaccagtgaatggtctgtcgtaatgcgcaagtctgtagcggaaccgactactttgggtgtccgtgtttccttttatctttttaatggctgcttatggtgacaatcctagattgttatcataaagcgatttggattggccatccagtgatatttgaaaccattactgtattgcctgctaaggctattttaaagacttaataaacacaacttcattcaactcaattacaccaactaacaactgtctcata

SEQ ID NO: 1079 - DNA, 744 bp, unidentified
  source 1..744: mol_type = unassigned DNA; note = unclassified Enterovirus sequence
tttaaaacagcctgtgggttgttcccacccacagggcccactgggcgctagcactctggtattacggtacctttgtgcgcctgttttacatccctcccccagatgcaacttagaagcagtacaccaagaccaatagtaggcatggcataccagccatgtgtcggtcaagcacttctgttcccccgggctgagtatcaataaactgctcacgtggttgaaggagaaagcgcccgttacccggctaactacttcgagaagcctattaacaccatgaaagttgcggagtgtttcgctcagcacgatcccggtgtagatcaggccgatgagtcaccgcgttccccacaggtgactgtggcggtggctgcgttggcggcctgcccatggggcaacccatgggacgcttcaatatggacatggtgtgaagagcccattgagctagttagtagtcctccggcccctgaatgcggctaatcccaactgcggagcacagcgcccccgctccagggggtagtgtgtcgtaacgggcaactctgcagcggaaccgactactttgggtgtccgtgtttccttttttccttttcattggctgcttatggtgacaattgaaagattgttaccatatagctattggattggccatccagtgtcaagcagagctataatttaccaatttatagggtttgtcccgttggatctgaaagctttaaaaacccttaacttggtactactattaaacagtgtaaa

SEQ ID NO: 1080 - DNA, 744 bp, Enterovirus B
  source 1..744: mol_type = genomic DNA
ttaaaacagcctgtgggttgttcccacccgcagggcccactgggcgctaccacactggtattaaggtacccttgtgcgcctgtttaatacacccctccccctaatgtaacttagaagcatgacttaagtggtcaatagatagctcagtaatccaactgagttccgaccaagtacttctgttaccccggaccgagtatcaataagctgttcacgcggcagaaggagaaagcgttcgttatccggccaattacttcgagaaacccagtatcaccatgaaagttgcgcagtgtttcgctccgcacaaccccagtgaagatcaggtcgatgagtcaccacagtcctcacgggcgaccgtggtggtggctgcgttggcggcctgcccatggggcaacccctgggacgcttcaatcctgacatggtgtgaagagtctattgagctggatggtatccctccggcccctgaatgcggctaatcctagctgcggagcagacgctcgcatgccaacgggtagtctgtcgtaccgggtaactctgcagcggaaccgactactttgggtgtccgtgtttccttttatccttatatcgcctgcttatggtgtcaattgaaagattgttaccatatagctaatggattggccatccgataacaaatagagtgattatctagttttttgttggatttgttccattgaactacaaggtattgaacacccttaatttcattttaacactcaacacaacaaa

SEQ ID NO: 1081 - DNA, 744 bp, Enterovirus B
  source 1..744: mol_type = genomic DNA
tttaaaacagcctgtgggttgttcccacccacagggcccactgggcgctagcactctggtatcacggtacctttgtgcgcctgttttatagcccctcccttagataggaatttagaagcactgcacaccgatcaatagcaggcgcggcacgccagccacgtcttgatcaagcacttctgtttccccggaccgagtatcaatagactgttaacgcggtcgaaggagaaaacgttcgttatccggccaactacttcgagaaacctagtaacgccatggaagttgcggagtgtttcgctcagcacatccccagtgtagatcaggtcgatgagtcaccgcatccctcacgggtgaccgtggcggtggctgcgttggcggcctgcctacggggcaacccgtaggacgcttcaatatggacatggtgcgaagagtatattgagctagttggtagtcctccggcccctgaatgcggctaatcctaactgcggagcgctcgcccccaatccagggggtcgtgcgtcgtaacgggtaactctgcagcggaaccgactactttgggtgtccgtgtttccttttatctttatcacggctgcttatggtgacaattgaaagattgttaccatatagctattggattggccatcctgtgtctaacagagcaatcatatatctttttgttggatttgtgccacttgataaaataagttaccagactttgtgttttatcatcagactaaacacaacaaa

SEQ ID NO: 1082 - DNA, 744 bp, Enterovirus B
  source 1..744: mol_type = genomic DNA
ttaaaacagcctgtgggttgtacccacccacagggcccaccgggcgctagcacactggtatcacggtacccttgtgcgcctgttttatcaacccctccccacattgaaacttagaagtaacacacaccgatcaatagtgggcgtggcaaaccagctacgtcgtgatcaagtatttctgtttccccggactgagtatcaatagactgctcgcgcggttgaaggagaaaacgttcgttacccggctaactacttcgagaaacctagtaatgccatgaaaattgcgtagcgtttcgttcagcacaaccccagtgtagatcaggtcgatgagtcactgcattcctcacgggcgaccgtggcagtggctgcgttggcggcctgcctatagggtaacctataggacgctacaatatggacatggtgtgaagagtctattgagctagttagtagtcctccggcccctgaatgcggctaatcctaactgcggagcgcgtgtttccaatccaggaagtggcgcgtcgtaatgggcaactctgcagcggaaccgactactttgggtgtccgtgtttctcttttatccttacactggctgcttatggtgacaattgaagaattgttaccatatagctattggattggccatccggtgtctaatagagcaattgtatacctctttgttggatttataccattaaacagaacaagttaccagaccctgtgctttattgttaaactaaacacgacgaa

SEQ ID NO: 1083 - DNA, 744 bp, Enterovirus B
  source 1..744: mol_type = genomic DNA
tttaaaacaaagctgtgggttgttcccacccacagggcccactgggcgctggcacactggtattgcggtacctttgtgcgcctgttttatccgccctccccagtagtaacctagaagcatgaataatgtggtcaataggaagctcagtaaaccaactgggtcttgaccaagcacttctgttaccccggactgagtatcaagaagctgctcgcgtggctgaaggagaaaacgttcgttacccggccaattacttcgagaaacccagtaccaccatggaagttgcgcagcgtttcgctccgcacaaccccagtgtagatcaggtcgatgagtcaccgcaatcctcacgggtgaccgtggcggtggctgcgctggcggcctgcccatggggtaacccatgggacgcttcaatactgacatggtgcgaagagtccattgagctaattggtagtcctccggcccctgaatgcggctaatcctaactgcggagcagatatccacacaccagtggacagtctgtcgtaatgggtaactctgcagcggaaccgactactttgggtgtccgtgtttccttttatctttatattggctgcttatggtgacaattgagagattgttaccatatagctattggattggccatccggtgagcaacagagcaattgtattcctctttgtaggatttgtgccgttgaattacaacaactacaacaccttactctacattatccacttaaacacgcggaa

SEQ ID NO: 1084 - DNA, 744 bp, Enterovirus B
  source 1..744: mol_type = genomic DNA
ttaaaacaaggctgtgggttgtacccgcccacagggcccactgggcgccagcactctggtattacggtacccttgtgcgcctgttttatatcccttccccaaggtaaacgttagaagcaatgcactcccgatcaatagaaggtgcgacgcgccagtcgtatctcgatcaagcacttctgtttccccggaccgagtatcaatagactgctagcgcggttgaaggagaaaacgttcgttacccgactaactacttcgagaagcccagtagcgccatgaaagttgcagagtgtttcgctcagcacttcccccgtgtagatcaggccgatgagtcaccgcaatccccacgggcgaccgtggcggtggctgcgttggcggcctgcctatggggaaacccataggacgctcaaatacagacatggtgcgaagagtctattgagctagttagtactcctccggcccctgaatgcggctaatcctaactgcggagcaagtactcacaatccagtgggcagcttgtcgtaacgggtaactctgcagcggaaccgactactttgggtgtccgtgtttccttttattcctacattggctgcttatggtgacaatcaaagagttgttaccatatagctattggattggccatccggtgactaataaagcaattatatttctttttgttgggtttgtaccccttaatacaaccagcttcaccacattgtgttacatcattagactgaacaaggcaaa

SEQ ID NO: 1085 - DNA, 744 bp, Enterovirus B
  source 1..744: mol_type = genomic DNA
ttaaaacagcctgtgggttgttcccacccacagggcccactgggcgccagcacactggtatcacggtacttttgtgcgcctgttttatctacccccacccccagcgtaacttagaagcacatttcacacggtcaataggtgactcagcatgccagctgagttttggccaagcacttctgttaccccggaccgagtatcaataagctactcacgtggctgaaggagaaagcgttcgttaaccggccaattacttcgagaaacctagtatcaccatgaaggttgcgtggcgtttcgctccgcacaaccccagtgtagatcaggtcgatgagttaccgcgtccctcacgggcgaccgtggcggtagctgcgctggcggcctgcccatggggcaacccatgggacgcttcaatactgacatggtgtgaagagtctattgagctaattggtagtcctccggcccctgaatgcggctaatcctaactgcggagcagatacccacacgccagtgggcagtctgtcgtaatgggcaactctgcagcggaaccgactactttgggtgtccgtgtttccttttactcttatattggctgcttatggtgacaattaaaagattgttaccatatagctattggattggccatccagtgtctaatagagcgatcatttacctttttcttgggtttgttccactcaactataaagcacttgtaacgctcaaatatattataaacctcaacacaacaaa

SEQ ID NO: 1086 - DNA, 745 bp, Enterovirus A
  source 1..745: mol_type = genomic DNA
ttaaacagctctagggttgttcccaccctagaggcccacgtggcggctagcactctggtatcacggtacctttgtgcgcctgttttatatccctttccccatgtaacttagaagttattaaacaaagttcaatagaagggggtacaaaccagtgccaccacgaacaagcacttctgtttccccggtgaagctgtatagactgtctccacggttgaaaatggcagatccgttacccgctttggtacttcgagaaacctagtatcaccttggaatcttcgatgcgttgcgctcagcactcaaccccagagtgtagcttaggtcgatgagtctggacgatcctcactggtgacagtggtccaggctgcgttggcggcctacctgtggtgaaaaccacaggacgctagttgtgaacaaggtgtgaagagtctattgagctaccaaagagtcctccggcccctgaatgcggctaatcctaaccacggagcaagtgccttcaaaccagtaggtagcttgtcgtaacgcgcaagtctgtggcggaaccgactactttgggtgtccgtgtttccttttattttatcatggctgcttatggtgacaatctaagattgttatcatatagctattggattggccatccggtgactaacagagatctcatatacctttttgttggttttactaaattaaatattaccacgttcaagacacttctccttatcatacaactaaatagtgagaagagaaa

SEQ ID NO: 1087 - DNA, 745 bp, Enterovirus A
  source 1..745: mol_type = genomic DNA
ttaaaacagcctgtgggttgtacccacccacagggcccactgggcgttagcacactgatttcacggaatctttgtgcgcctgttttatatccctcccccaatacagtaacttagaagttagaaacctacacgaccaatagcaggcgtgacgcaccagtcatgtcttggtcaaacacttctgtttccccggactgagtatcaataagccgctcacgcggctgaaggagaaaacgttcgttatccggctaactacttcgagaaacctagtagcaccgtgaaagttgcagagtgtttcgctcagcactttccccgtgtagatcaggtcgatgagtcactgcatcccccacgggcgaccgtggcagtggctgcgttggcggcctgcctatggggcaacccatgggacgctctaatacagacatggtgtgaagagtctattgagctagttagtagtcctccggcccctgaatgcggctaatcctaactgcggagcacgcaccctcaatccagggggcggcgtgtcgtaacgggtaactctgcagcggaaccgactactttgggtgtccgtgtttccttttatcacttactggctgcttatggtgacaatcaaagaattgttaccatatagcttttggattggccatccggtgtctaacagagctattgtttacctgtttgttggatacattcctctcaactacaaagttcttcaaactctcaactttatattgctccttaatcataagaa

SEQ ID NO: 1088 - DNA, 745 bp, Enterovirus A
  source 1..745: mol_type = genomic DNA
ttaaaacagcctgtgggttgcacccacccacagggcccactgggcgtcagcactctggtactgaggtacctttgtgcgcctgtttttacttccctttcccgaaagtaacttagaagctttgaaccagcgatcaacagtaggtgtgacataccagtcacatctcgatcaagcacttctgtatccccggactgagtatcaataggctgcttacgcggctgaaagagaaaacgttcgttacccggccaactacttcgagaagcttagtaccaccatgaacgaggcagagcgtttcgctcggcactaccccagtgtagatcaggctgatgagtcactgcaatccccatgggcgaccatggcagtggctgcgctggcggcctgcccatggagagatccatgggacgctctaattttgacacggtgcgaagagcctattgagctagttggtagtcctccggcccctgaatgcggctaatcctaactgcggagcgcacacccacataccagtgggtagtgtgtcgtaacgggcaactctgcagcggaaccgactactttgggtgtccgtgtttccttttattctcatgtcggctgcttatggtgacaatcgaagagttgttaccatatagctattggattggccatccggtgtgcaacagagcaattgtctaccagtttattggttttgtaccactgacattaaagtctgtaattaccctcaattttatcttgacccttaacacggtcaagc

SEQ ID NO: 1089 - DNA, 745 bp, Enterovirus A
  source 1..745: mol_type = genomic DNA
ttaaaacagcctgtgggttgttcccacccacagggcccactgggcgctagcacactgattctgcgggatctttgtgcgcctgttttataacccttcccctaggtagcaactttgaaggtttggacaaaaacgaacaatagggggcgaaaagcgccagtcacgtcttggtcaaacacttctgtatccccggactgagtaccaataggctgctcacgcggttgaaggggaaaacgttcgttacccggctaactacttcgagaaacctagtaacaccatgaaagttgcggagtgtttcgctcagcacttcccccgtgtagatcaggtcgatgagtcactgtaaaccccacgggcgaccgtgacagtggctgcgttggcggcctgcccatggggtaacccatgggacgctctaatacagacatggtgcgaagagtctattgagctagttagcagtcctccggcccctgaatgcggctaatcctaactgcggagcgcgcaccctcaatccagggggcggcgtgtcgtaatggttaactctgcagcggaaccgactactttgggtgtccgtgtttccttttattctttattggctgcttatggtgacaattgaaaagttgttaccatatagctattggattggccatccggtgtctaacagagctattgtttacctatttattggatacgtccctctcaatctcaagtccattcaaactcttgattatatattgctccttaactgtaggaa

SEQ ID NO: 1090 - DNA, 745 bp, Enterovirus A
  source 1..745: mol_type = genomic DNA
ttaaaacagcctgtgggttgttcccacccacagggcccattgggcgatagcacactgattttgcggaatctttgtgcgcctgttttataacccttcccccaagcagcaacttagaagtattgcacaatcgcggccagtagtgggcgtgacgcgccagtcacgtcttggtcaagcacttctgtatccccggactgagtatcaatagactgctcacgcggttgaaggagaaaacgttcgttatccggctaactacttcgggaaacctagtagcaccttgaaagttgcagagtgtttcgctcagcacttcccccgtgtagatcaggccgatgagccactgtaaaccccacgggcgaccgtgacagtggctgcgctggcggcctgcccatgggggaacccatgggacgctctaatacaaacatggggtgaaaagtctactgagctacttagtagtcctccggcccctgaatgcggctaatcctaactgcagagcacacaccctcaaccctcggggcagtgtgtcgtaatgggtaactctgcagaggaacccactactttgggtgaccgtgtttccttttattcgttattggctgcttagggcgacaattgaaaagttgttaccatatccctattgtattggccatccggtatctaacagagctattgtttacttatttgttggatacgtccctcttaatttcaaggctatccaaactcttgattatatatcgctccttaattataagaa

SEQ ID NO: 1091 - DNA, 745 bp, Enterovirus A
  source 1..745: mol_type = genomic DNA
ttaaaacagcctgtgggttgttcccacccacagggcccactgggcgctagcactctgattttgcgggatctttgtgcgcctgttttataatcccttccctaagcagtaacttagaagttctacacaatcaggaccaacagtcagcgtggcacgccagccacgttttggtcaagcacctctgtttccccggactgagtatcaatagactgctcacgcggttgaaggagaaaacgttcgttacccggctaactacttcgagaaacctaatagcaccatgaaagttgcggagtgtttcgctcagcacttcccccgtgtagatcaggtcgatgagtcactgtaaaccccacgggcgaccgtgacagtggctgcgttggcggcctgcccatggggtaacccatgggacgctctaatacggacatggtgtgaagagtctattgagctagttagtagtcctccggcccctgaatgcggctaatcctaactgcggagcatgcgccctcaacccagggggtggcatgtcgtaatgggcaactctgcagcggaaccgactactttgggtgtccgtgtttccttttattcctcattggctgcttatggtgacaattgaaaggttgttaccatatagctattggattggccatccggtgtctaacagagctattgtttacctattcattgggtttgtccctcttaatcttaagaccatccaaactcttgattacatattgctcctcaattgtagaag

SEQ ID NO: 1092 - DNA, 745 bp, Enterovirus A
  source 1..745: mol_type = genomic DNA
ttaaaacagcctgtgggttgtacccacccacagggcccactgggcgctagcactctggtactacggtacctttgtgtgcctgttttaagcccctaccccccactcgtaacttagaaggcttctcacactcgatcaatagtaggtgtggcacgccagtcacaccgtgatcaagcacttctgttaccccggtctgagtaccaataagctgctaacgcggctgaaggggaaaacgatcgttatccggctaactacttcgagaaacccagtaccaccatgaacgttgcagggtgtttcgctcggcacaaccccagtgtagatcaggtcgatgagtcaccgtattccccacgggcgaccgtggcggtggctgcgttggcggcctgcccatggggtgacccatgggacgctctaatactgacatggtgcgaagagtctattgagctagttagtagtcctccggcccctgaatgcggctaatcctaactgcggagcacatacccttaatccaaagggcagtgtgtcgtaacgggcaactctgcagcggaaccgactactttgggtgtccgtgtttccttttattcttacattggctgcttatggtgacaattgaaaagttgttaccatatagctattggattggccatccggtgacaaatagagctattgtatatctttttgttggttacgtaccccttaattacaaagtggtttcaactttgaaatacatcctaacactaaattgtagaaa

SEQ ID NO: 1093 - DNA, 745 bp, Enterovirus C
  source 1..745: mol_type = genomic DNA
ttaaaacagcctgtgggttgttcccaccccagaggcccacgtggcggctagtacaccggtatcgcggtacccttgtacgcctgttttatactccctaccccgtaacttagaagcaataacttgagttcaacagcagggggtacaaaccagtaccaccacgaacaagcacttctgtttccccggtgacgttgtatagactgtacccacggtcgaaaacaatagatccgttatccgcttttgtacttcgaaaagcccagtaccatcttggaatcttcgatgcgttgcgttcagcactcgaacccggagtgtagcttaggtcgatgagtctggacagtccacaccggcgacggtggtccaggctgcgttggcggcctacctgtggcccaaagccacaggacgctagttgtgaacaaggtgtgaagagcctattgagctacaaaagactcctccggcccctgaatgcggctaatcccaaccacggagcaggcgatcacaaaccagtggttagcctgtcgtaatgcgcaagtctgtggcggaaccgactactttgggtgtccgtgtttccttttatttcatttatggctgcttatggtgacaatcgtagattgttatcataaagcgaattggattggccatccggtgaaattcaaatatactgtttatttatttgttggcttcgcgcctttaaattaccgcaccttagaactcattcacattatcttgctggttagacagtggtaccatc

SEQ ID NO: 1094 - DNA, 745 bp, Enterovirus C
  source 1..745: mol_type = genomic DNA
ttaaaacagctctggggttgttcccaccccagaggcccacgtggcggctagtacaccggtatcacggtacccttgtacgcctgttttatacccccttcccccgtaacttagaagctacacaccaagttcaatagaagggggtacaaaccagtaccaccgcgaacaagcacttctgtttccccggtgaagttgcatagactgtgcccacggttgaaagcgaccgatccgttacccgccttggtacttcgagaaacccagtaccactttggaatcaatgatgcgttgcgctcagcgctcgaacccggagcgtagcttaggctgatgagtctggacattccccactggtgacagtggtccaggctgcgttggcggcctacctgtggtgaaagccacaggacgctagttgtgaacaaggtgcgaagagtctattgagctaccatggagtcctccggcccctgaatgcggctaatcccaaccacggagcaggcactcacaagccagtgagacgcttgtcgtaatgcgaaagtctgtggcggaaccgactactttgggtgtccgtgtttccttttattctttgtatggctgcttatggtgacaatcgaagattgttatcataaagcaagttggattggccatccggtgagaattaaaagcattatttacttgcttattggattcactccaatcacatcatttactccacatctaatcaatcttgtgttgatactcagaaggtgttatcaaa

SEQ ID NO: 1095 - DNA, 745 bp, Enterovirus C
  source 1..745: mol_type = genomic DNA
ttaaaacagctctggggttgttcccaccccagaggcccacgtggcggccagtacactggtattacggtacccttgtacgcctgttttacaccccttcccccgtaacttagaagctttaaacccaagttcaatagtaggtggtacaacccagtaccaccacgaacaagcacttctgttatcccggtgagattgcataagctgtccccacggctaaaagcgattgatccgttacccgctcttgtacttcgagaagcctagtaaaaccttggaatcttcgacgcgttgcgttcgacactcaaccccagagtgtagcttaggctgatgagtctggacattcctcaccggcgacggtggtccaggctgcgttggcggcctacctgtggcctaaagccacaggacgctagttgtgaacaaggtgtgaagagcctattgagctacaagggagtcctccggcccctgaatgcggctaatcccaaccacggagcaggtggttgcaatccagcaactggcctgtcgtaacgcgcaagtctgtggcggaaccgactactttgggtgtccgtgtttccttttattttttaatggctgcttatggtgacaatcacagattgttgtcataaagcgaattggattggccatccagtgagagttaagataattatctacttgtttattggatttgttcctataaccgcccatacaccttgcttgattgaagtgatcctgtcaataagacatcactattaca

SEQ ID NO: 1096 - DNA, 745 bp, Enterovirus C
  source 1..745: mol_type = genomic DNA
ttaaaacagctctggggttgttcccaccccagaggcccacgtggcggccagtactccggtattgcggtacccttgtacgcctgttttacactcccttccccggtaacttagaagtaaacaaaccaagttcaatagaagggggtacaaaccagtaccaccacgaacaagcacttctgtttccccggtgacgttgtatagactgtacccacggttgaaaacaactgatccgttatccgctcttgtacttcgagaagcccagtatcaccttggaatcttcgatgcgttgcgctcagcactcaaccccagagtgtagcttaggtcgatgagtctggacaatcctcaccggcgacggtggtccaggctgcgttggcggcctacctgtggcccaaagccacaggacgctagttgtgaacaaggtgtgaagagcctattgagctacgagagagtcctccggcccctgaatgcggctaatcccaaccacggagcaggtgatcacaagccagtgattagcctgtcgtaacgcgcaagtctgtggcggaaccgactactttgggtgtccgtgtttcctttattttattatggctgcttatggtgacaatcacagattgttatcataaagcgacttggattggccatccagtgaaaataaaacacatcatttacctgattgttggatttactccgctgactatctactcaccaggtcttattaaggttattctgttgattaggtcacaatttcaca

SEQ ID NO: 1097 - DNA, 745 bp, Enterovirus C
  source 1..745: mol_type = genomic DNA
ttaaaacagctctcgggttgttccccccccagaggcccacgtggcggccagtactccggtattacggtacccttgtacgcctgttttgtatccccttcccccgcaacttagaagttataaaccaagttcaatagaagggggtacaagccagtaccaccacgaacaagcacttctgtttccccggtgatgttgtatagactgctaacgcggttgaaaacagctgatccgttatccgcttgtgtacttcgagaagcctagtatcatcttggaatcttcgatgcgttgcgttcagcgctctaccccagagcgtagcttaggctgatgagtctgggcattccccaccggcgacggtggcccaggctgcgttggcggcctacctatggctaacgccataggacgctagttgtgaacaaggtgtgaagagcctattgagctacacaagagtcctccggcccctgaatgcggctaatcctaaccatggagcaagtgatcacaatccagtgatattcttgtcgtaacgcgcaagtccgtggcggaaccgactactttgggtgtccgtgtttccttttacttttatcatggctgcttatggtgacaatcattgattgttatcataaagcgaattggattggccatccggtgaaagtgagacttatcatctacttgtttgttggattcactccattgaacacattcactcccagtatcatttcaatagtaatcagaattagacagttgtatcaca

SEQ ID NO: 1098 - DNA, 745 bp, Enterovirus C
  source 1..745: mol_type = genomic DNA
ttaaaacagctctggggttgttcccaccccagaggcccacgtggcggctagtactccggtattacggtacccttgtacgcctgttttaaatccccttccccgtaacttagaagcttaaaccaataagttcaatagaagggggtacaaaccagtaccaccacgaacaagcacttctgtttccccggtgcggtggtatagactgtacccacggttaaaaaccaccaatccgttatccgctctggtacttcgagaagcctagtaccaccttggaatctttgacgcgttgcgctcaacactcaaccccagagtgtagcttaggctgatgagtctgggcagtccccaccggtgacggtggcccaggctgcgttggcggcctacccatggctaatgccatgggacgctagaagtgaacaaggtgtgaagagcctattgagctactagagagtcctccggcccctgaatgcggctaatcccaaccacggatcaagtgcgcgcaacccagtgcgtagcttgtcgtaatgcgcaagtctgtggcggaaccgactactttgggtgtccgtgtttccttttattcttattatggctgcttatggtgacaatcttagattgttatcatatagcaattggattggccatccagtgagagtgagagatatcatatacctatttgtagcttttactccacttagcacgaacacagttactttgattagaattgtgctattgatcagattgacacatcact

SEQ ID NO: 1099 - DNA, 745 bp, Enterovirus C
  source 1..745: mol_type = genomic DNA
ttaaaacagctctggggttgttcccaccccagaggcccacgtggcggctagtactctggtatcacggtacctttgtacgcctgttttatatcccttcccccgtaacttagaagctttgtaccaacaagttcaatagaaggggtacaaaccagtaccaccacgaacaagcacttctgtttccccggtgcgatgacatagactgtacccacggtcaaaagtcaccaatccgttacccgctttggtacttcgagacgcctagtattgccttggaattctcgatgcgttgcgctcaacactcgaccctggagtgtagcttaggctgatgagtctgggcattccccaccggtgacggtggcccaggctgcgttggcggcctacccatagctattgctatgggatgctagagttgaacaaggtgtgaagagccaattgagctactaaagagtcctccggcccctgaatgcggctaatcccaaccacggatcaagtgcgtgcaacccagcacgtagcttgtcgtaatgcgcaagtctgtggcggaaccgactactttgggtgtccgtgtttccttttatttttatcatggctgcttatggtgacaatcttggattgttatcatatagcgattggattggccatccggtgagaataaaagatattgtttatctgtttgtggcttttactccattaaacaaaaacacactttccttaattaaagtggtactattgatcagatcagcataccaca

SEQ ID NO: 1100 - DNA, 745 bp, Enterovirus C
  source 1..745: mol_type = genomic DNA
ttaaaacagctctggggttgttcccaccccagaggcccacgtggcggctagcactctggtattgcggtacctttgtgcgcctgttttatatccccgcccctacgtaactttagaagcaatacacagtgttcattaggaggggcacaaaccagtgtccttaagaacaagcacttctgtttccccggtgacctcgtataggctgtacccacggctaaaaacgagcgattcgttacccgcttaggtacttcgagaagcctagtaccgccttggaatcttcgacgcgttgcgctcagcactctaccccgagtgtagcttaggctgatgagtctgggcattccccaccggtgacggtggcccaggctgcgttggcggcctacccatggcctgcgccatgggacgctagttgtgaacaaggtgtgaagagcctattgagctacctaagaatcctccggcccctgaatgcggctaatcctaaccacggagcaagcaccctcaatccagggggtggcttgtcgtaacgcgcaagtctgtggcggaaccgactactttgggtgtccgtgtttccctttatttttattgtggctgcttatggtgacaatctttgattgccatcataaagcgaattggattggccatccggtgaaagttgaacacaccattcatctatttgttggattcacctcgttgactcagtttacacccaatttggtacatatagtgatagtgattagagaaaaataccaca

SEQ ID NO: 1101 - DNA, 745 bp, Enterovirus C
  source 1..745: mol_type = genomic DNA
ttaaaacagctctggggttgttcccaccccagaggcccacgtggcggctagtactctggtattacggtacctttgtacgcctgttttatatcccctccccccagtaacttagaaacaaaaaacccaagttcaataggagggggtacaaaccagtaccaccacgaacaagcacttctgttttccccggtgaggttgtatagactgtccccacggtcgaaaatgactgatccgttacccgctcctgtacttcgagaagcccagtaacatcttggaatcttcgatgcgttgcgctcagcactcaaccccagagtgtagcttaggtcgatgagtctggacgctccccaccggcgacggtggtccaggctgcgttggcggcctacctgtggtccaaagccacaggacgttagttgtgaacaaggtgtgaagagcctattgagctacaagagagtcctccggcccctgaatgcggctaatcccaaccatggagcagatgattgcaaaccagcaattggtctgtcgtaatgcgtaagtctgtggcggaaccgactactttgggtgtccgtgtttcctttttactctttaatggctgcttatggtgacaatcacggattgttatcataaagcgaattggattggccatccggtgagaatcagaacgattatttcttcctcgtggatttgtaccaataacaccttacacaccgcacttaatcagagttatattgtgtgagatttcattaccata

SEQ ID NO: 1102 - DNA, 745 bp, Enterovirus C
  source 1..745: mol_type = genomic DNA
ttaaaacagctctggggttgttcccaccccagaggcccacgtggcggctagcactctggtatcacggtacctttgtgcgcctgttttatgtccccgcccccatgtaactttagaagcaatacacggtgttcattaggaggggcacaagccagtgttcctatgaacaagcacttctgtttccccggtgacctcgtataggctgtgcccacggctaaaaacgtgcgatccgttacccgcttgggtacttcgagaagcccagtaccaccttggaatcttcgacgcgttgcgctcagcactctaccccgagtgtagcttaggctgatgagtctgggcattccccactggtgacagtggcccaggctgcgttggcggcctacccattgctcgcgcaatgggacgctagatgtgaacaaggtgtgaagagcctattgagctgcctaagagtcctccggcccctgaatgcggctaatcctaaccacggagcaagcgccttcaacccagggggtggcttgtcgtaacgcgcaagtctgtggcggaaccgactactttgggtgtccgtgtttccctttgtttttattatggctgcttatggtgacaatcattgattgccatcataaagcgaattggattggccatccggtggaagttacatacatcatccatctatttgttggatttgcttcactaacacagttcacaatcaacttggtatatataataatagtgattagagaaaaataccata

SEQ ID NO: 1103 - DNA, 745 bp, Enterovirus C
  source 1..745: mol_type = genomic DNA
ttaaaacagctctggggttgttcccaccccagaggcccacgtggcggctagtactctggtatctcggtacctttgtacgcctgttttatacccccttccccatgtaactttagaagcaattcaacaagttcaatagagggggtacaaaccagtaccaccacgaacaagcacttctgtttccccggtgattttacataagctgtgcccacggctgaaagtgaatgatccgttacccgcttgagtacttcgagaagcctagtatcgccttggaatcttcgatgcgttgcgctcagcactctaccccgagtgtagcttaggctgatgagtctgggcattccccaccggtgacggtggcccaggctgcgttggcggcctacccatggctaacgccatgggacgctagttgtgaacaaggtgtgaagagcctattgagctacttaagagtcctccggcccctgaatgcggctaatcccaaccacggagcaggcgccaccaatccaggaggtagcctgtcgtaacgcgtaagtctgtggcggaaccgactactttgggtgtccgtgtttccttttatctctttaatggctgcttatggtgacaatcatagattgttatcataaagcgaattggattggccatccggtgaagtgtaaacacattatttatttgttcattggatttactccattcacccgatttactccaaatataatacatattgtattgttgataagacgttgctactaca

SEQ ID NO: 1104 - DNA, 745 bp, Enterovirus C
  source 1..745: mol_type = genomic DNA
ttaaaacagctctggggttgttcccaccccagaggcccacgtggcggctagcactccggtattacggtacccttgtgcgcctgttttatactcccttcccccgcaatttagaagcatgaaacccggttcaatagtaaggggtacaaaccagtaccactatgaacaagcacttctgtctccccggtgatattgtatagactgctcacgcggttgaaagcgattgatccgttatccgcttgtgtacttcgagaagcctagtaccaccttcggaacttcgacgcgttgcgctcagcacccgaccccggggtgtagcttgggctgatgagtctggacgatcctcaccggcgacggtggtccaggctgcgttggcggcctacccgtggttcacaccacgggacgctacaagtgaacaaggtgtgaagagcctattgagctacacaagagtcctccggcccctgaatgcggctaatcccaaccacggagcaggcggtcacgaaccagtggctagcttgtcgtaacgcgcaagtctgtggcggaaccgactactttgggtgtccgtgtttcctgttatttttatcatggctgcttatggtgacaatcattgattgttatcataaagcgaattggattggccgtccggaaagtgttttatcacatatactgtttggtgaagctactacattaattctgcctctcactcggttagtcaaacagaactcagacagagtaaaacatcaccaacgca

SEQ ID NO: 1105 - DNA, 745 bp, Enterovirus C
  source 1..745: mol_type = genomic DNA
ttaaaacagcctgtgggttgttcccaccccagaggcccacgcggcggctagtactctggtgctgcggtacctttgtacgcctgttttatacccccgtccccgcaatttagaagcaagaaaacaaagttcaatagtaggtggtgcaatccagcatcgctatgaacaagcacttttgttgccccggtgaggttgcatagactgttcccacggtcaaaagtgaccaatccgttacccgcttttgtacttcgagaagcctagtatcaccttggaatcttcgacgcgttgcgttccgcactcaaccccagggtgtagcttaggtcgatgagtctgggcggaccccaccggcgacggtggcccaggctgcgttggcggcctacctgtggtccaaagccacaggacgctagttgtgaacaaggtgtgaagagcctattgagctacaaaagagtcctccggcccctgaatgcggctaatcctaaccacggagcaggtggtcgcaaaccagtgattaacctgtcgtaatgcgcaagtctgtggcggaaccgactactttgggtgtccgtgtttctctttattttactatggctgcttatggtgacaatcgaggattgttatcataaagcgaattggattggccatccggtgaaagtgaaatacattatctattcaattgttgaattcatccagaacacacccgcaacactacatctgattaaactcgttttgataaccagagaacattaccaca

SEQ ID NO: 1106 - DNA, 745 bp, Enterovirus C
  source 1..745: mol_type = genomic DNA
ttaaaacagcctgtgggttgttcccaccccagaggcccacgtggcggctagcactccggtattacggtacccttgtgcgcctgtttttatactcccttccccgtaacttagaagcacaaaaccaagttcaatagaagggggtacaaaccagtaccaccacgaacaagcacttctgtttccccggtgacgttgtatagactgctcacgcggttgaaagcgacgaatccgttatccgcttgtgtacttcgagaagcctagtaccaccttggaatcttcgacgcgttgcgctcggcactctaccccagagtgtagcttaggctgatgagtctgggcattcctcatcggcgacgatggcccaggctgcgttggcggcctacctatggctaacgccataggacgctagttgtgaacaaggtgtgaagagcctattgagctacacaagagtcctccggcccctgaatgcggctaatcctaaccatggagcaggagatcacaaaccagtggtattcctgtcgtaatgcgcaagtccgtggcggaaccgactactttgggtgtccgtgtttccttttatttttatcatggctgcttatggtgacaatcattgattgttatcataaagcgaattggattggccatccggtgaaaataagatttattatttacttgtttgttggattcactccgctaaacacattcactccaggtatcatctctatagtgattgaaattaggcaattacatcaca

SEQ ID NO: 1107 - DNA, 745 bp, Enterovirus C
  source 1..745: mol_type = genomic DNA
ttaaaacagctctggggttgttcccaccccagaggcccacgtggcggctagtactctggtatcacggtacctttgtacgcctgttttacatcccctcccccacgtaactttagaagcaattcaacaagttcaatagagggggtacaaaccagtatcaccacgaacaagcacttctgtttccccggtgattttacataagctgtgcccacggctgaaagtgaatgatccgttacccgctcgagtacttcgaaaagcctagtatcgctttgggatcttcgacgcgttgcgctcagcactctaccccgagtgtagcttaggctgatgagtctgggcattccccatcggcgacgatggcccaggctgcgttggcggcctacccatggctaacgccatgggacgctagttgtgaacaaggtgtgaagagcctattgagctactcgagagtcctccggcccctgaatgcggctaatcccaaccacggatcaggtgcctccaacccaggaggtggcctgtcgtaacgcgcaagtctgtggcggaaccgactactttgggtgtccgtgtttccttttatcttttaaatggctgcttatggtgacaatcatagattgttatcataaagcgaattggattggccatccggtgaaatacaaacacattatttacttgtttgttggatttactccgctcacacagcttactcctaagataatatttattgtattgctggtaaggagacactattata

SEQ ID NO: 1108 - DNA, 745 bp, Enterovirus B
  source 1..745: mol_type = genomic DNA
tttaaaacagcctgtgggttgttcccacccacagggcccactgggcgccagcactctggtattgcggtaccttagtgcgcctgttttatatacccatcccccaaacgtgatttagatgcatgttaacgaagaccaatagtaagcgcagcacaccagctgtgttccggtcaagcacttctgttaccccggactgagtatcaataagctactcacgtggctgaaggagaaaacgttcgttacccggccaattacttcgagaaacccagtaacaccatgaaggttgcgcagtgtttcgctccgcacaaccccagtgtagatcaggtcgatgagtcaccgcattccccacgggtgaccgtggcggtggctgcactggcggcctgcccatggggtaacccatgggacgcttcaatactgacatggtgcgaagagtctattgagctaattggtagtcctccggcccctgaatgcggctaatcctaactgcggagcagatacccacacgccagtgggcagtctgtcgtaacgggcaactctgcagcggaaccgactactttgggtgtccgtgtttctctttatccttatactggctgcttatggtgacaattgggagattgttaccatatagctattggattggccatccagtgacaaatagagcaatcgtgtatttgtttgttggtttcgtaccattaaattacaaggtcataaacaccctcaatcttattatagcattcaatacaacaaa

SEQ ID NO: 1109 - DNA, 745 bp, Enterovirus B
  source 1..745: mol_type = genomic DNA
ttaaaacagcctgtgggttgtacccacccacagggcccactgggcgctagcacactggtatcccggtacctttgtgcgcctgttttataccccctcccccatatcgtaacatagaagcaatgcactcccggtcaatagctgacgtgacaaaccagttgcgttttgaccaagcacttctgtaaccccggaccgagtatcaataagctgcttgcgcggctaaaggagaaaccgtccgttacccggctaactacttcgagaaacctagtaccaccatgaacgttgcggagtgtttcgctcagcacttcccccgtgtagatcaggtcgatgagccaccgcattccccacgggcgaccgtggcggtggctgcgttggcggcctgcctgtggggcaacccacaggacgctctaatatagacatggtgtgaagagtctattgagctagttagtagtcctccggcccctgaatgcggctaatcctaactgcggagcacatacccctaatccaaggggcagtgtgtcgtaacgggcgactctgcagcggaaccgactactttgggtgtccgtgtttccttttatcttttatattggctgcttatggtgacaattgcagagttgttaccatatagcttttggattggccatccggtgagcaatagagctgttatttatcaatttgttggattcgtcgcactcaaccacacagtctttagaacactcggatttatcttgacccttaatacgagaaa

SEQ ID NO: 1110 - DNA, 745 bp, Enterovirus B
  source 1..745: mol_type = genomic DNA
ttaaaacaagcctgtgggttgaacccactcacagggcccaatgggcgctagcacactggtatcacggtacctttgtgcgcctgttttatccaccctttccccgaacgaaacttagaagtttgaattaaacggtcaataggaaacccagtacaccaactgggctgtgaccaagcacttctgtgaccccggaccgagtatcaataagctactcacgtggctgaaggagaaaacgttcgttacccggccaattacttcgagaaacttagtaccaccatgaaagttgcgcagcgtttcgctccgcacgaccccagtgtagatcaggctgatgagtcaccgcgtaccccacgggtgaccgtggcggtggctgcgttggcggcctgcccttggggcaacccaagggacgcttcaatactgacatggtgcgaagagtctattgagctaattggtagtcctccggcccctgaatgcggctaatcccaactgcggagcagatacccacataccagtgggcagtctgtcgtaatgggcaactctgcagcggaaccgactactttgggtgtccgtgtttcctttatttcttacactggctgcttatggtgacaattgagagattgttgccatatagctattggattggccatccggtgtctaatagagcaattatctacctttttgttggatttattccacttaactataaagcactcaaaacacttatatacattgtagatctcaacacagcaaa

SEQ ID NO: 1111 - DNA, 745 bp, Enterovirus B
  source 1..745: mol_type = genomic DNA
tttaaaacagcctgtgggttgttcccacccacagggcccactgggcgctagcacactggtatcacggtacctttgtgcgcctgttttatacacccccccctacatcgtaatttagaagtccaagccaaacggtcaatagacaacccagtatgccaactgggtcccgaccaagcacttctgttgccccggaccgagtatcaataagctgcttgcgcggctgaaggagaaagcgttcgttacccggccaattacttcgagaaacccagtaacaccatggaagttgcgtggcgtttcgctccgcacaaccccagtgtagatcaggtcgatgagtcaccgcaaccctcacgggcgaccgtggcggtggctgcgttggcggcctgcccatgggacaacccatgggacgcttcaataccgacatggtgcgaagagtctattgagctaattggtattcctccggcccctgaatgcggctaatcctaactgcggagcagacacccacatgccagtgggcagtctgtcgtaacgggaaactctgcagcggaaccgactactttgggtgaccgtgtttcctattatccttattctggctgcttatggtgacaattgaaagattgttaccatatagctattggattggccatccggtgtctaatagagctattatatacctctttgttggatttataccacttaacaaagtaaactaccagactctgtgctatatcattggattgaacacggtgaa

SEQ ID NO: 1112 - DNA, 745 bp, Enterovirus B
  source 1..745: mol_type = genomic DNA
ttttaaaacaggctgtgggttgttcccacccacagggcccattgggcgccagcacactggtattacggtacctttgtgcgcctgttttatccaccccctccccaatgtaacgtagaagcacaaaccaagtggtcaatagatggctcagtacaccaactgggcttagaccaagcacttctgttaccccggactgagtatcaataggctgctcacgcggctgaaggagaaaacgttcgttacccgaccaactacttcgagaagcctagtaccatcatgaaggatgcgcagtgtttcgttcagcacaaccccagtgtagatcaggccgatgagtcaccgcaatccccacgggtgaccgtggcggtggctgcgctggcggcctgcccatggggcaacctatgggacgcttcaatttcgacatggtgcgaagagcctattgagctagttggtagtcctccggcccctgaatgcggctaatcccaactgcggagcagacacccacaaaccagtgggcagtttgtcgtaacgggcaactctgcagcggaaccgactactttgggtgtccgtgtttccttttatctatatattggctgcttatggtgacaattgagggattgttgccatatagctattggattggccatccggtaacaaacagagctattatttacctttttgttggcttcgtgccgttgaactttaaagttattaaaaccatatacttcatcttgacactcaacacagcaaa

SEQ ID NO: 1113 - DNA, 745 bp, Enterovirus B
  source 1..745: mol_type = genomic DNA
aaaacaagcctgtgggttgctcccggccccacaggggcccactgggcgctagcacactggtattgcggtacccttgtgcgcctgttttatccaccctccccaaccgtaatttagaagcacgaacaacgtggtcaacaggcaacccagtataccaactgggtctcgaccaagcacttctgtcaccccggactgagtatcaataagctgctcgcgtggctgaaggagaaaacgttcgttacccggccaattacttcgagaaacctagtatcaccatggaagttgcgcagtgtttcgctccgcacaaccccagtgtagatcaggtcgatgagtcaccgcaaccctcacgggtgaccgtggcggtggctgcgctggcggcctgcccatggggcaacccatgggacgcttcaatactgacatggtgcgaagagtctattgagctaattggtaatcctccggcccctgaatgcggctaatcctaactgcggagcagatatccacacaccagtggacagtctgtcgtaatgggcaactctgcagcggaaccgactactttgggtgtccgtgtttccttttattctttttattggctgcttatggtgacaattgagagattgttaccatatagctattggattggccatccggtgagcaacaggtcaattgtattcctctttgttggatttgtgccattaaactataataactacaacaccctgctttacattatccatttaaacacacagaa

SEQ ID NO: 1114 - DNA, 745 bp, Enterovirus C
  source 1..745: mol_type = genomic DNA
gctctggggttgttcccaccccagaggcccacgtggcggctagtactcccggtatcacggtacccttgtacgcctgttttatactccctttcccccgcaacttagaagattatgagaatccacgttcaacaggaagggggtacaaaccagtaccaccacgaacaagcacttctgtttccccggtgaggttgtatagactgtacccacggttgaagacgactgatccgttacccgctctagtacttcgagaagcttagtaacaccttggaatcatcgatgcgttgcgttcaacactcaaccccagagtgtagcttaggctgatgagtctggacaatcctcaccggtgacggtggtccaggctgcgctggcggcctacctgtggtccaaaaccacaggacgctagatgtgaacaaggtgcgaagagcctattgagctactagagagtcctccggcccctgaatgcggctaatcccaaccacgaagcaagtgctcacgatccagtgagtggcttgtcgtaacgcgtaagttcgtggcggaaccgactactttgggtgtccgtgtttcctttttaactttatatggctgcttatggtgacaatcattgattgttatcataaagcgatttggattggccatccagtgagagcgagaacaactacttatttgctcgttggatttgctccttcgacaagctacattttagatatcattctcattgtattcttgatcagaaagcaatatcata

SEQ ID NO: 1115 - DNA, 745 bp, unidentified
  source 1..745: mol_type = unassigned DNA; note = unclassified Enterovirus sequence
ttaaaacagcttgggggtgtttcccacccacagggcccactgggcggtagcactctggtattacggtacctttgtgcgccttttttatatccccacccccgattgtaacttagaagaaataattcacgaccaatagtaggcgtggcgcgccagccatgttttggtcaagtacttctgtttccccggatcgagtatcaataggctgtccacacggctgaaggagaaagcgtccgttatccggccaattacttcgagaaacctagtaccaccatgaaagttgcgcagtgtttcgctccgcacaaccccagtgtagatcaggtcgatgagtcaccgcttccctcacgggcgaccgtggcggtggctgcgctggcggcctgcccatggggaaacctatgggacgctccaatactgacatggtgcgaagagtctattgagctaattggtagtcctccggcccctgaatgcggctaatcccaactgcggagcagatacccacatgccagtgggcagtctgtcgtaacgggcaactctgcagcggaaccgactactttgggtgaccgtgtttccttttattcctatactggctgctaatggtgacaattgaaagattgttaccatatagctattggattggccatccggtaactaacagagcgattgtttaccaatttgttggttttgtaccactagactacaaggtcttaaacaccttaaactatatcttgacactcaacacattgaaaag

SEQ ID NO: 1116 - DNA, 746 bp, Enterovirus A
  source 1..746: mol_type = genomic DNA
gtgctcttccgatctgtgggttgcacccacccacagggcccactgggcgttagcactctggtaccatggtacccttgtgcgcctgttttatcaccctaacccaacttgaaacttagaagcaatacacaatcgaccaatagtaggtgtggcgcaccagccgcatcttggtcaagcacttctgtttccccgggttgagtatcaataagctgtccacacggctgaaggagaaaacgcccgttatccggccaactacttcgagaaacctagtaccactatgaacgttgcaaggcgtttcgctcagcacttcccccgtgtagatcaggtcgatgagtcaccgcattccccacgggcgaccgtggcggtggctgcgttggcggcctgcctatgggttaacccataggacgccttaatactgacatggtgcgaagagtctattgagctagttggtagtcctccggcccctgaatgcggctaatcctaactgcggagcacatactcacaacccagtgagcggtgtgtcgtaatgggtaaccctgcagcggaaccgactactttgggtgtccgtgtttccttttattcttacattggctgcttatggtgacaatcatagaattgttaccatatagctattggattggccatccgatttctaacagagctattatttacctgtttgttggatttactccgttgacatacaaatccctaaacactttgtgctttatcttgaacttgaacgcacgaaa

SEQ ID NO: 1117 - DNA, 746 bp, Enterovirus A
  source 1..746: mol_type = genomic DNA
tgctcttccgatctgtgggttgtacccacccacagggcccattgggcgctagcactctggtaccatggtacccttgtgcgcctgttttatcaccccgcccctacctgaaacgtagaagctataatcaatcggccaatagtgggtgtggcataccagccacatcttggtcaagcacttctgtttccccgggttgagtatcaatatgctgttcacacggctgaaggagaaaacacccgttacccggccaactacttcgagaagcttagtaccgccatgaacattgcaaggcgtttcgctcagcactttccccgtgtagatcaggccgatgagtcaccgcattccccacgggcgaccgtggcggtggctgcgttggcggcctgcctgtgggttaacccacaggacgccttaatatagacatggtgcgaagagcctattgagctagttggtattcctccggcccctgaatgcggctaatcctaactgtggagcacatactcacaagccagtgggtggtgtgtcgtaacgggcaactctgcagcggaaccgactactttgggtgtccgtgtttcctttttatccttatattggctgcttatggtgacaatcagagaattgttaccatatagctattggattggccatccggtgtgcaacagagctattgtgtatttgtttgttggatttgtcccactatcgtatacacccctcaacaccttgtattttattttgagattgaacgcaagaaa

SEQ ID NO: 1118 - DNA, 746 bp, Enterovirus A
  source 1..746: mol_type = genomic DNA
tttaaaacagcctgtgggttgtacccacttgcagggcccactgggcgctagcactctgattctgcgggatctttgtgcgcctgttttataaccccacccctactcgtaacttagaagtaacacacaccattgatcaacagcaagcgtggcgcaccagccacgtttagatcaagcacttctgtttccccggactgagtatcaatagactgctcacgcggttgaaggagaaatcgttcgttacccggctaactacttcgagaaacctagtagcaccattgaaactgcagagtgtttcgttcagcactttccccgtgtagatcaggccgatgagtcactgcaatccccacgggcgaccgtggcagtggctgcgttggcggcctgcctatgggctttcccataggacgctctaatgtggacatggtgtgaagagtctattgagctagttagtagtcctccggcccctgaatgcggctaatcctaactgcggagcgcataccctcaatccagggggtggtgcgtcgtaacgggcaactttgcagcggaaccgactactttgggtgtccgtgtttccttttattcttatattggctgcttatggtgacaattgagaaattgttaccatatagctattggattggccatccagtgtctaacagagcagttgtatacttatttgctggattcgttccactatcatacacatctattaataccttatattatattataagattgaacgcaaggaa

SEQ ID NO: 1119 - DNA, 746 bp, Enterovirus A
  source 1..746: mol_type = genomic DNA
tttaaaacagcctgtgggttgtacccacctacagggcccactgggcgctagcactctgattccacggaatccttgtgcgcctgttttatatcccctccccaagttgcaacttagaagcattgcactacaatgatcagtagcaggcgtggcgctccagccatgtctcgatcaagcacttctgtttccccggaccgagtatcaatagactgctaacgcggttgaaggagaaaacgttcgttatccggctaactacttcgagaaacctagtagcaccatcgaagctgcggggcgtttcgctcagcacttcccccgtgtagatcaggtcgatgagtcactgcaatcctcacgggcgaccgtggcagtggctgcgttggcggcctgcctatggggcaacccataggacgcttcaaagtggacatggtgtgaagagtctattgagctagttagtagtcctccggcccctgaatgcggctaatcctaactgcggagcacataccttcaatccaggaggtagtgtgtcgtaacgggcaactctgcagcggaaccgactactttgggtgtccgtgtttccttttattctcttattggctgcttatggtgacaattgaagaattgttaccatatagctattggattggccatccagtgtctaacagagcaattgtgtacttatttgttggttttgttcctttgtctcacacgtcccttagtactttgtattacattataaaactgaattcggagag

SEQ ID NO: 1120 - DNA, 746 bp, Enterovirus A
  source 1..746: mol_type = genomic DNA
tttaaaacagcctgtgggttgcacccacccacagggcccactgggcgctagcactctggtactgaggtacctttgtgcgcctgtttttactccccttcccccgaagtaacttagaagctgtaaatcaacgatcaatagcaggtgtggcacaccagtcataccttgatcaagcacttctgtttccccggactgagtatcaataggctgctcgcgcggctgaaggagaaaacgttcgttacccgaccaactacttcgagaagcttagtaccaccatgaacgaggcagggtgtttcgctcagcacaaccccagtgtagatcaggctgatgagtcactgcaacccccatgggcgaccatggcagtggctgcgttggcggcctgcccatggagaaatccatgggacgctctaattctgacatggtgtgaagagcctattgagctagctggtagtcctccggcccctgaatgcggctaatcctaactgcggagcacatgctcacaaaccagtgggtggtgtgtcgtaacgggcaactctgcagcggaaccgactactttgggtgtccgtgtttccttttattcctatattggctgcttatggtgacaatcaaagagttgttaccatatagctattggattggccatccggtgtgcaacagggcaattgtttacctatttattggttttgtaccattatcactgaagtctgtgatcactctcaaattcattttgaccctcaacgcaatcaaac

SEQ ID NO: 1121 - DNA, 746 bp, Enterovirus A
  source 1..746: mol_type = genomic DNA
ttttaaaaaccagcctgtgggttgcacccactcacagggcctactgggcgcaagcactctggtacctcggtacctttgtgcgcctgttttacaccccccccctagtgaaacttagaagcagcaaaccacgatcaatagcaggcataacgctccagttatgtcttgatcaagcacttctgtttccccggactgagtatcaatagactgctcgcgcggttgaaggagaaaacgttcgttatccggctaactacttcggaaaacctagtaacaccatgaaagttgcggagagcttcgttcagcactcccccagtgtagatcaggtcgatgagtcaccgcattccccacgggcgaccgtggcggtggctgcgttggcggcctgcccatggggtaacccatggggcgctctaatacggacatggtgtgaagagtctactgagctagttagtagtcctccggcccctgaatgcggctaatcccaactgcggagcacacgcccacaagccagcgggtagtgtgtcgtaacgggtaactctgcagcggaaccgactactttgggtgtccgtgtttccttttatctttatattggctgcttatggtgacaattaaagaattgttaccatatagctattggattggccatccggtgtgtaatagagcaattatttacctatttattggttttgtaccattaaccttgaattctgtgaccacccttaattatattttgacccttaacacagctaaac

SEQ ID NO: 1122 - DNA, 746 bp, Enterovirus A
  source 1..746: mol_type = genomic DNA
ttaaaacagcctgtgggttgttcccacccacagggcccactgggcgctagcacactgattctacggaaactttgtgcgcctgttttatgtccctccccctaatatgtaacttagaaatttagtacacccatgaccaatagtaggcgtgacgcaccagtcacgtcttggtcaagcacttttgtttccccgggctgagtatcaatagactgcttacgcggttgaaggagaaaacgttcgttacccggctaactacttcgagaaacctagtaacaccatgaaagttgcagggtgtttcgctcagcacttcccccgtgtagatcaggtcgatgagtcactgcaaaccccacgggcgaccgtggcagtggctgcgttggcggcctgcccatggggtaacccatgggacgctctgatactgacatggtgcgaagagtctattgagctagttagtagtcctccggcccctgaatgcggctaatcctaactgcggagcacacaccctcaacccagggggcggtgtgtcgtaacgggcaactctgcagcggaaccgactactttgggtgtccgtgtttccttttatctctattatggctgcttatggtgacaattgaagaattgttaccatatagctattggattggccatccggtgtttaacagagcaattgtatacctatttgttggatttgtccctttgtcacacacatctctcaataccttatactacattataaagttgaatacaggaac

SEQ ID NO: 1123 - DNA, 746 bp, Enterovirus A
  source 1..746: mol_type = genomic DNA
ttaaaacagcccgtgggttgtacccactcacggggtccactggacgctagcactctggttccacggaacctttgtgcgcctgttttatacccctccccaacttgtaacgtagaagcagtacctaatatcgatcaatagtaggtgtggcgcaccagccatatcttgatcaagcacttctgtctccccggaccgagtatcaatagactgctcacgcggttgaaggagaaagcgttcgttacccggctaactacttcgagaaacctagtagcaccatggaagctgcggagtgtttcgctcagcacttcccccgtgtagatcaggtcgatgagtcactgcaatcctcacgggtgaccgtggcagtggctgcgttggcggcctgcctgtggggcaacccacaggacgctctaatgtggacatggtgcgaagagtctattgagctagttagtagtcctccggcccctgaatgcggctaatcctaactgcggagcgcatgccctcaatccagagggtagtgcgtcgtaacgggcaactctgcagcggaaccgactactttgggtgtccgtgtttccttttactcttatattggctgcttatggtgacaattacggaattgttaccatatagctattggattggccatccggtgtgcaatagagctatcatttacctatttgttggatttgtaccactgtcattaaagtccataaccacactcaattatatactcactctcaatataactaaac

SEQ ID NO: 1124 - DNA, 746 bp, Enterovirus A
  source 1..746: mol_type = genomic DNA
ttaaaacagctgtgggttgttcccactcacagggcccactgggcgctagcactctgattttacgaaatccttgtgcgcctgttttatatcccttccctaattcgaaacgtagaagcaatgcgcaccactgatcaatagtaggcgtaacgcgccagttacgtcatgatcaagcatatctgttcccccggactgagtatcaatagactgcttacgcggttgaaggagaaaacgttcgttatccggctaactacttcgagaagcccagtaacaccatggaagctgcagggtgtttcgctcagcacttcccccgtgtagatcaggtcgatgagccactgcaatccccacaggtgattgtggcagtggctgcgttggcggcctgcctatggggagacccataggacgctctaatgtggacatggtgcgaagagcctattgagctagttagtagtcctccggcccctgaatgcggctaatcctaactgcggagcacatgccttcaacccagagggtagtgtgtcgtaatgggcaactctgcagcggaaccgactactttgggtgtccgtgtttctttttattcttatattggctgcttatggtgacaattacagaattgttaccatatagctattggattggccatccggtgtgtaatagagctgttatatacctatttgttggctttgtaccactaactttaaaatctataactaccctcaactttatattaaccctcaatacagttgaac

SEQ ID NO: 1125 - DNA, 746 bp, Enterovirus A
  source 1..746: mol_type = genomic DNA
ttaaaacagcctgtgggttgttcccacccacagggcccattgggcgctagcacactgactttgcggagtctttgtgcgcctgttttataacccttcccccaagtagcaacttagaagtattgcacaaccgcggccagtagtgggcgtgacgcgccagtcacgtcttggtcaagcacttctgtatccccggactgagtatcaatagactgctcgcgcggttgaaggagaaaacgttcgttatccggctaactacttcgggaaacctagtagcaccttggaagttgcagagtgtttcgctcagcactttccccgtgtagatcaggtcgatgagccactgtaaaccccacgggcgaccgtgacagtggctgcgttggcggcctgcccatggggtaacccatgggacgctctaatacagacatggtgtgaagagtctactgagctagttagtagtcctccggcccctgaatgcggctaatcctaactgcggagcacacaccctcaatccagggggcggtgtgtcgtaatgggtaactctgcagcggaaccgactactttgggtgtccgtgtttccttttattcctttactggctgcttatggtgacaattgaaaagttgttaccatatagctattggattggccatccggtgtctaacagagctattgtctacttgtttattggatacgtccctcttaatctcaaggtcattcgaactcttgattatatattgctccttaattataggaa

SEQ ID NO: 1126 - DNA, 746 bp, Enterovirus A
  source 1..746: mol_type = genomic DNA
tttaaaacagcctgtgggttgcacccacccacagggcccactgggcgccagcactctgattccgcggaatctttgtgtgcctgttttatcacccttcccccaaacttgcaacttagaagcagcacttcactgaccaatagcaggcgtggcgcaccagccatgtctaggtcaagcacttctgtttccccggactgagtatcaataggctgctcacgcggctgaaggagaaaacgttcgtcatccggctaactacttcgagaaacctagtagcaccggtgaagctgcagagtgtttcgctcagcacttcccccgtgtagatcaggtcgatgagtcactgcactccccacgggcgaccgtggcagtggctgcgctggcggcctgcctatgggtcaacccataggacgctctaatgtggacacggtgcgaagagtctattgagctagttagtagtcctccggcccctgaatgcggctaatcctaactgcggagcacatgcccccgaaccagggggtggtgtgtcgtaacgggcaactctgcagcggaaccgactactttgggtgaccgtgtttccttttgttcttattatggctgcttatggtgacaattgaagaattgttaccatatagctattggattggccatccagtgtctaacagagctatcatatacctatttgttggattcgttctattgtcatacacatcactcaatacattacattttattgtgagattaaatacaagaaa

SEQ ID NO: 1127 - DNA, 746 bp, Enterovirus A
  source 1..746: mol_type = genomic DNA
tttaaaacagcctgtgggttgtacccacccatagggcccactgggcgccagcactctgattctgcggaatctttgtgcgcctgttttatcaccctctccctaaattcgtaacttagaagcaacactctactgaccaatagcgggcgtggcgcaccagccatgtctaggtcaagcacttctgtctccccggactgagtatcaataggctgctcacgcggctgaaggagaaaacgttcgtcatccggctaactacttcgagaagcctagtagcaccgttgaaactgcagagtgtttcgctcagcactttccccgtgtagatcaggtcgatgagtcactgcactccccacgggcgaccgtggcagtggctgcgttggcggcctgcctatgggtcaacccataggacgctctaatgtagacacggtgcgaagagtctatcgagctagttagtagtcctccggcccctgaatgcggctaatcctaactgcggagcacatgcccccgagccagagggtggtgtgtcgtaacgggtaactctgcagcggaaccgactactttgggtgtccgtgtttccttttattcttgatatggctgcttatggtgacaattgaagaattgttaccatatagctattggattggccatccggtgtctaacagagctattgtatacctgtttgttggatttgttccattatcacaaacatcactcaacacactacacttcattgtgagattgaacgcaagaaa

SEQ ID NO: 1128 - DNA, 746 bp, Enterovirus A
  source 1..746: mol_type = genomic DNA
ttaaaacagctctggggttgtacccacccgcagggcccactgggcgctagcacactgattctacggaacctttgtgcgcctgttttatatccctcccccgaaacagcaacttagaagttgaacatttacacgaccaatagtgggcatggcgcgccagccatgtcttggtcaagcactcctgtttccccggactgagtatcaataggctgctcacgtggctgaaggagaaagagttcgttacccggctaactacttcgagaaacttagtaacaccatgaatgttgcagagtgtttcgctcagcacttcccccgtgtagatcaggctgatgagccactgcaaaccccacgggcgaccgtggcagtggctgcgttggcggcctgcctatggggcaacccataggacgctctaatacagacatggtgcgaagagtctattgagctagttagtattcctccggcccctgaatgcggctaatcccaactgcggagcacatgccctcaatccagagggtggtgtgtcgtaacgggcaactctgcagcggaaccgactactttgggtgtccgtgtttccttttattcttatattggctgcttatggtgacaattgaaagattgttaccatatagctattggattggccacccggtgactaacagagctttaatttaccaattcactgggtttgtacctttatcacctacagtttatcagactttggtgtatctgttatatctcaacagtaagaa

SEQ ID NO: 1129 - DNA, 746 bp, unidentified
  source 1..746: mol_type = unassigned DNA; note = unclassified Enterovirus sequence
ttaaaacagctctggggttgttcccaccccagaggcccacgtggcggccagtacaccggtaccacggtacccttgtacgcctgttttatactcccctccccgtaaactagaagcacgaaacacaagttcaatagaagggggtacagaccagtaccaccacgaacaagcacttctgttcccccggtgaggtcacatagactgtccccacggtcaaaagtgactgatccgttatccgctcacgtacttcggaaagcctagtaccaccttggaatctacgatgcgttgcgctcagcactcgaccccggagtgtagcttaggctgatgagtctggacgttccccactggtgacagtggtccaggctgcgttggcggcctacctgtggtccaaaaccacaggacgctagtagtgaacaaggtgtgaagagcccactgagctacctgagaatcctccggcccctgaatgcggctaatcccaaccacggagcaggtaatcgcaaaccagcggtcagcctgtcgtaacgcgtaagtctgtggcggaaccgactactttgggtgtccgtgtttccttttatttttatggtggctgcttatggtgacaatcatagattgttatcataaagcaaattggattggccatccggagtgagctaaactatctatttctctgagtgttggattcgtttcacccacattctgaacaatcagcctcattagtgttaccctgttaataagacgatatcatcacg

SEQ ID NO: 1130 - DNA, 746 bp, Enterovirus C
  source 1..746: mol_type = genomic DNA
ttaaaacagctctggggttgttcccaccccagaggcccacgtggcggccagtactccggtatcacggtacccttgtacgcctgttttatacccccttccccgcaacttagaagctttaaattcaagttcaatagaaggtggtacaaaccagtatcgccacgaacaagcacttctgttgccccggtgaaattgcataagctgtccccacggctgaaggcgattgatccgttacccgctcttgtacttcgagaagcctagtaccaccttggaattttcgatgcgttgcgctcagcactcaaccccagagtgtagcttaggctgatgagtctggacataccccaccggcgacggtggtccaggctgcgttggcggcctacctgtggcccaaagccacaggacgctagttatgaacaaggtgtgaagagcctattgagctacaagagagtcctccggcccctgaatgcggctaatcctaaccacggatcaggcgattgcaacccagcaattagcctgtcgtaatgcgcaagtctgtggcggaaccgactactttgggtgtccgtgtttctttttattcttacattggctgcttatggtgacaatcttagattgttatcataaagcaagttggattggccatccggtgaaagtcaaagttactatctatttatctgttggattttaccctaagaccactcatttacctgacttaattagaataattatactacttggaaattactatcaca

SEQ ID NO: 1131 - DNA, 746 bp, Enterovirus C
  source 1..746: mol_type = genomic DNA
ttaaaacagctctggggttgttcccaccccagaggcccacgtggcggctagtacaccggtatcacggtacccttgtacgcctgttttatattcccttccccgtaacttagaagcaataaactcaagttcaatagaagggggtgcaaaccagcaccaccacgaacaagcacttctgtttccccggtgagattgcatagactgtccccacggttgaaagcgattgatccgttaaccgctcttgtacttcgagaagcctagtaccatcctggaatctacgatgcgttgcgctcagcactcaatcccagagtgtagcttaggtcgatgagtctggatactccccaccggcgacggtgatccaggctgcgttggcggcctacctgtggtccaaagccacaggacgctagtagtgaacagggtgtgaagagcctattgagctacatgagagtcctccggcccctgaatgcggctaatcccaaccacggagcaggtggctacaacccagtaactggcctgtcgtaacgcgcaagtctgtggcggaaccgactactttgggtgtccgtgtttccttttatttttataatggctgcttatggtgacaatcattgattgttatcataaagcgacttggattggccatccagcgagaatcagatcgattatttatttgtttgttggattcaccaccttatctacatacacaccaaacttaattagaatcactttattgattaggtatcattatcacg

SEQ ID NO: 1132 - DNA, 746 bp, Enterovirus C
  source 1..746: mol_type = genomic DNA
ttaaaacagctgtggggttgttcccaccccagaggcccacgtggcggctagtactccggtatcacggtacccttgtacgcctgttttatactccctcccccgtaacttagaagcaatcaaatcaagttcaataggagggggtacaaaccagtaccaccacgaacgagcacttctgtttccccggtgaagttgcatagactgttaccacggttgaaagcgaccgatccgttatccgctcatgtacttcgagaagcctagtacctccttggaatcttcgatgcgttgcgctcagcactcaaccccggagtgtagcttaggctgatgagtctggacagccctcaccggcgacggtggtccaggctgcgttggcggcctacctgtggcccaaagccacaggacgctagttgtgaacaaggtgtgaagagcctattgagctacatgagagtcctccggcccctgaatgcggctaatcctaaccacggagcaggcgatcgcaaaccagcaattagcctgtcgtaacgcgaaagtctgtggcggaaccgactactttgggtgaccgtgtttctcttatttttattcatggctgcttatggtgacaatcatagattgttatcataaagcgagttggattggccatccggtaaaagtcaagtatatcatttacttgtttgtaggatttattcctttgaacgtccatttactcaatcttatcagagtcacattactagtaagatctcactatcaca

SEQ ID NO: 1133 - DNA, 746 bp, Enterovirus C
  source 1..746: mol_type = genomic DNA
ttaaaacagcctgtgggttgttcccaccccagaggcccacgtggcggctagtactctggtatcacggtacctttgtacgcctgttttatatcccttcccccgtaacttagaagctttgtaccaacaagttcaatagaaggggtacaaaccagtaccaccacgaacaagcacttctgtttccccggtgcgatgacatagactgtacccacggtcaaaagtcaccaatccgttacccgctttggtacttcgagacgcctagtattgccttggaattctcgatgcgttgcgctcaacactcgaccctggagtgtagcttaggctgatgagtctgggcattccccaccggtgacggtggcccaggctgcgttggcggcctacccatagctattgctatgggatgctagagttgaacaaggtgtgaagagccaattgagctactaaagagtcctccggcccctgaatgcggctaatcccaaccacggatcaagtgcgtgcaacccagcacgtagcttgtcgtaatgcgcaagtctgtggcggaaccgactactttgggtgtccgtgtttccttttatttttatcgtggctgcttatggtgacaatcatagattgttatcataaagcgaattggattggccatccagtgagaatcaagtcgctgatatatttatttgttggatttaccaaaatcaaccacagaacaccagttttaattcgtattgtgttactaattagatttcactactaca

SEQ ID NO: 1134 - DNA, 746 bp, Enterovirus C
  source 1..746: mol_type = genomic DNA
ttaaaacagcctgtgggttgttcccaccccagaggcccacgtggcggctagtactccggtattacggtacccttgtacgcctgttttatacccccttcccccgcaacttagattcaaacaaacacaagttcaataggagggggtacaaaccagtaccaccacgaacaagcacttctgtttccccggtgaggttgtatagactgttaccacggttgaaagcgactgatccgttatccgccttagtacttcgagaagcctagtatcaccttggaatctccgatgcgttgcgctcagcaatgtacccccattgtagcttaggccgatgagtctgggcattccccaccggcgacggtggcccaggctgcgttggcggcctacctatggtgaaaaccataggacgctagttgtgaacaaggtgcgaagagcctattgagctactaaggagtcctccggcccctgaatgcggctaatcccaaccacggagcaggtagttgcaaaccagcaaccagcctgtcgtaatgcgcaagtctgtggcggaaccgactactttgggtgtccgtgtttccttttattcttataatggctgcttatggtgacaatcatagattgttatcataaagcgaattggattggccatccggtgagaatcagatcgatcatttacctgtttgtcggatttaccccattggcatcgcacacgagtgacctaatcagaatagtgttgttgataaggtactactatcaca

SEQ ID NO: 1135 - DNA, 746 bp, Enterovirus C
  source 1..746: mol_type = genomic DNA
ttaaaacagctctggggttgttcccaccccagaggcccacgtggcggccagtactctggtactacggtacctttgtacgcctgttttatactccctcccccatgcaacattagaagcaattcacaaagttcaatagagggggtacaaaccagtaccaccacgaacaagcacttctgtttccccggtgatctcgtataggccgtacccacggctgaaaacaagtgatccgttatccgcttaggtacttcgagaaacctagtatcaccttgggatcttcgacgcgttgcactcagcactctaccccgagtgtagcttaggctgatgagtctgggcattccccaccggtgacggtggcccaggctgcgttggcggcctacccatggctaacgccatgggacgctagttgtgaacaaggtgtgaagagcctattgagctacctaagagtcctccggcccctgaatgcggctaatcccaaccacggagcaagtgccttcaatccagagggtggcttgtcgtaacgcgcaagtctgtggcggaaccgactactttgggtgtccgtgtttccttttatttttattacggctgcttatggtgacaatcattgattgccatcataaagcgagttggattggccatccggtgaaagttaagtatctcgtccacttatctgttggacttactccattaactcaactcacgcctgatttgatatctatagtgttattgatttggaaaaagctatcata

SEQ ID NO: 1136 - DNA, 746 bp, Enterovirus C
  source 1..746: mol_type = genomic DNA
ttaaaacagctctggggttgttcccaccccagaggcccacgtggcggctagtactccggtatcacggtacccttgtacgcctgttttatactcccttccccgtaacttagaagtatacaaaccaagttcaatagaagggggtacaaaccagtaccaccacgaacaagcacttctgtttccccggtgaagttgcatagattgtccccacggtcgaaagcgactgatccgttatccgctcttgtacttcgggaagcctagtatcaccttcggatcttcgatgcgttgcgctcagcactcaaccccagagtgtagcttaggtcgatgagtctggacgaacctcactggtgacagtggtccaggctgcgttggcggcctacctgtggcccaaagccacaggacgctagttgtgaacaaggtgtgaagagcctactgagctacatgagagtcctccggcccctgaatgcggctaatcccaaccacggagcaggtggtcacaaaccagtggtttgcctgtcgtaacgcgaaagtctgtggcggaaccgactactttgggtgtccgtgtttccttttattcttattatggctgcttatggtgacaatcttagattgttatcataaagcgaattggattggccatccggggaaaattaagcatatcatacacttgtttgttggattcacccctctgattacacatactcttggcttgattaggattgttgcattgataagacactattgttgca

SEQ ID NO: 1137 - DNA, 746 bp, Enterovirus C
  source 1..746: mol_type = genomic DNA
ttaaaacagcctgtgggttgttcccaccccagaggcccacgtggcggccagtactccggtatcacggtacccttgtacgcctgttttatactcccttccccagtaatttagaagcaattaaaccaagttcaatagaagggggtacaaaccagtaccaccacgaacaagcactcctgtttccccggtgacgttgtatatactgtacccacggtagaaagcgaccgatccgttatccgctcttgtacttcgagaagcccagtaccatcttggaatcttcgatgcgttgcgctcagcactcaaccccagagtgtagcttaggtcgatgagtctggacaatcctcaccggcgacggtggtccaggctgcgttggcggcctacctgtggcccaaagccacaggacgctagttgtgaacaaggtgcgaagagcctattgagctacaagagagtcctccggcccctgaatgcggctaatcccaaccacggagctggtgaccacaaaccagtggttaacctgtcgtaatgcgcaagtctgtggcggaaccgactactttgggtgtccgtgtttcctttatttttattatggctgcttatggtgacaatcatagattgttatcataaagcgacttggattggccatccagtgaaagcaaaacaatttatctacttgtttgttgaattcactctattgaccacccacttactaagtcttattaaaattctcttgttgattagattaacacaccaca

SEQ ID NO: 1138 - DNA, 746 bp, Enterovirus C
  source 1..746: mol_type = genomic DNA
ttaaaacagctctggggttgttcccaccccagaggcccacgtggcggctagtactccggtatcacggtacccttgtacgcctgttttatactcccttcccccgtaacttagaagaaataaaccaagttcaatagaagggggtacaaaccagtaccaccacgaacaagcacttctgtttccccggtgaagttgtataaactgtatccacggttgaaggcgactgatccgttatccgcttttgtacttcgagaagcctagtatcatcttggaatcttcgatgcgttgcgctcagcactcaaccccagagtgtagcttgggctgatgagtctggacacccctcaccggtgacggtggtccaggctgcgttggcggcctacctgtggcccaaagccacaggacgctagttgtgaacaaggtgtgaagagcctattgagctacgaaagagtcctccggcccctgaatgcggctaatcctaaccacggagcaagggtgcgcaaaccagtgcatgccttgtcgtaacgcgcaagtctgtggcggaaccgactactttgggtgtccgtgtttccttttattcttataatggctgcttatggtgacaatcatagattgttatcataaagcgaattggattggccatccggcgaaagtgaaatacattgtttatctttttgttggattcactccaaacacttccccttcttttaaactcatcactacggtcttgttgatcagagactcatatcaca

SEQ ID NO: 1139 - DNA, 746 bp, Enterovirus C
  source 1..746: mol_type = genomic DNA
ttaaaacagctctggggttgttcccaacccagaggcccacgtggcggctagtactctggtatcatggtacccttgtacgcctgttttatactcccttaccccgtaacttagaagcaataaaccaagttcaatagaagggggtacaaaccagtaccaccgcgaacaagcacttctgttgccccggtgaagttgcatagactgtgcccacggttaaaagcgactgatccgttatccgctcttgtacttcgagaaacctagtatcatcttggaatcttcgatgcgttgcgctcaacactcgaccccagagtgtagcttaggtcgatgagtctggacactcctcactggtgacagtggtccaggctgcgttggcggcctacctgtggcccaaagccacaggacgctagtagtgaacaaggtgtgaagagtctattgagctacaagtgagtcctccggcccctgaatgcggctaatcccaaccacggagcaagtgctcacactccagtgagtagcttgtcgtaacgggtaactctgtggcggaaccgactactttgggtgtccgtgtttccttttattcttataatggctgcttatggtgacaatcatagattgttatcataaagcgaattggattggccatccggtgaaagtgaaatactttgcttaactttttgttggattcactccagtcactttcctttcttttaaactcatcaccacagtcttgttgttcagagactcatatcaca

SEQ ID NO: 1140 - DNA, 746 bp, Enterovirus C
  source 1..746: mol_type = genomic DNA
ttaaaacagctctggggttgttcccaccccagaggcccacgtggcggccagtactctggtattacggtacctttgtacgcctgttttatactccctccctcgtaacttagaagaaacaaatcaagttcaacaggagggggtacaaaccagtaccaccacgaacaagcacttctgtctccccggtgacgttgcatagactgtacccacggtcgaaagcgattgatccgttatccgctcttgtacttcgagaagcctagtatcatcttggaatcttcgatgcgttgcgctcagcactcaaccccagagtgtagcttaggtcgatgagtctggacgttccccaccggcgacggtggtccaggctgcgttggcggcctacctgtggcccaaagccacaggacgctagttgtgaacaaggtgtgaagagcctattgagctacaggagagtcctccggcccctgaatgcggctaatcccaaccacggagcaggggtgcataaaccaatgcataccttgtcgtaacgcgcaagtctgtggcggaaccgactactttgggtgtccgtgtttccttttattttttcattggctgcttatggtgacaatcatagattgttatcataaagcgacttggattggccatccggtgagagtgaaatacattgtttacttgttcattggatttactccactcaactctttcgcttacaaactcattacaacaactctgttgattgaaacaacaatactaca

SEQ ID NO: 1141 - DNA, 746 bp, Enterovirus C
  source 1..746: mol_type = genomic DNA
ttaaaacagctctggggttgttcccaccccagaggcccacgtggcggctagtacactggtatcacggtacccttgtacgcctgttttatactcccttccccgtaacttagaagtatacaagccaagttcaatagaagggggtacaaaccagtaccaccacgaacaagcacttctgtttccccggtgaagttgcatagattgttcccacggtcgaaagcgactgatccgttacccgctcatgtacttcgggaagcctagtatcacttcggactcttcgatgcgttgcgctcagcactcaaccccagagtgtagcttaggtcgatgagtctggacaaacctcactggcgacagtggtccaggctgcgttggcggcctacctgtggcccaaagccacaggacgctagttgtgaacaaggtgtgaagagcctactgagctacatgagagtcctccggcccctgaatgcggctaatctcaaccacggagcaggtagtcacaaaccagtgatttgcctgtcgtaacgcgaaagtctgtggcggaaccgactactttgggtgtccgtgtttccttttattctcattatggctgcttatggtgacaatcctagattgttatcataaagtgagctggattggccatccggtgaaaatcaagcacattatatatttgtttgttgggtttaaccctctgattgcacgcactcttggcttggttaggattattgtgtggaaaaggcaccatagttaca

SEQ ID NO: 1142 - DNA, 746 bp, Enterovirus B
  source 1..746: mol_type = genomic DNA
ttaaaacagcctgtgggttgctcccacccacagggcccactgggcgtcagcacactggtatcaaggtacctttgtgcgcctgttttacaaaccctccccccccttgtaacaaacttagaagcaatgcacaccgatcaatagcgggcgcggcacgccagctgcgtcttgatcaagcacttctgtctccccggaccgagtatcaatagactgcttgcgtggttgaaggagaaagcgtccgttacccgaccaactacttcgagaagcccagtagcgccatggaagctgcgaagcgtttcgctcagcacacccccagtgtagatcaggtcgatgagtcaccgcattccccacgggcgaccgtggcggtggctgcgttggcggcctgcctacggggtaacccgtaggacgcttcaatgtagacatggtgcgaagagtcgattgagctagttggtaatcctccggcccctgaatgcggctaatcctaactgcggagcacgtgccttcaacccagagggtggcgtgtcgtaacgggcaactctgcagcggaaccgactactttgggtgtccgtgtttctttttattttgtactggctgcttatggtgacaattgaaggattgttaccatatagctattggattggccatccggtgcctaacagagcaattatttacctctttgttgggttcgtaccattcaataaggctaattaccaaatcttgtgttacatcctcagattgaacacatcgaa

SEQ ID NO: 1143 - DNA, 747 bp, Cosavirus D
  source 1..747: mol_type = genomic DNA
tggcagtccttgaaacgtgtggtgcgacgtctaaccattatggcagtgggtggagtactgcaaagatgtcaccgtgctttacacggtttttgaaccccacaccggctgtttggcgcttgcaggacagtaggtatattttctttcatttctcttttctagccgcgtaggttctatctacgcgggcggagtgatactcccgctccttcttggacaggcggcctccacgctctttgtggatcttaaggctgccaagtcactggtgtttgaagtgaagaatggagagacactagggcgtttcatgtggctttgccagggattgtagcgatgctgtgtgtgtgtgcggatttcccctcgtggcgacacgagcctcacaggccaaaagccctgtccgaaaggacccacacagtggggttgccccgacccctcccttcaaagctttgtgtaaacaaacttttgtttagactttcttaagcttctctcacatcaggccccaaagatgtcctgaaggtaccctgtgtatctgaggatgagcaccaccaactacccggacttgtgggacgtgtcccacagacgcatgtggtattccagccccctccttttgaggagggggcttttgctcgctcagcacaggatctgatcaggagattcatctctggtgctttacaccagagcatggatttaaaaattgcccaaggcctggcaaacaacctaggggactaggttttctctattttaaaagatgtcaat

SEQ ID NO: 1144 - DNA, 747 bp, Enterovirus A
  source 1..747: mol_type = genomic DNA
ttaaaacagcctgtgggttgcacccactcacaggacccacgtggtgctagcactctggttccacggaacctttgtgcgcctgttttacgtcccctccccaatttgtaacttagaagcaatttacaacactgatcaatagcaggcatggcgcaccagctatgtcttgatcaagcacttccgtttccccggaccgagtatcaatagactgttcacacggttgaaggagaaagcgtccgttatccggctaactacttcgagaaacccagtagcgccattgaaactgcagagtgtttcgctccacacttcccccgtgtagatcaggtcgatgagtcactgtaatccccacgggcgaccgtgacagtggctgcgttggcggcctgcctatggggcaacccataggacgctctaatgtggacatggtgcgaagagtctattgagctagttagtagtcctccggcccctgaatgcggctaatcctaactgcggagcacatgccttcaatccagagggtagtgtgtcgtaatgggcaactctgcagcggaaccgactactttgggtgtccgtgtttccttttattctcacattggctgcttatggtgacaattacagaattgttaccatatagctattggattggccatccggtgtgcaatagagctattatatacctatttgttggctttgtaccactaaccttaaaatctgcaaccactctcgagtatatattgacccttaatacaatcaaac

SEQ ID NO: 1145 - DNA, 747 bp, Enterovirus A
  source 1..747: mol_type = genomic DNA
tttaaaacagcctgtgggttgtacccacccacagggcccactgggcgctagcactccgattctgcggaatctttgtgcgcctgttttataaccctcccccgaaacttgcaacttagaagttatgtacgttactgatcaacagcaggcgtggcacaccagccatgtcttgatcaagcacttctgtacccccggactgagtatcaatagactgctcacgtggtcgaaggagaaaacgttcgttatccggctaactacctcgagaaacctagtaacgccattgaaactgcggagtgtttcgctcagcacttcccccgtgtagatcaggtcgatgagtcactgcttaccccacgggcgaccgtggcagtggctgcgttggcggcctgcctatggggcaacccataggacgctctaaagtggacatggtgcgaagagtctattgagctagttagtagtcctccggcccctgaatgcggctaatcctaactgcggagcgcatgccttcaaaccagaaggtggtgcgtcgtaacgggtaactctgcagcggaaccgactactttgggtgtccgtgtttctcttattctcataatggctgcttatggtgacaatcgaggaattgttaccatatagctattggattggccatccggtgtgcaacagagctattatctacttgtttattggatacattccattaacacttaaatccttcaatacattgcactatattctaacactgaacgcaagaaa

SEQ ID NO: 1146 - DNA, 747 bp, Enterovirus A
  source 1..747: mol_type = genomic DNA
tttaaaacagcctgtgggttgtacccacccacagggcccactgggcgccagcactctgattctacggaatctttgtgcgcctgttttacaacccttcccaaaatctgcaacttagaagttatgcacattattgatcaatagcaggcgtggcacaccagtcatgtcttgatcgagcacttctgtatccccggactgagtatcaatagactgctcacgtggtcgaaggagaaaacgttcgttatccggctaactacttcgagaagcctagtaacaccgttgaaactgcggagcgtttcgttcagcacttcccccgtgtagatcaggtcgatgagtcactgcttaccccacgggcgaccgtggcagtggctgcgttggcggcctgcctatggggcaacccataggacgctctaaagtggacatggtgcgaagagcctattgagctagttagtagtcctccggcccctgaatgcggctaatcctaactgcggagcgcatgccctcacgccagagggtggtgcgtcgtaacgggcaactctgcagcggaaccgactactttgggtgtccgtgtttctttttattctcattatggctgcttatggtgacaattaaggaattgttaccatatagctattggattggccatccggtgtgcaacagagctattatctacttatttgttggatacattccattaacacttaaatcccttaacacattgcaatacattctaacactgaacgcaagaaa

SEQ ID NO: 1147 - DNA, 747 bp, Enterovirus A
  source 1..747: mol_type = genomic DNA
ttaaaacagcctgtgggttgtacccacccacagggcccaccgggcgctagcactctgattccacggaatctttgtgcgcctgttttataacccccctccccacctcgcaacttagaagcaacgcgcatcactgatcaacagcaggcatggcgcgccagccatgtcttgatcaagcacttctgtttccccggactgagtatcaatagactgcttacgcggttgaaggagaaaacgttcgttacccggctaactacttcgagaaacttagtaacaccatcgaagctgcagggtgtttcgctcagcacttcccccgtgtagatcaggccgatgagtcaccgcaatccccacgggcgaccgtggcggtggctgcgttggcggcctgcctatggggcaacccataggacgccctaaagtggacatggtgcgaagagtctattgagctagttagtagtcctccggcccctgaatgcggctaatcctaactgcggagcacataccctcaagccagagggtggtgtgtcgtaacgggtaactctgcagcggaaccgactactttgggtgtccgtgtttccttttattcttactgtggctgcttatggtgacaattcaagagttgttaccatatagctattggattggccatccggtgtctaacagagctattgtgtacttatttgttgggtacgttccattatcttacacatcccttgacacattacattttattgtgaagctaaatacaagaag

SEQ ID NO: 1148 - DNA, 747 bp, Enterovirus A
  source 1..747: mol_type = genomic DNA
tttaaaacagcctgtgggttgtacccacccacagggcccactgggcgctagcactctggtactgcggtacctttgtgcgcctgttttatctccccagacccccgcaacgtcacattagaagatagacaatacgaccaatagtcagtggggcaacccagcctcactttggtcaagtacctctgtttccccgggcttagtaccaataggctgcttgcgcggctgaaggggaacgcgcccgttatccggctaactacttcgagaaacctagtaccaccatggaagttgccgagtgtttcgctcagcacaaccccagtgtagatcaggtcgatgagtcaccgtacaccccacgggcgaccgtgacggtggctgcgttggcggcctgcccatggtgcacaccatgggacgctctaatacagacatggtgcgaagagtctattgagctagttagtagtcctccggcccctgaatgcggctaatcctaactgtggagcatgcgctctcaacccagagagtagcgtgtcgtaacgggcaactctgcagcggaaccgactactttgggtgtccgtgtttccttttattcttatattggctgcttatggtgacaattgagagattgttaccatatagctattggattggccatccggtgtgcaatagagctattgtatattcttttgttggctttgtgccattagattatactgcaattgctactttaagatacatcttgtttctgaacacagcaaa

SEQ ID NO: 1149 - DNA, 747 bp, Enterovirus A
  source 1..747: mol_type = genomic DNA
tttaaaacagcctgtgggttgtacccacccacagggcccactgggcgctagcacactggtattacggtacccttgtgcgcctgttttatcctccctggcccccgtaataatgtattagaagtcttgcaacgtgaccaatagctagtaaagcaacccagctttacttgggtcaagtacttctgttaccccggacctagtaccaataggctgctcgcgcggctgaaggggaaaacgttcgttatccggctaactacttcgggaaacccagtaccatcatgaatgttgcggagtgtttcgctcagcactaccccagtgtagatcaggccgatgagtcaccgtacaccccacgggcgaccgtgacggtggctgcgttggcggcctgcccatggcacctgccatgggacgctctaatacggacatggtgtgaagagtctactgagctagttagtagtcctccggcccctgaatgcggctaatcctaactgcggagcacgcgcccccaatccagagggtagcgtgtcgtaatgggcaactctgcagcggaaccgactactttgggtgtccgtgtttccttttattcttacactggctgcttatggtgacaattgagagattgttgccatatagctattggattggccatccggtgagcaatagagcgattatctattcttttgttggatttgtgccattagattacactgccatcatcacactgaagtacattttattgttaaacacaacaaa

SEQ ID NO: 1150 - DNA, 747 bp, Enterovirus A
  source 1..747: mol_type = genomic DNA
ttttaaaacaggctgtgggttgtacccacccgcagggcccactgggcgctagcactctggtaccacggtacctttgtgcgcctgttttatctccccaaaccccgtaacgctacattagaagttaaacaatatgaccgatagtcagtggggcaacccagcctcactttggtcaagcacttctgttctcccgggcttagtaccaataagctgctcgcgcggctgaaggggaacgcgcccgttatccggctaactacttcgagaaacctagtaccaccatggaagttgcagagtgtttcgctcagcactaccccagtgtagatcaggctgatgagtcaccgtgcaccccacgggcgaccgtgacggtgactgcgttggcggcctgcccatggtgtataccatgggacgctctaatacagacatggtgcgaagagtctattgagctagttagtagtcctccggcccctgaatgcggctaatcctaactgcggagcacgcgctctcaacccagagagtagcgtgtcgtaacgggtaactctgcagcggaaccgactactttgggtgtccgtgtttctttttattcttacattggctgcttatggtgacaattgagagattgttaccatatagctattggattggccatccggtgtgtaacagagctatcatatattcttttgttggcttcgtgccactagattatactgcaattgttactttaaggtacatcttacttctgaatacggtaaa

SEQ ID NO: 1151 - DNA, 747 bp, unidentified
  source 1..747: mol_type = unassigned DNA; note = unclassified Enterovirus sequence
tttaaaacagcctgtgggttgtacccacccacagggcccactgggcgttagcacactgattctacggaatctttgtgcgcctgttttatatccctcccctaaaatagtaatttagacgttgaacatttacacgaccaatagtgggcgtggcgcaccagtcacgtcttggtcaagcactcctgttcccccggaccgagtatcaataggctgctcacgtggctgaaggagaaagtgttcgttatccggctaactacttcgggaaacccagtaacaccatgaaagttgcagagtgtttcgttcagcacttcccccgtgtagatcaggctgatgagtcactgcaaaccccacgggcgaccgtggcagtggctgcgttggcggcctgcctatggggtaacccataggacgctctaatacagacatggtgcgaagagtctactgagctagttagtattcctccggcccctgaatgcggctaatcctaactgcggagcacatgccctcaatccagagggtggtgtgtcgtaatgggcaactctgcagcggaaccgactactttgggtgtccgtgtttccttttattcttatactggctgcttatggtgacaattgaaaagttgttaccatatagctattggattggccatccggtgaataacagagctttggtttatcagttcattgggttcgtgcccttatcatctacagcttacacaactttggtgtacttgttatatcttaatagtaagaa

SEQ ID NO: 1152 - DNA, 747 bp, Enterovirus A
  source 1..747: mol_type = genomic DNA
ttaaaacagcctgtgggttgttcccactcacagggcccactgggcgctagcacactgattctccggtacctttgtgtgcttgttttagtatccctcccccaaactcgtaacttagaagaataacacgctatcgatcaatagcaggcatggcgcaccagccatgtctcgatcaagcacttctgtttccccggacagagtatcaatagactactcacgtggttgaaggagaaaacgtccgttatccggctaactacttcgagaaacctagtaacaccattgaagctgcagagcgtttcgttcagcacttaccccgtgtagatcaggtcgatgagtcactgcattccccacgggcgaccgtggcagtggctgcgttggcggcctgcctatggggtcacccataggacgctctaatgtggacatggtgcgaagagtctattgagctagttagtagtcctccggcccctgaatgcggctaatcctaactgcggagcgcataccctcaaaccagggggtagtgcgtcgtaacgggcaactctgcagcggaaccgactactttgggtgtccgtgtttccttttattttcttactggctgcttatggtgacaattgaagaattgttgccatatagctattggattggccatccggtgtgtaacagagcaatcatctatttgtttgccgggtacatcccattaacgctcaactcttttagtacattacagtatatactaatcctgaatacaagaaa

SEQ ID NO: 1153 - DNA, 747 bp, Enterovirus A
  source 1..747: mol_type = genomic DNA
ttaaaacagcctgtgggttgttcccacccacagggcccactgggcgctagcactctggttctccggaacctttgtgcgcctgttttgaaaccccctcccccaactcgaaacgtagaagtaatgtacactactgatcagtagcaggcgtggcgcaccagccatgtctcgatcaagcacttctgtttccccggactgagtatcaatagactgctcacgcggttgaaggtgaaaacgtccgttacccggctaactacttcgagaaacctagtagcaccatagaaactgcagagtgtttcgctcagcacttcccccgtgtagatcaggtcgatgagtcactgcaatccccacgggtgaccgtggcagtggctgcgttggcggcctgcctatggggcaacccataggacgctctaaggtggacatggtgtgaagagtctattgagctagttagtagtcctccggcccctgaatgcggctaatcctaactgtggagcgcatactcccaaaccagggagcagtgcgtcgtaacgggcaactccgcagcggaaccgactactttgggtgtccgtgtttccttttattcctatactggctgcttatggtgacaattgagagattgttaccatatagctattggattggccatccagtgtgtaatagagcaatcatttaccaatttgttggatttactccattaacccacacgtctctcaacacactacatttcatcttactactgaacactagaaa

SEQ ID NO: 1154 - DNA, 747 bp, Enterovirus C
  source 1..747: mol_type = genomic DNA
ttaaaacagctctggggttgttcccaccccagaggcccacgtggcggccagtacaccggtattacggtacccttgtacgcctgttttatactccctacccctgcaacttagaagcaaataatccaagttcaatagtagggggtacaaaccagtaccaccacgaacaagcacttctgtttccccggtgatgttgtatagactgtacccacggttgaaaacaattgatccgttacccgctcttgtacttcgagaagcctagtatcatcttggaaccttcgatgcgttgcgctcagcactcaaccccagagtgtagcttgggtcgatgagtctggacaatccacaccggcgacggtggtccaggctgcgttggcggcctacctgtggcccaaagccacaggacgctagttgtgaacaaggtgtgaagagcctattgagctacaagagagtcctccggcccctgaatgcggctaatcccaaccacggagcaggtgatcacaacccagtgattagcctgtcgtaatgcgtaagtctgtggcggaaccgactactttgggtgaccgtgtttccttttatttttattgtggctgcttatggtgacaatcttagattgttatcataaagcgatttggattggccatccggtgaaagttaaacacattatttacttgtttgttggattcactccgttgtcctctcgcactacgtatattattaacgctgtgctattaattaggtcaatacatcaca

SEQ ID NO: 1155 - DNA, 747 bp, Enterovirus C
  source 1..747: mol_type = genomic DNA
ttaaaacagcctgtgggttgttcccaccccagaggcccacgtggcggccagtacaccggtattacggtacccttgtacgcctgttttatacttccttcccccgtaacttagaagtttacaaaccaagttcaatagaagggggtacaaaccagtaccaccacgaacaagcacttctgtttccccggtgagtttgcatagactgtatccacggttgaaagtgaacgatccgttacccgctcttgtacttcgagaagcctagtaaccccttggaatcttcgatgcgttgcgctcagcactcaaacccagagtgtagcttaggtcgatgagtctggacactcctcaccggtgacggtggtccaggctgcgttggcggcctacctgtggtccaaagccacaggacgctagttgtgaacaaggtgtgaagagcctattgagctacttgagagtcctccggcccctgaatgcggctaatcctaaccatggatcaggtggtcacaatccagtgactggcctgtcgtaatgcgcaagtccgtggcggaaccgactactttgggtgtccgtgtttccttttattcttataatggctgcttatggtgacaatcatagattgttatcatatagcgaattggattggccatccggtgtgaacaaaacacttgattcacttgttggttgaatttgtttcattaattgaacacataccagagctcatttgattggcatttttgcttagacaattgtaccaca

SEQ ID NO: 1156 - DNA, 747 bp, Enterovirus C
  source 1..747: mol_type = genomic DNA
ttaaaacagctctggggttgttcccaccccagaggcccacgtggcggctagtacaccggtatcacggtacccttgtacgcctgttttatactcccttcccccagtaacttagaagtaataaaccaagttcaatagaagggggtacaaaccagtaccaccatgaacaagcacttctgttcccccggtgaggttgtatagactgtgcccacggttgaaagcgaccgatccgttatccgctcttgtacttcgagaagcctagtatcaccttggaatcttcgatgcattgcgttcagcacttgatcccggagtgtagcttaggccgatgagtctggacgttccccaccggtgacggtggtccaggctgcgttggcggcctacctgtggtccaaagccacaggacgctagttgtgaacaaggtgtgaagagcctattgagctacatgagagtcctccggcccctgaatgcggctaatcccaaccacggagcagatggttgcaatccagcggctagtctgtcgtaacgcgcaagtctgtggcggaaccgactactttgggtgtccgtgtttccttttatctttataatggctgcttatggtgacaatcattgattgttgccataaagcgacttggattggccatccggtgaaaatcagatcgattatctacttgtttattggattcacacccttatctatatacacgctaagtttgatcagagtcaccttgttaattagatattattaccacg

SEQ ID NO: 1157 - DNA, 747 bp, Enterovirus C
  source 1..747: mol_type = genomic DNA
ttaaaacagctctggggttgttcccaccccagaggcccacgtggcggctagtactccggtatcacggtacccttgtacgcctgttttatactccctacccctgcaacttagaagctagtaactcaagttcaatagtagggggtacaaaccagtaccaccacgaacaagcacttctgtttccccggtgatgccgtatagactgtgcccacggttgaaaacgactgacccgttatccgctcttatacttcgagaagcctagtatcatcttggaatcttcgatgcgttgcgctcagcactcaaccctagagtgtagcttaggtcgatgagtctggacattcctcaccggcgacggtggtccaggctgcgttggcggcctacctgtggcccaaagccacaggacgctagttgtgaacaaggtgtgaagagcctattgagctacaagagagtcctccggcccctgaatgcggctaatcccaaccacggagcaagtgatcacgaaccagtgattggcttgtcgtaacgcgcaagtctgtggcggaacccgactactttgggtgtccgtgtttcctttatttcatatatggctgcttatggtgacaattatagattgtcatcatagagcgaattggattggccatccggtgaaagttagacatattgtttacctatttgttggctttacatccttcaacctccacaccccgtattttgttaaggttgtgttgtcgatcagatcactataccaca

SEQ ID NO: 1158 - DNA, 747 bp, Enterovirus C
  source 1..747: mol_type = genomic DNA
ttaaaacagcctgtgggttgttcccaccccagaggcccacgtggcggccagtactccggtatcacggtacccttgtacgcctgttttatacccccttccccgtaacttagaagtaaacaaaaccaagttcaatagaaggcggtacaaaccagtgccaccatgaacaagcacttctgtttccccggtgatgttgtatagactgtttccacggttgaaagcgactgatccgttatccgctcaagtacttcgggaagcctagtatcatcttggaatcttcgatgcgttgcgttcagcactcaacccccgagtgtagcttaggtcgatgagtctggacattcctcaccggtgacggtggtccaggctgcgttggcggcctacctgtggcccaaaaccacaggacgctagttgtgaacaaggtgtgaagagcctactgagctacttgagagtcctccggcccctgaatgcggctaatcctaaccacggatcaggtgattgcaaaccagcagttggcctgtcgtaacgcgcaagtctgtggcggaaccgactactttgggtgtccgtgtttccttttatttttccattggctgcttatggtgacaatcgtagattgttgtcataaagcgaattggattggccatccggtgaaagtcaagtacattatttatttatttgtgggttttactcctataacagcaaatacccttcatcttatcaccatcacactactgattagatatcactaccaca

SEQ ID NO: 1159 - DNA, 747 bp, Enterovirus C
  source 1..747: mol_type = genomic DNA
ttaaaacagctctggggttgttcccaccccagaggcccacgtggcggccagtacactggtattacggtacctttgtacgcctgttttatgctcccttcccctgcaacttagaagattacaaaccaagttcaatagaagggggtgcaaaccagtaccaccacgaacaagcacttctgtttccccggtgaacttgtatagactgtacccacggtcgaaaacgagtgatccgttatccgctcttgtacttcgagaagcccagtaccttcttgggatcattgatgcgttgcgctcagcactcgaccccggagtgtagcttaggctgatgagtctggacatccctcaccggcgacggtggtccaggctgcgttggcggcctacctgtggtccaaagccacaggacgctaaatgtgaacaaggtgtgaagagcctattgagctacatgagagtcctccggcccctgaatgcggctaatcctaaccacggagcaggtggttgcaaaccagcaattggcctgtcgtaatgcgtaagtctgtggcggaaccgactactttgggtgtccgtgtttctctttatttttacaatggctgcttatggtgacaatcttagattgttgtcataaagcgaattggattggccatccggtgaagataaagcatatcatttatctatttattggattcactccattaaactcttggacttatcatttaatacaagtagtgttattgataagaagtgttcaccaca

SEQ ID NO: 1160 - DNA, 747 bp, Enterovirus C
  source 1..747: mol_type = genomic DNA
ttaaaacagcctgtgggttgttcccaccccagaggcccacgtggcggctagtactccggtattacggtacccttgtacgcctgttttatacccccttcccccagaaacttagacgctatgaaaccaagttcaataggagggggcacgaaccagtgtcaccacgaacaagcacttctgtttccccggtgattttacataagctgtacccacggctgaaagtgaatgatccgttatccgcttgggtacttcgagaagcctagtaccacctttggatcttcgatgcgttgcgctcagcactctaccccgagtgtagcttaggtcgatgagtctgggcataccccaccggtgacggtggcccaggctgcgttggcggcctacccatggttaacaccatgggacgctagttgtgaacaaggtgtgaagagcctattgagctactcaagagtcctccggcccctgaatgcggctaatcctaaccatggagcaggtgctttcaatccagaaagtggcctgtcgtaatgcgtaagtccgtggcggaaccgactactttgggtgtccgtgtttccttttttacttttgtatggctgtttatggtgacaatcatagattgttatcataaagcgaattggattggccatccggtaaaaattaaacacatcatttatctatttgttggattcgctccaatcacttctaaaacacttcagttgatacgtgtagtattaataatcaggctattgtatcaca

SEQ ID NO: 1161 - DNA, 747 bp, Enterovirus C
  source 1..747: mol_type = genomic DNA
ttaaaacagcctgtgggttgttcccaccccagaggcccacgtggcggctagtacaccggtatcacggtacccttgtacgcctgttttatactcccttcccccgtaacttagaagtataacaaccaagttcaatagaagggggtacaaaccagtaccaccacgaacaagcacctctgtttccccggtgaacttgcatagactgtgcccacggttgaaagcgagcgatccgttacccgctcttgtacttcgagaagcctagtattatcttggaatcattgatgcgttgcgctcagcactcaaccccagagtgtagcttaggtcgatgagtctggacactcctcaccggtgacggtggtccaggctgcgttggcggcctacctgtggcccatggtcacaggacgctaaatgtgaacaaggtgtgaagagcctattgagctacatgagagtcctccggcccctgaatgcggttaatcctaaccacggagcaggcggttacaaaccagtaactagcctgtcgtaatgcgcaagtctgtggcggaaccgactactttgggtgaccgtgtttccttttatttttacaatggctgcttatggtgacaatctcagattgttatcataaagcgagttggattggccatccggtaaagataaagtgtattatctatctatttgttggatttactccgttaaataccagaacatatcacttgatacaagcggtattactaattaggaacttctatcaca

SEQ ID NO: 1162 - DNA, 747 bp, Enterovirus C
  source 1..747: mol_type = genomic DNA
ttaaaacagctctggggttgttcccaccccagaggcccacgtggcggctagtactccggtattgcggtacccttgtacgcctgttttatactcccttcccccgtaacttagaagcaatcaaacaaagttcaatagaagggggtacaaaccagtaccaccacgaacaagcacttctgtttccccggtgaagttgtatagactgtacccacggttaaaagcaattgatccgttacccgctcttgtacttcgagaagcctagtactaccttggaatcttcgatgcgttgcgctcaacactcaaccccagagtgtagcttgggctgatgagtctggacgttccccaccggcgacggtggtccaggctgcgttggcggcctacctgtggcccaaagccacaggacgctagttgtgaacaaggtgcgaagagcctattgagctacaagagagtcctccggcccctgaatgcggctaatcccaaccacggagcaggtagttgcaagccagcaatcgacctgtcgtaacgcgtaagtctgtggcggaaccgactactttgggtgtccgtgtttccttttaattttaaactggctgcttatggtgacaatcattgattgttatcataaagcgaattggattggccatccggtgagaatcagatccattatctacttgttcattggatttactccattgacaacatacacatacgaccttattagagtcaatttactattgagacatctccaccata

SEQ ID NO: 1163 - DNA, 747 bp, Enterovirus C
  source 1..747: mol_type = genomic DNA
ttaaaacagctctggggttgttcccaccccagaggcccacgtggcggccagtacactggtatcacggtacccttgtacgcctgttttatactcccttcccccgtaacttagaagccataaatccaagttcaacagaagggggcacaaaccagtgccaccacgaacaagcacttctgtctccccggtgaagttgcatagactgtaaccacggttaaaagcgattgatccgttatccgctcatgtacttcgagaagcctagtaccaccttggaaccttcgacgcgttgcgctcagcactcaaacccagagtgtagcttaggccgatgagtctggacgttccccaccggcgacggtggtccaggctgcgttggcggcctacctgtggctcaaagccacaggacgctagttgcgaacagggtgtgaagagcctattgagctacatgagattcctccggcccctgaatgcggctaatcctaaccgcggagcaggtagttgcaagccagcaactggcctgtcgtaacgcgtaagtctgcggcggaaccgactactttgggtgtccgtgtttcctttatttcttataatggctgcttatggtgacaatcatagattgttatcataaagcgaattggattggccatccagtgaaagtcagactgattatccttctgtttgttgggtttgttccactcaattcacacactttgcacttaatcagaattgtcttattgacacgacaatatcatcact

SEQ ID NO: 1164 - DNA, 747 bp, Enterovirus C
  source 1..747: mol_type = genomic DNA
ttaaaacagctctggggttgttcccaccccagaggcccacgtggtggccagtactctggtattacggtacctttgtacgcctgttttatactcccttcccctgtaacttagaagcaatctaacctagttcaataggagggggtacaaaccagtaccactacgaacaagcacttctgttaccccggtgaagttgtatagactgtgcccacggtcgaaaatgactgatccgttatccgctcatgtacttcgggaagcctagtaccatcttcggatcttcgatgcgttgcgctcagcactcgaccccagagtgtagcttaggtcgatgagtctggacaatcctcactggcgacagtggtccaggctgcgttggcggcctacctgtggtccaaagccacaggacgctagttgtgaacaaggtgtgaagagcctactgagctacttgagagtcctccggcccctgaatgcggctaatcccaaccacggagcaagtagttgcaaaccagcaaccagcttgtcgtaacgcgtaagtctgtggcggaaccgactactttgggtgtccgtgtttccttttatttttacactggctgcttatggtgacaatcatagattgttatcataaggcgaattggattggccacccggtgtaagtcagatcaattgtctactcgtttgttggatatactccaataacgcactacactcttgagcttaacagagttgttctgctggcgagaagttgctatcgca

SEQ ID NO: 1165 - DNA, 747 bp, Enterovirus C
  source 1..747: mol_type = genomic DNA
acagtaaaacagctctggggttgttcccaccccagaggcccacgtggcggctagtactctggtatcgcggtacctttgtacgcctgttttatacccctaccccatgtaactttagaagcagttcaacaagttcaatagggggggtgcaaaccagcaccaccacgaacaagcacttctgtaaccccggtgaccttgtataagctgtacccacggctgaaagcgagtgatccgttatccgcttaagtacttcgagaagcctagtatcaccttagaatcttcgatgcgttgcgctcagcactctatcccgagtgtagcttaggctgatgagtctgggcgttcctcaccggcgacggtggcccaggctgcgttggcggcctacccatggctaacgccatgggacgctagatgtgaacaaggtgtgaagagcctattgagctacttaagagtcctccggcccctgaatgcggctaatcccaaccacggagcaggtgccttcaacccagagggtggcctgtcgtaacgcgcaagtctgtggcggaaccgactactttgggtgtccgtgtttccttttatcttttatatggctgcttatggtgacaatcatagattgttatcataaagcgacttggattggccatccggtaaaatacaaacacatcatttacttgtttgttggatttactccactctcccaatttactcctagcataatatccattgttttgttaacaagacattactatcaca

SEQ ID NO: 1166 - DNA, 747 bp, Enterovirus C
  source 1..747: mol_type = genomic DNA
ttaaaacagctctggggttgttcccaccccagaggcccacgtggcggccagtacactggtattgcggtacctttgtacgcctgttttatactcccttcccccgtaacttagaagcacaatgtccaagttcaataggagggggtacaaaccagtaccaccacgaacaagcacttctgttcccccggtgaggctgtataggctgtttccacggctaaaagcggctgatccgttatccgctcatgtacttcgagaagcctagtatcaccttggaatcttcgatgcgttgcgctcaacactcaaccccagagtgtagcttaggtcgatgagtctggacgttcctcaccggcgacggtggtccaggctgcgttggcggcctacctgtggcccaaagccacaggacgctagttgtgaacaaggtgtgaagagcctattgagctacctgagagtcctccggcccctgaatgcggctaatcctaaccacggagcaggcagtggcaatccagcgaccagcctgtcgtaacgcgcaagttcgtggcggaaccgactactttgggtgtccgtgtttccttttatttttacaatggctgcttatggtgacaatcattgattgttatcataaagcaaattggattggccatccggtgagaatttgattattaaattactctcttgttgggattgctcctttgaaatcttgtgcactcacacctattggaattacctcattgttaagatatcatcaccact

SEQ ID NO: 1167 - DNA, 747 bp, Enterovirus C
  source 1..747: mol_type = genomic DNA
ttaaaacagcctgtgggttgttcccaccccagaggcccacgtggcggctagtactctggtacccggtacccttgtacgcctgttttatatcccccttcccatgtaactttagaagcaattcactaagttcaacagggggggtgcaaaccagtaccaccacgaacaagcacttctgtttccccggtgatttcacataagctgtgcccacggccgaaagtggatgatccgttacccgcttgggtacttcgagaagcctagtatcaccttggaatcttcgacgcgttgcgttcagcgctctaacccgagtgtagcttaggctgatgagtctgggcgatccccaccggtgacggtggcccaggctgcgttggcggcctacccatggttaacgccatgggacgctagttttgaacaaggtgtgaagagcctattgagctactcaagagtcctccggcccctgaatgcggctaatcccaaccacggagcaagtgtcctcaaaccagagggtggcttgtcgtaacgcgcaagtctgtggcggaaccgactactttgggtgaccgtgtttccttttatttcatatttggctgcttatggtgacaatcacggattgttatcataaagcgaattggattggccatccggtgaaatacaagcacattatttacctttttgtcggattcattccaatagaatattcttcgccaaagttgatccaaataatcttagtgattagaagttattatttcagca

SEQ ID NO: 1168 - DNA, 747 bp, Enterovirus C
  source 1..747: mol_type = genomic DNA
ttaaaacagctctggggttgttcccaccccagaggcccacgtggcggccagtactccggtattacggtacccttgtacgcctgttttatactcccttcccctgtaacttagaagcatacaaaccaagttcaatagaagggggtacaaaccagtaccaccacgaacaagcactcctgtttccccggtgacattgcatagactgtacccacggttgaaagcgatcgatccgttacccgctcctgtacttcgagaagcctagtatcatcttggaatcttcgatgcgttgcgctcagcactcaaccccagagtgtagcttaggctgatgagtctggacgtcccccaccggcgacggtggtccaggctgcgttggcggcctacctgtggcccaaagccacaggacgctagttgtgaacaaggtgtgaagagcctattgagctacaagagagtcctccggcccctgaatgcggctaatcctaaccacggagcaggcagttgcaaaccagcaaccggcctgtcgtaacgcgcaagtctgtggcggaaccgactactttgggtgtccgtgtttccttttatttttacaatggctgcttatggtgacaatcatagattgttatcataaagcgacttggattggccatccggtgaaagtaaaacacattgtttacttgtttgttggattcactccaattaacacttttacttacaaactcattacaacaactctattaattagagataagcatcaca

SEQ ID NO: 1169 - DNA, 747 bp, Enterovirus C
  source 1..747: mol_type = genomic DNA
ttaaaacagctctggggttgttcccaccccagaggcccacgtggcggctagtacactggtattacggtacccttgtacgcctgttttatactcccttccccgtaacttagaagctatgtaatccaagttcaatagaagggggtacaaaccagtaccaccacgaacgagcacttctgtttccccggtgagattgtataagctgttcccacggccgaaaacgatcgatccgttacccgctcttgcacttcgagaagcctagtatcatcttgggatcttcgatgcgttgcgctcagcactctaccccagagtgtagcttaggtcgatgagtctggacattcctcaccggcgacggtggtccaggctgcgttggcggcctacctgtggtccaaagccacaggacgctagttgtaaacaaggtgtgaagagcctattgagctgcaagagagtcctccggcccctgaatgcggctaatcccaaccacggagcaggtggttgcaacccagtaactggcctgtcgtaacgcgtaagtctgtggcggaaccgactactttgggtgtccgtgtttccttttatttctataatggctgcttatggtgacaatcatagattgttatcataaagcgaattggattggccatccggtgagagttaagacaattatccacttgtttgttggatttacccctctgactaattacacactcaactttattaggattgtcattctagtgagatattaccatcaca

SEQ ID NO: 1170 - DNA, 747 bp, Enterovirus C
  source 1..747: mol_type = genomic DNA
ttaaaacagctctggggatgtacccaccccagaggcccacgtggcggctagcactccggtatcacggtacccttgtgcgcctgttttatactcccttcccgtaacttagaagcacgaaaccaagttcaatagaagggggtacaaaccagtaccaccacgaacaagcacttctgtttccccggtgatgttgcatagactgctcacgcggttgaaagcgactgatccgttatccgcttgtgtacttcgagaagcctagtatcaccttggaatcttcgtcgcgttgcgctcggcacccgaccccggggtgtggcttaggctgatgagtctggacattcctcaccggtgacggtggtctaggctgcgttggcggcctacctatggctaacgccataggacgctagatgtgaacaaggtgtgaagagcctattgagctacgcaagagtcctccggcccctgaatgcggctaatcccaaccacggagcaagcgatcgcaaaccagcgattggcttgtcgtaacgcgtaagtctgtggcggaaccgactactttgggtgtccgtgtttcctgttatttttatcatggctgcttatggtgacaatctgagattgttatcataaagcgaattggattggccatccggtgagtactgtctcaggtatactgctgcttaacggaaccgctaagttattcctactcctcatttagccaactcttccagaataatacgagggtaaaataacaatactata

SEQ ID NO: 1171 - DNA, 747 bp, Enterovirus C
  source 1..747: mol_type = genomic DNA
ttaaaacagctctggggttgttcccaccccagaggcccacgtggcggctagtactccggtatcacggtacccttgtacgcctgttttacactcccttcccccgtaacttagaagaaacaaacaaagttcaatagaagggggtacaaaccagtaccaccacgaacaagcacttctgtttccccggtgacgttgtatagactgtacccacggtcgaaaacgattgatccgttatccgcttttgtacttcgagaagcctagtatcatcttggaatcttcgatgcgttgcgctcagcactcaatcccagagtgtagcttaggtcgatgagtctggacgttcctcaccggcgacggtggtccaggctgcgttggcggcctacctgtggcccaaagccacaggacgctagttgtgaacaaggtgtgaagagcctattgagctacaagagagtcctccggcccctgaatgcggctaatcctaaccacggagcaagggtgtgtgagccaacacataccttgtcgtaatgcgtaagttcgtggcggaaccgactactttgggtgtccgtgtttccttttattcttgtattggctgcttatggtgacaatcatagattgttatcataaagcgacttggattggccatccagtggaagtgaaataccttgtctacctgtctgttggttttactccatttgactaattcacttacaagcttattgctataatttttattgactaaacaacaatactaca

SEQ ID NO: 1172 - DNA, 747 bp, Enterovirus C
  source 1..747: mol_type = genomic DNA
ttaaaacagctctggggttgttcccaccccagaggcccacgtggcggctagtactctggtatcgcggtacctttgtacgcctgttttatactccccttccctgtaacttagaagcaaacaagccaagttcaatagaagggggtacaaaccagtaccaccacgaacaagcacttctgttaccccggtgaagttgtataaactgtccccacggttgaaaacgactgatccgttacccgcttttgtacttcgagaagcctagtaccatcttggaatcttcgatgcgttgcgctccgcactcaatcccagagtgtagcttaggtcgatgagtctggacagtcctcaccggcgacggtggtccaggctgcgttggcggcctacctgtggcccaaagccacaggacgctagttgtgaacaaggtgtgaagagcctattgagctacaaaagagtcctccggcccctgaatgcggctaatcctaaccatggagcaggtggttacaaaccagtaattgacctgtcgtaacgcgtaagtccgtggcggaaccgactactttgggtgtccgtgtttccttttatttttaatgcggctgcttatggtgacaatcattgattgttatcataaagcgaattggattggccatccggtgtgaataaaacttattgtctacttgtttgttggatacactccactaaacgcattcacccctagcattatttctatagtgatcaaaatcagacaattacattaca

SEQ ID NO: 1173 - DNA, 747 bp, Enterovirus C
  source 1..747: mol_type = genomic DNA
ttaaaacagctctggggttgttcccaccccagaggcccacgtggcggctagcactctggtatcacggtacccttgtgcgcctgttttacaccccctccctgcaatttagaagcacaaaactaagttcaatagaagggggtacaaaccagtaccaccacgaacaagcacttctgtttccccggtgacattacatagactgctcacgcggttgaaagtgatcgatccgttacccgcttgtgtacttcgagaagcctagtatcactttgggatcttcgacgcgttgcgcccagcactcaaacccagggtgtagcttaggccgatgagtctggacgctcctcaccggcgacggtggtccaggctgcgttggcggcctacctatggctgacgccataggacgctagatgtgaacaaggtgtgaagagcctattgagctacgcaagagtcctccggcccctgaatgcggctaatcccaaccacggagcaggcggtcacaaaccagtgactggcttgtcgtaacgcgcaagtctgtggcggaaccgactactttgggtgtccgtgtttcctgttatctttattatggctgcttatggtgacaatcagagattgttaccataaagcgaattggattggccatccggtgtgtattgcattggatatacaactgtttactaaaattactgtgttatctctactttccatttaactggttaatcaggaacgatacgagaataaaacaacaacatcacg

SEQ ID NO: 1174 - DNA, 747 bp, Enterovirus B
  source 1..747: mol_type = genomic DNA
tttttaaaacagccctgtgggttgttcccacccacggggcccattgggcgctagcacactggtatcacggtacccttgtgcgcctgttttatccaccccctccccaatgtaacatagaagcacaaactaagtggtcaatagacggctcagtgcaccaactgggtttagaccaagcacttctgttaccccggactgagtatcaataggctgctcacgcggctgaaggagaaaacgttcgttacccggccaactacttcgagaagcccagtaccaccatgaaggttgcgcagtgtttcgttcagcacaaccccagtgtagatcaggtcgatgagtcaccgcaatccccacgggcgaccgtggcggtggctgcgctggcggcctgcccatggggtgacccatgggacgcttcaattccgacatggtgcgaagagcctattgagctagttggtagtcctccggcccctgaatgcggctaatcccaactgcggagcaagcacccacaaaccagtgggctgtttgtcgtaacgggcaactctgcagcggaaccgactactttgggtgtccgtgtttccttttattcctacactggctgcttatggtgacaattgaaagattgttgccatatagctattggattggccatccggtaacaaacagagctattattcacttatttgttggctttgtgccgttgaatttcaaagttataaaaaccataacctccatcttgacactcaacacagcaaa

SEQ ID NO: 1175 - DNA, 748 bp, Enterovirus A
  source 1..748: mol_type = genomic DNA
ttaaaacagcctgtgggttgcacccactcacagggcccacgtggcgctagcactctggttctacggaacctttgtgcgcctgttttacgccccttcccccaatttgcaacttagaagcaatacacaacactggtcaacagtaggcatggcgcaccagccatgtcttgatcaagcacttctgtttccccggaccgagtatcaatagactgctcacgcggttgaaggagaaagcgtccgttatccggctaactacttcgagaaacttagtaacaccattgaagctgcagagtgtttcgctcggcacttcccccgtgtagatcaggtcgatgagtcactgcaatccccacgggtgaccgtggcagtggctgcgctggcggcctgcctatggggtaacccataggacgctctaatgcggacatggtgcgaagagtctattgagctagttagtggtcctccggcccctgaatgcggctaatcctaactgcggagcacatgccttcaatccagagggtagtgtgtcgtaatgggcaactctgcagcggaaccgactactttgggtgtccgtgtttccttttattcttatattggctgcttatggtgacaattacagaattgttaccatatagctattggattggccatccggtgtgcaatagagctattatatacctatttgttggctttgtgccactaaccttaaaatctataaccaccctcgactttatactaaccctcaatacagtcaaac

SEQ ID NO: 1176 - DNA, 748 bp, Enterovirus A
  source 1..748: mol_type = genomic DNA
tttaaaaccaagctgtgggttgtacccactcacagggcccactgggcgctagcactctgattccgcggaatctttgtgcgcctgttttataacccctcccccgatttgtaatttagaagtaatgcacaccactgatcaacagcaagcgtggcgcgccagccatgttcagatcaaatacttctgttttcccggactgagtatcaatagactgctcacgcggttgaaggagaaaacgttcgttacccggctaactacttcgagaaacctagtagcaccatcgaaactgcagagtgtttcgctcagcactttccccgtgtagatcaggtcgatgagtcactgcaatccccacgggcgaccgtggcagtggctgcgttggcggcctgcctatgggcttgcccataggacgctctaatgtggacatggtgtgaagagtctattgagctagttggtagtcctccggcccctgaatgcggctaatcctaactgcagagcgcataccctcaatccagggggtggtgcgtcgtaacgggcaactctgcagcggaaccgactactttgggtgtccgtgtttccttttattcttatattggctgcttatggtgacaattgagagattgttgccatatagctattggattggccatccagtgtctaacagagcaattgtatacttgtttgttggattcgttccactgtcatatacatccactaacaccttatactatattacaaaattgaacacaagaaa

SEQ ID NO: 1177 - DNA, 748 bp, Enterovirus A
  source 1..748: mol_type = genomic DNA
tttaaaacagctctagggttgttcccaccctagaggcccaagtggcggctagcactctggtattacggtacctttgtgcgcctgttttatatcccttcccccatgtaacttagaagatattaaacaaagttcaataggagggggtacaaaccagtgccaccacgaacaaacacttctgtttccccggtgaagctacatagactgttcccacggttgaaagtggcagatccgttatccgctttggtacttcgagaaacctagtaccaccttggaatcttcgatgcgttgcgctcagcactcaaccccagagtgtagcttaggtcgatgagtctggacgatcctcactggcgacagtggtccaggctgcgttggcggcctacctgtggcgaaagccacaggacgctagttgtgaacaaggtgtgaagagtctattgagctaccaaagagtcctccggcccctgaatgcggctaatcccaaccacggagcaagtgcccacaaaccagtgggtggcttgtcgtaatgcgtaagtctgtggcggaaccgactactttgggtgtccgtgtttccttttatttttatcatggctgcttatggtgacaatctaagattgttatcatatagctattggattggccatccggtgactaacagagatcttgcatacctgtttgttggttttactaaactagatatagttacatttaaaactcttctttatatcatacagttgaatagtagaaagagaaa

SEQ ID NO: 1178 - DNA, 748 bp, Enterovirus A
  source 1..748: mol_type = genomic DNA
ttaaaacagcctgtgggttgcacccacccacagggcccactgggcgctagcaccctgattctgcggaatctttgtgcgcctgttttacaacccttcccccgatttgtaatttagaagcaacgaacctcaccgatcaatagtaggcgtggcgcgccagctacgtcttgatcaagcacttctgtttccccgggctgagtatcaatagactgcttgcgcggtcgaaggagaaaacgctcgttatccggctaactacttcgagaaacccagtaacaccattgaaactgcagagtgtttcgctcagcacttcccccgtgtagatcaggtcgatgagtcactgcaatccccacgggcgaccgtggcagtggctgcgttggcggcctgcctatggggcaacccataggacgctctaaggtggacatggtgtgaagagtctattgagctagttagtagtcctccggcccctgaatgcggctaatcctaactgcggagcgcatgccctcaaaccagagggtggtgcgtcgtaatgggcaactctgcagcggaaccgactactttgggtgtccgtgtttccttttattctcttaatggctgcttatggtgacaattaaggaattgttaccatatagctattggattggccatccggtgtgtagtagagctattatttatctatttgttggttttgtaccattaaacttaaggtctgtcaccactttacaatatatactgatcctcaatacggttaagc

SEQ ID NO: 1179 - DNA, 748 bp, Enterovirus A
  source 1..748: mol_type = genomic DNA
gcgcccagtgggccctgtgggttgcacccacccacagggcccactgggcgctagcactctggcactaaggtacctttgtgcgcctgttttatttcccttcccccaaagtaatttagaagttatgcaccaacgatcaatagcaggtgtgacacaccagtcatatcttgatcaagtactcctgtttccccggaccgagtatcaataagctgctcgcgcggctgaaggagaaaacgttcgttacccgaccaactacttcgagaagcttagtaccaccatgaacgaggcagagtgtttcgttcagcacaaccccagtgtagatcaggctgatgagtcactgcaaaccccatgggcgaccatggcagtggctgcgttggcggcctgcccatggagaaatccatgggacgctctaattctgacatggtgtgaagagcctattgagctagttggtagtcctccggcccctgaatgcggctaatcctaactgcggagcacatgctcacaaaccagtgggtggtgtgtcgtaatgggtaactctgcagcggaaccgactactttgggtgtccgtgtttccttttattcttatgttggctgcttatggtgacaatcaaagaattgttaccatatagctattggattggccatccggtgtgcaacagagcaattgtttacctatttgttggttttgtaccactatcactgaagtctgtgatcactctcaaattcattctgaccctcaactcaatcaaac

SEQ ID NO: 1180 - DNA, 748 bp, Enterovirus C
  source 1..748: mol_type = genomic DNA
ttaaaacagctctggggttgttcccaccccagaggcccacgtggcggccagtacaccggtatcacggtacccttgtacgcctgttttatactccctttcccccgtaacttagaagcaataaaaccaagttcaatagaaagggggtacaaaccagtaccaccacgaacaagcacttctgtttccccggtgatgttgtatagactgtttccacggttgaaaacgactgatccgttatccgctcttgtacttcgagaagcctagtatcatcttgggatcttcgatgcgttgcgctcaacactcgaccccggagtgtagcttaggccgatgagtctggacgttccccaccggcgacggtggtccaggctgcgttggcggcctacctgtggtccaaagccacaggacgctagttgtgaacaaggtgtgaagagcctattgagctacttgagagtcctccggcccctgaatgcggctaatcccaaccacggagcaggtggttgcaatccagcaactagcctgtcgtaacgcgcaagtctgtggcggaaccgactactttgggtgtccgtgtttccttttatttttcattggctgcttatggtgacaatctcagattgttatcataaagcgagttggattggccatccggtgaaaatcagatcgattatttacctttttgttggatttacacctttaacattacacactttgaaactcattgaaattgtactgttgatacggtattactatcaca

SEQ ID NO: 1181 - DNA, 748 bp, unidentified
  source 1..748: mol_type = unassigned DNA; note = Human coxsackievirus A13 isolate CV-A13_67001, complete genome.1 sequence
ttaaaacagctctggggttgttcccaccccagaggcccacgtggcggccagtacaccggtatcgcggtacccttgtacgcctgttttatactccctttccccgtaacttagaagcaatgaaaccaagttcaatagaaagggggtacaaaccagtaccaccacgaacaagcacttctgtctccccggtgaggtcgtatagactgttcccacggttgaaaatgactgatccgttatccgctcttgtacttcgagaagcctagtaccaccttggaatcttcgatgcgttgcgctcagcactcaaccccggagtgtagcttgggctgatgagtctggacattccccaccggcgacggtggtccaggctgcgttggcggcctacctgtggcccaaagccacaggacgctagttgtgaacaaggtgtgaagagcctattgagctacatgagagtcctccggcccctgaatgcggctaatcccaaccacggagcaggcgattgcaatccagcaattagcctgtcgtaacgcgtaagtctgtggcggaaccgactactttgggtgaccgtgtttccttttattcttacattggctgcttatggtgacaatcatagattgttatcataaagcgagttggattggccatccagtgagaattagatcgatcatctacctttttgttggatttacacctttaaaaccacacagcttgaatctcatcaaaattgtattgttgatacgacattattatcatt

SEQ ID NO: 1182 - DNA, 748 bp, Enterovirus C
  source 1..748: mol_type = genomic DNA
ttaaaacagctctggggttgttcccaccccagaggcccacgtggcggccagtacaccggtatcgcggtacccttgtacgcctgttttatactcccttccccccgtaacttagaagcatataacacaagttcaatagaagggggtgcaaaccagcaccaccacgaacaagcacttctgtttccccggtgagatcacatagattgttcccacggtcgaaagtgatcagtccgttatccgctcttgtacttcgagaagcctagtaccttcttggaatcttcgatgcgttgcgctcagcactcaaacccagagtgtagcttaggccgatgagtctggacattccccaccggtgacggtggtccaggctgcgttggcggcctacctgtgacccaaagtcacaggacgctagttgtgaacaaggtgagaagagcctattgagctacaagagattcctccggcccctgaatgcggctaatcccaaccatggagcaggtggctgcaaaccagcagacggcctgtcgtaacgcgcaagtccgtggcggaaccgactactttgggtgtccgtgtttcctttattttttattgtggctgcttatggtgacaatcattgattgttatcataaagcgaattggattggccatccagcgataattaaccagaccatttactagtttgttggatttactccactgacattctaaacactcaatctcatagaagtggtgaaattaattggataatttaactaca

SEQ ID NO: 1183 - DNA, 748 bp, Enterovirus C
  source 1..748: mol_type = genomic DNA
ttaaaacagcctgtgggttgttcccaccccagaggcccacgtggcggctagtactccggtattacggtacccttgtacgcctgttttatactcccttcccccgcaacttagaagttttacaaaactcgttcaacagaagggggtacaaaccagtaccaccacgaacaagcacttctgtttccccggtgacgttgtatagactgttcccacggtcgaaagcgactgatccgttatccgctctggtacttcgggaagcctagtagcaccttgggatcttcgacgcgttgcgttcaacactcaaccccggagtgtagcttaggtcgatgagtctggacgctcctcaccggcgacggtggtccaggctgcgttggcggcctacctgtggtccaaagccacaggacgctagttgtgaacaaggtgtgaagagcctactgagctacctgagagtcctccggcccctgaatgcggctaatcctaaccacggatcaggtgattgcaaaccagcaattggcctgtcgtaatgcgcaagtctgtggcggaaccgactactttgggtgtccgtgtttccttttattttaaaaatggctgcttatggtgacaatcatagattgttatcataaagcgagttggattggccatccggtgaaagtaaagtatattatctacttgtttgtgggatttactcctataactgcatacacttatcatctcattacgatcacactattgattagatcctgttaccaca

SEQ ID NO: 1184 - DNA, 748 bp, Enterovirus C
  source 1..748: mol_type = genomic DNA
ttaaaacagcctgtgggttgttcccaccccagaggcccacgtggcggctagtactctggtatcgcggtacctttgtacgcctgttttatactcccttccccatgtaactttagaagcaattcaccaagttcaatagagggggtacaagccagtaccaccacgaacaagcacttctgttaccccggtgagtttgcataagctgtgcccacggctgaaagtaaatgatccgttatccgcttgagtacttcgagaagcctagtatcaccttggaatcttcgacgcgttgcgctcaacactctaccccgagtgtagcttaggctgatgagtctgggcatcccccaccggcgacggtggcccaggctgcgttggcggcctacccatggccaacgccatgggacgctagttgtgaacaaggtgtgaagagcctattgagctactcaagagtcctccggcccctgaatgcggctaatcctaaccatggagcaagtggccccaacccaggggatggcttgtcgtaacgcgcaagtccgtggcggaaccgactactttgggtgtccgtgtttccttttattttatatatggctgcttatggtgacaatcacagattgttatcataaagcgaattggattggccatccggtgaaatataagcacattatttatatctttgctggattcgctccgttgacacattcttcaccaaagttgatttatacagtcttagtaattagaaatcaccacttcagtc

SEQ ID NO: 1185 - DNA, 748 bp, Enterovirus C
  source 1..748: mol_type = genomic DNA
ttaaaacagcctgtgggttgttcccaccccagaggcccacgtggcggctagtactccggtattacggtacccttgtacgcctgttttatactcccttcccctgtaacttagaagcaccgaacacaagttcaatagaagggggtacaaaccagtaccaccacgaacaagcacttctgtttccccggtgaagttgtattaaactgttcccacggttgaaagcggctgatccgttatccgctcatgtacttcgggaagcctagtaccatcttggaatcttcgatgcgttgcgctcagcactcaaccccagagtgtagcttaggtcgatgagtctggacaaacctcactggcgacagtggtccaggctgcgttggcggcctacctgtggcccaaagccacaggacgctagttgtgaacaaggtgtgaagagcctactgagctacatgagagtcctccggcccctgaatgcggccaatcccaaccacggagcaggcgactacaagccagtggttagtctgtcgtaatgcgcaagtctgtggcggaaccgactactttgggtgtccgtgtttccttttattttgacattggctgcttatggtgacaatcatagattgttatcataaagcgaattggattggccatccggtgagagtcaaaactattatctacctttttattggatttactccactgaacgcttataccccagtccttattagacttgcattgttgattagatatcactattata

SEQ ID NO: 1186 - DNA, 748 bp, Enterovirus C
  source 1..748: mol_type = genomic DNA
ttaaaacagctctggggttgtacccaccccagaggcccacgtggcggccagcactccggtattacggtacccttgtgcgcctgttttatactccctctcccgcaacttagaagcacgaaaccaagttcaatagaagggggtacaaaccagtaccaccacgaacaagcacctctgtttccccggtgacattgcatagactgctcacgcggttgaaagtgatcgatccgttacccgcttgtgtacttcgaaaagcctagtatcgccttggaatcttcgacgcgttgcgctcagcacccgaccccggggtgtagcttaggctgatgagtctggacattcctcaccggtgacggtggtccaggctgcgttggcggcctacctatggctaacgccataggacgctagttgtgaacaaggtgtgaagagcctattgagctacataagagtcctccggcccctgaatgcggctaatcctaaccacggagcaggcggtcgcgaaccagtgactggcttgtcgtaacgcgcaagtctgtggcggaaccgactactttgggtgtccgtgtttcctgttatttttatcatggctgcttatggtgacaatcagagattgttatcataaagcgaattggattggccatccggtgagtgttgtgtcaggtatacaaccgtttgttggaaccactgtgttagctttacttctcatttaaccagttaatcaaaaacaatacgaggacaaaacaacaatactaca

SEQ ID NO: 1187 - DNA, 748 bp, Enterovirus C
  source 1..748: mol_type = genomic DNA
ttccgctcctctggggttgttcccaccccagaggcccacgtggcggctagtactccggtattacggtacccttgtacgcctgttttatactcccttccccgcaacttagaagaattaaaccaagttcaatagaagggggtacaagccagtaccaccacgaacaagcacttctgtttccccggtgacgccgtatagactgtacccacggttgaaaacgactgatccgttatccgctttcgtacttcgagaagcctagtatcatcttgggatcatcgatgcgttgcgctcagcactcaaccccggggtgtagcttaggccgatgagtctggacattcctcaccggtgacggtggtccaggctgcgttggcggcctacctgtggcccaaagccacaggacgctagttgtgaacaaggtgtgaagagcctattgagctacgaaagattcctccggcccctgaatgcggctaatcccaaccacggagcaagtgctcgcacaccagtgagtagcttgtcgtaacgggtaactctgtggcggaaccgactactttgggtgtccgtgtttcctgttatttttatcatggctgcttatggtgacaatcagagattgttatcataaagcgaattggattggccatccggtgagcgttgtgtcaggtatacaactgtttgttggaaccactgtgttagctttacttctcatttaaccaatttatcaaaaataatacgaggataaaacaacaatactaca

SEQ ID NO: 1188 - DNA, 748 bp, Enterovirus C
  source 1..748: mol_type = genomic DNA
gttaaaacagctctggggttgttcccaccccagaggcccaagtggcggctagtactccggtatcacggtacccttgtacgcctgttttatactcccttcccccgtaacttagaagagttaaaccaagttcaatagaagggggtacaaaccagtaccaccacgaacaagcacttctgtttccccggtgatattgtatagactgtacccacggtcgaaaatgattgatccgttatccgctctcatacttcgagaagcctagtatcatcttggaatcttcgatgcgttgcgctcggcactcgatcccggagtgtagcttaggtcgatgagtctggacactcctcaccggtgacggtggtccagactgcgttggcggcctacctgtggtccaaagccacaggacgctagttgtgaacaaggtgtgaagagcctattgagctatgagagagtcctccggcccctgaatgcggctaatcccaaccacggagcgagagtgcgcaagccagcgtatatctcgtcgtaacgcgcaagtctgtggcggaaccgactactttgggtgtccgtgtttccttttatttttgtattggctgcttatggtgacaatcacagattgttatcataaagcgaattggattggccatccggtgaaagtgaaatacattatttgcttatttattggattcagtccacctaattgctatactcacgaacccaccacagccgttttgttaactgaaagccggtaccaata

SEQ ID NO: 1189 - DNA, 748 bp, Enterovirus C
  source 1..748: mol_type = genomic DNA
tggggttaaaacagctctggggttgttcccaccccagaggcccacgtggcggctagtactctggtatcatggtacctttgtacgcctgttttatacccctaccccacgtaactttagaagcaactcaacaagttcaatagggggggtacaaaccagtaccaccacgaacaagcactcctgttaccccggtgatcttgcataagctgtgcccacggctgaaggcgagagatccgttatccgcttgagtacttcgagaagcctagtatcaccttgggatcttcgacgcgttgcgctcagcactccacccgagtgtagcttaggctgatgagcctgggcattccccaccggcgacggtggcccaggctgcgttggcggcctacccatggctaacaccatgggacgctagatgtgaacaaggtgtgaagagcctattgagctactcaagagtcctccggcccctgaatgcggctaatcccaaccacggagcaggtgtcttcaacccagaaggtagcctgtcgtaacgcgtaagtctgtggcggaaccgactactttgggtgtccgtgtttccttttatcttttatatggctgcttatggtgacaatcacagattgttatcataaagcgatttggattggccatccggtgaagtacaaacacattatctacttgtttgttggatttactccactcacacaccccacccccaatataacatctattgttttgttaacaagaaattactttcgaa

SEQ ID NO: 1190 - DNA, 749 bp, Cosavirus B
  source 1..749: mol_type = genomic DNA
ttgccagttttttgaaacgtgtggtttgacgtctaaccattatggcagtgggtggagtactgcaaagatgtcaccgtgctttacacggtttttgaaccccacaccggctgtttggcgcttgcaggacagcaggtttattttcttttaactctctctttctagccacacacgatctatgtgtgtgggcggagtgatactcccgttccttcttggacaggcggcctccacgccctttgtggatcttaaggctaccaagtcactggtgttggaaagtgaagagaaaggagttccttgggaactacatgtggcattgacagaggttgtagcgatgctgtgtgtgtgtgcggattacccccgtggcgacacggaccccacaggccaaaagccctgtccgaaaggacccacacagtggagcaaccccagctcccctcttcaatgttttgtgttagcaaccttggtattattttctctcaagcttccaatacaccgggccccaaagatgtcctgaaggtaccccgtgtatctgaggatgagcaccatcaactacccggacttgttctttcgagaacagacgcatgtggtaacccagccccgatcctaaggggtcggggcttttgctcactcagcacaggatctgatcaggagacctcccccccctgctttacagggggcgggggtttaaaaattgcccaaggcctggcaaataacctaggggactaggttttcctttttattttaaagttgtcaat

SEQ ID NO: 1191 - DNA, 749 bp, Enterovirus A
  source 1..749: mol_type = genomic DNA
ttaaaacagctcttagggttgttcccaccctagaggcccacgtggcggctagcactctggtatcacggtacctttgtgcgcctgttttatacccccctcccccatgtaacttagaagctattaaataaagttcaatagaagggggtacaaaccagtaccaccacgaacaagcacttctgtttccccggtgaagctacatagactgttcccacggttgaaagtggcagatccgttatccgctttggtacttcgagaaacctagtatcatcttggaatcttcgatgcgttgcgttcagcactcaaccccagagtgtagcttaggtcgatgagtctggacgatcctcactggcgacagtggtccaggctgcgttggcggcctacctgtggcgaaagctacaggacgctagttgtgaacaaggtgtgaagagtctattgagctatcaaagagtcctccggcccctgaatgcggctattcccaaccacggagcaagtgctcacaaaccagtgagtggcttgtcgtaacgcgcaagtctgtggcggaaccgactactttgggtgcccgtgtttccttttatttttatcatggctgcttatggtgacaatctaagattgttatcatatagctattggattggccatccggtgactaacagagatatcatatattcatttgttggttttgttaaactagactcaactacattcaagtctcttctcttcatcatacaattgaataatagaaagagaaa

SEQ ID NO: 1192 - DNA, 749 bp, Enterovirus A
  source 1..749: mol_type = genomic DNA
ttaaaacagctctgggggttgttcccaccctagaggcccacgtggcggctagcactctggtatcacggtacctttgtgcgcctgttttatatccctttccccatgcaacttagaagttttttaaacaaagttcaatagaagggggtacaaaccagtgccaccacgaacaagcacttctgtttccccggtgaagctgcatagactgtccccacggttgaaagcggcagatccgtcatccgctttggtacttcgagaaacctagtatcaccttggaatcttcgatgcgttgcgctcagcactcaaccccagagtgtagcttaggttgatgagtctggacaatcctcactggcgacagtggtccaggctgcgttggcggcctacctgtggtgaaaaccacaggacgctagatgtgaacaaggtgtgaagagtctattgagctaccaaagagtcctccggcccctgaatgcggctaatcctaaccacggagcaagtacccacaaaccagtgggcagcttgtcgtaacgcgcaagtctgtggcggaaccgactactttgggtgtccgtgtttcctttttattttatcatggctgcttatggtgacaatctaagattgttatcatatagctattggattggccatccggtgactaacagagatattatatacctatttgttggttttgttagattaaatactatcacattcaaaactcttctttatatcatacaattgaacagtagaaagagaaa

SEQ ID NO: 1193 - DNA, 749 bp, Enterovirus A
  source 1..749: mol_type = genomic DNA
ttaaaacagcctgtgggttgttcccacccacagggcccactgggcgctagcactctgatttcacgaaatccttgtgcgcctgttttatatcccttccccccagtctgaaacatagaagcaatgcgcatcactgatcaatagcaggcgtaacgcgccagttacgtcatgatcaagcacatctgtctccccggaccgagtatcaatagactgcttgcgcggttgaaggagaaacagttcgttacccggctaactacttcgagaagcccagtagcaccatggaagctgcagggtgtttcgctcagcacttcccccgtgtagatcaggtcgatgagtcactgcaacccccacaggcgactgtggcagtggctgcgttggcggcctgcctatggggagacccataggacgctctaatgtggacatggtgtgaagagcctattgagctagttagtagtcctccggcccctgaatgcggctaatcctaactgcggagcacacgccctcaacccagagggtagtgtgtcgtaacgggcaactctgcagcggaaccgactactttgggtgtccgtgtttcttattattcttatattggctgcttatggtgacaattacagaattgttaccatatagctattggattggccatccggtgtgcaatagagctgttatatacctatttgttggttttgtgccactgactttaaaatctatagttactcttaatttcatattggctctcaacacaattaaac

SEQ ID NO: 1194 - DNA, 749 bp, Enterovirus A
  source 1..749: mol_type = genomic DNA
ttaaaacagcctgtgggttgttcccacccacagggcccactgggcgctagcactctggtattacggtacctttgtgcgcctgttttatgccccttaccccttaaattggtaacttagaagttttacatacctgcgaccaatagcgggcatgacgcaccagccatgtcttggtcaagcacttctgttcccccggactgagtatcaatagactgctcacgcggtcgaaggagaaaacgttcgttatccggctggctacttcgagaaacccagtaacaccatgaaagttgcagagtgtttcgctcagcactacccccgtgtagatcaggtcgatgagtcactgcgaaccccacgggcgaccgtggcagtggctgcgctggcggcctgcccatggggtgacccatgggacgctctaatacagacatggtgtgaagagtctattgagctagtcagtagtcctccggcccctgaatgcggctaatcctaactgcggagcacatgccctcaatccagggggtggtgtgtcgtaacgggtaactctgcagcggaaccgactactttgggtgtccgtgtttccttttattcctatcatggctgcttatggtgacaattgaaagattgttaccatatagctactggattggccacccggtgtctaacagagctattgtttatctatttgttgggtacgtccttcttgactataaggcccttcagactcttaagtacatcttgtacctcaatcaaaagag

SEQ ID NO: 1195 - DNA, 749 bp, Enterovirus A
  source 1..749: mol_type = genomic DNA
ttaaaacagcctgtgggttgtacccacccacagggcccactgggcgccagcactctgattctacggaatctttgtgcgcctgttttataatcccctccccccaagtttgtaatttagaagcaaagtaccgtaacgatcaacagcaggcgtggcgcaccagccatgtctcgatcaagcacttctgttcccccggacagagtatcaatagactactcacgtggttgaaggagaaaacgtccgttatccggctaactacttcgagaaacctagtaacaccattgaaactgcagagcgtttcgctcagcacttaccccgtgtagatcaggtcgatgagtcactgcattccccacgggcgaccgtggcagtggctgcgttggcggcctgcctatggggtcacccataggacgctctaatgtggacatggtgcgaagagtctattgagctagttagtagtcctccggcccctgaatgcggctaatcctaactgcggagcgtatgccctcaaaccagggggtggtgcgtcgtaacgggtaactctgcagcggaaccgactactttgggtgtccgtgtttccttttatttccttactggctgcttatggtgacaattgaagaattgttgccatatagctattggattggccatccggtgtgtaacagagcaatcatctatttgttcgtcgggtatatcccactaacgctcaactcttttaacacattacaatacatactaatcctaaatacaagaaa

SEQ ID NO: 1196 - DNA, 749 bp, Enterovirus C
  source 1..749: mol_type = genomic DNA
ttaaaacagcctgtgggttgttcccaccccagaggcccacgtggcggccagtactccggtattacggtacccttgtacgcctgttttatactccctttccctagtaacttagaagttgtacaattaagttcaatagaagggggtacaaaccagtaccaccacgaacaagcacttctgtttccccggtgaagttgcatagactgtccccacggttaaaagtgactgatccgttatccgctcatttacttcgggaagcctagtatcatcttgggatcttcgatgcgttgcgctcaacactcaaccccagagtgtagcttaggtcgatgagtctggacactccccactggtgacagtggtccaggctgcgttggcggcctacctgtggtccaaagccacaggacgctagtagtgaacaaggtgtgaagagcctactgagctaattgagagtcctccggcccctgaatgcggataatcctaaccacggagcaggtgatcacaatccagtgattggcctgtcgtaatgcgtgagtctgtggcggaaccgactactttgggtgtccgtgtttcctttttactcttattatggctgcttatggtgacaatcatagattgttatcataaagcgaattggattggccatccggtgagaattaaatcgctaatatatctatttgttggatttaccaaaatcaactacagaacactagccttaattcgaatcgtgttactgatcagattccaccatcaca

SEQ ID NO: 1197 - DNA, 749 bp, Enterovirus C
  source 1..749: mol_type = genomic DNA
ttaaaacagctctggggttgttcccaccccagaggcccacgtggcggctagtactctggtattacggtacctttgtacgcctgttttatactcccttcccctccgtaacttagaagcatgagaatcaagttcaatagaagggggtacaaaccagtaccaccacgaacaagcacttctgtcaccccggtgaggttgtatagactgtccccacggttgaaagcgactgatccgttatccgctcaattacttcgggaagcctagtaccatcctggaatcttcgatgcgttgcgctcagcactcaaccccagagtgtagcttaggccgatgagtctggacaatcctcactggcgacagtggtccaggctgcgttggcggcctacctgtggtccaaagccacaggacgctagttgtgaacaaggtgcgaagagcctactgagctaattgagagtcctccggcccctgaatgcggctaatcccaaccacggagcaggcggttgcaaaccagcaactggcttgtcgtaacgcgaaagtctgtggcggaaccgactactttgggtgtccgtgtttccttttattcttatgatggctgcttatggtgacaatcgttgattgttatcataaagcgaattggattggccatccggtgaaaatcaaatctattgtttacctgttcattgggttcactccactaacttcacacactatatatctcattaaggtcgtattactagtaaggaattatcaccaaa

SEQ ID NO: 1198 - DNA, 749 bp, Enterovirus C
  source 1..749: mol_type = genomic DNA
ttaaaacagctctggggttgttcccaccccagaggcccacgtggcggctagtactctggtattacggtacccttgtacgcctgttttatactcccttccccgtaacttagaagaaataaaccaagttcaatagaagggggcacaaaccagtgtcaccacgaacaagcacttctgtttccccggtgatattgtatagactgtacccacggttaaaagcgattgatccgttatccgctcttgtacttcgaaaagcctagtatcatcttggaatcttcgatgcgttgcgctcaacactcaaccccagagtgtagcttaggtcgatgagtctggacattccccaccggcgacggtggtccaggctgcgttggcggcctacctgtggcccaaagccacaggacgctagttgtgaacaaggtgtgaagagcctattgagctgcaagagagtcctccggcccctgaatgcggctaatcccaaccacggagcaagtgctcacacaccagtgagtggcttgtcgtaacgcgcaagtctgtggcggaaccgactactttgggtgtccgtgtttcctgttatttttatcatggctgcttatggtgacaatcagagattgttatcataaagcgaattggattggccatccggtgagtgttgtgtcaggtatacaactgtttgttggaaccactgtgttaactttacttctcatttaaccaattaatcaaaaacaatacgaggataaaacaacaatactaca

SEQ ID NO: 1199 - DNA, 749 bp, Enterovirus C
  source 1..749: mol_type = genomic DNA
ttaaaacagctctggggttgttcccaccccagaggcccacgtggcggccagtacaccggtattacggtacccttgtacgcctgttttatactcccttccccctgtaacttagaagctcaagaatccaagttcaatagaagggggtacaaaccagtaccaccacgaacaagcacttctgtttccccggtgaagttgcatagactgttcccacggttgaaagtgactgatccgttatccgctcaactacttcgagaagcccagtatcatcttggaatcttcgatgcgttgcgctcagcactcgaccccggagtgtagcttaggctgatgagtctggacgttccccactggtgacagtggtccaggctgcgttggcggcctacctgtggtccaaagccacaggacgctagttgtgaacaaggtgtgaagagcctattgagctaattgagaatcctccggcccctgaatgcggctaatcccaaccacggagcaggtggttacaacccagtaactggcctgtcgtaacgcgtaagtctgtggcggaaccgactactttgggtgtccgtgtttccttttattcctataatggctgcttatggtgacaatcacagattgttatcataaagcgaattggattggccatccggtgagagttaagacaattatccacttgttcattggatttacccctctgactaattacacactcaaccttattagaattgtagttctagtgagatactactgtcata

SEQ ID NO: 1200 - DNA, 749 bp, Enterovirus C
  source 1..749: mol_type = genomic DNA
ttaaaacagctctggggttgttcccaccccagaggcccacgtggcggctagtactccggtattacggtacccttgtacgcctgttttatactcccttccccgtaacttagaagcaataaatcaagttcaccaggagggggtacaaaccagtaccaccacgaacaagcacttctgtttccccggtgacgttgcatagactgtccccacggttgaaagcgactgatccgttatccgctcgtgtacttcgagaagcctagtatcatcttggaatcttcgatgcgttgcgctcagcactcgaccccggagtgtagcttaggctgatgagtctggacattcctcaccggcgacggtggtccaggctgcgttggcggcctacctgtggctcaaagccacaggacgctagttgtgaacaaggtgtgaagagcctattgagctacacgagaatcctccggcccctgaatgcggctaatcccaaccacggagcaagtgctcacaaaccagtgagtggcttgtcgtaacgggtaactctgtggcggaaccgactactttgggtgtccgtgtttcctttttatttttgtatggctgcttatggtgacaatcagagattgttatcataaagcgtattggattggccatccggtgagtgttgtgtcaggtatacaactgtttgttggaaccactgtgttagctttacttctcatttaaccaattaatcaaaaacaatacgaggataaaacaacaatactaca

SEQ ID NO: 1201 - DNA, 750 bp, Aichivirus E
  source 1..750: mol_type = genomic DNA
ttccccttcccccttttcacggcccggccgcccgccgggtcgtcacccgttcagacacctacgggttatctgttcgggctataaatatgggcattcctcttcccccttccccttttgaagatgagtgcgcatattcttgactccgcctggattggccgcccaaggcgtgaacaagcagctaggccaccatgacactgcggtggtgtccgaacccgcgggtgccttcacgggcacctgtggtatgtaggactcccaccgtggtcttccctttccccctcaatctttccccctggttcgactaacgggaccagtgctggaacctgtccggtgaacggtatagcaggcccccccggcagaaacacccggtgcttaccccttaaggctagcccccttccatgaatttggttggggcaactagtgggtgtacagttggcgtgaaccctccggtctaggagtgctcttgcccaatcctctgtgtgtgccttgcagtagggactggcaatccttcgcgtaggtgatccgctgtgccatgccatcctggcgacaggaggcccagtgtgcgcaacctacgtcccttctgggtgctgcattgcattacctttggagtaagcttggtgtgccgaaaccccagggtttacgtaccactcgtggtgtgaggaatgtgccgcaggtaccccatccttgaggtgggatctgagcggtagctaattgtctagcaccactttcttccttttttctttgctggtcacg

SEQ ID NO: 1202 - DNA, 750 bp, unidentified
  source 1..750: mol_type = unassigned DNA; note = Coxsackievirus A14 gene for polyprotein, polyprotein region, strain1 sequence
ttaaaacagctctggggttgtacccactcacagggcccactgggcgctagcactctgattctacggaatccttgtgcgcctgttttataaccccctcccaatatgtaacttagaagcagcacatactaccgatcaatagtgggcatggcgcaccagccatgtctcgatcaagcacttctgtttccccggactaagtatcaatagactgctcacgcggttgaaggagaaagcgtccgttacccggctaactacttcgagaaacccagtagcaccactgaagctgcagagtgtttcgctcagcacttcccccgtgtagatcaggtcgatgagtcaccgcaatccccacgggcgaccgtggcggtggctgcgtggcggcctgcctgtggggcaacccacaggacgctctaaagtggacatggtgcgaagagtctattgagctagttagtagtcctccggcccctgaatgcggctaatcctaactgcggagcgcatgccttcaaaccagatggtagtgcgtcgtaatgggcaactctgcagcggaaccgactactttgggtgtccgtgtttccttttattcttacattggctgcttatggtgacaatcacagaattgttaccatatagctattggattggccatccggtgtgtaatagagcaataatttactcttttgttgcttttgttccattgaccttcactacactgaacactttacagtacatacttcaactcaactccagaaagcaatc

SEQ ID NO: 1203 - DNA, 750 bp, unidentified
  source 1..750: mol_type = unassigned DNA; note = Enterovirus A120 strain TRT/2013-23196, complete genome.1 sequence
ttaaaacagcctatgggttgcacccacccatagggcccactgggcgctagcactctgattctacggaatctttgtgtgcctgttttatagtccctccccccgacttgtaacttagaagtaatgcaaaccactggtcaatagcaggcatgacgcaccagtcatgtcttgatcaagcacttctgtccccccgggctgagtatcaatagactgctcacgcggttgaaggagaaaacgctcgttacccggctaactacttcgagaaacctagtagcaccattgaaactgcagagcgtttcgctcagcactccccccgtgtagatcaggtcgatgagtcactgcactcctcacgggcgaccgtggcagtggctgcgttggcggcctgcctatggggtaacccataggacgctttaatgtggacatggtgcgaagagtctattgagctagttagtagtcctccggcccctgaatgcggctaatcctaactgcggagcacacgcccttaatccaaggggtagtgtgtcgtaatgggcaactctgcagcggaaccgactactttgggtgtccgtgtttccttttatttttatactggctgcttatggtgacaattgagagattgttaccatatagctattggattggccatccggtgtgcaacagagctattatctacctgtttgttggatatataccactcacagctgacaaaacccttatcacattattgtacatcctacacttgaactcaagaaa

SEQ ID NO: 1204 - DNA, 750 bp, Enterovirus C
  source 1..750: mol_type = genomic DNA
ttaaaacaagctgtggggttgttcccaccccagaggcccacgtggcggctagtactccggtattgcggtacccttgtacgcctgttttatactccctgcccccgtaacttagaagcacaaagaaatcaagttcaacagcagggggtacaaaccagtaccaccacgaacaagcacttctgttcccccggtgacgtcgcatagactgtgcccacggttgaaaacgattgatccgttaaccgctcttgtacttcgagaagcctagtatcacattggaatctacgatgcgttgcgctcagcactcaaccccagagtgtagcttaggctgatgagtctggacattcctcaccggtgacggtggtccaggctgcgttggcggcctacctgtggcccagagccacaggacgctagttgtgaacaaggtgtgaagagcctattgagctacaagagagtcctccggcccctgaatgcggctaatcccaaccatggagcaggtggtcacaatccagtgattggcctgtcgtaatgcgcaagtccgtggcggaaccgactactttgggtgtccgtgtttccttttattttacacttggctgcttatggtgacaatcatagattgttgtcataaagcaaattggattggccatccggtgaaaactaaatacgctatttacctgtttgttggatttataccttcaacttacaacacttattgtattatttgcattgtgttattgattagacaacaatactaca

SEQ ID NO: 1205 - DNA, 750 bp, unidentified
  source 1..750: mol_type = unassigned DNA; note = Human poliovirus 2 strain NIE0711199, complete genome.1 sequence
ttaaaacagctctggggttgttcccaccccagaggcccacgtggcggccagtactccggtattacggtacccttgtacgcctgttttatactcccttcccctgtaacctagaagaagtaaattaagttcaataggagggggtacaaaccagtaccaccacgaacaagcacttctgtttccccggtgacgttgtatagactgtgtccacggtcgaaagcaattgatccgttatccgctcttgtacttcgagaagcctagtaccagcttggaatcttcgatgcgttgcgttcagcactcaatcccagagtgtagcttaggttgatgagtctggacatccctcaccggcgacggtggtccaggctgcgttggcggcctacctgtggcccaaagccacaggacgctagttgtgaacaaggtgtgaagagcctattgagctacaagagagtcctccggcccctgaatgcggctaatcccaaccacggagcaagggtgcatgaaccaatgcatgccttgtcgtaatgcgtaagtctgtggcggaaccgactactttgggtgtccgtgtttccttttatttttatattggctgcttatggtgacaatcagagattgttatcataaagcgaattggattggccatccggtgagtgttgtgtcgggtatacaactgtttgttggaaccactgtgttaactttgcttcttatttaaccaattaatcaaaaacaatacgaggataaaacaacaataccaca

SEQ ID NO: 1206 - DNA, 750 bp, Enterovirus C
  source 1..750: mol_type = genomic DNA
ttaaaacagctctggggttgttcccaccccagaggcccacgtggcggctagtactccggtattccggtacccttgtacgcctgttttatactcccctcccccgtaacttagaagaaacaaaccaagttcactaggagggggtacaaaccagtaccaccacgaacaagcacttctgtttccccggtgatattgtatagactgtacccacggtcgaaaacgattgatccgttatccgcttctgtacttcgagaagcctagtaccactttggaatcttcgatgcgttgcgctcagcactcaaccccagagtgtagcttaggtcgatgagcctggactttcctcactggcgacagtggtccaggctgcgttggcggcctacctgtggcccaaagccacaggacgctagttgtgaacaaggtgtgaagagcctattgagctacaaaagagtcctccggcccctgaatgcggctaatcccaaccatggagcaagggtgtacgaaccagtacatatcttgtcgtaacgcgcaagtccgtggcggaaccgactactttgggtgtccgtgtttccttttattttcatactggctgcttatggtgacaatcatagattgttatcataaagcgaattggattggccatccggtgagtgttgtgtcaggtatacaattgtttgttggaaccactgtgtcagctttacttctcatttaaccaattaatcaaaaacaatacgaggataaaacaacaataccaca

SEQ ID NO: 1207 - DNA, 751 bp, Parechovirus B
  source 1..751: mol_type = genomic DNA
cgcggccatgtttgtaagcatggccgtagggaccccccggtgggctgggtgcacttctcgccttttaggtgggggtgtggctcggctaccaccactgggtggcaaccagttttcatgtaatagccaaacaagtaacattaacacctaagcttctggtgcaccaccctgtctggttgaagccgcttggaataaaattggatagctaaggtggattgtcaaacatgcatttctgtctcctggatatccttaatatccaggtaagggctgtacccgggcggtcctactcttcacaggagtctgcataggtggctttcacctctggacagtgcactccctcccgctccctcacccaagttagctggaacacagaatgaaaaatgagcgaacactagaaccaggtgtagcgaccacacatatgccagcggatttcccctagtggtaacactagcctctgggcccaaaaggcacgtctttgaccatatgtgtgcacaatcccagtgatggttctatctagtagtttatttagtaattttgtgaactggctcactgaacgtgagttggaggcttaggaatggcgggctgaaggatgccctgaaggtacccgtaggtaacgataagctcactatggatctgatcaggggcccaccagcatatttgctgggtagaagtcttcggaccttgggttaaaaaacgtctaggcccgtcccccagagggatctggggtttccctaataaccccaatactgacatt

SEQ ID NO: 1208 - DNA, 752 bp, unidentified
  source 1..752: mol_type = unassigned DNA; note = unclassified Rosavirus sequence
ggttcccgcccccacctccgtcacagcctttcgaggctgtgctggaacggcgacagggagtttagacttcttgccgctatgggttcttctgccccgtgttttggacgcccggcatggcgttaaactgtcattccccctaccctttccctatttgtaactaagttgtgcctcgcccagacaggctgctaagacgcttgttgctacagcatgtttggactagcgagctctccataagtaaacttttccacccccttgggtgtctttgcccttggggacggtctggagccccgttgtcttagacagagtgtgtcggtgcaggctttctgctctggacccatgccggccacaaactcccatcagtgttgtgaagacggtaggacacaagtgaacaggtacagggaactttcttggaatgtagcgattactgcaagtgagcggacctcccctggtggtaacaccagcctctcaggccaaaagccacggtgttaacagcacccttgcagtaggccactgccccgtggtctccaggatctttctctttactcctagtaatttgtgaatctagctgttctgaagcatactggtgcaaaggctaaggatgccctgaaggtacccacaggtaacgttaagacactgtggatctgatcaggggcctgaatactgaagctttacagaggtagttcaggttaaaaaacgtctatgcctttcccccacgggagtgggggttcccccacacttttatcacaggcact

SEQ ID NO: 1209 - DNA, 753 bp, Enterovirus A
  source 1..753: mol_type = genomic DNA
tttaaaacaagctctggggttgtacccacccacagggcccactgggcgctagcactcttattctacggaatatttgtgcgcctgttttatagccctcccccattaagtaacttagaagtgatgtgcagcacagatcaatagcaggcatagcgcaccagctgtgtcttgatcaagcactcctgtttccccggactgagtatcaataaactgctcacgcggttgaaggagaaaacgttcgttacccggctaaccacttcgagaaacttagtaacaccattgaagctgtagagtgtttcgctcagcacttccccagtgtagatcaggctgatgagtcactgcgaccctcacgggcgaccgtggcagtggctgcgttggcggcctgcctatggggcaacccataggacgctctaaagtggacatggtgtgaagagtctattgagctggttagtagtcctccggcccctgaatgcggctaatcctaactgcggagcgcatgccctcaaaccagggggtggtgcgtcgtaacgggtaactctgcagcggaaccgactactttgggtgtccgtgtttccttttattctcatattggctgcttatggtgacaattgaagaattgttaccatatagctattggattggccatccggtgtgtaacagagcgattatcttctcttttattgcctttgtcccattgaccccaactgcgttaaacactctgcaatatatactctatcttaactctaggaagcgaac

SEQ ID NO: 1210 - DNA, 753 bp, Enterovirus C
  source 1..753: mol_type = genomic DNA
ttaaaacagcctgtgggttgttcccaccccagaggcccacgtggcggctagtactctggtattacggtacccttgtacgcctgttttatactcccttcccatgtaacttagaagcaaataacacaagttcaatagaagggggtacaaaccagtaccaccacgaacaagcacttctgttaccccggtgaagttgcatagactgttcccacggttgaaagcgaccgatccgttatccgctcaagtacttcgagaagcctagtatcaccttggaatcttcgatgcgttgcgctcatcactcaaccccagagtgtagcttgggctgatgagtctggacgtccctcactggcgacagtggtccaggctgcgttggcggcctacctatggcccaaagccataggacgctagttgtgaacaaggtgtgaagagcctattgagctacttgagagtcctccggcccctgaatgcggctaatcccaaccacggatcaggtgattgcaaaccagcaattagcctgtcgtaacgcgcaagtctgtggcggaaccgactactttgggtgtccgtgtttccttttattttactattggctgcttatggtgacaatcattgattgttatcataaagcgaattggattggccatccggtgaaagtaaaacaggttatttacctttttgttggatttactgcattatctaagcacactccagatttaattcgtatcgttcttgcgattaggagagcacacttttccagca

SEQ ID NO: 1211 - DNA, 753 bp, unidentified
  source 1..753: mol_type = unassigned DNA; note = unclassified Enterovirus sequence
ttgatcaaggcccagttggtgcactgggttgatcccacccacagggcccactgggcgcatgcactctggtatcacggtacctttgtgcgcctgttttatctcccctcccccccgtgtaatttagaagcataagcacaatgatcaatagacaacccagtgcaccaactgggccttgatcaagcacttctgttaccccgggccgactatcaataggctgctcacgtggctgaaggagaaaacgctcgttacccggccagttacttcgagaagcctagtaccaccatgaacgttgcgcagtgtttcgctccgcacaaccccagtgtagatcaggtcgatgagtcaccgcatcccccacgggtgaccgtggcggtggctgcgttggcggcctgcccatggggtaacccatgggacgctacaatactgacatggtgtgaagagtctattgagctaactggtagtcctccggcccctgaatgcggctaatcccaactgcggagcacgtgcttccaatccaggaggtagcgtgtcgtaacgggcaactctgcagcggaaccgactactttgggtgtccgtgtttcctttatctctttattggctgcttatggtgacaattgaaagattgttgccatatagctattggattggccatccggtatctaacagagcaatcatatacctgtttgttggatttgttccacttaacaaaacagagttccgtactttgtgttatattattaggttgaacacatcaaa

SEQ ID NO: 1212 - DNA, 753 bp, unidentified
  source 1..753: mol_type = unassigned DNA; note = Human enterovirus C isolate V2-TOL cl1, complete genome.1 sequence
ttaaaacagctctggggttgttcccaccccagaggcccacgtggcggccagtacaccggtatcacggtacccttgtacgcctgttttatactccctctcccctgtaacttagaagcaaataaaccaagttcaatagaaagggggtacaaaccagtaccaccacgaacaaacacttctgtttccccggtgaggttgtataaactgtccccacggttgaaaacgactgatccgttacccgctcttgtacttcgagaagcctagtatcatcttggaatcttcgatgcgttgcgctcagcactcgaccccggagtgtagcttaggctgatgagtctggacgttccccaccggcgacggtggtccaggctgcgttggcggcctacctgtggcccaaagccacaggacgctagttgtgaacagggtgtgaagagcctattgagctacaagagagtcctccggcccctgaatgcggctaatcccaaccacggagcaggtggttgcaatccagcaactagcctgtcgtaacgcgcaagtctgtggcggaaccgactactttgggtgtccgtgtttccttttattcttacaatggctgcttatggtgacaatcatagattgttgtcataaagcgaattggattggccatccggtgaaagtcagatcaactatttatttgtttgttggagccactgtgttagctttacttctcatctaaccaattaatcaaaaacaatacgaggataaaacaacaacactaca

SEQ ID NO: 1213 - DNA, 753 bp, Enterovirus D
  source 1..753: mol_type = genomic DNA
ttaaaacagctctggggttgttcccaccccagaggcccacgtggcggctagtactccggtattacggtacccttgtacgcctgttttatactcccttcccccgtaacttagaagtaacacaaatccaagttcaatagaagggggtacaaaccagtaccaccatgaacaagcacttctgtttccccggtgaaatcatagactgtacccacggttgaaagtgatcgatccgtcatccgctcttgtacttcgagaagcctagtatcaccttggaatcttcgatgcgttgcgctcaacactcaaccccagagtgtagcttaggctgatgagtctggacactccccaccggcgacggtggtccaggctgcgttggcggcctacctgtggtccaaagccacaggacgctagttgtgaacaaggtgtgaagagcctattgagctacaggagagtcctccggcccctgaatgcggctaatcccaaccacggagcaggtggtcataatccaatgattggcctgtcgtaacgcgcaagtctgtggcggaaccgactactttgggtgtccgtgtttccttttattttatcattggctgcttatggtgacaatctaagattgccatcatatagcttttggattggccatccggtgatacttcgagttatttagcttgctgcttacatttattttaaacaacatccagttaccagcattcctattttgtttttctttcattctgagttatctaataagtagttaga

SEQ ID NO: 1214 - DNA, 754 bp, Enterovirus A
  source 1..754: mol_type = genomic DNA
gagttcagacgtgtgccttccgatgtgggttgcacccacccacagggcccactgggcgctagcactctgataccacggtacctttgtgcgcctgttttatcaccctaccccacacgaaacttagaagcaatacataactgaccaatagtaggtgtggcgcaccagccacatcttggtcaagcacttctgtctccccgggttgagtatcaataagctgttcacacggctgaaggagaaaacacccgttacccggccaactacttcgagaaacctagtatcaccatgaacgttgcgaggtgtttcgctcagcacttcccccgtgtagatcaggccgatgagtcaccgcattccccacgggtgaccgtggcggtggctgcgttggcggcctgcctatgggttagcccataggacgccttaatactgacatggtgcgaagagtctattgagctagttggtagtcctccggcccctgaatgcggctaatcctaactgcggagcacatacccacaaaccagtgggcggtgtgtcgtaacgggtaactctgcagcggaaccgactactttgggtgtccgtgtttccttttatctttatattggctgcttatggtgacaatcagagaattgttaccatatagctactggattggccatccggtgtccaatagagctattatatacctgtttgttggattcaccccattgacctacaaatccctaaatactttgtgttatattttgaacttaaatacacgaaa

SEQ ID NO: 1215 - DNA, 754 bp, Enterovirus C
  source 1..754: mol_type = genomic DNA
ttaaaacagcctgtgggttgttcccaccccagaggcccacgtggcggctagtactccggtattacggtacccttgtacgcctgttttatatccccttcccctgtaacttagaagcagacaacacaagttcaatagaagggggtacaaaccagtaccaccacgaacaagcacttctgttaccccggtgacgttgcatagactgttcccacggtcaaaagcgatcgatccgttatccgctcaagtacttcgaaaagcctagtatcaccttggaatcttcgatgcgttgcgctcggcactcgatcccggagtgtagcttaggccgatgagtctggacgatcctcactggcgacagtggtccaggctgcgttggcggcctacctatggcccaaagccataggacgctagttgtgaacaaggtgtgaagagcctattgagctacttgagaatcctccggcccctgaatgcggctaatcccaaccacggatcaggtgattgcaatccagcaattggcctgtcgtaacgcgcaagtctgtggcggaaccgactactttgggtgtccgtgtttccttttaattttattgctggctgcttatggtgacaatcgtagattgttatcatagagcgaattggattggccatccggtgagattaaaacacattatttacctttttgttggatttaccacactatctacgtacactccagacttaatccgcatagtacttttaattagaagatcttatcattataaca

SEQ ID NO: 1216 - DNA, 754 bp, Enterovirus C
  source 1..754: mol_type = genomic DNA
ttaaaacagctctggggttgttcccaccccagaggcccacgtggcggctagtactccggtatcgaggtacccttgtacgcctgttttatactcccttcccccgtaacttagaagccaaaaatacaagttcaatagaagggggtacaaaccagtaccaccacgaacaagcacttctgttaccccggtgatgttgcatagactgtccccacggtcgaaagcgattgatccgttatccgcttaggtacttcgagaagcctagtatcaccttggaatcttcgatgcgttgcgctcatcactcgaccccggagtgtagcttaggtcgatgagtctggacgatcctcactggcgacagtggtccaggctgcgttggcggcctacctatggcccaaagccataggacgctagttgtgaacaaggtgtgaagagcctattgagctacttaagagtcctccggcccctgaatgcggctaatcccaaccacggatcaggtgattgcaatccagcgattggcctgtcgtaacgcgcaagtctgtggcggaaccgactactttgggtgtccgtgtttccttttaattttattattggctgcttatggtgacaatcatagattgttatcataaagcgaattggattggccatccggtgaaaataaaacacattatctacctttttgttggatttactacactgtctacacacactccagatataatttatatagttcttttaatcaggagatcttatcattataaca

SEQ ID NO: 1217 - DNA, 754 bp, Enterovirus C
  source 1..754: mol_type = genomic DNA
tggggacaaagttaacagctctggggttgttcccaccccagaggcctacgtggcggctagtactccggtattacggtacccttgtacgcctgttttatactccccaccccgcaacttagaagaagctaatcaagttcaataggagggggtacaaaccagtaccaccacgaacaagcacttctgtctccccggtgacattgcatagactgtccccacggttgaaagcgatcgatccgttatccgctcttgtacttcgagaagcctagtaccatcttggaatcagcgatgcgttgcgctccgcactcaatcccagagtgtagcttaggctgatgagtctggacattcctcaccggcgacggtggtccaggctgcgttggcggcctacctgtggcccaaagccacaggacgctagttgtgaacaaggtgtgaagagcctattgagctataagagagtcctccggcccctgaatgcggctaatcccaaccacggatcaagggtgcacgaaccagtgtataccttgtcgtaacgcgcaagtctgtggcggaaccgactactttgggtgtccgtgtttccttttattgtttcaatggctgcttatggtgacaatcattgattgttatcataaagcgaattggattggccatccggtgaaagtgaaacatattgtttgcctccttattgggtctactccaatcgacctctttacctacaatcttattgccacagttttactggttagaagtgtgtttcaca

SEQ ID NO: 1218 - DNA, 755 bp, Aichivirus B
  source 1..755: mol_type = genomic DNA
cgcacgttcgcgtcgtcgtaagtctggattcccaaggccaacttggtttaacttcggtttctggacaaatacaaagaacctcagtcctcttggtactttctcgcctgagtcaacaaagcgagaaacctgcccctctaacgccagacgagcggcataaaacttgaacttctggcacgctccactcttccctctcccaatcccatccccatcgcgctctcaaggtcgcgcaattctgggactagcccagatttaaaagttcctggcaccctttgcccctttaggcccttaaggcaggaactgaccttgtgctgtgacctcggtgcggaagtgctactgcgtagtgattgtaagctcctcttatggttctgccctggcaaggctatagagtactgtgatccgctgcggatgccatcctggtaacaggacccccagtgtgcgtaacagtatgttcacggctcaccgtgttcaccatgactggaacactgctttcgtgaaacagtgtgtgtccaatccctgtgatcagtatcaaccacaccacctaggaatgctaggaaggtaccccggttcgccgggatctgatcctaggctaattgtctacagtggtgctcctttattttctctccaaccatttattgttcacaactgcttgatcttgtgtttgctgcctttctctgctctcactgccattctcaagtgttcacactgtccaagctcctttggttgttttcatccacttgccattgtcaactcttgtc

SEQ ID NO: 1219 - DNA, 755 bp, Enterovirus A
  source 1..755: mol_type = genomic DNA
ttaaaacagcctgtgggttgtacccacccacagggcccactgggcgctagcacactgattctgcgggatctttgtgcgcctgttttatatcccctccccccaaactaggtaacttagaagattagcacttgtatgaccaatagtaggcgtgacgcgccagtcatgtcttggtcaagcacttctgtttccccggactgagtatcaataagctgcttgcgcggctgaaggagaaaacgttcgttacccggctaactacttcgagaaacctagtaacaccatgaaagttgcggagtgtttcgctcagcacttcccccgtgtagatcaggtcgatgagtcactgcaaaccccacgggtgaccgtggcagtggctgcgttggcggcctgcctatgggtcaacccataggacgctctaatacagacatggtgtgaagagtctattgagctagttagtagtcctccggcccctgaatgcggctaatcctaactgcggagcacacgcttgcaaaccagtgagtagtgtgtcgtaatgggcaactctgcagcggaaccgactactttgggtgtccgtgtttccttttattctcatactggctgcttatggtgacaattgaagaattgttactatatagctattggattggccatccggtgtgtaacagagcgataatctactcctttgttgcatttgttccactaacccttactacattagacattctacaatacatactttatctcaactccaagaaacgaac

SEQ ID NO: 1220 - DNA, 758 bp, Enterovirus A
  source 1..758: mol_type = genomic DNA
aacacataaccgaccaataaaacagcctgtgggttgcacccacccacagggcccattgggcgctagcactctggtaccacggtacctttgtgcgcctgttttatcaccctaacccccacgaaacttagaagtaacacataaccgaccaatagtaggtgtggcgcaccagccgcatcttggtcaagcacttctgtttccccgggttgagtatcaataagctgttcacacggctgaaggagaaaacacccgttacccgaccaactacttcgagaaacctagtaccaccatgaacgttgcaaggcgtttcgctcagcacttcccccgtgtagatcaggccgatgagtcaccgcattccccacgggtgaccgtggcggtggctgcgttggcggcctgcctatgggttagcccataggacgccttaatactgacatggtgcgaagagtctattgagctagttggtagtcctccggcccctgaatgcggataatcctaactgcggagcacatactcacaaaccagtgagctgtgtgtcgtaacgggcaactctgcagcggaaccgactactttgggagaccgtgtttccttttatctttatattggctgcttatggtgacaatcagagaattgttgccatatagctattggattggccatccggtgtctaatagagctattatatacctgtttgttggattcactccgctgacacataaatcccttaatactttgtgttatatcttgaacttaaacacacgaaa

SEQ ID NO: 1221 - DNA, 758 bp, Enterovirus B
  source 1..758: mol_type = genomic DNA
tacaaaaaagcaggctttaaaacagctctggggttgttcccacccacagggcccactgggcgctagcactctggtatcacggtacctttgtgcgcctgtttttccacccctccccatacgcaacttagaagagagactcaaccggtcaatagacagcctagtacaccaactaggttctgaccaagaacttctgtttccccggaccgagtatcaataggctgcttacgcggctgaaggagaaaacgttcgttacccggccaattacttcgagaaacctagtatcaccatggaagttgcgcagtgtttcgctccgcacaaccccagtgtagatcaggtcgatgagtcaccgcattccccacaggcgactgtggcggtggctgcgttggcggcctgcccgtggggcaacccacgggacgcttcaataccgacatggtgcgaagagtctattgagctaattggtagtcctccggcccctgaatgcggctaatcctaactgtggagcagatacccacgcgccagtgggcagtctgtcgtaatgggcaactccgcagcggaaccgactactttgggtgtccgtgtttccttttatcctcataatggctgcttatggtgacaattgaaagattgttgccatatagctattggattggccatccggtgactaacagagcaattatttacttgtttgttgggtttgtaccattgaactacaaggtccttaatactctaaactacattataagtctcaatacagtgca

SEQ ID NO: 1222 - DNA, 759 bp, unidentified
  source 1..759: mol_type = unassigned DNA; note = unclassified Cosavirus sequence
acatgggggagactgcatgtggcagtcttgaaacgtgtggtttgacgtctaccttatatggcagtgggtggagtactgcaaagatgtcaccgtgctttacacggtttttgaaccccacaccggctgtttgacgctcgtagggcagcaggtttattttcattaaaattcttactttctagctgcatgagttctattcatgcagacggagtgatactcccgttccttcttggacaggttgcctccacgccctttgtggatcttaaggtgaccaagtcactggtgttggaggtgaagatagagagtcctcttgggaatgtcatgtggctgtgccaggggttgtagcgatgccattcgtgtgtgcggatttcctctcgtggtgacacgagcctcacaggccaaaagccccgtccgaaaggacccgaatggtggagtgaccctgactcccccctgcatagttttgtgattaggaacttgaggaatttctgtcataaatctctatcacatcaggccccaaagatgtcctgaaggtaccctgtgtatctgaggatgagcaccaccgactacccggacttgcattagcagacacatgtggttgcccagccccacctcttcagaggtggggctttgctcactcagcacaggatctgatcaggagccccgctcgtgtgctttacactcgacgcggggttaaaaattgcccaaggcctggcacaacaacctaggggactaggttttcctatttttgtaaattatgtcaat

SEQ ID NO: 1223 - DNA, 759 bp, Enterovirus A
  source 1..759: mol_type = genomic DNA
attggctcgagttacttaaaacagcctgtgggttgtacccacccacagggcccactgggcgctagcacactggttctgcgggacctttgtgcgcctgttttataacccttccctaagcagtaacttagaagctttgtacaatcatggccaatagtgggcgtggcgcgccagtcacgtcttggtcaagcacttctgtatccccggactgagtatcaatagactgctcacgtggttgaaggagaaaacgtccgttacccggctaactacttcgagaaacctagtagcaccatgaaagttgcggagtgtttcgttcagcacttcccccgtgtagatcaggtcgatgagtcactgtaaaccccacgggcgaccgtgacagtggctgcgttggcggcctgcccatggggtaacccatgggacgctctaatacagacatggtgcgaagagtctattgagctagttagcagtcctccggcccctgaatgcggctaatcctaactgcggagcgcgcaccctcaacccagggggcggcgcgtcgtaatgggcaactctgcagcggaaccgactactttgggtgtccgtgtttccttttattctttattggctgcttatggtgacaattgaaaagttgttaccatatagctattggattggccatccggtgtctaacagagctattgtttacctattcattggattcgtccctcttaatctcaaggtcattcaaactctcgattgcatattgctccttaactgtaagaa

SEQ ID NO: 1224 - DNA, 761 bp, Gallivirus A
  source 1..761: mol_type = genomic DNA
tccctacccaagccccagtacaccactatggagttctttatatcccagcgcgtggtggacgcactgtgaggtattccgataccaccccactcgcacttcctggatagtgcgttagatatgcccgacatatcgcttccaggaccaaagccccccttttctctttcccaaccagcttcgccactcaagctgtaattccatgtccggtctttccggccttagtatcatggaaatgtggtcgtgctcaaatgaaattgagttgacattgatcaatgaaagttgcactgaactttgctaaactggctagcgccacctggtgtgtgccgttggtctcctcacatggtaacatgtgccaacgggcccgaaaggctagtgggcaattaccgctccaagggaggggtacccaccccgacctgaacagcggtaatgaagctcacctcccaggctctgaccccgagaagtttagttatttagtaggtgtaattagtacttgtgattggtcaatttgatagtagtttgaaacgttatggatgaatgagtagaccccctgaaggtaccccattacatgggatctgatcagggccacattctgcgtgtctccccgcacttgtggttaaaaccatgaaagttcatcccaaacaatcttttcctcttctttttcttttagtggtgacaacctactggattggtgattaccaatctgtactagtgttgtattaagacttgttgtgtggagaaaatggactctttcaagaagatttttg

SEQ ID NO: 1225 - DNA, 762 bp, Parechovirus B
  source 1..762: mol_type = genomic DNA
ttgaaaggggggccctgtggccaattttggccacagggttcccctggtggggtgggtacacttctcgctcgatgagtgggggtgtggctcattgcccacacctggttggttcccaggttcatacaataaccatcaataaacttttaacatctaagatagtattatcccatactagactggacgaagccgcttggaataagtctagtcttatcttgtatgtgtcctgcactgaacttgtttctgtctctggagtgctttacacttcagtaggggctgtacccgggcggtcccactcttcacaggaatctgcacaggtggctttcacctctggacagtgcattccacacccgctccacggtagaagatgatgtgtgtctttgcttgtgaaaagcttgtgaaaatcgtgtgtaggcgtagcggctacttgagtgccagcggattacccctagtggtaacactagcctctgggcccaaaaggcatgtcatttgaccactcaggtacacaaccccagtgatgcacacgcttagtaatggcttagtaacaaacattgattgatcatttgaaagctgttaggaggtttaggtatgacgggctgaaggatgccctgaaggtacccataggtaaccttaagcgactatggatctgatcaggggcccaccatgtaacacatgggtagaagtcttcggaccttgggttaaaaaacgtctaggcccgccccccacagggatgtggggtttcccttataaccccaatattgtata

SEQ ID NO: 1226 - DNA, 762 bp, Enterovirus A
  source 1..762: mol_type = genomic DNA
tacaaaaaagcaggctttaaaacagcctgtgggttgttcccacccacagggcccactgggcgctagcacactgattctgcgggatctttgtgcgcctgttttataacccctcccctaagcagtaacttagaagcttcacactattacgaccaatagtaggcgtggcgcgccagtcacgttttggtcaagcacttctgtctccccggactgagtatcaatagactgctcacgcggttgaaggagaaaacgttcgttatccggctaactacttcgagaaacctagtagcaccgtgaaagttgcggagtgtttcgctcagcacttcccccgtgtagatcaggtcgatgagtcactgtgaaccccacgggtgaccgtgacagtggctgcgttggcggcctgcccatggggtgacccatgggacgctctaatacagacacggtgtgaagagtctattgagctagttagtagtcctccggcccctgaatgcggctaatcctaactgcggagcgcgcaccctcaatccagggggccagcgcgtcgtaatgggtaactctgcagcggaaccgactactttgggtgtccgtgtttccttttattccttattggctgcttatggtgacaattgaaaagttgttaccatatagctattggattggccatccggtgaccaacagagctattgtttacctgtttattggatacgtccctctcaatctcaaagccattcaaactcttgattacatattacttcttaactgtaagaa

SEQ ID NO: 1227 - DNA, 766 bp, Aichivirus A
  source 1..766: mol_type = genomic DNA
tttcacaccctcttttccggtggtccggacccagaccaccgttactccattcagctacttcggtacctgttcggaggaattaaacgggcaccctacccaagggttacatgggaccatattcctcctcccctgtaactttaagttttgtgcccgtattcttgactccaggcggatgttgtgtcgcccgtcctgtgaacaaacagctagacactttcctcccctccctctgggctgctccggcagtccactccctccccccagcgtaacatgccccgctggagtgatgcacctggaagtcgtggacgtgggttagtaacttcggtgaaaacccactataatgacaactggttgacccccacactcaaaggactcgagtctttctcccttaaggctagcccggccacatgaatttgcagctggcaactagtgagtccaccatgtcccgcaacctcggctgcggagtgctgttccccaagcgtatgccttccttctgtaagagtgcgcctggcaagcacatctgagaagtcgttccgctgcgtcgtgccaacctggcgacaggtgacccagtgtgcgtagacttcttccggattcgtccggctcttctctaggaaacatgcgtgtaaggttcatgtgccaaagccctgcgcgcggtgttcttctactgccctaggaatgtgccgcaggtacccctacttcggtagggatctgagcggtagctaattgtctacgggtagtttcatttccatcttctcttcaggtcgacatc

SEQ ID NO: 1228 - DNA, 768 bp, unidentified
  source 1..768: mol_type = unassigned DNA; note = unclassified environmental samples sequence
tatttgtttatttatcacaataagcattacatgagtttgtttaataacatactctgcaaatttattgtaggtgtttagagattaaaccaatctcttttcatttacaaaaccaataagtttgtaaaatagtaaaatttttagccattctgattcaggaatcaaaactgatgtaccactatctgtattttgtgaaaaatcaaaacgacagtagactagaaattactttgtatctaggaatctgtgtctaacgacgatagttaggaacgtgttgcacatttcatgtgcaggcctttatcactaggtctttattaaaaaagtggttgcaagttgtaattgacaacatgtgtttagttaagtttacttctattcatgattatcagggatctccttatcccgctattattagcaaaaggagccttgcaggttataccgacctgcatatgaagcctctacattaatttgtaatttttgtaggaaactgagagggaaagtggcataaccctcgtcctcgcggcgtataatgattcttcggaagaatacgacgtaacccagccgtcacaggtgcccattctctgggattgcatgcttgcatgtcgttctaggatttttcaggaacatttttgagctatagtagtttagatacgctatttgcaatgatgaaactacctagggtgggattatgagaaattcaactttgatctatttttcacaataggttgaggttggattttctcgtatttgggtttggggggtatactatttcaaatc

SEQ ID NO: 1229 - DNA, 769 bp, unidentified
  source 1..769: mol_type = unassigned DNA; note = unclassified Gallivirus sequence
ttgaccccggtatttctccgtctaaattagacggttcttttatatcccagtgcctgaagctggcactgtgaggttagtctactaaccaaggcttccgtgcagggcttgcacgttaggagttcatgttgattcatgctccaatgcccaaaactttgtgtgtttgtctgtgtctttcccaaagttcttcctaaggtttcggtactcaagccttaatctctggtcccagcttttgggccttagtatccagagaatgtacccgtgcttcgatgaacgtaagaaagctgtcttttaccgaaaaattttaatgaaataagtataactggctcgcgccacctggtgtgtgccgttggaattcccccatggtaacatggtccaacgggcccgaaaggctagtgggcaatcggtcctccaaggaaggggttcccaccccgacctgaacaggattcgatgaagctcacctcccaggctcctaaccccaaggaagtttacttaaagtaattaagatctagtacgtaattgctggcaattttgctagtagttgggaacgttatgacctaatgagtagacccccagaaggtaccccattttatgggatctgatctgggccctatactgtgtgtctccccacatatagggttaaaacaatgaaagttaggtccaaaatattcttttctttttattctttctttagtggtgacgccattatatcagcaatttgctgatgttttatagcgtacgcggcgatacgaacgattcatcactagagaaa

SEQ ID NO: 1230 - DNA, 770 bp, Aichivirus B
  source 1..770: mol_type = genomic DNA
cacccacttttccggcggcgcacgttcgcgtcgtcgtaagtctggactcccaaggccaactcggttcaacttcggtttccggacaaatacaagaacctcagtcctcttggtactttctcgcctgagtcaacaaagcgagaaacctgcccctctaacgccagacgagcggcatgaaacttgaacttctggcatgttccactttccctctccctcaccccaccccaccgcgctctcaaggtcgcgctcttccgggactagcccggttttaaaagttcctggcaccctttgcccctctaggcccttaaggtaggaactgaccttgtgctgtgatctcggtgcggaagtgctactgcgtagtgattgtaagatccctttgtggttctgccctggcaaggctacagagtactgtgatccgctgcggacgccatcctggtaacaggacccccagtgtgcgcaacagtatgtccacggtcttccgtgttcaccacattcggaacactgctctcgtgaaacagtgtgtgtccaatccctgtgaccagtattaaccacaccacctaggaatgctaggaaggtaccccggttcgccgggatctgatcctaggctaattgtctacagtggtgctccttttattttcccctcacttcattgactacaactgcttgatttccgtgtttgctgctcttcttagctctcactgccattctcaagtgttcacactgtccaagctcctttggttgtttgcctccacttgccactgtcaactcttgtc

SEQ ID NO: 1231 - DNA, 770 bp, unidentified
  source 1..770: mol_type = unassigned DNA; note = Coxsackievirus A10 strain 15-2711-1, complete genome.1 sequence
cacgtgagtgttgctcttacgtgtgctattccattctgtgggttgttcccacccacagggcccactgggcgccagcactctgattccacggaatctttgtgcgcctgttttataacccttccccaacttgtaacgtagaagtaatacacactacagatcaatagtaggcatggcgcgccagtcatgtctcgatcaagcacttctgtttccccgggctgagtatcaatagactgctcacgcggttgaaggagaaaacgtccgttacccggctaactacttcgagaaacctagtagcaccatagaagctgcagagtgtttcgctcagcacttcccccgtgtagatcaggctgatgagtcactgcaacccccacgggcgaccgtggcagtggctgcgctggcggcctgcctatggggcaacccataggacgctctaatgtggacatggtgcgaagagtctattgagctagttagtagtcctccggcccctgaatgcggctaatcctaactgcggagcacatgcctccaatccaggaggtggtgtgtcgtaacgggtaactctgcagcggaaccgactactttgggtgtccgtgtttctttttatctttatattggctgcttatggtgacaatcacggaattgttgccatatagctattggattggccatccggtgtctaatagagctattgtgtacctatttgttggatttactccactgtcatataaatctttgaacactttgtgctttatattgaacttaaacacacgaaa

SEQ ID NO: 1232 - DNA, 773 bp, unidentified
  source 1..773: mol_type = unassigned DNA; note = unclassified Sapelovirus sequence
gtggggtacatgcgttttaaggaacgcatgtatctcacactcatttctccccctcgcccccacaggcaacccccaccccttctcttacgggagttagggttaaggatctagtggtcaggcgttgtatcctcttacctttacccaccccacccacacggactggttaatggttttagactgaggttgtggatctgatttcaaatctgttacccattcagaggaaaaatggagtcatacattctggatttgacttgatatgaccaagagttaacaccttgcgtgttggccgtatggaatgttttaaggctactctatggattatgatttcagggttggccgcccaggataaaaggcaattgtggtaagtgatgttagtcattggtagttgaaagctgcccaagacatccgaggtctacgctttgcgggccggagtaagcttgggaacaacagtgagtatgctattttttgctttcacccaacacgaccgtgcatgaaagagctagaggcatctggaggcaaagggaaaagaatttcttatcccgaatgttcattcgagtccttgacgagtgcatccctactgtcccgtaggtgaggtgtatggcgcatgctcatggcattactccaaggtgtatctgtgaggggggggcccctcacacttagtctagtgctacctgacagggttgcggctggtcatttatgcatggtataaccagtagtaatcccccatggattgctttaactccccctccccccttacaaagacattctctaag

SEQ ID NO: 1233 - DNA, 773 bp, unidentified
  source 1..773: mol_type = unassigned DNA; note = unclassified Enterovirus sequence
ggcgtcagtacactggtacgtcagtacctttgtacgcctgtttttccctcccttaaataaattaagatcaccactactgaggggagtagtccgactccgctccggtaccgccgcaccagtattccggtacgcctagtaccctaatacggagtagatggtgtccctcacccgaaacttagaagaaagtaaactacccgaccaataggagcgcggcatccagtcgcgtatcggtcaagcacttctgtttccccggtctgcatagatcgttacccgcccgacccactgcgagaagcctagtagctggccaagcgaatgcgaggttgcgctcaaccacaaccccagtggtagctctggaagatggggctcgcaaactcccccgtggtaacacggttgcttgcccgcgcgtgcttccgggttcggtctcacgccgttcacctcaacctcgcgtaaccagtcaagagcttattgcgctggggcggttctcctccggggccgtgaatgctgctaatcctaacctctgagcgtgtgcgcacaaaccagtgttgctacgtcgtaatgcgcaagttggaggcggaacagactactttcggtaccccgtgtttcctttaattttatatttcaatttatggtgacattgactgacatttgccaagttgctcggttacctctgaacattgctttgtattatctgatagctttctacaaaaccacccagctttcacttgaactcattgagtttgtagtttatttgaaccaagcacacaaattctacg

SEQ ID NO: 1234 - DNA, 774 bp, unidentified
  source 1..774: mol_type = unassigned DNA; note = unclassified Enterovirus sequence
tattttccaggtggaatggggatgcaggcctgagttgtttttgcccccaaggaataaatcaatattcccagagccgaggggagtagtccgactccgctccactacggtgctccagtagattgctattgcggtagctctctacggggtggctggtattcctcaccctgaaacttagaagtttgtacacaccgaccaatagcggtctggcagccagccaggcaacggtcaagcacttctgtttccccggtccgcaaggatcgttacccgcccgaattgctacgaaaagcctagtaagtacccaagtttgtgcgaggttgcgttcagccacaatcccagtggtagctctgagtgatggggctcgtgattacccctctggtgacagagacacttgcccgcgcgtgcacttgggttcaccagaaatggtgttcacctcaatcaagcgcaagtactgaagagccaattgtgccaatttggtctcctccggggccgtgaatgctgctaatcctaacctccgagcgtgtgcgcacaatccagtgttgctacgtcgtaacgcgtaagttggaggcggaacagactactttcggtaccccgtgtttccttattttattcatttaaatttatggtgacaattgttgagatttgtgagctagcaaaattaccattgaatttggcattgtactgtctcattgcttttcacaaaacctcagatatcccacccagttacattgatcttttagttcatttgaatttacagttcaaactgagacaagtaaa

SEQ ID NO: 1235 - DNA, 775 bp, unidentified
  source 1..775: mol_type = unassigned DNA; note = unclassified Hepatovirus sequence
ttgaaaggtggccggagggtttcttgaagccctccgacgcctttcagcgcccggttcacaggggtgtaagtactgtgggcccgtttgccgtgggatacggctgcctgtgtctcaggggtaagtactggggccgtgttaaccgtgcgttacggttttgcttttagattaggatgtccgactgtccggcactctcttttgcttaaaatggccttaaatccatgggaggcgtaaccatgggccctttgttacctagacatgattgcattgggggccgtccttggggcttcggccccagccaatttcccttgactcgtctaagagtttgtttcatccttttcttttcttttattttccaggctctcggcatgccaacggctctgaccactgcgcccggtggggttaaccacacgactagcgtgtggctgtaggagttaaaagtgccgacaggccaattctgacgtaagttcattctatgttaacttgaccacgtaaggttgactgatctttgtgagagggtaggctacgggtgaaaccctctaggttaatactcatattgagagatacctccagaaggtgaaggttggcggatattggtgagttcttttaggacaaaaacctttcaacgcctgtgggcccacctcactggcacaatgctttcatccccaattgtgatgggtagtttggactgaaatcaggagtaacctgccctacgagtttaggggtagttcaggggtatttaggcttccacatttgatagagtttatgagagtgagcc

SEQ ID NO: 1236 - DNA, 775 bp, unidentified
  source 1..775: mol_type = unassigned DNA; note = Coxsackievirus A4 isolate 06/Taian/SD/2017, complete genome.1 sequence
tttcaaaagaatattaggaggggggggttttaaaacagcctgtgggttgtacccactcacagggcccactgggtgctagcactctgattctgcggaacctttgtgcgcctgttttaaaacccccccctcaattcgtgatttagaagtaatgcacaccattgatcaacagcaagcgtggcgcaccagccatgttcagatcaaacacttctgtttccccgggctgagtatcaatagactgctcgcgcggttgaaggagaaaacgctcgttacccggctaactacttcgagaaacctagtagcaccattgaaactacagagtgtttcgctcagcactttccccgtgtagatcaggtcgatgagtcactgcaatccccacgggcgaccgtggcagtggctgcgttggcggcctgcctatgggcttgcccataggacgctctaaagtggacatggtgtgaagagtctattgagctagttagtagtcctccggcccctgaatgcggctaatcctaactgcggagcgcatgccctcaatccagggggtggtgcgtcgtaacgggcaactctgcagcggaaccgactactttgggtgaccgtgtttccttttattcttatattggctgcttatggtgacaattgagagattgttaccatatagctattggattggccatccagtgtctaacagagcaatcgtatacttatttgttggattcatcccactatcatacatatccattaacaccttatactatattataagattgaacacaagaaa

SEQ ID NO: 1237 - DNA, 776 bp, Cadicivirus B
  source 1..776: mol_type = genomic DNA
agaaaaggccccccggggggataccgtctatggtatctctacgaggtcttttcgaacactccacatcatgagtgtataataaactgatgacctttaaatttcaccaacccttgacctgtaatgtcagtggacagagtgctcctctgttcccggttaccgtgttccaggacacgattgtaatcctgcgcctcaccagcgctgcgtgcacgtctgcataaggaaacgtgccttccccatgtctctatcaattctttggtgagtgaccgccctagttgctcatcctatgggattcttctctcatgggttctttgtggcatgcgaatgtcaccttaattggaggtctttaattagatatcctttcttcatctttgatatgagtgtcggaatttgattcctagtctctgcaaaacaaccccacttgatgaattcaacttttcaaccgcacaaacataatcaggtttttaaattgaatgtttctaaattctaaatttagtttatttaagtagtttgccatcttgactcgatgtaaaattgtcatacaagtcttcttttcttttctttacactttgaagtttgcacttagcagtcgttctgcacagctttcgagttttgtttgatcgacatcgcaacttccacccacctctctttttctagtgttgaatgcggctaatcctaacccgagagcaataaacccaggtttattgtcgtaacgcgcaagtcttggacggaaccgactatacacacacctctttaccctttagtacacccttggtacg

SEQ ID NO: 1238 - DNA, 776 bp, unidentified
  source 1..776: mol_type = unassigned DNA; note = unclassified Picornaviridae sequence
tgaaatggcctgggggtagcatgtacgctaaggcgtgcatgttactcccagaccatttctccccaccccctcaccttgccttttccccctcatttaatttttgtcgtaagtggcatcgacaaccacacaatttaaggagaggggcagccgtggaaactaaaagaccctaattggtatcttaatgtgctaaagccttgttctgaagaggggttccccaggccccatagtaggatcttggtgttccacattaagctctaccgaccacacatccaaacgataggcggtgtaagggctctctagctaagtgtttactcattgctagggaagtgttgcgacccgttatcaatagggatacaggaggtcttagttgcctaaccagataaagtggtgctgaaatattgcaagctcaatgtctggcgaacgacggactaccgttgaactgttgttaacgcccatatgtgtaggcaacatatgggttagtaggtcacttacattgacatccgtgccgggaaagcggatctgagctatcgattgcctgatagggtgccggcgggcgcggtacgtgtggtatagtccgctgttttggggtatggcgtctactcggttttgttgtcgtttcggaatgtcccatgtcggagatgtcgttaccggtgtttgttttacttgtgcacggataaggaagcaaagtttggagttctggaagctaatggataacattaagtttccgttgcgttcttcgtgcattttgggccagaaaatcgaccacaaaatcgaga

SEQ ID NO: 1239 - DNA, 779 bp, unidentified
  source 1..779: mol_type = unassigned DNA; note = unclassified environmental samples sequence
aataaggtatgctgtttatttattaaacagtgtatcttattttgccctcatcgagagttggaggttaactaacatcctttgccacatggagtctctgtggttggttccctggccatgtatttttacaaaacagatgtgccctttgcagcttatgcaattttcggttgtttccccttttgttcgcaagattgtctcttcatttgagattttgacgttttcactcgtagtactatatgagagtgatttattacattttattttgttagcaagattggtttagttccgtcttttcttagcggagttgcacacttttctttattgctaattgcattcaccctttactggtttttcctactagttcagatcattgcaatttgttaatttccttgtctgtttggcgacccccttagtagagaggttatgatgcatcaagtgaattatgaaacagggtgtctatttaagcatttgttcttaattacgttttctttgaaaaccatttcggtggtttggcttgaattggtccctagtcacgtagttggaatgtattaagtttatttatagtcccagtgttcacggtgtttttgatcctttttgaacgggattgtacccgttcagataattcagaatttagcaaagggatttgtaatttgttccctttattggttttacaccgagacaactaccggtgacctggacatcgacaacacatcctaggggaatggcatcaccttacgagccaccacaactaaaacacaaatatacattacaatttaattatt

SEQ ID NO: 1240 - DNA, 787 bp, Enterovirus A
  source 1..787: mol_type = genomic DNA
gtcaacacggtgttgtcggtattgtgtctaccggtggtaatgggcttgttggcttcgcagtgttcccacccacagggcccactgggcgccagcactctgattccacggaatctttgtgtgcctgttttacaaccctttcctaatttgtaacgtagaagcaatatacactactgatcaatagcaggcatggcgcgccagtcatgtctcgatcaagcacttctgtttccccggactgagtatcaatagactgctcacgcggttgaaggagaaaacgttcgttatccggctaactacttcgagaaacctagtagcaccatagaagctgcagagtgtttcgctcagcacttcccccgtgtagatcaggctgatgagtcactgcaatccccacgggcgaccgtggcagtggctgcgctggcggcctgcctatggggcaacccataggacgctctaatgtggacatggtgcgaagagtctattgagctagttagtagtcctccggcccctgaatgcggctaatcttaactgcggagcacatgccttcaacccaggaggtggtgtgtcgtaacgggcaactctgcagcggaaccgactactttgggtgtccgtgtttctctttatccttatattggctgcttatggtgacaattacggaattgttaccatatagctattggattggccatccggtgtctaatagagctattgtgtacctatttgttggatttactccgctatcatataaatctctgaacactttgtgctttatattgaacttaaacacacgaaa

SEQ ID NO: 1241 - DNA, 797 bp, unidentified
  source 1..797: mol_type = unassigned DNA; note = Kobuvirus sheep/TB3/HUN/2009, complete genome.1 sequence
tttgaaaagggggtgggggggcttcggccccctcaccctcttttccggcggcgcaagttcgcgtcgtcgtaagcctggacacccatgttcgcatcggtctccgggcaaatacaagaaccccagaccttctggtacttcttcgcctgggtcacaaaagcgaagaacctgcctctctaacgccagacgagcggcattaaacttgaacttctggcactctccactctcccttttccctgtccctttccccactgcgctctcaaggtcgcgcaatcctgggactagcccagttttaaaagttcctggcaccctttgcccctctaggcccttaaggtaggaactgaccttgtgctgtgatctcggtgcgggagtgctaccacgtagtcatcgtaagcctcgtttctggttctgccctggcaaggctacagagtaccgtgttccgctgtggatgccatccgggtaaccggacccccagtgtgtgtagcggtatgttcacggtccgccgtgttcaccagattcctgacctggctttgctagaaatggtgtgtgcccaatccctgtgaccagtatcaattacatcacctaggaatgctaggaaggtaccccagtcctgagctgggatctgatcctaggctaattgtctacggtgatgctccttttattttcttacaactgctattgactgtctgattgctgattctgctcttgtgctcttctgctctggctcattctcaagggttctctttgtccaagatcctttggttctctccttgttccacttgccactgccaacgcttgtc

SEQ ID NO: 1242 - DNA, 798 bp, unidentified
  source 1..798: mol_type = unassigned DNA; note = unclassified Enterovirus sequence
gggttgttcccaccccagggcccactgggcgccagtacactggtacgctagtaccttggtattacggtaccattgtacgccagtacctttgtacgcctgttttatattccctacccccacatgtaactttagaagtttaagtaacaaagaccaataggagtccaacatccagttggattgcggtcaagcacttctgtttccccggacctagtagtgataggctgtacccacggccgaagatgaacccgtccgttatccggccagctacttcgagaagcctagtagcatcaaagatctgtcttggcgtttcgctcagcgcgttccccccgcgtagatcgggctgatgggtctccgcattccccacgggcgaccgtggcggaggccgcgtggcggcccgcctatggcgaaagccataggacgccatttcagtgacagggtgtgaagagcctattgagctagttggtagtcctccggcccctgaatgcggctaatcctaaccactgagcgtccaccagcaaaccagctgggagggcgtcgtaacgggtaactcggtggcggaaccgactactttgggtgtccgtgtttccttttgatcctattgtggctgcttatggtgacaacttacagttgttatcataaagcttttggattggccatccggaaaaagttatcagtgtttgatattgttcggctttcacgcctaccaataagacaatcactttacttgttagttgcattttatcccactaaggatatcactgagttacatcttcaattgctcctaacattatcagcaca

SEQ ID NO: 1243 - DNA, 798 bp, unidentified
  source 1..798: mol_type = unassigned DNA; note = unclassified Enterovirus sequence
gggttgttcccacccgcggggcccactgggcgctagtacactggtacgccagtaccttggtattacggtaccattgtacgtcagtacctttgtacgcctgttttatatcccttcccccacatgtaacattagaagtcaagtaaacaaagaccaataggagcccaacaaccagttgggttgcggtcaagcacttctgtctccccggacctagtagtgataggctgtacccacggccgaagatgaacccgtccgttatccggccagctacttcgagaagcctagtaacatcaaagatctgtcttggcgtttcgctcagcgcgttccccccgcgtagatcgggctgatgggtctccgcataccccacgggcgaccgtggcggaggccgcgtggcggcccgcctatggcgaaagccataggacgccatttcagtgacagggtgtgaagagcctattgagctagttggtagtcctccggcccctgaatgcggctaatcctaaccacggagcatccaccagcaaaccagctgggagggtgtcgtaacgggtaactctgtggcggaaccgactactttgggtgtccgtgtttccttttgatcctattttggctgcttatggtgacaacgataagttgttatcataaagcttttgggttggccacctggaaaaaattgtcagtgtttgatatcgctcggctttcacgcctaccagtcaaacaagctctttatctccttgttggattctactcaataaaggacataactcagtttcacataaatctgttgctttcattgtcagcaaa

SEQ ID NO: 1244 - DNA, 800 bp, unidentified
  source 1..800: mol_type = unassigned DNA; note = unclassified Enterovirus sequence
ggggttgtacccacccctggggcccacgtggcgccagtaccctggtacgttagtacctttgtacgcctgttttccccccccttaaacaaattaagatcgctggtcctgtggggagtagtccgactccgcaccgatacgtcgcaccagcactccggtacgcctagtaccctagtgcggaggtaccagtgtccccccccctcgaaacttagaagcaatgaaccaaaccgacccaaaaggatgcgttgcacccagcagcgtaatggtcaagcacttctgtttccccggccgcaaggtcgttatccgcccgcaccactacgagaagcctattaggcagccaagcttgcaaagcgttgcgttcagccacaaccccagtggtagctctgagagatgggactcgttgttcccccatggtaacatggtgacttgtccgcgtgtgctctcgggttcgccatcaggcgttcacgctgcacaagtgtaactgctgaagagcctattgtgctggagcggttttcctccggaaccgtgaatgctgctaatcctaacctctgagcgtgtgcgcacaaaccagtgttgctacgtcgtaacgcgtaagtcggaggcggaacagactactttcggtactccgtgtttccttattttatatcgtttcatttatggtaacaattactgagattttaaagattgccaagctgcccttaaacattggtttgtattatctagttgcattttataaaacctctgagctttcacttgaattgattgatttcttagtctttctaaacaagcataaattgaggaca

SEQ ID NO: 1245 - DNA, 801 bp, unidentified
  source 1..801: mol_type = unassigned DNA; note = unclassified Enterovirus sequence
cctgtgggttgtacccacccacagggcccaccgggcgccagtacactggtacgccagtaccatggtattacggtaccatgttacgtcagtacctttgtacgcctgttttatatcccctccccgaagtaaccttagaagtttaagtaacaaagaccaataggagtccagcaaccagctggattgcggtcaagcacttctgtttccccggacctagtagtgataggctgtacccacggccgaagatgaacccgtccgttatccggccagctacttcgagaagcctagtagcatcaaagatctgtcttggcgtttcgctcagcgcgtttcccccgcgtagatcgggctgatgggtctccgcataccccacgggcgaccgtggcggaggccgcgtggcggcccgcctatggcgaaagccataggacgccatttcagtgacagggtgtgaagagcctattgagctagttggtagtcctccggcccctgaatgcggctaatcctaaccacggagcgtccaccagcaaaccagctggcggggcgtcgtaacgggtaactctgtggcggaaccgactactttgggtgtccgtgtttccttttgatcctattttggctgcttatggtgacaacaataagttgttatcataaagcttttgggttggccacctggaaaaagttatcagtgtttgatattgttcggctttcacgcctaccaacaaaacaagccttatatttattggttgccttttgtcccttggcggaaattactgattttcacctaaagcttctgattacattgacggcaaa

SEQ ID NO: 1246 - DNA, 803 bp, unidentified
  source 1..803: mol_type = unassigned DNA; note = unclassified Kobuvirus sequence
ttgaaaagggtgtggggggggataccctccccctccacactcttttcgacggcgcgcctcggcaaggccgccgataccgcactgtgctacttcggtaccactctgcgggaatgacaatatgcccggtgtatagtttgcctgtttctcgcaccgttaccgctcgttcgggaatgtgaaactggcacccctcctctcccctaccaccctttctccttcgcccccattcataatttacaacgccgcacacagcggcggccgccaagggctagcctggcggttataaaaggaacctgggtctttccctcttcaagccaaaaggtaggttccctgtgtccctgaatgctcggtgaggaatgctgcaccgtaacgctttgtgaagtgtttgcaagttctggcccggcaagcctacagagtgctgtgatccgctgcggacgccatcctggtaacaggacccccagtgtgcgcaacagtatgttcagacttcggtttgttcacttgctttcatggaccattgcgcgaaagtgcgtgcgccatatccctgtacttcaggtgtgcttctctggaccctaggaatgctgcgaaggtaccccgtttcggcgggatctgatcgcaggctaattgtctatgggttcagtttcctttttctttactccacaattgactgcttaactgactctggatcttgtgcttccactgctctttctgctctcaaaacggcttcacttaccaactctcacctttcgaccaacaccatttacacactaacttttttcgactcttctgactcctggcttggtgaagac

SEQ ID NO: 1247 - DNA, 804 bp, unidentified
  source 1..804: mol_type = unassigned DNA; note = unclassified Enterovirus sequence
ctgtgggttgttcccacccacagggcccactgggcgctagtacactggtatgcctaacctcggtattacggtaccgttgtttacagtacctttgtacgcctgttttatatcccctccccacaagcaactttagaagtatcaagcaaataaggaccaataggagtccaacacccagttggatcatggtcaagcacttctgtctccccggacctagtagtgataggctgtacccacggccgaagatgaaaccgtccgttatccggccagctacttcgagaagcctagtagcatcaaagatctgtcttggcgtttcgctcagcgcgttttcccccgcgtagatcgggctgatgggtctccgcataccccacgggcgaccgtggcggaggccgcgtggcggcccgcctatggcgaaagccataggacgccatttcagtgacagggtgtgaagagcctattgagctagttggtagtcctccggcccctgaatgcggctaatcctaaccacggagcgtttaccagcaaaccagctggcggaacgtcgtaacgggtaactctgtggcggaaccgactactttgggtgtccgtgtttccttttgatcctattgtggctgcttatggtgacaacttacggttgttatcataaagcttttggattggccatccggaaagagttatcagtgtttgatattgttcggctttcacgcctaccattaagacaatcactttatttgttagttgcattttatcctgccaaggacattactgagtttcacctacaactttactcatacaattacatcaagt

SEQ ID NO: 1248 - DNA, 808 bp, unidentified
  source 1..808: mol_type = unassigned DNA; note = unclassified Kobuvirus sequence
tttgaaaagggggtgggggggcttcggccccctcaccctcttttccggcggcgcatgttcgcgtcgtcgtaagtctggattcccaaggcccactcggttcaacttcggtttccggacaaatacaaagaacctcagtcctcttggtactttctcgcctgagtctacaaagcgagaaacctgcccctctaacgccagacgagcggcataaaactcgaacttctggcacgttccaccaccccttctcctatcccaacccccattgcgctctcaaggtcgcgcttttccgagactagctcggattcaaaaagttcctggcaccctttaccccttcaggcccttaaggtaggaactgaccttgtgctgtgatctcggtgcggaagtgctactgcgtagtgattgtaagatccttttgtggttctgccctggcaaggctacagagtgctgtgatccgctgcggatgccatcctggtaacaggacccccagtgtgcgcaacagtatgttcacggtcttccgtgttcaccacattcggaacactgctttcgtgaaacagtgtgtgtccaatccctgtgatcagtatcaaccacaccacctaggaatgctaggaaggtaccccggttcgccgggatctgatcctaggctaattgtctacggtggtgctcctttttattttccacttcaactcactggttacaactgcttgatttctgtgtttgctgcttttctctgctctcactgccattctcaagtgttcacactgtccaagctcctttggttgttcgcttccacttgccactgtcaactcttgtc

SEQ ID NO: 1249 - DNA, 809 bp, Enterovirus G
  source 1..809: mol_type = genomic DNA
ttaaaacagcctgtgggttgttcccacccacagggcccactgggcgctagtacactggtatgccttacctcggtattacggtaccgatgtatatagtacctttgtacgcctgttttatatccctcccccacatgtaaccttagaagtttacacaaacaaagaccaataggagtccaacacccagttggattgcggtcaagcacttctgtttccccggacctagtagtgataggctgtacccacggccgaagatgaacccgtccgttatccggctacctacttcgggaagcctagtaacattctgaagtctctgaggcgtttcgctcagcacgaccccggtgtagatcgggctgatgggtctccgcataccccacgggcgaccgtggcggaggccgcgttggcggcccgcctatggcgaaagccataggacgcctcttagatgacagggtgtgaagagcctactgagctgggtagtagtcctccggcccctgaatgcggctaatcctaaccacggagcgtccaccagcaatccagctggcagggcgtcgtaacgggcaactctgtggcggaaccgactactttgggtgtccgtgtttccttttgatcctattttggctgcttatggtgacaacgataagttgttatcataaagctcttgggttggccacctggaaaaagttatcagtgtttgatattgttcggctctcacgcctaccaataagacaagccctatatttacttgttgcattttactcgtcagaagaaatcacagagtatcatttggatttgttactcacattaaggacaag

SEQ ID NO: 1250 - DNA, 809 bp, unidentified
  source 1..809: mol_type = unassigned DNA; note = unclassified Enterovirus sequence
gggggttgttcccacccctggggcccacgtggcgccagtactctggtacgttagtacctttgtacgcctgttttcccctcccttaaacaaattaagattaccactactgaggggagtagtccgactccgctccagcactgctgcaccagtgaattggtacgctagtacctctgcacggagtagatggtatcccccccccgaaacttagaagtttgcaacaaacccgaccaataggtgcgtggcatccagctgcgtaaaggtcaagcacttctgtttccccggtccacaaggatcgttacccgcccaacccactgcgagaagcctattaactggccaaacaactgaagagttgcgctccgccacgacccctgtggtagctctggaagatggggctcgcacttcccccgtggtaacacggttgcctgcccgcgcgtgcttccgggttcgacctagtgtcgttcactccaaagttgcgtaaccagccaagagcctattgcgctgggatggttttcctccggggccgtgaatgctgctaatcctaacctccgagcgtgtgcgcacaaaccagtgttgctacgtcgtaacgcgtaagttggaggcggaacagactactttcggtaccccgtgtttcctcttatttttatataatattttatggtgacaattgctgagatttgtgatttggccaccctaccattgaatattgctttgtattatctggttgcatttcataaagcttcagaaatacctgcttcctatatcgatctacttgtattcctcaatttaaagcacaaattagagaacataag

SEQ ID NO: 1251 - DNA, 811 bp, Enterovirus G
  source 1..811: mol_type = genomic DNA
ttaaaacagcctgtgggttgttcccacccacagggcccactgggcgctagtacactggtatacttagcctcggtattgcggtaccggtgtatatagtacctttgtacgcctgttttatgtcccctcccccttaagtaacattagaagtttgaacaaacaaagaccaatagaggtccaacatccagttggattgcggtcaagcacttctgtctccccggacctagtagtgataggctgtacccacggccgaagatgaactcgtccgttatccggctatccacttcgggaagcctagtagcatcaaagctctgtcgaggcgtttcgctcagcacgtaaccccagtgtagatcgggctgatgggcctccgcataccccacgggtgaccgtggcggaggccgcgtggcggcccgcctatggcgaaagccatgggacgcctcttggatgacagggtgtgaagagcctactgagctgggtagtagtcctccggcccctgaatgcggctaatcctaaccacggagcgtccaccaacaaaccagttggcagggcgtcgtaacgggtaactctgtggcggaaccgactactttgggtgtccgtgtttccttttgatcctatgttggctgcttatggtgacaacgataagttgttatcataaagcttttgggttggccacctggaaaacgatatcagtgtttgacattgttcggctttcacgcctaccaacgagaaaagctctttattgctgagttgcattttatccaaaagaggtaataaccaccttccatttacaactcttactcacattatcatcaag

SEQ ID NO: 1252 - DNA, 812 bp, unidentified
  source 1..812: mol_type = unassigned DNA; note = unclassified Enterovirus sequence
ttaaaacagcctgggggttgtacccacccctggggcccacgcggcgccagtactctggttcgattagaacctttgtacgcctgttttcccctcccttaaacaaattaagatctctgccaatgtggggagtagtccgactccgcaccgatacgtcgcaccagcagaccggttcgcttaggacccttctgcggattggtatgagtccctctcccgaaacttagaagtttggacaaaccgaccaataggtgcgtggcatccagccatgttacggtcaagcacctctgtttccccggtcagaaatgatcgttacccgccctacccactacgaaaagcctattaaccattgaaagtgatgaggagttgcgctcagccatgaccccgatggtagctctgagggatggagctcgcagttcccccgtggtaacacggttgcttgctcgcgtgtgcccttgggttcgaccatttggtcgttcactccaaatcatcgtaaatggccaagagccaattgtgctggggaggttttcctccggagccgtgaatgctgctaatcccaacctccgagcgtgtgcgcacaatccagtgttgctacgtcgtaacgcgtaagttggaggcggaacagactactttcggtactccgtgtttccttttattttattattatattaatggtgacactgtttgagatttgcgagattgccaaattgccactcaacattgcactctattatttggtatcattctacaatacctcagaacttacggttgagctcattgatttcctcgtctttttgaataaaaataaattaaagaca

SEQ ID NO: 1253 - DNA, 813 bp, unidentified
  source 1..813: mol_type = unassigned DNA; note = unclassified Enterovirus sequence
taataacagtctatgggttgttcccacccacagggcccactgggcgtcagtacactggtatgccagtaccttggtatcacggtaccattgtacgccagtacctttgtacgcctgttttatattcccttccccatacgtaactttagaagtttaagcaaattaagaccaataggagtccaacaaccagttggattgcggtcaagcacttctgtttccccggacctagtagtgataggctgtacccacggccgaagatgaacccgtccgttatccggccagctacttcgagaagcctagtagcatcaaagatctgtcttggcgtttcgctcagcgcgttccccccgcgtagatcgggctgatgggtctccgcataccccacgggcgaccgtggcggaggccgcgtggcggcccgcctatggcgaaagccataggacgccatttcagtgacagggtgtgaagagcctattgagctagttggtagtcctccggcccctgaatgcggctaatcctaaccactgagcgtccaccaacaaaccagttgggagggcgtcgtaacgggtaactcggtggcggaaccgactactttgggtgtccgtgtttccttttgatcctattttggctgcttatggtgacaacgataagttgttatcataaagcttttgggttggccacctggaaaaagttatcagtgtttgatattgttcggctttcacgcctaccattcagactaactctttatttgcttattgcattttacccatcggaggatattacagacttccatctacaactcttattcacattatcaacaca

SEQ ID NO: 1254 - DNA, 814 bp, unidentified
  source 1..814: mol_type = unassigned DNA; note = unclassified Enterovirus sequence
ttaaaacaggctgggggttgtacccacccccggggcccacgcggcgccagtactctggttcgattagaacctttgtacgcctgttttccccacccttaaataaatcaagatctctgccaatgtggggagtagtccgactccgcaccgatacgtcgcaccagcagaccggttcgcttaggacccttctgcggattggtatgagttcccacccttgtaacttagaagttctcacaaaccgaccaatagcggcgttgcatccagcagcgcaacggtcaagcacttctgtttccccggcgcgtcgcgtcgttacccgcccggtctactacgggaagcccagtatggtcccaattgattgcgcagttgcgttcggccacaaccccagtggtagctctgaggaatggggctcgcccttcccccacagtaatgtggtggcctgcccgcgcgtgtcctcgggttcactcctagagtgttcactgcaattttgagtaagatctgaagagcctactgtgctaggttggttttcctccggagccgtgaatgctgctaatcccaacctccgagcgtgtgcgcacaatccagtgttgctacgtcgtaacgcgtaagttggaggcggaacagactactttcggtactccgtgtttccttattttattcacttattttatggtgacactgactgatatttgtgagtttgctcggctgcccttgaatattgctttgtactatttaatagcatttcatagaaccactcaactttcaattgagcttattgacttcgccgtctttctcaatcagatacacaaaaccacacata

SEQ ID NO: 1255 - DNA, 814 bp, Enterovirus G
  source 1..814: mol_type = genomic DNA
ctaaaacagcctgcgggttgtacccgcccgcagggcccactgggcgctagtactctggtacgctagtacactagcacgttagtgcttttgtacgccagtacctttgtacgcctgttttattttcccttccccacatgtaactttagaagtttagaaacaaacaatgaccaataggagtccagcatccagttggattgcggtcaagtacttctgtttccccggacctagtagtgataggctgtacccacggccgaagatgaacccgtccgttatccggctacctacttcgggaagcctagtaacattctgaagtctctgaggcgtttcgctcagcacgaccccggtgtagatcgggctgatgggtctccgcataccccacgggtgaccgtggcggaggccgcgttggcggcccgcctatggcgaaagccataggacgcctcttagatgacagggtgtgaagagcctactgagctgggtagtagtcctccggcccctgaatgcggctaatcctaaccacggagcgtccaccggcaaaccggtcgggagggcgtcgtaacgggtaactctgtggcggaaccgactactttgggtgtccgtgtttccttttgatcctattttggctgcttatggtgacaacgataagttgttatcataaagcttttgggttggccacctggaaaaagttatcagtgtttgatattgttcggctctcacgccttccaacaaaacaggccttacttcttttaattgcattttatccatcggaggttattacagatttccatctgaagcttcttctcacagtagcagtaaa

SEQ ID NO: 1256 - DNA, 814 bp, unidentified
  source 1..814: mol_type = unassigned DNA; note = unclassified Enterovirus sequence
aaaccagtctgtgggttgttcccacccacggggcctactgggcgccagtggactggtacgccagtaccttggtatcacggtaccactgtacgctagtacctttacacgcctgttttataccccttccccaaacgtaacattagaagtttaacaagcaaagaccaataggagtccaacacccagttggattgcggtcaagtacttctgtctccccggacctagtagtgataggctgtacccacggccgaagatgaaaccgtccgttatccggccagctacttcgagaagcctagtagcatcaaagatctgtcttggcgtttcgctcagcgcgttttcccccgcgtagatcgggctgatgggtctccgcataccccacgggcgaccgtggcggaggccgcgtggcggcccgcctatggcgaaagccataggacgccatttcagtgacagggtgtgaagagcctattgagctagttggtagtcctccggcccctgaatgcggctaatcctaaccacggagcgtttaccagcaaaccagctggcggaacgtcgtaacgggtaactctgtggcggaaccgactactttgggtgtccgtgtttcctgttgatcctattttggctgcttatggtgacaacgataagttgttatcataaagcttttgggttggccacctggaaaaaagttatcagtgtttgatattgttcggctttcacgcctaccattaagacaatcactttatttgttagttgcattttatcctgccaaggacattactgagtttcacctacaacttttactcatacaattacatcaagt

SEQ ID NO: 1257 - DNA, 814 bp, unidentified
  source 1..814: mol_type = unassigned DNA; note = unclassified Enterovirus sequence
ttcaaacagcctgggggttgtacccacccctggggcccacgtggcgctagcactctggtatgcttagtacctttgtgcgcctgttttcccctcccttaaacaaattaagattgccactactgaggggagtagtccgactccgctccggtacagccgcaccagtactccggtgcgcatagcaccctagtacggagtaggtggtatcccttcccgaaacttagaagttatgaaccaaaccgaccaataggagcgtggcatccagccatgttgtggtcaagcacttctgtttccccggtccgcaaggatcgttacccgcccgacccactacgagaagcctattaactggccaagcgattgcgaagttgcgctcagccacaatcccagtggtagctctggaagatggggctcgcactccccccgtggtaacacggttgcttgcccgcgtgtgcttccgggttcggtcaccgaccgttcacttcaatctcgcgtaaccagccaagagccgattgtgctgggacggttttcctccggggccgtgaatgctgctaatcctaacctccgagcgtgtgcgcacaaaccagtgttgctacgtcgtaacgcgtaagttggaggcggaacagactactttcggtaccccgtgtttcttttgatttattttgtattttaatggtgacactgactgacatttgtgagtttgctcgattgcctttgaatattgctctgtattatctaatagcatttcacaagactacccaactttcactcgagcttattgactttgctgtttacttgaaccgcatacacaaactcaaca

SEQ ID NO: 1258 - DNA, 815 bp, Enterovirus G
  source 1..815: mol_type = genomic DNA
taaacagtcagggggttgtacccacctccggggcccacgtggcgtcagtgctctggtgcgttagtacctttgcacgcctgttttcccttcccttaaacaaattaagatcgccagcgccgaggggagtagtccgactccgctccactacggtgctccagtggattgctattacggtagctcttcacggggtggctggtgtccccaaccccgcaacttagaagccagcacagatcgaccaatagcggctcggcagccagtcgggcaacggtcaagcacttctgtttccccggtccgtaaggatcgttacccgcccaggatgctacgagaaacttagtaaacacccaagcttgtgagaggttgcgctcagccacaaccccagtggtagctctgagtgatggggctcgtgactacccctctggtaacagagacacttgcccgcgtgtgcactcgggttcatcagaaatggtgttcacctcgaccaagcgtaagtgttgaagagtctattgtgccagcctggtttcctccggggccgtgaatgctgctaatcctaacctccgagcgtgtgcgcacaatccagtgttgctacgtcgtaacgcgtaagttggaggcggaacagactactttcggtaccccgtgtttcctcattcattatttcaatttatggtgacaattacagagatttgtgaattggcgaaactaccactgaatttggccttgtattgtcttattgccttccacaaaacttctgatattccacccagttatatcgatctcctggtttatctaaatttacaatataaattgaaccagataca

SEQ ID NO: 1259 - DNA, 816 bp, unidentified
  source 1..816: mol_type = unassigned DNA; note = unclassified Enterovirus sequence
ttaaaacagcctaggggttgttcccacccctggggcccacgcggcgctagtactctggtacgtcagcacccttgtacccccgtttttccctcccttaaacaaattaagattaccactactgaggggagtagtccgactccgctccggtactgccgcaccagtactccggtacgtttagtactctagtacggagtagatggtatcccccacccttgcaacttagaaggaatcaaactacccgaccaataggcgcgcggcatccagccgcgttacggtcaagcacttctgtttccccggtccgcaagggtcgttatccgcccgctccactacgaaaagcctagtagccaaccaaacgactgcgaagttgcgttcagccacaaccccagtggtagctctggaagatggggctcgcaatacccccgtggtgacacggttgcttgcccgcgcgtgcttccgggttcggtcatgtaccgttcactttaatgtcgtgtaattggtcaagagcctattgtgctggagcggttttcctccggggccgtgaatgctgctaatcccaacctctgagcgtgtgcgcacaaaccagtgttgctacgtcgtaacgcgtaagtcggaggcggaacagactactttcggtaccccgtgtttcacttatttttactttatattttatggtgacacttgctgatatttgtgaatttgctcgcttgccgttgaacatagccttgtattatttagtagcattttacaacacaagccagctttcagttgaactcattgattttgctgtttacctcaattacatacacaaacacaaca

SEQ ID NO: 1260 - DNA, 816 bp, unidentified
  source 1..816: mol_type = unassigned DNA; note = unclassified Enterovirus sequence
tttaaacagtctgggggttgttcccacccctggggcccacgtggcgctagcactctggtacgctagtacctttgtacgcctgttttccccacccttaaataaattaagattaccactaccgaggggagtagtccgactccgctccggcacagccgcaccagtgcactggtacgctagtaccttttcacggggtagtcggtatccccccccgtaacttagaagcatgtaacaaaccgaccaataggtgcgcggcagccagctgcgttgcggtcaagcacttctgtctccccggtccgcaaggatcgttacccgcccactccactacgaggagcctagtaactggccaagtgattgcggagttgcgttcagccacaaccccagtggtagctctggaagatggggctcgcacatcccccgtggtaacacggttgcttgcccgcgtgtgcttccgggttcagtctccgactgttcacttcaacatcacgcaaccagccaagagccgattgtgctggagtggtcttcctccggggccgtgaatgctgctaatcctaacctccgagcgtgtgcgcacaatccagtgttgctacgtcgtaacgcgtaagttggaggcggaacagactactttcggcaccccgtgtttcctttattttattcttattttatggtgacaattgcagagatttgtgatattgcgactttaccgttaaacatagcactgcattacctggttgcattccacaaaacttcagagattcctagttcctacattgacctacttgtttatttgaatcttaaatacaaacttgagcaagtgaa

SEQ ID NO: 1261 - DNA, 816 bp, unidentified
  source 1..816: mol_type = unassigned DNA; note = unclassified Enterovirus sequence
ttcaaacagcctgggggttgtacccacccctggggcccacgcggcgccagtactctggtacgctagtacctttgtacgcctgttttcccctcccttaaacaaattaagattgccactactgaggggagtagtccgactccgctccgacactgtcgcaccagtactccggtacgcttagtaccctagtacggagtaggtggcatccccaccccgaaacttagaagtatgcaaacaaaccgaccaataggcgcgcggtatccagccgtgtgaaggtcaagcacttctgtctccccggtccgtaaggatcgttacccgcccgacctactacgaaaagcctagtagttggccaagcgagcacgaggttgcactcaaccacaaccccagtggtagctctggaagatggggctcgcagttcccccgtggcaacacggttgcttgcccgcgtgcgcttccgggttcggacttgtgccgttcacctcaaactcgcgtaaccagcgaagagccgattgtgctaggacggttttcctccggggccgtgaatgctgctaatcccaacctccgagcgtgtgcgcacattccagtgttgctacgtcgtaatgcgtaagtcggaggcggaacagactactttcggtaccccgtgtttcctcttattttatttacattttatggtgacactgactgacattcgtgagctagcccgcttgcctctcaatattgcactttattatttggtagcattttacaatactctcgaacttacccttgagcttgttgatttcatcgtttacctaaatcggcttgacaaaggatacaata

SEQ ID NO: 1262 - DNA, 817 bp, unidentified
  source 1..817: mol_type = unassigned DNA; note = Enterovirus E3 polyprotein gene, partial cds.1 sequence
ttaaaacagcctgggggttgtacccacccctggggcccacgtggcgccagtactctggtacgctagtacctttgtacgcctgttttccccacccttaaataaattaagattaccactactgaggggagtagtccgactccgctccgacactgccgcaccagtattccggtacgcttagtaccctaatacggagtagatggtatccccaccccgcaacttagaagcatgcaaacaacccgaccgataggagcgcggcatccagtcgcgtataggtcaagcacttctgtttccccggtccgaaaggatcgttacccgcccaacccactacgagaagcctagtaactggccaaacaaccgcaaagttgcgctcagccacaaccccagtggtagctctggaagatggggctcgcacctcccccgtggtaacacggttgcttgcccgcgtgtgcttccgggttcggcctagtgccgttcactttaaagttgtgtaaccagcaaagagcctattgtgctgggatggttttcctccggggccgtgaatgctgctaatcccaacctccgagcgtgtgcgcacaaaccagtgttgctacgtcgtaatgcgtaagttggaggcggaacagactactttcggtaccccgtgtttccttttattgttatttacattttatggtgacactgactgacatttgtgaatttgctcgcttgcctctcaatattgcactatattacctgattgcatttcacaacactagtaaactaacccttgaacttatcgactttgctgtttacctaagtcacttaaatcacaagtacaata

SEQ ID NO: 1263 - DNA, 817 bp, unidentified
  source 1..817: mol_type = unassigned DNA; note = unclassified Enterovirus sequence
ttcaaacagcctgggggttgtacccacccctggggcccacgtggcgccagtactctggtacgttagtacctttgtacgcctgttttcccctcccttaaataaattaagattgccactactgaggggagtagtccgactccgctccggcactgccgcaccagtactccggtacgcctagtaccctagtacggagtagatggtatcccccccccgaaacttagaagtaatgagtctaaccgaccaataggcgcgcggcatccagccgtgttacggtcaagcacttctgtttccccggtccgcaaggatcgttacccgcccgacccactacgagaagcctattaactggccaagcgtcagtgaagttgcactcagccacaaccccagtggtagctctggaagatggggctcgcatctcccccgtggtaacacggttgcttgcccgcgcgtgcttccgggttcagcctcgcgctgttcacttcaatgacacgtaaccagccaagagccgattgtgctgggacggttttcctccggggccgtgaatgctgctaatcctaacctccgagcgtgtgcgcacaatccagtgttgctacgtcgtaacgcgtaagttggaggcggaacagactactttcggtaccccgtgtttcccttaaatttttccttaaatatatggtgacattgactgacatttgtgagtttgctcgcttgccaatcaacattgcactctattacctaatagcatttcacaatacttgtgaactcacccttgaacttgtcaatttctccgcctatttgaactacttaaatagaaagtataaca

SEQ ID NO: 1264 - DNA, 818 bp, Enterovirus E
  source 1..818: mol_type = genomic DNA
tttaaaacagctcgggggttgttcccactcccggggcccacgtggcgctagtactctggtacgttagtaccttgtacgcctgttttcccctccttaaacaaattaagattaccactactgaggggagtagtccgactccgctccagcactgctgcaccagtgaattggtatgattagtacctcttcacggagtagatggtattcctaccccgcaacttagaagtttattaacaaaccgaccaataggtgcacagtatccagctgtgtaacggtcaagcacttctgtttccccggtccaccaggatcgttacccgcccgacccactacgagaagcctagtaactagccaagtgactgcgaagttgcgctcaaccacaaccccagtggtagctctggaagatggggctcgcacctcccccgtggtaacacggttgcctgcccgcgtgtgcttccgggttcggccttgtgccgttcacttctacgtcatgtaactagccaagagcctattgtgctgggacggttttcctccgggaccgtgaatgctgctaatcctaacctccgagcgtgtgcgcacaatccagtgttgctacgtcgtaacgcgtaagttggaggcggaacagactactttcggtaccccgtgtttcctcttttattatattatttaatggtgacaattgcagaaatttgtgatttagcgactttaccattgcacatagcattatattgtttgattgctttccacaaaacatctgatatacccaactcttatatcgatctacttatctttctttgcttgaagaataaattaaagaaagcacg

SEQ ID NO: 1265 - DNA, 818 bp, unidentified
  source 1..818: mol_type = unassigned DNA; note = unclassified Enterovirus sequence
ttaaaacagcctgggggttgtacccacccctggggcccacgtggcgctagtactctggttcgttagaacctttgtacgcctgttttcccctccttaaacaaattaagatctctgccaatgtggggagtagtccgactccgcaccgatacgtcgcaccagtagaccggttcgcttaggacccttctacggattggtatgagttccccaccccgtaacttagaagtactagcaaaaccgaccaataggagcgtggcacccagctgcgttaaggtcaagcacttctgtctccccggccagaaatggtcgtcacccgccctctctactacgagaagcctattaaccattgaaggcgatgaggagttgcgctccaccacaaccccagtggtagctctgagagatggggctcgcagtcacccccgtggtaacacggttgcttgcccgcgtgtgctctcgggttcggccacttggccgttcactccaactcgttgtaagtggccaagagcctattgtgctagagaggttttcctccggagccgtgaatgctgctaatcccaacctccgagcgtgtgcgcacaatccagtgttgctacgtcgtaacgcgcaagttggaggcggaacagactactttcggtactccgtgtttccttattattttatacaacaatttatggtgacattgactgatactattgagttcgcccgcttgccattgaatattgccttgtattaccttatagcatttcaaaaagccacagatctcaccctcgagctcattcactttgcagtttgtttgaatcgcatacacaagacatttgaac

SEQ ID NO: 1266 - DNA, 818 bp, unidentified
  source 1..818: mol_type = unassigned DNA; note = unclassified Enterovirus sequence
ttaaaacagcctgggggttgtacccacccccggggcccacgtggcgccagtactctggtttgcttagaacctttgtacgcctgttttcccccccctttaaataaattaagatctctgccaatgtggggagtagtccgactccgcaccgatacgtcgcaccagcagaccggttcgcctagaacccttctgcggattggtatgagttcctccccgaaacttagaagcaccgcaccaaccgaccaataggagcgtggcacccagccatgttacggtcaagcacttctgtttccccggtcagaaatgatcgttatccgccctctcccctacgagaagcctattaaccaccgaacgtggtgaagagttgcgctcagccacaatcccagtggtagctctgagagatggggctcgcatttcccccgtggtaacacggttgcttgcccgcgcgtgctctcgggttcagtcttctgactgttcactctgaaccacggtaagtggccaagagcctattgtgctggagaggttctcctccggagccgtgaatgctgctaatcccaacctctgagcgtgtgcgcacaatccagtgttgctacgtcgtaacgcgtaagtcggaggcggaacagactactttcggtactccgtgtttccttattatctattaatcaatttatggtgacactgactgatattgttgagtttgctcgattgcccttgaacattgccttatactatcttattgcattttaatagagccacagagcttactgttgagcttattgactttgctgtttacttgaatcaaatatacgcattagataaac

SEQ ID NO: 1267 - DNA, 819 bp, unidentified
  source 1..819: mol_type = unassigned DNA; note = unclassified Enterovirus sequence
tttaaaacagcctgggggttgtacccacccctggggcccacgcggcgctagtactctggtacgttagtacctttgtacgcctgttttcccctcccttaaataaattaagattaccactactgaggggagtagtccgactccgctccgacaatgtcgcaccagtgcactggtacgctagtaccttttcacggagtagctggtattccctcccgaaacttagaagcacttaaatcaaccgaccaataggcgcgcggtagccagccgcgttacggtcaagcactcctgtttccccggtccacaaggatcgttacccgcccgacccactgcgagaaacctagtagttggccaagtggtaacgaggttgcgctcagccacaaccccagtggtagctccggaagatggggctcgcaccacccccgcggtaacgcggttgcttgcccgcgcgtgcttccgggtccggtctcgtaccgttcacctcaataccacgtaaccagcaaagagtctattgcgctgggacggttttcctccggggccgtgaatgctgctaatcccaacctccgagcgtgtgcgcacaatccagtgttgctacgtcgtaacgcgtaagttggaggcggaacagactactttcggtaccccgtgtttccctatcattccatttcattttatggtgacaattgctgagatctgtgatttggcgaccttaccactgaatattgccttatattacttggttgcattccacaaaacctctgacatacctgcttcctatatcgacctacttgttttcctcaatttaaagtatagactacaaatagcaga

SEQ ID NO: 1268 - DNA, 819 bp, Enterovirus F
  source 1..819: mol_type = genomic DNA
ttaaaacagcctgggggttgtacccacccctggggcccacgtggcgctagtactctggttcgtttagaacccttgtacgcctgttttcccctcccttaaacaaattaagatctctgccaatgtggggagtagtccgactccgcaccgatacgtcgcaccagcagaccggttcgcttagaacccttctgcggattggtatgagttccccccccttgcaacttagaagcatgagaacaaccgaccaataggagcatggcatccagccgtgtcacggtcaagcacttctgtttccccggccagagatggtcgttacccgccctacccactacgagaagcctattaactaccgaaatcagcgaagagttgcactcagccacaaccccggtggtagctctgagagatggggctcgcaacaacccccgtggtaacacggttgcttgcccgcgcgtgctctcgggttcagtctttgactgttcactccgacctgacgtaagtagccaagagcctattgtgctgggaaggttttcctccggagccgtgaatgctgctaatcctaacctccgagcgtgtgcgcacaaaccagtgttgctacgtcgtaacgcgcaagttggaggcggaacagactactttcggtactccgtgtttccttattttattaactccaatttatggtgacattgactgatattgttgtatttgcccgcctaccgttgaacatagctttatatcatctcattgcattcaagaaatccacagagcttaccctggaactccttgactttgcagttttcttaaatcggatacataaactcagtaaga

SEQ ID NO: 1269 - DNA, 819 bp, unidentified
  source 1..819: mol_type = unassigned DNA; note = unclassified Enterovirus sequence
ttcaaacagcctgggggttgtacccacccccggggcccacggggcgccagtactctggtatgcttaatacctttgtacgcctgtttttccctcccttaaataaattaagattaccactactgaggggagtagtccgactccgctccggtaccgccgcaccagtactccggtacgctcagtaccctagtacggagtagttggtattccctccctgtaatttagaagtatgaaattaaaccgaccaataggaggcgtggcatccagtcgcgttacggtcaagcacttctgtttccccggtccgtaaggatcgttacccgcccgacccactacggaaagcctagtaactggccaactggatgagaggttgcactcagccacaaccccagtggtagctctggaagatggggctcgcaccttcccccgtggtaacacggttgcttgcccgcgtgtgctcccgggttcggtccccgaccgttcacttcgattccaggtaaccagccaagagccaactgtgctgggacggttttcctccggggccgtgaatgctgctaatcctaacctccgagcgtgtgcgcgcaaaccagcgttgctacgtcgtaacgcgtaagttggaggcggaacagactactttcggtaccccgtgtttccttttattttacttattgtttatggttacactgactgatatttgtgagtttgctcgtttgcctttgaatattgctttgtattactttgttgcttttcacaaaacgacccagctcaccgttgaacttgtcgattttgctgtttttcttaatctaacctacaagaaacttaaca

SEQ ID NO: 1270 - DNA, 820 bp, unidentified
  source 1..820: mol_type = unassigned DNA; note = unclassified Enterovirus sequence
agtattaatgttgccgaattggactgacacaagttgaggagcacatagggcatggttgtaagaccactagcttgtacattccatgggcgatgctgggggtccacgtagccctcaggggaggcggtgacaagcagcgccccggccagtggcagacttgcaaaatttcctaccaaaccaccatctcactcctattaccccttccctctatacctttcgttatggtggttaccactgtttcattgccttggctgaaaatggccaccctctcgacacatgccccttgctgccccatcgtgcgactttccatttgtccactcagttagaaaagcacgggggtcctgtctgcgtcccgagcccggttggtgatcttcctcccccccgcccgattgatggcccggaggggtttgctgatgcgctttatgatgcttgcctgtccttcctccgtcggcgcgaacatgcgctcgttgagcttgcggaaatacagccttgcttccgtttctcccaccccgcataccctggccgcctcccgcttgaaattcgcttcgtccggcatcctggtgtgcctcccccgctgcgtgactttacccgtggcattcgacgccctggcattcagtacattccgctacctaacctaggcggtctcccccagtcccccgctcccccaattgcacacgtgatatccgccgctgtcaatgccgtgcgccgcggtagccactggcattgtcctctgcttcgtcaagtgtccactcacggctggctatttacctattctggctattggtgctctatcctgttgcatgaggggcgacatgaccacgac

SEQ ID NO: 1271 - DNA, 820 bp, Sicinivirus A
  source 1..820: mol_type = genomic DNA
tttaaaagagtcagggggttgtacccacccctggggcccacgtggcgctagtactctggtacgccagtacctttgtacgcctgttttcccctccctaaataaattaagattaccactactgaggggagtagtccgactccgctccggcaatgccgcaccagtgcactggtacgctagtaccttttcacggagtagatggtattcctcaccccgaaacttagaagcacgaaaacaaaccgaccaataggtgcatggcatccagccgtgttatggtcaagcacttctgtttccccggtccgcaaggatcgttacccgcccgacccactacgagaagcctagtaactgaccaagtagttgagaggttgcgctcagccacaaccccagtggtagctctggaagatggggctcgcacttcccccgtggtaacacggttgcttgcccgcgcgtgcttccgggttcggcctctgccgttcacctcgattctgcgtaatcagccaagagcctattgtgctgggacggtttcctccggggccgtgaatgctgctaatcccaacctccgagcgtgtgcgcacaatccagtgttgctacgtcgtaacgcgtaagttggaggcggaacagactactttcggaaccccgtgtttcctttgttttaattttaatgctttatggtgacaattgttgagatctgcgatctagcgaccttgccattgaacattgctttgtattatttggttgcattccacaaaacctctgacatacccagctcctatattgatcttttggtttatctaaacttaaaacacaaactcgaaggattgcg

SEQ ID NO: 1272 - DNA, 820 bp, Enterovirus F
  source 1..820: mol_type = genomic DNA
ttcaaacagcctgggggttgtacccacccctggggcccacgcggcgccagtactctggtacgcttagtacctttgtacgcctgttttccctttcccttaaacaaattaagattaccactgttgaggggagtagtccgactccgctccggcactgccgcaccagtactccggtatgcctagtaccctagtacggagcagatggtatccccctttccctgaaacttagaagtctgacgcaaacccgaccaataggagcgcggtatccaaccgcgtaacggtcaagcacttctgtttccccggtccgcaaggatcgttacccgcccgtcccactacgggaagcctagtaactggccaactgagtgagaggttgcgctcagccacatacccagtggtagctctggaagatggggctcgcactccccccgtggtaacacggttgcttgcccgcgtgtgcttccgggttcggtttcgaccgttcacctcaaccccaggtaaccagccaagagcctactgtgctggagcggttttcctccggagccgtgaatgctgctaatcccaacctccgagcgtgtgcgcacaaaccagtgttgctacgtcgtaacgcgtaagttggaggcggaacagactactttcggtactccgtgtttccttttgttttatctattgtttatggtgacactgtctgacatttgtgaatttgctcgcttacccttgaatattgcattgtattatctggttgcatttcacaacacaacccaactctccattgaactcatcaactttgctgtatttcttaacacaatacaaagaaagcgagata

SEQ ID NO: 1273 - DNA, 820 bp, unidentified
  source 1..820: mol_type = unassigned DNA; note = unclassified Enterovirus sequence
ttaaaacagcctgggggttgtacccacccccggggcccacgcggcgctagtactctggttcgtttagaacccttgtacgcctgtttttcccccccttaaataaattaagatctctgccaatgtggggagtagtccgactccgcaccgatacgtcgcaccaacagaccggttcgcctaggacccttctgcggattggtatgagtcccccccccgaaacttagaagcacattacaaactggccaataggagcgtggtatccaaccgcgttgcggtcaagcacttctgtttccccggtcagaaatgatcgttacccgccctccccactacgagaagcctattaaccactgaaagtgatgatgagttgcgctcagccacaaccccggtggtagctctgagagatggggctcgcaccacccccgtggtgacacggttgcttgcccgcgtgtgctctcgggttcagtcgcgagactgttcactctgactcattgtaggtggccaagagcctattgtgctggggaggttttcctccggagccgtgaatgctgctaatcccaacctccgagcgtgtgcgcacaatccagtgttgctacgtcgtaacgcgtaagttggaggcggaacagactactttcggtactccgtgtttccttaattttattgttcaaatttatggtgacattgtctgacatttgtgaattcgctcgcctgccacttaatatcgctttatatcatctgatagcattccataagactacagaactcactttggaactcatcgactttgctgttttcctgaatactgttcacaaccaaacaaaacaaa

SEQ ID NO: 1274 - DNA, 821 bp, unidentified
  source 1..821: mol_type = unassigned DNA; note = unclassified Enterovirus sequence
ttaaaacagcctgggggttgttcccacccccggggcccacgtggcgccagtactctggcacgttagtgcccttgtacgcctgttttcccctccttaaacaaattaagattgccactactgaggggagtagtccgactccgctccagtaccgctgcaccagtgagctggtacgctagtaccttcgcacggagtagatggcatcccccaccccgtaacttagaagcaaagtacacatctggccaatagtggcgctgcatccagccgcgcaacggtcaagcacttctgtttccccggtccgcaagggtcgttatccgcccagtccactacggaaagcctactaaccattgaagctatcgagaggttgcgctcggccacgaccccggtggtagctctgagtgatggggctcgcaaacacccccgtggtaacacggatgcttgcccgcgcgtgcactcgggttcagcctattggttgttcacctcaacatagtgtaaatggccaagagcctactgtgctggattggttttcctccggagccgtgaatgctgctaatcccaacctccgagcgtgtgcgcacaatccagtgttgctacgtcgtaacgcgtaagttggaggcggaacagactactttcggtactccgtgtttcttttgttttattttgaattttatggtgacaattgctgagatttgcgaattagcgactctaccgctgaacattgccctgtactacctaatcgcatttcacaaaacctcagagataccaagctcttacattgatctgcttgttttcctgaatctcaaatataaattggaacaagcaaa

SEQ ID NO: 1275 - DNA, 821 bp, unidentified
  source 1..821: mol_type = unassigned DNA; note = unclassified Enterovirus sequence
ttcaaacagcctgggggttgtacccacccctggggcccacgtggcgctagtactctggtacgttagtacctttgtacgcctgttttcccctcccttaaacaaattaagattaccactactgaggggagtagtccgactccgctccggtactgccgcaccagtactccggtacacttagtaccctagtacggagtagatggtatccccaccccgcaacttagaagcatgcaaacaaaccgaccaataggcgcacgatatccagtcgtgtttcggtcaagcacttctgtctccccggtccgaaaggatcgttacccgcccgacccactacgagaagcccagtaactggccaagtgattgcgaagttgcgctcagccacaaccccagtggtagctctggaagatggggctcgcgtctcccccgtggtgacacggtcgcttgcccgcgtgtgcttccgggttcggcctacgccgttcacttcaatgtcacgtaaccagccaagagcctattgtgctgggacggttttcctccggggccgtgaatgctgctaatcccaacctccgagcgtgtgcgcacaacccagtgttgctacgtcgtaatgcgtaagttggaggcggaacagactactttcggtaccccgtgtttcctttaaattttattcattattttatggtgacaattgctgagatctgcgaattagcgactctgccgttgaatattgctctgtactatttggttgcattccacaaaacctctgacatccccagtacatacattactttacttgtttacctcaatctaaagcacaagctagataatacaaa

SEQ ID NO: 1276 - DNA, 822 bp, unidentified
  source 1..822: mol_type = unassigned DNA; note = unclassified Enterovirus sequence
tttaaaagagcctgggggttgttcccacccccaggatgcccactcgtgggcatgtggtactgtggtatcgcggtaccacagtacgcctctttgaccgccctgacccaagaatcttttcctttaacagatctcttcgtaacaagggcctcagcctgacgcaagtgcctccattggagtctctccaagccctccggggcttggagggcgccgaccccctgcctagggggagcccacgacacggctggagtccattggcacaccgcagccacgattcaagccagaattgaaagcgggaagcacttctgtctccccggtgtggatcatacgctgtacccacggcgaaaagtgaagcatcgttacccgactcggtacttcgagaagcccagtacagttgtggatctctgcagggtatacgctcagcgtgacccctacgtagttccttgagatggctgagagaacaccccacgggcgaccgtgtctctcggcgcgtggctcaaggccgggccttcagtggctcggtgccttgcagagtgaagcctccgaacagcctattgagctaccgtttagcctccgccctcttgaatgcggctaatcctaaccatggagcgcccgcccacagtccagtgggtagagcgtcgtaacgcgcaagtccgtggcggaaccgactactttagagtggcgtgtttccaatttatcctttataaagttgcttatggtgacaccacaagagatccacgatttcttgtttcttatcactgagacacaagtcatattcatcaatctttattgcggaattaacttggtgcgtccaaacacatcagc

SEQ ID NO: 1277 - DNA, 822 bp, unidentified
  source 1..822: mol_type = unassigned DNA; note = unclassified Enterovirus sequence
tttaaaacagcctgggggttgtacccacccccggggcccacgtggcgccagtactctggtacgctagtacccttgtacgcctgtttttcccccccttaaataaattaagactgccactactgaggggagtagtccgactccgctccggcactgccgcaccagtacactggtatgttagtacctttgtacggagtaagtggtatccccaccctgaaacttagaagtatgcaaacaaaccgaccaataggtgcgcggtatccaaccgcgtaacggtcaagcacttctgtctccccggtccgaaaggatcgttatccgcccgacccactacgagaagcccagtagctggccaagtgaacgcgaggttgcgctcagccacaaaccccagtggtagctctggaagatggggctcgcacttcccccgtggtgacacggttgcttgcccgcgtgtgcttccgggttcggactcgtgccgatcacctcaaattcacgcaaccagtcaagagcctattgtgctgggacggttttcctccggagccgtgaatgctgctaatcctaacctccgagcgtgtgcgcacaatccagtgttgctacgtcgtaacgcgtaagttggaggcggaacagactactttcggtactccgtgtttcctttgaattttatcattattttatggtgacaattgctgaaatctgtgatttggcaactctcccactgaacatcgcactatactacctgattgcatttcacaaaacctccgatatccccagttcctatatcgacctacttgtttatctcaatttgaaacataaactaggacggttgaa

SEQ ID NO: 1278 - DNA, 822 bp, unidentified
  source 1..822: mol_type = unassigned DNA; note = unclassified Enterovirus sequence
tttaaaagagcctgggggttgtacccacccctggggcccacgtggcgctagtactctggtacgccagtacctttgtacgcctgttttcccctcccttaaataaattaagattgccactactgaggggagtagtccgactccgctccagcaatgctgcaccagtgcactggtacgccagtaccttttcacggagtagatggcatccccaccccgaaacgtagaagcatgcaaacaaaccgaccaccaggcgcgcggcatccaaccgcgttacggtcaagcacttctgtttccccggtccgcaaggatcgttacccgcccgacccactacgagaagcccagtaactggccaagtggtcgcgaggttgcactcagccacaaccccagtggtagctctggaagatggggctcgcagttcccccgtggtaacacggttgcctgcccgcgcgtgcttccgggttcggctctcgccgttcacctcaaccccacgtaaccagccaagagcctattgtgctgggacggtattcctccggggccgtgaatgctgctaatcccaacctccgagcgtgtgcgcacaatccagtgttgctacgtcgtaatgcgtaagttggaggcggaacagactactttcggtaccccgtgtttcctttatttttccttcaaaaattttatggtgacaattgttgagatttgcgatttggccactttaccattgaatattgccttgtattacttggttgcttttcacagaacctctgacatacccagttcgtatattgatcttcttgtttatttaaacctaaaacacaaacttagaaagctaag

SEQ ID NO: 1279 - DNA, 822 bp, Enterovirus F
  source 1..822: mol_type = genomic DNA
tttaaacagcctgggggttgttcccacccctggggcccacgtggcgctagtactctggtacgctagtacctttgtacgcctgtttttcccctcccttaaataaatcaaggttgccactactgaggggagtagtccgactccgctccagcaatgctgcaccagtgcactggtacgctagtaccttttcacggagtagatggtatcccttaccccggaacctagaagattgcacacaaaccgaccaataggcgcaccgcatccagccgtgcagcggtcaagcacttctgtctccccggtctgtaaagatcgttatccgcccgacccactacgaaaagcctagtaactggccaagtgaacgcgaagttgcgctccgccacaaccccagtggtagctctggaagatggggctcgcaccacccccgtggtaacacggttgcctgcccgcgtgtgcttccgggttcggtctcgtgccgttcacttcaacttcacgcaaccagccaagagcctattgtgctgggacggttttcctccggggccgtgaatgctgctaatcccaacctccgagcgtgtgcgcacaatccagtgttgctacgtcgtaacgcgtaagttggaggcggaacagactactttcggtaccccgtgtttcctctcattttatttaatattttatggtgacaattgttgagatttgcgctcttgcaacgttgccattgaatattggcttatactatttggttgccttttacaaaacctctgatatacccagttcttacattgatctgcttgtttttctcaatttgaagtatagactacaaatagcaaa

SEQ ID NO: 1280 - DNA, 822 bp, Enterovirus F
  source 1..822: mol_type = genomic DNA
tttaaaacagcctgggggttgtacccacccctagggcccacgtggcgccagtactctggtacattagtacctttgtacgcctgttttcccctcccttaaataaatcaagattaccactactgaggggagtagtccgactccgctccagcaatgctgcaccagtgcactggtacgctagtaccttttcacggagtagatggtatccccaccccgaaacttagaagcatgtgatcaaatcgaccaataggcgcgcggttgccagccgcgtttcggtcaagcacttctgtttccccggtccgcaaggatcgttacccgcccgacccactgcgagaagcccagtaactggccaagcggtagcgaggttgcactcagccacaaccccagtggtagctctggaagatggggctcgcagttcccccgtggtaacacggatgcctgcccgcgtgtgcttccgggttcggtctcgtgccgttcacctcaataccgcgtaaccagtgaagagcctattgcgctgggacggttttcctccggggccgtgaatgctgctaatcctaacctctgagcgtgtgcgcacaatccagtgttgctacgtcgtaacgcgtaagtcaggggcggaacagactactttcggtaccccgtgtttccttttattttatatttatcattttatggtgacaattgctgagatttgcgatttagcggttttgccattgaacattgctttgtactacttggttgcatttcacaaaacctccgacatacccagctcctacatcgacttgcttgtttttcttaattaagacataaactagagaacacaaa

SEQ ID NO: 1281 - DNA, 822 bp, unidentified
  source 1..822: mol_type = unassigned DNA; note = unclassified Enterovirus sequence
ttaaaacagcctgggggttgtacccacccctggggcccacgtggcgccagtactctggttcgcttagaacctttgtacgcctgttttcccctcccttaaacaaattaagattgccactactgaggggagtagtccgactccgctccagcactgctgcaccagtgaattggtacgctagtacctctccacggagtagataggaatccctacccgaaacttagaagcatgtaaataacccgaccaataggagcgtggtatccaaccatgttaaggtcaagcacttctgtttccccggccagaaatggtcgttacccgccctacccactacgagaagcccagtaactacccaaacaagtgagaagttgcactcatccacaaccccagtggtagctctgagagatggggctcgcatcttcccccgtggtaacacggttgcttgcccgcgtgtgctctcgggttcgaccccgtgtcgatcacctccgatctgacgtaaccagccaagagcctattgtgctgggaaggttttcctccggagccgtgaatgctgctaatcccaacctccgagcgcgtgcgcacaatccagtgttgctgcgtcgtaatgcgtaagttggaggcggaacagactactttcggtactccgtgtttccttttattcatttattgattttatggtgacattgctgagatttgtgatttggctgttttaccactgaacattgccctgtattacctgattgcattccacaaaacttctgagatacctacatcttatattgatttacttgtcttccttaacctgaggcacaaactagagaacacaaa

SEQ ID NO: 1282 - DNA, 823 bp, Enterovirus F
  source 1..823: mol_type = genomic DNA
tttaaaagagtcagggggttgtacccacccctggggcccacgtggcgctagtactctggtacgttagtacccttgtacgcctgtttttccctcccttaaataaattaagactaccactactgaggggagtagtccgactccgctccggcactgccgcaccagtacaccggtacgctagtacccttgtacggagtagatggtatccccacccccgaaacttagaagcaagcacacaaaccgaccattaggcgcgcggcatccagtcgcgtaacggtcaagcacttctgtttccccggtccgcaaggatcgttacccgcccgacccactacgagaagcctagtagttggccaagtgaacgcgaggttgcgctcagccacaaccccagtggtagctctggaagatggggctcgcacttcccccgtggtaacacggttgcttgcccgcgcgtgcttccgggttcggcttcgtgccgttcacctcaacttcacgtaaccagcaaagagcctattgtgctgggacggttttcctccggggccgtgaatgctgctaatcccaacctccgagcgtgtgcgcacaatccagtgttgctacgtcgtaacgcgtaagttggaggcggaacagactactttcggtaccccgtgtttccttttaattttattcattattttatggtgacaattgctgagatttgtgatttggcgactttaccattgaatattgcattctattaccttatagcatttcacaaaacttctgatattccaccctcctacatcgacctgcttgttttcctgaatctcaaatataaatttgaagagacaaa

SEQ ID NO: 1283 - DNA, 828 bp, Rosavirus A
  source 1..828: mol_type = genomic DNA
ttttcaaagccggggttgggggggctgcaccccatccccccttcttcccctcttcctccgttgcgcgcgttcctgacgcccgccgcggagttcctagctggctaacacccagttgggagggctctcactccctcacacctcgcgctttggacgccaggcatggcgttaaacatgcattcccttcccctagtaacctcccttcgccccttccccacgttgtaccccctccgagatggctgctaaggcgcttgctgctacagcagtctcgtgtttcgggtgttataagtgctttcttttccactccactccctgcctatggggagcggaacggccttgtctcggtcgttgcttcttgcagatcttcacccctccaggctttctggactcgccaggggtggagtagtaggcgcactgtctaagtgaaggtagcagtgttgttggcgaagagttgtggacctactttgagtttgtagcgatcatccagagctagcggatctccccacgcggtaacgcgtgcctctaggcccaaaaggcacggtgttcacagcaccctttggatggcgggggtgcccccctccgcacttaaagtagaaaaacagcttagtagtcaaataacatggctttcctcaagcattcagtgctacatgggactgaaggatgcccagaaggtacccgcaggcaacgataagctcactgtggatctgatctggggccctgggccaggtgctatacacctggttaaaaccaaatctggtagtcagggttaaaaaacgtctaagtcccacccccccggggacggggggttcccttaaaccctcaactgacacc

SEQ ID NO: 1284 - DNA, 830 bp, unidentified
  source 1..830: mol_type = unassigned DNA; note = unclassified Hunnivirus sequence
cccccctcccccccttcccttccctttgcaacgcaacaattgtaagtgccctcacctgtcaattgggaccaccactttcagtgaccccatgcgaagtgctgagagaaaggaagctttcttacccttcatttgtgaacccactggtctaagccgcttggaatacgatgagtggaaaagttcattcttaatggagtgaaacatgcttaaatttccagctcgtgctggtctttccagtacggggcggccctgtctggccgtaattcttcagagtgtcacgccacacttgtggatctcacgtgccacatgacagcgctacagctggaactgggtgcttggtgcccatggagtaacagcgaaaagtgttagatcaagccttgcttgggctatgagcctgcggaacaacaactggtaacagttgcctcaggggccgaaagccacggtgttaacagcaccctcatagtttgatccacctcagggtggtgatgtttagcagttagtagttgccaatctgtgttcactgaaatctcggcataccgtgtagtgtacaggggtgaaggatgcccagaaggtacccgtaggtaaccttaagagactatggatctgatctggggccttgtccggagtgctttacacacggctcaaggttaaaaaacgtctagccccacagagcccgagggattcgggttttccctttaaaaacccgactagagcttatggtgacaattattgctgttcagacgaacagtgtaattgttgtctattcacagcagttctatcagagcttttcccacaacggatcttcttggcaagcaaatacagcaggagtcaat

SEQ ID NO: 1285 - DNA, 837 bp, unidentified
  source 1..837: mol_type = unassigned DNA; note = unclassified Enterovirus sequence
atttaaggaggggaaaacagcctgggggttgtacccacccctggggcccacgtggcgctagtactctggtacgttagtacctttgtacgcctgttttcccctccttaaataaattaagattaccactactgaggggagtagtccgactccgctccagcaatgctgcaccagtgaattggtacgctagtacctctgcacggagtagatggtatccctttccccgaaacttagaagaaagcaaacaaaccgaccaataggagcgcggcaaccagccgtgttgcggtcaagcacttctgtttccccggtccgcaaggatcgttatccgcccgacccactacggaaagcctagtaactggccaaacagcaaagaagttgcgctcggccacaaccccagtggtagctctggaggatggggctcgcatctcccccgtggtaacacggttgcttgcccgcgtgtgcctccgggttcagtcatcgactgttcacttcaatgctgtgtaaccagccaagagcctactgtgctgggacggttttcctccggggccgtgaatgctgctaatcccaacctccgagcgtgtgcgcacaaaccagtgttgctacgtcgtaacgcgtaagtcggaggcggaacagactactttcggtaccccgtgtttcctttgatttttatttaatattttatggtgacaattactgagatttgtgatttggctgctttaccattgaatattgctctgtactatttagtcgcatttcacaaaacttctgagatccctgcgtcttttattgacttgcttgttttcctcaatttgaagtgcaaactagaaggcataaaaagag

SEQ ID NO: 1286 - DNA, 843 bp, unidentified
  source 1..843: mol_type = unassigned DNA; note = unclassified Picornaviridae sequence
cctatcgacagagtttgttgccgttaaaaagaggtcccaggggtgtttcccctggggcccctttttaacggcaacaaactctgtcgataggctaacgccgagcgttcacttagtgagggcgatttacatcacataacaccgccttgtttgacatgtttcactcaaggacaagatatggtaaatctgtgcactacttgaaaattctcgacgttagcggagctaaaacaacaccacaacacaacacaacaattaacaacacattagaaattcgaatttagaagttagaccccaatttttgatttaacatctgttattttgactttgggcaatccactgatctttgaatttcacacgacagccgtggagagacggcacacgctacttcagcatagatccaaggatagctggtagcggcgacgaagtccacaatcactctatattttcaggcttctgaaagtgctgataaattgattaagttcggtttatcggaattgccgaggtccctcgaagaaacccgcggaaatgagaatatagatgttggtatggcagccagaagacatgaactatgacaagtacgtacgagcgtgtgttcggacctggttccccgccttaggatcagcgccctgtgaggggaccctttggaaagatgatcactacatagactactcgaacgagaaactatgcaaataacagggaacgtttggccacccggatgaatccagtagtacggaaaagcttaggaattcgattttggatcttttacctgtgttttaataagaaatgcaggagttgataaatagggctcgactgggagcgagactgcagcggctaaagcagcagtaa

SEQ ID NO: 1287 - DNA, 847 bp, Enterovirus I
  source 1..847: mol_type = genomic DNA
ttaaaacagcctgggggttgttcccacccccagggcccacgtggcgcaagtactctgcttcgttagaagccttgtacgcctgttttcccctccttaaataaattaagattaccacttccgaggggagtagtccgactccgctccgatacgtcgctccagtgcgctagtacgcttagtactttctcacggggatagtggtacccctccctagtaatttagaagacttgaaaaaccgaccaataggcacctcgcatccagcggggtaaaggtcaagcacttctgtttccccgggtcgagtagcgatagactgtgcccacggtcgaaggtgaaacaacccgttatccgactttgtacttcgggaagcctagtaccaccaaagattatgcttggggtttcgctcagcacgaccctggtgtagatcaggctgatggatcaccgcgttcctcacaggcgactgtggcggtggtcgcgtggcagcctgccgatggggcaacccatcggacgccaagcatatgacagggtgtgaagagcctactgagctacaaagtattcctccggcccctgaatgcggctaatcccaaccacggagcatttgctaccaaaccaggtagtggaatgtcgtaacgggtaactctgtggcggaaccgactactttgggtgtccgtgtttccttttaatttatcattctgtgtatggtgacaactatagtgctatctcgatttgcattactattgttgagattgacactttattacattgttgcattttaccctttgagtgagttttcacctgaacagattaatttacttatcctgtttatatatcacaagcagaaatacttgcaaag

SEQ ID NO: 1288 - DNA, 867 bp, unidentified
  source 1..867: mol_type = unassigned DNA; note = unclassified Picornaviridae sequence
tttgcgcgcgggacctctgctacggccgggctcatattatcctccggggttttatgggtcgggcctagcccctttctgtaacggtctgtgtgagacctaaaaccacacataatatcgtgcctgatggttaacgcttgttagccgtctgtaaactaagaacctaccaacacactatgcacctcttggcgaagccgcttggaataagttgagaggaattatgcatgctagttgtgtttgtttacaactaattgttctaatccaagtgaagctcttcgcttggggcggcacgacacttgccgtaattcttctaccgtccctccacaccttgtggatgaagggccggatgtgtggcctctggctaacccctctctctggggtgatgctactggatgttttactcctagaccaaatcacatgaactcctcttgatccacttcggtggggctatgagcctgcggattaatagctggcgacagctaccccaggggccaaaagccacggtgttagcagcaccctcatagtctgatgcccaagggctgatgttgggagctagtagtgtgtgtctggcctatgtttaggacttctggccaagcgcagaggagtggggctgaaggatgcccagaaggtacccgtaggtaaccttaagagactatggatctgatctggggccccctcacgtggctttaccacgtgttgggggttaaaaaacgtctaggccccaccagcccacgggagtgggctttcccttaaaaagcccaacaatatttatggtgacaattcactgtttcttctttgcaatttttgtattcttggactccttattttttgtttgcttgattttagtggacattcagattcaaatacaaa

SEQ ID NO: 1289 - DNA, 891 bp, unidentified
  source 1..891: mol_type = unassigned DNA; note = unclassified environmental samples sequence
aagttgcattattaggtgcaaccataattgtttattttttcccgtgtgagacggaattctcatgacagggcagtcgagagagagcgatctctctctttgcctctaatagcaatattagcgttaccctttttcgataaaagagaaatatcaaaacgatagtagacgaaagttaatctatgtcctacatttgtagggaatgaaatactgattagttgtcattgacgacagatctaagctgtaatcaacagccggacttgtgcaaagttcgataagtagaataagtactagagattagtggatttgtgacccacaacttgaattaaaggcttgtatgtgcggaaatgctgtacaagaaaagagctaaaatgcgttttcctacgtgacgatataaacgatggaggtggggttcacttatttggagaaccgacctagacggctgtttttaacagcacccccagttgcctttctgggcttagtttcgggaataggaccccgaaacggcgtacgccactaaaaaggagaagacgtcaagcagcatgcgattaggacatgtatgtgtttttatccgattatggaaccaggtggttccgtaattgagacatatacccctatatttaaggtgtcgaaagatacccattatatgcaattactggagtattttgtatatatgtgctgtgagggcactatcctaggttaccgtgggatcgcaagatcaccttacggactgagcagtaaaagccattttggccgtctcttagcgtagagcacacactcatgcgaaacccaaactcgaaagagcgggctagtaggacttagggcagattgatgatcaaagaccccccaaaaggtctttttctctttctgcgtcttcatcttcctcatatgttttag

SEQ ID NO: 1290 - DNA, 899 bp, unidentified
  source 1..899: mol_type = unassigned DNA; note = unclassified Erbovirus sequence
ttttgtaactgaggttttaacatctcattgtttttgagccccaacgtcttggtggatgctcaaaagagattactcttgatgcttggctctcagaaagaatggcacctcaacgtgttgagacccgattcttttgagtcgagaccacttcccctcacccttaagattgcttttcttccaactaaacccctattgatgtgttggtcgtttgccaatcggagggcgacagatgcaggtcgctctgaggtctagtagtgtgggaacttgtcgctactaatgaaacgaggtagtgacacttagtacctacgaacaaatcttggagcaactccctttgcttccttcacccatctttcacttttcgttccgctttagcaggggtcttctttctgtccccctggcggcattggaactagccgtcgcgccttagcgcgcagccctgaaggccccacatcttgtggatctcgccgtgggcatgtttccggcatgtgtttctcaagcctgcaaccgaagaccgaacagccacttgaacggtttgagcgtggtagcgctgtgcgagttggcggtggactcccctcgtggcgacacgagcccccgcggccaaaagcccagtgtttgcagcacctctcgcatccaggacaaccccatcctggcgctcactcttagtagtgtggcttagtacgtattaggtggtaagccgagctctccctcggtcttgttctgaatgcacacatgtctaggggctaaggatgtcctacaggtacccgcacgtaaccttaagagagtgtggatctgagtaggagaccgtggtgcactgctttacagttgtagcccggtttaaaaaacgtctatgcccctacagggtagcggtgggccgcgccctttcctttaaaaatatttgtttt

SEQ ID NO: 1291 - DNA, 899 bp, unidentified
  source 1..899: mol_type = unassigned DNA; note = unclassified Sicinivirus sequence
ttacacgcgagttttgcctcgcgcgcccgtaagggcacaaacccccctaggacgtgcacttgcccattggtacgtccggaaaccgtctgcctcggcacgcggcttctccacggtcgcaagcgacccacaatgcttcctggccatggtgtcccccaggaagagcgaacttgtggtgcggcgacccgggagtcgcgtcggcagctcaagtttctctggcagcacaccattttcccctttgtaacctcccgaaaatggcccgggggtagtccgccccctcaaaatggaccgtgtgcacccctccccacgcgttaaagcgggaagggccctcagtcggcgcagggaagcgcgctgaccctgttaagtggataggtcaggaaaaacatgtccacatcataaccccaattcccacggtcgctgatggtctgaccgttaggggcggcccaccggcgctctttgccgggcgtggcttaaccacaccatctcctctagtggattcctagagttctcccacttagtaagctcattccccccactgctgatcccgcaagggagtacaagtgcccagtgagcccacctggtaacaggtgcactggggcccaaaaggctagtggacagggggaagaccccgaatgccgtgggttcccacctgcggtgaagggtttcccccgaagtccacctttgtacttggctatggcctgttggtagtgtggagagtggcgccgaaaggtctggatgtactctctgaggaaactagtaggatcggagaacgttagtagacccccactaggtacccgcgcaagcggatctgaggtgggcccggtgactatgccgttccggtaagtccgggttaaaacaatgaacgcgttctccacaaatcactttcctctctttcttattca

SEQ ID NO: 1292 - DNA, 900 bp, unidentified
  source 1..900: mol_type = unassigned DNA; note = unclassified Erbovirus sequence
ttttgtaactgaggttttgacatctcattgtttttgagccccaacgtcttggtggatgctcaaagaagattactcttgatgcttggctctcagaaagaatggcacctcaatgacttgagacccgattcttttgagtcgagacctttttccctctccccttttgaagattgctttcttccaactaaacccctattgatgtgttggtcgtttgccaatcggagggcgacaggcacaggtcgctcctgagctcagtagtgtgggaacttgttgctactaatgaaacgaggtagtgacacttagtacctgcgaacgactcaggtgcaatccctgtacttctttcaccaaccttccactttccgttccactttagcaggggtcttctttctgtccccctggcggcattggaactagccgttgcgccttagcgcacagccctgaaggccccacaccttgtggatcttgccgtgggcatgtttctggcatgtgtttctcaagcctgtaaccgacgaccgaacggtcacgtgaacagtttgagcgtggtagcgctgtgtgagttggcggtggactcccctcgtggcaacacgagcccccgtggccaaaagcccagtgtttgcagcacctctcacatccagggaaaccccaccctggcgctcactcttagtaacgtggcttagtacgtattaggtggtaagccgagctctccctcggtcttgtactgaatgcacacatgtctaggggctaaggatgtcctacaggtacccgtacgtaacctttagagagtatggatctgagtaggagaccgtggtgcactgctatacagatgtagcccggtttaaaaagcgtctatgcccctacagggtagcggtgggccgcgccctttcctttttaaaacttgttttt

SEQ ID NO: 1293 - DNA, 904 bp, Erbovirus A
  source 1..904: mol_type = genomic DNA
tatccccttgatgcaactgaggttttaacatctcattgtttttgagccccaacgtcttggtggatgctcaaagaagattactcttgatgcttggctctcagaaagaatggcacctcaacacttttgagacccgattcttttgagtcgagaccacttcccttcccctcaaggattgcttttcttccaactaaacccctattgatgtgttggtcgtttgccaatcggagggcgacagatacaggtcgctttggcgcttggtagtgtgggaacttgtcgctgctgatgaaacgaggtagtgacacttagtacctacgagaggcaacaaggcaataccccatcttccttcaccaactttttcttttcgttccactttagcggaggtcttctttctgtccctccggcggcattggaactagccgttgtgcctcagcacacagccctgaaggctccacaccttgtggatcttgccgtgggcatgtttctggcatgtgtttctcaagcctgcaaccgaagaccgaaccgttgcatgaacagtttgagcgtggtagcgctgtgcgagttggcggtggattcccctcgcggcaacacgagcccccgcggccaaaagcccagtgttcacagcacctctcgcatccaggaaaaccccctcctggcgctcactcttagtagtgtgacctagtacgtactaggtggtaagccgagctctccctcggtcttgttctgaatgcacacatgtctaggggctaaggatgtcctacaggtacccgtacgtaaccttcagagagtatggatctgagtaggagaccgtggtgcgctgctttacagtcgtagcccggtttaaaaagcgtctatgcccctacagggtagcggtgggccgcaccctttcctttgaaactattgtttt

SEQ ID NO: 1294 - DNA, 905 bp, Erbovirus A
  source 1..905: mol_type = genomic DNA
tatccccttgatgcaactgaggttttaacatctcattgtttttgagccccaacgccttggtggatgctcaaagaagattactcttgatgcttggctctcagaaagaatggcacctcaaagttttgagacccgattcttttgagtcgagaaccttacccccaacccttgagattgcttttcttccaactaaacccctattgatgtgttggtcgtttgccaatcggagggcgacaggcgcaggtcgccccaacagctagtattgtgggaacttgccactgctgatgaaacgaggtagtggcatttagtacctgagaacgctggaggagcatctccccctcttccttcattaatctttcacttttcgttcctctttagcgggggtcttcttgctatccccccggcggcattggaactagccgttgcgccttagcgcacagtcctgaaggccccacatcttgtggatcttgccgtggacatgtttctggcatgtgtttctcaagcctgcaaccgacgactgaacagacgtgtgaacagtttgagtgtggtagcgctgtgtgagttggcggtggaaccccctcgtggtgacacgagcccccgtggccaaaagcccagtgtttacagcacctctcacatccagggaaaccccaccctggcgctcactcttagtaacacttcctagtaggtattaggtggtaagccgagctcttcctcggtcttgttctgaatgcacacatgtctaggggctaaggatgtcctacaggtacccgcacgtaaccttcagagagtgtggatctgagtaggagactgtggtgcgctgctttacagacgtagcccagtttaaaaaacgtctatgcccctacagggtcgcggtgggccgcaccctttccttttacaaacttggtttt

SEQ ID NO: 1295 - DNA, 906 bp, unidentified
  source 1..906: mol_type = unassigned DNA; note = unclassified Sicinivirus sequence
gttgcgtgcctgcagccgctcagcgtccatccttcctgttacccacctaatttggtggtaccccccggtcccttccctatccccccatacagccggaacggaccacacacctccgggtctgtggcccaaccccgactcggggttgtggcggtggtcacagctccggctgtgacttcctaaccactcctttcacccacccctttcttacatctacttaagtttatgtttgccctctcatcccaaggccttggctcatgtcctttgaggctatctggcacaaacactctttgtttggcgtctggagacccactgagccaccacttatccatgctcaatgcaacccccattagtaaccacgcaaatctaatagtggttctgcctcggcagcacctaagtgcccagggagttcaactggcgacagttgccctggggcccaaaaggctaggtggtaagggtctggccaagcaaggggtccccaccccaagctgaacccatggccccgaagccaccctttaggtggaggttatgtacccgatcgctattctatttgtttggcgaacctggccggaaacatttagtttgtggattcgttggtttgtggtgattagtagaccccctggaggtacccgttttggatctgaccagggacccgtgactataccgctccggtaattcgggtttaaaaccatgaacgtcaccacttgtcttcttttcccattttattcttcttatagtggtctgtttaaatgctcttagaatttctgttggtgactacggcacttaccatagtggttctttcccccagtgagttgcatcagctgcttgctatttgcgtgtataattttgcattaattttcctctggttgctcggaattttggagttgcctagttaccccgctatacagc

SEQ ID NO: 1296 - DNA, 915 bp, Enterovirus A
  source 1..915: mol_type = genomic DNA
caggaacattcattagacgccatcagatccgtctcagggaaaagatcggtcgttgatctcctttctatgagacttcatgaagcgagggtttgtagttcgaagtggcatcagacacctcatggggttccgagaacttaattgggggacaaaagtgtacaaaaaagcaggctttaaaacagctctggggttgttcccacccacagggcccactgggcgctagcacactgattctgcgggatctttgtgcgcctgttttataaccctccccctaagcagcaacttagaagctctgtacaatcacgaccagtagtgggcgtggcgcgccagccatgtcttggtcaagcacttctgtatccccggactgagtatcaatagactgcttacgtggtcgaaggagaaaacgttcgttacccggctaactacttcgagaaacccagtagcactatgaaagttgcggagtgtttcgctcagcacttcccccgtgtagatcaggtcgatgagtcactgtaaaccccacgggcaaccgtgacagtggctgcgttggcggcctgcccatggggtaacccatgggacgctctaatacagacatggtgtgaagagtctattgagctagttagtagtcctccggcccctgaatgcggctaatcctaactgcggagcgcgcaccctcaacccagggggcggcgcgtcgtaatgggtaactctgcagcggaaccgactactttgggtgtccgtgtttccttttattccttattggctgcttatggtgacaattgagaagttgttaccatatagctattggattggccatccggtgtctaacagagccattgtttacctattcattggatacgtccctcttgatctcaaggccattcaaactcttgactatatattgctccttaactgcaagaa

SEQ ID NO: 1297 - DNA, 934 bp, unidentified
  source 1..934: mol_type = unassigned DNA; note = unclassified Picornaviridae sequence
ccgtgggaccggagatgtgtgtccgaaaggtggcccgtttcgtgggccagacgttgaaagggggatgcagggtatgctgttttaatacagcaaagacccacacatccccgctttcaacgtctggcccacgaaacgggccacctttcggactgaccattggtttattattgaaattggcttggaaatgctgacactgtaagctggtttgtgatttaaacaatggttgttctggactctctttgagagatttacctggtggcttggcacagcctccttaaggacgtctggtccagaaaggcccggtcaagacttatattggactggtcccctgtccactgagtattctgttctgaaccgtgtaggcagggctagcgccaccatgattgccaagggactgcctccctggtgacagggacccttgggcccaaaaggctaggtggcaactctcatgtcaagagaggggtatccaccccaatctgaatcatgtggagtgaagccactcgtcatggctctgaccccgagactgtctacatttagtaagatggatgaaaactggatttggagaccactttgattgtcttgatgagaaagtccgctatttgactgagtagatgccctccagctacccttacggatgtgaggaggggaccgtgactatagcgttccgctaaaccggtttaaaaaacatgaaaggtcaaatatgtggcgccattttccatttttactaataaccatatgcctgacgaagttgattgtgctgagtgctctaagccctcctggactgtcagattaaaattggcttttctgcaatattttggctgccagtttgtatgggtttatcactcaggaaagaatcaagagaaagattgaaaatcttggattgtgcaaccaaggctcatttttgtccttgtgaaggcaaccagagattgcagtc

SEQ ID NO: 1298 - DNA, 944 bp, unidentified
  source 1..944: mol_type = unassigned DNA; note = Mus musculus picornavirus strain Wencheng-Mm283 polyprotein gene,1 sequence
accccggtaaaggtcagggtgtacttgcccacgttggtcggcttgtcaacactggttccggctttatcctgatacgtcaccgtgtactcgctgccatcgatcacaaacccctcatcgtccttgacagtgaccgcaggctcctgcttctctccgttgaacgtcaccgagggcggcgtcacctggatggtgggcgcggtcacggtgttgctgatgatggacgcatctaccgaagcaggtgtgctgtcattgtggttgctgtcgccctgggccttgtaccagacagtgtaattgtccacagctttcccggtgggaatggttggagtatacgggccgtcctcagccagagcgtagaccatcgtgccgtcggaagcggtgcccgcctcaatcagcgcctgctcggtgccgttgtagggcagattttccaaacccttcggagccgttgccaccgatgcagcacccttcgcaatcacaaaggtccccgtaccgtttacgatgtagttgccgccgttggcgttggtgatgatgaccgtcgccgtaccggcgttgatgttgtcgcggtaggacagggtgtactcgtcgctggggatggtgttgccgccgtcctccaccttactgcgagactcctagtagggagtggacgtattttgtgtgtgacccggagtttcccccgctccagaaacctgtgatgagctatcctcacgcccacctggcaacaggcgaggacgctgcgttggcacaggacctcattgaggctcacaacttgctgaagcaaacgaagagacgattgcgctaaggtggtttcctccggcctcctgaatgcggctaatcccatcccttggtcatccgcccactagccagtgggtagggtgtcgtaacgcgcaagccgagggcggaaccgactactttggagtgtccgtgtttctattttattttatacggcagtc

SEQ ID NO: 1299 - DNA, 957 bp, Foot-and-mouth disease virus
  source 1..957: mol_type = genomic DNA
ctgtctgcctaatggaggtacgacagccagaggtctagccccagcgtcgcgtaacgaccgtccccggttgaaacgccactactcagacctctggctgtcgtacctccattaggcagacaggaaccacccttctggggcctacgctactgtgcccttttggggcccgcggtcgtcatcaccgcgcctccattaggctcgcagtcgtacctcctctaggctgacaactgtcgcccttttagggcctacgaccttcaagttacggttttggcgtccctcccgcggccgactcgcctacgtgaacgctagctcttcacccgaaggcccgcctttacgttaccgtcttttccgacgttaaaggattgcaaccacacgatttgccttcttttccgaagtaaaaggatacaagcacacagttttgcccgttttcatgagaaatgggacgtctgcgcacgaaacgcgctgttgctcttcgcattcttgtacaaacacgatcttgacgcaggaatcttagaccaacccaacccgtgcacctgcaagtttcgcccggtccttccgggtcttgagagacaaacagatgtactgagatcaactccacgattggtctactagcgggtactagtaacactcactttgcttcgtagcggagcacatgagcggtgggacctcccccatggtaacatggacccaccgggccaaaagccacgcctcacggcctcatgtgtgtgcaaccccagcacggcaacttgtttgtgaaacacaccttaaggtaacactgagactggtacttgatttctggagacaggctaaggatgcccttcaggtaccccgaggtaacaagagacactcgggatctgagaaggggaccaggagttctatcaaactgcccggtttaaaaagcttctatgcctggataggtgaccggaggccggcaccttttcctttatttaaactcacttt

SEQ ID NO: 1300 - DNA, 966 bp, unidentified
  source 1..966: mol_type = unassigned DNA; note = Canine picornavirus isolate A128thr polyprotein gene, complete cds.1 sequence
gggcctcctttcaccggggttcgcgtgacccggttataaaccacgtgacgtctttccagcgctgggttttgacgataaaataacccaggcactatagacagcgatgtctttaaacatccagacagaacagtctttaaaattacaagcttattcaattacaactagtggtgactcactttaaaatgtccaaatttaaggttggcagcttaactgcccgtgattgggctcacgtataaatggtcctggctggccgactacggccacacaatcaccgaatgatttaaacttcgggtgtgagctactaagctccttgtgtaagggtgacaccttgcccaagtatcttgtccccggtctgttgccgcttggaggcagatagggttattttccttgttactttctactcattggggatctatcccagtgaagggtcaagtggcaacccctctcttcttgaggagtggcatggcggtctttccgcatctcgaaccatgccacgcgccatgcacatatgtgacttataagtctgaagattttgaaacactttggttgacaagttgatgactgtagcgactccagtgtgcgagcggacttcccctcatggtaacatgagcctctcggaccaaaagtcaagcgttcatagcgccacactggacgggactttcctagtccctcatcaatgaaacacaatttgtgaatctttctttggacgaaagagtctgatgtgtaggatggagtgaagatggcctgaaggtaccccgtatacgggatctgatcaggtgcccctctcttggggttaaaaattactcggctcctcccacaaactggtggtccagtttttctctttaatttttactgcttatatggtgacagttattgacattctagtgttgattgcctattgttactttatattgttgttgtttttcctgaattgctttttacaaccttatactattacctttgaac

SEQ ID NO: 1301 - DNA, 970 bp, Ampivirus A
  source 1..970: mol_type = genomic DNA
ttaaaatgaaaatgtgcgagcatttagctcgcacttttcattttaaatatgtccacagccctcaagggacttagtcccttgtccgcctcggcgacttaatatttaacttgtagttacttatataaagcccgtaatttatacgatacatacaaaactccagcatccactctgactgccatagtggaataaaccaagaccactctctacatccggagagtcaaatccattggacgaccatttgatactattctacaaaatctattttgatcatattatattaagcattaagcgtcattgacttggttgattaattagtttcactgattaatcgagtcaacaaacaacttcctaaattaatataattttgctcaaacgagaatttcagaatattatgcgaccatttaactatgtttacttaagcatcattgacttttgagtcaacaaataccttaagtttccgctcatctccttaccttcatacgcaggcccataagcctatattatttacctctatttataattttaatcattaatctgcacaattccaccgtttagacattattagggtttataacaacactaataattattgtatgaaaaccagtagttccagcgcgtcgtggcctattgacccccatacaaagttcataagaatagttttgctgttttcagtcattcattctttcccttaaaaggtttggtcacctataagtccagctcattacatcgagtatggcaagtctgcccaacatttgttatatctgactctggtgataataaatgtggcgggataaagttacaagtctagttatatagacagctttagctcaaaaccccaatttccccccttgtgtattattattgtattattaattgtaattatgtatttaatgtaaattgtacttttatctatccaacttcttatttcaattttctatcaagacttttttcttgtcgaaactcaatatct

SEQ ID NO: 1302 - DNA, 975 bp, unidentified
  source 1..975: mol_type = unassigned DNA; note = Carfax virus polyprotein gene, partial cds.1 sequence
cacggggttaacacctcgtgcgatcttttcaaccacatatatatatattctgggcggaatattagaaaatcttgggattatatatatgtaattgatatattgggcggaatatttgaaaatcttgatatatctcttacaaaattttgaaaccaaccattttagaataggtttattagcgtgacaaactatgcgacctgtagagaaaaatgtcaaaatcaatacaaaattttaaaatgttaaaaatgtttatatatttagtaaactcaagttgaattgtgatagagaaggcaagtaactaccagatgactcttctcgcaacaggattatcccagactgttgttccagcaaattgatggatgtaaactaaatttataatgataaatagttaagtaggagacccttatggtactcaagcttgtattaaaatttttaactatagatatgtattattgaaatgtgttctgtctcttatatgtacacccacgtagtcgtggtaccgctataacgccaatcggactaaataacaagaatgtgaggttcctattgagatttcaaaatttatcatattgtcacgaccaatctctttgggtaaggacttgcatggtatgcgaaaggtcggattgccagaatctgcttgctgctttctggatgtgtacacattttaattttaagatttatgatagttaatttgataatacaaggacagtgcgttttgtgacgtgcttgtttgcatctctgtcttagatgacaggtttctacactaggcgatgtgtagaagtgtagacctctaatggtttggtgcatcgtgccccggttctttttcaaggcttctccggttcaaagatagcggaggacccccctttgtaatgcagacaccattgtggataatttatctacaattcgaagcgataatttttccattcatttttgtatctttaaaacttcttacggagattttcaatattaactagaaaa

SEQ ID NO: 1303 - DNA, 723 bp, unidentified
  source 1..723: mol_type = unassigned DNA; note = unclassified vectors sequence
cctcggccccctcaccctcttttccggtggtctggtcccggaccaccgttactccattcagcttcttcggaacctgttcggaggaattaaacgggcacccatactccccccaccccccttttgtaactaagtatgtgtgctcgtgatcttgactcccacggaacggaccgatccgttggtgaacaaacagctaggtccacatcctcccttcccctgggagggcccccgccctcccacatcctccccccagcctgacgtatcacaggctgtgtgaagcccccgcgaaagctgctcacgtggcaattgtgggtccccccttcatcaagacaccaggtctttcctccttaaggctagccccggcgtgtgaattcacgttgggcaactagtggtgtcactgtgcgctcccaatctcggccgcggagtgctgttccccaagccaaacccctggcccttcactatgtgcctggcaagcatatctgagaaggtgttccgctgtggctgccaacctggtgacaggtgccccagtgtgcgtaaccttcttccgtctccggacggtagtgattggttaagatttggtgtaaggttcatgtgccaacgccctgtgcgggatgaaacctctactgccctaggaatgccaggcaggtaccccacctccgggtgggatctgagcctgggctaattgtctacgggtagtttcatttccaatccttttatgtcggagtc

SEQ ID NO: 1304 - DNA, 712 bp, Aichivirus A
  source 1..712: mol_type = genomic DNA
tcaccctctttcccggtggtctggtcccggaccaccgttactccattcagcttcttcggaacctgttcggaggaattaaacgggcacccatactccccccacccccctttggtaactaagtatgtgtgctcgtgatcttggctcccacggagcggaccgatccgttggtgaacaaacagctaggtccacatcctcccttcccctgggagggcccccgccctcccacatcctccccccagcctgacgtatcacaggctgtgtgaagcccccgcgaaagctgctcacgtggcaattgtgggtccccccttcatcaagacaccaggtctttcctccttaaggctagccccggcgtgtgaattcacgttgggcaactagtggtgtcactgtgcgctcccaatctcggccgcggagtgctgttccccaagccaaacccctggcccttcactatgtgcctggcaagcatatctgagaaggtgttccgctgtggctgccaacctggtaacaggtgccccagtgtgcgtaaccttcttccgtctccggacggtagtgattggttaagatttggtgtaaggttcatgtgccaacgccctgtgcgggatgaaacctctactgccctaggaatgccaggcaggtaccccacctccgggtgggatctgagcctgggctaattgtctacgggtagtttcatttccaatccttttatgtcggagtc

SEQ ID NO: 1305 - DNA, 712 bp, unidentified
  source 1..712: mol_type = unassigned DNA; note = unclassified Kobuvirus sequence
tcaccctcttttccggtggtctggtcccggaccaccgttactccattcagcttcttcggaacctgttcggaggaattaaacgggcacccatacacccccatcccctttctgcaacttaagtatgtgtgctcgtgatcttgactcccacggaatggatcgatccgctggagaacaaactgctagatccacatcctcccttcccctgggaggaccttggtcctcccacatcctccccccagcctgacgtaccacaggctgtgtgaagcccccgcgaaagctgctcacgtggcaattgtgggtccccccttcatcaagacaccaggtctttcctccttaaggctagccccgatgtgtgaattcacattgggcaactagtggtgtcactgtgcgctcccaatctcggccgcggagtgctgttccccaagccaaacccctggcccttcactatgtgcctggcaagcatacctgagaaggtgttccgctgtggctgccagcctggtaacaggtgccccagtgtgcgtaaccttcttccgtcttcggacggtagtgattggttaagatttggtgtaaggtccatgtgccaacgccctgtgcgggatgaaacctctactgccctaggaatgccaggcaggtaccccacccccgggtgggatctgagcctgggctaattgtctacgggtagtttcatttccaattcttttatgtcggagtc

SEQ ID NO: 1306 - DNA, 712 bp, Aichivirus A
  source 1..712: mol_type = genomic DNA
tcaccctctttcccggtggtctggtcccggaccaccgttactccattcagcttcttcggaacctgttcggaggaattaaacgggcacccatacatccccatcccctttctgtaacttaagtatgtgtgcttgtaatcttgactcccacggaatggatcgatccgctggagaacaaactgctagatccacatcctcccttcccctgggaggaccttggtcctcccacatcctccccccagcctgacgtaccacaggctgtgtgaagcccccgcgaaagctgctcacgtggcaattgtgggtccccccttcatcaagacaccaggtctttcctccttaaggctagccccgatgtgtgaattcacattgggcaactagtggtgtcactgtgcgctcccaatctcggccgcggagtgctgttccccaagccaaacccctggcccttcactatgtgcctggcaagcatatctgagaaggtgttccgctgtggctgccagcctggtaacaggtgccccagtgtgcgtaaccttcttccgtctccggacggtagtgattggttaagatttggtgtaaggttcatgtgccaacgccctgtgcgggatgaaatctctactgccctaggaatgccaggcaggtaccccaccctcgggtgggatctgagcctgggctaattgtctacgggtagtttcatttccaatccttttatgtcggagtc

SEQ ID NO: 1307 - DNA, 679 bp, Aichivirus A
  source 1..679: mol_type = genomic DNA
gtgttactccattcagcttcttcggaacctgttcggaggaattaaacgggcacccatactcccccccaccccccttttgtaactaagtatgtgtgctcgtgaccttgactcccacggaacggaccgatccgttggtgaacaaacagctaggtccacatcctcctttcccctgggagggtccccgccctcccacatcccccccccagcctgacgtgtcacaggctgtgtgaagcccccgcgaaagctgctcacgtggcaattgtgggtccccccttcatcaagacaccaggtctttcctccttaaggctagccccggcgtgtgaactcacgttgggcaactagtggtgtcactgtgcgctcccaatctcggccgcggagtgctgttccccaagccaaacccctggcccttcactatgtgcctggcaagcacacctgagaaggtgttccgctgtggctgccagcctggtaacaggtgccccagtgtgcgtaaccttcttccgtcttcggacggtggtgattggttaagatttggtgtaaggttcatgtgccaacgccctgtgcgggatgaaacctctactgccctaggaatgccaggcaggtaccccaccttcgggtgggatctgagcctgggctaattgtctacgggtggtttcatttccaattctttcatgtcggagtc

SEQ ID NO: 1308 - DNA, 727 bp, Aichivirus A
  source 1..727: mol_type = genomic DNA
ggcttcggccccctcaccctcttttccggtggtctggtcccggaccaccgttactccattcagcttcttcggaacctgttcggaggaattaaacgggcacccatacacccccatccccttttttgcaacttaagtatgtgtgctcgtaatcttgactcccacggaatggatcgatccgctggagaacaaactgctagatccacatcctccctcccccctgggaggacctcggtcctcccacatcctccccccagcctgacgtatcacaggctgtgtgaagcccccgcgaaagctgctcacgtggcaattgtgggtccccccttcatcaagacaccaggtctttcctccttaaggctagtcccgatgtgtgaattcacatcgggcaactagtggtgtcactgtgcgctcccaatctcggccgcggagtgctgttccccaagccaaacccctggcccttcactatgtgcctggcaagcatatctgagaaggcgttccgctgtggctgccagcctggtaacaggtgccccagtgtgcgtaaccttcttccgtccccggacggtagtgattggttaagacttggcgtaaggttcatgtgccaacgccctgtgcgggatgaaacctctactgccctaggaatgccaggcaggtaccccaccttcgggtgggatctgagcctgggctaattgtctacgggtagtttcatttctaattctttcatgtcggagtc

SEQ ID NO: 1309 - DNA, 710 bp, Aichivirus A
  source 1..710: mol_type = genomic DNA
accctcttttccggtggtctggccccggaccaccgttactccattcagcttcttcggaacctgttcggaggaattaaacgggcacccatacacccccaccccctttctgcaacttaagtatgtgtgctcgtgatcttgactcccacggaatggatcgatccgctggagaacaaactgctagatccacatcctcccttcccttgggtggacctcggtcctcccacatcctccccccagcctgacgtatcacaggctgtgtgaagcccccgcgaaagctgctcacgtggcaattgtgggtccccccttcatcaagacaccaggtctttcctccttaaggctagccccgatgtgtgaattcacattgggcaactagtggtgtcactgtgcgctcccaatctcggccgcggagtgctgttccccaagccgaacccctggcccttcactatgtgcctggcaagcatatctgagaaggtgttccgctgtggctgccagcctggtaacaggtgccccagtgtgcgtaaccttcttccgtcctcggacggtagtgattggttaagatttggtgtaaggttcatgtgccaacgccctgtgcgggatgaaacctctactgccctaggaatgccaggcaggtaccccaccctcgggtgggatctgagcctgggctaattgtctacgggtagtttcatttccaattctttcatgtcggagtc

SEQ ID NO: 1310 - DNA, 710 bp, Aichivirus A
  source 1..710: mol_type = genomic DNA
accctcttttccggtggtctggtcccggaccaccgttactccattcagcttcttcggaacctgttcggaggaattaaacgggcacccatacacccccaccccctttttgcaacttaagtatgtgtgctcgtgatcttgactcccacggaatggatcgatccgctggagaacaaactgctagatccacatcctcccttcccttgggaggacctcggtcctcccacatcctccccccagcctgacgtaccacaggctgtgtgaagcccccgcgaaagccgctcacgtggcaattgtgggtccccccttcattaagacaccaggtctttcctccttaaggctagtcccgatgtgtgaattcacattgggcaactagtggtgtcactgtgcgctcccaatctcggccgcggagtgctgttccccaagccaaacccctggcccttcactatgtgcctggcaagcatatctgagaaggtgttccgctgtggctgccagcctggtaacaggtgccccagtgtgcgtaaccttcttccgtcttcggacggtagtgattggttaagatttggcgtaaggttcatgtgccaacgccctgtgcgggatgaaacctctactaccctaggaatgccaggcaggtaccccaccctcgggtgggatctgagcctgggctaattgtctacgggtagtttcatttccaattcttctatgtcggagtc

SEQ ID NO: 1311 - DNA, 710 bp, Aichivirus A
  source 1..710: mol_type = genomic DNA
accctctttcccggtggtctggtcccggaccaccgttactccattcagcttcttcggaacctgttcggaggaattaaacgggcacccatacactcccatcccctttctgcaacttaagtatgtgtgctcgtgatcttgactcccacggaatggatcgatccgctggagaacaaactgctagatccacatcctcccttcccttgggtggacctcggtcctcccacatcctccccccagcctgacgtatcacaggctgtgtgaagcccccgcgaaagctgctcacgtggcaattgtgggtccccccttcatcaagacaccaggtctttcctccttaaggctagccccgatgtgtgaattcacattgggcaactagtggtgtcactgtgcgctcccaatctcggccgcggagtgctgttccccaagccgaacccctggcccttcactatgtgcctggcaagcatatctgagaaggtgttccgctgtggctgccagcctggtaacaggtgccccagtgtgcgtaaccttcttccgtcctcggacggtagtgattggttaagatttggtgtaaggttcatgtgccaacgccctgtgcgggatgaaacctctactgccctaggaatgccaggcaggtaccccaccctcgggtgggatctgagcctgggctaattgtctacgggtagtttcatttccaattctttcatgtcggagtc

SEQ ID NO: 1312 - DNA, 677 bp, Aichivirus A
  source 1..677: mol_type = genomic DNA
gttactccattcagcttcttcggaacctgttcggaggaattaaacgggcacccatacacccccacccccttttctgcaacttaagtatgtgtgctcgtaatcttgactcccacggaatggatcgatccgctggagaacaaactgctagatccacatcctcccttcccctgggaggaccccggtcctcccacatcctccccccagcctgacgtatcacaggctgtgtgaagtccccgcgaaagctgctcacgtggcaattgtgggtccccccttcatcaagacaccaggtctttcctccttaaggctagccccgatgtgtgaattcacattgggcaactagtggtgtcactgtgcgctcccaatctcggccgcggagtgctgttccccaagccaaacccctggcccttcactatgtgcctggcaagcatatctgagaaggtgttccgctgtggctgccagcctggtaacaggtgccccagtgtgcgtaaccttcttccgtctccggacggtagtgattggttaagatttggtgtaaggttcatgtgccaacgccctgtgcgggatgaaacctctactgccctaggaatgccaggcaggtaccccaccttcgggtgggatctgagcctgggctaattgtctacgggtagtttcatttccaattcttttatgtcggagtc

SEQ ID NO: 1313 - DNA, 677 bp, Aichivirus A
  source 1..677: mol_type = genomic DNA
gttactccattcagcttcttcggaacctgttcggaggaattaaacgggcacccatacacccccacccccttttctgcaacttaagtatgtgtgctcgtaatcttgactcccacggaacggatcgatccgctggagaacaaactgctagatccacatcctcccttcccctgggaggaccccggtcctcccacatcctccccccagcctgacgtaacacaggctgtgtgaagtccccgcgaaagctgctcacgtggcaattgtgggtccccccttcaccaagacaccaggtctttcctccttaaggctagccccgatgtgtgaattcacattgggcaactagtggtgtcactgtgcgctcccaatctcggccgcggagtgctgttccccaagccaaacccctggcccttcactatgtgcctggcaagcatatctgagaaggtgttccgctgtggctgccagcctggtaacaggtgccccagtgtgcgtaaccttcttccgtctccggacggtagtgattggttaagatttggtgtaaggttcatgtgccaacgccctgtgcgggatgaaacctctactgccctaggaatgccaggcaggtaccccaccttcgggtgggatctgagcctgggctaattgtctacgggtagtttcatttccaattcttttatgtcggagtc

SEQ ID NO: 1314 - DNA, 677 bp, Aichivirus A
  source 1..677: mol_type = genomic DNA
gttactccattcagcttcttcggaacctgttcggaggaattaaacgggcacccatacacccccacccccttttctgcaacttaagtatgtgtgctcgtaatcttgactcccacggaatggatcgatccgctggagaacaaactgctagatccacatcctcccttcccctgggaggaccccggtcctcccacatcctccccccagcctgacgtatcacaggctgtgtgaagtccccgcgaaagctgctcacgtggcaattgtgggtccccccttcatcaagacaccaggtctttcctccttaaggctagccccgatgtgtgaattcacattgggcaactagtggtgtcactgtgcgctcccaatctcggccgcggagtgctgttccccaagccaaacccctggcccttcactatgtgcctggcaagcatatctgagaaggtgttccgctgtggctgccagcctggtaacaggtgccccagtgtgcgtaaccttcttccgtctccggacggtagtgattggttaagatttggtgtaaggttcatgtgccaacgccctgtgcgggatgaaacctctactgccctaggaatgccaggcaggtaccccaccttcgggtgggatctgagcctgggctaattgtctacgggtagttccatttccaattcttttatgtcggagtc

SEQ ID NO: 1315 - DNA, 677 bp, Aichivirus A
  source 1..677: mol_type = genomic DNA
gttactccattcagcttcttcggaacctgttcggaggaattaaacgggcacccatacacccccacccccttttctgcaacttaagtatgtgtgctcgtaatcttgactcccacggaatggatcgatccgctggagaacaaactgctagatccacatcctcccttcccctgggaggaccccggtcctcccacatcctccccccagcctgacgtatcacaggctgtatgaagtccccgcgaaagctgctcacgtggcaattgtgggtccccccttcatcaagacaccaggtctttcctccttaaggctagccccgatgtgtgaattcacattgggcaactagtggtgtcactgtgcgctcccaatctcggccgcggagtgctgttccccaagccaaacccctggcccttcactatgtgcctggcaagcatatctgagaaggtgttccgctgtggctgccagcctggtaacaggtgccccagtgtgcgtaaccttcttccgtctccggacggtagtgattggttaagatttggtgtaaggttcatgtgccaacgccctgtgcgggatgaaacctctactgccctaggaatgccaggcaggtaccccaccttcgggtgggatctgagcctgggctaattgtctatgggtagtttcatttccaattcttttatgtcggagtc

SEQ ID NO: 1316 - DNA, 664 bp, Aichivirus A
  source 1..664: mol_type = genomic DNA
gcttcttcggaacctgttcggaggaattaaacgggcacccatacacccccacccccttttctgcaacttaagtatgtgtgctcgtaatcttgactcccacggaatggatcgatccgctggagaacaaactgctagatccacatcctcccttcccctgggaggaccccggtcctcccacatcctccccccagcctgacgtatcacaggctgtgtgaagtccccgcgaaagctgctcacgtggcaattgtgggtccccccttcatcaagacaccaggtctttcctccttaaggctagccccgatgtgtgaattcacattgggcaactagtggtgtcactgtgcgctcccaatctcggccgcggagtgctgttccccaagccaaacccctggcccttcactatgtgcctggcaagcatatctgagaaggtgttccgctgtggctgccagcctggtaacaggtgccccagtgtgcgtaaccttcttccgtctccggacggtagtgattggttaagatttggtgtaaggttcatgtgccaacgccctgtgcgggatgaaacctctactgccctaggaatgccaggcaggtaccccaccttcgggtgggatctgagcctgggctaattgtctacgggtagtttcatttccaattcttttatgtcggagtc

SEQ ID NO: 1317 - DNA, 629 bp, unidentified
  source 1..629: mol_type = unassigned DNA; note = unclassified Kobuvirus sequence
cacccatacacccccacccccttttctgtaactcaagtatgtgtgctcgtaatcttgactcccacggaatggatcgatccgctggagaacaaactgctagatccacatcctccctccccttgggaggacctcggtcctcccacatcctccctccagcctgacgtatcacaggctgtgtgaagcccccgcgaaagctgctcacgtggcaattgtgggtccccccttcatcaagacaccaggtctttcctccttaaggctagccccgatgtgtgaattcacattgggcaactagtggtgtcactgtgcgctcccaatctcggccgcggagtgctgttccccaagccaaacccctggcccttcactatgtgcctggcaagcatatctgagaaggtgttccgctgtggctgccagcctggtaacaggtgccccagtgtgcgtaaccttcttccgtctccggacggtagtgattggttaagatttggtgtaaggttcatgtgccaacgccctgtgcgggatgaaacctctactgccctaggaatgccaggcaggtaccccaccttcgggtgggatctgagcctgggctaattgtctacgggtagtttcatttccaattcttttatgctggagtc

SEQ ID NO: 1318 - DNA, 487 bp, Aichivirus A
  source 1..487: mol_type = genomic DNA
catcctccccccagcctgacgtaccacaggctgtgtgaagcccccgcgaaagctgctcacgtggcaattgtgggtccccccttcattaagacaccaggtctttcctccttaaggctagtcccgatgtgtgaattcacattgggcaactagtggtgtcactgtgcgctcccaatctcggccgcggagtgctgttccccaagccaaacccctggcccttcactatgtgcctggcaagcatatctgagaaggtgttccgctgtggctgccagcctggtaacaggtgccccagtgtgcgtaaccttcttccgtcttcggacggtagtgactggttaagatttggcgtaaggttcatgtgccaacgccctgtgcgggatgaaacctctactaccctaggaatgccaggcaggtaccccaccctcgggtgggatctgagcctgggctaattgtctacgggtagtttcatttccaattcttctatgtcggagtc

SEQ ID NO: 1319 - DNA, 438 bp, unidentified
  source 1..438: mol_type = unassigned DNA; note = Aichi virus 1 isolate C1_Kwanak_06 polyprotein gene, partial cds.1 sequence
aagctgctcacgtggcaattgtgggtccccccttcatcaagacaccaggtctttcctccttaaggctagccccggcgtgtgaattcacgttgggcaactagtggtgtcactgtgcgctcccaatctcggccgcggagtgctgtcccccaagccaaacccctggcccttcactatgtgcctggcaagcatatctgagaaggtgttccgctgtggctgccagcctggtaacaggtgccccagtgtacgtaaccttcttccgtctccggacggtagtgattggttaagatttggtgtaaggttcatgtgccaacgccctgtgcgggatgaaacctctactgccctgggaatgccaggcaggtaccccacctccgggtgggatctgagcctgggctaattgtctacgggtagtttcatttccaatccttttatgtcggagtc

SEQ ID NO: 1320 - DNA, 724 bp, unidentified
  source 1..724: mol_type = unassigned DNA; note = unclassified Kobuvirus sequence
tgtcggccccctcaccctcttttccggtggtctggacccggaccaccgttactccattcagcttcttcggaacctgttcggaggaattaaacgggcacccactttcctgtcctctccccttttctgtaactccaagtgtgtgctcgtaatcttgactcccgcggattgaccgctccgctggtgaacaaactgctaggtcatctcctccccacccttgggcgtccttccgggcgtccacaccctccccccagcctgacgtgtcacaggctgtacaaagaccccgcgaaagctgctaacgtggcaattgtgggtcccccctttgtaaaggaaccgagtctttctcccttaaggctagacccctgtgtgaattcacaggtggcaactagtggttccactgcatgctcccgacctcggccgcggagtgctgttccccaagtcgtaacactgaccttcacttatgtgcctggcaagcatatctgagaagatgttccgctgtggctgccaaacctggtaacaggtgccccagtgtgcgtagtcttcttccgtcttcggacggtaggtgttaggtaaagatgcggcgtaaggttcaagtgccaacgccctggaagggatgacccttctactgccctaggaatgccgcgcaggtaccccaggttcgcctgggatctgagcgcgggctaattgtctacgggtagtttcatttccctcttcttccactggcatc

SEQ ID NO: 1321 - DNA, 438 bp, Aichivirus A
  source 1..438: mol_type = genomic DNA
aagctgctcacgtggcaattgtgggtccccccttcatcaagacaccaggtctttcctccttaaggctagccccgacgtgtgaactcacgttgggcaactagtggtgtcactgtgcgctcccaatctcggccgcggagtgctgttccccaagccaaacccctggcccttcactatgtgcctggcaagcatatctgagaaggtgttccgctgtggctgccagcctggtaacaggtgccccagtgtgcgtaaccttcttccgtcttcggacggtagtgattggttaagatttggtgtaaggttcatgtgccaacgccctgtgcgggatgaaacctctactgccctaggaatgccaggcaggtaccccaccttcgggtgggatctgagcctgggctaattgtctacgggtagtttcatttccaattcttttatgtcggagtc

SEQ ID NO: 1322 - DNA, 438 bp, unidentified
  source 1..438: mol_type = unassigned DNA; note = Aichi virus 1 isolate C3_Seongbuk_09 polyprotein gene, partial cds.1 sequence
aagctgctcacgtggcaattgtgggtccccccttcatcaagacaccaggtctttcctccttaaggctagccccggcgtgtgaactcacgttgggcaactagtggtgtcactgtgcgctcccaatctcggccgcggagtgctgttccccaagccaaacccctggcccttcactatgtgcctggcaagcatatctgagaaggtgttccgctgtggctgccagcctggtaacaggtgccccagtgtgcgtaaccttcttccgtcttcggacggtagtgattggttaagatttggtgtaaggttcatgtgccaacgccctgtgcgggatgaaacctctactgccctaggaatgccaggcaggtaccccaccttcgggtgggatctgagcctgggctaattgtctacgggtagtttcatttccaattctttcatgtcggagtc

SEQ ID NO: 1323 - DNA, 438 bp, unidentified
  source 1..438: mol_type = unassigned DNA; note = Aichi virus 1 isolate Inlet_2011JAN_Aichi_B leader protein gene,1 sequence
aagctgctcacgtggcaattgtgggtccccccttcatcaagacaccaggtctttcctccttaaggctagccccgatgtgtgaattcacattgggcaactagtggtgtcactgtgcgctcccaatctcggccgcggagtgctgttccccaagccaaacccctggcccttcactatgtgcctggcaagcatatctgagaaggtgttccgctgcggctgccaccctggtaacaggtgccccagtgtgcgtaaccttcttccgtctccggacggtagtgattggttaagatttggtgtaaggttcatgtgccaacgccctgtgcgggatgaaacctctactgccctaggaatgccaggcaggtaccccacccccgggtgggatctgagcctgggctaattgtctacgggtagtttcatttccaattcttttatgtcggagtc

SEQ ID NO: 1324 - DNA, 438 bp, unidentified
  source 1..438: mol_type = unassigned DNA; note = Aichi virus 1 isolate C4_Yongdeongpo_07 polyprotein gene, partial1 sequence
aagctgctcacgtggcaattgtgggtccccccttcatcaagacaccaggtctttcctccttaaggctagccccgatgtgtgaattcacattgggcaactagtggtgtcactgtgcgctcccaatctcggccgcggagtgctgttccccaagccaaacccctggcccttcactatgtgcctggcaagcatatctgagaaggtgttccgctgtggctgccagcctggtaacaggtgccccggtgtgcgtaaccttcttccgtctccggacggtagtgattggttaagatttggtgtaaggttcatgtgccaacgccctgtgcgggatgaaacctctactgccctaggaatgccaggcaggtaccccacccccgggtgggatctgagcctgggctaattgtctacgggtagtttcatttccaattcttttatgtcggagtc

SEQ ID NO: 1325 - DNA, 438 bp, unidentified
  source 1..438: mol_type = unassigned DNA; note = Aichi virus 1 isolate Inlet_2011JAN_Aichi_A leader protein gene,1 sequence
aagctgctcacgtggcaattgtgggtccccccttcatcaagacaccaggtctttcctccttaaggctagccccggcgcgtgaactcacgttgggcaactagtggtgtcactgtgcgctcccaacctcggccgcggagtgctgttccccaagccaaacccctggcccttcactatgtgcctggcaagcatatctgagaaggtgttccgctgtggctgccagcctggtaacaggtgccccagtgtgcgtaaccttcttccgtcttcggacggtagtgattggttaagatttggtgtaaggttcatgtgccaacgccctgtgcgggatgaaacctctactgccctaggaatgccaggcaggtaccccaccctcgggtgggatctgagcctgggctaattgtctacgggtagtttcatttccaattcttttatgtcggagtc

SEQ ID NO: 1326 - DNA, 438 bp, unidentified
  source 1..438: mol_type = unassigned DNA; note = Aichi virus 1 isolate C2_Kangdong_01 polyprotein gene, partial cds.1 sequence
aagctgctcacgtggcaattgtgggtccccccttcatcaagacaccaggtctttcctccttaaggctagccccgatgtgtgaattcacattgggcaactagtggtgtcactgtgcgctcccaatctcggccgcggagtgctgttccccaagccaaacccctggcccttcactatgtgcctggcaagcatatctgagaaggtgttccgctgtggctgccagcctggtaacaggtgccccagtgtgcgtaaccttcttccgtctccggacggtagtgattggttaagatttggcgtaaggttcatgtgccaacgccctgtgcgggatgaaacctctactgccctaggaatgccaggcaggtaccccaccctcgggtgggatctgagcctgggctaattgtctacgggtagtttcatttccaattcttttatgtcggagtc

SEQ ID NO: 1327 - DNA, 438 bp, Aichivirus A
  source 1..438: mol_type = genomic DNA
aagctgctcacgtggcaattgtgggtccccccttcatcaagacaccaggtctttcctccttaaggctagccccggcgtgtgaactcacgttgggcaactagtggtgtcactgtgcgctcccaatctcggccgcagagtgctgttccccaagccaaacccctggcccttcactatgtgcctggcaagcatatctgagaaggtgttccgctgtggctgccagcctggtaacaggtgccccagtgtgcgtaaccttcttccgtcttcggacggtagtgattggttaagatttggtgtaaggttcgtgtgccaacgccctgtgcgggatgaaacctctactgccctaggaatgccaggcaggtaccccaccttcgggtgggatctgagcctgggctaattgtctacgggtagtttcatttccaattctttcatgtcggagtc

SEQ ID NO: 1328 - DNA, 438 bp, unidentified
  source 1..438: mol_type = unassigned DNA; note = Aichi virus 1 isolate C6_Mapo_22 polyprotein gene, partial cds.1 sequence
aagctgctcacgtggcaattgtgggtccccccttcatcaagacaccaggtctttcctccttaaggctagccccggcgtgtgaactcgcgttgggcaactagtggtgtcactgtgcgctcccaatctcggccgcggagtgctgttccccaagccaaacccctggcccttcactatgtgcctggcaagcatatctgagaaggtgttccgctgtggctgccagcctggtaacaggtgccccagtgtgcgtaaccttcttccgtcttcggacggtagtgattggttaagatttggtgtaaggttcgtgtgccaacgccctgtgcgggatgaaacctctactgccctaggaatgccaggcaggtaccccaccttcgggtgggatctgagcctgggctaattgtctacgggtagtttcatttccaattccttcatgtcggagtc

SEQ ID NO: 1329 - DNA, 438 bp, unidentified
  source 1..438: mol_type = unassigned DNA; note = Aichi virus 1 isolate C4_Yongdeongpo_16 polyprotein gene, partial1 sequence
aagctgctcacgtggcaattgtgggtccccccttcatcaagacaccaggtctttcctccttaaggctagccccgatgtgtgaattcacattgggcaactagtggtgtcactgtgcgctcccaatctcggccgcggagtgctgttccccaagccaaacccctggcccttcactatgtgcctggcaagcatatctgagaaggtgttccgctgtggctgccagcctggtaacaggtgccccggtgtgcgtaaccttcttccgtctccggacggtagtgattggttaagatttggtgtaaggttcatgtgccaacgccctgtgcgggatgaaacctctactgccctaggaatgccaggcaggtaccccaccctcgggtgggatctgagcctgggctaattgtctacgggtagtttcatttccaattctttcatgtcggagtc

SEQ ID NO: 1330 - DNA, 725 bp, unidentified
  source 1..725: mol_type = unassigned DNA; note = unclassified Kobuvirus sequence
cctcggccccctcaccctcttttccggtggtctggacccggaccaccgttactccattcagcttcttcggaacctgttcggaggaattaaacgggcacccactttcctgtcctctccccctttctgcaactcaagtgtgtgctcgtaatcctgactcccacgggttgaccgccccgttggtgaacaaacagctaggtcattccctccctacccctgggcgccatttcagtggcgttcatatcctccccccagcctgacgtgtcacaggctgtgcaaagtccccgcgaaagctgctcacgtggcaattgtgggtcccccctttgtgaaggaaccgagtctttctcccttaaggctagacccctgtgtgaactcacaggtggcaactagtggttccactgcatgctcccgacctcggccgcggagtgctgttccccaagtcgtgacactgacctccacttatgtgcctggcaagcatatctgagaagatgttccgctgtggctgccaaacctggtaacaggtgccccagtgcgtgtagtcttcttccgtctccggacggtaagtgtgtggtaaagatgcggcgtaaggttcaagtgccaacgccctggaagggatgacccttctactgccctaggaatgccgcgcaggtaccccaggttcgcctgggatctgagcgcgggctaattgtctacgggtagtttcatttccctctcttttcactggcatc

SEQ ID NO: 1331 - DNA, 438 bp, unidentified
  source 1..438: mol_type = unassigned DNA; note = Aichi virus 1 isolate C5_Mapo_01 polyprotein gene, partial cds.1 sequence
aagctgctcacgtggcaattgtgggtccccccttcatcaagacaccaggtctttcctccttaaggctagccccggcgtgtgaactcacgttgggcaactagtggtgtcactgtgcgctcccaatctcggccgcggagtgctgttccccaagccaaacccctggcccttcactatgtgcctggcaagcatatctgagaaggtgttccgctgtggctgccagcctggtaacaggtgcccccgtgtgcgtaaccttcctccgtcttcggtcggtagtgattggttaagatttggtgtaaggttcgtgtgccaacgccctgtgcgggatgaaacctctactgccctaggaatgccaggcaggtaccccaccttcgggtgggatctgagcctgggctaattgtctacgggtagtttcatttccaattccttcatgtcggagtc

SEQ ID NO: 1332 - DNA, 395 bp, unidentified; identical to SEQ ID NO: 431
  source 1..395: mol_type = unassigned DNA; note = Kobuvirus sp. strain 16806x8 polyprotein gene, partial cds.1 sequence

SEQ ID NO: 1333 - DNA, 733 bp, unidentified
  source 1..733: mol_type = unassigned DNA; note = unclassified Kobuvirus sequence
cttcggccctcacaccctcttttccgatggtctggtcccggaccaccgtcactccattcagcttcttcggaacctgttcggaggaattaaacgggcaccccacttcccccccccaccctcgcaacttcaagtgtgtgtgcccataaccttgacccctgccggtatgccgcccggttcagtggacaaactgctaggcaaattcccccctccccctgtggctggtccttcaaccagccactctcttccccccagccggacgtgctacaggctgtgcaaagcccccgcgaaagctgctcacgtggcaattgtgggtcccccctttgtcaaggcttcgagtctttctcccttaaggctagtcccgtactgtgaaatcagtgtgggcaactagtgaagccactgcacgctcccgaccacggacgcggagtgctgtcccccaagtcatgacactaacaccaagctgtgctgcctggcaagcatagcctgggaaggtgttccgctgtggctgccaaacctggtaacaggtgccccagtgtgtgtaaccttcctccagtcttcggactggcagctttgtgtgaagacgtgacgtaaggttcaagtgccaactccctggaagggatgacccctctactgccctaggaatgctacgcaggtacccctggttcgccagggatctgagcgtaggctaattgtctacgggtagtttcatttcccacctttttatttctttagcatc

SEQ ID NO: 1334 - DNA, 729 bp, Aichivirus A
  source 1..729: mol_type = genomic DNA
cctcggccccctcaccctcttttccggtggtctggtcccggaccaccgttactccattcagcttcttcggaacctgttcggaggaattaaacgggcacccactcatccctacctccccctgtaacttgaagtgtgtgctcgtgaccttgactcctgcgggcttcaccgacccgtccagtgaacaaactgctaggtgatttcttcccctcccctgacctggatgttccacatccaggtcttcctcccccagcccgacatgtcatgggctgtttggaatccccgcgaaagctgctaacgtggcaattgtgggtcccccttccaacaagacaccgagtctttctcccttaaggctagccccgtgtggtgaattccaccgggcaactagtgatgtcaatgcatgcctccgacctcggccgcggagtgctgccccccaagttgcgaaactgaccaaggattgtgctgcctggcaagcatagtctgaggagatgttccgctgtggctgccaaacctggtaacaggtgccccagtgcgcgtagtctccttccggttcgtccggctgtcctttggtaaagacacaatgtaaggggcgtgtgccaacgccctggaaagagtgaacttctactgccctaggaatgccacgcaggtacccctggtctcctaccagggatctgagcgtgggctaattgtctaacgggtagtttcatttctctcctcccttttgttgacacc

SEQ ID NO: 1335 - DNA, 729 bp, Aichivirus A
  source 1..729: mol_type = genomic DNA
cctcggccccctcaccctcttttccggtggtctggtcccggaccaccgttactccattcagcttcttcggaacctgttcggaggaattaaacgggcacccactcacccccatctccccctgtaacttgaagtgtgtgctcgtgaccttgactcctgcgggcttcaccgacccgtccagtgaacaaactgctaggtgatttcttcccctcccctagcctggatgttccacatccaggtcttcttcccccagcccgacatgtcatgggctgtttggaatccccgcgaaagctgctaacgtggcaattgtgggtcccccttccaacaagacaccgagtctttctcccttaaggctagccccgtgtggtgaattccaccgggcaactagtggtgtcaatgcatgcctccgacctcggccgcggagtgctgccccccaagttgcgaaactgaccaaggattgtgctgcctggcaagcatagtctgaggagatgttccgctgtggttgccaaacctggtaacaggtgccccagtgcgcgtagtctccttccggttcgtccggctgtcctttggtaaagacacaatgtaaggggcgtgtgccaacgccctggaaagagtgaacttctactgccctaggaatgccacgcaggtacccctggtttcttaccagggatctgagcgtgggctaattgtctaacgggtagtttcatttccctcccttcttttgttgacatc

SEQ ID NO: 1336 - DNA, 717 bp, Aichivirus A
  source 1..717: mol_type = genomic DNA
tcaccctcttttccggtggtccggtcccagaccaccgttactccactcagcttcttcggaacctgtctggaggaattaaacgggcacccactcatccccaccccccttgtaacttaaagtgtgtgctcgtgaccttgactcctgcgggcttcaccgacccgttcagtgaacagactgctaggtgatttcttccccttccctggcctggatggcccacatccaggtccccttcccccagcccgacatgtcatgggctgtttggaatccccgcgaaagctgctaacgtggcaattgtgggtcccccttccaacaagacaccgagtctttctcccttaaggctagccccgtgtggtgaattccaccgggcaactagtgacgccactgcatgcctccgacctcggccgcggagtgctgccccccaagttgtgaaactggccaaggactgtgctgcctggcaagcatagtctgaggagatgttccgctgtggctgccaaacctggtaacaggtgccccagtgtgcgtagtctccttccggttcgtccggctgtcctttggtaaagacacaatgtaaggggcgtgtgccaacgccctggaaagagtgaacttctgctgccctaggaatgccacgcaggtacccctggtttcccaccagggatctgagcgtgggctaattgtctaacgggtagtttcatttccctcctctcttttgttgacatc

SEQ ID NO: 1337 - DNA, 523 bp, unidentified
  source 1..523: mol_type = unassigned DNA; note = unclassified Kobuvirus sequence
cctccccacccctgggcgccgcctaggcgacgtccacatcctccccccagcctgacgtgtcacaggctgtgcaaagaccccgcgaaagctgctcacgtggcaattgtgggtcccccctttgtgaaggaaccgagtctttctcccttaaggctagacccctgtgtgaattcacaggtggcaactagtggttccactgcatgctcccgacctcggccgcggagtgctgttccccaagtcgtaacactgacctccacttatgtgcctggcaagcatatctgagaagatgttccgctgtggctgccaaacctggtaacaggtgccccagtgtgcgtagtcttcttccgtctccggacggtaagtgtgtggtaaagatgcggcgtaaggttcaagtgccaacgccctggaagggatgacccttctactgccctaggaatgccgcgcaggtaccccaggttcgcctgggatctgagcgcgggctaattgtctacgggtagtttcatttccctctttcttcactggcatc

SEQ ID NO: 1338 - DNA, 534 bp, unidentified
  source 1..534: mol_type = unassigned DNA; note = unclassified Kobuvirus sequence
ctaggtcattccctccccacccctgggcgccgcttcggcggtgtccacatcctccccccagcctgacgtgtcacaggctgtgcaaagaccccgcgaaagctgctcacgtggcaattgtgggtcccccctttgtgaaggaaccgagtctttctcccttaaggctagacccctgtgtgaattcacaggtggcaactagtggttccactgcatgctcccgacctcggccgcggagtgctgttccccaagtcgtaacactgacctccacttatgtgcctggcaagcatatctgaaaagatgttccgctgtggctgccaaacctggtaacaggtgccccagtgtgcgtagtcttcttccgtcttcggacggtaagtgtgtggtaaagatgcggcgtaaggttcaagtgccaacgccctggaagggatgacccttctactgccctaggaatgccgcgcaggtaccccaggttcgcctgggatctgagcgcgggctaattgtctacgggtagtttcatttccctctttcttcactggcatc

SEQ ID NO: 1339 - DNA, 306 bp, unidentified
  source 1..306: mol_type = unassigned DNA; note = Aichi virus 1 isolate ETH/2016/P24 polyprotein gene, partial cds.1 sequence
cggagtgctgttccccaagccaaacccctggcccttcactatgtgcctggcaagcatatctgagaaggtgttccgctgtggctgccagcctggtaacaggtgccccagtgtgcgtaaccttcttccgtcttcggacggtagtgattggttaagatttggcgtaaggttcatgtgccaacgccctgtgcgggatgaaacctctactaccctaggaatgccaggcaggtaccccaccctcgggtgggatctgagcctgggctaattgtctacgggtagtttcatttccaattcttctatgtcggagtc

SEQ ID NO: 1340 - DNA, 301 bp, unidentified
  source 1..301: mol_type = unassigned DNA; note = Aichi virus 1 isolate ETH/2016/P6 polyprotein gene, partial cds.1 sequence
gtgctgttccccaagccaaacccctggccctccactatgtgcctggcaagcatacctgagagggtgttccgctgtggctgccagcctggtaacaggtgccccagtgtgcgtaaccttcttccgtcttcggacggtagtgatcggttaagatttggtgtaaggttcatgtgccaacgccctgtgcgggatgaacctctactgccctaggaatgccaggcaggtaccccaccctcgggtgggatctgagcctgggctaattgtctacgggtagtttcatttccaatccttttatgtcggagtc

SEQ ID NO: 1341 - DNA, 610 bp, unidentified; identical to SEQ ID NO: 665
  source 1..610: mol_type = unassigned DNA; note = unclassified Kobuvirus sequence

SEQ ID NO: 1342 - DNA, 711 bp, unidentified
  source 1..711: mol_type = unassigned DNA; note = unclassified Kobuvirus sequence
tcaccctcttttccggtggtccggacccagaccaccgttactccattcagcttcttcggaacctgttcggaggaattaaacgggcacccactcaccccctctccctcctcgtaactaagtgtgtgcccagtctctttactcctgctggcttcaccgaccagtagtggccaaaatgctaggtgaacctcctccctcccccactgggctcccgcccagtttcctccccccagcctgacgtgtcacaggctgtgcaaagaccccgcgaaagctgccaaaagtggcaattgtgggtcccccctttgtcaaggcgtcgagtctttctcccttaaggctagccccgtcagtgaattctgtcgggcaactagtgacgccactgcatgcctccgacctcggccgcggagtgctgccccccaagtcatgcccctgaccacaagttgtgctgtctggcaaacattgtctgtgagaatgttccgctgtggctgccaagcctggtaacaggctgccccagtgtgtgtagttctcatccggacttcggtctggcaacttgctgttaagacatggcgtaaggggcgtgtgccaacgccctggaacgagtgtccactctaataccccgaggaatgctacgcaggtacccctggcctgccagggatctgagcgtaggctaattgtctaagggtattttcatttcccactctttctttcttgttcata

SEQ ID NO: 1343 - DNA, 713 bp, unidentified; identical to SEQ ID NO: 871
  source 1..713: mol_type = unassigned DNA; note = unclassified Kobuvirus sequence

SEQ ID NO: 1344 - DNA, 712 bp, Aichivirus A; identical to SEQ ID NO: 867
  source 1..712: mol_type = genomic DNA

SEQ ID NO: 1345 - DNA, 712 bp, Aichivirus A; identical to SEQ ID NO: 866
  source 1..712: mol_type = genomic DNA

SEQ ID NO: 1346 - DNA, 711 bp, unidentified
  source 1..711: mol_type = unassigned DNA; note = unclassified Kobuvirus sequence
tcaccctcttttccggtggtccggacccagaccaccgttactccattcagcttcttcggaacctgtttggaggaattaaacgggcacccacccaccttcacccccttttcgtaactaagtgtgtgcccaatctcatgactcctgctgacttcaccgaccagcagtgtccaaaacgctaggtgaatttccttcctccccctctgggcttctgcccagctccctccctccagcctgacgtgccacaggctgtgcaaagaccccgcgaaagctgccaaaagtggcaattgtgggtcccccctttgtaaaggcgtcgagtctttctcccttaaggctagacccgtcagtgaattctgtcgggcaactagtgacgccactgcatgcctccgacctcggccgcggagtgctgccccccaagtcgtgcccctgactacaagttgtgctgtctggcaaacattgtctgtgagaatgttccgctgtggctgccaagcctggtaacaggctgccccagtgtgcgtagttctcatccagacttcggtctggcaacttgctgttaagacacggcgtaaggggcgtgtgccaacgccctggaacgagtgtccactctaataccccgaggaatgctacgcaggtacccctggctccccagggatctgagcgtaggctaattgtctaagggtattttcatttcccactctttctttcttgttcata

SEQ ID NO: 1347 - DNA, 646 bp, Aichivirus A
  source 1..646: mol_type = genomic DNA
ggaattaaacgggcacccactcacccccatccccccctgtaacttaaagtgtgtgctcgtgaccttgactcctgcgggcttcaccgacccgtccagtgaacaaactgctaggtgactccttccccccccctggcctggatggcccacatccaggtcttcttcccccagcccgacatgtcatgggctgtttggaatccccgcgaaagctgctaacgtggcaattgtgggtcccccttccaacaagacaccgagtctttctcccttaaggctagccccgtgtggtgaattccaccgggcaactagtggtgtcaatgcatgcctccgacctcggccgcggagtgctgccccccaagttgcgaaactgaccaagactgtgctgcctggcaagcatagtctgaggagatgttccgctgtggttgccaaacctggtaacaggtgccccagtgtgcgtagtctccttccggttcgtccggctgtcctttggtaaagacacaatgtaaggggcgtgtgccaacgccctggaaagagtgaacttctactgccctaggaatgccacgcaggtacccctggtttcccaccagggatctgagcgtgggctaattgtctaacgggtagtttcatttccctcctctcttttgttgacatc

SEQ ID NO: 1348 - DNA, 712 bp, unidentified
  source 1..712: mol_type = unassigned DNA; note = Canine kobuvirus 1 isolate 75 polyprotein mRNA, complete cds.1 sequence
tcaccctcttttccggtggtccggacccagaccaccgttactccattcagcttcttcggaacctgttcggaggaattaaacgggcacccactcaccccctctccctcctcgtaactaagtgtgtgcccagtctctttactcctgctggcttcaccgaccagtagtggccaaaatgctaggtgaacctcctccctcccccactgggctcccgcccagtttcctccccccagcctgacgtgtcacaggctgtgcaaagaccccgcgaaagctgccaaaagtggcaattgtgggtcccccctttgtcaaggcgtcgagtctttctcccttaaggctagacctgtcagtgaattctgccgggcaactagtgacgccactgcatgcctccgacctcggctgcggggtgctgccccccaagttgtgcccctgagccacaagttgtgctgtctggcaaacattgtctgtgagaatgttccgctgcggctgccaagcctggtgacaggctgccccagtgtgtgtagttctcatccagacctcggtctggcaacttgctgttaagacacggcgtaaggggcgtgtgccaacgccctggaacgagtgtccattctaataccccgaggaatgctacgcaggtacccctggttcaccagggatctgagcgtaggctaattgtctaagggtattttcatttcccactctttctttcttgttcata

SEQ ID NO: 1349 - DNA, 712 bp, unidentified
  source 1..712: mol_type = unassigned DNA; note = Canine kobuvirus 1 isolate B103 polyprotein mRNA, complete cds.1 sequence
tcaccctcttttccggtggtccggacccagaccaccgttactccattcagcttcttcggaacctgttcggaggaattaaacgggcacccactcaccctctctccctcctcgtaactaagtgtgtgcccagtctctttactcctgctggcttcaccgaccagtagtgaccaaaatgctaggtgaacctcctcccacgccctctgggcccccgcccagtttcctccccccagcctgacgtgtcacaggctgtacaaagaccccgcgaaagctgccaaaagtggcaattgtgggtcccccctttgtcaaggcgtcgagtctttctcccttaaggctagacccgtcagtgaattctgccgggcaactagtgacgccactgcatgcctccgacctcggctgcggagtgctgccccccaagtcgtgcccctgagccacaagttgtgctgtctggcaaacattgtctgtgagaatgttccgctgcggctgccaggcctggtaacaggctgccccagtgtgtgtagttctcatccagatctcggtctggcaacttgctgttaagacacggcgtaaggggcgtgtgccaacgccctggaacgagtgtccattctaataccccgaggaatgctacgcaggtacccctggtgaaccaggggtctgagcgtaggctaattgtctaagggtattttcatttcccactctttctttcttgttcata

SEQ ID NO: 1350 - DNA, 646 bp, Aichivirus A
  source 1..646: mol_type = genomic DNA
ggaattaaacgggcacccactcacccccatccccccctgtaacttaaagtgtgtgctcgtgaccttgactcctgcgggcttcaccgacccgtccagtgaacaaactgctaggtgatttcttcccctccctcagcctgggtgttccacatccaggtctttttcccccagcccgacatgtcatgggctgtttggaatccccgcgaaagctgctaacgtggcaattgtgggtcccccttccaacaagacaccgagtctttctcccttaaggctagccccgtgtggtgaactccaccgggcaactagtggtgtcaatgcatgcctccgacctcggccgcggagtgctgccccccaagttgtgaaactgaccaaggatgtgctgcctggcaagcatagtctgaggagatgttccgctgtggctggcaagcctggtaacaggtgccccagtgtgcgtagtctccttccggttcgtccggctgtcctttggtaaagacacaatgtaaggggcgtgtgccaacgccctggaaagagtgaacttttactgccctaggaatgccacgcaggtacccctggtttcccaccagggatctgagcgtgggctaattgtctaacgggtagtttcatttccctcctctcttttgttgacatc

SEQ ID NO: 1351 - DNA, 647 bp, Aichivirus A
  source 1..647: mol_type = genomic DNA
ggaattaaacgggcacccactcatccctacctccccctgtaacttgaagtgtgtgctcgtgaccttgactcctgcgggcttcaccgacccgtccagtgaacaaactgctaggtgatttcttccccttcccccacctggatgttctacatccaggtcttcctcccccagcccgacatgtcatgggctgtttggaacccccgcgaaagctgctaacgtggcaattgtgggtcccccttccaacaagacaccgagtctttctcccttaaggctagccccgtgtggtgaattccaccgggcaactagtggtgtcaatgcatgcctccgacctcggccgcggagtgctgccccccaagttgtgaaactgaccaaggattgtgctgcctggcaagcatagtctgaggagatgttccgctgtggctgccaaacctggtaacaggtgccccagtgcgcgtagtctccttccggttcgtccggctgtcctctggtaaagacacaatgtaaggggtgtgtgccaacgccctggaaagagtgaacttctactgccctaggaatgccacgcaggtacccctggtcccccaccagggatctgagcgtgggctaattgtctaacgggtagtttcatttctctcctctcctttgttgacatc

SEQ ID NO: 1352 - DNA, 579 bp, unidentified
  source 1..579: mol_type = unassigned DNA; note = Murine kobuvirus 1 isolate MKV1/NYC/2014/M014/0146, partial genome.1 sequence
gccaggtcgcatcgcctggttggtgaccaaactgctagatgctcctccctttccctcggggttggcgcaccgccatccctgcatcctccccccagcctgacatgctacaggctgtgcaagaaccccgcgaaagctgccaccgtggcaattgtgggtccccctcttgtcaaggcacagagtctttctcccttaaggctagacccctctgtgaattcagaggcggcaactagttgtgccactacatgcctcagacctcggtcgcggagtgctgttccccaaaccctgacactgccgcgtgagtatgctgcttggcaagcattgcctggatggtcgttccgctggggctgccaggtctggtaacagaccgctccagtgtgcgtagaccatctccagcttcggctggtgctcacaaggtaagactcggtgtaaggttcatgtgccaacaccctggaatgagtgaaaactctactgccctaggaatgctacgcaggtacccctgctcccttgggagccagggatctgagcgtaggctaattgtctgtcgggtagtttcatttcccacctcctagactgttcacc

SEQ ID NO: 1353 - DNA, 601 bp, Aichivirus A
  source 1..601: mol_type = genomic DNA
tttaagtgttgtgcccaatctcttgactcctgctggaaccaccgaccagtagtgtccaaaatgctaggtggaaaatcctcccttcccctctgggctccatgcccagcatcctccccccagcctgacgtgtcacaggctgtgcaaagaccccgcgaaagctgccaaaagtggcaattgtgggtcccccctttgtcaaggcgtcgagtctttctcccttaaggctagccccgtcagtgaattctgacgggcaactagtgacgccactgcatgcctccgacctcggccgcggagtgctgccccccaagtcatgcccctgaccacaagttgtgctgtctggcaaacactgtctgtgagaatgttccgctgtggctgccaagcctggtaacaggctgccccagtgtgcgtagttctcatccagacctcggtctggcaacttgctgttaagacatggcgtaaggggcgtgtgccaacgccctggaacgagtgtccactctaataccccgaggaatgctacgcaggtacccctggttcgccagggatctgagcgtaggctaattgtctaagggtattttcatttcccactctctctttcttgttcata

SEQ ID NO: 1354 - DNA, 601 bp, unidentified
  source 1..601: mol_type = unassigned DNA; note = unclassified Kobuvirus sequence
tttaagtgttgtgcccaatctcttgactcctgctggaaccaccgaccagtagtgtccaaaatgccaggtggaaaatcctcccttcccctctgggcttcatgcccggcatcctccccccagcctgacgtgccacaggctgtgcaaagaccccgcgaaagctgccaaaagtggcaattgtgggtcccccctttgtcaaggcgtcgagtctttctcccttaaggctagtcctgtcagtgaactctgtcgggcaactagtgacgccactgcatgcctccgacctcggccgcggagtgctgccccccaagtcatgcccctgaccacaagttgtgctgtctggcaaacattgtctgtgagaatgttccgctgtggctgccaagcctggtaacaggctgccccagtgtgcgtaattctcatccagacttcggtctggcaacttgctgttaagacatggcgtaaggggcgtgtgccaacgccctggaacgagtgtccactctaataccccgaggaatgctacgcaggtacccctggctcgccagggatctgagcgtaggctaattgtctaagggtattttcatttcccaccctcttcttcttgttcata

SEQ ID NO: 1355 - DNA, 493 bp, unidentified
  source 1..493: mol_type = unassigned DNA; note = unclassified Kobuvirus sequence
tcctccccccagcctgacgtgtcacaggctgtgcaaagaccccgcgaaagctgccaaaagtggcaattgtgggtcccccctttgtcaaggcgtcgagtctttctcccttaaggctagccccgacagtgaattctgtcgggcaactagtgacgccactgcatgcctccgacctcggccgcggagtgctgccccccaagtcgtgcccctgactacaagttgtgctgtctggcaaacattgtctgtgagaatgttccgctgtggctgccaagcctggtaacaggctgccccagtgtgcgtagttctcatccagacttcggtctggcaacttgctgttaagacgcggcgtaaggggcgtgtgccaacgccctggaacgagtgtccactctaataccccgaggaatgctacgcaggtacccctggctcgccagggatctgagcgtaggctaattgtctaagggtattttcatttcccactctttctctctcgttcata

SEQ ID NO: 1356 - DNA, 612 bp, unidentified; identical to SEQ ID NO: 680
  source 1..612: mol_type = unassigned DNA; note = unclassified Kobuvirus sequence

SEQ ID NO: 1357 - DNA, 766 bp, Aichivirus A; identical to SEQ ID NO: 1227
  source 1..766: mol_type = genomic DNA

SEQ ID NO: 1358 - DNA, 561 bp, Aichivirus A
  source 1..561: mol_type = genomic DNA
ccgaccagtagtgtccgaaatgctagagtggacttcctcccttcccctctgggtatcttgcccagtttcctccccccaacctgacgtgccacaggctgtgaaaacaccccgcgaaagctgccaaaagtgggaattgtgggtccccccctttgccaaggagtcgagtctttctcccttaaggctagccccatcagtgaattctgttgggcaactagtgacgccactgcatgcctccgacctcggccgcggagtgctgccccccaagtcgtgcccctgaccacaagttgtgctgtctggcaaacattgtctgtgagaatgttccgctgtggctgccaagcctggtaacaggctgccccagtgtgcgtagttctcatccagacttcggtctggcaacttgctgttaagacacggcgtaaggggcgtgtgccaacgccctggaacgagtgtccactctaataccccgaggaatgctacgtaggtacccctggttcgccagggatctgagcgtaggctaattgtctaagggtattttcatttcccactctctctttcttgttcata

SEQ ID NO: 1359 - DNA, 699 bp, unidentified
  source 1..699: mol_type = unassigned DNA; note = unclassified Salivirus sequence
tatggcaggcgggcttgtggacggtttcggcccacccacagcaagaatgccatcatctgtcctcacccccaattttccctttcttcccctgcaatcatcacgcttactcgcatgtgcattgagtggtgcatgtgttgaacaaacagctacactcacatgggggcgggttttcccgccctacggcctctcgcgaggcccacccttcccctccccttataactacagtgctttggcaggtaagcatcctgatcccccgcggaagctgctcacgtggcaactgtggggacccagacaggttatcaaaggcacccggtctttccgccttcaggagcatccccactagtgaattctagtggggctctgcttggtgccaacctcccccaaatgcgcgctgcgggagtgctcttccccaacccatcctagtatcctctcatgtgtgtgcttggtcagcatatctgagacgacgttccgctgtcccagaccagtccagtaatggacgggccagtgtgcgtagtcgtcttccggcttgtccggcgcatgtttggtgaaccggtggggtaaggttggtgtgcccaacgcccgtactttggtgacacctcaagaccacccaggaatgccagggaggtaccccgcctcacggcgggatctgaccctgggctaattgtctacggtggttcttcttgcttccacttctttctt

SEQ ID NO: 1360 - DNA, 709 bp, Salivirus A
  source 1..709: mol_type = genomic DNA
tatggcaggcgggcttgtggacggcttcggcccacccacagcaagaatgccatcatctgtcctcacccccaattttcccttttcttcccctgcaaccattacgcttactcgcatgtgcattgagtggtgcatgtgttgaacaaacagctacactcacatgggggcgggttttcccgccctacggcctctcgcgaggcccaccccttccctccccttataactacagtgctttggtaggtaagcatcctgatcccccgcggaagctgctcacgtggcaactgtggggacccagacaggttatcaaaggcacccggtctttccgccttcaggagtatccctactagtgaattctagcggggctctgcttggtgccaacctcccccaaatgcgcgctgcgggagtgctcttccccaactcaccctagtatcctctcatgtgtgtgcttggtcagcatatctgagacgatgttccgctgtcccagaccagtccagtaatggacgggccagtgcgtgtagtcgtcttccggcttgtccggggcatgtttggtgaaccggtggggtaaggttggtgtgcccaacgcccgtactttggtgacacctcaagaccacccaggaatgccagggaggtaccccacctcacggtgggatctgaccctgggctaattgtctacggtggttcttcttgcttccacttctttcttctgttcacg

SEQ ID NO: 1361 - DNA, 720 bp, unidentified
  source 1..720: mol_type = unassigned DNA; note = unclassified Salivirus sequence
cccctttcgaccgacctatggcaggcgggcttgtggacggcttcggcccacccacagcaagaatgccatcatctgtcctcacccccatcttcccctttcttccctgcaaccgtcacgcttactcgcatgtgcattgagtggtgcacgtgtcgaacaaacagctacactcacatggggcgggttttcccgccttgcggcctctcgcgaggcccacccctccctctcctcccataactacagtgctttggtaggtaagcatcctgatcccccgcggaagctgctcacgtggcaactgtggggacccagacaggttatcaaaggcacccggtctttccgccttcaggagtatccctgctagtgaattctagtagggctctgcttggtgccaacctcccccaaatgcgcgctgcaggagtgctcttccccaactcaccctagtatcctctcatgtgtgtgcttggtcagcatatctgagacgatgttccgctgtcccagaccagtccagtaatggacgggccagtgtgcgtagtcgtcttccggcttgcccggcgcatgtttggtgaaccggtggggtaaggttggtgtgcccaacgcccgtactttggtgatacctcaagaccacccaggaatgccagggaggtaccccgcttcacagcgggatctgaccctgggctaattgtctacggtggttcttcttgcttccacttctttctactgttt

SEQ ID NO: 1362 - DNA, 724 bp, unidentified
  source 1..724: mol_type = unassigned DNA; note = unclassified Salivirus sequence
cttccccctttcgaccgccctatggcaggcgggcttgtggacggcttcggcccacccacagcaagaatgccatcatctgtcctcacccccatcttcccctttcttccctgcaaccgtcacgcttactcgcatgtgcattgagtggtgcacgtgtcgaacaaacagctacactcacatggggcgggttttcccgccttgcggcctctcgcgaggcccacccctcccccccctcccataactacagtgctttggtaggtaagcatcctgatcccccgcggaagctgctcacgtggcaactgtggggacccagacaggttatcaaaggcacccggtctttccgccttcaggagtatccctgctagtgaattctagtagggctctgcttggtgccaacctcccccaaatgcgcgctgcaggagtgctcttccccaactcaccctagtatcctctcatgtgtgtgcttggtcagcatatctgagacgatgttccgctgtcccagaccagtccagtaatggacgggccagtgtgcgtagtcgtcttccggcttgcccggcgcatgtttggtgaaccggtggggtaaggttggtgtgcccaacgcccgtactttggtgatacctcaagaccacccaggaatgccagggaggtaccccgcttcacagcgggatctgaccctgggctaattgtctacggtggttcttcttgcttccacttctttctactgttt

SEQ ID NO: 1363 - DNA, 731 bp, unidentified; identical to SEQ ID NO: 931
  source 1..731: mol_type = unassigned DNA; note = unclassified Salivirus sequence

SEQ ID NO: 1364 - DNA, 650 bp, Salivirus A
  source 1..650: mol_type = genomic DNA
tctgtcctcaccccatcttcccttctttcctgcaccgttacgcttactcgcatgtgcattgagtggtgcacgtgcttgaacaaacagctacactcacatgggggcgggttttcccgccctgcggcctctcgcgaggcccacccctccccttcctcccataactacagtgctttggtaggtaagcatcctgatcccccgcggaagctgctcacgtggcaactgtggggacccagacaggttatcaaaggcacccggtctttccgccttcaggagtatccctgctagtgaattctagtagggctctgcttggtgccaacctcccccaaatgcgcgctgcgggagtgctcttccccaactcaccctagtatcctctcatgtgtgtgcttggtcagcatatctgagacgatgttccgctgtcccagaccagtccagtaatggacgggccagtgtgcgtagtcgtcttccggcttgtccggcgcatgtttggtgaaccggtggggtaaggttggtgtgcccaacgcccgtactttggtgatacctcaagaccacccaggaatgccagggaggtaccccgcttcacagcgggatctgaccctgggctaattgtctacggtggttcttcttgcttccacttctttctactgttcatg

SEQ ID NO: 1365 - DNA, 708 bp, unidentified
  source 1..708: mol_type = unassigned DNA; note = Salivirus A isolate BN-2, complete genome.1 sequence
tatggcaggcgggcttgtggacggcttcggcccacccacagcaagaatgccatcatctgtcctcacccccatgtttcccctttctttccctgcaaccgttacgcttactcgcaggtgcatttgagtggtgcacgtgttgaataaacagctacactcacatgggggcgggttttcccgccctgcggcctctcgcgaggcccacccctccccttcctcccataactacagtgctttggtaggtaagcatcctgatcccccgcggaagctgctcacgtggcaactgtggggacccagacaggttatcaaaggcacccggtctttccgccttcaggagtatccctgctagtgaattctagtagggctctgcttggtgccaacctcccccaaatgcgcgctgcgggagtgctcttccccaactcaccctagtatcctctcatgtgtgtgcttggtcagcatatctgagacgatgttccgctgtcccagaccagtccagtaatggacgggccagtgtgcgtagtcgtcttccggcttttccggcgcatgtttggtgaaccggtggggtaaggttggtgtgcccaacgcccgtactttggtgatacctcaagaccacccaggaatgccagggaggtaccccgcttcacagcgggatctgaccctgggctaattgtctacggtggttcttcttgcttccacttctttctactgttc

SEQ ID NO: 1366 - DNA, 484 bp, unidentified
  source 1..484: mol_type = unassigned DNA; note = Salivirus sp. isolate ETH_P14_2016 polyprotein gene, complete cds.1 sequence
gtgctttggcaggtaagcatcctgatcccccgcggaagctgctcacgtggcaactgtggggacccagacaggttatcaaaggcacccggtctttccgccttcaggagtaccctcactagtgaattctagtggggctctgcttggtgccaacctcccccaaatgcgcgctgcgggagtgctcttccccaacccatcctagtaccctctcatgtgtgtgcttggtcagcacatctgagacgacgttccgctgtcccagaccagtccagtaatggacgggccagtgtgcgtagtcgtcttccggcttgtccggcgcatgtttggtgaaccggtggggtaaggttggtgtgcccaatgcccgtactttggtgatacctcaagaccacccaggaatgccagggaggtaccccgcctctcggcgggatctgaccctgggctaattgtctacggtggttcttcttgcttccactcttttcttctgttcacg

SEQ ID NO: 1367 - DNA, 718 bp, unidentified
  source 1..718: mol_type = unassigned DNA; note = unclassified Salivirus sequence
tttcgaccgccttatggcaggcgggcttgtggacggcttcggcccacccacagcaagaatgccatcatctgtcctcacccccatttctcccctccttcccctgcaaccattacgcttactcgcatgtgcattgagtggtgcacgtgttgaacaaacagctacactcacgtgggggcgggttttcccgcccttcggcctctcgcgaggcccacccttccccttcctcccataactacagtgctttggtaggtaagcatcctgatcccccgcggaagctgctcgcgtggcaactgtggggacccagacaggttatcaaaggcacccggtctttccgcctccaggagtatccctgctagtgaattctagtggggctctgcttggtgccaacctcccccaaatgcgcgctgcgggagtgctcttccccaactcaccctagtatcctctcatgtgtgtgcttggtcagcatatctgagacgatgttccgctgtcccagaccagtccagcaatggacgggccagtgtgcgtagtcgtcttccggcttgtccggcgcatgtttggtgaaccggtggggtaaggttggtgtgcccaacgcccgtactttggtgacaactcaagaccacccaggaatgccagggaggtaccccgcctcacggcgggatctgaccctgggctaattgtctacggtggttcttcttgcttccatttctttcttctgttc

SEQ ID NO: 1368 - DNA, 624 bp, Salivirus A
  source 1..624: mol_type = genomic DNA
ttctcctgcaaccattacgcttaatcgcatgtgcattgagtggtgcatgtgttgaacaaacagctacaatcacatgggggcgggttttcccgccccacggcttctcgcgaggcccatccctcccttttctcccataactacagtgctttggtaggtaagcatcccgatctcccgcggaagctgctcacgtggcaactgtggggacccagacaggttatcaaaggcacccggtctttccgccttcaggagtatccctgctagcgaattctagtagggctctgcttggtgccaacctctcccaaatgcgcgctgcgggagtgctcttccccaaatcaccccagtatcctctcatgtgtgtgcctggtcagcatatctgagacgatgttccgctgtcccagaccagtccagtaatggacgggccagtgtgcgtagtcgtcctccggcttgtccggcgcatgtttggtgaaccggtggggtaaggttggtgtgcccaacgcccgtaatcaggggatacctcaaggcacccaggaatgccagggaggtatcccgcctcacagcgggatctgaccctggggtaaatgtctgcggggggtcctcttggcccaattctcagtaattttcagg

SEQ ID NO: 1369 - DNA, 624 bp, unidentified; identical to SEQ ID NO: 736
  source 1..624: mol_type = unassigned DNA; note = Salivirus A strain SH1 polyprotein gene, complete cds.1 sequence

SEQ ID NO: 1370 - DNA, 730 bp, unidentified
  source 1..730: mol_type = unassigned DNA; note = unclassified Salivirus sequence
acatggggggtctgcggacggcttcggcccacccgcgacaagaatgccgtcatctgtcctcattacccgtattccttcccttcccccgcaaccaccacgcttactcgcgcacgtgttgagtggcacgtgcgttgtccaaacagctacacccacacccttcggggcgggtttgtcccgccctcgggttcctcgcggaacccccccctccctctctctctttctatccgccctcacttcccataactacagtgctttggtaggtgagcaccctgaccccccgcggaagctgctaacgtggcaactgtggggatccaggcaggttatcaaaggcacccggtctttccgccttcaggagtatctctgccggtgaattccggtagggctctgcttggtgccaacctcccccaaatgcgcgctgcgggagtgctcttccccaactcatcttagtaacctctcatgtgtgtgcttggtcagcatatctgaggcgacgttccgctgtcccagaccagtccagcaatggacgggccagtgtgcgtagtcgctttccggttttccggcgcatgtttggcgaaacgctgaggtaaggttggtgtgcccaacgcccgtaatttggtgatacctcaagaccacccaggaatgccagggaggtaccccacttcggtgggatctgaccctgggctaattgtctacggtggttcttcttgcttccacttctcttttttctggcatg

SEQ ID NO: 1371 - DNA, 752 bp, unidentified; identical to SEQ ID NO: 128
  source 1..752: mol_type = unassigned DNA; note = unclassified Salivirus sequence

SEQ ID NO: 1372 - DNA, 471 bp, unidentified; identical to SEQ ID NO: 12
  source 1..471: mol_type = unassigned DNA; note = Kobuvirus cattle/Kagoshima-1-22-KoV/2014/JPN genomic RNA, nearly1 sequence

SEQ ID NO: 1373 - DNA, 750 bp, Aichivirus E; identical to SEQ ID NO: 1201
  source 1..750: mol_type = genomic DNA

SEQ ID NO: 1374 - DNA, 555 bp, Aichivirus C
  source 1..555: mol_type = genomic DNA
cctcggccccctcaccctcttttccggtggccattcgcccgggccaccgttactccactccactccttcgggactggtttggaggaacacaacagggcttcccatccctgtttaccctttattccatcatcctttccccaagtttaccctatccacaccccactgactgactcctttggattttgacctcagaatgcctatttgacctcccactcgcctctcccttttcggattgccggtggtgcctggcggaaaaagcacaagtgtgttgcaggctaccaaactcctacccgacaaaggtgcgtgtccgcgtgctgagtaatgggataggagatgcctacaacaggctcgcccatgagtagagcatggactgcggtgcatgtgacttcggtcaccacgggcatagcattgctcacccgtgaatcaagtcatcgagatttctctgacctctgaagtgcactgtggttgcgtggctgggaatccacgcttgaccatgtactgcttgatagagtcgcggctggccgactcatgggttaaagtcagttgacaagacac

SEQ ID NO: 1375 - DNA, 555 bp, Aichivirus C
  source 1..555: mol_type = genomic DNA
cctcggccctctcaccctcttttccggtggccactcgcccgggccaccgttactccattccactccttcgggactggtttggaggaacataacagggcttcccatccctgtttatcctaattccacttacctttctccataattaaccctatccacaccccactgaccgatccctttggattttgacctcagaatgcctacctgacctcccacttgcctttcccttttcggattgccggtggtgcctggcggaaaaagcacaagtgtgttgatggctaccaaactcctacccgacaaaggtgcgtgtccgcgtgctgagtaatgggataggagatgccattgacaggctcgcccatgagtagagcatggactgcggtgcatgtgacttcggtcaccaggggcatagcattgctcacccctgaatcaagtcatcgagatttctctgacctctgaagtgcactgtggttgcgtggctgggaatccacgcttgaccatgtactgcttgatagagtcgcggctggccgactcatgggttaaagtcagttgacaagacac

SEQ ID NO: 1376 - DNA, 556 bp, Aichivirus C
  source 1..556: mol_type = genomic DNA
cctcggccccctcaccctcttttccggtggccactcgcccgggccaccgttactccactccactccttcgggactggtttggaggaacataacagggcttcccatccctgtttacccttaattccatttaccttctcccccaactaaccctatccacaccccactgactgactcctttggattttgacctcagaatgcctacttgacctcccacttgcctctcccttctcggattgccggtggtgcctggcggaaaaagcacaagtgtgttgcaggctaccaaactcctacccgacaaaggtgcgtgtccgcgtgctgagtaatgggataggagatgcctacaacaggctcgcccatgagtagagcatggactgcggtgcatgtgacttcggtcaccacgggcatagcattgctcacccgtgaatcaagtcatcgagatttctctgacctctgaagtgcactgtggttgcgtggctgggaatccacgcttgaccatgtactgcttgatagagtcgcggctggccgactcatgggttaaagtcagttgacaagacac

SEQ ID NO: 1377 - DNA, 556 bp, unidentified
  source 1..556: mol_type = unassigned DNA; note = Porcine kobuvirus strain WUH1, complete genome.1 sequence
cctcggccccctcaccctcttttccggtggccactcgcccgggccaccgttactccactccactccttcgggactggtttggaggaacacaacagggcttcccatccctgttcaccctacactccacataccctttccctcaaccaaccctatccaaaccccactgaccgactcccttggattttgacctcagaatgcctacttgacctcccacttgcctctcccttctcggattgccggtggtgcctggcggaaaaagcacaagtgtgttgcaggctatcaaacttctacccgacaaaggcgcgtgtccgcgtgctgagtaatgggataggagatgcctacaacaggctcgcccatgagtagagcatggactgcggtgcatgtgacttcggtcaccacgggcatagcattgctcacccgtgaatcaagtcatcgagatttctctgacctctgaagtgcactgtggttgcgtggctgggaatccatgcttgaccatgtactgcttgatagagtcgcggctggccgactcatgggttaaagtcagttgacaagacac

SEQ ID NO: 1378 - DNA, 555 bp, unidentified
  source 1..555: mol_type = unassigned DNA; note = Porcine kobuvirus isolate K-11/2012/CH, complete genome.1 sequence
cctcggccccctcaccctcttttccggtggccacccgcccgggccaccgttactccactccactccttcgggactggtttggaggaacataacagggcttcccatccctgtttacccttattccacttaccctttcccttaaccaaccctatccacaccccactgactgattcctttggattttgacctcagaatgcctacttgacctcccacttgtctctcccttctcggattgccggtggtgcctggcggaaaaagcacaagtgtgttgcaggctaccaaactcctacccgacaaaggtgcgtgtccgcgtgctgagtaatgggataggagatgcctacaacaggctcgcccatgagtagagcatggactgcggtgcatgtgacttcggtcaccacgggcatagcattgctcacccgtgaatcaagtcatcgagatttctctgacctctgaagtgcactgtggttgcgtggctgggaatccacgcttgaccatgtactgcttgatagagtcgcggctggccgactcatgggttaaagtcagttgacaagacac

SEQ ID NO: 1379 - DNA, 555 bp, Aichivirus C
  source 1..555: mol_type = genomic DNA
cctcggccccctcaccctcttttccggtggccacacgcccgggccaccgttactccactccactccttcgggactggtttggaggaacacaacagggcttcccatccctgtttaccctttattccatcatcctttccccaagtttaccctatccacaccccactgactgactcctttggattttgacctcagaatgcctatttgacctcccactcgcctctcccttttcggattgccggtggtgcctggcggaaaaagcacaagtgtgttgcaggctaccaaactcctacccgacaaaggtgcgtgtccgcgtgctgagtaatgggataggagatgcctacaacaggctcgcccatgagtagagcatggactgcggtgcatgtgacttcggtcaccacgggcatagcattgctcacccgtgaatcaagtcatcgagatttctctgacctctgaagtgcactgtggttgcgtggctgggaatccacgcttgaccatgtactgcttgatagagtcgcggctggccgactcatgggttaaagtcagttgacaagacac

SEQ ID NO: 1380 - DNA, 555 bp, Aichivirus C
  source 1..555: mol_type = genomic DNA
cctcggccccctcaccctcttttccggtggccacccgcccgggccaccgttactccactccactccttcgggactggtttggaggaacataacagggcttcccatccctgtttacccttactccactcacccttctccttgaccaaccctatccacaccccactgactgactcctttggattttgacctcagaatgcctacctgacctcccacttgcctctcccatctcggactgccggtggtgcctggcggaaaaagcacaagtgtgttgatggctaccaaactcctacccgacaaaggtgcgtgtccgcgtgctgagtaatgggataggagatgccattgacaggctcgcccatgagtagagcatggactgcggtgcatgtgacttcggtcaccaggggcatagcattgctcacccctgaatcaagtcatcgagatttctctgacctctgaagtgcactgtggttgcgtggctgggaatccacgcttgaccatgtactgcttgatagagtcgcggctggccgactcatgggttaaagtcagttgacaagacac

SEQ ID NO: 1381 - DNA, 555 bp, unidentified
  source 1..555: mol_type = unassigned DNA; note = Porcine kobuvirus swine/K-30-HUN/2008/HUN, complete genome.1 sequence
cctcggccccctcaccctcttttccggtggccacccgcccgggccaccgttactccactccactccttcgggactggtttggaggaacataacagggcttcccatccctgtttacccttactccactcacccctccccttgaccaaccctatccacaccccactgactgactcctttggatcttgacctcggaatgcctacttgacctcccacttgcctctcccttttcggattgccggtggtgcctggcggaaaaagcacaagtgtgttgttggctaccaaactcctacccgacaaaggtgcgtgtccgcgtgctgagtaatgggataggagatgccaataacaggctcgcccatgagtagagcatggactgcggtgcatgtgacttcggtcaccaggggcatagcattgctcacccctgaatcaagtcatcgagatttctctgacctctgaagtgcactgtggttgcgtggctgggaatccacgcttgaccatgtactgcttgatagagtcgcggctggccgactcatgggttaaagtcagttgacaagacac

SEQ ID NO: 1382 - DNA, 555 bp, unidentified
  source 1..555: mol_type = unassigned DNA; note = Porcine kobuvirus swine/S-1-HUN/2007/Hungary, complete genome.1 sequence
cctcggccccctcaccctcttttccggtggccacccgcccgggccaccgttactccactccactccttcgggactggtttggaggaacataacagggcttcccatccctgtttacccttactccactcacccttccccttgaccaaccctatccacaccccactgactgactcctttggatcttgacctcggaatgcctacttgacctcccacttgcctctcccttttcggattgccggtggtgcctggcggaaaaagcacaagtgtgttgttggctaccaaactcctacccgacaaaggtgcgtgtccgcgtgctgagtaatgggataggagatgccaataacaggctcgcccatgagtagagcatggactgcggtgcatgtgacttcggtcaccaggggcatagcattgctcacccctgaatcaagtcatcgagatttctctgacctctgaagtgcactgtggttgcgtggctgggaatccacgcttgaccatgtactgcttgatagagtcgcggctggccgactcatgggttaaagtcagttgacaagacac

SEQ ID NO: 1383 - DNA, 555 bp, Aichivirus C
  source 1..555: mol_type = genomic DNA
cctcggccctctcaccctcttttccggtggccactcgcccgggccaccgttactccactccactccttcgggactggtttggaggaacataacagggcttcccacccctgtttaccctcactccacttatccttctcctcaactaaccctatccacaccccactgattgattcctttggatttcgacctcagaatgcctacttgacctcccacttgcctctcccctctcggattgccggtggtgcctggcggaaaaagcacaagtgtgttgttggctaccaaactcctacccgacaaaggtgcgtgtccgcgtgctgagtaatgggatgggagatgccaataacaggctcgcccatgagtagagcatggactgcggtgcatgtgacttcggtcaccaggggcatagcattgctcacccctgaatcaagtcatcgagatttctctgacctctgaagtgcactgtggttgcgtggctgggaatccacgcttgaccatgtactgcttgatagagtcgcggctggccgactcatgggttaaagtcagttgacaagacac

SEQ ID NO: 1384 - DNA, 555 bp, Aichivirus C
  source 1..555: mol_type = genomic DNA
cctcggccctctcaccctcttttccggtggccactcgcccgggccaccgttactccactccactccttcgggactggtttggaggaacataacagggcttcccacccctgttcacccttactccactcacccttatccttaaccaaccctatccacaccccactgactgattcctttggattttgacctcagaatgcccacctgacctcccacttgcttctcccttctcggattgccggtggtgcctggcggaaaaagcacaagtgtgttgttggctaccaaactcctacccgacaaaggtgcgtgtccgcgtgctgagtaatgggataggagatgccaatgacaggctcgcccatgagtagagcatggactgcggtgcatgtgacttcggtcaccaggggcatagcattgctcacccctgaatcaagtcatcgagacttctctgacctctgaagtgcactgtggttgcgtggctgggaatccacgcttgaccatgtactgcttgatagagtcgcggctgaccgactcatgggttaaagtcagttgacaagacac

SEQ ID NO: 1385 - DNA, 555 bp, Aichivirus C
  source 1..555: mol_type = genomic DNA
cctcggccctctcaccctcttttccggtggccactcgcccgggccaccgttactccactccactccttcgggactggtttggaggaacataacagggcttcccatccctgtttacccttattccacttacccttctcctcaaccaaccctatccacaccccactgactgattcctttggattttgacctcagaatgcctacctgacctcccacttgcctctcccctctcggattgccggtggtgcctggcggaaaaagcacaagtgtgttgttggctaccaaactcctacccgacaaaggtgcgtgtccgcgtgctgagtaatgggataggagatgccaataacaggctcgcccatgagtagagcatggactgcggtgcatgtgacttcggtcaccaggggcatagcattgctcacccctgaatcaagtcatcgagatttctctgacctctgaagtgcactgtggttgcgtggctgggaatccacgcttgaccatgtactgcttgatagagtcgcggctggccgactcatgggttaaagtcagttgacaagacac

SEQ ID NO: 1386 - DNA, 555 bp, Aichivirus C
  source 1..555: mol_type = genomic DNA
cctcggccctctcaccctcttttccggtggccactcgcccgggccaccgttactccactccactccttcgggactggtttggaggaacataacagggcttcccatccctgtttaccctcattccacttacccttccccttaaccaaccctatccacaccccactgactgattcctttggattttgacctcagaatgcctacctgacctcccacttgcttctcccctctcggattgccggtggtgcctggcggaaaaagcacaagtgtgttgttggctaccaaactcctacccgacaaaggtgcgtgtccgcgtgctgagtaatgggataggagatgccaataacaggctcgcccatgagtagagcatggactgcggtgtatgtgacttcggtcaccaggggcatagcattgctcacccctgaatcaagtcatcgagatttctctgacctctgaagtgcactgtggttgcgtggctgggaatccacgcttgaccatgtactgcttgatagagtcgcggctggccgactcatgggttaaagtcagttgacaagacac

SEQ ID NO: 1387 - DNA, 555 bp, Aichivirus C
  source 1..555: mol_type = genomic DNA
cctcggccctctcaccctcttttccggtggccactcgcccgggccaccgttactccactccactccttcgggactggtttggaggaacataacagggcttcccacccctgttcaccctaactccacttaccctttcccttaaccaaccctatccacaccccactgattgactcccttggattttgacctcggaatgcctacttgacctcccacttgcctttcccttcccggattgccggtggtgcctggcggaaaaagcacaagtgtgttgttggctaccaaactcctacccgacaaaggtgcgtgtccgcgtgctgagtaatgggataggagatgccaatgacaggctcgcccatgagtagagcatggactgcggtgcatgtgacttcggtcaccaggggcatagcattgctcacccctgaatcaagtcatcgagatttctctgacctctgaagtgcactgtggttgcgtggctgggaatccacgcttgaccatgtactgcttgatagagtcgcggctggccgactcatgggttaaagtcagttgacaagacac

SEQ ID NO: 1388 - DNA, 555 bp, Aichivirus C
  source 1..555: mol_type = genomic DNA
cctcggccctctcaccctcttttccggtggccactcgcccgggccaccgttactccactccactccttcgggactggtttggaggaacacaacagggcttcccacccctgtttacccttactccactcacccttccccataaccaaccctatccacaccccactgactgactcctttggattttgacctcagaatgcctatttaacctcccacttgcctctcccctctcggattgccggtggtgcctggcggaaaaagcacaagtgtgttgttggctaccaaactcctacccgacaaaggtgcgtgtccgcgtgctgagtaatgggataggagatgccaatgacaggctcgcccatgagtagagcatggactgtggtgcatgtgacctcggtcaccaggggcatagcattgctcacccctgaatcaagtcatcgagatttctctgacctctgaagtgcactgtggttgcgtggctgggaatccacgcttgaccatgtactgcttgatagagtcgcggctggccgactcatgggttaaagtcagttgacaagacac

SEQ ID NO: 1389 - DNA, 555 bp, unidentified
  source 1..555: mol_type = unassigned DNA; note = Porcine kobuvirus strain KobuV/Pig-wt/ESP/VC20B/2017, complete1 sequence
cctcggccctctcaccctcttttccggtggccactcgcccgggccaccgttactccactccactccttcgggactggtttggaggaacataacagggcttcccatccctgtttaccctcattccacttacccttttccttaaccaaccctatccacaccccactgactgattcctttggattttgacctcagaacgcctacttgacctcccacttgcttctcccttcccggattgccggtggtgcctggcggaaaaagcacaagtgtgttgttggctaccaaactcctacccgacaaaggtgcgtgtccgcgtgctgagtaatgggataggagatgccaataacaggctcgcccatgagtagagcatggactgcggtgcatgtgactccggtcaccgggggcatagcattgctcacccccgaatcaagtcatcgagatttctctgacctctgaagtgcactgtggttgtgtggctgggaatccacacttgaccatgtactgcttgatagagtcgcggctggccgactcatgggttaaagtcagttgacaagacac

SEQ ID NO: 1390 - DNA, 558 bp, Aichivirus C
  source 1..558: mol_type = genomic DNA
cctcggccccctcaccctcttttccggtggccactcgcccgggccaccgttactccactccactccctcgggactggtttggaggaacataacagggcttcccatccctgtttttacccttatttccatctaccctttcccttaaccaaccctatccacaccccactgactgactcctttggattttgacctcagaatgcctacttgacctcccacttgcctctcccttatcggattgccggtggtgcctggtggaaaaagcacaagtgtgttgttggctaccaaactcctacccgacaaaggtgcgtgtccgcgtgctgagtaatgggataggagatgccaatgacaggctcgcccatgagtagagcatggactgcggtgcatgtgacttcggtcaccaggggcatagcattgctcacccctgaatcaagtcatcgagatttctctgacctctgaagtgcactgtggttgcgtggctgggaatccacgcttgaccatgtactgcttgatagagtcgcggctggccgactcatgggttaaagtcagttgacaagacac

SEQ ID NO: 1391 - DNA, 555 bp, unidentified
  source 1..555: mol_type = unassigned DNA; note = Porcine kobuvirus isolate JXAT2015, complete genome.1 sequence
cctcggccccctcaccctcttttccggtggccactcgcccgggccaccgttacttcactccactccttcgggactggtttggaggaacataacagggcttcccatccctgtttacccttatttccacttaactttttcccaatctactctaaccacaccccactgactgactcctttggattttgacctcagaatgcctacctggcctcccactcgcctcatccttttcggattgccggtggtgcctggcggaaaaagcacaagtgtgttgcaggctaccaaactcctacccgacaaaggtgcgtgtccgcgtgctgagtaatgggataggagatgcctacaacaggctcgcccatgagtagagcatggactgcggtgcatgtgacttcggtcaccacgggcatagcattgctcacccgtgaatcaagtcatcgagatttctctgacctctgaagtgcactgtggttgcgtggctgggaatccacgcttgaccatgtactgcttgatagagtcgcggctggccgactcatgggttaaagtcagttgacaagacac

SEQ ID NO: 1392 - DNA, 555 bp, Aichivirus C
  source 1..555: mol_type = genomic DNA
cctcggccccctcaccctcttttccggtggccactcgcccgggccaccgttacttcactccactccttcgggactggtttggaggaacacaacagggcttcccaacccctgttacccttactctaattcccttttccctcaaccaaccctttccactccccactgactgactcccttggattttgacctcagaatgcctacttgacctcccacttgcctttcccttctcggattgccggtggtgcctggcggaaaaagcacaagtgtgttgcaggctaccaaactcctacccgacaaaggtgcgtgtccgcgtgctgagtaatgggataggagatgcctacaacaggctcgcccatgagtagagcatggactgcggtgcatgtgacttcggtcaccacgggcatagcattgctcacccgtgaatcaagtcatcgagatttctctgacctctgaagtgcactgtggttgcgtggctgggaatccacgcttgaccatgtactgcttgatagagtcgcggctggccgactcatgggttaaagtcagttgacaagacac

SEQ ID NO: 1393 - DNA, 555 bp, unidentified
  source 1..555: mol_type = unassigned DNA; note = Porcine kobuvirus SH-W-CHN/2010/China, complete genome.1 sequence
cctcggccccctcaccctcttttccggtggccactcgcccgggccaccgttacttcactccactccttcgggactggtttggaggaacataacagggcttcccatccctgtttaccctcattccactcaccccttccctaaaccaaccctatccacaccccactgactgactcctttggattttgacctcagaatgcctacctgacctcccacttgcctctcccttctcggattgccggtggtgcctggcggaaaaagcacaagtgtgttgcaggctaccaaactcctacccgacaaaggtgcgtgtccgcgtgctgagtaatgggataggagatgtctacaacaggctcgcccatgagtagagcatggactgcggtgcatgtgacttcggtcaccacgggcatagcattgctcacccgtgaatcaagtcatcgagatttctctgacctctgaagtgcactgtggttgcgtggctgggaatccacgcttgaccatgtactgcttgatagagtcgcggctggccgactcatgggttaaagtcagttgacaagacac

SEQ ID NO: 1394 - DNA, 555 bp, unidentified
  source 1..555: mol_type = unassigned DNA; note = Porcine kobuvirus isolate EdoMex/2018/205, complete genome.1 sequence
cttcggccctctcaccctcttttccggtggccactcgcccgggccaccgttactccactccactccttcgggactggtttggaggaacataacagggcttcccatccctgtttaccctcattccactcaccccttcccttgaccaaccccatccacaccccactgactgattcctttggattttgacctcagaatgcctacctgacctcccactcgcctctccctcttcggattgccggtggtgcctggcggaaaaagcacaagtgtgttgctggctaccaaactcctacccgacaaaggtgcgtgtccgcgtgctgagtaatgggataggagatgctaacaacaggctcgcccatgagtagagcatggactgcggtgcatgtgacttcggtcaccacgggcatagcattgctcacccgtgaatcaagtcatcgagatttctctgacctctgaagtgcactgtggttgcgtggctgggaatccacgcttgaccatgtactgcttgatagagtcgcggctggccgactcatgggttaaagtcagttgacaagacac

SEQ ID NO: 1395 - DNA, 555 bp, unidentified
  source 1..555: mol_type = unassigned DNA; note = Porcine kobuvirus strain KobuV/Pig-wt/ESP/VC8/2017, complete1 sequence
cctcggccccctcaccctcttttccggtggccacacgcccgggccaccgttactccactccactccctcgggactggtttggaggaacacaacagggcttcccatccctgtttaccctcactccacccatccttctccttaaccaaccctatccacaccccactgactgactccattggattttgacctcagaatgcctacctgacctcccacttgcctctcccttctcggattgccggtggtgcctggcggaaaaagcacaagtgtgttgttggctaccaaactcctacccgacaaaggtgcgtgtccgcgtgctgagtaatgggataggagatgccaatgacaggctcgcccatgagtagagcatggactgcggtgcatgtgactttggtcaccaggggcatagcattgctcacccctgaatcaagtcatcgagatttctctgacctctgaagtgcgctgtggttgcgtggctgggaatccacgcttgaccatgtactgcttgatagagtcgcggctggccgactcatgggttaaagtcagttgacaagacac

SEQ ID NO: 1396 - DNA, 555 bp, unidentified
  source 1..555: mol_type = unassigned DNA; note = Porcine kobuvirus strain KobuV/Pig-wt/ESP/P452/2017, complete1 sequence
cctcggccccctcaccctcttttccggtggccacacgcccgggccaccgttactccactccactccctcgggactggtttggaggaacacaacagggcttcccatccctgtttaccctcactccacttacccttctccttaaccaaccctatccacacctcactgactgattcctttggattttgacctcagaatgcctacttgacctcccacttgcctttcccttctcggattgccggtggtgcctggcggaaaaagcacaagtgtgttgttggctactaaactcctacccgacaaaggtgcgtgtccgcgcgctgagtaatgggataggagatgccaataacaggctcgcccatgagtagagcatggactgcggtgcatgtgacttcggtcaccaggggcatagcattgctcacccctgaatcaagtcatcgagacttctctgacctctgaagtgcactgtggttgcgtggctgggaatccacgcttgaccatgtactgcttgatagagtcgcggctggccgactcatgggttaaagtcagttgacaagacac

SEQ ID NO: 1397 - DNA, 556 bp, Aichivirus C
  source 1..556: mol_type = genomic DNA
ccctcggccccctcaccctcttttccggtgcccacccgcccgggccaccgttactccactccactccttcgggactggtttggaggaacataacagggcttcccacccctgtttacccttattccactcacccttctccttaatcaaccctatccacaccccattgactgactcctttggattttgacctcagaatgcctacctgacctcccacttgcctctcccttctcggactgccggtggtgcctggcggaaaaagcacaagtgtgttgatggctaccaaactcttacccgacaaaggtgcgtgtccgcgtgctgagtaatgggataagagatgccattgacaggctcgcccatgagtagagcatggactgcggtgcatgtgacttcggtcaccaggggcatagcattgctcacccctgaatcaagtcatcgagatttctctgacctctgaagtgcactgtggttgcgtggctgggaatccacgcttgaccatgtactgcttgatagagtcgcggctggccgactcatgggttaaagtcagttgacaagacac

SEQ ID NO: 1398 - DNA, 555 bp, Aichivirus C
  source 1..555: mol_type = genomic DNA
cctcggccctctcaccctcttttccggtggccacccgcccgggccaccgttactccactccactccttcgggactggtttggaggaacataacagggcttcccacccctgtttacccttattccactcacccttccccttaatcaaccctatccacaccccactgactgactcctttggtttttgacctcagaatgcctacctgacctcccacttacctctcccttttcggattgccggtggtgcctggtggaaaaagcacaagtgtgttgttggctactaaactcctacccgacaaaggtgcgtgtccgcgtgctgagtaatgggataggagatgccaataacaggctcgcccatgagtagagcatggactgcggtgcgtgtgacttcggtcaccaggggcatagcattgctcacccctgaatcaagtcatcgagatttctctgacctctgaagtgcactgtggttgcgtggctgggaatccacgcttgaccatgtactgcttgatagagtcgcggctggccgactcatgggttaaagtcagttgacaagacac

SEQ ID NO: 1399 - DNA, 555 bp, Aichivirus C
  source 1..555: mol_type = genomic DNA
cctcggccctctcaccctcttttccggtggccacccgcccgggccaccgttactccactccactccttcgggactggtttggaggaacacaacagggcttcccacccctgtttacctttactccacttacctttctcctaaaccaatcctatccacaccccactgactgattcctttggattttgacctcagaatgcctacatgacctcccactcgtctctcccttcccggattgccggtggtgcctggcggaaaaagcacaagtgtgttgatggctaccaaactcctacccgacaaaggtgcgtgtccgcgtgctgagtaatgggataggagatgccattgacaggctcgcccatgagtagagcatggactgcggtgcatgtgacttcagtcaccaggggcatagcattgctcacccctgaatcaagtcatcgagatttctctgacctctgaagtgcactgtggttgcgtggctgggaatccacgcttgaccatgtactgcttgatagagtcgcggctggccgactcatgggttaaagtcagttgataagacac

SEQ ID NO: 1400 - DNA, 555 bp, Aichivirus C
  source 1..555: mol_type = genomic DNA
cctcggccctctcaccctcttttccggtggccattcgcccgggccaccgttactccactccactccctcgggactggtttggaggaacacaacagggcttcccacccctgtttacccttactccacttaccaccccccttaaccaatcctatccacaccccactgactgattcctttggattttgatctcagaatgcctacttgacctcccacttgcctctcccttctcggattgccggtggtgcctggcggaaaaagcacaagtgtgttgttggctaccaaactcctacccgacaaaggtgcgtgtccgcgtgctgagtaatgggataggagatgccaatgacaggctcgcccatgagtagagcatggactgcggtgcatgtgacttcggtcaccaggggcatagcattgctcacccctgaatcaagtcatcgagatttctctgacctctgaagtgcactgtggttgcgtggctgggaatccacgcttgaccatgtactgcttgatagagtcgcggctggccgactcatgggttaaagtcagttgacaagacac

SEQ ID NO: 1401 - DNA, 555 bp, Aichivirus C
  source 1..555: mol_type = genomic DNA
cctcggccccctcaccctcttttccggtggccacacgcccgggccaccgttactccactccactccctcgggactggtttggaggaacacaacagggcttcccatccctgtttaccctaacttcactcacccttatccttaaccaaccctatccacaccccactgactgattcctttggattttgacctcagaatgcctacctgacctcccacttgcctctcccttttcggattgccggtggtgcctggcggaaaaagcacaagtgtgttgatggctaccaaactcctacccgacaaaggtgcgtgtccgcgtgctgagtaatgggataggagatgccattgacaggctcgcccatgagtagagcatggactgcggtgcatgtgacttcggtcaccaggggcatagcattgctcacccctgaatcaagtcatcgagatttctctgacctctgaagtgcactgtggttgcgtggctgggaatccacgcttgaccatgtactgcttgatagagtcgcggctggccgactcatgggttaaagtcagttgataagacac

SEQ ID NO: 1402 - DNA, 558 bp, Aichivirus C
  source 1..558: mol_type = genomic DNA
ggcttcggccctctcaccctcttttccggtggccactcgcccgggccaccgttactccactccactccttcgggactggtttggaggaacataacagggcttcccacccctgtttacccttaactccaccaaccctttccttgaattaaccctatccacaccccactgactgactcccttggattttgacctcagaatgcctacctgacctcccacttgcctctccctcctcggattgccggtggtgcctggcggaaaaagcacaagtgtgttgttggctaccaaactcctacccgacaaaggtgcgtgtccgcgtgctgagtaatgggataggagatgccaatgacaggctcgcccatgagtagagcatggactgcggtgcatgtgacttcggtcaccaggggcatagcattgctcacccctgaatcaagtcatcgagatttctctgacctctgaagtgcactgtggttgcgtggctgggaatccacgcttgaccatgtactgcttgatagagtcgcggctggccgactcatgggttaaagtcagttgacaagacac

SEQ ID NO: 1403 - DNA, 556 bp, Aichivirus C
  source 1..556: mol_type = genomic DNA
cttcggccctctcaccctcttttccggtggccactcgcccgggccaccgttactccactccactccttcgggactggtttggaggaacataacagggcttcccatccctgtttacccttattccactcacccttcccctacaaccaaccctatccacaccccactgactgattcctttggattttgacctcagaatgcctacctgacctcccacttgcctctcccttctcggattgccggtggtgcctggcggaaaaagcacaagtgtgttgttggctaccaaactcctacccgacaaaggtgcgtgtccgcgtgctgagtaatgggataggagatgccaatgacaggctcgcccatgagtagagcatggactgcggtgcatgtgacctcggtcaccaggggcatagcattgctcacccctgaatcaagtcatcgagatttctctgacctctgaagtgcactgtggttgcgtggctgggaatccacgcttgaccatgtactgcttgatagagtcgcggctggccgactcatgggttaaagtcagttgacaagacac

SEQ ID NO: 1404 - DNA, 556 bp, unidentified
  source 1..556: mol_type = unassigned DNA; note = Porcine kobuvirus isolate swKoV CH441, complete genome.1 sequence
cctcggccccctcaccctcttttccggtggccacccgcccgggccaccgttacttcactccactccttcgggactggtttggaggaacataacagggcttcccaatcccctgttatccttattccaattaccctttcccttaaccaaccctatccacaccccactgactgactcctttggattttgacctcagaatgcctacctgacctcccacttgcctctcccctctcggattgccggtggtgcctggcggaaaaagcacaagtgtgttgcaggctaccaaactcctacccgacaaaggtgcgtgtccgcgtgctgagtaatgggataggagatgcctacaacaggctcgcccatgagtagagcatggactgcggtgcatgtgacttcggtcaccacgggcatagcattgctcacccgtgaatcaagtcatcgagatttctctgacctctgaagtgcactgtggttgcgtggctgggaatccacgcttgaccatgtactgcttgatagagtcgcggctggccgactcatgggttaaagtcagttgacaagacac

SEQ ID NO: 1405 - DNA, 555 bp, Aichivirus C
  source 1..555: mol_type = genomic DNA
cctcggccccctcaccctcttttccggcggccactcgcccgggccaccgttacttcactccactccttcgggactggtttggaggaacataacagggcttcccatccctgtttacccttcactccaattacccttcccccaatcaaccctatccacaccccattgactgattcctttggattttgacctcagaatgcctacttgacctcccacttgccttccccttctcggactgccggtggtgcctggcggaaaaagcacaagtgtgttgcaggctaccaaactcctacccgacaaaggtgcgtgtccgcgtgctgagtaatgggataggagatgcctacaacaggctcgcccatgagtagagcatggactgcggtgcatgtgacttcggtcaccacgggcatagcattgctcacccgtgaatcaagtcatcgagatttctctgacctctgaagtgcactgtggttgcgtggctgggaatccacgcttgaccatgtactgcttgatagagtcgcggctggccgactcatgggttaaagtcagttgacaagacac

SEQ ID NO: 1406 - DNA, 661 bp, unidentified
  source 1..661: mol_type = unassigned DNA; note = unclassified Kobuvirus sequence
cctcggccccctcaccctcttttccggtggccacgcccgggccaccgatacttcccttcactccttcgggactgttggggaggaacacaacagggctcccctgttttcccattccttcccccttttcccaaccccaaccgccgtatctggtggcggcaagacacacgggtctttccctctaaagcacaattgtgtgtgtgtcccaggtcctcctgcgtacggtgcgggagtgctcccacccaactgttgtaagcctgtccaacgcgtcgtcctggcaagactatgacgtcgcatgttccgctgcggatgccgaccgggtaaccggttccccagtgtgtgtagtgcgatcttccaggtcctcctggttggcgttgtccagaaactgcttcaggtaagtggggtgtgcccaatccctacaaaggttgattctttcaccaccttaggaatgctccggaggtaccccagcaacagctgggatctgaccggaggctaattgtctacgggtggtgtttcctttttcttttcacacaactctactgctgacaactcactgactatccacttgctctcttgtgcctttctgctctggttcaagttccttgattgtttttgactgcttttcactgcttttcttctcacaatccttgctcagttcaaagtc

SEQ ID NO: 1407 - DNA, 556 bp, Aichivirus C
  source 1..556: mol_type = genomic DNA
cttcggccctctcaccctcttttccggtggccattcgcccgggccaccgttactccactccactccctcgggactggtttggaggaacacaacagggcttcccatccctgtttacccttaactccactcaccctttcctacaccaaccctatccacaccctactgattgattcctttggattttgacctcagaatgcctacccgacctcccactcgttttcctccttctcggattgccggtggtgcctggcggaaaaagcacaagtgtgttgttggctaccaaactcctacccgacaaaggtgcgtgtccgcgtgctgagtaatgggataggagatgccaataacaggctcgcccatgagtagagcatggactgcggtgcatgtgacttcggtcaccaggggcatagcattgctcacccctgaatcaagtcatcgagatttctctgacctctgaagtgcactgtggttgcgtggctgggaatccacgcttgaccatgtactgcttgatagagtcgcggctggccgactcatgggttaaagtcagttgacaagacac

SEQ ID NO: 1408 - DNA, 554 bp, unidentified
  source 1..554: mol_type = unassigned DNA; note = Porcine kobuvirus gene for polyprotein, complete cds, strain:1 sequence
cttcggccctctcaccctcttttccggtggccacccgcccgggccaccgttactccactccactccttcgggactggtttggaggaacacaacagggcttcccacccctgtttaccccgatttcatctacccttctcccgaactgaccctatccacaccccactgactaactcctttggattagacctcggaatgcctacttgacctcccacttgcctctccctttctggattgccggtggtgcctggcggaaaaagcacaagtgtgttgcaggctaccaaactcctacccgacaaaggtgcgtgtccgcgtgctgagtaatgggataggagatgcctacaacaggctcgcccatgagtagagcatggactgcggtgcatgcgacttcggtcgccacgggcatagcattgctcacccgtgaatcaagtcatcgagatttctctgacctctgaagtgcactgtggttgcgtggctgggaatccacgcttgaccatgtactgcttgatagagtcgcggctggccgactcatgggttaaagtcagttgacaagacac

SEQ ID NO: 1409 - DNA, 556 bp, Aichivirus C
  source 1..556: mol_type = genomic DNA
cttcggccctctcaccctcttttccggtggccacccgcccgggccaccgttactccactccactccttcgggactggtttggaggaacataacagggcttcccaatccctgttaccctttactccatttccccatcccccaaacttaccctatccacaccccactgactgattcctttggattttgacctcagaatgcctacttgacctcccactcgcctctccctctccggactgccggtggtgcctggcggaaaaagcacaagtgtgttgcaggctactaaactcctacccgacaaaggtgcgtgtccgcgtgctgagtaatgggataggagatgcctacaacaggctcgcccatgagtagagcatggactgcggtgcatgtgacttcggtcaccacgggcatagcattgctcacccgtgaatcaagtcatcgagaattctctgacctctgaagtgcactgtggttgcgtggctgggaatccacgcttgaccatgtactgcttgatagagtcgcggctggccgactcatgggttaaagtcagttgacaagacac

SEQ ID NO: 1410 - DNA, 557 bp, Aichivirus C
  source 1..557: mol_type = genomic DNA
cttcggccctctcaccctcttttccggtggccactcgcccgggccaccgttactccactccactccctcgggactggtttggaggaacataacagggcttcctacccctgttcttccctcaattccactcacccttcccctcaaccacccctatccacaccccactgactgattcctttggattttgacctcagaatgcctacttgacctcccacttgcctctcccttttcggactgccggtggtgcctggtggaaaaagcacaagtgtgttgttggctaccaaactcctacccgacaaaggtgcgtgtccgcgtgctgagtaatgggataggagatgcctacaacaggctcgcccatgagtagagcatggactgcggtgcatgtgacttcggtcaccacgggcatagcattgctcacccgtgaatcaagtcatcgagatttctctgacctctgaagtgcactgtggttgcgtggctgggaatccacgcttgaccatgtactgcttgatagagtcgcggctggccgactcatgggttaaagtcagttgataagacac

SEQ ID NO: 1411 - DNA, 556 bp, Aichivirus C
  source 1..556: mol_type = genomic DNA
cttcggccctctcaccctcttttccggtggccactcgcccgggccaccgttactccactccactccctcgggactggtttggaggaacataacagggcttcccatccctgtttacccttaattctgcttaccctctccttttaccaaccctgtccacaccccactgactgattcctttggattttgacctcagaatacctacctgacctcccacttgcctctcccttctcggattgccggtggtgcctggcggaaaaagcacaagtgtgttgttggctaccaaactcttacccgacaaaggtgcgtgtccgcgtgctgagtaatgggataggagatgccaatgacaggctcgcccatgagtagagcatggactgcggtgcatgtgacttcggtcaccaggggcatagcgttgctcacccctgaatcaagtcatcgagatttctctgacctctgaagtgcactgtggttgcgtggttgggaatccacgcttgaccatgtactgcttgatagagtcgcggctggccgactcatgggttaaagtcagttgacaagacac

SEQ ID NO: 1412 - DNA, 556 bp, Aichivirus C
  source 1..556: mol_type = genomic DNA
cttcggccctctcaccctcttttccggtggccactcgcccgggccaccgttactccactccactccctcgggactggtttggaggaacataacagggcttcccatccctgtttacccttaattccacttaccctctccttttaccaaccctatccatacctcactgactgattcctttggattttgacctcagaatgcctacctgacctcccacttgcctctcccttctcggattgccggtggtgcctggcggaaaaagcacaagtgtgttgttggctaccaaactcctacccgacaaaggtgcgtgtccgcgtgctgagtaatgggataggagatgcctacaacaggctcgcccatgagtagagcatggactgcggtgcatgtgacttcggtcaccacgggcatagcattgctcacccgtgaatcaagtcatcgagatttctctgacctctgaagtgcactgtggttgcgtggctgggaatccacgcttgaccatgtactgcttgatagagtcgcggctggccgactcatgggttaaagtcagttgacaagacac

SEQ ID NO: 1413 - DNA, 556 bp, Aichivirus C
  source 1..556: mol_type = genomic DNA
cttcggccctctcaccctcttttccggtggctactcgcccgggccaccgttactccactccactccctcgggactggtttggaggaacataacagggcttcccatccctgtttacccttaattctgcttaccctctccttttaccaaccctgtccacaccccactgactgattcctttggattttgacctcagaatacctacctgacctcccacttgcctctcccttctcggattgccggtggtgcctggcggaaaaagcacaagtgtgttgttggctaccaaactcttacccgacaaaggtgcgtgtccgcgtgctgagtaatgggataggagatgccaatgacaggctcgcccatgagtagagcatggactgcggtgcatgtgacttcggtcaccaggggcatagcgttgctcacccctgaatcaagtcatcgagatttctctgacctctgaagtgcactgtggttgcgtggttgggaatccacgcttgaccatgtactgcttgatagagtcgcggctggccgactcatgggttaaagtcagttgacaagacac

SEQ ID NO: 1414 - DNA, 556 bp, Aichivirus C
  source 1..556: mol_type = genomic DNA
cttcggccctctcaccctcttttccggtggccactcgcccgggccaccgttactccactccactccctcgggactggtttggaggaacataacagggcttcccatccctgtttacccttggttccactcaccctttcccctcaccaaccttatccacaccccactgactgactcctttggattttgacctcagaatgcctacttgacctcccactcgcctctcccttctcggactgccggtggtgcctggcggaaaaagcacaagtgtgttgttggctaccaaactcctacccgacaaaggtgcgtgtccgcgtgccgagtaatgggataggagatgccaataacaggctcgcccatgagtagagcatggactgcggtgcatgtgacttcggtcaccagggacatagcattgctcacccctgaatcaagtcatcgagaattctctgacctctgaagtgcactgtggttgcgtggctgggaatccacgcttgaccatgtactgcttgatagagtcgcggctggccgactcatgggttaaagtcagttgacaagacac

SEQ ID NO: 1415 - DNA, 558 bp, Aichivirus C
  source 1..558: mol_type = genomic DNA
cttcggccctctcaccctcttttccggtggccactcgcccgggccaccgttactccactccactccctcgggactggtttggaggaacacaacagggcttcccacccctgttctttccttaattccactcaccctttccctttaccaaccctatccacaccccactgactgattcctttggattttgacctcagaatacccatttgacctcccacttgcctctccctttttcggattgccggtggtgcctggcggaaaaagcacaagtgtgttgttggctaccaaactcctacccgacaaaggtgcgtgtccgcgtgccgagtaatgggataggagatgcctacaacaggctcgcccatgagtagagcatggactgcggtgcatgtgacttcggtcaccacgggcatagcattgctcacccgtgaatcaagtcatcgagatttctctgacctctgaagtgcactgtggttgcgtggctgggaatccacgcttgaccatgtactgcttgatagagtcgcggctggccgactcatgggttaaagtcagttgataagacac

SEQ ID NO: 1416 - DNA, 555 bp, Aichivirus C
  source 1..555: mol_type = genomic DNA
cctcggccccctcaccctcttttccggtggccacccgcccgggccaccgttacttcactccactccctcgggactggtttggaggaacataacagggcttcccatccctgtttacccttatttccaattaccctttcctaaaccaaccctatccacaccccactgactgactcctttggattttgacttcagaatgcctacctgacctcccacttgcctctcccttctcggactgccggtggtgcctggcggaaaaagcacaagtgtgttgttggctaccaaactcctacccgacaaaggtgcgtgtccgcgtgctgagtaatgggataggagataccaataacaggctcgcccatgagtagagcatggactgcggcgcatgtgacctcggtcaccaggggcatagcattgctcacccctgaatcaagtcatcgagacttctctgacctctgaagtgcgctgtggttgcgtggctgggaatccacgcttgaccatgtactgcttgatagagtcgcggctggccgactcatgggttaaagtcagttgacaagacac

SEQ ID NO: 1417 - DNA, 557 bp, Aichivirus C
  source 1..557: mol_type = genomic DNA
cttacggccctctcaccctcttttccggtggccattcgcccgggccaccgttactccactccactccctcgggactggtttggaggaacacaacagggcttcccatccctgtttatcctaattctacttaccttttcccttttaccgaccctatccacaccccactgactgattcctttggattttgacctcggaatgcctactagatctcccacttgcctctcccttcccggattgccggtggtgcctggcggaaaaagcacaagtgtgttgcaggctaccaaactcctacccgacaaaggtgcgtgtccgcgtgctgagtaatgggataggagatgcctacaacaggctcgcccatgagtagagcatggactgcggtgcatgtgacttcggtcaccacgggcatagcattgctcacccgtgaatcaagtcatcgagatttctctgacctctgaagtgcactgtggttgcgtggctgggaatccacgcttgaccatgtactgcttgatagagtcgcggctggccgactcatgggttaaagtcagttgacaagacac

SEQ ID NO: 1418 - DNA, 555 bp, Aichivirus C
  source 1..555: mol_type = genomic DNA
cctcggccccctcaccctcttttccggcggccactcgcccgggccaccgttacttcactccactccctcgggactggtttggaggaacataacagggcttcccatccctgtttacccttactctgacaacccttccccttaatcaaccctatccacaccccactgactgactcctttggattttgacctcagaatgcctacttgacctcccacttgcctctccctcctcggattgccggtggtgcctggcggaaaaagcacaagtgtgttgcaggctaccaaactcctacccgacaaaggtgcgtgtccgcgtgctgagtaatgggataggagatgcctacaacaggctcgcccatgggtagagcatggactgcggtgcatgtgacttcggtcaccacgggcatagcattgctcacccgtgaatcaagtcatcgagatttctctgacctctgaagtgcactgtggttgcgtggctgggaatccacgcttgaccatgtactgcttgatagagtcgcggctggccgactcatgggttaaagtcagttgacaagacac

SEQ ID NO: 1419 - DNA, 420 bp, unidentified; identical to SEQ ID NO: 460
  source 1..420: mol_type = unassigned DNA; note = Bovine kobuvirus polyprotein gene, complete cds.1 sequence

SEQ ID NO: 1420 - DNA, 555 bp, Aichivirus C
  source 1..555: mol_type = genomic DNA
cttcggccctctcaccctcttttccggtggccacccgcccgggccaccgttactccactccactccctcgggactggtttggaggaacacaacagggcttctcatccctgtttacccttattccacttacccttctccccgaactacccaacccactccccactgattgactcccttggattaagacctcggaatgtcttcctgaccttcttcttggttttcccttttcggattgccggtggtgcctggtggaaaaagcacaagtgtgttgttggctaccaaactcctacccgacaaaggtgcgtgtccgcgtgctgagtaatgggataggagatgccaataacaggctcgcccatgagtagagcatggactgcggtgcatgtgacttcggtcaccaggggcatagcattgctcacccctgaatcaagtcatcgagatttctctgacctctgaagtgcactgtggttgcgtggctgggaatccacgcttgaccatgtactgcttgatagagtcgcggctggccgactcatgggttaaagtcagttgacaagacac

SEQ ID NO: 1421 - DNA, 557 bp, Aichivirus C
  source 1..557: mol_type = genomic DNA
cttcggccctctcaccctcttttccggtggccacacgcccgggccaccgttactccactccactccctcgggactggtttggaggaacacaacagggcttcccatccctgttcctccctcaactccacttaccctttccccttaccaaccttatccacaccctattgactgattcctttggattttgacctcagaatgcctatctgacctcccacctgcctcccccttctcggattgccggtggtgcctggcggaaaaagcacaagtgtgttgttggctaccaaactcctacccgacaaaggtgcgtgtccgcgtgctgagtaatgggataggagatgccaataacaggctcgcccatgagtagagcatggactgcggtgcatgtgacttcagtcaccaggggcatagcattgctcacccctgaatcaagtcatcgagatttctctgacctctgaagtgcactgtggttgcgtggctgggaatccacgcttgaccatgtactgcttgatagagtcgcggctggccgactcatgggttaaagtcagttgacaagacac

SEQ ID NO: 1422 - DNA, 557 bp, Aichivirus C
  source 1..557: mol_type = genomic DNA
cttcggccctctcaccctcttttccggtggccacacgcccgggccaccgttactccactccactccctcgggactggtttggaggaacacaacagggcttcccatccctgttcctccctcaactccacttaccctttccccttaccaacctcatccacacctcattgactgattcctttggattttgacttcagaatgcctatctgacctcccacttgcctcccccttctcggattgccggtggtgcctggcggaaaaagcacaagtgtgttgttggctaccaaactcctacccgacaaaggtgcgtgtccgcgtgctgagtaatgggataggagatgccaataacaggctcgcccatgagtagagcatggactgcggtgcatgtgacttcagtcaccaggggcatagcattgctcacccctgaatcaagtcatcgagatttctctgacctctgaagtgcactgtggttgcgtggctgggaatccacgcttgaccatgtactgcttgatagagtcgcggctggccgactcatgggttaaagtcagttgacaagacac

SEQ ID NO: 1423 - DNA, 556 bp, Aichivirus C
  source 1..556: mol_type = genomic DNA
ttcggccctctcaccctcttttccggtggccacacgcccgggccaccgttactccactccactccctcgggactggtttggaggaacacaacagggcttcccatccctgttcctccctcaactccacttaccctttccccttaccaacctcatccacacctcattgactgattcctttggattttgacttcagaatgcctatctgacctcccacttgcctcccccttctcggattgccggtggtgcctggcggaaaaagcacaagtgtgttgttggctaccaaactcctacccgacaaaggtgcgtgtccgcgtgctgagtaatgggataggagatgccaataacaggctcgcccatgagtagagcatggactgcggtgcatgtgacttcagtcaccaggggcatagcattgctcacccctgaatcaagtcatcgagatttctctgacctctgaagtgcactgtggttgcgtggctgggaatccacgcttgaccatgtactgcttgatagagtcgcggctggccgactcatgggttaaagtcagttgacaagacac

SEQ ID NO: 1424 - DNA, 557 bp, Aichivirus C
  source 1..557: mol_type = genomic DNA
cttcggccctctcaccctcttttccggtggccacccgcccgggccaccgttacttcactccactccttcgggactggtttggaggaacataacagggcttcccaatcccctgttatcctttatcccaaacaccttttcccttaaccaaccctatccacaccccactgactgattcctttggattttgacctcagaatgcctacctgacctcccactcgcctctcccttctcggattgccggtggtgcctggcggaaaaagcacaagtgtgttgcaggctaccaaactcctacccgacaaaggtgcgtgtccgcgtgctgagtaatgggataggagatgcctacaacaggctcgcccatgagtagagcatggactgcggtgcatgtgacttcggtcaccacgggcatagcattgctcacccgtgaatcaagtcatcgagatttctctgacctctgaagtgcactgtggttgcgtggctgggaatccacgcttgaccatgtactgcttgatagagtcgcggctggccgactcatgggttaaagtcagttgacaagacac

SEQ ID NO: 1425 - DNA, 557 bp, Aichivirus C
  source 1..557: mol_type = genomic DNA
cttcggccctctcaccctcttttccggtggccactcgcccgggccaccgttactccactccactccctcgggactggtctggaggaacacaacagggcttcccatccctgtttaccctcattccaatttacccttcccttacaaccaaccctatccacaccccactgaatgattcctttggattttgacctcagaatgcctacctgaccccccacttgcttctccctcctcggattgccggtggtgcctggcggaaaaagcacaagtgtgttgttggctaccaaactcctacccgacaaaggtgcgtgtccgcgtgctgagtaatgggataggagatgccaataacaggctcgcccatgagtagagcatggactgcggtgcatgtgacttcggtcaccagggacatagcattgctcacccctgaatcaagttattgagatttctctgacctctgaagtgcactgtggttgcgtggccgggaatccacgcttgaccatgtactgcttgatagagtcgcggctggccgactcatgggttaaagtcagttgacaagacac

SEQ ID NO: 1426 - DNA, 559 bp, Aichivirus C
  source 1..559: mol_type = genomic DNA
cggcctcggcccactcaccctctttaccggtggccacccgcccgggccaccgttacttcactccactccttcgggactggtttggaggaacataacagggcttcccatccctgttcaccccttattccaattaccctcacccttgattaaccctacccacaccccactgactgattcctttggattttgacctcagaatgcctacttgacctcctacttgcttctcccttctcggattgccggtggtgcctggcggaaaaagcacaagtgtgttgcaggctaccaaactcctacccgacaaaggtgcgtgtccgcgtgctgagtaatgggataggagatgcctacaacaggctcgcccatgagtagagcatggactgcggtgcatgtgacttcggtcaccacgggcatagcattgctcacccgtgaatcaagtcatcgagatttctctgacctctgaagtgcactgtggttgcgtggctgggaatccacgcttgaccatgtactgcttgatagagtcgcggctggccgactcatgggttaaagtcagttgacaagacac

SEQ ID NO: 1427 - DNA, 556 bp, unidentified
  source 1..556: mol_type = unassigned DNA; note = Porcine kobuvirus isolate CH/DX/2012, complete genome.1 sequence
cttcggccctctcaccctcttttccggtggccactcgcccgggccaccgttacttcactccactccctcgggactggtttggaggaacataacagggcttcccacccctgtttacccttaattccacttacccttccccttaaccaaccctatccacaccccactgactgattcctttggattttgacctcagaatgcctacttgacctcccacttgcctctcccttctcggattgccggtggtgcctggcggaaaaagcacaagtgtgttgcaggctaccaaactcctacccgacaaaggtgcgtgtccgcgtgctgagtaatgggataggagatgcctacaacaggctcgcccatgagtagagcatggactgcggtgcatgtgacttcggtcaccacgggcatagcattgctcacccgtgaatcaagtcatcgagatttctctgacctctgaagtgcactgtggttgcgtggctgggaatccacgcttgaccatgtactgcttgatagagtcgcggctggccgactcatgggttaaagtcagttgacaagacac

SEQ ID NO: 1428 - DNA, 556 bp, unidentified
  source 1..556: mol_type = unassigned DNA; note = Porcine kobuvirus isolate CH/HZ/2011 polyprotein gene, complete1 sequence
cttcggccctctcaccctcttttccggtggccactcgcccgggccaccgttacttcactccactccctcgggactggtttggaggaacataacagggcttcccacccctgtttacccttaattccacttacccttccccttaaccaaccctatccacaccccactgactgattcctttggattttgacctcagaacgcctacttgacctcccacttgcctctcccttctcggattgccggtggtgcctggcggaaaaagcacaagtgtgttgcaggctaccaaactcctacccgacaaaggtgcgtgtccgcgtgctgagtaatgggataggagatgcctacaacaggctcgcccatgagtagagcatggactgcggtgcatgtgacttcggtcaccacgggcatagcattgctcacccgtgaatcaagtcatcgagatttctctgacctctgaagtgcactgtggttgcgtggctgggaatccacgcttgaccatgtactgcttgatagagtcgcggctggccgactcatgggttaaagtcagttgacaagacac

SEQ ID NO: 1429 - DNA, 556 bp, Aichivirus C
  source 1..556: mol_type = genomic DNA
cctcggccctctcaccctcttttccggtggccactcgcccgggccaccgttacttcactccactcccttgggactggtttggaggaacacaacagggcttcccacccctgtttaccctacactccactcaccctctcccttaaccaaccctatccacatcccactgactgattcctttggattttgacttcagaatgcctacttgacctcccacttgcttctcccttcccggattgccggtggtgcctggcggaaaaagcacaagtgtgttgttggctaccaaacccctacccgacaaaagcgcgtgtccgcgtgctgagtaatgggataggggatgccaatgacaggctcgcccatgagtagagcatggactgcggtgcatgtgactttggtcaccaggggcatagcattgctcacccctgaatcaagtcatcgagatttctctgacctctgaagtgcactgtggttgcgtggctgggaatccacgcttgaccatgtactgcttgatagagtcgcggctggccgactcatgggttaaagtcagttgacaagacac

SEQ ID NO: 1430 - DNA, 557 bp, Aichivirus C
  source 1..557: mol_type = genomic DNA
cttacggggctctcaccctcttttccggtggccactcgcccgggccaccgttactccactccactccttcgggactggtttggaggaacacaacagggcttcccacccctgtttacccttaactccactcacccctcccttgaaccaaccctatccacaccccactgactgactcctttggattttgacttcggaatgcctacctaacctcccacttgcctttccctttacggattgccggtggtgcctggcggaaaaagcacaagtgtgttgttggctaccaaactcctacccgacaaaggtgcgtgtccgcgtgctgagtaatgggataggagatgccaatgacaggctcgcccatgagtagagcatggactgcggtgcatgtgacttcggtcaccaggggcatagcattgctcacccctgaatcaagtcatcgagatttctctgacctctgaagtgcactgtggttgcgtggctgggaatccacgcttgaccatgtactgcttgatagagtcgcggctggccgactcatgggttaaagtcagttgacaagacac

SEQ ID NO: 1431 - DNA, 776 bp, Aichivirus B
  source 1..776: mol_type = genomic DNA
cttcggccccctcaccctcttttccggcggcgcaagttcgcgtcgtcgtaagcctggacacccatgttcgcatcggtctccgggcaaatacaagaaccccagaccttctggtacttcttcgcctgggtcacaaaagcgaagaacctgcctctctaacgccagacgagcggcattaaacttgaacttctggcactctccactctcccttttccctgtccctttccccactgcgctctcaaggtcgcgcaatcctgggactagcccagttttaaaagttcctggcaccctttgcccctctaggcccttaaggtaggaactgaccttgtgctgtgatctcggtgcgggagtgctaccacgtagtcatcgtaagcctcgtttctggttctgccctggcaaggctacagagtaccgtgttccgctgtggatgccatccgggtaaccggacccccagtgtgtgtagcggtatgttcacggtccgccgtgttcaccagattcctgacctggctttgctagaaatggtgtgtgcccaatccctgtgaccagtatcaattacatcacctaggaatgctaggaaggtaccccagtcctgagctgggatctgatcctaggctaattgtctacggtgatgctccttttattttcttacaactgctattgactgtctgattgctgattctgctcttgtgctcttctgctctggctcattctcaagggttctctttgtccaagatcctttggttctctccttgttccacttgccactgccaacgcttgtc

SEQ ID NO: 1432 - DNA, 665 bp, unidentified
  source 1..665: mol_type = unassigned DNA; note = unclassified Kobuvirus sequence
gcccgtccccctcaccctcttttccggtggccacgcccgggccaccgatacttcccttcactccctcgggactgttggggaggaacacaacagggctcccctgtatttcctcttcccattccccctttcctaaccccaaccgccgtatctggtggcggtaagacacacgggtctttccctctaaagcacaattgtgtgtgtgtcccaggtcctcctgcgttcggtgcgggagtgctcccacccaactgttgtaagcctgtccaacgtgtcgtcctggcaagactatgacgtcgcatgttccgctgtggatgccgaccgggtaaccggttccccagtgtgtgtagtgcgatcttccaggttctcctggttggcgttgtccagaaactgcttcgggtaagtggggtgtgcccaatccctacaagggttgattctttcaccaccttaggaatgctccggaggtaccccagcaacagctgggatctgaccggaggctaattgtctacgggtggtgtttccattttctttttcacacaacttcattgctgacaactcactgactaatcacttgctctcttgtgcctttctgctctggttcaagttccttgattgtttgtttgattgcttttcactgctttcttcccacaatccttgctcagttcaaagtc

SEQ ID NO: 1433 - DNA, 556 bp, unidentified
  source 1..556: mol_type = unassigned DNA; note = Porcine kobuvirus gene for polyprotein, complete cds, strain:1 sequence
cttcggccctctcaccctcttttccggtggccgcccgcccgggccaccgttacttcactccactccctcgggactggtttggaggaacacaacagggcttcccatccctgttttcccttaataccacttaccttttccctaattaaccctacccaccacccaccgactgactccctttggattttgacctcagaatgcccacttgacctcccacttgcctcttcctttttggattgccggtggtgcctggcggaaaaagcacaagtgtgttgcaggctaccaaactcctacccgacaaaggtgcgtgtccgcgtgctgagtaatgggataggagatgcctacaacaggctcgcccatgagtagagcatggactgcggtgcatgtgacctcggtcaccacgggcatagcattgctcacccgtgaatcaagtcatcgagatctctctgacctctgaagtgcactgtggttgcgtggctgggaatccacgcttgaccatgtactgcttgatagagtcgcggctggccgactcatgggttaaagtcagttgacaagacac

SEQ ID NO: 1434 - DNA, 549 bp, Aichivirus C
  source 1..549: mol_type = genomic DNA
cctctcaccctcttttccggtggccacccgcccgggccaccgttactccactccactccttcgggactggtttggaggaacataacagggcttcccacccctgtttacccttattccactcaccctttccccacaaccaaccctatccacaccccactgactgattcctttggattttgacctcagaatgcctacctgacctcccacttgcctctcccttctcggattgccggtggtgcctggcggaaaaagcacaagtgtgttgttggctaccaaactcctacccgacaaaggtgcgtgtccgcgtgctgagtaatgggataggagatgccaatgacaggctcgcccatgagtagagcatggactgcggtgcatgtgacctcggtcaccaggggcatagcattgctcacccctgaatcaagtcatcgagatttctctgacctctgaagtgcactgtggttgcgtggctgggaatccacgcttgaccatgtactgcttgatagagtcgcggctggccgactcatgggttaaagtcagttgacaagacac

SEQ ID NO: 1435 - DNA, 546 bp, Aichivirus C
  source 1..546: mol_type = genomic DNA
ctcaccctcttttccggtggccactcgcccgggccaccgttactccactccactccctcgggactggtttggaggaacacaacagggcttcccatccctgtttacccttcactccactcaccccttcccttaatcaaccctgtccacaccccactgactgattcctttggattatgacctcagaatgcctacccgatctcccactcgcctctcctttcttggattgccggtggtgcctggcggaaaaagcacaagtgtgttgcaggctaccaaactcctacccgacaaaggtgcgtgtccgcgtgctgagtaatgggataggagatgcctacaacaggctcgcccatgagtagagcatggactgcggtgcatgtgacttcggtcaccacgggcatagcattgctcacccgtgaatcaagtcatcgagatttctctgacctctgaagtgcactgtggttgcgtggctgggaatccacgcttgaccatgtactgcttgatagagtcgcggctggccgactcatgggttaaagtcagttgacaagacac

SEQ ID NO: 1436 - DNA, 755 bp, Aichivirus B; identical to SEQ ID NO: 1218
  source 1..755: mol_type = genomic DNA

SEQ ID NO: 1437 - DNA, 729 bp, Aichivirus B; identical to SEQ ID NO: 922
  source 1..729: mol_type = genomic DNA

SEQ ID NO: 1438 - DNA, 787 bp, unidentified
  source 1..787: mol_type = unassigned DNA; note = unclassified Kobuvirus sequence
cttcggccccctcaccctcttttccggcggcgcatgttcgcgtcgtcgtaagtctggattcccaaggcccactcggttcaacttcggtttccggacaaatacaaagaacctcagtcctcttggtactttctcgcctgagtctacaaagcgagaaacctgcccctctaacgccagacgagcggcataaaactcgaacttctggcacgttccaccaccccttctcctatcccaacccccattgcgctctcaaggtcgcgcttttccgagactagctcggattcaaaaagttcctggcaccctttaccccttcaggcccttaaggtaggaactgaccttgtgctgtgatctcggtgcggaagtgctactgcgtagtgattgtaagatccttttgtggttctgccctggcaaggctacagagtgctgtgatccgctgcggatgccatcctggtaacaggacccccagtgtgcgcaacagtatgttcacggtcttccgtgttcaccacattcggaacactgctttcgtgaaacagtgtgtgtccaatccctgtgatcagtatcaaccacaccacctaggaatgctaggaaggtaccccggttcgccgggatctgatcctaggctaattgtctacggtggtgctcctttttattttccacttcaactcactggttacaactgcttgatttctgtgtttgctgcttttctctgctctcactgccattctcaagtgttcacactgtccaagctcctttggttgttcgcttccacttgccactgtcaactcttgtc

SEQ ID NO: 1439 - DNA, 770 bp, Aichivirus B; identical to SEQ ID NO: 1230
  source 1..770: mol_type = genomic DNA

SEQ ID NO: 1440 - DNA, 545 bp, unidentified
  source 1..545: mol_type = unassigned DNA; note = unclassified Kobuvirus sequence
cccccttttccctaaccccaaccgccgtatctggtggcggcaagacacacgggtctttccctctaaagcacaaatgtgtgtgtgtcccaggtcctcctgcgctcggtgcgggagtgctcccacccaactgttgtaagcctgtccaacgtgtcgtcctggcaagactatgacgtcgcatgttccgctgcggatgccgaccgggtaaccggttccccagtgtgtgtagtgcgatcttccaggttcccctggttggcgttgtccagaaactgcttcaggtaagtggggtgtgcccaatccctgcaaaggttgattctctcaccaccttaggaatgctccggaggtaccccagcaacagctgggatctgaccggaggctaattgtctacgggtggtgtttcctttttctttttccacaacttcattgctgacaactcactgactacccatttgctctcttgtgcctttctgctctggttcaagctccttgattgtttttgattgctttctattgctttcttccactcaacccttgctcagttcaaagtc

SEQ ID NO: 1441 - DNA, 782 bp, unidentified
  source 1..782: mol_type = unassigned DNA; note = unclassified Kobuvirus sequence
ataccctccccctccacactcttttcgacggcgcgcctcggcaaggccgccgataccgcactgtgctacttcggtaccactctgcgggaatgacaatatgcccggtgtatagtttgcctgtttctcgcaccgttaccgctcgttcgggaatgtgaaactggcacccctcctctcccctaccaccctttctccttcgcccccattcataatttacaacgccgcacacagcggcggccgccaagggctagcctggcggttataaaaggaacctgggtctttccctcttcaagccaaaaggtaggttccctgtgtccctgaatgctcggtgaggaatgctgcaccgtaacgctttgtgaagtgtttgcaagttctggcccggcaagcctacagagtgctgtgatccgctgcggacgccatcctggtaacaggacccccagtgtgcgcaacagtatgttcagacttcggtttgttcacttgctttcatggaccattgcgcgaaagtgcgtgcgccatatccctgtacttcaggtgtgcttctctggaccctaggaatgctgcgaaggtaccccgtttcggcgggatctgatcgcaggctaattgtctatgggttcagtttcctttttctttactccacaattgactgcttaactgactctggatcttgtgcttccactgctctttctgctctcaaaacggcttcacttaccaactctcacctttcgaccaacaccatttacacactaacttttttcgactcttctgactcctggcttggtgaagac

SEQ ID NO: 1442 - DNA, 537 bp, Aichivirus C
  source 1..537: mol_type = genomic DNA
ttttccggtggccacacgcccgggccaccgttactccactccactccttcgggactggtttggaggaacacaacagggcttcccacccctgtttaccctttctccactcatccactccctttaaccaaccctgtccacaccccactgactgactcctttggattttgacctcggaatgcctacttgaccttccactcgcctttcccttttcggattgccggtggtgcctggcggaaaaagcacaagtgtgttgcaggctaccaaactcctacccgacaaaggtgcgtgtccgcgtgctgagtaatgggataggagatgcctacaacaggctcgcccatgagtagagcatggactgcggtgcatgtgacttcggtcaccacgggcatagcattgctcacccgtgaatcaagtcatcgagatttctctgacctctgaagtgcactgtggttgcgtggctgggaatccacgcttgaccatgtactgcttgatagagtcgcggctggccgactcatgggttaaagtcagttgacaagacac

SEQ ID NO: 1443 - DNA, 528 bp, Aichivirus C
  source 1..528: mol_type = genomic DNA
gccacacgcccgggccaccgttactccactccactccctcgggactggtttggaggaacacaacagggcttcccatccctgttcctccctcaactccacttaccctttccccttaccaaccttatccacaccctattgactgattcctttggattttgacctcagaatgcctatctgacctcccacctgcctcccccttctcggattgccggtggtgcctggcggaaaaagcacaagtgtgttgttggctaccaaactcctacccgacaaaggtgcgtgtccgcgtgctgagtaatgggataggagatgccaataacaggctcgcccatgagtagagcatggactgcggtgcatgtgacttcagtcaccaggggcatagcattgctcacccctgaatcaagtcatcgagatttctctgacctctgaagtgcactgtggttgcgtggctgggaatccacgcttgaccatgtactgcttgatagagtcgcggctggccgactcatgggttaaagtcagttgacaagacac

SEQ ID NO: 1444 - DNA, 532 bp, unidentified
  source 1..532: mol_type = unassigned DNA; note = Porcine kobuvirus gene for polyprotein, complete cds, strain:1 sequence
ccggtggccacccgcccgggccaccgttactccactccactccctcgggactggtttggaggaacataacagggcctcccacccctgttcaccttaattccacttaccctttccctcaaccaaccctatccacaccccattgactgattcctttggattttgacctcagaatgcctacttgacctcccacttgcctttcccttctcggattgccggtggtgcctggcggaaaaagcacaagtgtgttgcaggctatcaaactcctacccgacaaaggtgcgtgtccgcgtgctgagtaatgggataggagatgcctacaacaggctcgcccatgagtagagcatggactgcggtgcatgtgacttcggtcaccacgggcatagcattgctcacccgtgaatcaagtcatcgagatttctctgacctctgaagtgcactgtggttgcgtggctgggaatccacgcttgaccatgtactgcttgatagagtcgcggctggccgactcatgggttaaagtcagttgacaagacac

SEQ ID NO: 1445 - DNA, 510 bp, Aichivirus C
  source 1..510: mol_type = genomic DNA
cgttactccactccactccctcgggactggtttggaggaacataacagggcttcccacccctgtttacccttaattccactcaccctttccctataaccaaccctatccacaccccactgactgattcctttggattttgacctcagaatgcccacctgacctcccacttgcctctcccttcccggattgccggtggtgcctggcggaaaaagcacaagtgtgttgttggctaccaaactcctacccgacaaaggtgcgtgtccgcgtgctgagtaatgggataggagatgccaataacaggctcgcccatgagtagagcatggactgcggtgcatgtgactttggtcaccaggggcatagcattgctcacccctgaatcaagtcatcgagatttctctgacctctgaagtgcactgtggttgcgtggctgggaatccacgcttgaccatgtactgcttgatagagtcgcggctggccgactcatgggttaaagtcagttgacaagacac

SEQ ID NO: 1446 - DNA, 513 bp, Aichivirus C
  source 1..513: mol_type = genomic DNA
ccaccgttacttcactccactccctcgggactggtttggaggagcataacagggcttcccatccctgttcaccctcaataccacccaccctttccctcaaccatccctatccacaccccactgactgattcccttggattttgacctcagaacgcctacttgacctcccacttgcctttcccttctcggattgccggtggtgcctggcggaaaaagcacaagtgtgttgcaggctaccaaactcctacccgacaaaggtacgtgtccgcgtgctgagtaatgggataggagatgcctacaacaggctcgcccatgagtagagcatggactgcggtgcatgtgacttcggtcaccacgggcatagcattgctcacccgtgaatcaagtcattgagattcctctgacctctgaagtgcactgtggttgcgtggctgggaatccacgcttgaccatgtactgcttgatagagtcgcggctggccgactcatgggttaaagtcagttgataagacac

SEQ ID NO: 1447 - DNA, 509 bp, Aichivirus C
  source 1..509: mol_type = genomic DNA
cgttactccactccactccctcgggactggtttggaggaacataacagggcttcccacccctgtttacccttaattccactcaccctttcccttaaccaaccctatccacaccccactgactgattcctttggattttgacctcagaatgcccacttgacctcccacttgcctctcccttcccggattgccggtggtgcctggcggaaaaagcacaagtgtgttgttggctaccaaactcctacccgacaaaggtgcgtgtccgcgtgctgagtaatgggataggagatgccaataacaggctcgcccatgagtagagcatggactgcggtgcatgtgactttggtcaccaggggcatagcattgctcacccctgaatcaagtcatcgagatttctctgacctctgaagtgcactgtggttgcgtggctgggaatccacgcttgaccatgtactgcttgatagagtcgcggctggccgactcatgggttaaagtcagttgacaagacac

SEQ ID NO: 1448 - DNA, 509 bp, Aichivirus C
  source 1..509: mol_type = genomic DNA
cgttactccactccactccttcgggactggtttggaggaacataacagggcttcccatccctgtttaccctttattccacttaccctttctcctaatcaaccctatccacaccccactgactgactcctttggattttgacctcagaatgcctacttgacctcccacttgcctctcccttctcggattgccggtggtgcctggcggaaaaagcacaagtgtgttgcaggctaccaaactcctacccgacaaaggtgcgtgtccgcgtgctgagtaatgggataggagatgcctacaacaggctcgcccatgagtagagcatggactgcggtgcatgtgacttcggtcaccacgggcatagcattgctcacccgtgaatcaagtcatcgagatttctctgacctctgaagtgcactgtggttgcgtggctgggaatccacgcttgaccatgtactgcttgatagagtcgcggctggccgactcatgggttaaagtcagttgataagacac

SEQ ID NO: 1449 - DNA, 641 bp, unidentified; identical to SEQ ID NO: 770
  source 1..641: mol_type = unassigned DNA; note = unclassified Kobuvirus sequence

SEQ ID NO: 1450 - DNA, 510 bp, Aichivirus C
  source 1..510: mol_type = genomic DNA
cgttactccactccactccctcgggactggtttggaggaacataacagggcttcccacccctgtttacccttaactccactcaccctttccctacaaccaaccctatccacaccccactgactgattccttcggattttgacctcagaatgcctacctgacctcccacttgcctttcccttcccggattgccggtggtgcctggcggaaaaagcacaagtgtgttgttggctaccaaactcctacccgacaaaggtgcgtgtccgcgtgctgagtaatgggataggagatgccaataacaggctcgcccatgagtagagcatggactgcggtgcatgtgacttcggtcaccaggggcatagcattgctcacccctgaatcaagtcatcgagatttctctgacctctgaagtgcactgtggttgcgcggctgggaatccacgcttgaccatgtactgcttgatagagtcgcggctggccgactcatgggttaaagtcagttgacaagacac

SEQ ID NO: 1451 - DNA, 509 bp, Aichivirus C
  source 1..509: mol_type = genomic DNA
cgttactccactccactccctcgggactggtttggaggaacataacagggcttcccatccctgtttaccctaaattccacttaccctttccctagaccaaccctatccacaccccactgactgattcctttggattttgacctcagaatgcctacctgacctcccatctgcttttccctttccggattgccggtggtgcctggcggaaaaagcacaagtgtgttgttggctaccaaactcctacccgacaaaggtgcgtgtccgcgtgctgagtaatgggataggagatgccaataacaggctcgcccatgagtagagcatggactgcggtgcatgtgacttcggtcaccaggggcatagcattgctcacccctgaatcaagtcatcgagatttctctgacctctgaagtgcactgtggttgcgtggctgggaatccacgcttgaccatgtactgcttgatagagtcgcggctggccgactcatgggttaaagtcagttgacaagacac

SEQ ID NO: 1452 - DNA, 1000 bp, unidentified; identical to SEQ ID NO: 138
  source 1..1000: mol_type = unassigned DNA; note = unclassified Cardiovirus sequence

SEQ ID NO: 1453 - DNA, 977 bp, Cardiovirus B
  source 1..977: mol_type = genomic DNA
caccccctttggacgcggggcctgcgatagtgccaccccccgtcctccctattccaactacccgaccctaacccagggtccaggaaactggatcaatacaagtcatcccctgaatgctggctaatcagaggaaagtcagcattttccggcccaggctaagagaaacacaataagttagaatctaaattaatccccttgacgaattcgcaacgataagtcctccctcccttgccgctcgttcacacccagaactaacaattcggccccttgtgacgagccccttggtgaaaggacctctttcaatgcgacgtggttggagattaaaccgactccgacgaaagtgctatcatgcctccccgattatgtgatgttttctgccctgctgggcggagcattctcgggttgatacaccttgaatccttcatccttggacctcaggtcccccggtctaagccgcttggaatacgacagggttattttccaatcttctcctttctactttcatgagtcctattcatgaaaagggtctgtgctgccccttccttcttggagaatctgcgcggcggtctttccgtctctcgaaaagcgcagatgcagcatgctggaaccggtgaagaaaacagttctttgtggaaacttagagcagacatcgaaacagctgtagtgacctcacagtagcagcggaaccccctcctggtaacaggagcctctgcggccaaaagccccgtggataagatccactgctgtgagcggtgcaaccccagcaccctggttcgatggttgttctctgtggaaccagagaatggtctttctcaagccctccagtagagaagccaagaatgtcctgaaggtaccccgcatgcgggatctgatcaggagaccaatcgtcagtgctttacactggcgctttggtttaaaaactgtcacagcttctccaaaccaagtggtcttggttttcacttttatcaaactgtttc

SEQ ID NO: 1454 - DNA, 1000 bp, Pestivirus A
  source 1..1000: mol_type = genomic DNA
ggagggaaggcgattcgtcgccagcttatttatctccgctctggcaacctacacatacaagacttggaattaccacaacctctccaaggtagtagaaccagccttggcatacctcccctacgctaccagtgcactaaaaatgttcaccccaactaggctggagagcgtagtcatacttagcaccacaatatacaaaacttacctctcaataaggaaaggaaaaagtgatggacttctgggtacagggattagtgcagcaatggagattctgtcacagaacccggtgtcagtaggtatatctgtcatgctgggggtgggggcaattgccgctcacaatgcaatcgagtctagtgagcaaaaaaggaccctattgatgaaagtgtttgtaaaaaacttcctggaccaggcggcaacagatgagttggtgaaggaaaatccagagaaaataataatggccttatttgaagcagtacagacaattggcaacccattgaggcttatatatcatctgtatggggtttactacaaaggctgggaagcgaaagaactatccgagaggacagctggcaggaacctgttcactttgataatgttcgaagctttcgaactattagggatggactctgaagggaagataaggaacctatctgggaattacatcttggatttgatctacagtttacataaacagataaacagaggcttgaagaagatagtcttggggtgggctcctgcacccttcagttgtgactggactcctagtgatgggagaatcaggttacccacagacaactatctgagagtagagactaagtgcccatgtggttatgagatgaaagcactaaggaatttcagtggcagtctcacaaaagtggaagagaaagggcctttcctctgtaggaacgggcctggtagggggccagttaactatagagtcacaaagtactatgatgacaacctcacagagataaaaccagttgcaaaactagaaggactgcac

SEQ ID NO: 1455 - DNA, 1000 bp, Cardiovirus C
  source 1..1000: mol_type = genomic DNA
ggtttggatcttggatctctctccttccttcccccgtcttcaatttagcttcgtgattgaagcatctcactgtctctagtatttatgtcggactgacgattgagtacgttcagattgtgtttgggaggcccaagggatcgatggacaacacttcgaaagagtcacttgtccaccgctcctttcccctaccctagcaactctggatttgctcacgtggagttcgaggtctgtactttaactctgacttgcttttcttaccttgctatcttgctgacgtggattggttgtagactgattcacgttctcgttagatgctgacgtggagtacgatcgctgtacattccactactgccaattagctcccccttcccgttgctcccctctataaggagagccttctcttgcaaaggtgaagccttcacccccggtcgaagccgcttggaataagacagggttattttctcctctcctcggcgcttgcctcttctaagctgaataggttctatctattcaggcggatggtctggtccgttccttcttggacagagtgtgtatctgggttttccggatctcgaccacacactcaccagagctcaggagtgattaagtcaaggcccgatctgcggcgaaaaggaaatgaagtattttgcagctgtagcgacctctcaaggccagcggatttccccacctggtgacaggtgcctctggggccaaaagccacgtgttaatagcacccttgagagcggtggtaccccaccaccctgcaaattatggatttgacttagtaactaaaagattgacttggcatacctcaacctgagcggcggctaaggatgccctgaaggtacccgtgttgaaatcgcttcggcgaccatggatctgatcaggggccctgcctggagtggttctatcccacacagcgtagggttaaaaaacgtctaaccgccccacaaagaccccggcagggatgccggtttcctttttaccaattcttgacact

SEQ ID NO: 1456 - DNA, 1000 bp, Mischivirus A
  source 1..1000: mol_type = genomic DNA
atcacctgcttagggcgaattgtcgagacgtcattgatgttccggcccaggataacaacgaagtgttccaaggtgatttactccgcccttttaacaacgcacttgggcgaactgcactggtgtactggtaattcctgtcttggattgtgtagtggatataaactgtacccacggttgaaacccactactcacctcacagattgtgtttacctttatatctttgtacgcggtaagtgcggcgttgagagcgccttgtaagttcctaagcattagttggtcctccccgattatgtcatcaatggggttgtcggcacgcggttaagcggttgtcgacccgttgcttggtttaagcatgaggtggattcccccgattatgtctacccgttactatggcgggcggtcgtttcagggtgtttctactgaggactgcaccaagtctttatcttttattctcagatctccggctgtttgacgcttgtaggacagcaggactattttctcttaatctttttctacccactagggtcctatcctagtggagggagggtgccaccccttctctctttagagagtgcgcctggcggtctttccgtctctggaaaaaggagcacatggcatgctacaattggcacaagaaaacaagctttgcggattctttctttgtactagaggaagctgtagcgaccctgtatggcgagcggactcccctctcggcgacgagagcctctcgggccaaaagccaagtgttaatagcacccatacaggcggcagtaccccactgccctttctcaacatacaatgactgatgaaccactgttggtttttctgacacctttgtagtaggattccaaggaatgtcctgaaggtaccctgttagcttacgcgcaggatctgatcaggagtctctttacagtgctgtacactgtgcaagggattaaaaattgtttgaggaatccccgagatagtggtctatctcttcctattttgttttacagacacg

SEQ ID NO: 1457 - DNA, 1000 bp, unidentified
  source 1..1000: mol_type = unassigned DNA; note = Rodent cardiovirus isolate AMzj-2018, complete genome.1 sequence
cagtacccgcgtccaaagggggttgcctggggtggtctcaaccgcgaacacactagcgtgtatccgcggtgaagaccccagggccccctttggacgcgggtactgcgacagtgccaaaccccgtccttccctactccacctaccccggccctaacccagggtccaggaaactggatcaatacaaatcatcccctgaatgctggctaatcagaggaaagtcagcattttccggcccaggctaagagaaatacataagttagactcaatcttgatccccttgacgaattcgcaacgaaaagttctccctcccttgccgcttgttcacacccagaactaataattcggcccctcgtgacaagcccctcggtgaaagaacctctttcaatgcgacgtggttggagattaaatccgactccgacgaaagtactatcatgcctccccgattatgtgatgttttctgccctgctgggcggagcattctcgggttgatatactttgaatccttcctccttggacctccggtcccccggtctaagccgcttggaatacgacagggttattttccaaatctttctccttctactttcatgagctctattcatgaaaagggcatgtgctgccccttccttcttggagaatccgcgcggcggtctttccgtctctcaaaaagcgtggatgcagcatgctggaaccggtgaagaatgtagttctttgtggaaacctagagcagacatcgaaccggctgtagcgacctcacagtaccactgctgtgagcggtgcgaccccagcaccctggttcgatggttgttctctgtggaaccagagaatggccttctcaagccatccagtagagaagccaagaatgtcctgaaggtaccccggcccacgggatctgatcaggagactgatttgtggtgctttacaccacaacttcagtttaaaaattgtcacagcttctccaaaccaagtggtcttggttttccctctattacaatgtgac

SEQ ID NO: 1458 - DNA, 1000 bp, unidentified
  source 1..1000: mol_type = unassigned DNA; note = Foot-and-mouth disease virus - type O strain Akesu/58, complete1 sequence
cgacagctcctgcgttgcactccacacttacgtttgtatgcgcgcgggaaccgctggactttcgttcacccacctacagctggactcacggcaccgcgtggccattttagctggactgtgcggacgaacgccacttgcgcaccccgcgtgactggttaatactcttaccactttccgcctacttggtcgttagcgctgccctgggcactcccgttgggggccgtccggtgctccacggttcccacgcatgacaaactacggtgatggggccgcttcgtgcgagttgatcgcctggtgtgtttcggctgtcacccgaagcccgcctttcacaagttttaccgtcgttcccgacgttaaagggaggtaaccacatgcttattaccgcctttcccggcgttaaagggctgtaaccacacgaattgccttcacccggaagtaaaacggaaatccacacacacggttttgcccgttttcagagagaaacgggacgtgagcgcacgaaacgcgccgtcgcttgtggaagacttgtacaaacacgatctacgcaggtttcctcaactgacacaactcgtgcaaactgtaaccccgcctggtctttccaggtctggaggggaagcttttgtactgtgtttggctccacgttcggtctactggcgagcgctagtagtggcaatgttgtttcgtagcggagcatgttggccgtgggaatccctccttggcgacaaggacccacggggccgcaagccacgtctttgacccaacatgtgtgcaaccccagcacggcaaccttgccacgaaaaccacttcaaggtaacactgatactggtactcaaatactggtgacaggctaaggatgcccttcaggtaccccgaggtaacacgggacacttgggatctgagaaggggattgggacttctataaaagtgcccaatttaaaaagcttctatgcctgaataggtgaccggaggccggcacctttcctctacaactactttacca

SEQ ID NO: 1459 - DNA, 1000 bp, unidentified
  source 1..1000: mol_type = unassigned DNA; note = unclassified sequence
ccgcgggagagatccccggggccccctttcaacgcgggtactgcgatagtgccaccccagccttatccttctcccgacttcccgaccctaacccaggttcctcggaaaggaacaccaaaactcaatcccctggatgctgactaatcagaggaaagttggcattttccggcccaggcttagagaagtagataagttagactcaaattgattcaattccccttggcgaatccgcgtcgaggcgccacctctcacttgccgtcctccacacccatccttaattcggcctctgtgttggaccccttgttgaagtggcttccctctgcgcggcgcggttggagaattttgtcatccgactccgacgaaactaccatcatgcctccccgattgtgtgatgccctccgccctgctgggtggagcatcctcgggttgagaaacctcttccttcaaccttggaccccggtcccccggtctaagccgcttggaataagacagggttattttcactctcttcttcttctactccacggatttctattccctggaagggtatgtgttgcccctcgcttcttgcggaacgcgcacggtggtctttccacctctcgaaaagtgtgcgtgcaacatgcagagatacgtgaagaaagcagtttgtgaactagtcctagagcgaacacgaatccggctgtagcgaccacttaagagcagcggaacccccctcccggcgacgggagcctctgcggccaaaagccacgtggataagatccactcttgagtgcggtgcggccccggcaccccggtttcgtggttgttctttgacgaacccacaaatggcgatcttaagcgcctctgtagagaagccaagaatgtccagaaggtacccctatcaagggatctgatctggagacgtgtcacttatgctttacacgagtgctcgcgtttaaaaactgtcacagcttctccaaaccaagtggtcttggttttctccttctaattctctgtcaat

SEQ ID NO: 1460 - DNA, 1000 bp, Cardiovirus B
  source 1..1000: mol_type = genomic DNA
tcccccggtcaccccctttcgacgcgggtactgcgatagtgccacccagtctctcctactcccgactcccgaccctaacccaggttcctcggtataggaacaccactttactcatcccctggatgctgactaatcagaggaacgtcagcattttccggcccaggctaagagaagtagataagttacaatccaaattgatttatcatccccttgacgaattcgcgttggaaaagcacctctcacttgccgctcttcacacccatcattttaattcggcctctgtgttgagccccttgttgaagtgtttctctccatcgcgacgtggttggagatctaagtcaaccgactccgacgaaactaccatcatgtctccccgattatgtgatgctttctgccctgctgggtggagcatcctcgggttgagaaatccttcttcctttcaccttggaccccggtcccccggtctaagccgcttggaataagacagggttattttcacctctttttcttctactccacagtgctctatactgtggaagggtatgtgttgccccttccttcttggagaacgtgcgcggcggtctttccgtctctcgacaagcgcgcgtgcaacatgcagagtaacgcgaagaaagcagttcttggactagctttagtatctgcaagaagacagctgtagcgaccacacaaaggcagcggaacccccctcctggtaacaggagcctctgcggccaaaagccacgtggataagatccacctttgtgtgcggtgcaaccccagcaccctggtttcttgaagatactctagtgaacccttgaatggcaatctcaagcgcctctgtaggaaagccaagaatgtccaggaggtacccctacctcgcggaagggatctgacctggagacacgtcgcaagtgctttacacctgtgctcgtgtttaaaaattgtcacagctttcccaaaccaagtggtcttggttttcctttttattactattgacact

SEQ ID NO: 1461 - DNA, 1000 bp, unidentified
  source 1..1000: mol_type = unassigned DNA; note = Theiler murine encephalomyelitis, complete genome.1 sequence
ccggttaccccctttcgacgcgggtactgcgatagtgccaccccagtccttcctactcccgactcccgaccccaacccaggttccttggaacaggaacaccaatttattcatcccttggatgctgactaatcagaggaacgtcagcattttccggcccaggctaagagaagtagataagttagaatctaaattatttatcatccccttgacgaattcgcgttggaaaagcacctctcacttgccgctcttcacacccatcattctaattcggcccctgtgttgagccccttgttgaagtgtttccctccatcgcgacgtggttggagatctaagttaaccgactccgacgaaactaccatcatgcctccccgattatgtgatgctttctgccctgctgggtggagcatcctcgggttgagaaatctttcttccttttaccttggactccggtcccccggtctaagccgcttggaataagacagggttatcttcactcctcttcttttctacttcacagtgttctatgctgtgaaagggtatgtgtcgccccttccttcttcggagaacacgcgtggcggttttttccgtctctcgacaagcgcgtgtgcgacatgcagagtctcgcgaagaaagcagttctcggtctagctttagtgcccacaagaaaacagctgtagcgaccacacaaaggcagcggaacccccctcctggtaacaggagcctctgcggccaaaagccacgtggataagatccacctttgtgtgcggtgcaaccccagcaccctgttttcttggtgacactctagtgaacccctgaatggcgatcttaagcgcctctgtagggaagccaggaatgtccaggaggtaccccttccgctcggaagggatctgacctggagacacatcacatgtgctttacacctgtgcttgtgtttaaaaaattgtcgcagcttccccaaaccaagtggtcttggttttctctttttattatattgtcaat

SEQ ID NO: 1462 - DNA, 1000 bp, Cardiovirus B
  source 1..1000: mol_type = genomic DNA
atcccccggttaccccctttcgacgcgggtactgcgatagtgccaccccagtctttcctactcccgactcccgaccctaacccaggttcctcggaacaggaacaccaatttactcatcccctggatgctgactaatcagaggaacgtcagcattttccggcccaggctaagagaagtagataagttagaatccaaattgatttatcatccccttgacgaattcgcgttggaaaaacacctctcacttgccgctcttcacacccattaatttaattcggcctctgtgttgagccccttgttgaagtgtttccctccatcgcgacgtggttggagatctaagtcaaccgactccgacgaaactaccatcatgcctccccgattatgtgatgttttctgccctgctgggtggagcaccctcgggttgagaaaaccttcttcctttttccttggactccggtcccccggtctaagccgctcggaatatgacagggttattttcacctcttcttttctactccacagtgttctatactgtggaagggtatgtgttgccccttccttcttggagaacgtgcgcggcggtcttccgtctctcgacaagcgcgcgtgcaacatacagagtaacgcgaagaaagcagttctcggtctagctctagtgcccacaagaaaacagctgtagcgaccacacaaaggcagcggaacccctctcctggtaacaggagcctctgcggccaaaagccacgtggataagatccacctttgtgtgcggtgcaaccccagcaccctggtttcttggtgacactctagtgaacccctgaatggcaatctcaagcgcctctgtagggaagccaagaatgtccaggaggtaccccttcctctcggaagggatctgacctggagacacatcacacgtgctttacacctgtgcttgtgtttaaaaattgttacagcttccccgaaccaagtggtcttggttttcactttttatcacactgtcaat

SEQ ID NO: 1463 - DNA, 1000 bp, unidentified
  source 1..1000: mol_type = unassigned DNA; note = unclassified Picornaviridae sequence
cactacgttacggttcccgcccgggacaactggtaccccattaggctacaacatggctgaaaagggtattgggtccccccggattgtgtccgttcgtagtgtgtgtaacgtggtttaccatctccactaacattggactaagcatttcatctttcctccccgattgtgtactcacttggctaacgctgggtggtcgcggttgggtccttgatttactttttctcgtctaagcattccgactgtcctccccgattatgtgctcattcagttaactgctgggtggtcatgactaacatcgaggaaccttctgtccacgcttactttgagctccggtcgcttgacgcttgtagggcgatagggttatcttcctgacaacatctttattctacctccataggctctatctatggagacggagtgtggcacccgtcccttctttgggagcttcggtagtgacgccctttgtcactctcgccagccgaggcatgcctggtgccaggtagcaaagaaagcatatgtttaaggacttgactgatttagcgcaagagtttgtagcgatgtccatagtgtctgcggattccccacacggcgacgtgtgccgcggaggccaaaagccacggtgttcacagcacccctatggatgcccacagaccccagtgggcactcttgttgccggactttcaggaaattaggcataggctcttctcaaactcctggcattggactaggtaagaatgccccggaggtaccccagtactccttcgggagtctgggatctgaccgggggccccacaaacatgctttacgtgtttcgtgcggtcaaaaattgtctaactagtcccaaccttgaacaagggattgttctttcctttttattactgagactggcctatggtgacaacagagattgactgtgaatacagttattttctggtgtttatcatttggtttttctccgtgctcttttacctttgtggtatttgttctttagataggcaaa

SEQ ID NO: 1464 - DNA, 1000 bp, unidentified
  source 1..1000: mol_type = unassigned DNA; note = Theiler's encephalomyelitis virus isolate Vie415HTR, complete1 sequence
catcccccggtcaccccctttcgacgcgggtactgcgatagtgccaccccagtctttcctactcccgattcccgacccctacccaggttcctcggaacaggaacaccaaattactcatcccctggatgctgactaatcagaggaacgtcagcgttttccggcccaggttaagagaagtagataagttagattctaaattgacctaccatccccttgacgaattcacactggagacgcacctctcacttgccgctcttcacacccatcaatctaattcggcccctgtgttgagccccttgttgaagtgccttcccccattgtgacgtggttggagatctaagtcaaccgactccgacgaaactaccatcatgcctccccgattatgtgatgctttctgccctgctgggtggagcatcctcgggttgagaaaatcttcttcctttttccttggaccccggtcccccggtctaagccgcttggaataagacagggttagcttcatctcctccttcttccacttcaagtgcctatactatgaaagggtatgtgttgccccttccttcttggagaacacacgcggcggcctttccgtctctcgacaagcgcgtgtgcgacatgcagagaaacgtgaagaaagcagtttgcggactagctccagtgcccacaagaaaacagctgtagcgaccacacaaaggctgcggaaccccctcctggtaacaggagcctctgcggccaaaagccacgtggataagatccacctttgtgtgcggtacaaccccagtaccctggtttcttggtgcactctagcgaaaacgcaaatggcaatctgaagcgcctctgtaggaaagcaaagaatgtccaggaggtaccccttccttttggggagggatctgacctggagacacatcacacgtgctttacacttgtgcttgtgtttaaaaactgtccagctttcccaaaccaagtggtcttggttttcattttttaaacaaatttcact

SEQ ID NO: 1465 - DNA, 1000 bp, Cardiovirus B
  source 1..1000: mol_type = genomic DNA
cgcggtgaagatcaccccgggaaaccccctttggacgcgggacctgcgacagtgccatcccccgtctctcctattccaactacccgaccctaacccagggtccaggacactggatcaatacaagtcatcccctgaatgctggctaatcagaggaaagtcagcattttccggcccaggctaagagaaacacaataagttagaatctaaattaatcaccttgacgaattcgcaaagataagtcctccctcccttgccgctcgatcacacccagaactaacaattcggcctctcgtgacgagccccttggtgaaaggacctctttcaacgcgacgtggttggagattaaaaccgactccgacgaaagtgctatcatgcctccccgattatgtgatgttttctgccctgctgggcggagcattctcgggttgatataccttgaatccttcatccttggacctcccggtcccccggtctaagccacttggaatatgacagggttattttccaaaattcttatttccactttcatgagttcttttcatgaaaagggtatgtgctgccccttccttcttggagaatccgcgtggcggtctttccgtctctcgaaaaacgtggatgcagcatgctggaaacggtgaagaaagtagttctctgtggaaacttagaacagacatcgaaacagctgtagcgacctcacagtagcagcggaaccccctcctggcgacaggagcctctgcggccaaaagccccgtggataagatccactgctgtgagcggtgcaaccccagcaccctggttcgatggttgttctctgtggaatcagagaatggctttcctaagccctccagtagagaagccaagaatgtcctgaaggtaccccgcgtgcgggatctgatcaggagaccaattgccagtgctatacactggtactttggtttaaaaattgtcacagcttctccaaaccaagtggtcttggttttctatctttaataattggttc

SEQ ID NO: 1466 - DNA, 1000 bp, Cardiovirus B
  source 1..1000: mol_type = genomic DNA
gcgtcttcgcggtgaagaacaccccaggggtaccccctttgaacgcgggacctgcgaaagtgccaacccaagtcttttcctgttcttaccctactccctccttgggtccattggaaggaccaactatattatcccttggatgctggctaatcagaggaaagtcagcattttccggcccaggctaagagaaacatataagttagatatgattttaatcccttgacgaattcaaaacttgatgttctccctcccttgccgcttgatcacacccacctcttaaattcggccttttgtgacaagccccttggtgaaaggacctctcttgtttcgacgtggttggaattaacatcaattccgacgaaagtgctatcatgcctccccgattatgtgatgttttctgccctgctgggcggagcaccctcgggttgagataccttgactcttttcttttggaaccttggttcccccggtctaagccgcttggaatacgacagggttattttctatactcttatttctacttttacgggttctatccgtaaaaagggtatgtgttgccccttccatcttcggagaatccacacggcggtctttccgtctctcaaaaagtgtggatgcaacatgccggaaacggtgaagaaagcagttttctgtggaaatttagaatggacatcgaaacagctgtagcgacctcacagtagcagcggactcccctcttggtaacaagagcctctgcggccaaaagccccgtggataagatccactgctgtgagcggtgcaaccccagcaccctggttcgatggctactctctatggaaccagagaatggttttctcaagccctccggtagagaagccaagaatgtcctgaaggtaccccgcgtgcgggatctgatcaggagaccgaatggtaatgctttacattatcactttggtttaaaaattgtcacagcttctccaaaccaagtggtcttggttttcctttttatccacatggcaag

SEQ ID NO: 1467 - DNA, 1000 bp, Cardiovirus B
  source 1..1000: mol_type = genomic DNA
tagcatcttcgcggcaaagaacaccccaggggtaccccctttgaacgcgggtcctgcgaaagtgccaacccatgtctttcccactctttccccgactcccacctcgggtctaatgaaaagaccaaatatttcatcccttgaatgctggctaatcagaggaaagtcagcattttccggcccaggctaagagaaacatataagttagatttgatttaatcccttgacgaattcgaaacgagacgttttccctcccttgccgcttgttcacacccacttatttaattcggccttttgtgacaagcccctcggtgaaagaacctctctcttttcgacgtggttggaattaccatcatctccgacgaaagtgctatcatgcctccccgattatgtgatgttttctgccctgctgggcggagcattctcgggttgagaaaccttgaatcttttcctttggaaccttggttcccccggtctaagccgcttggaatatgacagggttattttcttaatcttatttctacttttacgggctctatccgtaaaaagggtacgtgctgccccttccttctctggagaatctacacggcggtctttccgtctcttaacaagtgtggatgcagcatgccggaaacggtgaagaaaacagttttctgtggaagtttagagtgcacatcgaaacagctgtagcgacctcacagtagcagcggactcccctcttggcgacaagagcctctgcggccaaaagccccgtggataagatccactgctgtgagcggtgcaaccccagcaccctgattcgatggtcattctctacggaaccagaaaatggttttctcaagccctccggtagagaagccaagaatgtcctgaaggtaccccgcgtgcgggatctgatcaggagaccaattgacggtgctttacactgtcactttggtttaaaaattgtcacagcttctccaaaccaagtggtcttggttttccaattttgttgagtggcaat

SEQ ID NO: 1468 - DNA, 1000 bp, unidentified
  source 1..1000: mol_type = unassigned DNA; note = unclassified Picornaviridae sequence
taggatgacatgttccaagtcagatgccaacgacttggtaaggacgaatttgcccgcactacactacggttcccgcccgggacaactggtaccccattatgccacaacatggctgaaaagggtactgggtccccccggattgtgtccgtttgtagtgtgtgtaacgtggtttaccatctccactaacattggactaagcatttcatctttcctccccgattgtgtactcacttggctaacgctgggtggtcgcggttgggtccttgatttactttttctcgtctaagcatgccgactgtcctccccgattatgtgctcattcagttaactgctgggtggtcatgactaatatcgaggaaccttctgtctacgcttactttgagctccggtcgcttgacgcttgtagggcgatagggttatcttcccaacaacatctttattctacctccataggctctatctatggagacggagtgtggcacccgtcccttctttgggagcttcggtagtgacgccctttgtcactctcgccagccgaggcatgcctggtgccaggtagcaaagaaagcatatacttaaggacttgactgatttagcgcaagagtttgtagcgatgtccatagtgtctgcggattccccacacggcgacgtgtgccgcggaggccaaaagccacggtgttcacagcacccctatggatgcccacagaccccagtgggcactcttgttgccggactttcaggaaattaggtataggctcttctcaaactcctggcattggactaggtaagaatgccccggaggtaccccagtactccttcgggagtctgggatctgaccgggggccccacaaacatgctttacgtgtttcgtgcggtcaaaaattgtctaactagtcccaaccttgaacaagggattgttctttcctttttattactgagactggcctatggtgacaacagagattgactgtgaatacagttattttctggtgttcatcat

SEQ ID NO: 1469 - DNA, 1000 bp, unidentified
  source 1..1000: mol_type = unassigned DNA; note = unclassified Cardiovirus sequence
cccccggttaccccttctgaacgcgggtcctgcgatagtgccaaccccagcttatccctaatcccgactccccgaccctaacccagggtcctcggaagaggatcaccaacttcatccccagaatgttgactaatcagaggaaagttagcattttccggcccagacttagagaagtagataagttagagccaaattgatacaagcatccccttgacgaattcgccatgaaacgtcgtccctcacttgccgcttgatcacacccagaactaacaattcggcccctcgtgacaagccccttgttgacacgacctctttctacgcgacgtggttggagattttgaaatcctttgactccgacgaaactaccatcatgtctccccgattatgtgatgctatccgccctgctgggtggagcattctcgggttgagttaacctattcctttactccttggactccggtcccccggtctaagccgcttggaataagacagggttatcttcctaactctctctcttctactcttaagtgtcctctacttaagaagggtatgtgctgccccttccttcttggagaactcgcgtggcggtctttccgtctctcgaagagcgtgagtgcagcatgcaaagacctgcgaagaaagcagtttcctgactaaccttagtttggacaagattccggctgtagcgacctcatagaagcagtggacacccctctcggtaacgagagcccctgcggccaaaagccacgtggatgagatccacttctatgagcggtgcaaccccagcaccccggtatcttggtcatactctggtgaacctggagatggcgatcttaagcaactttgtagagaagccaagaatgtccagaaggtaccccggctcacgggatctgatctggagaccagtacactgtgctttacacattgtctctggtttaaaaactgtcacagcttctccaaaccaagtggtcttggttttcccactttactacttggcaag

SEQ ID NO: 1470 - DNA, 1000 bp, Cardiovirus B
  source 1..1000: mol_type = genomic DNA
tgtcttcgcggtgtagaacaccccaggggtaccccctttgaacgcgggtcctgcgaaagtgccaacccacgtctcttccttcctttaatccgattcccacctcgggtccataaaaaggaccaaatatgtcatcccttgaatgctggctaatcagaggaaagtcagcattttccggcccaggctaagagaaacatataagttagatttgatcacaatcccttgacgaattcagaacgagaagttctccctcccttgccgcttgttcactcccttccattcaattcggcctctcgtgacaagccccttggtgaaagaacctctctctttctgacgtggttggaattaacatcatttccgacgaaagtgctatcatgcctccccgattatgtgatgttttctgccctgctgggcggagcattctcgggttgagaaaccttgaatcttttcttttggaaccttggttcccccggtctaagccgcttggaatatgacagggttattttcttcactcttacttctacttttatgggctctatccataaaaagggtatgtgctgccccttccttcttcggagaattcacacggcggtctttccgtctctcgacaagtgtggatgcagcatgccggaaacggtgaagaaaacagttttctgcggaagtttagaatacgcatcgaaacagctgtagcgacctcacagtagcagcggactcccctcttggcgacaagagcctctgcggccaaaagccccgtggataagatccactgctgtgagcggtgcaaccccagcaccctgattcgatgattattctctacggaaccagaaaatggttttctcaagccttccggtagagaagccaagaatgtcctgaaggtaccccgcgtgcgggatctgatcaggagaccaactggcagtgctttacactgttaccttggtttaaaaactgtcacagcttctccaaaccaagtggtcttggttttcccattttaattgatggcaat

SEQ ID NO: 1471 - DNA, 1000 bp, Cardiovirus B
  source 1..1000: mol_type = genomic DNA
gttcgcggtgaagaacaccccaggggtaccccctttggacgcgggacctgcgacagtgccaacccacgtctcttcccactattattattccggttcccgccttaggtccattgaaaagaccaaatatgtcatcccttggatgctggctaatcagaggaaagtcagcattttccggcccaggctaagagaaacatataagttagaaatgattctaatcccttgacgaattcggaacgagaagttctccctcccttgctgcttgttcacacccatcatttaattcggccctttgtgacaagccccttggtgaaaggacctctctctttccgacgtggttggaattaacatcttttccgacgaaagtgctatcatgcctccccgattgtgtgatgttttctgccctgctgggcggagcgtcctcgggttgagaaacctttaatcttttcctttggagccttggctcccccggtctaagccgcttggaatatgacagggttattttccaaactctttatttctactttcatgggttctatccatgaaaagggtatgtgttgccccttccttctttggagaatctgcgcggcggtctttccgtctctcaacaagcgtggatgcaacatgccggaaacggtgaagaaaacagttttctgtggaaatttagagtggacatcgaaacagctgtagcgacctcacagtagcagcggattcctctcttggcgacaagagcctctgcggccaaaagccccgtggataagatccactgctgtgagcggtgcaaccccagcaccctggttcgatggccattctctatggaaccagagaatggttttctcaagccctccggtagagaagccaagaatgtcctgaaggtaccccgcgcgcgggatctgatcaggagaccaattggcagtgctttacgctgccactttggtttaaaaactgtcacagcttctccaaaccaagtggtcttggttttctaattttgttgactggcaat

SEQ ID NO: 1472 - DNA, 1000 bp, unidentified
  source 1..1000: mol_type = unassigned DNA; note = Saffold virus strain BCH1031, complete genome.1 sequence
ttttcgcggcaaagaacacctcaggggtaccccctttgaacgcgggacctgcgatagtgccaacccacgtcttttcccactcctaacccggttcccaccttatgtccattgaaaggaccagatatatcatcccttgaatgctggctaatcagaggaaagtcagcattttccggcccaggctaagagaaacatataagttagaaatgattctaatcccttgacgaaaccagaacgagacgttctccctcccttgccgcttgttcacacccatttgattgattcggccttttgtgacaagccccttggtgaaaggacctctctctttctggcgtggttggaattaacatcctttccgacgaaagtgctatcatgcctccccgattatgtgatgctttctgccctgctgggcggagcattctcgggttgagaaatctcaaaccttttctttttggaactttggttcccccggtctaagccgcttggaatacgacagggttattttctatactcttatttctacttttacgggctctatccgtaaaaagggtaagtgttgccccttccatcttcggagaatccacacgacggtctttccgtctctcgaaaagtgtggatgcaacatgccggaaacggtgaagaaagcagttttctgtggaaatttagaatggacatcgaaacagctgtagcgacctcacagtagcagcggactcccctcttggcaacaagagcctctgcggccaaaagccccgtggataagatccactgctgtgagcggtgcaaccccagcaccctggttcgatggctattctctatggaaccagagaatggttttctcaagccctccggtagagaagccaagaatgtcctgaaggtaccccgcgtgcgggatctgatcaggagaccgaatggtaatgctttacattatcactttggtttaaaaattgtcacagcttctccaaaccaagtggtcttggttttccttttttatccacatggcaag

SEQ ID NO: 1473 - DNA, 1000 bp, unidentified
  source 1..1000: mol_type = unassigned DNA; note = Saffold virus gene for viral polyprotein, strain Nijmegen2008.1 sequence
gcatcttcgcggtgtagaacaccccaggggtaccccctttgaacgcgggacctgcgatagtgccaacccacgtcttttcccacttttgccccgattcccacctcgggtccaatgaaaggaccacatgtttcatcccttgagtgctggctaatcagaggaaagtcagcattttccggcccaggctaagagaaacatataagttagatttgattcaaatcccttgacgaattcggaacgagacgttctccctcccttgccacttgttcacacccacacttttgattcggccttttgtgacaagtcccttggtgaaagaacctctctctttccgacgtggttggaattaacatcatttccgacgaaagtgctatcatgcctccccgattgtgtgatgttttctgccctgctgggcggagcattctcgggttgagaaaccttgaatcttttcctttggaaccctggttcccccggtctaagccgcttggaatacgacagggttattttccttattcttacttctacttttatgggttctatccataaaaagggtatgtgctgccccttccttctttggagaattcgcacggcggtctttccgtctctcgacaagtgtgaatgcagcatgccggaaacggtgaagaaaacagttttctgtggaagtttagagtgcacatcgaaacagctgtagcgacctcacagtagcagcggaaccccctcttggcgacaagaacctctgcggccaaaagccccgtggataagatccactgctgtgagcggtgcaaccccagcaccctgattcgatggtcattctctacggaaccagaaaatggttttctcaagccctccggtagagaagccaagaatgtcctgaaggtaccccgtgcgcgggatctgatcagagaccaattgacagtgctgtacgctgtcactttggtttaaaaactgtcacagcttctccaaccaagtggtcttggttttccaatttttattgaatggcagt

SEQ ID NO: 1474 - DNA, 1000 bp, Cardiovirus B
  source 1..1000: mol_type = genomic DNA
cccggccaccccctttcgacgcgggtactgcgatagtgccaccccagtctttcctactcccgactcccgactctaacccaggttccttggaacaggaacaccaatatactcatcccctggatgctgactaatcagaggaacgtcagcattttccggcccaggctaagagaagtagataagttagattccaaattgatttatcatccccttgacgaattcgcgttggaaatgcacctctcacttgccgctcttcacacccattaacttgattcggcctctgtgttgagccccttgttgaagtgcttccctccatcgtgacgtggttggagatctaagtcaaccgactccgacgaaactaccatcatgcctccccgattatgtgatgctttctgccctgctgggtggagcatcctcgggttgagaaaaccttcttcctttttccttggaccccggtcccccggtctaagccgcttggaataagacagggttatcttcacctcttccttcttctacttcatagtgttctatactatgaaagggtatgtgtcgccccttccttctttggagaacacgcgcggcggtctttccgtctctcgaaaagcgcgtgtgcgacatgcagagaaccgtgaagaaagcagtttgcggactagctttagtgcccacaagaaaacagctgtagcgaccacacaaaggcagcggaccccccctcctggcaacaggagcctctgcggccaaaagccacgtggataagatccacctttgtgtgcggcacaaccccagtgccctggtttcttggtgacacttcagtgaaaacgcaaatggcgatctgaagcgcctctgtaggaaagccaagaatgtccaggaggtaccccttccctcgggaagggatctgacctggagacacatcacatgtgctttacacctgtgcttgtgtttaaaaattgtcacagctttcccaaaccaagtggtcttggttttcactctttaaactgatttcact

SEQ ID NO: 1475 - DNA, 1000 bp, Cardiovirus B
  source 1..1000: mol_type = genomic DNA
cccccggttaccccctttcgacgcgggtactgcgatagtgccaccccagtctttcctactcccgactcccgaccctaacccaggttcctcggaacaggaacacaaatttactcatcccctggatgctgactaatcagaggaacgtcagcattttccggcccaggcttagagaagtagataagttagaatctaaattgatatgacttccccttgacgaattcacgttggaaatgcacccctcacttgccgctcttcacacccactaattgattcggcctactgtgttgagccccttgttgaagtgcttccctccctcgtgacgtggttggagaaatcttgtcacccgactccgacgaaactaccatcatgcctccccgattatgtgatgctttctgccctgctgggtggagtatcctcgggttgagaaatccttcttccttttaccttggaccttggtcccccggtctaagccgcttggaataagacagggttattttcacctcttcttcttctacttcatggtgctctataccatgaaagggtatgtgtcgccccttccttcttggagaactcacgcggcggtcttccgtctctcaaaaagcgcgagtgcgacatgcagagtaacgcgaagaaagcagttcctggcctagctctagtgcccacaagaaaacggctgtagcgaccacacaaaggcagcggaactcccctcctggtaacaggagcctctgcggccaaaagccacgtggattagatccacctttgtgtgcggtgcaaccccagcaccccggtttcttgttgacactctagtgaatccttgaatggcaatctcaagcgcctctgtaggaaagccaagaatgtccaggaggtaccccttcctcgcggaagggatctgacctggagacacatcacacgtgctttacacttgtgcttgtgtttaaaaattgtcacagctttcccaaaccaagtggtcttggttttccttttttatcctactgtcaat

SEQ ID NO: 1476 - DNA, 1000 bp, Cosavirus A
  source 1..1000: mol_type = genomic DNA
ggctcactcctgtacaccgtgagtccgcgcagtgctgacttaacacttaagtaatgtgtaggccgagaacgacaccgctcggctcccacctttcaccaccgtgggattaacaggttcaatacacaaattcctgtccttggctatgtcaaagcaatacagtgtgtacatgatgtgcacgctcaaggcggagacttaggcctcacagattgtgttttgtgatattgaatgctggatggtcacgttggagactgcatgtggcagtcttgaaacgtgtggtttgacgtctatccattatggcagtgggtggagtactgcaaagatgtcaccgtgctttacacggtttttgaaccccacaccggctgtttggcgcttgcaggacagcaggtttattttcttatgttctctatttctagccaacaggacactatcctgttgggcggagtgatactcccgttccttcttggacagattgcctccacgacctttgtggatctcaaggtagtcaagtcactggtgaatagagcgaaggttgaggagacctgaggaatttccatgtggctttgccaggagttgtagcgatgctgtgtgtgtgtgcggatttcccctcatggcaacatgagcctcacaggccaaaagccctgtccgaaaggacccacacagtggagcgaccccagctccctcctacaaagctttgtgagaatgaactcacgtttattcttctttattctctatttacatcaggccccaaagatgtcctgaaggtaccttgtgtatctgggcatgagcaccatcaactacccggacttgcacttcggtgcagacgcatgtggtgtcccagcccctctgcttcggcaggggggcttttgctcgctcagcacgagatctgatcaggagtctcccccggtgtgctttacacccggcgggggattaaaaattgcccaaggcctggcaaaataacctaggggactaggttttccttttattaacaatgtctgtcatt

SEQ ID NO: 1477 - DNA, 1000 bp, unidentified
  source 1..1000: mol_type = unassigned DNA; note = Human cosavirus A strain AM326/BRA-AM/2017, complete genome.1 sequence
tccgctgtgatgggctcactcctgtacaccgtgagtccgcgcagtgctgacttaacacttaagtaatgcataggccgagaattacaccgctcggctcccacctttttccatcgtgggattaacaggtttaatgcacaaattcctgtccttggctatgtcaaagcaatacagtgtgtactcggtgtacacgctcaaggcggagatttaggcctcacagattgtgttttgtgttgttgaatgctggatggtcacgttggagactgcatgtggcagtcttgaaacgtgtggtttgacgtctatccattacggcagtgggtggagtactgcaaagatgtcaccgtgctttacacggtttttgaaccccacaccggctgtttggcgcttgcaggacagcaggtttattttcttatattctctatttctagccaacagggtactatcttgttgggcggagtgatactcccgttccttcttggacagattgcctccacgttctttgtggatcttgaggtgatcaagtcactggtaagtagagcgaaggttgaggagacctgaggaatttccatgtggctttgccaggagttgtagcgatgctgtgtgtgtgtgcggatctcccctcatggtaacatgagcctcacaggccaaaagccctgtccgaaaggacccacacagtggagcaatcccagctccctcctacaaagctttgtgagaatgaactcacgtttattcttctttattctctacttacatcaggccccaaagatgtcctgaaggtaccttgtgtatctgggcacgagcaccatcaactacccggacttgtgcttcggcgcagacgcatgtggtgactcagcccctctgcttcggcagaggggctttttgctcgctcagcacgagatctgatcaggagcccctcccagtgtgctttacacctggcgaggggttaaaaattgcccaaggcctggcaaaacaacctaggggactaggttttcctttattaaca

SEQ ID NO: 1478 - DNA, 1000 bp, unidentified
  source 1..1000: mol_type = unassigned DNA; note = Picornaviridae sp. isolate bbr144pit2 genomic sequence.1 sequence
tcagaacagaatactcagtggacaggggaccaatccaatataagtcttgaccgggcctttctggaccagatgtccttaaggaggctgtgccaagccaccaggtaaatctctcaaagagagtccagagtctcgtaggctatgctgtattaatacagcaaagacccacacatccccgctttcaacgtctggcccacgaaacgggccactttctcggtctgaccattggtttattattgaaattggcttggaaatgctgacactgtaagttggtttgtgatttaaacaatggttaatctggactctctttgagagatttacctggtggcttggcacagcctccttaaggacatctggtccagaaaggcccggtcaagacttatattggattggtcccctgtccactgagtattctgttctgaaccgtgtaggcagggctagcgccaccatgattgccaagggactacctccctggtgacagggacccttgggcccaaaaggctaggtggcaactctcatgtcaagagaggggtatccaccccaatctgaatcatgtggagtgaagccactcgtcatggctctgaccccgagactgtctacatctagtaagatggatgaaaactggatttggagaccactctgattgtcttgatgagaaagtccgctatttgactgagtagatgccctccagctacccttatggatgtgaggaggggaccgtgactatagcgttccgctaaaccggtttaaaaaacatgaaaggtcaaatatgtggcgccattttccacttatatcaataaccatatgtctgacgaagttgattgtgctgagtgttctaagccctcctggactgtcagattaaaattggcttttctgcaatattttggttgccagtttgtatgggtttatcactcaggaaagaatcaagagaaagattgaaaatcttggattgtgcaacaaaagctcatttttgtccttgtgaaggcaaccagagattgcagtc

SEQ ID NO: 1479 - DNA, 1000 bp, unidentified
  source 1..1000: mol_type = unassigned DNA; note = Cosavirus F strain NGR_2017_NHP_CV, complete genome.1 sequence
cggtgtgatgggctcactcctgtacatcgtgagtatgctcaaccactgactaaagggctgcttgaacttaacatcatggattccgatccgttacattgatcggcccgtgcccttctcaatatgggattaacagagcttcaacttggttttcctgtcttttagcgttccaacggtattatgccacaacatggcagaaagcccgcggtagctatcacagattgtgtaaccaggtttggctgctggatggtcatattcagatcgcatgcatgtgtggtcttgagatatgtcccggttgacgtttcccttatgttacattcttgacagccggtggagtgctgaaattacgtcaccatgctttacatggtttttgaactccacgccggtcgctagacgcttgtaaggcgataggcttatcttcctatttctcttctttctagcccagtaggttctatctactggggcggagcgaggttcccgttccttcttggacagctggtcaccacaccttgtggattcttagactggcaaaacactggtgcaagagttgaagggattatgtgtttaagtgaagttctactgctttttgaggaatcgtagcggtgctgtgtgtgtgtgcggattccctcctgcggcgacgcaggcctcacaggccaaaagccacggtcgaaagaccccacacagtggagatatcccatctccttcctctcttagtagtttaatgaatctttttcacaggatcttataagactactgcatttcagaccccaaagatggcctgaaggtaccttgtgtattcactttggctgaaccaccgactccccggactggctttgccgacgcatgtgggtgcccagcccctgcccttaagggcaggggcttccctcagcaagtgacacgagatctgatcaggtgccaggtcactggtgctttacaccaccctggttaaaaattgcccaaggtctgacaccccaacccaggggactgggttttcttttatctt

SEQ ID NO: 1480 - DNA, 1000 bp, unidentified
  source 1..1000: mol_type = unassigned DNA; note = unclassified Cosavirus sequence
ctcactcctgtacaccgtgagtccgcgcagtgctgacttaacacttaagtaatgtttaggccgagaattacaccgctcggctcccacctttcaccatcgtgggattaacaggtaaactatgtgtattcctgtccttggttgtttcaaagcaatacggcatgtgcaatggcgcacaggcccaaggcggagaattagacctcacagattgtgttacacatttgtttatgctggatggtcacgttggagactgcatgtggcagtcttgaaacgtgtggtttgacgtctaaccattatggcagtgggtggagtactgcaaagatgtcaccgtgctttacacggtttttgaaccccacaccggctgtttggcgcttgcaggacagtaggtttattttcatttgaattctcttttctagccgtgtaggatctatctacacgggcggagtgatactcccgctccttcttggacaggtgacctccacgctctttgtggatctcaaggtgaccaagtcactggtgtttgaagtgaagattgaagagacactagggagtttcatgtggctttgccagggattgtagcgatgctgtgtgtgtgtgcggatctcccctcgtggcgacacgagcctcacaggccaaaagccctgtccgaaaggacccacacagtggggttgccccgacccctccctacaaagctttgtgcaaacaaacttttgttttgtctttcttaagcttctctcacatcaggccccaaagatgtcctgaaggtaccccgtgtatctgaggatgagcaccatcagctacccggacttgtagaacacattctacagacgcatgtggtaacccagcccctctccttcgggaggggggctttgctcactcagcacaggatctgatcaggagatccacctctcgtgctttacacgagggcgtgggtttaaaaattgcccaaggcctggcaaacaacctaggggactaggttttcctttattcaaaagttgtcaat

SEQ ID NO: 1481 - DNA, 1000 bp, unidentified
  source 1..1000: mol_type = unassigned DNA; note = unclassified Cosavirus sequence
ctctgccagtgattcccccttgcgggatctttttaaactttatttcaaactacgtttctaagcaactttaaatacacaagaacgttgacccttccattgggaatggaagagatgaaattgaaatggaagtattctattgtaatgtcaatagtcttaccatccgctgtgatgggctcactcctgtacaccgtgagtccgcgcagtgctgacttaacacttaagtaatgattaggccgagaattacaccgctcggctcccacctttcaccatcgtgggattaacaggtaatttgtatacattcctgtccttggttatgtcaaagcaatacggcatgtgcaaaggcgcacaggcccaaggcggagacttagacctcacagattgtgttgtatattaaattatgctggatggtcacgttggagactgcatgtggcagtcttgaaacgtgtggtttgacgtctaaccattatggcagtgggtggagtactgcaaagatgtcaccgtgctttacacggtttttgaaccccacaccggctgtttggcgcttgcaggacagtaggtttattttctttcaacttctcttttctagccgcacatgttctatgtgtgcgggcggagtgatactcccgctccttcttggacaggtgacctccacgccctttgtggatcttaaggttgccaagtcactggtgtttgaagtgaagattgaagaaacactagggagtttcatgtggctttgccagggattgtagcgatgctgtgtgtgtgtgcggatttcccctcgtggcgacacgagcctcacaggccaaaagccccgtccgaaaggacccacacagtggggttaccccaacccctccctacaaagttttgtgcaaacaagcttttgtttagtctctcttaagcttctttcacatcaggccccaaagatgtcctgaaggtaccccgtgtatctgaggatgagcaccatcgactacccgaacttgcgagcaaatttcgcagacgc

SEQ ID NO: 1482 - DNA, 1000 bp, unidentified
  source 1..1000: mol_type = unassigned DNA; note = unclassified Cosavirus sequence
ctcactcctgtacaccgtgagtccgcgcagtgctgacttaacacttaaataatgtttaggccgagaattacaccgctcggctcccacctttcaccatcgtgggattaacaggtgactagtttgtattcctgtccttggttttatcaaagcaatacggcatgtgtaacggcgcacaggcccaaggcggagatttagacctcacagattgtgttacaaatttagtcatgctggatggtcacgttggagactgcatgtggcagtcttgaaacgtgtggtttgacgtctaaccattatggcagtgggtggagtactgcaaagatgtcaccgtgctatacacggtttttgaaccccacaccggctgtttggcgcttgcaggacagtaggtttattttcttttaaatctcttttctagccgtgcaggatctgtctgcacgggcggagtgatactcccgctccttcttggacaggtgacctccacgttctttgtggacctcaaggttaccaagtcactggtgtttgaagtgaagactagagagacactagggagtttcatgtggctttgccagggattgtagcgatgctgtgtgtgtgtgcggatttcccctcgtggcaacacgagcctcacaggccaaaagccctgtccgaaaggacccacacagtggggtgaccccgacccctccctacaaagctttgtgcaaacaatcttttgtttagcttttcttaagcttctttcacatcaggccccaaagatgtcctgaaggtaccccgtgtatctgaggatgagcaccaccgactacccggacttgcgcacctaacgcagacacatgtggtaatccagccccctccttgaggggagggggctttgctcactcagcacaggatctgatcaggagatccatctctggtgctttacaccggagcatggatttaaaaattgcccaaggcctggcacacaacctaggggactaggttttcttttttatttttcaagtttgtcaat

SEQ ID NO: 1483 - DNA, 1000 bp, Enterovirus A
  source 1..1000: mol_type = genomic DNA
catgtcttgatcaagcacttctgtaaccccggactgagtatcaatagactgctcacgtggtcgaaagagaaaacgttcgttatccggctaactacttcgagaaacctagtagcaccactgaagctgcggagtgtttcgctcagcacttcccccgtgtagatcaggtcgatgagtcactgcttaccccacgggtgaccgtggcagtggctgcgttggcggcctgcctatggggcaacccataggacgctctaaagtggacatggtgtgaagagtctattgagctagttagtagtcctccggcccctgaatgcggctaatcctaactgcggagcgcatgcccccaaaccagagggtggtgcgtcgtaacgggtaactctgcagcggaaccgactactttgggtgtccgtgtttcttttattctcataatggctgcttatggtgacaattgaggaattgttaccatatagctattggattggccatccggtgtgcaacagagctattatctacttgtttgttggatacattccattgacacctaaatccttcaatacattgtactatattttaacgttgaacgcaagaaaatgggagctcaagtctcgacgcaaaaatccggcagtcatgagactggtaatgtagccactggaggatctacaataaacttcactaacatcaactattataaagattcttacgccgcgtcagctacccggcaagacttcacacaagatccgaagaaattcacacaaccagtgttagactctattagagaactatcagccctttgaactctccttctgtggaagcttgtggttatagtgatagggtcgcccagctcactgttgggaactcctccatcactacccaagaggctgcaaatattgtattagcttatggagagtggcctgagtactgccctgacacagacgcaactgccgtggataaaccaactcgtccggacgtgtctgtcaacaggttctacactctggactccaaa

SEQ ID NO: 1484 - DNA, 300 bp, unidentified
  source 1..300: mol_type = unassigned DNA; note = unclassified RNA viruses ShiM-2016 sequence
acccttggacgagacaactttccagatcattgttgtgacgctgctttttctcgcatttgttcttcaacttttttccatcgcgctctcatttgtgagccttcgagaagaacaagtgtggtctcccaaaccacgttgggatcgacgtcgtcacaaccaccatccttaaatggaaattgatgaacttgtgttaattgttttgaccctcaatacgattttatttttcttttttattgttgtcgttgttttgatttttggatttattttgtttaatttttgttttcgaaatcggtgtatacccta

SEQ ID NO: 1485 - DNA, 300 bp, unidentified
  source 1..300: mol_type = unassigned DNA; note = unclassified RNA viruses ShiM-2016 sequence
gtcatcggctttgccttcggacaaggcattataatatgtgtccctctgtgcggtgcctccgtacatctgcggaaaaccaaaaaggcaatgtttgtattggttaccatgttcatgttttttacgtatttatatatttacataggcttgcatacatttgtaaaatagtaaccggcgtacctctttcgcacgggaggtgcgactgtacatagaagtgcgtccaacacaacaatctacgatttagagccgactctaaaaacacaaaaagtcggcaccgtcacgttcgctcatgcggaccaacct

SEQ ID NO: 1486 - DNA, 300 bp, Scarabeuvirus lampyris
  source 1..300: mol_type = genomic DNA
tagtgaaaggcagcctgacatgataataagagttgttacgtacgagagatcttctccaattggacagctttcacagcgattcagattagagaacacaatctgtttgtctgcagagcatttcttccttttgaatatagaagacggtcctgtggccttggtgacccctttcttgaacttctatgcagagcgatttgttgcattcaacacctcgccttcgagtgtactcatttccttcgaccaatccatctacgccccatataatcctcatctccaggcaagacagatccaggcagtgtcaga

SEQ ID NO: 1487 - DNA, 301 bp, unidentified
  source 1..301: mol_type = unassigned DNA; note = unclassified RNA viruses ShiM-2016 sequence
atgatacattaagagtagtggataatttaactgcaaaggctagagaaggggcaaggacgaccaatgtcaactcaattggtggaagctgttagagcagcgtttttaaccctagacataagcttagatatatagtgtaggatataccgttaagataccagccttgtagagatgggattgttttaaaaccttaaaataatgaagatacaacagaattcgtatcaaagattcataccataaattgttattcaatcttttacgagtgattagtgcctgttagtattatctacatttgaatttgaaa

SEQ ID NO: 1488 - DNA, 301 bp, unidentified
  source 1..301: mol_type = unassigned DNA; note = unclassified Riboviria sequence
agctcatgtaccttttacctgtcactcttttacagttgcttcaggttttgttctctccgtcaacaactataactcagaagtgcgaagctgcagagttttaccagcgttataattttctttactatagtaggtgctcttattctgtaaaatattttatctgccccatttgtatccgaagatgttatttttgtgatttctttaatcaagtatttgactgctattggagatttttccagttttcagtttttagaaattttatctgtatagttctttttattcttattattttgtttccgtaata

SEQ ID NO: 1489 - DNA, 302 bp, unidentified
  source 1..302: mol_type = unassigned DNA; note = unclassified RNA viruses ShiM-2016 sequence
cctgtaaacccttgttacttcagtcttttcactgttataaccgtttactactcttggtattccataaataaagaaaatttaagtttcttgatttaacccaatttctaaaactattggttggtttgaatcaaatcttgcgttgttgacacgacactcttgctattaagtttaagagtccaagatcaataccgcgaactctctatactggtgaggaaccgtatagataaccgtcaagttgttgtagacttgcgttaactattttaactttgtttaaaatactgtagtttccagtctgaagcaaa

SEQ ID NO: 1490 - DNA, 302 bp, unidentified
  source 1..302: mol_type = unassigned DNA; note = unclassified dsRNA viruses sequence
atagaacacacttgtgcgcgactgccccccgaagggggcccataacatggaaaacaaaagcaaaagtaataacacaaataaaaacaatactaagctacctcatccagatcagaagggttatagattttacgaattatcagaagaagagaaaaagaagctgattagaccaaggattcaattagaagattatagtacaaaacagagggctagagaggttgaccgagtgacgaggtctcaaattccaaaagaggaaataatattatctgataaagtaaaagaggtacttgagaagtttcctatag

SEQ ID NO: 1491 - DNA, 303 bp, unidentified
  source 1..303: mol_type = unassigned DNA; note = unclassified Arlivirus sequence
gaagttcgttcccgtgtgtttaaggtttcagtttatgactgggtccgagactctcctgctaatggtttaactgaagattctggtcgtcttgagtggatatatgatactaataagtgtcttatcctggctcaaggtgacggctggtacgttagacctttagtccaatctgatataattaatttactatctggtgagggcgatttagtaggagacactctatatggaggtagcacatgggaagagaaccatatcttgaaagtccctagttctgttcataaatttactccgtcttgggtttatact

SEQ ID NO: 1492 - DNA, 303 bp, unidentified
  source 1..303: mol_type = unassigned DNA; note = unclassified RNA viruses ShiM-2016 sequence
aaaagcgacgcaaaccgccaacagcgaaagcacaaaaagaagacaaacgaaacgagaccatcaaggagttgcgaggataataagttcgagaagtgcaaatataatttagtatttgagttaattacaaaagattaatcaaaacaatatatctaaattagaataattgatcgcacttgggataaaagatatctatatatttgaaattctagtagtttttagatttataggtagtagaataaggcaaaataatcctctttacagataagcaagagatctttctgatctagtttcacagatacaatt

SEQ ID NO: 1493 - DNA, 303 bp, unidentified
  source 1..303: mol_type = unassigned DNA; note = unclassified RNA viruses ShiM-2016 sequence
attggcatcgaccgcaatgtcattaaactacgaccggggcaggttaccacgtgcagatcgacaataatctggctaaaagtgatgcacggaggcgccccaaacgacacagttgggtatttacccttacttccaggatgctgttgtggcagccccacgaaaatccaggagaccagatcgacgccgcccagttaagctgctgtggcaactaggctttatgtttagggcgtttaaatgagttagcttgcaacaaataacatcaaacttgcaactctcgaggaagagtttacacatgacgcgactacc

SEQ ID NO: 1494 - DNA, 304 bp, unidentified
  source 1..304: mol_type = unassigned DNA; note = unclassified ssRNA positive-strand viruses sequence
cagagattattattgtttatctctgtgcttccgtcaaatacttattgcttatacttatattttattgaatatttcgaccgagtttacgttggacccaggtgagtcgtaatacgtttactcgtcaagccattttacaagattgatccgcgcgattgggattcaagtctagtcaaacccatttatacatcttctatagcgcgtgacgctttcggtttgtggaaggatattagcgaggcatttgttttagcagtctacctatttgttggagttgttgtgagatctatagacagtgtcatttccaaga

SEQ ID NO: 1495 - DNA, 305 bp, unidentified
  source 1..305: mol_type = unassigned DNA; note = unclassified RNA viruses ShiM-2016 sequence
gttacgtcccgcgtttggcttttgcccgtgctttgataaagagcatttcggacttttcggcgagttttcttcgttagtcgaaggaaatttttgacaacaaatttgttgttttatctcgacacttatcgtggtgtagagatctattaattatttgatacaaatatttgtattagataattttatatatataaatatatataatttagttgtattcttttgctttgtttaatagtagcatttaacctacgctttttcttgctttcatttgttacttgttaatcttcttgagagtttgattttttgct

SEQ ID NO: 1496 - DNA, 305 bp, unidentified
  source 1..305: mol_type = unassigned DNA; note = unclassified RNA viruses ShiM-2016 sequence
ttggctttgactagcttaggctttcctggatgagcctttaatcatctaggtctttttgtgctttatatatttatgggttataaaacttctttttctttagccttttcctgtaaggaaggccctttatataaagtacggttctgcgtgtgagcgtgtggggaggtatttacttccgtcctttggcattacttacgttaagtcgggtatttgtcataaaattttaggaaatcgttcctggagggtctagtatgagcagctagcctcctatggtttaaatatagctttcttttaattatactaatttt

SEQ ID NO: 1497 - DNA, 305 bp, unidentified
  source 1..305: mol_type = unassigned DNA; note = unclassified RNA viruses ShiM-2016 sequence
gtgatcacatcaccattggcttgcgggaggatcgctatccgctagcttcttaagaaagcgaagactatttggtacagtagtcgattgaccattatctcttcatgtactacggtttgtcgccgtgccccaagacacgaaacagttggattaatctgtccactgtgggtgtaatttattactagtagatttctaaacaatacaatgaagagcattggggaacgcggtataattcccccgcggtttggtatcccgcgacaccagaattaccctccacttccgtgcacatcgtgccagcgcgaacggaa

SEQ ID NO: 1498 - DNA, 305 bp, unidentified
  source 1..305: mol_type = unassigned DNA; note = unclassified Picornavirales sequence
tagaatacgctggaacatggtctccagatgctggcagtcatctgggtgaacctaggaaataccgactgcctatagctgccacccatcttccaatacctatcaacccgagggagtatcacattcatttaccggacaaacttttcttcgaactcaccgttccaagtagtttgaggcgccggccgaaggatgttgagaaactccggcggtattgggggaccgtaccatcatggtggcctatatctaacacgacagactgcgcatggcccatctatgtgcactacaactcaatcaaatcttgtggccat

SEQ ID NO: 1499 - DNA, 306 bp, unidentified
  source 1..306: mol_type = unassigned DNA; note = unclassified Riboviria sequence
aacttaatagttttctttagtacattcattataattctagtttttattataatttattattatatatatttttaggatttagtgtagatacagagttataatgcattttttataaaattttttaattgcagctactgaacattttttcctattttcaatttttaaaaattttcgtttaatgattgttagaattgtagtaactaacttaaacgtaaaacaaatgctacagcaaccaatcaatcaataacacaatcaaattcagttttttataataataagagcacggcagttagagactcaggctca

SEQ ID NO: 1500 - DNA, 306 bp, unidentified
  source 1..306: mol_type = unassigned DNA; note = Helminthosporium victoriae virus 145S
attcgcatcgacctcacgtaaaagacgtagagacttcgagatccttcgagtgacgccgaagagaaaatacgcgttattgttttaaaaagtgctcctcatattgagacgaagccgctgtcgctatcacgaccacagcataatcatcttcgtgagacccctcgccagtatctccgaggttaatcctttgattcagcgctcgcgcgtgccacccaccgcttaataagaacgttctgggtttgtcagttttgaccctcacgtggcaccacttaattgacatcaaattaaagtttcgtcatcttctaaaag

SEQ ID NO: 1501 - DNA, 307 bp, unidentified
  source 1..307: mol_type = unassigned DNA; note = unclassified Pneumoviridae sequence
cgataaaaacagaaaatccgatagcacgacaacagatagttggccaattgtttaaaacaagattgagatcacttaataataaataatttaaatcaaaattaagttggtgtcttggctggctggtccagaacaagttgtcgagccgtctgatgagtagcacctcagggtcacgaaacgctggacgtaacggcggaacagattattgaggttagtagaacattatcacaaacaaaacaacaacaacacaatcacacaacaacgaacaaacaacaatccaagacaagcactagaggttagcacatgcaag

SEQ ID NO: 1502 - DNA, 307 bp, unidentified
  source 1..307: mol_type = unassigned DNA; note = unclassified Pneumoviridae sequence
caaatatccttgtagtataaattccatactaataacaagtagttgtagagttactatgtataatcaaaagaacacactatatttcaatcaaaacaaccaaaataaccatatatactcaccgaatcaaccattcaatgaaatccattggacctctcaagacttgattgatgcaattcaaaattttctacaacatctaggtattactgatgatatatacacaatatatatattagtgtcataacactcaatcctaatgcttaccacatcatcaaactattaactcaaacaattcaagccatgggacaaa

SEQ ID NO: 1503 - DNA, 307 bp, unidentified
  source 1..307: mol_type = unassigned DNA; note = unclassified Flaviviridae sequence
ctttcaccccttgtggaccctagtgattactgagtacttctacttagaatcctgtctcacagtttttggtgttttctaaataagcataattaagttgcttggttttgttatatttctattgttgtaacatagccttttcgcgttgtctttacgtcccacttctcattagagtaaagtgtccaaagagataccgcgtttttgttttgagcgttgagagaatccgctcataacaggcaccagtcgttgtagactagtgtatctgcacaaatttttattttatttttattttaactatttgtgtaccacc

SEQ ID NO: 1504 - DNA, 307 bp, unidentified
  source 1..307: mol_type = unassigned DNA; note = unclassified Picornavirales sequence
tccccccacccacggcattggaatggggccttctttctatggaggaaagtgtgaaggcagcaaatcctgaatccaatgctaagagacgagggttatttagcccgtttatgccatggcgcgtctttaaataaaagctcggcatacctccagtcttcccttaggaataagtgtaccttaggtcgactataaaacaaccacacttgctaacaatgatacaacaaccccccaaactgcatctggttttaccacaaaggaggatttatcctctcgaggacgtcttgatactattcaagacgtttcctcctct

SEQ ID NO: 1505 - DNA, 307 bp, unidentified
  source 1..307: mol_type = unassigned DNA; note = unclassified RNA viruses ShiM-2016 sequence
cacgggtgcaccgttaagcacttcaccatgggcatggtaaggttgaatgcccccactcggaaggtggttaacaccgctgaggaccagcgacaccaattccccgctctggactgagccgctcggcgcgatcgttaagagacagcaccaggctagcgtctgccatcaacatagacgtgggaagcatatcccttggaagcgattgcatctgagaacagcccgtaaacttcagcggtaagtgggtcggtcgcctgatcgtgatggccccaggtgcgtgggttaacgcaccatctccccccactaatacact

SEQ ID NO: 1506 - DNA, 308 bp, unidentified
  source 1..308: mol_type = unassigned DNA; note = unclassified viruses sequence
cataaattcattataaaaaccaagtcgtgcaatcaatttgtacgatcataccaggtacagtttcaatagctgtactcagcaatctgctataaatcaattttataacaacatcacgtgcttacggtcaattcgtaagcataataatcagttctaaataattgtttagaaccatcacgccgatacaagaactttgtatccccataacttgaacgctgtcaatcaacgctcaaaatatccacctacagacacttctgtaagtctcgcgcaatttttcaatattttgaaaaactattccccgtttacccgca

SEQ ID NO: 1507 - DNA, 308 bp, unidentified
  source 1..308: mol_type = unassigned DNA; note = unclassified Ourmiavirus sequence
gccgcaaagtcaagactttacgtcacgacatccgtaaggatgtctggccgaaagggtttccccgaattttagatctttcgatcgataggactgctgctcgaatgagtgtgccgtcttttctatcattgattagtaatttttggacccttaggcccggtattaaatattatgtgcccgcagttgtggtctgcgttacctttctccacactagggatagcatctattcagccatcgcgtacatacctgaatcaaaacaaagtgatagcgcgcctggcccccgttacgggccatcgtaaaacccctcgaac

SEQ ID NO: 1508 - DNA, 308 bp, unidentified
  source 1..308: mol_type = unassigned DNA; note = unclassified Picornavirales sequence
tcttgtaaatatatataaattcctagttctaaaatatttattatgctatttgtgtattgtcctttattatttaatattaccgcccaagatgggacgaggcagcccctcaatatctagggcacctaggtgcagattgtctgttttagtggacaacaatctaaagaaactcactagcttcaaataacaatttaaccgaaaccaaaacaaaagacacaacctatcaagctagacttgacgaacacactgaagcaggagatattaatcctgggatcgagtaccaacgacaaattgtcactttttcagaagat

SEQ ID NO: 1509 - DNA, 308 bp, unidentified
  source 1..308: mol_type = unassigned DNA; note = unclassified Picornavirales sequence
aataaacaaatagacatactgtaagtggattgggttataatcgagtaattggcgcttgagccacagcccttacagtaatccacaaaagccaattagagctgatttgattgtataagcttgtaaattcaacaatcgcaaaacaattagataatattgaaaatttaatagatgaagaattgaatctatcatgcggaattaaagaagaatctcaattagatgatgtagtgacagatatatccaggtccataagaccttatctaccatgggaatgtggattaatattagctttagtaccacccttagtaggg

SEQ ID NO: 1510 - DNA, 308 bp, unidentified
  source 1..308: mol_type = unassigned DNA; note = unclassified RNA viruses ShiM-2016 sequence
ccttatggctttatttgtggtggtgtgaggagaccacgttgtgacacaacaaatagcctcgttgccctggtattacgagcgtcggtaaggttagcatcttgctgccagggatcggtaggtgcatatacgtcaagtgatgtgtgtacctttaatagggggcggcataaggccgccactgtagcacgcgtagcgcggtctaacgaaccgttgttggaggggcgtgttaccaccggcttgccggatggctggtcattctccaggtgttcccctccactccatgacaggaacccctaacactactacttcca

SEQ ID NO: 1511 - DNA, 309 bp, unidentified
  source 1..309: mol_type = unassigned DNA; note = unclassified Hypovirus sequence
gggtgtagagaacctctgcgaggttcaatcataatggacatttgtgatgtacttacgtctctaggacgcccattactggtttatactctgtcgagttatcagtgattgtgcttgttctacgtatggaagctacagtttcattcgtaaagctcctacccctgattggttaagaacctgattacactaatgtgtaggccaacccgctggccctagcggtttcattcaattcttgttgggtgttctgtgaacttgaatcggtgagatgggcccgtgtgccccgtctggcctggactttaactagtgcctgag

SEQ ID NO: 1512 - DNA, 309 bp, unidentified
  source 1..309: mol_type = unassigned DNA; note = unclassified Hypovirus sequence
agacgatttcggtcttacgcccactaggggcgcccaatactggtttatactctgtcgagttgtttgagctggcttgcggacattcaaaggaacgtctcgagctattgggtagcagcaaacgtgatacatgggaagcgctgttgatccgtcggggaggctgtctagcgcgtttggcttggccagctgaggtcagtagggctatgaaacccaagggtggcgatcccacccaatcagcctaggaatccacaccaggataggtgcacggcttaacaaccgaggcacgtggaaatttggccagactatgagtgt

SEQ ID NO: 1513 - DNA, 309 bp, unidentified
  source 1..309: mol_type = unassigned DNA; note = unclassified RNA viruses ShiM-2016 sequence
accaatatggttgagtccctggttctctacccatctaactgtcatggaccgttgaaggctggcaaccggaggtgacgcagatttggggtgtttcggactctgtgtattatcttaccgtccggggttttattccctgggaaccgcataattgatattgatgttagacggcagcgaggaagtgatactcagaggaaacgaatctcatcgaaccatcgaggagtccgacgagcagcaggcaggcttgcgactgggattcagcgatggaacgaaaataatggtggagcgtcggcggcagatgatctggccctc

SEQ ID NO: 1514 - DNA, 310 bp, unidentified
  source 1..310: mol_type = unassigned DNA; note = unclassified Riboviria sequence
gaactcgtccgacacaggaaaacgcgctctaaagcgcctaaaacatacagattacataatttcagagtatgatgaggtagttctcaataagtactttgaacccaacctagtgatatcgagactcctcaaggaatcctcccacaccatagcagctgttctactcgaacaggcaaatattgcttgcaacagccttcgcggcccaaggactattgaaataggacctgatgcaagaatacaagacacacacaagtgcgccgggctaatatgggcctgtagtgacggtaaggaccaaaagcgaattatcgagcac

SEQ ID NO: 1515 - DNA, 310 bp, unidentified
  source 1..310: mol_type = unassigned DNA; note = unclassified Fusariviridae sequence
tatttaagttattaattgagctggatcattttgtcggagatttgatggatctccctggctgtcctggccagtcttggatgtgctaagttgtgggtagtttccctaggtttcatgcctgcactctttcggaaaattccgaggtggattaaggtgcatctggctgaaaatagttttaaatcactcgtctccatcgcgttttgttcatttaaatcatgcttggtatcaagcctgatagtgccttaaagaccctgatgagccctggcacgaaacgcacttttgtgcgttggttgattttagttgttttgttagt

SEQ ID NO: 1516 - DNA, 310 bp, unidentified
  source 1..310: mol_type = unassigned DNA; note = unclassified Fusariviridae sequence
ggggtttcgttgcagccttaagtgtgtttcacttgtagactggccagtacggctggcggccctttgtggggcgccttttgtgcaatgcttcgatcccgtacaacaatctggcatttcgccgggcctggcagggcttctcggactttttaatcacgcatgctttctctggctttctcggcgcgtgttttctcggactgtggctaaaattcattaaaatccaaaaacaatgccactacctcaatctcctacttgaccctgatgagcaaggagcgaaacacgactgccatcgtgttggttatgaagttttaaa

SEQ ID NO: 1517 - DNA, 311 bp, unidentified
  source 1..311: mol_type = unassigned DNA; note = unclassified Bunyavirales sequence
ctccacttggtggattgcgacaatcgggctgccactctcattgtagatttgaatgacaggaccccgatggttgcgaccccagtggagtcggaagtggattttggctaattgggtgttgtcgattatggcactcacgtcggcatggcgctgcatgggtgcggtactatggtttgtggacttggcagcaatattgtaatataattgtttcattacctatagtgtgtgtgctgggactggcgtaatacgtaacaactagtcccaaaaaccaaaaaactctttaacaaggattgtcctttgttttcaactgaacg

SEQ ID NO: 1518 - DNA, 311 bp, unidentified
  source 1..311: mol_type = unassigned DNA; note = unclassified Bunyavirales sequence
aagggaagccctcctaggggcagggagtaaaacagccacccgtcgtgcggtctgcaaaagtctgacgctttgtgtgtatcagggtaaacccaccggaaggtggtgctggttttgaccaaaggcctgaatggtaacacattgccccagacagaactcactgtaatgcgtggtaagtccgtcgtactagtgggggggctctgcctcacttaatacaacagccggaatgagcacaccgagtcaaatctgggtgtatggttccgaaccgtctaaccgtaggttccaggtaactggaggcgtcggccgttggaggc

SEQ ID NO: 1519 - DNA, 311 bp, unidentified
  source 1..311: mol_type = unassigned DNA; note = unclassified Hepacivirus sequence
atatatatatgtataataaataaacaataaataaacaaataaaaaagaaacaacggtcttgggaagactaattaaaagcatccctctaggcgtaacctaccatgtctataataaataaccaaaaggaggctctttgtattggattaccgtgcgtgtccaactagttagtcataggacactgcataggcttgcaaagagaggcactttccccgtaaagtacccctattcaggggagtaatcgccatacagaagattaacacacgcattgtagaataagtcttctactttagcgttcataatgacttactagt

SEQ ID NO: 1520 - DNA, 311 bp, unidentified
  source 1..311: mol_type = unassigned DNA; note = unclassified Picornavirales sequence
tcatattaacaagggtttttgggactaccctgcagatgcttttcctgcaattctgtcccaacgctagattgctaacgatttgccgatatcgtcgaagatctttctagcgtcgcgtgatttatattacatatatattgcccattcgtttctggggctaatgtataccggtgtagcgagccatggctgcttggttaaagtgacccgtctgtgtgtataggcataaccacagatgtattttgtctgcgaacaacaatcaaagtaatacacatggtctattgaccgaattcattgatggagcacatggcaccaca

SEQ ID NO: 1521 - DNA, 311 bp, unidentified
  source 1..311: mol_type = unassigned DNA; note = unclassified RNA viruses ShiM-2016 sequence
actggggcaaaccaaacgttttatcccctgatgaagagtggacatatgaagattttagacaaagtatactacattacggagataaggtagcgagtggggaagaaaaagtctcatgcgaatgcgacggaagaataggatgggaaagggacctaactgaatttaaccaaaacttgaagcggttccatctaccagaagtgcacaagagatgtgcagggtgttacttgaataaaggcgcattagaagatgggctacacttactgttatacttagtgccgaaacaacagcaacacataattatagaacagtacaac

SEQ ID NO: 1522 - DNA, 311 bp, unidentified
  source 1..311: mol_type = unassigned DNA; note = unclassified RNA viruses ShiM-2016 sequence
tgaacccacttgggattagggcggagctaccgtcaacataaagccgcagacggccctgcgataacaaacagcaattgggttgatgtacatagaggaccaaaactgtgaaccctccggggggacgcaaaatttcagtgctaaacaaaacgccaagagactgcacggctccgcgttcctctatcgttagagacaaacgtatacatcgatgtacagtccccgtttgtggttcgggggtccaagaccaaccactactttcttcaccatttccgatttaactcttaatttctacaacgccactgtcattatccgtt

SEQ ID NO: 1523 - DNA, 312 bp, unidentified
  source 1..312: mol_type = unassigned DNA; note = unclassified RNA viruses ShiM-2016 sequence
ggaatttgttcccatgtcttcaaggttaggccatataagtgggtattagaatcgccactattggccatctcagatgaaacaagtcagctagaatgggcatatgatactgaaagtaacataactcgtgttctagctgacgggtggaacttgagacctttagctcattcagattggttgtcactttataataagactggttctttaattagtgataatgtgtcgggagcgtcgacatgggaagagaagtatccttcagaacctcctaataatttacatccatttgttccaaagtgggtgtattcattgaagctc

SEQ ID NO: 1524 - DNA, 312 bp, unidentified
  source 1..312: mol_type = unassigned DNA; note = unclassified dsRNA viruses sequence
ccaaccgtttaaaaatccaacgtaaagttctttatataagaacttaacgttccggttgacggcaggatcaaacctcagtaaccaatgaacctgagttaggaactacgggagctgggcgcagctggcggcggatcaaacctggaacccccagttaggaacgaccgagagggcgaggatttttaaacggttggtgtcgttattcacccttgatggaatacaagtaaaaatattaacccttaatgttagcaagtaagttagtttttaagtttgtgtttgtccccttaggttaagtttgtaagaacgtatggcacg

SEQ ID NO: 1525 - DNA, 312 bp, unidentified
  source 1..312: mol_type = unassigned DNA; note = unclassified Polycipiviridae sequence
gaattagaccaacggggagtaggtgagttcctctcctctactagagactgatatagcccttaggtttcatcgctttgatctcagtgtgcccaaattaatagtaaccctcacatcaaaggggaaaatctgccccatctattttatcgttaacattcgcgtgtctacagaccctatactatatctatttttttagcttacattttaatccttgtgtgatttaaagagagaggtgatagaactatgagcccctcttgatttagaaaaaaccaaccatagaagacaaatataaactgcgctcacctatttcataaa

SEQ ID NO: 1526 - DNA, 312 bp, unidentified
  source 1..312: mol_type = unassigned DNA; note = unclassified Riboviria sequence
gttacccctacgtattttgtttaacattaatgaaattgaagtgtctccgcgactttcaattttattcaaccaatgcaagttatcaacgaaagttagttagaaagacataatacacaatttagatgtattggcgcttagtcaccgcattagtgttctgtcggaatttagacactaattattatattaattccattagagcgcatgattttgtcatgtcctttatccacccgcagaattggatatgcgaggtgaggtggtttaaacactcgtccgcgatttgaaacgccagcgaagtttttccacaattaaacc

SEQ ID NO: 1527 - DNA, 313 bp, unidentified
  source 1..313: mol_type = unassigned DNA; note = unclassified RNA viruses ShiM-2016 sequence
cgaggagttatggaagtctcgtaatttaagtgaactcgaattgttcgagggtcttgaagagcctgagattaagccaattaaactcgtagaagaaaaacaagagaagaaggcttctgtattattcacttgtaatcgcgagaaacgtgttgataagatattgtctggtcatactgaactcgagataactaaatctggttatcttagatctccagaagaggtatgcggaattattaggaaaaagatcgagagcagaaagaagaaaaaggccgatcttagaagagagcgtgaaaatagatccaaagagaggggtctt

SEQ ID NO: 1528 - DNA, 314 bp, unidentified
  source 1..314: mol_type = unassigned DNA; note = unclassified Picornavirales sequence
tacaaaaacagattctgaaactttgtcccaagctgagcccattggaactagctgaatttccacttcagtacgtgggtaagcaacggacgaggtatcagactgccgtcgagagcttgagtgtcaagagcttgagacgcgccgatgcgtacaccagcaattttacgaaaactgaacgtacgctcaaggccaatgcagtacctagaaacatctctccgagaagttataggtacaacgcccaggtaggacggttgttaaaaccggcagaaggtgtcctacttgatggcattgcgaaagtcttaaacagcaagaccgtg

SEQ ID NO: 1529 - DNA, 314 bp, unidentified
  source 1..314: mol_type = unassigned DNA; note = unclassified Tombusviridae sequence
tcagctatgtgatacattttgcggtttgtatcgcatagaaccgcggctaagagtttcggaggtccccgtgaccttactatatttatagtaggaattagatgattccacaaaaccccaaaaatgagtggtttatagcattaacccacttcattcaattatagtatgctcctgacaataataataataataataaagggattaacattggccctcctaataccaatgtaaatagtcgtgttcttaagaactcgtctacctgtttgaagcaggaaacactggcgtttcatgatggatcgtcagaatggaggaattct

SEQ ID NO: 1530 - DNA, 314 bp, unidentified
  source 1..314: mol_type = unassigned DNA; note = unclassified Picornavirales sequence
cgagggtttatcactaggtaggataggagccgcacctatcttttcagggaacccaccctgttagccactgttaccagcgaccttcggaaagtcgtgttggatggtggaagggacaagcggattataaacgcctagccgttagccagcattgctgggtaggaacgcaaactgctttgcagtaggaggtgtgtagacaccactcgaggacagcgacggaggggctgtccacggcccacgaccgacgggcgcacaagaatcggctttggtgtccctccctaatatgaggtgacaaatttctcccatcttctctcact

SEQ ID NO: 1531 - DNA, 315 bp, unidentified
  source 1..315: mol_type = unassigned DNA; note = unclassified RNA viruses ShiM-2016 sequence
tcagttttgtttggttgtatctcgcgggagttaatccgtaagagaataaccaaacaaaactgactttcctcttctttgctttcccgtctttatctttcacgttctcttgctgctttgcgattgcttgttcttttaggacccccgatcgctttcctttcttaaggctttcttttcgttacgtgcttctaggttttctttatcgtttcgccttgtttttcttttccttgctttttatctatttctgcgtttttctctttttacgttctgcttttattttattttaaagggcttttcccacttgcttcatgctttacc

SEQ ID NO: 1532 - DNA, 315 bp, Alphamesonivirus 4
  source 1..315: mol_type = genomic DNA
aagtaataaccccgtccgtctagcttagacgaaaaacttagcttggaaatctagccacaacagttgctataagaatctctcgagacactctcccacttaacatcttctaggaatcttgctgctacaacaatttggctagtaaacgaaaaattcatacagttgtaagagacctttggtccgtacttttgaaattttgtttctaatatatataaatttgaaaggagggggtcttagcattgtctaagcactgcctacaaccctagcgaatacatatacattagtatgaatttgttgtaatcgtcctgataagacaca

SEQ ID NO: 1533 - DNA, 315 bp, unidentified
  source 1..315: mol_type = unassigned DNA; note = unclassified Picornavirales sequence
cttagaatgtttcttaaaaccttgccaagcctgaggattttaccatatcgatttcgatcgctgtgataatcttctcactttccccccaccctcccatattgtaattgaagcggggagttttgattgcaattgtatagtcattcctatttaggatacggttggactttaactaatcctccccccagcctattagtctgtaatgcgaacgctaaattggctgtgtaaatttcttgcattaacaatccactacacaaacaaaatgtttctgagggtcctcaaacgaccagcccccaggatatacattcaccagacaaa

SEQ ID NO: 1534 - DNA, 315 bp, unidentified
  source 1..315: mol_type = unassigned DNA; note = unclassified Picornavirales sequence
gtgacaaggtggatggcatgccaccacctatgccccctgagtaaagcaattctatgaccttagactgatcttgattcaaccgtaattgtctaatccaagttaaataaccccaacgtttcgtcgacggatgtggagaaactttgaaatacaactaaactcgtcgctcttgctattttgtagcacaagagagtctagcctctggttgattatatttcaagactgcttgttgtggagaagttaagccattgggaatgggacacgtttgcgttatccctggatattgccgccctttggtgaagctcatgcttgggatgc

SEQ ID NO: 1535 - DNA, 315 bp, unidentified
  source 1..315: mol_type = unassigned DNA; note = unclassified RNA viruses ShiM-2016 sequence
aaatattagccaactgaacaaaacttagaactatactataacctacaactaatcctataacttactttaattttatttcttttcttttgtttgttttgttgactttgctaatatttattgtgtgctttcttttatcccaataaccctcagcggggctctgccttaattaagtttcatgtaacttgttttatccttttgtggtgttagttttaggatcgttttattgtagtattatttttatattcattgtttcttttgtatgttcttgtggtgtttgggttctctgtgttttataggattatctactatgtaatt

SEQ ID NO: 1536 - DNA, 315 bp, unidentified
  source 1..315: mol_type = unassigned DNA; note = unclassified RNA viruses ShiM-2016 sequence
actaaggtacgggcttacaccataaagtccgttaaaccaaaatgtggtccttgtacatagttactgttacttatttatgaatcctacaattaaaaagtaggtagagcgtggatgtacattgtaatcttacctgagcgctcctcgaaatccctatttagggatacatttttggttagagtgtaaacaattttgtaggtagttctaggaattttgagtcgtatcctagaattaacatagagacttagtgtaaataatagttttgaaagcgacgccagcgctaaaaatactggaactgtttttgatggttcagcccac

SEQ ID NO: 1537 - DNA, 316 bp, unidentified
  source 1..316: mol_type = unassigned DNA; note = unclassified viruses sequence
ggcgcacaaacgtacaccacgacggatattcgctcttccgagcgatatctggagtgcttgcggttttgcgccagcccgtagtccggattcccctgcgaaagcaggtgcttccaaaccacatcggcgcaaccgtgccaggtcggtgcgtcaaactattcgtttgaccccggcggcactctgttgtgtcctccctcttccccactggcgagctaagctgctaaacgcaatcgatgacgcagatgcgggcgagaaagctaagaaacgtacgaaagtactgtattcgaagccaactcgcgtcaaatctgcgccaacctgt

SEQ ID NO: 1538 - DNA, 316 bp, unidentified
  source 1..316: mol_type = unassigned DNA; note = unclassified Picobirnavirus sequence
gaagaaaggagaagcactatggagtgtttactaaaacatctgaaaagcctttcttcaaccacttcaaagttgcctttggagtatgttggagtagaggtagagaggaggtggaaatgtgaccaccaatcaaattgagtacaataagttactcgaaactcgcagaactaatttagctaatgaagctgaaactgcgaggtcaaacagggcgcgggaagccgaaaccactcgcgcaaatcttgcttctgaagccatacgagcccatcagaatgcgattggagaagccgcaaatgttattaattccaatcactatgcaaga

SEQ ID NO: 1539 - DNA, 316 bp, unidentified
  source 1..316: mol_type = unassigned DNA; note = unclassified Luteovirus sequence
atatttgcaaatcacggttttgtttcacggcaaaacccaaaacataagtaagatgggcctaactagccctgtggagaggctaccccttgaataagggtagtggttgcacgtcttggcccgacagattccggccgaccatgcttctgtggtatacactgcaccagtaagacctggtttaacaaaactttatcctacccacgatgagatgagtgggcggcgtaaactttgtggaattttacagagaaatctgtaattctgcacatgtttgcgagaggggtctccagtacccctttatagaaataagcgcttctttggg

SEQ ID NO: 1540 - DNA, 316 bp, unidentified
  source 1..316: mol_type = unassigned DNA; note = unclassified Triatovirus sequence
ttttcttggcgtaattaaaaccaacaatgtgatcttgcttgcggaggcaaaaatttgcacagtataaaatctgcaagtagtgctattgttggaatcaccgtacctatttaggtttacgctccaagatcggtggatagcagccctatcaatatctaggagaactgtgctatgtttagaagattaggtagtctctaaacagaacaatttacctgctgaacaaattaatgaaaattatgaaaataaacaacaacttgttgaacagactgaaattaccacctttgaaaacgatttgatcgtgcttgaggatggaccgcaa

SEQ ID NO: 1541 - DNA, 317 bp, unidentified
  source 1..317: mol_type = unassigned DNA; note = unclassified Hypovirus sequence
ggggtgatgggaaacttacgtttcgccaacgttaaggtactgtgattttgtacttacgactcagggtcgaccttaactggtttatactctgtcgagtttgggcaaatagctagactatctccccgggttttcaggagcccttagtgtctggctgacacggtctggaatctctttttacgtctcacttacggcaaatgtgaaatcgcctactgatttagtagaagaatgccggcccgtgtgcccgcattggcaaccgtgatgcccggttttccacttttgggatagggcttccctccgaaaacgggacgaaccaaaat

SEQ ID NO: 1542 - DNA, 317 bp, unidentified
  source 1..317: mol_type = unassigned DNA; note = unclassified RNA viruses ShiM-2016 sequence
gtgggtgttgtcctgaccccatctgcccctacaacgcgccaacattactgtatgacatcaacaggaccaaaataaatgactatgttacgcgcgagggaaaaacacggctaccgacccaagcatatcgacctgacaaaccacctgctggattggaagtgaatcttttcttaaaaaatacaacccagtacaaaccctcttattgggatagtagggcctatgaaaaggcatgggaaaagttcacttacgccaatcctacagagctaacgcatgaagacatcgaatttgcaaagctcattctagctgatgagtatgactac

SEQ ID NO: 1543 - DNA, 319 bp, unidentified
  source 1..319: mol_type = unassigned DNA; note = unclassified Permutotetraviridae sequence
agccttaaggttgaacgggtactcctacatttaagcatgttttaatttacatgggcgggtttggaaccgtcgcagtaataatagacatgggtggatttgaaaccatcgtagtctcttgcttatctaagtagatacaggattgtggtctgtaccctagaggaatgccaccatgcggtaaaaccctactccgtgccccctgcacgaaaccaggatctgaggtctggttgggtgaggaactccaaagtgggaagtccagtagaggggatcattgcctctacatttttcagaagaaacaactcacaacaatacacatactaag

SEQ ID NO: 1544 - DNA, 319 bp, unidentified
  source 1..319: mol_type = unassigned DNA; note = unclassified RNA viruses ShiM-2016 sequence
aactacgagggccgggtaagtgtcctcaacataggttaacaatggaaaagtttcctctataaataacgaatttccactgtggcattggttaccattcgagttcatcgctgtgtgtggaatgcgaagaggcttgtcactttatgaaccgatttttattggtagcgcagttgtatgtgagtaatgtggaaacatatataaaaattataacattgcagaaacaccaaatttaaatataaagcccacaagcgaggaagggctagttcctcgcaacctgtcagcgcccgaaaggacgttcgatattccaactctaattgacgat

SEQ ID NO: 1545 - DNA, 319 bp, unidentified
  source 1..319: mol_type = unassigned DNA; note = unclassified RNA viruses ShiM-2016 sequence
tttgtcaattcatggggagttggggtcgagaattgattaaaataaagtcgtcccgacaccatgggaataaaaattatatatttaagcagatgcctatagagctatgcacaaaaacaccgagcctgtgaccattggcgatatatctgtggcgtcaccaccgccacaacaaaaacacgtcccgtgaccatgggaataaaaatttatattggtcggtatatccaaataccagcgtgatgtttcatgttcatgtatgttgggtgcggcacccggtggttggaggaatggaggaggttggttaacataattcccctatctgaca

SEQ ID NO: 1546 - DNA, 320 bp, unidentified
  source 1..320: mol_type = unassigned DNA; note = unclassified dsRNA viruses sequence
gttggaaaatagcccacaccccccccgccgggcgggctatttttccccggggcggcgggactagatggttgctagggccccgggcggtggtggtcgacgaccttgtggggtcgtcgacgttttcatttgtcttcatccatgcctgttctgatttccttccgttcgatttgttgttttctacagtcagcacctgttccttgctgactcgcctctcccatgggcgagttgtataaatacatgggacgtgagagaaccgtgctggatacctcacgtacacccaaagtcggtacggggatcgtaaccattacgctttttcctta

SEQ ID NO: 1547 - DNA, 320 bp, unidentified
  source 1..320: mol_type = unassigned DNA; note = Fulton virus isolate CHABV1/NYC/2014/M026/0243 segment L1 sequence
agtagttaacaaacgcttcacaacaatcatcgattacttgctctctcaatatattgcaaaactgaaaaaataatatttctcagcaacctatttcaacgaatttgaaataactaataataaaaagcaagccaaagcaaagaaatctaaataattcacttctaaagcaaaggaacaaaagaaaagaaaagaaaacaaataaaggaagagaaacaaaacaagataaagtagataaacaggtagaaaaacagaacaaagaggcagaaagaggagagtaaaggctcttgtagagcattaccgcattaataaggcccacaaccaaa

SEQ ID NO: 1548 - DNA, 320 bp, unidentified
  source 1..320: mol_type = unassigned DNA; note = unclassified Anphevirus sequence
tacttcttttctttatttgctttttattcatactcatatatcatcgtattcaccatgcatgatgtggtgttgattagtgataggtccaatatcaatttgagaaataaggcggagatataaatatgaaaaatggaaataaaaaacataaaatgaaaaatgaataactccaaaataaaaatttatagatataagtttccaatcatgaggtatttaggcctcgctaacctcactattaagaagatttctaacctatttttaaaaacccactagtagcagattcaagtacccttctgtcaaacatcttgaaaagattattcgat

SEQ ID NO: 1549 - DNA, 320 bp, unidentified
  source 1..320: mol_type = unassigned DNA; note = unclassified RNA viruses ShiM-2016 sequence
gtcagcttctcgaaagcccgccctgggggcttctaataccgggggccaccgcaactatgcgttggataagctaaaaatagttgcttgtgtttgattaacgcacaggttgtaggttctgaattacctgcaatttgtggacagctacacaagtagtcattgtatatagtcgttatttagcgacggggtgacgcccacaaaaatagcactgtcatgttgtcgattgatgcaccgctcatgatatttgtacaaattgcattacttatctacataaaattttggaggacggtaccctcaataaaaataccgaattgaacactact

SEQ ID NO: 1550 - DNA, 321 bp, unidentified
  source 1..321: mol_type = unassigned DNA; note = unclassified Narnaviridae sequence
agtatacactccactcgactaccaatgaaaggaggactattatgtcccaattcatttacactcagaacgaccttgtcgaagtcgatctgaatgaattcgatcaagggacgcttattcttgcgctccttgcaatcgaggcgcaggtgcctggcacacttgccagcatcttgcgtcaagccgcgttagctaacggggggtggagaatatcctccaacgtcagcaatccggggaagtccatcaatgatcagagggactttctcgcttggatgagaaaatttcaccaagccctgcaggaagagcaggcagaaaggagtgtctgag

SEQ ID NO: 1551 - DNA, 321 bp, unidentified
  source 1..321: mol_type = unassigned DNA; note = unclassified RNA viruses ShiM-2016 sequence
tttctttcattatgtcctgggatgacattaaaagcatccagcctctcgtccatgtcgtgatgggttatacaagcgttatttttctacatctcttttattaaacgtgccttaacttcatggatcggttccaggtatattaacaagcctgtgggcgggtatttacccgcggccattatgattacagatgctcattcctgtatttcatataaaatcctaaaagacatgtcctgccagttttccgagtcacgaactggtttatgtatacactgactttctttttctatttctaatatcgcgcgatgcatatcgccttataaatat

SEQ ID NO: 1552 - DNA, 321 bp, unidentified
  source 1..321: mol_type = unassigned DNA; note = unclassified RNA viruses ShiM-2016 sequence
ctatgcccagtcctggaacgagagagttaatctatcaggatttgatagatcaaatgccctctccaacaatgttgaagggaccagacggtttaccaataaatctcagttggaaagatctgatgagtaatccggaaaataacttgagacaaatcatatccagcatcggaactgatgcatttttcaaactatcgttggaacaaaagatttttaaactgcttgatttggagcagatggcagttgacgttttagacttaatgtccgttgaatacatgtaatcggtgaaaccattgttgaaaaaaactaaaatgcaacacccctcac

SEQ ID NO: 1553 - DNA, 321 bp, unidentified
  source 1..321: mol_type = unassigned DNA; note = unclassified Riboviria sequence
cctataattatgataaccgcacgcaacgaacaagggcttttgatgaactgatttagttcggttcaccgacagcaagattttacgaaatggatttaacttaccacgcaaaccctcagcggaccgcaggtattttgatcgcactggactctttagatcataacgacaagattggatcatatccatgtagttaacgtagactacactaaagagattttaagcacggtaatgtaatagaaattacccgcctggtaaagcaccaaaccttcgtggcagttatggcctagtcacgattgcatcgagccatttactcaatgtatcaca

SEQ ID NO: 1554 - DNA, 321 bp, unidentified
  source 1..321: mol_type = unassigned DNA; note = unclassified RNA viruses ShiM-2016 sequence
ctggactaccacccgtctttcactgcagacgttaaacactgtgccgacctgagggttcaggatgtgcgagcgtgtgatcttgctcccagcgatattggacgtaaagtcgctggcagtactgctgcactcattaagcacataggtgggctatttagtccagagacgcctcgtggcagtcccacaaagtctcaccccgtcctcgggccgcagcgccactgggcagtgcgcgcagctgacatagcgatatgtcagtgtggcctagaaaagataccgcctgcacaaccaaactcaaacattcaaactcaagaccaaacccttagt

SEQ ID NO: 1555 - DNA, 321 bp, unidentified
  source 1..321: mol_type = unassigned DNA; note = unclassified RNA viruses ShiM-2016 sequence
gggggcctagttgccacacatgggttcgacactgatacagctgccaatgtcagtggtctgccaattacggtgtgtgtgacatctgggaccccaaaggtgcgcaaggcattggccttgccaggattggggctgggcgtgcaatttggtgtgcacaaccagtccctcagaaatgtgctgcgcgggttggtggagagggtgttcaaggttgtcaaaaatggcaaattggtatctccacctaaacccgtggcgaacgttttcgataagttgagtggctttcgggcccggttgttacgtgtggtgggttcatgccgcccttggact

SEQ ID NO: 1556 - DNA, 322 bp, unidentified
  source 1..322: mol_type = unassigned DNA; note = unclassified Aparavirus sequence
gagctcggtacccggttttcactccgtgcacgattccattcactatctattgagcttcgatatcactctgttttgactctagttatactacactcaagcacactgatattatcgttctgatagtttgtggtttcattaaaagtgtatacatttatttatattaaatactgacactttgcgggttaaaatgtttaatactatttttcaatttgaggttgtatgagataattttgatttctatgttatcattgaataagggagtctggccctaattgatgtacgactcttctttggttgcgacccgagtcccttctacatcaag

SEQ ID NO: 1557 - DNA, 323 bp, unidentified
  source 1..323: mol_type = unassigned DNA; note = unclassified Picobirnavirus sequence
ctattttctattttattctagtgttctttacctattccaaggtgaacaccaattgtagcagaaaatttacactagtagcacacttgcaagcggtgtggaattagtgtaaagagatagctacgcagcaacaaaacatccacaaatgtcacgtccaaggaggtgaaccctaagtgacaaacaaccagatacggtactgggagtatcgtgagacgggtcggcacaaccaagaaactgaacgcgagacaaatcggtccaatctagctcgggaagctgagacgaatcggtctaatctagcgagagaagctgagacgcgtcgctcaaac

SEQ ID NO: 1558 - DNA, 323 bp, unidentified
  source 1..323: mol_type = unassigned DNA; note = unclassified Potexvirus sequence
ctacttggaaacatcatttcgagttccgaggaaagtggcagatttgatagcaggctgtggtttcgatttcgagaccaattcacaagaagaagggcacttagagatcactggtatattcaaagggcccctacttgggaaggtgatagccattgacgaggagtctgagacaacactgtccaggcatggtgttgagtttgttaagccctgccaagtgactggacttgagttcaaagtagtcactattgtgtctgccgcgccaatagaggaaattggccagtccacagctttttacaacgccatcaccaggtcaaagggattgacat

SEQ ID NO: 1559 - DNA, 323 bp, unidentified
  source 1..323: mol_type = unassigned DNA; note = unclassified Luteoviridae sequence
atgggctctgtcacgcatccggttttgaatccccttttaccattttgggattaccggatatcgtggtgcgtacaggggccgtccctaggaagagtcgtagtgtaattagctacttgagtcagttttctttaggtttagacttccgggttcccaacccttctctgcacaatgcccttgttgctgtggaaaggagagtttttactgttgggaagggtactgatgttgtacttccattggtacctagtcatggcattttcaataagctcgcttatttccgtgactccataataaaagaagtagggttctgtaaggtacatagtcca

SEQ ID NO: 1560 - DNA, 323 bp, unidentified
  source 1..323: mol_type = unassigned DNA; note = unclassified Flaviviridae sequence
tgcaggccgcactagcaattttccaccactgagcgacctgaactcagaccaatttctgacgggactgtcagggcaacccctgtaaaacgaacccatacgggtcggggactaacgcctgaatggctacctgtctgggtttggcctgatcaaggaagtctagtggtgcagttagcatcaactattgccggttcggccttcgggcagaacgaccctcgggtaagacgtagggccagggcatttggatagcacaatgggtgcgggatgtgcagctggtaacagtttcccccaccgcgtttgcctgtgcataaggttcatgtgattcc

SEQ ID NO: 1561 - DNA, 323 bp, unidentified
  source 1..323: mol_type = unassigned DNA; note = unclassified RNA viruses ShiM-2016 sequence
ctttctacaagaatatactgctattaagcttcctctcgggttttttactaaacgcgggaaagatggtatctctgcctaccataattcgactaccggcagaaatttgggttgcaggtaagaagaagaagaattgacaatcttctccttcgaacaataacctaatcaaaggtcacagaactagtgataaggagtggttgctttaaaatctacaccttaaaaccagttaacgtgagccgcattatttctaagggccactagatttggacttgggtctcgagaaataatttgactatcctaaatagctagatcgtgaaacggcaaat

SEQ ID NO: 1562 - DNA, 323 bp, unidentified
  source 1..323: mol_type = unassigned DNA; note = unclassified RNA viruses ShiM-2016 sequence
attgacattcttcatgaggtcttgccattttcctatctcctgccttttcttcttcatcctagacccttactcattaatatttactccatttaacatccctttggactttacagtgtattattgcactggcccttcaactagggtcaaacctgcctgatttgatatcatgctctaccacagggagagcaccctcgaacacgccatcagtagcagtagccgaagccggggttatacctcaatacctaggtgttgtatatgatcaagcttcggccgtagttacagtaggcgagcaaacaacaccaggaccccggggagaggctgca

SEQ ID NO: 1563 - DNA, 323 bp, unidentified
  source 1..323: mol_type = unassigned DNA; note = unclassified RNA viruses ShiM-2016 sequence
atacgtggccttgccttgggtgcaggctttaaacgcattcattcccgtgacgaggaattcaagtagtcgttacttaccgatgctgtcggtaataaagtaaaatcagctgcaacatagaaacataacggtgttccgatgtggaggtgaattgccacaatggagcatgacaggctatgattgtaaggactagggacccgagccctgaggctatttagtctccccgcattgtcctgtgggaaaaagttaccactcgcgtatgtcagtttgcacctgcgtacgatgattttgtaaatattgctaccgaaactaaacaaatttttagg

SEQ ID NO: 1564 - DNA, 323 bp, unidentified
  source 1..323: mol_type = unassigned DNA; note = unclassified RNA viruses ShiM-2016 sequence
ccgatcgtttatcggtgagcagcggctcacgaaacctagatagaccaccagaacaacggtacccccccttctccaatcataagaccctcgctttttttctcgctctctaataatcgtatacggtctaggcaggtgaacgcaataaacgccctttatggcccgatcatagaggaggctttaaagcaagcagactcacatttcctgtggatatacagtagagtttgcagtggactcataaatccatgagttgttgatgcgccaacacaaaattttgccacaaaactgaaagagacagtaaacctcagtaccagctgtaaacttgg

SEQ ID NO: 1565 - DNA, 324 bp, unidentified
  source 1..324: mol_type = unassigned DNA; note = unclassified RNA viruses ShiM-2016 sequence
gtcggcttctatggcccattcactggggccttgtaccggtggccaccgcaactatgcgttggataagctaaaaatagttattcacatttgattaacgcacgagttgctaggttctgcattacctagatcttgtggtcagctatgtgaatagtcatgtatatatttccattttttagtggaggggtgacgcccaataaaatagcactgttatgttgttgattgatgtaccacacataatattttataaattacattacttatctttatactttaaacgaggagagtgtcctcgataataacactgcgcctctcactaatttgaga

SEQ ID NO: 1566 - DNA, 324 bp, unidentified
  source 1..324: mol_type = unassigned DNA; note = unclassified RNA viruses ShiM-2016 sequence
aaagcagtgaaaaagtttttggatctgtcttcctgggcatcacatgattggactctcattgagggtaacgtcgcggcctgggagcgctttcttgataatgtattcaagtgtgagtatgtttctgaaggtgtattggtgaaaagtggatttgatttaatttatcatggaaaaacgaaatggtctgaagacatatggaagagtatttctatcgatcttgaaatccgtccaaaatttaagttatatgaagagtgtatcaagcggtcgaggagtgttccggttaatcctagagctatttaccttgacacttgggaaattaatgaaaag

SEQ ID NO: 1567 - DNA, 325 bp, unidentified
  source 1..325: mol_type = unassigned DNA; note = unclassified Picornavirales sequence
ttgaaaagcaatctgcgaactttgttactatttgttctcctcagctagttattggacttatccaattctctccgttttcgcacttactagcactgggcttatccagatttccttttagtacactctcactttgcacttccagcacaacttaattttccttggtgcttttagtgcattcacaacgtttactttaagcaatctcgcttccccgatttgtcaagttaggggtttttgtttttcctttgttgtcacgcagcaatcttttactcttttccttttctttctaattctttgttatattctcatcccaccagcaatccaaaat

SEQ ID NO: 1568 - DNA, 325 bp, unidentified
  source 1..325: mol_type = unassigned DNA; note = unclassified ssRNA viruses sequence
gaagttggaattgatgagggagacttcatcgttgcggctgcccttgcggggaatcttacgggtcgactgtccagggtcggttcgcatgggtgacctcatgtgggatttgatgttcacaccacatccagaaagcatcttggcgccacctcgtcgttagaggtaccttcacagggcggagcagaccgttacaagccaatgcaccagtggcgcctttgccgtaggtgtagataaatttacaaaagtggggggagtccaaccagtacatacactcccatcagtagtgatctgggtctggcatactgctgccactttccaattcttaatc

SEQ ID NO: 1569 - DNA, 326 bp, unidentified
  source 1..326: mol_type = unassigned DNA; note = unclassified viruses sequence
tacatggggagataaggctcactcgactctaagcgtcgaactctcatcaaagcctaatctcacctcgagcgccgatcttcacttctgaagctctcctcccgctcaccactcgcaatggatttacatcacaaagctcttcgcaaactcggaatcaaccccgattcagatcctggactcgtccacatctacaacgaaagccctccgccccgttttcaggtcatcctttctataaggagaattatcaatcagtcgtcattgacgcactcaaagaagtcctcccatcagaagacctagatatagtccttcacggctatttccgaagtccc

SEQ ID NO: 1570 - DNA, 326 bp, unidentified
  source 1..326: mol_type = unassigned DNA; note = unclassified Picornavirales sequence
ttgaaaagcaatctgcgaactttgttacgatttgttacttccagctagctattgggcttatccaatttctttcgtttccgcaatcactagcaccgggcttatccggatctctttttgttttctttgttacctctgttctgtgcgcgctttaattttcctttgcgttctttacagcagtcacaacgtttacattaagtaatctcgcttccccgatttgtcaagttaggggtttttgtttttcttttttcgtttcacagcaaacttttgctcttttccttttctttctgctcctctgctatatagttcttccccctttgatttctaac

SEQ ID NO: 1571 - DNA, 327 bp, unidentified
  source 1..327: mol_type = unassigned DNA; note = unclassified viruses sequence
tgattcaagcacaacatcgtagacacgatcttgtggttgaatcattttaataaaacttcgcgtaccaaaaacgcgtgtgcatacgcactaattctggctgtcgaacttcggatcggctgaaatttgtccgcacccctctgttggccgggggggtagacgtaaaaacttccagaggtgaccctacggggatcgtggctcttgcgttgtaagattcgcagtgtgttacaagcattcaacgactacacgccacgggagagaaggaatagtctggcctcatcgcgcacaaagtacgaggaagaattgggtatttccttcatcgagcagata

SEQ ID NO: 1572 - DNA, 327 bp, unidentified
  source 1..327: mol_type = unassigned DNA; note = unclassified vectors sequence
gccaatctcccttccctccgaaagaggcgaataatggcagaggcttcaactgctgaactatagggtacgttacattaatgatacacttgtgagtatcagccctggataatataagtcaattaaacgaccaagataaaattgttcatatctcgctagcagcttaaaatataaatgtaataggagctatatctctgacagtattataatcaattgttattaagtaacccaaaccaaaagtgatgaagattaagaaaaacctacctcggctgagagagtgttttttcattaaccttcatcttgtaaacgttgagcaaaattgttaaaaat

SEQ ID NO: 1573 - DNA, 327 bp, unidentified
  source 1..327: mol_type = unassigned DNA; note = unclassified Picornavirales sequence
gggggccgcgcatctttacggagatgcgtggtccaccggcctgtttccccattcccctatccctttattttgcccatattgggcattaagatcggatttctcaggtttgacgcggattgggtaatggataaggtttggtgtattgcttaggtaatgttataccaagactgtagcagctagactagggggcacagtgtttatggactccattggatatcctgccctggtaggcactcactgtgtacgggaggttgggaagcctcgccctggccctagactgggtgatagcctggcgcttgctgagccagttgcttacagtataatcag

SEQ ID NO: 1574 - DNA, 328 bp, unidentified
  source 1..328: mol_type = unassigned DNA; note = unclassified Picobirnavirus sequence
atttgtataaatggcattctgatatgcagcgttggctgaagcgtaacctgctccagcgttagccattccagtagcataattggcttcgatttgtttacgataattactttcactggctttgtttgatcttttagtttcattttctatttaaatctcacaattctaaaagtcttagcatggagattcacatgcgacacaccaatgagtgaaattttagtacctatcaaacacaataggaactacatccagtgagatttcgtgtagcaagcgaagttaagcaggatgaacaattattatcagtgttaaaaacattcagaaaggaggaaag

SEQ ID NO: 1575 - DNA, 328 bp, unidentified
  source 1..328: mol_type = unassigned DNA; note = unclassified Picornavirales sequence
cgctcaaacttttacccaacaatttgaaggtcgtcgtaatgcttcgaatattgctcagtcattcgacagtggtaatcgtatccaagttaacagaaacgccaatgttgttccaacccaaacgttaagatgtgccccgagcattcctcaagatcagactgttttggccgatggtcgggttgagaggcgtgtccgggatgcggcccaacaaattgctattgtgaataacaacgttcaatttgagacttcatggaaatcgtttgtttatgtcctatgtcagaatgggtcacaacctataatcgatgcctccacttcgattgagactggtcgg

SEQ ID NO: 1576 - DNA, 328 bp, unidentified
  source 1..328: mol_type = unassigned DNA; note = unclassified RNA viruses ShiM-2016 sequence
agggacactccctacacccaaattcataacacgcggcggattctcgtaaacccctgcatactcttagaggcttgtagcttaatagcgcgtttccttatgtgtgttatttccctttttctccccttccctttttaagttcttagtaatttattgctctgaactaaatctcgtggagattcattatcccttgtctatattatgcattgcgaagctttgataacaacagcgtcaaggtacgacgatcttgtaaatatggactttaaacttcatagctatatttatagcgagttgttgttggtagttatagtacgaatctaccagtaaaacc

SEQ ID NO: 1577 - DNA, 328 bp, unidentified
  source 1..328: mol_type = unassigned DNA; note = unclassified RNA viruses ShiM-2016 sequence
tatagagcgaatactctatatacaatatacagacctaagttggtggtattcatggtctctaaataaagcgaaaccactacgttgtgcgaataatcaaattgcggcagtgaacccagagaacggcaattctgaatattagcattcgatctcacctaagtttcagcttgtgtttcatggtgattaaataaagcgaaaaacaagcaaaatttttgttattaataagcaaccccgaagcatttttgagcgaaagaaagttattaatacgagtattatcgaagaaaccattttagctaatactccaggaaataacgtttatcgcccaacaaca

SEQ ID NO: 1578 - DNA, 328 bp, unidentified
  source 1..328: mol_type = unassigned DNA; note = unclassified RNA viruses ShiM-2016 sequence
gagaaaggaaaaacgtgtctccctagccatggattgaattcacggaccatggttagtgtggtgaaggcgataccgtgagtcgatcctcaaccacccttcggctggtgaacctgtgggttggaagcccactgggggtggacaggtcgaagtgtaaaaaatccacaaaatttcctctaaaaatcaaagtgaagatgacgcattactcgaagtgatacgtaacagcgcagtgaaacagactcgggaaaactttgaacaggaggaggaattcactgtggcctcaggtgttgcctttttggcggcactgaatgcccgatattctgactccgta

SEQ ID NO: 1579 - DNA, 329 bp, unidentified
  source 1..329: mol_type = unassigned DNA; note = unclassified Picornavirales sequence
gctgtgatgttcggcttcggccatgccaatcagcggctgtatttgatcactattgtacttaataaacatatcatacgagtatatttaacagcattacagtgtcagtgggaacagcttttcagctgtactgattcttaaccgcccatctttaagacttagcagtctaatagggtttgaatctgatatgtacgcctagcaccgggtcgaggcacccagctagatcgttttaccgccttcctaacactactacatcccagcctgccggctctacaggcaccgcatccgacaaaggtgccgaggaagttatttccgccgacaattttcaagtt

SEQ ID NO: 1580 - DNA, 330 bp, unidentified
  source 1..330: mol_type = unassigned DNA; note = unclassified RNA viruses ShiM-2016 sequence
tggcgctacagaagttacttagcaacttgtcgtgatgttagaattggtaacatacaacgaccggatgttaaagtaaatgtcgactctgttggcagccataaattttctaaatactattcaatattccacagcaacaatttaccaaagtggttttattacaacaaatgtccttgcaacgaatatgaagccatattaaaacgacactgtgtttcaacatcatgcaacactactcatccacttttcctaagagcaaaggctgtatctaatgagttagcgacactagttcgggaagatttactcgattataggccattaactcataaagagctt

SEQ ID NO: 1581 - DNA, 330 bp, unidentified
  source 1..330: mol_type = unassigned DNA; note = unclassified RNA viruses ShiM-2016 sequence
cttacttctgggggaaatacaacggatattttagcatgccgtttcgcgacagaagtttggcacagagtgccgttctagccgtaacgtctctgacaaacggtgaggtgcgcgtgagagcactagtggtgggcaaccgcgggtccgcaaggacttgtgtagcaaagcaacttcgacgtctcgtgtcaatctgcaatacggttgactaaagttgcgctaacccggctacacacattcataagtatctcccataacaccccggtatgaggccaattgcgataagagccaatatttttagcacgaaagcacggaggaaacggagagaaatccata

SEQ ID NO: 1582 - DNA, 331 bp, unidentified
  source 1..331: mol_type = unassigned DNA; note = unclassified viruses sequence
atccagagctaggagctctctctaatcgccgcaaggagggagcagcaaagtccggtctctggtcttcgttttagaagggcggagagtttcggctctactggctggtgtgtgccgcctaaaatccaggctaccagctcggcgcttttgaccagatccgtttaatcgagcgactgggagttagccaactcaatcgattgctacatcacaaaatcaagatttgtcccatattgggccgcaagaagacgttcagcagatcacgacattcgtcgacgattctaacatccagtcgtacgaaaagccacatatatcatctgtgactgcatggacaaaa

SEQ ID NO: 1583 - DNA, 331 bp, unidentified
  source 1..331: mol_type = unassigned DNA; note = unclassified Picornavirales sequence
ttgaaaagcaatctgcgaactttgttacttttttgttttccaaaactagctattgggcttatccaattctcgttacttgtttccctcactagcaccgagcttattcggattttacttggttctctttgttacttgtttttaaaaaacgcgctttaattttcctctgcgtttattacaaacagtcaccacgtttaccttaagcaatcttgcttccccgatttgtcaagttaggggattttgctttcaattttttgtctcacaacaaactcttctctttttcctctcctttttgttgctttgttatcttttgctccctcccctttattggacg

SEQ ID NO: 1584 - DNA, 331 bp, unidentified
  source 1..331: mol_type = unassigned DNA; note = unclassified RNA viruses ShiM-2016 sequence
cttcatcgggagcccgttgggctcctaggaggtacagccaagtgacaggctgttttgtgttttacgttgtctcaaaaacaagttctaagactatttatgcttttatgaaagcaccgtatgtgtcattgtatattttaaaaattataaaaatttcaagaaatgtgttactgatcagattagttaatcagaactatgggataatgttccccgtttttggccatttgaatgttatcaaaccccagaaggcctagatgtgcggactaggagtcactgtataaattcacagacataggacttgcccccctgtgtactagttaagcgatttattttt

SEQ ID NO: 1585 - DNA, 331 bp, unidentified
  source 1..331: mol_type = unassigned DNA; note = unclassified RNA viruses ShiM-2016 sequence
cccggatttagagcagatcgactacgccctattaatagggtgtcggttggtcttgctcatagccggagcggtgattctgtttaatttgcagcggaaagtgttgagaacgatctccatcaccaatcctgttcgacaatatgtaatcgagttgtctaagattaaacagtaccctgacgatctccgaaagaaatttcggaatctcaatgtcctcaagtatgctccgtctttgaacggtcatagccatggtgtgtgtgccgcattccgagctgcggccgatgataccatcaatacgtttatacaggaaaacggttttgaggtttactcggtcggc

SEQ ID NO: 1586 - DNA, 332 bp, Yingvirus charybdis
  source 1..332: mol_type = genomic DNA
aaccactgtatcaacgtaggcatgacaactgactctacatgttgaggcaactccaattcgacgttacttatttctacctctatttttaaatcctgcagtatctcttcttcattcagtccagggggccgcaagtccaaagtgccgcgggcacggagatggccgccttgcctatggggaggagggatgcattgaaggcatagtccggagaatggtagtgccctgtcggtgtcggaggagacggagcaatcaggggaccgcgtctggcacaggcaactggccggggcgatcccgacagtagttcgctggcacaccgccgtactcgttaggtccaa

SEQ ID NO: 1587 - DNA, 332 bp, Culicidavirus culicidae
  source 1..332: mol_type = genomic DNA
tcgaaaggtaacatcgagtacttataccatatacatgccattaactagaaagtaagtttaatagtaaggaccatccatgtaaccgcatttattagaatattaagacagttttaatccatatagtggttttattgtaaggttttgtagtacttagagagagttttaagaaagagttgaacgtggacgatagattttggatctcaccatacgagcttgcgcgaaccctaccccaactcacctcccctccccttcctatcctcaccctatcccccaatccgccttttggccttagcggattggtttaaaaacaacaagaggtggcccgagggcac

SEQ ID NO: 1588 - DNA, 332 bp, unidentified
  source 1..332: mol_type = unassigned DNA; note = unclassified RNA viruses ShiM-2016 sequence
tgtgtttttgtcaagataattgttctgtgattaacagtgattgtggttcgtgtaatgcgacgcagtcaaatgctagttttgatgaagtgtatgagagagtggaaaacttatctcataagaagattgaagagtgtgtagatcaggctattgatcgagcttctaagcttcgtgattacaagcttaatgttcacaatggctcccgacgggaatcatctgatcctctctttatttcgccccattcgttgttatcgcttggggtatctaagtttgttgcgtttgagcagcatcacagtttcgcttcagttgagtctctgaagttgcttgctctgtct

SEQ ID NO: 1589 - DNA, 332 bp, unidentified
  source 1..332: mol_type = unassigned DNA; note = unclassified Riboviria sequence
gtgtataagagacagcatctctcgtttgcccgccaaaaattctggtagctagcgaccgcccctgtttcatcttcacccccgaagggtggacactaccggaggttcccacatacccacatatgggtatggactccgcctcttgtgtcaggaaaccggagagatcggctaaagctgccagcccttcggggtcattgggaacggtccttctcgacgattttactcggagaaggtccgcgcaccgtgccctcggagggcgtggtgcgtagcaatcgaggctcgtcctcctttacactctcattcaaattcgcatagatcaatacacgtataacaag

SEQ ID NO: 1590 - DNA, 332 bp, unidentified
  source 1..332: mol_type = unassigned DNA; note = unclassified RNA viruses ShiM-2016 sequence
cggcaagtacatgcgattccttttcgccacgttagtggtttttgcttcactacccaaaacagaagtttttgttttggggccgtgctatgcacgaccattcccactaggtcaggaatggttgctatgacctaccatatagtagagagcggcacagggggggttttacggcaaagcccatatgttttgatgttttaaagaaatgtcagtaaaaaccgtgtgccccggaggttgtattggtgtatcacatagtgctctacatcggtacctcctcaggatggggcacggagttacaactccgcaatggcgacctacattaattggtcacaaacctt

SEQ ID NO: 1591 - DNA, 333 bp, Botrytimonavirus botrytidis
  source 1..333: mol_type = genomic DNA
cagggatgggagaggtgggtcttttttgaccgttcatgaggctctggccgtctacctcttccagccctgctgggtggatacagcatacctaattttgaaacatcaactggaatcttagaaaaaagtataagataaaaacggcctttatcatatcgagacctgtataccacccaaacaggtgacgatctacacgctactctatctaggaaatcatcaatcaattaggaccagaaattgttacctttaaacaaaaagtaataacgttaatcttgtatcgttcatctagcactggtataatcttataacaaactagcgaatacaggttaatttaca

SEQ ID NO: 1592 - DNA, 333 bp, unidentified
  source 1..333: mol_type = unassigned DNA; note = unclassified Hepacivirus sequence
agggtctgcgcctgtacactcccccacgggaataacaccagctccgagaaagtctgacgagtatcggtgttaaaaaggtggtgtgccctaccaacgtcataacgggtcgtgccgatgttccgaggcaaggactaccactgggtgcccgtgggaaaaaaggggcggatagggagctggggtgaaccgaacggccgtagacggccgaggtcacaggcatgggacgctttgagcctccgtagcctggttggatcttggattcccggtgtagctaccagtttactgcctgatagggtgcgggccagcgcatccgcccttctggttgttcataacgcc

SEQ ID NO: 1593 - DNA, 333 bp, unidentified
  source 1..333: mol_type = unassigned DNA; note = unclassified Picornavirales sequence
tgtactaatgtgatcttgcaactagaagtaaataagagatgtaaaaattttagttgtattgctattagtataaagaggttggttatttaaccttacttccaggatgcctcgtgagcagccctcataatatccaggaaccatctctcgagcatacattataagtgacatgtatgctttaaattcgaaaaccttggtgcaggttcaaatgttaccaacgacaacgactcgaattaccatgaccagaaacaaattatttctttccaaaatcaaggtcaaacggtagctgatgaagctttgccaaagattgtagacttgccaaaatcatatttagac

SEQ ID NO: 1594 - DNA, 333 bp, unidentified
  source 1..333: mol_type = unassigned DNA; note = unclassified ssRNA positive-strand viruses sequence
cctcattatagtaatattatatctcctgaatactatgtctattttgatggttatagtggaaaacctcatggtgaaactctttccgatttagatatatataaagcatatacaacatattacagatatattaaggaattttcagaattttgtaacaacgataatgattctaatactagcaatattattgaatatgagaataaggttagaaaatccacgaaggctaaggataaggatttaaaaaccaaaaactttcctgtgtttaatccagcattacaagaattgtataatacatacatcaaagataaatcggaagttaataaaaccaggttatta

SEQ ID NO: 1595 - DNA, 334 bp, Salem salemvirus
  source 1..334: mol_type = genomic DNA
ggcagttcatcgtgcttaggaccagtgctggatcactttctccaccttcgcccagcacccacaggcctcaccatcctatctctcattctcaaacagcaccagtagaccagtcccctcccacagaatctctccaataaagaccatccaaaatcagtctttccaccacatttgtctagtcctagaatttcaatattccattaagtatagtaattattattttaaaaaacgtagacctactaacctcttttaaaacagcactcaggacaagaaagaaaattaggagcaaagaccaaactcctgcgatctcatagatcaagttctaatttggtataca

SEQ ID NO: 1596 - DNA, 334 bp, Mogiana tick virus
  source 1..334: mol_type = genomic DNA
tttaaatcactcttagactcactttacaaactcgaagataaacaggaaaagaaacaagtgagttgttcatgaacttgacatggctgccccagtggtggcggccttgagctgcgtattaggcgggctgaggcggtagcatctgctgctggcaccagaattggtgttaggaaactcaccatgagtagaaaccagttacatacagcgccatttccgtgagatactccccaccataggatggttatctctggaatatgtggcgcccatcgacatcgttctaaacgaagaagacagcccttaccaacttgacaggaaggtttacgagaaagccctagca

SEQ ID NO: 1597 - DNA, 334 bp, unidentified
  source 1..334: mol_type = unassigned DNA; note = unclassified Picornavirales sequence
gtttccacgagtcatagctttatctttaattccttgcatatttattttatatcagcttaatggagttagaaagacttcatcaaccaacatatttccttctctgagaatagtgcggtaatcctccgtactatctttcagtgaatcacggctttcaaagattagaaatgctatgagaataatacttttatatatattatatcattaattataaataacaaagtttagatctaattttgtccccttgaggaaaagacagaacaataaagaccagtccacttaacccattggaaagctattttagaaatcccttggcggtggaactaattcgactaaa

SEQ ID NO: 1598 - DNA, 334 bp, unidentified
  source 1..334: mol_type = unassigned DNA; note = unclassified RNA viruses ShiM-2016 sequence
attgaattacgtacaacgttttaaattgcactgcgtataatacgtttagtgtaattggctgcgatcttattggtctgtataatacagttccaatacccaaagtcccccccgtgtagctcacggggttttattttccgtatatttacggctccccaaaatatttcgtatagcttacgaatgccaatatttttatttagtttaaatagatttttaatttggttttgttttatattatatatttgttttgctctctttgttagttttatcaacttatgtttacgttatattgtagtaagtgtcgcaggcccatttgggactgtatttgttaatttta

SEQ ID NO: 1599 - DNA, 334 bp, unidentified
  source 1..334: mol_type = unassigned DNA; note = unclassified RNA viruses ShiM-2016 sequence
gttttgtagctttattcttcgtgtaatcgtagaagttgtgtgtagaatacttcaaatatttattgagatattcaatgcgcgatttccttctcctaaacaaactatacaatgaggtaagttgtatttttaatgttgggctccacccctatgtgaagtgtcgactcacatagtatttagacatacggttttcgttttgtagcaaattattggcgatcaagcaagagagacaaaccaattacctgtctcaaacaacgttgagttaggtggttggaacgaattggaagtatctactacacgtgagactgtagaaacttctattagtaactttaaccct

SEQ ID NO: 1600 - DNA, 334 bp, unidentified
  source 1..334: mol_type = unassigned DNA; note = unclassified environmental samples sequence
tacctgtgattccttgttgtctttgacaactaaatattcactaagagaatgatctcactagacattctcgaattgggcaagcgcctcaccatcgcttgttccacccgcgcccttgcactcatcaacgataggcagagcatcggaagctatcactcattgtttgacaattgggtgacgctcctgatgtttgtgctgcttatcaatgttgtagcgcaagttaccggacgactgcgcctcctaccgggccctcttcagcaatggattggctgcctggctgttagggttatcgtgttcgatcaactgtggagggtgttccactacttcctgccttgca

SEQ ID NO: 1601 - DNA, 335 bp, unidentified
  source 1..335: mol_type = unassigned DNA; note = unclassified Ourmiavirus sequence
ccgtttgttaacccagtttactctgggggacacgatcggaggggttcgccgggagactctctgagttcggcgtccaacgagtcgttctttggaaaggagcggcgagtggggcctgtggatttggccgtcacacacgttaacagaaacggcatcccgcaaccaactcgtaagtggtacctactcgaaggtagggggatcgcagtgtcctgttcgggggcttccccgggttcgcccggtgtcggagccacaagatctttgtggtcttacccgatcaacaccctctggcttgccggtacgcgtgtgccacaaacacaactgccattttatattttaaa

SEQ ID NO: 1602 - DNA, 335 bp, unidentified
  source 1..335: mol_type = unassigned DNA; note = unclassified RNA viruses ShiM-2016 sequence
acttgctaaattacgtaaataagggagttataaagtagtttagtattgctatctctaggacactgttggctatttagtcttaatgatcaagatgcagtggagcagccctctaaaaatctaggtcacctccctagcgatagttaggatgatccacctacgtcgcgaaataccggatcgctacaattaaacaagatgaaacatctcctcaatctcaaaactatgaggaggcaccacagataacccagactgtggaacagcagcaagagttaattacttttgaccaggataaagctatagtggcagagcattatccgggagaaattaattatcctcgt

SEQ ID NO: 1603 - DNA, 335 bp, unidentified
  source 1..335: mol_type = unassigned DNA; note = unclassified RNA viruses ShiM-2016 sequence
agccgtggtgggatcaggcattggggaggactgatgcagatgaaataacattattgaacacaattcctgtgcaaggtggttctcataggccaaatagcagtaataataagaataaagataaaaaaggagaatttgtgaaaactgtgaagctgaccaaagataatataccggtatggtgtagtataaggaacaataatataacggtggttgatagagctaaggctagatttgtactggtacatgtgtcgtatgaaaacacacagggagtgggtggttttggtgctcataggataggtgatgtggtcgttaatagtcatgccatacaacttgatgat

SEQ ID NO: 1604 - DNA, 335 bp, unidentified
  source 1..335: mol_type = unassigned DNA; note = unclassified RNA viruses ShiM-2016 sequence
tagtacccaacttgacccacgacagtaagacagtaacattcataccctacatcaatcaattcggctatgcaagtaacgtacactccagttgtgtttgcaatgaatatcgtgccttggtcgatcgccacatcacagatcgcacatacatcaagtttgatgccaaggcctggcgagaagccgcccgtcacacccttaaatactaccccgggggtgttagtaaatgtagttacacccagatcatcaatggctacacgggcgggaagaaggctatctacatcaaagccctagaaggactgcgcgcgcatggtttacgaccatccgataccagggtgcgc

SEQ ID NO: 1605 - DNA, 335 bp, unidentified
  source 1..335: mol_type = unassigned DNA; note = unclassified RNA viruses ShiM-2016 sequence
cttacggcctctaagaggaatatcctctccggctctcgccggtcacctatcttacgatggtgatatcccataaccagcaactataggagagaagatcatgaaagacaagagccttgcggagattgctgtatcttcgccatactttgacgaatacgacatcaatctctacgtcgcaatgctcgaaatctctcttggtctcatcgaacctacagacgctgtttgctcataccattatggttgtgtgctcgcagctgctgagttgttgggttttgactggtccaaccagttgaaacttctccccagtgtcccgtccgaccctcttcacggagggttcc

SEQ ID NO: 1606 - DNA, 335 bp, unidentified
  source 1..335: mol_type = unassigned DNA; note = unclassified RNA viruses ShiM-2016 sequence
ccggcggcacgcgtgagcgtgctgtcggtgaactcggtggcgttggtgtaaaagccacgtcccgtgcctcccgcctgtctgggctgactacccaggcaggtgtaaaaccagtttacaaatcgaatcaggattcggcgcttgctagccagggggctggagacatccagcccaaaggcaaggaaacgcggaatcctgctcgtgggaaaggcataaccccgagtgccaaacatcaacgtgtttcgcagctcagaggcttcgcaaccgtgatcaacttctggttgtctcagttgcggctccgctgtagcctgtcggaactccaggatcacttcacggaa

SEQ ID NO: 1607 - DNA, 336 bp, Culicidavirus quitotaense
  source 1..336: mol_type = genomic DNA
agttaatatgaccggtcgaacatcaccctggaattggggaagaactaccgtacttaactaaccacactagtatataagatatatactatatacccgcatttacataggaagataaggattttaaactattttgtaagttgatgttaaggtttaatctgtaagctaacagccataacagtagaaataagtttgccatatgttgtgtttcatctctttgtttctggctcttcaatccttgggtgtactgctgatagatgctcctctttctacaatcgcgctaaactgcccctccccaatctaccttttggcctcggtggattggtttaaaaacaaact

SEQ ID NO: 1608 - DNA, 336 bp, unidentified
  source 1..336: mol_type = unassigned DNA; note = unclassified Metaavulavirus sequence
aacatatgtatcatctcgctcatgctagccaggatattgtcataattatgtagattacatatgtttcaatcatatgtcactattgtagtgtaatcaattcgcgatggtactgaattatcatcttatattccctggacagatttccgaaattgacaacatactctcttacgccaataaacgaaaatatctgattacggtgcaatctgtattcaattctaaacagtatatacacaatcatacacaagatagcttatttggattgttttacaaattactcactcataattaagaaaaaatcaaagagaacttaccggtgggggcgaccccaaatcaata

SEQ ID NO: 1609 - DNA, 336 bp, unidentified
  source 1..336: mol_type = unassigned DNA; note = unclassified Sopolycivirus sequence
ctccctttgggtttgagtcgtcaggctttgttctcgaagggtcttgatggtgattcgtcccatccccaatatagctgtgaaatgcttgagggccgagaccatgtagggaaaggtaagtcgagccgataagatttgacaacgctatatctgtgcattaaatatttatccagtaccaaaggaactcaagtgtaatgctgacctagacaagtcttaggacgcgctgcttgaatacattccttgtacgacactcggtggtgatcgtaatttggtcggagttaacctctggataatatttgcccgtgtcggagcggtgatatagtcggcggactaatttac

SEQ ID NO: 1610 - DNA, 336 bp, unidentified
  source 1..336: mol_type = unassigned DNA; note = unclassified Picornavirales sequence
agattggctgtgggtagcgcataccacgttaataatatgtgctagcggaaatagaggtattttagagatgcgcacatgcttgactttgccggtgtgtctcgaacgcgcgtactactcacacgtttatggagaggagcgaagtccgaagtgcagtgattgagcatccgcacgggtttatagcttacaaaaacagaaagtgacgtcacgacacaagacgttaaatgtgaagagtttgatgggttaactttaaaccctactcctgagctacttggagtagcttcctttagcaatgaagctggtcaatgcgcggcaattaaggctacacagtactattcg

SEQ ID NO: 1611 - DNA, 336 bp, unidentified
  source 1..336: mol_type = unassigned DNA; note = unclassified RNA viruses ShiM-2016 sequence
gaacaggagagtaacgaaggtggtacggccgctacagaggcgcctcaccttacaaaatctaagttcaagcagcaggcgggacggccaccccgcgaactaataactggtgttgatcacaacacaaacgctattattgagaggcaggactgcgtgtccatcgtacctgccttggcagccagtcagaagatccacgatatcggagttggaacttcggacaatgtagtcttgaggattaataacgctcggaagagaaaagtgaatactgatcctcttgactcatgtgtacaagcaacagagtccgactgtgagaatcctctaggattcaggcgggttcgg

SEQ ID NO: 1612 - DNA, 337 bp, Wenzhou crustavirus
  source 1..337: mol_type = genomic DNA
ctgtatgaagaatttacaaaaactgacaccatggagaaatcattcaaagagtgggaagagcttctcaaccagagacccccctcctcgacacctgcaccccttgtggagaccaggttctactgggagggtcttgtaatgggactgcttggagctgctctggtgattgcactctgtggaattctcaagcttgtgggatggaggtactgtcgcaatgtgattagtacacctctctagggctgagatgtccgggtgggtgggtgggatgggtccattgtggtgccttctcgtggcgggcctgtctagctaaaccacaactataaaaaaatgacaatacaca

SEQ ID NO: 1613 - DNA, 337 bp, unidentified
  source 1..337: mol_type = unassigned DNA; note = unclassified Marnavirus sequence
cccgatatttggcataaacctcgatgacacgtctagcgtaatggctacgctggatgcgacatgtaaggttgatcaaccgtttcaaaactaaagctgctagctgcgcacgcgcgtagtacattggcctctgctctttttgagcatgttcacctctggaccatgaatcacaagtgacagctttttaattgtttttgatcccgttgagataccccaagtctcgctccgctggacctctatctgagagtaccgagcaggtgaaagcccagctcagggaggtaaccctttattccaccgggcctcgtcccacaacagcacaagaatcagatacaaccgaaca

SEQ ID NO: 1614 - DNA, 337 bp, unidentified
  source 1..337: mol_type = unassigned DNA; note = unclassified RNA viruses ShiM-2016 sequence
gaattatagtaagattttctttgcgacttctccctgcgtttgtgattctacagtcatttctgctcaactttgttgctgcggccgctgtggacacaattttatttgcagagaatttttccttggtgaatgtttgcaattttatttagttttgtaatagactttgcttattattcattttcaggttactttgtttgtaatatttatcaattttgctctgataaagattacttgtcgcttatattttccttcttactatacactataattcttgttgctctttgtttattaagtttttgtggtgtaagttgttttatattcttattattagtgcttcatt

SEQ ID NO: 1615 - DNA, 337 bp, unidentified
  source 1..337: mol_type = unassigned DNA; note = unclassified RNA viruses ShiM-2016 sequence
cccctcccggggttctgcatccttatctattactagataggttgtcctttcggctcttcaaccacctaggaggcaatcatggaaactaatttaagatttttcttaaccatagatacatgcactctttcagaagatgaaagagagtatctaaaaattaagttaatcataaaatttcctgaatttagaaattactctttctgcaaccactttttaggcatgctacgattccgtgttttttctacgggtcgttacatgtacttaaaagaggctatacagaatttgtatcctgaattcgctgatcgcatccggtttgacttccaaacagacggggtctggc

SEQ ID NO: 1616 - DNA, 338 bp, unidentified
  source 1..338: mol_type = unassigned DNA; note = unclassified viruses sequence
gcaggagtaaagttaagatcatccaagctacatacctaagggacgtagtcggtgaccgaaacaaggctttctacagactattgcctgttctgaaagccctgcaaagtgaaggagctatcgatcgatacctctaccacttaccgtccggagatctcctatcggagaagtaccgaggacagtctattaaagaccaaccttgggaccggccggaaaagttcttcacacctgatcaggctgaaggacttcgaagaatcttaacccgagatatcggattaaaaccccgagtcaccaatatcctgatctcgcgaccgcgagttcaattcaatcgaattcaggat

SEQ ID NO: 1617 - DNA, 338 bp, unidentified
  source 1..338: mol_type = unassigned DNA; note = unclassified Hypovirus sequence
gttctaattggaagttccctggtaaaggtgcacctgaaggcattcaagataaatccagttttggcgagggtgtattagagcctgccaaatccgaaggtttattttactatcatcctgatctgatttctactccagtgttcaaagtactaactgtaggcaaaggaacttgggctattggctaccttaaatgcgacgatggtttagcgccagtgcattacgatgcggacattgaatctttctatagcttttcatattctggttatacttggctcaacgattttaaatcgagtctgacatctggaactgagttgccaaaggacaatcctggacatgtgcaa

SEQ ID NO: 1618 - DNA, 339 bp, unidentified
  source 1..339: mol_type = unassigned DNA; note = unclassified Reoviridae sequence
tcttcctactacttcgtgtctgtcgtcgttcgtcggttctgttatttaacaatcttaattcatgtcattttcatcaaatctgtcgaatctttgttgtggagggaaggaggattctccacagagcaatcaatcagagaaaaatttcgatttcgtaaacgagatggatcaactgattcatggaccgacattaactcattgctagaaatcattgattatgaaacaggttcacaatatccaccagttccaaacatcccagatgcgttactacccccaaattcaacaactggcgtaaatacacataatgtcaatcatcttgttagtaatattctttgcactagt

SEQ ID NO: 1619 - DNA, 339 bp, unidentified
  source 1..339: mol_type = unassigned DNA; note = unclassified RNA viruses ShiM-2016 sequence
cgttttctccaaccatttcctgtttgtctgtcgtcgagccagccgcaaacagtttctatcaccgtcccctttatcttttcggtgaatccccttataccctaaccttcgttggttttccgcttttacccgcacgtccccttcttttcatcctttcggtgaaacccctgcaccctaactttcggtttttcgcctttttccttacgtcccctttcgcgccccccctttttctttcttctctttttctttggttttgttttgttctccccttcctgtcccctttcccactttctttttggtttctcggttcttcccccttcttctgttttggctttagccaat

SEQ ID NO: 1620 - DNA, 339 bp, unidentified
  source 1..339: mol_type = unassigned DNA; note = unclassified Negevirus sequence
aaataagtaaataaattaaactaaataatctaacaaaacacacactaaagacttgtaaacaatgactatatactgacttctttattgttaatagttagagataagtgagacagtcgttaaagtatccaaaatttgaggtaatatgtcttaaggagaataatataatcaaagattgactaggcactgaccgtaaatacatcagaactaaagtacagggggggtgatggctgagatgaattgtaacttgcaggtatataaaaaagaaagaactataaaatgaattaaaacaactaaattaaaataaaggagaaaagtaaaagaaaaaaatcaacagacctc

SEQ ID NO: 1621 - DNA, 339 bp, unidentified
  source 1..339: mol_type = unassigned DNA; note = unclassified ssRNA positive-strand viruses sequence
cttccgctcgctctgccctcggatatggcataaaactgtcccccccgtcgatccatgggggtccggtgtatagttgaagagatccgtgttgtattggataccacgcaagtagaacggttttatcgttctttctaaacctacttgtacgaaggcttgcaacacgagggctgctcctattgaggagagcgtacccgcgcaccgagaaacaacggaccttctgggttgggtgacccaggagtgtatataatatcacctactaattcatatttcataaattttatagatagatatagtagaaatacacacccgtcacaggaagaaattgaagtggctactgcc

SEQ ID NO: 1622 - DNA, 340 bp, unidentified
  source 1..340: mol_type = unassigned DNA; note = unclassified ssRNA positive-strand viruses sequence
ttctatattacttttaaagtataaatggatattcgtaggtacttactccgggagttttcaaccctctcctggattgctatcgtaattttcattaacgtgattattctggttataaactatccctcaccacagtacataggcgaaggtcgcgttacttggcgtggtatagtttacacccagcaggatattacttttgtctgtcgcactagcaccaccgtttgcgtttttcaatcactcatttcactaatcattgctctgggttaccctttgtacccaattggaattgttgctgcttttatttatctgcttaacaagtggatttatttcctaaagcttcgtt

SEQ ID NO: 1623 - DNA, 340 bp, unidentified
  source 1..340: mol_type = unassigned DNA; note = unclassified ssRNA positive-strand viruses sequence
agcgcacaagaagagaacgataggagctttatgaaatcaccaagagttgacaaaaggtttcccaagtttggtactaggttttgtgagagctcaacaatgaaaaccgcactaggcacgttggggctggctatacgcaagtctttttgtcaactcttggtgatttcataaagctcctatcgttctcttcttgtgcgctttaagcaaaacccccttttcaggcttctccgccttctaattgagagagttataggctcctccccctactaatagtgaggaaattatatcgtatacttgggaccattgtaagtcgctaacgcttttgttagcccaggatacagcc

SEQ ID NO: 1624 - DNA, 341 bp, unidentified
  source 1..341: mol_type = unassigned DNA; note = unclassified Riboviria sequence
tgattcaagcacacaacgaggggaccctctcgtctgtgtttggattaaataaaaacttcgccaagcaagcggtgagtgcatgtgcacatattccgggttcgatttcagtggtgttttaccatggattcgttctgtatttatccgagcctcttattgctttaggggggtttcgtacaagctgccggaggtgagtctacggattagtagtggcttttgcgttgtaaaattcgcagcaggtaataccctgtacactgaactctacgccactggaaagaagaatgagtcggccttaacacgtgcactaggtgaatacttacttagttcatcttcgagataataca

SEQ ID NO: 1625 - DNA, 342 bp, unidentified
  source 1..342: mol_type = unassigned DNA; note = unclassified Picornavirales sequence
tttcgtggatagcggagtttccagtctctttaaaatggtgacttcaggaaagactggaccgtgtgagtatggcagccacacggatagtgcccctcaaatgtttgatcatcatttgttgtatgggaggaaagatcctctgttggttgttgaactgcttgttatgttggacggaagcgggagggtcgagtgcgaacccaactaagctggagaaaacacagcatgccggtgatacgagcgcaagatttagtacaatttattcccgatccacaccatatttcccccgtattaatttacacatttacggcttgcgtggttaattccgcaacatagctggcaccagtc

SEQ ID NO: 1626 - DNA, 342 bp, unidentified
  source 1..342: mol_type = unassigned DNA; note = unclassified Riboviria sequence
attaaaatgtgatcttgctttcttatacaattttgagaggttaataagaagaaagtagtgctattttaatatctaggttaactatttagttttactgttcaggatgcctagtggcagccccacaatatccaggacaccctctctgcttcttttatgattaggttgtcatttagaataagaaattaacctgctaactttcaaacaaatactagtaacattgaagatgaagaccggaaaattacttccgaacaaaaagagattgtacatttttctagtgaaggagttacccctagtaccactgcggtgcctgatatcgtcagcctttcaacagattatttgtca

SEQ ID NO: 1627 - DNA, 342 bp, unidentified
  source 1..342: mol_type = unassigned DNA; note = unclassified Riboviria sequence
aatttaaacaagctcaaatgttttattccgacatttgggcttttaaaacaggaatagggttgcaacctatagcatagaagaagtgtatatggttacaagagaaatgttgctgtcgctattcgccgtgctttcttctatatttgagacagttacacgagttatttacgtcgactcgttgaaatttaacgcgtaacaaattttacaaataatgatcaaaattttataaaacaagaacaacaaacaatagatattattgaatctgaaggctccactcatgtagagaatcgagtggcgtctatatccacaagaacaacacaggttgctaaggctgtccctaatcaa

SEQ ID NO: 1628 - DNA, 343 bp, unidentified
  source 1..343: mol_type = unassigned DNA; note = unclassified Chrysovirus sequence
gcaaaaaagagaataaagctttctacttttttgctccacacacgctcgactcagatggctgctcaaccaaacagaggcttcgactcattcttcgcagattactacgatcaggacggcttctcagatctcaccagcgtacgcgcgtccaccatccggccggcgaatatagtcgtagagccggaccacacggttttcgacacctaccgcacacacggcgggagccccccagactacacaaccagccaagtggcggacgcgttcggccagcgtgcttcagcaagcgacagggttcacggagtgaggagagacacagccgcttcagtgtacagcacgagaccgtacg

SEQ ID NO: 1629 - DNA, 343 bp, unidentified
  source 1..343: mol_type = unassigned DNA; note = unclassified Solemoviridae sequence
tccataggaagcccgcacagatcagtaaccatgccggtctcaggtaccccaccacgcatagcgtgaccaagtaatgctcacatgcaaaccgggccacaaccagcgagatggcaaacactatctcagcaaccttccagatcgctaggcaggccggtcctaaggactgggcccacgctagggtcactctgggttcaacaaagtctcgcacttggttaataccttccatctttttcttgacttgtggaacggacaagattagtacaaagaaagaaagtgatatcttcaagaatctaacactcacaaatatgtacggatcttatccgttccacaagtcaagaaaaag

SEQ ID NO: 1630 - DNA, 343 bp, unidentified
  source 1..343: mol_type = unassigned DNA; note = unclassified ssRNA positive-strand viruses sequence
caaccctgctggaactggatcatcagaaaaaggagaagaattaacacctttcgtaccactagatcagatttcgtttatttcacgttatccccgaaaattgccctctggagtgtattctggtgctcttaagaagattaccattgaaactttctttcactggactactagtacaactaaggaacatctaggcttactattgtcactagcctcgtttgaaagttgcttgtgggaatcagaataccattcagctattacaaaggaaattgaaaatttattgtcaaaatttaaatatataagatcttttgtctatatctatgacagagaagttgtagcagactctgtc

SEQ ID NO: 1631 - DNA, 344 bp, Obscuruvirus quintum
  source 1..344: mol_type = genomic DNA
cgaaatcaattactttaaaacttatatgttgaatttataatgagtggtaaaagcgtagatctgagaaaagttcgccacatggcaactactggcaaccctgtgactaaggtcgatttggaaatgattatgaaggagttgatggagatcaagagagagatcaaatcaatacggcaactaatagagggtgcctcatccaagaggtcaattagtgaaccaactgctcctactttggccctctcagaagttccgtttcatatgagatttaaataagggaaatgaaaacaatcattcttttttaaaaaatcttgagtattttgttggtaaagcaggaatctttgtggaaa

SEQ ID NO: 1632 - DNA, 344 bp, unidentified
  source 1..344: mol_type = unassigned DNA; note = unclassified RNA viruses ShiM-2016 sequence
gtaacgaggtcgcgctggtgtacccgccactcgccggagtccgaggagcagtacgctccctcttctccttttgcgggctctcctcgctgttcgcatggttaggttgctgggagtaccagcaaataccggtccatgtgcggctcgcctccgagctgcgatcgtctacggcgttcagcagtatatggacggcgcgaggatttgatgccacggcgctgcagttcagagtgcggcgcgcggaagctattgtgaagcgcaacgagtggaaagtaacaccgggtgtggtggaaacgacggtggccttcgtgtcggtcgaacaaccgagcgaggttgacgctgtccggttc

SEQ ID NO: 1633 - DNA, 345 bp, unidentified
  source 1..345: mol_type = unassigned DNA; note = unclassified RNA viruses ShiM-2016 sequence
ttagcaagaaactacgctcaagtgacagaggaaggtaggttcacgttggttaacaacagtatcgtaacagttaaacaaggagaatcttcttacaggtccgatctgtccctatcagcagacttccagtttgctggcagaaatgtaaggacaaacacgagtaacgtccacacggactactcggggtataacaacaagtacatcacgtcagatggagtcttcgatgctgggctcgcactgaccgagtttgcaagaactacagcggagagacgtctcgtaaaagaagacactttcagcttactctctcagcaaactcaagctgatagccacgaatctttcatttacaac

SEQ ID NO: 1634 - DNA, 346 bp, unidentified
  source 1..346: mol_type = unassigned DNA; note = unclassified Picobirnavirus sequence
aaacattgtagtttacaaatctgagaaaggagaaaccgcttatggttttacaagtaaacatccaatttacacacatccttagctcagccattagtggtctgagatttggagtaaatctggatgtagaaggaggtcgaatgtgacccgaaatcaaatagcttggtatgaagctagagaagggaagcgtcacaatgttgcaactgaacagctaggagttagagctcaaggtgagactgaacgatcaaatcgtgcgagagagttagaaactatacgacacaatgtgatcacagaaggtcaaacagatcgtactatccaggagcaacgcaggcataatataactggagag

SEQ ID NO: 1635 - DNA, 346 bp, unidentified
  source 1..346: mol_type = unassigned DNA; note = unclassified RNA viruses ShiM-2016 sequence
cgaggggcgaatcccctcgtattcttttcaccaattgctaggtatactgggactcttagaggcggtaccgaaactatatatcatgatagtgtgtgggactcttagaggcggcactagattttgatatgtattgcatttggcttttcttacttcttcaaatttgatgttgtgtttaacacctagttaggattgtgtctaagtaactacccgtcctttggataggctctgcttattgatacgtcaaacctgggatgcggattaagaattgtgcactctatggacatggctcgaacacgatttgttttgacgacactttgaacccacactttggtcctgcgaactatat

SEQ ID NO: 1636 - DNA, 347 bp, unidentified
  source 1..347: mol_type = unassigned DNA; note = unclassified RNA viruses ShiM-2016 sequence
ccctgtacactggtccaggcagatcggtgtgcagtaatgtaccgtctcagaggaccccatgtttggctcagaaagtacttgagccccagttgatatctgtcactggaagtacagataacttctatggaattgaccgaccatatgattttagtaggtttgaactgcagtcggaggtggttgatgatggaaccgttccaagcgtttctgaagaagaagttgtacaaacagtttcttttacggataacgctagaggcgtttctgtcgatctgccaacctcaacgaatgcagtggctgtcgtagataatacggacgatattggtttaggaacttttttgtcccgtccagtc

SEQ ID NO: 1637 - DNA, 347 bp, unidentified
  source 1..347: mol_type = unassigned DNA; note = unclassified RNA viruses ShiM-2016 sequence
gttcctgatagaacaaaacagtttattatgaattcgtaacatccaggtcaacgagcaagaatagagtgaatgaaaagaccgattataaatgtaggtcgttcagtaattcattgatacattaaggtcgcctaacacccttgtatatctatttttcgttctagtaagttggagaaatgttatcatgaaattttaaatttgtctagttttaccgttgtagtgacggaaacccctgcagaaagaaatattttcagagaatacaggtatcaaacttattattttctatatctaaaaattttaaatattattattgcctaaattgaattgtctcaaccttaacttttaacaat

SEQ ID NO: 1638 - DNA, 347 bp, unidentified
  source 1..347: mol_type = unassigned DNA; note = unclassified RNA viruses ShiM-2016 sequence
ccattgacgtcttgctcatggccttcgattgggcaagaccttggttgtaaccggccagtagggtgggtgtgcgcagcatccagcccgagtgtgcgggtgtgtggcgtgctggggagcttatgcttgtggagatttgcggtcatttagggacgaggacctaggtgcgagcaatatcctagagagccaacagcgatgacctaagagccataccttgatcactgaccagcacagggggattccaccgcggtgtggcgctcatcccggggaccggcccgtgtagagtgtatgaaccggataaaaccccacgaaccagccacaacctacgcaacacgatttgctacttcaac

SEQ ID NO: 1639 - DNA, 347 bp, unidentified
  source 1..347: mol_type = unassigned DNA; note = unclassified Riboviria sequence
accctagggatgttgtcggtgtggggtattcacccttttacgattaccttccggtactttcgacgaaagtacaaccggatgggagaagacttcgtctttacaccatcccggagggaaccatacttcaacgttctcatggcggtcaatccttaggaaagctgccatgggaggggggaggctccttctcgacgagaaggaggaaactccttagagttgtactcacaaagtccttaggcctaaggcctaccgttgtggatatcctattgacgaggtcaataaggcattttcaacggatagagggagccatcaatgccgtcgtcgacagcctagtgtgctctgaccctact

SEQ ID NO: 1640 - DNA, 348 bp, unidentified
  source 1..348: mol_type = unassigned DNA; note = unclassified Totiviridae sequence
tgataaatgagtcaacgtcacaactggacacggaaacaagaaagcgattcgcaccctcgtctccagtgctggcatttacacgactcatagtatcagctgattgatcccttagctgcatactgaacgcgaaccgggcggtccgcagggtgccaaataaacgagtgggaacagctactttgaaaggttgttgtttggcgggctgcacttgaatccaatgtggtgatggttgggataatgtacactagtcactaatgcggagacgtatttaaaataatatcacagttgaaatgcgtaatatgttaagcatattaagtccgattgtaacctgaacaaggccaacttaatcgg

SEQ ID NO: 1641 - DNA, 349 bp, unidentified
  source 1..349: mol_type = unassigned DNA; note = unclassified viruses sequence
ccttcttaagttcttaagaaagaataaaaactttccatccggttttggaataccaaaccactttctatcgttcgttgaaggtttttgtgttatcacaaaacagaacgactgctttttggaaatccaaaagctaacagcttagtcaagcatactaaaaacttggaataccagtttttgcctttaactactagatccatgcatttaaattgcacttataacatcttctacagtagttaccactgcgatttggacgattttacgatccgtgctagcagtgaagatacttggcaagtattaatttttaccacgctatttatcctgtccgcttttatattcattgtcttctata

SEQ ID NO: 1642 - DNA, 349 bp, unidentified
  source 1..349: mol_type = unassigned DNA; note = unclassified RNA viruses ShiM-2016 sequence
gctatatacggggctaacatgtaaaaatgctaaacggcatgttagcttgaacggataaaccgaaagcgggttgtttaaccttactactcagagcttatcagagagatttagcaacttgtatgaattgggcgattcatgcatgtacatatagtctgctacaataacaaaagaaacaaattgtaatgaaatagaagggatttctaatcctactttcactgatttaacaggcactttggtctcggcaggtgttgcaccagtttgtgctgagattccttacacagtgccatcatcttttatttctacttctgaggtgtctcaggatttgagagactatttttccagaccaagg

SEQ ID NO: 1643 - DNA, 349 bp, unidentified
  source 1..349: mol_type = unassigned DNA; note = unclassified Riboviria sequence
tcactccggggactttaaatccggcccagttttaaatctgaaggtaagcaaaattaatgtatgcatatggataccaagtgtagtgtatatttgtatgttttgtaaactagcttaggctttgcatatttaagggtccgtactgcggaagagagatctgagttccccctgctcaactgtaaatatacccttccactatattgagcgtagttagtggattgtacatagttcgttcggtaataattgtaaaacttacattaacatctgtcgagatgctaaaaacgacgtcgaggtcggtactggaagccgacctttgattgaggtaaattccaacgcccatgacaaacctgaa

SEQ ID NO: 1644 - DNA, 350 bp, unidentified
  source 1..350: mol_type = unassigned DNA; note = unclassified Flaviviridae sequence
aacaacgctaaaccctcaaacttttaatcaccacaaacaaacgaaacaatggcttcgaccaaagttttctgtgtgcgtgacgaggacgcgattgcggaacgtgctgccttgctgagcgacgtaggtctcaaaaccttcatgtcggcaggagcgcgcaacgctgagagggccgccgagtgccaatcggagtgcatttaccgtccaacggtcgagcctctgactgggctgtgctcaggcggtgatggtcacagtggcacccaccctaagcccactgaccaaggagaagaggcggcaaacatcgtcgtcgggagtgacccttctggcgggagtacttgcctttatggcatggc

SEQ ID NO: 1645 - DNA, 350 bp, unidentified
  source 1..350: mol_type = unassigned DNA; note = unclassified RNA viruses ShiM-2016 sequence
ggaacttcagaccgtcatgtcttaaaactgtctggaggcctgcctaggtcgtcattactccaaggagaaaccaaaaggcgtgctatgtactggatacctgatccttcttggtttgtggttttgccaggagtgtcttgcttgcatagttgatggactgtagtggtcgaggctgtttagcttcaggtgtaaagtcgccatcagtaaaccactgaaggcagttgtgctgatccgcgcagctgaccttgagaaaaataaattggattactaacttatatacacttttcaaagagtcctgggtctctcaatacctagggaacacggacggattcttctttgacccctgtctcgag

SEQ ID NO: 1646 - DNA, 350 bp, unidentified
  source 1..350: mol_type = unassigned DNA; note = unclassified RNA viruses ShiM-2016 sequence
gtcgtaaaatattttctacgttaaatttctttcttcagatttcaaacgttgctgaagacaaaaccagagtttgcacatactcttaaatcaatgtacatgctcccttaattgatccggagcttgataggattttgtggtcctattctcaaatactgtaagaacggcaacagtacacaatatgttacattatcatttaggtcagaaataccgagttgattgaagcagatatacttctgtgaaatccactattagcatttagtggtcatgtctttcaagaagacacaggcttaggtccttggcgtgccaaaaacaacagcctatattaaatagttgtttgaacgtcgtaaaca

SEQ ID NO: 1647 - DNA, 350 bp, unidentified
  source 1..350: mol_type = unassigned DNA; note = unclassified RNA viruses ShiM-2016 sequence
gttatccttaaccacagcactttgtgacccttcagggggatatacctgtatcattcatccacgccgtcgaaagagggcagcacgtatctgcacagaaggccagccgtccggtggtggcgggtgcatgattacaaggccagcgggaatccgccctttgcggtaccgctggctggcaggtgcatgagcaccggtatgtgctgaccggggggccccattggggcccccccggttcattgatttgggatggcagggccccaacgcctgctccggtcacccatggtcggttatttccaatgggagctttggaaatttgggctcaccaaaccatttaacaaccatgaacagtacac

SEQ ID NO: 1648 - DNA, 351 bp, unidentified
  source 1..351: mol_type = unassigned DNA; note = unclassified Gammacarmovirus sequence
aacaaactaatcctcggggaagaagtaaagaacgtggtgacagcgggggaaaacaaaagaactcaatggggcgaaagatagccaatgacgctatcgctgaatcgaagcaaggagttatgggtgctagcacatacattgctgataaaattaaggtgaccattaactttaatttttagtgtatggcctgttaccgttgtgactccagccccggggattactccggagcattgcttatattatttatctcatttgttttcttttatattacctcgcttagcccgcaaggaaatacttacgttcatcacttcgataattcttccgtcaaaacacaatacgttggcatctctacaa

SEQ ID NO: 1649 - DNA, 351 bp, unidentified
  source 1..351: mol_type = unassigned DNA; note = unclassified Dicistroviridae sequence
aacaagttaagatgtgatcttcaaaattgaaataattttctcaggctaaattcattttgtatgctatcttaactcttggtgttacctatttaggtttacttccaggatgcaccgaggcagcccctcataaatccaggaaccctgagtgcttgatatttgtttaggtagacgatatcgataagaaatttacctgctgactttcaaaaaacaaactcaaactcaaatccagaaattgctaattctagcatctcgactgaacaacaagaaattgtacatttcgcaagcgaaggagttactcccacgactagcgcagtccctgatattgttaatctttcaacagattatttggat

SEQ ID NO: 1650 - DNA, 351 bp, unidentified
  source 1..351: mol_type = unassigned DNA; note = unclassified Picornavirales sequence
tgcactcctcaccacttgggcttaactcacaagtccttgcttcggcagaaaccaaaagagagtaaatatatgtagtcactgtgcgtaatgcgtttaattgtttgtcgcttcatgttgcgtaagaatggatgtatatttgttaatccgccagggcgatccctaaagtctcttttcagagaaaggttcggctgattcctagagtgcgtaaacaactcgctcccttatagttgtaaaggagggttttaaaaatcaactgcccaaaatcaaaataatccaaattggcgagatgagttccaagatctcctcgacctctcaaatgaaaaacttggcaaattagtgcgggatacgtgg

SEQ ID NO: 1651 - DNA, 351 bp, unidentified
  source 1..351: mol_type = unassigned DNA; note = unclassified RNA viruses ShiM-2016 sequence
aaggtccctctctccggttgactcctggaggtgcttgtatatattaagctaaagagtcatgtgtatatatggttacggccactgcatgttattttgtgtcttgttgactgcttgtggaacgctttgtacataaggaattgatgggtatttacccatggtctcgccaaccaaccacaacgcaccgtgcatttatggagttaatacgctcctatgtaacgttttaaatgtattactacgcttgaaaataataacaatgtaaattcatatactttaactgtagataatcataaagagtcgatcgttgcgttccatcacgctgatgccgcctggactacgaaggtggattctatt

SEQ ID NO: 1652 - DNA, 352 bp, unidentified
  source 1..352: mol_type = unassigned DNA; note = unclassified Picornavirales sequence
gaattttggaagtaagatcgattttaaactttgtagcctccgcaaagcaaaataagagaagtacccacttgttgcaaccgcaagttgaaataagagtagccatttttgtagcataccgcaaattgaaataagagtagccttttctcaaatacttatttaaaccataaagattgacaaatataaaggattgctgatactgttgtatctataccttcctcaaataacactcctattgtcttcaattgccctcctgaatacgttgagagttttcgctcaattcttttcgtaattagattacctataaccattcttagagttatcaagagatcaatagacgaaatactcgctgaat

SEQ ID NO: 1653 - DNA, 353 bp, unidentified
  source 1..353: mol_type = unassigned DNA; note = unclassified Riboviria sequence
atcttccgtatgatccctcacatgacggaagaatccatagcaacggtaacgttgttggaggaattcttgagggcgctggaaaaggaatcgagaaagagaaggagcaagagtggacacgagaagagcgcaaacaacatgagcagtggcagtctggagagtcatctaaagaacgtggatggcgctctggagaaaacgccgctgatcggcgctctcgtgagagagagaatgaacttgatcgtcaatggcgcaaatggcaatctgaatatgaaaatggacagatagccgagcgccagagacaaaatcaaggatggcaatccggcgagaaccaaaaaggaagggagtgggaatctcga

SEQ ID NO: 1654 - DNA, 354 bp, unidentified
  source 1..354: mol_type = unassigned DNA; note = unclassified RNA viruses ShiM-2016 sequence
caaagcaacatggataccaatgtgtaggaagcattaggcttatagctttgtttaataccggcatcccaaagccaatcttaagataaaaatgagtgtattatcttattatatacaacacttactaattttttaaatttatatttatcagagctgggatatgtttcccagtattgcagaaatgcaattattatagaacataatggtgtttttaattatagtaaatttgtggagcaatccgggaatttaatatctttaaatacaccattagatacaaacgtgcagcaattcacgctaggcgcccctataaacagtacggaagtaccgggagaatcggatgagacttttcacattgct

SEQ ID NO: 1655 - DNA, 354 bp, unidentified
  source 1..354: mol_type = unassigned DNA; note = unclassified RNA viruses ShiM-2016 sequence
gattacatgttttgtgatttatgtgtttgtttaagtgttagtttatgtgttttacgcaccatggctaggggtcacaacaatgggattagagttgtgtcagcagagcccggtccatgagtgtaagcaaccagggttactttggccctatactagtgttcgggttgttaaatataggatactagatcccgagtccttttttaagagtaactcgccttactacgggactttaatgaatgagttgccgatcatcataaaactaaggaggattattaccacgacaatgtgcaagaaacttaccgtttcttgaacaacaatcaaacaacggaagcgacgcgcttagaagtacagacaccc

SEQ ID NO: 1656 - DNA, 355 bp, unidentified
  source 1..355: mol_type = unassigned DNA; note = unclassified Bunyavirales sequence
agacagagtcttccatggtcttactttggcgccttgagatacttttaccttttcataggcactttaatagttgtaccactgcttgtaatggtgtataaggcaataaaaagtttgctcaacttcatgttcaaaaggaaaagagttagggcctgtcatccaaagaaagtttaggctagataactaggtgcgtggcttgattaacacaaagcagccttgagttgataagagtttaattttgatagacaaaggtgaaaactgaattattggtttctatcaaaattactttctttgcttcaaggtggggctgggaattttccctcctcctgtaaaacccttaaaggccaaagaaaacgcc

SEQ ID NO: 1657 - DNA, 356 bp, unidentified
  source 1..356: mol_type = unassigned DNA; note = unclassified Picornavirales sequence
cgctaaacaagttttccgtgcgttcgactaaacgtcggctgggtggacctattaacgataagatcggcgctcatgtgctgattactgataatctcccggataaattaccacttaagtattttgatggtattaatctctcaggaaagaacatccctgggaagtattcatatattaaggtacctacgcgtgcgaatccagagatagctgaccaagagaaagactcacctgaagcattgaaacatcaagatgcgggcggacctgaccagacaactgtcgaccaatcagcacaatcagcaataacaactcagagagatgagtcagcacatgaagtccccgtagttaataaggattctggc

SEQ ID NO: 1658 - DNA, 356 bp, unidentified
  source 1..356: mol_type = unassigned DNA; note = unclassified Picornavirales sequence
tcctttcatttaaaactcattaatttcattatggctcaatggaggatgtgaatctctcatatatggccgcacgtaccatatatgttagataagcactatgaacttagtgttttagatcatcttcacttgtataattattttattatactaaatttgagtcatgttagatttgttgaattatcaaaatagtaaatgtagtgtattctctccaaaggagaactttagtgctatttctttgtaatatccatttattctaggaaagttccgaaagaattgtaacaatagatatacagagtgttttgatatgaaaacaaatttgacaaccccttgtaaccaacagtattattttaggcttt

SEQ ID NO: 1659 - DNA, 357 bp, unidentified
  source 1..357: mol_type = unassigned DNA; note = unclassified Totiviridae sequence
tgaatgaaaagcgcgagcgcggcgtcgtgtcgaccgcttttctgatcctgctggttgctggaccaatacccatcagtagcaggcagggggagtgcctcgagtcacagttaacgtcggctgtgtcacgacggtcagctcctagtaaattgcataggagttcaccctgtgtattcgccctgcggggtggtacactggaaccacggtcccttagcccagggatagcgccgtggggggatcgcatgagggcgtagttagggttctgctattcagacgtacgcacattaagtgtagtaggccgtcatgtggtggtaagcctaccgctggtaccggggtacagcgcctacgacctacaagctc

SEQ ID NO: 1660 - DNA, 357 bp, unidentified
  source 1..357: mol_type = unassigned DNA; note = unclassified Orthohepevirus sequence
tcttttgatgccagtcagagcactatggccgccggccctttcagtctcacctatgccgcctctgctgctgggctggaggtgcgctatgtcgctgccgggcttgaccaccgggcggtttttgcccccggcgtttcaccccggtcagcccctggcgaggtcaccgccttttgttctgccctatacaggtttaatcgcgaggcccagcgcctttcgctcaccggtaatttttggttccatcctgaggggctccttggcccctttgccccgttttcccccgggcatgtttgggagtcggctaatccattctgtggagagagcacactttacacccgcacttggtcggaggttgatgctgtt

SEQ ID NO: 1661 - DNA, 357 bp, unidentified
  source 1..357: mol_type = unassigned DNA; note = unclassified Rhabdoviridae sequence
tccaccctgatctccgaaactccccaagtcagcagccggacatcaaagcaaccagagcaaccccaaaccactcagaaccaacctcactataaaaaatacatatcttttctttctcaacaataacttaagctccgcagctctcaatctctcaaccagaagaagcagctccatctgaccctagtcaacacactccgatttagcaatcaactacacccaaactcaaacaccccgttcaaacagtcctgcaaccgctgcacgcaccaccggaacacatagataggtgcatacttctgcactttagaaaggttaaaaacgctccaagtcaaagaagtcccttaaaacttaatagaagccaaa

SEQ ID NO: 1662 - DNA, 357 bp, Hubei hupolycivirus
  source 1..357: mol_type = genomic DNA
tgtagggcatcatttcggattgtgggttgatgtcctgggcaacggaagccttgagatggtacgaagcatttttggaacatatgaaccctgacatggtgatattgtcgtttgacttcggttaggaccctcatgcggaccagtgaagaaaattcctattggaatgtcctgtacgcccgtctgagaccgtttaccgtggaatgaaagcgaagacttatcatgtaaagattgtgtggaaagaatttgtgggtaacatggttcattagagctccttataaaaaacaaaatgggtttcgacttcccaaacaaaaacataagaaaaataaaatgtagtgtaattagtaatttgcccctaaagag

SEQ ID NO: 1663 - DNA, 357 bp, unidentified
  source 1..357: mol_type = unassigned DNA; note = unclassified Picornavirales sequence
ggccggccgggtagccacaagctacccgacccatgctttaggagtcctttaggtgtattgtatatattaaacttcttgtatattattgtacttatattcgggacggtgatgtcccactcttgtcaacaggcgttgagagaactccattgcggcgttccttgcactgtgaggctgcagactgcacattgcgttgatctttctgtagtagcaaggttactggatgtagtgccagttggaggaaatacctttctagcgtccctaggaaatgttcccccctgggcccaatttggcccgagtctgataggtaattcagaccccttctcgtgtttgagcgtcacgcgagaattcagggaacag

SEQ ID NO: 1664 - DNA, 357 bp, unidentified
  source 1..357: mol_type = unassigned DNA; note = unclassified Picornavirales sequence
atgtgatattcaagaggcattctttcatggtcacccatcacataaggaaatttccaataaacttgtgtgtaaggcttgaaagaatggtcggagtactctatttagagtgaggagctccgctggcagccccagcaaatcctctattggataggaacagctatatcgggtagctatagcagtcgtacagtaacatgtgcggcgttccgaaataccatacctggcgattcaaacaaagaaaacaatactaccaacgtacataacacggagctcgcgtcgagttcccaagaaaacagtgtcgaaacggaacagattacaacctttcatgatgtggaaactccaaataggatcgataccccc

SEQ ID NO: 1665 - DNA, 357 bp, unidentified
  source 1..357: mol_type = unassigned DNA; note = unclassified ssRNA positive-strand viruses sequence
cagctctagcggtctgttattttgtttaaactttttgtttgcaaactagactttgtcgaaccccttgcttacaaaccattaaacaatttatatctcacttactgcccatattagagttagcactttgttaacttacaaagttaaatagacagttgtctatcgcttcgcaaggagcactcaccctctccctcaatcactactaagtgtgcgagagagatccaaatttttaacatttttataacttggttttgtttcatcagtctcacaatattttctgtccgacaaatccaagttattcaaatttataagtttttaaatttttatttttggaaagttgtctgacttcccccggaagcc

SEQ ID NO: 1666 - DNA, 357 bp, unidentified
  source 1..357: mol_type = unassigned DNA; note = unclassified RNA viruses ShiM-2016 sequence
cagggatcgaaaccctgtatatatcttagagagtttagcagtcgcgcattgtaaccaagacgggccggccctcaccaacacgtagtgattctgcggtttggtgttcggtgcagtgtaagtccctacccttgtttatcttgtgatcagagtgtaagtctactcgaccaaagaactcggtttttacataagtttctattccgaatccaaagaaactcaggagtgatcgggctccacgtacagttgcgacactgtgcgtggcgtcgtcaggtagtgtaccttgaaggttatcctagaataatttgcaaatttaggacatttgcacgtctcccaggacgttaaacggttcgaaaagacagt

SEQ ID NO: 1667 - DNA, 357 bp, unidentified
  source 1..357: mol_type = unassigned DNA; note = Changjiang tombus-like virus 5 strain CJLX42586 hypothetical2 sequence
gggtgcctagcgaaggtgtcgggtgtggagacaaacacccccattggtcatgtggagatcgatggtgacgttttgagatggcgtcagacaaataagctggggaggtcaaaagtgcgtgggttgtggacggtgactggcgccgggttccacaacagatatggcgtgcacaatgcgagtaaagccaacttgctgcgaggtgtttatgagagggtgctctaccgtgtggtaggtggagtagcacgcctccctccaagaccctcgggggatgtgttcaatgaacgcttgtccaagtttcgctctgccttggtggcggaaatccctgaaagtctccccataacgcgtgcccactttgtggac

SEQ ID NO: 1668 - DNA, 358 bp, unidentified
  source 1..358: mol_type = unassigned DNA; note = unclassified Orthorubulavirus sequence
taatcagacatgatcatatgccttgcaacagctgtctgctattctaaaagtttcagtaaccaccgatccaattaactggcacccatttaatccatctatttgcctttcttgactcccagctgcacactcctccgggcaactctgccatcttctggcttctatagactcacgatctgcaatccggcccccgccttcctgcatctggcattccaaagtgaggctcgatctcagcatttagaaaaaaccatataggcccgactggcaccacccacccccccgacccaaccgccagccgggaacacaaccccacaccccacagcaagcccacacccgcccaccagcggagacccagcggaga

SEQ ID NO: 1669 - DNA, 358 bp, unidentified
  source 1..358: mol_type = unassigned DNA; note = unclassified Picornavirales sequence
acgtgattatgtgatcttgctatactgaataaataagtgatgtaaaattagtatagtattgctataatcataagaaggtggactatttagtcttacttccaggatgccttgaaagcagccctttcgaaatccaggaaccatcactcgattatacgtcataagtgtcgcgtataatttaaaaactgcacttgccgaaacgaatacgaacgaaaaccctggtacaggtttaaatgttaccaacgatgatgattcgagatataacgaggtaaaacaagttatatcttttaataatcaaggccagacagttgctgatgatgctctagctaaacaaaaagatttgcctcagtcttatttagat

SEQ ID NO: 1670 - DNA, 359 bp, unidentified
  source 1..359: mol_type = unassigned DNA; note = unclassified Blunervirus sequence
cacaaatctgaaccactcacgctggtttgtcacctgtattattcaggtttactaccttcactacttcttcactaccatgcgcttaattgcgtgactacatgcgcttcggcgtgactagcgcttcgtgcgccttccactactgtattatgtaatatatccgtttctttcttcctcagtcaattgtgtcggattgtgattattaccaatcaaaaagcgcggttcctactacttcaccgtgtgttattggtactttttggttaataattacattctgatcaattgacactccctaaaatccaaattctttccctaaaatccaaaagtgagtgctattatacgtattagtactttataatatt

SEQ ID NO: 1671 - DNA, 359 bp, unidentified
  source 1..359: mol_type = unassigned DNA; note = unclassified Picornavirales sequence
tgaatactgcagttaatacagctaggccgacgtgaagtatcataggcggagaagggaaaatccggttatgtaacgtcgttaatataaactcgtgcgttgtgtgtttggcgacatactcaacttaaaacaatgttctttggatggagttcagctaacccctgttaatttcatcgttctggagtagtttaaagtagtgaagacgagtgtatgtgaggattccagcgatggatgaaagtaaggctcccgaaaggtgcaacctcatatgtctcgttgtagtagcgaaatttatgaaactcaaggaatggaccgttgggtaaaaacactcaaaactctctcttttcttatttggtacactacat

SEQ ID NO: 1672 - DNA, 359 bp, unidentified
  source 1..359: mol_type = unassigned DNA; note = unclassified Picornavirales sequence
cacaaattaccttttccccctctactgattggttcactcgttatgactaggactggatgtttacgttacggaatttgcgatttcactgagtttggccagctcggaatggcaattttggcgaatgtgggttattgtgaaacgcaccgaatatactcccgaaaggaggttagtaggggcgtgtagcaccacatagctgagaccacatgcgacagagcagataggagccaggaaatacgcctcatttgttgacaagtgtaccggctctgaatgtgtggggaggggtccccacatgggttctgtactgcctgatagggttgcggctgatcagttgcaatgtggtataatcagttggaattcac

SEQ ID NO: 1673 - DNA, 359 bp, unidentified
  source 1..359: mol_type = unassigned DNA; note = unclassified RNA viruses ShiM-2016 sequence
gtggggcacacagtagttatagtagttatatgccggacccggctggggggccctgtcactccttgacaggcagtgaacgtcactggcttatgcaaaatagcggatgcctgttggaaacatgggctgaaaacacaagaaccaacttagtattggataccactttgtatataattatgaatatactgtatatatacaagtaggcttgctaagtttagacacgtccctcgtggcgatgccatttttatggttgtatggtcgtacattccagtatattcctttctgtggtgataatcatatatcatagggagtagaacttgattgctacaaattcaaattcacagagtagcccactctataac

SEQ ID NO: 1674 - DNA, 360 bp, unidentified
  source 1..360: mol_type = unassigned DNA; note = unclassified Flaviviridae sequence
gttgacagctgcacaatacaattcctaccttgaaggtacgcgtgttctcggacacaaggcgtgcaagtggaccttcggtctgcgaaccccaaagcgttcaaaaacgttcacatcgttccgatctgctgtacaattcgctcttccgtatctaccactctattgatttagtatcactccttgctgttagcctttcaagaaatttagatttactcttacctctttgcacctccactgctccgcagttgtaggtgcactctctcaattcgtagttccgtcttccctaaagatattctacccgcggctcgtttacacctcgtaaaccccgttacgctccttgccacctccctcaaagaggcagtt

SEQ ID NO: 1675 - DNA, 360 bp, unidentified
  source 1..360: mol_type = unassigned DNA; note = unclassified RNA viruses ShiM-2016 sequence
catactgccatagcggaggaaggttgcgcgtgagatatattggatacttatggtttaatagcttgtatctcacaatttattggtggaattaaccatttcatcaaccagtatcatataatgagtgtaatatgatacttaaacgcacttactaatttaaatatttacacatcagagtgggagtatgttctcccacatgcgcataacagcattaatcaagatagtatactatatgcaagtatatcatgtatatcagagcattcatcggtagaatttaatgatacaaaagtcgaggatacgaatgtgttgcgttacgcattgggagaaaccagttataaaactgaggttcctggtaatcgtgac

SEQ ID NO: 1676 - DNA, 360 bp, unidentified
  source 1..360: mol_type = unassigned DNA; note = unclassified RNA viruses ShiM-2016 sequence
ccttgggggtcatctggcaatgccagggttcggatctgtagaaatacagactatggtaatccataggaaattaatctccggagtctgtctggatactgctgagacagatatgtcttaagtaggttaagtgtgctttgccagcacacgtgtcattgtgtgatatacgtgtatagtaacgttggctaacgttaccgtgctagttgttatatgatggcgcccgtgccgacacgagtacattctagtagttcagtatgcttagcatgctgttctgctggtctgtacagatgtcatacacacaaccagggctgggagtagtaactaggaccggtccttaacactgtcaaacagacaggaggactt

SEQ ID NO: 1677 - DNA, 361 bp, unidentified
  source 1..361: mol_type = unassigned DNA; note = unclassified RNA viruses ShiM-2016 sequence
tatagacgtacaacttaaacagttgtcgtactagtatatatttgccgtatcaggtgcgtaaacccgggcggctggcagacgcgaagctccaaacctttagaaaacacaattttaaataaaagttatgtaagatttgtccctatcatttgatcgaactcttaaattagatcatttgagaactccctgtttgtctctattcaaactactatttgagagtagagagattcacatttcttcgttaccctttaacgttaaaagggacattcttaaagcaaatggagtttggcttacgttattgtgcgttaatcttattgctggaattgagctggattgctcttccaagcgtaatgtttgatctacg

SEQ ID NO: 1678 - DNA, 361 bp, unidentified
  source 1..361: mol_type = unassigned DNA; note = unclassified RNA viruses ShiM-2016 sequence
aagaatcaccagcctcggcttcagttatggtggaaaagtcagaccaatccacagagatcttgctccagcaagcgagaataactacatcgctcgagcgtttgatttgtttaatggaatccaagaacttcaaccatatggagtccctgacttcacagaccagtggtccaatacaagggccgaatatagcagcttcttaaggcatgcggaaattagaagtgcgttagaggtccccactattactcaacaacaaaagaacgcactgttgaacatcgctgaggaccgatattctataatcaaacataaaatacaggatgattatcttgatcctgtaaatgtacgggatattatttgtaatttgaat

SEQ ID NO: 1679 - DNA, 362 bp, unidentified
  source 1..362: mol_type = unassigned DNA; note = unclassified RNA viruses ShiM-2016 sequence
ggtagaaggccctgcaaggcctccctctatcttagtgaattgatgagtagatatatgtatgggtgggttgggatacgaatgatccctcccacaacacaccgtaagactacatgttggcacaaacgaccatgcttgcctctgaaacactctgcatgtgatgatgaatcactgttagccaggtggaggttttcaagaagtccgctttgtgttttcacgaatattacgttgagaatccatatgatcgaacacccgcgacaacacatgctcttatgggtacgcattaaaatataacccttctaaaccacattcgtccaaatgtggtccattgacttaggacaaccaaccccccaaaccaacacgcc

SEQ ID NO: 1680 - DNA, 362 bp, unidentified
  source 1..362: mol_type = unassigned DNA; note = unclassified RNA viruses ShiM-2016 sequence
gatcaaagagttcttcaccggagagaagtcgggaagggtataacaagggagcaatgaagaggaaagtggccattgatgccattgataagaatgatggttcagctattgggtcgatggtgattaacgcagatgaagtaacaatgaccatcaacttcaatttctaatggagtgtcccaaaggattcatgtgtctttaccagaggcccagggaatacgagccatcattcctgattgttttattcattgcagttctgctgttcacttgtacaatccttagtgctacacaacaccaaacaataaacaccgacaactcatctgttaagactcagtacatcggcatttctacaggttcgaaatcttaac

SEQ ID NO: 1681 - DNA, 363 bp, Lophuromys jeilongvirus 2
  source 1..363: mol_type = genomic DNA
tgattaaattggataaaagcttagctgcttggttatgagtgatattgtgataaataatgtgatcaattgaagatacttgattactattagtgataaatagattgttgtgtatgtctgtgattactaatgtaactgaattgttgagtttaatcagaccacaaatgctgctatattgccaatgagctattatctcatgactgatgacactatgcgagagattagtcccaacacaattgattgatataatttatttacaatagttctcaaggataattactaagaaaaacttaggcggcaggtcataatccgtcaaaagtttggatgcatgacttctgtctttaagatctgttaaatcatttttta

SEQ ID NO: 1682 - DNA, 363 bp, unidentified
  source 1..363: mol_type = unassigned DNA; note = unclassified Bolenivirus sequence
aaatattcatcactattagtatatacgcatacccatacccgagattataatacggtttctattaggtcgttaaacgagaccaaacagaattttcttgtgcttctttagtctatgttactatcgcataaccagattcaacaactatagtagttcctgagaaaaattccgcgaaaacgcgcacagaaacgttataaaaggtgtagtgtatcctattatacccatagttggtatacagatactagtggtgaaacattcacactcgcgacaaaagttttacattttaaaacaaaaagtaaaaacaggctcgttaataaaacaaacgatcccgctcaaaggaagtttgtttagtctcctctaagcagg

SEQ ID NO: 1683 - DNA, 365 bp, unidentified
  source 1..365: mol_type = unassigned DNA; note = Posavirus 1 isolate Ishi-Ya8/JPN/2015, complete genome.1 sequence
ttcccggtgtaaaaagctgggcgcggtctggctcccgtcgggtggaaaggtccaccaatggctggttgagtgtaagctccggtgctctggttgtcgcaattccagacgtcgtaataacctatattgcatctgactctaatatttgtggccctactgtatctagttcttcttctgctcaatctgactctaaaaaacaaaaactacaaaaaactgcttacaaccttgaagaattctttgatcatgatcttcctgatcctatggtctcttatcgttctaaaatttcaacaagaattcttgaaaatcaaggttgcattcactctgattctcatcttactcctcgtgtgttttcattctctactgttggc

SEQ ID NO: 1684 - DNA, 365 bp, unidentified
  source 1..365: mol_type = unassigned DNA; note = unclassified Picornavirales sequence
ggacctacacaagcgttaattcgcctgttcgtcccacccctttgcggcgcatgccatcgcgtcgcggagctagctccacaccaactgaggcacacgatgatagttactgctctgaggtcctgagtgaatctgaagagagaatggatcatcatgtttctgcgcctgagcgtccctcaaagtccatttttatggaagtacccggcacaggtataaatacgctcaaggatgggttgggtttcggcgaaccttaccctggtaaacaaccgcctactaaccaaacaacatacatgtcgggagactttaaatcacacacacagattgcactgcaagtgcaatcacaagatgagtatgaggagttgttgcaa

SEQ ID NO: 1685 - DNA, 365 bp, unidentified
  source 1..365: mol_type = unassigned DNA; note = unclassified RNA viruses ShiM-2016 sequence
aacttctggttacccagcttaaaggaaatttccagtaaactttaaagtcaaggctttagttctaggtcgaggtgccctatttagggtgaggagcctcggtggcagccccatcaaatcctctattggataggagcagctacattcaggttgatgtagcagttgttaggtaacactagcagcgttccgaaacatccagacctgcccaatccaacagtacgaacaatggccctaacggcccaacgattgatacgacggacgtcaagatcaacacaacccttgcttcctcttcacaagaaaactcccttaaagaaatcgaaatcacagctttccaggatgtggaagcccccgcgcttgccctcactcca

SEQ ID NO: 1686 - DNA, 365 bp, unidentified
  source 1..365: mol_type = unassigned DNA; note = unclassified RNA viruses ShiM-2016 sequence
tgtggattgcttctggctccgttttgttttgacttcgttaatcgaagcttcggatatttccgagacttgactcaaaccggcgttagacgcgattggctggcgtaaccgttactgaggctagaagggacgcgtcctcgcgatcccttcgtttctcatatttggtgcagctgtacacgtccgttttctcttaagtgtaggtgataggatagggtgagaacgcgggcgccacgttttagctttttctaggacgtccccagtggtttaatacctcggagcttcggctctcgggtccttccccccccgggtggtgtagttagttgggtccccagggttgtttcatcagcgcttcgttgtttttaaaaaca

SEQ ID NO: 1687 - DNA, 365 bp, unidentified
  source 1..365: mol_type = unassigned DNA; note = unclassified RNA viruses ShiM-2016 sequence
cgccattactactgtaccaagaaaacttcaaacaaacaacaactgcgacaaccctaactaatgtaaccgaaaccaccaatgcactcgaacgcggcaacgcatcgaacgtaaatccgtatctgcactcaacactcaaaaagacaccaattccaaacgatagattaggaacatatatatctggaccacagttaggtgatgcacgcattacaactggtttggtatacccactatcatttcaaaaaatatgggctaaattattttacagtttttacaaagtaaacaacaattcatactacggattagatcgtttcattcatcaattaagtaacggataccttaatgttacaggaacagaagatgatttc

SEQ ID NO: 1688 - DNA, 366 bp, unidentified
  source 1..366: mol_type = unassigned DNA; note = unclassified Omegatetravirus sequence
tttctctctcttaccaagtgcggtaaaacaaacaaagaaaggaaatcgagtgacaacggcctctacacacctcacgtccgtgaccaccggattatacgtcgcccgcgcacggcgccttttccgaccactcgtgagagtcgctggacagctgtccgtgaccacccgattgcagtcaaattactgctttcggaccactaagtttgtcctcgaacgacatacattcgttcacacactgtcttagcgagacctaaactcgccttgatagacagctcatgacagatcgttgccggcgcatctgtttcatctacctcctggctattccgttgctattatccctcccgagcaagacggctgggaacttttaga

SEQ ID NO: 1689 - DNA, 366 bp, unidentified
  source 1..366: mol_type = unassigned DNA; note = unclassified ssRNA viruses sequence
ataacgttgagaacgtgtgtgggaatgcctttcctagactagcttgcttggtaaaaaggtaagacccatgagggtcatatttgattttgttggttccgcttttggaatttggactgttcatgtgtgtacagtgagttcatcgacacatgtttttgaggaacgcctgaattggttttcaggggtgtatcagccccctcatgagtgggtttatcccactctttgggagcttttgcagcgtgtgtgtgatgaactaaatgagcagatcttatggaaccatgatgagggcgacatagacatacaacaagaggtgtgggttgaccctgaggagtttttgaattaggctcttgagttgcggcaagctctcaa

SEQ ID NO: 1690 - DNA, 366 bp, unidentified
  source 1..366: mol_type = unassigned DNA; note = unclassified RNA viruses ShiM-2016 sequence
gggagcttggtcaaacgaccaataacatgcacaggagttcatagtttagagttgaagcaccacacttggtgtgagtgctcctcgaacaagaattttaagcttcgtgttgttggcctgaccgagctcccttgcgattgcagggggtttaaggaggttgtgcacttaccccttgcaatcaagaattgtagtgagtggttctaccactgcaattgcgtgcacaatatagtcagcgcgttggtgggtcgcgttgctttgtgcgttccgtcacccaccactcatcgaattgagcaactttcaaagatatcacagtctttggctcgatcactggggcatgttctccctattagccaggaccaggttattagg

SEQ ID NO: 1691 - DNA, 366 bp, unidentified
  source 1..366: mol_type = unassigned DNA; note = unclassified Riboviria sequence
gtaacactcaactgtatacccgcgacgcgtacgggtcaacttacgctaacccttcttcaccagactacactgtcaggtttaaaacccaaaaggcagttaaaaccattaacggcatccgagtgacgaacttcgtcacagagatcatcgtcaatgatctggtgggcgttgatgtcaaaggcacgagtgccgttgataacattgccatccgcatacgggtgtcgggagccgctgaggcccatgatcgcgtgaaagcgattctgaaagccttagccacccaacttcccaattggtgcgacgagaacacgttcctcggttttgaaccgaagacgcttccttccgtcgtgagctgataagaggtccaataag

SEQ ID NO: 1692 - DNA, 367 bp, unidentified
  source 1..367: mol_type = unassigned DNA; note = unclassified viruses sequence
tttctctggttacccagctcataggaaaatgtcttttaactattgagtcaaggcttagaaattagaatggagggtcctatttaggatgaggtcctccggtggcagccccaccaaaacctccaaagactaggaacagctatatcgggttgctatagcagcatcaaatttatttgatgcgttccgaaacaccaaacctgctgataatcaaacgaacaacgagcaaacttctaccctcacaaatacaggacttagcacgacttcagaagaaaataacatcgaaacggtccaaatcacgacctttcatgatgtggaaactccaaataggtacactaccccgctggtgcagaacactgcagcaactagccgt

SEQ ID NO: 1693 - DNA, 367 bp, unidentified
  source 1..367: mol_type = unassigned DNA; note = unclassified viruses sequence
gatctccggtctggtgagaccttaaaccaccaatcaggccaatggccttcagcttagcctggcataatcgcactcgaccgtaagctgaacgaaccaaaaccggatgagtgagtgcaactcatctggacgactcatgtaccagcttgacacagctaagtacatgtaaggaaaatgtgtctctaaaaatcaaactcaaaataactatgattttgaacagttatcacaaactgttgaactcacggacattgacaacactaatgttgtgtctgcgcagtccccagaagtggaactctcttctggtgacccttttccagatataactcccacttcctttctctcacgccctgtgaagataggaacccatgtg

SEQ ID NO: 1694 - DNA, 367 bp, unidentified
  source 1..367: mol_type = unassigned DNA; note = unclassified ssRNA viruses sequence
gcccgctgtagctcggcggcattagggagttcagggtttccatatggggatttgtctgtcacacctttgataaagaaacagaatggccgcaccacatgttcgttagtatgtagctcacgcgggttggttacctaaaaccctctgcctagttggatgaaaaccagtaaggcatatatttacaaaaatgaacatctgagtgggatctcagtataactcttccccctgtccgtgggtccacggtcgatggtatgattgggggtgatgcaccatctaaacgcaagtgcagtgcggttcagtctcgcgcggcttgtcagccccccccaacccgggttcagagaccggtcttattctatttagtggtcacaac

SEQ ID NO: 1695 - DNA, 368 bp, unidentified
  source 1..368: mol_type = unassigned DNA; note = unclassified Picornavirales sequence
ttttgattactcccgaggtggttagcaacacatttgcaggtgttgttctaaaaaataatgcaaaaagcgaagagaaccttacagcagtggttcaaattcaaaaagaattcttagcagcagctgaattcgaaaacgaagaactcgttacagcagtcgagtgtggaagtggagctagtagcagcagcgctagcagcattgggtttacagaagtgcctgaggaaagtagtgaggaagaagaagaagagcttacagccgtgctcaccgaaaccagtgattttgatgaaatcgaagaaatcatagttggtaaacatcattacaaccaacgcccccgcaattcatatgtcgatgacttgtcctttgtgaacagc

SEQ ID NO: 1696 - DNA, 368 bp, unidentified
  source 1..368: mol_type = unassigned DNA; note = unclassified Riboviria sequence
cgccgaatagacgtcatgctctacgtttccagatttctggagatgtattgtgctacgcctacgtaggtgcgttcccttcccaactccccctgctcattagagcgggcttgttgggaaaacgccgtagggacatcgattctcgtttgaggctaggcctcaaacgcgatgttctagcggtatccgatttaacaagcaaccgtctcgcggttgcttcgcagatctggtctggtatcattgcatgtaccgccggatctggcttcgtctcccttcgccttgacaaggctcaaggaagagaagctattcatggtctcgcgagactagctttgtggctagtctcgaccattcgaaactctggcgcaactcacgtc

SEQ ID NO: 1697 - DNA, 369 bp, unidentified
  source 1..369: mol_type = unassigned DNA; note = unclassified Hypovirus sequence
gggggttagagaaatcttgggagatttctatcgtcatagacatatgtgatgtacttacgtctctaggacgcctatgactggtttatactctgtcgagttgaacgtctggtggttcctacgtataagaactgcagtcttatgtgtgaaaccctacccctcgctaaccgagaacggttgtgtgatttgaggaacgttcgctgtttaaacttctttggaggaactttaaattgtattaattttgcatttgcaagagttagcccatctctaaaatgaggctatcgctgtgaacagccttaaagaccctctgggcaaactgattatgaattgagagttagacttctcagaaaaagtctggtcttgtcctagatt

SEQ ID NO: 1698 - DNA, 369 bp, unidentified
  source 1..369: mol_type = unassigned DNA; note = unclassified Picornavirales sequence
tgcggtttactggtttatgtttatcattttaaagtattaaacaacgtaatggcttcatcagcaaaaactaacgaacaagctttagggactacagtagcagcacatggcactagtggccaagtgttagctgaaccaagtccaattgatcaacaaattcatgataaccctggtacgattaaggcgtcgactgcaattgaaactcttttcaaccttttgttcaaagattatatttttaaaggattgtataccatctctactgatatggctcccggacaaatcatttggaaattacctattcatccagcagtttgtaatcaatataatgatcacgtaagaaaaatgtttaatgtttggacaggaggaatgaaa

SEQ ID NO: 1699 - DNA, 369 bp, unidentified
  source 1..369: mol_type = unassigned DNA; note = unclassified RNA viruses ShiM-2016 sequence
agcctatgtgaaatagttggttttggcttaccaactagcgccactgtaatacgcgccgcacagtcagcttctgtaaataatgtaaatactgtcatcgccgagggtcaacaggttaccccggctgataaagacactaacctgacccacttcgaagatcttaacactggcggagacgccaagatctcggaggtagccattgccagttctggcaagtatactgagtccgctctgggggattggtttaagagacccatccttataagggaatttgtgtggcccgaggacactttgctccttgactcatttgacccttatttgctgtatttctcacatagtacaattaaaccgaaattgcatgggtatagtcga

SEQ ID NO: 1700 - DNA, 370 bp, Alphamesonivirus 2
  source 1..370: mol_type = genomic DNA
actaaagaaaattttgttttctcccataatactactactacaagtatcaaccccgtccgtctgctagagacgctaaactctagcaccaaaaatctagccacatcagttgcttaaagaaccccttgagacactctcccacttaacatcttttaggaatcttcgatgctacaacaacttggctagtaataacagcaaatccatatatttcaacagttataagaggctttatgtccttactttgaaagatttgtttactattgtcacgattactttaattaacagaggctatatttagtgctcagcacgttaacgaaagcatttgtacaatagtatgagtttgttgtaaattgtcttgatacgacaccctatc

SEQ ID NO: 1701 - DNA, 370 bp, unidentified
  source 1..370: mol_type = unassigned DNA; note = unclassified Riboviria sequence
cataagtacctatattcagcgccccggagcatcagttccgaagaatcgataacgattatccagagcattagctacaaaacgccttacaaagtaagaagacacgatacgataacgttgagtgtatgcgaacacaaagagacgaatacttgtggcatttaaagctgataacagctttacgtggcaagattccgcgtgaggagttgagggagataattataaaatatcaagtacattttaaaataaccccatcaatatatagcagtcataataggaatatagttagacctaagttagaagaatactataggatagcatattaggataagttagattataattagtggaactttccacctaatctacctccact

SEQ ID NO: 1702 - DNA, 370 bp, unidentified
  source 1..370: mol_type = unassigned DNA; note = unclassified RNA viruses ShiM-2016 sequence
cgatgggccggtgcttaccccgccaccatccaagtgcccggaggtcacatgcttgacctacgaatgccccaaaccccgggcacttacctcctatcccttcaacgagctgctgcaagccgcttcgcagcgattgtggtcagacgcccagagcgtctgttcccgcttttgcgcgaagggggtagaggcctcagctattttgctgaggcaaattcgagaatgggcctccaagaccgcgtttgcagtcttgagtatactcctgtattgtgtcaccttcgtatgttgggggacgctttatggcccgtggctactcgtctcgacctacccggccgagaccctcaccgcatgcttattggccctttgcgtgcgcttt

SEQ ID NO: 1703 - DNA, 370 bp, unidentified
  source 1..370: mol_type = unassigned DNA; note = unclassified RNA viruses ShiM-2016 sequence
tccgatctctcgtcgattggcagtacgatgttggagatgtaatctccaattatgcgtccttccaaggcgacggccttgtccttcgttatggctatctgatggacaccacaaggtgggacatcagtgtgtcgacgaagaacccgggtatccggggtcttccgtccacgttcgacgctcactggtggagaatccagaagcgtagaacgcgatcgactccatacggatttggctctaatcctggtgaattctcatcaggtcagtgggccattttggccgctcttggtatgaccaagacgccaagatcgctgcgataactttgtcgctccgatttacaactgaattaacaatttaataaacgaaggacaatgct

SEQ ID NO: 1704 - DNA, 371 bp, Odonate anphevirus
  source 1..371: mol_type = genomic DNA
aaatgaatactaatgtatatcatatgataagtattactacaactcatttcccgaaaattcaggatttttacgagttgaacgtggaatacttcaatttaataagagaaaaatatgatgcatacaagggagataaaaattctcctgaattctttgcatcaatcgacaatcaaaaacttctcttattaattgaagtatgtaactacataaattcaagacatggattattccaggtgccaatattactgttgactccacagtcaacattgaacgcatattggcagaagatcgtaaaaggcgatccaacatccctgcaagatctagttcgattttattcagctaaataatgagaaaaacccgtaagagtcaggaag

SEQ ID NO: 1705 - DNA, 371 bp, unidentified
  source 1..371: mol_type = unassigned DNA; note = unclassified Picornavirales sequence
atagttacataaattcatattcctatgccacaaatttaaaacaaaaaattcttgcacggttaagtggctcgtgcctacatatttccaaggagccttgattcttggagtgacccttgaggtccctgcatatagtgtgatggtgtagtataacaaatctggtaataaatatctccaggttttgcttgctgtaaagtacctagtgtctggctcatgcaagcacacgggaatcccgtggttgctatttcttcatattatatgtagcctgtgtaagatcaggtcgattggtggcggtaccaccctaggtgactgagttgtgtcacacctgggaactgaggttaatcagaacaatcttaaactcttatcttttcact

SEQ ID NO: 1706 - DNA, 371 bp, unidentified
  source 1..371: mol_type = unassigned DNA; note = unclassified Riboviria sequence
gtaaaactcaacttttatcacgcgatgcatacggcgttacatatgcagatcccaacgaccccgactttactgtgcgcttcaaaaccgcacctaaagcaaagagtcttaatggggctcgcaccactaactatgtcacagaaattatcgtaaacgataatgtggctgtaacagttggtgggcaagcggcggtagatgcagtatcattacgtatacgcacctccggcacccgcgagtctatgccgcgcctgaaggcgatgctgaaaagtgttgcctcccagtgcgaaacatgggctgacgataacgttctattaggttttgaacctcctgtagggaatgaacccgacgttgttgtttaacgggagtaaacgaaa

SEQ ID NO: 1707 - DNA, 372 bp, Menangle pararubulavirus
  source 1..372: mol_type = genomic DNA
ctcagaattatctgaacatctacatcaccaacttctaacccaataaatttactgtgtggtcatcctgcaggactcacttgctattgccaccctacaagtaaaagccaattcaacaaatgcattgctttaccgcacatcaactgacctggcacttcaaattcaaggaccccgccacagcgcatgacagcagccccgaggcaaccccctccccacaacccactacacaattcctctcccatcacccaatcccctgctagtttaataaaaaattagagaggtgaaatgcacacacacaacgaccggaaaggagcacgaacaggtgcacccacacaccaccccacagcgaccaacccgccagccatccaaagcatc

SEQ ID NO: 1708 - DNA, 372 bp, unidentified
  source 1..372: mol_type = unassigned DNA; note = unclassified Orthorubulavirus sequence
gaaatctatcacaagtctatatatgtccacaattgacccttaagaaccaacttccaacgattatccgttaaatttaagtataatagtttaaaaattaacattaagcctccagataccaatgaatatgaatatatctcttagaaaacctgattattatgtgatagcgtagtacaatttaagaaaaaacctaaaataagcacgaacccttaaggtgtcgtaacgtctcgtgacaccgggttcagttcaaatatcgacctctaacccaatttaacacccattcttatataagaacacagtataatttaatcacaaaagacctcaaaaactgacacagcttgatccactcaacatataattgtaagattaataata

SEQ ID NO: 1709 - DNA, 372 bp, unidentified
  source 1..372: mol_type = unassigned DNA; note = Human parainfluenza virus 1, complete genome.2 sequence
gtctacactcctcaataatgacacccattagctctaaatcgtaccattaatcaaatacagatcaattcgatacaatcagttcaaataagaaaaacgtagggacaaagtcctctaccaacatcaaggaagacaagagtctcaaaaagctcagcctaagcagagagaaaaacaacaacacaaagaaagaaaaggacaagatcacaaacaagaacaaaagcaaaaacaaaaacaagaacaaaaaagggaagaaaaacaaaagtatacacaaaaaccaaaaaagaaaaaaggccagagacaaaaacggaggcaagaacaaaaatttaaacaaaaacagaatttaaattcataataaacaccaagatagagacaaaa

SEQ ID NO: 1710 - DNA, 372 bp, unidentified
  source 1..372: mol_type = unassigned DNA; note = unclassified Picornavirales sequence
agtttagttttcacatttaaatttgtaaagactgaatttcactctgggagacttgctttctgtttcttcccccaggaaggatacgataatcctaacgcgcctgttccctcttatgcgaattctaattatgttcatagagaaattgtagatattaggttatgtaatgaagttacatttactataccattcatttcctcctcaccatggagacctactgacaacacaagttatgctagtcacaccggatatttatcagtgtatgtagttgaccaactggttgctccatctggagtatctacaacagttactattcttaaagaaatttctgctggaccagattatgaagtagcactgcctaaatcaataaattat

SEQ ID NO: 1711 - DNA, 372 bp, unidentified
  source 1..372: mol_type = unassigned DNA; note = unclassified RNA viruses ShiM-2016 sequence
ccctggggcccgcccacgcgcaacaagcaagtgcagctggaggccggcttgtatgcagccctgcgactggaagccgcctttaacaacaggcgaaacggggcactcccactccagctcaaggcaaaggcgattaggcaccttgccgcgtacgacactagcgcttattctccgctagagttgacggatttgatcctcaacacggtcgtagccgccatgcgtcctagtggtcccgaacacctcctagcctcgatgttcggcaaccatcgcttccaaaaggagctcgcccgccttgaccctctttataaactagcttgaagaggccctgctaggcttgacgccacctgcgtgaagggcacccccctggggcccctc

SEQ ID NO: 1712 - DNA, 373 bp, unidentified
  source 1..373: mol_type = unassigned DNA; note = unclassified Narnavirus sequence
aaataagacataaggcagttcctatctcaatatctccaaaactaagaaacctacatcaagactcgctccggcaatcaagaagctcaaataccaacgttatattcttcaatcatcaataagcaatcaaacttgtttatccatcatcaagcatcagtaataatgtcaggaataccatctgagtttggaattggtgttgatatgagcaaaacgattgaaaacatgaagaaacttcaaactgccatggaaaacgacccaaattttgatccttcattgttcgatgacaagaaacctgataagaaagtgaagggtaaaggtcctatttccgacttctttcgacaatctggcgactttgttactgaaactcctatgggta

SEQ ID NO: 1713 - DNA, 373 bp, unidentified
  source 1..373: mol_type = unassigned DNA; note = unclassified RNA viruses ShiM-2016 sequence
tgaaaataaagcgctcacaattgagaacaaatatttcaaacaaattatattgaaaatttaatttaaaattttattaaaagtcttttaacagaaaggggtattttagtattgaggtattattttacgttgagtaattaaaagcagtataaatctttacttttggctagtagtgctgcggcatattaatcaagagaaagttagatcttgtcatttggtataaaatcgaggttttatattaaaccaatttctagtaaaaatccttacgaggtagttattattaaactaaaaataaattagcaaaatccttctacttgaaaaacactgtgaagtaaggtaaggtaaaacaaaattaaaataaaacaaattatataaa

SEQ ID NO: 1714 - DNA, 374 bp, unidentified
  source 1..374: mol_type = unassigned DNA; note = unclassified Picobirnavirus sequence
gtaagaacagagaagtgaaggtaacgaagtcaccttcagaacagacaaacggagcctcaaagccgcagcagaagcagcagcggcgttcgagacccacaaagaaatcgttcaaagaaagagcgaaattcaacgttgacagatcacttactgaccagtcagcaacagaagtaagcgaaacactgtctaacaaaccgacatcctcttcggttttcttcccgagccataaggcatctgctctcagtgccgggaattttattgagtccgcaggtcaggaaaactttgttgaagatttttctcgagtaaaagagaaatacagaccaggacacacgttcagtattcgggctaatacacaggcaaagcgtactccaaacgct

SEQ ID NO: 1715 - DNA, 374 bp, unidentified
  source 1..374: mol_type = unassigned DNA; note = unclassified Tobamovirus sequence
ttgtacttcgaattatctataacttactgaaatttttgttttgttttgttcgttttgttttgatttaatatttgaattatgagaataattttgtcattcgcgattttatgatccaaacttgaccacctgggtgatcacgattcgggtgcagggaatgaaacgctttccagcgcgtgtagttttgaaagtttacttgttgttatgatgtgctggactaaattaataagcacacattgtggtttgtgacggtcaaccataaatactaagattgacctaatgacgtagtcagatggcgaaattaattggtataggttttgagtatctattaggtcaatcatcgcatttcttatacaattttgcttttatttagaatc

SEQ ID NO: 1716 - DNA, 374 bp, unidentified
  source 1..374: mol_type = unassigned DNA; note = unclassified Mivirus sequence
agtgaagcagagcggcacgcgggctcaggaaaaagcgcctggcttccctccacctcgctctcactggaggtagaccaaacatggccctccatgagccaagcagcctattatcaacccgtatatatcatttatgtttgtatatcttatgaggacgggtgccgttatgtactctgaagggccctcactcctccatgacggcctctctattagattttttcgccccgggaacacaggaacgagggcgttcagctattagatgagaagatcatggaggcatgtatccaaaattgtatcctcatctagccctattgtaatcctcttctcagggcaacgtttttctctgtttgtattaaaaaggatgatggaacgataca

SEQ ID NO: 1717 - DNA, 375 bp, unidentified
  source 1..375: mol_type = unassigned DNA; note = unclassified Partitiviridae sequence
caatgcgtatgtcgcccgatggggaaatccgaagaggcggtatatctgcagtatcatgggaactttgttccatgctaatgcacgtgtattctaagattttccggtttgcttggatagtattaatcaatactacttttataacctaagccggatatattaacaaagagagacttatgtcaccttggttcgcatctgctattgtccgtattctaattgcagtcgttgagatcatatcaaaagcgcctttaaaatagaactatgagacgactaattcgacaagtttactattggttgcgttatcgctacccttggtaataattttgattcgttctcctctttgacgtgattacctatttatttaacaaggattataaa

SEQ ID NO: 1718 - DNA, 375 bp, unidentified
  source 1..375: mol_type = unassigned DNA; note = unclassified Picornavirales sequence
gaagctgagtccttgacaagacgttaaactgtcgctagatgagtgtgatcttgcaaaactatataaaatccaaagtttcaaaagttttgtattgctgctcatcagttggtagggtcctatttaggattactgctcaaggtcctacgaaggcgtccccttcaatagcctagagcgctttggtacggtctcatttatgggtttatatgagtacttaaattttaacctgcttcaaactctaatattaaagtaggtggggaaactactataaaagcccaaaacagtatgcaagaagacgtcacttctggcaagttatctgatgaagttcaggaaactactgtttttaaaactgacgctaatattgtcaaagcttctatg

SEQ ID NO: 1719 - DNA, 375 bp, unidentified
  source 1..375: mol_type = unassigned DNA; note = unclassified RNA viruses ShiM-2016 sequence
tttttctgcaactataaagaaattatcgtgacgaccgccgctgttggcggagtcactgccatttgcgtcttagcttataagcgtgaatggtttgtttcaaaggatgccgtttatgctaaaatactcactgtatttagtacgaacgtgcagccggattatagggaaactgttcgccttgttcgctatacgccgctgaaagtgggtggagctcattcacaccccgatgctgcagctgggcgcacaagcgcaaacattttcatcgataaagtgtgtgcgagcataggtcatatcccgttctccctttcgagttcgaatcgtgatgtcagagctggaaatgacggatgccgcaatttttatttcagtaaggatttgacc

SEQ ID NO: 1720 - DNA, 377 bp, unidentified
  source 1..377: mol_type = unassigned DNA; note = unclassified Morbillivirus sequence
gcactgaccatatgatccactgtaataagtccaatgaaagtatcaattaataatattggtagtgcaatgagtattgattgtataatatactcctttaaactagatagtgataaagggttatagatgatttcagttattttaatataatcatatattgattttattatcttacatgactattatgtaattgaattatgtgtcatcaattaatagcttaataatatcgtttaatgtacttatattgatggatagatgtgttatattgtaatcaaggatttagtatttagaaaaggaaagagtttaatttgttgttaattagttattgtgtattcaattagaaaaaacttaggaatccatgttaataaaaatttattatc

SEQ ID NO: 1721 - DNA, 377 bp, unidentified
  source 1..377: mol_type = unassigned DNA; note = unclassified RNA viruses ShiM-2016 sequence
tagcacctaggggaagaactcttttgttcttcctctatgtagtgtagaataatatataccagttataacatgtagactcacatggctagggaacttctacacttgaaatacatcgtggagtctcacgaaaactactgcacattgtggcgttatgtgtggtttttaattttaatgccagtaaatctcgcgataataatgatacaaattcttctctggatagctcattatccaattttaacaatgagcaactttctagctcagaggcagttggctctgacaacaacacgacgacgatcgagagtcatctatcagatattgtactccgcaccatatcgagaacagacccaatttataactcactccccaaaccatatggt

SEQ ID NO: 1722 - DNA, 378 bp, unidentified
  source 1..378: mol_type = unassigned DNA; note = unclassified Hypovirus sequence
gggtgtagagaactcctggggagttcaatcgtaatagacatgtgtgatgtacttacgtctctaggacgcctattactggtttatactctgtcgagtttgctaggatatggtggttctacgtaaagaagctacagttctttatggacacactctaccccactttggacctctttaaaggtcaactttctttaaatttcttatttgttaaccctgatgggtgttcatttctatgcctggagcaacgttaagctggagtgaaaggcccgtgtgcctgaaacgtgagctgataacgagagtcagcgaaagagaaatcccgacgaagggtaaattttagattttaagttggagactgcgacagactgcagacacttggtcaaa

SEQ ID NO: 1723 - DNA, 378 bp, unidentified
  source 1..378: mol_type = unassigned DNA; note = unclassified Astroviridae sequence
caaaacaattttaaaaattcaggactttttggacaatgccggtatggaatatcccatacttacggatgtgaattaccaggccttatggggcttataattatggtaaccaaaatattttatgtgcttaacgtgcgctatactcatgttcggaaaatcagtcaaagacgaagaagaagcaaaaagagtgctaggacaagttttaactgacgaagaaaccttgggactgttcatactatcttgtattgaacagcaagagttagaaacagaagtagtaaataaagaaggagacgaagttgactgttggttggtacccatagtcactgcactaactgcttttatacctctagctcaggatataattagatactttatatcaaa

SEQ ID NO: 1724 - DNA, 378 bp, unidentified
  source 1..378: mol_type = unassigned DNA; note = Barns Ness breadcrumb sponge aquatic picorna-like virus 3 isolate2 sequence
acctgtgatatgtctttaaaagatcagctcagttttaaatctgagttctacggaatagcaaaattaatgtgtgtatttggttaccatgtgattatacatttttatattattattttattgttatataggctttgcacatatgaataaacttaggtttaccctatttagggaggcgtcgttcaccaatgtaaataatgtcacccatagagttgagtcactctttgggattgtaaataccgacttactaattttaaaacacaaaataaaaacaaaaattctttacagaagtccaagaggcttcttcaacgggaaattgatctcaactatcatgttgtttttgataaaggtttcccaaccgtcttccaaattttgacgaat

SEQ ID NO: 1725 - DNA, 378 bp, unidentified
  source 1..378: mol_type = unassigned DNA; note = unclassified RNA viruses ShiM-2016 sequence
tcttaaaaacgtatatatagtttcgttaagagtttttacaactcttctcagaaactacgagcttggtttttataaccagctcaaaacgatcagtccggatagacttttcgtctcacacttgtgtttttacagcacaaaatttgtttctcgatttctcaaatcgactaagattttatatcttaggttgcaccgcaaacataaaacggtagttcatttattgaacgaaacagtgttaaagttcacttacaaaactcttaggattttatatcttaaggtcgtcccgacgaacataatcggaaaagtgttaaagttcactcacaaaactcatagaattttatattctgtggtcgtactctcgaacataaagagcgtttcacg

SEQ ID NO: 1726 - DNA, 378 bp, unidentified
  source 1..378: mol_type = unassigned DNA; note = unclassified RNA viruses ShiM-2016 sequence
aaattggaactatgaatttaataaatacagctgagaagattaagaaattttataataataaattaagttacttatatatcaaattcaggaaaatggagttcccaaaattctatatggatttccagacagcgactcactttaaacctagaggaggcattcaatatttagatgaagcgaaaagagaaatgtattcgatatcttttgatactaaaggggactatgaaacggttagaaaatatcttcagcaaagccaaataaccggagcaagatttgcagcacttttgaaaggacaggaaagaattattggaaatggtcaacccgaaattttaacagataactatcaagctcaatatattaaaatttaaacaaataaataaa

SEQ ID NO: 1727 - DNA, 378 bp, unidentified
  source 1..378: mol_type = unassigned DNA; note = unclassified Riboviria sequence
cttaactcggagatgagaggagttgacggcactgcatcgaatttctgatccgtcgtctctggttagcgacgctataggtataaagtccagcactttcttgcatgggactcgtgccacttccatgtgggattcgcccaattcgggcggcactaatctgctaagagctcccttaacggtctgctcttcagcatcgggcatatttattaatgcacgacgggctgaatcgcctaactcccgtagatacacatctccgacccaagaggggctagagaacctgggaactccacagatcttctaggttctctagcccctctttagttagggggagcagcccttgtttttgttctattcttttctcgttcgtataaaataaaaact

SEQ ID NO: 1728 - DNA, 378 bp, unidentified
  source 1..378: mol_type = unassigned DNA; note = unclassified RNA viruses ShiM-2016 sequence
gacttattaagacacaaggatatccgtacattgtggtcacgaccgggggttgtcaagttcatggcgataaagcttggcgggataccctggcccatttggaggaggtggcaaatcattagtaattagtagattagtgtgcaatacgtttcgctgacggctagaacccgttgcttcggaaagcgcacatcgaacgtggaaaagacaagccacccggcctcacgcagatgcgggttgggcacaccacaatgtaggtacctgcgattcgcaagtgggtgcgcggcggcaaccttcagggcaacctgttgattgcgggacctggcgaggaacgctgactggaggggaaagacctaccaacccaaaagcaaacacacatacaca

SEQ ID NO: 1729 - DNA, 379 bp, unidentified
  source 1..379: mol_type = unassigned DNA; note = unclassified Hepacivirus sequence
cagggtttcgaccctggcccggatacctatcgccttacgccgaaaggtaacgagtaggagtcgggtccccaggcccttaccgccaccaagccaggtggggaggtatgggagccggggggtgcagctggtagctccatgggggacgccccgtgagcggatgctgcatcgataccgggttagctctctgggagagcggcacttgacaccacgaatccgggaaccggacaatcgccggcgtgggacgcgttgcctccgtggccgagcaatttggcatgcccgtggtgaagagtgatggtgggggggggccccccttccagtaccgtactgcctgatagggtcttgcctcaagcccagagagtcgaggctgaaaaccgccatc

SEQ ID NO: 1730 - DNA, 379 bp, unidentified
  source 1..379: mol_type = unassigned DNA; note = unclassified RNA viruses ShiM-2016 sequence
gtaggggataaccctaccataatatagtgtgatgatttagtcatctctattgattcacgcttgtaaaaagtcgtgttatgcacgacttcccgttgatcgggtttcacagagtttatgactcttaaagaattttctatgcgtgcactgccatagtgtgtatatgtctcccttgttcaacaaatgttggacatgttacaacgtcaggagaggaagaacgtttgccgggttaccacgggagtttgccgacactccgcagtacccaatggctttcgggattagccaaactggcttttcccttttgtaggatgccgtggcgggcctccgattcgcgtgtgtttgattcggcgcacgcgtcttatctcaatggattgcttcactt

SEQ ID NO: 1731 - DNA, 380 bp, unidentified
  source 1..380: mol_type = unassigned DNA; note = unclassified RNA viruses ShiM-2016 sequence
ggagtctgactcacgctggtgagcagtagagcatgttggaagaaacctgaaagccccgttggctgatggtaatggaccgggcgaagtccttaaactcaccattgggtctcacaatataaactacccaaaacggtgaccaatcctgtggcgtcgatcagccgtctgatttcttcggaataagatgtgtagctgaggtcagcaggtcgggtcttaatacttccgtgctaagtgtgttgaacctgtagcggtaaccccccctcctaaagtcggcgaagggtacttcgaaagtttggcactaaatgccgagagactacacgggtaggcggcgcgtgtaggaagacagagaggtctggactggcgatatatgccaggcttcttgg

SEQ ID NO: 1732 - DNA, 381 bp, unidentified
  source 1..381: mol_type = unassigned DNA; note = unclassified Rubivirus sequence
gaagggggttagaggacgcggcgcgatgatacccctggccatccggctgctcatctgttccgtggccctcgttctgtgtcagctgctgcgtctcacccctgaacagctgcaggcgcttgagaatttcctccaggcgatcggtgtgcccggctgcgtgttggcgctgtttcacaaccgcaccgcatgatctgggccgctctcctcctttggctgctcgcctgtgtgcttagcgccaccgtcgccagagtcacagcggtcctgttcctcgggcttgccgcgctgtacgtgctggcccgaccgtacggatcgcccctctgcaggttgttcgagctcttatgaactccgtctccaatctggtcagcggcctcatcggggtgggaa

SEQ ID NO: 1733 - DNA, 381 bp, unidentified
  source 1..381: mol_type = unassigned DNA; note = unclassified Mononegavirales sequence
gtgacagtcaccttaacctcgcaaaatcttagaaaataaatccttctgaaaaactcttgagttcataattatacctaggcttaccggattatgggtgcatggttgatacttttccgcactagtattattcttgaactcgtgcaagtctgtttcgagattactaaagggctggttttatcacaagcagaaaaagaaacgcttaaagaagaacgcaagataatcaaggaaaagatcctcacttcgttgccacctagtataagagattctgctacgcattcgtcttaaggaaaaaccgagttcacaattcaatctattacaaatcactaaagctcatcttaagtgccttatttcctctgtttttcttccctcgtacgtgtcttc

SEQ ID NO: 1734 - DNA, 381 bp, Hermit mivirus
  source 1..381: mol_type = genomic DNA
agcacttgagtagacaaatgtcaaaaccaagcgctgaacactttctaagagaaatcatccgtcttgaagcggagtctcgctccatgatggaagattcgtacaaggattctcctgcggtgattttctgtcaacagcactttggtcctggtcggggtctttgcgcctgtgtattcctacgggtagccggagttcccctcctggactgtgtggccatgggggatgttgagaggtatagccttgaggcacaggagttgatcggaagaccattcgcatggaggagtgattgtccaaggtgtggaagggagtaccactgccccagccagtgagtagacccagtaaagatagctgtttaaaaagcattcttatctgatttctctctgc

SEQ ID NO: 1735 - DNA, 382 bp, unidentified
  source 1..382: mol_type = unassigned DNA; note = unclassified Riboviria sequence
ggaaccggctttcctctgattcaagaaagcgcagtgtgtgtaaagcaatagtgcgtgcaagcttacattagatgaattgttagtacctatacgaatgaggcagatattctttgttgggatcatatatggtaacatatacccttcgaaatgcgtctgaacctcaggatcatgtgcggaaaacagattcttttgtaagatcttttactagtgtttttacttttgcaaaattgattaagttcggttttacgacagtttaaagaaatgctagagtttgttataatatttctggagagactttgcggctaaagcaaaagtaagtccagatgactttggtcactttgaagaggaaagtgacaggtgtttttcccctctctttttaact

SEQ ID NO: 1736 - DNA, 383 bp, unidentified
  source 1..383: mol_type = unassigned DNA; note = Picobirnavirus sp. hypothetical protein and capsid protein genes,1 sequence
gcctcttttgcaatgttagatcgatgtgcttcatcttccatagcctgattatgtctcttcagttcataattggctgcagcactctgtctttcagcttccatattgtgacgctgatcttcggctgctttgaagaaagcaatttggttacttgtcatcattcattcctcctttctgttgatgatgaaagttgtaatcatgtaatttgcgaactagtccacagcaccgaatggctgtcgctagtttacatgaaagtgtggtttttaaactgtgtaaaaccataaagtgttctcctttctgtaaactagcgacagccattcagtgctgtggactagttcgcaaattacatgattacaactttcatcatcaacagaaaggaggaatga

SEQ ID NO: 1737 - DNA, 383 bp, unidentified
  source 1..383: mol_type = unassigned DNA; note = unclassified Aparavirus sequence
ttagggaccgttgacgacagctccacgtatatgctcattacgcccactgcggaaacaatgtgatgctgtggtgtatacgtggtcaagctagcggcgtgtcccgcttattttagttttagtctatcttaggttaggttaatttagtttgtagttttcttttctccatgtctggttacctatctatcttaactacgctccagacgactaaatttagtatggctttcatggagaggtttgctattcagcgtgcgtgtaccatcggcagccccaaaaacacgcgtcaggagatctccccagccaccatgggctaggttggcagccaggttttaacttggtggggagtaaaatagcctgctccaattcaaaattctgatacttctata

SEQ ID NO: 1738 - DNA, 383 bp, unidentified
  source 1..383: mol_type = unassigned DNA; note = unclassified Picornavirales sequence
cagtactcagtgtatcactgcttactgtgactagatccctagtaaagattttaacacgtaatatttattttgtttatttattatttatgtgtgtaagcgactttgtgctttccacacacaacaaaccattatttagactgctggacgcgtgtagtctcgtgagagttgcgtgaaaatggcttgtcccgagggacgtagttatctggtagtttattaatgcatttgttgtgtgcccatttccttttgtgtgctggaccacggtggtgtaggtgtggtgtgcttaaatgccccacagcgaaccactttaagatttaccacggttttcgtggtattgatcggcacacctgtatttccatggtttgggtacacctaaaggcccacca

SEQ ID NO: 1739 - DNA, 383 bp, unidentified
  source 1..383: mol_type = unassigned DNA; note = unclassified ssRNA positive-strand viruses sequence
taacctatataaaattacaagatgttgatcgtagattacctgagttggtttagcttcgcaatgagcgtagcggatgaacatctggtggtatcgcatatggcgatgattggttttgcggaaaaaccggcgaatcgtagtcggtggtcggagtgtttccaggaacatccctgctacaagcataaccttcgagaaaattgtacccacggccacttgatcgaggctaggttcggcggtgtaatgcactgccggaactgcctaccgcagacgtcggaacaacaggtcgaacatactaaacaacacgacaaatgtcggaaagaagcttacggtatcttggttacagctgccccggaccatagtaagtgcgggtatgcgttcgcttatga

SEQ ID NO: 1740 - DNA, 384 bp, unidentified
  source 1..384: mol_type = unassigned DNA; note = unclassified Hypovirus sequence
atcactataaacttccatgtgaacgttttactgcagaagaaatacaaaatggacaacagggcccaattcacagaactattgttgctagtgatagggtgagccacgtaccatccaccagtggtggggtattattcttcaggtttttgacgcatggccgttgcactgatcaacgtttcgagttaacgcagatcgagcgggagtgacccgtaatagcaaaagtctatcaccatccatgcgttaagacgtggacgggtgtgaagcttggatgagcgatattgtgccttcatgctctcaggtccacttaattgtgggatgcaattcattttgtaatggtgtttatctcacctgatcatggtacggtcatccgaagactaatttcccctt

SEQ ID NO: 1741 - DNA, 384 bp, unidentified
  source 1..384: mol_type = unassigned DNA; note = unclassified Permutotetraviridae sequence
agtcctagtccaccctctctccgttgttatgtttatagtgtccctatacctattttataacacagcccccctgacgaaatttgcaactacccttaacaactctactctcctgaaaccggttggaaccttcatttcatcccatttgacccagacagcgggtctgctatggttggtacccatatcattcgtagcggccaaacctgcctgggcctttctggcggcactcatcactggcatcttcacaactgagtacctccaagctcccacgaaatattgggagtatgcttttttaggagcagcgatggtgctcctactaaaagcgaggaacgtacctcagttcttcatagcattggtcgtggttatactaaccattggcgttgggct

SEQ ID NO: 1742 - DNA, 384 bp, unidentified
  source 1..384: mol_type = unassigned DNA; note = unclassified RNA viruses ShiM-2016 sequence
aataactcaacatcttacaatcataacgctgtaggtaatgcggctgatagcggccccattagggtaaactacgcaacacacacaggcaccccaactatcctccacacacctcagacgccgatagaggcagagaagtgtgggcaacggttgggcagaccaatatacgtcttgtcgtatgacgacgagattttgttcaaaacttctctggagcttcacgagctctttgacaatgatctttgcgattttagtatctcaattctcggtgaagacaacgaactagttatcactcgcgtgcacacaaaattagatatatacccagagccagagaagattaccgacattcgacaacagtttgtcgcaagaccccaccaacagaccacacct

SEQ ID NO: 1743 - DNA, 385 bp, unidentified
  source 1..385: mol_type = unassigned DNA; note = unclassified Mononegavirales sequence
tccgcaaacaacaaaaccaaatcaggtcttagcctttagttgtgagccattgcggtatgacgtactggttttgccagtggacggaagtcgctgagtttttaataaaaccccgtagtctagcgtcaatgtgccatgtgcctatgtgtattgtatcaactaacgtatatgcgtgttataactaatacaaaactacagttttaagaacccagacgagtaattacagaattgaaaggcagtgatagaagagaagaaaataaaggatcgacaacgtgaaaagtacctgtggtgataaactaagcaatacaaaagattgtgaagaaaaaatagtgaaggaatcacagtgctcataaattttcaaagagaaaaagatcaataattactaaag

SEQ ID NO: 1744 - DNA, 386 bp, unidentified
  source 1..386: mol_type = unassigned DNA; note = unclassified viruses sequence
gggaaaaacggttgcaacgttttgttccattcgcaggcccagtgttgtcatgggactagttatgcggatggcccacgggtgcgcgcagagcctgtgcgcgttaaaatcgttggagtcacttcgacaccccataggggctcctttggccggttggtggcgttatacactggtgatggggctccgtttcacggagctggacctgtttcgccgttatcaggtggtggtccctcgcgttcctgcatagcgagcctgctcaagcagttgggcaaatcctcgtggttctcaaggtcccgtaaaacaaggaacccgtgcgcagccccgactagaaacacgtaaactgttctacggggggtgctacctacctagtggtttcatagaattttgtg

SEQ ID NO: 1745 - DNA, 387 bp, unidentified
  source 1..387: mol_type = unassigned DNA; note = unclassified Picornavirales sequence
caggattatatcgttgaaccattaattaaactgcggtatttcttgaacttattatcatgagaaagtcttttctatactgttttattaactattggaattaagatagttgttgactttgttatgaataaggtggtacctcagatttggaatttcattaagggaattatatcatatatgtttccagatgttaagattaaaaattatgaagaatatgctgaatctcaaagtccaattagagaaacacctggtaagaaaggtggaagaaaagcagtaagattgatacgagcacaagacggaaataatgaatttttaaatcatgctgatagtgtaatgaggcgtaatatgtttagtttccacttgattaaagtggaaacaggaaagacacag

SEQ ID NO: 1746 - DNA, 388 bp, unidentified
  source 1..388: mol_type = unassigned DNA; note = Picobirnavirus sp. hypothetical protein and capsid protein genes,1 sequence
taacgtaatccaaacccatttgcgtcatatttcttgactcctttcataagtattcgcccttttgatctgaattcgtgagataggtacattgacctaccgtgttgaatcagagaagtagtagcacacttcaatcttttgtaggaagatttaaacctaattttcgaagatgtcaatgcatctccctcctttcggtagttctagtaaatttatatttactagaactaccgaaaggagggagatgcattgacatcttcgaaaattaggtttaaatcttcctacaaaagattgaagtgtgctactacttctctgattcaacacggtaggtcaatgtacctatctcacgaattcagatcaaaagggcgaatacttaagaaaggagtcaagaaat

SEQ ID NO: 1747 - DNA, 388 bp, unidentified
  source 1..388: mol_type = unassigned DNA; note = unclassified Narnavirus sequence
gggcacacgcacccatggtgcattcggtctgctaaacagaccactggcgcaggtcggtgaggacctgcgtaaggcctttaacaaggccagggccgaggcccttaacttggctcagccaagaaccaaggggttcccccttgatcgcctgcgtaggcgattcgcagacactctaggatggagtgtcgtgttccagccgaaggctgtaaaggtcaagaccgaccttgagaacgtcccaaaatgggagccttctccagtgtggagagccgcaccaagaggtgcgatatggagatcttacaagatctcaagtctgctaacaacgatagcagtaagcggttggagagccaactgcacgcacgatctcgtgcgtcttgccataaacacatggcat

SEQ ID NO: 1748 - DNA, 388 bp, unidentified
  source 1..388: mol_type = unassigned DNA; note = unclassified Hepacivirus sequence
tacctcctccataggagacacactaccctggcccacgtccgggactgggttgcttcttcccaactttccgggaagagcggcgcgtgtgtggattacatgttcgacgccaatgaagctagaccgtgcgacaccattcttcaggtctcggtgggtctgtaggctaaggcgcaagtgtatgaagcactgtggagtgctatgtgaggggggacccctctggggagaggtcaactcctaccactgacgggggaactcgtcagcttgtcggtaaagcggagtctgtggggataaagctgcacgcgtagacgctaaggcctctgatgcgcggttggtagctccacccagatgaagtgtaacggcgagtagggcatgccctgtgactagggggggg

SEQ ID NO: 1749 - DNA, 388 bp, unidentified
  source 1..388: mol_type = unassigned DNA; note = unclassified RNA viruses ShiM-2016 sequence
atatagtatatgtgtattgtctaacaagaatattgctgctcgactatgtcgaggcttattcattggtgttggacgtgcagattttgctagttgttggtggtaccttttcaaacccctatctcagattttctcttggtttagaggacagagatgtctttaaatatgtggtcatgttctggcctactactctcatcatgttttgtgattgggtgattagttaatttgaatggttctggcaaatcgtttgtcagtctcgagatatcgaggctaaataaatatgtttggtctacgagccagttgtgttatcctttaaggaaacaatgtcatcactagggtgaagtacagtgcccttgtgttgattctatttgaactgtcccgtgcgctcagg

SEQ ID NO: 1750 - DNA, 389 bp, Equine hepacivirus
  source 1..389: mol_type = genomic DNA
acctccgtgctatgcacggtgcgttgtcagcgttttgcgcttgcatgcgctacacgcgtcgtccaacgcggagggattcttccacattaccatgtgtcactccccctatggagggttccaccccgcccacacggaaataggttaaccatacctatagtacgggtgagcgggtcctcctagggcccccccggcaggtcgagggagctgaaattcgtgaatccgtgagtacacggaaatcgcggcttgaacgtcatacgtgaccttcggagccgaaatttgggcgtgccccacgaaggaaggcgggggcggtgttgggccgccgccccctttatcccacggtctgataggatgcttgcgagggcacctgccggtctcgtagaccataggac

SEQ ID NO: 1751 - DNA, 389 bp, unidentified
  source 1..389: mol_type = unassigned DNA; note = Wenzhou picorna-like virus 14 strain WZSLuoII97619 hypothetical2 sequence
tttccaggaaatgccaagctctgggaacttctagggcgtccgaaacgcgtcctgtttatgttcttttgagcatcaaagccaaagcacagaatttgggactatgtactcggttttagtgaccggattgatagcccagctacctaaacttggaggaatcccaaatattggtagtcatgtggatgacacttggcgaataaaggcatagcaataagtcctactcttagctatctaggttccagaccttgagtcaggcctggttctgaaactaccgacttgcaacaattataaataacgaagacaagtctagtcaagaactagataatccaccagatgtggatgaaagaaccaccacagtccaagctgtaggagacactgaaactgccgaagtt

SEQ ID NO: 1752 - DNA, 389 bp, unidentified
  source 1..389: mol_type = unassigned DNA; note = unclassified RNA viruses ShiM-2016 sequence
aacggagagatagaatctcatacccggtggatggcagattcccggtcacggccctccaatatcgcatcgcctatgacggctcacatcctgaaatagtggatttgagacctaacgtcgaggttgagggattgaggaggtccgaggaggggtcatccagatgggacttgggttcattctcttcacctatctcatactattatactgcactgtgccgagcgggacaactcaacgtcgcgcattgtcttgaaggaatagtaactacaatccaaaaacagatactgcaaagggcaatcagccccgaattcaaagatgatttcatacgcaaatggtttaaacatgtacacaatttcttttttacaaaaatatccgaaggactgggcaactcccta

SEQ ID NO: 1753 - DNA, 390 bp, Myriapod hubavirus
  source 1..390: mol_type = genomic DNA
gcgcgaggatagacacccccgttcccagttttcgatcatacagacagatttctgccggtaagattccgaactgagctgtattgccaggtgactgatactactaggtagtatcctttcatttagataccctgaaaaaggtttttttgtttgtttgtttatttggtttttgtttatttgcttctattactttatccaattgtttttcctattaaattttagatttagttcaatttaaatctttgtatatcaattgtttcagtgcattttgttcaaatttgattctgtatcaatccattttcacttctaaacttcttatataaccagtatatcctatacttttgattatatattcatataatattttaaaaaaaccatccagaattgtcaatc

SEQ ID NO: 1754 - DNA, 390 bp, unidentified
  source 1..390: mol_type = unassigned DNA; note = unclassified Marnavirus sequence
gggtttagaggctgactgtatatatgtaaatagctcggtgaacgtcactagaaaatagcggatgcctgtgggaaccatgggctaaaaacacaagaacccttcttgtattggataccatattttgtacattattaattagactatgtattttatataggcttgcaagaatgtagacacgccgctcgtggtgatgctgtatttacagcttagtcgcaattttgtctgattcctctgcgtagaataatgataactgcgtagttgtaacacctcattgccaacactaacaacaacaacgacggtgccgcgtcttatcaaatcggcacaactagttctaggataaattcaaatactgtaacgtttagggatggacaagagcagtgggatgctgct

SEQ ID NO: 1755 - DNA, 390 bp, unidentified
  source 1..390: mol_type = unassigned DNA; note = unclassified RNA viruses ShiM-2016 sequence
gggggaggtgtaggcccccaattatctgacggccgggaaagaccgctggcagcccggaaagacggcacccttaaatgaaaatacaacatatacgataaaccctctatgcgcgccgatggcacccctactttcgattctgctcactgctgctgtgatcactgctatcttcggactcgcttttttgttgcacgcgtgcacttatgagcgaacctacaccaacgacgtatagacatccacagcatttcgtcttatgggtcagtagagctactttcatagtagtataccttgaagttttaaccacttttcaccccggaaggggaatacgcatccagttccgtttccccagactgtacgggccctaccaagtacccaccgctccagcagcgcctg

SEQ ID NO: 1756 - DNA, 391 bp, unidentified
  source 1..391: mol_type = unassigned DNA; note = unclassified Anulavirus sequence
cgcatagcataagtgttgagtcaatttgcctttcgataactggtttttggattcattttcgttgttagctcaacgcttgtccgatttccggtgtgtagtgccccagcgtgttggtccacgacattgctccgcacttgttcgattggtactcgaggcctgttactagttgctctgaccctagcttgggtgagtgactttaaggctagctgctaaacccattgatcttgttgagtaaagcgtgagagttaggcccccgtttgtcaaagggctagactagcgcagcttcagatacaaggattgaggtgacatcttgaggccttggccttcaagctctctttgggtggtgtgacttacctgtttcaggtctcgtttataagcaaatcttgtaaat

SEQ ID NO: 1757 - DNA, 392 bp, unidentified
  source 1..392: mol_type = unassigned DNA; note = Fish HDV-like virus, complete genome sequence
gacatttctctatttcgtcctcaatctcttcctttcttatcagcaatttcttgtattcatctccgagcttcctcctctcttgctcttctttctcctccttggggtcaggttcctctgaatccccaactcttccccgactcttagacctggatctccccccactcttctgcttctctggctctgcagcctctttccgtggaatcttggatttctccctttcgccctgcttagccctcgctagtactttctcagccatttcttggtttcttctcgagattcgggtggggggcggtctcttctggactactctccttgttttctatcaaaagaataactcgagtagagtcctttgaggcgcaccgcatcccgaggtatcgagatagagagtaaga

SEQ ID NO: 1758 - DNA, 392 bp, unidentified
  source 1..392: mol_type = unassigned DNA; note = unclassified Picobirnavirus sequence
atgaaaggaggtaaaaccattgtttagatggtacaataatttacaaaaatttcaatcattattattttcacaagcaattgaaactatcactgaaatcatgacaggtcagtggtgctttcataagcaagtgaaagaaaaggaggttaacatgacacaaaatcaattaagctatcttgggttggaagaaactaagcgtaataacatagtaactagcgctgaaatcaatagacacaatttagcagatgaaggtattcgtagtgccgcgaatgctgaggctggacgtcacaatttagttactgaacagcagggggctcaatcgttgaaggaaacacagcgatctaatttagtgaaagaagcgatttcacgcgatactctgtctgaaactgctcgac

SEQ ID NO: 1759 - DNA, 392 bp, unidentified
  source 1..392: mol_type = unassigned DNA; note = unclassified Picornavirales sequence
gtcgaaaccagatttaactctggtgtagacggcatgtccactttcatatttaatttaagttattaacctcattggttgatcaataattataacaacaacttaggttagcgctgtagcaccatcatataatttatgatcggatggtgtgaggctctagcccaaagcactccgtggggctgtcactgcgacacattcccacaagtcaaaacgatagagtacgtagccacgatgcagccgaaaggtatcagcatagcattgctcactgatgtagaattattattccggcacgtggtatgtaggattgggaaatcctaccttagacgtatactccctgataggggcgcggcaggtcgatcgtatagactttaaaacctgttgaaaactctctcaac

SEQ ID NO: 1760 - DNA, 392 bp, unidentified
  source 1..392: mol_type = unassigned DNA; note = unclassified RNA viruses ShiM-2016 sequence
tagctagactggattctagctgtgacatttgatcacttctctttttatataaacttcaggtaataaatgagaagaagctatgtcatgaaagtgggagtccctattcagggagtatgggcctaggatgccttcttaattgatgacgagtcaaataatgatccaggtcccctgaagtcgaagtgtcagtgattgagctgtcaggcactttagattagtagcttactgataacaataataatagttcatctcccggagctgggtccgaggggacaaaagattacacagaaacccagcgttcagcccatgtaaatgaaactgtacaatttcaggagggtggtccaacttacgtcgctgaaattacacatggaaatgatgttactttcgacgatgga

SEQ ID NO: 1761 - DNA, 392 bp, unidentified
  source 1..392: mol_type = unassigned DNA; note = unclassified RNA viruses ShiM-2016 sequence
cccccagtgacctctatcaaatatctgtttagttgatgtctagggctattgagagactcattctgatcactgtgctaggctgccttctcttggaaatctttgactacatacagagaaataacaaggaaagtgaagtgactgttctcgggagaggtgactgtgttatatatacagggaaaaggttttgtgaggaagggaggaagttgagctgccctggtgtctatgaggatttcttctttgtaacaggtatcctgatttcaaaaggtttttcattggctgctattgcaggttctgtagcactgctagcatttgtttacgggaaaataacccgagagttgagaaccagcgaagtgatagacagacgactggacagggaagaagttgtgtaaagt

SEQ ID NO: 1762 - DNA, 393 bp, unidentified
  source 1..393: mol_type = unassigned DNA; note = unclassified RNA viruses ShiM-2016 sequence
tcgttcttgctgagtgtttgttaaccccagcaagtttcaatcattgaacttttggtgttgttgcaccatttgttcatttcttttccttatggaaaatacaattgctcaggagcgtttgctttctgagtttatttctcttttaaatattcttagtgataaagctaattttgttcatcttgacgaaaggtttcgttgtttagtctgtgtaattcaatacggttctaaggttgatagcaaactttttagtgaatctgttaggtatattaagtatctttgtcataaacatcaaatttgcattgcagttttatccacaggagtttttgctaggtcaaatacacatcccaattgctcttccacagttggttattattgtttccgctgtgatccttcaat

SEQ ID NO: 1763 - DNA, 394 bp, unidentified
  source 1..394: mol_type = unassigned DNA; note = unclassified Narnaviridae sequence
cctgaatcggaacataaggaaaaggctttcgccttacccatttgtgacggttaaggggcgacgggcactctgtaagagtgacccgcctcgatcgcgatgcgctgttcgtgcctacttcattgcaggctctcgcaggtcaaaacgatcaatccctagtcgtcgaattaatccgtttaccaaacagttatggaaggctgtttggtgtggtcttatctcttgtggtctcggaacacgtgctggttcttgggaattgaggaggtggttggcgcactctgttgagcgcaacggctggctctgtgttgcaaaggagttgaaggacctttgcggttggctgcgagccagggctcttaagagcactggtaagtgggattccaacacacacactcatattccc

SEQ ID NO: 1764 - DNA, 394 bp, Lophuromys jeilongvirus 2
  source 1..394: mol_type = genomic DNA
tagtataacaggatctgaccattaagcactccaatcttaatgcaaattaaccttgaaccaacactatcaaagtacgattatatgcattggtggatattaattgactaaccagtctaataattattatattaatctacatagcaagttcaacaaattaattcatgcaattataatcaacacacaaattggtagaaaataaggtcatgattaatgtataggataactgatggcttactgacaaatgaagtacttacgacttcaaatattcagttagaaaaaacttagggtcaaaggcgagtcaagccattaaaacagactttaaagtgtgcattatcaccggtacgataatagaagtaggcttacaatttagctagatcttgttaatgcaattaac

SEQ ID NO: 1765 - DNA, 394 bp, unidentified
  source 1..394: mol_type = unassigned DNA; note = unclassified Riboviria sequence
ccatgtctaattacaaaatccgttcaagcggcgaagccaaaactgtgttagtgaacccaacgacatataaaagtacgttggaaataactcataagtttaagcgagataccgcgctcaacgtcgatcaggtccgtattggtgtagcttcggcttataccgataatattaagacctgcaaagacgcatgtggactcgtacgccgtgaggtagtaaatcttgaaatgtccgttcttttgggcatggaagatgaatactacactcgcagaaaacaacagttagcggatacgctagctgcgggccaaaaattgttggaagcattcgacgaggtaaaactcggtctcgtcccgtcaattgaaatcgacgcgacagtctcttaaccttataaggaataatt

SEQ ID NO: 1766 - DNA, 395 bp, unidentified
  source 1..395: mol_type = unassigned DNA; note = unclassified Picornavirales sequence
gccacaaaaccatacaatcgttggttcttgtcttaattttgatttttgagcgccagatttcatacagtcgtcagctaataactttgcagcaggtagcagacgagcaataagatcagtatttgcgcgatttaatttaatggcagaccatcatatatgtaatctttgttgaccatgatcttgtttccattaatgattttaaatattcttccgaaattaattcaaaaatttgtttgacacaactagccgattatattggttggttctacaatcatccagaccccgataatttagattacacttctcgctatattgctgaaatcttcgcttcatttatatgttgtaacttgcatttcactaatccactcgcaatttctgagtcagagttctttagtgat

SEQ ID NO: 1767 - DNA, 395 bp, unidentified
  source 1..395: mol_type = unassigned DNA; note = unclassified RNA viruses ShiM-2016 sequence
agaccactgaccttgaaagtcacaaaacttatcacggtgtagtagcatcgtaaagcaactacaatgtttatgtatagttactgtatatatgtgagtttttcatcctttaatttgtaagagtggatacataaataaatcctgcatgggcgttccccgaaatctgtttttacagatgatgttgctggacatcaaaaattgaaatcgcagtgagaaatgggaatattcttagctgttaaataaataaataccttcccggaaatcttttcaaaaccaaacaaaataaaaacgaggagggagtgaaatgctccacacccggttttcgtgcctactctaaggaagaatcacaaaagttcctaaatattctgatcgatgattatatcactagattagaagaa

SEQ ID NO: 1768 - DNA, 395 bp, unidentified
  source 1..395: mol_type = unassigned DNA; note = unclassified RNA viruses ShiM-2016 sequence
ctggatagtggccattggcgcttatagggagcgcttagtgtacagtaccctccgccacccgggcattggctacgggtggcggcgtctgcgattgccgaaggacacgatagttcgatttagccgtggctagctgtagtggttggtggtgagtccaggtgagaaagcttggtaaccaatccgaccgcggtgacagtgaaggtgaaatcaaacaggggattccgccaaccccggacgttgtagctaggcccatattagagggtccgacgtagccagattttggatttgttctgtaaacatttccagggagctgtagcggtatactgcagctggtgtgaccgaccataaggcttagatgccgttttaaataaagtcacccctcaatttttcaatccacc

SEQ ID NO: 1769 - DNA, 396 bp, unidentified
  source 1..396: mol_type = unassigned DNA; note = unclassified RNA viruses ShiM-2016 sequence
ggggaactggtcgagcagcctcgagttgcgtcggctggtacggagggagtcgtcccgacactccccctaaaggttgcggtggctgcagacgggtctgcagtcggcgcaccagtggtagtaacgcctgagcaatcaggagccacaaaagcgatccggaggccccggggcggttgcgccgttggtgatgatgttgcggaaaagccgtgtgggtgtagaaggaaagatggcacgccgtatcctttcgagtgtgagacctgttactttgaaagaagtcacagggagagaaagcaagagaccatcaagaaggtgaaggaggcggcgaaggttacgaagaagcataggtgcagcaccaggcattgcatctatcgagacggtgccaggaagagcaggcactgg

SEQ ID NO: 1770 - DNA, 397 bp, unidentified
  source 1..397: mol_type = unassigned DNA; note = unclassified Picornavirales sequence
ttcgcagcagatttattgtgtggaggattactatttatttagcgtacctatcacagtgaacctaggattagtagattacgataatatagcgtacctatcaaagaacctatttttataagatgcattttacatattcaatcatatttgcttgcattttaaattcataccttgttccagtagcattcacggttagttgagaaatactggttagtgcgttgtatctacaggcatgcacagaaatcactgtaggggagatcacaaactcgattaacaatgtgcgccgaagcataccggagcgatatctgtatgcgccccccttacgttctaagttacaacctgcccacgagagttaacgatttgtcttttgaatttacaaactacaaattaaactttaaaa

SEQ ID NO: 1771 - DNA, 397 bp, unidentified
  source 1..397: mol_type = unassigned DNA; note = unclassified RNA viruses ShiM-2016 sequence
cgggggggtctatacccccccgttatgaagaaaacatctacttacgtctctcactttttgaagtgttattttgcaagtttattgttcttttcgccttttggccaggcttatcacctgatactagaaacgattacacatacaactttccccattacgttacacgtcacaacttatatatattttgcagtcgttattcgaatgcgcttaagattatcggctgtatatatattcggaagaaaagttagtttggcagctgacaccccgttattatgtaacatagagatttatattgacattttatgtattcggggattcatgtgacaggagttgggctcttaattgagtccttcatttgttatattgccaacccttttataccttcctagcgaatagcgat

SEQ ID NO: 1772 - DNA, 398 bp, Mammalian 1 orthobornavirus
  source 1..398: mol_type = genomic DNA
accgtaccgaccaaactcttaaaaaccctcttctcgggacagaggtctctttctgccttaaatcgagttcactcccccatcacgtacgagcattgggccagattaaagcaaagaacctggcatcctgtgactattacttgctattccgccaagttgtattgccccctgaagtatatcccattggtgtcttaataagagctgcggaggccatactaacagttatagtatcagcttggaagctggatcacatgacaaagaccctatactcctctgtgagatatgcactcaccaatccccgggtccgggcccaacttgagctccacattgcctaccagcgcatagtgggtcaggtctcgtatagccgggaagcagatatagggccaaaaaggcttgggaat

SEQ ID NO: 1773 - DNA, 398 bp, unidentified
  source 1..398: mol_type = unassigned DNA; note = unclassified ssRNA viruses sequence
tacattctggtttccccaacgatttgcattctgaatttcttcgtttactttataccccccaacagcttgaaaacccggacctcaacgtccgtcgtctcccgcatgtgatccgctcacaccctaagttcgactccgacttaattcttcctcaacagattcccattacttatggatctaaggaaggtcgtacttgggttaatgatcgtcgcgatccttacctgacgccattcgctgttaaaaacaaattagcttttgaattcccccgccccaacggttccacacaactaaaatctttcggccctgaccccttcgtattcgtcggttccaacacgagatacgccacttctgacaagctagcctaccggctacgcacctggcattctcgtcctaacttggac

SEQ ID NO: 1774 - DNA, 399 bp, unidentified
  source 1..399: mol_type = unassigned DNA; note = unclassified Dicistroviridae sequence
tcttgctaaactgaaacaaattctcggatataaattagtttagtagtgctatttctcagacaggctgggctatttagtcttacctcccaggatggcctgtggcagccccacaatatccagggtaaccgagtatatgattaagagattaagtcgtcctttttcatgaatatctgacttgcgaataacgatacaaatacgaatcaacaatctcgtattaaaactgatgatgttacttctgctcaagcatctgaactttacgagattgctcctgaaatttcaaattcagcagagcagcgtgtgcagatcacagcatttgctgatgattctgcagttttagccgaacatgtccctggtgaggctattttacctaatagggacacgacccagcatacagatagc

SEQ ID NO: 1775 - DNA, 399 bp, unidentified
  source 1..399: mol_type = unassigned DNA; note = unclassified RNA viruses ShiM-2016 sequence
atgtaaacaacatgtatacaatttcttgcaagactacagttggtagtacgttacaagtatttactgacttcggagtttcaaaaagatgatatgcaaaagcgtaagtgattctcgagacgatgatgaacgaaaacaacttagtcaaaaagatctgaaacccagaaattagatttaaggcgcacattaaatagtaccaactcagaaatgagagagatgatttatatacgtgcaaaattgaaaatggaattgtagaacggatttgaacaaccgcatgttagacatgtattatggcggtggaagatacagtataattaattatcactatggattaatagaactgtatatgcctggcctccgaaaggtgattgcaggcaatccgtgagggattaaaactcatca

SEQ ID NO: 1776 - DNA, 399 bp, unidentified
  source 1..399: mol_type = unassigned DNA; note = unclassified RNA viruses ShiM-2016 sequence
gccaaacaaaacccccgattacaagaacaatcgacctatctttataaccatatcgctttatatcacacagatctaaataatttggctagatgtaatactcttaacaggactgtaataagagaagaatggatctctcagtcagcaggagaactaaggaatctacctccaattactgttagtctattaacagaaagaagggcattgattaatattgagacagaaagtccagaagctaagggatctagtttgggaactgagagcacaaaccatataattggagatgagcaattaagaacctttgcccatgatttcacgttcaaaatactatctgagaagacggatgttcctcttatcaagttttttgaagcatctggacctggtgataatttaacaccagat

SEQ ID NO: 1777 - DNA, 399 bp, unidentified
  source 1..399: mol_type = unassigned DNA; note = unclassified RNA viruses ShiM-2016 sequence
cctgagtcatcccaaggggggtatgtgtacattaaggatgtcaacaaatcctttttaaatgccctaacaactgaccgccccaactcaatacctagcttggatttggaatatgattatgtcgttcgtattcaacatgatcctagatctcacatcgacttgtctttcaaacctacagagcagtttgtgattgtcaatgtaaagaagagtggttccatttactttgaggatcacaagtattgtctttcaggccattctattaggaagtttccccatgattttactctccgtctcttgagtgttttgcctgagagacacatttatgaattctttcctgatttaaaatcttctcttaatgagcttagtcctgacattgttttttggtggcaggatgttttctac

SEQ ID NO: 1778 - DNA, 400 bp, unidentified
  source 1..400: mol_type = unassigned DNA; note = unclassified Jingchuvirales sequence
gaccccttggggacaaagatccacacaccacacactatttacctacttaactaactaccaaagcattgcctgggctttttcacaggtgtgttctcgaggttgggatttaactgggataatgtgttgactaagatgtatcctgaagaggggggataatacactatctccagtaagaaataagaggctcgacgtataccctaacaattaacatctgaacgtataccattacatcgtgacagataatcctggatgaattaacctggaaactgtatgagatatcctttgaactacccgagggagaaattaagagactcgatgtacaaaggacagttccgagggctgaattttcagaccccaaaaggtgagaaaaacatctcacaatctttaaaaactgtttgct

SEQ ID NO: 1779 - DNA, 400 bp, unidentified
  source 1..400: mol_type = unassigned DNA; note = unclassified Hepacivirus sequence
catcgtgctggccttacggccggggttcgccccacgtaggtcactatgtgaccacagcgcggaagcgcacgtcaccttaacctattggtaaggcgattcactaccctctagcagctagctgcactcggaccagattctgtatccgacactacataagactagcgtacctagggctaacgtctaacgtctcaggtacggggccagtccgccggttagctcacgcgccggctgatcatgcccttaatcctgctctgctagggttagaggtgaaaaaacattgtgcaagtgaagctatgaaaccatccgtcgtcgagtgggcttgggcccccactttaacggacgatgctacagcctgatagggcgttgccactaccttgcactcttaagtggttgtaacaca

SEQ ID NO: 1780 - DNA, 400 bp, unidentified
  source 1..400: mol_type = unassigned DNA; note = unclassified Iflaviridae sequence
gccccttaaaatttaattttaaattggaatatcttttgatactccgactgtttatttggtaaccccaactaggcagtataaatacaaattggaatatctccggatactccgactgtttgaatagtctctatttaagcagtataaaccaaacaaaagcgattaaaataaactttaagtggcagtgtttgacttggtaattttatcactcaaactaggagaaatccgaatcccagaggacgcacttaatagtctaaatgaacaatttttcaataatagaaatcgaatctagcaattttgaaagcgacacgcgaaattttgaaaacaatccatataataataatttaatagaacgttttgaatttgttggtgaaggaagatatcttatagaagaaaatcaaca

SEQ ID NO: 1781 - DNA, 400 bp, unidentified
  source 1..400: mol_type = unassigned DNA; note = unclassified Picornavirales sequence
aaacgaacacagagataaatactaataggactacatatagaagtgtaccctattactactcatctgaataataagaataagaatcataagaataagcgaagcacactaggatatatataatacatatatccacgaataagtataagataagtacaagaattcacaatatcacaacagcaattgcaaatccagaacgaaagttcatcacaattcaatacactattaatacataagatacaagaagtaattgatacactatttgaacaagtcgacaacgataagaaattacaatatctaatagataaagtcaattcactatatagattggttaaagattatacggattcacaaacagaaactataatagcatatataaataaagatatcgataataagaatc

SEQ ID NO: 1782 - DNA, 401 bp, unidentified
  source 1..401: mol_type = unassigned DNA; note = unclassified Vitivirus sequence
ttagtttcggtagcagtagcaagtatgatcagattaggtatagatcggcatttaataaattagtagtttaaataaagtggcggatagtggagttgtgctgctaaagtctttcctgcgttatcacagatacactaaggaggaattctttctgcttgcagacattaagggagaaagcttggtggattttcacattcgatcgagaggcaccttgagcgttgaggatttaaagaaggtagcgaacgacaatttctcacccgagaatttgagttcgacagtgaataacatcctcaatttcaaaaagctgacctgtgaagagaaggacgttctgctatttattggtccgaggattgtggagatagtgcctcccagatactccagcggtttacactacagcacttacc

SEQ ID NO: 1783 - DNA, 401 bp, unidentified
  source 1..401: mol_type = unassigned DNA; note = unclassified Hepacivirus sequence
cactccccgaggggaatgcgccagccctggccttgttggacagggtagcgagagggtcactccatttttctttacctctcgccactgggctggtcaatggcacagacgtgggacgctataagcctccgtggtctggttggctgtagtctggccggtctagtgggcccccttggaatgataacctggaagagggctaacgtgaactacccggacggaactccggggcttgggattgagcgcaccagtagacgcttcggcctctgatgctgggttggtagccgcctttatggtacccaagttgggcatgcccataggaatcggggaaggcgttgggttgcctcctgcctactgcctgatagggtcgtgccgtgcgtccaggttcttacggctgtataacactt

SEQ ID NO: 1784 - DNA, 401 bp, Parechovirus A
  source 1..401: mol_type = genomic DNA
agaggtcttttacgtttcgaacaaagacaatgtctgcaagatgattaaagagctttctttgcatcctaagtcgacctttgatgaacattgtccgaagattttacgcgcttgtagagaaaatttgggttttattccgtacccgaatacgtatgatgagtgtcagagagacatcttgtcatccggaatctgttgggaatgatggtcgtaatcgactacaattggagtgaatttaacgtcagcactaaaagatgccttgaatatgctgagggacactcccaggtgggctatttagccttacttatcaacttacctgagcagcagtcctgctaaaaagttaggcaaacaaaaccaactcttagggattaagtggtccctaagttttaaacacacttgctgaaact

SEQ ID NO: 1785 - DNA, 402 bp, unidentified
  source 1..402: mol_type = unassigned DNA; note = unclassified RNA viruses ShiM-2016 sequence
gtgtgcaggagctgtcactgtggagacaataaatccaccccagttttaaatctgatggcagcaaaattaatgtgtgtgtatggataccacgagtacaatatctttatatgttttgtaaacttactcgtaggcttcgcatgcagcaagggtccctaatggggaacgaaagtgagtcctccctgctcaaacggaaacatgtcgttccacatcgcttaatccagcgtgtggtctgtacataaaaggattggtaattgtaaaaccaaaattctcggcttaataaaccgacgtgaaagttgtccacccaagaagggtcacgaaagagacaacacagaagccggcgtcagctggcaagactggaatttcaaaacccagtcaggagttgaacaaaatgatgcctacatc

SEQ ID NO: 1786 - DNA, 402 bp, unidentified
  source 1..402: mol_type = unassigned DNA; note = unclassified viruses sequence
accatctacactccccgttccagggattcccagcgtgctagggtggcacgtatctgctccgtttacattatttgagcagggctggggaactgaatggcaccggtgtggcaccgctattgcgctgcgtgaccgggttggctggagtctcagtctctccatgcgggcctggacggaccacaggggaggggagagagcaactgaaagtgtatccatgagtacatggagcgctgcagcgagcgcacatctaccacgcttcggcctggctaagatggttggtagccgcctatatggtactgcagtagggtatacccgcactggaggggggatagcgttgggtcgctccctgcttactgcctgatagggtcctgccaggggcccctcccttctggctgtaaaccactt

SEQ ID NO: 1787 - DNA, 402 bp, unidentified
  source 1..402: mol_type = unassigned DNA; note = unclassified sequence
cagacgttagtaaggcagctctattcattatcatatgaaggtttggatacaagttagctatcgtataggatggaccaacgtatgttcccactccggtcacaacctcaatttcaatgcgaattaatcgcaccatgtggttcggattgtaaccctgcttatgtgtgacagatgaaatagcaaaagccaattcatccacccaagatgttgcaccaacatctaacatgccattacgtatattaacgtatggcgtgcgcgatgtatgcgtgcgactgttagttaatggccccaagcgaccttcgtgatcaatgttgcggtaaataacattgaagcttttaagtctcattggttcgtcagtgattttgtaagaattaactattctgaaatcaaaatcttccaagctac

SEQ ID NO: 1788 - DNA, 402 bp, unidentified
  source 1..402: mol_type = unassigned DNA; note = unclassified Picornavirales sequence
gacagctccacactggaggctatatgctacgggcctgttaaagagccagagctcctccccggatgtagtcacaacgttccagtctgcgagtgcaagtgttcaagagtcacaacaaaactctttgacttcataccagctattccgtcgttggtatggactcataagtcatgtgtttgtaatgaaaaggtagcactttcattgcgtcatcagattgatacaggcgatcgctatgcaaccacattagacttacgttctgtcctgaagccctggatagaacatgttagccccgtttcacctagtgttataattaggcatgctacgtcacgtaagaggctattgttggaacaagctcttgaaagtttgaaaggtgaagaattatcagttaaggacgctaaggttaga

SEQ ID NO: 1789 - DNA, 404 bp, unidentified
  source 1..404: mol_type = unassigned DNA; note = unclassified RNA viruses ShiM-2016 sequence
ctgcaaaataactgtatataatttatttgaggtgtgtaccatgagccagtcacatcttttgtacaaaacggcttactacattgtataggtgcaaggggagcacgaagtcaatatccccctctaaatacttgggtaaaagtacgatttgccaagcggtggatgccgcgaaactaccaaccgttccaaggaaggttaagatagtgcgaactgcatcttttgatgaagtgtgtacagcatacgattcaggagatcctagggagccgatctactattctgcggaatgttctcatggtgatgttttggatgttcagtccggaactgagaaatttggagttactatcaccaaaccagctaaaggtactaaagagcagaatgtatcatttaatgatcaaaatccttctttc

SEQ ID NO: 1790 - DNA, 404 bp, unidentified
  source 1..404: mol_type = unassigned DNA; note = unclassified RNA viruses ShiM-2016 sequence
tggagattgtgctatccacccaatgttaattctgggaaaattgcacatgtataacatagttacttagccctaaattagtcctacatgcacagtagggtgagaggatgttatgcagcgtagcttagttgccattacgttttgcgcgcgttgtatcgtaggttttcgagcaagcttcggtcggcttgtttgataaaatttgaccacctgtttctaatcataatattttgacgtttattgatgataacgtcggggaggtgcatgctgcaccttccattactgatcccacatttcatcgtggtgaggatcatgctgcccccttttctggttggttttctcgacccttgcgtgttgccagttattcttggtctgagggcactcaactggccgagggttttaatccctgg

SEQ ID NO: 1791 - DNA, 404 bp, unidentified
  source 1..404: mol_type = unassigned DNA; note = unclassified RNA viruses ShiM-2016 sequence
ggaagttccctccctggggcctcctccccttcctccaatgggttaacattggagggggtggtagggcggaggccgccctgcccgagtactactctagttggccccagttccgtcgggcacttgaggggctgcgggtcaccagtagtaggctactgctcgcgagcagggaggccgaggggaaactcttccagtggcgtagggaaaatggtctcgagtggtctcctgcgtggacgacatctgagggggtgtgggccgggggtgacccgggcccccactccctcggactcgacccccgcggagcccgcgccctctcggcgtgcaagcgcctcccggctaccattggccaggacagcgccgctgccgcccatgacgcgtgggtcttgaggccactcaccaaggatgag

SEQ ID NO: 1792 - DNA, 404 bp, unidentified
  source 1..404: mol_type = unassigned DNA; note = unclassified RNA viruses ShiM-2016 sequence
tttatgactaacattacagttaacagcaaaactttcaaagaagtagctgaatacccagatagaaccgagtattctaactcggcggttgcgactacgtcgccagagtcaatttctattacacaaaagtggaataagaaacctaattcaaaaagatcaactacactgacttgcagaaaagttgtcccatataagaatgagaatggtattgatgttgttgaagttattcaggcatcaattcgtttaactcacctaccaggccgtctggctaatgataaactagagactattcagaatctatttaaagatctcttagctgttgcatctaattctgatgtacaggtatccctagttgctggtgagcataatttgactctttcactttagtaaaacttaaaggatttata

SEQ ID NO: 1793 - DNA, 404 bp, unidentified
  source 1..404: mol_type = unassigned DNA; note = unclassified Riboviria sequence
ttaaccttcctaggagaaaatccttatgccacaagcaattgagctttatagcaatgcaaccgaagctgccttcgtacaccctgaagacgtcctcactcgtgcgcgtttcacacgcaaactaagtgaaaagactgtcaacgggcttaagactgcaaaccttcggtctgagattatcttaaaccaaacggtcggcctgcgcgtatgcgagcagacctgtgctggtgacgaggtactttccgcccgtgcttcaatatctggttcaatcaagaaccatgagaaggtcgacgcgttagtcgacaatttgattgcagcgttacaacagtggaaaacggataagggtagccgaggcttccctgttaccgacttcacgtttaacgattaacaattaaatcaacggagggtcc

SEQ ID NO: 1794 - DNA, 405 bp, unidentified
  source 1..405: mol_type = unassigned DNA; note = unclassified Pegivirus sequence
tggctgcaagtccttttggacttgcagtcagtattgtgtttagttgcgttaaaaataagccatcgtcgtttagacgatgttttgtttgtaattatcacctttttctcggctttaaattgccggcttttgcgaaaatttaccctttctttgctacctacaactttttgtagtacactcccttgtcattttaggagagtatctagcttgatactaagaaaaacgccgtatgtgtctgggacgcgattcggctacctttatggtattgatgacaattttatcttagtttagtaaaactaagcatttcttaatgaccttagaaatgaccaaggccttttatgtacacccagcagtactttatgtgctgggtagtgaagtagcttccacgattggtgctacagttcaacc

SEQ ID NO: 1795 - DNA, 405 bp, unidentified
  source 1..405: mol_type = unassigned DNA; note = unclassified RNA viruses ShiM-2016 sequence
tatgacaaataaagccatacttctccaggcaactggatcgaatcgcgtgtacgctcaccccgaagacattacgcgaactgttagccaaaaattacagctaaaagaacgcgtcgtcgacggtaaacgagtaccacatgtgagaacagaggtgatcctcggtaggcaagctccaatcgctgtgtgtgaaaacacctgcgctggttttgaaaacctcagtgtacgtctaagtctgagcggcagtttatctaattctgctgccctagacagtatgttggaggaattaaaatccatcattgaccgtgccaagagtgacaaagtcagcaagggcttcccgttaactgaaattactttcaatagttaaggaaggttaatgtgaacacacaatctcgcgcgcgagcgccgaaa

SEQ ID NO: 1796 - DNA, 406 bp, unidentified
  source 1..406: mol_type = unassigned DNA; note = unclassified Riboviria sequence
gttgggtgtgtttggggttgtagacgagcgatatctccaagagataagcctaattgcaccgatcagggaagacaatttcacaaattacgagttcacggaggttatctaccgaaagggggcggcctcatacttgttgaacattgggattcacaaggagacagaagaaagggctgtgccgggatacgatcaccaatccctttgcgcggcactcgggaagatctgcccatttaagggggagcgatctatccctaagggtgtatctgatgcatcagttacgatcctgaaccctcaacggattagagaactatcgcaggttcttgctgcattgcccaagataaaactcttcgatgagactggggggatcaacatctctatattgctagcactcctgcgatggattcccggt

SEQ ID NO: 1797 - DNA, 406 bp, unidentified
  source 1..406: mol_type = unassigned DNA; note = unclassified Anphevirus sequence
gtgccagggtggatcaatcagatctgaatgtatcatatgtgtagaagtcagtgaaccctccctagaaccgaattgagtgtttcacattacgtgtcaggatgtgtacagcaccaaacgcacgattagaatagttcaattgttgacgagtcatctcaacacgctactggacttgtgaatgtccctccacttgattgcacaatttttggattttaatctatttttaagactatttttactgggctaacgggtgtgtaatagacgtcttccttgttgactgtctgggttaatgtttgaatctcgcttttaacttttggtattacatatatattaaaggcccttttgcctcatatcaatatctctgaaaaaaactaacagatttaaattgatcttaattgtgaattcagct

SEQ ID NO: 1798 - DNA, 407 bp, unidentified
  source 1..407: mol_type = unassigned DNA; note = unclassified Riboviria sequence
ggagtatatcctatgcaagcacagaactttagtgtaaccgtgacagacggtgaaaagacctttgaggtcctgtcacctgccggcgcatcagcgcctgcggaattccgtttacaagacgacggagttgcgcctacgctcctcccgtacttatcaatcaaggcaggaaaaacaaatggtacggcaaagcgccgcgccagtattttgtttatcaagccgattgagaaggacgggctgcgtattgggcagaacgtttttcaaattacaggtacgattgatctaaatcaacccgcatctgtgactgaaaaggacgtcgagttgctgctcgaggtcatgaaggaggactttatgaaagaagtcctctccaagtgtatcgcccctaattaaaagggacataaccaggagaattt

SEQ ID NO: 1799 - DNA, 408 bp, unidentified
  source 1..408: mol_type = unassigned DNA; note = unclassified Riboviria sequence
ctgaaagatagcaaacagattataacaagtaggcatgattatgttaccctgctcgatgggagtggtaaacagtcttgtgatgctgtcaaccaggttgattcctcaacccaaaatacggatggtacggtcagcgcaagcaaggccaaatataaccaaccgcaaaacccgattaaccaaagggtacggaaaaaggtccgcgtgaagcggaatgatttgttggacttggatgataagttcatacccgaacaggccttaaaagccttaagggatcaagagagacgtggacaggcgcggtccacggcgtcaaaaagacctgcctacgtttgcaatctgtgtggacgggagtgcccccatgtatgtgattatgtatatatagaattagaagattggcaaagaatcccccaccaa

SEQ ID NO: 1800 - DNA, 410 bp, unidentified
  source 1..410: mol_type = unassigned DNA; note = unclassified Hypoviridae sequence
ctcgtatccctcggtgattgaaccattgaatgacttgtgaacgtatgctcctcgtctgacaaatcctccagctccagtagatggtaattcttcgacatgttgattcatattgttacgtatgaatttcactgtgtttggttttgttgttttgtttgtgcttcgaacagttcgtttttcttctactcgttctaatggtagagtagtttccctgttgtgtgctttgtgtttgcgtattgtaataccagtattcagaaccttctatatcgtgatatagaagccaaacaaaacacaaacacaaagcacacaacagggaaactactctaccattagaacgagtagaagaaaaacgaactgttcgaagcacaaacaaaacaacaaaaccaaacacagtgaaattcatacgtaacaat

SEQ ID NO: 1801 - DNA, 410 bp, unidentified
  source 1..410: mol_type = unassigned DNA; note = unclassified Riboviria sequence
ctccgcaattgagttctaaactacgagggtggtatttaattcccggattacttaacgttcccgaaggccgtagaatcttgattactttagacggaatccaaaaacgtggatttcatcctgaccagtgtgatttgtttacccgactacaagatactaacctcaaaattgctttgacagcttggtcgtttgcgaacgacggggcttcaaaatacaaatactccaacagcccaccctcggactatccccctgagggacatagagctgttcattggctagtagattctcgcacagctggcattactaaaagctggctatatatatacgattggcacaatacaactggtattataaccccaaacaactttccattcttcccggatagagacgagtttgatgtatcagctgtacgc

SEQ ID NO: 1802 - DNA, 410 bp, unidentified
  source 1..410: mol_type = unassigned DNA; note = unclassified RNA viruses ShiM-2016 sequence
ccctgtaattttatatgatttgtagtagtaaacaccagttcctccaaactataagttacactacacaaatcatataaaattacagggtgtaaagagaagaggtactggtgactacgctgcaacagtgtttcactagcttaaagtgtgatagtgtttaagtgtgtttaattgtgtagtattattgatccagtattttagatatagttactgtttgttctcgcatcttagggtttaatatttatagtatttaataacaactgtattagtagtgtaagtttgcagtgagtgtttttatcctttagcacagcctttcctgaccaaatatagagttgttgctattgttgtttcacaagttaatctgcgtgcctgcttagattagaataacttttcaatatatcagtgttacttat

SEQ ID NO: 1803 - DNA, 411 bp, unidentified
  source 1..411: mol_type = unassigned DNA; note = unclassified viruses sequence
tccacttgtaggctctccgtgtcacgactgatccatcactgtgggatgcatagtcacaccagcatggttagatcaggaatggcagactatgtggttgaactaggtcgaagtgcgtgtatggaagctgtggagactcggaggatcaagtggtcaggagtcatcctagatggattgaaactaggaggggaactacacagcttacagactatagcgggtcatgtcactgcatcaggaaaatgtgaaggatcttcatactcagaccaatttgggagctggacaggagttgtggtgcaggctgaaattaagatgttcatagacagatatgccacaacagcaaacatcagaacgggggatattacgatcagagggggcctccggtgcgaatgggagtcttagtcatgtttcgacaat

SEQ ID NO: 1804 - DNA, 411 bp, unidentified
  source 1..411: mol_type = unassigned DNA; note = unclassified Carlavirus sequence
tttgccggggatgacatgtgcgctaataggaagttgaggcttaagactgagcatgatggattccttagtaaactgaaattgaaagctaaagtggatttcacagtgcacccaactttttgtggctggaatctcactaagtatgggatatacaagaggccagagttggtatttgagaggttatgcatctcaaaagaaaatggaaattttagagaatgcctggacaactatgcaatagaacttagttatgcatataaacttggtgagaaggcagtaggcttgatggatagtgatgctgtgagttgttattaccaatgcattagaataataatcaagtggaagcatttacttaggagcagtgtggctatagactttgtcgctaatgtggcttaggtttcttgccataaattgaat

SEQ ID NO: 1805 - DNA, 411 bp, unidentified
  source 1..411: mol_type = unassigned DNA; note = Hubei picorna-like virus 77 strain WHCC115343 hypothetical protein1 sequence
ctagatcctttgaaagagttgtttggtagttatattccatacccacatcagaatcctgtctccgattttcttatcttacctagttctctcactactttcaataccaatattgatggtttagttaaagtcaatggtgagttttttgattataactggcgtggttatgtacgtatagttaccggtttttctgcaacccaaattggtttaggttatggtcttcgtatttatatagagggttctgatcctagttatcgagctggtgtaactccatgggcttcggatgaaggttttgaaaatttccgtaatccaacaagtcttaagaaacgcttttctaattggaactctactgtatggtatactaatgctttaacttctaaaacaactctttctaattctggtgctagatattgg

SEQ ID NO: 1806 - DNA, 411 bp, unidentified
  source 1..411: mol_type = unassigned DNA; note = unclassified Fusariviridae sequence
gttccataaacacaccttcgtgatgaaactggtctcacggagccgccaaaatccagtgtttgggatgtttaggttggcgaccaggggcacaaccctctgtagcttggctggaacgggtgcgtgcaacgtgagtacacgcaacatgtccgtgcaagggaacctgctagccagtggtccgttaagacagtggtgtcttgaacaggccatccatttcaacatggagaacccgagtgtaacgactgcgaagtctttaaacctacaacatgaacagtctactccccaggccttttggttattgggtggtgtgttagagccccaaagcaaccttttggaccgccggcttaggcccattgatagagctcacatcaaacgtgaagtacctcaccagtcttcacccacgatacaacactg

SEQ ID NO: 1807 - DNA, 412 bp, unidentified
  source 1..412: mol_type = unassigned DNA; note = unclassified Ilarvirus sequence
agtaaatctacccatcttcctcccaccctagcatgacgaaaatccagaaatggagattgcctggtgcgatgtaaaacacaaaattcccggcggacttcagattccttgaggtccactcggtctttgaaggtccctgggggggagttgggaggcgaccccgtaaatttactttacgcaaccgaattcaagtctttgtgagtgtcagattgtgtcgtcgttcgtgaggtgaatgctgtcgaggaccactccaattcaactcactcgtcagtcacatagtccataagacttaggaggttgtagtagtttacacccatacacaactttgttgtaagattcaattctacgacgcgttgttagttgaggtccactcctttcaatctgtcgtaaaggcgaatatcgagcttatcttaag

SEQ ID NO: 1808 - DNA, 412 bp, unidentified
  source 1..412: mol_type = unassigned DNA; note = unclassified RNA viruses ShiM-2016 sequence
cctgggttaatattaaacccagggagcctgttttgctccatttgagctcgaagataaagcttcggctttatttagagtatcatgtagaccgcggtcattcgtgatcgcctatacatgttggagcaaagccctctgatggcgaggattttaagcctgtagttcgctgcagggccatcataaacacaaccacccaaacaaaataacctacccaaaccaatcccattccttagattgatttccgttgacaattttgctattgatttgtgacgattttaccgtgtttttactggtttttccgtaagaaataaccttgaaagattacacagatgtcggatctgtggtcaaggagacgtagcatgttttacgctactatgtactgaaatctaggggcagccccccaccaaacctttat

SEQ ID NO: 1809 - DNA, 413 bp, unidentified
  source 1..413: mol_type = unassigned DNA; note = unclassified Tymoviridae sequence
ttctcgggccccactccgcccctttcctgcgttctttcctttctgcctccagcctccccgtcccgttcacaaagatccatcagcataaaccttcaaacaaaagagccaaaactctcctaagcaacctccgctttggctttgatggcatcctcaaggtcaagttggctcaaggtgaaggtttggaccccgatctcctctcttcttggagtcgccgtctcacctacgcacaacccaggcaagttgaactctgcctcatccaaggctttccaggctgtggcaaatcccatcccatccaacaattgctacgcaaccgacacgactatcgtgtagcagttccaaccactcatctacgtgaagagtggaaaaacgccctccacctttcaaaagaaacttggagagtgaacacgtgggaa

SEQ ID NO: 1810 - DNA, 413 bp, unidentified
  source 1..413: mol_type = unassigned DNA; note = unclassified RNA viruses ShiM-2016 sequence
agttgtcaccccagtcctcgagcacgacgttaaactgctccccccgttggtccatgggggttctgtatatagttaaagagacccttgtataattggataccacgtacatgtttatgttttatcgttctttctataatatgtatatgtaggctttatatttgagagtggaccctatttagggtagtgtcctcgcacaaacaagaaacaacggccctacaacttaacccggtttgtaggatgtaaataaatgggttggtcaatgtttatattttaacaattggtttctatctaagccagggacagaaactgtagatcaaaatctggttggagctgatgctctacagaagactcaccatgaatatcagggaggtgagctagtgccacagagtggcactaccgacgatgtatctttg

SEQ ID NO: 1811 - DNA, 414 bp, unidentified
  source 1..414: mol_type = unassigned DNA; note = unclassified RNA viruses ShiM-2016 sequence
gatcttctggtgtttgtacatatgcacatatatatgtttttatatttatatacttttatactttatgttttatttttatttgttagtgacaattgtgatttatattcacaattagtacttacgtctcgggacgttaaaggaccaagtgagctgcctctcactagaccctacggggaatgggcattgtgtatattatgatttacttttacaggaatttatttctccttttgtatttctgtaattgaccctgtatatactgtttcataaaagcttgactcgctagaggtgtataacactaaacctcattgagtataaacatagtaaagtgttggtcaatgtatatataataataaaactgaagaacctagtgtcgtttcttcaggctttacacgtaagacacaatctttaaagggt

SEQ ID NO: 1812 - DNA, 415 bp, unidentified
  source 1..415: mol_type = unassigned DNA; note = unclassified Ampelovirus sequence
cgtggtgaacgtgtgaaatcgctaaaggatttttaaagagacaaattaacaaataaaacgacggacgcaccgcaatccatcaaagtacaacaaaaccctaaaaaccactacaagaatttacaaaactcgtcacaacccaccctagtaagggtgtttcgagaaaacctacccgactcacaggacttcaccaaccgggcggaaacagaactaggagaatctaccactaccaggagctcgtcacctgccaaagcagtcctgagagcccaaagaatatgagctaactccaggcgacgagaaatactcgcacacgagcttcatatctttgccttgctcgagctgcaagtggtgcgcgttcacaaccacgactattcgcggtgggtaagaaacccgggagacgacttaactccctaaaccg

SEQ ID NO: 1813 - DNA, 415 bp, unidentified
  source 1..415: mol_type = unassigned DNA; note = unclassified Flaviviridae sequence
gtatgaagataaatcaaagaggtgagagtggattaccacagcaacccgcttcatacacattggactataccaaactgatcttttaggctagattgggaaatgtgaaaagaacagcattaggggtgaagggcgaaaggatgttagccatacaccgagtagcactagccctgataatatgcgagagccccaacctgagtagatgaggaaggccgtagcagtgagtacactgtagccaacaaggttcctactggtaaggatcacccactaggtatgacctgtagttgggggcatgcccaggccatccttaatgcaaccgggggttggttgcatgaatccaatagggaaatctacacagcctgatagggtatcggcgccgatggggaaaggctctataaaatggcgtggaacatagcac

SEQ ID NO: 1814 - DNA, 415 bp, unidentified
  source 1..415: mol_type = unassigned DNA; note = unclassified Picornavirales sequence
aaatacgacgcgatcgccacagctgaagcaactttatgatgtcgtccacgaggccaagaggggcagaggtaacccggacgaaaacgagtgatgtcttatctagggacttttacgatcctgaagaacagcacggacaaggtgttacggtgaggaataagatccagtatcacgtccaataacagtgtcgggaacaggggagaagtgtaaaactccggataaggcaaataaatctaattgaaaggagagctttgctagactagtaaattgtgaaagcaatccaggaaatgataacggttgaattcttatactcagcatagtatatctctgtagcagagagtacttgcgaaaacgattctttgaatcactagaccttcgcgggtcgccaactcagaaccaaaccaatttttacccaaac

SEQ ID NO: 1815 - DNA, 415 bp, unidentified
  source 1..415: mol_type = unassigned DNA; note = unclassified Riboviria sequence
atctgggaatccgcttcctaacccacccacaggatttttcctaatctggctgggaggttacagtcgctgtaatgcgtgcaccaacgtttgcgtgctgtacgtatttagagcccgatgtttttctgagtttattgccaattttcttttttcagtattttcattttattattgtattatttttattcaagtgccttgcctcctgtggttcgtgcagctatgtgtaaggttttcaatactatttgtaagtttgatcctctttggttattagcactcggaattcgcaaaacccaaatgattttatgagcaagtagaggagatttctgatgcatgtagtagtttcaggtcagccttttggcgccccatttttgggttattacagtcgcgtgtcgcttttggtaagggcttcggatgcgcg

SEQ ID NO: 1816 - DNA, 415 bp, unidentified
  source 1..415: mol_type = unassigned DNA; note = unclassified RNA viruses ShiM-2016 sequence
aagcgatcatattacagctttatgttatagccttgtgtgtgtgagagacacactcattttcctataattattttccttagtcggcccctgtgattcgggaggtctgctatgtcgtataatcacgtagatagccggtggcaatatacgtaagaccaccatgtcggcacctgtagtgggtgatttcactttttgatactgtgagagtttccagtattctgtgttatgggcacacttccattcatcctttcaatggattccaggacacgaacgcgtgcatgaagaagcacgttagtagcgatagggtttatacggccaaacagagggtgggacattcccaccagattgaattttttccggtcttggaccacaaaacaacttacgacacagatacaacatactgatatacgaatacaat

SEQ ID NO: 1817 - DNA, 415 bp, unidentified
  source 1..415: mol_type = unassigned DNA; note = unclassified RNA viruses ShiM-2016 sequence
agcctattgcgccagggatctcgcttaacagaacaaaggtgttgggcaccttccgatcctactgcatgtcagcaacctccagcttacggggagtgtttagcatccgtgctgactatgatatcgctaaaaactgcaaaccagtatatgacgatgtcagaaggatggtggcgatggcccctagggatgaagcaaccatgagcattgctcgcaatgctgccatacgatcatgccgggaacacaaagttgatcctgaatgcatcccagtcgtgttggcaaaggctttgcaggtgactaaatccgaggtcaatgcagctgtgcatctcagtcgccgcaaggagcgaaaggctacgggtcttttaaactccttctaccatgtcctccgaaaatagaacctgcaacctgtgttccattaccc

SEQ ID NO: 1818 - DNA, 415 bp, unidentified
  source 1..415: mol_type = unassigned DNA; note = unclassified Riboviria sequence
gtatgcaagcaaaggatataaccatcaccttgacctctggtgaaaagaagtttgaggtcctttctccggccggggctgagaagcccgcggagtatcgtctagctgacgattccttaacccctactgccgcgccttacttaagtgtaaaagcgggcaatgcgggtaaggtagtgggaactcgtaaagtttccatcttactcgtcgtccctgtccttaaagacggggtacgcgttgaccagtcggtcatgcggctagagtttaaagcatctggattagctacgattgcatccattaaggaggcggtcgaaatgctcactaagttagtagagcatgatagcgtccagactgctttgaagacaacgactgctcctaactagaacagtcatttaaacttaatatcacaagaggatgtttc

SEQ ID NO: 1819 - DNA, 416 bp, unidentified
  source 1..416: mol_type = unassigned DNA; note = unclassified Aparavirus sequence
ctttaaaagtcgtgcgtggcttcaccacgcacgatcagtactatcagttaaccactcttgaatatgctcaatgaccctattcaacactggtgtctcttagtacattattttagcacttaacgtgcatgagttttgcccatttctttcaaaaaaatgagtattcgaggagacgtcccgctccccgtcttatttcaaccgtagactcgacatctattggtggacatttaattccagtcgccgtaagttgcttctgccccgcgctatattttcttatacttatggttctataggtctggtttaaaacgtaaatagacggcccacaaactatagaacgcgtacccggaacgccaatcccggataagtccctggatatatagatgcaccgcaatataagcctgcagactgtctcatatact

SEQ ID NO: 1820 - DNA, 416 bp, unidentified
  source 1..416: mol_type = unassigned DNA; note = unclassified Posavirus sequence
actgttctcgcacgtgtcttttgtgtggtttgtttttgtttatcgtatcggaaccatcactctattaagcctctctattgtttggcagcttcagatggttataagaacacggtcataaatgacaaaccgatttatgaatatgaaggagaagcgatttgtgatttgcatattccatcaaaacttgcttacatttggaaaactagcatgttttctggtggtggtgttataagatcaatgacagtttcagatactagaacgtttttttatgataaccctgagtttgcagatatctggatctttttttttagaaactgagttatctgattagtgtgaacaactgtgttggtgtaaaagtccctgctcctactatttcggagtatggtgtcacctttgtttatcttgtttcccatcccaca

SEQ ID NO: 1821 - DNA, 416 bp, unidentified
  source 1..416: mol_type = unassigned DNA; note = unclassified Picornavirales sequence
gtaaggactagatactatttaaactagagtacattttctaattttgcataaactatggcggcattgaccctggcgtaaacttcgccagcaccaccaatgtcaaatgggttatgtatgattatttcttgtattaggtttatttacttctaccgaccactccttagtttccgatgctagatgtatctggagcgcggaaaaccatttatttggttagtacgagcactggttttgtttagtattcagataggtgtatgatagaaaaagtagcaaaccctcaaacgaatggccctctttttgagtaagccggaagtgggttatcttttccgtgggggcacggttaaggagcgctatgttggatgacagtctcgcggcaggtcgttctatcagcactataaataccacctgttgaccttcac

SEQ ID NO: 1822 - DNA, 416 bp, unidentified
  source 1..416: mol_type = unassigned DNA; note = unclassified RNA viruses ShiM-2016 sequence
ggtttatgcgccacgcacgatttaatactaccagttagtcacacttgagtacactctattgactctactcaattctgacgtctgttagtatcattgattaaataaggcataagtgctcatagcacattagttttgttttgtctctaattaaaagacaattcactcgaggagacgtcccgctccccgttttatttcaaccattgactcgacatcaattggtggacattctctatcctccgccgtaagtagcttctgccacgcgctatattttcaacacttgtggtttcatggaagtagtttaaaacgtacctagacggcctacatgccatgaaaagcgtatccggaacgccaagcccggacaagtccctgatatatagatgcactgcaatataagcctgtaggaggacccatatatt

SEQ ID NO: 1823 - DNA, 416 bp, unidentified
  source 1..416: mol_type = unassigned DNA; note = unclassified RNA viruses ShiM-2016 sequence
tgcaaggtttgcatcccttgcacgattcactatgagtcctctttgtggcacactagtataccctactttgaccctagcttttagctacgctcatgtacgctgtactactctgtcatttttggttagtagtgttttgagttttcctcataatttgcacctttattcggagagacgtcccgctcttcgtcttatttcaactcacggactcaacatccatgggtggacatttcttaactcccgccgtaagagctttgtgccccgcgctacatttctcatacttacaggtttgcaggttctgtttaaaacgtattagacggccagtatactgcaaatgcgtagccaggattccgaccctgggtaagtccctcagtatgtagatgcaccgccgatatagccgatagggagtacgatacatc

SEQ ID NO: 1824 - DNA, 416 bp, unidentified
  source 1..416: mol_type = unassigned DNA; note = unclassified RNA viruses ShiM-2016 sequence
gccgggagtaaatatatgtagcgtaatgatatataataattatattttcattacgttacgtatgtttgccaggtaaggtggtttaccagccatcatttccttttttcggtccattggtgatatgaccactcacccttcccattgttgttttcaacatttcagcttacatccagccgctcttgcggctctgttccagctgtctgtaagtttaacagactataatcacctatgaagctacaattagcagagttgtagtggaggagttcggttactgaaaccaaatcaagggcattgaggattctctgccgagattagatgccttatttaagttttgcgtgctttccaatttttacgtggatcaaacgcaaggtagcttgtagtcaagccgttgacctaaacaacagtactacaccatt

SEQ ID NO: 1825 - DNA, 417 bp, unidentified
  source 1..417: mol_type = unassigned DNA; note = unclassified viruses sequence
agaaaattatttggtgtgagcgattatgatgtaggctcttggattatataaaataattgacccctttgttgaaaggataaatcaacctctttcgttttgaagcgtggaatttcaattcgattgtagtagtgtcattcctatttaggatacggttggacacataaataactaatcttccgcccagctccttgaactataccatctaccactaggagttgtgtaaaattatggtggtcaaaacaacaacaacaattcttcacaatctggcggttcccagtctacctcccccgctcagattcacaatcccgataaaatggtagacaatttgtcaacagacgttcaacaggaaactaatactacgtatttcgaacaacgagcagttttcgatgagacaaccttccaggctcctctctctca

SEQ ID NO: 1826 - DNA, 417 bp, unidentified
  source 1..417: mol_type = unassigned DNA; note = unclassified RNA viruses ShiM-2016 sequence
tttgtggctttgggtgtctgatatcacatccaacatacaaaccattagatatcctgacagttacatttactgcttgaatactatttcaggaaaataattatattcaagagcgtgggtgctgtcagaagaacacctgggcgtttcccgaataatctatttagattagagatgaaaataatattttaaatataggtgttactcaaatattttccaaactctggtgaactataagtgaagtcactagttttataatcacttactaaaaagaataacaatattggcgtatctcttgcccaaagagatctgacttgtggttggcagattcaatccgaacaagtgtcttatgacacaaaaaataatgatgcacaagacactattgtctcttttcatgatgcggaaattggcagtagtgttgat

SEQ ID NO: 1827 - DNA, 418 bp, unidentified
  source 1..418: mol_type = unassigned DNA; note = unclassified Husavirus sequence
aggacaaggctttgcgggaaaccgtgaagcaggcaggtggagaggtgaagactgagctcgctcggcttcctaagccgagagagcttaagcagagtctttccactgtcgcccgagtcttgccgacgaaggtgcctttggcacctttggcgacgatggctcgccgagcgagacgccgacagctcaatgctgcgttgaagtcgattgtagcggtagtgagtaattggaatcgctcgtttgacgtcgctcctcagacgtgatttcgaccctctgcgcgggcagtaacaatagcgcctcctctggcagttctctggataagaactgttcccagtgcgtgggaaacaatagcgcgcgcgtcttggatgattccgctaagaatctcccaactaacatcatttgcgggtcccccgcttgcagggtg

SEQ ID NO: 1828 - DNA, 419 bp, unidentified
  source 1..419: mol_type = unassigned DNA; note = unclassified Torovirus sequence
gttttagtcgtagtttggttaattataatgttagtttagtgttatataatatattagttggtaaatatttagaaaaaggttataaatgggtgaatggtgttcttaaacgtagtgatgttttggttatacagtatgttcaggaggcttatgctactaatcctgtgttaatgattgtagttattgtttttgtggttgttgctttgttaagtttattgttttcatattgttgttctaggcctttacataaggttgagaaaaggttattgtaatgtttttgttagaaattatatttaaagtattagctttaattattttacaccaactgctaactttgtaccttaatggtgcaagtgcgttaccagttgtgtgtgatatatttgaacctcctttttatagttgtaggttgagagaggatagtt

SEQ ID NO: 1829 - DNA, 419 bp, unidentified
  source 1..419: mol_type = unassigned DNA; note = unclassified ssRNA viruses sequence
ttaacttactaaccgcttacgtaacgaatgagcacatctacctaacttacacggggggatattggtcaatttttatctatactatcatattacgtgatgtcctagatcgtttaattttaaatggggtggttcctgttttcctaatatacaagcctagtgaaaaggatttaatccaatttaacagtgcgaagagtatcttattatctaaatatccaactgccagattcaacgtttatgacgttgttactgatattcctgtgacgagagtagctattgatccagatgactttcaagaatctaaagattttttgacgaagggaattatcaatttatggggcgaaaagaaattatggaacgaatggtacaacttcactcagaaatttattaacgagtcaaaatcgggttgtcgaaacacgcta

SEQ ID NO: 1830 - DNA, 419 bp, unidentified
  source 1..419: mol_type = unassigned DNA; note = unclassified Riboviria sequence
ggataattcccttgattaagtatattaatactttacgtgacaaaacctcctctgagttcgttcgcattgaaccaactttcgacggtggtcagttgtctttcactgcagctgtagttaaccctatggtggcaggcgtagtcgtacctatggtacgaggcgccgtccgcattactttaccgaccgaggtggtcgtgtgtggtaatgtgtgccctcagaagattaatcaatctgtggaagtgaaattcaaccttcatcagggcgctgctgatttagcagaacttcgtgctgaagtgttacgcgcaatggatattgctattacctcgtaccaacttggtaacggtattgtcccacctaccgatgcttcttttgcttcggcctgatcttttacaagcttcctcacctcctactaaggaaaacat

SEQ ID NO: 1831 - DNA, 420 bp, unidentified
  source 1..420: mol_type = unassigned DNA; note = unclassified ssRNA viruses sequence
tgtactcgcctttgtttaaaatcaatactctttgtcaattgaattgggtgcgaacttctattataaataacactcttataaaaatgcaatcctacaatttcatgtcttctattgatagacccattatactaatccttttctctaatcttctctctttcaaagatttgcgtaacaatagtagatatcctgatgactatcctctttattgtctctcaaaagaccctttcttaacttatatatctaatattctcaggtgtcttaatattagtaaaaatgtcgatattaacgagctcatcacttttaataatcaatattcctatgctattgaaaaatttaaatatttcttaaatgtctctaattatctatacaatagagaaatctttgaaaacgaatatcatctaacttggagacaataataaa

SEQ ID NO: 1832 - DNA, 420 bp, unidentified
  source 1..420: mol_type = unassigned DNA; note = unclassified RNA viruses ShiM-2016 sequence
agacgcgagccccctctatctgtgtgccggtacggagacattttgcagccattaccggacggtgcgcggattttgagcatacccgcaaccccatgcgatcatcgtcatgtcattagtaaaatcgcatggttttccgattgggttggcttcaaacgcctttcttgttttactgggtgcctgaagaacgagctggtttcgttgcataaccgacaccttgttcgtagggtggaaccagaattcaagacagtgaagcaggttgcctccaattggttatcaaagtttcctcggttcaagaattaccatcactggactgaagaggaagtgatcagccatacaacacagagtaagcgacaaaggacgcgtgacgcttttcgcaagtaccacgaggagggtgttgcagcctcggaccgccgcattaag

SEQ ID NO: 1833 - DNA, 421 bp, unidentified
  source 1..421: mol_type = unassigned DNA; note = unclassified Ampelovirus sequence
gcggctgagcacaaggcccgacccagacatttttccgccgattacgttgctacggtggacatattgaaattgttctccggggtccatatattggagaattcactacgacctgttaatggtcgaactttattgaaagtcgttagtggcagcgtgagcgttgtgggcgtaggtggcttgccgctacgacttagtcgcccgcactgacgcgtctttgttagacgtgtctcgatttagattataccaccttagggtatcgtccagcgccctggtggtagtatattcgtgcactggggttgcaacgagtaatacttcatcaaaagccccacctgctaaaatcgagaggcgtgagtctccacgggtagcggtgccagtagcagatcggcaggctatagccgatgcccgatggaaaaagtacgaagtt

SEQ ID NO: 1834 - DNA, 421 bp, unidentified
  source 1..421: mol_type = unassigned DNA; note = unclassified Arlivirus sequence
gcagacatacaacttctatctcaattatgcttacctctatctctcttctaatactcgggttgtcgataaagccgaattacataatttatgctatcacgactagaaaaaaccttattttcagaagattgtaattacaactctactcatgagtttattcaagaatctggaattgtaacatcagatccaacattctgaatgaattggactgttctgagtacaatgagtagagaaagcttaatctcatattggattttaaataacggaacttagaaaaactctgagatgtgcaaattgaaattatatttcaagctttcgatgtcacatcagctattattattgagacacaaggaaagttgtttgttttagaaaatactctacttctagtaaaatagcaattattagaattatatttacaagagac

SEQ ID NO: 1835 - DNA, 422 bp, unidentified
  source 1..422: mol_type = unassigned DNA; note = unclassified Hepacivirus sequence
taaccggatacactccaaagccaccggacaggctacctgccgtgacccgcagccgagggtctcgtagggggaagtgcgcgcttctttgcgcacagccggcggccataacctcggtgaggcaggcggagtgataagctagtgtgaatacccatcggcggggaccacaccaaaccctgtcgcccgctgcggcggtgggtcctggcaacaggaggccgcagtgagtggttcttcaggggaacgctggtgggggcttagcactagtggaaccttgcgcgctgaagccctggggcggtcgtgaggaggggtgaggaatgctgggaaggtacccgaaaggatctgatcccaggctaattgtctagcccctcccgacctttttccttttatttttcttttctgttgttgactgattacatagatacaag

SEQ ID NO: 1836 - DNA, 422 bp, unidentified
  source 1..422: mol_type = unassigned DNA; note = unclassified Bacillarnavirus sequence
gttttcctggtatcttgtacatatacatatttacatgttttcatatttacatatttatttgttatattttattgtgacaattgtgatttgctttcacaattagtattttcgtctcgggacgttaaaggaccaagtgagctgcctctcactagaccccacggggaatgggcgctgtatatattatgatttacttttattaaaatttatttctccttttgtatttttataattgaccctgtatatacaatccataaaagcttgactcgctagaggtgtataacactaaacctcattgagtataaacttagtaaagtgttggtcaatgtttaaaaccaaatgagttaggtgtaatctcagaaacaccaacatccggtagggatacaatttctctctattattgtgatgcagatcatattaactat

SEQ ID NO: 1837 - DNA, 422 bp, unidentified
  source 1..422: mol_type = unassigned DNA; note = unclassified RNA viruses ShiM-2016 sequence
cgattggggatctcggaaggtaccttattcgccggggacatccgtccagatggtcacctcgtgaccattctggtgcgtatgtggcctggcaatttggttggagtcctcttattagtgacctttatcgtcttgctgacttggctgatgccacggaagcgaggataaaggcactaaaggagggacatcgtgagcagaagtatggtggtaaactaccaccatccataccattctcacagtggaagtctggagtgaagaagactctagtcaatggctatcgccattgggtagagtacgagattcactttaaacgcgttgagaccaactggttcactaccagatttgagcttaacgacgagtatttaccagacttagacaacccgtcagcgaatattagaagagcccttgggcttgatctttctaat

SEQ ID NO: 1838 - DNA, 423 bp, Ghanaian bat henipavirus
  source 1..423: mol_type = genomic DNA
tgatagaccgggaagacaacgacaataccacaaccaacagctcccaaaatgcggaacaaacaagccccagaaccccaaggagacagcccagacaaccaaacccggcaccccgcagatccgaacaaagccccgcattcgaccccgaagcgcaaaccaaaaaaaccaccaaatctgccacagaacagccaaccaaccccaaaggacaccaacgacgcaaaacccgcttaactataaaaaacttaggatcacaaggtacaaaagatccaacagaaagacaaccagcccgactgcacagaacccgaaaacaagccccaaaagaacaaacaaaaccccgagaggagaaacaaccaatccccacacccgaacaaccctccacacccacacatagctcgaccacttgctcccaaggagtcttttcacttc

SEQ ID NO: 1839 - DNA, 423 bp, Britarnavirus 4
  source 1..423: mol_type = genomic DNA
tttttgttataatggtaaccataacgacggtttaatcaatctgttattgatttagtccgtgtcctagtttattctagggactttttggtcagcctaccagctgaccttttcactcgtcacattcttgagtgaataaattgattcttctttgtgaagatgtacaactatgcctggtttctgtttttaggcgatttaatgtattagttctttttgatttgtagcgtgtagagcgcactaattgaggtttccgtcaattcctcattagcttctcctttcggagaataacgaatcacattgaactcatgcaaatcacgtatgagaactcagtattgtatatgtgtgtaggccggtaccgtatggataaatccgaaaacctgatcacatatgttttattgcttgcagaaaactatatgactcacctag

SEQ ID NO: 1840 - DNA, 423 bp, unidentified
  source 1..423: mol_type = unassigned DNA; note = unclassified Picornavirales sequence
tttttagaaacaagctgcgaaaagatttcttttaaaacaaaatttcttatattatattttaagaaactattttggttcatatttatagacagttaagtcgctactgtaagctacttcttaattgttagtttaaattgctaaagtattttctacctcaagcttttaaaaacccaatcaattttttcgtgatttttaaaattttgaaaataatatcatcaaaaattttctgcagtataaacttgatcgctcgctttttaaagatcctgtttatatttgcgcttaacatcttcaaaattatctttgttagatcgttcacgatcttatctcatttggtacttttgactctgttgatattaggcattttgaaaccaaagcaatacgcgctttttgtattggtacttcacgcatattcgttaacacaaa

SEQ ID NO: 1841 - DNA, 423 bp, unidentified
  source 1..423: mol_type = unassigned DNA; note = unclassified RNA viruses ShiM-2016 sequence
gtttcggaatttcctttaataaaaccgccccgttgacccgatggggtttatgtatacagttgaacagggttgtgtgtatatggataccgtgcaaatatttgtttttcatattttgtattatttgtataggctttgcatgcatagatgtcgtcctcgtgcgatacccgtatttacgggaggttgatcacccatcaagatatgacgtacaatgtggattgagtgtgcccattgtattgtatattgtagcttactaaaacaattaaaagaaataaaaacaggggtttccaggattaccctacgaaaaatagaaatcttggtcaagattacaaaaacattaaatgcttgaatgatttgccacatgctttagccaaacaagaccctgatggttggttgggcataaattattgtgcatcttgtaatctt

SEQ ID NO: 1842 - DNA, 423 bp, unidentified
  source 1..423: mol_type = unassigned DNA; note = unclassified RNA viruses ShiM-2016 sequence
cctaggttaaaacctagggtagatgtagagagcaatggaacattaattaaatcttaacagagatgttccatcttttaaaatctactgaaaagtattttgccgtaaccacacgtaacgtggcgtacttatacgacaaataagagagtagcacacttagtgttagaaatttttatttaaccatgcgttagatgtgactttctatgcacctctgcagacaagaagaggcggtattccaccgatagcaggaaggtttgtttgtgtttctttagcagaatgaaacacagcgctcttgcgcgctttgatttcgtcatgagagcaagatgacgctggaacagacagctattttcttaagtgtttggacataaacacacgttgtgctacgttagtaaacgagccctctcgagagttgtaagtttaacaaat

SEQ ID NO: 1843 - DNA, 424 bp, unidentified
  source 1..424: mol_type = unassigned DNA; note = Picornavirales sp. isolate wpk049shi02 genomic sequence.1 sequence
ttgattcacaatacgggatgtagttacatgcttcatttttacatcataatggggggcttggtttttaataatagttcgaacagcgttacgcgcttgtcgattttcgtaaatggcaggggcttgatttaaaatttttgttacaggagctacacttttgacttttgtatcataaaggggaccttgagtttgattagggttatattctggtaacaccggtatatctctacacccatgttgagatataccggtgttaccagaatataaccctaatcaaactcaaggtcccctttatgatacaaaagtcaaaagtgtagctcctgtaacaaaaattttaaatcaagcccctgccatttacgaaaatcgacaagcgcgtaacgctgttcgaactattattaaaaaccaagccccccattatgatgtaaaa

SEQ ID NO: 1844 - DNA, 424 bp, unidentified
  source 1..424: mol_type = unassigned DNA; note = unclassified Negevirus sequence
ctccactgtctccgttccaactgttgcagactcgtgatcgcatcttgcgtgaaggtagcgcctgattttcaggaaaactcaacagttgtcggagtttccattacacaggtttcttcctcgttcttcctgtgttgttctttgaacgagaatcggttatttcttgcccttataacccgggttttattatttttgcctaaatttctattcctataatttctttactctcactatcgcacaatttaaaaatttgaacaaagaaattcatttgaatcaacgtctttctgatagtgaaaaaacatttcactaattcaagacgataaattatttcctacattgttttatacattgccaggagatcgattggatttttctgctgtaagatttgtgaatgaataagttaaatatgctttagtcaattatcatc

SEQ ID NO: 1845 - DNA, 425 bp, unidentified
  source 1..425: mol_type = unassigned DNA; note = unclassified viruses sequence
gtaaggtcagtcactttggagacgttaaatccaacccagtttcaatactgatggttagcaaaattgatatatgtatatggataccgtgtttgttttaatctttatatgttttgtagaaaattcataggctttgcatatattaacggtccctaccggggagttttgttcgagttcaccgtgctcacttgtaaatatgtcgtaccatatgagtcaatccactctatggtttgtaaataaataaatggattggtaatatctttaattataaattatgccgggatgtacaagccaacataagttttggtcccggggaagcaaacgtacacaataaatctgtgtcggagacacagtcagcagtgactgaaaattctttattgaaaatagagaaatttaagccacaatctggtccggaaggcactactgtt

SEQ ID NO: 1846 - DNA, 425 bp, unidentified
  source 1..425: mol_type = unassigned DNA; note = unclassified Deltavirus sequence
gctccccgcctccagcccaatccctgtcgttgcgggccgccagtccaacggaggaattgtcaggtccaccctggatggagcttctcttggttggaaacaggcctacccggatcgtctgacggagcccctcatacagcgggttcccgagatatcctgtgccctattgcttaccgtatgtaccaagatgttcacctgttgttcccctgctttcccaagtcttgggttgtgtttcacctgacgacctcctcttcctcccctgcccgcaacgttcccgacccctcttctgtcccgatcttcgcaaagttggacttacctgctgcggtccaacggggcgggaccaccaacttattttatctcttaagagaaaattgttgatttgggtcccagcccttcgttgaggagcagcagaaccaacacagcgaagg

SEQ ID NO: 1847 - DNA, 425 bp, unidentified
  source 1..425: mol_type = unassigned DNA; note = unclassified RNA viruses ShiM-2016 sequence
ctttgcataaagagatttaagtgaattgaaaagttctattaaatttgtttaatgtcaagggcagttgagagacttattttgattacagtcatcgcaacactttttgtagttatcactgattttattgttgaaaatagcaaagaaggtgaagttactattttaggtagaggagattgtataatctactctggtaagaggtactgtgaggagggtagaaaactgtcctgtcctggtgtctatgaagatttctttttcgtttcagggttacttctgtcaaagggtttcacttttgcttcaattgcaggtgccatagccttactagtctttgtatacgggaaaataacaagagaattgagaagtagtgaaatagttgattcaagatttgatttagagcaagcgagagaaaagaggcttctttgtaatct

SEQ ID NO: 1848 - DNA, 425 bp, unidentified
  source 1..425: mol_type = unassigned DNA; note = unclassified Riboviria sequence
attggagaaataatatggcacaagccaaagacttcacgtttaatgacggaacttccgatctgaccttcgaggtcttatcacctgcaggaccaaatagtccagcagaatttcgtcttgttgatgacagcaaggcaccaatgaccctcccatacctcagcattaaagcacgaggtgtgaacggagcattggcccggaaggcatcaatcatgtatatcgaacccatcgtgaataacgaaggggtccgtacaagtcaaaacgtatggacgctcgagtcacggattgatttgagtcaaacaaccgctactacccaaaagggtgttgctcgtttgatcaaactgctacaggaggacttcatcactgaggcccttacaaaagctgtagctcctaattaaacaaaccctaatcttacatacgaggtttattaa

SEQ ID NO: 1849 - DNA, 426 bp, unidentified
  source 1..426: mol_type = unassigned DNA; note = unclassified Hypovirus sequence
gggtgtgaaaacttacacctgctctatatactttcgtattatagaggcgcaagttcgcttcgctaagtcgggttcaaatcccacgcaattttacctgttacaggtttattgcagcttaggtacacttagacttaggagtgtacatccttcaatgtagagttccgagctggaactctcataaggctcgtagtgagcacccgggattggtcgtctcgggagtagaaaagaagactactttaggttagactatcttcctttctgactttaacggctgatgcgctaactcccacaccgcaggtgtggataggttggttatttactcagagtaaaagttggataaattgtttagtttttttaaaaatgaggtactggccatagaaccagaaactgcggctaccccgcacatatcaacaaagatatgccatc

SEQ ID NO: 1850 - DNA, 426 bp, unidentified
  source 1..426: mol_type = unassigned DNA; note = unclassified Picornavirales sequence
tctgcaagcacgggaagccccgtcttggggacgttaaaacccagttttgtcaactttaaagacacgagagggtactcacgttaggcaaatactctttgttcggcaggttaccaggatttggattttataagcccgagtttgccatttccttggcaccgaacgattataaaacatcggaggagttagagtggcgttgagttatgccattctttagagctatttgctcactctatacattgacttactacatatacatatacacaattacataataaagaaatagatatagatatagagggatcttatacatcccaaaacacactagaatttttgctagtgtgcacttgttgtggaggttttgttcctcaagccgatttagcagaaggagaaatctcatccgctcaggacaacttcgcacaacagacc

SEQ ID NO: 1851 - DNA, 426 bp, unidentified
  source 1..426: mol_type = unassigned DNA; note = unclassified Picornavirales sequence
ttattggattatggagatatatgatggcctggcatggaatccaggaattcttacatattggaattgtatcccacgtgaacggggatgtggcaagtcccccagtaatgctgggctctacccaatgtgtgaggaccgtgacttcaagactagttatggtcgtgtgacaagggaaagagtttcttacccgcctgtgtattaggtgtgtacgctgggaaaccataagcgatcgaaggtaaagtggtgctgaaatattgcaagctcaatgccttctatcgtgagtcggtgccgctgcatttgatacacgcccctcttttggggtaaatggctgacacgggcatccgcacttgggaatgtgcggctggaactagactgggtgatagcctgccggctggcgctgttgtcatggtatagccagttgattgccac

SEQ ID NO: 1852 - DNA, 427 bp, unidentified
  source 1..427: mol_type = unassigned DNA; note = unclassified Alphavirus sequence
ccagcactttagatttacagccacggcgtgtaaatctccagtgtttcgagttgcgcaaagcgttttctggataaatgagcattttcgaatacccactgactgtcacatcagtcattgacgtaattttcgcaacgttcaaaaccttcgcctcttcttcacccagccttggtctcttcctgaagaccatttgcaactttccaatctgggtagcttttgcaatcggtttgatctgccttacgattgacaggatcagcaagcacaagtacattcggtatttgaatacgagacatcacatcgtagagtcaattgccgagagaggtggagtcgtgccagttcagcccaagttgagaacgcacttctcacctagacttggcgatcgggacatcacgtctgccacacccaccagtgcatcacgcaggtggaacta

SEQ ID NO: 1853 - DNA, 427 bp, unidentified
  source 1..427: mol_type = unassigned DNA; note = unclassified Picornavirales sequence
aagagacaggaggttcgtcgtattgtcgattttgcgtatttatatgcatatccgcactgccgcttatcgtggtttcttttaaatgacatttggaaagacaaatgaacacttgtgtttgacgtttgtgtactcactatatactagtatagtgagaatgaataaatggctcgattattatgtgaataagtgaatgaaacttcaagacttagcaactcgattgtgtttagctaagtgtgcttgaaagtaacttatttatcatatgtatcgcttgaatttattttgattgcctatggtgtctaacccacaccagcctcttcatgaccctctgtgcacgcagggattaacgtgcatgcaaagtagcgctgtttgagaacagttttaaatccacaatatgtggtctttgcattagattttactcgtgggaata

SEQ ID NO: 1854 - DNA, 428 bp, unidentified
  source 1..428: mol_type = unassigned DNA; note = unclassified Ilarvirus sequence
tcagtcgatggaaagttaatatcactcaccaagtaaatcgctctttgttagcgtgttgagttgagtactcgatttcatttcgacttcgatctggtattatccgattgttgtgtttggtggtcccaaggcagggttggcccgtttgggaattgtaaatccaagcaacaaggagagcagagagaatcgtgataagttcgatctatctcagttgtaaatccgatagagaattaggagcaaaatcaacggtatcaaagcgatacttactcttttgaggacagttgattccagggttgctccgaatttctcgacgcggtggctgatacgatttgagtatcacgaggcttaggatcttcggttggacggaagagtaagggttggccctgctttcgaaagaacgactgattcgaatctgtccagagacgagaaga

SEQ ID NO: 1855 - DNA, 428 bp, unidentified
  source 1..428: mol_type = unassigned DNA; note = unclassified Iflaviridae sequence
tgacattgacaccaggtaaagagaacgagggaatccgaccctatccgttctctttacctggtgtcaatgtcaacaggctccagtggggtgtctggtaatcacccccgacaagtacagtcgttaaaatgcagaccccagtaaggtatctggtacttacctccgacccggattaatatttctgtggagtcgttaaataattagcaagaaataagccgaccactggttactccctcataggtttcagagttaaagtgggctcctaaatatgtgagtgtaccgcatttttagtgagtacatcagtacaccggtctatgtgttacaacttatgaagttatattatcgagtgacagagttaacgtgagaagctcttactgctaatcttgcatttactgcctgtaaaggtaacagtgagattaggggctgagtag

SEQ ID NO: 1856 - DNA, 428 bp, unidentified
  source 1..428: mol_type = unassigned DNA; note = unclassified Negevirus sequence
gcaaagttgtcaaccagcatcctcaccagatgtaattgccgactgctaagattgaacccgaattctaaacgaatttatcaatcgctcacccttgtccggtgagtccaaccagctgcctaacccgcagaaacatttcacgcgaattaatttgacgtgaatccaattgtcccagttatctggtacaaatctccgtttaaaatttttattttaaaccttttcgtcactttcacccagtgacacttcctgcagatccttctgattctgcaaaaattgtccgctcactccggatttctttgatttgttcacatcaaatctcccccaccttcattttgaagtcctgtctcattaatagtgagactcccccttgaattgttttcttcaattctcccctttttcgttgttaagttctgtcctaatccgacattacg

SEQ ID NO: 1857 - DNA, 429 bp, unidentified
  source 1..429: mol_type = unassigned DNA; note = unclassified viruses sequence
taccccctttcagtgtttgttaaacagactcttgatttgtaacccttgttgttgaaagaactagctattcaaaactagtgccatcatttgactaacccgacttctgtcggtggaaccctgtctttgacggctcttatctgcgcattgagcccagtttgctatgtcatcaccaccaagaaccatttcacgattcgtctgcgttaacttctccgcatttccgcctgattgcccattagtttgttcgactttctcgtttgcgagacttgaacgccgcacttttatgctctgctcagcatattaatccatcgtattaaacacaaacgatcgcagatttacccctgcgttaccaatagcgtactagtgatgtcgcactagcctaaccctgatcgagaccacactcgtaaccatggattccagccaagccttaaa

SEQ ID NO: 1858 - DNA, 429 bp, unidentified
  source 1..429: mol_type = unassigned DNA; note = unclassified viruses sequence
ctacactaaggtagttttcccactaactctaggagtaggaatagcattgatagcattcaccctaacaaggcccactctccccacggtcggggattcacaacacagcctacctcacggtggctggtaccgtgacggaacgaaaacagtggcctacaactccccccactactatagtagtagtttcatccctttcttagctgtgcttggtttaacactcttaatatatgtttctagtctatgttctggtcggggtgctactaggagttgccctcattgctgtggtcaacactaacaatcctcagtgtactatagtattcaccggtcattccactactatccaggggtgtgagcggttaactaatttgcatgacatcatagcagcggttaataaccgcttaagttttagctctagttgtgaaaactaactcc

SEQ ID NO: 1859 - DNA, 429 bp, Hermit mivirus
  source 1..429: mol_type = genomic DNA
ggcatcctataacaccgggtgaggactgttcagtattgttctcctatgcatgcttagttttagggtcacaggccgataagttctctgtctggaccatctttcttagtagtttgtaagtgcctgtttcatatatagatgtactattaagggtttagtttttaagtatatttttctcataatcatttagcatcataagattgtttttctcagatgaatgacagatacttctgttccactactcaaacttcccctctttctttcagagggaaggaagacggggagttggactcccagttatccctattagtccttatctcaaacctgcaattccatcagatccaatatttttgctcctaatgttgtaattggctagtttaaaagaacacccccactgagtaaacattataacacaattacacagttccaacc

SEQ ID NO: 1860 - DNA, 429 bp, unidentified
  source 1..429: mol_type = unassigned DNA; note = unclassified RNA viruses ShiM-2016 sequence
agaacttgtccacatatttgatgcttcgggataagtgagcctccatgttgtcgaggtgaagactactactcagtctttaaaagagaggagagcgtccagagtgtgtgtcttgagcagaccacactttagtatttgcttacagaaaatcatattaaagtggatggcaatgccactgaaaaagataattgcatagagattgaaggtatttcaatcactcctaacttagagttgacgtctggggtcaccggttttgatagtgaagccacattgtgcgctgaagtgccttctttaaataagggaactttgcgggcagatggcgacatcaatcagttgaagcattatttagcgaggccatttttatggcgtactgggacttttcttgtttcccctgggccacaagagattgcaccacttaacaatcacgcagat

SEQ ID NO: 1861 - DNA, 429 bp, unidentified
  source 1..429: mol_type = unassigned DNA; note = unclassified RNA viruses ShiM-2016 sequence
tttgtcaaaagcctgaccgtcaagtcgttaaactgtccggatgcggaattatctgtagtcgaaactctaaggaggaaccaaaaatattctgtatatattgattacgatgtgttatatgtgttgacaactacatatatattatagcgcttgtatactgctggttgccgtagtggcaaggagtttttactcctggagaaggaccactccaaagaagtgttgtgataggcaagtgctctgaggcgagcacttgacccgtatacatagtgccttactaatttttataatttttataatactgaagttgacagtataaacaacttatacatattatatacacctcaatcgggtacggttggggtaacagatagtgtagcccctaatgtgaggagtgaaactatcacaaattttgaagtgcagaatgcaggagaa

SEQ ID NO: 1862 - DNA, 429 bp, unidentified
  source 1..429: mol_type = unassigned DNA; note = unclassified ssRNA viruses sequence
gggcggaaggccgcctcctcgccggttatctgcctccggccaagtgactagcgcttctgctctagctctcaataaccctctcttctctacaactggataaagcaaataacatcatggacgcctccaacccagtcaaatctgcccagcgctatactctctctgagctccgtgattctcgacttgcatacaaaagacaggacctgaaagcgctgcaagctatggcggcttccgcggagaggcaactgttctcttcaggaggcccaagcaaagaagcttttcacagtcttactatggacctaaacgaagacctctcttcagtgcgcgcggcctctggcttatgacgtgaggagtgagatcgacttcctcgacaaactcccgcccgttccggtagataataccaaactcggggacaggcagatacaccccgcc

SEQ ID NO: 1863 - DNA, 429 bp, unidentified
  source 1..429: mol_type = unassigned DNA; note = unclassified RNA viruses ShiM-2016 sequence
aacacatccaacatgtcttctttaattaaatcaaagatatgggatgtgttaatatttccggggccccaacttgtcagcagttgttcatcttgggatttacgtgggcgctcaaccactatggaacttccatatgtggttttaatgggttacccgccatattttaaacgccaacgcgagcgtgctcgcctttggtctttgatatgtagagtgattaaataacactctggttggttataaacatatatcatggtattaattttaaacgtcagttaacaacgggtgtcttgcgtgcaaaaacacttcttgctgaatggttattattaatatggtcatatatgcttataaatggtgattaggtaaattaataccgggtgatctgcgtgcagaatcacctcatattgagatacctgttagtcatgttatcattag

SEQ ID NO: 1864 - DNA, 430 bp, Ollusvirus scaldisense
  source 1..430: mol_type = genomic DNA
gctctcaatattacacttatttactttatttctttatctatgaatttgtccttcaattatatatatccctcatctaagctgaaagacattattactttaaaaaataacatattttgtccttctgtatagttaagtctgttctcttactccatccatcatggcacgtagacaaccacatagatcaggtttgtccgagattaattacatatatgatcactgtaatgaagcacctataaaatggttaattgatggtgtaaaattgtgtgtgaatataaagaatcattggttcttccagggggcaaacctcgcatttgcatggtatagagataatgttcatatctacttattaccattatatgattaccatatggtaaaattgatttacaatgttatgattagaggttaccctgattacatctagtgtccattg

SEQ ID NO: 1865 - DNA, 430 bp, unidentified
  source 1..430: mol_type = unassigned DNA; note = unclassified Picornavirales sequence
atttagcaacgtcagagatgacattaaatatctaaagccgcctgttagggtttctaacagcttatccgtggaagtgccacggaacataaattaagaccccgaaggtcgagcgttggtgtgatcttgcctcatcattttatttctaagcagagattatagaggtagtgctgccagcgtaattccctgcctatttaggatactaatcacacagggattaggcagcccctaaatcaaagagagatgcttagactcaggtgcaataaaagtgtaagccctgttttataaatcacttgccaataataataataataatggtccgggcgcaccaataagcgtccaacacacagaaataccttctgacatacacacaagtggttctgccacagaagcggtgccagaagacccgacagttagaggaggagagcataat

SEQ ID NO: 1866 - DNA, 430 bp, unidentified
  source 1..430: mol_type = unassigned DNA; note = unclassified Picornavirales sequence
tccgatctcggcgctaggctcactctctgagtgccctagtggtcgttcccttttcaacaagaataaaacttgtaaaaattgaaaaactttgagtaaagtataaataccctcataactgagtaaaagtctgttatatatgtttgtttgtttgtaggcatctccgtgccttctacactactatatttgcccctgtgcgtacgcgcttgtgccgtgaggcctcacgtacgttcagatgcttatcctgagggatgtagcacaaggtgacacttatactagtacctttttccctgcccacgactggacctgggcggtgtaggtgtgtctctctcaatgtttcactccgaaccgttctataacaaggttgtactttccaacctgatatcagtgtgctataaattttctatcattgtggttagtccactacccaaac

SEQ ID NO: 1867 - DNA, 430 bp, unidentified
  source 1..430: mol_type = unassigned DNA; note = unclassified RNA viruses ShiM-2016 sequence
cagcgctttatttctaaatacccttatggtagatgacatacctcctgtgtacacttaatgagtgtacatacgagtgaggattttactgtctggttgttatgaaaggatgagttgtttcccagtccctttttcaaataagattccctttgacttttataagtcactgcaatcgtagtctggaatcgaatactacgtcgagaacaagagtttaccaaacgttaacgtgcgttcatgtgagcgttttcgtttagggcttgtttttggttaaaccgagtgtttaaatatcacgagatatatacccggaggttttcactgatccggtgtattaattttaggtgaagctaatactaatacttatgttattaagggtgtcaaagcccaaaccctggcgatttctaaccatgctaagcaggaggaagctcaagcttac

SEQ ID NO: 1868 - DNA, 430 bp, unidentified
  source 1..430: mol_type = unassigned DNA; note = unclassified RNA viruses ShiM-2016 sequence
ggaaggctctttgagccctcctatggaatcttggtatgatgtaattggaaggtaaagccctcctcttggattatatataaacatttttctacgttaaattagatactacgttttaaacgttagtagtatcacccttaaacatttatagtcacgcaatgttaaaactcatgacttgtacccttaattgatccggtactgacaacttaatacgattgtcatttatagcagttgaacggcactgctagtattagttcttttgtaatgaatttcttactcctcaagaaattacatttaattgcaataacgattgcagagactacttaattgtagcccacggtgtgagcatagacgctaagctcacggtaacggttagggaagcccaaaagagacgccaacccacaagtgctcttgaaccctgtattatacaatc

SEQ ID NO: 1869 - DNA, 431 bp, unidentified
  source 1..431: mol_type = unassigned DNA; note = unclassified viruses sequence
cataaaactatacaaccgtaaagtcttgtccgcttctcttcagggagaagcaaaaacttggataccgttatataccgtattctaacttggccaacgtgcactactttggtcgtaataccggtttcagttaatctgaagctataataattgggttgtttaaaacatcccgtaaaacttacgagtttaaatactcgtttaattttctgctctttccttgagtagaataaaaattttcacacttcaccgtgtgattaacttgttttccagttaactgtgaaaaccgtcttttcgtttcctgtcaatcagggagctaattctttgagattaattatctcttttctgttctctcgtaatcgagagaactctgtctttggtcctcgcaagagaaccactaccgtctatagacttctttgtcttctcttgatcttcag

SEQ ID NO: 1870 - DNA, 431 bp, unidentified
  source 1..431: mol_type = unassigned DNA; note = unclassified Picornavirales sequence
gcaattaaacgagaatattgattgttaaaaaattcaaaagtgtcactgatgcctgcgatataactgagtcaggcatcagtgacacttttgaatttttaaacaatcaatattctcgtttaattgcagagcctcaaataggtatctccattaatcatacaattgatgggagcctagatgacgctattaataaatctctatcccttttttcagaattatctaaagctctatccgataaatatcaaacaaccgttaatgattatcaacgtaaaattatcgcctcaataacgtcaatttataatttatatcgtttcacaactcacaaattatctcttcaagatttttgtgttaatctctgtggagttattggtgccgctggtcttgcctccgacatcataactcaactaataataactgttaggtctcttttctta

SEQ ID NO: 1871 - DNA, 433 bp, unidentified
  source 1..433: mol_type = unassigned DNA; note = unclassified Picobirnavirus sequence
ctcttgtatagtttacaagtattctacgaagggaggtgtagcatgttgctataccaatcgcaattttatcaagcgattaacaaaaacatcctgacgttactgactagctacatgctggcatgcacagtaggtacagtcattgtaacggatctgtggaaaggaggtaatttatatcacagatattcaggttaagtactggacattgaacgaaagtaaacgtcacaatgttagtactgagacacaagcagccaatgaattggctgaaactaggcgacacaatgtgtcgactgaaactttgggacgtgacaccctaaatgaagataaacgtcacaatgtcacaactgaaacggagagtagacgccataatgtacaaactgaacgtgaggcgaagcgtcataatgttgctggtgaagtcgaaaccaaacgacataat

SEQ ID NO: 1872 - DNA, 433 bp, unidentified
  source 1..433: mol_type = unassigned DNA; note = unclassified Narnavirus sequence
gaagagtcaagcacacagaatatcaaacaccgatatccaagcggagaaccttagggtccccgtaggtaccgggtttggattacgtgagacggggaagtctggtaaaaagagtatcgcagatctctttttgcccattatctatgataatgatgactatacccttccgggtcgattcgactcattacttaacttaaagtttcgtaataagcgattgcggttttcaagaaaccgagatattaagtatctcccggactcgtacgcctcgttcgttagaggtaggttagcaaccgaattgggacttagtcccctaaaatctaagattttagtcggtagatctattaccactatattaagaatagaggagttagtaagggctatcattgataaccttctattgtcatttaaaggatttttcttagaaaaaggccggaaa

SEQ ID NO: 1873 - DNA, 434 bp, unidentified
  source 1..434: mol_type = unassigned DNA; note = Anopheles darlingi virus isolate MAC, complete genome.2 sequence
ttgttcagcagagttattctcttcaatttcattgtttttgtctactgtattgcatgattttattaaccaggatgactattatatacatatcatcttggtctttgccacttattttatatttgctatattaatctgtgcgttagcacttaaattaaacaatcccaggcgtgggcaactgtgaggtttctttgagcatgtacgcagatatttgagtaagatagatttcaggtctttccaccaccttggcggaatgtactcctttatgctatattatcatacacttataattttactctgtgcattggcatttgacccaaattggttagggagtgggcaactatgaggcttcctcgagcatatacgcaggtacttacacaggacaggtgtaaaaattccccatgacatttttttcaaaaaacccgctagtcagaaag

SEQ ID NO: 1874 - DNA, 434 bp, unidentified
  source 1..434: mol_type = unassigned DNA; note = unclassified Riboviria sequence
tgattgaagaaccgacccatgaaggtaagctattcataaatcctgccaatgtggtccaagtttcatcagtatcaccctgaggggtgtctgcttctgcttggtccgtgataccacatcggcttgcaatggctgccaccgtcgtgtcaaccgtctgtgctgtctgtcctactgactggattgcgtccatcgtaactgtataagggttacgagggaggtaatcctgccagcctgcttctgctattgggagggtgtccaaatccgtatccgaatcgtcatcgtgtggggtgtctgcgctgggtccttgtcgaatataaatccatactgctttatcgtcaatcgtcctgtacttttccatatccttcatcatctgtattcgtgggggtcctcgaaaataattgtagtttgcgtcgtctccaagggcttggtatagtgtc

SEQ ID NO: 1875 - DNA, 435 bp, unidentified
  source 1..435: mol_type = unassigned DNA; note = unclassified Capillovirus sequence
aggagggttatttggggagtgtgattttggaaatgatagtatcttcaaagattacattaatagagtaaaaaacaaagttgaaattgatttattgaatgagagaattttgaggataaacactgagatgaatcagtttgacccaaggatatacatgatgaataagatagggtttgtcactagcacatcaatgtttgaagcaggccacattgcatcaaatgaatccaaccagtcaaaaggtcttcctccacaaacaagccggccatacgatgaggtgaaaccatacatgccattgagtttgaggaattcttatgagtcaaggacaaaaggcaacaggcttctatctatcctgagaaatcaaaaacgtttatgtgatttaggatcaggctctaccttaggtttaagagttttggagggcttgaaaatgttcaaggagga

SEQ ID NO: 1876 - DNA, 435 bp, Hantaan orthohantavirus
  source 1..435: mol_type = genomic DNA
ttagtgaatgtataacccttattatgtgatcattatatactactgaatcattatcaatcatatttgcactattattatcaggggaatcatcatatcagggtatgggtacatttatgggtgggaatcattattcaaagggtgggtcagttaatccgttgtgggtgggtttaggttcaggctgccttaagtagcctttttttgtatatatggatgtagatttcatttggtccttgaactaatcttgctttctttcctctttttctggcttcctctgcttactaataacaacattctacctcaacacaaaactacctcaacctaactacctcattagctgtcgctccttgattgtctttttagggagcatcctatagtagtagacaccgcaaaagaaagcagtcaatcagcaacatggggatatggaagtggctagta

SEQ ID NO: 1877 - DNA, 436 bp, unidentified
  source 1..436: mol_type = unassigned DNA; note = unclassified viruses sequence
tccgggaaggctatcagcgcgaggtggggtgggagcgtctccactggcggttcggtaacatttggtctccatctacgaagatggctagtcgcttacgtggacacttcggtgcccgcgtcccgagcgctgctaatgcagcccttggagagcactggctgttggagcagtatggtcatggactagatgcgtcccttgctgtctgcgtagcggtgaaactctggcttacgccaaccattaaggatgaggctatcgcacagtttcatccttttctggttggccggtaagttcgtttccaggtgtgtcccgtccttttgcaattccagcgggcgcaccattaaggaaattgcggggggttcataccggccctcaagtccgtgcgagtacgtctatctactcccaggtagtcggtggcttgtatagagttcatgataacaca

SEQ ID NO: 1878 - DNA, 437 bp, unidentified
  source 1..437: mol_type = unassigned DNA; note = Cryphonectria hypovirus 2
tttcagtagttccgcgctaaaagcgactcctttggaatcggtgatttgccgattacatggaggctccctggagggattgcctatctgaaagataagatggctgctgcacagccgtgggcgaaacgtttgcgtttacaacgcgtaggagaggtcctaacaaacaacctctaacgtggtccaggtggtgacactctccattccgtcaaggacgaagctcgtccgtgaaacgagtgactcgcaccctgaatgagaagagagaataacggatgcttctggtagttgtggagtagtgaccctagaaactaatccccagaagacctctcgctcatggatgccggaccaggtccacacctagtttaggtgttttgatggtaaaagaaacaccgcagactctgtcttgacatgaccggttgaccccgtacgaggtccgacttata

SEQ ID NO: 1879 - DNA, 438 bp, unidentified
  source 1..438: mol_type = unassigned DNA; note = unclassified Sopolycivirus sequence
tgagatacccgaagaagtgagttatacgactttgcacacaaatatatataagttcataactagttgttttgcaagaagaactctacggatgccagtgagttatttaacatcaagcacgccttgcaggatgtgcatattaaatcttacgcgagttacatgctctttgatatctttgagtggccggttagaaattgtctcctgtagtgcccaattgataaaggtactattttagtccctggcaagcagattcaataacgacccaccgtcctatactctttgactcataacatggttaatcagcgagagttaatatgtgcgtgaccttacgcagaaatgcacagggtaatgacctccaagtagaactagtatgtgtttgtatccctggaattgatttgaaataatgatggatgattaaggcgaagatttattcaatgaaat

SEQ ID NO: 1880 - DNA, 438 bp, unidentified
  source 1..438: mol_type = unassigned DNA; note = unclassified RNA viruses ShiM-2016 sequence
gctggctgccttagtcttgggcagacattaaatgcatccgctgtgtcttgggcagacgaaaaatgcatccaatattgtcctgggaagacaataaaagcatccctctgggcgtaacctaccacgtctatcggaaccaaaagggggcactctgtattgggttaccacgcattcccaatatgtcagtcattgggggatgacgaaggcttgcagagtgaggcattttcctcgtaaaatacccctatttaggggagtgttcgccgcacgtaagactgacgcacgctgtactggttgagtcacctttacgagcgttaatgaagacttactacaacaaatacaaaaagatttaatgttacaattaatgaggaaaatttggagtcacaacaccaaaatgttaggtttagtgatcagactccacaatgggactacaccgtagatagt

SEQ ID NO: 1881 - DNA, 438 bp, unidentified
  source 1..438: mol_type = unassigned DNA; note = unclassified RNA viruses ShiM-2016 sequence
ccccaaaaccccccccttaaactcaacactgtagtggattcattttccgttgcaaaacaaaacattactacccgcatttatgtaggctctgtgttttctatgcgaccgttacattaatctctactctgacccactagtttataaaaccgaagacctgaatgaaacgattttccttcttttcaacctctaacgaacctctgacggcttgagaaacctgaagttagtaattatgtttaaaagaaaggaaagtcaaacgcgatgactcttacatccctattccataccgttgctccacaatgtgagcgatgcgaggtcgggactgcagtattaggggaacgagctacatggagagttaattatctctcccctcctacgggagtctcatgtgagctgtagaaagcggttggcacctctcgttacctcgcctgtacatgatcc

SEQ ID NO: 1882 - DNA, 438 bp, unidentified
  source 1..438: mol_type = unassigned DNA; note = unclassified RNA viruses ShiM-2016 sequence
caagtatcccatggcttttaacgattggcaggctattgactttgtattttttgacttagaaaacgaagttgtggaaatatatagaggacacggccttgccaaccctgagagctttgtgacatatacgatcgatgatatcaatttgtatcaccttcatcatcgttttatttgtgacatcattgttagcgcgtatcttgagcagtatcaagtcattgtacatccgcttgtcaacaacgctgcactgcaaagtgctcttggcgggtaaacgcttaaacaaaaaacgctttattcgcgggaaagcagttgacagacctgtacagctaataaggcgcaaacgattgaacacaatcccaaaaaaacaacaaataattgacgcaaaaaactacggaaatcaccacatctctttgcaacattacggtgactccaaagacatacaaa

SEQ ID NO: 1883 - DNA, 438 bp, unidentified
  source 1..438: mol_type = unassigned DNA; note = unclassified ssRNA viruses sequence
tttcgggaaagtaggatgtatctttcaaaggaaagataagctaaatgtgcggtcgcacaaggttagatggaaggaaatgtccattggcataaactcagattgattgactttcaaatagaggaatgattcgcgtcgcgtggcgcctagtttacactgggcgcatcggccttgcatataagcaaggagcgctacgtcgtagcacgcattgaaaagtccccttaagcaagggagcctttgctctatcgattgcagatagagacggtgaacaatataccgaaccgcaacagagaaagcggtagtcaaagcttacaagtcgcaatggaaaccgtgatcgtacggatcacgtgaaccgaagttgcgcaatctgacaacttacgtgacaggattaaacgtccagaaggcccatggtccccggcatcgggaatccacagaaccaac

SEQ ID NO: 1884 - DNA, 439 bp, Odonate anphevirus
  source 1..439: mol_type = genomic DNA
aaattttatagaactatacaaaatatttgggttaagctggagactttctgcttgtttatggaataacatgtcacaattaattttacataaacaagccagaaggccattaaagattaatcgaaaagcattaatggcttataaaaagacccctcaaaacttagatctgacagaatctgcttaagaaaaacccgtaagagtcaggatgccaaaacctacaataacatttacttgtcctaattgcggtcatatcattagatatgaaaggagtgatctaccagccgtccctttgaaaccaggaggaagtgcttcaaaataacaggtcattaattaactttaactatgagactgtattggagataatccacatcattgattatttttaagttgttaaaattttgttttctggtagctaagattaatctcacgatgcagtacaaca

SEQ ID NO: 1885 - DNA, 439 bp, unidentified
  source 1..439: mol_type = unassigned DNA; note = unclassified Ebolavirus sequence
atgagcatgtaataatgggatgatttaatcgacaaatagctaacattaaatagtcaaggaacgcaaacaggaagaatttttgatgtctaaggtgtgaattattatcacaataaaagtgattcttagttttgaatttaaagctagcttattattactagccgtttttcaaagttcaatttgagtcttaatgcaaataagcgttaagccacagttatagccataatggtaactcaatatcttagccagcgatttatctaaattaaattacattatgcttttataacttacctactagcctgcccaacatttacacgatcgttttataattaagaaaaaactaatgatgaagattaaaaccttcatcatccttacgtcaattgaattctctagcactagaagcttattgtcttcaatgtaaaagaaaagctggcctaacaag

SEQ ID NO: 1886 - DNA, 439 bp, unidentified
  source 1..439: mol_type = unassigned DNA; note = unclassified RNA viruses ShiM-2016 sequence
gttgcatgggggaataccccatgcaacgtttgttttagcctgtggcgacacagggaggcgtttggacagcttgctgcccagcgccttgacttatcgctcttttcttttctttttctattacactttccgcaatagttctttatttcctgcaacgaaagccgttctaaaagaagtgattagttgtacatccacttttacctttctttatttacttctctctcttgaggagttcttttcagaaaaagacatggtgtgagtaggagtgagtctgatggccgagcgtggttcacgcataactggtcagattcactctggagaagcccttgtcttggctctatattcgtttgtgtaagcccgtttaggtatgtgaaacagtttagtaatacagtattcgtagtttttgaggggaaaccttcttcttcttttacttaggctgaaa

SEQ ID NO: 1887 - DNA, 439 bp, unidentified
  source 1..439: mol_type = unassigned DNA; note = unclassified RNA viruses ShiM-2016 sequence
atcagctcacgttatttttccataacgcttgtgtgtaagtatcgttacgttccctaacgtaggttgggtaaggtgacgcttctcgtcataccatcgttattttaacaactttaagcgagcaaagaaaatttttaatttcttattagtatttattttcagtctcatatagctatatatatgtgagggttttgccacttgccctttaaaggttaaaacaaaacactattataactagctaacgactagcctacctctgagtgttgttagagcaattgtaaaactctaacatcaacaggttcaagggcgaagtgccacagatgttataaggtgtgtggtcaattgcaccttgatgtgcggggagtgacgtcctacatacaattagtcacatacatgatggccaaaggggatgcttcggctgaactgagtagcaacacaaaat

SEQ ID NO: 1888 - DNA, 439 bp, unidentified
  source 1..439: mol_type = unassigned DNA; note = unclassified Riboviria sequence
taatcacccgaggggtcttacccatgcaaaatgtaacactaacaatagcggacaaatcttatgcacgttttcaggaaacgccagataaaacaacttacgttgcttctggccattctgtcggcgatgtcgatttgctgctactcggccgtaccgtcccaaccacaaccagtggtaatgccaaagttcgcgccaacctcgttaatgactttacgtcaggaaccggggatgataagaccgttattggacgagcgtatgctaatgttgaaacatcggtgcctgctatggcatcagatgaagacaaagcacagctgctatctgatttacgggcctacgtggcatcagaatcttttgccgaattgtataataaacaatcgatctagtatggaattacccgtactagtttaaatagattgtaaactttaacaacaaggttaagatt

SEQ ID NO: 1889 - DNA, 439 bp, unidentified
  source 1..439: mol_type = unassigned DNA; note = unclassified RNA viruses ShiM-2016 sequence
atatccaggtggaagagcctacacgtgtagagccagtgcaacaggtatacattccagaagctccatatcaaactgaacagaaccatttaaacttgaggacggcctctgccattgcggaggccagacagttgaggcagggcgctcctgttccgccaccaaggagtgtggcgggaccagtatctttgagtttgcagaggcagacggttcgtacgggtggccaacaatcgattcctgcagtgccaagcgtagtttcgcacggcatttgcgaatcgcagcagggtcgagagttgatatcccgtggagccaggcgcaaacgctcgaagaagcagaaaccagcgttgtcgcaagacttagttgtctaaagcattatccgcaatatgcagataatgctgaagacaacctcaattggttgtttttggcggcggttttggatgttgac

SEQ ID NO: 1890 - DNA, 440 bp, unidentified
  source 1..440: mol_type = unassigned DNA; note = unclassified viruses sequence
attcagacctcccacccgacgacagccccacacccgactcgcgtttttttcaaaaatataaaaaccaaaaaaataaactacctttacatccaccccctgtttccaagcaccagcccgggtcgacagccgacctaaacctttacggccataagccatgggctccctactcctaccctgacccgttacacacaccttacctctctctgctaaaatacgcagcggagacaaatttacatgctcagaaccatgtcctcgccttgttactgaccatcacaaagcacaacttctctgactttcaacgactcatcgaccgaactcgcaacaaccaccttctccaactgcggaggagacaagacgctgcgttcccggatatctcttttccaccgggaccaaggaacttcccccgcttcggcaaaaaagacgagctcaacctcgacctc

SEQ ID NO: 1891 - DNA, 440 bp, unidentified
  source 1..440: mol_type = unassigned DNA; note = unclassified viruses sequence
attctgtcctcccacccgacaacaaccacacaaacgactcacgtttcttcttaaaatataaaaaccaaaaaaatgaaccgactctacaaccacccctgtttcacaagaaccagcccgggtcgtcagccgacctaaacctttacggccataagccatgggctccatattcgtatcccgatcccctgcacaccccttacctttccctcttgaagtacgccgccgaagtgaaccttcacgctcaagaccacgttctggccctacttctgaccatcacaaagcacaacttttctgactaccaacgcctcattgaccgtactcgtgacaaccacttgctgcaacttcgacagcggcaggaaagcgccttccctgatatctccttccctcctggacctcgcaactttccccgtttcgggaagaagactgagctcaacctcgatctc

SEQ ID NO: 1892 - DNA, 440 bp, Pillworm peropuvirus
  source 1..440: mol_type = genomic DNA
tccatctcaagtcatcagaagaggaaagtgcaggaagctctaatctaaataggtaagttgagtgatctttatatataataattttaggtaattgtattggtttttaataataaatattctctttttaggacccacgtctgaaggaattggatgcatcaagtgtcaaacaattgtcagatgttagaaatcacaaagttgaaactgtgcaatatatccccaaaggggtacaattaagtgttttgtctgaattgtattttctaggagatagcttactataaattgatcaatcaaaaaattattttgtattattgatgttagaattagctttagtgattttgagtgtgattcacaatcaaggtaatcatacacttctttaaaggactttgttataattatttattctctattgttttaagaaaaactaacaagtcaaaatcaca

SEQ ID NO: 1893 - DNA, 440 bp, unidentified
  source 1..440: mol_type = unassigned DNA; note = unclassified vectors sequence
tttttctcgagattgcttcatggaaaagctcagcctcaaatcaatgaaaccaggatttaattatatggattacttgaatctaagattacttgacaaatgataatataatacactggagctttaaacatagccaatgtgattctaactcctttaaactcacagttaatcataaacaaggtttgacatcaatctagttatctctttgagaatgataaacttgatgaagattaagaaaaaggtaatctttcgattatctttaatcttcatccttgattctacaatcatgacagttgtctttagtgacaagggaaagaagcctttttattaagttgtaataatcagatctgcgaaccggtagagtttagttgcaacctaacacacataaagcattggtcaaaaagtcaatagaaatttaaacagtgagtggagacaacttttaa

SEQ ID NO: 1894 - DNA, 441 bp, unidentified
  source 1..441: mol_type = unassigned DNA; note = unclassified Metaavulavirus sequence
tgctgtataagcatcttatgatgacatataaaactgttgcagaaacatccaagttaatacacaaataagttatgtttcaaagggggtaatacactatcacgagacctaaattattaagtacacactaagtaccactgggtcagacagattgagtcttctaaaatgattgtcgcaaataatctctatgacactactgcacttaactattagatctgaccaatactatgataaccagtttcttgattattgatattctgattcgcagttcaatttatgtgggttaggcttatcatatattaattccgccaaagtagggggaaaggtttctcaatcagtagtgacagttccaggtctcttcacaattactgttcttataagatattaagaaaaaactaacaattcagcagggattaaacaagagacaattgggggagaattacc

SEQ ID NO: 1895 - DNA, 441 bp, unidentified
  source 1..441: mol_type = unassigned DNA; note = unclassified Sopolycivirus sequence
ttaacgaattcgccctttgctacggcgggttgacggcatagttatttaatcaccagtgaatggggtgtgtaccttcacaaaattcttaaacggtttacgattctgatatacgacacaacaattttaactgatctcttatgacgacaatggaaacatttacagaatatactagcttgccatcaacaaggaattctccagacaaagttttgcggttttctattgttcttggatgcatttttatactgaccttgcttgttattatgactacgattgagattaaagaatatacagaacgaagacatcttgaaagaattttgatagagatagaaactcggcgaaattatgtagaagagtctcttttgaaatcaaaatctttcaccccgattgattctgttgatttttcacaaacatcaacagttcactctcactatattgatttta

SEQ ID NO: 1896 - DNA, 441 bp, unidentified
  source 1..441: mol_type = unassigned DNA; note = Picornavirales sp. isolate ltt163pic3 genomic sequence.1 sequence
atatcgtcccggcgactagccatccaggaactgtaagtaccaaggcactcgaggttcccttcatccgatagggcataaaccctgtgatcaactttcttaccactagtcggtccagattttccgattggcttttcggggcagatactagcttcatcctcagattgggcgtcgtaataaccatccgaaacaccatcatcagaataatcctctgctggggtagaatttaggttctcgacttcttcattcatctcagcaaaggattattctgatgatggtgtttcggatggttattacgacgcccaatctgaggatgaagctagtatttgccccgaaaagccaatcggaaaatctggaccgactagtggtaagaaagttgatcacagggtttatgccctatcggatgaagggaacctcgagtgccttggtacttacagttcctgg

SEQ ID NO: 1897 - DNA, 441 bp, unidentified
  source 1..441: mol_type = unassigned DNA; note = unclassified RNA viruses ShiM-2016 sequence
cctggatgatactggggtgtaggtaagaggcctacacattgaacaacatattgttctaattacgtaaggtatacggtgtagtcagctctaataagaacaactggctatattcatgcacatatcagtgaaaattattattattctatatatataataaaattcaagtgcaagtacagctttaaagcacgccctaccaaggaccgactgtaagttttgctgaattaataaacttaatgtagatattttgtcgtttgtagaaataaactaccactactgactgtttagtggtaccattcattgggttgagtggaaaagacattctcagttgataataataagaacaataaaaacaaaaagcccttaaataaaagaaggcaattgaaacgagatagacgtgtggtggtctaaaaatagccatataaacgttaacgtgtggtggtg

SEQ ID NO: 1898 - DNA, 442 bp, Hubei chipolycivirus
  source 1..442: mol_type = genomic DNA
tctttacgaaaatttcagagatattctgggagtccgcgtgaagcttttcctgattaacatcaatatcgtggatgacaaaatacaaaaattccttgactgcgttgataggatatttttgccgtcgccgccccacgcaggaaatgggtttgtaatcgctccctcgtaaatccgaagggttgaggtagagtggtggcgcccatgtagccttacgagcagatcgatgcgtctcctttgtctaaattgacggaatttgagcgtattgaacaattcatgtaaccaaaaactttttctttatacaaattttacttatcatgtttctgaagtcacagtagcttacaagactttagttagttgttcaggatgaactttaaaccatatgggataagtggttgaaactttcccgagagtggtccaggatggactaaaaaccaataaaaatttt

SEQ ID NO: 1899 - DNA, 442 bp, unidentified
  source 1..442: mol_type = unassigned DNA; note = unclassified RNA viruses ShiM-2016 sequence
gctgcaagtcccttttgggacttgcagtcagtattattgtttaattgcgttattgagcgtttggtcgtttagaccaacctttagtaatgtttttatgacatctttttctcggcttataaattgccggcttttgcgaaaatttacaactttttcatgccaccaacacttttacgtggtacactcccttttctgttttaggaggctaatctagcttgattagtgagaaaaacaacgtatgtatcttggatatgatccgtttactctatgagtattgacagaaactttttatcttagtttagtaaaactaagcatttctttaaaacaccttagaaatgaccacaggtccttagcatcgactattttatatagttaattttgggagttatagcccaaacactgtaaaatgaactatcagtgaaaagttagtcaaccataccccacc

SEQ ID NO: 1900 - DNA, 444 bp, unidentified
  source 1..444: mol_type = unassigned DNA; note = unclassified Qinviridae sequence
agacaacccaactcaagacataagagacaccaacgaacttcaataaatctcttaaaggttgtctcacaagcaggcccaatgataagttaatttaaaaccttttgtctgcttgtgaacctgatatcatcaagaatcgagcgtctaacctgaattttgaatattttgtccctgctgttctcgttggaaaaaggtttgttgtctctatatgcttcttctctttgatttccttattgtaattaaatttaaatctgcgttatatccagattcagatgacaagtttctaattttaccgatagatattctgcataacttatcagctgaacgctcaacctttccaaacctgaattgaacattggtataatccttaagaggtatgtacatctcttaactgttcaaaatatcacatttgatggtgactaacacatatctttcatttaaacagag

SEQ ID NO: 1901 - DNA, 444 bp, unidentified
  source 1..444: mol_type = unassigned DNA; note = Soybean leaf-associated ssRNA virus 1 isolate SaSSRV1-1, partial1 sequence
gaaaagaaaaggaattgcactcaaagttagttcttcaaaggaagattgcaaagaaagctctagtgatggcaaagatgtagagaattttatcttgaacagagtgtgctgggaaaatttacccgatatttgcacctactaaagcaaaattcgggcgtgtagactctaacccgttcgcgggggtgagcatcctgcctccccgggggccagcatcttcctgtcatgggaagagcggtggcgagcctgcttttagaccggggtcgaaggcttcgtaacgtggcgccacttggtacacgctttgggaaatgatgccacggcttgtcattccttctgattgtcggctgggaagcttgaaatatcttcgggcctgggaaagcccttaaatttcccccttgactggggagatccgtctaacagggggtggtggccaacaccgttcatgaaact

SEQ ID NO: 1902 - DNA, 445 bp, unidentified
  source 1..445: mol_type = unassigned DNA; note = unclassified Picobirnavirus sequence
acaaataaatataggaggaagtgtctatgaaaaactgctttcttaccattgtgatggcgataaaacattggattctcagcgtactgttacgtaggtacgcttgtagaaagaaacaaaataggcgaagcttcaaatcgctcacgaagcaacagaaatatataatttataaagactttagggaatcgccctctaaagcaaaaggagaacagtatgaagaaagagatcattgccactaatgttattgaagcgatggaattagttgacgaagatatgcgtcaggtcatgcagagttggtgtcgtcaagatgtgatgtttagacatacaacagctgataaacttgtatctaaaggtgagagatggatcgctacactcactattgacgctaaacgtcctaacattcaattccagtttctaactatctactatatttggaaggtgtctaaag

SEQ ID NO: 1903 - DNA, 445 bp, unidentified
  source 1..445: mol_type = unassigned DNA; note = unclassified Benyvirus sequence
aaattcaaaatttaccattacatattggtatttatttaccctcagttggtgatatatgtgaggacgctagcctgttgggtttcctgaccgaccaaatccaagcgagcttaatccaagtacctcgtctcaaattgagtgtcaagtgaataagcatagtgaccccatcgtttcagggtagttgacggctattaatagacatattacagacgcttctctttatttatcaccaacatgggatgtaatgtttatgcgtgagcctatggccgcattgtaaaattagtggttttgaatttctattcttcggaatatacaaggtttaaaagaccagcatttgggttaaaaatttttaaaccttactatctttaactagtaactcgaattcgatttatattcagattttgtatatcaagttgttgtgttttctgatcatcattaagtggccgtc

SEQ ID NO: 1904 - DNA, 445 bp, unidentified
  source 1..445: mol_type = unassigned DNA; note = unclassified Hepeviridae sequence
ttctagtcatcatcaccgtcacgatcatagcaagcagcatttactatggccaccggcgtgcatcacgacgtttgcggtttccgcgagataaatgggcagacgcgatgcctgagctgcatggcgaagccaggcaacaatccatccccttacgggaagcatcaaccggggtgtgagtgggtggctgccatctgcatactcaccggccaaccgaccttccccgtgtgcaagctacactgtagaaaccgctacctttcaaatcaatccgtctgcacgcataccacacacacaccatccactctgtgccccatctgcagcatgaagaacagaactttaccaacagtcagcaagtgctattcagcccatcaggccttcctgggcccactccacgccaaacacaccagagtttgcttgatctgcaagcagcattcggtatgtttagtgtgtg

SEQ ID NO: 1905 - DNA, 445 bp, unidentified
  source 1..445: mol_type = unassigned DNA; note = unclassified Bunyavirales sequence
actacagctgcagcacgctgtgcctatatcgtatgatacaatacactcttgaagttaacaaaccagaagacgaagacatagttttaactgtagaggacttatcttataggttatccatttcaagtgagggtcatcccttagagacacaaatatcatattgtaattgtagttgtaattattattatagttattctagtgtgggttactgtagattatcatattttagtagagttattaatatcaatagtagtcttacaatacattattcagggagttatttagaagtgttagcatttgtaaatacaataccacaaagcccattcaagcaggagatttctcacaaagtgatattagatattcacaggtctgtaaggcatcttggtgcactttataataacaacaacacacttagattcatctgcaacaaccctttaccgtcaccacc

SEQ ID NO: 1906 - DNA, 445 bp, synthetic construct; identical to SEQ ID NO: 488
  source 1..445: mol_type = other DNA

SEQ ID NO: 1907 - DNA, 445 bp, unidentified
  source 1..445: mol_type = unassigned DNA; note = unclassified Picornavirales sequence
ctcgaaatgtgagattggcggcaagagtacgaaaatgatgtttccagtgattttggattgaatcaaactggaagagctattggcaaaggagttctgtaacagcgacatcatcgccagaccgggcactagaaaggcggtatagcgaaccccggggtaaacttgaacgtgctcttccagtacatgggagaaatctccagagtcaatgtgcatgactaccgtaaaaagtacataaacctcgtgccaactgaaattttcaacttcccggactatgacctcgttgttcttcgactaccccctggatctacaggtggattgaccccacaccgttctattgaaaaatgctgcgtaagcgaagtagatgaacacggcaaaccacatccgcccaccatctgggtcaacagaaaactccggtacattaattatgacgtaaacaacaaacactgcc

SEQ ID NO: 1908 - DNA, 446 bp, unidentified
  source 1..446: mol_type = unassigned DNA; note = Sugarcane mild mosaic virus isolate PSR07106, complete genome.1 sequence
tctttatctttaccggcacttccagcaaagaagtcattcctgactttctctgttgttccactatcattacgccagcgcccgcgctcccattcctgtaaccccaggctgttgtctagggttcgctcctccaccatcgccacaccagcgccctcgctctccttcctgtaaccccaaacttttgtttagggttcgtttgttctcaaacactctcacgctcaacccgttcgttttcccgtctctgtagaaactctgctctggtgtgtttgacctcagtcacgcactgtttacgcttcttctttttccaaaaacacaaaaagatttgttgtttcgtttctgtagaccagtagtagacttgctcccttttaccccttcccttcttacctttaatcctcaaaggttcttttatctcaatatcgtacatacctttcgccttctagttttccagt

SEQ ID NO: 1909 - DNA, 446 bp, unidentified
  source 1..446: mol_type = unassigned DNA; note = unclassified RNA viruses ShiM-2016 sequence
cctttcgtcttttggtggtggccggcacggtcgcggccgctgccgcgtcaggcggctcgggacagacatatctcgagttcttttttggtcaagtcgggagcgccgtcgcgtacttttacgcctgcgcctcgactggccccttgtcggccatcgccaacaccatttcgaccggtggctggtttaccgccgccgcgggccttttgtgctcgcttttcgtggaactagcgatagcgctcggctggctcactgccaacgcgctgttgctcgccctgggagcggcacattggctcgccgccgccgtgcctttttcctttttctacctctcctgcaacccggtggccgcggtcgcggccgtcgggttggccgtcgccaccgcgtatgtcttgcgccactcgcaccgcgagttttacgcgcggtacgtgggccctttcgtcggagacgccgac

SEQ ID NO: 1910 - DNA, 446 bp, unidentified
  source 1..446: mol_type = unassigned DNA; note = unclassified RNA viruses ShiM-2016 sequence
acgatctatcacccaattttctcacggaatttggctggcccgatttgcacgggattcgtgactctctttgctatcacgcaaagaaagttcatacgacccgtgcatcgacggttaagccaacggaggatgaattcaataaggtttgtttttatttggagcaagcatatgcgcctattcgctcggccaaattggttgagctgaatcgacccacgctgcgacgaataatcttaacacaactggattggacttcgacccccgggcatccatatcggtgttacggtaccaccaacagggaattgtttaaattcgacggacttgatgttgacgacgcgcgttttgaagtgatatattcggcagttgaagcacgatggcaggaactcctgactcggccttcggcagaccccattaatctcttcatcaagcgtgaacctcacaaaaccaagaaa

SEQ ID NO: 1911 - DNA, 447 bp, Odonate arlivirus
  source 1..447: mol_type = genomic DNA
taaagtaaagacagatagcaattgctgggtacaaagaatttatgcagagaatactcatcaaataataggaaagaacgagaaaagcactcaagcaggatacagcacatgttatgtactatttaattgaagatgctgtttcactttaaatcatgcaacattctggaataaggtattgatgcacatataatattcttataatgtgttctgttagacaaaactgtattataatattcgatgacacctgatactttgtgatttcctgtaatctacctatgatatgatggtagagtgaagcatttcatagttgatatacaatcaattgtaaagcaatctattaataaaaagacaagtctccaaaggatcttaaattacatcttatcagaataaggaattcctagtgattcatcaatccttgaatgcccagtcagagataaggcaactataaac

SEQ ID NO: 1912 - DNA, 447 bp, unidentified
  source 1..447: mol_type = unassigned DNA; note = unclassified Picornavirales sequence
gggatttatacgagttgcgaccatggggcaaacccccgaaaccctatttagggtggcagttggtcgagcctatccgcgtcctaggagaatattgtgagttgaaatattttccgaagacaatgactcgctgaaataaaaacaaaacaaaatttagtcacatttgttcaagatgaatatggtcagagtgccggttcaggagctatccttgctgacccaaccattattcatacagatgaaggtgattataaagattttttctctcgaccagtcaaaattgcatcatatgattggacagagggtaattctgttactggacaaattagcccgtggactttgtattttcagagtgttcccatagcagcgaaattgcgaggtttttctcgtttgcgtgctaatttgcatatacgtattttactcaatggcagtccatttcggtatggggatatc

SEQ ID NO: 1913 - DNA, 448 bp, unidentified
  source 1..448: mol_type = unassigned DNA; note = unclassified Flaviviridae sequence
ggagtcgtgccatgtgcaccagcctgtaaaatggccttctttgaagatgttcctaggttaatgaacgtctaaccgcccactctttggttgagacaaaccttctgtgtttgttctgagtaggtaaggttgtgggggtgtgtccccccttgcgaagggaaaaaaggctaatcccttgcaggcggataatggtaagccttgtgtgagcacctgaacttccatgactcgtttgctttaaggggagaggccggatttccttgagctagttaaagttttacccctcaagggatgaagactagtcgcggtagtaaccttcatcagctttaacttttcccatcgaaaaaaccgtggggaaccccaagctagcccaaaggtgcttggggaggttgccagtgaccgccagaggataacctgggcacactggtatcaaatctaattattaattctcact

SEQ ID NO: 1914 - DNA, 448 bp, unidentified
  source 1..448: mol_type = unassigned DNA; note = unclassified Iflaviridae sequence
acacatacttgtctagcacctgcattccaaggagtattagcgaaaacctttttcttaaaaccaattcttaattttaagtacaaccctcgcagaacttacaaatcgtgctcacgccttttgttatgtttagttaatttgtagttgaagaatttggacgaataatataacgtgcttattattcacgagaccctctaacgtttttaacgcattgatctcgtaaaatctgaagactgatcttacattgacattaaattaaacaaaagaaacgcaccacgacagtagtgtggccttactgttaaaacaactaggcctaacgagtatttctaactgtgacgttcgatgaatcattccgaactatgtactaactgatctaaatcgttgttctacaaggaccgtttcaccgcctcaatagatcctaactatagaggaaaagaaacaacaaacaaac

SEQ ID NO: 1915 - DNA, 448 bp, unidentified
  source 1..448: mol_type = unassigned DNA; note = unclassified Picornavirales sequence
aaaacccacgtttctaagtttactcgccggccaagaatggctactggaggcacgttggaagctacttatttctagcataacaagttcagtgtcgaggttctgccctatgtttgcagatttaaggtgctgggtacgcttttaggtctgaggaccaagaattacctttactactgtacaatatcaacatgttcgctccgcgttcgggagcccaccctactgtaatttcgaaaaacagtatatagggcctagcaacatcaccacgatttgcgctggtgtgagctggggtctatgttacccaggtgggaatttcattccttatttcaaggtaaggatgatcttaggggttgagataccccacgctacttgagggcatggcctatccatgacttgcgctaaaaattacgttgcgtatagtaatcacgttcccatttctctcaaaccatgaaaa

SEQ ID NO: 1916 - DNA, 448 bp, unidentified
  source 1..448: mol_type = unassigned DNA; note = unclassified RNA viruses ShiM-2016 sequence
aataccggcgtcacgagtaaggaacgtgtggacagggcggcctgtggactcgtaactatttagttttaccacctaggaccgagtttaaattgtccagggaagtggcgtcactcacgccttgttgagtcgcaaggcgtgtgtgaaatgactcgccgaaactacagaccatattaagagagtagctactgagactagcagagatgagactgaggtttgtgaggttattgaaggtctcacaataaataatgacgcccaacccactggagtgaccagcttcttgcaagaggcatgttcatcagtggaagttttgggtaaacatcacaaaccgcctcaagttttgaattatcaagaagatgttcagaacttgactgattattttaaaagaccccggttgatatccagaggggctttggctttgtcttccattgcttctcaagggcagtgggat

SEQ ID NO: 1917 - DNA, 450 bp, unidentified
  source 1..450: mol_type = unassigned DNA; note = unclassified RNA viruses ShiM-2016 sequence
tgcccatacggcatccttgttgatagtttcacctttcgaggtgacgtcgaccgaaattcctgtttatctaggttgtaatctagtctattagtgtaattgtacatatttatttatacactatgtaaatatttgtaatatattccccagcggatttgtaatatagttagttttgttagttttccttgagaatttctttttctcaaattttagcaatcgaaccctattggatggcattttggaattgaacgacgcgaatgttcacttcttcgtagtctgaccccatttccatttttccattagttcgctggttttgcgttacgccttttgtaccttaaaaagatatgtgctgcgcactttggtctggactagacctaataaaacttgttccccgttgtgcttatgtgagtaacgcacgagtacgtaactcaaagactcacatatattttaatt

SEQ ID NO: 1918 - DNA, 451 bp, unidentified
  source 1..451: mol_type = unassigned DNA; note = unclassified Picornavirales sequence
ccttagggttatttttattgtaactagttggaacaatttacaacaactaagctactttacctccggtctcatgtagacatttggggtgactgtcatgcggtggaacacttcctgtccgtttgtacatggtatttggtttcactgatggctttgtcgctaccatctaaatgcttgagttctttttggatgataacaatattcttgtttcttggttggattatgtttgcctggcagaaaggtgttaaccatgcactaagtatgacatgcaattcccagccaagggcgaactgtacattgttgagtgcacgttagatgttagctagggaactagcttaaccaggatatatccgacattgatacgttggtagtgggggttgctaccatttatgcacacagcctgatagggtcttgaccagagataatgtgcagtataattggtctgtccgtataa

SEQ ID NO: 1919 - DNA, 451 bp, unidentified
  source 1..451: mol_type = unassigned DNA; note = unclassified RNA viruses ShiM-2016 sequence
gtctggtgcggtaccgactcagcagcgcctggaactcaggcgcacagggctttgtagctgcagatgtcttctttttcctgtaactacaagcaatgtggacgaggggccacaacagcaatccaatcccccacaaggtagcgcaccggccgtgaataagccggtagagtatggatttactccacccgaaatctccaaggatcagaacgtaaaattcttggatgccgaggtaggcacgggtgatacacgtggtaccccttccgatcctctccgtgattctactttgatcggagatgccggattgggtgatttcttcaagcgacctataaagatagcgagttttgactgggccacttctgtcaaactcaatgaacgtttcaatccgtggcggttcttttgggaagatcgtagggtgattaatcgtattgccaattacaaactcctgaaggccacc

SEQ ID NO: 1920 - DNA, 452 bp, unidentified
  source 1..452: mol_type = unassigned DNA; note = unclassified Totivirus sequence
aaaacgaagaaactacctctcacaagttgggagagaagctgtatagaaactcaccctcggtaaacattcttacggactttgaacaagagctagtttcgtacaactactcacaaaagagtgaacgcactgtcacgcatgcctggggttctaacttggttccctcaagcatacgcgtgtgtggtgggcgcgtgtatgcctcaccatttgaagatgctactcatgtctacctcagaccgtacgcaggaagggcatgggaaggcgaagacgtctggctgcatatactcggctgcagcacgcttgccactgtgataacgattgccgggcgtaagcactcctattacaagctagatcagtactgccggtattcagatccttcgattattgctgtagtatcacgacacttgacggggctgtttgagtcactaaacttcaaccagcctaatgatgatact

SEQ ID NO: 1921 - DNA, 452 bp, unidentified
  source 1..452: mol_type = unassigned DNA; note = unclassified Picornavirales sequence
tatctcacgtcgctcgtacgcaaacgttttacaccagattcgcttggtctacaacggctacagcaggttcagtgttgtttagcgcgcccatcaccccaaacttctatcgttatactatatccgccgctcagtacgcccctacaactttagcgtataccgcagctgcttttaggcaatggagaggtggaattaatttcaattttaaatttgttaaaactaaatttcattctggtagagtaagaattatttatgtgcctggagattattcagcgggcacaacgcttcctgacagctttgatatagacgctaattattcaactgtggtcgatcttcgatcagatacagatgtggaatttaatgtaccgtatgttgctattcaacaatggttgttagtcgataatgctttccctggcacatcgcgtacgaatttgtttagtactggcaccatttat

SEQ ID NO: 1922 - DNA, 452 bp, unidentified
  source 1..452: mol_type = unassigned DNA; note = unclassified RNA viruses ShiM-2016 sequence
tgggagtgtatgagcccttacaaaccttgtgaggatgatacgcgatcgcagtcccgacttgtctccagacgaggttagacaggaagcagtgttgcgggtccgacgggcccggacagctcctgagctagtctggggcctattcgacgctgtgaacaacgcctgggaaggcacccctggacagttcgcgagtacgtgctgggatctctccgcgcttctgcgccacatggccatcggcgccaacgggcgagtgcagacagtccggagatcagaccggtgcttagcaagagccgtccttgaaaacgcatttgggaggagcattaggcgcaacctaagccttcaccgctcctaccgccatcttcccaggaatccaaccctgcgcgaggctttcctcgctgagagattggtggcattggaacgccgaatagttcactacacggtgacctggtcggacg

SEQ ID NO: 1923 - DNA, 453 bp, unidentified
  source 1..453: mol_type = unassigned DNA; note = unclassified Hypovirus sequence
aaagatgttttcattaatcagtgaacgaaagttaggggatggtactcttagggttgatctataaagatcctaactaggaggaaacatggccctgtctcgtgatgatttctttgttcaatcactaaagcttctcttcaccaaaaaggagagagctttgagagcttagctgtttcagctatttgaaccccgaaggattcatgtcatagacatttgacttctatttgaagtcgttcattcgttcatccgaagatgtaaaactactgcgcatgtgcgtgatggtcctgaattttcagagtagaacggcagggatgattgttctgtggagtagtgccctagaagaacaaatcctcattcccactcttgaaagtggcccatggcaacccgtgatgcccggatcgtcttctggacgtaaaaggttagaggctacgagagactgtagagaccttggtcaaa

SEQ ID NO: 1924 - DNA, 453 bp, unidentified
  source 1..453: mol_type = unassigned DNA; note = unclassified RNA viruses ShiM-2016 sequence
ctgcagggtattcaccctgcagtcttgttggaatatttgatagtatgctacttatgataattagctcgttcgggtattctaacccgtcgacttaattacatagctagtatggtattgtatgtattttgacattttaatctaccttttttgttattttattatggttaaattaaaatatcgccttttcgtcttccaaaagacacaaaactattggttctgacttcgcatgatcaggtaattaacacttcgtgtaatgcaatctccagtactttacagctgattcaaactggattaacaacttttggaatcgccgctaatacacgttacgtatatgacgtgccctttgatggtacgcaaggtgtctgtcctttttacagaacgcggtttaatgggctattatatgccggccatgcaccgaagcactatttgtgcaagcaaaacaggtacgctcct

SEQ ID NO: 1925 - DNA, 454 bp, unidentified
  source 1..454: mol_type = unassigned DNA; note = unclassified Fusariviridae sequence
gttagaagccgtctagctctcgacgttaaattgagcagacatttcgtttaagaagggggctagagaggtagcctggtgtaattcctcaccccttaaaaagttggttcgcagccatccatattcttaaacggtccagaaagtgtaaactggaacctgtgaaaattaaactaaggtggtgacttagataacctgttgtgagtggacgctcaccctcaagtgaagaaagctggatttgtacaggaaggcacttagtaagggtgtgggtgttagatgacgagtgaactgagggacccaaaaggttgcataccagctcggcatctgcccacacttctgaaacagtgagcaccccaacaaggaaggttctccaagcttgattgacagatgtgtccactgaccgggcgaaagtgccctgacggtcgtgaaagcacggcaaaacccactaacatcactcatc

SEQ ID NO: 1926 - DNA, 455 bp, unidentified
  source 1..455: mol_type = unassigned DNA; note = unclassified Totiviridae sequence
gccccttcttcgtaggcagtaaacctaatactgcctctaagttctctgtgtccggacgcgcggctgtaaaccgcgacgctgacctcgatatcctgctggcgggatgtcgtgcaacaaaaaattcaaaaatatggacggaagcggtcctgaggagacgtcacgaaacggctggtccgtcggccgcgagtgcagctgggctgtgcaatcaacaactgctggtggatagtaccccgaacccccctattagtgatgctggacccaccggtgctggcccaagagctaagctttctgcgcgagcttctcgtttgcgcgtctgcgaccccacggttggcgccaccgggaccggcggaacgaacggtgtgcacggttccctctgtccacctgttaccgcgggcgttccttgtacggaacggcctgtattcaaagccacccctgccatatcgcaggctccgtcc

SEQ ID NO: 1927 - DNA, 455 bp, unidentified
  source 1..455: mol_type = unassigned DNA; note = unclassified Picornavirales sequence
ctacccgcatttatgtaggctctaagagttaccttatgattggacacagtttatgagtgatttggactctttccgaatttgatatattttaaaattcttacaatttagagagaatacgaacgcgatggaccttgagaaaatcttagctagtaattgaatctttattgcgtaagaatgagatgaacggaaccttaccaatcccaacccaaatatggaggagctattgcctctttcctgagggcggaaatcagtattaaccgacgtaaacccaaacccaaacccaaaccgaaaccgctaacctgaactctgcactactctacttggaacgcaaaggaaaaatttcactagaccaatgctgttcacgacattgtgaacgcccatattttgtttatcgatttggaagacaagctgtcatcaaaacacttgatgagtgcattcttacggtcgacactccc

SEQ ID NO: 1928 - DNA, 455 bp, unidentified
  source 1..455: mol_type = unassigned DNA; note = unclassified RNA viruses ShiM-2016 sequence
acgggctctgcactgcgcctggttttaaatctcctttctgtattttgggagtaccaggtatcagtgtaacggcgggagcccgattacgtaaggatagtagtaatattaggtatttaacacaaaccagcctaggactaccattccaagcccctgaagcaagcctacacaatgcgctcgttgcgatagaacgccgggttttcacagtaggaaagggctccgagataatcctcccaccacaagcacaacatggtatttttgaggaactcggctacttcagagatgaggtagtacgtcattcggggtattgtaggaaattcagcgaggtcgagctcgccaattcgtaccattctggcaaaagatcccagtactacaaagcaattgcttcattaaagactcgtccatacgaagaaaaggatagctttgtcacagcatttatcaaaaaagaaaagcactgg

SEQ ID NO: 1929 - DNA, 456 bp, Ollusvirus coleopteri
  source 1..456: mol_type = genomic DNA
cctacttctttatgggctattttaaaacttgagttggactaatatattttcataatgtctaatgatagggttgagtctctccatcagatcagaaacaaatctttgccaagccaaaaatacaagactccagataaaaaaccagacttagatgttgacaagcgtttggcaatcattgagtcgaagttagattctgccttggctctaatcagacaattagtccaacttaaaaatgctgaagcttcaaataataatactgttaaatcttctgcacctcctatgtatccccatcttcctcacaccacccagcctagctatgttactgcattccaattgcccaagccttattaggttagcataaaaagtttaataaaaatggctgtaaattagctattttaaaagtaatatcgcttttaccctctttattaccaaaccagctatttttcagctatctcaatc

SEQ ID NO: 1930 - DNA, 456 bp, unidentified
  source 1..456: mol_type = unassigned DNA; note = unclassified Sopolycivirus sequence
cagcctctgaagcttttgaagctgaagaaggtattgaaagcggagttaaagttggtgagtcatttggaggaccattaggaatcggtgcaatcattcttcaatcattaggtgatgtaacaacaaacgcactaactgctggaatgaaagagactcaagctagcgattatacacagaatgcaacgcaacaaggaattggagcacagttgcaagctggtttaattgaaaagaatgaaactgccactattgatcaagtatctgctgtttctaaaggatttgatcttttgggacctgctggtgctggaattggttatgcaattggacaagcggcttttcaacctggagatccttatttgaatacagtcaactcctttaatggaatgacgaaccctcaagacactggaattgtacagtcactgaatactgatagtgcaagcggtgcaacacaacaagtagaaa

SEQ ID NO: 1931 - DNA, 456 bp, unidentified
  source 1..456: mol_type = unassigned DNA; note = unclassified Picornavirales sequence
actatatgtaagggagaaagccgtggctgattcgctagaactttgttcaataggactgttcttttacgttttgtaacgtagtggaggttaggtccgcaaatgaaagctgcctttggaaatatagtaatgtaaacctttatagaagtataaagtggaggtctttatcgaactcttgttcattctcctcccattctcacatgttagtgggaaataatttaaaatggatttttctgtttgaagtttgagaaactaataatagaagtagcaactaccaccgaggtggaaaaacgtcattgagttgtgcgaaagttgtatttcgatgatttagaggtctatcaaatgaatggcagattttgaagtttcaaattactttgtgtttggaactctgttattaacataaagcgtcgaattggagacgttaaatcgaactttttcttattatttaaaccaatcaat

SEQ ID NO: 1932 - DNA, 457 bp, unidentified
  source 1..457: mol_type = unassigned DNA; note = unclassified Partitiviridae sequence
taattatacataagttctccttgttttaaataaattatatttaaaactaaatatattagttggtgttcatgtgagactcaaagaagcattaaagaagtttgacttcgtcaaacgtcttaaaatacctgagaagctatatcctacgatagtagctaatttagctgccgtacttaagggctcagacaataagtacattacacctttgggtaaaacacacgatcctatcgaattaatcgtagcttgggatgaagtattccaagctaatgcacataaactaaacgctcctttactagacattgaagcagagcaacggcgcaagtttggacctcgttcaagggctaagccatgggttgaaagaaaaccaggtttattagcctcatttcatagtcagattgataattttacgccacctttcttcaaattcgaagatggtgaacataatttatgtcctctttct

SEQ ID NO: 1933 - DNA, 457 bp, unidentified
  source 1..457: mol_type = unassigned DNA; note = unclassified Picornavirales sequence
tccaaaacttatggtttggatttaggcaagttttacttgtgctttcttgatcttgtttttggcattactaggttaatagtgtattgatttagtttttatatttcaggtagttaggcgagatgctctactagcagtcctaccgtttacaagtatagaaatgatagttggttacttttagcttttagtacttagatggatgaaagatgtgtagcatattttagtatgatttatgatacacttaagttattgaaaagtaaatcttgggttccaccagtttctttgattaaataccatcggcaaaattcttagctcattaatctttcttcctgaagttcagttttaactgagcgtaacagagattgtatttaatgcaacattagtaagattttggcctgtatttgttagagaactacagcgaataaaattcctaagtgttttctttaatgacatcaggaag

SEQ ID NO: 1934 - DNA, 457 bp, unidentified
  source 1..457: mol_type = unassigned DNA; note = unclassified RNA viruses ShiM-2016 sequence
aaaggatggaagattgaaaaactggaactgtatttagtgaaagagaacaactgaaaaggttgcagttttaaaccaaaatgatctcagttatgagagaaattcggtattaaatctatcacccattttcctgattgaccctagttggtgtcaactgtaatttgttttgtttatttgttgttttatgtgttaatgttactaagtttttgtgaatatgatgggaaagcaaccgctctaactccaggagatgtacctgcccgagggtaagggaacctttgtaacggttttagatgttagtaagtactatagttcacgaagattgagtatactgcgctggagtggggatggcagcgcttaattaattatcttcccccggatggcagtccgttagccactatgtggtagccgatgctttggcaaggcatcgacataccctagtacgcaatgccagtatgagtgt

SEQ ID NO: 1935 - DNA, 458 bp, unidentified
  source 1..458: mol_type = unassigned DNA; note = unclassified Picobirnavirus sequence
tctttacatctatattatctttaattctttattctattccaaacaaatgttctaattcgttctctagtaaagaaatggacaagtacgtccttggagaacactaattggaacaaattacaaagaagtcttgaagcaattagtcctaggagattagtgtaggacggaaactttacttcaagcaaataacatccagaaaggagggtgatttgacacagaatcagatcaactaccaaagaacgctagaagataggcgttcacatcttgcgaacgagaaagagacgaaccgagctaacactgctcgggaaacagaagaacatcggtccaacgtagcgcgcgaatatgagaccaatcgatctaacgtcgcaagagagacagagactcatagagcaaatttggttcaagaaaatttgacgtctcgtagagaccaggaaacgcgtagatctaatctagcgcgggaa

SEQ ID NO: 1936 - DNA, 458 bp, unidentified
  source 1..458: mol_type = unassigned DNA; note = unclassified RNA viruses ShiM-2016 sequence
cttccggttgccgacgcttccctcagttataaagattatcttaacgaaaaaatttttctcgctcctcctcaacctcctataagaaatcaaacctcggtctctccggccttaagtactactactgccgttagtgtcccgactacaacacccgagatcgttactacatctcgtccgataccatctactactagaaagtcgagaccagtccctccatcttccattcctccatacatcgattgcggatgtctcgaaccacatcagtgcggtcctcctttaggcctccctcagaatgaccctcgtatgtctcgtgattaccctagggtttattcacctaactgcaattggtctgatggaaaacctcaggacacctatataagacctcctgacactcgcaatcgtcatcaaaatcaacgatcccgcaatatttaatttgaatataatttatcaattctataaaa

SEQ ID NO: 1937 - DNA, 458 bp, unidentified
  source 1..458: mol_type = unassigned DNA; note = unclassified RNA viruses ShiM-2016 sequence
gtgtcatctgcgtgggcagaagatcttgtccacccaagtgcgaccgcaaggtcgcgcctggccgatccagggagccaaagcacgaagccctcccgtgcgggcccgggggcagagaaataacatctctctgtcagccgggactcgtattcggagagcaagcgctgaacgctcccgctagcgggaacaagggacaccgaagggagacgacccccaggcacgcccttattcgcctcaagtccgcggaacatcttgcggactctcacggcgatctggcggggggcaacccggaactcgtcgcggggctggcgctcaggtcccaggagcattctgagctcccgggccatacgagtcgtcagttgctcgacacagtccactgtgccgagctcagagcctttgccctcgaaggggactttccccctcttgcaggcaacggcgctgaccgcgagcttgtgccgggt

SEQ ID NO: 1938 - DNA, 459 bp, unidentified
  source 1..459: mol_type = unassigned DNA; note = unclassified Totiviridae sequence
caaactcacaatttgggggactctgccacaccgtggatgacggcctagattgcgccgttattgacgtcgtgtatggcgttgttgtcgtcccatgcccggccggcccccccctccactcttcggtggtgtgcggtgccgcccggcgtggccggttcatccccatatacgcttcgtcaatgacgagcgccatcgtggccggctcacatcctgggcagggggtccgtcgccgctcgactcttgttgacaaagcggcaaaccgcagcgcagcggttgtgacgtcattttgcgcgcagaaccttggggtgcgcacccataggccataccatccgaacagggtggctccctggctgaaaagtggttctttggtacacggagtagggagggctacggcctccgttgatcccgtgtgtcaacgaattatctgctcgcaatcttcaccttgtttaccccccccaagcc

SEQ ID NO: 1939 - DNA, 460 bp, Chinturpovirus 1
  source 1..460: mol_type = genomic DNA
gtggaaaccccgcggatatctctgaggcggcagcctgtgtacaggtactgccgacccttctatagcgactccaaactcgacccgcccctagcctgacaacgtcaggaaggcaagccttgaaaagcctccgtaaccgtccaacggaggtggtcgtgctttgcagcgctcgttcttagtcagcgacccaaactcagttgaccatcgtttcagactcgagagggcgtgccctcatctgactcgacttctgagatctagctgacggtctgtgaccttcatcaacggaccattattttctacttagttgctcaccaggctaaacgcgagtgttctcgcgcactaagtatacttaaaatcctatttgctctgacgttatagagcttaggttcagtgttttatacactgatctccatcaatctccacgacatctcagtgttgtctcctgtgatcctaactactggta

SEQ ID NO: 1940 - DNA, 461 bp, unidentified
  source 1..461: mol_type = unassigned DNA; note = unclassified Marburgvirus sequence
aatgatgctcaaataaaacagaagtccatctgtataaggagtatggcttaaatgggtatttgtcagattcttaagagattagtttgtattgatttaaataatgctttaaccttacattgctgctttaaatggttgattaagctgattagcttgtaatatataatctcttctgggccatcagatctgtaatgggtttactagattatatacaagacacagtaatattttataaacaattcttgctcagttttgctttgatttaataacatacatcattgtgcctttcattgctaggtcaacccaactgataatgatattccttctgaaatagtaagaaaaactaatgaagaacattaattactgggtaaaagtgattaagttctttaaatttgatcaaagtaatattttgtcagtgaatatattctcatatcacttgattaaaaacaggaaattatcctaac

SEQ ID NO: 1941 - DNA, 461 bp, unidentified
  source 1..461: mol_type = unassigned DNA; note = unclassified Dicistroviridae sequence
gcaaggtttatctcttcggagtttttacttgtatcggagacagttctggaccattcctgcggaattcgctaatgatcgtgaataacaccaacggaaaagtttgtatctctactgtagaaatctccaaccccaaaccccaacccccaattttaaactcatggacgaaggagtataactttcccaaactcatagtattgagtataactatactagtcagtaaaagactttaatccgacacacgtagtgtcgttaaatgaattctatttgtatcaaatagtcttatctccccgtaaccaacacgaaaatattgaacgtttcgtactaagttacatggatgtgatcttgctagattatactgacgacaaattctagtaatgctatccaactacaagagccctatttagggatggcctcttcgcagcagccctgcaaactgccactcgtcaacctgcttcgactct

SEQ ID NO: 1942 - DNA, 461 bp, unidentified
  source 1..461: mol_type = unassigned DNA; note = unclassified Picornavirales sequence
catcatggaattttggagctatcaccgataggcttaaaaattgggtgaaaagtatgagtaaagactgcattcagttttttattgattctccattcgtggctggactcctttctattattgctggaattgctcaattccttggattgtatatggttatgcctactacaagaactggaattgctgcccttgttgataagtttcagaactcaacaagaaccatgcattatgcgaggaatgggttcaaaggagtaatggattcggtaaaggactgttttgcatgttgtaaggacatgttgggcatttcaaataatgcggaacttgaaaagtttaaagaacaggtcacccaatcattggagctttgtcgtgatatgttaataacagcacagtcaaaaccaggaacatttgtaaatgattcacagagatatgtcggatgcagaaaaagagtataggagacgtcatct

SEQ ID NO: 1943 - DNA, 461 bp, unidentified
  source 1..461: mol_type = unassigned DNA; note = unclassified RNA viruses ShiM-2016 sequence
cgtgtatattgtatagtatatgcgtaaaatttatttgcccgacttacgacggatttcgtttgacgagcaggagcgttgacttctgcacaaagtatgatacaaaagttagagtattcacgccttactattatagtgacgcttcatttatttttattttcatattatttcgttaaactttttcgttaaaagttaatttatatagtatagagagctggacttacattgtcttcgcttttatgcgtgcttagttagagctggattgctcacgacgtatgtgtttaagttgagattgtgtgtgaaattttcagtagctttatatagggggatatcaaacctccaacccaattagaatttgcgcttttaattggcacttgaaagtagtgatgtaagcaaataaccttgtgtgggatggctcccacacattgtatggcccgtcggcattgccgtcaatcgtaacacct

SEQ ID NO: 1944 - DNA, 461 bp, unidentified
  source 1..461: mol_type = unassigned DNA; note = unclassified RNA viruses ShiM-2016 sequence
aatccttgcggctacaagccgcgagatggctggaccgcgcccagcatgctaaaatcccctcgactgaggagcgggagcgcgtgattgctaagaccgtgagggcgttctcaaacgcacaaacaaatggccccacggcaaccagagatggacggctgacctggagaaactttctccaggatttcaaaagtgcagtgttctccctggagtttgacgccggcatcggcgtcccgtacatcgcgtacggtaagcctacccacagggggtggattgaagatccacgacttctcccagtgttagctcgcctggttttcgaccgattacagaagttgtcggaaattaggtttgaagatctttccgctgaggagctagtccaggctggactctgtgatcccattcgactatttgtcaagggggaaccacacaaacaagccaaactcgatgaggggcgctaccgcctcatc

SEQ ID NO: 1945 - DNA, 462 bp, unidentified
  source 1..462: mol_type = unassigned DNA; note = unclassified RNA viruses ShiM-2016 sequence
ggtgaatccccccctcttcctctaacgtctattagcaggtagatgtgtcttctcttattttgaagatgaacatactgtggattctcgagtgtattgtggctacacaatatagctcaaagagctttttagcgagtgtgtattcgctagattgcacactcaaactattaagttctggatttggtgactatttcagaacatttctttgttcgtatgtattatatgtaatatattctgaatttaaggttgcactttggtggttcgtcctacgcaggaatcaccatgcaaattcaaaagttttgtcattccctatacttcgggcaaaacttcaacaatattttattgttaattatagggcggtctagtatcaatcgttatatgacctaaatatgtagtatgcacgccactacgtatttagtattttaagtgcagcacctagctcaaggttatgagcccttatataaa

SEQ ID NO: 1946 - DNA, 462 bp, unidentified
  source 1..462: mol_type = unassigned DNA; note = unclassified RNA viruses ShiM-2016 sequence
tgggaaatgaagatggtgtgtatttatttatttatttattaagttaatgtttaatattccaagttctatatttgtttaactgtgtgcgtttccttagatattgatctactctcttttaactttatctcagttgttcttgacaacttcattaagttgatccgagtcctgtcatatagtcaatcgtatgggaagtaccaatacccttcttaatcccaacgagtgagatgacaataacagcatttggcgttccatgctgttttagcaggaatgtcttattgactcgggaatatttacttggtaattgatgtgataaactggtcaagtgcctgcgataatgacacacgtatacaatcaaaatgaggcctaaatacggcttttaattggtgctatgcttcgaagcaatgatacaatgatataacattacatcaaattagatcctgaaaaaaactaacagacctaaag

SEQ ID NO: 1947 - DNA, 463 bp, unidentified
  source 1..463: mol_type = unassigned DNA; note = unclassified RNA viruses ShiM-2016 sequence
ttcatattgcataccgaccgtcatgtctttaaactgtccggaggcgctgcggtagtgtcgtcgttactagaatgaaaccaaagccgaactcaacattgattacagatgttatgtatggtctagcacataccatgcaagcagactgctttgttgagacaagaatgacgcgaacatgcgagtaggtatttacttacagtggtttatagccccacaaacaaaggtgtgaataggcagacacaatgatgcatgtgtctgacccgtatcaacaaatcgcattagtaattttacaaattttattacagagccaacgatctctataaaccgtacactatacaaaccccagtccggtgcactgggtactattcaagaagaaggtgttgcaaatcttacggcacaaatcactaactttgaggagcaagatgctggttggaccacatctattggcgcaggttgggattctacg

SEQ ID NO: 1948 - DNA, 464 bp, unidentified
  source 1..464: mol_type = unassigned DNA; note = unclassified Higrevirus sequence
cataaaattcaaacaattctactgaggtgatcccttggtagtcttattttgtccggcgacgaggggtttggccgttatcaccctagacgctgtagtcatcaggtactggcacctgtactggagaggggctgcacgttgccatgctcggtgtggacgcgagatagtgctatcgcatccgagagctggtgtcctggggactgcctggggcgtagctacactattatatatatatgttggatcgatctgaggcaaaagtccactgcttttcattatatacgtttggactaccggttagcgggtggtacgattagggacgcctgataacctttcgtatctgtcagtgtgataatagtgctttagggtaagtggtgccgacttgtcggttttggtcgtggtcatttggcctggatgtgtttaggtaaggttgtgtattggttgttgcatcttgtctttgggacctcgaa

SEQ ID NO: 1949 - DNA, 464 bp, unidentified
  source 1..464: mol_type = unassigned DNA; note = unclassified Picornavirales sequence
gggggaccatcgacttatactcgatgctttccccctctccttttcaacgtcctgggcacgatacgcccaaccctactaatcaagcttgctagatttgctggtaagacccgtttggtaacgtaattacccgtaacgaatctaagaggtttggctggacttagtacctattaagatatgccttccggttatgtctcgagctctgctgtggaacaacacttggtaacaagtgccccagcagttagtgatctatccggttgaaacagtcttattgtgggaacagtttaagtattccgattacattcggcgtgaccttacgcagtgcacggacggatagtaccctcctttaggatcgaatccgttctttaggcccctcttggcatcctagcgagtcacctctccgtgacaagatagtgctgtattggcaaatattttcactttttaccaaaaactttcatgatgacaaa

SEQ ID NO: 1950 - DNA, 464 bp, unidentified
  source 1..464: mol_type = unassigned DNA; note = unclassified RNA viruses ShiM-2016 sequence
gtgccttaaacctattcacccagttttgagtctgggctctacggaaaagcaaaacttcatgtgtatatatggataccaattctcgcacaaattttgtgtacttttatgtgttagaattaggctttgtacataaagacaatctgcctgcggattacccctatttaggggagagtttcgtctactcaatgtaaactacaccactcctagcactaagcaatgcctggagattgtaaataccgcttactaataatgtaaataataataataataatatatatacatcgggtattacgtacccaacaatttttgaaattttgtcagacctcaggaaatacaaaattaatccaaaccgttttgataaactatggcataaacatagatgggaattagggaaaactgtttcatcatttgatggagtggagattcctcctaaaagagtgaaccaacgcctagttaaccaggtt

SEQ ID NO: 1951 - DNA, 465 bp, unidentified
  source 1..465: mol_type = unassigned DNA; note = unclassified RNA viruses ShiM-2016 sequence
gtgttagttcactagggttttatattaccgtagtccatgccgcgttagtgctgggcgttttgtgccatgaaacggtacttagtttgcgtttgttttgagagtgtgagctgagtgaaaatatttattctttgatgatatatacgtacgaagtactatttaagtatgtgtatagcttcgggttggcaatatacccgttacttattgattggccgatatttttaagcggttggagtaaattgcatcgcatcatgtaaacaagaaaatgttcctgtttttgtggtatttcaccgtaagactcagtgttgagcagggtcatatcatatttacagtgtttgaattattgtagatggtggcatgcatttgtagccaattgtcggttcgttattgaacccccaagcttgcgatggtagtagcaagttgagccgggataggccggtggttacactatcaaacaactcagcagtg

SEQ ID NO: 1952 - DNA, 466 bp, unidentified
  source 1..466: mol_type = unassigned DNA; note = unclassified Gammaflexiviridae sequence
cccccccttcgtaaaaatttgcggcaattacctccaagctcgaccacacgaacgagctttcacgttcgtgacttatactgattccctccgaggtcacatcaaatctcaacttaaaactttcggtgacgtggagggacatcacatcaagacgtgggaactggctctgctccaaccatgcaacccaatcgtcatctttgacgacgttggtctagctcctcctttgttggacttattccttatcacccaccccaacgttaaacactttttctttaccggagaccccgcccaaccccaatacaacgcctacaagcgcttccctaatgccccctttgtacccgataaccttaccattctcgctcaatcagcttgtcgttacttccgagaaactcgccgggtcccaatcgctactgcttccgctcttgggctaaacacctcatccaccgctgagggtggccttggactctcc

SEQ ID NO: 1953 - DNA, 466 bp, unidentified
  source 1..466: mol_type = unassigned DNA; note = Hainan oriental leaf-toed gecko picornavirus strain LPXYC2131221 sequence
gccacacgggggtttaattactcccgtgtggttcgctttggacagggtttttgctatgccctggggaatttcttcccgaaatagccttctgcagttcagagtagtagctggactgtgggagttcttttctttctttttcttactttatgtttgtttgtttaaggtttgatataatggttttatgtaatgtagtagccagtacgctggtgagcctacgtcaagattttattagagggccgtcctgtcctcgaatgttattgatgggtatgtcaggtgggttaaaccatttggcgggcagtcactggctaaagggcgtactagtgattctacttgtgcatgacatgatggttctgtaagtcgcagagtggagtacggacctggatgatgctgctgaccagtggggccttatcccctgccgtttttacgcaattggcggtatgggtggtagttgcagtagctcagtatt

SEQ ID NO: 1954 - DNA, 466 bp, unidentified
  source 1..466: mol_type = unassigned DNA; note = unclassified Picornavirales sequence
ggggtgtcgctgtgtgacaaaacaaccacttttttctgacttaaagctacgaaagcagcatcgaacaaagtcttagacaaagtgccaagtgctccatgtagctttaagtcagaaaaaagtggttgttttgtcacacagcgacaccccgcatgataccagtcagttcggaattcaattcttccaggatagtgtgcaggtgcatccaaaaagcgccgtgcgccatttaccagcggaaatttcacctgtgtgcaaagtttatggagtagtgggtaatcaatccacggcctattctacagtggtgacgtcacccatttctgatgcggtcgagagacactgtggtattgaacagcgttggggtcctccgaaatttcgcagtaattacccatggcaagcgagtttacagttttcatcccaacctactttaggcttacctgccgaagatttaatttatgcggtagattcctac

SEQ ID NO: 1955 - DNA, 467 bp, unidentified
  source 1..467: mol_type = unassigned DNA; note = unclassified Picornavirales sequence
cgcggttaaacccgcgcaaccttctttcagccgcgtctgagtagcgcggttagtcctgatacacagtttcctgttgggtactgtgtcttcgggtgaatgctcttgtgtgaatgttttaggctgtttaagggaagcgtttccccgtgcgctgtgagggtttctcacgctctttcggggtgcagtctcttctgttgttcattaagatgtatggatgcactgttgtgaaggatttgtgaactggggatcgacaccccgtgaggggtgccccagtgtccataggagtttgctggagaggtgtgttgctgtagtgactatccgtgacctggcattctaaggtgttgaccccaacctgtgagggtctggatcgcagtgttgaagtgctttggagggttcaatggggtttctgtagtggatattatgtgcttgacgactactggtacgagtgtattgggggtctacatgtgtga

SEQ ID NO: 1956 - DNA, 467 bp, unidentified
  source 1..467: mol_type = unassigned DNA; note = unclassified Picornavirales sequence
gatgagccaaattacattacgttgtgttgctgttacggctaatggcgcaaaattcgcaaacctcgctaatccagcggagtctgttacttttaaaaccactaaccaacagcgttcacgcaatggtgtacaagccgttgtcggtcgctcttcaatcgtttggattgcaccgcacgtcgtaaaacaatgcgatgatgcttgcgctccgtcgggtgatttcaccgacttgctacgtctcgaattttctaatgcgaattcaggggaacagttgattacccgccttaatgatttggcggactggttaactgcacacccggaattccttcgaggctttggtccacagcaatcttctgacgttgttcttggaacagtatgaatattcaggtaatgttattaggtagccttgcgattatcgcaactaccatcataacggtaacaggaatcgtttcttactacatccactaacttgc

SEQ ID NO: 1957 - DNA, 467 bp, unidentified
  source 1..467: mol_type = unassigned DNA; note = unclassified RNA viruses ShiM-2016 sequence
gttttgccagaatgccaactgatcggaagagaaaatggcaaagtacccctttgggtggcacctcaggtgcaatggctggtcaccggcctttgtgcatacgtgccaacagggttgtgggggcggatgcgggttgtctctggcctgtcatcactgatcccactccaaccgatgggtccaattcttttgggcactactccttcctctggctttgtctggccgcgcccttctgggtgcaaacggagtttggtttgaatcgggttcctgtgtgtcgtacacacccactgagtcagacggcaccgcgccgtactgatatatcttgagggccgataggggttggcctgtcctccaggatggcttcctctgagtcattattggtgaggcaagtagtttctgctgtgcgtgcttcagtgctgcctgcatatacccatctcattcaattctgatgttgaggataatgcctaatctgg

SEQ ID NO: 1958 - DNA, 468 bp, unidentified
  source 1..468: mol_type = unassigned DNA; note = unclassified Narnavirus sequence
gatgtcttgtatcaccggacggtagaactaccttccagtgcttgtggtgctagcgtgactgaaatcacggtcaccaagtatctcgagcgcaagtcgattgggaacgaacctcccctctctgtcaagcttctccgcccaccacgtctccaccgaagtgagaggcgtgtgtttggaaaactggcggacagaaggaggggggagtttcaacttcccaggtttcatggtctttggtttgcacggacgatattttcctcccgttgcccagtagcctttgtgcgctcctgtggagacgtacttgcctactgcgcgattggagacaaacgtaagtccaggtggtggagcttcactaacgagggcaggacccccgatgcgaagtcgcacctccacctccttacgcatgccttcgaaccgccgcgggtcggcgggcgcgaagaaaatatcgatacgtgcacagtactttgttgggtc

SEQ ID NO: 1959 - DNA, 469 bp, unidentified
  source 1..469: mol_type = unassigned DNA; note = unclassified Hypovirus sequence
ttttggggatggtgctcttaggtttgatctttgtagatcctaactaggaggaaacattgccctgtttcgtgatgatttctatgttcaatcactgaagcttctcttcaccaaaaaggagagagcttcgagagcttagctgtttcagctatttgaaccccgaaggattcatgtctaagacatttggtttctattcagaaactattcattctttcatccgaagatgtaaaactacttcgtagtaacgagacggtcctgaaccctgacatgtggaacggcgacgacaggcattctgtggagtagtgtcctagaagaatgatcccctgttgttacctgtcagactggccccggcacaccgtgatgcccggtgaactggtccgtgagacccagatcggaatactccaggctcttttgcacgatatgcttgtcatttttcgtggattaccctggtgctcgttcccaatccgaaagt

SEQ ID NO: 1960 - DNA, 469 bp, unidentified
  source 1..469: mol_type = unassigned DNA; note = unclassified vectors sequence
cggacacacaaaaagaaagaagaatttttaggatcttttgtgtgcgaataactatgaggaagattaataattttcctctcattgaaatttatatcggaatttaaattgaaattgttactgtaatcacacctggtttgtttcagagccacatcacaaagatagagaacaacctaggtctccgaagggagcaagggcatcagtgtgctcagttgaaaatcccttgtcaacacctaggtcttatcacatcacaagttccacctcagactctgcagggtgatccaacaaccttaatagaaacattattgttaaaggacagcattagttcacagtcaaacaagcaagattgagaattaaccttggttttgaacttgaacacttaggggattgaagattcaacaaccctaaagcttggggtaaaacattggaaatagttaaaagacaaattgctcggaatcacaaaattccgagt

SEQ ID NO: 1961 - DNA, 469 bp, unidentified
  source 1..469: mol_type = unassigned DNA; note = unclassified Picornavirales sequence
gttttattcttctgtgttgtgagacgtgaatacgagcaacgggtgctatgtaggagtacatagcataccaccgtaagtagatagcgaaatgacaatttcttataacatagtgacaatttgatgtatcacacagtatttagaacacactaatattgtggtttactgttctctcagtagtccgtgtatgtgttaagtataaggtggagataagaaacaatagcattccgttgaatgacaaaggcatgtggccactattgtgttcttacttatatatgatttaatggattaatggataacttgagtgttgtactttggtattacgctcaattggtctcggaagactcgtttttgagctccacgtgagaacgtgactggtcagccgccagcacgatatcgccattaaaaatggtagagagctctattggttacagacaaaatttctgaggtttctgctccgttgatagcagat

SEQ ID NO: 1962 - DNA, 469 bp, unidentified
  source 1..469: mol_type = unassigned DNA; note = unclassified RNA viruses ShiM-2016 sequence
gttcctctcctctctacctgacccggaccacgaggcggctaagctgttgttgggccgaggagtaaagagcttggacgtgaaggatcaaagtattgatctttcatgtctaaacgtgtataaagagtcatgcccaatcagtactctacaatacgaaaaggctcaaatacatccagaggccacgaaccaaaaagacggaaaagtaaccgtacgacgtaactttggtagagtaggcgcacaggacgctttgttgtcctctgcagcgctagtaaaatacccattagaaacgttggaagaactgcgcgacgcaaccgtatatacgtcaggaactccctctggtttttcaaatcgaatcaaggagcttacaacacggacgtgcaagtcggaaggaaaacccgcctggatagccaaaaacttatctaagttgctaccaacaacagaacttcctgattggcatgatgttgaggggttg

SEQ ID NO: 1963 - DNA, 470 bp, unidentified
  source 1..470: mol_type = unassigned DNA; note = unclassified RNA viruses ShiM-2016 sequence
atacttttagacgttatctaattattctgacatttcaggatagcttacgtacagaacaattagataacgtctaaaagtattggctattaacgccctattatatacacaaatttaataacggaactgaaattgaaacaacccgtatagcaagagagatttttaaaaatttagatttcaagcacttaggtgcattctttttgctatatagaccataccgataaaacacacccaaccccggggatttccccttttttgcaaagtatttatagctaaactaaagcagaggttcagatatctacttgaatctttgtagcagtggttatatttgcttattttttgccttcgggccattctaaactaagttttatcgaagttcctaacttggaggtgtcacttaggaagaatcaacaactaaaaaaggtcacatacacacattggaagattcaaagcttaatatctacttagccaag

SEQ ID NO: 1964 - DNA, 471 bp, unidentified
  source 1..471: mol_type = unassigned DNA; note = unclassified RNA viruses ShiM-2016 sequence
gtggggagctaccactccccaccgcttgtttacctgctagtacattttatgacggtctaaccgccattctttgtatccctcttactgatcatttgagggctctattgtacccaacagacaagaccgagtagcaagattaaacttttatttctataactatatttcccattacttagtattaaggatttttgggtatttatgtagaaatgcctagtcacgacatgacttaaaataaatagttaggactcgacatcctatactatgtcaccccttttcggtcccgccgtaagaggcttaggcccctgatggggattctgtgtaattgcgaattacagatgggtttaaaacgtagattggagaacactctccatgtagacggccccattagtttttcgtgcctgaatgtgagtcggcgccaccacagacccctgatactgccgtgacaagccctgcagggattcctcatataac

SEQ ID NO: 1965 - DNA, 471 bp, unidentified
  source 1..471: mol_type = unassigned DNA; note = unclassified RNA viruses ShiM-2016 sequence
cttatggcatcgtgctgaaatcacggtaaacttactccgttttgggaagaacgttaagctttttgatcttggaccgatgttaaaggtatcccgtcccggaaagacgttaaacttgctaagtcagttgtcctctgattagtgcccacgggcaataggacttgtatataaaagtgattatagcacagagttgattatttttcgttttgttccactctgtagtaccctatgtatataaataataaaacctacgtgtagtataccgtatgacttgaaagtatttgcacgttaaacgtagtataagtcaagaaatgtatatataatgatactgatgatggacagttaaaaccatcacttttacatattttcttttccgattcggctgaaactggtgaccaacctgttactgccaacgcggaaacagaacaagttttaacccagattggaggagatgccccacaagaaaatgagggc

SEQ ID NO: 1966 - DNA, 471 bp, unidentified
  source 1..471: mol_type = unassigned DNA; note = unclassified RNA viruses ShiM-2016 sequence
gactggacttgctggggaaatacctagtgcaacccagcattttaccatcgctagccactactcaggactatccagagaggcactagacgcgtggttgttgagtttgacccacgcagtaatttaagactcgctaaaattttagaatccatagtagaagagaaagtttgtgcagagattgaaggtctttccgtgaatgcacccgatgaaacaacgggtgttactagttttgcttcggaagccggggtgtgtgccgatatccctatagaccctgttgtctcattcgccaaaggcgatgagtcttaccaggatctaaaggaatattttaggcgcccccggcttattttcaccggcacttgtgctaacactgtttccgttttggtaaactccaacgttagtcagatttcactttttcaggattggtttccgaatggtatagaacgactatcaggagttcaaggggttcgcttcgat

SEQ ID NO: 1967 - DNA, 472 bp, unidentified
  source 1..472: mol_type = unassigned DNA; note = unclassified viruses sequence
tcatgaactcattaattcacttaatcacaaaacttgttgaacaattagaacttcgtggttgggtttgaggtgtttaaacatggatcatgtagtaccttatctacaaatcccagttgttggtctaatccttttaaagtaatggcccggaaacaatgtagggagtagtgaggatctgtgagtaagacgtgctctggcaagccgcgggtctccaattctggactttcggaccccagaaaaggaagtcgatggcccccatcacagtgagcagtaatacatgtgaagtggacaagttccattgaaaatcattcactcattggtttgtggcaagttgtgtggcaacgaggatcaagttgtttggcaacggcaagctgtgcggcagcgtggggaatggcaagctgtgtggcagcgtggggtaaggcaagctatgcggtagcgtgcaagggcgcgaaagctctgaggagcgattctgaac

SEQ ID NO: 1968 - DNA, 472 bp, unidentified
  source 1..472: mol_type = unassigned DNA; note = Hepacivirus C strain SL7 polyprotein (POLY) gene, complete cds.1 sequence
gctagtgatctcgcgggggcacgcccaaatttctgggtattgagcgggttgttccaagaaaggacccggtcaccccagcgattccggtgtactcaccggttccgcagaccactatggctctcccgggaggggggggtcctggaggctgcacgacactccaccatgaatcactcccctgtgaggaacttctgtcttcacgcggaaagcgtctagccatggcgttagtacgagtgtcgtgcagcctccaggaccccccctcccgggagagccatagtggtctgcggaaccggtgagtacaccggaatcgctggggtgaccgggtcctttcttggaacaacccgctcaatacccagaaatttgggcgtgcccccgcgagatcactagccgagtagtgttgggtcgcgaaaggccttgtggtactgcctgatagggtgcttgcgagtgccccgggaggtctcgtagaccgtgcatc

SEQ ID NO: 1969 - DNA, 473 bp, unidentified
  source 1..473: mol_type = unassigned DNA; note = unclassified Picobirnavirus sequence
atcaattaattctttaatttcattcaatttccaaactaaagttctgatctagttctcaaagtaaagaaatggacaagtacgtccttggagaacatcgattggaacaaattacaaacaagtctcaatatgcacgtctgaggagatcgatgtaggacggaaaagcatagtttgagcaaataacatccagaaaggaggtagatttgacacagaatcaaatcaactaccaaagaacgctggaagataggcgttcacatcttgcatccgagaaagaaactaatcgtgcaaatctagcgcgcgaaagagaggaaaaccgctctaatctggctcgggaatatgagactaacaggtctaatgttgcaagagaagttgaggcacaccgctctaacgtatcacaagagcatcttattgcagctagagatcaagagacgcgaaggtcgaatttagctagagagattgaaaccaatcgctcaaac

SEQ ID NO: 1970 - DNA, 473 bp, unidentified
  source 1..473: mol_type = unassigned DNA; note = unclassified Iflavirus sequence
ttttaaatatcgggtacagggttttaaccctgtacccggtattcagaccttagcttttgagctattgtaagaaggtagcctagcttttaagcaatggcggtattagatcttgcttttgagctctatctagtacgtgtttacaattaattcgattagttaagattttaattagttttagtaaccagtgcttcaatcttctattgtggcactggcttggatctcccttacacatgtgattacatgatagacttattagtagtagatacatctaaattctacaacgacctagtaagtattagttatgtgaaatagaatgtggaggattttaaattgtgaataggcctttatattcggagtaggtagtattgcgtatactattaatcccacaatacgtggtctccgtcttagtatttttaatttgcgccccaatggaaatggctcttcggacttgagtacagaggggcaacccataa

SEQ ID NO: 1971 - DNA, 473 bp, unidentified
  source 1..473: mol_type = unassigned DNA; note = unclassified Picornavirales sequence
ggggacagttaacatagctaatgctagttgacatgtccctaaacccttttcaacgtctgacccacgatacgggtcacctctttatgtttgttttgttttacgtttgtttgtttgtttggtggaacgtaaccacccgtaactataactagaatgtaggctacttaaattaggtttgttttacggatagttctcgtagacctcgagctacgtctcgtgcataaacatgggtaaccatggcacttggcggttagtggtttttacttggctttcacgaactcaaattgaaataagtcagtgacatttgaccttgtaggcgtgaggcgatgtgcaccgcgatatcaggtaaccttctttaggtctgagatgttgtcccagccacaatctttgcgagctggtcgagggctttcccgaggtactgcacttaacccaaaactttctaaatcaaactcaaactattgcagacaaaattaata

SEQ ID NO: 1972 - DNA, 474 bp, unidentified
  source 1..474: mol_type = unassigned DNA; note = unclassified viruses sequence
gaatttcattttataggaacattttcacctcatagcaacactcccattgttatgttgtacccctcccctttcataattgccttcctagtttatcttgtgcagtttttatcccagaagattgcattgacctgctgtgtaacaggtgttgcatggtaatgactactaggtgtccatattcacggctcgagggccacagggtgaaaatccctacattctagtgtgaagcgaaagataagctggaaattgagagaaagctattcaaggatagtgtcgtgcagctcttaggagtaaaggtgagtaacgtaatatgccttatgagctctcgacttctcaacacatttctttgcccaggtagtggatcacaacgtgaatggtcccataattaggggtattgtaggtaaaggtgcttcgacatatgtataaatgatcgaatagcgataaccggccgtgactacagggaccccctttacaaaa

SEQ ID NO: 1973 - DNA, 474 bp, Bavaria virus
  source 1..474: mol_type = genomic DNA
gtgggaaccctttcctcaaactccggacacggactactctccgtgtttccctcatcaaagagggcctcagctggcgcaagtcggctggggccccaagaatcacctgggtggatctctatggcgactggggtcgctttgactgtgatcccaccccactctttgctcgtgaagggtgcatcctcactgaacaccctcgggcagagatgcaagggtggaagtcgctcctgccccctggcaacatgcaggtgcccgatcccaagctcagctctgacttcctctcctgggtggtgcaacactccaaggttgatgaacaaacctggagggacctcaaggcaacctggtctctcgaggatctccggcgcatctccacagactacctcatgctcccggaacctgagaagaacactgatgcctatgatggctggctaatggtcggcgagatgttgaccttagccggtctcattggctgggagg

SEQ ID NO: 1974 - DNA, 474 bp, unidentified
  source 1..474: mol_type = unassigned DNA; note = unclassified Riboviria sequence
tcttgctcgatgtatacaaaattatgatgtaaataaaacgttgagtattgctattgtagaaagccgtgtagatttttatctttatatcctaggaccacggaaagcagccctttattgtccaaggaaacatcattgctgtacattggttaagtagccgtgtgcttaagaaacttacttactgaacaaaattttaatgctaatcctgatgttttatccgttacgacccctgattcaaatgatactataacccttcgcgatgatggcacaagagtttccgaacgctttaccgcttgtgaaggggatttgccttcttccctgtacgattgtatcggtgaaaagagtgaccactctatctccgatttcttgagcagatatgtgattatacaacaagggacgtggtccagcacgtcggtgcgcggagacgttttgtctaatcttgttttccccaagaatttgtttaatactggccaatat

SEQ ID NO: 1975 - DNA, 474 bp, unidentified
  source 1..474: mol_type = unassigned DNA; note = unclassified Fusariviridae sequence
agagcagccgtttggctgcctggtaccacatcataggggatcgccctagtggtgccccagttttctcccttagaccagcctatcttacggctggttgtccttattaaggatgggtttggttttcttccaaatttatagtcgcctggtgcgacttcatcttttgccccctgggccagctgatgagctggggccgaaactgctggcagtcctggcgttggaatttgtattccgactcccccctgtattgagaacacaggtggtaaattgaatctcacggtgccattgagttggtaaccagaaagcttccgtatctcgtctgagaggaaacaccggttgaaacagcttcggcgcgtttgcttgtgcgtacaacttggagggttagttgcgtttttggtgctcagtcccgtcaaatcttattcctttaaactgtttgaacgtagcaaagaccttgcagtcagtagtaacgacactgac

SEQ ID NO: 1976 - DNA, 475 bp, unidentified
  source 1..475: mol_type = unassigned DNA; note = unclassified Endornaviridae sequence
gtcgtcaacaccaacacctaccaactcacaccaaccaaccaaactacataccaccattgattacaaatctttgtccgagaacagcccctcggacaaagattaccaaaacaacccccataaattgggggccaagggctgcgactcgctagaagtcgtaaattcatctagcacaataactgaatggattcattccaagcggaacgacaaatccattcaaagatacaaatcacgcggatttacgacatgggatgctgttcacagtacgccgttcggaatatccgttgagaaagaaactgagttagctgagaaatttctcaatgaattagcaacacgcagctcagaattgaaacaatgttacaacgaacaagtggtgtgggaagaagatgaaaaacctgaaccagaaggtccggaatttgaagacctgcagccgctgaccgttggagccgccacacactgctggttgaacataccattc

SEQ ID NO: 1977 - DNA, 475 bp, unidentified
  source 1..475: mol_type = unassigned DNA; note = unclassified Riboviria sequence
aagataataaacgattaattataaataatagtacgaataaacgtaaaatgagtcatttaatatatagcgatttcattaaactaagagatgaacttcaacaatacttcacggaggcaatttcgttaccggccattcattacttcaaaccaaatcaaccagtcaccttatcagttaacatcataccatctggggaagttaatgacgaccttattagcgaactcagggccaagattcaacaacgtatcgccaagaaatccggtattaaaccgacgcttggggagacgtacccgttatatttatccatcaacagggagacgattttaaaaattcaagtgcatatgaaatatgcttataaggattttgaagcgattattgacgagatagattttgaactagtagaggcaattaaaacattgaaagacaccaaaattgatactttaactaagaaaagcgttatcgataaacttttaagaaa

SEQ ID NO: 1978 - DNA, 476 bp, unidentified
  source 1..476: mol_type = unassigned DNA; note = unclassified Dicistroviridae sequence
acatcgtgtaataaggcactagatgccccaaagcacaaaattgggtaacccgaactgaagcttgtctcaacaccaatcaatcgcagaaattggcagtggacggcccatggcgcccgaggttggactcttattgttccggctatgttataacctctgttcgcaagttatagcgtagtgctatccttggagaaatcctaaccagtgcctttggaaagcacaccaaaacaaaccttgacctggacatgtcattaaactgtccaaaacccaaagtcccttcaggacaacaatccatcgccagaatgacgaaaactcacggtcgagttcgaaccacgagtcgagtactcaaacttagatggatttctttgcgtaacgagcttcgaaactcgcgtgtaaagttgctacgatagtgcgaccctcttaggagaaggcagagcttaaccctaagttgtatcttgctcgcgttacgacaccaatct

SEQ ID NO: 1979 - DNA, 477 bp, unidentified
  source 1..477: mol_type = unassigned DNA; note = unclassified Tombusviridae sequence
attttccctaccaggacataggaaggtgttactgagtcctggccggcctgtgatggccaacggctgaaaggccgtgcctgtagtcgagtagggaggtttgcggtagcagcatcctggacaaagttaggtgtacacccaccttgccaatggatgtcaggacaacgcattgctccccccggcccgtctgcgcagaaccatggtcaatggcgcttatggcctgcaatggtaaccaggttgaattccctggctgtgcttaggagtgtgacgggtgtccgcgtcgtgatttatagggcgggcttaattgggataccgagggtaggcgccatagtctgggtaaccaggctcggttctgctaacggctgcaggtgtgcgcggcgagccaggggacactcctaggccccctcgccagctctgcccgagcttaagggcattataccttgtctggggtttaacagggggtggtggccttcaccattc

SEQ ID NO: 1980 - DNA, 477 bp, unidentified
  source 1..477: mol_type = unassigned DNA; note = unclassified RNA viruses ShiM-2016 sequence
atttcacccaggattcgcacatcctaaccatactcgtcgcattgttcgcgcacaacacctagggggaggtttagaccccacgcactcactctgttggagagtataatccagcaccacacactacatgtgccatataggaagacgtttgcgctgtacgcagtgttgcgcaactgagctagtgctcccacctccatgattacgggcgattgattgaatgcgcccttacaattagttagaacgcttggaggtgagagtgggaggggtatttaccccagggagcagagccgagtgcccgcttaagacggtgagagccgttcagaaagtttggctctgtgggcgatcgcgtatgcaggattaaggtatccgcatatgttaaactagcacctttcaaataataataataataaacaaaacaaaaatagagcaccattcacaaacaacaaacgcaatgtgcggcgccaacgggcgcccgttgcg

SEQ ID NO: 1981 - DNA, 478 bp, unidentified
  source 1..478: mol_type = unassigned DNA; note = unclassified ssRNA positive-strand viruses sequence
gcaaaaaggcccctgggggggggttaatgagtactggaaaaagaagcgcgagataccacttcgctgattatgctgattctggtattaaggattagtagagtatcggaagtgccgaagggaataatgctggtccgttgtaaacaggatacttatgaaacctcttaacagaaactttgagcaaacaacaaataaacgaacaaaaagagttatatattgaacttgaaaaatcaatatcttttatttagattgatttatattagtctttataatcgtagggaataattctcatctaatgatatcgatgtaaaatgtatcattctagctattcaattatattaattgagcttagcatctgattaaattactattgtaaaataatatttaatccccatctttgcaagatggaaactcttaataagtcaggagtataatggatttaaaccctcacaccgaatcatgagtataaacagattcaaat

SEQ ID NO: 1982 - DNA, 478 bp, unidentified
  source 1..478: mol_type = unassigned DNA; note = unclassified Riboviria sequence
ggggttaagaccccagcatattttcaccccacagcccttggggttagcctacaccttcatcaagatgatggtttaggtttgggcatggaatttgacttcgaccttgcatgtctgaccacgaatgtcatttcttcgttctggctgtagacgagactcggtattttgtattaaggactggcagggcccaagtattggcctaggagctctacatggctaccaggatattcaggccgataggatgtcccagcatctgtgtaggactgtttattacgccaatgtacctctgactctaagcactagagggagggggctgctacaggaaaaggacggcattgcctatccgattcacgtcatgagatttctctgacctctggcctgtagtggctactccgggatgggaaacccggactggcctctcactgcctgatagggtgtcggcggacacagtgcttagttttatagtccgttgtaatgggac

SEQ ID NO: 1983 - DNA, 479 bp, unidentified
  source 1..479: mol_type = unassigned DNA; note = unclassified RNA viruses ShiM-2016 sequence
gcaaggtttatagccttgcagtctctgtttgaatagttgatagttatatgtctatgtgtttagtgttgtacgttcaattatttgaacgtgccgctctcgatacatatgtcattataggtattgattgttcaatttaaactcgtttttcgtacttttgtcgtaaaaaagttcactttttcagtctactatcaagactttaaaaggatagttggagttttcgcacgtctccgtaatttacacttcgtgtagtgcaatctccggtactttggtaatcagccggattataaatttttggatttactgagctaacagtctcctcatactgtacgtcgtgcccatagatggtacgcaaattgtaggtattcctactcatggggtttaatggtagtactgatctggtaccccggctattatagcctaaacaactcagtttttgccaggacgctgttatttataacagtagtcctggcgtatatatt

SEQ ID NO: 1984 - DNA, 480 bp, unidentified
  source 1..480: mol_type = unassigned DNA; note = unclassified Partitiviridae sequence
ttgctcgcattggtgctcgcaccaagttaatggttgattggatgatcggttcttgggaaaactacttacgaccgaagacgtggatggacgcactcgaacaagaacagcaggagaagtgggcagctgcgaagcgcaggtacgaccgaatgattgaccatgagaatcagaggttggcaaaggcgcgggctgaatacgatgccattgttaacgatgtttctctgaagcaggccacggctcgagaagaacttcgagacgttctgagaggatttgggttgcaagatgcaccattactttcagtcccgtctgaagatcatggccatgaaaggctcagagaggaactcagctttctggggataaattttcgtcccccagatagccagttccactaatcgtgttcaaggaacaatacgcactctcgctagacgagcacgccggttaagaatgaaagaagcagcgacacagagacatcctatagagaaa

SEQ ID NO: 1985 - DNA, 480 bp, unidentified
  source 1..480: mol_type = unassigned DNA; note = unclassified vectors sequence
ctaaggtagaatacttcatattgagctaactcatatatgctgactcaatagttatcttgacatctctgctttcataatcagatatataagcacaataaataaatactcatatttcttgataatttgtttaaccacagataaatcctcactgtaagccagcttccaagttgacacccttacaaaaaccaggactcagaatccctcaaacaagagattccaagacaacatcatagaattgctttattatatgaataagcattttatcaccagaaatcctatatactaaatggttaattgtaactgaacccgcaggtcacatgtgttaggtttcacagattctatatattactaactctatactcgtaattaacattagataagtagattaagaaaaaagcctgaggaagattaagaaaaactgcttattgggtctttccgtgttttagatgaagcagttgaaattcttcctcttgatattaa

SEQ ID NO: 1986 - DNA, 481 bp, unidentified
  source 1..481: mol_type = unassigned DNA; note = unclassified Botourmiaviridae sequence
gggggtacacaggttttggcctggttcccggggattgtgctccacctgcgctttctccgagatttagtgctccttcggctggagagtggcaccgtaacgcgcagtggcgacgggccgtggttgctgggcatcacccagtgtaaaagggatgtaggggcattgcccgtaatccggtgaggaaggtaccggtcccaaaggggggaggtaaaacgctaatcaggcgtgttctgcgactgtgcctcgcgcgcggcagttcagacccggggactaactgtcccgggcgcaaaccccggcgggttgggtggacatggttgtcacctttcccttagatctttgcagtcgtaaaagaccgggccaagggggccctgaagtctataaaggtgggcgtcaatgcccaagcttcttgtcaacacacaagcgcgaattgaaacccctccctgggtcggagtaaaaggacccgcctttaaaagtgaatgataaa

SEQ ID NO: 1987 - DNA, 481 bp, unidentified
  source 1..481: mol_type = unassigned DNA; note = unclassified RNA viruses ShiM-2016 sequence
ggggacaacccagtctttactgatcacggtagacgttaaataaagagatcccggtgttgtccaatgctggaggtgttaagccaaaatcaaaatggactgctaagtaagatatacgcacagcgattaggttctgcattacctattcaatgtggtcaggctgcttagtggacttgtacatacccctttttaggggagggtttggtcacccaacaaaatagcactgttatgttgtcgattgatgtgccgcacataatatttattaaattacattactaatctttatactatttgtgagccagaatcagctcaaaatgattcacacatatcgtgcgatcctcgcacaattcatactgtcgcgtctttcgatgaagatgatgaagtcttgcaacttcgtgctcgggtcagggagctacgacaaaaacttgaccgaaagtaccgccatgttaagcagctcactaaacgaattgagcagctagaaggt

SEQ ID NO: 1988 - DNA, 482 bp, unidentified
  source 1..482: mol_type = unassigned DNA; note = unclassified Riboviria sequence
tttattaatactttcagaggaaactcttatgacacagaagaatctggtccttatcgagtctaatggctcgacccaactttatgggcaccctgaaaccctcgcgaagaccgtaaaggttaagcgctcattgtctactaaggcaacgagtacgggcgtaaaggtaacgaataaccgtgttgaagtcgttatcaacgcggatgtccctgtcaccgtctgtggcgactcgtgcgccggcggctccgaggttctgtctgtacgtttgtcaacaagtggtacaccgaaaaatagtgcagagcttgatgcaatgcttgatacgttaaaaagtatcattgacaaagctaaggcttcgcgcttaacttccggctacccaatgacccaagacttagtctgggttgatgtagacgaagcgtaacagacaaccgttaataggagagcaaccagtgaaaacatggaagctagaacgccgagcacgtgatgtgcta

SEQ ID NO: 1989 - DNA, 483 bp, unidentified
  source 1..483: mol_type = unassigned DNA; note = Sclerotinia sclerotiorum deltaflexivirus 1 isolate AX19 polyprotein1 sequence
ttttgtatttatggtgtttgttggttgctttgctttgtttttaactcacattcttttgcactttatctctctaatcttgtttctgctccgccacactctcggcttaaattgagtggtctcgctgtaccataccagcgatatttatctatctgaaacgacttcaggtcgcaaacttgtcatcacagctaatgccatccgaggctggtccacctgtaatgggtgcatatggtgtacttggtcgtgtaagctacgataacccaagtgctgatcgtcccgatcgaggaacgggtgcaaaataggtgttcacttcatctccaccccaatctcgaggtaaccagatcttctcccaaactggtgcgttacgcatgattgccgaatcctctgcgtacgtgtctgggtttgacccccaggctctgtacagactgtacgggcgaagggcactacattccctagtgtcttaaagaaacagtcggcccccgagta

SEQ ID NO: 1990 - DNA, 483 bp, Heterosigma akashiwo RNA virus
  source 1..483: mol_type = genomic DNA
tgatagaaagttctgcagtattctgcagaactttttaataccctttgtagagggatatctactttaattgctggtgtgcgccagctcgcttttcgatgtgattcataattaactatacacttgagcttaaaaccaattgttatgcgtaggtagcgttctttagcgtctactgtagtgtaattaatttgtttgctctagtggtgtctttgccttcaaagtactacagagtaagttcatttgcatagttgtgttgtgatcatgttgactagcttgtttgcgtgctccattaataacatcagtcccagctggcggggcaataagtaccagcctggttgttgcaagccgtgccgaaagaagcggtatcacgacccgtgtccctccatgtagtcgttaaaaacaagtgaggtaaggagttgtccatcttcgagaaaaattaataaaatggacttttgggtctttggcccccccccgcgttaggcacct

SEQ ID NO: 1991 - DNA, 483 bp, unidentified
  source 1..483: mol_type = unassigned DNA; note = unclassified ssRNA positive-strand viruses sequence
ttgttgatgctgtagcccagtggtctccgcgggtgtggttaattgcggcataaagactttcttgcagcaggttttgttgttggttgttgagtatggcgcgtgctaggggagttggttgagagttgttctttgcttgtgttccttagtgtgtgccttgtgttgtgtacacggtcaggcgagtagcctttgctgtgtgtacagcttgtttgtgcctttcgcccaacgtggtggcgggaggtatttgtgtttaatcgtcgttgagcagtaggctctcacggcgaaacgtagcatattgtgtgttatatttgtcgtgttcggcgaggaggttttctcggcttgagcacgatatactgtgttgattaaatttaagtgtagttccttgcgctctgttgggtaagctatccctacagagcgcgagatcatattgattgaagcaaaacgtgtatagtgtatattgtaacttgttagttgtaaaaggacaaa

SEQ ID NO: 1992 - DNA, 483 bp, unidentified
  source 1..483: mol_type = unassigned DNA; note = unclassified ssRNA viruses sequence
tgggggtagccatccctagtgtaatttcttacggggatgcatccttgccctttcaggaaagtaggatgtatctttcaaaggaaagataagctaaatgtgcatggcacaaggttagatggaaggaaatgtccatcggcataagctcagattgatttactgtcaaatagagaaatgattcgcgtcgcttggggcccagtttacactgggcgcatcggccccatatatcatggggtgcgctacgccgtagcaagcattgagaagtccccttaagcaagggagcctttgccttatcgactgtagataaggacggtgatcaatataccgagtcacgacaaagaaagtgacacgtcaacgcttaaaagtcgcgatggatatcaccactatactagtggtgtgaaccgaaatcgcgcaaatcgacaattcatatttcgataggattaattgtccaatcggcgttccgattcacgtgagaatccgttaatc

SEQ ID NO: 1993 - DNA, 484 bp, unidentified
  source 1..484: mol_type = unassigned DNA; note = unclassified RNA viruses ShiM-2016 sequence
cctagccgggctttacccggtttggtcgtcttttgcttatgtggtatattctccattttcgaatggacgatatatcgcataggttttctattctcttaaaaactaactatatctgttatatatttgtattgtttataaggtggtgggtttagagttttaattgtaagtaggatactctacttccccacttttgttttgtactatgtttaaggtagcacctaatgtgctattcttagtccaccgaagttttagtgaaagcaactgctttagattattttgccctgggtcttacccacttgcatttacgccgtgaggtattgtgcttgatgttggacagggatctaaataagtgacctattttgttcttggtctttgctaacgttgttagtagctattaattaggtggtactgcgcgtaagctagaacttacgacaagtgacctgggtatgtcatttaaactactcattcaaaatttacaatacat

SEQ ID NO: 1994 - DNA, 485 bp, unidentified
  source 1..485: mol_type = unassigned DNA; note = unclassified RNA viruses ShiM-2016 sequence
tacaaaaatccttaaaagtcagagaacttttaaaacccccggttagcacaaactagccacaaatagtctgagtactaccaaacgcacgtattgtccgagcacaattacgtaaaccaacgctacaatcgcacgtattgtctgagtacaattacgcaaaccaacgctacgaacaataaagcccataattttggatttatttccacaatttacgctatttagacttatcgctgccctccactatagtggttgtatcatctctctcggacaactgaatacttccaaggtatagcgtcgcagtcagagcacagcgcctaaatcttggtataaacgaacgtacgcctacagaagcaacctatgagttacacttatactgctctcagctcgagcattaccgaacgagaaaacatcaacgatatcgacgacacaactgttgacccttcagcctcgttcctagtgcccgtcagcgaacaagtgtataggccaac

SEQ ID NO: 1995 - DNA, 485 bp, unidentified
  source 1..485: mol_type = unassigned DNA; note = unclassified RNA viruses ShiM-2016 sequence
gcgctgcgcctgattagtccggaatgacgtaaaactaccaaactaccccttgcttgaggctaacaaagcgcgtgtcccaagggacctaaccgggggtgcgtcctataggacgataaacaggacgcccagattccagggctatccggttttcggcggtgcacccagcatcgccggcgacagtgcgtctagcgctgtcgtctggtccgcaatgacgttaaactaccacgccggcgcaccacgcgccgtcttcctgtccgcaacgacgttaaactatttagggggggttggtacggcgagctgggtcccgtccccgccaccgcccccctgcagccctcggggcgttgcagcagcatgaccgcggtcagctgccacgctcccgggggcgattgagtcagcctccaccgccccgcggggcggggtgttaagctggttcggtgtttctgcggccttactgctcgatctccaacactattcggtccgtgagg

SEQ ID NO: 1996 - DNA, 486 bp, unidentified
  source 1..486: mol_type = unassigned DNA; note = unclassified viruses sequence
cttattcattctgcatcatggcgtttataaataataatggtaatgctaaccagcgtggaatacccgcacaacagcaacaaagacctcaacagaggcgtccccgtcagagggattacgatcggatgttgtcctacaatcaagacagagctggtccgtcttgggcacaacaatcccaaccggtttttgagtatgagcgtgcaatggaacgcctcaaccggcaacagcaaccccgtccagtacagaagagcacgggcagtagacagcagaagaagcctgccgacagaggcccagagccgaaaccgacaacagtcgagcaggggcagcgagatgatccgatgtacgaaggtccatgtacatcaacaaccgccagtaccacattgtttggccacaatctggactacagcggatacattgccctagtccgtgagttctacatcaataccacggcactaaatccgcgtcttacacgcggagttacccttctgc

SEQ ID NO: 1997 - DNA, 486 bp, unidentified
  source 1..486: mol_type = unassigned DNA; note = Picobirnavirus sp. hypothetical protein and capsid protein genes,1 sequence
aataatataggaggaagtgcgaatgaaaaagacatgcatttctaaggtgaaacgatttctcatctatctattggcgtacttgttgagcacgctttgtagagaagcaatgtgtattcacattgtgaagaatcgtcagtgttattccgtgactgtaactaacggaaaattaaataaggaggtcaagtgatatgaccaaagtacagagcgctggagagcgcaagagctatgtgatgactatcggagagtatattggtaaggctcaagggtggctcaacacgctgcagatgatgcacgcatacaacatgaatattgatgcgaaatcatcgaatatcaaaaccggtactgaacaaggtcgaccttatgttgtggctacttatagttacactatgattaagggtcctacttctgttaaccgggtggtaacttggatctgggatgatgatcatcctgatggtgagttagcttactcatgcggaggtgattaat

SEQ ID NO: 1998 - DNA, 486 bp, unidentified
  source 1..486: mol_type = unassigned DNA; note = unclassified Reoviridae sequence
agtttttgcttccgaagtcatatcacacttaggcggggttaggtctgaaggaagatatagcgaataaaatatatagtgtaaattaatttaatagaatattagcattcaaatttcaatggagcagacggagtggtggaacagttactaaatgatagtagaggaacggcatggtcacagtagagtttagtgaggaggataccagtaatataaacaaacaagtctgagtaatatagttaaccagccgaaattaagacgacgtgaggagattctactgagacaagagctggagggtggaccacgtttgaagaatcatagaaagatgatttggagattaggtcgaaattgatataagtgaattaaacaatacgcttagagagccaaagatattagtagtaccatgttaccatataataagactagctactaaagagggcgggtttagtgtgatcgattctttcctaaagctatcatgtctaaattttctga

SEQ ID NO: 1999 - DNA, 487 bp, unidentified
  source 1..487: mol_type = unassigned DNA; note = unclassified Sopolycivirus sequence
acgctgctaaatctttagctagtggtgcaggcaccgctgctaatgtagttaaaggcgttgaagcaacagcttcagcaaccccttggggtgcaattgctttagtcaactcaatgttgggtgatgcaactgctgctggaattgatgctggaaatcgttctacaattaacaaagacttccaagcaaactcgatgcaacctggatcagcttcacaatatcaagctggattaataaaggacacacaacaaattcatgcgaataatgagttagctggcgcacgaattggaggtgtttttggaccattaggagcttattttggctcacttttggctaatgcacttcaagataatgcacccagagatctctatgattcactcaagactggctattcattcgatggaaaattcaatccccaagatacaggatcagttaattcaggtacaacagcaaatttatctggagaaactaatatgcaagataatttaataac

SEQ ID NO: 2000 - DNA, 488 bp, unidentified
  source 1..488: mol_type = unassigned DNA; note = unclassified Hepacivirus sequence
gaaaggaaacgtatgacaagtttgggctggaggtcccttacccgtaccaatccccgcatgctctggattttgaggcttcgagcctgccacagagcctctgcccgtgggtggcgccgccatttatgtcttctaaatctcacggcctttctttctgttaagtgtgtctggctaagaaccatttcgacccccggggcggcaagcttttcgccctgaccctgggccactcgggacacacgttctctgctgcgcgatggccgtcgcatgcgtgcgaaccatcagaattgcaagtgtgtgggaacggtttgactgtaaccagtactcttgggacaaccagcggtaacgctggcccttgggcaggcttcggcagctggtgtgaaccaatcctaggtacctgccttgcatgatcgtaaatagctgtatgtaagatcgcgccgcaggcaggagttggcggactccttaaacaccgtcaaccccaaaaaactatatat

SEQ ID NO: 2001 - DNA, 488 bp, unidentified
  source 1..488: mol_type = unassigned DNA; note = unclassified Iflaviridae sequence
agctggattttaacgatgagaagcttttaaattgttcatggtgatacccccctccccagtgtgattgtccatatttgtttgattgatttacgatgacgaaaattgagtaccctgtaatgattaattctttgttttatgaatataatatgacctcttatgctgactagtgtgagtgccgctagttggtggagtatgatgttatacaattgtatattaaatttagctctgagtaaaatggttgaaccccatgttgaaatgacgctatctgatatacgaatgtatgagccagaatgttgacaacacctaataatgcacaattgcaacaacttcggttggagcctcaaactgcgattggtcatgtaatttactagctttcaaactatcgacctagacaagtcttagggagtttgaaagaataggaaaccaattcgtgaatgtttgtgtacccgtgtcggagcggattattaggacggcggacgctttaaaag

SEQ ID NO: 2002 - DNA, 488 bp, unidentified
  source 1..488: mol_type = unassigned DNA; note = unclassified RNA viruses ShiM-2016 sequence
gcagcgaaatacaaattcctgtcgcaaaagagtgttatgaggagtcacgaggtcaaaactcccgttttgtaagtttagtgaacactttgagttcattagcggtggatgccgcgaaacattttgtacattttatattcactccaccgagtttgtatttgtatagaaaattgtatcctagttctcaggagctgaatgcagatgtacaaggtgggggcgatcaaattgccccacagattgattcaaatccggccctcacgtttgtcgatcagaacgcaggtgcagaagatggggtcgacacttatgttgaccctctgcgttccaatgctgaggagactgcccccttctcggaatggaggaagagacctgttctcttggcaacggtcccttggcagactgggacagatttggacaccgttttcaacccatgggtggaatatttttccaaccagtacatcaaagaacgctttggaaggtttcatatagcctcc

SEQ ID NO: 2003 - DNA, 488 bp, unidentified
  source 1..488: mol_type = unassigned DNA; note = unclassified RNA viruses ShiM-2016 sequence
ctgccccgtccaggcataaaacggacaccacctccctgtgtgatcttactcagtggccaataacttggtcctggaacatcactgagcatgctacagggggtagacacctaagggatggtgcggagcagccctccggaatcccatcaggacctagcagtgacgaccttgagttgagtcgtgaacaattccaatgtgaattgtgctgcgaaatacccagacttagcattcaagaaccagaattatatacaggacagactaatacgacaaccgcttcgctacctgaaatagcgacagcggcgacacaacagttgtctaccaccttggtagagaacgcaccaccacacaatgaacaacgccagattgaaccccgcgcatatacaagtacgaatgcctttaaggtagatcggccagaattactggaaacattgtccagggaggtgacagttgtcaccggcacctgggatagtagccacgtacaaatagccgac

SEQ ID NO: 2004 - DNA, 489 bp, unidentified
  source 1..489: mol_type = unassigned DNA; note = unclassified Picornavirales sequence
aaataaaatgtttaaatacaaattgtttttcgattcgattcgatttgttttgggttttggtttttgggtcaagaccgtaaaacggttcaagagaattcgtaaaacagatcgccgctagtcaaagctagttcgtacactagatcactgtcaataaattcacttttagtcgtcaatggtcaggatacttccgctttaagggcgcgtttgtatgattgcctttatatttcttttgataacacgacgtgctcatcccaccttgttagtatcccactaacctggacaaatctcgtgttttgaaaaatatattaatttatttgcgtaaattactatatttagtacttcttatacttaaattccttggagttaaattgcttattataacaatagcattttgctttttacttggatttattagtaaaagaacttacttaaccctaaccctagtttttggtgtgtacaatttatttgaaacataccaagaattcaaaa

SEQ ID NO: 2005 - DNA, 489 bp, unidentified
  source 1..489: mol_type = unassigned DNA; note = unclassified RNA viruses ShiM-2016 sequence
cgtatggagaacatacgcaattattgccgtctaacgggggtgacgtaacaagaccccggatgagtccaccacgtgtggcattttcagccgaatagattcattttatgacgacagattaatggaaatgttttagtgtttaagtaaaagggtttggaaccttagagtaacctcgatagtatatttatatactcccagaacctagccatggggatgggccgttgaggcaatgttctaagaccagagattttaaagcttgacaagcgctttacctgagattcctcttttgagtttgaatatattaaagatagtctaaaaacatttatcagttaattatgttagagtagctgaagacatgtatttcgtgctctaacctctgaaatgttaaatgtttgtccaatggttcggtgatcattggaatattagcgaagttaaccttcatctttaataatcctgtgtcggagcagtggtaaagtaatcggactattaagc

SEQ ID NO: 2006 - DNA, 489 bp, unidentified
  source 1..489: mol_type = unassigned DNA; note = unclassified RNA viruses ShiM-2016 sequence
gtagttgggggtggctctgatggtgtgtcaggtaccacccccgccccatccggaggtggctccgacggtgctgtgggtagcaatcccacccctacgccgaccaggacgcgttaccacgcggcctcggctacaggtgtacccgcaccctacgacttcttaggattaggcgcggtttaccaggtcacttccgatttggtataccagaggtttgacgatgtatggaagctcgccaattacactgacaagaccgtttacttccagctcaaggttgtgtaccacaatcttgcgttcgatacgtccgttaggtatggaaaccaggattcctattcttaccataccgacgtggcgtttgacaacaatggcggtaggctcgtcactgttacaggaaagctgcaacctgctgaggcctggcgttcgagcatctacattaagtggaagttcggagtcacccccccagacatttactggaccctgaagacagacatatac

SEQ ID NO: 2007 - DNA, 490 bp, unidentified
  source 1..490: mol_type = unassigned DNA; note = unclassified RNA viruses ShiM-2016 sequence
tattttaaacactaatttaagtaccttgttttattttataaaacttgcgacttaaaaatgtgtcttctttccttatcgtttttctttatgtttgtattgttagtataaaagtgagtaagtgattcatttcatgcttttcttttattcttttaaacgatattatacattcaataataagtgagtaagtactgccagtgcgctggaatgtggtagccccacttttggaaagctctaaatcttatgttgattgtattatatttgttttcggggttaataatgttccctttctaatattattattagtctgtaacactaacgtacaatgacgtgatattcgtcccagagggaaactggttaaaagcgtgcgcgctacggcgtgggttgatatgcaaccaaagacatatcgttcagccctcagcgaacatagtctgagggaagcttgtcagtgctttaaactgacaaattttattttactgctagagaaatcgac

SEQ ID NO: 2008 - DNA, 490 bp, unidentified
  source 1..490: mol_type = unassigned DNA; note = unclassified Riboviria sequence
gtacaggcgcattcgagagaagtgttattcgcagttgtatgttccgagtacctgaatcacagattcacagaaaggtcattaactgtcataatagtgcgtaatcgaaatttactgtcaaggggaacgagagtgtaaaggtttacaacggttcgcccgaagtacttggtttttgtgcgctttacagtgagagaagcagtatttacgacgagtaacggagtaacaggagtgagaattcatcgaaaggtgcacttcacgattaaatacagtgtaattgttgtgtcacagcaacgagacgagcagtatttgtgaatttgtgtcgagtaattggatcagggacccattgaaacggcttgttgtgttaaaatacagtgtaattgctgttattacctattacaatataattaattaggataagcgaaatcgtgcattagcacatcgattatagaattaggttaattttgttagcgattgttagcgttatacccgcaaa

SEQ ID NO: 2009 - DNA, 490 bp, unidentified
  source 1..490: mol_type = unassigned DNA; note = unclassified RNA viruses ShiM-2016 sequence
cgtagaggtgttgcctctgcgtttatttttgccaccctggctgggtgcttgtcaggccgctatagacatttcatgtttgatgcatgtgtggacgtggtatctgcctaaggaaaagtcttttcattgacggttttattacttgacttactattttagagttttttgactgtgtggggagtgttattttttcgttggcagtatttcgttaaactggccgttattcttttaggtgttggagacgctcttagttaatatgctgctttctttttagttatcattgatctggattgatctgagattatattgaaagcactatgttgtctgtgaaatttgcgttagccaacactagggggatatcaagtccctagcttcttgtgagtatgtggatatctcgcagaaccagttgaaagcactggatgaaatccgcaattgctatgcaattttcatatccgctcgccgacggcggtatataaatgtcggtcatggaaac

SEQ ID NO: 2010 - DNA, 490 bp, unidentified
  source 1..490: mol_type = unassigned DNA; note = unclassified RNA viruses ShiM-2016 sequence
atcagtccattcgtcaagctgatgacttgatccatcaacaatggtggagcactaatgtcaagcaacagcccgagggattatatgtaaatgatggctggtatgttgagaaatgcaccatgcccacgacatattatccgactgatatatatcatcctcactactacctgtataacagattaatagatctgcaggagtttgtgttcggtaaaaccgaaataaaatacatccccgagctttattcacaattgaagttaagatcgttaaacctgccaagagatgatttgcatcataatcaattaaggtccgcggcagttcagattcttaaccagaagaacatcaatcccacaagggttcatgatgctctgatgggttcaattaccagagccatgatacctgatgatgatgagttatcaagtatcagaattcgcaaatccggtcctgttaaggccaggcagagcgaactttcgggggaaggagatccaagcacccg

SEQ ID NO: 2011 - DNA, 491 bp, unidentified
  source 1..491: mol_type = unassigned DNA; note = unclassified Hypovirus sequence
gcctgtgggttcccgactcaggccgccctttcgggcgtaatcggggtgtagttactgcgctttcagcagtcaactttgtcaagatgatgtatctttgactgttggcgttctttaaactacggttgtgtctaacgacacgttctcttaattgagagtcacgctatgcgtgagcccaccaagtggggttgctgggtttccagcggttgtcgctcgcgacagtttcatagggttcacgtcgcccttgctaaacgacgaatttggttttgcttcctggttatactgtgccagccttggtggcacttaaacacttgaatgcgcacaccttgaatcgtttcgccgtcttcgccggtgtcaggatttagggccactgttctatcaagagggataagccgcgcctgtctgtgggtagttggggatgaatagacgtccgtggtgcaacgtgcacggctcccatttcaacaactacttggacgaatcagagcgtaaggtaa

SEQ ID NO: 2012 - DNA, 491 bp, unidentified
  source 1..491: mol_type = unassigned DNA; note = unclassified RNA viruses ShiM-2016 sequence
gtttcggtacgccgaccgtgctcgctcagtgcgagcacaacgcgctaaacgcgctgtacaaacgccatctttctgccccacctaacctttgcacccgccccttccactcgtgtttcctcgactacattcaaactaaacttgttcctcagtttcattttgtccggcaatcctgtgaaggcgcatggaagaagaagaagacccaatctaagcttgactcgatcgaccggtccgttgtttatgaccggttcgaattccaaagagcgaagtcctttgtcaagcgcgagattagtgtcaaggttccgaagaaagcccgtttgatacagggcaatttcaatgaaacgacggcctaccacgatcctgatactttcaaggccatctcccatctttttgaagacgtgcgcttcgaagctgaaggcgtttcgttcgtattacggtacacatctgggtgtactaacgccgacatcagccgactgttctccgacgaggttgcg

SEQ ID NO: 2013 - DNA, 492 bp, unidentified
  source 1..492: mol_type = unassigned DNA; note = unclassified Marburgvirus sequence
ttattgttcgaagattgacaatttgatcactttcagttttcaatttcaacccttatcgcgagatttggacacgatcttactaacttcaataactgaccccaaattcaagtttactaaaggctaagatgaaaataatcactagtttgttgtaaattactcgatcaaaatgttcttaagctatcttcaacttaatgatgcaactctgtttcatctttcttttgatttcaatgtcacagctatatccaagtgtctaattaacaacttgtacctctaaggaaaaccatgaagaacattaagaaaaaggatgttctgattcttcaactgaacttgtatatcctttattgatacccttgagagacaactgttgacgctagatcacggatcaagcatatttcaatcaaacatcctaaattttcaatcgtacacataataaccattttggtagcattgctttgcagtataggataggtggtcgtgaaaagacttccaagc

SEQ ID NO: 2014 - DNA, 494 bp, Human orthorubulavirus 4
  source 1..494: mol_type = genomic DNA
tcatacaaatcaatcactgatatagagttaaggaacattttatatccttccccattggatcaccattaccatcctgatatataaaaccacactacactatgcaccgtccaatatctagccgaccataagatcacaaccacattacaccaattcaatcaaggacatccctgcaaacatcaaacaatcaaaccacgactgcaacagacacagcaccacctgatcaagccagaccctcaccatgcacccaagtcacccgacacaaccgcaaactctcgactccactattcaaaacacatcctcgaacagaccacccaaaaacaccgaacaatcaatctcctggccacaacgatcattgtaaattttaagaaaaaatctaacacacaactagagccaaatacagggggggaaaaacgcatccgccgccacacgcacagatccagaactcaaggcaaccaagacccgccagattccgctccatcttcaaagaaatcaac

SEQ ID NO: 2015 - DNA, 494 bp, unidentified
  source 1..494: mol_type = unassigned DNA; note = unclassified Orthorubulavirus sequence
tcatataaatcaactattgataccaggctgagcagcatcccacatccttccccactgtactgctagcatcattcagatccatagaaccacaccacaccatgcaacaactgacattcagccaatcactaaaacacaaccacaacacaccaattcaaccaaggacatcctcataaacacaaaatgatcaaaacatgattgcagtagatacaacatcaccccatcaaatcaaaaccccatcgtatactcaattcacccgacgcaactacaaatctccgaatccgcccccagaaccacatcctcgaacagaccgcctcaaaccaccaaacaatcaatttcgcaattgcaacaatcattgtagattttaagaaaaaaacaagaacacaataaataccaaacgcagggggggaaaaacacatccaccgtcaagcacataactctaaactctgaggtgaccaatacccgtcgaaatccgctccaccaccagagaatccaac

SEQ ID NO: 2016 - DNA, 495 bp, unidentified
  source 1..495: mol_type = unassigned DNA; note = unclassified Hypovirus sequence
gcctatgggtggtctacataggtgagcatgcgttgctcgatatagaccgccattattggtaacacgcttgaagtgttctcatccggagaaagtgatttgctttcttccatgaggctccctggagggattgtccaataatggttgataattttggttgctgcacaaccggggctttgcccggggatttcatcccgttcaaggtgaggcccttgtagtaacctctccccgctgcgtgagcgaatacataagttcacccagtactgacagtgtcagcgccgcacgtgcgtgaaacgtgtgactcgcagactgaagcgacctatggtgaaaacggatgtaccatctagctgtggagtagtgaccctagaagctaatccgatggttccaccagtcgttgtttgccggcaaacgccacaaacggtttcgtgctttgcgtgaagaagcacggtctcttaagagttcattggtacggttgaccccgaacgaggtccgaacata

SEQ ID NO: 2017 - DNA, 495 bp, unidentified
  source 1..495: mol_type = unassigned DNA; note = unclassified Tombusviridae sequence
ggcctattgctagcgtagagttctcctagataacgttttaaatttcttatggcaaaaggaggagttttaaagcagcttaaaccgttggtccaatccctggccgggagttccaggacaatgaaacgaaaccgcagacgtggtggccgtcgcggtggggtgctgaccaccaagggttcgcgtccgcgaacagttaataatccctcgtggggaaggtcgttgccggccgcttacgcttcccacgtgaggccaaggttcaatatttcaagccgtacggcaactacggctgttgtttcagggtgtgatctaatatatcccattccagcaacgctcaatcctgatagtgagaccatattttcaatatttccagctaatcccgcttactggtccggtactcgtatcgcccagttcgcgcccgcttaccaaaattataggccgctggccttcactgttagttacattcctcaagtagcagtgactcaagcggggacagttttc

SEQ ID NO: 2018 - DNA, 495 bp, unidentified
  source 1..495: mol_type = unassigned DNA; note = unclassified Picornavirales sequence
cgggcaaatccctgcgcaatcaattgaccccatgctggctgtaaaccttagtgtatccgtggctgtccccacggagaataagtatgtgaaaccatggccgtagattgattgttcaaaccttttgaaccgcgtaatatttaacctttcgagaactctattaaaatctatacatcagatgcaagcgttgattgatgtatactttttgtagaactatcgcattgtaagctctttccctctcttcctttcaagctggtagcccagtaggacgcgatctccttttaagaaacacacgacggattcgaccccgctcgttggcgcacccctttaggctagtagtattggaacttcattctctttgaaggtaggcaccacgactagaactcgtggcagatagtagactcttttcaattaatttctgattaggcatgagcaaagtagctttgaataactcctcatgactggattgtacgcagatttcatccactgcactcagaa

SEQ ID NO: 2019 - DNA, 495 bp, unidentified
  source 1..495: mol_type = unassigned DNA; note = unclassified Picornavirales sequence
cgggagagttggcctcacgctgtttagcgtgagagccggctctcctgccccttcccctgagccggggatcttggctcattcccttcttttctatcctccctcattggactttacggatgacccggcataaacttgacaaccgatgttggatttcccttgtggctgtgatggaggacataccctcgggtgtagttgtgtgcgtgtcgctctgcgacttgagcttcaaagtggtgctgaaatattgcaagcgtcgttgctcaattaacggagtgatacaatcctatgaacccaagtgcattcatgcgaaagccccggaggggtgagtagcatggactcgaatcagaagagctagagctcgcttggtacggcacgtagcattgctttgcctaaagaccaagggggtatggctataggtgggggcctatagcttgtctagtgctggttgacagactcgtgctacgcgtctggttcgagtataagtagctgcaactcact

SEQ ID NO: 2020 - DNA, 496 bp, Xincheng anphevirus
  source 1..496: mol_type = genomic DNA
ggtaagcgacatccgagtttataaaaaccctctggttatattacaaaacaaattcattggcatctaattagtaaccgaaactatgagcaacactgtgaatagaattgtatgttggaggtgcagaacactcatcagtgtaaaagcagctgaagatgaaccattccagccttacattcgttgtaatttctgcaacagcaagaactggattgttccttctgggaattaagagtttataagtagtgttgttttcttttcttttgctagctaaatcagtatgtatttctttacatatgtatatattttctattataccttattaaatgtttctgattgagagtatcaatatttaaattctacatcgatagtgagaaacttaatttagaaaaaacctcgtggtcaaagttacacgcaacctagaaaatataactaagaaagaaagagagaggaaaccaggtacgacacctactcaattggcagaacatcattccacttcgag

SEQ ID NO: 2021 - DNA, 496 bp, unidentified
  source 1..496: mol_type = unassigned DNA; note = unclassified Picornavirales sequence
agagacaatcggatgagttcttctcctttaagtaagaataggtagggtcttaacccctaggttgcggacaccttaagttccgctgctaggtttcagtgtgatcttgttagtgtatataaaatctatagttctaaaacacttaagcagtgctgctgaaacaacgaggtgggctatttagccttacttccaggaagcctggggagcagccctcccaaattccaggaaactatagtacggatttcgttagcttgagtaggctcgatttcttaaaaatttacttgctacaattaataacaattcgggtggctccgattcaaaagctaacttagctccaaacactgttgtggatggagcaggagaaaggacgatagacggtactaccgctttcgtcaacgattcggaagtagtgcaagcgtctattatagcgcctctctccgtttcaagattgctaactcaatcgagtgcagtcgaaaatatagaggatataaaaagatgg

SEQ ID NO: 2022 - DNA, 496 bp, unidentified
  source 1..496: mol_type = unassigned DNA; note = unclassified RNA viruses ShiM-2016 sequence
atcgtatatgcgtttatacgcatatatgattagtagacgatgtctctatcgataaagaacttcaagtttagtatcccacgtgagatccttggagcgacaccccttttacaaataataccttttaaacgtattttcaggaccttgcatgacaatgattatcccccgcactgaatacaaccatacgtggattgtataagatgggaaccttgacaaacatttggtacgcgccgaaaggccatcggagacataatctccgcacctgtatgtagaccactacctggctctcaacagcttgagactttgtcttaaatcttcggattggaaacggctctatttgggtgtgctgataacccctcatcggagacgctgaggagggagattatgcctttagtgtacgccaccttgtcttgcgtaatgccttggttggtattgattctgggggccagcccagacggagctaagttgcactagagttatactggctgttcatatcgcc

SEQ ID NO: 2023 - DNA, 498 bp, unidentified
  source 1..498: mol_type = unassigned DNA; note = unclassified RNA viruses ShiM-2016 sequence
tgtagtttgacaagctacatattatcttctttttcgtcttagtgtgtgctgcactgccatttgtgacagtgtagttatcacgtggacgttttcttctatgaattgtcttctttttctttcttcttttctcttctttttctttcttttctacattttcttttgaaaatgttctctttttctttctttcttttctctttcttttcttcttttcttcatgacctttgtgtctgaagtttcttcgtaatgtttagtacctttttaaaggaagtactttactcatgttgatctccctatgacgttcaaactcgcgagagttgtcttgggctgtacgcattttccttcgggagggttttgtatgtactttttaagtgggaataaccgcttatgtggttacttctttctatgaagtagagctttcgttgtttttctctttaaataacgcagtttttgaaagtttttctgtgataaaattttcatttctttttccttttcttcatt

SEQ ID NO: 2024 - DNA, 499 bp, unidentified
  source 1..499: mol_type = unassigned DNA; note = unclassified ssRNA viruses sequence
cttgcaggggttgataccctatggatggacttgatggttcctggtcggtgctgccgtcccaagtccctcgggaactacgccgtaaaagtgttagtcgggccccttgccttgttataacttggggacatagcttggtgctgattgctatgccttaaattgcaccgctttctctagcacaacctgcctggcagtcaactggcaggttgtgctctcctaggcgtttgccacgctggaggttaatgcgtgacctgtgctcaaccggtgccccgccggtcttccgcttaggctaagagcaggtctcgccgcggctgctaaccgcgggttgtgttacaaccagggggggtaaactccagccctaagtgggtccggttctccggtgaatcgctggtggtggtgtcttagcacctcattgccatccgcagcccagtttgtgggtcttcccttggtgaatgggaaaccctcctccccaaattttggttttgtttactggtgatcaacg

SEQ ID NO: 2025 - DNA, 500 bp, unidentified
  source 1..500: mol_type = unassigned DNA; note = Narnavirus sp. isolate H4_Bulk_Litter_23_scaffold_4 hypothetical1R sequence
aaaatcatgaacttaaaatgcagctcaacgataccaacattcagcttcgaaagcttcaaactcaattcattgaattccaaacctcacttaaagaacagcacaaagcaatgatggcaagtatcaagcaacactctgatgcgatgaaacgtctcaaagattatgaagatctccatgaagttgatatcgaatcacttccttccgcaacttcatctcaactccgtacccgccaacgagttgaccaattcatcaataccctcccatcaggaacccagtctcctcatcctgctcccattcgtaaatccaaaattgttgatgaaccactctcattcaagtaatcgacaattcttgataagctgccccttactgtttcattgaattggtttctctatttataaaaactaggagaataatatctttatactacataacgatcaaattcttaagaactatttatcaaccacaaaaaccaactaccaacaaacaaacaaacaaccatcatc

SEQ ID NO: 2026 - DNA, 500 bp, unidentified
  source 1..500: mol_type = unassigned DNA; note = unclassified Luteoviridae sequence
aacactgagacactgtccggatataagctcgggagactcgtcacctccgtcgtatcacttgttgttagtaactacaaatagcacctaaaaatcaaaaaaacagagtgtttgtttgcttttctgctcactttcttttagaaaatccagatcccactaccacaagtgggtgaaaaatatgggtagggtcggacttagccagtcctgtcggtgaagacactggaggaataccaggtggcgtcttctagggataccgattccggattcggagcctgcttctgggtggacactgcctcggacacaaccgagtgaacaaatggagtcactaaccacgatgaaatgagtgggagggtgaatcgacctcaattacgtcgttaaactggttggagttcctaactactcggaagttggggagaaagtcatctcaaaatgatcgttcaaagtcatcgagaaactttggcggctagggcttgcaattatggacttggcttttgcctagaaac

SEQ ID NO: 2027 - DNA, 501 bp, unidentified
  source 1..501: mol_type = unassigned DNA; note = unclassified Sobemovirus sequence
ctggatctttgtacctttgtgccacctaagctggtattggtttatctcacaacgcatgtccgacacagtgattgtaaacttttcgctgatccgaactcggtgcgtggaacgctttggcgtgaattccctcccagttggaagacatttcattggttcagaggagattcctacaggcatcggtttcgttgagcggtcttttcaggtcacagcctttgggaactattcagttcctgagagaagccgagtcaggttgatagactgcccagtatcgtgcgaggggacttttaagttcgatccggtacctttgtggctatctgttatctgtcgagtttgccaatctgaggctaaccttatcatcaaccaggagttggtgcctgggtatagtgaaaacagcaagttcgtgttttgcgaccccgaagggagacctttacggattagaacacgaagaggcgtccagcccagcagattttaccaccaggaagaaaagaccatttgtcagtc

SEQ ID NO: 2028 - DNA, 502 bp, unidentified
  source 1..502: mol_type = unassigned DNA; note = unclassified dsRNA viruses sequence
aacgaggtaagactaagagatcgtccgtagggagggtcctaagtcccctctttttgtctggaaaaattcccgatccagttctaacagagggaaataacgaagatttagttctttgtttaagtggtttttcaattccatttttaaaaattgaaatgtaaggcttggacttaaagtaggtatattgatttttgataggcggtcaatataatgaaataagttgattaaagtcgcaccccgaaaaatctagggggcgcccttttactactgtactaccgactacgggacgtgccgtccgaaatcttaagacttagcgccttaatcatttattgattggggaatcgcggcgctaaccagaaatggaggtgaaccacttaaggtgaggcgacagactgcaacggtagggcttacgacattgtgtagcttgaaagagtgaatttggatcgagccgggtattaggggacagtcggagggatttttaaagcgaaagcttccttggcgcgtt

SEQ ID NO: 2029 - DNA, 502 bp, unidentified
  source 1..502: mol_type = unassigned DNA; note = unclassified Fusariviridae sequence
actggcacgtctacttgggtagcaagggagtttgtattcaatcccacccgatgagggttccttgcgtgcgatagcatgggaagtgggcaacactgatggagggaataagtgttgtctgtaaacaagactgcgacgggcataaagtaacctaaggtcggctggctatggtgattatgctaacaggaagggcaatgcctgggctgtggacatgcaatcagaaatggttgttatgtgcccgagaggacggatgcggcagtcggtcacccaaatgatgacgttaaactgggcttatggtgcaaaccgtgtcacagaggtatgagcacaggattggggacctggttagcaaaatgtgacaccgtatccccctgtggcgccgatcaagtcttaggacacaacaaaagaaacctaaaacttgctggcaccacgaatagtgttgtctagggcacaacacactacaagcgaaacacaacatagtactcaagagtgcacacacaaaacaagg

SEQ ID NO: 2030 - DNA, 502 bp, unidentified
  source 1..502: mol_type = unassigned DNA; note = unclassified ssRNA positive-strand viruses sequence
tcgggaagcccgttattacctttttacctgaattttgcggctggttgcttacttcccatggtatcattaggcacccctaccttttgtatgcgaagtatcttttccataaagaaaatggcaccttggccaatgttctaatttcatattacatggaattccaacattcgctaactcttggtgacgctctttgggaatcacttccgtatgatcttttgccctaccaaggccagcttcaacttctttttaatcaagctcgttctcgcgtgccttcctttctgattcgtgagaataaacttggcgatgctcctgctgccaagctttccgctcgttatgatctctttcgtcttccagctgattttatgcgcatggactggcgccttcttccttctagtattagacgatcacttctcttggctaggggtctgtaatgcctggcagcgttgtcatttcttctaatggaccccaattcttcatccaagatcatcgctcaacttctcgctga

SEQ ID NO: 2031 - DNA, 503 bp, unidentified
  source 1..503: mol_type = unassigned DNA; note = unclassified Hepacivirus sequence
ttgttcgcgtaaatcccgactaggcagaaaagtgaaggagtctgcagcgtgtaacgaccaagcccggacgaccccgttgaaacaggtgtatggtcatcgcgagacccggcggttacatgggtcgaatgtcaaggtgagttgacattctaaaaataaactcagttccaaaattggtagaggtttaggcagaataggttacacaacactgtgctggaacgtcgcctctaatgcccgagttcttagggacagtagacgtaagtcggcgagttgacaaaccagtggcactctttgctgtgttgtaaccctatttctggctccctcgttccgatggcggaagcctttttttaggcagccatgcagcacaccaggcggcgtccctcacacaggcggcaagagcaaaaatccttcgggtgagctcggtgtgcacttttatttaacagcgactatgagcagtttccttttgcagcacattgtgctgtgttgttcttggtggacttccaatc

SEQ ID NO: 2032 - DNA, 504 bp, unidentified
  source 1..504: mol_type = unassigned DNA; note = unclassified Ourmiavirus sequence
gagattagacgtttggcgaggttgtctcgactcagctttgttgagtgtaggagacttctcgcccttactgaaataagaaagtggaaagaaacaaaaaaagagaaacattggcaacgttggacttccctcacgtttgtgaggggtacttgtcccccgcttgcgggcatcgttacaccgatggaaactagtaagtagagcagtggagtaggcccagaaatagtcttggcccgtgtggtccgacttagggtcgctaccttttagcggcgaaaatgctaggaaatattttttcttgcccaagtgcgtagaatcgcgtgcttggggaggtggtcgtacttttgtattgccgggttaaccctccgggggacaaactaccaaggaaagagcctgaggtaaagaaggacgtaggcgtgtgtaggcacccgaacctttgtttcgatgagacaaaaaaaaagtgtcgtcctctacaggacaacttaaattgtgaatcgctcgattcgctttttt

SEQ ID NO: 2033 - DNA, 505 bp, unidentified
  source 1..505: mol_type = unassigned DNA; note = unclassified viruses sequence
ctcgtccaaatcgcaaccgacgctgcttccgctgccgcccgcctcgctgatgagaacctcgctgctgtcgctgcacgcgacgaggctatagccaagacgcgcgagtacaaagcggaatcggctcgtaaatacccgggagcaccttcaacgtgagaaagatcttgagactaagcatgtggctgacaaggccattcttcaggctgagatcactgctctcaccgctgagcgtgatcacttcgagctggagaatgcaggtaatgaagcacttgccgctggcctcaaagcccgcatccttgacgccgtacgtgacctcgaatctgcacgagctgaagtatccaagcttaaggcagattcggctccattgctcgcccgccttgaccgtgcacacatcttgctcggcaagtactccactggctatggattcgctcgcccgtttgaagaggtcgtccacgctgaacttgaccgctccgacgacgagttgagtgctgagcgcaatgaagggtat

SEQ ID NO: 2034 - DNA, 505 bp, unidentified
  source 1..505: mol_type = unassigned DNA; note = unclassified Picornavirales sequence
gttagccacccacgttgttttttccaccagtcacttgactgtgtgttcagttagtatgtgattacactgtatggtatttctagttgcgactagaagcagtccattttcacatgctagccggaatgcattttcgagcctggtgttttactcttcttttggctaaagaaagaaaaccagttaggtgtgtttcagcaaccactatcatagtctgacttacatcgctactattttcagtggccttcgtaattttacgggccgcgctattctttgagtaggaacgtacgcctccgttagaaggctgagctcaaggggaacagggcatagccccggcatttttgtgccgctggattgtgaccccttgtgtgtaggttgacttaggatggtcgaattcctgacacgtatatcaaaacgtggccacctatcagatagtgatacgttaggtgtgggctgtgagcgcctgtttatcactttgccggcgggctaacgctcttcttgtcgcctgggc

SEQ ID NO: 2035 - DNA, 506 bp, unidentified
  source 1..506: mol_type = unassigned DNA; note = unclassified Mitovirus sequence
ctcacgaaacctgcacccgggaaaaatccctttcgcagacgtgaatgatgataggatagttgttctagggaacggtagagtaagtttaatttcgaacctactccacttagtacggcttacccagctagtagcgctcagaaaactgtgaaaacaggactatggccactttagtttggaagttaatggcgataaagtatctactcccccgaaagggaagaagagacttttagccctccatactcactttatgtggaaattagcagcgaaaagtcagctatgggttaacccagatgctgctctctaagctaaatccaactctcagatgtagaccgtcttaacgatatcctttacaggacccattaatctggctttgatcaggttaaagtgatggtttccagaagatacagagttcgatacggggacagtgagacactgaccgagtaccaaatgctctagcacctctgaagtttaccaggagttcaaagcctggctacctaatacttaaa

SEQ ID NO: 2036 - DNA, 506 bp, unidentified
  source 1..506: mol_type = unassigned DNA; note = unclassified Metaavulavirus sequence
taatcacctatgccagttggttctagcttaagccaattattcactaatcactgctaatcatccatcatatgaagtgatcaactaagagagcgcccattaatcacatgtaatataaggagaaaatcctcaacggacaaacgaatcgtttaagggcttgaaccacaatcagatatcaagctacagtatgtcaaatcctatatatacattgtccatattgctacgtgagtccacactctattagctgccagaattcttactcctataataataccaagtcattataaatctgcctgtcaagatgatcgctcagataccacttaggttaactgtcaagttatcaaagtctataacaagcctgtctggatctgatacaaaaagagcacagattgtgatcttaatcccatcccttgacaacataaatctgattaactatgcatattcaagagaaattaagaaaaaacgggggggaatttatacgaattgcggtcacaaaagtataaccgagc

SEQ ID NO: 2037 - DNA, 507 bp, unidentified
  source 1..507: mol_type = unassigned DNA; note = unclassified viruses sequence
ggttaccctgcggaagggtggtaaaagactacgggtcggcagactaagcatctgtaccgtacgacgccttcgtaccgtgttcgaaaagagggtggaactggatcttaatctctgagagaatccatgtcctcttagtagtaggtgcggaatatgccaagctctcctgacgtggagcagcaggagtggttaccctgttagggataagggatctgtgcgacccccccggcataatcgtttagagctagccaccgtgctacggaatgacgcaaagccattcatctctctatccgaagaaaaccacaaggttctcatttttatgaggcaacgacgtacctgagttcagtcctaggacaatctaatccacgtttggtgcagataagactgactcgaaactaagttgaacccactcgccgagctcttcaatgggcggcctaaattgatccagcctaggatcattttagtagtttaggcactacctccatcaacggtcgttttgccaagacctta

SEQ ID NO: 2038 - DNA, 507 bp, Odonatavirus fabricii
  source 1..507: mol_type = genomic DNA
catccataacatgttatatattctttaattatcatatatactcattagcattattacttgattgtatataaccatgtttttgtaactacataactctaaacctaaccaccattgtagctggtattgattcttgtattaaaagttcattaatttgatgtgtgtcttttattgttcacgctgttatgcaagactctgacaacgaggtaatggtctaaatgtgtacaaacttgatatatactgttcctcgtgtatctaaataattaaactaattcattatttccatttatgttgtattctctttagagtgtcaagtcattcaagtcaagcggtagcgggaagagatcaaagtcctctaaaactgtaaaatcagggaaaaagcagaagcaagagggaactccccaaagggttaccagatcaaacaaatttgcggaaagtgcaagtgttctaagtacacttgaaacgttatctatcgcagaacctcctgtatctgccgcgcaacctcaaata

SEQ ID NO: 2039 - DNA, 507 bp, unidentified
  source 1..507: mol_type = unassigned DNA; note = unclassified Picornavirales sequence
ttttctctcatggaatagatgtgtagctctgagtagtggcatcgaaacccttgccgtaagttacatgataatttgaggctgtggctgataatagtgcagacctcttttaagtgtggactcgcaagacgatttcatgggcttatgcttaagagtagctcctgtagtagtgctctgactagccattgatgaaaccgatcaattattggggttgtgtactttacccacttaaggtacctgtggtaaggattagatggtggatcactaccggtcacgcctggcgagtaccaggtgctcattggagcataagaaagttgataggctctgtgaagcttgaaatcaaacccactgtgtagtgtagacaatatgtgttgattttgattatgatcagacatttaatctgtgaccgttgatacttcctacccactctaacggccttatgaactatatatagggttcgcaatcattcataaggttttatatattggattggctaccctacgatgcaac

SEQ ID NO: 2040 - DNA, 508 bp, unidentified
  source 1..508: mol_type = unassigned DNA; note = unclassified viruses sequence
aggagcatcgagcttgagcgagctcgttaaatatacgctcacgggtggttccgtgcacggattctctgaattgtgcttcagacccttttgaagttccgatctttgtatttagtggctgtttgtatattatgcgttcttcaattgttatagccatatgttgtgctagtgctagatgttaggtcaaatttagcactttatcttatgaccagcaagtttaacagatttagaaacgactgctgacgttcaaattcagcagacttttgcttttgatgatagtgagaagcaatttattactaccgttagagacggtgaggacccaactcatgattggggttcgtactctgatgttgatttggccagatggcttgagaggcctattttagcatcgactcatatttgggaggtcggacaaccctttcctcagatttatttcaatccttggtcagcgtttcttgacagccctagtgtggctcaaaaactatcaaatttttatttgctccgttgcaag

SEQ ID NO: 2041 - DNA, 508 bp, unidentified
  source 1..508: mol_type = unassigned DNA; note = unclassified ssRNA positive-strand viruses sequence
ctaggcacctgggcgggggttaatgagcactggaaataagaaacgcgagacaacgctttgctgattacgtataagtggagtatcggggagtaaaatcctgctgattacggttatatggagtatcggaagtggcaattgctataaactgggtccggagtaaacaggctgtttattaattttacgttcaaacctattgcaacaattccttacaacaacaaaaagttaaataggaaacttgaaaaattcctatcttaataaagtatattttgttttgttatcactacccgttttaattaataggctctgtaacattcataatagaaatatttcgtaatgataattctcatcaaaagatatcgatgtaaaatgtatctgtagctattcaattatattaattgagcttagcaatcgttaaattattataatttaaataataatttaatctcaatctagcagattgaaaaacacaaaagcataagtgtataaatatgcaaacgatggaagaaga

SEQ ID NO: 2042 - DNA, 508 bp, unidentified
  source 1..508: mol_type = unassigned DNA; note = unclassified RNA viruses ShiM-2016 sequence
agctatatacgcacaagttcttttaaatgatttaaacgctcaatttggactagtggacaggatgctctatgcaacaagttgttactactcaggactttaaaaccagagaagagtgtttacacatgtagcttttgaacgggcgcatgtgaataaaagttcagcttctaatcaatctaacaatgtcataccagagagggatgctctggaagtatgtgacaatattacatcccttgctattgacggcgtagagaccacaggcgttactacgttcgctcaagaggcttgtgagcaagttgacgttttgggaaagttctatgttcctactagcgtagccactttgcagccggagttgcaggaccttaaagaatattttcgtcgtcctcgcgttattgcccagggtccttttacgcttaacacgcgtaataatccagttcagttgaatttttcagattctaatttcgagacgttctttccaggtgcacgtacgcgacttttaggggtttatggc

SEQ ID NO: 2043 - DNA, 508 bp, unidentified
  source 1..508: mol_type = unassigned DNA; note = unclassified RNA viruses ShiM-2016 sequence
tgtgtatgctacaacatacacactcagtttaacggatctatccgttaaatagtttgcccacttctagtggtcgcttttcaccaggacttgatcctgtcgctttttaaacaacaaaccaatactgttttataatgacgatttgatattgtgttttagttagacctgcgtggttcattagtactgccttgcgaggaactggaaaatgaattactagtcggaccttttattaaccgctgcatgcaagttatagatcctaacacacaatatgcgagaaggaccaatctttggattatgacactgattagactgctggaacgcgtttcaggctctccgaaagatatagtacggagctagtgaaacaagtctttgtggagcgaaattatctctcactgggattggcactctcagaagcgtgagttcctttcacataagacgtatatctgggaagaaaagagcatcgataattggctctgagtttattaccagacgaaacactttttctgctatc

SEQ ID NO: 2044 - DNA, 508 bp, unidentified
  source 1..508: mol_type = unassigned DNA; note = unclassified RNA viruses ShiM-2016 sequence
tccgatctgcaacaacatacacactcagtttgacggacctatccgataaatagcttacccacttattagtggtcgctcttttaccaggacttgatcctgtcgcaagtacaaaatattattacctacgtcttacgatgatgatttggtattgtgttttagttagacctatatgatttgttagtactgccttgcgaggagctggaacgcttatcattagtcggaccttttattaaccgctgcaagcaagttatagatcctattgcacaatatgcgagaatgaccaatgactttggaatatgacgctgataagattgctatggccccgttctaggcccccgaaaagttacagtacggggctaatggaacaagtctttgtggagtgaaattacctctctctgaaattagcgacttcagctgcgtgagttctcttcacattgtacgtatatctaggaataagggctttataggccctgacgtagtactagacgaaaaactttacattgctacc

SEQ ID NO: 2045 - DNA, 509 bp, unidentified
  source 1..509: mol_type = unassigned DNA; note = unclassified viruses sequence
gggatttttgaccgcccagatgagttttcatcgaaagtttgtcacacatgtttgatgggacacaatccatccccttatagttgactatgtactacagtcgtaattctataagagtcttgcctgctagtgggttcacactagttccgttgtagagtttctgggatcttcggattaaaaccccatacccctcgtaagtcaaaatagtttagtctcagccaagaaagaagctagatatactattagaccactgcgtgcggcactgaaactttgcagacaagatagtctgttttaaatcgacttattagagtcagagacgcctccgttttggcctctatgggtgatgtgccctgacacctccgtctagtcaacgagagtacaatcgcatcaattttcttacacataacttgcctgtttctgggctgccctctctcacgggccgaatatcatgtattcgaagtcttgtgtttgccgggtcaccaaaaccggctaggatttaactccgaaaagtt

SEQ ID NO: 2046 - DNA, 510 bp, unidentified
  source 1..510: mol_type = unassigned DNA; note = unclassified Narnaviridae sequence
ttgaggaagagtggaagggtgaaccgaaagtttttacaaggttcaccccgtccttcttcttcctgcccgtggtcgtcagtcttggcagctggagtcacaacaaatgttgactccagtctggactggccacgctgcaccaatggtcgggacaggaagcacaattgtgctaccgtcttcgatgagctgtgcggcagcctcacccgtgatggcacgggagagggcaaattcaaccttcagaagctgagggctgctggcatccgtcttcaagacgttccagcctcccttagcaaggttgcatttgctctgactgcgcagaagaaatgtgtatgtcagcatgagtacgactcactcacagactcgctttactttttgcgggctctatgtgagaatcttcttgatgctgattcaatatttcttcgtgctaagacatccgatttcgacattttcttatccacactcttgaagttgaacaacgtggaaagagtcgcagccattaagtattggactgcg

SEQ ID NO: 2047 - DNA, 510 bp, unidentified
  source 1..510: mol_type = unassigned DNA; note = unclassified Picornavirales sequence
tagcgcagacgcaaacatagagtgtgcaagtttattacttgcacactctatgtttgcgtctgcgctattcgaatctttgtaagagacccttattctggtttggaaacgcctgggcgtctgcatagatgtgcagtcccttttatggagcactcttatttattgcagcttaattctatgattaaatgccatcaagtctaactatggcattttacaactacccgtctttattgataggctcttggttatagaattaattaggcctcttttgatgaaagaataaatcatccgctatttataggaagcgaagaattttctatttatagttgtagtgtcattcctatttaggatacggttggacacataaataactaatcttcttcccagcactttggtctataccatctaccccttagtgttgtgtaaaattatggtggtcaaaataacatcaacaataaagaatctgatggttcccagtctacctctccatcacagattcacaatcccgataaa

SEQ ID NO: 2048 - DNA, 511 bp, unidentified
  source 1..511: mol_type = unassigned DNA; note = unclassified dsRNA viruses sequence
aatacgttgataatagatactttctatgaaagtctccctcttttgcattagccctttcgtaactgatcggtctaaggcctgttcaaggctcattgagatctaaggataaaaattcttagaaatattaaagattatcgggggaagattgcgaggacaagtgcctaggaaacacttgaaacaatccttgcaataagaaacctacaaagctgtctataggtatgtgctcagactatagactaaagtataacactgctccctgagacggggggtgtgtccatatgggtaactgtatgtgatgctaacgaagccctatgcggattgcttgaagcagaagcgatatgatggatggtgcaaacgtgccgaaagcaaaattatttagttttgttattaggtgtaacgatcgcgtgtatactgaagagaagctctagccggtacgatctccttggacactaatgcctttaaataagttaggtgggggcgagcccctttggtactgaggccgcatgtaatc

SEQ ID NO: 2049 - DNA, 511 bp, Echinoderm berhavirus
  source 1..511: mol_type = genomic DNA
aggcccagccttgcggcagggggtgctggcaccgcgggtattgctcttgctcattgttgaaaccctgccccaacccgctatcaaactgagtctcgtgaacttacctaggcaagcgagtaattccactatataattgtttagaaaatgtatatgtctctcacaagcttattgatgattgtattagagagacagttaggattgattatgtgaaattgagagcctgagatggcatatgagtcatctatatttggaaatgtattatattatcgcggttcttataactagtaggctgtagtgtactgtaaaatgtatgtttgtaggtctgtagcgaattgaagtgaatcaaattatgatctaaaaagccacttaccttattaatactggcatgaccacgtagaatgtagaacacatcatgtatatccataatgtatattagtacttaccttctgttgcttagaaaaaatcgacaaacacaacaacgtctcttaaccagactcacaggtgtcacatt

SEQ ID NO: 2050 - DNA, 511 bp, unidentified
  source 1..511: mol_type = unassigned DNA; note = unclassified Picornavirales sequence
cggggtggttggaactcacctgtacggtgagtgtctagctgccctgccccttcccctgagccggggttctttggctcgtccctgatctttttctatctcccctacttgtttgattctccccgactacggagctttttggcataaacttgttatcgatgttggattgtccgttaactgacttgatgggggacatagccccgggtgacctatgtcttgaagcgtttcctcacatggattcaaagtggtgctgaaatattgcaagcgtcgtttccatgtgtgtagacgtgaataggcatagttagcccaactgcaatcacctgaaagcccctgaggggttattaaggtggactcacaactgaagagctggagtgggcgctttacggtacatagcattgctctacctataggaagtgtctacatggctaagggtgggggcccttagcttgtccagtgctgggtgacagcctcgtgccgcgcgtcagtttgtgagtataagcggctgtaaaccgcc

SEQ ID NO: 2051 - DNA, 511 bp, unidentified
  source 1..511: mol_type = unassigned DNA; note = unclassified RNA viruses ShiM-2016 sequence
agaatgatgagcgcggaaaaataaaaatattgacatatccaacgtgtacgcagtaccattcgaaaactcgactctaaagttagaagacataccacgaccacgaccacgattttgccactattttcttttacaagcagcgtaatctagctttgcatttttattactattattgcttcaaattaagccattagaaagtaaatatttagaattattgtatctcaactctatacatggaaggagctggaattgttcaatactatcaggaaaccaaaattcattccatctctccagcccaggccacaagtctacaaaacgcgctagagggtttgacaagtaacagatcaattagggttagggtcaattctgacctcgacaaatacattactaatttcttaggaactcccagtccgggagtaaatcagtcaactgtgtcaaaggttaacgccagagcaagagcagaacttgctttgaactacgacccagttaggtggatcagctcctacgaggcgct

SEQ ID NO: 2052 - DNA, 512 bp, unidentified
  source 1..512: mol_type = unassigned DNA; note = unclassified Marburgvirus sequence
gtggcttaaactagcatgagtatttccaggtcaaccacataataatgttggaggcacagtacattatagttgattatcctgtataataaaggatatacttaccctgatttatatttactggtataaaatagtagcatcatcttatcaactagttgtcatacaataggctgttcctataatctgatggtgaaagtataagcttgtagagttaccatgagtcacaactgttgtatattgtccaaaatatatcttgtgcaagtagtgtgtgcttgaatatgctgatgtaatacacactaataatgattgattaagaaaaatcaatgatggatattaaatgtccatcaagcaggtgtcgtaaaatattaggggtttcaaatgctgccagacttactaaattttacataggattatataattctcttcgatatacgttatatctttagcaaagtaatgaaaacagctttatcatgttagacgccaattattcatcttaagtgaatcctttcttcaat

SEQ ID NO: 2053 - DNA, 512 bp, unidentified
  source 1..512: mol_type = unassigned DNA; note = unclassified Picornavirales sequence
tttttttgttgctcgaccgcctaaacgaaggcaaagtgctcgaccctattgcggttgagtatattgactcagtgctagagcgccactttttgcgctacttgaaccgtctcaaccttacgaggtatgagaaactcgtgtggtccggatcatatccgtcctgcacgatcgagtacttgttcctcaaggctcgagcgaaattctatcatgacaatgatagagtctcgttctacgaggactgtcttcgccgattggaatcggctaacgtctactccgtcctgcatgacgaagaatgctctcatgagcccaccgttgacgtcattgagacgtgtgccgcgcacaatgttgtgcgtgttaaacgagtccgtcccgctatttgggatgatttcactcgtttagtggaagaacatcccgttcgagctcctgctcctattcgggatgctacgttgctgcgccgtctgcgtagtatcattagtggtctggtcgcccaccgcactaatgatgtttatgagggc

SEQ ID NO: 2054 - DNA, 512 bp, unidentified
  source 1..512: mol_type = unassigned DNA; note = unclassified Picornavirales sequence
gggggttgtgaccttcccttggttctctttggacgtaagctatacgatacatgcgctctttgttgtctggttttgtcacttttgttttgtgttatgtttccttctttctgggtgttctagcaccacccaagtcttagcgggttttccgattctatattaagacagatgctagctggctccgtattcaatccatctgagcctgtgtaaagttcttttgatttcttgggcttgcttacaccttgccaaaggtttgttttgagtggcggtggtttggccacgtggtgacacgtgcccccggacgtactatcgctatagtgcggaatctcattaaccaggaatagattgaatgttaagcaggaggtgatgttttgatgcgtagttgggcagctctttggacactagggaggtaccccttatgggatctgactctagggctatgaccatgatgctgcaaaaatttgtttccctttttaaaaacacacgaacacaacttaatgaaataacgatttgaa

SEQ ID NO: 2055 - DNA, 512 bp, unidentified
  source 1..512: mol_type = unassigned DNA; note = unclassified RNA viruses ShiM-2016 sequence
gcaaataagaaacctacggcctacataaatattaatgcatatctacaacataatagacatcgcacagttgcgcttaagttccaggtctttgcgcgtgtggctaggggtcataatatgataggcattgagacagtccaccaacctatgtttgatatggaacgattccctatggtgaagtttggaacggtggttgagtatatttgggatagacatgttatacgagcagcggtgatagacaaaaatgattttgtcaatgagaacgacttcaatactatgcggcattgtgctatacaaagaagtcagtgggcaggaatttgtttgcccaataggtattatgctgtaaacatgaattttgatatgttgcctattttcgcagaactagatgcacatcgtactcgtgaagtacctaaaaatgacgcagcacaaccaccagctccagctgttgcagtggcagataatgctgaaacagcagaaatagaacagaaagcggaaaactaatttgggctaatgtc

SEQ ID NO: 2056 - DNA, 513 bp, unidentified
  source 1..513: mol_type = unassigned DNA; note = unclassified Mononegavirales sequence
tatgttcaatatatataatagcgcaagtgcctctctcttttaagaaaacccgccagtcatacatcaccagtgaatgctgataattgcaaggatgaataattccatagtagttttcagcattgtcctcattgtaggtttactcactggaggggtctttatcatgggtcggattacatccgcaggactccagttgtcttacacccctggctcactcttttattttgtattccctaatttttcgactatggccatagaggcttcattagtttacaaagtccttatatttttcgtatcaatattgatcctctctctcctgtcgatcatctatctgatgcacaaggagataatatctacgataagatgggctagtgaaacatatagagagtcaaggatgtttttgcaagcagcagcaaggtcagggcagtcaaggggaccactgcctgatttaatgagaccctaagtgtatggctcagtaatcttttatttacaaaaacccgctagtcaaccatcata

SEQ ID NO: 2057 - DNA, 513 bp, unidentified
  source 1..513: mol_type = unassigned DNA; note = unclassified Picornavirales sequence
tttaaataagagtgtgcaagtaatacacttgcacactctaagttttcacatgagatgaccgattgtttggaattatatttcactcaattggaaacactcttgtgtgtctgcttagatgtgcagtcccttttatgaacacctcttatttaaagtattcatttgttagaatttatacatgcgccatcaagtctaaccatggcgtttgttacaactacccgtttgttaaataggctcttggttttaacatttgaatgacccctttgttgaaaggataaatcaacctctttcgtcttgaagcgtggagtttcaagtgaatgtagtagtgtcattcctattcaggatacggttggacacgtaaataactaatcctccacccagctctttgaactataccatctaccactaagggctgtgtaaattcatggtggtcaaaatgataatgaaaataataataatcatgattcgaatggttcccagtctacctctccaagttcgattcataaccccgataaa

SEQ ID NO: 2058 - DNA, 513 bp, unidentified
  source 1..513: mol_type = unassigned DNA; note = unclassified RNA viruses ShiM-2016 sequence
cgcaagacgcatgttcagtattgtttttgtatttgtattgtaggtctaagtccttggactttgagttataattttataatgcaaaatctttttacgggtgagtaaacacctcctttttggtaaaaaatcaatcatatttaatgatttaatttagtcaccttttaggcgatactgcatattgttccagcaggatagtattactattgatagtaatagttctactattgtcgaaatgaccgtatgtatagtacacatcactataagaaccggtaacctttatggtaagggaacacaggaataccgtttggtacccatattccacgcattgaagacaacctcattatctgatgatatgcgtgtaggagtttttctttcctccttgtttataaaaacctcactgagtcagttccacatctgttaaaaatgtgggcacaactaaagaccgagttgtgtagttaggccttttattttatttttattggaagcaatagagcttcccagacaaattttaag

SEQ ID NO: 2059 - DNA, 513 bp, unidentified
  source 1..513: mol_type = unassigned DNA; note = unclassified RNA viruses ShiM-2016 sequence
gggaataaatattccttacacaggccttaagccttctagtttatattgtactagatctattccggtatagtatagactttaggtatgatagcgaaacccgtgagggtacgtttaatatcatagaggtctatcttcagatactacgccacgtatttggaggctcataagttcttagggcttacaaccctacggtctttggcatacattgtaaaattacaacataagcttagatcgcagttaccagcgatatctcttcggagaaaaggtaacagaactgtggtgaacgatgttaacaacgtagttaacaacgatgtcctttataaagagttcgtaagatcctttggtaagatcttacgactttataaagattggaagtttgtccaaaaatttgctcgtcggattgaaaagaattacttctctacaaccgattacaaattgaattttggacagatcccaagcgaccgagccattaagcgtgtgaagaacacgctgtgttggtgcttttcatatatt

SEQ ID NO: 2060 - DNA, 514 bp, unidentified
  source 1..514: mol_type = unassigned DNA; note = unclassified Hypovirus sequence
cacagcctgttaaatccttcaggtggccccgtggggtctaaaggagtggatcgtcctacactttcagtaggcttcaaattagacgtgttactgtctattgaaggtgggtaatttaccgatccggggctatgcccgcgagctttgctcgagacaattgtcgtgcgttccgtgcgtgaggtttcctcgtgctttagagcgtgactttgtcatgttataatagtcaagttgtgttacgcatattaatattaacacaagatgagtcccattctagcagtcatgggaagcgcatttcaaaagaatgctgtctaggctggaatggaagaggccagttggggtcttgacttgggctgtacccaagaactaaccaggattgatagggtcaggagtagggtgtgttctaaccaacatcatctcctatctagtcaccttgaattgagtgggtaaaggtgacgaataaattccactctccaaaacaaatagtttgaaggagttacctgccgtctcccaaaaaggc

SEQ ID NO: 2061 - DNA, 514 bp, unidentified
  source 1..514: mol_type = unassigned DNA; note = Botrytis cinerea fusarivirus 1
tttggtgtgacaaatcaaccctgaaatagggttgacgactcgacacgacaacagtttcttctaagttgtcatgatttagtaagtctaaaactgttccacaccgaatttcaaagaaattttgaaaaacgatacggaaagttcttgaattggacaaggcttttcctgtcataaggcaagattgtgcttgtgtgcgctctgaccgaaccggtgggcaaggactggagcataggaaggaccatttagtatgggcttagtcgggcacaagtgaaccgtggggtccaaaagactgcttaccggcttgtgcttagggcttagtcctgaaatttgcgtagtaccccagcttctgttcttacctacttaaagggaaatagacgtggacactagactacatggaaagacatgttgacacagaatgaatagtattctacaaccaacaaaactcaacatttatgaagacaccagacaaacctgaacaagtaattatccgacacccatttagtaattttagtgaaag

SEQ ID NO: 2062 - DNA, 515 bp, unidentified
  source 1..515: mol_type = unassigned DNA; note = unclassified dsRNA viruses sequence
ctaaggcaaagtccaggcacaaaaagcaaaagccgagagctcatcaactgaacaatagatgcttggattccctttttgaacatgaatgtatattgtgcactgatcagatccttgttgggccaaaccaaattgtgattgaccaggataatcacctattccgtcgacctattccatcgacctattcgttttgctcattgttcattctgatcgaggctcccgcgtaccgcgttgtttgtatcggtgtacgcgtccgtgacaatgacggtcaagcaaagcgggccttctataaatggtacttgagcgtactttttccctctttgaaacccacgaacgtgactgagacgacgagcaaacggtgcacttacctctagtcgctccagtgcatttgtgctttcactagacgttcctcttcttcctacgcgctatcttacgggcttcttcgcaatggatcacttccaggctcatgcgccctgcgttgggagctcttccgataacatccagcaagccgatgtgga

SEQ ID NO: 2063 - DNA, 516 bp, unidentified
  source 1..516: mol_type = unassigned DNA; note = unclassified RNA viruses ShiM-2016 sequence
gtgtgcatagctatttacttagctatgcacactacattggtatttgtcagtttaatgctgacacattatgcaactacacagtcgcctttatgatatttatcgtttatcagggctactacatagtcgccttataaacttcaatgtttatcatattgtatgtttaattactgatacttttaccggcttaaaagagccgccgacatttatttgtccgaaatcttttttcttttttggtacgcctgttgaggcatttaataccaaaaccattttcaaagagaggtacgacagttctctgctgtcttactctataaaagcctaccccaaagagtagaacttgagggatgatatgagttttgcgctacttgactgcgcttattattaaagcgtcaagccacaacctacctgtcagttaattttcatgaaattattcggcagggaaccgtagagtcgcgggtgccacgacttgaaaggacttgtccttagcatgcaccgtacaccgatgaaccttacgaggtg

SEQ ID NO: 2064 - DNA, 516 bp, unidentified
  source 1..516: mol_type = unassigned DNA; note = unclassified RNA viruses ShiM-2016 sequence
gggtactagacccgatgacggaatttcgctcatgccggccctggccggggggggcagacttcggcgcacgtagacttcggtcgcggactggtgatatgcgcaagagatattctagttaagtcctagtggcaatattgtcccgggtgctgccctgattatagcagccgagtaacctgctcgatcgttaagagaaatataaggaccggaccgcaagtaggggtcatgcataccgtcgttggatatgcatcagcccccacgtaggctcgacggcgcaccacgctttaaaatggtctcctagctggagtgtacgctagtggcagcttgtgtaggcttgttgtcgcgaccacataccctggtccttggtacaccgatggacccctggccgaggttaatggcggccccgcagggcagttaaatatatgcaggtaagctccagccttgagtgggccggtctgacatacgtgagtccgttcgtgcaccagcgttaggtgtacactacccccctacaattacatc

SEQ ID NO: 2065 - DNA, 517 bp, unidentified
  source 1..517: mol_type = unassigned DNA; note = unclassified Riboviria sequence
gtacaggcgcatctgagagaagtgttattcgcagttttacgtactgattacctggatcacagattcacggaaaggtcgttgctgtcataatagtgcataatcagagtttattgcaaggggaacgagagtgtaaaggtttacaacggttcgcccgaggtgctttagttttgtgtgatacacgctgagagaagctacatcagtgacgagttacggagtaactggacgagtattcattgaaacggctatatcacggtaaaatacggtgtaattgttgtgtccattgtggaccatcgagaaaagcggtatttgtgataggtcacggagtaaccggatcggtgtccaccgaaacggctgcgttgcgtagtatatagtgtaatcgtgtgttagtgtttattgtttatcattattattttgacaatattcattcattatttagataagcgttatcgtgcattagtatatcgattttagaattattttatattttataggcgattacgagcgttaagcccgcaaa

SEQ ID NO: 2066 - DNA, 519 bp, unidentified
  source 1..519: mol_type = unassigned DNA; note = unclassified Picornavirales sequence
ggtcggggagatgtgttcatgatcggttaacaccatcatggatcatctctccccgacctctttttgacccagctatgggttaaatagtacttttcttttctcttttgctttcttttgtgttttgtttgttttgcaacatataacaagcattttatcagtattagtgtctgcaactgtataacaagcaaggtggagcaatcatgcgagtatatctcaattgaattgtgacacacaagtgtgcactatgtggaataaatgccattttggccaaacctggttagccagaccagtagtaggacaatttggcacccttagtgggcgcgacctagatgctagggatgagcaaacctatttcccctgagtacaggggctctccttcacctctacattttggacctctttttgagtatcctcgatagaaggtgaagtgacggtgtaccggatggttaattgatctcattgctgggtgacagcccgctaggaccaggcagcatctttgtatggacctgtacatgtaac

SEQ ID NO: 2067 - DNA, 520 bp, unidentified
  source 1..520: mol_type = unassigned DNA; note = unclassified Hypoviridae sequence
gttgaaatccttacaggtgaacccgtctgggtcctaaggagtgagttaccacgctttcagtggtttgcatttgcggtagtgatgtgctactcgctgcaagcggttatttcttttaactcgtgcccttctcgtgggcgtggaagttatcttccgtgatcttttggatcgtggtttcgtttgaaaccgtagctacttttgtgtagctgtgacctacttcaggttgttaatttgtggttcgcctaccacgtagtgctacggcactgtacattctttactccgaagagtttaaactactatgcgtgttggtactcgtgatgacactgatggccgtgaccgtgtgtcaattagaggcttggtctatatctgttgtaaggaagtacctacgaacagattctgtctcggaagacctttattataaatttaagaccttcaaaaccataggcttaaaccatcgacccaaagacgctttcgaatgtgtaccacttcaagtcaatctttggtagggaggttataaatccac

SEQ ID NO: 2068 - DNA, 520 bp, unidentified
  source 1..520: mol_type = unassigned DNA; note = unclassified Sopolycivirus sequence
atcctgctgctggaattcaggcagctacagcttctacagctgaggctggtgctgttgcaaataaagcggctgatataacaactggagttgtacaaacagcagagggagtggcaggagctactcctgttggaatgatagcgttgattaactcaatgcttggggatgcaactgcagctggtattaatgcttcaaaccaaaatgcaatttcaaaaaattatatacagaattctatggcaaagggatctcaatctggttttcaggctggacttattaaagaatctgagttagctcatgcatctgtaactaatgcaggagctaaaataggaggcatagcaggcccattaggtgcttggtttggctctttgatagctaatgcaattcaagattcaactcctaaggatgattataataatttcaaaacaggatattcctttgatggcaaagttaatccgcaagatactggtttggttggctcaggaactactgctgacctctctggtgaaactaacatgacaacatt

SEQ ID NO: 2069 - DNA, 520 bp, unidentified
  source 1..520: mol_type = unassigned DNA; note = unclassified RNA viruses ShiM-2016 sequence
atcccgctctttagtgttagtacttgttacacactaaatcctattatctaaggtcaatgtgaacatgtttatatgaatgtgtttgtgttgcaaagtgtttgtcttaatatgatgaacattttgtgattattattgattattagttagttattgttagtttatataaacaaacattaggtttgttagttagtgttagctttgttttgagctgctcatggggctcacattcgtctaatgccgctatttaagtttgaggtacgttgatcgtcacctgtcaaccgctgcctattattacttctacacatgcgagaatagcgtttcccgagtagtgttgacgtatgtttgtttgtatactaacgatgttttttattttgttttctagtcctggtgtgtacaggaattcatcgcaactgtatctttgttaagggtacagcaatatatattatagtcaacttccgtaagaaaaccaacttcagcacatcccaattgtgctgtcgtaattttggaggaacactctaac

SEQ ID NO: 2070 - DNA, 520 bp, unidentified
  source 1..520: mol_type = unassigned DNA; note = unclassified RNA viruses ShiM-2016 sequence
actggaatgacgaagttagctactcccgagaatccatgtcttatccagaccatggcccggtagagcggcctgctgacgttatacgtcagcaagggacagctcccgtgtcaacgtcacctacagcacaggccactcctatggccccagcgacatccgcgcccgcagcgccagcttcgccaaccccttcccagccggagggaaacgcgagcagggcctctgcaggtgcggaggcccgtggcaacgccagtctgcaaggaaatgcacagagcggaaacgcttcagtaagccccgcgtcagcaattcctttggaacagcaggcgacagctaccaatggcccgacatcgatgcctgctccgcgaagcgtagcttccgtctccacgtcgaccgatttttcgcggcgcaagcaaaccgcaaagctggtccgattggaacccggagcatcgaccgcgttgagaagagatgccgtagctggaagtgctcagtaacccgctacaaagattttgaagaaaactttgaaatc

SEQ ID NO: 2071 - DNA, 521 bp, unidentified
  source 1..521: mol_type = unassigned DNA; note = unclassified Caliciviridae sequence
catagctgttatgctatgtcaaatcgaacctttaacatctagttctcactatctcgccttgggatatggcttcggccctctatctcacggttaggtagttctgactgattttttgtttacgactttcttggcttttgtctttaaaaaccatgtgtaactgtaagtgcccttatcgacaggacgcgccccacgtggaattggggaaatctggatcatgggattccgcctgcagtacggaaaagtaccgagtacttagtatgttctgtagtgccccatgtgaagggaccgcctgagctagagctacgggcttggaaggtaaggtaggacgcctttttggctatcctacgatcgtccggcgccgattgcgtggcctcgtgcccctctccggttccgccccgatgatgcaggatttccgctaggggtttgtgacgcctccaggtacgtgaggatgggaagcctcaccaatgcgtagtgctgggtgacagcctgccggctggcgcagttcagtgtggtatagccag

SEQ ID NO: 2072 - DNA, 522 bp, unidentified
  source 1..522: mol_type = unassigned DNA; note = unclassified Picobirnavirus sequence
atttattaatttatcaacacagaaaggaggaatctattgtggtttgtaaaatcattaattcaaaaccacatagtcactcagtaatcgccaaatcacagtggatgctgtgtactttagcggttgagtgcagaaaggaggtatatcttgacagatatacaaattaagtactggggtctcaaagaaaccggtcgtcacaatctcgctggagaaagacaagcggctaatgaactgaaagagactcacagacacaatgtcactggtgagaaagaaaccaaacgacataatcaaacctttgagggtgagacaaagagacataatgttgctggcgaaagagaaacgcataggcatagtgtcgtgctcgaaggtattgagaaaggtaaactcaaagaggttactcgacataacgtagcttctgagagaattgattctggtaaattgtccgaatccaaaagacataataaggttaccgaatcaatccagcagcaagatgcaaatacaaggcttcaagttgcttatacccaa

SEQ ID NO: 2073 - DNA, 522 bp, Orthohepevirus A
  source 1..522: mol_type = genomic DNA
gcccggcactctattgtggaacaccgtttggaacatggctgtcatagcacactgttatgagttccgcgacctcagagtcgcagcatttaaaggggatgattccgttgtgctctgtagcgattatcggcagagccgcgacgctgctgccttgattgctggttgtgggttgaagcttaaagtggattttagacctattgggttgtatgctggtgtggttgtggccccgggcctcgggactctgcctgatgttgttaggtttgctggccggctctcggagaagaactgggggccaggcccggagagggcggagcagctccggctggccgtttgtgattttctgcgaaagttaacgaatgtggctcaggtttgtgtggatgttgtttcgcaggtttacggtgttagccccggtttggtacataacctgatcgggatgcttcagaccattgctgatggcaaggcacactttaccgagacaatcaaaccggttcttgaccttactagctccattatatatcgggtgga

SEQ ID NO: 2074 - DNA, 522 bp, unidentified
  source 1..522: mol_type = unassigned DNA; note = unclassified Phenuiviridae sequence
gccttctcatttatataagaactcttcagtgatcaaaagatgtcagcatctgtgtgatatagcagttggactggaatcatttgctggttcagcaaaggagacgaatccagtttttaaagattaccatggtctttttcacataaataaattacctgctatcaacagcctggcatctcatgttccagagagtatcgaccttgctttcaaactaaaacggaggaaatttattatagagaaacttcatttgccaccagaacttcaagagacaacacaaagagagcaagatgatatgccttctgctagagcagttagttgtggtgttggtggtgggacaagaaatctggatttttaatattcttgagttgtctggtctggcattggttgtactgggtgccatactgctaactgatgtccccagagtgctgttgtcccgacttttaggctccaatcacacatagacggagaccacatttgaaaaataattactaatctcgtgtgaaattgtaattagcaatcatcaag

SEQ ID NO: 2075 - DNA, 522 bp, unidentified
  source 1..522: mol_type = unassigned DNA; note = unclassified RNA viruses ShiM-2016 sequence
ggggaacactttcccccatgctctattttaacctcatatacgactttgtatttattaaaggatttggatcgcaacggtcctcttcttttcttactacaaaactcgtatatgttgtatcatcaatcttatcttttcattacaactttacttatcactttatcacaaatttatttgaatgttaacttctcgaaggtatggcaaacaagaatgtgtgagtgtggtttcacgaataaagggtattaggtgcaagaatagcttaaagtatatgcttttaaaacggcctctatacacctagtatactggagtatttaagtatcaaagggatatctatgattataggaaatcgatatcaactggtgctgcttacttactttacgtaatagacttggtaactctattataggtaaaactcacggaacgctggatttcttaatggattcgagaacggacacatgatagtatttaacatcgatatgagacatgaattacctcatatcatcataattttcacttgaacaaacc

SEQ ID NO: 2076 - DNA, 524 bp, unidentified
  source 1..524: mol_type = unassigned DNA; note = unclassified RNA viruses ShiM-2016 sequence
atacaactgaaagcagttaaccccgattgaacgtcttgtccacgatacgtgacctgtgaccgagagaattctactactttgttttcgcattccgtcgctattattttcctatttaaagtaagaggttgcctagagcatttaccaggactctgttaaatagatgagattttgtgtgttgtctaacaaaacactcagggccaagtattccctctaaaatactaaaccgtcttaagtagtgagctatctttgattgtattgttgattatcaaccaacttccgcctttgattttagcccgcaatctgaaaggttatcagttataaaacctccgcgatcgacgactcaagacttgttcctctgttggtactcgattcgccgcccctattgcgagaattagaagagatagtcccaagctaatctactttgaagaatcattgtgatctccacctgtacttgataactaccagtgtattttgctttgattgccatagttgtttatcgattaaagtcctttaggtactcaacc

SEQ ID NO: 2077 - DNA, 525 bp, unidentified
  source 1..525: mol_type = unassigned DNA; note = unclassified RNA viruses ShiM-2016 sequence
agcgtgcttaacagcacgttgaaagtaaattgttcgaccagagcatgcgtaaaactgatgcctcttttgaggaccacaatctggcgaagagtcatattgaagtacctctaatcagtgggaggagcccaatagcgattctttttagataattgaaaatggactttttatctcgcttcttcgcgcgagtaataaacacgaagaaaccaaaattataaaatttttaaaaatagggtcgcaggcttgttacctgcaaacacattatttagaccccccaaaaatagaagctccgtagtttgtccgaattgcggctcacttggtcattaagaagattccctgaaactccgccaaaagcgattgtaacgtaaaggaattatttcgagaaaccgagttgaggtgtgagataacgatattctatgccttccttcttttcccaacaagaagataaacatgttgaggaccttctgaagtggttatcttcagtgacagggtgaaagcacccaatccaaatttaacattttcttaatc

SEQ ID NO: 2078 - DNA, 526 bp, Mivirus boleense
  source 1..526: mol_type = genomic DNA
cgttagagatgagttagacggggttcttcagaaggattcagagaaatttgcgtatgatactctgactcatgtgctccacatagtgcatagattagcaaccatcgaaggattccttcttattgtaacacttgttcaaaaaggtgaagtaagcgttacagccaaacactgtaatgacggctataggagcttcatccatagcatagctcagcgagttgatctgagagccaacatggcagaacatcctcagggtgcctttgagtacaagggagagaccatacatcctttcaagcattggaaagtagggatgagatggggtgtccaagcaatgactatttcacgtcgcttgtgaggatactgatgtatatatgtaaatatatttagcattagctctgtaatcatcttatcttatatccatgtagtcaatattttatgcatatctcgttcatattcactcactgtattaaaaatggagacaggattcaattgatcgatttttgagcagatacactcttcctcagagatcatc

SEQ ID NO: 2079 - DNA, 526 bp, unidentified
  source 1..526: mol_type = unassigned DNA; note = unclassified RNA viruses ShiM-2016 sequence
gggcgtgacctacgtcctggtcttcattgaccgcaccaaaaggatctatatattgatctttcacgaatatgacggtaattgtgaagtgctatatatagtaaagttattagcgccatgtgtaggcgtgaacgcgaccgtcaataacacttcagcgtgcttgagcaggcatgctgtcgtacatagattgctcgccgctatcaataacaataataacaatgacaatacgcttgttggaaatcgttctgccttagaaactgaacagaataccacatttgtagaagacgcacctcttaccattacaccaaatgttgtagtgacagattccacttttaatgacggcgctgttgacaacgtggctttgggcgactggttctccagacccgtacatgttgccacatatgtttggaatgagggtgcactcttggatgaagttctattgccttggtatgagttttttaacattttaaccatcaggaataagctttttggatattcacgtttgaggtgcaaccttcatgctaagttc

SEQ ID NO: 2080 - DNA, 526 bp, unidentified
  source 1..526: mol_type = unassigned DNA; note = unclassified RNA viruses ShiM-2016 sequence
cggaaatgcaattgatcaggactgccgagtatataccaacgcaatatcggttggataggtttaatgagtttttcaggactggggacagcagctccagcgcggctactggccccaagaactcactaaacaaagtgaatgttgtgcgcaagtgcctctcaaaacgttggatagtaggcataggattattagccatggcaagcctggtcattttgcgaaaaccgcagttaccgttacatatcccaacattatcgcgtatcatgtaaatactcatagtagttgttattgtaatgaattagttagtatatataatagacatttagttgataggagttatattaaatatgataagttagctataagtaagggctttgggttagttgataagttttatagcaatgttaaggtacataaacttagttataatgatatcataggggaatatactggtagtaaacgtaggttttataagcaagcattatataagttaattaatgagggttttcagcgtaagtttagctatgtgact

SEQ ID NO: 2081 - DNA, 527 bp, unidentified
  source 1..527: mol_type = unassigned DNA; note = unclassified dsRNA viruses sequence
tttggaactcagctaatacactggtggctgagctgaggttccaccatctaattaaactactcaaatataccttcactaggaataataaattatatatatccctcgtggacgtgattaacgaagtagcaggccacacctttaaattgagctatttagatgataaacagaacttaaataaaccgaagtttttctttgattacgatactgttgcgcgtaaacacaactttaataatgaacctactgaaataaatggcgcaatattacgctggatcttcctacatcccactcctccaagtgtatatgactacttaccaaattttaatgaagatatcagattagaggattccattcaagttcttccagcacgatcataccttaatctagcaagtgtgccgtatgttccaccagaacgtttaggtgacactgactctaaaaatgagtatatagaacttgaccctcacactgtgggcatagccgttaagaaacagaattcagtactcatagaagaatggaatttttatcataat

SEQ ID NO: 2082 - DNA, 528 bp, unidentified
  source 1..528: mol_type = unassigned DNA; note = unclassified Alphavirus sequence
gatcgcaagcagagtgttgagagaacggctaaccggatcaccatgtgcagcattcattggagatgacaatatcgtgaaaggagtcaaatcggacaaattaatggcagacaggtgcgccacttggttgaatatggaagtcaagattatagatgctgtggtgggcgagaaagcgccctatttctgtggagggtttattttgtgtgactccgtgaccggcacagcgtgccgtgtggcagaccccctaaaaaggctgtttaagcttggcaaacctctggcagcagacgatgaacatgatgatgacaggagaagggcattgcatgaagagtcaacacgctggaaccgagtgggtattctttcagagctgtgcaaggcagtagaatcaaggtatgaaaccgtaggaacttccatcatagttatggccatgactactctagctagcagtgttaaatcattcagctacctgagaggggcccctataactctctacggctaacctgaatggactacgacatagtctagtccgccaag

SEQ ID NO: 2083 - DNA, 528 bp, unidentified
  source 1..528: mol_type = unassigned DNA; note = Yongsan picorna-like virus 1 strain 16-0061/ROK/2016 putative1 sequence
ccagtaggtctctaatccgatccaatattaccgcgcacaaagtcgaaaacagccttataacaagactccaagcacttcttcttcgagggtccaacttgttttatatgaaacaattgtacctttccgacgcgccaggtcgaattcggttattcaggaaactactacaccaccgtcaccgtgttcaagcgagtcggaaaggtacaattgtttcatataaaacaagttggaccctcgaagaagaagtgcttggagtcttgttataaggctgttttcgactttgtgcgcggtaatattggatcagattggaagacgcaaggactggactccaataagagcagtgatttgaatgctgatgtcgaggataatgtgcaagaggtttcgaaggaagagaatgttatcattgagggagcagaagtgagtactgttgcaagtgttccccgatcccaattgcgtgaccttgtggctttgtcaacaacagagaaagtttacacatttgctgattcttcttcatctgtagttggaagatgg

SEQ ID NO: 2084 - DNA, 529 bp, unidentified
  source 1..529: mol_type = unassigned DNA; note = unclassified Salisharnavirus sequence
acgcatccctccatgcggggtcgatctgcatgtaaaaccaaatccggctatgtttgtatggttacgcacgccaatagaaaagtttgttcatttatcttttctggtttgacgcttcttacataagactgttgtatggcaatccttatttagggatgggtagtcgcccgcaacaaatgatcataaattgtaagattgagggatcttgcgatatattatttatccccttgctcaaattacaaatgtaacgctcaccgagggagcgcataaatctcgggaccaaacagtgttgtataacgattatgcaaataattgggagtacggcgtcgacgcagcgcaagacccaacgtactcattgacggatctcaatgatgcatcacttgaacattttttctcacgcccagttaagatagcttcttataactgggctacagggactgctttatttcagtccgttaacccgtggactacgttttttaataatcctcgggttataaatcgcatttctaattttaaccttattaggtgtaaa

SEQ ID NO: 2085 - DNA, 530 bp, unidentified
  source 1..530: mol_type = unassigned DNA; note = unclassified Picornavirales sequence
ataaggtaagttaattataccttgtactttattgattatttgtatactatctccattttaaattattgatatgttgtgtgtgaacccatattgatatttaaataataaggatagatatactataattgatactgtatgtaagatttaacgtttaaaattatacttatcttttaaaacacccaaaacttgtatgaaacgcaagtcaatcattcaattagcaaactacccgtatttaatataggctctttgttgattgagtaattgttgttcaaatgaacacctatttaagggttgattaatttcttaatgtgcgtggtggcacctttaaatagtagatttccgtctttctctattcagagtacttttggacgttaactaatgctccatccagtcttgaatgtatgataattaaactcaagattgtgtaaatttatcttatcgcaagtacatcaaataaaatttatgaagaaccagcaaaactcgacgataatttcgcccctgatcttagtaatgtaacaaatactaatttt

SEQ ID NO: 2086 - DNA, 530 bp, unidentified
  source 1..530: mol_type = unassigned DNA; note = unclassified Riboviria sequence
acaaaaccgtcattccaaagaggaagacaacctcactaaaaaattacaagttttttagtttgttcgagaaacataccggcgaaagaaagttgggaaagtttctacttgaacagacggaaaacacatataataataaacgtaaattaccagatgcgattgactgtttcaaaactattcaagagatattacaatctgttgatcagcgaagaatcggtattaatccaactcaactggaatattacaaatcaaccttaagacaaaaattgaacggctcattgaaccgaccatttatcgtagcccatagtggtttcggtaagacgacgctagctaaggaaaaatggattttggatatagatgattacatcccaaaagaagtatttactgtgcaaaactcgtcaacttcggcgcctgagttgattcttcaaaacgaatatatttttaactacatatgtgcatcatctggtgtaggtaaatctcacgttacaaagtttcacaatcaaactaatgtctttatcgatatcgatgaagtc

SEQ ID NO: 2087 - DNA, 530 bp, unidentified
  source 1..530: mol_type = unassigned DNA; note = unclassified RNA viruses ShiM-2016 sequence
tgatatcatggcagtggctgcggcagcaatgtttggaggtaatgtgttgcaaggtttaatgaactggggtatgcagaaagatgttaatgcacaacaatttggatataatacacaactcattaatcaacaaattaaaggtcaaatggcagtgaatgcagttaattatcaaaatttagctaattatcaacaaacaatggcgagatcatctggtgctccagcttatatgtttggaggaatgtctagtgggatgactcccaatattgggggttatcatgtaatgaatacaggtggtggtgcaaattttatgactggtaattttgcgtggacaatgcctgttggaggtatttctggttatacaggacaaggacgagcaccatcaactgcagatgttggtacccaaatgggtggtatgacggcgtcaactggaacaaatccaatagaacaccaagattaaaattagtctacctatggttcctaattcgataatagatggcagcaaataaacaagaaatcccaaaaagttatttatc

SEQ ID NO: 2088 - DNA, 531 bp, unidentified
  source 1..531: mol_type = unassigned DNA; note = unclassified Robigovirus sequence
atgagccttaggcctccaacggattttggcaagccattactgtttgcggctgccggcgtctctttggccctgctcattgcagcttacaaaagtcactacttaccacccgtaggcgacaacattcattctctaccacatggtggtcactactcagatgggactaaaagcataagctacaacggtttgaattgccaacagaatcacagccagaacctcttatcaagcaccagcaagttgatcccgcttaccttagttttcgttgtgagctttttgatttatgtctccagtaaatttggcaataggtctcctagcattcagcattactgcattcatcatcgctagtttcaattcaagtcctagtaatagttgcatggttttgattactggcgagagagcgttagtcaccggttgtgaaataacaccagacttgtctgatcttgtcaaacagttgaagcctcattcacatagcttaggtttttagcactaatactgatttgtatttgtgtgtgattagactacaattcattttaa

SEQ ID NO: 2089 - DNA, 532 bp, unidentified
  source 1..532: mol_type = unassigned DNA; note = unclassified Closterovirus sequence
aacgttgcaatcaagtattgtataccccgattcttctttcgtgtttgcagatggtagctcactttcacccagtcaaatgcgcgcttctccttctcaaagcgctgaaagagagtttgcttaccttctacacagcgaaacgctttttaaatggtgcgcaacctgcgggccttcaatgcggtctgctctcagtgaaattaaccaactcggcaaatacagagaggatgcgaatatcgaagtcgatcttaaaactgtcgggtgtaagtatacaatcgatcgaattagagatttccttaagaatagcaacgactcctcgaacgacgcggttgaacacagctggagtttatctaactcttgcggtgaattagttgatcccagtgacatttcgcgttttaagaagctggttttcggaacgtcatcgtctgttgacaacgatgaattcactgctgtaacccatattcgggattatctagcttactgtttatctttagtcgataggtttaatttaccctcgcttaagggtgagaaagaacta

SEQ ID NO: 2090 - DNA, 533 bp, unidentified
  source 1..533: mol_type = unassigned DNA; note = unclassified Nodaviridae sequence
tgtaaagcgccacggcttcgccgtttagctttccccttttggttagagcgatgtctatagcttgttcccttggttgcgggtaacgtagtgatggcaaagttggccaactgggattactggcgtacgatgtaacagctggatcgtactgggctctgggatcgaccgtctctcttgaggatgctgcacgcttcgcgcgttagggctagagagagcagctcgtctagtattgtgcaatggtcttgccttgctagctaaaaccaacccgaatttgatagtacgtgaacgcccgcccattcatagcgacaatgataaactttcaagccctaatcactcttcttcttcgttttgtttccttggtttttgatttggcattcttagtgcttcgttatagttttaaggctcttatagcccttattaggcttggttggctccttttgcgcctaccccttcaagtttgtctggccgtagctcttttggctttggccgcagtgatctcattagcaaccgcccagcataataccagctggactgac

SEQ ID NO: 2091 - DNA, 533 bp, Drosophilid anphevirus
  source 1..533: mol_type = genomic DNA
ccttaaaaacaagtataaaatatcagcctattaattacctatataaaaattataactaaaacattatattatcagcaatattaaccccaagaattaataatcttaaatcgtaaacatataatcttaataaaacccgttgagtctagtcacatatctgtaataatacccaaaattaaatactatattaagaaaagagaatgtatgagactaaaatcatgtgtccctattgtggaatgatgatcaatgttaggataagtactaaaactgatagtaatttttcaaaaacattagtcaattgtaggttttgtaaagaagaagtaaatatagaattagtcacaactgggaccatagacagtaaagagccagttggttcaaacaaaacagacaggtaagaatcactcctacattatggtataaaagatgctactagaattccatccattttcttataaaatctttaatcaataaaattataatcaagttaatactaaatctttgagtcttgtcacttacgaatagaaaaacccgttaag

SEQ ID NO: 2092 - DNA, 534 bp, unidentified
  source 1..534: mol_type = unassigned DNA; note = unclassified Potexvirus sequence
ctaaggccactcagcaccttcatcgctctcacccgcgccaagggcaacctcaccatcttcgatttcaatgccaggtttagttccaccgcctgaccactccaagtcactcttcgtccttgctattggtataactgtggtctccgcactatttgtgctgaagtcccacacgtttccaattgcaggagacaatattcaccgcttcccctccggcggccaatataaagacggtaccaagcagataaatactgtccacctactcatgctaggtacccgaaataccctgactacaatgcttgccgccactgccgccatcgtcatcctctctgcctatatatttcctaccatcctggcaataatattcgccgtatttgcccttgttgcaatacatatcaccacccctgagcccttctgtaccatacacatagacggggcgtctattactatcactaactgccccgatcctgcagctatattaaataaagtagctataggcccctggcgagggttaagttaccacaataacttgaaataatc

SEQ ID NO: 2093 - DNA, 537 bp, unidentified
  source 1..537: mol_type = unassigned DNA; note = unclassified Sopolycivirus sequence
tagatgatgatcaaaaagcacttgatgattatgatgcatcaaaatctgacccatcgtttaattatggacctggtgaagaatctgctgcaatcgatactgatattcctattgaaacaggcattgccgagggagctgagatcgcttccgctggaaccccttggggtttggcagcccttataaaccaacaagtaggacaatcagttaattcagctataacaactggacaagaaaatatttcatctcaagattatatgtccaatatcaatcaacatggagtaaatgttggcttgaatgcttcccttattcaaaatcaacaacagcaaacaattaaagctggctccgctggaggaggaattggatctatattcggaccccttggcgctcttataggacatgccgttgctggaacagtacaagcgaatcctgatttattcaatactgctgcttcttcaagtggatggattaatcccactgatacaacagctgcaaattctgcttctgctgctgccccaactggtgactctacaatgcaagaca

SEQ ID NO: 2094 - DNA, 538 bp, unidentified
  source 1..538: mol_type = unassigned DNA; note = unclassified viruses sequence
gggattttaaccgcccgttgtattcttacacaaaagtttgttacgcatgtcttgaactgacacaatagttcccctaaaagctatcacgctcccttgtgatgtaactcttttagagtcttgcctactagttggtacaaactagttccattttaacaccaaacacatcaatggattaaacccgtgttccctccccgacagatctacaactcttagcttacagccaataaagaagcttaagtcacgttgttaactcgtcctggagctttcgtgttattgacaattccccctccccctcttttggactgattgtctaaaccccccgacttatatagacagagacgcctctatggcctctatgggtaatgtgccctgtcaacttcctgttagtcactgaagtacaatcgcattcacacacacaaactaccgcttgctcgttttacgggttgccctcattcacgggccgaatatcatgtattcgcaaagtagtgtttgctgggtcaccaaaaccggctagagtcctactactcgataaataagt

SEQ ID NO: 2095 - DNA, 538 bp, unidentified
  source 1..538: mol_type = unassigned DNA; note = unclassified Partitiviridae sequence
catcccttttggggcaaaaggtttgacaggggattggtcaccctacaaacttctggataggaccaccctacttgcgacggtagcccgccttacccgcaagtggagagcagtgagggcggatgtttgggctagaaccccttgcgataacgagtactcgatggtacggtcacagagcaaactgtactggcaaagtcgggtcaaggagtcgctgcgacacccagacattaggttaagagtcagttctatggatgcaggggaggcattcaagctggcgcacaaacatttgcaacgcagattgcgagtaactgaagaggcggtcaaggagaagaacttacctccgctgcatcttcagcacttgcgcgctctcattgtcgcgttaaaggattggcactattctccggatagggtgtcgattcttgcgacatgtgagttggcgcgaggctcctccccccctgaaaggcctccccgcattgaacagcggtgggtgggaggggttccaaggccattcgcaataaaggaggagataccaccctcgaag

SEQ ID NO: 2096 - DNA, 538 bp, unidentified
  source 1..538: mol_type = unassigned DNA; note = unclassified Triatovirus sequence
ggcaaacgtgtgatccctgcattaactcaacaaatatctgatgtaaataaagagtttttgtaacgctgcgtttgtaactacctgggctatttagtcttacctcccaggatgggtagtggcagccccacaatatccagggaaccatcagtatatactacatggttaagtggcctgtagtacgaataattcacttgctacaaaacaagaaaataattcaatagctcaagctgaggtagcgcctcaggaaggacagaatgctcaggagcaacaggaaataacatcatttaatgatgatcttgctgttattcctgagggagtacccggagagacaccagtcccgtcttttcggcatgatcaattcacggacttttcagaccattctattatttcgtttttagagaggtctcagcttcagtcgtcgtttcagtgggaattcgcgcaatcgggcggtgcttcggggttgaattcgattggttacgatctgttgaaaacgaacgactcgccagggttgttagtaccttcacagatattcaagccc

SEQ ID NO: 2097 - DNA, 538 bp, unidentified
  source 1..538: mol_type = unassigned DNA; note = unclassified Picornavirales sequence
gattgcgatcctttcactgagcactatttacagctggtttgctgggaagaaaacccgcttacgagagcgttatttcggaaccttgatgcaacaagttaaatgcaatttttattactaagttaatttggaatgttgtttatttaaacttttgttcttttagtttgttagtttatactcctatttactttagttttaacctaccattagtttattatgtttatttagttttgtttactttgaagtttcttacctggtgcattggagcgaagtagcttttgtgaaaagtccgatgttcctgaactccattgggaacctatgcggcctctgacgggtgtctttggcggaaacatggataactggtgggaatctctacacatagaggacaagcaccaacttcagacgctttgtattacaaagccgggctgtaccctgattttggtgtatggatacccatggggatggggtctgttttgtctactgcctgatagggtttttgcaaacaaatgtgtaagattataagatttgctgtagttatttt

SEQ ID NO: 2098 - DNA, 538 bp, unidentified
  source 1..538: mol_type = unassigned DNA; note = unclassified RNA viruses ShiM-2016 sequence
acctctgaactccctctgaagtttgtgctaaacaaccttgatatggtaccgctagaggttttcggacctttggcggcaatttcgctctgtgatgtcacttgacaagcaaggaatctgtcagcaacaatgacagtgtaaaattccccaagaactggcgacgatcctgaggcaaagcctataagacctcgtggtgaccctccagtgtcatgaatttcactttgcgaaaatcactgcacttactaaagaggtatgtgacatttcctctttcctttctctccttcctttcctggtacacattggttacgcaacgggcataactactcctcagacaactactgtccgtatcgctttgtgtactttggcttgctatttagcgtgcgtgtgccttgggcagccccctaaacacgtgtcagaggaccgctccagcctagttgggttactacggcagccacgcttgcgtggtggagtgtaaaactaacctgctcctacttcttcttctccttcttcctctacttctcctcctccttctactaactct

SEQ ID NO: 2099 - DNA, 538 bp, unidentified
  source 1..538: mol_type = unassigned DNA; note = unclassified RNA viruses ShiM-2016 sequence
attactcccgagaatccatggcttatccagaccatggcccggttgagcggcctgccgatgtaattcggcagcaagaaaacgctcccgcgccaccaacacccccagcaccagcaacttcggttgctccagctcaaaccacgccagcagttcctggcccttcagcccctcccactgtggccgcagatgtgacaactccctgtgtagaacagccggagggaaacgcgaacagggcctctgcaggtgtggaggcccgtggcaacgtcagccagcaaggaagtgcactgaacgtaagcgtttcagtaaaccccgtgtccaaaactcttttggaacagccggcgacagctaccaatggccagacatcgacgcctgctccgcgaagcgtagcttccgtctccacgtcgaccgatttttcgcggcgcaagcaaaccgcaaagctggtccgattggaacccggagcatcgaccgcgttgagaagagatgcagtagctggaagtgcacagtaacccgctttaaggattttgaagaaaatttcgaaatt

SEQ ID NO: 2100 - DNA, 539 bp, unidentified
  source 1..539: mol_type = unassigned DNA; note = unclassified Totivirus sequence
gaaaaactatccccgctggtcggtgggccgatacccaatcggtctatggagggaattcaaatagggctctggtagtccgctcgccatcgccttcggtctttccgttatggaaggtttgcttacggtccacgtaggttctccgaccttgcgaggaaagattgcgctgctttgcagttcccttaactggggcgggttaggacgtcggtagggtgcctgtggccctgcggcaggcggatctagcacgtaacgtatcccttgccagggagagcgtgccgaattgctatgggttggtgtaggtcctcggttgtgtacggctcctcgtccacctacatcacacatgagaaactgatgacgacacaggcgtgtctaggactcatgcgtaactgctccgatgggatattaggtgtaacgactgcctgtaaagttaaagagttagcaactcgggctgaccagtctgccctttgcgtggggtgtggcatacgctaggacgtggacaaaaacaacaaactaacaacaacaacaccaagccaaaaagaaag

SEQ ID NO: 2101 - DNA, 539 bp, unidentified
  source 1..539: mol_type = unassigned DNA; note = unclassified Picornavirales sequence
ctaggaaggcctttttgtaattattcgtagttgcgattattaaatatatagctatatctcttgattgagaaatagtattctgtacttttgtatttcatttgattatgattaatttatacaaatagtagctatatacttgacaatcgtctcttgtagtttaattttaaattcctagaacaccttaacccttacaaaacacacatatcattaattttaacatttaacatatacgcgcatatcttaaaaatttaaaaataacttagtgggaactacttaaatatataaggttaatgttatatagatcgaagatttatacaaatcacgaaacctcgcaagggttgcttctattttagcattaacaaactgtattttcttaaagtaccttttgtatcaaaaacaaaaccgaccacacttaaacatgacctctgaacaataagtttcagaagcgatcggaaatgatctatcacatacgtagttgtgatagcagtttgggtgatctgacttcacccacccccccctaaaaactttttacaaatatg

SEQ ID NO: 2102 - DNA, 540 bp, unidentified
  source 1..540: mol_type = unassigned DNA; note = unclassified RNA viruses ShiM-2016 sequence
tcgcattgttgtggatatttggtgtctctatggtttgttcactactattaacgtgtcttttaggttattattttataagactagttaggaggacatacagttatgcatgcagaaaaatccaaaaacatgatagtagtgtagatgccttagagttagtgactgtatatcgatctactgttgactctcttcctatgcctgtacctttatcctgaccctcagtaccgcaagcaactcgaacaatctaaccaactgtgtggggtgcgaggttaaagtatggtaacatactctctcactatgaagccagggggagatttagtagagccaccgcccgccactagtgcggaacctgtccgtaggttgggaacctggagatcagcgtgccgaggtccataacctctcccagtgtatttctgtgtgaggcattggcaaagttatgggtagccttgctggttctgcctggggagctggaagtcttcgagcccagggggtatcgtcaccgcccaatcttgtgacgtctttttcaaacatttgtattctatc

SEQ ID NO: 2103 - DNA, 542 bp, unidentified
  source 1..542: mol_type = unassigned DNA; note = unclassified RNA viruses ShiM-2016 sequence
gcatttgcatcactttgacctggcgaggtcagtaaatatacgctttttacccccggtgcagggttacattgtaccaccttatcgcagttgattacggcagagtcgaaatgatttgcttgttttattttcaattctgacgctctgcgatttgcatattattgtacataaacatgcgtctgtggagtgctgagtcgcacccatagtactattatagacttgctacaacattaaatcaaaattttacggtagaaaccgccaattcatctttgaaggaacagaatgtgtcttttaatgaccaatctgcgggctatgttcattcccttaattctgttattgattctacgagaaccaatgtggatgcatatgatgtggaattggggaattttttcgaacgtccattaaaaatagcttcgtatgagtggtcaacaaccattactttctttcaagattttaacccgtggtcattgtatttagagaatcctcgtgtagcgaatcgcatttccaattataagttgcttaaaggcaaacttcacgttaagttt

SEQ ID NO: 2104 - DNA, 544 bp, unidentified
  source 1..544: mol_type = unassigned DNA; note = unclassified Riboviria sequence
cttaaataagtataacgtaaaagccactacagttgatgacttgattcaggatatgactagacaagcatgtaaggcttttacgttatacttatttaagtgattgatggttgctggttgctgtgctgtaggggtcaacacctccaaagtaagatgagagaaatcaggcattctatgcccgttctcactgtatcttccttggaactgtttatcagtaactctcacacgcacaagacgcgaaaatagatctcacggaaatgaatcctttggtatatataacgaatttgctaattctactggtgttgatgatcaagttaaatcattaaactcaattatttcatcagatccatacagttttgaatctgcatttgttaaagaacaaccgtgtaaattgcgagttgtatcattgacttcaaaccagaaagattactcaaatttgttgaaaaccttaccggaagccaccttgtgtgctctattttcgcgtcttgtgcgtgtgagagttactgataaacagttccaaggaagatacagtgagaacgggcataga

SEQ ID NO: 2105 - DNA, 545 bp, unidentified
  source 1..545: mol_type = unassigned DNA; note = unclassified Picornavirales sequence
tgtcaattcatttttgttgaataatcccacgtctttcggacaggtcagaccgaccttttctaatagttcaattctattaaatggaaattacaataaggctcatgattttatgaatgcgaatgccctaaacacgcttcagtatcctaatgtaccaccgcctccttatgttaaggattcaccctctctgctttcctctgcagaaaaagcaggtggattaggggagatgtcaacaatgggtataggaatgggcgtaggagcgatggactcagcactcaatgattacactaatatgaaaattgagaatcaagtgaggacgggaacagggcctgacggtcatgcgtttgatgccgtacagcatgcacaaaatcaagtggcgtcaaataatgctcattcagcattcagatcttcagcattgatgctaggatcagctctaggtccagaaggattaataggagctggagttctttcagcagcagattatgctctgcaagctgtaacacaaccctcagagaataccaccaatagcactagtggcgatttggtaa

SEQ ID NO: 2106 - DNA, 545 bp, unidentified
  source 1..545: mol_type = unassigned DNA; note = unclassified RNA viruses ShiM-2016 sequence
cgtgcatataatgtcttctacgacattatatgcacttattaggaaatctttgtacgcttaccgcctacgtgattttcgaacacgtaacgttaggatttgcttagcatttacctggagtactgtaattagttttgacactatgcatgctgtttctacccccgtcttggttactacaccaagcagccggccttttagggcggttaccgttattatacgggctcttttgagtatgaaatttttgaagatttttaatggatgaaaaatcagctggcgggcatgccccgctaggacaagacgctctagctattgagcgcctggctatgaatgccggaatgaggtacattgtttgtaccaagaggttttttagatgttgtttgttagcgataattatgctttcgaaatcagacatcctgacggtgcgaagccgtacgatacaacctcaaggggtgcgtgtcggtgtccattgtattgaacatggacatacttgtttccgggaaacaagtgtcgaggactatctcccctcgagctagcttgctagtaatgtg

SEQ ID NO: 2107 - DNA, 545 bp, unidentified
  source 1..545: mol_type = unassigned DNA; note = unclassified Riboviria sequence
aggttaaagactccctgggggtataccccagggagtctgaagatatttgagcctcgatcggctcagatttagtgtgttaaacacttttataaggttatcaatttaccaagtatgagtgttatacactctgcattggtattaattggaccttttaatcttttcaacaacctaagtatcgactgtgctaaactagcagtcaaactatatgttattataaagacccataatgtctataaacttagaattataaacaattattgtgttgggactttgttggtcccattgtaaaattatttcatttgacggaggtataataagcctaccagtgctccgtctacagctttaaactttgacgcgtattttatctaattctgcgcaagattgagtcaacgtacttttatttgtattaaatttgtaaaaatgctttgatcgaatcgatcttcgtgcagcatttgtgtaaaagcacgcgccgttaaaactctacgagtcattttggaactcttgactatatgcaaggcaagctgaggtcataaaattccaataca

SEQ ID NO: 2108 - DNA, 546 bp, unidentified
  source 1..546: mol_type = unassigned DNA; note = unclassified Botybirnavirus sequence
gcaataaaaggcgaagccgggaggcttctattttattgcccagtttttcatctggtcaaaatgaagtcggctatctagctagcggagagtggaactggtcctcttcgtacgaaaccaaaccgagcccccacccggtgaggtaatccagtggcaatgcgtgggggagacctcggcctcggccgagtgattgtgcagaacgggtggtgatgtcagcaatgctcaccgtacatgtccgtgctagggagaatgtcctgtatccagcaggaagatatcccgcgtgtaacgactgcaagcactttgtctcctacgtagaacagtctatcacctagcggcgctgatcggccgatacagtaggtggtgtgtaggcttgccagcccaacccccgccacagacatagcttccaaacaattacacacacacaatatagcagagtgagctaatccagcagctatattaacacactacagtagatcaacttttgaatactgttatcgatcaaacacaagaatccatataccaatctcacaaattacaaaacacaaaaaa

SEQ ID NO: 2109 - DNA, 546 bp, unidentified
  source 1..546: mol_type = unassigned DNA; note = unclassified Picornavirales sequence
gggacaaccccacagctggtacaaccattgtgggttggtctccaccctttttcaaccgtggcaacttcggttaaagttgcaaatcccccctctccctattccacctcccttactttcactccccatatatggtcccagattttattctacctctttatatttttatttagtacagtggtggtgaattactcccagcataaactttgctggatcagtgttcatcaagcatactaattactaatgtactgagctatactattatctggcatctcacctggataaccggtgtgaccatatttcctaggttgcctccctatgtattttgtagcacctgtgcatctgcacgttggggcgacaaattgtaggtttcctggcacgggtaagaattgtggaaagctagtatgcagttaatgcaagggcgcgtttttcgctaccccgacactgctaaagtttttgggaggggtcccttaaacatttctagtattgagtgatagctttgcggcaggtcaccacaaccttactataaataaacctgttgaatctcac

SEQ ID NO: 2110 - DNA, 546 bp, unidentified
  source 1..546: mol_type = unassigned DNA; note = unclassified RNA viruses ShiM-2016 sequence
aaggggtcttaaccccctggttcttttgataaaatagcaataatgcacaattatagttgttgcaagattgttgagaaaaacattttattcaattcagtcttaattggcggataggttggcatcccgtcatgcatttaaatgcagatatgctttccacattttaaagtgtggaaccgatactgtgctcttgaaaaatggtgtagagccgcgcttacatttgcaggtgtagcgtgaaggaacacggaccaccatccttagcgttttaacgctgaggcgaccgcggccctgaattaatcagtgtgggctagattatgccactgtacaacacatttacaaataaatacaataaaaagaaaatttgaggtccaattagaggacactaaaaaatatttgtttatttaatttaaataaaccaacccccacttaaacctttgtgggaagggaagcttctgcttgagttgagatacctttctcatttaaaaaaggcgcttttattttggacatttttgcgacacaaaaagaaatccattttatgaaaacacatca

SEQ ID NO: 2111 - DNA, 547 bp, unidentified
  source 1..547: mol_type = unassigned DNA; note = unclassified Picornavirales sequence
ccttcgtgggcaacgatcagcacacattgtgtctgatcttggcctacggagtttacctttttgacgtttgatagtacgacaactattcattgtatttgttactttgttcaccttacctattgtttcattccctgtatatgaatatgaatttatcttaaacggttattccatttgtttcaaaggaggatggaggctatcgagcttgcatggaattgcaagcagtactttagtcaagccacttggaacgaatggtttttattgtttaatatttatttatatgttagtatacactcctagagttctacattgtttgtatgaagaatgggggaaagctacttgttagttagtaccacagtctttttaagcaattccagtagactggtatttttgaggaaaggtggtatggactgaattaatgggcgcattttttgccaacccggagagtcctaaagttatttgggggggcccttataacatttccactattgagtgatagctttgcggcaggtcacctcaaatctactataaataacctgttgattttcac

SEQ ID NO: 2112 - DNA, 548 bp, unidentified
  source 1..548: mol_type = unassigned DNA; note = unclassified Picornavirales sequence
gtttttagattttataaaaaatttcgaaacccgcgacgtttttgacgagatatgtgatttaagacacttactaaagggtttaaagttacaagatttaattttaaaaaaaaacttaaaaaacgtcgtttaaggtcacgaaaaccatctcgtttaaaaattttaaaacaatcacaaaaataaaacaaaattaataaaacaatctcaaaaacaatataaaatatcactcttgtagagtgtaaaaatgtaagtcggtactttaccgaattgtggatatcaatcttatccaaggtgtatttaaacacgtggcttttgggttttgtcgccctagttgtcgtccgtgcgttccaccttattcaaaccgagtaacaagttagttcttgtaagggctagttaatacctcctccaaaagagtttgtagtaacttgctagtacctgcttgagccgtatcgtgtaaaaggcttgtttgaatgtattcaccaatcgtaagatttatttctgattggtagataaaccccagaccgtttccaatttaatattaacccaatatg

SEQ ID NO: 2113 - DNA, 549 bp, unidentified
  source 1..549: mol_type = unassigned DNA; note = unclassified Metaavulavirus sequence
ggataggtgatccacctggaattaagctggttgattaagaatgtctgatacaacagagatcaaattagttaatctaaatgtgctagggagatagtgcaccaaagctataaagttgcgtattttatcgactcgcacttaattaacctgaaaccaggaatctatctttaagctatgaaattatgtgtcaaaaaaactaatatcaaattaaggagtatatccccatacacaacaagcattaataataatcatcactaagtatatagaaatcgggatcaacaatttgatcttcgtgagacttaactatacacaagattaatattaattcatgagttgactactcagtgttgattaactcttttggtcaaatttaggtgaagaatcaatataagacagtaggaactagattacaaaaaaatgggggagaacgtttgacagggcgcgtaatcagacatagcttgtctgtgtaagttttaagagatacgcggtcgctcaggagtacaagagtcaaagtagaaacagtttaaaggacaggacacggaaagcagaaca

SEQ ID NO: 2114 - DNA, 549 bp, unidentified
  source 1..549: mol_type = unassigned DNA; note = unclassified Astroviridae sequence
ttttgcattctgcaaacttcatcctcggggtcagggtttcccggcaccactcctccacccattgagtgtgtccttttggtgataacgccgccatttggttctcacactgtaggaggaggtctgtcatattgacaccgtgtgctgataggattgttcgagttttcccatagcacatgtgttgaatttcagtgtaagtaagttccctggttgatggtttaaagatgtcaaagtagcatccctcaatctgcgccgtgcagtcagtctcaagagcacgcgtttctccagctaggaacccaagcaagagaaagagaagtagcatgcaggcaaaggtccaggtccttgatgatgcgcgcacagccactgacacggcatttttgctatcgatgatggcatttctaaggagttttacctcctgctgatggtgccgtatcactctgtctttttcctgcagctctttctccctttccttcaagagctcacgcaaccgcatgttttcctctgtcttctgggatgattgtgcagcaaagagccttatcctaagctggttgg

SEQ ID NO: 2115 - DNA, 551 bp, unidentified
  source 1..551: mol_type = unassigned DNA; note = unclassified Morbillivirus sequence
actataacaataataaacagctactaaatagtattatgtatttaagtgtacactgataattgcgaataaaatacaccagattaataacagtatagagttaagatctaattgatatgtgggttggtactcgatcatttattagctctactgattatctatatcttgaatcaccaaatgtaagagcatcaacaggtaataagttttggattgctagattgacacttaattctcagaactagaatacccagattgtcaaacctataaccttgttagattcattaaagttagattcttgtaatgttgatcaattatcacttgagcaattataaaaaactaaggacctaatgtaataggaacccaaactccatccagtgagctctaaatcgccatgcttgaatattaatttatctagggcctgtctaactcagaacaaagatcacaactagagtctaaaggagtgggtcaagtctgaacaattatcaagagccgagattcaaaactgattcctccttaaactcagaaccctaacaatatatcatccactcaacatc

SEQ ID NO: 2116 - DNA, 551 bp, unidentified
  source 1..551: mol_type = unassigned DNA; note = unclassified Picornavirales sequence
cccctggggactggcgcttacgcgttagtttccaggatggtcttttcaacccagctatgggttaaatagcaacttttttatttttccagtttcactggactgtgtattggacactacacagtataataaaaggtgagtctttctcaccactttcgtgtctagcggttcaactcatttaggcatgtttgtcaatgtatcaatattagttgaagtgaagatttggaatcacaccacaaccccagtggtgcccaccataactctgcctcggatttcctccatagtaatatggaccttggtagttacacggtgttgtttatacatgagtcttcatggatcttttattgccgattgccgaacccctctatgaccactgttccgttaaggttttgtaagtctgctcccatgtaaaagccttggtcgtgcttaaatgccttcccgggtgagaggaaaggcctacttagctcacgcggtaggaacacctgtcatgctccgacacagggacttatattgccgaaacccattttccattttaaaccaactactctctcact

SEQ ID NO: 2117 - DNA, 551 bp, unidentified
  source 1..551: mol_type = unassigned DNA; note = unclassified RNA viruses ShiM-2016 sequence
ccctgaccgggggcaagaacgcaagttcacctctggaaacacccttacaaaggggtcgtcagtgtttggcgctcttctgtgcggccaggggtccaattaacagctatttactgttagacacatttcagtgtcggcatgtggatggcattcgcgatcgcacttagcctaaggaggttacacctgtgcgtatttcacacaagtataatcaacctctttggttggagtgtcggtccgataaaaacggcccgctcgagtacgctcagttacctattattggcgacggcgcagtacctgatagacttctgccgtacaaggttgcgaaaccttatactcgtgcagatgtccgtctggatcacttagttcccgcacctattcccgctggagttagcttaattgagcttcctacagcagaacaggttgtaagttctttgttatcgagtcggcccacgttggcatcgtcagtatttcaacctttcgttgatacagctggaatccagaactcagcattacaaaatgctattgagtatggaaatatcttgttactcgtctct

SEQ ID NO: 2118 - DNA, 553 bp, unidentified
  source 1..553: mol_type = unassigned DNA; note = unclassified RNA viruses ShiM-2016 sequence
tacggttttaaaaccgtacgcaatatttgccatctagctcctgatgtaaaattgagcattaatcaagtttagctctctactataaattgagtaattgttcgtgatgaaatattcatgggcgactctagctctctagtataaattgagcaatcttttatttagtgcttattgttttattgaagacgactgatggcatacggaattgtacttttaattaagggttagtatcctaatagtaaccatgataccgaataaagtaggtccaaagcaaagtgaaatttgtggaggccgtcatggcaatgctattagaactgaggatttaatgcttgacaagcgcaatatctgagcagatagtgtaaaaaatagcaacaatagttaaattattttacgatatgttatgaatatgttagacatgtattatgattcataacctctattcttaatttaactatatccaagtctcggtggatattggattctgttcgcagttaaccgtatttttacattgcccgagtcggagcggtgatattgtatccggactacttaatacaaa

SEQ ID NO: 2119 - DNA, 555 bp, unidentified
  source 1..555: mol_type = unassigned DNA; note = unclassified Picornavirales sequence
cgccttttaggctgtttttccacggctgaaggtgaaagaagtcgttacccgcctgcctacttcgggccgggctagtaacatggatactaccctaagtgtgtgatccgggtgaggttccccccctccccagaaacttgtgatgagggtcaccatcccgcatacggcgacgtatgggtgtccctgcgctggcacaaggcctgctcctgaaagggacaggcgcgcttaggatgttgaagtgtgaagacccggactgagctaggtatggagtcctccgccccctgaatgcggctaaccctaaccccggatctgtcgcaggcaatccagcctgaaggcagtcgtaacgcgtaagtctgggatgggaccgactactttggggtagcgtgtttcctttttattttattatggcgtgtatggtgacaacaatagggcattgttgttatcatacgttcagcgccttcctagctcttctacagtggttgataaccgctgtttcactgatccccagtggaatttcttggatttttctcggcttatttttaggaggatttgcttaca

SEQ ID NO: 2120 - DNA, 556 bp, unidentified
  source 1..556: mol_type = unassigned DNA; note = unclassified RNA viruses ShiM-2016 sequence
gtcagcaattccctctaatagggccgaaaccttattagactacttagtggaacagtacaactcttgcaagttgctgtaaagctgagttctcctgattttcaatcaacagaaaagagcctcattggaacgacatacaaagcgtaatcgttcgaatcaatgtcctattttcgacaggagacgtgtaagtgataacacgtgccagtcacgaccatccggtaacgacagagagctattacaaacgaaatgtattacaaatagtataattaaatctattgatacattcttagcactccatcatcttcacatagatgacgtaaattttaattcatactctaaaaaaattaacgagtatgttgatgataacggtataaaaccgttaatagacagttttaaatatttctgtttttacaggttcaataagtttattggggatcttgatacataccccaagcctgataattatttagacctccaccctaataggcatttggagaaatatctaaacagaaaactgtcaagtaaaacacctaggaactataaatttttagtgtcatta

SEQ ID NO: 2121 - DNA, 557 bp, Morsusvirus argatis
  source 1..557: mol_type = genomic DNA
gtaaccaacatcatgagaggcaccccacctacccatgcggcatcattctctcattggcaccctaatctgctcgcttagcattttgtgtacctcgccattctaaaccatactcattggggcttcattggtttaaaaccatgccgacacaaaaattccatttttgaggtctggactctctcccctcctcaccccaagagactatctgactaccgcatcatgtccagccgtctccccccgggtcggtatcgtcggcagacgccaggggttggccgcggtagacgcccggatgcttcgtcggatagcacggagtttttaggggccgggggtgacatagagcaactacgcattgcggtacaaagcctgtcggaacaattgcagagtatagaagcccgcctcgtcacggtggagaccaaactggtgcatctttacgacgttgccgtgttcccacagcggcgcaccaggccggatgtggggaatcagttaccaatgggcatgtagccgacacaaaaaacctccaattggtttaaaacatcaggatctgtcctgatgtttagacc

SEQ ID NO: 2122 - DNA, 557 bp, unidentified
  source 1..557: mol_type = unassigned DNA; note = unclassified Hepacivirus sequence
gccgctcccgaaagggagtccggcgcgtcatcccactccgaggagtggggtggcgtccccgtgtgccggggaaccatgaagcctaagggcatccacattttagaatgaacttgaagcttcgtttcgctggccggaaagtcctgggttcccatggccagggttccgcaggtgggtaaatcccggtggggttccatccaggatatacggcaggcgggcgtagtccggcggttcggacgacgtgtgggtcgcctacggtggattgttcacaggatgggcactccggtgtgaataggccccgtcagggtgcgctgacgttaaactcaggccttgcctggtgttcggggaggattgcagggccacgccgcctctaagggccgtatggcacagtacttcttcgggcgggttgtcaaggccctccaacgcgacaccagtgcctcggcaggcatggggccacccagctcggcgtcccgcacacagacggcgtaggggaaaatcagcaatgtgaccccgggtggcattttccttctctctacttccatgcatgatcaaccgcaatc

SEQ ID NO: 2123 - DNA, 558 bp, unidentified
  source 1..558: mol_type = unassigned DNA; note = unclassified RNA viruses ShiM-2016 sequence
tgggtgatgagcccggtgaagatattatattgctttttagttttattaggtagttcagttagtttttctaactgttcttaacttttactctaataagtagtatctatcttcattagcaattcatgaagtgatgtttaactcctaccacctttggtgttagagggggattcttactatcctctttaattagtaagtttgtttgggttcaagccccaactgtgaaattagcttgtagtacaatatattgaggcgtgtgactgaagaatcacacaactcgggaagtgaatacttccctctgataggagtagcagcctaccagagtattgcttatatagtttgcacgacttgaaatttccttttcctgatcgttcccgaaacgattcattaactatgagggacgtggtcctagagggactaccgtatggtaagacgatagaacgttaatctaaaaccttcccacgttaagaccaatgaggtattgttcctataccgtgacattgagtctttgacgtgtaataaaagtagttattttctaaagaggaaccgtggagacacatt

SEQ ID NO: 2124 - DNA, 559 bp, unidentified
  source 1..559: mol_type = unassigned DNA; note = unclassified Narnavirus sequence
gcctcaaaagacgaaatcgcacgacaaccctagggttgacgtgtggtggaacgcttgcgaggcggtacacgggagtcggggtgccatccgtcctaagggacgtggggccacccgacaggtactccctcgcaacacgcggcagcgtgttgcgttcctaaagttatcccccccctctgctgcccacgccaagttgttaaacttggtgtgggaggccctcctcggtgtcgcggccgcctaccgccctttgcctacctgggggagtcgtttcggtaacaagcgttgcttggaacttcaacggctcgccctgtggttagtaagggcggcagacggtcaagggatcggagcgacgatcgcgtggctaaaaggcgcggccagtggcgcccgcaacacttgtgttacaggcgcggccttgctgccttccacgcgatttctcgtcaggaagttgctgatcggcgatactcgcaatgagtcgctggaccagctgtccttcctttcccgatcccttccggaaggggactctgttgttgagtccaggacacttgtcgctcaccgcgacaat

SEQ ID NO: 2125 - DNA, 559 bp, unidentified
  source 1..559: mol_type = unassigned DNA; note = unclassified Totiviridae sequence
tattcatcaaatatatcaatcgaatccaatactttatgttcggttacaggcggtgaaacttgtaaaccttgataaaatacagaaccagattgtatattacaccacttccgttttggtggtaaaggaggtggagttggaatatacatcttaccaagattatgtttagacattttagctggttgggcagaaatgaatgtatatgtcggagcatagcagcggaccactatacacaaacatcgtatattgaggtttttctctagtttatcgttgatatgagagctcttgcgtcatacgtggcgtctgggtagctcgtactcatgttaaattaggaatcgttcaccaaaaccaaccctctttttaaacccttggaaattttatctgattctaagtaaggaacttagttaccaatgatcttagctgataataaattttccacaagcatttagtttagtgcaatcgcttatctgggatagcaacccgttagcactcaacttccaattctcctatttctggtttaaagccagcatgatccctaagcgggagatgattgtagaaatag

SEQ ID NO: 2126 - DNA, 562 bp, unidentified
  source 1..562: mol_type = unassigned DNA; note = unclassified Umbravirus sequence
ggggaatctggctcgccaccagcctcaagctcttcccacaaacttaaataaaatttaaatttaaactaggcttaaactgaaacttaaacttagacttacacttaaatttaaattttcacggtgagactcacactacctcacgtaaaacaaagttgtggcgatgtgcgtgtacagtgcacgcctagttaaatcactgggggacgtacgagctgcttgtagacacccggcagcgaaataagggtgtagcgcagctggcgcaacgatttgttaaggatctgacactggaaagacagactctcatctaattcttatccgtatgctgtgctcaccctggcgggggtttgacgcgtttgcttagagcaacatgtggacgggttttcgtggacccaggcgccgtgggcgcaagcaaggtaagcttctgccttaagagggcccccccgcccggggggtgatttagtacacacggtgtgtcttcacaaccgcggcgtgtggcacgtccagttttcaggccagggtacttttccttgatagatggaaaaaccctccactcccagcacacacg

SEQ ID NO: 2127 - DNA, 562 bp, unidentified
  source 1..562: mol_type = unassigned DNA; note = unclassified Picornavirales sequence
ccttagggtctggaatgcgtcctttctgggcacttccacaatcctaaggtaattttcaacgccagcgatggagcgatatccaaagaacctttatgttttagttcgtcttgtatgtttataaaatataaaattgggattagcaacccacaaaaacatttttgttattctcaccacatgagagggtggttaaacctcttcgtaacctatcttgcttgattggctacttgggctagatttaggacaacctctttagcaagcctaaattactcctcgtacttgcacctggtaacaggcgtacctggaggttacggtggcgctaacttggacttctcgttaattcgtgcaagtttaaatgatgcctattttgaatacaagaaagtatgatagtaacttagggcgtgaagttccgcttaacataaggcagtataagtactaagataaggtgtaagacctaccttaataactgttgtcttttctcatggtctttccgtgggagcccttgctaggggtaaagttaagtattctcaaataatttttcattcaaactctttctctctgtttt

SEQ ID NO: 2128 - DNA, 562 bp, unidentified
  source 1..562: mol_type = unassigned DNA; note = unclassified RNA viruses ShiM-2016 sequence
cgcgtaataccttgtttcacccccggccgctgccgggattttaataagcgtgtttaagcacctacgtcccaccttcgggtgtaaattacctgcgatctgcgacacaggggcgcagggtcgtgcactagtcgatcggtttgggcgggccggtcgtcgacgacggagtgctgccggtgcacgataagatggtccaggttgcaatgatccacgcgcctggtaggggacgcgggggggggttttctttatatcgactccacacgacccccccttggccgggactgtccctaactccacccttatgcctgagtagccggggctagtccggtgaacagcctgggaacgctgggaagcgatacggtgagggcgctaccgctacccgtctgcagcggtttctgttgtgtgggcgacagagtaaagtggtagtttgcgcatgtgagggtcccgaagcggagcggcctgcgagtgcagggtttagccttacctgcatgaatgtgggcttagctccgtggatgttccgtttggctcgcacggccaggtggataatagaccgcaaggtcttggc

SEQ ID NO: 2129 - DNA, 563 bp, unidentified
  source 1..563: mol_type = unassigned DNA; note = unclassified Picornavirales sequence
tggcgagcaattgattaactcgcccgcactatcacgcggattgtaagttcaaacggattgactattatgcggacctctagttcaaactttttgaagcggactattggttcaaacagatattatttcacgcggatttacagttcaaacggataagtgtgcttagatcaccttgacagctggaaagacagcaaacaacaacctttacattacttgatgcttattcagtaatggcgatgagaaatctcgtaatgactttatagagtaaagggcggaaacgtgttttactactaggagaatacatgcgagtaggttacattaggagttgattgataacgagtcctttgatggcactagtttatttcgtgcaaacccttaggataacacatggtaacatgtgcctttgggcagagctgattagactggtgaataccacaaagtgaattgtgcgtcgagccttttattgtaatatcggttactagcgttaacgaatgctagagtttgttgtataacactgcattgcggctaaagtaagtgtgagtgtttgactttagagtagtttcaag

SEQ ID NO: 2130 - DNA, 563 bp, unidentified
  source 1..563: mol_type = unassigned DNA; note = unclassified Picornavirales sequence
gcacggggtttatagccccgtgcattgatttcgacggcaagttattgtcgatagagtattacatacgttggatattaccattccttctaaggaggtctggtgttgtctttcatatgttttatgtcaaatagcaaaattttccaattaccttttacccacattttatgtttgtcttttacggttctctccgtaacacataattgtctaagtgtgtgtaaaccttttatcaggaaatagagaacttttgattgcctactttatattaatatttagcgaaatatttgcagttaggaatagttcgtcaattagtactgctccccgtaaggtgaactttttggcatgcaagtgtgagcagcaccttgtccttaactgtatttatagtagttatctaaattgatgtttggtaaggttgtcttaaggagatctgattataaggcgattggttgacgttacaactaacccccctttttctcatagcacaatttacaggagtatcacgtgcgctaccttttacctattgttcgttgtttttcatattgccgcgaggtgcaagacttcctaat

SEQ ID NO: 2131 - DNA, 563 bp, unidentified
  source 1..563: mol_type = unassigned DNA; note = unclassified RNA viruses ShiM-2016 sequence
tttcttctttttggactggaagaaattttgtgtacatatttataagtcctttttgactgccgatgtctataaaagcctggcgctagctgcatctagttgttacctaagtaggaatgtgcctttatatattagtgatttagtgaatttcatatatatttatcgttttgcatatgttttcataccctgtatatatttgtatttataaaaccttactctcattgcgtcattgcttcacgcgcaatttggagtctaaacatagctgataagcaggtaaaacattttcaattattacggacagattattgccatgtcttaaacaggcaattagtgggggagagcctcgaaccacccacattgagaggacacctaccgttcatgttcatcagacaagggacggttccttggaacttgatatagggagacatcctattgatttttccaaatcagacatagacgctatttcgcaaacaggaccagtagatagattggtaggattgaccgggaagtacacaccaacctgggcagtgcaaaaacctcctgatgttgtagttgatgtcagttac

SEQ ID NO: 2132 - DNA, 565 bp, unidentified
  source 1..565: mol_type = unassigned DNA; note = unclassified viruses sequence
actgcgtacgggaattccccgtacgcagtgtttgcaagtagtttggcatcaaatatgcccttatgtagcagagaaccttctctcacgaactacgtgttcgtgttatttagctcactccctatgtttgtctatcttcaaaaccatattctaagtatgtgaattactaactcacaccccctttatgtatttttaatggaaaagcaaaacgacggttatctagcatgttgctagacactccgtggcctattgtctctcgagactctaggcaacaacagctatgaggtcgccccctcttagctaaccttatttttattaggatggtaagtcctttgtttatgtaccttttaaacatcaatttaccgattactgattcgtccttgacgatcactctcacgagtgtcagaattatacattcagaactaagctctaatcaagagcaaaattcaactatacaggcttttagttgtcttattttataagcgatcagtgaaatatcttttcaggttttagtatggcctttagttaatacgtttcacacgttaagaactataaaacattaccaacc

SEQ ID NO: 2133 - DNA, 565 bp, unidentified
  source 1..565: mol_type = unassigned DNA; note = unclassified Riboviria sequence
caaaaaacttgactaaatatcgctaatcctaaaaatgactcgagtgattgaatttactattgagtttcatgaggatgacattggagatatcagactactctcttactactttccagatgaaactgactctccaatcacactgactccagagatgattataaaatcagttgaagacaaataccctaacatttgcatcgaacaaacactgagatatgaactaatgcagtcaggtgatctcgtagatgcgagagcagacgatgaatttgaattccacgaagatcatgtgatctttaaaggtgaggaattcagttctattatgttgtatctatatgtctctattgatgaagaacaggaatatgttgactatgaaagacgcttgaataccatttgaatccttattgacaactttatgttttatttttatttatgttctagcagtatgagcatcatttgaaaaaatttgattaaacattttgattaaaaaaacctatttgatctaagaaataaagatttaagtttcccaaactttgaacacaaagcattttacaaccccaattcttcaatc

SEQ ID NO: 2134 - DNA, 566 bp, unidentified
  source 1..566: mol_type = unassigned DNA; note = unclassified RNA viruses ShiM-2016 sequence
tcctcataaaactagaaacccagttatgattctgggtgctacggcgtagcaaaaatcatgtgtatatatggataccaagtattatatgtttttgtatgtttgtgcttattgtgcttaggctttatacatatcggcattccacaaaaggaatacacctttttaggtgaggtttcgccagccaatgtaaaatataccactcatggcactgagcaatgctttgagattgtaaaatatcgcttactattaataatttgtataataaaaatgtgagagtaaatggatgtgaaattacctatgagcagccaaccattctcgagattttatcagatcttaaaaagtttggaataaatcccaaccgatttgataagttgtggcgtaaaaaccgcaaacatttaggtaaacgggtcgaatcttttgatggtgtaaccattccttcacaaaggattgtttatactaccgatatttctaccttagagccgcatagtgggactgaagcaacagtttcaacagcggacgctgaaacaaagactgccaacttgcaattcgttgatgatgttagtccacat

SEQ ID NO: 2135 - DNA, 567 bp, unidentified
  source 1..567: mol_type = unassigned DNA; note = unclassified Riboviria sequence
gtttgggttcgtcagttggaggctgttttgggctcggcccctggcatagtcggggctttcgttaaagggcggtggacaccagacctcccctctagcgatcgctccgtcggtgctaaccttgccctcagccatccgacaggtggtgcaaagatccttggtgggggatctgtccgtggcggcactgcaggacaaccgcgtagggaaacctacattgttgtggagctatctgatggctccagggaaactgttttccctgaactgctgggtcgtttggcatcttattctcttctcagagagagaaacgccgatcttgtttctgcccttcgccttcgggcgcaggagtggtgcaagaatgctgggctttcgagcacagtgtcttggtgggctgtttgttcagccatcaagttggcgtggcccgtgtcggagttggaaacctcggtttccgacgtcgtaggggtcgggatgtcaaccacttcttttcctggtctggcttaggccagatcctttgaccttaaggggctttgctttggtgaatgtcccggccctcttcttgagggttccaccctg

SEQ ID NO: 2136 - DNA, 571 bp, unidentified
  source 1..571: mol_type = unassigned DNA; note = unclassified Picornavirales sequence
gcgaggataccctcaccggtatcttcgcagactctaaacaatctatacagcgtgtgtatacacgtttgtttgatatgattgttcatttgatttaataatgttttattgcctcagagtgaaatctgaggtttggaagcttacatgcttttaaaatattcattgccaccatggtttacgcaccataggtggtttgtttcattgaatagttgttgatttctcgtataaaaacacacaccctccaaagttggaggtctggtttctaagtgcataagcttggaagttaattgtgtggattgtggccgagaagctgctattgatcttgtttaagatggctcgatcgtaattgtaaaatcatctctctatgtaaatagtgaaaattgccaaaacgcacgtaaaacacattgtcgtgttagtcgtggtctacagagtattgtaggaaagataggtttgctcagcctttaaatgagatgatggtgtaaacaccccctgtctgacacagaggaagaaatgtcaaccgtttagtgtagttcgagcacttattatcgaatcggtaggtccaccgtaaggacat

SEQ ID NO: 2137 - DNA, 571 bp, unidentified
  source 1..571: mol_type = unassigned DNA; note = unclassified Picornavirales sequence
tagtgacccaggggggggacttgcgagtccacctctgaggaatctatttaacgccctggactagcgtatagtccatgctgtcgttttgcacaaaaacgtttaaatgtttgtttgttattacatttgcacacatgtaactccaacacaccctatcctaagtacattacctcgtggtattatgatactggcagaaacagaagttgttggagtgaccttttagacaacagtttagaaagtggcgggagtatcgaacccaagcgctagattgttgtatattagctcaattcattcaattatgtgactgtacatgacaaataccattagaaatcttatcaccaccactggttagcaacccagatgtctttggcattgcacggtctgctataaggtggaaccatggggtaagcttcgcaagactaagatactaagtccaagagtaagggttaagaatttcttccctgtggcagtaccactcaaggatgaatggtcataaggaggggtcctatgactgaggtattataggtgatgaaccagcgcgcatggctgtcttctagcgaagtaaaataaatat

SEQ ID NO: 2138 - DNA, 572 bp, unidentified
  source 1..572: mol_type = unassigned DNA; note = unclassified RNA viruses ShiM-2016 sequence
gtgcgcagggtttttatccctgcgcacagctttactgatcatggtgattttcttgaggcatatatcggcacctatgtagtcactgaacttttgtgttaagagagtggctttatcacaatgagtttatctgcatatttgtcgttattatgtcttccttttgcaccaagatcatttctagtgtgaatgaattatgtatgaatgtgaacaaaaatatagataacctaccggttctttcaatttcgtattctttatacattacatacttgtacctttgctactattttgagccttcggaaagctctttgagtgggtagtagtatatgttaccttaatgctaatatgtacgggacgatgtatgtccttacagtgcttgattagatgatagtgatgatagatatcactgcgtgattcgttggtagagcaatactgtattgcatatgatcccctaggcggatgagcattatgtcgtagtatgatagatctttattttcttttgaagttttatacgtttaagggttttacgttaaaacctcagagttcattgcttatattttatattgttcattataaac

SEQ ID NO: 2139 - DNA, 573 bp, unidentified
  source 1..573: mol_type = unassigned DNA; note = Hubei picorna-like virus 78 strain WHSF6879 hypothetical protein 11 sequence
ctgtaaggttactcccttacaggttctttgataatatattacagctgatttgatatcttacttgtgaacattcagatctgttttaaaacacttttctgaaatgcttagcttgtattttattattttcagtgtaactatcatctttatctggtgatgttgctctcaaattttgttaaatttgttagttcagcatgctttttatcgtatggtttttacagtaatatatttgatgagaaaccttttggaaaaaacgtttactttaatgtaaacagtttaattcatattcatttattaatattttcattttcttgtactttgtacattcattttcatattgtcccttggatttaaaggacttcttaattgagaaacagctctctgcggagagtgtaaataacttatctggggtagtaacccgttaacagtttcaatacattttgaatatccttaaagtcttcccttcccgtatttaagctataagactcggcgagttccgacgatggcaattttgttttatcttttcttacggagtatgattatttgctttttaatgatagtagtaacttcggttca

SEQ ID NO: 2140 - DNA, 573 bp, unidentified
  source 1..573: mol_type = unassigned DNA; note = unclassified RNA viruses ShiM-2016 sequence
gtgtgtgtgtgtgtgtgcgtgtgttagtcagagttctttgggggccacaagttctcggtcacgacagccgaccggccttctattggcaggccggcggtcagggacgtagcatatcaggggcatcatctcccgctcgctcgccccagaggtcaacccgcctgacggcggaatcggctcaacggggcgatcgggacgattagggtaggtagctctgcttccgctggactcgcgtgccgcagaaggcgaagagggggcaaacaacgacctatgcaccgaccatatccgaccaattcacatcccgggtacgcgactccgggaactcggtccacaaaatagaatttcacgctcgtccctagcgactttctgaaaaccgaaagtcttccgctgggatcgtgcgggggcgtgtaagtggggcggtgcgtgttcttaagttggtgttaacagctgcgccgcgactatatgtaggtgtgtgtgcgtgtgtgtgtgtgtcgcgtcgtgtcgagtcgtgttgtccgcacatttgagtcgtgctgtccgcaccttttcttttcagtgtgttagaatacccgaggc

SEQ ID NO: 2141 - DNA, 574 bp, unidentified
  source 1..574: mol_type = unassigned DNA; note = unclassified RNA viruses ShiM-2016 sequence
gattaagttactttaaatggatttatcaaccattgtatttttagtatctttcctccttgttgggaggtaaaatttgtggacttgatttagttagtatttagaaagttttcgtccaacttttgtttgatatactgtgccgtcatattcttggcacaattaagggttgacaccccggtaattgctcatgaattgataattctgagcaactttgtttgatctcttatgtaagagttatttactccatagaagagtttcatgttggtgatacgtatgattgtggacccgtctcgtagggttattttaaacacatgattttaacccagtttgttccggctgggagtacaaaacaagacttctgagggtggcaccgatgaagagtcttgagccataattgaaataaatctatgtgaggctttgtttggattgtttagtaatctgtacgcgacgtttaaggtattcaaaaaccttggcttcggccgtaagacgtgcatgatcgctttacatgaatttcattgttaatttcgcattagagtgatgctttgttgttgagcacgcacttttattctttatcgct

SEQ ID NO: 2142 - DNA, 575 bp, unidentified
  source 1..575: mol_type = unassigned DNA; note = unclassified Picornavirales sequence
cccagcctgggcacctttttaggtttatggttagcgtttccctttaacgcgaattctagtataaggttcgctggctttgccgcaccttatattctctctttcctcttattatcccatctagttttcaatcttttcttcaactagtcactctttctaatttttcccttctattttgggggcagagtaagtctgttacctgagtggatagaggtacacctctcgagtccaaaccttttctttttgatagtttgatcgcttcggtgggcacatagtgatgagaagtaagcggtcacaggaggatacaagtctagtttccatggtagttgagaagttttgagatcgttgtgatacgtgccctacagctgggtaggatgtccgagtggacaccatctcgtggtgacttcaatacattgcttctggaggacttggcttatggtgttggctaacaccggaaaatagcatatttgttgggtagaaacttgactagtgttagggtggtggtaacgaacaaaccctttgccagtactatatgtccgtgcataaataccgatttttgcccccaaaaccgctttttc

SEQ ID NO: 2143 - DNA, 575 bp, unidentified
  source 1..575: mol_type = unassigned DNA; note = unclassified ssRNA positive-strand viruses sequence
gggaaatttgtgagattatcgccctaaaggataactctcatgcgggtccgagtcccgcctgggaacgatatgtcacgtcaaatggtggtagggaaaccgttgaaccaccagaccaccctggtccggcttgtaggctgcgtgggctgacggaacagcagttggcgaggagctgcgctatgtaataacgggtggcccgttcctagtcatcgtcgaggggcaaataatcgctcccacttcggtgtcctcgatgtgaaaacaaactcggttttctcgcgggttggttacctgctccagtgagtcgattaaatggggattagtgctgtagggccccagccacaggttcggcactggtgtaacaaccgtcacccaggccagggtgtatgttttggccaaagacacctctagttccctgccattccggggaaggcggttttccgctaggtggagaaccaggctattctgtttgcagattggtgcgtgttagcctggactgtgggtgtcagtcaactcacctgtgagagatggtcatagatgcctcagtttaatcttagccttgaccgggtcagcgctccctt

SEQ ID NO: 2144 - DNA, 578 bp, unidentified
  source 1..578: mol_type = unassigned DNA; note = unclassified viruses sequence
tatcttcctcccccccgcccggcatggcttaaaagttccagaatgcaacaatgaaggttacgttatgagtaaacggtcttggtggtccactttactgtgggtcaccctgcactgtctctaagcttgcactgctgtgccaatcatgagcgtttgttagttaagctgcatccacttcactgtggatgaagaagtcgttctccgtcttcactttcagcatatcggagcctcagtgcgttctgacattaatttgttggacccctgttgagtgatatggaatgacccggcagtaatgtcgttaggtagggccccggtgcgcttcgctgcgtgcacccctactgtatgcaacctgtgatccattacaccattggcccattaggctaggttgctgtccgagccgatcgtcctaattagacgagcatcgtgagcacataactcactacgtcgctgtgttacgttggtccccaccctccgtagactcacccacagcccgtgaaggaatacaaggtgtccttctgtgtagagactgcacgctcggcggtctagttgccacactaggctgaaaggaacagtccacccac

SEQ ID NO: 2145 - DNA, 578 bp, unidentified
  source 1..578: mol_type = unassigned DNA; note = unclassified Picornavirales sequence
ataactccttaaagagaacaatacttataggcaataacaacaatgcaacaatggaagttaacacaggaggattagaggttattacagtctctaactcaaatataacgatcatacctaaagaattttcattaacatttacatcttacaatgcccagcaaacgttgtcactattcccatttcaaccattaccactaaataatttacccgaatatttaacttttgacagaaaatataaaactaccactccttttactttaacgtttccaactgaaatgtctcaggttgtgatggatatatttgggttagttataccagcaaattcccttagtggattaacaattaattatgtcattcaagattcagatgcttttgtgtttcaaccccagatttacccgaatcttatagttaaatctaagtcaaattcagtgaaccgctcagacgttatttctccaagcactcgtctggtttatcccaatggtttcaatggggatataattttatccttcgaaaccttgcgaggcacgccacttttatctgattctcccttggtatttattgttagtttgagttaaggaggc

SEQ ID NO: 2146 - DNA, 578 bp, unidentified
  source 1..578: mol_type = unassigned DNA; note = unclassified RNA viruses ShiM-2016 sequence
cctcgtacggacgttaaccgtccgtacgagatatagtctagttggcagcttaaacccgctgcccaggttctacctgtattttaggtactgttctggtttgctctggaatgggatcgcatcgtacatggaagaaccatgacgatgtcccactgtagagtgtaccacactgttactgctacgattgacagctatataaaagtttttaatggagggggagttaacctctgtaaaaaatcataaacccttataaagtgtttttcatactgattcaaaggcttgcacttgataaagcctcaagatctaaccccataatcaatgggattactgtgcatacggaagtaccggagccagttcttatgatggtattcgcttatatgccgaaaataaagcccccgtcctaacaaaacaaggtgggcaccctacacgggtggacaccgagccgtagagtcacgggaagtgtagatttgaaagagcttgctcttagtctgcttctatacgcttgacagagatttgagttttgcacttgtgtatatagcgtctcatttgtcttgttaaaacgtgtctcgatttgttgtcga

SEQ ID NO: 2147 - DNA, 579 bp, unidentified
  source 1..579: mol_type = unassigned DNA; note = unclassified RNA viruses ShiM-2016 sequence
actcacccttttacaataaaatttctactagtaaaagtaaaaggatgcttaaccgttaaatgctatcacactaaccgcgtgctctatttagagttatatcctaggatgcgcgaagagcaaacctcttaatatccaaggaactagtagtcgagtaaatgcactaagttatgctttactttaaataaataacttgcgaatcaacaaaataataataatgaaataaataatgtagcaccccctagttttaatgacgcaccagatgcatctttgcttcctaccgaacagatatcttcacttgtaacgcacgatgatggaggaactcctcatgaatattattcttctaaacctattcacgaactatcacaaattgaacaagcgactggtaacgagtttactaaatctttggataatttcctttctacacccattagggtagcagctggtacttggactactacacagacggcaaatactgacctgcaaaccttaaattttccggatgtcttgcttaacaaaacattgattgcaaacaaattagatggttttgctttcttgcatgctcgtgttaagtttcaggtg

SEQ ID NO: 2148 - DNA, 580 bp, unidentified
  source 1..580: mol_type = unassigned DNA; note = unclassified vectors sequence
ttgcaataattgactcagatccagttttatagaatcttctcagggatagtgataacatctatttagtaatccgtccattagaggagacacttttaattgatcaatatactaaaggtgctttacaccattgtcttttttctctcctaaatgtagaacttaacaaaagactcataatatacttgtttttaaaggattgattgatgaaagatcataactaataacattacaaataatcctactataatcaatacggtgattcaaatgttaatctttctcattgcacatactttttgcccttatcctcaaattgcctgcatgcttacatctgaggatagccagtgtgacttggattggaaatgtggagaaaaaatcgggacccatttctaggttgttcacaatccaagtacagacattgcccttctaattaagaaaaaatcggcgatgaagattaagccgacagtgagcgtaatcttcatctctcttagattatttgttttccagagtaggggtcgtcaggtccttttcaatcgtgtaaccaaaataaactccactagaaggatattgtggggctagcaacaca

SEQ ID NO: 2149 - DNA, 582 bp, unidentified
  source 1..582: mol_type = unassigned DNA; note = unclassified Picornavirales sequence
gcatgatacattttaaaattcccattttgggacgttgattattgcgtgatataatcattttcctttggacgttgactgttgcgtgattcagtcgtctttttcctcttgtgttattttctctatttaataaatccaaaaacaaatagagtttagtttccattttatattatttcgggcatcgttttggtcaagcgatgtagatcatatgtatgatcatttgttagcttatgtttaggaaagcattacgaatattcttaagatacaggagttttgcttgcggcgtggtacccgtaagacctcacaccagaaaattagttattttaatttgttgtctcactgccttgacccgttgcgattagaaagtaccaggattggtgccatgtgcttccgttatatcctgcgaaatcgataatgtcgactgcggctggatgggctttgtttcagggcaacattgagaaataccaaaaatatgtttatgtgtgagtggctcccgaggtcggggatattcactgtgatgggcttctgaacataagagtactaacatgtgtgagtacttgtgatgtgaccacctttttaaacatt

SEQ ID NO: 2150 - DNA, 583 bp, unidentified
  source 1..583: mol_type = unassigned DNA; note = unclassified Cucumovirus sequence
tttggtgtctttccaaccgacgtatgattgtcctatggaaagacaccaaagcgggaagatcatggttatgtaacgaaacgcattgcccatctataggagacaactccttgtcgcctagatcagctaagtaaattctcaaagacccttcagcatcagtggaaactgttcgagtaacagcacataatacctgggggacgctcatatatccttttgagcacaattcaccaacatcatatccagacttaaagaaggaagcaatacgaccgtgggtcatctcgggaacgaggggccggactgaaatagcattatcagcacgcatccaatgatgccggcctaggtcacactcagtagccattttcttaatggcttcagggctaaataatatcttttgaagatcgtcagacgtagccgctgaggactgttgagttaaagtcctactggtaccttggaaagccatgcctcggtaatcttaccactgtgtgtgtgcgtgtgtgtgtgtcgagtcgtgttgtccgcacatttgagtcgtgctgtccgcacatatattttatctttctttttcagtgtgttagattcccgaggc

SEQ ID NO: 2151 - DNA, 583 bp, unidentified
  source 1..583: mol_type = unassigned DNA; note = unclassified RNA viruses ShiM-2016 sequence
tttatagatatttatatctatatctttttcacgttggaaggttttaacattctttgaatggtttttctttcaacacccatctatcattcattttattaactcattattcttttaatcatttcttcgttttttcagatttactcttgtcttcggagtaatgactatcaacctcttataatgagtgtttatattatttgatgaatttattgaatcactacattaatttgtggtagttggtgaccctgggtttgaacgtaccctcggaaaaatcctgtttcaatatttacatcatttaatatgaatgttctcgagctgaactcaatgtagctcatcctaaataaatctttgagagtttgcgcgactaaagtgccaagatgtggaattcatccatgagtaaacatgtaaaaacgtgcgccacttaataatatcttccgtgatccaatggtggtggggtgtcccgactcgaagaggtgaccgcgcacttgagaccgttgcgacatacgatctcccctgttgctttgggttaaaagcatgtccttctctccaattacgttttatggttacaacttttgctatatagata

SEQ ID NO: 2152 - DNA, 585 bp, unidentified
  source 1..585: mol_type = unassigned DNA; note = Hydrocotyle vulgaris tombusvirus strain pt175-tom-27, complete1 sequence
caacggggctgatttcttgccctttcgggcggtttgtttgccctttcgggcggcttgcttttcagcaggctgggtacctttccgcacctgtgagtaactagctttcgctggttgcatggcggtaatactctctattaccgccatgcaaccagcgaaagctagttactcacaggtgctgaaaggtacccagcctgctgaaaagcaagccgcccgaaagggcaaacaaaccgcccgaaagggcaagaaatcagccccgttggaagtggctttgggtaagttgttgcccggagtgcatttggggtggttgggtaaggttgtggctgagttggccaagcctagccctgggtctgcggaggcctcgcaacctccgttgttcagagcgctcactgctgctctgaaggtgattggcggccaggacatcgatgctgccaatgcgtacaggaacagctctgccgtgaaagagtacgtgggaaaggtctttccccgtccgggaaacgccaagcagagcgaggggccggcaacgaacgtggctccgttgaacagcaagcagcgtcgggcgctcaagcgtgccgacaaacaggccgc

SEQ ID NO: 2153 - DNA, 585 bp, unidentified
  source 1..585: mol_type = unassigned DNA; note = unclassified RNA viruses ShiM-2016 sequence
gtagacggcgaaccgtcaccccaacccccccctcctccgccaccaagtccggaaccagaaccagaacccaaaccagccccacctccaacgaggttttggggatatgagggtaaaccaacctcccgagtttcaacagctcgcaatgatcagttcatagatgtcaaacctttgacatttataaaactgtacaaatgggagaatgaacattggagtaatgaaaattttactgccaattatctacaaaatgatcgcgagaaagcaaccccctatttcctaatccccgcagataagggggaattcacagtctatatagagaccgatggggaatacaaagtccgtgcaatcacagatcctaacaagggtaaatgggcaggctttgtagctttcaacgcagatcaagacggctggttcgcacgtgagtattcaggagtcaagatttcaaactatcaagctacacgtagctttgtcgttggacatcctgatgctgaggtcaataactgccacttccaaggttctcgagcagtagaaagtgattactactgctcctttgacctctccgtggccgaggatggtgcttattgggct

SEQ ID NO: 2154 - DNA, 585 bp, unidentified
  source 1..585: mol_type = unassigned DNA; note = unclassified RNA viruses ShiM-2016 sequence
cctcccctttcctccatgccaccgattctggcccctcacagggcggtctttcggtggaagtgacatggaagaaaggcgggggagggggggtcacgcccgctgacatggtgtcagcgggctatgccggcgaaccggaagggctacctgcccttgtgaggtgaatccgtggagagaataagagaacgcgttactggtggctttacaaccgagaagaccatcaagatctcgaatggcactgccacccgagtaaactatgctggcgtcaaggtaacgaagaccatccaggacacgctgactcctaacttcacggccttgctaaaatgcggacaattccttccgctaaatccagtacgaatcaccactgctactgaaacccgagtttcttcgggtgacggttgcaagatctggcccaattacaacccgggctacatctattttgatggtgatgttggtggtacgagcttctttacgagcgcgtattgccctccttggcccacgattggtgacaacgacggtttgattaacgccgctgtcgtcgcagcccgcagtaatgcggtgtctgatacgtgggatgtgttgacgttt

SEQ ID NO: 2155 - DNA, 587 bp, Mossman narmovirus
  source 1..587: mol_type = genomic DNA
gatcaagtcagccatcggtgggagtgttagagctcttccaatattcagttcatcactaggtaacctataagctcattagtaccagaatgtgatatgtttccgatacggggtgtcacactatgatacacaacagcgatagtacagattagtagttatatgcaggtctctaatacttaatggtacgacatctcaatcagacaaatcattaagcaccagccacgatcagtgtctcactctatagctacaacaatgagtcttcctatacagaccttccaagcactgtatatcacacttataatgggtaagggctagtttcagtcagatagtatatattgtttgggttaataatctaacaacaaaaaacttagggcaaaagaccctttaatcctggatctctgtacagtgccagacagaccaatccatagctccccactcacagtctcctcactagcaatcaccggaggattcgttgtggtaagtcatatagagctatatttatactttcaccaaattctatattcactgtcagcatccgctggatcttgtcttacaatctgttgcagggaactctatatctggattaaatc

SEQ ID NO: 2156 - DNA, 588 bp, unidentified
  source 1..588: mol_type = unassigned DNA; note = Beihai sipunculid worm virus 6 strain BHNXC41400 polyprotein gene,1 sequence
gtgcgctcgcaaaatgcgagcgcacacctgcaggtttatgatgttgttcttacgtcttatgacaacctgcggtggttagaaccaccttgactcgaactgagtcgaattaaattttaacgactgaaggatagacggttccccgcccgtcgactcctaatcggtgatccttaattttgatcgtgtttgacgatcttgatatggcccgtttgacgtgcctgaggtagttttcttagtcagaaagccttagggattacacgttagacggaattgatagattttatttcacgagatttgttttggtgaaacgttgacctcggcctgagcctactagatgatatgaaatctcgcactttccagtaccagcggaaatccgccgtactcagtgttagtgcagtgattgatttgatttaagttttatcagtttgtcgacgaataaaggagttaggtcccaaccttacaatagggatacctaaagaattcagacccgtgtaatgcgggccctcttcggaggtgtttgggctagtaccccactgataccacagtgttagttttactcctacgactgatttaaagtcatctgctcgacaa

SEQ ID NO: 2157 - DNA, 588 bp, unidentified
  source 1..588: mol_type = unassigned DNA; note = unclassified Picornavirales sequence
ctatggccacccagccatagtattgcggattagcgtcccattaagattttaatttagctattcacaaccttttgttctttctttgattgacttaagccgctgtgtctcacccttttttgtaacctatttatttttctccggattaatatttagccgctacatcccaccccctccacctcgattgcccatttacgacggtttttctgttacttcattgtaactgctctctctctctcggaatttcggtgatctctcgtactagcatagattacgagaacgatgccaatttgttgacttcgctcttcttttgctttgacgaatacatataagtcacgtacttttaaatgtccctttagacatgtttattaaagggaaagtgcgtatcaggatatgtatcaggtaccctgaaagtcataaggttagactttcacattagggatacgattacggcccagaatcattggattctctgggttatacgtaatacacacgcttattacaagcttctcttcttagatgttaatcattcaggcgaatggaacgcgcgtctcacgaccgtaagtactaatagccaatcacgaatttgaa

SEQ ID NO: 2158 - DNA, 589 bp, unidentified
  source 1..589: mol_type = unassigned DNA; note = unclassified Bacillarnavirus sequence
ggactcttccatcacccatttatatgtttgtattttacatatttatatattaagtgtttatttcttttgctgagaaatatgtacagaccactaatgtctataaactataagagtgtgcagtctcatacttgttcccacgggaaattgacgtgtatatattagtgatttagcgtatttaatatttatttgtcgttctgcatatttttacgtaccctgtatattacattttcatagaactttcagtctgtctagcccatgacttcactgctagatttgactataaacatagtgataagtcggttctacatttacacaattacaagccgctggcaattgctttacaaatattgccaaccgtgtgggaaaatctccagaaaatacacacttgaaaggagatgagctacctcaggtttattcacatcccagagatgatccattggaattagatatttcacctatccagggactacagcgccaggttacgatcggtaatctctcatctgaatctttagagatatctgaggaaattcagtcggagaaagtggaaatacaaccacttgatgatcgtgagagagaaattacagaatta

SEQ ID NO: 2159 - DNA, 590 bp, unidentified
  source 1..590: mol_type = unassigned DNA; note = unclassified Closterovirus sequence
gctgcgtacagcgaaagtcaaggacttgaagctagctccgagttttgactttcgctgtacgcagcgattacataatttcgcgcatctggcgcgcctttaataccgttggagtcctgcacttcttcggcactgatacaaccactacggtggttaaggagttttcggctgctgggccgatcgtccctttacggaaatcctgttttccgttctctgttcgcgctgctgttcgcgcgattaaagctgccggacgtcctattgacgctccgcgctccggatgcctctgtggcctccctgttatcgacacatctggtgtcgtgcgtccccgctctgttgcgggcgtttggaggtatgctctgtgtaaacctccccttactgctgccgccaagaggtccatccgcaaggcgaagaaagattctgcattctttctcagccgggcttcttctctcttctctcgggaagtcccctgcggcacgcgtcacagacttcgcaagcgtgttgcgaaactagctgaccccactgtgcgtgaaagtccccaagacaagactaaacttaaggggcgccgacatggcaaaaactctgacctcccgtat

SEQ ID NO: 2160 - DNA, 592 bp, unidentified
  source 1..592: mol_type = unassigned DNA; note = unclassified Picornavirales sequence
ttgggaaatccccaatgcttctttcaacaccgcctgactatgcggtggcgcttcggctcaaacaactagtcacttccccctcttaactactacccaagacttctaactacccttacctacttatttgtctaaatttcaaacttttattctcacgcgtcttataaacatcttttctatttgttatggtatgttttgtgatttgtgtggtgtatttcatttaatgggatctagtggaccgtgccccggttgggtatccgctccctttaaatgtttgcaagcactcttgacattataacctatcatttagtttacttgtttgtatgatcgtatttctgaatcgtaacatttatgcaattctttctcgccgagacttgtctaggagataaagttcctgcatatttagtgttacggttgtataatggagacttagatagcttcacactgaggacgctttttcgctatccttttgacctgattcaggccagtgtggagttaatgattgtatggatgggccctacaatttgtctaagacttggtgatagcctcgcggccgctcgccatttatacaactgaatagcggttgaaactctct

SEQ ID NO: 2161 - DNA, 596 bp, unidentified
  source 1..596: mol_type = unassigned DNA; note = unclassified RNA viruses ShiM-2016 sequence
gcggaagaaaaaccgcacacatatactaagcataaatcgaaggagatttaaagtgaagcatttatttaatatcgtaacaatgaatgtgaaggagccctttttatgttaatgtacaaacaaattgacaaccccccgtctacgcagacattaaatgctgtcttttatatattgagattaaaataatattttgtgattatagaaaacacatcaatttcttactccagagatagtaggagtctaaaactaatacaaaaccgaaatacactattcgaagtaagttctcgagggtagtgttatttcaaacgggacgcacaagagctaactagttaaagacactcttgcccacaaattgaagttccgaacgctgtaagaccgcaggacccttttatattatgaatactactattacgaatgtagtcgttagaatatttatttatataaataccaatcttcaatttctttatcgtatgatagtgacattttgtcatttagaagattactttatatatatatatattactttcaacgtcattttaacgtgtgatcttatataatgtcccatgcatttaatgcggctattagttcgctcataaaat

SEQ ID NO: 2162 - DNA, 597 bp, unidentified
  source 1..597: mol_type = unassigned DNA; note = unclassified Anphevirus sequence
ttgcatgtccagtaaccacacatatatcacgtcaatctcgatgtggtcattgtctcagaaaaacagaagggggtccttaattggcaattgtttgttcatacttgaatctcctgtaaaaaaaaccttcgagtgcctttatacttaattaagactagtaattatattttatacacataattttttatgttatacaccatgcatatacacatagctgtatctcttatcacattttaagaaaaaccgaacaaaagatggatcgagccggaaacacaccacaaaacccacatggagccatcagggatagtggatggatcactgtaaatggtcaactaccacctaatgacctagaacctcctgaaaggaagggcggaattacatctcaaccggtatacggctattgtaggcggtgtgattccgttgtccaggtcaaaccttctcccttttccagtcattatcgaaatggtcgagtaattgactctaagaagtcatcagtctgtgttactccctattatctaaccccatgagagaataaaggcacctacttgactcccactgtgagaagttgagccaaacgatttagaaaaacccgagtccaag

SEQ ID NO: 2163 - DNA, 597 bp, unidentified
  source 1..597: mol_type = unassigned DNA; note = unclassified Picornavirales sequence
cggaacgttgtatgctcagggcgtaggcaccacccacgggtggtgcctacacgtgtggactaaaccacacactcttttcagcacttagtgctgctatctctttttgtaacttagaagtttgtacacaatgcgttagggccacacatccagtgtggtatcgcaaagcacttctgtttccccggtgctagtaggagggtggctgctccacggccacttgccgaacccatcgttacccgactcattacttcgcaaagcctagtaacccagttgaagcaagcccggcgtgttccggtcaggaaaaaccccccctggccagaaacatgtgatgagggtgggctatccccactggtgacagtgagccctccctgcgttggcacatggcccgatctgggcgtggttcttgtggatgctgccgaagagccccgtgagctagtgtttataccgccggcctcgtgaatgcggctaaccctaaccccggagcagaggctactgaagccacagtagtcgctgtcgtaacgagtaattctgggatgggaccgactactttcgagtgtccgtgtttcctttattcttttattgttgtttatggtgacaaac

SEQ ID NO: 2164 - DNA, 597 bp, unidentified
  source 1..597: mol_type = unassigned DNA; note = unclassified RNA viruses ShiM-2016 sequence
tttgaacccacgctgtctataagtctagtgtaaccgtggctgtccccacgctgaatagcatgtgaaaccgtggccgtagaatgattgtacacttctaaagaactgtgcaatatttaacctttttcccttacgattttattctatatatcagaagcaagcgttgattgatatatactatacttttgtacaatggaaaattgtattagtttttaagattttagttataagcttctatcttctcctatatgctagttgactagtaggatgcgatctcctcttgaagaaacacacagcggattcgaccccgtctgttggcgcatttcaggtgattattttggaactccgttatcttcggaggtaggcaccatggctagaacccatggcggcttgtagtctcttataacttttgatccctcgataggcatgagcaaagtagcttagaataactcctcatgactggattgttagcgcatttcatccagcgcacttggaagatgattttatgagatatacgcgagccgtagaaggtcagtccctgaaataagggtggcattaccggaaacgctatcaccaattgaaagccgcaacccatataac

SEQ ID NO: 2165 - DNA, 598 bp, unidentified
  source 1..598: mol_type = unassigned DNA; note = unclassified Anphevirus sequence
tcgtctgtaggaactgtgtcttagtaagattaatcataatagtataacggtattaatctaatccttttgggtgagttataaccatcacctatctgcctaaacgtatctagtgcgatctatgtgtaagttagcctttagaagctttataataataataataggcatcggaagcaagtgtggtatcattataaaaacccgccagttacaaatcatgcctgtttcaatagcttgtgcacattgccactatcccattgacatccagtcagttggtgctcccagtgatattgggataaactgcaagatgtgtggaaaaacatcatacgtaatcaatgccccattttaacatgggtaggtagaaccgccacaccaggtttatatttatcttttgctcaagcacaatgcaacctagcaaatgcattaatatatctatatattttgaagattatacatattgtgcagctacattatcatcactgtgaggcttcttttctttatttatatttggctaatttattcaatgtataggttctcttgcttataaaaaacccgccagttacagatcacttgtcgtgtatttggaacattgaaaatcgaaaat

SEQ ID NO: 2166 - DNA, 600 bp, unidentified
  source 1..600: mol_type = unassigned DNA; note = unclassified Riboviria sequence
gcgggttaccccgcatggcgttttgaacgtgtcaaccacgatacggttgctgtaggggcaccagctgtgtcccacctcttgctagcggagctcgttagccggtgccggtacgttaagtcggcaacataggagttagttttatttcttctttactatattctttgttttccaggttgtctgcataccgagagctgctaccggtgcgcccgccggggttaactgcatggctagcatgcagctgtggccgccaaaagtgcagatgtagtgactatcgttgcggtctttgatttcagggggcattgtacgcatcctgtatcgaacgggtcagttggggtaggctacgggtgaaaccccagtggtatcctaataatatttattaggaccagaggcacgctaacgcagcggataatggtgagtttcaagggacaaaaaccattcaacgctggggctcgggtgtcactcctgattcgcgaatacatggtgtgtacaatgtgataactcttgtcattgaagaccccatcgtaagctacaccctatgcgtttagggctactcaggggcatgttaggttttaaagcccatatgtttgttagtatgccagg

SEQ ID NO: 2167 - DNA, 600 bp, unidentified
  source 1..600: mol_type = unassigned DNA; note = unclassified RNA viruses ShiM-2016 sequence
ctagactggtcatgtattttgtgatcatgctacgcgaatggcgagactgtcaattaggacagcctcggtgtagatactgatagtatctccgggtctcttatatttcagtaatgaaaggaggagaatactttggaaacaaattttgcgttaagcttaactactctaaccaaagtaacaaccgcagtctgtaaagcactacgatcattaggtttgtcaaagagaaaagaacacgcaatcgaggatatattgataaaacaattgtcctcctcggggcctgagtatgttttaaaacgcttatccgaattaacggactggcgaaagaaacatctcgagggagagctaagttacgctcccgcatggcacaagaagagtacgttaaaggatggaacaactaaaccatctgataggctgggaagccaagtctggaaattatcagacaaagctttcttttgtgtagttggttgcttgaggaaaagtatagagttaaatataccaaccgaaaagcagctttctaaatggttagagggggtaaggtgcgaaatcacatcaatacccagcaagactataacgctatccccaccagttgaaacaattgactgg

SEQ ID NO: 2168 - DNA, 602 bp, unidentified
  source 1..602: mol_type = unassigned DNA; note = unclassified Picornavirales sequence
gccagttcagggctgtaatcctgggaaatggaccgaatccatcagtgatgtagacctgttttgtacggaaaagcattcaggttagatcaccgtttgttgggatacgttaatcctcacacccccccccattccatttgtatttaatgtttagccgggtggtgtccggtatataaattaccaatgtttaacggatttgtttgtgtaccttcggtctgaaatcctaatgctggataatccttggcgtctgtgtttcacggtcttggaccctctttaggtgaatatgattgcaacctgtcggccctcttcggagcgtttagacatatcatattcttgggtcgctagcgcttgctctaaaccctcttagttgaaaattagagcacgtacgaactttagtggtcagggtgtacgttaaccacctataaaggtcatgtttatccacatcgaccctcaaggctaaccctttgagttaaaatcggatatcacttcgtcaaaattcgtcttcggtttctgcctccgcgtcttcggtttcggttagcgtatcttcggcttcgattcatgctttggaaaagcgtgttgagaaattgtctcttattgtgactaag

SEQ ID NO: 2169 - DNA, 602 bp, unidentified
  source 1..602: mol_type = unassigned DNA; note = unclassified RNA viruses ShiM-2016 sequence
agtgtcgcaacgaaagcaatgccccctacctctttgatcgtccttcatggtgggaaccgtgttggaatgcattgagggtggagagaaaacttctttaggttagtatcgatatccaattttgtgcgtggaaagcttgagctggctgaccacattttgcacttacttagcttgcgaaccaaaagaataatctagcgttcaatctgcttaagattgacagagagaggtggtatcctctccaagctgacactgagcttgtggataaagacagtggggaaggcgtaaaggttcaacaggaaactgtccggtttcatgacaatcaaaaatcttattcatacaagattccgactgcacctgataccattgctgaggattctgctattgacgcagcatctctcggtgagtttttgagccgtcccgttaagattggaacagtcacctggagtgaatctagtgcggctggtttagcaacatccatatacccttggtctgcattcttcaatgatgcacgcatcaaatataagcttaataattgggctttcattcgatgcaatttaaagatcaaggtgttggttaatgcttccccattttattatggagcagca

SEQ ID NO: 2170 - DNA, 602 bp, unidentified
  source 1..602: mol_type = unassigned DNA; note = unclassified RNA viruses ShiM-2016 sequence
caaaaatccaagttatacatcaagccaagagacaagtgcaattataaataattaacccaattacctacagacaatccaaatatatcggaaaatgaatccaactttaacaggtggcacaggcgaagcaagaaatggtcaatgggataagagaagaaaacaagcctggctaaatgatgcgctattgctgctcgacttgaaacttgggtttactatcaggacacgatcagactcacagctacagatgctagtatcaacatttgcaagcaacgagaagttgaaagagtattggcttaccttgggtgatacaactcatttggtacagccggccggtagttcagcctcatcgtacggtactgcgtttgagtgctcatactcgggaatgtttcgagaaaagtacttagagtgggtgttccaagacaaacaaatagttgacgaaatattagaagcaataggccagccaaagctgtcaatagtgtagacccctgaggagcttagcgaaacggcaatgccgtagggtcgcccccatttgaaaaaagaagtaactacaaataacaatagctccaacaaataacacaaatacaaacaaacaaacaacgccaaaa

SEQ ID NO: 2171 - DNA, 603 bp, unidentified
  source 1..603: mol_type = unassigned DNA; note = unclassified viruses sequence
gggcaataccctgcgcaatcatttgaactcacgctgtctgtaaatcttagtgtaaccgtggctgtccccacgctgaataagtatgtgaaaccgtgaccgtagaatgattgttcttctttttgaactgtgtaatatttaaccttatatctaatattttattgatctatttatcagaagcaagcgttgattgatatatacttcaatatttttgtacgatatactgtattaattttaattttctttctcctactatatgttagttgcctaataggatgcgatctcctcttgaagaaaaacacagcggattcgaccccgactgttggcgctcttcaggtgactattttggaacttcaattatttgaaggtaggcactgtggctagaacccacagcggtaagtagattcttaattttatctaattatgttaggcatgagcaaagtagctttgaataactcctcatgactagactgtattgtgcatttcgtctagcacacataatgaaataactttaatttaatcgcttaccgtagaaggtcaaccccattttatgggtggtattaccggaaaacgctatcaccaattgaaagccgaacccaatataac

SEQ ID NO: 2172 - DNA, 603 bp, unidentified
  source 1..603: mol_type = unassigned DNA; note = unclassified Riboviria sequence
atatacagtagtcgactaagacatccgaatgcagtatccttaatgaaaagaataaaacacccagattgtacactgtacacttattagagttattacttttaaaataccacgcgtacatacgtgctattttaaaagtaataactctaataagtgtacagtgtacaatctgggtgttttattcttttcattaaggatactgcattcggatgtcttagtcgactactgtatatggcgtgcacttctgctgcctaaggaattattgcgaaacccccccttctcacaaacacacaaactcacaaatactctcgaactcatcacaactcgagttcagtttttatataaagctggtgtctgagaaacagctagtcgcgagctagtgtactatatgtcatgtctatgtagtacagtttcaacacgtatctttgccttatatgaattccccacacaaaaatttccttctgagtacgcctcccggtttcataccttactgaaacacgcgaggacaaacggccgtggcctctcagtcgtagctatcaaaactttatagccgaacaccgctatggcaaccccatggttattaggcaattctgaaaatcttaaact

SEQ ID NO: 2173 - DNA, 603 bp, unidentified
  source 1..603: mol_type = unassigned DNA; note = unclassified ssRNA negative-strand viruses sequence
tatagaaacagtactactcgtgagctactagacagctgaatctcacttggactgattacattcgtacatgctaatcacacttgtcctctggcaatgcatccatgtgtagttgtcacgcaaccggatcacattcgtacacattgtgccgaacatgcatttggcatttatacagtagaagacctaattgaagacattgatctgtacaatcatgaattggctcaggcacaagatacaggcgaatggcgacacttcaatgaaatatggagcaataagataaacgaaaagaatttggatcacattaatatccttttagtgcccagtattggtttaggagagctcattcaatcaaggagcatcatggcattggttcttaatgacagttccttcagtttgtctctcagaggaatgtcgatgcaggataaacctttacagattgagttcagagaccagagcatgatgtttgaaggatatgtgaaacagttcgaaataattagttcgctttcatcctttataatgacttatatgtgaaattaaaggcacaatacaccgttgaactacacataaaaaaaaccgtttaaagcttagttctcttttaacactaca

SEQ ID NO: 2174 - DNA, 605 bp, unidentified
  source 1..605: mol_type = unassigned DNA; note = unclassified RNA viruses ShiM-2016 sequence
ctttcaaccccgggttcttttacaggtcttactaaccttgtctaacagtaatgttgacaaaattagtggtttttaagtgcgaagagctaggtttttccaaaaaaccgtacacttccgtgctcgtaagttcagcacgcctaatggaggcaattcttacatccatgagctagcaactccaactgctttaggttttagaatagattgttcgaattactgcatcaggaccatctgtcctttcataaaaccacttgttgattacaatccgctgtcagttaatattttgcactatatgtgctaactctgaccaggtgagtaattagtaagaaccatcctccatcaaagtcacaactggccacgtttgaatacgctgtctgctttgaggtttggattcaattgacacattgcgcggcattgatgttgattgtctgctgagctagcttagtgacactggggtcaaactgcttgtgctatcgtgtgataacgcgttacggcgtctgcactggtatgacgatgtccagtgactcgagttaggggaagtgcctaacgttctatcgtcacttaccttaaactttccgtttcttacggacccacagctggtaacacat

SEQ ID NO: 2175 - DNA, 605 bp, unidentified
  source 1..605: mol_type = unassigned DNA; note = unclassified RNA viruses ShiM-2016 sequence
gcccgagaagggcttattatgacgtgaaatgaacgtatgagttgttaaagctccatgtttaaaatgggggctctatattgttattttatgtttaaatataagatctgattggaactcttttcggtaaataaaaggagtgtgttcactagtaatgtttggttcggtttttgttattaagagatggagttaaaacatatacagcttcaaaagaatgaagaataccaacaaacgtataagttttatgtcccatacttatagtattgtgtataaacattattcgtgacacggctagattatcatacgttatcacgttgcagcgcgtgtgcagttttgaaaggataatcattaatagcgtttgttttttggctgtagctcttttatagagttagaggtttataatacaatagaatcttaagtgattcccataatgtccttggttgtattttaaacctcgaatacgtgaatgcaaatactcgatacctaatagagttagctatgctacccgttgttgtatgagatggtatcaaatccaacggagttagagaagttgggagatagacctggcttatggttagtttcacgtattttaggttgtctaaaacgaa

SEQ ID NO: 2176 - DNA, 605 bp, unidentified
  source 1..605: mol_type = unassigned DNA; note = unclassified RNA viruses ShiM-2016 sequence
acccaattatattacctgatattgatgatatacattacaaatacgcttttttaagtagtttcagaaataatgtttttttacattatcatattactactaatattaatagttttagttattatattaatccgcttagcaaatcattgactaagggtatcagtagatattatacggtccctttgaatgggaacacattttttgattcgtatgttattgatgatgttgtattttcacttgaaattaaatcagatggcgttatattagttgatgatcaacaagtattttcccttaataatggagttaataattacactacttgtacagtaagatttaaaactgtcccaaagaaagattctaacaatttactaatagttactatttatttagtcgaatatgaaaaaatatttagtaaggacccattaaagaatgatgaatactcctttaatagaactattaatagagtttatactaggtcatttggtgtgtccgattttaataaggtttttgttgatcctaagaagtcgataaatgtttttttatcgctggatacatttaatgacatagtgcatgactctttatattctattttcattgctcgatctgaa

SEQ ID NO: 2177 - DNA, 606 bp, unidentified
  source 1..606: mol_type = unassigned DNA; note = Mint vein banding-associated virus isolate NCGR MEN 454, partial1 sequence
cgtaatctgatagcctgagcgattcagaattcctccaaaccctgcctttgcagtcttcgttcctttcgtttaagttcactttcaatcctgtactttttcattttttactgcatcccatcccatcgttcatcaattcacaacccgcagaattcatcttctgcatttctcttcttttcattcttgtttttcgttcacttccattttctttgtgtctcaccaccacatcgacttttggctttgttttctctttgttcgttccatacttctcaacccgcagaactcgtcttctgcattttcgttttcttcgttttctcattttcgttcaaaaacacaaaaagattttgctttcttttcctcttttgtctctcacgagacccttgttgtcgttcacgcccagttgttttcacttgtttctctgttttccaaaacttttgttctctttctttcttcgttccattcactccggtttttcttcagttttgtttctctcctttgcaccactccatccttcgaacgttccattcctctttgttttttgttcttcatttccacttcttttcattctttttgtttccccttcgttccttcccacactcccatcgcggt

SEQ ID NO: 2178 - DNA, 606 bp, unidentified
  source 1..606: mol_type = unassigned DNA; note = unclassified Iflaviridae sequence
cgtagatatgttcatgtttgttttgttttgtaatttagttcaaagggctatacctacccctgattagtaacaaaatataaaactcggtacagaccggggcaaactaatatagttatttaataatctgtttgaccttatcttatgttcaatgccgtgttcgcttgcgtttttcattcccaggaaaatgttccccataagttttcagattattgtttaattattgtttgtgtataaacaattattttataaggcaaggcgttaattgatttaatgtttataagtatacggatttttattagcacgaattaattccatggtgaccaccgactagtaatcgagtactttgagtacaaggccaaaagccctctgtataacatgtgaagtgtgttagaaatgataataaaatgaagttgaaagtaaccgcttaatgattttgaacgtgacaagcttctatgcttaaaatcatctcatatttattatgtaattcaatagatgtgtatctctacctattggatgtattcctctaaggaatagatgatctaagaaccggtcctttggtggtttcatacgtcatgaaatcaccattcctttttaaaattttcaatc

SEQ ID NO: 2179 - DNA, 606 bp, unidentified
  source 1..606: mol_type = unassigned DNA; note = unclassified Picornavirales sequence
ggaggatactttgtttagctttgcaattcttaaactgttttccatttcactggtcgtttgacgcttgtagggcgacaggtgttcctagctcttgcttttctaaactatcgaattttgttttccactcgttcatatgtctatgtatgaatgaacggggtgagtcctcgttggccctcgctggagtgtaaattcccagtctttctggaactagaattacacaagactccaggagtgttctgaagattttcatatttaaataaaatcttttgggattgtccttgatggttgtagcgatgtctagtgtgtgtgcggattcccatgctggcaacagcatcctcacaggccaaaagcccagggttaacagcccccgctagatgcatggtaccccccatgcccattttggatatgaaattaaggtttgtttacttaggaatttcataaggaagcttctgaggctatgaaggatgcccaggaggtacccgctatatgtggatctgacctggggaccccttgcgtagctttactgcgtagtgtgggtttaaaaagcgtctagtagccttgttttcgggggaccgaaaacttccacattattttgagactggcatc

SEQ ID NO: 2180 - DNA, 606 bp, unidentified
  source 1..606: mol_type = unassigned DNA; note = unclassified RNA viruses ShiM-2016 sequence
gccggggctctttgagccccggttatcgtttgagtagtctgatagaatatgtctatctgcaggtcttgtcattgtgcgagaaatgcacgatgatgatgttcttgtagtgttgcgaagtcttgccagtgtgcgagatcgcacgttggtgatgttctttgcttgatatttttattagtatgaacagcttggtgttacactgagctatatgctcggtgtcgccaccccaaactgcctttctactactcgagcggttacgcagccgttttctgcaggtttttagtcaatttatcctgcgcgtaaaaattaaatacactttcaacccagttgacgctttttaaggattttgcgtgataaatcatccccgcttctgcggatgaaaagacggacatcgtagatcaagactgtaagtccgtgggctgcatttcacttttgtgaatgtagctgttacagtcagttagggtggatatttagatgttttatgcattgtagatattcaccacatcgatcacccggatgcaacagcgtgacggtgcgtacatgtagaaatagcgtgtatgtgctgaatgttactatttccctcattttttgagagctcatttgtcatgt

SEQ ID NO: 2181 - DNA, 606 bp, unidentified
  source 1..606: mol_type = unassigned DNA; note = unclassified RNA viruses ShiM-2016 sequence
ttttagctaacttatcctctaacattattgtgttagatttatttataccttaggaggtacaaattggattatttgacagaatacccgattgataaatctttatccattatcagtcatatctcttcagtctgctctcagttaggtggacctctctcacaagaattgaatactcttgttcaagaggggaactattctgctctaatcaactttaaatttgattatcagaagccctatacacaaaacgactttatttacgcccgtcaaattcaagctcttgtttcaaaacaggagtttattgacttaggcgtagatcgagaagttgaagcgtataaaaccttttctgaggctgaggaattatgttcgcgtactaatgaacgattccgtggtagtctatctgacgtttcgtcagagtgtcactccgtgctttacggggcgacacgaaaaatagctaccatactcggagacgttcctgagtacagtgaattaaatttctcttttggacctggagctacaaccaacgttaaacgagcgcggtctaaccctagggttaaacttgaagctcctctaacttgtagtttcgaatttgttccccatgtcgcgaaattc

SEQ ID NO: 2182 - DNA, 606 bp, unidentified
  source 1..606: mol_type = unassigned DNA; note = unclassified RNA viruses ShiM-2016 sequence
tggtgccgcgcggtgcttaatggtgttgaggcgcaagtaaaactgcaccacaggaacattaaggttacgtcccgtgtcggattagtgaagttgaggagaggtttcggttattttcgtgatgttgtgcaagacaacatttttttttataataatacagtcagcgtggtattgcgggctttgactgagcggttgtattacgttaagggtgtggatgggtttgtcccatgccctcgacccattgtaccattctccaggttgaaatggattcgcgaccgagtgcggagaggattagcagctgtgccgcctgtgtggacatatgaacaatttgtcaattcatacacaggtagcaagcacagacgttacacctctgccgtttccaatctagccgctagaggcttgagaagaagtgacggttacttgacaacattcatcaaagccgaactatacaatggcacaaccaaggctgacccttgcccaaggttgattcagccccgcagccctgagttcaatgttgaactaggacgatacttacgtccacttgagaaacttgtctacaaatccatcgaccatttgtttggccaccatgttgtacttaaatgtgacaac

SEQ ID NO: 2183 - DNA, 607 bp, unidentified
  source 1..607: mol_type = unassigned DNA; note = unclassified Astroviridae sequence
tgtgttgcaaaatcccacaaatcctcatatgttttctcaatttcaacaggatcactataatggaatttctcaaacatcttcgtataagctcgagacgtccaagttgtggatgcatagtcgtgttgttcataaggtgttattatccctagtaatggatctctcactttttttcaactatcaaggatggagtgaaaactcaaaccactatgcaaatggttgtcacacaggctcggaaaataaggaaaaagaaaccctttacatgtgctttttgtaataagacttttacaaactggcatgaccgccagaaatgtaagaaaagccaagagaaaaatgcagctgaaaagaaaaaagatgagccaaaaaacgagaagaaggggcagtagaaacatcgagctgccccgtttcggttttctcgtggtatgactatcttgaaaaaccctttggaaagatttgcctacctgaagaacaaacattgcttggctatatagcagttgacaaactagtggagagaactaaaaaagtgagagatccattactagggataataacaccttatgaacaacacgactatgcatccacaacttggacgtctcgagcttatacgaag

SEQ ID NO: 2184 - DNA, 607 bp, unidentified
  source 1..607: mol_type = unassigned DNA; note = unclassified Picornavirales sequence
cgtgttagtgtgatcttgctcttaatcggataaaaagagagaataataagatatagagtagtgctactaacataagggtcttagttatttagctttaccacacaaggtggaccgtggcagccccacaatatctagtgtagctctctaggatgggaacattaggtcgtgttctatccgaaattacccatggcctgcgtctaaaagtaataaaacaactaatggcaataataataccgctgtcattgatataaatagtaatacaggtattaatgagaaagagagcattggtcagagtaattttacagctcctcaagcacaaaattatgaagaagctccacaaatttctcaaacagttgaggagcaagtgcaaatcgtaacatttgatgatgataatgcagtagtccaggaacatataccatatgaaatagaagttccacgttttggaaatcaacaacacacggatcttttgacacattcagttgtgacgtttttaggaagaccgcggcttatttcatcatttccttggttggccgaatattctcggtccacgaatatactaaagttttcgaatcacggattgctcgtaccatcgaatattttatctccg

SEQ ID NO: 2185 - DNA, 607 bp, unidentified
  source 1..607: mol_type = unassigned DNA; note = unclassified Fusariviridae sequence
gtcaagatgcagcactatggttgtgtctacacttgtttgtgacttgaagtcgtcggactgtccactctgctccttgagacatggtggctttagcctttatgtcttaagtggtcgagttgacgggccctcgccctcaattctcattttatttatttgtttaatttatttggccacatagcccttgtgctttgtggagattatgatggtgcgctggttccgcactgacagggagttttgttttcctgtcagttcggggcctgtgaaccatctaatctcctcaacgctcatggtgactatgtgcgggagtcaactgatgccgagtatattattgaggttggcatggtgtttgccattccaacaccaataatgtggtcgggcccagatggtttcccacctggtcctcatcctgcgtcgccaaggttgtaggagtggctttgccgcccctgagatcttgtcgacgccggttgtggagccggtttgccactgttccccaaaattccttttcttgtctcattgtcaaatgcaagctgcccgaatattagctgagcggatgaagttcaaaggggaagcacccttacctatgccaccacgcgccccttggctgaaa

SEQ ID NO: 2186 - DNA, 607 bp, unidentified
  source 1..607: mol_type = unassigned DNA; note = unclassified RNA viruses ShiM-2016 sequence
cgccaattcttacgtcagtgtgttactgtttaacatcaccatggcttttagcactgaagtccaatggtgtttaatcggcatcgggttatgtcgtaccggtaagtatgtttatgattactttaacaggtttaaattacgggccaaggccatcaccactgctgctaattcacaggtcaatgctgtcatgcaagtgatgaacggcgacatctatgaccatatggaaattacagatgtcaccgaagatttgtctgaacaagttcttgattcatccgacaattctgttgtgaacaagcgtaggcgtgttagacaacgtgccccttttagagcttatttggtaaaaattggcaaagcaaaattcggtctgctcaaacgaactgaggccaatcgcatggttgtccgtaagtttctgtatgataattgcatagcacatggcgtgcttgcaagacacattacagataatattgacttcgccactgagatggtatttatacctacagagtccgagttgaccaatatggctatcaaatctactaccgttaatgttgagagtaacattgttgcccgcttgctgggcaccaatgatgctttcaattgatggggcccaagc

SEQ ID NO: 2187 - DNA, 608 bp, unidentified
  source 1..608: mol_type = unassigned DNA; note = unclassified Trichovirus sequence
ggtggaattactcaaacattttggatgggatgacaaggtgttgcaaagttacatcagaatgaaatgcacattgggttgcagactagggggtttcgccatcatgagattcaccggagaattctcaacatttttgttcaatacacttgcaaatatggtgtttacgttctgtagatatgaggttccagatggcaccccaatctgttttgcaggagatgacatgtgcgccctgaggaatttgaaagaaatcaatactcatgaattcattctgagtaaactgagcctcaaggcaaaagtcaatagaacaaaagtgccaatgttttgcggctggaggttgtgttgtgacggcctcatcaaggaaccttgtttgatatacgagaggttgcaagttgcaattgagaatgggagactgatggatgtgatagactcatattttctggaattttcattcgcctacaaattaggtgagaggctctattcacatcttgaaattgaacagctgaattatcatcaagttttaacaaggttctttataaggaacaagcatttgctaagaggtgattcaaggcacaacatctcggaactcgagtggctttcagacgaggatggcg

SEQ ID NO: 2188 - DNA, 609 bp, unidentified
  source 1..609: mol_type = unassigned DNA; note = unclassified RNA viruses ShiM-2016 sequence
ctttttctggccgcgcttttaccgtggtcggcataccacgtaggtctgatgatcaccgctaatcatttgacgcaaaaggccaagggggggggtgactattgcccggacgcacttgtgtaaacaaggtaagagggggaaggcatacatcaatgtccttcttcactcttgctatcgctgcaaggtagatttgtccgaaaacctcacggacgaggtatagactccaaacctcccgcccccgatcgtgtatcacatgtcgtgacacgttactcgtagttcttaggtctttgttagtaccaacaagtccatcccgcacccccctctggaacggctttgggagggtggcgcgtgcggcccgggcgctcctagcaaagggtgccagctgggttcaatcaacggttgtgtgttgcaccacgatcttataggattcgactcacccatagaactacaagtaaacatcacgcgtgcaatgacggctatcgcctgaaacaacgaaagggggcaaaactctttagaacatctgttctcatctagcggcagggagagggaattagctggcagtaaacctcgacctgaaatttttaatgcagccagggcgccgtttttactcta

SEQ ID NO: 2189 - DNA, 611 bp, unidentified
  source 1..611: mol_type = unassigned DNA; note = unclassified Botourmiaviridae sequence
tggaagcccctttgctttcatccgtcgctaaccatttccggtctccaccaccctcccttccacgcggttacgtcacatttgcacgtaagatcgttcgacgcctgttccctcacgggtgggacgccggatcttacgagtcttgtgtgctcggaaccgatccttctttgtcagcatgtttggagaatcgccgcagtgcgggcggacttcacggctatgtttccaaccctcgggttgagaatcaactcggacgttttcgtcacgatgacttcctcacgacgtgcttagacggggcaacccgtcctttgagcgtcgcttcgggtctgactgtcgtccagagtgccggtaagcctcgcccgctgagcaaattctcggcggacgcgatacacttgagaccgcttcataaggcgatctatgatagactgtcgcgcgagaaatggctctgccgtggtgattttacaactgacgttctacagcgcgctggtttttcctttgttgaaggcgaagtcttgacttcgggggattataagagtgccaccgacaatctctctatcgaggttgccgaggctattcttgacgaattgctcaagtccacggtctctgtgccggggtcg

SEQ ID NO: 2190 - DNA, 611 bp, unidentified
  source 1..611: mol_type = unassigned DNA; note = unclassified RNA viruses ShiM-2016 sequence
gtgaggtttatacctcacacacaattttgacccatctatgggtaaaatagacgtccagagttttttagcatgcattctttgagagacgttaagcacatgaaagagcatgaagttgtcgatgtacagagaattcattctccaaggcagggcacatcttagtatataaaacaaaacgattccgattatttacgacgaaaccatttaagtattaatcctgacccgattttgatatacgacaaacagctgaataactgttaaaactattcaaatccaacggaccagtaatcttaaattacctgtgacagccgaagtttagtaggttcccaatatagccgtgaaacgcttgagggccgttacagctctaatttaagacctacgtttttaaagcttggtaagcgctttacttgagcaacatatacaaaactagtaccaaatcttagtggaatttaagtatgatatttgaatgttagacatgtattatgtcaaatatcctctacatttctacataaaggtcatgcaatgctcagtggttattgcattatggtcgcagttaacttgcagttttgtattgcctgtgtcggagcagtagtaaagtaaacagacgatttcac

SEQ ID NO: 2191 - DNA, 613 bp, unidentified
  source 1..613: mol_type = unassigned DNA; note = unclassified Picobirnavirus sequence
tcaaagatcaaacttggctcaggagcaattgacggcttcaagagatcaggtggctaaggacctaggttatggtaccttagctgaaagtacacggcataacaaagcacaggagcagcataatgttaacgtccttggtgagcaacaaagacacaattatgcccaagagagctataatgtagcagtgttaggtgagcagacccgacacaacatagctaacgaagagctcacacgcttggctaatgaagagattgcacgaagcaatcgtgcacgagagagcgaaactaatcgacataatcttcaaaccgaagatgtggctaggcagcagttagttctatctcaagattcattggctgaaactgtgcgatccaatctcgcacgcgaaagtgaaacgcatcgatcaaacgttgaacgggagagagaaacgtttagatcgaatcgcgctagagaggaagaaacttctcgatctaatcgcgcaaaagaggatgagactcgaaggtcgaatctagtccgggagatcgagactgaaaggtcaaatcgggcgagtgaaggtattcgtcaacaacaggtgaatttaggctatgcgcagttaggtgagcagcgccaatatcaccaa

SEQ ID NO: 2192 - DNA, 613 bp, unidentified
  source 1..613: mol_type = unassigned DNA; note = unclassified RNA viruses ShiM-2016 sequence
gtgtgtttgttcaacacacatgttcatttttacccagttgctatgttgcaatacctaacttaatcagaggttatgttttagaaactcatgatattagaggttatgcttgaagaactcggtaagttgatatgttttagacactcagaaggatgaactcttgctggtcgtttattactcgttagtcattacgtctggtaccttcttgctcgtgagaccgatattgatggtcttctattactcgtgagaccaattttgttagctattgttaactcgtgaggcatgggatttattttaaccataaaacttatactaatatgagatggttttagccctatggaaatgcttagtacccttaggtgtgggaacacttttccaaagtcggaaaaacttcaaccgctgtgttgtacatgttgattgattttacatctcaccgctatgaaaaaggacattgctttattcatatgataaggacgatatggagccggtttagctacgtcgagactttggtcgtagacgcgtagtatgccaagcccattggtcaaactattaaggctctctggattagcaacccagtagtagatttagttttggtctgggcgtattccctgaagat

SEQ ID NO: 2193 - DNA, 614 bp, unidentified
  source 1..614: mol_type = unassigned DNA; note = unclassified Picornavirales sequence
gtagtacgttaaacgtacgaccaccgatgagactgaaatgacactagttgagattatttcaatatcctagtgttataaagtcaatatttgttggttgatcgtttcgtcaatcgatggcgctgacagccggaaagacggcaataataaaaaccaagatttagtttttaagttttgatttgattgcaaaagctatcttgaatagacaatcaaaatattaagtattgcaaaagcttcttaaagaagacaatatttaattagttagtaaccaaacctcatcgtgcccctaagggttaaccggttacgtaaaagcgtagaggtattaaggtcactgcggagacctaaaatccgcaattttatgttttgtaatgttttaattatagacttagatgtaactataagagtttataaatacttgtttcaagatttatagacaagatctgatcctatggattttagataaccttcatgttagtggatagtgtgtgtacctatctaaacgcataaggctcttatttcatatttaaagtaggactatgtattacggcgcatctaacggtaacgttagtcaagaccggagaatctcggaatgaattttagtaattcccaaatttata

SEQ ID NO: 2194 - DNA, 615 bp, unidentified
  source 1..615: mol_type = unassigned DNA; note = unclassified RNA viruses ShiM-2016 sequence
ctcgcacacgcgtttgcgtgtgcgaggatttcatttagtagttgtctctattttggagacacaattggtggacaggggtccgcccctgttacaccgtttgtcggagcaatggggtacgccccattgttccgtgctattgacgatttactttcttaactaggtatcgaaagtgttaaaccagctttcaccaaactttctacggagattgtaagattaaatctgacctgctagacgtatcataaaatccaatgtttactagtattgcttaaagctgtccgatcatgaggaagtacctactttcggatgtggtatttatgaggcccgtcacttggcctagtatgaaagaagtgaccaccaaaccagtccgcgaactatgttcgtttatagttatgatgtgtaccttttctaaggcgcgactatttagtctcacattttataaattggtgacaatttacataattatattcgtttagtgtgcggagagccgtagacctatggtgtatgttgatttgaaagagcttgctcttagtcagtacattgaaagccctagtggtgtagtaaaacataggtcgctttgtgaacgagaaaccccaacttttggggctttcagttcgc

SEQ ID NO: 2195 - DNA, 616 bp, unidentified
  source 1..616: mol_type = unassigned DNA; note = unclassified Picornavirales sequence
tgcgtatgtaacccatgcgcatgttttcatatagatatctttaaaacaatttgtagagaccctgcatattcttctttagaatcaggtatgagaccctgagtatttgctgttaagttttatttcgacgactattccgagaaatagggactctgtagccctggtattttgttctataactgtctggtttgtaatgaccttataaacatttcagttgttcataacatttgctataatttcagtataatatttctgtatgattataattttgcaaaaccccttttgttaatcacattttattcaaagcttcttaaatgaagttgcattagcattttatgcttttgctgtcagtctgatttattgttatatttacttattaatggtggcgagaattccactcgtcttgaaaacctttattttatatagaggtctgttttgttcacgctttaggtttcctatcgagcgactatgtgatgaaaaatgtggtagaaccaagtgtttcatcttatgcatacacctcaatgataggttgttaaaatctatatcacgctcgtgtcgtgaatgttgggtactctgatttaattgcagtaactttcctaaccgagttgtcatatcaacc

SEQ ID NO: 2196 - DNA, 616 bp, unidentified
  source 1..616: mol_type = unassigned DNA; note = unclassified RNA viruses ShiM-2016 sequence
atatgcatgggcttcccatgtatatcaattttatagtccgatccttattttaggtggcgagtatcctgctacatattttggcgagtacccttagcactggcgagtaccctatatctagtagacgattacccatttatttctgggttgggtgacccccttaattttaaataaccatcttatatcatattcattatttcaaatgttatattatatatgcttcctcatttattattaagtttgcttgatttaacaagtttgaactcgttatgaaacattgtctaagataactggattcggattctgggccagttatggagaaacggacgattgactgagagtaatggtgagactttttataattattcagtaacaactgtggttagtttgcggacgcccgaccgttctgtaccaattttattaagtctaaatgggcccttttgcaccttttggtccttaaggtctacagccattgcttgtagttacggacattcagacctccctgtttgatagcatctttctaatatttccagaagtatttgatttcatccccataataattttaagattgtgttttaaagtttttgaaaggttttcacaaaatctttcctctctggca

SEQ ID NO: 2197 - DNA, 618 bp, unidentified
  source 1..618: mol_type = unassigned DNA; note = unclassified Permutotetraviridae sequence
aagccctttgtgcttcgtccctttgatcctttctatcttcctcttctacgacgacaaactgctcacccaactcgctaatactttctctgctaatgccgcgttcaagtggcttgggactttcatctctgcacataagaaacaaatagctgggctcatatttcttgtcccggccacttttctgtcgtgcgatcccaaatgggcaaccgtagtatctgctgtggtttcctatctggtatcagaggtgttccccgcccctgggaagtatttcgagtacggcttccttggaggttcactcattctattgtgcaccgcaaggaagccgatccagttcgtcgtcgctacggtggttgcgctgctaaccattggtcttgggttgtggggctcggaggtatttgcctctttgccctccacctcacgccagggctagcaatcagcgacatccctctctgcgaccccagaaactgcaaagtctcctgtactaccaccggccacccgctcccttggtgtgacacaggtcccactgtctactgctactcagagggcaaggagtgcaagcaatgttgccccttagctctcccaccgtgtacgccatggccgtcgtgcttcttcacgactacc

SEQ ID NO: 2198 - DNA, 619 bp, unidentified
  source 1..619: mol_type = unassigned DNA; note = unclassified Picornavirales sequence
cgatgtatcggtaaatgtagtttaaccctctgtttctcgagagagacaggttggtgttctatgttctgctgcattgagaattgggctcccgttgtattgttgtacaaattgttgatatgtgttactcgtaaattttcagttaagttagcgttagaatttatgtgtctaccattataaacgtttgtatgtgatgtgttctaatttgatgtttatccctggtgttgaccgtgccaggcgatctgtaatatctgatgaagaagtggtgtagcttgacctacttgccctaaacttgggttttttattttaattttggaatacagctatttccctcctagttggattaagacagatggtgctgcttgacaatcagcatcaatcggtttggacgtttgtccagtcaagttgagtgtttagtacttgttactttgattttggaaattttagtgcctcatagctgtgagacaacactattagtccttgtcagagcgataaaggcttttcatgagacgtaagttgagcaattatgattgggtagcgctggaaatccgcgtagctcgtccttgttgaccatccatggtggtggatcagattgcttggctgacaaataaccacagatatt

SEQ ID NO: 2199 - DNA, 621 bp, unidentified
  source 1..621: mol_type = unassigned DNA; note = unclassified Picornavirales sequence
acacattcaatttgaaactcatattcattcactactgctccttggagcagtttgtgtttaatataaaacccaatttatatgttattatatgtttgttttgttttgtctgactgtattagcactattaacgtgccagtcgaaaagaaaataaaaatagaaaaatataaatactttataaactgttatgatgtcatttgcgaatgagattgaataagtacagaaagaatgttgagattgaaaccccgtttgagtccccaaagatgcatgctatattatctcatactctttgcatttttatgaatttcaatttatattgcaaaaagaaactaacatttcaaagttattcgagattgatgttctataagaacttatatccttcgaaaatttgttagtttaatataacgtacctaaagtaatgaaatatttaataccacccctcctttgagtagcttaacctctcaaagatcccgctgtggatttgtattaaatatgtaatgaaatgtgggaattgtactttattaaataacgaatgattagagcttgcccgattgaatttaggcttgttcaaattgatcgcttgaacaaagtattagatcactttttatggatttagtatgaata

SEQ ID NO: 2200 - DNA, 621 bp, unidentified
  source 1..621: mol_type = unassigned DNA; note = unclassified Picornavirales sequence
actagagacctttaacttattttttgcatcagtacttgtgtataaccttactaataccgtcattaaaactcaaagtagatttaatgaagctgttattggatgtatatttctactgattgaacagactttgtttgttccgtgcatggtctcaaaattaaaataaaataaaacaaaataaaacattataaaattgaaaatacaaaatattaccactttaaagatcactagaatgttttgaacatttctataccaccttatatttattatagagggctctatctacgagcacctagcgtttacagaagacgtaacttttgctttagcactttaaccttgtgaatggaatattggcggagggacctatgaggaagtacctactaacctcctttgttatcaaattttctgagtcgatttatttcgatgtttcatagttgtggcgcactcccactaaatttagatactcaaaacccaatatgtggcattcctacgttgttagagagttccgcgcaggcggctatcgcgtttatttaatagataaggtttattaatgtaagtagccattcttacatgaaatactaatcaccttctattatctaaaaccctgttgtttagctatatatt

SEQ ID NO: 2201 - DNA, 622 bp, unidentified
  source 1..622: mol_type = unassigned DNA; note = unclassified Benyvirus sequence
catccagtgtagcagcctaccatgccaagtatgtaaaagtccattttttgttctctattgctgagaaatttcttaacacgggccaacagtatttgtgtatggtgggtggatctcctttcttcggatcgtaggcgtctggttgagacgccatttaaggttgtgcaaggtgggcgtgtgtcgagacattcacgtaatcatcttctcacagggggtacctaaagcccccatggtcgtagacctttaggtgaccttagaaaaggcacgcgggcgactgattcgttcaaggctgaggagtctttaagtgttcttacaaggacacgaccgggttggaaaagccctctctctacagagagaaaagttgacaaagtccttacgcgataggggcgactttcccaatagggagtcccagtcgtaggctctactgttcagcttcgcctttcccaatagggagtagcagaacacgttcgggtaataagggcccatgttggtcaccaagtgcgaatgagcaacggaaagttttcggcaatcggatgaaagcgtcttaactctgaaaaagggggccacccgtgaggggtaagtgccatgtgcgtggagtttgaacggcgatctggaacccggtaag

SEQ ID NO: 2202 - DNA, 622 bp, unidentified
  source 1..622: mol_type = unassigned DNA; note = unclassified RNA viruses ShiM-2016 sequence
atcccttttgccttggagaggcgtaaaatctaccagctccggaactattcgtagcataagtttaaaatagttgtgtatatatggatactacatattttataatttacatgtttatatattttatggaagctttgtacatatagacatcctacccttaggataccggtatttactggaggtttcgtcaaccagggaaacattgtcacacacagatacagtgggtactgttctgatgtggtgtttatattaaatattgcctacttcacttaataataataatacaaacagtcttagaactgactcaaatagttctcctgatagcgcttatagtgtctcaaaagcagctcaacaggtttcaacgcaaaatgtacattttgttgatggagacacgccatggtcttacgacatttcatcatcaccggatagcaccacccagctcgcaggatttagcgatgcagaactcggttccttcctcggtcgtcctctcaaaatcagagaatttcagtggactccggaaagcactcgattgtttgaaatttttaatccgtggactgatttttttagtaatacagatgttttagagaaaataaatagatatcgtaatcttagatgtaatcttaga

SEQ ID NO: 2203 - DNA, 623 bp, unidentified
  source 1..623: mol_type = unassigned DNA; note = unclassified Picornavirales sequence
tggccgcaatcgctagtgctattggtgctcttgcaggagctgggattaatcccaactctattatgcaagctggtttgccttttgcccaggcagcccagcaacaaaattatcagcaacaaaatattcaatcttattttaaaggagaacaaggtttacaatcagatgtacaaaatcagtttactaaagctggcttgccttcttttatggcttataccggtggtaattcaggttctaacagtttgccgcgtcaagaattttcattaggcggcatgaataggttcgttggtggaaatgttggcgccaatatgccttccaccatgaatgctatgcaacagtattaccactggggtaacccgtttggaagttcaggtcaatttaatttccaaggagtgaatggttcaaatgtaccacgtaccaatcctataccaagcgatgcaaggcagaataatacaggttctacatttacaacaccagacaatgctaatacaagatattccacgcggggaacaccagctcaaagatcgactgctgaaggaaccactgtccctggagcttttctcaatacctagttaaaacgtcattgagagaaatacgtagttatatcttgcccagaaataactgca

SEQ ID NO: 2204 - DNA, 623 bp, unidentified
  source 1..623: mol_type = unassigned DNA; note = unclassified ssRNA negative-strand viruses sequence
aggtttcagtaactattaaccgaccgacgggtctggggattcttaattagtgggatggtataactatcatgatccgtctaattctgaatttctcgtaaaacaaatcttatttctaagacaaatagaaaaaaactcgactgctatagatccaatcattcatcattgtcactcgatggattccaaaaggatctactcagaggaacgatttctcatatccgtgatacgtccaacagatccggaagaagaatatgtagagattgatatattcactgagaataacatggacaatccgattgaaatgacaacaggtgaactccatgacattgtaactgataaggttccatttatgcatatttagtccactgtatttgtactctccacagacagggagaaggtactgatgtctgtcactgatagaaatgtcaagatccatttcctgaatcgatttatcacaatagacaacatgaggtttgatttcaattcaatagtactggctatttctgtagacagagaagaggagagacagagggaaatgaaggagtaagaaggatgatggaatctatatctgtcattagttcttgataaactgctatgttattacttaaagaaaacccgattgcatc

SEQ ID NO: 2205 - DNA, 624 bp, Phomosis penoulivirus
  source 1..624: mol_type = genomic DNA
tgcacgggtttagcccggcccccggatctgacgcgtgcctgcggactgttgaagtaggttgtcgtccttgcaatgtgagtcgattaaagagattatagtgccaaaggaatctcgcgctctcgagcgttcggcacttgcatgttccggtgccgggctgcgggttgacatccgcggtcccgttcccccctaggggtatttaaccggtgggtatgctagtaaggtccggccttcgggttaatgaacgcatattaaaatcttagatgtattcctcgagaggaacgtaagaacccactaggagatgctccaggagtggaccgtagcgggtagtgccgacggcctgggtggtggcggttgtgaaacaccgcggaagtggatgtaggggcgttgcatgtaatgcagggttagaaacctgccccgagtagcggtgtcgctgactgtgcctcgcgcgcgagtgacctccccgtgactgtgtgttcgtgcacggcgggttcttgccctttgggggccgcgaaaggttgtgtggacatggtcgctacctttcctaccacacccaaaactccgggacaacgaagtccctgatgagtataaaagcgaattgaaaatagaccccaaaagaaacagaac

SEQ ID NO: 2206 - DNA, 624 bp, unidentified
  source 1..624: mol_type = unassigned DNA; note = unclassified RNA viruses ShiM-2016 sequence
aagaagtgagactttaaaacactttatggatcgcaattccattctttggtaaaacttagacaaattgtagcttgcagatttattagaagagtttatagttgtttggcaaatgataatctttatattgcttacaattatttcacctttcgtgccgtattgtactctagttcaaaatcatttgtggtttgctattctatttaatgttatattagttgttttttatgctatagccattgtacatgtggcaaacgttgttatacatgacgtagacgacgattaatatggttgttgttattaatgctccttttactgaagggggtgtttctagggttgggaaattttttgttttagttttcccaaaaaaatttaaatgtaggttatttgttaccgtgtaccacgagactttcagctgtcaagtgggcctatcatgttggtgctattcccaggagaataatccgacgagtcattactaaaaatgctacccattgtcaaaaatggagattcgaggagagaactgctaaggccaagttgcttcaacaagtgcgggttggtatagccaatagtgttaggaaagagaaggagaaattgcgtgatgagaaatttcagtatgagtacgagcctcag

SEQ ID NO: 2207 - DNA, 624 bp, unidentified
  source 1..624: mol_type = unassigned DNA; note = unclassified RNA viruses ShiM-2016 sequence
ttagcggaccgcattttgtctgcgcaaagtgacctagggtttgaagaatatatagaccgggctgactatatcaacgccgaaatgcttgcggatgcactaggcattgatgccccggattactcgggagaagaagagttaaaggagaagttgcggaagatagaccagaaagtcaaggaaaaggtctgtggtacaaaggagctgcccaggaaagggaaggttcataagcgcaaccgtgcgccgttcatccgttcaatggtaactgaattacggatggaattcccgttcaatgtcactgaagataatgcagctaatcgcctgtccatgcataggcgcgctgttcaattgatgaagaatcagggactgtgctctgcccacattgttcgcgatgtagacttgattgttgagatgatgttcgtaccactgcagagtaacattgaagcacgtgaatgtgctaatacatgggctgtgagaaacgacatcgacaagtataacgccaggatgctctccgcctggtatgagtggttactccccaactggctgttgaatagacagcgggggagtgcccatcgcgccgcttagggaggcccagtgaccgtactcggaagggaagagactggcattaaa

SEQ ID NO: 2208 - DNA, 625 bp, unidentified
  source 1..625: mol_type = unassigned DNA; note = unclassified Picornavirales sequence
gagagatattctctcacgtgcgggtaaacgatatgctagtcgttttaactggattttattcagtttatgattttaactacgtacatgctagcccatggcgtgtgcttttgaagtgataggaacttcaataatgcaacttggaaagttgtatcaatggaaggattttcccaagactgtgtcttggaaccaccctattttgggttggggcttgcgcggcccctttactcttagtggtaagtccttcgaccacctcaacgaagtaggcagtagtaggcgcggctctctgagcctcgtactttatgcttcagcaatgaagcacagttttaaactggtgcgtacctacgtctcacaagagaacttgtgatttgactgagtacttgtcctatagtatggaacattttggaattgatgaaccgatttggaaccgctatagggaacggatttgattcccttggattgctttgcttgaaattgtttctgagtgttgtataacgtttctatgctgtccgtcttgcaggacattaaggtatagaatttatcggttacccgggccggagtttaagtagatttaatgaggttggcaccttatcattatttcttgcaacatttcaggctaagatgatgg

SEQ ID NO: 2209 - DNA, 626 bp, unidentified
  source 1..626: mol_type = unassigned DNA; note = unclassified Anphevirus sequence
agtaaaaaggtgtgcggggtaatcccccgcacgcctttgtttgtagaatgcacttatacagattccgctcttgccgttaattataccgctcttgccgcaatctgtcaccagatccgccatttccgctataaacgccatttacgcaatctaaacttgttttctctttcactaggttatgctcacctaattactcaaatttgctacaccacccacagcacttgattagtcaccacttgctgcttgtattatatagactcttttgtacacatttaatgtaccatatttatttaccaattatagaagaaaaataaaaatcaaataaccagaaaataaaaatatttatagacccacaatgtctttaaaattggactcaactctatttctttgccgatttagacttgtttgaacctttattccgaactcctcttgtatatacgaggctagtaaggtaaagtgatatgccctggacgcatgtatcgtcctgtttgtgagtaaagtataactctctccctaaaagtttttacgtttgtcagggataagaccgctagtgatgtatgccacggacacagaagtcctatatgcatttaattccactagttcataacgtacccccccatcttaacacc

SEQ ID NO: 2210 - DNA, 627 bp, unidentified
  source 1..627: mol_type = unassigned DNA; note = unclassified Virgaviridae sequence
gcctgcccacagaagatggtctacttccatatcagaagatgcagaggagaggtcatcgacaccaaccacccccgcggtgtgtatccatactttcatactgatctaccagcgaaatttcataataaaaaacccgctagttacaaatcatgtctgtcattgctgcattgtgggcatctgggagcgtgaccttctacaggttcttagaccacttgatcaagagccttaacgggggtataatgttcgacccccagccggacggatctctcttcggcccacccagaattcacttgatgagtgtgtcgtcagagggacttgccattctggggacaatcgcattggctgcatgtgttgggtttcttatagataactggcatgagtatgtgactaggcagaggtttcgcgaaagggtaagaagccgattgtctcgggtggattactatacccccaatgagtgagtcatagctcgccccaaaatcctcagtgctcaaattgtgacccactggatatgtatgacacacgatagtgttacatgtgaatgcgctttattttctagctgtgatatttttatgtttttattagtaaaaaacccgccagttacaaatcaataagaggagtaacacaggaacg

SEQ ID NO: 2211 - DNA, 627 bp, unidentified
  source 1..627: mol_type = unassigned DNA; note = unclassified RNA viruses ShiM-2016 sequence
gcgacgcaaagtgtaccttggtgcatagtatagccatttggcgacgggatttcccggaaaatcgaggcatttgcctctggccatttggccctaagtgtttagtgtgtgtaggaaagtttgtcgcttatttccgagcacatgtatgagttgtatataataggtctcgtaactggggcggcccttgttggactagcgtggtttataacgacgcgcgtgcagcattggctcattgtgcgaggactaccggcccacgtcggggatcttgagttacctagcgaatccggcatcggatattcgctgagttctttcgatctcgactcggttgatgattaggttgtaagccttttggcgtcttagttttcggcctttcggcgtttagttgtaagtctgacccgtttgggcctttagttataagttgcctcttttggcttattgtaagtttccctttcgggttagttttaagccttttcaggtcttaggttctaggtccattggattttctattgtagctttttagcttttgttttgtgcccccttttggggccgacccacgtttggcgtggcttatctttatgtttgcttaattgtaggttgcgccgacttaagtcggcgcgttgtagatttaag

SEQ ID NO: 2212 - DNA, 628 bp, unidentified
  source 1..628: mol_type = unassigned DNA; note = unclassified Sobemovirus sequence
tctccttctcgtgcatgtcaccttggcactggaattcattttgggggcgtcggcattttgccggcgagtagggagcgccactcacgccggtattcgccgggggggacgtgaggctgcgatagtcggcagcgcattttgctggtgtaaaatagggaggccagtccctgctccccgaattaccttcctgtcgtacgttcccgcgtgcggctatgagccaatttgcggcgtggttcctcccacgtgaaggtgaaggccaggggtgcggtagccgccggtatgcatgtatgtagcgatgattcgatcgtcgcgggtagtgccacccctcccgactgctcctatctggattaaaggttgaagttgtgcgatgatgcccaaactcgcacgatggaacctagggcagcgggcatggctacggttcggagcgcgtgtacggtccggggtcagccgtccctcggaaccccatcgcgtttcaggttagacggttagggtgggatttttcccagggcttttgtattagttattgcgcgcttggtgtttttccgagaatgacactcacatcaagttgtcccccttgcgcactgtttttggagcgaactgttttgcagttattagtggattttcgcccact

SEQ ID NO: 2213 - DNA, 629 bp, Enterovirus C
  source 1..629: mol_type = genomic DNA
attaaattaactctattgaacccgttatccggtgatataggatatctgtgaactaacatcacaataatcagttagcccctcgatttatgccttcagtggttatcgaggtctgctcatacgacgaggagacaggagattgtgaacttgagagtgcggcgaagatattcaccagtaacttcgacgggacttacgtcctatacactcacagttccgggccgaaatacgccggatcaactgtcacactcgtctgccctcactgcggggtgagtgaacaagcgacgttcccgaccagaggcctttcaggcaactggggtcaccacgggccgcacgacttacgacttgattgtaaggcgcggcactggcacggagcgtgcgaggtcattcccctctctgagcaagagtcgcgtgtagcgtctgacggggttttcgaaccaggtctaacgcacatcactacgacccgagggcagtcttggactagacatctttagtccctcccagttctcgctgggagtcccgcagcctggctacgggaaatatcggtggggttgatcaaacctacacctcttcgagaaaagcgctcttcgagtactccctcggcagactattctgttgcgtctcccatagtgaag

SEQ ID NO: 2214 - DNA, 629 bp, unidentified
  source 1..629: mol_type = unassigned DNA; note = unclassified Iflaviridae sequence
ctccacacgggtttttgcccgtgtggagatcatcaagcttttatcagtagtaatttgcagttactcgagtcctctgtttggactctatttaggaatgttaatttaaactcaattcagtcgtcgatgtctctattgggtttattccctttagagttatacaattgtcttgagttttaaaaattgcatcactatttagagtctcgcattttgcgcatgactcggataattttactttattaccgattttagtttgtgatctgacccagttttctatctattcagtgtttttgctaaccatgcaataatatgtcgcactgtctacgccataaagcaagactatttataggtgcaaatttaactttgagaattctaggctttgaacttcttattagttgtccgataatttgttatcgccccggaccgggcgatttccttctcatttatgagagaaacttttcaatgtgctgagtactgatcacgtggaagcacactaatatgtccacatgaactatagtcataatcaatgaccctaaaagtccttgtccggaaaacacgcacaaggcattatccgcaggttttgtcgcgaatccaaaataggccggattgtagacctatcgaatcgcgataac

SEQ ID NO: 2215 - DNA, 630 bp, unidentified
  source 1..630: mol_type = unassigned DNA; note = unclassified RNA viruses ShiM-2016 sequence
ataggtcctaacagtgtagatctgcttatttcaagtttttctagttttctgttggatagaatagtaatatattattttaatccatttagttcacggggctatacctaccccctattagtaacaaaatcatttaaaatactcggtacagaccggggtccaatttaatattcttaattatgcaattcgaccttatgataagttcaagaagcttctcttggttcctaataatccccctaggaatttccccttatcttttttgtataattttgattaactttggatgtataaaaattattattaaggcaaggcagatagtataattctgaaatgttacatgatttagattgccatttgaagcccctagataaatagttctgggtatgagttcgaggaaacaacaacgatgccgattttggaactacaatttactttatgtttcaaagtagggttttactagtctgtgacagcttttgcttaatacacgttagcctatgtgctaaaacttcgatgacatgtttatccatggacttcggacatatatctttaagatatgcgtgtactctgaaacgtcagatggtagtagcatgacgaagatagcaacctaccaattttcctttattttctttcact

SEQ ID NO: 2216 - DNA, 631 bp, unidentified
  source 1..631: mol_type = unassigned DNA; note = unclassified Bunyavirales sequence
tgtctcatccccgaccaccatgtcgttaaactggtcgcggcgcgcgtgagtgtcgtagccccacggggaagccaaaatcacactcatcgtagtggttacatacgaatacatgtttttgcttgtttatcatgattcggaatgcttgcgatgagaatggggagtattgaaactcgagtgctatttagttaccgcagagtcccactgcaattaaaatacgcgataggagtgttctaggaggcaagagcattaccggtataaattaaatcgtctcactaaattttctaatgaaatagagtctgctgaagactttaaaatcagcgggtatgtaccacaagctggcgagcctggtactactatagcccaaggcaatgggcaaaagttggaggccattacaggcttctccgaccagttggctggttggacgacttctatcacgggaggtcgtgacgctacgtataatttagctaacaataatgattccgacttgggagatttcctcggtcgaccagtcaaggtgttagagacacaatggtcgataggacaacctctttttgagcgttttaatccttggtatttgttcttgcacaataccagagtgaaagagaagacttccaactttgaattattgagg

SEQ ID NO: 2217 - DNA, 632 bp, unidentified
  source 1..632: mol_type = unassigned DNA; note = unclassified Bunyavirales sequence
agtagctgtttattgagtaagagtttgtagaggatggatgattaagagtgtgagtgagaggtgtagttgtgcgggtggtaaggttgagagtggtggtgtagaggaaaggtggaggtggagaccaaagtgatggggtatattcactgtgtacactttgctcaggttctgaaaacgtaaacctggataagaagagaaagaagtactgcatttgtgacaaggccttcttagaggagcacacctgcaattgctcagctggagtagtcaaggaggagttcctgagacccacctttaagcattggcatttgagtgagcctctaaataagtacagactatcttgcataaacgaggagctattgaagaagagctcatccaaagggccagtggttgaccctgactacagagtatcctctttgtcttttagactaggttggccactatcaccattcagtaagagctcacttccagtgcctcgttctggttctctcacaacaccagagaaacccaaggctgttaaaggcgccataaaggctgagccgaaatctgagccaaatccatctactagcagacccagtagagtagctcctcacacacaatcagaagggactgctaggaaggagctgtttaaatcagac

SEQ ID NO: 2218 - DNA, 632 bp, unidentified
  source 1..632: mol_type = unassigned DNA; note = unclassified Riboviria sequence
ttccgatctcgattttatatcgcatacactcaacaattacccctttatttggattatcttctgccttgctttcgagcaggtgcattagacttattccttataattcttccacaaaatttttcttacctccttttggagggatctttttgcgcgaattatatattggcaatgtataatttttaattgactaatcgtcttacccctttttgtttgcataaacttgctgtatctgttgtactgcaagctattgcatatgatggatttttgtgctgtatactgtaagctattgcacttatggttccagcgagtggtttgtataacatttccttaaccacgcgtaagccaacaaaataattagtcctattttgttaactttttatcaattgactattgatattttgatgagttggcactcattattattatcttttgccaaacccctcaatatttaccctagaacgtcatcttaggaggagtttttattttctaacggttctttttagacgcttgattataattataaccttcggtacagttcttagagtttttagtatgttttgtccaacaaaacatgcagcctgtattaggtttacaaatactagggaaacgccccgaaagagcgatttgtggta

SEQ ID NO: 2219 - DNA, 632 bp, unidentified
  source 1..632: mol_type = unassigned DNA; note = unclassified RNA viruses ShiM-2016 sequence
gcgaaatcgtctatggttaccaattatccttaaattggcgcaggcggcgttatcgtctttagtggaaactactatagtgtcaccaattgcttgtttacattcgacgtactatttgagagtgtgagtttcctttggtcgtagggtacttttgtaccgaaagcagatgtgttttcctgctgtttaaggtttttatgatgagtcctccgagaggggttttgtcggcacccagtcgacatcctttattctggatgacaccatacacggtacaggaaagtgcttgcaccagtaggttgttccaagagcgtggatcacggatactgagtttattttaaaacctagtgtgaagcgtggcggaagacccttcctactgtaggcgcatgtcgtggctagaacccgcaattgcgcttagcaacaagatagtgatgcccttgagtgatggcaacgttgttagtgtgttatgttatgacgaccgctttctttggcattttgccaacgggacggcccagcagagacacgattagttgtggcatcctatgtagtttggatgatctatcttgttgtgaataacccggtgattgcacaccacctgggtttgatttcccgactggccggtgtgtttgtcgttcggttta

SEQ ID NO: 2220 - DNA, 635 bp, unidentified
  source 1..635: mol_type = unassigned DNA; note = unclassified Narnaviridae sequence
aggaacccctacggggtcacataagagggctactgtgcacccagctaggcttaaagcccgctgtcgcagacgtcttcctatcaaggaagaagtctgagatcgaacgaatagaacaggagatccatggagtcttcgactccttactcttgttcgactggaaatcgtttaacgatgaacataactacaagatctatagatctgtggttgtgtctatcatcaagttaggttgtaccaaccttgacttggtgacaacgtattggaagcagtttacaaactggctcttcatacgtgtgtcccggtctattactcttgaagagcctagccgggataaacaaaacttcttcttcactttaagtgatattcgaagaattcgatcctatctggatagggattatcccatttccaaacgaggatggtcacggatagcccacctgatctctacgagacagctggtggccgggtccgtacggatagagcgacaatctgtcgatcgattccgagaggtgactacgtcaccctttattgccgaccccgatttccttaaggagatcggggacgtcgcttacgtcatcgggagacgcctcaggcgttctcacggcgactttccttcggatgccggacacatatctttaagt

SEQ ID NO: 2221 - DNA, 635 bp, unidentified
  source 1..635: mol_type = unassigned DNA; note = unclassified Alphachrysovirus sequence
tgataaaaatttaaaaatctctcagcctctaatacgacactgacatggacgagttgagagagcgggccaatctgatatgctcatgggagcatgtcatactcgatagagcgataggatatatcgtattgccaccgggccatgggaagagccacttacataacaggataccaggcctagtagaggcagacatggtattcgattgtagaggagacgatgagctgaaacgactgcgcggcaaagcgcgggagaccggggagtggtctacttacgatgaagaatggagtaatagactgtcggttcgtctaactaatcatcgttgggttgtaatggtaccatctcgcgagatagggaacaggataggcggtgtgtgtttgggggtggcccaactccacgacaagcagtggtcagctaacgtctcaagtcgtgggaagacgtctcgtgactatgaatacagcaggcaggttggtgtagatgtattgaggttcaagtgcaataaagacttagcagaatggttactcacagtggctaacatatggttagatgtgtgagcggcctgaggagtaccccccagggggacgaaacgctggtcgtagccgcgggcgcaagctaaccaacacatactaataagagacaac

SEQ ID NO: 2222 - DNA, 635 bp, unidentified
  source 1..635: mol_type = unassigned DNA; note = unclassified RNA viruses ShiM-2016 sequence
ccgagtgaggacggtgttcccacaaaattataaaaaccccaatgttagagaccagattctttacgcgacgtactattttagcgtcagattctttattatttctatttttagggttttatattggcccgattgtagtatgactacaattaaacagtatacgtcaaatataagtcgaaagacaacgaatgctttcattatcattattcaactataagatttacaaaacacacgttgttatgggcgtaacttacgaaggctatttagctgaggtgatccccggattagtagatgttttgtgatgatatattgttgccaccattccagagttttcattaattggtaggagacaagatttaagcaggttgtgacaaccacgaaaggatgaacctatgatatcataatgtttgattagtgggttgcaatgaagaatgcgtaatccaagtcatgtattcgtgtctgttacctccccctgttaaagatgtgacccgtggtcacatttccacttatgtggcgccgtaagctatattggcgtgtagctgaggtgacttgtttagtccccacgtatgattactcagagagtgtgagataaaacttgtttaaaagacaaaatctaaaaatatttctgtataatcaaa

SEQ ID NO: 2223 - DNA, 636 bp, unidentified
  source 1..636: mol_type = unassigned DNA; note = unclassified Picornavirales sequence
catgcttaattgctatataatagattgaacattctataacaaaaagtttcattggagttcaccagtgtcgaaaaaccgtaatgcagattcacgttaggagtcagccgtccgtggtccgagacgttaaatccgacaacgaaagcgatgtagtaaatacaaactaggaaatgtaatggctgaataacagtattgacaggcgttataaacaccttatggaaattatgtatttaatgcgtagccgtaggcagcttggatgtgatcggagtgaatgtgcgagtatgtgtgtgttttaacacattcgcttacgctatccaagtaatgaccgtagctatttagctttactgctcaggaccggtcggtggcagccccactaaagtccagaacattaaaataaatcaacaaattcttcaatacaccaatgatggtccaagtcagaattcttcaaccttttataataattccgaatttgatcagcaattcttgctttccgctacagacgggaggcaacatacaataattgattttttggaacgacctttccctctgacaaactttgaatggaatgtttcgagttctcagttttctacgctgtattctgcagaatttcctgatgccgttttagctcagccattgtat

SEQ ID NO: 2224 - DNA, 637 bp, unidentified
  source 1..637: mol_type = unassigned DNA; note = unclassified Tombusvirus sequence
gttctggggcgtcgtcgagagccttaagccgtggctgtgttgtgcccgtcaggatagtagtgaagttgtggagaacatccgttccgtcagagcccgcccgggtgaattggcggtggtataccttgactacacgcacgaccctaagcaccatcacgtcaccaaggggttcgaaagtcttgttgtggtggataatgaacaagatggcgcgacaggacgttacccgcccgctcctccgccgcctgctcctgctcctcaacgtgtacaagtatgtccagctcaaagttacttggcgcaactcaagggccgctacggggactataaggacgcgctactacgtagcaagtctaaggtccctcgaagagaccctgtcgcggttgcccgcaagaagaagctagacgtgctagtcagcaggaatgtgtgcctcgcagaggcagtgaaatccaagcagcaccactgtgagagtgctgatgttctcagagagatcgcgagtctcaatgtgggcaataggagcgcgcccaaggtctgggatgcagttgagaccttggtggccacgacggtggccgattgcgctctgggggtcgcttgggaccctccggtaccgacagtgacgagcccttctgggccgccactaaggtcc

SEQ ID NO: 2225 - DNA, 637 bp, unidentified
  source 1..637: mol_type = unassigned DNA; note = Brejeira virus strain AR800224 hypothetical protein 1, hypothetical1 sequence
aaaagggggaaaaaaacctaaaatttttgggggtttttttaaaaaacccaatttgttaagcttcaaatgaactgaaaaccggtattacgaccaaagtagtgcacgttggccaattttagaatacagtattttacagtatccaagattatgcttctccctaaagagaagcggacaagactttacggtagtatagtcttgtccgcttctctttagggagaagcataatcttggatactgtaaaatactgtattctaaattggccaacgtgcactactttggtcgtaataccggtttcagttcatctgaagctatactaattgggttgttaaaagcatcccgtaatacttacgagtttcatcgctcgtttaatatttctactctttctgagcagaataccacccctacaactcttaattggagttagtaaacttttcacaccttatcgtgtgaatacattgttttccagttagctgtgaaaactgtctttctgcttcctgttattcaggaagctcttctttgagactagctgtctctcttctattctctcgtaatcgagagaatcctgtctttggtcctcgcaagagaaccactactgtcttgaaggtttcttttgaagccgtcttatcttgatcttcaa

SEQ ID NO: 2226 - DNA, 638 bp, unidentified
  source 1..638: mol_type = unassigned DNA; note = unclassified RNA viruses ShiM-2016 sequence
cgcacgttttccttgtcattggtaaccaaatggcaagcttggattcgtccttgagcgagttaggttgaatatgcaactgacatgaaccatttcggtgggtgccgtaacgcaaggtgagtggctgaaaagaccacaccggtgttacttaccattgaatgttgggcatttgtagcgagagatgatagatgtgggaagcaggggccctgcttgcagaacaagtggatgcgaactgaactctagcgacagtaagggagtatctgcttgcaatgtgagtgtgcgaaacttgtgaaacacattgcgtaatcaagctggacttgggagtccggtagctttgttgctgccggagaggcgtggggaggccaccaccaagtaaccaacgatgtagcacttgcccggcatgcgccttctctgtccgagtgtaaagacaatacccttctgcggtaccttaacactggagtgatttatgtcatttgctgataatgcttgcaaatcgccttggggtaatgtccgctcttaggctggtgtacatcggtgtaaaccgcagtaggtccctcccgatgcaccagttgttgagcgaactgcgcctgggggtgtttttcaaattagggatgtgcttatgctgccctccttcatgaaat

SEQ ID NO: 2227 - DNA, 639 bp, unidentified
  source 1..639: mol_type = unassigned DNA; note = unclassified RNA viruses ShiM-2016 sequence
tcgacgtatcattttcccagacccgagcgcatgatgttcctctacgctgtgcttgttacctgtttcttggtgtgcatatggagactctgtgtgggcagaggtgccacagtgaatgctaacgcactggagcggtttgatcgtgccaccctcggcgatgagtcgagcgtcgatggtggtcacatgaccagccgccctgggtttgctgcagcaatggcgtgcaaggagaagctaggggagctgcgctacaataacgccaacaggatggtggtcggcgattttgtgcgcaactacctcagagagaactaccccgacatgaggaatgtcgatagggtgaggcacgctgccattggtgtggagttggcattggtgccgacagtcttcgcggtcgatgcagctggcttcgccagtgatgcggctgtgcggggccgtcgcgcaatggcaagtggacccaagtaggggtgccctgtcacatttcctgctcgggatacagctgttgaggttgaagctgtacctgatctcagggagcgggaagagtgtgataggggaggtcgggccaacggccctgatcgaacggtgcgctacctggctggctttgggactggagtcaactacggcgtgcatcgtaactcggctatcaac

SEQ ID NO: 2228 - DNA, 640 bp, unidentified
  source 1..640: mol_type = unassigned DNA; note = unclassified Tymovirales sequence
aggggctgaggcactcaagcactctccacacccaggagggggccgagtcgacgtcatcatcagctgaatcctgcgtggcgggagtgacgttcgatggctgctgtcggggagccgggagcaaatcaggaacgggggcggttggttgctgaaggaaaggaagcaagaagaagggttccagttcgtcgactttcatgacctgcgttctccattcaagatagaagcgcttcgggtgaaggtagttgtagtactgggctacttggcagttttgagtgtagcttcgagtggcgtaccagatggctgcggcgacgccagatccgacgcagaggagggcagcgtagttcttccaatgactacgaggagcaagctgcgggaaatggttcagcacccgagttgggatttgccgcttcatccagtcgataggttcaaatttggactcgcttcggatcacgctcgagctctggccggtaatccatcggggaagcccacgccaatacgcggtgaaggggttgattgagtcgttaatgaagttgtgcgagcgtatacgggctgacgctatcgtgactgccttgtgaattgccacatacgttactcacgttcaccgttatcgtacaaaccgtcatacgctccaaattttgccaac

SEQ ID NO: 2229 - DNA, 640 bp, unidentified
  source 1..640: mol_type = unassigned DNA; note = unclassified Luteovirus sequence
aaactcgagacccagatggcaatatcctctccctacaccctggcggtttgaatgccatgggccgtgacctacagcagttcgaaagggatgctgtttataagatgtgggtcgagggacaagcagaggatatacggcgaaaacagattgagactgatgccgcctcagcacgttctatttctgagaacgactaccgccagataaaccaggaaatacgagctgccgagctgcctaaccaaccgaactttgtataccgggacgaccctattgtgaagcaaaacagcacgtctgatttcattgctgcacgtagggctgatttcgatgaacaaagtgtatcggatttgaagtctaatgcatcaactcggacaatcactgggaatcttggtggtggcaaactgaagaagaaggcgaacgaccttgatgatgttgaggacaagatcttgaaggcattaccagaaattgattataaaccttcagaaatcctcggcgtcaaggcacggtatcatggaggatgtggcaagtggagagatacctttgattcttccatgaattgccgttgttggatgccaaccctcgagtggcaacaagttgattttcaatacaaggggaaagcatccaagaatgagggaaagtctattatttc

SEQ ID NO: 2230 - DNA, 641 bp, unidentified
  source 1..641: mol_type = unassigned DNA; note = Agaricus bisporus virus 14 isolate AbV14-003, partial sequence.1 sequence
attatttatcggttattcgtcgtcttggaccctaccagggcacggtgatcgactttggctcgatatagaatgcgcgggcttgatgcctactagtccaaaagactaggaagagcgacattttcttctgtacgatatttctatcgtctgtcttgattgacgcaagacactacgtgtattattagtttcttattctcttcagatttctcgttccctcacgggtaagactgaattacagggcgcgaccctggagaatcaattatccttccggagcttccgcccccactgctcctctcccctcctatttgtccgtttaatcgaaatggtccgcgtctacgtcagccagcgagcgttataaatgcaggccgcccccccatcactcttacacacaaagacaattacatcatatgctaaactccattgactagagctctggatgtgactcgcacttgcctcgtgattaaagatcgaaatagcaaccggtgaaatagtctagtacttaatgactcgtccgagaagggcgacgagagcctactagctatgggttatcctatattccgtgagtttcgacggcctgaccctaggctttgcagtatctgttgcgagctaccctcattctttggtaactcaagcaatcaaatcgc

SEQ ID NO: 2231 - DNA, 641 bp, unidentified
  source 1..641: mol_type = unassigned DNA; note = unclassified RNA viruses ShiM-2016 sequence
cctggcgaggtgatttttcttccttcattgttgcgcgtaaactctgcgcgtattcgatgaagggtcttttttgtgtagctttaagttttcccgctcaatcgggttgattatatgcatgttcctttggaggtcctgtaatatagactgcggattgtggctgagccgtcatttagatcgttccctactttctttatgccttgctggtagaagccagtattgaaaatattacggcgcttattgtattaatttaacctagcgaattgctttgttacacactagctggcatgcatgcctaaatgcaaactcttaatgttcgtgcgtaaccatagcgcacctgcccatgctcagatagtgtggtagctcctggctagatccaggaacagttgtagtatagaacctgctggcacacagattgtgccaaccaagtcaacaggtaggcatacctaaatgcaaacccgtgtagaaactttttggcataaagattgtgccaaccaagtaaacaggcctggctgacccaggactatgcgttaaaggtgttttcggttccgtggtcctgagtggcctacacgacgggcgcatagtagtcccctagggacgtgggtgcacactatggtgtgcatcaagacaataagccgaacccc

SEQ ID NO: 2232 - DNA, 642 bp, unidentified
  source 1..642: mol_type = unassigned DNA; note = unclassified dsRNA viruses sequence
gtcatccaccgaccggtgggtgtttggcttgcggggaaactcactgctatgcaggaatggaccaaccaaacacacaagacaaacacccactggcaccccgttggtgctcagtcggtgtatggccatcccccaactccatgcaaaattaagggcttgggggatgctaattagtatagcacacaacgcaagatgtcttgccacatgcgtcccacccgggggaggagttccactgcctacccctcagggtttatgaggacgtgcccaaaattcggatgcttggtacatcagccagatgtattgggcatgccggtgctaagtccaagccacgggcgaatgcgacctggaagcttggtaaatgccgagagactgcaacgggctagggggtgccatttggcactgcgttgagcaacctgaatgtggtgaggtacagtccaacagctaagcgagctgagatgatcacatctattgcgtttgcttctaggtgtgctcctgcgttttcatccctattaagggctgtgttctcctccgtcttcaaactgttccgcattcacttgattcagattttagtgatagcgctttatttgactcatttgtgtgcgtttcaatctgttttcaagacggaccgatcgcgtgaatctgggc

SEQ ID NO: 2233 - DNA, 642 bp, unidentified
  source 1..642: mol_type = unassigned DNA; note = unclassified RNA viruses ShiM-2016 sequence
gttttacctcactaaattaatagtttcaaacacgcaatacccaatctactagttatggcagcagcagcagcagctcttttaggtggctcctccattggagcagcctcacaattaggatctacagcaattagtgccaatgcacagcgtgaaatttctgctaatcaaattgaacaacaaaaatgggaaatgatgagaagagaaggagcatttacatcgcaagggctcccctctttcttagcttaccaaggtggcaatgcatatgtacctagaaccgttagccatttaggaggtacgaattatggtatatcggggttcaatggaaacaatctgccgtattcaccttcactcaccaggcagatgtatggcttttacaacgatcctttgcgatcaaggaccgaggcacctgccggtcccgttggtgatccgcagtttcctggacaaaccgacagaatgggattaggagctggaaggtatagtgcagttccaccaccaactcacatcggaactcaaacagaacgaacccatttccctagtagaacgtttgtaaacagtaaccgactttaatagatacctgactcattgagcttcatctatcgcaatacccaagtgattgcgaaatttggaattcgtgaatcattcaaa

SEQ ID NO: 2234 - DNA, 644 bp, unidentified
  source 1..644: mol_type = unassigned DNA; note = unclassified Cilevirus sequence
tttcatacatgagattggtatttgctcatatggattttgaattttatctttggttttatggatatgacgactcttaatcttcatcggcagttacagctgcgcctcggcccggactgtatttggtggtacctggaatgcccacacctttgaagacagaatactctatttcatatgtcgcaatgatatttattcatattttgtgtatcgctcagccgattttggtttgagcatttacacacacttagtttgagattatctgtacgtttatcacaatgttgattgacgttttagattctctcacgtatagtacgtgggctataatcggttaaaattttaaccgtattatttcctaacatattcgagatgacttgatctcccgtccttctcagtattgctataccgtttaacggtgttgagataaactggcgtcggtcgattctcagttttaccatcttgtttggtaactcttgtatatatgtaaataggtaagggttcttgcgtgccaagagtcttctgtattaatgtagtggactgctgcttcgatagagttgcagcagtacttgcattgatatgtaaatacacagagatacatatcaatgatccactccttattatggagacaaatcaaggtatgagttcacaca

SEQ ID NO: 2235 - DNA, 644 bp, unidentified
  source 1..644: mol_type = unassigned DNA; note = Raspberry mottle virus isolate HCRL Glen Clova, complete genome.2 sequence
gtcgttttcttaagtggggtagttacgtcttaactagtagtttccagcccaacacgcccgttcctctcggtgctttgttgtcgcctccatgcatcagcgagaccctatcgtcacttcgtcgatgttagtttcttgtcctcgatgctctagcttctacgcaaaatttttcgctctccgttagtttcagcgatcgatcgtctcattcttcatctctctccccttttgtttctgacggtctcttctttcaagcttccgagctcggtggttctttagttaccctttcgttgtcaaggtctctctctggtctgctcctttctcttcgcgcgtcgtccccctcagcctcaggtatacgcactcgcctcctagattctattgttgtgtcgagtttgtcccctgctatacacttttcgttgaagttacctaactcccgcggtgagtcactgtcgtctactgtgactttgggcgctcgggtactctttcttccgaagggtgtttataactccttcgcgatcggcacgtccttttcggtcgtttcttcgttgtcgcgtgtttttcaaaaacgaccagagtcgcgtttcgcttaccgtttctcctcccctgacgtgtctctgtcagaccagtttaggttttgtctaccgctaatc

SEQ ID NO: 2236 - DNA, 644 bp, unidentified
  source 1..644: mol_type = unassigned DNA; note = unclassified RNA viruses ShiM-2016 sequence
ggtagaaacccggttcccttttggtggttgtgacatgccaccagctcaagtgaaagaactccgagatctggtatatttccatttatgcgaatatttggttatgtacggattgattcttttgcacttgagttcaaacgtccatttgttcttccaaaaacaaatgtttatgttttagtgtcgtcttgtatgtatgtgtgtatgtttgagagtatgaatgttatgagttgaaaaagttacaaacacaagtcgtgttgttgttgttgaagttgttgttgttgttgaagattgttgactttgtgtatacaactttttgctcactgtatgtatttttgaactgactgtacggacgtcgatgttatgattaattctaagcgtacctaaagtagtgaactttaagatatatcttaatagctgatgagatgcctatgaaatcttggtaggatgattaagttcgatctatcgagttagtaagtggcggtcagtgatttagcgtagctctgtatcttattgtaagcgaaatgtgggaaagcatgctttgcatacttagttttatgattaacggagacagactttggacctgacctccagcccttgcgcagccgctggttgtattttgcgcacccccctgactaattgctttcaaa

SEQ ID NO: 2237 - DNA, 644 bp, unidentified
  source 1..644: mol_type = unassigned DNA; note = unclassified RNA viruses ShiM-2016 sequence
ccgaccattgcggtcgggtgtacagggggtgcgcggcgttcgggggcttcggctaccttccgcgcgtgttttagggggcacatggttgggacgaccatgtgagtagtgtgcggtgctcacgcgaacccaggcgttctggccgtgaggtggtcctacgtgaccacgcagttttggggcttgtgtagcttgttcatttgccattttggcgctgtcgggacggttcacgtcccgactgactcccgtagggtcactaaagccccgtgccactgtaaaatagggaggccggtccctgcacaccgaattaccttcctcatcccacttcccaggtggggtgtacgagccaattagcgggtgcgtgccagcgcactgaaggtgaaggccaggcggatgctgttacccgcagctatgcaccgctcacctgccgtcctatccggatgaaggcgacctccagcatgattgcccagtagtgctgttggaacccgaggcggcagtgtggatgactacggccctcagatccccggtttggccgctggggtgcggcgtgaatcaagtaacggtgggtgtgccgtcttgtagcgtcctgaggtgggtacacaccaatgggtgggtcgtgactggggtccgacctagggcaatttctgcgc

SEQ ID NO: 2238 - DNA, 645 bp, unidentified
  source 1..645: mol_type = unassigned DNA; note = unclassified Picornavirales sequence
cctagggatacagagattttggacaattatttatattacagcttatatttggactaacagctggttttgttacttggtaatacatttaacatctaaatccaactgttaggaccagatagagtgaggctttatacacgccatttgtgcagggcctcatgggactgtacaatctaagagaatgtataaatgccttagtcgtatttatgattgttcatcaaaaacttttgataaattttatatctattttaaaatttatttaatgcatttaaatatgaactaggagtaaagttctatagtgaatagcttatctggggtagcaacccgtataactatagaagtaatatgcctggttcctctatttctgactgtgtaggaatttttatggagaacgtccaactaacagtggcgcttatcctaagtttcgttagtaaacttgcctaaagcttttcgatcggtaagactcgcctagttgcgacgacagatcacaatgttttaaatttaagggagatagtcctcttatctagtgattcagtattactgtgattattactatatctattaagcgtaacgaccttagtacgtatagtaataagagttctaaatgatgaagatttgaagaaatatcccgtagtcgtattgttaaat

SEQ ID NO: 2239 - DNA, 645 bp, unidentified
  source 1..645: mol_type = unassigned DNA; note = unclassified RNA viruses ShiM-2016 sequence
ataaaattccgtacaacgattagtcgccgattaggtgctttgtgaggtattcacccaggcctagtttcgtgcgcgtgctaggttgctttggctataaaagttggagtagtataagcagcaaactcctatatttaaccctcattgaggggtacttgcaatggctgattgccttttatggagggtgcttgtaatggcctattgtgcgtgcactataggttcctaagggtataaaagtattacttgtatgttccattaaaaggttcagttcctcagggtataaaagtattgcctgtatgtctcatgagggagtgcgacaccccccttttaagtttcagtttaacttttaatttgatgatttaggttctggtgtctgaggtattacaggttgcgcgcctggacagcacatgttagtcatgtattatggtgtttaccaacacgtatctttgttcctaatgattcttttaggtcaagataaggaattgtgtgccccttatctgataagctgaacaccttgggatacggtcctggcgtttagttacagagacacatagccccgtggggttccctcgtatcaaatcgtataagtggcgaaatgaaagcttagtttctttgaaactagcaagtaagaatagccaaccctaagaa

SEQ ID NO: 2240 - DNA, 648 bp, unidentified
  source 1..648: mol_type = unassigned DNA; note = unclassified Ampelovirus sequence
atataaaaactaaaaaatttttaagaaaaaccaaaaacagagtgtttgtttgacttttcctttatttgtagtgagtcagttgtaatttcgctgtttccactatcttatttttatcgtgtttttccagtgtgtagttaaagtcaagtcgttgatttggtgatagtgtgtcgattgcgcaccttgtaccggatttcccgaattgacttattagagtcagtaggtttgtatcggtctcgtttgtttttctttgtaactgttcctgtctgcttctgtaatttttaatttcgggtttatacgcatttgtgtattcgtgtggtttgttcagtttccagttgtaacctgtattactatttgggtttgtcttattaccgtctacgttgttgtttggaagttcccggaaaccactttcttcccaatcaacacacgtcagttgttgttcattctccctgtttgtttcgctattcctgtcagtagtgcatccactgtcatcctcgaacactttagttttacagtttcccatttttacttcctaacactcttagtctttccgttcgtttaattcctttttgtgtttcaaaccgtctgtggttttaattttcctgagatataactttttgacgcagtaatctttctcttacaatcttcgaa

SEQ ID NO: 2241 - DNA, 648 bp, unidentified
  source 1..648: mol_type = unassigned DNA; note = unclassified Picornavirales sequence
aatcatcactcatcaaacgttaagtcccctgtttatacttctcgttatcattactaaattagaaactcatctttgcggtgatatataattgtcgtggttgtcgattatatattgtcgtgctgtaggatatttgtcttgattgttgagatattccaatcaagcgaccttctatctaagttgtcgagcatatgaatcgcatagtttattcttaattgataccgacttaccctcgccttcatgtctaaataagctatgtctcatatgtgacggattacagcactgttaacgttttgagacgatatataaggagacctaaaggggtcctcctggttttaaattgagtacatattgtaccgtaccaggcaaaggcctttaggagatctatatattgtttcgaaatgttgataagtaaatggtttctcaccccctccccgaaccttaacgtgattgcactcatacataagaatctcatgtcctatttgaatcatcaggattagactcttttgcatgtttaatgaactcggcgcttaaccacgtcgtttaatgaattagaacaacccaatattgtaggaaaaactttcggtgatataaagaaccgatgacaggtgtcaaagacactgaccgacggaaagacgtcacaacaaacta

SEQ ID NO: 2242 - DNA, 649 bp, unidentified
  source 1..649: mol_type = unassigned DNA; note = unclassified RNA viruses ShiM-2016 sequence
gcggggttttccccgcatcgtcttttcaaccttatcgaatatctgtgccattgtgtcatggctatttgatattgtatgcttcttttgtgctcgttcggcaatgacctttccgcacgatcactttggcagctttcttttcaccttccggtttctttttgttttatgttagtttgttttgtgctgttttgctgtatgcgttctctacctatgtaacgccagctaaatgtttactataaaaatacttttcataagttagttttaaatgcattccggtttcggttttagaagtctttttgttgctatcttaattatgtatgctcctagtgaaggattcgctctgctagtttaaacttagtatgacatatttaattattttagtggcatttagcaactccattaatgaacgtttgtaattaggtgagatacgtaggtctcctgtaatgtcctttgcgtaagttgcttggttagtcccttgcttcttagacacttcgtgtggtggacctcttgcactgactgttgaggttgctcataaattacgaattagtaaggttggttttaggactttttatcagctttttggcccctttattataaaagctgtaggtaatggcctcatccatacgcctaacattgtttaatcaatgtgaaa

SEQ ID NO: 2243 - DNA, 650 bp, unidentified
  source 1..650: mol_type = unassigned DNA; note = unclassified Picornavirales sequence
tacaaggcctatacagaccacctagatcagcggaacttaaagagaacgtataattatcaattattcaaacgctgatctaaatcaacttttaaacaattaaccctgacacgtccatcattgtaaaatataattcatattcacctttgcatgagcagttacgagtacgaagaaacgaagaagtttatagagcgagtttatgagaagtttaaaacgcacttgcgtcatcatccgttgtgcacttctcagttaccatcaattcgacagtgcctgacttgctcagagtacttcaccgcctatttggactatttggtacatattttgtcatctttaccaatatccagacgagaatacaagatccttcgtctcgtcgaaagcctacaattggaaattgcagatattgtagaggctggcggacttgctcctttcatgtttgtattttcttccccttctgttactcgtattgttggcgaagaccttcatgaagtttggtagatcacaatcattcattaatatatcattattcattgtatttaacctcattctcctgtatttatcaattagatatcgcaacgaacgtcgaaagaagctaaaacagaaggctgaggacattcttgaatcttcgcgcttgaatttgtttaaagacgatcacg

SEQ ID NO: 2244 - DNA, 650 bp, unidentified
  source 1..650: mol_type = unassigned DNA; note = unclassified RNA viruses ShiM-2016 sequence
ccgatctcgcctctcggcttggactaacctggttatcactaaccagtaccgtgtacaagtgactccacatgtggagactcctgtcttcacccgttaagtggcctttaactacacgctttgacttgttctacgaacgaatcaggcctgtagttggggttgccatcctggagtagcattcttccttgtcttagcctgttcttgaacagaattagactaggaaggcattgctcccagatggcttcctcccgttcgctggagttctcattagaccccagcagacggataagcccacctaatagtggtcattcaccattgcattgtgcgtaagtgaatggttgtcagaagtgacgtgatcgtgtcctctctcgaaattgttcttgttcaagagagagctcatgctgtgactttacaaccaccggtgtcctatttaggacaggtaccggggggtgcagcccaccccaaaaccttaacaggataggactagtgcgattgggtaaccgcattatcctttaccaacggtaagggagtccgaaatacaactacctgctaacacgaaaacaaccccaggtattagggtcgttcccgtgtcgaggcgccgtactacttgtcctagcgaccgcaaggtcaatggaaagtcggacttgaaggct

SEQ ID NO: 2245 - DNA, 652 bp, unidentified
  source 1..652: mol_type = unassigned DNA; note = unclassified Picornavirales sequence
cctgggttgatacccagtggtcatttggacgctttggtaaggaggcgtaattatccttcccatgtggaacctagtgcttaggttcttttatatgttctttgtttgtcctgtatactttctatcgggcaatcttgtagcctaacacaatatgtgttttgggttgcctaagataatttcaattttaaccagtccctatcttggggttgtgcctttctttctttcttatatcttcttaagctgacttacttgctaatccgactcctcgtcaacgggagggtaaagcagtatcactagggtattgtgatgtaggagaaaaagtaagtaggaattatacatgtaacgaaagtaatttggtactttaaactctcttaatcccaaagtgtggtattggtcatgttggagtaggctacgggtgaaactccttcacatttagtaatgtgttcacacgctaacgctacggtagaagacagactaggtcttattctcaacgtagggggacgggtgtatgttcatgactagccacatattaaggttttgaggggctgaattatataagtatgtgtattaattcttggtactagtccctggggactagcccttttctaggttgatattagttttccccaattttaaaacatatgagatttacgac

SEQ ID NO: 2246 - DNA, 652 bp, unidentified
  source 1..652: mol_type = unassigned DNA; note = unclassified RNA viruses ShiM-2016 sequence
gggccacgtcggaaaaaggtaacaaacgctacgaagccatgtacgtcaatggtcaaaatgacgatcatggtgtagtgattaaaggcataagaggaagaatagtttatgctgaagaacaagaagactggatggacatctcaccaactccaaagaagaaggtgagatcgtttaccggagaatctctttcttcgaagaccacaactctcaccccgcagttcgaagaccaacctccttttttagaggaacgccaggcccagcaaaagctgagcctggaaacgctgactacagccactgccgaactcagtcagaaggacaagcagatccttctgaacgctctgatgatgaagactcagagctcggggccgagacagaatgctactgtcttggatacagcacaggaagaacctgcaccgagccaatctggctcgacgttccagccaccgagaacccaggaccgggttacgaggaaggcctctacgcgttaccacgcgtggactcctgcgcagaaaagaagagtttctgtacgcacgtccagatcaacgccaaatcgcacttaaatcacatcccccctactcaacacgaacaacaatatgtcgaagaaaacatcttaagacatctccgctcaatagctggtgtttactgctattccacc

SEQ ID NO: 2247 - DNA, 653 bp, unidentified
  source 1..653: mol_type = unassigned DNA; note = unclassified Picornavirales sequence
gatccacgaaattcaggattgtgctttggtcaggcaattctgaaggagagatctctgtatcctggtatgggatctcgttgacctgatgaggacggatataaagtgtttgcacctgtcacgtagtggggtcattgcagctattctattattgctctggctgccgcaaatgacctaggctcgtgtatgtgtttatgcattcacactctgagaatcaagacgtgctctgtaaccatcacaaattctcaccgtactatctcgacttgtcttgaatggacatgaaatggaacggaatggacatgaataagaaattcaattttggatatgcacgactggcgactgcgttgtactgtctttcctcttatagggctgacacagacgttgctttaaagcgtgaagaagtagtttccaattttgtcttaggaaaataatctcgagcgattcgcatcctgttagggaataggattgatgctccttttagttcttgtatactgatgactcttgtgaatggaatgattcagtaacgttagcatccgcttagccacgggtatcgattaaaactggctcccacactagtaacaaggccccatccatgttcaagagcatgtagttggatcgcctggtgtcagcgaacagtattcagtttttctgaatcg

SEQ ID NO: 2248 - DNA, 654 bp, Human orthopneumovirus
  source 1..654: mol_type = genomic DNA
actcaattatcaacattgaatgacaggttcacatatatcctcaactgcacactatatctaaacatcataaacatctacactacacacttcatcacacaaaccaatcccactcaaaatctaaaatcacttccagccattgtctgccagacctagagtgcgaataggtaaataaaacaagaatatggggtaaatagatatcagttagagttcaaccaatctcaacaaccatctataccgccaatccaatacatacattgcaaatcttaaaatgggaaacacatccatcacaatagaattcacaagcaaattttggccctattttacactaatacatatgatcttaactctaatctctttactaattataatcactattatgattgcaatactaaataagctaagtgaacataaaatattctgcaacaaaactcttgaacaaggacagatgtatcaaatcgacacatagtgttctcccattatgctgtatcaaatcacaatcctgtgtatataaataaacaaatccaatcttctcacagagtcatggcatcacaaaaccatgccaaccatcatggtagcatagagtagttattaaaaattaacataatgatgaattattagtatgggatcaaaaacaacattggggcaaatgcaaca

SEQ ID NO: 2249 - DNA, 654 bp, Menangle pararubulavirus
  source 1..654: mol_type = genomic DNA
caatcttgactggaaagtggataaaattctctctcagcagtctgttattacccaaatcaaacacgagcaacatgcaatcaaagcaggaatagccactttggaaggtcttatcaccaccatcaagatcatggaccctggagtaggtgatggcgccactgcggccaaatcaaagagattatttaaagaagcccctgtggttgtgagtggaccggtcattggagacaaccccattgttgatgctgacaccattcaactggacgagttggcccgcccatctcttcccaaaacaaaatctcagaagtccagcgctgcctcaccagcggccctatccggctataagatgacattattggctcttatcaaggaatgcattcccaatcaggcaaaacgccaaaagtttgaaatgcaagttggcggaatccgaaatgagcaagatttcaagaatctccgccgagagataatccgcagtgctgcccaataatcattttgtacgctactacatcctgccaattcagcacaatttgattaatcaccgcaattaattagcaactattaatctcttcttatgccaggctttgcttatctgcgactcttctttgagctttaagaaaaaataagtgagcccgaaccagttaagaagggcacactccgacc

SEQ ID NO: 2250 - DNA, 654 bp, unidentified
  source 1..654: mol_type = unassigned DNA; note = unclassified Aparavirus sequence
taaaattgtacgtagggacttttatgtccctacgtacaatttacgcagaaattagcgatataatttcaaaattgttttgtggcgcctgagcagcctttttaatggtaggagcgtcgatcccccgtatggagtggagaatataaggctcagctaggatgacacgcctgtacactgtcgacattagttaagttacaattacacgtcttttgccgaagaaaccattttagtcaattgattatgatttttgtataatgataaacagtgatgaactgtataactcatcgataacaaaacggattacgaacctatttgtaactatcttgatcgaagtctagtagatccccaatatagccctgaaaagcttgagggacgagatagctctataaatagacgtgaggctttaaatcctgataagtacattacctgagaattcctccttttggagtttgaatttatataagttagtaccaatagttaatatcatttaagtatgttattattgctgaagacatgtatttcggataataacctctacattgatatataaattatatgcaagtctcggtggatattgcattatggtcgcagttaacctgtagcttatatattcctgtgtcggagcagtggtaatggagccggataatttcgccaaaa

SEQ ID NO: 2251 - DNA, 654 bp, unidentified
  source 1..654: mol_type = unassigned DNA; note = unclassified RNA viruses ShiM-2016 sequence
gtacgtctttagacgtacagtcagacttcttgtttagttgtgttcagttcatgttcaggtttactttatgagaagtgacctacatgtatttgacgcagttaaatgcgatatgacgatattttcgggtgaagaaaacacctcccattttgttgggtaaaaaattacattcttgtttttatggcctattggcactgtagcaggttcgagccctgcaaggccagtagatgaagaccaaaaagagtcattttgtataggactctgaatttatttacggtgaagttagatagaacgcttgcttctgaaacttatagagtacgaacatttgcgccagttatggcactcctttggagaactggtttatattgatgtgtgagacttgaggactcgatcaatatagcaaatatcacgtacataatattggaaaagatgagcaaggccagtaatctattctgatccctttgatttatttagggtgtataatttgatgctgacatttggtaacgggatttaatttaatgtactgctagtcccatagcgtgaataacgtttagcatatttattactagtatcttgggtcaacagccctgggtagcgcagtctacggagcgttaaaagtttgttacgaacaaccaattttggtgtagggggagcaca

SEQ ID NO: 2252 - DNA, 657 bp, Berhavirus beihaiense
  source 1..657: mol_type = genomic DNA
gaatccctcataactcgataggctccgatttttaaagcgttgtttcctaagaggggtatgacgggtgagttacaaggacatgcctatggggtaacattttttggttttttggtttgtgtttgtatacgcttgcttatacaaaatacaaccaaaaaaacaaaaatgtcaccattagacacgatcttgtgactcactctgtcgtacccccattatcaaacagcgcgttaatgagcttaaaaaaacgaaaacacaactcaggaactttgcaaactcctaatcaccaatattcggttcttatcctaatataggttagacataatggcgaaaaatgtgacttttgttccaccagtgaggtccactgagacagaggatgagactcttgccactctctcagctatgagagatcagtggatcgcccaggacggtcttcccctttggagatctcaagcaggggtaagttagtcttcctagtgccatattatatcgatatgaggtcattaacattgctgaggtactaattcgtctcgtttatcctttcaggtaaaagtggcaagagagaaggggttgctcgcctacaactcgagtgccaagaagtaccagactgcaggagatctaggtcaggccaatgcctcgcagttcgcccaggccgctcacaag

SEQ ID NO: 2253 - DNA, 657 bp, unidentified
  source 1..657: mol_type = unassigned DNA; note = unclassified Picornavirales sequence
ctcttccgatcttgggggttcgcccccatgtctcatttcaactagccgtgtgtctagttaacgcaccgcctcaccctggtcgttatcgggtcggttcttgcgaccgttagatcgtgagcgtttctgaggatcagttcgtataagttctccggtgtggcgaccgtaaaatcgtcacgtcccatgcaatagatgacgttaaactcgtttgccagttacataaaggaatgttgttacttttaaattgtctgttacatttaacatcttgccagtatgatgctactgtacactacgggtgtaggaaccttgtagtgtgacgtatcactcatatgtggatgggtgctccagacctttatggaagctctcagttagtagtgatccttgacttcattgagccctggtaacagtggaagtcaagatgtatatgttgctcaacacacttcggtgctacgaagctgtttgtggaagtactggcgaggttcattctgaatcatatgtttgtcacatagtcagggagtgccgtcgcttacgacggaccctttttctttataattacaaatctgtgtctcaagtgttgttggctggttttcttcttctgttttcattgttcatatatatacgtcagagtgaaagactcggtatatacaaaactgatccaga

SEQ ID NO: 2254 - DNA, 658 bp, unidentified
  source 1..658: mol_type = unassigned DNA; note = unclassified RNA viruses ShiM-2016 sequence
agctgctccgccttgggcaggcgttgtatgcaccccgccttggacagcgtaaaggtccatttctgtccagggatgacgtaaaaagccccgcttgggacagcgaaacagtcctattccggacctatccgggatagcaaatgcatgagttgaaaataggtatgtacaacagattactgcatgtttaattatttatatgtttctttttcacatgttcagcattgtacatataggcacagccctcgcgctgtactggtattcaccagagagttagccactcaacaaaacatattgccacttggagtattaagcgaaacccttgtggtatgaacataaatagcttactgaaacaaacattaataataataattctaacaatccatcagttaatgatgggccttctttttctgtatctcagacgagtaatgagtcatcagcacaaaatgtacattttattgatggagactcgccatggacttatgaggtttcacacagcaccgattcgacatccaagcttacaggattcgatgacgcggacctcggatcattcttatctcgaccagttaagattaaagaatactcttggtcaccaactgttcagttgtttgaaacatttaacccttggactgagttttttaataatgcggatgttaaagataaa

SEQ ID NO: 2255 - DNA, 659 bp, unidentified
  source 1..659: mol_type = unassigned DNA; note = unclassified Picornavirales sequence
aggtcttaagtcctggaaggacattaaacttaacccgtcaggaaacttcttttcctgtttttccgtgttttacgttaaaaatatggagtcagtggaacttactcgcctcgaagatgtgatccgtaaatctctttcattctagtataaaatggagattctatcaggctatcattcgtgaaacggttgtgtttttacgcatagatcagtaaggcgccgtgctggcagccccagcaaagactaacgaaactagatatatcctaaagggcctgggtggaccgaatggacgaatataaccacctgctgaaaataatacaaatgcacagggacctgttgcccctattgcaaataataacaactaccctgtggcagttaccgctggtgaggatactcacactgcatctgccacaaccggtttcacaaccgatgctaacatcgcaaatgtagcaccacaagcacctgtaggagttgaccggctttttcttgcatcgagttcggacaattacgaacaggatatcaagaccttcttggccaaaccggttgcaatcaaatctggaaccatatcgacagccgatgttgttggtactcctttgtatgctgctaatttacctcatgatggtctctctgctagtaatatcttcttaaagaaaattgaaggtttt

SEQ ID NO: 2256 - DNA, 660 bp, unidentified
  source 1..660: mol_type = unassigned DNA; note = unclassified Picornavirales sequence
gcattagcccgacttatagttggcactttgagcagtgcccgctttcgaaataattgtgaagattcaccctccatcttcgaccccatatctacgcatatggcgttattatgaagcaaataccatgtccctatttctagctcatgtgtattttcacttttattatctcatttgacttattctaacgcacattcttccattttcttagtgtgttatttaattatcaaatacaatacaaccccccctatttctacatggacatttatgtccattttgaccgattttttgggagggacaatttatgcttttatagatttatcatgggatagtggggtacaacccactactttatgttaatcaattctattttaatagtacctaaacctataattctggatacgcgttattatacgcaagttataaagcgtctatccctgtttagaaccatgtttctatccaaatacgatgacatccagaattgcatactcatgaaccccagttttaaattgaatttgacgatcccgtaaatatacttcagaatctgttcgtcctgattttatacttatgtagggtggtttcatgataaaaactataaaagaacgtccataaattgttttcccggaatttattctttttaaattttcctgaccatttttaaaccaa

SEQ ID NO: 2257 - DNA, 660 bp, unidentified
  source 1..660: mol_type = unassigned DNA; note = unclassified RNA viruses ShiM-2016 sequence
cctatacgtcgaaagacgtataggtagcattgtattatttgtgttgattagtttactggttatcacaaactagtatactgctgagacatatttagtaatttttaacgggtgatttatgagaacacctctccaaaaggagtaaaaaatctcattctttcaagctgtattcagctatcaaaaaacgttgtttcttcaattttcttcaaaaactgtttgatgaagttagttagattcactgatctgtgtatttacaaatccggtttaccgggaaatttggtacatttaagaccacaatacgacctaatgaattttaattgtaaagtaggcaaataattataagtcctatttttgatttgaattgtggaattaacgttttagggtgaatgaagtctgatgatatcgtgtagtgataaaagagccctgagaagctcgctaccagtcacagatgtatatatgtcgtgtcggacatagtcgagagacacataaggcactattcggttagttatagttaaagactacgctataattgaggaagatgaccggagtaccagctcatgcgagtaaaggtacgcaatttcaaatacgatcttcccgtatgttgattggcaagttaacatactatatatattttttgctgctacaaacaacaataatattaca

SEQ ID NO: 2258 - DNA, 662 bp, unidentified
  source 1..662: mol_type = unassigned DNA; note = unclassified RNA viruses ShiM-2016 sequence
ctgcattaatttgcagcatacatatttgacccagatgagttcggcctgggataacaatagtcgacaaaacttttaacccttttttattttcagggctgaccaccctctttcaaacggttagtgattgtctaataccacttgattattgggcaaagtctttttagcgtctgtttatgatttatttcattgtgctaaaacactttttgactctgtgcattcaggtatatcgtgcattgaactttcatccttgcattgatagaacggatttcatcagattcattgagtatttcttgatacagctcagtatagatttgcttgacgtggatatcagcccacgatactgatgtgattgattagacgtagtctgtcattcgagaatattaatactctttgtttccaggtgtcttcttagtaagcttgtctaactcagatatcttagtgtttgttccaaggaacgaatttgagcctacactcttgctaaccactggagtgtacaaactttgaggactcgacaccttcgaagggcttgtgttttaggccatgggacgtctccgaaccttataattccttgattagttgaatatgtagctcaaggtggattaggcgccacccaactatgatttgaacagttcaaatgagacattaggccgatcatatatact

SEQ ID NO: 2259 - DNA, 663 bp, unidentified
  source 1..663: mol_type = unassigned DNA; note = unclassified Sopolycivirus sequence
ccttttgatgtttgaattctaattccgttctcgccggagatgagtaccggcttgagtttaattcccaggtagcgcgagccgtgagtcagcccagacaagcgcagtagccctacttggagaggttctccttgagcgaccagaagctggcattgaatcgagccacataatgctgagagtagagggatttgcattctattgtgaaagcaataatttgagagctaagcccatcacattgtgcactcggaatattgtgcagcgcgaaaggttagtaacattaagttggcgaaaggttagcgcagcaatgattggtggtaacgctggatcttattgtggaagcaatggatgaatatgaagttgaaatcaggatcaccacacccccgcagcatagcggtaccgtactgaatgtcacaatccagtgatgatttgaagcctataacgggcggacgtgtttaaatggtgttttatgtggatgttagttcgccggaatgtgcagctccggatatcgagtcgaagattcagtgaccagtggagcaagcaacataggtaactatttcgtatgattttactcacaaaattgcactgggcaggagcttccaaaggaaccttctgcttctcgtaactgcacacaaactagatttcttattttcgaagagcatatttaaa

SEQ ID NO: 2260 - DNA, 663 bp, unidentified
  source 1..663: mol_type = unassigned DNA; note = unclassified Picornavirales sequence
ctgcaagtcgtttagacttgtagagggaatgttagttaatagctgtgcacatgtcgtttagactgtgtattttctagtcaccttaattggtgcataataaaaatactgttttttgttattgtctgataggactttaaactatcaaacaaacctttcgtagatagggtcatttctctgaacttagatgagaaatgatatcaaactatttagtgaacgatggtaacgatgttgtgatacttatcacaacattttaatccatgtcgtctcttaattgagacggataactacgaaccgcactgtttaattatagtgtacgtgcactcgcacacttaccaaccattttagtattggttggctatattcttatgaatatattgtaatattgtagtataaattaaactttgagaccaagtgttgatatagttttaattttgtataattggaggccatagcaatgaggccgttgtatgctttgaacaaaatgtaaagcctagggcgaggaacttaatagttcggaccctggtatttggagtagaagatataaaccgccccgttcaaatgggtaaaccaatttttatgctgagcagaaggccgcctagcccgacctgcaagctactattcaattgacctttggaagctgagaagatagtcaatcaagaaaaa

SEQ ID NO: 2261 - DNA, 663 bp, unidentified
  source 1..663: mol_type = unassigned DNA; note = unclassified Riboviria sequence
aatctcaatcttctattgagaattggtttttagattcattttacgagggttagtcaatgagattattacgaaggagtcctaattgtgtattctgtagcaggattgtacccatcccgctcatactaataaacggaacacgccttacgggaaatccgtattgaagtacgataaaggctgagcccggccttatcaacgtgagatctgagaagtgaagcacttgcaatgtggatcttcaagagtgattgttatttgcacgccagttcaatccagattacggtgcaaatgattcataaaagtatgagtacagatatctgcgcaaacaccctagtattcctaaccctcccctcttaaagcgtctacgggcgttgcaggtctaattgaaaacagcggtctgctatagagggagaattagacactaactcttttctttctcgcctcggagctttatagcgatgtgggaacgcgaacggtcactctctaactacttgttggttttgagagagacttagtacctagatacctaaggtgagaatgaacattgttatcaaaattataaaaactgccgaagcgctaacaacgtgaggctgttgttttctaaactttcttgacccataaatcgtatttagtcgtcactaatacgtagcaacgtttgcagcgtccctt

SEQ ID NO: 2262 - DNA, 664 bp, unidentified
  source 1..664: mol_type = unassigned DNA; note = unclassified Mitovirus sequence
gatctctctcaccgaacctggccccgggcaaatgccctaatccagaggtgaatgtgtaaagtctcaggccaaatggggttggagaaggtatcaaagattagattaataaatgctttaaggcttttagttaaacttcttgcttgattccgtccctggtgtgcaaaagcacactacactcgagaagaataagagctagataaccttagggataaggggatctaactccgaaatacactctccaacacccgtgttctcctcctccttctccggcagctttgcggctgtcgagagggtaaggaacgagataggtgcggattgacacttccagtccagtataaaaactgaacaactgaagtctatctgacacatgtataatgttttctaatttagaaactcatcctaagtggaaattagcggcgaaaagtcagctatggggtaacccagatgctgtttcctaagctaaattcgactctccaatgttgaccttcttaacggacgacctcttaaatgtgaggaccctattaatctgactttgatcggattagaatgaagacaccaaagggtaaagagttggatacggggacagtgagacactgacctagtaccaaacgctctagcacctctggggtttaagggagtttaagcccttttaatagtagtaaaa

SEQ ID NO: 2263 - DNA, 664 bp, unidentified
  source 1..664: mol_type = unassigned DNA; note = unclassified Picornavirales sequence
accaaggcataatcacattggaatacggctctgagtcccttttgaacggttaagaactattcaactgggaaggcacccgctcccttgtggcgatgtccaaggatgacaaaacacaaaacccaactctatgtttttgtatacgtatgaaatcttggtgttgttaaatattagcagccaagtaacgtaagacagaataggttgagaaaaccagaaactaatcagtaggacctccgaaagttagaccttctggcactactctgaacttattaaacgggatctctagcatctaaattttagtcgctgacgtaagcatttgctagtaagatactgtgaacagttcatcccagatctatgacccgattgaaataagaccatcttatgaacgaataacggattatatgatttgacggatagtctcattgacatgcacatagcgagtttaatatgattgaagtagcaaaccctaggggaccgcaatgaatatcatattaaggttgaagcgcactcaacccttgtcacgagatagtaaggacgttttacatagtactatagttttctcaaaactgtgtataggtgcggataacattgaaaccgttcaccgacctcatgggatcgtcctaggaaagcccatgttgtatgataaactaggcctcaatgtagcaca

SEQ ID NO: 2264 - DNA, 665 bp, unidentified
  source 1..665: mol_type = unassigned DNA; note = unclassified Picornavirales sequence
tgcgggtaaactcccgcatgtgtgaatgaggcgatgtcccaggaactaactgccgatcctggttttaactacgatccgtatttgttactaatgcgatatccccccattgtttgcctccatgttgttttcaacgcttttggccttgagtgttatcaagtgttttagcgacatagtgggaagctacggctgcgtccccatttttgagtggcgacccagttttagtggccactctgtccctgaactgcgctataatgtgaatttatgttcacaaaaacggactgatgtaactgttaatgactaaggaatagtacctcactgaagtatcaagaccccgttcgagcggtgtacatatatggatggaaaccttgtctgagtcatctcgaatactaatcaatgagggatgtcgagtaagcatatcatgaaccacatagaatagtggggtttcggggttagaggctctctgcagcaatgtatctctaacaccatggccgaaatgagagatagagaccacgatgtttgtgtgtaagtaatgatgtgtggaaagaaaattctgaatgttggtatgatatcagtctaaggggagtggctcacctaagagctacccaaacatttcacagcagacaacataacgtactgagagtagttggaaggttccagaaatcagt

SEQ ID NO: 2265 - DNA, 665 bp, unidentified
  source 1..665: mol_type = unassigned DNA; note = unclassified RNA viruses ShiM-2016 sequence
cttccgatcttgcgtaagcatgccctaagtatttgtggtggtctttaaaaagacatgattaatatgtaatatctccctttttaaggttttccctaatcagtcaccaccataatgccaaatgcatattacaaatggctttttcaacgttcgtgaaacgaattcacatccactattctagcgaatcaatgctcagctagtctagctcattgtgaatgttagcatcactgcagagcacatgtgatcatttctttgagcagagcggacccagtggcaatctgtctttgccggtttaaaattgtaccttaacaatccgcctatggtaacggcgtacccaggaccgcaaatccattaatgggataacatttcccatgttcttttgatattatgtgaacatgtaaatcttcaacaaaatatcacaatggctctatcaatctttcagcctcgacagttgaaagagggctctctagggatttatgtctatggcccctgtggttaaaacccgcccatccggaagtgtattgggactagcaaaggaagaatttattcaaatacctcctagttcttggatctgaccgggagttgatcccccgggtacactaaaagatgggacaggatctccactaccgcctgcatttaatagactgctttcccgactttgatatact

SEQ ID NO: 2266 - DNA, 665 bp, unidentified
  source 1..665: mol_type = unassigned DNA; note = unclassified RNA viruses ShiM-2016 sequence
agtgttagtcacttgcatgaagagtagccgttgacagtatggcgatcatactggcgtattgggctttcacttgggtagcagtacctctgtgcctcgtctgtacgtctccctatctcgggagtctaaaaatagattcggtggttcgacagtttcgaccgagtgctgtgatggcacgctatctgaagtctgcggttgctgttggctgcaacagcgttgggcgcgataagtctaatatgtttgatgaatcacttttctttgttcgtatataaaaaacattaagttgctttttacccctatgtcttaggacagtaaaaattcatacacgcgccgtgtactaaagataggcgtattcatattctttcgttggcattttcgttaaatggccgacattcttcaaaataccaggtaagaaaccgcattgtgagctggaaattgcactgttacatttgaacctttttaggcgagctggattgctcatgtaactgttggaaacacacttcgcaaaaggtggatgatatggtataactggtcactattgaccgcaaggagcattatgtatagtgtgtgctctgtaggcagggaagtgctgctgtgttactatacacaagtcgtcctttggcgtggttgccattggatctgttataccacacacagttttaccactt

SEQ ID NO: 2267 - DNA, 666 bp, unidentified
  source 1..666: mol_type = unassigned DNA; note = unclassified RNA viruses ShiM-2016 sequence
cccggagccctgcgtacctacgcaggactttcttttaacgtcacctcgacgtgactgaggcatttacacaccctcttttgaggagcgccattaatttgacttgtaaatgaacacaaaaccggcccccaaaactcaatgacgacaatctttagaatttaacactacccgcttttaaagtaggctctgttatttctattgaggataccgcaaagtttatctttcaaaacaactcactacggaagataagtgaccacggacttcatacaataataaaaatccgtttaaaatgacgtgcacaagtaattatttagagactcttagtaggatatgccaagatgcgttctcgcatatccatagtattaggacaatctcacttaattaatcaccaatcttttaaacttgataataaaatttgtatgaatgatacattgaccctgcgaaataaccttttaaaatacgatttaataagataataaaaattgaattgggaactcaataataaaattcttatgtcggtgttggcgaaggaaatttcaaatctatgacaacgtgaacggaaatgaaacatcaggtttttcaactacccgcatttatgtaggctcttgaaaccaaaatcaacggttcttcggaaccaaaattttagaattaaggaaaacaaaaaccaca

SEQ ID NO: 2268 - DNA, 667 bp, unidentified
  source 1..667: mol_type = unassigned DNA; note = Solemoviridae sp. isolate ybw116shi01 genomic sequence.1 sequence
agacagtatctgtatggtgtcggggtcgccagtagatttccaactgacggtctttcctctttcaaattgacctaacaaccattctggtgatgactccagacgttgcttaaaatgcacgtgaatcaagttctgaacatagttggctgagaaaccaccattgacagcaccgcccatttgatgaatcccaaggagttcattgcctttcatgtacgcagccccactataacctggcagagtcatctatacaggtagtactctgcaaggttatagtggggctgcgtacatgaaaggcaatgaactccttgggattcatcaaagcagccccactataaccttgtagagtactacctgtatagataactctgccaaagctaacagcatcgtgcgaaacatttccaacagttcccttcccatcgggtccaacaatttggcctgttgtccgaatctcatccatatgcccgacgttagaattgctcaatcccaatcgggagaactccgcttcgtccaggacaatggcaaccagatcagcatccaaagggatgcggacttttccagctaacgaaagccagacgcccaacttgctccttgcgcacttaaccaaacaagctttgggattttaattaattcaattgcgagttagaccatttattacttaacattcgtaaca

SEQ ID NO: 2269 - DNA, 667 bp, unidentified
  source 1..667: mol_type = unassigned DNA; note = unclassified Picornavirales sequence
tggtgttctcgctaggactcttggggtgcgaacccccttttcaacaaatattgttgaattgcaagtgatgtaacgtattgcactaattatagtaagtgttataccctccacaaaaatattttgtggagtgttaaggtatggattgtatagggcattagcaattaagtctgtaggccgaaccggcatgcacggtacatttgaatggactggagttatggtttgaacaacttagaagtcactgtgtgtattccttttaggttgcacattggcccattgatgaacgcaatgttagcgtagagtagtcataactattttgttcttgccatgttttcatatcttgaaaaatgtctcttgtttgttggcgtatggtttggtgctatcgtaaagcacaattccccagaagtcgtaagactattccgaaaggatttgggttagccctgggggaggtaggtctccatgactcagacattggatcatggcattgcaaaaacacccatgttgaggtggtgcccaatagatcatgaacaatctctgtttaagaatgcttctacatgggggtctatggcgctgcgaggaatatggtcatgtaacaagtagggttcctcttctacaaatgttgtagttggtgtttagattacaatctttaggaccataccggcagcgttaa

SEQ ID NO: 2270 - DNA, 669 bp, unidentified
  source 1..669: mol_type = unassigned DNA; note = unclassified Picornavirales sequence
gatctctgtgggggagttttattctcccccataggtcattttaaagcacccaacatgttatgtgcttaataaacttgcatgcgcgtggtctggcgggtggtttcaccctccggggtgtcatcatcaacgacccggtttctgtttatcgacaaaagcaggggcttggtggatgcctgattcaccacatacatcgaaacatgaagatgtaaaatttatgtcgttggtaaattacgttaaagttacaaccaccaccatcaggcaggattagattatccttctacgctcggtagacaaaaccttgtattcgggacaatctaatttggttatgaagtactgttgtgaaacagtgtgggaactgcttggttaggttaattcgttgtggagaatgcaccgtggcaacacgttttccccagcatgaaaggtagtgcatgccctagaccttagcctctcatagtacctgctgcgtagtggctttatggattaattgaattgctcctggagtctaaggagactggcgtaacttaatacgctaccccccttctttaacaggcacaattgtacaggatactcacgtgcagtcaaagaaaacccccggagagttagaaattttgcgagagacagtttttggtttactttgttgcgacgagtagcttgtaagaggccggcaac

SEQ ID NO: 2271 - DNA, 669 bp, unidentified
  source 1..669: mol_type = unassigned DNA; note = unclassified RNA viruses ShiM-2016 sequence
gtcccaccaggttttcacctggtggactcccctatattgtatgatttcattgcacagtttagcacctgtgccgtgcttttatacgaaaattttattctcctttatatacctttcacagtaattttgtgttctattatgtcaatacctctacgaggttttgcaagaaccctcgtatgttgtgttgtctttgaactcctggtgagtttagaaataacctcatcagattactacctattttatacataaagcatttattctcgttggtagagaactaccattcccgctcgtctgtaacgcgttaagtgcacaccttttggtgtatttgagctgattatattgaaactttatattcagatcgtctgttttaagtatgttactttattgtgcgtaagtcccttcaagaaaacttgcgtagtcgtgtgagactagagaactcagactaacgaactttcgattctgtcataattggaaatgatttatatgaacttgtttacaccgccccggttgtcttaagttagatactatctaggacccatgagtggttaaccccacatagatactagtattaaaatcggccggcgaaagccttgtggatttgcactccactccgagcctccgtccctccttcatcggagagggggttaaaactttttagcttctatttctttt

SEQ ID NO: 2272 - DNA, 670 bp, unidentified
  source 1..670: mol_type = unassigned DNA; note = unclassified Alphacarmovirus sequence
gcggcgatatgaacactgccttaggaaattgcatcttagcctgccttatcaccaagcacatttgccgtgggttagacgcgagacttatcaacaatggtgacgattgtgttctcatatgcgaaactcgtgacgtggggcgtgtcgtggataagttaacgacagcgtggctccactttggttttacatgtatcgcagaggaaccagtctatgaaccagagaagattaggttttgtcagatggcccctgtatatgatggtgagaagtgggtgatggtgcgagatccgaaggtcagcctaagtaaggacgctttttctatggttcgttgggatacagtgaagaatgcacaacaatggtttaaagctgtggggcagtgcggtctatctatagccggaggggtgcctattgtgcaggagttctacaggatgtacgagcgcgcgggaggtcatgtcaaactcccagtgttgaaagaggttagcgctagtgggttgtttcatatgagtttcaattccaaccgggcctattctgagatttccgatgctgccagatttagcttttggaaagccttcgacatcttaccagatgttcaggaggccaccgaagctgaactgcgtcgcacctggattagtctcgattttggcccggctggtgaccttaacaaccctatcctaga

SEQ ID NO: 2273 - DNA, 671 bp, Pediavirus cirripedis
  source 1..671: mol_type = genomic DNA
ctctgcggtccacttctgtcccacaaggggccgtgcctgcccagcgagtacctcgctctgttcaaactcgggaaaagaagagcattgtgaggttacttcctaagcaactattttcttttaagttagttctccttgctttttgcgtgtttagtgctttgtaggtatgtgtggtcccctatattggattatgtccattcgcgccctgtggcgccttccaggcagggaccctagtagaagtgatgcgtcctctcaggtatctctcttgtcgttagaacgtgtcgttagtgtggagcccggctccattgcccgtctccccgcagctccgcttgaactatacagtgatggtcgaattcgcccgccacaagccagtagcaatgatctctctgctgaggaattagatcggaggctagacctccttgcattagaatcaggatgatcgatcccagattgcccctcctcccgaatacgatatgttagtacggaggagaggactccacggcatttctgccaaacctggggtagcaaacatagggtacaaatacacgtgtcgttctgggtttctgatttaaaaccaccgatgatcgggattccaccgaaatcactgtttattagccgggccagaggtcttctgtgttctgagctcctgcttccggaactgctcgaaagcactg

SEQ ID NO: 2274 - DNA, 672 bp, unidentified
  source 1..672: mol_type = unassigned DNA; note = unclassified Picornavirales sequence
atgtagcaatttgcaggtgcccgagacatggcgtgtatctgtattattgtttttatgtgaaagctcgccttgactaacccgatggctccttttaccgacggtaattatctttaagtaaggccggattagtacgtttcaagttgtggaatataaaaaacttctttaatttataaaagtggatgatgcaaaagttggattaagacaaagaactcttatacccaatgatcgcacgcaaagttagtatttatacgaaaggttagtgcgagtctgaaactcaacaaatgacagaagaaaattattttgtgatggatagcggaaagacggttctggaagaagagagaaaggttaaaagactagagcatgtatttgtttttgtggaaacaaatagatgagctagagaacaggttggtctatttaagcttagggccttacctttctaacgttacccgggagaatctgccaccattgtgctgggtggataacagtagtatctgagagtctaggcaaggaaaataggtattttcccctaaaacccttttccctttatgtaatacccatgtcatgttttaaaagagaagctttccttttgaaacacaagcacacaaatactaaataaatatattacttgtgaatttttatttctttttgatatctttaaatacaacgtttaat

SEQ ID NO: 2275 - DNA, 672 bp, unidentified
  source 1..672: mol_type = unassigned DNA; note = unclassified RNA viruses ShiM-2016 sequence
caacgttaatgattccgtttgtatctttgatacataaatcgtttcgatataacgatttgactcagtcaatagacgtattgccttaaccggtttccgcgagtggtacttcgcgatacgtgcctcgtatcacattgctattgatttgcagggtatgaactttagtcaagagctgggattttcctgtgccccgatttcagtcttcacacaccaagacacagcgagtacatacaacgccttggtaggtcttaatagttgcagtagttttagcccatgaatttggctctgattctaccagtacctaaccttcgccatggctaatgtcactggattttcgctatcggggagccgcatcggagcgggccctacctaatatccaattggattgcaaaatgatcacaactaaccaaaaaaaaacaaatcatccaaacaaccaacctcacatccaccatttattcaccacaatctggcaaatacataaagaccaatatcacagattttaaaattgttcatgcaaattgtttttatgataatattaaattcactaatgtacctttgctttcagttcaagattcagaatattatttgtttacaccaactattctagccactaaatttcataatataacaaatggatcagttacagataattttgtcagaaaactcaccacatta

SEQ ID NO: 2276 - DNA, 672 bp, unidentified
  source 1..672: mol_type = unassigned DNA; note = unclassified Riboviria sequence
cgggcattacccgtacatcacttattgaattatttggcattaaatatgcatagaaatcacaccctcgagtggcatctgagcattacgatgctcttatgtcactccgattgtgactctattaattctatttattctaggtttattcacacctccgtctctttcgagcgtgaaagttgaacccttgcctatgtatttgtgaaaatccagaacgaaggtaggtacacattgtagtgtatagtccttgtctaggttctcgttaggcacgagttcaccacctaggaataaaatctactggaatgccaccagtagttacgtagaaagttaaacgtatttattgacgtctattttaagatgttgaactagaacttggattctagtgttaggcgatttaatcgcttttgaaattgatttttcttagtgtatcatagcacagttagttaggttactccaatttcctactaaccccttttataggtaaaagataatgataaagtaattagagaaataacgtatgacacttcatatatatgtttacgtgttcgaccggcgcacatggtaagaccggaatcgagatcgtcaatgtatatgtgcttgtttgaaagcaatatgattaaaatttgacgtagggtatgagaaaacaccccgtccattcaattgtaataaaccacttct

SEQ ID NO: 2277 - DNA, 673 bp, unidentified
  source 1..673: mol_type = unassigned DNA; note = unclassified Botybirnavirus sequence
gcatgcctttgagatgcagttttgatttttgtacttaacaaaatgccatggatatgtatgatagctaatgactatctggaacaagaggcacgctgcccccggctaggggtccgaactgataaggttcttgcgattgatccggcgcaaggatttctcatttgagaaacagtcttgaattaacaagtttaaggacggaagcctcgacatgtccaatgttcacaatgaagctggtcttgtgaattcgccaaaatccagtgctttccctggaatcgtgtaccctctcattagagaggcgattggctggaacgggtgtaggtgtcagcaatgccctacgtgttgtccgtgcaaggaggagagctgcgtatccagcgtagtttgaatccgagtgtaacgactgcgaagcctttgtctgtagggtagtcctgtaaaagggggctatccgtccaggaacagtctgtttccctgtcctcccgtgaggtgttgttcgtgactacagttcaacagtaaaaaacagggcgatgtgtagatcggaaagatatctctaacaaagtattaagcgaaagctaaccgcgccgcctgccgaacgtgctgactagtacccgggcgtaaaactacaactacatatcacaaacctacgacttaactaaaacattccaaaatctacaaaacaaac

SEQ ID NO: 2278 - DNA, 673 bp, unidentified
  source 1..673: mol_type = unassigned DNA; note = unclassified Picornavirales sequence
atatgtgccctcacctgtcaattgggaccaccactttcagtgaccccatgcgaagtgctgagagaaaggaagccttcttacccttcatttgtgaacccactagtctaagccgcttggaatacgatgagtggaaatgttcattctaaatggagtgaaacatgacttaacttttctagtcagacgcatacttgtgtgtctgagcgccactgtcttggcgtaattcttcagagtgtcacgccgtgcttgcggatcttacgtggcacatgacaaggctctcgctggaactgtgagtctgaagcatgtgaagtaacagtgaagagtgcatgatcacacgtatgtgtgggctatgagcctgcggatcaacaactggtaacagttgcctcaggggccgaaagccacggtgttaacagcaccctcatagtttgatctaccccagggtagtgatgttgtgtacctagtaattgccaattttcatgttttggtatcacggcataccggagagttcgcgggtgaaggatgcccagaaggtacccgtaggtaaccttaagagactatggatctgatctggggccctgtctggagtgctatacacacagctcagggttaaaaaacgtctagcccgccaggacccgagggattcgggttttcccttaaaaaaacccgactagagctt

SEQ ID NO: 2279 - DNA, 674 bp, unidentified
  source 1..674: mol_type = unassigned DNA; note = unclassified Mononegavirales sequence
ttgtaaaagaaaaaggataaccggcactcctgttataaaaacccgatagtaacgctcaactcaaatcgctgaaccaatctcagagaggacaaggagtgagattttcctcaaggagagagcagaggagaaaaggtcaaggggaagaagaaagaaacaaggaacaaagagggtgaaaagagagagaaccagtggtaccaaaaatgacagattacgtcacatgcaccctctgtgggaccaaaatccctgtgattgttgtccccctcggcacactcgaaagagcggttcagtgtaacgtatgcgggcaaaactattcggtctctccaaagtgaactggtgtattgtagaagccaccttagacatgtacatatgtatacacatgtgtatgtgtctatatgcatacacacatctatatatatatatatatttttgatcaatttactcatttatttgtctatcatctttacaatctttcaaacagctcaagaagcatcagcgtatgtccatttggatacgcactacgccgggaagattgcatttttgtattgtgttttacaatgagtgttgcagctactttttggttggagtgttttcctggatcgggggttctttgttattaacacaccatccacctggtacttttcagatttagaaaaacccgatagttaccagtcaaa

SEQ ID NO: 2280 - DNA, 675 bp, unidentified
  source 1..675: mol_type = unassigned DNA; note = unclassified viruses sequence
ccattacggccgggggaaaataagggctatggcgtcatgccatagtttatatacaccacggattacgtgaaccttgttagtaataacgggtgccctttgttagggatgtgttttatgaattattaattatgttataactcttattttcaactacgggattaaaaccccactttaaaactatatagggaaatttagtttaaacctgtataggaaattaaggattgataattttattgaacgagcctactcgttgaatatttatagttagttgtgataactagccttgtatttagacatggataatctccagcccatgttcgacataccttaggaagtttatatgcggcacgtattcaattaaatgaagatgctataagtgcttgattagacattaaaactagaacaagttctctagttgtcgctggtagagcataacttatagtaggtggattttatttgatgacccaagtatttatgaaatttgtcggcctccaagttgatcagctaattatttatattttgcgagtaatagtagttcagactgtgctatccccttgacatgcattttttggttactccagattgtgatattagggctctaatattgcaagactgcccaccaagtaaggaacttatgtaaacttgcttgggaaacacattactcaaaaaattatt

SEQ ID NO: 2281 - DNA, 675 bp, unidentified
  source 1..675: mol_type = unassigned DNA; note = unclassified RNA viruses ShiM-2016 sequence
gtggtttacacaccacgcacggtatatagttaaaagtcctcccaattgcaaccccggcttaacccgctcttttaagagttcgttacagcctcgcttgcatgacagctggttctatattctttatttttctttttgtttaaatgtgtacgtcttttgttagtgacgacgttaaaagtaactaactgagttttattagcgacctcattaaaagtaacttttatagtggatatctatctcttatcccgagtgaagattcgttaaatcactggacttgatttctttcattgtatgaagattcagatgcctatagtacgttcgaggtgtaaaaacctcttcgcggaaataggatatacatctgtttttgattactttgttagattgatagtgacggcttgtatcctactacacgtttgacgtgatatcgtataatcactaggtggcttgacaaccgcccaaatctcttgacctctcatgacgaagcataaacactaaactgacctcaccacagtagaattgtggccagggaactggttagtggtggatagaccttatgtcgaatccgcagtgttatcattgatgttttgagaattgtttaggtcggctagttgagaagctatagccctcccatgttgtcaacacattaggttctcaccttttacctcttttctctccttt

SEQ ID NO: 2282 - DNA, 676 bp, unidentified
  source 1..676: mol_type = unassigned DNA; note = unclassified Iflaviridae sequence
ccccccacccgttcaaccaccgctaacatgtcggcccagtactacggcgctgtgtcgtcccctgttatgtgctccatcatcaattcggcctcgtactacggcgcgttgtcgtcttacccaagatgaggatattgttgacggaagggagaaaacccccgctgttttgaaaaccccaacttttatgtaaaatgtaatgtgttgtccacgttgtatgtttacgcggtggcatatataacaagaaccgcctgcagactaacactcacttcgtagatttgaggttaaagtttggaactgaacagttgatcattttctggtgtccccccagttggtttaagtactgtaaaaatgtgatatgtagtaagtgccagacctcttaacagttagttcttcggaatgttgattcaggtgacactgatgatcatttgtaggtatggacttggtatgtcgtaggggcctgtcaacgcaggtgcagccgcgcaaccccttgcagcaaaggactagatagtcgcaagattagatgtctgatgaatataccagacacagataatcgcttccaggtaaataactcactgtctcttcggagatataggacggtacctcggatagtcgcgcgccttaaccggtatctaggactcgttcgatcggagaacggcaagggctcccggattattttgca

SEQ ID NO: 2283 - DNA, 677 bp, Odonate arlivirus
  source 1..677: mol_type = genomic DNA
ttgatgaagttcaactactctttaaggtcatacaaaatatataatgtatcttatatataacaatatacacattatgatgtctcattaaacaattcgtacaaacagaatttcatgagaagacatgtaattgagtaatcatggttctttgttgtcaatgccaattggtatctgcttagtggccagaatctcgatatatattcatatcactcaacttgccatagtatccaattgattgtggtaacgtggtttgaagccatgtagaatgagaaactcattcttgagagatctctttgatttccattatatcaagtctctaattagttacatcaattcttttgagtctttaatttgttagaatcagttgatccttagcaagatcccatgcttcctacgagaatgagtaacttaacgttcgatatggaggagcaaacaatgaataaaaagacaagacttccacaggattatgcaaacatgagatgtttaccatcaattattttacccattgttagattccagtctttagaattatttttcaaattcttagcaactgaaaagtgatctataatataagtaattaaccaaaatacgatcaatcaatatctacactttatcactgtgtgttacattgttttagggctgtaagattcctaatgaaaagtagcagtttctgatgttgc

SEQ ID NO: 2284 - DNA, 678 bp, unidentified
  source 1..678: mol_type = unassigned DNA; note = unclassified Picornavirales sequence
tcgaccaagttggaggacacgttggaaagtacattgatggaaaaaataatttagaccttcaaaatttaaaggggagaaatttattagaccttcaaaatttaatcggtgatcagaaaaaagatgtcaccggtatggagatagctggaaataaagatttgcagaagaatcaacttgacaaccaggataagtggatcaatgcaggacgtgactcgttcactaaagcaggcctcccggaattttcattctgggatcggggtcgcggtggaccactcaatgtcggttcgacgagaagttcaatcggtggtaacaactttgtgaactcctttggaggcccaaacacaaacttaccgtcaaccggttcctcgccatacgcagacttgaatggattatcccgcccgttctgatcagggttgtcataaactttcttcatcatttcttgcattcttaagcgttttgtcatgagtcgcaggttgctgttactcatggggtactggtttgcgcacaacaaagtgttcttactggaaaagcgtttcattatgcacaaaaaaattagaattcctaaggagcttaactcccgtcattctagctatcgtgtaaactaaattagtttagtagtctttcttaaaaagataaattaaaatttaatttgggttaaacataacatcatacacatggatc

SEQ ID NO: 2285 - DNA, 678 bp, unidentified
  source 1..678: mol_type = unassigned DNA; note = unclassified Picornavirales sequence
tgaaccgttacgcaccactcagttggtgtttggtggcaccaatgatggaacaaaaggctacaccacttgggctacggcccgcgccaccttgtggcgcaaagacattagaagaatagcataccgcccactagggccctgcagccagcagggtaacgggcaagcacttctgtctccccggtagaacggtataggctgtacccacggccgaaaactgaactatcgttacccgactccgtacttcgcaaagcttagtaggaaactggaaagttcgagttattgacccggagtgttccccccactccagaaacgcgtgatgagggttgccaccccgaccatggcgacatggtgggcatccctgcgctggcacgcggcctctaagaggataactcgctcctactggtaaccgaagagccccgtgagctacggtttattcctccgcctccctgaatgcggctaatcctaacccatgagcagttgccatagatccatatggtggactgtcgtaacgcgtaagttgtgggcggaaccgactactttgggatggcgtgtttccttgttttctccatttgttgttgtatggtgacaagttatagatctcgatctatagcgtttcttgagagatttccaaacatttattcaagtcgtacaattcttgtgtttaagcagtacagtgtaagg

SEQ ID NO: 2286 - DNA, 681 bp, unidentified
  source 1..681: mol_type = unassigned DNA; note = unclassified Picornavirales sequence
acaataaaatttatgaattactacaattattatatgtttagaataagtgcttttgatggttcgctctagcaaagcgggtcacacgagggaggaacagattttggaatctcgtggcttattttattctcaagtatttatatagatgggatattatcgatgatttttggtgcagccgtaagcagcagagaggtaagaagtttaggcgaacataccattccgaaaggagcacaaaccgcacacaatggtttgtgaacagcaataatggtactttcactcgttttgcattatttgagtgtgctggcagggtcgaatctgtcacaattaggatgtcggcttaatgaaccgagtccctaattgcagatgcattactttagagtgaatagttttcaccgacgatacttaaactgtggtgactccacacccacctaatttctaaataaatatgagacaagtctcttatttgagcatttattttattgttggttgggggggcaaatccaatgatgaatcccaacacttctctcatatttattttccgaattagcaccaaatctctttattgattttatcaggagtatctcggactgcgttctatcgtcgtttgtccgggtgactgtcgtgaaagacgaatatttggagagaactccagtagctgattctgaatttttacaatattgccct

SEQ ID NO: 2287 - DNA, 682 bp, unidentified
  source 1..682: mol_type = unassigned DNA; note = unclassified dsRNA viruses sequence
cacgggggcacacaacgatttaacgttgcatgatgtgatcttatcgtttcatcatgtatatatcgaaggatatataatgtaagttattttatgttatattgcttgagggggtatctcaggcacttgggtatgctttatgccgctatagcgttgtcccttaccgacacctatgttgtttataggtgcagtcagtcatgggaggaaatgcctatgccatcagacttagaacaagtcatttagaatgtcatcgtttcggccaaccacatacgaagtgggtggcggtccattcaggcaactggatgcggctagttacgtgtaactcgataccacaaagctcgcagcaacgaggccaggctttaacaattctagcagtccatgttagaaattgcgaaagataaagcaaggtgacccaagaccaagggtaagcaagggtcgacgtttacgttcgacgaccgcacaatctggggagtaagtgattgtatggccctgttcttgcagccagcaggaatatccatgtgtggcattgatacatgggaagcgtcaaaggactgtctagccatgccacagacaagtacatttgggtacttctagttaatcaagaaagcgattagtttcgcgaccaaaggtagaccgcctagatctagcctaaatgccgatgcacaagcggaggtaatctagcact

SEQ ID NO: 2288 - DNA, 682 bp, unidentified
  source 1..682: mol_type = unassigned DNA; note = unclassified Picornavirales sequence
acatattttcgcccggtgcagtgtcatagcaccagctggatttacttctgcaagtggacgcatttgcagccatatctccagccgtacctgagcttcctaatttctgcacgacccgtgtgattaggccacttacgtacaacccctcacccttctatttctttcacagctatttagtattacatccgtggcgttaggcccgcccaacatctaggcctctctatagcgtgtgagatctatttagaatttggttgagttattgtccctcaaccaccatccgtttgctactcacttgaccttgacagagcattctgttagtgcatagtagtcgattccatccagtaccccttgatcccgggtatctggcccgtagactgattgacttcagcttattgcgaagcctacccaccatagtaggagatagtagcgagaactgtcgatggtcagagcctgctaaagattattatgtacagtgatcaccaccttctggtattgtctacaccaacgtccattcggtcttaatcgagcctacagaacgcgccacgttctggtgctgaattggataaacaaacgtttagctatggtatagcttgtaattgtgacttcccgacgagggaccacatcgtttgctctggctatggtaaatagctaagccctagtaaggacttccacaggagcctccagc

SEQ ID NO: 2289 - DNA, 682 bp, unidentified
  source 1..682: mol_type = unassigned DNA; note = unclassified RNA viruses ShiM-2016 sequence
tgagggccttcagccctccagccgtattttgataatagcttagtttatataagactaatatatagaacagattaattcgaactatatatatgcaattaaattttgctattatcaaatgtggaagtatttcatctttatataagtctaacgtattttcaacagataaattcgagaatttacgtatgcatttgctttcacatttgtttttgatttcaaagtcattaaacaattatgtttgtttcattatcattttattaatgttaatttatatacttatacatctttcgtttaatttcttcgatttagctagctgacattcattatgaaacgcacataagatatattacgccggatacaggtaatatatagagaatcgtgtgctgcctgagtaaatatgtgtacttaagaatatcttgcgcctccatcgttagcgtgactaacgtatatatttggattgtataaagagcattagatttctttatgttttatgggcctcttttcaccttttggtcattagagtctacagcatatttatgtaggtatggcgttgttggcttcccagcttgacaagaaattatccacataaagacatataagtatttgttttcatttcccatattaatttaagtttatgggttttagctctcctagttttccctaatataactaggagatccgcaaa

SEQ ID NO: 2290 - DNA, 684 bp, unidentified
  source 1..684: mol_type = unassigned DNA; note = unclassified Picornavirales sequence
tggccatagtattgcgggttagcgtcccattaagattttaatatagctattcacaaccttaatttctttctttgattgaattaagccgctgtgtttccctttccgcacaaccactttgtcttcttttgttgatattgtgccgctgtgcccccttcttttcccctgctctttttatgacggtttagttagtaacaacttgaggaatagggattcaggctccagcccctggaatctatcgcactgttaccttgggagagaccactaccattaatatggtggcagaggtttcggtctcagtgttattcaaatacagttgttattagcggcgttcttttcggatgtctcttggtgatctcttacactagcaaagattgtaggaacgatgcctttggattgagctcttttgcatttacggattcacataagtcacatacctttaaatgtccctctaggcatgttaattagagggaaggtatgtatcagaatgtgtctatggtaccctgtatgtcaatggttagacatacacattagggatacggttatggcccaggaaacgttggtttgcctgggttatacataacacaaacgctcattgcgagcttcccttcttatgatttttctcctttggcgaatggaacgcgcgtcttcggaccgtaagtactaatagccaatcccacaattgaa

SEQ ID NO: 2291 - DNA, 685 bp, unidentified
  source 1..685: mol_type = unassigned DNA; note = unclassified Totiviridae sequence
tcccaagctctccttctctacggcgaaagggcggggtgacatcaatttcggatatcgcccgttgatgacttcacctctaaccctctggaatgcacttaaatggcgtagcctgacggtcccttctagccaaagggtgaaacggaagaaggctacagtttctgtgtctgcattgaagtgaccttgtgatctaacaccctgaatacttgttagttcaattgtcttatttctggctcaataggttcggctaacgcgggttgttcctaagcctatacatagtcgtggctgtcttgtcgatcgtaaacagtgacagcgtgactcatcgtgatcatttaaagtattttattgctggcagtaggttgttgctattaagtctgaattgttccgtttgctgtgctttcaacatttaagcttacccacttattgcttgtggtatttgtagtacgtattgtggattgtcaggtgagtttttggtgcgtgtgccttaacacagtcttagtgcagactacctcactgatcgtaaagtggttggtagtgtcactcgagctagtttagtatcactccttctattagtggttgctgtgtcagtttttgtgttttcataatatttaacttcagactacttcactgatcgtaaagtggtagtagtatccaagcccgttgggatctttaactttaaaccttaaca

SEQ ID NO: 2292 - DNA, 685 bp, unidentified
  source 1..685: mol_type = unassigned DNA; note = unclassified RNA viruses ShiM-2016 sequence
cacgggaattcccgtgtgcagtgtaagttagattacttggcagtttttgccctaatagaccatagacgtcatcctgggcatattatgcccattgtgaccactacgtctattagtttttctaacacaaccaatgttttgttctaagtattgatcgtgctaaactagcgatccccattttctttgagttgagttatattattacttgactctttactctattttaagtagggtttttagttagcctgccagctagctatttgtttgtcactattgtgacacttgattcttcagattgaagatgtagaactatacctggtttctgagttcaggcgatttaatgttctaatttattgtgatttgtagtgaatacagcacactaatagaagttccgtcaatcttactattagttctccaatattattatttggagatatcagatcattttagatttttacaaataacgtacgaactctcgttagtgtatgtgtgtgtaggccggtaccgtatggataaatccgaaatcctgatcacatatgcactagcgcttgtagaacgctatatgaagcaatctgaagaatagggttaagcgagaaccccgttcatcaaatttcaagaccaccactcctgtatgaaaagaaagtttattagtatattatatcgtttcaagtggtgaaaaattgacaat

SEQ ID NO: 2293 - DNA, 686 bp, Tremovirus B
  source 1..686: mol_type = genomic DNA
cgggattacccgtgcggcgcttttggacgctctagcttggaggcgtaatatccagctatcgtttgccgtgatttacggctattttaattaataaaattcaaaaacattgtgcccttcccccaatacgacctggatcttggtcgtggctttagactcaccatcagtgtatggtagtactttgcgatattatgtcgcaatggcccagattgtttgtcatactattgggccctctcttgtggcccaatcttttctttatgtttgtttcttagggtagtctgtgttaccaagccgagtgctcgcgtgtggcatgattagcactatcactagggtggtgtgagtaggcgaaacatacagagtggttgtcattctcatgtggtaatgttctgcatttcaacccttacaagtattaaggtggtgtatgtgtgtccgtagtaggctacgggtgaaactacggggctaacaatttagtcagcaatgtgaatagtggcggccaattgtgcaaatcaaattgataatcgttgctcaattcaacgcctgggaactacactaaagctgcatacttgccactggaggatttgttaaggggtggttcattatatcacatgaggattataccgccccttctacgggcgcttcagacacgtattagttttcccattataaaacaaatatgatatagaggttat

SEQ ID NO: 2294 - DNA, 687 bp, unidentified
  source 1..687: mol_type = unassigned DNA; note = unclassified RNA viruses ShiM-2016 sequence
gttttttattattgtttatatgtaattgtatttgtttatatgtattatgtgtagtgtttcgtggtaacattgttattgttacctgtaaaaatattaaaataacaatataagttggtatacttgttaactgaagttttgtagaatactgggttaatctggatttttgtatgaagcaattgccgagtaagatgtcgtcctatagcttatcaaaatgttcttcggaatagtttagtttcataaccttctgtaattcatatcactgagagaagcttttaaagactttcaaatacatgttacggggaaactttactgggtcgtgccgttgtttaagctagatagatatatcattggaccttacttggactgaacttttgtggattcttcttggtaggttagcaaccggttttattaattactacctttcgtttcgagaaatcctcctttggaccgccaaaggatcgtcgattctatgaactgagtgtacatacgttgagacgtttcgaaatgttctaattaatatgacatctgcattatggaagttttcaagtggttaatcccaagtttccatggttctgccgccgaataactgggggttctcatcccttaagtgatgacgctggaaagacagcggactgatggaaagacatcatttttcagatttaaagcttttatgactagtacaactta

SEQ ID NO: 2295 - DNA, 688 bp, unidentified
  source 1..688: mol_type = unassigned DNA; note = unclassified RNA viruses ShiM-2016 sequence
acacaaatacgcacatcactaactcaaatagtgaagcacgggaaagtgtgatgtggacagggtgtcgcctttaaacctagcttttcagctttactactcaggcggagccagagaggtgcttctattgcagtgcgtgggaccgcactgcaatgtaattagtcccgctagttctacagcgaataccgatcagttggatcgagactcagtcactgtttgtgatcaagtggattctcttgccattaataatggacccgagaccactggtgtcaccgagtttgtacaggaggcttgctctcagattgacgtgctaggtgcacatcacgtgcccgcgccgttatctggtcagagccagtttcaggacttgaaggcctatttctcccgaccacgtctcgttactaatggtaacgtcacaagtgtggggaggattgcggccatcaatgtcacgccgggcatcctgttggctacgctttttcccgatggggttaagcggttgacaggtgtgtatggcatccgtttcactttggtgtttacgctgcaggttgcggctacaccattccaccaaggtttgttagcattgaactggcagtatgaggttagttctaacactaacgaagcttatgtgcgcagtgtcaatagtgagactgccaccaatcttccccatgttagacttgacctcagtgtggacacg

SEQ ID NO: 2296 - DNA, 688 bp, unidentified
  source 1..688: mol_type = unassigned DNA; note = unclassified RNA viruses ShiM-2016 sequence
gctcttccgatctccctggagaggtgtaattgtatctcttcagagtattttttggtgcgtgttcccgtagggtagtatactgtgaggttgctattcgtaggggcatgttaagaataatatatatattatcatgaggagttgtttaagccgtgtgttatcgggcttctttgaagtagtatattttctttgatttgatatgttacattttgaaagcgatcttttcgaatagtgatgtgcaaatatacagcaacgataatttacacctattttaattcttgtacgaagattttatcttcaattaagatggagtcagttaaacccaacagcctctaaagtttgaggaaaaagaacaaacgttggtgactgtgtcccatataattgtatttgattaatttaggaataatttggattgctagccttgtctgtggtacgttattggttttagcagcggccatgcagttttgaaaacacagatagtctaggcatctattagctgtagaatcttttgattcgagttgtattggcaatttttggttgacagccccctatcgtcctgggtaattgttcaatatgacgtgcaagtgtatgcaaagagccgattctatataagctcagctatgttaccccaagttgtacgcgatggtatcaaatccttgggagtaaaggaacagagagatagacttagttc

SEQ ID NO: 2297 - DNA, 690 bp, unidentified
  source 1..690: mol_type = unassigned DNA; note = Astroviridae sp. isolate coa196ast2nc genomic sequence.1 sequence
atcaaggtatacccttgatgaggagggttgatagtgtaccagactatattgaggcttatttgagagcccatgctgctgttgaagtgcgtctgcgtgacgctcttaaggaagtatctcacctgaaaatgcagctgatgattgctgataggaagaaagatcgggctgagaggaaagtagcaaatcttgaaacctggcgcagaataagaaatgctactttcctctcagcccgatctttcttcctatcagcaatcatcagctgcattttcaggtgagatacttccttaagagcgtcacgcagacgcacttcaacagcagcatgggctctcaaataagcctcaatatagtctggtacactatcaaccctcctcatcaagggtataccttgagagacaatcctgacttgaaaaaactcctcacctttcatggcataagccactgtgaggttctggagaaaaaccttgtcagttctcagcaattctttccagacattagtagtgccaatagcactcctccaaagagtaaagagattctgggttgctacgccagatatgacctttgaaaggccagctggtgtggaacgatccatctcctcttacgctttggaggagtgctattggcactactaatgtctggaaagaattgctgagaactgacaaggtttttctccagaacctcacagtggcttatgcc

SEQ ID NO: 2298 - DNA, 691 bp, unidentified
  source 1..691: mol_type = unassigned DNA; note = unclassified Dicistroviridae sequence
tagatacacgtcctacttatgtggctactcgtggtgcaggttgtttatcctgcaccacgagtagccacataagtaggacgtgtatctacggcactgacggactaattatgtgttgaggatatcgacggatagatttatgaaataatatatttctgacggcgatattgtcatacgaaatcccccataggcgttatctacggcactggcgaatatggactaaaaatgtttaccaaactgatcacttagagatccccaaccacacataaatacacttataaacgattgataacactataacaatttgtaggcaatattttattagaatttaagcataatgatgttagtaacctcatagtaacctagatatatttgtttgacaaatatcccacagttgagtgaaatcaacaatgggccgtttaggcaatgttatgagaactgaggcgttaaattttgacaaatacaatacctgacaagtcccttttggattgactaaatataagaatagtatcaatagtttttgaatttaaataagttattgtagatgaagacatgtatttcttgcaataacctctgtatttcttaaactatatgcaattactcggtggtacttgcatcttgatcgaagttaacctttattcttatattgctgtgtcggagcagtggtattggcgccggactaattaacataaac

SEQ ID NO: 2299 - DNA, 691 bp, unidentified
  source 1..691: mol_type = unassigned DNA; note = unclassified RNA viruses ShiM-2016 sequence
tccctagggatgtatgaaaattatccttagggcttcaagccaaatcgaattggatgattatcgtcatcctctttgctttgtttaaagctataaaattctacgttaaaacatttgattctcatttttaaacgttttgagtttctacacactttattttactgccgtgcacagtataaaagcatgtttcagaccttagtaatgtggtctgtgtaatttacgacattgcatatcgtttcggatcaagtacgttaaatctctgttatgctaggtaccagagacaatatttgatcctttcttaaatcttaacatacgctagaatgttagatttgagttctaaatacaatagttttcagtgcggaacggaatccccctgaatgttatatcacgtccagaatagataaacccagcagtatggaagagtatcttagacctctgattataacagacagaacaattggtccaccccgagctgtattaacgcaacgtaccgcggctatgattgttacaataccgaatttatattccacgtttaggcattttaccaggatgtcaaggtagctgactgcacctaacttttttcgtggaccctatgttttcgtgaggtagaatctcatttttgacacatattttagactatttatagagatagtagataaacccttgacttagcacccaacgcttgttcctaatt

SEQ ID NO: 2300 - DNA, 692 bp, unidentified
  source 1..692: mol_type = unassigned DNA; note = unclassified Picornavirales sequence
tttgaaaggggctgggggatgtatccccatcccccagtgtgtatgccatactgcatagctcgcctatgccctatggattcacaaccctttcatataccctccctacccaaccccgtaaccacatgctttactccgcttggggttttgcggccccatgttgtgacgaaatggctacgcaatcaatgcggctaatggggcctgccgcttttaagtggccccagttagaagtttatgcacacccgcccattaggaggccaccagccaggtggtcagagggcaagcacttctgtttccccggtgaagtttgataagctgtgcccacggctgaagcagacagatccgttacccgcctcactactacgagacggctagtagtgtgtaatatccgaatttcattgatccgggtgttccccccacccagaaacgtgtgatgaggagcggcacccctcctatggcaacatagggcctctcctgcgctggcacacgggctctatgagcatgaaatcaggagaaagtcacacgaagaccttattgtgctagtgttgattcctccgcccccctgaatgcggctaatcccaactccggagcgcccgctggcaaacccgccagaagagcgtcgtaatgcgtaagtctggagcggaaccgactactttgggtgtggcgtgtttcctttatttcctttgtatttgtat

SEQ ID NO: 2301 - DNA, 692 bp, unidentified
  source 1..692: mol_type = unassigned DNA; note = unclassified RNA viruses ShiM-2016 sequence
ggtgtagggcctaaaaaccctacacctaattttatcatcatgtcgttgttatttatggacgcctgttgagagaagtattttatacgatggactcccgttgcgagaagataacccatgattttgtttcagatgtttggtttttagaccatacatttaattattttatgtgttttgtttttaatatgtgaaaagccccttagtattaaattgcaattaacaacataattcggcctttgggcttcttttatataaaataaataaaaatactcgttaccgaacggggtctttaaatagattgacaaactattttaagatgtataaaatcctactaacattgtgtagatacacgtacctattcgagagttgaagcagtgctattagatatgcagataaaagtgagggttgcgagctaataactcgtcctcatggccaaaagcatgcctctatcttttagcaatactgtgtatagtacttcagtataatgtgggcaagtgtattctgtcaaaacggtttaaacatatttgttccgtaacacaacaaatacaatttatgacgttggaaagcgttagtttccgagtttttctggaagcaagtttacttacaatcataaactgctaccattcaaaaatttttatttcatttatggtcacaatttaagattttagaaaagcgttcatatatttacatacaaa

SEQ ID NO: 2302 - DNA, 692 bp, unidentified
  source 1..692: mol_type = unassigned DNA; note = unclassified RNA viruses ShiM-2016 sequence
aggctggatcaattaattaacaataatggttgctgctatgaaaactgctaacacaactagacgtatcgtacgtcgtactattcccgtcggtaaacctcgcagttcaccgactcgacccacggtacctgtcgttaatagtgttaaaaaacgagcgaccgaaccaattattccagtcacctcacttagttttagttcgttaaattcatatttttcatatgcttcaggtgttttgttaaacaccgaatttttattatattttattgtggctatgtttgctatttttaactatcattcaatgcctgaaaattcctacgttactaaaattgttagtaatatcttttctaaggccagtgcttatgataagtgtacgtataccacgtttattatggcttttataccatttattcctgtcattttaagcgtttctagtaatatgcgtattttatcggctattttatgcttcgcattttataaatttttccctgaaaaaacttattatgaatatttagtttttgctacgtgcatttatttagctgtaaaaacgaagaataaagtatatagatttatttctattatcttattagcatttttgtattttatacaatttgctttaccattccctacggacaatacacttacgtgtagagctcctgcatcgaaaccaaattagaatgtaagataatagttaagtt

SEQ ID NO: 2303 - DNA, 693 bp, unidentified
  source 1..693: mol_type = unassigned DNA; note = unclassified Riboviria sequence
tttaacggtccgacagaccgatatgtatcgcagctcttttacaaactggaaaactgctcttttgcatactaggatgaaactgtggatcacgtttgtcaaggttacggccccatacactcctgatttccgagcctcttatgcagaatcaagtcccttttgtagaacctgacgtacaatgtcaaccccaaaacccaaactttttgtttttgttttgtcctctttataaagaagattgttgtggcttataaaccgcaggttttcttttagatgacagaatacgctgagaaaacatagacttttggtagtaggacctccgaaccctttatgtttatgcactactctgaataacgtattaatattttgttaatcatctaacacactgatctcgtgtagatccttgcgcatttggttagtaaattattgatacctattcaccccataagcgtatgccccgaatgaatttagaccagaattttaacgactattggaatatatgaattgacggataccagataatgattattgtcagcgagaccttgtagcagaacgcgactgctaatatgaatctggagtacggatgtttttatgactcaaacagttttctcaaaactgagagtaggatggatttccgacctcggcaggtaaagcttctaggcctgaccgttgcatcactgaagcagccaatgtatcaca

SEQ ID NO: 2304 - DNA, 695 bp, unidentified
  source 1..695: mol_type = unassigned DNA; note = unclassified RNA viruses ShiM-2016 sequence
ctcccggtaaatatatatacacagttaatagaactaactgtgtattatgtttgcctggaacgagggcagtatcccaagtagtgtggtaaccatttagcggtcccagcccacgctgtctcgtggtagaaaatgggtaactttttagggaagggtaaatccatccggtcatataattcacgcctttcaatgacatttgccaggtcacgctgattacagaagaccggtttaagaatagtttattgaggacatccatcattcaatgttcagtactataacctctcctctgaagacagagcgaaagttatggattgtttattgtatagtaaagttttgcgtgagtttgcatgcaaagcgtccccgtattattattcacaatcccagtggagggattgttagtcatcacttccacccatgcgattcgtgtgtggaaggtccaggagagtgcatcgtagacagctggtggcaatatacgtaagaccaccatgtcgcacgctgtagtggcgtgatcatccttagttaattgatgctttcatcttaacttccggtatgggccacttaccgttcatccattcataggtttcccgatataacatagtttgaacgccttttcaacacgatctactagcatcttcagtgggtaacaccctggagggaaaactagagaagccgttaacaattgaaaagattagtagact

SEQ ID NO: 2305 - DNA, 696 bp, unidentified
  source 1..696: mol_type = unassigned DNA; note = unclassified RNA viruses ShiM-2016 sequence
atatttaaacgaaacgtaattaatgcgacaaacattagttaaaacgttgaaattctttcctttgtcactcgtcattgaaccccttaattctttgttattacttttaaatcatcatttcacccctctaaattttcaggttgaacgcgtttaggtaagtctggacaaccgattatgtgagacgtaactgccctcatgtaatttgtgcttgtcttcggcccctatcctgcaactacctttatcttattatcaaagtctttagtcaattcctgcgtacacctccaaagggtgccttagtgcagacgagatctgtttacgttcgagaacaaccatgtacttgggattttccgcctaataacgtaacaagagatcgctaaagatagagaaataaggtataaatgagatagtaataatatatgaaattaagcttagtaaatggataccgcgagatgcctatatctataaataggagaagcttagtggaaaacggcttataatagttttctgacaccccaatagaattggtgttaaaataattctatacactttttggatatagtgttaaaacaatcctctcattccacactgaaagtggaattcaaatactttcagacactgtttttataatttcgtgtaaaacaaaaattataacactttgtgaagtagtgttaaaataattctcaaaaacccaatgacaaa

SEQ ID NO: 2306 - DNA, 698 bp, unidentified
  source 1..698: mol_type = unassigned DNA; note = unclassified RNA viruses ShiM-2016 sequence
cgccaatatttcgtcgcctgtcttgcgttaagatgatgcttcagttgttggtctgcttgagtgtcgttggtctaactgcttggctgtgtgattatttgtttcaggtttatgatggggtacgcaggtggattcgggtacgacgtcgtgtcgccaatgttgtccgtaaggtcaacaatgacgttctcgaggttatagctaccgtggaagctgacattgcggctgatatcgatgcgtctactgctagtgctgtagatgatgaggtaattgaccgcactgtagttaaaaagcggaaggttaacaataaacaccgcgcatcccatttccgttcgtggttggttcgtatggcaaaagcaaaattcggacgggtccatgagactgaggctaacagactttgtgttcggaaatatttgtatgatctttgtgttgagcacggcgtggttgtgcgtcatatagcagagaatatagatttcgcgaccgcattagtttttgtcccaatgtcttatgagattgaagctctggcagttaaacacaccactgaggtgatggatcttaaagcgattgctgagcggttgcagccgctcggtcgatgtgcttgatggggccccgagaaaagggaggggatagacactaagccttctgtttatcccggcatcactcccaaattttcggggaaggcccgtccacgcaaatatctgact

SEQ ID NO: 2307 - DNA, 699 bp, unidentified
  source 1..699: mol_type = unassigned DNA; note = unclassified Picornavirales sequence
gttttgtgggttatcccccactttatgaatgtcactgattttgtattttatgatttcatagattagaatatcttgtacagacactcatatttatttatctacttcccgcgttctgcggttgctcttaaataaattaaattgagcagttttatatattgatatgatgaattgttaggttccccatgtggaataaacaagaatttgtattctaaagatttagtatttcgaaagattgaagcgtcctaatattttaaagtgctcgctattacacaagcgttgttatggtgtaaatagtaaacggtatagttgatgtagcccggtttgcagccgccctataatttgctatatgtcagacaaacgcgatcgtattgtataacctcctttgatgatattaacgattgaacatttcgtatgaagctggacttaccaccagaacttggatttcagaatgattaacgactttcggcttttgctgggagttgctccaaggaagagttcttccgatttgaacatgcccgagaataaatcattggcgttgtgcattatttggcgattctaataacggtttactgaacgatgtaggaatttagttgttgtaatgttgaacgtattattcacttacacctatttctgggcatcctttatggaaaacggagtcaatacccgacttgtattagaacaggggaggcacttgctaat

SEQ ID NO: 2308 - DNA, 699 bp, unidentified
  source 1..699: mol_type = unassigned DNA; note = unclassified Picornavirales sequence
tgtggttaacaccacatgcttgatttgtttggccggaagccagacttgatttcaatttgcgttcattcgcacctggatgccatttgatgacaataacttgcgtgcgtttacgggcgtacgtatagacattaacatcgaaacatcttgtggctcataaccacactgaaattcaattctaacctgacaagatgaaagtatctatccccccctttttgttttgtatatgtacctgatggggcgatgtagccccatttatatttcattgatcgaggaataaataccaaaatatcatcactcgacaaaaaaggagtttggtcactgcccctttagtttcaatccgttctggtaataaactattgataatactccacaaagaaaatacaagaaaaagaaaagtgttttgagaagatgctagtaatttacccttgattaagatcattagtgtgtggtgttaagcacccactagataagcagagtcattctctgtaatcgttttgaacccttcgtcatcgattttgactagtaaaactatcaattcaggtcgtaaactcgactaggtctgtaccgccattccgaagaatatggcgggtatgccccacaacagagggatgaacaaaatatctaaccacaaaccagacacaacctacgatagactcaccaaacgcgcacacaacgatttgccccatatcagcacatatc

SEQ ID NO: 2309 - DNA, 701 bp, unidentified
  source 1..701: mol_type = unassigned DNA; note = unclassified RNA viruses ShiM-2016 sequence
ttcacggacattcttttattcttcgctgcttgtgagaaaggagcagcaagtcttatggttacttctcatttgtcaatggctaaatgccatgagtgtcatttgtataagtagaaactttatatttatatgtttataagagaacgattacccaggtttgcaaaagctatcaaaccccctctcgttgggagagggtcttcagttaagcgatttctatgaatttgcgatcgtcctgaagaggaagtgaccttcaataacatttgtcagtgtaaaagtaaacatctttttagtgcgtgtgcgttcacaacgtatgggcaagtagaccttgcgttttgacagcaaccttattgtggattgcctactagattacatatgtttacctattgaaatgcctctttggaatatacgagaccattggattacaatgagtttctctgaatgagtgcggaggatggaagagtgagtattgaactacaatgtacgaaatcatggtactataggatttccgatcagtcaatatgtcactaatggacctgctgaacacagggtataaaatgttctgagtggtgtaaagctgcaaccacgaaaaaccatgtcgggtttgtactaaaacagcagtagtaggaaagcactgaccggtgcagttcccccggagggtaacaccccggagacacctcgagtaatgtcgagagtgtgccgacctt

SEQ ID NO: 2310 - DNA, 704 bp, unidentified
  source 1..704: mol_type = unassigned DNA; note = unclassified Picornavirales sequence
tggcccttcccttcccctttcatgattcccttggatttgactcggattgtttgactacccttcttcttaccacattggccctagcggccaccggactgacctactcccatggcaagctgaacgccttcgcagcggaggtcccttcttcggatacggttgaccactgcataagtcgcgggcccaagtgagcttttggactgacccattttgttttctggactgccaccgccaagaattgcggagcagctctgtgtagagagatccttcctttaggccgaccccgtgtcccagcacggtagtaggactattggagtgctttgcacatctgcgcctagtgtcagatgagccagtggtgtcacaggaaaacgggacgcgattcgctatccctaagcatccctcttcggaggtaaagcgcctgtggcatacggtgggatcgtgccttcactcgagggccgggaaacccaccctggactggtgcagcttgacagagtgtcggccggcactctggcactagtagccggttgttctgggatatgctgttctcttacctctcctccttcaaatcctcctctcataccttcccccaggctttttcaaaagccccctcccacagagtcctctcttggattctctctcaaggagcccctcaccaccgtggctcctacctgcatgcaaccctgccctataacatttatgagcaggac

SEQ ID NO: 2311 - DNA, 705 bp, unidentified
  source 1..705: mol_type = unassigned DNA; note = unclassified Mitovirus sequence
gtaacaacggaaaacgaactcaaaatcttgagttcagctcttgtgagcactaatttggtatttatactaggttacgcttatgggagttcccacaagtaaagtagcgtcgacgattacactgttgacgggacccgtctctggcgttgagagggcccgggggcaacctcgggggaaaccgaagtcactttctcttgaatgagaatgatagaggcatttcaacatccagaacgtaagtccgatggcaagcgccatcagtcctacgaaatgctgcggccccctgctttgcaggggaaaccgaagtttaattttaaacttaccgtataaaacggtagtttgtacgtttgtcaagttgaaattaagtaggatcaatatatatctcctagaacttgatatttatgttcccgcaagtatggcgcttagtttcctttgtaggaaagtaattcctattcccagaccatttggtcttcgaggttataggttatccgtagggactaagttaaagtcataccaggggtatcaagatggagttttaataaaaggctgagacgccgcttcccgtgagggatgacgcatcaggaatgcccgtgagtagaccccggaccggtgtaatacggtaccgtagtggctgaaagagccatatctacgaatctcctctcgaaagaggggagaaacggaaactatctgagtgctccttatatatataac

SEQ ID NO: 2312 - DNA, 705 bp, unidentified
  source 1..705: mol_type = unassigned DNA; note = unclassified Carlavirus sequence
ttagtgtagcttaggtattgctattgtattgaatatttatggatgtgattgtagatttgttgtataaatacaagtttgagcgtttaagtaataagttagtgtgccctatagtcgttcactgtgtgcctggggctggcaagagtagcttaattcgcgagttgttagaattagatagtcgcttctgtgcatacacagctggtgtagaggaccagccaaggttgagcgggaattggatcaggaagtagagcgggcaacaaccggaaggcaaatttgtggttctggacgagtacactctgttgactgaagtgcccccggtatttgcattgttcggtgaccccatacaatcgaacacaagcgccgttcagcgtgctgactttgtgtgctcagtgagtagaagattcggcagtgccacgtgcgggctgttgcgagagttgggctggaacgttcgaagtgaaaaggctgacctggtgcaagtatctgacatatacacaaaagaacccctgggcaaagttgtgttcttcgaggaggaagtgggttgcttgctgagatcacacggggtggaagcattgagcttgcaggaaataacaggccaaactttcgaggtggtaacgttcgtgacttcagagaattctccagtgatcaatcgagcggctgcctatcagtgcatgacaaggcatcgaacggctctgcacatcttgtgtcctg

SEQ ID NO: 2313 - DNA, 705 bp, unidentified
  source 1..705: mol_type = unassigned DNA; note = unclassified RNA viruses ShiM-2016 sequence
aggggcgagcagatccattctgtggatctgcaccccaatatactctcttcaggtcatctgactcatgtcacaaagtcagagctgacctgggagggtgatcagctggtcgacagcgaggggcgcaaatcacaacagctaacaatacacacaagaacaacaacagacacaagcggtgaggtgacaattaaacaggaagatgcaggatttgaagacgtgagtgtgctccaagcggtagcgaccacgctggacaacaatggtgacgatgggagcgatgacatcatcagcattgaagaagccagtcccagcagtgacactgaggacaggccagtagaaccacaggctgaggaagaggaagatcaggatgtggtcgttggagttgaagaagaggaagagcctgtggcagaagactgggcagcagaggtagaggcagctgaagaagaagaactaatagagctggcagtcgaggcagaaagtggccttgccagtaagacagtattcaacacagagggcatcaagaaagttgacaaactcactgtgttgaacactgtctccacattctaccacctcaacagagacggccacacatacccagcagcacaagtgacatttagctttaaggatttcagcagatttcctgacaagaactacactgaggtgaaggctaagggcttgcctacattgacagtggctgtgcttccagcagaa

SEQ ID NO: 2314 - DNA, 706 bp, unidentified
  source 1..706: mol_type = unassigned DNA; note = unclassified Iflavirus sequence
ggaccgtactttgtcgacgttttgaacgatgacgaatcggtatacgcttcggtacctattgttgcaagttcgttccctattttcgatttgcctgcccgaatttgactcaaacaattgtgacatactatgtctctgtttgaaagcactacacgagtttgcgcccagcatgtatgttttcaagtcttttgtataagtctgcctctatagtggttttctttgaccttaaagccttgtcaaccatcctatatgctgcatcgagacttgatgtcaatctgcctctactacgcaaatgtctagtaattagttataaggttttactattttccctcatttccaattttagtttgtagtgtatgtgagtatcattcttactccgactgttaagagaaaccaatttatagtcgttaaatatgataaatggaatgaatgatggtgtcattttaaaaacactcttctctataggcgtaagcattctcgctcttagagtcgtaaagaagaaatgccgtgtctatcagtatgttatgcgatttattttctgccacgcgcttctagtgcaatctagttgacatacagacattgcctaccactcgcgagggtcgaccggtagtgtaaggagtaagtgatgatttccgcttattctgtaccctttgcctggtgaggacagatcctgactaattttaaatataaatgaacactagcttccaag

SEQ ID NO: 2315 - DNA, 706 bp, unidentified
  source 1..706: mol_type = unassigned DNA; note = unclassified RNA viruses ShiM-2016 sequence
atgcatgtatatttttattcatatgtagcattatagaatgtaacacatatgcttatgaatcgagtaaaatcggtcacggcgtcactgtggtaaaattttaataatgttgcaaaaattttttagattacatgcgaccaaattaatatatggttttttacaataggttgacctcctattgtatgacgaatttttacaaaattcatttggtttaataatagataaattaaattaggaacgcgatttttaaaatggtatgtttaatcgaaagactaacacgtgagtaccgaaaggaaagactcatctgaacctaatcgattaaacgcttaatgaaatatatttaactcagttgttgttaccacaatgcaacaattgttataatcaacaaatacatcactaccgtggtttttaggtagtaaagcagtttcgattgcagactgtattgttttctttaggttaagagagtttatacactctcaaaacttggatggtttctttttgaagaaacgaatccaatccttaaaagatgtcatagccgtagtaagctaacgcacgatatttatatcctgttagattataccatcggctttatatgataagtacctgaagttagttaccgtgtaactaacgtccagactagtatcatataaaggcctgtataagcatgctgaagcgcttataagtgaatattttaagatcaatgtgaaat

SEQ ID NO: 2316 - DNA, 707 bp, Xincheng anphevirus
  source 1..707: mol_type = genomic DNA
acctattttactcatcattttacagcggtgtttataggtcgcttaatcaaaacttattcaatcaactttttgattaatttctttctttcattttctttaataaaacccgccggtcatggaacaaaataacttgagcgcattggagacattttataaatatattgaagaagtctttgtgctatctgggattcaaggatttgtgacagctgttttaggctatattcaagataattggcaaaggggaggtctgattgcaggttctgattctgattcctgcaatccattttggatctcccccgtaattagaaatcaagacgagtcaagagtgactgaaattgttagtgaatattcgagtcccggaagaaatctggtcgccatgctggttaaaaggaccgtgacaaaggaaattgatagtgttagttttatattaggatttttggctgctgtagtcttggtaatcgcctacattctgataaggatggcaatccaaaagatatgtgacaaaattaagggtaaggctagggatttcattaatagttgtataaggagtcatagggcaaatgttttagcccaatatgcagttgaaaaaggagatcaacaggatctttagaaaaaccctccggtcaaacaacaagtgatttgatagcagttagcagagatttagcaaacgacagatcaaaagttacttcaacagaagaagagttaat

SEQ ID NO: 2317 - DNA, 707 bp, unidentified
  source 1..707: mol_type = unassigned DNA; note = unclassified RNA viruses ShiM-2016 sequence
acaaaatgccccctcacttccggccgatatttggcgaatagtctcatgactactgcataggtcttcgtacctggaggattcgtgtagacagccctattattttcctacgggactatagtcgggtgttcgccggtatgggttatgagtttcaataaaccctatttaactgtctcttaaagactttatcttttcattctgaaatcccttaaggatttattgcaacacctgcatcatttgttttggacggacgccgaaagaaacaaaatgttgctgtcgcatggcaaaggactctgatagtcgtttgaagggcttctccggtatgaagccttcgaagtagccaacagcattgtggaagtttggggtcgcgcccaggtggaagcagttgcaagtcctacgatgacgtcctctctcacttgtaaatattgaggcatgtcttcttacgacttgttcgtctaccataagctactgcgtaatcggtttgtgatgggggtcacttactgtagcaggataaacgtgtgatatataatttaccgtatgttttgatctttccttggcggaagcggttaacccgtcattgtatgtaaccacgacttaacaaaatttcacttaagaaagaaagtcgtaccggaaaacgcacccccttgtttttgtgtagccctgccgaacgccgccatttgtggtatcgtcagtggcaaaataagaagaaa

SEQ ID NO: 2318 - DNA, 708 bp, unidentified
  source 1..708: mol_type = unassigned DNA; note = Bat Paramyxovirus Eid_hel/GH-M74a/GHA/2009, complete genome.3 sequence
caaagatcagtatggtcacctgagcccatcctccacacattcccacgactcctgagtctcgaccccgaagggcagaaatcacaactgacacgaaccccaaaagacaaaaaaagcaacctagctcacatctcaacccgctcactaaacaatctcaattgactgaacgctacatctccaatagattgcgataagccttgctaaccagtttatcaaacagctttgggaattttactctaaatctgaacttttggtcaactaaccgaatattaatctctcaaactatcatattaagggttaatcttgactaaacaaaacttaggaaatcagggcttatccgaaaaagacaaccaacagacgccgaaaatcaacacacacaaggaccaaccacagagaaaagaagaagcaacaaacacaggagagacccccaagccaccaccagaaacaccacatccaaggcacccccaccccccaacaccccacgccacagcccgtccacagaaagctccgacggcccggagacccccaggaacccggaaaccacacaaagaaacaggaccatcggcactcccagagagaccgaaaagaagatcggcgaccaagttcgaaggaaaagcgagacatccaaagaacccgagaaacaaaacaattcgactcacagcaagctcagtcagcaagcaatatcccaggaaacaaccctggtacagcaca

SEQ ID NO: 2319 - DNA, 708 bp, unidentified
  source 1..708: mol_type = unassigned DNA; note = unclassified RNA viruses ShiM-2016 sequence
gaaacacctagggtgcttccctaggtgttgtttttgctttctttatagctttgacgttatggatatcctacttgtacgtatccatatcctcttagtatctttctttcggcaaagacactcttttacccgttgctttttccttctttgtaagaaattagtttgcggagttattactaccagaatctgattttggctctgtagctctgtaaccttttatgcttacccttacgaacttggactagtcttctgattatgagcttgcctatcgattaattaagacgatcttatattctctttagaaactgacttgtcttcggtcagtggaactatcaacctctaaaagaaccattcatggaccctttctatgttttgctccccttaggtatctccgaggagtgctgggaaatcttcataggaaatgctaacagaatgtctagtaactgaacaaatactactctaactttattgttcaacaaactctatataaggaagtggttattatatagttttatgtcggtggctccaccggaaaaccatgtacgcgcttagacttagaaatctacttgattcgtcatttagatagtatagacttaagaaatgcgggctgatatgcgctgaagtcatatcgctcaaagtgttcaccgagcatagtagtgaacacgggtgctgctttccctgtaagcaggttttcaaaacccctctatttat

SEQ ID NO: 2320 - DNA, 708 bp, unidentified
  source 1..708: mol_type = unassigned DNA; note = unclassified RNA viruses ShiM-2016 sequence
atgaccgtaaactgcacatcctaactcatggcgattcaacaacttgtacaggcgacttttgtcgttggtattgctcaatcgtgcatcatcaaaccgtttctggcttggaggcgtcgcagaagggctctgattctggatgccaaggatgatttgaacgtgttgaattcaccatccacccttaagactcccttgaatgccttcactgaggtgcattcgcattccatccgtcgtggtgttgcacctgaggtgtcggagatgacgacaatcaggagacggcagcacaaaaccttttgtgcgaagtgggcccgggccgccaaggttcggttcctctttgtacagatgtgtcaggacactccccttaacaggggggctgttcacaggtggttgttgggacagtggcgcgagacgtatcggacgcagattggtagtgatctgcacaagatggatgtgttccttcgggacactatagagatggcgttcttgcccactgatgaatgcgtggcccaggacaagaagtccagtagggaggtgaagaagcaggcacgcatggagttttataatgagaggaagtttgtggagggatggaaatagggatgcctggtgcaagttcctggttatgatagcagacccgttatagataacataccaggggtaagggtgcgagcactggatgatgataagggtcagaagaaggagcggttcgttgtc

SEQ ID NO: 2321 - DNA, 708 bp, unidentified
  source 1..708: mol_type = unassigned DNA; note = unclassified RNA viruses ShiM-2016 sequence
ccgcgcccggcatgtttatggctttgacgaagatgagttcgagtccaatggccgaaccattatagtccacgacagtaagatctcaggcgatcgcgctctgcgccgccaggagaatgagcgtatggctgacatcgccgcacaacggaaagctctgctgcgcactcgtgatcagattgcgagtgagcgccgtgagcttgaacgtcaaactcgctcatatagggaaaatctccaacggaaacgggaggcgcttaaagaggctcaaattgaagcccaacggcgcctcaaagaactgaaggaggccaagactgctttcctcaaagagcatgaggccaaagcagccgagctggaccgagctattaatgccatgtccagctcactccctagtgaaagcaaagaccatacgcatgaggattttcggcggaggctgtcaccgggccagcccgagccagaaagtccggtgaagggaaagaaagttacatttcaatcccagggccagcacgatacgaagaactcgaaacctatcgaaactactcaggaatccactggctcgaaagcaccccccagctcatcggaaccgaaacgccctccgttgaagcaccactcacctgggtcggaaactggaaaactaccgcgccgccggaaaaggcgccgcgcggcttcgaaccggaagaagcaataaaagtccttccgggactttccggttatgtc

SEQ ID NO: 2322 - DNA, 711 bp, unidentified
  source 1..711: mol_type = unassigned DNA; note = unclassified Endornaviridae sequence
accccaccaataggcgctgaaggccaactaaagcatcaaacattaatcgcatactatctgagaaggctcaaatctaaggctaaaggagaaccaaggctcgaagaaataatttctaaatatgaatttgagcaaaaacaaaatttgacacatacaataacaacaagtggaaaatataacttaagtggaattatacctattaaaaacaattatggaatattactagataaaggcacaattataacttacatacgggaacaagaatgttgggtattaacgcataaaccagtaacaacccactttattggcgataacgatggaaatatagccaaccaatcgagacaaggtagttatgaattaagaaataaggataaatcaaaataccaacatattccagctgaacctgtcattaagaacaccttgacaaaagataaattaagacaactattagaaaaaaaatatacctataaaacaaaaatagccccacacaaattagattacactactttaacagatggacatataaatgaagaatggaaaaaatttttattggatgcttatgatgactgttcgtttatacctgacaatgggaaaatagccgtgtatgggatcataccaggccagttagatagggacccaggtgatgaagattactcaatatggatatgtggtgccaaaccagatggaagacacaaccgaatcaatgacatagtt

SEQ ID NO: 2323 - DNA, 711 bp, unidentified
  source 1..711: mol_type = unassigned DNA; note = unclassified Umbravirus sequence
atgtgcggtggcaattttccctgtcgtgcgctacgacattaaagacgcgtatggagagaccagttgtgccaaggcaaaatgtctgtaaactttggtaacttggacgtgaatcccctaattaacgatacaaagctggggcgtccacacaccatggggcggagccgttcattcggaaagatggtagagggccaattccctcgcatgcagcgcccatgttcaaacggcgtggtggcggttggccaacaccccttcatcgggatgttggtgcccccaacatatggctaagggggggccaacgtgctaatcccagcggtaaattctcgggattgactagggagagaccaagactgatggaaagacatcaaacgaggtgattgaacctgaccgggagagagttcccatgactggccaagcgcgcgtgggcgggacaaccacgcgtacaatattgtcccacgcttatgaggcgtctaataagtgtgtaaggtaagacgagtttcgaggtcgttggcgacccgagatttatgcttaagacgtgtttcgaggtcgttagcggccttgagtacccgctctggttggaattgcctggagggtaaatacgcattcctggctctggaaagacagaatcttgactgctggaaagacagcggcgttgtctggcgcttaaggggcagccccccacagggtgtggtggacgacaccagatgatttagt

SEQ ID NO: 2324 - DNA, 711 bp, unidentified
  source 1..711: mol_type = unassigned DNA; note = unclassified Marnavirus sequence
aagtgtgtacaatcggtttgttaaccaattatacatacattattactaggggtggtaaaacaccctagcatggttatagccgaccatgtgccctctccttccaattagtgtaggatgaagcggacctactgttaaatcaacaacggactggtggctctttggactgtataagtaagcgacagcatgcaacgtgcagtggacaaagatccatgtaacacgttgtcataccggtgagcttagaaagaggatattggcaatcccgcgggacgcgcggaaataaattcgttccaccccaacccacgttttgcatattgttagtgttgtgagtaaaccagaaaactctcttatatgggagcatcgcttatagagcgactccggaaacttaaaacaaacagattgcggccaaaacttaaataacttgtatattcaagccaataagatctggaatagtgggcaaagccattaactttggaaatgatctctaggagtaacagcatggtacctatccgaatcgtacaggtagtgccgacgttaaaccatgtttggtcggagtaatgaaccgatctcctttagtgattgtccttagtgaaaactttgtgctaggctgtaactcagctagccggaacccccccggtgaacgaaataggggtgggaaagggacgcaggaaccctgaaaagaaactgcacacgaatcagatacaaacgaataca

SEQ ID NO: 2325 - DNA, 712 bp, unidentified
  source 1..712: mol_type = unassigned DNA; note = unclassified Picornavirales sequence
tattggagcagccgcaactttgggagcatcattgggagcagcgtctatacaatccaacacagctaaagagaccaataccactaatttaaatttccagcgagatgtcattagtcagggtgagaagtcttttacggatgctggactaccaaaattcatgtattatggaggacaatcagcaactcagccaaacaccctcttgcaccttggtggatctaatttctatgaacaatcgggtgttaacgcgaatttgccacatttcactacgggaggttattctcaatggaaccatactggaacaactcagcaacttggtaaaaactcagctagaactaactcagtacttgacggtgcgcctcacctctacaacagctttgtcagggaaggagagactgggcccccacgccttggatatggtgattggacagttgtcccacacccgacagcgtactctgatcagtcgattcagacggatagagcgatcacgtctaacttctctggcggccccgctaagccgacaagaaatacaggcacaaattttacgtcaactccaatgtctcaacgttcaagctataatagccctggaaggtcttcagaaccgccaatgtctgaagcagatatcgttaaaggattgtatgctatgagaataaggtaacgtacctcggctttcgccttcacgttcgcaaatgcattagccatagaaaattatatagtc

SEQ ID NO: 2326 - DNA, 714 bp, unidentified
  source 1..714: mol_type = unassigned DNA; note = unclassified RNA viruses ShiM-2016 sequence
gcggctagttgccgcacgctttgtagtagtatttgtacgttataattatcaggttagaagagtactaatactactctctaatctcacatttaactatagatgattacactcaaaaattatatttcatacgtccaagcacgatacgcttacacatacgctttaggttaagaccgtaccatcttaacctttatttcttttggtacttggttactatgtacccgtaattcactagacaatggtctagcacataacaaatcgtcaacttagagagcgttacgtttgctcatgctgatcacataagcatccactctcaagtttttatttaccacgtcatcaataagattgacatcgattcttttctaaacgactgttttgtattgcgaaaagtcatcccaccaacttataaaccctgaatttatagatcacacccgcagtagggttgaacgtgatctttttcattttatttgttggaacaatcgggacttttcggttgcattaatccgacgaactggaacaagttaacaatatatcgtttttgcaagtataatttcaggtagtctacaccgggctactagggttgttcgcagcacccgtcctttaaatacctctgactaacgattgagatagactagaactatgtccataatttggtaactgacttgttgaataataaaatcttttgatcaaacccccagacttgttttcaaaataatc

SEQ ID NO: 2327 - DNA, 715 bp, unidentified
  source 1..715: mol_type = unassigned DNA; note = unclassified environmental samples sequence
ccgggccccggcttatcttcccacaacgctctcgcatagtgatactataggttagctatgcgggagtgacaggcttgcaaacgtggggttacgcaagttgggcctaggtaccccttggggtgcctaggtctgggcgggagccaagccacggcagtaatgtcgtggcgcgattttctaggagattcctagagtctcctagaactgacttacatctttttataaacttcttgatggcaataccccattaatctcccaatattataaactctatagagtttctttgagagtttgcgtatgtataacgcaaggtttctctctaatgcgttgggtttggtcggtattgcgtcaataagtttataataactggtctgtcagcccgttctgattttgtcctgtgttcttcctactctttgctttgtgtgttttatttaaagccgactgtatgaatgtaagcttatttctaagcttgcaggccaaaatcgtcagcaaggggttgatagccttgcgatagggcgtgctaagtgtgggaaaccactaaatgccgagagactgcaacggccgtaattcatatggtgcacagtcctcacctactggcgggtagctccggcttataacaccagttctgtgctatctttggatatttggaagtattttggaagtgattcgatttgtgaaagtaaaagtttggaagttctttggaagttttcgaaagcgt

SEQ ID NO: 2328 - DNA, 716 bp, unidentified
  source 1..716: mol_type = unassigned DNA; note = unclassified Mitovirus sequence
ggggtagactctcgtaaagagagcctatcacgtccaaagactaggacgtagatgatcagattcatcgtaatgtgacatcgccgtaacgcaaggctacggaaaggaatgccgagagaataacttactctctgcaacccttagtgtaaggagtgtgtcgttgggtgttttctgaatacctaagagtagaactcttatgttaagatctcagccagggttagtaacctggtgagcaatcgaagcataagtgttcccacttatagtactcctgttctcctccataattgccgtcaaaagcaagaaagagtgcaaaacagaaccgtactagacgtccccgcactgcctacgcgatctgtagaaggtaccattggaggtccttccggggcggaatttcaccgctagtgaacgaaacgatttcgatcgttctctgaaactgtgtgcgatttccattaaaatcagtaaacaacgtataattattaacgatacttgctgatggacggataatccactgtaaaccttaaaggtaccttatggtatatcaggttaaaaactgatgaaggggtaaagcaattcaccccaatccataaggaggtctacctgactctcctagagtagctgcggccccttgaagtgatgtagaaatatataacttcttaaccttcgtgagggaaaccgactttgacacgaccaaacttgaggcaacctacaattttaaattt

SEQ ID NO: 2329 - DNA, 716 bp, unidentified
  source 1..716: mol_type = unassigned DNA; note = unclassified Riboviria sequence
tagaatatacaaaatatcttcccttagctgtagtaacaagatatgctgagcctataagggtaacaacatttgctgctagagaagtgcacaaacaagtggagaggagtgtagggctcaggttaagagccttcaacagattagctgtgaaagcatccccaacctgggctataaccccagttgagggtccagcttttgattgtaccggcatattgccgaaaatacaaaagcacaaaaacgataacgatacacgtaatacgtatattcgtttttgtgcttttctcaaaagtacagcttgtttacgcgattttctcaaaatcgcattgttttcgcgcttttctcaaaagtgcatctgtttattcgattttctcaaaatcgaatttgtttatacttttctcaaaagtaattttattttatagatttcttcaaaatctatatttgttttatcacttttatcaaaagtgaatccgtttattagattttctcaaaatctaacattctatcatatttataaaatatttaaattttcctggcttcttcaaaaccaggaacttttgttggatattttgtccaacacattattattaaattattttaacacaagtattaggttttacctgatatatgtaaatattttagcgctttttataaaagcacacagtttacatacttggactattcgcataaggatttgccaagtattaagtattttcggcaat

SEQ ID NO: 2330 - DNA, 716 bp, unidentified
  source 1..716: mol_type = unassigned DNA; note = unclassified RNA viruses ShiM-2016 sequence
gggaaaacccctccgtgcaaagtaacgctcctcaaggttcgtctgcgactaagcccaatgaactgtataaacccttgaagttactttgtgcaacatagtgtatttctcacgtgctttatttaacttcaactcttctgtattatcagacgcaagcgtagattgataatacttatcgagttgtcgaacacctctgatttatgaacgatctcagttgtaatagagagaacatttattgtattagaggccatatttattgtgatgctagtaataatcacttcattttgaatgtgtaaagactgctgctgcttctaatttatttgctctataggggtcatcccatcctatagcataaattatttgtggaaattgagttagtaataacacagccgctctgctagtatcactctatctatggtcctattacaatacttgctatcttagttcaacctctacattccggcagagtgtagttgtaactcaatccagcggctcgaccccgttggatgccactttataggcgacgcctagtaaaacctgtgaagaccttgggtcgatcagagctcccaatgtggatacattttaacagaccaagcaattcaagcaaagggctcacttatgtgaaaatacctccttgttttgtggctccaagtggatcatgagcccccactagaatgtagatcataagtagtgtactgatcactgaccctgtctgagga

SEQ ID NO: 2331 - DNA, 717 bp, Goosefish actinovirus
  source 1..717: mol_type = genomic DNA
cccagaaaactaattgcaaactcaaaacctcaatctacatgaagccgacagtgacactcttaaactggttgtcaaaagctaaacttggggcaaacgcagcaagcaacgaagaattctttgttgtcctctgcttttggcacggttacaaggcgattgggaacgaaagtgttgttagctggtggagaggtgcagttaacgaagggaggccacaagaggagaaagtgagcgaagcagagtttgacgaagcgattgaggctgagagtccattaaggaacatacagataaccagaggcggaccaagtggtgaaatcctgtaccttgcgacatctgaagagacagttttgtttaatcagcaactgtctgatcaggggtttgattgtgcaagttgatggaacagattttgacttgggctgagaacaagggtgtaggataccatacattaggagaaaaagagaacaaagtgttcttgtgttgctggacagcatataataatcgcggctccaggtcaacttgtgaacattggataagagaaggttgcggaaaccaaacagagactgaattccaaaggattagaactaagttctcttggtgtcacagtctcgctacttggtggccacatcatctctctgggacaaaagtcatcatttgggagaaagccgttcccggcacggtattcgtaagcccacttaagaagcacgagacaacaagtcgatagtc

SEQ ID NO: 2332 - DNA, 717 bp, unidentified
  source 1..717: mol_type = unassigned DNA; note = unclassified RNA viruses ShiM-2016 sequence
cgtggattaacacccacgcaatgatgcattcctcaggaattcctcggaagctattgatgattgaactggctttctacggattccccagaaattcctcggatatagtgaatgattgaactgagcatccatcgtttgcaacgcattttatttctaacgccggagacggctttaaacatctacccctttatgtattgtctataccgcgtgcgcaagctgcacgtgagtgagttgtccggccccagggctatgtgattcgtctaagttaataatacctctcgacgacgaattcacaaccttggtaggtcggttgcggcttatgccgctctcttataaacaaataaaagaaataaaaattagaaaataccgctaaaacaaaacaaaaaactttaattcgaacgtacattttgtacaacgcttatatatttctattttctgcggtatacgtaatgaaagtcatggttgatgactgtatagatcgatgtcatattggattatggaaatccactcactgacaaaggatcaaagcctctcagatttgacgctttgacatgtacacgaatcctagtttactagtatggaagctatgatctttcgttcatcctatatgtgaaaaccagatagggtaccctcgatgtactgaaactcagatagagggatgggacctcgataaaagaccctattaaatgaaagttacttacgatataacgatataaaacg

SEQ ID NO: 2333 - DNA, 717 bp, unidentified
  source 1..717: mol_type = unassigned DNA; note = unclassified RNA viruses ShiM-2016 sequence
gcctgacacgcagacctagccctctttgcctgccgtacacagtattgtacgaccattcagcagggaactcttagagtgcgagaaatcgcggagaacaacgtttatcctgaaaccctaaacctgcgacaaccatcatgggttacgtttttttttgagtctgagagtaataacatgtacccgaactctgagtcagtctaaaaacacgcggtggagtggcatgtcaaccgttgtgtctgtggggtgccacccgtgtaataggacaagataacgaggggagagagtgggacttaccggtaggacgttgagtataaaccttcagttaaagtaaataacggcataaatatggaatcgaactttaatcaaactgataatagggatgtactagtcaacgaaaattcagttgatatagtggacgagacgtcaaggttagttacagatgtgttgtgcgtgaacacattgtacgctaaagtggaacgccactggatttggaccattggaattaacgtggttctgttgtgtgtagtagtcatattgggaatatggattggactattatacattcagcaacaggaacacgtttctgaaatcaaaaaaatgaattacggaattggaatgatgaaaaaatcagcaaatgaatcggaacgtttgctgttggaagtgtgcaaggctgagttcggccagacagcttccatttgtgaactcaactggctctagtta

SEQ ID NO: 2334 - DNA, 718 bp, unidentified
  source 1..718: mol_type = unassigned DNA; note = unclassified Iflavirus sequence
ccagcgtgcgcatctacctcagggaagaggtccgatttcatatctcagtttcttgggatatgttgtaattcggatagtagatcctacctttggaatatgggtaaaagttatatttccaaaaattcaataaatatatttataagttagttcacagggctataacctaccccttattagtaacaaaataaataaaatactcggtactgaccggggtatattattgtatttatagagatcaaatttagtagttcgtgggaaaactatggtcgttttatgaattatcgttctttggaggtatccatttactggcttggtcagtcaggctcgattattcattttatattttgctctctactcttacaatgtatatgtataaatatagttttaaggcaaggcatagataataaagatatgttagtaagtaaacaagagtacgcgacgttatgttgtatgaaaatagtcattgacttaccagtagccctggcgtaaccagtaacatagctattggctcttgtcggaagcaaccgctactttattatcgtatgtgacagatttatctacaatacgtgttaacctttgtgttagaacctcgatgatatgtgtatccatagacttcgggtatatgctttctaaaagcatgcacgtacttctgaaccgtcattatgagcgttagacgacgaaggaatatcgactcatttccctttttaaaatcttactt

SEQ ID NO: 2335 - DNA, 718 bp, unidentified
  source 1..718: mol_type = unassigned DNA; note = unclassified RNA viruses ShiM-2016 sequence
cctggcgttggcataggattagttagactaacttcacacctccctcctcatcccgattagttagttttgcactataccggtttttggagttccagttctgcctgttggtgtgtaaacgttttgagccaggttcaatatgtgtgaaaccgagcggggtcctgcactttgatcaccagtaattcttcctgagaagtttccgtcgctctatgggagatggcagcattgtgcaactgtacaacggacgtacagtggatctgacaggggcgtcgccacgcgtttgagagacgtgttaataaatatggcggccgggcctcttaagcgcgcctacgaggagcgtccaaccaagcgatggataggtggaggtgttccggagccccagcggtagcttccaccgaaacatagtctctctaggggtccgagcatatcaacgggtaacgggctgtcactcctttccttgtggaatctgtaccattctgatgcgaacgcggtacctagtacctcggtccagtcagacttctttttggacgtgtatgccaatggactgccattcatcggcacgcacacatgttatgctgtccctccccctcctgccgctgctcctccggcacttccacctccggtgtggtcgtgcaccaggtcagcggtgacaatagcatactttttagtccataggaagcttctcccctccccaccaattcgggacctcaccgttcccgga

SEQ ID NO: 2336 - DNA, 721 bp, unidentified
  source 1..721: mol_type = unassigned DNA; note = unclassified Picornavirales sequence
tttcacaacgaaaatggccgctgctgcacttgctggtgccgctctttcaggaggttctaatataatcgcatctttaggttcaacaggattacagtcttatacatcattaaagttacaaactggcgaacaaaaatacaatcaaaatgttatggacactgccacaaaagcttttactgatgttggtttacctaagtatatggcctatacaggaaattcaggttctcttcatttacctggccaacagtaccacgtttctggctccaacttttattcagctggccttgttggtcaatcagttccttttttatctactccgtatcaagcttttactcatacaggaagacctaatactaccgtaaatcaaccctctgaaagaagagcaggattaggtgtgtattcacaggtacgtccctggaatgagcctcaaaatgtaaatgagctaggaaatacttcttaccaaaatttgccgataaatagggctctaatggcaagtatggctcggaatgagaaccctaccggaaacatgcaaactttgccgaaaacaaattttacaagaagtagttttcctactgccactccattacaaaattttgtaggtagaaatactgaactgcatcaacaggcagcccgacttctacaatgacctgcttagtctagttgacgtctggtctattttctttccaatcacttagtgtagcgcttgtattggttaatcttaatt

SEQ ID NO: 2337 - DNA, 722 bp, unidentified
  source 1..722: mol_type = unassigned DNA; note = unclassified Orthorubulavirus sequence
tcaacaaagttattctgtaatataaactaatcttatgagtgaaaagatacccacacaaggtggtcgatagacaaacagcaagagcagcaactgcaacaaaacttcaagggaaaaataattcgagaaatataataaattgacctcagagcaaacacaacatcgatccacaatagtcaacacaatcaacaatactccatgaggcttcacccatcaacagcaaaaagcacagtccattaagcagagcccaactcgcctcatcctcaaccatccactgaaagaaaaaatacatgaaagacctttggccaccagatccaaacaatccagcacaaaaattcaaacaaccgcaacactccattcggcctcaacaaacaatccgccaatctgtccatcattcccacactgacacacaaccatcccattcctcaccagcaacttaatccgcaagtcaaggaagattctccatatatttagccagtccgtcaatccgacacatcatcgtattttttaagaaaaaagagagatgagcaattgatacattctattttccatacgtatagtaaacattaaatcatggattcaccatagaccaagaccagaaattgaaagatcagaatgatcttgaacagcgatggataagcattgagaaacaaaaaagatagattatctccaacaacgaatggcacaaagcatccaacaacaggggggaagagagcacccccaag

SEQ ID NO: 2338 - DNA, 722 bp, unidentified
  source 1..722: mol_type = unassigned DNA; note = unclassified RNA viruses ShiM-2016 sequence
ctctcttacaaaattttgaaggatctatcttcgatccatagaatacattattgatttgtattttatctatgtaaggaaaacagcactttcgttttgccggattatggaaattaattcggttatagtacgaaatggcaaaaacgacggtaaccaatcagagaatttcattattcttttgattgaccccgtggctttaaacatatgcgtgatagtatatgttaagcaaacaaaacattttgggtaaaaccaaaaggttccatctgttaagaggaataaaaatatttaccacttttatagtggcggttttcactaggtatttagtgttgctcgtgaagcaatcctagaatattaaacgaacatcttttacgaagcacattgctcgcttgtcgaagggttttataatttactgaaaaacgagagaagacgcatgctagaagtatgtagttgctccgtgcacaccaccgcgcgtccgcagtttaacgttctctcatatctttgcacgagatatgtttgacgaattagaaaaacaggttttcgaaggagaccgttttgatttacaggtacgtgaaaagtaacctatagggattaggtacggcattcagactctcatctggacgtaagtccgctaatactataggccaagatctcaatcggattggctaaatttaagactattagttttttaattttagtaccaaaacaacaagagcccaaccaacatc

SEQ ID NO: 2339 - DNA, 723 bp, Phyllomonavirus phyllospherae
  source 1..723: mol_type = genomic DNA
ccccagacatacagccagcccagcatcctccttgagatttcacatactgtctcctgtcccccatccctatcacgagtccggatggagaaatataaagatccgagaagagacacaatgtatccttccgagatcaaaagttctgctggtaaaagagtagctttctttgtaatgcctaccggacatggaaagacgcatcagcacagtcctgaaagagggatatacgatgccgccaccatagttcctccgagcggaactgccttcctccgttttgcgcgcgatcatgggaagaagacggggaaatgggacacttatgaccgagagtggactcgtcttcttgtagaatatgtggagagtacaataggtaatatagtcgttatgattcctcattacgcaaatggtattcgtgcagggtgggtagatatgggaggagctatcctgaccaggaaagcccttgaacataactttagagagaggaaagacaaccttgagtcatatgaatattatagaatggttgaaaagaggcgcggtgctcctgagtttgaatctaacaaagaacttgaaaagtgtttgctattgaccgcagaaaggtggattgttcgaggaatagacgagccttccaggattccctatctccttgactactaatcagtacgtctgtaataactattaagaaaaaattcgagaatagactctcaaattgaaaatttctaccaagattacatc

SEQ ID NO: 2340 - DNA, 724 bp, unidentified
  source 1..724: mol_type = unassigned DNA; note = unclassified Lagovirus sequence
ttgtgagcaaactgaactcacaaaaagtgtcgttctgaccttgaagtcgcaccctatgactattcttgacgcaatgatcattcaaaccaaaagaggacttccaagtggcatgcccttcacatcagttataaattccatatgtcattggttactttggtcagcagcagtttataaagcatgtgcagagataggtctccactgttcaaacctgtatgaagatgcccctttttacacgtacggtgatgatggagtttatgccatgacgcccatgatggttagtttactgcctgccattatagaaaacctccgtgattatggtttgtctccaactgctgccgataaaactgagtacattgacgtgtgcccattaaaagatgtggcattcttgaaaaggcatttcaaaatgacagacattggttgggtgtctttgctcgacagatccagcatcctcaggcaacttgagtggtgcaaaaccagcaaacggcacatgacactggaagagactcatgaccttgcaaaggaggaacgcggtgtacagcttgaggaactccaagtggtggctgctgctcatggtaaggaattctttgacttcatcaagccagagttgatgcgccaacaagcttacacgaagttcaacgtgtacgactatgacgcagcttggaaaattcttgcagatcgcaagagggtcgtctcggtagtacctgacgacaattttgtgaatgtt

SEQ ID NO: 2341 - DNA, 724 bp, unidentified
  source 1..724: mol_type = unassigned DNA; note = unclassified RNA viruses ShiM-2016 sequence
ggggggaggggtaaaaccctcctctccttttggcacgaacagagattcctccttgttaggttaagtcctggtggtggatcactctcccattaggttaagtcctgactttgactgtccctctgtgctatgtcgagattccttgtgattaagtagtaagtcctgaccttgggttaccccactgttaggttgtaagtcttggtcccaactaaccctcggcgtggctgtgtcgaactgagaacctttatttgtttagattaggacaagcgattttctttgtcgctataagttcgtcaggcattgcttattgcctgtccctttctatctgtcccagagtcctgtgactattcttgtcccaaaacattgtagctgctagtaccatcgtgtgttgattattacaggtaacagcgtagatcttcactggcaacagtaaagcacgacagcggaacgcagagcactatggtgtactaaggcacttatagtttctaactctatctttttcgacaaccggatgcgcatgacgggattccttctttaggaatgaaagggtaattattgcgtagtcgggtttaccggctattgtctactcgttgtgtgttaatgttcgcttccagaacagtccgaaagtgcactctatttctttcttcagtgtgtactgccacgtgttgtcttcttagtggcatctctttaacccgctagggatcttttatttttgcaattttaatat

SEQ ID NO: 2342 - DNA, 724 bp, unidentified
  source 1..724: mol_type = unassigned DNA; note = unclassified RNA viruses ShiM-2016 sequence
gtaaacttttagtttacatcagcctttaaggattcctcatgggattctttatttcaattggattgaatagttactttaagtactttttgatcgaagaatttattcgacggtcttaatttattttccactgttctttacattttgtcttatgcaagatttttatttatctatcaccggatgaccggagtgaatattaatttacatgatctttctcactatgataaaagtgtcgttttattcattttacgttaaaatgtttcccctttaattatattaattatttccgtatagttacctgagctataattcaggagtttgtgcaatacttgcagttaacactgtaagattgataaagattttgataaatcacatactgtccccaatctgtacacaaggatgtatttatagtcgtagtttttattctatgaagtagaacttacatgaatattattaacgaaagtgtgaacaggatttatttctattataggcgcgagaaaccatatcaattatgatagtggtaggacgtggttagaaagaatcagtttccaacacatattagtttttattacatagaacacgatgcacaataacgaaaaatacttattaaatacgtgcaccatacttgtgatgctgatagaatttcccaattagacaatgactcaacattattgatcgacgtggattacgtattctaaaaagctggtgctgttaacctaaagagaat

SEQ ID NO: 2343 - DNA, 728 bp, unidentified
  source 1..728: mol_type = unassigned DNA; note = unclassified Iflaviridae sequence
gtggggggaaaccccacgttctgcaaagtgtaataacccttaagcccgtttcatacgtacctcactaaattgttatgaccactggaggatgctttgtgttatcggtctaaccacggccgagagcaattcatttcgtagatagtgttagtaacatgctggttgacacatacctgacgtcaataagtaaaagactttgtagaatgtagttcgaacccattacctttaaaacccaaaaccaaaactttcttatcaattatgaagaggattaaacccctaatataattgttcgtgtcattgcgttcaatgacttaaaaccatgcactaaagcaagtttaattttacgagcttttaaaatttggcaaatttttgtaagtgtagctactcaaagttttcgcagactttgttttaaactgtaatctttagatataattcagcgactgatatttgcgagatatcggaacgttttatattctattgaccagtgatattaccttaattggttgtatcgagacatagtaaggactataaccttctctcaaacggtgtgtttattagtatttcagaagcacaaacgttttcatattttatatgttggtacttgagtataagtatccctattttgaaacccttaatggaactgggaaccattattgtataaaccccttaccaagttatgatcgtagtttcttggtggaccgttaaatcgatcactactcgtgggaacaatt

SEQ ID NO: 2344 - DNA, 728 bp, unidentified
  source 1..728: mol_type = unassigned DNA; note = unclassified Picornavirales sequence
ccacgtgtgtatgccaacctacatggactcgtgcatgtaggttggattcacaaccctttcataaccccccccttttaacccaacccttcgtaaccgtacgcttcactcgcctttgggtatagcggcccaatgtgctgaagaaaaggatacgctataaggggccaacgggtggtggcccttaagaccacccaacctagaagcttgtacactcgggcaatagtgaggcccacatccagtgggtcaagcccaaagcattcttgttccccggtatgatctcataagctgtacccacggctgaaagagtgattatcgttatcccactcagtacttcggagagcctagtacaccacttggaaatggaagtctgtgatccggggttgaccctgaaccccagaaactcatgatgaggctaaccttcccgaacacggcgacgtgtggttagcctgcgctggcatgaggcctctttgtaggcagactgaaatggaagggtgacgaagagccgactgagctactgttttattcctccggccccctgaatgcggctaatcctaactcctggtccagtacttgtaacccaacaggtggctggtcgtaatgcgtaagccgggagcggaaccgactactttggggcgtccgtgtttctcaatattattcatttctagcttatggtgacaatttatgattgcagagattgtgctgtatttgtgtctgagagaagaagtaacaat

SEQ ID NO: 2345 - DNA, 729 bp, unidentified
  source 1..729: mol_type = unassigned DNA; note = unclassified Hypovirus sequence
tgcctgtaaaatccttcaggtgtttccttttggaaactaggagtgagaacaccacgctttcagtggtcagtatttgtatcgtttgtgttcgaatactactggctgttatcttttgttctcgtgagctttcgctcgtggcctttggccggaaactctattgagttttgtgggatttcctcccgtgggctttgcccgtggcacttgtgccgtttactccgaaatgagtgaaaactatttcaaatgcatgttaagacctcaccgcaaagtgtataaactaacagaaggcataaaacctgatgaatggagtagaccattcacggagaaccttattaggctgcctgtataaccgttcttcccacgactttatcaatcacgtagactgcggtccataatcgtgtttaagttgagactcgtcagcggagtcaagaacagaacgttaaaataacgctgattaacatgctttcaacatcttccggtggacgtttactggttaactgtatttggtttaaatttgaggtgtgacccctaccttcaagctaatttgacacgaccataccctgcgtaactagaaacctaacaagtcgagttcgaacttgagggttgtgttatgatatggtggaatcgtcaataatgaaccttgttaaagagccaattagcacaccgtgatgctcggttttaaaattttagaatggctgacccggcctagatgggtgtgtcacgtccaagaac

SEQ ID NO: 2346 - DNA, 731 bp, unidentified
  source 1..731: mol_type = unassigned DNA; note = unclassified Caliciviridae sequence
tcccgtataagggaatggacatattgagttaacaatatgccattcccttatacgggagtgagcccacgaccgttggggtttttaccccaccgttcgtggacctcatttctgcttattacttcccccactttcatcggggacgttccttttgccgcacacccagtgcggcaggaggtaacgagtttattttgtatagttgttattagtcacaccggagggcgtgctttacgctcttaagggcttaacccactccgttgtgcctgtcacttgtcgcttgacggcggctggtctagtacgggtctagttagtaccactcagtggtcagggtgtgccgcccgttgaaggctggtattcccgcgtgagggggctaccgtggtaacacggtccttgcgtgtgtgtgagccagtatgctctctggagctgccattgtttgggaaagctcttccccgaacaactaagtgcctgatggcctcatttggctgattggtgctctcaagacatgtgccggaggcaagcttgttggaaccaccagcaagccctgaccggtagctaattagtcccttgacggcatcgaatttttcctttttccttttctttttgtgaactgaatatagtgatttgtgtttagtgcttttgtgcctttgtcacttttactttgtcaaatattagtgtttgtgcatttgttttaaactgcaacttgttgttaatttttggacaatttgaacttagac

SEQ ID NO: 2347 - DNA, 731 bp, unidentified
  source 1..731: mol_type = unassigned DNA; note = unclassified Picornavirales sequence
tttgaaagggccctggatataatagggttaaacccctattatatccaggaattgccaacccataatccattgtccatcaatgttttatgggggggaccctttctcccctccccctccaaataccttttacccctctgtaaccaagagtgtgcaaaatctatttactagcccagaattgcggcttctggggaggtttattcctcatgcctaacaagatgttacgcaaactccgggctacggccctgggcttttgccctaaagatttagaagtttacactatcgtccaacaggaggacaacaaaccagttgttctaaggacaagcacttctgtttccccggtgagactggatagactgtacccacggttgaaactggttgatccgttacccgactcactacttcgagaagattagtaggaaactgtgaaactgattccattgatccggatactttccccgtatccagaaactactgatgagggttgacttcccgactacggcgacgtagtgtcatccctgcgctggcagtaggcctctttgaggatggaagatgtggatcggtaaccgaaggtcctattgagctagtgtttatacctccggcctcctgaatgcggctaatcctaacccatgatctagtgctcacaaaccagtgagtagctagtcgtaacgcgtaagtcgtgggcggaaccgactactttggagtgaccgtgtttcctattttacttttgtttg

SEQ ID NO: 2348 - DNA, 732 bp, Synodus synodonvirus
  source 1..732: mol_type = genomic DNA
accctaagtgatatcactaactgattaagcaaaacttaggatgaagcagttggaaaacagtttctcaacatttaaattgtgcatacgtatctactttgaaaacaaccacctggggaagagatggatgattatacaccaatcaaagatattatatcagcagaggccctttctgacctgacagcaataataattatcattttacagatccacacggagctcggaatcaggccttatcctttcagtccagatattcatgatagatttcgagtattgtctatcagagctagtgatttcaccagacttagcataagaaggagggatctccttaactacgggatagactcgttacttggaaaggctgaaccgaatccgcagattgcttttgagcttgctagagttaggctgctcttagatctcctaagaaaatacacccacccttatatagagcctgacacaaagaaaacaaaccagaaatgaattaagatctctaacgatccgatatcagatgagttcggataacatacagatgattaacacctataaccttcttaatattgcatttgaacaaaaagaaattgatatcaatctgagtttaacaatactgtaagagatcatatactatgattttggataattaagaaaaacttaggattacacattatatacatcattctgtgtgacaacattcatcaaactagcttcaaaggcgttagcctctcaaaaagtgtcagt

SEQ ID NO: 2349 - DNA, 732 bp, unidentified
  source 1..732: mol_type = unassigned DNA; note = unclassified Iflavirus sequence
cgatctcgggtttaacccgtgcagtgcttttaatagattttcaatattctatcgtttatctccgactttattgattagtagcgtctcttgttcatttttcagctcgatttttatcgttcgtgattttatgttcgttgagacgttttctgaactttgttagtcggagattttgttagaatatctttttctattaatgcattagtagtttaggtttcttttgcttagttttgtttattctggttttatctccagtacaattggaatattggaaaactttgccttcgtttcaaagagccgggctactttcccgtgcatgttttatttcctgcttactgagtgtaaagcttggttaccgtagatgtattaagttatgtaatgtaatttatgcatcgttaaattctctttacgtattatcgatttatcctccggatagataatgaattaacggattgaattttcggtaattgagtgtgtaatttcaggacccaccgtgagcagcgggtgtagagcgcatatcttggtattagttgttaattttgaatactaaagttaattgatttcttgaacttagtgtagtcatgtcttaccaatgttcaagttacggcaattaattaggtatctattttaacttgacaagcccttcatgcggaagaaccgaagttgtggtagttggctagtattaacagaaaatggggtgcgtgagctacattagtggtgtaactttaattaaat

SEQ ID NO: 2350 - DNA, 732 bp, unidentified
  source 1..732: mol_type = unassigned DNA; note = Robinvale bee virus 9 isolate VN3-31 polyprotein gene, complete1 sequence
ggtatcagacccgtcatcaccttagcatacgtaataggtatctttagatcattctaaaagcattctttctactggagtacactctcctatatcaaaagtgaccagtgtatatggttggtgaaccattgtaaacaatcaccgtagctcttttaacgttataaagatggaattttaagctactaaatctctaaaactctgtactcaagccatgttaaggcgaagtaccaagataggggttttaccctcatcttgctcgtattgtgatgcgttggtgcctgatctgggctaacccaatacgtgatacatatacatatatagcactatgtgctactgcattaagaatttactctatgggtataaaaaacataaattacaaactccccatatagatccattttagtgttggatttctaatacactatgatagcattttactatgttagtaagcggataatagcagccgctggtcctacgttacatataatatatactaacctctccgtgaagcaaccttccgacgttactatagaaaactctaggataccctagtaacctctccgctccgagaaaggacgacgttaatactaatcaactgattttgtgtaataaggcgttcgctgaacactagtttaattactaatcatgtaaaagtcaagattgaaggaatcacaaccttaaatagtgatagtctagctagacgataaactcaattaagaaccagagtacaacaat

SEQ ID NO: 2351 - DNA, 733 bp, Kimberley ephemerovirus
  source 1..733: mol_type = genomic DNA
ctaattaaaccgtgtacctcaatattatatataatccattgcatgagtaatgaaaaaaatgcgagcgacctttaaactcaatatgaatttttgatataaattaatcccaatttaacaggcatcatggagttttccagatgcaaactgagtcttcaaataatcaattttaaacccattgagattgaaagaagagcactactaggcttgcttgctgttaagagtataaagaccttgcacagaggtaaccaaatgattacaaggctttctgagatcttgataccaagtgcaattgtgaatggagaatttgttgttcgaaatgataaaaagaatggttactgaatctttgtgggggaggcttatggagctatagattcagatgatttaagaggagtcagagaaaaggtgatgaaaattagcagaaccataccattgattatcacaggagaggaatatggggctattgatttggacataacgctagaagattccgaaataatattcttaaaaagaaagaatgagcttgacatctgtgacttacctcgaaaaatgagatttctgcattgagcacaggcatcaaataatacttttattcacgctccaataaatggacaagtaaataaaggaaccaaataaatccttaaacagatgaaaaccttataaacatgaaaaaaatcaaattctcaagctgagacccactgtccttacgataggtaacttaagatcaacaggcatc

SEQ ID NO: 2352 - DNA, 734 bp, unidentified
  source 1..734: mol_type = unassigned DNA; note = unclassified Bunyavirales sequence
atgatggtgataaacattgaaactgaaacaaagagctttgctgcgcagctgggcaactctgacaagaaattacagcttaaggaaattttcaaaagaaaattctgtggagacttcgcaagtcaaaaatatatttccttcgggagccagccatgtttggatttaggtggtgaaggtgattgtttctacagatgcatgtactactcattgcctcactcatttcaagcaagttatgcagaattttatagcaatttttctgatggccagtgggttgatgaagctaagatcatcaggttttgtgaaaccttccctgtgaagatttttgtgcattacggtgatgaaaagggtgtgatcaaacaatttggtgtaccataccttctggtggtgcatttgcttctctccaagggtcattacacattgatggggtacaaagaaacggggccttttatgcaaaaactactgatgtcaaataactaccatgcttctgcactgtctgaggatgtttatgactctattagcagcctcggcgtaggcttcatggaggattttgaaattctttgcaaaatttataggtcttgtccgggtttagttaccatgccaaacacaaatgtggaagttgtttcaaaatgcaaagatatgttgttgaacaatcattaccatgaaagaaacaacacagatatggtagcacacatccaagttatgatcaattcacttctttgtactaatccgggcggcag

SEQ ID NO: 2353 - DNA, 734 bp, unidentified
  source 1..734: mol_type = unassigned DNA; note = unclassified Sopolycivirus sequence
tcgctttagcggattgtgtttccttaggttaagaacagtaagctttttgctgagtagtaagtaatgcgtaactcaagaaatcccgcaaggtttgaattcttgagaccactgccctgctgagtcatggtctagtaattgtagtgcaatacttatataacagtcaggccactaagaagtaatctcttagtttgctaaagtcctgaagaaacgatggaactagcaattccggactttccatagaggaacctgctaaatgtggatgccaccccagagagctccatttagtatgtcagatataagtatgaatgcaatgaatgatagtggcgaccccctatgggacccctcataggtaagcttggtatgtcaagaacactctcatcctaaagttagaacgatctgttcagctggagtttaaacattatgcttacatgtttaagttgtgcttcagttaaatcttaagccggtttcgtactgggacacacaaaccgttaatcttccattcgtggctagattgtgagtacccaattttattttgtacttaatgctgtttattttgctgtctattgctgcccttgctgttttattatttgctaatttttgcttatataatttgctatttactgctgctataattgatactttaggaatcaatccaatcgtaaaatattgcgttataactctaacttctgttttgcttatttttgctattatttacgaattaataaagattaaac

SEQ ID NO: 2354 - DNA, 734 bp, unidentified
  source 1..734: mol_type = unassigned DNA; note = unclassified RNA viruses ShiM-2016 sequence
tagacgtatgtctatgcacactttgttaacataacccggggcttgccgcctgcggggccttgtaaaaaggatactccaataacggtttgactggatagcctccagtcagggttttcccgccggctatgtagcttgccgctcatagttaaattggactccaatttacttggtgttcaggagaagatgaagaagtttgggagttttaagtctgcctgactgtaaaaggcaaccccctccttagccagtgagccatgtcgcaactaaataagtgcctcgctcggccccagtgggaaactggataaaaagactttccccgttttgttagtgaacgaaatcacacctatatcgtttgatagtaagcaaacgcatgtttggcagcgtgccctttgccactggatacgtatgtagacgtagcgatggaggacctgctccagcaggtatcaacgcaagggatttgaagaccttgtagcgaaatcgcatttaaatagaatcgtggcggattctagcctatctactaaggcctcattttgtatgcaagtactcttgtgatatgcgacgaacacggtaggatgagttcagtaccgcccctaggatgatctccttcggtgacgggaacaaactcgtttatcctgctgctagtaagcaatttgaacgacagaacgtgtgcaaagtgggattccccgctagtcgtgcctagactttaaattggcatttctttttctctttccctcatc

SEQ ID NO: 2355 - DNA, 734 bp, unidentified
  source 1..734: mol_type = unassigned DNA; note = unclassified RNA viruses ShiM-2016 sequence
ggcacatgcattaattcgtctgcggacgggaaaggatcacagatagcatgcaccggtggcttttgaataccaccatgggaagtcggggaggcagtttggaaactgtcgagatgtgggagcatgggttacctatacctggcacattcgttcacatgtgcgatccatgcgcggttgtagcagaccgttctaccacgggcttattcttccgtgccgggcagaatgccaatgtcccggtcggagcctgccgcgagcctacagggggccgctgaggtgaaggctcttcagatttccgcatcccgggcggttggggaccagccatccccgtaaaatctgaggattgtactctcgtgctgctaccggaagcttgactgcaagggagtgggcccgaatccggaaggtgaagggacagtcaggtgaccagccaactgtgtgtgaaagggaatttccagcccggggatcacatggaaggtcggagggtacacaaaatgactacggccgagcgccctgcgatagtgggttgacttgtccggggggggacgctccatgccattttggctcgcttttcgtgcaatggatgacttcctcagcgcggggactgttgcccgcgccgccgcggttgctgcggtgttattttcaatggcatcatttgaataattaggcaaaagtgatcctcgacttgaaccgaaaagctcacatataaacattgttgtttaagtgcacgtgacatttcgctt

SEQ ID NO: 2356 - DNA, 736 bp, unidentified
  source 1..736: mol_type = unassigned DNA; note = unclassified Mitovirus sequence
ggggccgtgaggctccttatgagtaatcgaaatctcgattaccagcgataaatcgcacattacattgttttgtgtagttcgtcgttccccaacagtaacgaaggggatcactggaggacttgtcgtagctcatacggccggtgttaaggtggtctcggcagaccaaaacctcgttgcgagggggttccctaccagaaatggtgttaaagggaactgagaaagttgctctcccaagagtaaccgtattgcgatataggttatcgtctgccagtcgtctaaggcgcaagccttagaagacgcagtcttctctgctgctgcggcccctgcgaaagcggggaaaccgaagttttatagagcttattaagattattaggccctagggacagtataccaggcactggtcagtagaccaggcgttagtacctgaaccctgtgcgaagaaaccttaagttcaccctaccagcgagagcgtagtacgactcctggaaagagaatttaagaatgtattcacccgaatcggattcaaatctttttggatctgaaggcggtcactggataccatgcatggtgctaaggggaacccgctttggaaagctggttatccaagagctacctagggacgtgaggaataccaagtagtaatacttgagatcctcgccttttacgtgtgggagcaacctcgtagcagttcggctgacgagggacccatgacggaggcaccacctttttccaaaaa

SEQ ID NO: 2357 - DNA, 736 bp, unidentified
  source 1..736: mol_type = unassigned DNA; note = unclassified Picornavirales sequence
gtgtccccaaatacgcaccgcgtagcgcttaaactacggtggcccgtcgtaagttgcgcggtggacaggggggacacaggtcagtcccgggttttttaaccgtactactcaggcgggactataaaatatccagagaggaggccaccacccacacgttttatagcggtaagcgtgtggtgtacattccgctgctaataacgataataataccgcttctgcgggatatgtacagcctcgggaaactgaagttgtgtgcgaggagtttgagggccttagcgtcgacgccgatccttctgccacgggcgctactgaatttattcaggaagcgtgcgcggcagtagatgttcttggcaagtactacgcgggcagctccatccacgcaaagcagcaagatttgcagggcctgcgacagtacttttctcggccccggcttgtgggccgaggtactatcaccactggctttaggggtcgcattgcggtcctgaacgtcaacgcctccaacctttttaccactttgttcccgaacggccttgcgcggctcactggtgtctatggggtgcggtttaagatctgctttaagttgcaggttgcctctacccctttccatcagggccttctgtcacttagttggcagtatggctctttgtcaaccagtaccacggtttatcagcgtgcttcgcgcgctgagactgccaccaacattcctcatgtcaggctggatttgtcagaactcact

SEQ ID NO: 2358 - DNA, 736 bp, unidentified
  source 1..736: mol_type = unassigned DNA; note = unclassified Riboviria sequence
atctaccaacaaagccatgcttgggaatctcaaaacgtaaccaaagattgagtgatttttctttgcattatactccttctcttttgtgttgtgatggataggcacctactaagtttggcctaaatactcactattccgtccagttttgtaatttcagctccataatctcatattattccacgagggtatgtggcattgtaattgctcatacaaacaagttcctatttttctcttatatcgattttgctgatttaaaatcactatgggcctagagccaacttgctaagatgtccgatccatcagaagatttgcccttagccggtccatcaggagttctccaaggacccgggagattccctagaccattgacccgtcatcatgaatcttttgaagaagaaacaaggcgccgtcttacctccattgaattaagaatcaaaggcctggaggatagagtctccgctcaatccacaatcttgggtgagataaaaagcatgctggaaacactcaccattgcagccaatgtgccgactcactcagtaacatcctatagccaaatccgcagaggccgatcggcgcgcaaaaattagacagccaaaaatttgttcgtaagaactgtcatgatatttggatgtttgctgtattaaaacttccagtcgcatgcacgaagaatggattataccctcctccttccttattatagtgacagttttaacggacaaaaacgagcagagccatt

SEQ ID NO: 2359 - DNA, 737 bp, unidentified
  source 1..737: mol_type = unassigned DNA; note = unclassified Picornavirales sequence
cacggattttgtccgtgtacgtctcgcttgatagttgagcttcgctcagctcagagttctccatttgattggaggcattcagggattcgtccctgtacgatctgtatcattacctttactgagtaaccagagaaattagactactctctacctttatgttttagtagattttaaaacctaaacgactgtgccgcccctgtggggttagtcagtgtccttgaactgttgttcgagggagtattaggcgatcttgtatcgccatttttgtaaattattatacagacttataatgtctataaacttagaaaacaaacaaaaatacatatgtaaacatagagtcacatacggctgtgttcggcctatagaaccttactgaacttatcataataaagaaacgcgagttttataaaagaatacattcattaatacctgccttaccaggttctttgtgaatatctcaacgccagagagaagtaaagtatgacaacacaagttaatcatgaccaatgatgaggttatcgattacgccctggtgcagggtagtacagataaattgctgtgggagcaccaagtccactccgtgagatcgaccggaaacagttgctgtcttttattcatagtctaacaaaatgaattaaacaacgtatacactcctaacccgtttctatgcactaataaatatcaaatgaattcaatcaaatgatattactggtgctaactaacacaactgtcttaat

SEQ ID NO: 2360 - DNA, 738 bp, unidentified
  source 1..738: mol_type = unassigned DNA; note = unclassified Marnavirus sequence
ttattgctaggtacccctttaggggggaactaggacattatggtttttgtctgatagcttgagttttctcttgctagtttattcgtaggcatacatggaaatgctcgttagtatctgatctaaccccaccatagtatcgcggcttacgtgtattatgctggcaagtggactgctaaagcgaccaaattcttatgtttacgaatttacgaatgaaccaaattttgttgatcacgtccttttataaagtgacaacggttttcgtaataagggctttaccgtttgtaagtaaaaagctactgttgtttgacacactatgttagggtgtgccgtagaacagtttgcgctttgcgcaattgcatattgaagaaaaaataatcaaataaaaagtttatatttacatttatgttttataccggttgatgaccaaccttcacaatatatcctttaaagaagctaatctttgtgtgttatgttatgaaaaccttgttgatggcgccgttttggcttacagtcactgcaagttattctgttcacactgacatcacatggacagccagatgttttcatttggtatgcaccctcggtctttgttttcataataatatgctttaacggtgtattgtgaggtacctcctcagatagaagtgcagagggctgaacctaacagtaaatttttggtatccttgaccgggagaaataatacgtcatccaagaaccagagaattacgattttacacg

SEQ ID NO: 2361 - DNA, 741 bp, unidentified
  source 1..741: mol_type = unassigned DNA; note = unclassified environmental samples sequence
ctgaaacctttttctaaccggtcgaaaccctcaaccgcctcggaaacgttgaggttgagtacaggggcgtaaccgtctaggttacgtctccccccagctcttaggttggttagtctgttagcgcaatgccttacttccgcctttgagttacggcagccctaccgggggatacagggttgcttagcccgcgagggtcagtgcttcggcagtcttatgtgggtccctgagtcacataaggcaacgtacaaaagggacatatggagttctcttcgggggtctctatatgttcttatgtactccctatatgaaccttacaacgccaacggttttcattgcccgctttctccccctggagagagatgactatcgaagacggtgtaatggttgctataattagaataagctatacattaaggacttagtattaaacactagggggacgcctctaggagtctccgttcgggcgtgggatgtggtatagcatttcactcggagaggccaaaacagggatcgcctgtgctaacacaaatgtcaactgactgcaacggccatgcttaattgctctcctaggtgggtacagtcgggcccgtcttcaggtgggtcgcctgtccgctattagtatctgaagttacgaagttataattcaaatcgaaaatctttattgcaattcttatttacgaaagcggacgtctagtaaactatcttgggaagcctacgtctggtggtagttgaaaccaaata

SEQ ID NO: 2362 - DNA, 741 bp, unidentified
  source 1..741: mol_type = unassigned DNA; note = unclassified Partitiviridae sequence
aggtgttgtcgaagctggccaccagcttcgcagccaagtgtggagggtaccccgttatgctacatacctcctcgaagaccatttgcatgctcctggtcgagtgctgggagttgaagtcgtcgtagtccagcataacgttgtacccctggccgtgtctcaaagctacgaccttctcgcacataccgagcgtgccgtactgccctgggtcgaggaccaccctcctgttcctccacgccttggcaaccagcgacaataggctacgaatgtgtcgagtacccggggcgcggttgctgtggatggttgccctcgcctccacttcgatttggagggtagtcgtgtgggtaggaggggccgcccacgcgcgaaggtaagtgccctgggctaaggcgttccccagtagaacgctcgggcgcggtggcgcccgcggtacctacaagcccgcacacgcgtctgacggattcggcctagtattgccaactaagtcgtcctccccgtagcgcgtgtggcggttaatcgggagagccaggtggagggttatggcgcgcaaacaacacgtcccaggttttaacgttctgggtgcggccttgccacctccttaaccatttaagagactggtgcatggtggtgttcccgtgtcgagcgggcggtcagacacgagctcaggggagtcgaatccccctgagtaacgtggtttatgcgtagcatagctgatacggccgcaggcccactgttactgaatgc

SEQ ID NO: 2363 - DNA, 742 bp, unidentified
  source 1..742: mol_type = unassigned DNA; note = unclassified Orthorubulavirus sequence
aatacttcgaggccttgatctcagaatgcaatctctggaagggaaagtggataagattcttgcaacctcggcaaccataacagccttaaagaatgaagtgacaagtctaaaagcaaatgtggccacagttgagggcatgatgactactatgaaaattatggacccaagcactccaactaatgtaccagttgaaaagataagaaagaacctgaaagatactcctgttataatctcagggcccctgagtgagagccacatcactgaagggagtgatatgattgtgcttgatgaattagccaggccttctctaagttccacaaagaagattgtgaggagacctgaacccaagaaggatttaacaggtatgaaattaatgttgatccaactagctaatgactgtatggggaagcctgatcaaaaggcagaaatcgtggcaaaaattcatgcggctactcgtgaggctcagctgttagatatcaagcgcagcatcatcaagtctgcaatataagaaatcttagttgagtacatacctaagacacaacaataattccactacatatatattgaatcgaagtgagcactagggtggataggtcaagggacacatctaggcatcagaaatccgagtcaatctgcactgtccgggtttaagaaaaaaccaagtgtcaagagcatcagataggcacgaacctaacacaccccgagacacaccagccacacacatccgggccgaccagcagcc

SEQ ID NO: 2364 - DNA, 743 bp, unidentified
  source 1..743: mol_type = unassigned DNA; note = unclassified RNA viruses ShiM-2016 sequence
gtgggtggcttaggccacgcatagagtttttctagtcatcatttgatgccagtagtagcacttatagtccttaggggctatttagtgtgtttactgagaagtgttacatgtcatgtataatgttgctaaagatgatattgttttaagcacttcgaaattttattgggtatagtagtgcaacgtctactatatcctttctctctaattagagagataaaatcaatatgtccaccttgtactcatttttgagtacatgttaattagtcagtggaggaagaactaaactttgcagagaagaattagtgtttgcaaactaaggaatagctctgcaatttatgcttttaaaaagatgatcggttaattcgccgtcatttcacttcctatatggaagtgttttataagggattgctgtcgtgaaagatatcttgcgtaagaagaacgtgtctaaggggaagaaaaattcatcccctatagttagtaaggaagaaattcgtcagaggaaggctctggaaaaggagcggaaaactaggatagaaagagataaaaccagattgaatgatctggataccgttgtgcataaaaagaaaagtaagaagattgttccctatgagggagatcataataatatcttggatatcccagtgaagcaagatcatgaattcgatgattttctggacaatataccagattcagaattctttgatgagagtgatattccacctgttcataacaacaatgtggat

SEQ ID NO: 2365 - DNA, 744 bp, unidentified
  source 1..744: mol_type = unassigned DNA; note = unclassified RNA viruses ShiM-2016 sequence
ccacggtcctaatcgaccgtgtatccttttgaccccgtgtaggttgcgggtgaacgcctcattttgttaattcgaagttctcgggttttcaactgaggtgttgccagtgtggacttttgtcgcttatgtttcctatacatcgacttgtgtgtataggtacaacaacctccaactttaaccttaacctttatttgagtgtttattttaagatgtctctaactcagctctcttgctgtcatggctaatgactcgtgtgtagattgtattggatgtgcccatcgtgtaacgggccatcacttaccacctaaatattagttactcgtcgtggaggctaatagcatttgggagtgatggttatgatttcgatgggtaactggctgcccgctagtggttccggtcaggcccgattgtagatctatgcatgccttattagtaacaaaatccttgagtggtatcatagggtggagccccagggctccggtgtgaacactgcttgaggtggtcccctaggacatgcaccggggagaggctcctcgaggaaccggtggcgaaggctacaggtgttccaactgtagtcggcgtgagacctagaatttcccttggtggagggcccacattaaaaaccccgtggggcagaaaggcaccatttacaaaccatatgaaaattacaactagtgatatagacgattttgttggtacagagagacctgcgattataattgttgatacaagagttattacaag

SEQ ID NO: 2366 - DNA, 745 bp, unidentified
  source 1..745: mol_type = unassigned DNA; note = unclassified Picornavirales sequence
ccgtataggcattttgcctatacggagattattgagttgtgtggtttaccccacaccggttcattcatttatggactgcagcacatgttgtgagagtatagcatctctcattgacaatatgtgcggatttaacttgtccttaaatggacttctttgtgcgcttttgattgttttagctataaacaatacaaacctttgtaaaagaattgaaaataaaattataaaaataaatttcaatcaatgttgcaagcgaatacttgcgttctttatgtaaaagtttacactgatcagaccaaactaaaattttgacacgatctaagctgtaatctacagcatgtaaagagttcagtttactgctctttatgattattttaatgctattcctgtatagctgtttttatgacaaataggaacttccgaattatacgagaattcacatctcttggtaacgccttcgggtagggaccaaacccctgacgagactctgtagaaagcgtttctctcagtgatgggaagatattgctcttcaatgaattttgaatttgagcgtcttcttgcatctgttgaaactaacttttgcattgaaagtggccgtttttgaccgcggaataacactttatgatttgcatgactaaatctggccttttattacgccagacaaaaagttgcagtgtcgactgttgagaaattttctctgcaggtcaactgcttggaaagttcttcaactcgtcgatgttaacaacat

SEQ ID NO: 2367 - DNA, 746 bp, unidentified
  source 1..746: mol_type = unassigned DNA; note = unclassified Picobirnavirus sequence
tctaattctatttttattcttagtgttcttctaccttattcaaggcgaaacacccaaactaattagattggtcaaatttacacgtagcacacttcgtttgagtgtgaatatgtgtagaatgatcaagctacagtaacacacaaacatccaaccaatgtcacaactaaggaggtgaatctctagtgacacacaatcagctactctactggcagaacgtagagacaaacagagctaacgtggctcgagagactgaaacgcatcgagcgaacgtcgcacaagagactgagactaatcggtctaacttagcacgagaagctgagacaaatcggtctaacttagcgcgcgaagcggaaacaaatcggcataacaaagtgtccgagcgtgagactgaaaggagtaaccggcagagagagtttctcacaacactgcagcgtcagcaggactggcagctggggctcttaaacgagcagtatcggcgtgacgccttagcggaaacgaaacgatcgaacaaggctaacgaagagctgaaccgactacgaacgtatattgatgagtcgatccggagcgaaacaaaccggattcagtcgttagcgaacactcaagctaactcgatacgtcaggcaactctatctgaaacagtaagatccaatcagaaacaagaagcgttatcagcacagcgcaacgctgaaagtgaacgcgctaacttagcgtctgagtcaattcgagaagcgcagaacgctatcgct

SEQ ID NO: 2368 - DNA, 746 bp, unidentified
  source 1..746: mol_type = unassigned DNA; note = unclassified Riboviria sequence
ccctgcacacgcgtacgattatttagatctatatctataatatagttacttttaaatgtgaatgtttcattgcaaatttgagagtgacaactcttaaacattgtgatgtaatttgcatattctaagaattatttagtatatatttatttattcgatatttgtgttcggtttgaagagccgtcaacattatatatttttctggaaattcgacacttttatgacttatggtagtaagttgaagatactgtttacagtactaccacgtgaccagcgatggtcttaaaatatatctctttttctacttatcagaatttttcttgaagaaaattcagatatgatgatcataatgattactcagatgcatggcttgccctgtctgttttaccgaatattgataaattattctaccctcatcgactatgaattttacaacgttgccgcttttattaggtaacctcttggttaggttagcgatttgaggatgaagaaattgattatttgaagatgtctttggtattttgatgtattattaacgaaaatgccaccaagcccacccgggtcgaaacggactattgtccttattagacacggggaaccgcagagtcaagggtgatgacactttgaaggagcttgctcctaggtggtcaccatacgtttggaatttattccttattaaaacttgtctcgttagttgaacttataaccctaaaacactcttgtttttggtttatttgttcactcggttc

SEQ ID NO: 2369 - DNA, 746 bp, unidentified
  source 1..746: mol_type = unassigned DNA; note = unclassified RNA viruses ShiM-2016 sequence
cttagagggaaatcctgattcatcactgaatcagttccgtgcaacattagttgattccgattaactagcgctgtgctgaacgttaatcgtcgtgtgatctggagagagttaaaatttagactctttggaactaaattctctcttgctgcgacgttatctaaggtaggtgtcctatttaggacaggtacctagggaggcagccccttccaaaaccttaaagagtctagcctgacaactactgagtcatagttgtgacaaagactaagttctttgaaggcgaaaatacctgacttggcaatcacaaaagaataaaccgatcagatccatcggaaggatctaatggttctttcaaatgtgatcgggaagccatccaaacccgtcctgccggtagtaataccaaaggaaaggtggaccttaaaatttcaaaggtgcttgaatcctatgctggttgcataagaatttggcatcagattaattttaaagggtgtttttctttttcagaaaaggcacagatcgcacactttagaaaagtgttcttagggattgagacgagtaagtacccaaaggtatttaaaggtctcctagccgatcgtttttcaattgaattgaatcaggatcgtccagaggtccctatctctggtcatagactattctatccatcttatgatcggaagctattccgatatttaagtggaatttcgaatggtcagagaccaaagacccaacttagactcttctgggactta

SEQ ID NO: 2370 - DNA, 747 bp, unidentified
  source 1..747: mol_type = unassigned DNA; note = unclassified RNA viruses ShiM-2016 sequence
actgcgtaggcaaaacctacgcagtttcttttgactcctctcagaggagagggatcaagtaagtcgatgtatcgcattgataaagggtgggctgacatgtaagtcgatgctgtcattacatgtccatcgctttgtttattagttttaagattttcttcgtctccaatttatttttcgaaatatcttcaacaagaaaaattattgttttaattgactgagttcttataagactatgagtttattgtgtatttctctcttatttgaaccctcgtattttatatagatgcattatgtgtatttggattgtctttcttgacgcttttgaaagggtacaggatatttactttctccagttctcgttggaaaggctctttgaatgattgatatatgctgtttcacattgtttcttgcatagtattgtagacataggctcggcacgcattggcacttccgtacagcaactactctacaacgaatatgtatagcgacaatgtaacgttaaccttggtgatgagttggtgataccctcttggttatgtttcagtatatgtttttctttttaaagatgtgtcccgaggccattctttggtttgatggattgatgaaaagaatacagacattttgttgacatttattatatgagcatattatacacacgacgatgtgaaagaacattgacaatatgaaagcatattgactacaggaaagactgttgacaataggaaagactatacatatgactttaca

SEQ ID NO: 2371 - DNA, 748 bp, unidentified
  source 1..748: mol_type = unassigned DNA; note = unclassified Totiviridae sequence
caaaagtggcgaggcttttgcccgggcacaccgactctacgattgggagttgggtgtgtccggtctctgcactctggactgctcgcaagtctaaacttaattttgggtaggatggcgaaagcgtgtagcctgaaatccgaaactaccctcatattacatctggattacgcaattgtgcacctgagagactataacatgtacccgaacgcgtaagaatactaaaaaccatgtgggagtggcatgtcatgcgaagcatctatcgttggccctctggttggacgtgtttgaagcggggcgagagtgggttagtccggtagggtttagatttcattttttggactggagagtcagtactcacccgaaacaaacatggaaaacttaacaatcaacacacaaagtagggacgcactagtcaacgaagtaagtgttgacttagaggatgagacatcaaggttagttatagatacacttggtgtaagtgtattatacgataaggttgacaccaataggaaaatactttatggaattgggatgattttggtggcgtgcggagcaatttttgggattatggctgggctcctatacgttcaacaccaggatctgacctcttatgcctctcatatggaaacaaaatggattggattgaataacaggataagggaatcggagtccttattagctacagtatgcaagtctgagttcggacagtcatctgtagtatgttcgcggaattcttcttcttttaata

SEQ ID NO: 2372 - DNA, 748 bp, unidentified
  source 1..748: mol_type = unassigned DNA; note = unclassified Tymovirales sequence
gccctgtagtcccttataatctagtaagtaggtaatttagctatagatatatgtttcttccttgtttgaacatgagtatatcagcagttattgacatagtaaataaatcacactttgtaccctgctacccctgcacacaactgccccccgtcattaacggagtaccgggatcagggaagagcacactcctcaaggaattgcttaatctgcataacgtccgcatctacacagccggcataccctacggatgatcccttaagactgaaggcgtactcccactgagtgagttcacaagccgagctaaccatctgtgcatcctcgacgagtaccaacttgccactgataaagaatttgagccattccaggtattggtgggcgaccccttccaaggagctacacaccgtagacctcacttcattgccaccaccagcttcagagtgcccaaagcaatctgcgaacacctcagaagcagagatttccagattgagagtgacaaagaaggtgatctaatcaagggatctccattcaccacagctgttgaaggagagttactgcacttgggccaagtcagcaaggaccttgcacactcacacaacgcttgctcgaaaggtcccacggaagttcaagggcttgaatttgacacagtgaccttgctttaccactcatctgaactatccaatagaatcggattctacgttgcctgcactagagcttgcaagagattgctgttgctctctgatgagcacgt

SEQ ID NO: 2373 - DNA, 750 bp, unidentified
  source 1..750: mol_type = unassigned DNA; note = unclassified Sopolycivirus sequence
atggactccctaccaccgcaactcaatttactaattggtacagtgagaactttgcttcttctgggatatctttccttgcaagtggcggcgcaaattgagtccctggcagtagcagtgtttcgtcctctgttacgccgagtcgggtacaacctgctagactcaatcaggactatgccagcttcgcacagtcatctcccgctaacaatcaaggatttgacccatggggagtgaaggactcgccaattattgatgatgacgaacgtgttcaatctaatttggaaactgagacagaaataccgaatgaagctgaggaagggttatcagagactgttgaggcagttggtgaggttacgactggagttgaggcagctgaggcgaccgctgcggtgtccactccttggaccttgctggctatagccaatcaacaactaggccaagcagttagtacagcacatgtgtcaggattgcaacagcaatcctcggcggattacacggccaatatgcagtctcacggcttgaatgtaggtcttaatgcagatcttattcgtgaacagcagagccagaccatttcgaggcagcaggcaggaggttctattgggtctttgcttgggccccttggaacgttgatcggacaggccattgccggatataactctgtgaaccaagaggatttgaaaacagccgcttctttcaacggctatgttaatccccaaatgagtaacatcgttgcttcgcagacaacatctggtg

SEQ ID NO: 2374 - DNA, 750 bp, unidentified
  source 1..750: mol_type = unassigned DNA; note = unclassified Picornavirales sequence
gaaatatgtatggagtgtcttctttaagacacttcatatgtatgagtaacgattaatttcggttacgacgacctaatggaaggcgtccctttgagaatcatggcgggatgtcaacccccgcgaagcgatagaatgagtcgcgtgattgaaatgagggagaataaaattcttcggtaggttgttgtaatctctatggtctgggaccatattctaagtttttactgcttttttaagaaaaagtttatcgagagcataactcgtgtgaaagcaacatggtgagtctaacatcagtagaaaaatgacaacccctcccctatatgttatgtaagtatatggcagtgtgccattaaaacaaaaataaaaatctgtatattttatatttcgacaaacagtttgtaagacgttagtcttcaaaaattaagaacgcccctgtgtttattcacttgtagacgcaaaattgtttgatctccattttgtcatcagatatgacaagaaaaagacaaagtgctcaacattagtacgtcttgtaatggttttcaccgtcagaaagatattagcaattcgattttccaacctctacgctcctaaaaggactacgttaaaaggaagacgatggtatgttacagctgcagttgcagccgaggacagcctggcaatctagtaagaacaagagagaaaatgatgagtaggttgtaaactcaactagcatatggtagagggcgaagatagctttaccaatccggggctcca

SEQ ID NO: 2375 - DNA, 751 bp, unidentified
  source 1..751: mol_type = unassigned DNA; note = unclassified dsRNA viruses sequence
ctgaccagttgtttctccactccggactgcgatctagtcattaagtcctttcacaagccgccgaatcaagtattaggggagctggtgactgggttgactcagggtgcagtgtgccttgcctggtgagatggacacacaagatgtgaccgccactatagggtccatgaggagttaaatcgatttggtgaacccgtgctaaggttcaccgaccttttaattcaggggatgccgaagggtgaaacttggttactatctgtcttgagtggctgcataaccgcatcaagcgagaaactattcaatgggtagatagttttagcatttggattaaccactaaatgcttatgggccggcaaccggaactgccacattagtatcatccttcgggatgggcgcgttggataccgcgcttgaaatggaaacactgcgctcacattagaggtgagcaactacagtcaagctgggtttttagccaattctcggacactgtagtgggagaccacggtggttaagcatcttcggatgcgttcgtgtggataacctgaatggcatcagggtgtgatcaagtctgagcttcctctttgagatgctttaaccttactcaggggacttgtgagctaacgtaggcgagtatagagtagatgcaaactcgtcgaacgtgctttttggttttagaacaccaaggagtggagagactacacccatacgaattcgggaaaccgagttaacgaatagtccagcccaaagggagcct

SEQ ID NO: 2376 - DNA, 751 bp, unidentified
  source 1..751: mol_type = unassigned DNA; note = unclassified Picornavirales sequence
gattcaatctaatacagccaaacagaccaatcagaccaatcttgattttcagaaaagtttaattgataggggagaaaaatcatttacagataaaggattaccgtcttttctttattgggggggatcaagcgcacaaactccaaattctttaatacagttaggaggacaaaatttctatgaacaatccggtgttaattcgaatctcccatattttacaggaactccatacgctcagtggaaccatgttggcacacctaagatccagcaacaaaaaccttcaccctctagctctcaggcacatgcaggagtgtcagctcagtctggaaagtctccagcctttgtatcttcaactagttcaggaagcgtatcttccggagggacagttagtatcaatgttggaaagcataatttcagcggtcagacagatacgacaggacttggaaatggccgttactctgcagttcctccaccaaccttaacgtacaatagcgttggaatccagaatgctgcaaggactcatgattttgccacgcaatctaatccatctgtgagaagtgcctcccaacagacttgggcccggtttgactcttcaaagtccactcaaacaagtttaacgggctcccagtttatggtcgacaaaggtacccaagccaatcctttcaggtactatgccaaccgttgagttcctaggcaatgccgtcactcacgctaatgcacacaaaatcgagttcttatacgataacgcagaaat

SEQ ID NO: 2377 - DNA, 753 bp, unidentified
  source 1..753: mol_type = unassigned DNA; note = unclassified Marburgvirus sequence
cccggatactacagcacgattacccacccatccacttcgatatgattcaccctcagatcacagcaatcaaccctatttgaatatccaaaccactatttagtatcctattacttgtcactattgtgtgagacaacataagctatcaaataacaatcacgggcaagaactgggcatacgatggtgatttgagagtattgttcagtgctacaaattcttttttcaattgctataatgatacaactacaaatctccgtacacttgccgcaatactgtaattaacactgctgtatctcttcctcaagccatctgatttaactcaataaacatgacttgattcagagaatatgctgaaaatgttattgattgaacttctcaaatggtgcactatcctactgttttactcaacttggtatattgtaacatatcagcggactctccacttttcttcttgtatattctctataagtcatttacttgatagaatgtcaagtctactggttcagagtctcctcactccaatgaatgtaataattaactgttagcttagatgacaacagttatgaggttatataattactcatggtgtaaaatgtaattcttacctctatttcttctgttttccctctcctttataatatgccaattaagaaaaactaaaaatcgaagaatattaaagattttctttaatattcagaaaaggttttttattctcttctttctttttacaaatatattaaaataataattctcaca

SEQ ID NO: 2378 - DNA, 753 bp, unidentified
  source 1..753: mol_type = unassigned DNA; note = White ash mosaic virus replicase, 27 kDa protein, 11 kDa protein,1 sequence
cccatatctttctgcttattacgacccccaaacccttccttttggattgtacctcatcctgcaaaattcttgtttggttccatatggactttcactaccagatcctttcgatgttccccgcttatttacatatatatcttcaggacgattctgaatatgaacggattttcccttttgctcgactacctgatcgttgcttcaataaattatttatgtatagcacatttgtacaaaattttcttgcagacggagactgggcgaacttgttcttcggcgattttgctgttgctcacagcactagtgaccgaggttatatacatgacattgacaagtacgtccacttttcgtatgataatgaccgctttgctaatactttcccactatttcagcgcactgattatctggattatttatttcatgaaccagttccttataatgtacgaaaactcagaggatggtattgtagtgttcgaaacctatcacatcattttcaggaacatgtcgcacgccatcttagtttggaatggcttgcaattataaaattactaaactctccattacccgtatctttaccgccactgttggcgcttcagatgaacaagtttattgtttatttggagcaaagacagattaaagaaatttgggcacttctgggtatcccccgttttgagtgtgtttatttcggcccgggattttagctccttacgaggaagcttgccgtaaaacttaaatcttattttaaaacacttcaaa

SEQ ID NO: 2379 - DNA, 753 bp, unidentified
  source 1..753: mol_type = unassigned DNA; note = unclassified Picornavirales sequence
ggagtgctcaaaatagcagattggtgtgtacgaggcttgtcaacacttgctgcaattgtgtcaatagcaggctctgtgtatttaatctatcgcctctttgctaaagatcaaggtccatattcgggtgcgccgcagagaggtctgaaagccccagttccccgtgtggtgaaagctcagggaccagattatgacttcgccatatctttacagaagcggagtctcttccctgtgacatgcttgaatggtccattcactgctcttggattaaaaggaaagtggattctcctacctcgccactgcaaagtgggggaaaccctggatctagccggaacagaatacaaagtgctagacaatgcagagctagaatgtaatgagggaaagcttgaattgaggtgtgtgaagattgatcgtcctgtggatttccccaacattttgaaaagaataccaaagaaatttgaagaacgccaggattgtgttttgtgtgtgaattctgaaaagtttccagggttgacctgcccagttggcaaaatccaaaattggggtaagttgtgcttgtctggtaatgtgacatgtcgcaccttaaagtacaactacccaactagatcaggccagtgtgggggtgtggtcactaaatgtggtgaaattctgggtgtacacattggtggtgatggacagaatgggtatgctacagctttgtatcaacattattttgatgccctagatgatgctatagagcagggccatatagtggag

SEQ ID NO: 2380 - DNA, 754 bp, unidentified
  source 1..754: mol_type = unassigned DNA; note = unclassified ssRNA negative-strand viruses sequence
aaatatctattagtatacatactctatagcctagaaaaaacaatgatcaagaatccttcagtcatcatgtcagagtcagaatggtcatcggaagattcttcatctcttcacacttcctcaactcaatgtgatctaagcccacttcaaaatcaatttttagctatgtctgcaaaaatacagaataacatagatagaattaataatagacctagatttacgcctctgaattctcaggtaatcagaaagtgtttcaacgtaaaactttctagtggtgagcttgaacaggggttaaaggatgacggagaggaatggatgttttactcagcacaagacacagtatcaaagtccattccggtgtatactagaggaaagatctttcctccacttttaaaaggatctattgtcaaaattaaaacagtcgaagtccctgtctcttctgagaaggaacatccctataaaactaaattgaaccctatatcggagcaataacctctacattgatcttccagattgataacaggtgagctctaatggggaaacatgtaacctccgcattgatcagttacctgcttcacatacctgtgcgcctttaacattaaccaaattgcttttctactcctttaattaaaataatttagattttgaaaaactgtaaagcttaaaactcactaaatagaaatctcaatgagatcttaatctgtttatctcaattgatcttctcctgtttttactgccccaatccacatcccctgcc

SEQ ID NO: 2381 - DNA, 756 bp, Parechovirus B
  source 1..756: mol_type = genomic DNA
tttgaaagggggcccctgcagctcatcagctgcagggtcccccggtggactgggtacacttctcgcccccttctggggtgggggtgtggctcagttaaccaccactgggtggctaccagttttcatagaatagccaatcccgtaacatttgccacctaagcatagtttaacctcctacaattggtcgaagccgcttggaataagactgattgtatactgtgagcctgagtattctcttctgtcttccggttgctctacaaccggataagggctgtacctgggcggtcctactcttcacaggagtctgcataggtggctttcacctctggacaatgcactccacacccactcccacactcaagttagtataagttgtgcatgtgaaatgttgtgaacgcgttgggtaggtgtagcgactacaagtgtgccagcggatttcccctggtggtaacaccagcctctgggcccaaaaggcatgtctctgaccgcacttgtacacaatcccagtgatgcccaccgttagtagtgatctagtaatctgcacttctcaactagcaaaccgtgtgcttggaggtgtaggtatggcaggctgaaggatgccctgaaggtacccgcaggtaacgttaagacactgtggatctgatcaggggcccaccggctctccgggtagaagtcttcggaccttgggttaaaaaacgtctaggcctgtcccccagagggatctggggtttcccttataaccccaatactgacaat

SEQ ID NO: 2382 - DNA, 756 bp, unidentified
  source 1..756: mol_type = unassigned DNA; note = unclassified Picornavirales sequence
attaataatacgtatttctttatttgccgtatcctgtacgatactcaggccatgggatggttttcccacaaaaacaatacacaaagttccttaacattcttttgattattttgattctatataacagcttacgtagtactatgtaagtgagctgttattgatttataatttgatttttaaggttgtgcattgacctgagtatagtctaactatacgcaaataatgtgttcatattaaagttggtctttaattagattctaacatcgaatgctttcactttcagatatgaagtctatatgatttatcacacacgttgttatgggtttagcttacgaagtgtgtagagtagtgagattgactattcagtagatcaatcagagcctttacacatgaggtgttttccctattagtagatgtggtcttgaatatatatttcccatcatttccggattttcattaatcggtaggagacaagaaaagacaggttgtgacacctatgagagaacgaacttatgaatcttaatgttagataagtaagttgtcagaagtggacgtaatacaagtcgtatacttatagctgttacctccccctgttaaagatctgatccgtgatcagatttccacattatgtggcgcttagaattatattggcgtgtaattcaagtgacttgtttagtccccgcatatgttaatcttgagagcgtgagaatataattgataaaatacaaaattcaaaaatatttcagatttgacaag

SEQ ID NO: 2383 - DNA, 756 bp, unidentified
  source 1..756: mol_type = unassigned DNA; note = unclassified RNA viruses ShiM-2016 sequence
tccgatctatgggtcatgcccatgggtctcattttaacggtcggagcaaccgatagataagctctactacgttcatatcagagatactcgcatctagtttttgctacgtgtcagttttctcgaagtatggatctagtaacttatcagctccaaacaccaaacacaccaaacatcaatcataaatcatttaatcgtgagattttactaagtataaatgtccagtagttctactatacggctgtggtggtacgtggttggcgcttaactgtaacaggttcagtaggccacgtgctgctcattacgcactccagcggaaacaatggttaaattgtatagttagagcaaaagatcttagtaaaattggtgatgcaagtctttcattatgttccgggtagcgaacttgataatttgatttagttcggattaccgagttggaccgagttcattgatggaagcaaccgcattggttatattgcgcaagcgaggcatattgtgatttactttctttggtagtactattcttaggatcaagtatcgagagatactcctttggacaactggaaccccgagaagtaaagttgatcaatatcgttttgcaagtgtatgagaccaatgtatgtgttttgacagtttgccgaaactgtccgtcagttataataatggtagtaagaggttgcacgagacgtaaaccttggctacaccctttgactcctttgtaggtgaaaaggagggttttattcattttaaacttaaacc

SEQ ID NO: 2384 - DNA, 757 bp, unidentified
  source 1..757: mol_type = unassigned DNA; note = unclassified RNA viruses ShiM-2016 sequence
ctggggggctaaccacctcccattttgatctgcctcttccctgttggtcagatatgaactttttagtcatatctgaaccggaatgcagttttcgtaaaatgtaacgtttaagtgtctttgtatcgttttgtaaatcaaagtcttaatcaatgttaacttagtattttcagtagaaattacgcgatttttgtcaattagtaagaattctataggcgtagccttagaccttattatggcaatttggacagtgttctaccagtcaatactagagttcttagtattagaactataaaataatactatctcttggaagcagagattgaaaataattccaccccttaggcacctgagacccaattcttaggaatccaccgtataggatttaaaataagatactgaagttaatggaagcgacaagcttgcccgagaggtaacctcgctaaacgaccctataaggattcgacccctttatagtacgatttttgccgctatgggacgatcaccggccccgttacttaataccttctatctttcattgttcacaatcttagtttagtcgatcttaaatgtgacgaactatttatattgatacgcagggtaccctctgattgaatctcaccttagtttaagttaagaggactacgcgtaaccagaccgccaatgctggatgcctatcaatacctaattttgtgatcatgtttgaggggaggatctgtgacaactgccaatttgatcataagtggcctcaatatagatc

SEQ ID NO: 2385 - DNA, 759 bp, unidentified
  source 1..759: mol_type = unassigned DNA; note = unclassified Picornavirales sequence
ggagattgcaaatacggtgtatgcagatgtaaataaatagctgcatggtaaattgcatacatgacagggcgtctccaggaaacgtagctttttagctttactactcagggccgtttgtccagagaaatgcggctcttactttccttatgaagctaaggttgtgagtattttgcttcgctaacacagataactttacagttgaggcacaagcgtgccgtgaatggaccgctagagtccttgccgctaatcttacttattatagattgcgacgtgagctttttgaacagttcaacgatttagtttttgatgaagaccagagtcaacctttggttaatgttaacgaggaagtgttcatagtagttagacagtttttgacttcacgtaatgatgccattaatgatgataagcgcttgtcttttgacaaggctatttttgagttgaggcgcgcttgcgcaaaggctttaaagtctacaccaccttccacaccttctgagggtgtttcgagtcacgtctctccatgatgtccagagaaatgccgctcgccatttgagtgtgagaccattcagtggcgtataatgtctcgcttcttctaaaaataattctaacgagggaaacctccgtgacgccgacgttaagtgcgacgaaataaattctttggcaattactaattcgccagagacgactggagtgacttcatttgtacaggaggctgtagaatgtcaggatatcattccagaggctgttaaccttggcacttta

SEQ ID NO: 2386 - DNA, 760 bp, unidentified
  source 1..760: mol_type = unassigned DNA; note = unclassified Picornavirales sequence
gtggtgggtgttcccaccacggtttctaagttttcaatttgaacatttgtttattacattatataagtagtgttgttacgacaacacgctatatttttgtaaggaccatttgtttgaatcttttcttagttatttttcctttgtttacgtttttctgtgttagtgtgtttgtgtttgtttagagcttgtattcactccctttctatgtagtgacaagccaaaaatctactatataaaatacctttcatcaagttagtttcaaatgaattccggtttacggttataggatagttgatatattgtgttattgcaatgagttcgtgaaaaccccttaacagggctaggaagaatggacccccgcttaacgggataagttgtcttctcgttctctctttaagtttgttaatctcactttattatcgctatcacaacttcacgaatagaaagtttcagttgtaggctagatacggaggactcagatatggtgtttgtagaagttcacttggtaattcttgtggatggagactcttcgtgaggtcgccctctatcgctgtctgatgaggttgctagtaacactggaccgagtattgtgtgtcgaagccaatttacgaagtagtttctcggcttttatgaaactatccaggacatgaatcgacagttgctcctatcctgagtatcgatcgatactgaatgagtactgaaggttgaccatttagtttatgatttattgattaagatttaagatttaaagcgatttaaa

SEQ ID NO: 2387 - DNA, 760 bp, unidentified
  source 1..760: mol_type = unassigned DNA; note = unclassified RNA viruses ShiM-2016 sequence
gcgggattttctcccgcactcttatttcaccgacgttaatcatagcccttgctatcatcaactttgagtgatatatgttcctattggtagttgtatactatacggtatacccgtttggctgcaattacaatagtgcaagatctatgattgttagccagtagggtgatatctgatcccacaattatcaatacttaatagactttgattcttccagtctataaaattagaatcaacaaacccaaattttatgtagtaatgttttgttttgtcttacaacttataccttgagtttataaaacacacctttgctcgttattataaaaatattattatttatgagaataaaatgtgaaataggttgttctgcaaccacctggttgggctattaccacgcccctgacttaccagtgtttcagtatggagaagcccgggcgatttgccaaagggttatttgtattgaatatcacattaaaattagtacatttgtttaatatatgaaattattggtatcttcgtttagttcccaatagacacttttaagtgagtcgtgcagacgttcgtttttcggagtcaacttgacccaataattttaatatattaaattcgagaagatcaatgctaatttgatgtgagtttcgagaggattgagcacccttgagaaaggttttacatttgaagcttataatgcgatggtaattttatcgatagcagctaaacttcgactttatatgttttaaaaaacttacctttaatcaatgat

SEQ ID NO: 2388 - DNA, 761 bp, unidentified
  source 1..761: mol_type = unassigned DNA; note = unclassified RNA viruses ShiM-2016 sequence
ataaaatgcatgtataatttttattcatatttatatttatgttatgtaacatatatgcttatgaaccgagtaaaatcggtcacggcgtcactatggtaaaataatatatatatagaaaactttttcacgtacatgcgaacaaaaagatttatagtttttcatatagggttgacaaccccatatgtgatggagttttcacaaaactccatatgtttgatgacaaaataataattatttgatgcagtttattaaaagatctaagattgaattgtgattctattttaaactttatatggactaacacggatacgagatttatctcgaaggtatctctggacatcgtataaaacggagagtagaatcttctgataaggactactggcctcaatacaatgtatcacgagcgttgtattgttgtatctcaaccatcacaccactactagtgactagtagagtagtaaaacagtttcgactgaaggctgtgatttttcttttgtggcgcgggtttatacactcgtaaaacaggcttgtttcttttggaagcaaatgggccatcccatgttatgtcataccagagtaggctaacgtacggtgcttgcacactactagctaataccatcggatcttgtatttaagtacctgaggattgagtgtcgttggaaacgatacgagctcaatcataacagactagtaaatatttgatgcctgtattagcataccgaaagcgtaaccaaatgaccaatcatggatcaatgtgaaat

SEQ ID NO: 2389 - DNA, 762 bp, unidentified
  source 1..762: mol_type = unassigned DNA; note = Pythium polare RNA virus 1 PpRV1-OPU1176 genomic RNA, complete1 sequence
ggattttaaagggggtaagacacctttaaaattcgtccgatttgcgcttgtgccgtggtttgatccgatacgttcgtctctccgcttgccgctgccagtctggaaccacggtccggaaagcatgccttctctggaatccaccgctgaggtcctctggttacaaatcggtcggcaggttcgcctgtcagcgtcgtcgaatgagcgaagttgacgcttgcgatctactctgacacccgtaccaccggtacggacgttatgaccctcgtcccgcccgtaaggttctacgttatgagccagttaacggtcttcgccgaaccgtgtacaaatgaggccccggactatccgcctatcggatatgccaaggtgaaagaacctgacaacagagagagagctgtgaccgctgggagagaccgctgacggcagtagatctgcaagcgctaaacggaatccggaccggggcgtgacacttggcaaagctggggagttttcgacgagcttcctattgcaaccttgtggatcgaacagtgttcttagttttccaattaagtgcgattaggattggcccgaggggcgaatgcaccgtatgaaggatacgcgttgggcgtgtattactgtatgggaagaagcagattatggattctctgtgttcgtctaagaaacttggtaactggtcagtcctagcgaggcaagggagtggtggtttagtcgatgagccacctgtgggtaactggaccccttgcgttaccgtcgcattgaaggtga

SEQ ID NO: 2390 - DNA, 763 bp, Sclerotimonavirus illinoisense
  source 1..763: mol_type = genomic DNA
ctgctgtcgtagatcgagatggacctctgaagagtggcatgccgaggatgttttactccatcttccggctcagctcaggtgcctcgctcaacccgcttttgatcatcactcgatttgcccgaaagtatccgcagttctatgcggagtttcccgatctcgagaccgagtttcacgccgctgcgcatgcgcttgctcggttctacgacgttaacgagaagcgtcggatgtatctgaaggtaatcttcggaagtgattacgtccctgtgcctcgaactgatgtcgactctcttttgggagttgctgtcttcaccttgcagcaaaccgagcgttctctgcaaaactacaacggcggcaccctcagtgtagctcatcgagagaaacttctctcactcctcaatgtttccgccgcaaaggaggaagacgtcccggagtcctaagtctccttctagtctcgcactgtactgtcattggtgattaaataaaacttaggagagaatcaattcgacgtcgatacgatgctttacgataagtttctgacatatgtcatctccgtcgagctactagcgaatctctgcgagagagctggtatcgaagaatccggaccgaagaaagaagatgttccatctcgatgcgtcttgccgattccttccgtgcctatcgagcatgatgatcgagagagagcaaagttggttgagctaactacctcttcgtcagagcgtctgtaacgcaaatataataaaacttaggagacaaataaatcacc

SEQ ID NO: 2391 - DNA, 764 bp, unidentified
  source 1..764: mol_type = unassigned DNA; note = Ipomoea aquatica botybirnavirus strain pt078-rha-1-newwen-plant _78,1 sequence
agatgtgtataagagacagagtcccaacccgttccaccgaaggtaggcacaaaaggtgggtgttaccacaccaccggcccctctcagcactagctccatcactggatttgtcgtgtctgctagaccagctccatagcagatggtttgcttattatcccgcattccgcggctggcaataaaaggcgaagcctgtgctttggcttttattgcaagccgcggaatgcgggataataagcaaaccatctgctatggagctggtctagcagacacgacaaatccagtgatggagctagtactgagaggggccggtggtgtggtaacacccaccttttgtgcctaccttcggtggaacgggttgggaattccgtaaggaccccagtaatgtccgtgcgacggggaaaagctacaacagcctgcctgtaacctgtaagggccaagggactacccagagtgtaacgactgcgaatcgtttactcagtatctaggaacagtctacttcccacaactcaattgagtttctggtcgtcgaaagccagagttaaaactgtgggcggtgttcgaccttcacaatcttagtaaccccgatttttgcgatagatcaacttttgaatatcgcccggcagagtgagttaatccaacagccacccatctacataaacaacaaaatatcggaaacacaccagcaccctcgaaactaggcagagcgatttaatccaacagccgcacgctaactattaaaacaacaaaacataccatctgtcaac

SEQ ID NO: 2392 - DNA, 768 bp, unidentified
  source 1..768: mol_type = unassigned DNA; note = unclassified Sopolycivirus sequence
gttgggataagctccaattctagtttaacccgggatgtgcttttgttgcccgaagattcaatttggtgagccgtaagtcagcccagacaagcgcagtaaccaatgcgaatgaagttctccttgagcgaccgagaaggcgcgcaggtgaagatgtatcacttagtaggggaggttattaaacgaatctgaaaagtagttttaatgaagttgtacttactattgccccacggattgaacggaaagaaaccgtcatacccagtgctgcaggaacagttactagacctttaaaagtaggcgggccaagttactgcagaatagttaattcaacggatttaagatgaaaagtaagaggcagtgaacaccgaagcgaaacgtaaacgagataaaatgaggccagatgcccaagtcgtaagctccaccacaacccagtggaatggagtaaagctcagaagggttctcggatacattagacattagtcgagagtctccctaccgcacttggggaggtaacaaactcttagcctgtgacgttggattgagagcaacataggttataaattaggaaacgctttcaaaattgctctgggcaggattttcaaatcagaacttcctgctttaaataaaagtgcacaaataagtctatatattttatgtcagaagattttgataaggagattttgctatttacaattaaagcttctatagttgttttacttgtttatatttcagctttatctttgatttgtataattgaaaaccgaatttaca

SEQ ID NO: 2393 - DNA, 768 bp, unidentified
  source 1..768: mol_type = unassigned DNA; note = Dicistroviridae sp. isolate fcc172dic1 genomic sequence.1 sequence
acttataatatcttacgggcctacgtggcctacgctagtacaatgtagtatagcagggacttaaaggtcctttcaaaaccaatataggctcggaaatccgaagtacaccctataccagcatttacgcaggattgcgtaaaggtcaatgaaattaacaataagtatatcgtatacaagagattgtatccacaaaaaaggagccgtaattcctaatgagcagcatatagcgcggtgtgacgcggtgtgcgaagggattataggttcttttttgtggatacaatctcttgtatacgatatacttattgttaatttcattgacctttacgcaatcctgcgtaaatgctggtatagggtgtacttcggatttccgagcctatattggttttgaaaggacctttaagtccctgctatactacattgtactagcgtaggccacgtaggcccgtaagatattataagtattttattatattttattcaccccccacattaaccccagttaaagctttataactataagtaagccgtgccgaaacgttaatcggtcgctagttgcgtaacaactattagtttaattttccaaaatttatttttcacaattcttagttaagattttagcttgccttaagcagtctttatatcttctgtatattattttaaagtttataggagcaaagttcgctttactcgctatagctattttatttattttaggaatattatcacctcgtaattatttaattataacattagctttatctatttata

SEQ ID NO: 2394 - DNA, 768 bp, unidentified
  source 1..768: mol_type = unassigned DNA; note = unclassified RNA viruses ShiM-2016 sequence
cggcataccaacgcacgcccaatgtttgaccctcaagctctggcatttagtctgtttatcttggttaatactcttcggaggggtacaagttcgctgcggctgaaagcgggaagctctgtccttatggggccgaacccttgtcgttatgggggggaacctatgtccttatgtggggaagccttgtccttatggggccgctcttacgagagtgtatctttttgtttttagttttaagtctgcttttagcacttaggtcgtagaaagctagattggcctaagtccttctttctctcttttactattttcctttctttctttctcttatgtagtggtgatctaccttcttcacccgtggataaatacacgttaaactttgagattccattctttcaacttgatgttttgtcatgttcctttagtacgttcggagggtaaaacctctttcgcggaacgagattatgtcatgatgagattgattgttgtctgtttagaatgatgtctgacatactgctgtcagtttgatgaggagttctcataacctctaggcgacttgagattcgcccttgttcattgcaatttgctagtacgtatacgtggttggtctgatcatttgcgcagttcccgtgacaggaactgtgtgtatgtgttcagatgtggagactaaatccaactgctattaggttacgtatcagctcgtcacaattgcttcgttcaagtttgctcgtggggtagtgctatgacccacctgttttgctctcacaacattcg

SEQ ID NO: 2395 - DNA, 768 bp, unidentified
  source 1..768: mol_type = unassigned DNA; note = unclassified RNA viruses ShiM-2016 sequence
tatgcctaacggcataccatacagtgtagaggaattttgatatcggcatctctatagaacaagactgcaagccagaaacatgactatagacttaaccgagaagttttcaatttacacaaccccctgggatcaaaccctcttgtctgtccagactttaaatggactcgcctttccaattaggccagacttttgcttttatcgaagtaactatatagatactagcaaaggaaagcggcgtattgtattaacacgaaacgttgtgctgtgttttgtcgaaacaccataataaatcaacaaagacgacctatcgctaacgaataatggacgaagaattcggacttatttactatgacgattaagcgggcgtatatgtttggtattacttaacggttttatcgaccatgttacccgtagttataggaatagacgttttggacttcacctaggatagccctgaccggcttacccgacggattgaacgagacggctatttctatgagcctttagattgacaaacgtgcaagtttttgtcgcatcatattgcgcgctttgcgattttcagtaatggagaaagcaaggacttcgacctgacccgttccacggtacataatctggttatatatattagaacgttagacatgtattatgctaatatatatttcccgggcctgaaaaccctaaagaaccctaaggacgacgatggcaatcgatgagtgatatgacgaggaccgcttcggaggcggacttgtattggcggacgcgttagaa

SEQ ID NO: 2396 - DNA, 769 bp, unidentified
  source 1..769: mol_type = unassigned DNA; note = unclassified RNA viruses ShiM-2016 sequence
tatatgattaaaatcgtatttatttattatttagttgttcctttataatttgcagtagtgcttacgttagcactttgcaattttattttggaacattaaatttataagtatttacttttctagtcttatagctctgtttgtgtacctggatgtgggaatacattccaaacaatttcaagggtttttttgaatatcaaaaaccctaatcgagtatcgccgtcaagtcttagcagttttatcgctaaggttactcgttccctcccttttggaggagctctacggtttgacggtcttaatttgtccattttccatttggattttattaagaccttttttgttttagtacactttttctagttttattgttttgctttgcctcttttccattgaggttttagcttgatgatttaatttttcttccctactatttcttttctctttttctacctattctatctctacttctctattgtttagaagacgttgccttttctattgaaaattctttattgcgctcttaaatgacctttatttgaatttaatacatagattttggttttcttattctttccgcaattgtccgcaccttatatgtggggttggttggttttccagaaaccagcgctgtacgagatatctttctcccaattagtgggagtttcaacagcttaagctcgccaaaactattttttacgacggagttcgtactaccctggttttgaaatgaaagtggtggaaaacagccgaaaggcacagggggagaggagtc

SEQ ID NO: 2397 - DNA, 772 bp, unidentified
  source 1..772: mol_type = unassigned DNA; note = unclassified Polerovirus sequence
atgggcaagcggcaccgtccgccaaaacaaacggcaactccgacatccccgacgccgctacaagcgcaccaccaatggacagaatggtcgaacagatcatcacggctatggtggggagaatcaatctctcggagatagaggagaagatagtgagcagggtgtctcagaaagccctgcagaagcccaaacaaaagaagcgcggaaggcgtggagggaagaacaagcaaaacagttcacctcctacttcaacgcaatctacaagtggggcgcccaagaaggaggctgccccccaggcttcaggaagtgtgggcacatcccgcgctactaccacccccgcaccagaggcgaaacccagtgggggcaaaaactctgccaagttcatcccgagctggcggagaaaacagcaggattcggctggccaaaagcaggatctgaagctgaactccaaagcctgaatctacaggctgccaggtggctccaacgcgcggagtcggccactatccctggcgcagaagcaagaaagcgcgtgattgagaaaacagtggaggcatacagaaattgtgtaactaacgccccactgtgctcccttaaatccaaactggattgggctggctttcaacaagatatccgtgaagcagtccagtcccttgagctagacgctggtgtaggcattccctatatcgcgtatggcctccccacacaccgaggatgggttgaggaccataagcttctcccagcgctcactcagctgacctttgaccgactacagaag

SEQ ID NO: 2398 - DNA, 773 bp, Tropivirus A
  source 1..773: mol_type = genomic DNA
ggggaaaaccccctacaacttttttcgcgcagttattggaatctgcgtaggcaataacatcgatgtcgctactctgtgcttcggtgcagagcggcctatgtcgcatgttgccaacatcaaaattctgggagagtcgcgaactccttaacactgccttgcctcgacggagccgttgttatagtgtcgacgggatacaaacattaaactaaacccacttgcctcgacggaaccccttaccttttattttattttatagtatgaaagtgaatcttgtatgaatgttcatagaaaactgcaaatgagtaccacgtctaacatgagagaatgatactggagaaatccaagtttagaagtcactacgaatcccagcggaaacaagggaattctgagcttctaataggcgtttaagactatttgcaaaattctggtgcgtaagtgatattttcattgcgtagaacgctggtaaccactccggctagtataagcattgttagtcacttattatgaaactccacactatcctttctggagaagcacacaaacttacatggtaaagctagaccattatcttaagcggtgagtacactgcaaccttgtaacaatgcttgtatgactactttttgtatatcttgagcaatattgttgaggtggacatgtccaaaggtaatgttgttgggaatggaggggtccattttcccgtgcacgtagtgtactagtattgggtgatagccttgcggcggatcaaccatgtattttaatccgttgactttcac

SEQ ID NO: 2399 - DNA, 774 bp, unidentified
  source 1..774: mol_type = unassigned DNA; note = unclassified Potexvirus sequence
gaagaatcagagaccggttctgcccaaaacatatcctcatcaattgcgaaaagaccccaacacaaatctctgactttgtcaaagctcagtgggacttctctgactttgcatacgccaacgacttcacggcctttgaccaaagtcaggatggagccatgctccagtttgagatcatcaaagcaaagtttcacaacattccagaggatataattttaggctacatggacatcaagacaaatgcaaaaatcttcttaggaaccctggccatcatgaggctcacaggcgaaggacccaccttcgacgccaacaccgaatgcaacatcgcgtacacacacttacgattcaacgtgccggaaaatgttgcacaagtgtacgctggagatgattccgccctctcaaaggtctgccctgaaaaagactccttcaagcaattcgcggaccgactcaccctaaaatccaaaccccaggtgttcccgcaaacacagggcgcctgggctgagttttgcgggcttctaatcacaccaagaggaatcataaaggaccccgtgaagctgcacgcctcctgggtgctggcaaccaaacttggcacactgcaacaaatcaaatgcgttaactcgtacggtgaagacctcaagctttcttacgaccttggtgaccatctacaggagctcctctcggagtcccagtgcagaacccaccaagtcaccgttagggagctggttaagttcgctggaaaagtcgaaaagcatcaagcagagatcagatcagtggcca

SEQ ID NO: 2400 - DNA, 775 bp, unidentified
  source 1..775: mol_type = unassigned DNA; note = unclassified RNA viruses ShiM-2016 sequence
gtgaggatgaacctcacatgattcttttatggctcgttgatgagcaatggtttaattaccatttttcaaatgatgcgagttcgcgtgctaatgattagcagtggttttattaccattgccttaatataatttagcataggcggttttgttaccgcttcattatttcatatcaattcattttgtataactttgtgtgtattttctttttgttttaattttgttatgaacgggcttacgctttagccaagctatacgctacggcagtacggtctaatgactagagagactgctagaatttcaattttgaaacaggatgattgtactttcagccaatgatttaaactttttgataaaaagtgcgttacgttaagttgcaaatggtgtctgattcagactttggttggtcggcagaattcttacgaccttaatgcggcacattagctccattgcgggagtttaggccacaatttattgtgtagtgtctatgtaacaagacggtgtgagagatctttgatcgtggctctttgataaaaggcgttttttgcgaggcgtataagatttggattataggagataccaataaaatcataaaaatcggtgggtatcactttaagtagcgagaaagacatgccttcccaaaggcttagtttagggtgctgcttacactcgcaagtgtatttgcattatcttgtggatatttaagtggacttaagtattcgtgggaacaagataatggcttgtactacctcggtaagtttccgatgacgcgacgacg

SEQ ID NO: 2401 - DNA, 776 bp, unidentified
  source 1..776: mol_type = unassigned DNA; note = unclassified Picornavirales sequence
atttggtagcccaaatatatatagtttattatctaaatgctttgtgcaatatagcacggcatccgatctattatggttgtgtcaatatttgacgctcactatttgttattacaatggaattgaccggattttccggcactattgtatatcaaatatgagtagagacaatgagacacttcgactgtattagtcgatgttagagagtttgagctctagtatttagatttaatctatagcatagattatttctgatggccctgattcgtggcattaataaaattaccaatcgccccccctgcatattacaagaaagtaaatcagtttttaactggcattattaaatcgtgtatccttttggaataaatccgtacaaataatgtttttacacaaaataacagaaaaatagataaaagtgtccaaacaaaaacatatacatatatatatacatttgacacagaacacacaatttttgtgtaggtttatggaatagttttcactgtcgaaagctattagcaaacatcgcaaacgcctctccaaatcgaatcacttatgtggtgtctgaagatttgacgcgaatcgtaaagatgtggtatagtacagtaacagttgttaccgaggctagcctagcaagttagtagaccataaactaaccttcttttgttacagcatcatgtaagagtcaagatgcagatttctatatctttaaatagaatatctctatactgggagaaaactacgtcaccaaaatccagatacaacagacaatttacacgata

SEQ ID NO: 2402 - DNA, 777 bp, unidentified
  source 1..777: mol_type = unassigned DNA; note = unclassified Iflaviridae sequence
tttaaatctagtgcataacatcgcactagttatattttggagataagtaccataatatatttaaagtttgcattgctttcaatcgtgaaacattccttcagaattatttcatgctattaaccgatgagccgtgagtaagccctacaagcgcagtaaaaggtttttagaaagagttttcctttagtaaaaaggagacggtacgattataaaataataccttccgcatttattagcaatgccgaggtggagaagtaaagtggaaagttaatttgatactagtaataatgaaaaaaataattatgtaaaagtgggaatgaggctaaagattgccaataccccatgatcattcgcccagctaggcatgtaccgagctattagaaagaataattataataaataaatattagaagatgattaataagtactaatgaacgcccatggaagacccttttaaagggagatatattatcgatcatttagttaactcaaaaataagcggtttggaggactttaagcctataactcctagagcatctatttgtggaaagtgcagtgcgcatataattatatccgttgtattatttaaacagtcccattacatcgtgctggtgtgggatagcagctggtaattgatatttgatcctaatgaacttggtattttatttggactacttttcaaaacattgggcaggaattttaaatcaaaaactcctgctttaaaatcagcacaaacaaataaataaatacttaaaactttagaacatttcaattttaaat

SEQ ID NO: 2403 - DNA, 777 bp, unidentified
  source 1..777: mol_type = unassigned DNA; note = unclassified RNA viruses ShiM-2016 sequence
caggggcactccccctgcacttcctattttaacttcatatgagacgtggttactccatatgtcgtagtgatgtaagtttgctgtatgattgcgaacaccgtaatgtgcggtagaacctctctcacaaaacaaccaagaaccacggtgatactacccgtgttaattgtagtacaaccccaaccaaccccaacctgttagcttaaacagtataaacctcgagcaactcgtgttaactaacgtagcgatattatcttatgttattttagtcaacaacttctttagtgttgagtcctagaagtaaaacaacactcaacttcattcctttgtattagttattcaggatcacctagaattatcgacgtaatcttttattttatatgtctacaaatattgatatggaaaatatgggacgctttcggtttccaatggtgagattcggatactcactgcggaggttggataacttaaagttttctgaagcttaggttcttatcactgtttatatatcttatatattcgtcggagctctgcctttcgtattctccctcagatatggtatgaaaatagactatgtcaattcatattcctctactgtgaaaatatataagtgtataatacatattccctaacacagatttagtcaccccattctttattagtaatcaacatataaatattagattcaaccgtataagacttggtgttgaatgaatcactttacttagatagtaatgaggccaaggtaagagctttaatcttccaacagaaacaaacaaa

SEQ ID NO: 2404 - DNA, 778 bp, unidentified
  source 1..778: mol_type = unassigned DNA; note = unclassified Betachrysovirus sequence
gaaaaaggcttctcatttttgcacatgtacgagcgctctccactaaacacgttaggcacaccaggtaacgcccaagacccaacagctagctaactgcccaccacaacgccccactcccacgcggccgctatgagcaacagggtgccacgtggtttcgctcacatattctccgacttggataccgcgagcgcttgggacaacgcactgagcgaggttgaagaacgcgagccggacgagagcgtggttattgagggcgaccccgagatctacgagacactgcgcagtcacggaggcccgccgcccgactacgaaactagtgagatagctagcgtgtacggccaaagagcagccccacccccgccagtggctgggtgcgcccgcaaccgctttgcccgcaccgagcgccccgcaaaccaccgcgaagcgccgcagaggttggctacaccacctcctcgcccccgtcgagacactcagttctacagttcggactggccggggcgcgacgctctacccacacgaggcggcatcgaggaacagacggcgcgcgttgaggcaaggaaccggtggctgcaggctgaattggacctattaacagaggacgacctgcggttcaacaacacacagcacagagcgcgtgccccatccgtacgcagagagtccggattataccaacgcgtgagcgagacagctgctcgagaccggcgccagcgcgaacgccagcgtagcaaccgagggagtagcaccaacggctctggcagcacactcgtgcggtacggcg

SEQ ID NO: 2405 - DNA, 779 bp, unidentified
  source 1..779: mol_type = unassigned DNA; note = unclassified Bacillarnavirus sequence
tcctgcattgaccacatgcagggtttttcgggtattagccgttcttaattgaacgcaaatatttcgtttatttacgctatgaactccaacgacctggagttatttttgaactgcgtaagtaacgcagtttgatcaaaatatagtttagatttaacatttcgaagttttttagccgacatttttatgtcgtggtaggcaaaccattgccggtgacagaaatcccattgatatagtcacttaaataaaaccgttccttttaggaatgtgagcatttcagatttgggcagtgaatggggccccaaatcagtcgcacaattgcggcattacgttttaacgtttatcgtagtcaaaacgttgatttttacttagtttgattgtaaaactaatgtgtgttacgaaagaaagtcgactcactgatgagtttattgtgttccttagttggttacgctttaggtggtttgccaatcccacctttagttctcatttgagatataggaagacagtgaatgaattattagtaacgtaagtacgtccatttttgtggagcacgtgtaggtcggtaccgtatgggtaaaaccgttaacctgatcgtgtaaaacattgatgacacatgaagagacaagatttctatttagagatagggaagccaaacccgcacaaaaaatagagcaaaggtgcaatctacgagcctaatgtatttatacaaaccgtgagtccactaaccgaaagtatttacaggatcaaaacgagtttacagtggaaatttggtaatcaggaat

SEQ ID NO: 2406 - DNA, 779 bp, unidentified
  source 1..779: mol_type = unassigned DNA; note = unclassified Picornavirales sequence
gggatttatccccatgctgaatttatcccactctaaatattagagtgttgtactcctctttggcccaccattgtacggggtgtgtaccgtacactagttatagtaagtaccactagttcttggttccttctcgtgttagtgcacacgttcttgcgctaagttttctaacttttctttgtctaaactttaaatatgtgcttcttttaacctggaggtctatcgtatttgtggagaaaagctattctaagcaaggaaaacaataacactttctatcttctttgtttctgggttgtcctcttaaccaagctggtcccatgggggcgtgggtaaatggccctatggattagccatagtggttatgtaggcgaaataaggggaacccccaatcatgttgtacgttgagttgttcatggtaactgctttatatacatatctataattgcccataagaggtaggctacgggtgaaacctctattgtagacggtaaggctgcggtaaagattttctttcaacgcagggggaccgctgttctgcagtgggaatatataaatatttatgtactgtgggtggatgactaggctaaggcttgattgtttaggggtgcttaggaagttattagaggaaggggttcacttatatgaaattgaaaaaggatgaacgctatcccacctcaaacttcctgagccttttcttggctctttcaggttttaaatccccaaatgattaaaatatatgatatagatacaaatattggtttttgttttgctgattagtagca

SEQ ID NO: 2407 - DNA, 779 bp, unidentified
  source 1..779: mol_type = unassigned DNA; note = unclassified RNA viruses ShiM-2016 sequence
acgcattatgcgtatgcggggatcatcgagatgccggattaacttccggccagttggccttgaggaggtcagcctcctttcgagctagagtagcactttgggggttcgccccctctgtgctagttttgttttgtaattaaatttattcttttatgcaggtatcgaccgtgttaaaccagcggtcatcgacctgagaaggtcattaaatatatctaccaatcttttgtgatagagacgtaaaataaacctataaaaataaattgcgtccaatgtattgttattttgtcggtctgtagccggcactatatgttgtatgttaatcacaggctttttactgatcaaatggaagcctaatatgtccattagaactaatccgtaattaacggtaatatgagtattatgactgctcgtctaacagtcatagctccgcctgagagtgcaacgtaatgcaatcaggcttgagtcgggacgaattatcccgaccacatttgaggaacgccttcgggtagggcctcaaccccagacgagactcagtagcaagcgtaatgtgagttgtgcttaggtatagcctcattcatgaatttggattttgagcgcctttgtgcaacagcattgctaacttgtggattgagggtggccattgtgtccatggaataacacccaatgatgtccttgattaaatttcattcgtgagactaaagatgctgtgtcgactgtcgaagatttattctttgcaggacacctgcacggaataatctttgactcgtcgttcaataacc

SEQ ID NO: 2408 - DNA, 780 bp, unidentified
  source 1..780: mol_type = unassigned DNA; note = unclassified RNA viruses ShiM-2016 sequence
gcaggtttccctcacacggaaacctgcgcacgcgtattaaacaaccattgcatctgcaatcacgtcttagcattgctagtaagttgctttaaacttgctagttgtcctttgactagttgtatgatccgatggactttaatatataatttaattatatattttaccggattaatggtacgacttggaccgtgtgaagtaaacagcttcgcacgttttcttggatttaaccatcgatttataggatggtcactgatgtatatcagttattttcttataaattgattcttgagcgagttttcttttaaaactgcatgcgaagcaatttattgtttcgtagattcgaggtgacattgatcgtttgacctaataaggcgactgaaaaaccaccggcttattagttagatcttggatgttgcttatgtaccgcaggggtcttatccgccccctcctgtaagctactgcacgggtagactggtgtctccttttaatattgtttcagacccatgcgagtcgagtattagaaggctgatcttccggcgactgtgtagatggagctaatgaggatggcttactctcctcgtcatcggaacctaattgctgggacgtcatcaaatacttgggcgatccagttcttgagcggcattattcgcacaggtgaaaaagtcctgctggtctagtgctagtgtgcctcgctcgaatctctgacaaggtagtctttatggttatctataggagttcgggaattagggtgtgaacgagaactaaatttcattttttacg

SEQ ID NO: 2409 - DNA, 780 bp, unidentified
  source 1..780: mol_type = unassigned DNA; note = unclassified RNA viruses ShiM-2016 sequence
ataggacatcctttacggatgtcctataggctcttttcttatgtcgatctacagtttgaactgctgtagcagtcgcatgagatgtattcatgctatcagttaatttgactttattaatagttgcgctcttctgggacactatttttattgtccctttagagattgctatatgaagtcctcttggacactcatttgcattgtccaattgtttaacgctagtattactttattctcgttggcagagtactgccattataagttttgaagcttagttcacttcatgaaaggctttctttcaaaaaccctttcaacccccccttttgggggcttacatgttcaaatctttcgttcggggaaagatttattgtttgctcccggcttcctctaattgattttagtgaaagctgatttatttgatgtaattcgcttagtgttttatgccctaaagagaatcccacctttactatctaacaaccgtttaataacctcgtgacctaataagaacgtggaacgagtaggaatgatttagtttaggaagaattggtctcttggagtataatttatcagacgtacttgaacatatttagctcaataccaaatagtaaccttacgtttaagcacgtgaaccacacgtgtagggtatgtagccgtgcccgatatttgagtaagaagtgctatttgtgagatacatataatgatatttcagttattaactttttgatattttaggaagttttgtttaggcctggtgcctaccgaaacctcacccagtttctaatt

SEQ ID NO: 2410 - DNA, 781 bp, unidentified
  source 1..781: mol_type = unassigned DNA; note = unclassified viruses sequence
ctggcgacaaatgtcacaggtgcgttcgtggaagacgtaaaatctctaatagattattatatcgctagggctaattttactaacactaccatagattacgataagttgagcgaagttctatcgaatgtaaaaattaacgtaaccactacgcagtctaaaccgtcgttttcttactaccgccggcttatagattactatatcgaccacgactacaatatcacacaccatatttttggtggcggttctatagttggtgataggactaaaaggtttacgttcgctggattgttcgagagctccattcttgccatagttagaccgattttacatataatacacgaatttttcttggaatttattgaacccttattagaacgtttgatagatatattcgcaaaaataacattaccattagttaaaacaatatttactttttcaaaaactttgttcgaacacatatacaattacataatcgaaaacgtacctgaacagacattgatagactttttcgaaagatttttaaaatttttatacagaatattgcatgttgttgttgaaaaatttgtagacattctaataaacactaacactacacataaaatttttgagtttgttgcactatatttaattctgttttactattttaaagcatatttcttatcattaattatcacaatagtaacttttgtaatcattggcatagaacgcaccgacgaacataccataatggttatattaatttttacttttctattgattcgctgctacactaacccacgaa

SEQ ID NO: 2411 - DNA, 781 bp, unidentified
  source 1..781: mol_type = unassigned DNA; note = unclassified RNA viruses ShiM-2016 sequence
tgacgttgctttcgggcgacgaggtaccgtgcgcgacggtaggacagctgccccggcggccgtaggatacaaggttggcgtctgttcagtatgaggtgaaaccatggatgtctaagacattgcattggtactcctgcggatggcacttgattccgaaaaccggcgtggggactttttgggcgcatgctgtgggcaggcatgtgagtagtgggcgctcgtggttttttctcagctctggtgtcgcaaccaccaccagcatattctgttaaacagtgtgctgtgtgtccgtgccatagtgtagagctgacccgtgctgtagggctgcattatggtatacgtgagagtgtaaaatagggaggccagtccctgcccgccaaattaccttccgtggtcaacccagcctcgaggggagaccctgagccaattcgtggacctgctgcggccaggttgaaggtgaaggccacccgactccgaatgccaacggaaaacagtcgggcatcctaccagcctatctggatgaacctgatgccccgcacgagagtgtactttaggggataggggagctggaggatggaggttacggttccgtgtcatgaagtgtggaagcgatgcatggcacgtaggcatccagaggccgtgggcggtcattgtgatcatggggtcactgagtaccgctcgcgaattttcatccacgttagcatcacattgtcgcgcagaggaagagtcccagtggtgttgatgtgtgagacgtttgtgtcggtgtttgccattcattacagag

SEQ ID NO: 2412 - DNA, 782 bp, Mirafiori lettuce big-vein ophiovirus
  source 1..782: mol_type = genomic DNA
aaaaggaaaaaacattgcatcaaaacagtaaaaacattcagtcacttcaaattttgactatggactataacaaagatctaccagaaaatgtaagaacagtgactaaaggtgaaagtaatgaagcagaaacggttagcaaggctgattgtgaaaagtctaatagtcttagcattcaattgttcctcaattatcatgttaaagagattacagttaatgattcaaaaatacaaacaagaaatatctatcttttaaacttgttaaagggatatcaaactagttacaaagaagtaacaagattcctgttcggttcttggttacttttcgaagaggagctgcagccaccctttaacataaaagccatgataataattgacacgaaccaagaattagtagacgtctcagaatacaaaggaatcgagctaattctagggaatgacatacaatcgtgtattgattcattttatatgcatatttacaaggaagatctaattatctttaatgaatcaggagactttatgttcctgacagatcattttaagattccaaaatattttgcaagactggatggacaacaaataaaagtcaggaaaattattgaaaaaagatatttagaagtatctaaagggaaaacactcaaggagagaacttagctgttttaataaaaaatcaaacaaaacaagtgagaactacaaccaagatcaattaagcaagtaaaaatagtgatatcaaaacaaaaaccaaccttcaagttctttgtcatactcctctgcataacgttaata

SEQ ID NO: 2413 - DNA, 782 bp, unidentified
  source 1..782: mol_type = unassigned DNA; note = unclassified RNA viruses ShiM-2016 sequence
atattgcatttggtcctgggatgacattaaactcatccaaactccggaaccatctgtagtataagtttaaaatggttgtgttgtattggataccatatgtgttgaatttttgatgttattttgtacatatataggcttgcatcacatagacattctcccagtgggaatacctgtttttacaggaggtctcgtcaaccacacaaatatcatgcggaaagtgctttgagtagagcacttatcctaagttcataaaattacttactacacttaatactaataccaaaattgaagcggaaggaggctccgcataccaagtctccaaaacctctcgcgattcgaaggcgcagacagtcaactttgttgatggcgatacgccttggtcgtatgatattgtcgcaactcctgacgcgacgaccaagctctctggattctctgatgccgaactcggtgacttccttagccgacctatcaagatcaaggaatatcagtggacgcctggatcttctttgtcagttacgcgtttcagtccgtggacggaattttttagtaatgctgatgttcttgataaaattaatcgttatcgtaacttgcgctgtaatttgcgcctaaaagttctcgttaacggaaacagtttttattatggacgtgcattgctaacatacaatccgtacattgccaatgatcaagtgactgtcaatcgtgcatttattgctcaagatttgattcaagcgtctcagaagccacatttgttgttagatcctacaacttcacaaggtggtgag

SEQ ID NO: 2414 - DNA, 782 bp, unidentified
  source 1..782: mol_type = unassigned DNA; note = unclassified RNA viruses ShiM-2016 sequence
tttagctaggatagttagatagcataactatgaatagatcaggaaatagacgtggtaataatggatctgtgcggttaccagcacaaattttggccagagcgctgacgcaacaaatgaacaacaagtcagcaagaaaaccccgtcctcccaaaagtaggcgaaaacagccgattgcacctggcaatcgagggcttcgtgacaccttcgtgttcacggttgattcactgaaaggcaattctgaagggaccttaacttttggtcctagccttaaggagtgtcctgctttttctgggggagtgacgaaggggtaccacgagttcaaagtggtttgggttaggttcaccttcatttctgaagctgcctcaacctcctctgggtcaatggcatatgagatagatccacatttgaagttgacaaaactgtcctccaccgtttttaaattcggaataacaaaaggaggatcaagaacctaccgagcctcgcagatcaatggcaatgaatgggtatccacttcggatgaccaattcaggtttctgtacaagggcaatggagacacaactacagctggtagttggcaagtgacaatgatggtccatttccagaactccaaataggtagacgacgacccggcacctgctccggtgccacctccatctccacccccctccccctcacctagtccacaaccaacaccagatgatgagagattcattgtttacactggtgttgcaacaactcgcataagagcaaagacaaccgatgatgcattaattctcaacccg

SEQ ID NO: 2415 - DNA, 783 bp, unidentified
  source 1..783: mol_type = unassigned DNA; note = unclassified Iflaviridae sequence
tattttatacccccatgcttcatggcagatgcatacagtggagatgcatccctgtcaaagcataccctcttttagttataagattttattattattatcaaattaggcctaagtataatataataaaatgctcgttactgaacggggctcttttgagtgtataaaaatttggttagaatgtaagtttgatgactccatcactcgcggagttatatatgaattaaagaatgtatgggcattccctcacaaatatgaaacatgaccctataattatatcgggaagtactcctatggcgtttatgttgctacttactgtatacatatttcggcattagttgtcaccatgcaagattctgtcctctattatgcatttgtataggccatccgacttgtcgcctaaactatacagatgtgtattatgataatgtttcgagtactagaactacttattagttattccatatatgcataatcatggtattaattgtgagattcatatattttgcgtcagtcgacacatggtgttttataaaatggggttgcattgtaaacatttcaccgtcttcgtcgatcattccatatttttttttaaagctcaaactcttctctttatctatcttttcggagtggcgcccgagatttataatctcattaaattgagagtaaattgagccattttgtatttcctttcttttcttccgtaaaatgtttagctactccgaccaccagggataggtcgatcatccacccccaagaattacgaatcagatacaactaaatacg

SEQ ID NO: 2416 - DNA, 783 bp, unidentified
  source 1..783: mol_type = unassigned DNA; note = unclassified RNA viruses ShiM-2016 sequence
ggggcttttcccccatggctctcattttaacggcaaagataatcatgccgatagttaagctctcagtgatcttagatgtgcatttggtatacttagtttcgacttttatgcttcttgtacaatctattacactgttggtttttcatgatttcaccctttaagttgaaaaacttattttgattttgattttcgaatttagaagtaagacccctttgtttgacttaacttttgttattttgacattgggcaatccactgacttttgagaatcaccccttgtggttagaagaccacgtacgtaactttagcatagatccttggatagctagttacggcgacgaagtctacttacactttaatttactaagcagagagaaagtgctgacaaattgatttagttcgatttgtcggaattgccgaggtccctcacagaaacccgcctctttagtattttatttgttgtagtagcaggctttgacgatgaactgatataagtacaaactgatcctttggtcggaccccgttcacaagtcttggaacaacacatcgcgaggtgtgccttggccggtaatcatcgctatggttacccgtggacaattgggccccccggctgcgctagcaagcaggaggaacatatcaggaattcaacgaagtatcttttacctgcgttttaataagaaatgcaggagttgataaatagggcttaaactggaagcgagactgcagcggctaaagcagcagtaaatggtgccagtgtaggtgttttctctttttaaatctcatt

SEQ ID NO: 2417 - DNA, 784 bp, unidentified
  source 1..784: mol_type = unassigned DNA; note = unclassified RNA viruses ShiM-2016 sequence
gctcttccgatctggggaaacccccctgttctcttttgaaagctgaagtattggattttgcgtgatttattgagttaccgcagtttcatctgaatttattccggattttgcaaaatgttcttttgtttaattgataccagcgggattttatctaacgaatctagccacacttttaatcattagcactctttagtacaacggcaccaaccaacccccccttttatcattttaatattcttctgtgacaggcgccttagcgcagtcagtgtttgaggattctttatccatttcggaccgcgttatctatttatagatcctttttacgatttcacactgattgtttttaacaaccatcacccttatatttacgtgtacaaaaaattataaaaacgtcgcaagacaccaaaaacaactgtcttttcatacattagatgcaataataacactgatgaattagactatgaatcagatttacctatatgatactaaaacgtcgccgaggcataaagagcggacccaaaaggaaaacctacgtcaagtattatatctgctgatcagccatcttttttattttgtgcgctgtttttgcggacactttgtaaatgctatgtcgttgctgggctcacttttcgagcaataattactagaacccaaaaaatgaataaaggtcttacgggtattcttaggcagcaactttcattgtcaatccaaacatgtttcggtgtttggttctagcaattaatccttcccacgattcctattttaactctttttaacattcacg

SEQ ID NO: 2418 - DNA, 786 bp, unidentified
  source 1..786: mol_type = unassigned DNA; note = unclassified Hypovirus sequence
gggttccgactaaggtgctgtttacagcttaatcgggtgaacgcgcccaacttcaatgggtcaccaatttgggttcgtgatgttcgaaccattggaggttaaatattttgcgttcgtgtcacattgtgacgtgacctatttaggtcgtagggtgagtccctgtggtccattaggacggtgcctctcttggggcgttgcacgaggtgcagcatatcaaaagtaaaatcaccaaaaacaatttaaaatatgaaatgataaaatttgacctgggacgtcattaaactcacggcctcaattgccaccgctcatcggtctcagtgaaggggtgaaagcggccacggtcgttagtaaatataactgggaatgagtaggagagtctgggcccgattaccagttggctgatattaagcggatagattttaaaggttcacctccaggctcaatcggactgagatccgttgtcggcagtaatgagtgcaactcacaattctggctaggtaagacgaaaagacgttaaaacctgaggtgttcgatcaactttaagactatttcggttaaatatggctgggtgggaaaggtagtaagctacccaaaaccttaggctgagatgtcactttgtgtccggtaaaactccggggaagcggaaaaatgcacgctgcacatgacacgagagacacttgactgtactttggtcccgaacgggagcacatgggggtcgatgacaattgggaaagaccaattgacttggcagtggaaagaactgctattcaccatgatcacatataa

SEQ ID NO: 2419 - DNA, 786 bp, unidentified
  source 1..786: mol_type = unassigned DNA; note = unclassified Picornavirales sequence
acatgggcgtttataacgccctaccagtcctctttgaacgtgtgctgtccatctatcagcgcaccatggtctcacgaccatgttgttcaataggtattctaatccaatccctattctcccacaaaccttcttgtaactctgttaagccttttacatccatgtaatttaattttctccacctaaaaggatttcccccatggtcctttttggctcgaacaaatgctacatagggtcttgttttctccccctggctctcttgccagggttccataccccaattcctctatttccatgatttttcatcatggtttatttttactgtcttcttattttctgaggtgaccaactcctaagccgactgggtcgcggaagcccggactcctcgcatcactagggtgcgtagcgatgtaggcgaaaatattggttgctagatgcatacatatagtgaattgatactacaccaaactctgttctttttgaaactagctattttctaagtaaggtaggctacgggtgaaaccttaccattgcaggtacgtgaaccgcaacggacatttggccgaagactggtgtacccacgtcagttataggacctcttcaacgttggtggacggcatgtcactgattagttaggctagtgaatttaagttcagggggtatcttttagcttaagcgtgtattctagtaggacttgcagagcctccccacctaggaggatctctgtttatagccccttttccttgttccgttagttttccacacttttacaatatttgatgatttgtt

SEQ ID NO: 2420 - DNA, 788 bp, unidentified
  source 1..788: mol_type = unassigned DNA; note = unclassified Torovirus sequence
tgacgtattcttagttgattttgaagccttgaaataaagcttttaaaccccttttacggtttgtccaccatacggacattgttcagaccgcagtgtcttgtcaaggaggttcagccttgacattacttctctgtgaggaatctactcagaaatactgcttgcgtactagtagttacaagagttgacacttagtacttacaagcgggttcaaccgccctccggaacggtggaaactccctcccgaacgtgcgcttgacgtgaccaatttaggtctagctttctgagaaatactccagggctgtatttgaccacatctgttattcatttgtggttgtccacaaccaaacatcgtgtgactcacctccagctttgctgcaggccttttggactaaacgagtcgcacgttttgtgactagttttaggacttttcacactcccctaccgccaacctgattcttttcatccttaagttttgcgtttatacgctattttcttacggttggcagtttgtttggttgtttgcacagtttcttttaataccaatttttactgtgctcttagtttttacagctaaggctgttttttatttactcaagttgcttgaagcagcttttacaacactagttttagttttaattgaaaagttaaagggcgtcaggaaacaacgcagacgcccttcttgtggtgtctagttagtcctaatctggcaaacaaatatcaggttgttgactccctttggagtgagacctacgagtatcagtttgcttattttggacacccatataaaa

SEQ ID NO: 2421 - DNA, 789 bp, unidentified
  source 1..789: mol_type = unassigned DNA; note = unclassified Picornavirales sequence
tttagtgttgatgggcttggccgcaggtgcttcagcaattggcactgcggtcaatgctggtatggctgctaggggacagaataaagctattgaccaacaaacttcagtcaataacacaaatttgcagatgcagaaaaacgctatgaattatcaaactctaaattggcaacgtaatgtagatctgtttaaacagagtggattacctggttggatggcggaaacccaaggtggaggtagtggtaatgttgcgtttaacgatttccctaaaataactcaacaagtagctggtaataatttctcttcagcagcaatacctggaaatttagtgagcgattttggcaattctatgatgcaacaagtgatgggtatcgctaattaccagtacatgacaaaacaaggttttggtccaaaagtatctaccatgtcacaaacagatcgcggtgacattaatcctaccagcacattttcgacccaaacagagccaaatcctactgggacctcgatgactgcgactccaaacacccctgaagaactttggggtgatctgggaggcacagtgcctagtacatcctcaacagtagctatgcccgatgcgtctgcagccgctgaggcgattccagctgcagcgccgattgaagaatagccctagtaaacgtgttacttgtgaaaaacatccgcggattttttcacgatggtacagttgtcaaaataaatacatgggcttgaaagacttgaggatttactttgaccttttgtgtttcttggataataaccttgaaatattcaaag

SEQ ID NO: 2422 - DNA, 789 bp, unidentified
  source 1..789: mol_type = unassigned DNA; note = unclassified Picornavirales sequence
acccctggggcccacgcggcgccagtactctggttcgcttagaacctttgtacgcctgttttccctcccctaaataaattaagatcaccactactgtggggagtagtccgactccgcaccgatacgtcgcaccagtgaactggttcgcttaggacctttacacggagtagatggtgttcccttcccccgtaacttagaagcatgaaccaaccgaccaatagtggcgttgcatccagcagcgcagcggtcaagcacttctgtttccccggcgcgaagcgtcgttacccgcccagcctactgcgggaagcctagtagcaccccaattgatcgcgcggttgcgttcagccacaaccccagtggtagctctgaggaatggagctcgccgtccccccacagcaatgtggtggcttgctcgcgcgtgtcctcgggttcactcaaagagtgttcaccgcaacatcaagtaaggtgtgaagagcctactgcgctaggctggttttcctccggagccgtgaatgctgctaatcccaacctccgagcgtgtgcgcacaatccagtgttgctacgtcgtaacgcgtaagtcggaggcggaacagactactttcggtactccgtgtttccttattttgtttcaatattttatggtgacattgactgatatctgtgaatttgctcgctgcccctgaatattgccttatattacttaatagcatttcacgaaaacgacccagctttcaattgagcttattaactttgctgtatctttaaaccagatccacaagtcggtgtaca

SEQ ID NO: 2423 - DNA, 790 bp, unidentified
  source 1..790: mol_type = unassigned DNA; note = unclassified RNA viruses ShiM-2016 sequence
cagaataatagctacctgcaagtcattattgacttgcaggtagtattttatgtaattgtgcctatgtttatgcatggttctacggacctatgtttatgcatggtcaccaaacatttattattctgggagaaggatactcctccacattatgtggtaaaaaaccaaatcacggcgtttaaaggcctgaattgcttttagcccactccctttctatggagtgaccaaaacggcggtagggtagagattatatctccctagtccgcgtctttgctgaatattgattcagaaaggaatggcaattcattgtgatgaagttttaggacagactttaaaatgtcctcgtgtgttatgttatatgataagagcagtaccagattttctgctctacatttgctctatgatttttcataacatatcgtctttaagattgtactttattgattagtttttgctggtttagacctagctattaaggtgagtcgcccactctgcatacttacgagtatgtcgaagtaacgatagtctttttagtaaagttgcgcttcagatggatcgtgatcaccacctgatactgtctttttaacgaagctctgaaagtttaaatacttataaagcatgtgtttgttaaagagaccaccgtcctgctgttgttagttaaaaataaccaggttaccgaattcatatgaggaagtctttaagaagatatgggggttggtactcccgaacggataattagtacctgattagttaagaactcgtgttggtcgtgcgttaacggctgtgcccattg

SEQ ID NO: 2424 - DNA, 792 bp, Brevicoryne brassicae virus
  source 1..792: mol_type = genomic DNA
ttgaaaagatcgtgtagggtatttaccctacatgatctatcatattcttttcatgacgacatttgttcttgacatgcaccatatttgttctctttgaggattcttatggtatatgttacaggattcttgtcgtagtcgtttggatatgattattggcacgtcccgctgattgcgtaacaatcaacaatttagtctataagctttcttttcaaaatttaaataattaattcgctctaacaacattagaattcttctatttcaattatactttattaaccaaaaatatttagctttaagactagctttgtgagctttgcacacacgtcatttatgtattacactttagaaggtaccataaatggacaatttcggttgtcttggctgatacgataatcagtttctattctaaggcttcgggtgaagtgtctatcccgttgaaattaacaccgctggataagagtctttaaacttactatctgagattgtatttagtacaggcgatagttttatgtaatctaggctggagacagtacgattatataaatctagtttaaagaatttctgtttggtttgtgtatggcatattcagtgattatacgtaatcactgtctcgtttataatgtttaatatttttcggcaaacggaaggttgtagttactctgagagatttaataccgtatctaatagaatttagaactcatgatttgttctattagtccagcatattgctataccgtattattttgcctttagtagcgttttaaccaactgacttattagccgcatttacct

SEQ ID NO: 2425 - DNA, 792 bp, unidentified
  source 1..792: mol_type = unassigned DNA; note = unclassified RNA viruses ShiM-2016 sequence
atattgtacatattgtcctgggaagacgtaaaactcattccaaccccccggaactattcgtgggatgtgtaagtttaaaatagtcttgtagtattggttaccgttaatctgtaaatttttgtgttatttgtatttctttctggcttgctacttgttgacacttccctcgtgaagtacccgtatttacgggaggtttcgtcagccacacaaacactatgcaggaagtgcactgagcaatgcacttaccctaagttcataaaatagctttctaatataattaataataatgataataataataatgaaggaggtgccgcgtatgacatttccaaaatttcaaatgaaacaagtactcaaacaactaattttgttgatggagacagcccttggtcgtatgacattgttgcaacacctgatgagacaaccagactcgcaggtttcactgacgcacaattaggtgatttcctcagcagacctattaaaattaaagagtatcaatggactccgtcatcatcgttgtctgtcgcacgttttaatccgtgggctttgttttttgcaaatgctgatgttcttgataaaatcaatcgctatcgtaatttacgttgtaatcttcgtcttaaggtgttagtgaatggcaatagtttttactacggccgtgctttactttcttataatccttttgttacgaatgatgaagttacagtgaatcgaacatttattgaacaagatcttgttcaggcttctcaaaaaccccatttgcttttagatccgacttcttcgcaaggaggagaa

SEQ ID NO: 2426 - DNA, 793 bp, Dobrovirus bufonis
  source 1..793: mol_type = genomic DNA
ttctgaagaaaaccccgggaaaggaacaaccccgagtttttctccctttcgacagccgccacactgtctcatcagctgggataggggctctgtcgagccccccggcccccaggagagagaaaaactctgggcaagagattttgatctccttattgagaggaagatttttggaagattccgggagcgggaattgttcttccgggcgagaccgaccgtggcccatcctcggataggtcgggccctctcgggactgctgtcgccccggagactctcggagatggagatgcctcggcgcgggtggcctcggtccaggaggcgaaatcttccgtttcaagtcggaaccgatggagtcccccttgggtccttcgaaagctgaaagaagttggaaaaatcgggcatccggagaacctggaaatggactttgaggagagtgttgctaaggctttttacctgtcctgtttttcccgatttcccgcatgtggctcttccgcaaagaggggctccctgaccgttttgtccttcctcccctccgcgcctttcccagttttgctccgggaaagaatttgacagtttcttctccagatctctcgattcccttagggccaaactagcccccgggagcggcgcgttctcgtcggttccctccccccccattactaacaattaccgtctgagttcattgtccccaaatcctcaaacgggatcgcccccgggctgcagcgggagtctaaaaagccttttggcataatagttctccgctgagtcggaggcgcggtcccctatttttgaggaa

SEQ ID NO: 2427 - DNA, 795 bp, unidentified
  source 1..795: mol_type = unassigned DNA; note = unclassified RNA viruses ShiM-2016 sequence
taaagtctccatgcgcattatgcgcgtggagacttaaattgaattaattggcattaatatatgcccttgaaccttgtttacgagctatgaagggcattatgatgcccccatacctcgaaggaaagaagcaagctttagatcctttattgtaggatcttagtttgatttaagttatttattttattattctactggggggtggtcccctacaaaaaccacacactatatgtatatggaaaccaaaacgatggtagtagactctctgttggagttgaagtccatggccttaatggcaagagatatcgtggaatgccaccacgataaataaattaaataagcaacacgaaataattcgtgcattttatcggagtaacccgaagtgcgaaagtgctcgaaggtactcgtgtatatttgatatgtatccttgttcgggatgctgtctagtagccactgtcaagcctagcagtgtagtattataatatattacatcattgatagtatatacgagtataggcggagagcagttagtaacccttgtccgaagaggaaaggtaggtgcaagcagtattgtaagccttgttgcctgacacatagtctaaggaaaggtcggtctcgcccgttagaagtatcggattgtttagagtagttatatcagtagacgctcgttcaaaattgttaactgaattcttaatatttctatagcagaattaaaattgcaataggactcaaattagaacaaaagttattataaagaattaaaacgatatttttgaggtaaattgacaaagacagaag

SEQ ID NO: 2428 - DNA, 796 bp, unidentified
  source 1..796: mol_type = unassigned DNA; note = unclassified dsRNA viruses sequence
tggataaaaggccgacaccttttatcccttctatcaattctttttgatagttgttttctaagtcacatggtagcgaaccacaattcgttctttgacgttgttatgaactcatatcatttccataacgtaattcgatcaaaagtcttggtggtgtgtacttcctcacaccttgtcgtttattttgatgcactagcaacgacgtaaaatgcatcctattttacaatttcctttcacacgtggagttaaaccttcactttactctttttcaacgtgtgcctagcattgtatttgaaagctaagtaccctgtgtcatatgaatcacacatccttgtgatatttctagtggtcccaagctcgtttcagccgagtataagatgacagtccctgctgttaattgtgtcatctttagtcccttgcccccctatcttcgtttatttgaagatagataggatttggtttagccacagtgttctatacctagatagctgcgggacgtgattccccgttgggaagctatttctaaaacaatcacaaaaacaggtataaaattaaaaatcacaaaacaacttaaacatgcatggttataagcatgtgcgtgactgagtatgtcctaggttttgcctaagatggaccactacttcacgttgttataactatttgaatcatacactattcatctgtgcctcggaccggccttgtaggaccccgacccatcatgatttctatccgcaccaaacatgtcaagtcaggacctcaacgccaatcccccgttgtgccagtccattgattcatccct

SEQ ID NO: 2429 - DNA, 797 bp, unidentified
  source 1..797: mol_type = unassigned DNA; note = Dicistroviridae sp. isolate fcc172dic1 genomic sequence.1 sequence
cctgcaggtattacctgcaggaggtctgagatctggaattcgtcgatctgcgacgacaggctggttgtttactagctttgttgttgtttttgtgcgtggaaacacccgtttcatctttgtatgtatgtatattagttactatatgtttgtttgccggtgtcgttaaaccggccatgccccgcatatgcggggctagtttatgttgtaaatattgtatcctataataacgtatggtccctgttcggaccagtgtatgaaaaagtggactattttgggttggagcccaacatggaggaacttaccccagtagtttgaactggggacccggggtcggtttaacgagccggccccgtgagttctggattagcatggcgctgtccacataaatacgtacgacctttattttagaataataacctttgcggatgccttagggtgtacgcagtatacagacgacaggtcaacattgacgtttttggagttggtccgtgcctctgtgctgatcccgaagcacatgcgattaaagaacgacccgagatatggtatcatcatttgtagttgtacgaagcgtatgtatctgctattgtgtaaacatagtctggtaaagccatgatttatagcatggacaggccagtttgtggtactgaagcagtagatttgttagcatttcgttagtggattgcaagtgatggtagcgaagtccccaagaaattagatgttgtccgatatttgagcacgcgacttttgtcgcgagctcaagtcgtcagttgttactgacgaacttgagactcgcgttt

SEQ ID NO: 2430 - DNA, 798 bp, unidentified
  source 1..798: mol_type = unassigned DNA; note = unclassified RNA viruses ShiM-2016 sequence
cggacgttcacgtccgtatgagatatagtttagttggcagcttagcccgctgcccgggttttacctgtattttaggtactgtttaggtttgttcttgaatgggatcgcaggatacatggtagaaccatgattctgtcccatttttgaggaaacctttctgatactgttacgattgacttctatataaacgttttttaatgctctgaggagtaaaccttataagaaatctagggagtccaccctacgacaaaacaaaccccaatgctcatgagggcctgcgcatgtcgcttttattgtgtagaccttccgtacgtcgatgagggaagtttaggccttgagcaagcctttagaacttcttaccttactttcgagtgaggtggcccacagtggtgtggacgttcttgattggaaatgatcatattaggtcatagtagtgaattatgatgatgttatgcataattcgaacttattgaaactttgatatggtaatgtcggtttaaatacgcaaaagtgtgtgagactagagtactcgactttgctaccgaatggccctgttattggaaatgatatttgtatcgatggcgtattctgattctgcaggattcttacttatgagatgtgtgagttttatccggtcataagcctaattatcatagtgttggatgtggtgagggttaatagcccaccagcttctatgcaaaagaacttagctggcccaacacgccagacgcctagccttcgggagggaattttatcgttactaaaaaccaaacacagagcggggagagcttgctgaca

SEQ ID NO: 2431 - DNA, 799 bp, unidentified
  source 1..799: mol_type = unassigned DNA; note = unclassified RNA viruses ShiM-2016 sequence
gacatgtcactccagaattcgctgcccccgggtcggtcagggggtggcatatggccgtggagaaggccttggtcgaggagtgtcggccatgcatgtgtggggggccggttgcccaccggtcgagatgggggccctcgagacattgccgactcggggataggcgagctcaccgctgaaacccttggcttattctttcgtgcgggcgtggtgtgacgtcccgtcaaaagcctgctggagtatcggcactcctgaggtgcaagccagtacgcgctgtgcttcgaggtgggcacagttcctttgccagggacgaaggcgtaccaacgtcactcaccgtgccatccagagcaccaaccatttgtggcacgggcgtgtgagtcaggataccacatctgtgggacacccctggtgttgtgtggaaatcggaccgcgacggagcacgccacgtcgcaacgggcaccgtgggaagcacatattggggaggcagagtgacggggaatggactacggcaccgctgcgccgcggaggcgcctgccctcgccattttggcagacggcagatacaccccacaattttgatcgattttccgcgcacacccgcgtgtcggtgcgaccgactgccaattttgggactgtatgaagcgcgtctgttctcgcgcgtccgtgcctatagcggacatcacggtccacaagagacaagtgatcccacaccgactgaccgagctccggcagccgccgggggaggttttgcacgaaggagttgagacgttcggggtctggagagagtggtaccgtcgtgtgcc

SEQ ID NO: 2432 - DNA, 800 bp, unidentified
  source 1..800: mol_type = unassigned DNA; note = unclassified RNA viruses ShiM-2016 sequence
tgcaactgtgctttgcagcacagttgtattacttacggataatgtaattcggtatattttatcgattatgttgttgttaacagtttatgacactctaaatgagtcttacatactggcgcctaccgcggcttcagtatgtaatcaagaagaaagttccatcgactgtctaacgacagtcgtggtttctctctttatttgtattataaattgctaatatcacaattatattattccgtatattactgtgtatttctgtatcatgtgtaatatgttttctaatcacaggatgcttggtcaaggacttaaaagctcccgatagggcaccatgggagaactgattattaattcagtatcttaaacagcagtattgtctaaccacgactagcctgcgtctattttctcttttagttaaaataggacaagcctatcaccttgcgtttttgttaacgcccactagttccgattaaccaagtggttaaacttagaagttaatcaattaagagatgcattggagtcctctgctccattactctataaaaacctaccccaaagagtagaacttgagggatgatatgattatagcctaactaactggcaccataagtgaaaacgttagtccccacacatgcccggtcgtctcttgtgacggacggggaatcgtagggtcatgatcctcacgacttgaaagagcttgctcttagcaaaggatatacatcacggagatctaaggatcaatgaagtgattaaaacgtggcccgccgtattgaacatacaaacccattaatttcgggtttagttca

SEQ ID NO: 2433 - DNA, 800 bp, unidentified
  source 1..800: mol_type = unassigned DNA; note = unclassified RNA viruses ShiM-2016 sequence
gtgctgcagcgcgtaagcgctgtagcactccataggtatttggacctcaaccggtccaggtatcactctacatattatatgtgggcgtttcgacgccctgctgtatttttagagcgttaggtcgctctgcaatattgcgggcgtcaagcccgtagcattgtagaagcacagtaagattttggaactcttttaaccaggtatcgatggtgttaaaccagccatcaccccctttttgtcctgagctggacgctaaacatgctcgattgtcctatagtaagacattaaactgctttttgtccatgagtaagacataaaatcgctcaatagtcctagatatgacataaaactttctgttgtggctttaggaaccacacactagacttaaaattctgtattgaagaaatgttcggatgtagagatttaagcaacctctctgcaatacgcaatatgtaagacgtatatgtcgattgttgtgcaccctctatgatcgttccacagaattaccgagccccgtcgtgtagcgagcacctcggcggatgattagttaagccatgtcgaatatgtaccgaagcgatcctgcgtttttaataaacaatgatcttcggagccaattacatgacatgcccaggctactatctgcgacgctgttaggtacgagtgtaagaaaaatttcttatacgttgaattttgatgttcgagtgccatttaaggctatcattataggttattcctatgtacttgatgctagccaaatttaaaacctatatggtcagttgtgaactgtgaatcactcggcttgg

SEQ ID NO: 2434 - DNA, 801 bp, unidentified
  source 1..801: mol_type = unassigned DNA; note = unclassified Mitovirus sequence
ggggtagactcctaagataggagcctatctcggccaaagacgaggccgatgatgatcagattcatcatatgaagatgacatcaccacaacgcgaggttgcggttaggaatgtcccttgattagtaaccaaggcacaaccctttgcataaggaagtagacgttgggttgaaatacctaagatccataagatttgaagagataacatcaatatcaaaccatatgggttatagtatgtcgaccttctattctatctggtgtcgaatcagattagaaagacaggacgaaccgtactagacggcccttatttgcttttgcgatccgcagaaggaacctttggaggttcttccggggtggaatatataattccggagatcaatgactttcgtcattccaaagattaagtgttgagtgctctgatcggctgtatgaaaattacagtccttcatcctagcacttctttaatggggtgacaattttacaaagttattgtgaaccagaattggtattccaataagcatatactcatacgcttattgttaatcacgatattgtatatgtggaaggataatccaacaggtaaccttaatggtacctgtgaggcaactctgctattaatacgcagagtagaggtaagtaattcacctcacccttacaggaggtctaccagactctcctagagtagctgcagccccttggacctaatgtgaaaacattgggtccttaactaatcccgttaaacggagaagagggaaactgacttttacatgacctagttaacgatacaacctttaatcacaaaat

SEQ ID NO: 2435 - DNA, 801 bp, unidentified
  source 1..801: mol_type = unassigned DNA; note = unclassified Picornavirales sequence
cagtgtgtatgccatccctcatagcatgcctatgactgatggattcacaaccctttcataacccctcccctaattcccaccttgcaaccatacgctttactccgcttcgggttttgcggcccgatgtcgtgaagaaacggttacgcaaacttagtggcgaacggggcctgccaccataagtggccccattagaagaatgtacgatccgcccagtaggcggccaccatccaggtggtttacgggcaagcacttctgtttccccggtgacgttacataggatgtccccacgtctgaaagtgactgatccgttacccgcctcaccactgcgagacggttagtacgatgtaatagctgatcaccgttgatccgggcgttttccccccgcccagaaacatgtgatgaggagcggcatccctcctatggcaacatagggcctctcctgcgttggcacgtgggctccttgagcacggtgtgatgtgaaagtcatccgaagaccttattgcgctggtgttgagtcctccgcccccctgaatgcggctaatcctaactccggatcatccgccggcaagcccgccggtagggtgtcgtaacgcgtaagtctggagcggaaccgactactttgggtgtggcgtgtttccttatttgtttggttgattgcatatggtgacaattcgttgtattgacgtttgccacttcccctgcaaatattaccaaaccaggtgctgtttttgtgctaactcctgccttactattaccaagaaattttcagagtcacttattccctcggttgtttggagcata

SEQ ID NO: 2436 - DNA, 801 bp, unidentified
  source 1..801: mol_type = unassigned DNA; note = unclassified RNA viruses ShiM-2016 sequence
cgagggggtagtattaactaccccctcggtatatgaagtcatagacgagacttcttaatttacacttagtctattctttggtcgtatggtatctacgggaccatgcctcacgacgtccaatgtcaataagtggcgctgacacgctagtccgctataagcgggtcactggccatgagatgaaaagcctattctgaatatgattatttgtaagttatttacattcgcgaaccccataatttgagatacagtatgttcgcttcggagcatcctggagcattaacggttaacagttaccggctcgaaattgcacaacaacatcgtgcatcttgaccatttactttacgccaatgatggagtaaccatttcaccgacaagctagtactcttgtacgaaacactaggattgaaatgttcgaaactgattttagtattgtaggtcaccactttttactcttacgagagaggacgtagctttcccacaagcacgtaatagtgatgaaaattcaccattaagggagcagtaagcgctgtctgaacaaatgctgcgtatgtgcacacgcaatagaagaatgcacccttttaccttgccggtgctctcgcgagcatcgggttcaagtccttcacgaatttccgttgattatgacgattgtcccagattttctggttgtacgataagagtcaactgataataggaagtagtgaacttaattgtttgcaatgtcccttggaggcgcccagacatcaccaaagccatcttttggctttggcgttatttgggcagaacctggttaccgaaactatc

SEQ ID NO: 2437 - DNA, 801 bp, unidentified
  source 1..801: mol_type = unassigned DNA; note = unclassified RNA viruses ShiM-2016 sequence
cttctttagattagtagtaaatatttgtttctgttcattggaaaactatcagtaatataattattgttgttatgactgatgtgcccaatttttggaacggtaacgactgcgtagcatcccccaatgtaggactacgtagacgcttagtcggtaattgtagctattgatagttacatttcgtgacaggttgaatgaatattaaaaataatcatagtacaccaatttgatgtaggccaacccgttgtttgtatatgcatgtttcatatttgcgtttatatacatttgacaaacagtttttcgtaaaaagggctttactgttgtgaataaagctcgcgccgttttgatgtggtaagttaggccgcaccgttgggcgcacgagatttgaagaaaaaacaaaataaaaagaaaataatgccaaagaaaaaggtagcagaactaccatgtatgtttaaaagtgctggcagcaaaccttgaatgcaatgttggagcatggtatgagtacactgactcgtattgatataagaggttttctctgcatagtcactgcaagttatacggttcacactagtatcatatgttacaaatgcgtttgttgagtagttgtttagtttttaatgcgttatgcaccctaggtaattagtcaagtagtatgagtgatcatgtgcgttgtttttatgttacgtccagggtaaaagtcccaggaacagtttaccgctcctgtagagcgggtagccgagctccgggcgataaacgcagcacgcaaagaccagagtgaacacagttaagtaataagtaagtaat

SEQ ID NO: 2438 - DNA, 803 bp, unidentified
  source 1..803: mol_type = unassigned DNA; note = unclassified Partitiviridae sequence
ggctcgtcccaagtcgagcttgcaattgctaattcattcctcttttcccctctccaccctcaagctctaaagcaattatagcaaccatgcagttcgagccgccgatcaagccagccgacatgaccattaagatcactgatggagacaatagcaaccaaagcatcgattcgaatggcatcgtgattggccgctggaagaccggtctctttggtttcaccgattcgatagtgcccaatggcgtcatgtcttgttgctgtcccggtcttgtggtagctcagatatcggctcgtcttggctttatgccattttattacgtgctcagtatctttggagggctttatctagtagcacttattgcggtgacaacccacagtcgctttttcgactttattatatggttgtgcgttgtaatatcggccctctccatgatgcgtttgcgctggcgtattcgatcacttttcagtattcctggatctcatgctgaggacgccgccttcagtttttgctgtggatgctgctcgatcgcacagatggcctcgcatgttgaatcgtatgagccgggcactttttcatttgccccacgcgccacacttcaaggctactcactgaattaaggctttattataaaatagaccatcactatttgcctggaggaagatgggtacgcaagggtacagatataatctctaatactatttacataggcgatttccattcgaaactgaactccgtaactcaatctttgctatactgtcgcaaatttttcagctcttcctacgcttttttcgtaacctctacccact

SEQ ID NO: 2439 - DNA, 803 bp, Human orthorubulavirus 4
  source 1..803: mol_type = genomic DNA
tgcaatcaaagcattagaggtgaggttagacaggatcgaagggaaagttgacaaaattatgctcacccaaaatacaattcagcaaacaaaaaatgacactcaacaaattaaaggctcacttgcaacaattgagggcctaatcacaacaatgaaaataatggaccctggagtcccatcaaaagtaagtcttagaagcttaaacaaagagccagagcaagttccaataatcgtcactggtactggcgatgtctcaaaatttgttgatcaagacaatacaataacacttgatccgttagcaagacccattttgtccggaaccaagcaaacaactgatgaaaggagagcaggtgttcgtatagatgcacttaaaataacagtatcagaaatgattcgagatctatttggagactgtgataagagcagaaaacttcttgaatcaataaacatggcaaccacagagcaagaaatcaacctgatcaaaactaatgctcttagaagcatcacttaaactatgagatctatgaaccacggaggtcacagtgacccaaattcactcaatacgccaagcaatcaaccccacactcagaagggacaactgcaccgcatccctaagaatcgacaccaactcaagcgacggcgacatcaatcatcacaaaacaaaatacagaacatcagcactgcatacaaaatcaccccccggcacacataattcatcgaccgacagattccctccatgacattacaaagtatttaagaaaaaaaccaaaagtaaggggggacccatcatccaatcgactgtggcc

SEQ ID NO: 2440 - DNA, 804 bp, unidentified
  source 1..804: mol_type = unassigned DNA; note = Weivirus-like virus sp. isolate cra070shi3 genomic sequence.1 sequence
aaatcccctccattagggccggtcatctgcaaccggtagagttattttgtttatcttaggaaaacgtggcatctcaacaccaaaaacctgtaaaaaagggctgtttaactcgcattactgctaaagtacggtaaagctaaccggtaaaaagacccgggggtggaaatcccccgggctctttttaccggttagctttaccgtactttagcagtaatgcgagttaaacagcccttttttacaggtttttggtgttgagatgccacgttttcctaagataaacaaaataactctaccggttgcagatgaccggccctaatggaggggatttctgcctcaaagtttcacatactaagttgtgagtgtcacgcactttacgcgtttttagaattagattagatatccgacttactacatcaggacattaggtcttttcacattttccgttcgtctgataatgaccgctgttggttaatattttgatgggtttaacccactaactccaaccaggcattatttttcgttcacattttccattaaaactaagaatgaccacgtttggatacgctgtctgctttgaggtttttgcttacattgaaatagagcgcggctctaattactcattgaagcaaaggctagcttagtgacactggggccacacttcttgtgttatcgcttagtaacgcgctacggcgtcttcccccactatcgcaatatgtgcgggatttagtcaggggcagtgcctgacactttattgcgtttttctatattttgccgttttggacggccccacagctggtaacacct

SEQ ID NO: 2441 - DNA, 806 bp, unidentified
  source 1..806: mol_type = unassigned DNA; note = unclassified Riboviria sequence
taaggcataataaccgaagttacccttaaaaccaacattgaaaacaatattctacctaaaagtcgtgtgtacatatatatatgtacacacgacttttaggtagaatattgttttcaatgttggttttaagggtaacttcggttattatgccttacggtcttcattgttaatggttttcgcggctcgcagtccctaattgttgaattgttcttactgatacgttgtcttcattgttgatggtaagtagagtggtttttcagaagatagctctattattactgttttcaatgttgatggccttcgtttggactttctttattaatgacggtaatcaaagattacacccaattttagaattaaacttttaagtagggtatgctgattttatcctctctcttaattgattttgatatctggtaattgatctcgaaagaagatgcgtcttctggatttgtaatagctgggccttaagatcgtaggtgttattacatggggaaacacattactttggttgatgatgatatttcgatgatgattcatgatgcatgtgcttgtattaagcctgatacaagaacttactaatttgcatagtgcaaagggttagcatatgatttctctgatgtggattttgacactgcctttgattaggatgtgtggatgatcttgaagcatcattggatgtttatgcgagcgtgttgtttaccaatttcaggatatgtggaagcggttgtgtatgatctatacgcacatttagttcccagagggcgttgtcgtctccccctaagcaagggagaaacacgtggcac

SEQ ID NO: 2442 - DNA, 806 bp, unidentified
  source 1..806: mol_type = unassigned DNA; note = unclassified RNA viruses ShiM-2016 sequence
cccgccgcccttcaggcgacgagtggaggtcacaagccctcataaactgtggagtgtaagacacatgccctttaaaggcatgaagattcttgcttattttagcagatgaatcatactagcttgctttacaatattagcaatcgagccagaccacgaggattgaacttcaattgaaaatgaaggacggtccgaatgccctcactttatagagaagtgtgccctcactttatagagcagtagcgttttccctcactctataaagcagatccatattataattgttgccctcacttgattgaatatttcaagccagcgaagcaagttggtgtggtcccggcgtgttaggtgagccgtttaagacatctaacaaatatttagtttctttcttttctcgaactaaattctttacttcaatcgctgaaacttgtatgtgacttaacttaggccagcatattttgtgtaagcgcagtgatagtctgactctatccgaggaatcactacctcgttaaataaatgtggcccggccagggttatccaagcctgagacttcgaaactctcaggtggcatacttcaagcggagcgtaagacctaaccaccgttggctagtggcgcagtatgagcgaattaatggattgtagcaaagtagctttgaataactcctacgatcagcacgcaaccgggttttcgtgccccggcattatgcaactcatattaacggctagcaaagtctatgtccttgtgtggacatgtgtgtgtgggcccttaaccgggttatttgattaggctatattcgcgaccatatatt

SEQ ID NO: 2443 - DNA, 807 bp, unidentified
  source 1..807: mol_type = unassigned DNA; note = unclassified Sopolycivirus sequence
tacacaacaatcaatgaatttacccccacgtgatgtagttgtgcctaacgttcctgaaacacaaactaatatgggaaccttagaacacactggattacctattgaacctatttggcaaattacggatatacctccggattttaaatggatgactgaacaatggaaatttcacacaacttttgaagtaaaagatacacaacttcctggagatgttatttatacaacacgcgttgttcaatctgatgcaagtaaggattctaatttaacattggcacaatggcatgatattccattcgcttgttctaagtggtggaatggaaaaatttcttatcgttttacgatagttaaaccccctcgtgttgttggaaaattattaattcgatatcgtcaagattgtttcgataaatggaatgctgttgatgctcctagctctggttgggacatcaaggattcgaaaatgcgctcaattttgaaagaatgggacttaggacaatcatcacagtttgaatttgatattacaggctcaaacccaattcgtgcccgacccacccatctttatgaaaataaaccgcaaatagatggaactagtttaagtttaaacgatgttgctgaattccgaacaccttatatcctgtttgaaatgggacgtatcagcatagaagttgctcaaaccatatcacctggtggaatttttccgagcaattatatagttatagttgagaagtgtttgaaggatagtgagtttatgaccccaacggacccccgaactgatcataaattgactttatataattctattactgaatc

SEQ ID NO: 2444 - DNA, 807 bp, unidentified
  source 1..807: mol_type = unassigned DNA; note = unclassified RNA viruses ShiM-2016 sequence
ctccacgtgcgcgatttgcgcacgtggagttatagtgtagttggcgatcttcttcgcccgatttaagtgttaaggtagtgctattaagcgttacgacgctttctagttctgcacttaatacttttttttgttttacatctttatcatacccgttccctgggatagtgggaccccctctgtcatgaggtaagacattaactgagattagacaggtctgtgaagtatgtcaaacgtatatatagtaataccgatttcttatgcctctataggaagatgaagtatttaactggtggtgtgtacttgtttttaacaagcgcgtcctttatggattcacactttatcacctaggaataggtgacaccaagttactcgtaagagagactatcttgtaatcggtcatgaattgataattcagactcgattgtaaactgatctttattgatcactctagcgcctacttggcgtattttgaaagagtaaggagttcgagacgtgccctactagcatgggccgacgtaatggtcaagcgaaactcgatttatctcattagttccggtgagacttcagaatcacatatcttgagattggcactcgatgatagattgtgagctacttgacaaatataatatttaggacactttaactagcatttagcaatagttttatcgcaatgtttagggtattcagaaaccttggtatttataccgtaagacgatttatgagttatttcgcgaattttagtgtgagtgtgatgtggattatttttgcattcgagggactaccatccttttattttttgaacacagc

SEQ ID NO: 2445 - DNA, 810 bp, unidentified
  source 1..810: mol_type = unassigned DNA; note = unclassified RNA viruses ShiM-2016 sequence
gcatggggacgatatccccatgcgatcggcctgtgttaatcagactctgttatacctagtgtcttatttggcttccagtaagacacaatttggtatcagacaataattaacaaaacaaattaattttaaggtataattttaagtaacttagttcaaagggctattaaacccctgattagtaacaaaattataaaatactcggttctgaccggggtaattcttttaacaataatatatgataattttatcgaagataacagttagcacctaccagatggcgctgttgcgtagagtataacccccaactctacttcccaactttgataatttttaattatatttttggagaattatgtataaaaattgaggaaacccctcaggtttaactacgacggcgaattaagatgagcgaaagtaaagtgcttaccaaggaggcgtaataatagggacccctctaaccagcaaacactggacgttacttaaggtaagaattacattttattagtagccggcttatagtaggcgtttaaggttaagcgacaaccctagtggtttacagtattctagcctatgtgctaatcctcgacggcagtagatcgctggcgatcgggaatatacctggatgtgaattaagtaaatctataggtatggatactcttctgaccctccagttttacactgtactaatcagctgaggaagagcagattatttcctttttttttcttcttatggtgacaattttatgatttatttataaagttgttatttaatttgaattttattgtattgacttatatattttatttaaa

SEQ ID NO: 2446 - DNA, 811 bp, unidentified
  source 1..811: mol_type = unassigned DNA; note = unclassified RNA viruses ShiM-2016 sequence
tatgcaacttcctattgaagttgcatcgagtgttgctgtagttatttgtgagctacgcattaaatttgactattcactaccaaagtagacgtcaatgtccctattggacttggctatctgctttatgttgtattttgaagcatctttgtgttgctcttctgagtagcatgaagtgttttcacctttatatttagttttttgcaatcttttgattgtcaaaccactaccctagtaaaattacatcggtaattcgtctttatgtttgtgggtctcaccacccactacttgtatattatatatgtttgatcggcattggttataaaaatttttgtatttttaattaattatttgtttaaaaactgtcaatgtcttaaactagtctttgtttctcatcttcggtgaaagttgttgcactttgtgctgacgacttttattatgcgaagtaggttgtatctgcctgagtgaggtacgtattcaaagattaagactgttcgaatcctgtagcgttccgtgattggtcttgagccatgagccgtccgcgtaacaaggtaaacagtaaacaaaaactgtaatagacttattatttaacactatcgcagtactgctctgatcaagcagttgattggtttcgcaagccatgacaaaagggtcatctatgatacagaaaatagacgttaagcaaggtccgaaataccaagggtcccgcttcaaccgatgaagccctggaaacaattattctctctgctgtttgaagtgcttaacaaattctcagtcattctccactgagtcttcttaattcacttccataatc

SEQ ID NO: 2447 - DNA, 812 bp, unidentified
  source 1..812: mol_type = unassigned DNA; note = unclassified Riboviria sequence
gacataaacgctaaaggcaagataggataagtggaaagtcacttctgacgccataaaaacatgcagtccctggaatccactatgacagttaaagaggctggagagctgttaaaccttatgctcacgcatcatggccaatctcggagggatatcctcattctgttcgctgactttttcatgaagatgtcaacggttgtagcagaaaggtcgtcaagtgcatggtctgagcggatgtcacgagcagcagcttgtttcaattctgtaaacggttctatgagaagtgaggaattcagtaaggagcgccttcaactttccactgcaatcatagcacttagtagcgcaacagatgccactccgacgctcgatttcttccggttgaacacaccagagatcctgatagaggttcaatctttccgctcaatgcaccaggttgatcaattgtccatccaactctctatgaggtctgtatttatgttctggcttgcattcgaccaactcaggattatcgaagagtcgcgctctatagtggaagatgcactggcaatgagcttgagtaaatttgtcgaagagaatgcagtagtagcaaggtggttttcattgatgatgacagagaagttcgatgcttccatatgtacctccgtactcgatgatactgtcatggtgatttccagatgattctgcgagttttcctttgtcgtccgagattcatttccatatgatcttaaaaaaactaagagaatgaatcatcacgattttatcattataagtttaagaacaatcactctcagcgaactacagattactacagaatc

SEQ ID NO: 2448 - DNA, 813 bp, unidentified
  source 1..813: mol_type = unassigned DNA; note = unclassified RNA viruses ShiM-2016 sequence
gggtgaggggaattcggggcgtatgccgcgccacagtggcgtaattggcagcccctgcattaggcccaacagaaaaacctaaagagggccgcattttttccgggcaccgtgggcccggtgaaggggagcggcagggggacaatacctgtcgtgagatgaccgcctcgcatgtaacgggagtttaccgtctcacttggagttgtgcgagttgtaccgcgtcccaacgggagtgtcagccttgttcttccagccctagccggtccgcagccggtgggtcagagcctgagtggggtcctactccgcccctgaggtgtggccttgcacgaccgtggatatgggtcccacgtgggtttcgccagcccttaagtcgtgtatcccgagtcccccattgggaatggcccctccagagcgtgtacattttgagcgctcgtacgaggaacgtcgaagctggttgcaggcgcgaaatcgcctgcagttggttaggggaccagtgatgatgtctacggaaccgggggcggcggccgaaaccgccgcggatgacgcaggagaagcaacgtacccgatctgaccgagcttgagccggcgatggaaggacgggcaacctgctgtgtgagggtgcatcgcgtaataccgaccttgtcgggcccatcctccagtcatccacccatgtacagtctgcgggcgtctggtgtgcgaacccccggcccggtccgggcacaccagacgcatgtatagggccgttttggccatggctcaggcgatccccgcctgagacggttgttttgtttgttttcttttttttgtttggacgtg

SEQ ID NO: 2449 - DNA, 815 bp, unidentified
  source 1..815: mol_type = unassigned DNA; note = unclassified Picornavirales sequence
tcccgcgcacgcgaaagcgtgtgcggagttgttgttgtagttggcgtttatacgcccatcatgagttcaaagtaccttctttgctgcgttacgacgcagccccgaagttcttttaacttttgttgtttacgatatttatcagacccgttccctgggatagtgggacccctgtcatgaggataatcattactgacgttagacagacgtatgaagtatgataaattgtaataagtaactatgaaagagtttattcctcaaactcttaatgattagtttactaaattggtgtgtaccttcctttacggaaggcgcgtccattatgtttttaacatttatggattcacattttttagtctagtaatagactacgatttagttcaggtaagactgacttttctggaatcggttatggattgataatcctgacttgttttcaaatgatcttgattgatctctcttatgcctattaggcgtttatttaaagagtaagacgttgaattatgtacccttctagcatgggtagacttaattgtcacacattgttcattaagactgttaattccggcagtcagtaagaattcagtgttctgagggttggcacccgatgatgacactgttgctactttaatttaaacaaattttaggacatacatttaatttcacaataaattattgtcgcgaagtttggagtattcaaaaactctgtagttcgctacgtaagacgactttatgttttgtgtattgattttgtatgagagagctatttcttgtattatttgaaatcgagaaaccactccttttatcttggatacagc

SEQ ID NO: 2450 - DNA, 816 bp, unidentified
  source 1..816: mol_type = unassigned DNA; note = unclassified Iflavirus sequence
aatccctccatacatcttaccctacaagggtcgtaaatctgttcaaagttaatttcaagcagagaacagtagatattttatttaattttaagacatactttagttcacgaggctatctatttattagaaccctctattagtaacaaaacattaaaatactcgtttcagaacggggcttcattttgaagtgaataaaatatttagataacttagtaagtacctgaacgaattataaatagtaaaagaacgagttcgttaggattgaatcgtaaattttaaataattcaattactatatgcttatgccaggtatagttctttctatatatttgacttattatatattatagtgtactagtctacataaatccattgtagatgatgaatatggcaagttggaaccagattactcatattcttgtggcgtagagtgctctccaaagctctacggtcccctataattataataatgatagtatatagaggagaatagtatcgtttctcttttgaatgagtataagtacgtaactttagtattcgaactttataaggatctcgtgggaacgctagactgcgacttaagtgaatagcctttaatcacttagtacaatttgtttcagtataaacatgtaggccggcttgctacgtccgcagaggagtcgttaactatttatcattttggtaacttagtcctcagacggtgacggatggaaagacatcgattccttttatatgcagacaacaattattgatttgattttatttccttgtttgatatacacttgttttatttccctttataatcaattttgttaat

SEQ ID NO: 2451 - DNA, 817 bp, unidentified
  source 1..817: mol_type = unassigned DNA; note = unclassified environmental samples sequence
tagtgtgacgcctatacagcgtcacagatcttcctaccgaaggttggtgggttactatgcggagtcgcctgtcgagggccatccacaggagtgggcaaccctcgggagatgaaccggtgaccctttatcgctccgcttgggtcccggccctacctattttctcgttcacctggcgaggaagtaggggggtgggcgtatgcctgccgtacgagtaattgtacggcgtgatttcggtggggtacttagccttcctgctaggttcctcaccagaatttccccactagatctatccaatagttgtgggcagggtctatttttgcccagtgtatatggaaacactggagtctcttatagggtctgctcatgagagcactaactaagtcgatagcttactgatagtgagtaagtactccttatataacaccttatatgaccactcctgcgaaatgcaggggtacctgaagtcttacagcgccgagacaatgagattctcggtggccaaaacgtcggtttggtatgaccagggcgtgctaagtgatctggcgctcgtttaggcggcggttccatatgaaccccaccggctaaacttgcttccttcattggataagatctaaatgccgagagactgcaacggccacaatgttgtaggggaacagtccctccttacgttagggtaagggggcagttggtgccttcactgttataccgaaagatttatgacaagcgatttccaagtgattttttagattgagaaccgagcgagcaaatttgaaagccagcgttaagttgagaaaactattcgagcctattgggcgtt

SEQ ID NO: 2452 - DNA, 817 bp, unidentified
  source 1..817: mol_type = unassigned DNA; note = unclassified RNA viruses ShiM-2016 sequence
cacgtgattcccggaatttttatcggcgttaacgcatattattacatttattagtacgtataatagcaatattgtattgtattagttagtgtagtatgtgtgttggtgtctggaatcgttactaagaaattagtagtttataagcagaaatgcttattctcaatttttatgtaggtaatagggaaaccgtcaaatgcagtcgtagggaataaataacttacaactgatacctacattaggattcaacgacgattacatagttgtgattttcgttgtcttaggaaatccggaaagtatttacataatataagtacacgtagttatcttgaagggtacccctcgtccgtaaggaagtcagttgtttccccttctgactagagccggtagctgactaagcccgatacgccttaactgtgttagtttaggacctttggctgcttagagtaacgtgctctcccaatggataggaactgcttttacaaattatacatattgagctataatgatttagctactcatttgtcgtgggtgtatgtataaggcgtaatttctaactcctatttggaacatggctagtttcgccgctagtggtgttgtcgtaaggccacagaggtaatgaaagtatttataagaactaaattaacggaacggattcaaatggattggaacatggactcaatatgaagataataatccaataccctcataggcagagtgaaataagagatagttatccattcaccgtctatttgtcgtagacacctatgtaacattggtgattattactcatggagagatatacgggcaacccccaaat

SEQ ID NO: 2453 - DNA, 818 bp, unidentified
  source 1..818: mol_type = unassigned DNA; note = unclassified RNA viruses ShiM-2016 sequence
gagcttccagtctatagtaagtccgcattgaacggccttatgataagtcttctgaagagttttgacttcaatgagtcgatgtttgagcgaatgctcacatccattttgtgatcacttttgtgatatttgttttaaataaatttaataaataaataaaaatgatatatgttaatatttgagcttggtaaagctacaatattgaaaatacgtttgagcgccaatatattgggtttgagcccttggccgggtgtcgtgattaataatcccatgccccaattgttgttgtttagcgtatttgataattgtaggatagagaccatacagcgctatacttgctgtaaagattatatactacagaagttcgtaaatgtgcttattgtaggagctctggaatatggtgcgcgttaaataggcgcaagtttcactggctttgtttagggtatttacctgacttgatgtatataattgtttatcaacggatgatatggaaaaggtgacgttctcacttttagatcgcagtcatcatagcactcctggaggaggctatagtatatcgcgaagacgtcattttgatatttgacggttaaggcgtaaagaatccaccctgttatagaatagatacgagtcgcacgtcgcgccagtagtgattctatattaaatgtgatcacctccttatttctcttggaggtttctagttcgagactacaggcattcagccaaccccccactttccaggaaacaatagagatttatatatttattattattattataatattcttcattcattcatttctctattgttcctattttatatc

SEQ ID NO: 2454 - DNA, 819 bp, unidentified
  source 1..819: mol_type = unassigned DNA; note = unclassified Iflaviridae sequence
ccccttttcatcttcacaataatatctattatgaatctacactactagttggattttcattgccttacagaatacgtatagtgtattgctggactagatggtgtatgttgatatagaattattttgaagtaaagccccaaacaaagcaaccccgctctcttttagttcttaagtttaattattaatttattttaagttccctcccctattccaatatccctattatcctttagtttaaacaagttgataggcctgggaaccctggagactttgagaaaaacccataatgatttagcaatttcacatggaactgattgagtgactaagtgcctaaatgtaggttgagtttcgacaaaaagcctttacttagttagacaacactccgatgttaatctcggaatttcttgtgacggtttctatatttgttcctgatagtcagacgtatagattctaatgtacaagaccgaagacttaactacgtttagtggtagtatattatacacggtgtatgaacgatttattcaagtaaaagccgtgagttatataatatatatatcagattgttgagcttgatagcgtgcgaaacgtgcagtgattgtgattttggtttatcttgaaaagtatcatagaaaaatattaattattaatgtgctatggatagatgcgctacgccccaaatccttcagagctatcccacgactggcatcgtgtaattaaatgtggtaagttaatatgagatgactcactgtgtgcccggttgctttgctagtttgttcaccgtaaggaagaaactagttttacaaaccttccaattctttt

SEQ ID NO: 2455 - DNA, 820 bp, unidentified
  source 1..820: mol_type = unassigned DNA; note = unclassified Riboviria sequence
tcattaccttgttgtttattatgataagctagagtcggcctctttcatagtgacttgttttgacgtagttccccgtatcgtagcattgctgatacgttcagttttcgacctaggcatctttaatgtagttcggttgtagattcagataaatgcacaacaaaatggttgtaaacaaccagaaaggaactctttgtttaattttcttaaactttgctaaagttttagttattctttgaccctggctcgttattatttcgcattactagaaagagaaatatgcgtgagccataaagttaatttattaactatgctttagaccaccttcttctgtaacaatatcgcagaagatagtcccgtaaatgatgattcactgaaagggcagtggtaacaccaccgtcggaatgaaccttttaacaggggattgacccgagtccttgacaacccaccatttgtagttgatactatatcctacaccatgctttatgggagcaccatccacggttcattagtagttcgcgaaattgaagaattaaacctgttatgaaaggatttagtaggacacgacctgtcttgatgtcattcgagtaggagccgttaacaatccgaaaggtctaagtaatgcagcttaattccataggtttctgcgggattgtcatttcgcctttctcatctccttagggaccagtatgctggtccctttggagccctttcatagtgcgctgattgctagtaacaatcagtgtactaagtttgggattctttcgatttaattctttagaggaatcccctcgcccaactttttatcatacagtacaacatc

SEQ ID NO: 2456 - DNA, 821 bp, unidentified
  source 1..821: mol_type = unassigned DNA; note = unclassified Torovirus sequence
acgtatctttagaagtttatgaagccttgaaataaaaagctataaaccttattacggttagtccaccacacggctaaattttcagtgcgcagtcactagtcagggaggttcagccctgtcttttacttctgtgtaggaatctgtacagatatattgtctgcatactagtagttacaagagagtgcatttagtacttacaagcgggtcaaaccgccctccggaaaggtgcactttccctcccgaacgtgtgtagaccgtgaccattgtgtctagctatctgtaacaaactatacggttgtattttactcaactttaaggcttttataaaacttgcaagtgccaattttggcatttgttctttagccttttaaacctcacctccctacgggcaggcgcttaagcgactaaacgaggtatagccaattagttgttactcccctccagctttgctgcaggcccttagtttgggactaaagtgagtaaacatactttttggattacatctttctaaactactgccaaactgttgttttatatatttaagttttgcggttttacgctatttacttacggttggcagtttgtttggttgtttgcacaattttttgttataccaatttttactgtgtttttactttttacagttaaggctattttttatcttcttaggcttgttgaattaagtttttccactttaataatttggcttatagaggttttaagaaaaaggaaacaacaatttagacgtcgttctttagacgtctaaattttaaatctggccaataaatatcaggttattgactccttgtggagcgagactt

SEQ ID NO: 2457 - DNA, 825 bp, unidentified
  source 1..825: mol_type = unassigned DNA; note = unclassified Luteovirus sequence
tgataactttgcaaggtcccaaataggtagacgcagctccatcaccttcacccaagcctgacccaaaacccagtcctcctccaccttcaccgaaacccgcaaaggaaaggcgatttttcgcctactctggtataccaaagacgaagatcaaaactaaaggcaatgacgactccatcattgcctcctccaacttggagcagcaggtcttccggtatatagaggcaaacaatcagaaagacgtcacgttgaacgcgcgttggtattcgacttccacagtgaagaacaagccaatgattgtattcgacgtgcccgctggtgattggtttgttgatttcctttgtgagggttacatgcctattgaggcaataggtggtagtgaggaccagaagtggatgggaattgtagcgtacaacaatgataccgcggatatttggtccgtcggggtgtacgacaatgtctcaatcactgagctcaacataacttcctcttggaagcttggtcacaaagatttagagctcaatgggtgtcatttccatgacggtcaggttgtagagagagatagcatcggttcatgtaaagtatcatccaataccggtggatctctctttttggtggcaccatccattatgaagacagcaaaatacaactactgtgtctcatatggcgattacactgacaaaaccttggagtttggttttgtatccatggtgtttgatgagcgtgatggagctaacaccgccgttccgcacattagaagagagctcaagaatgttaaatatcttcggccttctcctgtgcgtctgaacgacggcggtgattatattg

SEQ ID NO: 2458 - DNA, 826 bp, unidentified
  source 1..826: mol_type = unassigned DNA; note = unclassified Hepeviridae sequence
actacacttcaccagaaagtgttcaaaaggtcctgccgggtaaacccgacagggccttttgaacactttctggtgaagtgtagtatcgccagtgggtttctccagccaaatctggaggagcgggctgcagcgtgactgcagtggtgtgacccggtaccatgattctgggaaatggtgtgaatgagaagtgtgattgagtgtttagccccgacccactggggtttcgctactgttggtgcagtggttgagcattgtggggtgaaataggggatacttcttttaggagcagtcttttagccatattggctgtgacatttaaattcttaatacgtctggttcttgataccagcgctcatttcttctttctatcattcttctcttactggctgtctaactgccaagagctgctaccgctgcgcccggcggggttaactccaggactagcctggagctgtggccgccaaaaagttagatgctgtgactaaccaggcggtgagctctcctccagtgtccacattgggggtccggtagcgatcggggtcgacaggtaggctacgggtgaaacctgtctgggttactactatgtaggagaaccactggagcgctaagcacgcggacatttgtgagatccaaagtcaggcaaaccagcttggtatgggtcaaaaacatctcaacgcgagtggggcggtgtctccagggccccgcgggacctattcccctggtgtggcgtagctggagctgcgcccaccttcctgtatgcagtactccccttgagggggctaatcaggggcatgttaggttttaaaccacaacagtgttgaagttc

SEQ ID NO: 2459 - DNA, 826 bp, unidentified
  source 1..826: mol_type = unassigned DNA; note = Apodemus agrarius picornavirus strain Longquan-Aa118 polyprotein1 sequence
tttgaaaggggtgcggatatcatggcgtttctcgccatgatatccgcacattgcaaacccatattgcatacccactgggtatgcattatggggaggcccctttcacccctccccccccaattaccttttccccctctagtaaccatacgctttactcagcgtaactactccgggttacgtgatgaagaagaggctacggagattctcgggctacggccctggagccactccggctcctaaagatttagaagtttgagcacacccgcccactagggccccccatccaggggggcaacgggcaagcacttctgtttccccggtatgatctgataggctgtaaccacggctgaaacagagattatcgttatccgcttcactacttcgagaagcctagtaatgatgggtgaaattgaatccgttgatccggtgtctcccccacaccagaaactcatgatgagggttgccatcccggctacggcgacgtagcgggcatccctgcgctggcatgaggcctcttaggaggacggatgatatggatcttgtcgtgaagagcctattgagctagtgtcgactcctccgcccccgtgaatgcggctaatcctaaccccggagcaggtgggtccaatccagggcctggcctgtcgtaatgcgtaagtctgggacggaaccgactactttcgggaaggcgtgtttccatttgttcattatttgtgtgtttatggtgacaactctgggtaaacgttctattgcgtttattgagagattcccaacaattgaacaaacgagaactacctgttttattaaatttacacagagaagaattaca

SEQ ID NO: 2460 - DNA, 827 bp, unidentified
  source 1..827: mol_type = unassigned DNA; note = unclassified Partitiviridae sequence
tgtataatgggtttggaatccatatacatcctgaaatcgttcattgttgcatcgcgagctggagttatcgcgggggagtttatctcttctagggaaatgatggcgtgacttaagaccgaaaagtgtcgaaaagcgttggaccggcctctgtttacaagccgcctctattatgaatgtgctccttcctctgttagtgtgagagcttaagttattagcctaggtgacgccgtagggtgctctgtgcccggggattgttgctgtaaaagagtactgaagtgcaatcggctcagaaaggctatataagagtgcctttgtcaaacggcaacctgccgcttagttggtaatcaccagccccctggcgcctaagttaagcgtctcctaacccgtggcgtaggtatctaaaaggagctgtgcaccgtatagctggaagtttcggggggtgacgtcgctgtccatgtgacacagtaacccagggtgccttcgcaagggtatacctgtggtgctatcctcactcagtcggccgggttcaactcctttatgcttataccaagatatttcctacattatatcatactatagggtgctagttatagttttattcttaatatatcgataggccaaacattcttagtttgagctctttcgtgcatttttctcacatatgtacatatgtttcactatttatcagaatactcgaaaggtataccgtactgaaaaatcggataaagaggttgacgatctaatatggtttctcaaattggaaggacgtccgaaatgggttagctttgtaatgaagtgaccagggtgaggcatgatgccgccacttc

SEQ ID NO: 2461 - DNA, 828 bp, unidentified
  source 1..828: mol_type = unassigned DNA; note = unclassified RNA viruses ShiM-2016 sequence
gggagagaaccatggattaacatccatggttctctccctacatatgattgtgtgtcgtttcaccgcgacacccggcaatcatacatattcattgcagatctcgttctgctcttattttacgtagatatagacgtgttgaataggggtagaacccctaatcgcatttgctgtatttgctttaagagacctatagaataggcaatagcttaatctatagattatgagaatgtatattaatatgatatttagtcaccactccggaaattaaccacttctaagtgatgaccgtatgaatgaaacagttgtggctactgttttgtacgtttatgccgtcaccccagagagtcaactctgagaataaatcacccacttctgcgagaagttgtagcagcctgtaaggacgagctgtgtttcgacttgttcgcatagattattgaatctcatgaactgaagtttaatgactgataattaacgcttgtaaggttttttaatcgttggaatcccacctattagtttcgatttcgcttaactgatctccacccgcagtagggttgaagagagatcatagatctaacgaacttttaggaagaattggtccaccggttttaatttgactgacgtactagtacttactataagtgaacaatatagatttatatatgcacgtttacctcatgacaacctgagtgaggaggtttggtcacctaaatttaccgtgtctctgtatgaattttgaggttatcgatagttgttctactgatgtgattgagatgatatcgtcttggtttgtttagcccgttgaggttagtccctattcccactaaaatt

SEQ ID NO: 2462 - DNA, 829 bp, unidentified
  source 1..829: mol_type = unassigned DNA; note = unclassified RNA viruses ShiM-2016 sequence
gttacctggatggcgcaagtagaagttgctttgctcagtatacttgttcatataataactaaaccttttatgtaaacctttttatatgtgtttgtgtatgtttattgtgtttgtccctacactgtgtattaggacctctatgtacgttgtcataagtcccacagtaaaacaaatataatatcaggtaattctcatgtatcaatatctctacgggtattggggaagttttcaagttttgggtgccgacgaagatgccgacgacttaggaatcaaaatgcctttatggtcatggggtgcttaatatgctatcatacctcttgcggagcttttaaagccgttcaaagtccctgtatagcagcacctcgtggggtcatgccgttgttttcctatggctagatatagctactgtccttcgttggggaaccgccctctaggcgattatgggtcctttactgatgtggttattataattggttcacaatgttcgagaaatccttcttaagaccgcttaagaatcgtcgagaccgtgaactagggtacacgcgtggagacgttccgttgtgaatcaattataatcgacatggtattggtcatgagagttattgggtctcaccaaccctcggagtaatgtatccgaatgtcctgtaagttgtttttgagcaacctcttcaggaaggtgggtttctcaccaaagaggcggatgtggccggaacccggtgacgctactcaataagagtggggctctgcggagagacgtggtgacaccttggaatagacagggatttttcagttccaaattagctttcatgtgtttgtacaaattaaattt

SEQ ID NO: 2463 - DNA, 832 bp, unidentified
  source 1..832: mol_type = unassigned DNA; note = unclassified environmental samples sequence
ctcgtgcaatggggcccctgtcccctgaccatacctacccgcctccgggccacctgagtttctgtacagagctcagacccgggggtaacaggccccattgcacgagcaggtaggtctcggggtctacccctgtcgaagttccggcttcggcaggggctgggcgtaagccagccatcagagcgatctggtggcgagatttggcactccgttaacacgtttgtggaggcggagtgttgattcacccaatagcattcttgaccatcatgggttttcacccaccctttccccctagctataggctttggggtaagggtgtgtgtaaaacccctagtagccgattgccatctgcccacacaggctcatttgaaaaagcaccgaaagctctgcggagcaccctctatcccctgcgggatttgaggaagtttgaggctcttgccttgcctccaattgatggaggtggccaaattaccctctgatgggttcgagaggtaagctaagttggcttggtagttaggcggttgtactgctcgagggcaggtttccggctgctacctttaaggtcataaatgccgagagactgcaacggccgcaatagggtagggggacagtccctagttgagttaggtcaactggggtggtttgagcgcccccacaggtaatccacacacgttaggcgagtttttccaaaatatccaagttatccaggtgatcttcgagtgtattccagacgattagagtgtttactccagatttttaaagtgtacttcaagggaatttcgtataacaagcgtaaaaaccgttcttttaagaacgaaccgtatttattgttgag

SEQ ID NO: 2464 - DNA, 832 bp, unidentified
  source 1..832: mol_type = unassigned DNA; note = UNVERIFIED: Macaque picobirnavirus 0 ORF1-like gene, complete1 sequence
agatgcatatggttttactaaacctatgcttcaaaaactcgagccatttgtattcaaagtggttagagtagaagcaacaacaacatccgtcacagaaaggaggaaatagtgtgacaagtaatcaattatcttatctagcgaatcaagaaacggttcgacacaatctagccgttgaaaatgaaactcatcgctacaacactgaagcactagctgaactaaatcggcataacttagctacagaacaaagtgcgacagtaacaaacgcaataaacgataacagccagaaggaaaacgctcgacacaatttatctcttgagcagatacaagcattagctcaaggtgaagtcggtagacacaatcaggcgagcgaagagttagctagcagtagtttgtctgagcaaatacgtcatgcgctaatttctgaagatactcagaatattttagcaggagcgcaggcacttaacgcgcaaactaatgcgttgagtcagcaggagacagccagacacaacttctcacaagagcaggtttctaattacactgctatggagcagcaccgccataaccaagcaggtgaagaactgtcatctgagagtaacttgttaagcggacagagaagtttattagactacacaacaaaacagcagaatattgatctgcaaaataatgtccttgatgaaacaaagagacataatactgttaacgaaatattaacaggggttgatcttgctcaacaaattgtaaacaaaaatctcgacagaagagatagaactacgaattccctatttaatggaattttccgaatagggtcaatggtaaaataggagggcatacc

SEQ ID NO: 2465 - DNA, 832 bp, Cardiovirus F
  source 1..832: mol_type = genomic DNA
ctagactttctaccctcttgaatggcgaattccagagtaaagtcacctctgccttgccgctatacacacccaaccaatcgattcggccccacgtgtatagccccttggtcaagtgacctcttacgtctggacgcggatttaagacctgaatatccgctgaaagttaacaccatgtttgccccgattatgtgatgtttctgctcttgctgggcggaacatccgtcgggatgccaaagcaatttgtgtccccttctttctttggacttcggtcccccggtcgaagccgcttggaataagacagggttattttccctccttcctctcttctactttgttaagctctatttaacaaaagggtatgtctggcccctcccttcttggggaatgtgcgcggcggtctttccgtctctcgaaaagcgtgcatgccagatgcaagagaaggtgaagaaagtaagttgtgtctaacgttaagacaggaacgaatgtgtctgtagcgacctctcaaaggctgcggtctccccacctggtaacaggtgccgcagcggccaaaagccacgtggttaacagccacctttgagagcggtgcaaccccagcaccacactttcgttgttgttttctcactaaccacaactcgcttctctgaagccctcttgtagagttgccaagaatgtccagaaggtaccccggtccacgggatctgatctggagctccatgcgtgtgctctacacacgttcgggagttaaaaactgtcacagcaactccaaactaggtggtcctagttttcacttttatttgtcaagtcatatggtgatggttaaaggagaacgaca

SEQ ID NO: 2466 - DNA, 832 bp, unidentified
  source 1..832: mol_type = unassigned DNA; note = unclassified RNA viruses ShiM-2016 sequence
cccggcaaagccgtccgggtgcggctttgtacgagtgggcggtggtagaccgctcgctcgtggcgctagaagtgacagcgcggagcccgacattggtgaaacatgaacgctatagagttctatcggcccacgggccgggcctcactgtccatacgcctgggggtagtcctttgcggacgctatccatcgcgtcaatgtcagtggggagctcggggtgcagggagggtaccggtgttgcattgggatagactgttttgcgcgaaaacgcttgggtgtcgaccagatttatttctaccacaacatggctttaattagcgcgtgtggcagggtctcccttgtttaatctacggcttaggcagctcattggcattcacggtatttactcttatgcattagtcaccgcacgttgaggggcggttggaccacgggtagaattctgggtggtttcatcattcctgaatccggaaacgggaagttggcggcgataatgcctatacgacctgtggcccggggactaaggcggtcaaatcaaagaaaccgcttttccaaagccagctgtcctttagagggaggctggcccacgttgttagtgggtgacatatctttctgaactctgagctctgctcacgtatttttctttggcacacgtagggtccctcccgcttacagataagcagcttaaaacgtattgctaggtagaagagttctatctaaggccacgaaaagtccttcgcgtccgcgagtacggtgcttccctcgatcagcacagcttgaagcttagtatcggtgataccttgaagaaccagagtttagaaaacaacttttaccacag

SEQ ID NO: 2467 - DNA, 833 bp, unidentified
  source 1..833: mol_type = unassigned DNA; note = unclassified Sobemovirus sequence
gatggtagagatgggcttgtgtgacccggtgcggctttttgtcaaacaagagccgcacccgtctcgtaagttgaaggaagggaggtatcggcttatctcctcggtctcaatcgtcgaccaattggtcgaaagaatgctctttggagctcagaacgagttagagattgctgagtggcaatctatcccttcaaaacccggtatggggctttccgtcatccaccaagctgacgcgatattccgtgacttgcgagtcaaacataccgtgtgtcctgcagctgaagcagacatatctggttttgattggtccgttcaggactgggaattgtgggctgatgttgaaatgagaatcgttttgggctctttcccacccatgatggctagagctgctaggaacaggttttcatgcttcatgaactcagtcctgcaactctcaaacggacagttactccagcaagagctgccggggatcatgaaatctggatcttattgcacctcctccactaattcgcggatacgttgccttatggctgagcttattggttccccatggtgcatcgccatgggtgacgactccgtggagggttttgtggagggggctagggagaagtatgcggggctggggcacttgtgcaaggattacaagccttgtgcaaccacccccacaggccagttgtatgccgtggagttctgttcccacgtgattaaacgcaataaggcgtttcttacatcatggcccaaaactctgtataggttccttagcacgccgagggagacgctggaagatctcgagagagagcttgcatcctcccccatgtggcataagattcagagtt

SEQ ID NO: 2468 - DNA, 834 bp, unidentified
  source 1..834: mol_type = unassigned DNA; note = unclassified viruses sequence
gagcttacgctccgttgggtatccctctcatacgctgttatgagacggaagggggtgaggtgttttcggattaatagcccctaaatcccaaagaggcttgtgaaacttcctgttctaaatagtcgtttcacaggccggtaatgctggaaggttatgggatgcaaccaccagtccccgcgagggggtgcgcttcggcggtctatagcagatctcgtaccggctataggcgaaatacgtaagtattccctgtatgaaaacccaaacctcctcgatcacaaaccgcctttatccccagattatagggggccctataaggccccatattaatctacgtgtacgtactactgcgagtttcgacttgtgaaatgtatgaatcactgtttactggctggactatcgatcgaggtttcggttatcataaaacaaaaactcagctgtgttttgatcaaatatcaaaacagcggctgggagtacctttcaattattgtcttcgggcaataactgatagttctttgcaagtaactttataggtagcggccttagttagggcgggacgtcctgggtggcgcgatgctggccaaaatctgttcgtcagtgctaaataggagttgggcaagtgcctgcttcttaaacgccgagagactacaacggcctcactgtgggaaaggatcaaacgacgtgatcccatggtgactaattttaggggtatagtccccctctgtgctaggaggggcttcctgcatactctatatctagcatatcgttacgatctttgaattttttacgcgctttaagtcttgagaacctactcttgggaattattttcggataatt

SEQ ID NO: 2469 - DNA, 836 bp, unidentified
  source 1..836: mol_type = unassigned DNA; note = unclassified RNA viruses ShiM-2016 sequence
accaacgccacggcttgcccgtggaatgcattaattcgtatcgttgtaattaagccattttggctaaagtcccaggccttgaggaggaaatgcctcaggggagatgacgtaggacaattgcatacccaggggatgttccgcccctctctccttgtccggggttctgaagggagaaaccctaacaagtcaggcttattcttgacccctcgcttgatgagcgcaagcagggtgcagcctgccggtccagtgggaaggagctggcctgaggtgaaagtcgtgccgaacgcgggttgacagccgcgtagggttagccgccttaatcggtacaggagttccccctctcccgcgcatccttaagggatgtgaccccagcacccaagccgtaatggcgtggaatgttggaaggggaactaaggaatggttgcgccgtgatccagcactgcttgacaaatctggactcatctagcagcaggaatgtgtattctaagccctccgacctctgacgagactatcaaacatccaaggtagcacgtgattaggttcaagtcaagtcggtgaaggtggtttcttgagccccaccttttggaaacaccaggagttgatcgccctggctcggcgccgaacggacagattcatttctgcccgatagttttggccgcgctcgtgtggagtacacattttggatgagatgtcagtgtgcctagctttcgcgagctttgcacacacaacgctctgtatatagtttcacttgtattccgtggaacgtcgaacatcgatggcccacgtggacctgggcgaagacctagttgtcgtctatcaagctttctgttttttct

SEQ ID NO: 2470 - DNA, 837 bp, unidentified
  source 1..837: mol_type = unassigned DNA; note = unclassified RNA viruses ShiM-2016 sequence
gtttatagcgcatgtagagtttttttgaagattgatcaacctaaagttgagagatgagtatacttcgtgtagatacaaattgtgaaccgtgttcgcatatacgcgaagtatatgctttcacgtttcatgcttttgtctgcatgagttatatgtcattatgagaatgatttagtttgtctcggtctttgaaaacgtttttacggttctagcagaaactaccctcgcgaagtagggtccatctgtagtcctttcggacaaacgtgttaaccggaacacgtcgtaatgttgccttaattggcattttcacgggcttcttgacttttgctccggagcatcagttatatagaagttgggtctgacgagcccttcaccatagttgtgtacgtcttagatatacactacttgtccatatgtttggacaatacatagtttatggtttagatatatatatctatgttcaagctgtttgtcagcccaagggatcacgccattgatcctcctttaatatgggtgtaaatttcttcgcactttggaaacagagtgcaagtattggcaaaaaccctaagcctgtgatttgattcaggatagccaaacgatcttcaagatcatactttttcagggggcgaaatacccagaataatcaatcctgcccgggttcgcaagaacacggggtgttaacctcatgcaatgtacaagcgctgaccttcgctctctgcttggtacttccgacgccgtcattggttaggacatgtggtgctgggcaaccagaaatgaatcccaacacgggattcatggtttctcagcattgtgacatcttgtttgcaatgctgatttatc

SEQ ID NO: 2471 - DNA, 840 bp, unidentified
  source 1..840: mol_type = unassigned DNA; note = unclassified Iflavirus sequence
cgtattttgaccgtatcgatctgtttatataatagcgacgtattttagtgagaatcgtttccttatataatatagttgatatgtgatatagtcaatatacagaagaataattgtttcctggtaattcatagcaaagtaaaatctgtccctattgtctatactagttttaagttttagttttaagacacctttcttagttttaaattttgtttgcatgttaatgttgttgaatctgcgagaaaatgttgattttgtatgaatgaaattttcctattaagttaggtccgtttgtgtttgaatgaagagtatgtattagtatgtttgtttctattcctaatccctcctttgtccttgataatctttattattagtaaattatgtagtagaactctaccggaattcgattttgtatagttcttacctgcagcggttagatgaagaactactttttctttaattattgagctcagccctgtgacgttgtatgagagtatgcttttgcattatctttactgaacgcatctatttttataggttacgatttgcgtgtttatgcattatgtcggtttaaccctataatagaagagcgttgtaatagagaagcattagaacttccttgtatgattagaatcagatcctggtaaagcaataattatagacgaagtaaagtacaattgacatgccccggtagtgaccttcagacaagtccccctctgaagttcgaatcattttctaaagtaataaagtattatcccttttcctctttttatccttggattgatttctttatttggacacgaccactgcttgtttttatgactattttgaatattttatgat

SEQ ID NO: 2472 - DNA, 840 bp, unidentified
  source 1..840: mol_type = unassigned DNA; note = unclassified RNA viruses ShiM-2016 sequence
gcggagcatgcttgtggtgtgttgagccattttggctcgcgctgtgtcgctaattagcattttgctttaattaaagtcccaggcctcagggaggaaatgccctgggggagatggcgtaggagtgtgcatacacggggatgttccgcccctcgctccaactccggggttctgaagggagaaaccccaacaagcctggcttattcttgacccctcgcccgatgagcacgggcagggcgcagcctgccggaccagtgtggagctggcctgaggtgaaggccgtgccgagcgcgggttagccgccgcgtaggattggccatccttaatcggtataggaggggcccctctcccgcgcatccctaagggatgtgaccccagcacccaagctataatggcgtggtgtgttggtagggcctccaaaaagtggttacgatgtgtcccagcactgcttgacaaatctgggcgcacctagcagcagcagcacgtttccaagcccgccgacctctcacgtggactatcaaacattcacggtagccgttgacccatttccagtcatgtcggttgtggtggctttggcttgagcgccaccattaggaaacaccaggatttagtcacctgcctgggcgccgaacgggttcgggattcttcccgtccgccgatagttttggcccagatgtgtgggaatgtgctgtgggtgtgggcgaccttcgattattgcgtcgttggtcttttgctctgtaaatagcgttcaacttttcgtggttccataagcggcccacgacgacctgggtgaggacttagtccgtgctcacgccgttgcagtgtgttagcatctcttccgcg

SEQ ID NO: 2473 - DNA, 842 bp, unidentified
  source 1..842: mol_type = unassigned DNA; note = unclassified RNA viruses ShiM-2016 sequence
catgcacagcggttttcccgctgtgcatgtgtcttcacgttgatttttcttcgaatgcgtttattcgcattttgtcttttgaatcaactcgtattgtaagtgcaattgcttgctgtgatatttcgtatacacctatagcctttgtgcacgtgtgtagacgactgtttcagtatgtttgaccattttcaatacaaacaacaagttttatgacatttcttgtgaacaaataaatgtcaccaccctagagcattgctactaagctttgttagtagaagttgtttagagtcaaaacgacggacctctatttagagaacccgtgtccgatggtgataagaactttaatcgccccgggtgagttgccctcacatctttatgatgtgtagggcgctctcggttagtattgtggtggattttataaatacgtcagatggctcgacgttaaagcctatggttgtgaatcaaccagcagaagggaaaagccaacccaaactgctttgttaaaaactttgccgaatgcggaagtaccgtgaagcaaaggacggtaaccaaacttacatgtgactgcgacggaatagcatgtattttaatccaataacgttcaccagcccaggcgggaacctgagctcaaatttatttgactcgttggttaacgccgagaaacataatcaaggtgatatgtccatgaagtgggaagcttgcttcctgtgggtatctcggaaagtttggcccggaatttattccccccaaatgagtacaccttggtcagatagatgaagtacgcactatttttagtgcgtgtttcttctatcgtgtttcatggctatttatcatttaaatagatc

SEQ ID NO: 2474 - DNA, 846 bp, unidentified
  source 1..846: mol_type = unassigned DNA; note = unclassified Bacillarnavirus sequence
gaaatatatattatgtatttcgtgctctttagcactgatctaagaaggatcttattatagattgttactttgtagcacaggaccctttttagggtcctatgttagatcgtctaactttgtatattaagatgtggacatttcagttaactattgaattacgtattatgtaatcttggtgctccagattggtaatctggagcttccattgtaacttagaattaataaatatctaaaatttaccaccttgagtgtttattctacgaatattcactctttgctctcagccttgcgctgagagcttttgctccccatttatggggagctttttgctctacacttttgtgtggagctttttcctgcctttatggcaggattttcgatgttttatctgagtcgactacggtcaagtgtttatactcagacttatcatcacctatagaaatttcaaaaattttattagttgaatttctatgattcgttacctttataagaatggtttcgtatgttcgaggaatcccctcagtactatttagtaattttgtttattaaaatctccgacgaaaggagagtttatcagaaatagaactttagtgccgaaataatcggtcctcggctacgttttaagcaacgtatcgctacatttatattatattaggtattcgcaataccatttagagattatgtatcgtttaagcatcagttaccgctggtgtagggtgttggcactcccgacttttaaatacctctacctcttttgtgagccgatatcactagattttcgtaaactactattacgattgttttaaatatagtttttcaaacacaacccccctcttcacttttatc

SEQ ID NO: 2475 - DNA, 846 bp, unidentified
  source 1..846: mol_type = unassigned DNA; note = unclassified Picornavirales sequence
cgtatattctaccattttggtaggatatacgtgagtattagtttcgacctttacgggtcaaggataattttaaaccttctttatggaggactgaatttgattgcacaattgttgtgaaccgtaaggtcatttcaactttgtttatatcaataagtcacttattttgatttgtttttaaatgtctttgatcatttaattctaaaatagagtaaactatattatcaaatctgtacgggtcttttcagacccaaataactaaatgaaaccaacccttttatgtttatatgttgtagtgcgtttattttacacgcattgtttttataagtaaaattagttgatattaatctgcctttcttaagttcaaatcttttagatacctctcgtcggaaagacagcaaattaattattttctattgttgaagtttagtggatatgtacttcttgttttccaaacatccatcataaaatattataaaatatgcccctaaaaagagccaagtattgtttaatacatttagtattgtttaactcatttatgtttcttttgcagaaaactttttataaaattactacacacagaatagaatatttctggtgtgaaatctattagcaaatctcgcaaacgcctctccgttcttttatggacgacgcgaatcgtgtagagatgataagttacagcatcagttgatgccgaggactatctagcaagttagtaaccctgtgtggaaaattttatattaataccacatcaaagtaagagtcttagatgtatgttccagtgcattgcactggatatccttagcacgggagaaataaaactgcaccccaaaacctattagtacaacc

SEQ ID NO: 2476 - DNA, 847 bp, unidentified
  source 1..847: mol_type = unassigned DNA; note = unclassified Picornavirales sequence
gtgcaacccctcatctcaaccaggtgatttgaggtattttaattcctggggttcctggcgaagaagcacaactctcgccttgataccggtgtcggctagtagatccgatggttcacctggtgcgcagcccgttccttaaaccatttaatattgcaccttgtaggactgagccctcctgcaagtagtttagtggcttactgaagaaacatttcaaaaaacaaacttaggtgtctacaatcaagacacctcaacccctgttgttcaaacaggtacaacgtcatttgtggcagatccggtgtcggccatacaaagtgttggcaggtcccaagatgtgtacgatttgtacacgcctaatagcacaagcaccattgccgattacctggctaagccatatcaagtttttgccggtactttcactgttgttgattcaattggagctattttgtatgcttcagacacaaaaccgtattatacaaattcattgaaaataaataagttgcaaggcttctttggtttgcgttccactttgtgtattcgtctggatttaaatggcacgccttatcatgcagggcgtcttcgtttatgttattatccttgtttttccctcaatgtgaggaaggggagtgctcacatcacgaatgccattcctttgtctcagttacccggtgttgacattgaagcaaatgagtcgtctgttgttctgcgtattccgtatgtagctacgtcacagtttatcgaactgactggcggagcggtcgactggggtcgtgtatatattgccgtcttgtccccgttaaggacaggccctgacaatttgctcgaggttaattaccgcgtctggacatgg

SEQ ID NO: 2477 - DNA, 847 bp, unidentified
  source 1..847: mol_type = unassigned DNA; note = unclassified RNA viruses ShiM-2016 sequence
gggggacacacccccacgcacaccgtagattaattgagacatcagttagtcttgttggaaccagttgtactgtcttttggagagttacgactctcctccagaccagacttcatgttccatcgcacttttctacaaaccattattctgaggttagccacctcgtgcaacggctcatagacgcatacatgctcagtatacgtataaaatctatgttgattttacagaaaaacatagtcgctattatagcgcaacaaagctaaatactagataatttctgtattattagaagtatttattcctatgaattttaaaggaacgggcggcacccggctatgttggtttatgttatgtttatttgcgcactccacgcaagattatttaaacatgtcctgtctggacactttaggttgacacctagtaatcggtcgaattgataattcacctattacaacatcgaactcattggagttccatgttccgcttcgtttgaagcaatccggagtgaggcgtttatttgcggacctgtcttgcagggttatcttaaaggataacgcaaatgattaggagtattgaccggtactcagtcggaattattgtagataggtgtggcaacccatgacctacaataagctactggaatgtgaatacgttgtcgggctacctctcgggagaaatcgtgagacttacgcaataggttcgaggtatccaaaaatccttactagtagtgacactgttgtgtgtcttgctagtgtaagccgtttggtaacgactattctgtttggctgttggaataaatttgagggacgtgtgtaatagtgaccacgcaccttttatctttgatatcgca

SEQ ID NO: 2478 - DNA, 848 bp, unidentified
  source 1..848: mol_type = unassigned DNA; note = unclassified Carlavirus sequence
catcgtgtgttttcaacatgcggtcctgtgtcgttttgcgccctacatgcggtacattgagatgaaagtgcatgaggtgctaccaaagaattactacatccactcagggaagggcctggaggagctggatgcttgggtcaaggaagggaagtttgacggtatttgcacggaatctgattatgaggcattcgatgcatcgcaagatgaatttatcatggctttcgagctggaattgatgaagtacttaaggctgccaagtgatctaatcgaggattacaagttcatcaaactagcttggggtctaaactaggcaatttcgccataatgcgcttctccggggaagcaagcactttcctgtttaacacactggccaacatgttattcactttcatgaggtataacatacggggtgatgaattcatatgctttgctggggacgatatgtgcgcgtcgcgaagattgcaacccacaaagaaatttgctcacttcttggacaagctcaaactgaaagcaaaggtgcaattcgtaaacaaaccaactttctgtggctggcacttgtgccccgatggtatatataagaagccgcaactcgtgctagagagaatgtgcattgcgaaagagatgaacaacctgagcaattgcattgacaactacgccattgaggtggcgtacgcatacaagttgggggagaaggctgtgaatagaatggatgaggaggaagtcgctgcgttctacaattgcgtgagaatgattgtgcgaaacaaacacctcatccgctccgatgtgaaacgagtatttgaagtgctttaattagtgtagcttaggtattgctattgtattgaatattt

SEQ ID NO: 2479 - DNA, 848 bp, unidentified
  source 1..848: mol_type = unassigned DNA; note = unclassified Riboviria sequence
ggtgcaggaaaactttttcccgacgtgtccaaaatttcctatctagtgatttcgatattaatactcctgaacaggaggccattcgacgcatttttgtttttaccaactataaaaatgacgttgaaaaatcgaaattacgtaacttatccagtgaacgatgtactcctgctacgtttacttcattggatgagtcttttctttatgttgatttttcttccctttcaaaatctctcaaaatcaccagggaaccttatgatgcagtatctgcatatattctttatttcctttttgatcctattcctattgaagtatggaaattcattcctacaacaatcttttggtcagagaacttatcaattccattttcacaaaataattattctaatagaagctatcccacgcctactatcatttcgaaattccgtgaattatttccttctccaggcggacgtgcttatgaaaaatctttcattttacctcatgatgttctttcctctcttgaaaaacctaataaaactaagaatctctacagactcatatctcgtcttcttcatgtgaaatgggagcctaatgttgtttctggtcttttacttgcttgtatttccttgcctactttagatttgttctttaccatcattattaattgggatgagttttggcaatgtgataagaaacaattagttaaagtgttaaaggacttacatactgggattcgtcttacattcagtcttccaaacggagttaggttgacctcagaacagactagacatcactacggtctcgatgcactctacggccggtccgacactttaactaatttttctgcaaaagatgaaattgctcaaaga

SEQ ID NO: 2480 - DNA, 848 bp, unidentified
  source 1..848: mol_type = unassigned DNA; note = unclassified Riboviria sequence
tgagatttacgcgcgagcgtagatccgccctagacgagtggtccaactggcagttaaagctagccagggactgctcgggtcaaagctagtcagttgccgagtggcgacggcggctgatactagagaaggcgacaccaagtgtggacgctgactcgcacgaccttaaacgtcttgggtgcgcgtaactgcaggttttggcaagcttgtagcctagcgtgagcttcagtgtcatggttaagtcaagaacataaaccggatagcactggagccgaaaggcgattacccgtagaagctggctttgccggtgtagtgttctggtatggacacgctaggggtgggtcgtcggttgtttaacgcgagtggggtatgctaaagcattaaccacttgaggcttagcgtgaaaaactaagcccgcgaatgaccatgctaatcggcaatagccgtgtagttgtgcacacaactatgtcacaggggtggccctgtataccggtatcttcttacggtatactaccaagttatgttaacctgcggtgcgatgaataagtatcagaagcagggtgtggcagcaggaggaattctgttgttgctaacgtacgctcaactggcctcacggcagcgggtaagaaccgtatgagttgggtggaacgtgccttgggcgatagacgtccagggtggaacggccggataacttggggaagcagaaagctgcggggattgaatggcctgcctacgggtgcctgatagtgacggaacatattggataacgttaatccaattttcaaataattaacctctccgcagcctagcagctgggatacatagcgggttaactactattaacgataaag

SEQ ID NO: 2481 - DNA, 848 bp, unidentified
  source 1..848: mol_type = unassigned DNA; note = unclassified RNA viruses ShiM-2016 sequence
gtcagacgttaatattactttgtttaaagagtcttattattctcgttatctaacttattattcaatggtctccgttcatatagttgcttatgctatatgttccgcgattttctgacctaataagatgcttggttaagaaccataaaagtccccgcataggaatggggtggccttagggtctctacaacaacggtttcggcatttgctgagcccgtgtcttgatttgatttgtgaacgcgtaatttaaattttaaaagcattctggatcaaatctagttgccaattgaaatttagttaaacgcatattcattttttattcgaggaagaactatgcattgcgtgagtgtttccgcaaaatgaattggtgggatattccccatcacccaattctaaatctttacaattgcatgaatgtgcataaacacatttgaaacttaatgagtagcattagagtttaaagattgtggtttataccactttataacagtttgttttacaaggttagatctataacggatttccgggggtctagcgcggttgccacagactcaacatcctttctttttggaaatgatagtgtgtttgttagtgtacattactacggttgtttttatttaatttgggaccaacttttgttgaacttacattgatttacggatgtcaaccagttacaatttctttagtctgggagatagaacgccttgtaagtagactaaaactacagatcgggggcgcggattaatgctatcgtggacaatgatgtgtttcattgatttgtctggaaactttgtttcttccccttaaaaaccggcattccaactgcttttaagcatagtcgcgtgcagaca

SEQ ID NO: 2482 - DNA, 850 bp, unidentified
  source 1..850: mol_type = unassigned DNA; note = unclassified Picornavirales sequence
atagtttcactctggaggttacacataagtcaatttcttgaaatacacataacatagacgtgtcaattagcagatagaaatatggctttatgtgtatatatgtaattttgaatttgattgcgtgtattgtccattttctacagatagggactcaataattttgcagtgcgctccatctcccattagtgctgtataaattattccttttcctttttcccttccctttggatttataatgtgcttatgtttcacttgcataagcaaacttaaaattatatattgtattgtgattttccaatagtatataaatttaagtagacaagttgtgaacttactcttcggagtattttattctcttctgatatgatttggctttgtattttttcggatgtttgatatggcatgtgaactgattgaagggcttcggcaatatgtgaggatctgtaatggtatccaaatattctgatagtattacgcgtggcgaattgagatgtgacttattttaaaaagaaaactcactcacacatcactacgagtcgtacgtaattaactaaccgagttgtcccccctgttcactatcggctaacctgatgcctccaggcgttccgtcggaaacttcatcgctaagcctagcggctgaaacttacaatcaccctttccactgttttgttattgcctagtgcgagaaagacgcttttagatcgtgaatctataagctggagtgaagtacgcgtgagacatgtgttctgcgtatgaaccttcataacaaaattagtggtcggctattgacagtaagaccttcagtgactgcgaaaatggatcaagatgcccaaccttgaccaattggctg

SEQ ID NO: 2483 - DNA, 851 bp, unidentified
  source 1..851: mol_type = unassigned DNA; note = unclassified RNA viruses ShiM-2016 sequence
atataattgattgatttcaattatattcgtttgacgtgttcgcacgttgggtgaaaatcctgtttccgagatttatatatgtatttgaaccattagctcttttagttcaaggtacagctaattctggcctttgttctactaaacaagattgatttttggattcttttaaggccttttcgtacagctcatctgtgcgttgacaagcttgaccgatgtttcaatgcattttatttttcccggaacagacataaccctgtttctacagcagacctatctgctatatcaaaggaaccccctatatgtttacagaaaaatattccactaaatgtagtgaagaagaatgccccgttggcactcttttaacgggaggacataaacctgattctttcaggcctgcccccccgttttacgggaggacataaccctagcttctactaggcctgcccccccgtgtatcagggcccctgccctgatacctctgtttttactttgaggcatttgtaagacctcaccagattcatattgttataaaaatacgaaaataacaattcctcaatatgaacgttccagattggaataaaaaataatctataccctttggtaatttatgtcgatctaagtttaactcgttccactttgtttggttttactcactgcaatctatgatgttcacagtataccaacttatgaaagcgcttgatactttatcgcgttatgcaccctagtcttttgtgacgccggtttgacatttcgacatattttattaaatacttatcaggttaaagtccagatatatcccaaggaaggggagaaataatactccatttaagactcagaattacaattttaag

SEQ ID NO: 2484 - DNA, 853 bp, unidentified
  source 1..853: mol_type = unassigned DNA; note = unclassified Nidovirales sequence
ggtatatataatatacctccagacagtgatcctgtcaattgtgaaaaccatatttgttaaccagttaaataactgtttgaccgcctgctaaagtgggcaacttgtttttgctaaaccccaagacagtttagatcagtccaatttaatcaaacaaaacaattgaaatattttattttattgtcagagtagttaactgattgtttgagaattagtgtaccagcacaaccactcagccagcctaccaaaggcccttggccacttcccctctcacgacttataaaagtcgccacccagataatctacgaaagtagacatcactcctatttccacccataggcactaggagaacaggataaccccgaaaggggcatcctgcctgtgtctctcacattcgctagccagatatcttcacagactctgctaggcttgtgacccagtccgttcccaaagaccgttacctcccgagtagcgcttaggcgcgaaagggaagggagtacctcccgagtaagcgaaagctgaaagggacgggaaccacggcaagactaatcttagtcttacagtgtgggcaatctggtaattgtccccaacaatcaacccaatttgatgtgaaaacatctaactcggttggcttctaactagctataaactaggatatctcttaacggagactccgaggagggccaccaacagtccaccagtttatagtaagcaacaacaggggcgatcttccaagacacctctcaccacaagacacaacaacagtcttgtgaagccgacaatattgtctacggacgtattatcgagggttttaaaggaggagttagtgattaaactaatttcaacaccaataact

SEQ ID NO: 2485 - DNA, 853 bp, unidentified
  source 1..853: mol_type = unassigned DNA; note = unclassified Iflavirus sequence
atttgttcgactatacaatagcaacttatctttgtgagaattgtttccttgtttagatcgacttatgttggatgtagtcaatatatacgagaataggtgtttccttgattttattcgtttagcttagcttctcgcgtaatttcaatagcatggtaaaacgtatccctgttgctacattttagttgttaagttttagtttttaagaacaacttttaatgttaagaaattttgtttgcttgttagcgttgatgaatctgcgaaaaaatgttttcaagtatgaatgaaattttcctatttagttaggtctgtatgtgtatgaatgaagtgtgtgtattagtatgttttgtttctaacctttacccattcctgttcctttgtaattcttcctctacaagtaattttgttagtagtacttataaagaattcgatcgtatatagaccttacttgcagcagttagatgaaggtctacttttcgattagaaattgagctcagccctgtgacgatgagtgagtgtatgctttaatattatctgtactgaacgaacttaagtatataggttacgatttgcgtgtttatgcattatgtcggtttaaccctatcttaagagatcgttgtatttgagaaattttagttcttcctcgcttgtttagaatcagatcctggtaaagcaatttctttttgcgaagtaaagtatatgtgacatgccctttatatgacctcttgaataagtccccctcaagagtatgaatacattatgaaagttttggaataattaccctttcccttcttttccctcgactgttatcttttggacacgacccctgctttgtttaattgattttatagcaaat

SEQ ID NO: 2486 - DNA, 853 bp, unidentified
  source 1..853: mol_type = unassigned DNA; note = unclassified RNA viruses ShiM-2016 sequence
tgtatatatttgattaactatcaaatatattcacgttttatgaaaggatgttgcttttagcaacatctaggaagtagtgcttacttctgacctatagcctggttttggcacgaacggataccgtatcgtcataatgcaactgggcctttatggtaccgcctcttatcattgtacgataatcactcgaacaaaccaactatagtcctggcacgtgcgtatgcatgccgtcactatgcagagggccttgaaggtaccgccactagtcattgtactgtaattacacgaacaaataaagcacaaccccatttaagttccctattcctgggttaaggaatgacgaactatcgtctaagcaaatagtgtgttgataatcactaaactatcatccccccttttttatgttaaatgtcaggtgtttcctgaccttcctcacaagggaatgcgttcttaacaattttatattgttaaacacactagtctttttagacttttattatctggttttatgaatactttgaccatgaccccatactacagaatgcgacgttcgcgtttgctccatagtatgtaatttcaaaggtatgttgtgggtttccaaccctccttgttttacgcgttttgccgaacttgatattataataacaaatttccatgtgcctgggtgtacttgaagatggaacgatgaactgtttcctatcacttcttgatataccccgcacctctgagttatttttaaagaatattgtttttagcctttatgactgcaaagatcagcatattgtttacgttatcccctatgtatgttaagggacactattaattgtagaaacaagtaacatatgtccatgacgct

SEQ ID NO: 2487 - DNA, 853 bp, unidentified
  source 1..853: mol_type = unassigned DNA; note = unclassified RNA viruses ShiM-2016 sequence
ggaactccctgtaggcctcaaagcctacaggagttccctagagaaagtatattgtgtcgtttgaccgcgacacccgatatatgctttcacagatattcggattttatattccttttcaatgtgaaaaacattggcactggtaagtgctgtcgttactgggatgtgaaatcccggttcgtagtattttgctatatgtgtttaaaggagtctttgtatgctgctaacgcggcttcatcgcaaagtccttatttcatctgttatatttcgtcaccacccttatggtcacccgtaagtgatggttcatcatagattctatttgtggcgagtagagtttattattgatgtataccaccccggagagtcaacttcgttacgaaaatcaagccccttgcgctatcatgtattaggaaattgtaaggaacgtttcccgtattacttgatagtgtcgattgatgctaactcataagattggcttcatttgaggattatttatactagatggtttagtattcgtgaagaatcccactcacattatatgatttcgcttaaccaccttcactcgcagtagagttgaacgaaggtgtagatctaacatttttgtgagaagaattggtcttctcggagctatttgctcaacgtaccgagacattattgatgtatacaataccatattttacaactacgttttaaccagggacaacctgacctggagagtttaagccactcaatttttccgtagctctgtctgatatgtgaggtaatcattactcagaagaagtttcaactatgatgcagtagatatcgtagtattgtttagcccttgtggttagttccctattcccattttgaaatc

SEQ ID NO: 2488 - DNA, 854 bp, unidentified
  source 1..854: mol_type = unassigned DNA; note = unclassified RNA viruses ShiM-2016 sequence
gggagagaaccatggaataactccatggttctctcccttacatatgtttgtgtagtgtaccgcactacccggcaaacatacatattcattgcagtacttgttctgctcttattttaaaatgcgtaaaggcgtgtcaaataggggtagaacccctaattgcacttcctttatacattataagagacctatacaattaccgaaaggcaaatgtatagattatgagaatgtatattaatatgatatttagtcatcactccggaaaaaactaattccgtaagagatgaccgcattgtcagctatagttgtggctactatagcatatgtgaatgccgtcaccccgtagagtcaactgcgtcattaaatcagcaccttctgtggaaaatcatagtagcttttaaggacgagctatgttttgatttgtccatatagaacattgaatgttattgtatgacattggatgactgagatttatgcaaattgttttgtattcagatgagaatcccacttttagtgtgtattactcgatttaacctatttccacccgcagcagggttgaagtgagatagtagagttaacgccattcgaagaagaattggtctcgtgtgtgtactttaatccaccgatatagagctatgtcaataagcctcttatgtggagctctggtatacaatatgcgtttatttaagtacgtttacctcatgacaacctgagtgaggaggtttggtcacctaaatttttcgtacctatgaatatttcgctgaggtctcacacagttagaaaatcgattgctttagcaggatttgttcttagttttgtttagccctttgaggttagtcctagttcccatttaaatc

SEQ ID NO: 2489 - DNA, 856 bp, unidentified
  source 1..856: mol_type = unassigned DNA; note = unclassified Riboviria sequence
atgcctgaaaaggagtggtgaagatccaaaccatgttgatagtgccttgtttagcctcggagagcagttggcgactgtttgcaagcgaatgtttattatagtatttactaaagtatcatgtacctgtatcgtttacgttgggtacatagaagtggcgacgattcctgccttgtacttactatattagatttagcccgaagtttccgttgtaagatagctacttatatcaatccaaatataaatgtcccctttattttttataaagagtaatttcccccataccgctgaaagtgtctacaggtacgaacgttattaccagaatttattttggattatgcggaatgtggagtgtttcatgtatgtgttgctctatttactgtgtgaatgtgtgcgtatgtgacaggacctcttcttaattgaagaggacagacgagccaacttgattttcttgtaaaaacatttactgaaagtgtttctatctatgatttctacaactaggacctgcccgtgtagcctctggctagtagaattctccttcgcgagttttcgaacgctaatgcctcgtgtttgactcacttaagcctgatgagactttcgatttctctcaggagggtgttttctctctgatgttgagcctagaatgataagatagaagtgcgattaagacctgttttcggattattgacggaaccgttttccttgaatgtgattgagtgaagttgtctacctaacgccaaaaggagccatgtcataaactttgtttggccaccgatttagttaggaagttaaactctatgtgttcgccttaaccggcccaaaacccctttttgctggcgagtgcccaaacccttaaaca

SEQ ID NO: 2490 - DNA, 856 bp, unidentified
  source 1..856: mol_type = unassigned DNA; note = unclassified RNA viruses ShiM-2016 sequence
ctggtggcctgtgtgcaattaattctttgtgttcatgcctcatcagcattgaacagtacttcaatattttgattatcaattctttgcacaccgcccaatgtatccagtgaaccatggctagacagcggattgctttgccaactgcggacgtcatcgtgccgagacgttaaaacgacgcatcgtctactgccagcaccgatgttaactgtgcaggaccccccagacaaaggaaaacatgagcgcactcgtacgtggattaaccaagtacgcgtgtgctggccttgccctggccactgtctatgctgcggatcaattggtgaagaggttccaccggcgacgcgctttgctgcgtgatgctaaggaggaccttgcagccctcaattcgccatcagtcatgcgtgggcctggtcttgaccaggtcccaggggtggtcactatgctggagcgccaaggcgttgctccagtggccgcctcttccaccactcatctcctccgaaacaaccataagtacttctgtgcgaagtgggctcgggcagtgaaggctcgctttgagtttgccaggatgtgtgaggacaccccccttaaccgtgctgctgtccataggtggctcctttctcagtggaaggagcttaagaacagcgctgggaaggggatgccgttgcatgtcatggacctttacatgaccgatgctatggacatgagcttcctgccaactgccgaatatatgcagagtgagtctaagagggcagttaggaagcgcgcccgcatggagtactacaacgagcggaaatttgtggagggatggaaataggggggcctagtgagggtaagggggtttgataccgtcccgcgattt

SEQ ID NO: 2491 - DNA, 858 bp, unidentified
  source 1..858: mol_type = unassigned DNA; note = unclassified RNA viruses ShiM-2016 sequence
ccatgccagaagacgaattcgatgttggccccgttcttttggggcctcatctgcatttgaatttattaagggagcgtcgggggaggaaatgcccccggtggagatgacgttgtgcgcaatatgggttgggggttcaaagcatcacccacccaggggatttcaccgtctcatccgggcctgcgcactgaagggggccgcaccccgagtcagccttgttcttctgccacgtgtttcactgtgcacggggtgagagcctgtagcggcgtgtcgagccccacgcctgaggtgaaggcttataggagactggatttcacccccagtttaggattggcctcctttaactcctatacccgagatgggcaatgcggtaggcaccccatgatgccccacatctgttgatgagttgttctttttaactctctcagatgggcgtagggatacggggagaagtcgaagctggccgccaagccgcaaggcgtggttggttggttacccatcctgtgttgaatggcgcggtaccgaggcctggcgtatccaggtaatgctttcaagaacatggttagagcctcgacggttgaggaaccggtcaccgaccaccgtatgagccagcggggaacccttcctgttccaggcttgttcgacccatgtttaagagagtgttggtgtgtatagaaatcagtgacgatgcaagtccgagcaggcaacaaaataaaagtaaaatatgcctgctcgtccattgtatagttttttccggacctgattctgtatgaacaggcacaagcgactcccgcttgagacgtgtatagtttttccgaaacgtcacagtagtgttcatccgagtgtacattctttaagaga

SEQ ID NO: 2492 - DNA, 859 bp, unidentified
  source 1..859: mol_type = unassigned DNA; note = unclassified RNA viruses ShiM-2016 sequence
cgcagataaagaactccacgtgcgcgtttcgcgcacgtggagttattgttgtatttggcgtttgactacgcccagtgtacttgttatgtagtgagttggggcgttacgacgccccctcttcctgcattagcagctacattgacttcaatttcatctttatcatacccgttccctgggatagtgggaccccctctgtcatgaggatagtcatttctgacgtaagacagacgtatgaagaatgacatattgaatataggtaacattgacgaactatgcctctaagttcgaatgatatgtttaccgaattgatgtgtaccttcttttgaaggcacgtctactttcttgatgagaccgaccgaaaggcggcacttgattgtagattcacattttatgtttctcgtgagagaacacaattcggtacaggtaagactgacctgtctggcaatcggtcagagattgataatctcgactcgatttgttgtgattttgtattgatcactttagcgccgagaaggcgtttgcaccgagagtaagcggtacgagacatgccctactagcatgggccgacgtaatggtcaagtgaaacttgttttaggctatctgttccggtagtcacgcagaattaagtgtactgaggggtggcacccgatgaaggcacttttgctactttgtgtaaacaaattctaggacatcattttgatattttgtcaataattttatcgctatgtttggggtatttacagaaactctggcttttgccgtaagacgatttatgagacattatttgagacttgatgtaagtgattgatcttttgatcagtaattcgagggactacgttccttttatcttgaacacagc

SEQ ID NO: 2493 - DNA, 860 bp, unidentified
  source 1..860: mol_type = unassigned DNA; note = unclassified RNA viruses ShiM-2016 sequence
gctataggtctacctatagcaagtttcattcctgaagcagataagcctctcgaggatattaatttgattttatgttacactgtatacactagatgtgggtgttgttactcacacactagaagacggtggactaaagattttattatatattgtatacaatcaaccccaacctattggttgaaggcttccagacgttttacgcctagctggcaacaaattagtcaccagcgatccaaaacgaatttggagtgggtttgacatcccactaagaaattgtcctgcatagcagggaaactaacgtctggccaaaatcctattattaggtgcgcagcgggttcgctttaacctgccactcttgtttactgtcagtccgaaagagtaatagtcggacagaatatgtcaatgaattgaccggaatgaggaccaagttgattgagcctcgccctccgaatgggccaagaatattttcttatattcccacgtatatacacaatttagcacaatagtgtattaacccccttattgttttggggcattgaatattgtgtatagactttgtcatagagtcacacttgtggatattttctgctcgaaacgagtagatagggagattcatcacacaacctggataatcttttgattataaaccatatggaagtgtgggttgaagctcaagtgtgactggtctgagagcgtctatttgatcagtagacagcgcttgatgaagaccgcagttggtggattaacaaccacttatggtatatggcaacctgtgtgaacagtttctttactctgatcgtgtgcttcgtgcaccagggtaaagtattgtttgacaggacttgggacttttctatacaaaa

SEQ ID NO: 2494 - DNA, 860 bp, unidentified
  source 1..860: mol_type = unassigned DNA; note = unclassified RNA viruses ShiM-2016 sequence
gcctgcgcctcgataacagtggtattacgtttcaccccgtgttgcttgcatttaattaaagtcccagggctcgaggaggaaatgcctcgggtgagatggcgtagagttcttataaaacaggggcacgttccgccgtcccctcctaactcggggttctgaagggagaaaccctaacaagccaggcttattcttgacccctcgcgtgatgagcgcacgcagggcgcagcctgccggcatggtgtaggagccagcctgaggtgaaagccgtatcgagcgcgggttagcagccgcgtaggatttgccaccttaatcggtacaggagtcccccctctcccgcgcgctccctaagggatgcgtgaacccagcacccaagctgtaatggcgtggcctgttggaagggggactaaagaatggttacgatgtgtgccagcactgcgttttgggcttcggttcattacaagacaaatctggacatgcctagtagcaagagtgcgtactctaagcccgccgacctctcacgttgacgtcgtactgtggttcgcccacggacgcagctgatcccgttcatgtcatgtcggttgaagggtggtttcttgagccccacccgtggaagcaccaggagttgatcgcctggcgcggcgccgaacggggagtttgctcgcccgatagttttggccgcgcacgtgtggagtacgtattttgggcatgctgctgcgtttgaggatagtcccattcgcaccacgctcttccttaagggaaatgaattgttttagttatgttgttactgtttttccagtgatgccattttggcacacgaagacctggagaggacacagtcgtcgtcttgagttgcttcaaca

SEQ ID NO: 2495 - DNA, 861 bp, unidentified
  source 1..861: mol_type = unassigned DNA; note = unclassified Riboviria sequence
gtccaaggggtttgaaggctcggtctaccactttgtggggataaattgtaactgcgagcaatggttgttggtttcaccctgaaacccgtggcggctgttaccccatctttgagttggtggtcacgctgcaaacgggctttcggtgaagccgtcctggagtctccaatactccagtctctttgctgctatgacagtagagaggtagagtcgtacaaggcggatcgcgaaatccgccatgacatccgtgaatccatgcgcacacatatgggttatggtacggctgctacttgtgttgagaatgtgatgttggaaacgtttaacaccaccggctatgatcttagcaatttctcgaccatccggacccagtgcgcggggttgcggaaaaccatgacacaatgggacgaattcttccagttgaaaggggttgacccattcaaactggtggacttcgagattctacccacttgtgttgtgcccaagttcgctgcgtcaatggccttgatgctgagaagcaaacttggaaggttagcaccaaatgatgctaacacgctccttgtggagagggagtacttgcgggtggcaaggaagttaaacgtgcgcgatgtggacatcgtcgcgcaccagcagttcgtgatgaatgctgtgttcggtgaaacgttgctggacagtgtagctttaaccaggagtcgcattccaaggtggatgcggtgggcgttcgaggtggaaacaccgacagcgcccgtccgcgtctgctaggggtgcccactcactgtgcgtggctgtgacactaaggttgctgatgagttgttagaacagatcagaacccaatgtctcggcaagttgtgcgcgcgcaggaatggg

SEQ ID NO: 2496 - DNA, 862 bp, unidentified
  source 1..862: mol_type = unassigned DNA; note = unclassified Tymovirales sequence
ctcacgcgccgttctacctgactcccacgaagatgagtctaccgacagcacaccccaaagcgacaatctcacaacctgccgctctgaggctagccctacaaccccggtccttgaacccttacccacctccgctcttgcacccgcccaaggcacttccgctgatctctatgaattgcctcctttcgtggctcaggcccccctcggtggcgccgccacctcggccgcccctttttgcacgcccgtcggcccgtcgctctctgaaccggaacgtccgtcagcgtcgagccctctcgacagcgacgtcagcgccgcgcctggcgtctccgagcctttctaccttcttcacaactttcccgccgccagcgacattctctggcccacgcgtcgacgagtcaacggcgcttcgaaccttcccgtcccacacaacaactgcctcctcgttgccctggccgaagttatccctactcagtctgtgcgctcactttggacccgcctatgcgagctcctccctgactcacaactcgacagcgaggagatccgcacaatcggtcttagcaccgaacacctctctgcactcgcctggagccttcaggtccatgtcaccgtcgtctctggcaataccagcacctacggcaatccactcgcctccgctaaagaccattacaccatttattacggcaacaatcacttcagcgcccagagggtgctccgcggcgccactccccaaaaatatcgcccggtccgacattcagactacgcggccttacacaagttcaccaccaacagcgggcatcgcctccccttcgacaaatttcacaagcacaccgccgaccgtcatcgtgccaagaacctaatctccaac

SEQ ID NO: 2497 - DNA, 862 bp, unidentified
  source 1..862: mol_type = unassigned DNA; note = unclassified Picornavirales sequence
gtaggtcatgtttgttgaattggaggcgaataatttccttgccgtctctaaacgcgctagtcagcgtggctttgcctatgacgaacctcggaagcataaccgagctatcaatattgctgaatagattacgtagatctattttaaagaagaatacggaccccataatacacatagagagatttgatcgtctatatgatttgagatgacttctttattttgtggttttttcgggcttttatttaaaagctccctcgggttggtctcccgagtgctttcgacattagtgtctaatgatataacgtttgagaagatattcagcccatcgtacgtacttttttccttatacggtagccccgtttggaattatttacttactggtggtattctcgcggtaaaatgactttctttttaattttcctttgtaaaatattaaatttttctctacctattttcattctatcatttatgtagttatctttctgtgtttcatatcactcggttttactgttggcaacacattgttttttacattatctcactcggtctacatggtggtacttcataacatttcactcggtctacaaggtggtacttcattttcattttcattggttatttgtccattgttgcgcacttcaacggttgatgtgtaattcgttgttttcccccagcgtgccgtagttcacggtaatatcatgaacatccacgagcgactgagcaggattagctttgacgttgctatcgccgtatattttatataatccgcgtgcggcaaacccataagtggtgcggaaagaacaaaaacatggaccattaaggccgtgagcatctttgtgatactactacaaacaaaaagcagacc

SEQ ID NO: 2498 - DNA, 863 bp, unidentified
  source 1..863: mol_type = unassigned DNA; note = unclassified RNA viruses ShiM-2016 sequence
ggttaacaccgcatagcagtcactttctcaagaaaatcttcttagaagactttcctgacatgaacgatttgttagagatttataagatttatttgtgagtatagtactccttgtagctcggcgaaatcgtagagtgcttaactattgatatagtcaattctccttgcagctctacggatttgtctggagcttgattttgatatcattagacactttaagtatctcctaatagctttttcatgcagaaagttttaaactaaagtaaccaacaccttttgtatactgccatgttggcagctagatgttcctactttgaagtcgttttataccgcttctggtagtgttttatatttgttttaaaatataaaaatcgcttgtgtgattcccagtagggaatttctaaatagtggactccagagatgagtaatggccactttgatgaacctagaataagcagttgacgcgagatagcactttgtgtgaaacggtcctgtgataaaaagagaagccgcctgagtgggctagagcgtttggaagcgttcgtcatcaaagatgaagaccctttatgggtaggatacaccaaatattgcaccaggcaatgtgcaatctgattttactatttgagtcagttaaaaccaaggttgaaggccaccttgaggtctctgcggcagaaatcaccgttcaatgacaaattctctcgtgtaaagtgagagagacaacagcaactattttcatcagttctattacactggtgaatcttacataggataatagagcaacttcccggtagatgtacccggatattaacgagcacgccgtagcgtgcacatcatgaaattttgtctttcccattccattttgga

SEQ ID NO: 2499 - DNA, 863 bp, unidentified
  source 1..863: mol_type = unassigned DNA; note = unclassified RNA viruses ShiM-2016 sequence
gatctccacacggtcctttcgaccgtgtggagattcagttaatttcttttgtcaaatagtttattctcagaagtgcatactatatgcttctgagactttatgtgtagtaagtcatactttagagttgagttattacactctactctactttatgatatatgtatgctatacttaaagtctatcagaattgtacttctgttagtgagatatttgatttataagaattacagtaatcgaaaccccgtcatttatcgactttctgtgtttgaaatgtcgcacagatcgtagttcctaaagttagacataacataatttaaggattgtcaaggctaatgattaagttgttaactttcttcttatgatttagttgtactttttaacttgatatagcgcacagcaccgtgcgcttccaatccgacctcttaggtttaatttgttagttcagtaaccgtcaattattgaatgtttacaaattaacccatttgtttattaacactatttaaacatcttatttataatatttttgatttagacataggacttatataacctgttgtatccccctactatatttcatacttgttttaacggaaaaccgcgtaaagagacgtataggattcccagagaatttgtcttatagtagaagaatcggccaatggagtatatttaacgaaacgtacatcgagatccaatgattgtcggaatatattaccaagatatgtatagtttaaggcatcgtacaccgcgatgttaaggtcgtcttacctgatttttaattacctctacttggaattgacccattaatagagtaaataattagtgtttatatattgtgatttacaataaagtattttgacgttttt

SEQ ID NO: 2500 - DNA, 864 bp, unidentified
  source 1..864: mol_type = unassigned DNA; note = unclassified Mitovirus sequence
gggtgtagccggtagaaataccggttacatgtcaagttactagagcttggctctaatagacctgatgtaggagtttaactcctgaagggaaagtccgatcttggaatggttggacctaactattagctcacctggaatctagcaggtttgtgttcagaacctacctttggagcagggaaccgtaaatgggttttcacacctatgagcccggttaaagcttaacagggtgcccggccagggcctctgacagggtagataagtaatttggaaacaggttactaagaaaggagagagggtaatccgaactcctgccttatagacagaagcgaccgctcttaaaccggagcgaagtagtagagatgattctctgaaaggacagctggcaaagtcagttgctagattcgtaacgaatctgggagtcaaataggtagggtagcacccatccttactataaggtcccccgaaggggataaactgatcacaaggaccaactcattagttaaaaggagataaggtgcttgggtaaccgagtaccggggtaactgggatctttcgatccaacgattgaaggaaattacgagccttattcctgttagtctgacagggtaaggtgagaccaggtctctggcaaactcatagagttaggaccaaaggtggcgacaccgaactgaaccacagttgcctgcggcctgtccggactagtggattccctaggctcatgctgagcaagaggattcaaaggtccaagtaacgaaatcaggaagagttctgggtagccctgtatagggcatcttgagctttaactgaggacagaaaccgaaggtttcaataatcgacgctaacggtcaattcaatctactaatt

SEQ ID NO: 2501 - DNA, 864 bp, unidentified
  source 1..864: mol_type = unassigned DNA; note = unclassified RNA viruses ShiM-2016 sequence
aatttttctgcacatttattgctagcgccttccctcggcgtaggacggtttgtctatcatctgtctgttcaatgccaaaccatgatgatcacgtattgtcatggtatgtatcagtcttaagactgctttgaggttttcaaatagagggtttgcactagctttgctggtgcttttggggagttatctccccttttagcgttattgcctcatgaaaagggctgtaacgcgtagttttcgctgcttttgactatgataaaagcagcatatttgcctttatggcaaagtcttttgttcttgactttactaagaacaataataggctagtatttgttgtaaatacgtatcgttccacgtattgtagtaaaggaacgcatgttttcaacatgtagggtgcaaatcccttgctggctctttgcgttttgatccactttatgccagtattgcctattgtatttttgagctttggatcagctcagttaagttttaaaaagaaataaaaattaaaaaatatctgtccaaataaaaagattatttttgtcatatttgttttaaaagctggacagcaaacagccattttaattaggtggagaaatagattttctctggttgttattatacgttttatgttcttaactgtcactgcatggaatatttccggttcacacaggttaaggacatagccaccctgtgagtttccggggcatgtttcaggccttgtaacgtattttgcatgcttcatttgattttaatggtttattcctggtaggtaagagtccaatcaggtcttccccgtgggatcacggggtatccctttgaccgggagaaataatacgtcatttacacgcctagagacacgaaacatta

SEQ ID NO: 2502 - DNA, 865 bp, unidentified
  source 1..865: mol_type = unassigned DNA; note = unclassified dsRNA viruses sequence
gaataatagacccgaggagggtggcctgattcgagccaggtagcccctccgtctgttatgtgatgtcctaaattgttgggcctcacctcaaggtgcagagacgattgcactggctgaacctcggccgtaaaacgaaacccggtgctaaatcacaaccacttcattctttcattggttgagcgggtggatacccaacacttacagatgttgggacggttcagcgcgcgtaagtccgttagggtagggtggctttatagcatttagccacaccaggccagcggcgcgtagcctaacatttagaaaattcgttcttccattaataacggtatgctccgttagggagaacgatgcttttaaatcgagcgtgcagcaactccgacctgggcatgtcgttaaactacctaccttatcttcgggtgaagctggtccccggagatccgacaaagccagtgcagcctcctgtgattaaaccagcgagtagggaaccgacgccgacttccagatatggtcgtccgccgagggtgtgccaaccgatcagcgcttgcgctgccagtgtaaaaactgcgctcttgagattagagggttggtgctaacgtagagatggtgtccccgcgggcttgttcctcgtagatatgcgagggagcggcttttgcccccgatccgcgggcatatactaccactcgaacgtgctagacttaaaaactctagtggagagacaacacctaccgccccgacctgcgcaatgtcttcgactgttcaggaattacgccatggcgcccccaagtagcaatgcttgggccggtgtggttgtatagggcacagaaagagtccgctctcccttcatatcccctgaagggcgggaacg

SEQ ID NO: 2503 - DNA, 866 bp, unidentified
  source 1..866: mol_type = unassigned DNA; note = unclassified RNA viruses ShiM-2016 sequence
ccacattaacttccgccccacgcacgccgcatgtggtataatattactccttactttatagttttcatttacacagtatactgcttcttgtttatcctccatatggtgttaaatatattagtagctcctataattgtactaatccttctcataataatcttgataattgttgcaggctgcttttccacagacttgagtgctaggtgttcgcctgagttgcctttatccaaatgctcaacacaacaacagtcagctggccttatcctcaatccataggatttgtgttgtatatatacgccttgtcgatacttatttcactatttgtatatgagcttttaaccctgctgcaaacaaagtccttcttgaggtttactatttacttgtctttcatactagggctggcttattacacacatcattatatggtacataatataaacaccattgatagttacaatcaaatgactaatgagtgatatagtagcatctatttccaatctacagagtgatagtctaaacttcaggtatagattcattatactcacaaccgtatcgctaagcagcatattaatcaacctactatctttgataggtttattaatttgtgagaagcattgttacttacctgtcactaactacaattgtgaagacatagactatatatattatgagtatatattctctcattacccttttataggattttacaacactttcagtagagaaggctgtgatttttatgttactttctataataaaatctgtgttagttgtgattcatcatcccgttgctataagctacaaggtgaaataacaaaaataggaaattgttttgctctagtgaaaagagactttagtgcttcagt

SEQ ID NO: 2504 - DNA, 867 bp, unidentified
  source 1..867: mol_type = unassigned DNA; note = unclassified RNA viruses ShiM-2016 sequence
tgcgtagcgttacacgctacgcacgcttattttatatctcgtttatttgatttatatatatttatttagggataaatatgaagatttctttgagaaggtaggccttggcttagatttcaatatttcaatattcgagatccccttttacacccccctcttttctttttaattggctggtgttcaaaattatttattaattttattttattattcgtattagtatgtttggaaatctttaactattacgaatttcattaagttggagtttcaaaattttcatctcgttccctagattatgtatgggaaaaagttcgtaccctaacgatttattcaatgggtaagtttgattggtataaacacgttttcaattttataactaaatatacttgttaataatctcttttattagagttatcctgcgggatgtcttagacataaaattattaataaaggtatttattataaaattagatttctatccggtttttacttagatcatgggaaatctacagtttctataaagtatgtagtcctgttaattagagggcctcaaatattaggtacgcttgatatttgcctctaatgaggaggggaaaaactaaaggtgcgattcgacatcaaacctactcctgtattcatattcgtacgcgtaagtgcttgggatggataattgaatactgtcttatgtaatgtctggatgtaaaagatatgagcaaagtagcaacgtcttgttaaataactcctcttatcggcgcgtttagtcctagtcgcgcagggacacattcttatgttatgtttgtataagatcattatcagccaccgtgcatatcccctcagaaatagcccgtaaagtacgatttatataca

SEQ ID NO: 2505 - DNA, 867 bp, unidentified
  source 1..867: mol_type = unassigned DNA; note = unclassified RNA viruses ShiM-2016 sequence
attttatcatatttagttttgctccggagaaaaccgggtaacaaatggacgacctttaattgtgagacacatgggggttggagccaacatgatattagagatcatgttcggtagatcatcttcggtctggcggtcatagacttccagggcttgatgtcgtccatggcgtgaataccagttaggtctaaaggcgtttgaacaaacaaacagaaaaatgatggtaaaccatcaccacctttacttcgttgtttcatcattgagacaggcgtgaaagaatgccatccgtggagtcgctttatacatactgcgctattctgaccaatattcgacatactagaaagagaatattgcttattgtagaccagccatatgagtgtaatcttggtgcagtccttgttacactatgatttcaactgccacgtaagtgatcgcgtcactatagaattccaaaaacattgttttgttctaccgtgtcaatttatcatcaggatacaatttttgcttaggcattcgatggttgtcgtcccttccatcgaacccgcacctcggagaaaggtgtgctcccacattacgtcaagttaaggtaaagctgctgttataacataatgagaatcaggagatcatttcctatggattagatattacgatttctgtagtatcctcatcatctgtatggatttgtaccaaatgtagttgtgtttattaagtggagcccgatacacttgggtcgtgtgatgagtaaacaagaaggtttggtcaccatttcttgttgggattatcgaggtccgagattttgcgacatttgaacaaatagtttgagagaattcccacttccatttattctagtgaattatagtgctttgcatt

SEQ ID NO: 2506 - DNA, 872 bp, unidentified
  source 1..872: mol_type = unassigned DNA; note = Posavirus 1 isolate Ishi-Im2/JPN/2016, complete genome.1 sequence
agaatttccaattctcatatcgtagactggctgaaaagttggtcttgacgtcgtgaaaatggcgttatattttgagtgtaagggtttcctgaaaaggtaattcttatattgctgtgaaaacggctttctctttttatctcctcaaactccttattttgcattctggctgttcaagcggcccaaatcgcaagcgtattacatttccttgcgtgcgtacccgaaaatttattgaatttggcttgaattataagcaatgcttcttatagcggacactttgagaatataatgcttgcatggattaatgtatactgtttcaaataacaaacctagacacgcagttgcgttgatggttgtatcaatcacatacgggtgttgaactcgtgttaatcctcgatcgctatatgtttgcctcctacttccaataaaatagattacatacgcgacatgcctttgtggtttacctattggcctctgtcaaaaacaaatcgttcgatttgtagtttcctggcctaaaaagctgggcgcggtctggctctcgtcggatggaaaggtccatcaatggctggttgagtgtaagctccggtgttctggttgtcgcaattccagacgtcgtaataacctatattgcatctgactctaattcttgtggctctactgtatctagttcttgttctactaactctaacaatgctactggttctatgtttgaaaaactctcctatgtcaatatagataatgtccttgatcccgatatccctcacatcactgaagttcatcgcaagcggatttcagatgatatcctcgaatctcaaggctgtacttgctctgaacctattctcactcctcgtgtgtttactttttcaactcttggc

SEQ ID NO: 2507 - DNA, 872 bp, unidentified
  source 1..872: mol_type = unassigned DNA; note = unclassified RNA viruses ShiM-2016 sequence
ctaggaggcactcttttaaacactgtagatcggtcgggtaacagcgcagcgatacaagattcttccacagcccttcaggctgactggaagtttttcaaaatttcaaaaccccaacacttttaaatgtgatcactgctttccactataagactgcttgaacaacagtacgtggttagttagatttagttttaagtaaagaagagtaaaacatcaaagctctgacacggatgccgagcctgtgagtaagccagacaagcagcattaggcagaagtggtaaacgttcaccttgagaaacgtggacggcgcgtcaacgaagtttactttataagccatttgcaatcgcgtcgtgtgggaaattggaatgttttcttttatctaaagttcttgagtataaacaacccgaaaaggccgtagaaaccatgaagattacggacgagggggcgacaggctagttataactaagttatagcgaaatattagtgcccagttgtttaatatgaaagaatcgcggatttaagagaaagtaccatcgtacctgcgtaaatcgtataagaagattgaaatgagtttaagcaccaagcatacctagcgggttgcgactaggcaagtctaacttgacgggaaatttaaagcctcccatggtgtaagtaaatagcgaaagcgagggtctgacagtgtgcaagctcagatgctaacccttagttgttcttatttagcaaataagattaccctaaccaggtaacgacgtcgaaagccaatcaacataggtaaaatcttttaggccgttcatcaaaattaccctggcaggactttcaaaaagaacgttctgctttcaaataattgcacaacaataaaacaagtgaataataaa

SEQ ID NO: 2508 - DNA, 875 bp, unidentified
  source 1..875: mol_type = unassigned DNA; note = unclassified Picornavirales sequence
tctagccgcggtatggcaaccgcggcgcccaggccccgcctgttgttggtccttttcttaacccacttttgtggctattgcctgtctctgcttgcatacaggcatgtgtcctttagtgagttgtcttggactgtatacatgggcctcggtctttgccacctctcccatttttcaccacttttgtaactaagccttctttctcgccacaatataacttgtcacactagagagtattttctacttggcggctctctagggcttctttatgaacacagtgttgatcactgggagtccaccggctacgctaagtttccctttcccccactgcctcacggcagttgggttcttaccctcccaccccctcccactttctctaatctttgtcttctttcgtcttgtttttctgggttgtccccgtaaccaagtcgatcaggccgccagggtctgaatactagtagcaggattagcctcttctagggtagacgaaacacgagggataggaagaagtagatttttgagtttagtttaaggtgcccttaactgggtaactgtcttcaggtctttgtattcgatcgcgcggacaagagtaggctacgggtgaactcttgtttttgttggagaaatcctcataatgtagtgcgacctgcaagtgcattgattggccgtttggtgcattaagttgtgccttacggacatcctctaacgcttggggtacaggagtgctacaccgctcgcgagtacactgctctggaggcgggcctttcattaggctcacctctctcttctttctagcctgcaaggtgacgggctcttgccccgatccctgtcggccgcttcctgcctggcttttaggttttacccactttatagcattg

SEQ ID NO: 2509 - DNA, 877 bp, unidentified
  source 1..877: mol_type = unassigned DNA; note = unclassified Mitovirus sequence
cccaggttgtgaaacctggtaacatgtcaagtgactggagcttggctcgcagtgtagcttgactgaagggcttagaagcccggaagttaagtttgactctctcttctaacgaggatgagttctacacctgttaacccatctgaaatccagcaggtactgtttctatacagtcttcgtaacagggttgaaggagacacgcccgcggacgtgaatcttcttgaaaagtgaacttgggctggggccaccacctaaggcgaagacccatgaaggcaacaatgccaaaaaacataaagagattttctgtaaaagggatttctcgccatatgagacagaagcgaccgggttccctgcccgaagtagtaggaagtgtcagcgcaaacgcgagctagtttatactagtccgttcggccgaaagggccgttgggcactacaggttggttagtaccatccttacttatatggtcccgagagggataagtagaaacaggagaccaccctatagtgttggaccttagaatcgagcagttgtaaaactgtttgaggggcaaaaggattatggatctaggtgtcttacctagtttgtagtctatctaagctaaaactacttaggaaatggtcaaaggaggcgactccgatctgtaccacagaaacctgcagcctgaccgaagaaccgggatatccttaacaggaccccttgttcgccagaacccctaacggggaaggtaagcctttaaaggtaggtgagacctcctggtgatctattcaagtaaataaactccgaaggcccgttggtagccgaatggcatcatgggagataaagagggtcagaaactgaaggctatctattaactaacaatggaacaactaactctacatt

SEQ ID NO: 2510 - DNA, 877 bp, unidentified
  source 1..877: mol_type = unassigned DNA; note = unclassified Picornavirales sequence
gcatgtcattttagtcgcgcgagggggacgacgttaactacccccgccggaatactaatccttagacgttcttccctttggattaagtaaatcttaattacttttaaatggctaatagcgatttaccggaatttttacaaaaatacgtcacaaattttcccaaggccagttctggattgaacaatcaacaaaagcaaagtattgaagaattgagaaaacttcccattcaggatacagactcacctcgtttaatttgcttgaagtgttttcctgacatctctttcgagtctatgctaaaagaagaggtgtttaagtgttgttggtattcatatttagaacatagcagtcagtggaaaaatcatgtccgtgaacgatacgaacgtagtcgacgaattcgtgaagaagagtctgcctctgggtctcctgaggccgattaattttgggacgaaggacattatctgctattatttcttgtgtgaatatacgcgggaagaaaatccatgcccgcttaataatcaacttgtagcaaccaattctcttcaagaaaaattgtgtccattttgtcaaagtaaacgtaggtgtgtcaaagcagaataccatattaataataaattggctgatgtacttccaaattcaatcatttttacagaaatcgaagaccacactaagtcgttgagaacattgtactttaaaggattttatccaggagacgcaactctcacaggcaagaaccatttcaacattcgagccgggtacaattatcctgacggtcgctgtgtggaatttcatcaacgatatggacctcctcaaaacaattatctccgaactcaattcagctttggccactccccctgccccccaatcagaggaaatggag

SEQ ID NO: 2511 - DNA, 877 bp, unidentified
  source 1..877: mol_type = unassigned DNA; note = unclassified Negevirus sequence
cagactcccgaaccatataccaaattgctagatttagtatttaccaagtaccagaacgtcacactacaaattctgcaagatcccgttattcaaaacctcacatcttacctcacaaagaatctcacattgaattttacagcagaccctatagattacaacgctttgtccgcactactgaaccgcacccttgaagctttggtagtgaggttacccaacatgtcacagaccaccgattacaaaaattttgccaaagttatacatcaatccccatcaaacaccttatcattttggaaagaaatcatagactattttattgagcacgattacagtataactcacaaagtttacggacaacctgggacgaaaaagcggttctctgttgtaggctatttggaaagtgttttattgaaagttgcccatcggatcataggtacgttaaaggccgtgttgcacgatatcatagaacctatatttttaaaaattttacgcaccatagtatctcttaccgccgaaattgttaccgccgtatttcacgtaattaaggcattatggactgaaataaagacggccgtcatcgataatcctgagttagttcgtcatttttcaacttttgttaagtgggtcgttcagcttgttcgcgacgtttcccacgttctcgtggagcatctcgtcgagttgaatgaacagtataaggttgtggaattggtattgctatttgtcgtgtgtgttaggtatttgcgcggttacgtcatatctgcgtttatagtggccgccgcaggataccattttggatacgaacgtgtcacggaacataccataatagttatattaattgttattttttcatttatacacttcctatttccagatttaaaca

SEQ ID NO: 2512 - DNA, 877 bp, unidentified
  source 1..877: mol_type = unassigned DNA; note = unclassified RNA viruses ShiM-2016 sequence
cccgtatgcacatttacatgtgcatacggggattattattgaagtgctggggattctcccagcaagatttttacacgagtacgctcggtatttatcttttgaatgacataagtacgcttttgttattcattcaaaatattattttccgaaatttctttatgtacgtttgtgggtatctaataaccctctttcatgaacagaaataaaaagtttagacctaggtatagcagaggagtctttaaaaggccttactggtcctgatcatgaccacttaaactgattattctaaacagaattcaaacttatacactgtcgggtgtttaaatacgatgtgatgaaaacacttataaaacatagtgtcaactgatacacttgtacacttatatacaagagatctaagctgtaattaacagcagctgctttgttaagtttacttctttgcagtgttttaacacggaattcacatattcctgcatctaaatgcaaatgtgatctttgcctatgatatgtgcatagctgcaccgagttaacgctgaacgtctctcacaatcgtgagaactagtatgtagggaacgcaaaacaaacgaggctcagtagcaagcgttttgaatttattaaggtaggcttgctcatttatataaatgagtttcatatctggaagtaatgaccccagtatgatgagaggccttagtagataagataagctaacttgtgagttgaggatggccatttgtccgtggaataacatccaatgatgctcctgacgaacgttctttagcctaaccagctatcgaacccaaaggtgctgtgccgactgtcaaagattttatctttacaggacacctgtacagatatctttgacacgttgcatttaaca

SEQ ID NO: 2513 - DNA, 877 bp, unidentified
  source 1..877: mol_type = unassigned DNA; note = unclassified RNA viruses ShiM-2016 sequence
gttagtagcccttcttttataaccccgtaacaaaaggttaaacccttgggaggacctgaagcacctaaaagcgcaagatggaaaagctactaaaacaaataattaagaaacagatgttataaaacatcacaccagcaataaaacattaacgttaactggttataagaactccttgagaaagagtatcccagttatattcaaaattttaaaagaggttacttaccaacttaaccgatatttcaaacgagcgcccgagttagccagacaaggaccagtagggagaaatagtaaatgttcaccttgagcaacacggaaggtgcgtgaatgaaggatttaatacaaccgtaaataatcgcgtcaagtgggaatctttacagagtgtagataagagaaaatttttataaactagagtccgaaaaacgactgttccgaacaaagtgttcacgaatacagttgtggggcgccaagcgagacaaattaaattttgtttgaccagttagtcccagctcttttaactattaaaattggaaactatctatcataaagtagagttagtacctttgtaaatcgtataagaagaatagttataggttaacttatttaggcttatttgacggatagcaatcaaactactagtattagtagacgggaaatttgaagcctcccaataaataagttaaatctagcataagcgtgaggccggcagcgtgtgagaccggataacacctcatagttcgcgacattgaatgtagagcaacataggtattttgtttcgaaactcgttcaaaattactctggtaggaattcaaaaattgaacatcctatcaccaaataatcacacaataataaaacaaacttaaataatcatatatcaata

SEQ ID NO: 2514 - DNA, 878 bp, unidentified
  source 1..878: mol_type = unassigned DNA; note = unclassified dsRNA viruses sequence
tgaataaaaggccgaaaggctggattttcagagcatcgctccgaagtccagctaccttttatattgtccacttaattagctagtggatgatctcaggtcgggagacaatccggccagtgtagtagggggcaggaaagaactaagcacgtgcttatcggttgagctcacccaacttgggctaaactgtagcgtgtggatactcaaggtgtcaaggtgcggtcaacatgcaaacacgaccagttccgaaaacatccacaaaccttgaggcctactacagagcgtaagaatgctagggtagaaagagctggggctataacccccggatctcttatcaggccagcatcgctcagcccctctttttgtgtaaatcccacccggtctagcggagtgggacgcatataaaatgagcgtgtgaaatcgctctaaccgtccaagcacatgacactaaactgtactcgcccaggatatggcgttaaactgtaccatccgcttttgccagcggttaaaacaatggcttttcataacagccgcgtgtgagtccgcgggataataagtgttctaacagactcaaaaagacatcctatttccaagttttcgtcgctacgtcaaacgtcggcacttcttggatctggtggggtaacatacacgtcaagtatggtgtgaaccggggctacacaactaccggggagctaacgtaactgcgctggtgctctactttcaacgtgcttcaggaccgaaaccgtccgtaaaccaatgggttgcacagaaagtaaaggcgtagggaacgtgcctgggacaagaaccaggtggacagactgacactcaccagtgccttcccgatcgaaggcagtagcaaacagtcggtgcgggaactccgc

SEQ ID NO: 2515 - DNA, 879 bp, unidentified
  source 1..879: mol_type = unassigned DNA; note = unclassified Iflavirus sequence
cagggattttatccctggggctctttgagaagattcactaacactgcgttgtaagataaggaatactgtcattactcactcacctcctagatcattcgaaagaggtagtatgatttcagatatttaaactcgttacggcactgtggtagcttgcttttcaaactcgaatcaccattcgtttcacaaaattcgatttagtagtatgtctcattgactttacaagtaatcatataatacttgttgttttccatttgaggttttctacctcctaaatttaatcaaaattatgggttttcttcccgtgaaattcttttagtttttaggcgcttttcgaactttgtgcgaaacaaagcggaccgtgatatatagtggaagttcaatgtgaggtaacggaaagataaccgctgtgtaaaataggacttattctatgtgtgctctttgagaaattctttacctagtattttgaatgagatacgatggggaccacatagttttatcctagcttctaatatactctcgtatctgtttggagcgattgagaatagtagaagccataagttacttctgtgcacttgctagtaaaacggaaactagtcacctcttagcagtgagatactgttaccgggttggcatccggtatactgacattgatggaggttacctgatactggcgcagagctggtatggtgcattggatgagtgcttgcattcgccagtggattggtgtcggctgcacgcttataacgatgaactcgaagatgggatacctgtttaggtccttagtgagaagttatttgcctgtagacctcccttgtaatcgatgaaatctccggtgcataaaacgggctcagtgaagaacacagctactttgatttcaat

SEQ ID NO: 2516 - DNA, 881 bp, unidentified
  source 1..881: mol_type = unassigned DNA; note = unclassified Sobemovirus sequence
gttgatacaactaggtctttgcgacccagtgcgtctcttcataaaacaggagccccatccactcaggaaagttcggactggcaggttgaggctgatttcatcggtatccctgttggaccaactggttgagagggttcttttcggttttcagaataacctcgagataagccgatggaagcagtgtccatcgaaacccggaatgggtctcacttctaaggagcaatccgatgcgttgtgggacgagctgaagttcaagtccaccctagcccccgcggctgaggcggacatatcgggattcgattggtcagtgcaacattgggagctaatggcggatgtcgaaatgagaattcgactcggagacttcagcaaccttgctgcaagggctgctaggaacaggtttacttgtttgtcgaactcggttttccaactgagtgatggcaccctgatttctcagggactaccaggcctaatgaagtccgggtcttattgcacttcgagctcaaattcacggataagatgcctaatggcgaagatcatcggctcacgatggtgtatagccatgggtgatgattccgtggagggttgggttgacaatgctgtagaaaagtatcatgcacttggtcatgagtgtaaagaatactcagcatgcgcccggacatacgtgagcgggagcggagaacaaacccttcaaacggttaatttctgctcgcacgagttgtccgagggtaagtgtcatcttacgacctggagcaaaacgcttttccgattcttccatagtacggctccgtgcattaggagtctggaaatggaattagcgggcagcccccagtggcccaaaatctatcggtacctgcgtcgggtgggcttagcgcccgacaaag

SEQ ID NO: 2517 - DNA, 882 bp, unidentified
  source 1..882: mol_type = unassigned DNA; note = unclassified Marburgvirus sequence
cattaagtgtgcaatgatgagaactttaagataattgctactgagcccttcttctgatctactgaaatcaacttgggagatttttgagaagctgataacttaatgtgaatcaacagtttacgtattatcgattattatggtttgagattcaactgttatcatcgtcaagagtgacctttcctatttgatgcattaatgttttaaactacctcttaagcctttgtggatggtctcaatatgcgcgtaagggttaatttaaagagatttcttgttgcatagtttttcgtgttactgatttaggcttgaagacatagttaagactggccgaaaatgctctccagtcaactccatttcctctcaggggagacgtgctgtccaaagagtcttaatccataatcaaccattgcaagaattaatttactttttccgttatacttatctacattaattctttaaatgtccagcattattaacaacttgccttacttcaatcttttggatgcaaatcataaggaaagatgagccactttccctctaccctaagctaaggaaatttctcttatcagctcaaaatatgatccgtcaggtcacgggccattcataatctgtttgagcgtgaatattgatcaaataaccaaatgatgttgcatttgtatagacgcaattatcctttattaagaaaaagacaaatagaacacagatagttgacaaaattttactttgataaattttgcgaggaattataaaaatcttgaaggataatttatagtagagtagaatcgaagaacattaagtgttctttgttagaattattcatccaagttgtttttgagtatattcgcttcaatacaactcctctttatatttgatttaagatttaaa

SEQ ID NO: 2518 - DNA, 882 bp, unidentified
  source 1..882: mol_type = unassigned DNA; note = unclassified Riboviria sequence
gcgccgtaagcgcgaaggaggacacaggtacccgatgctgtactgattaattcaggcattttgcctggtaaagtcccagggccatgggaggaaatgcccatggcgagagagggaagacgacattgcaaaaccagggtttgcccccctctgccggagtcgtccgggtgttggtagagtccacccgtagaccgaggcttattcttctacactcactgtgcccgtagtgagtggcgagcctgctgacgctgttttttccggagcgtctgaggtgaaggccgtgcgagagggggatttagtcacctccttggtttggccaccttaactcgtactgaacggggcccaggctctttggcacgccttttgcgtggcaacactggctaccaaccggcgacgggtggatagttggaagccccgaatggaatggctatgatgcgacctggcgcgacggtggggagtctcgttctgttacctggtttcgccaggagattgactccgtcacaccacatcaatccagggccatgctgttgacaccgtcagcacatccccagtgaacctctcatgttgagtcagggccgacgcattttgctaggccaggcagggtcgagccccttaaatagccagcagcgagcacgttgcctgatgcagagtgattcctattcatattatgttcactgcctcccattgcttgagggggagggttaagggggaggttgatcacctccgggactagtctgaccggttaggcatggttgactgtgggtaaccaatcccacttagggcgttttgcaacacttgagcccgtttggctcatgtgacctggtatcaccaccggttacgttactttaatcacggcgctgtctgccgtcattgcctttattaaag

SEQ ID NO: 2519 - DNA, 885 bp, unidentified
  source 1..885: mol_type = unassigned DNA; note = unclassified RNA viruses ShiM-2016 sequence
cccaaaagggtctggtctatgtggcacccgattctcggtgcgggtccttgtttgcggatgccttgggccggccggggatcgttgcgacgggcaggtgctagccctagcgtagcctccttctacagttctcctggctgtgggaggaggtcggactgatgtcagctgcttgggtaaccaagcagcgtaacccgagcactctccttcgggagggtgtaaggtgtgcgcacactcttacacaactccttggtagaaacggcatataaaaaccgtggttatagcaaccatgggagactttttacccggccctttctagggcctatagtgatgccgatgtgaggaggtggagtgaacaggagataacaacatgcaactacaatctgagaatgcatttcaaaaatgacaccctcttgtagatgcccgtgtagggccagccaaaacgtcatctaagggcggggagctcgcagcgccccgctgatggatagggcgtgctaagtgtggggtttatttaatcctgctaaatgccgagagactgcaacggctgccaaaggctacaggggcacagtcccgtcgtacaggtgcgggcgggtgtttatacctgtagtgagtctgcgattttgacgagtgatattaacaagcgatattccaagttccaggtccctgagcaccttattcgagctatcttatatttcatacaaccattgtgtgaggcgttcttctaagcgttccgtcgcgtccttttcaggacgttagatttcgagtgtctttgaagtgaattaaacagttcttttcagaactacccaatcgcccttttcagggcggcaaggtttcggtgttttcaagtgttttcagttaggccatccaatttcaaacgcttctacttgttta

SEQ ID NO: 2520 - DNA, 887 bp, unidentified
  source 1..887: mol_type = unassigned DNA; note = unclassified RNA viruses ShiM-2016 sequence
gccgtagtgccaggttaacgtattaattaatgtgcgggacacgtatgagccgggcccgtttgggtcacgcggcacttgccgcattaatacctgttggttgacacagagccggcagggtccacgcgtctcgacgtttgcttcggcgggcaggcgtcgcaacacagagtgccgctggcgcgtggatgtgagaccgttccttgtttattgctttacttggataggggtggcggcgcggatgcgccggcccgagtcataccccgaaggttgcctcatgcctgagtagcggagggtagttccgtgaacagcctggaagccgggtagcgccggtgacggtgagggcgccgctgttaaccctgtgcgtgggttggtccctttggagggggaacgtaaaatggcggttccgttgtgtgagtggtgactcgaaggattcgagcctgcgaggccggcaatgctgcgcttgctacgcagcaaccgtgaatatgtgggttttcggtctggatgtttcgttcgcgtagcgcgcgcgggtgaataatcgcctagggaggggcgacacacacggacaaaatggaagtgcgggggtaacggcccgcttaacgcactgcatgggggacgcccccccctttcgcgtgtttcccgcacgccgtaggatattgcatgatagtctgctgggagtagcaaacccgttacagacccgtagtcggctgcggcgccgacgaatttaaagtattgtaggccatatttcaaaactgcgtcgagaacactaccgggcgggccggtggtttcctctaaggtgcatctgtgtcgcactcggcgccacgcctttttctccggctgccggtgggggcagcttgcgtttttcgtcttcgcaatcgggagtgtttttagcg

SEQ ID NO: 2521 - DNA, 890 bp, unidentified
  source 1..890: mol_type = unassigned DNA; note = unclassified Riboviria sequence
cacgggttaatcccgtgcagcgctctagtagtatttcaaattttgaatcgttacagtgcatttttgttgactaattttgttatctagttcattgtcagttcgatttatcgttcgtgactataatgttcgtagaattttcacctttagtcttcgttaaatgtattgtttgttacaaaattctttgactactaaactttaggttagttatatattatagttaagataatttatatatatattataacgaaatatagtattaataaaatataaaatacaaggtaccgaccttggctatctctaacaactattaatgtaagtgttatgtattttcactgtcggccagtccaagctcttcatgggcgagacaaacagtgacaggagcacaatcatccctcctggcaacaagtacctctcacacttttattaatagaatgattgatagtgtataaataataattttaaggcaaggttagattgtattgtaaatgtctacgagtagatgaaacggtctttgataagtgtgttaaaatggggacccctccaactggtttgcagccagcgcctactgccaatagacataaaacgacataatcgaaagtgaccgctttatgtgcaatgctaacgaccactcttctgtaatggagggagtgtaattcggctgggcaagtcccaaaacctcgatgacgtgtttatccacggacttcgggaatatatctctaagatatagtcgaacttctgaaacttaaatttacggacgttttagtaggaagattaaaacgtgtccatttctttcatttcttttcttatggtgacaatttgagtgattatttcagagaatttgcgcaaatttataaaagttatttcccatacacatttttattcctatcacc

SEQ ID NO: 2522 - DNA, 891 bp, unidentified
  source 1..891: mol_type = unassigned DNA; note = unclassified Mitovirus sequence
ccggccttcctttctgtccctagccaggcagataaactctcattcctatctaaatcctaactccggtgaggtctctgttaacgctgagaaccggcaaaacgcactcaatcaatgagttggccacttgtgatgatgcgtataacccttcctactcttggctagaggaaagaagggtttcctatacatgctccctcttttcctttccaaagtatgttactgtccctaatcttaaacggctgagtagattgtctctctagtatcagcaatgcttgaccatcctagctctcccgaagattgatcgcttctgggtcttggggtgtccgagataggaacggacataaatatatcattaattacattcatgaagtaagactcctcttaactccctactctactctagtcctaacactgttgaggctaaggtaagactgcggtcttcttagatcaactacttgtccctaattgcttccacttcataacaagtctcggctatcacgagcctcggctccggtagagttacttgagtcccttaagtcccaacgtccctgtccttaatacatctctctgttccctttctctctttcaaaactcccctctgactccttgaaagcgtagattcaggtcttggtaagcgtggcaaggttaataactcacaaagacttgtaaaccgcaaatccttattagtagaacataaatgattgttgaagataagaaggtctacccctcatcacttgtagggtcaacatgagtgtgcccgtcttgggtatgttactaattcggtacctatacggggggagattaaagcccgcacgtaccatccctaatcgaagatatctgtgtgatcagattttaatggacttactatgataagtagtacagcagttttcagta

SEQ ID NO: 2523 - DNA, 897 bp, unidentified
  source 1..897: mol_type = unassigned DNA; note = unclassified RNA viruses ShiM-2016 sequence
gtgtttaaatttaggttaataccttcttttaaacactgtatacacacctaaaagcgtaaggtacaagaatcatacaccacctaaaagcggactgtatgtttaaaacaaaccccaaaatccaattaaaacaaaagcctagtcagttaatattaatctgatttaattcaagagatgtgggaagtctcgataatattaaccttttagttttaagttcaaagaagagtaaaacaactaagctctgacctcttagccgagccgtgaaccgccaaagaaaacgcagtaggcgacgagggtaaacgttcaccttgagaaacgatgaaggtgcgtaatcgaaaacttaattaataaattcatctcttgacaccaagttgagtgggaaaatttattagtttgaaactcagattgtaataaaattttgaaccgaaacgataagatttctatgaatgaataccttatcaagggtgcgccaagctagttagattaaattcgaaacgaaatactagtgcccattcaaaactataaaaacaattgaaactttaaactaataaaaatgtaccttcgtaaaccttgctcttttgagagatggatattataacacataattgcttgctagcgggtagtaactagccaatttattgaaggatgaaagccacatcccattatgtgattaagttagccttttggcgtagtgcaggaaccgtgtaagccctgataaaccactatagattatgacattgaattcagatcaacaaaggtatgcactttcggaaacccattctaaattactttggcaggacttcaaaattgaacgttctgctttcaaataattacacacaaaacaaaactttatttttcatttcaacttcgtttaatttgactttgaattaataatcaatt

SEQ ID NO: 2524 - DNA, 898 bp, unidentified
  source 1..898: mol_type = unassigned DNA; note = unclassified dsRNA viruses sequence
ttgcatgcctgcaggtcgctagaaaagacatggttctaagtatagtcgacaacggtctattgaagatctcttgcagatggaagatgccgttgatacatagccaaccttagtcgttagggtaactatgtatggagagagtttagtcagtctgatctgaagaactactctctgtcgaacgataacagccatttcattttcattttctttcttttcatttttgttccattaaattcttatttatttcacgttctgcgggataagaggccactaccgcgatagaaattagtgtggaattaagcatccaatcaagaagcagaagtccaacagccagttggatactgtaagctggaacgggattcatgtccgtgcaaggacctaccccctctacctttctggagctccgtgcctacaaacttacctgacctagttatgcctagggtggtatgctgcgtaggagcgaggagactggggagatgcgggacattaagagtaggcaccgagtgtaacgactgcgaagctttgttcttggttagggaacagtctctccggcatacccgggggtgatagcatgcttgtgggtcttaattggctcgctgcttgtaggttaagtaaccttcttttcctccttttccactacactagtagtgacgataaaggttgctccttcctttcacttcagttattcttccgccgtcagcgaggaaacagttggttgcaataatcttggacttaagtgtttgagatctattgactgctgcgtacaacgttgaggtatcgtttgattgatttggattcttcccgcgctaaacggttaattttagtatcttgaagtggtagccccacaaattttcaaactagcgtgatttgagacgccctgagtggttaatcgcgtttaaaa

SEQ ID NO: 2525 - DNA, 900 bp, unidentified
  source 1..900: mol_type = unassigned DNA; note = unclassified Riboviria sequence
tttcaccggcccttggttagggccgggacccttggttagggtcgttaatgttgtgttttgggattcgatgagagcaccattttggtattttgacaccgggcggtacctttgcgcgtggggcccgggtgcgaccagacacactcacgttgttgctcgtcaacgtgaggcaagatggagtgcggacgtctggcgcatgtgaaagatccgctcccctgcttggggagttgcgcggggccatatgccttaccccgcggccgacgataatgtctagctggtccgtcggcgtgaacccttatgcctcagtagctgcggtgctgcgcggtgaagagcctgggagacttggcacgtcttacggtgagggcggcgacttgccttcttggttgggttgggagttggagagctcccgtgaaagtcgtctggtgtggcggtaggccggcgaagcttgcgaagtatttttacagcaagtggattggcgtctgagtatcccgctcgggtgtctaatggttacgcatgtgaatacgttttgcatgcagaatacctccgtcatggcgttgtccgctttgtgagggcacgacctggtcgccgtctgtttggcttggcagagcgcgcgacttaccacaaaatgtctacggtttataaaacctcgtatgtggctacacccacttattaccgaatcctgagcactctttccacacgtgatcttttacttgcggcagtattagatcctttttcatattatgcccacacgtccatccttcgacgtgccgcactgatttgggcttgttttgatagtagcagccagcatggcttaaggtgcaacgcgcagttcactgctactctacgatatcgctgtcgcggttctggcgtccgtgactcagaaaacaatcatcgtcattcagt

SEQ ID NO: 2526 - DNA, 901 bp, unidentified
  source 1..901: mol_type = unassigned DNA; note = unclassified Caliciviridae sequence
cgatatggcatacgtaaattctttactcttatttttcctatccctccacaagatggctcacgagcttatcgtgtggagtctctttggggtacgggcgcgggttagccgcgccccaactcccctctttatttcagttaggtcccccacttcccggtggcctggctgtgccacctatacacctggcaccacttttgtggtctcgctgggtgaaggccccattggccgtctggtcacagcacggcccaacctagtacccacgaacgcacccaactgagcgtcgcggcgtcatgaggcgggcggagcacccccctggtaacagggtcctcccgggccacaagccacgtgggcagggcgaaggtgaaggaagggtcccccgacccaacctcaagcctgaacccgcgttcaccctcatgatcaggcaaacccagcctggcggttgtttgttagtattggcgaaaagctggcaccgactgttcccaagaccacccaatggcaagggggctggtgagtagatgccctgcaggtaccctttcggatctgagcaggggcccttgactataccgttccggtaaacagggggtaagaaccatgaaagcgcagcccccacaacgggttcgtccaagggaggggtacccaccccgacctcacgacacccgtcatttcctttttctttttcctcttgtttatggtgacaccaatggtttttgagtctctggcgacttttgtttgtgtttggctcatcttctttttccactcaattcgcctgggcgcacaactcacaaccatttttggctttttgattcgctatttgattggcgtttttctttggctttgtttggagtgcgtggactttagaccctggtttctttatactgactctgcatggtccagatagaatatc

SEQ ID NO: 2527 - DNA, 903 bp, unidentified
  source 1..903: mol_type = unassigned DNA; note = unclassified RNA viruses ShiM-2016 sequence
ggactctatataggtttcacaacctatatagagttccatttgattagatattgtccgcttagcaccggaccatgcttttcttaattttattgaatacttacattctgaataagtatagtagtctcctctcaggttattactataccctgtttggagtgtctactttattcctaataagtttcaccccttattagttatgtttaagttttagtgtctataagcaccttggtattaggttctttgaccctattaccaatgagtagcttacctaagtatacgtttttcgaaccgtataaattgcttaatgtattcattattatttattttatctcgttgataaagaattatcaaaaataagagagtttgctaaacttcttaaatcgtctacaaggcgcagtttattttatttctctgttaaaaatattaaccaattttattattgcttcaacggtaaatttgtacttgattaaaatcaggagtacattacccgtgtttagcttacgatttacgaatttaattaaattggaaatttgattgtaatgatttagatttgacatttcaattgcttagagaaatcccactttattaataagtttcatttacgataaatgcactcgcaaaggacgagtaaagcgcattttagatgtataactgttattgaagaacaattggttctctggattttgattaatgcgacgtacagcatgttataaatcccaatactctttaaagtacccttagcttcagcacgtaccagcgtgtagggagttgcttcccgtgattcatataaggctatgctttgagatgaggcatttagattgatagtttcaactttttatttatttttgtgattgttatttgttagcttttatagttactgatattaaccctttctttttaatc

SEQ ID NO: 2528 - DNA, 905 bp, unidentified
  source 1..905: mol_type = unassigned DNA; note = unclassified Iflavirus sequence
cgcgggtttatcccgcgcagcgttgtagagcataatttcactaatatttcaaagtgcatgtctattgtaaattatttgtgttagttcagtttgtatgttcctaaaggttcgatacttgttcgtaatacagagatgtttcctttgatggcatgtatttgaatattagctttgtatgtttacgtcatagttttaaaataaattattttgttagttattgtatatattatatcattgtatagtattaataaaatataatactcggtactgaccggggctatatctaacgacttattattttcacatcatgtgttttcgtagtcggcctctatataattcctttcagtgggtattagtaactacgacaccggcataatcacccccggtggcaacaagcacctctcatgtgtttataataagaacgatttatagtgtaaaaataataattttaaggcaagactaatttctattgcaaatgtctatgagtagatgaaacatagtgaagaagtaagtgtgttaaaatagggacccctctaagtggctaaaaccaccgcctactactttttcacgtattatgacataatcgaaaatgaccgctttgtgtagaaagttggtgaccctcattctgtcatggaggtgaggttaatccggctgagtttatctcaaaacctcgatgacatgtgtatccatggatttcgggaacatatctctaagatatggtcggacttctgaaccctaaatttacggacgttttagtaggaagaataaaacgtgtccatttcttattcattttcttttatggtgacaatttattgagtattaacattattttgtttgtttgattctatcacttttacagtcttgtgtattctttccactttattttgaatttattaaatctttaaaaa

SEQ ID NO: 2529 - DNA, 906 bp, unidentified
  source 1..906: mol_type = unassigned DNA; note = unclassified RNA viruses ShiM-2016 sequence
tctgtagattcgttcttatgaacgaatctacgcatatgcttgttttggctgcaaaaaacagccacttcgagaagtcgaagccatacatttagtaaatcgccgcactaccgtagcggataaatgatggtggaaaccatcacgaagttacgaatgtatgacaacgcgaagttatttccgtaggagcgctcactccgaatataaaatgagcaacacgtggaaaggaaaaaccacgataaaacaaaccggcaaaccatttgcctatatgtaatttgtctatttgcttttgcaaagagtaaccagggttttaacccactagtgtacaataagtttaaatcgaaagatacctctcgcaaaaacactagcttttataaagaaaacataaaacaaataaaaattatcgttattatgctatctgtatgctgaggtcacagctttacaaaagacctattaggtgatctattcaccttgataggagttaagacactcctccaacaacagtcatcatttagtccgtggctacttagagccacaaccaaacaaaccggagtggaaccggttgacacagccttgtgtgcttttatagcaccttggcactcaccttgtgagtgtgtcaaacctttagagtctcatggatataatacctgagaattacataggacacaaggaattagacgcgaaagtccacctcagagtggtagacgccccttagtttgttcctcctgttgaagacaacctttgacattactttgactagacaattaggtcccgatgaatatagagtgattagactcttgacataggaaagcctctgattgttgaacccttgtaatggataaggaagttggaaatttgagtgattcttggagaaccggtaaaaatagccgggcccttgacttgtaaatcaac

SEQ ID NO: 2530 - DNA, 908 bp, unidentified
  source 1..908: mol_type = unassigned DNA; note = Riboviria sp. isolate nut157pic1nc genomic sequence.1 sequence
ccgtgggacttttcagacccgagctcaatcaactcgccatgatgcctgcttgcactattcattctacatatggcccgcttctggttttgactaaaaagccaatactgagctgcgtcaattccgataaaccgaactaaatcaatttatcagcacttcgttccagattctgtagggtagaagttacaagactacttcacctttcctagtggatagcacataagaaagtaaacatgcgttgatttgtttttgtgtttgctatattgcttcataggtaaataagagaagaatgggttcaattcaaacaaaagcatgctcgtgagtgaatcgaagagccgtgttctaatattatttagagctagacagcaatatcgtaaacacaaaaacaaatcaacgcatgtttactttcttatgtgctatccactaggaaaggtgaagtagtcttgtaacttctaccctacagaatctggaacgaagtgctgataaattgatttagttcggtttatcggaattgacgcagctcagtattggctttttagtcaaaaccagaagcgggccatatgtagaatgaatagtgcaagcaggcatcatggcgagttgattgagctcgggtctgaaaagtcccacgggtattcaggtgcaggttctcttgaaaggttttacttctttgaagtaaaataagacaccgagaggtgtgtcctggactatgctggttaccttagtggatatggcttgatgaactgagataagcaaacattcgtgtttgttgcttgagcctttgattgatgtatcgattttagtagatggtttgatgaaactcctactgcgagatatattttaacccttttatgaaccgacgtggaatttggtaagaagaaagggcgaacgatggctttttattttctctcatt

SEQ ID NO: 2531 - DNA, 909 bp, unidentified
  source 1..909: mol_type = unassigned DNA; note = unclassified Picornavirales sequence
cgtatcccttatgggatacggaccttttgttcatgtcgatttataatcagcactaaatacgtttagtaacgccattgtaataggacgcttgtcgactattatatataagagaattattacgcgtatcgtagtgtgaacatttcataacgccattgtacgtatcgtacgtttcaaaaccgcttagatttgttgtcgtacgtgcgtatatataagagaattatgccgtgttctggttatttattgatgtgttcatcaaaaacttttgataaaacacccattttatttcatttgtagatatttcatcattttagcttgtaaatatttaggtaattatattttgaagtgaatattatctgccagggcagcactgatatccaattatctgacctgacagcactgttattcatagatatttaataaaatgagtattatttgcctagacagcttatatctgcctagacaacactgtcactcaccaaaaacattttataaaatagaaaatggcgatctttgcatcttgttgcaattaagccaccaaaaatatatttatttgattaatgacaatatgtagccttttatcatttggcagatggatgaaggattactcacttgttgagcgtaccaattccacccatttgactataataaattagcgtatcatgttatcacccttattgttgttaataacctaggagtccagactcatatcacgggttagatgagataaaactggttactgcgtgtcttgcatagggctgcagcgaaaaatttctatgcacaagtattggatcttgtaaaaattcacgctttgacttttgagcgatatcacggtcacccataaattttcaattgtacaacctgcccacgagagttaacgttattttgtgtttattatacgattttattaca

SEQ ID NO: 2532 - DNA, 910 bp, unidentified
  source 1..910: mol_type = unassigned DNA; note = unclassified Picornavirales sequence
aatcctagggggcccctattttaagggccccctagatcgcgtgtcgtacgtcttacgacttttcatttattattttatttgaagaatttcctataccgcccttcctggcggtttcaacatcatatgtaatatatttttgtcttaaatttagttttttgatattacatatccccgttattgctcatgtgtgtttctcttgaagattcacgtatttcgaaacaatttagttgttattctattgtcctggagcaatatcgtattcagcaatgcgtttagattatgccaaatcctttggcgataacaaactcagagcacctgtcgcatagacaggccccccattccatgatatcatatcatgttcggataattagaagttccgaacctctagcttttattatgagctgcttaaatattcataattaacccaccccatgcagagtagactgtccaaacatttcgttattcaagactttttatagctcgataaattgtcctctgactctcaatcttatgcgctagaaccgaaatcttagcttagttctgatcatcctatatttgatctgatgactataatagttagactcgaacctcgcttagtctttaaagaagaggtaaccgtgtattatttttaatcttgctttgctagcagattgcttatactacccacggtaatattaggattgcaaggccacattagtgcctcctgtttattacccggtatttcaaaaccacggtctgaccgaaacttgttagtagtacttgcagaaatcagcaacatgaatctgtaagtggttatgctacaggatctttcattaggtccgcaaaactttcttaaggtttcaattcccagcgtcctttcgtcttagttttatactacttcactggatactaaaacagttttaccttaacc

SEQ ID NO: 2533 - DNA, 911 bp, unidentified
  source 1..911: mol_type = unassigned DNA; note = unclassified RNA viruses ShiM-2016 sequence
cttgctatgggtcaaaccatagcaagttatactccgaagcagataagcctctcgggagttagtattgaacgattgtccagtgtgacgatttcgaattttatagatgtcctattggagattttctccagtcgaacttactagatattttatttcgtcatatttgggttttcttttagtatatattgtgttaaatcaaacccccccccatttttgagggaagtctttctacgtttttagactagccagcaacaattttgtcactggtgaaccaaaacgacggtatgacaggtttgacatcctgttgagtccgtgcctttttaaggaattgaacgtagagttctcaaaattacatttactgtggtttcaactgaaaagctctgtaagcagtaaaatgtgatttttgatagtgtttataagtaaaatattacttggtttagccgagtcctaggcgaaggtctgtgattagttgacctctatgcgcgacttacgagttgtgtttaagtaacaaggcgtcataggcttagccgcgcttatttgatagacgtgacgaccatctcgttatgttcatatttgtagatctgaagagtcatatcagactgattatttgatcaatcggtgtgcttacgctcaatatatgccctaagggagcaatctctccgagtcttacgagtccgttgagtgagagtgttatacaccaaatattgtgataatgtcatgagattatctactctaaatcttgtgttaaatatgaaccacctcttgattatttgtggttaaaataggcgctttactaaaagtagtaatttgaacagacacatgaaaagtggttttggtgattgccataagagcaaaattttcacccatctaggccgatgtaaaccttcccgtgtggaccgcgtgcggaacggggt

SEQ ID NO: 2534 - DNA, 913 bp, unidentified
  source 1..913: mol_type = unassigned DNA; note = unclassified Picornavirales sequence
cacctgacgcctgtctcttatacacagcgtaaatcattaaggtgcaattaatcaatagttgcacaagaaatcctgggaggtgactcccaggatttcttgtgcaactattgattaattgcaccttaatgatttacgcctacttggtgttgacacggctttttatttcacgccgacttttttgcgaaacgcatagacgccgcattcttgtcgacacggacttactaagcacgctgactatatgtagacacggatgatttttgtttagatctgactactggaaagacagttgactcaaggaaagacttgaaaaaccccacattaccatacttaattattgtataagtggttttagtcgctgacgtaaccactacctctggattagttttagtcgttgacgtaactattctcctaggttaagtatttcaagaatatcaatcttggtacttttatactttaatttatttatcgataatacattagggtgttgttctttaagagcagcccgaccataagacgaaataggacacttggatatttattaccggtacttctaacttcttattgaggtaaggttttcggaccctcactttctaagatgcattagtacttgttgtaggtacccctgttatcagcctatgcccccgcaagaatcatacaaattcttttgaatacgatttggtttgacgacgaggcgcactatgactctataccgttaagtaggagagggacatttctatattatacttaggttgttaccatctctcttggcatatcggcctatgccagttatagtgtttgtaagcagtacagcgtaagtctgcaagaacttcgtaggagtatacctccgaacctccggttaaaggcgcgcacgataataccggttgcataaaaactgagcgcacaatgtatcaca

SEQ ID NO: 2535 - DNA, 913 bp, unidentified
  source 1..913: mol_type = unassigned DNA; note = unclassified RNA viruses ShiM-2016 sequence
gcccatacacgcattcacgcagtacatagcgtcttggcggctgcgttgggtggcaggacagcctacccgttactactcagaggattcagagagtaccaagacacttacattggcttgtgcgagccatgtatgtacatagtagcacgcgacagatccagcaagaattgaagaatgttccactataagtggattagatgtacccagcaaagtccttgataatgctggagtcctgtttgctgatgaggcgagcatatgcgcggtggggcctggtggctctgagtcctcgtttttgcttgccgactccggtttgcaagatttgaagagtttcttttctcgaccagtcttgtggagtaggtccactttgagcacgaccccggctgtgcttacaacccacattttgacgtggacggagttgaacaatttgactccatcttggtccactaggctgcagggtgtcaggggtattcgtggcactttggtgtttaccgtggaacacaacgctaatccttttcaacagggattgctggttgcctcgtttcagtatggggacgaccagtataggcgggggttacggccatcattgtgtacgcagttgcctcatgttaggttagacattgcgcataacacttcagcatcactcaagattcctttcaggtcagagtttgagtatattggaagcgcctttagtgaagttaaccatgtttatggtactttcgctttgactcaggtgctgccaactccctctttgcccaattcatccttacctgtttttaaggtgtatgctcattgggaggatcttgaggtgtttggtagagtgccgctcaatggcaccacatttgtggttcctcagtccggcgccaatgtcaagccgcgcggattgactccttctgatagggagttagaggataatggc

SEQ ID NO: 2536 - DNA, 916 bp, unidentified
  source 1..916: mol_type = unassigned DNA; note = unclassified Flaviviridae sequence
caggaagttagttattttctgtgtgtattaccacgtgctaggtaacaatttttctattgttgttatcggtatatttgtatttagtttttagtttacattatatgtttagctaagtagcttttaataaatgtctgggataggaaatacctcttccaaaagtagcactaatcagttaggtagaaatttgcttaaacaaacagtgtataatagttcacttctctcttgctattatagacagccagtggtcatttacaatactgaatcgacttgcgaccgaaactttacaggagtatttggcaatatattttatgacattacccctctaaaggaaggcggagtcaggttatcatatcttgaccctttacttgctaggacttacaacgacccgaaaactctacagcaaactcttgtagatcagggtatcaccggaactcatttggttgggaaatcggtggtatatgtttgtgagcaggacccacaaataccagttcctgcttctcctccaggttggttttactctaggtagaccatcctgtagagtcacagacaatcgttgttattgtctttacggtagggtttggattgagaaacctagttattgtgaaggacttgctgattataacagtaagattgtaaaagcagtattatctaccgatctggaaccagatatgaatgcctctcaggcaatttctaagtgtttcggttccccaaagttggagtttgacttcacaaggtggacgccggaatacaaagaaactttatatttgtgttccatcctcttcatatactcattttttatgagtagaaatctaggaatttctggtctgggtttagccgttggcctctgtaccaaagccctagatataaagaaaacggctttaattgttctggctataaccgggtttagaacaaaaca

SEQ ID NO: 2537 - DNA, 916 bp, unidentified
  source 1..916: mol_type = unassigned DNA; note = unclassified RNA viruses ShiM-2016 sequence
ggacgacaccgcgcggagtttcagttctaattgctgggtttgcccccagcaggctttgttccttgcagatatttctgcctagcttgcagttcccgggcaaaacccggataaaactgtattgttctaggatgaaattactgtattgtgatacattgtttattgaattgaaatggagttagctgctccttttttaatgcgtagcccctaggttgactacgtcgtaacaaaaccgaaccccccccttgtgcattggggggcttcggcccctcatgtgtgttttgtatattattgttcccaatgccgtttttgtggccttgtgccgcaggaattgtattcctgtatattattatttaacttaaaaaccgccttgcggagaaaaatttaaattttgggaggaaacatgtattagcgagaaaaatttatattgtatttttatttaactcaaaaatacgttaatacattggtacacacacattgtcaactaaccaccatcgtagggccgcccctacttgtgatggtgtgtgaaatttcagtgcttgaatgactgagagaacctgtaattgtttggttcttaactttgtgtggacagatctcttctaacgccgatgctttaaaagcagcagaggttactaagcggagatacttaattgatctgacagtctcagatgagagactagctggctggaaccagcgaagctaagatcagcctcggaggaaagaggtgaagaggacctaagagggtctagcagatggagtattagcatcgctaatgcgtagtgtagaattgcgaatcttaaatcaatccccccccttcaggtaacgaaggatcaggaagcattatctcattttgctttactgctgctacaaaaagtcagattattattatttgccttatctagtttgtcagtcccccatc

SEQ ID NO: 2538 - DNA, 916 bp, unidentified
  source 1..916: mol_type = unassigned DNA; note = unclassified RNA viruses ShiM-2016 sequence
gggcgagggtaattttgggtgtacgcttccagcatgccaccaatgtctcataaagcaataaagagaggcagggtttgtggtgtgttgcaatgagcggcccattgcatgtcagcattttgctgagtctttttccgcggtccgtgccgcgatgaaggggagccaccggaggataatgccgtgtggtgagaagaccgctcgtcgactataagggggaatttaccgtctcgcccagtgctgtcgtcgaaagccttgatccagaggttaggtcatccttattcttcaatcccgaccctgtctgcagcaggagggttagagcctggaggagcccagcactgctcctgaggtgtggctttgcgtgtgcgtcgatatgggtccgacgtgggtttgccagcccgaaacacgtaccccgagtcctccctggatatggcacctcgagcgcgagaccattttggcacgcgagtaagaggaacgtcgaagctggttgtgcacgcgtaatcgtgcacagttggttaggggaccagaggtgatgactacgctcccgcaggcagcgtgcgacaacgctgcggtgacgaatgagagacgaggtgaaccaagggctgcgagctccgagccggcccaagtggctttgggaatccttgtcctgtgaggttactctcatgtcgaagatcccgctttcgcgggtgaccgccctcaagtcaccacccatgtacagcatctgcagcgtcgcgtttccactttttgtctaccacggattgtagagtggttgcgcgatggtaccacggaacaaaaatcaaataaacaattgaaaacctaaatgcaaagattcattgttttgtttcggcgcaggcgatccccgcctgagacggagtcactttgtgacagtttttgtttgttttaaagcgcgtcggttttgctc

SEQ ID NO: 2539 - DNA, 922 bp, unidentified
  source 1..922: mol_type = unassigned DNA; note = UNVERIFIED: Potato virus S isolate 18-1113-2, complete genome.2 sequence
gttcacaggtaaaagctcgaataaactgtttcacagagagaatgccgcctaaaccagatccttctagttcaggggaggtgccacaagctgtgccacctgcaccacctccgcgcaattcggaagggcacagatccgcgcaatcggaggcgccagggcaaaatgaagaagccatgctggaacaaaggctcgttcgattgattgagcttatggctaaaaagaggcacaactcgacattgagtaacatctcctttgagataggtaggcccagtttggaaccaacacccgagatgagaaggaatccggaaaatccatactctcgattctcaattgacgagctgttcaaaatggaaatccggtcggtgtcgaacaacatggccaatactgaacaaatggcacagatcactgcagatattgccgggctcggtgttcccactgagcatgttgctggcgtcatactgaaggtcgtgatcatgtgcgcaagcgtgagcagttctgtctacctagaccctgcaggaactgttgaattccccactggagcagtccctttggactccataattgcaatcatgaaaaatcgtgctggactgaggaaggtgtgcaggctgtatgccccggtcgtctggaattacatgctcgttcagaacaggcctccttcggactggcaggcaatggggtttcaatggaatgcacgcttcgccgcttttgacacatttgattatgtgaccaacggcgccgcgatccagcctgtcgaggggctaatccgtaggcccacgcctgaggagacgatagctcataacgctcacaagagcatggcaattgacaagtctaacagaaatgaaaggctggccaacaccaacgttgaatacaccgggggcatgctcggtgctgagatcgtgcgtaaccatcggaatgcagcaaacca

SEQ ID NO: 2540 - DNA, 922 bp, unidentified
  source 1..922: mol_type = unassigned DNA; note = unclassified Ampelovirus sequence
gtattgtcctagtaggtatcgaacccgacaatcccaatcctaccattgctttccatttcagatctgaaatccactcttcttctctgctctcagctctcgggcatctcttctcgctttccttcctcgttaagacgcgctgaactacagttcgtctgtctttcctcatctcaaccgcttcttttcctttttctctcgtgtcttaactacgctctcctctagctcattttctccctttactttttcgtttcctttctatcaggggcgaaggtttttcttcatctcttaacctgtcttttcctcattctgctttttcctttctttctcgtcttctttttgtgtcgtaatacttcttcgcatactctcttccgctttcatttcctttcatcactctttctttttggttttctcatctcttctctttctactgcttttctttcttattcctttcttatctctctttacctttgtttcttctctttgttttacatatctctttctttttattttccttatttcgttttgtttcagcgggttttttcttcttcttttctctcgcactatccactgtttttccttatttcttcacttttctaactctcttttctacacgttttccaccgtctatttttatcattttcctttttgttcgtctaggttctcttcttctcttacccaggccttttccgcatataactaacatttcctttctctaaggatcttgggttttgtttaactgttgttacgttatcatctttgtgttcggttttcctttctttaattttagtttacctctttttcttcctacttacttcttttcttttattttaactttccttttaatttttctctcttgcttagcttttctttcttttcgtcgcctttatcttttactcttttcctttcattactttcaacccaaaat

SEQ ID NO: 2541 - DNA, 922 bp, unidentified
  source 1..922: mol_type = unassigned DNA; note = unclassified Riboviria sequence
cctcaaggcacgcacgcttattaacttatcagattatatggacgattatcactagtattgataccgctaaaccaaccctctcttcttttaagattggaggatgctttagtaggctctctactactgtttagtctaaatatacgctggtatgacctttatatatttaaatatccttttataattaagttaacaaggtggtaccttaagtagcaccattaggttaccctatagtcgtaagtataggttaagaattttcttcttaaattatatttaattttagttgtagatacccaaaaaaaataataaaattataaaaggctttgccacaaaaaaaattacatttagatttttgtttatttttgtatgcatattttttgtttgttcttactaatagaattaagaatcaaacaataaagtagcgctatattttggccgtttctgtaacagattccgcccgagtatagtatagtggttatgagtcggagttccactataaaccaactcaaagatcgcttagcaccggtaaagtgagcggggagtgaacagcgaataaagtagctgtaggcaaccttggctcggcctgcacgtacatgtctatgttgtaggtagtctaaccaactctattacccgtggtttgcatcggaccctctttggatgtttctaggaccccttacaggtattaaagtactgacaatgagagtaacactaaacactgttagacgtaggcgcggttggtttagcagcaggaagtagtaaacctgttgcgtcgcgctcaattgaggcgatccgtaattgctggtccccgttagattttatcgtagtcgaaatctaactatagtgtttattgtgaaatcgtgaggaaatttgtcttgtaagtagaaaacattcaccttcttttttctctttttatggttaaatatat

SEQ ID NO: 2542 - DNA, 926 bp, unidentified
  source 1..926: mol_type = unassigned DNA; note = unclassified Dianthovirus sequence
gaacaaacgttttaccggtttgtaaattggaattctcgaattcgccagtcgccttcttcgtatcaaggatctggaatttgaacggtatctttatcattttaatttctacttttcgtaccagtcatgggttttgtcaacttttcgctttttgatgtggacaaattgatggtatgggtgagcaaattcaatccaggcaagatattgtccgctatttgcaacttgggtatagactgctggaaccgttttcgcaaatggtacttcggtctcaactttgatgcacatatgtgggctgtcgatgcctttatgccactcatgccacattacacggagcagatggaacgcgtagtcggcgacctctgcagcgaaaccctagaatccaaattagaagactgtctggaattggacacttccgtcaaccagtattttgacgaagaagtgtacaaagaggatgacaagggcgtgatgaaactccaaaggagtgctgccaggaagcacattaaacgtgtgcgaccaggtatgatgacagcagccataaaagctgttgagacgaggatcagaaaccgccatgccattttcggagataacatgggattgatagacgaagctgcagttagagcaactgccagtgatatctgtggagagttcaaaataaatgaacaccacacgaggacattggtatacaccgcagcatatctttccatgacacctgaccagaagtccctagacagtgtcaagctcgcctataatccaaagagtcaagccagaaggactttagtgacagccgttcgtgagaacaaagctgttgctgggttcaaatcccttgaggatttttaggcggtccactcagctttccggttgaagatgccccatatcctattttaggcatcccggaaatcagggtagctgagaagcgggccagtagagtc

SEQ ID NO: 2543 - DNA, 928 bp, unidentified
  source 1..928: mol_type = unassigned DNA; note = unclassified Sopolycivirus sequence
tgagaaatacaacaaattttgtacaagctagtttaactattcaaattacacttgctatgactgtgatgcgaaagttaaatatttctaagatttacgtatatgacaattcacacttctttgacaatgcaacgacacacattacagacaacgtacgatactctaaaagacaggaaaattacgctgtcctttctaaagccgcccaacaaactttaacgaaagaaaactatcgatctcatacgaatcatactcttctttcagatcatataggtttatatattacattgtaagtatggatactttgatcgcagtttgcggattgttatccattaggttaggaacagtaagcccattgctgtggttcagtaatgcgtttcatctcaacaatcccgtaaggtttgatggttgagaacctctgccttggcgagctttggtctattagttctagtgcaattgctgcagtacagtcagggacccagagagtaatcctctggtgttctaaagtcctgaagttgagaaggactagcaatccggatcaaccagagtggaaccctttaaacgtggacgccaccccagagagctccgtttatcgtgtcacctgcagtaatgaatggaatgaatgatagaagcgacccacctagggacccctctaggatagtcatggtatgtcatgaaagactccatcactgggttagaacgatctgttcaactggctttggaaagcttggcttgagcttatctagtctagggccagtataaaatataagccggcttcgtactgggacacacaagccgttagacttctttttgctagtctgtgagtacccaatttttacctttaaatttatgctgtcttattgctatctttgtgctgcctttgctactttactgctgttatttgtgccaaactactgctagaataatcgttgct

SEQ ID NO: 2544 - DNA, 930 bp, unidentified
  source 1..930: mol_type = unassigned DNA; note = unclassified Iflavirus sequence
gtacgtatttcgtacgtacagatccttgtaggagtttcaataattgttaatttcagagttagggatattcccgccgctagtattcacaatgaatctagtcgccagtttatctaaacctttggggtttctcagttatctttcttcttcatttccttttccaggatctcacaaaattcaatttgttaacttcaattttaattttcaatttgagattttaatctccaaaatttcttctaaattatgggttttctttcccgtgtaattttcaatgttgttgtgttttgaaaatcagaaaatcaaacaaagatgtgaatgtgtgtgtgaatgtgaacaagtcgagtgattctcgacagcgtatttctgacgtttaatacttatattaagattagttgaaaaacagtcgtcctgagtagcagtaagagcactagggccattttcaaaggcttaagagatgaactcctgtttctaatcaattctatgggagacatgctcttaagttgactggctaattgaaattgagtattttagtttggattgtgtggtctagttggacagacccctaagggaagtgccagtacctagaaattcgtaaggctatctttgtaccagctatatcgattaataaccggtatagttacgtctgggacccctagagggtttgggatcggcgtaccatgcagttttagtggcttcggcacttacttaaagtatgtgggaaccccatggaacttaggtagagcaagcgcattaattttgcgtagtccaatatagggacgtctattcctcctagagggaataggtagagagtcaacaacgtcatagacgaggtaattccgccataatatagtctggacagctagaatatggaagggcatctctacatgtagggatgggctctcaaaaccgatccggtgacgcaaggctgcctta

SEQ ID NO: 2545 - DNA, 935 bp, unidentified
  source 1..935: mol_type = unassigned DNA; note = unclassified Riboviria sequence
taaaattttattcgcgatgaaacgcctccttcctgatgcacatcaggatacggagaagatctctgagattgttagagataagaatacaacattgtacggagctattagcgaggttagtaacactgacgccctacaggttgatctctcagagttccgagctcttctccgtcgctttaatgaagacgttgaagagtttcggggtgcgcaaaagttcttccagaccactttggattctttaggagggactgtagatcgcctgaatggttcttttgtggacctcaatgcttccttaaatgttgtaaaagaagatgtcaaacagctagatatagctgttgatgacaattcaaaacaaatccttgttttgatagacgagaataaaacatatgagtctaagttggaagctcttgataaaagagtttctaaacttgaagattctaatgtctcgataaatttggggatttaatcatgtttgattttcttaaaccatattttaaacccccgcctcgtaaggttttctctcgccctatggcccgtgctgccaaggatgagagtatttctgatgttataaaagaacgtaaccttactgagtatcaagctattgaacaagtgttctctgaacgcttatcatcgatagagaccttctccccgtccagacgatttcttcctctacacgacgaccagaaatataggttccatagcctaaaacttgagcgggattatgagtatagtgttatcaaaggtgttctctttgatcaggtctttttcggtacaacaattaagcttgacaacttctctgaagttattatttacccttccgatccagaagttgcaccatctgatcctaaatatttggatacagtgattattatcctggtgaaggtgaatggatctgacactccggcatccggagtgtataaaatttacagtctaatata

SEQ ID NO: 2546 - DNA, 936 bp, unidentified
  source 1..936: mol_type = unassigned DNA; note = unclassified Iflavirus sequence
cgattgtatcagagttttcaaattaattaatgagtctcttaagtgagttttatatttcttgagtttcatgttccgaaaaggttcgatgattatactcttggataatatttaatgacatttttggattggctcattattaagtcttttctctgtacttagttaaggtttatttgcttttaaattatatatattatacaacttatatgttttaaaaattgaaatactcggttcagaccggggctatatctaacaacttgtaataaagaatttacctattttcactatcggcctctcttattagtcttttagtagcatagagaaatagtgacatgagcataatcacccctcatggcaacaagtagctctttattttctattacaagtatgatttatagtgtataaaaattaattttaaggcaaggcaacataatattgtagatgtctatgagtagataaaacgtagttggaatgtgtgtgcgataaaatggggacccctccaactggctaacaccagcgcctactacatttcaacatattgcgacataatcgaaaatgaccgctctatgtgttatggttgtgaccactattctgatttattttggaggtagtgttaatccggctgagtttatctcaaaacctcgatgacaagtgtatccttggacttcgggcatatatctctaagatatagtcggacttctgaaccgtaaatttgcggaggctttaagtacgaagaataagcctgtccattttcttttttctttttcttatggttacaatctcagaatatactaaagcgttttcattgtttattgttatttcaattattctcaattgcaatcctattacccctttgttttatttttattccaaccttataattcttttgctaattgtttctcatactgattttaaatttgtatcaaaatatttttgaag

SEQ ID NO: 2547 - DNA, 942 bp, unidentified
  source 1..942: mol_type = unassigned DNA; note = unclassified RNA viruses ShiM-2016 sequence
tagttgatgtttaaacatcaactatacgcgatatatggagcttggtatgctcctaccaatttaaaactagtaccaaataagggctgaaacaatgctacggtgcttattggaacaatactaggtaattactactacttgctgaaacgtaagatacggtgagtactgtaattttcactttggtttcaccaaacttgggtaacaccataaccttcagtatgaattttgtatgaatgtatgaatgaatattgagtacggtataccgaaagagactagaaagttgcataaattcttgcaatttggtgggattatgacacgaccaccacccttgagtttacgaaccgaggctttgtttgaaatctctctaggtattactggctgtgggtatatgaacttataagtaacagcatatggaactcttagtacgcttgggtagtatgaggagccgtggggaataaacttggtccacagggagtagcccgaacgctgacctgacgataggctgctatgtccgactataaacctattcaattaggggtggcacacaccatgcactagtgcgggacaggaacggttgacaataaggaggccttctctaagcccttacgggggtgaggaagcggaacttcagaacagcttgcggaaaagaaggaaatatggtctgagaaagtaacttatatgcgacgccggcccttctagttaaagggaattgcctatggacgagatagattaggtaattaccatcggcggctgggtgcaccgatacatagtacggagtgcgcttcacagtggacttatctacacagtggagtggatcttagcttagtggacagacagacgtactaagcgacctagatctcccaaagataacgactttatgggcgtagtccggtcgtgcaggggttaccccgcggacaacgcaaattttcttccaaactttcactt

SEQ ID NO: 2548 - DNA, 945 bp, unidentified
  source 1..945: mol_type = unassigned DNA; note = unclassified dsRNA viruses sequence
gcgaccgttctttagatctttcgttcggacccccccagcccctggcggggcgtcaactttccacacgtcttagtttgctaagcggaccagccacaccgacacaaagagcttcggctctgggaaacagggcagactaccgcgatgtgcttacgatgatttgtggttagagcgcgcctcttgctaattctgaggtggtgccgcgcgagctttaggcccttttgttcggaactccaaaaataacttggctttccgctcagccctgagacaatagggttatccaacgacttggctattaatataacatcctccccactaacgaatcgcccttacactaacttagggtctttccgggggaaaggaacccgtaccgccatatttcaaaacacatggcttttcatggtccggggtcgttggagtaggtatgtgtgttagcggcagtgagtatatgaagcggttcatcgcggatttcctgctgagcaccctacgcccgaatttttaggaagaatggctcttaagaactaggtagccattctgcccttaaaatttgagggtgtggttatacgcgtccagcatgacgttaaaaggcacacttcgccttaggacggcgaaaaactcagctctgtagatctagcccgtgatccttctgcagtatcaacatatcgggaataagcatcctgtcgagttctggaaagcttgaactcagcggtggggtaaccaaggtacgaacttgggtgtgaagccattcaagacgtggatggtggagctaacgtattagtggatgtcatggtacggggtataggtccgggattaaccacccgggtgaacactaactcgccactacgaacgtgccagccttcgggttggtggacagactgacactcaccgcgccaagtcccggctaagggcggcgcagcaaacagtcggcgtgggaattattaccgcgtg

SEQ ID NO: 2549 - DNA, 945 bp, unidentified
  source 1..945: mol_type = unassigned DNA; note = unclassified Riboviria sequence
ggtcaattaaggtgacgaagatttcgtcattacacgaactgccggcgccgggaccgaatgtccaagtcttgtgcttcaaacagtccgaaaagaaggagttgaagcatttgaacgcagtaactatccatgaattttagggtcaggaaagtgcggtcgtctggatcgtgagactatcatcgctacctaacgaacagatctgcaagagtgaagaacatcaggtggtggggattacaagacataagaaagagttaatatactacacggtcgtagaagacgatctcgcaagattattaacccaccacatagacgaaaccacactcaactccgccgttgggtcgttgaaaggaggaatgcttgaaattcagagagacgaagctattcttcaatcatgggactgtcacgatgtctctttcagagcggccataatcgattgcggggaagaggacctcccgtcgacaaaaatttcggaacccttcaaggaaccactcgcttgtttcaagcccggtcacgttactgcagacatattttgacgatctttttcctggaagatcagctgagatccatgatttcgaccaatacctttgcgaaaattccactaaatcatatgttttggaaaatgccagttttgggggaaaaggttgggtacctagggcacagttatatgataagaaaaggccctctctgttgacatccattcaatcaaaaagggaaaattccctaaatgaggtcttacttgcctttcaaaagcgcaacggcgcggtaccggaattggctctggattccgctattgaccaagaagcgagtgttttggtaaaaaactttgtaaacacagcggtggacaagtcaagattggatttgctgagacagtttcgagaggaccaaactgtgctaaattcggcgcagattcgagaatggttggactcacaaccacccggagtcgaaaac

SEQ ID NO: 2550 - DNA, 946 bp, unidentified
  source 1..946: mol_type = unassigned DNA; note = unclassified Hepeviridae sequence
gaccatagcccatgggagagttggacaagggatatccgcatggtcaaaaacaactgtggctctgtatggcccgtggttccgggcgattgagaaggctattgtggatcgactgccagacaatgtcttctacgcagacgcccagaaccctgatgtttttaatgcggcagtctcaggtctgacaggctatcaggtctttgagaatgacttctctgagttcgacagcacccaaaataactattcgctgtcgttggaatgtgcccttatgactgaggccggcatgcctgagtggatggtacgcctgtactggctcctccgatcagcctgggtcctgcaggcgccgaaggaggggctcaagggctattggaagaagcattcaggtgagcctggaacactgctgttcaatacggtatggaacatggccatcattgcatactgttatgattttgttggagagtgtgtatatgcttttaaaggagatgattcagttgtttgctgccaacgttacatccggcacggccgtgcagacgtcttgatcactggctgcggtctcaagttgaaggcagcctgttcttacataggtgggtatgccggctccatcgttgcctgcgggtgcggcgttgtgccggatatcatcagatttgccgcccgcctgacggagaagaactggaaaatcgctgataatgatgatggtaagagggcggctgagttaacaacagcagtgaaggatttcctggcaaaactggagaacgtgcatcatctggccataactttgggggcccgctatcacaacaagcctgtcgggctgctagtcaacctcgtcggtgccctcaaaacaatcgccgagggcaaaggccacctgaccaagcagattttaccaatcttgactctattgaaggggtttgaatgaataacatgtctttttgtgtggtatgagtgggtgtgcaga

SEQ ID NO: 2551 - DNA, 946 bp, unidentified
  source 1..946: mol_type = unassigned DNA; note = unclassified Riboviria sequence
tacacatagtcaataaagaagaatgggcccccatccttctttattgactatgtgtattattttatgactagctcgtttaaccttccagcggaagctctgtgccagtatttttcatttaggtgcatgttagcatttttcttatttgcccacgtactctgtaattcattaaccgaccagcggtcgctctgttggattatgactgtgcaattttgttccctcttgacaatcttattcttatttgatgacgactttttaggccctcaattcttggattgatattttgttactacccggatattattatgatcttgtatcagaaccacgccgataagctcggataatattatccctggctctgcaatttattatgacgactattgagatgaacactattggactatgacttgacttattatttgttatttgtacgttagaatcaggcaagcttgcctatcctgtttacttgtcgattaatctaggactgaacgttaatacgaactacttatcgagtaggtaacccactaccgaaattgtggctaacccgaaacattaagtagaatttttgtatcgattattaagaactttgattatgaaaccgcactcagtgacgcaagtaatactatgaaagaagaaacggcttttatagtgattaggacgtgaacgcaaaatcgtaatgtttgcctatacattgacgatttgttctgtctgagtagttattacgttatagaattcctaaagtatcttggaaccctcgtattactctcacacttgaggaggtgtgttagtattaaggtaatccattgatatgtgaagaattcgactaacggtgttggtatgttaccggtaaggtttgtactatgatgtacttaagggaccagttaggttaactcttggtgccacggccaagacccgctcaacgcgcataccgcatgaatggaaatatttt

SEQ ID NO: 2552 - DNA, 950 bp, unidentified
  source 1..950: mol_type = unassigned DNA; note = unclassified Negevirus sequence
gtgtcattctgacacacatcactcctctgtcacctatgagttttacaacatgacctttgtccctcagtcccttgctctgcgcgaacctcttcgtctctacaacaaggagtttaccgtcttgaagaacctcgttcccgtttccttcttcgagtggttcttccttgtacgttcagacgataaccgatttggtattgtgcccaggatttgtgacgaactttttcgcaactcaaccaggttgccaaagaatgtgcatgttagacgtgagggcaacgagttctgttttgttgaggtcagccacgactcctatacgtgtactcccaaactttacccgaatgttgcaactttgatgatggtccatgactttcctgttgatttcgacgacgtgcctttctcgcagggctcatacgcgtcgaccaacaataaggctatgggcgctgatcagtacctcgccaacaacgtcgcttctaaagtgtatgtcgttgacaaggtgggtgggtcttatatggtcacttatgacccccaagactactctggtccccgcttcattgttcgcagccacgggcatgttcccacggagaaaccgttctgttttgaccttgctacacactacgcgtcgcccattcactctatctttgcacacgtgacgaagttttttcacgaagcgctggtgtatttgttgcagttcctgaaagagatcgccgccgatctcgccctggtcctcttcaaagtcatcagcgaactatttgagattctcatgtcgatcgttccgtacaattcacatttctacactgcagggcttgtgtgtcttttcacgtatttccttttgcgtgacttgctcatctcgtccgttgtgtttttctgtgtgtacagttttaaaatctacactgattctctcatataaatgcttgttgaaactcttctcattttcttcgcgatcctcgcatactgcc

SEQ ID NO: 2553 - DNA, 950 bp, unidentified
  source 1..950: mol_type = unassigned DNA; note = unclassified RNA viruses ShiM-2016 sequence
tatgggagcgcttttgcgcttccatatttctattttaaatacatcttcggtactttagggctctcctttaatgttcttgccttgttaattcaccaccattactgcacccctatcttatcagagtgactcggttacttagatgttctacttaaccttgccccttatggcaacaggaaaagttccaaaactgctcgttccgggagattcccatccggtaaaaacccaagaccacactcaacatccggagtgtctaaacccaaggacgaccattgataatatttgtaaaattcatttcaacgtacttattttaaagcatcaagcgtcattatgtcagttgattaattagtttcactgattaattgagataacaaacaacttcctaaatttattttaagtgttttgagttgaagttcacaaatattatgcgatcatattactaatcaccgcctatttccatatcttccgatgaattccgtacaggaatgtaataatttttgttatttgtatttaatttataactttgatctatgctcatcccaccgtttagccattattaggttctgttatgaaactagtaattattgtttgaaaaccagtagttccagcgcgtcgtggcctattgacccccaaacaaagtctttgtctttccctaaaggtttggtcacctataagtctggctctaacatcgagtacagcaagtctgcccaacatttgttgcatctgactctgggggcaacaaatgtggcgggataaagttacaaacctgataacacaggtagctttagcacaaaaccccacattcccacccgagtaatgtcaattttattattttatgcactttataactatgttatggcaaatttattataaaaatgtatttcaactatccaccttcttctttcacctttactgtcgaaactcttttccagtcaagaaaatcttaatgaaaa

SEQ ID NO: 2554 - DNA, 952 bp, unidentified
  source 1..952: mol_type = unassigned DNA; note = Beihai weivirus-like virus 21 strain BHZY60867 RNA-dependent RNA1 sequence
gtccgctgccgtgcagtttaattaattcttttcgtgtgagctgcatgagtcggctccccctgtggggggcattttgtggctacggccacacaattacccatcggttgacacagagccggtggggtccgtgcgttacggtgtgtgcttcgacgggcgcacactggacgaaagagtgccgctggcgcacggatgcgagtaccgttccgagcttagagctttgctcggataggggtggcggtggcgagccattttggctgagtgacgtcatcggcccgagccataccccgaaggttgccttatgcctcagtagccgagggtagttcggtgaagagcctggaagccgggtagcgccggcgacggtgagggcaccgctgttaaccctgcgcgtgggttggccccttgggaggggggctgtaaaatggcggttctgttgtgcgagtggtggctcgaaggttctgggacctgctagtccggctctgcggcgttcactgcgtcgcatccgtgaagacgtggggaccgttccggatgttccgttcacgtagcgcgcgtgggtggataatcgccgaggaagccattttggcagaaggcgacgcacaacagacaaaatggactggcgggggttacggcccgcttttacgcgttgcaggaggacgccccctccatctttcgtggctcacacgacctagttttgcacgcccggtatgtttgtgggagtagtgacccgtgacagacccgtcgacttcaagtcggcactcaggaagagactggctcacccgtggttttgagcctgcttccgtaattaactacttaccctaaaacgagccgtgatttctctggtgggggccagagatttccttcaaggtgtatctgtgtcgcactacggctcatcacgttgcgtgtctggctgtctttgtcatactgacgccggatttgtcgtgctttcgttgtgaca

SEQ ID NO: 2555 - DNA, 955 bp, unidentified
  source 1..955: mol_type = unassigned DNA; note = unclassified Rhabdoviridae sequence
agtttcctttaaccctatctctccaacctgaacaagcaaacacacacgctccgccaacatagaagacagagagccaagacaagtacaccaacgcaaccagcaacttcttcactttcaacacaaaaggaaaatcaacacggaatgttcctgcgaagcatcattccccccctccgcacacccccaattttgggaaataaaatagctttgatcaatagataatccctcacccgaaatcggaataccgcacaacaccctcgatcccaattccctgcaagctccaagcgatccagtttaagccaaaccacaataaaacccttcaagcgacaaagataaaggaccgtcaaacatagacaaaagttcaccagacccgtcacaaaaccaaagataacgacactccgtatccagccatccagttagaactttatctacaaacagttgtaataattcttatgatctctatggtctcattatccccagaatatgtctctcacaaagcaatgccagaaccacacaactatcacaccaaaaaaacctcggcacaatcaggctcattaaacaaaaaaccaagaatttcgcaaagatccagctccctcgtcaaaactccaaaataaaattagcctggcaagtccacaaaacaccgtcacaaacacatcccagtatatcaccaatatctgcccccacacacgcccctccccaaaaaagacacaccagatgtgataagcaaatccctgtcaattttcggcaaacaagaccccttttgcttctttcacaaccaaaagcaaacaatcggaaaacagcccacaaagcgaacacccatcagcatactccggagttcaataaggaaatttctaaaacagactgtttcatactgcaacagtccaattgaacattacattaccaatttatttgagaggaaaatatataaattgcacaatagacatttaagaaaaaaact

SEQ ID NO: 2556 - DNA, 959 bp, unidentified
  source 1..959: mol_type = unassigned DNA; note = unclassified Picornavirales sequence
tggagatccctctatcttgcgagtcactcaagttcctggtcgtgtcgaatatgattggcctggttggagatttggccatccaaatttttcttctacaacatctgaaattttggaaaaaccatttaaagcggctcaagcgttagcaagtggtggtgttcactttgacaaaaatggacacgctcgagtggaaattccatattactctaaattcgaacgcttgtttactcaatcaactaatccgtcgaataaggatgaccctaacgggttccaaaaatctatatctttaacagattctattggtatggtgtatattactgggtcttatcaaatcgatggtacactcacattttatccgcgagtgaccctcgagattaatcaggcgattggagatgatttcgaatttcaatatccgaaagcagtgccttgttttattgtagaatggtagttgttatattatgggttcttggtcttgctctgttattatcatgtatccttactggtataataggttattattttttaagattagtacatagaacatataattatacatgcagaaaaatacaaaaacatacatttagcttaggtgatgaggagatggcgcctatttataagccaactactcatagtgttcttgttccagtgcccttgtcctgacccttagtaccttacccagcatgaacgatctaagactaaccgagtggggtgcgagattaaaacttggtaacaagttctctcactatgaagccggggtctgatttagtagtgtgacaagtgggaacctggtgttcagcgtgctggagtccataacctctcccaatgtaaattctgcgtgaggcattggcaaagttgtgggtggctctggtggtccagtccggagggctagaagtcttcgagtccggagggtatcgtcaccgcccaatcttgtgacgtctttcttttaaatttactctacaatc

SEQ ID NO: 2557 - DNA, 969 bp, unidentified
  source 1..969: mol_type = unassigned DNA; note = unclassified Riboviria sequence
ggttaatcccgtgcagcgctctagtagtatttcaaattttgaatcgttacagtgcatttttgttgactaattttgttatctagttcattgtcagttcgatttatcgttcgtgactataatgttcgtagaattttcacctttagtcttcgttaaatgtattgtttgttacaaaattctttgactactaaactttaggttagttatatattatagttaagataatttatatatatattataacgaaatatagtattaataaaatataaaatacaaggtaccgaccttggctatctctaacaactattaatgtaagtgttatgtattttcactgtcggccagtccaagctcttcatgggcgagacaaacagtgacaggagcacaatcatccctcctggcaacaagtacctctcacacttttattaatagaatgattgatagtgtataaataataattttaaggcaagattcagattgtaaataatgtttataagtacatcttatactcctagtaagagtccttaatatatatagacggtatactgggcgtaataatggggacccctccaacctgcaaacacaggacgtaaccagtgacgctagattatgagtataagacgaaagtgaccgcttatttatagtcgtggatgacagaaattctattagatagattttcttaaacgcgttctgatcgtgagaatacttttgcgagttactcatggcggagatcgtaagcagatccagactggttacggtacaatacctaaatgatcttacagtgataggtattacgtgtcttactggcatcgagttcgactgttacgcggatgaagcagcgtagctgaatttttcattttctttcttttatggtgacaagcgatattgaaacattttcgatattttccaagtgattaattgcatctcttatttcatttttaattgtgacttatattatttcaacaatcatcaaca

SEQ ID NO: 2558 - DNA, 970 bp, unidentified
  source 1..970: mol_type = unassigned DNA; note = Larsen virus isolate Antarctic83 RNA-dependent RNA polymerase gene,1R sequence
cattttatgaaattacgacagaaggctttatcaagctgggaaaggccaaaggttttggtttttcgcagaacattggtaagccataccatcaatcatatagggatctgtattcaatcgaatggttggatactgtgacctgctatgagtggctgacgactgagttaacccttattaatccgaaggccgcttacgctaaaagtttgggcttaacaaacccatttcttatagtgaatgacctgatcccctggtcctttgtagtaaactactggactggtcacgagaagtggctatcctcactggatgcctttctcggactgaaacgtgagaacgagtgtaaaacgacaaaaatcgtttactacactgagtactcacgttgggataatcggaatgatccgcccactagggaggattatttaggggactacacgaagttcgatagaactgtcgaggagataaaagctcctgggcttacagacagagtgaaggcttggcctttctcttcgcagaaaagggccgtcaacatgtctgtcttaatcgcatcacaatttagaaatctttaattcctaaaaggagtacaattatgcaagctaaaagctttacagttacaggcggatctggtgaactcgaatttgaggttctatgtccagcgggcccaaaaagccctgctgaatttcgccttaagaatgaggagaaatccccactcttagcaccttacctttcagttctggctgacaaagtgaatcgatcttcctcacggaaggtttcaattctcttcgttaagccaattgaacaagaaggacaacgtgtcggtcaaaacgtttttaccgttcaagcaaaacttgatctgcgtagaagcgtcaccgatgcgaaaaaggacgttgaagatctactggctatcataaaccaggacgacttcaaagaaatcctcgcaaaagcaatttcaccaaattaacaaccggagttatttatt

SEQ ID NO: 2559 - DNA, 971 bp, unidentified
  source 1..971: mol_type = unassigned DNA; note = unclassified Iflavirus sequence
tctttaactcatcaactgtgacttacatatacgcaagtatccctgtaatttcatcacattgatgttaaaatcatagttaattactgtaagttgaagtatccctctttgaaatactatacaactgagtaaccctgtctatgatcttaggtttaagacttagttttaagaaatttttatttttaataaccaatttgtatgaatgttttcatgtatgatacgctgcaactccaataaggattgtacgtgaatgaatgttttccaaattgtgtgaatgaagcgaagctcaaagaagtagtacgatttattccgaagctttgagaagtagtagcttttgtatgcttgacgtaacgtatgtttgttttattattaatttgtgtgttttagttttaagaagttctcaatttattttcttacttcatttgctccaattatttgtttgagccaatttgaaactgcatagtctttattaagttacaaagtttaatttatgcctaatactgctgattcccagccttagtagatcttgatggcaggcttccaacttgttggtaaaacaagatatcaagatctcttcttctacttttacagagctcagccttacgaagcgatgtgatagtttatacttgtgcctagagcgtaacctctgtactcatagaaatactagttagaacttgtttcttgcgttataacgtattgttgagatatcagagcatcgtgtcgacttgttttctattgcaccgtgagatgtaaaacctggtaaagctgtaaaactagagaagaaaaatacttcggaccggataagagtaaacttcaggataagtccccccctggagctaggtatattttaacacttataaagattgtatgttttagattgaggatggattcttttgtatcacgaccactgctatggaccttgactaagggatgtgtgcttgcactgccctaattttttgaatttgttttatgaa

SEQ ID NO: 2560 - DNA, 972 bp, unidentified
  source 1..972: mol_type = unassigned DNA; note = unclassified Sobemovirus sequence
gtaggcacggcgatcttgtgtacatagcagtagcagaaaggctaatagcgctgtccgaggccgacttggaagcccatccgaagcccagcgatttagttcgtttgggtctttgtgatcctgtgagattgtttgtaaagaatgagcctcaccctgccaataaggtgcgggaagggcgatttagactgatctcatcggtatcgctggttgatcaactagttgaaaggctgctattcgggccccaaaacaaggcagagatcgctttgtggcagtcggtgccttcaaaacctggtatgggattgtcacagaagtggcagttcgaggcgctgtggaaagatttgcaaatcaaacacgccagtgcccccgctgctgaggcggatatatcgggttttgattggtctgtgcagaaatgggagttagaagctgatgtgtgcatgagaatagaaaggggaaacttccctgcaagaatgaggaaagccgccttgaaccgcttcaagtgtttcgccaatgctgtgttccagctaagcaacggcgagttaatagagcaaggcttaccgggtctaatgaagtctggtagttattgtacctcgagtactaacagccggataaggtgccttatggctgaaataatacaagccccgtggtgcatcgccatgggagacgactcggtagaaggatatgttgagggggcccgtgagctctacggagaactgggtcacacatgtaaagattacatcccgtgtgctgctgagggagagatcctcaaggaagtgaacttttgctcacacagcatagctgcggatcgttgctatctccaatcctgggctaaaaccttatttagatatctggaacaccctgacgactttgaggagttggcagtggaattgcagggctgtccgcagtggccgcggatatacaagtacttacgtcggattggaagagtctccgacaaaattcccgaaccaagagaagaaa

SEQ ID NO: 2561 - DNA, 973 bp, unidentified
  source 1..973: mol_type = unassigned DNA; note = unclassified RNA viruses ShiM-2016 sequence
tgcagggttaataaccctgcacctcgcgattgacgatttggttagattgtgcgcattatgttgaagattcgggctgacttatctttcgagatttttcagctcttcttattttcatatttttgcgtaactttttagctttttctgatatcctagggcttggaagtgtgcccagattttctatacacttaccttcagctccgttcgtgaacttgcacgttcggttctatttacactctcatgaatactgtagtgatgagtaaacaacacagtactaaagcttcgctattcattgaagctatgacaagataaatgtctaaacaaaatgacggtaaaactctacttagaagtgattccgtaaccatacgatttggtaaatatgaatagcaatttttgtatttttaatatccctctaacccagggatttgtatatgtatatattttacacatgttgtagagctcttgttgggctctttaaagaacagatgattactagtggagataaaaataattcgaatgttacacaagtttttaaataaaatctaaaaacttcactagttggaacctcagcgcggatagcgattactgatcgagaaattcgtaccactttgtgccatcgatatatcgatcttatggaaagcagcaaaccatggcgatccggaggggatcaccgcgttgagaggatggtgtgcaacttgactcgtggaggctgctttgcagtcggtcacgtaagagatctgcatgtcatgaggtaaagtcaagcgtgacctaagcgcttgcgaccattgatcaggttaaaagttcgggtggggcagctggtacagccaggccgtaggggaacgggattcggagaataccgccaatcaagcttcagatttcaaagaagcattcggaagccattatctatttgagttatcttttcattcaaaatcatcaactattataatttgctgatatcaatgaataagacaccaat

SEQ ID NO: 2562 - DNA, 975 bp, Rubivirus rubellae
  source 1..975: mol_type = genomic DNA
tccgcatttccgcgcgatccagaagatcatcatgcgcccctgcgcccgcaattccttgtggccgctggccatacggagcccgaggtcgacgcctggtggcaggctcattacaccaccaacgccatcgaggtcgacttcactgagttcgacatgaaccagacccttgctactcgggacgtcgagctcgagatcagcgccgctctcttgggcctcccttgcgccgaagactaccgcgcgctccgcgccggcagctattgcactctgcgcgaactgggctccactgagaccggctgcgagcgcacaagcggcgagcccgccacgctactgcacaacaccaccgtggccatgtgcatggctatgcgcatggtccccaaaggcgtgcgctgggccgggattttccagggcgacgatatggtcatcttcctccccgagggcgcgcgcaatgcggcactcaagtggacccccgccgaggtgggcttgttcggcttccacatcccagtgaagcatgtgagcaccccaacccccagcttctgcgggcacgtcggcaccgcggccggcctcttccatgatgtcatgcaccaggcaatcaaggtgctttgccgccgtttcgaccccgacgtgcttgaagaacagcaggtggccctcctcgaccgcctccggggggtctacgcggctctgcctgacaccgttgcgccaatgctgcgtactatgactacagcgcggagcgcgtcctcgctatcgtgcgcgaacttaccgcgtacgcgggggcgcggcctcgaccacccggccaccatcggcgcgctcgaggagattcagactccctacgcgcgcgccaatctccacgacgctgactaacgcccccgtacgtggggcctttaatctcatctactctaaccaggtcatcacccaccgttgtttcgccgcatctggtgggtaccccactcttgccattcgggagagccccagggtgcccga

SEQ ID NO: 2563 - DNA, 976 bp, unidentified
  source 1..976: mol_type = unassigned DNA; note = unclassified Iflaviridae sequence
tggactcgtattttgacctcagccgatttgctgtttgagctagatctgatagaaatgcaagataactggcgtctcgactgttgtagtcaaatgtgttgctagatctgaaagaaatgtaaccttttgatctttagttttaaggaattttaataaacttaaataaactattgcgaacgatctccaagaagtaattttttgtaaagttttgtgtcttgttgaagccgaagcgaagtagtaacgaaagtgaagcgcggacgaagcagtatatcaagcacatgttttaaaattcaaaattaacatatagtcacgacctatttcttcgtgtatccattgtgcatatggagaaataattgttgcatatagtcacagtctatcactctgtgtatcctggtttgtatttgcctcaggagaaataattgttaccaaatacatcccaaaaaggggttaaagtttatccctggccatttgccttaaactgattctcgtgcgtgtcacaatttggtcaccgagatgatgtaaaactcttcacaataaccttttgtagcaatggaagttgtgtaagtattatgagtagctacctaggttttgcaagtgcgtggaataactcgtcatcttttagtgaagaactctgcaccgtaggaatcccttactgatatcttagcgctgataggcttttgtttacggacaaagtcgacagttaagatatgggctgggcagaacttaagagtaggcctgagaaacctgctctgagttgcggctcctgtacgatattcatttgatgacttgtgtttctataatcgcaaacacttagacgtcccccgcgcggtaccggctggacgaagaagtacctttatggtaggccgttctcccgtcgaacgacgggatcaaacacccaactaggtcctgtgtctcgccgttctcgtcttctcggcgactcactttcatctcaatttctttttctctatattttttcaaa

SEQ ID NO: 2564 - DNA, 982 bp, unidentified
  source 1..982: mol_type = unassigned DNA; note = unclassified RNA viruses ShiM-2016 sequence
gccccccccaagatactcacccaagtgtttaacaatcttgcttgaactgactacctacaaaaccggctgctacagtgactgtaacagtgtgtgagacataaagtcttaattactcactcttgccttaatcactgttatcaaagtggatttgacattctatataatcctgttttacgcagtattaatagccatcacatttgctctgttatactgctatatgaagtgattatgggccacaattcaggagtatagggtgtcaccaaacactattggacaccaatgtctggttgcttggatttaagttcagcactagaactggtatctgtgagggaatttgctgagaggattaataaggaggagtcaaaccttcaatcctttgtgagactattttattatttgaggaacaaagggttgactagtgaattggagaacgaatatagtagtatagtgaaaaggattgatgtgctgaggcctatacaagttctaggagaaggattaaactgttatacactaaatcaagaagtattatctaaatttgtcgtaagattgactattcattcagtggtgagtgatactggcttcagtagtaacagagtgaaggtagtttgtaagggaggaaagacagaaaaggtaaccggtatacaagctgtcagaaaagtactggaaccttgctataagaggagtagattgctagatagactcagcagaggctgtgaagcagttgtactttgtcagaagtggtttgtgacacttaaggtcattaaaagaggtagtatcagtaaactgcactgcctttgtagggatataaacatcacattgaataagaagcagctgagcttcttaggtatttataaggcaggttacgactacttctgtggggaattaaacttcttcctaactctgctagattatattagtggaggtagttttgatagaggcagtaacagcacacacataaaagaattgttgggtaaactaagtg

SEQ ID NO: 2565 - DNA, 983 bp, unidentified
  source 1..983: mol_type = unassigned DNA; note = unclassified RNA viruses ShiM-2016 sequence
tgcatacgtacatatttgaacatattttaacgtaatagtgtgaatgtttctttatattatgtttactctctttaagtatgatagtgttattaatgtattgagtggactataaaaatcagtgttatattaatttttggtatgaatataacacgtttatttgcgtatggattttgcgtccatatgaatgattttaagagaggctattgagttttatatattacggttttgatgttcaatgacaatgggaaagactataaatttcgttttagattttataattaatgtgtgaatgtggtagttcaagggattttatactcctgaatagtaacaaaattataaaataaacaaaaatattatgttagatttagttagtacctagacgatttaatattagtaagatgaacggtacgttaagattaagtttttacataagaacaagcttaattattatatgcttatcccagtgagagtatattctttgagatgtattatacataaaataagtgcagacagtgtaacaaaaatccagttatgctgcgttataagcaagttggtaccagatgactttataactttctggcacgaaggattattccccgacttcgtggtccccttattctatgtatgatttcatttttttgaggtatatttcttgcgtaggatttttaattctgagggtaagtacgctgctaagtaatcagaacgtattattgatcctgtgggaaagctagactggatcagagaacaatagcctttaatgttcttgaatgtatgtatttgttccagtataatttgtaggcaggcttgttacgttcgcagaggagtctttagtttaatgtaatttacatataaatcctcagacggtgacggatggaaagacatcattttccttttttatgcagattttatattgatttttcttgtttgtcgaagttattctcagtgttttatccctttaacgtttttctttaatattttgtata

SEQ ID NO: 2566 - DNA, 984 bp, unidentified
  source 1..984: mol_type = unassigned DNA; note = unclassified Sobemovirus sequence
agaggcacttagaattagttgctttgtgtgttaccgagagattgttcttactcagtgaagctgaggatctacacaataaatcccctgtggacctagttcagatggggttgtgtgacccagttcggctgtttgtcaagcaggagccccatgcttcccgaaaggtgaaggagggtagatttcgcttgatttcatccgtttcgctggtggatcagcttgtagagcgaatgcttttcgggccccaaaaccagcttgagatcgctgagtgggaacatattccctcaaaacctggtatgggcctttcgctgcaacgacaagccaaaagcttgttcgacgatttgagagtcaaacattctcgttgtcctgcggctgaggccgacatatcgggttttgactggtctgttcaagactgggagttgtgggctgatgtagagatgagaatagttttaggaggttttggacagaagttgtccatagccgctagaaacaggttttcgtgcttcatgaactcagtcttccagctctcggatggcacgcttatagaacagcaactgcctggtattatgaagtctggttcttactgcacttcctcgacaaactccagaatacgttgccttatggctgaacttattggttccccatggtgtatagccatgggtgatgattctgttgagggttgggttgatggtgcgaaggacaagtacatgagattaggccacacgtgcaaggattataaaccctgtgcaacatccatttccggtcgcttatacgaggtagagttttgctctcacgttataagggaagatcgatgttggttggcgtcgtggcccaaaactctgtataaatacttgtctgagggcaagtggttctttgaggaccttgagcgagagcttgggtcttctccccactggcctagaatcagacactatgtagtcgggaatactccatcgcccgacaaaactagattagaaaatttaagtccgagct

SEQ ID NO: 2567 - DNA, 985 bp, unidentified
  source 1..985: mol_type = unassigned DNA; note = unclassified Riboviria sequence
actgccagacagatgaattcaccgtgccaccgtgcacggttgctctgaatttgtagggagcgtcgggggaggaaatgcccctggcggagatgacgctgtgcacacaacgcgactactgatctaagcatcagtgagtccgggggattcttaccgtctcgtccgagcttgtgcactgaagggggccgcacccctagtcagccttgttcttctgccacacttttcactgtgagtgtggtgagagcctgtagtggcgtactaagctctgcgcctgaggtgaaggcctctgggaaactggatttaacccccggttgggactggcctcccttaattcccatacccgagacggacaatgcggtaggcacctcttgatgccccacaccagatgtgagtcggcctttttggacttgcacaggtggatgtagggaacgaggagaagtcgaagctggtcaccaagcagtaatgcgtggtgtgttggctatccgtccagtgttgattggttacggtaccgtggcccggcgtttttccgggtgatgctatcgagcatgtggttagagctccgacagaatgaggaaccggtcaccgaccactgttgagccgcagggaacccttctgttccggcttgtttgacccacgtgattagagaaacatcggtttgtatagaaatcagtgacgatgcatgcatccgaagccccaaataaataaaatatagcggcttctgtgtacagtgcaggcttggtccatccccacatgaactccttcgtggttaagcgacattcgatgcgttcggaaactgcttctgcgcggggtatgattgtgtgggggtggccagactttgcccagggttggacgtctatcacgtggttaagcgacttccgatgcgttcggtcactgcttctgcgtggttatgcccgttctgacgctgccaagcgactcccgcttgagacgtgtatagttttttcggccttgccgtctgtttatctgagtg

SEQ ID NO: 2568 - DNA, 987 bp, unidentified
  source 1..987: mol_type = unassigned DNA; note = unclassified ssRNA viruses sequence
catggacgtaatgtccatgcagagaattataatacttttatcagatatatctatgatattgtttcaagagttcatcttgaaactttcgtatgttagagcttgtatattgttgtcaatgtatgggttcttcccatacaacttcatatacaagatatttttcatacgctaagtttcgtaattgatagaatctcttgttgctttaagtagaatatttgatgaggtgttattattcgccccagttttctatctgtttacagctacgacttaaccattagtcgataacgcaggctgtatcctagttcagtaaagtacatagaatgcaaagatatttagactacttaagctactgataaagtttatactttcgcttttgatgtagatgttcatttacttaagtatagcgctctgaaccgagcgcttttgtttatgaaagaatttaatcaactctttcacccggccacacatctttagagatgtttatgacagtattaatttgtttaatactcgaggccaaatttcggtgtttttactaattgcaagatgtctacggactgccaaaatcttgtgtatttagtataaattcctctcccattttagttttaactatgaaattcttttattagttgactatttaggtttaggactttaacactgctcgaggaatccccctttatatgtgaaaattgcgatttaacacatactcgccccaaagaagggtttagagatgttagtaaaagaataacattttagagaagaatcggtccttggaggtgttttaatggaacgtaccccaagatcttattataaccggaatatacaaaggatgtatgtataatttaaggtatagttaccgctatgctagggccgacatgcccgatttttaattacctctacccgatgttgaccagtcaatatttttaaactaatgaattagttttattctaactttggaggaaagttatttggcacgccctttctattttaatc

SEQ ID NO: 2569 - DNA, 988 bp, Sanfarnavirus 1
  source 1..988: mol_type = genomic DNA
aaaataatgcatgaaatatagattttatctatatttcatgccacatttgtgacccttgagaaggtcataccgcattatgcggttctaagttaataactcacttcagtccagaagactgttaagtagttctgacggtggaaagccgtcatctgttacattattagttataataggatgtgtactcctaactagacgatctctacccttaagtcggaagccagcgtttagtgctgagtgcttccgtcacctttggatgacaaatcgtctacttcgactcattaatccgaaagttacctaattttcgtaacccctgtgtctgtgttcagtaaatgacagacagtttgagataaactaaaaatctcccaagtctccacaagtgacatcaatgatctgaactttatttttgacgtttgagatggtgaatgaaggccttgtgcctgtcctcactcttctttaatctttagtaagtcagtgactaacttgtgttatcctagttgattatactaggcttatcgttttctacaaaattttgatgcaaaatcggaacgaatttattcgtaacccgtgagcgtttcaaggtctttgcccttgatcctaaattttttgctatatttcgtgtcgtatcaagtcattttattaatactttttgacttgcctgaacgatgatgtctcgtttgggaagctgcgtaagcagttaactaacaaggtataccagaggatgtaatccccttccagttaccccttgtgttttgaagtactttttcgtaacttcgtgacattcgacctggttctaactcagatgtttgataaactttcgaactatcactgtgaaaggtgctttagcaccttacttgaacccgtcgtctaacacggacatcgttaacgtatgtagaatactatgagagatgttaaattcctcttattgaccacattggaaggcccttagaaaaggcccacactatagactggtgtctaagtccatcccgcc

SEQ ID NO: 2570 - DNA, 989 bp, unidentified
  source 1..989: mol_type = unassigned DNA; note = unclassified dsRNA viruses sequence
ggcccgatagttaccaagcgcgcggtaatagactttaccgcttcagcaattcacgggtgcctacccctagtgtggatgaaggtgctcgcatttataatatagtacataaatatttgcctaaccacaaagttttaactggaggtcttccttcaagtagacgagctggtctcgattatttattgccacctgccctgaggagcggcaacgaaacggctggtccgttggcaggtagtacgctggacgtacgtgctcgaggcggtcctcgactcacggtcacgaagactgaggtcggtgttactgaggtaggagaaaatgttcacggtcccaagaatgaggatagagccctgtccccgcatgagactattacacgttctctttccggtgtttcgctgatcggaagtagtcgtggtagtgatgacggttctgcttcgtccccacggccgggtggtgttaccacctgccaacccccctcccctactggattatcgaggcaggcagtcaaagataactatgtgggcggtgtcgatgaaactacccaagctgcggatgtgacatcggcacgtatcggcaagcaagctgtgacaccggaagtatctgataacgaacaacctccaagtggtatcagatgggaacccttacgcagacaaggggcaaagttcgtcctgctcatcccgagtggagaaggtaaaacatatttggccgagacgtatcctgagatcttcaccgatcacgatgccctcgaggattacacaattgaggtccaaccgtacattgagcaggcacgcgaaagtggcgactggtcatacatcgatgcggtccaccgccggagtagcgccaagtgccaaacacctgtactactatcgtggaacgtttcgacatacgatcatacccgcttcgtgagtctaggtgcgtatttattgcgccaacctactaacattcgtgaaaacgagaataaccgtgccgctctgatcgcaacccacgattattgt

SEQ ID NO: 2571 - DNA, 992 bp, Halfbeak nidovirus 1
  source 1..992: mol_type = genomic DNA
ctgaaaagcatcccctaaacttcagttaaacgctgattccgagaaagaaataccctgctttctcagctacaaaatctgtctggctcatagtgctggttaatcacatcccccgtggtgtaacactgtgacacatacaatttgtagtccctctccttactctacccccgagtgtctcttatcggttactcaaaagttgtgtttggtttgtccgcttttcggattttgtgttagaattacattataaccttatcctagtttgtgttgtgattatatgtaaaaactcttcgtgtgaaagtttgaaattttgtgtgttcttattgtacctctttaacccacatatataatttctggcctcttgccttacctgtaggatttccaaagcctaaagtataatctccccgctagaggtctgttgtgtgaatcagaccattctttaacgtaaagtcacccgtatcgacgctaccatcacacagtaggatcaagattagctccggcagccctggggcgtcttctttgatacaacatcacctttgctggtgcttgcaccgcttgggtatatttttcggtacttgcaccttcgggtgttgtggcctcttactagtttttctcccccttacgtaccttcgccccttgggcccggagtccctgtaattggcatcgcaattgtggtgtcaccctaggcactgcctttattggttctgtctaggtcggtgtggtaagggtagaaaggcgataaacaccgtacattgtttattctattttatagctttcgctactgacttctatgactgattccctcctgtacttagcctcccacccggcggcacttgtcactcttacggctgtggttcttttcctttacctgtatgctggttgtcgtgcattgtttttagacggtgtgaagttagctagatattgtggaactcctctttgttggggtgttaagtgtctctgttgttttgttagaagaggtaagtcacctcgccaagaag

SEQ ID NO: 2572 - DNA, 994 bp, unidentified
  source 1..994: mol_type = unassigned DNA; note = unclassified Hypovirus sequence
tataggtgctgtaggtctccccgtcgctcaccattacggtgttagcgtacgagctcgtgcgttgtatgcacgagtaccctacagacttcttaggtcttgtcgaccctgctggttgcgccgtcgtcgttagacggactctattcggacgtcatttgttttcgtccaaccccccttccaaaagactgcgtggagcggtcaatctagttacgggctgacagtagtggtgctgtcactaaggaacaccaggctggcctcagaggaaaagctgagtaataacaaacccgttaagtgatcacatagcctcgctagcatgtgacacagcgctatgactctgatgcgtcaggatgcactagcatcccaggaaagagtacgtgagacaatatgaacacagtgcgtgacctttgttcacctgtgcgattttggctccctagctgtatgccgcagcgacttgtcttgggttgatgtcgaataacccacgtagaatcttatccgaaacctctccacacacaaccgtcgacgcagcgacgttaaatacccggctatgcggaagtaccgaaagtcgggcgggcgtcaaatctacgccttaaggtcaaccaaaactttgcaattgcatcgtgtgtcagatgacacgaccatgagtcctcctggacacttctctagcttgctagagttgcccgccaccacagctgttataggcccttcggggatggtgcgactagtgttagcacccgtgtgaaagagagggcgcgttacgccctataaacgcttgttaggatagctttcccctggagaggagggactagtgtcgatgaaaacctcacaactcgaaagagtattgaagagcctcggcgcgtcaatcttaaaccaaacacccagtgccatttaaaacccgaaaagggtggatggtataaccaaagttctcaaaaggagccactgtgtggagtgcgacgtatagttcaccaggtcagccatagggttgtttacaaaacaacaa

SEQ ID NO: 2573 - DNA, 1000 bp, unidentified
  source 1..1000: mol_type = unassigned DNA; note = unclassified viruses sequence
tcattccacagtggagtgtttgctgacggtgagttaaaatttttgcctctattcttcttcgcgaagtgtgttgatggtagcatatgcatccattattaaagacaagctgtgccgggtgtttcgttatatgtggacacgaagcgggtaatcctgtggaaaccacccccatcagaagtagcaccaaccggttatcgtggccgatttggtagttagtacctcgcggtagggcttcggcccgcgtaagacactagcattaggcagcgcagagacagtcagaaccatggaggccgtaatagccgttgaagtgtgatgatcctccagtgctcgggcgacgtgcagtacctaggcgaacgcgcgtaaatcttttgaaataagggtataagtgatatgacgaggcgggtagcttgacaaccacctagataagtcgaagaatatggaagaaggacgagaacgagtaagaaaatagaaaagcccaactttggcaagtttgtagaggatggggtgttttaggtcacaaatatggagtagggagcttcggcgaacctgcaaaacctacacatagtgctataagcgctgcccagcgtgaaaggccgtgatcataaccgtacgagggggcatcgagactggacctgtcgttacagcaagggtagacatttggggaaaccggcgatgctcatcgggtgtcgtgtcgctcctacctaaacttagagatgttaagttctggcggggggtcaacctatgtcgtgtcatttcgggtcaatttcactcattggaagtggaatccgctaacagagcatgcacggacgacgtctgtggtcaagcaacctttgtttgggaagaatcctgttatacaacttctacggttccttcgtctctacgaaccaatcgaagtctactgtttacctatctcgatgttactttacgacacacctccacgtgatcagtccgtcaagttaggtcacccatggtgaaaggcgatgtatgctaagaactcgaagcc

SEQ ID NO: 2574 - DNA, 1000 bp, unidentified
  source 1..1000: mol_type = unassigned DNA; note = unclassified viruses sequence
ggcagcgcagagacagtcagaaccatggaggccgtaatagccgttgaagtgtgatgatcctccagtgctcgggcgacgtgcagtacctaggcgaacgcgcgtaaatcttttgaaataagggtataagtgatatgacgaggcgggtagcttgacaaccacctagataagtcgaagaatatggaagaaggacgagaacgagtaagaaaatagaaaagcccaactttggcaagtttgtagaggatggggtgttttaggtcacaaatatggagtagggagcttcggcgaacctgcaaaacctacacatagtgctataagcgctgcccagcgtgaaaggccgtgatcataaccgtacgagggggcatcgagactggacctgtcgttacagcaagggtagacatttggggaaaccggcgatgctcatcgggtgtcgtgtcgctcctacctaaacttagagatgttaagttctggcggggggtcaacctatgtcgtgtcatttcgggtcaatttcactcattggaagtggaatccgctaacagagcatgcacggacgacgtctgtggtcaagcaacctttgtttgggaagaatcctgttatacaacttctacggttccttcgtctctacgaaccaatcgaagtctactgtttacctatctcgatgttactttacgacacacctccacgtgatcagtccgtcaagttaggtcacccatggtgaaaggcgatgtatgctaagaactcgaagccttggttgattgggccgctaccctctggggtccgtgcacggtctatttagccttggttaggggacaaccctgcagcaaactcaccctctggagaatcctttctttatgtatgaattacgcggatacaaaatctacaaaactacctaaagggccttgcaagcgggaaagccaaaaacgtcgatttcgaggcactcgaacggagagttgggaacagcgtgatctacttctcgactcccgtcgtcgaagtcggcgtgact

SEQ ID NO: 2575 - DNA, 1000 bp, unidentified
  source 1..1000: mol_type = unassigned DNA; note = unclassified viruses sequence
ctaaatcgcttcaaactgatggtgaagggtgatgtgaagtttaagggcgactcagaagcgttggaggagtttgctccgggacaaaacattgttttccacagccgactagtttgtgcgcacttcgcaagcgtattttgtgagctagtgaacaggttacgctcaatatgtgctccaaacgtaatattattcaatggcctatccttcgaagactttgcggcacacgtggactcatgtttggatggtgaacccctctataatttcaagagtgacgaaatagacatttcaaaatacgacaagtctcaaagcactttaaccaaagccatagagcttgaggtttacaggagattgggactggatcaacgcattcttgatgtgtggggatcgtcagagttttatggtagagcaaccacgggttcaagaagcttctctgcggagatattcgctcagaggcgtactggtgccgccaacacctggataggtaacacgattataaatatgtgtttattggcccagagcacagacccgagactctttaaggtggcgtgttttgctggagacgatagtctactaatctatcgaaagaaacccaccatacactttgagtactatgagacaaagttcgacttcgacgtgaagtattacgactctgcggcaatgtacttctgtggaaagtttcttatctcagatggggagaaaactcgaattgttccagaccccatgaaactttttgtgaaattgggaaaagagcggccctgtcatgattctgtattgttggagaattggaggtcattttttgacgtcacgaaagcgtatgcaaataacaccgttttggaacgtttggtggagcaatttgcattgaaatatacagaatcaccacaggcttatgcagccttttgtgcagtgaactcaatcagaagcaatccagaacaattcaagagattgtggttttctttgtatagtgggttttcgagcgacatcaagcaaagattgaggtgacttc

SEQ ID NO: 2576 - DNA, 1000 bp, unidentified
  source 1..1000: mol_type = unassigned DNA; note = unclassified viruses sequence
tggtggggggttgggaaaaaataatccaaccccacagttgacaaaccaagcacagcgcaagaccaacaaggaaaattagtgggttattgtaagtgaacccaatcgagtatattgatcgagcgaacgaacaagatgtgatgtggcaaggcgtgtcgatgtttctaccatcctctgaattatagctgtgtgcggagtaattatgatggagctaagtcgtgcacttcccttgtgtggttgactggtggccgaggcgatttatttcgtgggcggtacagttaacctagtggtaatgcagcacggtagaccttttagtacataagttgccgtccggtcctaagcccgggtacatgcagaaggacacgcgttaagctgtaacgcgggttatgtcacagcagactccgacagaatctgcagccatccttcggcccccaatgcgcgggcagatgagtgtgatggatgcgggacactaacggaggttccgggtaatgggtgaaaccgagccgacgcgaaagcgacaggccccccggacatagggagcccactgaccctgaccgccaacacaaaggatgttggccagggaggagtggtaaactatgggtagtgacaacatactagagcaaggtatgttgattgcaagacgcggacggctatttaggggcgaaccctatctaaaacagtctagtgtaaccccatgcaacatgggcgcgctagctgggcaacgggaagggtggttctggaccgtagttcgtcgacatctgacagggcaagccccttgagatgtacacgaggctcgagaggacagaggcgcgcgtcggtctccctgacaaggaggcttaaggtgtaaacagcgtgtttgggagttagtggatattgaattctgtggatgcttacatcgcctaggtattaaattacggacgatggaagtgttcacaaagttccttataccctgcggccacggtcattgaccctaagcccgagctcccttcatgactgacattcg

SEQ ID NO: 2577 - DNA, 1000 bp, unidentified
  source 1..1000: mol_type = unassigned DNA; note = unclassified viruses sequence
ctcttgacgccagagttgctagtctccgtggtacatccaagaagcactctggggagccaggcaccatgcttttcaacactatttggaacatgaccgctgttttccacaccaccagtttcactagaatgaccctctagctcttcaaaggagatgactccgttgtgtgctgtgactccagcatgcccaccccaattgctaaggagttcatctctcagaacgggctcgtcatgaaacagaagacgtcccacctcggctccttcacatgcagtctcgtcacccgcacaagttatgtcccggacgtctacaggttcgcttgcaggctgaacaacaacgacttcacagataccaagcgcatcgaggatctccagagggccacagacgatttcatcaagagagcgactgtcaccaccaactacgggttccacttgctcgatcaacggcagatactacgtgtccttcggacaccattgagtgtgtcgttggcttcctccaagattttgctctcaccggaaaaatagacctccaaacatcatacaaaccaattttaaaatattaaaataagagaagaaattaaataagttggacattagttatgtgcgcttgagatagatacagtcactatggcagattccaaagcagtcgctccttccgtacaatctaaaccacgtcgcactaggcgtccaaagatggacccttctcagatcccagatacagtcaaaaccttccgtctcacaaccgaccctattatggcacctccacctggtgaagttgattcacttctctacacatcaggcctttcacctgcagttgtcctttccttctccccattcacctcccccgcagttgtcttcgccgccaactatgagaatacaagatcttatctttcaaagctactgtcctctccctagcaccagaagctatttccagttacaacctctctgtcgtctggttcccagatgcatcagaagggcccacctctcttcaagctacaaacttgtcc

SEQ ID NO: 2578 - DNA, 1000 bp, unidentified
  source 1..1000: mol_type = unassigned DNA; note = unclassified viruses sequence
cccgtgcgggtttttctggtgctccttatgcaatgggcaacaaggtttacggtatgcatctgggtgcttcctctgaaaacataggctacgatgctggctacattctcatgaagttgaggggtttgaccgagtcatcaactgactatttcgagaaactcgtggacaacgctagacgccgcgggcgcaagcttgtggtgcgaaacactggtgatcctgacgttgttgaagttttcgtcaagggtcactacgtgcgtcttgaccgcgatctcttggaaggttatggggatgaggttgagtcagccacttactctcaggagagtgttagtcagggaaacggaaaggggccccgtgcggatgcgcggggccctgggcagaagacctctccggtccctgctcccgtcccgagtgggcaaagttctcccttaaccccgaaacagccgcaagctgcgacggaggagaagggtacggagtcccccgcatcgacgcctgtgccatcaagcagtcgttcgccaaccacgtccgcatccgtgaagcccaaggctctgctcgaccagcagggacgattgtcgaaagatgtcttgactgtcttgagcaaactttcggcgaatggaggttccggcctcaactcggccgaattgaaattgctaaggcaatacgcgaactcgactttacctcaacacccggttattgtcagttcagtggctacggcccaaccaacggtgccatcttaggatgggacgggttggactttaagcgtcgggatgtctatgaggcacttgtctctgcggtggagtatcgacttgggcaactcacacaaggaaaactagtctatgatcccatcaagcttttcatcaagcaggagccgcacaaacgggctaagctggaggaaggccggttgcgacttatttctgccatctctttggtggatcaggtcgttgaccgagtgttgtttggccgattggtggagagggttctctccactgttggccgaacaccttgc

SEQ ID NO: 2579 - DNA, 1000 bp, unidentified
  source 1..1000: mol_type = unassigned DNA; note = unclassified dsRNA viruses sequence
gtttctaatataatgcaaaccccgtaagttacgatgactggctcggccgttgtaactgagtatgttgttgaggtgagtgtaatgagcaggaccgcccggagaggatagtatttatccctcattgtagcttccaggatcacgaacgttagtctaagtattgacggttacttgcagtatttagttctggccggaatgacacacatggaccgtcctttatgtggacggagggcgttacctctaaacctagactctgcgctgcgagtcaggatgaggatgctacttcaatgtatcttcagcctgacactactgcagtgtcgggtctaggtttaaattgagccaccttagtgggtttcaccagtatgaaagaatatactggcacccgtgcaggcaccgtttcccttgggctgggagaaaaacgcatccggttcgaaacaccctaattggttaggcttctgcctttccggccactcatccgtcattgagttctattatgtttccttccctcgtagaagccgggggcacatcatgtggcaacgaaactaggcctccgtagcaatctcacggttaagatgattatcgcgcggctgaaaatagggacggggcgccgtacccgcgcattactgttaggcgtctaggcaaatattgggatagaccccagtagtttccacgcgcggtagggctggccgctaaatataaaacacagtcaaagtcatcgcggatagtggcctaaccagccgctagacctgctcaagggttccggaattcgcaagttttctgggtgtgctgtgtagtagctggacagagtagctgcacggtgctaacgtatgcttaggctgtccgccctaagtagaacgtgccgaaaggtggtctatcgtacgtaacgaaggagggacgtactgggtttaatcccgaggtagggagcgcctgtaggtggaacgactgcccctgagttgaatgcacggttgtgcacgcggaacagtctgctgggcatcccccagtg

SEQ ID NO: 2580 - DNA, 1000 bp, unidentified
  source 1..1000: mol_type = unassigned DNA; note = unclassified dsRNA viruses sequence
gcccgtgaacaccccctgtcttcctcactgggacgatcccaccagtataaaaataggtccgtctggctgcatgttaaacagcccaggtcagcgctgtcacgctgggtttatcacctaacaatacgacccctcgcatcacgtcgtaaaactgtgagagctcgtccattgctggcgacgaattaaacagcgtactgcaggcatggggtgtttaaaaggtaggttgcttaggctgtatgttgccgatatgatacagaaacccttcgcgctgatcaaaccactgggctcaaacaaaccagtggatgctgcagtcggtcaaattcacttcgttgaagtgcttcgggtaactcccgaatcatgaggtaactagtggaccgtcaacccctcatttactaccacacttgggacttttgagagcttccttgtgtggatatgttataaaatgagtgttggttcggcgtttgcgcgtcgaatttctaagattaacacctggtgcgcactcctccggcttcggccgggggtgtgcgtagcaggagtttgttttagaaatgcacttattcaattaactcaagtcctaggtatgacttaaaactacctccccccgccctaggtatggcataaaactaccttccttggcaccgtgaagtgtttaaactagcaacctcggtggcgtgggtagatatgctcagccactataagcgtctcgggcgtgacggttattactcaaaaatcgccaaaatccatcgtgtgagcgggagatgaccctgccggacgggaggtaacctagatgtcaactagggtgtgaccacaatgcggccaacgttgtgcgagctatcgtaaccagggacggtctggatgtagcgtacgggtgcaatctctaatgcaccacttctgttgctacccctggggaacgagccatgcttaggtatggtggacagactgacactcctgtcgctaagtttcatagcgcaccaaacagtcggctgggtctacgggcccagtg

SEQ ID NO: 2581 - DNA, 1000 bp, unidentified
  source 1..1000: mol_type = unassigned DNA; note = unclassified dsRNA viruses sequence
aaatctcggacggtgccgcgcgatcctaggcacttttgttcggggcgttgtatctcactcagcgtcctcctcagccctgagaccatagggttatccgacgacttggctataaatataacatcctccctttagtggaatcgcccttacaccaacttagggccttttccagggaaaggaacccgtgccgccgcgcaattcgcggtttaccatggtgcggggttgtcggagtaggtacgtgtgctagcggtagagagtatatgatgcggtttttcgctgatttcctactgagcaccctacgcccgaatttttaggaagaacggccctcaaaaacgagaaagctgttctgccccgaaaatttgaggggtaccaccatttacgtccagcatgacggaaaaaggcataccaaactctggtcactcgcgccctgggcacggcggtaaactgcaccatttgcgtgatctatatggtcgaaatagtcgcacacctcgttaaacctcctactgcacagctctattgatcgagaaccctttagtgggaatgcagagctcacactcggcgtgtggtcaggataggtgaggttggcttccgtttcagcgcatcctgtggtgagccccacacacataagctcaaaaaccagagtcctgccgcctaatacgcgggatataaaggaagcggaggggtcattcgctataataaaattagatcaaaagcatcgcggatagtgggctcaccacccattagacctgctgtagggttccgattcggagtaatccgatagggtgtgctggtagctagctggttagagtaggctatcggtgctaacgtatgcttgggctaaccgacccaggtagaacgtgccgaaaggtggtctctgcgcaagcccgaaggcgcggtttgctaggtttaatccaagcggagggagcgcccgtaggtggaacgactgccccacagttgacgcaaggttttgcacgcggaccagtctgccggacaacctccggtg

SEQ ID NO: 2582 - DNA, 1000 bp, unidentified
  source 1..1000: mol_type = unassigned DNA; note = unclassified dsRNA viruses sequence
agttatcagtctctcatgttcgtagcgagtacatgagtatcacagctgaccaggtggcaggctaagaggaattcgagggtaaaagcagggtatccaacttcacccatcaagcaactatcttcgtgttcatttctccatcgtgctaaggcgacggtgtgtcatctctaattcttgattgtggtagcgattgtgctaaccatacaagataaaagccctcagttataaaccctgcagcctattacgtacatagccaggggcgctaactttaaattgagcgctgtaactgtagcctgtcaggatgggagcagagtctatatggcggtagtcgtcgtgatctgcgcatagccaacctctgtacatctctattgtgtcgcaacccttcagtgggaacggagagatcgcagcgaccgtgcggagcgtctggtgtggtgaccttcttctacaactatttccatctgtctcgaggaaagccgggacgtcagtaaactaggcccacgcatcaaaggcgtctaacatgaggctactaatgacaaaggcttaatcattagattcgacacgctgcccggccgtgcagccgctgtattcataaatcggcaatcgcttcgtctagtgggaactaaccattcctacgtccggtgtgagggttctccttttggaggtgtccacttcagatatcgcacaggagtttctgatttgggctaacgtatgcgtgtagctgtgcgtctacaagtagaacgtgccgaacggtggtctctgcagtgtctcgaaggcgcagatacttaggatagaatccaagcggagggagcgcctattaggtggaacgactgcccccatttccgatgtacggttgtacagacggaccagtctatcgggcatacccggtgaagcgaattcatatcatctagtggtgtccttaattaacggcgtcactttaatcccaaaaattgttgattagtgaaatttaagttagaagcttattttacgactctcttcacccacc

SEQ ID NO: 2583 - DNA, 1000 bp, unidentified
  source 1..1000: mol_type = unassigned DNA; note = unclassified dsRNA viruses sequence
aaatatgcacgccccctccctgaagcttaatagtagtgatacccttggacctgtccagggccgcacgctgggcccgaagtagtcttcctgaaggcttaagagtttaggactcacagccgaggtaggtgactgggcttcaacacctctatggttcttttccctcctttggcacaggggggaactgattaaatagaggcatagcggtgacaatcgctatataaatatgacctactcgtagggccgcgagtataaataaggcttgccaagagcatcgcgtattcaggattaccagacctgaagtcctctgtcggggttccgtccctagtcatgctgcatgggttgccatgcggtaggctagcacacgggtgtgtttctaactggctatgcagagtaggttagaaatgctaacgtatgcttaggctgcatgtcctaagtagaacgtgccgaagggtggtctctggggcgagatggtgtcagctgctgggctatgtaaatccggggtgtcttagcttaaccagtatgcgggcgtgtgtagggtagtggcttgtaagtccgggggtagtcgtccaactaacagtgtcggctacatgcttagccttaagctaccttgcatacatctcttaaccggagggagcgccttagtaggtggaacgactgcccctgacggtgacgcttggtagcgacgcggaccagtctgcccggcaccaccgggtgatgctcttatgccatatcgccgagagataacgaacggcgctagcccctagatccgggctggctttctctccgcatatgctagggtggccagacgtcccttgactggtactcacttccgggccgcggcggcctttgtcacttctttgtccttccacggatgccagccccgttcaccacatcctcatcccctaggaaacttggggaaagtagccggtgtatagcaactctcaaggggtagtgggaggagatcggaaaaatcgagtcataaaagcctgcacgaaacatt

SEQ ID NO: 2584 - DNA, 1000 bp, unidentified
  source 1..1000: mol_type = unassigned DNA; note = unclassified dsRNA viruses sequence
ttgggcgcgaatccagctagtgtagtagggggcaggaaagaacgaagtacgtgttaactatatgattcatccaacttgggtcatatacagcgtattgctacccaaggtgtcaaggtagtgtgtgcgatttacaacagcagcactactaaaaaacatcacagaccttggggcctactacagagagtacaaccgttagggtaggtaagggcaggagctacaacctcttgatctcttaccaggccagcggctctcagcccctgttttatatttactcctccccggtctagcggtgggggagtggtataaaatgagcggtcgcgctcacttgaattaatcttttacgtttacgcgcataaaatcaggacacatctcttgtatactttagtatatcaatgatgtttttgttttatgcgattaatcgtaagagaacttctttccatccgcctgtatgggcgggataataagttcaccgccttggtcgaggcgcaaacttgtatgtgcaaaggtgagctatatgctcgaaatagtcgtaactaacacacagccactacctgtagagctctattgatccggaatcctttagtgggaatgcagagctcacaccggacctgcgggtatcttcggcgttagggacttctgtttcagccttgaatcatttacctttataccttctctgaggcgcctgggccgggcgcgatattaagtacaagtcaaggacatcgcgggtagtggtctaatcagccgctagtcctgctggagagttccaacttagttgggtgtggtgcatactagctggatagagtaggtatgtattgctaacgtatgccggaggctatccgtcctcggtagaacgtgccgaggagtagtctctgcagacccccgaacgcgtggggtctttacttaaatgtaggcggagggagcgctcgtaggtggaacgactgcctcccagtcgaatgcaagattttgcacgcggaccagtctgcccggcaattcccgggtg

SEQ ID NO: 2585 - DNA, 1000 bp, unidentified
  source 1..1000: mol_type = unassigned DNA; note = unclassified dsRNA viruses sequence
gcactaaattgataagtgaggtccgcaaatttgcagctacgccagcaatggcgtatgctgaacagcctcccgtcctggtgcgacctaaccaggggagttacaaattgccagatggcaagactgtgcgcagagcgcgggtcgtgtcgtctggtggtaacgccactcggaacagtgaggtttcgagaacttccggcccccgtcggaacgttaaaggtgcagtgatcgggggttccggtggagggggatcgtcctttcgcgcgggtgtggggaaggagagtggttctcacacggacgtgcagggtatcgtaagcggcgcgcttacgatggccaagcacccaagagtgatggcgaagtcactcttggcgattgggcgcgcagccctgaatgctggcagcgaggaggccttggtctcgctagccagatcgatccaagcaaggcaaaaacctggagtaggcttgggtccaaaggagcgggtgggcttatctgatctgatcagagaaggcatcggttctggagaactaagagtgggtgatgcaagaaacctgctcaagatagcgccggaggttgaaccggtgctcccagctgagattaagaatcagctgggaaattacaaatctttgtcgtttggcgaggttgaggtagaagttctatctccccggggcgtcgaggaattggagaaagccagccctgagttgactgatagcgctgcatatgaggcgcaatttgacgcagctgggcaggcgacggattttgctttcgagccaatagcagaaggcaagggccacgcggtgggcgcggcttataaagacgagggtggtgcccgactgggggtgctagatgatgttgaagccgatccggctttaaactaatctggcactcctcgtgcgcaccctttggcgaggcgcgtgcccgattacttttcaaatttgcctgcccactatttttaaaagaaatagttggttttttggagagtctcggttgcgatagaaccattacacgg

SEQ ID NO: 2586 - DNA, 1000 bp, unidentified
  source 1..1000: mol_type = unassigned DNA; note = unclassified Hypovirus sequence
agtcttatctagtcaataagacacaagtgcagaaggggagtttatccccgcctgttgttcagctaatcctctcaaaggaggctcaccgctgggaagcgctgaggaattcgcgattaaataccgcgcgttcatgaagatgacggagtaaaccgtcatgctgttcatcataaacattaaatcttttggaacttaaaggtggattcaaccaccgagtgtgatttgagcctaaaagccatcgaggctgaaatggaaagctcagattgtgcgagcccccttagggggattttgttctgttcaaagtcgttaaaacaggagattcaaccgcagagatgattacgcatcgagctcaaggtggggggaacaccggtggtttcaagactacgctctgcggatggttgcctggactagggcagttgacgatgtcctcctagttcacgatgaatgacgatgcttttgactatttggcatatactaaatagtgacgctataccgggatacgaaccggaacccctgctcggagagctcgtttgatccgacccaagttgcctatacgacttccctaatcttaagacaccaacgcgtaccgtgctttgcctgaattctgacgctgagactcttagagtggctgaagataatctggtccaacggccttaattgcgaacggtcattgcttaaagccccccgaaggttcaaccacgtagggatctataaaggcgatgaatgaaatagtgccaggcacctcggtgtttgttggccgttcaatgtttctggtttaattttgtggtccaccattccgtaagtgaagccccaatcggtgggttaatacggtcgcgaatgtccaatgagtgttaaggatagtcatggttataatgctaaggattgaacacggttttatatcgtctggcgccctctccaaggatggcaatttgttttgcgaggaaccctagctataagaattgggagtccctcaaatgtacgcaggccaatcatcgatgcctgt

SEQ ID NO: 2587 - DNA, 1000 bp, unidentified
  source 1..1000: mol_type = unassigned DNA; note = unclassified Picobirnavirus sequence
gtgtagaacaatggttttacacaaaattgaaaacattcaatcaattctgctcctcagccacgcagttacactgtgtgtttgtagcagcagaataagtcagaatgtgttaggaggtgacacttatgactaagaatcaaattgagtatctaaaattattagaaactcaaagatcaaatgttgcaaatgagaagctcacggcaacaagagatcaaactactcgagaattaggatttgctaatctcgcagagactagtagacacaatcgccaaactgagcaacatgccgttaatgttcttggagaaactgcacggcacaatcttgctcaagaagctttaacttcaagatcacttgatgagcaggagaggcataatagagtctcagaggatttgggatatgccactctggacgaaacgtctcggcataatcaagctgtggagttggaaacttctttgcataatagaaacacggaacgtgagcaagtccggtctaacaaggcaaaggagttcgaaacttatcgatcaaacctggctaaagaagttgaaactagaagggcgaacgttgctagagagcaggaaactgcgcggcataacaaagcaacggaaaagcaagcttctgctgaactcgagtattcctatgccaacttggcagaacagcgcaggtatcactcacagtccattggtttgggctactctcaattggaggaacaggctagatctaaccttgccagagaggctgaaacccgtagatctaatatctcccaggaggcactacggggtaagcaactggctgaagaggaaagatccaatcgccaggatgaagccttgacctcataccgaaaccgtgagcaggctaggcacaatcgagagtctgaagagctagaggagatcagaactagaagccaaagggttcgcgatcttacctcaggatacaataatctaatgtctggtgcgatgagcggcatcagaagcgctggtatgctaatacccttattcggactgtc

SEQ ID NO: 2588 - DNA, 1000 bp, unidentified
  source 1..1000: mol_type = unassigned DNA; note = unclassified Potexvirus sequence
aacaaaaagaaaattggtgaaatcctctttgaaaactataagagagccatgcaactcccaaatgacccagtagcattctccagggagctttgggatgtgtgcgccgacgaggtccagaaaacctatctgtccaagcccctccacatgatcaagaatggccagaacaggcagtctcccgactatccaaaaaacttcatcaccttgttcctaaagtcacagtgggttcagaagcttgagaagctcgggctcccaaagattaagcccgggcagacaattgcctcctttcatcagatcacggtgatgctctacggtaccatggctcgctacctccggagaactagagaaacattccagcccgccaacatttttatcaactgcgagagaactccggaggatatgtccaagtgggtccgtgagcactggaacttcaccagaacctcctacgccaatgacttcactgcctttgaccaatcccaagatggcgcgatgctccaatttgaaatcatgaaggcaagattcttcaacatccccgaggaagtcattgaggggtacattgacatcaagtgcaacgccgaggtgttcaccggcgtcctttcaatcatgaggctgacaggagaaggtcccaccttcgacgcaaacactgagtgcaacatcgccttcacacacacaaagtataacataccaaaggaatgtgcacaactctttgcaggagatgactctgccctcgacttctcaccagaagtcaagcccagcttcaggctgattgaaactgaactgtcactgacagccaagcccgtacttaaaatgcaaattcagggacaatgggctgaattttgtgggatgctcattacccctctgggcgtcgtcaaggacccaatcaaactctgggcttcatgggtgagggccaggcaaacaggcaagctcaaagaggttgcggacagttacgagcttgacctttgcctagcataccaacaccgcgatctgttgcaagaggtttttg

SEQ ID NO: 2589 - DNA, 1000 bp, Tomato blistering mosaic tymovirus
  source 1..1000: mol_type = genomic DNA
tggaaagcttgccaaactctggccctcatgcatgattacatcatcttaatccttggtccagtcaagaagtatcaacggatcatagatgccagagatcgccctcctcaaatttacatccactgcgggcacactcctcagcaactatcctcttggtcccaatctcatctgaaaggctctgttttccttgccaatgactacacatcttttgaccaatcccagcatggagaagctgtagttttagaattgctgaaaatgcaacgcctttcttttcctcctttcttcctctctctccatcttcatctcaagacttccattgagacgcagttcggccctctgacttgcatgcgcctcacaggtgagccaggcacctacgatgacaactccgactacaatctggctgtcatttattcgaaatactcgatctccaatcatcccatcatgatttctggggatgattccgtaatctgtggttctcctcctctcaatcctcagtggcccaatctccagaaactgctccacctcaagttcaaaactgagcagtcagaccggcctctcttctgtggctattatgtctcccccctcggagcatgtcgcaatcctctggccctcttcgccaagctcatgatttgcgtcgacgacctaaccttgccagacaaggtcctttcttatttgtctgaattctcagtcggccacgctttaggtgactcagtcactgaagtcatcccatcgcacctcatctcctattactccgcttgtcatgacttcttctgtcgcaactgctcaccttcccaaaagctcatgctgagccttgatccaatcccagagtccaagctcatcaagttaatcctcaaagttcgctgggcttcaaaaagtttcttttccatgctcccacaaaaggccagagacatccttgtttccactcattctttccaatccatgccttttgatcctaaagtttcccaactagagtcggaattgcttcccaattacaattgacacg

SEQ ID NO: 2590 - DNA, 1000 bp, unidentified
  source 1..1000: mol_type = unassigned DNA; note = unclassified Benyvirus sequence
ctttactgtccattgctgctggtgggagcggcttgtttttcgcgcgggcaaaagtaaaggagttcctgctgaagatgaaaggcaatctgttcaaacgtgatagtgagcctgacaacacaggcggttttaccggcgactggccgtccaggtcgtctggagaaatttctttacaagagttgagtagaccatcaccggagttccaagctccacggcccctatctccgagagtgagggacattttagacgatagacacctggatgtcttatatgccctccgtaatggtttggcgtattgtgccgggttgtatgggttcacagacaaattcttggcgatcagttatgcgttacaaaccgacaagactctaatatctctcctggaggacgatagtcccttggacgcgatcaagccatcagaagatgccatattggcgaaccatgagtctgaaattgcgctgctacagagggagctggagttggaaaaactcaaaaacgagttagcgttggaaagagctagggcagagattgaaacattaaaaatgcggaaagacgtgcaggcccaagaagaactaaatgagttagccataaaggaacagagactgaaagccgaaactgcagagttttcacggaacaaagaggaggctctcacaaaattggctcagatggacgcagactcatatcaagctagacacacgggaataaccagcgttgctagtattaccggtggatatcttatgggtagggccatgcgcgggcctaagatgagtgcgtacactgctggggttcagggggtttccaatttaagttctattgacagcagcagggcacgcgctaattcaggttctgttttaagtgggtctagggcttcagttgctgcttctgttcctattcagcctgtaacagctagtactgcttccagcagtagggcggggtcgaacgtttttaccattaaggatctaggtagtggtagattacatacacctccacccttttcacctgcagg

SEQ ID NO: 2591 - DNA, 1000 bp, Orthohepevirus A
  source 1..1000: mol_type = genomic DNA
aaggtgtgtggaccaaaagaaacatttgtccccggtcggcagctgcagttctatagacagtgtcgggattgggtgtcagcaggtttttatgtggaccttagagagctctgcttcgatcgtgagtacgcctgcccatgcctcccttttgagcgggcagtgcgtaaaggatgttgctgtgtcgcccgtaagttgaaacaggtttgtgggtgctttatgtctgatgttgtggagagtttagaggactcgtgtgaggatctgacagccgacttttaccccaaaccagaggtttacgagcccgctggcttggataattggaccatccgcgctctcacggacgccttccatcaggcctccctgcgcgccgtgaggaccggtgcaaaactggctgggtggccggagatagggttggcattctatatcgcccccgtgggtattgtctttcgcggcgagcccctactaggcccccccggtcgccgattagaggcggggccttattgggctgatgcgccgccgccgcccacgccggatgaagcgccatatcaaacaccggtgagcccggacggccctcccccgcctgcatcttggacgccggggccgatctccccgaggtacgttctccctacacctgttacgtaccgtgggcatctccccgggtctgcaggcttctgggagtcgtcctccgcttccacacttgagggctctctgagtcgtcacacatccctccagagtgtcaacttggaccccccccgtaaccctcgagtccagccggtccagagggtattactggagttgctcccggatggggcggcagtttatgaaggggatcttttcaattcagattgcttctggcttgtcaatgcggccaacgcccaacacaaccccggagggggcgtgtgcggcgcgttttacggacgctttccagaggcctttgaccgaacccaatttgtccaccctaacgggtcggtggccgcctacacagtgacacccaggcccataattc

SEQ ID NO: 2592 - DNA, 1000 bp, unidentified
  source 1..1000: mol_type = unassigned DNA; note = Hepatitis E virus rat/R68/DEU/2009, complete genome.2 sequence
actgcggttctcaacttggatttcactgataaggcatgcactaggataacattctttcagaaggactgcaacaagtttaccacggatgagccagtgctacacggcaaggtcgggcagggcatttcagcgtggtcaaagacccttgtggctctgtttggcccttggtttagggccatagagaaggcgattgtggacacactgcctgagtggtgtttttatggggattgtttttcccaggagaaattggaggacgccgtggccggggcgaaagcctgccgcgttttcgaaaatgatttcagcgagtttgacagcacacagaataatttctctttaggccttgagtgcttattgatgaaggaggccggggcgccccagtggatgtggaggttgtaccacctgctccgttcggcgtgggttgtgcaggctcctcaagaaagcttgcggggtcgatggaagaagcattccggtgagcccggtacattgctatggaatacagtctggaacatggcagtcataatgcattgttaccgttttgatgggttagctgtggccgcatttaagggtgacgactccattgtgtgctgccgattctatcagcaagagcctcgagccgcagccctcatcaccggctgcggcctcaaattgaaggttaacttcggggatgttggctcgtacgcaggcctgctagttgcctgtggtcttggggtcacccctgacgttgttaggttcctggggaggctctcggagaagaactggggtccggtgaaagagcggaaggaagaccttgaacagtccgtgcgtgacttcgtggcaaggttgcgcaacgtcactgctctgtcgtgcctgctcgccactcgcttttacaagctggagcccggcctggccctcaatgcagtcgcaggcttgaaggcgatcgctgaaggccgcatggagctgaaagagtatacctggcctgttctccagctggaggggaagaaggaataacactctggcccgtagc

SEQ ID NO: 2593 - DNA, 1000 bp, unidentified
  source 1..1000: mol_type = unassigned DNA; note = unclassified Tobravirus sequence
gatgtgaaacctaagactgatttaacaccgcaatttgaatactcagctctacagactgttgtgtatcacgagaagttgatcaactcgttgttcggtccaattttcaaagaaattaatgaacgcaagttggatgctatgcaaccacattttgtgttcaacacgagaatgacatcgagtgatttaaacgatcgagtgaagttcttaaatacggaagcggcttacgactttgttgagatagacatgtctaaattcgacaagtcggcaaatcgcttccatttacaactgcagctggagatttacaggttatttgggctagatgagtgggcggccttcctttgggaggtgtcgcacactcaaactactgtgagagatattcaaaatggtatgatggcgcatatttggtaccaacaaaagagtggagatgctgatacttataatgcaaattcagatagaacactgtgtgcactcttgtctgaattaccattggagaaagcagtcatggttacatatggaggagatgactcactgattgcgtttcctagaggaacgcagtttgttgatccgtgtccaaagttggctactaagtggaatttcgagtgcaagatttttaagtacgatgtcccaatgttttgcgggaagttcttgcttaagacgtcatcgtgttacgagttcgtgccagatccggtaaaagttctgacgaagttggggaaaaagagtataaaggatgtgcaacatttagccgagatctacatctcgctgaatgattccaatagagctcttgggaactacatggtggtatccaaactgtccgagtctgtttcagaccggtatttgtacaaaggtgattctgttcatgcgctttgtgcgctatggaagcatattaagagttttacagctctgtgtacattattccgagacgaaaacgataaggaattgaacccggctaaggttgattggaagaaggcacagagagctgtgtcaaacttttacgactggtaat

SEQ ID NO: 2594 - DNA, 1000 bp, unidentified
  source 1..1000: mol_type = unassigned DNA; note = unclassified Alphacarmotetravirus sequence
gatctgagcaggtgggacatgcacgtccaagttccgctactcaagcgagtactggaaatatacagtcagcacgtgacgtgcccgctactgctggacatgtgcagcaacctcctcaagaacgtttgctacacaaacaagggtatacgataccacgtcgatggaggaatcatgagtggggatatgacgacgggcctagggaattgtattgcagtacttgttatagttatgtccttccgggacgttataagaaggcttgctaccacgagcgaaagcaacacgctcgacgtgctgggggaactgccctcaagtacggcaacccaagatcaggagttagtccggaccttattagagataagtccccgtcttcgggccgctcagttgacactggggtggctcagcatattagacgatggcgacgaccacgtgataatttgcgagaaacaacatacgtggatttgcgagctagtcctccctctgtggtggacagccatgggtcactccctgagagtggacggcacggcggaagacttcgagagcatagagttctgccaacacaaaccatggaatggtgcaactcggcttaccatggtgcccaacccagcaaaagttttgcccaagtcttgcacggtgacagggaagtacatcagcaaaccccagtcgtatctacgtactgtgtggaccgcccgggctatccttcacgtggatatcccgcttttgggcccatttttccagaacaacgccagacagttgtctggggcccctctaatggaggtcatcagttcggagtttcagcacatcaattcgtccctacattacctaatgagataccacgcgagtggtatgtacctgccagcacagcagaaggtggacgagatggacagggtgctgttttggcgaatgtgggacatttcgccaacggagcaatgtaaatgggaaacgacacttgctcccaaaaacaccaacgtttccgatattgactggccgtcagggtattgagatc

SEQ ID NO: 2595 - DNA, 1000 bp, unidentified
  source 1..1000: mol_type = unassigned DNA; note = unclassified Tombusvirus sequence
cctgatgtcaaatcactagggcagcagctcgactcgttccgtgctacgaggataaactcgcattggggtcagaggtggccattgatgcctgaccttaaacaaacgccggcttggctcgactggcccccgtagaggggctaacccccactttattacaattatggctacaactacatcgaacccagaaactgcctccgtttattctttcgatgctcctaagcctacaattcgtttgcgccttcccgggaaaggatgtgccacttgtggcatgtccaagcctgtggaagtagcgccagtggtggtacaaaacgacgctcccgtgtcgatggagcatcatgttcaaggggtcaaggctcgtgtgggaccgtggatggcttttaagatgttgttccgtggctatgttagcccggtggcacaactgaaggccaagcacgccctcgagacttacgacaaccctgattatgatgagccctctgatcatttcacggatgtcgtcagcggttgccgcaaccagggtgaggaggcgatccaggcgaagcgcaagcctcgcagggataacacttcctggtggacggtttattctctgcttgcacatgcagagtttaaccgcccctctttcacgcgggcgaacgaaatggtggtgtctacttggattcgcaagcagatggctgccgacggggttaccagggtagactgtgccaaggtgctgggtgccgctactcggatggcatttgtgcctaccgagtcggacatctttgccgcacagatggctcagacccctgcgttccgcaagagagaaggtgaggcaaacaccaaatggtggactgcatggtgggattgcagaccgcgtggctacgaaagtagccaatagggtggcccagttgctgtaccaggaagggaagccggcgtttcgctggcccccaccccttccagtttggtggtacatcgcaaagtgggacatgccaatcgcgttcgacgcacgtacttggtggggcaaggg

SEQ ID NO: 2596 - DNA, 1000 bp, unidentified
  source 1..1000: mol_type = unassigned DNA; note = unclassified Tombusvirus sequence
aagctgttgatggcgtattcggagagacgacgtgcattaagggatacacagccgatgaggtgggtgcaatttttcgggagaagtgggataggtttcataagcctgtcgccattggtctcgatgcatccaggtttgatcaacactgttccgttgaggctttgcagtatgagcatagcttctacagggccatgtaccctggcaacaagctcttgggcaagttgttggactggcaactccacaataaagggaaaggttatgttcctgatggaactataacctaccgcaaggaggggtgccgtatgagtggggatataaacacttcgttgggaaattatctattgatgtgcgctatggtacacgggtacatgcgtcatttggggattaatgagtttagtctggcaaactgtggggatgactgtgttcttatactagaacgcagaaatcttaagcaggtgcagaagaccctaccggagtatttccttaatttgggatacactatgaaggtggagccgcctgtatttcaattggaagaggttgaattttgccaggcacaccccgtacagtttcaaggtggttggaagatggtccgaaatgtccgcactgcgatgagcaaggatgtgcattgtgtcaataatatacgcgatctggcgacgaggagagcatggagtaatgctcaacaccacggtggattagcactcagtgctggtatacctgtggttgagaggttctactccaggttcgcactatatgatgtgcctcgtaagcatcaacgcattgacactgtcactaatgttcacaagtggcgtggatctggtggaagttatgttgtgactcctgaatctagggctagcttttgggctgccttcgggttgacgggggatgagcaactagctttggaggaccgtctggatagatgggagatggatctgtttggagaggagggtgttgacgctcatgagcccagcatcctcgactccgccgtagcttgaccaagcgagac

SEQ ID NO: 2597 - DNA, 1000 bp, unidentified
  source 1..1000: mol_type = unassigned DNA; note = unclassified Polerovirus sequence
gtgagccttgttgatcaactggtagcccgggttttattccaagaacagaacaaactggagattaatctctggaaagctataccaagcaaacccggaatggggctgtctactgactcccaagtgatagagttcatcaattctctgtcccacctcgtgcaaataccagttgaagacttggtatacaattgggaaaagcacgtggtgcccactgactgctctggttttgactggagtgtttctcactggctattgacggacgaaatggaggttcgtaaccgtctgacacgcaacaacaataccctcacaagaaagctgagggattgttggttaaaatgtttatccaatagtgtgttggccttttctgatggaagcctgtatgcacagcgtgttcctggagttcaaaagtctggaagctataatacaagctcgactaactcccgaattcgtgttatgtgtgcttattatgcaggtgcttcctgggccatagcaatgggagatgacgctttggaagcagtggacactgacctatcagtgtataaaaatataggtttaaaagtcgaggtttcaggacaactggaattctgctctcatatctttgagaagcctgacctcgccattccggtaaatgtaggaaaaatgttgtacaaattgatatatggctacaacccggaatgtggatcgattcaggttctcaagaattatatcgacgcttgcacttcagtgttaaatgaattgcgtcatgatcctgaattagttcagcttctctactcgtggcttctccatccagtgttgccacaaaagtaagcgagtaagagaagcagacagatagccggtatcagttgttgcaatagccggagtcttagtcaacgtacaatcgtgaaaattgattataaatttctcgccggatttaccgcgggtttcgtgacatcaattccaatatcagtttttgcgatttatatcatctacctcaagatttctgcccacgttagatcaatagtta

SEQ ID NO: 2598 - DNA, 1000 bp, unidentified
  source 1..1000: mol_type = unassigned DNA; note = unclassified Luteovirus sequence
cagcaacggtgctcagtggttacgataattttaaacaggggagattgatcgctggtaagtggaacaaattcaggaatcctgtggctattggagtagacgcctcccgcttcgaccaacatgtgtcgacggaggcgttgaagtgggagcacagcatctacaacaaggtttttggggaccctctgttgcgtgacttgttggactggcaaacagtaaacaagtgcagtctttttgttgaagacaagatgttgcgcttcaaggttaagggccacaggatgtctggtgatattaataccagtatggggaacaagctcatcatgtgcgggatgatgcacaactatttccgtgaacttgtagtgaaagctgaactttgcaacaatggtgacgattgcgtcatcatctgtgaacgcaaagacgaaaagaagttcgacggattagggaaatggttttgggagtacggtttcaacatggctattgaacctcctgtatactccctagccaagcttgaattttgccagtcccgaccggtttgtataaatgggaagtatagaatggttcgtcgtcctgattcaattgctaaggacgccaataccatgctcagtatgcagaatgcagaagatgtgaagagtttcatgtctgctactggtcaatgtggtatgattctaaattctggtgtccccattttagacgcttaccattctaatttgtatagaggttcgggctacaagaaggtatctgagagctttattgatcgagtcatatcttatgggacagatgagcgcctccagggtcgacggacccgtgttgaggaaccagtaactatggaaaatcggttgagttactgggatgcttttggggttgatccgcaaacacaggtccttgttgaacgttatctcaacaatttgcggatcggatgcgaacccctgggagtgaagatagtgactcctcttctcacaagcacgttgcttgaaataccttattttaaacctcttaatttagcacc

SEQ ID NO: 2599 - DNA, 1000 bp, unidentified
  source 1..1000: mol_type = unassigned DNA; note = unclassified Luteovirus sequence
aaagtcccacaattctttccggttacgatagttttagagtaggtaggatagtggctgcgaagtggggtaagtttcgtgaccccgttgctattggagtagacgccagtcgtttcgaccagcatgtctctcgacaagctttgaagtttgaacatagtgtttacaatgggatcttctgtgatcctattcttaagaaacttctcaagtggcaactcagaaatgaggttgtcctttttgtcgaagataagatgctacagtttaccatcgatcgaatgcgaatgtctggtgacatcaatacttcaatgggcaacaagataatcatgacaggactcatgcatttgtacttccgagatttgggagtccaggctgagctgtgcaacaatggggatgattgcgtgattatctgtgacaagaaggaccagcgtaaatttgataatcttgccgcttggtttttggattttgggttttccatggctattgaagatccagtttacgaactggagaagcttgagttctgccagggacatccactgtgcatcaacggcagttacaggatggtccgcaaacccgagagcatgtctaaagacgcgcactctatgcttagcatgaaacaccacgaggatgtcaagacattcctcagtgccacggcacaatgtggtctcgttcttaactctggggtaccgatcctggaggcgttccataggtgcttataccgtacttctgggtacaagaaagtctctgagggtttgataaagaaggtgatcagttatggtcaagatgagcgactcggtggcaggcgtgccattcgcgaggaaccagtaactatgggaaataggatgagtttctggaaagcttacggagttgacccgagaacacaggtccttgtcgaacgatatttcgacaatttgacggtcaatatcgaactccgcggtgtaaagaacttgacacctcttttacaaagcattcttgtgggagtccctgacttccctgatttcagccaaat

SEQ ID NO: 2600 - DNA, 1000 bp, unidentified
  source 1..1000: mol_type = unassigned DNA; note = unclassified Luteovirus sequence
atgcaaatggcgccacctggaatgtaggtgagtacaacaatgttaaaatcacaaaacttctcaacacctcttcttggaagaaggggcataaagacgttgtgctcaacggttgccattttaatgacggtcaaatcattgaacgcgattcaaccatgtcgttccactgtgaagtgggacatggcggaggtacaatcctcctggttgctccccctgtttgtaaaagtgacaagtacaactatgttgtctcttacggcgagtataccaccaaacacatggagtttgggtccattgctatatgttttgatgagaagaatgatggagcaagagcagggaaattcttgggcgctcctttcccccgtgcaggtcacgtggtgcgtgagcaacaaacagaaattgcccgatttccagcaggtagcgacgtcccgattgtaaagatcagtgacaatgactttgctacctctacacaaccagctgcacatattctccctgttccttcatctgttcaacttcctgacgatcctgtctctaagaaggtgcgatcttggatcgagaattcgagcgaggatttgcgcctggcgcgtgaagctgaacagactgacagcgactgggaaccccttccaccacctgcaccccctcctggacccaggcaattgcccaccgacacctcaggtgccactcaggctatccgcaaccagatcctgcgtgatcatacgcagccctactctggccctggtactccgcccgtcttcgatgatattgaggatacgaggtcaaccacccgtactgaaagttcgcggcggagttttctcagtggtgtcctcagaccccagctcaaaccaaagagtaatttgcgtccgacttcctctctcccgcgtaagctaactgctgaccaggaggcacgagtgaaggctgtgcgcgagtcttttgggtctgccgctgctaaacgtcttagagacgagtttcttgaggggaaggtcagtcccgatcagatctactgacc

SEQ ID NO: 2601 - DNA, 1000 bp, unidentified
  source 1..1000: mol_type = unassigned DNA; note = Torilis crimson leaf virus isolate RL5 genome assembly, complete1 sequence
ttaagtgccggtgtgggggttcctttcatctcgtatgggaaaagaacacaccgtgattggattgaaaaccctaccctcctccccgtcctcgcaaggatgacttttgatcgattacagaagatatcagaagccaactttgaaaatatgacgcctgaggagctggttcagaatgggctctgcgatcctatacggcttttcgtaaaaggtgagccgcacaaacagagcaagcttgatgagggacgctaccgccttatcatgagtgtgtcattattagaccaattggtagcccgggtcttgttccagtctcagaacaagttagaaatagcgctttggagagcagtaccctctaaacccggatttggcctttccacagacgatcaaactgaaaattttgtagattgtctagccaagcaagtgggtgagacggctgatgaagtaataaagaattggccacaatatttaattcccactgattgctcaggcttcgattggtcggtctctgactggctactcgaagatgacatggaggttcgaaaccgcttgacccacaactgcacccccctactaaggaggctccgtgcaggttggctcaaatgcatttccaactctgtcttgtgcctttctgatggcaccctgctggcccaaacaaaacctggggttcaaaagagcggatcttacaataccagctcttctaattctcgaatccgggtgatggctgcttttcatagcggtgcatcttgggctatggcgatgggcgatgacgccctggaaagcgttgacacggacctatccgtgtataaagatttaggctttaaagtcgaggtttcagcacaactggaattttgctctcacattttcaaggagagaaacctcgccattccggttaatgtcaacaagatgttgtacaaattgatttatgggtacgacccggaatgtgggaacgctgaggttttgtcaaattatctcagtgctgtggtctcggttatgaatgaattacgtc

SEQ ID NO: 2602 - DNA, 1000 bp, Ollusvirus culvertonense
  source 1..1000: mol_type = genomic DNA
caagtaatcacctataacaaacttgatagacaagattatctaacttatcaccagctctactatactctaaactttgtagctacccgatttgtgagctccactctacaatagatactagagtaggttatctctcaactggatcagagacctcatcgcgtatgcttgtgagtgttctaaattggttagtcacgacaagtgtactagctcctctgtacctctactttactgggttgagatttcaagacctatttgtgtacactccgatacccgtaggtatcgaccaacataccgaactggccacattcggtgcaagtgattgcaccaacaccgccaacacggtagcggctacattttccattactccttcagagatctgctaccttagtgcatccttaatcacttgtgcatcactatactttctatatcaatcttggaacaccatgcataagtcagtagtaagaagcttagaggagatccgccggaaagcagtggagcaggaacagaagttgccccaggtgtccctgactggtctggaagatatttcagctcacctccagggtattaccaaagagctgaaggagatacgcttgcagttagaattattaactgatcaagtcaatcaacctcctactagattggcagcaaccgcaccacctttaccggcatctacaccaccagtaatttcttactatccaaacttaaatgtcccatgaatagtgctgagggataaccctggactgataacacggatttgaccatacaaatatgaattgcttcatccattgcttctctctagttattacttagattttagattctatgctttaccttactccaccacgaagctatactggtttttttagttgctattaatctcccttgtatttgttctctcccctgcttgctttttaaaaacttactatgccaactctaacaacactcagttcaaatccatcagtaacaaatgtgatagacaaattaactattacaaaagatagta

SEQ ID NO: 2603 - DNA, 1000 bp, Human orthopneumovirus
  source 1..1000: mol_type = genomic DNA
caaatcaacttacaacagatacttcaacatcacagcacaggctgaatcatctcctcgcatcatgctacccacacaactaagctagatccttaattcatagttacataaaagcctcaaatatcgcaatcaacactaaatcaacacatcattcacaaaactaacagctggggcaaatatgtcgcgaagaaatccctgcaaatttgagattagaggtcattgcttgaatggtagaagatgccactacagtcataattactttgaatggcctcctcatgcattgctagtgaggcaaaacttcatgttaaacaagatactcaagtcaatggacaagagcatagacactttgtctgaaataagtggagctgctgaacttgatagaacagaagaatatgctcttggtatagttggagtgctagagagttacataggatctataaacaacataacaaaacaatcagcatgtgttgctatgagtaaacttcttattgagatcaatagtgatgacattaaaaagctgagagataatgaagaacccaattcacctaagataagagtgtacaatactgttatatcatacatcgagagcaatagaaaaaacagcaagcaaaccatccatctgcttaaacgattaccagcagacgtgctgaagaagacaataaagaacacattagatatccacaaaagcataaccataagcaacccaaaagagtcaaccataagtgatcaaaatgaccaaaccaaaaataatgatattaccggataaatatccttgtagtatatcatccatattgatctcaagtgaaagcatgattgctacattcaatcataaagacatattacaatttaaccacaaccatttagataaccaccagtgtttattaaatcatatatttgatgaaattcattggacacctaaaaacttattagatgccactcaacaatttctccaacatcttaacatccctgaagatatatatacagtatatatattagtgtcata

SEQ ID NO: 2604 - DNA, 1000 bp, unidentified
  source 1..1000: mol_type = unassigned DNA; note = unclassified Orthorubulavirus sequence
caaagagtccagccaggccgatggttatgaatatgactcttacttagcacaaaatgcaaaaaccaacattctcaaaaggtggacagatgtaagcggggatgttgagccgatcccgatgaaccccgaagtgtttaagaggggggcagacctcaccaagcccacaaatcccaatccaggtcatcgccgagaatggagcattgggtgggttgggtcaacagtcaaggtcttggagtggtgcaaccccacctgctctccaattacagcaacatcccgatactatgaatgtgtctgtggaatctgccctaagatctgcccccgatgtgtcggagattatggacatgttgagacggctggacgcaaggattggctcagtagaggcgaagatggatcggattctagcagtaggggcgactgtgaatcagatcaagaatgaagtcagttcattaaaatcgatcactgccacaatagaagggatgattacaactgtaaggatcatggaccctggcaccccgagccatatgagtgcaactgaagtaagaagacagttgagtgacgtcccactagttatcagtggacccggtccagtcccccaacttgaccccagaagagacttaattgccttagatgagcttgctaggcctaaggttgtgcagagccccccggttgcttctcccgcaccctccatggcctcccagctaagtgatggcacccgcatcatgatccttcagatgataaaagaatgcgtctctgatccgcttgaacaatccagatttgaaactaaattgagcagctgcacaaccgaggaccaagggaaagcaataaagatggaaatcttacggagagcaacctaaaaactagctgacacactgctcaacatcaaccacccctgcaacccacccacatgcgcaaccgcagcccagagcacacacccaacaccgactcaatcaattaagaaaaaacataggcccgactggctgcaaacccagtcggaaccccggcc

SEQ ID NO: 2605 - DNA, 1000 bp, unidentified
  source 1..1000: mol_type = unassigned DNA; note = Bat Paramyxovirus Eid_hel/GH-M74a/GHA/2009, complete genome.2 sequence
agaacaaatcaagaagatccctgcaatggagaagaaactatcagacattgaaaagcttctgcttaaaaccaatactgcactctccaccattgaaggacatatcacatcaatgatgatcatggttcctgggaaaacagtgaacgaaggagagatacaaataaatgagcagttaaagcctgtaattggaagaaaagatggtgtgtacgacaaaatgatactcccacgagtagacaagaaaatctcacttgtgactgatcgtacacctctttgtgatgatttcaaagaagatccttacgtgttaaatgagaagcttatccttgaccccatcaatccaagcgtaaccaatgcctcggcgttcatacccagttacgacaatatatctcctgctgttcttcgatccctcataagaagcaatgtagaagacagagagacacgagtggagttgattgagttagtgaatcaagcaagaaatgattctgaactcaatgagatactcgcattagtcaatgacattatagattcaaatcagtctggtgtgtgattcccaaaatcactcaactaactcaacaaacaacacacaatacccgaagtagaaaacaatgacactagatcgctacataactgtttcgcagtagctgcaatagggacacatgtaaatcaccaccgattacacccaccaatctcaaatcacagctgttcacgcatctttactcactgcttaagcaatgatatatgcaagtataattaaacaaaacttagggatcaagcacgatccaacgccggagagcgacaaagaaaaaccaaaaccagagaaacaccaaccaatctcccaacgaaactaagaggaccccacaacagcgaaacccatccaaaaggaagaagtcaccccaaaacccaaacccgaaaagacaaagaccgtcccaccgctacatcagcagcgcaggagtccaaccagctgaggtcaagaggaggaaggaacagaagtagttctacggacgaa

SEQ ID NO: 2606 - DNA, 1000 bp, unidentified
  source 1..1000: mol_type = unassigned DNA; note = unclassified vectors sequence
agcaatacccgaaaacgacccccctcataatgacagccagaaggcccggacaaaaaagccccctccagaagactccacggaccaagcgagaggccagccagcagccgacagcaagtgtggacaccaggcggcccaagcacagaacagccccgacacaaggccaccaccagccatcccaatctgcgtcctcctcgtgggacccccgaggaccaaccccgaaggtcgctccgaacacagaccaccaaccgcatccccacagctcccgggaaaggaacccccagcaactggaaggcccctccccccctcccccaacgcaagaaccccacaaccgaaccgcacaagcgaccgaggtgacccaaccgcaggcatccgactccttagacagatcctctccccccggcatactaaacaaaacttagggccaaggaacacacacactcgacagaacccagaccccggcccgcggcaccgcgcccccaccccccgaaaaccagagggagcccccaaccaaacccgccggcccccccggtgcccacaggtaggcacaccaacccccgaccagacccagcacccagccaccgacaatccaagacggggggccccccccaaaaaaaggcccccaggggccgacagccagcatcgcgaggaagcacacccaccccacacacgaccacggcaaccgaaccagagtccagaccaccctgggccaccagctcccagactcggccatcaccccgcaaaaaggaaaggccacaacccgcgcaccccagccccgatccggcgggcagccactcaacccgaaccagcacccaagagcgatccctgggggacccccaaaccgcaaaagacatcagtatcccacagcctctccaagtcccccggtctcctcctcttctcgaagggaccaaaagatcaatccaccacatccgacgacactcaattccccacccccaaaggagacaccgggaatcccagaatcaagactcatccagtgtccatc

SEQ ID NO: 2607 - DNA, 1000 bp, Human respirovirus 1
  source 1..1000: mol_type = genomic DNA
aacgaagagtcagcagccactccaaagaacaaccacaaccacagaaaaacaagatacacaacaaacaatgcaaacaacaacacaaaaagtccaccaactcccgaacacgacgcaaccgcaaatgaagaggaaaccagcaacacatcggtcgatgagatggccaagttattagtaagtcttggtgtaatgaaatcacaacatgaatttgaattatctaggagtgcaagtcatgtatttgctaagcgcatgttaaaatctgcaaattacaaagaaatgacatttaatctctgtggtatgcttatatcagttgaaaaatcacttgagaataaagtagaagaaaatagaacattacttaaacaaattcaagaggaaataaattcatccagggatcttcacaaacggttctcggaataccaaaaagaacagaactcactcatgatggccaatctatccacactccatataattacagatagaggcgggaaaacgggaaatcccagtgatactacaaggtcaccatcagtcttcacaaaagggaaagacaataaggtcaaaaagacaaggtttgacccctctatggaagctctaggaggtcaagagttcaagcctgacttgataagagaggatgaactgagagatgacatcaaaaatccggtactagaagaaaacaacaatgagcctcaagcatccaatgcatcacgcctgattccgtccactgaaaaacacactctgcactcactcaaactagttatcgaaaacagtcctctaagcagagtagagaagaaggcttacatcaaatccctttataagtgtcggacaaaccaagaggttaaaaatgtaatggagctattcgaggaagacatagattcactaactaactaaacatgaatctacaatttcaaccagcaatcaaaatcaatatccagagccaactcaaaaagctccctcaaaacaattaagaaaaacttagggtcaaagaaattttgcccggagaaaggaa

SEQ ID NO: 2608 - DNA, 1000 bp, unidentified
  source 1..1000: mol_type = unassigned DNA; note = unclassified Sobemovirus sequence
gagctggtagagaaaggtctctgtgaccctgtgcgcttgtttgtcaagaacgagccacacccacggaagaaattgcttgaacgcagattcaggctgatctcttctgtttctctagtcgaccagctggtggagcggatgcttttcgggccccagaacaacaccgagatttcgacttggtggcagtggccctcgaagccgggcatgggtcttctgacccctgaacaaatccgtttggtgtgggacgacgtgttccagaagcaccaggcccaccctgcggctgaggcagacatatcggggtttgactggtccgttcaggactgggagttgtggtcagacctcgcgatccgtataaacagagggaatttccagggaaacctcaggagagcggctatcagccgctactactgttttatgaactctgttttccaactctcagatggaactctcatccagcaggaattgcccggactgatgaagtctggctcttactgcacctcatctacaaactcgcgcattcggtgcctcatgggtgagcttatcggctcgccgtggtgcatagcgatgggcgacgattcagtggaggggtggattgaggggggccagtccaagtacgccgcgctaggtcacacctgcaaggagtactacccatgtaagaccagagggcgcgagctcttggaattcaacttctgttcgcatttgatcaggaggggtcatgctgagctaacttcatggccgaaggcgttgtttcgctttctgtccagcaagcatgaggactttgaggatctgtgggttgagctccacacgtgcggggtgtggggccggatcgaacgatatctgcgtgggatagggcgtgtctcccacaaagatagccaggaagggcaagaaaaccaaccccaaccaggggcagcaaggaaagaagaagagccggcgtccacgtgggcgttcggcggaaccccagcttcaacgggctccagtggctcaggcctcccggatatctggg

SEQ ID NO: 2609 - DNA, 1000 bp, unidentified
  source 1..1000: mol_type = unassigned DNA; note = unclassified Barnavirus sequence
cgtgcgcaatggcgcgtgtgatccggttaaactattcatcaaaggagaaccacactcgcagaagaaaatcgttcagggttttcttcgaatcattgcaagtgtatccctatgtgatcaacttcttacgcgtacgattagtgcgcgtcaaaataagactgagatcatgaattgggaaacctgcccgtcaaaaccgggtatgggtcttcacgatgaaggtcttgccaaactctccgagaatgctcggagaatactaacggaaggtcgcatcatggcgactgacctatcaagctgggactggacagtccaagaatgggagctggaggtggacgccaagaggcgtatattactggccgggattgatgaagatcacccaatggccaaactcttaatggcgcacgcccacatcgtcgccaactcggtctatgtggattcggcgggtaacatgtttgcccagacaattcctggaggtcaactctctggggattacaatactggatcatcaaactctgcgatgcgtgtaatcgcgactcaagctgctaggcttaaggtaaatcaagaactttaccttgagcgcatttcggctaaggagttgcttgtatgctcaatgggtgacgatacactcgagttggaagtcaccggcgtgccagaggtcttagaggagatcgggcatattgttaaggatgtggaattccatgagacactgcaagatgtagagttctgttcgcaaagatttaatgcggacggttcagcctatccagtggattataacaaaaccctttacagattcctttcgcacgctcccgacgacgtagagtactcctcctacaaggctcagctcatgtacatattccgacacatgaatcaggaggctcgcgataaaattgagcacacagcactagtccgggttgagcgggctagaaaattattctgtgagaaaaacaaattgtaagttaatatacaccatatctactgtgcttcgacatatatttggtagcttgca

SEQ ID NO: 2610 - DNA, 1000 bp, unidentified
  source 1..1000: mol_type = unassigned DNA; note = unclassified Polycipiviridae sequence
tcagattcgagttatcgtgaagttcagcaaaattcttttattcccgcagatactagcatgttccggcatattgagttgacaatgccatatgaatatcccaccccgtggtatgatcagtttgcctggatgtcccgtagagtaactccctcgcgttatgttagaagtggtgacatttctttcgacacattcgcagccccccttacaaatgagcctcatggtgacaatttcttcgccatgggacttcgtggaaatcttgcagccacccaagaaggagctcagatcgagttcgagttagaatatcgagctgtggaagggtttcagttcgctgatccttaccttccaccagcatattttgcaagtactcatcgtgatctcctcattaatgactttgacaagattaagcgggttccagatccgactttgacttcagatggtcttagtaaaatcactaaaacaggttccaggactgtaagatctgtttcatctcaatctatagctcaaaggagaaaggctgatttgaagctagatctttctggaatagatttaggagaagatactgtagaccccgtgatgcctagtggatatggatctcgcgaacgggaatttactttttagagtttaggtcatttttcattcatgttcattttcagttttaaaatgaaactcttcatgcataaccatgagttggctaattacgtgacggttcctagttatgagcaatctaactccgaatatagaggtgaaactcttgacggccgggaacaagtagcgtgctttagtcgagcccgtaagattgaccaacgcaattcttgtatcagaaaaaggagtttttatccctagactcattgtatgtaatgctgacctagtcaagtcttaggacgcgctgtacaataaacgtctatgcaacgtctcggtgggcgttgcattcagggtgcagtctaacctgcattactcccttgatctgtgtcggagcagtagaattgtgggcggactaattaac

SEQ ID NO: 2611 - DNA, 1000 bp, unidentified
  source 1..1000: mol_type = unassigned DNA; note = unclassified Polycipiviridae sequence
atctaatatggtaggtagtatatttggacccgcaggagttttattctcctcaatcgcttcgccctcggatttcgcatcacaatttaatacaaattatcaagttgaaacaccatctggcgcctttgtaaatgctcaagatggatcaaatattaatgcagatagttatgtcggtagcaccagttagaactccagcacaggcaccattacagcctatgcaaccaaatccccagacagcctgcggaactttggatgacggatgtgtttataacactatggatattcatttaggaggacaacaacctaatgaacagttttgggctgcacgtagtgaatattgtaatcaagtacaatggaccactcagcaggccataggaacgaccctggcaacgattgatgttttacgttattgtggagatgatatgaataaccctgacaaccttaatgcaaatggaggattacaaactagatccagagcatatggtagagtaatatggccaagatggttaattacgaaatcgtcgacttatatctctgtctctgttaaatatgacttctggcttcataaaccagtaggtccagtagtaggaggtaagttgaggatatcgtataatcctggtataagaaagaattggaatactgtgctaaatagcattggaagcactattgattcctatcaagattctctgttcagagaaaatttatgggaatgggatgtaaaagcttctgatacttttagtgtcacacttaatggcaatataccaactaaatacattactagtaccataccaagtacaagattttcagaggttgcagatccacgcgagtgttttccagcatttatgacaagttttggaacgttagagattagtgttttgaacaattatgtagcaggttcagtttttgctgattctgtatttatatctatttataaatcatttccgtctttacaagcttatatagttcgtggccaccgaaatgaccaattcttaactgcaattta

SEQ ID NO: 2612 - DNA, 1000 bp, unidentified
  source 1..1000: mol_type = unassigned DNA; note = unclassified Sapovirus sequence
aagcaatggaaaatggggcttcaccatcacacctccttccacgcaggctccagagggctcgtggcaacagagctggtggttatgccgtgggtatggtgattgttggttcggcacaccaggtcaaccgccacttcacggcgcttggcacaacttttggctggtccactgctccttatgagccaatgcggtgtgcgtttggtggtgtgcacactggtactgacacctctcccaaaattggctattattgggaagtcgggtccgaccaacgtgggcccatatttccccatatagtcaatcattggccagattttgctgtgaacaacacctactcatggccaggctcggagtttgtccctcaaaacgccattgtcggtacacttgtctcctttgctgacaatggtgatgtgtccgagaacgaggtggtacccgcatttgcggttacaatgaacactccttccaccagcactcgaggcaccgtccgtggctcatttgacccatccaccatgcatttggtgcgtactaacagcactggacaaccatctgggtggccatctggcccaaacaatgggaatggatatttcacaccaatgtggggacatggtcagggcaatgctattaatgataaaatcaccaacatggagggtgtgaattacaccttcggaggctctggccaaaacaacattgtcttgtggattgagaggatcttctccgaccaccccggaaaaacaaccctgtactcatctcagctggacagtactgccacaatatttcaatctggtcctgtcaacatccctgagaacatgatggccgtgtataacgtcaccactaacggagctgacttccaagttggcattcgacgtgatggctatatggtcacttctggagcaattggaacacagcaagagcttgaccccgacacttctttcacttatgttggacttttccccctttctgcctcacttgttggcccacatgggaatgctggacgggcacacattgc

SEQ ID NO: 2613 - DNA, 1000 bp, unidentified
  source 1..1000: mol_type = unassigned DNA; note = unclassified Iflavirus sequence
tcaaaccttccaacctttcttagttttaagttgtatcgattgtatttgtgtgattattcataataattgcccatcttttctttcgcaaatacatctcttctctaagtgtgaatgtttctgaacgttgtatgaatcagtttttctcttccaatttatcgaacttgtgtatatgtgagtgtgaactaatttttgattctttcttttcgtttcgatgactaggactgattaccctaccattgatcctaacaatagtcacgacgggatagactccgtgcagtgtttttagaaatccggttggactccggtagcacatacgatgacaccacactagccagagtcggcgtagtcgtattgtgttgtgttccctactagagacccaaagcagcgttctcttattcattatattcttgtgattctgaaatgaggtttgttgatttgcttgtggtagtgttgattgagacccgtttccggtaagctgcttggtatcgtgatggcatagtgatgcttgatctgaaatcacagactcgtgttgtcgcccgctacataatttaaacgtattatggaactgctagacatctactggtcaaatgggagaagcaacatgaggtttgtttcttttgtttgggatcacggataaacagcttttaagaagtccctgcgctccctagcttgcagctctatagcgataagtcaagtgaagttagtaaactcttcttagctggtaatgagtatgtgctatatatcctggataagtcccccccagggttgatgctaatggtaggtgcacaacaggcaggtgcacctttgtcgtgggatgtgaattcgttctgcccgggcaccatagaatgactagtgagtagcaatcgatgtagtaccctttcaatccatatagtctcaaaattacctggcagttgttttcaacgtgaacacaactgctttcgttctgcctaatcctatattttaaagtttttttttaaattttgtttgtttgtgttacaat

SEQ ID NO: 2614 - DNA, 1000 bp, unidentified
  source 1..1000: mol_type = unassigned DNA; note = unclassified Iflaviridae sequence
aggtttattttgaagcgttttgttcgattccgatcgaccatagaaaaggtatattatgttcgcatctgtatcatcgcttcaaatttaaagttttaaggctttttattattggagaacttttgaaatttatttggtgagcctttagtctttgagttcgatacttagactatttaatttccagatatctatcgtccaagtagaatctgaggggtttaaagcaggagccgtgagtcagcccagacaagcgtagtactgttttattccgaagtttgcgttgagcgaccggcgtcggtgcgtcaaacaaaattccgaatggagttgtggttcgagcgagtatctatacacgcggatcatgtgggaagttttgcttactgaagttttcaatgatatctaacattggccctcggatcaacctaaagactggaagtacccgaccaacgcccagctagtaagagtttaaatactcgcgagcagttagttggcaatgttatttggatttgtttatgaatgtttgagactccgtacctatacgatgcgttgattaccatcagaaaaagctctagtaatgaaataattatagcggtttcctggactatggtgtaatttcagttacatagtgactactttacaatcaaagcctaaacaggcattactataaaagaaccgtcgtgttagcattgtgtttggctaacatcccaacgatagttggcgacattgaactgagagcaacatacgttaccaattcgattatcgttcaaaaagctctgggcaggaatttgaaaaatcaaacttcctgctaaagttaaacacacaaaccttattttattttcctaatttaacgtttacgttattttatgtcagttgttcgtttgatagaagaagttgaagaaaacagtgaagaaatacatccgtttcaacaacgattacaagaagcaagtacaaatttccaattacgtcgatcaaattatccaataggcacaacaagattatacaatcaaca

SEQ ID NO: 2615 - DNA, 1000 bp, unidentified
  source 1..1000: mol_type = unassigned DNA; note = Iflaviridae sp. isolate rfb094ifl1 genomic sequence.1 sequence
aggttatttaatcggtgacagactgtgctctgcacttattatttagcataacttgtacatatataagaatctaattttaaatgaacttacgaaaatcaacagtccacctgaagattgattaggtttagtatagaggttttaaatgatttcgatcatttatataaaagatgtattatattcgtatctgcatcatccttttatttttaggttaaacagccttggtgacggcttgagttctgactatgtacacccacgtagccgtggtaccgcttttcagaatccaccctggcctctctcctttttaagggagtttcctggagagagtaatttgcaccgccagtatcgatcttacgataactcctcccttaaaagcaagacatagtttgagtatatcagacaaacgttatattatctagttgcatcctcaatgaacaaggtattctgcatccttaactcgcaagggttattgaagcctcatatggacgagtccaacccatatgaagtgtccagttactttatttcgcctctcgcaagggaaaagtaaagtaatgcactaatattgaccttcaaggttgttggttattattagtagagcctttgataatataatcgtatttgaattctcctaaatattgtgtatgtaaggcgctcacggtcccgttggggtttatgcatcatgtcggccacgtgagtatgaagtggttctagtttactatgatactgcaaggcaggccggtgtggatacaccaaaaaccaaaacataaatacacctttagccatcttttgccgctttctgcgagttttctgcgagttttattattccccaaagccattattagctaccttttatgtcaacagtgcgattaatagaagaagttgaagaaaactgtgaagaaatacatccgtttcaacaacgtttaagagaagctagtgcgaattttcaactgcgacgatcaaattatcctattggaacagctcaactttatagacaaagagaaca

SEQ ID NO: 2616 - DNA, 1000 bp, unidentified
  source 1..1000: mol_type = unassigned DNA; note = unclassified Picornavirales sequence
gcagtgagcaaattccattgcagtcgaggtttagcctcgccattcgtcttttaaaattagtttcttttaagatgctagaagataaaacacggtaaaaaattgtatataacgatataggtctggagtatagtaatcaatgttaattcgttgcattggtgataacgacatactgtatactcccaactttcgcgccggacgattccggatatattgtacgtgataataatgtcttcttaattgagactgactttttaagtcaattaaacaactctaccagagcctacgcgttctatctctgacacgggatagttctcagggttgaagattccataggtcttcagcctgccgaaactctgtgctgtaatgtagggtcgactaccatctacctatttaggtttgaatcggtctgagataatttcaatacacgaccggccttaaaatagttcttcagagccaccggatggttagtttagatgtggcatagcgaaaaacgcagcacactgatgatattctttcaaacgaattttgttccctcacgatcggtgaggacctgcttcaagcaggagataatggatttttgcttgcccctgttatattagggcaagctcaagaaactcatgtacatggacctactattgtacgtgattttacagattgggacgcctttaatttgtggcaggtcccagatctttattatgatggtccggaagcagatttagctgaacgagatggttttaataactatcaaaatgaagcaaatttgcgacagactataactaccgtcattgaaaaagatctacctccttatgaggtgttgatttttagtgatgaagaagaaagttctcgaactttcttttcctgtgagtcggataatgaagggtacactccttcgtcttctgattcacaagaacagatgcctgatatcatatatcagatgccctttacagctacttctatacaaaaagaacctgaccaggttcagcagaagttagttaaaagg

SEQ ID NO: 2617 - DNA, 1000 bp, unidentified
  source 1..1000: mol_type = unassigned DNA; note = Picornavirales sp. isolate H4_Bulk_Litter_22_scaffold_31 sequence
ccttcaatagaaaatatgcgtaagttaatttgtatgttttaattttagactaaaaatataaacattctgtactatcaagttagtatatgtaaaatctttatcagacgatcaatctgattataaaagatttgtacatataaaaccttgtgtttgtacacgcttatgacgtgagaaagtgcattgagcgatatcaatgtggatagcttactatagctatccgttagtcttgaacgatcaaattcaggagctataaatggacattagtccaaggtctttaatcatgtaggaccttctttttaagtaaaggaaacatgagaaccacacatgggaagttattgccctcatgtgagtccagctaaatagtttggcattaggtaaagattgcagtgagcaaattccattgcagtcgaggtttagcctcgccattcgtcttttaaaattagtttcttttaagatgctagaagataaaacacggtaaaaaattgtatataacgatataggtctggagtatagtaatcaatgttaattcgttgcattggtgataacgacatactgtatactcccaactttcgcgccggacgattccggatatattgtacgtgataataatgtcttcttaattgagactgactttttaagtcaattaaacaactctaccagagcctacgcgttctatctctgacacgggatagttctcagggttgaagattccataggtctttaacctgccgaaactctgtgctgtactgtagggtcgactaccatctacctatttaggtttgaatcggtctgagataatttcaatacacgaccggccttaaaatagttcttcagagccaccggatggttagttcagatgtggcatagcgaaaaacgcagcacactgatgatattctttcaaacgaattttgttccctcacgatcggtgaggacctgcttcaagcaggagataatggatttttgcttgcccctgttatattagggcaagctcaagaaactc

SEQ ID NO: 2618 - DNA, 1000 bp, unidentified
  source 1..1000: mol_type = unassigned DNA; note = Picornavirales sp. isolate H2_Rhizo_32_scaffold_97 hypothetical1 sequence
acaagatagtggagcttctcaggttagaccgtgtaatgacgttacctgagtgatatgtatcccaactattgtttataacaatgaaccgggttcttggtatggtgtgtgagggtcagcctcaccggagtaatgaaccgtacgaccaagaactgctggaatgctttgttattcacacttaattgtgtgcaattgtgagttgccatacaactcgcgtatattaaattttacttgtttttggataaacatgataacacatatctttcattccgattatcccatgtcggggatatgatagaataaaggagtgtacttgatatctatggcctggagctagtatgtccaggaataaccaactatcaaatacggcaggaggaattattgtctagccgacaatcctctgaagatttaggttaccagccaatttagattgaaagattatgacccagaagtcgctagagctactaagctcgcgcacgtccgtgttttacaacaacaaagagaccagttcctttctcataggaaggagcaggtccaagaatttggagccgattttgtcttggctcagttcttaaataagactgtagaacctatatctacttctccgggcgatataccagaaaagtataggagaggaaactttccaattcgagataattatttgtctttatcgttacatgatgaatataaactcgatagtgactctattcgtcactactccttaaacgaccgaagctcgaggagtcaaaaaagagctaatgataaattacgtgaaaagtatgatcctaaatacttagtagcagtggttcgggtgctcaaaaaacctgaacctaccgaagatcagttacgtcgtcttcgaagattttggaatctccttgagggggttccagaatttgatattgattcactaaaacaatatttctttactgtaaatcatattttgtttaagaacaattggttttccaaagttgaaacttggaagtcaagaagtttctttacattt

SEQ ID NO: 2619 - DNA, 1000 bp, unidentified
  source 1..1000: mol_type = unassigned DNA; note = unclassified Picornavirales sequence
ataggagatacataacaaagaaaataataaaaattcttttgtacatatcaaaggtattggtttgactgagcacttggcgagcgagtgcaaggttgcaatgtcttaattcacggttttgaacatgttccaccagggatcgtacctgcatgttttgtcgccttaagtggcggactataaatatactatactcaagtggtgtgagtgtatgtttgtagcgcagttcgagagccgaataattcttaatattgaattgtgatgtgttatgttttgtgtagtttgtattttaattgtatgcgtagtaccaaacgctcttttgtgtgtttatgcgatcacacttactttgttggagcgatacgatcaacgaagttaatgtcttaatctaaggcctttgccgcatgtggaagaaccaatccggcatcgtattataccccaaccgctaatgaggttggatgagggcaaaatcgtagctcatctaccttctacccttttaaaatggaggagagatgctatactagggccactacaggggcccgacccccaaacctacgtggtgatgtgtgactttggcgagatggtaacttgccttgtccggtaccatatgagctacttctacattagatatagaatgacgcgtttagctgaagacccttagtacctccggtgaaagttgtgcccggaatgtggttgaatatatcttgtggttttagagtagttatgtatgggctggaactgttgtacacactttgatgagtgctccgcattttccctttgcgaataagagcacaatgattctatacgtgaagctgatacattttcagagacttatcgtgaatgatatacgtttttgtagatttgaagggccctgaaaaggtttaccctagtctgaattcctatgtcttagcggtttgagatggaatgttgttgcctatagtacgtaaggttgaacattgccataggcaatcctcaagggattggcttggcgatgtgggaataaacttca

SEQ ID NO: 2620 - DNA, 1000 bp, unidentified
  source 1..1000: mol_type = unassigned DNA; note = unclassified Picornavirales sequence
tgcagtaaccgctgcagtgaccagtttttaggtccctatagtttgacctagaggtaatctaacagcaaatagggattctccgttaaatcggaggccagctaggaggccaatctttgtggaagccttataggtggcacactggttgactatcggcctatccatgtggaagctatcccggtttcataccggattctatagtggcatatgtgtagactaggctcgtaatatccaaggaggcctgttgcggtcttaaccgtagcagactatcgtttgttgttcttaggctctttgcgttctttgggaagttttttctttgtccatttgacccaaaaacccagttcggcccttatgttatgttgatccggtcctttaggcctttgtgtgtgtaccacgtagtttaatagtgcaccttatcgtatggataccaagtgcgattcgtattttaagattggaattttgcgccacacgtcgtatgttgcttcacgtgtcttgtagtgtttatacttagacattattcgtagtttaataagtagagagtgagcctcgatttattcgtgacactgctctcacaatcattgactaatatacaggtattggaactatcttcttatgtttcagtaggctgatgtctttgaaatccctttttatgggtgtcccccacttttaggctgtcagcgatcttgctgccaggcaaaattatagagggctccgattgggtgaattgtgaattaccccagtatgagtttaaacaaatacccgcacagcaccatctcaaattattgatggagcgcaactcggtcgccttgtaaccgatacccccgaaacaaccgcgaatggtaacaattccctggtaccccccccggcccttatcaagcacaagaagtctgcagaagaaattaaatttgaatctgtagatcctactttatttgatgagtggattcaaaatgttgagattgagcaagaacctccaaaatctattcatagattgcggaaatgtttg

SEQ ID NO: 2621 - DNA, 1000 bp, unidentified
  source 1..1000: mol_type = unassigned DNA; note = unclassified Picornavirales sequence
ttgtcctttttaaacataaattagattgattcttctcttttgagatgtagaactatacctggttactaatttaagtcgattttaatttcattattttgcatttgttttagagcgcatgaagctcactgaataaggtttcagtcaattccttttcagctcttatttatataagatataaacattttcattattttggaaaataacgtaataaatttcagtattttatatgtgtgtaggccggtaccgaatggataaatccgatgtcctgatcattatataccttattgcttgtagaacactatatgaccgaatttgaagaatagggttaagaaagttccccgttctatcaataacaataaaccacccttcatgagaaaaaagttacttacagaaaataaacgaattattggtggtaatattgacaacatgggttttattttaaaagaaaaaatggacccatcctccgcaaaggagacgcgacgaattaagtttcgacgcaaaaaaatacaacgagcgcgaagcagctcgcagaccttttaaaaataataaggtttggaaaaattcgcaaaaatggaaactagagtttgaaactcttcctgaactggatatcatttccgaagagtcctatcagccacactttggcttagagactatttcagcagcgtcattttcgattgacgctttggcaaaatttgccaatattgatattccagataaagttttaagagaagtagaaggagttattcttcttctagtaaatctttcacaacaaagtacaccattgggtgtcattacgtcagttttgacttgggctcaaggtcgtaccacaaaatcactttttaaaacagtgaaaggatttgttgaggaacttctcgtttcaccacaatcaagcgcaaccccagattggttggattgtcttcgtgatgtccgccaaaattggcaattgtgtaagactaatagagcattcaaacaagtgtcaaaacttcttggttgtctcgtc

SEQ ID NO: 2622 - DNA, 1000 bp, unidentified
  source 1..1000: mol_type = unassigned DNA; note = Picornavirales sp. isolate H1_Bulk_30_scaffold_14 RNA-dependent RNA1 sequence
gatgatatcctctccttagtgaaagtattctaccgtttgtaattgaaaattgtaaagttggtaaggtatgtcggattcactggtattttaatacctctaccgctgatcgaatggtgtaagatcagggtcatgcggggcagtgccgcaatgctacaccatgttcaacccttttgtttgacgcccccagggcttccgaacacacatggaaaaactaaaccccccctcctctttctcgattgaagttttgaacagagtaagcgctctgccaaatgtggatttgactgttgatggcaaaatgctcccagttgttggttcaactggcggtggtcctcgcaagccaaagttgcctgccaaggacttgtgcctccgtgaatgtgcacgtgaaggagaaaggaaaggtgcagtgaacctgaaagagaaatctagtaaggccttttccaataggggaagcgttgagccggtgggttttactcaatcccgtttgaaagcgaaagcaagtaatagggagcagagtcttcaaaggcattgggatacgtcgggcattactgccccccgtcaacatcgtgaaatgctgcagcgtttagctgcagagagacgcgttgttgaagaatggaagagcaagggaaaagttgaacgtaagcgagagattctgcttaagcgtgataagcgttctggcgttgggattgagttccagagaggtaggtttatgcctgcttcgccggaagatttgttgcctgatgcagaagctcaggcgaggactgatattttacatgcgtgcaccgagaataaaatgccgtttgttcgtgatgttcgtgacattttgcacacatctgcgatggcacacaggatgatgactgagtatggcgaaggtgaggatcacagtgagttatttgagtttttaccaaaacatattagttccaagttgaaaccccgttcttttgagttacttgacgttgaatggcagtctggtaaggttttaccagctgttgcaggagtagcc

SEQ ID NO: 2623 - DNA, 1000 bp, Auricularimonavirus auriculariae
  source 1..1000: mol_type = genomic DNA
cagtggcggaagtccgacaccagctcggccaggcaccgacgcaggcggtgatgaatgctcttgcagctcgcggggagaccgcatcccagacggccccgacgccagagtggcagcccgaagagactcgcgaggctgacgacgaggacgacgcgttccaccacccctcatcgaacgcggacatgatggagaggatagagtcgctgtcgcagcagctcgggagcctcaccgagtggaagtcctccatcgaggagaagatgcaggccctccataacgatagcaagagggccgcggacaacgcctcgtcgttcgagagtcgcctcaaggaggtgaacaagggcattcatagccgtctcgaccgcatgtcggaggccttagagagcctcgggaagtttgtcaacacccagcggcagatcctgccgcagcgaccccgcgcgccggaagcacaagcgccagcgtccctacctgaggacgtcaaggtcgaggtcatccacccggacgctggctccctgctggatgcgcctggccgcgcgtcgcaccaggagcagctgctcccgaggtccctacgtcccgcgccgaaagcgcctgagacgtcgaagaggacgacggccgaggacaagaagaagttctcagcagacgctgcggcggctctagcaactcgccaggagtcgtcccctcgcgcccgcgccgcgggagcgaagccgttcgaatccacttcgaggcggaccgcgcttccccccccgcctccccctatcgctttcgacgactcctcggacgaggaggacaaagaggaagtgggtgcggtcgaggggtacgacgaccttgagtgagctacgccctgccttccgtgcgtcagcgccacgatagcagctcgagaatgtacttgtaagattagacgcttgaggatgccggcctggacgcgcctctatcactttgatgatctcgccgcttagaaaaaaccaagagacaaatcgatagatattgtctctggtatctcgccgtg

SEQ ID NO: 2624 - DNA, 1000 bp, Auricularimonavirus auriculariae
  source 1..1000: mol_type = genomic DNA
agttgcttgttccctttccgcagatgttaaaaaccaaggagacaaaactgatgattgcgtcttggttgaacgctcagcagccgcgcgccgggataagcatctccggagggaacgagtatgtggagcagtccgacttcgggtccgagcccgctctgaccggccagatagatgacctcagcgcgatctacagcttgtaccagaagcctaacaaggtcatcgtgggggcggacgtactgccgaaattcgcgcactcggtggatcaagacgctcctcaccccgcccctcatctctggaccgaggatatccgtgctggcacctggcatcgtggaggtctaaccctggctcagtgcgacttcccgaatgtcgatgctgttcgacgagagctcgtcaagcaaaactcttccgagatggagcattggaccagaggactgacagcaattcgcctcgtgaaacgcacgcacgctctcgtccggaagattcacaacctgcttaagagcactctctgggccttgatgactcgcgtgtacatgaacagcacgacggacgctgacatccatcgtctgctcgaggagaatcgccttgagtctcactccctggcggagtacacgacggcgatcaaaggatacacggagcatatgcacgagatggtaacgacaacctcagtcgtagtccctcagtctgctcctccgccgtcgtctgtctcctcgttgtcttccctcccgccgcctgatgcgtactcccccctccgaggggctcctctcctccctcacttccaggagcatcgcaaccgggcctcaacccccagcactcctcgagctcgctaagatgatgtgataaggcgttgcgtgctctcgttagaggacgctcgcgtacacatctgatttatgatctgttagaaaaaaccaagaggaacaaaaatgcagctgcttggtctggtaccacacagcgtgagacaaaccgacaagcattatcgcgtctgtcgatcgcgcctccggccact

SEQ ID NO: 2625 - DNA, 1000 bp, unidentified
  source 1..1000: mol_type = unassigned DNA; note = unclassified Riboviria sequence
gttctgctccccctgatgagctgggaccgaaataagctggacttatcggggtttagactgttgtccttccacacttcggtgaccaggatcgacatctgcttagatagccagatagtgcatgtgtgttcgagcatcgtttattcgattggctcagatgttcacaatcacttacaaccctatctatttgatcactaattccgtaccacccgtagcactaccgctaggtaagcgcagaacatcgaggttgtcccagttatgggcgtattggtaggggagtcactgttgtctatgacgcatcgaactcgtcccagcgatccattaccctagggaacctaactgcatgcgaaccatcaggttttaagctatacatgggtggtaggttatattaaatagaggtatcagtgctgaccgtctagtcctcagtatgacgttaaactactcaccgtctgtatcttgggacattaaactacaagtaggtattctagcgagcatgctgatccggcactcgtagaaaaggaggttcgcaaccttggaacatatctcgttccttaaccagtattgaataccattccatccgttgaccggggctatacggtccatcagtgtaattagtataatagcgagtaatggacatgcggtttaaacttggatgtagaataagtagataactgctttctattatggacgggctcacctactgtggttacgttgttctgaaacatgttggttctaaatcatgattggttcagtcttcttaagcacttacaaagtgaccgacccttccccataatatgttagatccaaacagttaatcgaagtatctcatcgacataacgattaaaaatcgtgtttaaacttagcataataaagttactttaagttatatgaacgcgcaggtattttgatagtttatcctaaatattaaactatctcggccggcttgttgtttgcggggctagaaatacgaagcaaggatcaccaaaaacttttttactcaatc

SEQ ID NO: 2626 - DNA, 1000 bp, unidentified
  source 1..1000: mol_type = unassigned DNA; note = unclassified RNA viruses ShiM-2016 sequence
aggtttgcacatttgcatcaagtcactcttgctctccacttgtgttaatccgattgattgttaggaaaactgaaatcgtccagtattcatccccctttgtaacatatcttgagtctctcttgagttccttagggcatatgtctctgacgtccagatacgggattagtagtgttttccctgaatctgagactaggcccggaatgggtagacctacaccttggtggatctcatatgcttgtcacgctactagctgtcttgccgttgagattggcgttttaaaagagaattcccaacccccaatttatccctacctatttagggcgatgtatttgtgaaagcttgcatcgccaccattttacacacctttttgattagcaaaaagaccacacatgaaatatcatcttgttgcactcctatgggtggttagtcttggactagcaatttgataattttcatcatacactatgtttacacattttactttgttcgtctacacatttatatgtttgttttcgttctgagagacatttagtgcagatttatttgcctctctaatacatgttattaacttttagtctgtatctttctcttctactatttatatttcctttatcttgttttagaattgacgctgtagagtggtctcattccccttcagcaagtcttttaagacatcctcctactatcgatgacgaaaattgtcccccaagagttaactagttaacgacactcttgggtactgaagttccgttcgattgtaagacctagaagcctgttttatgaatactatcttagataagaggcgttagaattagtcattgattagtttacaaataacgttagatgcaagtaggacctacttgtatactattttgttgtgaataatcaaagactctttgctaaaatctctcgactgttagtccatttcgtcgcggacaactaagataagatcatattacaatgctgaaatttaactaggcatgtagagcgcacataccgt

SEQ ID NO: 2627 - DNA, 1000 bp, unidentified
  source 1..1000: mol_type = unassigned DNA; note = unclassified RNA viruses ShiM-2016 sequence
taggtacttggaaggaatcagatgattagctagaaatgagtctgaccccgatagatttcgggacccaacacttgcgaacttatgctttaattcgcagcatgtagggaccgtggacttagtcttgtttgttctgagtgaacttacaattctttgctccccctcatgtaggaagaaagcaaaacgtagaggtacagtttctcctattaatgtacagaagaaacgaaaattctcaacgatggtattgactatgtcgaatccatgtccaactggatcaagttgggattttgatgggcttttagtttagccctttagtacagtaaaactacagcaaggtttgattagccttgagaagttcaattaatcacattgtttattagagaattaattattataaaactccagaaaaatatgtgtattattagtgtagagttagcatcactcattagaagatgccagttcgtttactgatcactcatccgaatagaaatagatatgagagaactatgtcctaattaaggatgcgtcaataaggtgctggagatgctggtagatggaaaattgtccgccagcgacggctatgcttgtataagctccctggtaaatcaagtgtagttacctcatctttgcagtacggaagtaaactgccgaatttctttcccagggtcgggaggggccctagcgggcacctcgtctgatctcaggactaaagccgcttgagacgacattctttttcaaatgcggatacccgtatcctcgtgagacctttgtcaattaagttcagttatttaacactgcgcgcattgatgatgaaactcaggaacggattctattcttggatcgtaagaaagtctgttttaaataacaatctcctggttaacggtgattaagcctggggtcgccttgtggttttcacaatccccccttggggtattgtgttccgcaaggctgatctttcaagtatcagccgtggaacattgtaccctcccactttcatgagaat

SEQ ID NO: 2628 - DNA, 1000 bp, unidentified
  source 1..1000: mol_type = unassigned DNA; note = unclassified ssRNA positive-strand viruses sequence
ataataatggccatgttttagcttgtcaattttggttgaattgttgtgttgcaaataagattgccgttggactgtcatctgttcgttttaaaacacaaactgggagagatagtgtttttacgatgctaaagttttctggtgcgttgcagttttcaaagtatgaacgatttccaaatggtgcatcagtgagtcttaatacccctgctatctttgacacgttgtgtgctattgctgctgctgctgcttatagagatagacttttggagaaaacccatgggcataagatggataaaaggaaagataagattgtggaggacttttctactgctaattggtcttataatgattctagtactgcttatcacaagtctgtcgtgctactcaaatcacttttcagacaaaggtgtgttggtagaaataaatttgaacaatcttataatttaaaatgggtaccagctggcacaccaattttaacacttggtgatactcctacccttggttctcttaatcttgctttatctacttcttgtcttggactttggatggagggggcgtttctggttagtcaagacagattgactgatacttttaaatatggtgataacactttaatgtttccagtagatccttgggatactcctgttcactgtgatggatttctatatatccctaggaaaaatggaaattttgatgttgtaccgtataaatataagtgcagacagtttgtatttggagatatagattctaccattcgaggtaccagatctgatatgcttgctttcattgattctgcactacaattttataagtctaaggaaggagatgaaatcgaatgtcctggttggctcgatgttgtaaagaagatacttggtgacaaagccgccgaagaattacatgacacacacgataaggaggataaaactgttaaaccaccgttgggcgataaaacaactgaaattggtgaaacttctggtggtgtggacactgaatcataactgat

SEQ ID NO: 2629 - DNA, 1000 bp, unidentified
  source 1..1000: mol_type = unassigned DNA; note = unclassified Negevirus sequence
ccgaaaccgaacttgactgtggatgcaaccaaaagttacttggcgttgcagaccattgtttatcacgaaaaacccatcaatgctatgttttgctccattttccgtgagataaaaactcgggtcacattgtccctaaagaaacatgttaagatcttttgtgatatgtcagctgaagattttgagaatgtgttgaacagagacatacgaccgagatcgttgtccccttttctcgagaagttggaaatagacattagcaagtatgacaaaagtcagagagaattggcgctcgaattcgagtgtaaattgatgtcgtattttggtgtcgacgcggatatcgttgaattgtggttcaatgctcacgtgttaaccgaagtgtatgacaaaaccacgaagatgagagctcttattccgtatcagaggaaatcgggtgacgcatcgacattcattgggaacaccttgttcttgatggctgtcgtgtgtgatctggtgcctgtatctgaacttgagcttgcattgttttcgggagacgattctctcctatatggtcacgatatggatgtttatcgtgattcgcaacatttcggtttgaagttcaatcttgaaattaagtttttctcttttgaaatgtcgtatttttgttcgaagtttctgttagttgtcaatgataaatggacgtttacgcccgacccagtcaaattcatgactaagctcggtcgacacgatctggttaatcctctacatgttgaggagtaccgtatctcattcgttgacactgttagaaattatcgcgattatcatgtatgcagaaacgtggcgaaggctttaattgagcgttatggaattgtgactgatcacacatcttttttgatgtctctggacgatatgacttcaagagaaaatttttctctgttgttttattcgttgtcaggtgataaaatcgactactctattactttcaataaagacttctaatctacgagattcgttcatataagttaaa

SEQ ID NO: 2630 - DNA, 1000 bp, unidentified
  source 1..1000: mol_type = unassigned DNA; note = unclassified RNA viruses ShiM-2016 sequence
gcacatttttctgattgccctttctttgggcgtaactcgttggcgccatcgtgaacaaatttcgaccgacgtctgcctgctacgctttgaagagaaggtggcctcaattcaatgcttatattgcttcagcccgaaacgacatactcaggataagccctgtttattagtgggtcgttgtaatttgagatattgagttgtggtgtttaattgtctcaattaaactgtaaatatttttgttttcttttgttttgttcattttattagtacaatagttttatttttcttttgtttcatgccggtacctatccgcgtccgatgtgggaaagcacttcactagttgatcttagctttataaatctatcaagcggtattctagtgggctaggtacgtcttggtagtctcacttttgtgagtgcagtattaagcccggacctcgctcaggtgttgtcagtaaggggattcgtccttctgaaacttcgtaaggcgaaaagggaagtacggtttttgcaatagataggagaaatagcagtgtgcctttaaagtgctgcaaataaaataaaataaaaattttggtttaatacttcccgggactcatttagataaggcggtgtgcaggggtgacctcctatcggatcgaattatctccgactggaaagagagctgtaattgtaaacttcccgagggaacaggattatcgtgatcctggtgtgtaggcccattaacgttcgactgtcccaacttagcggcaggaaataagaaaaattcggcgttagtaaaacctatgatctttgtcccattcgagccaaagcatgtttatgttaggcttgacggttattgttgctataagaacctactgaagagatccccttccatcttttaaataaccagtaggtcgcagtatttcccctgggtgctctttggacttgtctgggggtttgggaaggcaactcatgcgcctccctcactctacgagcatactaataagcatggggccctcttc

SEQ ID NO: 2631 - DNA, 1000 bp, unidentified
  source 1..1000: mol_type = unassigned DNA; note = unclassified Riboviria sequence
gacctctcttaaatccaaaccaagagatcaaaatttggccatagagaaattgtcgttttgcaatcaggaagtccgcatgaaaggatatgcaagaacctcagtggtcattcgcctttctgaccatggatgtgatccggcggtggctcttcaatatgtgctaaaagagaaagcagaggatttgatgttgggtgacggcctttccatcgataagaaggttcattggttactaacaaaacatgagcccgcacgaaagctccttggggcactttcggcatcagcctacaactagcacatgaaaaaaactaacagacctcactatgaggcgcatttttggtcgcttgctgcccgaagctccgaacatggctgttgttcctgcggcccaagcaggcccggtccgccgggtcaatgaccccctggagggatgggggcgacaattcgtgatggtccctcccgacccacaacccgttcccaacaccgtcaccagcaccacctatgacattgtaggtgagctggtggtgaacacacccctccagtccgacgatctcgtcctcctcggccagatggccatgaatttccctcactactatcaaggggatatcaccatgaaacctttccacaccgctgtgttctgcctgttagtgtcagaactcagatgtcggaccaccctcttccatggccgcattttcgccagtcgtgtggcggaatgtgtgaccttccagggagaacccagagagctcccccatggctcatctgccctgttcagagaaacgttcacctggcccctgcgaggagaaccttacgtctgggccgtgaacatctcttggactagatcctacatgccgggggtcgccctccatgagttcatccgtccccacgtcaaccccctcatgtcagccctaggcgtttccactcgttggaatggagtggataactacctggtcctcgtggcctagggtcccatttgcaatatggaccatgaaaaaaactaacagtcctcacc

SEQ ID NO: 2632 - DNA, 1000 bp, unidentified
  source 1..1000: mol_type = unassigned DNA; note = unclassified RNA viruses ShiM-2016 sequence
accactctcttcaacagagtgtactaatcacactttttacgtagtgagatttgaaactgtaatcgacagtcgcatacttataatctcaagtatgtagtaattgagtagtcctagaatttggattcaattttgaagaaaatccgccacgtggccaaggcgaaacttggcaagtgctaagcatggccgcacgttactgatcaaccacacgtggtagatccgcagccgagagagacggcacccggagtatttttgtttgtaattagatagattcattgagaacttatttccttcgcgccctgtaaaaagggaattggaatttactcagagcgtcaactgagtagtacgaccgcggtatggagcagcggtaatttagaccaatgatgttcttttatgaacatttataccagacatttctgatacataattgagagatggatactcaatcttgcagtaatgttccggctagtaggcaataacccaaaggcttgagggtcgcctgactagtataagaaaaatccacgaatggcgctggggagggttaatagcccccctagcatcaaatagcaatgaagttactaaaagcgtaaaaaccggacgaacccctatttccaattggagaaacacgaatcaaagatactgtcctacgtggactttgtccactaggatcagtgaaaaggtggaagatggacgttatgtgtacctcgaggatattctgttttcaaacaaatttttcgaggattcatacacagaaaggtgtattaaagatagtttcttaatcgataagagtgtaaatcgattgaggaagaaagaggcggaaaagcgctctcgtgattatcacagagcgtgtattaacccgtggctcgctgggaagaagcgagtcaagaaaagacacagtgatagtgaaaggcgttatcgtaggattttggaacaagttcgtgaacttacagatgtttcagttggttccaactgcaatgacgattcaattgactggtctgatgat

SEQ ID NO: 2633 - DNA, 1000 bp, unidentified
  source 1..1000: mol_type = unassigned DNA; note = unclassified RNA viruses ShiM-2016 sequence
attttctcgtacattttaagtttttgcgcgactttattgtcgcgtctttcacacgcatctagtgtgtgtgtgtgttatttttctaaataattgtttttcagtatgtttttagcatacgcttttcaattattatatgatgtctttgtatgactttattgttgtacatccttttgaatttttagtgcgattttatgttcgcacattgtgaccaggtttatacctggtcattttattcagcacgatctctgatatcgtgcagtaattctttatgtttgttagacataataatgtagtatggaattttgtaaaatttcgctcaaaagattgtttaagtgcattgtttgacatgtgtgagactcgagtactcgatgttatacaaatatgtactaagactttctttaagtgattgttataagatctctagctttctggaaacagttgactacgaagtcgtaataagcacattattcctaatataacatgaagtggggaattttaaccgctatacagtcgaatttactttcgattctgagtggctgaagtgatctttgtgaagctacccttcttgaaatcttacaataacctggaactcattggagttccggatactattggttttcgttgtgaaggatgcaagatcttagaaagaaattcagcagtcgctaacttacctgctcacgacgttgaggaggtagatttgactgtaatatgttaaaaggactaacagcattatacctattatagaaagtatcaataaaatccatttggtatggtaggtatgtgttccgctctaactaagcgtgccgagaggcagtctttgtttgaggaggcgttgttcccaccgtctccaagtatacgcccacgcgggagagtatgcaggtgaaacataattcggggtcttccatgaatatgggagttggaaatcgactgatcggtcgagcttctgtaaaaaacaaaatagatcgctcaacaacaaaaaacaaacaacaacaaacaaaat

SEQ ID NO: 2634 - DNA, 1000 bp, unidentified
  source 1..1000: mol_type = unassigned DNA; note = unclassified Riboviria sequence
agagagaagataaaagactccacacgggtattccccgtgtggagatcaataaacttttatcagtagtaacaatttgttactcaagtctgcgaatgacttttattaggtattcgaaactctttatatacaaccatgtctattaggggttttcccctaatagttatttgtttttctgagtttcaatgaattgttaataaatgttatttaaacatacttgtttaatgtattgaaaattctattgatgtgtttatgatcgaacccaagttttttcatctgtaatcgtttcacttttcgttaagaaatttgtcaagctggcgattacgtagtccttctggacgccaagcttatttatgaaccgaattggattataactggattatatggcattagtcttagttgtaattgttctttaacatttcgattccggtgaaccccggaatttgttcaggccttctggccacctcaaacgcttgcactcatgcatacagaagcgtttttaaaatatgtctgtacgatgtaatactgtaattacagaacttatcaaataaggaagaacctatattgatatttcatctcgttgtaatgcttagcgcttgcaataagagccccctcgtttatacggctgaaaatagtataaacctagtttaatatcacgctaagatcctgtgatattcttaggtaacctatcttatgatatggggaccgacccttagacaagactcattagtcggcgtattgtctaaacttatagttaggaagtaatgaccctaatttcacttgagaattcttgttggaaaactattaagttaaacctttaccaaccgatgtacttagtgtagcgcctctgcctgcggcgaataatacatgcttaaagtacgtaagtaagttcatcctcttaactgagtggtgaagcaaagcttttgtgtcgaagcacaattggattaccaattttgcgggctttcgcgaattggttcctctgtgcttgtcgctttcaaatttt

SEQ ID NO: 2635 - DNA, 1000 bp, unidentified
  source 1..1000: mol_type = unassigned DNA; note = unclassified RNA viruses ShiM-2016 sequence
aatcaacagcgatccttcggcatgaagtaaactgaccaaaatagaacctgatctaggtgtttttaagtcatggtaagtccatgagaccaaaaacaggcgttgctaacccgttacgaaaaagcggaaattattatcatagggatgatttgcaattcccaatggttcagactgcatatgtttgcggcatacacaaattcggttgtgtaacagctgtttattttgattctttgtctatagaaaatagacgaacttcctcctgtggcgcccggtaatagggtaggaggtacattgggcgtggaaccccagtgtgagtgtgaacgacttggagctgtgtcccactattgtgggtttagactctatttgttagtcattgaatcaattgaaccagcttgcctatgatcttacctatccacgtaggtattgcatggcaagtgctgtccttgttatagctgatgaaggcttgagtcagcttaacgttcgaggtaagtttgtagctctttaagagctagtgggaagacctggcgctgtcgtggattaatcgtcccttcagcatcaatatagcattgaagttagtaatagccaaaatcttttatccagaccatctttttcttcggatttagaattgcctttatggctttttaattgttggttgctacttaatgtagcaattagtgtgtacactattccccgtgattgtttcatttgggatattgtgtatggtgtgtttttcatttgtgtttttgtattgaccatctatttgtatgtttacagcattttattgatttggaaagctatatttggtccgcggcgtagaacttttgaagaacaacttggattcaggttaccgtcgtttgttacacctgattttgttgcacgggagaccactctgctattagcgttgaaaacgagtgtttcttcgagtcggaataaggcaggtgtcatatcagcgttggtatcttacgcacaagctcacagtcaacgttcccttttgggtcactta

SEQ ID NO: 2636 - DNA, 1000 bp, unidentified
  source 1..1000: mol_type = unassigned DNA; note = unclassified RNA viruses ShiM-2016 sequence
agggaatttatattccctacataccctatactttttagttgtaatctaaatgatgactctcttttgcagagaccctgtataaagatcgagatctgcgtctcgtgtttcagtcctaggattacactaggaggttagcacgggagcatgaaccatttattttgctcaagaaatttatacttttattcttttgtctggtttgctgaagccgaaatttcagcaccccctttttgcctgttatcaaacaggcccccgctttcgagcgggtgattggagactgtacaatcttgtgctgtctccatgctccggttttccggagccgcgatattatatcgcaaatcctcaaccgaggataatatcggttggtcccaatttttactcatttggataatgagtccctatttttgagtaggtgattgaagtgatagcacttcacctgcgcttccgagcgcactgctccctttgggagctgcagtatttatactgcaaacccccagccgagggttgtttcggctggttccattatattgatgtatctttaataattattttacatttgtttttgaattgcaaacggctcttctataacattcaaaagaaacccttgattcaaatgtttacatttgtaacttatgttttctgataccttatatactggtaaaatagaggattagcgtacctctcctcaagtagtttcagctcactctctttgagagaactgacgtccatattgtgatctagcttgattgatataagcggtaagtcaattaagcccattatgatatgttcggaaaattgtacacataatatacaggaagactatgtcctatggtgtgtacttcagtaagaccttagccggtcgcaattgttacgtgaataataggtagtcacgcgtaacacatttcacttgtggttgactcccacgagtgatcttatctttattgttactaaatttttacaacccgcttttgatcccgtcttcactgattttcgggattcaact

SEQ ID NO: 2637 - DNA, 1000 bp, unidentified
  source 1..1000: mol_type = unassigned DNA; note = unclassified RNA viruses ShiM-2016 sequence
ttttattcgcatcttgtagtgttcgcgagaaagaatctactatttagtgatcacaaacatattgggttgtttgtttgtgttcacccgaggtacgaaatgtaccagtcctgtttattaatactttggggataaaaagcagaattttctgcaccgtatacggtattgaaatgtatagtcgatattttaaggacattattaaatggacgtgaaagtctgttgaaactgctctgttttgaatattgctgtttgagggttgggaaaccctacttttgttgcgatggtagcaaatgcaccgtttagaccttatgacatttcgagtcactattggcttctgggaaggttgattaccagagtacgtgagcctagatctaacatgaggaggattgtgctggagcttgagaacatttggctagttgcgcatgttctgacaaaaacatcaatggggaaaggcgttaggccccacgtataagacagaagacacgttgttatcagaatttctttaaaccacatttatcacgtcaacccactccacattatttgtttagtttcccgtaaaccaatttttataggcgaacagccttttgatgtttattatgcagattttaaatttttaaataaagtagcgtatgtagttgtttcatattgttgtccagtagaaacactaatattgacattaaatgaatatgtaaacaccgaattaatagagttagaagagccattttatggcaattattttatagattgtaaacccattcgaagcggtttgaccgtttgtgcttatggggatattacaggtaagaaaattacaactaacattggccgtttatgcggaggttatcgtgatccttatcgcttgtatcatattattttgcaatgtgagaaacaagtattattagagaccttgaaacttcaaggtgatgaagagttcgcagaacaagttcgtcaagaacaatataaacaggtgcaacaagataaagtttttagaaacatattgcgtttt

SEQ ID NO: 2638 - DNA, 1000 bp, Sclerotimonavirus alternariae
  source 1..1000: mol_type = genomic DNA
gatccttccacggaagattacctcttcgccgccaaggttgatccgatggaactcgcagcttatgctggaattcttgcatatgcgattggcaagcagccgactgcggagaacatggatgcgttcaactctcgccggcgcaacgccatctcccaattccttcctgcaggcgatctcaagatcttcgttgatgattccgagttcttgtccatcgacatccttggcaagattcatcgtgcgttcaactccgtcacgatcgatcgagcccttgtcatgagtgcgattgtcgacaaggatgctgctctagttcagggacgcgagaaggtcttttacatcatcttccgtctcggatctggtgcctcgctcaatccattgctgatcatcacgcgctttgcgcgcaagtacccgtacttctattccgagtttcccgatctcgagaccgaataccatgccgcggctcatgcactccagcggttctttgatgttcccgagaagcgtcgcatgtacctcaaggtcatcttcgggagcgcctacgttcctgtcgatcgcacggatgtgaacgaacttctcggcgtctctgtctttgcacttcagcagtcagagccctcgcttgccaattacaacggcggaactctcagtgtcgtccatcgccagaagttgattcgcctcttggaggttgcttcaactaatgacgaagaaatccccgaggagcaacttgctgagtaagtgtttccaccactcatctccttattaaatccaaggatttaataaaacttaggagtaatcaataagatgaagctcgctgatgcacttcgactgtatgtcgaaatgttcgaactgattaccgcactcgtccaacgcgtcatggacgataagacattcgaagatactttcgacattgtctcacttgactaagttcacgtactcagttgcaagagttatttaataaaacttaggaaataacaaacgcatcgtctcgcactcaacctactcattaagaaat

SEQ ID NO: 2639 - DNA, 1000 bp, unidentified
  source 1..1000: mol_type = unassigned DNA; note = unclassified RNA viruses ShiM-2016 sequence
tcccagatgccatcgcgcatctcaacttgaatcctctacggtgaaaagccgtaccacatcagcctcgaccgataattaaagtaggtcatccgttttctacgaccaactggctgatgtgatgttcaacgtctacagccggtccatcatgagtatggacgtgcaaaacctgagtcgccacctttcgaagttggtgtgatagtcgtaggccgaccctgcctagcagttaataaataaactagcgtgagcctgcgataagggccaatcctcgggatgatctacaagtgattacccgcactgaagtcaacaaatttgattcgtttccacctgatctggagaaaccgatttgtaatggcttgcgccacggcgaagagtgaataactctgagtggctgccaccttgacattaagtgtgtgttctacacctgtattattaggacatgattatggtcctgtttatgttttctacaacctacgctgctaatcaacgctcatcgagcaccgcgtgcgattggagggactctgtttctctcctcttagtagtttgctatatatttatattgtctcgtatagacgtcaacccgcgtctctaaataaagctggataaaaagatgtattattcatattttcatatcacatcgtaccacatttatgaggggaaactctggaatggcattagccggtcagagtataaagaaccgtcagaggggatgtgcgagtttccagtcacattagtgatactggaccacattaccgcgccctggggacttagaggtacagtggtgtacgagaggtgtgtgttaggcgtagcctgcactcactttctcctctgcccaccgaggcctagtcatctttatacaatgcctagagaacaaccaaatgaattacagaacacgtgaaagtcgagttctaggtcggggcccctgaatgggtccctatcccagcgacggggagaaataatacgtttttaagaccaagtacgacataccatttaccgatttatc

SEQ ID NO: 2640 - DNA, 1000 bp, unidentified
  source 1..1000: mol_type = unassigned DNA; note = unclassified Riboviria sequence
cacatcggtggcttgcgagggaactcactgcgctgcaggaaacacccaagtgcgttctcgcaaaagcaaatcaccaagcatccgtcggttgccgattggcaatcgctgggcctttatcccccctccctccttcgagcgggggggtaatgtgtgaatgtgataatgacggcttaggattcttaagccagagtgaatgtgatccgacttacggatttgggaaggcaagtgcgtccactgagcggttagaacgcctctgggcaaaggccgggctagtcccccggtaacacaactgcggttgttgcaaagataggtgcggtgcgcgaactctggctcctgttatacaggagtacagttacactcacgactctccctatcagagcacttgtcggctcaaatccgacatcggatgtatgatggctccccgagctaagcaactcgggttggggtgtgaagccgaaaggtcaccccgggccaatgcgtgggcggcatgaaactgccccatcggcaagtaagctgtgcatcatgccgatgagtgctggtcgaacctggggttggaccaacaaggaagaactccgtatgggcggggtgtggtacgtagaggaacttggagtgctgtactttcaggtaagcctggcaggaggactataaggatttagttcggcctgtggcctttggagggcagggcgtcttagcgcggcgagcaaggggtagtacaactaccgctcgtcgggcgggcgggtctaggtctatggctttaagtatagcaacaagaaatcgcgtgccacccttgttgcttcaatctcagaggcgaggactgcgcatgggcggtgtgggcacagcccacaccaccccacctctcagcggggggagggggcgtaaggggcgccctccctgcctagagcatcggatgcagccccccacttaaggaccagctacgactcattgatttattgattattgagtgtgaatatagtgcgattcagtgcgattattgtcctag

SEQ ID NO: 2641 - DNA, 1000 bp, unidentified
  source 1..1000: mol_type = unassigned DNA; note = unclassified ssRNA negative-strand viruses sequence
atatgctatgttctcgcactcaactctatctcgcatcgcaggtgaagaattacctcgggtatgtagattgctccaacagatgatattagatccatactgtgcaatgttatccaatccgatccccgtgcgaacatatgcgaatatagcatacattgcctgtaaactcatatataaatctaatgttgttgccagtgacttgaccatgaaggtcactggatatgtgaacaccttacacacaatgatcacaatcgatcaagggttgttggatacagatgttatcaatatacgcgaatcacagatccaaatcagtggagatagagcttccttagtgaaggtgctggctaagcggcacgggtatcatataagttccgataaaaacaccatttttgagaaaattgaaccagaacctacatcttcagttcaatctacatcgcaatatgacatgctacctattaaaactcatgatatgatgattaatgacaagaagtatagagaaattgatattggagagaagtacaaggacatgaggacaaaagaagacatagcttttttcaacctgtgtcagcaattcaaaaatacaatgatgcaaacagtgattcctgacggcgcttcttatatccccggttccaaattgacacttactgaagatgagcataaatatctacacctcgataagtttaatgaagaaccaacggaatataaaagcactcaacacatcatcaccgataacatacgtaggtcaggttcggttttaatcagtgatattttgtcattagctaagggagttgggttgaattgggctactactgtagcgacgcctgtgatgcctgctgcttcttccacccgagcagttgttagaaccccggctgaagaggaggaaatgggcatttaataagtgtaaacaacgtgtatcaggtttttgatcatagcctcttaaaggatatgtggtgagattgcaagtgttttcctgattattttaaaaccaactctggtgtttacc

SEQ ID NO: 2642 - DNA, 1000 bp, unidentified
  source 1..1000: mol_type = unassigned DNA; note = unclassified RNA viruses ShiM-2016 sequence
attagactacccttcgaccatttgatttccatgctaatgcatgtactactcatatcgtgacaggataagagttaatatcgtaattaacgagaacccatcaatggaaattggccatcctctggtagaggcgtgtaaagaaccacgttagtgaaacggagtcgacattaggtccgtcaaccctgatatttgcgcacatgcttgtgtgcatatagcgaaatatgaatctacaagattgagccgaataaaaatattttgtagtgatccgtgttacggtaattttccgtctaagatttgtatgataccaggtatccgaaagctattgctggaggaccttgatgtaacatttatatgtagaccaacatactatcattccgatattatcgaacattaactataatataaattgtgaaactcgatgagctaggtgacacatttgtgtttaatcatctttgacatttgtcaactctgaggacgagaggagcagcggcacaattcatttgtgtaagaagcaattttgttaatagttattaatggtgtttgatcttgattcccttgggaaaggaattattgcatccacctaggatctatgcgtttggaaagtaaaggttgatattccatatcgtattgcccagtcacaattttgtggcccggtcggaacaggctaataccctgagctcggacttacatctgtaagtgaccggtatacctatcagttacgagtaccttcaaacctagtaaaccgctatattgcaacgaggaatttgttgataatcgtgtcctgagaactgatgctaacatcgttttggagggatacgaccctgagttggagtgccaggtaggcattggaagctttgtgagtattggaactggacttgatgtcctatccaaagcttcagggattgatataccagattggattgtcagtgagatagaatcaattatctgtttgtttatctctcttactggacaaacgactacgcaaggtgctttagccacaatt

SEQ ID NO: 2643 - DNA, 1000 bp, unidentified
  source 1..1000: mol_type = unassigned DNA; note = unclassified Riboviria sequence
gcaagcctatttggtactgtttcctcaagaatgaaattctgaaggaaaagaaggtcagtgagaatgacatccgagtgatatcttgtacagatcccgtctttgtgcgtataggagctgcgctggatgaacaccaaaatgctaggatgaaagcaaagacagagacgcatcatgctcaggtcggttggacaccctttaggggtggccttgacaggcgctgcaggcgcctcgcaaagaaggacgtatttgtcgagcttgattggacgcggtttgatggcaccattcctccttggctcttcagaagagtcagaatgatacgctggtatctcatgaatggagaagaccgcgagcgctatggagacctagcacggtggtacaccaagaacctgttgagtcggttcacgctgttcccaactggtgaggtcacactcatcaagaaaggaaatccttcgggtcagtattctaccactgtagacaacaacatggtgaatgaattccttactgctgctgagtttggctacctttataggaaggccaatggccgcctacccactgtcgaggagtaccgggcgagcgttgacatgctctgctacggagatgatagactccttggctttcgcgcggggttcgtcgactacgagccaaaggaagtcattgacttctacaagcgcgtcttcggaatgtgggtgaaagacgagaatatcaaggtggcgccctctcttgagggacttagtttctgtggttttacccttgtaagagtgaacggccggtactatggtacgatgcaggccgataagatcttgcagagcttgaagacccccacgaggtcattgcctgatgtggagtcgctttgggggaagcttatttcccttcgtatacttttacaccatagcgaccctaagcacaaggagtaccttgacaggcagattgccaaggtggaagagtacgcccgtgctgaaggtattgacctacccgaagtcgggcccgacttctataccaccat

SEQ ID NO: 2644 - DNA, 1000 bp, unidentified
  source 1..1000: mol_type = unassigned DNA; note = unclassified Fusariviridae sequence
tggtgctgaagagtgcttttgccgaaacgtcaagtacaccatgtatttattaaatactaggccttttgtatggctatataagttgtttttggtcttgatgttaattttgttattgacctcaggagtctgttttgcgtggcttggcgtaggctttgccgctgtgattttggtttttctcgccagtaatgctagccttgttggcatagcttttattggactgtttggaccttttgcacttatttattgtggcttcatctttgagcaagctgtgcgtcgtgaggcacagttgatcagggacgttggtgctgatacagctctgtgggcttttcttgataagaagcccattggtttcactatcttttcaaagctcacattgacacatgcagttttggcggggcatgataagtcaggccgacttttgtctgccagttttcgtgtcttgggcctaccacaagaaatacaagatatggtggaacctgggattcttactatggcttcaaggctctggtccaatcttgtgttgaatgttgactctttatatgatggcagagcatcatttatcgtgagtcttgctgcttattggtacttgcaacgaaaattttctgtttttctttggcgtaggtttgaaacctttgtcaaagttttgtggattgcatttattgtcttgtggtttgttaaaccacaacacttcctttttgccttaatgcaggtttttagaggtgttgtctttttctcaaaccgtgagcgtgtttctgtcttttcattgtggctcaagtggcgtctcacacatttaattgtgaagttgatagcatattttgagtctttcaatgcctcttttcggaaataccatagtgagcaactagacagtagcagaaagactctctctgcacattttagaaattttgtgatgtctgctgctgtttatatttctgatttgggcctaccttcttatgttcgtggtggtttcgtgccttacaataaggaaactttggaacaatca

SEQ ID NO: 2645 - DNA, 1000 bp, unidentified
  source 1..1000: mol_type = unassigned DNA; note = unclassified RNA viruses ShiM-2016 sequence
atggaatttccaaatacagacgacgcgatgttgtttcgttaacgcaatatatgtacttcgcagaggattcgcgtttcctcagcggcaaatacacagtagtgctgtgcgcgtaaccataatgggttacaacacgccgttttagtactgaatttatttgaagaatacaagaacttatacccaggcttgcggctaaaaccgtttgggtattcctcatattatgggtgcgctgaccctaatgaggagagtgatgtacgacttggagcagtattgcaatcatttgattgtatgagactgtattctgacaatattggaagactaatttatccggtctaagattgaaccctcccacatgttcgatgggagtggcgacttagatgcgtggcttgtttaactggtgcgaaagcttgagcaccgacctttcgagcaaagattatagaacgaaaaatggcgcctgaggtttgggttaacaaccccccaggcatcaataaagcatgaagtctctgaaagccaaactttgaatcagatttcactctctcttctccaagagagagctacctttatttcccgtcaaaacattgactctgttaaagagtcctgtcatgactattctttgaaattgaaagatttcttgagcgaaattgctcctggttttgaactaccggaacaattcgctttcttgaaggagcaaactatagcttctctgaacattctactcggtctagtgaaagatttatatgctgtcactaaagaccaccttgccgacattggatcggctctcatccatgttatcaatttttacattggaacacggaattctaccaactggacggatgtgtccattggttttgtgtcgttgtgtttgtccttattcaaattggataccattaaagattcagctaagtacgttcagcaaatcgttggtgtctttgtggacaagcttcgaacttattttgtgaagggcgaatctgccgagaaggagattcgttcgttttggtcggac

SEQ ID NO: 2646 - DNA, 1000 bp, unidentified
  source 1..1000: mol_type = unassigned DNA; note = unclassified RNA viruses ShiM-2016 sequence
cctcaaagccaatagctcagggacaatcaaattcggaccggatttatcggcatgtccagcgctttcaggcggaatactcaagtcctaccacgattacaagatcacagctcttacggtcgtctacaagtctttcgcgtcctcaaccacgtccggtgctatcagtattgaactcgacaattcgtgcacacaatcaaccctcggttcttatgttaactcattcaccgtctccaagacaggaaccaagaagttctcggcttcccagattaacgggaccaagttcatctcctcgacggtgaatcagttctatctgttgtacaagggttcaagtagttcaactgatacagccgggcaatttgtgatcactattagggttgtcaaccaaaaccctaaataggtagaagaccttccacctcaaccaactccaaccccaacgccgcaaccacagccagaaccacaaccgacaccgacaccagttccatcaaaacagttcttctgctgttacaccggaatccctattgtcaacatatcgactagggaaacgtctgactcaatatctgtaggtaagttatccacacagaccttcagatatacatctgatgaaaaatctgaagacagagacgttagatcttggtggtacagcaataacaatgtctctgcacaagcagctttcatatttcccgtcccaaaaggggagtacagtgctacagttgtttgtgaaggtttacaatctgtagaccacattggaggcacggaagatggacagtggatagggattatcgcttattctgatgattccactgacaactggggtattggtagatatcaagactgcacaatatcaaactaccaaaaccagtcgtcttggcggatagggcataaagacttgcaacttaatggctgtaagttcactggccaggctgttgagagagatgcattttgtacattccacatatcagcaacctccaacgacgccagtttctacattgttgcgcctaggacc

SEQ ID NO: 2647 - DNA, 1000 bp, unidentified
  source 1..1000: mol_type = unassigned DNA; note = unclassified ssRNA viruses sequence
gccgagagggagattagaacaccgcgggctcgaacatcagtatagcgagtcattatgggaatgaaggtagtccgaccacggatatatcgcaagttaccgcgaacttcattttcttgtagggtgggcttccccgaaggtgtgaccttatggttcagtaggcgttcactgcactgaacgttgaagagctaggcgatgtactgacatctgcggaggcggttagcggttgtggtagtcgcgccgtccggtgagggccagagcaacatggagtagcgcccatgcgagtttgccagctcggacattttgttttgctcccccagacctgcatgcgcattctgaggcttggatcggcatggtcgaaggtgcgtggtggggtggttgcctgaagcaagtgtggttaagtgattctaggtattattccgtatgaatcttatgggaaggcggactcattgggttgagcctcgattcccatgccacaagcaacccagtgggaacggctacgggtgcgcttaaggtgcagcttggttatgtaagagcgagttaaaggagcggggttgtggcttgtccgtccccagaatccttcatcaagtccgcgacataacctgcaagtagcatgaattttgatgcattagtgcttaagcataaatggggtccactaactatattggtgagatgcgagtgtcattcgtttgggacaacttaacaaaacacttttgttttgatgaatgtgtggctatgcgtgttaatcctaatcaatttacgattattattccaagtgagtatgacttaccagccgatggaacaaccggggctggatatattcattctgttttgtttggtgaaatgcgtttttcatctattagacgattacgatatgcaagaaatcaagccatactaaccgttgacactatacccattcctcgtagtgaggaaagtgcttaaggcacaaattttggagtctagccgctgacaattttgttcatgcattcccaggtcataattt

SEQ ID NO: 2648 - DNA, 1000 bp, unidentified
  source 1..1000: mol_type = unassigned DNA; note = unclassified RNA viruses ShiM-2016 sequence
aggaccccagatgtatccaataccgtaataagcggtatggtttacgtctggccacctacctacacccgcttgaaaaatatgtaatgtcctggacccgcaacggcactcacatctttgccaaggggaggaacatgaggcaacggggtagggatatcgcccacaaatttaacaggtacgaagagtgcgctgtggtctcccttgatcatagcaagtttgactgccatgttaatgaatccctattacgtgctgagcattggttttacaatcaatgctacggttcggaggagctggaatttttgcttgagctgcaggttcgcaacaaaggcatgactaagaatggcactaagtacactactagagccactcgtatgtcaggcgatcaaaacactggtctaggcaactgtttgatcaactatatgatgaccaagcagttgcttagtaagttggggatagggtacgatctgtacattgatggcgacgattttctaatcttcatggagaagagacacgtcccactcatcgacccgagtgcttattccgtcttcggtatgtcaacgaagttggagagtgttgcatacaccattgaacatgtggatttctgccagtgcaggcccgtattcgatggtgtgggttacaccatggtgcgcaaccccgagagaatgttagctagactaccctggatagtaggacctgtcgaggatagtcgagctaacgatattgtattctctactggacagtgtgagatcgctcaaggcttaggtctgcctattggccagtacatcggccagcgaatgtgtgagcgaggtgggaagatggttcgcatcagacatcgggcgtggttggagaaaatgaaacctggaaaactccaacctatagagcccatgggtggtgtgcgtgagagctatgaaagagcttggggtctgtcaatagccgaccaactgctaattgaacagactagtctggtggaacccgaggagcatttcgctccgggtattctaca

SEQ ID NO: 2649 - DNA, 1000 bp, unidentified
  source 1..1000: mol_type = unassigned DNA; note = unclassified RNA viruses ShiM-2016 sequence
gcgtcgccaaaggccttaaccatagacaacgcgcccaattattaatcgataagttagcccgtttcgaagatccagtcatactttgtctggacgcccacaggtgggatgctcatttgaaaaagaggaagttagaggcagaacatctagtttatgtcctctgctccgctttttatgagctagctgaattgttgagaatgcagttgagcaacaagtgtcgaacccgcaatggcgttaaataccgtaccaaaggtaaacgcatgagcggtgatcttaacacagcacttggcaactgcctgatcaatattctaaccattctttgggtgtttatgggtattattatcgattttatggttgatggagatgatggaatagtcatcatggagcgcaaagattggattaagtttaaagatcaaattaacgaaaggtatggtaagactggattcgtcatgaaaatggaggtcgttgaccgattagaagatgttgaattttgcaaatcaagagttatacgtacacatttaggtcccagatttgtagtctatccaaagcatgtcctcagtgggagcacggttggtgtcaggccacggcatggtacttattgggttaagcgcatgcgagccgacgcgataggtctctacgccctataccaaggtgttccgattttgcaggactatgctctggctacactcgaagccacacagcaagtggtaccagcagaccttacaggagaggatgcatggtttcaatttagattgcatccagcgtataattatatggtaaatttgaaaaagattgacatcagtaagttagaccaattcatctcaccccaatctcgagttgatttcgaaagagcctttggaatatcaataggtcagcaaatgctaattgagcatcaattgagacaggcacataaagggtacctctgtgaggtcgcatatcttaagaaacatccttttctgttcacagtcgaacaaaccaggcatttattactcaaactttggta

SEQ ID NO: 2650 - DNA, 1000 bp, unidentified
  source 1..1000: mol_type = unassigned DNA; note = unclassified Riboviria sequence
tccacaaagggggccaccctatcggaatccgcagccgggtggctaccagcccgaaaacaactatctgccggctgggcctgatgaccaggacagaccctacaactactatgcgccactgcgcgacatctttatgagaccacgcttacccaacctcttgggccccactatcaccatcgctgcttcggcagccatgaaggccatgccacacaacttggtctcaggggtcgtgaccacctatgccaccaaatatgcttataggagcatctggtccacagcctactatctagccggtaatgccctcattagtgtcagtcgcatagccacaattgctgctgctgtccgtggcttgacaccaacagccatgactgccagcattgcaatgagggcagcagactttggtggcaatctgttgcaacacgcagcgcgggtaactcatcctcgcgcaatgcatgtggcggccattgttgatggtaccatggccgctgccaacagacttgcctacccaatgctctgcatcggggctgtctggggactgtatgtcctggccaggcatgccatagagccaccaccatatgaggcaccacctggctgctatcccaatggtggccccatcgtggagattacgcaggaagaggcccccaatcgtgaaatggtctttacctgtccagcacccctcgcccggctagtccaagagagagtgctgctctgtgagagggacccaacaatcatccagaaggtcaaatcaattgcctcccgctggtgcgatgcagctggcatccaaggaaaccaacgctatgccgccatctgtggcgctgtagcctctgccttgaccgtaccagttaatgaacagctggtcttgcaactctcacagacacatgcagttcaaacacagtactcaagactagcacgctatctctctggcatcaaacacacccatgatgcctggtggactaagtacttctccatcaggcgctaggccaggtggagggatgctgactgc

SEQ ID NO: 2651 - DNA, 1000 bp, unidentified
  source 1..1000: mol_type = unassigned DNA; note = unclassified Riboviria sequence
ttaaagacttctccatgcgaaacatcatatggcttattgaattctgctatactatgctatctaacatttatacaaaaactagaaaaatcatacgccgcttacttaaacgtctcacaacgagcacatgctcatccctcacagcgatactggcctgccttacgttattctgtcgcgaaattcatcagtatgttagcaatttccagcctggtaatacccctacaggtatacttcttaaccctgtcctactctgcattaaacacatggctgaattcatacacaaatctattccagctatattcccgtcggtttatgcctggatcaaccacgatccttatgtcagcgctatacaagattctctcatctccgaccatggaacaactattcaaactcagaactctcagctggatattaagtttgtacaacatcgcattggcgctgtatttcggattactacagaatcagataccaggtatgtatactgcggagatgaagtcacagcggatatccatatggctaagcgaggagcccgctatgctccagttgatggaactagtacctttgaatgcacatccgaccctgatgagacccttagtaaggttgatgagacctacattacgacaattgtaaacattgtggaagaaaaactgaaagacaatgagaaaattgcggaatttaccctagtacactttgtacaaacagtacaatctactggtacccgaattaggaagacacgagcagatatcagtcctgaatttatgagtaatggtgcctcttaccaaaatagtggcaaactttctatagacgttaatgtcgcaagacaaatggtaactcaaagagccactccaaacctggtccaatctcaccattacggttttctctaccttatggcctatgtatcaattaactccgagcaaagcgtaaattttcaaacacaaaaacagtcgattgcatcccggatttaaaaccccgaggcatatccacagtagtagtaaagaaatac

SEQ ID NO: 2652 - DNA, 1000 bp, unidentified
  source 1..1000: mol_type = unassigned DNA; note = unclassified RNA viruses ShiM-2016 sequence
attagcctaatacgtgaagtgtatgagccgggccctccggggtcgcgctcggcggcggtttaggtagaggtgggagcgcacggcccaactccctaggctgccccgagcaacaatacctgttggttttcgacacagagccttcagggtccacgtgtccggtgcgcgcctcggcgggcgcgcactgcaagacaggagtgccgccggcacgtggatgtgagaccgctccgtgcttattgctttgcgcggataggggtggcggcacggcgggcattgaggagcaagggccggtgctcctcattgccgcgtgccggcccgagccataccccgaaggttgccttatgcctgagtagccgagggtagttcggtgaacagcctggaagccgggtagcgccggtgacggtgagggcgccactgtttcccagcgcgtgggttggcctcttgggaggggggccgtaaaatggtggtttcgttgtgtgagtggtggctcgaaggacacaggcctgcgaggccggctctgcagtgttcgctgcgctgcaaccgggatatgtgggtactggtctggatgtttcgttcgcgtagcgcgcgcgggtgaataactgctggatggctgcacggcgggcattttgccgcgtgacggcttgaaggtggcgcacaacgacaaatggcatcgcgggggtgacggcccgcaacaacgcgcgtgcagggggacgccccccccattcgcacttcacgatgcatgtgggtatgtggacttagcgaatccgttgcagacccgttagctggtggcggcaccagctgaattcaccacattacaaaacaaaaatcgcaaaacgaaacttagcgacggggcaagccccggaagataaaaatagcataagtaaaacccaggcgtcctcctcaaggtgcatctgtgtcgcattctgacgcctggtcgttgtctccggctgccgccgggggttgaacgctgcgaagtgatttccgtattgctggtcgtgaaacg

SEQ ID NO: 2653 - DNA, 1000 bp, unidentified
  source 1..1000: mol_type = unassigned DNA; note = unclassified RNA viruses ShiM-2016 sequence
aggaaaaggccttaataatgtgcagcgtgctttccaccttgaagccaaaatggcagacttcacccacccagtcgtctactctatcgacttgtcacgctttgaccaacatgtatcccgtgaactcctcgagattgaacactctgtctatctttcgtgcaatagcaatgactattttcgtaatcttctcaaggagcaattgaacaacttgtgctttacgcgcaatggatggggatataaagtgcgtggatgtcgcatgagtggtgatatgaatactgggttaggtaactgccttctcatgtacctcatgacaacgtcagctatgaggtaccttggcttagcaaagtatgagctctttgttgatggtgatgacacgctaataataattgaggaacatgatgagtggaagctttcgggcctcactcaagagttcctccgttatgggcatgaaatgaaactagaaaaccgtgcgacctcaatctccgaagtcacctggtgtcaggcaaaagtcgtatatgtcgatggcgtaccaaaatttgtggctaatcccactaaagtcctttcgacagctgtagctggggtgcgccattggcatgacaagggacgccaaaacatgggctattcccttggacaatgtcttttgtccttgtacgcgggtgtgcctatcctccaggctttctgtgaatctttaacatcacgaggtaggtggaatgatgaggtcatgtggcgcgactggatttatcggctaaccatcgaacaggcgaagaacgcaaaagttcgcgaggttagtatcgaaacccggttagctttccaacgcacgtggaaaattagccccgaggagcagatggctgtcgagcgccaactcctcgactgggatataactgcagatccagtatggtgccagtcacaagtgcgacagggttggttcatcgaccctgatattcgtgctggcccatgggcgcgcggtgggtatgacaacccactgacaacgttctagtccact

SEQ ID NO: 2654 - DNA, 1000 bp, unidentified
  source 1..1000: mol_type = unassigned DNA; note = unclassified Riboviria sequence
gggtaggttagcatctgccaccatgatcgtgtgttaggcacgtaaaacctacgttgtcagtacggacatcgttaccaaaatcgtacggagtgacgtctccatctcagtcatccgtggctggacaaatagctaacaccttttcactgttactatggccacaactaccgattcaccgctactgcccgtcgggctcaacactcccaggttgtccacctggaaccgcgcactcattgccactaagaagtggtggcaaaatttgtgcgagaaatcggaagttacacagttgttgtgctgtgttgacgccactgaggccgacaattatcgtcgagacactcgtgtgcgatcagagattcgcgaagctatgcgctcgcagatgggcttttacggtcagcccacatgcattgcagcggtcatgcatgaaacaaagcaggagcataattatgctctgggagctgagcaggaggatgtcattcgtatgactgccgctcaatgggatgcactttttgtgcaataccgcttccatgcgaacacaccttcagcccaaattttggctgtggcgaagaaggtggttgcaccggcgcgtgttgtgccgaagtttgcagccgccgtcacgctccacatcaaggccaaactgggtgtgctcgccaagaccgaggcaaacctgctgcttgttcaacgcaagtatcttgaggtttgccgggaccaccgtgtgcgtgatgttgacgttgtgtcacacatgcagtttgtgcagaacgcatatttcacggaagatgtcctcgagcggctcgccaaaacgcgacttcgcgcacctgcgtggttacgccttttcgaagagaaggagcgtaccgccacgcttgaggtgtgctgagggcgcccggttcgggttcagggccagaacacaagtgtgtcaccacagcttcggttgaagcgtgacaccctgtgtgctggtaagttgtccgttcacaggaacgggctgctcgcaaaaccacgccaatttgtg

SEQ ID NO: 2655 - DNA, 1000 bp, unidentified
  source 1..1000: mol_type = unassigned DNA; note = unclassified Riboviria sequence
aaccgcaggaagatgatgtgtctgtagctgaattaaatacccacttttccaatatgatcaataagcatggtcggaaaggctacaaactatcattcgacgagggtcagaaacgagtcggattactcaaacgtcccatgaactgtacttggaacaaatttctcagtttgtggagacggcctgtctgcgtgatggataggtggtgttcaaaatactttgacgtatttcgtcttttcaataaacttgttatttttgatgtttatgagaagatagattctgataagtatactgtaatgttgaaacataagatgcgagcgaccaaatattgcagccgcgctgatgttcatgctgtcatcgatttcaaacatttcgaaaagatagtcgattgtcaacattttatctacaaagaatttgacgtagctactaagatgcttagggccgcacaaccaaatatttttgaactccaccaattcatggatgttgaaacagctgaggccgaattgacgatgaaagagagtaagttggaattagaattgttcatccaactcactcatattggtttacttgatagtacgatgacacctgaagatgcgcatagggcgatagtaaggaatgcaaaacgtttatgtactgttaactacaaccgataccgtcatttggtcacaaaccatcttcaagtgatgtcacttcattatgctaaggcatacttcaatcatcagttacttgaagttgtttcaactctggattttcaccgcgcctccccacaaacacgcgattctttgcgcttggttatcgctcacgggaaattagagagctttctgcacctattcaaacgaaaaacgggcttaagtttagaaatgttaggaacatcaactttcgtcctgttcgtggtgtggaaatggtttctacgggtcctcatgttgaggggtattgcttacctcatatcgacacaagagaccctgcttccctgtttgatggcgtgcgtgcacgtatggggaaagtg

SEQ ID NO: 2656 - DNA, 1000 bp, unidentified
  source 1..1000: mol_type = unassigned DNA; note = unclassified RNA viruses ShiM-2016 sequence
tcactactacgctttcgtttgtgtgggaacggttggggtcatattattcagcgaaagttctctgtttgtttaagcgagtttcgctgcatgcctcattacaatgaggtctacgctgtccagctttattccagctgcggccgctacatcatccaccttcgattcaggcttatagtcacgcagcgctcctctttggtagtgagtgttgtgcccatagccattcataccaccagggccacatgagtagtggcgcttctatagcgcttacatttctagtggtcatcctcatatttgcctgcgggtttttcattcagtggtgtctcatcaagcgcaactagtagccatggcaatttcttataagtttgtcgcgccgctggccattattccttgctattatgcgggacgctgggcgctcgtgaggtacggcaactcacatggctggtgggataccaagacagcttgctctgatgctgtcattggcattgccaccgccattgagcagcggtctgccggtagggacccctccgaccttctcagggcgttggagttcgacggggaggtcgctgacaatctgcacgaggagctggccgaggctgcgttctacgagcgaaagtcctacgagagccggcacttctaccgccactggattgcagccgttcgcatggagtttcctcttcggagtgatcgtccatccgataaggcctgcatgacaaagtggttggtgggcaagatgagggcaaagggcattcgcatcactcacattgaggatgctgtgccccggatcgtggcaatggccatcaaccccagccgtgctgaggttgaggctagggagatggccgaggctgccgatgcctggcgaaccccccccgcccttacgtgggtggagtggttgctaggcatgacgccgaagccgacttccgcgtcgaagtgggaatagtggtgccctgtggctgcgcctcagcgtgctggcgatgttggtggcattgcgcgccatctcgccgac

SEQ ID NO: 2657 - DNA, 1000 bp, unidentified
  source 1..1000: mol_type = unassigned DNA; note = unclassified Riboviria sequence
tcccgtgtcaggcacccccagttttcggccttgaagcacaactgcatccccacattggatagcgcagacatatggcgaaatgctaagtacccatcgagtccgtttgacagttgcaatggcctggcacaacattgcccagtaaagtcatccttcccaggggctgctttaatacattcagattattatctgagttctgaggacttggcagccgtcatcaggtcgcacactttcatagtcacccacccatttgatggggaggaagggtgtttcaatgacgagttacattggaggaaagagggaccgtacatacgtgcgtggactgatgatggcacgccgtacaagcacttgtaccaccattgggaggctgaggggtgcataattgggagacatggagccgccacttacgtgagggtgcacagggggccgagcatggatgtgtactactgctttccatcaccaggcgtctaccgatcagacgacccgctcaggttgagaaggagtgacgaagtgctgatgcaccgattgcctagcgggaatttttattcagtgactaatggtagtgcgaagatctatgaccccgattttaaagtgttgcaagagataccgcatggcatcttacaacgagtggcagccaggtgtgggacagccgtccgtgatgagaagtttctaccggcgctggttgcttatacaacaacaaggttcacagcagacaaccaagacttgcatgtggtggaggatgtcatatcggtggccctgcggcatagcgacatgtttgccttgaatgtgtcttccaggtacattaccaatttcgatcccatgcgaatcaccaactttcagaggctggtgtgggtgtggaatgacttgcgctccagcttgagagggtattggaggttgcccctgacaactagcaacccactagtcaaccgtgtcactaccccttgggcatttagtcgtatatccgtcaacagttacgttcgtttcacccattatggactggtag

SEQ ID NO: 2658 - DNA, 1000 bp, unidentified
  source 1..1000: mol_type = unassigned DNA; note = unclassified RNA viruses ShiM-2016 sequence
accaaagtgcaagagttcgtttgtgcctcggagcaggtagtcgagggagactactcaaacttcgatggcagcgtgtccgcggatgctcagaagtgcgtgatgaacgccgtttatcacaggtatttccggagtgagttccaagaagaactcaccggctacaccagcatgctcatcacttgtcctgctaggtccaaaaccttcgggttcaagtatgacgctggtgtcggagtcaagagcggctccccaacaacctgtgacgcaaacaccgttctcaacgcctttctgcaatacatagccgtaagacggacactgccagagctctcaccagaagacgccttcctccaaataggattggcgttcggggatgactctctttgcaacagtcagttctccaaggcttggaccaaggcagccacccaactagggttcgcactaaaagtcgaaaagtgcgctcctgacacgggtgtgacattcctggcccgggtctacccagatgcgaaagcaagcctgacctccttccaggaccccgtgcgcacattacgcaaggcacaccttaccgggcgggacccaaatgtcccactcccggatgccgcgtgcgatcgcgccgagggttacctggtgaccgataaggagactccggtactgggtgaatacttccggttcgttttgcgccactatggaccgcaacggaccgcgaaggtgagagccgacagttgcagtgagaagccatactggctgacgcaaggcggaagctggccccaggaggcaaaggacttcgacttgatgctacactgcatggcagcacgcacaagcttcgaggtcgagaccttacgcgccatggaacttcactacaagagcgcgaaggacccctggacccccttaccttgggtgctgggagatgaggacccgacgcgggatacgcttaacgccgagggtctcccaagcacgggggcggtggactcacgtacatatgaaaaggacgtggagagagtaatccgtg

SEQ ID NO: 2659 - DNA, 1000 bp, unidentified
  source 1..1000: mol_type = unassigned DNA; note = unclassified Riboviria sequence
tgagtgtaaaaatgggaggcccgtcccagtccaccgaattaccttctttctcacacttcctcggtgtgggatatgagccaatttgcgggccgctgccgggcggctgaaggtgaaggccacgcccacgccacgacccgtggctattcggggcgcatcctgcatcctatcgggattaaaggttgaaggagcttccaagtaacccaacaggggctctggaacctagatgcagggtgggtgactacggcccgacgatcacggaatgagcacccgtgtgtcactcatttgcacggcaaggtgggcatgccaccgtgtagagtacgtcggttgggaacatgtcaagaggtggcttctcggctaagccgatggccagggttttagagcgcatgtatagaatgttgctagtgtttgctgtagtttttggtgtgttagaaatcttttgggttgcgtttgggtttgggtgtgcactccttcaaattaataggttacccctcgcctactgttgcaatcagcttcgttctcggtgagctcaacagcgactgtcaaccgacgcggtgtggtgagccgtcattggaggagtggtctcctttgattggcacgtactctagccaagaggtgcgactggtagaaggcatcgaacattgttaatcgtcctgtcttgtcattctcgtccatgacaagtttcgcatagaggccgtaatcagttcgattctttcctgggtgagctattcctgcgcttgtcggaataactctttgcggtggaagccacatcggtgagctcaaatgtgttttgggtcgcgacgcgggaagcggaggaggggccgaaaggccactcgtacgaagccaagggtattctgattgttgaggttgggtcgggcagcacccatcgccattcctcaatccacatgatttcacacacacactcacacagccacaacagcggcatgtattttcaagtgtccctcgcgcattgggtcttaggattttcggaacattcttcacc

SEQ ID NO: 2660 - DNA, 1000 bp, unidentified
  source 1..1000: mol_type = unassigned DNA; note = unclassified Riboviria sequence
gggggctggcgtgcgctagcgttgtcaaggacggcaagctggtgcgacagaagttattgcaattggatgagattgcacggggcgtggacatcactgatgaccacctttacgaccccgtgcagtatctgtccatgttcgagttgggcccattggagccgagcttctcgaacgtggcaggacggctctcaaaagctgttgagtacaacaatcgcgcaggcctcccgctcgaggatctgcgacaaaagcttattgagtgcgtgtcgagtgggcagaagtgtgcgaaagctcagggccaacccggtgcacaccattcccaggacaagggaaagggccggggagcgcttggacgcagcggtaagggggggcagacagccgcctcccaccactaggtggtcatagcctcctgttgcaaacacgcagtgcttcggcactcgcagcaggagggcgttggagcgtggggatcgccgtcggtgtgggaatccggcggtgacggcgtcagtcgtggggggttcggcccttatacgacaggctgatgtacgaagtaactggtggcttaggctaccaccagcgaaagaggcccgtggctgcggtcgcctcttttggctgcttggttgttgaccgaagtgagttgcgctactttggatgttgaatttagcctagtgcttcattcgacgccagttttgcgcgatttatcaacaatcgagttccccgaaccgacaccctgtgggtgctcagcttggaagcgggtcgtgatatatgattagcaaatacgcgggctatacttgagccgtccgtgatcactgcaacggataatgtcacgccgtggaaaggtgaaccacctatcacgttggtaagggtaacccggccgggatgggagcacattcaccatgtgcccggccactccatgtagctcaaaggcacagattaaccagctacaagcctaaaggaacctctcctgaacgcaccgctgtcgaacgacagctacaacgactttttcgct

SEQ ID NO: 2661 - DNA, 1000 bp, unidentified
  source 1..1000: mol_type = unassigned DNA; note = unclassified Riboviria sequence
tccttacaggatgggttaaaagcccttgaacctgttaaagctacatttttgcgtacgcgcaaacgtgatagtttcactgatgaggatacaatcataggttccccttacgggtcccatcaattgtctccttgtactgccagctttagtcgtgagactgtggctcgtgcacaagtgtatactattttaacagctgaacaggcaaaaatgaggcgttacttacttggtccagttacaaccgcatgggaacttgttcctttgtcttttgttgttgattgggtcgtacaagtaggcgattttatcgcttcatttcgtatgctccccaaagagtcacagggaataactttttctgtgaaagataaggtggaaattctagcggtcgctagtgcagactctaaactaatcatacgttcggacggttatattgtgtccagaattgatggtagacagagtttgagctactccaagcaacgttacacgcgcggggtaattccaaatgattttaaacatgaaatcccggttggcgttcaaatgaacctgtgtcgtactattgacgcattttctctcgcttataaaatcggactaagccaattaaaaaggagacattaacaatgtcacaatacaaaacgcgtactcgcggagaagccaaaactgtgcttgttaatccgtcaagctataaatcaacgcttgaggttatccacagtttcaaacgagacacagcccttaatcaggaccaagtccgaatcggtgttgcttcggcatatactgatgtagttaaaacctgcaaggactcctgtggcgtgccacgtcgcgagctggttaagcttgaaatgcctgttttattaggcatggacgaagcttattacaccagaaagaaacaacagctgactgacgttttagcgtcgggtcagaaacttctcgaagcattcgatgatgtgcagattggaatcattcctgatctgaacgtcgaagctactgtcgcttaacaataaggaatataatt

SEQ ID NO: 2662 - DNA, 328 bp, unidentified
  source 1..328: mol_type = unassigned DNA; note = Picornaviridae sp. isolate ybw202shi02 genomic sequence.1 sequence
ttcgtccgaccactacatccaaccaacctcctcgcttgattggttgaagtatcatactgtccgtggtcccaaaaccttttacatcgagattctctcatcctgtgctagtgcccatttacttctaattactactcgaaaaccttcttacatcagcgagagcgccgactttgagacaccaacttgcgttgagctacccgctcctctagacgtctccattccccttcgagatcgtcttgttccgaagaaagcatatgacaatgcgtttgtctatgttcgtgctgttcgcacccttcgcaagactgatccagccggctttgttcgcacccag

SEQ ID NO: 2663 - DNA, 354 bp, Pegivirus B
  source 1..354: mol_type = genomic DNA
acgacgcagtctcaccaatggactggcacggtccacaggagttgtcccttccggtgtgaataaggggccgtcacgagcggtgacgtaaaactgagggagattaggccagggtaacttggcgtgcgtacggccacgtcgcttctagatttcaatgccactcttgtggggcgagttgtcaaggccagcacggcggggcccccatactggttgggggtactcaatcgcctagtccagattatgccatgtttcccccaggcgggcgtagcgctacatgcggccaagaggaaaatccctatgggtgacctcgggggaaccttttcttttttagcggtcatggggtggtgtaccgcaacc

SEQ ID NO: 2664 - DNA, 365 bp, unidentified
  source 1..365: mol_type = unassigned DNA; note = unclassified sequence
ccatcatcaaatatatacggagttttacgacacatacaacgacgcatgcgcaaccccacctacggttgcccgcgcatgcacagttgctgacatgcgcagtaaaaccaggaaatgactttgcattttcaagaaggtcacacgtaagcggatctctccgggtttttaaggctttttaagcatttttaccggatttttgacgtttaattattatctaaatgactcatctcatccctttaaatgtgctaacctgcaaggggacggtagagctgctttcctgcgactggtggaggtctgcgttggtttcacagtgggtaagtgagcctttttctgcctacttttatttctagacagattctgagtggctt

SEQ ID NO: 2665 - DNA, 383 bp, unidentified
  source 1..383: mol_type = unassigned DNA; note = unclassified Pestivirus sequence
tgtataaggaaggggtgggagccttccctatacttgtttacaaataccatacagtgttacagcagtgtgtagtttactatgcaggtttgaagggcggggatagtctgtgccagcagacgtgtaccagcacttcagaaggaacctgcaactgcgaaccgggagagcatctagagcccctaagctgtgagtacacagcagccgtcagagagtcagctggaaaggatcacccacctggaagctctcgtggacggggtcatagaccaagggcaactctattgaggaggtggggtacctcttcatacaccccagtggtgtgatgtgctgcctgacagggtcccggctgatggcccggctagcagtataaaaatcagttgtaatggcac

SEQ ID NO: 2666 - DNA, 397 bp, unidentified
  source 1..397: mol_type = unassigned DNA; note = unclassified Picornaviridae sequence
gtaggttatatggagttcatgctcgttctgaaccgggaatggcacaacccgtagtaggatcttgcctctgccatattaatctgcgcctgttgcttctagactatgggctgctaaggatgatgttggaactcctttttggatattccatatcaagtcaactgtttcacctggtgtacgctggaaatccatgctttaagtcctcatccggaggtggtgctgaaatattgcaagccacggatgactcttgaagcctggtgccgctactaggtgttacaccctttatgggcaaatgttgaaccttagtggacgcgtgagatgggaatccacgcctggccatagactggctgataagctcgcggctgatcgagttgcaacagtaatcagttgatttgccact

SEQ ID NO: 2667 - DNA, 415 bp, Passerivirus A
  source 1..415: mol_type = genomic DNA
tcctcacccatgcttttcctacccccaccacgcccgcatgtttactgctttccttgatgctgcccgtgactacttccatgacctccccaacccaaacctcaaacgccttaagctatcatgggctctctatcaccaatccccttccttcccacccagaacccccccctccctcccctacaacgtgtatgagcaagacgagtttgacaagctcgccgaagccatgctcacccactctcccttccccacatcccattacctcttccaccccctcccgtccaacgcccgcaccatcgtcgagcgtgaggctgactgggatggctgtgatctagaaaagaaatggctcgacctcgtcatagaggacgatgccaagttccttctggagaacggctctctcccgtttggctccacccttgcc

SEQ ID NO: 2668 - DNA, 415 bp, Passerivirus A
  source 1..415: mol_type = genomic DNA
tcctcacccatgcttttcctacccccaccacgctcgcatgttcactgctttccttgatgctgcccgggactacttccatgacctccccaaccccaatctcaagcgtcttaagctgtcctgggccctttatcatcaatccccctccttccctcccaaaacccccccctcccttccctacaatgtgtatgagcaagacgagtttgacaagctcgccgaagccatgctcacccactctcccttccccacttcacactacctcttccaccccctcccctccaacgcccgcgccatcgtcgagcgtgaggccgactgggacggctgtgatctggaaaagaaatggctcgacctcgtcattgaggacgatgccaagttccttctagagaacggctccctcccgtttggttccacccttgcc

SEQ ID NO: 2669 - DNA, 425 bp, Anativirus A
  source 1..425: mol_type = genomic DNA
cccccccccataccttttccccctctttaacggcaatggttaatggactaaggataaaggattatggacttatatgatgtgcccgacatggaattcgggaaatctggatctaagggttacctcaaaggtagtgaaattccctcgcaggggtatagtagctagctttgtgccttagtgaagggaccgtgtgttctagacatggtagttgtgtaggtacaagaggacttcatttgaatatcctcgatcccggacctaaattaccttgtggatttccggaggaatttaggaaaccacctccttcgggaggctagtaggagcttacatgactctcggattgggaagtccgagctggaccatgactgggtgatagcctgccggctggcgcagttcacatggtatagtcagttgaaaataaatagaaaatc

SEQ ID NO: 2670 - DNA, 430 bp, unidentified
  source 1..430: mol_type = unassigned DNA; note = unclassified Picornaviridae sequence
ccacccccctttcaacggctggcccacgatacgggccacaactttcctatcatcttctcatttcctataggttcggtttaatggttttgacttctgcattaataatggttttgtatgtggatgaccgtactatggatttggtgtgttaagctcacgttaaaaagctaggtggaatggatttgctacctggatggtcccccaggattaatggtaactccctctttcaccgaagtcaggaggaagagtagatgcttctagagttctgtgctctgtattacacagcaccgctcagctggcgtggacttccggccattggttgagttgacactaggagtagccagtactgggataactggcctggtctatactgctgataaggtgggttgcctgaccctctaaacctgactataattcaggctgtcttgatgcg

SEQ ID NO: 2671 - DNA, 461 bp, Melegrivirus A
  source 1..461: mol_type = genomic DNA
ggcaagttgatatactggctctgatcacggactattctggtgttggtggacactctctccacaagtaggcgccgtggagttcatgctcgttctgaaccgggaatggcacaacccgtagtaggatcttgcctctgccacgtgcacctgcgcctgttgcttctagactatgggctgctaaggatgatcacagactcctttttggacaatctgtgtcaagtctactgttacatctgatgtacgctggaaatcctcgtactggaggcaatacctggaggtggtgctgaaatattgcaagccacaggtgtgtttctagtcttggtgccgctatcagatgtcgcaccctctacgggcaaatgtagaaccttagtggacgcgtgagatgggaatccacgcctggccatagactggctgataagctcgcggctgatcgagttgcaacagtaatcagttgatttgccact

SEQ ID NO: 2672 - DNA, 493 bp, Foot-and-mouth disease virus
  source 1..493: mol_type = genomic DNA
cttgaggaatacttgtacaaacacgatctacgcaggtttccacaactgacacacacaccgtgcaatctgaaactccgcctggtctttccaggtctagaggggtgacactttgtactgtgcttgactccacgctcggtccactagcgagtgttagtaacaggactgttgtttcgtagcggagcatgatggccgtgggaactcccccttggtaacaaggacccacggggccgaaagccacgtcctaacggacccgtcatgtgtgcaaacccagcacggcaacttactgtgaaaaccactttaaggtgacactgatactggtactcaaccactggtgacaggctaaggatgcccttcaggtaccccgaggtaacacgcgacactcgggatctgagaaggggactggggcttctttaaaagcgcctagtttaaaaagcttctacgcctgaataggcgaccggaggccggcgcctttcctttaaactgttttaactta

SEQ ID NO: 2673 - DNA, 502 bp, Enterovirus J
  source 1..502: mol_type = genomic DNA
aaaacgatcgttacccggctatctacttcgagaagcctagtaacaacattgaaactcttgagcgttgcgttcagcacagtaacccctgtgtagctttggctgatgagtctgggcactccccactggcgacagtggcccaggctgcgttggcggccaaccgatccgggcaaccgggtcggacgctcacttgtggacatggtgtgaagagcccattgagctagatagtagtcctccggcccctgaatgcggctaatcctaactccggagcaaacgcacgcaacccagcgtgtagtttgtcgtaacgcgcaagtctggagcggaaccgactactttgggtgtccgtgtttcctgttttaccttatttggctgcttatggtgacaatctagagttgttaccatatagctattggattggccatccggtgaatagatctcgatatattttattgcacagccttttatagcttgaattcataagtctcacttcaactcagaagtaatc

SEQ ID NO: 2674 - DNA, 506 bp, Foot-and-mouth disease virus
  source 1..506: mol_type = genomic DNA
acgaaacgcgccgcctcttttggacttcttgtacaaacacgatcttgaagcaggaatcctcaactggcacacccgtgcaactgtaagtttcgcctggtctttccaggtctagagagatgagcagctgtactgagactaactccacaattggtctactagcgggtattagtaacactcactttgcttcgtagcggagcacatgagcgttgggaactcccccatggtaacatggacccaacgggccaaaagccacgcctcgtgcctcatgtgtgtgcaaccccagcacggcaatttgtttgtgaaacacaccttaaggtaacactgagattggtacttggtttctggaggcaggctaaggatgccctttaggtacccggaggtaacaagagacactctggatctgagaaggggaccggggcttctataaaagtgcccggtttaaaaagcttctacgcctgaacaggtgaccggaggccggcaccttttcccatctacaacttttatct

SEQ ID NO: 2675 - DNA, 507 bp, Foot-and-mouth disease virus
  source 1..507: mol_type = genomic DNA
acgaaacgcgccgcctcttttggacttcttgtacaaacacgatcttgaagcaggaatcctcaactggcaaacccgtgcaactgcaagtttcgcctggtctttccaggtctagagagacaaacagatgtactgagactaactccacgattggtctactagcgggtattagtaacactcactttgcttcgtagcggagcacatgagcgctgggaactcccccatggtaacatggacccagcgggccaaaagccacgccttgtgcctcatgtgtgtgcaaccccagcacggcaacttgtttgtgaaccacaccttaaggtaacactgagactggtacttggtttctggagacaggctaaggatgcccttcaggtacccggaggtaacaagagacactctggatctgagaaggggaccgggacttctataaaagcgcccgttttaaaaagcttctatgcctgaataggtgaccggaggccggcaccttttctttttattaactttaaatct

SEQ ID NO: 2676 - DNA, 507 bp, Foot-and-mouth disease virus
  source 1..507: mol_type = genomic DNA
acgaaacgcgccgtcacttttggaacacttgtacaaacacgatctaatgcaggtttccttaactgacacacccgtgcaatttgaagtttcgcctggtctttccaggtctagagagacaacactttgtactgagactgactccacgattggtctactggcgggtgctagtaatgactttgttgcttcgtagcggagcatgcaagccacgggaactcctccttggtgacaaggacccgtggggccgaaagccacgttctctgaaccttgcatgtgtgcaaccccagcacggcaacactgttgtgaaacacactttaaggtaacactgagactggtacttggtttctggagacaggctaaggatgcccttcaggtacctcgaggtaacaagagacactcgagatctgagaaggggatcggggcttctgtaaaagcgcccggtttaaaaagcttctatgcctgaataggtgaccggaggccggcaccttttcctttaacactacttacttt

SEQ ID NO: 2677 - DNA, 508 bp, Foot-and-mouth disease virus
  source 1..508: mol_type = genomic DNA
acgaaacgcgccgtcgcttgaggaagatttgtacaaacacgatctatgcagacttccacaactgacacaaaccgtgcaacttgaagctccgcctggtctttccaggtctagaggggcgacactttgtactgtgcttgactccacgctcggtccactggcgagtgttagtaacagcactgttgtttcgtagcggagcatggtggccgtgggaacccctccttggtaacaaggacccacggggccgaaagccacgtcctaacggacccaccatgtgtgcaaccccagcacggcaacatttctgtgaaagctactttaaggtgacactgaaactggtactcaatcactggtgacaggctaaggatgcccttcaggtaccccgaggtaacaagcgacactcgggatctgagaaggggactgggacttctttaaaagtgcctagtttaaaaagcttctatgcctgaataggcgaccggaggccggcgcctttcctttaaactgtttcaactta

SEQ ID NO: 2678 - DNA, 512 bp, Foot-and-mouth disease virus
  source 1..512: mol_type = genomic DNA
gcgcacgaaacgcgccgtcgcttgaggaatacctgtacaaacacgactcacgcaggtctccacaactgacacaaaccgtgcaacttgaaactccgcctggtctttccaggtctagaggggtgacactttgtactgtgcttgactccacgctcggtccactagcgagtgttagtaacagcactgttgcttcgtagcggagcatggtggccgtgggaacccctccttggcgacaaggacccacggggccgaaagccacgtccttgtggacccaccatgtgtgcaaccccagcacggcagctctactgtgaaaaccactttaaggtgacactgatactggtactcagacactggtgacaggctaaggatgcccttcaggtaccccgaggtaacacgcgacactcgggatctgagaaggggactgagacttctttaaaagtgcccagtttaaaaagcttctatgcctgaataggcgaccggaggccggcgcctttctccttaactaccacttctta

SEQ ID NO: 2679 - DNA, 514 bp, Foot-and-mouth disease virus
  source 1..514: mol_type = genomic DNA
gcgcacgaaacgcgctgtcgcttgaggagaacttgcacaaacacgactcacgcttgtcttcacaactgacacaaaaccgtgcaacttgaagctccgcctggtctttccaggtctagaggggcaacactttgtactgtgattgactccacgctcggtccactggcgagtgcgagtagtggtgttgttgtttcgtagcggagcatgatggccgcgggaactcctccttggtaacaaggacccgcggggccgaaagccacgtcttaacggacccatcatgtgtgcaaccccagcacggcaaccacaccacgaaaaccacttcaaggtgacactgatactggtactcaaccactggtgacaggctaaggatgcccttcaggtaccccgaggtaacacgcgacactcgggatctgagaaggggactgggacttctttaaaagtgcccagtttaaaaagcttctatgcctgaataggcgaccggaggccggcgccttttccacaatttaatacttctttt

SEQ ID NO: 2680 - DNA, 516 bp, Pegivirus B
  source 1..516: mol_type = genomic DNA
tcctttagaattaatggaacgctaggcttccggcccgaaagccgtggatctcccctgacagggttcttcgggtaaatcccggggggagtggtagcggtattagggtaggtcgtaaaaactgccccagtggggctacctagttgttaccggcaggacgaacggcgcgtcctgaaggactggcacggtccacaggtgtggtccctaccggtgtgaataaggggccgactcaagcggagtcgttaaactgaggctctagtgtcaagggtaacttgggcttgtgtacgtccacgtcgcttctagagttcaatgccagcactaggctggggcgagttgtcaagggcaacaggcgcgggggtggattattgttttccaccactcaatcgacactcgggtaatatgccatgctccctcccaggcgggcgtcgcgctgcaggcggcctagaggaaaaatccgaaaggtgacctcgggggggacctctcttctcttagcggtatgggtgtggtgttaccgcaacc

SEQ ID NO: 2681 - DNA, 520 bp, Megrivirus A
  source 1..520: mol_type = genomic DNA
ttcgggacactggatgggcgactcggtggggctgccaccccgtcttgacttctcgttgttgaccctggaattctagaacattctcttgtcttctgcgtctggtccacggacggactaattggaatgtttattggttaagcctcgttctgaaatgccctagccaatgggctatagtaggatcttggtgtttccagtgaacctcttccgaccatagtagctagagttatggctgtgtaggatgtgggtaagaccgctttttgcgtatctcccacaagacaccggatcatgggtgtgtccgctggataaggctcgaaacctcccaactgacggtggtgctgaaatattgcaagcctaagttgtgtagaggcaagtagatgcccgccgcgacatctgtgatccgcccgtctgggttagtagtgtacctacatggacgtggggttgggaatccccacctagcataacactggttgatagacctgcggctggtcaagttactatggtataaccagttgaaatggct

SEQ ID NO: 2682 - DNA, 522 bp, Foot-and-mouth disease virus
  source 1..522: mol_type = genomic DNA
gggacgtctgcgcacgaaacgcgccgtcgcttgaggaagacttgtacaaacacgatctacgcaggtttccacaactgacacaaaccgtgcaacttgaagctccgcctggtctttccaggtctagaggggcgacactttgtactgtgcttgactccacgctcggtccactagcgggtgttagtaacagcactgttgcttcgtagcggagcatggtggccgtgggaacccctccttggcaacaaggacccacggggccgaaagccacgtcctaacggacccaccatgtgtgcgaccccagcacggcaactttactgtgaaaaccactttaaggtgacactgatactggtactcaaacactggtggcaggctaaggatgcccttcaggtaccccgaggtaacaagcgacactcgggatctgagaaggggactgggacttctttaaaagtgcccagtttaaaaagcttctatgcctgaataggtgaccggaggccggcacctttcttttaaaccacaactatcctt

SEQ ID NO: 2683 - DNA, 527 bp, Foot-and-mouth disease virus
  source 1..527: mol_type = genomic DNA
tttgagaaatgggacgtctgcgcacgaaacgcgccgtcgcttgaggagacttgtacaaacacgatctacgcaggtctccacaactgacacaaaatcgtgcaacttgaaactccgcctggtctttccaggtctagaggggtgacattttgtactgtgcttgactccacgctcggtccactggcgagtgttagtagtagtactgttgcttcgtagcggagcatggtggccgtgggaaccctccttggtaacaaggacccgcggggccgaaagccacgtcctaacggacccaccatgtgtgcaaccccagcacagcaattttactgtgaaaaccacttcaaggtgacactgatactggtactcaaacactggtaacaggctaaggatgcccttcaggtaccccgaggtaacacgcgacactcgggatctgagaaggggactgggacttctataaagtgcctggtttaaaaagcttctatgcctgaataggcgaccggaggccggcgccttttcactaaccactacttttt

SEQ ID NO: 2684 - DNA, 529 bp, unidentified
  source 1..529: mol_type = unassigned DNA; note = unclassified Picornaviridae sequence
ttctttgaaaagggtactgggggggtcgattctagacccccacctagcccttttccccgtcagtggggggcttactcactgggcatctgttaatctggcctaactagattgacaccactcccttggaacgtaactccacgctaactcactggctctacgcacagacacacggtctttctgctatccccggggaagataccagatggcgaccggctgtcccagcggcctagtagctactcgggttgagtacccaccacggttttgacgcctgctaaaattcaagagacagaggtaggggtgcttagtgtgtgggggaagttcccacaagcgaggcaaagcattgctccctcgcgtcaccgggtgcaaggtaaattggctggacttccgctctacccttgctactcgccctcttcggagggttcgaagtgacactaggtatacgcatggttgggaaaccatgcctggcctactactgggtgatagcctggcggcgggtccgtctcttggcttatacccgttgatttgggat

SEQ ID NO: 2685 - DNA, 529 bp, Foot-and-mouth disease virus
  source 1..529: mol_type = genomic DNA
tttgagaaatgggacgtctgcgcacgaaacgcgccgtcgcttgaggatgacttgtcaacacgatctacgcaggtatccacaactgacacaaaaccgtgcaatttgaagctccgcctggtctttccaggtctagaggggtaacactttgtactgtggttgactccacgctcggtccactagcgggtgctagtagtggtaccgttgcttcgtagcggagcatggtggccgtgggaattcctccttggtgacaaggacccacggggccgaaagccacgtcctgacggacccaccatgtgtgcaaccccagcacggcaactttaccacgaaaaccactttaaagtgacactgaaactggtactcaaccactggtgacaggctaaggatgcccttcaggtaccccgaggtaacacgcgacactcgggatctgagagggggaatgggactcctttaaagtgctcattttaaaaagcttctatgcctgattaggcgaccggaggtcggcgcctttccattaactatcactcactat

SEQ ID NO: 2686 - DNA, 532 bp, Foot-and-mouth disease virus
  source 1..532: mol_type = genomic DNA
ttgagaaaaggggcgtctgcgcacgaaacgcgccgtcgcttgaggatgacttgtacaaacacgatctacgcaggtatccacaactgacacagaaccgtgcaatttgaagctccgcctggtctttccaggtctagaggggtaacactttgtactgtgattgactccacgctcggtccactggctggtgctagtagtggtactgttgtttcgtagcggagcatggtggccgtgggaatccctccttggtgacaaggacccacggggccgaaagccacgtcctaacggacccaccatgtgtgcaaccccagcacggcaactttaccacgaaaaccactttaaggtgacactgaaactggtactcaaccactggtgacagactaaggatgcccttcaggtaccccgaggcaacaagcgacactcgggatctgagaaggggactggggcttctttaaaagcgcccagtttaaaaagcttctatgtctgtgtaggtgaccggaggccggcgcctttccatttaactattacccaccat

SEQ ID NO: 2687 - DNA, 550 bp, unidentified
  source 1..550: mol_type = unassigned DNA; note = unclassified Aphthovirus sequence
ttgtaaccgcacggtttgccttcctgggggaagtaaaacacccacaagcttgacagttttgcccgttttcacgagaaatgggacgtcagcgcacgtaacgcgccgccactttggaatacttgtacaaacacgatcttacgcaggtttcccaactggtacactcgtgcaacttggagtttcgcctggtctttccaggtctagagggacgacactttgtactgaaaccagctccacgattggtctactggcgggtgctagtaatgactgtgttgtttcgtagtggagcatacaagccgcgggaacccctccctggtaacagggacccgcggggccaaaagccacgttctttgaaccttgtatgtgtgcgaccccggcacggcaacactgttgtgaaacacatcttaaggtaacactgagactggtacctggtttctggagacaggctaaggatgccctccaggtaccctgaggtaacaagcgacactcaggatctgaggaggggactgggacttctataaaagtgtccagtttaaaaagcttctatgcctga

SEQ ID NO: 2688 - DNA, 555 bp, unidentified
  source 1..555: mol_type = unassigned DNA; note = unclassified Picornaviridae sequence
ctgtgccttcctggtcataattggctccggctggttttgacttcggaacactggatgggcgattcggtggggctgccaccccttcttgctttttcggtgtgacattggaattctagacccttctttgtccctcgtgtctggtccacatacggactaaatggaatgtttgccagctaagcctcgttctgaaatgcccttgccactgggctgtagtaggatcttggtgtttctggtgaacctcttccgaccatggtagctagagctatggctgcgtaggatgtgagtaggaccactttttgtgtatccctcacaagacaccgggtagtgggtgtgtccgctggatatggctcgaaacctcccaactgaaggtggtgctgaaatatcgcaagcctaagttgtgtagaggaaagtagatgcttgccgcgacacttgcttcccacccttctctgggctagtagtgtacctgcgtggacgtggagttgggaatctccaccatgcatagcactggttgatagacctgcggctggtcaagttatcatggtataaccagttgta

SEQ ID NO: 2689 - DNA, 562 bp, Enterovirus A
  source 1..562: mol_type = genomic DNA
ccaccaacccaggtgggttttccgtcaagcacttctgtctccccggacttagtaccaataggctgtacccacggccgaaagggaaaacgttcgttacccggctacctacttcgagaagcctagtaacatcattgaatgtctcaagtgttacattcagcacaaccccagtgtagttcaggtcgatgagtcaccgaattccccacgggcgaccgtgtcggtggctgcgttggcggcctgcctgcgggtctcactcgcaggacgcttgattcatgacatggtgcgaagagcctattgagctaggtagtagtcctccggcccctgaatgcggctaatcccaaccacggagccatgcgctacaatccagtggtgttgtggtcgtaacgagtaattctgtggcggaaccgactactttgggtgtccgtgtttcctgttttatttaccttggctgcttatggtgacaatctagagttgtcatcatatagcgattggattggccatccggatatatcttttgtgtgatttacctcttgctaccaagcaattgtcacttgttaataatacc

SEQ ID NO: 2690 - DNA, 566 bp, Pegivirus B
  source 1..566: mol_type = genomic DNA
cgtaggcgcctgggggttcgggtgcaagccccgaaaccgacccttacttcgaacaaccgttctagaacggctgggtcaactccccctttagtcaaaagcccagtgttgctggggtgccagggttcttagggtaaatcccggccccagtggatctgggaatatgataggaggagcggtgcggttcgaccaccgcacgggaccactgaccggcttgacgaagcggctagtagttgactagggcacggtccacaggtgtggcgtaccggtgtgaataacggcccgtctggagcgacagacgttaaactgaggggggtgtgaggatggcaacgcggcccgtgtacggggacgtcgctaaataccttcgggaacagctatgcgggttgtcaaccccagcggtggcgcggcctacctactgttggcaggtgccagttccctctcaccctcgcgaaagcagcacggggccccccagctggcgcagcgctacatgcggcaagaggaaaatccttcgggtgacctcggggggcatgtcccaaccaaacatgatactaggggtagcaactgccaag

SEQ ID NO: 2691 - DNA, 570 bp, unidentified
  source 1..570: mol_type = unassigned DNA; note = unclassified Picornaviridae sequence
agatgtgtataacacacaggcccccttttcccgaccggtttggcacaccgggcggttaccctgattagatgtctgggaattgctggacttcagtggctattgctgctgtcttctggcttttctgaactgggcatctagttgggttctttgccatccacactctaattcccattacgttttctctaccccttgattggtctaactggttaagtgactccttgcctgcttttgactattcttggtgctggtggacactctttccacaagtagatggtatggagttcatgctcgttctgaaccgggaatggcacaacccgtagtaggatcttgcctctgccatactcatctgcgactgttacttctagaccataggctatataggatgatcttggacctctttttgagcatcctggtcaagccaactgtgtcttgcaacatgcacgctggaaatcctcgctagaatgaaatcctgatggaggtggtgctgaaatattgcaagccacatcggctttcattctcttggtgccgctgtgttgctacacaccccatgtgggcaaatgttggacctat

SEQ ID NO: 2692 - DNA, 579 bp, Aichivirus A
  source 1..579: mol_type = genomic DNA
gccaggtcgcatcgcctggttggtgaccaaactgctagatgctcctccctttccctcggggttggcgcaccgccatccctgcatcctccccccagcctgacatgctacaggctgtgcaagaaccccgcgaaagctgccaccgtggcaattgtgggtccccctcttgtcaaggcacagagtctttctcccttaaggctagacccctctgtgaattcagaggcggcaactagttgtgccactacatgcctcagacctcggtcgcggagtgctgttccccaaaccctgacactgccgcgtgagtatgctgcttggcaagcattgcctggatggtcgttccgctggggctgccaggtctggtaacagaccgctccagtgtgcgtagaccatctccagcttcggctggtgctcacaaggtaagactcggtgtaaggttcatgtgccaacaccctggaatgagtgaaaactctactgccctaggaatgctacgcaggtacccctgctcccttgggagccagggatctgagcgtaggctaattgtctgtcgggtagtttcatttcccaccctctagactgttcacc

SEQ ID NO: 2693 - DNA, 581 bp, unidentified
  source 1..581: mol_type = unassigned DNA; note = unclassified Enterovirus sequence
ttgtgtttgagtgttgtatactgttattacggtaaccttatacgccagttttatatcccccttaccccaatgtaacttagaagtttgtacataccgaccaacagtaagcaatcatccagattgtttaaggtcaagcacttctgttaccccggtcagcgttgatatgctccaacagggcaaaaacagcaatgatcgttatccgcaagatgcctacacagagcctagtagcactctagaagaattctggttggtcgctcagttgcaaacccagcaatagacctggcagatgaggctggacgttccccactggcgacagtggtccagcctgcgtggctgcctgcacactcctttggagtgtgaagccttaatttggacagggtgcgaagagccgcgtgtgctcatcttgagtcctccggcccctgaatgcggctaaccttaaacctgcagccattgtttgcaatccagcaaatatgtggtcgtaatgagtaattgcgggatgggaccgactactttgggtgtccgtgtttcttttatttccatttgtatgcttatggtgacaatatatgatatatattgacacc

SEQ ID NO: 2694 - DNA, 584 bp, unidentified
  source 1..584: mol_type = unassigned DNA; note = unclassified Avihepatovirus sequence
ttcagctggtatggcatgcatgcatcgactgcttgggggtgtccctgacccccttaattcaacgtctagcccacgatacgggcaccctatccagtttatatccctttacctcccatggactgacttgtatggatttggatctaaattggattatcatttatttgtggtggttagccaaccatgctctggtgcaatgattccatgtattcatttggctaggtgccgacctaggaggtggtgctgaaatattgcaagccactggtgtcgttacttagcatctggatgcatggggttgattgcattctgtacagaggaaggctagcttatgccttgggctaatagtctttgttgtgaaacggattaccggtagtagcatcttagaccaccaaggttataggtgagtgtgtggtctagagtaggcacacatctgtccaggcacatgtacattgttacaactgctccagactagttcctgagggacagatgttgtggggggcttgggaaaacccccttaacctacactgcctgatcgggtcgcggctggtcgagtcccacacactataataccagtagaccttcatgca

SEQ ID NO: 2695 - DNA, 584 bp, Parechovirus B
  source 1..584: mol_type = genomic DNA
ggtcgaagccgcttggaataagactggtgctgttcacagtgtgttcacgatctatgcaacttctgtcttccatctgtgtctatgcaggtggataagggctgtacccgggcggtcctactctccacaggggcctgcgtaggtggctttcacctctggacagcgcaccccaccccgcctactgagtgaagggcatacggcttttctattgcgaattgtattgaagtttaggattaggtgtagcgaccacatgtgtgccagcggatctcccctggtggtaacaccagcctctgggcccaaaaggcatgtctctgaccacacatgtgcacaaccccagtgataatcctttttagtaaatgcttagtaacagtggattagcagtgctcctcaagctcagtagggcttaggtatggcaggttgaaggatgccctggaggtacccgcaggtaacgataagttcactgtggatctgaccaggggcccaccgggaattccccgggtagaagccttcgggccttgggttaaaaaacgtctagacctgtcccccagagggatctggggtttcccttttaaccccaattattcaat

SEQ ID NO: 2696 - DNA, 587 bp, unidentified
  source 1..587: mol_type = unassigned DNA; note = unclassified Picornaviridae sequence
caatagggtaacctattgtaacttggacttattactttatcatatagtttattgtttaaatcggaactagtgtattatgtttaaataatatgtgttagcctttaaactttattctattatttgataaggttcaataagtttgtatgactagatccagtaactattgctcaattttaaaacaatcttaaaaatctgtatgaaacgcagatcaatttaatattttagaactacccgtatttatataggctcttctaaaatatgaattgttatcgaaagataccttattattggttgattaatttcttaatgtgcatggtggcacctttaataagtagatttccgtcattctctatttagagtacttttggacgttaactaatgctccattcagtctagaatgtatgataattaaactctagattgtataaactatcattatcgcaagtaccacatcaaataaaacttatgaaaaaccgcaattactcgatgataactttgctcctgatgttagtgatattactaatactaactttctcgaggaaagggtagtcgaaactagggaagcatatccatcaacatctcttact

SEQ ID NO: 2697 - DNA, 591 bp, Sakobuvirus A
  source 1..591: mol_type = genomic DNA
tcacgcgcttttccggtggtcacccaccgttagggagcgccagcgttcgcgcttccgctaccaggtgacacactcctttcccctcccccattcccgttcccatcctctggactggtttctcctcacgattgaccagcagctgggagctgttaccagacgttggacagtaagtcccggatgcactatagggctggtggctagtgcttggtaagcactcaacgccatacctaatgtgtacctcggcttgccctcctggtcgtggtgaccggctgtttctcttcccttggctctagacgggctggtgtcctaccaccaccgttgcatgcagacctccccctgcgcactcgaacgccctgtcccagcagggttagtatgtgctgtgcagatctgcatgtgacaccccatccactggtagagcaggaagttgccctagctaacgcggcaagtattactttccgctacacgtccttgagattcctcggacctctggaactagggtgactgtgggcttgggaaaacccaccttggtcctgtactgcctgatagggtcgcggctggccgaccagtggatgtagccagttgttttgggat

SEQ ID NO: 2698 - DNA, 593 bp, Foot-and-mouth disease virus
  source 1..593: mol_type = genomic DNA
acgaaacgcgccgttgcttggggaaaacttgtacaaacacgatccatgcaggtttccacaactgacacacaacgtgcaacttgaaaccccgcctggtctttccaggtctagaggggtgacactttgtactgtgattgactccacgctcggtccactggcgggtgttagtaacaggactgttgtttcgtagcggagcatgatggccgtgggactccccccttggtaacaaggacccacggggccgaaagccacgtccagacggacccatcatgtgtgcgaccccagcacggcaactttactgtgaaaaccactttaaggtgacactgatactggtactcaaccactggtgacgggctaaggatgcccttcaggtacctcgaggtaacacgcgacactcgggatctgagaaggggactgggacttctttaaaagtgcccagtttaaaaagcttctatgcctggataggcgaccggaggccggcgccttttcttttaccactactaaatttatgaatacaactgactgttttatcgctctactgcacgcttttagagagattaaagcacttttttcgtacacggacacaaggcaag

SEQ ID NO: 2699 - DNA, 593 bp, unidentified
  source 1..593: mol_type = unassigned DNA; note = unclassified Megrivirus sequence
acgatggcgtgacgaaccatcgtgcgtgactctgctaagtcgtctgtgcctctcgggcatgttgtggctccggctgcaacatgcttgggacattggatgggcggcttggtggggcttagtcaccccgtttaggactacccggtttgatttctttattggattttgggactggtccaccgacggactaattggtatctgcaaggactaacagcctcgttctgaaatgccctagccaaagggacgtagtaggatcttggtgttccccttgtagctctgccgaccatattagctagagctaggactgtgtaggatgttctagacctctttttgagcaatctaggacaagactccggatctagatgtgtacgctggataaggctcgaacactcccgcgcgttaggtggtgctgaaatattgcaagccgacgtgtgtgtagagttagtagaagcccgccgctacatcgaaatccgccccttccggggttagtagagtacctgcatggatgtgtggttgggaatccacaccagtgcctagtgctggttgacagacccgcggctggtcgagttaatatggtataaccagttgatttggca

SEQ ID NO: 2700 - DNA, 610 bp, unidentified
  source 1..610: mol_type = unassigned DNA; note = unclassified Enterovirus sequence
ttaaaactgggcatgggttgaccccacccatgccacccaagtggtgtagtgctcttgtatttcggtacatttgcacgccagtttgccaccccttaccccaagtaacttagaagcatgtaactttgatcaatagggagtggtaagccataccacttgagatcaagcacttctgtttccccggctctagaggaatagaccttgcaaagggttgaagccacgaaagtcgttatccgcacacatactacgcaaagcttagtatttccttgaaagctcgccggttggtcactccgttaataccccattaacagacctggcagatgaggcaggaaactccccactggcgacagtgttcctgcctgcgtggctgcctgcacaccctctcgggtgtgaagccgactagtggacaaggtgagaagagccccgtgtgctatgtgtgagtcctccggcccctgaatgcggctaatccaaccccacatctgtcgcacacaatccagtgtgtaggcagtcgtaacgggcaactgtgggacggaaccgactactttgggtgtccgtgtttcctttatttcttttatgaatgcttatggtgacaatatcgagtaatattgttacc

SEQ ID NO: 2701 - DNA, 611 bp, unidentified
  source 1..611: mol_type = unassigned DNA; note = unclassified Enterovirus sequence
ttaaaactgggttgtggttgttcccaccacaatcacctacgtggtgttgtagtcttgcatttcggtgcatttctatgccagttttatctccccagcccccgtaacttagaagaaaagaacacagaccaataggaggtggtcacccagaccacttacggtcaagcacttctgtttccccggttgatctagatatgctttacccgaggcaaaaactaaatcaatcgttatccgcaaagtgcctacgggaagcctagtagcactctgaaagcctatggctggtcgctccattgcaaacccagcaatagacctggcagatgaggctagacgtaccccaccagcgatggtggtctagcctgcgtggctgcctgcacaccctcatcgggtgtgaagccagaaagtggacagggtgtgaagagcctactgtgctcactttgagtcctccggcccctgaatgtggctaatcctaaccctgcagctgttgcacacaagccagtgtgtatgcagtcgtaacgagcaattgcgggatggaaccaactactttgggtgtccgtgtttctctttattccttatgttgacctatggtgacaagtgtgcaattcacgtttgtcact

SEQ ID NO: 2702 - DNA, 613 bp, Rhinovirus A
  source 1..613: mol_type = genomic DNA
ttaaaactggatctgggttgttcccacctagatcacctacagggtgtagtacactgttattacggtaactttgtacgccagttttatatcccctccccgatgtaacttagaagcaagcacaaacgtccaataggcggtgattatccaaatcacttacggacaagcacttctgtctccccggcaactgctgatatgctccaacagggcaaaaacagcggaagtcgtcatccgcaaaatgcctacgcaaagcctagtatcactctagaaggtgtgtggttggtcgctcagccgtgaacctgacggtagacctggcagatgaggctagaaataccccactggcgacagtgttctagcctgcgtggctgcctgcacaccctcacgggtgtgaagccattcattggacagggtgagaagagcccagtgtgctcattttgagtcctccggcccctgaatgtggctaaccttaaacctgcagccaatgcacacaacccagtgtgtatttggtcgtaacgagcaattgcgggatgggaccaactactttgggtgtccgtgtttctttttattcttatcatattgcctatggtgacaatatatactgttatatattgttatc

SEQ ID NO: 2703 - DNA, 615 bp, unidentified
  source 1..615: mol_type = unassigned DNA; note = Porcine pegivirus strain ND/33/2017 polyprotein gene, complete cds.1 sequence
ccgctacccccccagcccgtgtaccggccctcgggccgcacgggatggggggggtagcgggggccggaggcccccgcgttctagaatggtgtgatcggttgccgctccagcggaaagcgggcgggatctagtggttagggttgttcgcgtaaatcccacactagtggtacgctcgtataacgtgggagcagccgggggggtcggccccccccctggcagctgctgagcaccggacgaagcgcggggggtgaacgctaacccgcagcccgggatgccaacgttaggcacgtcttggctggaagacgttaaacacagggccctccctcaaccccgatccgagaccagagttcaaggtacgccgcccttttaaaggcgttactcgtccaataggtctctccggcgggttgtcaaaccttgctggttccggtgacggttacgaggcagggcggggtggggatttaaacccccatccggcacgggggtaccaagctcggcacgcccagcacgcgtggcgtaggggaaaaatcctgcgggtgacccctggtaccataaagtaattaacatgagcatgccgctagggtgtgctttttccttccttgggaaggcggtggcacc

SEQ ID NO: 2704 - DNA, 615 bp, Rhinovirus A
  source 1..615: mol_type = genomic DNA
ttaaaactgggtcgtggttgttcccaccacgactatctacggatgtagtgctcttgtattccggtacgcttgcacgccagttttgtcacccccccctacattgtaacttagaagattaacacaaagaccaataggcggcaatgaaccacattgtcaacggtcaagcacttctgtttccccggtcaatctagatatgctttaccaaaggcaaaaactggagcgatcgttatccgcaaggtgcctacgggaaacccagtagcattctttatttgatctggttggttgctcagccgttaaacccaaacggtaaacctggcagatgaggctggaagatccccaccagcgatggtgttccagcctgcgtggctgcctgcacacccgaaagggtgtgaagccttttcaaagacagggtgcgaagagtctactgtgctcaccttgattcctccggcccctgaatgtggctaatcctaaccccgtagctgtggtgtgcaatccagcacattcgcagtcgtaatgggtaactgcgggatggaaccaactactttgggtgtccgtgtttctctttttccttttatatatgcttatggtgacaattatacggatatagttgtcatc

SEQ ID NO: 2705 - DNA, 615 bp, Rhinovirus C
  source 1..615: mol_type = genomic DNA
ttaaaactgggctcgggttgtacccacccgagctgcccatgtggcgtggtgctcttgtatcccggtacacttgcacgccagtttgcctctccttaccccgtaacatatctagaagaatgtgcataacggaccaataggtggtggcaacccatgccactgacggtcaagtacttctgtttccccggtgtgatgtggaatagactctctcagggttgaagccataagcatcgttatccgctacgtgcctacgcaaaacctagtagcattttgaagcttacttggttggccgctcagccactaacccgtggtaggcctggcagatgaggctgggcgcaccccactggcgacagtggcccagcctgcgtggctgcctgcccctctttgaggggaagccatttaagtgacaaggtgtgaagagtctcgtgtgctccacgtagaatccttccggcccctgaatgtggctaatcctaaccccgcagctattgcacacaatccagtgtgttgatagtcgtaatgggcaactgtgggatggaaccaactactttgggtgtccgtgtttcctgttttctttaaatacttgcttatggtgacaaatagtgtatactgtttgacacc

SEQ ID NO: 2706 - DNA, 616 bp, Pegivirus E
  source 1..616: mol_type = genomic DNA
gacgcgcatcccgggtgaaagccccgggcgtacgacctggttcgggatgattcccgttctcagtgcggaggccccgcaaaccgagccgccctgtaggcaacttctagaatggggagttaactcctggcactggcccgaagcatgaactgatcgcggtggcagggttcttcgggtaaatcccggccgcgtgttgtgattgtgttagggcaggtgacagtcggcagggtcgaccccctgcttcaggaccactgtcttcctggacgaccgttgctgaaaaagggccgccacggtctgtagctcgccgacgcttctaattcaggccggaggaccacgctccgtaatcgagcccaagtactcaaaccccagcacccctgggtcacgccctacgccgcccttttaacgcttcggctaatagggtctatccggcgggttgacaaagggcgcagggttacctggtactacgagcttgggtgtccctgggagtaatcccagggtgccatgctgcagcgcaggcgggcgagggtggtgcctcggcctaggggaagagcgcaagtgaccccgtgctgcataaatcccccccctttttttctacatgggtgttccatgtgccgccaag

SEQ ID NO: 2707 - DNA, 617 bp, unidentified
  source 1..617: mol_type = unassigned DNA; note = unclassified Pegivirus sequence
ggctccccccccacctcgcgcggcccgagggccgatacgcgggttgggggggtagcgggggccggaggcccccgcgttctagaatggtgtgatccgtcgccgctccagcggaaagcgggcgggatctagtggttagggttgttcgcgtaaatcccacactagtggtacgctcgtataacgtgggagcagccgggggggtcgaccccccccctggcggctgctgagcaccggacgaagcgcggggggtgaacgctaacccgcggcccgggctgccaacgttaggcacgtcttggctggaagacgttaaacacagggccccccctcaaccctgatccgaggccagagaccaaggtacgccgcccttttaaaggcgttactcgtccaataggatctctccggcgggttgtcaaaccttgctggccctggtgatggttacgggagggggtggggcggggagtagaagccccgcccggcatgggggtaccaagctcggcacgcccagcacgcgtggcgtaggggaaaaatccttcgggtgacccctggtaccataaagtaattaacatgagcatgccgctagggtgtgctttttcttccttccttgggaaggcggtggcacc

SEQ ID NO: 2708 - DNA, 617 bp, Grusopivirus C
  source 1..617: mol_type = genomic DNA
gccccgacgagtcccgtgggatacctggtacgtgccaggaaaatcccacgggactcgtcggggctttacccctaatttcaacgttggtccacgaaacggccgttctttcttttttcttctattttcaatcttgactccgcactgatcttttggttctagacacaggcgcgtttggttatagagtaggatttggatatagttatgagagggttagccaacccattctgaaccactttaagtatgtcaatctgaattcatcagtaatatagcacaggaggtggtgctgaaatattgcaagccactgttttatttatatgaagaattcaagaacctacttaaggtggtgatgaaaaggctaggtttatccatagtaatcccttgttctgaaaaggtaatgcacagtccttagtaggatcttgggctctgcaactggctctaaaccgaccaatctaggtagaggcactaggtgtaggacttgccatattgtattacaatctggtaccgacaaaatgtctggaaactccacactgagggtgataggggggggccccttcacagttgtgctactgcttgatagagttgcggctggtcaacttagattggtataaccagtagaa

SEQ ID NO: 2709 - DNA, 620 bp, unidentified
  source 1..620: mol_type = unassigned DNA; note = unclassified Aphthovirus sequence
taccgcccatcccggtgttaaagggtgtaaccacaagatgcaccttcgtcccggaagtaaaacggcaatttcacacagttttgcccgttttcacgagaaacgggacgtctgcgcacgaaacgcctgtcgcttgaggaggacttgtacaaacacgatctaagcaggcctccccaactgacacaaaccgtgcaatttggaactccgcctggtctttcctggtctagaggggtgacactttgtactgtgtttggctccacgctcggtccactggcgagtgttagtaacagcaccgttgcttcgtagcggagcatgatggccgtgggaactcctccttggtaacaaggacccacggggccgaaagccacgtccaatcggacccatcatgtgtgcaaccccagcacagcaacttttctgcgaaactcacttcaaggtgacactgatactggtactcaaacactggtgacaggctaaggatgcccttcaggtaccccgaggtaacacgcgtcactcgggatctgagaaggggactggggcttctataaaagcgtccaggttaaaaagcttctatgcctgaataggtgaccggaggccggcaccttttctttacagccactgacttt

SEQ ID NO: 2710 - DNA, 622 bp, Enterovirus C
  source 1..622: mol_type = genomic DNA
ggacgtcagtacaccggcattgcggtgcccttgtatgcctgttttatattccccccctgtaactctagaagaaaatgaactctgagctcaacaggcgttacgtttccagcgtgactacgagcaagcacttctgtttccccggttgcgccctatatgctgtgtgaacggcagaaaggggcaaaatcgttatccgcttgactactgcgggacgcccagtatcaccatggattgatttgagagttgcgctcagcacatccccagtgtagcctgggccgatgaggctccgaattccccacgggcgaccgtgtcggagcctgcgttggcggcctaccctcgcctcacggtgagggacgctcacttcatgacatggtgcgaagagtctactgcgctagttaagattcctccggcccctgaatgtggctaatcctaaccactgatcctgtaagtacacgccagtgcccagcaggtcgtaatgcgcaagtcggtggcggaaccgactactttgggtgtccgtgtttcctttatttccttattgaatgtttatggtgacaattgttgagtacagttgttgccattattgcattctacaaacagtgaacaaaccacacaccaatatagcaca

SEQ ID NO: 2711 - DNA, 625 bp, unidentified
  source 1..625: mol_type = unassigned DNA; note = Eotetranychus kankitus picorna-like virus strain EKPLV.abc9,1 sequence
cctattgagaagtgaactttcattttctatacaaagtgctatatttcgagcgacagtgtaaaactaaacaatagtgtacataacttattactcaaaatatagttaagacaaaagtcctctggaccccagtccagaggatctttgtcttaactatattttgagtaataagttatgtacactattgtttagttttacactgtcgctcgaaatatagcactttgtatagaaaatgaaagttcacttctcaataggagtatgtacttagtagattatataacagctgattattattggctgaaataatccgtaataatcgtaagtcgattatataagactacacgctcattttgtggttatttcaaatttaacaacttttgaaaccactttcattttaagatgtgtgttctatttatctagacgcatattcatattcacttgtttagtaatttcaccctactaaactcgtattcacgatacgtattttccagaattagtttactaatgagattatacgcattaacattttcgttagacttttgatacatacaaatctaacccttgtttggtaggcaagtacaacctactggtttcccgagacctatgaggggcccaataaatatgaaag

SEQ ID NO: 2712 - DNA, 625 bp, Enterovirus A
  source 1..625: mol_type = genomic DNA
gctctgcagatatcaatagcaggcatggcgcgccagtcatgtctagatcaagcacttctgtctccccggatcgagtatcaatagactgctagcgcggttgaaggagaaaacgtccgttacccggctaactacttcgagaaacttagtagcatcattgaagctgcggagtgtttcgctcagcactcccccagtgtagatcaggtcgatgagtcactgcactccccacgggcgaccgtggcagtgactgcgttggcggcctgcctatggggcaacccataggacgctctaaagtggacatggtgcgaagagtctattgagctagttagtagtcctccggcccctgaatgcggctaatcctaactgcggagcacatgccctcaacccagggggtggtgtgtcgtaacgggcaactctgcagcggaaccgactactttgggtgtccgtgtttctttttattcttatattggctgcttatggtgacaattgagagattgttaccatatagctattggattggccatccggtaaccaacagagctattgtttacctgtttgttggatacgtccctctcaatttcaaagtcattaaaactcttgattatatattactcctcaactgtgagaa

SEQ ID NO: 2713 - DNA, 627 bp, Avihepatovirus A
  source 1..627: mol_type = genomic DNA
tatgaaagtaactggaaactgggaggatttcagggggaggtaaaaaaggtatgacaagggtgcatcgactgcttgggggtgtgcctgacccccctaattcaacgtctagcccacgatacgggcaccctatccaatttgtatccctttacctcctatggacagacttgtatggatttggatctaaattggattatcctttatttgtggtggttagccaaccatgctctggtgtaatgattccatctgttcatctggttaagtgccgacctaggaggtggtgctgaaatattgcaagccactagtatcgttacgcttggcctctggatacgtgggattaattgcattctgtacagaggaaggctagtctatgccttgggctaatggtctttgttgtgaaacggattaccggtagtagcatctcagactaccaaggttgtaggtgagtgtgtggtctagagtaggcacacatctgtccaggcacatgcacattgttgcgattgctccagactagttcctgagggacagatgttgtggggggcttgggaaaacccccttaacatacactgcctgatagggtcgcggctggtcgagttcccacacactataataccagtagattttcatgca

SEQ ID NO: 2714 - DNA, 630 bp, unidentified
  source 1..630: mol_type = unassigned DNA; note = unclassified Avihepatovirus sequence
ttttgaaagccgggtgcatgcatggccattttccagcacaggttcagctggtatggcatgcgtgcatcgactgcttgggggtgtccctgacccccttaattcaacgtctagcccacgatacgggcaccctatccaatttgtgtccctttacctcccatggattgacttgtattggatttggatctaaattggattaccctttgtttgtggtggttagccaaccatgctctggtgcaatggttccatgtgttcattctggccacgtgccaacctaggaggtggtgctgaaatatcgcaagccactagcgttattacacttggcctctggacacgtgggattaattgcattctgtacagaggaaggctagtctatgccttgggctaatggtcttcgttgtgaaacggattaccggtagtagcatcttagactaccaaggttgtaggtgagtgtgtggtctagagtaggcatacatctgtccaggcacatgtacattgctacgattgctccagactagttcctgagggacagatgttgtggggggcttgggaaaacccccttaacctacactgcctgatagggtcgcggctggtcgagtcccacacactataataccagtagattttcatgca

SEQ ID NO: 2715 - DNA, 633 bp, unidentified
  source 1..633: mol_type = unassigned DNA; note = unclassified Enterovirus sequence
ttaaaacagcgggtgggtatcccaccacccgacccactgggtgtggtacactggtactttgtacctttgtatgcctgtttgcatcccttttcccttcacctaacatcctcccccaaagtatattttgcggtaacgttagaagaagtgaactcagtgcaacaggaagtatcaccaccagtgatataacgcacaagcaattcttgttccccggagctggatatagactgctaacgtggtcaaaagtccttaaccgttatccgccagctaactgcgagaagactagtaacatcatgcacatttctagacgttcgatcaggtgaataccccattcactagtttggtcgatgaggctgagagttccccacaggtgactgtgtctcagcctgcgtggcggccaacccgacttatgtcgggacgcctattaatggacatggtgtgaagatcctattgcgcttagctgtgagtcctccggcccctgaatgcggctaaccttaaccccggagccttgtggtgcaaaccagcatttgcaaggtcgtaatgagcaattctgggatgggaccgactactttgggtgtccgtgtttcctttattcttattatttgtgtttcatggttacaagcatagtttgtaatc

SEQ ID NO: 2716 - DNA, 636 bp, unidentified
  source 1..636: mol_type = unassigned DNA; note = unclassified Megrivirus sequence
ttcccgaccggtctggcaaaccggacggttatcctggttagatgtctgatggttgctggaacgtggtggctattgctgccaccttctggcttcctttattgggcatctagctgggtcctttgccatattccatctaactctcttcccattttctattacccaggcttgttgtaactggtaagttgactcactggcttcgttttgagactactctggtgctggtggacactctttccacaagtggattgtatggagttcatgctcgttctgaaccgggaatggcacaacccgtagtaggatcttgcctctgccataccaatctgcgcctgttgcttctagactatgggctgctaaggatgatcttggaactcctttttggatattccggttcaagtcaactgtttcatctggtgcacgctggaaatcctcgtttctaggtcttgtctggaggtggtgctgaaatattgcaagccacggatggttcctaggacctggtgccgctatcagatggtacaccctctatgggcaaatgttgaaccttagtggacgcgtgagatgggaatccacgccggccatagactggctgataagctcgcggctgatcgagttgcaacagtaatcagttgatttgccact

SEQ ID NO: 2717 - DNA, 642 bp, unidentified
  source 1..642: mol_type = unassigned DNA; note = unclassified Megrivirus sequence
ttcccgaccggtctggcaaaccggacggttatcctggttagatgtctgatggttgctggaacgtggtggctattgctgccatcttctggctgcctttattgggcattctagctgggttctttgccaaaattcccatcttattcttattcccattttccttacccaggcttatttacaactggtaagttgacccactggttttgttcttggacttctctggtgttggtggacactctttccacaagtaagtattgtggagttcatgctcgttctgaaccgggaatggcacaacccgtagtaggatcttgcctctgccacatttacttgcgcctgttgcttctagactatgggctgctaaggatgaccgcagacccctttttgggcaatctgtgtcaagtctactgcttcgtctggtgtacgctggaaatccctgttctggatgcctatgcttggaggtggtgctgaaatattgcaagccacaagcatacctctggactcggtgccgctaccaggtgttgcaccccttgtgggcaaacgtagaaccttggtggacgcgtgagatgggaatccacgcctggccatagactggctgataagctcgcggctgatcgagttgcaacagtaatcagttgatttgccact

SEQ ID NO: 2718 - DNA, 643 bp, Oscivirus A
  source 1..643: mol_type = genomic DNA
gaaagggggcccggcggggcaatacccgtcggtccctctttccgtccaagccgcggacgttaaattgtggcacggttgtgcttaggcgcaaccctgctactaatggcggtatccctgcccttagtatgcatgtttgtatgaatggaatctgtagtgatgccccgctttggggtctcagaaacacactacagtgacggctagagttcctctactccggctaccttagtagcgagcattggaagtatattgtgaacagggttccacgcccgataaaggctgatattcccgctcatggagtggacctaggtaactagggccatgagtgtgtgtgaatcagcacccgcaagggataacagtatatggaaggtgctcgtgaaacggcaagtggagttagcagcagctctcagcctcaaggtcagcttctagacatgtgccgcaggtaccccgcaagggatctgagcggtagctaattagtccctggaagttggctgactttcttcttatttctttcttattgtgaattgtgtgcattggcattctttagagtttgggagttgtcttctattggatttatatcttactctgtatcacactcaatcacggctctttggtcagttaagaaaaccatttatagagtaataaa

SEQ ID NO: 2719 - DNA, 646 bp, Oscivirus A
  source 1..646: mol_type = genomic DNA
gaaagggggcccggcggggcaacacccgtcggtccctctttccgtccaagccgcggacgttaaactgtggcacggttgtgcctaggtgcaaccctgctactaatggcggtacccctgcccttagtatgcatgtttgtatgaatggaatctgtagtgatgccctgctttggggtctctaaaacacactacagtgatggctagagctcctctactccggctaccttagtagtgagcattggaagtatattgtgaacagggttccacgcccgataaaggctggtattcccgctcatggagtggacctaggtaactagggccatgagtgtgtgtgaatcagcacccgcaagggatagcagtatatggaaggtgctcgtgaaacggcaagtggagttagtagcagctctcagtctcaaggtcagcttctagacatgtgccgcaggtaccccgtaagggatctgagcggtagctaattagtccctggaggttggctgactttcttcctatttctcttttcactgcgaattgtgtggattggtattctttagagcttgggagttgtctcatattgaattcatatattttactctatactacactcaaacacggctctctggtcagttaagaaaatcatttatagaataataaa

SEQ ID NO: 2720 - DNA, 651 bp, unidentified
  source 1..651: mol_type = unassigned DNA; note = unclassified Picornaviridae sequence
cggcctcttttcccgaccggtctggcaaaccggacggttatcctggttagatgtctgatgattgctggaacatggtggctatagctgccatcttttggctttctctattgggcatctagctgggttctttgctaatcttccatcttactcttatccccattttctattacccaggattgttcgtaactggtaagttgactaactggctatgttttctggctcttctggtgctggtggacactcttttccacaagtaggttatgtggagttcatgctcgttctgaaccgggaatggcacaacccgtagtaggatcttgcctctgccacatatacttgcgcctgttgcttctagactatgggctgctaaggatggctacggacctctttttgagtaatccgtgccaagtcaactgtttcactctgatgtacgctggaaatccttgttttggatgttatgtccggaggtggtgctgaaatattgcaagccacggacattcttctgaacctggtgccgctatcaggtgttacaccccttgagggcaaatgttgaaccttagtggacgcgtgagatgggaatccacgcctggccatagactggctgataagctcgcggctgatcgagttgcaacagtaatcagttgatttgccact

SEQ ID NO: 2721 - DNA, 652 bp, Avihepatovirus A
  source 1..652: mol_type = genomic DNA
tttgaaagccgctgtggtgtagaccattttctggcgcttggctcagccagtatggtctcaccacagtctgcttggggttattcccaaaccccttaattcaacgcctagtcctatcaatataggaccccctatccacttattttacctttaccctccattatatagtctgtttcctggctattgactttggcttttgtttttgacctacgtctaagtctcaatggattttgtagtggttagcctaccaccccttggccactaatttttggctctctgtttggggacccaccacatcttggaggtggtgctgaaatattgcaagccacttgatatgtgtgtgtcctccagacatgaagctttgatgcagtggttttggacaaggaaaggctagtgtttggtctgggcacaaacccttgttgtgaaacggattaccggtagtagcatctagtggttccagtccataacatgagtgtatggtctagagtggacacagcttggatacagacaccttcagtattactgggtgttccagactagttcctgaggtaccaagttgtgaggggctatgggaaaacccctttgatccacactgcctgatagggtcgcggctggtcgagtcccatacactataataccagttgattttcatgca

SEQ ID NO: 2722 - DNA, 653 bp, Avihepatovirus A
  source 1..653: mol_type = genomic DNA
gaaagcggccactgtgtagccattttctagcgcttggtacagctagtatggttacacagtgtgcgtcagcttggggccattcccaggccccttaattcaacgcctagctctggcgatacagagccccctatccaattctatgtcccttatcctccacaggttgattgtctttcttgttctgactcaactgcctgttgtattggacttctattggattacccttttgtatggatggttagccaaccatgctctggttactagccattctatggcaggtttggcttgatactggtggatggaggtggtgctgaaatattgcaagccacgtctcccattgtcaatccaacccatcatggaatgtagttggtaattcctgtacagaggaaggttagtgtataagagtgggtctaataccattgttgtgaaacggattaccggtagtagcatccttggtatccattcttatcatgagtgtgtggtctagagtagacatgtattctcacaggtgcatgcagcattgctgagcactccagactagttcctgaggtgggaaatacatggggggcactgggaaaacccccttgatctacactgcctgatagggtcgcggctggtcgagtcccacacactataaaccagttgatttgcatgca

SEQ ID NO: 2723 - DNA, 654 bp, unidentified
  source 1..654: mol_type = unassigned DNA; note = unclassified Sicinivirus sequence
tgcaacccccactagtactcgtgcacatccaatggtgattctgccctggcagcatctaagtgcccagggagctcaactggtaacagttgccctggggcccaaaaggctaggtggcaaggacctggtcaagtaaggggttcccaccccgagctgaacccgcggtcctgaagctaccctttagatggaggtttcgcacccgattgccattctttttgcctgaagaacctggctggaaacatttagcccacggatttgctggtttgtggtgattagtagaccccctggaggtacccgttttggatctgaccagggacccgtgactatgccgttccggtaatccgggtttaaaaccatgaacgtcaccacctatcttcttttccttgctttgaattcttttatctgagagtagtgaacgagtgttgatgttccctgacttttgcatttggtctgcattctcagttatacggtttgactgggctgggttgtttatttagatgtttctagagtctctgttggtagctattacacttgttatagtagttgcttcccccagtgagcttcatcagttatttactatttgtgtttataatttcgccttaatcttcctctggctggttgaaatcctagagcttcctaattaccctgccatccaac

SEQ ID NO: 2724 - DNA, 654 bp, unidentified
  source 1..654: mol_type = unassigned DNA; note = unclassified Hepatovirus sequence
gtttttcccggacccctctttggacaaccttggtggggggttgtaaattaccccaccctcgtttgcctagagtttaggctaaattccctatagtaccctttatatgtaaatatcaattcctgcaggttcaggtttcttgaatgtgtctctctttaagagcactcattttactctcagaatttctctagagtccagacacttgagggctctttttctcctgcactatcatctcgattccgggctctcgtggtgccaatggaacgaccgatgcgcacgtcggggttaacccacagattagctgtgggctgtagttgctaaaagccacgatctctgaatgccctctttgaatgggggtggtattaactgaacacatgaaaccacattgatcttgctgggagggtaggctacgggtgaaaccctccatattaatactcatattgagagatatatctggtaggctaatgttggcggataaggctgagtttcacgacaaaaagccttcaacgcctgtggaacaggtctcaccagcagcatgccttgtggcgtagtgtgctagggccatcttcatttcaggtgggagctaggagactctccccgtaagggttggaggggtagttcaggtgcatttaggtttttccacattcaataaaaaca

SEQ ID NO: 2725 - DNA, 657 bp, unidentified
  source 1..657: mol_type = unassigned DNA; note = unclassified Megrivirus sequence
tttctgaaggcctcttttcccgaccggtttggcgcaccggacggtcatcctggttagatgtctgatggttgctggaacgtggtggctattgctgccaccttctggcttcctctattgggcatctagctgggtcctttgccacattccatctcactctttacccattttctattacccaggcttgattgtaactggtaagtttgacccactggcaatgttcttaagaccattctggtgttggtggacactctttccacaagtaggttacgtggagttcatgctcgttctgaaccgggaatggcacaacccgtagtaggatcttgcctctgccatgctaatctgcgcctgttgcttctagactatgggctgctaaggatgatgttgggactcctttttggatatctcatatcaagtcaactgtttcatctaatgtacgctggaaatccttgtctcagggttctatctggaggtggtgctgaaatattgcaagccacagatgaatcttgcggcatggtgccgctattggatgttacaccctttattgggcaaatgttgaaccttagtggacgcgtgagatgggaatccacgcctggccatagactggctgataagctcgcggctgatcgagttgcaacagtaatcagttgacttgccacc

SEQ ID NO: 2726 - DNA, 662 bp, Megrivirus C
  source 1..662: mol_type = genomic DNA
gtgtgtttctgaagggcctcttttcccgaccggtttggcacaccggacggttatcctggttagatgtctgatggttgctggaacgtggtggctgttgctgccaccttttggcttcctctattgggcatctagctgggtcctttgccacatcccatcttattctttacccattttctactacccaggcttgcctgaaactggtaagttgacctattgaccatgtttttggactactcttggtgctggtggacactctttccacaagtaggttgcatggagttcatgctcgttctgaaccgggaatggcacaacccgtagtaggatcttgcctctgccatgttgatctgcgcctgttgcttctagactatgggctgctaaggatgatgttgagactcctttttggatatctcatatcaagtcaactgtttcatctggtgtacgctggagatccttgtcgtgaggctgtatctggaggtggtgctgaaatattgcaagccacagatcagtcttgtaacatggtgccgctatcaggtgttacaccctctactgggcaaatgttgaaccttagtggacgcgtgagatgggaatccacgcctggccatagactggctgataagctcgcggctgatcgagttgcaacagtaatcagttgatttgccact

SEQ ID NO: 2727 - DNA, 663 bp, unidentified
  source 1..663: mol_type = unassigned DNA; note = unclassified Picornaviridae sequence
gggggctctcccccacggcctcttttcccgaccggtctggcaaaccggacggttatcctggttaggtgtccgatggatgctggaacggggtggctatagctgcctccttctggcttcctttattgggcattctagctgggccctttgccaaaattccatcttaatcttaaacccattttctatacccaggcttgcttgtaactggtaagttgacccactggcttgtcttaagactattctggtgttggtggacactccttccacaagtaagtattgtggagttcatgctcgttctgaaccgggaatggcacaccccgtagtaggatcttgcctctgccacatatacttgcgcctgttgcttctagactatgggctactaaggatgactacggacccctttttgggtaatctgtgtcaagtctactgtatcatctggtgtacgctggaaatccttgttctggaaactgcgtctggaggtggtgctgaaatattgcaagccacagatgcatttctggtcttggtgccgctactaggtgttacaccccctgtgggcaaatgtagaaccttggtggacgcgtgagatgggaatccacgcctggccatagactggctgataagctcgcggctgatcgagttgcaacagtaatcagttgatttgccact

SEQ ID NO: 2728 - DNA, 663 bp, unidentified
  source 1..663: mol_type = unassigned DNA; note = unclassified Megrivirus sequence
gtgtgtttctgaaggcctcttttcccgaccggtttggcacaccggacggttatcctggttagatgtctgatggttgctggaacgtggtggctattgctgccaccttttggcttcctatattgggcatctagctgggtcctttgccacattccatcttactcttttacccactattctattacccaggcttgatcgtaaccggcaagtttgacccaccggctatgttctaagactattctggtgttggtggacactctctccacaagtagattgcatggagttcatgctcgttctgaaccgggaatggcacaacccgtagtaggatcttgcctctgccatgttgatctgcgcctgttgcttctagactatgggctgctaaggatgatgttgggactcctttttggatatctcatatcaagtcaactgttccatctgatgtacgctggaaatccttgtcccagggttgtatctggaggtggtgctgaaatattgcaagccacggattaaccttgcgacatggtgccgctatcaggtgttacaccctctatcgggcaaatgttgaaccttagtggacgcgtgagatgggaatccacgcctggccatagactggctgataagctcgcggctgatcgagttgcaacagtaatcagttgatttgccact

SEQ ID NO: 2729 - DNA, 664 bp, unidentified
  source 1..664: mol_type = unassigned DNA; note = unclassified Picornaviridae sequence
agatgtagacatctaaccaggataaccgtccggtgtgccacaccggacggttatcctggttagatgtctgggaactgctggacttcagtggctattgctgctgacttctggctcttctgaactgggcatctagctgggtcctttgccacccataccctatctcccgttatattctctttgcccttggactgttgtaactggttaagagaccctccgcatgttttgtctatgactattctggtgctggtggacactctttccacaagtggatgatgtggagttcatgctcgttctgaaccgggaatggcacaacccgtagtaggatcttgcctctgccatactcatctgcgactgttacttctagaccataggctgtgtaggatgactatggacctctttttgagtatcctggtcaagccaactgtgtttataacacgtacgctggatatccttgttagggtggaatttcagtggaggtggtgctgaaatattgcaagccacattggattttaccctcttggtgccgctgtgttattacgcaccccttgtgggcaaatgttggacctacatggacacgtgtgatgggaatccacgtctctgctatggactggctgataagctcgcggctgatcgagttgtaacagtaatcagttgaaaagccact

SEQ ID NO: 2730 - DNA, 668 bp, Mischivirus D
  source 1..668: mol_type = genomic DNA
ttatttttcaaaatgccactggcattacaccatattcgtatggtgtaatgtcagtggttggatgcccagtcctgagggactgtgcatccagtggttaagagccacactctttatttatcaactattgatctttgtaactaagaaatgtaccagagttctattatggctccaaacccattggggtctagaacaagcacttctgttaccccggtcattattggctgttaggatgtacccacgtctgaaggccaagaagatcgttacccggctgttgtctacgggaagactagtaacttttgttgaaaggtaatctcattgatccgggtggcaaccccagtcacccagaaactagtgatgagtgtccacattcctcctatggtaacatagggtggtcgctgcgctggcactagggccttaaggcatgagagaaccaagacacaactgtgaagatccgactgtgcacttcagtattcctccggcccctgaatgcggctaatcctaacccacttgcacacgctcgcaacccagtgagtggtgtgtcgtaatgcgcaagaagtggacggaaccgactactttgggtgtccgtgtttctttttttatttaccaagtctcttatggtcacaagcattagaaacaagatgcctgtgatcactcgcgagacctccaac

SEQ ID NO: 2731 - DNA, 670 bp, unidentified
  source 1..670: mol_type = unassigned DNA; note = Human rhinovirus A strain HRV-A76_p1194_sR844_2008 polyprotein1 sequence
cttcacacccgttaaggtgtgcaggcagccacgcaggctaggacactgttaccagtggggaactcctagcctcatcccacctggatctcctacaaggagttgtactctattattgcggtaattttgtacgccagttttatctcccctccccaatatgtaacttagaagctgaacacaaagaccaataggcgacatttaatccaaaatgtcaaaggtcaagcacttctgtttccccggctaaagctgatatgctccaacagggcaaaaacagttgcggtcgttatccgcaaagcaactacgcaaagcctagtatcaccttctagagcatatgactggtcgctccactataaacccaatagtagacctggcagatgaggctaggagttccccactggtaacagtgtcctagcctgcgtggctgcctgcacaccttaacgggtgtgaagccatatgtttgacaaggtgtgtgagccccgtgtgcttgctttgagtcctccggcccctgaatgtggctaaccttaaccctgcagctagtgcacacaatccagtgtgtggctagtcgtaatgagcaattgcgggacgggaccaactactttgggtgtccgtgtttcttgtttttccttatatttgcttatggtgacaatatatatataacatatatattggcatc

SEQ ID NO: 2732 - DNA, 671 bp, unidentified
  source 1..671: mol_type = unassigned DNA; note = unclassified Picornaviridae sequence
gccgcaggggataacccctgcggaccccttttcccgaccggcttggcaaaccggacggttatcctggttagatgtctgggatttgctggactttagtggctatcgctgctatcttctggcttctctaaactgggcatctagctgggtcctttgccatccaattctttattcccatctatttttccacccatggactgatgtaactggctaagaaatcctctggttctcactttggccacgcacttgtgttggcggacactctttccgcaagtgaacagtgtggagttcatgctcgttctgaaccgggaatggcacaacccgtagtaggatcttgcctctgccacatcctgtttgcgactgttacttctagaccataggctgtgtaggatgactttggacctctttttgagtatccttgtcaagctaactgcaattacaacatgtacgctggaaatccttgtctgaaagtagatcctagtggaggtggtgctgaaatattgcaagccacactagattctctttccttggtgccgctgtgttgctttgcacccctagtgggcaaatgttagacctacatggacacgtgtgatgggaatccacgtcttggctatggactggctgataagcccgcggctgatcgagttgtaacagtaatcagttgaattgccacc

SEQ ID NO: 2733 - DNA, 672 bp, Foot-and-mouth disease virus
  source 1..672: mol_type = genomic DNA
ccccccctaagttctaccgtcgttcccgacgtaaagggatgtaaccacaagcttaccgcctttcccggcgttaaagggatgtaaccacaacgacttaccttcacccggaagtaaaacggcaacttcacacagttttgcccgttttcatgagaaacgggacgtctgcgcacgaaacgcgccgtcgcttgaggacttgtacaaacacgatctaagcaggtttccccaactgacacaaaccgtgcaatttgaaactccgcctgggctttccaggtctagaggggtgacactttgtactgtgtttgactccacgctcgatccactggcgagtgttagtaacaacactgctgcttcgtagcggagcatgacggccgtgggaccccccccttggtaacaaggacccacggggccaaaagccacgtccgaatggacccgtcatgtgtgcaaacccagcacagtacctttgttgtgaaactcactttaaagtgacattgatactggtactcaagcactggtgacaggctaaggatgcccttcaggtaccccgaggtaacacgtgacactcgggatctgagaaggggaccggggcttctataaaagcgcccggtttaaaaagcttctatgtctgaataggtgaccggaggcaggcacctttcttttaattacactggactt

SEQ ID NO: 2734 - DNA, 673 bp, unidentified
  source 1..673: mol_type = unassigned DNA; note = unclassified Enterovirus sequence
ggcgcacaggtttccaagcagagtgtgggagcacatgaaaccatggtacaggaataaaaggaaacacggacacccaaagtagttgttcccactataaccacccacgtggtgttgtggacttgtatttcggtacacttccatgccagttttatctccccccctgcaacctttagaagacacgtactttcagaccaataggtggcggccatccaggtcgtcgacggtcaagcacttctgtctccccggtggtactggatacgctttacccaaggcgaaaaccgggcccatcgttatccgcaaagtgcctacgagaagcctattagcactctagaagcctatggttggtcgctccgctgcaaccccagcagtagacctggcagatggggctagacataccccaccagcgatggtggtctagcccgcgtggctgcctgcacaccctatgggtgtgaagccagaaagtggacagggtgtgaagagcctattgtgctcactttgagtcctccggcccctgaatgtggctaatcctaaccctgcagccgttgcacacagcccagtgtgtatgcggtcgtaacgagtaattgcgggatggaaccaactactttgggtgtccgtgtttccttttattcctttacttgcttatggtgacactgtatagttatacattgtcact

SEQ ID NO: 2735 - DNA, 675 bp, Foot-and-mouth disease virus
  source 1..675: mol_type = genomic DNA
aaccacaagtcttgcaccttcttgtccgaagttaaaggactgtaaccgcaagctttgaaccgcctttcccggcgttaaagggctgtgaccgcaagatagaccttcacccggaagtaaaacggcaactcccacagttttgcccgttttcatgagaaatgggacgtcagcgcgcgaaacgcgcagtcgcttgaggaggacttgtacaaacacgattcacgcaggttcccacaaccgacacaaaacgtgcaacttggaatcccgcctggtctttccaggtctagaggggtgacactttgtactgtgattgacaccacgctcggtccactggcgagtgttagtagtagtattgttgtttcgtagcggagcatggtggccgtgggaccccctccttggtaacaaggacccacggggccgaaagccacgtctcaggacccaccatgtgtgcaaccccagcacggcaaccttaccacgaaaaccactttaaggtgacactgaaactggtactcaaccactggtgacaggctaaggatgcccttcaggtaccccgaggtaacacgcgacactcgggatctgagaaggggactggggcctctgtaaaagcgcccagtttaaaaagcttctatgcctgaataggcgaccggaggccggcgcctttccttaactaccactgtttac

SEQ ID NO: 2736 - DNA, 675 bp, unidentified
  source 1..675: mol_type = unassigned DNA; note = unclassified Parechovirus sequence
cgtcgggccttataccccgacttgctgagcttctctaggagagtccctttcccagccctgaggcggctggtcaataaaagcctcaattgtaacaaacatctaagcttattacatataaccacaaccctggtccccaccagcttaaggcatcttgcaatacagtgggtggactcaggacgcttaaaggttgtagtacataatcttttctaatccaactatgttggagtggtggacagcgcaccataactctatcagtgagataccatgcttgtggaccttatgctcacacagctgtcctctagtcactaagtgtggaaactaatgaaatgtgggaacttagttgaagtacacacttgcttatgcaccaattagccagcggatcaacacccggcaacgggtgcccctggggccaaaagccaaggtttaacagaccctaattggttggttttaaaacctgagcgtgtacggatgctacttagtacctgtggatttggtaactgtgcttatactagttgtaaggccctcgaaggatgcccagaaggtacctgtaggtaacaagtgacactatagatctgatctggggccccatacttctctaaagtgatggggttaaaaaacgtctagagggccaaacccaggggggaccctggattccttttattttatttagacaat

SEQ ID NO: 2737 - DNA, 678 bp, unidentified
  source 1..678: mol_type = unassigned DNA; note = unclassified Aphthovirus sequence
actagtgattttaccgtcgttccccgacgtttgaagggaggaaaccacacgcttgcagcaccactcccggtgtcaacgggatgcaaccgcaagatggaccttcgcccggaagtaaaacggcagctttacacagttttgcccgttttcgtgagaaacgggacgtccgcgcacgaaacgcgccgtcgcttgaggaacacttgtacaaacacgatttaagcaggtttccacaactgataaaactcgtgcaacttgaaaccccgcctggtctttccaggtctagaggggtgacactttgtactgtgctcgactccacgcccggtccactggcgggtgttagtagcagcactgttgtttcgtagcggagcatggtggccgtgggaactcctccttggtgacaagggcccacggggccgaaagccacgtccagacggacccaccatgtgtgcaaccccagcacggcaacttttactgcgaacaccaccttaaggtgacactggtactggtactcggtcactggtgacaggctaaggatgcccttcaggtaccccgaggtaacacgggacactcgggatctgagaaggggattgggacttctttaaaagtgcccagtttaaaaagcttctacgcctgaataggcgaccggaggccggcgcctttccattacccactactaaatcc

SEQ ID NO: 2738 - DNA, 679 bp, Megrivirus C
  source 1..679: mol_type = genomic DNA
aaaaggggtccgtgggggttctcccccacggctccttttcccgaccggtctggcgaaccggacggttatcctggttagatgtctgatggttgctggaacgtggtggctatagctgccaccttctggcttcctctattgggcattctagctgggttctttgccaaaattccatcttactctttacccattttctctacccaggcttgcttgtaactggtaagttgacccactggctttagttcatgattattctggtgttggtggacactctttccacaagtaggtagtgtggagttcatgctcgttctgaaccgggaatggcacaacccgtagtaggatcttgcctctgccacacttacttgcgcctgttgcttctagactatgggctgctaaggatgactacggacctctttttgagcaatccgtgtcaagtcaactgtttcatctgatgtacgctggaaatccttgtttctggatgattgtatcctggaggtggtgctgaaatatctcaagccacaggtacgcttctggacttggtgccgctgtcaggtgttacaccccttgtgggcaaatgttgaaccttagtggacgcgtgagatgggaatccatgcctggccatagactggctgataagctcgcggctgatcgagttgcaacagtaatcagttgatttgccact

SEQ ID NO: 2739 - DNA, 682 bp, unidentified
  source 1..682: mol_type = unassigned DNA; note = Foot-and-mouth disease virus - type O O/JPN/2010-1/14c (CV_d1)1 sequence
gggaggtaaccacaagatttgcgccttcttgtccgaagttagagggctgtaaccgcaaactttgaaccgcctttcccagcgttaacgggatgtaatcacaagatggaccttcatccggaagtaaaacggcaacttacacagttttgcccgttttcatgagaaatgggacgtcagcgcacgaaacgcgcagtcgcttgaggaggacttgtacaaacacgtctcacacaggtacccacaaccgacacaaaacgtgcaacttgaaatcccgcctggtctttccaggtctagaggggtgacactttgtactgtgattgactccacgctcggcccactggcgagtgttagtagtagtactgttgcttcgtagcggagcatggtggccgtgggactccctccttggtaacaaggacccacggggccgaaagccacgtctcaggacccaccatgtgtgcaaccccagcacggcaactttaccacgaaaaccactttaaggtgacactgaaactggtactcaaccactggtgacaggctaaggatgcccttcaggtaccccgaggtaacacgcgacactcaggatctgagaaggggattggggcttctgtaaaagcgcccagtttaaaaagcttctatgcctgaataggcgaccggaggccggcgcctttccttaactattactgcttac

SEQ ID NO: 2740 - DNA, 682 bp, Enterovirus B
  source 1..682: mol_type = genomic DNA
cctgtgggttgttcccacccacagggcccactgggcgctagcacactggtatcacggtacccttgtgcgcctgttttaacccccctcccctcagaagtaacttagaagcataaatcaaacggtcaacaggtggcctagcgcaccagctgggtctagaccaagcacttctgtcaccccggactgagtatcaataggctgcttgcgcggctgaaggagaaaacgttcgttatccgaccagttacttcgggaaacctagtaccaccatggaagttgcgcagcgtttcgctccgcacacccccagtgtagatcaggtcgatgagtcaccgtatcccccacgggcgaccgtgacggtggctgcgttggcggcctgcccatggggtaacccatgggacgcttcaatactgacatggtgtgaagagtctactgagctaattggtagtcctccggcccctgaatgcggctaatcctaactgcggagcagacacccacaagccagtgggcggtctgtcgtaacgggtaactctgcagcggaaccgactactttgggtgtccgtgtttccttttattcttatactggctgcttatggtgacaattgaaaggttgttgccatatagctattggattggccatccggtgactaatagagcgattgtttacttgtttgttggtttcataccaaaa

SEQ ID NO: 2741 - DNA, 683 bp, unidentified
  source 1..683: mol_type = unassigned DNA; note = unclassified Megrivirus sequence
gaaaagaggccgtgggggataacccccacggaccccttttcccgaccggtttggcaaaccggacggttatcctgattagatgtctgatggttgctggaatgtggtggctactgctgccaccttttggcttcctctattgggcatctagttgggtcctttgccattttcccatcttactctttttaacccatcttctaccccaggcatgcttgtaactggtaagttgacccacttggctctgattcatgattctgtttggtgctggtggacactctttccacaagtagattgtgtggagtccatgctcgttctgaaccgggaatggcacaacccgtagtaggatcttgcctctgccacattacatctgcgcctgttgcttctagactatgggctgctaaggatggtttggacccctttttgggtaatccaaatcaagtcaactgtttcatccaatgtacgctggaaatccttgttactgggtgtttacaactggaggtggtgctgaaatattgcaagccacagttgtgcacctagtcctggtgccgctattgggtgttacaccctttgatgggcaaatgttgaaccttagtggacgcgtgagatgggaatccacgcctggccatagactggctgataagctcgcggctgatcgagttgcaacagtaatcagttgatttgccact

SEQ ID NO: 2742 - DNA, 687 bp, unidentified
  source 1..687: mol_type = unassigned DNA; note = unclassified Enterovirus sequence
gggttgttcccacccacagggcccaagcggcgttagtactctggtatcacggtacctttgtatgcctgttttacatcccttcccccgtaacgttagaagaaagcacaaacgacaaatagcaagtccaccaaaccaggtgggtttttgtcaagcacttctgtttccccggacatagtaccaataagctgtacccacggctgaaagggaaaacgttcgttacccggctacttacttcgagaagcctagtaccatcatgaattgtttcaagtgttacgttcagcacaatcccagtgtagttcaggctgatgagtcaccgaattccccacgggcgaccgtgtcggtggctgcgttggcggcctgcctgcgggtattactcgcaggacgcttgattcatgacatggtgcgaagagcctattgagctaggtagtagtcctccggcccctgaatgcggctaatcccaaccacggagccatgcgttgcaatccagcaatgttgtggtcgtaatgagcaattctgtggcggaaccgactactttgggtgtccgtgtttcctgttttatttaccttggctgcttatggtgacaatctagagttgtcatcatatagcgattggattggccatccggatattatctttgtgtgactcattcctagtccataagcattccttgtaatttacacattcatc

SEQ ID NO: 2743 - DNA, 696 bp, Foot-and-mouth disease virus
  source 1..696: mol_type = genomic DNA
acgttaaaggggtgtaaccacaagcttgaaaccgtcttgcccgacgttaatgggttgtaaccacacgcttgtaccacctttcccggcgttatcgggatgcaaccaaaagatgaaccttcacccggaagtaaaacggcaaccacacccagttttgcccgttttcatgagaaatgggacgtcagcgcacgaaacgcgccgtcgcttgaggaagatttgtacaaacacgatttatgcaggcttccacaactgacacgaaccgtgcaatttgaagctccgcctggtctttccaggtctagaggggcaacactttgtactgtgcttgactccacgctcggtccactagcgggtgttagtaacagcactgttgtttcgtagcggagcatgatggccgcgggaactcccccttggtgacaaggacccgcggggccgaaagccacgtcttaacggacccatcatgtgtgcaaccccagcacggcaactttactgtgaaaaccactttaaggtgacactgatactggtactcaaccactggtgacaggctaaggatgcccttcaggtaccccgaggtaacaagtgacactcgagatctgagaaggggacaggggcttctttaaaagcgctctgtttaaaaagcttctatgcctgaataggcgaccggaggccggcgccttttcccactaaaccactactaacttt

SEQ ID NO: 2744 - DNA, 697 bp, Foot-and-mouth disease virus
  source 1..697: mol_type = genomic DNA
ttcccgacgttaaagggatgtaaccacaagcttaacaccttcgtgtccgaagtcaaaggactgaaaccacatgcttgcaccgccttttccggcgttaatggactgtaaccacaagatggaccttcacccggaagtaaaacggcaacttacacagttttgcccgttttcactagaaacgggacgtctgcgcacgaaacgcgccgccgcttgaggaggacttgtacaaacacgatctacgcaggttcccacaactggcttaaaacgtgcaatttgaaaccccgcctggtctttccaggtctagaggggtgacaccttgtactgtgcttgactccacgctcggtccactggcgagtgttagtagtagcactgttgcttcgtagcggagcatgatggccgcgggagtccctccttggtgacaaggacccgcggggccgaaagccacgtcctacggacccatcatgtgtgcaaccccagcacggcaactttgacacgaaaaccactttaaggtgacactgatactggtactcaaacactggtgacaggctaaggatgcccttcaggtaccccgaggtaacacgcggcactcgggatctgagaaggggactggggcttctgtaaaagcgcccagtttaaaaagcttctatgcctgaataggcgaccggaggccggcgcctttcctttaattgccactaactac

SEQ ID NO: 2745 - DNA, 701 bp, Foot-and-mouth disease virus
  source 1..701: mol_type = genomic DNA
ttcccgacgttaatggggaaacaaccacaagcttaacaccgtcttgcccgacgtaaaagggctgcaaccaaaaagcttgtgccgcctttcccggcgttaatgggaggtaaccacaagacaaaccttcacccggaagtaaaacggcaacttcacacagttttgcccgttttcgtgagaaatgggccgtcaacgcacgaaacgcgccgtcgcttgaggaggacttgtacaaacacgatctatgcaggtttccacaactgacacaaaccgtgcaacttgaaaccccgcctggtctttccaggtctagaggggcgacattttgtactgtgcttgactccacgctcggtccactagcgagtgttagtagtagcactgttgcttcgtagcggagcatgatggccgtgggagctcccccttggtgacaaggacccacggggccaaaagccacgtcctaccggacccatcatgtgtgcaaacccagcacggcaactttactgcgaaaaccactttaaggtgacactgatactggtactcaatcactggtgacaggctaaggatgcccttcaggtaccccgaggtaacacgcgacactcgggatctgagaaggggactggggcttctttaaaagtgcccagtttaaaaagcttctatgcctgaataggcgaccggaggccggcgccttttcactgttttactactgtttc

SEQ ID NO: 2746 - DNA, 702 bp, Enterovirus A
  source 1..702: mol_type = genomic DNA
tttaaaacagcctgtgggttgtacccacccacagggcccacgcggcgttagtactctggtatcacggtacctttgtatgcctgttttatctcccttcccccgtaacgttagaagaatgaacaaaagacaattagcaaatccaccaacccaggtgggttttcgtcaagcacttctgtttccccggacctagtaccaataagctgtgcccacggctgaaggggaaaacgttcgttatccggctacctacttcgagaagcctagtaccaccaatgattgtctcaagtgttacgctcagcacaaccccagtgtagttcaggtcgatgagtcaccgaattccccacgggcgaccgtgtcggtggctgcgttggcggcctgcctgcgagtttcactcgcaggacgcttgattcatgacatggtgcgaagagcctattgagctaggcagtagtcctccggcccctgaatgcggctaatcctaaccacggagccatgcgtcacaaaccagtggcgtcatggtcgtaacgagcaattctgtggcggaaccgactactttgggtgtccgtgtttcctgttttatttaccttggctgcttatggtgacaatctagagttgtcatcatatagcgattggattggccatccggatattactttgtgtgatttatctcttgctcgtaagcaattttaaatagtttatagcatcatt

SEQ ID NO: 2747 - DNA, 708 bp, unidentified
  source 1..708: mol_type = unassigned DNA; note = Coxsackievirus A14 isolate SEN-14-254, complete genome.1 sequence
ggggccggagctctggtgatacgttacctttgtgcgcctgttttatttccctaccccggaacaatctagaagcaacgcgctactggccaatagaaagtgtagcaaaccagctacatcccggtcaagcacttctgtctccccggaccgagtatcaataaactgctaacgcggttgaaggagaaaaggttcgttacccggccaactacttcgaaaagcccagtaacaccatgaaagttgcagagtgtttcgctcagcacttcccccgtgtagatcaggtcgatgagtcaccgcgatccccacgggcgaccgtggcggtggctgcgttggcggcctgcctatggggcaacccataggacgctctaatacagacatggtgcgaagagcctattgagctagttggtagtcctccggcccctgaatgcggctaatcctaactgcggagcttatgctcgcgaaccagcgagtagtgagtcgtaacgggtaactctgcagcggaaccgactactttgggtgtccgtgtttccttttattctcatattggctgcttatggtgacaatcaaagaattgttaccatatagctattggattggccatccggtgtgcaacagagctattgtctactcttttgttggatttgttccattgtcctctttcaccacactaaatactctacagtatatactttcccttaattcaaggaaacgatc

SEQ ID NO: 2748 - DNA, 709 bp, Foot-and-mouth disease virus
  source 1..709: mol_type = genomic DNA
aagttttgccgtcgttcccgacgttaaagggagataaccacaagctttgcaccttcttgcccgaagtaaaagggctgcaaccgcaagctttaaaccgcctttcccggcgttaacgggatgcaaccataagatggaccttcgcccggaagtaaaacggcaactcacacagttttgcccgttttcacgagaaatgggacgtcagcgcacgaaacgcgccgtcgcttgaggaggacttgtacaaacacgatctacgcaggttcccacaaccgacacaaaccgtgcaatttgaaatcccgcctggtctttccaggtctagaggggtaacactttgtactgtgattgactccacgctcggtccactggcgagtgtaagtagtagtactgttgcttcgtagcggaacatggtggccgtgggactccctccttggtaacaaggacccacggggccgaaagccacgtcttggacccaccatgtgtgcaaccccagcacggcaaccatactacgaaaaccactttaaactggcactgatactggtactcaaccactggtgacaggctaaggatgcccttcaggtaccccgaggtaacacgcgacactcgggatctgagaagggggctggggcttctataaaagcgcccagtttaaaaagcttctatgcctgaataggcgaccggaggccggcgcctttctctacttactactgtttac

SEQ ID NO: 2749 - DNA, 712 bp, Foot-and-mouth disease virus
  source 1..712: mol_type = genomic DNA
taagtgttaccgtcgtgcccgacgttaaagggaagtaaccacaagcttgacaccgtcttgtccgacgttaaagggctgtagccacaagcttgcaccgcctttcccggcgtaaatgggatgtaaccacaagacacaccttcagccggaagtaaacggcaacaccacacagttttgcccgttttcatgagaaatgggacgtctgcgcacgaaacgcgccgtcgcttgaggagaacttgtacaaacacgatctacgcaggtttccacaactgacacgaaccgtgcaacttgaaactccgcctggtctttccaggtctagaggggtaacactttgtactgtgtttgactccacgcttggtccactagcgagtgttagtagcagcactgttgcttcgtcgcggagcatgatggctgtgggaactcccccttggtaacaaggacccacggggccaaaagccacgtcctcacggacccatcatgcgtgcaaccccagcacagcaactttactgcgaaagccactttaaggtgacactgatactggtactcaaccactggtgacaggctaaggatgcccttcaggtaccccgaggtaacatgcgacactcgggatctgagaagggggctgaggcttctttaaaagcgctcagcttaaaaagcttctatgcctgaataggcgaccggaggccggcgcctttccacttaccaatactgtttt

SEQ ID NO: 2750 - DNA, 713 bp, Enterovirus A
  source 1..713: mol_type = genomic DNA
ccacagggcccacggggcgctagcacactggtgttacggcacctttgtgcgcctgttttactcccctttcccctgtaatttagaagtatcgcaccacggatcaatagcaggtgtgtcgcaccaggcacatctagatcaggcacttctgtctccccggaccgagtatcaataggctgctagcgcggctgaaggagaaaacgttcgttacccggccaactacttcgagaagcttagtaccaccatgaacgttgcagagtgtttcactcagcacaaccccagtgtagatcaggtcgatgagtcaccgcattccccacgggcgaccgtggcggtggctgcgttggcggcctgcctatggggcaacccatgggacgctctaatactgacatggtgcgaagagcctattgagctagttggtagtcctccggcccctgaatgcggctaatcctaaccgcggagcatgtactcacaacccagtgggcagcatgtcgtaacgggtaactctgcggcggaaccgactactttgggtgtccgtgtttccttttattcttacattggctgcttatggtgacaactgaaggattgttaccatatagctattggattggccatccggtgtccaacagagctctgatttatcagtttgttggctttgtgcctttatcacctacagcctactcaaccttagtgtttttgatacaccttaacaataggaa

SEQ ID NO: 2751 - DNA, 715 bp, Parechovirus B
  source 1..715: mol_type = genomic DNA
ggtggggtgggtacgtttctcgctcattgagtgggggcgtggctcaccaaccacacctggttggttcccaggttcatacaataaccacctctttgtaacaactacacctaagcttaatttgcccgcttgaactggacgaaaccgcttggaataagtttggttctcttttgagtgtgttttgtgttagcataatttctgtctctagagtgctttacgctctagtaggggctgtacccgggcggtcccactcttcacaggaatctgcacaggtggctttcacctctggacagtgcattccacacccgctccacaatagaagataatgtatgtctttgtttgtgaaatgcttatgaaacgagtgtgtaggcgtagcggctacttggatgccagcggaactcccctagtggtaacactagcctctgggcccaaaaggcatgtctttgaccattcaagtacacaaccccagtgatgcacacacctagtaatggcttagtaatggacattgattgattatcagacaattgctaggaggcttaggtatgacgggctgaaggatgccctggaggtacccgcaggcaaccttaggagactgtggatctgaccaggggcccaccatggaagcatgggtagaagtcttcggaccttgggttaaaaaacgtctaggcccgccccccacagggatgtggggtttcccttataaccccaatactacact

SEQ ID NO: 2752 - DNA, 717 bp, Enterovirus B
  source 1..717: mol_type = genomic DNA
acccacagggcccactgggcgctagcacactggtatcacggtacctttgtgcgcctgttttatccaccttaccccactgtaacttagaagttaaccaaacacggtcactaggtggctcagtataccaactgagtctagaccaagcacttctgttaccccggactgagtatcaataggctgctcgcgcggctgaaggagaaaacgttcgttacccggccaattacttcgagaaacctagtaccaccatgaaggttgcgcagcgtttcgctccgcacttccccagtgtagatcaggccgatgagtcaccgcgtacctcacgggcgaccgtggcggtggctgcgctggcggcctgcccatggggcaacccatgggacgcttcaaaactgacatggtgcgaagagtctattgagctaattggtagtcctccggcccctgaatgcggctaatcccaactgcggagcagatacccacactccagtgggcagtctgtcgtaatgggcaactctgcagcggaaccgactactttgggtgtccgtgtttccttttattcttatactggctgcttatggtgacaattgagagattgttaccatattgctattggattggccatccggtgacaaacagagcaataatctacttatttgttggtttcgtaccattgaactttagagtactgaagacccttaactttatactaattctcaacacagcaaa

SEQ ID NO: 2753 - DNA, 719 bp, Foot-and-mouth disease virus
  source 1..719: mol_type = genomic DNA
cccataaaggttttaccgtcattcccgacgttaaagggaggtaaccacacgcttgagaccgtcttgtccgacgttaacggactggaaccacaagcttataccgcctttcccggcgttaacggaatgtaaccacaagatggaccttcacccggaagtaaaacggcacacacacacaattttgcccgttttcacgagaaacgggacgtctgcgcacgaaacgcgccatcgcttgaggaggacttgtacaaacacgatctacgcaggtttcccaaccgacacaacccgtgcaacttgaaactccgcctggtctttccaggtctagaggggtgacattttgtactgtaattgactccacgctcggtccactagcgggtgtttagtagctgtattgttgcttcgtagcggagcataatggccgcgggagctcccccttggtaacaaggacccacggggccgaaagccacgtcctaacggacccattatgtgtgcaaccccagcacggcaacttactgtgaaaaccactttaaggtgacactgatactggtactcaactactggtggcaggctaaggatgcccttcaggtaccccgaggtaacatgcgacactcgggatctgagaaggggaccgggacttctttaaaagtgcccggtttaaaaagcttctatgcctgaataggcgaccggaggccggcgcctttcttttgattactactgctttt

SEQ ID NO: 2754 - DNA, 719 bp, Enterovirus A
  source 1..719: mol_type = genomic DNA
ccacccacagggcccacggggcgctagcacactggtgtcacggcacctttgtgcgcctgttttatttcccctcccccccgcaatttagaagttttgcactacagatcaatagcaggtgtgtcgcaccaggcacatctagatcaagcacttctgtttccccggactgagtatcaataggctgctcacgcggctgaaagagaaagcgttcgttatccggccaactacttcgagaagcttagtaccaccatgaacgttgcagagtgtttcgctcagcacatccccagtgtagatcaggtcgatgagtcaccgcactccccacgggcgaccgtggcggtggctgcgttggcggcctgcctatggggcaacccataggacgctctaataccgacatggtgcgaagagcctattgagctagttggtagtcctccggcccctgaatgcggctaatcctaactgcggagcatgtactcacaatccagtgggcagcatgtcgtaacgggcaactctgcagcggaaccgactactttgggtgtccgtgtttcctttttattcttatattggctgcttatggtgacaattgaagaattgttaccatatagctattggattggccatccggtgtctaacagagctattgtttacctgtttgttggatacgtccctctcaatttcaaggtcattaaaactcttaattatatactacttctcaactgtgagaa

SEQ ID NO: 2755 - DNA, 719 bp, Enterovirus B
  source 1..719: mol_type = genomic DNA
cacccacagggcccactgggcgctagtacactggtatcacggtacctttgtgcgcctgtttgaccgacccaccccgaatgcaacttagaagcacaacttggatggtcaataggcggctcggtatgccaactgagtctagaccaagcacttctgttaccccggactgagtaccaataggctgctcgcgcggctgaaggggaaaccgttcgttacccgactaactacttcgagaaacctagtaccaccatgaaagttgcgcagcgtttcgttccacacaaccccagtgttgatcaggtcgatgagtcaccgcaaaccccacgggcgaccgtggcggtggctgcgctggcggcctgcccatgaggcaactcatgggacgcttcaatactgacatggtgcgaagagtctattgagctagttggtagtcctccggcccctgaatgcggctaatcctaactgcggagcagatacccacacaccagtgggcagtctgtcgtaatgggcaactctgcagcggaaccgactactttgggtgtccgtgtttccttttgttcttattctaaccacttatggtgacaattgagaggctgtgaccatattgccactgagttgaccacccggtgacgagcagaacagttgcttacctgtctgttggtcacgtatcattaaaccacaaatccttgaacgctctcctattttgtcataacgcccaacacgtcaaa

SEQ ID NO: 2756 - DNA, 720 bp, Foot-and-mouth disease virus
  source 1..720: mol_type = genomic DNA
ccccccctaagttttaccgtcgttcccgacgttaaagggatgtaaccacaagctagaaaccgtcttgcccggcgttatagggctgtaaccacatgcttgtaccgcctttcccggcgacaacgggatgtaaccacacgattgaccttcacccggaagtaaaacggcaacttcacacatttttgcccgttttcacgagaaacgggacgtctgcgcacgaaacgcgccgccgcttgaggaagacttgtacaaacacgatctaagcaggtctccacaactgacacaaaccgtgcaacttgaaactccgcctggtctttccaggtctagaggggtgacactttgtactgtgcttgacaccacgctcggtccactagcgggtatgagtagcagaactgttgcttcgtagcggagcatggtggccgtgggaactcctccttggtaacaaggacccacggggccaaaagccacgtcctgtggacccaccatgtgtgcaaccccagcacggcaatttttctgtgaaaactaccttaaggtgacactgatactggtactcaaccactggtgacaggctaaggatgcccttcaggtaccccgaggtaacacgcgacactcgggatctgagaaggggactgggacttctttaaaagtgcccagtttaaaaagcttctatgcctgaataggcgaccggaggccggcgcctttcttttaaacactactagacta

SEQ ID NO: 2757 - DNA, 726 bp, Enterovirus B
  source 1..726: mol_type = genomic DNA
ggttgttcccacccacagggcccattgggcgctagcacactggtatcacggtacccttgtgcgcctgttttatacacccttccccaacgaaacttagaagtaaagcaacaaggtcaataggtagctcagtgagccaactgagttatgaccaagcacttctgtcaccccggactgagtatcaataggctgctcacgcggctgaaggagaaagcgttcgttatccggctaactacttcgagaaacctagtaccaccatgaaggttgcgtagcgtttcgatcagcacaaccccggtgtagatcaggccgatgagtctccgcattcctcacgggcgaccgtggcggtggctgcgctggcggcctgcccatggggcaacccatgggacgcttcaatactgacatggtgcgaagagtctattgagctagttagtagtcctccggcccctgaatgcggctaatcctaactgcggagcacacacccccaacccaggaggcagtgtgtcgtaacgggtaactctgcagcggaaccgactactttgggtgtccgtgtttccttttattcttatactggctgcttatggtgacaattgagagattgttaccatatagctattggattggccatccggtgactaacagagctattgtatacctgtttgttggttttataccattaaattgcaaagttctagagaccctcaattttatcctattactaaacgcagcaaa

SEQ ID NO: 2758 - DNA, 726 bp, unidentified
  source 1..726: mol_type = unassigned DNA; note = unclassified Enterovirus sequence
acatgggcacccagagggcccacgtggcgtagaactcacgtggcgtagaactccggtattacggtacccttgttcgcctattttaccaccccttccccagaaacttagaagtcatgatcacaaggctcaatagatacttgggcaaaccagcccaaggacgagcaagcacttctgtctccccgggaggcaacgctgttaggctgtccccacggccgaaggcaacgctaccgttaaccggcgtggtactgcgggaagtctagtaacatcattgaatttctttgacgttacgttcagcacacaaacccagtgtgtagttttggctgatgagtgcctgcattccccactggcgacagtggcaggcgctgcgttggcggccaactctcagggcaacctgagagacgtcaaattaaggacatggtgtgaagaacctactgcgctactgcgtagtcctccggcccctgaatgcggctaatcctaactcgggagcatctgcacacaatccagtgtgaagggtgtcgtaacgggcaactcctgagcggaaccgactactttgggtgtccgtgtttcctgttttatttaccttggctgcttatggtgacaatctagattgttaccatatagcaattgggttggccacctggttttgtaagcttgtgacttttagtacgctaaaacacttactataatacaacacagacattactataaaaccacttgaaagagagg

SEQ ID NO: 2759 - DNA, 727 bp, unidentified
  source 1..727: mol_type = unassigned DNA; note = unclassified Hepatovirus sequence
tcccctctttgggctactctggctgggggtagtaaaatacccagccctcgtttgcctagagtttaggctaaaacccctttccctttgtaaatacgttcatttgtaaatattgattcctgcaggttcaggctttcttgaatcatgttgtgctttaacacacacttactattttgccataagtgcgatggatggaaacttccatcaaaccttttaacacaggatgttattagggcagtttctcttaatatatctctgggacattcttcggtcccattgtttctcctttctatcttcttgttttccgggttctcaggataccaatggagcgaccactgcgcccggtggggttaaccagaagattagcttctggctgtagctgctaaaagtcctgacgttatagagcgccgtcacggagttagtgattaaactcaggtgtttggaaattcattgatcttctagaaagggtaggctacgggtgaaaccctttacactaatacctatattaggagatgtgttgcataggtgaagggtactggtaaaggggattttcacgatgaacctttcaacagttgtggacccacctcatgcactagatgctttgatttgaagaacacttggggtcacttcccgagtgatcgcgccactaggcgccctcctctatgagttgtaggggtaatcaggggcatttaggtttccacatttaaaagatttatatgattgattcaaa

SEQ ID NO: 2760 - DNA, 729 bp, Enterovirus B
  source 1..729: mol_type = genomic DNA
gggttgttcccacccacagggcccacggggcgctagcactctggtatcacggtacctttgtgcgcctgttttatccaccctcccccaaatgtaacctagaagtacaatactaacggtcaataggcggcacagcacaccagctgggtctagaccaagcactcctgttgccccggactgagtatcaataggctgcctccgcggctgaaggagaaaacgttcgttatccggccaattacttcgagaaacccagtaccaccatggaagttgcgcagcgtttcgttccgcacaaccccagtgtagatcaggtcgatgagtcaccgcattccccacgggcgaccgtggcggtggctgcgttggcggcctgcccatggggtgacccatgggacgcttcaatactgacatggtgtgaagagtctattgagctaattggtagtcctccggcccctgaatgcggctaatcctaactgcggagcagacactcacaagccagtgagcagtctgtcgtaacgggtaactctgcagcggaaccgactactttgggtgtccgtgtttccttttattcttacattggctgcttatggtgacaattgagaaattgttaccatatagctattggattggccatccggtgactaacagagcaattgtctatctgtttgttggatttgtaccactgaactataaggtattgaacacacttaactttatcatatcactaaactcagcaaa

SEQ ID NO: 2761 - DNA, 730 bp, Enterovirus B
  source 1..730: mol_type = genomic DNA
gttgttcccacccacagggcccactgggcgctagcacactggtatcacggtacctttgtgcgcctgttttatgcttcctcccccactatagtaatctagaagcttgaactacatggccaacagacaacccggtacaccaaccgggccccggccaagcacttctgtatccccggactgagtatcagtaagctgctcgcgcggctgaaggagaaaacgttcgttacccggccacttacttcgagaaacctagtaacgccatgaaagttgcgcagcgtttcgctccgcacaaacccagtgtagatcaggtcgatgagtcaccgcatcccccacgggcgaccgtggcggtggctgcgttggcggcctgcccatggggtaacccatgggacgcttcaatactgacatggtgcgaagagtctattgagctaagtggtagtcctccggcccctgaatgcggctaatcctaactgcggagcagatacccacactccagtgggcagtctgtcgtaacgggcaactctgcagcggaaccgactactttgggtgtccgtgtttccttttgtcttttacactggctgcttatggtgacaattgaaagattgttaccatatagctattggattggccatccggtatcaaacagagcaattatttacttgtttgttggttatatacctctcgataccaaggttctaaaaacactcaactacatcttgttattgaatacgttgaa

SEQ ID NO: 2762 - DNA, 740 bp, unidentified
  source 1..740: mol_type = unassigned DNA; note = unclassified Parechovirus sequence
cccgtggcttatgccacgggacccgtgcccccgtccagggggttttacttatgctcaggcgtttgcattatcgcctggatctggctctgggcaccctttcagcccctgggcatgggtttaaactgcctacctgtaacacttaacatctaagaaactgatttgtaaccaaccctggccagatgttgccagcccaagccacttggaataaggtgggcaatgtcacattggtgcttaaaggttgcgtccaaatttttcttttccaaccactcatgtggacggtgtgcaaactccaccgtaacacttctaggtgacttccacacttgtggggctaaagcaccagagtctttgcttcaaccatattgtggtgacagcaaagcatcctgaaattagttagtaatgattctagatccacttctgtggtgctgcatgcctgcggagcaatggggggtgaccctcacctcaggggccgaaagccacggtgtttaaagcacccatgcagtatgcttgtctgtttaggattgtgaacactgaaagtaaggatgatgagtggtcactgtggtcactggttgtcgtacgggggctgaaggatgcccagaaggtacccgtaggtaaccttaagagactatggatctgatctggggccagggagtgatgtactctatacacctgccttggttaaaaaacgtctaggcccccccaacctgggggaccaggttttcctggtcattttgcaaaggaat

SEQ ID NO: 2763 - DNA, 741 bp, unidentified
  source 1..741: mol_type = unassigned DNA; note = unclassified Sapelovirus sequence
tcacactcatttcgccccctcaccctactcaggcaacccccaccccttctcttacgggagttagggccaaggatctagtgtagtggtgttgtatccccttaccttaaacccatcccatccaagcggactggtattatggctttagattgaataatggttgatgaatccaaacctgttactcattcaggggaaaaatgaagacattctctatggatttgacttgttacgaccaagagttagcgcttcgcgcgctggccgtatggactgtttaatggttactctatggattatgatttcagggttggccgcccaggataaaaggcaattgtggtaagtgatgttagtcattggcagttgaaacctgcctagaacatctaaggtctacgctgtgcgggccgaagtaagtctaggaacaacagggagtatgctgttttttgctttcacccaacacgaccgtacacgaaagagctagaggcatctggaggcaaagggaaaagaatttcttagcccgaatgttcattagagtccttgacgaatgcgtcccctctgtcccgagggtgaggcgtatggcgcatgctcatggcattactccaaggtgtatctagaggggggggccccctctacttagtctagtgctacctgacagggccgcggctggtcgtttgtgtatggtataaccagtagtaatcccccatggattgctttaactccccctcctcccttcacaagacattctctaag

SEQ ID NO: 2764 - DNA, 741 bp, Enterovirus B
  source 1..741: mol_type = genomic DNA
ttaaaacagcctgtgggttgatcccacccacagggcccattgggcgctagcactctggtattacggtacccttgtgcgcctgttttacacgcccctccccaagcaacttagaagtctgtcacaaatggtcaatagacagctcaacacgccagttgagtctagaccaagcacttctgtcgccccggaccgagtatcaatagactgctagcgcggttgaaagagaaaacgttcgttacccggccaactacttcgggaaacctagtaccaccatgaaagttgcgcagtgtttcgctccgcacaaccccagtgtagatcaggtcgatgagccaccgcattccccacaggcgactgtggcggtggctgcgttggcggcctgcccatggtacaacccatgggacgcttcaatactgacatggtgcgaagagtctactgagctagttggtagtcctccggcccctgaatgcggctaatcctaactgcggagcaggtacccacgagccagtgggcagcctgtcgtaatgggcaactctgcagcggaaccgactactttgggtgtccgtgtttccatttactcttatactggctgcttatggtgacaatcacggaattgttaccatatagctattggattggccatccagtgactaacagagcgattatattcctttgtgttggttttgtaccactcaccgtcacgagctttacaacgctaaactacattttgtcattgaacacggcaag

SEQ ID NO: 2765 - DNA, 741 bp, Enterovirus B
  source 1..741: mol_type = genomic DNA
ttaaaacagcctgtgggttgtacccacccacagggcccactgggcgctagcactctggtactacggtacctttgtgtgcctgttttatacccctccccctactgaaacttagaagcaattcataccgatcaatagtgggcgtggcacaccagccgtgtctagatcaagcactcctgtttccccggaccgagtatcaatagactgctcacgcggttgaaggagaaaacgttcgttatccggctaactacttcgaaaaacctagtaacaccatgaaagttgcggagtgtttcactcagcacttccccagtgtagatcaggtcgatgagtcaccgcattcctcacgggcgaccgtggcggtggctgcgctggcggcctgcctatggggtgacccataggacgctctaatacagacatggtgcgaagagtctattgagctagttagtagtcctccggcccctgaatgcggataatcctaactgtggagcagatacccacgaaccagtgggcagtctgtcgtaacgggcaactccgcagcggaaccgactactttgggtgtccgtgtttccttttattccaaatctggctgcttatggtgacaattgagagattgttgccatatagctattggattggccatccggtgaataatagagcgataatatatttgtttgttggattcgtgccacttagtctgaaagttttgagaacactcaactacgttttattgctgaatagtgcaag

SEQ ID NO: 2766 - DNA, 745 bp, Enterovirus A
  source 1..745: mol_type = genomic DNA
ttaaaacagcctgtgggttgcacccactcacagggcccactgggcgctagcacactgatttcccggaatccttgtgcgcctgttttatatcccctcccccatgcgcaacttagaagcaatctacaccttcgatcaatagcaggcgtggcgcgccagccatgtctagatcaagcacttctgtttccccggactgagtatcaataaactgctcacgcggttgaaggagaaaatgttcgttacccggctaactacttcgagaaacctagtagcaccatgaaaattgcagagcgtttcgctcagcgcttcccccgcgtagatcaggctgatgagtcactgcattcctcacgggcgaccgtggcagtggctgcgttggcggcctgcccatggggtaacccatgggacgctctaatatggacatggtgtgaagagtctattgagctagttagtagtcctccggcccctgaatgcggctaatcctaactgcggagcacatacccccaaaccagggggcggtgtgtcgtaacgggcaactctgcagcggaaccgactactttgggtgtccgtgtttccttttattcttatattggctgcttatggtgacaattgaaagattgttaccatatagctattggattggccatccggtgaataacagagccttgatatacctttttgtagggtttataccacttactcttcgcgttgttgagactctaaagtacattctaatcttgaacactagaaa

SEQ ID NO: 2767 - DNA, 746 bp, Enterovirus A
  source 1..746: mol_type = genomic DNA
ttaaaacagcctgtgggttgcacccacccacagggcccactgggcgttagcacactgattccacggaatccttgtgcgcctgttttacaaccccttcccaaactcgtaacttagaagaatagcacgctaccgatcaatagcaggcatggcgcaccagccatgtctagatcaagcactcctgtctccccggaccgagtatcaatagactgctaacgcggttgaaggagaaaacgttcgtcacccggctaactacttcgagaaacctagtaacaccattgaagctgcggagcgtttcgctcagcactacccccgtgtagatcaggtcgatgagtcactgcaacccccacgggcgaccgtggcagtggctgcgttggcggcctgcctatggggtaacccataggacgctctaaagtggacatggtgcgaagagtctattgagctagttagtagtcctccggcccctgaatgcggctaatcctaactgcggagcgcataccctcaacccagggggtggtgcgtcgtaacgggcaactctgcagcggaaccgactactttgggtgtccgtgtttccttttattcttatactggctgcttatggtgacaattgaaagattgttaccatatagctattggattggccatccagtgactaatagagctttgatatacctgtttgtgggttttgttccactcaccaatcgtgcagtttacactctgaagtacattttaatcttgaataatagaaa

SEQ ID NO: 2768 - DNA, 746 bp, Enterovirus A
  source 1..746: mol_type = genomic DNA
tttaaaacagcctgtgggttgcacccacccgcagggcccactgggcgccagcactctggtttcgtggaacctttgtgcgcctgttttatcaccctcttcccaaactcgcaacttagaagtaacactttactgatcaatagcaggcgtggcgcaccagccatgtctagatcaagcacttctgtctccccggaccgagtatcaataggctgctcacgcggctgaaagagaaaacgttcgttatccggctaactacttcgagaaacttagtagcaccgttgaaactgcagggtgtttcgctcagcacttcccccgtgtagatcaggtcgatgagtcactgcaatccccacgggcgaccgtggcagtggctgcgttggcggcctgcctatggggtaacccataggacgctctaatgtggacacggtgcgaagagtctattgagctagttagtagtcctccggcccctgaatgcggctaatcctaactgcggagcgcatgcccccgaaccaggaggtggtgcgtcgtaatgggtaactctgcagcggaaccgactactttgggtgaccgtgtttctttttattcctattatggctgcttatggtgacaattaaagaattgttaccatatagctattggattggccatccggtgtctaacagagctattatatatctgtttgttgggtttgttccattatcacacacatcactcaatacattgtatttcattgtgggattgaacacaagaaa

SEQ ID NO: 2769 - DNA, 746 bp, Enterovirus A
  source 1..746: mol_type = genomic DNA
ttaaaacagcctgtgggttgtacccactcacagggcccactgggcgttagcactctgattccgcggaatccttgtgcgcctgttttaaaacccctccccacacttgtaatctagaagtaatgcactcttatgatcaatagcaggcgtggcgcaccagccatgtcttgatcaagcacttctgtctccccgggctgagtatcaatagactgctcacgcggttgaaggagaaaatgctcgttatccggctaactacttcgagaaacctagtagcaccagtgaagctgcggggcgtttcgttcagcacttcccccgtgtagatcaggtcgatgagtcactgcgttccccacgggcgaccgtggcagtggctgcgttggcggcctgcctatggggcaacccataggacgctctaatgtggacatggtgcgaagagtctattgagctagttagtagtcctccggcccctgaatgcggctaatcctaactgcggagcacatgccctcaagccagagggtggtgtgtcgtaatgggcaactctgcagcggaaccgactactttgggtgtccgtgtttccttttattcttatactggctgcttatggtgacaatcacagaattgttgccatatagctattggattggccatccggtgcacaacagagcaattatctatttatttgttggatttacccctttgacacttacatctcttaacacattgcactacatcctatttttgaatacgaggaa

SEQ ID NO: 2770 - DNA, 747 bp, Enterovirus A
  source 1..747: mol_type = genomic DNA
ttaaaacagcctgtgggttgtacccacccacagggcccactgggcgctagcacactgattctatggaatctttgtgcgcctgttttataatccctttcccaaaattgcaacttagaagaacagtactttatcgatcaatagcaggcatgacgcaccagttatgtctagatcaagcactcctgtttccccggaccgagtatcaatagactgctaacgcggttgaaggagaaaacgtccgttacccggctaactacttcgagaaacctagtagcaccattgaagctgcagagcgtttcgctcagcacttccccagtgtagatcaggttgatgagccactgcactccccacgggcgaccgtggcagtggctgcgttggcggcctgcctatgggacaacccataggacgctctaaagtggacatggtgcgaagagtctattgagctagttagtagtcctccggcccctgaatgcggctaatcctaactgcagagcacatgccctcaacccagggggtggtgtgtcgtaacgggcaactctgcagcggaaccgactactttgggtgtccgtgtttccttttattcttatattggctgcttatggtgacaattgagagattgttaccatatagctattggattggccatccggtgaccaacagagctttgatatacctgtttgcgggttttattccactctccagtcgttcagtccatactataaagtgcattttgattctgaacaatagaaa

SEQ ID NO: 2771 - DNA, 747 bp, Enterovirus A
  source 1..747: mol_type = genomic DNA
ttaaaacagcctctgggttgcacccacccacagggcccactgggcgctagcacactggtatcacggtacctttgtgcgcctgttttatacaccctccccccttgtaacttagaagaaacaaacaaacgatcaatagtaggcttagcactccagctaagtctcgatcaagcacttctgttaccccggaccgagtatcaataggctgtacccacggctgaaagagaaaacgttcgttacccggctatctacttcgggaaacccagtaccatcatgaagattgcaaagcgtttcgctcagcacaaccccagtgtagatcaggtcgatgagtcactgcattccccacaggcgactgtggcagtggctgcgttggcggcctgcctatggggaaacccataggacgctttaatattgacatggtgcgaagagtctactgagctaggtagtagtcctccggcccctgaatgcggctaatcccaaccacggagcaggcgctcacactccagtgagtagcttgtcgtaatgcgaaagtctgtggcggaaccgactactttgggtgtccgtgtttccttttatttttatcatggctgcttatggtgacaatctaagattgttatcatatagctattggattggccatccggtgaattctagagatattatttacttgtttgttggttttaccacattaaacattaccaattacagaactctcctctacatcctgttattgaataatagaaagagaaa

SEQ ID NO: 2772 - DNA, 748 bp, Enterovirus A
  source 1..748: mol_type = genomic DNA
ttaaaacagcctgtgggttgcacccacccacagggcccactgggcgccagcacactgattctacggaacctttgtgcgcctgttttacaaccccttccccgaaactcgcaacttagaagaacagcacgctatcgatcaatagcaggcatggcgcgccagtcatgtctagatcaagcacttctgtctccccggactgagtatcgatagactgctaacgcggttgaaggagaaaacgtccgttacccggctaactacttcgagaagcctagtaacaccattgaaactgcagagtgtttcgctcagcactaccccagtgtagatcaggtcgatgagtcactgcactccccacgggtgaccgtggcagtggctgcgttggcggcctgcctatggggtaacccataggacgctctaaagtggacatggtgcgaagagcctattgagctagttagtagtcctccggcccctgaatgcggctaatcctaactgcggagcgcatgccctcaatccagggggtggtgcgtcgtaatgggcaactctgcagcggaaccgactactttgggtgtccgtgtttccttttattcttatgttggctgcttatggtgacaattgagagattgttgccatatagctattggattggccatccagtgactaacagagctttgatatacctgtttgtgggttttgttccactcaccaattgtacagttcaaactttgaagtacattttaattctgaataatagaaa

SEQ ID NO: 2773 - DNA, 749 bp, Enterovirus A
  source 1..749: mol_type = genomic DNA
ttaaaacagcctgtgggttgcacccacccacagggcccattgggcgctagcacactgattctatggaatctttgtgcgcctgttttagtatccctccccctcaaacacgtaacttagaagaatagcacgctatcgatcaatagcaggcgtggcgcaccagccatgtctagatcaagcacttctgtctccccggattgagtatcaatagactgctaacgtggttgaaggagaaaacgtccgttacccggctaactacttcgagaaacctagtaacaccattgaaactgcagagcgtttcactcagcactaccccagtgtagatcaggtcgatgagtcactgcattccccacgggcgaccgtggcagtggctgcgttggcggcctgcctatggggtgacccataggacgctctaaagtggacatggtgtgaagagtctattgagctagttagtagtcctccggcccctgaatgcggataatcctaactgcggagcgcatgccctcaatccagggggtggtgcgtcgtaacgggcaactctgcagcggaaccgactactttgggtgtccgtgtttccttttatctttatactggctgcttatggtgacaattgagagattgttaccatatagctattggattggccatccagtgaccaacagagctttgatttacctgtttgtgggttttgttccactcaccagttgtacagttcatactttgaagtatattttaatcctgaataatagaaa

SEQ ID NO: 2774 - DNA, 750 bp, Enterovirus A
  source 1..750: mol_type = genomic DNA
acttaaaacaaacctgtgggttgcacccacccacagggcccactgggcgctagcacactgattctatggaatctttgtgcgcctgttttataaccccttccccaaaactgtaacttagaagaatagcactctatcgatcaatagcaggcatggtgcgccaatcatgtctagatcaagcacttctgtctccccggatcgagtatcaatagactgctagcgcggttgaaggagaaaacgtccgttacccggctaactacttcgagaaacttagtagcaccattgaagccgcagagtgtttcgctcagcactcccccagtgtagatcaggtcgatgagtcactgcactccccacgggcgaccgtggcagtgactgcgttggcggcctgcctatggggcaacccataggacgctctaaagtggacatggtgcgaagagtctattgagctagttagtagtcctccggcccctgaatgcggctaatcctaactgcggagcgcatgccctcaatccagggggtggtgtgtcgtaacgggcaactctgcagcggaaccgactactttgggtgaccgtgtttccttttattcttatactggctgcttatggtgacaattgagagattgttaccatatagctattggattggccatccagtaaccaacagagctttgatatacttgtttgtgggtttcgttccactcaccaatcgtacaatccatactctaaagcacattttgattctgaacaatagaaa

SEQ ID NO: 2775 - DNA, 750 bp, Enterovirus A
  source 1..750: mol_type = genomic DNA
ttaaaacagcctgtgggttgcacccacccacagggcccactgggcgctagcacactgattctacggaatctttgtgcgcctgttttataacccccttccccccaaaactgtaacttagaagaatattacactactgatcaatagcaggcatggcgcgccagtcatgtctagatcaagcacctctgtctccccggactgagtatcaatagactgctagcgcggttgaaggagaaaacgtccgttacccggctaactacttcgagaaacctagtagcaccattgaagctgcggagtgtttcgctcagcactcccccagtgtagatcaggtcgatgagtcactgcactccccacgggcgaccgtggcagtggctgcgttggcggcctgcctatggggcaacccataggacgctctaaagtggacatggtgtgaagagtttattgagctagttagtagtcctccggcccctgaatgcggctaatcccaactgcggagcacatgctctcaatccagagggtggtgtgtcgtaacgggcaactctgcagcggaaccgactactttgggtgtccgtgtttccttttattattatattggctgcttatggtgacaattgagagattgttgccatatagctattggattggccatccagtgacaaacagagctttgatatacttgttcgtgggttttgttccactcaccagtcgtacagttcatactctaaagtacattctgattctgaacaatagaaa

SEQ ID NO: 2776 - DNA, 750 bp, Enterovirus B
  source 1..750: mol_type = genomic DNA
ttaaaacagcctgtgggttgatcccacccacagggcccactgggcgccagcacactggtatcgtggtacctttgtgcgcctgttttataccccctacccccacatgtactctagaagcaaggcaaacctgaccaatagtaggtgtggcacaccagccgcattttggtcaagcacttctgtttccccggaccgagtatcaataagctgctcacgcggctgaaggagaaaccgttcgttacccgaccagctacttcgagaaacctagtaacactatgaacgttgcggagtgtttcgttcagcacttcccccgtgtagatcaggtcgatgagtcaccgcattcctcacgggtgaccgtggcggtggctgcgttggcggcctgcctacgggttcgcccgtaggacgctctaataccgacatggtgtgaagagtccattgagctagctggtagtcctccggcccctgaatgcggctaatcctaactgcggagcaggtgctcacagaccagtgagtagcctgtcgtaacgggcaactctgcagcggaaccgactactttgggtgtttttccttttttcttctcttatattggctgcttatggtgacaattaaagaattgttaccatatagctattggattggccatccggtgacgagcagagccattgtttacctctttgttggatttgtacctttgaaccacaaagtcttgaataccattcatctcattttaaagttcaactcagctaaaagaaa

SEQ ID NO: 2777 - DNA, 751 bp, Enterovirus A
  source 1..751: mol_type = genomic DNA
tttaaaacagcctgtgggttgtacccacccacagggctcactgggcgctagcacactggtatcacggtacccttgtgcgcctgttttatacaccctcccccctttttgtaacttagaagaaacaaacacacgatcaatagcaggcttagcgcaccagctaagtcttgatcaagcacttctgttaccccggactgagtatcaataagctgtgcccacggctgaaagagaaaacgttcgttacccggctgtctacttcgggaaacctagtaccatcatgaagactgcaaagcgtttcgctcagcacaaccccagtgtagatcaggtcgatgagtcactgcattcctcacaggcgactgtggcagtggctgcgttggcggcctgcctatggggaaacccataggacgctttaatgttgacatggtgcgaagagtctactgagctaggtagtagtcctccggcccctgaatgcggctaatcccaaccacggagcaggcgctcacactccagtgagtagcctgtcgtaatgcgcaagtctgtggcggaaccgactactttgggtgtccgtgtttccttttattcttatcatggctgcttatggtgacaatctaagattgttatcatatagctattggattggccatccggtgaactctagagatattatctatttgtttgttggttttaccaagttaaacatcaccagctacaccactcttctttatatcatattattgaacagtaaaaagagaaa

SEQ ID NO: 2778 - DNA, 751 bp, Enterovirus A
  source 1..751: mol_type = genomic DNA
ttaaaacagcctgtgggttgtgacccacccacagggcccactgggcgctagcactctgattctacggaatccttgtgcgcctgttttatgtcccttcccccaatcagtaacttagaagcattgcacctctttcgaccgttagcaggcgtggcgcaccagccatgtcttggtcaagcacttctgtttccccggaccgagtatcaatagactgctcacgcggttgagggagaaaacgtccgttacccggctaactacttcgagaagcctagtagcaccatgaaagttgcagagtgtttcgctcagcacttcccccgtgtagatcaggtcgatgagtcactgcgatccccacgggcgaccgtggcagtggctgcgttggcggcctgcctgtggggtaacccacaggacgctctaatatggacatggtgcaaagagtctattgagctagttagtactcctccggcccctgaatgcggctaatcctaactgcggagcacataccctcgacccagggggcagtgtgtcgtaacgggcaactctgcagcggaaccgactactttgggtgtccgtgtttccttttattcttatactggctgcttatggtgacaattgaaagattgttaccatatagctattggattggccatccggtgtgcaacagagctattatttacctatttgttgggtatataccactcacatccagaaaaaccctcgacacactagtatacattctttacttgaattctagaaa

SEQ ID NO: 2779 - DNA, 752 bp, Enterovirus C
  source 1..752: mol_type = genomic DNA
ttaaaacagctctggggttgttcccaccccagaggcccacgtggcggctagtactctggtatcacggtacccttgtacgcctgacatcccattccctactgaaggagaagcaaattgcacgatatcaaaaaaagggggtacaaaccagaaccaccacgaacaagcacttctgttaccccggtgatattgcatagactgttcccacggtcaaaagcgattgatccgttatccgctcaagtacttcgagaagccttagtatctccttggaatcttccgatgcgttgcgctcaacactcgaccccggagtgtagcttaggtcgatgagtctggacgatcctcactggcgacagtggtccaggctgcgttggcggcctacctatggcccaaagccataggacgctagttgtgaacaaggtgtgaagagcctattgagctactcgagagtcctccggcccgtgaatgcggctaatcccaaccacggatcaggtgattgcaatccagcagttggcctgtcgtaacgcgcaagtctgtggcggaaccgactactttgggtgaccgtgtttccttttatttttattactggctgcttatggtgacaatcgaggattgttatcataaagcgaattggattggccatccggtgaaagtaaaacacattatttacctttttgttggatttactacattatccacgttcactctagatttaattcgcatagttcttttgactagaagattttaccaacataaca

SEQ ID NO: 2780 - DNA, 756 bp, Enterovirus A
  source 1..756: mol_type = genomic DNA
cagacgtgtgctcttcccgatgtgggttgtacccacccacagggcccaatgggcgctagcacaccggtatcacggtacccttgtgcgcctgttttatgcaccctccccctatgtaacttagaagaaacaaacacacgatcaatagtaggcttggcgcgccagctaagtcttgatcaagcacttctgttaccccggactgagtatcaataggctgtacccacggctgaaagagaaaacgttcgttacccggctatctacttcgggaaacctagtaccatcatgaagactgcaaagcgtttcgctcagcacaaccccagtgtagatcaggtcgatgagtcactgcattcctcacaggcgactgtggcagtggctgcgttggcggcctgcctatggggaaacccataggacgctttaatgttgacatggtgcgaagagtctactgagctaggtagtagtcctccggcccctgaatgcggctaatcccaaccacggagcaagcgctcacaatccagtgagtagcttgtcgtaatgcgaaagtctgtggcggaaccgactactttgggtgtccgtgtttccttttatttttatcatggctgcttatggtgacaatctaagattgttatcatatagctattggattggccatccggtgaactctagagatattatctatttgtttgttggttttaccaagttaaacatcactagttacaccaccttactttatattatactactgaataatagaaaaagaaa

SEQ ID NO: 2781 - DNA, 759 bp, Parechovirus B
  source 1..759: mol_type = genomic DNA
ttgaaaggggggccctgcagccgatataggctgcagggttcccctggtggggtgggtacgtctctcgctcattgagtgggggcgtggctcaccaaccacacctggttggtccccaggttcatgcaataaccactttttgtaatctttacatctaagcttaattcacccactagaactggacgaaaccgcttggaataagtttggttctctcttgagtgtgttttgtgttagcataatttctgtctctagagtgctttacactctagtaggggctgtacccgggcggtcccactcttcacaggaatctgcacaggtggctttcacctctggacagtgcattccatacccgctccacaatagaagatgatgtatatctttgtttgtgaaatgctcatgaaacgtgtgtgtaggcgtagcggctacttgaatgccagcggaacccccctagtggtaacactagcctctgggcccaaaaggcatgtctctgaccattcaagtacacaaccccagtgatacacacatttagtaatggctcagtaatggacattgattgatcatcagacaattgttaggaggcctaggtatgacgggctgaaggatgccctggaggtacccgcaggtaaccttaagagactgtggatctgaccaggggcccaccatggaaacatgggtagaagtcttcggaccttgggttaaaaaacgtctaggcccgccccccacagggatgtggggtttcccttataaccccaatatcacatt

SEQ ID NO: 2782 - DNA, 788 bp, unidentified
  source 1..788: mol_type = unassigned DNA; note = unclassified environmental samples sequence
cgataaaccggttatggagaccttctttggagaataatattttaaccgttattagctctttagaacttaaaaggatgattaatttctttgcacttctcccgtgctttatagattttacctatatgtgagttaaccctctcactccaatttgccctgagtgggcataaataactgaacgacggtatgtactttgtacgattccgtgaccagatgaatatagctgatgagtatcttagactcagcttgtatcttcattattggttaaccaaccttaccctcattaataaactgaatcccatatgggtccgtttcttgtttcttttgaattattattaaatctgaaaaggtaacatgtagttgtgaggcatgaggtactaccttagaaaggaatagaatttttggtttctctccgtctagaacaatgacggagtctcgcttgaaccctttgttattattgatcgtcacacaccagtgacattccgagtaagcatttatattgactactttgggcttgcacgatcagtccccaggctgatctctccccatcttatatcttgaatatgactatactcattgatctctaatacttagttattacacagcgtttctcttgattggtttcgaaaacgtgcgagagttttatacgcctgttaacccaggtaccatttcgttgatgcgattatctcgcaaaagaaactttttacggccaacatgaatggttagcccccttatagcctagcgatattatttatttaattttcagttaggcatcacaaataattcccacc

SEQ ID NO: 2783 - DNA, 807 bp, unidentified
  source 1..807: mol_type = unassigned DNA; note = unclassified Passerivirus sequence
ttgaaagccccacctggggggctttccctgtgctgcgacctgtcgctaaccaagaggcatgacctcaagattggacccacagtcgccacaggtgtccgttgatacgctccggacctaacccggataatgtaacatcaaattatttaagatttatgagcttatatactgttatgaacaccagtaaacatgttagattaagagcaaaacacccccctcgtcaattctagaagtccgcgagggatttagggtagcaaactaggaatctagatgcatattcttgttttaaaacccacgctgcaagtgatctgttcactctcatccaccctcagggtggtcagtgtggtgagtcatagcgacacctaacagaggctaacctagtaactcttgtgaagttcaacacgctgacaggattccacgtccgtttactgctagcattcccgctcagagggtggcccaagtaattggtgctctgagtgtgcgtgagctagtatcccgcgagggataggtgtgttgtaatgacacaagttggtgaaaggtaaagtgctttaggctagctactggcccattggctacgagtagacatgtgcaggaggtacccgctcatcttagcggatgtgacctgtagctaattagtcaatgctcgctgtagaaatcttttccccttttttcttttatatacagagtgattcgcatttgtattgaagattgtgtgcctagtgtatcttggtattatcagaggaagcaatttaaactggattttcaattaggaggattaaaaccttgttaactttttataagcattataaa

SEQ ID NO: 2784 - DNA, 833 bp, Cardiovirus B
  source 1..833: mol_type = genomic DNA
tttccggcccaggctaagagaaacatataagttagatttgatccaaatttcttgacgaattcggaacgagatgttctccctcccttgccgcttgttcacacccataactctgattcggccctttgtgacaagccccttggtgaaagaacctctctccttccgacgtggttggaattaacatcacttccgacgaaagtgctatcatgcctccccgattgtgtggtgttttctgccctgctgggcggagcattttcgggttgagaaaccttgaatcctttcttttggaaccttggttcccccggtctaagccgcttggaatatgacagggttattttctttattcttatttctacttttatgggttctatccatgaaaagggtatgtgctgccccttccttctttggagaattcacacggcggtctttccgtctctcaacaagtgtgaatgcagcatgccggaaacggtgaagaaaacagtcttctgtggaagtctagagtgcacatcgaaacagctgtagcgacctcacggtagcagcggaatcccctcttggcgacaagagcctctgcggccaaaagccccgtggataagatccactgctgtgagcggtgcaaccccagcaccctgattcgatggttactctctacggaatcaaaagatggttttctcaagccctccggtagagaagccaagaatgtcctgaaggtaccccgcgtgcgggatctgatcaggagaccaattgacagtgctttacactgtcactttggtttaaaaactgtcacagcttctccaaaccaagtggtcttggttttccactttttattgaatggtaat

SEQ ID NO: 2785 - DNA, 963 bp, Cardiovirus B
  source 1..963: mol_type = genomic DNA
tttgaacgcgggacctgcgatagtgccaacccacgtcttttcccactcctaacccggttcccacctcgggtccattgtaaggaccagatatatcatcccttgaatgctggctaatcagaggaaagtcagcattttccggcccaggctaagagaaacatataagttagaaatgattctaatcccttgacgaaatcagaacgagatgttctccctcccttgccgcttgttcacacccactttattgattcggccttttgtgacaagccccttggtgaaaggacctctctctttctggcgtggttggaattaacatcctttccgacgaaagtgctaacatgcctccccgattatgtgatgttttctgccctgctgggcggagcattctcgggttgagaaatctcagaacttttcctttggaactttggttcccccggtctaagccgcttggaatatgacagggttattttcttaatcttatttctacttttatgggttctatccataaaaagggtatgtgctgccccttccttctttggagaattcacacggcggtctttccgtctctcagcaagtgtgaatgcagcatgccggaaacggtgaagaaagcagttttctgtggaagtctagagtgcacatcgaaacagctgtagcgacctcacagtagcagcggactcccctcttggtgacaagagcctctgcggccaaaagccccgtggataagatccactgctgtgagcggtgcaaccccagcaccctgattcgatggtcattctctacggaaccagagaatggttttcctaagccctccggtagagaagccaagaatgtcctgaaggtaccccgcgtgcgggatctgatcaggagaccaattgacagtgctttacactgccactttggtttaaaaattgtcacagcttctccaaaccaagtggtcttggtttttcaactttattgaatggcaat

SEQ ID NO: 2786 - DNA, 992 bp, Foot-and-mouth disease virus
  source 1..992: mol_type = genomic DNA
ttgaaagggggcgctagggtctcacccctagcatgccaacgactgctcctacgtcgcactccacacttatgtgtgcgcgcgcgggaatcgatggactatcgttcacccacctacagctggactcacggcaccgcgtggccattttagctggactgtgcggacgaacaccacttgcgcacctcgcgtgactggttagtactcttaccactctccgcctacttggtcgttagcgctgtcttgggcactcctgttgggggccgttcgacgctccacggtttcccccgtgccgcacactacggtgttggggccgtttcgtgcgagtcgatcgcctggtgtgcctcggctgtcacccggcgcccgcctttcatttttaccgtcgttcccggcgttaacgggatgtaatcgcaagatttgccttcgcccggaagtgaaacggcaacttcacacacttttgcccgttttcatgagaaacgggacgtcagcgcacgaaacgcgccgtcacttgaggaacacttgtacaaacacgtttcacgcaggtctccacgactgacataaatcgtgcaacttgaagctccgcctggtctttccaggtctagaggggtgacattttgtactgtgtttgactccacgcttggtccaccggcgagagttagtagcagcactgttgcttcgtagcggagcatgatggccgtgggaacccctccttggtaacaaggacccacggggccgaaagccacgtcctaacggacccatcatgtgtgcaaccccagcacggcaactttactgtgaaagccactttaaggtgacactgacactggtactcaaccactggtgacaggctaaggatgcccttcaggtaccccgaggtaacacgcgacactcgggatctgagaaggggactgggacttctttaaagtgcccagtttaaaaagcttctatgcctgaataggtgaccggaggccggcaccttttctcaattaacactgtaatct

SEQ ID NO: 2787 - DNA, 1000 bp, unidentified
  source 1..1000: mol_type = unassigned DNA; note = unclassified Picornaviridae sequence
tacccccctgcatctcttgtctgaagcgtccaatatatttggtcaccgttttggacagattgtaacggttctacctgcatctcttttcaatgactggcaaagtgcccggattagatatattaagtctttcgtagttagcttaggcgtggtgaaaattgactttttatatgctaatcaatccaaaacaaatttgcttgcatttttgtcccaccttcgggtgggttctttttagaacaggtttatcaatgtgacaagttgtgcgacctctagagaaaaatgtcaaaatactcggttcagaccggggttttaataactacatatattgatcgattattgaattgtagtcctcgccagttactaccagatgacggaggatgcatctaatatcatcccaaattaggtgtctcccaactttttggtaattaatgatatatatgtgtgtgttaaaatgtataaacacttttaagtaagaaagtgtagcactttcaaggttgtactcgttttgatactggttattttaactttatatataatttcccttttccctcataagtacacccacgtaatcgtggtaccgctatgacatcatacgggggtgaaaagtgtggctgacagtcccggcaacgttaattcggcggcggtttcctgcagtgtattctgcctcgggctccggtatgtgttatctaagataacagtagggaaattatttgatagctggtaatccttatcttaattagtgcagcgacggagtctttagtgagactaccaaacacggctagcttaatgctaacggtccgatgaaaggctggcggtcggaggatcacatatctctaagatatggtcgtgcagtatccgcccggggtttaaggcaacgggtcccctaatgtccgaatggaatccttttcttttatggtgacaccagtactttatttcgataaagtgctttatatgtgttattcctttataatatttttttcaatttattatataaatatctatc

SEQ ID NO: 2788 - DNA, 1000 bp, Foot-and-mouth disease virus
  source 1..1000: mol_type = genomic DNA
cgttagactgtcgttcaaccacctccagttggactcacggcaccgcgtggccattttagctggattgtgcggacgaacaccgcttgcgcaactcgcgtgaccggttagtactcttaccaccttccgcctacttggtcgttagcgctgtcttgggcacacctgttggggttagttcgacgctctgcggtatcccccgcgtgacggactacggtgctggggccgcctcgtgcgagccgatcgcctggtgtgcttcggctgtcacccggcgcccgcctttcatcccccctaagttttaccgtcgttcccgacgttaaagggaggtaaccacaagcttgataccgtcttgtccgacgttaaagggctgtaaccaaaagcttgtaccgcctttccccggcgttaatgggatgtaaccacaagatgaaccttcacccggaagtaaaacggcaacttcacacagttttgcccgttttcgtgagaaatgggacgtctgcgcacgaaacgcgccgtcgcttgaggaggacttgtacaaacacgatctacgcaggtctccacaactgacacaaaccgtgcaacttgaaactccgcctggtctttccaggtctagaggggtgacattttgtactgtgcttgactccacgctcggtccactagcgagtgtcagtagtagcactgttgcttcgtagcggaacatgatggccgtgggaacccccccttggtaacaaggacccacggggccgaaagccacgcctaacggacccatcatgtgtgcgatcccggcacggcaactttactatgaacatcactttaaggtgacgctgaaactggtactcaaacactggtgacagactaaggatgcccttcaggtaccccgaggtaacaagcgacactcgggatctgagaaggggactgggacttctttaaaagtgcccagtttaaaaagcttctatgtctgaataggcgaccggaggccggtgcctttcctttaactactactactttt

SEQ ID NO: 2789 - DNA, 1000 bp, Foot-and-mouth disease virus
  source 1..1000: mol_type = genomic DNA
cggtggactgttgttcacccacctacagctgaactcacagcaccgcgtggccattttagctggcttgtgcggacgaacaccgcttgcgcatctcgcgtgaccggttagtactcttaccacttgccgcctacttggtcgttcgcgctgttttgggtactcctgttgggggccgttcaacgctctacggtctcccctgcgtaacagactacggtgatggggccgcttcgtgcgagttactcgcctggtgtgcttcggctgtcacccggcgcccgcctttcatcccccctaagttttaccgtcgttcccgacgttaaagggatgtaaccacaagcttgaaccgccttgcccgacgttaataggctgtaaccacatgcttgtaccgcctttcccggcgttaacgggatgcaaccacaagatggaccctcactcgggaagtaaaacgacaaacacactcagttttgcccgttttcacgagaaatgggacgtctgcgcacgaaacgcgccgtcgcttgaggaagacttgtacaaacacgatctatgcaggtttccacaactgacacacatcgtgcaacttgaagctccgcctggtctttccaggtctagaggggtgacactttgtactgtgcttgactccacgctcggtccactggcgggagtgagtagcagaactgttgcttcgtagcggagcatggtggccgtgggaacccccccctggtgacagggacccacgggccgaaagccacgtcctaacggacccaccatgtgtgcaaccccagcacggtaactttactgtgaaaaccactttaaggtgacactgatactggtactcaaccactggtgacaggctaaggatgcccttcaggtaccccgaggtaacacgcgacactcgggatctgagaaggggactgggacttctttaaaagtgctcagtttaaaaagcttctatgcctgaataggcgaccggaggccggcgcctttctcttaaaccactactacatta

SEQ ID NO: 2790 - DNA, 1000 bp, Foot-and-mouth disease virus
  source 1..1000: mol_type = genomic DNA
gatggactgtcgttcacccacctacagctggactcaaggcaccgtgtggccattttagctggattgtgtggacgaacaccgcttgcgcacctcgcgtgaccggttagtactctcgacaccttccgcctacttggtcgtcagcgctgtcctgggcactcctgttgggggcgctccgacgctctacggtctcccccgtttgacgggctacggtgatagggccgcctcgtgcgagttggtcgtctggtgtgcttcggctgtcacccggcgcccgcctttcatccccccctaagttttaccgtcgttcccgacgttaaagggatgtaaccacaagctttggaccgtcttgtccgacgttaacgggctgtaaccacatgcttgtaccgcctttcccggcgttaacgggatgtaaccacaagatataccttcacccggaagtaaaacggcaaacccattcagttttgcccgttttcatgagaaatgggacgtcagcgcacgaaacgcgccgtcgcttgaggaagacttgtacaaacatgatctatgcaggtttccacaactgacacacatcgttcaacttgaaactccgcctggtctttccaggtctagaggggtgacactttgtactgtgattgactccacgctcggtccactggcgggtgctagtaacagggactgttgtttcgtagcggagcatgatggctgtgggactccctccttggtaacaaggacccacggggccaaaagccacgtcctaacggacccatcatgtgtgcaaccccagcacggcaactttactgtgaaaaacactttaaggtgacactgatactggtactcaaccactggtgacaggctaaggatgcccttcaggtaccccgaggtaacacgcgacactcgggatctgagaaggggactggggcttctttaaaagcgcccagtttaaaaagcgtctatgcctgaatgggcgaccggaggccggcgcctttcttttactactacttaactg

SEQ ID NO: 2791 - DNA, 1000 bp, Foot-and-mouth disease virus
  source 1..1000: mol_type = genomic DNA
gttggactgtcgttcacccacctacgactggactcactgcaccgcgtggctaccctagttggatagtgcggacgaacaccacttgcgcacctcgcgtgactggttagtactcttaccactctccgcctgcttagtcgttagcgctgttttgggcactcttgttgggggccgttctacgctccacgttctctcccgtgcaacggactacggcgttggggccgctccgtgcgagcagctcgcttggtgtgtttcggttgtcactcggagcccacctttcacccccctccccctaagtaatgccgtctttcccgacgttaaagggaggttaccgcaagctcagtaccgccttgcccggcgttaagggcctgtaaccacacgcttacaccgcttttcccggcgttacgggatgcaaccgtaagatgatccttcaaccggaagtaaaacggaaacacgcacattttgcccgttttctgagaaacgggacgtcggcgcacgaaacgcgcagtcgctcgcgggacacttgtacaaacacgactcacgcaagattccacgactgacacaactcgtgcaacttgaaactccgcctggtctttccaggtctagaggggtgacactttgtactatgactgactccacgctcggtccactggcgggtgttagtaatggcattgttgtttcgtagcggagcgtagtggccgtgggaactcctccttggcaacaaggacccacggggccaaaagccacgtcctagcggacccactacgtgtgcgacccaggcacaacaaccttgctgtgaaaaccaccttaaagtgacactgatactggtactcagccattggtgacaggctaaggatgcccttcaggtaccccgaggtaacatgagacactcgggatctgagaaggggactggggcttctttaaaagcgcccagtttaaaaagcttctatgcctgaataggcgaccggaggccggcgcctttccattacctaccactacttga

SEQ ID NO: 2792 - DNA, 1000 bp, Foot-and-mouth disease virus
  source 1..1000: mol_type = genomic DNA
gcgcgtggggaccgctggactaccgttcacccacctacggctggactcacggcaccgcgtggccattttagctggaatgtgcggacgaacgccacttgcgcacctcgcgtgactggttaatactcttaccactttccgcctacttggtcgttagcgctgtcttgggcactcccgttgggggccgttcggcgctccacggtttcccacacacggcaaactacggtgatggggccgctccgtgcgagttgatcgcctggtgtgctcggcgtcacccggcgcccgcctttcatttttaccgtcgttcccgacgtttaaagggaggtaaccacaagcttacaaccgtcttgtccgacgttaaagggctgtaaccacaagcttgtaccgcctttcccggcgtcaaagggatgtaaccgcaagatacgccttcacccggaagtaaaacggcaacttaacacagttttgcccgttttcacgagaaacgggacgtttgcgcacgaaacgcgccgtcacttgaggaagacttgtacaaacacgatccacgcaggtttccgcaactgacaagaaccgtgcaacttgaagctccgcctggtctctccaggtctagaggggtgacactttgtactgtgcttgactccacgctcggtccactggcgagtgttagtaacagcactgttgcttcgtagcggagcatggtggccgcgggaactcctccttggtgacaaggacccgcggggccgaaagccacgtcctaaccgacccaccatgtgtgcgaccctggcacggcaactttactgtgaaacccacttcaaggtgacactgatactggtactcaaccactggtgacaggctaaggatgcccttcaggtaccccgaggtaacacgcgacactcgggatctgagaaggggactggggcttctttaaaagcgcccggtttaaaaagcttctacgcctgaataggtgaccggagccggcacctttccttttgaactaccaatttta

SEQ ID NO: 2793 - DNA, 1000 bp, Foot-and-mouth disease virus
  source 1..1000: mol_type = genomic DNA
tcgcgggaaccgatggactgtcgttcacccacctacagctggactcacggcaccgcgtggccattttagctggattgtgcggacgaacaccgcttgcgcatcttgcgtgaccggtcagtactcttaccaccttccgcctacttggtcgttagcgctgttctgggcactcctgttgggggccgttcgacgctccacggtctcccccgtctgacggactacggtgatggggccgcctcgtgcgggttggtcgtttggtgtgcttcggctgtcacccggcgcccgcctttcatttttaccgtcgttcccgacgttaaagggatgaaaccacaagcttgaaaccgtcttgcccgacgttaatgggttgtaccacacgcttgtaccgcctttcccggcgtcaacgggatgtaaccacaagataaaccttcatccggaagtaaaacggcaaccacactcagttttgcccgttttcatgagaaatgggacgtctgcgcacgaaacgcgccgtcgcttgaggaagacttgtacaaacacgatctatgcaggtttccacaactgacacaaaccgtgcaatttgaaactccgcctggtctttccaggtctagaggggtaacactttgtactgtgtttgactccacgctcggtccaccagcgagtgttagtaacagcactgttgcttcgtagcggagcatgatggccgcgggaattcccccttggtgacaaggacctgcggggccgaaagccacgtcctaatggacccatcatgtgtgcaaccccagcacggcagctttgctgagaaaaccactttaaggtgacactgatactggtactcaatcactggtgacaggctaaggatgcccttcaggtaccccgaggtaacaagtgacactcgggatctgagaaggggacaggggcttctttaaaagcgccctgtttaaaaaacttctatgcctggataagcgaccggaggccggcgcttttctaccaaaccactactgacttg

SEQ ID NO: 2794 - DNA, 1000 bp, Foot-and-mouth disease virus
  source 1..1000: mol_type = genomic DNA
cgcgggaatcgatggactatcgttcacccacctacagttggactcacggcaccgcgtggccattttagctggactgtgcggacgaacaccacttgcgcacctcgcgtgactggttagtactcttaccactttccgcctacttggtcgttagcgctgtcttgggcactcctgttgggggccgttcgacgctccacggtttcccccgtgccgcacactatggtgttggggccgcttcgtgcgagacgatcgcctggtgtgcttcggctgtcacccggcgcccgcctttcatttttaccgtcgttcccgacgttaaagggagataaccacaagctcaacgccgtcttgcccgacgttaaaggactgtaaccgtaagcttgtaccgcctttcccggcgttaacgggatgtaaccgcaagatttgccttcacccgggaagtaaaacggcaatttcacacagttttgcccgttttcatgagaaatgggacgtcagcgcacgaaacgcgccgtcacttgaggaagacttgtacaaacacgcttcacgcaggtctccacaactgacacaaatcgtgcaacttgaaactccgcctggtctttccaggtctagagggtgacattttgtactgtgtttgactccacgcttggtccaccggcgagagttagtaacagcactgttgcttcgtagcggagcatgatggccgtgggaacccctccttggtaacaaggacccacgggccgaaagccacgtcctaacggacccatcatgtgtgcaaccccagcacggcaactttactgtgaaagccgctttaaggtgacactgatactggtactcaaccactggtgacagctaaggatgcccttcaggtaccccgaggtaacacgcgacacttgggatctgagaaggggacagggacttctttaaaagtgccccagtttaaaaagcttctatgcctgaataggtgaccggaggccggcaccttttctcaattaacactgaaatctta

SEQ ID NO: 2795 - DNA, 1000 bp, Foot-and-mouth disease virus
  source 1..1000: mol_type = genomic DNA
acgcgggaaccgatggactgttgttcacccacctacggctggactcacggcaccgtgtggctatgatagctgaattgtgcgaacgaacgccgcttgcgcatcttgcgtaaccggttagtacctttataactctccgcctacatggtcgtcagcgctgtcctgggcacacccgttggggaccgttcgacgttctacggtttcccccgtataacaaactacggtaatggggccgcttcgcgcgagccgatcgcctggtgtgcagcggctgtcacccggcgcccgcctttcatttttaccgtcgttcccgacgttaaagggttgtaaccacaagcttggaaccgtcttgcccgacgttaacgggctgcaaccacacgcttgtaccgctttcccctgcgttaaaggggtgtaaccacaagatgtaccttcgcccggaagtaaaacggcaatcacactcagttttgcccgttttcatgagaaacgggacgtcagcgcacgaaacgcgccgtcgcttgaggaagacttgtacaaacacgatccacgtaggtttccacaactgacacaaaccgtgcaatttgaagctccgcctggtctttccaggtctagaggggtgacactttgtactgtgcttgactccacgctcggtccactagcgagtgttagtagcaacactgttgtttcgtagcggagcatgatggccgtgggaactcccccttggtaacaaggacccacggggccgaaagccacgtcctaacggacccatcatgtgtgcaaccccggcacggcaactttgttgtgaaagccactttaaggtgacactgatactggtacccaaccactggtgacaggctaaggatgcccttcaggtacacccaagtaacaagcgacactcgggatctgagaaggggactgggacttctgtaaaagtgcccagtttaaaaagcttctatgcctggataggcgaccggaggccggcgcctttcctttacctattactgttttc

SEQ ID NO: 2796 - DNA, 1000 bp, Foot-and-mouth disease virus
  source 1..1000: mol_type = genomic DNA
cgtgcactgccgggaaccgatggactgtcgttcacccacctacagctggactcacagcaccgcgtggccattttagctggactgtgcggacgaacaacgcgtgcgcatctcgcgtgaccgtttagtactcttaccactttccgcctacttggtcgctagcgctgcttttgggcactcctgttgggggccgtccgacgctccacggtctcccctgtgacggactacggtgatggggccgcctcgtgcgagttggtcgtttggtgtgctttggctgtcacccggcgcccgcctttcatttttaccgtcgttccggcgtaaaggggaggtagccataagcttgcaacgtctgcccgacgtaaaggctgtaaccgcaagattgtaccgcctgcccggcgttaaacgggctgcagccacaagatgaaccttcacccggaagttaaacggcaaacttgctcagttttgcccgttttcaggagaaatgggacgtctgcgcacgaaacgcgccgtcgcttgaggaggacttgtacaaacgcgattcattcaggttcccacaaccgacacaaaccgtgcaacttgaaacctcgcctggtctttccaggtctagaggggtgacattttgtactgtgtttgactccacgctcggtccactggcgagtgttagtaacagcactgttgcttcgtagcggagcatggtggccgcgggaattcctccttggtaacaaggacccgcggggccgaaagccacgtcctcacggacccaccatgtgtgcaaccccagcacggcaactttactgtgaaaaccactttaaggtgacgctgatactggtactcaaccactggtgacaggctaaggatgcccttcaggtaccccgaggtaacctgcgacactcgggatctgagaaggggactggggcttctttaaaagcgcctagtttaaaaagcttctatgcctgaataggtgaccggaggccggcacctttcctttaaacaactactttca

SEQ ID NO: 2797 - DNA, 1000 bp, Foot-and-mouth disease virus
  source 1..1000: mol_type = genomic DNA
tgtggggaccgctggactaccgtccacccacctacggctggactcacggcaccgcgtagccattttagctggactgtgcggacgaacgccacttgcgcaccccgcgtgactggttaatactcttaccactttccgcctacttggtcgttagcgctgccctgggcactcccgttgggggccgtccggtgctccacggttcccacgcatgacaaactacggtgatggggccgcttcgtgcgagttgatcgcctggtgtgtttcggctgtcacccgaagcccgcctttcacaagttttaccgtcgttcccggcgttaaagggaggtaaccacaagcttgcaactgtcttgctcgacgataaagggctgtgaccgcaagatgataccgcctttcccggcgttaattggatgcaaccacaagatgaaccttcacccggaagtaaaacggcaaattcgcctagttttgcccgttttcaggagaaatgggacgtctgcgcacgaaacgcgccgtcgcttgaggaggacttgtacaaacacgatctattcaggttcccacaaccgacacaaaccgtgcaacttgaaactccgcctggtctttccaggtctagaggggtgacattttgtactgtgcttgactccacgctcggtccactggcgagtgctagtaacagcactgttgcttcgtagcggagcatggtggccgcgggaactcctccttggtaacagggacccgcggggccgaaagccacgtcctcacggacccaccatgtgtgcaaccccagcacggcaactttactgtgaaaaccactttaaggtgacactgatactggtactcaaccactggtgacaggctaaggatgcccttcaggtaccctgaggtaacacgcgacactcgggatctgagaaggggactggggcttctttaaaagcgcctagtttaaaaagcttctacgcctgaataggtgaccggaggccggcacctttcttttaaacaactactttta

SEQ ID NO: 2798 - DNA, 1000 bp, Foot-and-mouth disease virus
  source 1..1000: mol_type = genomic DNA
gcgggacccgatggactttcgttcacccacctacagctggactcacggcaccgcgtggccattttagctggattgtgcggacgaacaccgcttgcgcacctcgcgtgaccggttagtactcttaccactctccgcctacttggtcgttagcgctgtcttgggcactcctgttgggggccgttcgacgctccacgggctctcctgtgtgacatctacggtgatggggccgtttcgcgcgggctggtcgtctggactgcttcggctgtcacccgacgcccgcctttcataggttttaccgtcattcccgacgtaaaagggaggtaaccacaagcttgaaaccgtccggcccgacgtaaaagggtggtaaccacaagcttactgccgtctttcccgacgttaaagggatgaaaccacaagacttaccttcgctcggaagtaaaacgacaaacacacacagttttgcccgttttcatgagaaatgggacgtctgcgcacgaaacgcgccgtcgcttgaggaggacttgtacaaacacgatctatgcaggtttccccaactgacacaaaccgtgcaacttgaaactccgcctggtctttccaggtctagaggggtaacactttgtactgagtttgactccacgctcgatccactagcgagtgttagtagcggtactgctgtctcgtagcggagcatgttggccgtgggaacacctccttggtaacaaggacccacggggccgaaagccacgtcctaacggacccaacatgtgtgcaaccccagcacggcagctttactgtgaaacccacttcaaggtgacattgatactggtactcaaacactggtgacaggctaaggatgcccttcaggtaccccgaggtaacaagcgacactcgggatctgagaaggggactgggacttctttaaagtgcccagtttaaaaagcttctatgcctgaataggtgaccggaggccggcacctttccttttataaccactgaatac

SEQ ID NO: 2799 - DNA, 1000 bp, Foot-and-mouth disease virus
  source 1..1000: mol_type = genomic DNA
ccacacttacctttgcgtacgcgcaggaaccgatggactttcgttcacctacctacagctggactcacggcaccgcgtggccattttagctggattgtgcggacgaacaccacttgcgcatttcgcgtgaccggttattactcttaccactttccgcctacttggtcgtcagcgctgtcctgggcacgcctgttgggggctgttcgacgctctacggtctcctccgcgtggcagactacggtgttggggccgcttcgtgcgagtcgctcgcctggtgtgctttggttgtcacccgaagcccgcctttcacaagttttaccgtcgttcccgacgttaaagggaggtaaccacaagcttgataccgtcttgcccgacgttaaaggctgtaaccataagcttgtaccgcctttcccggcgttaacgggatgcaaccacaagataaaccttcacccggaagtaaaacggtaacttcacacagttttgcccgcttttaccagaaacgggacgtctgcgcacgaaacgcgccgtcgcttgaggaagacttgtacaaacacgatctatgcaggtttccacaactgacacaaatcgtgcaacttgaaactccgcctggtctttccaggtctagaggggtgacattttgtactgtgctcgactccacgctcggtccactagcgggtgttagtaacagcactgttgcttcgtagcggagcatggtggccgcgggaactcctccttggtaacaaggacccacggggccaaaagccacgtcctaacggacccaccatgtgtgcaaccccagcacggcaactttactgcgaaaaccactttaaggtgacactgatactggtactcgaccactggtgacaggctaaggatgcccttcaggtaccccgaggtaacatgtgacactcgggatctgagggggactgggacttctttaaaagtgcccggtttaaaaagcttctatgcctgaataggcgaccggaggccggcgcctttc

SEQ ID NO: 2800 - DNA, 1000 bp, Foot-and-mouth disease virus
  source 1..1000: mol_type = genomic DNA
gtccctgcgttgcactccacacttacgtttgtgaacgcacgggaaccgatggactttcgttcacccacctacagctggactcacggcaccgcgtggccatttagctggattgtgcggacgaacaccgcttgcgcttttcgcgtgaccggttagtactcttaccaccttccgcctacttggtcgttagcgctgtcttgggcactcctgttgggggctgttcgacgctctacggtctcccctgcgtgacagactacggtgtttggggccacctcgtgcgagccgctcgcctggtgtgtttcggctgtcacccggcgcccggctttcatcccccctaagttttaccgtcgttcccgacgttaaaggactgtaaccacatgcttgtaccgcctttcccggcgttaacgggatgtaaccacaagataaaccttcacccggaagtaaaacggcaacttcactcagttttgcccgttttcgagaaatgggacgtctgcgcacgaaacgcgccgtcgcttgaggaagacttgtacaaacacgatatatgcaggtttccacaactgacacacatcgtgcaacttgaagcctcgcctggtctttccaggtctagaggggtgacattttgtactgtgtttgactccacgctcggtccactggcgagtgttagtaacagcactgttgcttcgtagcggagcatgatggccgcgggaatccctccttggtaacaaggacccgcggggccgaaagccacgtcctgacggacccatcatgtgtgcaaccccagcacggcaactttactgtgaaactcactttaaggtgacactgatactggtactcatccactggtgacaggctaaggatgcccttcaggtaccccgaggtaacacgcgacactcgggatctgagaaggggactgggacttctttaaaagtgcctagtttaaaaagcttctatgcctgaataggcgaccggaggccggcgcctttctctaaccactaattaattg

SEQ ID NO: 2801 - DNA, 1000 bp, Foot-and-mouth disease virus
  source 1..1000: mol_type = genomic DNA
caactggactttcgttcacccacccacggctggactcacggcaccgtgtggccacttttctggactgtgcggacgaacgccgcttgcgcatctcgcgtgaccggttagtactcttaccaccttccgccaacttggtcgtcagcgctgtcttgggcactcccgtcgggggccgttcgacgctccactgtttctcttgtgtgctagactacggtgatggggctgtttcgcgcgggctgatcgcctggcgtctaggcgaacgcccgaagcctgcctttcacccccatcaccgtaagtaataccgtcttttccgacgttaaaggatagcaaccgcaagcttgctgccgtcttggccgacgttaaagggctgtaaccacaagcttgcaccgccttccccggcgtaaaatggatgtaaccgcaagaagaaccttcacccggaagtaaaacggcaacgttcacacttttgcccgttttgaagaaatgggacgtcagcgcacgaaacgcgccgtcgcttgaggatgacttgtacaaacacgatctacgcaggtatccacaactgacacaaaaccgtgcaatttgaagttccgcctggtctttccaggtctagaggggcgacactttgtactgtgattgactccacgctcggtccactagcgagtgctagtagtggtatcgtcgtttcgtagcggagcatggcggccgtgggatctcctccttggtgacaaggacccacggggccgaaagccacgccctaacgggcccgccatgtgtgcaaccccagcacggcaactttaccacgaagaccactttaaggtgacactgaaactggtactcaaccactggtgacaggctaaggatgcccttcaggtaccccgaggtaacacgcgacactcgggatctgagaaggggactgggacttctttaaagtgcccagtttaaaaagcttctatgcctgaataggcgaccggaggccggcgcctttccattaaccactactcaccac

SEQ ID NO: 2802 - DNA, 1000 bp, Foot-and-mouth disease virus
  source 1..1000: mol_type = genomic DNA
acgcgacactagggtgtcgccctagtgtcgcgtaccgaccgtcaccggttgaaacgctactgctcagacctctggctgtcgtacctctattaggcaggcaggaaccacccttttggggcccacgcgttttcgcccttttggggcccgcggtcaccacaccgcgcctccactaggctgacaaccgtgcctcctctaggctgacaactgtcgcccttttagggcctacgaccttcaagttacggctttagcgtccctcccgctgccgactcgcctacgtgaacgctagctcgtcacccgacggcctacctttcacccgggccgtcttaaagaacgtctccgtcttttccgacgttaatggattgtaaccaaacgctcttgccgtcgtgtccgacgttaaaggactgtaaccataagaaacaccttcccgcaggaagtaaaacatgcacaaagtaaccagttttgcccgttttcatgagaaatgggacgtccgcgcacgaaacgcgccgttgctctttgcattcttgtacaaacacgatctcacgcaggaatctcagaccaactcaacccgtgcatctgcaagtttcgcccggtctttccgggtctagagagacaaacagttgtactgagaccgactccacgattagtctactggcgggtattagtaacactcactttgcttcgtagcggagcacttgagcggtgggagtccccccatggtaacatggacccaccgggccaaaagccacgcttcatgcctcaagtgtgtgcaaccccagcacggcaatttgattgtgaaacctatcttaaggtaacactgagactggtacttggtttctggagacaggctaaggatgtccttcaggtaccccgaggtaacatgcgacactcgggatctgagaaggagactgggagttctgtaaaactgcccggtttaaaaagcttctatgcctgaataggtgaccggaggccggcaccttttccttttaccacaactaatttt

SEQ ID NO: 2803 - DNA, 1000 bp, Foot-and-mouth disease virus
  source 1..1000: mol_type = genomic DNA
atcggcagctcttgcgttgcactccacacttacgcccgtgcactgacgggaaccgatggactgtcgttcagccacccacagctggactcacagcaccgcgtggccattttagctggactgtccggacgaacaacgcttgcgcacttcacgtgaccgtttagtactcttaccactttccgcctacttggtcgttagcgctgcttttgggcactcctgttgggggccgtccgacgctccacggtctcccctctgtgacggactacggtgatggggccgcctcgtgcgagttagtcgtttggtgtgctttggctgccacccggcgcccgcctttcatttttaccgtcgttcccgacgttaacgggttgtaaccacacgcttgtaccgcctttcccggcgttaacgggatgtaaccataagatagaccttcacccggaagtaaaacggcaactacactcagttttgcccgttttcatgagaaatgggacgtctgcgcacgaaacgcgccgtcgcttgaggaagacttgtacaaacacgatctatgcaggtttccacaactgacacacaccgtacaatttgaagctccgcctggtctttccaggtctagaggggcgacactttgtactgtggctgactccacgctcggtccactggcgggtgtgagtaacaggactgttgcttcgtagcggagcatgttggccgtgggattccccccttggtaacaagggcccacggggccgaaagccacgtcttaacggacccaacatgtgtgcaaccccagcacggcaactttactgtgaaaaccactttaaggtgacactgatactggtactcaaccactggtgacaggctaaggatgcccttcaggtaccccgaggtaacatgcgacactcgggatctgagaaggggactggggcttctttcaaagcgcccagtttaaaaagcttctatgcctgaataggcgaccggaggccggcgcctttcttttaccattactaaacca

SEQ ID NO: 2804 - DNA, 1000 bp, Foot-and-mouth disease virus
  source 1..1000: mol_type = genomic DNA
ggcagctcctgcgttgcactccacacttacgcccgtgcactcgcgggaaccgatggactgtcgttcacccacctacagctggactcacggcaccgcgtggccattttagctggattgtactcttaccaccttccgcctacttggtcgttagcgctgtcctgggcactcctgttgggggccgttcgacgctccacggtctcccccgcctgacggactacggtgatggagccgcctcgtgcgggttggtcgtttggtgtgcttcggttgtcacccggcgcccgcctttcatttttaccgtcgttcccgacgttaaagggatgaaaacacaagcttgaaaccgtcttgcccgacgttaatgggttgtaaccacacgcttgtaccgcctttcccggcgttaacgggatgtaaccacaagacaaaccttcacccggaagcaaaacggcaaccacattcagttttgcccgttttcatgagaaacgggacgtctgcgcacgaaacgcgccgtcgcttgaggaagacttgtacaaacacgatctatgcaggtttccacaactgacacaaaccgtgcaatttgaaactccgcctggtctttccaggtctagaggggtaacactttgtactgtgtttgactccacgctcggtccaccagcgagtgttagtaacagcactgttgcttcgtagcggagcatgacggccgcgggaatccccccttggtgacaaggacccgcggggccgaaagccacgtcctgatggacccgtcatgtgtgcaaccccagcacggcagctttgctgagaaaaccactttaaggtgacactgatactggtactcaatcactggtgacaggctaaggatgcccttcaggtaccccgaggtaacaagtgacactcgggatctgagaaggggacaggggcttctttaaaagcgccctgtttaaaaagcttctatgcctggataagcgaccggaggccggcgcttttctactaaaccactactgacttg

SEQ ID NO: 2805 - DNA, 1000 bp, unidentified
  source 1..1000: mol_type = unassigned DNA; note = unclassified Aphthovirus sequence
agggggcactagggcgagaccctagtgtcgcgtaacgaccgtcaccggttgaaacgctactgctcagacctctggctgtcgtacctctattaggcagacaggaaccacccttttggggcctacgcgttctcgcccttttggggcccgcggctgtacgccgcgcctccactaggctgacaaccgtgcctcctctaggctgacaactgtcgcccttttagggcctacgaccttcaagttacggctttagcgtccctcccgctgccgactcgcctacgtgaacgctagctcgtcacccgacggcctacctttcacccccctccccctaaagaacgtttccgtcttttccgacgttaatggattgtaaccaaacgctcttgccgtcttgtccgacgttaaaggattgtaaccataagattcaccttcccgcaagaagtaaaacatgcacaaagtaaccagttttgcccgttttcatgagaaatgggacgtctgcgcacgaaacgcgctgttgctctttgcattcttgtacaaacacgatcttacgcaggaatcttagaccaacccaaaccgtgcaactgcaagtttcgcccggtctttccgggtctagagagacaaacagctgtactgaagccaactccacgtttggtccactagcgggtgctagtaacactcactttgcttcgtagcggagcacatgagcggtgggaactcccccatggcaacatggacccaccgggccaaaagccacgcctcgtgcctcatgtgtgtgcaaccccagcacggcaacttgtttgtgaaacacaccttaaggtgacactgatactggtacttgacttctggagacaggctaaggatgtccttcaggtaccccgaggtaacaagcgacactcgggatctgagaaggagactgggagttctataaaactgcccggtttaaaaagcttctatgcctgaataggtgaccggaggccggcaccttttcctttttaaaccactaaattct

SEQ ID NO: 2806 - DNA, 1000 bp, Foot-and-mouth disease virus
  source 1..1000: mol_type = genomic DNA
acgacagtccctgcattgcactccacacttacgttgtgcgtacgcggggcccgatggaccatcgttcacccacctacagctggactcacgacaccgcgtggccattttagctggattgtgcggacgaacaccgcttgcgcttctcgcgtgaccggttagtactcttaccaccttccgcctacttggttgttagcgctgtcctgggcacccctgttgggggccgttcgacgctccacgggttcccccgtgcggcaactacggtgatggggccgtttcgcgcgggctgatcgcctggtttgcttcggctgtcacccgaaacccgcctttcataagttttaccgtctgtcccgacgttaaagggaggtaaccacaagcatactgccgccttccccggcgttaacgggatgcaaccgtaagacacaccttcatccggaagtgaaacggctgcgtcacatagttttgcccgttttcacgagaaatgggacgtctgcgcacgaaacgcgccgtcgcttgaggaagacttgtacaaacacgatctaagcaggtttccccaactgacacaaaacgtgcaacttgaaactccgcctggtctttccaggtctagaggggtaacactttgtactgtgtttggctccacgctcgatccactggcgagtgttagtaacagcactgttgcttcgtagcggagcatgacggccgtgggaactcctccttggtaacaaggacccacggggccaaaagccacgcccacacgggcccgtcatgtgtgcaaccccagcacggcgactttactgcgaaacccactttaaagtgacattgaaactggtacccacacactggtgacaggctaaggatgcccttcaggtaccccgaggtaacacgcgacactcgggatctgagaaggggactggggcttctataaaagcgctcggtttaaaaagcttctatgcctgaataggtgaccggaggtcggcacctttcctttacaattaatgaccct

SEQ ID NO: 2807 - DNA, 1000 bp, Cardiovirus B
  source 1..1000: mol_type = genomic DNA
tagcatcttcgcggtaaagaacaccccaggggtaacccctttgaacgcgggactgcgatagtgccaccccacgtctttcccactcctaacccgactcccacctcgggtccaatgaaaggaccaaataattcatcccttgaatgttggctaatcagaggaaagtcagcattttccggcccaggctaagagaaacatataagttagatttgattcaaatcccttgacgaattcgaaacgagatgttctccctcccttgccgcttgttcacacccatacatttaattcggcctcctgtgacaagcccctcggtgaaagaacctctctcttttcgacgtggttggaattaacatcatttccgacgaaagtgctatcatgcctccccgattatgtgatgttttctgccctgctgggcggagcattctcgggttgagaaaccttgaatcttttcctttggaaccttggttcccccggtctaagccgcttggaatatgacagggttattttctttatcttatttctactttcacgggttctatccgtgaaaagggtacgtgttgccccttccttcttcggagaattcacacggcggtctttccgtctctcgacaagtgtgaatgcaacatgccggaaacggtgaagaaaacagttttctgcggaagtctagagtgcgcatcgaaacagctgtagcgacctcacagtagcagcggactcccctcttggcgacaagagcctctgcggccaaaagccccgtggataagatccactgctgtgagcggtgcaaccccagcaccctgattcgatgaacgttctttacggaaccagaggatggttttcctaagccctccggtagagaagccaagaatgtcctgaaggtaccccgcgtgcgggatctgatcaggagaccaattgactgtgctttacaccgtcactttggtttaaaaactgtcacagcttctccaaaccaagtggtcttggttttccaattttattaactggcaat

SEQ ID NO: 2808 - DNA, 1000 bp, Foot-and-mouth disease virus
  source 1..1000: mol_type = genomic DNA
aaagggggcgctagggtcgcacccctagcatgccatcggcagctcctgcgttgcactccacacttacgctcgtgcactcgcggggactgatggactgtcgttcacccacctacagctggactcacagcaccgcgtggccattttagctggattgtgcggacgaacaacgcttgcgcacctcgcgtgaccgtttagtactcttaccattttccgcctacttggtcgttagcgctgccttgggcactcctgttgggggccgtccgacgcttcacggtctcccccgtgtgacggactacggtgatggggccgcctcgtgcgagttggtcgtttggtgtactttggctgtaacccggcgccctcctttcatcccccctaagttttaccgtcgttcccggcgttaaagggatgtaaccacaagataacccttcacccggaagtaaaacggcaaccacactcagttttgcccgttttcatgagaaatgggacgtctgcgcacgaaacgcgccgtcgcttgaggatgacttgtacaaacacgatctaagcaggtttccacaactgacacacaccgtgcaatttgaaactccgcctggtctttccaggtctagaggggcgacactttgtactgtgattgactccacgctcggtccactggcgggtgcgagtaacaggactgttgcttcgtagcggagcatgttggccgtgggattccctccttggtaacaaggacccacggggccgaaagccacgtcctaacggacccaacatgtgtgcaaccccagcacggcaactttactgtgaaaaccactttaaggtgacactgatactggtactcaaccactggtgacaggctaaggatgcccttcaggtaccccgaggtaacacgcgacactcgggatctgagaaggggactggggcttctttaaagcgcccagtttaaaaagcttctatgtctgaataggcgaccggaggccggcgcctttcttttaccattactaaactg

SEQ ID NO: 2809 - DNA, 1000 bp, Foot-and-mouth disease virus
  source 1..1000: mol_type = genomic DNA
cgactcccgcgtcgcactccacacttacgtctctgcaagtgtaggaaccgacggactgtcgctcacccacctacagctgaacccacaacaccgcgtggccattttagctggattgtgcggacgaacgccgctcacgcatgtttcgcgtgaccggtcaatactcttaccactttccgcctacttggtcgtcagcgctgttgtagggcactcctgttgggggctgttcgacgctccgcggtctcccccgtactgagactacggtgttggggccgccacgtgcgggccgctcgcctggtgtgcttcgactgtcacccgaagcctacctttcaaagtaacaccgtcgctcccgacgttcaaagggaggaaaccacaagcttgcaccaccactcccggtgtcaacgggatgtaaccgcaagatgaaccttcacccggaagtaaaacggcaacttcacacagttttgcccgttttcatgagaaacgggacgtttgcgcacgaaacgcgccgtcgcttgaggaagacttgtacaaacacgatttaagcaggtttccacaactgataaaactcgtgcattttgaaaccccgcctggtctttccaggtctagaggggtgacactttgtactgtgctcgactccacgctcggtccactggcgggtgttagtagcagcactgttgcttcgtagcggagcatggtggccgtgggaactcctccttggtgacaaggacccacggggccaaaagccacgtccagatggacccaccatgtgtgcaaccccagcacggcaaccttactgcgaacaccaccttaacgtgacactgatactggtactcggtcactggtgacagactaaggatgcccttcaggtaccccgaggtaacacgggacactcgggatctgagaaggggattgggacttctttaaaagtgtccaatttaaaaagcttctatgtctgaataggcgaccggaggccggcgcctttccattacctactactaaatcc

SEQ ID NO: 2810 - DNA, 1000 bp, Foot-and-mouth disease virus
  source 1..1000: mol_type = genomic DNA
agggggcgttagggtctcagccctaacatgccaacgacagctcctgcgtcgcactccacacttacgtctgtgtgcgtgcgggaaccgatggactttcgttcacccacctacagctgggctcacggcaccgcgtggccattttagctggtttgagcggacgaacgtcgcttgcgcgcctcgcgtgaccggctagtactcttaacactccgcctacttggtcgttagcgctgtcctgggcactcctgttgggggccgttcgacgctctacggtctcccccccgcagcagtctacggtgatggggccgcttcgtgcgagccgatcgtttggtgtgcctcggttgtgaccttctcgtccgagtaaaggacggtaaccgcgagctttaaaccgcctttcccggtgttaacgggatgtaaccacaagatggaccttcgcccggaagtaaaacggcaacacacacagttttgcccgttttcatgagaaacgggacgtcagcgcacgaaacgcgccgttgcttgaggaggacttgtacaaacacgatttacgcaggttcccacaaccaacacaaaccgtgcaatttgaaatcccgcctggtcattccaggtctagaggggtgacactttgtactgtggttgactccacgctcggtccactggcgagtgtgagtagtagcactgttgcttcgtagcggagcatggtggccgcgggactccctccttggcaacaaggacccgcggggccgaaagccacgtctttgacccaccatgtgtgcaaccccagcacggcaaccttactacgaaaaccactttaaagtgacactgatactggtactcaaccactggtgacaggctaaggatgcccttcaggtaccccgaggtaacacgcgacactcgggatctgagaaggggactggggcttctgtaaaagcgcccagtttaaaaagcttctatgcctgaataggcgaccggaggccggcgcctttccctatctaccattacttac

SEQ ID NO: 2811 - DNA, 1000 bp, Cardiovirus B
  source 1..1000: mol_type = genomic DNA
agcatcttcgcggtaaagaacaccccaggggcaccccctttgaacgcgggacctgcgaaagtgccaacccacgtctttcccactcttatcccgattcccacctcgggtccaaagaaaggaccaattatttcatccctcgaatgctggctaatcagaggaaagtcagcattttccggcccaggctaagagaaacatataagttagatttggttcaaatcccttgacgaatttggaacgagatgttctccctcccttgccgcttgttcacacccacacatttaattcggcctattgtgacaagccccttggtgaaagaacctctctctttccaacgtggttggaattaacatcatttccgacgaaagtgttatcatgcctccccgattatgtgatgctttctgccctgctgggcggagcattctcgggtcgagaaaccttgaatcttttctcatggaaccttggttcccccggtctaagccgcttggaataagacagggttattttctttatcttgtttctacttttatgggttctatccataaaaagggtatgtgctgccccttccttcttcggagaattcacacggcggtctttccgtctctcgacaggtgtgaatgcagcatgccggaaacggtgaagaaaacagttttctgtggaagtctagagtgtacatcgaaacagctgtagcgacctcacagtagcagcggactcccctcttggtaacaagagcctctgcggccaaaagccccgtggatcagatccactgctgtgagcggtgcaaccccggcaccctgattcgatggacattctctacggaaccagagaatggttttctcaagccctccggtagagaagccaggaatgtcctgaaggtaccccgcgtgcgggatctgatcaggagaccaaatagcagtgctttacgctgttactttggtttaaaaattgtcacagcttctccaaaccaagtggtcttggttttctaattttattgaatggcaat

SEQ ID NO: 2812 - DNA, 1000 bp, Cardiovirus B
  source 1..1000: mol_type = genomic DNA
gcatcttcgcggcgaagaacaccccaggggtaccccctttgaacgcgggacctgcgacagtgccaacccacgtcttttcctactcccatcccggctcccacctcgagtccatagaaaggaccaagtacatcatcccttggatgctggctaatcagaggaaagtcagcattttccggcccaggctaagagaaacatataagttagaaatgatcacaatcccttgacgaaatcagaacgagatgttctccctcccttgccgcttgttcacacccacttcattaattcggccttttgtgacaagccccttggtgaaaggacctctctctttctgacgtggttggaattgacatcttttccgacgaaagtgctatcgtgcctccccgattatgtgatgttttctgccctgctgggcagagcattctcgggttgagaaaccttgaacctcttcctttggaaccttggttcccccggtctaagccgcttggaatatgacagggttattttccttatcttatttctactttcatgggttctatccatgaaaagggtatgtgttgccccttccttcttcggagaattcacacggcggtctttccgtctctcgacaagtgtgaatgcaacatgccggaaacggtgaagaaaacagttctctgtggaagtctagagcgcgcatcgaaacagctgtagcgacctcacagtagcagcggactcccctcttggcgacaagagcccctgcggccaaaagccccgtggataagatccactgctgtgagcggtgcaaccccagcaccctgattcgatgaacgttctttacggaaccagaggatggttttctcaagccctccggtagagaagccaagaatgtcctgaaggtaccccgcgtgcgggatctgatcaggagaccaattgacggtgctttacaccgtcactttggtttaaaaactgtcacagcttctccaaaccaagtggtcttggttttctacttttattgactggcaat

SEQ ID NO: 2813 - DNA, 1000 bp, Cardiovirus B
  source 1..1000: mol_type = genomic DNA
cattttcgcggtgaagaacaccccaggggtaccccctttgaacgcgggacctgcgagagtgccaacccacgtcttttccctcttttaccccgattcccacctcgggtccaatgaaaggaccaaacatttcatcccttgaatgctggctaatcagaggaaagtcagcattttccggcccaggctaagagaaacatataagttagatttgatttgaatcccttgacgaattcggaatgagatgttctccctcccttgccgcttgttcacacccactgttttgattcggccccttgtgacaggccccttggtgaaagaacctctctcttttcgacgtggttggaattaacatcacttccgacgaaagtgctatcatgcctccccgattatgtaatgttttctgccctgctgggcggagcattctcgggttgagaaaccttgactcttttcttttggaaccttggttcccccggtctaagccgcttggaatatgacagggttattttctttattcttgattctacttttatgggttctatccataaaaagggtacgtgctgccccttccttctttggagaattcgcacgacggtctttccgtctctcaacaagtgtgaatgcagcatgccggaaacggtgaagaaaacagttttctgtggaagtctagagtgcacatcgaaacagctgtagcgacctcacagtagcagcggaaccccctcttggcgacaagagcctctgcggccaaaagccccgtggataagatccactgctgtgagcggtgcaatcccagcaccctggttcgatggtcattctctacagaaccagagaatggttttcttaagccctccggtagagaagccaagaatgtcctgaaggtaccccgcgtgcgggatctgatcaggagaccaattgacagtgctttacactgtcactttggtttaaaaactgtcgcagcttctccaaaccaactggtcttggttttccaattttattttatggcagt

SEQ ID NO: 2814 - DNA, 1000 bp, Cardiovirus B
  source 1..1000: mol_type = genomic DNA
caccttcgcggcgaagaacaccccaggggtaccccctttgaacgcgggacctgcgagagtgccaacccacgtcttttcccacttttaccccggttcccacctcgggtccaatgaaaggaccaagcaattcatcccctgaatgttggctaatcagaggaaagtcaacattttccggcccaggctaagagaaacatataagttagatttgattcaaatcccttgacgaattcggaacgagatgttctccctcccttgccgcttgttcacacccatgttttagattcggcctcttgtgacaagccccttggtgaaagaacctctctcttttcgacgtggttggaattaacatcatttccgacgaaagtgctatcatgcctccccgattgtgtgatgttttctgccctgctgggcggaacattctcgggttgagaaaccttgaatcttttcctttggaaccttggttcccccggtctaagccgcttggaatatgacagggttattttctaaatcttatttccacttttgtgggttctatccacaaaaagggtacgtgctgccccttccttctttggagaactcgcacggcggtctttccgtctctcaacaagtgtgagtgcagcatgccggaaacggtgaagaaaacagtttcttgtggaagtctagagtgcacatcgaaacagctgtagcgacctcacagtagcagcggactcccctcttggcgacaagagcctctgcggccaaaagccccgtggataagatccactgctgtgagcggtgcaaccccagcaccctgattcgatggtcattctctacggaaccaggaaatggttttcttaagccctccggcagagaagccaagaatgtcctgaaggtaccccgcgtgcgggatctgatcaggagaccaatcgacagtgctttacactgtcgctttggtttaaaaactgtcacagcttctccaaaccaagtggtcttggttttctaatttttgttgaatggcaat

SEQ ID NO: 2815 - DNA, 1000 bp, unidentified
  source 1..1000: mol_type = unassigned DNA; note = unclassified Cosavirus sequence
gctcactcctgtacaccgtgagtccgcgcagtgctgacttaacacttaagtaatgtttaggccgagaattacaccgctcggctcccacctttcaccaccgtgggattaacaggtggtcaatctgtattcctgtctttggttatgtcaaagcaatacggcatgtgcaatggcgcacaggcccaaggcggagatctagacctcacagattgtgttacagattaagaccatgctggatggtcacgttggagactgcatgtggcagtcttgaaacgtgtggtttgacgtctaaccattatagcagtgggtggagtactgcaaagatgtcaccgtgctttacacggtttttgaaccccacaccggctgtttggcacttgcaggacagtaggtttattttctttcagatctcttttctagtcgtgcatgttctgtatgcacgagcggagtgatactcccgctccttcttggacaggcggcctccacgtcctttgtggaactcaaggttgccaagtcactggtgtttgaagtgaagattagagaaacactagggagtttcatgtggctttgccagggattgtagcgatgctgtgtgtgtgtgcggaatccccctcgtggcgacacgagcctcacaggccaaaagccctgtccgaaaggacccacacagtggggcacccccagcccctccctacaaagctttgtgcaaatgaacttttgtttggcttttcttaagcttctctcacatcaggccccaaagatgtcctgaaggtaccccgtgtatctgaggatgagcaccatcgactacccggacttgtgagccttttcacagacgcatgtggtacccaagccccttccctacggggaaggggctttgctcactcagcacaggatctgatcaggagatctgtctccggtgctttacaccggggcacagatttaaaaatttcccaaggcctggcacacaacctaggggactaggttttccttttatcacaaagatgtcaat

SEQ ID NO: 2816 - DNA, 301 bp, unidentified
  source 1..301: mol_type = unassigned DNA; note = unclassified Riboviria sequence
acagaggaatcaaaatcgctgaatactcttctcacgcttacactattgctcattattgcatctcctaaggacttatacatttgactcattttctactctagatgcactttccctccctctccatttattcacttgcactgaaaaaaactaacagacttaacaagcctttccgtctctcttgtctggatgtttgcgtctgtgctcttggggttcagcgtcctgggtatattattaacaggagccctattcccactagtccaccgactgacaagccaagtcgaccccaaggagattgaacatc

SEQ ID NO: 2817 - DNA, 304 bp, unidentified
  source 1..304: mol_type = unassigned DNA; note = unclassified Mitovirus sequence
ctgtaccttcacaggttcagttaagacgaaatctcgtctttctctcctcaattggagttctatctttagttcttcttctgagagggtcccccagtcttgggtaattaggtagttacatcctaattacttcggccgggagttaggtcaagtcttttgatttgatattgcctcctaaaccgagtgacacccgccatccttccaaaggtagccgcagcccccacctaggggaaactgtaggatagtctctagagggaagtgacgaatggtcgtcggcctggtttagtaacatacaaatcagagtccc

SEQ ID NO: 2818 - DNA, 304 bp, Sclerotimonavirus betaplasmoparae
  source 1..304: mol_type = genomic DNA
tcaagcttcgcatgaccggtaagtagttattttcattatttaataaaacttaggattaaaaaataatctagactacaatatgaaagatatcgcagttaatcttagtgtgttagttcattctttggaattattatcgaaaattctttctcggatcgaggaactaaataagtcagaaaatgagctagatgcaattggaacagaagaaacatggaccttagtataaccatgcattaggtttattttataaaacttaggagcaaatcacaattatccttaagtctttttttgtaattgaagtgaaatc

SEQ ID NO: 2819 - DNA, 305 bp, unidentified
  source 1..305: mol_type = unassigned DNA; note = unclassified Flaviviridae sequence
caagtacgctcatagttctcgagccaaccacacgaaagctagttggggcctttaaatatggaaacttctagtcgtaaggtggggtatctcccctatgggtggtgaacgcttgttcgctgcaataatggtgagtagtctctagactaatgctacctagtgagacaacgattatctgtctcatgtaagatagcattagtttggcgagccaggttgtttgggagcaaccctctgtcgataaactacacagtctgataggacgcacgaccttgcccattatgtaggataaagaatggtctgtcaacaca

SEQ ID NO: 2820 - DNA, 308 bp, unidentified
  source 1..308: mol_type = unassigned DNA; note = unclassified viruses sequence
gcgattggttcaatcgccaatttgagaaagctttaattgatctcgacgtcgcttctgtacccggtataacggccctttctaagtatggcactaccttaggagaaatcctagggtttgatggcaaggcttttgatgcagagcgcatcaacatatttagaatttatgttctagatagattcaaaactttactccgaggagaagaatatgcagatccaattaagttattcataaaacaggaaccgcacaagattaagaaaatagaagacaatcgtcttcgcttgattagtgctgtctctgtggtggatacg

SEQ ID NO: 2821 - DNA, 308 bp, unidentified
  source 1..308: mol_type = unassigned DNA; note = unclassified RNA viruses ShiM-2016 sequence
actcagcgacaactcggaccataccgagagatagaaaaggagccagagtcggcttggtagacccccagaaggaaaactgggagtactgggaaacccggcaacccaccgtgaagaggtagattagccagataggaagacgtttggaccttacgaggttgagcgcacatgggcattaatgtcccggtgttagtgattacggagagatggacgcaatgtacccttagcgacatctagacgcctaatacgagaggcggagcgctatttagcgcagggggccagcccgagtgccgccttcaagttatcgagag

SEQ ID NO: 2822 - DNA, 309 bp, unidentified
  source 1..309: mol_type = unassigned DNA; note = unclassified RNA viruses ShiM-2016 sequence
taaaacttcttaccccaaaggtaggatttgcaatcgcagtgaccctagcagcaaagttttataatttctatcccaaagatagacgaggtgagcgtactcgataacgtctcagccaatgttaacttggctacgtaataaagtcaatttgatgataattagcgtgttacaacgcgtaaacacaataataaaccaacaaatcgcagagcggcagttagctagcaatcaagtatccacagtgtgatatatgtcaaatcaaccaagatattttcctctagagatttccaccacagaagagatagcagagcaatc

SEQ ID NO: 2823 - DNA, 314 bp, Sclerotimonavirus fusarii
  source 1..314: mol_type = genomic DNA
tcatccccaaattccccagactccccacacactgactgcgacagaggtatttaataaaacttaggagtaaactctagatgcgcacaatgacgacctgccaaaaagcattggaggatttggcgaatgtgctcgacattctaacgagatgtctctccgaggctactcaagagaagtctgatttcgaggagattcatactccttctgacgacgtgatttctatttcttctgctgagcaaagtgcattataaagggcaacgttggtattagattatataagtcgtgtattaaataaaacttaggagataaccgcaatc

SEQ ID NO: 2824 - DNA, 314 bp, unidentified
  source 1..314: mol_type = unassigned DNA; note = unclassified RNA viruses ShiM-2016 sequence
tatcacattttatttaataggcttaatatatgtaactatttagtttacagcttattgaatacaatttccatttacctaatttataatcatattcgtattaaagtattcacatttttcatagaagatcttttgaattccgctctagatatttaagttttgaagtattagttttgaaagtaataattatcacgattagtaattccagtcttttcgactataagaaaccttcgaccgttcggtaatctctaaccaaagaagtcctgattgtatttaattttagggggtgtatttattcattcgtcaccatagtacaa

SEQ ID NO: 2825 - DNA, 317 bp, unidentified
  source 1..317: mol_type = unassigned DNA; note = unclassified Riboviria sequence
ccccagcaaagtctagatgctggataattgacatccgctgggcgaatgtcgtagtagctgagagcaggcaggctcgttttattaatgattttaagccagtcgtttttgcttggcacttgcaggttctattgaaccgccggcccctattggccaactccgctggtcggagcattttagaaattgtttttgattttcctgtcggctggtccgatgagagcggtcttttggccgattttgaatcatctgttttggatattatacgtatccgtattttaaatgactctgaggtcgatgacgagattaccgcgcagcagctg

SEQ ID NO: 2826 - DNA, 318 bp, unidentified
  source 1..318: mol_type = unassigned DNA; note = unclassified dsRNA viruses sequence
ttttggaaaattatacgcctctgtttctagagtttcttttccaatgcccatagagtttggtacccatgctcctaagggtttgagccaattcggtaccgggggtaggtttaagcagcgggtttctactccctcccgcactgagttctaccggtattgtaggaccaggctggcaatccggaccagcctgtaggatggatatctcaaggcgatatagttgtcttttcgtggctatggggttagaacggcgctccctactcgatccgagggagcagccccattcgctgtacgcgagactagcacattagctgcctatatctc

SEQ ID NO: 2827 - DNA, 319 bp, unidentified
  source 1..319: mol_type = unassigned DNA; note = unclassified Picornavirales sequence
aagtgttaacactcccctcctgtagcttactccacggttatacaggtagtattatagtgggtgcgtctgtgtgagtggtatgtagcagactaagattctttaccaattttgaggaaatggcctcgatcctaacccgattgtgttaccgcctccatcactttgccccatattacaggttatgcattgagtaccgcttcttgatgtatgatgactggaaggctttgtgagatctcgttctcctgacaaacaggttgttatagagttgggcgtccccccgaaaacaaaaacggcaactggtgagctgactgatctagaaagc

SEQ ID NO: 2828 - DNA, 322 bp, unidentified
  source 1..322: mol_type = unassigned DNA; note = unclassified RNA viruses ShiM-2016 sequence
atgggcagctatatattagctgcacggtagatacttttcaagcaagaggccagtgcagaccccttggtcgtatccagattttgcctagtgcgttaaaagagtccatcctcgccgggtatccagattaccggaggacctcatcagcacgtctgaagcggaatatatacgatagatcactagagacaagtctagacggatcagttagttggatttctctgcagtctgtaacgacgagagtgccagcagagctgagcgacctctattgatcgctgtgcacacccccgaactgacaacacgagatagaatcacttttcggcccatc

SEQ ID NO: 2829 - DNA, 323 bp, unidentified
  source 1..323: mol_type = unassigned DNA; note = unclassified RNA viruses ShiM-2016 sequence
acgggctctgctccgactctggttttgaatccccgttttcaattttggggttaccagagattgtggtgcgcagtggggctatccctaggaaaactagctctagaattagtttcttgaatcagtttagtttaggattagattttagatctcctaacccttctttacacaacgctttagtagcagtcgagagacgtgtctttactgtaggcaaaggcacggagattattcttcccccgcaacctgaggaaaacatttttcacagcttagattactttagagatgctgtggtgagggaagtcggcttttgtaagacctacaccccc

SEQ ID NO: 2830 - DNA, 327 bp, unidentified
  source 1..327: mol_type = unassigned DNA; note = unclassified Nairoviridae sequence
cacaaagaaacttacggctcagcaaccaaaactgtgctactggatcattgtttgtgtattaagtgcttcatattcatatttggtaatgtggtgtatctgcatacgtcactttatctccatttgcattatattatctttcattattgtcttctcttagatataggtatagttagtaataagctgtgaaattctagatagttgaactatagtaaactagtagacattaagaattaaatcactgacaagtagcagataaatcattttttcttaaactggaaagtaagtaaatacccacaagcaactgctgacagaatttgatgagtgaag

SEQ ID NO: 2831 - DNA, 336 bp, unidentified
  source 1..336: mol_type = unassigned DNA; note = unclassified viruses sequence
aataaattaattggtcctaatttattttctttttctgtgtccgaccagcacaaatgattttgtcgttttgacaataattaaacaacagttactctagaacgtcatctaggaggagttctatgttctaacggttctcattatgaggcgcttgaattttggaataacctttgttacagttctctgagtttttgcacgttttttccattaaaaacgtgcagcctgtgttaggtttataaacactagggaaacgccccgaaagtgcgacttgcagataattgttgtcatgctgcattgtatttttacaacacggcttatatagccttaaccgaagattcc

SEQ ID NO: 2832 - DNA, 342 bp, unidentified
  source 1..342: mol_type = unassigned DNA; note = unclassified Metaavulavirus sequence
tcacaatatcttcagaagattataacggcttaacaacaagaccatctaaatactatattacatgcatctatacgattcctttaaaataattaaattaatgacagtgacacaatattacaaaataatcttctagataatcctaaattgccaccctggaccaatttctcattctgatttaacagtgataccttcaccatttgtttttgtaatgatctagtatcagattctattggttttgagctttccaataataaagattttgaaccatcagttctaaaaaaaaccttttgggtgggtgaaatggaacttgggggcgacccctagcctgagaatatcccaaca

SEQ ID NO: 2833 - DNA, 344 bp, unidentified
  source 1..344: mol_type = unassigned DNA; note = unclassified Dicistroviridae sequence
tcttgctatcttaggtaaaatgagaggttaaaataagttagtagtgctatttcggataagatgttagttatttaactttactgcttaggatgcatcgtggcagccccataaaaatccagagcccctccctcgtttctagaagattaagtcgtcaatagaaattaaataatagacttgcgtcaaaatataatgataataatcctagtaatagatctgataatacatataatggtagtttaagtaatgaagatgctccccctactccccaaaatgcacaagaacaggtacaaataacaacttttgaagctgatcttgctgtattacccgagcatgtcccaggagaa

SEQ ID NO: 2834 - DNA, 356 bp, unidentified
  source 1..356: mol_type = unassigned DNA; note = unclassified Picobirnaviridae sequence
cgcatatcctctccctcttttctcccttccccctccccgacctttttcccctctacggcctcggattgcggactgatatgacgcgcctgacgtggaattcaggaattctggaactgggggacttcgcccaagctgtgaaccggattaccgatgtagctccttgggtgcctcagggaagggaccagtagttctagagcacatgtgaagcactgacaaggggactgcgttgcatatccccgaccccggactctgtgtgatgatgctggattgccgctagcacagagaaaccacccttttagggctcgcagggcagtgtgtagcacctagtttgggaaagctaggctggtgtgtactgg

SEQ ID NO: 2835 - DNA, 357 bp, unidentified
  source 1..357: mol_type = unassigned DNA; note = unclassified RNA viruses ShiM-2016 sequence
gggtgcccaacagatgccacaggtcaggggtgtgaatggtctaaagctattgaagagttcaattgtgttcttatcaatgggggtcatagggtgacctttgaccccattgagaggaagcagttgaataaaagctcggaattcccccctgatcgtttgcagtgggaaaccactgttgggatacccaaggaacgtaggtatgttagagtgtctagaataggtcgcgatgtaaatattattccatttaataatgatatacgaactttgcaacgggcggtcgttgaacgagtcttcactgtgaaaagtgatggtgagttttgtcggccaccccgtccagctaaggatcatttccaaaacgta

SEQ ID NO: 2836 - DNA, 367 bp, unidentified
  source 1..367: mol_type = unassigned DNA; note = unclassified RNA viruses ShiM-2016 sequence
agagatcgagcgaaacgggtttcgatatatcggaaaaaccgatccaatcagtagaaatgtcggtgcttatggaacaaattcttacattgcgcaaagatttcctgattttgacagaatcgataagctcgaagagtactgcccgccagagttccacacacagcggcaaaacaacacagcagaactccgaagtttcgcagtccattcaaaaataagacgcgaattgttagataggatacaaccgttgacgacccagcaattcaattcggttttggatcgaagcgaggacgtgttttcaaaaattagagttgagatttctgatgactttctagattttgataaggttttaaaaattgtgctatctcttaat

SEQ ID NO: 2837 - DNA, 382 bp, unidentified
  source 1..382: mol_type = unassigned DNA; note = unclassified Picornavirales sequence
tgatgagggtcgccatcccggttgtggtgacacaacgggcgtccctgcgctggcatgaggcctctttgaggctggagaatcgggatcggtaaccgaagagccccgtgagctagggttgactcctccgcctccctgaatgcggctaatcccaacccatgagcatccggtggcaatcccgccacaagggtgtcgtaacgcgtaagtcgtgggcggaaccgactactttgggaaggcgtgtttccattttatccattctactgtggttatggtgacaagttataaatctagatctatagcgtttgttgagagatatccaacaattgaacaaactcgcacagttcttttctttggaaggcttttctttggaaggcaaacagtgaaa

SEQ ID NO: 2838 - DNA, 384 bp, Salem salemvirus
  source 1..384: mol_type = genomic DNA
acgcttctagaaggtctccaatcactactgttatctttcaatcagtctaatcaccgaacttgattgatttgcttttatcattaaataactcttaaaatcactaaaaaaaacctaggactcaagagaacgagacccaagacagtccgacaagcccggaaccctcccaagagaggaacgaaagccgacaccccgagaacccaccaagatccaacaacaaccgagccacacccaccacaccgccagaaatccagacaaagccccgaaacaatcacactcctagccatccacagcggcctccttcccaacgaattggaaacgccacccaccacgtgtcatccctgacacttgggcataggcaatcaactcactccataagtagtaaat

SEQ ID NO: 2839 - DNA, 384 bp, unidentified
  source 1..384: mol_type = unassigned DNA; note = unclassified RNA viruses ShiM-2016 sequence
ataaaattcagtattgaacgtatgggtgtcctcaagccaccgttgtgacaggcgcctacttggctgaactgaatgagtgcctaaaattgtgttgtttacgcaaaccaactagggtattggtggcgagccaattacctgaaagctctagatgatgttgagcgttgttcatttgaggagtacccaaatctttgtgtacgagccgttcctaggaacgttgtcgagcacacattgatgtagggcccgattacaggacatgccattgactaatcagagtgagtacaattttaggggagtccactgtaagttcttttcggcccagtccccgtgtagacgcaactcacaaaacatgttgacaatgctgctttttatttgccctcccttctt

SEQ ID NO: 2840 - DNA, 388 bp, unidentified
  source 1..388: mol_type = unassigned DNA; note = unclassified RNA viruses ShiM-2016 sequence
gccgttaaggccccgctgcgctgcttcttcggacgctgcgtactgctttgcagatcccggcctacacccttctcggaggtatgtatgccgtatagtcaccgctgcaggttctctgctacgggccgtttactcggcggtgtatttcttttacacttgacttgaggtcacatatgtccaaggacgagctcctccagctgctttatagtcagcgcgaatctattcagcttatatctcctaacgggggtcgtcaagacctttctgtcggggatatcggtgatgcttcgcgctattctgtttcgcaactgcagggctttactttggcttatgcgagcgtgctttatgaacacgctgacgaactcgtcgcctctagacttcttaaggaatcgtg

SEQ ID NO: 2841 - DNA, 391 bp, unidentified
  source 1..391: mol_type = unassigned DNA; note = unclassified Metaavulavirus sequence
cttgtttagttaagttgaacggtgatggttacattcctcattgcacattgactcataactggcgttggtacaattaatctagttgacgaaagaggtcaactagcgtactctaacactaatattaatataaacacttaagcttaggctcacatctagatgtgaagaagcagtcactttaaattcattcaattaaattatcaattgatactgtactgaggcataaccacttacaacttagtgcacagccttattgctttacaatctgcagatagtggtaacttaggtcgaaatttagatttaaatgcataagtgctatactgttgatttaataaaaaaatgggggagaccaccaataaaacagcaactgccgctgctagaagtagacctaatc

SEQ ID NO: 2842 - DNA, 399 bp, Britarnavirus 3
  source 1..399: mol_type = genomic DNA
ttctagaatagctagattttaacctatgtattattattgttttatgtttatatatctgaccatcatgtccttaaactgttcggaggcgcactcatgtgtcaacgtgacttatgtgaaaccaaaaatgagctgtacatactgattacggcagtcgaccttagtgtctaccccttaaatagactgacgcttgtgtatatctgggaagcataatgcttgtggctatttagctgcggaggtcctaccactccaccaatgtagagacaggacatcgctctgaggtgagctttgtacccgtgtaaataaaaataccttaccaactttactctaaaacaaaagtctgtggaggactataaactctacacttatgtgccccaatctggagaggttgggatttcacaa

SEQ ID NO: 2843 - DNA, 399 bp, unidentified
  source 1..399: mol_type = unassigned DNA; note = unclassified RNA viruses ShiM-2016 sequence
acttgcaactaatcttcgagagtctaagaataagacactaatggctggtcaatccgctaataacggtctacagtacggtgaaactttttctacatcactattctggtaagaatgtaaatatacaatttgtcttatagacacctcaatgtgaaatgacgaacgaaaataacattgttgtattaaagcggctctttttagagttactaatcaagaacgcttgttggcagccccaatgaattctagatgttcaaatttgctaacgattaggctgttgttagtgaataaattaagcctgcgaattttataactgaaactttaaagcaagaacaacgacaaattttaactttcgcatcagaaggtgattccaaccacactaatgtgatagcaaaaagtttgcaa

SEQ ID NO: 2844 - DNA, 403 bp, unidentified
  source 1..403: mol_type = unassigned DNA; note = unclassified Botybirnavirus sequence
gcaaataaaagagctgccttttgaagccttttatttgtaaggaaaatttatattgatcgtcattcaacgatccccgctcgggttagaaagcaccacaagcgcagtgacgatcgcttgtgagtagtagtcacactagatggtaaattctatttggaacctcggacactctcaaaccgccttgtcaggatatcagcggatgtgaatagacgtgtggaacacaacgtgcccaccacatcttcaactgctcctgttagtgtataaatcagaaggataggtaaaccgagatctctagagaagaggctacctggcactgctgacgggccgtagtatactacgatatcgggaggaattgaagccttctgtaatcccccagtacccaggctctctagggtaaagtgagaga

SEQ ID NO: 2845 - DNA, 411 bp, unidentified
  source 1..411: mol_type = unassigned DNA; note = unclassified RNA viruses ShiM-2016 sequence
gaatgccgcaccttgactgctgtctgtacgtccggaagacctggacccaacaaaaccttgccaggtagcagtgttaacgccaaggaatgcgtttgtcattgtaaacgcagaaccaccaaattattcaactacagcattccagagttgaacgacagctatgtttggacgcacaaagggtgtgtgtgtaacgaactggtggctctaaaacaacggcaccaactcgatgatggtctcagatatgtttcaaagtctaacttgtctagacatctcagaccgttcatcaagacggttagtccctgctcggaagatactgtgattgcccacagtgcaggcgctaagcgtaaactccttctctcggccaaattaagccttgaagtctatcctattcaacctgaggatggcgcggtgaaa

SEQ ID NO: 2846 - DNA, 416 bp, unidentified
  source 1..416: mol_type = unassigned DNA; note = unclassified Riboviria sequence
ccccgcaattgtcccaaagattgcggggagcgagcctcggtaatatatttggattagcatatacggattatatttatgtgcatatagaaggagataaattgactgacttaatatttcaaaatgctttactagacattccggattttacaacagtatcattatttcaacacgaaatatcatctaccgagagtggatacacattccaattctgtactgttggttatgcttcctattaccagcatagtagctatttcgtgctatttcaatctaattccgataatttccttccattaattaaagattataaaagtagttcagagtttgcagatgtatctcgcacaatttatgattggtacaaccctacatacgatgatctagactactgtagcttttataaagttgaccaaattaataaa

SEQ ID NO: 2847 - DNA, 422 bp, Achimota pararubulavirus 1
  source 1..422: mol_type = genomic DNA
atgagtgctggccagagcattctcaagactcctccaccaggtccacagaacacagaaccccgaatgacaaagaagaggatttgcatcaccccactggacagaaggaaccaactcagatctgctacagcatccacaatcatcacaaagtcagcaatcgcatccttctctaaaaacaaactctctagcttgctcaaaattgcccaacagttaatcaatcatcccgtagatagatagatttccatgctaatacgcttaatgcatttaagaaaaaacttgaggatatatagtctgtatgattgaataaatgagatgggatgatcatcttagaagaaaagaagaatgggcccggaccccataaatgtccggacactctagattccaacatggctctatcaactcatcttagacaagcctattctgtg

SEQ ID NO: 2848 - DNA, 428 bp, unidentified
  source 1..428: mol_type = unassigned DNA; note = unclassified Riboviria sequence
ccacctctgatatacaggtgaaagttgtatatcaaaagaaatttttattttagttttaatatctagttcacagggctataacctaccccttattagtaacaaaatataaaaactcggtacagaccggggtattgatttgatgactttaagatggaattttgtttagtttacggaaggcccgtagctcttatcaatccccctaagagttacccctattctagaattccattttaattttatcaataggtatggataaatattagatagtaaggcaaggtacgtatcttatagaaatgttagtaagtacggagaagtacgcgactctagttgaacgataaatagcatctcgagcttaccagtagccctggcgttaacaatagaatagctaaaggcttctcctgaaagcaaccgctactataagatagcgt

SEQ ID NO: 2849 - DNA, 436 bp, Dipteran anphevirus
  source 1..436: mol_type = genomic DNA
atctaacaacattcaatttactaaccatagatataagatacatttaaagaaaaccgtagtaaaagtcaaatacagtatacatcgaaatggacccagtatattttactaccacttgtcccagatgtggtgaaggaattaaatatataagggttgaaaaaccacttccaactacacaaaatcaacccaaacagacaggttaaatcattacaaatttttcattttgatattaatcccaatttatttttacagaagcttttacatttctaattatttattatttattgaaacatatatgtctgttcttatcccatctcttatttctttatacatctacttttggacataattaaattattattcagttatttatcattttaacacagagattatgttctagaccctttaatatttaaacaaaaccgtagtaaaagtcata

SEQ ID NO: 2850 - DNA, 440 bp, unidentified
  source 1..440: mol_type = unassigned DNA; note = unclassified Bunyavirales sequence
agaacaatcccaaaagctgtactgcctgtgccttttgtattggctccgaagtctgaattgcatgaccaaacatttgtacctttccctatgtcaactgctggtggtaaatgcgaccctgtcatgagactttggcaagcagcatctagaaattacaatcacagacctgcagactatctagcgtcaaagagagaaaggtttgacgagatgtatgaagatgaccctgaagagcagcggaagatacaggaaaagaataaagagaagaggggccttgcccatcgggctaacatcaaaggagaattagctgaagaggacctcaggctgctagcactagatggtgtgtttgggaagaagtttatgagcgatatggaaaagcaagtgaaatatgaagatagcaaaagaccttggaattggaacactgactgcactgatatagatgcttt

SEQ ID NO: 2851 - DNA, 445 bp, unidentified
  source 1..445: mol_type = unassigned DNA; note = unclassified Totiviridae sequence
gtagcctatagccttgctcctcttaaggagggctagtatcatgagcgtcaattcatgacctgatatagctttatgcgaaaatatcggggtcaacaatggtgtattctgtgtgacggtagctccggtttccgtaattctagatagttaataactctagttcccttgtggttagtcgttgtaagcgctggcatagatgcactcaaacgatcagacgccgagtcggtgcaaaaggagtggtttggcagccacactctatagaccgattcattctgactcgcctattgttgactatctactactaccaatcgctattgctctcgtcatcctatcagttcgacttgttagtgtctactctcgctctagactaacaaggcttctagttgtttcaactagattcatataagaactgatctgtgacatccaactttcgttattcatcatcaaa

SEQ ID NO: 2852 - DNA, 448 bp, unidentified
  source 1..448: mol_type = unassigned DNA; note = unclassified sequence
atcaacacaaatcgagaaaaaaacttttataatggcttctaattcagtactaaaaattagcactcatctggagatgaagtttagagaacctcctagaactagtaaagatgtattaagagccttagaactcattaaagacaattataatgggtttccggagaatttagaaattataatggtgttttatgtattgtcgggattcacatgtaaatatttaggaaaattaggtcaattctatatttataaaagtacattatctggagtatttaatggtaggtgatgggatacgattattcataattatttatcctccgggaaatgtctagataaatttttctgcactagatacagtagctgcaaccattagattttaacaagatgagcgtgaaaaaaacagataacacaaatcatattatatcatcttattataattcgaatctatctgaac

SEQ ID NO: 2853 - DNA, 455 bp, unidentified
  source 1..455: mol_type = unassigned DNA; note = unclassified RNA viruses ShiM-2016 sequence
ctagaaatactgccgtactcttgctgactgttagtagaagtgttttatgtgtgacggacggatgtcaaacaaaggttgacatctctctcggcacattccaatacttcgctaaaccccctcctacaacacaatgtattgagcttgttacatctaccgctctagggaaaacagagtgttcccttcctccacactgtggagaagctcaatatgctgaggtcgacagtggatggttttctagagtcggagtctgtcaaggacttggactgacgaaaactactttgcaaggagcaccaactctaattggcaactggctttctgtatataatgttaccattactcgtattcccccagtcatagctgatgaacttgtagtcctttttgaccagaaatccaacgtgtactctttagtaccgcatttctatgttgagacatttttcattaaaacccaagatgga

SEQ ID NO: 2854 - DNA, 458 bp, unidentified
  source 1..458: mol_type = unassigned DNA; note = unclassified Picornavirales sequence
aataaaatataaccgttatgtagttgaaattgaggaaacgatagtaggctgtggtcttgtccaactaagatcgggtagcaattttattgtccgattatgttgtccaaggctccttacgccgattactcataacactatattttattataattttaaggtttaatgtgatcttgcacgataaatgttgatgtgaaaacgtcgtgtattgctattaaacttgcgtacctatttaggtttactcatcaagatcgcggagtgcagcccactcgaaatctagatacatcaactattctattagattaggtagtcaatagtttagtataatattacctgcaaattttgaacaaaatactataacaaaaacgcaacaacaaatattgtctttttcctctgaaggagaatgtaacaggtctggagtattaccagatagagttagtattccacgccaatttctgtcg

SEQ ID NO: 2855 - DNA, 459 bp, Ollusvirus culvertonense
  source 1..459: mol_type = genomic DNA
atcttcacaggttgcccctaacatatgacgactggcatgattaatgacaagagataccttagttttaagagtttttagagttagaccaaatgtaaccacattccatgaagtactattaacattaaccttagacataagttatgtattatttttctatttgtagttcttaattgctttttaaaaactcacagataaaaaaactcggttaatcaaagaaaacccacctgaaagacaaacaatctacttagattatgtctgctatttttcccaagaattcgaaatttgtatgcatattaccctaatcaggtttttacactagtgacgagtataaaagctctagactaataagaggaccagcccgatacatagatagttttaacagaggttgatggtcgagggagtatgatataataattcagctctcaatctatatcgtagtgatgatatgatccattcaca

SEQ ID NO: 2856 - DNA, 463 bp, unidentified
  source 1..463: mol_type = unassigned DNA; note = unclassified Picornavirales sequence
aaaggactgttgtaatacagttgaatcaataagttgtgaatttgcagattgttgagtattcgttgtctcaatcttgtttgaggtgcttctgtggtggtcgcacttctagagtagctaagggtttgacacacatttaaatttcaagatcatgctagtagctgtcgagtcatttttccaaagaaagtccatgggatttacgtgatggacatgggtatgactccggagacggtgtaacgaggcagtaaagatcttgagatggcgtgtgtgaatgactccgccttgcattaatcacatgaaaagaccgttcggatagcggagctgacagtaggcacgtgatgattaatgtgactgtggaaacttagcgcgagattacttgtattctcaatctgctttaaagcaatgatgtgattcaggtgttaaaccaacgattgcatcgtgtgtaattagctagattggaagtggt

SEQ ID NO: 2857 - DNA, 464 bp, unidentified
  source 1..464: mol_type = unassigned DNA; note = unclassified Tombusviridae sequence
agagcccgtgagatattttcactcctaatagtagccatgaaaccttgattggtggattggcgaagctaggggcagagatcgctgcacgtagcccatgagtgacacatgggcgcggactggtaatatgcagaactattctagagaggggggagcatacctaacagtgcccaccctggtccttggtaagtttgatggacccgggaaggagcccgaaatactccggagttgcgagactcccgcggccggcgtaatggcgaacatgggaaggtaaggcgcaccctaaatgcgcaagggacggaaaacctaattacaaaccacaactagggcagcagcccgactcgttgcgtgctacgaggataaactcgcattgcggtcagaggtggtcattgatacctgaccttaaacaatgtcggtttggcccgactggcccccgtagaggggctatcccactacaattttcaatt

SEQ ID NO: 2858 - DNA, 476 bp, unidentified
  source 1..476: mol_type = unassigned DNA; note = unclassified RNA viruses ShiM-2016 sequence
ggggctgttagataatattagggaatttccaatggccttattggataaactttttaatgcacttattaaatacaagctagaaagtctacttttctcaggatgaatgttcaatactcagcacgagctaaaactgcaccacaaattgacctccgtttctatgtagtggaacgtaatggggaaattctagaagccttcgcaagataccatcacctaccacagcagcaaattgcctattttcatctggcaacacaagaattaggatctactggtggtatcttgcctaatcaacgcttcgcctcatatcgttactccgttccaccaggcttccaattacatccagaattgaataagtggttcaatgccacacccgctattataaaacgtgaagtgctgaagaaacctaacgtcgtcatgacgccaatttgtgctatactagatgctgagctggtgagtccttaccttagataatcaaacgt

SEQ ID NO: 2859 - DNA, 484 bp, unidentified
  source 1..484: mol_type = unassigned DNA; note = unclassified RNA viruses ShiM-2016 sequence
aacatgatgtgatcttatattttagaataaattagtgatgtaaaatttgaaatatattgctatcatgttaacagagttacctatttaggtttacttccaagatgctctagaagcagcccttccaaaatctaggaaccatcactcgattatatagtttaagttgactatatagtttaaattataacttgctacaaatcaaaatacaattcaaaatacaacagatgacgatgctagtcgtgaaataagtcaagtacaaaacgtaacatttcttaatcaaggacaagaagttgaagataaagcactccctagcattgttgatattaacccttcatatttaaatgaaacattatacgatgtttctcatgatataccagattttttggaaagaccaataagagtgtggaatggattttttgataatacacaaacaccaaatacatcattggcaactttacgatttccagatgtattattacaaaacaga

SEQ ID NO: 2860 - DNA, 489 bp, unidentified
  source 1..489: mol_type = unassigned DNA; note = unclassified Riboviria sequence
gtatatatcatcattatcatcatttcattatcattatcattatcatcatcacgtacgtactacattctaagttctgaccagcttagtcttatttgtcacatgagcaacattttagtgagtgtcggagcacaatcgagaataaagtatcgttatagcgcctcacgaagagtgtggatcacagttcaagtcaaaccgttattgttgtagggtatatgggtaacctcacactacaaacaaccgcggcattctatatttggatgaatatagtaattactagacctcaatgcttgaaacccgttgaactagtatagacaccaattcgttagtgatctagagttttgtaaattgacttaataatttaccgtcggagcccgcaagcccacctggaataattttctaattttcaagaaattagacgttcagccacgtacggctaccagatctaaaagagctcgtaatgcttaattacaccccaaacagattgaagaa

SEQ ID NO: 2861 - DNA, 493 bp, unidentified
  source 1..493: mol_type = unassigned DNA; note = unclassified RNA viruses ShiM-2016 sequence
ggaagcaatgtccttactatgactttaaactagtaaaggtagtgacttacactcgtctcgtctagacgtaagtagccgagggtggtgaccaacaccacgtgattactgcggtataaggaatgtgacactttatgggaagaccaaaagtgtagagaaatcaaggattctatgtgatcttgcattcatgatatatggagtaaaatcatgattgtattgctatagaattgtcaaggtgctatttagtttcggtgtcctttggagcagtcctcctaaacaccaatcctccaaatttcaagcgttgtacagacgtcgtttgatcttaatattctggcctacaaatacaaacacaacacccgaagagagcgggaataatttctctcaaactaatgtagaagcatctgctacttctgaagtgcaagctactactatatttaatgatgatgccggtattaccaccagttctatcgacaatcctgcgtccatctatcaaaag

SEQ ID NO: 2862 - DNA, 495 bp, unidentified
  source 1..495: mol_type = unassigned DNA; note = unclassified viruses sequence
gtacggcatcattcaccggagagagtgatctcacaacgaataagaaagacgttaagagcgttaacgacacggaaacggacgttttgcggttacctattcaggtcggcttccccgcgatagcagccctatcaaatggagcagtttccaacttcctaagcacttggtcgtgcgaacggattttacatcagaccagcacaaacatttgacaatataccagaaaacacccccaccccctatcttgctgataattcatcatcagtaacagacaacacaggtctatttggaaacacaacacatgagcaaactggaaccactggctttactgatcaatcagtcgaagtagtcgtcaatggcggagacttaacagcaggtctctttgaagatgtagttgcaacagatactactaataccatcgttgattatctatctagatatcgaaaagtttttgactatcacttcggttctaccattggttaccatcctattgcagatttc

SEQ ID NO: 2863 - DNA, 500 bp, unidentified
  source 1..500: mol_type = unassigned DNA; note = unclassified Picornavirales sequence
aagaacatattgattaagttctttatattattacgcggatgatggcttgcgtgagggcctaccattcaaacggataatatacatagatcacttttatatgttttgtttttgtctttacatgtattcctttcaagaatatatggtgatgaagtcctgtaatgccattataggttaagaggcaaggtgtcttaatactaggtgaaacatgcaggcaggtctatttaagaattgattgataacgagactattaatgctgtgagttatttcgtgcaaaccgatcggataaacatttggcgacaaatgcctttgggcagagctgattaatttgcaggttaacattaatacgtattgtgcgtcgagcttcttttatagatatcggttgctagtattgacgaaatctagagtttgttttatgggactgctctgcggctaaagtaatagtgagttcctgactttaggcgtttcaagatgaaatcgtcgtttaaattttaaatctcatt

SEQ ID NO: 2864 - DNA, 501 bp, unidentified
  source 1..501: mol_type = unassigned DNA; note = unclassified Riboviria sequence
tgagccccaactcatggaattcttgttatagatactaagtcaaaagatgtgacgttaatatcgtagtttactgtggtaaaacgctttaaatgtcgattggtattgacggtgaaatctttgtatataacgtgacgttaggtacagcatcatactccggtgaaacgttttatgtataagtcgatacactaacggtaaagttatattctatagttttctcttcaagttttaaaaatgggaatccccctttattttaattgcatttatattcgcgtaagatctcttcttacatgcgtcttattttgtgttcaacgacattatcaaccgcttatctgggatagcaacccgttaggatgtcgtcatggtgtactacctctagatagttaaaagctagcatgatccttaagcaggagatgattgtatctagagaaggataatagttcttctacggaagcaactattttattttattttatttttaagtcttatcttcaatgtgacctt

SEQ ID NO: 2865 - DNA, 502 bp, Reptile sunshinevirus 1
  source 1..502: mol_type = genomic DNA
aaacggaaatgaatgactttgttaagatttgatgatcaagttcttcactaaaatatacactactcagaaagagtagattgtggactttgtattcaaagagttaaacccacgagtcatccttcaacagagtacgagagaactccacactcttcccaattaaaaaatagggagagggagagagattaggcatacctagatctagaagttcagattctcctatctttgagcgtgttgaacaactcccaaaaacctagtcattgaaggcttgagaagaaggcaaagaacacaaatcacttgtttttgaatacttactgtctctaagtatatggacaaagaccccctcatcacaaacattacctcttaattggatgattaaatgccaggttgagatactctaaaaatgaaagaattgaagttagggctgtagttatctatcaggatcacagggtggcttatttttcaaatatattgggttttaataagaaaattgaagggcattaaa

SEQ ID NO: 2866 - DNA, 506 bp, unidentified
  source 1..506: mol_type = unassigned DNA; note = unclassified RNA viruses ShiM-2016 sequence
ccctagggggtggaattaaaattccaccttctagagatttttacccttaataaatgggttaacgatgataaatatttgagtaacactctcgtcaatgctcctagagttaacgaagatccaagtattttattactctcgtcaatgcttatttaatattgtatttagttttaagtttttatgtgtcgtggtgacctaaaaaccaaccaatttttaattcataatatcattttaattatatgataacccgtttaggctgtatattttatatgcgtgttatataatatcatttcattaaatttcatatattcattttaatttttgttaggtcattttcatccctaacaaattcctttggttcattttgagtttatgattttattattttgattagatgttttcgatcccctctttttattttaaaaattaaattacaaataaaagataataagacttctaccagagagagcagttctaaccctgcgcaggtagttgatacgtgtgttagg

SEQ ID NO: 2867 - DNA, 513 bp, unidentified
  source 1..513: mol_type = unassigned DNA; note = unclassified Picornavirales sequence
gctactcacaaccttgttttctttctttgattgaatcaagccactgtgtttctccccacacacaaccactgtgtcttcttcggttgatatagtgccgctgtgctcccatcccacccattgcccttcttgatgtcggttctgttatttataacagcatgtctctggtttttttctttcggtgatctctcgcactagcatagattgcgagaacgatgcccttgaatcggtttcttcggactaacgaattcacataagtcacatatctttaaatgtccctctagacatgttaattagagggaaggtatgtatcagagtgtgtctacggtaccctgtatgtcaatggttagatgtacaaattagggatacggttatggcccaggaaacgttggtttacctgggttatacataacacaaatgctcattttgagcttctcttcttatgaatttattcatgcggcgaatggaacgcgcgtcttcggaccgtaagtactaatagccaaccacacatttgaa

SEQ ID NO: 2868 - DNA, 513 bp, unidentified
  source 1..513: mol_type = unassigned DNA; note = unclassified RNA viruses ShiM-2016 sequence
ttactctacaggagttgacgttttctgtagtgctttagtttggagtagtcgaatctttcgaccccgggttatgagtaaatcctggggtttaaaattttactcgaaactaaatttaataatgaaaaccgagggagtagtaaaccctttacaaattcaaatggtggtattccacaaggactggatggtccgaatcacaaaagagttaactttgctctagaggatacactacatgattatagtgtagcttctgaagaaagtagtgacattacctcacttaggcaacgccaatttctttttgaaattggcgattgtggtaatatttctcagttttgccgtgctcgtcgcgctgctcgttctcttgttcgcttgaagtatgaggctcaatctttgttagagtctattgctgattccaacgttcaagccaatatagttggatttaccgatcacgatgctgggtatgaagcgggtttaatatcagcccgtgatgacagttattatgttagtgatgaaccc

SEQ ID NO: 2869 - DNA, 517 bp, unidentified
  source 1..517: mol_type = unassigned DNA; note = unclassified Hepacivirus sequence
cccactagaaacgatcttctagaatggggaaccgcgacaagtgaatcacgatggactaagcgaccaagagtttaagtgacagggttgttcgcgtaaatcccggcttaaattcaaagttgaatatgtccgtacggagcactctagcaccggacgaaggatcgtggacggtgggcgtagggtacacagggtcagctgtgtataaactcagtactgaagcaggatttgggagcattgcagtcacactcaagtggagtactccgcctttaatacccgtatggggcaatactccgaggagggcgggttttcaaacgaaacttgagtaatactttatatggtctcaatatacacttgtggatgtagggaaaccagccatgggcggacccaaggcggcgcacctgacacatgcggcaagagaaaaaatccttcgggtgatctctgggtccattccaaaactatgaattgcgatttgtgcttacctcgtgttggttggctttgaacactaaatacaaacactaca

SEQ ID NO: 2870 - DNA, 519 bp, unidentified
  source 1..519: mol_type = unassigned DNA; note = unclassified RNA viruses ShiM-2016 sequence
ttcgtgtttaattgagtttccggtctccataagaaaccggcctacttcctagggattagggagccacgtgtggtacacgctatgcagtggtgcgcaataaaacaccgggtttgatctcctttataatgatccatttgtcgatatatgataatcgtcgcaagttaatatgttcaattgtttattgtttctaggctgtatacacttgtgtttttacttgtaatcccttggctatttagccttactaatcaaggtggggagggtaattccaatacctagattctagatagcctctgaccttgagttaaaatcggaggtgaattattgtgactcgctattactaatacttctcaagaaggtgtcccttgtgagacaccaacaaatacctcgggtccttctgctcccgaggtgccttctcaggcagttaagcagaattgtttgtcaaagctagaaggtgcatcgtccactgcctttcaggaagatggtgctgtagtatctggaacaactagatctgttccatca

SEQ ID NO: 2871 - DNA, 527 bp, Alphachrysovirus anthurii
  source 1..527: mol_type = genomic DNA
gactaagatccagtccaccttctagtgtgaccagtctcttattctattggttaatgtctcagcattgtctgccgatacattaaccatatgttactaatcttgtctctctctgttccatttactaagaaaacttgcttccattaccatccaaatctgctcacgttctcacatattcttgttgttatatccacactcgcactcggtacccgtgtacctccatgcttcatactctcgtcttcctctactgcacttctttgttctacatacttcggtatttcctcatccaccatctcattttccaaccggctctccctcctctctggttaatgaatagctcttctagaagcactctgacgtctcccatactggactcactctttaatttacccatcggcaccaactcatctgccactgcacttcttgttaacgcatcgcagtgtataccgtcataggttattcctattatcttatcatgttccactccttttgtaccaatcccatatgcttcatttattcttttatcatat

SEQ ID NO: 2872 - DNA, 527 bp, Salem salemvirus
  source 1..527: mol_type = genomic DNA
ttatttatattaaagatcatgttgctcctcagtcagtatatataatttagctgattgacccgaattactacaacccacctttaaagctactagtctttgctcggccaacttttctaattagaataaagtcgctttccttgcagctaataatcctaaggctacagccaattgcttgactcctggaggttacacatgggtaatcatttgagcttgttcagataattacaagctgagattgagacaaaataataagaggaatttacctgtcctaatttaggtttagaagtgctctaagacagttaatcaattaataaaaaacttaggaatcacgtcaaatgaggcacacactgctctagaaccacacccaagcaccccggtttcctcttacacacccagcctgcatccccacaaaaacccaaggctttagcaagcccaagccaagcaagacgaaacccaaaaatcacggttcgactcttacctcattctccaccggttgcaattcagcctcagcatagcctaagggaaat

SEQ ID NO: 2873 - DNA, 549 bp, unidentified
  source 1..549: mol_type = unassigned DNA; note = unclassified RNA viruses ShiM-2016 sequence
gcaaaaacctacgcacaatatggccttagtggtgtttggccttaatttatagcctttggttaatcgacgccctctttgaggagttaacggacggccagctatggtcaccagaaaaatagcactttagacaaatacatttaaaaattctatattttcttgaattaagattgaagttcttgaactgaaagtcttcaatgaattgtgcaatgtacgtgtaaacagttccccgcgagggtgtcccacgttcttagcgtttcgccattgcattttgaagttgttgcattagtatgtgatagaaccaatttctctatgacctggactgtttttaactagatggttatggcagtaatctagtagttttgtaccaggcattaactcaactttagtgatattgtctacttgatacgtcgcgttttaaaatttaaggacaataggcgaggcccgcgagttgtcaaatcttaagtctatacccagatggtaaatagtatcactctagatgaggctaactaaagacttcttaaaacttctgcctttctttttccaaaattt

SEQ ID NO: 2874 - DNA, 553 bp, unidentified
  source 1..553: mol_type = unassigned DNA; note = unclassified Arlivirus sequence
tagtaattaagaaaaaccaagacgctcaggtctttcatctcttacaagaaaatagaatggcatctacaagctcatcaaaaacccataataccattgaatctgtaaatctggtatatgatttacgtgataataaaagtggattcaattatcgcggtatcataaaattggggagatctagaactgcggaattttcagaacaaacgagaaaaacaacaataaagaaatggataactaaaatgaagattgttcaagggaatcctgtagaacttttaatacaatggagcattcctacaaatcaagatcttgttgaattgtgcttctccacggagatcactagcactgatttgagtatcaatttgggagtccctcgatatgaaataaatattgctgatttggagatcataaagtatgaaattggactgagttcgactcctgctaccaaaactgaactgaactattagggattatttacacatagtatttggcttaattaattgattaagaaaaaccaagaccactcacgtcttattttcctccgtattcctatataaac

SEQ ID NO: 2875 - DNA, 555 bp, unidentified
  source 1..555: mol_type = unassigned DNA; note = unclassified RNA viruses ShiM-2016 sequence
ccccctagccgggggcaagaacgcaagttcacctctagaatcacctgtacaggtgcgtatcagtgattggtacgttcttgtgcggctaggggtccaatacaactgctacttgcagtcggacacatttcagtgccggcatgtacgtggcatttcgcgacgcactcagcctaaaggaggattaacattgtgcgtatttcacacaaatataatcaacctacctggttagagtgtcggtccgataaaaacggcccgttaaggtacgaggaaattactgttgaaggtaattccagtactccagatcgacaaataccctataaggctgcaaagccgtatacaagggcagatgtctttctagatagcagtgtaccatctggcgtcccggctggagttagtcttttagacttgcctacagccgacgacgttgttgcatcgttgttatctgacgagcccacgttggcatcatctgtgtttcaaccctttgttgatacgtcggatatccagaatcaggcacttcaaaatgccattgagtatggaaatatcttactccttgtctct

SEQ ID NO: 2876 - DNA, 562 bp, unidentified
  source 1..562: mol_type = unassigned DNA; note = unclassified RNA viruses ShiM-2016 sequence
tctaggccgatgacggaatttcgctccttcgggggcatgcacggggaacgtaccttcggggcgtgctggtaatactcccaacaattctagatgcgtactgcgctcagcgccgggcacaccgttaagtgcttcaccctggtccttggtaaggttgatggaccctgaagaaacagtaaatcaccgggagagtgaactctcgttacatcatggttcgcccagttgcaaacgcgtctagagacaactaggcagagcggcagagggaagtgagacactctctgaagcgattaaatccgcgtgctgtccgtgactatagctgccgccagcggggattggcgatcgttaagagaataaacccgcccacgcatttgggaccacattagtggtatagcaacaacaaccagtacggaatctggtcacgtaactttccggccagcccattggtttaccactaccacttcggtgttcttgtggcattgggacgtacgctaccgcgagggggccccgctctgggtgatgagacggttgatggtcccgtagaccacacttccccccctacgacatc

SEQ ID NO: 2877 - DNA, 566 bp, unidentified
  source 1..566: mol_type = unassigned DNA; note = unclassified Hepacivirus sequence
gggggcccggcggaggaccaacgattgacgttcttcctggtgacgggaagtctctcgttggcagctccgaaaccgagcgctgcgttaacccgagttctagaatgctacgcgatcagctattcatggacgaagactcgagcggcactagggtaagggttcttcgggtaaatccctcctaatgcttaacgtttaataagttgttgaatactggtttgctacgcggacgaagctcggcagctccggcgccacggtcactggttgtgggttatccgggaacaaaccctccggttgggtaccgtaatataggaaccccataacccgggcctcccgaaaggagctcccggggtaccctaaccctgcaacgggcaaggacatcccactacgccgcccttcaaaggagttactcttccaatatattcttaggcgggttgtcaaagtgggccgcggccgtgcaggtcatcgggcttggggtagccatggggccaccaaggcggggagtccccctactcccctagaccaaaaatcctacgggtgaggtctggtggcactttttccttatattaacc

SEQ ID NO: 2878 - DNA, 572 bp, Myriavirus myriapedis
  source 1..572: mol_type = genomic DNA
gtccttcgcttggtaattcaatgttaattgtcctttctgtcctcatgttacatgtgattttcactatctttccttaatttatcaatcgataattcaaaaaattggcagaccgtgttacttgccttattctagaatattttatttgtatataaaagtctgataatgttagtcttgtaattctttttatatattttaattactattcacattccgattttgactaagctgtcacaaagttaattaattaagacaacacaaatgaaattttttctatgtatattatatattcgtgttttaatgtttcaacatgtacaatttacaatgcatttttacaaacatacattaatcaactatttttcgaagagcttatcggtaagctctcaatattgaagtgcagttttacactcatgtacttaatggataccatttttaacaactatttttggcacattctcgtatgacactctatttagtattataaactttattaataaacaccctcggtctcataccaacctgttttaaaagcggttaattactgagtaattttagatttaacagctttgttcaca

SEQ ID NO: 2879 - DNA, 573 bp, unidentified
  source 1..573: mol_type = unassigned DNA; note = unclassified RNA viruses ShiM-2016 sequence
caacaatgggagaattacacgtcaatttccgcacacagctccaagttgtcaaagtcaaaagctcagaaccaggcgcaggctattccaaaacaaagcgcaggctattccagctttgatgaaaatggatctgatgaaggggaaggaagacaatgtgaagatgctgtagatggtttcgaagactcaatagttaagaggatcaagaagagtgttgacaatcaatataaggttggaaaggaagagtttctgaatctaggggaaagaaaagaaacacttcaaaaggaacctaagactgaatgtgaacatctcaaatttgagaataaagtgatcaaaaagattataaaagaaataacttatactaagactaagcgtgtggatatcacatactcggatgaagcaactactagtgaactggaagaatatctcaagattcacgccaatgaattgaatgaagctggaaaccaatggtataatattaatccaacatctaatttatctaaatccttacctgagaaagtgaggaagctttatgatgaactgaactttgaacttctagagaagctggattcaaatgaa

SEQ ID NO: 2880 - DNA, 577 bp, unidentified
  source 1..577: mol_type = unassigned DNA; note = unclassified Hepacivirus sequence
aacaggggcgagagttcctgttggtgtgtggtggccccacggaccatgcgaagtcgaatcctacgcattctagaatggatgattcccgtaactatccacggaatggcctaccctttggtcaagtctgacagcttcgcggggcttgagacttaggggtggagattccgagaggcctgtacgggtattccggacgaagtgcgataggtaacacggcgcatgtagaccgcgtggagcggcagaacagctcccgtgacaaggtcggttgtcacgttaataaactcagtaacttgttattagctactaggcttgctgtctacggaagatgttgagggaacgtcgcgtctaaagataacaataggctacggcccgcgagttgtcaatcctccctgggaacaggctcatcatctctccaaaaccagttttggctagtatgtgatgtaacatgttaggagaaatccaaccatgggcggacccaaggtggcggccccgacacagccggcaagaggaataaccttcgggtgacctctgggtccatttctcaaagctagagtgggtgtgtgtgtcgtcgtttgcaaag

SEQ ID NO: 2881 - DNA, 578 bp, unidentified
  source 1..578: mol_type = unassigned DNA; note = unclassified Hypovirus sequence
gtcttaggggtccctacttaagatcacccattgggtgtttaaaagggatgtgatcaggtttcatgaccaatcataacgtaaccttttggggtctacaatgattccttttggtggagatcgtaatctccgtgagcatagctcgtgtgtttcgtttaaaacacgtgacttgatagtcgtggttagctaccgtgcacctaggtgcgtgccttgctcaggcgtgacctaacggtctaccctatggggcctcaacagtggtgtctgaagacaaactgtcggtattgtgggtggacttgcgttccacgcgtggtattgcttcggctcttattctggctactgtattcgggttttgaagcgtaagctcgttcatgggattgggcccccatgtctggttgatggtcacacatacgtgtgtcggtactggtatctaatttcctttgttatctagaacctggtttgacagcaaacactctaagctttatttgtttctcttcctagaaacatcagccacgctcttgtcagaacggtgtccttttccaagcggggagtagtgacctttagcttgatccgttaaggatgac

SEQ ID NO: 2882 - DNA, 578 bp, unidentified
  source 1..578: mol_type = unassigned DNA; note = unclassified Hepacivirus sequence
gagcccatccccgaaagggggtgggtcagccttatggctgtgtggtgtccccacaaaccgactcctaaacctcgctggttctagaatggtttgatgtgttggttgaccactggtcgaagctaactagcatatggtgttagggttcttcgggtaaatcccagccacatgcgaaattagaataagaccggtgtgcaccaatgcctctcttccggacgaagccggtcaggcatggagcacggtatgccgagaggcccgccgcatcagttatcgcggtggcgacagggcacgctgtcgttaaactcagtcctgatacagttgctgctgtgggcattgtctacgacactggtttgcggtggaacgccgcgcttttaaatacacagtagggtctgtcccgcgggttgtcaatccgtaacccagaaggggccgtaacctagtgtcaaaaccaatagccggcaacagcgttctgtggaaggagcgtaagcaaccatgggggtaccaaggtggcgtcccgtgcacaggcggcaaggggaaaatccgtatggtgacccctggtaccatttttttcttagtagaatgtt

SEQ ID NO: 2883 - DNA, 582 bp, unidentified
  source 1..582: mol_type = unassigned DNA; note = unclassified Picornavirales sequence
ccgtggggtttaccccacgggatgttttcgacgcagctactgcgagagtgtagcctagtttacacagctagaaatctgtgtgcccttttgtgctcattttgggtgaataaatgatcacgatgcccatatcgttaaatgtgtgctgagggaaactttcgcactgtggcactcttttcggacggatctaggttatgactattgcttgaataaggaaatccccgttctagcggtgtagtgattggcactaaaccttgtgtggagcagtctagaccaacacataatagcatagtgaagttaatggtacgagttatggagtagtcgccttctatatattaggttggccctggtaacaggtctaatatgtaatgggttaatgccatatgtttgacgaatgccatgatgagttaaaggaagataactatgtgaaaggtgtgttggatgtatccctctaaggagcgtggcttacttaagagctaaccctgttttgaatagtacaccagcaaagaagcaagacgtacttatttgaggcagacttttaccaagtttcatattgtgagtagttggaaggttccagaaagcaat

SEQ ID NO: 2884 - DNA, 596 bp, unidentified
  source 1..596: mol_type = unassigned DNA; note = Lassa mammarenavirus isolate LASV/H.sapiens-wt/NGA/2018/IRR_077 Z1R sequence
aatgcaagatcatctcaaagtaccttgcagataatgagaagctatcaaggcagaagttagcttttggtccagaccgaacccagaatgttgctcatggagggactgaaactactatccctttgcattgagattgactctgcaaggccaatggatgtgagcataacactgaagacaaaacggttgaatccattctaagtgatcatgggattctcactccagctttatgctttgtggtcctgacggctacaaactcactggtaatgttctaatcttgcttgagtgctttgttagatcatctcccgccaattttgaacagaagtatttagaagatcacaagaaactagaacaattaagatgacttggagtctagacgcaggacaacattttacaatgaacagatacctgattgggtgaatgacaaactcagggacacttattcactttgttaaatactcacaagaagtaatgcactataagatagatatagaggattttaaagctaggaacaaattaaggcaagggaacatagaaagtcaatttgttaagactgataagatgagattattagaggattttgaaagctaggaacaataagg

SEQ ID NO: 2885 - DNA, 604 bp, Olluvirus shayangense
  source 1..604: mol_type = genomic DNA
attgatgaacagaaacctctaattggtaatttttttcttaaatcgctgtgtctcgcagtggtttaaaactgactaatcgggcattatcccctaaactgacctaattataccgatttctgacttgattcaatataatctcgaagcatgaacaacatgttaccctcaacgtctcgacgaaccggacagccggtggctgttaatcagttgaggcaaaccgccgtaatggctactaaccctgacattaagggtgcaaatgatacagcacgacaactagagtgtatcaatatgcgtctaactaaaattgagaagactctagaatctatccaaaataccatggagattttgagggcagctgcaggttcacctgcaccaatatatccctctgctccctcattagtcactgaggtacgaggactaccggggttagcaactccggtttattccagcatggacgctagacggtttgtataaagccaaataaacgggctcgtcccataaaaccgttaacagctactcaaaaccttttcaagtgttttaaaatcccttgtttcaggctctctatactcgtgatttcctcgtacaaattcctcgaatctatcaatct

SEQ ID NO: 2886 - DNA, 613 bp, unidentified
  source 1..613: mol_type = unassigned DNA; note = unclassified Picornavirales sequence
aatcttcagtgctgtaaagtcaatctaaaatggcagccgcaacagcagtagcagcattaggtaatacagcctcatcatcttcaacagcaggtttacaaattttaggaaattatttaggtaatgctcaaaatttagctaatcaacaaactttaatgagccatgttgagaatacttttaaagagtctggtcttcctcgttatatggcctacactggcactggtgatatgccacagaacaggtatcaggtcagcggtggtaatttctactctgctggtccagttaattctaatttgcctacatttacaactcaggcacaacaagatacacattcaggcagaccaggaagaccgtatgaagcagttccaccttttaatcaattaggtcccaacaatgaaatgcgagttttaggccaaaatgatcgtcaaggtttaggtttcggtcgatataatattcaaaataattttgtagctgggggagtaatgacagcagccacccccaggaatgcagccgctcatcaagcagctgctaggattcttcagtaaaaactttcatccttaaaaacttcggagacccggttagataattgttatatttgtttaagtctagaattaca

SEQ ID NO: 2887 - DNA, 616 bp, unidentified
  source 1..616: mol_type = unassigned DNA; note = unclassified RNA viruses ShiM-2016 sequence
aggggccccttcccctacctctcttttcggccagcggcctgctggtcctatgtgtgctacggacttattttcggataccagatacaagttatctccggacttattttcggaatcaccatagataggcaaccaaaaaaccttcgtgtcgtcattatgtgttaatgttacaagcaagtgtttctcccccttgcttggcgaagaaagtctaataacttccttaacaaagaaccctgagtgaagagccggtgtcaaaaccggaattggcggaaattggcttatgtcgaaactgatcagtatttgttaagaaatagtgttagcaaggctatagtattattgcgcaaacgagaattctaaatgagagtttattctgcccaaactgtgttgggagttcacatcgagaggtgtgcccttcgcgagatctgaagcagatattctcactaatcatggatgattcttgtaagcgtggtgtgctataatatcgatttactcaggttagatgaaatctgagcgtttgttataatagtcttctagagaccttgcgacgaaagtaaaggtaagctgaagtgacttccgagccgtgtgaagagaaaacggtcgtttttcccagtacttgatt

SEQ ID NO: 2888 - DNA, 628 bp, unidentified
  source 1..628: mol_type = unassigned DNA; note = unclassified RNA viruses ShiM-2016 sequence
tccaggggtgatccccctggactactttgaagtattgtgaaatttttcgagaaggattgtacacatgtgaccgtgaagcgcggtctgtttaacgagcgtccttttcgaaggacgcggattgcatcgttacacgctattgagtaccgacttgatgtgcaatgaatctgttctattaagcttatttcaaacttttgctgttttacagatatttaattattctattaacctcgaccttcatatgtaaaggtggaggcgttggttttgaatatttaatattctgtattgttgaggttatcactatacattattggaagtgaaaatttcctcaatcgaggagagtttggcgttttcaattaaaaacgcattttctagataagtgtcaagaggctctaacgaacttgatattgatacttattttgcactatacacttgtattgttctgaatgccatataggcccaacggaacaaattggtgtctggatgaatttccagctagaccactctagatctgtgattttgtgctttttaggaaaagtaatatctaaagtttttcatggtttttcccagagataggggagctgtgtgaagtttccacagttcactttaaataaaccttgttttctcaaga

SEQ ID NO: 2889 - DNA, 631 bp, unidentified
  source 1..631: mol_type = unassigned DNA; note = unclassified Alphachrysovirus sequence
tgataaaaaacaaaaaacctcttcagccagtatctgatcacattttgggcaaccaccgtcgtgttaaatgttgttggaaatatatctggttgattgtggtggcgaggcagatgtgtggtctgggggtacagcctcaggcagtgtcatctgcgatcgtaaatgtctgtttcgcgtgacggcagaacaggctaaaatcgtaatcggtaggcagttactggtggtaatatccgatgataattcttgtgaagtattattctgcccgctgtgtggattgggcgtctacactaacactaggaacatgcatactagcgaagtttacgttgagcacagcgaacttccagtgcctagacagtggtcgcacctgatgtcggcacataagacatgttctaacgcatatgacttgctgttatcgcgtggaaagttgaggacacggcgtaaggcagtcaccggtactcaggtaggtacagtattgtatcgccgagggtcggtatatctagacaacattgggccaattggcgttgaccattagctgaggggcctgatgagtacctctcaggaggacgaaacgccaatgcgtcgccccggggcaagataacagtaccaaaagttaacgtaaggaatcaacaacaca

SEQ ID NO: 2890 - DNA, 633 bp, unidentified
  source 1..633: mol_type = unassigned DNA; note = unclassified Marburgvirus sequence
ttcttattgttcaaagttgcaagggaagttatcttcccgagttgatacaaagacactaaacatttcaaaagcatgtatgtgggcaaaacgtaactagaccatcttgattgaagtagtaatttatttctgtcttaaatgtgattttcacttcaaaagagttaaatggtgatagatcaatctttgaaattacccatttatacattatagagaaactaatattactaacaaaaggggtctacctaacgggtatgatcgagtgatcagtctatcttataaaccaaacaattgacttcttactttttaagaatcaactaacagcatagaaaccacatttatccttacgtaatctttggcttagttggaattaacttttgttgtaattcaatacgtttagtcatagtatattgtaggattttttataagtttagaataccttaaatcatacccacaaaaaatactgttttaattaagaaaaactatgaagaacattaagaagatctttctctcgtagtgttcttttactggaagaagtattccaatcttaacttgttggatcagttgtcacttaagttgttatttttaaaattgattcacacaaagtagtttaaatttgtatctagaataaattttaat

SEQ ID NO: 2891 - DNA, 635 bp, unidentified
  source 1..635: mol_type = unassigned DNA; note = unclassified Picornavirales sequence
tctcggggcagtcggtcggggcggttagtgccatgtgtagggcgtttaaagacgcaatactattggtgcggccgttactgacttcctgtctcgcaggtcccactcccctttcccttttcatgtcgctatcttctctcccccaacttttaaactggactgattttaacgtgtaacagatgatttgtggattatggatgtctagagatatgatctccgaaacctagcttgtttcgctgttattgacgcatttgtcattcgatggtggctaagtgcccacaaccctaaacttgggtgtggtcaacacatgagtcaattcgtctgcctaattcgccatgaggacagtaacgtaattgctagttagtagaaatcgcattcttgtgtcataggaaacctgtggccgatagttggtaaccactccagcgtttaggactcagagaattttatctttctatgatttaacacaaggactagtgaggagagagtagaggctgtagaccggtttgggacctcattgagtatcccttgcctagtagcaccggctatggactccgggttggaatcccggacttggctctatacttcctgatagggacgcggctggccgcttctcactagtatagtcagttgactttcac

SEQ ID NO: 2892 - DNA, 648 bp, unidentified
  source 1..648: mol_type = unassigned DNA; note = unclassified Picornavirales sequence
ttaaaattgtacgtagggaacaaccctacgtacaatggcctgagccaatcagaccctggttttacaccagacaataattggcaaacaaaaacattgggcgctatagcttaacggtgcgtcctgcccccgtatggagtggttgaatataagtgctataccctgaggagggaataatacctaagtctatgagaaacacattatttatcgacgaaaccatttaagctaaatgattatgatttttctataacgacaaacagcgtaaactgtataaacttacaacaacccaacggattacgaaccttaaagtaactgttctagatgaagtctagtagtctccaaatattcccgtgaaacggatgatggacggaacagctctattttaagacgtgaggctttaaatattgataattacattacctgagagccctctttatgaggtttgattattaataaaattagtaccaattcttgatagaatttaagtatgttaacaatgctgaagacatgtatttcgattgttaacctctacatttctatgaaaaggatatgcgagtctcggtggatatcgcattatggtcgcagtcaacctgcagttttattaatcccgtgtcggagcggtggtaatggagccggactactttgccaaaa

SEQ ID NO: 2893 - DNA, 650 bp, unidentified
  source 1..650: mol_type = unassigned DNA; note = unclassified Riboviria sequence
cttgttcttacactctagaacaaacatttctggattctccaaatagaacttcttgaaaacttcgggccctccctttatggcatcaaccagggcgggcactccgtattccaacacatcgggcaggcattcccctttggacctccaatagggtgctcctgctgaggcatttttacttgttgtaacatctgccagcaattccgacaggtcttcagcgtgccagcttttaacctcacccaccggcaacagcttctttagagtggctactttcgcgggtaccactcctgtcgggtccacttttatatcgacgcacttacggcttgtcatcaaactaagcctattaacaaatccatcaacggttccactcgagtatatggtgctgttcattgactcggcgacctcctccggagagtacacccgaacaagcccactcactgttgccggtgggtgaggttaaaagctggcacgctgaagacctgtcggaattgctggcagatgttacaacaagtaaaaatgcctcagcaggagcaccctattggaggtccaaaggggaatgcctgcccgatgtgttggaatacggagtgcccgccctggttgatgccataaagggagggcccgaagttttcaagaagttctatttggagaatccagaa

SEQ ID NO: 2894 - DNA, 651 bp, unidentified
  source 1..651: mol_type = unassigned DNA; note = unclassified Mononegavirales sequence
tgaggtcctgatcgcctacccctagcccccttgagcagaatctcataatcccttgtgtaatccccgtctgatgcctcctcctcttgaggcagctgttttaaaacctctaccatgggaatgagatacaatgtttagcactaaacctagacgatcaggacacgatgatgacgatgacgacgaggtgccttatgtgcacacccctagtacttcaggtgtcgtcactaggagggtaatgtccttggacgaggtgattcttgccaagctgaataagctcgaggcagcagtggccaagataagccagacccaggatgtcatggcggcagagatgaccaaaatctcgacggtgctggctactgttcaagcaatcggaggacgcgagagtgcatttagaatcagcaagatgtctgatggccctcaggactctaaacggaacagaccgtagctcgtctagaagacctgtggttccacaaaaaccaccataaacaatattaacaaaatgctgttttaagtagatgatcggtccgatctcgtgcaccctgttaagggttagctgtgtctgttttaaaactccttttcttctgaagagaaaatggaaaatataactactatcctttttatcataggagcacgattgctggacaaagcgataaa

SEQ ID NO: 2895 - DNA, 652 bp, unidentified
  source 1..652: mol_type = unassigned DNA; note = unclassified viruses sequence
gtgcagtttttatactgcacgcacaatgacccgctaatatatcggattctagtatttctagacaattatatattagacctaatttgttttgttaatattactttcatggtctttaaatgaggcgaaaagtaaatttaaccatcctaattgtttgttagtatatttcatggatgtaaaatgaggcgaatcaaactaacaactattttaatcaattccgaatactatgacgaaaccatttgaatactattcttgacctgattatgatataacgacaaacagcaattattataaactgtataaacttttaataacaacaatggactacgaacctatatgtaaccaagatatcgatgagcaatctcgatcccaatataagagtgaaatctttgagggccgttttggcaatgtatatagacgtggggttttaatggctagtaaccacattacttgtgatgaaactcaataactagtactaattcttaaataatttaatcatgatataaatgctgaagacaagtatttcgatttatatcctctgaatttattaaagaatatataattactcggtggtaattatattttagtcgcagttaacctgcagttatagagcatcctgtgtcggagcagtagtaatgcaacctatcaacgaaac

SEQ ID NO: 2896 - DNA, 653 bp, unidentified
  source 1..653: mol_type = unassigned DNA; note = unclassified RNA viruses ShiM-2016 sequence
gatatacacttattagtgtatactttatttgcctgaaccgatgtgagcagtatctcccggagtgcggtaaccatttagcggtcccagacacagctgtctctgtgtaaaacgggtaatttcgggtagggtttattcatccggtcattttattccgtccattatggacttcatccatcattgacattttatttttgtggttggagagctgttagaagaagctctcgtttgcaaggtaggctttattttaagctgaggttgacagatcatatctatacgacactttggtgttaagtgtttagtcctcaggtctagctatgcgattcgtagtctagaccttaatggcagtgaatcgtacagtagctggtggcaatatacgtaagaccaccatactggcattccagcagtggaatgtgacgcatccttagatagttgatgctttcatcctatcttccgctatggggcatacccattcatgattcacaggtttcccgttatagtgcattttgaaaacgtttctattgaacacgactgacaagcatgttgggggaatcctaataggccccaacggaacactcgcagagccgttaacaattcattagagtaaatcgttagtagagtgtaccggtagggcactgtcattgaaaatatttcgc

SEQ ID NO: 2897 - DNA, 656 bp, Ranunculus white mottle ophiovirus
  source 1..656: mol_type = genomic DNA
ataaaacaagcctataatacaaatctcctgaaaacatacaaacttttgagataaaatttcaaatacaaaatagtcaaaacatgaatagtgctgattctagaattattccgatgaataaacacaaggaatttgagaaggataagctaagcttgcaaaaaatagtgattaatcctcaattgcaagaaagaaacaatcatttccttgatatattatcacgatacaaaactagttattgctcaaaagaacgttttttgtttggatcatggttaattaacaataacttagtcacttctccttttagtcctaaagcgtttataataattaaaacgtcaaatgagctaattgattatgatttgtttgaaggattggaaatctatttgatcacttctcttgaatttgcaataagttcgtatgctttacatctgttcaaagaagattttattatgcaagaaaaaagaggagaaacctcattgatcctcaattcttataaaattcctaagtactccctaaaacttgagaaatcacaagagaatatcctcaagaaaatcaaagaagactatagttatatcattaaaatgaataaatttaaatgaggagttaaaacaaatcaaccaataaatttgcatgaaaaatacaaaagaatcttgcggcttgat

SEQ ID NO: 2898 - DNA, 664 bp, unidentified
  source 1..664: mol_type = unassigned DNA; note = unclassified RNA viruses ShiM-2016 sequence
cccccttttcaacggcgctggcaaattcgccgtattgactattatgccatcctatatcagtcatccgtggcctttatatcgattcatattagtcaaatatttgccaaaactttactttcagtttagtttttcagtgtattttctttttgtgtatgtacgttgtattttctatgtaagcgtttgtcgcgagtgttgaaaattctctacaattacaatgtgtgaaaatttgaattatgctttataactctaccctgtattgtttatctaagtagtttcggttgaatctaaattggtgaatttcgtagatcatgaccaagcattttctctgaccctatgtatgttaaatttacgcaggttaaaagttattttagtgtttttcgagtgagtatcagttgtgttgatgaggcttcaaattttcggttttgacttgacacgtgaaaacccattatttgattctaagtgcttaactgaattctaggctctgtacgattgcttgttaaatccatgctgtcaacatgtgctacgcggctgtagcggtacaatttcctagtgtaaagaatggctggttagaacagtccccctcctaaagggaacctccctggtcgccggagtatgtaaatgcgacaaatgtctagacgacaagtttctttttctacgtatcact

SEQ ID NO: 2899 - DNA, 669 bp, unidentified
  source 1..669: mol_type = unassigned DNA; note = unclassified Picornavirales sequence
agagacccccttttcaagttttgtgtgtgattacattgcactttggattacaaaagttttccaagtttgatcacatgaaactgacaaaactcgacttttcgttttgttttgtcttgtattttgtttgcatgtgtaatgcaaatatgtagtactgttatgtacttatatatcgaagctataggtatttaccgaaacctattccatctgatggctatggttgtggttaagtctcataaacttaatcaccattaggtgagcgtctgttgacttaaggaatgatacagcgtttaatctcctagtgtcgctttgatgttgtgtgacatttcaagttctcatacttgtgttatgtattgcggtttggtagttgtcacgtacacaactactgggtttgtttttgcgttcagatgtctagacggttagtttgtcttgttgtatagacccgctttctcactttagtgactttgcgttagtggacattgcgcatcgtgttccctcaaaagcacaaatgaatttcatcgtttcggcagtgtgctgcaaatgttagaccaagttgtcacattgcagtttccggatatttatatccaccgagcgcggacgtgaaaaataatccgacacattatctcttacgcgtataaggggatgctaggattcatttaaatcttacttatc

SEQ ID NO: 2900 - DNA, 670 bp, unidentified
  source 1..670: mol_type = unassigned DNA; note = unclassified Picornavirales sequence
aggtggggggggcgcttatgcgtcccccccttcttttcccttcctgtccgatgtcggtctgtctcctgcggtgcgtcgctctatttagagtggtaatccgtgggttcagtactggttgaggatgggttgggtcccattccccctccctttaacgtcgctatcaacttctttgtaaccccacactttacatggactgatttaatggcttttgatgtttttgaggattatggatgtctagagacatgatctccgaaacctaacctgctttgctattattaacaaatttgttatatggtggtggctaaacgcccatgctcctaaacttggagatggtcaccgtatgagccaagctgtctacctaatttgttatgaggatagtagcgtaagtgttagttagtagaaatcgcattcttatgtcatagggaacctgtggccgatagctggtaaccaacccggtgtgtaggacatggagcaagtcaacactctatggtaaacataaggactgatgcgagaagagcagaagctgtagactcgtttgggacccaatttggtatcccttgcctagtagcgcgagctatggactccgggctggactcccggacttggttctgtacttcctgatagggacgcggatggccgtctcgcattagtatagtcatttgcaactcac

SEQ ID NO: 2901 - DNA, 678 bp, unidentified
  source 1..678: mol_type = unassigned DNA; note = unclassified Riboviria sequence
cgcgtgcacgttcacacgtgcacgcggatatgtagatttagatctatagcaatactatagttgatactttttgatggatgatatccaatttatgagagtttcgactactcatttttggattatcacatccatacttaaagattgattgttattgagatacatttacttcttcagtacttattaggtttgaatagccttaaataaactacttttctaagaaatagacacttaatgcttatagttgtaagctgcaaatactgtcttgaacagtacaactaccccccttttttctattaatcatcatttttctcgtagaaaatgaagatttgattgtcataattgacatctcagatgcatggcttgccctgtctgttataccggataatatccgttgacgtcttttgtgttttgatgtaaatataacgaaaacaccacacatacacacccgtctcgaaatcactttgtgttactagaggcggggaaccgtagagtctagagttatgtcattttgaaggagcttgctcctagatggtaactatacattttcttagattttgagtttcgccacttattatccttgatagagaactaaaactagtctcgtttgttgaacaattttcttttgactttgtcagaagtttatttgttcactcggttcatgtattttaatttaataac

SEQ ID NO: 2902 - DNA, 681 bp, unidentified
  source 1..681: mol_type = unassigned DNA; note = unclassified Ourmiavirus sequence
caaaccgattttagtcggtctgtgtcgtgctcatcaaactggaaactgagaaattagaatctggtagcgtgaggtgaatggatagctcgtccgttcattgcgaggccccccctgagatgacgaagggagagggtactgtgcacgggtaaaagaagaaaacactctatgatccgagttgagtgaaatcctgttgtgacagacgccggttgaggcagtcgcgcagagaggaagcgattcctggatatagaggtatcggcaatactgatcagaggcgtgaagacgcaacatcagatcaaacccaacaaaccggcacaggcgttatgaccctgtgttacgacagaggccctactgtccgggacctgagggaagcgcgttcggctgagcgctgccggctttatgcccgcagaggagtcgtcagaggttgctgtggagtgaccgccgtgcggggtggtggcaatgagtgccgccgccgtcagcgaggggaggagtgagcccaacccccataccaaatcgcgaacccggtgcgtattaacgcggaagacgccggggcctgtagatccagaaacgcggggaaccaaatcccgcacaagaggacgcaggaaaaattctgcctcgttttggctagagcagattgaagtctagactgacactgacccgggcttggaattgccggaccagtgg

SEQ ID NO: 2903 - DNA, 683 bp, unidentified
  source 1..683: mol_type = unassigned DNA; note = unclassified RNA viruses ShiM-2016 sequence
atgggccttaacccatgcaccttctttcgcggaatctatccgcgtcgctttaatgcgagcaatatagacgtgaatatatacgataattatatacatatatagttttagtttggtgtccatttgacattattatctttttatatatgattttgaacaatacatgattcaagcattatcttgccagagttgcgaagatttagttctgtaggactttgtagtgacttaagcacctaatagttgtggtagaagattgtagtagtttgtttcgaagctagatgaaattgtaggctgagttcagagtgagctagaggactgccatcctcgttgtagctattctaactgtactgtttctagttaactagtgatgagaacaaattagtactatgcttttatgtattctgatgaacggtggttttgtgaattatctgttgtgtgttgtgatattgattgtgtaaattgtgcgttttgtcgatgaagatgagggttttggtgtaagcagcaaaacttagtttgatacctcattgtagactgcaagcgttcgaaatcgtgaatggtcgatcggttttctttttatgactgttttatagagtttctagagtgattacaagtttatttgctggcaggcaatttttgatttaaaaggtaaaatattgagagttatttgttaaataataaattacaca

SEQ ID NO: 2904 - DNA, 695 bp, unidentified
  source 1..695: mol_type = unassigned DNA; note = UNVERIFIED: Potato virus S isolate 18-1113-2, complete genome.1 sequence
cagcttaggtaatcagcttagtagtattgaataaatggatgtgtttttgcaagttttgaataaatacaagtttgagcgtgttagtagtgctttgaataaaccaatagttgtacatagcgttccaggtgctggtaaaagttccgcaatcagggaactactgaagttagatagtaggtttgagtgcatcacccgcggccggccagatattcccaatctagagggtgctttcatcaagagcgaacgtagtggtgaggataagctgttgctggttgacgagtacatagaggggcccgttccagaagacgcttttgcaatctttgcagatccgctgcagagcacagctgttagcccatatagagcgcatttcatcaaaacactaagccatcgctttggcaagtgtactgcttcgctcttaagggatttgggttgggacgtgcaagctgagggtcaggattcagtacaaattgccgatatcttcacggttgaccctaaagaaacagttgtttactttgagccggaagtcggggagttgttgaggaaccacggcgttgaggcgaattgcattggtgaggtgcgaggagctacttttgagcacgtgacgttcgtcacttctgaaaacagcccactagttgataaggccgccgccttccagtgcttaacgaggcacaccaagagcttgctcatactgtgcccag

SEQ ID NO: 2905 - DNA, 697 bp, unidentified
  source 1..697: mol_type = unassigned DNA; note = unclassified RNA viruses ShiM-2016 sequence
cgtatatgagctgatcactcatatacgcacttacgtttctaggggatgctatttagcattcctaggatggtatccagaccaatccgagttctataacacatttggacctaactaaaaggcctaaatggtactagggagacatggaattatgtgtgaacgcacaaagacagagctacacgggctgcgtcttttggcgtatgcagcgagtttataacgtgtctttgatgcaatctggattagggaggggacatttatgtcaccctccagtcaacgatcacaaagagttattttgcttccgaactctataaataaaggaatataccagacccgaggctaccgcctcacctttattgtctattggcaatatttaccctactgttggtgaataaccaaccttattgtatttttatatacagtatgacacccactcaatcattataatcgaattgatgaaaaattggacaagcatgctgtgatgatgttttatgaaatattagtaaatgttttagcttttctactttaggaattgaagacgataagactaggcgcacttctctagaatctagatgggcaaaccccaaaactagactgatgtgattgcgttggttgccgagtccgcggagaatatccgttgctcctttagcgaaatctattatgttgaaattatgaattgattcattattggtacgaaatctca

SEQ ID NO: 2906 - DNA, 698 bp, unidentified
  source 1..698: mol_type = unassigned DNA; note = unclassified RNA viruses ShiM-2016 sequence
tggggagaccccccagtcaacattggtagtttctatcaatgccttcgccaggatttcttaactatgataaggtttaatcaccggttcatgcattatatgatagtgcaaaatttttgagtaagatcaacatcggtctcatagatttttctctatcagttaatgttacagttacgtgaattgaagattgcgggtggcgcccgcttttgggagcatctatgctcccgcccctttttgagttttagtgttcacttttgtggacgtcactcaattatgtctctctatctagagatagctctagatataatcatttgtcagagagaggaagaacaaatgctaagtgtatagttacctgtagctccgccaagcctacctggataccttagaaatcgcggttttaaccgcattattggtctggcaaaccttctttgtttgttaaccggaggcaccaaggttaatgaacgttaaagtttttacgtgtcgcaaaccccctttatcgaagcgtaggcttcaacctttttgatgatactcctgatgagagtggattgtttgatgttgaagaaacagaatttgatcgttgcgatgatgatcgcattgatgttgccgaattgcaggcattttttgatgaggaggatatcggtcgaagagccgatgagaaaactgttgaagagacagttgaggtgaagcggcgtaaaggcaag

SEQ ID NO: 2907 - DNA, 699 bp, unidentified
  source 1..699: mol_type = unassigned DNA; note = Human parainfluenza virus 4b strain HPIV4b/Seattle/USA/SC0496/ 2019,4 sequence
ttgcaaccaagaggcacattttgcaaatcttacctagatgcatctagacaaatcgcccacaaagaaaaacaaattcccaattcaccaaaagaaatccaaaatcaacggagctacagctatcctgaaacaacactgcgaccacaatgacattcctcaagaaataaaggacaaatccaggaacagaaaaaaacagcccagaacaaactaacagacagagaaagggagaggcaaacccgtctcagcaaaatctcccatcaacatcactcgaccaagaccgaaccaacagcacaaacgcagaaacccactaccgcaaaactacagaaattctcccacaatcccccaccaacattcaccaacaaaccagaaaatcattcaaccaggcaacctccacatttcaagtttaagaaaaaaactattataggggggaacgcacttctcagctctaaccacacgaggccttgtcttgtaaaacaagatcaatctcacacagttcaaaacaaaatctgactacaagtagaacctccacaattcaaagttagaccaacgatctaacaacaactcatcaactagcaactatcattgaactaaacaatccagaaggacattacatcaactcattcgtgaatctccaaaagaaataacccaagtaaatttacaatctactctttaattataaataaactgaagtaggtcacaagg

SEQ ID NO: 2908 - DNA, 702 bp, unidentified
  source 1..702: mol_type = unassigned DNA; note = unclassified Orthorubulavirus sequence
caaccaaggttcatactttatgaaattcatctagatgctccaggaaaagccatccacagtgatgcaccgaccctcatctcattgaaagaaactcaaaatcaacaggatcacaaccatcccacgacaacaccacgcccacaacaacgccctccaaaaaatgaaagacaaagccaagaaaagggaaaaatggaaaagaacacaacaacagacagagaaaaagaagaagaagggcaacattgccctggcaacatcactcacaaacatctcccaaccaagaccgaaccgactgcacaggcacagaaactcaacatcacaaaaccagaaatggccctccacaatcctcccccaacaatcaccaacaaaacaaaacgacacccaatcaaacaatctccacatttcaattttaagaaaaaaactattataggggggaacacacttctcagccctaactgtacaaggccttgccctgtgcaactgagacacccccacgagcaccggaacaagacccgacaacaagtgcagcctccacgaccaaaaaccgaatcaaagatccagaaacagcccatcgcccagccatcatcatagaatctaacaatccagaaagacgctacatcaacccagccacgaatctccaaagggaacatctcagacaaaaacacagcccactctccaattacgaataaactaaaataaatcataaga

SEQ ID NO: 2909 - DNA, 702 bp, unidentified
  source 1..702: mol_type = unassigned DNA; note = unclassified Dicistroviridae sequence
gtcatctgggctacaactgacgcttttgagtgattaacccgcctttatatattattgccgattaaatactcatgattcttgtgtgtgtttattttggacaaggaaactagttctgaaaagactttgaagagcgcgataacgtcgaacttttagtttgtataaccaggagctctgggaactgtcgttgacaggaaattgagaccgttgtgtatgctttgtgatcttcaccgtctcacccacctacctggacgattgtcgtccttggatttgagcctttagaaaaggaagtccttgaattatagaggtacattagtgcgttgtctgccaaaacaggtacgtacggattacactataaggacgtctagagttgttcattttgcccccttaaccggattcggcgaacactctattttatatacccacccatttatagttaaagctttataacttaaaagtaagccgactggaaatcgttaatccaattttattttattttattttatttaatttatttcaatatagattattttagatatataagaccagtatttagctgccttaagcaactattatacttattttttgttattcttaaatttttaggagctaaggtagcgttattagctattgcacttttatttattttaggaatattgtccccgaggaattatttgttaataacactttgtttgtcattatata

SEQ ID NO: 2910 - DNA, 708 bp, Hepatovirus D
  source 1..708: mol_type = genomic DNA
ttcaaaagagggtggggagttttctccccacccccttttggatacccatggtgcgggggtataaattaccgcaccccctttgctgtgcccagggtatgggcacctttctgtctgttttgtttcgtttgtctgctttatgtgtgctcgtcccctatagggcactcatttcagctttctttcattctttcttttccccggttctcaccttaccggaggcactggccgttgcgcccggcggggtcaacctagtgattagcactaggctgtaggtgtctaaagtggtgacacaaagaggtgtttcctgattccagcactgttaactgatacagatgaaacctgattgatcttctagaaggggtaggctacgggtgaaaccccttatcttaatactactatgtagagatagatccagtaggttaagggcagtggataaggttgagttcaaatggacaataaatcttcaacactggtggacccaatctcactggctagttgccttcagtgtggattctgtggaggggtgtttcttctggatagggaaccatcacactggtgcctgagactcagggtgtctggccttaaatcacagaagccgtatggtttttgtggcctagcttctgcctctaaacagactctggggcccaatgacaccctgagcccttcggggtactcaggggcatttaggttttccacatttcaaaatagtca

SEQ ID NO: 2911 - DNA, 710 bp, unidentified
  source 1..710: mol_type = unassigned DNA; note = unclassified RNA viruses ShiM-2016 sequence
actgcatctattttgccacgctccacattggcccgtgtatatggctatgtgctctggattcgtgactaattcgcgaacggtttcccgacgccgcctgtcgagcgctttgacgttatcgtagagggtttttaaaagtcgatgagtggtacctactaagtgacacaattgatatccgtttctgttcgcagtactaatttagagtagtttcgatttattttcagcattgtgtccttttcctttagtttagtctccatgtcatcgccgttagtacacggggtgccgtttgcggaggcaagactaaccacttttcaggtcaatgagctatgattgactgaggatagcaagtacggaccacgttatgaatttaacgtgatttacccgaaggttcgctccaacggggttttaggcttgtgaataggctgccaagccgttctttggaacgttgtttacgatttgattttgaagcttgggaatggcgccttttgaaggccaaccactgcttgtttcttcttatggtctgatggggcgtttttatcaccccttgtctagaagcctatttggctttgcacgacttcgattacatgcaacttcataccatgcggcttttgcctcaaacccacttgggggggaacgccccgagcatcatggtggctctgatgtcataaccactatacaaaacaacaactatcatacaacacaacttaaccaat

SEQ ID NO: 2912 - DNA, 715 bp, unidentified
  source 1..715: mol_type = unassigned DNA; note = unclassified Picornavirales sequence
taaatcgtgagattgagaataaaggtaagcgagatgtagccgatcaaaatataaaaggtaattggttaatacaagatactaaaaatcgcggtctattagaattacaaaaattaatcggcagtcaaaaagaaaacataacgactaaagaaataaatggccaattagaattgttgagagagaaactgggcaatcaagataagtggaccgaagctggacgtgatgcattcactaaagctggcctcccggaatttactttctgggaccggggatctagaggaccactcgatatcggatcaacgcgatcatacatcggaggcaacaattttgtcaattcctatggaggacctgacaccaaactgcctaaaaccggtgagtcgccgttcgcagatatgaatggactatcccgcccgtactaatcttgttgctcataacatcgatcaacaatctaagctgtcttaagtggtttgtcgggtgtcgcaggctactgttccactcggggtcatggtgccgcgcttaagcgtttcactgtaaaaccatttcattcagcatcaaaaagaaaaatacctaggtgagcttaactcaccgtcatttaagctaaagttacaaaatttaaattaacttacgttctgttttcttaacctcaactttcaaaattaaagtaaagaattctagtaaagtaaatttcaaaatttgtcatccaaaaaaatcatggatc

SEQ ID NO: 2913 - DNA, 727 bp, unidentified
  source 1..727: mol_type = unassigned DNA; note = unclassified RNA viruses ShiM-2016 sequence
ccatggacgcccctttgtaattcgtcgttgcatgtatttagtatgccgttatacgtattcccccgtgagaaacggtcgttgcgtgtattcctcatgctattatatgtattccccgttgaaggaatcctgaacccttattttacccatttacaaaattttctaaattttatatatttaattaggatcataccttttacatcgatttgccatacacaaggtgtaattgctatgataaccggaatgataccttccggacagtggaatctgttactttcccatctttaatcttcagatgtaaaatatagctagactgataccgtctagacagtggaatctgtatctttcccatccttaaactttggatgtaaactaaagccgccctgatatggcgtacctcgtggtgattcgctcccataaggataaaactatcaaggttctattttggacattttaacctaaagaaaaatgttctattggccagatcaatctcacttactcaacatttgtgagaggctatttgcctgtgcgttgtccagacccagatgttaatactgcatgacccactacactgtggaataagcaaaggaaatactttggtataaatacctccttattcttgaacgcaaccaggatttcgttccctggcagtgatatgctcatgtaagatctcatcaactgtcgcaaaggacttaaagttattatctctacgctgtggcttaatacaact

SEQ ID NO: 2914 - DNA, 730 bp, unidentified
  source 1..730: mol_type = unassigned DNA; note = unclassified Rhabdoviridae sequence
ggccctaagaacattgaccctgaaaacaatagacctactcatccatccatatccttctgaccggttttagccaaaaggagcctttaagaacaaatcatccaatccaagcaaaacctcactctagaccaaaaaacccaattcttctcctcaaccacctatgccattgtagtaatcttcccttctttccgcaatagagaccagcaataatctgataatgcttttctctctgatttccttaatatcacgaaaaacctctatgtaacggagaaaattacaaacttctaacagcaataattttttagatctcatttttcaaaaatttgtgtcaaatacaaacattcgataggtctcttactcaaaataaaataacaatgtctattaaagaaattgattaataaacactaattattaaaaaagaatgtttagaaccgatagtggtaaaaaaccattgctcacgaaagtatagaaaatttgagagagctgaaaaactgcattaacttttcgggtctattcaatacaacagtccaaaccaacctcagataaagcaagccttaacaatcaacaactgcgtcatagtgattcgaaaccgtagatccagcaatacagctcggcccggtaggaatttaaatccgagttactctaaaaatctagtcaacgacacatcaaggaaccatttgtccaaaatcagagtccccgaacgcataccacattccattaccaaaacgcaacg

SEQ ID NO: 2915 - DNA, 730 bp, unidentified
  source 1..730: mol_type = unassigned DNA; note = unclassified Negevirus sequence
ataaaactatactaacgtattggcttatcaggtttgtatccaggtacagatcatagtcggtttccatccaggtgggaactgtataccggcggctcgtaaggcgagttgctgtaaactggtacgtagccagactacgtactgtaataactggagtcccgaattacgcgactctgtaaaccccggtgttccgctagacggatcactgtataattgctgctcatctaggtgaggagtgtaaactgaataacgttaagcgctattctcaaacaccacgacgttctttcgggagcgtcgtttaactgctgactttctagaaagtcagtgtaaaaattccgcaagttcgcttgtggatctaaaataggagaaactttcgaggtttctcccgtctgtcttgtgctcagcttgcttttgacggacagtgttgcacacgcgttgttacagaagaccgaattttgctcttctacgcctcgcctacgcttcacatctctgtctctcgcagccgcactgtcttcgtgctttgcgacttgatagaacaactgcacttccatcatttggaactgctgaggaccggacttgctcctcacgcacccaactcgttgttggtgcatcgttcttctttcgggaagcactgtctcactgtctccggatttcactttccggggtctgtctagcgctctactgagcccttctctcttcgtctcttggccaaggacgattatacactttcatc

SEQ ID NO: 2916 - DNA, 736 bp, unidentified
  source 1..736: mol_type = unassigned DNA; note = unclassified RNA viruses ShiM-2016 sequence
ctgggcagtattgcccagcaatctcttaaggagtttctcctttaacaatatcgcaacaattttatgcaagtttggtgatgtctaaaaatcacccgatcctttctatcttgttctttacgacttttctataatattattttattaatcatattataggcgagtaatataatatggatttcacgaaaaatattatagttctgattatggtcattttagttaggatgtgccttatcttgttgtcaggcttggtctagccttgatagaccattttaaggtttagtctaacctctaaatggactactcaattgttttagagttttgttggtgttgctagccataaatagcacactcggattgttatccagcgtcattgagtggattaacttaagcaattctctctatataattttattaatttaattatacttactgtaaatgtctagacgtgtacttgatgttttgccttttcggaaagcgagtataatgtaatcttttgaaattaggtaaacctgtaatccagagagactgatcagtagatatttcgaatgtaacctttatggtgattagtagaaagacctttcattatgagggtcctgattaggtaaattattaagttcacggtacaactccatctgttttactattaaacatccagattgtaatcctgtttttactttaataattttattttcatctgacttaagtaaattaagacgttttaaattacttttattca

SEQ ID NO: 2917 - DNA, 745 bp, unidentified
  source 1..745: mol_type = unassigned DNA; note = unclassified Tombusviridae sequence
ggtttctagaaccgcttgaagaaatttcggccggctagcatggtatcctcccctcgaggataattctgcgaaccggtcagaaaggtggacctaccgcatatgcacaaacatgtgcgggggggctggtaatatccaccacaattctagatgaggccgtgtcccgcggtgcaagtaggcttggctccggcttcagcggcttgcaagggcgtatacgggtccgctcgtgtacgctaaatgggatcgcattggcatgtgcaaggtacatgccaccgcttatagggacagattgctgagtcccagttcacggaattgaacttcttccccgagaccggttgcaagtctcaaagggtcaaggttacgtgcgccttgtgtcccctcctaatcgcactactgcaaccctcatacggttgtgggagctcgaactggcacccacggtggtggaccggcattaagttggttcgagcaagtccggtcccagacgtgtgtggtatccacacgggtgtagcaaacacctaaacagtgccgcggaccgtgaaaccgaggacaacacgggttggcaacaccagccgccctggcagagggtagaaactctgctgtcacgcatctgacgatcacttcagtgatgccggtaagctaaggccgtaagccagccgttactccaagcccacaattcgcgtttgtgggtcataacgtgaggaggtcgcggaggcggttataactcaaccacccccccaacacaacaatc

SEQ ID NO: 2918 - DNA, 746 bp, Rajidapivirus A
  source 1..746: mol_type = genomic DNA
tccgttataggattatttggacctctatattgattgacgagaggttaaacaatgtgcgtttgcttcatgatttattatgttgtgatcgttggtcttcttaacacattgatgtcaatcacccttttactttactttgtaactaagtttcatacatttctttgaaattctcatttacaatattgtcgagctgattcacatgtttcatttacttttactacaaatctaaatgttccacaatcatattttgtttattcataatcaaggttgtaagtattatgcagggcaacccacgcagtcaattggtcactcatgaagtggctgtggattaacgcctgaatgtatttgcttattaatatcttgttttacgaatagataaattatgtggtctttttaaactacccttgttgttaattgggtcgaatcatcgcacacataatgctattttagacaaacgttgttcgcgagtatgcacggtattggaccattattgcttgtcattagcaccattggtaacaatgatgacaatccccggttttcacttaagacagctccgcgcttcgtgctgtgtttgagccttgagtgttgacgtctgggatgggtggttgtgctccactttatctagactgtgtatataagttagcaagctgttgctttcttagcattatgtggtgggcccgaccacaaagggcggtgggatgtgccaccgtaaataatcatatcaaaaccctttattttaatatgtagac

SEQ ID NO: 2919 - DNA, 748 bp, unidentified
  source 1..748: mol_type = unassigned DNA; note = unclassified RNA viruses ShiM-2016 sequence
catggtagtacccatgcagcgaatctacgtaaagtgtaattaactgacacacagtgcccatcttttgcacactgtctcttagtttttacatgtagttttaatcaaagtacaatttctattagtttcttctactatccttttagttttagatcaaaaccctaaaaactattataattttaaaatccaaaaatattctagttttaagtgttgagctctaattgtgatacttaaatggaaattgattgcgttggtgatgattttgatgacggatgtacctctattaggatcaagtatggcgacatactccttttggcacgggaaccctgagaatgactctagacaatattaatagaagtttttgttgatctcttatctcacctctagcgaggttaaagttagtaacacggttttatgatgtgaagctcttctttctcttttctcatctacgagattcttttattttacttcacattatttatcgtagttacggcaatacgttacttctccgggtgttatggcgtccggtaagttaggtatatgtccacgtagtaatgcgtggagtccgccttgtattctgactgtggtgagtataaggtgcctaatgtggagactaaagcttattgcaactccaatccacggagcactttacttaacgtatcgtctgttgctacataacttgatacttcacgtgtagtaataaatttcttgaaagtatcgccccttttctttcttatatggtgacaattat

SEQ ID NO: 2920 - DNA, 752 bp, unidentified
  source 1..752: mol_type = unassigned DNA; note = unclassified Hypovirus sequence
gctggctagaattttaaaagaaaacttgcgtaggtatgaccgcccaccatcgcgttagcaacgtaagcggcacgctccttccttggaaaagaaggattctaagcgtccagagctggcacctaaggaggtgggcagtcggaattcggtgtgtcccggaactgacccttgggcaaggcgtgagcttcactggacctgtagacgccccggtgtctccatctctagacgaattttcctgacttaaagtcaactgtatgctacccgagatgttggaaggggaagctagaaccggggactcccggcatgttgtatacgctgaaaccgtaacgggttggggccgtccgcgcctttagctgttaacacaacatgttgggtttgccaaccgtaatgggaaggcagcctagcgggcctttaggggcgatgctttggtcctcccgggtgatgaactgtcttctgattggctgcgaaagctgtaccacagatgttcaggggattcatcgggggttaaataccggattcttccttctctcgtttcgggctgaaaccccgcagggaatgctttatggactttcaagaaaagtaccaccgtgatggaccggagatccaggttaccagatgtggcagagcttcctaaaagcggcgcccacgcccagagtacaacgactattacacgtataactcgacggtgctctcagtaaagacgggacactaggcattgaattcaagatttccgacttcccaattctcccttcgcc

SEQ ID NO: 2921 - DNA, 761 bp, unidentified
  source 1..761: mol_type = unassigned DNA; note = unclassified RNA viruses ShiM-2016 sequence
cttctcacgctaaacgtatgattcttttgactttggaaacccatcctggtacccgcagtgctatgctgttcagtcattacatgccaaccatgcactgctgcactttgatgcagatgcccatggttgagatgcaattgatcaaagcagatgcccactgatgatattcagtcgtgtttccatcgtactcacgagttatcctggtgcccacaacattatgttattcagtcctcttgtgccaactatgctatgttgcacggagatgcaaatgcccatagttgagacattaggatcaaaataaatgcgtgttggtgacattcagtcaacaatctcacattctcaaaaatttcacaaatcacaaataattgctggtatcaataaatttgacactggtgcgttataatctaagtatgacttctggattccgaatgaaggcctaaaacctgatgtgcttgaaggaagtctagacataaaccggcgtagattcggcttgtgttggctgcacgagtaacgattacaaaggtgtaaggtcaaatacttattttatagtgtcatcttttgacaatttattggtaatttgcggtagtgagctaagtatggtccagcaaagccatcttagtttgaaacagatctaccatatattaaactaattcctatggaatcttgtatggatattggcgaaaacccgatacacgtagtagacggctagtagtcaagtaaatcaactccggtcgatagttatccattgatttgggtagcggtcc

SEQ ID NO: 2922 - DNA, 761 bp, unidentified
  source 1..761: mol_type = unassigned DNA; note = unclassified Riboviria sequence
agcatacatgctatacccaaattttaacatcttttcttatttattctagaacaacccgtgagacggctaacccccgttgatcggcatccctagaatttagtacataggggatgaccccctatggaaccccaagggaaccctacccttacccaacgcacctggtcctcatgcgtttaatgatgttggcaccgcaaccttgcggccttgctggtatcaatggacccctaccacctaacccactcacttgacacatgtggttcgcccacgaaaccccctttgtgtggctagcgccatctgagaggagtgcggaactcccccacggtaacgtggcccgcactggcctaaagcctagtgtgcaaggacacatgctggtcggttgtacccacggcctgcctaccatgtgtcctgaagctcaccgctcagacctcgatcccggagacacactggggctagtactgtgcgcgccgcctggaccaccaagtccttgggcagtgcgtaggactgccagccttagtagacccccagcaggtacccccttggatctgagctgggccctgtgactataccgttccggtaatgcagggttagaaaaatgaacgggttggcaccacttctcttctctttttcacctttttaatgcagacatcaatggttgtattggtttttgcaatcttcaccttggctgtgatattcattgctatctgcaatctcttgtgcattatcctctggtgtgggttttgtgctgaacctccgctttcact

SEQ ID NO: 2923 - DNA, 764 bp, unidentified
  source 1..764: mol_type = unassigned DNA; note = unclassified dsRNA viruses sequence
tttggaatgctgcgctagctgcgactgcccgtgagcattccatcatcattttctctcgggtacttcagctctttgaagaacctgttaaggcagccgttacagacacgttggcccgtaggagctttaaattgaggggccgaatcttttatgcattctctgaaatttgtgcagagtgggacctggctactgctcctaatttagccacgcatgagaatgagaaagtggtgaaagccattttaacctatatctttattcaccccactcctatccaggtatatgaatatataccacgcttggccgtgaatcactcaggactgtcatctaattttaaacttagttatacgagaaaagccattgaacaggtaaattctcacacacacacacaggtgggcaaatattcttattataccaacgattcgggcgtattgtccagctgcgcgactcgagtttttaccttactcggtattcaatgggagcactcgatctatgatgctgttgatcctgctaagtttggggtgatagctgatacttttaacaaatatattcgtagcagctggcatccaaagttgcaaatcctaacatattcatattgctacgatggggaagtaccaccgtttgaagggtgggagcaaggtgacaaagaacttttattatttgtgtataatgatcatgtagcctatgctttgcggcaggacatatgcgccaaattacaaaagttggatagtgatctacgcacatacaagtctagacttgctattaaagag

SEQ ID NO: 2924 - DNA, 767 bp, unidentified
  source 1..767: mol_type = unassigned DNA; note = unclassified RNA viruses ShiM-2016 sequence
cctgcagctcttatcgatgttgattacttggtgtattcacccaatgtattttgaatattcagaatctagcggtgtacgtcaccgctttattttggtataatattcaagatcattgttatagtagttttcgttgatttgaacttattttacctccttatatttctgattgaggagatctttagtcaagatttatcaaaacgaaaccttatttgtcttgtgcattcaggtacaccccctgatgcgtattcatttttgtatattattgaacatattttatattttatatattgcgtatccgacgatcttcggtttacatatatagtaaaatcacaacgacggtatctactgagactgtctttgtatgacagtgtctctttaggagtccgtgtctagaatttgttctaggaaattcctcgttaatttgttacgaggtcttctgtttttagatgatttttaatttggatggatcacctcttcctatcttgtgatggttcactgtcctgaattcttacaataactctatgagtactattggttttcattatggatataactacagaacttgagaagtcgaggtttgtcacgcagaccaactgtaagtcgtgtgtgaaatctgatgatttttgattcttttaatggaaaagtgaagcgttacagtgttgttatgatacttggaccctgagaagtccacatacagctgaacgtgtataatgctcgttacggagcatggagagatccagtgaagtaactattcggttggctccggt

SEQ ID NO: 2925 - DNA, 768 bp, unidentified
  source 1..768: mol_type = unassigned DNA; note = unclassified Picornavirales sequence
cggagtgatcttttaataatatagctaggtatgcttatactaccgaacagtaaggtactactttacaggcttttaatagtgcgtattaacacgtcgctactatttcataataatatgtgttacacaggtttagtgtagataaactttttatagtgcgttctagattatcgctactatatcatatgaaaatctatttagttgattggacgtaatttattttaacaatcctatttttagttttagttttaactatatatttattttattttattctacaactcgtttgtagatgtcgacaataattcattaatggctgcgtttcctttcagtttaagcatgtaataaagtagtgacagtgatttacatgatactttgggttatgttcccctcttttcggattaagtcaaaacacgttttgcgactctgccgtgtaagcagaagcccactgattttctaaattttcttttgattaatcacatacaaattttatacaaacatgtcgactcgtgtatatcacctgtctgttaacctctatgatcttgcctatatttctagcgtctatgaccacttaattgtgagcgatataggtatttttgattatgttagccttatttgtataatagctgttgagtttaaactttagtggagtatcccctaacgttctgaggattctttaaagtgaaggccgttcgcttttatgcgcgctatatgtggtagtaccaacttagtgttaaataacggaggtccacatgggagaacgaacaatca

SEQ ID NO: 2926 - DNA, 770 bp, unidentified
  source 1..770: mol_type = unassigned DNA; note = Trichosanthes kirilowii marnavirus strain pt111-mar-9, complete1 sequence
agacaataacacatgcgtgcggaactaccgcacgcatgtattattggcgaccttggaaggtcggccaaatttggagtctgtgactccctctttgtttaaatgttagaattgaacctgatttgtttaccccgagacctcacttgttcaagtttacatttgggcattcttgggattacacttcggcagcctttctagacatcactttacactgaggcaatagctagctccatcttttctaaatccgatgatggtaaaccatcacccatttatatgtatagtagcgtgtgcccttaagcaaggcaagtcaaagtttactggttatctttaaaacctttattaggactatttcgtcgttgacgcttgcagtaaatcgagtacgcttcggcggtaaatccgtacatctgtcaagatagttcctgttgtaggagacaaaagctacaaacaaactctagaaaaatcttcaaacacaataagctcctataacgaaagcttaggtcaaatattaagcctttccccaaccctactagcaatccacgcaaacacctctccgctcctattggacgacgtgaaaagttaagtggtggtaaggtacagctgcagttgcagccgaggcctgcctggcaaggtaataaggattggcccaattgtggcctatgtccggtactccggtagacttcctggtttgttgaattaaaaccaggtgcggcaatctaggggccaaagaaaacaacctatttcagaaacagagacaaccacaaacgacaacgcaa

SEQ ID NO: 2927 - DNA, 781 bp, unidentified
  source 1..781: mol_type = unassigned DNA; note = unclassified Ampelovirus sequence
gcgagtgtcatttttaaatatttttatttggtttaagccgatgtgtagctatttttagagccaatactttattcgtttctttgcgtaattgcctgatttgttacaatgcgcaattttgtttagcgtattgtcattttttgattctttattgcttgtaccgtcatgtgaatattagttgagcttggttttcgggttttaggttgtttctaattaatgttcgttttgttttgtacagcttcatacagaccctccgattatatcgcttgcaaggcggttagtgcggggacacggggggggtcttagtggtgatgttggcctgacacagtaggtctcctcacagcatcacacttttggttgggagaggagtttgcgagtgaggcgcatctcctttgtatatatacgcgttatattgttgttttaattatagcgttggtattactattataacatattctcagggttttttagtttatgttagtttataattaggttttcttacagttaatataattctattttttcacgattaggtattggctctatcttgcgtagagtggtagtattgtatattatcgattgtagattgtcagtaacacgagatgatatgagtgtatacattaacagatgttagacgctttcacagccataactatcatagcctctttaatcttagcttttctttttctgttgatactatttatagtggtactagtgtataattattattctagaatgcacagttcgatgcgatcgtatggagcggcgtaagtagtcacgacgt

SEQ ID NO: 2928 - DNA, 787 bp, unidentified
  source 1..787: mol_type = unassigned DNA; note = unclassified Aquaparamyxovirus sequence
accgacctaggatagtccctccactggagacctcaacacacataatccgtcaagcatcacaccgaggaggtctccaggaacacccagactatatgaacagctgatccacatgtctcgttctctgctctgtcacattttcttataaataaaatatatctactgtagttctatacttgaattatttagcaacaactatctcatcagaggcttattcttagcgggtctagatatttgtgtgtttattggaaattgggtcagggttttagtagaacactcgcgaaaagcctctgagagcctatctctaaaagaacgtggaacaaagccagcaatctccagaaggcacacgtgcaatgtccattccaagcttgtaattgctcaggaatcgtaaagcatacatgaatcagtccatgagtgtcaggacatcaggtgatctctgtgttgatatatctgtcggttgtacttaaattggtgaccttcaacgaacacttaaagacccggatatttagtgactttgcacattcactaacgggtaactcaagccagtatataaaggtcttactggaaaatagttgtatgataactcgcacttatcatgtattgtctaaagccgttatagattacgaaattatttcggatatgtttgttagttttttgtctttatagattgagatatcgttgcatctcgtttatgtcacttgtcaatggattaaagaaaacttaggatcaaagcaattgatatctactctagttgataccgactactttgatctttttcccatattagcaa

SEQ ID NO: 2929 - DNA, 804 bp, unidentified
  source 1..804: mol_type = unassigned DNA; note = unclassified RNA viruses ShiM-2016 sequence
gcgtagaattcctctacggaattctacgcatgtgatacgattttatcggtcatccctgcaaagggtttatttctagtcatgatataattcatgatattgcgccgctttgtgtgttgaaccaaattggcgctcccaatttgcttctatttcacatgaaccgccgtaggtatctatgagttatattatgcaaaattcggccaggcccgatccacctggccgtcttatatacggatcaccccctatttgttatttgttcactgtatgtgttataaaactaaacaatagtggtgttggattatatccattattttaaatcataaaaatgtgtgttgtatatcatcattatatattcgatttggcacatctttttaccatttctttgattgattatttgttagttgagtaatttccaagggccccctcttcggaaagacgcttaatgagcatacgaattctacaattgagaatcgtttgaagttgtttgattaactgatcgactagctcttgcttttccctctaggacctgacgacctcctattgggaactgtaagatactcgcaatactttttcatgggtatgtgtgagtttttgatgatcctgtattttgtggctctatctagagtcaaccccctgaccccagttatgtgagtcaacttaaaatgacaaactccataacatttcttatgtaagcctaagttggcaattagtgaaataatctttttcgcttggtagaatttcacacacgacaagtttgtctactaaagcaaacaatactgatcagcttgcagatcataatcccgatca

SEQ ID NO: 2930 - DNA, 805 bp, unidentified
  source 1..805: mol_type = unassigned DNA; note = unclassified Totiviridae sequence
tctcggcagctcggtttataccgcccgccggggcccctcgtaagaggggtgacagggacacgatatgtgtagcgggactcgttcgcgggtctcagaggatcggtgatctgatttcccctttccttctcgaggtttcaagacgcacaatacctcgatgcgatacgtcataaccttggcggttgttcctttctgacagccggggcataatttgacgtgttaaggccgcaagcgttgttccgggcttttggctgtatctttggatcggtactgatacaggtgatgagctcgttaaccagataggaggtgggttcacgtgaatgcgtgtgtccacgcctaggctggcaagtggcaatttatttacagtgatctagtcgtctaagtggtgataatcctccctaacccacacctcggagcgagctgaaattagacgagtagagcatatgtttaggatacaggcgacgggctacccgcccggcaaggaaatctcttcggagaggcccgccttgtagaggtatagttacgggcccgagcgattccgacgaagtcgcgcttggctgcctcccatgccttctcatcctcaggctataacggtaaagatcacccgttgttgttaagtgataccgataaaagagcgacggtacgcgtatctgaggaatcatagtcgaatgtaccccgcgtgaaactatgtcgttcgaggtccgaacatatgtaaagctcgttttctagaagttcgtgtctatggttaggttagtagttaggttagttggtcgcctcacccgttagttggggcaatctcccaaaaatc

SEQ ID NO: 2931 - DNA, 827 bp, unidentified
  source 1..827: mol_type = unassigned DNA; note = unclassified ssRNA positive-strand viruses sequence
aaaatgcgaggcatgggttaccttcccatgccccctccattttaaacaacattatttcaacattttgtgttttatcagactcagtttattgcgttactaattagttttgcgtttatctgcccccgtggtttagcactttatgtgtaaagactcttgattctaaccttgccgtatggtgccctaacgggttcatttaatcatgcgatgagggttgctataccgcatccattctaaggcgattcaatgcttcatttaggaattttgttgacgattaaaaggtacccccacaaaaacaaaaccaatcttacttgattttcgttttaactgaccactgcgatcccaaattttcgccttcttatcaaagtatgttgtgttctttgggtgtacaacctgagaacttgtctacaactacatattactcgaggaagaaattcggtttaagccgtgccttctcacgtttagtatatctatctagacacaccttcttcatcttctaatccccatctagtctcctgatcagagacgtcgttattaacaaataaccccccttgttaataagagacaaagtacaatcaagctaagttctcttggagttcctgtaggaacttagccattgtgatagagtcataagtctatgtgcatagacagctctagctcaccatttccttcccaacccatcttttcatcagcttaactctatgaatccgatgcaaaaaccattctaacatcttatggtgctttccaagccaaatgagagctcactcttttgagccgctatttaatggacaataaacgttttatagtgtacatcatattgtaaaaacaaa

SEQ ID NO: 2932 - DNA, 828 bp, unidentified
  source 1..828: mol_type = unassigned DNA; note = unclassified RNA viruses ShiM-2016 sequence
catatgcggagttctgattttagttgtcatatatagtttgggtaaaaacccggtagtagctattacgatggctattacatggtttttgcttaaccgactgtatatgggtactaatgacgagttcccataagtttacatttttatacatacgtcaatcccacgacacgggatagaattttcgaattcttgttaaaacggcttaattggctgtattgttcatctacagtggataaacgacccagcgaccctacaatttcggttcgtcttcgatatagactgataaaaatattttagtaattttaagacaaaattactgcaacgcacacatgtggttgcggcgcactgcgccatttgatatagaccattagcctcaggtctagaaaatgagggccatgtcaccggcaaggagatattctatggggtagcatagcccatagtcttaaacccgtgctttgattttagatcacaactacaggcaataaaggacatatacagttgcctgtacccacgacggcgtagaatagtgaaaatgcctaagtaactattcgtaggagcgtaatgaacttgaggttgatgtgataggtgtgattggttagaatcacattgtaagcacacgtacctcccgtccgaagccatgccaaattgagtatggtggaaaagtgggacaacaaggcgtcaacaacaaaaccaaagatttctctttggcttgttgttgactctttgttgtgtttgtggtctgcgaaatttagctgaataatagtaggttattaaagtagcagacctttacaaatacaacaagagtcaataacagccataaagtacagcgta

SEQ ID NO: 2933 - DNA, 833 bp, unidentified
  source 1..833: mol_type = unassigned DNA; note = unclassified RNA viruses ShiM-2016 sequence
agagaaccatggaacatcccgttccatggctctcccttgctgattgtagtgtgtcgttttaccgcgacacccggctacatcacatatattcatctaagcttaattgctccttttataaacagacacaagaactgataaacaggggcaacccccttgtttactgcgtcttaccctgtaacaggagaccgtacaggcaactatttgttggctgtacgaacctagcatttgaattatatgatatttagtcaccataccggattaaaaacccgttataagtgacaagcgcttgagtgtagatagttgtggctactatttactatacttttgcccttgcccaagagagtcaactctttttcaaatcaagccccttctggcacatttgtgtttaggatatgcggaacgtatcccgaatcactatgtgtcataaactattgctccgattaagatgtcaagtatattaatcgcataattaagcagtgtttggttttgttagcagaagaatcccccctactagagaatgatttcgttttaacgactgtgcctccgcagaggactcgcacagatctagatctaacaactcttttaggaagaattggtcttttggtacattttggatgctgatatacgcatcacaaactatactgtcgcaatataactctttataagtatgtttacttcctgacaacctgagggaagaggtttggacacctaaattttccataccgctgtactgagtttgaggttttgctatgattatttatttgatggactttttggactatagttttggttttgtttagcctgttgaggttagttctacgcctactaaaatt

SEQ ID NO: 2934 - DNA, 838 bp, Phyllomonavirus gysingense
  source 1..838: mol_type = genomic DNA
gataagaacgttatctttttccttctttgacaattttcttaagtttgaacaatcactattaaaaacttgaacaatgagaaaagacactcctctaagtttacctctctttaagatcttcattatcattatccactaaccaaccattagttggaaagtcacaaggtgatatccttgatgtgtcgtaggtgtgtattgttagcctcattcactccgcattatcacagaattgtattaatattagctaaattgttcttgggtcatcaattgtcctgtctgaactgtttaactctagtcgtccatatcctagaagttacaactcgatcctattattcatccttatctcaatatttctttgtggtgtccgcgtggagtcttatattggagcatttattgtcgaatccaatttccttacagcttctagacaatcttgatctctttcttcttgtatccgatttggctcaccatttgctagtcaaacatgcttgtgctgggattggtatcgctctacgtatacaataaaattacaaggatgaccatgtttgaagtttttgaaggatcagaagttgatgaattattacgtcttaaaatagagcaagggaagcttgaccatcatgatcagattatggaagaaccaagtgttactcttgaagattacctccgttccagactgttactaccattccgtgtggaaaatgatattgttactgtagtcaatgatagaaaactcagattattccatcacattcagacaaatccgatttctgaaattgaactaactgccttagaactcttgcaatttttctctactctttaatgagaaaagccatcattttaaagt

SEQ ID NO: 2935 - DNA, 838 bp, unidentified
  source 1..838: mol_type = unassigned DNA; note = unclassified RNA viruses ShiM-2016 sequence
ctgggggccaaccccaggaggatctcacctttagaagtgcgcgaagcgctgtaacggcgttagtgaaccttgaggataatttctatttgtcaaacctaatcattggagtgtgacggagccttaggccactagtccctctttggagcggcgacctggtcttgaagtcctcacctttgactcaatacagtgccttaggccactagtctcctacgtgttgcgactcactgtgacggtgttagtgactgtagacggcaacctggtcttgaagtctggagaagttaatccaacatagttcaacggaagaaggtgtgatgtgtcttttaaacccctattgtatattaacgtgttacaaagtaataatgtgatgtataaaaagctcttcaaaatggacacctggtccaccaaaaatatacgtgtaatctatctatgttttcttttcttgtttccgaaattccagttagtgctacaccttagacctaatctatcaagtcggagtcggaagtaacgtgtttagtacagatttctggaacgaccgaagtcgactaattctagtccggatttccgcctacacgaaagtggtggttggatacgggaaacaaagtaagcctttagcgaaagcgacgaaagtcggcctctgctctagaattgtcggagttactgagacgtgtagtattttctggtcataccctatgggactaagaggcaggtgtccccggtttcaaggctaccgaaaaagtccttttgataaaactccccaaagtgatgaaatattttaactcgaatgttttcttctcgcacatgatgtgactttgttaatattgaacgaataactgacaaa

SEQ ID NO: 2936 - DNA, 839 bp, unidentified
  source 1..839: mol_type = unassigned DNA; note = unclassified RNA viruses ShiM-2016 sequence
gggtgttttcacccacacacttttaattagggacttattagcaaacctctcatttcgctccttttcgctatatgccattacgagccatttcatgttaattgcttttattttcttgattgattgtgtaatcacatcttatttatacccattgactccctttctttgtcaatttctctttctcatacttcatttgtacatagttatgcttatatagaggtgttctactccgacctttctatgtacccttcttctagtttagtatttctagtcagaaaaataccttatataccgttccctgtatctcttgggaatttctacctgtatatttttccgttttaaggcttaggctttatatacagtgtatttctttcttcttcctaattgtatattttctccgttttatgtttcgtttgtctccgcacgagatgtttagctatgggattttccgaattaacgttgtgaagagcgtggtggtttttaccgaccatttcacgtttcatttcgacttggattttctctacggcgactattgtgttatatgtattttcctgtttgtatgaatgctatgtttttgtttgtattatgtttctctgtttgtaatttcaatttctagacaatcactttttgtttcattgtgtactttagcggttttctgcccgccatttgaatttagacgatataagttagtaagattttgtcacaaatgctttattcccgcgtgttatcgcttcttagccccgtgacttaaaaactgctttcttcagtctttgttcttatgtgaagctattgtatgtgtgttaactggataattttgctagcccagttttcatacatacgag

SEQ ID NO: 2937 - DNA, 850 bp, unidentified
  source 1..850: mol_type = unassigned DNA; note = unclassified Riboviria sequence
gaataaagcagttgatgccccctctcagtatgagggagggtgtgcccccccggtaaaacggggaagaggatctgccgtccagcagactctggaattaaacatcgatgagatgaagcccaaacttgaaggccccaacaacagcgtagtgttggtggttagcaaggatgtaggcggtcaaatcgattttctagagccgactggtttcgcgggtcttaagcagaagcttagtgattggtcatcacaacgagtggaagcaaaacatgatgatgggttagtaaccatcatctcaagtgcccttcacaatgcgccacgcgctttcgtgggattgtgggggttgaaggatgaagtgacaagtgatagtgtcattcaatcgatcgtggacggagaagtcatggtcacgcacttggaggagaaagatgaggaatctcctaacactactaagaaggtcaaatccgttgacctttgcggagacggcgtaattgtcgttagaaccaacacccacaagcgtacgaacaaacgcacagggttccgcattccagtgctagctggagacgtcgctgccaaccttaaaggtcggcacggattcctggaatacaatccagacaacgtaaagttgatccgtgctgatgctgcgcgaaaggttgaagcatggcgcaaggaaggagatgcggaatggttaaacttgagaggagttgaagccacccgaatcatcatgcatgcggctaacatgtactggcttttgtctcaagatgaggcagatgtccaggaaatgtacaacacaagccacatgcgtgcctcgcgcgccgcccggtccaagatggccggtgcggcccctagatgctagggccgc

SEQ ID NO: 2938 - DNA, 853 bp, unidentified
  source 1..853: mol_type = unassigned DNA; note = unclassified RNA viruses ShiM-2016 sequence
gtgtgcaatatgcgtaacaccgcatattgcacacattaaaagttatatcatacgtttaaattcgataaacctcaatttacatgtgttctttggtaaattgatgcacattttaaagtattatagaatcatagtttatatgatctgaaatatcaaaataatttgtaatcctcacagattcttttattatgatacatgtaagaacaaatatgtatgtacttctagatattttaatctacacaactttacacatttataggatggatatcctttaaatatccaaaacaaatatacacatataaacacgcacactcattcatgctaacttaacttgttagcaatcatagtcgttacacattatatgtataaatatttgatttatgcacatcagaattggtttttactaggttcgattcctagctgatgttttaaagttaaaatttttatactacatcacatctcatgctgtattttaaagttcacaattcacatattcatctttattttggattgtttaacaaaattccgatttttaccagatagttttacggaaattaaaattagcaatcataccgtccttgattgttatttaaaataaaactactgactgctcaagcttcgagcgtccataaggagatcatgaaaactgttgaagtaattcatataaatttaagtagaagatcccgactgtgtatggtggtaaagatcacccatcatatatggtaggaaaattacctactttatttgtacggacagaaaagacagcgcagggtgatgcctgatagtgattggaggccgatgattataagccttctcgaaagagagtaaattatggatataattggacaaaataccc

SEQ ID NO: 2939 - DNA, 856 bp, unidentified
  source 1..856: mol_type = unassigned DNA; note = unclassified RNA viruses ShiM-2016 sequence
tgtatgggtatttacccatatagagtctcctacttgttggcatttcgttgtctgtttgaccgcagactcggctttcttgtcaacctattcagtcttctgagaatgttgagcttcatgcgaattttcttagaagattcgcatgctagatttcgcagctcctagacgcgttgattaatacgtctagagacacattttgagtagtattcatacatcctaggtcaccacaaaatctttgtttttgatacgttagcatattaggatgttatgctgtattttaaaaacagagtgcgcacctggcgtttccaggtccactttcaccgcgtggtcacattaaccgcgggaaccaccttatttggtgtggcattatacgccctcgagagtattttgctttattgattaattcaattacaatatcaaatcgcattaagcgatccgagcactcaagtttaaaaaggaacccagagcgccttgagacattaatattttagaacctccttttggagtggcttagcacgctaaaccgtaacggttgtaggccccaacatcaagcatatatcattttctcttgataaattacacagtgggttaaattcccagctggaagaaatgatatttagaattttgtgaggcaagcctcccgagcacattacgttacgtcctaagtaaaagtattatgagaattagccttcgaacgtcgtacaaactataagctacgatatttgaaattgttttaaatctttaactgcaattattctttgtaaattcaaaatgaacatacttgattaaaattgttctgaagctgtacccagcagcactaccagcctgaaggtagtgtgttattataaggcaccttttc

SEQ ID NO: 2940 - DNA, 858 bp, unidentified
  source 1..858: mol_type = unassigned DNA; note = unclassified Picornavirales sequence
tggccactttagcagcactccttgctggtggttttggcagcgatatactcggctcgtatatcaaaggccaaattcagctcaacaatgcagagagtctcgagcagttcaaacaacagacgatgacaaatgctggaatcaatcccatgttggctgcgatgcaagctgctggcagcggcggatcagtgatgtccgaccagatgaccagtggcatgctctccaacatgtccagcgcagtgatgttgggaggtgtaacaacaaaaggaatcctcccgtggatgcaaggtggtcagcttggtacacctacatctgtgacagccaattatggagggatgcgtgtgacagcttcaggaagtccctcctctggcacctcttcatcgaaccccctaggggcttacagttcgatgcctcctcccagtcgaccaacttctgggaatacttatttcaacaacccatccaatacgacgaatgtcagtggcaattcagttgccttcgttccatcaagtgcaggaaccgcagctaatgaaagtgctgcacttgtcactggcaatccccaaccgtctatgacaaattctgagtttcagactgcgaacccatataacagcgctttgacgtcgtggggttctgaaatggatgttcgaaatcctggcggcctcgacacctctgctgtcggagccagtgatccatccacaaccgacgtcatgtccagtgatgacgcagtcgcggcttctggatcgggtttagtttctgccattggctaaactacgttttctagaaactgcgtttggcgacgtagttttctcaatacgatattgagcgtttcttagtgataccagaaaaaacaagaaaaacacaaaaaac

SEQ ID NO: 2941 - DNA, 860 bp, unidentified
  source 1..860: mol_type = unassigned DNA; note = unclassified RNA viruses ShiM-2016 sequence
tgagccccggggggtcatcccccccggactccgttcacttaagtgtgggcttgccgaagcagggactcttttcaccgtctgtaaaaagacaaattttagtttgtaaggaccttagttttaagaccgaggccgtaatctcactggataatcgtagtatatggatcaacttaggattgagatgaatataaaataaatgaagttggacagtgtctctatattaatatagctgtagccaacggacttgcttatatgattgccaattctttgccatagcagtattaaacctgcacagattattatcagtattatctagacttagtttgcggattcgacacccgtgtggcgacggctctaggtatacgtaaacgcccatagtcagtaatacggctattcctttaaggacatgcactgtatcaagaaaggaccagtgtcaagtgtgatatatatcccaacgaccaaacccccacgatacacaccccaatgtgcaaaattgtattactagctgcttatgctaattttcccaaataagctattttctacttatataaagtagatcgttgttagagaactaactaggatcttagtatgtagatgggatgatacgggaacgctgtatttcaaaggcatgtattttggtacatagtccgtattccttgaatctatttacgctaatttctgaaaagaggacctgtctctataaccagtagtacctacagtgccttacgggttaccactatgaggacagagggatttgacccgcagtgtggtaatattgggcgtagtcacgagagtcacttggcttcatatcgtgcttaattccgttaaacggtcgccctcttagatatttaaaaccatatacc

SEQ ID NO: 2942 - DNA, 865 bp, unidentified
  source 1..865: mol_type = unassigned DNA; note = unclassified Luteovirus sequence
acgtcattcccgactttatctcttgctgtgatgttgtccaggtggacactggtgaaaagctcccttctaagaaagataaagaagggaatgaattgccgcctgagcctaagcttaaaatgtttagaagggtgaagcctgagcatgttggtgatgccaggaaatacatctgtcaacatattcgcaataataatatgaggttgatagacggctctgatgtttctcatgcaaccatcaaccgatatgcgctcaagttttgcgaagacttggagcttgatatgaccagcactgaaatgctcatcaaatatgctatggtcatggtcccactccctcgaaaatctgatattgaggctgctaaaatcgtccaatctcctgctgccaggcaaataaggcatgagttgggcgtgcttaacgccgaggttttttagaggggctctgctccgactctggttttgaatccccgttttctattttggggttgccagagatcgtggtgcgaagtggggctatccctaggaagagtcgtagtactattaattatttgagtcagtttagtttaggtctagattaccaatgccctaatcccagtttgcacaacgcattggtggcggttgaacgtagagtgttcaccgttgggaaaggaaatgaggtagtgctaccttacaagaacataccaggaatcttctctaatcttgattatttccgcaaatctattgtggataaggttggttgccccaggacgttctcccctgaagaacttgcagcgacgtatcactctggtaagagaacgttgtataatgctgctgttcaaagtcttaaacgtaaggctgttgagaggagtgacgcgaatgtgacagctttccttaag

SEQ ID NO: 2943 - DNA, 870 bp, unidentified
  source 1..870: mol_type = unassigned DNA; note = unclassified RNA viruses ShiM-2016 sequence
atctcatagggtgaacccctatgcacattttgaaatagtttcaacttatgttggatttgtttgacttagtaatgaatttgtcaaatttaaaaggtcggaagcatgaaatttattggcgtatataattatataattgattggcgttttatagaattcgtagctatatcactgatttcaattatactttgtatacaggaactctcagtggttggttaactgagctgcggcgatactaaattgatgatattttgattactgattgttgtaaatatttccaatgtaaggctttatatttcaatgactcctggaaagacaggtatggtttgaaaaccaattttaggtttaagatacttagcgttgctggaagtgagtactattagtgaagtactggacttttagatgcttattgagatatattagaatatgtactagtacctctatctgatattttcaacacataagttctctctaagaaaggtatggatcttcctcatggaaaccaaggctaaactgttaaagtcagtctgtactgaggtacagaagatctagtcccgtttatggttagcatatacatatgatgccgctttgtaacccaaatgcgtgcgcgtgattactgtatatgtccggaagcggaaaacacactctagatgattctcgtctggtgaagtacgtacgtctgatcatcctatgagcatgagctatctggcaatagcgtaatggtgcctcctaagtgctactttgtgggagtgaatctcaatgtcccgtaaaacggatacagtgaaactacacatcgacaataggcattgcggtacggagtataccttgagatccgcgtcggagcggtcttcagtgtgactttcattttattcc

SEQ ID NO: 2944 - DNA, 877 bp, unidentified
  source 1..877: mol_type = unassigned DNA; note = unclassified Picornavirales sequence
tcctgcaaacgcggggggcaaccacccaactgctacaccctgcacaaacaacaactaaccagcaaaagagcaaattaatcaacgccaagcatgtatgacagtctcgaggacgcgtaggggtggaaacccctacgcgccctcgagactgtcatacatgcttggctttgattaatttgctcttttgcttgttagtttttgtttttgcatggtctagaatttgactacttccccccctcttttgcactacgtgccactgtttttcaactttggttagttttgcatcccctttctccgggaacttgtttcccaccccctttttgttgttttggcggctatgttgtggcttttcaaccgcagtagcagtagacagaagaagttgagaaaacgtaagatttattagtaggacctccgaaagtaaacccctgcgcactactctgtgatgtccggacgagctatgtaaggagattcatctaaattatcgatttggacgtttagtctgccgataagcatttgtttttcccaacgtttgtaggtattcacaccccagacttctgaccgactgaattacggatttttctttttgaacaatggaattgacttgacgaagcttggctgctctttgttgtccagtgtggcatttgtaggtgtacttaagtgtatgtttacatttgtgtgatatcaaattcacagcgcaaagacaaggtttttcaaagcgtgcagtttcctaaaaactgatcacaaggtagactgggcatgcctctattattaggccaccataagtccttttagtatgcgtgtcacgacgtaccgtccatcgcgagcgaattccggagacacctcgtggatgatgtatgcaacttccggcccaaggtgaaag

SEQ ID NO: 2945 - DNA, 883 bp, unidentified
  source 1..883: mol_type = unassigned DNA; note = unclassified Picornavirales sequence
gtttacgtttcttttacctgcacgttcgcgtgtagggttttcttgcaaccactatggttcgccatagttggatgcgatccccgtcctcgccaaccgacgttaaactgttggtatatgtaacctccaatcccccctaacctaagttttaccagtttctcggtatctgtaagaaccgagcgcacaccacaagtggcgacaagacttgtggaggtttgtacactaaagtacacgtctcttatagattttatctagagatctataaatagatgtaaaatattatctagacccccaccacccctgtgccatggtgcaactggcctatgagtcggattcccttttgatccgtcagcacccattctaaagactgttagcatggtcattagtctgtgaactctcgcgaaagcgttagtgttttctagcgatgcattgattgcgcgtggattccccatctggtgacagatgccccgcggcccaaaaggctagtgtgtcacaacacaccgtcaatgtgccagaaaccccatctggcaacactaattgttagtaccgattggtaaccactaatcgtccattctggctgaacattctttgggatgagcatagaagtgagtagaccccctagcgctaccttcgggcgtgactagggccagttgactataccgctccggtaataactggttaaaacaatgaaagcttactatgcgaactgccctacccaaggtagctgtacccacggctatcctgaacgtcggcagcctttcctttttattctttaaaatgttttatggtgacaatattgtgttatttagtttgttaattttgtttcttttgccttttaatttaactattgttaagcaaaacccccttgtctaattaaactgaaacc

SEQ ID NO: 2946 - DNA, 886 bp, unidentified
  source 1..886: mol_type = unassigned DNA; note = unclassified Tombusviridae sequence
tcgtcaacgggaagagtgctgccgaggttgaatcgggcattgcaaagcactgggaaatcttcggcttccaatgtgttgtcgaacccaccgtccataccctagaacatattgagttttgccagatgaagccggttttcgatggtaaatcctacgttatgacacgtaatccgcatatttgtctttccaaggatgcatatagtatcggtccatttaacacgacactcggggctaggaaatgggggaaagctgtcggtgaatgtggtttagcattgaccggtggtcttcccatcatgcagagtttttacggcatgttggtacgtaacgcgggtgatgttgggggaaaggtttcacgtgatgttgcatttgctagcggctttgcagcattggctaagatggggaaacgggtgaagagtgatgtcagtgaggaagctaggttttctttctacctcgcattcgacattagcccggatactcaattagccgtagaacgcatgtatgatgacatggttcttaacatggaattcgtcccccagggatcaccagccattgattcagacttaacatggattctcaaacacctcaaacagtaaaccgcggtaggtcaaaggaaagagctcagggtaaagatgatagcaagggatctttgaagaggcgtgttgccactgatgcgatcgcagccggggagggttctgctttgggcactatggtcatacaagctgaaacggtcactatgaccattaatttcaacttctagacatgcagtgtacctgtgtagtgcccagggatagcctcctcgacactctcaaagcttatattgtacttctcatagctttcattctcttcttcatcacaatcctttcagctcaccaaacacaatacataaata

SEQ ID NO: 2947 - DNA, 889 bp, unidentified
  source 1..889: mol_type = unassigned DNA; note = unclassified RNA viruses ShiM-2016 sequence
acgggagcgagagctcccgtgctttgattgtctatacgtcgttcactgatactttgcgtgtgaaccacgtatcgttgaagtgttacttcttattggcgattaattacacaggatattaatcccgtgcattattggatctgtttagtctttacgacttcttttcgcaccagagagggcccacttacctctttggcaaacatttaggttggttttgtttacaagaccatattctaaatgaatactgctttgtttatcacactagaagaagaatccctcagattgctgttggattctactctagcataacttagcccccctccatgttttatgttttatgtcaccatgtcgaaggaggatgtacctcctgccggttgcgtaagaatgtaggctaccgaaactagtacatactaaactctcattccattaggggtgttagtatatgatttttaaaattgtctgtaaatagttatacccataaaaccaaataaaaattagtctagatcatttgtcaagtcagcaacttcttcactgagggtacagctatccctatatgggatgttgcgttaccgaaatcgaggagactggaggcgtcttattagagattaggagcccaccgcaacagctgattgattgaaatcttatttagagacccctgatgataactaatattaactgtattcgatgtcgcatgttttgcgtctagtagtaggttgtgataccttcaggttatagttattgtgccaggccacctgaatagacggattgattgaagcgccatgtgtagtgaacaccacaagcttgcatggtttgccgaggccacagtggagaggccaagcccacaacccgccgttatatgtgttatagaggtttttaaaatttagcaccaaaa

SEQ ID NO: 2948 - DNA, 890 bp, unidentified
  source 1..890: mol_type = unassigned DNA; note = unclassified Riboviria sequence
atggggaggaaaagagagatatagagttgtaccggccttcgggctggagggacactacatctctccggacctccaccttccagctgccggcctggggctggagagtgtattttgccgggcccccactgcctccggggagggggtgtaatcagtttcctcgggttgaaactataaaacgaggagggtgcgcccttgacagcgtgatggtgcatgggtacgcggcgtgattaaaactgagctatggtggttgtctagtcgtccaactgctgggtggatcgtcaaaagttcacgccccttctagacatcctaagtagtaggctacccgactcctctgtgagagggccgtgcaccaggtccgaagtggtcttccagaaggctttttgccgaggtaggtgaccggaccacaacgcctctattctctgttcctcctgcttcagggggagaagattaaatagaggcatccttcgcgccgcggattgctctgcgtgagcaaagcgcactgcgtcgcgggtagcttgcaactaccgaagccctagtgaagcaggtcctagggcaccttccgctaaagcctgtgagactaatggtagcaggggccttgcctatgaacctctacgctctcgggcggtatgtgacggtgagtgacctttgtggctggtggtcctttgcggctatgaacctctacaccttcgggtggtatgtgacgctgcgcacggggctattggcctgccaggtcgaatcctcctgtgtgatcacttgctccctgagtaagtgtgaagcgagtagggaaccagcatcgatggacgtaagctgggtgtggtgtggcttggtgccatgctgctaacgtagtctgcgtaggaggcctttatgcctatgaacctctacatcttcgg

SEQ ID NO: 2949 - DNA, 891 bp, unidentified
  source 1..891: mol_type = unassigned DNA; note = unclassified RNA viruses ShiM-2016 sequence
tgataggatttcctcacggaaatcctatcatatgctagattagcaaatttttgttattctggaagctcggaaaattctcattgtattagtgttctgggcaaatggactttgatcggtccataccagaacttaaattagtcatatgcggactaagctactactatgaaaatctacgcaaaattatttctgtagccctaacttcgggtgaataaatagaagtgttcgattgtcgaatcgaactaaaataaggcagacaacagataaaactgtttgtttaaaacttcagtcagcactgaaggatactcttatatttgagatcgaacatgctgatcaggttcttatattataaaacataaaaacattgggaaagttaattttgatcaacctctcgttcaagttaatgatcattatcacctctcgaaccccaatggcctgattttattttgtatatctgctctagcttgtggcagatcgtgtctacaacaagcttttatttctaaaaccatagaaaaagtataaaatgagccaaaaaaaaacacataaaaattttgtatattatgctcagaaagactctttttaatggaaatgattctagatgtgacgatggaaacctctcagctgtaaagtgctcagctcacgtttacctgacttaacatggtcaagatactgccgtagcccctcgatgggtagattcttttgagtcgcagatctatgatgtcatcggttcccatgccggtggataggccttgctagatgatttgaaattaacaagatatatccctaggtaaaagtcccaagggagagaatcagaactctaaatactgatatggcgtgacggacgcatgaataaaatatccaactacgaatcagatacgaccatcgaatttcacc

SEQ ID NO: 2950 - DNA, 896 bp, unidentified
  source 1..896: mol_type = unassigned DNA; note = unclassified dsRNA viruses sequence
cgagcgtacttcttccttagcagctgatgcttaacgacattaaactggtcggtatcagagatcgcgctaattagacggggtgtgtgcgttgggcatacagagtctagatgggggagagacatcaatgatggactcgaactcagccaggtcgtattgcaataaggacggttttgaaaggatctggcaaattcttttgagaatccgtgaagtcagtagaagggatgagtcaatgacgtaagcccgggccactggtttcaaatatatcaaaatctcatgtagctggctccggtcggtgcaaatcttggcggattgcttgaggtggaggtagagtagatgcggggactgtagtttcgtgacttgatcatggctcagtctgacagttaccgcggaaaattcagggctatgctcggatgctcttgctaacggctaacgccgtgcagtctagcacaagactgtgtcacagggatggccccacacatcggtaacttcatacgatgtgttaaactattacgtaaactcgtggtgcgatgtataagcattagaagcggggtgtggtgttaggaggaattctaacattgctaacgtatgctcaaccggcgaaagcagcgtttaagtagcgtatgggttgggtagaacgtgccttgatgcataagttatcaaggtggaacggccgggtaatagtattcagcgattaggcgcggggaacgaatggcctaccataactggtgtccgatagtgacgatattttatagatttaccgttgactatcgcagagaacagagaagtctggccgaatatttaatattctaatatctttctatagtagtagctgcgtttattttataaacgtgaaggccaagcatagttagacggtgacagtacattcctcaaacatc

SEQ ID NO: 2951 - DNA, 896 bp, unidentified
  source 1..896: mol_type = unassigned DNA; note = unclassified Picornavirales sequence
ctttgtcccgtccgtaatgacattaaactaagtctagctctcgactttaaattgagcaccaaatccacacgcaagtgtgaagagagaatgcatggacgtggagtaacccctaggactccatggatcgcgctctctagaaataggggttcgagcttgagcacgttgatcagctaaactcaagcctatcgtgaaattggatcgccgaaaatacatttgaaaacgaacccaaaactaccgtagacagtaatggactcgtagattttatcgaagagtctaaaactgtgcgtactgctgtcccgagattaccacgacctcgtgatatctcgccttgggcagatcaaacacctgtaaagatacttgaacgtgagtatgctttggatgatgttgtttatagcacttcttcaaattccgtgctgagatatttacctaatatttttgcacaaactgcctggaaaaacgcaatgtcttcgtttcgttatataaggtgggattttcttgaatggcgttatcaaataatgtcagttcctcaggtttggggtgctgtaggatttacatgcattccaatggacccgcgtcgtcgcactgtactatcagaagattatggtttgctatctcatactgattgccaaattgccgatttttccactgctaacagcggaagaataatggttccttggtgctctttgaataagtggcttgactggtcttctcgtcaagaggagggcttcgacgctcaaaccttcaatgagctgaagattgttggtggaccttggatatattcagccgattcctcaatcccgactagtgttaccataaatttgtggtgtagcttgcatggagtgcaagtagcaggacctcgtgtccctaatactgtgacggatgaaggagaagctcag

SEQ ID NO: 2952 - DNA, 901 bp, unidentified
  source 1..901: mol_type = unassigned DNA; note = unclassified RNA viruses ShiM-2016 sequence
cccatggcaagttatggtctgaagctagataagcctctcgagaccggtgtgtacaagtactgtgctcttttacctattacgatatcactagaatttcgtgttttaaagagcacgatcacactagattatcgttttcgatatttagagattttactttgcacatttgttgtgttaaatcaaacctgcatctttctttttagatgcaagctcgtcattgactttgagctagttggcaacaaattgtcaccaacgaatcaaaacgacggtataccctgtggtgacacacaggggaatccgtgcctcatttgaggaattagtcaatgtaagatagttccattaactattaaaattctcccactgggagtgtcagcagaacgactggttctgccacgcttgtttactgtcaatccgaaagcgtaatagtcggatagaatatcccattgaaatgggcggtatgaggaccaagacttcgtgttttgagcctcgctctccgatatgagccaagctatcttttaaaatagcccaattgacatcaatttacttactccacttgtggagagtccccctattatgatttttaggctgggcatgtagttgatggcttttgtcacgggccacattgtatggatacatccaggacgaaacgttctggacatgagaatcatcacacatcccgggcagtcttttgactgtttaccattgggatgtgtgggtgcaagcatgctttgtggtaggctgagggcgtctcatctagaccatgagacagcgccctatgaagcctgcggtagctggatttaatcaccagtgatggtacgtggcaccctgcagcagcagtttccaatacccggtctattccggatattggtagtgttgtgcaggaccccgggcgatctatatcaaa

SEQ ID NO: 2953 - DNA, 911 bp, unidentified
  source 1..911: mol_type = unassigned DNA; note = unclassified RNA viruses ShiM-2016 sequence
ctgcatgggcgttccccatgcagacttttgcatttagttgtgagttttctaactcaccaaatatcgagcgtaaatcgctccttacaactcagttagagatatgtggattggagcgtacatcgctcctctatcactgtttcaactaagttcttacaggcgtacatcggttgtatgtatctttttaatagcttagttgtatgatttgtatatctacagaagttctgcaagattctttattaacgcaatatcttgtaaccaggatttgatcacctgaaattttagtaatgaattgtttgaattatgtgatcgataattagattcattacggtgcattaagataccaatatgatatagctcctattaagttagttagagcgtcattttggtggattttttgtgccagctccttttaattattaacttcgaaataacgtaaagtgactacgagcattcttggactcacaaggtaataagagactcgaaccccgaagcgcgaggaggcacacgcattctctattctcgaaaggaatggaggcaatatatgttctgaagttattggttagatagcccgaggcacacgactagagatggttactataggaagtaattgtatagaaaatttgttgatatgagaattgttctaacatccatctcgcttactgctgtgtagtagcaagctgtctatctagactaaaactatattgttctgctaaacggattgacacccggccgacaccttagttaatgcaaaacgtaggtaattgaaatgattcggtgaacattttaagttgagcaaagttctgatgtgcgttatagaacatatcaaaatcacgcacagaccctgttatagatcagtaaaactagacctcttcatgttatttgatcacatcatgaagattctttgatcagcc

SEQ ID NO: 2954 - DNA, 913 bp, unidentified
  source 1..913: mol_type = unassigned DNA; note = unclassified RNA viruses ShiM-2016 sequence
ttgatgcgaattagctattgacagtttcgatcttgtaacgatttcttttgagaattttgttagagatctagatttcaattaagtgccagttgtggcgattttaattgtgatcgactccaacgtctcagttttatagatccagttgtggatgagacttgtatataaatgtcttacactttccatgtatgtttattttgtcttttgttcatagtttccgttgtaccagttgtggaggaaatttgacgataaagatttatgtgtgcgtgttctattgtcttatatatataggttcattcatacttgtttgctaccattttagtttcatgcaattgtaccatatcattcacgaaacttcatgttaggaactttcaacttagttttgattagcacgttaatgttttgaaagcgttgagcaattgaggttgttgggatcgcgtaaagcggctctacgttgttactctttccgtagagattttgttatgttccgaccctagttaagctttttggtggttcttaaagccggttaggttaggccctgcaaagaagcttcatatctgaaacgcccttactttgattctcgaaggcgcgcaagctaccggatgatgataagtaacatgttggcaatgtatttgtacattgtagggagatcactgaagcactcaggcattctgcatagctgtcggaatggcctgttacccgtatcagcgaaggtttgacgtattaattaacctcttttcgtgcaaaagattctattttgatatcaacccggtgaagatgcttaatccactgttccttttaggggagcaacattttgcgttcgatccaccccttatttgtgcgttgatctatcagtatgatctcgtagtgatgcgcgtatttaaggtttttccaccccaggtggcttattttaacc

SEQ ID NO: 2955 - DNA, 933 bp, unidentified
  source 1..933: mol_type = unassigned DNA; note = unclassified RNA viruses ShiM-2016 sequence
tgtgggtacaaacccacatacatctgtcgtagatcgcgacgtaaaataagcgatcattcgtagctcacgaatttaaataagcgagcagtcgtagatcgcgactctaaataagcgatccggagttgatatgcttacgtgacaaaaatatattcatcttttcatgatgtaaactgaatttgtgttttataacacacttctataactcttttacttattttatatttacttgagtttcccctcattttctatgaggatctaacctgtatttataccgtctagaattttataagtacgggccattgcctattttctgaaggtatacgtttacgcctatagccctatagtattcgtgtatctttctttcctttcttaatagcactttgcttagtaagagtctatctctcttagctactcctgctataaagaggatgtcgttgtcacgactttaaatgaaagacagacctgtgtgaagacacaataaaatacttccttatatatcgttttagtatttgaaatgttgttcttaggtagtagtacgttcggaggtgtgaaaacctctttcgcggaacctactggtatgagcttcaggacattgaacgaattatatatatgagagttggtagactactctactcgtcagactcatgacgttaattatgatagctagcttgacatctagtgaatgattttctgtataaagatattgtttcattgtgctaagtactcaggtaagctgtacagcaatgtatagtttcagagagctgtttcacaaccagttcttttgtgagtatgtcgagagtaaatcttagtgcgcctacgtggacaataatcttgtgatgaaggattttcattttatggtcggaaggtatccatatgacttccctctattgatgttccccgttcgattggattaatcaactaccatttctttat

SEQ ID NO: 2956 - DNA, 934 bp, unidentified
  source 1..934: mol_type = unassigned DNA; note = unclassified RNA viruses ShiM-2016 sequence
cacggggggaacccccgtgcgtccttttcttctatagacactttgttgtttgctttgaactaacttctgcaagtgtattttgaatttcgatttgaagtgattcattgagatttcattagtgctttgctggagtttttcgagaattgtgagtttgtgttggattgtttagtgtctctagaagagaaggtaactttttcataacataggttaattatgaatgaatgtgtgtatgtttggttgtgaattgaaagctcagctctgcacacaattgttattcttgtgttatgagttttgtttcagtttgcttgaaaccagttattttgaaagcagttatgttagtaagtatcctcctcccagaaggagcctggtgaaagcaaccgctaattgtaagtaaagtaactagtttagtaaattaatgttcgttttattatgtgcttcgaatgttttttagtaaagaaagcatatacctcatgtacttgacatgtacttgttgtatgtatctttaagatacaattgtcccatagatctgttgttctctagtagttgagaccttatcagtatgagcagagcgtagcctatacctcaaaacacacactgtatctgtttggagcagtggaaagaagttagggttttgcagagtgatatgatctgcaatgtcagctagccggcaggtgttctgtatgctagtgattacgcgtagtcctaaaccgctgataagctttccgaacgatgaactaagactgtgaagaatctgtgggttgaccgaccatggattgtaaagattgctatggtacgcccaggcatgaggttggccagttcggggtcgctccgttcatttccttaattacgataattacgatttttgttttgttgtttccttgtactgtctctaatcttgatatttttgaatttattgtaatttaatttttattgt

SEQ ID NO: 2957 - DNA, 940 bp, Apple stem grooving virus
  source 1..940: mol_type = genomic DNA
aaatttaacagcgcttaatttccgcgcattacgtcaatggctttcacttacagaaaccctctagaaattgcaattaacaaacttccaagtaagcaatctgatcaattgctttctttgaccaccgacgagattgaaaagaccttggaagtgacaaatcgcttcttttctttttcaatcactccagaagatcaagaactgttgaccaaacatggtttgacacttgcaccaattggatttaaatcacactcccatccagtatccaaaatgattgaaaaccatcttctgtatatatgtattcctagtcttctatcttctttcagatcagttgccttcttttctttaagagaaagtaaggtcaatagttttattaagatgcattcagtcttctcacatggaaaaatcaagtctttagggatgtataatgcaatcatcgatggaaaggacaaatataggtatggtgaggtctctttcacttctttcagagacagagtgattggtttgagagaccaatgcttgacgcgtaataaatttccgaaagtccttttcatccatgacgagttacactttttaagcccttttgatatggccttttttatttgagactataccagagattgacagagttgtagctacaactgtctttccaattgaactactttttggtgataaggtttcaaaagaacccagggtttacacttacaaggttcatggtccccctttctccttttaccctgatggtgttgcctctgaatgctatgagcaaaatctcgctaactcaaaatggccttttacctgtagtggtatccaatgggccaacaggaagatcagagttaccaaattacagagcctttttgctcaccacgttttttcatttgacagaggaagggcttgcaatgaattcaatcacttcaataagccgagttgcctacttgcagaagag

SEQ ID NO: 2958 - DNA, 957 bp, unidentified
  source 1..957: mol_type = unassigned DNA; note = unclassified Mitovirus sequence
tcggcaagggctcgggaaggtgccgaccttcctcagagtcctgatcagactctggaacaatctacagactactctgttgttaaacactgtacgtagtggatatcggcaagggctaatttatagatctgatcaatctatatctaatagtaacagcttattcttaagactgatcatcttaagtagaaagctttctcataatttcactctctactaaccttcaaattgttctcataatcttaaagcgctatatctaactcttcttcattaataacattaccaactatggttaaatagtaaagtatacactatgcttgacactaatccaaccttaatgtacagtaaggccattagtgatgtggacttcactcagtttctcttacattccttccaatactaaatcggatacttgttactctatgataagagttgtcttggtcacggctactagcagctgagtggcgaaatcctctcagggcgtgtacacccaccaaggttaagcaattctaggattagggagcctaacaggttcaaattcgatggacaatctggaaaatagggagacgatccaacatctaacgctaccgcggcacaggttcttctgtggaaggtttgcagtcacctaccacggtttgtcaccggtctctctaataaactctccccccttcaatttaccattttcccttccattggtatctttgtaacctatcgcagacactgtgtgggtagagcctcaaaaactgaagcacagatgataggtaagtttaacctagcactttacaataactaggccgtgcttatgcatgcaaatctttatccttccactcctcttcgtgcaagcatggctgacgcaacgagtgatgtaacacttatgcttgaatcagcttaatagattcttgtatctaggtttctagattttattggacttcttatgattagtaaacatacgcctaaagtgct

SEQ ID NO: 2959 - DNA, 969 bp, synthetic construct
  source 1..969: mol_type = other DNA
taaggctgactaaaacactatataaccttctacttgatcacaatactccgtatacctatcatcatatatttaatcaagacgatatcctttaaaacttattcagtactataatcactctcgtttcaaattaataagatgtgcatgattgccctaatatatgaagaggtatgatacaaccctaacagtgatcaaagaaaatcataatctcgtatcgctcgtaatataacctgccaagcatacctcttgcacaaagtgattcttgtacacaaataatgttttactctacaggaggtagcaacgatccatcccatcaaaaaataagtatttcatgacttactaatgatctcttaaaatattaagaaaaactgacggaacataaattctttatgcttcaagctgtggaggaggtgtttggtattggctattgttatattacaatcaataacaagcttgtaaaaatattgttcttgtttcaagaggtagattgtgaccggaaatgctaaactaatgatgaagattaatgcggaggtctgataagaataaaccttattattcagattaggccccaagaggcattcttcatctccttttagcaaagtactatttcagggtagtccaattagtggcacgtcttttagctgtatatcagtcgcccctgagatacgccacaaaagtgtctctaagctaaattggtctgtacacatcccatacattgtattaggggcaataatatctaattgaacttagccgtttaaaatttagtgcataaatctgggctaacaccaccaggtcaactccattggctgaaaagaagcttacctacaacgaacatcactttgagcgccctcacaattaaaaaataggaacgtcgttccaacaatcgagcgcaaggtttcaaggttgaactgagagtgtctagacaacaaaatattgatactccagacaccaagcaagacctgagaaaaaacc

SEQ ID NO: 2960 - DNA, 975 bp, unidentified
  source 1..975: mol_type = unassigned DNA; note = unclassified Sobemovirus sequence
acaggcatggggacctagtgtacatagcagtagcggaaagaatatgtatgttggctgaggctgatcttgcagatgctccagatccagtggaccttgtgaaagctggatactgtgatccgataagattatttgtcaaacaggagccccacccactcaagaaggttgtggaagggagattccgtttgatttcttcagtatcactagttgatcaactagttgagagactgctcttcggcccacaaaacgaaaccgaaatcgatctctggcaatcagtcccgtccaaacccggaatggggctgtcgcaaccgtggcaggtgtccgctctgtggaatgacttagagcataagcataagctcagtcctgcagcagaggcagacatctccggctttgattggtcagtccaatcatgggagatcttagctgatgtgtgcattaggatagatagagggggttttaaaggtaacctccgtaaagccgccctgaataggttcaaatgtttctccaatgctgttttccaactcagcgacggaacattgataagtcaaggcttaccgggtctgatgaaatctggaagttattgtacctcgagtaccaacagccggataagatgtctaatggctaaaatcattggagccccgtggtgcattgccatgggcgacgactcggtagaaggatatgttgagggcgccagggagatgtacgactctctcggccacacttgcaaggattatataccttgcaaagctgatctagacaagttagaggaagtgaatttttgctcccacactataaggaaagacagctactacctccaatcctgggcgaaaaccttgtttcgattcctcagtcaacctgaagatgtcaatgaacttgctgtggaattgaaaggatgtcctgaatggccccggatatccaagtacctccgtcggattggaaagatctccgacaaaacttcagaaggagagggaaaacaaa

SEQ ID NO: 2961 - DNA, 988 bp, unidentified
  source 1..988: mol_type = unassigned DNA; note = unclassified Iflaviridae sequence
attgaaagagcggcggcgcgtgtttttcacgcgtcgtcgtcttattcgggttgcccaagtgcctgctacattgtttatttgtaaattctttaccaggcctactctcgaagtacactgctaaagttttgcatctcgccttgtacctcgtcttggttttcttgagtagatttcgattgttgtgttttacatagttgccgtctctttcataccctttattggaacttattttataatttatattattattatacattatctggttataaatgttaatattctttgtgaagggccgcattacactaatttagtgttgattcaattatatttttgctttgttacattatttatcgtgagggaagtagtccatgatagtttaatgtgatttggccggggtatttattgaattaggaatcttttacagcaatatgtgtgatagcgtcaaaattttgtttattgttctcattctaaattatgtttatatctttagagcgatgattctatcatattgtaatgtaatttgtgttagagcctgctgagtttcttttcggacattcccaagaagaaagatcaactcagtaggatagcttttagtagccagtacatacttatttagtcactgtgcgtatggtgaagaagcctctacaagatttcagatgtgtataactggtgctagtcattttccgccagcctgtcttaacttagcgattaacctctttatataccaagcgctgattctgtattttagtagtgtattttatttaattggttgggcttagttataagctaggatattcaattgtctatctagatattttcttttatctcaaacggatatgatatcaaattgatgattttccaatttaccgtcatatcgtctgtgtgtgatctatatcccagtgtccttattcatccagtctaaggaaggtaagatatacgtagaaattattttaactgacaattgtctagagttggaaattttattttaaaa

SEQ ID NO: 2962 - DNA, 991 bp, Tropivirus B
  source 1..991: mol_type = genomic DNA
ccggggggaatccccggtaatccacttttcggccagcgtctgttgctggcactctcgcccaatcttataacactaggtattgggtcttacccgaaaggagaatcccactacaatagattataatgataaagagatagatcgacggttgcgggtcttaccttaaccgggaatcccaaaacaagcgtctatactccagagagagatcaaataagcagcgtaatggtgatacgttaaacaatccgtcatgagaagacgtaaaaatccttgtactgcaagtaaaattgcaacttttgtaattaagtaaatatgtacctcacacatgtgagcactctctaacatcagagaggaaataatcttaaattgtaatacgtgttctggtgaaccgtttagaaaccacgtccgactagagagactagtccacggagaaatccagatgttcaagttcactacgctttcctgcggaaacaatggttagctgagatttgaacgggcgtttaagttctagacacctcacagtggagcgatccacaacagagctacaatcttcagggctaactctggtgcgccgaggcatagcggcaactgtgtattaggagcatttcagggcttgaagagcaggcacgtgcttaaaatgtagcaaaactcaagatgttgagcaatgcgttctgtttgaaaaccatgagtacatggtaacctaccacattgacctatagtgcataacgagtgaagatgtagtttgaaaacatgcagcggatcatggaattgatcgcggtgtttcagatgaaattttcattgcagtgaacattatagagggctcgtttttcgataaccctttgtcagataatgttggaggtgggtacacccacttacagaaggtaccgttttcgtgtgggttgcgaaaatggcgttattagttaacacctaataatgttgtgcagggtgacagcctgtcggcgggtgcacatcttgttttaatccgttgtcttgccat

SEQ ID NO: 2963 - DNA, 1000 bp, unidentified
  source 1..1000: mol_type = unassigned DNA; note = unclassified viruses sequence
attctaggaattgatgttctttcaaacaagatttcgattggatcattcaaacattgattgtttgtttgttaagcttgcgcccatcatgttcgcgtttgactgttaattcttttccctggcaacttgacgtcttgtcacccggttacgtatttatggcttgccttgctagggcgcgtccgcctataaacgacttaagcttcggtctagatttgctgaaagtagccctttcaccatcactctgccgtgcgtagtgagttttgtagaacattgagtgtttgagcccgtactcatcacgtgcagtcttttcaactatgctaccttgagttgtaactcttgatgctctattggaggctgtatctcgaaggctatatacctctgtatcctgggtgaaagtacccgtccctcggagcatgtactaatttccttgtgtaagatgttgctcgatcaactctacttggagagtagctttcattaacctcttggagaagaacaatgtttatacccattctttgacgttcgatgtcgatgacacaccaactctggtgagtttgatactgttgaactcgtgagtacgtctttgatgtttccccctcagaaagttgcttcaagttggttccggttccgcttgccttttcaaatcatctttgggtagacactggtgtctgtaaattcaaactggtggtaagatccggtttcccaaatctctgtctattggaggtaacgattcatgcggtgacactattagttttgacctatacccgtttgtaacgtttcgatgtccaagacacaccaactctggtgaactgaatcccacatttggttcgtgagtgcgttgcagatatctcttgtcaaacttggttgttcatggcaattttcacatggtaagattgtgagaagacccctgactcaacagtagttaattgcgccgcggttccgtattttcatctaatttaccctactttcatgatgttgaggagtaaacctcctcttttcgtttata

SEQ ID NO: 2964 - DNA, 1000 bp, unidentified
  source 1..1000: mol_type = unassigned DNA; note = unclassified dsRNA viruses sequence
gtacagatccgatgataaattccggtgatgtttaatatagcgagtttagtctcaaagctcgtcctgcggatatacaccagctcaagggggtatggactgcccttgtaaagtctacaattctagaggagaaggtgtaatttgctaacctccttagataaactgcctcatttatacatcctgtgctcaccataagctaggatggcgcttggtattaaattgagcgcaatacctccctcgaggaaagccgggggcccatcaatggggatatgaaactaggccctggtagcaatctcaccagtaagatgattttagctctaatgtataggcccggacattagtaagattacagggcaagaactatcctagtgggtctgttctcgtcgttgcgtttaacgccggcattcaggtccaggtgcgaggtaactgagattttcgactcaggtgtgatccggtggtgtcggctaccccggtgagctatcgtaacatcctacgccgttagcctcctatctagcctctagtaattatttccactgctatgctaatccaggagtgagtagggatgggaacgagcctttcgatggaataagtccctaaatagagtggcatcctacaaagaaaggtggacagactgacactcgacacagagcaaggtgaatcctgctcctagcaaacagtcggttggggaaataagagtacccaatgatggttcatcccttcaccgggtggtatagaacggcgcgtgaggtaatacatagtattatccacctcacgtatacctacccacttgaagtagggttgttggacgtcccttgaccaacttatatataccgggctgcgcaaagcctttgtcacccatttgtctaatcaagatgccagtatcgcctaccacatcctcatccccattaattttggacgaaagaagccggtagatagttgctatccaagatacactgattagagatctgaaagtaccgagtcataaatttgctgcacgaacaaa

SEQ ID NO: 2965 - DNA, 1000 bp, unidentified
  source 1..1000: mol_type = unassigned DNA; note = unclassified Tobamovirus sequence
caagtcactattgggcaattgtctgattttgactttgtggatctgcctgcagttgatcagtatagacatatgattaaagcacagccgaaacagaagttggatacttccattcaaacggaatatccggctctgcagacgattgtgtatcattctaagaagatcaatgcaatttttggaccgctcttcagcgaactgacaaggcaactactggacagtgttgactcaagcagatttttgttcttcacgagaaagacaccagctcaaatcgaagatttcttcggagatctagatagtcatgtccccatggatgtgttggagttggatatttccaaatacgacaaatctcagaatgagtttcactgcgcagtagagtatgaaatctggagaagactgggtctagaagattttctggcagaagtgtggaaacaagggcataggaaaaccactcttaaagattacacagctggtataaaaacatgtttatggtaccagagaaagagtggtgatgttacaactttcataggaaatactgtcattatcgccgcgtgcctagcctcaatgttaccgatggaaaaactgattaaaggggcgttttgtggtgatgacagtctgctgtacttcccaaagggctgtgagttccctgatatacaacaggctgcaaacttaatgtggaactttgaagctaagttgtacaagaaaaagtacgggtacttctgtggaaggtacgtgatacatcatgatagaggttgtatagtatattatgatcctcttaagttgatttcaaaactcggtgcaaaacacatcaaggattgggatcatctagaagagttcagaagatccctctgtgatgttgctggctcgttgaacaattgtgcgtattacatgcaattggacgacgctgttggggaggttcataaaaccgccccccctggttcgtttgtttataaaagtttagttaaatatctgtcagataaggttttgtttagaagtttgtttatca

SEQ ID NO: 2966 - DNA, 1000 bp, unidentified
  source 1..1000: mol_type = unassigned DNA; note = unclassified Cucumovirus sequence
aacagaacattggaagaaaccccacaacaacatctttgtccgactctagtacccacttcaatctttctttttatctttcaaaggtcctttgggtatcttgctcaaaaccttcgcatcgaacactgcatattgcttcttaatctcggcaatcgccttttcaccaaaagagtccacttgatcttcatatttctcatagagcacaggcacagtatgaagcaaaacaaaagctatgtagaacaacgtcaagaagttcgcccagctccccagaatagagaaaacccataatccagcaatcactgataagaacttcttgagatcccttccggatgcaatatcccttaacactgaaaatgcccgattaatctcaattctaagagcagaggcaaattgtaaaatagggtcctctggaatgtgcacttgtgggatctttggcggcctcttgttgatgaaagtggatgcattggaccacaagaacaaacccgcgagggcaagtattacgaagtggcaaaccagagtgaggaggtggtactcaagcaattcaaacagaatccatatgactgtagcaactccgagtgtcgatgctgatatcttcttatttctccacagaaaaacatcagcctgttttccgccaccaagaacatggtgaatgggcttttcccttccgaaaagcctgaaaacctttgacttcaaggaatcagagggcccggttttctcgttgtcggaatccgaggaagacgatgaatcgtggtcgtggatcttcccggaaatcttgtccaacaaggactcacccttggcctcctcgtgctcgtggtgctccgccatcacagaatcgccgatcaatggaagcgtctagaaggaataagaaactccctttttcaccaagagagagagtatgtgtgtgtgcgtgtgtgtgtgtgtcgcgtcgtgtcgagtcgtgttgtccacacatttgagtcgtgctgtccgcaccttcttttcagtgtgttagaatacccgaggc

SEQ ID NO: 2967 - DNA, 1000 bp, unidentified
  source 1..1000: mol_type = unassigned DNA; note = unclassified Arlivirus sequence
actcatagtaggccaacaatatacttgtcgattctactagcgtcctgtatcaagacaccatcggttgagtaagattatgtctaaccattataaaataatagcagatattggtttgttggaactagacactggaataactagaagagtcaaggctggattagggacaatatccatctcaaatgataaacttcctaaagttagagaaattctagccaatcttatattactatatcaggtacaagagttagagcactggtatcttcgtctagatttccactctcccagtatgaaaaccctaattgatatgtattcagcagagttattatctcaagagcaagtttggtatatgagaattagaaccctgctaggatctggaagtgcatgtttggttaaaagtggctttgaagtgccgactatgcaaattatattagtgaaatatgtttacccatcggcattcatacctgaatagattcttttaaacagggaactttatttataacactttcttttctttacgcaaatttatcaatatacttgcatatctagcagtctcaactggaagtctctttaatttatttatcaatacacaagccagcttatctatatgattatattatgtatcaaatgcatgcgttcttagaacattaattaataaaatatgtctgctatacacaggtgataaccaatgagattatagagtaccattacaaaattgtgtctttattggcaataactagatgcttatctttctgctttaatttacacttagaaaaactcaagaagtgccatctaatagctacaatataaacataagcgcgaatacaaccaatataaatcgtcaccaaaggcttatgcgccagacatctcaaaaagaactcttgccagaggaatcagaagctataaataaagaagcatcagcattgcgagaacagaaatcaattgaccagaatatataattgaaattcaaagtgaataaatcttgcttaacataatctccagt

SEQ ID NO: 2968 - DNA, 1000 bp, Berhavirus beihaiense
  source 1..1000: mol_type = genomic DNA
atgcttgaatcttgagggaactcacatcgacatctcataactatgatattgattgctctggttttgattttatactttgatgttgagatatgcggggggaaacaggccagagtgctctttatagaaaactgaatttttaatcatgcatggaagggaaactgcccgatcctccgggaggttagtgctataggatttctagagcagatcagtagaattagtgttataactttggcttcttgatgtatgttattattcttgttatattacctgtgtactctatatcatactttactctattaaatccagctatccattcctgtaatgtatgcctaaatgtaaccttatagtgctataaaaaaagtaacattacccaacaaaactcggaatcctctttaacaatgaatagtgattttactgatataagctcagaatatagcgactctgctaaaggagacaaacaaactcaatctaagcaactgattaagaaaataaggagaaagttaaagacaagaaagaacactaaacagaaaaaaacctgtgccagaagggacagactcatcagatcaggaaattcacccctatcagctattatacgacagagaaaagagactaattgagaaggagtcaattgagaaacgcgtcttgaagaggaaatctgccccaccgcctgagcctcctcaaatagaaggtgatttatcggacgagttgcacctcttgatagacgatcaatcctccaagagagcttgcaggccgacagaaatacctacggacataaacagccatatcgtgacagctctgcacggcctcggagagcagatcgggaagctatccaagaaggtggatgagatcttggtgaatcagcgcgatcagtggtcagcaattagaggactgcaggctcaggtggctaagctgaacggagaagccgtagagggtctgctgtctccccaacaggaacttcggctagagtcattcaacacgaggaaggctgctaggaccatcg

SEQ ID NO: 2969 - DNA, 1000 bp, unidentified
  source 1..1000: mol_type = unassigned DNA; note = unclassified Morbillivirus sequence
tcctaaattacttgttaagccgccacctagggtaaaaacaagcgttgatcacagtaatccattaaaaggggccacaggagggaaattagcctcacctgggatggagactacattattcgagaggagtggtgcaaccccatctgtacacccatatactcaacctgcaagcgacttcaatgtaggtgcaagcaatgtccatcaacctgccctaaatgtgaataataattgcaatgatggtagggtaacagcgcctaactcacataaagatatcgagggtgagtctgaaatatctattcaagatatatataacttgattcttggatttaaggatgattacaggaaattatcaaacaaattagatatggtattagagatgaaacaagacattgacaatctaaaaaagaatagtgctaaagtgcaattggctctatcaactattgagggacatctatccagtgttatgattgccatccctggttcaggtattgattccacaggggatgaggaaaaggatcagataaattctgacttaaaaccactgctaggaagggatcattgtagagcatttcgagaagttaccaatcctctagatgagtcttcactagccaattctccaacaaaacatgttgccaaggtaaacaaaaactgcactcttcagaagatcaacaagaacgaaacatctgcaatcaaatttgttcctagtgacagtcatgcaagcacatcaaccatcagatcaattatcaggtcatctaatctcgatcaggatttgaaaacaaaattgctcacaattctatcccagattagaggggcagacaatattagagaattctatgaaaaggttatgatattaataaagaataagaattaaatattacaaatctacattcattataggttgtaattgtcttcaataagatttggtcagtttcatatatatggttattgatttgtgataattataaaaaacttaggagctaaaggttactcagtcatatacagc

SEQ ID NO: 2970 - DNA, 1000 bp, Small ruminant morbillivirus
  source 1..1000: mol_type = genomic DNA
gggtcccggaaatacccgatgtcaagaactctagaccatcagcccaatcaattaaaaagggcacagacgggaactcagtcttatctggaacggtgacagagtgttcatcgataagtggtgcaacccaagctgtgccagagtccagatgggagtcatcagagcgaaatgcgtctgtggggagtgtccccaaatctgcgaggagtgcaaagacgatccaggggttgacacaagaatctggtaccatagcatcactgactcagcctaaagagaatgactccgagtttgagtatgaggatgatctattcacagagatgcaggagattcgtgcaagcattgctaagatccatgatgacaacaaaactatcctctcaaaacttgattctctactgttattgaaaggagaaatcgatactatcaagaaacaaatcagcaaacaaaatataagtatatctaccattgagggccatctatccagtataatgatagccatcccgggctttgggaaggacatcaaggacccaacatctgaggttgagttgaacccggatttgagacctataatcagccgtgattctggcagggctcttgcggaggtcctcaagaaacccgctgttgataggtctcagaaaagcggaatcaaagtcaactccggttcaaagggtcagctccttaaggatctccagctaaaacctgtcgacaaacaggcaagctctgcaatcgagtttgttccatctgaccatgaatcatccaggagtgtcatccgctccataatcaagtcgagcaagcttaacattgatcacaaggactatcttctagatttactgaatgatgtgaaaggctccaaggatcttaaggaattccacaagatgctaacagccattcttgccaagcagccgtaacacatcctataatcaacatctcatactcggttgaaaacatcctctcaatcaggctattacaaaaaacttaggagcaagggcaactgagcttcacagacaag

SEQ ID NO: 2971 - DNA, 1000 bp, unidentified
  source 1..1000: mol_type = unassigned DNA; note = unclassified Bunyavirales sequence
ggtttgacaaatgtacttgactgaccagcaggtatgaccgatgtatttggttttaaacaggtaggtatgtcaggtgtatttgattgacgggtaggtatgccaggtgtaacggggagtctattttaacaatgaggtggttgctttggctgactgatttttagtaaacgtgcttcctctgaatgtggataagactcaaataatacattttaaagcaaattacacaaacagttttcagcaaatcagacttctaaattctcggctggtccctgaagatatttgttgaaaataaaaatctgtttcctcacatttataaattgggtaaaaaactaagttcaccaatctttttccttagaattatcactaaagtcacaaagacccaattggatatctatcatccttatttttaatccctgttgaattagggaatttttgtatgggaaaattcaagccactccataagttcttaaaacatcagaaaaaaatcaatgtgtactatagccaactatacttacaatattcatgacaatatatttttcagcagtttcaagttttcatattttatgacaactacattttaaaatagcttattgggtaaagaataactggttcacattcagagaatgccaatcaaatgtgtctatgccactagatataagcataagattaagcctgtaaatcataggctaagcctgtaaatcatgggctaagcctgtatcagtgatcagtatactagaccacaaatatataacgttccaacaaatttaaaaatatcaccataagttttagattttggaaaaactaaagaatggcttttaacaaaaacattttattctctagaagaataatttaaaggaaacgggaaaacttgaattcattaatagattaatttttctcttcattagtactgtaatttgacaaaagtgttctgtcattgtttaagggcagataggtacgactcaagcacgctgaggttaaacacaaatgagtaatctaaagaaaa

SEQ ID NO: 2972 - DNA, 1000 bp, Mamastrovirus 9
  source 1..1000: mol_type = genomic DNA
ctaaagataagtaaaattgaggaagaagacattaggcaaattgtttgtgctgatcccattttttctagaattggttgtgtatttgaagagtaccaaaatcaattgatgaaaaatagaaccctgacacgtatgggtcaatgtggatggtcgccgtttatgggaggtttccataaacgcataaagcgcttagttgataaaggcaatgattatttcattgaattcgactggacgcgttatgatggtaccatccctaatgaagtctttagggtcattaaggactttagattctcgtgtcttaggggggatttgcaaacaaaggaaaatagagatgtctataattggtattgtgagaatatatttagaagatatgtgatgttaccttcaggagaagttacaatccaggacagggggaatccctctgggcaaatatccacaactatggataataacatttgtaatgtctttttccaggcatttgagtttgcatatctgaatactgaattggattctgatgaattaaaggaaaattgggataagtatgattcacttatatatggagatgacaggctaactacaacccctattttatgtgataattatgtagacagagttattaaaatgtatgctgatgtctttgggatgtgggtcaagagagagaaagtaaaagtttcaaataaaattaatggattgaccttttgtggctttactgttcaagagtcaaatggcctttttgtccccataccaactgatacagataaattacttgctggtttaataacaccaataaagaaattgcctgatattttgtcactctatgggaagctcctttgctaccgcatccttggccataacttgccggatgaccataaatttaaaaattatattttggtcgccttggaggtagtggccaggcacatccgtgctagtggtggggaagaaccctactatatcacggatagcatgctggataggctttggaggggaggtccaaagcaaagtc

SEQ ID NO: 2973 - DNA, 1000 bp, unidentified
  source 1..1000: mol_type = unassigned DNA; note = unclassified Picornavirales sequence
gccgcttatgttaagtcagaacggttatggatcttgagcatttactttataggtttaggcccgaagcgaagggtggcgtaatgatcaccgccgtgaaagccagtcgtgggggtacctctatggagtacgtgttccttctaatctgggtatggttttgattaaccagtacacttatgaatgagcaccttgaatgaatgtagagtgaatgtttgtatactatttagtgaagctgtaatttggaagtagtacggaagtagtacggaaaccgaagcctgaagccgaattacagaagtagtagcttagtgtgtgtatacaaaacagtagacatctgtggcttgtctagaagctgagtatcttctttaaatattactcaattctgcgtgttatattatctattatattagtaatattagtagtgcgtaactaagtacctcctctttgagtttgagtctacttagaccactgcagtatcgagtagtaatctttaagaatagtgcaatatgttgatcgattgtcaaccaccgttaagggtaacccttagcctgtggtaaaccaatgcatgcgaaggtctagcaaactggaacatgtgagttggtattccctatacagtgtgccaccccagagagcgggtatagggcatgtcatgtcaacatatgaattttctaaaggatgtgctgcgatgaggtagggacccctctatcctctaggtactgtatgtcgcgaaagtatgaaagtataagaacgtaatataatattcagacgtacaatggtatactttaagcaagtaatactggtgtgttgtacgttaaatttgcttcggtatcactctcacaccacagccgttagtgtctcacagtggagtagggaatctttatttatttatttattgctgattccattgctgattatactgctgcgctcttgctaatttatttgctgatctatttatttatttattgctatttattgctgattatttattgctaataaatcatataca

SEQ ID NO: 2974 - DNA, 1000 bp, unidentified
  source 1..1000: mol_type = unassigned DNA; note = unclassified Picornavirales sequence
ttagttcagtggaaagcacaacaccgcttcccccgattatgtgacatcaagtaagtgggcggatgggagcccctcagaatccccgtctcccttgacgggtttgacttttaaaattcccataccggacgaaggcgcttgcaacaagtcaggtttattttctagaattcttgtttttcttaaccctacgtgatctatgcgtagtgggcggtttagtgaggaaccgttctcaggtgatccccgcacgcttgtgcggaactttggacaccacctcaggtcaggtgagacgaaggtagtgtatcctttctggaaatcttgtaatgaaaccctaacagttcatcctcttggtataagctgttcccacggctgaaacttgaggctctgatttgcacggaggctgtggacgaacatctggtaacagatgccacagtggccaaaagccaagtgagcaagaaagtccccttaataggctgtacccacggctgaagactgggatggactgcgttcaccacgtgtatccactttaagtggctgtttggttagtaagagcttgatggaaggtttggacgactgctataagtccacttgattggtttgtgtaggaatgctgggcaggtacccctatctagggatctgagctcaggctaattgtctaagcaaacccaaacttcttttcccttttttcttttcattggtgacgatcacaggagctatcatggcttctcaggcaattcacggtgtctataatctcccaatggattctcttgaagctttcaacatgattcgcgttttttaccgcgataaccaccttgacttcatttcttactgtgcctcagtggtgcggacctatcccgcggtgctgcaggagttggctcaactggttcgagacccggaacgttatgttctgttttgtgccttacattggcagaacaaccatgatgaaggttatgagactgaccctaacccggaacctatggaccaagatgaatctggagatgaacag

SEQ ID NO: 2975 - DNA, 1000 bp, Cardiovirus E
  source 1..1000: mol_type = genomic DNA
tcatgtgtgtcgcggtccactccctcagcaacccgtctttggacgtgggtactacgatagtgccatccaattcccctaaccttgttaccttccgagcgacctccaacacccgaggtgctcaccaccctgtaaggaaaaatgaaatttcgtctggtgctggctaacagataagatctagcattttccggcccaggctaagaaacctctataaagtagatcgataaacttaaattggcgaactgtacaaagaacggtcctctaccttgccgccacacacacccaaccctaaaatttggcctttagtgtgtggccccttgtgtatgacctcaactcttgcgtacacgcggaatttaacatctttccgctgaaaggagttttcgtgcctccccgattatgtgatgctcgtcctttgctgggcggagcaacgcacgaaacaagccttttctttactaatggaatccaattcccccggtctaagccgcttggaataagacagggttattttcaccccctcttcttctactctcacagagctctattctgtgagaagggaatgttgcgcccctccttcttgggagctcgcttggcggtctttccgtctctgtgcaagagcgagtgcgcaatgtgttagaaggtgaagaaagatattttgggactaacgtttgacacggaacgaaaacgtctgtagcgacctcacaaaggcagcggaacccccctcctggtgacaggagcctctgcggccaaaagccacgtggttagcagccacctttgtgagcggcgtgaacccgacgccacggtttcgttgtgtgacactcactacccccattcggtctttcttaagccctaacacaggtccaccaagaatgtcctgaaggtacctcttcggagatctgatcaggagcttcatgccggtgctttacaccggttcggaagttaaaaactgtcacagtggacccaaatctagatggttctagatttctattggttttaaaatttcatt

SEQ ID NO: 2976 - DNA, 1000 bp, unidentified
  source 1..1000: mol_type = unassigned DNA; note = unclassified RNA viruses ShiM-2016 sequence
aacccgcaccagtgctgtctattagtttacaaagtgatcgcttggcgtaaattattagagagcttgcattgctctcctctacactttctttcgtagagtcattttatttgtccgttgaaacgtattaaaggacctattttgtgtctaaggtcttgtatatgtgtgtggttaaattcatcaaaatcttaactatcactattatatgttattgtcctttgttctatgttgtatgaaagtgtttgtgcttatattcttcaaaacacaaaaacattgttgttgactcctatagtcactatatgtgtatgaatgttgtatgaatgtatcccggattacactaaatgtacctgcttcagcatacaatggctgtgtgtagtaagggtccagcggtgctgcccccatgatagggaggagatttgcttgtgtgtctagaggagtttgttctaccggcggctgaattgctgcgtctgagagacaacttcttgaaccaccgtttgcatttggccttccttgagggatgttcccgtcacgcccggaaccacctgtcctgtcgtatttagtgtgggaaacagtgtaagatggcgttaccagatcgaaactggacctcagcacttcttcgctgagaggctggttatgcaccaccagctaaacaaacaacggttgttcttactaggcactctgtggtggagtagccgaggcgtaggaccattaacataattggagcatacaggcgagaggcccatgttgcgaggtctgtccataggggacctcaagacatcggataccaactctcgggctaagttcagcaataatgcacctctgccggcagtgttctaggcaagtgtcacactccaattccctgttattgtaagacaactaaccttccacatattgacgcccgagcccgaagggactaacgtcgaactgtgagtgcacacagtaaatctagggatctttgggtgagctcccgttatcagctcaatccttttctcatttcgtcacc

SEQ ID NO: 2977 - DNA, 1000 bp, unidentified
  source 1..1000: mol_type = unassigned DNA; note = unclassified ssRNA viruses sequence
tttaaaaatttgatgtttttactgcttctgttaatcttcttgcaagttcttttcttcttttactatctattgcatgtggacactggagaactgggacagctctatcctgatctcgactagcctgttactactatcatttatcttttcacctagatcaacaacagtggtagtactgtcttacacagtgctactttatcgcctatggcagacttggaaaatctttgcaagcaactaaaagacttgacaaccaaggttaaccaaattgcccaaagccaaaaacaaacagacccaaaacaacaaagacgcggaagatctaggagccgtagccgctccagagaacgcaaaaacatccgctactttgacgaggacaaggtaaaacctggggatattgtacacgttcgtacttgtccaggtactattactggtaaacactccgattgtcagtggaactacatcgaaatcaaattcccaaagaaacctaaaacagagggttcaaactaagtggtcagaatttgtagccaaacataatttgactgctaccaaaaacacaaacggcaaaacttgtgtcttcctctgtgacgcaacctattgtgacaacgacaacacagagttccaaaattggcgcataacaccaaaccttgaactcttagtttattcgtcaacccaaatttcaggtgggcgtagaacaaccctacagctagcctgtaaaaactactcttgtccttggcgagaagaggttcaacaattacgcaataaaacaatagttagacaccaaccgtgtctacccaaaaatttaactcaaaaaatcttaaacggctcgctttgtaccggtctagaagacggtagtaatctgatctgcgtcaaaaaaccaccaagaccaagaccaacctctctcgcgctagttttcgctagtacgatccaaatacaaacaacaactgtagtgacaaccggttctactactcaaataaccacctcacaacagacaaccaaactaacaaca

SEQ ID NO: 2978 - DNA, 1000 bp, unidentified
  source 1..1000: mol_type = unassigned DNA; note = unclassified RNA viruses ShiM-2016 sequence
gttgtctcttttgagacagattggcaaccaaacatatatttattatattactactcaagcgtagcccgctagagttaatagctgtcattaacagcgacccctcggcaagaggttaactgtccaaaatcgaatctgatcgaggaagaaatccaaaaacagacgtcgctaacccgctacgaaaacgcggaattattatcgtaggataagaatcgactctatgtcgtgtgcgagtccaacggttcagattacatatgtttgtgacatgtgcaaattcggttgcacaacagccattctttgtaattcatcttattaagaagatggaagaactccctcctatggcgccctgtaatggggattggaggtactctagatttggaaacctggagtgaacgagaacggtttggagcagtggccttttataggtatagactccatctgtaattagttgaattcttagaatcagcctgtatttgatcttacttgttttccacgcaagtattgcagtataggtgctgtccttgtttgacataacgaaggcttgagttattataacacttcgaggaaagtataaagactttattaggtcagtggaaagatctggcgctgtgtttggggttaatagccccctcagcatcaatatagcaatgaagttacgaacagccaaaattttaattccggactttttgtcacacccaattccggttgtggtgatgataaatcatttgcaagagttaaatttcagaagtctaaggcttctaagcttcgtcagaagggaaaggatgctggcaagtttggcgctcccaaggggaggcgaactcagatcgctcagcaattggataaggccaatagggaatataaggcaggtagatataacctgcaggctaatagtggcatcgtcgaggaccttgagaaggtgcgacggagcctcgccggttttaaggcttcaataccgaagaagctcggcaatatttttaacgttattgaggacgtaatattacat

SEQ ID NO: 2979 - DNA, 1000 bp, unidentified
  source 1..1000: mol_type = unassigned DNA; note = unclassified RNA viruses ShiM-2016 sequence
gaatgtgcaagcacgaattcacctcctgcttgtatgttttccacgaaactagatttttggcaaattagcctccatcatgtttcgtcagcccttgagtaacgggtgcaaatggtataaccctggcatgttgctcaccccaaacccgaccgaaattgtcattaaactaatgtcgaccgaaatgtcattaaactaatctaactatcttttgttctttataagattttagatgtgcatctcaccttgtagatgcttttagccggttttaagaactggcaacccagccccctattccgactctttaagagattaattttagatttggaatgtttttgcagcagtttagctcatgctgactgtttgccccatacttttattagcgtggagtaatttatttaaatcacttgtgaacgattttgaggaatcactgtctagaagatgtcacaaagcgacttagtcgtagttttgctctttacttatgatatattaccgataaatttgaagcatttaaaagtcccacatcagatgggatggtttcgatattgacctctatcacttttacgagtatgaagtgatcgaatttcatgtcatacactgataaaacgcatatctggcgaattgcgggtgttagtgaagtttgtatatggggcctcgtacccccaggcgacgagccgaatacgagtatataggttggttaatttattagcccatatctgcgtgacctgagtaacaacccatgcgggaaaagttacaaattgccacatcgacgtagatctccgcctattggtcaataagcggagaaagtatttatttgactactaacaattatcaacaactttttgtaggatgtgagaatttatcagctcccatctgtgaaatttttgatagtacttttcttgataacactcaagaaacactttttggaccccgcctttgtggtcctcgtttatgtagcgatgcgtatgatcctaaggaatatgcgcgtagcaagtaccggcgtcgt

SEQ ID NO: 2980 - DNA, 1000 bp, unidentified
  source 1..1000: mol_type = unassigned DNA; note = unclassified RNA viruses ShiM-2016 sequence
ttttctaacttaaacaagaaaatgccgctcaacttgatgggcgtcattttgttgtcagtgaacagagttcagccaactctatgtatcgcatcatttaatgctctgactttcgggtcatcagatgccttttcttggttatttgataagtatgctatagatttgcgatgtattgtatcacaagagcgctatagatttgcgctgtattgttgacgtcacatgtggcggtaccatggttgaaccctgccgctcatgtgtattcagcacgtcacgtacgtctcgcctgactgcttattttaatgatatagtttgcaaattgtcttttcagaaggtaattatcagttccttgtccaaaattctgattaaccttaggagattatatatctccgcacactagctttactaggtcgagctatttctccccttcataggaggaaaggacatctagactttaagctctttggtcctgagctatttcccgatgggcatacacagatgtccacagtaacaactcgtaaaagaaataaaaatattttgaaaacggaccattacccttacccttgtaacaaaggaactccccttctcaaatttagaaatcccataaaaatctttaaaacagaaatgtaaacaagatccacctttgttgcagagaaccatatgcttgtgaggaaatacactgaatataaatccctaaacgctgggtttcactgtatgagtttcctaacctacacagtcgagagattgtgggctcaattgagtttggttctagacctaagcgcccctcttactagatatagtttgcacttgaggaaatgcgatatgggaaagcgtgcacttacccctgcgaaggaagggtgcatgtgttggaaacagatgtgtagaggttcataaccactcacatgccatacgtactgatcacggtaagagtccgagagctagggtttccccctgaaagtgggatatcccgacaccaggagaaataataggtgataatgtgaaagcg

SEQ ID NO: 2981 - DNA, 1000 bp, unidentified
  source 1..1000: mol_type = unassigned DNA; note = unclassified RNA viruses ShiM-2016 sequence
ccatcgagctgtaaggagttagggaaacccctggcagtttatcggtcctgccataaccaaataccgacaccccctcccttcatagtttgtagatattttcaacacgaagcgttgagaacaatagtataacaccatcgcgagcgcactttgtctgtgctactggtcttatatgaggtgtttatacgccactgttatagttttagagaattgttggaattagtggacacatgtccacatgcacgaaatactacgtgagtgcatgctggcttgaccccaaaaacaaaatcaaaattataaatgttcttgccctttgtcggtttagaacatacaaaaatcgcagataggtgcctcttggtgacttaatcagtcccatatcgtactgttgccatcacatatcaatcgtaagtgagacagcgttgctggtggctactctagagaccagcacacagcgtaagctgttcaggtgtccactttacccgagagggtatgtagcagcgattgttgttgtgacacgggcgggtacacctgacttagtaaggttccgattaactggaactctgaaacgttagccccctggaccattagggtcgtgagggttccatgcggagtgcttatcactcctgaatggatatggagcattcacagaagccgcggagtaaaggcccggaggaatgccagtacgtctagctcagccggatgaggagtccggcgttgtcgagacaatgtgtattgcgatgcactaggtaagacagagcgccactgagcctgctcgtggtatgaagggacgtgcacggatctggcaatgtccgatgatggtgataccgtcagctggatgtgaatgtttccagagtcaggcactggatgtagtgccgaagtttccttggtgacgttcctccctttgatgaggtaatgttacaacaaaaacactccgtgcaacccaggaacaatcgcaaaacccctccacccccaaaactaaacacacgacacagatacaacaatc

SEQ ID NO: 2982 - DNA, 1000 bp, unidentified
  source 1..1000: mol_type = unassigned DNA; note = unclassified RNA viruses ShiM-2016 sequence
ctttgcctacaacctttatagtttttatgccggcccactttgatttatcaatgtggccccttgatttgtatctcgcgggatacgcccatacatttccggcatcctatttgatatttcattcgaattattttattaacatataatatttatttattcgttagtcactataattagtgcaaccggtcttcgggccattattagtccttttattagttctatcacgtgtcttcgggcacacaaatagtaaagtatttttattagatctctggagcatttaagatgctatagccttaacgaactggcgtttatcggctttttaaattgaacggtatggttaccacattgcccgggagcctattttaagctttttcctttagcggggaattatcacttattttagaataaactcctttatccaggtgactaggtattcctatcaagccaagtttcaactattaagtgtcaggataagtctttagagttaagttgcacatcgctgcgcgttgagtgcgtagttacccatggtgtgcattttgctatgataaccatcttgcatgtttcatgtcttttattaatgaggtagttgttctataacagcatttcggctgagaagctgaggtgttggaacactaatgtttacccacctatcgaatattctatacactgggttaactgcccgtatagtcttaaactagttccttctattttatctagacatggaaaagcaattcctacccctcgagtcggggaaactaattctcttcaacacatactagtctcttcggagagtgttgaagcccttaatcattcttgtaatgaacatgtgcagttacatggtttatttcattttactgccaagtgtagttgtttcaatgttgacttgattgtctcaaaggatgacacacacgaatcaaaagtggatctatcttcggatgattccaatgtcaaagaagtactatttactgagagcgattatttttcgatttcgcaacagacaggg

SEQ ID NO: 2983 - DNA, 1000 bp, unidentified
  source 1..1000: mol_type = unassigned DNA; note = unclassified RNA viruses ShiM-2016 sequence
cctaaaaatatatgtgtgaattgctctccgtgaaaggagatactgatcatgtaataggtgctttaagcactgaagctgcaagaactacagcgtaatcaacgcgaaccccgcttgctcagcgggaaataaatagagcatttttggtaatcttcttacctctgaatatagaaaaagaagacgtcgttcgaagccggaacgtaatccggattttacattacagtaccttcgcgtaggtgcagtaacaaatagttggtggagccaaccgtctagatatagtgatctaggacacactaccactttttaattttacattataaagaacacacgaactcacctcttggcgggctacgtaacgtagttttgaggttctcttataggtatacttatcctgttagagagtgcgatgtacggcatggagcagtaatatacttttatagtattcagactgtgttcgttacttatatttgtaataaatattgattagtggtcagctctttcatcttatcccaaggctttattcgaccttgggtgtttgttagagtgtgtggcttgttagactgaagcaaaggcttgagcttcgacttttcgagcaaagaattagaatagatctggcgccgttgggcttaactagcccctcggcatcaaatagcatgaaattactaacgccttttcaaaagtactagaccctctttcctttgaaggaggaacttacgatttgtactctccccaatcttttaatttgtggtcaagatggcaatttattagcaaatacttggcacgggaactttctaaagaagttctttccaaaattgaaggattggtggctttgtttttggcactcagtgaggttcagacggagaaaggtttcttgtctgtgttaatactttatgtaaaaacacattgtgacgagtctcttattaaattcgtgactgaacaggttgcagtcctgtttaagggctatacggcacagagttctggccgtccaaagtggttggatgat

SEQ ID NO: 2984 - DNA, 240 bp, synthetic construct
  source 1..240: mol_type = other DNA
gaagaaattctttaagtggatgctctcaaactcagggaaacctaaatctagttatagacaaggcaatcctgagccaagccgaagtagtaattagtaagttaacaatagatgacttacaactaatcggaaggtgcagagactcgacgggagctaccctaacgtcaagacgagggtaaagagagagtccaattctcaaagccaataggcagtagcgaaagctgcaagagaatgaaaatccgt

SEQ ID NO: 2985 - DNA, 239 bp, synthetic construct
  source 1..239: mol_type = other DNA
aagaaattctttaagtggatgctctcaaactcagggaaacctaaatctagttatagacaaggcaatcctgagccaagccgaagtagtaattagtaagttaacaatagatgacttacaactaatcggaaggtgcagagactcgacgggagctaccctaacgtcaagacgagggtaaagagagagtccaattctcaaagccaataggcagtagcgaaagctgcaagagaatgaaaatccgt

SEQ ID NO: 2986 - DNA, 238 bp, synthetic construct
  source 1..238: mol_type = other DNA
agaaattctttaagtggatgctctcaaactcagggaaacctaaatctagttatagacaaggcaatcctgagccaagccgaagtagtaattagtaagttaacaatagatgacttacaactaatcggaaggtgcagagactcgacgggagctaccctaacgtcaagacgagggtaaagagagagtccaattctcaaagccaataggcagtagcgaaagctgcaagagaatgaaaatccgt

SEQ ID NO: 2987 - DNA, 190 bp, synthetic construct
  source 1..190: mol_type = other DNA
gttatagacaaggcaatcctgagccaagccgaagtagtaattagtaagttaacaatagatgacttacaactaatcggaaggtgcagagactcgacgggagctaccctaacgtcaagacgagggtaaagagagagtccaattctcaaagccaataggcagtagcgaaagctgcaagagaatgaaaatccgt

SEQ ID NO: 2988 - DNA, 189 bp, synthetic construct
  source 1..189: mol_type = other DNA
ttatagacaaggcaatcctgagccaagccgaagtagtaattagtaagttaacaatagatgacttacaactaatcggaaggtgcagagactcgacgggagctaccctaacgtcaagacgagggtaaagagagagtccaattctcaaagccaataggcagtagcgaaagctgcaagagaatgaaaatccgt

SEQ ID NO: 2989 - DNA, 188 bp, synthetic construct
  source 1..188: mol_type = other DNA
tatagacaaggcaatcctgagccaagccgaagtagtaattagtaagttaacaatagatgacttacaactaatcggaaggtgcagagactcgacgggagctaccctaacgtcaagacgagggtaaagagagagtccaattctcaaagccaataggcagtagcgaaagctgcaagagaatgaaaatccgt

SEQ ID NO: 2990 - DNA, 187 bp, synthetic construct
  source 1..187: mol_type = other DNA
atagacaaggcaatcctgagccaagccgaagtagtaattagtaagttaacaatagatgacttacaactaatcggaaggtgcagagactcgacgggagctaccctaacgtcaagacgagggtaaagagagagtccaattctcaaagccaataggcagtagcgaaagctgcaagagaatgaaaatccgt

SEQ ID NO: 2991 - DNA, 186 bp, synthetic construct
  source 1..186: mol_type = other DNA
tagacaaggcaatcctgagccaagccgaagtagtaattagtaagttaacaatagatgacttacaactaatcggaaggtgcagagactcgacgggagctaccctaacgtcaagacgagggtaaagagagagtccaattctcaaagccaataggcagtagcgaaagctgcaagagaatgaaaatccgt

SEQ ID NO: 2992 - DNA, 139 bp, synthetic construct
  source 1..139: mol_type = other DNA
acaatagatgacttacaactaatcggaaggtgcagagactcgacgggagctaccctaacgtcaagacgagggtaaagagagagtccaattctcaaagccaataggcagtagcgaaagctgcaagagaatgaaaatccgt

SEQ ID NO: 2993 - DNA, 138 bp, synthetic construct
  source 1..138: mol_type = other DNA
caatagatgacttacaactaatcggaaggtgcagagactcgacgggagctaccctaacgtcaagacgagggtaaagagagagtccaattctcaaagccaataggcagtagcgaaagctgcaagagaatgaaaatccgt

SEQ ID NO: 2994 - DNA, 137 bp, synthetic construct
  source 1..137: mol_type = other DNA
aatagatgacttacaactaatcggaaggtgcagagactcgacgggagctaccctaacgtcaagacgagggtaaagagagagtccaattctcaaagccaataggcagtagcgaaagctgcaagagaatgaaaatccgt

SEQ ID NO: 2995 - DNA, 136 bp, synthetic construct
  source 1..136: mol_type = other DNA
atagatgacttacaactaatcggaaggtgcagagactcgacgggagctaccctaacgtcaagacgagggtaaagagagagtccaattctcaaagccaataggcagtagcgaaagctgcaagagaatgaaaatccgt

SEQ ID NO: 2996 - DNA, 135 bp, synthetic construct
  source 1..135: mol_type = other DNA
tagatgacttacaactaatcggaaggtgcagagactcgacgggagctaccctaacgtcaagacgagggtaaagagagagtccaattctcaaagccaataggcagtagcgaaagctgcaagagaatgaaaatccgt

SEQ ID NO: 2997 - DNA, 134 bp, synthetic construct
  source 1..134: mol_type = other DNA
agatgacttacaactaatcggaaggtgcagagactcgacgggagctaccctaacgtcaagacgagggtaaagagagagtccaattctcaaagccaataggcagtagcgaaagctgcaagagaatgaaaatccgt

SEQ ID NO: 2998 - DNA, 133 bp, synthetic construct
  source 1..133: mol_type = other DNA
gatgacttacaactaatcggaaggtgcagagactcgacgggagctaccctaacgtcaagacgagggtaaagagagagtccaattctcaaagccaataggcagtagcgaaagctgcaagagaatgaaaatccgt

SEQ ID NO: 2999 - DNA, 132 bp, synthetic construct
  source 1..132: mol_type = other DNA
atgacttacaactaatcggaaggtgcagagactcgacgggagctaccctaacgtcaagacgagggtaaagagagagtccaattctcaaagccaataggcagtagcgaaagctgcaagagaatgaaaatccgt

SEQ ID NO: 3000 - DNA, 131 bp, synthetic construct
  source 1..131: mol_type = other DNA
tgacttacaactaatcggaaggtgcagagactcgacgggagctaccctaacgtcaagacgagggtaaagagagagtccaattctcaaagccaataggcagtagcgaaagctgcaagagaatgaaaatccgt

SEQ ID NO: 3001 - DNA, 78 bp, synthetic construct
  source 1..78: mol_type = other DNA
caagacgagggtaaagagagagtccaattctcaaagccaataggcagtagcgaaagctgcaagagaatgaaaatccgt

SEQ ID NO: 3002 - DNA, 77 bp, synthetic construct
  source 1..77: mol_type = other DNA
aagacgagggtaaagagagagtccaattctcaaagccaataggcagtagcgaaagctgcaagagaatgaaaatccgt

SEQ ID NO: 3003 - DNA, 76 bp, synthetic construct
  source 1..76: mol_type = other DNA
agacgagggtaaagagagagtccaattctcaaagccaataggcagtagcgaaagctgcaagagaatgaaaatccgt

SEQ ID NO: 3004 - DNA, 75 bp, synthetic construct
  source 1..75: mol_type = other DNA
gacgagggtaaagagagagtccaattctcaaagccaataggcagtagcgaaagctgcaagagaatgaaaatccgt

SEQ ID NO: 3005 - DNA, 74 bp, synthetic construct
  source 1..74: mol_type = other DNA
acgagggtaaagagagagtccaattctcaaagccaataggcagtagcgaaagctgcaagagaatgaaaatccgt

SEQ ID NO: 3006 - DNA, 40 bp, synthetic construct
  source 1..40: mol_type = other DNA
aataggcagtagcgaaagctgcaagagaatgaaaatccgt

SEQ ID NO: 3007 - DNA, 39 bp, synthetic construct
  source 1..39: mol_type = other DNA
ataggcagtagcgaaagctgcaagagaatgaaaatccgt

SEQ ID NO: 3008 - DNA, 38 bp, synthetic construct
  source 1..38: mol_type = other DNA
taggcagtagcgaaagctgcaagagaatgaaaatccgt

SEQ ID NO: 3009 - DNA, 37 bp, synthetic construct
  source 1..37: mol_type = other DNA
aggcagtagcgaaagctgcaagagaatgaaaatccgt

SEQ ID NO: 3010 - DNA, 36 bp, synthetic construct
  source 1..36: mol_type = other DNA
ggcagtagcgaaagctgcaagagaatgaaaatccgt

SEQ ID NO: 3011 - DNA, 27 bp, synthetic construct
  source 1..27: mol_type = other DNA
gaaagctgcaagagaatgaaaatccgt

SEQ ID NO: 3012 - DNA, 26 bp, synthetic construct
  source 1..26: mol_type = other DNA
aaagctgcaagagaatgaaaatccgt

SEQ ID NO: 3013 - DNA, 25 bp, synthetic construct
  source 1..25: mol_type = other DNA
aagctgcaagagaatgaaaatccgt

SEQ ID NO: 3014 - DNA, 24 bp, synthetic construct
  source 1..24: mol_type = other DNA
agctgcaagagaatgaaaatccgt

SEQ ID NO: 3015 - DNA, 23 bp, synthetic construct
  source 1..23: mol_type = other DNA
gctgcaagagaatgaaaatccgt

SEQ ID NO: 3016 - DNA, 22 bp, synthetic construct
  source 1..22: mol_type = other DNA
ctgcaagagaatgaaaatccgt

SEQ ID NO: 3017 - DNA, 18 bp, synthetic construct
  source 1..18: mol_type = other DNA
aagagaatgaaaatccgt

SEQ ID NO: 3018 - DNA, 17 bp, synthetic construct
  source 1..17: mol_type = other DNA
agagaatgaaaatccgt

SEQ ID NO: 3019 - DNA, 16 bp, synthetic construct
  source 1..16: mol_type = other DNA
gagaatgaaaatccgt

SEQ ID NO: 3020 - DNA, 35 bp, synthetic construct
  source 1..35: mol_type = other DNA
gcagtagcgaaagctgcaagagaatgaaaatccgt

SEQ ID NO: 3021 - DNA, 33 bp, synthetic construct
  source 1..33: mol_type = other DNA
agtagcgaaagctgcaagagaatgaaaatccgt

SEQ ID NO: 3022 - DNA, 32 bp, synthetic construct
  source 1..32: mol_type = other DNA
gtagcgaaagctgcaagagaatgaaaatccgt

SEQ ID NO: 3023 - DNA, 26 bp, synthetic construct
  source 1..26: mol_type = other DNA
acggacttaaataattgagccttaaa

SEQ ID NO: 3024 - DNA, 27 bp, synthetic construct
  source 1..27: mol_type = other DNA
acggacttaaataattgagccttaaag

SEQ ID NO: 3025 - DNA, 28 bp, synthetic construct
  source 1..28: mol_type = other DNA
acggacttaaataattgagccttaaaga

SEQ ID NO: 3026 - DNA, 76 bp, synthetic construct
  source 1..76: mol_type = other DNA
acggacttaaataattgagccttaaagaagaaattctttaagtggatgctctcaaactcagggaaacctaaatcta

SEQ ID NO: 3027 - DNA, 77 bp, synthetic construct
  source 1..77: mol_type = other DNA
acggacttaaataattgagccttaaagaagaaattctttaagtggatgctctcaaactcagggaaacctaaatctag

SEQ ID NO: 3028 - DNA, 78 bp, synthetic construct
  source 1..78: mol_type = other DNA
acggacttaaataattgagccttaaagaagaaattctttaagtggatgctctcaaactcagggaaacctaaatctagt

SEQ ID NO: 3029 - DNA, 79 bp, synthetic construct
  source 1..79: mol_type = other DNA
acggacttaaataattgagccttaaagaagaaattctttaagtggatgctctcaaactcagggaaacctaaatctagtt

SEQ ID NO: 3030 - DNA, 80 bp, synthetic construct
  source 1..80: mol_type = other DNA
acggacttaaataattgagccttaaagaagaaattctttaagtggatgctctcaaactcagggaaacctaaatctagtta

SEQ ID NO: 3031 - DNA, 127 bp, synthetic construct
  source 1..127: mol_type = other DNA
acggacttaaataattgagccttaaagaagaaattctttaagtggatgctctcaaactcagggaaacctaaatctagttatagacaaggcaatcctgagccaagccgaagtagtaattagtaagtta

SEQ ID NO: 3032 - DNA, 128 bp, synthetic construct
  source 1..128: mol_type = other DNA
acggacttaaataattgagccttaaagaagaaattctttaagtggatgctctcaaactcagggaaacctaaatctagttatagacaaggcaatcctgagccaagccgaagtagtaattagtaagttaa

SEQ ID NO: 3033 - DNA, 129 bp, synthetic construct
  source 1..129: mol_type = other DNA
acggacttaaataattgagccttaaagaagaaattctttaagtggatgctctcaaactcagggaaacctaaatctagttatagacaaggcaatcctgagccaagccgaagtagtaattagtaagttaac

SEQ ID NO: 3034 - DNA, 130 bp, synthetic construct
  source 1..130: mol_type = other DNA
acggacttaaataattgagccttaaagaagaaattctttaagtggatgctctcaaactcagggaaacctaaatctagttatagacaaggcaatcctgagccaagccgaagtagtaattagtaagttaaca

SEQ ID NO: 3035 - DNA, 131 bp, synthetic construct
  source 1..131: mol_type = other DNA
acggacttaaataattgagccttaaagaagaaattctttaagtggatgctctcaaactcagggaaacctaaatctagttatagacaaggcaatcctgagccaagccgaagtagtaattagtaagttaacaa

SEQ ID NO: 3036 - DNA, 132 bp, synthetic construct
  source 1..132: mol_type = other DNA
acggacttaaataattgagccttaaagaagaaattctttaagtggatgctctcaaactcagggaaacctaaatctagttatagacaaggcaatcctgagccaagccgaagtagtaattagtaagttaacaat

SEQ ID NO: 3037 - DNA, 133 bp, synthetic construct
  source 1..133: mol_type = other DNA
acggacttaaataattgagccttaaagaagaaattctttaagtggatgctctcaaactcagggaaacctaaatctagttatagacaaggcaatcctgagccaagccgaagtagtaattagtaagttaacaata

SEQ ID NO: 3038 - DNA, 134 bp, synthetic construct
  source 1..134: mol_type = other DNA
acggacttaaataattgagccttaaagaagaaattctttaagtggatgctctcaaactcagggaaacctaaatctagttatagacaaggcaatcctgagccaagccgaagtagtaattagtaagttaacaatag

SEQ ID NO: 3039 - DNA, 135 bp, synthetic construct
  source 1..135: mol_type = other DNA
acggacttaaataattgagccttaaagaagaaattctttaagtggatgctctcaaactcagggaaacctaaatctagttatagacaaggcaatcctgagccaagccgaagtagtaattagtaagttaacaataga

SEQ ID NO: 3040 - DNA, 188 bp, synthetic construct
  source 1..188: mol_type = other DNA
acggacttaaataattgagccttaaagaagaaattctttaagtggatgctctcaaactcagggaaacctaaatctagttatagacaaggcaatcctgagccaagccgaagtagtaattagtaagttaacaatagatgacttacaactaatcggaaggtgcagagactcgacgggagctaccctaacgt

SEQ ID NO: 3041 - DNA, 189 bp, synthetic construct
  source 1..189: mol_type = other DNA
acggacttaaataattgagccttaaagaagaaattctttaagtggatgctctcaaactcagggaaacctaaatctagttatagacaaggcaatcctgagccaagccgaagtagtaattagtaagttaacaatagatgacttacaactaatcggaaggtgcagagactcgacgggagctaccctaacgtc

SEQ ID NO: 3042 - DNA, 190 bp, synthetic construct
  source 1..190: mol_type = other DNA
acggacttaaataattgagccttaaagaagaaattctttaagtggatgctctcaaactcagggaaacctaaatctagttatagacaaggcaatcctgagccaagccgaagtagtaattagtaagttaacaatagatgacttacaactaatcggaaggtgcagagactcgacgggagctaccctaacgtca

SEQ ID NO: 3043 - DNA, 191 bp, synthetic construct
  source 1..191: mol_type = other DNA
acggacttaaataattgagccttaaagaagaaattctttaagtggatgctctcaaactcagggaaacctaaatctagttatagacaaggcaatcctgagccaagccgaagtagtaattagtaagttaacaatagatgacttacaactaatcggaaggtgcagagactcgacgggagctaccctaacgtcaa

SEQ ID NO: 3044 - DNA, 192 bp, synthetic construct
  source 1..192: mol_type = other DNA
acggacttaaataattgagccttaaagaagaaattctttaagtggatgctctcaaactcagggaaacctaaatctagttatagacaaggcaatcctgagccaagccgaagtagtaattagtaagttaacaatagatgacttacaactaatcggaaggtgcagagactcgacgggagctaccctaacgtcaag

SEQ ID NO: 3045 - DNA, 226 bp, synthetic construct
  source 1..226: mol_type = other DNA
acggacttaaataattgagccttaaagaagaaattctttaagtggatgctctcaaactcagggaaacctaaatctagttatagacaaggcaatcctgagccaagccgaagtagtaattagtaagttaacaatagatgacttacaactaatcggaaggtgcagagactcgacgggagctaccctaacgtcaagacgagggtaaagagagagtccaattctcaaagcc

SEQ ID NO: 3046 - DNA, 227 bp, synthetic construct
  source 1..227: mol_type = other DNA
acggacttaaataattgagccttaaagaagaaattctttaagtggatgctctcaaactcagggaaacctaaatctagttatagacaaggcaatcctgagccaagccgaagtagtaattagtaagttaacaatagatgacttacaactaatcggaaggtgcagagactcgacgggagctaccctaacgtcaagacgagggtaaagagagagtccaattctcaaagcca

SEQ ID NO: 3047 - DNA, 228 bp, synthetic construct
  source 1..228: mol_type = other DNA
acggacttaaataattgagccttaaagaagaaattctttaagtggatgctctcaaactcagggaaacctaaatctagttatagacaaggcaatcctgagccaagccgaagtagtaattagtaagttaacaatagatgacttacaactaatcggaaggtgcagagactcgacgggagctaccctaacgtcaagacgagggtaaagagagagtccaattctcaaagccaa

SEQ ID NO: 3048 - DNA, 229 bp, synthetic construct
  source 1..229: mol_type = other DNA
acggacttaaataattgagccttaaagaagaaattctttaagtggatgctctcaaactcagggaaacctaaatctagttatagacaaggcaatcctgagccaagccgaagtagtaattagtaagttaacaatagatgacttacaactaatcggaaggtgcagagactcgacgggagctaccctaacgtcaagacgagggtaaagagagagtccaattctcaaagccaat

SEQ ID NO: 3049 - DNA, 230 bp, synthetic construct
  source 1..230: mol_type = other DNA
acggacttaaataattgagccttaaagaagaaattctttaagtggatgctctcaaactcagggaaacctaaatctagttatagacaaggcaatcctgagccaagccgaagtagtaattagtaagttaacaatagatgacttacaactaatcggaaggtgcagagactcgacgggagctaccctaacgtcaagacgagggtaaagagagagtccaattctcaaagccaata

SEQ ID NO: 3050 - DNA, 239 bp, synthetic construct
  source 1..239: mol_type = other DNA
acggacttaaataattgagccttaaagaagaaattctttaagtggatgctctcaaactcagggaaacctaaatctagttatagacaaggcaatcctgagccaagccgaagtagtaattagtaagttaacaatagatgacttacaactaatcggaaggtgcagagactcgacgggagctaccctaacgtcaagacgagggtaaagagagagtccaattctcaaagccaataggcagtagc

SEQ ID NO: 3051 - DNA, 240 bp, synthetic construct
  source 1..240: mol_type = other DNA
acggacttaaataattgagccttaaagaagaaattctttaagtggatgctctcaaactcagggaaacctaaatctagttatagacaaggcaatcctgagccaagccgaagtagtaattagtaagttaacaatagatgacttacaactaatcggaaggtgcagagactcgacgggagctaccctaacgtcaagacgagggtaaagagagagtccaattctcaaagccaataggcagtagcg

SEQ ID NO: 3052 - DNA, 241 bp, synthetic construct
  source 1..241: mol_type = other DNA
acggacttaaataattgagccttaaagaagaaattctttaagtggatgctctcaaactcagggaaacctaaatctagttatagacaaggcaatcctgagccaagccgaagtagtaattagtaagttaacaatagatgacttacaactaatcggaaggtgcagagactcgacgggagctaccctaacgtcaagacgagggtaaagagagagtccaattctcaaagccaataggcagtagcga

SEQ ID NO: 3053 - DNA, 242 bp, synthetic construct
  source 1..242: mol_type = other DNA
acggacttaaataattgagccttaaagaagaaattctttaagtggatgctctcaaactcagggaaacctaaatctagttatagacaaggcaatcctgagccaagccgaagtagtaattagtaagttaacaatagatgacttacaactaatcggaaggtgcagagactcgacgggagctaccctaacgtcaagacgagggtaaagagagagtccaattctcaaagccaataggcagtagcgaa

SEQ ID NO: 3054 - DNA, 243 bp, synthetic construct
  source 1..243: mol_type = other DNA
acggacttaaataattgagccttaaagaagaaattctttaagtggatgctctcaaactcagggaaacctaaatctagttatagacaaggcaatcctgagccaagccgaagtagtaattagtaagttaacaatagatgacttacaactaatcggaaggtgcagagactcgacgggagctaccctaacgtcaagacgagggtaaagagagagtccaattctcaaagccaataggcagtagcgaaa

SEQ ID NO: 3055 - DNA, 244 bp, synthetic construct
  source 1..244: mol_type = other DNA
acggacttaaataattgagccttaaagaagaaattctttaagtggatgctctcaaactcagggaaacctaaatctagttatagacaaggcaatcctgagccaagccgaagtagtaattagtaagttaacaatagatgacttacaactaatcggaaggtgcagagactcgacgggagctaccctaacgtcaagacgagggtaaagagagagtccaattctcaaagccaataggcagtagcgaaag

SEQ ID NO: 3056 - DNA, 248 bp, synthetic construct
  source 1..248: mol_type = other DNA
acggacttaaataattgagccttaaagaagaaattctttaagtggatgctctcaaactcagggaaacctaaatctagttatagacaaggcaatcctgagccaagccgaagtagtaattagtaagttaacaatagatgacttacaactaatcggaaggtgcagagactcgacgggagctaccctaacgtcaagacgagggtaaagagagagtccaattctcaaagccaataggcagtagcgaaagctgc

SEQ ID NO: 3057 - DNA, 249 bp, synthetic construct
  source 1..249: mol_type = other DNA
acggacttaaataattgagccttaaagaagaaattctttaagtggatgctctcaaactcagggaaacctaaatctagttatagacaaggcaatcctgagccaagccgaagtagtaattagtaagttaacaatagatgacttacaactaatcggaaggtgcagagactcgacgggagctaccctaacgtcaagacgagggtaaagagagagtccaattctcaaagccaataggcagtagcgaaagctgca

SEQ ID NO: 3058 - DNA, 250 bp, synthetic construct
  source 1..250: mol_type = other DNA
acggacttaaataattgagccttaaagaagaaattctttaagtggatgctctcaaactcagggaaacctaaatctagttatagacaaggcaatcctgagccaagccgaagtagtaattagtaagttaacaatagatgacttacaactaatcggaaggtgcagagactcgacgggagctaccctaacgtcaagacgagggtaaagagagagtccaattctcaaagccaataggcagtagcgaaagctgcaa

SEQ ID NO: 3059 - DNA, 231 bp, synthetic construct
  source 1..231: mol_type = other DNA
acggacttaaataattgagccttaaagaagaaattctttaagtggatgctctcaaactcagggaaacctaaatctagttatagacaaggcaatcctgagccaagccgaagtagtaattagtaagttaacaatagatgacttacaactaatcggaaggtgcagagactcgacgggagctaccctaacgtcaagacgagggtaaagagagagtccaattctcaaagccaatag

SEQ ID NO: 3060 - DNA, 233 bp, synthetic construct
  source 1..233: mol_type = other DNA
acggacttaaataattgagccttaaagaagaaattctttaagtggatgctctcaaactcagggaaacctaaatctagttatagacaaggcaatcctgagccaagccgaagtagtaattagtaagttaacaatagatgacttacaactaatcggaaggtgcagagactcgacgggagctaccctaacgtcaagacgagggtaaagagagagtccaattctcaaagccaataggc

SEQ ID NO: 3061 - DNA, 234 bp, synthetic construct
  source 1..234: mol_type = other DNA
acggacttaaataattgagccttaaagaagaaattctttaagtggatgctctcaaactcagggaaacctaaatctagttatagacaaggcaatcctgagccaagccgaagtagtaattagtaagttaacaatagatgacttacaactaatcggaaggtgcagagactcgacgggagctaccctaacgtcaagacgagggtaaagagagagtccaattctcaaagccaataggca

SEQ ID NO: 3062 - DNA, 104 bp, synthetic construct
  source 1..104: mol_type = other DNA
tgcgccgatgaaggtgtagagactagacggcacccacctaaggcaaacgctatggtgaaggcatagtccagggagtggcgaaagtcacacaaaccggaatccgt

SEQ ID NO: 3063 - DNA, 141 bp, synthetic construct
  source 1..141: mol_type = other DNA
ccgggcgtatggcaacgccgagccaagcttcggcgcctgcgccgatgaaggtgtagagactagacggcacccacctaaggcaaacgctatggtgaaggcatagtccagggagtggcgaaagtcacacaaaccggaatccgt

SEQ ID NO: 3064 - DNA, 78 bp, synthetic construct
  source 1..78: mol_type = other DNA
acggcacccacctaaggcaaacgctatggtgaaggcatagtccagggagtggcgaaagtcacacaaaccggaatccgt

SEQ ID NO: 3065 - DNA, 58 bp, synthetic construct
  source 1..58: mol_type = other DNA
acgctatggtgaaggcatagtccagggagtggcgaaagtcacacaaaccggaatccgt

SEQ ID NO: 3066 - DNA, 75 bp, synthetic construct
  source 1..75: mol_type = other DNA
attaaagttatagaattatcagagaatgatatagtccaagccttatggtaacatgagggcacttgaccctggtag

SEQ ID NO: 3067 - DNA, 195 bp, synthetic construct
  source 1..195: mol_type = other DNA
aagatgtaggcaatcctgagctaagctcttagtaataagagaaagtgcaacgactattccgataggaagtagggtcaagtgactcgaaatggggattacccttctagggtagtgatatagtctgaacatatatggaaacatatagaaggataggagtaacgaacctattcgtaacataattgaacttttagttat

SEQ ID NO: 3068 - DNA, 163 bp, synthetic construct
  source 1..163: mol_type = other DNA
taataagagaaagtgcaacgactattccgataggaagtagggtcaagtgactcgaaatggggattacccttctagggtagtgatatagtctgaacatatatggaaacatatagaaggataggagtaacgaacctattcgtaacataattgaacttttagttat

SEQ ID NO: 3069 - DNA, 133 bp, synthetic construct
  source 1..133: mol_type = other DNA
taggaagtagggtcaagtgactcgaaatggggattacccttctagggtagtgatatagtctgaacatatatggaaacatatagaaggataggagtaacgaacctattcgtaacataattgaacttttagttat

SEQ ID NO: 3070 - DNA, 92 bp, synthetic construct
  source 1..92: mol_type = other DNA
ctagggtagtgatatagtctgaacatatatggaaacatatagaaggataggagtaacgaacctattcgtaacataattgaacttttagttat

SEQ ID NO: 3071 - DNA, 92 bp, synthetic construct
  source 1..92: mol_type = other DNA
agttaataaagatgatgaaatagtctgaaccattttgagaaaagtggaaataaaagaaaatcttttatgataacataaattgaacaggctaa

SEQ ID NO: 3072 - DNA, 62 bp, synthetic construct
  source 1..62: mol_type = other DNA
caaagactgatgatatagtccgacactcctagtaataggagaatacagaaaggatgaaatcc

SEQ ID NO: 3073 - DNA, 76 bp, synthetic construct
  source 1..76: mol_type = other DNA
agtcgagggtaaagggagagtccaattctcaaagcctattggcagtagcgaaagctgcgggagaatgaaaatccgt

SEQ ID NO: 3074 - DNA, 76 bp, synthetic construct
  source 1..76: mol_type = other DNA
agccgagggtaaagggagagtccaattctcaaagccaataggcagtagcgaaagctgcgggagaatgaaaatccgt

SEQ ID NO: 3075 - DNA, 89 bp, synthetic construct
  source 1..89: mol_type = other DNA
agccgagggtaaagggagagtccaattctcaaagccgaaggttattaaaacctggcagcagtgaaagctgcgggagaatgaaaatccgt

SEQ ID NO: 3076 - DNA, 79 bp, synthetic construct
  source 1..79: mol_type = other DNA
agctgagggtaaagagagagtccaattctcaaagccagcagatggcagtagcgaaagctgcgggagaatgaaaatccgt

SEQ ID NO: 3077 - DNA, 76 bp, synthetic construct
  source 1..76: mol_type = other DNA
agccgagggtaaagagagagtccaattctcaaagccaattggtagtagcgaaagctacgggagaatgaaaatccgt

SEQ ID NO: 3078 - DNA, 118 bp, synthetic construct
  source 1..118: mol_type = other DNA
gcggactcatatttcgatgtgccttgcgccgggaaaccacgcaagggatggtgtcaaattcggcgaaacctaagcgcccgcccgggcgtatggcaacgccgagccaagcttcggcgcc

SEQ ID NO: 3079 - DNA, 81 bp, synthetic construct
  source 1..81: mol_type = other DNA
gcggactcatatttcgatgtgccttgcgccgggaaaccacgcaagggatggtgtcaaattcggcgaaacctaagcgcccgc

SEQ ID NO: 3080 - DNA, 144 bp, synthetic construct
  source 1..144: mol_type = other DNA
gcggactcatatttcgatgtgccttgcgccgggaaaccacgcaagggatggtgtcaaattcggcgaaacctaagcgcccgcccgggcgtatggcaacgccgagccaagcttcggcgcctgcgccgatgaaggtgtagagactag

SEQ ID NO: 3081 - DNA, 164 bp, synthetic construct
  source 1..164: mol_type = other DNA
gcggactcatatttcgatgtgccttgcgccgggaaaccacgcaagggatggtgtcaaattcggcgaaacctaagcgcccgcccgggcgtatggcaacgccgagccaagcttcggcgcctgcgccgatgaaggtgtagagactagacggcacccacctaaggcaa

SEQ ID NO: 3082 - DNA, 179 bp, synthetic construct
  source 1..179: mol_type = other DNA
aggattagatactacactaagtgtcccccagactggtgacagtctggtgtgcatccagctatatcggtgaaaccccattggggtaataccgagggaagctatattatatatatattaataaatagccccgtagagactatgtaggtaaggagatagaagatgataaaatcaaaatcatc

SEQ ID NO: 3083 - DNA, 84 bp, synthetic construct
  source 1..84: mol_type = other DNA
actactgaaagcataaataattgtgcctttatacagtaatgtatatcgaaaaatcctctaattcagggaacacctaaacaaact

SEQ ID NO: 3084 - DNA, 116 bp, synthetic construct
  source 1..116: mol_type = other DNA
actactgaaagcataaataattgtgcctttatacagtaatgtatatcgaaaaatcctctaattcagggaacacctaaacaaactaagatgtaggcaatcctgagctaagctcttag

SEQ ID NO: 3085 - DNA, 146 bp, synthetic construct
  source 1..146: mol_type = other DNA
actactgaaagcataaataattgtgcctttatacagtaatgtatatcgaaaaatcctctaattcagggaacacctaaacaaactaagatgtaggcaatcctgagctaagctcttagtaataagagaaagtgcaacgactattccga

SEQ ID NO: 3086 - DNA, 187 bp, synthetic construct
  source 1..187: mol_type = other DNA
actactgaaagcataaataattgtgcctttatacagtaatgtatatcgaaaaatcctctaattcagggaacacctaaacaaactaagatgtaggcaatcctgagctaagctcttagtaataagagaaagtgcaacgactattccgataggaagtagggtcaagtgactcgaaatggggattaccctt

SEQ ID NO: 3087 - DNA, 216 bp, synthetic construct
  source 1..216: mol_type = other DNA
cgctagggatttataactgtgagtcctccaatattataaaatgttggtaatatattgggtaaatttcaaagacaacttttctccacgtcaggatatagtgtatttgaagcgaaacttattttagcagtgaaaaagcaaataaggacgttcaacgactaaaaggtgagtattgctaacaataatccttttttttaatgcccaacatctttattaact

SEQ ID NO: 3088 - DNA, 559 bp, synthetic construct
  source 1..559: mol_type = other DNA
gtgggtgcataaactatttcattgtgcacattaaatctggtgaactcggtgaaaccctaatggggcaataccgagccaagccatagggaggatatatgagaggcaagaagttaattcttgaggccactgagactggctgtatcatccctacgtcacacaaacttaatgccgatggttatttcagaaagaaaaccaatggcgtcttagagatgtatcacagaacggtgtggaaggagcataacggagacatacctgatggcttcgagatagaccataagtgtcgcaatagggcttgctgtaatatagagcatttacagatgcttgagggtacagcccacactgttaagaccaatcgtgaacgctacgcagacagaaaggaaacagctagggaatactggctggagactggatgtaccggcctagcactcggtgagaagtttggtgtgtcgttctcttctgcttgtaagtggattagagaatggaaggcgtagagactatccgaaaggagtagggccgagggtgagactccctcgtaacccgaagcgccagacagtcaact

SEQ ID NO: 3089 - DNA, 218 bp, synthetic construct
  source 1..218: mol_type = other DNA
acggacttaagtaattgagccttaaagaagaaattctttaagtggcagctctcaaactcagggaaacctaaatctgttcacagacaaggcaatcctgagccaagccgaaagagtcatgagtgctgagtagtgagtaaaataaaagctcacaactcagaggttgtaactctaagctagtcggaaggtgcagagactcgacgggagctaccctaacgtaa

SEQ ID NO: 3090 - DNA, 165 bp, synthetic construct
  source 1..165: mol_type = other DNA
acggacttaaactgaattgagccttagagaagaaattctttaagtgtcagctctcaaactcagggaaacctaaatctgttgacagacaaggcaatcctgagccaagccgagaactctaagttattcggaaggtgcagagactcgacgggagctaccctaacgtca

SEQ ID NO: 3091 - DNA, 181 bp, synthetic construct
  source 1..181: mol_type = other DNA
acggacttagaaaactgagccttgatcgagaaatctttcaagtggaagctctcaaattcagggaaacctaaatctgtttacagatatggcaatcctgagccaagccgaaacaagtcctgagtgttaaagctcataactcatcggaaggtgcagagactcgacgggagctaccctaacgtta

SEQ ID NO: 3092 - DNA, 188 bp, synthetic construct
  source 1..188: mol_type = other DNA
acggacttaaaaaaattgagccttggcagagaaatctgtcatgcgaacgctctcaaattcagggaaacctaagtctggcaacagatatggcaatcctgagccaagccttaatcaaggaaaaaaacatttttaccttttaccttgaaaggaaggtgcagagactcaacgggagctaccctaacaggtca

SEQ ID NO: 3093 - DNA, 200 bp, synthetic construct
  source 1..200: mol_type = other DNA
acggacttaaagataaattgagccttgaggcgagaaatctctcaagtgtaagctgtcaaattcagggaaacctaaatctgtaaattcagacaaggcaatcctgagccaagcctaggggtattagaaatgagggagtttccccaatctaagatcaatacctaggaaggtgcagagactcgacgggagctaccctaacgtta

SEQ ID NO: 3094 - DNA, 162 bp, synthetic construct
  source 1..162: mol_type = other DNA
gctgcgagccacggacttaaataattgagccttaaagaagaaattctttaagtggatgctctcaaactcagggaaacctaaatctagttatagacaaggcaatcctgagccaagccgaagtagtaattagtaagttaacaacacaaacacaacttatatact

SEQ ID NO: 3095 - DNA, 172 bp, synthetic construct
  source 1..172: mol_type = other DNA
gctgcgagccacggacttaaataattgagccttaaagaagaaattctttaagtggatgctctcaaactcagggaaacctaaatctagttatagacaaggcaatcctgagccaagccgaagtagtaattagtaagttaacaacacaaacacaagagtataagtataatttcag

SEQ ID NO: 3096 - DNA, 182 bp, synthetic construct
  source 1..182: mol_type = other DNA
gctgcgagccacggacttaaataattgagccttaaagaagaaattctttaagtggatgctctcaaactcagggaaacctaaatctagttatagacaaggcaatcctgagccaagccgaagtagtaattagtaagttaacaacacaaacacaagtcatatactgagtataagtataatttcag

SEQ ID NO: 3097 - DNA, 192 bp, synthetic construct
  source 1..192: mol_type = other DNA
gctgcgagccacggacttaaataattgagccttaaagaagaaattctttaagtggatgctctcaaactcagggaaacctaaatctagttatagacaaggcaatcctgagccaagccgaagtagtaattagtaagttaacaacacaaacacaagtcatatactgagtataagtataatttcatattgttgatg

SEQ ID NO: 3098 - DNA, 202 bp, synthetic construct
  source 1..202: mol_type = other DNA
gctgcgagccacggacttaaataattgagccttaaagaagaaattctttaagtggatgctctcaaactcagggaaacctaaatctagttatagacaaggcaatcctgagccaagccgaagtagtaattagtaagttaacaacacaaacacaagcgataatgcttcatatactgagtataagtatagtttcatattgttgatg

SEQ ID NO: 3099 - DNA, 162 bp, synthetic construct
  source 1..162: mol_type = other DNA
gctgcgagccacggacttaaataattgagccttaaagaagaaattctttaagtggatgctctcaaactcagggaaacctaaatctagttatagacaaggcaatcctgagccaagccgaagtagtaattagtaagttaacaaaacaaaaacaagctgacgcta

SEQ ID NO: 3100 - DNA, 172 bp, synthetic construct
  source 1..172: mol_type = other DNA
gctgcgagccacggacttaaataattgagccttaaagaagaaattctttaagtggatgctctcaaactcagggaaacctaaatctagttatagacaaggcaatcctgagccaagccgaagtagtaattagtaagttaacaaaacaaaaacaagctgacgctagtatgagtat

SEQ ID NO: 3101 - DNA, 182 bp, synthetic construct
  source 1..182: mol_type = other DNA
gctgcgagccacggacttaaataattgagccttaaagaagaaattctttaagtggatgctctcaaactcagggaaacctaaatctagttatagacaaggcaatcctgagccaagccgaagtagtaattagtaagttaacaaaacaaaaacaagctgacgctagtatgagtatagcttcacac

SEQ ID NO: 3102 - DNA, 192 bp, synthetic construct
  source 1..192: mol_type = other DNA
gctgcgagccacggacttaaataattgagccttaaagaagaaattctttaagtggatgctctcaaactcagggaaacctaaatctagttatagacaaggcaatcctgagccaagccgaagtagtaattagtaagttaacaaaacaaaaacaagctgacgctagtatgagtatagcttcacactcaggtgagg

SEQ ID NO: 3103 - DNA, 202 bp, synthetic construct
  source 1..202: mol_type = other DNA
gctgcgagccacggacttaaataattgagccttaaagaagaaattctttaagtggatgctctcaaactcagggaaacctaaatctagttatagacaaggcaatcctgagccaagccgaagtagtaattagtaagttaacaaaacaaaaacaagctgacgctagtatgagtatagcttcacactcaggtgaggcatcattcgg

SEQ ID NO: 3104 - DNA, 162 bp, synthetic construct
  source 1..162: mol_type = other DNA
gctgcgagccacggacttaaataattgagccttaaagaagaaattctttaagtggatgctctcaaactcagggaaacctaaatctagttatagacaaggcaatcctgagccaagccgaagtagtaattagtaagttaacaaaacaaaaacaagctcgcaccg

SEQ ID NO: 3105 - DNA, 172 bp, synthetic construct
  source 1..172: mol_type = other DNA
gctgcgagccacggacttaaataattgagccttaaagaagaaattctttaagtggatgctctcaaactcagggaaacctaaatctagttatagacaaggcaatcctgagccaagccgaagtagtaattagtaagttaacaaaacaaaaacaagctcgcactgggtcggagcg

SEQ ID NO: 3106 - DNA, 182 bp, synthetic construct
  source 1..182: mol_type = other DNA
gctgcgagccacggacttaaataattgagccttaaagaagaaattctttaagtggatgctctcaaactcagggaaacctaaatctagttatagacaaggcaatcctgagccaagccgaagtagtaattagtaagttaacaacacaaacacaagtaacttagagagtataagtataatttcag

SEQ ID NO: 3107 - DNA, 182 bp, synthetic construct
  source 1..182: mol_type = other DNA
gctgcgagccacggacttaaataattgagccttaaagaagaaattctttaagtggatgctctcaaactcagggaaacctaaatctagttatagacaaggcaatcctgagccaagccgaagtagtaattagtaagttaacaacacaaacacaagtaacttagatgtaacacacataatttcag

SEQ ID NO: 3108 - DNA, 182 bp, synthetic construct
  source 1..182: mol_type = other DNA
gctgcgagccacggacttaaataattgagccttaaagaagaaattctttaagtggatgctctcaaactcagggaaacctaaatctagttatagacaaggcaatcctgagccaagccgaagtagtaattagtaagttaacaacacaaacacaagtaacttagatgtaacacacaccgatcaac

SEQ ID NO: 3109 - DNA, 182 bp, synthetic construct
  source 1..182: mol_type = other DNA
ctgtttaatcacggacttaaataattgagccttaaagaagaaattctttaagtggatgctctcaaactcagggaaacctaaatctagttatagacaaggcaatcctgagccaagccgaagtagtaattagtaagttaacaacacaaacacaagtcatatactgagtataagtataatttcag

SEQ ID NO: 3110 - DNA, 192 bp, synthetic construct
  source 1..192: mol_type = other DNA
cgtaatttatattgtgaatcacggacttaaataattgagccttaaagaagaaattctttaagtggatgctctcaaactcagggaaacctaaatctagttatagacaaggcaatcctgagccaagccgaagtagtaattagtaagttaacaacacaaacacaagtcatatactgagtataagtataatttcag

SEQ ID NO: 3111 - DNA, 182 bp, synthetic construct
  source 1..182: mol_type = other DNA
gctatgatccacggacttaaataattgagccttaaagaagaaattctttaagtggatgctctcaaactcagggaaacctaaatctagttatagacaaggcaatcctgagccaagccgaagtagtaattagtaagttaacaacacaaacacaagtcatatactgagtataagtataatttcag

SEQ ID NO: 3112 - DNA, 192 bp, synthetic construct
  source 1..192: mol_type = other DNA
cggatattatgctgcgatccacggacttaaataattgagccttaaagaagaaattctttaagtggatgctctcaaactcagggaaacctaaatctagttatagacaaggcaatcctgagccaagccgaagtagtaattagtaagttaacaacacaaacacaagtcatatactgagtataagtataatttcag

SEQ ID NO: 3113 - DNA, 192 bp, synthetic construct
  source 1..192: mol_type = other DNA
cggtaggcgcgctgcgagccacggacttaaataattgagccttaaagaagaaattctttaagtggatgctctcaaactcagggaaacctaaatctagttatagacaaggcaatcctgagccaagccgaagtagtaattagtaagttaacaacacaaacacaagtcatatactgagtataagtataatttcag

SEQ ID NO: 3114 - DNA, 215 bp, synthetic construct
  source 1..215: mol_type = other DNA
gcgctaacgtcgacgccggcaaacggtaggcgcgctgcgagccacggacttaaataattgagccttaaagaagaaattctttaagtggatgctctcaaactcagggaaacctaaatctagttatagacaaggcaatcctgagccaagccgaagtagtaattagtaagttaacaacacaaacacaagtcatatactgagtataagtataatttcag

SEQ ID NO: 3115 - DNA, 215 bp, synthetic construct
  source 1..215: mol_type = other DNA
gcatgtcacttgtatcctcgaaacggatattatgctgcgatccacggacttaaataattgagccttaaagaagaaattctttaagtggatgctctcaaactcagggaaacctaaatctagttatagacaaggcaatcctgagccaagccgaagtagtaattagtaagttaacaacacaaacacaagtcatatactgagtataagtataatttcag

SEQ ID NO: 3116 - DNA, 215 bp, synthetic construct
  source 1..215: mol_type = other DNA
gttagagttatcatttatcgaaacgtaatttagattgtgaatcacggacttaaataattgagccttaaagaagaaattctttaagtggatgctctcaaactcagggaaacctaaatctagttatagacaaggcaatcctgagccaagccgaagtagtaattagtaagttaacaacacaaacacaagtcatatactgagtataagtataatttcag

SEQ ID NO: 3117 - DNA, 152 bp, synthetic construct
  source 1..152: mol_type = other DNA
gctgcgagccacggacttaaataattgagccttaaagaagaaattctttaagtggatgctctcaaactcagggaaacctaaatctagttatagacaaggcaatcctgagccaagccgaagtagtaattagtaagttaacaacacaaacacaa

SEQ ID NO: 3118 - DNA, 157 bp, synthetic construct
  source 1..157: mol_type = other DNA
gctgcgagccacggacttaaataattgagccttaaagaagaaattctttaagtggatgctctcaaactcagggaaacctaaatctagttatagacaaggcaatcctgagccaagccgaagtagtaattagtaagttaacaaaacaaaaacaagcccg

SEQ ID NO: 3119 - DNA, 182 bp, synthetic construct
  source 1..182: mol_type = other DNA
gctgcgagccacggacttaaataattgagccttaaagaagaaattctttaagtggatgctctcaaactcagggaaacctaaatctagttatagacaaggcaatcctgagccaagccgaagtagtaattagtaagttaacaaaacaaaaacaagctcgcactggccggaagctcgtcggagcg

SEQ ID NO: 3120 - DNA, 251 bp, synthetic construct
  source 1..251: mol_type = other DNA
gctgcgagccacggacttaaataattgagccttaaagaagaaattctttaagtggatgctctcaaactcagggaaacctaaatctagttatagacaaggcaatcctgagccaagccgaagtagtaattagtaagttaacaatagatgacttacaactaatcggaaggtgcagagactcgacgggagctaccctaacgtcaagacgagggtaaagagagagtccaattctcaaagccaatacacaaacacaa

SEQ ID NO: 3121 - DNA, 261 bp, synthetic construct
  source 1..261: mol_type = other DNA
gctgcgagccacggacttaaataattgagccttaaagaagaaattctttaagtggatgctctcaaactcagggaaacctaaatctagttatagacaaggcaatcctgagccaagccgaagtagtaattagtaagttaacaatagatgacttacaactaatcggaaggtgcagagactcgacgggagctaccctaacgtcaagacgagggtaaagagagagtccaattctcaaagccaatacacaaacacaacttatatact

SEQ ID NO: 3122 - DNA, 271 bp, synthetic construct
  source 1..271: mol_type = other DNA
gctgcgagccacggacttaaataattgagccttaaagaagaaattctttaagtggatgctctcaaactcagggaaacctaaatctagttatagacaaggcaatcctgagccaagccgaagtagtaattagtaagttaacaatagatgacttacaactaatcggaaggtgcagagactcgacgggagctaccctaacgtcaagacgagggtaaagagagagtccaattctcaaagccaatacacaaacacaagagtataagtataatttcag

SEQ ID NO: 3123 - DNA, 281 bp, synthetic construct
  source 1..281: mol_type = other DNA
gctgcgagccacggacttaaataattgagccttaaagaagaaattctttaagtggatgctctcaaactcagggaaacctaaatctagttatagacaaggcaatcctgagccaagccgaagtagtaattagtaagttaacaatagatgacttacaactaatcggaaggtgcagagactcgacgggagctaccctaacgtcaagacgagggtaaagagagagtccaattctcaaagccaatacacaaacacaagtcatatactgagtataagtataatttcag

SEQ ID NO: 3124 - DNA, 261 bp, synthetic construct
  source 1..261: mol_type = other DNA
gctgcgagccacggacttaaataattgagccttaaagaagaaattctttaagtggatgctctcaaactcagggaaacctaaatctagttatagacaaggcaatcctgagccaagccgaagtagtaattagtaagttaacaatagatgacttacaactaatcggaaggtgcagagactcgacgggagctaccctaacgtcaagacgagggtaaagagagagtccaattctcaaagccaataaacaaaaacaagctgacgcta

SEQ ID NO: 3125 - DNA, 271 bp, synthetic construct
  source 1..271: mol_type = other DNA
gctgcgagccacggacttaaataattgagccttaaagaagaaattctttaagtggatgctctcaaactcagggaaacctaaatctagttatagacaaggcaatcctgagccaagccgaagtagtaattagtaagttaacaatagatgacttacaactaatcggaaggtgcagagactcgacgggagctaccctaacgtcaagacgagggtaaagagagagtccaattctcaaagccaataaacaaaaacaagctgacgctagtatgagtat

SEQ ID NO: 3126 - DNA, 281 bp, synthetic construct
  source 1..281: mol_type = other DNA
gctgcgagccacggacttaaataattgagccttaaagaagaaattctttaagtggatgctctcaaactcagggaaacctaaatctagttatagacaaggcaatcctgagccaagccgaagtagtaattagtaagttaacaatagatgacttacaactaatcggaaggtgcagagactcgacgggagctaccctaacgtcaagacgagggtaaagagagagtccaattctcaaagccaataaacaaaaacaagctgacgctagtatgagtatagcttcacac

SEQ ID NO: 3127 - DNA, 261 bp, synthetic construct
  source 1..261: mol_type = other DNA
gctgcgagccacggacttaaataattgagccttaaagaagaaattctttaagtggatgctctcaaactcagggaaacctaaatctagttatagacaaggcaatcctgagccaagccgaagtagtaattagtaagttaacaatagatgacttacaactaatcggaaggtgcagagactcgacgggagctaccctaacgtcaagacgagggtaaagagagagtccaattctcaaagccaataaacaaaaacaagctcgcaccg

SEQ ID NO: 3128 - DNA, 271 bp, synthetic construct
  source 1..271: mol_type = other DNA
gctgcgagccacggacttaaataattgagccttaaagaagaaattctttaagtggatgctctcaaactcagggaaacctaaatctagttatagacaaggcaatcctgagccaagccgaagtagtaattagtaagttaacaatagatgacttacaactaatcggaaggtgcagagactcgacgggagctaccctaacgtcaagacgagggtaaagagagagtccaattctcaaagccaataaacaaaaacaagctcgcactgggtcggagcg

SEQ ID NO: 3129 - DNA, 281 bp, synthetic construct
  source 1..281: mol_type = other DNA
gctgcgagccacggacttaaataattgagccttaaagaagaaattctttaagtggatgctctcaaactcagggaaacctaaatctagttatagacaaggcaatcctgagccaagccgaagtagtaattagtaagttaacaatagatgacttacaactaatcggaaggtgcagagactcgacgggagctaccctaacgtcaagacgagggtaaagagagagtccaattctcaaagccaataaacaaaaacaagctcgcactggccggaagctcgtcggagcg

SEQ ID NO: 3130 - DNA, 210 bp, synthetic construct
  source 1..210: mol_type = other DNA
gctgcgagccacggacttaaataattgagccttaaagaagaaattctttaagtggatgctctcaaactcagggaaacctaaatctagttatagacaaggcaatcctgagccaagccgaagtagtaattagtaagttaacaatagatgacttacaactaatcggaaggtgcagagactcgacgggagctaccctaacgtccacaaacacaa

SEQ ID NO: 3131 - DNA, 220 bp, synthetic construct
  source 1..220: mol_type = other DNA
gctgcgagccacggacttaaataattgagccttaaagaagaaattctttaagtggatgctctcaaactcagggaaacctaaatctagttatagacaaggcaatcctgagccaagccgaagtagtaattagtaagttaacaatagatgacttacaactaatcggaaggtgcagagactcgacgggagctaccctaacgtccacaaacacaacttatatact

SEQ ID NO: 3132 - DNA, 230 bp, synthetic construct
  source 1..230: mol_type = other DNA
gctgcgagccacggacttaaataattgagccttaaagaagaaattctttaagtggatgctctcaaactcagggaaacctaaatctagttatagacaaggcaatcctgagccaagccgaagtagtaattagtaagttaacaatagatgacttacaactaatcggaaggtgcagagactcgacgggagctaccctaacgtccacaaacacaagagtataagtataatttcag

SEQ ID NO: 3133 - DNA, 240 bp, synthetic construct
  source 1..240: mol_type = other DNA
gctgcgagccacggacttaaataattgagccttaaagaagaaattctttaagtggatgctctcaaactcagggaaacctaaatctagttatagacaaggcaatcctgagccaagccgaagtagtaattagtaagttaacaatagatgacttacaactaatcggaaggtgcagagactcgacgggagctaccctaacgtccacaaacacaagtcatatactgagtataagtataatttcag

SEQ ID NO: 3134 - DNA, 220 bp, synthetic construct
  source 1..220: mol_type = other DNA
gctgcgagccacggacttaaataattgagccttaaagaagaaattctttaagtggatgctctcaaactcagggaaacctaaatctagttatagacaaggcaatcctgagccaagccgaagtagtaattagtaagttaacaatagatgacttacaactaatcggaaggtgcagagactcgacgggagctaccctaacgtcaacaaaaacaagctgacgcta

SEQ ID NO: 3135 - DNA, 230 bp, synthetic construct
  source 1..230: mol_type = other DNA
gctgcgagccacggacttaaataattgagccttaaagaagaaattctttaagtggatgctctcaaactcagggaaacctaaatctagttatagacaaggcaatcctgagccaagccgaagtagtaattagtaagttaacaatagatgacttacaactaatcggaaggtgcagagactcgacgggagctaccctaacgtcaacaaaaacaagctgacgctagtatgagtat

SEQ ID NO: 3136 - DNA, 240 bp, synthetic construct
  source 1..240: mol_type = other DNA
gctgcgagccacggacttaaataattgagccttaaagaagaaattctttaagtggatgctctcaaactcagggaaacctaaatctagttatagacaaggcaatcctgagccaagccgaagtagtaattagtaagttaacaatagatgacttacaactaatcggaaggtgcagagactcgacgggagctaccctaacgtcaacaaaaacaagctgacgctagtatgagtatagcttcacac

SEQ ID NO: 3137 - DNA, 220 bp, synthetic construct
  source 1..220: mol_type = other DNA
gctgcgagccacggacttaaataattgagccttaaagaagaaattctttaagtggatgctctcaaactcagggaaacctaaatctagttatagacaaggcaatcctgagccaagccgaagtagtaattagtaagttaacaatagatgacttacaactaatcggaaggtgcagagactcgacgggagctaccctaacgtcaacaaaaacaagctcgcaccg

SEQ ID NO: 3138 - DNA, 230 bp, synthetic construct
  source 1..230: mol_type = other DNA
gctgcgagccacggacttaaataattgagccttaaagaagaaattctttaagtggatgctctcaaactcagggaaacctaaatctagttatagacaaggcaatcctgagccaagccgaagtagtaattagtaagttaacaatagatgacttacaactaatcggaaggtgcagagactcgacgggagctaccctaacgtcaacaaaaacaagctcgcactgggtcggagcg

SEQ ID NO: 3139 - DNA, 240 bp, synthetic construct
  source 1..240: mol_type = other DNA
gctgcgagccacggacttaaataattgagccttaaagaagaaattctttaagtggatgctctcaaactcagggaaacctaaatctagttatagacaaggcaatcctgagccaagccgaagtagtaattagtaagttaacaatagatgacttacaactaatcggaaggtgcagagactcgacgggagctaccctaacgtcaacaaaaacaagctcgcactggccggaagctcgtcggagcg

SEQ ID NO: 3140 - DNA, 172 bp, synthetic construct
  source 1..172: mol_type = other DNA
acggacttaaataattgagccttaaagaagaaattctttaagtggatgctctcaaactcagggaaacctaaatctagttatagacaaggcaatcctgagccaagccgaagtagtaattagtaagttaacaacacaaacacaagtcatatactgagtataagtataatttcag

SEQ ID NO: 3141 - DNA, 271 bp, synthetic construct
  source 1..271: mol_type = other DNA
acggacttaaataattgagccttaaagaagaaattctttaagtggatgctctcaaactcagggaaacctaaatctagttatagacaaggcaatcctgagccaagccgaagtagtaattagtaagttaacaatagatgacttacaactaatcggaaggtgcagagactcgacgggagctaccctaacgtcaagacgagggtaaagagagagtccaattctcaaagccaatacacaaacacaagtcatatactgagtataagtataatttcag

SEQ ID NO: 3142 - DNA, 281 bp, synthetic construct
  source 1..281: mol_type = other DNA
ctgtttaatcacggacttaaataattgagccttaaagaagaaattctttaagtggatgctctcaaactcagggaaacctaaatctagttatagacaaggcaatcctgagccaagccgaagtagtaattagtaagttaacaatagatgacttacaactaatcggaaggtgcagagactcgacgggagctaccctaacgtcaagacgagggtaaagagagagtccaattctcaaagccaatacacaaacacaagtcatatactgagtataagtataatttcag

SEQ ID NO: 3143 - DNA, 291 bp, synthetic construct
  source 1..291: mol_type = other DNA
cgtaatttatattgtgaatcacggacttaaataattgagccttaaagaagaaattctttaagtggatgctctcaaactcagggaaacctaaatctagttatagacaaggcaatcctgagccaagccgaagtagtaattagtaagttaacaatagatgacttacaactaatcggaaggtgcagagactcgacgggagctaccctaacgtcaagacgagggtaaagagagagtccaattctcaaagccaatacacaaacacaagtcatatactgagtataagtataatttcag

SEQ ID NO: 3144 - DNA, 281 bp, synthetic construct
  source 1..281: mol_type = other DNA
gctatgatccacggacttaaataattgagccttaaagaagaaattctttaagtggatgctctcaaactcagggaaacctaaatctagttatagacaaggcaatcctgagccaagccgaagtagtaattagtaagttaacaatagatgacttacaactaatcggaaggtgcagagactcgacgggagctaccctaacgtcaagacgagggtaaagagagagtccaattctcaaagccaatacacaaacacaagtcatatactgagtataagtataatttcag

SEQ ID NO: 3145 - DNA, 291 bp, synthetic construct
  source 1..291: mol_type = other DNA
cggatattatgctgcgatccacggacttaaataattgagccttaaagaagaaattctttaagtggatgctctcaaactcagggaaacctaaatctagttatagacaaggcaatcctgagccaagccgaagtagtaattagtaagttaacaatagatgacttacaactaatcggaaggtgcagagactcgacgggagctaccctaacgtcaagacgagggtaaagagagagtccaattctcaaagccaatacacaaacacaagtcatatactgagtataagtataatttcag

SEQ ID NO: 3146 - DNA, 291 bp, synthetic construct
  source 1..291: mol_type = other DNA
cggtaggcgcgctgcgagccacggacttaaataattgagccttaaagaagaaattctttaagtggatgctctcaaactcagggaaacctaaatctagttatagacaaggcaatcctgagccaagccgaagtagtaattagtaagttaacaatagatgacttacaactaatcggaaggtgcagagactcgacgggagctaccctaacgtcaagacgagggtaaagagagagtccaattctcaaagccaatacacaaacacaagtcatatactgagtataagtataatttcag

SEQ ID NO: 3147 - DNA, 230 bp, synthetic construct
  source 1..230: mol_type = other DNA
acggacttaaataattgagccttaaagaagaaattctttaagtggatgctctcaaactcagggaaacctaaatctagttatagacaaggcaatcctgagccaagccgaagtagtaattagtaagttaacaatagatgacttacaactaatcggaaggtgcagagactcgacgggagctaccctaacgtccacaaacacaagtcatatactgagtataagtataatttcag

SEQ ID NO: 3148 - DNA, 240 bp, synthetic construct
  source 1..240: mol_type = other DNA
ctgtttaatcacggacttaaataattgagccttaaagaagaaattctttaagtggatgctctcaaactcagggaaacctaaatctagttatagacaaggcaatcctgagccaagccgaagtagtaattagtaagttaacaatagatgacttacaactaatcggaaggtgcagagactcgacgggagctaccctaacgtccacaaacacaagtcatatactgagtataagtataatttcag

SEQ ID NO: 3149 - DNA, 250 bp, synthetic construct
  source 1..250: mol_type = other DNA
cgtaatttatattgtgaatcacggacttaaataattgagccttaaagaagaaattctttaagtggatgctctcaaactcagggaaacctaaatctagttatagacaaggcaatcctgagccaagccgaagtagtaattagtaagttaacaatagatgacttacaactaatcggaaggtgcagagactcgacgggagctaccctaacgtccacaaacacaagtcatatactgagtataagtataatttcag

SEQ ID NO: 3150 - DNA, 240 bp, synthetic construct
  source 1..240: mol_type = other DNA
gctatgatccacggacttaaataattgagccttaaagaagaaattctttaagtggatgctctcaaactcagggaaacctaaatctagttatagacaaggcaatcctgagccaagccgaagtagtaattagtaagttaacaatagatgacttacaactaatcggaaggtgcagagactcgacgggagctaccctaacgtccacaaacacaagtcatatactgagtataagtataatttcag

SEQ ID NO: 3151 - DNA, 250 bp, synthetic construct
  source 1..250: mol_type = other DNA
cggatattatgctgcgatccacggacttaaataattgagccttaaagaagaaattctttaagtggatgctctcaaactcagggaaacctaaatctagttatagacaaggcaatcctgagccaagccgaagtagtaattagtaagttaacaatagatgacttacaactaatcggaaggtgcagagactcgacgggagctaccctaacgtccacaaacacaagtcatatactgagtataagtataatttcag

SEQ ID NO: 3152 - DNA, 250 bp, synthetic construct
  source 1..250: mol_type = other DNA
cggtaggcgcgctgcgagccacggacttaaataattgagccttaaagaagaaattctttaagtggatgctctcaaactcagggaaacctaaatctagttatagacaaggcaatcctgagccaagccgaagtagtaattagtaagttaacaatagatgacttacaactaatcggaaggtgcagagactcgacgggagctaccctaacgtccacaaacacaagtcatatactgagtataagtataatttcag

SEQ ID NO: 3153 - DNA, 1137 bp, synthetic construct
  source 1..1137: mol_type = other DNA
atgctgctgctggtcacatctctgctgctgtgcgagctgccccatcctgcctttctgctgatccccgacatccagatgacccagaccacaagcagcctgtctgccagcctgggcgatagagtgaccatcagctgtagagccagccaggacatcagcaagtacctgaactggtatcagcaaaagcccgacggcaccgtgaagctgctgatctaccacaccagcagactgcacagcggcgtgccaagcagattttctggcagcggctctggcaccgactacagcctgacaatcagcaacctggaacaagaggatatcgctacctacttctgccagcaaggcaacaccctgccttacacctttggcggaggcaccaagctggaaatcaccggctctacaagcggcagcggcaaacctggatctggcgagggatctaccaagggcgaagtgaaactgcaagagtctggccctggactggtggccccatctcagtctctgagcgtgacctgtacagtcagcggagtgtccctgcctgattacggcgtgtcctggatcagacagcctcctcggaaaggcctggaatggctgggagtgatctggggcagcgagacaacctactacaacagcgccctgaagtcccggctgaccatcatcaaggacaactccaagagccaggtgttcctgaagatgaacagcctgcagaccgacgacaccgccatctactattgcgccaagcactactactacggcggcagctacgccatggattattggggccagggcaccagcgtgaccgtttcttctgccgccgctatcgaagtgatgtaccctcctccttacctggacaacgagaagtccaacggcaccatcatccacgtgaagggcaagcacctgtgtccttctccactgttccccggacctagcaagcctttctgggtgctcgttgttgttggcggcgtgctggcctgttacagcctgctggttaccgtggccttcatcatcttttgggtcaagagaggccggaagaaacttctttatatattcaagcagccctttatgcgacccgttcagactacccaagaggaagatggatgcagttgccgctttccagaagaggaggagggcgggtgcgaactgtaa

SEQ ID NO: 3154 - DNA, 1134 bp, synthetic construct
  source 1..1134: mol_type = other DNA
atgctgctgctggtcacatctctgctgctgtgcgagctgccccatcctgcctttctgctgatccccgacatccagatgacccagaccacaagcagcctgtctgccagcctgggcgatagagtgaccatcagctgtagagccagccaggacatcagcaagtacctgaactggtatcagcaaaagcccgacggcaccgtgaagctgctgatctaccacaccagcagactgcacagcggcgtgccaagcagattttctggcagcggctctggcaccgactacagcctgacaatcagcaacctggaacaagaggatatcgctacctacttctgccagcaaggcaacaccctgccttacacctttggcggaggcaccaagctggaaatcaccggctctacaagcggcagcggcaaacctggatctggcgagggatctaccaagggcgaagtgaaactgcaagagtctggccctggactggtggccccatctcagtctctgagcgtgacctgtacagtcagcggagtgtccctgcctgattacggcgtgtcctggatcagacagcctcctcggaaaggcctggaatggctgggagtgatctggggcagcgagacaacctactacaacagcgccctgaagtcccggctgaccatcatcaaggacaactccaagagccaggtgttcctgaagatgaacagcctgcagaccgacgacaccgccatctactattgcgccaagcactactactacggcggcagctacgccatggattattggggccagggcaccagcgtgaccgtttcttctgccgccgctatcgaagtgatgtaccctcctccttacctggacaacgagaagtccaacggcaccatcatccacgtgaagggcaagcacctgtgtccttctccactgttccccggacctagcaagcctttctgggtgctcgttgttgttggcggcgtgctggcctgttacagcctgctggttaccgtggccttcatcatcttttgggtccgaagcaagcggagccggctgctgcactccgactacatgaacatgacccctagacggcccggaccaaccagaaagcactaccagccttacgctcctcctagagacttcgccgcctaccggtcctaa

SEQ ID NO: 3155 - DNA, 1470 bp, synthetic construct
  source 1..1470: mol_type = other DNA
atgctgctgctggtcacatctctgctgctgtgcgagctgccccatcctgcctttctgctgatccccgacatccagatgacccagaccacaagcagcctgtctgccagcctgggcgatagagtgaccatcagctgtagagccagccaggacatcagcaagtacctgaactggtatcagcaaaagcccgacggcaccgtgaagctgctgatctaccacaccagcagactgcacagcggcgtgccaagcagattttctggcagcggctctggcaccgactacagcctgacaatcagcaacctggaacaagaggatatcgctacctacttctgccagcaaggcaacaccctgccttacacctttggcggaggcaccaagctggaaatcaccggctctacaagcggcagcggcaaacctggatctggcgagggatctaccaagggcgaagtgaaactgcaagagtctggccctggactggtggccccatctcagtctctgagcgtgacctgtacagtcagcggagtgtccctgcctgattacggcgtgtcctggatcagacagcctcctcggaaaggcctggaatggctgggagtgatctggggcagcgagacaacctactacaacagcgccctgaagtcccggctgaccatcatcaaggacaactccaagagccaggtgttcctgaagatgaacagcctgcagaccgacgacaccgccatctactattgcgccaagcactactactacggcggcagctacgccatggattattggggccagggcaccagcgtgaccgtttcttctgccgccgctatcgaagtgatgtaccctcctccttacctggacaacgagaagtccaacggcaccatcatccacgtgaagggcaagcacctgtgtccttctccactgttccccggacctagcaagcctttctgggtgctcgttgttgttggcggcgtgctggcctgttacagcctgctggttaccgtggccttcatcatcttttgggtccgaagcaagcggagccggctgctgcactccgactacatgaacatgacccctagacggcccggaccaaccagaaagcactaccagccttacgctcctcctagagacttcgccgcctaccggtccagagtgaagttcagcagatccgccgatgctcccgcctatcagcagggccaaaaccagctgtacaacgagctgaacctggggagaagagaagagtacgacgtgctggacaagcggagaggcagagatcctgaaatgggcggcaagcccagacggaagaatcctcaagagggcctgtataatgagctgcagaaagacaagatggccgaggcctacagcgagatcggaatgaagggcgagcgcagaagaggcaagggacacgatggactgtaccagggactgagcaccgccaccaaggatacctatgacgccctgcacatgcaggccctgcctccaagataa

SEQ ID NO: 3156 - DNA, 1347 bp, synthetic construct
  source 1..1347: mol_type = other DNA
atgctgctgctggtcacatctctgctgctgtgcgagctgccccatcctgcctttctgctgatccccgacatccagatgacccagaccacaagcagcctgtctgccagcctgggcgatagagtgaccatcagctgtagagccagccaggacatcagcaagtacctgaactggtatcagcaaaagcccgacggcaccgtgaagctgctgatctaccacaccagcagactgcacagcggcgtgccaagcagattttctggcagcggctctggcaccgactacagcctgacaatcagcaacctggaacaagaggatatcgctacctacttctgccagcaaggcaacaccctgccttacacctttggcggaggcaccaagctggaaatcaccggctctacaagcggcagcggcaaacctggatctggcgagggatctaccaagggcgaagtgaaactgcaagagtctggccctggactggtggccccatctcagtctctgagcgtgacctgtacagtcagcggagtgtccctgcctgattacggcgtgtcctggatcagacagcctcctcggaaaggcctggaatggctgggagtgatctggggcagcgagacaacctactacaacagcgccctgaagtcccggctgaccatcatcaaggacaactccaagagccaggtgttcctgaagatgaacagcctgcagaccgacgacaccgccatctactattgcgccaagcactactactacggcggcagctacgccatggattattggggccagggcaccagcgtgaccgtttcttctgccgccgctatcgaagtgatgtaccctcctccttacctggacaacgagaagtccaacggcaccatcatccacgtgaagggcaagcacctgtgtccttctccactgttccccggacctagcaagcctttctgggtgctcgttgttgttggcggcgtgctggcctgttacagcctgctggttaccgtggccttcatcatcttttgggtcagagtgaagttcagcagatccgccgatgctcccgcctatcagcagggccaaaaccagctgtacaacgagctgaacctggggagaagagaagagtacgacgtgctggacaagcggagaggcagagatcctgaaatgggcggcaagcccagacggaagaatcctcaagagggcctgtataatgagctgcagaaagacaagatggccgaggcctacagcgagatcggaatgaagggcgagcgcagaagaggcaagggacacgatggactgtaccagggactgagcaccgccaccaaggatacctatgacgccctgcacatgcaggccctgcctccaagataa

SEQ ID NO: 3157 - DNA, 1461 bp, synthetic construct
  source 1..1461: mol_type = other DNA
atggctctcccggtcacagcccttctcctgcccctggcactcttgctgcatgcggcacgacccgacatccagatgacccagaccacaagcagcctgtctgccagcctgggcgatagagtgaccatcagctgtagagccagccaggacatcagcaagtacctgaactggtatcagcaaaagcccgacggcaccgtgaagctgctgatctaccacaccagcagactgcacagcggcgtgccaagcagattttctggcagcggctctggcaccgactacagcctgacaatcagcaacctggaacaagaggatatcgctacctacttctgccagcaaggcaacaccctgccttacacctttggcggaggcaccaagctggaaatcaccggtggaggtggttctggcggagggggatctggtggaggcggttcagaagtgaaactgcaagagtctggccctggactggtggccccatctcagtctctgagcgtgacctgtacagtcagcggagtgtccctgcctgattacggcgtgtcctggatcagacagcctcctcggaaaggcctggaatggctgggagtgatctggggcagcgagacaacctactacaacagcgccctgaagtcccggctgaccatcatcaaggacaactccaagagccaggtgttcctgaagatgaacagcctgcagaccgacgacaccgccatctactattgcgccaagcactactactacggcggcagctacgccatggattattggggccagggcaccagcgtgaccgtttcttctaccacaacgcccgccccgcgaccgcctactcccgctcccacaattgcatcacaacccctgtctttgagacccgaagcttgtcgaccagctgccggtggcgcggttcacacgcgggggctcgatttcgcctgtgatatatatatatgggccccattggctggaacatgcggagtattgcttctgagcctggtgattaccctctactgtaagagaggccggaagaaacttctttatatattcaagcagccctttatgcgacccgttcagactacccaagaggaagatggatgcagttgccgctttccagaagaggaggagggcgggtgcgaactgagagtgaagttcagcagatccgccgatgctcccgcctatcagcagggccaaaaccagctgtacaacgagctgaacctggggagaagagaagagtacgacgtgctggacaagcggagaggcagagatcctgaaatgggcggcaagcccagacggaagaatcctcaagagggcctgtataatgagctgcagaaagacaagatggccgaggcctacagcgagatcggaatgaagggcgagcgcagaagaggcaagggacacgatggactgtaccagggactgagcaccgccaccaaggatacctatgacgccctgcacatgcaggccctgcctccaagataa

SEQ ID NO: 3158 - DNA, 1461 bp, synthetic construct
  source 1..1461: mol_type = other DNA
atggctctcccggtcacagcccttctcctgcccctggcactcttgctgcatgcggcacgacccgacatccagatgacccagaccacaagcagcctgtctgccagcctgggcgatagagtgaccatcagctgtagagccagccaggacatcagcaagtacctgaactggtatcagcaaaagcccgacggcaccgtgaagctgctgatctaccacaccagcagactgcacagcggcgtgccaagcagattttctggcagcggctctggcaccgactacagcctgacaatcagcaacctggaacaagaggatatcgctacctacttctgccagcaaggcaacaccctgccttacacctttggcggaggcaccaagctggaaatcaccggtggaggtggttctggcggagggggatctggtggaggcggttcagaagtgaaactgcaagagtctggccctggactggtggccccatctcagtctctgagcgtgacctgtacagtcagcggagtgtccctgcctgattacggcgtgtcctggatcagacagcctcctcggaaaggcctggaatggctgggagtgatctggggcagcgagacaacctactacaacagcgccctgaagtcccggctgaccatcatcaaggacaactccaagagccaggtgttcctgaagatgaacagcctgcagaccgacgacaccgccatctactattgcgccaagcactactactacggcggcagctacgccatggattattggggccagggcaccagcgtgaccgtttcttctaccacaacgcccgccccgcgaccgcctactcccgctcccacaattgcatcacaacccctgtctttgagacccgaagcttgtcgaccagctgccggtggcgcggttcacacgcgggggctcgatttcgcctgtgatatatatatatgggccccattggctggaacatgcggagtattgcttctgagcctggtgattaccctctactgtaagagaggccggaagaaacttctttatatattcaagcagccctttatgcgacccgttcagactacccaagaggaagatggatgcagttgccgctttccagaagaggaggagggcgggtgcgaactgagagtgaagttcagcagatccgccgatgctcccgcctataagcagggccaaaaccagctgtacaacgagctgaacctggggagaagagaagagtacgacgtgctggacaagcggagaggcagagatcctgaaatgggcggcaagcccagacggaagaatcctcaagagggcctgtataatgagctgcagaaagacaagatggccgaggcctacagcgagatcggaatgaagggcgagcgcagaagaggcaagggacacgatggactgtaccagggactgagcaccgccaccaaggatacctatgacgccctgcacatgcaggccctgcctccaagataa

SEQ ID NO: 3159 - DNA, 1452 bp, synthetic construct
  source 1..1452: mol_type = other DNA
atgctgctgctggtcacatctctgctgctgtgcgagctgccccatcctgcctttctgctgatcccccaggttcaactccagcagtctggtcccggcctcgttaaaccaagccagactttgtctcttacctgtgctatcagtggcgatagcgtgtctagtaattcagccgcatggaactggatccgacaatcaccgagtaggggacttgaatggctgggtagaacctattaccggtccaaatggtacaatgactatgcagtgtctgtaaaaagcaggatcacgatcaaccctgatacgtctaaaaaccagttttctctgcaacttaatagtgtgacccctgaagacaccgctgtgtattactgtgcacgggaggttaccggtgatcttgaagatgcttttgatatatggggccaaggtacgatggtcacggtgtctagtgggggaggcggcagcgacatacagatgacgcagagcccatccagtctctccgcgtctgttggtgacagagtgactattacatgtagggcgtctcagaccatttggtcttacctcaattggtatcaacagcgaccaggcaaagcaccgaacttgctcatttacgctgccagctcactccaaagtggtgtgccgtccagatttagtggtaggggcagtggcactgatttcactctgactatttcaagtcttcaagctgaggattttgccacatactactgccagcaaagttactcaatacctcagacttttggacaggggacaaaattggagattaaatccggaaccacaacgcccgccccgcgaccgcctactcccgctcccacaattgcatcacaacccctgtctttgagacccgaagcttgtcgaccagctgccggtggcgcggttcacacgcgggggctcgatttcgcctgtgatatatatatatgggccccattggctggaacatgcggagtattgcttctgagcctggtgattaccctctactgtaagagaggccggaagaaacttctttatatattcaagcagccctttatgcgacccgttcagactacccaagaggaagatggatgcagttgccgctttccagaagaggaggagggcgggtgcgaactgagagtgaagttcagcagatccgccgatgctcccgcctataagcagggccaaaaccagctgtacaacgagctgaacctggggagaagagaagagtacgacgtgctggacaagcggagaggcagagatcctgaaatgggcggcaagcccagacggaagaatcctcaagagggcctgtataatgagctgcagaaagacaagatggccgaggcctacagcgagatcggaatgaagggcgagcgcagaagaggcaagggacacgatggactgtaccagggactgagcaccgccaccaaggatacctatgacgccctgcacatgcaggccctgcctccaagataa

SEQ ID NO: 3160 - DNA, 2202 bp, synthetic construct
  source 1..2202: mol_type = other DNA
atgctgctgctggtcacatctctgctgctgtgcgagctgccccatcctgcctttctgctgatccccgacatccagatgacccagaccacaagcagcctgtctgccagcctgggcgatagagtgaccatcagctgtagagccagccaggacatcagcaagtacctgaactggtatcagcaaaagcccgacggcaccgtgaagctgctgatctaccacaccagcagactgcacagcggcgtgccaagcagattttctggcagcggctctggcaccgactacagcctgacaatcagcaacctggaacaagaggatatcgctacctacttctgccagcaaggcaacaccctgccttacacctttggcggaggcaccaagctggaaatcaccggcggcggaggatcccaggttcaactccagcagtctggtcccggcctcgttaaaccaagccagactttgtctcttacctgtgctatcagtggcgatagcgtgtctagtaattcagccgcatggaactggatccgacaatcaccgagtaggggacttgaatggctgggtagaacctattaccggtccaaatggtacaatgactatgcagtgtctgtaaaaagcaggatcacgatcaaccctgatacgtctaaaaaccagttttctctgcaacttaatagtgtgacccctgaagacaccgctgtgtattactgtgcacgggaggttaccggtgatcttgaagatgcttttgatatatggggccaaggtacgatggtcacggtgtctagtggctctacaagcggcagcggcaaacctggatctggcgagggatctaccaagggcgacatacagatgacgcagagcccatccagtctctccgcgtctgttggtgacagagtgactattacatgtagggcgtctcagaccatttggtcttacctcaattggtatcaacagcgaccaggcaaagcaccgaacttgctcatttacgctgccagctcactccaaagtggtgtgccgtccagatttagtggtaggggcagtggcactgatttcactctgactatttcaagtcttcaagctgaggattttgccacatactactgccagcaaagttactcaatacctcagacttttggacaggggacaaaattggagattaaagggggaggcggcagcgaagtgaaactgcaagagtctggccctggactggtggccccatctcagtctctgagcgtgacctgtacagtcagcggagtgtccctgcctgattacggcgtgtcctggatcagacagcctcctcggaaaggcctggaatggctgggagtgatctggggcagcgagacaacctactacaacagcgccctgaagtcccggctgaccatcatcaaggacaactccaagagccaggtgttcctgaagatgaacagcctgcagaccgacgacaccgccatctactattgcgccaagcactactactacggcggcagctacgccatggattattggggccagggcaccagcgtgaccgtttcttcttccggaaccacaacgcccgccccgcgaccgcctactcccgctcccacaattgcatcacaacccctgtctttgagacccgaagcttgtcgaccagctgccggtggcgcggttcacacgcgggggctcgatttcgcctgtgatatatatatatgggccccattggctggaacatgcggagtattgcttctgagcctggtgattaccctctactgtaagagaggccggaagaaacttctttatatattcaagcagccctttatgcgacccgttcagactacccaagaggaagatggatgcagttgccgctttccagaagaggaggagggcgggtgcgaactgagagtgaagttcagcagatccgccgatgctcccgcctataagcagggccaaaaccagctgtacaacgagctgaacctggggagaagagaagagtacgacgtgctggacaagcggagaggcagagatcctgaaatgggcggcaagcccagacggaagaatcctcaagagggcctgtataatgagctgcagaaagacaagatggccgaggcctacagcgagatcggaatgaagggcgagcgcagaagaggcaagggacacgatggactgtaccagggactgagcaccgccaccaaggatacctatgacgccctgcacatgcaggccctgcctccaagataa

SEQ ID NO: 3161 - DNA, 2262 bp, synthetic construct
  source 1..2262: mol_type = other DNA
atgctgctgctggtcacatctctgctgctgtgcgagctgccccatcctgcctttctgctgatcccccaggttcaactccagcagtctggtcccggcctcgttaaaccaagccagactttgtctcttacctgtgctatcagtggcgatagcgtgtctagtaattcagccgcatggaactggatccgacaatcaccgagtaggggacttgaatggctgggtagaacctattaccggtccaaatggtacaatgactatgcagtgtctgtaaaaagcaggatcacgatcaaccctgatacgtctaaaaaccagttttctctgcaacttaatagtgtgacccctgaagacaccgctgtgtattactgtgcacgggaggttaccggtgatcttgaagatgcttttgatatatggggccaaggtacgatggtcacggtgtctagtgggggaggcggcagcgacatacagatgacgcagagcccatccagtctctccgcgtctgttggtgacagagtgactattacatgtagggcgtctcagaccatttggtcttacctcaattggtatcaacagcgaccaggcaaagcaccgaacttgctcatttacgctgccagctcactccaaagtggtgtgccgtccagatttagtggtaggggcagtggcactgatttcactctgactatttcaagtcttcaagctgaggattttgccacatactactgccagcaaagttactcaatacctcagacttttggacaggggacaaaattggagattaaagggggaggcggatccggcggtggtggctccggcggtggtggttctggaggcggcggaagcggtgggggtggtagcgacatccagatgacccagaccacaagcagcctgtctgccagcctgggcgatagagtgaccatcagctgtagagccagccaggacatcagcaagtacctgaactggtatcagcaaaagcccgacggcaccgtgaagctgctgatctaccacaccagcagactgcacagcggcgtgccaagcagattttctggcagcggctctggcaccgactacagcctgacaatcagcaacctggaacaagaggatatcgctacctacttctgccagcaaggcaacaccctgccttacacctttggcggaggcaccaagctggaaatcaccggctctacaagcggcagcggcaaacctggatctggcgagggatctaccaagggcgaagtgaaactgcaagagtctggccctggactggtggccccatctcagtctctgagcgtgacctgtacagtcagcggagtgtccctgcctgattacggcgtgtcctggatcagacagcctcctcggaaaggcctggaatggctgggagtgatctggggcagcgagacaacctactacaacagcgccctgaagtcccggctgaccatcatcaaggacaactccaagagccaggtgttcctgaagatgaacagcctgcagaccgacgacaccgccatctactattgcgccaagcactactactacggcggcagctacgccatggattattggggccagggcaccagcgtgaccgtttcttcttccggaaccacaacgcccgccccgcgaccgcctactcccgctcccacaattgcatcacaacccctgtctttgagacccgaagcttgtcgaccagctgccggtggcgcggttcacacgcgggggctcgatttcgcctgtgatatatatatatgggccccattggctggaacatgcggagtattgcttctgagcctggtgattaccctctactgtaagagaggccggaagaaacttctttatatattcaagcagccctttatgcgacccgttcagactacccaagaggaagatggatgcagttgccgctttccagaagaggaggagggcgggtgcgaactgagagtgaagttcagcagatccgccgatgctcccgcctataagcagggccaaaaccagctgtacaacgagctgaacctggggagaagagaagagtacgacgtgctggacaagcggagaggcagagatcctgaaatgggcggcaagcccagacggaagaatcctcaagagggcctgtataatgagctgcagaaagacaagatggccgaggcctacagcgagatcggaatgaagggcgagcgcagaagaggcaagggacacgatggactgtaccagggactgagcaccgccaccaaggatacctatgacgccctgcacatgcaggccctgcctccaagataa

SEQ ID NO: 3162 - protein, 42 aa, synthetic construct
KRGRKKLLYIFKQPFMRPVQTTQEEDGCSCRFPEEEEGGCEL

SEQ ID NO: 3163 - protein, 112 aa, synthetic construct
RVKFSRSADAPAYKQGQNQLYNELNLGRREEYDVLDKRRGRDPEMGGKPRRKNPQEGLYNELQKDKMAEAYSEIGMKGERRRGKGHDGLYQGLSTATKDTYDALHMQALPPR

SEQ ID NO: 3164 - protein, 241 aa, synthetic construct
QVQLVQSGAEVEKPGASVKVSCKASGYTFTDYYMHWVRQAPGQGLEWMGWINPNSGGTNYAQKFQGRVTMTRDTSISTAYMELSRLRSDDTAVYYCASGWDFDYWGQGTLVTVSSGGGGSGGGGSGGGGSGGGGSDIVMTQSPSSLSASVGDRVTITCRASQSIRYYLSWYQQKPGKAPKLLIYTASILQNGVPSRFSGSGSGTDFTLTISSLQPEDFATYYCLQTYTTPDFGPGTKVEIK

SEQ ID NO: 3165 - protein, 120 aa, synthetic construct
EVKLQESGPGLVAPSQSLSVTCTVSGVSLPDYGVSWIRQPPRKGLEWLGVIWGSETTYYNSALKSRLTIIKDNSKSQVFLKMNSLQTDDTAIYYCAKHYYYGGSYAMDYWGQGTSVTVSS

SEQ ID NO: 3166 - protein, 107 aa, synthetic construct
DIQMTQTTSSLSASLGDRVTISCRASQDISKYLNWYQQKPDGTVKLLIYHTSRLHSGVPSRFSGSGSGTDYSLTISNLEQEDIATYFCQQGNTLPYTFGGGTKLEIT

SEQ ID NO: 3167 - protein, 447 aa, synthetic construct
QVQLVQSGVEVKKPGASVKVSCKASGYTFTNYYMYWVRQAPGQGLEWMGGINPSNGGTNFNEKFKNRVTLTTDSSTTTAYMELKSLQFDDTAVYYCARRDYRFDMGFDYWGQGTTVTVSSASTKGPSVFPLAPCSRSTSESTAALGCLVKDYFPEPVTVSWNSGALTSGVHTFPAVLQSSGLYSLSSVVTVPSSSLGTKTYTCNVDHKPSNTKVDKRVESKYGPPCPPCPAPEFLGGPSVFLFPPKPKDTLMISRTPEVTCVVVDVSQEDPEVQFNWYVDGVEVHNAKTKPREEQFNSTYRVVSVLTVLHQDWLNGKEYKCKVSNKGLPSSIEKTISKAKGQPREPQVYTLPPSQEEMTKNQVSLTCLVKGFYPSDIAVEWESNGQPENNYKTTPPVLDSDGSFFLYSRLTVDKSRWQEGNVFSCSVMHEALHNHYTQKSLSLSLGK

SEQ ID NO: 3168 - protein, 218 aa, synthetic construct
EIVLTQSPATLSLSPGERATLSCRASKGVSTSGYSYLHWYQQKPGQAPRLLIYLASYLESGVPARFSGSGSGTDFTLTISSLEPEDFAVYYCQHSRDLPLTFGGGTKVEIKRTVAAPSVFIFPPSDEQLKSGTASVVCLLNNFYPREAKVQWKVDNALQSGNSQESVTEQDSKDSTYSLSSTLTLSKADYEKHKVYACEVTHQGLSSPVTKSFNRGEC

SEQ ID NO: 3169 - protein, 440 aa, synthetic construct
QVQLVESGGGVVQPGRSLRLDCKASGITFSNSGMHWVRQAPGKGLEWVAVIWYDGSKRYYADSVKGRFTISRDNSKNTLFLQMNSLRAEDTAVYYCATNDDYWGQGTLVTVSSASTKGPSVFPLAPCSRSTSESTAALGCLVKDYFPEPVTVSWNSGALTSGVHTFPAVLQSSGLYSLSSVVTVPSSSLGTKTYTCNVDHKPSNTKVDKRVESKYGPPCPPCPAPEFLGGPSVFLFPPKPKDTLMISRTPEVTCVVVDVSQEDPEVQFNWYVDGVEVHNAKTKPREEQFNSTYRVVSVLTVLHQDWLNGKEYKCKVSNKGLPSSIEKTISKAKGQPREPQVYTLPPSQEEMTKNQVSLTCLVKGFYPSDIAVEWESNGQPENNYKTTPPVLDSDGSFFLYSRLTVDKSRWQEGNVFSCSVMHEALHNHYTQKSLSLSLGK

SEQ ID NO: 3170 - protein, 214 aa, synthetic construct
EIVLTQSPATLSLSPGERATLSCRASQSVSSYLAWYQQKPGQAPRLLIYDASNRATGIPARFSGSGSGTDFTLTISSLEPEDFAVYYCQQSSNWPRTFGQGTKVEIKRTVAAPSVFIFPPSDEQLKSGTASVVCLLNNFYPREAKVQWKVDNALQSGNSQESVTEQDSKDSTYSLSSTLTLSKADYEKHKVYACEVTHQGLSSPVTKSFNRGEC

SEQ ID NO: 3171 - protein, 448 aa, synthetic construct
EVQLVESGGGLVQPGGSLRLSCAASGFTFSDSWIHWVRQAPGKGLEWVAWISPYGGSTYYADSVKGRFTISADTSKNTAYLQMNSLRAEDTAVYYCARRHWPGGFDYWGQGTLVTVSSASTKGPSVFPLAPSSKSTSGGTAALGCLVKDYFPEPVTVSWNSGALTSGVHTFPAVLQSSGLYSLSSVVTVPSSSLGTQTYICNVNHKPSNTKVDKKVEPKSCDKTHTCPPCPAPELLGGPSVFLFPPKPKDTLMISRTPEVTCVVVDVSHEDPEVKFNWYVDGVEVHNAKTKPREEQYASTYRVVSVLTVLHQDWLNGKEYKCKVSNKALPAPIEKTISKAKGQPREPQVYTLPPSREEMTKNQVSLTCLVKGFYPSDIAVEWESNGQPENNYKTTPPVLDSDGSFFLYSKLTVDKSRWQQGNVFSCSVMHEALHNHYTQKSLSLSPGK

SEQ ID NO: 3172 - protein, 214 aa, synthetic construct
DIQMTQSPSSLSASVGDRVTITCRASQDVSTAVAWYQQKPGKAPKLLIYSASFLYSGVPSRFSGSGSGTDFTLTISSLQPEDFATYYCQQYLYHPATFGQGTKVEIKRTVAAPSVFIFPPSDEQLKSGTASVVCLLNNFYPREAKVQWKVDNALQSGNSQESVTEQDSKDSTYSLSSTLTLSKADYEKHKVYACEVTHQGLSSPVTKSFNRGEC

SEQ ID NO: 3173 - protein, 450 aa, synthetic construct
EVQLLESGGGLVQPGGSLRLSCAASGFTFSSYIMMWVRQAPGKGLEWVSSIYPSGGITFYADTVKGRFTISRDNSKNTLYLQMNSLRAEDTAVYYCARIKLGTVTTVDYWGQGTLVTVSSASTKGPSVFPLAPSSKSTSGGTAALGCLVKDYFPEPVTVSWNSGALTSGVHTFPAVLQSSGLYSLSSVVTVPSSSLGTQTYICNVNHKPSNTKVDKKVEPKSCDKTHTCPPCPAPELLGGPSVFLFPPKPKDTLMISRTPEVTCVVVDVSHEDPEVKFNWYVDGVEVHNAKTKPREEQYNSTYRVVSVLTVLHQDWLNGKEYKCKVSNKALPAPIEKTISKAKGQPREPQVYTLPPSRDELTKNQVSLTCLVKGFYPSDIAVEWESNGQPENNYKTTPPVLDSDGSFFLYSKLTVDKSRWQQGNVFSCSVMHEALHNHYTQKSLSLSPGK

SEQ ID NO: 3174 - protein, 216 aa, synthetic construct
QSALTQPASVSGSPGQSITISCTGTSSDVGGYNYVSWYQQHPGKAPKLMIYDVSNRPSGVSNRFSGSKSGNTASLTISGLQAEDEADYYCSSYTSSSTRVFGTGTKVTVLGQPKANPTVTLFPPSSEELQANKATLVCLISDFYPGAVTVAWKADGSPVKAGVETTKPSKQSNNKYAASSYLSLTPEQWKSHRSYSCQVTHEGSTVEKTVAPTECS

SEQ ID NO: 3175 - protein, 451 aa, synthetic construct
EVQLVESGGGLVQPGGSLRLSCAASGFTFSRYWMSWVRQAPGKGLEWVANIKQDGSEKYYVDSVKGRFTISRDNAKNSLYLQMNSLRAEDTAVYYCAREGGWFGELAFDYWGQGTLVTVSSASTKGPSVFPLAPSSKSTSGGTAALGCLVKDYFPEPVTVSWNSGALTSGVHTFPAVLQSSGLYSLSSVVTVPSSSLGTQTYICNVNHKPSNTKVDKRVEPKSCDKTHTCPPCPAPEFEGGPSVFLFPPKPKDTLMISRTPEVTCVVVDVSHEDPEVKFNWYVDGVEVHNAKTKPREEQYNSTYRVVSVLTVLHQDWLNGKEYKCKVSNKALPASIEKTISKAKGQPREPQVYTLPPSREEMTKNQVSLTCLVKGFYPSDIAVEWESNGQPENNYKTTPPVLDSDGSFFLYSKLTVDKSRWQQGNVFSCSVMHEALHNHYTQKSLSLSPGK

SEQ ID NO: 3176 - protein, 215 aa, synthetic construct
EIVLTQSPGTLSLSPGERATLSCRASQRVSSSYLAWYQQKPGQAPRLLIYDASSRATGIPDRFSGSGSGTDFTLTISRLEPEDFAVYYCQQYGSLPWTFGQGTKVEIKRTVAAPSVFIFPPSDEQLKSGTASVVCLLNNFYPREAKVQWKVDNALQSGNSQESVTEQDSKDSTYSLSSTLTLSKADYEKHKVYACEVTHQGLSSPVTKSFNRGEC

SEQ ID NO: 3177 - protein, 133 aa, unidentified [sequence omitted]

SEQ ID NO: 3178 - protein, 197 aa, unidentified
  source 1..197: note = IL-12A sequence
RNLPVATPDPGMFPCLHHSQNLLRAVSNMLQKARQTLEFYPCTSEEIDHEDITKDKTSTVEACLPLELTKNESCLNSRETSFITNGSCLASRKTSFMMALCLSSIYEDLKMYQVEFKTMNAKLLMDPKRQIFLDQNMLAVIDELMQALNFNSETVPQKSSLEEPDFYKTKIKLCILLHAFRIRAVTIDRVMSYLNAS

SEQ ID NO: 3179 - protein, 306 aa, unidentified
  source 1..306: note = IL-12B sequence
IWELKKDVYVVELDWYPDAPGEMVVLTCDTPEEDGITWTLDQSSEVLGSGKTLTIQVKEFGDAGQYTCHKGGEVLSHSLLLLHKKEDGIWSTDILKDQKEPKNKTFLRCEAKNYSGRFTCWWLTTISTDLTFSVKSSRGSSDPQGVTCGAATLSAERVRGDNKEYEYSVECQEDSACPAAEESLPIEVMVDAVHKLKYENYTSSFFIRDIIKPDPPKNLQLKPLKNSRQVEVSWEYPDTWSTPHSYFSLTFCVQVQGKSKREKKDRVFTDKTSATVICRKNASISVRAQDRYYSSSWSEWASVPCS

SEQ ID NO: 3180 - protein, 152 aa, unidentified
  source 1..152: note = IL-7 sequence
DCDIEGKDGKQYESVLMVSIDQLLDSMKEIGSNCLNNEFNFFKRHICDANKEGMFLFRAARKLRQFLKMNSTGDFDLHLLKVSEGTTILLNCTGQVKGRKPAALGEAQPTKSLEENKSLKEQKKLNDLCFLKRLLQEIKTCWNKILMGTKEH

SEQ ID NO: 3181 - protein, 160 aa, unidentified
  source 1..160: note = IL-10 sequence
SPGQGTQSENSCTHFPGNLPNMLRDLRDAFSRVKTFFQMKDQLDNLLLKESLLEDFKGYLGCQALSEMIQFYLEEVMPQAENQDPDIKAHVNSLGENLKTLRLRLRRCHRFLPCENKSKAVEQVKNAFNKLQEKGIYKAMSEFDIFINYIEAYMTMKIRN

SEQ ID NO: 3182 - protein, 114 aa, unidentified
  source 1..114: note = IL-15 sequence
NWVNVISDLKKIEDLIQSMHIDATLYTESDVHPSCKVTAMKCFLLELQVISLESGDASIHDTVENLIILANNSLSSNGNVTESGCKECEELEEKNIKEFLQSFVHIVQMFINTS

SEQ ID NO: 3183 - protein, 157 aa, unidentified
  source 1..157: note = IL-18 sequence
YFGKLESKLSVIRNLNDQVLFIDQGNRPLFEDMTDSDCRDNAPRTIFIISMYKDSQPRGMAVTISVKCEKISTLSCENKIISFKEMNPPDNIKDTKSDIIFFQRSVPGHDNKMQFESSSYEGYFLACEKERDLFKLILKKEDELGDRSIMFTVQNED

SEQ ID NO: 3184 - protein, 209 aa, unidentified
  source 1..209: note = IL-27beta sequence
RKGPPAALTLPRVQCRASRYPIAVDCSWTLPPAPNSTSPVSFIATYRLGMAARGHSWPCLQQTPTSTSCTITDVQLFSMAPYVLNVTAVHPWGSSSSFVPFITEHIIKPDPPEGVRLSPLAERQLQVQWEPPGSWPFPEIFSLKYWIRYKRQGAARFHRVGPIEATSFILRAVRPRARYYVQVAAQDLTDYGELSDWSLPATATMSLGK

SEQ ID NO: 3185 - protein, 138 aa, unidentified
  source 1..138: note = IFNgamma sequence
QDPYVKEAENLKKYFNAGHSDVADNGTLFLGILKNWKEESDRKIMQSQIVSFYFKLFKNFKDDQSIQKSVETIKEDMNVKFFNSNKKKRDDFEKLTNYSVTDLNVQRKAIHELIQVMAELSPAAKTGKRKRSQMLFRG

SEQ ID NO: 3186 - protein, 112 aa, unidentified
  source 1..112: note = TGFbeta1 sequence
ALDTNYCFSSTEKNCCVRQLYIDFRKDLGWKWIHEPKGYHANFCLGPCPYIWSLDTQYSKVLALYNQHNPGASAAPCCVPQALEPLPIVYYVGRKPKVEQLSNMIVRSCKCS

SEQ ID NO: 3187 - protein, 431 aa, unidentified
  source 1..431: note = FOXP3 sequence
MPNPRPGKPSAPSLALGPSPGASPSWRAAPKASDLLGARGPGGTFQGRDLRGGAHASSSSLNPMPPSQLQLPTLPLVMVAPSGARLGPLPHLQALLQDRPHFMHQLSTVDAHARTPVLQVHPLESPAMISLTPPTTATGVFSLKARPGLPPGINVASLEWVSREPALLCTFPNPSAPRKDSTLSAVPQSSYPLLANGVCKWPGCEKVFEEPEDFLKHCQADHLLDEKGRAQCLLQREMVQSLEQQLVLEKEKLSAMQAHLAGKMALTKASSVASSDKGSCCIVAAGSQGPVVPAWSGPREAPDSLFAVRRHLWGSHGNSTFPEFLHNMDYFKFHNMRPPFTYATLIRWAILEAPEKQRTLNEIYHWFTRMFAFFRNHPATWKNAIRHNLSLHKCFVRVESEKGAVWTVDELEFRKKRSQRPSRCSNPTPGP

SEQ ID NO: 3188 - protein, 417 aa, unidentified
  source 1..417: note = FOXP3 sequence
MPNPRPGKPSAPSLALGPSPGASPSWRAAPKASDLLGARGPGGTFQGRDLRGGAHASSSSLNPMPPSQLQLPTLPLVMVAPSGARLGPLPHLQALLQDRPHFMHQLSTVDAHARTPVLQVHPLESPAMISLTPPTTATGVFSLKARPGLPPGINVASLEWVSREPALLCTFPNPSAPRKDSTLSAVPQSSYPLLANGVCKWPGCEKVFEEPEDFLKHCQADHLLDEKGRAQCLLQREMVQSLEQQLVLEKEKLSAMQAHLAGKMALTKASSVASSDKGSCCIVAAGSQGPVVPAWSGPREAPDSLFAVRRHLWGSHGNSTFPEFLHNMDYFKFHNMRPPFTYATLIRWAILEAPEKQRTLNEIYHWFTRMFAFFRNHPATWKNAIRHNLSLHKCFVRVESEKGAVWTVDELEFRKKR

SEQ ID NO: 3189 - protein, 366 aa, unidentified
  source 1..366: note = FOXP3 sequence
GGAHASSSSLNPMPPSQLQLPTLPLVMVAPSGARLGPLPHLQALLQDRPHFMHQLSTVDAHARTPVLQVHPLESPAMISLTPPTTATGVFSLKARPGLPPGINVASLEWVSREPALLCTFPNPSAPRKDSTLSAVPQSSYPLLANGVCKWPGCEKVFEEPEDFLKHCQADHLLDEKGRAQCLLQREMVQSLEQQLVLEKEKLSAMQAHLAGKMALTKASSVASSDKGSCCIVAAGSQGPVVPAWSGPREAPDSLFAVRRHLWGSHGNSTFPEFLHNMDYFKFHNMRPPFTYATLIRWAILEAPEKQRTLNEIYHWFTRMFAFFRNHPATWKNAIRHNLSLHKCFVRVESEKGAVWTVDELEFRKKR

SEQ ID NO: 3190 - protein, 787 aa, unidentified
  source 1..787: note = STAT5B sequence
MAVWIQAQQLQGEALHQMQALYGQHFPIEVRHYLSQWIESQAWDSVDLDNPQENIKATQLLEGLVQELQKKAEHQVGEDGFLLKIKLGHYATQLQNTYDRCPMELVRCIRHILYNEQRLVREANNGSSPAGSLADAMSQKHLQINQTFEELRLVTQDTENELKKLQQTQEYFIIQYQESLRIQAQFGPLAQLSPQERLSRETALQQKQVSLEAWLQREAQTLQQYRVELAEKHQKTLQLLRKQQTIILDDELIQWKRRQQLAGNGGPPEGSLDVLQSWCEKLAEIIWQNRQQIRRAEHLCQQLPIPGPVEEMLAEVNATITDIISALVTSTFIIEKQPPQVLKTQTKFAATVRLLVGGKLNVHMNPPQVKATIISEQQAKSLLKNENTRNDYSGEILNNCCVMEYHQATGTLSAHFRNMSLKRIKRSDRRGAESVTEEKFTILFESQFSVGGNELVFQVKTLSLPVVVIVHGSQDNNATATVLWDNAFAEPGRVPFAVPDKVLWPQLCEALNMKFKAEVQSNRGLTKENLVFLAQKLFNNSSSHLEDYSGLSVSWSQFNRENLPGRNYTFWQWFDGVMEVLKKHLKPHWNDGAILGFVNKQQAHDLLINKPDGTFLLRFSDSEIGGITIAWKFDSQERMFWNLMPFTTRDFSIRSLADRLGDLNYLIYVFPDRPKDEVYSKYYTPVPCESATAKAVDGYVKPQIKQVVPEFVNASADAGGGSATYMDQAPSPAVCPQAHYNMYPQNPDSVLDTDGDFDLEDTMDVARRVEELLGRPMDSQWIPHAQS

SEQ ID NO: 3191 - protein, 526 aa, unidentified [sequence omitted]

SEQ ID NO: 3192 - DNA, 167 bp, synthetic construct
  source 1..167: mol_type = other DNA
ccctgcagccgtcaccgtaagtttgaagttaccgcatatcagcctctgcttcccagcgcgtccaattcctgttcttattgtttcccctccaggcgttacgcgtgacgacgaactgtgtcgcagctaccacattattccggagccttcattctcgcggctctgatcgt

SEQ ID NO: 3193 - DNA, 43 bp, synthetic construct
  source 1..43: mol_type = other DNA
ggagaccgcggccacgccgagtaggatcgagggtacagtctcc

SEQ ID NO: 3194 - DNA, 167 bp, synthetic construct
  source 1..167: mol_type = other DNA
gacaccaggatcactcttgctctgacccgccctgtgtagaatagactcatgcttccctaagacctggatttcttcccaggcactttcacccgcctgccctgctccttcagtggactgcacccagggaggcggtctctgactgtcctttactttctattctggattgc

SEQ ID NO: 3195 - DNA, 30 bp, synthetic construct
  source 1..30: mol_type = other DNA
aaacccccctaagccgccgccgccgccacc

SEQ ID NO: 3196 - DNA, 18 bp, synthetic construct
  source 1..18: mol_type = other DNA
cccccccaacccgtcacg

SEQ ID NO: 3197 - skipped

SEQ ID NO: 3198 - DNA, 141 bp, synthetic construct
  source 1..141: mol_type = other DNA
tctgcgcactcgtaatcagtactaacccccctttgtcggacactatgcgataatcgatccgcctttttcaccgccttcggaattttatttacctcaactgatcctggagtctctcttggttttcacggaggcctccgccca

SEQ ID NO: 3199 - DNA, 141 bp, synthetic construct
  source 1..141: mol_type = other DNA
ccccttgaaacccccgccccaggttcagtctctcttcatccctctgtcctgcatggtgatacaaagaccctttgtggaccctaagccatgtagttgctgctccctccttccagttgtgaatattggtttctgttaatcaca

SEQ ID NO: 3200 - DNA, 43 bp, synthetic construct
  source 1..43: mol_type = other DNA
aataagagagaaaagaagagtaagaagaaatataagagccacc

SEQ ID NO: 3201 - DNA, 49 bp, synthetic construct
  source 1..49: mol_type = other DNA
cgaactagtattcttctggtccccacagactcagagagaacccgccacc

SEQ ID NO: 3202 - skipped

SEQ ID NO: 3203 - DNA, 14 bp, synthetic construct
  source 1..14: mol_type = other DNA
tgatagctaactag

SEQ ID NO: 3204 - DNA, 14 bp, synthetic construct
  source 1..14: mol_type = other DNA
tagtagctaactag

SEQ ID NO: 3205 - DNA, 14 bp, synthetic construct
  source 1..14: mol_type = other DNA
tgatgactgagtga

SEQ ID NO: 3206 - DNA, 14 bp, synthetic construct
  source 1..14: mol_type = other DNA
tagtagctaggtag

SEQ ID NO: 3207 - skipped

SEQ ID NO: 3208 - DNA, 14 bp, synthetic construct
  source 1..14: mol_type = other DNA
taatagctaactag

SEQ ID NO: 3209 - DNA, 15 bp, synthetic construct
  source 1..15: mol_type = other DNA
taactagctaactag

SEQ ID NO: 3210 - protein, 329 aa, Homo sapiens
MKFGSKIRRLAVAAVAGAIALGASFAVAQAPTFFRIGTGGTAGTYYPIGGLIANAISGAGEKGVPGLVATAVSSNGSVANINAIKSGALESGFTQSDVAYWAYNGTGLYDGKGKVEDLRLLATLYPETIHIVARKDANIKSVADLKGKRVSLDEPGSGTIVDARIVLEAYGLTEDDIKAEHLKPGPAGERLKDGALDAYFFVGGYPTGAISELAISNGISLVPISGPEADKILEKYSFFSKDVVPAGAYKDVAETPTLAVAAQWVTSAKQPDDLIYNITKVLWNEDTRKALDAGHAKGKLIKLDSATSSLGIPLHPGAERFYKEAGVLK

SEQ ID NO: 3211 - protein, 402 aa, Homo sapiens
MKKLLKSALLFAATGSALSLQALPVGNPAEPSLLIDGTMWEGASGDPCDPCATWCDAISIRAGYYGDYVFDRVLKVDVNKTFSGMAATPTQATGNASNTNQPEANGRPNIAYGRHMQDAEWFSNAAFLALNIWDRFDIFCTLGASNGYFKASSAAFNLVGLIGFSAASSISTDLPMQLPNVGITQGVVEFYTDTSFSWSVGARGALWECGCATLGAEFQYAQSNPKIEMLNVTSSPAQFVIHKPRGYKGASSNFPLPITAGTTEATDTKSATIKYHEWQVGLALSYRLNMLVPYIGVNWSRATFDADTIRIAQPKLKSEILNITTWNPSLIGSTTALPNNSGKDVLSDVLQIASIQINKMKSRKACGVAVGATLIDADKWSITGEARLINERAAHMNAQFRF

SEQ ID NO: 3212 - protein, 370 aa, Fusobacterium nucleatum
MKKLALVLGLLLVVGSVASAKEVMPAPTPAPEKVVEYVEKPVIVYRDREVAPAWRPNGSVDVQYRWYGEVEKKNPKDDKDENWATGKVNAGRLQTLTKVNFTEKQTLEVRTRNHHTLNDTDANNKKSNGAADEYRLRHFYNFGKLGSSKVNATSRVEFKQKTNDGEKSLGASVLFDFADYIYSNNFFKVDKLGLRPGYKYVWKGHGNGEEGTPTVHNEYHLAFESDFTLPFNFALNLEYDLSYNRYREKFETTDGLKKAEWYGELTAVLSNYTPLYKAGAFELGFNAEGGYDTYNMHQYKRIGGEDGTSVDRRDYELYLEPTLQVSYKPTDFVKLYAAAGADYRNRITGESEVKRWRWQPTASAGMKVTF

SEQ ID NO: 3213 - protein, 495 aa, Mycobacterium tuberculosis
MNQHFDVLIIGAGLSGIGTACHVTAEFPDKTIALLERRERLGGTWDLFRYPGVRSDSDMFTFGYKFRPWRDVKVLADGASIRQYIADTATEFGVDEKIHYGLKVNTAEWSSRQCRWTVAGVHEATGETRTYTCDYLISCTGYYNYDAGYLPDFPGVHRFGGRCVHPQHWPEDLDYSGKKVVVIGSGATAVTLVPAMAGSNPGSAAHVTMLQRSPSYIFSLPAVDKISEVLGRFLPDRWVYEFGRRRNIAIQRKLYQACRRWPKLMRRLLLWEVRRRLGRSVDMSNFTPNYLPWDERLCAVPNGDLFKTLASGAASVVTDQIETFTEKGILCKSGREIEADIIVTATGLNIQMLGGMRLIVDGAEYQLPEKMTYKGVLLENAPNLAWIIGYTNASWTLKSDIAGAYLCRLLRHMADNGYTVATPRDAQDCALDVGMFDQLNSGYVKRGQDIMPRQGSKHPWRVLMHYEKDAKILLEDPIDDGVLHFAAAAQDHAAA

SEQ ID NO: 3214 - protein, 95 aa, Mycobacterium tuberculosis
MTEQQWNFAGIEAAASAIQGNVTSIHSLLDEGKQSLTKLAAAWGGSGSEAYQGVQQKWDATATELNNALQNLARTISEAGQAMASTEGNVTGMFA

SEQ ID NO: 3215 - protein, 311 aa, Neisseria gonorrhoeae
MKKSLIALTLAALPVAAMADVTLYGTIKAGVETYRFVAHNGAQASGVETATEIADLGSKIGFKGQEDLGNGLKAIWQLEQKAYVSGTNTGWGNRQSFIGLKGGFGKVRVGRLNSVLKDTGGFNPWEGKSEYLSLSNIARPEERPISVRYDSPEFAGFSGSVQYVPNDNSGENKSESYHAGFNYKNSGFFVQYAGSYKRHNYTTEKHQIHRLVGGYDHDALYASVAVQQQDAKLAWPDDNSHNSQTEVATTVAYRFGNVTPRVSYAHGFKGSVYEANHDNTYDQVVVGAEYDFSKRTSALVSAGWLQEGKGA

SEQ ID NO: 3216 - protein, 107 aa, Staphylococcus aureus
FVGYKPYSQNPRDYFVPDNELPPLVHSGFNPSFIATVSHEKGSGDTSEFEITYGRNMDVTHATRRTTHYGNSYLEGSRIHNAFVNRNYTVKYEVNWKTHEIKVKGHN

SEQ ID NO: 3217 - protein, 301 aa, Rhodobacter capsulatus
EVKLSGDARMGVMYNGDDWNFSSRSRVLFTMSGTTDSGLEFGASFKAHESVGAETGEDGTVFLSGAFGKIEMGDALGASEALFGDLYEVGYTDLDDRGGNDIPYLTGDERLTAEDNPVLLYTYSAGAFSVAASMSDGKVGETSEDDAQEMAVAAAYTFGNYTVGLGYEKIDSPDTALMADMEQLELAAIAKFGATNVKAYYADGELDRDFARAVFDLTPVAAAATAVDHKAYGLSVDSTFGATTVGGYVQVLDIDTIDDVTYYGLGASYDLGGGASIVGGIADNDLPNSDMVADLGVKFKF

SEQ ID NO: 3218 - protein, 346 aa, Escherichia coli
MKKTAIAIAVALAGFATVAQAAPKDNTWYTGAKLGWSQYHDTGFINNNGPTHENQLGAGAFGGYQVNPYVGFEMGYDWLGRMPYKGSVENGAYKAQGVQLTAKLGYPITDDLDIYTRLGGMVWRADTKSNVYGKNHDTGVSPVFAGGVEYAITPEIATRLEYQWTNNIGDAHTIGTRPDNGMLSLGVSYRFGQGEAAPVVAPAPAPAPEVQTKHFTLKSDVLFNFNKATLKPEGQAALDQLYSQLSNLDPKDGSVVVLGYTDRIGSDAYNQGLSERRAQSVVDYLISKGIPADKISARGMGESNPVTGNTCDNVKQRAALIDCLAPDRRVEIEVKGIKDVVTQPQA

SEQ ID NO: 3219 - protein, 87 aa, Chlamydia pneumoniae
AGVATATGTKSATINYHEWQVGASLSYRLNSLVPYIGVQWSRATFDADNIRIAQPKLPTAVLNLTAWNPSLLGNATALSTTDSFSDF

SEQ ID NO: 3220 - protein, 631 aa, Streptococcus pyogenes
MTTYQDDFYQAVNGKWAETAVIPDDKPRTGGFSDLADEIEALMLDTTDAWLAGENIPDDAILKNFVKFHRLVADYAKRDEVGVSPILPLIEEYQSLKSFSEFVANIAKYELAGLPNEFPFSVAPDFMNAQLNVLWAEAPSILLPDTTYYEEGNEKAEELRGIWRQSQEKLLPQFGFSTEEIKDLLDKVIELDKQLAKYVLSREEGSEYAKLYHPYVWADFKKLAPELPLDSIFEKILGQVPDKVIVPEERFWTEFAATYYSEANWDLLKANLIVDAANAYNAYLTDDIRVESGAYSRALSGTPQAMDKQKAAFYLAQGPFSQALGLWYAGQKFSPEAKADVESKVARMIEVYKSRLETADWLAPATREKAITKLNVITPHIGYPEKLPETYAKKVIDESLSLVENAQNLAKITIAHTWSKWNKPVDRSEWHMPAHLVNAYYDPQQNQIVFPAAILQEPFYSLDQSSSANYGGIGAVIAHEISHAFDTNGASFDEHGSLNDWWTQEDYAAFKERTDKIVAQFDGLESHGAKVNGKLTVSENVADLGGVACALEAAQSEEDFSARDFFINFATIWRMKAREEYMQMLASIDVHAPGELRTNVTLTNFDAFHETFDIKEGDAMWRAPKDRVIIW

SEQ ID NO: 3221 - protein, 341 aa, Vibrio cholerae
MNKTLIALAVSAAAVATGAYADGINQSGDKAGSTVYSAKGTSLEVGGRAEARLSLKDGKAQDNSRVRLNFLGKAEINDSLYGVGFYEGEFTTNDQGKNASNNSLDNRYTYAGIGGTYGEVTYGKNDGALGVITDFTDIMSYHGNTAAEKIAVADRVDNMLAYKGQFGDLGVKASYRFADRNAVDAMGNVVTETNAAKYSDNGEDGYSLSAIYTFGDTGFNVGAGYADQDDQNEYMLAASYRMENLYFAGLFTDGELAKDVDYTGYELAAGYKLGQAAFTATYNNAETAKETSADNFAIDATYYFKPNFRSYISYQFNLLDSDKVGKVASEDELAIGLRYDF

SEQ ID NO: 3222 - protein, 160 aa, Mycobacterium tuberculosis
MKGGAGVPDLPSLDASGVRLAIVASSWHGKICDALLDGARKVAAGCGLDDPTVVRVLGAIEIPVVAQELARNHDAVVALGVVIRGQTPHFDYVCDAVTQGLTRVSLDSSTPIANGVLTTNTEEQALDRAGLPTSAEDKGAQATVAALATALTLRELRAHS

SEQ ID NO: 3223 - protein, 150 aa, Pasteurella multocida
MKKLTKVLLVAGSVAVLAACGSSKKDESAGQMFGGYSVQDLQQRYNTVYFGFDKYNIEGEYVQILDAHAAFLNATPATKVVVEGNTDERGTPEYNIALGQRRADAVKHYLSAKGVQAGQVSTVSYGEEKPAVLGHDEAAYSKNRRAVLAY

SEQ ID NO: 3224 - protein, 177 aa, Brucella melitensis
MGISKASLLSLAAAGIVLAGCQSSRLGNLDNVSPPPPPAPVNAVPAGTVQKGNLDSPTQFPNAPSTDMSAQSGTQVASLPPASAPDLTPGAVAGVWNASLGGQSCKIATPQTKYGQGYRAGPLRCPGELANLASWAVNGKQLVLYDANGGTVASLYSSGQGRFDGQTTGGQAVTLSR

SEQ ID NO: 3225 - protein, 359 aa, Escherichia coli
MQILADLLNTIPAIDSTAMSRAQRHIDGLLKPVGSLGKLEVLAIQLAGMPGLNGIPHVGKKAVLVMCADHGVWEEGVAISPKEVTAIQAENMTRGTTGVCVLAEQAGANVHVIDVGIDTAEPIPGLINMRVARGSGNIASAPAMSRRQAEKLLLDVICYTQELAKNGVTLFGVGELGMANTTPAAAIVSTITGRDPEEVVGIGANLPTDKLANKIDVVRRAITLNQPNPQDGVDVLAKVGGFDLVGIAGVMLGAASCGLPVLLDGFLSYAAALAACQMSPAIKPYLIPSHLSAEKGARIALSHLGLEPYLNMEMRLGEGSGAALAMPIIEAACAIYNNMGELAASNIVLPGNTTSDLNS

SEQ ID NO: 3226 - protein, 172 aa, Mycobacterium tuberculosis
MKNARTTLIAAAIAGTLVTTSPAGIANADDAGLDPNAAAGPDAVGFDPNLPPAPDAAPVDTPPAPEDAGFDPNLPPPLAPDFLSPPAEEAPPVPVAYSVNWDAIAQCESGGNWSINTGNGYYGGLRFTAGTWRANGGSGSAANASREEQIRVAENVLRSQGIRAWPVCGRRG

SEQ ID NO: 3227 - protein, 130 aa, Mycobacterium tuberculosis
MAKLSTDELLDAFKEMTLLELSDFVKKFEETFEVTAAAPVAVAAAGAAPAGAAVEAAEEQSEFDVILEAAGDKKIGVIKVVREIVSGLGLKEAKDLVDGAPKPLLEKVAKEAADEAKAKLEAAGATVTVK

SEQ ID NO: 3228 - protein, 199 aa, Mycobacterium tuberculosis
MAENSNIDDIKAPLLAALGAADLALATVNELITNLRERAEETRTDTRSRVEESRARLTKLQEDLPEQLTELREKFTAEELRKAAEGYLEAATSRYNELVERGEAALERLRSQQSFEEVSARAEGYVDQAVELTQEALGTVASQTRAVGERAAKLVGIELPKKAAPAKKAAPAKKAAPAKKAAAKKAPAKKAAAKKVTQK

SEQ ID NO: 3229 - protein, 594 aa, Homo sapiens
MNKIYRIIWNSALNAWVAVSELTRNHTKRASATVATAVLATLLFATVQASTTDDDDLYLEPVQRTAVVLSFRSDKEGTGEKEVTEDSNWGVYFDKKGVLTAGTITLKAGDNLKIKQNTNENTNASSFTYSLKKDLTDLTSVGTEKLSFSANSNKVNITSDTKGLNFAKKTAETNGDTTVHLNGIGSTLTDTLLNTGATTNVTNDNVTDDEKKRAASVKDVLNAGWNIKGVKPGTTASDNVDFVRTYDTVEFLSADTKTTTVNVESKDNGKRTEVKIGAKTSVIKEKDGKLVTGKDKGENDSSTDKGEGLVTAKEVIDAVNKAGWRMKTTTANGQTGQADKFETVTSGTNVTFASGKGTTATVSKDDQGNITVMYDVNVGDALNVNQLQNSGWNLDSKAVAGSSGKVISGNVSPSKGKMDETVNINAGNNIEITRNGKNIDIATSMTPQFSSVSLGAGADAPTLSVDDEGALNVGSKDANKPVRITNVAPGVKEGDVTNVAQLKGVAQNLNNHIDNVDGNARAGIAQAIATAGLVQAYLPGKSMMAIGGGTYRGEAGYAIGYSSISDGGNWIIKGTASGNSRGHFGASASVGYQW

SEQ ID NO: 3230 - protein, 376 aa, Escherichia coli
MAKQDYYEILGVSKTAEEREIRKAYKRLAMKYHPDRNQGDKEAEAKFKEIKEAYEVLTDSQKRAAYDQYGHAAFEQGGMGGGGFGGGADFSDIFGDVFGDIFGGGRGRQRAARGADLRYNMELTLEEAVRGVTKEIRIPTLEECDVCHGSGAKPGTQPQTCPTCHGSGQVQMRQGFFAVQQTCPHCQGRGTLIKDPCNKCHGHGRVERSKTLSVKIPAGVDTGDRIRLAGEGEAGEHGAPAGDLYVQVQVKQHPIFEREGNNLYCEVPINFAMAALGGEIEVPTLDGRVKLKVPGETQTGKLFRMRGKGVKSVRGGAQGDLLCRVVVETPVGLNERQKQLLQELQESFGGPTGEHNSPRSKSFFDGVKKFFDDLTR

SEQ ID NO: 3231 - protein, 471 aa, Streptococcus pneumoniae
MANKAVNDFILAMNYDKKKLLTHQGESIENRFIKEGNQLPDEFVVIERKKRSLSTNTSDISVTATNDSRLYPGALLVVDETLLENNPTLLAVDRAPMTYSIDLPGLASSDSFLQVEDPSNSSVRGAVNDLLAKWHQDYGQVNNVPARMQYEKITAHSMEQLKVKFGSDFEKTGNSLDIDFNSVHSGEKQIQIVNFKQIYYTVSVDAVKNPGDVFQDTVTVEDLKQRGISAERPLVYISSVAYGRQVYLKLETTSKSDEVEAAFEALIKGVKVAPQTEWKQILDNTEVKAVILGGDPSSGARVVTGKVDMVEDLIQEGSRFTADHPGLPISYTTSFLRDNVVATFQNSTDYVETKVTAYRNGDLLLDHSGAYVAQYYITWDELSYDHQGKEVLTPKAWDRNGQDLTAHFTTSIPLKGNVRNLSVKIRECTGLAWEWWRTVYEKTDLPLVRKRTISIWGTTLYPQVEDKVEND

SEQ ID NO: 3232 - protein, 498 aa, Homo sapiens
MAQVINTNSLSLITQNNINKNQSALSSSIERLSSGLRINSAKDDAAGQAIANRFTSNIKGLTQAARNANDGISVAQTTEGALSEINNNLQRVRELTVQATTGTNSESDLSSIQDEIKSRLDEIDRVSGQTQFNGVNVLAKNGSMKIQVGANDNQTITIDLKQIDAKTLGLDGFSVKNNDTVTTSAPVTAFGATTTNNIKLTGITLSTEAATDTGGTNPASIEGVYTDNGNDYYAKITGGDNDGKYYAVTVANDGTVTMATGATANATVTDANTTKATTITSGGTPVQIDNTAGSATANLGAVSLVKLQDSKGNDTDTYALKDTNGNLYAADVNETTGAVSVKTITYTDSSGAASSPTAVKLGGDDGKTEVVDIDGKTYDSADLNGGNLQTGLTAGGEALTAVANGKTTDPLKALDDAIASVDKFRSSLGAVQNRLDSAVTNLNNTTTNLSEAQSRIQDADYATEVSNMSKAQIIQQAGNSVLAKANQVPQQVLSLLQG

SEQ ID NO: 3233 - protein, 189 aa, Homo sapiens
MASPFALLMVLVVLSCKSSCSLGCDLPETHSLDNRRTLMLLAQMSRISPSSCLMDRHDFGFPQEEFDGNQFQKAPAISVLHELIQQIFNLFTTKDSSAAWDEDLLDKFCTELYQQLNDLEACVMQEERVGETPLMNADSILAVKKYFRRITLYLTEKKYSPCAWEVVRAEIMRSLSLSTNLQERLRRKE

SEQ ID NO: 3234 - protein, 166 aa, Homo sapiens
MKYTSYILAFQLCIVLGSLGCYCQDPYVKEAENLKKYFNAGHSDVADNGTLFLGILKNWKEESDRKIMQSQIVSFYFKLFKNFKDDQSIQKSVETIKEDMNVKFFNSNKKKRDDFEKLTNYSVTDLNVQRKAIHELIQVMAELSPAAKTGKRKRSQMLFRGRRASQ

SEQ ID NO: 3235 - protein, 153 aa, Homo sapiens
MYRMQLLSCIALSLALVTNSAPTSSSTKKTQLQLEHLLLDLQMILNGINNYKNPKLTRMLTFKFYMPKKATELKHLQCLEEELKPLEEVLNLAQSKNFHLRPRDLISNINVIVLELKGSETTFMCEYADETATIVEFLNRWITFCQSIISTLT

SEQ ID NO: 3236 - protein, 39 aa, Homo sapiens
MWPPGSASQPPPSPAAATGLHPAARPVSLQCRLSMCPAR

SEQ ID NO: 3237 - protein, 338 aa, Homo sapiens [sequence omitted]

SEQ ID NO: 3238 - protein, 162 aa, Homo sapiens
MRISKPHLRSISIQCYLCLLLNSHFLTEAGIHVFILGCFSAGLPKTEANWVNVISDLKKIEDLIQSMHIDATLYTESDVHPSCKVTAMKCFLLELQVISLESGDASIHDTVENLIILANNSLSSNGNVTESGCKECEELEEKNIKEFLQSFVHIVQMFINTS

SEQ ID NO: 3239 - protein, 193 aa, Homo sapiens
MAAEPVEDNCINFVAMKFIDNTLYFIAEDDENLESDYFGKLESKLSVIRNLNDQVLFIDQGNRPLFEDMTDSDCRDNAPRTIFIISMYKDSQPRGMAVTISVKCEKISTLSCENKIISFKEMNPPDNIKDTKSDIIFFQRSVPGHDNKMQFESSSYEGYFLACEKERDLFKLILKKEDELGDRSIMFTVQNED

SEQ ID NO: 3240 - protein, 162 aa, Homo sapiens
MRSSPGNMERIVICLMVIFLGTLVHKSSSQGQDRHMIRMRQLIDIVDQLKNYVNDLVPEFLPAPEDVETNCEWSAFSCFQKAQLKSANTGNNERIINVSIKKLKRKPPSTNAGRRQKHRLTCPSCDSYEKKPPKEFLERFKSLLQKMIHQHLSSRTHGSEDS

SEQ ID NO: 3241 - protein, 144 aa, Homo sapiens
MWLQSLLLLGTVACSISAPARSPSPSTQPWEHVNAIQEARRLLNLSRDTAAEMNETVEVISEMFDLQEPTCLQTRLELYKQGLRGSLTKLKGPLTMMASHYKQHCPPTPETSCATQIITFESFKENLKDFLLVIPFDCWEPVQE

SEQ ID NO: 3242 - protein, 269 aa, Homo sapiens
MAEVPELASEMMAYYSGNEDDLFFEADGPKQMKCSFQDLDLCPLDGGIQLRISDHHYSKGFRQAASVVVAMDKLRKMLVPCPQTFQENDLSTFFPFIFEEEPIFFDTWDNEAYVHDAPVRSLNCTLRDSQQKSLVMSGPYELKALHLQGQDMEQQVVFSMSFVQGEESNDKIPVALGLKEKNLYLSCVLKDDKPTLQLESVDPKNYPKKKMEKRFVFNKIEINNKLEFESAQFPNWYISTSQAENMPVFLGGTKGGQDITDFTMQFVSS

SEQ ID NO: 3243 - protein, 212 aa, Homo sapiens
MNSFSTSAFGPVAFSLGLLLVLPAAFPAPVPPGEDSKDVAAPHRQPLTSSERIDKQIRYILDGISALRKETCNKSNMCESSKEALAENNLNLPKMAEKDGCFQSGFNEETCLVKIITGLLEFEVYLEYLQNRFESSEEQARAVQMSTKVLIQFLQKKAKNLDAITTPDPTTNASLLTKLQAQNQWLQDMTTHLILRSFKEFLQSSLRALRQM

SEQ ID NO: 3244 - protein, 233 aa, Homo sapiens
MSTESMIRDVELAEEALPKKTGGPQGSRRCLFLSLFSFLIVAGATTLFCLLHFGVIGPQREEFPRDLSLISPLAQAVRSSSRTPSDKPVAHVVANPQAEGQLQWLNRRANALLANGVELRDNQLVVPSEGLYLIYSQVLFKGQGCPSTHVLLTHTISRIAVSYQTKVNLLSAIKSPCQRETPEGAEAKPWYEPIYLGGVFQLEKGDRLSAEINRPDYLDFAESGQVYFGIIAL

SEQ ID NO: 3245 - protein, 177 aa, Homo sapiens
MFHVSFRYIFGLPPLILVLLPVASSDCDIEGKDGKQYESVLMVSIDQLLDSMKEIGSNCLNNEFNFFKRHICDANKEGMFLFRAARKLRQFLKMNSTGDFDLHLLKVSEGTTILLNCTGQVKGRKPAALGEAQPTKSLEENKSLKEQKKLNDLCFLKRLLQEIKTCWNKILMGTKEH

SEQ ID NO: 3246 - protein, 155 aa, Homo sapiens
MTPGKTSLVSLLLLLSLEAIVKAGITIPRNPGCPNSEDKNFPRTVMVNLNIHNRNTNTNPKRSSDYYNRSTSPWNLHRNEDPERYPSVIWEAKCRHLGCINADGNVDYHMNSVPIQQEILVLRREPPHCPNSFRLEKILVSVGCTCVTPIVHHVA

SEQ ID NO: 3247 - protein, 235 aa, Homo sapiens
MTVLAPAWSPTTYLLLLLLLSSGLSGTQDCSFQHSPISSDFAVKIRELSDYLLQDYPVTVASNLQDEELCGGLWRLVLAQRWMERLKTVAGSKMQGLLERVNTEIHFVTKCAFQPPPSCLRFVQTNISRLLQETSEQLVALKPWITRQNFSRCLELQCQPDSSTLPPPWSPRPLEATAPTAPQPPLLLLLLLPVGLLLLAAAWCLHWQRTRRRTPRPGEQVPPVPSPQDLLLVEH

SEQ ID NO: 3248 - protein, 448 aa, Homo sapiens
QVQLVESGGGVVQPGRSLRLSCAASGFTFSSYTMHWVRQAPGKGLEWVTFISYDGNNKYYADSVKGRFTISRDNSKNTLYLQMNSLRAEDTAIYYCARTGWLGPFDYWGQGTLVTVSSASTKGPSVFPLAPSSKSTSGGTAALGCLVKDYFPEPVTVSWNSGALTSGVHTFPAVLQSSGLYSLSSVVTVPSSSLGTQTYICNVNHKPSNTKVDKRVEPKSCDKTHTCPPCPAPELLGGPSVFLFPPKPKDTLMISRTPEVTCVVVDVSHEDPEVKFNWYVDGVEVHNAKTKPREEQYNSTYRVVSVLTVLHQDWLNGKEYKCKVSNKALPAPIEKTISKAKGQPREPQVYTLPPSRDELTKNQVSLTCLVKGFYPSDIAVEWESNGQPENNYKTTPPVLDSDGSFFLYSKLTVDKSRWQQGNVFSCSVMHEALHNHYTQKSLSLSPGK

SEQ ID NO: 3249 - protein, 440 aa, Homo sapiens; identical to SEQ ID NO: 3169

SEQ ID NO: 3250 - protein, 442 aa, Homo sapiens
EVQLVQSGAEVKKPGESLRISCKGSGYSFSTYWISWVRQMPGKGLEWMGKIYPGDSYTNYSPSFQGQVTISADKSISTAYLQWSSLKASDTAMYYCARGYGIFDYWGQGTLVTVSSASTKGPSVFPLAPCSRSTSESTAALGCLVKDYFPEPVTVSWNSGALTSGVHTFPAVLQSSGLYSLSSVVTVPSSNFGTQTYTCNVDHKPSNTKVDKTVERKCCVECPPCPAPPVAGPSVFLFPPKPKDTLMISRTPEVTCVVVDVSHEDPEVQFNWYVDGVEVHNAKTKPREEQFNSTFRVVSVLTVVHQDWLNGKEYKCKVSNKGLPAPIEKTISKTKGQPREPQVYTLPPSREEMTKNQVSLTCLVKGFYPSDIAVEWESNGQPENNYKTTPPMLDSDGSFFLYSKLTVDKSRWQQGNVFSCSVMHEALHNHYTQKSLSLSPGK

SEQ ID NO: 3251 - protein, 1464 aa, Homo sapiens
MPEQERQITAREGASRKILSKLSLPTRAWEPAMKKSFAFDNVGYEGGLDGLGPSSQVATSTVRILGMTCQSCVKSIEDRISNLKGIISMKVSLEQGSATVKYVPSVVCLQQVCHQIGDMGFEASIAEGKAASWPSRSLPAQEAVVKLRVEGMTCQSCVSSIEGKVRKLQGVVRVKVSLSNQEAVITYQPYLIQPEDLRDHVNDMGFEAAIKSKVAPLSLGPIDIERLQSTNPKRPLSSANQNFNNSETLGHQGSHVVTLQLRIDGMHCKSCVLNIEENIGQLLGVQSIQVSLENKTAQVKYDPSCTSPVALQRAIEALPPGNFKVSLPDGAEGSGTDHRSSSSHSPGSPPRNQVQGTCSTTLIAIAGMTCASCVHSIEGMISQLEGVQQISVSLAEGTATVLYNPSVISPEELRAAIEDMGFEASVVSESCSTNPLGNHSAGNSMVQTTDGTPTSVQEVAPHTGRLPANHAPDILAKSPQSTRAVAPQKCFLQIKGMTCASCVSNIERNLQKEAGVLSVLVALMAGKAEIKYDPEVIQPLEIAQFIQDLGFEAAVMEDYAGSDGNIELTITGMTCASCVHNIESKLTRTNGITYASVALATSKALVKFDPEIIGPRDIIKIIEEIGFHASLAQRNPNAHHLDHKMEIKQWKKSFLCSLVFGIPVMALMIYMLIPSNEPHQSMVLDHNIIPGLSILNLIFFILCTFVQLLGGWYFYVQAYKSLRHRSANMDVLIVLATSIAYVYSLVILVVAVAEKAERSPVTFFDTPPMLFVFIALGRWLEHLAKSKTSEALAKLMSLQATEATVVTLGEDNLIIREEQVPMELVQRGDIVKVVPGGKFPVDGKVLEGNTMADESLITGEAMPVTKKPGSTVIAGSINAHGSVLIKATHVGNDTTLAQIVKLVEEAQMSKAPIQQLADRFSGYFVPFIIIMSTLTLVVWIVIGFIDFGVVQRYFPNPNKHISQTEVIIRFAFQTSITVLCIACPCSLGLATPTAVMVGTGVAAQNGILIKGGKPLEMAHKIKTMFDKTGTITHGVPRVMRVLLLGDVATLPLRKVLAVVGTAEASSEHPLGVAVTKYCKEELGTETLGYCTDFQAVPGCGIGCKVSNVEGILAHSERPLSAPASHLNEAGSLPAEKDAVPQTFSVLIGNREWLRRNGLTISSDVSDAMTDHEMKGQTAILVAIDGVLCGMIAIADAVKQEAALAVHTLQSMGVDVVLITGDNRKTARAIATQVGINKVFAEVLPSHKVAKVQELQNKGKKVAMVGDGVNDSPALAQADMGVAIGTGTDVAIEAADVVLIRNDLLDVVASIHLSKRTVRRIRINLVLALIYNLVGIPIAAGVFMPIGIVLQPWMGSAAMAASSVSVVLSSLQLKCYKKPDLERYEAQAHGHMKPLTASQVSVHIGMDDRWRDSPRATPWDQVSYVSQVSLSSLTSDKPSRHSAAADDDGDKWSLLLNGRDEEQYI

SEQ ID NO: 3252 - protein, 1321 aa, Homo sapiens
MSDSVILRSIKKFGEENDGFESDKSYNNDKKSRLQDEKKGDGVRVGFFQLFRFSSSTDIWLMFVGSLCAFLHGIAQPGVLLIFGTMTDVFIDYDVELQELQIPGKACVNNTIVWTNSSLNQNMTNGTRCGLLNIESEMIKFASYYAGIAVAVLITGYIQICFWVIAAARQIQKMRKFYFRRIMRMEIGWFDCNSVGELNTRFSDDINKINDAIADQMALFIQRMTSTICGFLLGFFRGWKLTLVIISVSPLIGIGAATIGLSVSKFTDYELKAYAKAGVVADEVISSMRTVAAFGGEKREVERYEKNLVFAQRWGIRKGIVMGFFTGFVWCLIFLCYALAFWYGSTLVLDEGEYTPGTLVQIFLSVIVGALNLGNASPCLEAFATGRAAATSIFETIDRKPIIDCMSEDGYKLDRIKGEIEFHNVTFHYPSRPEVKILNDLNMVIKPGEMTALVGPSGAGKSTALQLIQRFYDPCEGMVTVDGHDIRSLNIQWLRDQIGIVEQEPVLFSTTIAENIRYGREDATMEDIVQAAKEANAYNFIMDLPQQFDTLVGEGGGQMSGGQKQRVAIARALIRNPKILLLDMATSALDNESEAMVQEVLSKIQHGHTIISVAHRLSTVRAADTIIGFEHGTAVERGTHEELLERKGVYFTLVTLQSQGNQALNEEDIKDATEDDMLARTFSRGSYQDSLRASIRQRSKSQLSYLVHEPPLAVVDHKSTYEEDRKDKDIPVQEEVEPAPVRRILKFSAPEWPYMLVGSVGAAVNGTVTPLYAFLFSQILGTFSIPDKEEQRSQINGVCLLFVAMGCVSLFTQFLQGYAFAKSGELLTKRLRKFGFRAMLGQDIAWFDDLRNSPGALTTRLATDASQVQGAAGSQIGMIVNSFTNVTVAMIIAFSFSWKLSLVILCFFPFLALSGATQTRMLTGFASRDKQALEMVGQITNEALSNIRTVAGIGKERRFIEALETELEKPFKTAIQKANIYGFCFAFAQCIMFIANSASYRYGGYLISNEGLHFSYVFRVISAVVLSATALGRAFSYTPSYAKAKISAARFFQLLDRQPPISVYNTAGEKWDNFQGKIDFVDCKFTYPSRPDSQVLNGLSVSISPGQTLAFVGSSGCGKSTSIQLLERFYDPDQGKVMIDGHDSKKVNVQFLRSNIGIVSQEPVLFACSIMDNIKYGDNTKEIPMERVIAAAKQAQLHDFVMSLPEKYETNVGSQGSQLSRGEKQRIAIARAIVRDPKILLLDEATSALDTESEKTVQVALDKAREGRTCIVIAHRLSTIQNADIIAVMAQGVVIEKGTHEELMAQKGAYYKLVTTGSPIS

SEQ ID NO: 3253 - protein, 654 aa, Homo sapiens
MQAARMAASLGRQLLRLGGGSSRLTALLGQPRPGPARRPYAGGAAQLALDKSDSHPSDALTRKKPAKAESKSFAVGFKGQLTTDQVFPYPSVLNEEQTQFLKELVEPVSRFFEEVNDPAKNDALEMVEETTWQGLKELGAFGLQVPSELGGVGLCNTQYARLVEIVGMHDLGVGITLGAHQSIGFKGILLFGTKAQKEKYLPKLASGETVAAFCLTEPSSGSDAASIRTSAVPSPCGKYYTLNGSKLWISNGGLADIFTVFAKTPVTDPATGAVKEKITAFVVERGFGGITHGPPEKKMGIKASNTAEVFFDGVRVPSENVLGEVGSGFKVAMHILNNGRFGMAAALAGTMRGIIAKAVDHATNRTQFGEKIHNFGLIQEKLARMVMLQYVTESMAYMVSANMDQGATDFQIEAAISKIFGSEAAWKVTDECIQIMGGMGFMKEPGVERVLRDLRIFRIFEGTNDILRLFVALQGCMDKGKELSGLGSALKNPFGNAGLLLGEAGKQLRRRAGLGSGLSLSGLVHPELSRSGELAVRALEQFATVVEAKLIKHKKGIVNEQFLLQRLADGAIDLYAMVVVLSRASRSLSEGHPTAQHEKMLCDTWCIEAAARIREGMAALQSDPWQQELYRNFKSISKALVERGGVVTSNPLGF

SEQ ID NO: 3254 - protein, 1532 aa, Homo sapiens
MGHSKQIRILLLNEMEKLEKTLFRLEQGYELQFRLGPTLQGKAVTVYTNYPFPGETFNREKFRSLDWENPTEREDDSDKYCKLNLQQSGSFQYYFLQGNEKSGGGYIVVDPILRVGADNHVLPLDCVTLQTFLAKCLGPFDEWESRLRVAKESGYNMIHFTPLQTLGLSRSCYSLANQLELNPDFSRPNRKYTWNDVGQLVEKLKKEWNVICITDVVYNHTAANSKWIQEHPECAYNLVNSPHLKPAWVLDRALWRFSCDVAEGKYKEKGIPALIENDHHMNSIRKIIWEDIFPKLKLWEFFQVDVNKAVEQFRRLLTQENRRVTKSDPNQHLTIIQDPEYRRFGCTVDMNIALTTFIPHDKGPAAIEECCNWFHKRMEELNSEKHRLINYHQEQAVNCLLGNVFYERLAGHGPKLGPVTRKHPLVTRYFTFPFEEIDFSMEESMIHLPNKACFLMAHNGWVMGDDPLRNFAEPGSEVYLRRELICWGDSVKLRYGNKPEDCPYLWAHMKKYTEITATYFQGVRLDNCHSTPLHVAEYMLDAARNLQPNLYVVAELFTGSEDLDNVFVTRLGISSLIREAMSAYNSHEEGRLVYRYGGEPVGSFVQPCLRPLMPAIAHALFMDITHDNECPIVHRSAYDALPSTTIVSMACCASGSTRGYDELVPHQISVVSEERFYTKWNPEALPSNTGEVNFQSGIIAARCAISKLHQELGAKGFIQVYVDQVDEDIVAVTRHSPSIHQSVVAVSRTAFRNPKTSFYSKEVPQMCIPGKIEEVVLEARTIERNTKPYRKDENSINGTPDITVEIREHIQLNESKIVKQAGVATKGPNEYIQEIEFENLSPGSVIIFRVSLDPHAQVAVGILRNHLTQFSPHFKSGSLAVDNADPILKIPFASLASRLTLAELNQILYRCESEEKEDGGGCYDIPNWSALKYAGLQGLMSVLAEIRPKNDLGHPFCNNLRSGDWMIDYVSNRLISRSGTIAEVGKWLQAMFFYLKQIPRYLIPCYFDAILIGAYTTLLDTAWKQMSSFVQNGSTFVKHLSLGSVQLCGVGKFPSLPILSPALMDVPYRLNEITKEKEQCCVSLAAGLPHFSSGIFRCWGRDTFIALRGILLITGRYVEARNIILAFAGTLRHGLIPNLLGEGIYARYNCRDAVWWWLQCIQDYCKMVPNGLDILKCPVSRMYPTDDSAPLPAGTLDQPLFEVIQEAMQKHMQGIQFRERNAGPQIDRNMKDEGFNITAGVDEETGFVYGGNRFNCGTWMDKMGESDRARNRGIPATPRDGSAVEIVGLSKSAVRWLLELSKKNIFPYHEVTVKRHGKAIKVSYDEWNRKIQDNFEKLFHVSEDPSDLNEKHPNLVHKRGIYKDSYGASSPWCDYQLRPNFTIAMVVAPELFTTEKAWKALEIAEKKLLGPLGMKTLDPDDMVYCGIYDNALDNDNYNLAKGFNYHQGPEWLWPIGYFLRAKLYFSRLMGPETTAKTIVLVKNVLSRHYVHLERSPWKGLPELTNENAQYCPFSCETQAWSIATILETLYDL

SEQ ID NO: 3255 - protein, 2351 aa, Homo sapiens
MQIELSTCFFLCLLRFCFSATRRYYLGAVELSWDYMQSDLGELPVDARFPPRVPKSFPFNTSVVYKKTLFVEFTDHLFNIAKPRPPWMGLLGPTIQAEVYDTVVITLKNMASHPVSLHAVGVSYWKASEGAEYDDQTSQREKEDDKVFPGGSHTYVWQVLKENGPMASDPLCLTYSYLSHVDLVKDLNSGLIGALLVCREGSLAKEKTQTLHKFILLFAVFDEGKSWHSETKNSLMQDRDAASARAWPKMHTVNGYVNRSLPGLIGCHRKSVYWHVIGMGTTPEVHSIFLEGHTFLVRNHRQASLEISPITFLTAQTLLMDLGQFLLFCHISSHQHDGMEAYVKVDSCPEEPQLRMKNNEEAEDYDDDLTDSEMDVVRFDDDNSPSFIQIRSVAKKHPKTWVHYIAAEEEDWDYAPLVLAPDDRSYKSQYLNNGPQRIGRKYKKVRFMAYTDETFKTREAIQHESGILGPLLYGEVGDTLLIIFKNQASRPYNIYPHGITDVRPLYSRRLPKGVKHLKDFPILPGEIFKYKWTVTVEDGPTKSDPRCLTRYYSSFVNMERDLASGLIGPLLICYKESVDQRGNQIMSDKRNVILFSVFDENRSWYLTENIQRFLPNPAGVQLEDPEFQASNIMHSINGYVFDSLQLSVCLHEVAYWYILSIGAQTDFLSVFFSGYTFKHKMVYEDTLTLFPFSGETVFMSMENPGLWILGCHNSDFRNRGMTALLKVSSCDKNTGDYYEDSYEDISAYLLSKNNAIEPRSFSQNSRHPSTRQKQFNATTIPENDIEKTDPWFAHRTPMPKIQNVSSSDLLMLLRQSPTPHGLSLSDLQEAKYETFSDDPSPGAIDSNNSLSEMTHFRPQLHHSGDMVFTPESGLQLRLNEKLGTTAATELKKLDFKVSSTSNNLISTIPSDNLAAGTDNTSSLGPPSMPVHYDSQLDTTLFGKKSSPLTESGGPLSLSEENNDSKLLESGLMNSQESSWGKNVSSTESGRLFKGKRAHGPALLTKDNALFKVSISLLKTNKTSNNSATNRKTHIDGPSLLIENSPSVWQNILESDTEFKKVTPLIHDRMLMDKNATALRLNHMSNKTTSSKNMEMVQQKKEGPIPPDAQNPDMSFFKMLFLPESARWIQRTHGKNSLNSGQGPSPKQLVSLGPEKSVEGQNFLSEKNKVVVGKGEFTKDVGLKEMVFPSSRNLFLTNLDNLHENNTHNQEKKIQEEIEKKETLIQENVVLPQIHTVTGTKNFMKNLFLLSTRQNVEGSYDGAYAPVLQDFRSLNDSTNRTKKHTAHFSKKGEEENLEGLGNQTKQIVEKYACTTRISPNTSQQNFVTQRSKRALKQFRLPLEETELEKRIIVDDTSTQWSKNMKHLTPSTLTQIDYNEKEKGAITQSPLSDCLTRSHSIPQANRSPLPIAKVSSFPSIRPIYLTRVLFQDNSSHLPAASYRKKDSGVQESSHFLQGAKKNNLSLAILTLEMTGDQREVGSLGTSATNSVTYKKVENTVLPKPDLPKTSGKVELLPKVHIYQKDLFPTETSNGSPGHLDLVEGSLLQGTEGAIKWNEANRPGKVPFLRVATESSAKTPSKLLDPLAWDNHYGTQIPKEEWKSQEKSPEKTAFKKKDTILSLNACESNHAIAAINEGQNKPEIEVTWAKQGRTERLCSQNPPVLKRHQREITRTTLQSDQEEIDYDDTISVEMKKEDFDIYDEDENQSPRSFQKKTRHYFIAAVERLWDYGMSSSPHVLRNRAQSGSVPQFKKVVFQEFTDGSFTQPLYRGELNEHLGLLGPYIRAEVEDNIMVTFRNQASRPYSFYSSLISYEEDQRQGAEPRKNFVKPNETKTYFWKVQHHMAPTKDEFDCKAWAYFSDVDLEKDVHSGLIGPLLVCHTNTLNPAHGRQVTVQEFALFFTIFDETKSWYFTENMERNCRAPCNIQMEDPTFKENYRFHAINGYIMDTLPGLVMAQDQRIRWYLLSMGSNENIHSIHFSGHVFTVRKKEEYKMALYNLYPGVFETVEMLPSKAGIWRVECLIGEHLHAGMSTLFLVYSNKCQTPLGMASGHIRDFQITASGQYGQWAPKLARLHYSGSINAWSTKEPFSWIKVDLLAPMIIHGIKTQGARQKFSSLYISQFIIMYSLDGKKWQTYRGNSTGTLMVFFGNVDSSGIKHNIFNPPIIARYIRLHPTHYSIRSTLRMELMGCDLNSCSMPLGMESKAISDAQITASSYFTNMFATWSPSKARLHLQGRSNAWRPQVNNPKEWLQVDFQKTMKVTGVTTQGVKSLLTSMYVKEFLISSSQDGHQWTLFFQNGKVKVFQGNQDSFTPVVNSLDPPLLTRYLRIHPQSWVHQIALRMEVLGCEAQDLY

SEQ ID NO: 3256 - protein, 461 aa, Homo sapiens
MQRVNMIMAESPGLITICLLGYLLSAECTVFLDHENANKILNRPKRYNSGKLEEFVQGNLERECMEEKCSFEEAREVFENTERTTEFWKQYVDGDQCESNPCLNGGSCKDDINSYECWCPFGFEGKNCELDVTCNIKNGRCEQFCKNSADNKVVCSCTEGYRLAENQKSCEPAVPFPCGRVSVSQTSKLTRAETVFPDVDYVNSTEAETILDNITQSTQSFNDFTRVVGGEDAKPGQFPWQVVLNGKVDAFCGGSIVNEKWIVTAAHCVETGVKITVVAGEHNIEETEHTEQKRNVIRIIPHHNYNAAINKYNHDIALLELDEPLVLNSYVTPICIADKEYTNIFLKFGSGYVSGWGRVFHKGRSALVLQYLRVPLVDRATCLRSTKFTIYNNMFCAGFHEGGRDSCQGDSGGPHVTEVEGTSFLTGIISWGEECAMKGKYGIYTKVSRYVNWIKEKTKLT

SEQ ID NO: 3257 - protein, 452 aa, Homo sapiens
MSTAVLENPGLGRKLSDFGQETSYIEDNCNQNGAISLIFSLKEEVGALAKVLRLFEENDVNLTHIESRPSRLKKDEYEFFTHLDKRSLPALTNIIKILRHDIGATVHELSRDKKKDTVPWFPRTIQELDRFANQILSYGAELDADHPGFKDPVYRARRKQFADIAYNYRHGQPIPRVEYMEEEKKTWGTVFKTLKSLYKTHACYEYNHIFPLLEKYCGFHEDNIPQLEDVSQFLQTCTGFRLRPVAGLLSSRDFLGGLAFRVFHCTQYIRHGSKPMYTPEPDICHELLGHVPLFSDRSFAQFSQEIGLASLGAPDEYIEKLATIYWFTVEFGLCKQGDSIKAYGAGLLSSFGELQYCLSEKPKLLPLELEKTAIQNYTVTEFQPLYYVAESFNDAKEKVRNFAATIPRPFSVRYDPYTQRIEVLDNTQQLKILADSINSEIGILCSALQKIK

SEQ ID NO: 3258 - protein, 361 aa, Homo sapiens [sequence omitted]

SEQ ID NO: 3259 - protein, 952 aa, Homo sapiens
MGVRHPPCSHRLLAVCALVSLATAALLGHILLHDFLLVPRELSGSSPVLEETHPAHQQGASRPGPRDAQAHPGRPRAVPTQCDVPPNSRFDCAPDKAITQEQCEARGCCYIPAKQGLQGAQMGQPWCFFPPSYPSYKLENLSSSEMGYTATLTRTTPTFFPKDILTLRLDVMMETENRLHFTIKDPANRRYEVPLETPHVHSRAPSPLYSVEFSEEPFGVIVRRQLDGRVLLNTTVAPLFFADQFLQLSTSLPSQYITGLAEHLSPLMLSTSWTRITLWNRDLAPTPGANLYGSHPFYLALEDGGSAHGVFLLNSNAMDVVLQPSPALSWRSTGGILDVYIFLGPEPKSVVQQYLDVVGYPFMPPYWGLGFHLCRWGYSSTAITRQVVENMTRAHFPLDVQWNDLDYMDSRRDFTFNKDGFRDFPAMVQELHQGGRRYMMIVDPAISSSGPAGSYRPYDEGLRRGVFITNETGQPLIGKVWPGSTAFPDFTNPTALAWWEDMVAEFHDQVPFDGMWIDMNEPSNFIRGSEDGCPNNELENPPYVPGVVGGTLQAATICASSHQFLSTHYNLHNLYGLTEAIASHRALVKARGTRPFVISRSTFAGHGRYAGHWTGDVWSSWEQLASSVPEILQFNLLGVPLVGADVCGFLGNTSEELCVRWTQLGAFYPFMRNHNSLLSLPQEPYSFSEPAQQAMRKALTLRYALLPHLYTLFHQAHVAGETVARPLFLEFPKDSSTWTVDHQLLWGEALLITPVLQAGKAEVTGYFPLGTWYDLQTVPVEALGSLPPPPAAPREPAIHSEGQWVTLPAPLDTINVHLRAGYIIPLQGPGLTTTESRQQPMALAVALTKGGEARGELFWDDGESLEVLERGAYTQVIFLARNNTIVNELVRVTSEGAGLQLQKVTVLGVATAPQQVLSNGVPVSNFTYSPDTKVLDICVSLLMGEQFLVSWC

SEQ ID NO: 3260 - protein, 412 aa, Homo sapiens
MSSKGSVVLAYSGGLDTSCILVWLKEQGYDVIAYLANIGQKEDFEEARKKALKLGAKKVFIEDVSREFVEEFIWPAIQSSALYEDRYLLGTSLARPCIARKQVEIAQREGAKYVSHGATGKGNDQVRFELSCYSLAPQIKVIAPWRMPEFYNRFKGRNDLMEYAKQHGIPIPVTPKNPWSMDENLMHISYEAGILENPKNQAPPGLYTKTQDPAKAPNTPDILEIEFKKGVPVKVTNVKDGTTHQTSLELFMYLNEVAGKHGVGRIDIVENRFIGMKSRGIYETPAGTILYHAHLDIEAFTMDREVRKIKQGLGLKFAELVYTGFWHSPECEFVRHCIAKSQERVEGKVQVSVLKGQVYILGRESPLSLYNEELVSMNVQGDYEPTDATGFININSLRLKEYHRLQSKVTAK

SEQ ID NO: 3261 - protein, 357 aa, Homo sapiens
MEEGMNVLHDFGIQSTHYLQVNYQDSQDWFILVSVIADLRNAFYVLFPIWFHLQEAVGIKLLWVAVIGDWLNLVFKWILFGQRPYWWVLDTDYYSNTSVPLIKQFPVTCETGPGSPSGHAMGTAGVYYVMVTSTLSIFQGKIKPTYRFRCLNVILWLGFWAVQLNVCLSRIYLAAHFPHQVVAGVLSGIAVAETFSHIHSIYNASLKKYFLITFFLFSFAIGFYLLLKGLGVDLLWTLEKAQRWCEQPEWVHIDTTPFASLLKNLGTLFGLGLALNSSMYRESCKGKLSKWLPFRLSSIVASLVLLHVFDSLKPPSQVELVFYVLSFCKSAVVPLASVSVIPYCLAQVLGQPHKKSL

SEQ ID NO: 3262 - protein, 354 aa, Homo sapiens
MLFNLRILLNNAAFRNGHNFMVRNFRCGQPLQNKVQLKGRDLLTLKNFTGEEIKYMLWLSADLKFRIKQKGEYLPLLQGKSLGMIFEKRSTRTRLSTETGFALLGGHPCFLTTQDIHLGVNESLTDTARVLSSMADAVLARVYKQSDLDTLAKEASIPIINGLSDLYHPIQILADYLTLQEHYSSLKGLTLSWIGDGNNILHSIMMSAAKFGMHLQAATPKGYEPDASVTKLAEQYAKENGTKLLLTNDPLEAAHGGNVLITDTWISMGQEEEKKKRLQAFQGYQVTMKTAKVAASDWTFLHCLPRKPEEVDDEVFYSPRSLVFPEAENRKWTIMAVMVSLLTDYSPQLQKPKF

SEQ ID NO: 3263 - protein, 3684 aa, Homo sapiens
MLWWEEVEDCYEREDVQKKTFTKWVNAQFSKFGKQHIENLFSDLQDGRRLLDLLEGLTGQKLPKEKGSTRVHALNNVNKALRVLQNNNVDLVNIGSTDIVDGNHKLTLGLIWNIILHWQVKNVMKNIMAGLQQTNSEKILLSWVRQSTRNYPQVNVINFTTSWSDGLALNALIHSHRPDLFDWNSVVCQQSATQRLEHAFNIARYQLGIEKLLDPEDVDTTYPDKKSILMYITSLFQVLPQQVSIEAIQEVEMLPRPPKVTKEEHFQLHHQMHYSQQITVSLAQGYERTSSPKPRFKSYAYTQAAYVTTSDPTRSPFPSQHLEAPEDKSFGSSLMESEVNLDRYQTALEEVLSWLLSAEDTLQAQGEISNDVEVVKDQFHTHEGYMMDLTAHQGRVGNILQLGSKLIGTGKLSEDEETEVQEQMNLLNSRWECLRVASMEKQSNLHRVLMDLQNQKLKELNDWLTKTEERTRKMEEEPLGPDLEDLKRQVQQHKVLQEDLEQEQVRVNSLTHMVVVVDESSGDHATAALEEQLKVLGDRWANICRWTEDRWVLLQDILLKWQRLTEEQCLFSAWLSEKEDAVNKIHTTGFKDQNEMLSSLQKLAVLKADLEKKKQSMGKLYSLKQDLLSTLKNKSVTQKTEAWLDNFARCWDNLVQKLEKSTAQISQAVTTTQPSLTQTTVMETVTTVTTREQILVKHAQEELPPPPPQKKRQITVDSEIRKRLDVDITELHSWITRSEAVLQSPEFAIFRKEGNFSDLKEKVNAIEREKAEKFRKLQDASRSAQALVEQMVNEGVNADSIKQASEQLNSRWIEFCQLLSERLNWLEYQNNIIAFYNQLQQLEQMTTTAENWLKIQPTTPSEPTAIKSQLKICKDEVNRLSDLQPQIERLKIQSIALKEKGQGPMFLDADFVAFTNHFKQVFSDVQAREKELQTIFDTLPPMRYQETMSAIRTWVQQSETKLSIPQLSVTDYEIMEQRLGELQALQSSLQEQQSGLYYLSTTVKEMSKKAPSEISRKYQEFEEIEGRWKKLSSQLVEHCQKLEEQMNKLRKIQNHIQTLKKWMAEVDVFLKEEWPALGDSEILKKQLKQCRLLVSDIQTIQPSLNSVNEGGQKIKNEAEPEFASRLETELKELNTQWDHMCQQVYARKEALKGGLEKTVSLQKDLSEMHEWMTQAEEEYLERDFEYKTPDELQKAVEEMKRAKEEAQQKEAKVKLLTESVNSVIAQAPPVAQEALKKELETLTTNYQWLCTRLNGKCKTLEEVWACWHELLSYLEKANKWLNEVEFKLKTTENIPGGAEEISEVLDSLENLMRHSEDNPNQIRILAQTLTDGGVMDELINEELETFNSRWRELHEEAVRRQKLLEQSIQSAQETEKSLHLIQESLTFIDKQLAAYIADKVDAAQMPQEAQKIQSDLTSHEISLEEMKKHNQGKEAAQRVLSQIDVAQKKLQDVSMKFRLFQKPANFEQRLQESKMILDEVKMHLPALETKSVEQEVVQSQLNHCVNLYKSLSEVKSEVEMVIKTGRQIVQKKQTENPKELDERVTALKLHYNELGAKVTERKQQLEKCLKLSRKMRKEMNVLTEWLAATDMELTKRSAVEGMPSNLDSEVAWGKATQKEIEKQKVHLKSITEVGEALKTVLGKKETLVEDKLSLLNSNWIAVTSRAEEWLNLLLEYQKHMETFDQNVDHITKWIIQADTLLDESEKKKPQQKEDVLKRLKAELNDIRPKVDSTRDQAANLMANRGDHCRKLVEPQISELNHRFAAISHRIKTGKASIPLKELEQFNSDIQKLLEPLEAEIQQGVNLKEEDFNKDMNEDNEGTVKELLQRGDNLQQRITDERKREEIKIKQQLLQTKHNALKDLRSQRRKKALEISHQWYQYKRQADDLLKCLDDIEKKLASLPEPRDERKIKEIDRELQKKKEELNAVRRQAEGLSEDGAAMAVEPTQIQLSKRWREIESKFAQFRRLNFAQIHTVREETMMVMTEDMPLEISYVPSTYLTEITHVSQALLEVEQLLNAPDLCAKDFEDLFKQEESLKNIKDSLQQSSGRIDIIHSKKTAALQSATPVERVKLQEALSQLDFQWEKVNKMYKDRQGRFDRSVEKWRRFHYDIKIFNQWLTEAEQFLRKTQIPENWEHAKYKWYLKELQDGIGQRQTVVRTLNATGEEIIQQSSKTDASILQEKLGSLNLRWQEVCKQLSDRKKRLEEQKNILSEFQRDLNEFVLWLEEADNIASIPLEPGKEQQLKEKLEQVKLLVEELPLRQGILKQLNETGGPVLVSAPISPEEQDKLENKLKQTNLQWIKVSRALPEKQGEIEAQIKDLGQLEKKLEDLEEQLNHLLLWLSPIRNQLEIYNQPNQEGPFDVKETEIAVQAKQPDVEEILSKGQHLYKEKPATQPVKRKLEDLSSEWKAVNRLLQELRAKQPDLAPGLTTIGASPTQTVTLVTQPVVTKETAISKLEMPSSLMLEVPALADFNRAWTELTDWLSLLDQVIKSQRVMVGDLEDINEMIIKQKATMQDLEQRRPQLEELITAAQNLKNKTSNQEARTIITDRIERIQNQWDEVQEHLQNRRQQLNEMLKDSTQWLEAKEEAEQVLGQARAKLESWKEGPYTVDAIQKKITETKQLAKDLRQWQTNVDVANDLALKLLRDYSADDTRKVHMITENINASWRSIHKRVSEREAALEETHRLLQQFPLDLEKFLAWLTEAETTANVLQDATRKERLLEDSKGVKELMKQWQDLQGEIEAHTDVYHNLDENSQKILRSLEGSDDAVLLQRRLDNMNFKWSELRKKSLNIRSHLEASSDQWKRLHLSLQELLVWLQLKDDELSRQAPIGGDFPAVQKQNDVHRAFKRELKTKEPVIMSTLETVRIFLTEQPLEGLEKLYQEPRELPPEERAQNVTRLLRKQAEEVNTEWEKLNLHSADWQRKIDETLERLQELQEATDELDLKLRQAEVIKGSWQPVGDLLIDSLQDHLEKVKALRGEIAPLKENVSHVNDLARQLTTLGIQLSPYNLSTLEDLNTRWKLLQVAVEDRVRQLHEAHRDFGPASQHFLSTSVQGPWERAISPNKVPYYINHETQTTCWDHPKMTELYQSLADLNNVRFSAYRTAMKLRRLQKALCLDLLSLSAACDALDQHNLKQNDQPMDILQIINCLTTIYDRLEQEHNNLVNVPLCVDMCLNWLLNVYDTGRTGRIRVLSFKTGIISLCKAHLEDKYRYLFKQVASSTGFCDQRRLGLLLHDSIQIPRQLGEVASFGGSNIEPSVRSCFQFANNKPEIEAALFLDWMRLEPQSMVWLPVLHRVAAAETAKHQAKCNICKECPIIGFRYRSLKHFNYDICQSCFFSGRVAKGHKMHYPMVEYCTPTTSGEDVRDFAKVLKNKFRTKRYFAKHPRMGYLPVQTVLEGDNMETPVTLINFWPVDSAPASSPQLSHDDTHSRIEHYASRLAEMENSNGSYLNDSISPNESIDDEHLLIQHYCQSLNQDSPLSQPRSPAQILISLESEERGELERILADLEEENRNLQAEYDRLKQQHEHKGLSPLPSPPEMMPTSPQSPRDAELIAEAKLLRQHKGRLEARMQILEDHNKQLESQLHRLRQLLEQPQAEAKVNGTTVSSPSTSLQRSDSSQPMLLRVVGSQTSDSMGEEDLLSPPQDTSTGLEEVMEQLNNSFPSSRGRNTPGKPMREDTM

SEQ ID NO: 3264 - protein, 3121 aa, Homo sapiens
MPGAAGVLLLLLLSGGLGGVQAQRPQQQRQSQAHQQRGLFPAVLNLASNALITTNATCGEKGPEMYCKLVEHVPGQPVRNPQCRICNQNSSNPNQRHPITNAIDGKNTWWQSPSIKNGIEYHYVTITLDLQQVFQIAYVIVKAANSPRPGNWILERSLDDVEYKPWQYHAVTDTECLTLYNIYPRTGPPSYAKDDEVICTSFYSKIHPLENGEIHISLINGRPSADDPSPELLEFTSARYIRLRFQRIRTLNADLMMFAHKDPREIDPIVTRRYYYSVKDISVGGMCICYGHARACPLDPATNKSRCECEHNTCGDSCDQCCPGFHQKPWRAGTFLTKTECEACNCHGKAEECYYDENVARRNLSLNIRGKYIGGGVCINCTQNTAGINCETCTDGFFRPKGVSPNYPRPCQPCHCDPIGSLNEVCVKDEKHARRGLAPGSCHCKTGFGGVSCDRCARGYTGYPDCKACNCSGLGSKNEDPCFGPCICKENVEGGDCSRCKSGFFNLQEDNWKGCDECFCSGVSNRCQSSYWTYGKIQDMSGWYLTDLPGRIRVAPQQDDLDSPQQISISNAEARQALPHSYYWSAPAPYLGNKLPAVGGQLTFTISYDLEEEEEDTERVLQLMIILEGNDLSISTAQDEVYLHPSEEHTNVLLLKEESFTIHGTHFPVRRKEFMTVLANLKRVLLQITYSFGMDAIFRLSSVNLESAVSYPTDGSIAAAVEVCQCPPGYTGSSCESCWPRHRRVNGTIFGGICEPCQCFGHAESCDDVTGECLNCKDHTGGPYCDKCLPGFYGEPTKGTSEDCQPCACPLNIPSNNFSPTCHLDRSLGLICDGCPVGYTGPRCERCAEGYFGQPSVPGGSCQPCQCNDNLDFSIPGSCDSLSGSCLICKPGTTGRYCELCADGYFGDAVDAKNCQPCRCNAGGSFSEVCHSQTGQCECRANVQGQRCDKCKAGTFGLQSARGCVPCNCNSFGSKSFDCEESGQCWCQPGVTGKKCDRCAHGYFNFQEGGCTACECSHLGNNCDPKTGRCICPPNTIGEKCSKCAPNTWGHSITTGCKACNCSTVGSLDFQCNVNTGQCNCHPKFSGAKCTECSRGHWNYPRCNLCDCFLPGTDATTCDSETKKCSCSDQTGQCTCKVNVEGIHCDRCRPGKFGLDAKNPLGCSSCYCFGTTTQCSEAKGLIRTWVTLKAEQTILPLVDEALQHTTTKGIVFQHPEIVAHMDLMREDLHLEPFYWKLPEQFEGKKLMAYGGKLKYAIYFEAREETGFSTYNPQVIIRGGTPTHARIIVRHMAAPLIGQLTRHEIEMTEKEWKYYGDDPRVHRTVTREDFLDILYDIHYILIKATYGNFMRQSRISEISMEVAEQGRGTTMTPPADLIEKCDCPLGYSGLSCEACLPGFYRLRSQPGGRTPGPTLGTCVPCQCNGHSSLCDPETSICQNCQHHTAGDFCERCALGYYGIVKGLPNDCQQCACPLISSSNNFSPSCVAEGLDDYRCTACPRGYEGQYCERCAPGYTGSPGNPGGSCQECECDPYGSLPVPCDPVTGFCTCRPGATGRKCDGCKHWAREGWECVFCGDECTGLLLGDLARLEQMVMSINLTGPLPAPYKMLYGLENMTQELKHLLSPQRAPERLIQLAEGNLNTLVTEMNELLTRATKVTADGEQTGQDAERTNTRAKSLGEFIKELARDAEAVNEKAIKLNETLGTRDEAFERNLEGLQKEIDQMIKELRRKNLETQKEIAEDELVAAEALLKKVKKLFGESRGENEEMEKDLREKLADYKNKVDDAWDLLREATDKIREANRLFAVNQKNMTALEKKKEAVESGKRQIENTLKEGNDILDEANRLADEINSIIDYVEDIQTKLPPMSEELNDKIDDLSQEIKDRKLAEKVSQAESHAAQLNDSSAVLDGILDEAKNISFNATAAFKAYSNIKDYIDEAEKVAKEAKDLAHEATKLATGPRGLLKEDAKGCLQKSFRILNEAKKLANDVKENEDHLNGLKTRIENADARNGDLLRTLNDTLGKLSAIPNDTAAKLQAVKDKARQANDTAKDVLAQITELHQNLDGLKKNYNKLADSVAKTNAVVKDPSKNKIIADADATVKNLEQEADRLIDKLKPIKELEDNLKKNISEIKELINQARKQANSIKVSVSSGGDCIRTYKPEIKKGSYNNIVVNVKTAVADNLLFYLGSAKFIDFLAIEMRKGKVSFLWDVGSGVGRVEYPDLTIDDSYWYRIVASRTGRNGTISVRALDGPKASIVPSTHHSTSPPGYTILDVDANAMLFVGGLTGKLKKADAVRVITFTGCMGETYFDNKPIGLWNFREKEGDCKGCTVSPQVEDSEGTIQFDGEGYALVSRPIRWYPNISTVMFKFRTFSSSALLMYLATRDLRDFMSVELTDGHIKVSYDLGSGMASVVSNQNHNDGKWKSFTLSRIQKQANISIVDIDTNQEENIATSSSGNNFGLDLKADDKIYFGGLPTLRNLSMKARPEVNLKKYSGCLKDIEISRTPYNILSSPDYVGVTKGCSLENVYTVSFPKPGFVELSPVPIDVGTEINLSFSTKNESGIILLGSGGTPAPPRRKRRQTGQAYYAILLNRGRLEVHLSTGARTMRKIVIRPEPNLFHDGREHSVHVERTRGIFTVQVDENRRYMQNLTVEQPIEVKKLFVGGAPPEFQPSPLRNIPPFEGCIWNLVINSVPMDFARPVSFKNADIGRCAHQKLREDEDGAAPAEIVIQPEPVPTPAFPTPTPVLTHGPCAAESEPALLIGSKQFGLSRNSHIAIAFDDTKVKNRLTIELEVRTEAESGLLFYMARINHADFATVQLRNGLPYFSYDLGSGDTHTMIPTKINDGQWHKIKIMRSKQEGILYVDGASNRTISPKKADILDVVGMLYVGGLPINYTTRRIGPVTYSIDGCVRNLHMAEAPADLEQPTSSFHVGTCFANAQRGTYFDGTGFAKAVGGFKVGLDLLVEFEFRTTTTTGVLLGISSQKMDGMGIEMIDEKLMFHVDNGAGRFTAVYDAGVPGHLCDGQWHKVTANKIKHRIELTVDGNQVEAQSPNPASTSADTNDPVFVGGFPDDLKQFGLTTSIPFRGCIRSLKLTKGTGKPLEVNFAKALELRGVQPVSCPAN

SEQ ID NO: 3265 - protein, 474 aa, Homo sapiens
MRLSKTLVDMDMADYSAALDPAYTTLEFENVQVLTMGNDTSPSEGTNLNAPNSLGVSALCAICGDRATGKHYGASSCDGCKGFFRRSVRKNHMYSCRFSRQCVVDKDKRNQCRYCRLKKCFRAGMKKEAVQNERDRISTRRSSYEDSSLPSINALLQAEVLSRQITSPVSGINGDIRAKKIASIADVCESMKEQLLVLVEWAKYIPAFCELPLDDQVALLRAHAGEHLLLGATKRSMVFKDVLLLGNDYIVPRHCPELAEMSRVSIRILDELVLPFQELQIDDNEYAYLKAIIFFDPDAKGLSDPGKIKRLRSQVQVSLEDYINDRQYDSRGRFGELLLLLPTLQSITWQMIEQIQFIKLFGMAKIDNLLQEMLLGGSPSDAPHAHHPLHPHLMQEHMGTNVIVANTMPTHLSNGQMCEWPRPRGQAATPETPQPSPPGGSGSEPYKLLPGAVATIVKPLSAIPQPTITKQEVI

SEQ ID NO: 3266 - RNA, 40 nt, synthetic construct
  source 1..40: mol_type = other RNA
actcactatttgttttcgcgcccagttgcaaaaagtgtcg

SEQ ID NO: 3267 - RNA, 39 nt, synthetic construct
  source 1..39: mol_type = other RNA
gccagagcaacaaccttccgagccgcgggataaaccgag

SEQ ID NO: 3268 - RNA, 40 nt, synthetic construct
  source 1..40: mol_type = other RNA
ggggaccgcgccccacatgtgagtgaggccgaaacgtaga

SEQ ID NO: 3269 - RNA, 30 nt, synthetic construct
  source 1..30: mol_type = other RNA
tataattctaccctattgaggcattgacta

SEQ ID NO: 3270 - protein, 493 aa, synthetic construct
MALPVTALLLPLALLLHAARPDIVLTQSPASLAVSLGERATINCRASESVSVIGAHLIHWYQQKPGQPPKLLIYLASNLETGVPARFSGSGSGTDFTLTISSLQAEDAAIYYCLQSRIFPRTFGQGTKLEIKGSTSGSGKPGSGEGSTKGQVQLVQSGSELKKPGASVKVSCKASGYTFTDYSINWVRQAPGQGLEWMGWINTETREPAYAYDFRGRFVFSLDTSVSTAYLQISSLKAEDTAVYYCARDYSYAMDYWGQGTLVTVSSAAATTTPAPRPPTPAPTIASQPLSLRPEACRPAAGGAVHTRGLDFACDIYIWAPLAGTCGVLLLSLVITLYCKRGRKKLLYIFKQPFMRPVQTTQEEDGCSCRFPEEEEGGCELRVKFSRSADAPAYQQGQNQLYNELNLGRREEYDVLDKRRGRDPEMGGKPRRKNPQEGLYNELQKDKMAEAYSEIGMKGERRRGKGHDGLYQGLSTATKDTYDALHMQALPPR

SEQ ID NO: 3271 - protein, 207 aa, synthetic construct
KNQVEQSPQSLIILEGKNCTLQCNYTVSPFSNLRWYKQDTGRGPVSLTIMTFSENTKSNGRYTATLDADTKQSSLHITASQLSDSASYICVVNHSGGSYIPTFGRGTSLIVHPYIQKPDPAVYQLRDSKSSDKSVCLFTDFDSQTNVSQSKDSDVYITDKTVLDMRSMDFKSNSAVAWSNKSDFACANAFNNSIIPEDTFFPSPESS

SEQ ID NO: 3272 - protein, 246 aa, synthetic construct
DVKVTQSSRYLVKRTGEKVFLECVQDMDHENMFWYRQDPGLGLRLIYFSYDVKMKEKGDIPEGYSVSREKKERFSLILESASTNQTSMYLCASSFLMTSGDPYEQYFGPGTRLTVTEDLKNVFPPEVAVFEPSEAEISHTQKATLVCLATGFYPDHVELSWWVNGKEVHSGVSTDPQPLKEQPALNDSRYCLSSRLRVSATFWQNPRNHFRCQVQFYGLSENDEWTQDRAKPVTQIVSAEAWGRAD

SEQ ID NO: 3273 - protein, 115 aa, synthetic construct
MQEVTQIPAALSVPEGENLVLNCSFTDSAIYNLQWFRQDPGKGLTSLLLIQSSQREQTSGRLNASLDKSSGRSTLYIAASQPGDSATYLCAVRPTSGGSYIPTFGRGTSLIVHPY

SEQ ID NO: 3274 - protein, 112 aa, synthetic construct
MGVTQTPKFQVLKTGQSMTLQCAQDMNHEYMSWYRQDPGMGLRLIHYSVGAGITDQGEVPNGYNVSRSTTEDFPLRLLSAAPSQTSVYFCASSYVGNTGELFFGEGSRLTVL

SEQ ID NO: 3275 - protein, 166 aa, synthetic construct
APPRLICDSRVLERYLLEAKEAENITTGCAEHCSLNENITVPDTKVNFYAWKRMEVGQQAVEVWQGLALLSEAVLRGQALLVNSSQPWEPLQLHVDKAVSGLRSLTTLLRALGAQKEAISPPDAASAAPLRTITADTFRKLFRVYSNFLRGKLKLYTGEACRTGDR

SEQ ID NO: 3276 - protein, 1462 aa, synthetic construct
LSVKAQTAHIVLEDGTKMKGYSFGHPSSVAGEVVFNTGLGGYPEAITDPAYKGQILTMANPIIGNGGAPDTTALDELGLSKYLESNGIKVSGLLVLDYSKDYNHWLATKSLGQWLQEEKVPAIYGVDTRMLTKIIRDKGTMLGKIEFEGQPVDFVDPNKQNLIAEVSTKDVKVYGKGNPTKVVAVDCGIKNNVIRLLVKRGAEVHLVPWNHDFTKMEYDGILIAGGPGNPALAEPLIQNVRKILESDRKEPLFGISTGNLITGLAAGAKTYKMSMANRGQNQPVLNITNKQAFITAQNHGYALDNTLPAGWKPLFVNVNDQTNEGIMHESKPFFAVQFHPEVTPGPIDTEYLFDSFFSLIKKGKATTITSVLPKPALVASRVEVSKVLILGSGGLSIGQAGEFDYSGSQAVKAMKEENVKTVLMNPNIASVQTNEVGLKQADTVYFLPITPQFVTEVIKAEQPDGLILGMGGQTALNCGVELFKRGVLKEYGVKVLGTSVESIMATEDRQLFSDKLNEINEKIAPSFAVESIEDALKAADTIGYPVMIRSAYALGGLGSGICPNRETLMDLSTKAFAMTNQILVEKSVTGWKEIEYEVVRDADDNCVTVCNMENVDAMGVHTGDSVVVAPAQTLSNAEFQMLRRTSINVVRHLGIVGECNIQFALHPTSMEYCIIEVNARLSRSSALASKATGYPLAFIAAKIALGIPLPEIKNVVSGKTSACFEPSLDYMVTKIPRWDLDRFHGTSSRIGSSMKSVGEVMAIGRTFEESFQKALRMCHPSIEGFTPRLPMNKEWPSNLDLRKELSEPSSTRIYAIAKAIDDNMSLDEIEKLTYIDKWFLYKMRDILNMEKTLKGLNSESMTEETLKRAKEIGFSDKQISKCLGLTEAQTRELRLKKNIHPWVKQIDTLAAEYPSVTNYLYVTYNGQEHDVNFDDHGMMVLGCGPYHIGSSVEFDWCAVSSIRTLRQLGKKTVVVNCNPETVSTDFDECDKLYFEELSLERILDIYHQEACGGCIISVGGQIPNNLAVPLYKNGVKIMGTSPLQIDRAEDRSIFSAVLDELKVAQAPWKAVNTLNEALEFAKSVDYPCLLRPSYVLSGSAMNVVFSEDEMKKFLEEATRVSQEHPVVLTKFVEGAREVEMDAVGKDGRVISHAISEHVEDAGVHSGDATLMLPTQTISQGAIEKVKDATRKIAKAFAISGPFNVQFLVKGNDVLVIECNLRASRSFPFVSKTLGVDFIDVATKVMIGENVDEKHLPTLDHPIIPADYVAIKAPMFSWPRLRDADPILRCEMASTGEVACFGEGIHTAFLKAMLSTGFKIPQKGILIGIQQSFRPRFLGVAEQLHNEGFKLFATEATSDWLNANNVPATPVAWPSQEGQNPSLSSIRKLIRDGSIDLVINLPNNNTKFVHDNYVIRRTAVDSGIPLLTNFQVTKLFAEAVQKSRKVDSKSLFHYRQYSAGKAA

SEQ ID NO: 3277 - protein, 1053 aa, synthetic construct
MKRNYILGLDIGITSVGYGIIDYETRDVIDAGVRLFKEANVENNEGRRSKRGARRLKRRRRHRIQRVKKLLFDYNLLTDHSELSGINPYEARVKGLSQKLSEEEFSAALLHLAKRRGVHNVNEVEEDTGNELSTKEQISRNSKALEEKYVAELQLERLKKDGEVRGSINRFKTSDYVKEAKQLLKVQKAYHQLDQSFIDTYIDLLETRRTYYEGPGEGSPFGWKDIKEWYEMLMGHCTYFPEELRSVKYAYNADLYNALNDLNNLVITRDENEKLEYYEKFQIIENVFKQKKKPTLKQIAKEILVNEEDIKGYRVTSTGKPEFTNLKVYHDIKDITARKEIIENAELLDQIAKILTIYQSSEDIQEELTNLNSELTQEEIEQISNLKGYTGTHNLSLKAINLILDELWHTNDNQIAIFNRLKLVPKKVDLSQQKEIPTTLVDDFILSPVVKRSFIQSIKVINAIIKKYGLPNDIIIELAREKNSKDAQKMINEMQKRNRQTNERIEEIIRTTGKENAKYLIEKIKLHDMQEGKCLYSLEAIPLEDLLNNPFNYEVDHIIPRSVSFDNSFNNKVLVKQEENSKKGNRTPFQYLSSSDSKISYETFKKHILNLAKGKGRISKTKKEYLLEERDINRFSVQKDFINRNLVDTRYATRGLMNLLRSYFRVNNLDVKVKSINGGFTSFLRRKWKFKKERNKGYKHHAEDALIIANADFIFKEWKKLDKAKKVMENQMFEEKQAESMPEIETEQEYKEIFITPHQIKHIKDFKDYKYSHRVDKKPNRELINDTLYSTRKDDKGNTLIVNNLNGLYDKDNDKLKKLINKSPEKLLMYHHDPQTYQKLKLIMEQYGDEKNPLYKYYEETGNYLTKYSKKDNGPVIKKIKYYGNKLNAHLDITDDYPNSRNKVVKLSLKPYRFDVYLDNGVYKFVTVKNLDVIKKENYYEVNSKCYEEAKKLKKISNQAEFIASFYNNDLIKINGELYRVIGVNNDLLNRIEVNMIDITYREYLENMNDKRPPRIIKTIASKTQSIKKYSTDILGNLYEVKSKKHPQIIKKG

SEQ ID NO: 3278 - protein, 1353 aa, synthetic construct
AAGGILHLELLVAVGPDVFQAHQEDTERYVLTNLNIGAELLRDPSLGAQFRVHLVKMVILTEPEGAPNITANLTSSLLSVCGWSQTINPEDDTDPGHADLVLYITRFDLELPDGNRQVRGVTQLGGACSPTWSCLITEDTGFDLGVTIAHEIGHSFGLEHDGAPGSGCGPSGHVMASDGAAPRAGLAWSPCSRRQLLSLLSAGRARCVWDPPRPQPGSAGHPPDAQPGLYYSANEQCRVAFGPKAVACTFAREHLDMCQALSCHTDPLDQSSCSRLLVPLLDGTECGVEKWCSKGRCRSLVELTPIAAVHGRWSSWGPRSPCSRSCGGGVVTRRRQCNNPRPAFGGRACVGADLQAEMCNTQACEKTQLEFMSQQCARTDGQPLRSSPGGASFYHWGAAVPHSQGDALCRHMCRAIGESFIMKRGDSFLDGTRCMPSGPREDGTLSLCVSGSCRTFGCDGRMDSQQVWDRCQVCGGDNSTCSPRKGSFTAGRAREYVTFLTVTPNLTSVYIANHRPLFTHLAVRIGGRYVVAGKMSISPNTTYPSLLEDGRVEYRVALTEDRLPRLEEIRIWGPLQEDADIQVYRRYGEEYGNLTRPDITFTYFQPKPRQAWVWAAVRGPCSVSCGAGLRWVNYSCLDQARKELVETVQCQGSQQPPAWPEACVLEPCPPYWAVGDFGPCSASCGGGLRERPVRCVEAQGSLLKTLPPARCRAGAQQPAVALETCNPQPCPARWEVSEPSSCTSAGGAGLALENETCVPGADGLEAPVTEGPGSVDEKLPAPEPCVGMSCPPGWGHLDATSAGEKAPSPWGSIRTGAQAAHVWTPAAGSCSVSCGRGLMELRFLCMDSALRVPVQEELCGLASKPGSRREVCQAVPCPARWQYKLAACSVSCGRGVVRRILYCARAHGEDDGEEILLDTQCQGLPRPEPQEACSLEPCPPRWKVMSLGPCSASCGLGTARRSVACVQLDQGQDVEVDEAACAALVRPEASVPCLIADCTYRWHVGTWMECSVSCGDGIQRRRDTCLGPQAQAPVPADFCQHLPKPVTVRGCWAGPCVGQGTPSLVPHEEAAAPGRTTATPAGASLEWSQARGLLFSPAPQPRRLLPGPQENSVQSSACGRQHLEPTGTIDMRGPGQADCAVAIGRPLGEVVTLRVLESSLNCSAGDMLLLWGRLTWRKMCRKLLDMTFSSKTNTLVVRQRCGRPGGGVLLRYGSQLAPETFYRECDMQLFGPWGEIVSPSLSPATSNAGGCRLFINVAPHARIAIHALATNMGAGTEGANASYILIRDTHSLRTTAFHGQQVLYWESESSQAEMEFSEGFLKAQASLRGQYWTLQSWVPEMQDPQSWKGKEGT

SEQ ID NO: 3279 - DNA, 150 bp, synthetic construct
  source 1..150: mol_type = other DNA
aaaaaaaaaaaaaaaaaaaaaaaaaaaaaaaaaaaaaaaaaaaaaaaaaaaaaaaaaaaaaaaaaaaaaaaaaaaaaaaaaaaaaaaaaaaaaaaaaaaaaaaaaaaaaaaaaaaaaaaaaaaaaaaaaaaaaaaaaaaaaaaaaaaaaa

SEQ ID NO: 3280 - protein, 5 aa, synthetic construct
GGGGS

SEQ ID NO: 3281 - protein, 15 aa, synthetic construct
GGGGSGGGGSGGGGS

SEQ ID NO: 3282 - DNA, 549 bp, synthetic construct
  source 1..549: mol_type = other DNA
gtggccacgcccgggccaccgatacttcccttcactccttcgggactgttggggaggaacacaacagggctcccctgttttcccattccttcccccttttcccaaccccaaccgccgtatctggtggcggcaagacacacgggtctttccctctaaagcacaattgtgtgtgtgtcccaggtcctcctgcgtacggtgcgggagtgctcccacccaactgttgtaagcctgtccaacgcgtcgtcctggcaagactatgacgtcgcatgttccgctgcggatgccgaccgggtaaccggttccccagtgtgtgtagtgcgatcttccaggtcctcctggttggcgttgtccagaaactgcttcaggtaagtggggtgtgcccaatccctacaaaggttgattctttcaccaccttaggaatgctccggaggtaccccagcaacagctgggatctgaccggaggctaattgtctacgggtggtgtttcctttttcttttcacacaactctactgcgtacaactcactgactatccacttgctctgtcacg

SEQ ID NO: 3283 - DNA, 625 bp, synthetic construct
  source 1..625: mol_type = other DNA
attctcgggctacggccctggagccactccggctcctaaagatttagaagtttgagcacacccgcccactagggccccccatccaggggggcaacgggcaagcacttctgtttccccggtatgatctgataggctgtaaccacggctgaaacagagattatcgttatccgcttcactacttcgagaagcctagtaatgatgggtgaaattgaatccgttgatccggtgtctcccccacaccagaaactcatgatgagggttgccatcccggctacggcgacgtagcgggcatccctgcgctggcatgaggcctcttaggaggacggatgatatggatcttgtcgtgaagagcctattgagctagtgtcgactcctccgcccccgtgaatgcggctaatcctaaccccggagcaggtgggtccaatccagggcctggcctgtcgtaatgcgtaagtctgggacggaaccgactactttcgggaaggcgtgtttccatttgttcattatttgtgtgtttatggtgacaactctgggtaaacgttctattgcgtttattgagagattcccaacaattgaacaaacgagaactacctgttttattaaatttacacagagaagaattaca

SEQ ID NO: 3284 - DNA, 630 bp, synthetic construct
  source 1..630: mol_type = other DNA
aacaaaaggctacaccacttgggctacggcccgcgccaccttgtggcgcaaagacattagaagaatagcataccgcccactagggccctgcagccagcagggtaacgggcaagcacttctgtctccccggtagaacggtataggctgtacccacggccgaaaactgaactatcgttacccgactccgtacttcgcaaagcttagtaggaaactggaaagttcgagttattgacccggagtgttccccccactccagaaacgcgtgatgagggttgccaccccgaccatggcgacatggtgggcatccctgcgctggcacgcggcctctaagaggataactcgctcctactggtaaccgaagagccccgtgagctacggtttattcctccgcctccctgaatgcggctaatcctaacccatgagcagttgccatagatccatatggtggactgtcgtaacgcgtaagttgtgggcggaaccgactactttgggatggcgtgtttccttgttttctccatttgttgttgtatggtgacaagttatagatctcgatctatagcgtttcttgagagatttccaaacatttattcaagtcgtacaattcttgtgtttaagcagtacagtgtaacc

SEQ ID NO: 3285 - DNA, 653 bp, Salivirus A
  source 1..653: mol_type = other DNA
tctgtcctcaccccatcttcccttctttcctgcaccgttacgcttactcgcatgtgcattgagtggtgcacgtgcttgaacaaacagctacactcacatgggggcgggttttcccgccctgcggcctctcgcgaggcccacccctccccttcctcccataactacagtgctttggtaggtaagcatcctgatcccccgcggaagctgctcacgtggcaactgtggggacccagacaggttatcaaaggcacccggtctttccgccttcaggagtatccctgctagtgaattctagtagggctctgcttggtgccaacctcccccaaatgcgcgctgcgggagtgctcttccccaactcaccctagtatcctctcatgtgtgtgcttggtcagcatatctgagacgatgttccgctgtcccagaccagtccagtaatggacgggccagtgtgcgtagtcgtcttccggcttgtccggcgcatgtttggtgaaccggtggggtaaggttggtgtgcccaacgcccgtactttggtgatacctcaagaccacccaggaatgccagggaggtaccccgcttcacagcgggatctgaccctgggctaattgtctacggtggttcttcttgcttccacttctttctactgttcgccacc

SEQ ID NO: 3286 - DNA, 675 bp, Aichivirus A
  source 1..675: mol_type = other DNA
cctacccaagggttacatgggaccatattcctcctcccctgtaactttaagttttgtgcccgtattcttgactccaggcggatgttgtgtcgcccgtcctgtgaacaaacagctagacactttcctcccctccctctgggctgctccggcagtccactccctccccccagcgtaacatgccccgctggagtgatgcacctggaagtcgtggacgtgggttagtaacttcggtgaaaacccactataatgacaactggttgacccccacactcaaaggactcgagtctttctcccttaaggctagcccggccacatgaatttgcagctggcaactagtgagtccaccatgtcccgcaacctcggctgcggagtgctgttccccaagcgtatgccttccttctgtaagagtgcgcctggcaagcacatctgagaagtcgttccgctgcgtcgtgccaacctggcgacaggtgacccagtgtgcgtagacttcttccggattcgtccggctcttctctaggaaacatgcgtgtaaggttcatgtgccaaagccctgcgcgcggtgttcttctactgccctaggaatgtgccgcaggtacccctacttcggtagggatctgagcggtagctaattgtctacgggtagtttcatttccatcttctcttcaggtcgacatc

SEQ ID NO: 3287 - DNA, 675 bp, unidentified
  source 1..675: mol_type = unassigned DNA; note = unclassified Picornavirales sequence
accgttacgcaccactcagttggtgtttggtggcaccaatgatggaacaaaaggctacaccacttgggctacggcccgcgccaccttgtggcgcaaagacattagaagaatagcataccgcccactagggccctgcagccagcagggtaacgggcaagcacttctgtctccccggtagaacggtataggctgtacccacggccgaaaactgaactatcgttacccgactccgtacttcgcaaagcttagtaggaaactggaaagttcgagttattgacccggagtgttccccccactccagaaacgcgtgatgagggttgccaccccgaccatggcgacatggtgggcatccctgcgctggcacgcggcctctaagaggataactcgctcctactggtaaccgaagagccccgtgagctacggtttattcctccgcctccctgaatgcggctaatcctaacccatgagcagttgccatagatccatatggtggactgtcgtaacgcgtaagttgtgggcggaaccgactactttgggatggcgtgtttccttgttttctccatttgttgttgtatggtgacaagttatagatctcgatctatagcgtttcttgagagatttccaaacatttattcaagtcgtacaattcttgtgtttaagcagtacagtgtaagg

SEQ ID NO: 3288 - DNA, 675 bp, unidentified
  source 1..675: mol_type = unassigned DNA; note = Picornavirales sp. isolate RtMruf-PicoV
tttgctcagcgtaacttctccgggttacgtggagaccaaaaggctacggagactcgggctacggccctggagcacctaggtgctcctaaagacgttagaagttgtacaaactcgcccaatagggccccccaaccaggggggtagcgggcaagcacttctgtttccccggtatgatctcataggctgtacccacggctgaaagagagattatcgttacccgcctcactacttcgagaagcccagtaatggttcatgaagttgatctcgttgacccggtgtttcccccacaccagaaacctgtgatgggggtggtcatcccggtcatggcgacatgacggacctccccgcgccggcacagggcctcttcggaggacgagtgacatggattcaaccgtgaagagcctattgagctagtgttgattcctccgcccccgtgaatgcggctaatcccaactccggagcaggcgggcccaaaccagggtctggcctgtcgtaacgcgaaagtctggagcggaaccgactactttcgggaaggcgtgtttccttttgttccttttatcaagttttatggtgacaactcctggtagacgttttattgcgtttattgagagatttccaacaattgaacagactagaaccacttgttttatcaaaccctcacagaataagataaca

SEQ ID NO: 3289 - DNA, 675 bp, unidentified; identical to SEQ ID NO: 3286
  source 1..675: mol_type = unassigned DNA; note = Kobuvirus SZAL6

SEQ ID NO: 3290 - DNA, 675 bp, unidentified; identical to SEQ ID NO: 3287
  source 1..675: mol_type = unassigned DNA; note = Parabovirus A3

SEQ ID NO: 3291 - DNA, 675 bp, unidentified; identical to SEQ ID NO: 3288
  source 1..675: mol_type = unassigned DNA; note = Picornavirales sp. Isolate RtMruf-PicoV

SEQ ID NO: 3292 - DNA, 711 bp, unidentified; identical to SEQ ID NO: 1346
  source 1..711: mol_type = unassigned DNA; note = Canine kobuvirus strain S272/16 complete genome.1

SEQ ID NO: 3293 - DNA, 601 bp, unidentified; identical to SEQ ID NO: 1354
  source 1..601: mol_type = unassigned DNA; note = Canine kobuvirus Isolate SMCD-59 complete genome.1

SEQ ID NO: 3294 - DNA, 612 bp, unidentified; identical to SEQ ID NO: 680
  source 1..612: mol_type = unassigned DNA; note = Canine koburvirus strain UK003 complete genome.1

SEQ ID NO: 3295 - DNA, 650 bp, unidentified; identical to SEQ ID NO: 1364
  source 1..650: mol_type = unassigned DNA; note = Salivirus A isolate 02394-01 complete genome.1

SEQ ID NO: 3296 - DNA, 718 bp, unidentified; identical to SEQ ID NO: 1367
  source 1..718: mol_type = unassigned DNA; note = Salivirus FHB complete genome.1

SEQ ID NO: 3297 - DNA, 730 bp, unidentified; identical to SEQ ID NO: 1370
  source 1..730: mol_type = unassigned DNA; note = Caprine kobuvirus isolate MN1/2018 complete genome.1

SEQ ID NO: 3298 - DNA, 665 bp, unidentified; identical to SEQ ID NO: 1432
  source 1..665: mol_type = unassigned DNA; note = Bovine kobuvirus strain BKoV/EGY-1 complete genome.1

SEQ ID NO: 3299 - DNA, 755 bp, unidentified; identical to SEQ ID NO: 1218
  source 1..755: mol_type = unassigned DNA; note = Bovine kobuvirus strain BKoV/EGY-1 complete genome.1

SEQ ID NO: 3300 - DNA, 787 bp, unidentified; identical to SEQ ID NO: 1438
  source 1..787: mol_type = unassigned DNA; note = Aichivirus B genomic RNA complete genome strain:U-1.1

SEQ ID NO: 3301 - DNA, 770 bp, unidentified; identical to SEQ ID NO: 1230
  source 1..770: mol_type = unassigned DNA; note = Bovine kobuvirus strain IL35164 complete genome.1

SEQ ID NO: 3302 - DNA, 545 bp, unidentified; identical to SEQ ID NO: 1440
  source 1..545: mol_type = unassigned DNA; note = Caprine kobuvirus isolate CKoV-China/SWUN/F11/2019 complete1

SEQ ID NO: 3303 - DNA, 549 bp, unidentified
  source 1..549: mol_type = unassigned DNA; note = CK-151 IRES
gtggccacgcccgggccaccgatacttcccttcactccttcgggactgttggggaggaacacaacagggctcccctgttttcccattccttcccccttttcccaaccccaaccgccgtatctggtggcggcaagacacacgggtctttccctctaaagcacaattgtgtgtgtgtcccaggtcctcctgcgtacggtgcgggagtgctcccacccaactgttgtaagcctgtccaacgcgtcgtcctggcaagactatgacgtcgcatgttccgctgcggatgccgaccgggtaaccggttccccagtgtgtgtagtgcgatcttccaggtcctcctggttggcgttgtccagaaactgcttcaggtaagtggggtgtgcccaatccctacaaaggttgattctttcaccaccttaggaatgctccggaggtaccccagcaacagctgggatctgaccggaggctaattgtctacgggtggtgtttcctttttcttttcacacaactctactgctgacaactcactgactatccacttgctctgtcacg

SEQ ID NO: 3304 - DNA, 20 bp, synthetic construct
  source 1..20: mol_type = other DNA
taggcgtcgatgccgatccc

SEQ ID NO: 3305 - DNA, 20 bp, synthetic construct
  source 1..20: mol_type = other DNA
ggatgataaccgatactcga

SEQ ID NO: 3306 - DNA, 20 bp, synthetic construct
  source 1..20: mol_type = other DNA
ccgtcacgaccggctgaaat

SEQ ID NO: 3307 - DNA, 20 bp, synthetic construct
  source 1..20: mol_type = other DNA
caacatcagtattcccaggc

SEQ ID NO: 3308 - DNA, 20 bp, synthetic construct
  source 1..20: mol_type = other DNA
gagtgtgtggttagtacgca

SEQ ID NO: 3309 - DNA, 20 bp, synthetic construct
  source 1..20: mol_type = other DNA
aaacttcggcggtaggatcc

SEQ ID NO: 3310 - DNA, 20 bp, synthetic construct
  source 1..20: mol_type = other DNA
cgtcacaagtgacatccggc

SEQ ID NO: 3311 - DNA, 20 bp, synthetic construct
  source 1..20: mol_type = other DNA
aactacgctttagatgagtt

SEQ ID NO: 3312 - DNA, 20 bp, synthetic construct
  source 1..20: mol_type = other DNA
tgcagatgcgatgcgcacga

SEQ ID NO: 3313 - DNA, 20 bp, synthetic construct
  source 1..20: mol_type = other DNA
aggtttatatcatcagcgct

SEQ ID NO: 3314 - DNA, 20 bp, synthetic construct
  source 1..20: mol_type = other DNA
gtagctagttcggcttatgc

SEQ ID NO: 3315 - DNA, 20 bp, synthetic construct
  source 1..20: mol_type = other DNA
gtgctgaccaatcgaccaag

SEQ ID NO: 3316 - DNA, 20 bp, synthetic construct
  source 1..20: mol_type = other DNA
gaaccacaactttaccctag

SEQ ID NO: 3317 - DNA, 20 bp, synthetic construct
  source 1..20: mol_type = other DNA
gccgggagtctaactcaaat

SEQ ID NO: 3318 - DNA, 20 bp, synthetic construct
  source 1..20: mol_type = other DNA
atatggcccatcgcagtgcg

SEQ ID NO: 3319 - DNA, 20 bp, synthetic construct
  source 1..20: mol_type = other DNA
ctctctgctatgatgagaca

SEQ ID NO: 3320 - DNA, 20 bp, synthetic construct
  source 1..20: mol_type = other DNA
gtccgtacactcactacttg

SEQ ID NO: 3321 - DNA, 20 bp, synthetic construct
  source 1..20: mol_type = other DNA
tggttggtaccttagggtgg

SEQ ID NO: 3322 - DNA, 20 bp, synthetic construct
  source 1..20: mol_type = other DNA
acacgacagtccgggtccta

SEQ ID NO: 3323 - DNA, 20 bp, synthetic construct
  source 1..20: mol_type = other DNA
ctcatcctgcgaaccaagtg

SEQ ID NO: 3324 - DNA, 20 bp, synthetic construct
  source 1..20: mol_type = other DNA
ctatctcaccgaagcgctag

SEQ ID NO: 3325 - DNA, 20 bp, synthetic construct
  source 1..20: mol_type = other DNA
aacgcctctgctgcgctttg

SEQ ID NO: 3326 - DNA, 20 bp, synthetic construct
  source 1..20: mol_type = other DNA
ctcaggtagtgtaggcaagc

SEQ ID NO: 3327 - DNA, 20 bp, synthetic construct
  source 1..20: mol_type = other DNA
tatagtataacacgacccat

SEQ ID NO: 3328 - DNA, 20 bp, synthetic construct
  source 1..20: mol_type = other DNA
tgaaggtagacggaggattt

SEQ ID NO: 3329 - DNA, 20 bp, synthetic construct
  source 1..20: mol_type = other DNA
aatgagtagtagagactagg

SEQ ID NO: 3330 - DNA, 20 bp, synthetic construct
  source 1..20: mol_type = other DNA
gatcatgcaacgtattgaaa

SEQ ID NO: 3331 - DNA, 20 bp, synthetic construct
  source 1..20: mol_type = other DNA
accacccggacatgatcgtc

SEQ ID NO: 3332 - DNA, 20 bp, synthetic construct
  source 1..20: mol_type = other DNA
ttgtctggttaagagggctt

SEQ ID NO: 3333 - DNA, 20 bp, synthetic construct
  source 1..20: mol_type = other DNA
atgaattacgcgcgctcaga

SEQ ID NO: 3334 - DNA, 20 bp, synthetic construct
  source 1..20: mol_type = other DNA
ccaacggaaagtctgttgtc

SEQ ID NO: 3335 - DNA, 20 bp, synthetic construct
  source 1..20: mol_type = other DNA
ttgttaagggactttcaagt

SEQ ID NO: 3336 - DNA, 20 bp, synthetic construct
  source 1..20: mol_type = other DNA
cgtgatagactagcgcaagg

SEQ ID NO: 3337 - DNA, 20 bp, synthetic construct
  source 1..20: mol_type = other DNA
aggccgtcggcataaacgtg

SEQ ID NO: 3338 - DNA, 20 bp, synthetic construct
  source 1..20: mol_type = other DNA
attcccgacgttaacagtac

SEQ ID NO: 3339 - DNA, 20 bp, synthetic construct
  source 1..20: mol_type = other DNA
acataggagacaattcaata

SEQ ID NO: 3340 - DNA, 20 bp, synthetic construct
  source 1..20: mol_type = other DNA
gcatgtatagcgactcatgg

SEQ ID NO: 3341 - DNA, 20 bp, synthetic construct
  source 1..20: mol_type = other DNA
tggcaccggaccgtctgaaa

SEQ ID NO: 3342 - DNA, 20 bp, synthetic construct
  source 1..20: mol_type = other DNA
ttgtgtaggcgcgtctacgc

SEQ ID NO: 3343 - DNA, 20 bp, synthetic construct
  source 1..20: mol_type = other DNA
ctagacgctgtagttctgta

SEQ ID NO: 3344 - DNA, 20 bp, synthetic construct
  source 1..20: mol_type = other DNA
agcagatcaacctccggcaa

SEQ ID NO: 3345 - DNA, 20 bp, synthetic construct
  source 1..20: mol_type = other DNA
ctgtccatgcttgcctgtga

SEQ ID NO: 3346 - DNA, 20 bp, synthetic construct
  source 1..20: mol_type = other DNA
tagagattccgagagcgaga

SEQ ID NO: 3347 - DNA, 20 bp, synthetic construct
  source 1..20: mol_type = other DNA
tgataagtaaattgctctgc

SEQ ID NO: 3348 - DNA, 20 bp, synthetic construct
  source 1..20: mol_type = other DNA
ctagtaaatggagcgggcca

SEQ ID NO: 3349 - DNA, 20 bp, synthetic construct
  source 1..20: mol_type = other DNA
ttagcgtcgcagatagcaga

SEQ ID NO: 3350 - DNA, 20 bp, synthetic construct
  source 1..20: mol_type = other DNA
cataacttggatagaagtgc

SEQ ID NO: 3351 - DNA, 20 bp, synthetic construct
  source 1..20: mol_type = other DNA
gtgccgtacttcctctgaca

SEQ ID NO: 3352 - DNA, 20 bp, synthetic construct
  source 1..20: mol_type = other DNA
ggtagttcgacgtgccctga

SEQ ID NO: 3353 - DNA, 20 bp, synthetic construct
  source 1..20: mol_type = other DNA
ctaacggaaccgagagagaa

SEQ ID NO: 3354 - DNA, 20 bp, synthetic construct
  source 1..20: mol_type = other DNA
tagtattggcgggactcatc

SEQ ID NO: 3355 - DNA, 20 bp, synthetic construct
  source 1..20: mol_type = other DNA
tgtttacgcaaacagcacac

SEQ ID NO: 3356 - DNA, 20 bp, synthetic construct
  source 1..20: mol_type = other DNA
taattgtacctcttcccgga

SEQ ID NO: 3357 - DNA, 20 bp, synthetic construct
  source 1..20: mol_type = other DNA
agtgaggaggcatgctctta

SEQ ID NO: 3358 - DNA, 20 bp, synthetic construct
  source 1..20: mol_type = other DNA
cactgcatttgcttccctgc

SEQ ID NO: 3359 - DNA, 20 bp, synthetic construct
  source 1..20: mol_type = other DNA
acaaagtgccctcaacggat

SEQ ID NO: 3360 - DNA, 20 bp, synthetic construct
  source 1..20: mol_type = other DNA
caagaccttagtttgatctg

SEQ ID NO: 3361 - DNA, 20 bp, synthetic construct
  source 1..20: mol_type = other DNA
aaatacttgactcagcatga

SEQ ID NO: 3362 - DNA, 20 bp, synthetic construct
  source 1..20: mol_type = other DNA
ccgttgataatgtgcgatgg

SEQ ID NO: 3363 - DNA, 20 bp, synthetic construct
  source 1..20: mol_type = other DNA
acagctgagagagcatagac

SEQ ID NO: 3364 - DNA, 20 bp, synthetic construct
  source 1..20: mol_type = other DNA
aaggtcgcgtgttcagtata

SEQ ID NO: 3365 - DNA, 20 bp, synthetic construct
  source 1..20: mol_type = other DNA
gctgcaggttaagatgttca

SEQ ID NO: 3366 - DNA, 20 bp, synthetic construct
  source 1..20: mol_type = other DNA
agggatcacacttcgttacg

SEQ ID NO: 3367 - DNA, 20 bp, synthetic construct
  source 1..20: mol_type = other DNA
atcctcggttatatgtatag

SEQ ID NO: 3368 - DNA, 20 bp, synthetic construct
  source 1..20: mol_type = other DNA
ctaacacggtactactcatc

SEQ ID NO: 3369 - DNA, 20 bp, synthetic construct
  source 1..20: mol_type = other DNA
gcgctgcatcaccgcgcaaa

SEQ ID NO: 3370 - DNA, 20 bp, synthetic construct
  source 1..20: mol_type = other DNA
tttcaacacttctggtggat

SEQ ID NO: 3371 - DNA, 20 bp, synthetic construct
  source 1..20: mol_type = other DNA
gttagtactttcacgggagg

SEQ ID NO: 3372 - DNA, 20 bp, synthetic construct
  source 1..20: mol_type = other DNA
gaagctacgtaaaccgggac

SEQ ID NO: 3373 - DNA, 20 bp, synthetic construct
  source 1..20: mol_type = other DNA
cgtgtaggctctaaactaga

SEQ ID NO: 3374 - DNA, 20 bp, synthetic construct
  source 1..20: mol_type = other DNA
gacacgagtagtgtgccgtg

SEQ ID NO: 3375 - DNA, 20 bp, synthetic construct
  source 1..20: mol_type = other DNA
ctagataggagaccaccaga

SEQ ID NO: 3376 - DNA, 20 bp, synthetic construct
  source 1..20: mol_type = other DNA
ccctcttcttggacccgtga

SEQ ID NO: 3377 - DNA, 20 bp, synthetic construct
  source 1..20: mol_type = other DNA
cgggatcaggcataatgtgc

SEQ ID NO: 3378 - DNA, 20 bp, synthetic construct
  source 1..20: mol_type = other DNA
accgtcagtcgctgcacgtg

SEQ ID NO: 3379 - DNA, 20 bp, synthetic construct
  source 1..20: mol_type = other DNA
cgttcgcagcctcggagctg

SEQ ID NO: 3380 - DNA, 20 bp, synthetic construct
  source 1..20: mol_type = other DNA
attgcaaacgctggcgtaag

SEQ ID NO: 3381 - DNA, 20 bp, synthetic construct
  source 1..20: mol_type = other DNA
ttaaagttgtgtacgtaacg

SEQ ID NO: 3382 - DNA, 20 bp, synthetic construct
  source 1..20: mol_type = other DNA
atcagttcaactacctacat

SEQ ID NO: 3383 - DNA, 20 bp, synthetic construct
  source 1..20: mol_type = other DNA
ttgactaactgcgccgttcg

SEQ ID NO: 3384 - DNA, 20 bp, synthetic construct
  source 1..20: mol_type = other DNA
tgcagagaccaatgccgact

SEQ ID NO: 3385 - DNA, 20 bp, synthetic construct
  source 1..20: mol_type = other DNA
gattgcgtagcgcggtccgt

SEQ ID NO: 3386 - DNA, 20 bp, synthetic construct
  source 1..20: mol_type = other DNA
gtcactctgtgatccttgtt

SEQ ID NO: 3387 - DNA, 20 bp, synthetic construct
  source 1..20: mol_type = other DNA
cagaacgccaggttgggttc

SEQ ID NO: 3388 - DNA, 20 bp, synthetic construct
  source 1..20: mol_type = other DNA
ctaaaggctgagtctttaca

SEQ ID NO: 3389 - DNA, 20 bp, synthetic construct
  source 1..20: mol_type = other DNA
cgggtttcataaagtacaca

SEQ ID NO: 3390 - DNA, 20 bp, synthetic construct
  source 1..20: mol_type = other DNA
ttcggcacgcttggctgtgt

SEQ ID NO: 3391 - DNA, 20 bp, synthetic construct
  source 1..20: mol_type = other DNA
gacctacgggcaccagagtt

SEQ ID NO: 3392 - DNA, 20 bp, synthetic construct
  source 1..20: mol_type = other DNA
tagcgttgggtgtttaaatc

SEQ ID NO: 3393 - DNA, 20 bp, synthetic construct
  source 1..20: mol_type = other DNA
ttgttcttctgaggacatgg

SEQ ID NO: 3394 - DNA, 20 bp, synthetic construct
  source 1..20: mol_type = other DNA
aggccagcttctgattaaag

SEQ ID NO: 3395 - DNA, 20 bp, synthetic construct
  source 1..20: mol_type = other DNA
taactcacaggctgctgatg

SEQ ID NO: 3396 - DNA, 20 bp, synthetic construct
  source 1..20: mol_type = other DNA
gtctgcaactcaagagtacc

SEQ ID NO: 3397 - DNA, 20 bp, synthetic construct
  source 1..20: mol_type = other DNA
tacgtgtggtgcggcataat

SEQ ID NO: 3398 - DNA, 20 bp, synthetic construct
  source 1..20: mol_type = other DNA
cattatgcgttgcttgccat

SEQ ID NO: 3399 - DNA, 20 bp, synthetic construct
  source 1..20: mol_type = other DNA
taggagagcgccgcgtatgt

SEQ ID NO: 3400 - DNA, 20 bp, synthetic construct
  source 1..20: mol_type = other DNA
cgcgattctcagatccgttt

SEQ ID NO: 3401 - DNA, 20 bp, synthetic construct
  source 1..20: mol_type = other DNA
ttaggccagccgtcttgtta

SEQ ID NO: 3402 - DNA, 20 bp, synthetic construct
  source 1..20: mol_type = other DNA
cagcctggcgaggtccaaca

SEQ ID NO: 3403 - DNA, 20 bp, synthetic construct
  source 1..20: mol_type = other DNA
ccgctggtgcatccgacaag

SEQ ID NO: 3404 - DNA, 20 bp, synthetic construct
  source 1..20: mol_type = other DNA
tgtgcctcgattaccatatg

SEQ ID NO: 3405 - DNA, 20 bp, synthetic construct
  source 1..20: mol_type = other DNA
cctgaacccacggagtccgt

SEQ ID NO: 3406 - DNA, 20 bp, synthetic construct
  source 1..20: mol_type = other DNA
tacaagcattggttacgctg

SEQ ID NO: 3407 - DNA, 20 bp, synthetic construct
  source 1..20: mol_type = other DNA
ggatcatgcggtggttaaca

SEQ ID NO: 3408 - DNA, 20 bp, synthetic construct
  source 1..20: mol_type = other DNA
acttcaggctacttacccat

SEQ ID NO: 3409 - DNA, 20 bp, synthetic construct
  source 1..20: mol_type = other DNA
cttcctattcaggatactgg

SEQ ID NO: 3410 - DNA, 20 bp, synthetic construct
  source 1..20: mol_type = other DNA
gtcctattgacggttgcagt

SEQ ID NO: 3411 - DNA, 20 bp, synthetic construct
  source 1..20: mol_type = other DNA
ttgatgcgcttggcgatcac

SEQ ID NO: 3412 - DNA, 20 bp, synthetic construct
  source 1..20: mol_type = other DNA
tgggacttgctgtaccaaat

SEQ ID NO: 3413 - DNA, 20 bp, synthetic construct
  source 1..20: mol_type = other DNA
tgaggaggctggcgagggaa

SEQ ID NO: 3414 - DNA, 20 bp, synthetic construct
  source 1..20: mol_type = other DNA
tagaaggacctcgcgtagga

SEQ ID NO: 3415 - DNA, 20 bp, synthetic construct
  source 1..20: mol_type = other DNA
tgaggtgtgctggtgcatcc

SEQ ID NO: 3416 - DNA, 20 bp, synthetic construct
  source 1..20: mol_type = other DNA
gagaccgctcagagttcgta

SEQ ID NO: 3417 - DNA, 20 bp, synthetic construct
  source 1..20: mol_type = other DNA
tcactaccagagctgagtac

SEQ ID NO: 3418 - DNA, 20 bp, synthetic construct
  source 1..20: mol_type = other DNA
acgaagttacaatactgatt

SEQ ID NO: 3419 - DNA, 20 bp, synthetic construct
  source 1..20: mol_type = other DNA
cataaccgttgctaggtcaa

SEQ ID NO: 3420 - DNA, 20 bp, synthetic construct
  source 1..20: mol_type = other DNA
tgtaatccagtttcagaatg

SEQ ID NO: 3421 - DNA, 20 bp, synthetic construct
  source 1..20: mol_type = other DNA
gtacgctcattcgccgatcc

SEQ ID NO: 3422 - DNA, 20 bp, synthetic construct
  source 1..20: mol_type = other DNA
taggaccaagaaatagagtc

SEQ ID NO: 3423 - DNA, 20 bp, synthetic construct
  source 1..20: mol_type = other DNA
tgtcaagtggttgcccgagg

SEQ ID NO: 3424 - DNA, 20 bp, synthetic construct
  source 1..20: mol_type = other DNA
gtagagcacaaatatggcat

SEQ ID NO: 3425 - DNA, 20 bp, synthetic construct
  source 1..20: mol_type = other DNA
tgcacccgcaaacaacgtcg

SEQ ID NO: 3426 - DNA, 20 bp, synthetic construct
  source 1..20: mol_type = other DNA
gacatctctaggtacgcagt

SEQ ID NO: 3427 - DNA, 20 bp, synthetic construct
  source 1..20: mol_type = other DNA
cacggctgcggatgcgttaa

SEQ ID NO: 3428 - DNA, 20 bp, synthetic construct
  source 1..20: mol_type = other DNA
atttgtgtacagtgctcgga

SEQ ID NO: 3429 - DNA, 20 bp, synthetic construct
  source 1..20: mol_type = other DNA
aataactggttcaccgactc

SEQ ID NO: 3430 - DNA, 20 bp, synthetic construct
  source 1..20: mol_type = other DNA
gatagccattatgcactagg

SEQ ID NO: 3431 - DNA, 20 bp, synthetic construct
  source 1..20: mol_type = other DNA
cgggttcaggtcagaggcac

SEQ ID NO: 3432 - DNA, 20 bp, synthetic construct
  source 1..20: mol_type = other DNA
agcattatttccacgaatca

SEQ ID NO: 3433 - DNA, 20 bp, synthetic construct
  source 1..20: mol_type = other DNA
aatacctttacacaggctag

SEQ ID NO: 3434 - DNA, 20 bp, synthetic construct
  source 1..20: mol_type = other DNA
ctcatccacttgcgcgatat

SEQ ID NO: 3435 - DNA, 20 bp, synthetic construct
  source 1..20: mol_type = other DNA
tacccaccctttcgtacagg

SEQ ID NO: 3436 - DNA, 20 bp, synthetic construct
  source 1..20: mol_type = other DNA
ttaactgtgcgctcgtagta

SEQ ID NO: 3437 - DNA, 20 bp, synthetic construct
  source 1..20: mol_type = other DNA
agcacggtcggaaacgtctc

SEQ ID NO: 3438 - DNA, 20 bp, synthetic construct
  source 1..20: mol_type = other DNA
gtttggaatcaggatcaccc

SEQ ID NO: 3439 - DNA, 20 bp, synthetic construct
  source 1..20: mol_type = other DNA
taactcactcactggtacaa

SEQ ID NO: 3440 - DNA, 20 bp, synthetic construct
  source 1..20: mol_type = other DNA
agcttcgagtgatgcgaccc

SEQ ID NO: 3441 - DNA, 20 bp, synthetic construct
  source 1..20: mol_type = other DNA
tgtccgctaacggaacaatg

SEQ ID NO: 3442 - DNA, 20 bp, synthetic construct
  source 1..20: mol_type = other DNA
ttcgaaccggctcttactga

SEQ ID NO: 3443 - DNA, 20 bp, synthetic construct
  source 1..20: mol_type = other DNA
ccagctatcacctcagcggt

SEQ ID NO: 3444 - DNA, 20 bp, synthetic construct
  source 1..20: mol_type = other DNA
tcctcgaatgttcgacaagt

SEQ ID NO: 3445 - DNA, 20 bp, synthetic construct
  source 1..20: mol_type = other DNA
cagtcgaatgttctacaacg

SEQ ID NO: 3446 - DNA, 20 bp, synthetic construct
  source 1..20: mol_type = other DNA
tagatggcggcaaatcccgg

SEQ ID NO: 3447 - DNA, 20 bp, synthetic construct
  source 1..20: mol_type = other DNA
gggtgaactttctcttagtc

SEQ ID NO: 3448 - DNA, 20 bp, synthetic construct
  source 1..20: mol_type = other DNA
cgtacagcgatagcacggac

SEQ ID NO: 3449 - DNA, 20 bp, synthetic construct
  source 1..20: mol_type = other DNA
ggccctggtcgcacaatcgc

SEQ ID NO: 3450 - DNA, 20 bp, synthetic construct
  source 1..20: mol_type = other DNA
gtgatgttaaaccgtcccgc

SEQ ID NO: 3451 - DNA, 20 bp, synthetic construct
  source 1..20: mol_type = other DNA
cctacattcctcattagcgg

SEQ ID NO: 3452 - DNA, 20 bp, synthetic construct
  source 1..20: mol_type = other DNA
gacaaattgttccaattggg

SEQ ID NO: 3453 - DNA, 20 bp, synthetic construct
  source 1..20: mol_type = other DNA
ttgttatagcgtatattagg

SEQ ID NO: 3454 - DNA, 20 bp, synthetic construct
  source 1..20: mol_type = other DNA
ggtctacacaaatccactgg

SEQ ID NO: 3455 - DNA, 20 bp, synthetic construct
  source 1..20: mol_type = other DNA
tgccctgcttgaacgatatg

SEQ ID NO: 3456 - DNA, 20 bp, synthetic construct
  source 1..20: mol_type = other DNA
ggcgctatagagagcgttgt

SEQ ID NO: 3457 - DNA, 20 bp, synthetic construct
  source 1..20: mol_type = other DNA
ctgcaggaccgcaaatggcc

SEQ ID NO: 3458 - DNA, 20 bp, synthetic construct
  source 1..20: mol_type = other DNA
gaacgtgcctcgacgtgaaa

SEQ ID NO: 3459 - DNA, 20 bp, synthetic construct
  source 1..20: mol_type = other DNA
tttagggaggtcaaagagga

SEQ ID NO: 3460 - DNA, 20 bp, synthetic construct
  source 1..20: mol_type = other DNA
actgcctttcgacccgttag

SEQ ID NO: 3461 - DNA, 20 bp, synthetic construct
  source 1..20: mol_type = other DNA
gaggttacgagactgcgaat

SEQ ID NO: 3462 - DNA, 20 bp, synthetic construct
  source 1..20: mol_type = other DNA
gactaaattcgcgtcacact

SEQ ID NO: 3463 - DNA, 20 bp, synthetic construct
  source 1..20: mol_type = other DNA
cgatcgcgagtcgtgatagt

SEQ ID NO: 3464 - DNA, 20 bp, synthetic construct
  source 1..20: mol_type = other DNA
atgcgaaggagacacaaatt

SEQ ID NO: 3465 - DNA, 20 bp, synthetic construct
  source 1..20: mol_type = other DNA
catgctccattcgtattgct

SEQ ID NO: 3466 - DNA, 20 bp, synthetic construct
  source 1..20: mol_type = other DNA
gcatcagcagagtctacttg

SEQ ID NO: 3467 - DNA, 20 bp, synthetic construct
  source 1..20: mol_type = other DNA
gaacgggagcggagtaatgt

SEQ ID NO: 3468 - DNA, 20 bp, synthetic construct
  source 1..20: mol_type = other DNA
gcatctcaaatctttgatgg

SEQ ID NO: 3469 - DNA, 20 bp, synthetic construct
  source 1..20: mol_type = other DNA
acctatacagaggcatactg

SEQ ID NO: 3470 - DNA, 20 bp, synthetic construct
  source 1..20: mol_type = other DNA
tctcgcattagtaggcggtc

SEQ ID NO: 3471 - DNA, 20 bp, synthetic construct
  source 1..20: mol_type = other DNA
aacggaccatccaagcacgt

SEQ ID NO: 3472 - DNA, 20 bp, synthetic construct
  source 1..20: mol_type = other DNA
acctagtaaggaggcgttta

SEQ ID NO: 3473 - DNA, 20 bp, synthetic construct
  source 1..20: mol_type = other DNA
aagacaaacggttgggatta

SEQ ID NO: 3474 - DNA, 20 bp, synthetic construct
  source 1..20: mol_type = other DNA
ctgtgtggcttaggctacag

SEQ ID NO: 3475 - DNA, 20 bp, synthetic construct
  source 1..20: mol_type = other DNA
acggtaccaatatattggtg

SEQ ID NO: 3476 - DNA, 20 bp, synthetic construct
  source 1..20: mol_type = other DNA
tgagggcagcccgattacct

SEQ ID NO: 3477 - DNA, 20 bp, synthetic construct
  source 1..20: mol_type = other DNA
ttcgcacacgccgtaaggat

SEQ ID NO: 3478 - DNA, 20 bp, synthetic construct
  source 1..20: mol_type = other DNA
cggaccgccgacgtcaatta

SEQ ID NO: 3479 - DNA, 20 bp, synthetic construct
  source 1..20: mol_type = other DNA
agtcacctaccctcggtgag

SEQ ID NO: 3480 - DNA, 20 bp, synthetic construct
  source 1..20: mol_type = other DNA
acatcttcacatacctttct

SEQ ID NO: 3481 - DNA, 20 bp, synthetic construct
  source 1..20: mol_type = other DNA
cctcacaacctttcgccaag

SEQ ID NO: 3482 - DNA, 20 bp, synthetic construct
  source 1..20: mol_type = other DNA
tttccgtacaaccggtcgcg

SEQ ID NO: 3483 - DNA, 20 bp, synthetic construct
  source 1..20: mol_type = other DNA
actgacgaagtttcggtctc

SEQ ID NO: 3484 - DNA, 20 bp, synthetic construct
  source 1..20: mol_type = other DNA
atgttgcgtcctaagatcca

SEQ ID NO: 3485 - DNA, 20 bp, synthetic construct
  source 1..20: mol_type = other DNA
tccctacattacgcacttgt

SEQ ID NO: 3486 - DNA, 20 bp, synthetic construct
  source 1..20: mol_type = other DNA
tactataagggtgcacaaag

SEQ ID NO: 3487 - DNA, 20 bp, synthetic construct
  source 1..20: mol_type = other DNA
ttgtctcgccgcttcttgca

SEQ ID NO: 3488 - DNA, 20 bp, synthetic construct
  source 1..20: mol_type = other DNA
taggtcaatctagcacgatc

SEQ ID NO: 3489 - DNA, 20 bp, synthetic construct
  source 1..20: mol_type = other DNA
aatctgggtgtccaaacaag

SEQ ID NO: 3490 - DNA, 20 bp, synthetic construct
  source 1..20: mol_type = other DNA
cccagtgttcagctgagttt

SEQ ID NO: 3491 - DNA, 20 bp, synthetic construct
  source 1..20: mol_type = other DNA
gggtgtgctcatgcgctcat

SEQ ID NO: 3492 - DNA, 20 bp, synthetic construct
  source 1..20: mol_type = other DNA
tgcgtccaacgtagcctaag

SEQ ID NO: 3493 - DNA, 20 bp, synthetic construct
  source 1..20: mol_type = other DNA
ataataggcatcgcacgcca

SEQ ID NO: 3494 - DNA, 20 bp, synthetic construct
  source 1..20: mol_type = other DNA
ccacgtaataataagcggta

SEQ ID NO: 3495 - DNA, 20 bp, synthetic construct
  source 1..20: mol_type = other DNA
agcctggatggtacttatgc

SEQ ID NO: 3496 - DNA, 20 bp, synthetic construct
  source 1..20: mol_type = other DNA
ctcagactcatcttgcgaag

SEQ ID NO: 3497 - DNA, 20 bp, synthetic construct
  source 1..20: mol_type = other DNA
agcatcaccatggtttggct

SEQ ID NO: 3498 - DNA, 20 bp, synthetic construct
  source 1..20: mol_type = other DNA
tgatcccaggacttcagcga

SEQ ID NO: 3499 - DNA, 20 bp, synthetic construct
  source 1..20: mol_type = other DNA
aggcgtagacagcatcccgc

SEQ ID NO: 3500 - DNA, 20 bp, synthetic construct
  source 1..20: mol_type = other DNA
tgtccattattgggtgccta

SEQ ID NO: 3501 - DNA, 20 bp, synthetic construct
  source 1..20: mol_type = other DNA
atccgaccattagtacttgg

SEQ ID NO: 3502 - DNA, 20 bp, synthetic construct
  source 1..20: mol_type = other DNA
tactccaagtggacgcaaac

SEQ ID NO: 3503 - DNA, 20 bp, synthetic construct
  source 1..20: mol_type = other DNA
ccgaggtataagatagcagg

SEQ ID NO: 3504 - DNA, 20 bp, synthetic construct
  source 1..20: mol_type = other DNA
actatggtggttgtccagat

SEQ ID NO: 3505 - DNA, 20 bp, synthetic construct
  source 1..20: mol_type = other DNA
gcggatagtgcactgatgag

SEQ ID NO: 3506 - DNA, 20 bp, synthetic construct
  source 1..20: mol_type = other DNA
ttgggacgccaatccatccg

SEQ ID NO: 3507 - DNA, 20 bp, synthetic construct
  source 1..20: mol_type = other DNA
acgaccactcgacgtgccaa

SEQ ID NO: 3508 - DNA, 20 bp, synthetic construct
  source 1..20: mol_type = other DNA
aatgtgggtcacgacagtga

SEQ ID NO: 3509 - DNA, 20 bp, synthetic construct
  source 1..20: mol_type = other DNA
tctgcgcacaaaccagcgaa

SEQ ID NO: 3510 - DNA, 20 bp, synthetic construct
  source 1..20: mol_type = other DNA
aacttgttaagccgctagca

SEQ ID NO: 3511 - DNA, 20 bp, synthetic construct
  source 1..20: mol_type = other DNA
ggacgagcgtgcaaagagtt

SEQ ID NO: 3512 - DNA, 20 bp, synthetic construct
  source 1..20: mol_type = other DNA
tatagcgccgtccttgcaac

SEQ ID NO: 3513 - DNA, 20 bp, synthetic construct
  source 1..20: mol_type = other DNA
agaaaccagtgggaagagaa

SEQ ID NO: 3514 - DNA, 20 bp, synthetic construct
  source 1..20: mol_type = other DNA
ccttcaacgtcgagagcctg

SEQ ID NO: 3515 - DNA, 20 bp, synthetic construct
  source 1..20: mol_type = other DNA
tttctgtgtatgtcggctaa

SEQ ID NO: 3516 - DNA, 20 bp, synthetic construct
  source 1..20: mol_type = other DNA
caacacatactttgaggttt

SEQ ID NO: 3517 - DNA, 20 bp, synthetic construct
  source 1..20: mol_type = other DNA
tagatatatgagttaccaca

SEQ ID NO: 3518 - DNA, 20 bp, synthetic construct
  source 1..20: mol_type = other DNA
tttcgccctttgaaggatgt

SEQ ID NO: 3519 - DNA, 20 bp, synthetic construct
  source 1..20: mol_type = other DNA
gaaggatcgataagcaggat

SEQ ID NO: 3520 - DNA, 20 bp, synthetic construct
  source 1..20: mol_type = other DNA
gttcgaactagcttctggcc

SEQ ID NO: 3521 - DNA, 20 bp, synthetic construct
  source 1..20: mol_type = other DNA
cagacctcatcggacgacca

SEQ ID NO: 3522 - DNA, 20 bp, synthetic construct
  source 1..20: mol_type = other DNA
actacaccgtttatgactag

SEQ ID NO: 3523 - DNA, 20 bp, synthetic construct
  source 1..20: mol_type = other DNA
ggcctaacgagacggaaact

SEQ ID NO: 3524 - DNA, 20 bp, synthetic construct
  source 1..20: mol_type = other DNA
gcacgtctccacgaagttgt

SEQ ID NO: 3525 - DNA, 20 bp, synthetic construct
  source 1..20: mol_type = other DNA
cttcagtctgctacgctcta

SEQ ID NO: 3526 - DNA, 20 bp, synthetic construct
  source 1..20: mol_type = other DNA
taccaggcatggtgccggaa

SEQ ID NO: 3527 - DNA, 20 bp, synthetic construct
  source 1..20: mol_type = other DNA
gttcgtaatgggactcgctt

SEQ ID NO: 3528 - DNA, 20 bp, synthetic construct
  source 1..20: mol_type = other DNA
attgcagtgctacttattcg

SEQ ID NO: 3529 - DNA, 20 bp, synthetic construct
  source 1..20: mol_type = other DNA
ggtgctgatggtcaatttag

SEQ ID NO: 3530 - DNA, 20 bp, synthetic construct
  source 1..20: mol_type = other DNA
gggatcgtatgaggcgactc

SEQ ID NO: 3531 - DNA, 20 bp, synthetic construct
  source 1..20: mol_type = other DNA
gctacgcattagtataatcg

SEQ ID NO: 3532 - DNA, 20 bp, synthetic construct
  source 1..20: mol_type = other DNA
aacacctagcgagccttcag

SEQ ID NO: 3533 - DNA, 20 bp, synthetic construct
  source 1..20: mol_type = other DNA
catatctaactctctcggtc

SEQ ID NO: 3534 - DNA, 20 bp, synthetic construct
  source 1..20: mol_type = other DNA
accacgataaccagcctccc

SEQ ID NO: 3535 - DNA, 20 bp, synthetic construct
  source 1..20: mol_type = other DNA
tgcgacatgccgtacagctg

SEQ ID NO: 3536 - DNA, 20 bp, synthetic construct
  source 1..20: mol_type = other DNA
tgcccttcaatgatctacga

SEQ ID NO: 3537 - DNA, 20 bp, synthetic construct
  source 1..20: mol_type = other DNA
catgcttacgttccgctcac

SEQ ID NO: 3538 - DNA, 20 bp, synthetic construct
  source 1..20: mol_type = other DNA
gaggctgttctgcggttgcg

SEQ ID NO: 3539 - DNA, 20 bp, synthetic construct
  source 1..20: mol_type = other DNA
ggagctccatggatatgcaa

SEQ ID NO: 3540 - DNA, 20 bp, synthetic construct
  source 1..20: mol_type = other DNA
gggccacttgtacatagaag

SEQ ID NO: 3541 - DNA, 20 bp, synthetic construct
  source 1..20: mol_type = other DNA
caaactatgttgggcaagct

SEQ ID NO: 3542 - DNA, 20 bp, synthetic construct
  source 1..20: mol_type = other DNA
ttacatattgcgaaacaggc

SEQ ID NO: 3543 - DNA, 20 bp, synthetic construct
  source 1..20: mol_type = other DNA
tacctggacctagtttatgg

SEQ ID NO: 3544 - DNA, 20 bp, synthetic construct
  source 1..20: mol_type = other DNA
gactgaggagttcttcagcc

SEQ ID NO: 3545 - DNA, 20 bp, synthetic construct
  source 1..20: mol_type = other DNA
gcgagttgaacctaagatcg

SEQ ID NO: 3546 - DNA, 20 bp, synthetic construct
  source 1..20: mol_type = other DNA
gatgcttggatcgtctagct

SEQ ID NO: 3547 - DNA, 20 bp, synthetic construct
  source 1..20: mol_type = other DNA
cccgagagcggtatgggcat

SEQ ID NO: 3548 - DNA, 20 bp, synthetic construct
  source 1..20: mol_type = other DNA
aacaggtcctatcgatgcac

SEQ ID NO: 3549 - DNA, 20 bp, synthetic construct
  source 1..20: mol_type = other DNA
gatccatctccgtaaactga

SEQ ID NO: 3550 - DNA, 20 bp, synthetic construct
  source 1..20: mol_type = other DNA
ctaggcccaagcctcaaaga

SEQ ID NO: 3551 - DNA, 20 bp, synthetic construct
  source 1..20: mol_type = other DNA
cgactgggttgacgtagatt

SEQ ID NO: 3552 - DNA, 20 bp, synthetic construct
  source 1..20: mol_type = other DNA
cactaagcattagctaccgc

SEQ ID NO: 3553 - DNA, 20 bp, synthetic construct
  source 1..20: mol_type = other DNA
tgctctgagagggcaatgtg

SEQ ID NO: 3554 - DNA, 20 bp, synthetic construct
  source 1..20: mol_type = other DNA
gtccgacccaataaatactg

SEQ ID NO: 3555 - DNA, 20 bp, synthetic construct
  source 1..20: mol_type = other DNA
ccctgtttatgcaccagctg

SEQ ID NO: 3556 - DNA, 20 bp, synthetic construct
  source 1..20: mol_type = other DNA
tgacatctctgacgagctta

SEQ ID NO: 3557 - DNA, 20 bp, synthetic construct
  source 1..20: mol_type = other DNA
caagatgttgagggaccgtg

SEQ ID NO: 3558 - DNA, 20 bp, synthetic construct
  source 1..20: mol_type = other DNA
cacgtccagctattgccgcg

SEQ ID NO: 3559 - DNA, 20 bp, synthetic construct
  source 1..20: mol_type = other DNA
gcgcacaatctttgctgaag

SEQ ID NO: 3560 - DNA, 20 bp, synthetic construct
  source 1..20: mol_type = other DNA
ggtaggaacatatgtagttc

SEQ ID NO: 3561 - DNA, 20 bp, synthetic construct
  source 1..20: mol_type = other DNA
gggtagaatagagtcccgtt

SEQ ID NO: 3562 - DNA, 20 bp, synthetic construct
  source 1..20: mol_type = other DNA
agtcgttggccagttgtaaa

SEQ ID NO: 3563 - DNA, 20 bp, synthetic construct
  source 1..20: mol_type = other DNA
ctcacgaggaacgactgtta

SEQ ID NO: 3564 - DNA, 20 bp, synthetic construct
  source 1..20: mol_type = other DNA
aacgtggagcatggtacata

SEQ ID NO: 3565 - DNA, 20 bp, synthetic construct
  source 1..20: mol_type = other DNA
catatcgatccaaccgttag

SEQ ID NO: 3566 - DNA, 20 bp, synthetic construct
  source 1..20: mol_type = other DNA
gtaatagggacgtgaggatc

SEQ ID NO: 3567 - DNA, 20 bp, synthetic construct
  source 1..20: mol_type = other DNA
ggctcatgatgtcgggcgct

SEQ ID NO: 3568 - DNA, 20 bp, synthetic construct
  source 1..20: mol_type = other DNA
acgagggtggcgtataaacc

SEQ ID NO: 3569 - DNA, 20 bp, synthetic construct
  source 1..20: mol_type = other DNA
tctgtctgaccacgtcctct

SEQ ID NO: 3570 - DNA, 20 bp, synthetic construct
  source 1..20: mol_type = other DNA
atactaaagaacggcaaaga

SEQ ID NO: 3571 - DNA, 20 bp, synthetic construct
  source 1..20: mol_type = other DNA
actgaatgatactaagacta

SEQ ID NO: 3572 - DNA, 20 bp, synthetic construct
  source 1..20: mol_type = other DNA
agccgctttcctggacaaag

SEQ ID NO: 3573 - DNA, 20 bp, synthetic construct
  source 1..20: mol_type = other DNA
attctttgaaggcgcgatca

SEQ ID NO: 3574 - DNA, 20 bp, synthetic construct
  source 1..20: mol_type = other DNA
tattcgcatccgagtatatg

SEQ ID NO: 3575 - DNA, 20 bp, synthetic construct
  source 1..20: mol_type = other DNA
atttcgtgtacgaaatgggc

SEQ ID NO: 3576 - DNA, 20 bp, synthetic construct
  source 1..20: mol_type = other DNA
ctgcttcacaaattatactt

SEQ ID NO: 3577 - DNA, 20 bp, synthetic construct
  source 1..20: mol_type = other DNA
gagggttgtcagtgcaattc

SEQ ID NO: 3578 - DNA, 20 bp, synthetic construct
  source 1..20: mol_type = other DNA
gcaatggaatgtcccgaaag

SEQ ID NO: 3579 - DNA, 20 bp, synthetic construct
  source 1..20: mol_type = other DNA
tgcttccttgcgagggtatt

SEQ ID NO: 3580 - DNA, 20 bp, synthetic construct
  source 1..20: mol_type = other DNA
aggtataatgtggtattgcg

SEQ ID NO: 3581 - DNA, 20 bp, synthetic construct
  source 1..20: mol_type = other DNA
gctccctaccttgcactatg

SEQ ID NO: 3582 - DNA, 20 bp, synthetic construct
  source 1..20: mol_type = other DNA
aggcaacacagacctccacg

SEQ ID NO: 3583 - DNA, 20 bp, synthetic construct
  source 1..20: mol_type = other DNA
aaggtccctgcgttatagga

SEQ ID NO: 3584 - DNA, 20 bp, synthetic construct
  source 1..20: mol_type = other DNA
tcgactggtgcatagagact

SEQ ID NO: 3585 - DNA, 20 bp, synthetic construct
  source 1..20: mol_type = other DNA
ggaaagattcaccgcgactt

SEQ ID NO: 3586 - DNA, 20 bp, synthetic construct
  source 1..20: mol_type = other DNA
gaataatgggtggtttcgag

SEQ ID NO: 3587 - DNA, 20 bp, synthetic construct
  source 1..20: mol_type = other DNA
gaaggtattcgacatcgatg

SEQ ID NO: 3588 - DNA, 20 bp, synthetic construct
  source 1..20: mol_type = other DNA
ctcaaacaagggttagcacg

SEQ ID NO: 3589 - DNA, 20 bp, synthetic construct
  source 1..20: mol_type = other DNA
cttcggcgctaacccatatc

SEQ ID NO: 3590 - DNA, 20 bp, synthetic construct
  source 1..20: mol_type = other DNA
atttgggtacaggaactggg

SEQ ID NO: 3591 - DNA, 20 bp, synthetic construct
  source 1..20: mol_type = other DNA
accagatgtcgaactgttcc

SEQ ID NO: 3592 - DNA, 20 bp, synthetic construct
  source 1..20: mol_type = other DNA
acactttgggccactttact

SEQ ID NO: 3593 - DNA, 20 bp, synthetic construct
  source 1..20: mol_type = other DNA
gtatcgatccatctacgatt

SEQ ID NO: 3594 - DNA, 20 bp, synthetic construct
  source 1..20: mol_type = other DNA
cgtgagtggctaaaccgcct

SEQ ID NO: 3595 - DNA, 20 bp, synthetic construct
  source 1..20: mol_type = other DNA
ccctttcaaccaatcgcgcc

SEQ ID NO: 3596 - DNA, 20 bp, synthetic construct
  source 1..20: mol_type = other DNA
tgtgagcgatatgcttcgtg

SEQ ID NO: 3597 - DNA, 20 bp, synthetic construct
  source 1..20: mol_type = other DNA
ctgcgcgacccttgcatttg

SEQ ID NO: 3598 - DNA, 20 bp, synthetic construct
  source 1..20: mol_type = other DNA
ataacaacctagcgttgcag

SEQ ID NO: 3599 - DNA, 20 bp, synthetic construct
  source 1..20: mol_type = other DNA
ttatccgcccgtctcctagt

SEQ ID NO: 3600 - DNA, 20 bp, synthetic construct
  source 1..20: mol_type = other DNA
agaaggcactgacgttaaac

SEQ ID NO: 3601 - DNA, 20 bp, synthetic construct
  source 1..20: mol_type = other DNA
agaagcacttggatacatgg

SEQ ID NO: 3602 - DNA, 20 bp, synthetic construct
  source 1..20: mol_type = other DNA
gcccaactacaactggtctc

SEQ ID NO: 3603 - DNA, 20 bp, synthetic construct
  source 1..20: mol_type = other DNA
ggcgtcttgagcacatgtta

SEQ ID NO: 3604 - DNA, 20 bp, synthetic construct
  source 1..20: mol_type = other DNA
tggagggtagtggcgcatgg

SEQ ID NO: 3605 - DNA, 20 bp, synthetic construct
  source 1..20: mol_type = other DNA
gcatccttctctattctcag

SEQ ID NO: 3606 - DNA, 20 bp, synthetic construct
  source 1..20: mol_type = other DNA
agaggagaggaccaggatta

SEQ ID NO: 3607 - DNA, 20 bp, synthetic construct
  source 1..20: mol_type = other DNA
agttaggcctcagctttctg

SEQ ID NO: 3608 - DNA, 20 bp, synthetic construct
  source 1..20: mol_type = other DNA
ggctacctgctactgagtga

SEQ ID NO: 3609 - DNA, 20 bp, synthetic construct
  source 1..20: mol_type = other DNA
gacattggtgtctaacatct

SEQ ID NO: 3610 - DNA, 20 bp, synthetic construct
  source 1..20: mol_type = other DNA
ggcgatcgggatcgcctatc

SEQ ID NO: 3611 - DNA, 20 bp, synthetic construct
  source 1..20: mol_type = other DNA
gcactaaatgcagctagact

SEQ ID NO: 3612 - DNA, 20 bp, synthetic construct
  source 1..20: mol_type = other DNA
gtcaacttgacactcacact

SEQ ID NO: 3613 - DNA, 20 bp, synthetic construct
  source 1..20: mol_type = other DNA
gcacacgaccgaacgtctcc

SEQ ID NO: 3614 - DNA, 20 bp, synthetic construct
  source 1..20: mol_type = other DNA
actgagcacgggtgcgagta

SEQ ID NO: 3615 - DNA, 20 bp, synthetic construct
  source 1..20: mol_type = other DNA
aatccaccgctcggcgttgc

SEQ ID NO: 3616 - DNA, 20 bp, synthetic construct
  source 1..20: mol_type = other DNA
attaggtaccgggtatcatc

SEQ ID NO: 3617 - DNA, 20 bp, synthetic construct
  source 1..20: mol_type = other DNA
tactattggtacttagtccc

SEQ ID NO: 3618 - DNA, 20 bp, synthetic construct
  source 1..20: mol_type = other DNA
agcctaagatacgattgcac

SEQ ID NO: 3619 - DNA, 20 bp, synthetic construct
  source 1..20: mol_type = other DNA
gcgtgttgtgtgtaaccgct

SEQ ID NO: 3620 - DNA, 20 bp, synthetic construct
  source 1..20: mol_type = other DNA
tatgttgagcctatacgatg

SEQ ID NO: 3621 - DNA, 20 bp, synthetic construct
  source 1..20: mol_type = other DNA
aagagctaaccagtaatcct

SEQ ID NO: 3622 - DNA, 20 bp, synthetic construct
  source 1..20: mol_type = other DNA
cggatggatgtcgtgcgtct

SEQ ID NO: 3623 - DNA, 20 bp, synthetic construct
  source 1..20: mol_type = other DNA
tcatccattgatataatcct

SEQ ID NO: 3624 - DNA, 20 bp, synthetic construct
  source 1..20: mol_type = other DNA
tggctttatcgagcggatca

SEQ ID NO: 3625 - DNA, 20 bp, synthetic construct
  source 1..20: mol_type = other DNA
tcgggttaagttaagacgca

SEQ ID NO: 3626 - DNA, 20 bp, synthetic construct
  source 1..20: mol_type = other DNA
gtcggaactcactttcaaca

SEQ ID NO: 3627 - DNA, 20 bp, synthetic construct
  source 1..20: mol_type = other DNA
gcgcgaaatgtgccaggacg

SEQ ID NO: 3628 - DNA, 20 bp, synthetic construct
  source 1..20: mol_type = other DNA
tgccaagtagctaactttac

SEQ ID NO: 3629 - DNA, 20 bp, synthetic construct
  source 1..20: mol_type = other DNA
tgagacagtccgcaattagg

SEQ ID NO: 3630 - DNA, 20 bp, synthetic construct
  source 1..20: mol_type = other DNA
ctgacacctaccggttccgt

SEQ ID NO: 3631 - DNA, 20 bp, synthetic construct
  source 1..20: mol_type = other DNA
taaggagttccgaccgtggg

SEQ ID NO: 3632 - DNA, 20 bp, synthetic construct
  source 1..20: mol_type = other DNA
ggattatttcggcgcgtgtc

SEQ ID NO: 3633 - DNA, 20 bp, synthetic construct
  source 1..20: mol_type = other DNA
caaacaacgcgggatagtcc

SEQ ID NO: 3634 - DNA, 20 bp, synthetic construct
  source 1..20: mol_type = other DNA
ggaaggcttaggtgatcgat

SEQ ID NO: 3635 - DNA, 20 bp, synthetic construct
  source 1..20: mol_type = other DNA
agctgtgaagcggctcaaat

SEQ ID NO: 3636 - DNA, 20 bp, synthetic construct
  source 1..20: mol_type = other DNA
tcagcgatcaccacggttct

SEQ ID NO: 3637 - DNA, 20 bp, synthetic construct
  source 1..20: mol_type = other DNA
tggccgtatacggcccatca

SEQ ID NO: 3638 - DNA, 20 bp, synthetic construct
  source 1..20: mol_type = other DNA
ttagttggtggtgccgtaaa

SEQ ID NO: 3639 - DNA, 20 bp, synthetic construct
  source 1..20: mol_type = other DNA
gtaggcttctgcagaagcat

SEQ ID NO: 3640 - DNA, 20 bp, synthetic construct
  source 1..20: mol_type = other DNA
cggtaatccctaacggaccc

SEQ ID NO: 3641 - DNA, 20 bp, synthetic construct
  source 1..20: mol_type = other DNA
tttgccttctcccgaatccg

SEQ ID NO: 3642 - DNA, 20 bp, synthetic construct
  source 1..20: mol_type = other DNA
cgatgtgaaggactcagtac

SEQ ID NO: 3643 - DNA, 20 bp, synthetic construct
  source 1..20: mol_type = other DNA
aagtttcaacctacatcgtt

SEQ ID NO: 3644 - DNA, 20 bp, synthetic construct
  source 1..20: mol_type = other DNA
gactataacaagagaaagat

SEQ ID NO: 3645 - DNA, 20 bp, synthetic construct
  source 1..20: mol_type = other DNA
ggaccaggctattacgttaa

SEQ ID NO: 3646 - DNA, 20 bp, synthetic construct
  source 1..20: mol_type = other DNA
aacacgggtggcaagggcag

SEQ ID NO: 3647 - DNA, 20 bp, synthetic construct
  source 1..20: mol_type = other DNA
ggccgaataagattctgttt

SEQ ID NO: 3648 - DNA, 20 bp, synthetic construct
  source 1..20: mol_type = other DNA
ccaaatccatcgtagcaaag

SEQ ID NO: 3649 - DNA, 20 bp, synthetic construct
  source 1..20: mol_type = other DNA
gagtgggtacgaccgaccac

SEQ ID NO: 3650 - DNA, 20 bp, synthetic construct
  source 1..20: mol_type = other DNA
acgctcagagactttctaag

SEQ ID NO: 3651 - DNA, 20 bp, synthetic construct
  source 1..20: mol_type = other DNA
ggatctacggtgcccttcct

SEQ ID NO: 3652 - DNA, 20 bp, synthetic construct
  source 1..20: mol_type = other DNA
gttactagccacggttcgaa

SEQ ID NO: 3653 - DNA, 20 bp, synthetic construct
  source 1..20: mol_type = other DNA
ctcggacttccagttctgca

SEQ ID NO: 3654 - DNA, 20 bp, synthetic construct
  source 1..20: mol_type = other DNA
gacaggcgaagagcccacat

SEQ ID NO: 3655 - DNA, 20 bp, synthetic construct
  source 1..20: mol_type = other DNA
gaaagggccgatcgacctca

SEQ ID NO: 3656 - DNA, 20 bp, synthetic construct
  source 1..20: mol_type = other DNA
tattaatgccatagaacggc

SEQ ID NO: 3657 - DNA, 20 bp, synthetic construct
  source 1..20: mol_type = other DNA
tagacgaagtaataggtagc

SEQ ID NO: 3658 - DNA, 20 bp, synthetic construct
  source 1..20: mol_type = other DNA
cacgtaagtgcccgccgacc

SEQ ID NO: 3659 - DNA, 20 bp, synthetic construct
  source 1..20: mol_type = other DNA
tggtaatacacaacacagcc

SEQ ID NO: 3660 - DNA, 20 bp, synthetic construct
  source 1..20: mol_type = other DNA
cagcaatgtcgtccaccagg

SEQ ID NO: 3661 - DNA, 20 bp, synthetic construct
  source 1..20: mol_type = other DNA
ctggcgtcgctaatctgcca

SEQ ID NO: 3662 - DNA, 20 bp, synthetic construct
  source 1..20: mol_type = other DNA
ctaactctcgatgtttccgc

SEQ ID NO: 3663 - DNA, 20 bp, synthetic construct
  source 1..20: mol_type = other DNA
gtctatggctgaatagcacc

SEQ ID NO: 3664 - DNA, 20 bp, synthetic construct
  source 1..20: mol_type = other DNA
ttgcgaatcgacaagcgagt

SEQ ID NO: 3665 - DNA, 20 bp, synthetic construct
  source 1..20: mol_type = other DNA
ggatcttcaatgcaggcctt

SEQ ID NO: 3666 - DNA, 20 bp, synthetic construct
  source 1..20: mol_type = other DNA
aggcaacgagaccggcgacc

SEQ ID NO: 3667 - DNA, 20 bp, synthetic construct
  source 1..20: mol_type = other DNA
acaatagggtaatgtattgc

SEQ ID NO: 3668 - DNA, 20 bp, synthetic construct
  source 1..20: mol_type = other DNA
gtgtactttagatccatgca

SEQ ID NO: 3669 - DNA, 20 bp, synthetic construct
  source 1..20: mol_type = other DNA
aacagcgtaggagtctcgcc

SEQ ID NO: 3670 - DNA, 20 bp, synthetic construct
  source 1..20: mol_type = other DNA
ccagcacgaagatgctggta

SEQ ID NO: 3671 - DNA, 20 bp, synthetic construct
  source 1..20: mol_type = other DNA
aatagtcgggtggacccaga

SEQ ID NO: 3672 - DNA, 20 bp, synthetic construct
  source 1..20: mol_type = other DNA
cggagtcccgactgtgtaca

SEQ ID NO: 3673 - DNA, 20 bp, synthetic construct
  source 1..20: mol_type = other DNA
cctagactctactgtcgtcc

SEQ ID NO: 3674 - DNA, 20 bp, synthetic construct
  source 1..20: mol_type = other DNA
agtttatgaaacgccactcc

SEQ ID NO: 3675 - DNA, 20 bp, synthetic construct
  source 1..20: mol_type = other DNA
agtcgttgggactagcagca

SEQ ID NO: 3676 - DNA, 20 bp, synthetic construct
  source 1..20: mol_type = other DNA
cactcgcaatcttggaagcg

SEQ ID NO: 3677 - DNA, 20 bp, synthetic construct
  source 1..20: mol_type = other DNA
aacgcaggaatgctagttct

SEQ ID NO: 3678 - DNA, 20 bp, synthetic construct
  source 1..20: mol_type = other DNA
gaaaccagcaaggccaacga

SEQ ID NO: 3679 - DNA, 20 bp, synthetic construct
  source 1..20: mol_type = other DNA
ctagggaccattaaccacag

SEQ ID NO: 3680 - DNA, 20 bp, synthetic construct
  source 1..20: mol_type = other DNA
ctacctacagcggacacctc

SEQ ID NO: 3681 - DNA, 20 bp, synthetic construct
  source 1..20: mol_type = other DNA
gcgtccttgtctccacgctg

SEQ ID NO: 3682 - DNA, 20 bp, synthetic construct
  source 1..20: mol_type = other DNA
tccaagtaagagggcattac

SEQ ID NO: 3683 - DNA, 20 bp, synthetic construct
  source 1..20: mol_type = other DNA
taggtgaggaatgtgggttt

SEQ ID NO: 3684 - DNA, 20 bp, synthetic construct
  source 1..20: mol_type = other DNA
tagtggccggcctacagttc

SEQ ID NO: 3685 - DNA, 20 bp, synthetic construct
  source 1..20: mol_type = other DNA
cgaacccagtgagcgctaaa

SEQ ID NO: 3686 - DNA, 20 bp, synthetic construct
  source 1..20: mol_type = other DNA
ttgctagatcgctggataaa

SEQ ID NO: 3687 - DNA, 20 bp, synthetic construct
  source 1..20: mol_type = other DNA
tttagatgcccagagaccgg

SEQ ID NO: 3688 - DNA, 20 bp, synthetic construct
  source 1..20: mol_type = other DNA
tcgaacgactaggttatatg

SEQ ID NO: 3689 - DNA, 20 bp, synthetic construct
  source 1..20: mol_type = other DNA
caaagcagtatatcaaccta

SEQ ID NO: 3690 - DNA, 20 bp, synthetic construct
  source 1..20: mol_type = other DNA
cctatccctatataccgcaa

SEQ ID NO: 3691 - DNA, 20 bp, synthetic construct
  source 1..20: mol_type = other DNA
ttgtgtggactgtacgcttt

SEQ ID NO: 3692 - DNA, 20 bp, synthetic construct
  source 1..20: mol_type = other DNA
gtagggttccatgggtccgg

SEQ ID NO: 3693 - DNA, 20 bp, synthetic construct
  source 1..20: mol_type = other DNA
ggtccgggcacgtaatgtgt

SEQ ID NO: 3694 - DNA, 20 bp, synthetic construct
  source 1..20: mol_type = other DNA
ttcttactcgcgcctgaccc

SEQ ID NO: 3695 - DNA, 20 bp, synthetic construct
  source 1..20: mol_type = other DNA
gcgtcactcccaaccgttat

SEQ ID NO: 3696 - DNA, 20 bp, synthetic construct
  source 1..20: mol_type = other DNA
ctgtcgttcgggtgtttcgt

SEQ ID NO: 3697 - DNA, 20 bp, synthetic construct
  source 1..20: mol_type = other DNA
atgttcaagtaccgcaacac

SEQ ID NO: 3698 - DNA, 20 bp, synthetic construct
  source 1..20: mol_type = other DNA
cgactcgtgcacttaagttg

SEQ ID NO: 3699 - DNA, 20 bp, synthetic construct
  source 1..20: mol_type = other DNA
aatggctttcaggcttgcgt

SEQ ID NO: 3700 - DNA, 20 bp, synthetic construct
  source 1..20: mol_type = other DNA
gatccagtccgtactgcact

SEQ ID NO: 3701 - DNA, 20 bp, synthetic construct
  source 1..20: mol_type = other DNA
gcgctgaggtgcgatgtacg

SEQ ID NO: 3702 - DNA, 20 bp, synthetic construct
  source 1..20: mol_type = other DNA
aagtgcgtaaagtctggctg

SEQ ID NO: 3703 - DNA, 20 bp, synthetic construct
  source 1..20: mol_type = other DNA
tggattgtaagataccagat

SEQ ID NO: 3704 - DNA, 20 bp, synthetic construct
  source 1..20: mol_type = other DNA
ggtgtacatgttccgggtag

SEQ ID NO: 3705 - DNA, 20 bp, synthetic construct
  source 1..20: mol_type = other DNA
ctagcttgtataccagaagg

SEQ ID NO: 3706 - DNA, 20 bp, synthetic construct
  source 1..20: mol_type = other DNA
cacgagctggcctgaacaaa

SEQ ID NO: 3707 - DNA, 20 bp, synthetic construct
  source 1..20: mol_type = other DNA
tagcctacgcagacatcata

SEQ ID NO: 3708 - DNA, 20 bp, synthetic construct
  source 1..20: mol_type = other DNA
atcttaacgtgccgagtaga

SEQ ID NO: 3709 - DNA, 20 bp, synthetic construct
  source 1..20: mol_type = other DNA
atcacactgtcgtgtaaatt

SEQ ID NO: 3710 - DNA, 20 bp, synthetic construct
  source 1..20: mol_type = other DNA
gactccaccgcacgtcctat

SEQ ID NO: 3711 - DNA, 20 bp, synthetic construct
  source 1..20: mol_type = other DNA
agtccacttcgtactccggc

SEQ ID NO: 3712 - DNA, 20 bp, synthetic construct
  source 1..20: mol_type = other DNA
atgtgttaaatctcgtacca

SEQ ID NO: 3713 - DNA, 20 bp, synthetic construct
  source 1..20: mol_type = other DNA
gtaaagagttaaatgctcgc

SEQ ID NO: 3714 - DNA, 20 bp, synthetic construct
  source 1..20: mol_type = other DNA
cctgggatgccaaggtttgg

SEQ ID NO: 3715 - DNA, 20 bp, synthetic construct
  source 1..20: mol_type = other DNA
cccagactgctttacttgag

SEQ ID NO: 3716 - DNA, 20 bp, synthetic construct
  source 1..20: mol_type = other DNA
cctcagctaagtgactgctg

SEQ ID NO: 3717 - DNA, 20 bp, synthetic construct
  source 1..20: mol_type = other DNA
ctacttagccaacacgaaac

SEQ ID NO: 3718 - DNA, 20 bp, synthetic construct
  source 1..20: mol_type = other DNA
cagcattcgggtatgattca

SEQ ID NO: 3719 - DNA, 20 bp, synthetic construct
  source 1..20: mol_type = other DNA
gcgttcgccaacgcagggac

SEQ ID NO: 3720 - DNA, 20 bp, synthetic construct
  source 1..20: mol_type = other DNA
catggatcccataattgtag

SEQ ID NO: 3721 - DNA, 20 bp, synthetic construct
  source 1..20: mol_type = other DNA
atatgtaagtcgcatgggtc

SEQ ID NO: 3722 - DNA, 20 bp, synthetic construct
  source 1..20: mol_type = other DNA
agccgtctttcggattcggc

SEQ ID NO: 3723 - DNA, 20 bp, synthetic construct
  source 1..20: mol_type = other DNA
tacttcgtcttgcggtaggg

SEQ ID NO: 3724 - DNA, 20 bp, synthetic construct
  source 1..20: mol_type = other DNA
gtgcgtcaatatgtttcttc

SEQ ID NO: 3725 - DNA, 20 bp, synthetic construct
  source 1..20: mol_type = other DNA
tctcactccacgttacaggc

SEQ ID NO: 3726 - DNA, 20 bp, synthetic construct
  source 1..20: mol_type = other DNA
ccgttaagtgattcgggtat

SEQ ID NO: 3727 - DNA, 20 bp, synthetic construct
  source 1..20: mol_type = other DNA
ttcagctcttcgtttgtgat

SEQ ID NO: 3728 - DNA, 20 bp, synthetic construct
  source 1..20: mol_type = other DNA
ctcccacctacagatccaga

SEQ ID NO: 3729 - DNA, 20 bp, synthetic construct
  source 1..20: mol_type = other DNA
gaatagaacgcggttatacg

SEQ ID NO: 3730 - DNA, 20 bp, synthetic construct
  source 1..20: mol_type = other DNA
acaagcctgccggagtactt

SEQ ID NO: 3731 - DNA, 20 bp, synthetic construct
  source 1..20: mol_type = other DNA
cttcgattgcgatggaggtc

SEQ ID NO: 3732 - DNA, 20 bp, synthetic construct
  source 1..20: mol_type = other DNA
catgctacaatctccgagag

SEQ ID NO: 3733 - DNA, 20 bp, synthetic construct
  source 1..20: mol_type = other DNA
gcgcgctaggcgctatctag

SEQ ID NO: 3734 - DNA, 20 bp, synthetic construct
  source 1..20: mol_type = other DNA
tcttgctctcctggaccacg

SEQ ID NO: 3735 - DNA, 20 bp, synthetic construct
  source 1..20: mol_type = other DNA
gcaacctgaactcggaagct

SEQ ID NO: 3736 - DNA, 20 bp, synthetic construct
  source 1..20: mol_type = other DNA
cttgggctgcgtacatatct

SEQ ID NO: 3737 - DNA, 20 bp, synthetic construct
  source 1..20: mol_type = other DNA
ctcagtactgctgttccctg

SEQ ID NO: 3738 - DNA, 20 bp, synthetic construct
  source 1..20: mol_type = other DNA
tcactcccatagttatactt

SEQ ID NO: 3739 - DNA, 20 bp, synthetic construct
  source 1..20: mol_type = other DNA
ggacgtacgactgcaccctc

SEQ ID NO: 3740 - DNA, 20 bp, synthetic construct
  source 1..20: mol_type = other DNA
ggcggacgcttattcacaat

SEQ ID NO: 3741 - DNA, 20 bp, synthetic construct
  source 1..20: mol_type = other DNA
cggcctcgtgggaaacctgt

SEQ ID NO: 3742 - DNA, 20 bp, synthetic construct
  source 1..20: mol_type = other DNA
ggctcggcatctctgtgcat

SEQ ID NO: 3743 - DNA, 20 bp, synthetic construct
  source 1..20: mol_type = other DNA
acattgcccttacgattctc

SEQ ID NO: 3744 - DNA, 20 bp, synthetic construct
  source 1..20: mol_type = other DNA
cgcttattaagggctcaacc

SEQ ID NO: 3745 - DNA, 20 bp, synthetic construct
  source 1..20: mol_type = other DNA
gatcgatggtcctgccgata

SEQ ID NO: 3746 - DNA, 20 bp, synthetic construct
  source 1..20: mol_type = other DNA
caatgggagcgctccgtgac

SEQ ID NO: 3747 - DNA, 20 bp, synthetic construct
  source 1..20: mol_type = other DNA
ataacttgtaggtcacacca

SEQ ID NO: 3748 - DNA, 20 bp, synthetic construct
  source 1..20: mol_type = other DNA
tggtttcgtgacgaggtcgc

SEQ ID NO: 3749 - DNA, 20 bp, synthetic construct
  source 1..20: mol_type = other DNA
actgaaatgttgggcctacc

SEQ ID NO: 3750 - DNA, 20 bp, synthetic construct
  source 1..20: mol_type = other DNA
gtttgtaatagcttccttca

SEQ ID NO: 3751 - DNA, 20 bp, synthetic construct
  source 1..20: mol_type = other DNA
tctcccggatccaaataaac

SEQ ID NO: 3752 - DNA, 20 bp, synthetic construct
  source 1..20: mol_type = other DNA
attatcaatgaccctgttcg

SEQ ID NO: 3753 - DNA, 20 bp, synthetic construct
  source 1..20: mol_type = other DNA
tccgtattcccatacggaaa

SEQ ID NO: 3754 - DNA, 20 bp, synthetic construct
  source 1..20: mol_type = other DNA
atgcgtgacataccacttag

SEQ ID NO: 3755 - DNA, 20 bp, synthetic construct
  source 1..20: mol_type = other DNA
cctgttggtggctgcatgac

SEQ ID NO: 3756 - DNA, 20 bp, synthetic construct
  source 1..20: mol_type = other DNA
atctgtttcgtcactttgac

SEQ ID NO: 3757 - DNA, 20 bp, synthetic construct
  source 1..20: mol_type = other DNA
gtgagtcagtcatcagagtg

SEQ ID NO: 3758 - DNA, 20 bp, synthetic construct
  source 1..20: mol_type = other DNA
gcagtccaaagtctaccgag

SEQ ID NO: 3759 - DNA, 20 bp, synthetic construct
  source 1..20: mol_type = other DNA
ttgcgatccctaaatcaaca

SEQ ID NO: 3760 - DNA, 20 bp, synthetic construct
  source 1..20: mol_type = other DNA
accgccaagtcgtttatgtg

SEQ ID NO: 3761 - DNA, 20 bp, synthetic construct
  source 1..20: mol_type = other DNA
ctgggcgggttaacctttcg

SEQ ID NO: 3762 - DNA, 20 bp, synthetic construct
  source 1..20: mol_type = other DNA
ataacctgaatagggcttgc

SEQ ID NO: 3763 - DNA, 20 bp, synthetic construct
  source 1..20: mol_type = other DNA
tcatggtgttggacaaactg

SEQ ID NO: 3764 - DNA, 20 bp, synthetic construct
  source 1..20: mol_type = other DNA
ccctgcagttgcaacctcgc

SEQ ID NO: 3765 - DNA, 20 bp, synthetic construct
  source 1..20: mol_type = other DNA
tcggtattcaacgtatcata

SEQ ID NO: 3766 - DNA, 20 bp, synthetic construct
  source 1..20: mol_type = other DNA
atctataagaggcatttctc

SEQ ID NO: 3767 - DNA, 20 bp, synthetic construct
  source 1..20: mol_type = other DNA
atcctatgggttaaccaggc

SEQ ID NO: 3768 - DNA, 20 bp, synthetic construct
  source 1..20: mol_type = other DNA
ttgttgagacctcgctttgc

SEQ ID NO: 3769 - DNA, 20 bp, synthetic construct
  source 1..20: mol_type = other DNA
tacgggaccctcgtgtagtt

SEQ ID NO: 3770 - DNA, 20 bp, synthetic construct
  source 1..20: mol_type = other DNA
aaatcgagtagcctttctac

SEQ ID NO: 3771 - DNA, 20 bp, synthetic construct
  source 1..20: mol_type = other DNA
ggagccgagttgagcgaata

SEQ ID NO: 3772 - DNA, 20 bp, synthetic construct
  source 1..20: mol_type = other DNA
cctccgtgctatatagtgtt

SEQ ID NO: 3773 - DNA, 20 bp, synthetic construct
  source 1..20: mol_type = other DNA
cctacttagatgaacgggtc

SEQ ID NO: 3774 - DNA, 20 bp, synthetic construct
  source 1..20: mol_type = other DNA
tcagcgtatcagtaacgttc

SEQ ID NO: 3775 - DNA, 20 bp, synthetic construct
  source 1..20: mol_type = other DNA
cgctggacgctaatctagcc

SEQ ID NO: 3776 - DNA, 20 bp, synthetic construct
  source 1..20: mol_type = other DNA
gataacgcaaatagttgctt

SEQ ID NO: 3777 - DNA, 20 bp, synthetic construct
  source 1..20: mol_type = other DNA
ggatgttcgcggtcgcctac

SEQ ID NO: 3778 - DNA, 20 bp, synthetic construct
  source 1..20: mol_type = other DNA
gggtaatgctgaattgtgag

SEQ ID NO: 3779 - DNA, 20 bp, synthetic construct
  source 1..20: mol_type = other DNA
aaggcacgctgtttgacgtt

SEQ ID NO: 3780 - DNA, 20 bp, synthetic construct
  source 1..20: mol_type = other DNA
cctcggtactcataatcata

SEQ ID NO: 3781 - DNA, 20 bp, synthetic construct
  source 1..20: mol_type = other DNA
tcgtcgtaatagcactacgg

SEQ ID NO: 3782 - DNA, 20 bp, synthetic construct
  source 1..20: mol_type = other DNA
tcgctgccgcacttaggaac

SEQ ID NO: 3783 - DNA, 20 bp, synthetic construct
  source 1..20: mol_type = other DNA
tgcatgtgtccggaatcgtg

SEQ ID NO: 3784 - DNA, 20 bp, synthetic construct
  source 1..20: mol_type = other DNA
gctggtcaggtctatatacc

SEQ ID NO: 3785 - DNA, 20 bp, synthetic construct
  source 1..20: mol_type = other DNA
gcatcacatgctgcaacagg

SEQ ID NO: 3786 - DNA, 20 bp, synthetic construct
  source 1..20: mol_type = other DNA
gctggtaagtacgtttggta

SEQ ID NO: 3787 - DNA, 20 bp, synthetic construct
  source 1..20: mol_type = other DNA
atgagcaccgtctgccacgc

SEQ ID NO: 3788 - DNA, 20 bp, synthetic construct
  source 1..20: mol_type = other DNA
gggctgccgctaccgtagaa

SEQ ID NO: 3789 - DNA, 20 bp, synthetic construct
  source 1..20: mol_type = other DNA
gttcatgttggcgtcgtcca

SEQ ID NO: 3790 - DNA, 20 bp, synthetic construct
  source 1..20: mol_type = other DNA
tgtgcgaatcatcttctcta

SEQ ID NO: 3791 - DNA, 20 bp, synthetic construct
  source 1..20: mol_type = other DNA
tctcaagtctcacgttggga

SEQ ID NO: 3792 - DNA, 20 bp, synthetic construct
  source 1..20: mol_type = other DNA
tctctagtgttccatatacg

SEQ ID NO: 3793 - DNA, 20 bp, synthetic construct
  source 1..20: mol_type = other DNA
ggatctatgcgcttatctga

SEQ ID NO: 3794 - DNA, 20 bp, synthetic construct
  source 1..20: mol_type = other DNA
cagtatcggttcgtccgaga

SEQ ID NO: 3795 - DNA, 20 bp, synthetic construct
  source 1..20: mol_type = other DNA
agttagtctcgttgtgtaga

SEQ ID NO: 3796 - DNA, 20 bp, synthetic construct
  source 1..20: mol_type = other DNA
ggaacaccgtgccatagctc

SEQ ID NO: 3797 - DNA, 20 bp, synthetic construct
  source 1..20: mol_type = other DNA
cccttacacctctactcgcg

SEQ ID NO: 3798 - DNA, 20 bp, synthetic construct
  source 1..20: mol_type = other DNA
ggatcaagttgtggagttta

SEQ ID NO: 3799 - DNA, 20 bp, synthetic construct
  source 1..20: mol_type = other DNA
ttgaaggcttgatccgcacg

SEQ ID NO: 3800 - DNA, 20 bp, synthetic construct
  source 1..20: mol_type = other DNA
ggagaaactgtaccggtgat

SEQ ID NO: 3801 - DNA, 20 bp, synthetic construct
  source 1..20: mol_type = other DNA
tcttgagcggcccgcttaat

SEQ ID NO: 3802 - DNA, 20 bp, synthetic construct
  source 1..20: mol_type = other DNA
atcacgctacactagagcgt

SEQ ID NO: 3803 - DNA, 20 bp, synthetic construct
  source 1..20: mol_type = other DNA
ggtactgaaaggtcggccta

SEQ ID NO: 3804 - DNA, 20 bp, synthetic construct
  source 1..20: mol_type = other DNA
acgttccatatcacagccaa

SEQ ID NO: 3805 - DNA, 20 bp, synthetic construct
  source 1..20: mol_type = other DNA
aattagggacgccattgtgc

SEQ ID NO: 3806 - DNA, 20 bp, synthetic construct
  source 1..20: mol_type = other DNA
atattactacaaggcccaga

SEQ ID NO: 3807 - DNA, 20 bp, synthetic construct
  source 1..20: mol_type = other DNA
gcagtctatttgccaactcg

SEQ ID NO: 3808 - DNA, 20 bp, synthetic construct
  source 1..20: mol_type = other DNA
gacgggatcgcacgggaaat

SEQ ID NO: 3809 - DNA, 20 bp, synthetic construct
  source 1..20: mol_type = other DNA
gaaatcctgacacccgcctc

SEQ ID NO: 3810 - DNA, 20 bp, synthetic construct
  source 1..20: mol_type = other DNA
gccacctgggatcagtcttc

SEQ ID NO: 3811 - DNA, 20 bp, synthetic construct
  source 1..20: mol_type = other DNA
cggtgttcctggctatcact

SEQ ID NO: 3812 - DNA, 20 bp, synthetic construct
  source 1..20: mol_type = other DNA
ggcggaggatgcgtccaact

SEQ ID NO: 3813 - DNA, 20 bp, synthetic construct
  source 1..20: mol_type = other DNA
cagcctaccctccgaacaaa

SEQ ID NO: 3814 - DNA, 20 bp, synthetic construct
  source 1..20: mol_type = other DNA
cccacaacactcatccagca

SEQ ID NO: 3815 - DNA, 20 bp, synthetic construct
  source 1..20: mol_type = other DNA
cagcgcagagagaagtaaga

SEQ ID NO: 3816 - DNA, 20 bp, synthetic construct
  source 1..20: mol_type = other DNA
tcatcgatatggagccagct

SEQ ID NO: 3817 - DNA, 20 bp, synthetic construct
  source 1..20: mol_type = other DNA
acacagggcagtctcagaga

SEQ ID NO: 3818 - DNA, 20 bp, synthetic construct
  source 1..20: mol_type = other DNA
taattctctataggcgcgtc

SEQ ID NO: 3819 - DNA, 20 bp, synthetic construct
  source 1..20: mol_type = other DNA
accatgtatctctacgggaa

SEQ ID NO: 3820 - DNA, 20 bp, synthetic construct
  source 1..20: mol_type = other DNA
cctgccgcgattatccctat

SEQ ID NO: 3821 - DNA, 20 bp, synthetic construct
  source 1..20: mol_type = other DNA
tcagctttagttggtcggtg

SEQ ID NO: 3822 - DNA, 20 bp, synthetic construct
  source 1..20: mol_type = other DNA
ggtggataaacggtctaggc

SEQ ID NO: 3823 - DNA, 20 bp, synthetic construct
  source 1..20: mol_type = other DNA
ccctcgaagtccgcttgcga

SEQ ID NO: 3824 - DNA, 20 bp, synthetic construct
  source 1..20: mol_type = other DNA
aacataaaccgtgcgaagcc

SEQ ID NO: 3825 - DNA, 20 bp, synthetic construct
  source 1..20: mol_type = other DNA
tgtttggcgctctgtaagat

SEQ ID NO: 3826 - DNA, 20 bp, synthetic construct
  source 1..20: mol_type = other DNA
gtatgctttagtccacagtt

SEQ ID NO: 3827 - DNA, 20 bp, synthetic construct
  source 1..20: mol_type = other DNA
caacttacggtcattaagcg

SEQ ID NO: 3828 - DNA, 20 bp, synthetic construct
  source 1..20: mol_type = other DNA
cctaaacgcgtcgtgcaatg

SEQ ID NO: 3829 - DNA, 20 bp, synthetic construct
  source 1..20: mol_type = other DNA
ggtaaggcactgtaacgggc

SEQ ID NO: 3830 - DNA, 20 bp, synthetic construct
  source 1..20: mol_type = other DNA
agataattattgccctcatg

SEQ ID NO: 3831 - DNA, 20 bp, synthetic construct
  source 1..20: mol_type = other DNA
agaatggtacaaccatagaa

SEQ ID NO: 3832 - DNA, 20 bp, synthetic construct
  source 1..20: mol_type = other DNA
gtacaaagaattggtcgcga

SEQ ID NO: 3833 - DNA, 20 bp, synthetic construct
  source 1..20: mol_type = other DNA
aaagtccgctttcgtctatc

SEQ ID NO: 3834 - DNA, 20 bp, synthetic construct
  source 1..20: mol_type = other DNA
agtggacgaatcttgtatga

SEQ ID NO: 3835 - DNA, 20 bp, synthetic construct
  source 1..20: mol_type = other DNA
cacgagccctctctggagta

SEQ ID NO: 3836 - DNA, 20 bp, synthetic construct
  source 1..20: mol_type = other DNA
atcagcactcgcctcatcgt

SEQ ID NO: 3837 - DNA, 20 bp, synthetic construct
  source 1..20: mol_type = other DNA
tatcgcaggcaaattcagcc

SEQ ID NO: 3838 - DNA, 20 bp, synthetic construct
  source 1..20: mol_type = other DNA
ggagacgaagtaatacttgt

SEQ ID NO: 3839 - DNA, 20 bp, synthetic construct
  source 1..20: mol_type = other DNA
ccaccttataccgacgtatt

SEQ ID NO: 3840 - DNA, 20 bp, synthetic construct
  source 1..20: mol_type = other DNA
ggcactcgtgaatctaaatc

SEQ ID NO: 3841 - DNA, 20 bp, synthetic construct
  source 1..20: mol_type = other DNA
aaatgaggatgcaacctcgt

SEQ ID NO: 3842 - DNA, 20 bp, synthetic construct
  source 1..20: mol_type = other DNA
agtgtaaacccagacggtcc

SEQ ID NO: 3843 - DNA, 20 bp, synthetic construct
  source 1..20: mol_type = other DNA
ttcacacatcgagtgtatcc

SEQ ID NO: 3844 - DNA, 20 bp, synthetic construct
  source 1..20: mol_type = other DNA
agtgtatgcgcggccagata

SEQ ID NO: 3845 - DNA, 20 bp, synthetic construct
  source 1..20: mol_type = other DNA
catgtgataggcgggcactg

SEQ ID NO: 3846 - DNA, 20 bp, synthetic construct
  source 1..20: mol_type = other DNA
ggaccactgggtcggtcctt

SEQ ID NO: 3847 - DNA, 20 bp, synthetic construct
  source 1..20: mol_type = other DNA
agtgcctatcccaacccata

SEQ ID NO: 3848 - DNA, 20 bp, synthetic construct
  source 1..20: mol_type = other DNA
tgtgttaccaattctcaaac

SEQ ID NO: 3849 - DNA, 20 bp, synthetic construct
  source 1..20: mol_type = other DNA
gagctctcaaccggaacagg

SEQ ID NO: 3850 - DNA, 20 bp, synthetic construct
  source 1..20: mol_type = other DNA
tagagttgccatggattaga

SEQ ID NO: 3851 - DNA, 20 bp, synthetic construct
  source 1..20: mol_type = other DNA
ccgtgtttaccctgaaactc

SEQ ID NO: 3852 - DNA, 20 bp, synthetic construct
  source 1..20: mol_type = other DNA
agtgatctgtgacgtacgag

SEQ ID NO: 3853 - DNA, 20 bp, synthetic construct
  source 1..20: mol_type = other DNA
tcgtttgcgtggttccgcat

SEQ ID NO: 3854 - DNA, 20 bp, synthetic construct
  source 1..20: mol_type = other DNA
aagtcgattcacatttcctt

SEQ ID NO: 3855 - DNA, 20 bp, synthetic construct
  source 1..20: mol_type = other DNA
ggcttatgacggttagtttc

SEQ ID NO: 3856 - DNA, 20 bp, synthetic construct
  source 1..20: mol_type = other DNA
cgactctcagattgcatgtt

SEQ ID NO: 3857 - DNA, 20 bp, synthetic construct
  source 1..20: mol_type = other DNA
ttcaacaccgtcaatggagt

SEQ ID NO: 3858 - DNA, 20 bp, synthetic construct
  source 1..20: mol_type = other DNA
gcgcagaccttccaccggga

SEQ ID NO: 3859 - DNA, 20 bp, synthetic construct
  source 1..20: mol_type = other DNA
gtcaagtagccattctagcg

SEQ ID NO: 3860 - DNA, 20 bp, synthetic construct
  source 1..20: mol_type = other DNA
ctcgatttattcctgctctt

SEQ ID NO: 3861 - DNA, 20 bp, synthetic construct
  source 1..20: mol_type = other DNA
acgctaggacaaagctaatg

SEQ ID NO: 3862 - DNA, 20 bp, synthetic construct
  source 1..20: mol_type = other DNA
ctgcgatcgatttggaacca

SEQ ID NO: 3863 - DNA, 20 bp, synthetic construct
  source 1..20: mol_type = other DNA
gtcttctatcctcaaccttg

SEQ ID NO: 3864 - DNA, 20 bp, synthetic construct
  source 1..20: mol_type = other DNA
gagttgactttaacgcggta

SEQ ID NO: 3865 - DNA, 20 bp, synthetic construct
  source 1..20: mol_type = other DNA
tttgtgacggtctgatgggc

SEQ ID NO: 3866 - DNA, 20 bp, synthetic construct
  source 1..20: mol_type = other DNA
attgctatctccgccgaatg

SEQ ID NO: 3867 - DNA, 20 bp, synthetic construct
  source 1..20: mol_type = other DNA
cacctagcgatacaattagt

SEQ ID NO: 3868 - DNA, 20 bp, synthetic construct
  source 1..20: mol_type = other DNA
ccggacgcatgtgacttgtt

SEQ ID NO: 3869 - DNA, 20 bp, synthetic construct
  source 1..20: mol_type = other DNA
ctccaactctgcgagcctgt

SEQ ID NO: 3870 - DNA, 20 bp, synthetic construct
  source 1..20: mol_type = other DNA
tgctctacgcttaacctaat

SEQ ID NO: 3871 - DNA, 20 bp, synthetic construct
  source 1..20: mol_type = other DNA
gaggtagacgagctcggatt

SEQ ID NO: 3872 - DNA, 20 bp, synthetic construct
  source 1..20: mol_type = other DNA
accgtaaagctccactcaga

SEQ ID NO: 3873 - DNA, 20 bp, synthetic construct
  source 1..20: mol_type = other DNA
tgctcggattcttgggcgtc

SEQ ID NO: 3874 - DNA, 20 bp, synthetic construct
  source 1..20: mol_type = other DNA
aacgtatttgttgctcttct

SEQ ID NO: 3875 - DNA, 20 bp, synthetic construct
  source 1..20: mol_type = other DNA
gtctgcaccagtcactctca

SEQ ID NO: 3876 - DNA, 20 bp, synthetic construct
  source 1..20: mol_type = other DNA
caccgtgccgataggattgt

SEQ ID NO: 3877 - DNA, 20 bp, synthetic construct
  source 1..20: mol_type = other DNA
ccgttaagagcatggcatcg

SEQ ID NO: 3878 - DNA, 20 bp, synthetic construct
  source 1..20: mol_type = other DNA
atagagtgtgatcagtcgtg

SEQ ID NO: 3879 - DNA, 20 bp, synthetic construct
  source 1..20: mol_type = other DNA
tacgcagagagcagttgtgc

SEQ ID NO: 3880 - DNA, 20 bp, synthetic construct
  source 1..20: mol_type = other DNA
tccatattcagtgcggtata

SEQ ID NO: 3881 - DNA, 20 bp, synthetic construct
  source 1..20: mol_type = other DNA
caaccctgagttgatccgga

SEQ ID NO: 3882 - DNA, 20 bp, synthetic construct
  source 1..20: mol_type = other DNA
ctacaagtggcggctcgcac

SEQ ID NO: 3883 - DNA, 20 bp, synthetic construct
  source 1..20: mol_type = other DNA
ataggtgctgcggttgccca

SEQ ID NO: 3884 - DNA, 20 bp, synthetic construct
  source 1..20: mol_type = other DNA
cttcaactcgtcaagtgatc

SEQ ID NO: 3885 - DNA, 20 bp, synthetic construct
  source 1..20: mol_type = other DNA
caatattccgatatgcggac

SEQ ID NO: 3886 - DNA, 20 bp, synthetic construct
  source 1..20: mol_type = other DNA
agctaagttcaaattggagg

SEQ ID NO: 3887 - DNA, 20 bp, synthetic construct
  source 1..20: mol_type = other DNA
tgtatataacgtaagttcca

SEQ ID NO: 3888 - DNA, 20 bp, synthetic construct
  source 1..20: mol_type = other DNA
ggacgggtggcaatcaacaa

SEQ ID NO: 3889 - DNA, 20 bp, synthetic construct
  source 1..20: mol_type = other DNA
tgcgggcacgtggatccttg

SEQ ID NO: 3890 - DNA, 20 bp, synthetic construct
  source 1..20: mol_type = other DNA
agcattagagtccgttaatt

SEQ ID NO: 3891 - DNA, 20 bp, synthetic construct
  source 1..20: mol_type = other DNA
gtgtgatacgggtacacttg

SEQ ID NO: 3892 - DNA, 20 bp, synthetic construct
  source 1..20: mol_type = other DNA
taaaggtcaaggtattagta

SEQ ID NO: 3893 - DNA, 20 bp, synthetic construct
  source 1..20: mol_type = other DNA
tccatcctatttgtttcaat

SEQ ID NO: 3894 - DNA, 20 bp, synthetic construct
  source 1..20: mol_type = other DNA
tcgcgacgtaaatcgtattc

SEQ ID NO: 3895 - DNA, 20 bp, synthetic construct
  source 1..20: mol_type = other DNA
taccacaatccacgcggcat

SEQ ID NO: 3896 - DNA, 20 bp, synthetic construct
  source 1..20: mol_type = other DNA
cgacactatcgagcatttcc

SEQ ID NO: 3897 - DNA, 20 bp, synthetic construct
  source 1..20: mol_type = other DNA
ttaatgttacgactgccacc

SEQ ID NO: 3898 - DNA, 20 bp, synthetic construct
  source 1..20: mol_type = other DNA
tgctttataccgttaataac

SEQ ID NO: 3899 - DNA, 20 bp, synthetic construct
  source 1..20: mol_type = other DNA
acatccgccgaaccgatata

SEQ ID NO: 3900 - DNA, 20 bp, synthetic construct
  source 1..20: mol_type = other DNA
ctgtggaaggccttgtgcgg

SEQ ID NO: 3901 - DNA, 20 bp, synthetic construct
  source 1..20: mol_type = other DNA
gttacagcgatttactaagt

SEQ ID NO: 3902 - DNA, 20 bp, synthetic construct
  source 1..20: mol_type = other DNA
ttacaatagtacgaagccgg

SEQ ID NO: 3903 - DNA, 20 bp, synthetic construct
  source 1..20: mol_type = other DNA
aaatccatcttagccctcag

SEQ ID NO: 3904 - DNA, 20 bp, synthetic construct
  source 1..20: mol_type = other DNA
ctcctaccaggtgtgctgac

SEQ ID NO: 3905 - DNA, 20 bp, synthetic construct
  source 1..20: mol_type = other DNA
gggtatcaagctcctgacga

SEQ ID NO: 3906 - DNA, 20 bp, synthetic construct
  source 1..20: mol_type = other DNA
tcagcaaggaggcacgagca

SEQ ID NO: 3907 - DNA, 20 bp, synthetic construct
  source 1..20: mol_type = other DNA
tacaagaaggaaatcctcgg

SEQ ID NO: 3908 - DNA, 20 bp, synthetic construct
  source 1..20: mol_type = other DNA
gacagtaagcggcgggtaag

SEQ ID NO: 3909 - DNA, 20 bp, synthetic construct
  source 1..20: mol_type = other DNA
tctttacaatgtgttcggtt

SEQ ID NO: 3910 - DNA, 20 bp, synthetic construct
  source 1..20: mol_type = other DNA
gggagttaggctttctacac

SEQ ID NO: 3911 - DNA, 20 bp, synthetic construct
  source 1..20: mol_type = other DNA
ggctcgtcatatgtcaaaca

SEQ ID NO: 3912 - DNA, 20 bp, synthetic construct
  source 1..20: mol_type = other DNA
ctgtacgtccttgcgtacgg

SEQ ID NO: 3913 - DNA, 20 bp, synthetic construct
  source 1..20: mol_type = other DNA
ccacggttgctacgtcgctg

SEQ ID NO: 3914 - DNA, 20 bp, synthetic construct
  source 1..20: mol_type = other DNA
cttcctgcatgtgtcactaa

SEQ ID NO: 3915 - DNA, 20 bp, synthetic construct
  source 1..20: mol_type = other DNA
acgtctgatgtccatttcgt

SEQ ID NO: 3916 - DNA, 20 bp, synthetic construct
  source 1..20: mol_type = other DNA
cttcccgacaatgaattacc

SEQ ID NO: 3917 - DNA, 20 bp, synthetic construct
  source 1..20: mol_type = other DNA
cagcaacataggaccgtggg

SEQ ID NO: 3918 - DNA, 20 bp, synthetic construct
  source 1..20: mol_type = other DNA
gcaaatttgtactacccgtc

SEQ ID NO: 3919 - DNA, 20 bp, synthetic construct
  source 1..20: mol_type = other DNA
gctaatggattcgtacgccc

SEQ ID NO: 3920 - DNA, 20 bp, synthetic construct
  source 1..20: mol_type = other DNA
acattctatgagctcccaat

SEQ ID NO: 3921 - DNA, 20 bp, synthetic construct
  source 1..20: mol_type = other DNA
cgtactactttcgaagaata

SEQ ID NO: 3922 - DNA, 20 bp, synthetic construct
  source 1..20: mol_type = other DNA
agtctatgttctttcgatcg

SEQ ID NO: 3923 - DNA, 20 bp, synthetic construct
  source 1..20: mol_type = other DNA
gaaggagaaagaagggcggt

SEQ ID NO: 3924 - DNA, 20 bp, synthetic construct
  source 1..20: mol_type = other DNA
cacacgcccaagattacgtc

SEQ ID NO: 3925 - DNA, 20 bp, synthetic construct
  source 1..20: mol_type = other DNA
gacagctcaattccatccgt

SEQ ID NO: 3926 - DNA, 20 bp, synthetic construct
  source 1..20: mol_type = other DNA
cgaacgtagtagtctaccta

SEQ ID NO: 3927 - DNA, 20 bp, synthetic construct
  source 1..20: mol_type = other DNA
aaggcaaactgtgtcgggca

SEQ ID NO: 3928 - DNA, 20 bp, synthetic construct
  source 1..20: mol_type = other DNA
tatctttacgagcaatatgg

SEQ ID NO: 3929 - DNA, 20 bp, synthetic construct
  source 1..20: mol_type = other DNA
aattcggtggacgagacatt

SEQ ID NO: 3930 - DNA, 20 bp, synthetic construct
  source 1..20: mol_type = other DNA
gagttctggtatcttggaaa

SEQ ID NO: 3931 - DNA, 20 bp, synthetic construct
  source 1..20: mol_type = other DNA
cgcttacggacggagtcaag

SEQ ID NO: 3932 - DNA, 20 bp, synthetic construct
  source 1..20: mol_type = other DNA
ccgctgtgcatctcgacgtc

SEQ ID NO: 3933 - DNA, 20 bp, synthetic construct
  source 1..20: mol_type = other DNA
acaacaagtctcaacatatc

SEQ ID NO: 3934 - DNA, 20 bp, synthetic construct
  source 1..20: mol_type = other DNA
tggacagtactaatccactt

SEQ ID NO: 3935 - DNA, 20 bp, synthetic construct
  source 1..20: mol_type = other DNA
tgcagtgttctatgatcaca

SEQ ID NO: 3936 - DNA, 20 bp, synthetic construct
  source 1..20: mol_type = other DNA
gatgcctaattggaaggcgg

SEQ ID NO: 3937 - DNA, 20 bp, synthetic construct
  source 1..20: mol_type = other DNA
tctatcctagcttcacgtta

SEQ ID NO: 3938 - DNA, 20 bp, synthetic construct
  source 1..20: mol_type = other DNA
gtaagcatgttgatgtggaa

SEQ ID NO: 3939 - DNA, 20 bp, synthetic construct
  source 1..20: mol_type = other DNA
actatcttcggcggaggtag

SEQ ID NO: 3940 - DNA, 20 bp, synthetic construct
  source 1..20: mol_type = other DNA
gattcggtcattgtctaacg

SEQ ID NO: 3941 - DNA, 20 bp, synthetic construct
  source 1..20: mol_type = other DNA
gaaacgccataaccacgtaa

SEQ ID NO: 3942 - DNA, 20 bp, synthetic construct
  source 1..20: mol_type = other DNA
taagatccaatgaaccaggg

SEQ ID NO: 3943 - DNA, 20 bp, synthetic construct
  source 1..20: mol_type = other DNA
atcgatgagatgcgtcgaaa

SEQ ID NO: 3944 - DNA, 20 bp, synthetic construct
  source 1..20: mol_type = other DNA
taaatcttggccgaagttat

SEQ ID NO: 3945 - DNA, 20 bp, synthetic construct
  source 1..20: mol_type = other DNA
gacacttgcgatgtcttgga

SEQ ID NO: 3946 - DNA, 20 bp, synthetic construct
  source 1..20: mol_type = other DNA
ctatgggcatccggctattg

SEQ ID NO: 3947 - DNA, 20 bp, synthetic construct
  source 1..20: mol_type = other DNA
tttccttgatccgcgtacgc

SEQ ID NO: 3948 - DNA, 20 bp, synthetic construct
  source 1..20: mol_type = other DNA
cgccagtacatggagcatgc

SEQ ID NO: 3949 - DNA, 20 bp, synthetic construct
  source 1..20: mol_type = other DNA
caagtgcgagtctgatagat

SEQ ID NO: 3950 - DNA, 20 bp, synthetic construct
  source 1..20: mol_type = other DNA
aaggatagtccgttgcgcat

SEQ ID NO: 3951 - DNA, 20 bp, synthetic construct
  source 1..20: mol_type = other DNA
cacatgcgaaacttcttggc

SEQ ID NO: 3952 - DNA, 20 bp, synthetic construct
  source 1..20: mol_type = other DNA
ggcgaactcggtgtgtcaat

SEQ ID NO: 3953 - DNA, 20 bp, synthetic construct
  source 1..20: mol_type = other DNA
atgacttaactcgtaatctt

SEQ ID NO: 3954 - DNA, 20 bp, synthetic construct
  source 1..20: mol_type = other DNA
ctacgcttggtgttctggtg

SEQ ID NO: 3955 - DNA, 20 bp, synthetic construct
  source 1..20: mol_type = other DNA
ctctgagagtaccattattc

SEQ ID NO: 3956 - DNA, 20 bp, synthetic construct
  source 1..20: mol_type = other DNA
tacccaaaggatcacggctc

SEQ ID NO: 3957 - DNA, 20 bp, synthetic construct
  source 1..20: mol_type = other DNA
cgaggcttatgatcgagttg

SEQ ID NO: 3958 - DNA, 20 bp, synthetic construct
  source 1..20: mol_type = other DNA
agattcgagtacaaccggtc

SEQ ID NO: 3959 - DNA, 20 bp, synthetic construct
  source 1..20: mol_type = other DNA
attggagtaacctcaaggac

SEQ ID NO: 3960 - DNA, 20 bp, synthetic construct
  source 1..20: mol_type = other DNA
cgtaatcgttaggtgttcat

SEQ ID NO: 3961 - DNA, 20 bp, synthetic construct
  source 1..20: mol_type = other DNA
cctaacaggagtggacgaac

SEQ ID NO: 3962 - DNA, 20 bp, synthetic construct
  source 1..20: mol_type = other DNA
gcggtgttcgttggcttgtc

SEQ ID NO: 3963 - DNA, 20 bp, synthetic construct
  source 1..20: mol_type = other DNA
acaactgattgcttacacta

SEQ ID NO: 3964 - DNA, 20 bp, synthetic construct
  source 1..20: mol_type = other DNA
tgtagtagcattgatgactg

SEQ ID NO: 3965 - DNA, 20 bp, synthetic construct
  source 1..20: mol_type = other DNA
cccgccactgaagtgaatac

SEQ ID NO: 3966 - DNA, 20 bp, synthetic construct
  source 1..20: mol_type = other DNA
gacaatgattcctacgcgat

SEQ ID NO: 3967 - DNA, 20 bp, synthetic construct
  source 1..20: mol_type = other DNA
gagagtggcttgattagcaa

SEQ ID NO: 3968 - DNA, 20 bp, synthetic construct
  source 1..20: mol_type = other DNA
cgggtcgttctaaggttgtc

SEQ ID NO: 3969 - DNA, 20 bp, synthetic construct
  source 1..20: mol_type = other DNA
agcctataaagcatgtgcgg

SEQ ID NO: 3970 - DNA, 20 bp, synthetic construct
  source 1..20: mol_type = other DNA
gcttgtgtgcggaacagtga

SEQ ID NO: 3971 - DNA, 20 bp, synthetic construct
  source 1..20: mol_type = other DNA
acaggcgagctcgctgaacg

SEQ ID NO: 3972 - DNA, 20 bp, synthetic construct
  source 1..20: mol_type = other DNA
gcgggttacttgagagtcat

SEQ ID NO: 3973 - DNA, 20 bp, synthetic construct
  source 1..20: mol_type = other DNA
gagaaggtatcttgttccca

SEQ ID NO: 3974 - DNA, 20 bp, synthetic construct
  source 1..20: mol_type = other DNA
acttcgaggtcatatgcatc

SEQ ID NO: 3975 - DNA, 20 bp, synthetic construct
  source 1..20: mol_type = other DNA
atgcgatagtaatggcacag

SEQ ID NO: 3976 - DNA, 20 bp, synthetic construct
  source 1..20: mol_type = other DNA
tggacccggtctataacttg

SEQ ID NO: 3977 - DNA, 20 bp, synthetic construct
  source 1..20: mol_type = other DNA
accaggcctttaggtagcca

SEQ ID NO: 3978 - DNA, 20 bp, synthetic construct
  source 1..20: mol_type = other DNA
agggttatgcctcagactat

SEQ ID NO: 3979 - DNA, 20 bp, synthetic construct
  source 1..20: mol_type = other DNA
acgaccatgacctggatatg

SEQ ID NO: 3980 - DNA, 20 bp, synthetic construct
  source 1..20: mol_type = other DNA
tccctgtacaatgctccctt

SEQ ID NO: 3981 - DNA, 20 bp, synthetic construct
  source 1..20: mol_type = other DNA
ttgtggagggagtagcctcc

SEQ ID NO: 3982 - DNA, 20 bp, synthetic construct
  source 1..20: mol_type = other DNA
gaccaccgagtcaactaggc

SEQ ID NO: 3983 - DNA, 20 bp, synthetic construct
  source 1..20: mol_type = other DNA
tgcgataattactcgacgga

SEQ ID NO: 3984 - DNA, 20 bp, synthetic construct
  source 1..20: mol_type = other DNA
aacgacccgtaaggccgtct

SEQ ID NO: 3985 - DNA, 20 bp, synthetic construct
  source 1..20: mol_type = other DNA
gcgcgcaccgattcctgata

SEQ ID NO: 3986 - DNA, 20 bp, synthetic construct
  source 1..20: mol_type = other DNA
tcatcatatacggttgtgca

SEQ ID NO: 3987 - DNA, 20 bp, synthetic construct
  source 1..20: mol_type = other DNA
tgctctaaggcgacgtgtat

SEQ ID NO: 3988 - DNA, 20 bp, synthetic construct
  source 1..20: mol_type = other DNA
agccctatccgttgccgcgt

SEQ ID NO: 3989 - DNA, 20 bp, synthetic construct
  source 1..20: mol_type = other DNA
tagactcgtctccttcgctt

SEQ ID NO: 3990 - DNA, 20 bp, synthetic construct
  source 1..20: mol_type = other DNA
agtaccgtgtgccagaagaa

SEQ ID NO: 3991 - DNA, 20 bp, synthetic construct
  source 1..20: mol_type = other DNA
ttgtaatacgaacgtctctc

SEQ ID NO: 3992 - DNA, 20 bp, synthetic construct
  source 1..20: mol_type = other DNA
cctgaccatagcctaccaca

SEQ ID NO: 3993 - DNA, 20 bp, synthetic construct
  source 1..20: mol_type = other DNA
cgtctgtagaacactgtatc

SEQ ID NO: 3994 - DNA, 20 bp, synthetic construct
  source 1..20: mol_type = other DNA
ctagagagctacaaccactg

SEQ ID NO: 3995 - DNA, 20 bp, synthetic construct
  source 1..20: mol_type = other DNA
accactaccatgtctctccc

SEQ ID NO: 3996 - DNA, 20 bp, synthetic construct
  source 1..20: mol_type = other DNA
aggaaaggaatgtcgtgcca

SEQ ID NO: 3997 - DNA, 20 bp, synthetic construct
  source 1..20: mol_type = other DNA
atgcacagatcccgattcgt

SEQ ID NO: 3998 - DNA, 20 bp, synthetic construct
  source 1..20: mol_type = other DNA
gaccgacgcgagcgttcttt

SEQ ID NO: 3999 - DNA, 20 bp, synthetic construct
  source 1..20: mol_type = other DNA
aactagagggtcatgggcca

SEQ ID NO: 4000 - DNA, 20 bp, synthetic construct
  source 1..20: mol_type = other DNA
ctctcaaacgcggtttccgc

SEQ ID NO: 4001 - DNA, 20 bp, synthetic construct
  source 1..20: mol_type = other DNA
aggctgtccgaaactaccaa

SEQ ID NO: 4002 - DNA, 20 bp, synthetic construct
  source 1..20: mol_type = other DNA
ggctctgtcttcacatgaac

SEQ ID NO: 4003 - DNA, 20 bp, synthetic construct
  source 1..20: mol_type = other DNA
gctccaactgcaatagagtc

SEQ ID NO: 4004 - DNA, 20 bp, synthetic construct
  source 1..20: mol_type = other DNA
ctccgatcctgctcaatatg

SEQ ID NO: 4005 - DNA, 20 bp, synthetic construct
  source 1..20: mol_type = other DNA
agagcagcggatcccagttg

SEQ ID NO: 4006 - DNA, 20 bp, synthetic construct
  source 1..20: mol_type = other DNA
cgacagtaagcattaggtca

SEQ ID NO: 4007 - DNA, 20 bp, synthetic construct
  source 1..20: mol_type = other DNA
ttcaggtccgttaaccgtac

SEQ ID NO: 4008 - DNA, 20 bp, synthetic construct
  source 1..20: mol_type = other DNA
gaagattatatacacaggcc

SEQ ID NO: 4009 - DNA, 20 bp, synthetic construct
  source 1..20: mol_type = other DNA
ggcatgggattgccggtttg

SEQ ID NO: 4010 - DNA, 20 bp, synthetic construct
  source 1..20: mol_type = other DNA
cgcgtcgctgattagctatt

SEQ ID NO: 4011 - DNA, 20 bp, synthetic construct
  source 1..20: mol_type = other DNA
tttcatttgcattactggct

SEQ ID NO: 4012 - DNA, 20 bp, synthetic construct
  source 1..20: mol_type = other DNA
ccgttcagggtgccgtcagt

SEQ ID NO: 4013 - DNA, 20 bp, synthetic construct
  source 1..20: mol_type = other DNA
tactttggcgcttacaatca

SEQ ID NO: 4014 - DNA, 20 bp, synthetic construct
  source 1..20: mol_type = other DNA
tcaagtaacactcctggccc

SEQ ID NO: 4015 - DNA, 20 bp, synthetic construct
  source 1..20: mol_type = other DNA
agagattccgcgagcgtgct

SEQ ID NO: 4016 - DNA, 20 bp, synthetic construct
  source 1..20: mol_type = other DNA
gccaacttacctgtatctgc

SEQ ID NO: 4017 - DNA, 20 bp, synthetic construct
  source 1..20: mol_type = other DNA
tgggtgttctagtacgctga

SEQ ID NO: 4018 - DNA, 20 bp, synthetic construct
  source 1..20: mol_type = other DNA
gtcgggccatctctttacac

SEQ ID NO: 4019 - DNA, 20 bp, synthetic construct
  source 1..20: mol_type = other DNA
ctcagccaattgagtagaaa

SEQ ID NO: 4020 - DNA, 20 bp, synthetic construct
  source 1..20: mol_type = other DNA
gtccggttctcaagccgata

SEQ ID NO: 4021 - DNA, 20 bp, synthetic construct
  source 1..20: mol_type = other DNA
gagagattgtgaaacatcga

SEQ ID NO: 4022 - DNA, 20 bp, synthetic construct
  source 1..20: mol_type = other DNA
agcctaacattcagcgagcg

SEQ ID NO: 4023 - DNA, 20 bp, synthetic construct
  source 1..20: mol_type = other DNA
ctatctgggacattgatttc

SEQ ID NO: 4024 - DNA, 20 bp, synthetic construct
  source 1..20: mol_type = other DNA
cacaatttcggcattgccga

SEQ ID NO: 4025 - DNA, 20 bp, synthetic construct
  source 1..20: mol_type = other DNA
gttcgaactactggttattc

SEQ ID NO: 4026 - DNA, 20 bp, synthetic construct
  source 1..20: mol_type = other DNA
tgtagcagcgcggcttcagt

SEQ ID NO: 4027 - DNA, 20 bp, synthetic construct
  source 1..20: mol_type = other DNA
ggcagtacctagacgcacag

SEQ ID NO: 4028 - DNA, 20 bp, synthetic construct
  source 1..20: mol_type = other DNA
ggatctggctctaagtgttc

SEQ ID NO: 4029 - DNA, 20 bp, synthetic construct
  source 1..20: mol_type = other DNA
ctttatggagtaggtcgtcc

SEQ ID NO: 4030 - DNA, 20 bp, synthetic construct
  source 1..20: mol_type = other DNA
gcagtaaactccatgtgcga

SEQ ID NO: 4031 - DNA, 20 bp, synthetic construct
  source 1..20: mol_type = other DNA
ctgctgacaatcaataccga

SEQ ID NO: 4032 - DNA, 20 bp, synthetic construct
  source 1..20: mol_type = other DNA
acctagcccattacgcatta

SEQ ID NO: 4033 - DNA, 20 bp, synthetic construct
  source 1..20: mol_type = other DNA
ccaatctcggtacattacat

SEQ ID NO: 4034 - DNA, 20 bp, synthetic construct
  source 1..20: mol_type = other DNA
ggagcctacgaaccttcgct

SEQ ID NO: 4035 - DNA, 20 bp, synthetic construct
  source 1..20: mol_type = other DNA
cgtacttgggtgcgactgtt

SEQ ID NO: 4036 - DNA, 20 bp, synthetic construct
  source 1..20: mol_type = other DNA
caatgcatatcgttatgtca

SEQ ID NO: 4037 - DNA, 20 bp, synthetic construct
  source 1..20: mol_type = other DNA
ggatcgagccactctatgtt

SEQ ID NO: 4038 - DNA, 20 bp, synthetic construct
  source 1..20: mol_type = other DNA
cttgggttctcgaagcagaa

SEQ ID NO: 4039 - DNA, 20 bp, synthetic construct
  source 1..20: mol_type = other DNA
caaattagtgacgccattgc

SEQ ID NO: 4040 - DNA, 20 bp, synthetic construct
  source 1..20: mol_type = other DNA
gacgattggtctcgaatcgt

SEQ ID NO: 4041 - DNA, 20 bp, synthetic construct
  source 1..20: mol_type = other DNA
gcatgctgaaggctcgacct

SEQ ID NO: 4042 - DNA, 20 bp, synthetic construct
  source 1..20: mol_type = other DNA
tcatgtgatcgtacgagaag

SEQ ID NO: 4043 - DNA, 20 bp, synthetic construct
  source 1..20: mol_type = other DNA
ctgtaacgctgtaggaagct

SEQ ID NO: 4044 - DNA, 20 bp, synthetic construct
  source 1..20: mol_type = other DNA
tgcactgcggactagtttgt

SEQ ID NO: 4045 - DNA, 20 bp, synthetic construct
  source 1..20: mol_type = other DNA
gcagcagacgctgacattca

SEQ ID NO: 4046 - DNA, 20 bp, synthetic construct
  source 1..20: mol_type = other DNA
taaagggaggacttacttat

SEQ ID NO: 4047 - DNA, 20 bp, synthetic construct
  source 1..20: mol_type = other DNA
tacacgggtgtttaagaggg

SEQ ID NO: 4048 - DNA, 20 bp, synthetic construct
  source 1..20: mol_type = other DNA
ttacaagacctcatggtgat

SEQ ID NO: 4049 - DNA, 20 bp, synthetic construct
  source 1..20: mol_type = other DNA
ctgtgcgtgactcgtctatt

SEQ ID NO: 4050 - DNA, 20 bp, synthetic construct
  source 1..20: mol_type = other DNA
ctgttggaacacatgctatc

SEQ ID NO: 4051 - DNA, 20 bp, synthetic construct
  source 1..20: mol_type = other DNA
acgtgatgctgactggccag

SEQ ID NO: 4052 - DNA, 20 bp, synthetic construct
  source 1..20: mol_type = other DNA
gtgcaagaagcaacgagttc

SEQ ID NO: 4053 - DNA, 20 bp, synthetic construct
  source 1..20: mol_type = other DNA
gattaggtgagacattctag

SEQ ID NO: 4054 - DNA, 20 bp, synthetic construct
  source 1..20: mol_type = other DNA
tagaacgatggtcaccagtc

SEQ ID NO: 4055 - DNA, 20 bp, synthetic construct
  source 1..20: mol_type = other DNA
ggtgttatctccatcacttc

SEQ ID NO: 4056 - DNA, 20 bp, synthetic construct
  source 1..20: mol_type = other DNA
gccggctcaggcctcttata

SEQ ID NO: 4057 - DNA, 20 bp, synthetic construct
  source 1..20: mol_type = other DNA
cgacggtgattgatagtcct

SEQ ID NO: 4058 - DNA, 20 bp, synthetic construct
  source 1..20: mol_type = other DNA
atacatctgactctgagtct

SEQ ID NO: 4059 - DNA, 20 bp, synthetic construct
  source 1..20: mol_type = other DNA
tatctatcttgcttcgtacc

SEQ ID NO: 4060 - DNA, 20 bp, synthetic construct
  source 1..20: mol_type = other DNA
tctctcctctcacgcgagta

SEQ ID NO: 4061 - DNA, 20 bp, synthetic construct
  source 1..20: mol_type = other DNA
gccgaatagaattaactcgg

SEQ ID NO: 4062 - DNA, 20 bp, synthetic construct
  source 1..20: mol_type = other DNA
gcaagcacacacacttctaa

SEQ ID NO: 4063 - DNA, 20 bp, synthetic construct
  source 1..20: mol_type = other DNA
aggctctattagagagtttc

SEQ ID NO: 4064 - DNA, 20 bp, synthetic construct
  source 1..20: mol_type = other DNA
gtgtattgtatatgcagtcg

SEQ ID NO: 4065 - DNA, 20 bp, synthetic construct
  source 1..20: mol_type = other DNA
aggtcgcgttaccaacccga

SEQ ID NO: 4066 - DNA, 20 bp, synthetic construct
  source 1..20: mol_type = other DNA
gagaatactggtcgtctggg

SEQ ID NO: 4067 - DNA, 20 bp, synthetic construct
  source 1..20: mol_type = other DNA
gggcacccatacctactcgt

SEQ ID NO: 4068 - DNA, 20 bp, synthetic construct
  source 1..20: mol_type = other DNA
gggtatagatactcaaacga

SEQ ID NO: 4069 - DNA, 20 bp, synthetic construct
  source 1..20: mol_type = other DNA
taaagtagcggccaggttta

SEQ ID NO: 4070 - DNA, 20 bp, synthetic construct
  source 1..20: mol_type = other DNA
agcaaccacaccgtgacgga

SEQ ID NO: 4071 - DNA, 20 bp, synthetic construct
  source 1..20: mol_type = other DNA
gtccggaacgcgatttgctg

SEQ ID NO: 4072 - DNA, 20 bp, synthetic construct
  source 1..20: mol_type = other DNA
gtatctctcccgtcggcagt

SEQ ID NO: 4073 - DNA, 20 bp, synthetic construct
  source 1..20: mol_type = other DNA
agcaccttggcatgcgtcaa

SEQ ID NO: 4074 - DNA, 20 bp, synthetic construct
  source 1..20: mol_type = other DNA
ggctggcgcatttgaacttt

SEQ ID NO: 4075 - DNA, 20 bp, synthetic construct
  source 1..20: mol_type = other DNA
attgctcactacagatcacc

SEQ ID NO: 4076 - DNA, 20 bp, synthetic construct
  source 1..20: mol_type = other DNA
cgcacggtggataattcgca

SEQ ID NO: 4077 - DNA, 20 bp, synthetic construct
  source 1..20: mol_type = other DNA
gccgcagtgaaccttaccgt

SEQ ID NO: 4078 - DNA, 20 bp, synthetic construct
  source 1..20: mol_type = other DNA
tcatctgcgcctatctttag

SEQ ID NO: 4079 - DNA, 20 bp, synthetic construct
  source 1..20: mol_type = other DNA
aagcagtgccgtagggcctc

SEQ ID NO: 4080 - DNA, 20 bp, synthetic construct
  source 1..20: mol_type = other DNA
agatgacgcgtaggataagc

SEQ ID NO: 4081 - DNA, 20 bp, synthetic construct
  source 1..20: mol_type = other DNA
tagagaagccggaagcgtgt

SEQ ID NO: 4082 - DNA, 20 bp, synthetic construct
  source 1..20: mol_type = other DNA
aatttgactgcaggttagag

SEQ ID NO: 4083 - DNA, 20 bp, synthetic construct
  source 1..20: mol_type = other DNA
cgatgccgcctatcataacc

SEQ ID NO: 4084 - DNA, 20 bp, synthetic construct
  source 1..20: mol_type = other DNA
gcggtgtctcctctcgtacc

SEQ ID NO: 4085 - DNA, 20 bp, synthetic construct
  source 1..20: mol_type = other DNA
tgggactcagaacgaagggc

SEQ ID NO: 4086 - DNA, 20 bp, synthetic construct
  source 1..20: mol_type = other DNA
tcgatggagcaacttcagaa

SEQ ID NO: 4087 - DNA, 20 bp, synthetic construct
  source 1..20: mol_type = other DNA
gcgtctccttcattccttac

SEQ ID NO: 4088 - DNA, 20 bp, synthetic construct
  source 1..20: mol_type = other DNA
aggaaagcacaagatccatt

SEQ ID NO: 4089 - DNA, 20 bp, synthetic construct
  source 1..20: mol_type = other DNA
tcccgttaagtatatatcga

SEQ ID NO: 4090 - DNA, 20 bp, synthetic construct
  source 1..20: mol_type = other DNA
agaacacagtatcctgcttc

SEQ ID NO: 4091 - DNA, 20 bp, synthetic construct
  source 1..20: mol_type = other DNA
cgctggttaagcacccataa

SEQ ID NO: 4092 - DNA, 20 bp, synthetic construct
  source 1..20: mol_type = other DNA
acttatcgtcctgcaacgag

SEQ ID NO: 4093 - DNA, 20 bp, synthetic construct
  source 1..20: mol_type = other DNA
ccgttgtgcatgctacgtcg

SEQ ID NO: 4094 - DNA, 20 bp, synthetic construct
  source 1..20: mol_type = other DNA
agctgttgcagatctacagt

SEQ ID NO: 4095 - DNA, 20 bp, synthetic construct
  source 1..20: mol_type = other DNA
ctcctcagtataagtcgtat

SEQ ID NO: 4096 - DNA, 20 bp, synthetic construct
  source 1..20: mol_type = other DNA
agcgtcctcgttagttgggt

SEQ ID NO: 4097 - DNA, 20 bp, synthetic construct
  source 1..20: mol_type = other DNA
gtgcagaatgtaagtattac

SEQ ID NO: 4098 - DNA, 20 bp, synthetic construct
  source 1..20: mol_type = other DNA
gcatcagcaacaaggtatct

SEQ ID NO: 4099 - DNA, 20 bp, synthetic construct
  source 1..20: mol_type = other DNA
ataaccctaatttacacctg

SEQ ID NO: 4100 - DNA, 20 bp, synthetic construct
  source 1..20: mol_type = other DNA
cagcttccagccgtcttgtg

SEQ ID NO: 4101 - DNA, 20 bp, synthetic construct
  source 1..20: mol_type = other DNA
tccggtaacttccagataac

SEQ ID NO: 4102 - DNA, 20 bp, synthetic construct
  source 1..20: mol_type = other DNA
ccgaactgctattccgccga

SEQ ID NO: 4103 - DNA, 20 bp, synthetic construct
  source 1..20: mol_type = other DNA
gcgcagatcaatgaccaagc

SEQ ID NO: 4104 - DNA, 20 bp, synthetic construct
  source 1..20: mol_type = other DNA
tatatatgtgtgcccttcag

SEQ ID NO: 4105 - DNA, 20 bp, synthetic construct
  source 1..20: mol_type = other DNA
agacgaatgaacggctgtgc

SEQ ID NO: 4106 - DNA, 20 bp, synthetic construct
  source 1..20: mol_type = other DNA
tatcaccgtgttcccaaagt

SEQ ID NO: 4107 - DNA, 20 bp, synthetic construct
  source 1..20: mol_type = other DNA
ccgtagggactccattaacc

SEQ ID NO: 4108 - DNA, 20 bp, synthetic construct
  source 1..20: mol_type = other DNA
gcgcggtggtgtggtatggt

SEQ ID NO: 4109 - DNA, 20 bp, synthetic construct
  source 1..20: mol_type = other DNA
ccaattctctatttccgagg

SEQ ID NO: 4110 - DNA, 20 bp, synthetic construct
  source 1..20: mol_type = other DNA
tatcttacagtgatgttgcc

SEQ ID NO: 4111 - DNA, 20 bp, synthetic construct
  source 1..20: mol_type = other DNA
gtgactcaggactttcaacc

SEQ ID NO: 4112 - DNA, 20 bp, synthetic construct
  source 1..20: mol_type = other DNA
cctgcggtagaatttatgtg

SEQ ID NO: 4113 - DNA, 20 bp, synthetic construct
  source 1..20: mol_type = other DNA
atcagaaacaggttcgtaga

SEQ ID NO: 4114 - DNA, 20 bp, synthetic construct
  source 1..20: mol_type = other DNA
aaagacatccctcgataact

SEQ ID NO: 4115 - DNA, 20 bp, synthetic construct
  source 1..20: mol_type = other DNA
cgccgccgcagctaacaact

SEQ ID NO: 4116 - DNA, 20 bp, synthetic construct
  source 1..20: mol_type = other DNA
gttgagttgaaccctaaaca

SEQ ID NO: 4117 - DNA, 20 bp, synthetic construct
  source 1..20: mol_type = other DNA
tacgacctagagattcgatc

SEQ ID NO: 4118 - DNA, 20 bp, synthetic construct
  source 1..20: mol_type = other DNA
ccacccatctactagctgat

SEQ ID NO: 4119 - DNA, 20 bp, synthetic construct
  source 1..20: mol_type = other DNA
gccatctactggatcatttg

SEQ ID NO: 4120 - DNA, 20 bp, synthetic construct
  source 1..20: mol_type = other DNA
gcaggtggcgagaggaactg

SEQ ID NO: 4121 - DNA, 20 bp, synthetic construct
  source 1..20: mol_type = other DNA
ggacgtttaagcaagggccc

SEQ ID NO: 4122 - DNA, 20 bp, synthetic construct
  source 1..20: mol_type = other DNA
gtaccaaattaactcgggag

SEQ ID NO: 4123 - DNA, 20 bp, synthetic construct
  source 1..20: mol_type = other DNA
tctagttgttaagcggatgc

SEQ ID NO: 4124 - DNA, 20 bp, synthetic construct
  source 1..20: mol_type = other DNA
cctttctaaccctgcggtct

SEQ ID NO: 4125 - DNA, 20 bp, synthetic construct
  source 1..20: mol_type = other DNA
gagcgttcattctcatgatg

SEQ ID NO: 4126 - DNA, 20 bp, synthetic construct
  source 1..20: mol_type = other DNA
gtaacctttatggctttgga

SEQ ID NO: 4127 - DNA, 20 bp, synthetic construct
  source 1..20: mol_type = other DNA
ccatctctttcaggccatca

SEQ ID NO: 4128 - DNA, 20 bp, synthetic construct
  source 1..20: mol_type = other DNA
ggagatctactttgggagcg

SEQ ID NO: 4129 - DNA, 20 bp, synthetic construct
  source 1..20: mol_type = other DNA
tgtaatgtcaagttggtggg

SEQ ID NO: 4130 - DNA, 20 bp, synthetic construct
  source 1..20: mol_type = other DNA
gataggcgatagggaggtta

SEQ ID NO: 4131 - DNA, 20 bp, synthetic construct
  source 1..20: mol_type = other DNA
ctacccggaactgactacgc

SEQ ID NO: 4132 - DNA, 20 bp, synthetic construct
  source 1..20: mol_type = other DNA
acctaagccgtcccgctgct

SEQ ID NO: 4133 - DNA, 20 bp, synthetic construct
  source 1..20: mol_type = other DNA
ccgatgctcaggtcctgctt

SEQ ID NO: 4134 - DNA, 20 bp, synthetic construct
  source 1..20: mol_type = other DNA
ccaagtgaaccgactacacg

SEQ ID NO: 4135 - DNA, 20 bp, synthetic construct
  source 1..20: mol_type = other DNA
ctagactgcagttctcacca

SEQ ID NO: 4136 - DNA, 20 bp, synthetic construct
  source 1..20: mol_type = other DNA
aagtaccgataatggacatg

SEQ ID NO: 4137 - DNA, 20 bp, synthetic construct
  source 1..20: mol_type = other DNA
aagtagggtgatgagcggcg

SEQ ID NO: 4138 - DNA, 20 bp, synthetic construct
  source 1..20: mol_type = other DNA
agcctctgtcattccttctt

SEQ ID NO: 4139 - DNA, 20 bp, synthetic construct
  source 1..20: mol_type = other DNA
acaccagggacgcgtcctct

SEQ ID NO: 4140 - DNA, 20 bp, synthetic construct
  source 1..20: mol_type = other DNA
tgactgttgcttgggtgctt

SEQ ID NO: 4141 - DNA, 20 bp, synthetic construct
  source 1..20: mol_type = other DNA
agatcccaagcctatgcgaa

SEQ ID NO: 4142 - DNA, 20 bp, synthetic construct
  source 1..20: mol_type = other DNA
ggctctcacctccggttgtc

SEQ ID NO: 4143 - DNA, 20 bp, synthetic construct
  source 1..20: mol_type = other DNA
tatcaggcatagctcaatgc

SEQ ID NO: 4144 - DNA, 20 bp, synthetic construct
  source 1..20: mol_type = other DNA
gaggaatagggaaatagagc

SEQ ID NO: 4145 - DNA, 20 bp, synthetic construct
  source 1..20: mol_type = other DNA
aattgataccaatttgcgcc

SEQ ID NO: 4146 - DNA, 20 bp, synthetic construct
  source 1..20: mol_type = other DNA
cccgccatgcggcattatca

SEQ ID NO: 4147 - DNA, 20 bp, synthetic construct
  source 1..20: mol_type = other DNA
ccgcgacgttcgtatttgtt

SEQ ID NO: 4148 - DNA, 20 bp, synthetic construct
  source 1..20: mol_type = other DNA
gagggcctgtcgataagtga

SEQ ID NO: 4149 - DNA, 20 bp, synthetic construct
  source 1..20: mol_type = other DNA
tttggagttatcagttcgca

SEQ ID NO: 4150 - DNA, 20 bp, synthetic construct
  source 1..20: mol_type = other DNA
ttcccgtcgcgaatcgtaca

SEQ ID NO: 4151 - DNA, 20 bp, synthetic construct
  source 1..20: mol_type = other DNA
acgtttcacttaacactacg

SEQ ID NO: 4152 - DNA, 20 bp, synthetic construct
  source 1..20: mol_type = other DNA
ggatcgccagtctctggtat

SEQ ID NO: 4153 - DNA, 20 bp, synthetic construct
  source 1..20: mol_type = other DNA
tactctaatggagcgccgga

SEQ ID NO: 4154 - DNA, 20 bp, synthetic construct
  source 1..20: mol_type = other DNA
tccaactcctgaagtacttg

SEQ ID NO: 4155 - DNA, 20 bp, synthetic construct
  source 1..20: mol_type = other DNA
gtggacagtaatgcagttgg

SEQ ID NO: 4156 - DNA, 20 bp, synthetic construct
  source 1..20: mol_type = other DNA
gacataataatgaacccacc

SEQ ID NO: 4157 - DNA, 20 bp, synthetic construct
  source 1..20: mol_type = other DNA
gcctacataggtgtgttatg

SEQ ID NO: 4158 - DNA, 20 bp, synthetic construct
  source 1..20: mol_type = other DNA
cgctaagccacgagactacg

SEQ ID NO: 4159 - DNA, 20 bp, synthetic construct
  source 1..20: mol_type = other DNA
tggagtgaacagtcccaggc

SEQ ID NO: 4160 - DNA, 20 bp, synthetic construct
  source 1..20: mol_type = other DNA
ttggttagcaacggtgcttg

SEQ ID NO: 4161 - DNA, 20 bp, synthetic construct
  source 1..20: mol_type = other DNA
gtgaacgtcagctttaaact

SEQ ID NO: 4162 - DNA, 20 bp, synthetic construct
  source 1..20: mol_type = other DNA
aggcagccgcccttaccaca

SEQ ID NO: 4163 - DNA, 20 bp, synthetic construct
  source 1..20: mol_type = other DNA
acttcccgatcgtttgattc

SEQ ID NO: 4164 - DNA, 20 bp, synthetic construct
  source 1..20: mol_type = other DNA
atccagagtaattgccctta

SEQ ID NO: 4165 - DNA, 20 bp, synthetic construct
  source 1..20: mol_type = other DNA
ctggaagggattacacctga

SEQ ID NO: 4166 - DNA, 20 bp, synthetic construct
  source 1..20: mol_type = other DNA
agttgccaattggtacagcg

SEQ ID NO: 4167 - DNA, 20 bp, synthetic construct
  source 1..20: mol_type = other DNA
gctatttcgtcgcatttaca

SEQ ID NO: 4168 - DNA, 20 bp, synthetic construct
  source 1..20: mol_type = other DNA
cgagttcccgtgacgtagat

SEQ ID NO: 4169 - DNA, 20 bp, synthetic construct
  source 1..20: mol_type = other DNA
gacaacacattcaaccagaa

SEQ ID NO: 4170 - DNA, 20 bp, synthetic construct
  source 1..20: mol_type = other DNA
aaatgtacgcgttatgcgaa

SEQ ID NO: 4171 - DNA, 20 bp, synthetic construct
  source 1..20: mol_type = other DNA
atgctttgtgactcctgctg

SEQ ID NO: 4172 - DNA, 20 bp, synthetic construct
  source 1..20: mol_type = other DNA
ggaatccatcctgtgtgact

SEQ ID NO: 4173 - DNA, 20 bp, synthetic construct
  source 1..20: mol_type = other DNA
tcacttacaccgataagggc

SEQ ID NO: 4174 - DNA, 20 bp, synthetic construct
  source 1..20: mol_type = other DNA
ctctgagaacgggcatacag

SEQ ID NO: 4175 - DNA, 20 bp, synthetic construct
  source 1..20: mol_type = other DNA
ctgctcagtgcatgactgcg

SEQ ID NO: 4176 - DNA, 20 bp, synthetic construct
  source 1..20: mol_type = other DNA
ttggtcgtgaatggtaggta

SEQ ID NO: 4177 - DNA, 20 bp, synthetic construct
  source 1..20: mol_type = other DNA
tcgaaggcgaacggcagaat

SEQ ID NO: 4178 - DNA, 20 bp, synthetic construct
  source 1..20: mol_type = other DNA
atccaaactctcatcacagg

SEQ ID NO: 4179 - DNA, 20 bp, synthetic construct
  source 1..20: mol_type = other DNA
gcaactgccaccgacacatc

SEQ ID NO: 4180 - DNA, 20 bp, synthetic construct
  source 1..20: mol_type = other DNA
gatggccgaaacaacaatcc

SEQ ID NO: 4181 - DNA, 20 bp, synthetic construct
  source 1..20: mol_type = other DNA
ccaggatttgagagcgatca

SEQ ID NO: 4182 - DNA, 20 bp, synthetic construct
  source 1..20: mol_type = other DNA
cgacgtccgtatgagggtcc

SEQ ID NO: 4183 - DNA, 20 bp, synthetic construct
  source 1..20: mol_type = other DNA
agtccgatctccatgcacat

SEQ ID NO: 4184 - DNA, 20 bp, synthetic construct
  source 1..20: mol_type = other DNA
ggtgggtacatcgtcttggg

SEQ ID NO: 4185 - DNA, 20 bp, synthetic construct
  source 1..20: mol_type = other DNA
atatggcgcatccatttata

SEQ ID NO: 4186 - DNA, 20 bp, synthetic construct
  source 1..20: mol_type = other DNA
gattgaacttacccaggcga

SEQ ID NO: 4187 - DNA, 20 bp, synthetic construct
  source 1..20: mol_type = other DNA
tcgcttgtggaacgttgatc

SEQ ID NO: 4188 - DNA, 20 bp, synthetic construct
  source 1..20: mol_type = other DNA
cgaattgctgtacgtagttg

SEQ ID NO: 4189 - DNA, 20 bp, synthetic construct
  source 1..20: mol_type = other DNA
ccagtagccatctgcttctg

SEQ ID NO: 4190 - DNA, 20 bp, synthetic construct
  source 1..20: mol_type = other DNA
ttaggtggatgtaggtcgtc

SEQ ID NO: 4191 - DNA, 20 bp, synthetic construct
  source 1..20: mol_type = other DNA
actaccatctgccgaaagtg

SEQ ID NO: 4192 - DNA, 20 bp, synthetic construct
  source 1..20: mol_type = other DNA
agcttaccaagtgaagatcc

SEQ ID NO: 4193 - DNA, 20 bp, synthetic construct
  source 1..20: mol_type = other DNA
tgtcgtagccggcgtaggaa

SEQ ID NO: 4194 - DNA, 20 bp, synthetic construct
  source 1..20: mol_type = other DNA
agttcgggcagcttcgagac

SEQ ID NO: 4195 - DNA, 20 bp, synthetic construct
  source 1..20: mol_type = other DNA
cgccgccttaagtaagtgct

SEQ ID NO: 4196 - DNA, 20 bp, synthetic construct
  source 1..20: mol_type = other DNA
ctccatgaagtgtggagtta

SEQ ID NO: 4197 - DNA, 20 bp, synthetic construct
  source 1..20: mol_type = other DNA
agtctcatacaagtatcgag

SEQ ID NO: 4198 - DNA, 20 bp, synthetic construct
  source 1..20: mol_type = other DNA
ggtcacaattgtgggttact

SEQ ID NO: 4199 - DNA, 20 bp, synthetic construct
  source 1..20: mol_type = other DNA
aatctccatgtcggacatgc

SEQ ID NO: 4200 - DNA, 20 bp, synthetic construct
  source 1..20: mol_type = other DNA
tctcttagacgtgtgtgcaa

SEQ ID NO: 4201 - DNA, 20 bp, synthetic construct
  source 1..20: mol_type = other DNA
cttgattagtacggtgcgct

SEQ ID NO: 4202 - DNA, 20 bp, synthetic construct
  source 1..20: mol_type = other DNA
acgggtgactgtacggtgca

SEQ ID NO: 4203 - DNA, 20 bp, synthetic construct
  source 1..20: mol_type = other DNA
agccggcctactttattcag

SEQ ID NO: 4204 - DNA, 20 bp, synthetic construct
  source 1..20: mol_type = other DNA
tagtaaagagcgagtggcgc

SEQ ID NO: 4205 - DNA, 20 bp, synthetic construct
  source 1..20: mol_type = other DNA
gccgattggacttacttaaa

SEQ ID NO: 4206 - DNA, 20 bp, synthetic construct
  source 1..20: mol_type = other DNA
ggactctgaccgtctatagc

SEQ ID NO: 4207 - DNA, 20 bp, synthetic construct
  source 1..20: mol_type = other DNA
agtacgcctgggtagggcag

SEQ ID NO: 4208 - DNA, 20 bp, synthetic construct
  source 1..20: mol_type = other DNA
agccttaggtatcggtttga

SEQ ID NO: 4209 - DNA, 20 bp, synthetic construct
  source 1..20: mol_type = other DNA
gtggagtcttgtctgagaag

SEQ ID NO: 4210 - DNA, 20 bp, synthetic construct
  source 1..20: mol_type = other DNA
ataaccttgcttatttcgca

SEQ ID NO: 4211 - DNA, 20 bp, synthetic construct
  source 1..20: mol_type = other DNA
gttactcgaatcttccatga

SEQ ID NO: 4212 - DNA, 20 bp, synthetic construct
  source 1..20: mol_type = other DNA
gtgttggcgaatcacaagtg

SEQ ID NO: 4213 - DNA, 20 bp, synthetic construct
  source 1..20: mol_type = other DNA
caacataggctgggctttga

SEQ ID NO: 4214 - DNA, 20 bp, synthetic construct
  source 1..20: mol_type = other DNA
tgtaagcggcacgtgggacg

SEQ ID NO: 4215 - DNA, 20 bp, synthetic construct
  source 1..20: mol_type = other DNA
ctattgcacacggtacgtct

SEQ ID NO: 4216 - DNA, 20 bp, synthetic construct
  source 1..20: mol_type = other DNA
gctacttgatagtatcgtgg

SEQ ID NO: 4217 - DNA, 20 bp, synthetic construct
  source 1..20: mol_type = other DNA
cgacaccatggcagcctgca

SEQ ID NO: 4218 - DNA, 20 bp, synthetic construct
  source 1..20: mol_type = other DNA
atacacgtcgcgggcaataa

SEQ ID NO: 4219 - DNA, 20 bp, synthetic construct
  source 1..20: mol_type = other DNA
tcttccgttagtcctgatcc

SEQ ID NO: 4220 - DNA, 20 bp, synthetic construct
  source 1..20: mol_type = other DNA
agcggaaggtagtgaggccc

SEQ ID NO: 4221 - DNA, 20 bp, synthetic construct
  source 1..20: mol_type = other DNA
tattagtagaaacgcaggat

SEQ ID NO: 4222 - DNA, 20 bp, synthetic construct
  source 1..20: mol_type = other DNA
gttcattacaatctcgcttc

SEQ ID NO: 4223 - DNA, 20 bp, synthetic construct
  source 1..20: mol_type = other DNA
aataaataccctgccgaacg

SEQ ID NO: 4224 - DNA, 20 bp, synthetic construct
  source 1..20: mol_type = other DNA
ttacacttcttaaagcactg

SEQ ID NO: 4225 - DNA, 20 bp, synthetic construct
  source 1..20: mol_type = other DNA
atgaaattaaagcgctcgaa

SEQ ID NO: 4226 - DNA, 20 bp, synthetic construct
  source 1..20: mol_type = other DNA
gggccattgtcagccttggt

SEQ ID NO: 4227 - DNA, 20 bp, synthetic construct
  source 1..20: mol_type = other DNA
ccactatagtatggccagtt

SEQ ID NO: 4228 - DNA, 20 bp, synthetic construct
  source 1..20: mol_type = other DNA
taacgtgcgtgtaagctcgg

SEQ ID NO: 4229 - DNA, 20 bp, synthetic construct
  source 1..20: mol_type = other DNA
gactattgacccacgtatta

SEQ ID NO: 4230 - DNA, 20 bp, synthetic construct
  source 1..20: mol_type = other DNA
tgtcccgtcagtgtggatgc

SEQ ID NO: 4231 - DNA, 20 bp, synthetic construct
  source 1..20: mol_type = other DNA
aaagacgaatacgaatctgg

SEQ ID NO: 4232 - DNA, 20 bp, synthetic construct
  source 1..20: mol_type = other DNA
agaagcactaaggtaagtga

SEQ ID NO: 4233 - DNA, 20 bp, synthetic construct
  source 1..20: mol_type = other DNA
cggtcattgtcctttggcag

SEQ ID NO: 4234 - DNA, 20 bp, synthetic construct
  source 1..20: mol_type = other DNA
ttgggatttatcctgtactt

SEQ ID NO: 4235 - DNA, 20 bp, synthetic construct
  source 1..20: mol_type = other DNA
atatcgaatctagggcattc

SEQ ID NO: 4236 - DNA, 20 bp, synthetic construct
  source 1..20: mol_type = other DNA
aagactgatcattgggctga

SEQ ID NO: 4237 - DNA, 20 bp, synthetic construct
  source 1..20: mol_type = other DNA
ggtatttgaggacctcgttg

SEQ ID NO: 4238 - DNA, 20 bp, synthetic construct
  source 1..20: mol_type = other DNA
cctgatggactataacgtac

SEQ ID NO: 4239 - DNA, 20 bp, synthetic construct
  source 1..20: mol_type = other DNA
ggagtatgagtttatgatcc

SEQ ID NO: 4240 - DNA, 20 bp, synthetic construct
  source 1..20: mol_type = other DNA
agtagaggccctaaccttcg

SEQ ID NO: 4241 - DNA, 20 bp, synthetic construct
  source 1..20: mol_type = other DNA
atccatggcctccaagttct

SEQ ID NO: 4242 - DNA, 20 bp, synthetic construct
  source 1..20: mol_type = other DNA
taacttccgaccataacata

SEQ ID NO: 4243 - DNA, 20 bp, synthetic construct
  source 1..20: mol_type = other DNA
gtgactgcgagaggacctgc

SEQ ID NO: 4244 - DNA, 20 bp, synthetic construct
  source 1..20: mol_type = other DNA
acgactctccagacaacacg

SEQ ID NO: 4245 - DNA, 20 bp, synthetic construct
  source 1..20: mol_type = other DNA
accacctccagcgccaactc

SEQ ID NO: 4246 - DNA, 20 bp, synthetic construct
  source 1..20: mol_type = other DNA
aacggtgtaactatgggtca

SEQ ID NO: 4247 - DNA, 20 bp, synthetic construct
  source 1..20: mol_type = other DNA
tcgtcggttgacgcgcaggt

SEQ ID NO: 4248 - DNA, 20 bp, synthetic construct
  source 1..20: mol_type = other DNA
acaaagaagggcagagaccg

SEQ ID NO: 4249 - DNA, 20 bp, synthetic construct
  source 1..20: mol_type = other DNA
agggacagttaacacataac

SEQ ID NO: 4250 - DNA, 20 bp, synthetic construct
  source 1..20: mol_type = other DNA
tgagtggatcacgtagttta

SEQ ID NO: 4251 - DNA, 20 bp, synthetic construct
  source 1..20: mol_type = other DNA
tctcgcaatttcgggcctcc

SEQ ID NO: 4252 - DNA, 20 bp, synthetic construct
  source 1..20: mol_type = other DNA
aggataaatggttgttaccc

SEQ ID NO: 4253 - DNA, 20 bp, synthetic construct
  source 1..20: mol_type = other DNA
ccgggattcgttacacggcc

SEQ ID NO: 4254 - DNA, 20 bp, synthetic construct
  source 1..20: mol_type = other DNA
tgcttgctgggaatgtgggt

SEQ ID NO: 4255 - DNA, 20 bp, synthetic construct
  source 1..20: mol_type = other DNA
acgaggacctcttaatagtc

SEQ ID NO: 4256 - DNA, 20 bp, synthetic construct
  source 1..20: mol_type = other DNA
gaaccaagaggattgaccac

SEQ ID NO: 4257 - DNA, 20 bp, synthetic construct
  source 1..20: mol_type = other DNA
tgttggatcgatataatggt

SEQ ID NO: 4258 - DNA, 20 bp, synthetic construct
  source 1..20: mol_type = other DNA
ccactgatatagtcatcgac

SEQ ID NO: 4259 - DNA, 20 bp, synthetic construct
  source 1..20: mol_type = other DNA
cgttacatgggtatgatgta

SEQ ID NO: 4260 - DNA, 20 bp, synthetic construct
  source 1..20: mol_type = other DNA
tgttgctggactcaattctt

SEQ ID NO: 4261 - DNA, 20 bp, synthetic construct
  source 1..20: mol_type = other DNA
atacataacgtaacaatccc

SEQ ID NO: 4262 - DNA, 20 bp, synthetic construct
  source 1..20: mol_type = other DNA
gtcttggctatgtcccggac

SEQ ID NO: 4263 - DNA, 20 bp, synthetic construct
  source 1..20: mol_type = other DNA
cgctaagtatagctacttat

SEQ ID NO: 4264 - DNA, 20 bp, synthetic construct
  source 1..20: mol_type = other DNA
tcactccgcgggttaaggtg

SEQ ID NO: 4265 - DNA, 20 bp, synthetic construct
  source 1..20: mol_type = other DNA
gcagtcagcacatgcactaa

SEQ ID NO: 4266 - DNA, 20 bp, synthetic construct
  source 1..20: mol_type = other DNA
gtccagagtccggatggtac

SEQ ID NO: 4267 - DNA, 20 bp, synthetic construct
  source 1..20: mol_type = other DNA
tcgagcaacaacgtgaagtc

SEQ ID NO: 4268 - DNA, 20 bp, synthetic construct
  source 1..20: mol_type = other DNA
gttcctgggcaggattgatt

SEQ ID NO: 4269 - DNA, 20 bp, synthetic construct
  source 1..20: mol_type = other DNA
cgatgcacggtgttcatatc

SEQ ID NO: 4270 - DNA, 20 bp, synthetic construct
  source 1..20: mol_type = other DNA
cagagacccagcccacattc

SEQ ID NO: 4271 - DNA, 20 bp, synthetic construct
  source 1..20: mol_type = other DNA
gagaaacccttgctccgaag

SEQ ID NO: 4272 - DNA, 20 bp, synthetic construct
  source 1..20: mol_type = other DNA
tgaatattacggccataact

SEQ ID NO: 4273 - DNA, 20 bp, synthetic construct
  source 1..20: mol_type = other DNA
cgctatgcacggtgaatcga

SEQ ID NO: 4274 - DNA, 20 bp, synthetic construct
  source 1..20: mol_type = other DNA
tctgccactccgagacagga

SEQ ID NO: 4275 - DNA, 20 bp, synthetic construct
  source 1..20: mol_type = other DNA
tatgccaaatgcgccacaaa

SEQ ID NO: 4276 - DNA, 20 bp, synthetic construct
  source 1..20: mol_type = other DNA
actgtaaagtattcgcggag

SEQ ID NO: 4277 - DNA, 20 bp, synthetic construct
  source 1..20: mol_type = other DNA
gtgcgttaagtctctggact

SEQ ID NO: 4278 - DNA, 20 bp, synthetic construct
  source 1..20: mol_type = other DNA
cgaaccctagcatagttaat

SEQ ID NO: 4279 - DNA, 20 bp, synthetic construct
  source 1..20: mol_type = other DNA
actcccatacgcatatatgc

SEQ ID NO: 4280 - DNA, 20 bp, synthetic construct
  source 1..20: mol_type = other DNA
cgacagatttgacctgagat

SEQ ID NO: 4281 - DNA, 20 bp, synthetic construct
  source 1..20: mol_type = other DNA
tctataacactattgtggct

SEQ ID NO: 4282 - DNA, 20 bp, synthetic construct
  source 1..20: mol_type = other DNA
ccactataccagccctctct

SEQ ID NO: 4283 - DNA, 20 bp, synthetic construct
  source 1..20: mol_type = other DNA
agggagcaactagacgtggg

SEQ ID NO: 4284 - DNA, 20 bp, synthetic construct
  source 1..20: mol_type = other DNA
tattagaagcatcggtcgcg

SEQ ID NO: 4285 - DNA, 20 bp, synthetic construct
  source 1..20: mol_type = other DNA
gtgaaacagggaattgctaa

SEQ ID NO: 4286 - DNA, 20 bp, synthetic construct
  source 1..20: mol_type = other DNA
ctttaatcagctcgcacagt

SEQ ID NO: 4287 - DNA, 20 bp, synthetic construct
  source 1..20: mol_type = other DNA
gtaagataagctacagcaga

SEQ ID NO: 4288 - DNA, 20 bp, synthetic construct
  source 1..20: mol_type = other DNA
cgacatgcccgcaaccttga

SEQ ID NO: 4289 - DNA, 20 bp, synthetic construct
  source 1..20: mol_type = other DNA
gaagtcatgacctctacatg

SEQ ID NO: 4290 - DNA, 20 bp, synthetic construct
  source 1..20: mol_type = other DNA
gttagatcgcaatgttgtag

SEQ ID NO: 4291 - DNA, 20 bp, synthetic construct
  source 1..20: mol_type = other DNA
tgacggagtataccgcatgg

SEQ ID NO: 4292 - DNA, 20 bp, synthetic construct
  source 1..20: mol_type = other DNA
aacagaggccttgatattca

SEQ ID NO: 4293 - DNA, 20 bp, synthetic construct
  source 1..20: mol_type = other DNA
attacgtctatcttcaaggg

SEQ ID NO: 4294 - DNA, 20 bp, synthetic construct
  source 1..20: mol_type = other DNA
tattagggtctttaaagctg

SEQ ID NO: 4295 - DNA, 20 bp, synthetic construct
  source 1..20: mol_type = other DNA
ggaggcccacaccacttcat

SEQ ID NO: 4296 - DNA, 20 bp, synthetic construct
  source 1..20: mol_type = other DNA
gtaccggtctcctatctgtg

SEQ ID NO: 4297 - DNA, 20 bp, synthetic construct
  source 1..20: mol_type = other DNA
gattagcttaggcccgcctc

SEQ ID NO: 4298 - DNA, 20 bp, synthetic construct
  source 1..20: mol_type = other DNA
cgccgcggtccgaaagatag

SEQ ID NO: 4299 - DNA, 20 bp, synthetic construct
  source 1..20: mol_type = other DNA
caataattcagagactagtg

SEQ ID NO: 4300 - DNA, 20 bp, synthetic construct
  source 1..20: mol_type = other DNA
ttgcaatgcgaatcaacaga

SEQ ID NO: 4301 - DNA, 20 bp, synthetic construct
  source 1..20: mol_type = other DNA
atttgaccggagcgcaaata

SEQ ID NO: 4302 - DNA, 20 bp, synthetic construct
  source 1..20: mol_type = other DNA
gaagtgccgagattggcaat

SEQ ID NO: 4303 - DNA, 20 bp, synthetic construct
  source 1..20: mol_type = other DNA
gagtaatgtagagccacata

SEQ ID NO: 4304 - DNA, 20 bp, synthetic construct
  source 1..20: mol_type = other DNA
cgccttgaaccagcccaacc

SEQ ID NO: 4305 - DNA, 20 bp, synthetic construct
  source 1..20: mol_type = other DNA
gcgcttactctacgtgcaca

SEQ ID NO: 4306 - DNA, 20 bp, synthetic construct
  source 1..20: mol_type = other DNA
cctcaggatgctaagagccc

SEQ ID NO: 4307 - DNA, 20 bp, synthetic construct
  source 1..20: mol_type = other DNA
atgcgctgcgcacggtaaat

SEQ ID NO: 4308 - DNA, 20 bp, synthetic construct
  source 1..20: mol_type = other DNA
tatatcgcatgattgcggga

SEQ ID NO: 4309 - DNA, 20 bp, synthetic construct
  source 1..20: mol_type = other DNA
ctactggtacgtgatcgtga

SEQ ID NO: 4310 - DNA, 20 bp, synthetic construct
  source 1..20: mol_type = other DNA
ccaactagggcctacatcga

SEQ ID NO: 4311 - DNA, 20 bp, synthetic construct
  source 1..20: mol_type = other DNA
cagcccgacgctagcctcga

SEQ ID NO: 4312 - DNA, 20 bp, synthetic construct
  source 1..20: mol_type = other DNA
acgacaagatactcagctgc

SEQ ID NO: 4313 - DNA, 20 bp, synthetic construct
  source 1..20: mol_type = other DNA
gctttcggtaagctacggag

SEQ ID NO: 4314 - DNA, 20 bp, synthetic construct
  source 1..20: mol_type = other DNA
gagccctgcaaagcacctat

SEQ ID NO: 4315 - DNA, 20 bp, synthetic construct
  source 1..20: mol_type = other DNA
taatagggccctgctttacc

SEQ ID NO: 4316 - DNA, 20 bp, synthetic construct
  source 1..20: mol_type = other DNA
ccactccaagcagagtatcc

SEQ ID NO: 4317 - DNA, 20 bp, synthetic construct
  source 1..20: mol_type = other DNA
ttatggtcagatgcgagaaa

SEQ ID NO: 4318 - DNA, 20 bp, synthetic construct
  source 1..20: mol_type = other DNA
gaattgtgcatgccaggcag

SEQ ID NO: 4319 - DNA, 20 bp, synthetic construct
  source 1..20: mol_type = other DNA
ctgacattctgcctaatgat

SEQ ID NO: 4320 - DNA, 20 bp, synthetic construct
  source 1..20: mol_type = other DNA
cattgccgcgctcttcacta

SEQ ID NO: 4321 - DNA, 20 bp, synthetic construct
  source 1..20: mol_type = other DNA
catcttggccgacacatagc

SEQ ID NO: 4322 - DNA, 20 bp, synthetic construct
  source 1..20: mol_type = other DNA
tccctcctactgtcagccac

SEQ ID NO: 4323 - DNA, 20 bp, synthetic construct
  source 1..20: mol_type = other DNA
agtagccgcacctggttagg

SEQ ID NO: 4324 - DNA, 20 bp, synthetic construct
  source 1..20: mol_type = other DNA
gacccgtgggctggtgaaga

SEQ ID NO: 4325 - DNA, 20 bp, synthetic construct
  source 1..20: mol_type = other DNA
attgccacaacgcttccctg

SEQ ID NO: 4326 - DNA, 20 bp, synthetic construct
  source 1..20: mol_type = other DNA
cgtaggtttcgggaattgaa

SEQ ID NO: 4327 - DNA, 20 bp, synthetic construct
  source 1..20: mol_type = other DNA
gaggttggtacatgactaag

SEQ ID NO: 4328 - DNA, 20 bp, synthetic construct
  source 1..20: mol_type = other DNA
cttcgcgacccacatgtcag

SEQ ID NO: 4329 - DNA, 20 bp, synthetic construct
  source 1..20: mol_type = other DNA
cggactgttccaggtttaga

SEQ ID NO: 4330 - DNA, 20 bp, synthetic construct
  source 1..20: mol_type = other DNA
cgccctgatcgtacatagaa

SEQ ID NO: 4331 - DNA, 20 bp, synthetic construct
  source 1..20: mol_type = other DNA
taggaatttctggaacggga

SEQ ID NO: 4332 - DNA, 20 bp, synthetic construct
  source 1..20: mol_type = other DNA
tgtggtcatagggcgagtcc

SEQ ID NO: 4333 - DNA, 20 bp, synthetic construct
  source 1..20: mol_type = other DNA
ccaatcttacgtctaacatc

SEQ ID NO: 4334 - DNA, 20 bp, synthetic construct
  source 1..20: mol_type = other DNA
ttcatggtcaatcgtagctc

SEQ ID NO: 4335 - DNA, 20 bp, synthetic construct
  source 1..20: mol_type = other DNA
gcttcgatggtcgctcccaa

SEQ ID NO: 4336 - DNA, 20 bp, synthetic construct
  source 1..20: mol_type = other DNA
ctcatgcactttcggtctct

SEQ ID NO: 4337 - DNA, 20 bp, synthetic construct
  source 1..20: mol_type = other DNA
tttgactagatccgccagtt

SEQ ID NO: 4338 - DNA, 20 bp, synthetic construct
  source 1..20: mol_type = other DNA
cactctcgcatacgtcatta

SEQ ID NO: 4339 - DNA, 20 bp, synthetic construct
  source 1..20: mol_type = other DNA
ccgagaattatcatctgacg

SEQ ID NO: 4340 - DNA, 20 bp, synthetic construct
  source 1..20: mol_type = other DNA
tagttgcctggtgctcgcaa

SEQ ID NO: 4341 - DNA, 20 bp, synthetic construct
  source 1..20: mol_type = other DNA
agcaagcggccatacgggat

SEQ ID NO: 4342 - DNA, 20 bp, synthetic construct
  source 1..20: mol_type = other DNA
gcaggtccttcgtgggagag

SEQ ID NO: 4343 - DNA, 20 bp, synthetic construct
  source 1..20: mol_type = other DNA
aaacagcgtgtgtgcttcag

SEQ ID NO: 4344 - DNA, 20 bp, synthetic construct
  source 1..20: mol_type = other DNA
tcagagcctcggccaaacct

SEQ ID NO: 4345 - DNA, 20 bp, synthetic construct
  source 1..20: mol_type = other DNA
gcattgcgcgcgaaggttca

SEQ ID NO: 4346 - DNA, 20 bp, synthetic construct
  source 1..20: mol_type = other DNA
gcggcgttggtcttcatatc

SEQ ID NO: 4347 - DNA, 20 bp, synthetic construct
  source 1..20: mol_type = other DNA
agtggaacttcaataagctc

SEQ ID NO: 4348 - DNA, 20 bp, synthetic construct
  source 1..20: mol_type = other DNA
aggcaggaggaaagtaaagg

SEQ ID NO: 4349 - DNA, 20 bp, synthetic construct
  source 1..20: mol_type = other DNA
tcttaacaccgctggttata

SEQ ID NO: 4350 - DNA, 20 bp, synthetic construct
  source 1..20: mol_type = other DNA
tccgtccttaagagtacagc

SEQ ID NO: 4351 - DNA, 20 bp, synthetic construct
  source 1..20: mol_type = other DNA
gtgatttactaaaggtactg

SEQ ID NO: 4352 - DNA, 20 bp, synthetic construct
  source 1..20: mol_type = other DNA
gtgttcttcggccgctaagc

SEQ ID NO: 4353 - DNA, 20 bp, synthetic construct
  source 1..20: mol_type = other DNA
gagacagaactgctcttgag

SEQ ID NO: 4354 - DNA, 20 bp, synthetic construct
  source 1..20: mol_type = other DNA
catcgctcctgtcttgcaaa

SEQ ID NO: 4355 - DNA, 20 bp, synthetic construct
  source 1..20: mol_type = other DNA
tcagcaattcttgactctgc

SEQ ID NO: 4356 - DNA, 20 bp, synthetic construct
  source 1..20: mol_type = other DNA
ggaagttgatttacccgtgt

SEQ ID NO: 4357 - DNA, 20 bp, synthetic construct
  source 1..20: mol_type = other DNA
tccctagggtttagggttaa

SEQ ID NO: 4358 - DNA, 20 bp, synthetic construct
  source 1..20: mol_type = other DNA
ggcctggtagaactgttatg

SEQ ID NO: 4359 - DNA, 20 bp, synthetic construct
  source 1..20: mol_type = other DNA
aacacgtattggttcttgag

SEQ ID NO: 4360 - DNA, 20 bp, synthetic construct
  source 1..20: mol_type = other DNA
tgtagatcggcgagacggga

SEQ ID NO: 4361 - DNA, 20 bp, synthetic construct
  source 1..20: mol_type = other DNA
agatcgttaatgatggcata

SEQ ID NO: 4362 - DNA, 20 bp, synthetic construct
  source 1..20: mol_type = other DNA
aataaggacccactccgtgg

SEQ ID NO: 4363 - DNA, 20 bp, synthetic construct
  source 1..20: mol_type = other DNA
gccaagtatgaggcgttaga

SEQ ID NO: 4364 - DNA, 20 bp, synthetic construct
  source 1..20: mol_type = other DNA
taccgggcaagccgggaagt

SEQ ID NO: 4365 - DNA, 20 bp, synthetic construct
  source 1..20: mol_type = other DNA
ttagctctccacaggagaaa

SEQ ID NO: 4366 - DNA, 20 bp, synthetic construct
  source 1..20: mol_type = other DNA
ggagtcattggaccctaacc

SEQ ID NO: 4367 - DNA, 20 bp, synthetic construct
  source 1..20: mol_type = other DNA
tcggacgtctacggttcgcg

SEQ ID NO: 4368 - DNA, 20 bp, synthetic construct
  source 1..20: mol_type = other DNA
ggaacgtaatacttcaggtc

SEQ ID NO: 4369 - DNA, 20 bp, synthetic construct
  source 1..20: mol_type = other DNA
gacctccatgaacctgagga

SEQ ID NO: 4370 - DNA, 20 bp, synthetic construct
  source 1..20: mol_type = other DNA
agtgcccaattctaatgtac

SEQ ID NO: 4371 - DNA, 20 bp, synthetic construct
  source 1..20: mol_type = other DNA
acttagcgacaaacgccggc

SEQ ID NO: 4372 - DNA, 20 bp, synthetic construct
  source 1..20: mol_type = other DNA
ggcagtagttacccgtctct

SEQ ID NO: 4373 - DNA, 20 bp, synthetic construct
  source 1..20: mol_type = other DNA
tcttaccgccctgaacgcca

SEQ ID NO: 4374 - DNA, 20 bp, synthetic construct
  source 1..20: mol_type = other DNA
gacaccgtgccaatgtgatg

SEQ ID NO: 4375 - DNA, 20 bp, synthetic construct
  source 1..20: mol_type = other DNA
ctaagttccgacctaagggc

SEQ ID NO: 4376 - DNA, 20 bp, synthetic construct
  source 1..20: mol_type = other DNA
tttagattacgcggtcaagt

SEQ ID NO: 4377 - DNA, 20 bp, synthetic construct
  source 1..20: mol_type = other DNA
cttgcgtctaagaatgcatc

SEQ ID NO: 4378 - DNA, 20 bp, synthetic construct
  source 1..20: mol_type = other DNA
gcggcggactcagatgtgta

SEQ ID NO: 4379 - DNA, 20 bp, synthetic construct
  source 1..20: mol_type = other DNA
tctttcgctataggaacggt

SEQ ID NO: 4380 - DNA, 20 bp, synthetic construct
  source 1..20: mol_type = other DNA
cccacctcagcgtgcttacc

SEQ ID NO: 4381 - DNA, 20 bp, synthetic construct
  source 1..20: mol_type = other DNA
cctggaggacaatgcatcgc

SEQ ID NO: 4382 - DNA, 20 bp, synthetic construct
  source 1..20: mol_type = other DNA
tgatgccatacaaccgttat

SEQ ID NO: 4383 - DNA, 20 bp, synthetic construct
  source 1..20: mol_type = other DNA
aactatcagtatttactcgg

SEQ ID NO: 4384 - DNA, 20 bp, synthetic construct
  source 1..20: mol_type = other DNA
aaagtcatctgaggtcatat

SEQ ID NO: 4385 - DNA, 20 bp, synthetic construct
  source 1..20: mol_type = other DNA
atatcgagaatggcacgtaa

SEQ ID NO: 4386 - DNA, 20 bp, synthetic construct
  source 1..20: mol_type = other DNA
tcctgacctcttggagaaca

SEQ ID NO: 4387 - DNA, 20 bp, synthetic construct
  source 1..20: mol_type = other DNA
cagcgtcttcgtccaaatga

SEQ ID NO: 4388 - DNA, 20 bp, synthetic construct
  source 1..20: mol_type = other DNA
caggcttctgttgggacctt

SEQ ID NO: 4389 - DNA, 20 bp, synthetic construct
  source 1..20: mol_type = other DNA
tatcagcccaatgtttgtct

SEQ ID NO: 4390 - DNA, 20 bp, synthetic construct
  source 1..20: mol_type = other DNA
gtttacctgggtagccttcc

SEQ ID NO: 4391 - DNA, 20 bp, synthetic construct
  source 1..20: mol_type = other DNA
tgccgtcagaatatctttca

SEQ ID NO: 4392 - DNA, 20 bp, synthetic construct
  source 1..20: mol_type = other DNA
gtaatgtctgattcaccata

SEQ ID NO: 4393 - DNA, 20 bp, synthetic construct
  source 1..20: mol_type = other DNA
tgtcatattcctctggcgac

SEQ ID NO: 4394 - DNA, 20 bp, synthetic construct
  source 1..20: mol_type = other DNA
gagtggaagccataaacacg

SEQ ID NO: 4395 - DNA, 20 bp, synthetic construct
  source 1..20: mol_type = other DNA
cgatgctaggctcgcactgg

SEQ ID NO: 4396 - DNA, 20 bp, synthetic construct
  source 1..20: mol_type = other DNA
acataggtcctgacgctcat

SEQ ID NO: 4397 - DNA, 20 bp, synthetic construct
  source 1..20: mol_type = other DNA
gatccggcgagctgatcgat

SEQ ID NO: 4398 - DNA, 20 bp, synthetic construct
  source 1..20: mol_type = other DNA
gcgcgcacctttaattattg

SEQ ID NO: 4399 - DNA, 20 bp, synthetic construct
  source 1..20: mol_type = other DNA
gcttaatgaagccaaacact

SEQ ID NO: 4400 - DNA, 20 bp, synthetic construct
  source 1..20: mol_type = other DNA
tacgagggacatgggatcga

SEQ ID NO: 4401 - DNA, 20 bp, synthetic construct
  source 1..20: mol_type = other DNA
cccttccgacaggaactcag

SEQ ID NO: 4402 - DNA, 20 bp, synthetic construct
  source 1..20: mol_type = other DNA
ttctacgctatcagtttgag

SEQ ID NO: 4403 - DNA, 20 bp, synthetic construct
  source 1..20: mol_type = other DNA
ttcgagaatcctggagggat

SEQ ID NO: 4404 - DNA, 20 bp, synthetic construct
  source 1..20: mol_type = other DNA
tgatttatgtgcactcttag

SEQ ID NO: 4405 - DNA, 20 bp, synthetic construct
  source 1..20: mol_type = other DNA
attgagttgaaccagaccgg

SEQ ID NO: 4406 - DNA, 20 bp, synthetic construct
  source 1..20: mol_type = other DNA
tgcctaaacgggcatcgatg

SEQ ID NO: 4407 - DNA, 20 bp, synthetic construct
  source 1..20: mol_type = other DNA
gggcaccgagctacgatcgg

SEQ ID NO: 4408 - DNA, 20 bp, synthetic construct
  source 1..20: mol_type = other DNA
cagcacattcacataccaaa

SEQ ID NO: 4409 - DNA, 20 bp, synthetic construct
  source 1..20: mol_type = other DNA
aacctctgtccgcgtgacgg

SEQ ID NO: 4410 - DNA, 20 bp, synthetic construct
  source 1..20: mol_type = other DNA
gctaccacgcaagggcacaa

SEQ ID NO: 4411 - DNA, 20 bp, synthetic construct
  source 1..20: mol_type = other DNA
acggaactatggctatccgt

SEQ ID NO: 4412 - DNA, 20 bp, synthetic construct
  source 1..20: mol_type = other DNA
ttcattcgttgattatgacg

SEQ ID NO: 4413 - DNA, 20 bp, synthetic construct
  source 1..20: mol_type = other DNA
gctcgatgactgtaccctca

SEQ ID NO: 4414 - DNA, 20 bp, synthetic construct
  source 1..20: mol_type = other DNA
aacaacggcacagtggcctt

SEQ ID NO: 4415 - DNA, 20 bp, synthetic construct
  source 1..20: mol_type = other DNA
agttaggtaactctggatca

SEQ ID NO: 4416 - DNA, 20 bp, synthetic construct
  source 1..20: mol_type = other DNA
caccaggccagaacaactag

SEQ ID NO: 4417 - DNA, 20 bp, synthetic construct
  source 1..20: mol_type = other DNA
tcaaattcgtttcactacac

SEQ ID NO: 4418 - DNA, 20 bp, synthetic construct
  source 1..20: mol_type = other DNA
aatgttaaagccgctcggtg

SEQ ID NO: 4419 - DNA, 20 bp, synthetic construct
  source 1..20: mol_type = other DNA
gcttcatggagaattaccag

SEQ ID NO: 4420 - DNA, 20 bp, synthetic construct
  source 1..20: mol_type = other DNA
acgtaagtagacggtagtgc

SEQ ID NO: 4421 - DNA, 20 bp, synthetic construct
  source 1..20: mol_type = other DNA
ctagtcaacagtggcatgtt

SEQ ID NO: 4422 - DNA, 20 bp, synthetic construct
  source 1..20: mol_type = other DNA
ccgaccgcgtctctaccaag

SEQ ID NO: 4423 - DNA, 20 bp, synthetic construct
  source 1..20: mol_type = other DNA
tgaagatttggctcgctcaa

SEQ ID NO: 4424 - DNA, 20 bp, synthetic construct
  source 1..20: mol_type = other DNA
actatgggacggcgaagtcg

SEQ ID NO: 4425 - DNA, 20 bp, synthetic construct
  source 1..20: mol_type = other DNA
gtgattcgcccgtgcgaaac

SEQ ID NO: 4426 - DNA, 20 bp, synthetic construct
  source 1..20: mol_type = other DNA
gggttcatgttagcgcgtcc

SEQ ID NO: 4427 - DNA, 20 bp, synthetic construct
  source 1..20: mol_type = other DNA
aggaatttgctcaggcgcgg

SEQ ID NO: 4428 - DNA, 20 bp, synthetic construct
  source 1..20: mol_type = other DNA
gcgggttagggtgagctgtg

SEQ ID NO: 4429 - DNA, 20 bp, synthetic construct
  source 1..20: mol_type = other DNA
gggttaataaatcttccgca

SEQ ID NO: 4430 - DNA, 20 bp, synthetic construct
  source 1..20: mol_type = other DNA
ctcgacggtttaactctaaa

SEQ ID NO: 4431 - DNA, 20 bp, synthetic construct
  source 1..20: mol_type = other DNA
gcagtacaaaggagtgtgag

SEQ ID NO: 4432 - DNA, 20 bp, synthetic construct
  source 1..20: mol_type = other DNA
tgcctggttgcaatgtgctg

SEQ ID NO: 4433 - DNA, 20 bp, synthetic construct
  source 1..20: mol_type = other DNA
atccggagctacctacacct

SEQ ID NO: 4434 - DNA, 20 bp, synthetic construct
  source 1..20: mol_type = other DNA
ccaaatagcgttcacaaatt

SEQ ID NO: 4435 - DNA, 20 bp, synthetic construct
  source 1..20: mol_type = other DNA
cctccacgtataaccagcag

SEQ ID NO: 4436 - DNA, 20 bp, synthetic construct
  source 1..20: mol_type = other DNA
gagtttattgttgtcgtggg

SEQ ID NO: 4437 - DNA, 20 bp, synthetic construct
  source 1..20: mol_type = other DNA
agcaacgttcagtcgaggta

SEQ ID NO: 4438 - DNA, 20 bp, synthetic construct
  source 1..20: mol_type = other DNA
cacgcctttagactatttgc

SEQ ID NO: 4439 - DNA, 20 bp, synthetic construct
  source 1..20: mol_type = other DNA
tcgctgctgtaaaggttgga

SEQ ID NO: 4440 - DNA, 20 bp, synthetic construct
  source 1..20: mol_type = other DNA
tccggtaagttccgagatag

SEQ ID NO: 4441 - DNA, 20 bp, synthetic construct
  source 1..20: mol_type = other DNA
cgtaaagcaggattactgtg

SEQ ID NO: 4442 - DNA, 20 bp, synthetic construct
  source 1..20: mol_type = other DNA
tgagtacaaccaagaaactc

SEQ ID NO: 4443 - DNA, 20 bp, synthetic construct
  source 1..20: mol_type = other DNA
gtagatgtcataatcccatg

SEQ ID NO: 4444 - DNA, 20 bp, synthetic construct
  source 1..20: mol_type = other DNA
tggtttaactctggcaacca

SEQ ID NO: 4445 - DNA, 20 bp, synthetic construct
  source 1..20: mol_type = other DNA
cgcacgccttgtgcctagtt

SEQ ID NO: 4446 - DNA, 20 bp, synthetic construct
  source 1..20: mol_type = other DNA
gctaaccgtaaatagcctga

SEQ ID NO: 4447 - DNA, 20 bp, synthetic construct
  source 1..20: mol_type = other DNA
tatgaatagagcaatgacgt

SEQ ID NO: 4448 - DNA, 20 bp, synthetic construct
  source 1..20: mol_type = other DNA
caatactttaacatcagtcc

SEQ ID NO: 4449 - DNA, 20 bp, synthetic construct
  source 1..20: mol_type = other DNA
acttgcagagcatatgttcg

SEQ ID NO: 4450 - DNA, 20 bp, synthetic construct
  source 1..20: mol_type = other DNA
ggaatgagtgtcgcgactga

SEQ ID NO: 4451 - DNA, 20 bp, synthetic construct
  source 1..20: mol_type = other DNA
catagctacagattagatgc

SEQ ID NO: 4452 - DNA, 20 bp, synthetic construct
  source 1..20: mol_type = other DNA
ccttatggcgttccgtctac

SEQ ID NO: 4453 - DNA, 20 bp, synthetic construct
  source 1..20: mol_type = other DNA
ctcctgaacacaccagaaac

SEQ ID NO: 4454 - DNA, 20 bp, synthetic construct
  source 1..20: mol_type = other DNA
ctcacacagcgtggcagaat

SEQ ID NO: 4455 - DNA, 20 bp, synthetic construct
  source 1..20: mol_type = other DNA
gtagtagcctacgaattgcc

SEQ ID NO: 4456 - DNA, 20 bp, synthetic construct
  source 1..20: mol_type = other DNA
tggtggtatcgcgcttagta

SEQ ID NO: 4457 - DNA, 20 bp, synthetic construct
  source 1..20: mol_type = other DNA
gcgaagaatgcttgttcaac

SEQ ID NO: 4458 - DNA, 20 bp, synthetic construct
  source 1..20: mol_type = other DNA
gtcgtgtcgcctggaactct

SEQ ID NO: 4459 - DNA, 20 bp, synthetic construct
  source 1..20: mol_type = other DNA
gttgatcagcctgtctttcc

SEQ ID NO: 4460 - DNA, 20 bp, synthetic construct
  source 1..20: mol_type = other DNA
aacttgacgtctacccgaac

SEQ ID NO: 4461 - DNA, 20 bp, synthetic construct
  source 1..20: mol_type = other DNA
tgggcaaactcttaactcgt

SEQ ID NO: 4462 - DNA, 20 bp, synthetic construct
  source 1..20: mol_type = other DNA
ctcttacacttccataagtt

SEQ ID NO: 4463 - DNA, 20 bp, synthetic construct
  source 1..20: mol_type = other DNA
tacagaagttgcattagaac

SEQ ID NO: 4464 - DNA, 20 bp, synthetic construct
  source 1..20: mol_type = other DNA
atcaacccaatccgattgca

SEQ ID NO: 4465 - DNA, 20 bp, synthetic construct
  source 1..20: mol_type = other DNA
ggtcaggtttcagcttgtta

SEQ ID NO: 4466 - DNA, 20 bp, synthetic construct
  source 1..20: mol_type = other DNA
taggcttaagttgaccacat

SEQ ID NO: 4467 - DNA, 20 bp, synthetic construct
  source 1..20: mol_type = other DNA
gttgcgtattagtccgcgtg

SEQ ID NO: 4468 - DNA, 20 bp, synthetic construct
  source 1..20: mol_type = other DNA
atgtcaacgggatccgtgtg

SEQ ID NO: 4469 - DNA, 20 bp, synthetic construct
  source 1..20: mol_type = other DNA
tgcgagatatatgtgtgata

SEQ ID NO: 4470 - DNA, 20 bp, synthetic construct
  source 1..20: mol_type = other DNA
gcgtcgagtggatagcgcac

SEQ ID NO: 4471 - DNA, 20 bp, synthetic construct
  source 1..20: mol_type = other DNA
gcaattcattctggcgggtc

SEQ ID NO: 4472 - DNA, 20 bp, synthetic construct
  source 1..20: mol_type = other DNA
gacgtccactgtcacactct

SEQ ID NO: 4473 - DNA, 20 bp, synthetic construct
  source 1..20: mol_type = other DNA
atcacccgattcgatccacg

SEQ ID NO: 4474 - DNA, 20 bp, synthetic construct
  source 1..20: mol_type = other DNA
aggcaaatcactatccttga

SEQ ID NO: 4475 - DNA, 20 bp, synthetic construct
  source 1..20: mol_type = other DNA
ctgcctggcattcttactac

SEQ ID NO: 4476 - DNA, 20 bp, synthetic construct
  source 1..20: mol_type = other DNA
ggtgcggtatatagtgattt

SEQ ID NO: 4477 - DNA, 20 bp, synthetic construct
  source 1..20: mol_type = other DNA
acagggagacagatcacaat

SEQ ID NO: 4478 - DNA, 20 bp, synthetic construct
  source 1..20: mol_type = other DNA
ggttaagcaaagctcgggag

SEQ ID NO: 4479 - DNA, 20 bp, synthetic construct
  source 1..20: mol_type = other DNA
ttaaccgatatgtggacacg

SEQ ID NO: 4480 - DNA, 20 bp, synthetic construct
  source 1..20: mol_type = other DNA
tcgctggaatcaccgcagag

SEQ ID NO: 4481 - DNA, 20 bp, synthetic construct
  source 1..20: mol_type = other DNA
gatgctgatagattcccgcc

SEQ ID NO: 4482 - DNA, 20 bp, synthetic construct
  source 1..20: mol_type = other DNA
gggtcagggtctgaactgtg

SEQ ID NO: 4483 - DNA, 20 bp, synthetic construct
  source 1..20: mol_type = other DNA
tctgctgagaccgctattcc

SEQ ID NO: 4484 - DNA, 20 bp, synthetic construct
  source 1..20: mol_type = other DNA
ctctaggcacggatgttaag

SEQ ID NO: 4485 - DNA, 20 bp, synthetic construct
  source 1..20: mol_type = other DNA
cgagcccgagaaactagccc

SEQ ID NO: 4486 - DNA, 20 bp, synthetic construct
  source 1..20: mol_type = other DNA
gaactgtcgtatatgtggat

SEQ ID NO: 4487 - DNA, 20 bp, synthetic construct
  source 1..20: mol_type = other DNA
tccagctgctttagtattcg

SEQ ID NO: 4488 - DNA, 20 bp, synthetic construct
  source 1..20: mol_type = other DNA
gcttacgcgaacacgttctt

SEQ ID NO: 4489 - DNA, 20 bp, synthetic construct
  source 1..20: mol_type = other DNA
cgatgactaccatcttacac

SEQ ID NO: 4490 - DNA, 20 bp, synthetic construct
  source 1..20: mol_type = other DNA
cgattgcgatggtcatcttt

SEQ ID NO: 4491 - DNA, 20 bp, synthetic construct
  source 1..20: mol_type = other DNA
aaattggctaacgccataca

SEQ ID NO: 4492 - DNA, 20 bp, synthetic construct
  source 1..20: mol_type = other DNA
cgatatgtccctgaccgtcc

SEQ ID NO: 4493 - DNA, 20 bp, synthetic construct
  source 1..20: mol_type = other DNA
cacttcatgtccagtcagta

SEQ ID NO: 4494 - DNA, 20 bp, synthetic construct
  source 1..20: mol_type = other DNA
tctgtagcgtatcgcattag

SEQ ID NO: 4495 - DNA, 20 bp, synthetic construct
  source 1..20: mol_type = other DNA
catagagagctaggatggaa

SEQ ID NO: 4496 - DNA, 20 bp, synthetic construct
  source 1..20: mol_type = other DNA
cagacttgtcacaagaagca

SEQ ID NO: 4497 - DNA, 20 bp, synthetic construct
  source 1..20: mol_type = other DNA
cagcaccattcgacgacgtc

SEQ ID NO: 4498 - DNA, 20 bp, synthetic construct
  source 1..20: mol_type = other DNA
gcactttcatgcgaaactag

SEQ ID NO: 4499 - DNA, 20 bp, synthetic construct
  source 1..20: mol_type = other DNA
taagcaactattgccctctt

SEQ ID NO: 4500 - DNA, 20 bp, synthetic construct
  source 1..20: mol_type = other DNA
cagtaaggaatctcaagtgc

SEQ ID NO: 4501 - DNA, 20 bp, synthetic construct
  source 1..20: mol_type = other DNA
tgcgatgttaggagaggacg

SEQ ID NO: 4502 - DNA, 20 bp, synthetic construct
  source 1..20: mol_type = other DNA
ccttagtccatggtatctga

SEQ ID NO: 4503 - DNA, 20 bp, synthetic construct
  source 1..20: mol_type = other DNA
atcaccaagttagatactca

SEQ ID NO: 4504 - DNA, 20 bp, synthetic construct
  source 1..20: mol_type = other DNA
tcaccatgtaggacgaatag

SEQ ID NO: 4505 - DNA, 20 bp, synthetic construct
  source 1..20: mol_type = other DNA
gattacgattgctagctaag

SEQ ID NO: 4506 - DNA, 20 bp, synthetic construct
  source 1..20: mol_type = other DNA
ttagaacccgcagtggtgtc

SEQ ID NO: 4507 - DNA, 20 bp, synthetic construct
  source 1..20: mol_type = other DNA
ggacctggaatatacatcca

SEQ ID NO: 4508 - DNA, 20 bp, synthetic construct
  source 1..20: mol_type = other DNA
agggctttctcgaatgcaga

SEQ ID NO: 4509 - DNA, 20 bp, synthetic construct
  source 1..20: mol_type = other DNA
aagtttgtccgactcttccg

SEQ ID NO: 4510 - DNA, 20 bp, synthetic construct
  source 1..20: mol_type = other DNA
gcaactagttcctcaacgtg

SEQ ID NO: 4511 - DNA, 20 bp, synthetic construct
  source 1..20: mol_type = other DNA
tacggttattcgaacgaagt

SEQ ID NO: 4512 - DNA, 20 bp, synthetic construct
  source 1..20: mol_type = other DNA
ttgtaagcccagatttgaca

SEQ ID NO: 4513 - DNA, 20 bp, synthetic construct
  source 1..20: mol_type = other DNA
tcctggtagccgctaacgca

SEQ ID NO: 4514 - DNA, 20 bp, synthetic construct
  source 1..20: mol_type = other DNA
aaatcgccaggcaatggcac

SEQ ID NO: 4515 - DNA, 20 bp, synthetic construct
  source 1..20: mol_type = other DNA
ggtgatttaacggttggccc

SEQ ID NO: 4516 - DNA, 20 bp, synthetic construct
  source 1..20: mol_type = other DNA
aagtctaactcgtctcgctt

SEQ ID NO: 4517 - DNA, 20 bp, synthetic construct
  source 1..20: mol_type = other DNA
ttctcaatagcgtacagacc

SEQ ID NO: 4518 - DNA, 20 bp, synthetic construct
  source 1..20: mol_type = other DNA
gttctgccgtctccacacgt

SEQ ID NO: 4519 - DNA, 20 bp, synthetic construct
  source 1..20: mol_type = other DNA
gcctttattatcacgacgat

SEQ ID NO: 4520 - DNA, 20 bp, synthetic construct
  source 1..20: mol_type = other DNA
gttgcgctgtcgcgcatgct

SEQ ID NO: 4521 - DNA, 20 bp, synthetic construct
  source 1..20: mol_type = other DNA
attctcgggtgtcgcctgaa

SEQ ID NO: 4522 - DNA, 20 bp, synthetic construct
  source 1..20: mol_type = other DNA
tgcgttactccgcaacagcc

SEQ ID NO: 4523 - DNA, 20 bp, synthetic construct
  source 1..20: mol_type = other DNA
tctctcatgagtcctatggt

SEQ ID NO: 4524 - DNA, 20 bp, synthetic construct
  source 1..20: mol_type = other DNA
aacctaagtccgtaatgact

SEQ ID NO: 4525 - DNA, 20 bp, synthetic construct
  source 1..20: mol_type = other DNA
ttgatgtgttatgttcggtt

SEQ ID NO: 4526 - DNA, 20 bp, synthetic construct
  source 1..20: mol_type = other DNA
tggtatataacggcattgtt

SEQ ID NO: 4527 - DNA, 20 bp, synthetic construct
  source 1..20: mol_type = other DNA
gcgcggaatcgctaaccttc

SEQ ID NO: 4528 - DNA, 20 bp, synthetic construct
  source 1..20: mol_type = other DNA
gaacccgtggtggtgggaga

SEQ ID NO: 4529 - DNA, 20 bp, synthetic construct
  source 1..20: mol_type = other DNA
ggcgaaccagttattgtcgc

SEQ ID NO: 4530 - DNA, 20 bp, synthetic construct
  source 1..20: mol_type = other DNA
gcgactaacttaatgcgcct

SEQ ID NO: 4531 - DNA, 20 bp, synthetic construct
  source 1..20: mol_type = other DNA
attactgcagatgttctcgt

SEQ ID NO: 4532 - DNA, 20 bp, synthetic construct
  source 1..20: mol_type = other DNA
cggtcgctccttatatacct

SEQ ID NO: 4533 - DNA, 20 bp, synthetic construct
  source 1..20: mol_type = other DNA
gttgaccatttctggaggct

SEQ ID NO: 4534 - DNA, 20 bp, synthetic construct
  source 1..20: mol_type = other DNA
attagaaacggcgatgccac

SEQ ID NO: 4535 - DNA, 20 bp, synthetic construct
  source 1..20: mol_type = other DNA
gaaagtattgcacagatggt

SEQ ID NO: 4536 - DNA, 20 bp, synthetic construct
  source 1..20: mol_type = other DNA
taacctggtctcgtgacctt

SEQ ID NO: 4537 - DNA, 20 bp, synthetic construct
  source 1..20: mol_type = other DNA
tatctggcacccggcgatcg

SEQ ID NO: 4538 - DNA, 20 bp, synthetic construct
  source 1..20: mol_type = other DNA
cttgacgttattcaaacctt

SEQ ID NO: 4539 - DNA, 20 bp, synthetic construct
  source 1..20: mol_type = other DNA
cactattagcatgtttccgt

SEQ ID NO: 4540 - DNA, 20 bp, synthetic construct
  source 1..20: mol_type = other DNA
aagcaactcagcatgtagta

SEQ ID NO: 4541 - DNA, 20 bp, synthetic construct
  source 1..20: mol_type = other DNA
tgtgcgcaacctcaacccta

SEQ ID NO: 4542 - DNA, 20 bp, synthetic construct
  source 1..20: mol_type = other DNA
attacctgggaccggtcaca

SEQ ID NO: 4543 - DNA, 20 bp, synthetic construct
  source 1..20: mol_type = other DNA
ggtgagcgaagctgctcacc

SEQ ID NO: 4544 - DNA, 20 bp, synthetic construct
  source 1..20: mol_type = other DNA
tcaccgtgacgtttatagtt

SEQ ID NO: 4545 - DNA, 20 bp, synthetic construct
  source 1..20: mol_type = other DNA
actctcagaaagatgcactg

SEQ ID NO: 4546 - DNA, 20 bp, synthetic construct
  source 1..20: mol_type = other DNA
agtgcagtctaggtaataga

SEQ ID NO: 4547 - DNA, 20 bp, synthetic construct
  source 1..20: mol_type = other DNA
atctcgctacaaagggatca

SEQ ID NO: 4548 - DNA, 20 bp, synthetic construct
  source 1..20: mol_type = other DNA
tctgggaccacacctgtgcg

SEQ ID NO: 4549 - DNA, 20 bp, synthetic construct
  source 1..20: mol_type = other DNA
acattctacccacctagctg

SEQ ID NO: 4550 - DNA, 20 bp, synthetic construct
  source 1..20: mol_type = other DNA
tatatccgatgtgcgctatt

SEQ ID NO: 4551 - DNA, 20 bp, synthetic construct
  source 1..20: mol_type = other DNA
taccggtgttaatatagacg

SEQ ID NO: 4552 - DNA, 20 bp, synthetic construct
  source 1..20: mol_type = other DNA
attcgtgggactatagttaa

SEQ ID NO: 4553 - DNA, 20 bp, synthetic construct
  source 1..20: mol_type = other DNA
ggcgtcctcgcggattcatt

SEQ ID NO: 4554 - DNA, 20 bp, synthetic construct
  source 1..20: mol_type = other DNA
tatggaaattcctcgcgtcg

SEQ ID NO: 4555 - DNA, 20 bp, synthetic construct
  source 1..20: mol_type = other DNA
gacttctacaatccgaaggt

SEQ ID NO: 4556 - DNA, 20 bp, synthetic construct
  source 1..20: mol_type = other DNA
tcactgacatacaacctaac

SEQ ID NO: 4557 - DNA, 20 bp, synthetic construct
  source 1..20: mol_type = other DNA
aaatgctgtttactgtgggc

SEQ ID NO: 4558 - DNA, 20 bp, synthetic construct
  source 1..20: mol_type = other DNA
ttggataagcaaggtggtac

SEQ ID NO: 4559 - DNA, 20 bp, synthetic construct
  source 1..20: mol_type = other DNA
tggttcatgtaggcagtccc

SEQ ID NO: 4560 - DNA, 20 bp, synthetic construct
  source 1..20: mol_type = other DNA
gttcattcggtcggacgttc

SEQ ID NO: 4561 - DNA, 20 bp, synthetic construct
  source 1..20: mol_type = other DNA
ggaagggagataaattcatt

SEQ ID NO: 4562 - DNA, 20 bp, synthetic construct
  source 1..20: mol_type = other DNA
aagacctcatcgaggcctaa

SEQ ID NO: 4563 - DNA, 20 bp, synthetic construct
  source 1..20: mol_type = other DNA
cctccggattcggtaatacc

SEQ ID NO: 4564 - DNA, 20 bp, synthetic construct
  source 1..20: mol_type = other DNA
ggtgggacctgattaaggaa

SEQ ID NO: 4565 - DNA, 20 bp, synthetic construct
  source 1..20: mol_type = other DNA
tagccacgcactcacgcggc

SEQ ID NO: 4566 - DNA, 20 bp, synthetic construct
  source 1..20: mol_type = other DNA
ggaagagctccaataggact

SEQ ID NO: 4567 - DNA, 20 bp, synthetic construct
  source 1..20: mol_type = other DNA
gaaccgacgctccagaaggt

SEQ ID NO: 4568 - DNA, 20 bp, synthetic construct
  source 1..20: mol_type = other DNA
gaagataagatgggaccaga

SEQ ID NO: 4569 - DNA, 20 bp, synthetic construct
  source 1..20: mol_type = other DNA
gcggatctcacgctggtcca

SEQ ID NO: 4570 - DNA, 20 bp, synthetic construct
  source 1..20: mol_type = other DNA
aatgcttcccttaaggtagt

SEQ ID NO: 4571 - DNA, 20 bp, synthetic construct
  source 1..20: mol_type = other DNA
attgtaccactgacagtcct

SEQ ID NO: 4572 - DNA, 20 bp, synthetic construct
  source 1..20: mol_type = other DNA
acaatgagcaaggtgagaca

SEQ ID NO: 4573 - DNA, 20 bp, synthetic construct
  source 1..20: mol_type = other DNA
tgaacggttccagttccatg

SEQ ID NO: 4574 - DNA, 20 bp, synthetic construct
  source 1..20: mol_type = other DNA
aaggacggcgtgttatcgcc

SEQ ID NO: 4575 - DNA, 20 bp, synthetic construct
  source 1..20: mol_type = other DNA
gatctactaccacattatag

SEQ ID NO: 4576 - DNA, 20 bp, synthetic construct
  source 1..20: mol_type = other DNA
tatcgtcgccgtctctccaa

SEQ ID NO: 4577 - DNA, 20 bp, synthetic construct
  source 1..20: mol_type = other DNA
tgcatgacaacagtggtcaa

SEQ ID NO: 4578 - DNA, 20 bp, synthetic construct
  source 1..20: mol_type = other DNA
ctccatatcaggaacagtca

SEQ ID NO: 4579 - DNA, 20 bp, synthetic construct
  source 1..20: mol_type = other DNA
tcaacgatgggcatgtttgg

SEQ ID NO: 4580 - DNA, 20 bp, synthetic construct
  source 1..20: mol_type = other DNA
tacgacatagcttagatggg

SEQ ID NO: 4581 - DNA, 20 bp, synthetic construct
  source 1..20: mol_type = other DNA
ggtccggcctctcactagct

SEQ ID NO: 4582 - DNA, 20 bp, synthetic construct
  source 1..20: mol_type = other DNA
attccgcacggaccggcatt

SEQ ID NO: 4583 - DNA, 20 bp, synthetic construct
  source 1..20: mol_type = other DNA
gcaaatgacgttgtgtgacc

SEQ ID NO: 4584 - DNA, 20 bp, synthetic construct
  source 1..20: mol_type = other DNA
acccacgtcgcgggaagata

SEQ ID NO: 4585 - DNA, 20 bp, synthetic construct
  source 1..20: mol_type = other DNA
ccgctagtcgctggtcctga

SEQ ID NO: 4586 - DNA, 20 bp, synthetic construct
  source 1..20: mol_type = other DNA
ctcacctaggcgaaaccagg

SEQ ID NO: 4587 - DNA, 20 bp, synthetic construct
  source 1..20: mol_type = other DNA
ccagtccctccatgcaccaa

SEQ ID NO: 4588 - DNA, 20 bp, synthetic construct
  source 1..20: mol_type = other DNA
attcacgcatttcgtaaact

SEQ ID NO: 4589 - DNA, 20 bp, synthetic construct
  source 1..20: mol_type = other DNA
agccaccagtatagtcacag

SEQ ID NO: 4590 - DNA, 20 bp, synthetic construct
  source 1..20: mol_type = other DNA
tacggtacccaacttgtcag

SEQ ID NO: 4591 - DNA, 20 bp, synthetic construct
  source 1..20: mol_type = other DNA
aaggcaaaccctatcacgtc

SEQ ID NO: 4592 - DNA, 20 bp, synthetic construct
  source 1..20: mol_type = other DNA
ctgccatcatgtgaatcgta

SEQ ID NO: 4593 - DNA, 20 bp, synthetic construct
  source 1..20: mol_type = other DNA
accaaccgcatctactctgc

SEQ ID NO: 4594 - DNA, 20 bp, synthetic construct
  source 1..20: mol_type = other DNA
cgcagttactcttctcaagt

SEQ ID NO: 4595 - DNA, 20 bp, synthetic construct
  source 1..20: mol_type = other DNA
gtcagggatcgaatccaatg

SEQ ID NO: 4596 - DNA, 20 bp, synthetic construct
  source 1..20: mol_type = other DNA
cacgcttatgtagctgtaac

SEQ ID NO: 4597 - DNA, 20 bp, synthetic construct
  source 1..20: mol_type = other DNA
agcgaatttacagcagctac

SEQ ID NO: 4598 - DNA, 20 bp, synthetic construct
  source 1..20: mol_type = other DNA
caatagtgccgagcttcccg

SEQ ID NO: 4599 - DNA, 20 bp, synthetic construct
  source 1..20: mol_type = other DNA
tcgcagtattgtgatacaaa

SEQ ID NO: 4600 - DNA, 20 bp, synthetic construct
  source 1..20: mol_type = other DNA
acacgacgtgaccggtgggt

SEQ ID NO: 4601 - DNA, 20 bp, synthetic construct
  source 1..20: mol_type = other DNA
tgggcgcaacgcttcaagcc

SEQ ID NO: 4602 - DNA, 20 bp, synthetic construct
  source 1..20: mol_type = other DNA
ccactcgtatatggaagggt

SEQ ID NO: 4603 - DNA, 20 bp, synthetic construct
  source 1..20: mol_type = other DNA
tagggcagtgtgagtgggtt

SEQ ID NO: 4604 - DNA, 20 bp, synthetic construct
  source 1..20: mol_type = other DNA
ctccagtgttccttcttggc

SEQ ID NO: 4605 - DNA, 20 bp, synthetic construct
  source 1..20: mol_type = other DNA
cacacttgagatggagccca

SEQ ID NO: 4606 - DNA, 20 bp, synthetic construct
  source 1..20: mol_type = other DNA
atggcatcgttgttcagctg

SEQ ID NO: 4607 - DNA, 20 bp, synthetic construct
  source 1..20: mol_type = other DNA
gcggagaatgtgatgatatg

SEQ ID NO: 4608 - DNA, 20 bp, synthetic construct
  source 1..20: mol_type = other DNA
gtcgagtgtcaccgggtgct

SEQ ID NO: 4609 - DNA, 20 bp, synthetic construct
  source 1..20: mol_type = other DNA
ggtacttaaacttgcctcat

SEQ ID NO: 4610 - DNA, 20 bp, synthetic construct
  source 1..20: mol_type = other DNA
gagcaatctccacttcgatg

SEQ ID NO: 4611 - DNA, 20 bp, synthetic construct
  source 1..20: mol_type = other DNA
ggaccatctactatctgcgg

SEQ ID NO: 4612 - DNA, 20 bp, synthetic construct
  source 1..20: mol_type = other DNA
tacacgttccgatccttaaa

SEQ ID NO: 4613 - DNA, 20 bp, synthetic construct
  source 1..20: mol_type = other DNA
ggtggtcgctgtcaaactct

SEQ ID NO: 4614 - DNA, 20 bp, synthetic construct
  source 1..20: mol_type = other DNA
ggaaagcacaacatttacac

SEQ ID NO: 4615 - DNA, 20 bp, synthetic construct
  source 1..20: mol_type = other DNA
cgccagtgttcatccactgc

SEQ ID NO: 4616 - DNA, 20 bp, synthetic construct
  source 1..20: mol_type = other DNA
tcgggactgaaagtgatctg

SEQ ID NO: 4617 - DNA, 20 bp, synthetic construct
  source 1..20: mol_type = other DNA
agccgtgtacatgaaatact

SEQ ID NO: 4618 - DNA, 20 bp, synthetic construct
  source 1..20: mol_type = other DNA
tttatctccgctaatctccg

SEQ ID NO: 4619 - DNA, 20 bp, synthetic construct
  source 1..20: mol_type = other DNA
tacgctgactttgttgatcg

SEQ ID NO: 4620 - DNA, 20 bp, synthetic construct
  source 1..20: mol_type = other DNA
cttcgaggacctgcatcctc

SEQ ID NO: 4621 - DNA, 20 bp, synthetic construct
  source 1..20: mol_type = other DNA
tattgtaaccagttgcacag

SEQ ID NO: 4622 - DNA, 20 bp, synthetic construct
  source 1..20: mol_type = other DNA
gggatgggtttccacggttg

SEQ ID NO: 4623 - DNA, 20 bp, synthetic construct
  source 1..20: mol_type = other DNA
gtttcccagattacgtagta

SEQ ID NO: 4624 - DNA, 20 bp, synthetic construct
  source 1..20: mol_type = other DNA
ggtcactattaatcggtgat

SEQ ID NO: 4625 - DNA, 20 bp, synthetic construct
  source 1..20: mol_type = other DNA
tcaaggcggcaggtaccaag

SEQ ID NO: 4626 - DNA, 20 bp, synthetic construct
  source 1..20: mol_type = other DNA
ggcaatgctggagggctatg

SEQ ID NO: 4627 - DNA, 20 bp, synthetic construct
  source 1..20: mol_type = other DNA
cgaatcagtcttagacggca

SEQ ID NO: 4628 - DNA, 20 bp, synthetic construct
  source 1..20: mol_type = other DNA
aagtttactgcttcctacga

SEQ ID NO: 4629 - DNA, 20 bp, synthetic construct
  source 1..20: mol_type = other DNA
cggccgagggtcttcaacga

SEQ ID NO: 4630 - DNA, 20 bp, synthetic construct
  source 1..20: mol_type = other DNA
cgataatcgtgatatgccag

SEQ ID NO: 4631 - DNA, 20 bp, synthetic construct
  source 1..20: mol_type = other DNA
tcgccgggaaggatagtccg

SEQ ID NO: 4632 - DNA, 20 bp, synthetic construct
  source 1..20: mol_type = other DNA
tgggtagttcgtaccggagc

SEQ ID NO: 4633 - DNA, 20 bp, synthetic construct
  source 1..20: mol_type = other DNA
tacgtgactctttcccacct

SEQ ID NO: 4634 - DNA, 20 bp, synthetic construct
  source 1..20: mol_type = other DNA
cgaggtgactcaaatgttat

SEQ ID NO: 4635 - DNA, 20 bp, synthetic construct
  source 1..20: mol_type = other DNA
gtctacgcgtatttcgtccg

SEQ ID NO: 4636 - DNA, 20 bp, synthetic construct
  source 1..20: mol_type = other DNA
gctagtagagtagtgtttat

SEQ ID NO: 4637 - DNA, 20 bp, synthetic construct
  source 1..20: mol_type = other DNA
ggcaagagtgaaggccctga

SEQ ID NO: 4638 - DNA, 20 bp, synthetic construct
  source 1..20: mol_type = other DNA
ttctcagtctgtgacgcgat

SEQ ID NO: 4639 - DNA, 20 bp, synthetic construct
  source 1..20: mol_type = other DNA
tcatgtccgaaaggagtgca

SEQ ID NO: 4640 - DNA, 20 bp, synthetic construct
  source 1..20: mol_type = other DNA
agcctgtgctccgacctaac

SEQ ID NO: 4641 - DNA, 20 bp, synthetic construct
  source 1..20: mol_type = other DNA
tccgagtaggcaccaataac

SEQ ID NO: 4642 - DNA, 20 bp, synthetic construct
  source 1..20: mol_type = other DNA
aacagcccggtaccgtcact

SEQ ID NO: 4643 - DNA, 20 bp, synthetic construct
  source 1..20: mol_type = other DNA
gtatggtaaggcacgtaact

SEQ ID NO: 4644 - DNA, 20 bp, synthetic construct
  source 1..20: mol_type = other DNA
taagtctagctcaaacacgg

SEQ ID NO: 4645 - DNA, 20 bp, synthetic construct
  source 1..20: mol_type = other DNA
gttgaacagcgactgaacat

SEQ ID NO: 4646 - DNA, 20 bp, synthetic construct
  source 1..20: mol_type = other DNA
ccgaagtgtgagtgcgattt

SEQ ID NO: 4647 - DNA, 20 bp, synthetic construct
  source 1..20: mol_type = other DNA
agcgattcggttaaatatcc

SEQ ID NO: 4648 - DNA, 20 bp, synthetic construct
  source 1..20: mol_type = other DNA
gggtcacatgcctttcccat

SEQ ID NO: 4649 - DNA, 20 bp, synthetic construct
  source 1..20: mol_type = other DNA
tagttgatgcccgtctgcgg

SEQ ID NO: 4650 - DNA, 20 bp, synthetic construct
  source 1..20: mol_type = other DNA
tgtgatgacgctactggtgc

SEQ ID NO: 4651 - DNA, 20 bp, synthetic construct
  source 1..20: mol_type = other DNA
tacggtttacaagtgtggtc

SEQ ID NO: 4652 - DNA, 20 bp, synthetic construct
  source 1..20: mol_type = other DNA
gtctgatctcagagcgtcca

SEQ ID NO: 4653 - DNA, 20 bp, synthetic construct
  source 1..20: mol_type = other DNA
ttaacgtgccagcagaagat

SEQ ID NO: 4654 - DNA, 20 bp, synthetic construct
  source 1..20: mol_type = other DNA
ggttaattccctgaggcggg

SEQ ID NO: 4655 - DNA, 20 bp, synthetic construct
  source 1..20: mol_type = other DNA
ctggttgtttaggttccaga

SEQ ID NO: 4656 - DNA, 20 bp, synthetic construct
  source 1..20: mol_type = other DNA
aacggtctcaagcgctactt

SEQ ID NO: 4657 - DNA, 20 bp, synthetic construct
  source 1..20: mol_type = other DNA
ttctacctcgcgataggaga

SEQ ID NO: 4658 - DNA, 20 bp, synthetic construct
  source 1..20: mol_type = other DNA
tatatagcatgtccgtggcg

SEQ ID NO: 4659 - DNA, 20 bp, synthetic construct
  source 1..20: mol_type = other DNA
catgcgtctctaatgtctag

SEQ ID NO: 4660 - DNA, 20 bp, synthetic construct
  source 1..20: mol_type = other DNA
tttgcttaacaatccgccat

SEQ ID NO: 4661 - DNA, 20 bp, synthetic construct
  source 1..20: mol_type = other DNA
tccaaatagtcgccctcgtt

SEQ ID NO: 4662 - DNA, 20 bp, synthetic construct
  source 1..20: mol_type = other DNA
ttctgtccctgaacagtgtg

SEQ ID NO: 4663 - DNA, 20 bp, synthetic construct
  source 1..20: mol_type = other DNA
atgggcgcatctgtacttga

SEQ ID NO: 4664 - DNA, 20 bp, synthetic construct
  source 1..20: mol_type = other DNA
gtatcatcaataggctgcaa

SEQ ID NO: 4665 - DNA, 20 bp, synthetic construct
  source 1..20: mol_type = other DNA
aacttgtagctgagagagct

SEQ ID NO: 4666 - DNA, 20 bp, synthetic construct
  source 1..20: mol_type = other DNA
aacgccgtctaagccgagta

SEQ ID NO: 4667 - DNA, 20 bp, synthetic construct
  source 1..20: mol_type = other DNA
tcccgctgagagaatccttg

SEQ ID NO: 4668 - DNA, 20 bp, synthetic construct
  source 1..20: mol_type = other DNA
cttactggcttcatcagaat

SEQ ID NO: 4669 - DNA, 20 bp, synthetic construct
  source 1..20: mol_type = other DNA
atagcgttcgtcctttcacg

SEQ ID NO: 4670 - DNA, 20 bp, synthetic construct
  source 1..20: mol_type = other DNA
tgccattcttgctgttcgta

SEQ ID NO: 4671 - DNA, 20 bp, synthetic construct
  source 1..20: mol_type = other DNA
gggtttcacattaataccgc

SEQ ID NO: 4672 - DNA, 20 bp, synthetic construct
  source 1..20: mol_type = other DNA
gacaccaaaccgcggtattt

SEQ ID NO: 4673 - DNA, 20 bp, synthetic construct
  source 1..20: mol_type = other DNA
aaaccgtgctcgtctgcaat

SEQ ID NO: 4674 - DNA, 20 bp, synthetic construct
  source 1..20: mol_type = other DNA
cttaccaagtgctagtccac

SEQ ID NO: 4675 - DNA, 20 bp, synthetic construct
  source 1..20: mol_type = other DNA
agttctatgctcgtggtaga

SEQ ID NO: 4676 - DNA, 20 bp, synthetic construct
  source 1..20: mol_type = other DNA
atatgtggcggttcaaagac

SEQ ID NO: 4677 - DNA, 20 bp, synthetic construct
  source 1..20: mol_type = other DNA
atcaatagcttaagacagct

SEQ ID NO: 4678 - DNA, 20 bp, synthetic construct
  source 1..20: mol_type = other DNA
gtgtgcaaactgcccgctgt

SEQ ID NO: 4679 - DNA, 20 bp, synthetic construct
  source 1..20: mol_type = other DNA
accaacagtgcgtcgcacga

SEQ ID NO: 4680 - DNA, 20 bp, synthetic construct
  source 1..20: mol_type = other DNA
tggactcctggctcctctca

SEQ ID NO: 4681 - DNA, 20 bp, synthetic construct
  source 1..20: mol_type = other DNA
actctcagagatgcgcaagt

SEQ ID NO: 4682 - DNA, 20 bp, synthetic construct
  source 1..20: mol_type = other DNA
ccgtaaatagagtaataaca

SEQ ID NO: 4683 - DNA, 20 bp, synthetic construct
  source 1..20: mol_type = other DNA
actagcaaacaagttcaaca

SEQ ID NO: 4684 - DNA, 20 bp, synthetic construct
  source 1..20: mol_type = other DNA
gtgttggaacttgccgtagc

SEQ ID NO: 4685 - DNA, 20 bp, synthetic construct
  source 1..20: mol_type = other DNA
tgaggctcaaccctcagcaa

SEQ ID NO: 4686 - DNA, 20 bp, synthetic construct
  source 1..20: mol_type = other DNA
gtagggagaacgttggagac

SEQ ID NO: 4687 - DNA, 20 bp, synthetic construct
  source 1..20: mol_type = other DNA
gtacggactcttgcatggct

SEQ ID NO: 4688 - DNA, 20 bp, synthetic construct
  source 1..20: mol_type = other DNA
ggccagatcgacttcacggt

SEQ ID NO: 4689 - DNA, 20 bp, synthetic construct
  source 1..20: mol_type = other DNA
gtgggaaatgccggttctgg

SEQ ID NO: 4690 - DNA, 20 bp, synthetic construct
  source 1..20: mol_type = other DNA
tcccgtgtaacatccctaaa

SEQ ID NO: 4691 - DNA, 20 bp, synthetic construct
  source 1..20: mol_type = other DNA
ctcagcgtagtaatcgctta

SEQ ID NO: 4692 - DNA, 20 bp, synthetic construct
  source 1..20: mol_type = other DNA
gattaaccatcaaccagtct

SEQ ID NO: 4693 - DNA, 20 bp, synthetic construct
  source 1..20: mol_type = other DNA
cggcagttacgttcatgcgc

SEQ ID NO: 4694 - DNA, 20 bp, synthetic construct
  source 1..20: mol_type = other DNA
ggctttactagtattaccat

SEQ ID NO: 4695 - DNA, 20 bp, synthetic construct
  source 1..20: mol_type = other DNA
agctcggacctctattacat

SEQ ID NO: 4696 - DNA, 20 bp, synthetic construct
  source 1..20: mol_type = other DNA
tacgtggcgccgaacactta

SEQ ID NO: 4697 - DNA, 20 bp, synthetic construct
  source 1..20: mol_type = other DNA
ataataagcagtgcctatcc

SEQ ID NO: 4698 - DNA, 20 bp, synthetic construct
  source 1..20: mol_type = other DNA
attggtcccgcaattacacg

SEQ ID NO: 4699 - DNA, 20 bp, synthetic construct
  source 1..20: mol_type = other DNA
ggcggcactcgcgattgtgt

SEQ ID NO: 4700 - DNA, 20 bp, synthetic construct
  source 1..20: mol_type = other DNA
agctaagcgtgttacaagga

SEQ ID NO: 4701 - DNA, 20 bp, synthetic construct
  source 1..20: mol_type = other DNA
cgcgggagtctccgtccaaa

SEQ ID NO: 4702 - DNA, 20 bp, synthetic construct
  source 1..20: mol_type = other DNA
aatcagacacagtttcaccg

SEQ ID NO: 4703 - DNA, 20 bp, synthetic construct
  source 1..20: mol_type = other DNA
atgttcgtactggtgataag

SEQ ID NO: 4704 - DNA, 20 bp, synthetic construct
  source 1..20: mol_type = other DNA
gtgtccttgcctccgacgag

SEQ ID NO: 4705 - DNA, 20 bp, synthetic construct
  source 1..20: mol_type = other DNA
cctgctaattcggcctatgt

SEQ ID NO: 4706 - DNA, 20 bp, synthetic construct
  source 1..20: mol_type = other DNA
catcactcctagacaggctg

SEQ ID NO: 4707 - DNA, 20 bp, synthetic construct
  source 1..20: mol_type = other DNA
gagcagttaatccgccatcc

SEQ ID NO: 4708 - DNA, 20 bp, synthetic construct
  source 1..20: mol_type = other DNA
catggtctttcgcctggcgc

SEQ ID NO: 4709 - DNA, 20 bp, synthetic construct
  source 1..20: mol_type = other DNA
gcgctaactcagaacactgc

SEQ ID NO: 4710 - DNA, 20 bp, synthetic construct
  source 1..20: mol_type = other DNA
taagagcggcagctctgcta

SEQ ID NO: 4711 - DNA, 20 bp, synthetic construct
  source 1..20: mol_type = other DNA
cgcacttccgccaaatattc

SEQ ID NO: 4712 - DNA, 20 bp, synthetic construct
  source 1..20: mol_type = other DNA
tttatgtatatctcccagtg

SEQ ID NO: 4713 - DNA, 20 bp, synthetic construct
  source 1..20: mol_type = other DNA
cattgcgccaagaatggcta

SEQ ID NO: 4714 - DNA, 20 bp, synthetic construct
  source 1..20: mol_type = other DNA
acttagaggccaatcgttcg

SEQ ID NO: 4715 - DNA, 20 bp, synthetic construct
  source 1..20: mol_type = other DNA
gtgagacgacaaattgcgtt

SEQ ID NO: 4716 - DNA, 20 bp, synthetic construct
  source 1..20: mol_type = other DNA
ctaagacgattacgaaaggc

SEQ ID NO: 4717 - DNA, 20 bp, synthetic construct
  source 1..20: mol_type = other DNA
ccgtcggtcataagagggta

SEQ ID NO: 4718 - DNA, 20 bp, synthetic construct
  source 1..20: mol_type = other DNA
taccttggcactctaaacaa

SEQ ID NO: 4719 - DNA, 20 bp, synthetic construct
  source 1..20: mol_type = other DNA
tagaactaggacggatctcg

SEQ ID NO: 4720 - DNA, 20 bp, synthetic construct
  source 1..20: mol_type = other DNA
tgctggatagagtgacaccg

SEQ ID NO: 4721 - DNA, 20 bp, synthetic construct
  source 1..20: mol_type = other DNA
cggtgaatacaggtaaagct

SEQ ID NO: 4722 - DNA, 20 bp, synthetic construct
  source 1..20: mol_type = other DNA
gtcccgcatgtttcaggcga

SEQ ID NO: 4723 - DNA, 20 bp, synthetic construct
  source 1..20: mol_type = other DNA
tgtatagagcaatcgcactg

SEQ ID NO: 4724 - DNA, 20 bp, synthetic construct
  source 1..20: mol_type = other DNA
aacttccaggtttgaagtcg

SEQ ID NO: 4725 - DNA, 20 bp, synthetic construct
  source 1..20: mol_type = other DNA
aacacatacggcttagcatc

SEQ ID NO: 4726 - DNA, 20 bp, synthetic construct
  source 1..20: mol_type = other DNA
aacatctcgtggctcggcgc

SEQ ID NO: 4727 - DNA, 20 bp, synthetic construct
  source 1..20: mol_type = other DNA
atgcatcccttgtgtccata

SEQ ID NO: 4728 - DNA, 20 bp, synthetic construct
  source 1..20: mol_type = other DNA
ttcgtgatgtggagtggctg

SEQ ID NO: 4729 - DNA, 20 bp, synthetic construct
  source 1..20: mol_type = other DNA
ccagttacgagtggacttag

SEQ ID NO: 4730 - DNA, 20 bp, synthetic construct
  source 1..20: mol_type = other DNA
agcttgtttactacggcgag

SEQ ID NO: 4731 - DNA, 20 bp, synthetic construct
  source 1..20: mol_type = other DNA
tgaggcggatgtcgtaggct

SEQ ID NO: 4732 - DNA, 20 bp, synthetic construct
  source 1..20: mol_type = other DNA
tatgtaaatccacaaaccaa

SEQ ID NO: 4733 - DNA, 20 bp, synthetic construct
  source 1..20: mol_type = other DNA
aaagaactttctcgtcagag

SEQ ID NO: 4734 - DNA, 20 bp, synthetic construct
  source 1..20: mol_type = other DNA
ccatcccagcaggttgatgc

SEQ ID NO: 4735 - DNA, 20 bp, synthetic construct
  source 1..20: mol_type = other DNA
gcagttagcgatgtgtagcc

SEQ ID NO: 4736 - DNA, 20 bp, synthetic construct
  source 1..20: mol_type = other DNA
ggttcgtgagcgaggtgata

SEQ ID NO: 4737 - DNA, 20 bp, synthetic construct
  source 1..20: mol_type = other DNA
gcccacataatattcctccc

SEQ ID NO: 4738 - DNA, 20 bp, synthetic construct
  source 1..20: mol_type = other DNA
ggattcccggttggaagtgc

SEQ ID NO: 4739 - DNA, 20 bp, synthetic construct
  source 1..20: mol_type = other DNA
cactctagtagttccaataa

SEQ ID NO: 4740 - DNA, 20 bp, synthetic construct
  source 1..20: mol_type = other DNA
agacaaatccattacacctg

SEQ ID NO: 4741 - DNA, 20 bp, synthetic construct
  source 1..20: mol_type = other DNA
gaggtttggcaccggtttac

SEQ ID NO: 4742 - DNA, 20 bp, synthetic construct
  source 1..20: mol_type = other DNA
aaccacgtttctatcaggtc

SEQ ID NO: 4743 - DNA, 20 bp, synthetic construct
  source 1..20: mol_type = other DNA
acaacgcgcgtgcccagtat

SEQ ID NO: 4744 - DNA, 20 bp, synthetic construct
  source 1..20: mol_type = other DNA
tggacatgggtgacgactat

SEQ ID NO: 4745 - DNA, 20 bp, synthetic construct
  source 1..20: mol_type = other DNA
aatatttgcccacctggagt

SEQ ID NO: 4746 - DNA, 20 bp, synthetic construct
  source 1..20: mol_type = other DNA
actataattaagcccaggca

SEQ ID NO: 4747 - DNA, 20 bp, synthetic construct
  source 1..20: mol_type = other DNA
tgagttaatgttaggctcta

SEQ ID NO: 4748 - DNA, 20 bp, synthetic construct
  source 1..20: mol_type = other DNA
aacgatccgttaactgtcga

SEQ ID NO: 4749 - DNA, 20 bp, synthetic construct
  source 1..20: mol_type = other DNA
tacccggagggtcacgttgt

SEQ ID NO: 4750 - DNA, 20 bp, synthetic construct
  source 1..20: mol_type = other DNA
gccacatattggacaagatc

SEQ ID NO: 4751 - DNA, 20 bp, synthetic construct
  source 1..20: mol_type = other DNA
gcgcgtagtcaaagcaacta

SEQ ID NO: 4752 - DNA, 20 bp, synthetic construct
  source 1..20: mol_type = other DNA
ataggcaaatctcacttcta

SEQ ID NO: 4753 - DNA, 20 bp, synthetic construct
  source 1..20: mol_type = other DNA
tgttgtcgtacgggcacact

SEQ ID NO: 4754 - DNA, 20 bp, synthetic construct
  source 1..20: mol_type = other DNA
atcaccacaggaagcaacgc

SEQ ID NO: 4755 - DNA, 20 bp, synthetic construct
  source 1..20: mol_type = other DNA
tccctaaacggatgatcgct

SEQ ID NO: 4756 - DNA, 20 bp, synthetic construct
  source 1..20: mol_type = other DNA
ggtaacctacttagcgggta

SEQ ID NO: 4757 - DNA, 20 bp, synthetic construct
  source 1..20: mol_type = other DNA
agccggaatatcgcgttctg

SEQ ID NO: 4758 - DNA, 20 bp, synthetic construct
  source 1..20: mol_type = other DNA
attactaccgttatgggtga

SEQ ID NO: 4759 - DNA, 20 bp, synthetic construct
  source 1..20: mol_type = other DNA
ctcaccggcaagatgatggc

SEQ ID NO: 4760 - DNA, 20 bp, synthetic construct
  source 1..20: mol_type = other DNA
ccgctcgtgatgctatggcg

SEQ ID NO: 4761 - DNA, 20 bp, synthetic construct
  source 1..20: mol_type = other DNA
ttcgtgtcacttgcgcgccc

SEQ ID NO: 4762 - DNA, 20 bp, synthetic construct
  source 1..20: mol_type = other DNA
tcccgtgacgtatagcacta

SEQ ID NO: 4763 - DNA, 20 bp, synthetic construct
  source 1..20: mol_type = other DNA
gtgtcggtatactgagccat

SEQ ID NO: 4764 - DNA, 20 bp, synthetic construct
  source 1..20: mol_type = other DNA
caacctcccggaatcgcgag

SEQ ID NO: 4765 - DNA, 20 bp, synthetic construct
  source 1..20: mol_type = other DNA
taaccatgcgacaccgctcc

SEQ ID NO: 4766 - DNA, 20 bp, synthetic construct
  source 1..20: mol_type = other DNA
ttatgctaactccgttgcct

SEQ ID NO: 4767 - DNA, 20 bp, synthetic construct
  source 1..20: mol_type = other DNA
cagggagacccagatggtcg

SEQ ID NO: 4768 - DNA, 20 bp, synthetic construct
  source 1..20: mol_type = other DNA
agcccggcatgcaacacatg

SEQ ID NO: 4769 - DNA, 20 bp, synthetic construct
  source 1..20: mol_type = other DNA
aggagcgcaaccaggcacac

SEQ ID NO: 4770 - DNA, 20 bp, synthetic construct
  source 1..20: mol_type = other DNA
gccatttcttcaaactcacg

SEQ ID NO: 4771 - DNA, 20 bp, synthetic construct
  source 1..20: mol_type = other DNA
acggctggaacctcactgac

SEQ ID NO: 4772 - DNA, 20 bp, synthetic construct
  source 1..20: mol_type = other DNA
tagcgtcacgctgcacccgt

SEQ ID NO: 4773 - DNA, 20 bp, synthetic construct
  source 1..20: mol_type = other DNA
gcacgacggcgtccttccaa

SEQ ID NO: 4774 - DNA, 20 bp, synthetic construct
  source 1..20: mol_type = other DNA
cacgacctgtggctcagttg

SEQ ID NO: 4775 - DNA, 20 bp, synthetic construct
  source 1..20: mol_type = other DNA
ccaatgtgcgttcctgccgt

SEQ ID NO: 4776 - DNA, 20 bp, synthetic construct
  source 1..20: mol_type = other DNA
tagatacttaatcctctgtc

SEQ ID NO: 4777 - DNA, 20 bp, synthetic construct
  source 1..20: mol_type = other DNA
tatcatcggcctcgtcacaa

SEQ ID NO: 4778 - DNA, 20 bp, synthetic construct
  source 1..20: mol_type = other DNA
gtttggtgccttctatattc

SEQ ID NO: 4779 - DNA, 20 bp, synthetic construct
  source 1..20: mol_type = other DNA
tgttatttccgatactggcg

SEQ ID NO: 4780 - DNA, 20 bp, synthetic construct
  source 1..20: mol_type = other DNA
aagtcagcattcacaactgc

SEQ ID NO: 4781 - DNA, 20 bp, synthetic construct
  source 1..20: mol_type = other DNA
gcgttacagtctgatgttgc

SEQ ID NO: 4782 - DNA, 20 bp, synthetic construct
  source 1..20: mol_type = other DNA
actgaagtccgattgtggta

SEQ ID NO: 4783 - DNA, 20 bp, synthetic construct
  source 1..20: mol_type = other DNA
cattgacgctcgaatacgtc

SEQ ID NO: 4784 - DNA, 20 bp, synthetic construct
  source 1..20: mol_type = other DNA
agcattaaacttggacatgg

SEQ ID NO: 4785 - DNA, 20 bp, synthetic construct
  source 1..20: mol_type = other DNA
aacgagcaacttctccggtc

SEQ ID NO: 4786 - DNA, 20 bp, synthetic construct
  source 1..20: mol_type = other DNA
aacagtgaagttgaacacat

SEQ ID NO: 4787 - DNA, 20 bp, synthetic construct
  source 1..20: mol_type = other DNA
gaatgaaccctgatgcgtgc

SEQ ID NO: 4788 - DNA, 20 bp, synthetic construct
  source 1..20: mol_type = other DNA
agtggaaagttaacagtcac

SEQ ID NO: 4789 - DNA, 20 bp, synthetic construct
  source 1..20: mol_type = other DNA
gaactgcgtgtatatcgccg

SEQ ID NO: 4790 - DNA, 20 bp, synthetic construct
  source 1..20: mol_type = other DNA
aggagttctcagagacatac

SEQ ID NO: 4791 - DNA, 20 bp, synthetic construct
  source 1..20: mol_type = other DNA
ccttgcaagcggaactttcc

SEQ ID NO: 4792 - DNA, 20 bp, synthetic construct
  source 1..20: mol_type = other DNA
tgaaggagaaacgggatcga

SEQ ID NO: 4793 - DNA, 20 bp, synthetic construct
  source 1..20: mol_type = other DNA
agtagaggcgcgataacagg

SEQ ID NO: 4794 - DNA, 20 bp, synthetic construct
  source 1..20: mol_type = other DNA
ttacccatcactgcattgcc

SEQ ID NO: 4795 - DNA, 20 bp, synthetic construct
  source 1..20: mol_type = other DNA
cgtaaacgacgataatcggc

SEQ ID NO: 4796 - DNA, 20 bp, synthetic construct
  source 1..20: mol_type = other DNA
ccactatcgacgattaatct

SEQ ID NO: 4797 - DNA, 20 bp, synthetic construct
  source 1..20: mol_type = other DNA
ctcgctacgtttggagcgat

SEQ ID NO: 4798 - DNA, 20 bp, synthetic construct
  source 1..20: mol_type = other DNA
atacgagtattaccgcatga

SEQ ID NO: 4799 - DNA, 20 bp, synthetic construct
  source 1..20: mol_type = other DNA
gccaccggctttacaaccag

SEQ ID NO: 4800 - DNA, 20 bp, synthetic construct
  source 1..20: mol_type = other DNA
ttgtggtcgtgtacgttcta

SEQ ID NO: 4801 - DNA, 20 bp, synthetic construct
  source 1..20: mol_type = other DNA
tttcttatgagacggcgagt

SEQ ID NO: 4802 - DNA, 20 bp, synthetic construct
  source 1..20: mol_type = other DNA
gtagtgctgaacagtcttga

SEQ ID NO: 4803 - DNA, 20 bp, synthetic construct
  source 1..20: mol_type = other DNA
gaatcgcagtctcgtctagg

SEQ ID NO: 4804 - DNA, 20 bp, synthetic construct
  source 1..20: mol_type = other DNA
cattcctttcggtaatacag

SEQ ID NO: 4805 - DNA, 20 bp, synthetic construct
  source 1..20: mol_type = other DNA
agcaagctactaactgggtt

SEQ ID NO: 4806 - DNA, 20 bp, synthetic construct
  source 1..20: mol_type = other DNA
aatttgactcagttgagagg

SEQ ID NO: 4807 - DNA, 20 bp, synthetic construct
  source 1..20: mol_type = other DNA
gagcgtgcgaactacgatag

SEQ ID NO: 4808 - DNA, 20 bp, synthetic construct
  source 1..20: mol_type = other DNA
ggtcactgccaatccgcaga

SEQ ID NO: 4809 - DNA, 20 bp, synthetic construct
  source 1..20: mol_type = other DNA
agggagactgactcgtgccg

SEQ ID NO: 4810 - DNA, 20 bp, synthetic construct
  source 1..20: mol_type = other DNA
tgaaataagagatcaagtgc

SEQ ID NO: 4811 - DNA, 20 bp, synthetic construct
  source 1..20: mol_type = other DNA
gggtgatcgacacttctgtt

SEQ ID NO: 4812 - DNA, 20 bp, synthetic construct
  source 1..20: mol_type = other DNA
acgacacgactctgatggca

SEQ ID NO: 4813 - DNA, 20 bp, synthetic construct
  source 1..20: mol_type = other DNA
actcgcgagtgtgtgacgcc

SEQ ID NO: 4814 - DNA, 20 bp, synthetic construct
  source 1..20: mol_type = other DNA
acggctctgatggtcccgat

SEQ ID NO: 4815 - DNA, 20 bp, synthetic construct
  source 1..20: mol_type = other DNA
tgacggtgctaggtcctaga

SEQ ID NO: 4816 - DNA, 20 bp, synthetic construct
  source 1..20: mol_type = other DNA
cgatgatccaatgacccagc

SEQ ID NO: 4817 - DNA, 20 bp, synthetic construct
  source 1..20: mol_type = other DNA
atattcagccttgtttcagt

SEQ ID NO: 4818 - DNA, 20 bp, synthetic construct
  source 1..20: mol_type = other DNA
accgctgcctgacgattatc

SEQ ID NO: 4819 - DNA, 20 bp, synthetic construct
  source 1..20: mol_type = other DNA
ttccagggtggaaatgacga

SEQ ID NO: 4820 - DNA, 20 bp, synthetic construct
  source 1..20: mol_type = other DNA
gattactcatccaaaggctt

SEQ ID NO: 4821 - DNA, 20 bp, synthetic construct
  source 1..20: mol_type = other DNA
ataaccagacactgtggagt

SEQ ID NO: 4822 - DNA, 20 bp, synthetic construct
  source 1..20: mol_type = other DNA
cactgcttaccgaaactgat

SEQ ID NO: 4823 - DNA, 20 bp, synthetic construct
  source 1..20: mol_type = other DNA
tgtcatggtcattcggttta

SEQ ID NO: 4824 - DNA, 20 bp, synthetic construct
  source 1..20: mol_type = other DNA
tactttctgcaccgtccagc

SEQ ID NO: 4825 - DNA, 20 bp, synthetic construct
  source 1..20: mol_type = other DNA
ttattctcatacgtggtcta

SEQ ID NO: 4826 - DNA, 20 bp, synthetic construct
  source 1..20: mol_type = other DNA
caactagccgatcccttccg

SEQ ID NO: 4827 - DNA, 20 bp, synthetic construct
  source 1..20: mol_type = other DNA
aaccaaagtcactcacctta

SEQ ID NO: 4828 - DNA, 20 bp, synthetic construct
  source 1..20: mol_type = other DNA
attggtgggatgaactagta

SEQ ID NO: 4829 - DNA, 20 bp, synthetic construct
  source 1..20: mol_type = other DNA
actctggatccagcaccgcc

SEQ ID NO: 4830 - DNA, 20 bp, synthetic construct
  source 1..20: mol_type = other DNA
ttgggctatccgacatatac

SEQ ID NO: 4831 - DNA, 20 bp, synthetic construct
  source 1..20: mol_type = other DNA
caaactcttcctacgacagt

SEQ ID NO: 4832 - DNA, 20 bp, synthetic construct
  source 1..20: mol_type = other DNA
ctgctcatatcagcccggcc

SEQ ID NO: 4833 - DNA, 20 bp, synthetic construct
  source 1..20: mol_type = other DNA
cccacttatgaactttgtac

SEQ ID NO: 4834 - DNA, 20 bp, synthetic construct
  source 1..20: mol_type = other DNA
gactgcccacttagatgcag

SEQ ID NO: 4835 - DNA, 20 bp, synthetic construct
  source 1..20: mol_type = other DNA
ggtcatcaggtcctagcgcc

SEQ ID NO: 4836 - DNA, 20 bp, synthetic construct
  source 1..20: mol_type = other DNA
cccagtgtagtcgtgccatt

SEQ ID NO: 4837 - DNA, 20 bp, synthetic construct
  source 1..20: mol_type = other DNA
cccactcttatgtgtattgg

SEQ ID NO: 4838 - DNA, 20 bp, synthetic construct
  source 1..20: mol_type = other DNA
gtaaggtatattaacaaggg

SEQ ID NO: 4839 - DNA, 20 bp, synthetic construct
  source 1..20: mol_type = other DNA
ccgacaatttcgggcgcaat

SEQ ID NO: 4840 - DNA, 20 bp, synthetic construct
  source 1..20: mol_type = other DNA
ctacctcccttatcccgatt

SEQ ID NO: 4841 - DNA, 20 bp, synthetic construct
  source 1..20: mol_type = other DNA
taagttcggtagacgagcga

SEQ ID NO: 4842 - DNA, 20 bp, synthetic construct
  source 1..20: mol_type = other DNA
actacttcgggaaggtttga

SEQ ID NO: 4843 - DNA, 20 bp, synthetic construct
  source 1..20: mol_type = other DNA
gccgtctacagaggttgaat

SEQ ID NO: 4844 - DNA, 20 bp, synthetic construct
  source 1..20: mol_type = other DNA
agtcccggttctgcactcga

SEQ ID NO: 4845 - DNA, 20 bp, synthetic construct
  source 1..20: mol_type = other DNA
tagtgccgcacggtgtttaa

SEQ ID NO: 4846 - DNA, 20 bp, synthetic construct
  source 1..20: mol_type = other DNA
aaagccagatatacactagc

SEQ ID NO: 4847 - DNA, 20 bp, synthetic construct
  source 1..20: mol_type = other DNA
cagatttggatttgggtccg

SEQ ID NO: 4848 - DNA, 20 bp, synthetic construct
  source 1..20: mol_type = other DNA
tcgtgaattgcgaacagctg

SEQ ID NO: 4849 - DNA, 20 bp, synthetic construct
  source 1..20: mol_type = other DNA
tagcgttgctacacccgtat

SEQ ID NO: 4850 - DNA, 20 bp, synthetic construct
  source 1..20: mol_type = other DNA
tcgcaagtaggatatgtatt

SEQ ID NO: 4851 - DNA, 20 bp, synthetic construct
  source 1..20: mol_type = other DNA
gagcacggctagcatgcgtc

SEQ ID NO: 4852 - DNA, 20 bp, synthetic construct
  source 1..20: mol_type = other DNA
tatcataggcgatataaagg

SEQ ID NO: 4853 - DNA, 20 bp, synthetic construct
  source 1..20: mol_type = other DNA
ggattaatcagagatacaga

SEQ ID NO: 4854 - DNA, 20 bp, synthetic construct
  source 1..20: mol_type = other DNA
ggagaatgcttgtgtaaatc

SEQ ID NO: 4855 - DNA, 20 bp, synthetic construct
  source 1..20: mol_type = other DNA
gcctcggacttgcagggatc

SEQ ID NO: 4856 - DNA, 20 bp, synthetic construct
  source 1..20: mol_type = other DNA
taccatctgaatggatctca

SEQ ID NO: 4857 - DNA, 20 bp, synthetic construct
  source 1..20: mol_type = other DNA
atgcggctgtgagttctagt

SEQ ID NO: 4858 - DNA, 20 bp, synthetic construct
  source 1..20: mol_type = other DNA
ggtctaaatgagataacagg

SEQ ID NO: 4859 - DNA, 20 bp, synthetic construct
  source 1..20: mol_type = other DNA
tcccgtacctggaaggagct

SEQ ID NO: 4860 - DNA, 20 bp, synthetic construct
  source 1..20: mol_type = other DNA
gcatctaagacaggtttgtc

SEQ ID NO: 4861 - DNA, 20 bp, synthetic construct
  source 1..20: mol_type = other DNA
taggtggctgtagtcgagtc

SEQ ID NO: 4862 - DNA, 20 bp, synthetic construct
  source 1..20: mol_type = other DNA
tgtttcgtatatcccaagca

SEQ ID NO: 4863 - DNA, 20 bp, synthetic construct
  source 1..20: mol_type = other DNA
actgctcttaccagaagagg

SEQ ID NO: 4864 - DNA, 20 bp, synthetic construct
  source 1..20: mol_type = other DNA
gacctttgagtgttcgatat

SEQ ID NO: 4865 - DNA, 20 bp, synthetic construct
  source 1..20: mol_type = other DNA
aaagtacaactgaacccgga

SEQ ID NO: 4866 - DNA, 20 bp, synthetic construct
  source 1..20: mol_type = other DNA
cgtcattgctggcatagcca

SEQ ID NO: 4867 - DNA, 20 bp, synthetic construct
  source 1..20: mol_type = other DNA
ccgctgataagtaacctaat

SEQ ID NO: 4868 - DNA, 20 bp, synthetic construct
  source 1..20: mol_type = other DNA
gtatcgcgcgagctatgtta

SEQ ID NO: 4869 - DNA, 20 bp, synthetic construct
  source 1..20: mol_type = other DNA
gggctacgtctctctattac

SEQ ID NO: 4870 - DNA, 20 bp, synthetic construct
  source 1..20: mol_type = other DNA
aggcttgtgcattcggaagt

SEQ ID NO: 4871 - DNA, 20 bp, synthetic construct
  source 1..20: mol_type = other DNA
tctacagtacattgtcgtgt

SEQ ID NO: 4872 - DNA, 20 bp, synthetic construct
  source 1..20: mol_type = other DNA
agaccgggcatttgggtctt

SEQ ID NO: 4873 - DNA, 20 bp, synthetic construct
  source 1..20: mol_type = other DNA
catgaggagaatcgggacta

SEQ ID NO: 4874 - DNA, 20 bp, synthetic construct
  source 1..20: mol_type = other DNA
gaactaccattattactgcc

SEQ ID NO: 4875 - DNA, 20 bp, synthetic construct
  source 1..20: mol_type = other DNA
ttcctgagacgaggcgctag

SEQ ID NO: 4876 - DNA, 20 bp, synthetic construct
  source 1..20: mol_type = other DNA
cacatagttgcagacaagtt

SEQ ID NO: 4877 - DNA, 20 bp, synthetic construct
  source 1..20: mol_type = other DNA
aaacgcgtcctaagagttcc

SEQ ID NO: 4878 - DNA, 20 bp, synthetic construct
  source 1..20: mol_type = other DNA
ctttgcgaggtctgccgaat

SEQ ID NO: 4879 - DNA, 20 bp, synthetic construct
  source 1..20: mol_type = other DNA
gcgcttcgaataggaatgcg

SEQ ID NO: 4880 - DNA, 20 bp, synthetic construct
  source 1..20: mol_type = other DNA
tcactagccattaattgagt

SEQ ID NO: 4881 - DNA, 20 bp, synthetic construct
  source 1..20: mol_type = other DNA
ctatcatttggatctctcgc

SEQ ID NO: 4882 - DNA, 20 bp, synthetic construct
  source 1..20: mol_type = other DNA
ctctggagcctactccttat

SEQ ID NO: 4883 - DNA, 20 bp, synthetic construct
  source 1..20: mol_type = other DNA
ctctaaatgtctttagctct

SEQ ID NO: 4884 - DNA, 20 bp, synthetic construct
  source 1..20: mol_type = other DNA
ggtgcgattacaaagaatgt

SEQ ID NO: 4885 - DNA, 20 bp, synthetic construct
  source 1..20: mol_type = other DNA
cacacaccgatctgcttcta

SEQ ID NO: 4886 - DNA, 20 bp, synthetic construct
  source 1..20: mol_type = other DNA
ctgagctgccacaatactcc

SEQ ID NO: 4887 - DNA, 20 bp, synthetic construct
  source 1..20: mol_type = other DNA
taataatagccgtctgtaca

SEQ ID NO: 4888 - DNA, 20 bp, synthetic construct
  source 1..20: mol_type = other DNA
cgacggacggtttatactcg

SEQ ID NO: 4889 - DNA, 20 bp, synthetic construct
  source 1..20: mol_type = other DNA
gcatttcagagttgctgagg

SEQ ID NO: 4890 - DNA, 20 bp, synthetic construct
  source 1..20: mol_type = other DNA
tgcacttaagtctagcgtac

SEQ ID NO: 4891 - DNA, 20 bp, synthetic construct
  source 1..20: mol_type = other DNA
aatagtatgaacctcaggaa

SEQ ID NO: 4892 - DNA, 20 bp, synthetic construct
  source 1..20: mol_type = other DNA
catgtagtttaaatggccct

SEQ ID NO: 4893 - DNA, 20 bp, synthetic construct
  source 1..20: mol_type = other DNA
tctgaaatcacgacttgggt

SEQ ID NO: 4894 - DNA, 20 bp, synthetic construct
  source 1..20: mol_type = other DNA
aggtctgccgctttatgctt

SEQ ID NO: 4895 - DNA, 20 bp, synthetic construct
  source 1..20: mol_type = other DNA
ctcgccacaatacgacacgt

SEQ ID NO: 4896 - DNA, 20 bp, synthetic construct
  source 1..20: mol_type = other DNA
cgtgtgcacttaaggatgac

SEQ ID NO: 4897 - DNA, 20 bp, synthetic construct
  source 1..20: mol_type = other DNA
cttgagcggtacgattctcg

SEQ ID NO: 4898 - DNA, 20 bp, synthetic construct
  source 1..20: mol_type = other DNA
aggctagtacaggaagttag

SEQ ID NO: 4899 - DNA, 20 bp, synthetic construct
  source 1..20: mol_type = other DNA
tggacgcttagaaccgtgaa

SEQ ID NO: 4900 - DNA, 20 bp, synthetic construct
  source 1..20: mol_type = other DNA
atggctcacgtgctaagcat

SEQ ID NO: 4901 - DNA, 20 bp, synthetic construct
  source 1..20: mol_type = other DNA
gtcaaagataagtggtcaga

SEQ ID NO: 4902 - DNA, 20 bp, synthetic construct
  source 1..20: mol_type = other DNA
gaacccaaactatctacaga

SEQ ID NO: 4903 - DNA, 20 bp, synthetic construct
  source 1..20: mol_type = other DNA
ctacaatgctcgccctgtag

SEQ ID NO: 4904 - DNA, 20 bp, synthetic construct
  source 1..20: mol_type = other DNA
cgactcgtatggcaatctga

SEQ ID NO: 4905 - DNA, 20 bp, synthetic construct
  source 1..20: mol_type = other DNA
cagtggccttccataattca

SEQ ID NO: 4906 - DNA, 20 bp, synthetic construct
  source 1..20: mol_type = other DNA
aataagcaagcgaaccaatt

SEQ ID NO: 4907 - DNA, 20 bp, synthetic construct
  source 1..20: mol_type = other DNA
tttagggcgaagtttatggg

SEQ ID NO: 4908 - DNA, 20 bp, synthetic construct
  source 1..20: mol_type = other DNA
gacttggtctctaaagttta

SEQ ID NO: 4909 - DNA, 20 bp, synthetic construct
  source 1..20: mol_type = other DNA
attacttgactgccctgcga

SEQ ID NO: 4910 - DNA, 20 bp, synthetic construct
  source 1..20: mol_type = other DNA
gatggaacccggaaccggtt

SEQ ID NO: 4911 - DNA, 20 bp, synthetic construct
  source 1..20: mol_type = other DNA
tcgttattccatgacaggag

SEQ ID NO: 4912 - DNA, 20 bp, synthetic construct
  source 1..20: mol_type = other DNA
cgaccttggtgcttattggc

SEQ ID NO: 4913 - DNA, 20 bp, synthetic construct
  source 1..20: mol_type = other DNA
atccaatgttgagaaatccc

SEQ ID NO: 4914 - DNA, 20 bp, synthetic construct
  source 1..20: mol_type = other DNA
gtcgaggctccgtcactacc

SEQ ID NO: 4915 - DNA, 20 bp, synthetic construct
  source 1..20: mol_type = other DNA
gctgcacaggccacgcgtaa

SEQ ID NO: 4916 - DNA, 20 bp, synthetic construct
  source 1..20: mol_type = other DNA
gtaacagtgtccggatagct

SEQ ID NO: 4917 - DNA, 20 bp, synthetic construct
  source 1..20: mol_type = other DNA
gtgcataagtcccatggagt

SEQ ID NO: 4918 - DNA, 20 bp, synthetic construct
  source 1..20: mol_type = other DNA
catcgcgaaggtggttccca

SEQ ID NO: 4919 - DNA, 20 bp, synthetic construct
  source 1..20: mol_type = other DNA
gggatgatagcaaaccacgc

SEQ ID NO: 4920 - DNA, 20 bp, synthetic construct
  source 1..20: mol_type = other DNA
caatggattgcgtgcgattg

SEQ ID NO: 4921 - DNA, 20 bp, synthetic construct
  source 1..20: mol_type = other DNA
gtatccaaagaacccgcggt

SEQ ID NO: 4922 - DNA, 20 bp, synthetic construct
  source 1..20: mol_type = other DNA
gccataacgcgaggatatgg

SEQ ID NO: 4923 - DNA, 20 bp, synthetic construct
  source 1..20: mol_type = other DNA
cttgccaaactgactgagaa

SEQ ID NO: 4924 - DNA, 20 bp, synthetic construct
  source 1..20: mol_type = other DNA
tctcacgcgctatagtctct

SEQ ID NO: 4925 - DNA, 20 bp, synthetic construct
  source 1..20: mol_type = other DNA
gagcagttgcgatgttacgc

SEQ ID NO: 4926 - DNA, 20 bp, synthetic construct
  source 1..20: mol_type = other DNA
ataacagccgcattgcatgg

SEQ ID NO: 4927 - DNA, 20 bp, synthetic construct
  source 1..20: mol_type = other DNA
tcaaacgctcaggaaacgca

SEQ ID NO: 4928 - DNA, 20 bp, synthetic construct
  source 1..20: mol_type = other DNA
ccggtacatgaactccagcg

SEQ ID NO: 4929 - DNA, 20 bp, synthetic construct
  source 1..20: mol_type = other DNA
caatattagagaaagaaccc

SEQ ID NO: 4930 - DNA, 20 bp, synthetic construct
  source 1..20: mol_type = other DNA
agcttatctaagtctctttc

SEQ ID NO: 4931 - DNA, 20 bp, synthetic construct
  source 1..20: mol_type = other DNA
ggacatgtgaacttacgcgc

SEQ ID NO: 4932 - DNA, 20 bp, synthetic construct
  source 1..20: mol_type = other DNA
gcagaagggtcctatgtttg

SEQ ID NO: 4933 - DNA, 20 bp, synthetic construct
  source 1..20: mol_type = other DNA
tatatcaagggccaagaagt

SEQ ID NO: 4934 - DNA, 20 bp, synthetic construct
  source 1..20: mol_type = other DNA
cgagaacttaattagccatc

SEQ ID NO: 4935 - DNA, 20 bp, synthetic construct
  source 1..20: mol_type = other DNA
tcccaacggtcgtttgcagg

SEQ ID NO: 4936 - DNA, 20 bp, synthetic construct
  source 1..20: mol_type = other DNA
cgtgcgctccttaagcctca

SEQ ID NO: 4937 - DNA, 20 bp, synthetic construct
  source 1..20: mol_type = other DNA
gcaagagcttcgtcccaatt

SEQ ID NO: 4938 - DNA, 20 bp, synthetic construct
  source 1..20: mol_type = other DNA
gtcagacgtttccacggtat

SEQ ID NO: 4939 - DNA, 20 bp, synthetic construct
  source 1..20: mol_type = other DNA
gcccactgacacgttgcttg

SEQ ID NO: 4940 - DNA, 20 bp, synthetic construct
  source 1..20: mol_type = other DNA
atataactcacatggcggat

SEQ ID NO: 4941 - DNA, 20 bp, synthetic construct
  source 1..20: mol_type = other DNA
actcccgaacgttggctctg

SEQ ID NO: 4942 - DNA, 20 bp, synthetic construct
  source 1..20: mol_type = other DNA
gggaatctcgtaggaggtga

SEQ ID NO: 4943 - DNA, 20 bp, synthetic construct
  source 1..20: mol_type = other DNA
cagatcgcttaaggcacgac

SEQ ID NO: 4944 - DNA, 20 bp, synthetic construct
  source 1..20: mol_type = other DNA
agacataggcacgcatcctt

SEQ ID NO: 4945 - DNA, 20 bp, synthetic construct
  source 1..20: mol_type = other DNA
acggagagccacatatcttc

SEQ ID NO: 4946 - DNA, 20 bp, synthetic construct
  source 1..20: mol_type = other DNA
ggattgcggcttgcaccaag

SEQ ID NO: 4947 - DNA, 20 bp, synthetic construct
  source 1..20: mol_type = other DNA
tggcggcaggagtacactct

SEQ ID NO: 4948 - DNA, 20 bp, synthetic construct
  source 1..20: mol_type = other DNA
cggtatcccagaacttcact

SEQ ID NO: 4949 - DNA, 20 bp, synthetic construct
  source 1..20: mol_type = other DNA
gcttgctcttatcgaatgca

SEQ ID NO: 4950 - DNA, 20 bp, synthetic construct
  source 1..20: mol_type = other DNA
tcacgaatggagcgtggaaa

SEQ ID NO: 4951 - DNA, 20 bp, synthetic construct
  source 1..20: mol_type = other DNA
acggtccactcttcatcgct

SEQ ID NO: 4952 - DNA, 20 bp, synthetic construct
  source 1..20: mol_type = other DNA
tgatgcccagaagtatttaa

SEQ ID NO: 4953 - DNA, 20 bp, synthetic construct
  source 1..20: mol_type = other DNA
ctggtcaggaccgagcctgt

SEQ ID NO: 4954 - DNA, 20 bp, synthetic construct
  source 1..20: mol_type = other DNA
tttgactgttgtgaacctta

SEQ ID NO: 4955 - DNA, 20 bp, synthetic construct
  source 1..20: mol_type = other DNA
ggataagggccacatcatcg

SEQ ID NO: 4956 - DNA, 20 bp, synthetic construct
  source 1..20: mol_type = other DNA
cgctgtaggcgggcaacata

SEQ ID NO: 4957 - DNA, 20 bp, synthetic construct
  source 1..20: mol_type = other DNA
cgacccaaatcaagatccaa

SEQ ID NO: 4958 - DNA, 20 bp, synthetic construct
  source 1..20: mol_type = other DNA
tctctttccgtgtgttcgaa

SEQ ID NO: 4959 - DNA, 20 bp, synthetic construct
  source 1..20: mol_type = other DNA
tgcgtttgccgggtcgctca

SEQ ID NO: 4960 - DNA, 20 bp, synthetic construct
  source 1..20: mol_type = other DNA
ggtccctccgtgagttgaca

SEQ ID NO: 4961 - DNA, 20 bp, synthetic construct
  source 1..20: mol_type = other DNA
gatagagcatgaaagacatc

SEQ ID NO: 4962 - DNA, 20 bp, synthetic construct
  source 1..20: mol_type = other DNA
ttcatctgtaacaggcaact

SEQ ID NO: 4963 - DNA, 20 bp, synthetic construct
  source 1..20: mol_type = other DNA
accgtgagtggtaagttggc

SEQ ID NO: 4964 - DNA, 20 bp, synthetic construct
  source 1..20: mol_type = other DNA
gtctaggtcgaacaagatgt

SEQ ID NO: 4965 - DNA, 20 bp, synthetic construct
  source 1..20: mol_type = other DNA
ctgactacagcggcttgcaa

SEQ ID NO: 4966 - DNA, 20 bp, synthetic construct
  source 1..20: mol_type = other DNA
aatacaccatatcgacttgc

SEQ ID NO: 4967 - DNA, 20 bp, synthetic construct
  source 1..20: mol_type = other DNA
tcatgcgttaaatgggtaac

SEQ ID NO: 4968 - DNA, 20 bp, synthetic construct
  source 1..20: mol_type = other DNA
cactaagctcatgcgggtga

SEQ ID NO: 4969 - DNA, 20 bp, synthetic construct
  source 1..20: mol_type = other DNA
cgtaagccttaatcaccggc

SEQ ID NO: 4970 - DNA, 20 bp, synthetic construct
  source 1..20: mol_type = other DNA
cagtacgcgctagcgaccct

SEQ ID NO: 4971 - DNA, 20 bp, synthetic construct
  source 1..20: mol_type = other DNA
taattctatacgctgtcacc

SEQ ID NO: 4972 - DNA, 20 bp, synthetic construct
  source 1..20: mol_type = other DNA
ttctatggctgcatggatta

SEQ ID NO: 4973 - DNA, 20 bp, synthetic construct
  source 1..20: mol_type = other DNA
gtgataaaggagtatggcac

SEQ ID NO: 4974 - DNA, 20 bp, synthetic construct
  source 1..20: mol_type = other DNA
tatcataagctgggtagtcg

SEQ ID NO: 4975 - DNA, 20 bp, synthetic construct
  source 1..20: mol_type = other DNA
gaacatgttgctgtacgagg

SEQ ID NO: 4976 - DNA, 20 bp, synthetic construct
  source 1..20: mol_type = other DNA
aatgctgaagatcaccttca

SEQ ID NO: 4977 - DNA, 20 bp, synthetic construct
  source 1..20: mol_type = other DNA
tgaatagaccggtgccgtgt

SEQ ID NO: 4978 - DNA, 20 bp, synthetic construct
  source 1..20: mol_type = other DNA
tagctagacaacctaatctt

SEQ ID NO: 4979 - DNA, 20 bp, synthetic construct
  source 1..20: mol_type = other DNA
tctcatgtattcgcagccgt

SEQ ID NO: 4980 - DNA, 20 bp, synthetic construct
  source 1..20: mol_type = other DNA
gtttgactctggacatattg

SEQ ID NO: 4981 - DNA, 20 bp, synthetic construct
  source 1..20: mol_type = other DNA
accatcggagagaaagactt

SEQ ID NO: 4982 - DNA, 20 bp, synthetic construct
  source 1..20: mol_type = other DNA
cccggcggcacacttataag

SEQ ID NO: 4983 - DNA, 20 bp, synthetic construct
  source 1..20: mol_type = other DNA
agtagacatcactccacagc

SEQ ID NO: 4984 - DNA, 20 bp, synthetic construct
  source 1..20: mol_type = other DNA
cgttggtaggcgtctccgtg

SEQ ID NO: 4985 - DNA, 20 bp, synthetic construct
  source 1..20: mol_type = other DNA
tgaaacacgtttatttgcct

SEQ ID NO: 4986 - DNA, 20 bp, synthetic construct
  source 1..20: mol_type = other DNA
catgcccgctactttcaacc

SEQ ID NO: 4987 - DNA, 20 bp, synthetic construct
  source 1..20: mol_type = other DNA
ctttgtaccatacggatttg

SEQ ID NO: 4988 - DNA, 20 bp, synthetic construct
  source 1..20: mol_type = other DNA
agttcgtaccctccggtaat

SEQ ID NO: 4989 - DNA, 20 bp, synthetic construct
  source 1..20: mol_type = other DNA
gaggtggatctacgtggttt

SEQ ID NO: 4990 - DNA, 20 bp, synthetic construct
  source 1..20: mol_type = other DNA
agcgacgcacaaccgaaata

SEQ ID NO: 4991 - DNA, 20 bp, synthetic construct
  source 1..20: mol_type = other DNA
ctagagttacaagcggtcag

SEQ ID NO: 4992 - DNA, 20 bp, synthetic construct
  source 1..20: mol_type = other DNA
aaatctcgcattccctgcct

SEQ ID NO: 4993 - DNA, 20 bp, synthetic construct
  source 1..20: mol_type = other DNA
tcgtatctatcatataggct

SEQ ID NO: 4994 - DNA, 20 bp, synthetic construct
  source 1..20: mol_type = other DNA
ggaagcccgttccagttcct

SEQ ID NO: 4995 - DNA, 20 bp, synthetic construct
  source 1..20: mol_type = other DNA
tagcgacggtatagctggag

SEQ ID NO: 4996 - DNA, 20 bp, synthetic construct
  source 1..20: mol_type = other DNA
gctaacagtggccagagacc

SEQ ID NO: 4997 - DNA, 20 bp, synthetic construct
  source 1..20: mol_type = other DNA
ggatagagtgcctatcccgg

SEQ ID NO: 4998 - DNA, 20 bp, synthetic construct
  source 1..20: mol_type = other DNA
gtactatgcacatagcggta

SEQ ID NO: 4999 - DNA, 20 bp, synthetic construct
  source 1..20: mol_type = other DNA
cggtgtgcgcttaggagtcg

SEQ ID NO: 5000 - DNA, 20 bp, synthetic construct
  source 1..20: mol_type = other DNA
ttattcgagcaaacttgcct

SEQ ID NO: 5001 - DNA, 20 bp, synthetic construct
  source 1..20: mol_type = other DNA
ccgcgaaatcgagaaatgcg

SEQ ID NO: 5002 - DNA, 20 bp, synthetic construct
  source 1..20: mol_type = other DNA
tcgaataatgtaaatccgct

SEQ ID NO: 5003 - DNA, 20 bp, synthetic construct
  source 1..20: mol_type = other DNA
tgacgccatcttgtaccaca

SEQ ID NO: 5004 - DNA, 20 bp, synthetic construct
  source 1..20: mol_type = other DNA
ccttgctacgatgcgttata

SEQ ID NO: 5005 - DNA, 20 bp, synthetic construct
  source 1..20: mol_type = other DNA
gaccgttaaggtcccacttt

SEQ ID NO: 5006 - DNA, 20 bp, synthetic construct
  source 1..20: mol_type = other DNA
cgggactctcggctgtcaag

SEQ ID NO: 5007 - DNA, 20 bp, synthetic construct
  source 1..20: mol_type = other DNA
tcaaggcgtgttcgggctac

SEQ ID NO: 5008 - DNA, 20 bp, synthetic construct
  source 1..20: mol_type = other DNA
gcggctacaatatccgtcca

SEQ ID NO: 5009 - DNA, 20 bp, synthetic construct
  source 1..20: mol_type = other DNA
cacagatctacaatgagact

SEQ ID NO: 5010 - DNA, 20 bp, synthetic construct
  source 1..20: mol_type = other DNA
atatctccaccttacgcatt

SEQ ID NO: 5011 - DNA, 20 bp, synthetic construct
  source 1..20: mol_type = other DNA
ttgctcccaacaagaactca

SEQ ID NO: 5012 - DNA, 20 bp, synthetic construct
  source 1..20: mol_type = other DNA
cataattgctgcccaactct

SEQ ID NO: 5013 - DNA, 20 bp, synthetic construct
  source 1..20: mol_type = other DNA
tgtagtaaccgatgaatcgg

SEQ ID NO: 5014 - DNA, 20 bp, synthetic construct
  source 1..20: mol_type = other DNA
cagactaatgacgcttacat

SEQ ID NO: 5015 - DNA, 20 bp, synthetic construct
  source 1..20: mol_type = other DNA
gacgctaaccgtcagcttac

SEQ ID NO: 5016 - DNA, 20 bp, synthetic construct
  source 1..20: mol_type = other DNA
ggtagccgaaatccggcaca

SEQ ID NO: 5017 - DNA, 20 bp, synthetic construct
  source 1..20: mol_type = other DNA
gcgcaatcggcggtcttaga

SEQ ID NO: 5018 - DNA, 20 bp, synthetic construct
  source 1..20: mol_type = other DNA
ggcttatggctttcatccgc

SEQ ID NO: 5019 - DNA, 20 bp, synthetic construct
  source 1..20: mol_type = other DNA
gcgcgtagcatgaagcgcca

SEQ ID NO: 5020 - DNA, 20 bp, synthetic construct
  source 1..20: mol_type = other DNA
ttgtagatcgttctgatgac

SEQ ID NO: 5021 - DNA, 20 bp, synthetic construct
  source 1..20: mol_type = other DNA
gcacgcgtgcatctaccatc

SEQ ID NO: 5022 - DNA, 20 bp, synthetic construct
  source 1..20: mol_type = other DNA
ctcgattcacgcagcttcca

SEQ ID NO: 5023 - DNA, 20 bp, synthetic construct
  source 1..20: mol_type = other DNA
ccatgattgtatcgctgctc

SEQ ID NO: 5024 - DNA, 20 bp, synthetic construct
  source 1..20: mol_type = other DNA
cgtcggtgggatgagtttcc

SEQ ID NO: 5025 - DNA, 20 bp, synthetic construct
  source 1..20: mol_type = other DNA
tagtacagctggactgtgaa

SEQ ID NO: 5026 - DNA, 20 bp, synthetic construct
  source 1..20: mol_type = other DNA
tgtgaaattgtccagcaccc

SEQ ID NO: 5027 - DNA, 20 bp, synthetic construct
  source 1..20: mol_type = other DNA
tcacttagaaactgcgagaa

SEQ ID NO: 5028 - DNA, 20 bp, synthetic construct
  source 1..20: mol_type = other DNA
atctgtccacctctctgggt

SEQ ID NO: 5029 - DNA, 20 bp, synthetic construct
  source 1..20: mol_type = other DNA
cgaatcacggccacacgtga

SEQ ID NO: 5030 - DNA, 20 bp, synthetic construct
  source 1..20: mol_type = other DNA
aacgcatgtaatgtagacga

SEQ ID NO: 5031 - DNA, 20 bp, synthetic construct
  source 1..20: mol_type = other DNA
ttattcaccacgtagtcctt

SEQ ID NO: 5032 - DNA, 20 bp, synthetic construct
  source 1..20: mol_type = other DNA
aggtggaatcacctgccatg

SEQ ID NO: 5033 - DNA, 20 bp, synthetic construct
  source 1..20: mol_type = other DNA
tcaccatatagatgaatcct

SEQ ID NO: 5034 - DNA, 20 bp, synthetic construct
  source 1..20: mol_type = other DNA
atgagctttgttcagggtcg

SEQ ID NO: 5035 - DNA, 20 bp, synthetic construct
  source 1..20: mol_type = other DNA
aaataggtgccgagaaatgg

SEQ ID NO: 5036 - DNA, 20 bp, synthetic construct
  source 1..20: mol_type = other DNA
attatggaccctcggctcaa

SEQ ID NO: 5037 - DNA, 20 bp, synthetic construct
  source 1..20: mol_type = other DNA
tagcattgtcggttgttatt

SEQ ID NO: 5038 - DNA, 20 bp, synthetic construct
  source 1..20: mol_type = other DNA
gagtcaggtgggtagtccca

SEQ ID NO: 5039 - DNA, 20 bp, synthetic construct
  source 1..20: mol_type = other DNA
ctacgcccagtgttgtggtc

SEQ ID NO: 5040 - DNA, 20 bp, synthetic construct
  source 1..20: mol_type = other DNA
aagggagtctcaacctgcac

SEQ ID NO: 5041 - DNA, 20 bp, synthetic construct
  source 1..20: mol_type = other DNA
cctctttggaaacacattcc

SEQ ID NO: 5042 - DNA, 20 bp, synthetic construct
  source 1..20: mol_type = other DNA
aagcgctactaagaaacgac

SEQ ID NO: 5043 - DNA, 20 bp, synthetic construct
  source 1..20: mol_type = other DNA
acttctcagaccaatctgcc

SEQ ID NO: 5044 - DNA, 20 bp, synthetic construct
  source 1..20: mol_type = other DNA
aggttgcgtgcgctacaggt

SEQ ID NO: 5045 - DNA, 20 bp, synthetic construct
  source 1..20: mol_type = other DNA
ctttcgggagctatatttgc

SEQ ID NO: 5046 - DNA, 20 bp, synthetic construct
  source 1..20: mol_type = other DNA
aaagtcactgtttgtagacc

SEQ ID NO: 5047 - DNA, 20 bp, synthetic construct
  source 1..20: mol_type = other DNA
ccaagtgacgagggttccac

SEQ ID NO: 5048 - DNA, 20 bp, synthetic construct
  source 1..20: mol_type = other DNA
agcaaggtttgcgtaatcgt

SEQ ID NO: 5049 - DNA, 20 bp, synthetic construct
  source 1..20: mol_type = other DNA
accgaggcacagatgtgtaa

SEQ ID NO: 5050 - DNA, 20 bp, synthetic construct
  source 1..20: mol_type = other DNA
tatgtctgtgcgtttaatag

SEQ ID NO: 5051 - DNA, 20 bp, synthetic construct
  source 1..20: mol_type = other DNA
aattgtaatcattgcgcccg

SEQ ID NO: 5052 - DNA, 20 bp, synthetic construct
  source 1..20: mol_type = other DNA
gctcttggaaacatcgcact

SEQ ID NO: 5053 - DNA, 20 bp, synthetic construct
  source 1..20: mol_type = other DNA
gatcgacatccagacttatt

SEQ ID NO: 5054 - DNA, 20 bp, synthetic construct
  source 1..20: mol_type = other DNA
cggatattaagctagttgct

SEQ ID NO: 5055 - DNA, 20 bp, synthetic construct
  source 1..20: mol_type = other DNA
tccgatagaaatccctgctc

SEQ ID NO: 5056 - DNA, 20 bp, synthetic construct
  source 1..20: mol_type = other DNA
ccctctatggcggaatgaag

SEQ ID NO: 5057 - DNA, 20 bp, synthetic construct
  source 1..20: mol_type = other DNA
gccgctcgattggtgatgtg

SEQ ID NO: 5058 - DNA, 20 bp, synthetic construct
  source 1..20: mol_type = other DNA
cgacagtaattgcagaagag

SEQ ID NO: 5059 - DNA, 20 bp, synthetic construct
  source 1..20: mol_type = other DNA
ctgggcgtattcagttacat

SEQ ID NO: 5060 - DNA, 20 bp, synthetic construct
  source 1..20: mol_type = other DNA
gcctaaagttctgtccctgc

SEQ ID NO: 5061 - DNA, 20 bp, synthetic construct
  source 1..20: mol_type = other DNA
tcgggcgtttgatccactcc

SEQ ID NO: 5062 - DNA, 20 bp, synthetic construct
  source 1..20: mol_type = other DNA
cgcacgtccgggaatacctt

SEQ ID NO: 5063 - DNA, 20 bp, synthetic construct
  source 1..20: mol_type = other DNA
atggcttgcacatacctggg

SEQ ID NO: 5064 - DNA, 20 bp, synthetic construct
  source 1..20: mol_type = other DNA
ttgaatgagaggcttacgaa

SEQ ID NO: 5065 - DNA, 20 bp, synthetic construct
  source 1..20: mol_type = other DNA
ataaattcgtagtcggataa

SEQ ID NO: 5066 - DNA, 20 bp, synthetic construct
  source 1..20: mol_type = other DNA
gattagtatgagcaagtcgc

SEQ ID NO: 5067 - DNA, 20 bp, synthetic construct
  source 1..20: mol_type = other DNA
ctggcttgtaagtttacaat

SEQ ID NO: 5068 - DNA, 20 bp, synthetic construct
  source 1..20: mol_type = other DNA
tcacagattgaagggactct

SEQ ID NO: 5069 - DNA, 20 bp, synthetic construct
  source 1..20: mol_type = other DNA
cagcgcgaaagcagaagtaa

SEQ ID NO: 5070 - DNA, 20 bp, synthetic construct
  source 1..20: mol_type = other DNA
agtcggatgcaacgagttct

SEQ ID NO: 5071 - DNA, 20 bp, synthetic construct
  source 1..20: mol_type = other DNA
tcggcgacccgcatgataat

SEQ ID NO: 5072 - DNA, 20 bp, synthetic construct
  source 1..20: mol_type = other DNA
ccttccagggtttcgcgttg

SEQ ID NO: 5073 - DNA, 20 bp, synthetic construct
  source 1..20: mol_type = other DNA
gataatagggtatacgtcgg

SEQ ID NO: 5074 - DNA, 20 bp, synthetic construct
  source 1..20: mol_type = other DNA
tgtcggttgagactattcca

SEQ ID NO: 5075 - DNA, 20 bp, synthetic construct
  source 1..20: mol_type = other DNA
aacacacgggctaggaggag

SEQ ID NO: 5076 - DNA, 20 bp, synthetic construct
  source 1..20: mol_type = other DNA
attgtcctaattacacctac

SEQ ID NO: 5077 - DNA, 20 bp, synthetic construct
  source 1..20: mol_type = other DNA
cgaatgccagacaaatttgt

SEQ ID NO: 5078 - DNA, 20 bp, synthetic construct
  source 1..20: mol_type = other DNA
gcatttcatcggtgaggcgg

SEQ ID NO: 5079 - DNA, 20 bp, synthetic construct
  source 1..20: mol_type = other DNA
catatgaccgattgccacca

SEQ ID NO: 5080 - DNA, 20 bp, synthetic construct
  source 1..20: mol_type = other DNA
attggccgtatcattctgct

SEQ ID NO: 5081 - DNA, 20 bp, synthetic construct
  source 1..20: mol_type = other DNA
cagctacaagacggaactaa

SEQ ID NO: 5082 - DNA, 20 bp, synthetic construct
  source 1..20: mol_type = other DNA
gtcaagagggcgcgataaac

SEQ ID NO: 5083 - DNA, 20 bp, synthetic construct
  source 1..20: mol_type = other DNA
aaatagcacgccaagagaat

SEQ ID NO: 5084 - DNA, 20 bp, synthetic construct
  source 1..20: mol_type = other DNA
cgttggaatcccgacagatc

SEQ ID NO: 5085 - DNA, 20 bp, synthetic construct
  source 1..20: mol_type = other DNA
tgcgcctccgtgttaggctg

SEQ ID NO: 5086 - DNA, 20 bp, synthetic construct
  source 1..20: mol_type = other DNA
tcgtagtcattaaagctgag

SEQ ID NO: 5087 - DNA, 20 bp, synthetic construct
  source 1..20: mol_type = other DNA
accatcacgtgaagcaacat

SEQ ID NO: 5088 - DNA, 20 bp, synthetic construct
  source 1..20: mol_type = other DNA
actgctccggtggattgcac

SEQ ID NO: 5089 - DNA, 20 bp, synthetic construct
  source 1..20: mol_type = other DNA
cgaacatagtgaggcctacg

SEQ ID NO: 5090 - DNA, 20 bp, synthetic construct
  source 1..20: mol_type = other DNA
acgttactgcgccaactgtc

SEQ ID NO: 5091 - DNA, 20 bp, synthetic construct
  source 1..20: mol_type = other DNA
gaccataggtacactgcgcc

SEQ ID NO: 5092 - DNA, 20 bp, synthetic construct
  source 1..20: mol_type = other DNA
gtatgctgtacaaccagaga

SEQ ID NO: 5093 - DNA, 20 bp, synthetic construct
  source 1..20: mol_type = other DNA
gctttgggaacttcctaaat

SEQ ID NO: 5094 - DNA, 20 bp, synthetic construct
  source 1..20: mol_type = other DNA
cttatcactctgctacacac

SEQ ID NO: 5095 - DNA, 20 bp, synthetic construct
  source 1..20: mol_type = other DNA
cgtactacggattggtttca

SEQ ID NO: 5096 - DNA, 20 bp, synthetic construct
  source 1..20: mol_type = other DNA
ttctttccactcttgggagg

SEQ ID NO: 5097 - DNA, 20 bp, synthetic construct
  source 1..20: mol_type = other DNA
ccgaaccgagaaacattgct

SEQ ID NO: 5098 - DNA, 20 bp, synthetic construct
  source 1..20: mol_type = other DNA
acaacattcgcacaagatta

SEQ ID NO: 5099 - DNA, 20 bp, synthetic construct
  source 1..20: mol_type = other DNA
ataatagtccctgatggatt

SEQ ID NO: 5100 - DNA, 20 bp, synthetic construct
  source 1..20: mol_type = other DNA
tggcatggagagccggttga

SEQ ID NO: 5101 - DNA, 20 bp, synthetic construct
  source 1..20: mol_type = other DNA
taagtttacaccgctttgtg

SEQ ID NO: 5102 - DNA, 20 bp, synthetic construct
  source 1..20: mol_type = other DNA
gcattgcaaacacctactca

SEQ ID NO: 5103 - DNA, 20 bp, synthetic construct
  source 1..20: mol_type = other DNA
taggatcgaaagataaggcc

SEQ ID NO: 5104 - DNA, 20 bp, synthetic construct
  source 1..20: mol_type = other DNA
agcggtcgctaagtgccttt

SEQ ID NO: 5105 - DNA, 20 bp, synthetic construct
  source 1..20: mol_type = other DNA
ttcgatccaaatggaatact

SEQ ID NO: 5106 - DNA, 20 bp, synthetic construct
  source 1..20: mol_type = other DNA
tctcttctccgcattacgca

SEQ ID NO: 5107 - DNA, 20 bp, synthetic construct
  source 1..20: mol_type = other DNA
cgtcatttaactgccggtgc

SEQ ID NO: 5108 - DNA, 20 bp, synthetic construct
  source 1..20: mol_type = other DNA
tttcgtagctagaaataggc

SEQ ID NO: 5109 - DNA, 20 bp, synthetic construct
  source 1..20: mol_type = other DNA
gaatacgaatgcgcccatcc

SEQ ID NO: 5110 - DNA, 20 bp, synthetic construct
  source 1..20: mol_type = other DNA
ctagagaccatgcagcctcc

SEQ ID NO: 5111 - DNA, 20 bp, synthetic construct
  source 1..20: mol_type = other DNA
ctagacagcggagtaatgcg

SEQ ID NO: 5112 - DNA, 20 bp, synthetic construct
  source 1..20: mol_type = other DNA
gaagttgactaactagatag

SEQ ID NO: 5113 - DNA, 20 bp, synthetic construct
  source 1..20: mol_type = other DNA
gttgaagcattacctaagcg

SEQ ID NO: 5114 - DNA, 20 bp, synthetic construct
  source 1..20: mol_type = other DNA
aggcacacgacatcaacgta

SEQ ID NO: 5115 - DNA, 20 bp, synthetic construct
  source 1..20: mol_type = other DNA
gacagtaggtgggaatagtg

SEQ ID NO: 5116 - DNA, 20 bp, synthetic construct
  source 1..20: mol_type = other DNA
gcgagtgtgtcatgtgtgtg

SEQ ID NO: 5117 - DNA, 20 bp, synthetic construct
  source 1..20: mol_type = other DNA
caatgctacactacggaatg

SEQ ID NO: 5118 - DNA, 20 bp, synthetic construct
  source 1..20: mol_type = other DNA
ccatttattccgtaagaagc

SEQ ID NO: 5119 - DNA, 20 bp, synthetic construct
  source 1..20: mol_type = other DNA
tcggcatataatagtagttg

SEQ ID NO: 5120 - DNA, 20 bp, synthetic construct
  source 1..20: mol_type = other DNA
agctgacgtcgataactcta

SEQ ID NO: 5121 - DNA, 20 bp, synthetic construct
  source 1..20: mol_type = other DNA
gtgcacgaatctatgggaat

SEQ ID NO: 5122 - DNA, 20 bp, synthetic construct
  source 1..20: mol_type = other DNA
taggcacaactgataggaat

SEQ ID NO: 5123 - DNA, 20 bp, synthetic construct
  source 1..20: mol_type = other DNA
tcaaactcagtaccgccgaa

SEQ ID NO: 5124 - DNA, 20 bp, synthetic construct
  source 1..20: mol_type = other DNA
ggaaatagggccgttgcaaa

SEQ ID NO: 5125 - DNA, 20 bp, synthetic construct
  source 1..20: mol_type = other DNA
agatggtttctcatgttgaa

SEQ ID NO: 5126 - DNA, 20 bp, synthetic construct
  source 1..20: mol_type = other DNA
acagtcttacagggtcacag

SEQ ID NO: 5127 - DNA, 20 bp, synthetic construct
  source 1..20: mol_type = other DNA
gtcttgtattatcgtctcgt

SEQ ID NO: 5128 - DNA, 20 bp, synthetic construct
  source 1..20: mol_type = other DNA
gctgcccaaattaattagaa

SEQ ID NO: 5129 - DNA, 20 bp, synthetic construct
  source 1..20: mol_type = other DNA
ccaaagccgcacacagaccg

SEQ ID NO: 5130 - DNA, 20 bp, synthetic construct
  source 1..20: mol_type = other DNA
aagccgagctaccacgactt

SEQ ID NO: 5131 - DNA, 20 bp, synthetic construct
  source 1..20: mol_type = other DNA
tactccatatacttcttgag

SEQ ID NO: 5132 - DNA, 20 bp, synthetic construct
  source 1..20: mol_type = other DNA
ctactcacttatgttcgata

SEQ ID NO: 5133 - DNA, 20 bp, synthetic construct
  source 1..20: mol_type = other DNA
tggtttctagtaaactcacg

SEQ ID NO: 5134 - DNA, 20 bp, synthetic construct
  source 1..20: mol_type = other DNA
ccagactcgtgtcgggtaga

SEQ ID NO: 5135 - DNA, 20 bp, synthetic construct
  source 1..20: mol_type = other DNA
agtgacaacttactgcaggg

SEQ ID NO: 5136 - DNA, 20 bp, synthetic construct
  source 1..20: mol_type = other DNA
aatgctggatagcagtggat

SEQ ID NO: 5137 - DNA, 20 bp, synthetic construct
  source 1..20: mol_type = other DNA
atgcgcattacttacagatc

SEQ ID NO: 5138 - DNA, 20 bp, synthetic construct
  source 1..20: mol_type = other DNA
gaaagatgaacgggcaccag

SEQ ID NO: 5139 - DNA, 20 bp, synthetic construct
  source 1..20: mol_type = other DNA
acgggagcggaccagaatgg

SEQ ID NO: 5140 - DNA, 20 bp, synthetic construct
  source 1..20: mol_type = other DNA
tgtattgtttcaagatgggt

SEQ ID NO: 5141 - DNA, 20 bp, synthetic construct
  source 1..20: mol_type = other DNA
ctcccgagataaccaatcca

SEQ ID NO: 5142 - DNA, 20 bp, synthetic construct
  source 1..20: mol_type = other DNA
aacagtccggtacgattcct

SEQ ID NO: 5143 - DNA, 20 bp, synthetic construct
  source 1..20: mol_type = other DNA
cccgagttcggtaccagttg

SEQ ID NO: 5144 - DNA, 20 bp, synthetic construct
  source 1..20: mol_type = other DNA
ccatgcctcacccgtctacc

SEQ ID NO: 5145 - DNA, 20 bp, synthetic construct
  source 1..20: mol_type = other DNA
ccaagattcaaggatatggt

SEQ ID NO: 5146 - DNA, 20 bp, synthetic construct
  source 1..20: mol_type = other DNA
ttctcgcactatcattacac

SEQ ID NO: 5147 - DNA, 20 bp, synthetic construct
  source 1..20: mol_type = other DNA
agttgccgatcccgtccact

SEQ ID NO: 5148 - DNA, 20 bp, synthetic construct
  source 1..20: mol_type = other DNA
agaatttccgcagggtgagc

SEQ ID NO: 5149 - DNA, 20 bp, synthetic construct
  source 1..20: mol_type = other DNA
ctagacagtgttacggcatc

SEQ ID NO: 5150 - DNA, 20 bp, synthetic construct
  source 1..20: mol_type = other DNA
gtcgcacagtctcttaccga

SEQ ID NO: 5151 - DNA, 20 bp, synthetic construct
  source 1..20: mol_type = other DNA
gcgaggccacaaagactaag

SEQ ID NO: 5152 - DNA, 20 bp, synthetic construct
  source 1..20: mol_type = other DNA
attaagttagcaacaccaga

SEQ ID NO: 5153 - DNA, 20 bp, synthetic construct
  source 1..20: mol_type = other DNA
ggcaatcgcacgtcttcggg

SEQ ID NO: 5154 - DNA, 20 bp, synthetic construct
  source 1..20: mol_type = other DNA
gtcggaacaaccggtggcag

SEQ ID NO: 5155 - DNA, 20 bp, synthetic construct
  source 1..20: mol_type = other DNA
ttggtatcaaggtagctgtc

SEQ ID NO: 5156 - DNA, 20 bp, synthetic construct
  source 1..20: mol_type = other DNA
tctaactcgtttggcacgtc

SEQ ID NO: 5157 - DNA, 20 bp, synthetic construct
  source 1..20: mol_type = other DNA
ggcttgcgcagagatatatg

SEQ ID NO: 5158 - DNA, 20 bp, synthetic construct
  source 1..20: mol_type = other DNA
tcacgagtaaacgaactgga

SEQ ID NO: 5159 - DNA, 20 bp, synthetic construct
  source 1..20: mol_type = other DNA
gcaatcacttgaactaagac

SEQ ID NO: 5160 - DNA, 20 bp, synthetic construct
  source 1..20: mol_type = other DNA
gccggtttagacggaagagc

SEQ ID NO: 5161 - DNA, 20 bp, synthetic construct
  source 1..20: mol_type = other DNA
tccgaattaattagtggtgc

SEQ ID NO: 5162 - DNA, 20 bp, synthetic construct
  source 1..20: mol_type = other DNA
agttgttggcgatcctcgct

SEQ ID NO: 5163 - DNA, 20 bp, synthetic construct
  source 1..20: mol_type = other DNA
gcaagttccaacaagaaacg

SEQ ID NO: 5164 - DNA, 20 bp, synthetic construct
  source 1..20: mol_type = other DNA
gtcttacgtccagtaacggg

SEQ ID NO: 5165 - DNA, 20 bp, synthetic construct
  source 1..20: mol_type = other DNA
acaacggagctgatgtatgt

SEQ ID NO: 5166 - DNA, 20 bp, synthetic construct
  source 1..20: mol_type = other DNA
gcgcgcctagttgttacttt

SEQ ID NO: 5167 - DNA, 20 bp, synthetic construct
  source 1..20: mol_type = other DNA
ctatcccgcacgctacgtac

SEQ ID NO: 5168 - DNA, 20 bp, synthetic construct
  source 1..20: mol_type = other DNA
tggaccatcccgctagcttg

SEQ ID NO: 5169 - DNA, 20 bp, synthetic construct
  source 1..20: mol_type = other DNA
caccaattcgcaagtaagaa

SEQ ID NO: 5170 - DNA, 20 bp, synthetic construct
  source 1..20: mol_type = other DNA
gacaacacatctcgttccga

SEQ ID NO: 5171 - DNA, 20 bp, synthetic construct
  source 1..20: mol_type = other DNA
tagttattcggttgctggaa

SEQ ID NO: 5172 - DNA, 20 bp, synthetic construct
  source 1..20: mol_type = other DNA
agtgtgcgagccatcaaacg

SEQ ID NO: 5173 - DNA, 20 bp, synthetic construct
  source 1..20: mol_type = other DNA
tgacctcaggtagtatagct

SEQ ID NO: 5174 - DNA, 20 bp, synthetic construct
  source 1..20: mol_type = other DNA
agacgtctaggctctccagc

SEQ ID NO: 5175 - DNA, 20 bp, synthetic construct
  source 1..20: mol_type = other DNA
tgcaccatgtaggtgggctt

SEQ ID NO: 5176 - DNA, 20 bp, synthetic construct
  source 1..20: mol_type = other DNA
tacctgcgcccatcttagcc

SEQ ID NO: 5177 - DNA, 20 bp, synthetic construct
  source 1..20: mol_type = other DNA
tggtgtgatttgcagtgtcg

SEQ ID NO: 5178 - DNA, 20 bp, synthetic construct
  source 1..20: mol_type = other DNA
cccgttcggaaagtgtgacc

SEQ ID NO: 5179 - DNA, 20 bp, synthetic construct
  source 1..20: mol_type = other DNA
tcacatcaccacgcctacgt

SEQ ID NO: 5180 - DNA, 20 bp, synthetic construct
  source 1..20: mol_type = other DNA
actttgccgtgtcgttccaa

SEQ ID NO: 5181 - DNA, 20 bp, synthetic construct
  source 1..20: mol_type = other DNA
cgccctgttcgattaggtag

SEQ ID NO: 5182 - DNA, 20 bp, synthetic construct
  source 1..20: mol_type = other DNA
taggtactcatgttgagatg

SEQ ID NO: 5183 - DNA, 20 bp, synthetic construct
  source 1..20: mol_type = other DNA
gttctgcggagcaagactcg

SEQ ID NO: 5184 - DNA, 20 bp, synthetic construct
  source 1..20: mol_type = other DNA
atgtgttgcgtggatgcaca

SEQ ID NO: 5185 - DNA, 20 bp, synthetic construct
  source 1..20: mol_type = other DNA
ctccatgcaacaatacatat

SEQ ID NO: 5186 - DNA, 20 bp, synthetic construct
  source 1..20: mol_type = other DNA
taggtctcgtgtcatgacac

SEQ ID NO: 5187 - DNA, 20 bp, synthetic construct
  source 1..20: mol_type = other DNA
ttgtaagtgtacgatgctat

SEQ ID NO: 5188 - DNA, 20 bp, synthetic construct
  source 1..20: mol_type = other DNA
catcgacgttagatttatcc

SEQ ID NO: 5189 - DNA, 20 bp, synthetic construct
  source 1..20: mol_type = other DNA
agctcaccgtccatcattct

SEQ ID NO: 5190 - DNA, 20 bp, synthetic construct
  source 1..20: mol_type = other DNA
tgagatccgttggtccctag

SEQ ID NO: 5191 - DNA, 20 bp, synthetic construct
  source 1..20: mol_type = other DNA
ctcgtagatttccgctgcgg

SEQ ID NO: 5192 - DNA, 20 bp, synthetic construct
  source 1..20: mol_type = other DNA
cagcagcgccgtggaacaat

SEQ ID NO: 5193 - DNA, 20 bp, synthetic construct
  source 1..20: mol_type = other DNA
tcggtgccttagcgttgttc

SEQ ID NO: 5194 - DNA, 20 bp, synthetic construct
  source 1..20: mol_type = other DNA
tacaccgcattggcgccgaa

SEQ ID NO: 5195 - DNA, 20 bp, synthetic construct
  source 1..20: mol_type = other DNA
gtaacctcacccagacgagt

SEQ ID NO: 5196 - DNA, 20 bp, synthetic construct
  source 1..20: mol_type = other DNA
aagagtttcagtctcagtta

SEQ ID NO: 5197 - DNA, 20 bp, synthetic construct
  source 1..20: mol_type = other DNA
agatatggtcaatgcgggca

SEQ ID NO: 5198 - DNA, 20 bp, synthetic construct
  source 1..20: mol_type = other DNA
ccaacgtggctaacgagtta

SEQ ID NO: 5199 - DNA, 20 bp, synthetic construct
  source 1..20: mol_type = other DNA
tgtgttggaaattctgccat

SEQ ID NO: 5200 - DNA, 20 bp, synthetic construct
  source 1..20: mol_type = other DNA
ccagagtacgatagataacc

SEQ ID NO: 5201 - DNA, 20 bp, synthetic construct
  source 1..20: mol_type = other DNA
cgacgctgtccgaagtgaca

SEQ ID NO: 5202 - DNA, 20 bp, synthetic construct
  source 1..20: mol_type = other DNA
ccctacaacatctaaacctc

SEQ ID NO: 5203 - DNA, 20 bp, synthetic construct
  source 1..20: mol_type = other DNA
atatcaatcgacccatcaga

SEQ ID NO: 5204 - DNA, 20 bp, synthetic construct
  source 1..20: mol_type = other DNA
cttagtacgaatgcatactg

SEQ ID NO: 5205 - DNA, 20 bp, synthetic construct
  source 1..20: mol_type = other DNA
gggcttggattcacgaccaa

SEQ ID NO: 5206 - DNA, 20 bp, synthetic construct
  source 1..20: mol_type = other DNA
ctatgaaataggcgtgctgt

SEQ ID NO: 5207 - DNA, 20 bp, synthetic construct
  source 1..20: mol_type = other DNA
ggtccgcccgttactgagca

SEQ ID NO: 5208 - DNA, 20 bp, synthetic construct
  source 1..20: mol_type = other DNA
gatagacgtgtcttcatgct

SEQ ID NO: 5209 - DNA, 20 bp, synthetic construct
  source 1..20: mol_type = other DNA
catcggaggtacaatcctca

SEQ ID NO: 5210 - DNA, 20 bp, synthetic construct
  source 1..20: mol_type = other DNA
cagtctgacatactttccga

SEQ ID NO: 5211 - DNA, 20 bp, synthetic construct
  source 1..20: mol_type = other DNA
tgactcgtgtagcgggttgg

SEQ ID NO: 5212 - DNA, 20 bp, synthetic construct
  source 1..20: mol_type = other DNA
acagctgttgcacatgctta

SEQ ID NO: 5213 - DNA, 20 bp, synthetic construct
  source 1..20: mol_type = other DNA
cctctccgtctgtaactaag

SEQ ID NO: 5214 - DNA, 20 bp, synthetic construct
  source 1..20: mol_type = other DNA
cacaggagacgcccgctgaa

SEQ ID NO: 5215 - DNA, 20 bp, synthetic construct
  source 1..20: mol_type = other DNA
gtcgtgtgcactgagtacgc

SEQ ID NO: 5216 - DNA, 20 bp, synthetic construct
  source 1..20: mol_type = other DNA
gtcggagctttcccgacaat

SEQ ID NO: 5217 - DNA, 20 bp, synthetic construct
  source 1..20: mol_type = other DNA
gtcgggagagcaccggagaa

SEQ ID NO: 5218 - DNA, 20 bp, synthetic construct
  source 1..20: mol_type = other DNA
accctttcccactccacttg

SEQ ID NO: 5219 - DNA, 20 bp, synthetic construct
  source 1..20: mol_type = other DNA
cacaagtcacaaggttggtg

SEQ ID NO: 5220 - DNA, 20 bp, synthetic construct
  source 1..20: mol_type = other DNA
cctacctcgcctttccatta

SEQ ID NO: 5221 - DNA, 20 bp, synthetic construct
  source 1..20: mol_type = other DNA
aggtttacgtcaagaacaag

SEQ ID NO: 5222 - DNA, 20 bp, synthetic construct
  source 1..20: mol_type = other DNA
aaacgcagagtttggtccat

SEQ ID NO: 5223 - DNA, 20 bp, synthetic construct
  source 1..20: mol_type = other DNA
gtatgagggcccacgagagc

SEQ ID NO: 5224 - DNA, 20 bp, synthetic construct
  source 1..20: mol_type = other DNA
tgggcagaatgtgccgagtc

SEQ ID NO: 5225 - DNA, 20 bp, synthetic construct
  source 1..20: mol_type = other DNA
ctcacgcttccgcgattgac

SEQ ID NO: 5226 - DNA, 20 bp, synthetic construct
  source 1..20: mol_type = other DNA
tccagggctaactttccagg

SEQ ID NO: 5227 - DNA, 20 bp, synthetic construct
  source 1..20: mol_type = other DNA
ctctaagtgggaacctgcga

SEQ ID NO: 5228 - DNA, 20 bp, synthetic construct
  source 1..20: mol_type = other DNA
tctgttaagcccaatgtccg

SEQ ID NO: 5229 - DNA, 20 bp, synthetic construct
  source 1..20: mol_type = other DNA
cttaactcgatatggacttg

SEQ ID NO: 5230 - DNA, 20 bp, synthetic construct
  source 1..20: mol_type = other DNA
taggccggcagaactggtaa

SEQ ID NO: 5231 - DNA, 20 bp, synthetic construct
  source 1..20: mol_type = other DNA
acacatatccgaagccacgc

SEQ ID NO: 5232 - DNA, 20 bp, synthetic construct
  source 1..20: mol_type = other DNA
tattggatctgaacggtggt

SEQ ID NO: 5233 - DNA, 20 bp, synthetic construct
  source 1..20: mol_type = other DNA
tgatcgccgcaacagggtta

SEQ ID NO: 5234 - DNA, 20 bp, synthetic construct
  source 1..20: mol_type = other DNA
ccgacgacggttattccgga

SEQ ID NO: 5235 - DNA, 20 bp, synthetic construct
  source 1..20: mol_type = other DNA
tcgtttcacgaatgccttgt

SEQ ID NO: 5236 - DNA, 20 bp, synthetic construct
  source 1..20: mol_type = other DNA
tcaccatatttcagttgctt

SEQ ID NO: 5237 - DNA, 20 bp, synthetic construct
  source 1..20: mol_type = other DNA
cgcaagaagtagttatcaca

SEQ ID NO: 5238 - DNA, 20 bp, synthetic construct
  source 1..20: mol_type = other DNA
ctactatcacgtgacttatt

SEQ ID NO: 5239 - DNA, 20 bp, synthetic construct
  source 1..20: mol_type = other DNA
tattgtccctgttagcagtt

SEQ ID NO: 5240 - DNA, 20 bp, synthetic construct
  source 1..20: mol_type = other DNA
tggcagaatcgcatattact

SEQ ID NO: 5241 - DNA, 20 bp, synthetic construct
  source 1..20: mol_type = other DNA
gcaagatggtcactagtata

SEQ ID NO: 5242 - DNA, 20 bp, synthetic construct
  source 1..20: mol_type = other DNA
taattaacatcgcgcatgcc

SEQ ID NO: 5243 - DNA, 20 bp, synthetic construct
  source 1..20: mol_type = other DNA
gcaccctagttacatggcgc

SEQ ID NO: 5244 - DNA, 20 bp, synthetic construct
  source 1..20: mol_type = other DNA
tgcaaggacacgggtacacc

SEQ ID NO: 5245 - DNA, 20 bp, synthetic construct
  source 1..20: mol_type = other DNA
catcggccacaccagtcaca

SEQ ID NO: 5246 - DNA, 20 bp, synthetic construct
  source 1..20: mol_type = other DNA
tacctatcacaagatgcctg

SEQ ID NO: 5247 - DNA, 20 bp, synthetic construct
  source 1..20: mol_type = other DNA
cgtgccatctcgtgctgaga

SEQ ID NO: 5248 - DNA, 20 bp, synthetic construct
  source 1..20: mol_type = other DNA
gtgtagcactcacgtggaca

SEQ ID NO: 5249 - DNA, 20 bp, synthetic construct
  source 1..20: mol_type = other DNA
ttgtgcaacggcattgggtt

SEQ ID NO: 5250 - DNA, 20 bp, synthetic construct
  source 1..20: mol_type = other DNA
agccatgttctactgaccat

SEQ ID NO: 5251 - DNA, 20 bp, synthetic construct
  source 1..20: mol_type = other DNA
ctgactcctagctgcttcca

SEQ ID NO: 5252 - DNA, 20 bp, synthetic construct
  source 1..20: mol_type = other DNA
cgtcctaccgagtaccgttg

SEQ ID NO: 5253 - DNA, 20 bp, synthetic construct
  source 1..20: mol_type = other DNA
tgacagatggtagaccggct

SEQ ID NO: 5254 - DNA, 20 bp, synthetic construct
  source 1..20: mol_type = other DNA
aaacgcaatgagccgttgct

SEQ ID NO: 5255 - DNA, 20 bp, synthetic construct
  source 1..20: mol_type = other DNA
tgggaggatgctcgcgctgt

SEQ ID NO: 5256 - DNA, 20 bp, synthetic construct
  source 1..20: mol_type = other DNA
ggtagctacctccctcgtcc

SEQ ID NO: 5257 - DNA, 20 bp, synthetic construct
  source 1..20: mol_type = other DNA
gtagcgccagatatgtagga

SEQ ID NO: 5258 - DNA, 20 bp, synthetic construct
  source 1..20: mol_type = other DNA
cgtattggtatggtaacacg

SEQ ID NO: 5259 - DNA, 20 bp, synthetic construct
  source 1..20: mol_type = other DNA
acttaacagtcgctcgcgac

SEQ ID NO: 5260 - DNA, 20 bp, synthetic construct
  source 1..20: mol_type = other DNA
acatcgggcgtatgtgccca

SEQ ID NO: 5261 - DNA, 20 bp, synthetic construct
  source 1..20: mol_type = other DNA
tttgcttaggaaagagtcgc

SEQ ID NO: 5262 - DNA, 20 bp, synthetic construct
  source 1..20: mol_type = other DNA
atctcgcttaactccctcgc

SEQ ID NO: 5263 - DNA, 20 bp, synthetic construct
  source 1..20: mol_type = other DNA
gctcattacgtcgaaaccag

SEQ ID NO: 5264 - DNA, 20 bp, synthetic construct
  source 1..20: mol_type = other DNA
cagccatatatcataggagg

SEQ ID NO: 5265 - DNA, 20 bp, synthetic construct
  source 1..20: mol_type = other DNA
cttatgcgtgtcgtttagcc

SEQ ID NO: 5266 - DNA, 20 bp, synthetic construct
  source 1..20: mol_type = other DNA
ctacagacccaagtacgagc

SEQ ID NO: 5267 - DNA, 20 bp, synthetic construct
  source 1..20: mol_type = other DNA
catcgtgctaccaatggatg

SEQ ID NO: 5268 - DNA, 20 bp, synthetic construct
  source 1..20: mol_type = other DNA
attgaaggttgggctaccac

SEQ ID NO: 5269 - DNA, 20 bp, synthetic construct
  source 1..20: mol_type = other DNA
atcagaatttaggtctctat

SEQ ID NO: 5270 - DNA, 20 bp, synthetic construct
  source 1..20: mol_type = other DNA
gtgaagcggaaggaacttag

SEQ ID NO: 5271 - DNA, 20 bp, synthetic construct
  source 1..20: mol_type = other DNA
atatagactaaccagcgttc

SEQ ID NO: 5272 - DNA, 20 bp, synthetic construct
  source 1..20: mol_type = other DNA
tgcgtgtttgcaattgccta

SEQ ID NO: 5273 - DNA, 20 bp, synthetic construct
  source 1..20: mol_type = other DNA
cgttggacgctacgagggta

SEQ ID NO: 5274 - DNA, 20 bp, synthetic construct
  source 1..20: mol_type = other DNA
ctaatacctatactgaaccc

SEQ ID NO: 5275 - DNA, 20 bp, synthetic construct
  source 1..20: mol_type = other DNA
aagcatcggttggacatcca

SEQ ID NO: 5276 - DNA, 20 bp, synthetic construct
  source 1..20: mol_type = other DNA
gggtactgcgatgcttacat

SEQ ID NO: 5277 - DNA, 20 bp, synthetic construct
  source 1..20: mol_type = other DNA
ttgcatcgagtgcatatgct

SEQ ID NO: 5278 - DNA, 20 bp, synthetic construct
  source 1..20: mol_type = other DNA
atcttgactacacagctcag

SEQ ID NO: 5279 - DNA, 20 bp, synthetic construct
  source 1..20: mol_type = other DNA
gacgtcctcgatgcgaatga

SEQ ID NO: 5280 - DNA, 20 bp, synthetic construct
  source 1..20: mol_type = other DNA
gttagcgatgtaacgacgca

SEQ ID NO: 5281 - DNA, 20 bp, synthetic construct
  source 1..20: mol_type = other DNA
cctaaacaatgccggtgtta

SEQ ID NO: 5282 - DNA, 20 bp, synthetic construct
  source 1..20: mol_type = other DNA
aatagaccgcactacgtccg

SEQ ID NO: 5283 - DNA, 20 bp, synthetic construct
  source 1..20: mol_type = other DNA
gtacttcagggaacgccgga

SEQ ID NO: 5284 - DNA, 20 bp, synthetic construct
  source 1..20: mol_type = other DNA
atagctcgaccaccgtatta

SEQ ID NO: 5285 - DNA, 20 bp, synthetic construct
  source 1..20: mol_type = other DNA
gtaccacaccagaagagaca

SEQ ID NO: 5286 - DNA, 20 bp, synthetic construct
  source 1..20: mol_type = other DNA
gttccatccaagtccgagag

SEQ ID NO: 5287 - DNA, 20 bp, synthetic construct
  source 1..20: mol_type = other DNA
accgtaactgcgaggagccc

SEQ ID NO: 5288 - DNA, 20 bp, synthetic construct
  source 1..20: mol_type = other DNA
ataccaggcgttacccttcg

SEQ ID NO: 5289 - DNA, 20 bp, synthetic construct
  source 1..20: mol_type = other DNA
caaggcgatttagaaaggtc

SEQ ID NO: 5290 - DNA, 20 bp, synthetic construct
  source 1..20: mol_type = other DNA
gggctgcaatctcgatgaat

SEQ ID NO: 5291 - DNA, 20 bp, synthetic construct
  source 1..20: mol_type = other DNA
ttctccatgggagcctcaac

SEQ ID NO: 5292 - DNA, 20 bp, synthetic construct
  source 1..20: mol_type = other DNA
tgtctatactccgagatcca

SEQ ID NO: 5293 - DNA, 20 bp, synthetic construct
  source 1..20: mol_type = other DNA
gtcaacaattgaagcctcca

SEQ ID NO: 5294 - DNA, 20 bp, synthetic construct
  source 1..20: mol_type = other DNA
tgcccgacatggtcaaatat

SEQ ID NO: 5295 - DNA, 20 bp, synthetic construct
  source 1..20: mol_type = other DNA
aggcacgtatcgcggctagt

SEQ ID NO: 5296 - DNA, 20 bp, synthetic construct
  source 1..20: mol_type = other DNA
cggatgcagatgggcctcag

SEQ ID NO: 5297 - DNA, 20 bp, synthetic construct
  source 1..20: mol_type = other DNA
tagacacgacgattcagtaa

SEQ ID NO: 5298 - DNA, 20 bp, synthetic construct
  source 1..20: mol_type = other DNA
aatgactttggatctcaggt

SEQ ID NO: 5299 - DNA, 20 bp, synthetic construct
  source 1..20: mol_type = other DNA
tactaccaagccggtaatac

SEQ ID NO: 5300 - DNA, 20 bp, synthetic construct
  source 1..20: mol_type = other DNA
tatctcgttaatcgggtgat

SEQ ID NO: 5301 - DNA, 20 bp, synthetic construct
  source 1..20: mol_type = other DNA
agctctggtatacgtcgttt

SEQ ID NO: 5302 - DNA, 20 bp, synthetic construct
  source 1..20: mol_type = other DNA
aattggcagaggctgtaatg

SEQ ID NO: 5303 - DNA, 20 bp, synthetic construct
  source 1..20: mol_type = other DNA
ttcccgtgtaggactgtgca

(The sequence listing continues in the following parts.)
